(19) United States
(12) Patent Application Publication
(10) Pub. No.: US 2024/0117440 A1
(43) Pub. Date: Apr. 11, 2024

(54) PANELS AND METHODS FOR TREATMENT OF DIFFUSE LARGE B-CELL LYMPHOMA

(71) Applicants: The Broad Institute, Inc., Cambridge, MA (US); Dana-Farber Cancer Institute, Inc., Boston, MA (US); The General Hospital Corporation, Boston, MA (US)

(72) Inventors: Bjoern CHAPUY, Boston, MA (US); Donald STEWART, Cambridge, MA (US); Tim WOOD, Cambridge, MA (US); Margaret SHIPP, Boston, MA (US); Gad GETZ, Boston, MA (US); Mark MURAKAMI, Boston, MA (US); Lee LAWTON, Boston, MA (US); Andrew DUNFORD, Cambridge, MA (US); Kirsty WIENAND, Boston, MA (US)

(73) Assignees: The Broad Institute, Inc., Cambridge, MA (US); Dana-Farber Cancer Institute, Inc., Boston, MA (US); The General Hospital Corporation, Boston, MA (US)

(21) Appl. No.: 18/468,384

(22) Filed: Sep. 15, 2023

Related U.S. Application Data
(63) Continuation of application No. PCT/US2022/020762, filed on Mar. 17, 2022.
(60) Provisional application No. 63/163,006, filed on Mar. 18, 2021.

(51) Int. Cl. C12Q 1/6886; C12Q 1/6869; G16B 20/20; G16B 40/20

(52) U.S. Cl. CPC C12Q 1/6886; C12Q 1/6869; G16B 20/20; G16B 40/20; C12Q 2600/106; C12Q 2600/112; C12Q 2600/156

(57) ABSTRACT

The invention provides a molecular classifier and a targeted sequencing assay for use in characterization and treatment of diffuse large B-cell lymphoma.

### CROSS-REFERENCE TO RELATED APPLICATIONS

[0001] This application is a continuation under 35 U.S.C. § 111(a) of PCT International Patent Application No. PCT/US2022/020762, filed Mar. 17, 2022, designating the United States and published in English, which claims priority to and the benefit of U.S. Provisional Application No. 63/163,006, filed Mar. 18, 2021, the entire contents of each of which are incorporated by reference herein.

### SEQUENCE LISTING

[0002] The present application contains a Sequence Listing which has been submitted electronically in XML format following conversion from the originally filed TXT format.

[0003] The content of the electronic XML Sequence Listing, (Date of creation: Sep. 14, 2023; Size: 13,992,026 bytes; Name: 167741-035002US-Sequence_Listing.xml), is herein incorporated by reference in its entirety.

### BACKGROUND OF THE INVENTION

[0004] Diffuse large B-cell lymphoma (DLBCL) is the most common lymphoid malignancy in adults. Over 35% of patients with DLBCL cannot be effectively treated using standard induction therapy. There remains a need for better approaches to treatment. Currently, novel targeted agents are tested in unselected patients or those defined solely by clinical prognostic categories, such as the International Prognostic Index (IPI), or tumor transcriptional subgroups, GCB vs ABC. This approach has led to negative phase III trials of multiple targeted agents and uncertain prospects for others. Outcomes for patients with DLBCL have not substantially improved in the last 20 years. Further, current diffuse large B-cell lymphoma (DLBCL) treatment strategies do not reflect the genomic complexity of the disease.

[0005] Thus, there remains a need for better methods for treatment of diffuse large B-cell lymphoma.

### SUMMARY OF THE INVENTION

[0006] As described below, the present invention features a molecular classifier and a targeted sequencing assay for use in characterization and treatment of diffuse large B-cell lymphoma.

[0007] In one aspect, the invention of the disclosure features a method for characterizing a diffuse large B-cell lymphoma (DLBCL) in a subject. The method involves (a) characterizing variants in a biological sample from the subject. The variants are selected from one or more of 10q23.31, 11p, 11q, 11q23.3, 12p, 12p13.2, 12q, 13q, 13q14.2, 13q31.3, 13q34, 14q32.31, 15q15.3, 16q12.1, 17p, 17q24.3, 17q25.1, 18p, 18q, 18q21.32, 18q22.2, 18q23, 19p13.2, 19p13.3, 19q, 19q13.32.1, 19q13.42, 1p13.1, 1p31.1, 1p36.11, 1p36.32, 1q, 1932.1, 1942.12, 21q, 2p16.1, 2q22.2, 3p, 3p21.31, 3q28, 4q21.22, 5p, 6p, 6p21.1, 6p21.33, 6q14.1, 6q21, 7p, 7q, 7q22.1, 8q12.1, 8q24.22, 9p21.3, 9p24.1, ACTB, ARID1A, ATP2A2, B2M, BCL10, BCL2, BCL6, BCL7A, BRAF, BTG1, BTG2, CARD11, CCDC27, CD274, CD58, CD70, CD79B^{mut}, CD83, CREBBP, CRIP1, CXCR4, DTX1, DUSP2, EBF1, EEF1A1, EP300, ETV6, EZH2, FADD, FAS, GNA13, GNAI2, GRHPR, HIST1H1B, HIST1H1C, HIST1H1D, HIST1H1E, HIST1H2AC, HIST1H2AM, HIST1H2BC, HIST1H2BD, HLA-A, HLA-B, HLA-C, HVCN1, IGLL5, IKZF3, IRF2BP2, IRF8, KLHL6, KMT2D, KRAS, LTB, LYN, MAP2K1, MEF2B, MEF2C, MYC, MYD88, MYD88L^{265P}, MYD88^{OTHER}, NFKBIA, NFKBIE, NOTCH2, OSBPL10, PABPC1, PDE4DIP, PIM1, POU2AF1, POU2F2, PRDM1, PTEN, PTPN6, RAC2, RHOA, SESN3, SF3B1, SGK1, SMG7, SOCS1, SPEN, STAT3, TBL1XR1, TET2, TMEM30A, TMSB4X, TNFAIP3, TNFRSF14, TNIP1, TOX, TP53, TUBGCP5, UBE2A, VMP1, YY1, ZC3H12A, ZEB2, ZFP36L1, ZNF423, and ZNF608. The variants are characterized by using a targeted sequencing panel to characterize classes of the variants in the sample based upon the characterization of alterations in the variants. The alterations are selected from the group one or more of a mutation, a structural variant (SV), and a somatic copy number alteration (SCNA). The method involves (b) assigning a classification-specific weighted value to each class of variant characterized. Each classification-specific weighted value reflects the magnitude of the characterized alteration in each class of variant. The method also involves (c) condensing the variant classification-specific weighted values into two or more metafeatures. The method further involves (d) using the metafeatures as input variables for a computational analysis to assign the DLBCL to one of DLBCL subclasses C1 to C5, thereby characterizing the DLBCL.

[0008] In another aspect, the invention of the disclosure features a method for selecting a treatment for a subject having a diffuse large B-cell lymphoma (DLBCL). The method involves (a) characterizing variants in a biological sample from the subject. The variants are selected from one or more of 10q23.31, 11p, 11q, 11q23.3, 12p, 12p13.2, 12q, 13q, 13q14.2, 13q31.3, 13q34, 14q32.31, 15q15.3, 16q12.1, 17p, 17q24.3, 17q25.1, 18p, 18q, 18q21.32, 18q22.2, 18q23, 19p13.2, 19p13.3, 19q, 19q13.32.1, 19q13.42, 1p13.1, 1p31.1, 1p36.11, 1p36.32, 1q, 1q32.1, 1q42.12, 21q, 2p16.1, 2q22.2, 3p, 3p21.31, 3q28, 4q21.22, 5p, 6p, 6p21.1, 6p21.33, 6q14.1, 6q21, 7p, 7q, 7q22.1, 8q12.1, 8q24.22, 9p21.3, 9p24.1, ACTB, ARID1A, ATP2A2, B2M, BCL10, BCL2, BCL6, BCL7A, BRAF, BTG1, BTG2, CARD11, CCDC27, CD274, CD58, CD70, CD79B^{mut}, CD83, CREBBP, CRIP1, CXCR4, DTX1, DUSP2, EBF1, EEF1A1, EP300, ETV6, EZH2, FADD, FAS, GNA13, GNAI2, GRHPR, HIST1H1B, HIST1H1C, HIST1H1D, HIST1H1E, HIST1H2AC, HIST1H2AM, HIST1H2BC, HIST1H2BD, HLA-A, HLA-B, HLA-C, HVCN1, IGLL5, IKZF3, IRF2BP2, IRF8, KLHL6, KMT2D, KRAS, LTB, LYN, MAP2K1, MEF2B, MEF2C, MYC, MYD88, MYD88^{L265P}, MYD88^{OTHER}, NFKBIA, NFKBIE, NOTCH2, OSBPL10, PABPC1, PDE4DIP, PIM1, POU2AF1, POU2F2, PRDM1, PTEN, PTPN6, RAC2, RHOA, SESN3, SF3B1, SGK1, SMG7, SOCS1, SPEN, STAT3, TBL1XR1, TET2, TMEM30A, TMSB4X, TNFAIP3, TNFRSF14, TNIP1, TOX, TP53, TUBGCP5, UBE2A, VMP1, YY1, ZC3H12A, ZEB2, ZFP36L1, ZNF423, and ZNF608. The variants are characterized by characterizing classes of the variants in the sample based upon the characterization of alterations in the variants. The alterations are selected from one or more of a mutation, a structural variant (SV), and a somatic copy number alteration (SCNA). The method involves (b) assigning a classification-specific weighted value to each class of variant characterized, where each classification-specific weighted value reflects the magnitude of the characterized alteration in each class of variant. The method involves (c) condensing the variant classification-specific weighted values into two or more metafeatures. The method also involves (d) assigning the DLBCL as belonging to one of DLBCL subclasses C1 to C5 using a computational analysis. The metafeatures are used as input variables for the computational analysis. The method further involves (e), which involves (i), (ii), or (iii), thereby selecting a treatment for the subject having a DLBCL. For (i), if the DLBCL is assigned to class C1 or C5, administering to the subject a treatment containing an agent selected from one or more of a NOTCH inhibitor, a BCL6 inhibitor and an activator of immune evasion, optionally an oligonucleotide inhibitor of NOTCH and/or BCL6, for administration to the subject, or an agent selected from one or more of a BCR/TLR signaling inhibitor and a BCL2 inhibitor, optionally oblimersen, ABT-263, Venetoclax (ABT-199), an antibody or oligonucleotide inhibitor of BCR/TLR signaling and/or an oligonucleotide inhibitor of BCL2. For (ii), if the DLBCL is assigned to DLBCL subclass C3 or C4 class, administering to the subject either a treatment containing an agent selected from one or more of a BCL2 inhibitor, a PI3K inhibitor and an epigenetic modifier, optionally oblimersen, ABT-263, Venetoclax (ABT-199), wortmannin, LY294002, an E2H2 inhibitor (optionally 3-deazaneplanocin A (DZNep), EPZ005687, EI1, GSK126, and/or UNC1999), a CREBBP inhibitor, an oligonucleotide inhibitor of BCL2, an oligonucleotide inhibitor of PI3K and/or an oligonucleotide inhibitor of an epigenetic modifier; or an agent selected from one or more of a JAK/STAT inhibitor and a BRAF/MEK1 inhibitor, optionally ruxolitinib, Vemurafenib, Cobimetinib, an oligonucleotide inhibitor of JAK/STAT and/or an oligonucleotide inhibitor of BRAF/MEK1. For (iii), if the DLBCL is assigned to DLBCL subclass C2, selecting a treatment containing a CDK inhibitor.

[0009] In another aspect, the invention of the disclosure features a targeted sequencing panel. The targeted sequencing panel contains oligonucleotides suitable for use in targeted sequencing to characterize two or more classes of variants in a biological sample based upon the characterization of alterations in the variants. The alterations are selected from one or more of a mutation, a structural variant (SV), and a somatic copy number alteration (SCNA). The variants are selected from one or more of 10q23.31, 11p, 11q, 11q23.3, 12p, 12p13.2, 12q, 13q, 13q14.2, 13q31.3, 13q34, 14q32.31, 15q15.3, 16q12.1, 17p, 17q24.3, 17q25.1, 18p, 18q, 18q21.32, 18q22.2, 18q23, 19p13.2, 19p13.3, 19q, 19q13.32.1, 19q13.42, 1p13.1, 1p31.1, 1p36.11, 1p36.32, 1q, 1q32.1, 1q42.12, 21q, 2p16.1, 2q22.2, 3p, 3p21.31, 3q28, 4q21.22, 5p, 6p, 6p21.1, 6p21.33, 6q14.1, 6q21, 7p, 7q, 7q22.1, 8q12.1, 8q24.22, 9p21.3, 9p24.1, ACTB, ARID1A, ATP2A2, B2M, BCL10, BCL2, BCL6, BCL7A, BRAF, BTG1, BTG2, CARD11, CCDC27, CD274, CD58, CD70, CD79B1^{mut}, CD83, CREBBP, CRIP1, CXCR4, DTX1, DUSP2, EBF1, EEF1A1, EP300, ETV6, EZH2, FADD, FAS, GNA13, GNAI2, GRHPR, HIST1H1B, HIST1H1C, HIST1H1D, HIST1H1E, HIST1H2AC, HIST1H2AM, HIST1H2BC, HIST1H2BD, HLA-A, HLA-B, HLA-C, HVCN1, IGLL5, IKZF3, IRF2BP2, IRF8, KLHL6, KMT2D, KRAS, LTB, LYN, MAP2K1, MEF2B, MEF2C, MYC, MYD88, MYD88^{L265P}, MYD88^{OTHER}, NFKBIA, NFKBIE, NOTCH2, OSBPL10, PABPC1, PDE4DIP, PIM1, POU2AF1, POU2F2, PRDM1, PTEN, PTPN6, RAC2, RHOA, SESN3, SF3B1, SGK1, SMG7, SOCS1, SPEN, STAT3, TBL1XR1, TET2, TMEM30A, TMSB4X, TNFAIP3, TNFRSF14, TNIP1, TOX, TP53, TUBGCP5, UBE2A, VMP1, YY1, ZC3H12A, ZEB2, ZFP36L1, ZNF423, and ZNF608.

[0010] In another aspect, the invention of the disclosure features a method involving instructing, by at least one processor, at least one computing device to render at least one diffuse large B-cell lymphoma (DLBCL) classification interface. The at least one DLBCL classification interface contains at least one gene sample matrix (GSM) array input element configured to accept at least one GSM array input file storing at least one GSM array associated with at least one patient. The method also involves receiving, by the at least one processor, via the at least one GSM array input element the at least one GSM array input file. The at least one GSM array input file represents at least one GSM array that characterizes classes of variants in the at least one sample of oligonucleotides. The classes of variants are characterized using a targeted sequencing panel containing the oligonucleotides suitable for use in targeted sequencing of the variant classes. The method also involves generating, by the at least one processor, at least one metafeature based at least in part on a weighted sum of the classes of the variants in the at least one GSM array. The method further involves utilizing, by the at least one processor, at least one DLBCL classification machine learning model to generate at least one cluster identification categorizing the at least one patient based at least in part on the at least one metafeature and at least one trained classification layer. The at least one cluster identification characterizes DLBCL burden on a subject associated with the at least one patient. The method also involves instructing, by the at least one processor, the at least one computing device to render at least one DLBCL classification results element in the at least one DLBCL classification interface. The at least one DLBCL classification results element depicts a representation of the at least one cluster identification categorizing the at least one patient.

[0011] In another aspect, the invention of the disclosure features a system. The system contains at least one processor configured to execute software instructions which, upon execution, cause the at least one processor to perform steps to: instruct at least one computing device to render at least one diffuse large B-cell lymphoma (DLBCL) classification interface, the at least one DLBCL classification interface containing at least one gene sample matrix (GSM) array input element configured to accept at least one GSM array input file storing at least one GSM array associated with at least one patient; receive via the at least one GSM array input element the at least one GSM array input file, where the at least one GSM array input file represents at least one GSM array that characterizes classes of variants in the at least one sample of oligonucleotides, where the classes of variants are characterized using a targeted sequencing panel containing the oligonucleotides suitable for use in targeted sequencing of the variant classes; generate at least one metafeature based at least in part on a weighted sum of the classes of the variants in the at least one GSM array; utilize at least one DLBCL classification machine learning model to generate at least one cluster identification categorizing the at least one patient based at least in part on the at least one metafeature and at least one trained classification layer, where the at least one cluster identification characterizes DLBCL burden on a subject associated with the at least one patient; and instruct the at least one computing device to render at least one DLBCL classification results element in the at least one DLBCL classification interface, where the at least one DLBCL classification results element depicts a representation of the at least one cluster identification categorizing the at least one patient.

[0012] In any of the above aspects, or embodiments thereof, the method further involves characterizing the DLBCL as high-risk if the DLBCL is assigned to subclass C5 or C3. In any of the above aspects, or embodiments thereof, the agent contains one or more of rituximab, cyclophosphamide adriamycin, vincristine, prednisone, doxorubicin hydrochloride, and vincristine sulfate. In any of the above aspects, or embodiments thereof, the agent contains one or more of rituximab, cyclophosphamide, doxorubicin hydrochloride, vincristine sulfate, and prednisone (R-CHOP).

[0013] In any of the above aspects, or embodiments thereof, less than 25 metafeatures are used as the input variables. In any of the above aspects, or embodiments thereof, 21 metafeatures or less are used as the input variables. In any of the above aspects, or embodiments thereof, 21 metafeatures are used as the input variables. In any of the above aspects, or embodiments thereof, the metafeatures are selected from one or more of M1, M2, M3, M4, M5, M6, M7, M8, M9, M10, M11, M12, M13, M14, M15, M16, M17, M18, M19, M20, and M21. In any of the above aspects, or embodiments thereof, at least one class of variant corresponding to each metafeature is characterized. In any of the above aspects, or embodiments thereof, all the classes of variants listed in Table 3 are characterized.

[0014] In any of the above aspects, or embodiments thereof, condensing the variant classification-specific weighted values involves summing the values corresponding to each metafeature. In embodiments, the weighted values are proportional to degree of variation from a reference sequence. In any of the above aspects, or embodiments thereof, in step (a), characterization involves (i) determining for the mutation classes of variants whether there is a mutation and, if there is a mutation, whether the mutation is a silent mutation or a non-synonymous mutation; (ii) determining for the SCNA mutation class of variants whether there is an SCNA and, if there is an SCNA, whether the SCNA is a low level copy number alteration or a high level copy number alteration; and/or (iii) determining for the SV mutation class of variants whether or not an SV is present.

[0015] In any of the above aspects, or embodiments thereof, the variant-specific weighted values are condensed into metafeatures as indicated in Table 3.

[0016] In any of the above aspects, or embodiments thereof, the computational method is an artificial neural network classification method, a random forest classification method, or a naïve Bayes classification method. In any of the above aspects, or embodiments thereof, the computational method is an artificial neural network classification method.

[0017] In any of the above aspects, or embodiments thereof, the biological sample contains cell free DNA. In any of the above aspects, or embodiments thereof, the method involves characterizing the variants in the cell free DNA. In any of the above aspects, or embodiments thereof, the biological sample contains a bodily fluid and/or a tissue sample. In embodiments, the bodily fluid contains ascites, blood, plasma, pleural fluid, serum, cerebrospinal fluid, phlegm, saliva, stool, urine, semen, prostate fluid, breast milk, and tears. In embodiments, the tissue sample is a biopsy. In embodiments, the biopsy contains a primary tumor sample.

[0018] In any of the above aspects, or embodiments thereof, subject is a human.

[0019] In any of the above aspects, or embodiments thereof, the classes of variants belong to two or more of metafeatures selected from one or more of M1, M2, M3, M4, M5, M6, M7, M8, M9, M10, M11, M12, M13, M14, M15, M16, M17, M18, M19, M20, and M21. In any of the above aspects, or embodiments thereof, the oligonucleotides are suitable for use in targeted sequencing to characterize at least one variant class corresponding to each of M1, M2, M3, M4, M5, M6, M7, M8, M9, M10, M11, M12, M13, M14, M15, M16, M17, M18, M19, M20, and M21.

[0020] In any of the above aspects, or embodiments thereof, the oligonucleotides are suitable for use in targeted sequencing to characterize all of the variant classes listed in Table 3.

[0021] In any of the above aspects, or embodiments thereof, the sequencing panel contains oligonucleotide sequences suitable for use in targeted sequencing to measure microsatellite instability, tumor mutational burden, and/or to detect Epstein Barr virus.

[0022] In any of the above aspects, or embodiments thereof, the targeted sequencing panel contains polynucleotides sharing at least 85% sequence identity over a span of at least 80 nucleotides to at least one sequence listed in SEQ ID NOs: 1-9244 targeting the classes of variants. In any of the above aspects, or embodiments thereof, the targeted sequencing panel collectively contains polynucleotides sharing at least 85% sequence identity over a span of at least 80 nucleotides each sequence of SEQ ID NOs: 1-9244 targeting the classes of variants. In any of the above aspects, or embodiments thereof, the targeted sequencing panel contains polynucleotides sharing at least 85% sequence identity over a span of at least 80 nucleotides to at least one sequence listed in Table 2. In any of the above aspects, or embodiments thereof, the targeted sequencing panel contains polynucleotides sharing at least 85% sequence identity over a span of at least 80 nucleotides to all of the sequences listed in Table 2. In any of the above aspects, or embodiments thereof, the targeted sequencing panel contains polynucleotides sharing at least 85% sequence identity over a span of at least 80 nucleotides to at least one sequence of SEQ ID NOs: 1-9244 targeting microsatellite instability. In any of the above aspects, or embodiments thereof, the targeted sequencing panel contains polynucleotides sharing at least 85% sequence identity over a span of at least 80 nucleotides to all sequences of SEQ ID NOs: 1-9244 targeting microsatellite instability. In any of the above aspects, or embodiments thereof, the targeted sequencing panel contains polynucleotides complementary to at least about 80% of chromosomal regions collectively targeted by sequences of SEQ ID NOs: 1-9244 corresponding to the classes of variants.

[0023] In any of the above aspects, or embodiments thereof, the method further involves receiving, by the at least one processor, at least one DLBCL classification request from the at least one computing device associated with the at least one patient, where the at least one DLBCL classification request involves at least one electronic request over a network; and generating, by the at least one processor, at least one rendering instruction in response to the at least one DLBCL classification request, where the at least one rendering instruction is configured to instruct the at least one computing device to render the at least one DLBCL classification interface.

[0024] In any of the above aspects, or embodiments thereof, the at least one trained classification layer contains an artificial neural network having learned weights for each of a plurality of neural network nodes.

[0025] In any of the above aspects, or embodiments thereof, the method further involves: utilizing, by the at least one processor, at least one dimensionality reduction model to create a two-dimensional representation of the at least one metafeature; and generating, by the at least one processor, the at least one DLBCL classification results element containing a two-dimensional visualization of the two-dimensional representation of the at least one metafeature, where the two-dimensional visualization contains at least one labelled data point representing the at least one metafeature and the at least one cluster identification associated with the at least one metafeature.

[0026] In any of the above aspects, or embodiments thereof, the at least one dimensionality reduction model involves uniform manifold approximation and projection (UMAP). In any of the above aspects, or embodiments thereof, the at least one DLBCL classification results element contains a listing of the at least one metafeature and the at least one cluster identification associated with the at least one metafeature.

[0027] In any of the above aspects, or embodiments thereof, the at least one trained classification layer is configured to produce at least one confidence score associated with the at least one cluster identification for the at least one metafeature; where the listing contains the at least one confidence score associated with the at least one cluster identification for the at least one metafeature.

[0028] In any of the above aspects, or embodiments thereof, the at least one DLBCL classification results element contains a heatmap depicting: i) at least one gene mutation associated with the at least one metafeature, and ii) the at least one cluster identification associated with the at least one metafeature.

[0029] In any of the above aspects, or embodiments thereof, the method further involves: generating, by the at least one processor, at least one treatment selection based at least in part on the at least one cluster identification; where the at least one DLBCL classification results element represents that at least one treatment selection.

[0030] In any of the above aspects, or embodiments thereof, the at least one processor is remote from the at least one computing device. In any of the above aspects, or embodiments thereof, the at least one processor is further configured to execute software instructions which, upon execution, further cause the at least one processor to perform steps to: receive at least one DLBCL classification request from the at least one computing device associated with the at least one patient, where the at least one DLBCL classification request involves at least one electronic request over a network; and generate at least one rendering instruction in response to the at least one DLBCL classification request, where the at least one rendering instruction is configured to instruct the at least one computing device to render the at least one DLBCL classification interface.

[0031] In any of the above aspects, or embodiments thereof, the at least one trained classification layer contains an artificial neural network having learned weights for each of a plurality of neural network nodes.

[0032] In any of the above aspects, or embodiments thereof, the at least one processor is further configured to execute software instructions which, upon execution, further cause the at least one processor to perform steps to: utilize at least one dimensionality reduction model to create a two-dimensional representation of the at least one metafeature; and generate the at least one DLBCL classification results element containing a two-dimensional visualization of the two-dimensional representation of the at least one metafeature, where the two-dimensional visualization contains at least one labelled data point representing the at least one metafeature and the at least one cluster identification associated with the at least one metafeature.

[0033] In any of the above aspects, or embodiments thereof, the at least one dimensionality reduction model contains uniform manifold approximation and projection (UMAP).

[0034] In any of the above aspects, or embodiments thereof, the at least one DLBCL classification results element contains a listing of the at least one metafeature and the at least one cluster identification associated with the at least one metafeature.

[0035] In any of the above aspects, or embodiments thereof, the at least one trained classification layer is configured to produce at least one confidence score associated with the at least one cluster identification for the at least one metafeature; where the listing contains the at least one confidence score associated with the at least one cluster identification for the at least one metafeature.

[0036] In any of the above aspects, or embodiments thereof, the at least one DLBCL classification results element contains a heatmap depicting: i) at least one gene mutation associated with the at least one metafeature, and ii) the at least one cluster identification associated with the at least one metafeature.

[0037] In any of the above aspects, or embodiments thereof, the at least one processor is further configured to execute software instructions which, upon execution, further cause the at least one processor to perform steps to: generate at least one treatment selection based at least in part on the at least one cluster identification; where the at least one DLBCL classification results element represents that at least one treatment selection.

[0038] In any of the above aspects, or embodiments thereof, the at least one processor is remote from the at least one computing device.

[0039] The invention provides a molecular classifier and a targeted sequencing assay for use in characterization and treatment of diffuse large B-cell lymphoma. Compositions and articles defined by the invention were isolated or otherwise manufactured in connection with the examples provided below. Other features and advantages of the invention will be apparent from the detailed description, and from the claims.

### Definitions

[0040] Unless defined otherwise, all technical and scientific terms used herein have the meaning commonly understood by a person skilled in the art to which this invention belongs. The following references provide one of skill with a general definition of many of the terms used in this invention: Singleton et al., Dictionary of Microbiology and Molecular Biology (2nd ed. 1994); The Cambridge Dictionary of Science and Technology (Walker ed., 1988); The Glossary of Genetics, 5th Ed., R. Rieger et al. (eds.), Springer Verlag (1991); and Hale & Marham, The Harper Collins Dictionary of Biology (1991). As used herein, the following terms have the meanings ascribed to them below, unless specified otherwise.

[0041] By “variant” is meant a genomic locus associated with an alteration associated with diffuse large B-cell lymphoma. The alteration can be a mutation, a somatic copy number alteration (SCNA), or a somatic variant (SV; including translocations). The alteration can be a focal alteration or an arm variation. The somatic copy number alteration (SCNA) can be a copy number gain or a copy number loss. A focal alteration is an alteration affecting a small region of a chromosome; for example, the small region can be about or less than about 100 bp, 200 bp, 300 bp, 400 bp, 500 bp, 1 kbp, 5 kbp, 10 kbp, 25 kbp, 50 kbp, 100 kbp, 250 kbp, 500 kbp, or 1 Mbp in size. An arm alteration is an alteration affecting a large region of a chromosome (e.g., an arm of a chromosome). An arm alteration can affect a large region containing about or at least about 500 bp, 1 kbp, 5 kbp, 10 kbp, 25 kbp, 50 kbp, 100 kbp, 250 kbp, 500 kbp, 1 Mbp, 2 Mbp, 3 Mbp, 4 Mbp, or 5 Mbp. The alteration can be an alteration affecting a gene (i.e., a “gene” alteration). A variant can be described as a “target” for sequencing and the variant can be assigned to a “type” where the type identifies the type of genomic locus associated with the variant; for example, a gene, a large chromosomal region (“arm”), a small chromosomal region (“focal”), or microsatellite instability (“MSI” or a microsatellite).

[0042] By “variant classification” or “class of variant” is meant a particular alteration associated with a variant.

[0043] By “metafeature” is meant one variable of a reduced set of variables determined using dimensionality reduction. In embodiments, a metafeature is a weighted sum (i.e., “metafeature value”) of variant classes observed in a sample (see, e.g., Tables 1 and 3). Table 3 below provides representative definitions of metafeatures. A variant class can be assigned a higher weight proportional to the magnitude of an associated alteration; for example, a higher alteration in copy number can be assigned a higher weight than a lower alteration in copy number (see, e.g., the weighting scheme provided in Table 1).

TABLE 1
Weighing scale used to calculate metafeature
values based on variant measurements.

| Type | Value | Meaning |
|---|---|---|
| Mutations | 0 | no mutation |
| | 1 | silent mutation |
| | 2 | non-synonymous mutation |
| SCNA | 0 | no SCNA |
| | 1 | low level copy number alteration |
| | 2 | high level copy number alteration |
| SV | 0 | no SV |
| | 3 | SV |

[0044] By “agent” is meant any small molecule chemical compound, antibody, nucleic acid molecule, or polypeptide, or fragments thereof.

[0045] As used herein, the term “algorithm” refers to any formula, model, mathematical equation, algorithmic, analytical, or programmed process, or statistical technique or classification analysis that takes one or more inputs or parameters, whether continuous or categorical, and calculates an output value, index, index value or score. Examples of algorithms include but are not limited to ratios, sums, regression operators such as exponents or coefficients, biomarker value transformations and normalizations (including, without limitation, normalization schemes that are based on clinical parameters such as age, gender, ethnicity, etc.), rules and guidelines, statistical classification models, statistical weights, and neural networks trained on populations or datasets.

[0046] By “ameliorate” is meant decrease, suppress, attenuate, diminish, arrest, or stabilize the development or progression of a disease.

[0047] By “alteration” is meant a change (increase or decrease) in the expression levels or activity of a gene or polypeptide as detected by standard art known methods such as those described herein. As used herein, an alteration includes a 10% change in expression levels, preferably a 25% change, more preferably a 40% change, and most preferably a 50% or greater change in expression levels.”

[0048] By “analog” is meant a molecule that is not identical, but has analogous functional or structural features. For example, a polypeptide analog retains the biological activity of a corresponding naturally-occurring polypeptide, while having certain biochemical modifications that enhance the analog's function relative to a naturally occurring polypeptide. Such biochemical modifications could increase the analog's protease resistance, membrane permeability, or half-life, without altering, for example, ligand binding. An analog may include an unnatural amino acid.

[0049] “Biological sample” as used herein refers to a sample obtained from a subject. Biological samples include samples of biological tissue or fluid origin, obtained, reached, or collected in vivo or in situ, that contains or is suspected of containing a polynucleotide. A biological sample also includes samples from a region of a biological subject containing precancerous or cancer cells or tissues. Such samples can be, but are not limited to, organs, tissues, fractions and cells isolated from mammals including, humans such as a patient, mice, and rats. Biological samples also may include sections of the biological sample including tissues, for example, frozen sections taken for histologic purposes. In embodiments, a sample is a blood, plasma, or serum sample comprising circulating tumor DNA.

[0050] By “circulating tumor DNA (ctDNA)” is meant cell-free DNA found in the bloodstream of a subject that is derived from neoplasm cells. In embodiments, the neoplasm is a cancer.

[0051] In this disclosure, “comprises,” “comprising,” “containing” and “having” and the like can have the meaning ascribed to them in U.S. Patent law and can mean “includes,” “including,” and the like; “consisting essentially of” or “consists essentially” likewise has the meaning ascribed in U.S. Patent law and the term is open-ended, allowing for the presence of more than that which is recited so long as basic or novel characteristics of that which is recited is not changed by the presence of more than that which is recited, but excludes prior art embodiments. Any embodiments specified as “comprising” a particular component(s) or element(s) are also contemplated as “consisting of” or “consisting essentially of” the particular component(s) or element(s) in some embodiments.

[0052] By “control” or “reference” is meant a standard of comparison. In one aspect, as used herein, “changed as compared to a control” sample or subject is understood as having a level that is statistically different than a sample from a normal, untreated, or control sample. Control samples include, for example, cells in culture, one or more laboratory test animals, one or more human subjects, or biological samples from the same (e.g., cfDNA). Methods to select and test control samples are within the ability of those in the art. Determination of statistical significance is within the ability of those skilled in the art, e.g., the number of standard deviations from the mean that constitute a positive result. In embodiments, a reference is a subject or a sample from a subject that does not have a cancer or a subject prior to a change in a treatment or administration of a drug or treatment. In embodiments, the reference is a matched normal sample or a panel of normals (PoN), where in some instances the matched normal sample is a sample from a healthy subject and/or a subject that does not have a cancer (e.g., a subject prior to being diagnosed with a DLBCL).

[0053] By “consist essentially” it is meant that the ingredients include only the listed components along with the normal impurities present in commercial materials and with any other additives present at levels which do not affect the operation of the disclosure, for instance at levels less than 5% by weight or less than 1% or even 0.5% by weight.

[0054] By “copy number variation (CNV),” “copy number alteration (CNA),” or “somatic copy number alteration (SCNA)” is meant an alteration that results in a gain or loss in copies of a section(s) of a genome. Non-limiting examples of SCNAs include duplications and deletions.

[0055] As used herein, the term “coverage” refers to the number of sequence reads that align to a specific locus in a reference sequence. In embodiments, the reference sequence is a reference genome. For example, with regard to the terminal base of the following reference sequence, because there is only one sample base aligned at this locus (the bold cytosine in Read 2), there is 1× coverage of the reference sequence at this locus. At the 5′ end, there is 3× coverage of the reference sequence at the 5′ terminus guanine.

Reference Sequence:
5′ GGGAAGGGCGATC 3′
Read 1
GGGAAGGGCGAT
Read 2
GGGAAGGGCGATC
Read 3
GGGAAGGGCG

When a genome is sequenced, there will be a large number of nucleotides sequenced. If an individual genome is sequenced only once, there will be a significant number of sequencing errors. To increase the sequencing accuracy, an individual genome will need to be sequenced a large number of times. The average coverage for a whole genome can be calculated from the length of the original genome (G), the number of reads (N), and the average read length (L) as N×L/G. In another example, a hypothetical genome with 2,000 base pairs reconstructed from 8 reads with an average length of 500 nucleotides will have 2× redundancy. This parameter also enables one to estimate other quantities, such as the percentage of the genome covered by reads (sometimes also called breadth of coverage). At a coverage of 0.1×, only 10% of a reference sequence is covered by sequence reads. In embodiments, a sample polynucleotide is sequenced to a coverage of about, at least about, and/or no more than about 1e-8×, 1e-7×, 1e-6×, 1e-5×, 1e-4×, 1e-3×, 1e-2×, 0.05×, 0.1×, 0.2×, 0.3×, 0.4×, 0.5×, 1×, 2×, 3×, 4×, 5×, 7×, 8×, 9×, 10×, 20×, 30×, 40×, 50×, 60×, 70×, 90×, 100×, 200×, 300×, 400×, 500×, 600×, 700×, 800×, 900×, 1000×, 5000×, 10000×, 15000×, 20000×, 25000×, 30000×, 50000×, 100000×, or more.

[0056] By “ultra-low coverage” is meant a coverage of less than at least 5×. In some instances, ultra-low coverage is a coverage of less than 0.5×, 0.2×, or 0.1×.

[0057] “Detect” refers to identifying the presence, absence or amount of the analyte to be detected.

[0058] By “detectable label” is meant a composition that when linked to a molecule of interest renders the latter detectable, via spectroscopic, photochemical, biochemical, immunochemical, or chemical means. For example, useful labels include radioactive isotopes, magnetic beads, metallic beads, colloidal particles, fluorescent dyes, electron-dense reagents, enzymes (for example, as commonly used in an ELISA), biotin, digoxigenin, or haptens.

[0059] By “disease” is meant any condition or disorder that damages or interferes with the normal function of a cell, tissue, or organ. Examples of diseases include cancer (e.g., Hodgkin's lymphoma, primary mediastinal B-cell lymphoma), and related diseases or disorders.

[0060] By “effective amount” is meant the amount of an agent required to provide a therapeutic benefit in the treatment of a condition or to delay or minimize one or more symptoms associated with the condition. In some instances, the effective amount ameliorates the symptoms of a disease relative to an untreated patient. A therapeutically effective amount of an agent can mean an amount of therapeutic agent, alone or in combination with other therapies, which provides a therapeutic benefit in the treatment of the condition. The term “effective amount” can encompass an amount that improves overall therapy, reduces or avoids symptoms, signs, or causes of the condition, and/or enhances the therapeutic efficacy of another therapeutic agent. The effective amount of active compound(s) used to practice the present invention for therapeutic treatment of a disease varies depending upon the manner of administration, the age, body weight, and general health of the subject. Ultimately, the attending physician or veterinarian will decide the appropriate amount and dosage regimen. Such amount is referred to as an “effective” amount.

[0061] By “fragment” is meant a portion of a polypeptide or nucleic acid molecule. This portion contains, preferably, at least 10%, 20%, 30%, 40%, 50%, 60%, 70%, 80%, or 90% of the entire length of the reference nucleic acid molecule or polypeptide. A fragment may contain 10, 20, 30, 40, 50, 60, 70, 80, 90, or 100, 200, 300, 400, 500, 600, 700, 800, 900, or 1000 nucleotides or amino acids.

[0062] “Hybridization” means hydrogen bonding, which may be Watson-Crick, Hoogsteen or reversed Hoogsteen hydrogen bonding, between complementary nucleobases. For example, adenine and thymine are complementary nucleobases that pair through the formation of hydrogen bonds.

[0063] By “immunotherapy” is meant a treatment that involves supplementing or stimulating the immune system. Non-limiting examples of immunotherapies include treatments involving administration of biologics, such as immune checkpoint blockades, and/or CAR T cells.

[0064] By “immune checkpoint blockade” is meant an agent that functions as an inhibitor of a polynucleotide and/or pathway that functions in inhibiting or stimulating an immune response. In embodiments, the agent is an antibody.

[0065] By “increases” is meant a positive alteration of at least 10%, 25%, 50%, 75%, or 100%.

[0066] The terms “isolated,” “purified,” or “biologically pure” refer to material that is free to varying degrees from components which normally accompany it as found in its native state. “Isolate” denotes a degree of separation from original source or surroundings. “Purify” denotes a degree of separation that is higher than isolation. A “purified” or “biologically pure” protein is sufficiently free of other materials such that any impurities do not materially affect the biological properties of the protein or cause other adverse consequences. That is, a nucleic acid or peptide of this invention is purified if it is substantially free of cellular material, viral material, or culture medium when produced by recombinant DNA techniques, or chemical precursors or other chemicals when chemically synthesized. Purity and homogeneity are typically determined using analytical chemistry techniques, for example, polyacrylamide gel electrophoresis or high performance liquid chromatography. The term “purified” can denote that a nucleic acid or protein gives rise to essentially one band in an electrophoretic gel. For a protein that can be subjected to modifications, for example, phosphorylation or glycosylation, different modifications may give rise to different isolated proteins, which can be separately purified.

[0067] By “isolated polynucleotide” is meant a nucleic acid (e.g., a DNA) that is free of the genes which, in the naturally-occurring genome of the organism from which the nucleic acid molecule of the invention is derived, flank the gene. The term therefore includes, for example, a recombinant DNA that is incorporated into a vector; into an autonomously replicating plasmid or virus; or into the genomic DNA of a prokaryote or eukaryote; or that exists as a separate molecule (for example, a cDNA or a genomic or cDNA fragment produced by PCR or restriction endonuclease digestion) independent of other sequences. In addition, the term includes an RNA molecule that is transcribed from a DNA molecule, as well as a recombinant DNA that is part of a hybrid gene encoding additional polypeptide sequence.

[0068] By an “isolated polypeptide” is meant a polypeptide of the invention that has been separated from components that naturally accompany it. Typically, the polypeptide is isolated when it is at least 60%, by weight, free from the proteins and naturally-occurring organic molecules with which it is naturally associated. Preferably, the preparation is at least 75%, more preferably at least 90%, and most preferably at least 99%, by weight, a polypeptide of the invention. An isolated polypeptide of the invention may be obtained, for example, by extraction from a natural source, by expression of a recombinant nucleic acid encoding such a polypeptide; or by chemically synthesizing the protein. Purity can be measured by any appropriate method, for example, column chromatography, polyacrylamide gel electrophoresis, or by HPLC analysis.

[0069] By “marker” is meant a protein, polynucleotide, or other analyte having an alteration in sequence, copy number, structure, expression level or activity that is associated with a disease or disorder.

[0070] By “mutation” is meant an alteration to a polynucleotide sequence. Non-limiting examples of non-synonymous mutations include single-nucleotide polymorphisms (SNPs), single-nucleotide variations (SNVs), and insertions or deletions (indel mutations). In embodiments, a non-synonymous mutation corresponds to a genomic region about or less than about 1 bp, 2 bp, 3 bp, 4 bp, 5 bp, 10 bp, 50 bp, or 100 bp in size.

[0071] As used herein, the term “next-generation sequencing (NGS)” refers to a variety of high-throughput sequencing technologies that parallelize the sequencing process, producing thousands or millions of sequence reads at once. NGS parallelization of sequencing reactions can generate hundreds of megabases to gigabases of nucleotide sequence reads in a single instrument run. Unlike conventional sequencing techniques, such as Sanger sequencing, which typically report the average genotype of an aggregate collection of molecules, NGS technologies typically digitally tabulate the sequence of numerous individual DNA fragments (sequence reads discussed in detail below), such that low frequency variants (e.g., variants present at less than about 10%, 5% or 1% frequency in a heterogeneous population of nucleic acid molecules) can be detected. The term “massively parallel” can also be used to refer to the simultaneous generation of sequence information from many different template molecules by NGS. NGS sequencing platforms include, but are not limited to, the following: Massively Parallel Signature Sequencing (Lynx Therapeutics); 454 pyro-sequencing (454 Life Sciences/Roche Diagnostics); solid-phase, reversible dye-terminator sequencing (Solexa/Illumina); SOLiD technology (Applied Biosystems); Ion semiconductor sequencing (ion Torrent); and DNA nanoball sequencing (Complete Genomics). Descriptions of certain NGS platforms can be found in the following: Shendure, et al., “Next-generation DNA sequencing,” Nature, 2008, vol. 26, No. 10, 135-1 145; Mardis, “The impact of next-generation sequencing technology on genetics,” Trends in Genetics, 2007, vol. 24, No. 3, pp. 133-141; Su, et al., “Next-generation sequencing and its applications in molecular diagnostics” Expert Rev Mol Diagn, 2011, 11 (3):333-43; and Zhang et al., “The impact of next-generation sequencing on genomics,” J Genet Genomics, 201, 38(3): 95-109.

[0072] As used herein, “obtaining” as in “obtaining an agent” includes synthesizing, purchasing, or otherwise acquiring the agent.

[0073] By “polypeptide” or “amino acid sequence” is meant any chain of amino acids, regardless of length or post-translational modification. In various embodiments, the post-translational modification is glycosylation or phosphorylation. In various embodiments, conservative amino acid substitutions may be made to a polypeptide to provide functionally equivalent variants, or homologs of the polypeptide. In some aspects the invention embraces sequence alterations that result in conservative amino acid substitutions. In some embodiments, a “conservative amino acid substitution” refers to an amino acid substitution that does not alter the relative charge or size characteristics of the protein in which the conservative amino acid substitution is made. Variants can be prepared according to methods for altering polypeptide sequence known to one of ordinary skill in the art such as are found in references that compile such methods, e.g. Molecular Cloning: A Laboratory Manual, J. Sambrook, et al., eds., Second Edition, Cold Spring Harbor Laboratory Press, Cold Spring Harbor, N.Y., 1989, or Current Protocols in Molecular Biology, F. M. Ausubel, et al., eds., John Wiley & Sons, Inc., New York. Non-limiting examples of conservative substitutions of amino acids include substitutions made among amino acids within the following groups: (a) M, I, L, V; (b) F, Y, W; (c) K, R, H; (d) A, G; (e) S, T; (f) Q, N; and (g) E, D. In various embodiments, conservative amino acid substitutions can be made to the amino acid sequence of the proteins and polypeptides disclosed herein.

[0074] By “probe set” or “bait set” is meant a set of probes that hybridize to and characterize a target polynucleotide.

[0075] By “reduces” is meant a negative alteration of at least 10%, 25%, 50%, 75%, or 100%.

[0076] By “reference” is meant a standard or control condition. In embodiments, the reference is a reference sequence. A non-limiting example of a reference sequence is a genomic DNA sequence corresponding to a subject not having a DLBCL. As used herein, “changed as compared to a reference” sample or subject is understood as having a level that is statistically different than a sample from a normal, untreated, or reference sample. Reference samples include, for example, cells in culture, one or more laboratory test animals, or one or more human subjects. Methods to select and test reference samples are within the ability of those in the art. Determination of statistical significance is within the ability of those skilled in the art, e.g., the number of standard deviations from the mean that constitute a positive result.

[0077] A “reference genome” is a defined genome used as a basis for genome comparison or for alignment of sequencing reads thereto. A reference genome may be a subset of or the entirety of a specified genome; for example, a subset of a genome sequence, such as exome sequence, or the complete genome sequence.

[0078] Nucleic acid molecules useful in the methods of the invention include any nucleic acid molecule that encodes a polypeptide of the invention or a fragment thereof. Such nucleic acid molecules need not be 100% identical with an endogenous nucleic acid sequence, but will typically exhibit substantial identity. Polynucleotides having “substantial identity” to an endogenous sequence are typically capable of hybridizing with at least one strand of a double-stranded nucleic acid molecule. Nucleic acid molecules useful in the methods of the invention include any nucleic acid molecule that encodes a polypeptide of the invention or a fragment thereof. Such nucleic acid molecules need not be 100% identical with an endogenous nucleic acid sequence, but will typically exhibit substantial identity. Polynucleotides having “substantial identity” to an endogenous sequence are typically capable of hybridizing with at least one strand of a double-stranded nucleic acid molecule. By “hybridize” is meant pair to form a double-stranded molecule between complementary polynucleotide sequences (e.g., a gene described herein), or portions thereof, under various conditions of stringency. (See, e.g., Wahl, G. M. and S. L. Berger (1987) Methods Enzymol. 152:399; Kimmel, A. R. (1987) Methods Enzymol. 152:507).

[0079] For example, stringent salt concentration will ordinarily be less than about 750 mM NaCl and 75 mM trisodium citrate, preferably less than about 500 mM NaCl and 50 mM trisodium citrate, and more preferably less than about 250 mM NaCl and 25 mM trisodium citrate. Low stringency hybridization can be obtained in the absence of organic solvent, e.g., formamide, while high stringency hybridization can be obtained in the presence of at least about 35% formamide, and more preferably at least about 50% formamide. Stringent temperature conditions will ordinarily include temperatures of at least about 30° C., more preferably of at least about 37° C., and most preferably of at least about 42° C. Varying additional parameters, such as hybridization time, the concentration of detergent, e.g., sodium dodecyl sulfate (SDS), and the inclusion or exclusion of carrier DNA, are well known to those skilled in the art. Various levels of stringency are accomplished by combining these various conditions as needed. In a preferred: embodiment, hybridization will occur at 30° C. in 750 mM NaCl, 75 mM trisodium citrate, and 1% SDS. In a more preferred embodiment, hybridization will occur at 37° C. in 500 mM NaCl, 50 mM trisodium citrate, 1% SDS, 35% formamide, and 100 μg/ml denatured salmon sperm DNA (ssDNA). In a most preferred embodiment, hybridization will occur at 42° C. in 250 mM NaCl, 25 mM trisodium citrate, 1% SDS, 50% formamide, and 200 μg/ml ssDNA. Useful variations on these conditions will be readily apparent to those skilled in the art.

[0080] For most applications, washing steps that follow hybridization will also vary in stringency. Wash stringency conditions can be defined by salt concentration and by temperature. As above, wash stringency can be increased by decreasing salt concentration or by increasing temperature. For example, stringent salt concentration for the wash steps will preferably be less than about 30 mM NaCl and 3 mM trisodium citrate, and most preferably less than about 15 mM NaCl and 1.5 mM trisodium citrate. Stringent temperature conditions for the wash steps will ordinarily include a temperature of at least about 25° C., more preferably of at least about 42° C., and even more preferably of at least about 68° C. In a preferred embodiment, wash steps will occur at 25° C. in 30 mM NaCl, 3 mM trisodium citrate, and 0.1% SDS. In a more preferred embodiment, wash steps will occur at 42 C in 15 mM NaCl, 1.5 mM trisodium citrate, and 0.1% SDS. In a more preferred embodiment, wash steps will occur at 68° C. in 15 mM NaCl, 1.5 mM trisodium citrate, and 0.1% SDS. Additional variations on these conditions will be readily apparent to those skilled in the art. Hybridization techniques are well known to those skilled in the art and are described, for example, in Benton and Davis (Science 196:180, 1977); Grunstein and Hogness (Proc. Natl. Acad. Sci., USA 72:3961, 1975); Ausubel et al. (Current Protocols in Molecular Biology, Wiley Interscience, New York, 2001); Berger and Kimmel (Guide to Molecular Cloning Techniques, 1987, Academic Press, New York); and Sambrook et al., Molecular Cloning: A Laboratory Manual, Cold Spring Harbor Laboratory Press, New York.

[0081] The phrase “pharmaceutically acceptable carrier” is recognized in the art and includes a pharmaceutically acceptable material, composition or vehicle, suitable for administering compounds of the present disclosure to a subject. The carriers include liquid or solid filler, diluent, excipient, solvent or encapsulating material, involved in carrying or transporting the subject agent from one organ, or portion of the body, to another organ, or portion of the body. Each carrier must be “acceptable” in the sense of being compatible with the other ingredients of the formulation and not injurious to the patient. Some non-limiting examples of materials which can serve as pharmaceutically acceptable carriers include the following: sugars, such as lactose, glucose and sucrose; starches, such as corn starch and potato starch; cellulose, and its derivatives, such as sodium carboxymethyl cellulose, ethyl cellulose and cellulose acetate; powdered tragacanth; malt; gelatin; talc; excipients, such as cocoa butter and suppository waxes; oils, such as peanut oil, cottonseed oil, safflower oil, sesame oil, olive oil, corn oil and soybean oil; glycols, such as propylene glycol; polyols, such as glycerin, sorbitol, mannitol and polyethylene glycol; esters, such as ethyl oleate and ethyl laurate; agar; buffering agents, such as magnesium hydroxide and aluminum hydroxide; alginic acid; pyrogen-free water; isotonic saline; Ringer's solution; ethyl alcohol; phosphate buffer solutions; and other non-toxic compatible substances employed in pharmaceutical formulations.

[0082] The term “salts” refers to the relatively non-toxic, inorganic and organic acid addition salts of compounds of the present disclosure. These salts can be prepared in situ during the final isolation and purification of compounds or by separately reacting a purified compound in its free base form with a suitable organic or inorganic acid and isolating the salt thus formed. Representative salts include the hydrobromide, hydrochloride, sulfate, bisulfate, nitrate, acetate, oxalate, valerate, oleate, palmitate, stearate, laurate, borate, benzoate, lactate, phosphate, tosylate, citrate, maleate, fumarate, succinate, tartrate, naphthylate mesylate, glucoheptonate, lactobionate and laurylsulphonate salts, and the like. Representative salts may further include cations based on the alkali and alkaline earth metals, such as sodium, lithium, potassium, calcium, magnesium, and the like, as well as non-toxic ammonium, tetramethylammonium, tetramethyl ammonium, methlyamine, dimethlyamine, trimethlyamine, triethlyamine, ethylamine, and the like. (See, for example, S. M. Barge et al., “Pharmaceutical Salts,” J. Pharm. Sci., 1977, 66:1-19 which is incorporated herein by reference).

[0083] By “structural variation (SV)” is meant a large alteration in the sequence of a genome. Non-limiting examples of structural variants include gene fusions, translocations, deletions, duplications, inversions, and translocations. In embodiments, a structural variation corresponds to a genomic region that is about or at least about 100 bp, 500 bp, 1 kb, 10 kb, 100 kb, 1 Mb, 2 Mb, 3 Mb 4 Mb, 5 Mb or 10 Mb in size.

[0084] By “substantially identical” is meant a polypeptide or nucleic acid molecule exhibiting at least 50% identity to a reference amino acid sequence (for example, any one of the amino acid sequences described herein) or nucleic acid sequence (for example, any one of the nucleic acid sequences described herein). Preferably, such a sequence is at least 60%, more preferably 80% or 85%, and more preferably 90%, 95% or even 99% identical at the amino acid level or nucleic acid to the sequence used for comparison.

[0085] Sequence identity is typically measured using sequence analysis software (for example, Sequence Analysis Software Package of the Genetics Computer Group, University of Wisconsin Biotechnology Center, 1710 University Avenue, Madison, Wis. 53705, BLAST, BESTFIT, GAP, or PILEUP/PRETTYBOX programs). Such software matches identical or similar sequences by assigning degrees of homology to various substitutions, deletions, and/or other modifications. Conservative substitutions typically include substitutions within the following groups: glycine, alanine; valine, isoleucine, leucine; aspartic acid, glutamic acid, asparagine, glutamine; serine, threonine; lysine, arginine; and phenylalanine, tyrosine. In an exemplary approach to determining the degree of identity, a BLAST program may be used, with a probability score between e⁻³ and e⁻¹⁰⁰ indicating a closely related sequence.

[0086] By “subject” is meant an animal. The animal can be a mammal. The mammal can be a human or non-human mammal, such as a bovine, equine, canine, ovine, rodent, or feline.

[0087] Ranges provided herein are understood to be shorthand for all of the values within the range. For example, a range of 1 to 50 is understood to include any number, combination of numbers, or sub-range from the group consisting of 1, 2, 3, 4, 5, 6, 7, 8, 9, 10, 11, 12, 13, 14, 15, 16, 17, 18, 19, 20, 21, 22, 23, 24, 25, 26, 27, 28, 29, 30, 31, 32, 33, 34, 35, 36, 37, 38, 39, 40, 41, 42, 43, 44, 45, 46, 47, 48, 49, or 50.

[0088] By “targeted sequencing” is meant a sequencing method where polynucleotide sequences of interest from a biological sample are selectively sequenced. In embodiments, targeted contacting polynucleotides present in a biological sample with an oligonucleotide probe or panel of oligonucleotide probes. In embodiments, targeted sequencing involves enriching for polynucleotide sequences from a sample that hybridize to an oligonucleotide probe or panel of oligonucleotide probes. In various instances, targeted sequencing has the advantage of allowing for sequencing polynucleotide sequences of interest in a biological sample to a high sequencing coverage.

[0089] As used herein, the terms “treat,” treating,” “treatment,” and the like refer obtaining a desired pharmacologic and/or physiologic effect. The effect can involve reducing or ameliorating a disorder and/or symptoms associated therewith. The effect can be prophylactic in terms of completely or partially preventing a disease or symptom thereof and/or can be therapeutic in terms of a partial or complete cure for a disease and/or adverse effect attributable to the disease. “Treatment,” as used herein, covers any treatment of a disease or condition in a mammal, particularly in a human, and includes: (a) preventing the disease from occurring in a subject which can be predisposed to the disease but has not yet been diagnosed as having it; (b) inhibiting the disease, i.e., arresting its development; and (c) relieving the disease, i.e., causing regression of the disease. It will be appreciated that, although not precluded, treating a disorder or condition does not require that the disorder, condition or symptoms associated therewith be completely eliminated.

[0090] “Tumor-derived DNA” means DNA that is derived from a cancer cell rather than a healthy control cell. Tumor derived DNA often includes structural changes that are indicative of cancer.

[0091] Unless specifically stated or obvious from context, as used herein, the term “or” is understood to be inclusive. Unless specifically stated or obvious from context, as used herein, the terms “a”, “an”, and “the” are understood to be singular or plural.

[0092] Unless specifically stated or obvious from context, as used herein, the term “about” is understood as within a range of normal tolerance in the art, for example within 2 standard deviations of the mean. About can be understood as within 10%, 9%, 8%, 7%, 6%, 5%, 4%, 3%, 2%, 1%, 0.5%, 0.1%, 0.05%, or 0.01% of the stated value. Unless otherwise clear from context, all numerical values provided herein are modified by the term about.

[0093] The recitation of a listing of chemical groups in any definition of a variable herein includes definitions of that variable as any single group or combination of listed groups. The recitation of an embodiment for a variable or aspect herein includes that embodiment as any single embodiment or in combination with any other embodiments or portions thereof.

[0094] Any compositions or methods provided herein can be combined with one or more of any of the other compositions and methods provided herein.

### BRIEF DESCRIPTION OF THE DRAWINGS

[0095] FIGS. 1A and 1B are bar graphs, a matrix, and mirror GISTIC plots relating to recurrently mutated candidate cancer genes (CCGs) (FIG. 1A) and SCNAs (FIG. 1B) in primary diffuse large B cell lymphomas (DLBCLs). FIG. 1A provides a matrix and two bar graphs showing number and frequency of recurrent mutations (left), a gene sample matrix of recurrently mutated genes (shaded by type, center), and a ranking of mutated genes by their significance (MutSig2CV q value, right). FIG. 1B provides mirror GISTIC plots showing GISTIC2.0-defined recurrent copy number gains (left panel) and losses (right panel), with arm-level events (left of each plot) and focal events (right). CCGs were more likely to reside within focal SCNAs* (p=1e-44).

[0096] FIGS. 2A and 2B present a matrix and plots showing DLBCL subsets with discrete genetic signatures (FIG. 2A) and outcomes (FIG. 2B). FIG. 2A presents a matrix showing types of genetic alterations—mutations (black), copy number gains or losses (grey), structural variants (green). Transcriptionally defined cell-of-origin (COO) classification is provided at the top of FIG. 2A (ABC, dark grey; GCB, medium grey; unclassified, light grey). FIG. 2B presents plots showing PFS for the genetically distinct GCB-DLBCL clusters (C3 and C4; left), the ABC-DLBCL clusters (C1 and C5; middle) and COO independent C2 DLBCLs.

[0097] FIG. 3 presents a matrix showing a visualization of the combined gene sample matrix (samples, columns; genetic alterations, rows), which included cases from the Boston (Chapuy) and NIH (Staudt) series. Assigned clusters by non-negative matrix factorization (NMF) are indicated and associated marker genes are boxed. Each genetic alteration is ranking from top to bottom in each cluster by significance (q value as histogram to the right). A reanalysis of the combined dataset confirmed identify, associated marker genes, and biology of C1-C5 DLBCL clusters in a combined cohort. Notably, the C1-C5 labels in this cohort were used as “gold-standard” to train a molecular classifier of the disclosure.

[0098] FIGS. 4A-4F present schematics, a formula, a matrix, plots, and a list providing an overview of workflow and evaluation criteria for the molecular DLBCL classifier of the disclosure. FIGS. 4A and 4B provide schematics showing overall design. The combined dataset of DLBCL tumors from FIG. 3 was used as gold-standard to define the C1-C5 DLBCL classes. The cohort was divided into a training (n=551) and test set (n=149). Different feature reduction technologies were evaluated and different computer-based classification methods were explored and optimized in the training set. The final model was evaluated in an independent test set and is suitable for application to different new datasets. The overall goals of the classifier were that it needed to be easy, robust and probabilistic, allowing an assignment into a given C1-C5 class and also defining specific probability (“certainty”) of the classification. FIG. 4C provides and describes a formula for calculating performance score. The evaluation of different classifier models leveraged a newly constructed “performance matrix”. This performance matrix was defined as a weighted harmonic mean between two core metrics (accuracy and kappa), with accuracy weighted twice as much as the calibration factor, kappa. FIG. 4D provides a matrix describing accuracy. To calculate the accuracy, the correctly assigned cases were divided though all classified cases. FIG. 4D provides plots corresponding to an example of an high accuracy model. FIG. 4E provides a schematic describing calibration/kappa. Kappa is a calibration factor that captures the correlation between confidence and accuracy. To calculate kappa, first correctly and incorrectly classified cases were plotted and grouped based on confidence bins. By analyzing the worst case residual, best case residual, and observed residual, mean calibration relative to these bounds was computed. FIG. 4F provides a list giving an overview of model evaluation steps. The steps during the model evaluation and classifier construction are listed.

[0099] FIG. 5 provides a schematic and plots showing an overview of step 1 of the classifier construction, namely, selecting optimal classification method and data reduction technology. Different classification methods, including artificial neural networks, random forest, and naïve bayes classifying methods, were explored. The input features were either used as full features (n=163) or reduced in their complexity (e.g., through the use of metafeatures) by different dimensionality reduction technologies (e.g., PCA, biological reduction, such as summing of biologically relevant groups). The Accuracy, kappa (k) and the computed performance was calculated for each combination and ranked by performance. A model with good performance was an artificial neural network that learned the classification from a biologically reduced input feature set (metafeatures, see Table 3).

[0100] FIGS. 6A-6E provide plot showing further optimization and testing of robustness of the molecular classifier. FIG. 6A provides a plot showing optimization of metafeatures by significance and size. A model performing well in a prior design step (FIG. 5) was further optimized. It was explored whether a more stringent selection of marker genes with increased q-value thresholds and/or the reduction of features increased the performance. Metafeatures were dropped by size of the feature in the genome space (larger features were removed first). Notably, with this step the final q-value at 0.05 was able to be defined and 5 features were dropped. This was a final version of the model. The final feature list is reported in Table 3. FIG. 6B provides plots showing an evaluation of alteration classes. Next, experiments were undertaken to determine if all datatypes (mutations, copy number alterations and structural variants) were needed. Notably, all variants were needed, as the removal of features/classes deteriorated the performance of the model. A further reduction of features reduces the performance of the molecular classifier. FIG. 6C provides plots showing an evaluation of orthogonal assays. The addition of orthogonal assays to capture molecular complexity in DLBCL, such as the cell of origin defined transcriptional subtypes and/or ploidy, did not improve the performance of the molecular classifier significantly. For this reason, these features were not included in some embodiments of the molecular classifier of the disclosure. FIGS. 6D and 6E provide plots showing robustness and evaluation of sensitivity and false positive rate. By simulating loss of input data (FIG. 6D) or adding of random noise/artifacts (FIG. 6E), the robustness of the model was evaluated and the sensitivity and false positive rate of the model were determined.

[0101] FIG. 7 provides a confusion matrix showing classification results. FIG. 7 shows the classification output of the molecular classifier as confusion matrix for the training and independent test sets. As this classifier is probabilistic, it allows for defining post-hoc thresholds on the confidence. In FIG. 7 accuracy is exemplified in training and test cohorts (top and bottom row, respectively) for no confidence threshold (left column, all cases are classified), the top 70% confident cases (middle panel) and above 90% confident cases, right column). The different confidence thresholds can be used to apply the classifier in a scenario in which all cases need to be classified with no confidence limit threshold. In a scenario in which the classifier is used to assign patients to a clinical trial, a higher confidence threshold might be used with the caveat of not classifying all patients.

[0102] FIG. 8 provides images of a web portal. As one example of a tool that allows the commutation of the classification results for new cases, a web-portal was designed. The web portal was password protected, had a landing page, allowed file/data upload, classification with the latest version of the molecular classifier and the download of a classification result (class and probability). In addition, the portal allowed visualization of the data in context to published data, including the generation of heatmaps and uniform manifold approximation and projections (UMAPs). Notably, the web-portal is only one tool that allows the communication of classification results. Other tools might be apps for smartphones, etc.

[0103] FIG. 9 provides a chart describing metafeatures used in a molecular classifier of the disclosure. The indicated 21 metafeatures, M1-M21, were composed of the listed genetic features. The specific features are noted and the alteration types are coded using shading (mutations, black; copy number gains, dark grey; copy number losses, medium-grey; structural variants such as translocations, light grey).

### DETAILED DESCRIPTION OF THE INVENTION

[0104] The invention features a molecular classifier and a targeted sequencing assay for use in characterization and treatment of diffuse large B-cell lymphoma.

[0105] The invention is based in part on the discovery outlined in the examples provided herein that there are distinct classes of Diffuse large B-cell lymphoma (DLBCL) characterized by genetic signatures. The classes were discovered by identifying recurrent mutations, somatic copy number alterations (SCNAs) and structural variants (SVs, including translocations) in 304 newly diagnosed DLBCLs with clinical annotation and outcome data. By integrating these recurrent alterations, the 5 distinct DLBCL classes were identified, which included 2 particularly high-risk groups. Characterization of a DLBCL as belonging to one of these classes using the methods and panels provided herein can assist with identifying specific targeted therapies (e.g., combination therapies) to administer to a patient. This approach can accelerate the development of promising targeted therapies in patients with the greatest need and the highest likelihood of clinical benefit. More broadly, the examples provided below establish a clinically applicable molecular framework for the analysis of targeted combination therapies in patients with DLBCL and other lymphoid malignancies. The DLBCL genetic signatures can guide development of rational combination therapies in patients with the greatest need. Thus, among other things, herein is provided a molecular classifier for identifying high-risk DLBCL classes.

### DLBCL

[0106] Diffuse large B-cell lymphoma is the most common type of non-Hodgkin lymphoma (NHL) accounting for about 22 percent of newly diagnosed cases of B-cell NHL in the United States. DLBCL is an aggressive (fast-growing) NHL that affects B-lymphocytes. The occurrence of DLBCL generally increases with age, and patients tend to be over the age of 60 at diagnosis. DLBCL can develop in the lymph nodes or in “extranodal sites” (areas outside the lymph nodes) such as the gastrointestinal tract, testes, thyroid, skin, breast, bone, brain, or essentially any organ of the body. It may be localized (in one spot) or generalized (spread throughout the body).

### DLBCL Classification

[0107] The methods and compositions described herein relate to identification of a new and clinically useful classifier for DLBCL, the development of which is based upon an assessment of a significantly powered cohort of DLBCL samples for variants across whole exome sequences, where such variant assessment included characterization and evaluation of each of the following types of variation: somatic single nucleotide variants (SNVs), small insertions and deletions (Indels), somatic copy number alterations (SCNAs) and structural variants (SVs), including identification of variation across all cancer causing genes (CCGs). The classifier can predict outcome for a subject having a DLBCL independent of current clinical prognostic classification systems (e.g., the International Prognostic Index (IPI)). Specific components of the instant DLBCL classifier include the following.

### Types of Samples

[0108] This invention provides methods to extract and sequence a polynucleotide present in a sample. In one embodiment, the samples are biological samples generally derived from a subject (e.g., mammal, such as a human), preferably as a bodily fluid (such as ascites, blood, plasma, pleural fluid, serum, cerebrospinal fluid, phlegm, saliva, stool, urine, semen, prostate fluid, breast milk, or tears), or tissue sample (e.g. biopsy (e.g., needle biopsy), primary tumor sample, tissue section). In still another embodiment, the samples are biological samples from in vitro sources (e.g., cell culture medium). In an embodiment, the biological sample is plasma containing cell free (cfDNA) or circulating tumor DNA (ctDNA)

[0109] In embodiments, a liquid sample (e.g., blood, plasma, serum) comprises at least about and/or less than about 1 μl, 10 μl, 100 μl, 200 μl, 300 μl, 400 μl, 500 μl, 600 μl, 700 μl, 800 μl, 900 μl, 1 ml, 2 ml, 3 ml, 4 ml, 5 ml, 6 ml, 7 ml, 8 ml, 9 ml, 10 ml, or 15 ml. In embodiments, a sample comprises at least about and/or less than about 1 mg, 10 mg, 100 mg, 200 mg, 300 mg, 400 mg, 500 mg, 600 mg, 700 mg, 800 mg, 900 mg, 1 g, 2 g, 3 g, 4 g, 5 g, 6 g, 7 g, 8 g, 9 g, 10 g, or 15 g. In various cases, the methods provided herein can be completed successfully using any of the above-listed sample volumes and/or masses.

### Reference Sequences

[0110] In certain aspects, the instant disclosure provides methods and kits that involve and/or allow for assessment of the presence or absence of one or more sequence variants and/or mutations (e.g., structural variants including translocations (SVs), somatic copy number alterations (SCNAs) and recurrent mutations) in a test subject, tissue, cell or sample, as compared to a corresponding reference sequence. In particular embodiments, a subject, tissue, cell and/or sample is assessed for one or more variants and/or sites of copy number variation.

[0111] Up to five alteration types (alternatively “classes”) were measured and can be used for the classifier (i.e., a prognostic classifier as exemplified herein):
[0112] 1.) Mutations (single nucleotide variants and/or InDels)
[0113] 2.) Copy number alterations (CN gain, amplifications, CN losses, Deletions)
[0114] 3.) Structural variants (chromosomal translocations, inversions, tandem duplications, etc.)
[0115] 4.) Genome doublings
[0116] 5.) Mutational Signatures

[0117] In some instances, the alteration types used for the classifier include structural variants including translocations (SVs), somatic copy number alterations (SCNAs) and mutations.

[0118] For classifier performance consistent with the exemplar described below as “Neural Network classifier” the somatic variants (1-5) should be detected with at least 90% sensitivity and less than 5% false detection rate.

[0119] Mutations in Candidate Cancer Genes (CCGs), hereafter referred to as driver mutations, were identified with MutSig2CV and CLUMPS.

[0120] Recurrent copy number alterations were identified using GISTIC2.0, as described in U.S. Patent Application Publication No. 2019/0292602.

[0121] C1 and C5 DLBCLs had significantly different cAID signature activity.

[0122] It is expressly contemplated that either all or a subset of these five classes of alterations may be measured as part of the methods provided herein, where any combination of the individual members of each class, or even other genes, can be used within a classifier of the instant disclosure.

### Detection of Alterations

[0123] In some aspects, exome sequencing or probe-hybridization is performed upon a test sample (e.g., a biological sample containing circulating tumor DNA (ctDNA), cell free DNA (cfDNA), RNA, polypeptides, mixtures thereof, and the like) for purpose of detecting variants and/or copy number variation as described herein and identifying DLBCL classification and selecting a therapy. In certain embodiments, assessment of candidate and/or test DLBCL samples can be performed using one or more amplification and/or sequencing oligonucleotides flanking the above-referenced variant sequence and/or copy number variation regions. Assessment of candidate and/or test DLBCL samples can be performed using one or more baits (described further below) for use in targeted sequencing of variants. The assessment can involve using baits to target particular sequences from a sample for subsequent sequencing.

[0124] In some embodiments, assessment of candidate and/or test DLBCL samples can be performed by sequencing a library of polynucleotides prepared from a sample (e.g., circulating tumor DNA from a subject). The library of polynucleotides can be sequenced in some embodiments as described further below and in the Examples of the present disclosure using targeted sequencing using a targeted sequencing panel comprising baits (i.e., probes or polynucleotides targeting variants). The assessment can also be performed based upon binding of a labeled bait(s) (e.g., an oligonucleotide(s)) to a target sequence in the sample. Design and use of such amplification and sequencing oligonucleotides, and/or copy number detection probes/oligonucleotides (e.g., baits), can be performed by one of ordinary skill in the art.

[0125] The methods provided herein can be used for enriching for target polynucleotides. The polynucleotides are associated with a genetic alteration of interest (e.g., SVs, SCNAs, or mutations). The polynucleotides can be enriched from a sample by about or at least about 2, 3, 4, 5, 6, 7, 8, 9, 10, 15, 20, 25, 30, 35, 40, 45, 50, 55, 60, 65, 70, 75, 80, 85, 90, 95, or 100-fold.

[0126] In some instances the library is prepared using about, less than about, and/or at least about, 0.1 ng, 1 ng, 2 ng, 3 ng, 4 ng, 5 ng, 10 ng, 15 ng, 20 ng, 25 ng, 30 ng, 35 ng, 40 ng, 45 ng, 50 ng, 75 ng, 100 ng, 250 ng, 300 ng, 350 ng, 400 ng, 450 ng, 500 ng, 1,000 ng, or more of DNA. In some cases, the library is prepared using DNA fragments with an average size of about, at least about, and/or of no more than about 10 bp, 20 bp, 30 bp, 40 bp, 50 bp, 100 bp, 150 bp, 200 bp, 300 bp, 400 bp, 500 bp, or 1,000 bp.

[0127] Methods for preparing libraries of polynucleotides for sequencing are known to one of skill in the art. Library preparation can include the addition of nucleotide bar codes to the library polynucleotides according to methods known in the art.

[0128] As will be appreciated by one of ordinary skill in the art, any amplification, sequencing (e.g., targeted sequencing), and/or copy number detection oligonucleotides can be modified by any of a number of art-recognized moieties and/or exogenous sequences, e.g., to enhance the processes of amplification, hybridization, sequencing reactions and/or detection. Exemplary oligonucleotide modifications that are expressly contemplated for use with the oligonucleotides of the instant disclosure include, e.g., fluorescent and/or radioactive label modifications; labeling one or more oligonucleotides with a universal amplification sequence (optionally of exogenous origin) and/or labeling one or more oligonucleotides of the instant disclosure with a unique identification sequence (e.g., a “bar-code” sequence, optionally of exogenous origin), as well as other modifications known in the art and suitable for use with oligonucleotides.

[0129] In embodiments, the polynucleotides (e.g., baits, probes, or oligonucleotides) provided herein (e.g., baits, probes, or oligonucleotides) contain one or more modifications or analogs.

[0130] For example, in some embodiments a polynucleotide contains one or more analogs (e.g., altered backbone, sugar, or nucleobase). Some non-limiting examples of analogs include 5-bromouracil, peptide nucleic acid, xeno nucleic acid, morpholinos, locked nucleic acids, glycol nucleic acids, threose nucleic acids, dideoxynucleotides, cordycepin, 7-deaza-GTP, fluorophores (e.g., rhodamine or fluorescein linked to the sugar), thiol containing nucleotides, biotin linked nucleotides, fluorescent base analogs, CpG islands, methyl-7-guanosine, methylated nucleotides, inosine, thiouridine, pseudouridine, dihydrouridine, queuosine, and wyosine.

[0131] In embodiments, the polynucleotide contains a modified backbone and/or linkages (e.g., between adjacent nucleosides). Non-limiting examples of modified backbones include those that contain a phosphorus atom in the backbone and those that do not contain a phosphorus atom in the backbone. Non-limiting examples of modified backbones include phosphorothioates, chiral phosphorothioates, phosphorodithioates, phosphotriesters, aminoalkyl phosphotriesters, methyl and other alkyl phosphonate such as 3′-alkylene phosphonates, 5′-alkylene phosphonates, chiral phosphonates, phosphinates, phosphoramidates including 3′-amino phosphoramidate and aminoalkyl phosphoramidates, phosphorodiamidates, thionophosphoramidates, thionoalkylphosphonates, thionoalkylphosphotriesters, selenophosphates, and boranophosphates having normal 3′-5′ linkages, 2′-5′ linked analogs, and those having inverted polarity wherein one or more internucleotide linkages is a 3′ to 3′, a 5′ to 5′ or a 2′ to 2′ linkage.

[0132] In embodiments, a polynucleotide contains short chain alkyl or cycloalkyl linkages (e.g., between adjacent nucleosides), mixed heteroatom and alkyl or cycloalkyl internucleoside linkages, or one or more short chain heteroatomic or heterocyclic internucleoside linkages. In embodiments, a polynucleotide includes one or more of the following: morpholino linkages (formed in part from the sugar portion of a nucleoside); siloxane backbones; sulfide, sulfoxide and sulfone backbones; formacetyl and thioformacetyl backbones; methylene formacetyl and thioformacetyl backbones; riboacetyl backbones; alkene containing backbones; sulfamate backbones; methyleneimino and methylenehydrazino backbones; sulfonate and sulfonamide backbones; amide backbones; and others having mixed N, O, S and CH₂ component parts.

[0133] In embodiments, a polynucleotide contains a nucleic acid mimetic. The term “mimetic” can be intended to include polynucleotides wherein only the furanose ring or both the furanose ring and the internucleotide linkage are replaced with non-furanose groups, replacement of only the furanose ring can also be referred as being a sugar surrogate. The heterocyclic base moiety or a modified heterocyclic base moiety can be maintained for hybridization with an appropriate target nucleic acid. One such nucleic acid can be a peptide nucleic acid (PNA). In a PNA, the sugar-backbone of a polynucleotide can be replaced with an amide containing backbone, in particular an aminoethylglycine backbone. The nucleotides can be retained and are bound directly or indirectly to aza nitrogen atoms of the amide portion of the backbone. In embodiments, the backbone in PNA compounds contains two or more linked aminoethylglycine units that give PNA an amide containing backbone. Heterocyclic base moieties can be bound directly or indirectly to aza nitrogen atoms of the amide portion of the backbone.

[0134] In embodiments, a polynucleotide contains a morpholino backbone structure. For example, a nucleic acid can contain a 6-membered morpholino ring in place of a ribose ring. In some of these embodiments, a phosphorodiamidate or other non-phosphodiester internucleoside linkage can replace a phosphodiester linkage.

[0135] A polynucleotide can contain linked morpholino units having heterocyclic bases attached to the morpholino ring. Linking groups can link morpholino monomeric units. Non-ionic morpholino-based oligomeric compounds can have less undesired interactions with cellular proteins. Morpholino-based polynucleotides can be nonionic mimics of nucleic acids. A variety of compounds within the morpholino class can be joined using different linking groups. A further class of polynucleotide mimetic can be referred to as cyclohexenyl nucleic acids (CeNA). In some instances, the furanose ring normally present in a nucleic acid molecule is replaced with a cyclohexenyl ring. CeNA DMT protected phosphoramidite monomers can be prepared and used for oligomeric compound synthesis using phosphoramidite chemistry. In some cases, incorporation of CeNA monomers into a nucleic acid chain increases the stability of a DNA/RNA hybrid. CeNA oligoadenylates can form complexes with nucleic acid complements with similar stability to the native complexes. In embodiments, a polynucleotide contains Locked Nucleic Acids (LNAs) in which the 2′-hydroxyl group is linked to the 4′ carbon atom of the sugar ring thereby forming a 2′-C, 4′-C-oxymethylene linkage, thereby forming a bicyclic sugar moiety. The linkage can be a methylene (—CH₂), group bridging the 2′ oxygen atom and the 4′ carbon atom wherein n is 1 or 2. LNA and LNA analogs can display very high duplex thermal stabilities with complementary nucleic acid (Tₘ=+3 to +10° C.), stability towards 3′-exonucleolytic degradation and good solubility properties.

[0136] In embodiments, a polynucleotide contains nucleobase modifications (often referred to simply as “base modifications”) or substitutions. In embodiments, unmodified nucleobases include one or more of the purine bases, (e.g., adenine (A) and guanine (G)), and/or the pyrimidine bases, (e.g., thymine (T), cytosine (C) and uracil (U)). Non-limiting examples of modified nucleobases include nucleobases such as 5-methylcytosine (5-me-C), 5-hydroxymethyl cytosine, xanthine, hypoxanthine, 2-aminoadenine, 6-methyl and other alkyl derivatives of adenine and guanine, 2-propyl and other alkyl derivatives of adenine and guanine, 2-thiouracil, 2-thiothymine and 2-thiocytosine, 5-halouracil and cytosine, 5-propynyl (—C═C—CH3) uracil and cytosine and other alkynyl derivatives of pyrimidine bases, 6-azo uracil, cytosine and thymine, 5-uracil (pseudouracil), 4-thiouracil, 8-halo, 8-amino, 8-thiol, 8-thioalkyl, 8-hydroxyl and other 8-substituted adenines and guanines, 5-halo particularly 5-bromo, 5-trifluoromethyl and other 5-substituted uracils and cytosines, 7-methylguanine and 7-methyladenine, 2-F-adenine, 2-aminoadenine, 8-azaguanine and 8-azaadenine, 7-deazaguanine and 7-deazaadenine and 3-deazaguanine and 3-deazaadenine. Further non-limiting examples of modified nucleobases include tricyclic pyrimidines such as phenoxazine cytidine(1H-pyrimido(5,4-b)(1,4)benzoxazin-2(3H)-one), phenothiazine cytidine (1H-pyrimido(5,4-b)(1,4)benzothiazin-2(3H)-one), G-clamps such as a substituted phenoxazine cytidine (e.g., 9-(2-aminoethoxy)-H-pyrimido(5,4-(b) (1,4)benzoxazin-2(3H)-one), phenothiazine cytidine (1H-pyrimido(5,4-b)(1,4)benzothiazin-2(3H)-one), G-clamps such as a substituted phenoxazine cytidine (e.g., 9-(2-aminoethoxy)-H-pyrimido(5,4-(b) (1,4)benzoxazin-2(3H)-one), carbazole cytidine (2H-pyrimido(4,-b)indol-2-one), pyridoindole cytidine (H-pyrido(3′,2′:4,5)pyrrolo[2,3-d]pyrimidin-2-one).

[0137] Variants can be characterized by sequencing polynucleotides. Characterization of a variant can involve sequencing all or a portion of a variant targeted by an oligonucleotide probe with an oligonucleotide sequence corresponding to any of SEQ ID NOs: 1-9244 or to one or more of the baits described further below. The polynucleotides can be DNA fragments.

[0138] Sequencing may be performed on any high-throughput platform. Methods of sequencing oligonucleotides and nucleic acids are well known in the art (see, e.g., WO93/23564, WO98/28440 and WO98/13523; U.S. Pat. Nos. 5,525,464; 5,202,231; 5,695,940; 4,971,903; 5,902,723; 5,795,782; 5,547,839 and 5,403,708; Sanger et al., Proc. Natl. Acad. Sci. USA 74:5463 (1977); Drmanac et al., Genomics 4:114 (1989); Koster et al., Nature Biotechnology 14:1123 (1996); Hyman, Anal. Biochem. 174:423 (1988); Rosenthal, International Patent Application Publication 761107 (1989); Metzker et al., Nucl. Acids Res. 22:4259 (1994); Jones, Biotechniques 22:938 (1997); Ronaghi et al., Anal. Biochem. 242:84 (1996); Ronaghi et al., Science 281:363 (1998); Nyren et al., Anal. Biochem. 151:504 (1985); Canard and Arzumanov, Gene 11:1 (1994); Dyatkina and Arzumanov, Nucleic Acids Symp Ser 18:117 (1987); Johnson et al., Anal. Biochem. 136:192 (1984); and Elgen and Rigler, Proc. Natl. Acad. Sci. USA 91(13):5740 (1994), all of which are expressly incorporated by reference). In one embodiment, the sequencing of a DNA fragment is carried out using commercially available sequencing technology SBS (sequencing by synthesis) by Illumina. In another embodiment, the sequencing of the DNA fragment is carried out using chain termination method of DNA sequencing. In yet another embodiment, the sequencing of the DNA fragment is carried out using one of the commercially available next-generation sequencing technologies, including SMRT (single-molecule real-time) sequencing from Pacific Biosciences, Ion Torrent™ sequencing from ThermoFisher Scientific, Pyrosequencing (454) from Roche, and SOLiD© technology from Applied Biosystems. Any appropriate sequencing technology may be chosen for sequencing. Further examples of sequencing methods suitable for use in the methods of the present disclosure include those described in U.S. Patent Application Publication No. 2019/0078232, which is incorporated herein by reference in its entirety for all purposes. A DNA sample can be pre-screened using ultra low pass sequencing to confirm that the sample contains sufficient levels of tumor-derived DNA prior to further characterization, as described in U.S. Patent Application Publication No. 2019/0078232.

[0139] In various aspects, the methods provided herein involve sequencing of a sample. In some embodiments, the sequencing is whole-genome sequencing (WGS) or whole-exome sequencing (WES). The sequencing is performed upon a test sample for purpose of detecting alterations, such as somatic copy number alterations, mutations (e.g., single nucleotide polymorphisms), and/or structural variations. In certain embodiments, the sequencing can be performed with or without amplification of a sample to be sequenced. In embodiments, a sample is sequenced to a coverage of about, at least about, and/or no more than about 0.01×, 0.05×, 0.1×, 0.2×, 0.3×, 0.4×, 0.5×, 1×, 2×, 3×, 4×, 5×, 7×, 8×, 9×, 10×, 20×, 30×, 40×, 50×, 60×, 70×, 90×, 100×, 200×, 300×, 400×, 500×, 600×, 700×, 800×, 900×, 1000×, 5000×, 10000×, 15000×, 20000×, 25000×, 30000×, 50000×, 100000×, or more.

[0140] Whole genome sequencing (also known as “WGS”, full genome sequencing, complete genome sequencing, or entire genome sequencing) is a process that involves sequencing a complete DNA sequence of an organism's genome. A common strategy used for WGS is shotgun sequencing, in which DNA is broken up randomly into numerous small segments, which are sequenced. Sequence data obtained from one sequencing reaction is termed a “read.” The reads can be assembled together based on sequence overlap. The genome sequence is obtained by assembling the reads into a reconstructed sequence.

[0141] Whole exome sequencing (“WES”) is a technique used to sequence all the expressed genes in a cell or subject. WES includes first selecting only that portion of a polynucleotide sample that encodes proteins (e.g., cDNA, or a subset of a cfDNA sample), and then sequencing using any DNA sequencing technology well known in the art or as described herein. In a human being, there are about 180,000 exons, which constitute about 1% of the human genome, or approximately 30 million base pairs. In some embodiments, to sequence the exons of a genome, fragments of double-stranded genomic DNA are obtained (e.g., by methods such as sonication, nuclease digestion, or any other appropriate methods). Linkers or adapters are then attached to the DNA fragments, which are then hybridized to a library of polynucleotides designed to capture only the exons. The hybridized DNA fragments are then selectively isolated and subjected to sequencing using any sequencing method known in the art or described herein.

[0142] In aspects of the invention, a sample is analyzed by means of a biochip (also known as a microarray) containing targeted baits (oligonucleotides specific for a target alteration). Targeted baits specific for target alterations (e.g., select SV, SCNAs, and mutations) are useful as hybridizable array elements in a biochip. Biochips generally comprise solid substrates and have a generally planar surface, to which a capture reagent (also called an adsorbent or affinity reagent) is attached. Frequently, the surface of a biochip comprises a plurality of addressable locations, each of which has the capture reagent bound there.

[0143] The array elements are organized in an ordered fashion such that each element is present at a specified location on the substrate. Useful substrate materials include membranes, composed of paper, nylon or other materials, filters, chips, glass slides, and other solid supports. The ordered arrangement of the array elements allows hybridization patterns and intensities to be interpreted as expression levels of particular genes or proteins. Methods for making nucleic acid microarrays are known to the skilled artisan and are described, for example, in U.S. Pat. No. 5,837,832, Lockhart, et al. (Nat. Biotech. 14:1675-1680, 1996), and Schena, et al. (Proc. Natl. Acad. Sci. 93:10614-10619, 1996), herein incorporated by reference. Methods for making polypeptide microarrays are described, for example, by Ge (Nucleic Acids Res. 28: e3. i-e3. vii, 2000), MacBeath et al., (Science 289:1760-1763, 2000), Zhu et al. (Nature Genet. 26:283-289), and in U.S. Pat. No. 6,436,665, hereby incorporated by reference.

[0144] In aspects of the invention, a sample is analyzed by means of a nucleic acid biochip (also known as a nucleic acid microarray). To produce a nucleic acid biochip, oligonucleotides may be synthesized or bound to the surface of a substrate using a chemical coupling procedure and an ink jet application apparatus, as described in PCT application WO95/251116 (Baldeschweiler et al.). Alternatively, a gridded array may be used to arrange and link cDNA fragments or oligonucleotides to the surface of a substrate using a vacuum system, thermal, UV, mechanical or chemical bonding procedure.

[0145] Incubation conditions are adjusted such that hybridization occurs with precise complementary matches or with various degrees of less complementarity depending on the degree of stringency employed. For example, stringent salt concentration will ordinarily be less than about 750 mM NaCl and 75 mM trisodium citrate, less than about 500 mM NaCl and 50 mM trisodium citrate, or less than about 250 mM NaCl and 25 mM trisodium citrate. Low stringency hybridization can be obtained in the absence of organic solvent, e.g., formamide, while high stringency hybridization can be obtained in the presence of at least about 35% formamide, and most preferably at least about 50% formamide. Stringent temperature conditions will ordinarily include temperatures of at least about 30° C., of at least about 37° C., or of at least about 42° C. Varying additional parameters, such as hybridization time, the concentration of detergent, e.g., sodium dodecyl sulfate (SDS), and the inclusion or exclusion of carrier DNA, are well known to those skilled in the art. Various levels of stringency are accomplished by combining these various conditions as needed. In a preferred embodiment, hybridization will occur at 30° C. in 750 mM NaCl, 75 mM trisodium citrate, and 1% SDS. In embodiments, hybridization will occur at 37° C. in 500 mM NaCl, 50 mM trisodium citrate, 1% SDS, 35% formamide, and 100 μg/ml denatured salmon sperm DNA (ssDNA). In other embodiments, hybridization will occur at 42° C. in 250 mM NaCl, 25 mM trisodium citrate, 1% SDS, 50% formamide, and 200 μg/ml ssDNA. Useful variations on these conditions will be readily apparent to those skilled in the art.

[0146] The removal of nonhybridized probes may be accomplished, for example, by washing. The washing steps that follow hybridization can also vary in stringency. Wash stringency conditions can be defined by salt concentration and by temperature. As above, wash stringency can be increased by decreasing salt concentration or by increasing temperature. For example, stringent salt concentration for the wash steps will preferably be less than about 30 mM NaCl and 3 mM trisodium citrate, and most preferably less than about 15 mM NaCl and 1.5 mM trisodium citrate. Stringent temperature conditions for the wash steps will ordinarily include a temperature of at least about 25° C., of at least about 42° C., or of at least about 68° C. In embodiments, wash steps will occur at 25° C. in 30 mM NaCl, 3 mM trisodium citrate, and 0.1% SDS. In a more preferred embodiment, wash steps will occur at 42° C. in 15 mM NaCl, 1.5 mM trisodium citrate, and 0.1% SDS. In other embodiments, wash steps will occur at 68° C. in 15 mM NaCl, 1.5 mM trisodium citrate, and 0.1% SDS. Additional variations on these conditions will be readily apparent to those skilled in the art.

[0147] Detection system for measuring the absence, presence, and amount of hybridization for all of the distinct nucleic acid sequences are well known in the art. For example, simultaneous detection is described in Heller et al., Proc. Natl. Acad. Sci. 94:2150-2155, 1997. In embodiments, a scanner is used to determine the levels and patterns of fluorescence.

[0148] For purpose of this disclosure, the term “amplification” means any method employing a primer and a polymerase for replicating a target sequence linearly or exponentially with reasonable fidelity. Amplification may be carried out by natural or recombinant DNA polymerases such as TaqGold™, T7 DNA polymerase, Klenow fragment of E. coli DNA polymerase, and reverse transcriptase. A preferred amplification method is PCR. Typically, the amplification of a sample results in an exponential increase in copy number of the amplified sequences. Amplification may involve thermocycling or isothermal amplification (such as through the methods RPA or LAMP).

[0149] Design and use of oligonucleotides for amplification and/or sequencing is within the knowledge of one of ordinary skill in the art. Oligonucleotides can be modified by any of a number of art-recognized moieties and/or exogenous sequences, e.g., to enhance the processes of amplification, sequencing reactions, and/or detection. Exemplary oligonucleotide modifications that are expressly contemplated for use with the oligonucleotides of the instant disclosure include, e.g., fluorescent and/or radioactive label modifications; labeling one or more oligonucleotides with a universal amplification sequence (optionally of exogenous origin) and/or labeling one or more oligonucleotides of the instant disclosure with a unique identification sequence (e.g., a “bar-code” sequence, optionally of exogenous origin), as well as other modifications known in the art and suitable for use with oligonucleotides.

### Classification

[0150] In the methods of the invention, a neural network classifier (i.e., a classification model) can be employed to define DLBCL classification groups (C1-C5). As would be appreciated by one of ordinary skill in the art, other forms of classifier (e.g., nearest-neighbor, decision trees, boosting, support-vector machines, Naive Bayes, bagging, random forests, and various others) can be applied to variant and/or copy number data, to perform such test sample classification. Methods for the design of classifiers are described, for example, in Baldi Pierre, and Brunak, Soren, Bioinformatics: The Machine Learning Approach. 2^{nd} Ed. Cambridge, MA, “A Bradford Book” 2001; Zhang, Y. and Rajapakse, J., Machine Learning in Bioinformatics, Wiley, 2009; and Srinivasa K., Siddesh G., Manisekhar S. (eds) Statistical Modelling and Machine Learning Principles for Bioinformatics Techniques, Tools, and Applications. Algorithms for Intelligent Systems. Springer, Singapore (2020), the disclosures of each of which are incorporated herein in their entirety by reference for all purposes.

[0151] In embodiments, the methods of the disclosure involve dimensionality reduction (e.g., through the use of metafeatures), where dimensionality reduction is the transformation of data from a high-dimensional space into a low-dimensional space so that the low-dimensional representation retains meaningful properties of the original data. Dimensionality reduction can involve a linear or a nonlinear approach, and/or feature selection or feature extraction. In feature selection a subset of input variables can be selected using any of a variety of methods, such as a filter strategy, a wrapper strategy, or an embedded strategy. Non-limiting examples of techniques that can be used for dimensionality reduction include feedforward neural networks, principal component analysis (PCA), non-negative matrix factorization (NMF) (see, Chapuy B, Stewart C, Dunford A J, et al. Molecular subtypes of diffuse large B cell lymphoma are associated with distinct pathogenic mechanisms and outcomes. Nat Med. 2018; 24(5):679-690, the disclosure of which is incorporated herein by reference in its entirety for all purposes), kernel PCA, graph-based kernel PCA, linear discriminant analysis (LDA), generalized discriminant analysis (GDA), autoencoder, t-distributed stochastic neighbor embedding (t-SNE), and uniform manifold approximation projection. In embodiments, dimensionality reduction is sued to avoid overtraining a classification algorithm.

[0152] A neural network consists of units (neurons), arranged in layers, which convert an input vector (e.g., a vector comprising 21 metafeature values) into some output In embodiments, the input vector contains about, at least about, and/or no more than about 1, 2, 3, 4, 5, 6, 7, 8, 9, 10, 11, 12, 13, 14, 15, 16, 17, 18, 19, 20, 21, 22, 23, 24, 25, 30, 35, 40, 45, 50, 55, 60, 65, 70, 75, 80, 85, 90, 95, 100, 125, 150, 175, 200, 225, 250, 275, 300, 400, or 500 metafeature values. Each unit takes an input, applies a (often nonlinear) function to it and then passes the output on to the next layer. Generally the networks are defined to be feed-forward: a unit feeds its output to all the units on the next layer, but there is no feedback to the previous layer.

[0153] In embodiments, the molecular classifier is probabilistic and includes a post-hoc threshold on confidence. In some cases, the confidence threshold is about, at least about, and/or no more than about 0%, 5%, 10%, 20%, 30%, 40%, 50%, 60%, 70%, 75%, 80%, 81%, 82%, 83%, 84%, 85%, 86%, 87%, 88%, 89%, 90%, 91%, 92%9, 93%, 94%, 95%. 96%. 97%, 98%, 99%, or 100%. It is advantageous in some contexts to select a lower confidence threshold (e.g., below 5%, 10%, 20%, 30%, 40%, 50%, 60%, 70%, 80%, or 90%) to allow for classification of a larger number of samples, and it is advantageous in some contexts (e.g., in the clinical setting) to select a higher confidence threshold (e.g., above 70%, 80%, 90%, 95%, 96%, 97%, 98%, or 99%).

[0154] Weightings are applied to the signals passing from one unit to another, and it is these weightings which are tuned in the training phase to adapt a neural network to the particular problem at hand. This is the learning phase.

[0155] Neural networks have found application in a wide variety of problems. These range from function representation to pattern recognition, with pattern recognition being the focus of use of neural net classifiers of the instant disclosure.

[0156] In some embodiments, data derived from assays (e.g., genomic analyses) that are generated using samples such as “known samples” can then be used to “train” a classification model. A “known sample” is a sample that has been pre-classified. The data that are used to form the classification model can be referred to as a “training data set.” Once trained, the classification model can recognize patterns in data derived from unknown samples. The classification model can then be used to classify the unknown samples into classes (C1-C5). This can be useful, for example, in predicting whether or not a particular biological sample is associated with a certain biological condition (e.g., diseased versus non-diseased). The training data set that is used to form the classification model may comprise raw data or pre-processed data.

[0157] Classification models can be formed using any suitable statistical classification (or “learning”) method that attempts to segregate bodies of data into classes based on objective parameters present in the data. Classification methods may be either supervised or unsupervised. Examples of supervised and unsupervised classification processes are described in Jain, “Statistical Pattern Recognition: A Review”, IEEE Transactions on Pattern Analysis and Machine Intelligence, Vol. 22, No. 1, January 2000, the teachings of which are incorporated by reference.

[0158] In supervised classification, training data containing examples of known categories are presented to a learning mechanism, which learns one or more sets of relationships that define each of the known classes. New data may then be applied to the learning mechanism, which then classifies the new data using the learned relationships. Examples of supervised classification processes include linear regression processes (e.g., multiple linear regression (MLR), partial least squares (PLS) regression and principal components regression), binary decision trees (e.g., recursive partitioning processes such as CART—classification and regression trees), artificial neural networks such as back propagation networks, discriminant analyses (e.g., Bayesian classifier or Fischer analysis), logistic classifiers, and support vector classifiers (support vector machines).

[0159] In embodiments, a supervised classification method is a recursive partitioning process. Recursive partitioning processes use recursive partitioning trees to classify data derived from unknown samples. Further details about recursive partitioning processes are provided in U.S. Patent Application No. 2002 0138208 A1 to Paulse et al., “Method for analyzing mass spectra.”

[0160] In other embodiments, the classification models that are created can be formed using unsupervised learning methods. Unsupervised classification attempts to learn classifications based on similarities in the training data set, without pre-classifying the spectra from which the training data set was derived. Unsupervised learning methods include cluster analyses. A cluster analysis attempts to divide the data into “clusters” or groups that ideally should have members that are very similar to each other, and very dissimilar to members of other clusters. Similarity is then measured using some distance metric, which measures the distance between data items, and clusters together data items that are closer to each other. Clustering techniques include the MacQueen's K-means algorithm and the Kohonen's Self-Organizing Map algorithm.

[0161] Learning algorithms asserted for use in classifying biological information are described, for example, in International Publication No. WO 01/31580 (Barnhill et al., “Methods and devices for identifying patterns in biological systems and methods of use thereof”), U.S. Patent Application No. 2002 0193950 A1 (Gavin et al., “Method or analyzing mass spectra”), U.S. Patent Application No. 2003 0004402 A1 (Hitt et al., “Process for discriminating between biological states based on hidden patterns from biological data”), and U.S. Patent Application No. 2003 0055615 A1 (Zhang and Zhang, “Systems and methods for processing biological expression data”).

[0162] The classification models can be formed on and used on any suitable digital computer. Suitable digital computers include micro, mini, or large computers using any standard or specialized operating system, such as a Unix, Windows™ or Linux™ based operating system. The digital computer that is used may be physically separate from an instrument used to generate data of interest, or it may be coupled to the instrument.

[0163] The training data set and the classification models according to embodiments of the invention can be embodied by computer code that is executed or used by a digital computer. The computer code can be stored on any suitable computer readable media including optical or magnetic disks, sticks, tapes, etc., and can be written in any suitable computer programming language including C, C++, visual basic, etc.

### Clinical Classifier Scoring Algorithm

[0164] As an example, a neural net classifier was developed to prospectively identify DLBCL patients with the respective genetic signatures. The exemplified classifier utilizes 21 metafeatures (i.e., input parameters/variables), which are listed in Table 3 of the Examples below, that were selected based on biological significance for each DLBCL genetic cluster. Each metafeature contains one or more of the variants listed in Table 3. A neural network using these 21 metafeatures (each containing structural variants (SVs, which include translocations), somatic copy number alterations (SCNAs), and/or mutations) provided over 95% accuracy in assignment to classes at high confidence (e.g., >0.7 or >0.9) (FIG. 7). The output of the classifier can include a probability associated with a DLBCL falling within one of the five classes described herein (i.e., C1-C5).

[0165] Each metafeature can be calculated as a sum of variant class-specific weighted values (see Table 1) determined based upon the measurement of each variant included in the metafeature. For example, the metafeature BCL6.C1 listed in Table 3 could range from 0 (no mutation and no SV) to 5 (non-synonymous mutation and SV). The particular values assigned to each mutation, SCNA, or SV measured need not be limiting. For example, in some instances the relative magnitude of the various types of alterations listed in Table 1 (e.g., small, medium, and large) can be preserved while altering the absolute value assigned. For example, in the case of mutations, “no mutation” may be assigned a value of 100, “silent mutation” may be assigned a value of “1000” and “non-synonymous mutation” may be assigned a value of 2000. An intention of the weights/values listed in Table 1 can be to provide a means for quantifying the relative magnitude or severity of a particular observed alteration relative to a reference sequence (e.g., a wild type genome). For example, a non-synonymous mutation may be considered as being more severe than a silent mutation, which may be considered more severe than no mutation; therefore, a non-synonymous mutation may be assigned a greater weighting value than a silent mutation and both of these mutations may be assigned greater weighing values than no mutation. Similarly, an SV is considered as more severe than no SV and greater alterations in copy number are more severe than lower copy number alterations. Relative magnitudes of values assigned to mutations can be preserved across types of mutations; for example, a high level copy number alteration may be assigned a value equivalent to a non-synonymous mutation, a silent mutation can be assigned a value lower than (e.g., 3-fold lower than) than that assigned to an SV, etc. The particular values assigned to each alteration observed for each variant are not intended to be limiting.

[0166] A somatic copy number alteration can be a low level copy number alteration or a high level copy number alteration. Non-limiting examples of low-level copy number alterations include an increase or decrease in copy number of not more than about 2×, 3×, 4×, 5×, 6×, 7×, 8×, 9×, or 10×. Non-limiting examples of high-level copy number alterations include an increase or decrease in copy number of about or at least about 3×, 4×, 5×, 6×, 7×, 8×, 9×, 10×, 11×, 12×, 13×, 14×, 15×, 20×, 25×, 50×, 75×, 100×, 200×, 250×, 500×, 750×, 1,000×, 10,000×, or 100,000×.

[0167] It is expressly contemplated that a classifier of the instant disclosure can be used to link discrete genetic signatures, clinical outcome and specific targeted therapy in clinical trials and in practice. Specifically, it is contemplated that tumors of patients with DLBCL can be analyzed prospectively with an exemplified classifier or other classifier within the scope of the instant disclosure. The resulting cluster identifications are predictive of the likelihood of response to standard combination chemotherapy and suggest rational targeted therapies based on cluster-specific biology. It is further expressly contemplated that a classifier of the instant disclosure can also be applied retrospectively to archival tissue from patients on specific clinical trials or therapies.

### Clinical Classifier Computer Interface

[0168] In some embodiments, one or more computing devices may be configured to present a DCBCL classification interface that represents the cluster identifications of the metafeatures of a gene sample matrix (GSM) array representing classes of variants of a sample. The computing device(s) each at least include a computer-readable medium, such as a random-access memory (RAM) coupled to a processor or FLASH memory. In some embodiments, the processor may execute computer-executable program instructions stored in memory. In some embodiments, the processor may include a microprocessor, an ASIC, and/or a state machine. In some embodiments, the processor may include, or may be in communication with, media, for example computer-readable media, which stores instructions that, when executed by the processor, may cause the processor to perform one or more steps described herein. In some embodiments, examples of computer-readable media may include, but are not limited to, an electronic, optical, magnetic, or other storage or transmission device capable of providing a processor, such as the processor of a computing device, with computer-readable instructions. In some embodiments, other examples of suitable media may include, but are not limited to, a floppy disk, CD-ROM, DVD, magnetic disk, memory chip, ROM, RAM, an ASIC, a configured processor, all optical media, all magnetic tape or other magnetic media, or any other medium from which a computer processor can read instructions. Also, various other forms of computer-readable media may transmit or carry instructions to a computer, including a router, private or public network, or other transmission device or channel, both wired and wireless. In some embodiments, the instructions may comprise code from any computer-programming language, including, for example, C, C++, Visual Basic, Java, Python, Perl, JavaScript, and etc.

[0169] In some embodiments, computing devices may also comprise a number of external or internal devices such as a mouse, a CD-ROM, DVD, a physical or virtual keyboard, a display, or other input or output devices. In some embodiments, examples of computing devices may be any type of processor-based platforms that are connected to a network such as, without limitation, personal computers, digital assistants, personal digital assistants, smart phones, pagers, digital tablets, laptop computers, Internet appliances, and other processor-based devices. In some embodiments, computing devices may be specifically programmed with one or more application programs in accordance with one or more principles/methodologies detailed herein. In some embodiments, computing devices may operate on any operating system capable of supporting a browser or browser-enabled application, such as Microsoft™, Windows™, and/or Linux. In some embodiments, computing devices shown may include, for example, personal computers executing a browser application program such as Microsoft Corporation's Internet Explorer™, Apple Computer, Inc.'s Safari™, Mozilla Firefox, and/or Opera.

[0170] In some embodiments, through the computing devices, users may communicate over the exemplary network with each other and/or with other systems and/or devices coupled to the network. Server devices may include a processor as well as memory. In some embodiments, the server devices may be also coupled to the network. In some embodiments, one or more computing devices may be mobile clients.

[0171] In some embodiments, at least one database may be in communication with the server devices. The database may be any type of database, including a database managed by a database management system (DBMS). In some embodiments, an exemplary DBMS-managed database may be specifically programmed as an engine that controls organization, storage, management, and/or retrieval of data in the respective database. In some embodiments, the exemplary DBMS-managed database may be specifically programmed to provide the ability to query, backup and replicate, enforce rules, provide security, compute, perform change and access logging, and/or automate optimization. In some embodiments, the exemplary DBMS-managed database may be chosen from Oracle database, IBM DB2, Adaptive Server Enterprise, FileMaker, Microsoft Access, Microsoft SQL Server, MySQL, PostgreSQL, and a NoSQL implementation. In some embodiments, the exemplary DBMS-managed database may be specifically programmed to define each respective schema of each database in the exemplary DBMS, according to a particular database model of the present disclosure which may include a hierarchical model, network model, relational model, object model, or some other suitable organization that may result in one or more applicable data structures that may include fields, records, files, and/or objects. In some embodiments, the exemplary DBMS-managed database may be specifically programmed to include metadata about the data that is stored.

[0172] In some embodiments, the server(s) may be configured use the DCBCL classification model to produce the cluster identifications of the metafeatures. The server may provide instructions across the network to cause the computing device(s) to present the DCBCL classification interface that represents the cluster identifications of the metafeatures of a gene sample matrix (GSM) array representing classes of variants of a sample. In some embodiments, to provide the DLBCL classification, the server may be specifically configured to operate in a cloud computing/architecture such as, but not limiting to: infrastructure a service (IaaS), platform as a service (PaaS), and/or software as a service (SaaS) using a web browser, mobile app, thin client, terminal emulator or other endpoint including the computing device.

[0173] In some embodiments, the cluster identifications may be presented to the user via a DLBCL classification interface rendered on a display of the computing device, e.g., via direct instruction of the processor of the computing device or by instruction over the network by the server, or a combination thereof. The DLBCL classification interface may present, e.g., a heatmap including a visualization of variants and associated cluster identifications, confidence levels of each cluster identification, and gene mutations, a list/table of each sample/metafeature and the associated confidence levels for each possible cluster identification and/or a predicted cluster with the associated confidence level, a two-dimensional or three-dimensional representation of the metafeatures, among other visualizations. In some embodiments, the two-dimensional or three-dimensional representation of the metafeatures may include a label (e.g., via color coding, shape coding, text-based labelling, etc.) of each metafeature, where the label represents that associated cluster identification. Moreover, the two-dimensional or three-dimensional representation of the metafeatures may be produced via dimensionality reduction, such as by using a suitable dimensionality reduction model including uniform manifold approximation and projection (UMAP), principle component analysis (PCA), or other dimensionality reduction model or any combination thereof.

[0174] Accordingly, the DCBCL classification model may be implemented remotely from the computing device(s), e.g., as portal to a website or cloud-based service, or may be implemented locally to each computing device(s).

### Bait Sets

[0175] Provided herein are bait sets (e.g., sets of oligonucleotide probes) for characterization of variants in a biological sample (e.g., a biological sample containing circulating tumor DNA). The bait sets can be used in combination with the method for DLBCL classification described herein to provide a targeted sequencing assay for use in the clinic. The bait sets can comprise oligonucleotide sequences targeting structural variants including translocations (SVs), somatic copy number alterations (SCNAs), and mutations. The bait sets can contain primer sequences allowing for targeted sequencing of a sample or for preparation of an amplicon(s) from a sample. In embodiments, the bait sets make up part of a targeted sequencing panel. Methods for design and manufacture of a targeted sequencing panel are known in the art (see, e.g., Moorthie, et al. “Review of massively parallel DNA sequencing technologies”, The HUGO Journal, 5:1-12 (2011)). The targeted sequencing panel can be hybridization capture-based, circularization-based, or amplicon sequencing-based. The bait sets can be used to prepare one of the biochips described above.

[0176] The below “List of Sequence Descriptions” provides information relating to baits suitable for use in targeted sequencing according to methods of the present invention. The list provides SEQ ID NOs (i.e., SEQ ID NOs: 1-9244) for bait sequences that can be used to target the indicated variant. For each bait sequence, the List of Sequence Descriptions also lists the identity of the variant targeted (Variant) by each respective bait as well as the type (e.g., FOCAL, Gene, ARM, MSI (microsatellite instability), FP (fingerprinting), and SV).

[0177] List of Sequence Descriptions: The following list provides descriptions of the sequences provided in the Sequence Listing, where in the list each SEQ ID NO is followed by the name of the targeted genetic locus, which is followed by a description of the target type in parentheses: SEQ ID NO: 1, 1p36.32_DLBCL (FOCAL); SEQ ID NO: 2, 1p36.32_DLBCL (FOCAL); SEQ ID NO: 3, 1p36.32_DLBCL (FOCAL); SEQ ID NO: 4, 1p36.32_DLBCL (FOCAL); SEQ ID NO: 5, 1p36.32_DLBCL (FOCAL); SEQ ID NO: 6, GNB1 (Gene); SEQ ID NO: 7, GNB1 (Gene); SEQ ID NO: 8, GNB1 (Gene); SEQ ID NO: 9, GNB1 (Gene); SEQ ID NO: 10, GNB1 (Gene); SEQ ID NO: 11, GNB1 (Gene); SEQ ID NO: 12, GNB1 (Gene); SEQ ID NO: 13, GNB1 (Gene); SEQ ID NO: 14, GNB1 (Gene); SEQ ID NO: 15, 1p36.32_DLBCL (FOCAL); SEQ ID NO: 16, 1p36.32_DLBCL (FOCAL); SEQ ID NO: 17, 1p36.32_DLBCL (FOCAL); SEQ ID NO: 18, TNFRSF14 (Gene); SEQ ID NO: 19, TNFRSF14 (Gene); SEQ ID NO: 20, TNFRSF14 (Gene); SEQ ID NO: 21, TNFRSF14 (Gene); SEQ ID NO: 22, TNFRSF14 (Gene); SEQ ID NO: 23, TNFRSF14 (Gene); SEQ ID NO: 24, TNFRSF14 (Gene); SEQ ID NO: 25, TNFRSF14 (Gene); SEQ ID NO: 26, 1p36.32_DLBCL (FOCAL); SEQ ID NO: 27, 1p36.32_DLBCL (FOCAL); SEQ ID NO: 28, 1p36.32_DLBCL (FOCAL); SEQ ID NO: 29, 1p36.32_DLBCL (FOCAL); SEQ ID NO: 30, 1p36.32_DLBCL (FOCAL); SEQ ID NO: 31, 1p36.32_DLBCL (FOCAL); SEQ ID NO: 32, FP (FP); SEQ ID NO: 33, 1P (ARM); SEQ ID NO: 34, 1P (ARM); SEQ ID NO: 35, MSI (MSI); SEQ ID NO: 36, MSI (MSI); SEQ ID NO: 37, 1P (ARM); SEQ ID NO: 38, 1P (ARM); SEQ ID NO: 39, PIK3CD (Gene); SEQ ID NO: 40, PIK3CD (Gene); SEQ ID NO: 41, PIK3CD (Gene); SEQ ID NO: 42, PIK3CD (Gene); SEQ ID NO: 43, PIK3CD (Gene); SEQ ID NO: 44, PIK3CD (Gene); SEQ ID NO: 45, PIK3CD (Gene); SEQ ID NO: 46, PIK3CD (Gene); SEQ ID NO: 47, PIK3CD (Gene); SEQ ID NO: 48, PIK3CD (Gene); SEQ ID NO: 49, PIK3CD (Gene); SEQ ID NO: 50, PIK3CD (Gene); SEQ ID NO: 51, PIK3CD (Gene); SEQ ID NO: 52, PIK3CD (Gene); SEQ ID NO: 53, PIK3CD (Gene); SEQ ID NO: 54, PIK3CD (Gene); SEQ ID NO: 55, PIK3CD (Gene); SEQ ID NO: 56, PIK3CD (Gene); SEQ ID NO: 57, PIK3CD (Gene); SEQ ID NO: 58, PIK3CD (Gene); SEQ ID NO: 59, PIK3CD (Gene); SEQ ID NO: 60, PIK3CD (Gene); SEQ ID NO: 61, 1P (ARM); SEQ ID NO: 62, MTOR (Gene); SEQ ID NO: 63, MTOR (Gene); SEQ ID NO: 64, MTOR (Gene); SEQ ID NO: 65, MTOR (Gene); SEQ ID NO: 66, MTOR (Gene); SEQ ID NO: 67, MTOR (Gene); SEQ ID NO: 68, MTOR (Gene); SEQ ID NO: 69, MTOR (Gene); SEQ ID NO: 70, MTOR (Gene); SEQ ID NO: 71, MTOR (Gene); SEQ ID NO: 72, MTOR (Gene); SEQ ID NO: 73, MTOR (Gene); SEQ ID NO: 74, MTOR (Gene); SEQ ID NO: 75, MTOR (Gene); SEQ ID NO: 76, MTOR (Gene); SEQ ID NO: 77, MTOR (Gene); SEQ ID NO: 78, MTOR (Gene); SEQ ID NO: 79, MTOR (Gene); SEQ ID NO: 80, MTOR (Gene); SEQ ID NO: 81, MTOR (Gene); SEQ ID NO: 82, MTOR (Gene); SEQ ID NO: 83, MTOR (Gene); SEQ ID NO: 84, MTOR (Gene); SEQ ID NO: 85, MTOR (Gene); SEQ ID NO: 86, MTOR (Gene); SEQ ID NO: 87, MTOR (Gene); SEQ ID NO: 88, MTOR (Gene); SEQ ID NO: 89, MTOR (Gene); SEQ ID NO: 90, MTOR (Gene); SEQ ID NO: 91, MTOR (Gene); SEQ ID NO: 92, MTOR (Gene); SEQ ID NO: 93, MTOR (Gene); SEQ ID NO: 94, MTOR (Gene); SEQ ID NO: 95, MTOR (Gene); SEQ ID NO: 96, MTOR (Gene); SEQ ID NO: 97, MTOR (Gene); SEQ ID NO: 98, MTOR (Gene); SEQ ID NO: 99, MTOR (Gene); SEQ ID NO: 100, MTOR (Gene); SEQ ID NO: 101, MTOR (Gene); SEQ ID NO: 102, MTOR (Gene); SEQ ID NO: 103, MTOR (Gene); SEQ ID NO: 104, MTOR (Gene); SEQ ID NO: 105, MTOR (Gene); SEQ ID NO: 106, MTOR (Gene); SEQ ID NO: 107, MTOR (Gene); SEQ ID NO: 108, MTOR (Gene); SEQ ID NO: 109, MTOR (Gene); SEQ ID NO: 110, MTOR (Gene); SEQ ID NO: 111, MTOR (Gene); SEQ ID NO: 112, MTOR (Gene); SEQ ID NO: 113, MTOR (Gene); SEQ ID NO: 114, MTOR (Gene); SEQ ID NO: 115, MTOR (Gene); SEQ ID NO: 116, MTOR (Gene); SEQ ID NO: 117, MTOR (Gene); SEQ ID NO: 118, MTOR (Gene); SEQ ID NO: 119, MTOR (Gene); SEQ ID NO: 120, MTOR (Gene); SEQ ID NO: 121, MTOR (Gene); SEQ ID NO: 122, 1P (ARM); SEQ ID NO: 123, TNFRSF8 (Gene); SEQ ID NO: 124, TNFRSF8 (Gene); SEQ ID NO: 125, TNFRSF8 (Gene); SEQ ID NO: 126, TNFRSF8 (Gene); SEQ ID NO: 127, TNFRSF8 (Gene); SEQ ID NO: 128, TNFRSF8 (Gene); SEQ ID NO: 129, TNFRSF8 (Gene); SEQ ID NO: 130, TNFRSF8 (Gene); SEQ ID NO: 131, TNFRSF8 (Gene); SEQ ID NO: 132, TNFRSF8 (Gene); SEQ ID NO: 133, TNFRSF8 (Gene); SEQ ID NO: 134, TNFRSF8 (Gene); SEQ ID NO: 135, TNFRSF8 (Gene); SEQ ID NO: 136, TNFRSF8 (Gene); SEQ ID NO: 137, TNFRSF8 (Gene); SEQ ID NO: 138, TNFRSF8 (Gene); SEQ ID NO: 139, FP (FP); SEQ ID NO: 140, 1P (ARM); SEQ ID NO: 141, 1P (ARM); SEQ ID NO: 142, FP (FP); SEQ ID NO: 143, 1P (ARM); SEQ ID NO: 144, SPEN (Gene); SEQ ID NO: 145, SPEN (Gene); SEQ ID NO: 146, SPEN (Gene); SEQ ID NO: 147, SPEN (Gene); SEQ ID NO: 148, SPEN (Gene); SEQ ID NO: 149, SPEN (Gene); SEQ ID NO: 150, SPEN (Gene); SEQ ID NO: 151, SPEN (Gene); SEQ ID NO: 152, SPEN (Gene); SEQ ID NO: 153, SPEN (Gene); SEQ ID NO: 154, SPEN (Gene); SEQ ID NO: 155, SPEN (Gene); SEQ ID NO: 156, SPEN (Gene); SEQ ID NO: 157, SPEN (Gene); SEQ ID NO: 158, SPEN (Gene); SEQ ID NO: 159, SPEN (Gene); SEQ ID NO: 160, SPEN (Gene); SEQ ID NO: 161, SPEN (Gene); SEQ ID NO: 162, SPEN (Gene); SEQ ID NO: 163, SPEN (Gene); SEQ ID NO: 164, SPEN (Gene); SEQ ID NO: 165, SPEN (Gene); SEQ ID NO: 166, SPEN (Gene); SEQ ID NO: 167, SPEN (Gene); SEQ ID NO: 168, SPEN (Gene); SEQ ID NO: 169, SPEN (Gene); SEQ ID NO: 170, SPEN (Gene); SEQ ID NO: 171, SPEN (Gene); SEQ ID NO: 172, SPEN (Gene); SEQ ID NO: 173, SPEN (Gene); SEQ ID NO: 174, SPEN (Gene); SEQ ID NO: 175, SPEN (Gene); SEQ ID NO: 176, SPEN (Gene); SEQ ID NO: 177, SPEN (Gene); SEQ ID NO: 178, 1P (ARM); SEQ ID NO: 179, 1P (ARM); SEQ ID NO: 180, 1P (ARM); SEQ ID NO: 181, 1P (ARM); SEQ ID NO: 182, MSI (MSI); SEQ ID NO: 183, MSI (MSI); SEQ ID NO: 184, 1P (ARM); SEQ ID NO: 185, 1p36.11_DLBCL (FOCAL); SEQ ID NO: 186, 1p36.11_DLBCL (FOCAL); SEQ ID NO: 187, 1p36.11_DLBCL (FOCAL); SEQ ID NO: 188, 1p36.11_DLBCL (FOCAL); SEQ ID NO: 189, 1p36.11_DLBCL (FOCAL); SEQ ID NO: 190, ARID1A (Gene); SEQ ID NO: 191, ARID1A (Gene); SEQ ID NO: 192, ARID1A (Gene); SEQ ID NO: 193, ARID1A (Gene); SEQ ID NO: 194, ARID1A (Gene); SEQ ID NO: 195, ARID1A (Gene); SEQ ID NO: 196, ARID1A (Gene); SEQ ID NO: 197, ARID1A (Gene); SEQ ID NO: 198, ARID1A (Gene); SEQ ID NO: 199, ARID1A (Gene); SEQ ID NO: 200, ARID1A (Gene); SEQ ID NO: 201, ARID1A (Gene); SEQ ID NO: 202, ARID1A (Gene); SEQ ID NO: 203, ARID1A (Gene); SEQ ID NO: 204, ARID1A (Gene); SEQ ID NO: 205, ARID1A (Gene); SEQ ID NO: 206, ARID1A (Gene); SEQ ID NO: 207, ARID1A (Gene); SEQ ID NO: 208, ARID1A (Gene); SEQ ID NO: 209, ARID1A (Gene); SEQ ID NO: 210, ARID1A (Gene); SEQ ID NO: 211, ARID1A (Gene); SEQ ID NO: 212, ARID1A (Gene); SEQ ID NO: 213, ARID1A (Gene); SEQ ID NO: 214, ARID1A (Gene); SEQ ID NO: 215, ARID1A (Gene); SEQ ID NO: 216, ARID1A (Gene); SEQ ID NO: 217, 1p36.11_DLBCL (FOCAL); SEQ ID NO: 218, 1p36.11_DLBCL (FOCAL); SEQ ID NO: 219, MSI (MSI); SEQ ID NO: 220, MSI (MSI); SEQ ID NO: 221, 1p36.11_DLBCL (FOCAL); SEQ ID NO: 222, 1p36.11_DLBCL (FOCAL); SEQ ID NO: 223, 1p36.11_DLBCL (FOCAL); SEQ ID NO: 224, 1P (ARM); SEQ ID NO: 225, 1P (ARM); SEQ ID NO: 226, 1P (ARM); SEQ ID NO: 227, 1P (ARM); SEQ ID NO: 228, 1P (ARM); SEQ ID NO: 229, 1P (ARM); SEQ ID NO: 230, 1P (ARM); SEQ ID NO: 231, 1P (ARM); SEQ ID NO: 232, 1P (ARM); SEQ ID NO: 233, MSI (MSI); SEQ ID NO: 234, MSI (MSI); SEQ ID NO: 235, 1P (ARM); SEQ ID NO: 236, ZC3H12A (Gene); SEQ ID NO: 237, ZC3H12A (Gene); SEQ ID NO: 238, ZC3H12A (Gene); SEQ ID NO: 239, ZC3H12A (Gene); SEQ ID NO: 240, ZC3H12A (Gene); SEQ ID NO: 241, ZC3H12A (Gene); SEQ ID NO: 242, 1P (ARM); SEQ ID NO: 243, 1P (ARM); SEQ ID NO: 244, 1P (ARM); SEQ ID NO: 245, 1P (ARM); SEQ ID NO: 246, 1P (ARM); SEQ ID NO: 247, 1P (ARM); SEQ ID NO: 248, 1P (ARM); SEQ ID NO: 249, 1P (ARM); SEQ ID NO: 250, 1P (ARM); SEQ ID NO: 251, 1P (ARM); SEQ ID NO: 252, 1P (ARM); SEQ ID NO: 253, 1P (ARM); SEQ ID NO: 254, 1P (ARM); SEQ ID NO: 255, 1P (ARM); SEQ ID NO: 256, 1P (ARM); SEQ ID NO: 257, 1P (ARM); SEQ ID NO: 258, 1P (ARM); SEQ ID NO: 259, 1P (ARM); SEQ ID NO: 260, 1P (ARM); SEQ ID NO: 261, 1P (ARM); SEQ ID NO: 262, 1P (ARM); SEQ ID NO: 263, JAK1 (Gene); SEQ ID NO: 264, JAK1 (Gene); SEQ ID NO: 265, JAK1 (Gene); SEQ ID NO: 266, JAK1 (Gene); SEQ ID NO: 267, JAK1 (Gene); SEQ ID NO: 268, JAK1 (Gene); SEQ ID NO: 269, JAK1 (Gene); SEQ ID NO: 270, JAK1 (Gene); SEQ ID NO: 271, JAK1 (Gene); SEQ ID NO: 272, JAK1 (Gene); SEQ ID NO: 273, JAK1 (Gene); SEQ ID NO: 274, JAK1 (Gene); SEQ ID NO: 275, JAK1 (Gene); SEQ ID NO: 276, JAK1 (Gene); SEQ ID NO: 277, JAK1 (Gene); SEQ ID NO: 278, JAK1 (Gene); SEQ ID NO: 279, JAK1 (Gene); SEQ ID NO: 280, JAK1 (Gene); SEQ ID NO: 281, JAK1 (Gene); SEQ ID NO: 282, JAK1 (Gene); SEQ ID NO: 283, JAK1 (Gene); SEQ ID NO: 284, JAK1 (Gene); SEQ ID NO: 285, JAK1 (Gene); SEQ ID NO: 286, JAK1 (Gene); SEQ ID NO: 287, 1P (ARM); SEQ ID NO: 288, 1P (ARM); SEQ ID NO: 289, 1P (ARM); SEQ ID NO: 290, 1P (ARM); SEQ ID NO: 291, 1P (ARM); SEQ ID NO: 292, 1P (ARM); SEQ ID NO: 293, 1P (ARM); SEQ ID NO: 294, 1P (ARM); SEQ ID NO: 295, 1p31.1_DLBCL (FOCAL); SEQ ID NO: 296, 1p31.1_DLBCL (FOCAL); SEQ ID NO: 297, 1p31.1_DLBCL (FOCAL); SEQ ID NO: 298, 1p31.1_DLBCL (FOCAL); SEQ ID NO: 299, 1p31.1_DLBCL (FOCAL); SEQ ID NO: 300, 1p31.1_DLBCL (FOCAL); SEQ ID NO: 301, 1p31.1_DLBCL (FOCAL); SEQ ID NO: 302, 1p31.1_DLBCL (FOCAL); SEQ ID NO: 303, 1p31.1_DLBCL (FOCAL); SEQ ID NO: 304, 1p31.1_DLBCL (FOCAL); SEQ ID NO: 305, 1p31.1_DLBCL (FOCAL); SEQ ID NO: 306, 1p31.1_DLBCL (FOCAL); SEQ ID NO: 307, 1p31.1_DLBCL (FOCAL); SEQ ID NO: 308, 1p31.1_DLBCL (FOCAL); SEQ ID NO: 309, 1p31.1_DLBCL (FOCAL); SEQ ID NO: 310, 1p31.1_DLBCL (FOCAL); SEQ ID NO: 311, 1p31.1_DLBCL (FOCAL); SEQ ID NO: 312, 1p31.1_DLBCL (FOCAL); SEQ ID NO: 313, 1p31.1_DLBCL (FOCAL); SEQ ID NO: 314, 1p31.1_DLBCL (FOCAL); SEQ ID NO: 315, 1p31.1_DLBCL (FOCAL); SEQ ID NO: 316, 1p31.1_DLBCL (FOCAL); SEQ ID NO: 317, 1p31.1_DLBCL (FOCAL); SEQ ID NO: 318, 1p31.1_DLBCL (FOCAL); SEQ ID NO: 319, 1p31.1_DLBCL (FOCAL); SEQ ID NO: 320, 1p31.1_DLBCL (FOCAL); SEQ ID NO: 321, 1p31.1_DLBCL (FOCAL); SEQ ID NO: 322, 1p31.1_DLBCL (FOCAL); SEQ ID NO: 323, 1p21-p22_MCL (FOCAL); SEQ ID NO: 324, 1p21-p22_MCL (FOCAL); SEQ ID NO: 325, 1p21-p22_MCL (FOCAL); SEQ ID NO: 326, BCL10 (Gene); SEQ ID NO: 327, BCL10 (Gene); SEQ ID NO: 328, BCL10 (Gene); SEQ ID NO: 329, 1p21-p22_MCL (FOCAL); SEQ ID NO: 330, 1p21-p22_MCL (FOCAL); SEQ ID NO: 331, 1p21-p22_MCL (FOCAL); SEQ ID NO: 332, 1p21-p22_MCL (FOCAL); SEQ ID NO: 333, 1p21-p22_MCL (FOCAL); SEQ ID NO: 334, 1p21-p22_MCL (FOCAL); SEQ ID NO: 335, 1p21-p22_MCL (FOCAL); SEQ ID NO: 336, 1p21-p22_MCL (FOCAL); SEQ ID NO: 337, 1p21-p22_MCL (FOCAL); SEQ ID NO: 338, 1p21-p22_MCL (FOCAL); SEQ ID NO: 339, 1p21-p22_MCL (FOCAL); SEQ ID NO: 340, 1p21-p22_MCL (FOCAL); SEQ ID NO: 341, 1p21-p22_MCL (FOCAL); SEQ ID NO: 342, 1p21-p22_MCL (FOCAL); SEQ ID NO: 343, 1p21-p22_MCL (FOCAL); SEQ ID NO: 344, 1p21-p22_MCL (FOCAL); SEQ ID NO: 345, 1p21-p22_MCL (FOCAL); SEQ ID NO: 346, 1p21-p22_MCL (FOCAL); SEQ ID NO: 347, 1p21-p22_MCL (FOCAL); SEQ ID NO: 348, 1p21-p22_MCL (FOCAL); SEQ ID NO: 349, 1p21-p22_MCL (FOCAL); SEQ ID NO: 350, 1p21-p22_MCL (FOCAL); SEQ ID NO: 351, 1p21-p22_MCL (FOCAL); SEQ ID NO: 352, 1p21-p22_MCL (FOCAL); SEQ ID NO: 353, 1p21-p22_MCL (FOCAL); SEQ ID NO: 354, 1p21-p22_MCL (FOCAL); SEQ ID NO: 355, 1p21-p22_MCL (FOCAL); SEQ ID NO: 356, 1p21-p22_MCL (FOCAL); SEQ ID NO: 357, 1p21-p22_MCL (FOCAL); SEQ ID NO: 358, 1p21-p22_MCL (FOCAL); SEQ ID NO: 359, 1p21-p22_MCL (FOCAL); SEQ ID NO: 360, 1p21-p22_MCL (FOCAL); SEQ ID NO: 361, 1p21-p22_MCL (FOCAL); SEQ ID NO: 362, 1p21-p22_MCL (FOCAL); SEQ ID NO: 363, 1p21-p22_MCL (FOCAL); SEQ ID NO: 364, 1p21-p22_MCL (FOCAL); SEQ ID NO: 365, 1p21-p22_MCL (FOCAL); SEQ ID NO: 366, 1p21-p22_MCL (FOCAL); SEQ ID NO: 367, MSI (MSI); SEQ ID NO: 368, MSI (MSI); SEQ ID NO: 369, 1p21-p22_MCL (FOCAL); SEQ ID NO: 370, 1p21-p22_MCL (FOCAL); SEQ ID NO: 371, 1p21-p22_MCL (FOCAL); SEQ ID NO: 372, 1p21-p22_MCL (FOCAL); SEQ ID NO: 373, 1p21-p22_MCL (FOCAL); SEQ ID NO: 374, 1p21-p22_MCL (FOCAL); SEQ ID NO: 375, 1p21-p22_MCL (FOCAL); SEQ ID NO: 376, 1p21-p22_MCL (FOCAL); SEQ ID NO: 377, 1p21-p22_MCL (FOCAL); SEQ ID NO: 378, 1p21-p22_MCL (FOCAL); SEQ ID NO: 379, 1p21-p22_MCL (FOCAL); SEQ ID NO: 380, 1p21-p22_MCL (FOCAL); SEQ ID NO: 381, 1p21-p22_MCL (FOCAL); SEQ ID NO: 382, 1p21-p22_MCL (FOCAL); SEQ ID NO: 383, 1p21-p22_MCL (FOCAL); SEQ ID NO: 384, 1p21-p22_MCL (FOCAL); SEQ ID NO: 385, 1p21-p22_MCL (FOCAL); SEQ ID NO: 386, 1p21-p22_MCL (FOCAL); SEQ ID NO: 387, 1p21-p22_MCL (FOCAL); SEQ ID NO: 388, 1p21-p22_MCL (FOCAL); SEQ ID NO: 389, 1p21-p22_MCL (FOCAL); SEQ ID NO: 390, 1p21-p22_MCL (FOCAL); SEQ ID NO: 391, 1p21-p22_MCL (FOCAL); SEQ ID NO: 392, 1p21-p22_MCL (FOCAL); SEQ ID NO: 393, 1p21-p22_MCL (FOCAL); SEQ ID NO: 394, 1p21-p22_MCL (FOCAL); SEQ ID NO: 395, 1p21-p22_MCL (FOCAL); SEQ ID NO: 396, 1p21-p22_MCL (FOCAL); SEQ ID NO: 397, 1p21-p22_MCL (FOCAL); SEQ ID NO: 398, 1p21-p22_MCL (FOCAL); SEQ ID NO: 399, 1p21-p22_MCL (FOCAL); SEQ ID NO: 400, 1p21-p22_MCL (FOCAL); SEQ ID NO: 401, 1p21-p22_MCL (FOCAL); SEQ ID NO: 402, 1p21-p22_MCL (FOCAL); SEQ ID NO: 403, 1p21-p22_MCL (FOCAL); SEQ ID NO: 404, 1p21-p22_MCL (FOCAL); SEQ ID NO: 405, 1p21-p22_MCL (FOCAL); SEQ ID NO: 406, 1p21-p22_MCL (FOCAL); SEQ ID NO: 407, 1p21-p22_MCL (FOCAL); SEQ ID NO: 408, 1p21-p22_MCL (FOCAL); SEQ ID NO: 409, 1p21-p22_MCL (FOCAL); SEQ ID NO: 410, 1p21-p22_MCL (FOCAL); SEQ ID NO: 411, 1p21-p22_MCL (FOCAL); SEQ ID NO: 412, 1p21-p22_MCL (FOCAL); SEQ ID NO: 413, 1p21-p22_MCL (FOCAL); SEQ ID NO: 414, 1p21-p22_MCL (FOCAL); SEQ ID NO: 415, 1p21-p22_MCL (FOCAL); SEQ ID NO: 416, 1p21-p22_MCL (FOCAL); SEQ ID NO: 417, 1p21-p22_MCL (FOCAL); SEQ ID NO: 418, 1p21-p22_MCL (FOCAL); SEQ ID NO: 419, 1p21-p22_MCL (FOCAL); SEQ ID NO: 420, 1p21-p22_MCL (FOCAL); SEQ ID NO: 421, 1P (ARM); SEQ ID NO: 422, 1P (ARM); SEQ ID NO: 423, 1P (ARM); SEQ ID NO: 424, 1P (ARM); SEQ ID NO: 425, 1P (ARM); SEQ ID NO: 426, 1P (ARM); SEQ ID NO: 427, 1p13.1_DLBCL (FOCAL); SEQ ID NO: 428, 1p13.1_DLBCL (FOCAL); SEQ ID NO: 429, 1p13.1_DLBCL (FOCAL); SEQ ID NO: 430, 1p13.1_DLBCL (FOCAL); SEQ ID NO: 431, 1p13.1_DLBCL (FOCAL); SEQ ID NO: 432, NRAS (Gene); SEQ ID NO: 433, NRAS (Gene); SEQ ID NO: 434, NRAS (Gene); SEQ ID NO: 435, NRAS (Gene); SEQ ID NO: 436, 1p13.1_DLBCL (FOCAL); SEQ ID NO: 437, 1p13.1_DLBCL (FOCAL); SEQ ID NO: 438, 1p13.1_DLBCL (FOCAL); SEQ ID NO: 439, 1p13.1_DLBCL (FOCAL); SEQ ID NO: 440, 1p13.1_DLBCL (FOCAL); SEQ ID NO: 441, 1p13.1_DLBCL (FOCAL); SEQ ID NO: 442, 1p13.1_DLBCL (FOCAL); SEQ ID NO: 443, 1p13.1_DLBCL (FOCAL); SEQ ID NO: 444, CD58 (Gene); SEQ ID NO: 445, CD58 (Gene); SEQ ID NO: 446, CD58 (Gene); SEQ ID NO: 447, CD58 (Gene); SEQ ID NO: 448, CD58 (Gene); SEQ ID NO: 449, CD58 (Gene); SEQ ID NO: 450, 1p13.1_DLBCL (FOCAL); SEQ ID NO: 451, 1p13.1_DLBCL (FOCAL); SEQ ID NO: 452, 1p13.1_DLBCL (FOCAL); SEQ ID NO: 453, 1p13.1_DLBCL (FOCAL); SEQ ID NO: 454, 1p13.1_DLBCL (FOCAL); SEQ ID NO: 455, 1p13.1_DLBCL (FOCAL); SEQ ID NO: 456, 1P (ARM); SEQ ID NO: 457, NOTCH2 (Gene); SEQ ID NO: 458, NOTCH2 (Gene); SEQ ID NO: 459, NOTCH2 (Gene); SEQ ID NO: 460, NOTCH2 (Gene); SEQ ID NO: 461, NOTCH2 (Gene); SEQ ID NO: 462, NOTCH2 (Gene); SEQ ID NO: 463, NOTCH2 (Gene); SEQ ID NO: 464, NOTCH2 (Gene); SEQ ID NO: 465, NOTCH2 (Gene); SEQ ID NO: 466, NOTCH2 (Gene); SEQ ID NO: 467, NOTCH2 (Gene); SEQ ID NO: 468, NOTCH2 (Gene); SEQ ID NO: 469, NOTCH2 (Gene); SEQ ID NO: 470, NOTCH2 (Gene); SEQ ID NO: 471, NOTCH2 (Gene); SEQ ID NO: 472, NOTCH2 (Gene); SEQ ID NO: 473, NOTCH2 (Gene); SEQ ID NO: 474, NOTCH2 (Gene); SEQ ID NO: 475, NOTCH2 (Gene); SEQ ID NO: 476, NOTCH2 (Gene); SEQ ID NO: 477, NOTCH2 (Gene); SEQ ID NO: 478, NOTCH2 (Gene); SEQ ID NO: 479, NOTCH2 (Gene); SEQ ID NO: 480, NOTCH2 (Gene); SEQ ID NO: 481, NOTCH2 (Gene); SEQ ID NO: 482, NOTCH2 (Gene); SEQ ID NO: 483, NOTCH2 (Gene); SEQ ID NO: 484, NOTCH2 (Gene); SEQ ID NO: 485, NOTCH2 (Gene); SEQ ID NO: 486, NOTCH2 (Gene); SEQ ID NO: 487, NOTCH2 (Gene); SEQ ID NO: 488, NOTCH2 (Gene); SEQ ID NO: 489, NOTCH2 (Gene); SEQ ID NO: 490, NOTCH2 (Gene); SEQ ID NO: 491, NOTCH2 (Gene); SEQ ID NO: 492, NOTCH2 (Gene); SEQ ID NO: 493, NOTCH2 (Gene); SEQ ID NO: 494, 1q23.3_DLBCL (FOCAL); SEQ ID NO: 495, PDE4DIP (Gene); SEQ ID NO: 496, PDE4DIP (Gene); SEQ ID NO: 497, PDE4DIP (Gene); SEQ ID NO: 498, PDE4DIP (Gene); SEQ ID NO: 499, PDE4DIP (Gene); SEQ ID NO: 500, PDE4DIP (Gene); SEQ ID NO: 501, PDE4DIP (Gene); SEQ ID NO: 502, PDE4DIP (Gene); SEQ ID NO: 503, PDE4DIP (Gene); SEQ ID NO: 504, PDE4DIP (Gene); SEQ ID NO: 505, PDE4DIP (Gene); SEQ ID NO: 506, PDE4DIP (Gene); SEQ ID NO: 507, PDE4DIP (Gene); SEQ ID NO: 508, PDE4DIP (Gene); SEQ ID NO: 509, PDE4DIP (Gene); SEQ ID NO: 510, PDE4DIP (Gene); SEQ ID NO: 511, PDE4DIP (Gene); SEQ ID NO: 512, PDE4DIP (Gene); SEQ ID NO: 513, PDE4DIP (Gene); SEQ ID NO: 514, PDE4DIP (Gene); SEQ ID NO: 515, PDE4DIP (Gene); SEQ ID NO: 516, PDE4DIP (Gene); SEQ ID NO: 517, PDE4DIP (Gene); SEQ ID NO: 518, PDE4DIP (Gene); SEQ ID NO: 519, PDE4DIP (Gene); SEQ ID NO: 520, PDE4DIP (Gene); SEQ ID NO: 521, PDE4DIP (Gene); SEQ ID NO: 522, PDE4DIP (Gene); SEQ ID NO: 523, PDE4DIP (Gene); SEQ ID NO: 524, PDE4DIP (Gene); SEQ ID NO: 525, PDE4DIP (Gene); SEQ ID NO: 526, PDE4DIP (Gene); SEQ ID NO: 527, PDE4DIP (Gene); SEQ ID NO: 528, PDE4DIP (Gene); SEQ ID NO: 529, PDE4DIP (Gene); SEQ ID NO: 530, PDE4DIP (Gene); SEQ ID NO: 531, PDE4DIP (Gene); SEQ ID NO: 532, PDE4DIP (Gene); SEQ ID NO: 533, PDE4DIP (Gene); SEQ ID NO: 534, PDE4DIP (Gene); SEQ ID NO: 535, PDE4DIP (Gene); SEQ ID NO: 536, PDE4DIP (Gene); SEQ ID NO: 537, PDE4DIP (Gene); SEQ ID NO: 538, PDE4DIP (Gene); SEQ ID NO: 539, PDE4DIP (Gene); SEQ ID NO: 540, PDE4DIP (Gene); SEQ ID NO: 541, PDE4DIP (Gene); SEQ ID NO: 542, PDE4DIP (Gene); SEQ ID NO: 543, PDE4DIP (Gene); SEQ ID NO: 544, PDE4DIP (Gene); SEQ ID NO: 545, PDE4DIP (Gene); SEQ ID NO: 546, PDE4DIP (Gene); SEQ ID NO: 547, PDE4DIP (Gene); SEQ ID NO: 548, PDE4DIP (Gene); SEQ ID NO: 549, 1q23.3_DLBCL (FOCAL); SEQ ID NO: 550, PDE4DIP (Gene); SEQ ID NO: 551, 1q23.3_DLBCL (FOCAL); SEQ ID NO: 552, 1q23.3_DLBCL (FOCAL); SEQ ID NO: 553, 1q23.3_DLBCL (FOCAL); SEQ ID NO: 554, 1q23.3_DLBCL (FOCAL); SEQ ID NO: 555, 1q23.3_DLBCL (FOCAL); SEQ ID NO: 556, 1q23.3_DLBCL (FOCAL); SEQ ID NO: 557, 1q23.3_DLBCL (FOCAL); SEQ ID NO: 558, 1q23.3_DLBCL (FOCAL); SEQ ID NO: 559, 1q23.3_DLBCL (FOCAL); SEQ ID NO: 560, HIST2H2BE (Gene); SEQ ID NO: 561, 1q23.3_DLBCL (FOCAL); SEQ ID NO: 562, 1q23.3_DLBCL (FOCAL); SEQ ID NO: 563, 1q23.3_DLBCL (FOCAL); SEQ ID NO: 564, MCL1 (Gene); SEQ ID NO: 565, MCL1 (Gene); SEQ ID NO: 566, MCL1 (Gene); SEQ ID NO: 567, MCL1 (Gene); SEQ ID NO: 568, MCL1 (Gene); SEQ ID NO: 569, 1q23.3_DLBCL (FOCAL); SEQ ID NO: 570, SETDB1 (Gene); SEQ ID NO: 571, SETDB1 (Gene); SEQ ID NO: 572, SETDB1 (Gene); SEQ ID NO: 573, SETDB1 (Gene); SEQ ID NO: 574, SETDB1 (Gene); SEQ ID NO: 575, SETDB1 (Gene); SEQ ID NO: 576, SETDB1 (Gene); SEQ ID NO: 577, SETDB1 (Gene); SEQ ID NO: 578, SETDB1 (Gene); SEQ ID NO: 579, SETDB1 (Gene); SEQ ID NO: 580, SETDB1 (Gene); SEQ ID NO: 581, SETDB1 (Gene); SEQ ID NO: 582, SETDB1 (Gene); SEQ ID NO: 583, SETDB1 (Gene); SEQ ID NO: 584, SETDB1 (Gene); SEQ ID NO: 585, SETDB1 (Gene); SEQ ID NO: 586, SETDB1 (Gene); SEQ ID NO: 587, SETDB1 (Gene); SEQ ID NO: 588, SETDB1 (Gene); SEQ ID NO: 589, SETDB1 (Gene); SEQ ID NO: 590, SETDB1 (Gene); SEQ ID NO: 591, SETDB1 (Gene); SEQ ID NO: 592, SETDB1 (Gene); SEQ ID NO: 593, SETDB1 (Gene); SEQ ID NO: 594, 1q23.3_DLBCL (FOCAL); SEQ ID NO: 595, 1q23.3_DLBCL (FOCAL); SEQ ID NO: 596, 1q23.3_DLBCL (FOCAL); SEQ ID NO: 597, 1q23.3_DLBCL (FOCAL); SEQ ID NO: 598, 1q23.3_DLBCL (FOCAL); SEQ ID NO: 599, 1q23.3_DLBCL (FOCAL); SEQ ID NO: 600, 1q23.3_DLBCL (FOCAL); SEQ ID NO: 601, 1q23.3_DLBCL (FOCAL); SEQ ID NO: 602, 1q23.3_DLBCL (FOCAL); SEQ ID NO: 603, 1q23.3_DLBCL (FOCAL); SEQ ID NO: 604, 1q23.3_DLBCL (FOCAL); SEQ ID NO: 605, 1q23.3_DLBCL (FOCAL); SEQ ID NO: 606, 1q23.3_DLBCL (FOCAL); SEQ ID NO: 607, 1q23.3_DLBCL (FOCAL); SEQ ID NO: 608, 1q23.3_DLBCL (FOCAL); SEQ ID NO: 609, 1q23.3_DLBCL (FOCAL); SEQ ID NO: 610, 1q23.3_DLBCL (FOCAL); SEQ ID NO: 611, 1q23.3_DLBCL (FOCAL); SEQ ID NO: 612, 1q23.3_DLBCL (FOCAL); SEQ ID NO: 613, 1q23.3_DLBCL (FOCAL); SEQ ID NO: 614, 1q23.3_DLBCL (FOCAL); SEQ ID NO: 615, MSI (MSI); SEQ ID NO: 616, MSI (MSI); SEQ ID NO: 617, 1q23.3_DLBCL (FOCAL); SEQ ID NO: 618, 1q23.3_DLBCL (FOCAL); SEQ ID NO: 619, 1q23.3_DLBCL (FOCAL); SEQ ID NO: 620, 1q23.3_DLBCL (FOCAL); SEQ ID NO: 621, 1q23.3_DLBCL (FOCAL); SEQ ID NO: 622, 1q23.3_DLBCL (FOCAL); SEQ ID NO: 623, NTRK1 (Gene); SEQ ID NO: 624, NTRK1 (Gene); SEQ ID NO: 625, NTRK1 (Gene); SEQ ID NO: 626, NTRK1 (Gene); SEQ ID NO: 627, NTRK1 (Gene); SEQ ID NO: 628, NTRK1 (Gene); SEQ ID NO: 629, NTRK1 (Gene); SEQ ID NO: 630, NTRK1 (Gene); SEQ ID NO: 631, NTRK1 (Gene); SEQ ID NO: 632, NTRK1 (Gene); SEQ ID NO: 633, NTRK1 (Gene); SEQ ID NO: 634, NTRK1 (Gene); SEQ ID NO: 635, NTRK1 (Gene); SEQ ID NO: 636, NTRK1 (Gene); SEQ ID NO: 637, NTRK1 (Gene); SEQ ID NO: 638, NTRK1 (Gene); SEQ ID NO: 639, NTRK1 (Gene); SEQ ID NO: 640, NTRK1 (Gene); SEQ ID NO: 641, NTRK1 (Gene); SEQ ID NO: 642, NTRK1 (Gene); SEQ ID NO: 643, 1q23.3_DLBCL (FOCAL); SEQ ID NO: 644, 1q23.3_DLBCL (FOCAL); SEQ ID NO: 645, 1q23.3_DLBCL (FOCAL); SEQ ID NO: 646, 1q23.3_DLBCL (FOCAL); SEQ ID NO: 647, 1q23.3_DLBCL (FOCAL); SEQ ID NO: 648, 1q23.3_DLBCL (FOCAL); SEQ ID NO: 649, 1q23.3_DLBCL (FOCAL); SEQ ID NO: 650, FP (FP); SEQ ID NO: 651, 1q23.3_DLBCL (FOCAL); SEQ ID NO: 652, 1q23.3_DLBCL (FOCAL); SEQ ID NO: 653, 1q23.3_DLBCL (FOCAL); SEQ ID NO: 654, 1q23.3_DLBCL (FOCAL); SEQ ID NO: 655, 1q23.3_DLBCL (FOCAL); SEQ ID NO: 656, 1q23.3_DLBCL (FOCAL); SEQ ID NO: 657, 1q23.3_DLBCL (FOCAL); SEQ ID NO: 658, 1q23.3_DLBCL (FOCAL); SEQ ID NO: 659, 1q23.3_DLBCL (FOCAL); SEQ ID NO: 660, 1q23.3_DLBCL (FOCAL); SEQ ID NO: 661, 1q23.3_DLBCL (FOCAL); SEQ ID NO: 662, 1q23.3_DLBCL (FOCAL); SEQ ID NO: 663, 1q23.3_DLBCL (FOCAL); SEQ ID NO: 664, 1q23.3_DLBCL (FOCAL); SEQ ID NO: 665, 1q23.3_DLBCL (FOCAL); SEQ ID NO: 666, 1q23.3_DLBCL (FOCAL); SEQ ID NO: 667, 1q23.3_DLBCL (FOCAL); SEQ ID NO: 668, 1q23.3_DLBCL (FOCAL); SEQ ID NO: 669, 1q23.3_DLBCL (FOCAL); SEQ ID NO: 670, 1q23.3_DLBCL (FOCAL); SEQ ID NO: 671, 1q23.3_DLBCL (FOCAL); SEQ ID NO: 672, 1q23.3_DLBCL (FOCAL); SEQ ID NO: 673, 1q23.3_DLBCL (FOCAL); SEQ ID NO: 674, 1q23.3_DLBCL (FOCAL); SEQ ID NO: 675, 1q23.3_DLBCL (FOCAL); SEQ ID NO: 676, 1q23.3_DLBCL (FOCAL); SEQ ID NO: 677, 1q23.3_DLBCL (FOCAL); SEQ ID NO: 678, 1q23.3_DLBCL (FOCAL); SEQ ID NO: 679, 1q23.3_DLBCL (FOCAL); SEQ ID NO: 680, 1q23.3_DLBCL (FOCAL); SEQ ID NO: 681, 1q23.3_DLBCL (FOCAL); SEQ ID NO: 682, 1q23.3_DLBCL (FOCAL); SEQ ID NO: 683, 1q23.3_DLBCL (FOCAL); SEQ ID NO: 684, 1q23.3_DLBCL (FOCAL); SEQ ID NO: 685, 1q23.3_DLBCL (FOCAL); SEQ ID NO: 686, 1q23.3_DLBCL (FOCAL); SEQ ID NO: 687, 1q23.3_DLBCL (FOCAL); SEQ ID NO: 688, 1q23.3_DLBCL (FOCAL); SEQ ID NO: 689, 1q23.3_DLBCL (FOCAL); SEQ ID NO: 690, 1q23.3_DLBCL (FOCAL); SEQ ID NO: 691, 1q23.3_DLBCL (FOCAL); SEQ ID NO: 692, 1q23.3_DLBCL (FOCAL); SEQ ID NO: 693, 1q23.3_DLBCL (FOCAL); SEQ ID NO: 694, 1q23.3_DLBCL (FOCAL); SEQ ID NO: 695, 1q23.3_DLBCL (FOCAL); SEQ ID NO: 696, 1q23.3_DLBCL (FOCAL); SEQ ID NO: 697, 1q23.3_DLBCL (FOCAL); SEQ ID NO: 698, 1q23.3_DLBCL (FOCAL); SEQ ID NO: 699, 1q23.3_DLBCL (FOCAL); SEQ ID NO: 700, 1q23.3_DLBCL (FOCAL); SEQ ID NO: 701, 1q23.3_DLBCL (FOCAL); SEQ ID NO: 702, 1q23.3_DLBCL (FOCAL); SEQ ID NO: 703, 1q23.3_DLBCL (FOCAL); SEQ ID NO: 704, 1q23.3_DLBCL (FOCAL); SEQ ID NO: 705, 1q23.3_DLBCL (FOCAL); SEQ ID NO: 706, 1q23.3_DLBCL (FOCAL); SEQ ID NO: 707, 1q23.3_DLBCL (FOCAL); SEQ ID NO: 708, 1q23.3_DLBCL (FOCAL); SEQ ID NO: 709, 1q23.3_DLBCL (FOCAL); SEQ ID NO: 710, 1q23.3_DLBCL (FOCAL); SEQ ID NO: 711, 1q23.3_DLBCL (FOCAL); SEQ ID NO: 712, 1q23.3_DLBCL (FOCAL); SEQ ID NO: 713, 1q23.3_DLBCL (FOCAL); SEQ ID NO: 714, 1q23.3_DLBCL (FOCAL); SEQ ID NO: 715, 1q23.3_DLBCL (FOCAL); SEQ ID NO: 716, 1q23.3_DLBCL (FOCAL); SEQ ID NO: 717, 1q23.3_DLBCL (FOCAL); SEQ ID NO: 718, 1q23.3_DLBCL (FOCAL); SEQ ID NO: 719, 1q23.3_DLBCL (FOCAL); SEQ ID NO: 720, 1q23.3_DLBCL (FOCAL); SEQ ID NO: 721, 1q23.3_DLBCL (FOCAL); SEQ ID NO: 722, 1q23.3_DLBCL (FOCAL); SEQ ID NO: 723, 1q23.3_DLBCL (FOCAL); SEQ ID NO: 724, 1q23.3_DLBCL (FOCAL); SEQ ID NO: 725, 1q23.3_DLBCL (FOCAL); SEQ ID NO: 726, 1q23.3_DLBCL (FOCAL); SEQ ID NO: 727, 1q23.3_DLBCL (FOCAL); SEQ ID NO: 728, 1q23.3_DLBCL (FOCAL); SEQ ID NO: 729, 1Q_DLBCL (ARM); SEQ ID NO: 730, 1Q_DLBCL (ARM); SEQ ID NO: 731, 1Q_DLBCL (ARM); SEQ ID NO: 732, 1Q_DLBCL (ARM); SEQ ID NO: 733, 1Q_DLBCL (ARM); SEQ ID NO: 734, 1Q_DLBCL (ARM); SEQ ID NO: 735, 1Q_DLBCL (ARM); SEQ ID NO: 736, 1Q_DLBCL (ARM); SEQ ID NO: 737, 1Q_DLBCL (ARM); SEQ ID NO: 738, 1Q_DLBCL (ARM); SEQ ID NO: 739, 1Q_DLBCL (ARM); SEQ ID NO: 740, 1Q_DLBCL (ARM); SEQ ID NO: 741, 1Q_DLBCL (ARM); SEQ ID NO: 742, 1Q_DLBCL (ARM); SEQ ID NO: 743, 1Q_DLBCL (ARM); SEQ ID NO: 744, 1Q_DLBCL (ARM); SEQ ID NO: 745, 1Q_DLBCL (ARM); SEQ ID NO: 746, 1Q_DLBCL (ARM); SEQ ID NO: 747, 1Q_DLBCL (ARM); SEQ ID NO: 748, 1Q_DLBCL (ARM); SEQ ID NO: 749, 1Q_DLBCL (ARM); SEQ ID NO: 750, 1Q_DLBCL (ARM); SEQ ID NO: 751, 1Q_DLBCL (ARM); SEQ ID NO: 752, 1Q_DLBCL (ARM); SEQ ID NO: 753, 1Q_DLBCL (ARM); SEQ ID NO: 754, 1Q_DLBCL (ARM); SEQ ID NO: 755, 1Q_DLBCL (ARM); SEQ ID NO: 756, BTG2 (Gene); SEQ ID NO: 757, BTG2 (Gene); SEQ ID NO: 758, 1Q_DLBCL (ARM); SEQ ID NO: 759, 1Q_DLBCL (ARM); SEQ ID NO: 760, 1Q_DLBCL (ARM); SEQ ID NO: 761, 1Q_DLBCL (ARM); SEQ ID NO: 762, 1Q_DLBCL (ARM); SEQ ID NO: 763, 1Q_DLBCL (ARM); SEQ ID NO: 764, 1Q_DLBCL (ARM); SEQ ID NO: 765, 1Q_DLBCL (ARM); SEQ ID NO: 766, 1Q_DLBCL (ARM); SEQ ID NO: 767, 1Q_DLBCL (ARM); SEQ ID NO: 768, PTPN14 (Gene); SEQ ID NO: 769, PTPN14 (Gene); SEQ ID NO: 770, PTPN14 (Gene); SEQ ID NO: 771, PTPN14 (Gene); SEQ ID NO: 772, PTPN14 (Gene); SEQ ID NO: 773, PTPN14 (Gene); SEQ ID NO: 774, PTPN14 (Gene); SEQ ID NO: 775, PTPN14 (Gene); SEQ ID NO: 776, PTPN14 (Gene); SEQ ID NO: 777, PTPN14 (Gene); SEQ ID NO: 778, PTPN14 (Gene); SEQ ID NO: 779, PTPN14 (Gene); SEQ ID NO: 780, PTPN14 (Gene); SEQ ID NO: 781, PTPN14 (Gene); SEQ ID NO: 782, PTPN14 (Gene); SEQ ID NO: 783, PTPN14 (Gene); SEQ ID NO: 784, PTPN14 (Gene); SEQ ID NO: 785, PTPN14 (Gene); SEQ ID NO: 786, PTPN14 (Gene); SEQ ID NO: 787, PTPN14 (Gene); SEQ ID NO: 788, PTPN14 (Gene); SEQ ID NO: 789, 1Q_DLBCL (ARM); SEQ ID NO: 790, 1Q_DLBCL (ARM); SEQ ID NO: 791, 1Q_DLBCL (ARM); SEQ ID NO: 792, 1q42.12_DLBCL (FOCAL); SEQ ID NO: 793, 1q42.12_DLBCL (FOCAL); SEQ ID NO: 794, 1q42.12_DLBCL (FOCAL); SEQ ID NO: 795, 1q42.12_DLBCL (FOCAL); SEQ ID NO: 796, 1q42.12_DLBCL (FOCAL); SEQ ID NO: 797, 1q42.12_DLBCL (FOCAL); SEQ ID NO: 798, 1q42.12_DLBCL (FOCAL); SEQ ID NO: 799, 1q42.12_DLBCL (FOCAL); SEQ ID NO: 800, 1q42.12_DLBCL (FOCAL); SEQ ID NO: 801, 1q42.12_DLBCL (FOCAL); SEQ ID NO: 802, 1q42.12_DLBCL (FOCAL); SEQ ID NO: 803, 1q42.12_DLBCL (FOCAL); SEQ ID NO: 804, 1q42.12_DLBCL (FOCAL); SEQ ID NO: 805, 1q42.12_DLBCL (FOCAL); SEQ ID NO: 806, FP (FP); SEQ ID NO: 807, 1q42.12_DLBCL (FOCAL); SEQ ID NO: 808, 1q42.12_DLBCL (FOCAL); SEQ ID NO: 809, 1q42.12_DLBCL (FOCAL); SEQ ID NO: 810, 1q42.12_DLBCL (FOCAL); SEQ ID NO: 811, 1q42.12_DLBCL (FOCAL); SEQ ID NO: 812, 1q42.12_DLBCL (FOCAL); SEQ ID NO: 813, 1q42.12_DLBCL (FOCAL); SEQ ID NO: 814, 1q42.12_DLBCL (FOCAL); SEQ ID NO: 815, 1q42.12_DLBCL (FOCAL); SEQ ID NO: 816, 1q42.12_DLBCL (FOCAL); SEQ ID NO: 817, 1q42.12_DLBCL (FOCAL); SEQ ID NO: 818, 1q42.12_DLBCL (FOCAL); SEQ ID NO: 819, 1q42.12_DLBCL (FOCAL); SEQ ID NO: 820, 1q42.12_DLBCL (FOCAL); SEQ ID NO: 821, 1q42.12_DLBCL (FOCAL); SEQ ID NO: 822, 1q42.12_DLBCL (FOCAL); SEQ ID NO: 823, 1q42.12_DLBCL (FOCAL); SEQ ID NO: 824, 1q42.12_DLBCL (FOCAL); SEQ ID NO: 825, 1q42.12_DLBCL (FOCAL); SEQ ID NO: 826, 1q42.12_DLBCL (FOCAL); SEQ ID NO: 827, 1q42.12_DLBCL (FOCAL); SEQ ID NO: 828, 1q42.12_DLBCL (FOCAL); SEQ ID NO: 829, 1q42.12_DLBCL (FOCAL); SEQ ID NO: 830, 1q42.12_DLBCL (FOCAL); SEQ ID NO: 831, 1q42.12_DLBCL (FOCAL); SEQ ID NO: 832, 1q42.12_DLBCL (FOCAL); SEQ ID NO: 833, 1q42.12_DLBCL (FOCAL); SEQ ID NO: 834, 1q42.12_DLBCL (FOCAL); SEQ ID NO: 835, 1q42.12_DLBCL (FOCAL); SEQ ID NO: 836, 1q42.12_DLBCL (FOCAL); SEQ ID NO: 837, 1q42.12_DLBCL (FOCAL); SEQ ID NO: 838, 1q42.12_DLBCL (FOCAL); SEQ ID NO: 839, 1q42.12_DLBCL (FOCAL); SEQ ID NO: 840, 1q42.12_DLBCL (FOCAL); SEQ ID NO: 841, 1q42.12_DLBCL (FOCAL); SEQ ID NO: 842, 1q42.12_DLBCL (FOCAL); SEQ ID NO: 843, 1q42.12_DLBCL (FOCAL); SEQ ID NO: 844, 1q42.12_DLBCL (FOCAL); SEQ ID NO: 845, 1q42.12_DLBCL (FOCAL); SEQ ID NO: 846, 1q42.12_DLBCL (FOCAL); SEQ ID NO: 847, 1q42.12_DLBCL (FOCAL); SEQ ID NO: 848, 1q42.12_DLBCL (FOCAL); SEQ ID NO: 849, 1q42.12_DLBCL (FOCAL); SEQ ID NO: 850, 1q42.12_DLBCL (FOCAL); SEQ ID NO: 851, 1q42.12_DLBCL (FOCAL); SEQ ID NO: 852, 1q42.12_DLBCL (FOCAL); SEQ ID NO: 853, 1q42.12_DLBCL (FOCAL); SEQ ID NO: 854, 1q42.12_DLBCL (FOCAL); SEQ ID NO: 855, 1q42.12_DLBCL (FOCAL); SEQ ID NO: 856, 1q42.12_DLBCL (FOCAL); SEQ ID NO: 857, 1q42.12_DLBCL (FOCAL); SEQ ID NO: 858, ITPKB (Gene); SEQ ID NO: 859, ITPKB (Gene); SEQ ID NO: 860, ITPKB (Gene); SEQ ID NO: 861, ITPKB (Gene); SEQ ID NO: 862, ITPKB (Gene); SEQ ID NO: 863, ITPKB (Gene); SEQ ID NO: 864, 1q42.12_DLBCL (FOCAL); SEQ ID NO: 865, ITPKB (Gene); SEQ ID NO: 866, ITPKB (Gene); SEQ ID NO: 867, ITPKB (Gene); SEQ ID NO: 868, ITPKB (Gene); SEQ ID NO: 869, ITPKB (Gene); SEQ ID NO: 870, 1q42.12_DLBCL (FOCAL); SEQ ID NO: 871, 1q42.12_DLBCL (FOCAL); SEQ ID NO: 872, 1q42.12_DLBCL (FOCAL); SEQ ID NO: 873, 1q42.12_DLBCL (FOCAL); SEQ ID NO: 874, 1q42.12_DLBCL (FOCAL); SEQ ID NO: 875, 1q42.12_DLBCL (FOCAL); SEQ ID NO: 876, 1q42.12_DLBCL (FOCAL); SEQ ID NO: 877, 1q42.12_DLBCL (FOCAL); SEQ ID NO: 878, 1q42.12_DLBCL (FOCAL); SEQ ID NO: 879, 1q42.12_DLBCL (FOCAL); SEQ ID NO: 880, 1q42.12_DLBCL (FOCAL); SEQ ID NO: 881, 1q42.12_DLBCL (FOCAL); SEQ ID NO: 882, 1q42.12_DLBCL (FOCAL); SEQ ID NO: 883, 1q42.12_DLBCL (FOCAL); SEQ ID NO: 884, 1q42.12_DLBCL (FOCAL); SEQ ID NO: 885, 1q42.12_DLBCL (FOCAL); SEQ ID NO: 886, 1q42.12_DLBCL (FOCAL); SEQ ID NO: 887, 1q42.12_DLBCL (FOCAL); SEQ ID NO: 888, 1q42.12_DLBCL (FOCAL); SEQ ID NO: 889, 1q42.12_DLBCL (FOCAL); SEQ ID NO: 890, 1q42.12_DLBCL (FOCAL); SEQ ID NO: 891, 1q42.12_DLBCL (FOCAL); SEQ ID NO: 892, 1q42.12_DLBCL (FOCAL); SEQ ID NO: 893, 1q42.12_DLBCL (FOCAL); SEQ ID NO: 894, 1q42.12_DLBCL (FOCAL); SEQ ID NO: 895, 1q42.12_DLBCL (FOCAL); SEQ ID NO: 896, 1q42.12_DLBCL (FOCAL); SEQ ID NO: 897, 1q42.12_DLBCL (FOCAL); SEQ ID NO: 898, 1q42.12_DLBCL (FOCAL); SEQ ID NO: 899, 1q42.12_DLBCL (FOCAL); SEQ ID NO: 900, 1q42.12_DLBCL (FOCAL); SEQ ID NO: 901, 1q42.12_DLBCL (FOCAL); SEQ ID NO: 902, 1q42.12_DLBCL (FOCAL); SEQ ID NO: 903, 1q42.12_DLBCL (FOCAL); SEQ ID NO: 904, 1q42.12_DLBCL (FOCAL); SEQ ID NO: 905, 1q42.12_DLBCL (FOCAL); SEQ ID NO: 906, 1q42.12_DLBCL (FOCAL); SEQ ID NO: 907, 1q42.12_DLBCL (FOCAL); SEQ ID NO: 908, 1q42.12_DLBCL (FOCAL); SEQ ID NO: 909, 1q42.12_DLBCL (FOCAL); SEQ ID NO: 910, MSI (MSI); SEQ ID NO: 911, MSI (MSI); SEQ ID NO: 912, 1q42.12_DLBCL (FOCAL); SEQ ID NO: 913, 1q42.12_DLBCL (FOCAL); SEQ ID NO: 914, 1q42.12_DLBCL (FOCAL); SEQ ID NO: 915, 1q42.12_DLBCL (FOCAL); SEQ ID NO: 916, 1q42.12_DLBCL (FOCAL); SEQ ID NO: 917, 1q42.12_DLBCL (FOCAL); SEQ ID NO: 918, 1q42.12_DLBCL (FOCAL); SEQ ID NO: 919, 1q42.12_DLBCL (FOCAL); SEQ ID NO: 920, 1q42.12_DLBCL (FOCAL); SEQ ID NO: 921, 1q42.12_DLBCL (FOCAL); SEQ ID NO: 922, 1q42.12_DLBCL (FOCAL); SEQ ID NO: 923, 1q42.12_DLBCL (FOCAL); SEQ ID NO: 924, 1q42.12_DLBCL (FOCAL); SEQ ID NO: 925, 1q42.12_DLBCL (FOCAL); SEQ ID NO: 926, 1q42.12_DLBCL (FOCAL); SEQ ID NO: 927, 1q42.12_DLBCL (FOCAL); SEQ ID NO: 928, 1q42.12_DLBCL (FOCAL); SEQ ID NO: 929, 1q42.12_DLBCL (FOCAL); SEQ ID NO: 930, 1q42.12_DLBCL (FOCAL); SEQ ID NO: 931, 1q42.12_DLBCL (FOCAL); SEQ ID NO: 932, 1q42.12_DLBCL (FOCAL); SEQ ID NO: 933, 1q42.12_DLBCL (FOCAL); SEQ ID NO: 934, 1q42.12_DLBCL (FOCAL); SEQ ID NO: 935, 1q42.12_DLBCL (FOCAL); SEQ ID NO: 936, 1q42.12_DLBCL (FOCAL); SEQ ID NO: 937, 1q42.12_DLBCL (FOCAL); SEQ ID NO: 938, 1q42.12_DLBCL (FOCAL); SEQ ID NO: 939, 1q42.12_DLBCL (FOCAL); SEQ ID NO: 940, 1q42.12_DLBCL (FOCAL); SEQ ID NO: 941, 1q42.12_DLBCL (FOCAL); SEQ ID NO: 942, IRF2BP2 (Gene); SEQ ID NO: 943, IRF2BP2 (Gene); SEQ ID NO: 944, IRF2BP2 (Gene); SEQ ID NO: 945, IRF2BP2 (Gene); SEQ ID NO: 946, IRF2BP2 (Gene); SEQ ID NO: 947, 1q42.12_DLBCL (FOCAL); SEQ ID NO: 948, 1q42.12_DLBCL (FOCAL); SEQ ID NO: 949, 1q42.12_DLBCL (FOCAL); SEQ ID NO: 950, 1q42.12_DLBCL (FOCAL); SEQ ID NO: 951, 1q42.12_DLBCL (FOCAL); SEQ ID NO: 952, 1q42.12_DLBCL (FOCAL); SEQ ID NO: 953, 1q42.12_DLBCL (FOCAL); SEQ ID NO: 954, 1q42.12_DLBCL (FOCAL); SEQ ID NO: 955, 1q42.12_DLBCL (FOCAL); SEQ ID NO: 956, 1q42.12_DLBCL (FOCAL); SEQ ID NO: 957, 1q42.12_DLBCL (FOCAL); SEQ ID NO: 958, 1q42.12_DLBCL (FOCAL); SEQ ID NO: 959, 1q42.12_DLBCL (FOCAL); SEQ ID NO: 960, 1q42.12_DLBCL (FOCAL); SEQ ID NO: 961, 1q42.12_DLBCL (FOCAL); SEQ ID NO: 962, 1q42.12_DLBCL (FOCAL); SEQ ID NO: 963, 1q42.12_DLBCL (FOCAL); SEQ ID NO: 964, 1q42.12_DLBCL (FOCAL); SEQ ID NO: 965, 1q42.12_DLBCL (FOCAL); SEQ ID NO: 966, 1q42.12_DLBCL (FOCAL); SEQ ID NO: 967, 1q42.12_DLBCL (FOCAL); SEQ ID NO: 968, 1q42.12_DLBCL (FOCAL); SEQ ID NO: 969, 1q42.12_DLBCL (FOCAL); SEQ ID NO: 970, 1q42.12_DLBCL (FOCAL); SEQ ID NO: 971, 1q42.12_DLBCL (FOCAL); SEQ ID NO: 972, 1q42.12_DLBCL (FOCAL); SEQ ID NO: 973, 1q42.12_DLBCL (FOCAL); SEQ ID NO: 974, 1q42.12_DLBCL (FOCAL); SEQ ID NO: 975, 1q42.12_DLBCL (FOCAL); SEQ ID NO: 976, 1q42.12_DLBCL (FOCAL); SEQ ID NO: 977, 1q42.12_DLBCL (FOCAL); SEQ ID NO: 978, FP (FP); SEQ ID NO: 979, 1q42.12_DLBCL (FOCAL); SEQ ID NO: 980, 1q42.12_DLBCL (FOCAL); SEQ ID NO: 981, 1q42.12_DLBCL (FOCAL); SEQ ID NO: 982, 1q42.12_DLBCL (FOCAL); SEQ ID NO: 983, 1q42.12_DLBCL (FOCAL); SEQ ID NO: 984, 1q42.12_DLBCL (FOCAL); SEQ ID NO: 985, 1q42.12_DLBCL (FOCAL); SEQ ID NO: 986, 1q42.12_DLBCL (FOCAL); SEQ ID NO: 987, FP (FP); SEQ ID NO: 988, 1q42.12_DLBCL (FOCAL); SEQ ID NO: 989, 1q42.12_DLBCL (FOCAL); SEQ ID NO: 990, 1q42.12_DLBCL (FOCAL); SEQ ID NO: 991, 1q42.12_DLBCL (FOCAL); SEQ ID NO: 992, 1q42.12_DLBCL (FOCAL); SEQ ID NO: 993, 1q42.12_DLBCL (FOCAL); SEQ ID NO: 994, 1q42.12_DLBCL (FOCAL); SEQ ID NO: 995, 1q42.12_DLBCL (FOCAL); SEQ ID NO: 996, 1q42.12_DLBCL (FOCAL); SEQ ID NO: 997, 1q42.12_DLBCL (FOCAL); SEQ ID NO: 998, 1q42.12_DLBCL (FOCAL); SEQ ID NO: 999, 1q42.12_DLBCL (FOCAL); SEQ ID NO: 1000, 1q42.12_DLBCL (FOCAL); SEQ ID NO: 1001, 1q42.12_DLBCL (FOCAL); SEQ ID NO: 1002, 1q42.12_DLBCL (FOCAL); SEQ ID NO: 1003, 1q42.12_DLBCL (FOCAL); SEQ ID NO: 1004, 1q42.12_DLBCL (FOCAL); SEQ ID NO: 1005, 1q42.12_DLBCL (FOCAL); SEQ ID NO: 1006, 1q42.12_DLBCL (FOCAL); SEQ ID NO: 1007, 1q42.12_DLBCL (FOCAL); SEQ ID NO: 1008, 1q42.12_DLBCL (FOCAL); SEQ ID NO: 1009, FP (FP); SEQ ID NO: 1010, 1q42.12_DLBCL (FOCAL); SEQ ID NO: 1011, 1q42.12_DLBCL (FOCAL); SEQ ID NO: 1012, 1q42.12_DLBCL (FOCAL); SEQ ID NO: 1013, 1q42.12_DLBCL (FOCAL); SEQ ID NO: 1014, 1q42.12_DLBCL (FOCAL); SEQ ID NO: 1015, 1q42.12_DLBCL (FOCAL); SEQ ID NO: 1016, 1q42.12_DLBCL (FOCAL); SEQ ID NO: 1017, 1q42.12_DLBCL (FOCAL); SEQ ID NO: 1018, 1q42.12_DLBCL (FOCAL); SEQ ID NO: 1019, 1q42.12_DLBCL (FOCAL); SEQ ID NO: 1020, 1q42.12_DLBCL (FOCAL); SEQ ID NO: 1021, 1q42.12_DLBCL (FOCAL); SEQ ID NO: 1022, 1q42.12_DLBCL (FOCAL); SEQ ID NO: 1023, 1q42.12_DLBCL (FOCAL); SEQ ID NO: 1024, 1q42.12_DLBCL (FOCAL); SEQ ID NO: 1025, 1q42.12_DLBCL (FOCAL); SEQ ID NO: 1026, 1q42.12_DLBCL (FOCAL); SEQ ID NO: 1027, 1q42.12_DLBCL (FOCAL); SEQ ID NO: 1028, 1q42.12_DLBCL (FOCAL); SEQ ID NO: 1029, 1q42.12_DLBCL (FOCAL); SEQ ID NO: 1030, 1q42.12_DLBCL (FOCAL); SEQ ID NO: 1031, 1q42.12_DLBCL (FOCAL); SEQ ID NO: 1032, 1q42.12_DLBCL (FOCAL); SEQ ID NO: 1033, 1q42.12_DLBCL (FOCAL); SEQ ID NO: 1034, 1q42.12_DLBCL (FOCAL); SEQ ID NO: 1035, 1q42.12_DLBCL (FOCAL); SEQ ID NO: 1036, 1q42.12_DLBCL (FOCAL); SEQ ID NO: 1037, 1q42.12_DLBCL (FOCAL); SEQ ID NO: 1038, 1q42.12_DLBCL (FOCAL); SEQ ID NO: 1039, 1q42.12_DLBCL (FOCAL); SEQ ID NO: 1040, 1q42.12_DLBCL (FOCAL); SEQ ID NO: 1041, 1q42.12_DLBCL (FOCAL); SEQ ID NO: 1042, 1q42.12_DLBCL (FOCAL); SEQ ID NO: 1043, 1q42.12_DLBCL (FOCAL); SEQ ID NO: 1044, 1q42.12_DLBCL (FOCAL); SEQ ID NO: 1045, 1q42.12_DLBCL (FOCAL); SEQ ID NO: 1046, 1q42.12_DLBCL (FOCAL); SEQ ID NO: 1047, 1q42.12_DLBCL (FOCAL); SEQ ID NO: 1048, 1q42.12_DLBCL (FOCAL); SEQ ID NO: 1049, 1q42.12_DLBCL (FOCAL); SEQ ID NO: 1050, 1q42.12_DLBCL (FOCAL); SEQ ID NO: 1051, 1q42.12_DLBCL (FOCAL); SEQ ID NO: 1052, 1q42.12_DLBCL (FOCAL); SEQ ID NO: 1053, 1q42.12_DLBCL (FOCAL); SEQ ID NO: 1054, 10P (ARM); SEQ ID NO: 1055, 10P (ARM); SEQ ID NO: 1056, 10P (ARM); SEQ ID NO: 1057, 10P (ARM); SEQ ID NO: 1058, FP (FP); SEQ ID NO: 1059, 10P (ARM); SEQ ID NO: 1060, 10P (ARM); SEQ ID NO: 1061, 10P (ARM); SEQ ID NO: 1062, 10P (ARM); SEQ ID NO: 1063, 10P (ARM); SEQ ID NO: 1064, 10P (ARM); SEQ ID NO: 1065, 10P (ARM); SEQ ID NO: 1066, 10P (ARM); SEQ ID NO: 1067, 10P (ARM); SEQ ID NO: 1068, 10P (ARM); SEQ ID NO: 1069, 10P (ARM); SEQ ID NO: 1070, 10P (ARM); SEQ ID NO: 1071, 10P (ARM); SEQ ID NO: 1072, 10P (ARM); SEQ ID NO: 1073, 10P (ARM); SEQ ID NO: 1074, 10P (ARM); SEQ ID NO: 1075, 10P (ARM); SEQ ID NO: 1076, 10P (ARM); SEQ ID NO: 1077, 10P (ARM); SEQ ID NO: 1078, 10P (ARM); SEQ ID NO: 1079, 10P (ARM); SEQ ID NO: 1080, 10P (ARM); SEQ ID NO: 1081, 10P (ARM); SEQ ID NO: 1082, 10P (ARM); SEQ ID NO: 1083, WAC (Gene); SEQ ID NO: 1084, WAC (Gene); SEQ ID NO: 1085, WAC (Gene); SEQ ID NO: 1086, WAC (Gene); SEQ ID NO: 1087, WAC (Gene); SEQ ID NO: 1088, WAC (Gene); SEQ ID NO: 1089, WAC (Gene); SEQ ID NO: 1090, WAC (Gene); SEQ ID NO: 1091, WAC (Gene); SEQ ID NO: 1092, WAC (Gene); SEQ ID NO: 1093, WAC (Gene); SEQ ID NO: 1094, WAC (Gene); SEQ ID NO: 1095, WAC (Gene); SEQ ID NO: 1096, WAC (Gene); SEQ ID NO: 1097, WAC (Gene); SEQ ID NO: 1098, 10P (ARM); SEQ ID NO: 1099, 10P (ARM); SEQ ID NO: 1100, MSI (MSI); SEQ ID NO: 1101, MSI (MSI); SEQ ID NO: 1102, 10P (ARM); SEQ ID NO: 1103, 10P (ARM); SEQ ID NO: 1104, 10P (ARM); SEQ ID NO: 1105, 10P (ARM); SEQ ID NO: 1106, 10P (ARM); SEQ ID NO: 1107, RET (Gene); SEQ ID NO: 1108, RET (Gene); SEQ ID NO: 1109, RET (Gene); SEQ ID NO: 1110, RET (Gene); SEQ ID NO: 1111, RET (Gene); SEQ ID NO: 1112, RET (Gene); SEQ ID NO: 1113, RET (Gene); SEQ ID NO: 1114, RET (Gene); SEQ ID NO: 1115, RET (Gene); SEQ ID NO: 1116, RET (Gene); SEQ ID NO: 1117, RET (Gene); SEQ ID NO: 1118, RET (Gene); SEQ ID NO: 1119, RET (Gene); SEQ ID NO: 1120, RET (Gene); SEQ ID NO: 1121, RET (Gene); SEQ ID NO: 1122, RET (Gene); SEQ ID NO: 1123, RET (Gene); SEQ ID NO: 1124, RET (Gene); SEQ ID NO: 1125, RET (Gene); SEQ ID NO: 1126, RET (Gene); SEQ ID NO: 1127, RET (Gene); SEQ ID NO: 1128, 10P (ARM); SEQ ID NO: 1129, 10P (ARM); SEQ ID NO: 1130, 10P (ARM); SEQ ID NO: 1131, 10P (ARM); SEQ ID NO: 1132, 10P (ARM); SEQ ID NO: 1133, 10P (ARM); SEQ ID NO: 1134, 10P (ARM); SEQ ID NO: 1135, 10P (ARM); SEQ ID NO: 1136, 10P (ARM); SEQ ID NO: 1137, 10P (ARM); SEQ ID NO: 1138, 10P (ARM); SEQ ID NO: 1139, 10P (ARM); SEQ ID NO: 1140, FP (FP); SEQ ID NO: 1141, 10P (ARM); SEQ ID NO: 1142, 10P (ARM); SEQ ID NO: 1143, 10P (ARM); SEQ ID NO: 1144, 10P (ARM); SEQ ID NO: 1145, 10P (ARM); SEQ ID NO: 1146, ARID5B (Gene); SEQ ID NO: 1147, ARID5B (Gene); SEQ ID NO: 1148, ARID5B (Gene); SEQ ID NO: 1149, ARID5B (Gene); SEQ ID NO: 1150, ARID5B (Gene); SEQ ID NO: 1151, ARID5B (Gene); SEQ ID NO: 1152, ARID5B (Gene); SEQ ID NO: 1153, ARID5B (Gene); SEQ ID NO: 1154, ARID5B (Gene); SEQ ID NO: 1155, ARID5B (Gene); SEQ ID NO: 1156, ARID5B (Gene); SEQ ID NO: 1157, ARID5B (Gene); SEQ ID NO: 1158, ARID5B (Gene); SEQ ID NO: 1159, ARID5B (Gene); SEQ ID NO: 1160, ARID5B (Gene); SEQ ID NO: 1161, ARID5B (Gene); SEQ ID NO: 1162, ARID5B (Gene); SEQ ID NO: 1163, ARID5B (Gene); SEQ ID NO: 1164, ARID5B (Gene); SEQ ID NO: 1165, ARID5B (Gene); SEQ ID NO: 1166, 10P (ARM); SEQ ID NO: 1167, 10P (ARM); SEQ ID NO: 1168, 10P (ARM); SEQ ID NO: 1169, 10P (ARM); SEQ ID NO: 1170, 10P (ARM); SEQ ID NO: 1171, MSI (MSI); SEQ ID NO: 1172, MSI (MSI); SEQ ID NO: 1173, 10P (ARM); SEQ ID NO: 1174, 10P (ARM); SEQ ID NO: 1175, 10P (ARM); SEQ ID NO: 1176, 10P (ARM); SEQ ID NO: 1177, 10P (ARM); SEQ ID NO: 1178, 10P (ARM); SEQ ID NO: 1179, 10P (ARM); SEQ ID NO: 1180, 10P (ARM); SEQ ID NO: 1181, 10P (ARM); SEQ ID NO: 1182, 10P (ARM); SEQ ID NO: 1183, 10P (ARM); SEQ ID NO: 1184, 10P (ARM); SEQ ID NO: 1185, 10P (ARM); SEQ ID NO: 1186, 10P (ARM); SEQ ID NO: 1187, 10P (ARM); SEQ ID NO: 1188, 10P (ARM); SEQ ID NO: 1189, 10P (ARM); SEQ ID NO: 1190, 10P (ARM); SEQ ID NO: 1191, 10P (ARM); SEQ ID NO: 1192, 10P (ARM); SEQ ID NO: 1193, 10q23.31_DLBCL (FOCAL); SEQ ID NO: 1194, 10q23.31_DLBCL (FOCAL); SEQ ID NO: 1195, 10q23.31_DLBCL (FOCAL); SEQ ID NO: 1196, PTEN (Gene); SEQ ID NO: 1197, PTEN (Gene); SEQ ID NO: 1198, PTEN (Gene); SEQ ID NO: 1199, PTEN (Gene); SEQ ID NO: 1200, PTEN (Gene); SEQ ID NO: 1201, PTEN (Gene); SEQ ID NO: 1202, PTEN (Gene); SEQ ID NO: 1203, PTEN (Gene); SEQ ID NO: 1204, PTEN (Gene); SEQ ID NO: 1205, PTEN (Gene); SEQ ID NO: 1206, 10q23.31_DLBCL (FOCAL); SEQ ID NO: 1207, 10q23.31_DLBCL (FOCAL); SEQ ID NO: 1208, 10q23.31_DLBCL (FOCAL); SEQ ID NO: 1209, 10q23.31_DLBCL (FOCAL); SEQ ID NO: 1210, 10q23.31_DLBCL (FOCAL); SEQ ID NO: 1211, FAS (Gene); SEQ ID NO: 1212, FAS (Gene); SEQ ID NO: 1213, FAS (Gene); SEQ ID NO: 1214, FAS (Gene); SEQ ID NO: 1215, FAS (Gene); SEQ ID NO: 1216, FAS (Gene); SEQ ID NO: 1217, FAS (Gene); SEQ ID NO: 1218, FAS (Gene); SEQ ID NO: 1219, FAS (Gene); SEQ ID NO: 1220, 10q23.31_DLBCL (FOCAL); SEQ ID NO: 1221, 10q23.31_DLBCL (FOCAL); SEQ ID NO: 1222, 10P (ARM); SEQ ID NO: 1223, 10P (ARM); SEQ ID NO: 1224, 10P (ARM); SEQ ID NO: 1225, 10P (ARM); SEQ ID NO: 1226, 10P (ARM); SEQ ID NO: 1227, 10P (ARM); SEQ ID NO: 1228, MSI (MSI); SEQ ID NO: 1229, MSI (MSI); SEQ ID NO: 1230, 10P (ARM); SEQ ID NO: 1231, MSI (MSI); SEQ ID NO: 1232, MSI (MSI); SEQ ID NO: 1233, 10P (ARM); SEQ ID NO: 1234, 10Q (ARM); SEQ ID NO: 1235, 10Q (ARM); SEQ ID NO: 1236, 10Q (ARM); SEQ ID NO: 1237, 10Q (ARM); SEQ ID NO: 1238, 10Q (ARM); SEQ ID NO: 1239, 10Q (ARM); SEQ ID NO: 1240, 10Q (ARM); SEQ ID NO: 1241, 10Q (ARM); SEQ ID NO: 1242, MSI (MSI); SEQ ID NO: 1243, MSI (MSI); SEQ ID NO: 1244, 10Q (ARM); SEQ ID NO: 1245, 10Q (ARM); SEQ ID NO: 1246, 10Q (ARM); SEQ ID NO: 1247, 10Q (ARM); SEQ ID NO: 1248, 10Q (ARM); SEQ ID NO: 1249, 10Q (ARM); SEQ ID NO: 1250, 10Q (ARM); SEQ ID NO: 1251, 10Q (ARM); SEQ ID NO: 1252, 10Q (ARM); SEQ ID NO: 1253, 10Q (ARM); SEQ ID NO: 1254, 10Q (ARM); SEQ ID NO: 1255, 10Q (ARM); SEQ ID NO: 1256, 10Q (ARM); SEQ ID NO: 1257, 10Q (ARM); SEQ ID NO: 1258, 10Q (ARM); SEQ ID NO: 1259, 10Q (ARM); SEQ ID NO: 1260, 10Q (ARM); SEQ ID NO: 1261, 10Q (ARM); SEQ ID NO: 1262, 10Q (ARM); SEQ ID NO: 1263, 10Q (ARM); SEQ ID NO: 1264, FP (FP); SEQ ID NO: 1265, 10Q (ARM); SEQ ID NO: 1266, 10Q (ARM); SEQ ID NO: 1267, 10Q (ARM); SEQ ID NO: 1268, 10Q (ARM); SEQ ID NO: 1269, 10Q (ARM); SEQ ID NO: 1270, FP (FP); SEQ ID NO: 1271, 10Q (ARM); SEQ ID NO: 1272, 10Q (ARM); SEQ ID NO: 1273, 10Q (ARM); SEQ ID NO: 1274, 11P_DLBCL (ARM); SEQ ID NO: 1275, 11P_DLBCL (ARM); SEQ ID NO: 1276, 11P_DLBCL (ARM); SEQ ID NO: 1277, 11P_DLBCL (ARM); SEQ ID NO: 1278, 11P_DLBCL (ARM); SEQ ID NO: 1279, 11P_DLBCL (ARM); SEQ ID NO: 1280, 11P_DLBCL (ARM); SEQ ID NO: 1281, 11P_DLBCL (ARM); SEQ ID NO: 1282, 11P_DLBCL (ARM); SEQ ID NO: 1283, 11P_DLBCL (ARM); SEQ ID NO: 1284, FP (FP); SEQ ID NO: 1285, 11P_DLBCL (ARM); SEQ ID NO: 1286, 11P_DLBCL (ARM); SEQ ID NO: 1287, 11P_DLBCL (ARM); SEQ ID NO: 1288, 11P_DLBCL (ARM); SEQ ID NO: 1289, 11P_DLBCL (ARM); SEQ ID NO: 1290, 11P_DLBCL (ARM); SEQ ID NO: 1291, 11P_DLBCL (ARM); SEQ ID NO: 1292, 11P_DLBCL (ARM); SEQ ID NO: 1293, 11P_DLBCL (ARM); SEQ ID NO: 1294, 11P_DLBCL (ARM); SEQ ID NO: 1295, 11P_DLBCL (ARM); SEQ ID NO: 1296, 11P_DLBCL (ARM); SEQ ID NO: 1297, 11P_DLBCL (ARM); SEQ ID NO: 1298, 11P_DLBCL (ARM); SEQ ID NO: 1299, 11P_DLBCL (ARM); SEQ ID NO: 1300, 11P_DLBCL (ARM); SEQ ID NO: 1301, 11P_DLBCL (ARM); SEQ ID NO: 1302, 11P_DLBCL (ARM); SEQ ID NO: 1303, 11P_DLBCL (ARM); SEQ ID NO: 1304, 11P_DLBCL (ARM); SEQ ID NO: 1305, 11P_DLBCL (ARM); SEQ ID NO: 1306, 11P_DLBCL (ARM); SEQ ID NO: 1307, 11P_DLBCL (ARM); SEQ ID NO: 1308, 11P_DLBCL (ARM); SEQ ID NO: 1309, 11P_DLBCL (ARM); SEQ ID NO: 1310, 11P_DLBCL (ARM); SEQ ID NO: 1311, 11P_DLBCL (ARM); SEQ ID NO: 1312, 11P_DLBCL (ARM); SEQ ID NO: 1313, 11P_DLBCL (ARM); SEQ ID NO: 1314, 11P_DLBCL (ARM); SEQ ID NO: 1315, 11P_DLBCL (ARM); SEQ ID NO: 1316, 11P_DLBCL (ARM); SEQ ID NO: 1317, 11P_DLBCL (ARM); SEQ ID NO: 1318, 11P_DLBCL (ARM); SEQ ID NO: 1319, 11P_DLBCL (ARM); SEQ ID NO: 1320, 11P_DLBCL (ARM); SEQ ID NO: 1321, 11P_DLBCL (ARM); SEQ ID NO: 1322, 11Q_DLBCL (ARM); SEQ ID NO: 1323, MS4A1 (Gene); SEQ ID NO: 1324, MS4A1 (Gene); SEQ ID NO: 1325, MS4A1 (Gene); SEQ ID NO: 1326, 11Q_DLBCL (ARM); SEQ ID NO: 1327, MS4A1 (Gene); SEQ ID NO: 1328, MS4A1 (Gene); SEQ ID NO: 1329, MS4A1 (Gene); SEQ ID NO: 1330, 11Q_DLBCL (ARM); SEQ ID NO: 1331, 11Q_DLBCL (ARM); SEQ ID NO: 1332, MSI (MSI); SEQ ID NO: 1333, MSI (MSI); SEQ ID NO: 1334, 11Q_DLBCL (ARM); SEQ ID NO: 1335, 11Q_DLBCL (ARM); SEQ ID NO: 1336, CCND1_MTC (SV); SEQ ID NO: 1337, CCND1_MTC (SV); SEQ ID NO: 1338, CCND1_MTC (SV); SEQ ID NO: 1339, CCND1_MTC (SV); SEQ ID NO: 1340, CCND1_MTC (SV); SEQ ID NO: 1341, CCND1_MTC (SV); SEQ ID NO: 1342, CCND1_MTC (SV); SEQ ID NO: 1343, CCND1_MTC (SV); SEQ ID NO: 1344, CCND1_MTC (SV); SEQ ID NO: 1345, CCND1_MTC (SV); SEQ ID NO: 1346, CCND1_MTC (SV); SEQ ID NO: 1347, CCND1_MTC (SV); SEQ ID NO: 1348, CCND1_MTC (SV); SEQ ID NO: 1349, CCND1_MTC (SV); SEQ ID NO: 1350, CCND1_MTC (SV); SEQ ID NO: 1351, CCND1_MTC (SV); SEQ ID NO: 1352, CCND1_MTC (SV); SEQ ID NO: 1353, CCND1_MTC (SV); SEQ ID NO: 1354, CCND1_MTC (SV); SEQ ID NO: 1355, CCND1_MTC (SV); SEQ ID NO: 1356, CCND1_MTC (SV); SEQ ID NO: 1357, CCND1_MTC (SV); SEQ ID NO: 1358, CCND1_MTC (SV); SEQ ID NO: 1359, CCND1_MTC (SV); SEQ ID NO: 1360, CCND1_MTC (SV); SEQ ID NO: 1361, CCND1_MTC (SV); SEQ ID NO: 1362, CCND1_MTC (SV); SEQ ID NO: 1363, CCND1_MTC (SV); SEQ ID NO: 1364, CCND1_MTC (SV); SEQ ID NO: 1365, CCND1_MTC (SV); SEQ ID NO: 1366, CCND1_MTC (SV); SEQ ID NO: 1367, CCND1_MTC (SV); SEQ ID NO: 1368, CCND1_MTC (SV); SEQ ID NO: 1369, CCND1_MTC (SV); SEQ ID NO: 1370, CCND1_MTC (SV); SEQ ID NO: 1371, CCND1_MTC (SV); SEQ ID NO: 1372, CCND1_MTC (SV); SEQ ID NO: 1373, CCND1_MTC (SV); SEQ ID NO: 1374, CCND1_MTC (SV); SEQ ID NO: 1375, CCND1_MTC (SV); SEQ ID NO: 1376, CCND1_MTC (SV); SEQ ID NO: 1377, CCND1_MTC (SV); SEQ ID NO: 1378, CCND1_MTC (SV); SEQ ID NO: 1379, CCND1_MTC (SV); SEQ ID NO: 1380, CCND1_MTC (SV); SEQ ID NO: 1381, CCND1_MTC (SV); SEQ ID NO: 1382, CCND1_MTC (SV); SEQ ID NO: 1383, CCND1_MTC (SV); SEQ ID NO: 1384, CCND1_MTC (SV); SEQ ID NO: 1385, CCND1_MTC (SV); SEQ ID NO: 1386, CCND1_MTC (SV); SEQ ID NO: 1387, CCND1_MTC (SV); SEQ ID NO: 1388, CCND1_MTC (SV); SEQ ID NO: 1389, CCND1_MTC (SV); SEQ ID NO: 1390, CCND1_MTC (SV); SEQ ID NO: 1391, CCND1_MTC (SV); SEQ ID NO: 1392, CCND1_MTC (SV); SEQ ID NO: 1393, CCND1_promoter (SV); SEQ ID NO: 1394, CCND1_promoter (SV); SEQ ID NO: 1395, CCND1_promoter (SV); SEQ ID NO: 1396, CCND1_promoter (SV); SEQ ID NO: 1397, CCND1_promoter (SV); SEQ ID NO: 1398, CCND1_promoter (SV); SEQ ID NO: 1399, CCND1_promoter (SV); SEQ ID NO: 1400, CCND1_promoter (SV); SEQ ID NO: 1401, CCND1_promoter (SV); SEQ ID NO: 1402, CCND1_promoter (SV); SEQ ID NO: 1403, CCND1_promoter (SV); SEQ ID NO: 1404, CCND1_promoter (SV); SEQ ID NO: 1405, CCND1_promoter (SV); SEQ ID NO: 1406, CCND1_promoter (SV); SEQ ID NO: 1407, CCND1_promoter (SV); SEQ ID NO: 1408, CCND1_promoter (SV); SEQ ID NO: 1409, CCND1_promoter (SV); SEQ ID NO: 1410, CCND1_promoter (SV); SEQ ID NO: 1411, CCND1_promoter (SV); SEQ ID NO: 1412, CCND1_promoter (SV); SEQ ID NO: 1413, CCND1_promoter (SV); SEQ ID NO: 1414, CCND1_promoter (SV); SEQ ID NO: 1415, CCND1_promoter (SV); SEQ ID NO: 1416, CCND1_promoter (SV); SEQ ID NO: 1417, CCND1_promoter (SV); SEQ ID NO: 1418, CCND1_promoter (SV); SEQ ID NO: 1419, CCND1_promoter (SV); SEQ ID NO: 1420, CCND1_promoter (SV); SEQ ID NO: 1421, CCND1_promoter (SV); SEQ ID NO: 1422, CCND1_promoter (SV); SEQ ID NO: 1423, CCND1_promoter (SV); SEQ ID NO: 1424, CCND1_promoter (SV); SEQ ID NO: 1425, CCND1_promoter (SV); SEQ ID NO: 1426, CCND1_promoter (SV); SEQ ID NO: 1427, CCND1_promoter (SV); SEQ ID NO: 1428, CCND1_promoter (SV); SEQ ID NO: 1429, CCND1_promoter (SV); SEQ ID NO: 1430, CCND1_promoter (SV); SEQ ID NO: 1431, CCND1_promoter (SV); SEQ ID NO: 1432, CCND1_promoter (SV); SEQ ID NO: 1433, CCND1_promoter (SV); SEQ ID NO: 1434, CCND1_promoter (SV); SEQ ID NO: 1435, CCND1_promoter (SV); SEQ ID NO: 1436, CCND1_promoter (SV); SEQ ID NO: 1437, CCND1_promoter (SV); SEQ ID NO: 1438, CCND1_promoter (SV); SEQ ID NO: 1439, CCND1_promoter (SV); SEQ ID NO: 1440, CCND1_promoter (SV); SEQ ID NO: 1441, CCND1_promoter (SV); SEQ ID NO: 1442, CCND1_promoter (SV); SEQ ID NO: 1443, CCND1_promoter (SV); SEQ ID NO: 1444, CCND1_SV (SV); SEQ ID NO: 1445, CCND1_promoter (SV); SEQ ID NO: 1446, CCND1_promoter (SV); SEQ ID NO: 1447, CCND1_SV (SV); SEQ ID NO: 1448, CCND1_SV (SV); SEQ ID NO: 1449, CCND1 (Gene); SEQ ID NO: 1450, CCND1 (Gene); SEQ ID NO: 1451, CCND1 (Gene); SEQ ID NO: 1452, 11Q_DLBCL (ARM); SEQ ID NO: 1453, 11Q_DLBCL (ARM); SEQ ID NO: 1454, 11Q_DLBCL (ARM); SEQ ID NO: 1455, 11Q_DLBCL (ARM); SEQ ID NO: 1456, 11Q_DLBCL (ARM); SEQ ID NO: 1457, 11Q_DLBCL (ARM); SEQ ID NO: 1458, 11Q_DLBCL (ARM); SEQ ID NO: 1459, 11Q_DLBCL (ARM); SEQ ID NO: 1460, 11Q_DLBCL (ARM); SEQ ID NO: 1461, 11Q_DLBCL (ARM); SEQ ID NO: 1462, 11Q_DLBCL (ARM); SEQ ID NO: 1463, 11Q_DLBCL (ARM); SEQ ID NO: 1464, 11Q_DLBCL (ARM); SEQ ID NO: 1465, 11Q_DLBCL (ARM); SEQ ID NO: 1466, 11Q_DLBCL (ARM); SEQ ID NO: 1467, 11Q_DLBCL (ARM); SEQ ID NO: 1468, 11Q_DLBCL (ARM); SEQ ID NO: 1469, 11Q_DLBCL (ARM); SEQ ID NO: 1470, 11Q_DLBCL (ARM); SEQ ID NO: 1471, 11Q_DLBCL (ARM); SEQ ID NO: 1472, 11Q_DLBCL (ARM); SEQ ID NO: 1473, 11Q_DLBCL (ARM); SEQ ID NO: 1474, 11Q_DLBCL (ARM); SEQ ID NO: 1475, 11Q_DLBCL (ARM); SEQ ID NO: 1476, 11Q_DLBCL (ARM); SEQ ID NO: 1477, 11Q_DLBCL (ARM); SEQ ID NO: 1478, 11Q_DLBCL (ARM); SEQ ID NO: 1479, 11Q_DLBCL (ARM); SEQ ID NO: 1480, 11Q_DLBCL (ARM); SEQ ID NO: 1481, 11Q_DLBCL (ARM); SEQ ID NO: 1482, 11Q_DLBCL (ARM); SEQ ID NO: 1483, BIRC3 (Gene); SEQ ID NO: 1484, BIRC3 (Gene); SEQ ID NO: 1485, BIRC3 (Gene); SEQ ID NO: 1486, BIRC3 (Gene); SEQ ID NO: 1487, BIRC3 (Gene); SEQ ID NO: 1488, BIRC3 (Gene); SEQ ID NO: 1489, BIRC3 (Gene); SEQ ID NO: 1490, BIRC3 (Gene); SEQ ID NO: 1491, BIRC3 (Gene); SEQ ID NO: 1492, BIRC3 (Gene); SEQ ID NO: 1493, 11Q_DLBCL (ARM); SEQ ID NO: 1494, 11Q_DLBCL (ARM); SEQ ID NO: 1495, 11Q_DLBCL (ARM); SEQ ID NO: 1496, 11Q_DLBCL (ARM); SEQ ID NO: 1497, ATM (Gene); SEQ ID NO: 1498, ATM (Gene); SEQ ID NO: 1499, ATM (Gene); SEQ ID NO: 1500, ATM (Gene); SEQ ID NO: 1501, ATM (Gene); SEQ ID NO: 1502, ATM (Gene); SEQ ID NO: 1503, ATM (Gene); SEQ ID NO: 1504, ATM (Gene); SEQ ID NO: 1505, ATM (Gene); SEQ ID NO: 1506, ATM (Gene); SEQ ID NO: 1507, ATM (Gene); SEQ ID NO: 1508, ATM (Gene); SEQ ID NO: 1509, ATM (Gene); SEQ ID NO: 1510, ATM (Gene); SEQ ID NO: 1511, ATM (Gene); SEQ ID NO: 1512, ATM (Gene); SEQ ID NO: 1513, ATM (Gene); SEQ ID NO: 1514, ATM (Gene); SEQ ID NO: 1515, ATM (Gene); SEQ ID NO: 1516, ATM (Gene); SEQ ID NO: 1517, ATM (Gene); SEQ ID NO: 1518, ATM (Gene); SEQ ID NO: 1519, ATM (Gene); SEQ ID NO: 1520, ATM (Gene); SEQ ID NO: 1521, ATM (Gene); SEQ ID NO: 1522, ATM (Gene); SEQ ID NO: 1523, ATM (Gene); SEQ ID NO: 1524, ATM (Gene); SEQ ID NO: 1525, ATM (Gene); SEQ ID NO: 1526, ATM (Gene); SEQ ID NO: 1527, ATM (Gene); SEQ ID NO: 1528, ATM (Gene); SEQ ID NO: 1529, ATM (Gene); SEQ ID NO: 1530, ATM (Gene); SEQ ID NO: 1531, ATM (Gene); SEQ ID NO: 1532, ATM (Gene); SEQ ID NO: 1533, ATM (Gene); SEQ ID NO: 1534, ATM (Gene); SEQ ID NO: 1535, ATM (Gene); SEQ ID NO: 1536, ATM (Gene); SEQ ID NO: 1537, ATM (Gene); SEQ ID NO: 1538, ATM (Gene); SEQ ID NO: 1539, ATM (Gene); SEQ ID NO: 1540, ATM (Gene); SEQ ID NO: 1541, ATM (Gene); SEQ ID NO: 1542, ATM (Gene); SEQ ID NO: 1543, ATM (Gene); SEQ ID NO: 1544, ATM (Gene); SEQ ID NO: 1545, ATM (Gene); SEQ ID NO: 1546, ATM (Gene); SEQ ID NO: 1547, ATM (Gene); SEQ ID NO: 1548, ATM (Gene); SEQ ID NO: 1549, ATM (Gene); SEQ ID NO: 1550, ATM (Gene); SEQ ID NO: 1551, ATM (Gene); SEQ ID NO: 1552, ATM (Gene); SEQ ID NO: 1553, ATM (Gene); SEQ ID NO: 1554, ATM (Gene); SEQ ID NO: 1555, ATM (Gene); SEQ ID NO: 1556, ATM (Gene); SEQ ID NO: 1557, ATM (Gene); SEQ ID NO: 1558, ATM (Gene); SEQ ID NO: 1559, ATM (Gene); SEQ ID NO: 1560, 11Q_DLBCL (ARM); SEQ ID NO: 1561, FP (FP); SEQ ID NO: 1562, POU2AF1 (Gene); SEQ ID NO: 1563, POU2AF1 (Gene); SEQ ID NO: 1564, POU2AF1 (Gene); SEQ ID NO: 1565, POU2AF1 (Gene); SEQ ID NO: 1566, POU2AF1 (Gene); SEQ ID NO: 1567, 11Q_DLBCL (ARM); SEQ ID NO: 1568, 11Q_DLBCL (ARM); SEQ ID NO: 1569, 11Q_DLBCL (ARM); SEQ ID NO: 1570, 11Q_DLBCL (ARM); SEQ ID NO: 1571, 11Q_DLBCL (ARM); SEQ ID NO: 1572, 11Q_DLBCL (ARM); SEQ ID NO: 1573, 11Q_DLBCL (ARM); SEQ ID NO: 1574, 11Q_DLBCL (ARM); SEQ ID NO: 1575, 11Q_DLBCL (ARM); SEQ ID NO: 1576, 11q23.3_DLBCL (FOCAL); SEQ ID NO: 1577, 11q23.3_DLBCL (FOCAL); SEQ ID NO: 1578, 11q23.3_DLBCL (FOCAL); SEQ ID NO: 1579, 11q23.3_DLBCL (FOCAL); SEQ ID NO: 1580, 11q23.3_DLBCL (FOCAL); SEQ ID NO: 1581, IL10RA (Gene); SEQ ID NO: 1582, IL10RA (Gene); SEQ ID NO: 1583, IL10RA (Gene); SEQ ID NO: 1584, IL10RA (Gene); SEQ ID NO: 1585, IL10RA (Gene); SEQ ID NO: 1586, IL10RA (Gene); SEQ ID NO: 1587, IL10RA (Gene); SEQ ID NO: 1588, IL10RA (Gene); SEQ ID NO: 1589, 11q23.3_DLBCL (FOCAL); SEQ ID NO: 1590, 11q23.3_DLBCL (FOCAL); SEQ ID NO: 1591, MSI (MSI); SEQ ID NO: 1592, MSI (MSI); SEQ ID NO: 1593, 11Q_DLBCL (ARM); SEQ ID NO: 1594, 11Q_DLBCL (ARM); SEQ ID NO: 1595, 11Q_DLBCL (ARM); SEQ ID NO: 1596, 11Q_DLBCL (ARM); SEQ ID NO: 1597, 11Q_DLBCL (ARM); SEQ ID NO: 1598, 11Q_DLBCL (ARM); SEQ ID NO: 1599, 11Q_DLBCL (ARM); SEQ ID NO: 1600, 11Q_DLBCL (ARM); SEQ ID NO: 1601, 11Q_DLBCL (ARM); SEQ ID NO: 1602, 11Q_DLBCL (ARM); SEQ ID NO: 1603, 11Q_DLBCL (ARM); SEQ ID NO: 1604, MSI (MSI); SEQ ID NO: 1605, MSI (MSI); SEQ ID NO: 1606, 11Q_DLBCL (ARM); SEQ ID NO: 1607, 11Q_DLBCL (ARM); SEQ ID NO: 1608, 11Q_DLBCL (ARM); SEQ ID NO: 1609, 11Q_DLBCL (ARM); SEQ ID NO: 1610, ETS1 (Gene); SEQ ID NO: 1611, ETS1 (Gene); SEQ ID NO: 1612, ETS1 (Gene); SEQ ID NO: 1613, ETS1 (Gene); SEQ ID NO: 1614, ETS1 (Gene); SEQ ID NO: 1615, ETS1 (Gene); SEQ ID NO: 1616, ETS1 (Gene); SEQ ID NO: 1617, ETS1 (Gene); SEQ ID NO: 1618, ETS1 (Gene); SEQ ID NO: 1619, ETS1 (Gene); SEQ ID NO: 1620, ETS1 (Gene); SEQ ID NO: 1621, 11Q_DLBCL (ARM); SEQ ID NO: 1622, 11Q_DLBCL (ARM); SEQ ID NO: 1623, 11Q_DLBCL (ARM); SEQ ID NO: 1624, 11Q_DLBCL (ARM); SEQ ID NO: 1625, 11Q_DLBCL (ARM); SEQ ID NO: 1626, 11Q_DLBCL (ARM); SEQ ID NO: 1627, 11Q_DLBCL (ARM); SEQ ID NO: 1628, 11Q_DLBCL (ARM); SEQ ID NO: 1629, 11Q_DLBCL (ARM); SEQ ID NO: 1630, 11Q_DLBCL (ARM); SEQ ID NO: 1631, 11Q_DLBCL (ARM); SEQ ID NO: 1632, 11Q_DLBCL (ARM); SEQ ID NO: 1633, FP (FP); SEQ ID NO: 1634, 11Q_DLBCL (ARM); SEQ ID NO: 1635, MSI (MSI); SEQ ID NO: 1636, MSI (MSI); SEQ ID NO: 1637, FP (FP); SEQ ID NO: 1638, 12P_DLBCL (ARM); SEQ ID NO: 1639, 12P_DLBCL (ARM); SEQ ID NO: 1640, 12P_DLBCL (ARM); SEQ ID NO: 1641, 12P_DLBCL (ARM); SEQ ID NO: 1642, 12P_DLBCL (ARM); SEQ ID NO: 1643, 12P_DLBCL (ARM); SEQ ID NO: 1644, 12P_DLBCL (ARM); SEQ ID NO: 1645, 12P_DLBCL (ARM); SEQ ID NO: 1646, PTPN6 (Gene); SEQ ID NO: 1647, PTPN6 (Gene); SEQ ID NO: 1648, PTPN6 (Gene); SEQ ID NO: 1649, PTPN6 (Gene); SEQ ID NO: 1650, PTPN6 (Gene); SEQ ID NO: 1651, PTPN6 (Gene); SEQ ID NO: 1652, PTPN6 (Gene); SEQ ID NO: 1653, PTPN6 (Gene); SEQ ID NO: 1654, PTPN6 (Gene); SEQ ID NO: 1655, PTPN6 (Gene); SEQ ID NO: 1656, PTPN6 (Gene); SEQ ID NO: 1657, PTPN6 (Gene); SEQ ID NO: 1658, PTPN6 (Gene); SEQ ID NO: 1659, PTPN6 (Gene); SEQ ID NO: 1660, PTPN6 (Gene); SEQ ID NO: 1661, PTPN6 (Gene); SEQ ID NO: 1662, 12P_DLBCL (ARM); SEQ ID NO: 1663, 12p13.2_DLBCL (FOCAL); SEQ ID NO: 1664, 12p13.2_DLBCL (FOCAL); SEQ ID NO: 1665, 12p13.2_DLBCL (FOCAL); SEQ ID NO: 1666, 12p13.2_DLBCL (FOCAL); SEQ ID NO: 1667, 12p13.2_DLBCL (FOCAL); SEQ ID NO: 1668, ETV6 (Gene); SEQ ID NO: 1669, 12p13.2_DLBCL (FOCAL); SEQ ID NO: 1670, ETV6_SV (SV); SEQ ID NO: 1671, ETV6_SV (SV); SEQ ID NO: 1672, ETV6_SV (SV); SEQ ID NO: 1673, ETV6_SV (SV); SEQ ID NO: 1674, ETV6_SV (SV); SEQ ID NO: 1675, ETV6_SV (SV); SEQ ID NO: 1676, ETV6_SV (SV); SEQ ID NO: 1677, ETV6_SV (SV); SEQ ID NO: 1678, ETV6_SV (SV); SEQ ID NO: 1679, ETV6_SV (SV); SEQ ID NO: 1680, ETV6_SV (SV); SEQ ID NO: 1681, ETV6_SV (SV); SEQ ID NO: 1682, ETV6_SV (SV); SEQ ID NO: 1683, ETV6_SV (SV); SEQ ID NO: 1684, ETV6_SV (SV); SEQ ID NO: 1685, ETV6_SV (SV); SEQ ID NO: 1686, ETV6_SV (SV); SEQ ID NO: 1687, ETV6_SV (SV); SEQ ID NO: 1688, ETV6_SV (SV); SEQ ID NO: 1689, ETV6_SV (SV); SEQ ID NO: 1690, ETV6_SV (SV); SEQ ID NO: 1691, ETV6_SV (SV); SEQ ID NO: 1692, ETV6_SV (SV); SEQ ID NO: 1693, ETV6_SV (SV); SEQ ID NO: 1694, ETV6_SV (SV); SEQ ID NO: 1695, ETV6_SV (SV); SEQ ID NO: 1696, ETV6_SV (SV); SEQ ID NO: 1697, ETV6_SV (SV); SEQ ID NO: 1698, ETV6_SV (SV); SEQ ID NO: 1699, ETV6_SV (SV); SEQ ID NO: 1700, ETV6_SV (SV); SEQ ID NO: 1701, ETV6_SV (SV); SEQ ID NO: 1702, ETV6_SV (SV); SEQ ID NO: 1703, ETV6_SV (SV); SEQ ID NO: 1704, ETV6_SV (SV); SEQ ID NO: 1705, ETV6_SV (SV); SEQ ID NO: 1706, ETV6_SV (SV); SEQ ID NO: 1707, ETV6_SV (SV); SEQ ID NO: 1708, ETV6_SV (SV); SEQ ID NO: 1709, ETV6_SV (SV); SEQ ID NO: 1710, ETV6_SV (SV); SEQ ID NO: 1711, ETV6_SV (SV); SEQ ID NO: 1712, ETV6_SV (SV); SEQ ID NO: 1713, ETV6_SV (SV); SEQ ID NO: 1714, ETV6_SV (SV); SEQ ID NO: 1715, ETV6_SV (SV); SEQ ID NO: 1716, ETV6_SV (SV); SEQ ID NO: 1717, ETV6_SV (SV); SEQ ID NO: 1718, ETV6_SV (SV); SEQ ID NO: 1719, ETV6_SV (SV); SEQ ID NO: 1720, ETV6_SV (SV); SEQ ID NO: 1721, ETV6_SV (SV); SEQ ID NO: 1722, ETV6_SV (SV); SEQ ID NO: 1723, ETV6_SV (SV); SEQ ID NO: 1724, ETV6_SV (SV); SEQ ID NO: 1725, ETV6_SV (SV); SEQ ID NO: 1726, ETV6_SV (SV); SEQ ID NO: 1727, ETV6_SV (SV); SEQ ID NO: 1728, ETV6_SV (SV); SEQ ID NO: 1729, ETV6_SV (SV); SEQ ID NO: 1730, ETV6_SV (SV); SEQ ID NO: 1731, ETV6_SV (SV); SEQ ID NO: 1732, ETV6_SV (SV); SEQ ID NO: 1733, ETV6_SV (SV); SEQ ID NO: 1734, ETV6_SV (SV); SEQ ID NO: 1735, ETV6_SV (SV); SEQ ID NO: 1736, ETV6_SV (SV); SEQ ID NO: 1737, ETV6_SV (SV); SEQ ID NO: 1738, ETV6_SV (SV); SEQ ID NO: 1739, ETV6_SV (SV); SEQ ID NO: 1740, ETV6_SV (SV); SEQ ID NO: 1741, ETV6_SV (SV); SEQ ID NO: 1742, ETV6_SV (SV); SEQ ID NO: 1743, ETV6_SV (SV); SEQ ID NO: 1744, ETV6_SV (SV); SEQ ID NO: 1745, ETV6_SV (SV); SEQ ID NO: 1746, ETV6_SV (SV); SEQ ID NO: 1747, ETV6_SV (SV); SEQ ID NO: 1748, ETV6_SV (SV); SEQ ID NO: 1749, ETV6_SV (SV); SEQ ID NO: 1750, ETV6_SV (SV); SEQ ID NO: 1751, ETV6_SV (SV); SEQ ID NO: 1752, ETV6_SV (SV); SEQ ID NO: 1753, ETV6_SV (SV); SEQ ID NO: 1754, ETV6_SV (SV); SEQ ID NO: 1755, ETV6_SV (SV); SEQ ID NO: 1756, ETV6_SV (SV); SEQ ID NO: 1757, ETV6_SV (SV); SEQ ID NO: 1758, ETV6_SV (SV); SEQ ID NO: 1759, ETV6_SV (SV); SEQ ID NO: 1760, ETV6_SV (SV); SEQ ID NO: 1761, ETV6_SV (SV); SEQ ID NO: 1762, ETV6_SV (SV); SEQ ID NO: 1763, ETV6_SV (SV); SEQ ID NO: 1764, ETV6_SV (SV); SEQ ID NO: 1765, ETV6_SV (SV); SEQ ID NO: 1766, ETV6_SV (SV); SEQ ID NO: 1767, ETV6_SV (SV); SEQ ID NO: 1768, ETV6_SV (SV); SEQ ID NO: 1769, ETV6_SV (SV); SEQ ID NO: 1770, ETV6_SV (SV); SEQ ID NO: 1771, ETV6_SV (SV); SEQ ID NO: 1772, ETV6_SV (SV); SEQ ID NO: 1773, ETV6_SV (SV); SEQ ID NO: 1774, ETV6_SV (SV); SEQ ID NO: 1775, ETV6_SV (SV); SEQ ID NO: 1776, ETV6_SV (SV); SEQ ID NO: 1777, ETV6_SV (SV); SEQ ID NO: 1778, ETV6_SV (SV); SEQ ID NO: 1779, ETV6_SV (SV); SEQ ID NO: 1780, ETV6_SV (SV); SEQ ID NO: 1781, ETV6_SV (SV); SEQ ID NO: 1782, ETV6_SV (SV); SEQ ID NO: 1783, ETV6_SV (SV); SEQ ID NO: 1784, ETV6_SV (SV); SEQ ID NO: 1785, ETV6_SV (SV); SEQ ID NO: 1786, ETV6_SV (SV); SEQ ID NO: 1787, ETV6_SV (SV); SEQ ID NO: 1788, ETV6_SV (SV); SEQ ID NO: 1789, ETV6_SV (SV); SEQ ID NO: 1790, ETV6_SV (SV); SEQ ID NO: 1791, ETV6_SV (SV); SEQ ID NO: 1792, ETV6_SV (SV); SEQ ID NO: 1793, ETV6_SV (SV); SEQ ID NO: 1794, ETV6_SV (SV); SEQ ID NO: 1795, ETV6_SV (SV); SEQ ID NO: 1796, ETV6_SV (SV); SEQ ID NO: 1797, ETV6_SV (SV); SEQ ID NO: 1798, ETV6_SV (SV); SEQ ID NO: 1799, ETV6_SV (SV); SEQ ID NO: 1800, ETV6_SV (SV); SEQ ID NO: 1801, ETV6_SV (SV); SEQ ID NO: 1802, ETV6_SV (SV); SEQ ID NO: 1803, ETV6_SV (SV); SEQ ID NO: 1804, ETV6_SV (SV); SEQ ID NO: 1805, ETV6_SV (SV); SEQ ID NO: 1806, ETV6_SV (SV); SEQ ID NO: 1807, ETV6_SV (SV); SEQ ID NO: 1808, ETV6_SV (SV); SEQ ID NO: 1809, ETV6_SV (SV); SEQ ID NO: 1810, ETV6_SV (SV); SEQ ID NO: 1811, ETV6_SV (SV); SEQ ID NO: 1812, ETV6_SV (SV); SEQ ID NO: 1813, ETV6_SV (SV); SEQ ID NO: 1814, ETV6_SV (SV); SEQ ID NO: 1815, ETV6_SV (SV); SEQ ID NO: 1816, ETV6_SV (SV); SEQ ID NO: 1817, ETV6_SV (SV); SEQ ID NO: 1818, ETV6_SV (SV); SEQ ID NO: 1819, ETV6_SV (SV); SEQ ID NO: 1820, ETV6_SV (SV); SEQ ID NO: 1821, ETV6_SV (SV); SEQ ID NO: 1822, ETV6_SV (SV); SEQ ID NO: 1823, ETV6_SV (SV); SEQ ID NO: 1824, ETV6_SV (SV); SEQ ID NO: 1825, ETV6_SV (SV); SEQ ID NO: 1826, ETV6_SV (SV); SEQ ID NO: 1827, ETV6_SV (SV); SEQ ID NO: 1828, ETV6_SV (SV); SEQ ID NO: 1829, ETV6_SV (SV); SEQ ID NO: 1830, ETV6_SV (SV); SEQ ID NO: 1831, ETV6_SV (SV); SEQ ID NO: 1832, ETV6_SV (SV); SEQ ID NO: 1833, ETV6_SV (SV); SEQ ID NO: 1834, ETV6_SV (SV); SEQ ID NO: 1835, ETV6_SV (SV); SEQ ID NO: 1836, ETV6_SV (SV); SEQ ID NO: 1837, ETV6_SV (SV); SEQ ID NO: 1838, ETV6_SV (SV); SEQ ID NO: 1839, ETV6_SV (SV); SEQ ID NO: 1840, ETV6_SV (SV); SEQ ID NO: 1841, ETV6_SV (SV); SEQ ID NO: 1842, ETV6_SV (SV); SEQ ID NO: 1843, ETV6_SV (SV); SEQ ID NO: 1844, ETV6_SV (SV); SEQ ID NO: 1845, ETV6_SV (SV); SEQ ID NO: 1846, ETV6_SV (SV); SEQ ID NO: 1847, ETV6_SV (SV); SEQ ID NO: 1848, ETV6_SV (SV); SEQ ID NO: 1849, ETV6_SV (SV); SEQ ID NO: 1850, ETV6_SV (SV); SEQ ID NO: 1851, ETV6_SV (SV); SEQ ID NO: 1852, ETV6_SV (SV); SEQ ID NO: 1853, ETV6_SV (SV); SEQ ID NO: 1854, ETV6_SV (SV); SEQ ID NO: 1855, ETV6_SV (SV); SEQ ID NO: 1856, ETV6_SV (SV); SEQ ID NO: 1857, ETV6_SV (SV); SEQ ID NO: 1858, ETV6_SV (SV); SEQ ID NO: 1859, ETV6_SV (SV); SEQ ID NO: 1860, ETV6_SV (SV); SEQ ID NO: 1861, ETV6_SV (SV); SEQ ID NO: 1862, ETV6_SV (SV); SEQ ID NO: 1863, ETV6_SV (SV); SEQ ID NO: 1864, ETV6_SV (SV); SEQ ID NO: 1865, ETV6_SV (SV); SEQ ID NO: 1866, ETV6_SV (SV); SEQ ID NO: 1867, ETV6_SV (SV); SEQ ID NO: 1868, ETV6_SV (SV); SEQ ID NO: 1869, ETV6_SV (SV); SEQ ID NO: 1870, ETV6_SV (SV); SEQ ID NO: 1871, ETV6_SV (SV); SEQ ID NO: 1872, ETV6_SV (SV); SEQ ID NO: 1873, ETV6_SV (SV); SEQ ID NO: 1874, ETV6_SV (SV); SEQ ID NO: 1875, ETV6_SV (SV); SEQ ID NO: 1876, ETV6_SV (SV); SEQ ID NO: 1877, ETV6_SV (SV); SEQ ID NO: 1878, ETV6_SV (SV); SEQ ID NO: 1879, ETV6_SV (SV); SEQ ID NO: 1880, ETV6_SV (SV); SEQ ID NO: 1881, ETV6_SV (SV); SEQ ID NO: 1882, ETV6_SV (SV); SEQ ID NO: 1883, ETV6_SV (SV); SEQ ID NO: 1884, ETV6_SV (SV); SEQ ID NO: 1885, ETV6_SV (SV); SEQ ID NO: 1886, ETV6_SV (SV); SEQ ID NO: 1887, ETV6_SV (SV); SEQ ID NO: 1888, ETV6_SV (SV); SEQ ID NO: 1889, ETV6_SV (SV); SEQ ID NO: 1890, ETV6_SV (SV); SEQ ID NO: 1891, ETV6_SV (SV); SEQ ID NO: 1892, ETV6_SV (SV); SEQ ID NO: 1893, ETV6_SV (SV); SEQ ID NO: 1894, ETV6_SV (SV); SEQ ID NO: 1895, ETV6_SV (SV); SEQ ID NO: 1896, ETV6_SV (SV); SEQ ID NO: 1897, ETV6_SV (SV); SEQ ID NO: 1898, ETV6_SV (SV); SEQ ID NO: 1899, ETV6_SV (SV); SEQ ID NO: 1900, ETV6_SV (SV); SEQ ID NO: 1901, ETV6_SV (SV); SEQ ID NO: 1902, ETV6_SV (SV); SEQ ID NO: 1903, ETV6_SV (SV); SEQ ID NO: 1904, ETV6_SV (SV); SEQ ID NO: 1905, ETV6_SV (SV); SEQ ID NO: 1906, ETV6_SV (SV); SEQ ID NO: 1907, ETV6_SV (SV); SEQ ID NO: 1908, ETV6_SV (SV); SEQ ID NO: 1909, ETV6_SV (SV); SEQ ID NO: 1910, ETV6_SV (SV); SEQ ID NO: 1911, ETV6_SV (SV); SEQ ID NO: 1912, ETV6_SV (SV); SEQ ID NO: 1913, ETV6_SV (SV); SEQ ID NO: 1914, ETV6_SV (SV); SEQ ID NO: 1915, ETV6 (Gene); SEQ ID NO: 1916, ETV6 (Gene); SEQ ID NO: 1917, ETV6 (Gene); SEQ ID NO: 1918, ETV6 (Gene); SEQ ID NO: 1919, ETV6 (Gene); SEQ ID NO: 1920, ETV6 (Gene); SEQ ID NO: 1921, 12p13.2_DLBCL (FOCAL); SEQ ID NO: 1922, 12p13.2_DLBCL (FOCAL); SEQ ID NO: 1923, 12p13.2_DLBCL (FOCAL); SEQ ID NO: 1924, CDKN1B (Gene); SEQ ID NO: 1925, CDKN1B (Gene); SEQ ID NO: 1926, 12p13.2_DLBCL (FOCAL); SEQ ID NO: 1927, 12p13.2_DLBCL (FOCAL); SEQ ID NO: 1928, 12p13.2_DLBCL (FOCAL); SEQ ID NO: 1929, 12p13.2_DLBCL (FOCAL); SEQ ID NO: 1930, 12P_DLBCL (ARM); SEQ ID NO: 1931, 12P_DLBCL (ARM); SEQ ID NO: 1932, 12P_DLBCL (ARM); SEQ ID NO: 1933, 12P_DLBCL (ARM); SEQ ID NO: 1934, 12P_DLBCL (ARM); SEQ ID NO: 1935, 12P_DLBCL (ARM); SEQ ID NO: 1936, FP (FP); SEQ ID NO: 1937, 12P_DLBCL (ARM); SEQ ID NO: 1938, KRAS (Gene); SEQ ID NO: 1939, KRAS (Gene); SEQ ID NO: 1940, KRAS (Gene); SEQ ID NO: 1941, KRAS (Gene); SEQ ID NO: 1942, KRAS (Gene); SEQ ID NO: 1943, 12P_DLBCL (ARM); SEQ ID NO: 1944, FP (FP); SEQ ID NO: 1945, 12P_DLBCL (ARM); SEQ ID NO: 1946, 12P_DLBCL (ARM); SEQ ID NO: 1947, 12P_DLBCL (ARM); SEQ ID NO: 1948, 12P_DLBCL (ARM); SEQ ID NO: 1949, 12P_DLBCL (ARM); SEQ ID NO: 1950, 12P_DLBCL (ARM); SEQ ID NO: 1951, 12Q (ARM); SEQ ID NO: 1952, 12Q (ARM); SEQ ID NO: 1953, 12Q (ARM); SEQ ID NO: 1954, 12Q (ARM); SEQ ID NO: 1955, 12Q (ARM); SEQ ID NO: 1956, 12Q (ARM); SEQ ID NO: 1957, 12Q (ARM); SEQ ID NO: 1958, 12Q (ARM); SEQ ID NO: 1959, FP (FP); SEQ ID NO: 1960, 12Q (ARM); SEQ ID NO: 1961, 12Q (ARM); SEQ ID NO: 1962, KMT2D (Gene); SEQ ID NO: 1963, KMT2D (Gene); SEQ ID NO: 1964, KMT2D (Gene); SEQ ID NO: 1965, KMT2D (Gene); SEQ ID NO: 1966, KMT2D (Gene); SEQ ID NO: 1967, KMT2D (Gene); SEQ ID NO: 1968, KMT2D (Gene); SEQ ID NO: 1969, KMT2D (Gene); SEQ ID NO: 1970, KMT2D (Gene); SEQ ID NO: 1971, KMT2D (Gene); SEQ ID NO: 1972, KMT2D (Gene); SEQ ID NO: 1973, KMT2D (Gene); SEQ ID NO: 1974, KMT2D (Gene); SEQ ID NO: 1975, KMT2D (Gene); SEQ ID NO: 1976, KMT2D (Gene); SEQ ID NO: 1977, KMT2D (Gene); SEQ ID NO: 1978, KMT2D (Gene); SEQ ID NO: 1979, KMT2D (Gene); SEQ ID NO: 1980, KMT2D (Gene); SEQ ID NO: 1981, KMT2D (Gene); SEQ ID NO: 1982, KMT2D (Gene); SEQ ID NO: 1983, KMT2D (Gene); SEQ ID NO: 1984, KMT2D (Gene); SEQ ID NO: 1985, KMT2D (Gene); SEQ ID NO: 1986, KMT2D (Gene); SEQ ID NO: 1987, KMT2D (Gene); SEQ ID NO: 1988, KMT2D (Gene); SEQ ID NO: 1989, KMT2D (Gene); SEQ ID NO: 1990, KMT2D (Gene); SEQ ID NO: 1991, KMT2D (Gene); SEQ ID NO: 1992, KMT2D (Gene); SEQ ID NO: 1993, KMT2D (Gene); SEQ ID NO: 1994, KMT2D (Gene); SEQ ID NO: 1995, KMT2D (Gene); SEQ ID NO: 1996, KMT2D (Gene); SEQ ID NO: 1997, KMT2D (Gene); SEQ ID NO: 1998, KMT2D (Gene); SEQ ID NO: 1999, KMT2D (Gene); SEQ ID NO: 2000, KMT2D (Gene); SEQ ID NO: 2001, KMT2D (Gene); SEQ ID NO: 2002, KMT2D (Gene); SEQ ID NO: 2003, KMT2D (Gene); SEQ ID NO: 2004, KMT2D (Gene); SEQ ID NO: 2005, KMT2D (Gene); SEQ ID NO: 2006, KMT2D (Gene); SEQ ID NO: 2007, KMT2D (Gene); SEQ ID NO: 2008, KMT2D (Gene); SEQ ID NO: 2009, KMT2D (Gene); SEQ ID NO: 2010, KMT2D (Gene); SEQ ID NO: 2011, KMT2D (Gene); SEQ ID NO: 2012, KMT2D (Gene); SEQ ID NO: 2013, KMT2D (Gene); SEQ ID NO: 2014, KMT2D (Gene); SEQ ID NO: 2015, KMT2D (Gene); SEQ ID NO: 2016, KMT2D (Gene); SEQ ID NO: 2017, KMT2D (Gene); SEQ ID NO: 2018, KMT2D (Gene); SEQ ID NO: 2019, KMT2D (Gene); SEQ ID NO: 2020, KMT2D (Gene); SEQ ID NO: 2021, KMT2D (Gene); SEQ ID NO: 2022, KMT2D (Gene); SEQ ID NO: 2023, KMT2D (Gene); SEQ ID NO: 2024, KMT2D (Gene); SEQ ID NO: 2025, KMT2D (Gene); SEQ ID NO: 2026, KMT2D (Gene); SEQ ID NO: 2027, KMT2D (Gene); SEQ ID NO: 2028, KMT2D (Gene); SEQ ID NO: 2029, KMT2D (Gene); SEQ ID NO: 2030, KMT2D (Gene); SEQ ID NO: 2031, KMT2D (Gene); SEQ ID NO: 2032, KMT2D (Gene); SEQ ID NO: 2033, KMT2D (Gene); SEQ ID NO: 2034, KMT2D (Gene); SEQ ID NO: 2035, KMT2D (Gene); SEQ ID NO: 2036, KMT2D (Gene); SEQ ID NO: 2037, KMT2D (Gene); SEQ ID NO: 2038, KMT2D (Gene); SEQ ID NO: 2039, KMT2D (Gene); SEQ ID NO: 2040, KMT2D (Gene); SEQ ID NO: 2041, 12Q (ARM); SEQ ID NO: 2042, 12Q (ARM); SEQ ID NO: 2043, 12Q (ARM); SEQ ID NO: 2044, MSI (MSI); SEQ ID NO: 2045, MSI (MSI); SEQ ID NO: 2046, MSI (MSI); SEQ ID NO: 2047, MSI (MSI); SEQ ID NO: 2048, STAT6 (Gene); SEQ ID NO: 2049, STAT6 (Gene); SEQ ID NO: 2050, STAT6 (Gene); SEQ ID NO: 2051, STAT6 (Gene); SEQ ID NO: 2052, STAT6 (Gene); SEQ ID NO: 2053, STAT6 (Gene); SEQ ID NO: 2054, STAT6 (Gene); SEQ ID NO: 2055, STAT6 (Gene); SEQ ID NO: 2056, STAT6 (Gene); SEQ ID NO: 2057, STAT6 (Gene); SEQ ID NO: 2058, STAT6 (Gene); SEQ ID NO: 2059, STAT6 (Gene); SEQ ID NO: 2060, STAT6 (Gene); SEQ ID NO: 2061, STAT6 (Gene); SEQ ID NO: 2062, STAT6 (Gene); SEQ ID NO: 2063, STAT6 (Gene); SEQ ID NO: 2064, STAT6 (Gene); SEQ ID NO: 2065, STAT6 (Gene); SEQ ID NO: 2066, STAT6 (Gene); SEQ ID NO: 2067, STAT6 (Gene); SEQ ID NO: 2068, STAT6 (Gene); SEQ ID NO: 2069, 12Q (ARM); SEQ ID NO: 2070, 12Q (ARM); SEQ ID NO: 2071, 12Q (ARM); SEQ ID NO: 2072, 12Q (ARM); SEQ ID NO: 2073, 12Q (ARM); SEQ ID NO: 2074, 12Q (ARM); SEQ ID NO: 2075, 12Q (ARM); SEQ ID NO: 2076, 12Q (ARM); SEQ ID NO: 2077, 12Q (ARM); SEQ ID NO: 2078, 12Q (ARM); SEQ ID NO: 2079, 12Q (ARM); SEQ ID NO: 2080, 12Q (ARM); SEQ ID NO: 2081, 12Q (ARM); SEQ ID NO: 2082, 12Q (ARM); SEQ ID NO: 2083, 12Q (ARM); SEQ ID NO: 2084, 12Q (ARM); SEQ ID NO: 2085, 12Q (ARM); SEQ ID NO: 2086, 12Q (ARM); SEQ ID NO: 2087, 12Q (ARM); SEQ ID NO: 2088, 12Q (ARM); SEQ ID NO: 2089, 12Q (ARM); SEQ ID NO: 2090, 12Q (ARM); SEQ ID NO: 2091, 12Q (ARM); SEQ ID NO: 2092, BTG1 (Gene); SEQ ID NO: 2093, BTG1 (Gene); SEQ ID NO: 2094, BTG1 (Gene); SEQ ID NO: 2095, BTG1 (Gene); SEQ ID NO: 2096, 12Q (ARM); SEQ ID NO: 2097, 12Q (ARM); SEQ ID NO: 2098, 12Q (ARM); SEQ ID NO: 2099, 12Q (ARM); SEQ ID NO: 2100, 12Q (ARM); SEQ ID NO: 2101, 12Q (ARM); SEQ ID NO: 2102, 12Q (ARM); SEQ ID NO: 2103, 12Q (ARM); SEQ ID NO: 2104, 12Q (ARM); SEQ ID NO: 2105, 12Q (ARM); SEQ ID NO: 2106, FP (FP); SEQ ID NO: 2107, 12Q (ARM); SEQ ID NO: 2108, 12Q (ARM); SEQ ID NO: 2109, 12Q (ARM); SEQ ID NO: 2110, 12Q (ARM); SEQ ID NO: 2111, 12Q (ARM); SEQ ID NO: 2112, 12Q (ARM); SEQ ID NO: 2113, 12Q (ARM); SEQ ID NO: 2114, HVCN1 (Gene); SEQ ID NO: 2115, HVCN1 (Gene); SEQ ID NO: 2116, HVCN1 (Gene); SEQ ID NO: 2117, HVCN1 (Gene); SEQ ID NO: 2118, HVCN1 (Gene); SEQ ID NO: 2119, HVCN1 (Gene); SEQ ID NO: 2120, 12Q (ARM); SEQ ID NO: 2121, 12Q (ARM); SEQ ID NO: 2122, 12Q (ARM); SEQ ID NO: 2123, DTX1 (Gene); SEQ ID NO: 2124, DTX1 (Gene); SEQ ID NO: 2125, DTX1 (Gene); SEQ ID NO: 2126, DTX1 (Gene); SEQ ID NO: 2127, DTX1 (Gene); SEQ ID NO: 2128, DTX1 (Gene); SEQ ID NO: 2129, DTX1 (Gene); SEQ ID NO: 2130, DTX1 (Gene); SEQ ID NO: 2131, DTX1 (Gene); SEQ ID NO: 2132, DTX1 (Gene); SEQ ID NO: 2133, 12Q (ARM); SEQ ID NO: 2134, 12Q (ARM); SEQ ID NO: 2135, 12Q (ARM); SEQ ID NO: 2136, 12Q (ARM); SEQ ID NO: 2137, 12Q (ARM); SEQ ID NO: 2138, 12Q (ARM); SEQ ID NO: 2139, 12Q (ARM); SEQ ID NO: 2140, 12Q (ARM); SEQ ID NO: 2141, 12Q (ARM); SEQ ID NO: 2142, 12Q (ARM); SEQ ID NO: 2143, 12Q (ARM); SEQ ID NO: 2144, SETD1B (Gene); SEQ ID NO: 2145, SETD1B (Gene); SEQ ID NO: 2146, SETD1B (Gene); SEQ ID NO: 2147, SETD1B (Gene); SEQ ID NO: 2148, SETD1B (Gene); SEQ ID NO: 2149, SETD1B (Gene); SEQ ID NO: 2150, SETD1B (Gene); SEQ ID NO: 2151, SETD1B (Gene); SEQ ID NO: 2152, SETD1B (Gene); SEQ ID NO: 2153, SETD1B (Gene); SEQ ID NO: 2154, SETD1B (Gene); SEQ ID NO: 2155, SETD1B (Gene); SEQ ID NO: 2156, SETD1B (Gene); SEQ ID NO: 2157, SETD1B (Gene); SEQ ID NO: 2158, SETD1B (Gene); SEQ ID NO: 2159, SETD1B (Gene); SEQ ID NO: 2160, SETD1B (Gene); SEQ ID NO: 2161, SETD1B (Gene); SEQ ID NO: 2162, SETD1B (Gene); SEQ ID NO: 2163, SETD1B (Gene); SEQ ID NO: 2164, SETD1B (Gene); SEQ ID NO: 2165, SETD1B (Gene); SEQ ID NO: 2166, SETD1B (Gene); SEQ ID NO: 2167, SETD1B (Gene); SEQ ID NO: 2168, BCL7A (Gene); SEQ ID NO: 2169, BCL7A (Gene); SEQ ID NO: 2170, BCL7A (Gene); SEQ ID NO: 2171, BCL7A (Gene); SEQ ID NO: 2172, BCL7A (Gene); SEQ ID NO: 2173, BCL7A (Gene); SEQ ID NO: 2174, 12Q (ARM); SEQ ID NO: 2175, 12Q (ARM); SEQ ID NO: 2176, 12Q (ARM); SEQ ID NO: 2177, 12Q (ARM); SEQ ID NO: 2178, 12Q (ARM); SEQ ID NO: 2179, 12Q (ARM); SEQ ID NO: 2180, 12Q (ARM); SEQ ID NO: 2181, 12Q (ARM); SEQ ID NO: 2182, 12Q (ARM); SEQ ID NO: 2183, 12Q (ARM); SEQ ID NO: 2184, 12Q (ARM); SEQ ID NO: 2185, 12Q (ARM); SEQ ID NO: 2186, 13q-ARM_CLL (ARM); SEQ ID NO: 2187, 13q-ARM_CLL (ARM); SEQ ID NO: 2188, FP (FP); SEQ ID NO: 2189, 13q-ARM_CLL (ARM); SEQ ID NO: 2190, 13q-ARM_CLL (ARM); SEQ ID NO: 2191, 13q-ARM_CLL (ARM); SEQ ID NO: 2192, 13q-ARM_CLL (ARM); SEQ ID NO: 2193, 13q-ARM_CLL (ARM); SEQ ID NO: 2194, 13q-ARM_CLL (ARM); SEQ ID NO: 2195, PABPC3 (Gene); SEQ ID NO: 2196, PABPC3 (Gene); SEQ ID NO: 2197, PABPC3 (Gene); SEQ ID NO: 2198, PABPC3 (Gene); SEQ ID NO: 2199, 13q-ARM_CLL (ARM); SEQ ID NO: 2200, 13q-ARM_CLL (ARM); SEQ ID NO: 2201, 13q-ARM_CLL (ARM); SEQ ID NO: 2202, 13q-ARM_CLL (ARM); SEQ ID NO: 2203, 13q12.3-q13.1_MCL (FOCAL); SEQ ID NO: 2204, 13q12.3-q13.1_MCL (FOCAL); SEQ ID NO: 2205, 13q12.3-q13.1_MCL (FOCAL); SEQ ID NO: 2206, 13q12.3-q13.1_MCL (FOCAL); SEQ ID NO: 2207, 13q12.3-q13.1_MCL (FOCAL); SEQ ID NO: 2208, 13q12.3-q13.1_MCL (FOCAL); SEQ ID NO: 2209, 13q12.3-q13.1_MCL (FOCAL); SEQ ID NO: 2210, 13q12.3-q13.1_MCL (FOCAL); SEQ ID NO: 2211, 13q12.3-q13.1_MCL (FOCAL); SEQ ID NO: 2212, 13q12.3-q13.1_MCL (FOCAL); SEQ ID NO: 2213, 13q12.3-q13.1_MCL (FOCAL); SEQ ID NO: 2214, 13q12.3-q13.1_MCL (FOCAL); SEQ ID NO: 2215, 13q12.3-q13.1_MCL (FOCAL); SEQ ID NO: 2216, 13q12.3-q13.1_MCL (FOCAL); SEQ ID NO: 2217, 13q12.3-q13.1_MCL (FOCAL); SEQ ID NO: 2218, 13q12.3-q13.1_MCL (FOCAL); SEQ ID NO: 2219, 13q12.3-q13.1_MCL (FOCAL); SEQ ID NO: 2220, 13q12.3-q13.1_MCL (FOCAL); SEQ ID NO: 2221, 13q12.3-q13.1_MCL (FOCAL); SEQ ID NO: 2222, 13q12.3-q13.1_MCL (FOCAL); SEQ ID NO: 2223, 13q12.3-q13.1_MCL (FOCAL); SEQ ID NO: 2224, 13q12.3-q13.1_MCL (FOCAL); SEQ ID NO: 2225, 13q12.3-q13.1_MCL (FOCAL); SEQ ID NO: 2226, BRCA2 (Gene); SEQ ID NO: 2227, BRCA2 (Gene); SEQ ID NO: 2228, BRCA2 (Gene); SEQ ID NO: 2229, BRCA2 (Gene); SEQ ID NO: 2230, BRCA2 (Gene); SEQ ID NO: 2231, BRCA2 (Gene); SEQ ID NO: 2232, BRCA2 (Gene); SEQ ID NO: 2233, BRCA2 (Gene); SEQ ID NO: 2234, BRCA2 (Gene); SEQ ID NO: 2235, BRCA2 (Gene); SEQ ID NO: 2236, BRCA2 (Gene); SEQ ID NO: 2237, BRCA2 (Gene); SEQ ID NO: 2238, BRCA2 (Gene); SEQ ID NO: 2239, BRCA2 (Gene); SEQ ID NO: 2240, BRCA2 (Gene); SEQ ID NO: 2241, BRCA2 (Gene); SEQ ID NO: 2242, BRCA2 (Gene); SEQ ID NO: 2243, BRCA2 (Gene); SEQ ID NO: 2244, BRCA2 (Gene); SEQ ID NO: 2245, BRCA2 (Gene); SEQ ID NO: 2246, BRCA2 (Gene); SEQ ID NO: 2247, BRCA2 (Gene); SEQ ID NO: 2248, BRCA2 (Gene); SEQ ID NO: 2249, BRCA2 (Gene); SEQ ID NO: 2250, BRCA2 (Gene); SEQ ID NO: 2251, BRCA2 (Gene); SEQ ID NO: 2252, BRCA2 (Gene); SEQ ID NO: 2253, BRCA2 (Gene); SEQ ID NO: 2254, BRCA2 (Gene); SEQ ID NO: 2255, BRCA2 (Gene); SEQ ID NO: 2256, BRCA2 (Gene); SEQ ID NO: 2257, BRCA2 (Gene); SEQ ID NO: 2258, BRCA2 (Gene); SEQ ID NO: 2259, BRCA2 (Gene); SEQ ID NO: 2260, BRCA2 (Gene); SEQ ID NO: 2261, BRCA2 (Gene); SEQ ID NO: 2262, BRCA2 (Gene); SEQ ID NO: 2263, BRCA2 (Gene); SEQ ID NO: 2264, BRCA2 (Gene); SEQ ID NO: 2265, BRCA2 (Gene); SEQ ID NO: 2266, BRCA2 (Gene); SEQ ID NO: 2267, BRCA2 (Gene); SEQ ID NO: 2268, BRCA2 (Gene); SEQ ID NO: 2269, BRCA2 (Gene); SEQ ID NO: 2270, 13q12.3-q13.1_MCL (FOCAL); SEQ ID NO: 2271, 13q12.3-q13.1_MCL (FOCAL); SEQ ID NO: 2272, 13q12.3-q13.1_MCL (FOCAL); SEQ ID NO: 2273, 13q12.3-q13.1_MCL (FOCAL); SEQ ID NO: 2274, 13q12.3-q13.1_MCL (FOCAL); SEQ ID NO: 2275, 13q-ARM_CLL (ARM); SEQ ID NO: 2276, 13q-ARM_CLL (ARM); SEQ ID NO: 2277, FP (FP); SEQ ID NO: 2278, 13q-ARM_CLL (ARM); SEQ ID NO: 2279, 13q-ARM_CLL (ARM); SEQ ID NO: 2280, 13q-ARM_CLL (ARM); SEQ ID NO: 2281, 13q-ARM_CLL (ARM); SEQ ID NO: 2282, 13q-ARM_CLL (ARM); SEQ ID NO: 2283, FOXO1 (Gene); SEQ ID NO: 2284, FOXO1 (Gene); SEQ ID NO: 2285, FOXO1 (Gene); SEQ ID NO: 2286, FOXO1 (Gene); SEQ ID NO: 2287, FOXO1 (Gene); SEQ ID NO: 2288, 13q-ARM_CLL (ARM); SEQ ID NO: 2289, 13q-ARM_CLL (ARM); SEQ ID NO: 2290, 13q-ARM_CLL (ARM); SEQ ID NO: 2291, 13q-ARM_CLL (ARM); SEQ ID NO: 2292, 13q-ARM_CLL (ARM); SEQ ID NO: 2293, 13q-ARM_CLL (ARM); SEQ ID NO: 2294, 13q-ARM_CLL (ARM); SEQ ID NO: 2295, 13q14.2_DLBCL (FOCAL); SEQ ID NO: 2296, 13q14.2_DLBCL (FOCAL); SEQ ID NO: 2297, 13q14.2_DLBCL (FOCAL); SEQ ID NO: 2298, 13q14.2_DLBCL (FOCAL); SEQ ID NO: 2299, 13q14.2_DLBCL (FOCAL); SEQ ID NO: 2300, 13q14.2_DLBCL (FOCAL); SEQ ID NO: 2301, 13q14.2_DLBCL (FOCAL); SEQ ID NO: 2302, FP (FP); SEQ ID NO: 2303, 13q14.2_DLBCL (FOCAL); SEQ ID NO: 2304, RB1 (Gene); SEQ ID NO: 2305, RB1 (Gene); SEQ ID NO: 2306, RB1 (Gene); SEQ ID NO: 2307, RB1 (Gene); SEQ ID NO: 2308, RB1 (Gene); SEQ ID NO: 2309, RB1 (Gene); SEQ ID NO: 2310, RB1 (Gene); SEQ ID NO: 2311, RB1 (Gene); SEQ ID NO: 2312, RB1 (Gene); SEQ ID NO: 2313, RB1 (Gene); SEQ ID NO: 2314, RB1 (Gene); SEQ ID NO: 2315, RB1 (Gene); SEQ ID NO: 2316, RB1 (Gene); SEQ ID NO: 2317, RB1 (Gene); SEQ ID NO: 2318, RB1 (Gene); SEQ ID NO: 2319, RB1 (Gene); SEQ ID NO: 2320, RB1 (Gene); SEQ ID NO: 2321, RB1 (Gene); SEQ ID NO: 2322, RB1 (Gene); SEQ ID NO: 2323, RB1 (Gene); SEQ ID NO: 2324, RB1 (Gene); SEQ ID NO: 2325, RB1 (Gene); SEQ ID NO: 2326, RB1 (Gene); SEQ ID NO: 2327, RB1 (Gene); SEQ ID NO: 2328, RB1 (Gene); SEQ ID NO: 2329, RB1 (Gene); SEQ ID NO: 2330, RB1 (Gene); SEQ ID NO: 2331, 13q14.2_DLBCL (FOCAL); SEQ ID NO: 2332, 13q14.2_DLBCL (FOCAL); SEQ ID NO: 2333, 13q14.2_DLBCL (FOCAL); SEQ ID NO: 2334, SETDB2 (Gene); SEQ ID NO: 2335, SETDB2 (Gene); SEQ ID NO: 2336, SETDB2 (Gene); SEQ ID NO: 2337, SETDB2 (Gene); SEQ ID NO: 2338, SETDB2 (Gene); SEQ ID NO: 2339, SETDB2 (Gene); SEQ ID NO: 2340, SETDB2 (Gene); SEQ ID NO: 2341, SETDB2 (Gene); SEQ ID NO: 2342, SETDB2 (Gene); SEQ ID NO: 2343, SETDB2 (Gene); SEQ ID NO: 2344, SETDB2 (Gene); SEQ ID NO: 2345, SETDB2 (Gene); SEQ ID NO: 2346, SETDB2 (Gene); SEQ ID NO: 2347, SETDB2 (Gene); SEQ ID NO: 2348, SETDB2 (Gene); SEQ ID NO: 2349, 13q14.2_DLBCL (FOCAL); SEQ ID NO: 2350, 13q14.2_DLBCL (FOCAL); SEQ ID NO: 2351, 13q14.2_DLBCL (FOCAL); SEQ ID NO: 2352, 13q14.2_DLBCL (FOCAL); SEQ ID NO: 2353, 13q14.2_DLBCL (FOCAL); SEQ ID NO: 2354, 13q14.2_DLBCL (FOCAL); SEQ ID NO: 2355, 13q14.2_DLBCL (FOCAL); SEQ ID NO: 2356, 13q14.2_DLBCL (FOCAL); SEQ ID NO: 2357, 13q14.2_DLBCL (FOCAL); SEQ ID NO: 2358, 13q14.2_DLBCL (FOCAL); SEQ ID NO: 2359, 13q-ARM_CLL (ARM); SEQ ID NO: 2360, 13q-ARM_CLL (ARM); SEQ ID NO: 2361, 13q-ARM_CLL (ARM); SEQ ID NO: 2362, 13q-ARM_CLL (ARM); SEQ ID NO: 2363, 13q-ARM_CLL (ARM); SEQ ID NO: 2364, 13q-ARM_CLL (ARM); SEQ ID NO: 2365, 13q-ARM_CLL (ARM); SEQ ID NO: 2366, 13q-ARM_CLL (ARM); SEQ ID NO: 2367, 13q-ARM_CLL (ARM); SEQ ID NO: 2368, FP (FP); SEQ ID NO: 2369, 13q-ARM_CLL (ARM); SEQ ID NO: 2370, 13q-ARM_CLL (ARM); SEQ ID NO: 2371, 13q-ARM_CLL (ARM); SEQ ID NO: 2372, 13q-ARM_CLL (ARM); SEQ ID NO: 2373, 13q-ARM_CLL (ARM); SEQ ID NO: 2374, 13q-ARM_CLL (ARM); SEQ ID NO: 2375, 13q-ARM_CLL (ARM); SEQ ID NO: 2376, 13q-ARM_CLL (ARM); SEQ ID NO: 2377, 13q-ARM_CLL (ARM); SEQ ID NO: 2378, MYCBP2 (Gene); SEQ ID NO: 2379, MYCBP2 (Gene); SEQ ID NO: 2380, MYCBP2 (Gene); SEQ ID NO: 2381, MYCBP2 (Gene); SEQ ID NO: 2382, MYCBP2 (Gene); SEQ ID NO: 2383, MYCBP2 (Gene); SEQ ID NO: 2384, MYCBP2 (Gene); SEQ ID NO: 2385, MYCBP2 (Gene); SEQ ID NO: 2386, MYCBP2 (Gene); SEQ ID NO: 2387, MYCBP2 (Gene); SEQ ID NO: 2388, MYCBP2 (Gene); SEQ ID NO: 2389, MYCBP2 (Gene); SEQ ID NO: 2390, MYCBP2 (Gene); SEQ ID NO: 2391, MYCBP2 (Gene); SEQ ID NO: 2392, MYCBP2 (Gene); SEQ ID NO: 2393, MYCBP2 (Gene); SEQ ID NO: 2394, MYCBP2 (Gene); SEQ ID NO: 2395, MYCBP2 (Gene); SEQ ID NO: 2396, MYCBP2 (Gene); SEQ ID NO: 2397, MYCBP2 (Gene); SEQ ID NO: 2398, MYCBP2 (Gene); SEQ ID NO: 2399, MYCBP2 (Gene); SEQ ID NO: 2400, MYCBP2 (Gene); SEQ ID NO: 2401, MYCBP2 (Gene); SEQ ID NO: 2402, MYCBP2 (Gene); SEQ ID NO: 2403, MYCBP2 (Gene); SEQ ID NO: 2404, MYCBP2 (Gene); SEQ ID NO: 2405, MYCBP2 (Gene); SEQ ID NO: 2406, MYCBP2 (Gene); SEQ ID NO: 2407, MYCBP2 (Gene); SEQ ID NO: 2408, MYCBP2 (Gene); SEQ ID NO: 2409, MYCBP2 (Gene); SEQ ID NO: 2410, MYCBP2 (Gene); SEQ ID NO: 2411, MYCBP2 (Gene); SEQ ID NO: 2412, MYCBP2 (Gene); SEQ ID NO: 2413, MYCBP2 (Gene); SEQ ID NO: 2414, MYCBP2 (Gene); SEQ ID NO: 2415, MYCBP2 (Gene); SEQ ID NO: 2416, MYCBP2 (Gene); SEQ ID NO: 2417, MYCBP2 (Gene); SEQ ID NO: 2418, MYCBP2 (Gene); SEQ ID NO: 2419, MYCBP2 (Gene); SEQ ID NO: 2420, MYCBP2 (Gene); SEQ ID NO: 2421, MYCBP2 (Gene); SEQ ID NO: 2422, MYCBP2 (Gene); SEQ ID NO: 2423, MYCBP2 (Gene); SEQ ID NO: 2424, MYCBP2 (Gene); SEQ ID NO: 2425, MYCBP2 (Gene); SEQ ID NO: 2426, MYCBP2 (Gene); SEQ ID NO: 2427, MYCBP2 (Gene); SEQ ID NO: 2428, MYCBP2 (Gene); SEQ ID NO: 2429, MYCBP2 (Gene); SEQ ID NO: 2430, MYCBP2 (Gene); SEQ ID NO: 2431, MYCBP2 (Gene); SEQ ID NO: 2432, MYCBP2 (Gene); SEQ ID NO: 2433, MYCBP2 (Gene); SEQ ID NO: 2434, MYCBP2 (Gene); SEQ ID NO: 2435, MYCBP2 (Gene); SEQ ID NO: 2436, MYCBP2 (Gene); SEQ ID NO: 2437, MYCBP2 (Gene); SEQ ID NO: 2438, MYCBP2 (Gene); SEQ ID NO: 2439, MYCBP2 (Gene); SEQ ID NO: 2440, MYCBP2 (Gene); SEQ ID NO: 2441, MYCBP2 (Gene); SEQ ID NO: 2442, MYCBP2 (Gene); SEQ ID NO: 2443, MYCBP2 (Gene); SEQ ID NO: 2444, MYCBP2 (Gene); SEQ ID NO: 2445, MYCBP2 (Gene); SEQ ID NO: 2446, MYCBP2 (Gene); SEQ ID NO: 2447, MYCBP2 (Gene); SEQ ID NO: 2448, MYCBP2 (Gene); SEQ ID NO: 2449, MYCBP2 (Gene); SEQ ID NO: 2450, MYCBP2 (Gene); SEQ ID NO: 2451, MYCBP2 (Gene); SEQ ID NO: 2452, MYCBP2 (Gene); SEQ ID NO: 2453, MYCBP2 (Gene); SEQ ID NO: 2454, MYCBP2 (Gene); SEQ ID NO: 2455, MYCBP2 (Gene); SEQ ID NO: 2456, MYCBP2 (Gene); SEQ ID NO: 2457, MYCBP2 (Gene); SEQ ID NO: 2458, MYCBP2 (Gene); SEQ ID NO: 2459, MYCBP2 (Gene); SEQ ID NO: 2460, MYCBP2 (Gene); SEQ ID NO: 2461, MYCBP2 (Gene); SEQ ID NO: 2462, MYCBP2 (Gene); SEQ ID NO: 2463, MYCBP2 (Gene); SEQ ID NO: 2464, MYCBP2 (Gene); SEQ ID NO: 2465, MYCBP2 (Gene); SEQ ID NO: 2466, 13q-ARM_CLL (ARM); SEQ ID NO: 2467, 13q31.3_DLBCL (FOCAL); SEQ ID NO: 2468, 13q31.3_DLBCL (FOCAL); SEQ ID NO: 2469, 13q31.3_DLBCL (FOCAL); SEQ ID NO: 2470, 13q31.3_DLBCL (FOCAL); SEQ ID NO: 2471, 13q31.3_DLBCL (FOCAL); SEQ ID NO: 2472, 13q31.3_DLBCL (FOCAL); SEQ ID NO: 2473, 13q31.3_DLBCL (FOCAL); SEQ ID NO: 2474, 13q31.3_DLBCL (FOCAL); SEQ ID NO: 2475, 13q31.3_DLBCL (FOCAL); SEQ ID NO: 2476, 13q31.3_DLBCL (FOCAL); SEQ ID NO: 2477, 13q31.3_DLBCL (FOCAL); SEQ ID NO: 2478, 13q31.3_DLBCL (FOCAL); SEQ ID NO: 2479, 13q31.3_DLBCL (FOCAL); SEQ ID NO: 2480, 13q31.3_DLBCL (FOCAL); SEQ ID NO: 2481, 13q31.3_DLBCL (FOCAL); SEQ ID NO: 2482, 13q31.3_DLBCL (FOCAL); SEQ ID NO: 2483, 13q31.3_DLBCL (FOCAL); SEQ ID NO: 2484, 13q31.3_DLBCL (FOCAL); SEQ ID NO: 2485, 13q31.3_DLBCL (FOCAL); SEQ ID NO: 2486, 13q31.3_DLBCL (FOCAL); SEQ ID NO: 2487, 13q31.3_DLBCL (FOCAL); SEQ ID NO: 2488, 13q31.3_DLBCL (FOCAL); SEQ ID NO: 2489, 13q31.3_DLBCL (FOCAL); SEQ ID NO: 2490, 13q31.3_DLBCL (FOCAL); SEQ ID NO: 2491, 13q31.3_DLBCL (FOCAL); SEQ ID NO: 2492, 13q31.3_DLBCL (FOCAL); SEQ ID NO: 2493, 13q31.3_DLBCL (FOCAL); SEQ ID NO: 2494, 13q31.3_DLBCL (FOCAL); SEQ ID NO: 2495, 13q31.3_DLBCL (FOCAL); SEQ ID NO: 2496, 13q31.3_DLBCL (FOCAL); SEQ ID NO: 2497, 13q31.3_DLBCL (FOCAL); SEQ ID NO: 2498, 13q31.3_DLBCL (FOCAL); SEQ ID NO: 2499, 13q31.3_DLBCL (FOCAL); SEQ ID NO: 2500, 13q31.3_DLBCL (FOCAL); SEQ ID NO: 2501, 13q31.3_DLBCL (FOCAL); SEQ ID NO: 2502, 13q31.3_DLBCL (FOCAL); SEQ ID NO: 2503, 13q31.3_DLBCL (FOCAL); SEQ ID NO: 2504, 13q31.3_DLBCL (FOCAL); SEQ ID NO: 2505, 13q31.3_DLBCL (FOCAL); SEQ ID NO: 2506, 13q31.3_DLBCL (FOCAL); SEQ ID NO: 2507, 13q31.3_DLBCL (FOCAL); SEQ ID NO: 2508, 13q31.3_DLBCL (FOCAL); SEQ ID NO: 2509, 13q31.3_DLBCL (FOCAL); SEQ ID NO: 2510, 13q31.3_DLBCL (FOCAL); SEQ ID NO: 2511, 13q31.3_DLBCL (FOCAL); SEQ ID NO: 2512, 13q31.3_DLBCL (FOCAL); SEQ ID NO: 2513, 13q31.3_DLBCL (FOCAL); SEQ ID NO: 2514, 13q31.3_DLBCL (FOCAL); SEQ ID NO: 2515, 13q31.3_DLBCL (FOCAL); SEQ ID NO: 2516, 13q31.3_DLBCL (FOCAL); SEQ ID NO: 2517, 13q31.3_DLBCL (FOCAL); SEQ ID NO: 2518, 13q31.3_DLBCL (FOCAL); SEQ ID NO: 2519, 13q31.3_DLBCL (FOCAL); SEQ ID NO: 2520, 13q31.3_DLBCL (FOCAL); SEQ ID NO: 2521, 13q31.3_DLBCL (FOCAL); SEQ ID NO: 2522, 13q31.3_DLBCL (FOCAL); SEQ ID NO: 2523, 13q31.3_DLBCL (FOCAL); SEQ ID NO: 2524, 13q31.3_DLBCL (FOCAL); SEQ ID NO: 2525, 13q31.3_DLBCL (FOCAL); SEQ ID NO: 2526, 13q31.3_DLBCL (FOCAL); SEQ ID NO: 2527, 13q31.3_DLBCL (FOCAL); SEQ ID NO: 2528, 13q31.3_DLBCL (FOCAL); SEQ ID NO: 2529, 13q31.3_DLBCL (FOCAL); SEQ ID NO: 2530, 13q31.3_DLBCL (FOCAL); SEQ ID NO: 2531, 13q31.3_DLBCL (FOCAL); SEQ ID NO: 2532, 13q31.3_DLBCL (FOCAL); SEQ ID NO: 2533, 13q31.3_DLBCL (FOCAL); SEQ ID NO: 2534, 13q31.3_DLBCL (FOCAL); SEQ ID NO: 2535, 13q31.3_DLBCL (FOCAL); SEQ ID NO: 2536, 13q31.3_DLBCL (FOCAL); SEQ ID NO: 2537, 13q31.3_DLBCL (FOCAL); SEQ ID NO: 2538, 13q31.3_DLBCL (FOCAL); SEQ ID NO: 2539, 13q31.3_DLBCL (FOCAL); SEQ ID NO: 2540, 13q31.3_DLBCL (FOCAL); SEQ ID NO: 2541, 13q31.3_DLBCL (FOCAL); SEQ ID NO: 2542, 13q31.3_DLBCL (FOCAL); SEQ ID NO: 2543, 13q31.3_DLBCL (FOCAL); SEQ ID NO: 2544, 13q31.3_DLBCL (FOCAL); SEQ ID NO: 2545, 13q31.3_DLBCL (FOCAL); SEQ ID NO: 2546, 13q31.3_DLBCL (FOCAL); SEQ ID NO: 2547, 13q31.3_DLBCL (FOCAL); SEQ ID NO: 2548, 13q31.3_DLBCL (FOCAL); SEQ ID NO: 2549, 13q31.3_DLBCL (FOCAL); SEQ ID NO: 2550, 13q31.3_DLBCL (FOCAL); SEQ ID NO: 2551, 13q31.3_DLBCL (FOCAL); SEQ ID NO: 2552, 13q31.3_DLBCL (FOCAL); SEQ ID NO: 2553, 13q31.3_DLBCL (FOCAL); SEQ ID NO: 2554, 13q31.3_DLBCL (FOCAL); SEQ ID NO: 2555, 13q31.3_DLBCL (FOCAL); SEQ ID NO: 2556, 13q31.3_DLBCL (FOCAL); SEQ ID NO: 2557, 13q31.3_DLBCL (FOCAL); SEQ ID NO: 2558, 13q31.3_DLBCL (FOCAL); SEQ ID NO: 2559, 13q31.3_DLBCL (FOCAL); SEQ ID NO: 2560, 13q31.3_DLBCL (FOCAL); SEQ ID NO: 2561, 13q31.3_DLBCL (FOCAL); SEQ ID NO: 2562, 13q31.3_DLBCL (FOCAL); SEQ ID NO: 2563, 13q31.3_DLBCL (FOCAL); SEQ ID NO: 2564, 13q31.3_DLBCL (FOCAL); SEQ ID NO: 2565, 13q31.3_DLBCL (FOCAL); SEQ ID NO: 2566, 13q31.3_DLBCL (FOCAL); SEQ ID NO: 2567, 13q31.3_DLBCL (FOCAL); SEQ ID NO: 2568, 13q31.3_DLBCL (FOCAL); SEQ ID NO: 2569, 13q31.3_DLBCL (FOCAL); SEQ ID NO: 2570, 13q31.3_DLBCL (FOCAL); SEQ ID NO: 2571, 13q31.3_DLBCL (FOCAL); SEQ ID NO: 2572, 13q31.3_DLBCL (FOCAL); SEQ ID NO: 2573, 13q31.3_DLBCL (FOCAL); SEQ ID NO: 2574, 13q31.3_DLBCL (FOCAL); SEQ ID NO: 2575, 13q31.3_DLBCL (FOCAL); SEQ ID NO: 2576, 13q31.3_DLBCL (FOCAL); SEQ ID NO: 2577, 13q31.3_DLBCL (FOCAL); SEQ ID NO: 2578, 13q31.3_DLBCL (FOCAL); SEQ ID NO: 2579, 13q31.3_DLBCL (FOCAL); SEQ ID NO: 2580, 13q31.3_DLBCL (FOCAL); SEQ ID NO: 2581, 13q31.3_DLBCL (FOCAL); SEQ ID NO: 2582, 13q31.3_DLBCL (FOCAL); SEQ ID NO: 2583, 13q31.3_DLBCL (FOCAL); SEQ ID NO: 2584, 13q31.3_DLBCL (FOCAL); SEQ ID NO: 2585, 13q31.3_DLBCL (FOCAL); SEQ ID NO: 2586, 13q31.3_DLBCL (FOCAL); SEQ ID NO: 2587, 13q31.3_DLBCL (FOCAL); SEQ ID NO: 2588, 13q31.3_DLBCL (FOCAL); SEQ ID NO: 2589, 13q31.3_DLBCL (FOCAL); SEQ ID NO: 2590, 13q31.3_DLBCL (FOCAL); SEQ ID NO: 2591, 13q31.3_DLBCL (FOCAL); SEQ ID NO: 2592, 13q31.3_DLBCL (FOCAL); SEQ ID NO: 2593, 13q31.3_DLBCL (FOCAL); SEQ ID NO: 2594, 13q31.3_DLBCL (FOCAL); SEQ ID NO: 2595, 13q31.3_DLBCL (FOCAL); SEQ ID NO: 2596, 13q31.3_DLBCL (FOCAL); SEQ ID NO: 2597, 13q31.3_DLBCL (FOCAL); SEQ ID NO: 2598, 13q31.3_DLBCL (FOCAL); SEQ ID NO: 2599, 13q31.3_DLBCL (FOCAL); SEQ ID NO: 2600, 13q31.3_DLBCL (FOCAL); SEQ ID NO: 2601, FP (FP); SEQ ID NO: 2602, 13q31.3_DLBCL (FOCAL); SEQ ID NO: 2603, 13q31.3_DLBCL (FOCAL); SEQ ID NO: 2604, 13q31.3_DLBCL (FOCAL); SEQ ID NO: 2605, 13q31.3_DLBCL (FOCAL); SEQ ID NO: 2606, 13q31.3_DLBCL (FOCAL); SEQ ID NO: 2607, 13q31.3_DLBCL (FOCAL); SEQ ID NO: 2608, 13q31.3_DLBCL (FOCAL); SEQ ID NO: 2609, 13q31.3_DLBCL (FOCAL); SEQ ID NO: 2610, 13q31.3_DLBCL (FOCAL); SEQ ID NO: 2611, 13q34_DLBCL (FOCAL); SEQ ID NO: 2612, 13q34_DLBCL (FOCAL); SEQ ID NO: 2613, 13q34 DLBCL (FOCAL); SEQ ID NO: 2614, 13q34_DLBCL (FOCAL); SEQ ID NO: 2615, 13q34 DLBCL (FOCAL); SEQ ID NO: 2616, 13q34_DLBCL (FOCAL); SEQ ID NO: 2617, 13q34 DLBCL (FOCAL); SEQ ID NO: 2618, 13q34_DLBCL (FOCAL); SEQ ID NO: 2619, 13q34 DLBCL (FOCAL); SEQ ID NO: 2620, 13q34_DLBCL (FOCAL); SEQ ID NO: 2621, 13q34 DLBCL (FOCAL); SEQ ID NO: 2622, 13q34_DLBCL (FOCAL); SEQ ID NO: 2623, 13q34 DLBCL (FOCAL); SEQ ID NO: 2624, 13q34_DLBCL (FOCAL); SEQ ID NO: 2625, 13q34 DLBCL (FOCAL); SEQ ID NO: 2626, 13q34_DLBCL (FOCAL); SEQ ID NO: 2627, 13q34 DLBCL (FOCAL); SEQ ID NO: 2628, 13q34_DLBCL (FOCAL); SEQ ID NO: 2629, 13q34 DLBCL (FOCAL); SEQ ID NO: 2630, 13q34_DLBCL (FOCAL); SEQ ID NO: 2631, 13q34 DLBCL (FOCAL); SEQ ID NO: 2632, 13q34_DLBCL (FOCAL); SEQ ID NO: 2633, 13q34 DLBCL (FOCAL); SEQ ID NO: 2634, CHD8 (Gene); SEQ ID NO: 2635, CHD8 (Gene); SEQ ID NO: 2636, CHD8 (Gene); SEQ ID NO: 2637, CHD8 (Gene); SEQ ID NO: 2638, CHD8 (Gene); SEQ ID NO: 2639, CHD8 (Gene); SEQ ID NO: 2640, CHD8 (Gene); SEQ ID NO: 2641, CHD8 (Gene); SEQ ID NO: 2642, CHD8 (Gene); SEQ ID NO: 2643, CHD8 (Gene); SEQ ID NO: 2644, CHD8 (Gene); SEQ ID NO: 2645, CHD8 (Gene); SEQ ID NO: 2646, CHD8 (Gene); SEQ ID NO: 2647, CHD8 (Gene); SEQ ID NO: 2648, CHD8 (Gene); SEQ ID NO: 2649, CHD8 (Gene); SEQ ID NO: 2650, CHD8 (Gene); SEQ ID NO: 2651, CHD8 (Gene); SEQ ID NO: 2652, CHD8 (Gene); SEQ ID NO: 2653, CHD8 (Gene); SEQ ID NO: 2654, CHD8 (Gene); SEQ ID NO: 2655, CHD8 (Gene); SEQ ID NO: 2656, CHD8 (Gene); SEQ ID NO: 2657, CHD8 (Gene); SEQ ID NO: 2658, CHD8 (Gene); SEQ ID NO: 2659, CHD8 (Gene); SEQ ID NO: 2660, CHD8 (Gene); SEQ ID NO: 2661, CHD8 (Gene); SEQ ID NO: 2662, CHD8 (Gene); SEQ ID NO: 2663, CHD8 (Gene); SEQ ID NO: 2664, CHD8 (Gene); SEQ ID NO: 2665, CHD8 (Gene); SEQ ID NO: 2666, CHD8 (Gene); SEQ ID NO: 2667, CHD8 (Gene); SEQ ID NO: 2668, CHD8 (Gene); SEQ ID NO: 2669, CHD8 (Gene); SEQ ID NO: 2670, CHD8 (Gene); SEQ ID NO: 2671, CHD8 (Gene); SEQ ID NO: 2672, CHD8 (Gene); SEQ ID NO: 2673, CHD8 (Gene); SEQ ID NO: 2674, CHD8 (Gene); SEQ ID NO: 2675, CHD8 (Gene); SEQ ID NO: 2676, CHD8 (Gene); SEQ ID NO: 2677, CHD8 (Gene); SEQ ID NO: 2678, 14Q (ARM); SEQ ID NO: 2679, 14Q (ARM); SEQ ID NO: 2680, 14Q (ARM); SEQ ID NO: 2681, FP (FP); SEQ ID NO: 2682, 14Q (ARM); SEQ ID NO: 2683, 14Q (ARM); SEQ ID NO: 2684, FP (FP); SEQ ID NO: 2685, 14Q (ARM); SEQ ID NO: 2686, 14Q (ARM); SEQ ID NO: 2687, 14Q (ARM); SEQ ID NO: 2688, 14Q (ARM); SEQ ID NO: 2689, FP (FP); SEQ ID NO: 2690, 14Q (ARM); SEQ ID NO: 2691, 14Q (ARM); SEQ ID NO: 2692, NFKBIA (Gene); SEQ ID NO: 2693, NFKBIA (Gene); SEQ ID NO: 2694, NFKBIA (Gene); SEQ ID NO: 2695, NFKBIA (Gene); SEQ ID NO: 2696, NFKBIA (Gene); SEQ ID NO: 2697, NFKBIA (Gene); SEQ ID NO: 2698, 14Q (ARM); SEQ ID NO: 2699, 14Q (ARM); SEQ ID NO: 2700, 14Q (ARM); SEQ ID NO: 2701, 14Q (ARM); SEQ ID NO: 2702, 14Q (ARM); SEQ ID NO: 2703, 14Q (ARM); SEQ ID NO: 2704, 14Q (ARM); SEQ ID NO: 2705, 14Q (ARM); SEQ ID NO: 2706, 14Q (ARM); SEQ ID NO: 2707, 14Q (ARM); SEQ ID NO: 2708, 14Q (ARM); SEQ ID NO: 2709, 14Q (ARM); SEQ ID NO: 2710, 14Q (ARM); SEQ ID NO: 2711, 14Q (ARM); SEQ ID NO: 2712, 14Q (ARM); SEQ ID NO: 2713, 14Q (ARM); SEQ ID NO: 2714, 14Q (ARM); SEQ ID NO: 2715, 14Q (ARM); SEQ ID NO: 2716, 14Q (ARM); SEQ ID NO: 2717, 14Q (ARM); SEQ ID NO: 2718, 14Q (ARM); SEQ ID NO: 2719, 14Q (ARM); SEQ ID NO: 2720, 14Q (ARM); SEQ ID NO: 2721, 14Q (ARM); SEQ ID NO: 2722, 14Q (ARM); SEQ ID NO: 2723, 14Q (ARM); SEQ ID NO: 2724, FP (FP); SEQ ID NO: 2725, 14Q (ARM); SEQ ID NO: 2726, 14Q (ARM); SEQ ID NO: 2727, ZFP36L1 (Gene); SEQ ID NO: 2728, ZFP36L1 (Gene); SEQ ID NO: 2729, ZFP36L1 (Gene); SEQ ID NO: 2730, ZFP36L1 (Gene); SEQ ID NO: 2731, 14Q (ARM); SEQ ID NO: 2732, 14Q (ARM); SEQ ID NO: 2733, 14Q (ARM); SEQ ID NO: 2734, 14Q (ARM); SEQ ID NO: 2735, 14Q (ARM); SEQ ID NO: 2736, 14Q (ARM); SEQ ID NO: 2737, 14Q (ARM); SEQ ID NO: 2738, 14Q (ARM); SEQ ID NO: 2739, 14Q (ARM); SEQ ID NO: 2740, 14Q (ARM); SEQ ID NO: 2741, 14Q (ARM); SEQ ID NO: 2742, 14Q (ARM); SEQ ID NO: 2743, 14Q (ARM); SEQ ID NO: 2744, 14Q (ARM); SEQ ID NO: 2745, 14Q (ARM); SEQ ID NO: 2746, 14Q (ARM); SEQ ID NO: 2747, 14Q (ARM); SEQ ID NO: 2748, 14Q (ARM); SEQ ID NO: 2749, 14Q (ARM); SEQ ID NO: 2750, 14Q (ARM); SEQ ID NO: 2751, PPP4R3A (Gene); SEQ ID NO: 2752, PPP4R3A (Gene); SEQ ID NO: 2753, PPP4R3A (Gene); SEQ ID NO: 2754, PPP4R3A (Gene); SEQ ID NO: 2755, PPP4R3A (Gene); SEQ ID NO: 2756, PPP4R3A (Gene); SEQ ID NO: 2757, PPP4R3A (Gene); SEQ ID NO: 2758, PPP4R3A (Gene); SEQ ID NO: 2759, PPP4R3A (Gene); SEQ ID NO: 2760, PPP4R3A (Gene); SEQ ID NO: 2761, PPP4R3A (Gene); SEQ ID NO: 2762, PPP4R3A (Gene); SEQ ID NO: 2763, PPP4R3A (Gene); SEQ ID NO: 2764, PPP4R3A (Gene); SEQ ID NO: 2765, PPP4R3A (Gene); SEQ ID NO: 2766, PPP4R3A (Gene); SEQ ID NO: 2767, 14Q (ARM); SEQ ID NO: 2768, 14Q (ARM); SEQ ID NO: 2769, 14Q (ARM); SEQ ID NO: 2770, 14Q (ARM); SEQ ID NO: 2771, FP (FP); SEQ ID NO: 2772, TCL1A (Gene); SEQ ID NO: 2773, TCL1A (Gene); SEQ ID NO: 2774, TCL1A (Gene); SEQ ID NO: 2775, 14Q (ARM); SEQ ID NO: 2776, 14Q (ARM); SEQ ID NO: 2777, 14Q (ARM); SEQ ID NO: 2778, FP (FP); SEQ ID NO: 2779, 14Q (ARM); SEQ ID NO: 2780, 14Q (ARM); SEQ ID NO: 2781, 14Q (ARM); SEQ ID NO: 2782, YY1 (Gene); SEQ ID NO: 2783, YY1 (Gene); SEQ ID NO: 2784, YY1 (Gene); SEQ ID NO: 2785, YY1 (Gene); SEQ ID NO: 2786, YY1 (Gene); SEQ ID NO: 2787, YY1 (Gene); SEQ ID NO: 2788, 14Q (ARM); SEQ ID NO: 2789, 14q32.31_DLBCL (FOCAL); SEQ ID NO: 2790, 14q32.31_DLBCL (FOCAL); SEQ ID NO: 2791, 14q32.31_DLBCL (FOCAL); SEQ ID NO: 2792, RCOR1 (Gene); SEQ ID NO: 2793, RCOR1 (Gene); SEQ ID NO: 2794, RCOR1 (Gene); SEQ ID NO: 2795, RCOR1 (Gene); SEQ ID NO: 2796, RCOR1 (Gene); SEQ ID NO: 2797, RCOR1 (Gene); SEQ ID NO: 2798, RCOR1 (Gene); SEQ ID NO: 2799, RCOR1 (Gene); SEQ ID NO: 2800, RCOR1 (Gene); SEQ ID NO: 2801, RCOR1 (Gene); SEQ ID NO: 2802, RCOR1 (Gene); SEQ ID NO: 2803, RCOR1 (Gene); SEQ ID NO: 2804, 14q32.31_DLBCL (FOCAL); SEQ ID NO: 2805, TRAF3 (Gene); SEQ ID NO: 2806, TRAF3 (Gene); SEQ ID NO: 2807, TRAF3 (Gene); SEQ ID NO: 2808, TRAF3 (Gene); SEQ ID NO: 2809, TRAF3 (Gene); SEQ ID NO: 2810, TRAF3 (Gene); SEQ ID NO: 2811, TRAF3 (Gene); SEQ ID NO: 2812, TRAF3 (Gene); SEQ ID NO: 2813, TRAF3 (Gene); SEQ ID NO: 2814, TRAF3 (Gene); SEQ ID NO: 2815, TRAF3 (Gene); SEQ ID NO: 2816, TRAF3 (Gene); SEQ ID NO: 2817, 14q32.31_DLBCL (FOCAL); SEQ ID NO: 2818, 14q32.31_DLBCL (FOCAL); SEQ ID NO: 2819, 14q32.31_DLBCL (FOCAL); SEQ ID NO: 2820, 14q32.31_DLBCL (FOCAL); SEQ ID NO: 2821, 14q32.31_DLBCL (FOCAL); SEQ ID NO: 2822, 14Q (ARM); SEQ ID NO: 2823, CRIP1 (Gene); SEQ ID NO: 2824, CRIP1 (Gene); SEQ ID NO: 2825, CRIP1 (Gene); SEQ ID NO: 2826, CRIP1 (Gene); SEQ ID NO: 2827, IGH_SV (SV); SEQ ID NO: 2828, IGH_SV (SV); SEQ ID NO: 2829, IGH_SV (SV); SEQ ID NO: 2830, IGH_SV (SV); SEQ ID NO: 2831, IGH_SV (SV); SEQ ID NO: 2832, IGH_SV (SV); SEQ ID NO: 2833, IGH_SV (SV); SEQ ID NO: 2834, IGH_SV (SV); SEQ ID NO: 2835, IGH_SV (SV); SEQ ID NO: 2836, IGH_SV (SV); SEQ ID NO: 2837, IGH_SV (SV); SEQ ID NO: 2838, IGH_SV (SV); SEQ ID NO: 2839, IGH_SV (SV); SEQ ID NO: 2840, IGH_SV (SV); SEQ ID NO: 2841, IGH_SV (SV); SEQ ID NO: 2842, IGH_SV (SV); SEQ ID NO: 2843, IGH_SV (SV); SEQ ID NO: 2844, IGH_SV (SV); SEQ ID NO: 2845, IGH_SV (SV); SEQ ID NO: 2846, IGH_SV (SV); SEQ ID NO: 2847, IGH_SV (SV); SEQ ID NO: 2848, IGH_SV (SV); SEQ ID NO: 2849, IGH_SV (SV); SEQ ID NO: 2850, IGH_SV (SV); SEQ ID NO: 2851, IGH_SV (SV); SEQ ID NO: 2852, IGH_SV (SV); SEQ ID NO: 2853, IGH_SV (SV); SEQ ID NO: 2854, IGH_SV (SV); SEQ ID NO: 2855, IGH_SV (SV); SEQ ID NO: 2856, IGH_SV (SV); SEQ ID NO: 2857, IGH_SV (SV); SEQ ID NO: 2858, IGH_SV (SV); SEQ ID NO: 2859, IGH_SV (SV); SEQ ID NO: 2860, IGH_SV (SV); SEQ ID NO: 2861, IGH_SV (SV); SEQ ID NO: 2862, IGH_SV (SV); SEQ ID NO: 2863, IGH_SV (SV); SEQ ID NO: 2864, IGH_SV (SV); SEQ ID NO: 2865, IGH_SV (SV); SEQ ID NO: 2866, IGH_SV (SV); SEQ ID NO: 2867, IGH_SV (SV); SEQ ID NO: 2868, IGH_SV (SV); SEQ ID NO: 2869, IGH_SV (SV); SEQ ID NO: 2870, IGH_SV (SV); SEQ ID NO: 2871, IGH_SV (SV); SEQ ID NO: 2872, IGH_SV (SV); SEQ ID NO: 2873, IGH_SV (SV); SEQ ID NO: 2874, IGH_SV (SV); SEQ ID NO: 2875, IGH_SV (SV); SEQ ID NO: 2876, IGH_SV (SV); SEQ ID NO: 2877, IGH_SV (SV); SEQ ID NO: 2878, IGH_SV (SV); SEQ ID NO: 2879, IGH_SV (SV); SEQ ID NO: 2880, IGH_SV (SV); SEQ ID NO: 2881, IGH_SV (SV); SEQ ID NO: 2882, IGH_SV (SV); SEQ ID NO: 2883, IGH_SV (SV); SEQ ID NO: 2884, IGH_SV (SV); SEQ ID NO: 2885, IGH_SV (SV); SEQ ID NO: 2886, IGH_SV (SV); SEQ ID NO: 2887, IGH_SV (SV); SEQ ID NO: 2888, IGH_SV (SV); SEQ ID NO: 2889, IGH_SV (SV); SEQ ID NO: 2890, IGH_SV (SV); SEQ ID NO: 2891, IGH_SV (SV); SEQ ID NO: 2892, IGH_SV (SV); SEQ ID NO: 2893, IGH_SV (SV); SEQ ID NO: 2894, IGH_SV (SV); SEQ ID NO: 2895, IGH_SV (SV); SEQ ID NO: 2896, IGH_SV (SV); SEQ ID NO: 2897, IGH_SV (SV); SEQ ID NO: 2898, IGH_SV (SV); SEQ ID NO: 2899, IGH_SV (SV); SEQ ID NO: 2900, IGH_SV (SV); SEQ ID NO: 2901, IGH_SV (SV); SEQ ID NO: 2902, IGH_SV (SV); SEQ ID NO: 2903, IGH_SV (SV); SEQ ID NO: 2904, IGH_SV (SV); SEQ ID NO: 2905, IGH_SV (SV); SEQ ID NO: 2906, IGH_SV (SV); SEQ ID NO: 2907, IGH_SV (SV); SEQ ID NO: 2908, IGH_SV (SV); SEQ ID NO: 2909, IGH_SV (SV); SEQ ID NO: 2910, IGH_SV (SV); SEQ ID NO: 2911, IGH_SV (SV); SEQ ID NO: 2912, IGH_SV (SV); SEQ ID NO: 2913, IGH_SV (SV); SEQ ID NO: 2914, IGH_SV (SV); SEQ ID NO: 2915, IGH_SV (SV); SEQ ID NO: 2916, IGH_SV (SV); SEQ ID NO: 2917, IGH_SV (SV); SEQ ID NO: 2918, IGH_SV (SV); SEQ ID NO: 2919, IGH_SV (SV); SEQ ID NO: 2920, IGH_SV (SV); SEQ ID NO: 2921, IGH_SV (SV); SEQ ID NO: 2922, IGH_SV (SV); SEQ ID NO: 2923, IGH_SV (SV); SEQ ID NO: 2924, IGH_SV (SV); SEQ ID NO: 2925, IGH_SV (SV); SEQ ID NO: 2926, IGH_SV (SV); SEQ ID NO: 2927, IGH_SV (SV); SEQ ID NO: 2928, IGH_SV (SV); SEQ ID NO: 2929, IGH_SV (SV); SEQ ID NO: 2930, IGH_SV (SV); SEQ ID NO: 2931, IGH_SV (SV); SEQ ID NO: 2932, IGH_SV (SV); SEQ ID NO: 2933, IGH_SV (SV); SEQ ID NO: 2934, IGH_SV (SV); SEQ ID NO: 2935, IGH_SV (SV); SEQ ID NO: 2936, IGH_SV (SV); SEQ ID NO: 2937, IGH_SV (SV); SEQ ID NO: 2938, IGH_SV (SV); SEQ ID NO: 2939, IGH_SV (SV); SEQ ID NO: 2940, IGH_SV (SV); SEQ ID NO: 2941, IGH_SV (SV); SEQ ID NO: 2942, IGH_SV (SV); SEQ ID NO: 2943, IGH_SV (SV); SEQ ID NO: 2944, IGH_SV (SV); SEQ ID NO: 2945, IGH_SV (SV); SEQ ID NO: 2946, IGH_SV (SV); SEQ ID NO: 2947, IGH_SV (SV); SEQ ID NO: 2948, IGH_SV (SV); SEQ ID NO: 2949, IGH_SV (SV); SEQ ID NO: 2950, IGH_SV (SV); SEQ ID NO: 2951, IGH_SV (SV); SEQ ID NO: 2952, IGH_SV (SV); SEQ ID NO: 2953, IGH_SV (SV); SEQ ID NO: 2954, IGH_SV (SV); SEQ ID NO: 2955, IGH_SV (SV); SEQ ID NO: 2956, IGH_SV (SV); SEQ ID NO: 2957, IGH_SV (SV); SEQ ID NO: 2958, IGH_SV (SV); SEQ ID NO: 2959, IGH_SV (SV); SEQ ID NO: 2960, 15Q (ARM); SEQ ID NO: 2961, FP (FP); SEQ ID NO: 2962, 15Q (ARM); SEQ ID NO: 2963, 15Q (ARM); SEQ ID NO: 2964, 15Q (ARM); SEQ ID NO: 2965, 15Q (ARM); SEQ ID NO: 2966, 15Q (ARM); SEQ ID NO: 2967, 15Q (ARM); SEQ ID NO: 2968, 15Q (ARM); SEQ ID NO: 2969, 15Q (ARM); SEQ ID NO: 2970, 15Q (ARM); SEQ ID NO: 2971, 15Q (ARM); SEQ ID NO: 2972, 15Q (ARM); SEQ ID NO: 2973, 15Q (ARM); SEQ ID NO: 2974, 15Q (ARM); SEQ ID NO: 2975, 15Q (ARM); SEQ ID NO: 2976, 15Q (ARM); SEQ ID NO: 2977, 15Q (ARM); SEQ ID NO: 2978, 15q15.3_DLBCL (FOCAL); SEQ ID NO: 2979, 15q15.3_DLBCL (FOCAL); SEQ ID NO: 2980, 15q15.3_DLBCL (FOCAL); SEQ ID NO: 2981, 15q15.3_DLBCL (FOCAL); SEQ ID NO: 2982, 15q15.3_DLBCL (FOCAL); SEQ ID NO: 2983, MGA (Gene); SEQ ID NO: 2984, MGA (Gene); SEQ ID NO: 2985, MGA (Gene); SEQ ID NO: 2986, MGA (Gene); SEQ ID NO: 2987, MGA (Gene); SEQ ID NO: 2988, MGA (Gene); SEQ ID NO: 2989, MGA (Gene); SEQ ID NO: 2990, MGA (Gene); SEQ ID NO: 2991, MGA (Gene); SEQ ID NO: 2992, MGA (Gene); SEQ ID NO: 2993, MGA (Gene); SEQ ID NO: 2994, MGA (Gene); SEQ ID NO: 2995, MGA (Gene); SEQ ID NO: 2996, MGA (Gene); SEQ ID NO: 2997, MGA (Gene); SEQ ID NO: 2998, MGA (Gene); SEQ ID NO: 2999, MGA (Gene); SEQ ID NO: 3000, MGA (Gene); SEQ ID NO: 3001, MGA (Gene); SEQ ID NO: 3002, MGA (Gene); SEQ ID NO: 3003, MGA (Gene); SEQ ID NO: 3004, MGA (Gene); SEQ ID NO: 3005, MGA (Gene); SEQ ID NO: 3006, MGA (Gene); SEQ ID NO: 3007, MGA (Gene); SEQ ID NO: 3008, MGA (Gene); SEQ ID NO: 3009, MGA (Gene); SEQ ID NO: 3010, MGA (Gene); SEQ ID NO: 3011, MGA (Gene); SEQ ID NO: 3012, MGA (Gene); SEQ ID NO: 3013, MGA (Gene); SEQ ID NO: 3014, MGA (Gene); SEQ ID NO: 3015, MGA (Gene); SEQ ID NO: 3016, MGA (Gene); SEQ ID NO: 3017, 15q15.3_DLBCL (FOCAL); SEQ ID NO: 3018, 15q15.3_DLBCL (FOCAL); SEQ ID NO: 3019, 15q15.3_DLBCL (FOCAL); SEQ ID NO: 3020, 15q15.3_DLBCL (FOCAL); SEQ ID NO: 3021, 15q15.3_DLBCL (FOCAL); SEQ ID NO: 3022, 15q15.3_DLBCL (FOCAL); SEQ ID NO: 3023, 15q15.3_DLBCL (FOCAL); SEQ ID NO: 3024, 15q15.3_DLBCL (FOCAL); SEQ ID NO: 3025, 15q15.3_DLBCL (FOCAL); SEQ ID NO: 3026, 15q15.3_DLBCL (FOCAL); SEQ ID NO: 3027, 15q15.3_DLBCL (FOCAL); SEQ ID NO: 3028, 15q15.3_DLBCL (FOCAL); SEQ ID NO: 3029, B2M (Gene); SEQ ID NO: 3030, B2M (Gene); SEQ ID NO: 3031, B2M (Gene); SEQ ID NO: 3032, 15q15.3_DLBCL (FOCAL); SEQ ID NO: 3033, 15q15.3_DLBCL (FOCAL); SEQ ID NO: 3034, 15Q (ARM); SEQ ID NO: 3035, 15Q (ARM); SEQ ID NO: 3036, FP (FP); SEQ ID NO: 3037, 15Q (ARM); SEQ ID NO: 3038, 15Q (ARM); SEQ ID NO: 3039, 15Q (ARM); SEQ ID NO: 3040, 15Q (ARM); SEQ ID NO: 3041, SCG3 (Gene); SEQ ID NO: 3042, SCG3 (Gene); SEQ ID NO: 3043, SCG3 (Gene); SEQ ID NO: 3044, SCG3 (Gene); SEQ ID NO: 3045, SCG3 (Gene); SEQ ID NO: 3046, SCG3 (Gene); SEQ ID NO: 3047, SCG3 (Gene); SEQ ID NO: 3048, SCG3 (Gene); SEQ ID NO: 3049, SCG3 (Gene); SEQ ID NO: 3050, SCG3 (Gene); SEQ ID NO: 3051, SCG3 (Gene); SEQ ID NO: 3052, SCG3 (Gene); SEQ ID NO: 3053, 15Q (ARM); SEQ ID NO: 3054, 15Q (ARM); SEQ ID NO: 3055, FP (FP); SEQ ID NO: 3056, 15Q (ARM); SEQ ID NO: 3057, 15Q (ARM); SEQ ID NO: 3058, 15Q (ARM); SEQ ID NO: 3059, FP (FP); SEQ ID NO: 3060, 15Q (ARM); SEQ ID NO: 3061, 15Q (ARM); SEQ ID NO: 3062, 15Q (ARM); SEQ ID NO: 3063, 15Q (ARM); SEQ ID NO: 3064, 15Q (ARM); SEQ ID NO: 3065, 15Q (ARM); SEQ ID NO: 3066, 15Q (ARM); SEQ ID NO: 3067, 15Q (ARM); SEQ ID NO: 3068, 15Q (ARM); SEQ ID NO: 3069, 15Q (ARM); SEQ ID NO: 3070, 15Q (ARM); SEQ ID NO: 3071, MSI (MSI); SEQ ID NO: 3072, MSI (MSI); SEQ ID NO: 3073, MAP2K1 (Gene); SEQ ID NO: 3074, MAP2K1 (Gene); SEQ ID NO: 3075, MAP2K1 (Gene); SEQ ID NO: 3076, MAP2K1 (Gene); SEQ ID NO: 3077, MAP2K1 (Gene); SEQ ID NO: 3078, MAP2K1 (Gene); SEQ ID NO: 3079, MAP2K1 (Gene); SEQ ID NO: 3080, MAP2K1 (Gene); SEQ ID NO: 3081, MAP2K1 (Gene); SEQ ID NO: 3082, MAP2K1 (Gene); SEQ ID NO: 3083, MAP2K1 (Gene); SEQ ID NO: 3084, 15Q (ARM); SEQ ID NO: 3085, 15Q (ARM); SEQ ID NO: 3086, 15Q (ARM); SEQ ID NO: 3087, 15Q (ARM); SEQ ID NO: 3088, 15Q (ARM); SEQ ID NO: 3089, 15Q (ARM); SEQ ID NO: 3090, 15Q (ARM); SEQ ID NO: 3091, 15Q (ARM); SEQ ID NO: 3092, SIN3A (Gene); SEQ ID NO: 3093, SIN3A (Gene); SEQ ID NO: 3094, SIN3A (Gene); SEQ ID NO: 3095, SIN3A (Gene); SEQ ID NO: 3096, SIN3A (Gene); SEQ ID NO: 3097, SIN3A (Gene); SEQ ID NO: 3098, SIN3A (Gene); SEQ ID NO: 3099, SIN3A (Gene); SEQ ID NO: 3100, SIN3A (Gene); SEQ ID NO: 3101, SIN3A (Gene); SEQ ID NO: 3102, SIN3A (Gene); SEQ ID NO: 3103, SIN3A (Gene); SEQ ID NO: 3104, SIN3A (Gene); SEQ ID NO: 3105, SIN3A (Gene); SEQ ID NO: 3106, SIN3A (Gene); SEQ ID NO: 3107, SIN3A (Gene); SEQ ID NO: 3108, SIN3A (Gene); SEQ ID NO: 3109, SIN3A (Gene); SEQ ID NO: 3110, SIN3A (Gene); SEQ ID NO: 3111, SIN3A (Gene); SEQ ID NO: 3112, SIN3A (Gene); SEQ ID NO: 3113, 15Q (ARM); SEQ ID NO: 3114, 15Q (ARM); SEQ ID NO: 3115, MSI (MSI); SEQ ID NO: 3116, MSI (MSI); SEQ ID NO: 3117, 15Q (ARM); SEQ ID NO: 3118, 15Q (ARM); SEQ ID NO: 3119, 15Q (ARM); SEQ ID NO: 3120, 15Q (ARM); SEQ ID NO: 3121, 15Q (ARM); SEQ ID NO: 3122, 15Q (ARM); SEQ ID NO: 3123, 15Q (ARM); SEQ ID NO: 3124, 15Q (ARM); SEQ ID NO: 3125, 15Q (ARM); SEQ ID NO: 3126, 15Q (ARM); SEQ ID NO: 3127, IDH2 (Gene); SEQ ID NO: 3128, IDH2 (Gene); SEQ ID NO: 3129, IDH2 (Gene); SEQ ID NO: 3130, IDH2 (Gene); SEQ ID NO: 3131, IDH2 (Gene); SEQ ID NO: 3132, IDH2 (Gene); SEQ ID NO: 3133, IDH2 (Gene); SEQ ID NO: 3134, IDH2 (Gene); SEQ ID NO: 3135, IDH2 (Gene); SEQ ID NO: 3136, IDH2 (Gene); SEQ ID NO: 3137, IDH2 (Gene); SEQ ID NO: 3138, 15Q (ARM); SEQ ID NO: 3139, MSI (MSI); SEQ ID NO: 3140, MSI (MSI); SEQ ID NO: 3141, FP (FP); SEQ ID NO: 3142, 15Q (ARM); SEQ ID NO: 3143, 15Q (ARM); SEQ ID NO: 3144, 15Q (ARM); SEQ ID NO: 3145, 15Q (ARM); SEQ ID NO: 3146, 15Q (ARM); SEQ ID NO: 3147, 15Q (ARM); SEQ ID NO: 3148, 15Q (ARM); SEQ ID NO: 3149, 15Q (ARM); SEQ ID NO: 3150, 15Q (ARM); SEQ ID NO: 3151, 15Q (ARM); SEQ ID NO: 3152, 15Q (ARM); SEQ ID NO: 3153, 15Q (ARM); SEQ ID NO: 3154, 15Q (ARM); SEQ ID NO: 3155, TSC2 (Gene); SEQ ID NO: 3156, TSC2 (Gene); SEQ ID NO: 3157, TSC2 (Gene); SEQ ID NO: 3158, TSC2 (Gene); SEQ ID NO: 3159, TSC2 (Gene); SEQ ID NO: 3160, TSC2 (Gene); SEQ ID NO: 3161, TSC2 (Gene); SEQ ID NO: 3162, TSC2 (Gene); SEQ ID NO: 3163, TSC2 (Gene); SEQ ID NO: 3164, TSC2 (Gene); SEQ ID NO: 3165, TSC2 (Gene); SEQ ID NO: 3166, TSC2 (Gene); SEQ ID NO: 3167, TSC2 (Gene); SEQ ID NO: 3168, TSC2 (Gene); SEQ ID NO: 3169, TSC2 (Gene); SEQ ID NO: 3170, TSC2 (Gene); SEQ ID NO: 3171, TSC2 (Gene); SEQ ID NO: 3172, TSC2 (Gene); SEQ ID NO: 3173, TSC2 (Gene); SEQ ID NO: 3174, TSC2 (Gene); SEQ ID NO: 3175, TSC2 (Gene); SEQ ID NO: 3176, TSC2 (Gene); SEQ ID NO: 3177, TSC2 (Gene); SEQ ID NO: 3178, TSC2 (Gene); SEQ ID NO: 3179, TSC2 (Gene); SEQ ID NO: 3180, TSC2 (Gene); SEQ ID NO: 3181, TSC2 (Gene); SEQ ID NO: 3182, TSC2 (Gene); SEQ ID NO: 3183, TSC2 (Gene); SEQ ID NO: 3184, TSC2 (Gene); SEQ ID NO: 3185, TSC2 (Gene); SEQ ID NO: 3186, TSC2 (Gene); SEQ ID NO: 3187, TSC2 (Gene); SEQ ID NO: 3188, TSC2 (Gene); SEQ ID NO: 3189, TSC2 (Gene); SEQ ID NO: 3190, TSC2 (Gene); SEQ ID NO: 3191, TSC2 (Gene); SEQ ID NO: 3192, TSC2 (Gene); SEQ ID NO: 3193, TSC2 (Gene); SEQ ID NO: 3194, TSC2 (Gene); SEQ ID NO: 3195, TSC2 (Gene); SEQ ID NO: 3196, TSC2 (Gene); SEQ ID NO: 3197, TSC2 (Gene); SEQ ID NO: 3198, TSC2 (Gene); SEQ ID NO: 3199, TSC2 (Gene); SEQ ID NO: 3200, 16P (ARM); SEQ ID NO: 3201, CREBBP (Gene); SEQ ID NO: 3202, CREBBP (Gene); SEQ ID NO: 3203, CREBBP (Gene); SEQ ID NO: 3204, CREBBP (Gene); SEQ ID NO: 3205, CREBBP (Gene); SEQ ID NO: 3206, CREBBP (Gene); SEQ ID NO: 3207, CREBBP (Gene); SEQ ID NO: 3208, CREBBP (Gene); SEQ ID NO: 3209, CREBBP (Gene); SEQ ID NO: 3210, CREBBP (Gene); SEQ ID NO: 3211, CREBBP (Gene); SEQ ID NO: 3212, CREBBP (Gene); SEQ ID NO: 3213, CREBBP (Gene); SEQ ID NO: 3214, CREBBP (Gene); SEQ ID NO: 3215, CREBBP (Gene); SEQ ID NO: 3216, CREBBP (Gene); SEQ ID NO: 3217, CREBBP (Gene); SEQ ID NO: 3218, CREBBP (Gene); SEQ ID NO: 3219, CREBBP (Gene); SEQ ID NO: 3220, CREBBP (Gene); SEQ ID NO: 3221, CREBBP (Gene); SEQ ID NO: 3222, CREBBP (Gene); SEQ ID NO: 3223, CREBBP (Gene); SEQ ID NO: 3224, CREBBP (Gene); SEQ ID NO: 3225, CREBBP (Gene); SEQ ID NO: 3226, CREBBP (Gene); SEQ ID NO: 3227, CREBBP (Gene); SEQ ID NO: 3228, CREBBP (Gene); SEQ ID NO: 3229, CREBBP (Gene); SEQ ID NO: 3230, CREBBP (Gene); SEQ ID NO: 3231, CREBBP (Gene); SEQ ID NO: 3232, CREBBP (Gene); SEQ ID NO: 3233, CREBBP (Gene); SEQ ID NO: 3234, CREBBP (Gene); SEQ ID NO: 3235, CREBBP (Gene); SEQ ID NO: 3236, CREBBP (Gene); SEQ ID NO: 3237, CREBBP (Gene); SEQ ID NO: 3238, CREBBP (Gene); SEQ ID NO: 3239, CREBBP (Gene); SEQ ID NO: 3240, CREBBP (Gene); SEQ ID NO: 3241, FP (FP); SEQ ID NO: 3242, 16P (ARM); SEQ ID NO: 3243, 16P (ARM); SEQ ID NO: 3244, 16P (ARM); SEQ ID NO: 3245, 16P (ARM); SEQ ID NO: 3246, 16P (ARM); SEQ ID NO: 3247, 16P (ARM); SEQ ID NO: 3248, 16P (ARM); SEQ ID NO: 3249, 16P (ARM); SEQ ID NO: 3250, 16P (ARM); SEQ ID NO: 3251, MSI (MSI); SEQ ID NO: 3252, MSI (MSI); SEQ ID NO: 3253, CIITA_SV (SV); SEQ ID NO: 3254, CIITA_SV (SV); SEQ ID NO: 3255, CIITA_SV (SV); SEQ ID NO: 3256, CIITA_SV (SV); SEQ ID NO: 3257, CIITA_SV (SV); SEQ ID NO: 3258, CIITA_SV (SV); SEQ ID NO: 3259, CIITA_SV (SV); SEQ ID NO: 3260, CIITA_SV (SV); SEQ ID NO: 3261, CIITA_SV (SV); SEQ ID NO: 3262, CIITA_SV (SV); SEQ ID NO: 3263, CIITA_SV (SV); SEQ ID NO: 3264, CIITA_SV (SV); SEQ ID NO: 3265, CIITA_SV (SV); SEQ ID NO: 3266, CIITA_SV (SV); SEQ ID NO: 3267, CIITA_SV (SV); SEQ ID NO: 3268, CIITA_SV (SV); SEQ ID NO: 3269, CIITA_SV (SV); SEQ ID NO: 3270, CIITA_SV (SV); SEQ ID NO: 3271, CIITA_SV (SV); SEQ ID NO: 3272, CIITA_SV (SV); SEQ ID NO: 3273, CIITA_SV (SV); SEQ ID NO: 3274, CIITA_SV (SV); SEQ ID NO: 3275, CIITA_SV (SV); SEQ ID NO: 3276, CIITA_SV (SV); SEQ ID NO: 3277, CIITA_SV (SV); SEQ ID NO: 3278, CIITA_SV (SV); SEQ ID NO: 3279, CIITA_SV (SV); SEQ ID NO: 3280, CIITA_SV (SV); SEQ ID NO: 3281, CIITA_SV (SV); SEQ ID NO: 3282, CIITA_SV (SV); SEQ ID NO: 3283, CIITA_SV (SV); SEQ ID NO: 3284, CIITA_SV (SV); SEQ ID NO: 3285, CIITA_SV (SV); SEQ ID NO: 3286, CIITA_SV (SV); SEQ ID NO: 3287, CIITA_SV (SV); SEQ ID NO: 3288, CIITA_SV (SV); SEQ ID NO: 3289, CIITA_SV (SV); SEQ ID NO: 3290, CIITA (Gene); SEQ ID NO: 3291, CIITA (Gene); SEQ ID NO: 3292, CIITA (Gene); SEQ ID NO: 3293, CIITA (Gene); SEQ ID NO: 3294, CIITA (Gene); SEQ ID NO: 3295, CIITA (Gene); SEQ ID NO: 3296, CIITA (Gene); SEQ ID NO: 3297, CIITA (Gene); SEQ ID NO: 3298, CIITA (Gene); SEQ ID NO: 3299, CIITA (Gene); SEQ ID NO: 3300, CIITA (Gene); SEQ ID NO: 3301, CIITA (Gene); SEQ ID NO: 3302, CIITA (Gene); SEQ ID NO: 3303, CIITA (Gene); SEQ ID NO: 3304, CIITA (Gene); SEQ ID NO: 3305, CIITA (Gene); SEQ ID NO: 3306, CIITA (Gene); SEQ ID NO: 3307, CIITA (Gene); SEQ ID NO: 3308, CIITA (Gene); SEQ ID NO: 3309, CIITA (Gene); SEQ ID NO: 3310, CIITA (Gene); SEQ ID NO: 3311, CIITA (Gene); SEQ ID NO: 3312, CIITA (Gene); SEQ ID NO: 3313, SOCS1 (Gene); SEQ ID NO: 3314, SOCS1 (Gene); SEQ ID NO: 3315, 16P (ARM); SEQ ID NO: 3316, 16P (ARM); SEQ ID NO: 3317, 16P (ARM); SEQ ID NO: 3318, 16P (ARM); SEQ ID NO: 3319, 16P (ARM); SEQ ID NO: 3320, 16P (ARM); SEQ ID NO: 3321, 16P (ARM); SEQ ID NO: 3322, 16P (ARM); SEQ ID NO: 3323, PRKCB (Gene); SEQ ID NO: 3324, PRKCB (Gene); SEQ ID NO: 3325, PRKCB (Gene); SEQ ID NO: 3326, PRKCB (Gene); SEQ ID NO: 3327, PRKCB (Gene); SEQ ID NO: 3328, PRKCB (Gene); SEQ ID NO: 3329, PRKCB (Gene); SEQ ID NO: 3330, PRKCB (Gene); SEQ ID NO: 3331, PRKCB (Gene); SEQ ID NO: 3332, 16P (ARM); SEQ ID NO: 3333, PRKCB (Gene); SEQ ID NO: 3334, PRKCB (Gene); SEQ ID NO: 3335, PRKCB (Gene); SEQ ID NO: 3336, PRKCB (Gene); SEQ ID NO: 3337, PRKCB (Gene); SEQ ID NO: 3338, PRKCB (Gene); SEQ ID NO: 3339, PRKCB (Gene); SEQ ID NO: 3340, PRKCB (Gene); SEQ ID NO: 3341, PRKCB (Gene); SEQ ID NO: 3342, 16P (ARM); SEQ ID NO: 3343, 16P (ARM); SEQ ID NO: 3344, 16P (ARM); SEQ ID NO: 3345, 16P (ARM); SEQ ID NO: 3346, IL4R (Gene); SEQ ID NO: 3347, IL4R (Gene); SEQ ID NO: 3348, IL4R (Gene); SEQ ID NO: 3349, IL4R (Gene); SEQ ID NO: 3350, IL4R (Gene); SEQ ID NO: 3351, IL4R (Gene); SEQ ID NO: 3352, IL4R (Gene); SEQ ID NO: 3353, IL4R (Gene); SEQ ID NO: 3354, IL4R (Gene); SEQ ID NO: 3355, IL4R (Gene); SEQ ID NO: 3356, IL4R (Gene); SEQ ID NO: 3357, IL4R (Gene); SEQ ID NO: 3358, IL4R (Gene); SEQ ID NO: 3359, 16P (ARM); SEQ ID NO: 3360, CD19 (Gene); SEQ ID NO: 3361, CD19 (Gene); SEQ ID NO: 3362, CD19 (Gene); SEQ ID NO: 3363, CD19 (Gene); SEQ ID NO: 3364, CD19 (Gene); SEQ ID NO: 3365, CD19 (Gene); SEQ ID NO: 3366, CD19 (Gene); SEQ ID NO: 3367, CD19 (Gene); SEQ ID NO: 3368, CD19 (Gene); SEQ ID NO: 3369, CD19 (Gene); SEQ ID NO: 3370, CD19 (Gene); SEQ ID NO: 3371, CD19 (Gene); SEQ ID NO: 3372, CD19 (Gene); SEQ ID NO: 3373, CD19 (Gene); SEQ ID NO: 3374, 16q12.1_DLBCL_trim (FOCAL); SEQ ID NO: 3375, 16q12.1_DLBCL_trim (FOCAL); SEQ ID NO: 3376, 16q12.1_DLBCL_trim (FOCAL); SEQ ID NO: 3377, 16q12.1_DLBCL_trim (FOCAL); SEQ ID NO: 3378, 16q12.1_DLBCL_trim (FOCAL); SEQ ID NO: 3379, 16q12.1_DLBCL_trim (FOCAL); SEQ ID NO: 3380, 16q12.1_DLBCL_trim (FOCAL); SEQ ID NO: 3381, 16q12.1_DLBCL_trim (FOCAL); SEQ ID NO: 3382, 16q12.1_DLBCL_trim (FOCAL); SEQ ID NO: 3383, 16q12.1_DLBCL_trim (FOCAL); SEQ ID NO: 3384, 16q12.1_DLBCL_trim (FOCAL); SEQ ID NO: 3385, 16q12.1_DLBCL_trim (FOCAL); SEQ ID NO: 3386, 16q12.1_DLBCL_trim (FOCAL); SEQ ID NO: 3387, 16q12.1_DLBCL_trim (FOCAL); SEQ ID NO: 3388, 16q12.1_DLBCL_trim (FOCAL); SEQ ID NO: 3389, 16q12.1_DLBCL_trim (FOCAL); SEQ ID NO: 3390, 16q12.1_DLBCL_trim (FOCAL); SEQ ID NO: 3391, 16q12.1_DLBCL_trim (FOCAL); SEQ ID NO: 3392, 16q12.1_DLBCL_trim (FOCAL); SEQ ID NO: 3393, 16q12.1_DLBCL_trim (FOCAL); SEQ ID NO: 3394, 16q12.1_DLBCL_trim (FOCAL); SEQ ID NO: 3395, FP (FP); SEQ ID NO: 3396, 16q12.1_DLBCL_trim (FOCAL); SEQ ID NO: 3397, 16q12.1_DLBCL_trim (FOCAL); SEQ ID NO: 3398, 16q12.1_DLBCL_trim (FOCAL); SEQ ID NO: 3399, 16q12.1_DLBCL_trim (FOCAL); SEQ ID NO: 3400, 16q12.1_DLBCL_trim (FOCAL); SEQ ID NO: 3401, 16q12.1_DLBCL_trim (FOCAL); SEQ ID NO: 3402, 16q12.1_DLBCL_trim (FOCAL); SEQ ID NO: 3403, 16q12.1_DLBCL_trim (FOCAL); SEQ ID NO: 3404, 16q12.1_DLBCL_trim (FOCAL); SEQ ID NO: 3405, 16q12.1_DLBCL_trim (FOCAL); SEQ ID NO: 3406, 16q12.1_DLBCL_trim (FOCAL); SEQ ID NO: 3407, 16q12.1_DLBCL_trim (FOCAL); SEQ ID NO: 3408, 16q12.1_DLBCL_trim (FOCAL); SEQ ID NO: 3409, 16q12.1_DLBCL_trim (FOCAL); SEQ ID NO: 3410, 16q12.1_DLBCL_trim (FOCAL); SEQ ID NO: 3411, 16q12.1_DLBCL_trim (FOCAL); SEQ ID NO: 3412, 16q12.1_DLBCL_trim (FOCAL); SEQ ID NO: 3413, 16q12.1_DLBCL_trim (FOCAL); SEQ ID NO: 3414, 16q12.1_DLBCL_trim (FOCAL); SEQ ID NO: 3415, 16q12.1_DLBCL_trim (FOCAL); SEQ ID NO: 3416, 16q12.1_DLBCL_trim (FOCAL); SEQ ID NO: 3417, 16q12.1_DLBCL_trim (FOCAL); SEQ ID NO: 3418, 16q12.1_DLBCL_trim (FOCAL); SEQ ID NO: 3419, 16q12.1_DLBCL_trim (FOCAL); SEQ ID NO: 3420, 16q12.1_DLBCL_trim (FOCAL); SEQ ID NO: 3421, 16q12.1_DLBCL_trim (FOCAL); SEQ ID NO: 3422, 16q12.1_DLBCL_trim (FOCAL); SEQ ID NO: 3423, 16q12.1_DLBCL_trim (FOCAL); SEQ ID NO: 3424, 16q12.1_DLBCL_trim (FOCAL); SEQ ID NO: 3425, 16q12.1_DLBCL_trim (FOCAL); SEQ ID NO: 3426, 16q12.1_DLBCL_trim (FOCAL); SEQ ID NO: 3427, 16q12.1_DLBCL_trim (FOCAL); SEQ ID NO: 3428, 16q12.1_DLBCL_trim (FOCAL); SEQ ID NO: 3429, 16q12.1_DLBCL_trim (FOCAL); SEQ ID NO: 3430, 16q12.1_DLBCL_trim (FOCAL); SEQ ID NO: 3431, 16q12.1_DLBCL_trim (FOCAL); SEQ ID NO: 3432, 16q12.1_DLBCL_trim (FOCAL); SEQ ID NO: 3433, 16q12.1_DLBCL_trim (FOCAL); SEQ ID NO: 3434, 16q12.1_DLBCL_trim (FOCAL); SEQ ID NO: 3435, 16q12.1_DLBCL_trim (FOCAL); SEQ ID NO: 3436, 16q12.1_DLBCL_trim (FOCAL); SEQ ID NO: 3437, 16q12.1_DLBCL_trim (FOCAL); SEQ ID NO: 3438, 16q12.1_DLBCL_trim (FOCAL); SEQ ID NO: 3439, 16q12.1_DLBCL_trim (FOCAL); SEQ ID NO: 3440, 16q12.1_DLBCL_trim (FOCAL); SEQ ID NO: 3441, 16q12.1_DLBCL_trim (FOCAL); SEQ ID NO: 3442, 16q12.1_DLBCL_trim (FOCAL); SEQ ID NO: 3443, 16q12.1_DLBCL_trim (FOCAL); SEQ ID NO: 3444, 16q12.1_DLBCL_trim (FOCAL); SEQ ID NO: 3445, 16q12.1_DLBCL_trim (FOCAL); SEQ ID NO: 3446, 16q12.1_DLBCL_trim (FOCAL); SEQ ID NO: 3447, 16q12.1_DLBCL_trim (FOCAL); SEQ ID NO: 3448, 16q12.1_DLBCL_trim (FOCAL); SEQ ID NO: 3449, 16Q (ARM); SEQ ID NO: 3450, 16Q (ARM); SEQ ID NO: 3451, 16Q (ARM); SEQ ID NO: 3452, 16Q (ARM); SEQ ID NO: 3453, 16Q (ARM); SEQ ID NO: 3454, 16Q (ARM); SEQ ID NO: 3455, MSI (MSI); SEQ ID NO: 3456, MSI (MSI); SEQ ID NO: 3457, 16Q (ARM); SEQ ID NO: 3458, 16Q (ARM); SEQ ID NO: 3459, 16Q (ARM); SEQ ID NO: 3460, 16Q (ARM); SEQ ID NO: 3461, 16Q (ARM); SEQ ID NO: 3462, 16Q (ARM); SEQ ID NO: 3463, 16Q (ARM); SEQ ID NO: 3464, 16Q (ARM); SEQ ID NO: 3465, 16Q (ARM); SEQ ID NO: 3466, 16Q (ARM); SEQ ID NO: 3467, 16Q (ARM); SEQ ID NO: 3468, 16Q (ARM); SEQ ID NO: 3469, 16Q (ARM); SEQ ID NO: 3470, 16Q (ARM); SEQ ID NO: 3471, 16Q (ARM); SEQ ID NO: 3472, FP (FP); SEQ ID NO: 3473, 16Q (ARM); SEQ ID NO: 3474, 16Q (ARM); SEQ ID NO: 3475, PLCG2 (Gene); SEQ ID NO: 3476, PLCG2 (Gene); SEQ ID NO: 3477, PLCG2 (Gene); SEQ ID NO: 3478, PLCG2 (Gene); SEQ ID NO: 3479, PLCG2 (Gene); SEQ ID NO: 3480, PLCG2 (Gene); SEQ ID NO: 3481, PLCG2 (Gene); SEQ ID NO: 3482, PLCG2 (Gene); SEQ ID NO: 3483, PLCG2 (Gene); SEQ ID NO: 3484, PLCG2 (Gene); SEQ ID NO: 3485, PLCG2 (Gene); SEQ ID NO: 3486, PLCG2 (Gene); SEQ ID NO: 3487, PLCG2 (Gene); SEQ ID NO: 3488, PLCG2 (Gene); SEQ ID NO: 3489, PLCG2 (Gene); SEQ ID NO: 3490, PLCG2 (Gene); SEQ ID NO: 3491, PLCG2 (Gene); SEQ ID NO: 3492, PLCG2 (Gene); SEQ ID NO: 3493, PLCG2 (Gene); SEQ ID NO: 3494, PLCG2 (Gene); SEQ ID NO: 3495, PLCG2 (Gene); SEQ ID NO: 3496, 16Q (ARM); SEQ ID NO: 3497, PLCG2 (Gene); SEQ ID NO: 3498, PLCG2 (Gene); SEQ ID NO: 3499, PLCG2 (Gene); SEQ ID NO: 3500, PLCG2 (Gene); SEQ ID NO: 3501, PLCG2 (Gene); SEQ ID NO: 3502, PLCG2 (Gene); SEQ ID NO: 3503, PLCG2 (Gene); SEQ ID NO: 3504, PLCG2 (Gene); SEQ ID NO: 3505, PLCG2 (Gene); SEQ ID NO: 3506, PLCG2 (Gene); SEQ ID NO: 3507, PLCG2 (Gene); SEQ ID NO: 3508, 16Q (ARM); SEQ ID NO: 3509, 16Q (ARM); SEQ ID NO: 3510, 16Q (ARM); SEQ ID NO: 3511, 16Q (ARM); SEQ ID NO: 3512, 16Q (ARM); SEQ ID NO: 3513, 16Q (ARM); SEQ ID NO: 3514, MSI (MSI); SEQ ID NO: 3515, MSI (MSI); SEQ ID NO: 3516, IRF8 (Gene); SEQ ID NO: 3517, IRF8 (Gene); SEQ ID NO: 3518, IRF8 (Gene); SEQ ID NO: 3519, IRF8 (Gene); SEQ ID NO: 3520, IRF8 (Gene); SEQ ID NO: 3521, IRF8 (Gene); SEQ ID NO: 3522, IRF8 (Gene); SEQ ID NO: 3523, IRF8 (Gene); SEQ ID NO: 3524, IRF8 (Gene); SEQ ID NO: 3525, 16Q (ARM); SEQ ID NO: 3526, 16Q (ARM); SEQ ID NO: 3527, 16Q (ARM); SEQ ID NO: 3528, ANKRD11 (Gene); SEQ ID NO: 3529, ANKRD11 (Gene); SEQ ID NO: 3530, ANKRD11 (Gene); SEQ ID NO: 3531, ANKRD11 (Gene); SEQ ID NO: 3532, ANKRD11 (Gene); SEQ ID NO: 3533, ANKRD11 (Gene); SEQ ID NO: 3534, ANKRD11 (Gene); SEQ ID NO: 3535, ANKRD11 (Gene); SEQ ID NO: 3536, ANKRD11 (Gene); SEQ ID NO: 3537, ANKRD11 (Gene); SEQ ID NO: 3538, ANKRD11 (Gene); SEQ ID NO: 3539, ANKRD11 (Gene); SEQ ID NO: 3540, ANKRD11 (Gene); SEQ ID NO: 3541, ANKRD11 (Gene); SEQ ID NO: 3542, ANKRD11 (Gene); SEQ ID NO: 3543, ANKRD11 (Gene); SEQ ID NO: 3544, ANKRD11 (Gene); SEQ ID NO: 3545, ANKRD11 (Gene); SEQ ID NO: 3546, ANKRD11 (Gene); SEQ ID NO: 3547, ANKRD11 (Gene); SEQ ID NO: 3548, ANKRD11 (Gene); SEQ ID NO: 3549, ANKRD11 (Gene); SEQ ID NO: 3550, ANKRD11 (Gene); SEQ ID NO: 3551, ANKRD11 (Gene); SEQ ID NO: 3552, ANKRD11 (Gene); SEQ ID NO: 3553, 16Q (ARM); SEQ ID NO: 3554, 16Q (ARM); SEQ ID NO: 3555, 17p_CLL (TP53) (ARM); SEQ ID NO: 3556, 17p_CLL (TP53) (ARM); SEQ ID NO: 3557, 17p_CLL (TP53) (ARM); SEQ ID NO: 3558, 17p_CLL (TP53) (ARM); SEQ ID NO: 3559, 17p_CLL (TP53) (ARM); SEQ ID NO: 3560, FP (FP); SEQ ID NO: 3561, 17p_CLL (TP53) (ARM); SEQ ID NO: 3562, 17p_CLL (TP53) (ARM); SEQ ID NO: 3563, GPS2 (Gene); SEQ ID NO: 3564, GPS2 (Gene); SEQ ID NO: 3565, GPS2 (Gene); SEQ ID NO: 3566, GPS2 (Gene); SEQ ID NO: 3567, GPS2 (Gene); SEQ ID NO: 3568, GPS2 (Gene); SEQ ID NO: 3569, GPS2 (Gene); SEQ ID NO: 3570, GPS2 (Gene); SEQ ID NO: 3571, GPS2 (Gene); SEQ ID NO: 3572, GPS2 (Gene); SEQ ID NO: 3573, TP53 (Gene); SEQ ID NO: 3574, TP53 (Gene); SEQ ID NO: 3575, TP53 (Gene); SEQ ID NO: 3576, TP53 (Gene); SEQ ID NO: 3577, TP53 (Gene); SEQ ID NO: 3578, TP53 (Gene); SEQ ID NO: 3579, TP53 (Gene); SEQ ID NO: 3580, TP53 (Gene); SEQ ID NO: 3581, TP53 (Gene); SEQ ID NO: 3582, TP53 (Gene); SEQ ID NO: 3583, TP53 (Gene); SEQ ID NO: 3584, DNAH2 (Gene); SEQ ID NO: 3585, DNAH2 (Gene); SEQ ID NO: 3586, DNAH2 (Gene); SEQ ID NO: 3587, DNAH2 (Gene); SEQ ID NO: 3588, DNAH2 (Gene); SEQ ID NO: 3589, DNAH2 (Gene); SEQ ID NO: 3590, DNAH2 (Gene); SEQ ID NO: 3591, DNAH2 (Gene); SEQ ID NO: 3592, DNAH2 (Gene); SEQ ID NO: 3593, DNAH2 (Gene); SEQ ID NO: 3594, DNAH2 (Gene); SEQ ID NO: 3595, DNAH2 (Gene); SEQ ID NO: 3596, DNAH2 (Gene); SEQ ID NO: 3597, DNAH2 (Gene); SEQ ID NO: 3598, DNAH2 (Gene); SEQ ID NO: 3599, DNAH2 (Gene); SEQ ID NO: 3600, DNAH2 (Gene); SEQ ID NO: 3601, DNAH2 (Gene); SEQ ID NO: 3602, DNAH2 (Gene); SEQ ID NO: 3603, DNAH2 (Gene); SEQ ID NO: 3604, DNAH2 (Gene); SEQ ID NO: 3605, DNAH2 (Gene); SEQ ID NO: 3606, DNAH2 (Gene); SEQ ID NO: 3607, DNAH2 (Gene); SEQ ID NO: 3608, DNAH2 (Gene); SEQ ID NO: 3609, DNAH2 (Gene); SEQ ID NO: 3610, DNAH2 (Gene); SEQ ID NO: 3611, DNAH2 (Gene); SEQ ID NO: 3612, DNAH2 (Gene); SEQ ID NO: 3613, DNAH2 (Gene); SEQ ID NO: 3614, DNAH2 (Gene); SEQ ID NO: 3615, DNAH2 (Gene); SEQ ID NO: 3616, DNAH2 (Gene); SEQ ID NO: 3617, DNAH2 (Gene); SEQ ID NO: 3618, DNAH2 (Gene); SEQ ID NO: 3619, DNAH2 (Gene); SEQ ID NO: 3620, DNAH2 (Gene); SEQ ID NO: 3621, DNAH2 (Gene); SEQ ID NO: 3622, DNAH2 (Gene); SEQ ID NO: 3623, DNAH2 (Gene); SEQ ID NO: 3624, DNAH2 (Gene); SEQ ID NO: 3625, DNAH2 (Gene); SEQ ID NO: 3626, DNAH2 (Gene); SEQ ID NO: 3627, DNAH2 (Gene); SEQ ID NO: 3628, DNAH2 (Gene); SEQ ID NO: 3629, DNAH2 (Gene); SEQ ID NO: 3630, DNAH2 (Gene); SEQ ID NO: 3631, DNAH2 (Gene); SEQ ID NO: 3632, DNAH2 (Gene); SEQ ID NO: 3633, DNAH2 (Gene); SEQ ID NO: 3634, DNAH2 (Gene); SEQ ID NO: 3635, DNAH2 (Gene); SEQ ID NO: 3636, DNAH2 (Gene); SEQ ID NO: 3637, DNAH2 (Gene); SEQ ID NO: 3638, DNAH2 (Gene); SEQ ID NO: 3639, DNAH2 (Gene); SEQ ID NO: 3640, DNAH2 (Gene); SEQ ID NO: 3641, DNAH2 (Gene); SEQ ID NO: 3642, DNAH2 (Gene); SEQ ID NO: 3643, DNAH2 (Gene); SEQ ID NO: 3644, DNAH2 (Gene); SEQ ID NO: 3645, DNAH2 (Gene); SEQ ID NO: 3646, DNAH2 (Gene); SEQ ID NO: 3647, DNAH2 (Gene); SEQ ID NO: 3648, DNAH2 (Gene); SEQ ID NO: 3649, DNAH2 (Gene); SEQ ID NO: 3650, DNAH2 (Gene); SEQ ID NO: 3651, DNAH2 (Gene); SEQ ID NO: 3652, DNAH2 (Gene); SEQ ID NO: 3653, DNAH2 (Gene); SEQ ID NO: 3654, DNAH2 (Gene); SEQ ID NO: 3655, DNAH2 (Gene); SEQ ID NO: 3656, DNAH2 (Gene); SEQ ID NO: 3657, DNAH2 (Gene); SEQ ID NO: 3658, DNAH2 (Gene); SEQ ID NO: 3659, DNAH2 (Gene); SEQ ID NO: 3660, DNAH2 (Gene); SEQ ID NO: 3661, DNAH2 (Gene); SEQ ID NO: 3662, DNAH2 (Gene); SEQ ID NO: 3663, DNAH2 (Gene); SEQ ID NO: 3664, DNAH2 (Gene); SEQ ID NO: 3665, DNAH2 (Gene); SEQ ID NO: 3666, DNAH2 (Gene); SEQ ID NO: 3667, DNAH2 (Gene); SEQ ID NO: 3668, DNAH2 (Gene); SEQ ID NO: 3669, DNAH2 (Gene); SEQ ID NO: 3670, DNAH2 (Gene); SEQ ID NO: 3671, MSI (MSI); SEQ ID NO: 3672, MSI (MSI); SEQ ID NO: 3673, 17p_CLL (TP53) (ARM); SEQ ID NO: 3674, 17p_CLL (TP53) (ARM); SEQ ID NO: 3675, 17p_CLL (TP53) (ARM); SEQ ID NO: 3676, 17p_CLL (TP53) (ARM); SEQ ID NO: 3677, FP (FP); SEQ ID NO: 3678, 17p_CLL (TP53) (ARM); SEQ ID NO: 3679, 17p_CLL (TP53) (ARM); SEQ ID NO: 3680, 17p_CLL (TP53) (ARM); SEQ ID NO: 3681, 17p_CLL (TP53) (ARM); SEQ ID NO: 3682, 17p_CLL (TP53) (ARM); SEQ ID NO: 3683, NCOR1 (Gene); SEQ ID NO: 3684, NCOR1 (Gene); SEQ ID NO: 3685, NCOR1 (Gene); SEQ ID NO: 3686, NCOR1 (Gene); SEQ ID NO: 3687, NCOR1 (Gene); SEQ ID NO: 3688, NCOR1 (Gene); SEQ ID NO: 3689, NCOR1 (Gene); SEQ ID NO: 3690, NCOR1 (Gene); SEQ ID NO: 3691, NCOR1 (Gene); SEQ ID NO: 3692, NCOR1 (Gene); SEQ ID NO: 3693, NCOR1 (Gene); SEQ ID NO: 3694, NCOR1 (Gene); SEQ ID NO: 3695, NCOR1 (Gene); SEQ ID NO: 3696, NCOR1 (Gene); SEQ ID NO: 3697, NCOR1 (Gene); SEQ ID NO: 3698, NCOR1 (Gene); SEQ ID NO: 3699, NCOR1 (Gene); SEQ ID NO: 3700, NCOR1 (Gene); SEQ ID NO: 3701, NCOR1 (Gene); SEQ ID NO: 3702, NCOR1 (Gene); SEQ ID NO: 3703, NCOR1 (Gene); SEQ ID NO: 3704, NCOR1 (Gene); SEQ ID NO: 3705, NCOR1 (Gene); SEQ ID NO: 3706, NCOR1 (Gene); SEQ ID NO: 3707, NCOR1 (Gene); SEQ ID NO: 3708, NCOR1 (Gene); SEQ ID NO: 3709, NCOR1 (Gene); SEQ ID NO: 3710, NCOR1 (Gene); SEQ ID NO: 3711, NCOR1 (Gene); SEQ ID NO: 3712, NCOR1 (Gene); SEQ ID NO: 3713, NCOR1 (Gene); SEQ ID NO: 3714, NCOR1 (Gene); SEQ ID NO: 3715, NCOR1 (Gene); SEQ ID NO: 3716, NCOR1 (Gene); SEQ ID NO: 3717, NCOR1 (Gene); SEQ ID NO: 3718, NCOR1 (Gene); SEQ ID NO: 3719, NCOR1 (Gene); SEQ ID NO: 3720, NCOR1 (Gene); SEQ ID NO: 3721, NCOR1 (Gene); SEQ ID NO: 3722, NCOR1 (Gene); SEQ ID NO: 3723, NCOR1 (Gene); SEQ ID NO: 3724, NCOR1 (Gene); SEQ ID NO: 3725, NCOR1 (Gene); SEQ ID NO: 3726, NCOR1 (Gene); SEQ ID NO: 3727, NCOR1 (Gene); SEQ ID NO: 3728, NCOR1 (Gene); SEQ ID NO: 3729, NCOR1 (Gene); SEQ ID NO: 3730, NCOR1 (Gene); SEQ ID NO: 3731, 17p_CLL (TP53) (ARM); SEQ ID NO: 3732, 17p_CLL (TP53) (ARM); SEQ ID NO: 3733, 17p_CLL (TP53) (ARM); SEQ ID NO: 3734, FP (FP); SEQ ID NO: 3735, 17Q (ARM); SEQ ID NO: 3736, 17Q (ARM); SEQ ID NO: 3737, 17Q (ARM); SEQ ID NO: 3738, 17Q (ARM); SEQ ID NO: 3739, 17Q (ARM); SEQ ID NO: 3740, 17Q (ARM); SEQ ID NO: 3741, 17Q (ARM); SEQ ID NO: 3742, CCL4 (Gene); SEQ ID NO: 3743, CCL4 (Gene); SEQ ID NO: 3744, CCL4 (Gene); SEQ ID NO: 3745, 17Q (ARM); SEQ ID NO: 3746, 17Q (ARM); SEQ ID NO: 3747, IKZF3 (Gene); SEQ ID NO: 3748, IKZF3 (Gene); SEQ ID NO: 3749, IKZF3 (Gene); SEQ ID NO: 3750, IKZF3 (Gene); SEQ ID NO: 3751, IKZF3 (Gene); SEQ ID NO: 3752, IKZF3 (Gene); SEQ ID NO: 3753, IKZF3 (Gene); SEQ ID NO: 3754, IKZF3 (Gene); SEQ ID NO: 3755, IKZF3 (Gene); SEQ ID NO: 3756, 17Q (ARM); SEQ ID NO: 3757, MSI (MSI); SEQ ID NO: 3758, MSI (MSI); SEQ ID NO: 3759, FP (FP); SEQ ID NO: 3760, STAT5B (Gene); SEQ ID NO: 3761, STAT5B (Gene); SEQ ID NO: 3762, STAT5B (Gene); SEQ ID NO: 3763, STAT5B (Gene); SEQ ID NO: 3764, STAT5B (Gene); SEQ ID NO: 3765, STAT5B (Gene); SEQ ID NO: 3766, STAT5B (Gene); SEQ ID NO: 3767, STAT5B (Gene); SEQ ID NO: 3768, STAT5B (Gene); SEQ ID NO: 3769, STAT5B (Gene); SEQ ID NO: 3770, STAT5B (Gene); SEQ ID NO: 3771, STAT5B (Gene); SEQ ID NO: 3772, STAT5B (Gene); SEQ ID NO: 3773, STAT5B (Gene); SEQ ID NO: 3774, STAT5B (Gene); SEQ ID NO: 3775, STAT3 (Gene); SEQ ID NO: 3776, STAT3 (Gene); SEQ ID NO: 3777, STAT3 (Gene); SEQ ID NO: 3778, STAT3 (Gene); SEQ ID NO: 3779, STAT3 (Gene); SEQ ID NO: 3780, STAT3 (Gene); SEQ ID NO: 3781, STAT3 (Gene); SEQ ID NO: 3782, STAT3 (Gene); SEQ ID NO: 3783, STAT3 (Gene); SEQ ID NO: 3784, STAT3 (Gene); SEQ ID NO: 3785, STAT3 (Gene); SEQ ID NO: 3786, STAT3 (Gene); SEQ ID NO: 3787, STAT3 (Gene); SEQ ID NO: 3788, STAT3 (Gene); SEQ ID NO: 3789, STAT3 (Gene); SEQ ID NO: 3790, STAT3 (Gene); SEQ ID NO: 3791, STAT3 (Gene); SEQ ID NO: 3792, STAT3 (Gene); SEQ ID NO: 3793, STAT3 (Gene); SEQ ID NO: 3794, STAT3 (Gene); SEQ ID NO: 3795, STAT3 (Gene); SEQ ID NO: 3796, STAT3 (Gene); SEQ ID NO: 3797, STAT3 (Gene); SEQ ID NO: 3798, 17Q (ARM); SEQ ID NO: 3799, 17Q (ARM); SEQ ID NO: 3800, BRCA1 (Gene); SEQ ID NO: 3801, BRCA1 (Gene); SEQ ID NO: 3802, BRCA1 (Gene); SEQ ID NO: 3803, BRCA1 (Gene); SEQ ID NO: 3804, BRCA1 (Gene); SEQ ID NO: 3805, BRCA1 (Gene); SEQ ID NO: 3806, BRCA1 (Gene); SEQ ID NO: 3807, BRCA1 (Gene); SEQ ID NO: 3808, BRCA1 (Gene); SEQ ID NO: 3809, BRCA1 (Gene); SEQ ID NO: 3810, BRCA1 (Gene); SEQ ID NO: 3811, BRCA1 (Gene); SEQ ID NO: 3812, BRCA1 (Gene); SEQ ID NO: 3813, BRCA1 (Gene); SEQ ID NO: 3814, BRCA1 (Gene); SEQ ID NO: 3815, BRCA1 (Gene); SEQ ID NO: 3816, BRCA1 (Gene); SEQ ID NO: 3817, BRCA1 (Gene); SEQ ID NO: 3818, BRCA1 (Gene); SEQ ID NO: 3819, BRCA1 (Gene); SEQ ID NO: 3820, BRCA1 (Gene); SEQ ID NO: 3821, BRCA1 (Gene); SEQ ID NO: 3822, BRCA1 (Gene); SEQ ID NO: 3823, BRCA1 (Gene); SEQ ID NO: 3824, BRCA1 (Gene); SEQ ID NO: 3825, BRCA1 (Gene); SEQ ID NO: 3826, BRCA1 (Gene); SEQ ID NO: 3827, BRCA1 (Gene); SEQ ID NO: 3828, BRCA1 (Gene); SEQ ID NO: 3829, BRCA1 (Gene); SEQ ID NO: 3830, MSI (MSI); SEQ ID NO: 3831, MSI (MSI); SEQ ID NO: 3832, 17Q (ARM); SEQ ID NO: 3833, FP (FP); SEQ ID NO: 3834, 17Q (ARM); SEQ ID NO: 3835, 17Q (ARM); SEQ ID NO: 3836, MSI (MSI); SEQ ID NO: 3837, MSI (MSI); SEQ ID NO: 3838, 17Q (ARM); SEQ ID NO: 3839, 17Q (ARM); SEQ ID NO: 3840, FP (FP); SEQ ID NO: 3841, 17Q (ARM); SEQ ID NO: 3842, 17Q (ARM); SEQ ID NO: 3843, 17Q (ARM); SEQ ID NO: 3844, 17Q (ARM); SEQ ID NO: 3845, 17Q (ARM); SEQ ID NO: 3846, 17Q (ARM); SEQ ID NO: 3847, 17Q (ARM); SEQ ID NO: 3848, MSI (MSI); SEQ ID NO: 3849, MSI (MSI); SEQ ID NO: 3850, 17Q (ARM); SEQ ID NO: 3851, VMP1 (Gene); SEQ ID NO: 3852, VMP1 (Gene); SEQ ID NO: 3853, VMP1 (Gene); SEQ ID NO: 3854, VMP1 (Gene); SEQ ID NO: 3855, VMP1 (Gene); SEQ ID NO: 3856, VMP1 (Gene); SEQ ID NO: 3857, VMP1 (Gene); SEQ ID NO: 3858, VMP1 (Gene); SEQ ID NO: 3859, VMP1 (Gene); SEQ ID NO: 3860, VMP1 (Gene); SEQ ID NO: 3861, VMP1 (Gene); SEQ ID NO: 3862, PPM1D (Gene); SEQ ID NO: 3863, PPM1D (Gene); SEQ ID NO: 3864, PPM1D (Gene); SEQ ID NO: 3865, PPM1D (Gene); SEQ ID NO: 3866, PPM1D (Gene); SEQ ID NO: 3867, PPM1D (Gene); SEQ ID NO: 3868, PPM1D (Gene); SEQ ID NO: 3869, PPM1D (Gene); SEQ ID NO: 3870, 17Q (ARM); SEQ ID NO: 3871, 17Q (ARM); SEQ ID NO: 3872, CD79B (Gene); SEQ ID NO: 3873, CD79B (Gene); SEQ ID NO: 3874, CD79B (Gene); SEQ ID NO: 3875, CD79B (Gene); SEQ ID NO: 3876, CD79B (Gene); SEQ ID NO: 3877, CD79B (Gene); SEQ ID NO: 3878, 17Q (ARM); SEQ ID NO: 3879, GNA13 (Gene); SEQ ID NO: 3880, GNA13 (Gene); SEQ ID NO: 3881, GNA13 (Gene); SEQ ID NO: 3882, GNA13 (Gene); SEQ ID NO: 3883, GNA13 (Gene); SEQ ID NO: 3884, 17Q (ARM); SEQ ID NO: 3885, 17Q (ARM); SEQ ID NO: 3886, 17Q (ARM); SEQ ID NO: 3887, 17q24.3_DLBCL (FOCAL); SEQ ID NO: 3888, 17q24.3_DLBCL (FOCAL); SEQ ID NO: 3889, 17q24.3_DLBCL (FOCAL); SEQ ID NO: 3890, 17q24.3 DLBCL (FOCAL); SEQ ID NO: 3891, 17q24.3_DLBCL (FOCAL); SEQ ID NO: 3892, 17q24.3_DLBCL (FOCAL); SEQ ID NO: 3893, 17q24.3_DLBCL (FOCAL); SEQ ID NO: 3894, 17q24.3_DLBCL (FOCAL); SEQ ID NO: 3895, 17q24.3_DLBCL (FOCAL); SEQ ID NO: 3896, 17q24.3_DLBCL (FOCAL); SEQ ID NO: 3897, 17Q (ARM); SEQ ID NO: 3898, 17Q (ARM); SEQ ID NO: 3899, 17Q (ARM); SEQ ID NO: 3900, 17Q (ARM); SEQ ID NO: 3901, 17Q (ARM); SEQ ID NO: 3902, 17q25.1_DLBCL (FOCAL); SEQ ID NO: 3903, 17q25.1_DLBCL (FOCAL); SEQ ID NO: 3904, 17q25.1_DLBCL (FOCAL); SEQ ID NO: 3905, 17q25.1_DLBCL (FOCAL); SEQ ID NO: 3906, 17q25.1_DLBCL (FOCAL); SEQ ID NO: 3907, GRB2 (Gene); SEQ ID NO: 3908, GRB2 (Gene); SEQ ID NO: 3909, GRB2 (Gene); SEQ ID NO: 3910, GRB2 (Gene); SEQ ID NO: 3911, 17q25.1_DLBCL (FOCAL); SEQ ID NO: 3912, GRB2 (Gene); SEQ ID NO: 3913, 17q25.1_DLBCL (FOCAL); SEQ ID NO: 3914, 17q25.1_DLBCL (FOCAL); SEQ ID NO: 3915, 17q25.1_DLBCL (FOCAL); SEQ ID NO: 3916, 17Q (ARM); SEQ ID NO: 3917, 17Q (ARM); SEQ ID NO: 3918, 17Q (ARM); SEQ ID NO: 3919, 17Q (ARM); SEQ ID NO: 3920, 17Q (ARM); SEQ ID NO: 3921, 17Q (ARM); SEQ ID NO: 3922, 17Q (ARM); SEQ ID NO: 3923, 18P_DLBCL (ARM); SEQ ID NO: 3924, FP (FP); SEQ ID NO: 3925, 18P_DLBCL (ARM); SEQ ID NO: 3926, 18P_DLBCL (ARM); SEQ ID NO: 3927, 18P_DLBCL (ARM); SEQ ID NO: 3928, 18P_DLBCL (ARM); SEQ ID NO: 3929, FP (FP); SEQ ID NO: 3930, 18P_DLBCL (ARM); SEQ ID NO: 3931, 18P_DLBCL (ARM); SEQ ID NO: 3932, 18P_DLBCL (ARM); SEQ ID NO: 3933, 18P_DLBCL (ARM); SEQ ID NO: 3934, 18P_DLBCL (ARM); SEQ ID NO: 3935, 18P_DLBCL (ARM); SEQ ID NO: 3936, 18P_DLBCL (ARM); SEQ ID NO: 3937, 18P_DLBCL (ARM); SEQ ID NO: 3938, 18P_DLBCL (ARM); SEQ ID NO: 3939, 18P_DLBCL (ARM); SEQ ID NO: 3940, 18Q_DLBCL (ARM); SEQ ID NO: 3941, MSI (MSI); SEQ ID NO: 3942, MSI (MSI); SEQ ID NO: 3943, 18Q_DLBCL (ARM); SEQ ID NO: 3944, 18Q_DLBCL (ARM); SEQ ID NO: 3945, 18Q_DLBCL (ARM); SEQ ID NO: 3946, 18Q_DLBCL (ARM); SEQ ID NO: 3947, 18Q_DLBCL (ARM); SEQ ID NO: 3948, 18Q_DLBCL (ARM); SEQ ID NO: 3949, 18Q_DLBCL (ARM); SEQ ID NO: 3950, 18Q_DLBCL (ARM); SEQ ID NO: 3951, 18Q_DLBCL (ARM); SEQ ID NO: 3952, KLHL14 (Gene); SEQ ID NO: 3953, KLHL14 (Gene); SEQ ID NO: 3954, KLHL14 (Gene); SEQ ID NO: 3955, KLHL14 (Gene); SEQ ID NO: 3956, KLHL14 (Gene); SEQ ID NO: 3957, KLHL14 (Gene); SEQ ID NO: 3958, KLHL14 (Gene); SEQ ID NO: 3959, KLHL14 (Gene); SEQ ID NO: 3960, KLHL14 (Gene); SEQ ID NO: 3961, 18Q_DLBCL (ARM); SEQ ID NO: 3962, 18Q_DLBCL (ARM); SEQ ID NO: 3963, 18Q_DLBCL (ARM); SEQ ID NO: 3964, 18Q_DLBCL (ARM); SEQ ID NO: 3965, 18Q_DLBCL (ARM); SEQ ID NO: 3966, 18Q_DLBCL (ARM); SEQ ID NO: 3967, 18Q_DLBCL (ARM); SEQ ID NO: 3968, 18Q_DLBCL (ARM); SEQ ID NO: 3969, 18Q_DLBCL (ARM); SEQ ID NO: 3970, 18Q_DLBCL (ARM); SEQ ID NO: 3971, 18Q_DLBCL (ARM); SEQ ID NO: 3972, 18Q_DLBCL (ARM); SEQ ID NO: 3973, 18Q_DLBCL (ARM); SEQ ID NO: 3974, 18Q_DLBCL (ARM); SEQ ID NO: 3975, 18Q_DLBCL (ARM); SEQ ID NO: 3976, 18Q_DLBCL (ARM); SEQ ID NO: 3977, 18Q_DLBCL (ARM); SEQ ID NO: 3978, 18Q_DLBCL (ARM); SEQ ID NO: 3979, 18Q_DLBCL (ARM); SEQ ID NO: 3980, 18Q_DLBCL (ARM); SEQ ID NO: 3981, 18Q_DLBCL (ARM); SEQ ID NO: 3982, 18q22.2_DLBCL (FOCAL); SEQ ID NO: 3983, 18q22.2_DLBCL (FOCAL); SEQ ID NO: 3984, 18q22.2_DLBCL (FOCAL); SEQ ID NO: 3985, 18q22.2_DLBCL (FOCAL); SEQ ID NO: 3986, 18q22.2 DLBCL (FOCAL); SEQ ID NO: 3987, 18q22.2_DLBCL (FOCAL); SEQ ID NO: 3988, 18q22.2_DLBCL (FOCAL); SEQ ID NO: 3989, 18q22.2_DLBCL (FOCAL); SEQ ID NO: 3990, 18q22.2_DLBCL (FOCAL); SEQ ID NO: 3991, 18q22.2_DLBCL (FOCAL); SEQ ID NO: 3992, 18q22.2_DLBCL (FOCAL); SEQ ID NO: 3993, 18q22.2_DLBCL (FOCAL); SEQ ID NO: 3994, 18q22.2_DLBCL (FOCAL); SEQ ID NO: 3995, 18q22.2_DLBCL (FOCAL); SEQ ID NO: 3996, 18q22.2_DLBCL (FOCAL); SEQ ID NO: 3997, 18q22.2 DLBCL (FOCAL); SEQ ID NO: 3998, 18q22.2_DLBCL (FOCAL); SEQ ID NO: 3999, 18q22.2_DLBCL (FOCAL); SEQ ID NO: 4000, MALT1 (Gene); SEQ ID NO: 4001, MALT1 (Gene); SEQ ID NO: 4002, MALT1 (Gene); SEQ ID NO: 4003, MALT1 (Gene); SEQ ID NO: 4004, MALT1 (Gene); SEQ ID NO: 4005, MALT1 (Gene); SEQ ID NO: 4006, MALT1 (Gene); SEQ ID NO: 4007, MALT1 (Gene); SEQ ID NO: 4008, MALT1 (Gene); SEQ ID NO: 4009, MALT1 (Gene); SEQ ID NO: 4010, MALT1 (Gene); SEQ ID NO: 4011, MALT1 (Gene); SEQ ID NO: 4012, MALT1 (Gene); SEQ ID NO: 4013, MALT1 (Gene); SEQ ID NO: 4014, MALT1 (Gene); SEQ ID NO: 4015, MALT1 (Gene); SEQ ID NO: 4016, MALT1 (Gene); SEQ ID NO: 4017, 18q22.2_DLBCL (FOCAL); SEQ ID NO: 4018, MSI (MSI); SEQ ID NO: 4019, MSI (MSI); SEQ ID NO: 4020, 18q22.2_DLBCL (FOCAL); SEQ ID NO: 4021, 18q22.2_DLBCL (FOCAL); SEQ ID NO: 4022, 18q22.2_DLBCL (FOCAL); SEQ ID NO: 4023, 18q22.2 DLBCL (FOCAL); SEQ ID NO: 4024, 18q22.2_DLBCL (FOCAL); SEQ ID NO: 4025, 18q22.2_DLBCL (FOCAL); SEQ ID NO: 4026, 18q22.2_DLBCL (FOCAL); SEQ ID NO: 4027, 18q22.2_DLBCL (FOCAL); SEQ ID NO: 4028, 18q22.2_DLBCL (FOCAL); SEQ ID NO: 4029, 18q22.2_DLBCL (FOCAL); SEQ ID NO: 4030, 18q22.2_DLBCL (FOCAL); SEQ ID NO: 4031, 18q22.2_DLBCL (FOCAL); SEQ ID NO: 4032, 18q22.2_DLBCL (FOCAL); SEQ ID NO: 4033, 18q22.2_DLBCL (FOCAL); SEQ ID NO: 4034, 18q22.2 DLBCL (FOCAL); SEQ ID NO: 4035, 18q22.2_DLBCL (FOCAL); SEQ ID NO: 4036, 18q22.2_DLBCL (FOCAL); SEQ ID NO: 4037, BCL2_SV (SV); SEQ ID NO: 4038, BCL2_SV (SV); SEQ ID NO: 4039, BCL2_SV (SV); SEQ ID NO: 4040, BCL2_SV (SV); SEQ ID NO: 4041, BCL2_SV (SV); SEQ ID NO: 4042, BCL2_SV (SV); SEQ ID NO: 4043, BCL2_SV (SV); SEQ ID NO: 4044, BCL2_SV (SV); SEQ ID NO: 4045, BCL2_SV (SV); SEQ ID NO: 4046, BCL2_SV (SV); SEQ ID NO: 4047, BCL2_SV (SV); SEQ ID NO: 4048, BCL2_SV (SV); SEQ ID NO: 4049, BCL2_SV (SV); SEQ ID NO: 4050, BCL2_SV (SV); SEQ ID NO: 4051, BCL2_SV (SV); SEQ ID NO: 4052, BCL2_SV (SV); SEQ ID NO: 4053, BCL2_SV (SV); SEQ ID NO: 4054, BCL2_SV (SV); SEQ ID NO: 4055, BCL2_SV (SV); SEQ ID NO: 4056, BCL2_SV (SV); SEQ ID NO: 4057, BCL2_SV (SV); SEQ ID NO: 4058, BCL2_SV (SV); SEQ ID NO: 4059, BCL2_SV (SV); SEQ ID NO: 4060, BCL2_SV (SV); SEQ ID NO: 4061, BCL2_SV (SV); SEQ ID NO: 4062, BCL2_SV (SV); SEQ ID NO: 4063, BCL2_SV (SV); SEQ ID NO: 4064, BCL2_SV (SV); SEQ ID NO: 4065, BCL2_SV (SV); SEQ ID NO: 4066, BCL2_SV (SV); SEQ ID NO: 4067, BCL2_SV (SV); SEQ ID NO: 4068, BCL2_SV (SV); SEQ ID NO: 4069, BCL2_SV (SV); SEQ ID NO: 4070, BCL2_SV (SV); SEQ ID NO: 4071, BCL2_SV (SV); SEQ ID NO: 4072, BCL2_SV (SV); SEQ ID NO: 4073, BCL2_SV (SV); SEQ ID NO: 4074, BCL2_SV (SV); SEQ ID NO: 4075, BCL2_SV (SV); SEQ ID NO: 4076, BCL2_SV (SV); SEQ ID NO: 4077, BCL2_SV (SV); SEQ ID NO: 4078, BCL2_SV (SV); SEQ ID NO: 4079, BCL2_SV (SV); SEQ ID NO: 4080, BCL2_SV (SV); SEQ ID NO: 4081, BCL2_SV (SV); SEQ ID NO: 4082, BCL2_SV (SV); SEQ ID NO: 4083, BCL2_SV (SV); SEQ ID NO: 4084, BCL2_SV (SV); SEQ ID NO: 4085, BCL2_SV (SV); SEQ ID NO: 4086, BCL2_SV (SV); SEQ ID NO: 4087, BCL2_SV (SV); SEQ ID NO: 4088, BCL2_SV (SV); SEQ ID NO: 4089, BCL2_SV (SV); SEQ ID NO: 4090, BCL2_SV (SV); SEQ ID NO: 4091, BCL2_SV (SV); SEQ ID NO: 4092, BCL2_SV (SV); SEQ ID NO: 4093, BCL2_SV (SV); SEQ ID NO: 4094, BCL2_SV (SV); SEQ ID NO: 4095, BCL2_SV (SV); SEQ ID NO: 4096, BCL2_SV (SV); SEQ ID NO: 4097, BCL2_SV (SV); SEQ ID NO: 4098, BCL2_SV (SV); SEQ ID NO: 4099, BCL2_SV (SV); SEQ ID NO: 4100, BCL2_SV (SV); SEQ ID NO: 4101, BCL2_SV (SV); SEQ ID NO: 4102, BCL2_SV (SV); SEQ ID NO: 4103, BCL2_SV (SV); SEQ ID NO: 4104, BCL2_SV (SV); SEQ ID NO: 4105, BCL2_SV (SV); SEQ ID NO: 4106, BCL2_SV (SV); SEQ ID NO: 4107, BCL2_SV (SV); SEQ ID NO: 4108, BCL2_SV (SV); SEQ ID NO: 4109, BCL2_SV (SV); SEQ ID NO: 4110, BCL2_SV (SV); SEQ ID NO: 4111, BCL2_SV (SV); SEQ ID NO: 4112, BCL2_SV (SV); SEQ ID NO: 4113, BCL2_SV (SV); SEQ ID NO: 4114, BCL2_SV (SV); SEQ ID NO: 4115, BCL2_SV (SV); SEQ ID NO: 4116, BCL2_SV (SV); SEQ ID NO: 4117, BCL2_SV (SV); SEQ ID NO: 4118, BCL2_SV (SV); SEQ ID NO: 4119, BCL2_SV (SV); SEQ ID NO: 4120, BCL2_SV (SV); SEQ ID NO: 4121, BCL2_SV (SV); SEQ ID NO: 4122, BCL2_SV (SV); SEQ ID NO: 4123, BCL2_SV (SV); SEQ ID NO: 4124, BCL2_SV (SV); SEQ ID NO: 4125, BCL2_SV (SV); SEQ ID NO: 4126, BCL2_SV (SV); SEQ ID NO: 4127, BCL2_SV (SV); SEQ ID NO: 4128, BCL2_SV (SV); SEQ ID NO: 4129, BCL2_SV (SV); SEQ ID NO: 4130, BCL2_SV (SV); SEQ ID NO: 4131, BCL2_SV (SV); SEQ ID NO: 4132, BCL2_SV (SV); SEQ ID NO: 4133, BCL2_SV (SV); SEQ ID NO: 4134, BCL2_SV (SV); SEQ ID NO: 4135, BCL2_SV (SV); SEQ ID NO: 4136, BCL2_SV (SV); SEQ ID NO: 4137, 18q22.2_DLBCL (FOCAL); SEQ ID NO: 4138, 18q22.2_DLBCL (FOCAL); SEQ ID NO: 4139, 18q22.2_DLBCL (FOCAL); SEQ ID NO: 4140, 18q22.2_DLBCL (FOCAL); SEQ ID NO: 4141, 18q22.2_DLBCL (FOCAL); SEQ ID NO: 4142, 18q22.2_DLBCL (FOCAL); SEQ ID NO: 4143, 18q22.2_DLBCL (FOCAL); SEQ ID NO: 4144, 18q22.2_DLBCL (FOCAL); SEQ ID NO: 4145, 18q22.2 DLBCL (FOCAL); SEQ ID NO: 4146, 18q22.2_DLBCL (FOCAL); SEQ ID NO: 4147, 18q22.2_DLBCL (FOCAL); SEQ ID NO: 4148, 18q22.2_DLBCL (FOCAL); SEQ ID NO: 4149, 18q22.2_DLBCL (FOCAL); SEQ ID NO: 4150, 18q22.2_DLBCL (FOCAL); SEQ ID NO: 4151, 18q22.2_DLBCL (FOCAL); SEQ ID NO: 4152, 18q22.2_DLBCL (FOCAL); SEQ ID NO: 4153, 18q22.2_DLBCL (FOCAL); SEQ ID NO: 4154, 18q22.2_DLBCL (FOCAL); SEQ ID NO: 4155, 18q22.2_DLBCL (FOCAL); SEQ ID NO: 4156, 18q22.2 DLBCL (FOCAL); SEQ ID NO: 4157, 18q22.2_DLBCL (FOCAL); SEQ ID NO: 4158, 18q22.2_DLBCL (FOCAL); SEQ ID NO: 4159, 18q22.2_DLBCL (FOCAL); SEQ ID NO: 4160, 18q22.2_DLBCL (FOCAL); SEQ ID NO: 4161, 18q22.2_DLBCL (FOCAL); SEQ ID NO: 4162, 18q22.2_DLBCL (FOCAL); SEQ ID NO: 4163, 18q22.2_DLBCL (FOCAL); SEQ ID NO: 4164, 18q22.2_DLBCL (FOCAL); SEQ ID NO: 4165, 18q22.2_DLBCL (FOCAL); SEQ ID NO: 4166, 18q22.2_DLBCL (FOCAL); SEQ ID NO: 4167, 18q22.2 DLBCL (FOCAL); SEQ ID NO: 4168, 18q22.2_DLBCL (FOCAL); SEQ ID NO: 4169, 18q22.2_DLBCL (FOCAL); SEQ ID NO: 4170, 18q22.2_DLBCL (FOCAL); SEQ ID NO: 4171, SOCS6 (Gene); SEQ ID NO: 4172, SOCS6 (Gene); SEQ ID NO: 4173, SOCS6 (Gene); SEQ ID NO: 4174, SOCS6 (Gene); SEQ ID NO: 4175, 18q22.2_DLBCL (FOCAL); SEQ ID NO: 4176, 18q22.2_DLBCL (FOCAL); SEQ ID NO: 4177, 18q22.2_DLBCL (FOCAL); SEQ ID NO: 4178, 18q22.2_DLBCL (FOCAL); SEQ ID NO: 4179, 18q22.2_DLBCL (FOCAL); SEQ ID NO: 4180, 18q22.2_DLBCL (FOCAL); SEQ ID NO: 4181, 18q22.2 DLBCL (FOCAL); SEQ ID NO: 4182, 18q22.2_DLBCL (FOCAL); SEQ ID NO: 4183, 18q22.2_DLBCL (FOCAL); SEQ ID NO: 4184, 18q22.2_DLBCL (FOCAL); SEQ ID NO: 4185, 18q22.2_DLBCL (FOCAL); SEQ ID NO: 4186, 18q22.2_DLBCL (FOCAL); SEQ ID NO: 4187, 18q22.2_DLBCL (FOCAL); SEQ ID NO: 4188, 18q22.2_DLBCL (FOCAL); SEQ ID NO: 4189, 18q22.2_DLBCL (FOCAL); SEQ ID NO: 4190, 18q22.2_DLBCL (FOCAL); SEQ ID NO: 4191, 18q22.2_DLBCL (FOCAL); SEQ ID NO: 4192, 18q22.2 DLBCL (FOCAL); SEQ ID NO: 4193, 18q22.2_DLBCL (FOCAL); SEQ ID NO: 4194, 18q22.2_DLBCL (FOCAL); SEQ ID NO: 4195, 18q22.2_DLBCL (FOCAL); SEQ ID NO: 4196, 18q22.2_DLBCL (FOCAL); SEQ ID NO: 4197, 18q22.2_DLBCL (FOCAL); SEQ ID NO: 4198, 18q22.2_DLBCL (FOCAL); SEQ ID NO: 4199, 18q22.2_DLBCL (FOCAL); SEQ ID NO: 4200, 18q22.2_DLBCL (FOCAL); SEQ ID NO: 4201, 18q22.2_DLBCL (FOCAL); SEQ ID NO: 4202, 18q22.2_DLBCL (FOCAL); SEQ ID NO: 4203, 18q22.2 DLBCL (FOCAL); SEQ ID NO: 4204, 18q22.2_DLBCL (FOCAL); SEQ ID NO: 4205, 18q22.2_DLBCL (FOCAL); SEQ ID NO: 4206, 18q22.2_DLBCL (FOCAL); SEQ ID NO: 4207, 18q22.2_DLBCL (FOCAL); SEQ ID NO: 4208, 18q22.2_DLBCL (FOCAL); SEQ ID NO: 4209, FP (FP); SEQ ID NO: 4210, 18q22.2_DLBCL (FOCAL); SEQ ID NO: 4211, 18q22.2_DLBCL (FOCAL); SEQ ID NO: 4212, 18q22.2_DLBCL (FOCAL); SEQ ID NO: 4213, 18q22.2 DLBCL (FOCAL); SEQ ID NO: 4214, 18q22.2_DLBCL (FOCAL); SEQ ID NO: 4215, 18q22.2_DLBCL (FOCAL); SEQ ID NO: 4216, 18q22.2_DLBCL (FOCAL); SEQ ID NO: 4217, 18q22.2_DLBCL (FOCAL); SEQ ID NO: 4218, 18q22.2_DLBCL (FOCAL); SEQ ID NO: 4219, 18q22.2_DLBCL (FOCAL); SEQ ID NO: 4220, 18q22.2_DLBCL (FOCAL); SEQ ID NO: 4221, 18q22.2_DLBCL (FOCAL); SEQ ID NO: 4222, 18q22.2_DLBCL (FOCAL); SEQ ID NO: 4223, DAZAP1 (Gene); SEQ ID NO: 4224, DAZAP1 (Gene); SEQ ID NO: 4225, DAZAP1 (Gene); SEQ ID NO: 4226, DAZAP1 (Gene); SEQ ID NO: 4227, DAZAP1 (Gene); SEQ ID NO: 4228, DAZAP1 (Gene); SEQ ID NO: 4229, DAZAP1 (Gene); SEQ ID NO: 4230, DAZAP1 (Gene); SEQ ID NO: 4231, DAZAP1 (Gene); SEQ ID NO: 4232, DAZAP1 (Gene); SEQ ID NO: 4233, DAZAP1 (Gene); SEQ ID NO: 4234, DAZAP1 (Gene); SEQ ID NO: 4235, DAZAP1 (Gene); SEQ ID NO: 4236, RPS15 (Gene); SEQ ID NO: 4237, RPS15 (Gene); SEQ ID NO: 4238, RPS15 (Gene); SEQ ID NO: 4239, RPS15 (Gene); SEQ ID NO: 4240, RPS15 (Gene); SEQ ID NO: 4241, 19P (ARM); SEQ ID NO: 4242, 19P (ARM); SEQ ID NO: 4243, 19p13.3_DLBCL (FOCAL); SEQ ID NO: 4244, 19p13.3_DLBCL (FOCAL); SEQ ID NO: 4245, CD70 (Gene); SEQ ID NO: 4246, CD70 (Gene); SEQ ID NO: 4247, CD70 (Gene); SEQ ID NO: 4248, CD70 (Gene); SEQ ID NO: 4249, 19p13.3_DLBCL (FOCAL); SEQ ID NO: 4250, 19p13.3_DLBCL (FOCAL); SEQ ID NO: 4251, 19p13.3_DLBCL (FOCAL); SEQ ID NO: 4252, VAV1 (Gene); SEQ ID NO: 4253, VAV1 (Gene); SEQ ID NO: 4254, VAV1 (Gene); SEQ ID NO: 4255, VAV1 (Gene); SEQ ID NO: 4256, VAV1 (Gene); SEQ ID NO: 4257, VAV1 (Gene); SEQ ID NO: 4258, VAV1 (Gene); SEQ ID NO: 4259, VAV1 (Gene); SEQ ID NO: 4260, VAV1 (Gene); SEQ ID NO: 4261, VAV1 (Gene); SEQ ID NO: 4262, VAV1 (Gene); SEQ ID NO: 4263, VAV1 (Gene); SEQ ID NO: 4264, VAV1 (Gene); SEQ ID NO: 4265, VAV1 (Gene); SEQ ID NO: 4266, VAV1 (Gene); SEQ ID NO: 4267, VAV1 (Gene); SEQ ID NO: 4268, VAV1 (Gene); SEQ ID NO: 4269, VAV1 (Gene); SEQ ID NO: 4270, VAV1 (Gene); SEQ ID NO: 4271, VAV1 (Gene); SEQ ID NO: 4272, VAV1 (Gene); SEQ ID NO: 4273, VAV1 (Gene); SEQ ID NO: 4274, VAV1 (Gene); SEQ ID NO: 4275, VAV1 (Gene); SEQ ID NO: 4276, VAV1 (Gene); SEQ ID NO: 4277, VAV1 (Gene); SEQ ID NO: 4278, VAV1 (Gene); SEQ ID NO: 4279, 19p13.3_DLBCL (FOCAL); SEQ ID NO: 4280, 19p13.3_DLBCL (FOCAL); SEQ ID NO: 4281, 19p13.3_DLBCL (FOCAL); SEQ ID NO: 4282, 19P (ARM); SEQ ID NO: 4283, 19P (ARM); SEQ ID NO: 4284, 19p13.2_DLBCL (FOCAL); SEQ ID NO: 4285, 19p13.2_DLBCL (FOCAL); SEQ ID NO: 4286, 19p13.2_DLBCL (FOCAL); SEQ ID NO: 4287, 19p13.2_DLBCL (FOCAL); SEQ ID NO: 4288, 19p13.2_DLBCL (FOCAL); SEQ ID NO: 4289, 19p13.2_DLBCL (FOCAL); SEQ ID NO: 4290, 19p13.2_DLBCL (FOCAL); SEQ ID NO: 4291, 19p13.2_DLBCL (FOCAL); SEQ ID NO: 4292, 19p13.2_DLBCL (FOCAL); SEQ ID NO: 4293, SMARCA4 (Gene); SEQ ID NO: 4294, SMARCA4 (Gene); SEQ ID NO: 4295, SMARCA4 (Gene); SEQ ID NO: 4296, SMARCA4 (Gene); SEQ ID NO: 4297, SMARCA4 (Gene); SEQ ID NO: 4298, SMARCA4 (Gene); SEQ ID NO: 4299, SMARCA4 (Gene); SEQ ID NO: 4300, SMARCA4 (Gene); SEQ ID NO: 4301, SMARCA4 (Gene); SEQ ID NO: 4302, SMARCA4 (Gene); SEQ ID NO: 4303, SMARCA4 (Gene); SEQ ID NO: 4304, SMARCA4 (Gene); SEQ ID NO: 4305, SMARCA4 (Gene); SEQ ID NO: 4306, SMARCA4 (Gene); SEQ ID NO: 4307, SMARCA4 (Gene); SEQ ID NO: 4308, SMARCA4 (Gene); SEQ ID NO: 4309, SMARCA4 (Gene); SEQ ID NO: 4310, SMARCA4 (Gene); SEQ ID NO: 4311, SMARCA4 (Gene); SEQ ID NO: 4312, SMARCA4 (Gene); SEQ ID NO: 4313, SMARCA4 (Gene); SEQ ID NO: 4314, SMARCA4 (Gene); SEQ ID NO: 4315, SMARCA4 (Gene); SEQ ID NO: 4316, SMARCA4 (Gene); SEQ ID NO: 4317, SMARCA4 (Gene); SEQ ID NO: 4318, SMARCA4 (Gene); SEQ ID NO: 4319, SMARCA4 (Gene); SEQ ID NO: 4320, SMARCA4 (Gene); SEQ ID NO: 4321, SMARCA4 (Gene); SEQ ID NO: 4322, SMARCA4 (Gene); SEQ ID NO: 4323, SMARCA4 (Gene); SEQ ID NO: 4324, SMARCA4 (Gene); SEQ ID NO: 4325, SMARCA4 (Gene); SEQ ID NO: 4326, SMARCA4 (Gene); SEQ ID NO: 4327, SMARCA4 (Gene); SEQ ID NO: 4328, SMARCA4 (Gene); SEQ ID NO: 4329, 19p13.1_MCL (FOCAL); SEQ ID NO: 4330, 19p13.1_MCL (FOCAL); SEQ ID NO: 4331, 19p13.1_MCL (FOCAL); SEQ ID NO: 4332, 19p13.1_MCL (FOCAL); SEQ ID NO: 4333, 19p13.1_MCL (FOCAL); SEQ ID NO: 4334, 19p13.1_MCL (FOCAL); SEQ ID NO: 4335, 19p13.1_MCL (FOCAL); SEQ ID NO: 4336, 19p13.1_MCL (FOCAL); SEQ ID NO: 4337, 19p13.1_MCL (FOCAL); SEQ ID NO: 4338, 19p13.1_MCL (FOCAL); SEQ ID NO: 4339, 19p13.1_MCL (FOCAL); SEQ ID NO: 4340, 19p13.1_MCL (FOCAL); SEQ ID NO: 4341, KLF2 (Gene); SEQ ID NO: 4342, KLF2 (Gene); SEQ ID NO: 4343, KLF2 (Gene); SEQ ID NO: 4344, KLF2 (Gene); SEQ ID NO: 4345, 19p13.1_MCL (FOCAL); SEQ ID NO: 4346, 19p13.1_MCL (FOCAL); SEQ ID NO: 4347, 19p13.1_MCL (FOCAL); SEQ ID NO: 4348, 19p13.1_MCL (FOCAL); SEQ ID NO: 4349, 19p13.1_MCL (FOCAL); SEQ ID NO: 4350, 19p13.1_MCL (FOCAL); SEQ ID NO: 4351, 19p13.1_MCL (FOCAL); SEQ ID NO: 4352, JAK3 (Gene); SEQ ID NO: 4353, JAK3 (Gene); SEQ ID NO: 4354, JAK3 (Gene); SEQ ID NO: 4355, JAK3 (Gene); SEQ ID NO: 4356, JAK3 (Gene); SEQ ID NO: 4357, JAK3 (Gene); SEQ ID NO: 4358, JAK3 (Gene); SEQ ID NO: 4359, JAK3 (Gene); SEQ ID NO: 4360, JAK3 (Gene); SEQ ID NO: 4361, JAK3 (Gene); SEQ ID NO: 4362, JAK3 (Gene); SEQ ID NO: 4363, JAK3 (Gene); SEQ ID NO: 4364, JAK3 (Gene); SEQ ID NO: 4365, JAK3 (Gene); SEQ ID NO: 4366, JAK3 (Gene); SEQ ID NO: 4367, JAK3 (Gene); SEQ ID NO: 4368, JAK3 (Gene); SEQ ID NO: 4369, JAK3 (Gene); SEQ ID NO: 4370, JAK3 (Gene); SEQ ID NO: 4371, JAK3 (Gene); SEQ ID NO: 4372, JAK3 (Gene); SEQ ID NO: 4373, JAK3 (Gene); SEQ ID NO: 4374, JAK3 (Gene); SEQ ID NO: 4375, 19p13.1_MCL (FOCAL); SEQ ID NO: 4376, 19p13.1_MCL (FOCAL); SEQ ID NO: 4377, 19p13.1_MCL (FOCAL); SEQ ID NO: 4378, 19p13.1_MCL (FOCAL); SEQ ID NO: 4379, 19p13.1_MCL (FOCAL); SEQ ID NO: 4380, 19p13.1_MCL (FOCAL); SEQ ID NO: 4381, MEF2B (Gene); SEQ ID NO: 4382, MEF2B (Gene); SEQ ID NO: 4383, MEF2B (Gene); SEQ ID NO: 4384, MEF2B (Gene); SEQ ID NO: 4385, MEF2B (Gene); SEQ ID NO: 4386, MEF2B (Gene); SEQ ID NO: 4387, MEF2B (Gene); SEQ ID NO: 4388, MEF2B (Gene); SEQ ID NO: 4389, 19p13.1_MCL (FOCAL); SEQ ID NO: 4390, 19p13.1_MCL (FOCAL); SEQ ID NO: 4391, 19p13.1_MCL (FOCAL); SEQ ID NO: 4392, 19P (ARM); SEQ ID NO: 4393, 19P (ARM); SEQ ID NO: 4394, 19Q_DLBCL (ARM); SEQ ID NO: 4395, FP (FP); SEQ ID NO: 4396, 19Q_DLBCL (ARM); SEQ ID NO: 4397, 19Q_DLBCL (ARM); SEQ ID NO: 4398, 19Q_DLBCL (ARM); SEQ ID NO: 4399, 19Q_DLBCL (ARM); SEQ ID NO: 4400, 19Q_DLBCL (ARM); SEQ ID NO: 4401, 19Q_DLBCL (ARM); SEQ ID NO: 4402, 19Q_DLBCL (ARM); SEQ ID NO: 4403, 19Q_DLBCL (ARM); SEQ ID NO: 4404, 19Q_DLBCL (ARM); SEQ ID NO: 4405, 19Q_DLBCL (ARM); SEQ ID NO: 4406, CD79A (Gene); SEQ ID NO: 4407, CD79A (Gene); SEQ ID NO: 4408, CD79A (Gene); SEQ ID NO: 4409, CD79A (Gene); SEQ ID NO: 4410, CD79A (Gene); SEQ ID NO: 4411, ARHGEF1 (Gene); SEQ ID NO: 4412, ARHGEF1 (Gene); SEQ ID NO: 4413, ARHGEF1 (Gene); SEQ ID NO: 4414, ARHGEF1 (Gene); SEQ ID NO: 4415, ARHGEF1 (Gene); SEQ ID NO: 4416, ARHGEF1 (Gene); SEQ ID NO: 4417, ARHGEF1 (Gene); SEQ ID NO: 4418, ARHGEF1 (Gene); SEQ ID NO: 4419, ARHGEF1 (Gene); SEQ ID NO: 4420, ARHGEF1 (Gene); SEQ ID NO: 4421, ARHGEF1 (Gene); SEQ ID NO: 4422, ARHGEF1 (Gene); SEQ ID NO: 4423, ARHGEF1 (Gene); SEQ ID NO: 4424, ARHGEF1 (Gene); SEQ ID NO: 4425, ARHGEF1 (Gene); SEQ ID NO: 4426, ARHGEF1 (Gene); SEQ ID NO: 4427, ARHGEF1 (Gene); SEQ ID NO: 4428, ARHGEF1 (Gene); SEQ ID NO: 4429, ARHGEF1 (Gene); SEQ ID NO: 4430, ARHGEF1 (Gene); SEQ ID NO: 4431, ARHGEF1 (Gene); SEQ ID NO: 4432, ARHGEF1 (Gene); SEQ ID NO: 4433, ARHGEF1 (Gene); SEQ ID NO: 4434, ARHGEF1 (Gene); SEQ ID NO: 4435, ARHGEF1 (Gene); SEQ ID NO: 4436, ARHGEF1 (Gene); SEQ ID NO: 4437, ARHGEF1 (Gene); SEQ ID NO: 4438, ARHGEF1 (Gene); SEQ ID NO: 4439, ARHGEF1 (Gene); SEQ ID NO: 4440, POU2F2 (Gene); SEQ ID NO: 4441, POU2F2 (Gene); SEQ ID NO: 4442, POU2F2 (Gene); SEQ ID NO: 4443, POU2F2 (Gene); SEQ ID NO: 4444, POU2F2 (Gene); SEQ ID NO: 4445, POU2F2 (Gene); SEQ ID NO: 4446, POU2F2 (Gene); SEQ ID NO: 4447, POU2F2 (Gene); SEQ ID NO: 4448, POU2F2 (Gene); SEQ ID NO: 4449, POU2F2 (Gene); SEQ ID NO: 4450, POU2F2 (Gene); SEQ ID NO: 4451, POU2F2 (Gene); SEQ ID NO: 4452, POU2F2 (Gene); SEQ ID NO: 4453, POU2F2 (Gene); SEQ ID NO: 4454, 19Q_DLBCL (ARM); SEQ ID NO: 4455, 19Q_DLBCL (ARM); SEQ ID NO: 4456, ZNF296 (Gene); SEQ ID NO: 4457, ZNF296 (Gene); SEQ ID NO: 4458, ZNF296 (Gene); SEQ ID NO: 4459, ZNF296 (Gene); SEQ ID NO: 4460, ZNF296 (Gene); SEQ ID NO: 4461, 19Q_DLBCL (ARM); SEQ ID NO: 4462, MSI (MSI); SEQ ID NO: 4463, MSI (MSI); SEQ ID NO: 4464, 19Q_DLBCL (ARM); SEQ ID NO: 4465, MSI (MSI); SEQ ID NO: 4466, MSI (MSI); SEQ ID NO: 4467, SPIB (Gene); SEQ ID NO: 4468, SPIB (Gene); SEQ ID NO: 4469, SPIB (Gene); SEQ ID NO: 4470, SPIB (Gene); SEQ ID NO: 4471, SPIB (Gene); SEQ ID NO: 4472, SPIB (Gene); SEQ ID NO: 4473, 19Q_DLBCL (ARM); SEQ ID NO: 4474, 19Q_DLBCL (ARM); SEQ ID NO: 4475, 19q13.42_DLBCL (FOCAL); SEQ ID NO: 4476, 19q13.42_DLBCL (FOCAL); SEQ ID NO: 4477, 19q13.42_DLBCL (FOCAL); SEQ ID NO: 4478, 19q13.42_DLBCL (FOCAL); SEQ ID NO: 4479, 19q13.42_DLBCL (FOCAL); SEQ ID NO: 4480, 19q13.42_DLBCL (FOCAL); SEQ ID NO: 4481, 19q13.42_DLBCL (FOCAL); SEQ ID NO: 4482, 19q13.42_DLBCL (FOCAL); SEQ ID NO: 4483, 19q13.42_DLBCL (FOCAL); SEQ ID NO: 4484, 19q13.42_DLBCL (FOCAL); SEQ ID NO: 4485, 19q13.42_DLBCL (FOCAL); SEQ ID NO: 4486, 19q13.42_DLBCL (FOCAL); SEQ ID NO: 4487, 19q13.42_DLBCL (FOCAL); SEQ ID NO: 4488, 19q13.42_DLBCL (FOCAL); SEQ ID NO: 4489, NLRP8 (Gene); SEQ ID NO: 4490, NLRP8 (Gene); SEQ ID NO: 4491, NLRP8 (Gene); SEQ ID NO: 4492, NLRP8 (Gene); SEQ ID NO: 4493, NLRP8 (Gene); SEQ ID NO: 4494, NLRP8 (Gene); SEQ ID NO: 4495, NLRP8 (Gene); SEQ ID NO: 4496, NLRP8 (Gene); SEQ ID NO: 4497, NLRP8 (Gene); SEQ ID NO: 4498, NLRP8 (Gene); SEQ ID NO: 4499, NLRP8 (Gene); SEQ ID NO: 4500, NLRP8 (Gene); SEQ ID NO: 4501, NLRP8 (Gene); SEQ ID NO: 4502, NLRP8 (Gene); SEQ ID NO: 4503, NLRP8 (Gene); SEQ ID NO: 4504, 19q13.42_DLBCL (FOCAL); SEQ ID NO: 4505, 19q13.42_DLBCL (FOCAL); SEQ ID NO: 4506, 19q13.42_DLBCL (FOCAL); SEQ ID NO: 4507, 19q13.42_DLBCL (FOCAL); SEQ ID NO: 4508, 19q13.42_DLBCL (FOCAL); SEQ ID NO: 4509, 19q13.42_DLBCL (FOCAL); SEQ ID NO: 4510, 19q13.42_DLBCL (FOCAL); SEQ ID NO: 4511, 19q13.42_DLBCL (FOCAL); SEQ ID NO: 4512, FP (FP); SEQ ID NO: 4513, 2P (ARM); SEQ ID NO: 4514, 2P (ARM); SEQ ID NO: 4515, 2P (ARM); SEQ ID NO: 4516, 2P (ARM); SEQ ID NO: 4517, 2P (ARM); SEQ ID NO: 4518, 2P (ARM); SEQ ID NO: 4519, 2P (ARM); SEQ ID NO: 4520, 2P (ARM); SEQ ID NO: 4521, 2P (ARM); SEQ ID NO: 4522, FP (FP); SEQ ID NO: 4523, 2P (ARM); SEQ ID NO: 4524, 2P (ARM); SEQ ID NO: 4525, 2P (ARM); SEQ ID NO: 4526, 2P (ARM); SEQ ID NO: 4527, 2P (ARM); SEQ ID NO: 4528, 2P (ARM); SEQ ID NO: 4529, 2P (ARM); SEQ ID NO: 4530, FP (FP); SEQ ID NO: 4531, 2P (ARM); SEQ ID NO: 4532, 2P (ARM); SEQ ID NO: 4533, 2P (ARM); SEQ ID NO: 4534, 2P (ARM); SEQ ID NO: 4535, 2P (ARM); SEQ ID NO: 4536, 2P (ARM); SEQ ID NO: 4537, 2P (ARM); SEQ ID NO: 4538, 2P (ARM); SEQ ID NO: 4539, 2P (ARM); SEQ ID NO: 4540, 2P (ARM); SEQ ID NO: 4541, 2P (ARM); SEQ ID NO: 4542, 2P (ARM); SEQ ID NO: 4543, 2P (ARM); SEQ ID NO: 4544, DNMT3A (Gene); SEQ ID NO: 4545, DNMT3A (Gene); SEQ ID NO: 4546, DNMT3A (Gene); SEQ ID NO: 4547, DNMT3A (Gene); SEQ ID NO: 4548, DNMT3A (Gene); SEQ ID NO: 4549, DNMT3A (Gene); SEQ ID NO: 4550, DNMT3A (Gene); SEQ ID NO: 4551, DNMT3A (Gene); SEQ ID NO: 4552, DNMT3A (Gene); SEQ ID NO: 4553, DNMT3A (Gene); SEQ ID NO: 4554, DNMT3A (Gene); SEQ ID NO: 4555, DNMT3A (Gene); SEQ ID NO: 4556, DNMT3A (Gene); SEQ ID NO: 4557, DNMT3A (Gene); SEQ ID NO: 4558, DNMT3A (Gene); SEQ ID NO: 4559, DNMT3A (Gene); SEQ ID NO: 4560, DNMT3A (Gene); SEQ ID NO: 4561, DNMT3A (Gene); SEQ ID NO: 4562, DNMT3A (Gene); SEQ ID NO: 4563, DNMT3A (Gene); SEQ ID NO: 4564, DNMT3A (Gene); SEQ ID NO: 4565, DNMT3A (Gene); SEQ ID NO: 4566, DNMT3A (Gene); SEQ ID NO: 4567, DNMT3A (Gene); SEQ ID NO: 4568, DNMT3A (Gene); SEQ ID NO: 4569, 2P (ARM); SEQ ID NO: 4570, 2P (ARM); SEQ ID NO: 4571, ALK (Gene); SEQ ID NO: 4572, ALK (Gene); SEQ ID NO: 4573, ALK (Gene); SEQ ID NO: 4574, ALK (Gene); SEQ ID NO: 4575, ALK (Gene); SEQ ID NO: 4576, ALK (Gene); SEQ ID NO: 4577, ALK (Gene); SEQ ID NO: 4578, ALK (Gene); SEQ ID NO: 4579, ALK (Gene); SEQ ID NO: 4580, ALK (Gene); SEQ ID NO: 4581, ALK (Gene); SEQ ID NO: 4582, ALK (Gene); SEQ ID NO: 4583, ALK (Gene); SEQ ID NO: 4584, ALK (Gene); SEQ ID NO: 4585, ALK (Gene); SEQ ID NO: 4586, ALK (Gene); SEQ ID NO: 4587, ALK (Gene); SEQ ID NO: 4588, ALK (Gene); SEQ ID NO: 4589, ALK (Gene); SEQ ID NO: 4590, ALK (Gene); SEQ ID NO: 4591, ALK (Gene); SEQ ID NO: 4592, ALK (Gene); SEQ ID NO: 4593, ALK (Gene); SEQ ID NO: 4594, ALK (Gene); SEQ ID NO: 4595, ALK (Gene); SEQ ID NO: 4596, ALK (Gene); SEQ ID NO: 4597, ALK (Gene); SEQ ID NO: 4598, ALK (Gene); SEQ ID NO: 4599, ALK (Gene); SEQ ID NO: 4600, 2P (ARM); SEQ ID NO: 4601, 2P (ARM); SEQ ID NO: 4602, 2P (ARM); SEQ ID NO: 4603, 2P (ARM); SEQ ID NO: 4604, 2P (ARM); SEQ ID NO: 4605, 2P (ARM); SEQ ID NO: 4606, 2P (ARM); SEQ ID NO: 4607, 2P (ARM); SEQ ID NO: 4608, 2P (ARM); SEQ ID NO: 4609, 2P (ARM); SEQ ID NO: 4610, 2P (ARM); SEQ ID NO: 4611, 2P (ARM); SEQ ID NO: 4612, 2P (ARM); SEQ ID NO: 4613, 2P (ARM); SEQ ID NO: 4614, 2P (ARM); SEQ ID NO: 4615, 2P (ARM); SEQ ID NO: 4616, 2P (ARM); SEQ ID NO: 4617, 2P (ARM); SEQ ID NO: 4618, 2P (ARM); SEQ ID NO: 4619, 2P (ARM); SEQ ID NO: 4620, 2P (ARM); SEQ ID NO: 4621, 2P (ARM); SEQ ID NO: 4622, 2P (ARM); SEQ ID NO: 4623, 2P (ARM); SEQ ID NO: 4624, 2P (ARM); SEQ ID NO: 4625, 2P (ARM); SEQ ID NO: 4626, 2p15_HL_Region (FOCAL); SEQ ID NO: 4627, 2p15_HL_Region (FOCAL); SEQ ID NO: 4628, 2p15_HL_Region (FOCAL); SEQ ID NO: 4629, 2p15_HL_Region (FOCAL); SEQ ID NO: 4630, 2p15_HL_Region (FOCAL); SEQ ID NO: 4631, 2p15_HL_Region (FOCAL); SEQ ID NO: 4632, 2p15_HL_Region (FOCAL); SEQ ID NO: 4633, 2p15_HL_Region (FOCAL); SEQ ID NO: 4634, 2p15_HL_Region (FOCAL); SEQ ID NO: 4635, 2p15_HL_Region (FOCAL); SEQ ID NO: 4636, 2p15_HL_Region (FOCAL); SEQ ID NO: 4637, 2p15_HL_Region (FOCAL); SEQ ID NO: 4638, BCL11A (Gene); SEQ ID NO: 4639, BCL11A (Gene); SEQ ID NO: 4640, BCL11A (Gene); SEQ ID NO: 4641, BCL11A (Gene); SEQ ID NO: 4642, BCL11A (Gene); SEQ ID NO: 4643, BCL11A (Gene); SEQ ID NO: 4644, BCL11A (Gene); SEQ ID NO: 4645, BCL11A (Gene); SEQ ID NO: 4646, BCL11A (Gene); SEQ ID NO: 4647, 2p15_HL_Region (FOCAL); SEQ ID NO: 4648, REL (Gene); SEQ ID NO: 4649, REL (Gene); SEQ ID NO: 4650, REL (Gene); SEQ ID NO: 4651, REL (Gene); SEQ ID NO: 4652, REL (Gene); SEQ ID NO: 4653, REL (Gene); SEQ ID NO: 4654, REL (Gene); SEQ ID NO: 4655, REL (Gene); SEQ ID NO: 4656, REL (Gene); SEQ ID NO: 4657, REL (Gene); SEQ ID NO: 4658, REL (Gene); SEQ ID NO: 4659, 2p15_HL_Region (FOCAL); SEQ ID NO: 4660, 2p15_HL_Region (FOCAL); SEQ ID NO: 4661, 2p15_HL_Region (FOCAL); SEQ ID NO: 4662, 2p15_HL_Region (FOCAL); SEQ ID NO: 4663, XPO1 (Gene); SEQ ID NO: 4664, XPO1 (Gene); SEQ ID NO: 4665, XPO1 (Gene); SEQ ID NO: 4666, XPO1 (Gene); SEQ ID NO: 4667, XPO1 (Gene); SEQ ID NO: 4668, XPO1 (Gene); SEQ ID NO: 4669, XPO1 (Gene); SEQ ID NO: 4670, XPO1 (Gene); SEQ ID NO: 4671, XPO1 (Gene); SEQ ID NO: 4672, XPO1 (Gene); SEQ ID NO: 4673, XPO1 (Gene); SEQ ID NO: 4674, XPO1 (Gene); SEQ ID NO: 4675, XPO1 (Gene); SEQ ID NO: 4676, XPO1 (Gene); SEQ ID NO: 4677, XPO1 (Gene); SEQ ID NO: 4678, XPO1 (Gene); SEQ ID NO: 4679, XPO1 (Gene); SEQ ID NO: 4680, XPO1 (Gene); SEQ ID NO: 4681, XPO1 (Gene); SEQ ID NO: 4682, XPO1 (Gene); SEQ ID NO: 4683, XPO1 (Gene); SEQ ID NO: 4684, XPO1 (Gene); SEQ ID NO: 4685, XPO1 (Gene); SEQ ID NO: 4686, XPO1 (Gene); SEQ ID NO: 4687, 2p15_HL_Region (FOCAL); SEQ ID NO: 4688, 2p15_HL_Region (FOCAL); SEQ ID NO: 4689, 2p15_HL_Region (FOCAL); SEQ ID NO: 4690, 2p15_HL_Region (FOCAL); SEQ ID NO: 4691, 2p15_HL_Region (FOCAL); SEQ ID NO: 4692, 2p15_HL_Region (FOCAL); SEQ ID NO: 4693, 2P (ARM); SEQ ID NO: 4694, 2P (ARM); SEQ ID NO: 4695, 2P (ARM); SEQ ID NO: 4696, 2P (ARM); SEQ ID NO: 4697, 2P (ARM); SEQ ID NO: 4698, FP (FP); SEQ ID NO: 4699, 2P (ARM); SEQ ID NO: 4700, 2P (ARM); SEQ ID NO: 4701, ARHGAP25 (Gene); SEQ ID NO: 4702, ARHGAP25 (Gene); SEQ ID NO: 4703, ARHGAP25 (Gene); SEQ ID NO: 4704, ARHGAP25 (Gene); SEQ ID NO: 4705, ARHGAP25 (Gene); SEQ ID NO: 4706, ARHGAP25 (Gene); SEQ ID NO: 4707, ARHGAP25 (Gene); SEQ ID NO: 4708, ARHGAP25 (Gene); SEQ ID NO: 4709, ARHGAP25 (Gene); SEQ ID NO: 4710, ARHGAP25 (Gene); SEQ ID NO: 4711, ARHGAP25 (Gene); SEQ ID NO: 4712, ARHGAP25 (Gene); SEQ ID NO: 4713, 2P (ARM); SEQ ID NO: 4714, 2P (ARM); SEQ ID NO: 4715, 2P (ARM); SEQ ID NO: 4716, 2P (ARM); SEQ ID NO: 4717, MSI (MSI); SEQ ID NO: 4718, MSI (MSI); SEQ ID NO: 4719, 2P (ARM); SEQ ID NO: 4720, 2P (ARM); SEQ ID NO: 4721, 2P (ARM); SEQ ID NO: 4722, 2P (ARM); SEQ ID NO: 4723, FP (FP); SEQ ID NO: 4724, 2P (ARM); SEQ ID NO: 4725, 2P (ARM); SEQ ID NO: 4726, 2P (ARM); SEQ ID NO: 4727, 2P (ARM); SEQ ID NO: 4728, 2P (ARM); SEQ ID NO: 4729, 2P (ARM); SEQ ID NO: 4730, IGK_SV (SV); SEQ ID NO: 4731, IGK_SV (SV); SEQ ID NO: 4732, IGK_SV (SV); SEQ ID NO: 4733, IGK_SV (SV); SEQ ID NO: 4734, IGK_SV (SV); SEQ ID NO: 4735, IGK_SV (SV); SEQ ID NO: 4736, IGK_SV (SV); SEQ ID NO: 4737, IGK_SV (SV); SEQ ID NO: 4738, IGK_SV (SV); SEQ ID NO: 4739, IGK_SV (SV); SEQ ID NO: 4740, IGK_SV (SV); SEQ ID NO: 4741, IGK_SV (SV); SEQ ID NO: 4742, IGK_SV (SV); SEQ ID NO: 4743, IGK_SV (SV); SEQ ID NO: 4744, IGK_SV (SV); SEQ ID NO: 4745, IGK_SV (SV); SEQ ID NO: 4746, IGK_SV (SV); SEQ ID NO: 4747, IGK_SV (SV); SEQ ID NO: 4748, IGK_SV (SV); SEQ ID NO: 4749, IGK_SV (SV); SEQ ID NO: 4750, IGK_SV (SV); SEQ ID NO: 4751, IGK_SV (SV); SEQ ID NO: 4752, DUSP2 (Gene); SEQ ID NO: 4753, DUSP2 (Gene); SEQ ID NO: 4754, DUSP2 (Gene); SEQ ID NO: 4755, DUSP2 (Gene); SEQ ID NO: 4756, 2P (ARM); SEQ ID NO: 4757, 2P (ARM); SEQ ID NO: 4758, 2P (ARM); SEQ ID NO: 4759, 2P (ARM); SEQ ID NO: 4760, 2P (ARM); SEQ ID NO: 4761, 2P (ARM); SEQ ID NO: 4762, 2P (ARM); SEQ ID NO: 4763, 2P (ARM); SEQ ID NO: 4764, 2P (ARM); SEQ ID NO: 4765, 2q13_MCL (ARM); SEQ ID NO: 4766, 2q13 MCL (ARM); SEQ ID NO: 4767, 2q13 MCL (ARM); SEQ ID NO: 4768, 2q13 MCL (ARM); SEQ ID NO: 4769, 2q13 MCL (ARM); SEQ ID NO: 4770, 2q13_MCL (ARM); SEQ ID NO: 4771, 2q13 MCL (ARM); SEQ ID NO: 4772, 2q13_MCL (ARM); SEQ ID NO: 4773, 2q13 MCL (ARM); SEQ ID NO: 4774, 2q13 MCL (ARM); SEQ ID NO: 4775, 2q13 MCL (ARM); SEQ ID NO: 4776, 2q13 MCL (ARM); SEQ ID NO: 4777, 2q13_MCL (ARM); SEQ ID NO: 4778, 2q13 MCL (ARM); SEQ ID NO: 4779, 2q13_MCL (ARM); SEQ ID NO: 4780, 2q13 MCL (ARM); SEQ ID NO: 4781, 2q13 MCL (ARM); SEQ ID NO: 4782, 2q13 MCL (ARM); SEQ ID NO: 4783, 2q13 MCL (ARM); SEQ ID NO: 4784, 2q13_MCL (ARM); SEQ ID NO: 4785, 2P (ARM); SEQ ID NO: 4786, 2P (ARM); SEQ ID NO: 4787, 2P (ARM); SEQ ID NO: 4788, 2P (ARM); SEQ ID NO: 4789, 2P (ARM); SEQ ID NO: 4790, 2P (ARM); SEQ ID NO: 4791, 2P (ARM); SEQ ID NO: 4792, 2P (ARM); SEQ ID NO: 4793, 2P (ARM); SEQ ID NO: 4794, 2P (ARM); SEQ ID NO: 4795, 2P (ARM); SEQ ID NO: 4796, 2P (ARM); SEQ ID NO: 4797, 2P (ARM); SEQ ID NO: 4798, 2P (ARM); SEQ ID NO: 4799, 2P (ARM); SEQ ID NO: 4800, 2P (ARM); SEQ ID NO: 4801, 2P (ARM); SEQ ID NO: 4802, 2P (ARM); SEQ ID NO: 4803, 2P (ARM); SEQ ID NO: 4804, 2P (ARM); SEQ ID NO: 4805, 2P (ARM); SEQ ID NO: 4806, CXCR4 (Gene); SEQ ID NO: 4807, CXCR4 (Gene); SEQ ID NO: 4808, CXCR4 (Gene); SEQ ID NO: 4809, CXCR4 (Gene); SEQ ID NO: 4810, CXCR4 (Gene); SEQ ID NO: 4811, 2P (ARM); SEQ ID NO: 4812, 2P (ARM); SEQ ID NO: 4813, 2P (ARM); SEQ ID NO: 4814, 2P (ARM); SEQ ID NO: 4815, 2P (ARM); SEQ ID NO: 4816, 2q22.2_DLBCL (FOCAL); SEQ ID NO: 4817, 2q22.2_DLBCL (FOCAL); SEQ ID NO: 4818, 2q22.2_DLBCL (FOCAL); SEQ ID NO: 4819, 2q22.2_DLBCL (FOCAL); SEQ ID NO: 4820, 2q22.2_DLBCL (FOCAL); SEQ ID NO: 4821, 2q22.2_DLBCL (FOCAL); SEQ ID NO: 4822, ZEB2 (Gene); SEQ ID NO: 4823, ZEB2 (Gene); SEQ ID NO: 4824, ZEB2 (Gene); SEQ ID NO: 4825, ZEB2 (Gene); SEQ ID NO: 4826, ZEB2 (Gene); SEQ ID NO: 4827, ZEB2 (Gene); SEQ ID NO: 4828, ZEB2 (Gene); SEQ ID NO: 4829, ZEB2 (Gene); SEQ ID NO: 4830, ZEB2 (Gene); SEQ ID NO: 4831, ZEB2 (Gene); SEQ ID NO: 4832, ZEB2 (Gene); SEQ ID NO: 4833, ZEB2 (Gene); SEQ ID NO: 4834, ZEB2 (Gene); SEQ ID NO: 4835, ZEB2 (Gene); SEQ ID NO: 4836, 2q22.2_DLBCL (FOCAL); SEQ ID NO: 4837, 2q22.2_DLBCL (FOCAL); SEQ ID NO: 4838, 2q22.2_DLBCL (FOCAL); SEQ ID NO: 4839, 2q22.2_DLBCL (FOCAL); SEQ ID NO: 4840, 2q22.2_DLBCL (FOCAL); SEQ ID NO: 4841, 2q22.2_DLBCL (FOCAL); SEQ ID NO: 4842, 2q22.2_DLBCL (FOCAL); SEQ ID NO: 4843, 2q22.2_DLBCL (FOCAL); SEQ ID NO: 4844, 2q22.2_DLBCL (FOCAL); SEQ ID NO: 4845, 2q22.2_DLBCL (FOCAL); SEQ ID NO: 4846, 2q22.2_DLBCL (FOCAL); SEQ ID NO: 4847, 2q22.2_DLBCL (FOCAL); SEQ ID NO: 4848, 2q22.2_DLBCL (FOCAL); SEQ ID NO: 4849, 2q22.2_DLBCL (FOCAL); SEQ ID NO: 4850, 2q22.2_DLBCL (FOCAL); SEQ ID NO: 4851, MSI (MSI); SEQ ID NO: 4852, MSI (MSI); SEQ ID NO: 4853, 2P (ARM); SEQ ID NO: 4854, 2P (ARM); SEQ ID NO: 4855, 2P (ARM); SEQ ID NO: 4856, 2P (ARM); SEQ ID NO: 4857, 2P (ARM); SEQ ID NO: 4858, 2P (ARM); SEQ ID NO: 4859, 2P (ARM); SEQ ID NO: 4860, 2P (ARM); SEQ ID NO: 4861, 2P (ARM); SEQ ID NO: 4862, 2P (ARM); SEQ ID NO: 4863, MSI (MSI); SEQ ID NO: 4864, MSI (MSI); SEQ ID NO: 4865, 2P (ARM); SEQ ID NO: 4866, 2P (ARM); SEQ ID NO: 4867, 2P (ARM); SEQ ID NO: 4868, 2P (ARM); SEQ ID NO: 4869, 2P (ARM); SEQ ID NO: 4870, 2P (ARM); SEQ ID NO: 4871, 2P (ARM); SEQ ID NO: 4872, 2P (ARM); SEQ ID NO: 4873, 2P (ARM); SEQ ID NO: 4874, 2P (ARM); SEQ ID NO: 4875, 2P (ARM); SEQ ID NO: 4876, 2P (ARM); SEQ ID NO: 4877, 2P (ARM); SEQ ID NO: 4878, 2P (ARM); SEQ ID NO: 4879, 2P (ARM); SEQ ID NO: 4880, 2P (ARM); SEQ ID NO: 4881, 2P (ARM); SEQ ID NO: 4882, SF3B1 (Gene); SEQ ID NO: 4883, SF3B1 (Gene); SEQ ID NO: 4884, SF3B1 (Gene); SEQ ID NO: 4885, SF3B1 (Gene); SEQ ID NO: 4886, SF3B1 (Gene); SEQ ID NO: 4887, SF3B1 (Gene); SEQ ID NO: 4888, SF3B1 (Gene); SEQ ID NO: 4889, SF3B1 (Gene); SEQ ID NO: 4890, SF3B1 (Gene); SEQ ID NO: 4891, SF3B1 (Gene); SEQ ID NO: 4892, SF3B1 (Gene); SEQ ID NO: 4893, SF3B1 (Gene); SEQ ID NO: 4894, SF3B1 (Gene); SEQ ID NO: 4895, SF3B1 (Gene); SEQ ID NO: 4896, SF3B1 (Gene); SEQ ID NO: 4897, SF3B1 (Gene); SEQ ID NO: 4898, SF3B1 (Gene); SEQ ID NO: 4899, SF3B1 (Gene); SEQ ID NO: 4900, SF3B1 (Gene); SEQ ID NO: 4901, SF3B1 (Gene); SEQ ID NO: 4902, SF3B1 (Gene); SEQ ID NO: 4903, SF3B1 (Gene); SEQ ID NO: 4904, SF3B1 (Gene); SEQ ID NO: 4905, SF3B1 (Gene); SEQ ID NO: 4906, SF3B1 (Gene); SEQ ID NO: 4907, SF3B1 (Gene); SEQ ID NO: 4908, 2P (ARM); SEQ ID NO: 4909, 2P (ARM); SEQ ID NO: 4910, 2P (ARM); SEQ ID NO: 4911, 2P (ARM); SEQ ID NO: 4912, 2P (ARM); SEQ ID NO: 4913, MSI (MSI); SEQ ID NO: 4914, MSI (MSI); SEQ ID NO: 4915, 2P (ARM); SEQ ID NO: 4916, 2P (ARM); SEQ ID NO: 4917, MSI (MSI); SEQ ID NO: 4918, MSI (MSI); SEQ ID NO: 4919, 2P (ARM); SEQ ID NO: 4920, 2P (ARM); SEQ ID NO: 4921, IDH1 (Gene); SEQ ID NO: 4922, IDH1 (Gene); SEQ ID NO: 4923, IDH1 (Gene); SEQ ID NO: 4924, IDH1 (Gene); SEQ ID NO: 4925, IDH1 (Gene); SEQ ID NO: 4926, IDH1 (Gene); SEQ ID NO: 4927, IDH1 (Gene); SEQ ID NO: 4928, IDH1 (Gene); SEQ ID NO: 4929, 2P (ARM); SEQ ID NO: 4930, ERBB4 (Gene); SEQ ID NO: 4931, ERBB4 (Gene); SEQ ID NO: 4932, ERBB4 (Gene); SEQ ID NO: 4933, ERBB4 (Gene); SEQ ID NO: 4934, ERBB4 (Gene); SEQ ID NO: 4935, ERBB4 (Gene); SEQ ID NO: 4936, ERBB4 (Gene); SEQ ID NO: 4937, ERBB4 (Gene); SEQ ID NO: 4938, ERBB4 (Gene); SEQ ID NO: 4939, ERBB4 (Gene); SEQ ID NO: 4940, ERBB4 (Gene); SEQ ID NO: 4941, ERBB4 (Gene); SEQ ID NO: 4942, ERBB4 (Gene); SEQ ID NO: 4943, ERBB4 (Gene); SEQ ID NO: 4944, ERBB4 (Gene); SEQ ID NO: 4945, ERBB4 (Gene); SEQ ID NO: 4946, ERBB4 (Gene); SEQ ID NO: 4947, ERBB4 (Gene); SEQ ID NO: 4948, ERBB4 (Gene); SEQ ID NO: 4949, ERBB4 (Gene); SEQ ID NO: 4950, ERBB4 (Gene); SEQ ID NO: 4951, ERBB4 (Gene); SEQ ID NO: 4952, ERBB4 (Gene); SEQ ID NO: 4953, ERBB4 (Gene); SEQ ID NO: 4954, ERBB4 (Gene); SEQ ID NO: 4955, ERBB4 (Gene); SEQ ID NO: 4956, ERBB4 (Gene); SEQ ID NO: 4957, ERBB4 (Gene); SEQ ID NO: 4958, 2P (ARM); SEQ ID NO: 4959, 2P (ARM); SEQ ID NO: 4960, 2P (ARM); SEQ ID NO: 4961, 2P (ARM); SEQ ID NO: 4962, 2P (ARM); SEQ ID NO: 4963, 2P (ARM); SEQ ID NO: 4964, 2P (ARM); SEQ ID NO: 4965, 2P (ARM); SEQ ID NO: 4966, 2P (ARM); SEQ ID NO: 4967, FP (FP); SEQ ID NO: 4968, 2P (ARM); SEQ ID NO: 4969, 2P (ARM); SEQ ID NO: 4970, 2P (ARM); SEQ ID NO: 4971, 2P (ARM); SEQ ID NO: 4972, 2P (ARM); SEQ ID NO: 4973, 2P (ARM); SEQ ID NO: 4974, 2P (ARM); SEQ ID NO: 4975, 2P (ARM); SEQ ID NO: 4976, MSI (MSI); SEQ ID NO: 4977, MSI (MSI); SEQ ID NO: 4978, 2P (ARM); SEQ ID NO: 4979, 2P (ARM); SEQ ID NO: 4980, 2P (ARM); SEQ ID NO: 4981, 2P (ARM); SEQ ID NO: 4982, FP (FP); SEQ ID NO: 4983, 2P (ARM); SEQ ID NO: 4984, 2P (ARM); SEQ ID NO: 4985, 2P (ARM); SEQ ID NO: 4986, PDCD1 (Gene); SEQ ID NO: 4987, PDCD1 (Gene); SEQ ID NO: 4988, PDCD1 (Gene); SEQ ID NO: 4989, PDCD1 (Gene); SEQ ID NO: 4990, PDCD1 (Gene); SEQ ID NO: 4991, 20P (ARM); SEQ ID NO: 4992, 20P (ARM); SEQ ID NO: 4993, 20P (ARM); SEQ ID NO: 4994, 20P (ARM); SEQ ID NO: 4995, 20P (ARM); SEQ ID NO: 4996, 20P (ARM); SEQ ID NO: 4997, FP (FP); SEQ ID NO: 4998, 20P (ARM); SEQ ID NO: 4999, 20P (ARM); SEQ ID NO: 5000, 20P (ARM); SEQ ID NO: 5001, 20P (ARM); SEQ ID NO: 5002, 20P (ARM); SEQ ID NO: 5003, 20P (ARM); SEQ ID NO: 5004, 20P (ARM); SEQ ID NO: 5005, 20P (ARM); SEQ ID NO: 5006, 20P (ARM); SEQ ID NO: 5007, 20P (ARM); SEQ ID NO: 5008, 20P (ARM); SEQ ID NO: 5009, 20P (ARM); SEQ ID NO: 5010, 20P (ARM); SEQ ID NO: 5011, 20P (ARM); SEQ ID NO: 5012, 20P (ARM); SEQ ID NO: 5013, 20P (ARM); SEQ ID NO: 5014, 20P (ARM); SEQ ID NO: 5015, 20P (ARM); SEQ ID NO: 5016, 20P (ARM); SEQ ID NO: 5017, 20P (ARM); SEQ ID NO: 5018, 20P (ARM); SEQ ID NO: 5019, 20P (ARM); SEQ ID NO: 5020, 20P (ARM); SEQ ID NO: 5021, 20P (ARM); SEQ ID NO: 5022, 20P (ARM); SEQ ID NO: 5023, 20P (ARM); SEQ ID NO: 5024, ASXL1 (Gene); SEQ ID NO: 5025, ASXL1 (Gene); SEQ ID NO: 5026, ASXL1 (Gene); SEQ ID NO: 5027, ASXL1 (Gene); SEQ ID NO: 5028, ASXL1 (Gene); SEQ ID NO: 5029, ASXL1 (Gene); SEQ ID NO: 5030, ASXL1 (Gene); SEQ ID NO: 5031, ASXL1 (Gene); SEQ ID NO: 5032, ASXL1 (Gene); SEQ ID NO: 5033, ASXL1 (Gene); SEQ ID NO: 5034, ASXL1 (Gene); SEQ ID NO: 5035, ASXL1 (Gene); SEQ ID NO: 5036, ASXL1 (Gene); SEQ ID NO: 5037, ASXL1 (Gene); SEQ ID NO: 5038, ASXL1 (Gene); SEQ ID NO: 5039, ASXL1 (Gene); SEQ ID NO: 5040, ASXL1 (Gene); SEQ ID NO: 5041, ASXL1 (Gene); SEQ ID NO: 5042, ASXL1 (Gene); SEQ ID NO: 5043, ASXL1 (Gene); SEQ ID NO: 5044, ASXL1 (Gene); SEQ ID NO: 5045, 20Q (ARM); SEQ ID NO: 5046, 20Q (ARM); SEQ ID NO: 5047, 20Q (ARM); SEQ ID NO: 5048, 20Q (ARM); SEQ ID NO: 5049, 20Q (ARM); SEQ ID NO: 5050, 20Q (ARM); SEQ ID NO: 5051, 20Q (ARM); SEQ ID NO: 5052, FP (FP); SEQ ID NO: 5053, PLCG1 (Gene); SEQ ID NO: 5054, PLCG1 (Gene); SEQ ID NO: 5055, PLCG1 (Gene); SEQ ID NO: 5056, PLCG1 (Gene); SEQ ID NO: 5057, PLCG1 (Gene); SEQ ID NO: 5058, PLCG1 (Gene); SEQ ID NO: 5059, PLCG1 (Gene); SEQ ID NO: 5060, PLCG1 (Gene); SEQ ID NO: 5061, PLCG1 (Gene); SEQ ID NO: 5062, PLCG1 (Gene); SEQ ID NO: 5063, PLCG1 (Gene); SEQ ID NO: 5064, PLCG1 (Gene); SEQ ID NO: 5065, PLCG1 (Gene); SEQ ID NO: 5066, PLCG1 (Gene); SEQ ID NO: 5067, PLCG1 (Gene); SEQ ID NO: 5068, PLCG1 (Gene); SEQ ID NO: 5069, PLCG1 (Gene); SEQ ID NO: 5070, PLCG1 (Gene); SEQ ID NO: 5071, PLCG1 (Gene); SEQ ID NO: 5072, PLCG1 (Gene); SEQ ID NO: 5073, PLCG1 (Gene); SEQ ID NO: 5074, PLCG1 (Gene); SEQ ID NO: 5075, PLCG1 (Gene); SEQ ID NO: 5076, PLCG1 (Gene); SEQ ID NO: 5077, PLCG1 (Gene); SEQ ID NO: 5078, PLCG1 (Gene); SEQ ID NO: 5079, PLCG1 (Gene); SEQ ID NO: 5080, PLCG1 (Gene); SEQ ID NO: 5081, PLCG1 (Gene); SEQ ID NO: 5082, PLCG1 (Gene); SEQ ID NO: 5083, PLCG1 (Gene); SEQ ID NO: 5084, PLCG1 (Gene); SEQ ID NO: 5085, 20Q (ARM); SEQ ID NO: 5086, 20Q (ARM); SEQ ID NO: 5087, 20Q (ARM); SEQ ID NO: 5088, 20Q (ARM); SEQ ID NO: 5089, 20Q (ARM); SEQ ID NO: 5090, 20Q (ARM); SEQ ID NO: 5091, 20Q (ARM); SEQ ID NO: 5092, 20Q (ARM); SEQ ID NO: 5093, 20Q (ARM); SEQ ID NO: 5094, MSI (MSI); SEQ ID NO: 5095, MSI (MSI); SEQ ID NO: 5096, 20Q (ARM); SEQ ID NO: 5097, 20Q (ARM); SEQ ID NO: 5098, PTPN1 (Gene); SEQ ID NO: 5099, PTPN1 (Gene); SEQ ID NO: 5100, PTPN1 (Gene); SEQ ID NO: 5101, PTPN1 (Gene); SEQ ID NO: 5102, PTPN1 (Gene); SEQ ID NO: 5103, PTPN1 (Gene); SEQ ID NO: 5104, PTPN1 (Gene); SEQ ID NO: 5105, PTPN1 (Gene); SEQ ID NO: 5106, PTPN1 (Gene); SEQ ID NO: 5107, PTPN1 (Gene); SEQ ID NO: 5108, MSI (MSI); SEQ ID NO: 5109, MSI (MSI); SEQ ID NO: 5110, 20Q (ARM); SEQ ID NO: 5111, 20Q (ARM); SEQ ID NO: 5112, 20Q (ARM); SEQ ID NO: 5113, 20Q (ARM); SEQ ID NO: 5114, ZNF217 (Gene); SEQ ID NO: 5115, ZNF217 (Gene); SEQ ID NO: 5116, ZNF217 (Gene); SEQ ID NO: 5117, ZNF217 (Gene); SEQ ID NO: 5118, ZNF217 (Gene); SEQ ID NO: 5119, ZNF217 (Gene); SEQ ID NO: 5120, ZNF217 (Gene); SEQ ID NO: 5121, ZNF217 (Gene); SEQ ID NO: 5122, ZNF217 (Gene); SEQ ID NO: 5123, 20Q (ARM); SEQ ID NO: 5124, 20Q (ARM); SEQ ID NO: 5125, 20Q (ARM); SEQ ID NO: 5126, 20Q (ARM); SEQ ID NO: 5127, 20Q (ARM); SEQ ID NO: 5128, RBM38 (Gene); SEQ ID NO: 5129, RBM38 (Gene); SEQ ID NO: 5130, RBM38 (Gene); SEQ ID NO: 5131, RBM38 (Gene); SEQ ID NO: 5132, RBM38 (Gene); SEQ ID NO: 5133, 20Q (ARM); SEQ ID NO: 5134, 20Q (ARM); SEQ ID NO: 5135, 20Q (ARM); SEQ ID NO: 5136, 20Q (ARM); SEQ ID NO: 5137, MSI (MSI); SEQ ID NO: 5138, MSI (MSI); SEQ ID NO: 5139, 20Q (ARM); SEQ ID NO: 5140, 20Q (ARM); SEQ ID NO: 5141, 20Q (ARM); SEQ ID NO: 5142, 20Q (ARM); SEQ ID NO: 5143, 21q11.2_MCL (FOCAL); SEQ ID NO: 5144, 21q11.2_MCL (FOCAL); SEQ ID NO: 5145, 21q11.2_MCL (FOCAL); SEQ ID NO: 5146, 21q11.2_MCL (FOCAL); SEQ ID NO: 5147, 21q11.2_MCL (FOCAL); SEQ ID NO: 5148, 21q11.2_MCL (FOCAL); SEQ ID NO: 5149, 21q11.2_MCL (FOCAL); SEQ ID NO: 5150, 21q11.2_MCL (FOCAL); SEQ ID NO: 5151, 21q11.2_MCL (FOCAL); SEQ ID NO: 5152, 21q11.2_MCL (FOCAL); SEQ ID NO: 5153, FP (FP); SEQ ID NO: 5154, 21Q_DLBCL (ARM); SEQ ID NO: 5155, 21Q_DLBCL (ARM); SEQ ID NO: 5156, 21Q_DLBCL (ARM); SEQ ID NO: 5157, 21Q_DLBCL (ARM); SEQ ID NO: 5158, 21Q_DLBCL (ARM); SEQ ID NO: 5159, 21Q_DLBCL (ARM); SEQ ID NO: 5160, 21Q_DLBCL (ARM); SEQ ID NO: 5161, 21Q_DLBCL (ARM); SEQ ID NO: 5162, 21Q_DLBCL (ARM); SEQ ID NO: 5163, 21Q_DLBCL (ARM); SEQ ID NO: 5164, 21Q_DLBCL (ARM); SEQ ID NO: 5165, FP (FP); SEQ ID NO: 5166, 21Q_DLBCL (ARM); SEQ ID NO: 5167, FP (FP); SEQ ID NO: 5168, 21Q_DLBCL (ARM); SEQ ID NO: 5169, 21Q_DLBCL (ARM); SEQ ID NO: 5170, 21Q_DLBCL (ARM); SEQ ID NO: 5171, 21Q_DLBCL (ARM); SEQ ID NO: 5172, 21Q_DLBCL (ARM); SEQ ID NO: 5173, 21Q_DLBCL (ARM); SEQ ID NO: 5174, MSI (MSI); SEQ ID NO: 5175, MSI (MSI); SEQ ID NO: 5176, 21Q_DLBCL (ARM); SEQ ID NO: 5177, 21Q_DLBCL (ARM); SEQ ID NO: 5178, 21Q_DLBCL (ARM); SEQ ID NO: 5179, 21Q_DLBCL (ARM); SEQ ID NO: 5180, 21Q_DLBCL (ARM); SEQ ID NO: 5181, 21Q_DLBCL (ARM); SEQ ID NO: 5182, 21Q_DLBCL (ARM); SEQ ID NO: 5183, FP (FP); SEQ ID NO: 5184, 21Q_DLBCL (ARM); SEQ ID NO: 5185, 21Q_DLBCL (ARM); SEQ ID NO: 5186, 21Q_DLBCL (ARM); SEQ ID NO: 5187, 21Q_DLBCL (ARM); SEQ ID NO: 5188, FP (FP); SEQ ID NO: 5189, 22Q (ARM); SEQ ID NO: 5190, 22Q (ARM); SEQ ID NO: 5191, FP (FP); SEQ ID NO: 5192, MAPK1 (Gene); SEQ ID NO: 5193, MAPK1 (Gene); SEQ ID NO: 5194, MAPK1 (Gene); SEQ ID NO: 5195, MAPK1 (Gene); SEQ ID NO: 5196, MAPK1 (Gene); SEQ ID NO: 5197, MAPK1 (Gene); SEQ ID NO: 5198, MAPK1 (Gene); SEQ ID NO: 5199, IGLV2-14 (SV); SEQ ID NO: 5200, IGLV2-14 (SV); SEQ ID NO: 5201, IGLV2-14 (SV); SEQ ID NO: 5202, IGLL5 (Gene); SEQ ID NO: 5203, IGLL5_intron_SV (SV); SEQ ID NO: 5204, IGLL5 (Gene); SEQ ID NO: 5205, IgL_SV (SV); SEQ ID NO: 5206, IgL_SV (SV); SEQ ID NO: 5207, IgL_SV (SV); SEQ ID NO: 5208, IgL_SV (SV); SEQ ID NO: 5209, IgL_SV (SV); SEQ ID NO: 5210, IgL_SV (SV); SEQ ID NO: 5211, IgL_SV (SV); SEQ ID NO: 5212, IgL_SV (SV); SEQ ID NO: 5213, IgL_SV (SV); SEQ ID NO: 5214, IgL_SV (SV); SEQ ID NO: 5215, IgL_SV (SV); SEQ ID NO: 5216, IGLL1_SV (SV); SEQ ID NO: 5217, IGLL1_SV (SV); SEQ ID NO: 5218, IGLL1_SV (SV); SEQ ID NO: 5219, IGLL1_SV (SV); SEQ ID NO: 5220, IGLL1_SV (SV); SEQ ID NO: 5221, IGLL1_SV (SV); SEQ ID NO: 5222, IGLL1_SV (SV); SEQ ID NO: 5223, IGLL1_SV (SV); SEQ ID NO: 5224, IGLL1_SV (SV); SEQ ID NO: 5225, IGLL1_SV (SV); SEQ ID NO: 5226, IGLL1_SV (SV); SEQ ID NO: 5227, IGLL1_SV (SV); SEQ ID NO: 5228, IGLL1_SV (SV); SEQ ID NO: 5229, IGLL1_SV (SV); SEQ ID NO: 5230, IGLL1_SV (SV); SEQ ID NO: 5231, 22Q (ARM); SEQ ID NO: 5232, 22Q (ARM); SEQ ID NO: 5233, 22Q (ARM); SEQ ID NO: 5234, 22Q (ARM); SEQ ID NO: 5235, FP (FP); SEQ ID NO: 5236, 22Q (ARM); SEQ ID NO: 5237, CHEK2 (Gene); SEQ ID NO: 5238, CHEK2 (Gene); SEQ ID NO: 5239, CHEK2 (Gene); SEQ ID NO: 5240, CHEK2 (Gene); SEQ ID NO: 5241, CHEK2 (Gene); SEQ ID NO: 5242, CHEK2 (Gene); SEQ ID NO: 5243, CHEK2 (Gene); SEQ ID NO: 5244, CHEK2 (Gene); SEQ ID NO: 5245, CHEK2 (Gene); SEQ ID NO: 5246, CHEK2 (Gene); SEQ ID NO: 5247, CHEK2 (Gene); SEQ ID NO: 5248, CHEK2 (Gene); SEQ ID NO: 5249, CHEK2 (Gene); SEQ ID NO: 5250, CHEK2 (Gene); SEQ ID NO: 5251, CHEK2 (Gene); SEQ ID NO: 5252, FP (FP); SEQ ID NO: 5253, 22Q (ARM); SEQ ID NO: 5254, FP (FP); SEQ ID NO: 5255, 22Q (ARM); SEQ ID NO: 5256, FP (FP); SEQ ID NO: 5257, 22Q (ARM); SEQ ID NO: 5258, 22Q (ARM); SEQ ID NO: 5259, 22Q (ARM); SEQ ID NO: 5260, 22Q (ARM); SEQ ID NO: 5261, 22Q (ARM); SEQ ID NO: 5262, 22Q (ARM); SEQ ID NO: 5263, 22Q (ARM); SEQ ID NO: 5264, 22Q (ARM); SEQ ID NO: 5265, 22Q (ARM); SEQ ID NO: 5266, EP300 (Gene); SEQ ID NO: 5267, EP300 (Gene); SEQ ID NO: 5268, EP300 (Gene); SEQ ID NO: 5269, EP300 (Gene); SEQ ID NO: 5270, EP300 (Gene); SEQ ID NO: 5271, EP300 (Gene); SEQ ID NO: 5272, EP300 (Gene); SEQ ID NO: 5273, EP300 (Gene); SEQ ID NO: 5274, EP300 (Gene); SEQ ID NO: 5275, EP300 (Gene); SEQ ID NO: 5276, EP300 (Gene); SEQ ID NO: 5277, EP300 (Gene); SEQ ID NO: 5278, EP300 (Gene); SEQ ID NO: 5279, EP300 (Gene); SEQ ID NO: 5280, EP300 (Gene); SEQ ID NO: 5281, EP300 (Gene); SEQ ID NO: 5282, EP300 (Gene); SEQ ID NO: 5283, EP300 (Gene); SEQ ID NO: 5284, EP300 (Gene); SEQ ID NO: 5285, EP300 (Gene); SEQ ID NO: 5286, EP300 (Gene); SEQ ID NO: 5287, EP300 (Gene); SEQ ID NO: 5288, EP300 (Gene); SEQ ID NO: 5289, EP300 (Gene); SEQ ID NO: 5290, EP300 (Gene); SEQ ID NO: 5291, EP300 (Gene); SEQ ID NO: 5292, EP300 (Gene); SEQ ID NO: 5293, EP300 (Gene); SEQ ID NO: 5294, EP300 (Gene); SEQ ID NO: 5295, EP300 (Gene); SEQ ID NO: 5296, EP300 (Gene); SEQ ID NO: 5297, EP300 (Gene); SEQ ID NO: 5298, EP300 (Gene); SEQ ID NO: 5299, EP300 (Gene); SEQ ID NO: 5300, EP300 (Gene); SEQ ID NO: 5301, EP300 (Gene); SEQ ID NO: 5302, EP300 (Gene); SEQ ID NO: 5303, 22Q (ARM); SEQ ID NO: 5304, 22Q (ARM); SEQ ID NO: 5305, 22Q (ARM); SEQ ID NO: 5306, 22Q (ARM); SEQ ID NO: 5307, 22Q (ARM); SEQ ID NO: 5308, 22Q (ARM); SEQ ID NO: 5309, 22Q (ARM); SEQ ID NO: 5310, MSI (MSI); SEQ ID NO: 5311, MSI (MSI); SEQ ID NO: 5312, 22Q (ARM); SEQ ID NO: 5313, 3P_DLBCL (ARM); SEQ ID NO: 5314, 3P_DLBCL (ARM); SEQ ID NO: 5315, FP (FP); SEQ ID NO: 5316, 3P_DLBCL (ARM); SEQ ID NO: 5317, 3P_DLBCL (ARM); SEQ ID NO: 5318, 3P_DLBCL (ARM); SEQ ID NO: 5319, CRBN (Gene); SEQ ID NO: 5320, CRBN (Gene); SEQ ID NO: 5321, CRBN (Gene); SEQ ID NO: 5322, CRBN (Gene); SEQ ID NO: 5323, CRBN (Gene); SEQ ID NO: 5324, CRBN (Gene); SEQ ID NO: 5325, CRBN (Gene); SEQ ID NO: 5326, CRBN (Gene); SEQ ID NO: 5327, CRBN (Gene); SEQ ID NO: 5328, CRBN (Gene); SEQ ID NO: 5329, CRBN (Gene); SEQ ID NO: 5330, 3P_DLBCL (ARM); SEQ ID NO: 5331, 3P_DLBCL (ARM); SEQ ID NO: 5332, 3P_DLBCL (ARM); SEQ ID NO: 5333, 3P_DLBCL (ARM); SEQ ID NO: 5334, 3P_DLBCL (ARM); SEQ ID NO: 5335, 3P_DLBCL (ARM); SEQ ID NO: 5336, 3P_DLBCL (ARM); SEQ ID NO: 5337, 3P_DLBCL (ARM); SEQ ID NO: 5338, SETD5 (Gene); SEQ ID NO: 5339, SETD5 (Gene); SEQ ID NO: 5340, SETD5 (Gene); SEQ ID NO: 5341, SETD5 (Gene); SEQ ID NO: 5342, SETD5 (Gene); SEQ ID NO: 5343, SETD5 (Gene); SEQ ID NO: 5344, SETD5 (Gene); SEQ ID NO: 5345, SETD5 (Gene); SEQ ID NO: 5346, SETD5 (Gene); SEQ ID NO: 5347, SETD5 (Gene); SEQ ID NO: 5348, SETD5 (Gene); SEQ ID NO: 5349, SETD5 (Gene); SEQ ID NO: 5350, SETD5 (Gene); SEQ ID NO: 5351, SETD5 (Gene); SEQ ID NO: 5352, SETD5 (Gene); SEQ ID NO: 5353, SETD5 (Gene); SEQ ID NO: 5354, SETD5 (Gene); SEQ ID NO: 5355, SETD5 (Gene); SEQ ID NO: 5356, SETD5 (Gene); SEQ ID NO: 5357, SETD5 (Gene); SEQ ID NO: 5358, SETD5 (Gene); SEQ ID NO: 5359, SETD5 (Gene); SEQ ID NO: 5360, SETD5 (Gene); SEQ ID NO: 5361, SETD5 (Gene); SEQ ID NO: 5362, SETD5 (Gene); SEQ ID NO: 5363, SETD5 (Gene); SEQ ID NO: 5364, SETD5 (Gene); SEQ ID NO: 5365, SETD5 (Gene); SEQ ID NO: 5366, SETD5 (Gene); SEQ ID NO: 5367, 3P_DLBCL (ARM); SEQ ID NO: 5368, 3P_DLBCL (ARM); SEQ ID NO: 5369, 3P_DLBCL (ARM); SEQ ID NO: 5370, RAF1 (Gene); SEQ ID NO: 5371, RAF1 (Gene); SEQ ID NO: 5372, RAF1 (Gene); SEQ ID NO: 5373, RAF1 (Gene); SEQ ID NO: 5374, RAF1 (Gene); SEQ ID NO: 5375, RAF1 (Gene); SEQ ID NO: 5376, RAF1 (Gene); SEQ ID NO: 5377, RAF1 (Gene); SEQ ID NO: 5378, RAF1 (Gene); SEQ ID NO: 5379, RAF1 (Gene); SEQ ID NO: 5380, RAF1 (Gene); SEQ ID NO: 5381, RAF1 (Gene); SEQ ID NO: 5382, RAF1 (Gene); SEQ ID NO: 5383, RAF1 (Gene); SEQ ID NO: 5384, RAF1 (Gene); SEQ ID NO: 5385, RAF1 (Gene); SEQ ID NO: 5386, RAF1 (Gene); SEQ ID NO: 5387, 3P_DLBCL (ARM); SEQ ID NO: 5388, 3P_DLBCL (ARM); SEQ ID NO: 5389, 3P_DLBCL (ARM); SEQ ID NO: 5390, 3P_DLBCL (ARM); SEQ ID NO: 5391, 3P_DLBCL (ARM); SEQ ID NO: 5392, 3P_DLBCL (ARM); SEQ ID NO: 5393, 3P_DLBCL (ARM); SEQ ID NO: 5394, FP (FP); SEQ ID NO: 5395, 3P_DLBCL (ARM); SEQ ID NO: 5396, 3P_DLBCL (ARM); SEQ ID NO: 5397, 3P_DLBCL (ARM); SEQ ID NO: 5398, 3P_DLBCL (ARM); SEQ ID NO: 5399, 3P_DLBCL (ARM); SEQ ID NO: 5400, 3P_DLBCL (ARM); SEQ ID NO: 5401, 3P_DLBCL (ARM); SEQ ID NO: 5402, 3P_DLBCL (ARM); SEQ ID NO: 5403, 3P_DLBCL (ARM); SEQ ID NO: 5404, 3P_DLBCL (ARM); SEQ ID NO: 5405, 3P_DLBCL (ARM); SEQ ID NO: 5406, 3P_DLBCL (ARM); SEQ ID NO: 5407, 3P_DLBCL (ARM); SEQ ID NO: 5408, MSI (MSI); SEQ ID NO: 5409, MSI (MSI); SEQ ID NO: 5410, 3P_DLBCL (ARM); SEQ ID NO: 5411, CCR4 (Gene); SEQ ID NO: 5412, CCR4 (Gene); SEQ ID NO: 5413, CCR4 (Gene); SEQ ID NO: 5414, CCR4 (Gene); SEQ ID NO: 5415, CCR4 (Gene); SEQ ID NO: 5416, 3P_DLBCL (ARM); SEQ ID NO: 5417, 3P_DLBCL (ARM); SEQ ID NO: 5418, 3P_DLBCL (ARM); SEQ ID NO: 5419, 3P_DLBCL (ARM); SEQ ID NO: 5420, 3P_DLBCL (ARM); SEQ ID NO: 5421, FP (FP); SEQ ID NO: 5422, 3P_DLBCL (ARM); SEQ ID NO: 5423, MYD88 (Gene); SEQ ID NO: 5424, MYD88 (Gene); SEQ ID NO: 5425, MYD88 (Gene); SEQ ID NO: 5426, MYD88 (Gene); SEQ ID NO: 5427, MYD88 (Gene); SEQ ID NO: 5428, 3P_DLBCL (ARM); SEQ ID NO: 5429, 3P_DLBCL (ARM); SEQ ID NO: 5430, 3P_DLBCL (ARM); SEQ ID NO: 5431, 3P_DLBCL (ARM); SEQ ID NO: 5432, 3P_DLBCL (ARM); SEQ ID NO: 5433, 3P_DLBCL (ARM); SEQ ID NO: 5434, 3P_DLBCL (ARM); SEQ ID NO: 5435, 3P_DLBCL (ARM); SEQ ID NO: 5436, SETD2 (Gene); SEQ ID NO: 5437, SETD2 (Gene); SEQ ID NO: 5438, SETD2 (Gene); SEQ ID NO: 5439, SETD2 (Gene); SEQ ID NO: 5440, SETD2 (Gene); SEQ ID NO: 5441, SETD2 (Gene); SEQ ID NO: 5442, SETD2 (Gene); SEQ ID NO: 5443, SETD2 (Gene); SEQ ID NO: 5444, SETD2 (Gene); SEQ ID NO: 5445, SETD2 (Gene); SEQ ID NO: 5446, SETD2 (Gene); SEQ ID NO: 5447, SETD2 (Gene); SEQ ID NO: 5448, SETD2 (Gene); SEQ ID NO: 5449, SETD2 (Gene); SEQ ID NO: 5450, SETD2 (Gene); SEQ ID NO: 5451, SETD2 (Gene); SEQ ID NO: 5452, SETD2 (Gene); SEQ ID NO: 5453, SETD2 (Gene); SEQ ID NO: 5454, SETD2 (Gene); SEQ ID NO: 5455, SETD2 (Gene); SEQ ID NO: 5456, SETD2 (Gene); SEQ ID NO: 5457, SETD2 (Gene); SEQ ID NO: 5458, SETD2 (Gene); SEQ ID NO: 5459, SETD2 (Gene); SEQ ID NO: 5460, SETD2 (Gene); SEQ ID NO: 5461, SETD2 (Gene); SEQ ID NO: 5462, SETD2 (Gene); SEQ ID NO: 5463, SETD2 (Gene); SEQ ID NO: 5464, SETD2 (Gene); SEQ ID NO: 5465, SETD2 (Gene); SEQ ID NO: 5466, SETD2 (Gene); SEQ ID NO: 5467, SETD2 (Gene); SEQ ID NO: 5468, 3p21.31_DLBCL (FOCAL); SEQ ID NO: 5469, 3p21.31_DLBCL (FOCAL); SEQ ID NO: 5470, 3p21.31_DLBCL (FOCAL); SEQ ID NO: 5471, 3p21.31_DLBCL (FOCAL); SEQ ID NO: 5472, 3p21.31_DLBCL (FOCAL); SEQ ID NO: 5473, 3p21.31_DLBCL (FOCAL); SEQ ID NO: 5474, 3p21.31_DLBCL (FOCAL); SEQ ID NO: 5475, 3p21.31_DLBCL (FOCAL); SEQ ID NO: 5476, 3p21.31_DLBCL (FOCAL); SEQ ID NO: 5477, 3p21.31_DLBCL (FOCAL); SEQ ID NO: 5478, RHOA (Gene); SEQ ID NO: 5479, RHOA (Gene); SEQ ID NO: 5480, RHOA (Gene); SEQ ID NO: 5481, RHOA (Gene); SEQ ID NO: 5482, 3p21.31_DLBCL (FOCAL); SEQ ID NO: 5483, 3p21.31_DLBCL (FOCAL); SEQ ID NO: 5484, 3p21.31_DLBCL (FOCAL); SEQ ID NO: 5485, GNAI2 (Gene); SEQ ID NO: 5486, GNAI2 (Gene); SEQ ID NO: 5487, GNAI2 (Gene); SEQ ID NO: 5488, GNAI2 (Gene); SEQ ID NO: 5489, GNAI2 (Gene); SEQ ID NO: 5490, GNAI2 (Gene); SEQ ID NO: 5491, GNAI2 (Gene); SEQ ID NO: 5492, GNAI2 (Gene); SEQ ID NO: 5493, GNAI2 (Gene); SEQ ID NO: 5494, GNAI2 (Gene); SEQ ID NO: 5495, GNAI2 (Gene); SEQ ID NO: 5496, MSI (MSI); SEQ ID NO: 5497, MSI (MSI); SEQ ID NO: 5498, 3P_DLBCL (ARM); SEQ ID NO: 5499, 3P_DLBCL (ARM); SEQ ID NO: 5500, 3P_DLBCL (ARM); SEQ ID NO: 5501, 3P_DLBCL (ARM); SEQ ID NO: 5502, 3P_DLBCL (ARM); SEQ ID NO: 5503, 3P_DLBCL (ARM); SEQ ID NO: 5504, 3P_DLBCL (ARM); SEQ ID NO: 5505, 3P_DLBCL (ARM); SEQ ID NO: 5506, 3P_DLBCL (ARM); SEQ ID NO: 5507, 3P_DLBCL (ARM); SEQ ID NO: 5508, 3P_DLBCL (ARM); SEQ ID NO: 5509, 3P_DLBCL (ARM); SEQ ID NO: 5510, 3P_DLBCL (ARM); SEQ ID NO: 5511, 3P_DLBCL (ARM); SEQ ID NO: 5512, 3P_DLBCL (ARM); SEQ ID NO: 5513, 3P_DLBCL (ARM); SEQ ID NO: 5514, 3P_DLBCL (ARM); SEQ ID NO: 5515, 3P_DLBCL (ARM); SEQ ID NO: 5516, 3P_DLBCL (ARM); SEQ ID NO: 5517, 3P_DLBCL (ARM); SEQ ID NO: 5518, 3P_DLBCL (ARM); SEQ ID NO: 5519, 3P_DLBCL (ARM); SEQ ID NO: 5520, 3P_DLBCL (ARM); SEQ ID NO: 5521, 3P_DLBCL (ARM); SEQ ID NO: 5522, 3P_DLBCL (ARM); SEQ ID NO: 5523, 3P_DLBCL (ARM); SEQ ID NO: 5524, 3P_DLBCL (ARM); SEQ ID NO: 5525, 3P_DLBCL (ARM); SEQ ID NO: 5526, 3P_DLBCL (ARM); SEQ ID NO: 5527, 3P_DLBCL (ARM); SEQ ID NO: 5528, 3P_DLBCL (ARM); SEQ ID NO: 5529, 3Q_DLBCL (ARM); SEQ ID NO: 5530, 3Q_DLBCL (ARM); SEQ ID NO: 5531, 3Q_DLBCL (ARM); SEQ ID NO: 5532, 3Q_DLBCL (ARM); SEQ ID NO: 5533, 3Q_DLBCL (ARM); SEQ ID NO: 5534, 3Q_DLBCL (ARM); SEQ ID NO: 5535, MSI (MSI); SEQ ID NO: 5536, MSI (MSI); SEQ ID NO: 5537, 3Q_DLBCL (ARM); SEQ ID NO: 5538, 3Q_DLBCL (ARM); SEQ ID NO: 5539, NFKBIZ (Gene); SEQ ID NO: 5540, NFKBIZ (Gene); SEQ ID NO: 5541, NFKBIZ (Gene); SEQ ID NO: 5542, NFKBIZ (Gene); SEQ ID NO: 5543, NFKBIZ (Gene); SEQ ID NO: 5544, NFKBIZ (Gene); SEQ ID NO: 5545, NFKBIZ (Gene); SEQ ID NO: 5546, NFKBIZ (Gene); SEQ ID NO: 5547, NFKBIZ (Gene); SEQ ID NO: 5548, NFKBIZ (Gene); SEQ ID NO: 5549, NFKBIZ (Gene); SEQ ID NO: 5550, NFKBIZ (Gene); SEQ ID NO: 5551, NFKBIZ 3′UTR (SV); SEQ ID NO: 5552, NFKBIZ 3′UTR (SV); SEQ ID NO: 5553, NFKBIZ 3′UTR (SV); SEQ ID NO: 5554, NFKBIZ 3′UTR (SV); SEQ ID NO: 5555, 3Q_DLBCL (ARM); SEQ ID NO: 5556, 3Q_DLBCL (ARM); SEQ ID NO: 5557, 3Q_DLBCL (ARM); SEQ ID NO: 5558, 3Q_DLBCL (ARM); SEQ ID NO: 5559, 3Q_DLBCL (ARM); SEQ ID NO: 5560, 3Q_DLBCL (ARM); SEQ ID NO: 5561, 3Q_DLBCL (ARM); SEQ ID NO: 5562, 3Q_DLBCL (ARM); SEQ ID NO: 5563, MSI (MSI); SEQ ID NO: 5564, MSI (MSI); SEQ ID NO: 5565, 3Q_DLBCL (ARM); SEQ ID NO: 5566, 3Q_DLBCL (ARM); SEQ ID NO: 5567, 3Q_DLBCL (ARM); SEQ ID NO: 5568, 3Q_DLBCL (ARM); SEQ ID NO: 5569, 3Q_DLBCL (ARM); SEQ ID NO: 5570, 3Q_DLBCL (ARM); SEQ ID NO: 5571, 3Q_DLBCL (ARM); SEQ ID NO: 5572, 3Q_DLBCL (ARM); SEQ ID NO: 5573, 3Q_DLBCL (ARM); SEQ ID NO: 5574, 3Q_DLBCL (ARM); SEQ ID NO: 5575, 3Q_DLBCL (ARM); SEQ ID NO: 5576, 3Q_DLBCL (ARM); SEQ ID NO: 5577, 3Q_DLBCL (ARM); SEQ ID NO: 5578, 3Q_DLBCL (ARM); SEQ ID NO: 5579, 3Q_DLBCL (ARM); SEQ ID NO: 5580, 3Q_DLBCL (ARM); SEQ ID NO: 5581, 3Q_DLBCL (ARM); SEQ ID NO: 5582, FP (FP); SEQ ID NO: 5583, 3Q_DLBCL (ARM); SEQ ID NO: 5584, 3Q_DLBCL (ARM); SEQ ID NO: 5585, 3Q_DLBCL (ARM); SEQ ID NO: 5586, 3Q_DLBCL (ARM); SEQ ID NO: 5587, 3Q_DLBCL (ARM); SEQ ID NO: 5588, ATR (Gene); SEQ ID NO: 5589, ATR (Gene); SEQ ID NO: 5590, ATR (Gene); SEQ ID NO: 5591, ATR (Gene); SEQ ID NO: 5592, ATR (Gene); SEQ ID NO: 5593, ATR (Gene); SEQ ID NO: 5594, ATR (Gene); SEQ ID NO: 5595, ATR (Gene); SEQ ID NO: 5596, ATR (Gene); SEQ ID NO: 5597, ATR (Gene); SEQ ID NO: 5598, ATR (Gene); SEQ ID NO: 5599, ATR (Gene); SEQ ID NO: 5600, ATR (Gene); SEQ ID NO: 5601, ATR (Gene); SEQ ID NO: 5602, ATR (Gene); SEQ ID NO: 5603, ATR (Gene); SEQ ID NO: 5604, ATR (Gene); SEQ ID NO: 5605, ATR (Gene); SEQ ID NO: 5606, ATR (Gene); SEQ ID NO: 5607, ATR (Gene); SEQ ID NO: 5608, ATR (Gene); SEQ ID NO: 5609, ATR (Gene); SEQ ID NO: 5610, ATR (Gene); SEQ ID NO: 5611, ATR (Gene); SEQ ID NO: 5612, ATR (Gene); SEQ ID NO: 5613, ATR (Gene); SEQ ID NO: 5614, ATR (Gene); SEQ ID NO: 5615, ATR (Gene); SEQ ID NO: 5616, ATR (Gene); SEQ ID NO: 5617, ATR (Gene); SEQ ID NO: 5618, ATR (Gene); SEQ ID NO: 5619, ATR (Gene); SEQ ID NO: 5620, ATR (Gene); SEQ ID NO: 5621, ATR (Gene); SEQ ID NO: 5622, ATR (Gene); SEQ ID NO: 5623, ATR (Gene); SEQ ID NO: 5624, ATR (Gene); SEQ ID NO: 5625, ATR (Gene); SEQ ID NO: 5626, ATR (Gene); SEQ ID NO: 5627, ATR (Gene); SEQ ID NO: 5628, ATR (Gene); SEQ ID NO: 5629, ATR (Gene); SEQ ID NO: 5630, ATR (Gene); SEQ ID NO: 5631, ATR (Gene); SEQ ID NO: 5632, ATR (Gene); SEQ ID NO: 5633, ATR (Gene); SEQ ID NO: 5634, ATR (Gene); SEQ ID NO: 5635, ATR (Gene); SEQ ID NO: 5636, 3Q_DLBCL (ARM); SEQ ID NO: 5637, 3Q_DLBCL (ARM); SEQ ID NO: 5638, 3Q_DLBCL (ARM); SEQ ID NO: 5639, 3Q_DLBCL (ARM); SEQ ID NO: 5640, 3Q_DLBCL (ARM); SEQ ID NO: 5641, 3Q_DLBCL (ARM); SEQ ID NO: 5642, 3Q_DLBCL (ARM); SEQ ID NO: 5643, FP (FP); SEQ ID NO: 5644, 3Q_DLBCL (ARM); SEQ ID NO: 5645, 3Q_DLBCL (ARM); SEQ ID NO: 5646, 3Q_DLBCL (ARM); SEQ ID NO: 5647, MSI (MSI); SEQ ID NO: 5648, MSI (MSI); SEQ ID NO: 5649, 3Q_DLBCL (ARM); SEQ ID NO: 5650, 3Q_DLBCL (ARM); SEQ ID NO: 5651, 3Q_DLBCL (ARM); SEQ ID NO: 5652, 3Q_DLBCL (ARM); SEQ ID NO: 5653, 3Q_DLBCL (ARM); SEQ ID NO: 5654, 3Q_DLBCL (ARM); SEQ ID NO: 5655, 3Q_DLBCL (ARM); SEQ ID NO: 5656, 3Q_DLBCL (ARM); SEQ ID NO: 5657, 3Q_DLBCL (ARM); SEQ ID NO: 5658, 3Q_DLBCL (ARM); SEQ ID NO: 5659, TBL1XR1 (Gene); SEQ ID NO: 5660, TBL1XR1 (Gene); SEQ ID NO: 5661, TBL1XR1_SV (SV); SEQ ID NO: 5662, TBL1XR1_SV (SV); SEQ ID NO: 5663, TBL1XR1_SV (SV); SEQ ID NO: 5664, TBL1XR1_SV (SV); SEQ ID NO: 5665, TBL1XR1 (Gene); SEQ ID NO: 5666, TBL1XR1 (Gene); SEQ ID NO: 5667, TBL1XR1_SV (SV); SEQ ID NO: 5668, TBL1XR1_SV (SV); SEQ ID NO: 5669, TBL1XR1_SV (SV); SEQ ID NO: 5670, TBL1XR1_SV (SV); SEQ ID NO: 5671, TBL1XR1 (Gene); SEQ ID NO: 5672, TBL1XR1 (Gene); SEQ ID NO: 5673, TBL1XR1 (Gene); SEQ ID NO: 5674, TBL1XR1 (Gene); SEQ ID NO: 5675, TBL1XR1 (Gene); SEQ ID NO: 5676, TBL1XR1 (Gene); SEQ ID NO: 5677, TBL1XR1_SV (SV); SEQ ID NO: 5678, TBL1XR1_SV (SV); SEQ ID NO: 5679, TBL1XR1_SV (SV); SEQ ID NO: 5680, TBL1XR1 (Gene); SEQ ID NO: 5681, TBL1XR1 (Gene); SEQ ID NO: 5682, TBL1XR1_SV (SV); SEQ ID NO: 5683, TBL1XR1_SV (SV); SEQ ID NO: 5684, TBL1XR1_SV (SV); SEQ ID NO: 5685, TBL1XR1_SV (SV); SEQ ID NO: 5686, TBL1XR1_SV (SV); SEQ ID NO: 5687, TBL1XR1_SV (SV); SEQ ID NO: 5688, TBL1XR1_SV (SV); SEQ ID NO: 5689, TBL1XR1_SV (SV); SEQ ID NO: 5690, TBL1XR1_SV (SV); SEQ ID NO: 5691, TBL1XR1_SV (SV); SEQ ID NO: 5692, TBL1XR1_SV (SV); SEQ ID NO: 5693, TBL1XR1_SV (SV); SEQ ID NO: 5694, TBL1XR1_SV (SV); SEQ ID NO: 5695, TBL1XR1_SV (SV); SEQ ID NO: 5696, TBL1XR1_SV (SV); SEQ ID NO: 5697, TBL1XR1_SV (SV); SEQ ID NO: 5698, TBL1XR1_SV (SV); SEQ ID NO: 5699, TBL1XR1_SV (SV); SEQ ID NO: 5700, TBL1XR1_SV (SV); SEQ ID NO: 5701, TBL1XR1_SV (SV); SEQ ID NO: 5702, TBL1XR1_SV (SV); SEQ ID NO: 5703, TBL1XR1_SV (SV); SEQ ID NO: 5704, TBL1XR1_SV (SV); SEQ ID NO: 5705, TBL1XR1_SV (SV); SEQ ID NO: 5706, TBL1XR1_SV (SV); SEQ ID NO: 5707, TBL1XR1_SV (SV); SEQ ID NO: 5708, TBL1XR1_SV (SV); SEQ ID NO: 5709, TBL1XR1_SV (SV); SEQ ID NO: 5710, TBL1XR1_SV (SV); SEQ ID NO: 5711, TBL1XR1_SV (SV); SEQ ID NO: 5712, TBL1XR1_SV (SV); SEQ ID NO: 5713, TBL1XR1_SV (SV); SEQ ID NO: 5714, TBL1XR1_SV (SV); SEQ ID NO: 5715, TBL1XR1_SV (SV); SEQ ID NO: 5716, TBL1XR1_SV (SV); SEQ ID NO: 5717, TBL1XR1_SV (SV); SEQ ID NO: 5718, TBL1XR1_SV (SV); SEQ ID NO: 5719, TBL1XR1_SV (SV); SEQ ID NO: 5720, TBL1XR1_SV (SV); SEQ ID NO: 5721, TBL1XR1_SV (SV); SEQ ID NO: 5722, TBL1XR1_SV (SV); SEQ ID NO: 5723, TBL1XR1_SV (SV); SEQ ID NO: 5724, TBL1XR1_SV (SV); SEQ ID NO: 5725, TBL1XR1_SV (SV); SEQ ID NO: 5726, TBL1XR1_SV (SV); SEQ ID NO: 5727, TBL1XR1_SV (SV); SEQ ID NO: 5728, TBL1XR1_SV (SV); SEQ ID NO: 5729, TBL1XR1_SV (SV); SEQ ID NO: 5730, TBL1XR1_SV (SV); SEQ ID NO: 5731, TBL1XR1_SV (SV); SEQ ID NO: 5732, TBL1XR1_SV (SV); SEQ ID NO: 5733, TBL1XR1_SV (SV); SEQ ID NO: 5734, TBL1XR1_SV (SV); SEQ ID NO: 5735, TBL1XR1_SV (SV); SEQ ID NO: 5736, TBL1XR1_SV (SV); SEQ ID NO: 5737, TBL1XR1_SV (SV); SEQ ID NO: 5738, TBL1XR1_SV (SV); SEQ ID NO: 5739, TBL1XR1_SV (SV); SEQ ID NO: 5740, TBL1XR1_SV (SV); SEQ ID NO: 5741, TBL1XR1_SV (SV); SEQ ID NO: 5742, 3Q_DLBCL (ARM); SEQ ID NO: 5743, 3Q_DLBCL (ARM); SEQ ID NO: 5744, PIK3CA (Gene); SEQ ID NO: 5745, PIK3CA (Gene); SEQ ID NO: 5746, PIK3CA (Gene); SEQ ID NO: 5747, PIK3CA (Gene); SEQ ID NO: 5748, PIK3CA (Gene); SEQ ID NO: 5749, PIK3CA (Gene); SEQ ID NO: 5750, PIK3CA (Gene); SEQ ID NO: 5751, PIK3CA (Gene); SEQ ID NO: 5752, PIK3CA (Gene); SEQ ID NO: 5753, PIK3CA (Gene); SEQ ID NO: 5754, PIK3CA (Gene); SEQ ID NO: 5755, PIK3CA (Gene); SEQ ID NO: 5756, PIK3CA (Gene); SEQ ID NO: 5757, PIK3CA (Gene); SEQ ID NO: 5758, PIK3CA (Gene); SEQ ID NO: 5759, PIK3CA (Gene); SEQ ID NO: 5760, PIK3CA (Gene); SEQ ID NO: 5761, PIK3CA (Gene); SEQ ID NO: 5762, PIK3CA (Gene); SEQ ID NO: 5763, PIK3CA (Gene); SEQ ID NO: 5764, PIK3CA (Gene); SEQ ID NO: 5765, PIK3CA (Gene); SEQ ID NO: 5766, 3Q_DLBCL (ARM); SEQ ID NO: 5767, KLHL6 (Gene); SEQ ID NO: 5768, KLHL6 (Gene); SEQ ID NO: 5769, KLHL6 (Gene); SEQ ID NO: 5770, KLHL6 (Gene); SEQ ID NO: 5771, KLHL6 (Gene); SEQ ID NO: 5772, KLHL6 (Gene); SEQ ID NO: 5773, KLHL6 (Gene); SEQ ID NO: 5774, 3Q_DLBCL (ARM); SEQ ID NO: 5775, 3Q_DLBCL (ARM); SEQ ID NO: 5776, 3Q_DLBCL (ARM); SEQ ID NO: 5777, FP (FP); SEQ ID NO: 5778, 3Q_DLBCL (ARM); SEQ ID NO: 5779, 3q28_DLBCL (FOCAL); SEQ ID NO: 5780, BCL6 (Gene); SEQ ID NO: 5781, BCL6 (Gene); SEQ ID NO: 5782, BCL6 (Gene); SEQ ID NO: 5783, BCL6 (Gene); SEQ ID NO: 5784, BCL6 (Gene); SEQ ID NO: 5785, BCL6 (Gene); SEQ ID NO: 5786, BCL6 (Gene); SEQ ID NO: 5787, BCL6 (Gene); SEQ ID NO: 5788, BCL6 (Gene); SEQ ID NO: 5789, BCL6 (Gene); SEQ ID NO: 5790, BCL6 (Gene); SEQ ID NO: 5791, BCL6 (Gene); SEQ ID NO: 5792, BCL6 (Gene); SEQ ID NO: 5793, BCL6 (Gene); SEQ ID NO: 5794, BCL6 (Gene); SEQ ID NO: 5795, BCL6_SV (SV); SEQ ID NO: 5796, BCL6_SV (SV); SEQ ID NO: 5797, BCL6_SV (SV); SEQ ID NO: 5798, BCL6_SV (SV); SEQ ID NO: 5799, BCL6_SV (SV); SEQ ID NO: 5800, BCL6_SV (SV); SEQ ID NO: 5801, BCL6_SV (SV); SEQ ID NO: 5802, 3q28 DLBCL (FOCAL); SEQ ID NO: 5803, 3q28 DLBCL (FOCAL); SEQ ID NO: 5804, 3q28 DLBCL (FOCAL); SEQ ID NO: 5805, 3q28 DLBCL (FOCAL); SEQ ID NO: 5806, 3q28_DLBCL (FOCAL); SEQ ID NO: 5807, 3q28_DLBCL (FOCAL); SEQ ID NO: 5808, 3q28_DLBCL (FOCAL); SEQ ID NO: 5809, 3q28_DLBCL (FOCAL); SEQ ID NO: 5810, 3q28 DLBCL (FOCAL); SEQ ID NO: 5811, TP63 (Gene); SEQ ID NO: 5812, TP63 (Gene); SEQ ID NO: 5813, TP63 (Gene); SEQ ID NO: 5814, TP63_SV (SV); SEQ ID NO: 5815, TP63_SV (SV); SEQ ID NO: 5816, TP63_SV (SV); SEQ ID NO: 5817, TP63_SV (SV); SEQ ID NO: 5818, TP63_SV (SV); SEQ ID NO: 5819, TP63_SV (SV); SEQ ID NO: 5820, TP63_SV (SV); SEQ ID NO: 5821, TP63_SV (SV); SEQ ID NO: 5822, TP63_SV (SV); SEQ ID NO: 5823, TP63_SV (SV); SEQ ID NO: 5824, TP63_SV (SV); SEQ ID NO: 5825, TP63_SV (SV); SEQ ID NO: 5826, TP63_SV (SV); SEQ ID NO: 5827, TP63_SV (SV); SEQ ID NO: 5828, TP63_SV (SV); SEQ ID NO: 5829, TP63_SV (SV); SEQ ID NO: 5830, TP63_SV (SV); SEQ ID NO: 5831, TP63_SV (SV); SEQ ID NO: 5832, TP63_SV (SV); SEQ ID NO: 5833, TP63_SV (SV); SEQ ID NO: 5834, TP63_SV (SV); SEQ ID NO: 5835, TP63_SV (SV); SEQ ID NO: 5836, TP63_SV (SV); SEQ ID NO: 5837, TP63_SV (SV); SEQ ID NO: 5838, TP63_SV (SV); SEQ ID NO: 5839, TP63_SV (SV); SEQ ID NO: 5840, TP63_SV (SV); SEQ ID NO: 5841, TP63_SV (SV); SEQ ID NO: 5842, TP63_SV (SV); SEQ ID NO: 5843, TP63_SV (SV); SEQ ID NO: 5844, TP63_SV (SV); SEQ ID NO: 5845, TP63_SV (SV); SEQ ID NO: 5846, TP63_SV (SV); SEQ ID NO: 5847, TP63_SV (SV); SEQ ID NO: 5848, TP63_SV (SV); SEQ ID NO: 5849, TP63_SV (SV); SEQ ID NO: 5850, TP63_SV (SV); SEQ ID NO: 5851, TP63_SV (SV); SEQ ID NO: 5852, TP63_SV (SV); SEQ ID NO: 5853, TP63_SV (SV); SEQ ID NO: 5854, TP63_SV (SV); SEQ ID NO: 5855, TP63_SV (SV); SEQ ID NO: 5856, TP63_SV (SV); SEQ ID NO: 5857, TP63_SV (SV); SEQ ID NO: 5858, TP63_SV (SV); SEQ ID NO: 5859, TP63_SV (SV); SEQ ID NO: 5860, TP63_SV (SV); SEQ ID NO: 5861, TP63_SV (SV); SEQ ID NO: 5862, TP63_SV (SV); SEQ ID NO: 5863, TP63_SV (SV); SEQ ID NO: 5864, TP63_SV (SV); SEQ ID NO: 5865, TP63_SV (SV); SEQ ID NO: 5866, TP63_SV (SV); SEQ ID NO: 5867, TP63_SV (SV); SEQ ID NO: 5868, TP63_SV (SV); SEQ ID NO: 5869, TP63_SV (SV); SEQ ID NO: 5870, TP63_SV (SV); SEQ ID NO: 5871, TP63_SV (SV); SEQ ID NO: 5872, TP63_SV (SV); SEQ ID NO: 5873, TP63_SV (SV); SEQ ID NO: 5874, TP63_SV (SV); SEQ ID NO: 5875, TP63_SV (SV); SEQ ID NO: 5876, TP63_SV (SV); SEQ ID NO: 5877, TP63_SV (SV); SEQ ID NO: 5878, TP63_SV (SV); SEQ ID NO: 5879, TP63_SV (SV); SEQ ID NO: 5880, TP63_SV (SV); SEQ ID NO: 5881, TP63_SV (SV); SEQ ID NO: 5882, TP63_SV (SV); SEQ ID NO: 5883, TP63_SV (SV); SEQ ID NO: 5884, TP63_SV (SV); SEQ ID NO: 5885, TP63_SV (SV); SEQ ID NO: 5886, TP63_SV (SV); SEQ ID NO: 5887, TP63_SV (SV); SEQ ID NO: 5888, TP63_SV (SV); SEQ ID NO: 5889, TP63_SV (SV); SEQ ID NO: 5890, TP63_SV (SV); SEQ ID NO: 5891, TP63_SV (SV); SEQ ID NO: 5892, TP63_SV (SV); SEQ ID NO: 5893, TP63_SV (SV); SEQ ID NO: 5894, TP63_SV (SV); SEQ ID NO: 5895, TP63_SV (SV); SEQ ID NO: 5896, TP63_SV (SV); SEQ ID NO: 5897, TP63_SV (SV); SEQ ID NO: 5898, TP63_SV (SV); SEQ ID NO: 5899, TP63_SV (SV); SEQ ID NO: 5900, TP63_SV (SV); SEQ ID NO: 5901, TP63_SV (SV); SEQ ID NO: 5902, TP63_SV (SV); SEQ ID NO: 5903, TP63_SV (SV); SEQ ID NO: 5904, TP63_SV (SV); SEQ ID NO: 5905, TP63_SV (SV); SEQ ID NO: 5906, TP63_SV (SV); SEQ ID NO: 5907, TP63_SV (SV); SEQ ID NO: 5908, TP63_SV (SV); SEQ ID NO: 5909, TP63_SV (SV); SEQ ID NO: 5910, TP63_SV (SV); SEQ ID NO: 5911, TP63_SV (SV); SEQ ID NO: 5912, TP63_SV (SV); SEQ ID NO: 5913, TP63_SV (SV); SEQ ID NO: 5914, TP63_SV (SV); SEQ ID NO: 5915, TP63_SV (SV); SEQ ID NO: 5916, TP63_SV (SV); SEQ ID NO: 5917, TP63_SV (SV); SEQ ID NO: 5918, TP63_SV (SV); SEQ ID NO: 5919, TP63_SV (SV); SEQ ID NO: 5920, TP63_SV (SV); SEQ ID NO: 5921, TP63_SV (SV); SEQ ID NO: 5922, TP63_SV (SV); SEQ ID NO: 5923, TP63_SV (SV); SEQ ID NO: 5924, TP63_SV (SV); SEQ ID NO: 5925, TP63_SV (SV); SEQ ID NO: 5926, TP63_SV (SV); SEQ ID NO: 5927, TP63_SV (SV); SEQ ID NO: 5928, TP63_SV (SV); SEQ ID NO: 5929, TP63_SV (SV); SEQ ID NO: 5930, TP63_SV (SV); SEQ ID NO: 5931, TP63_SV (SV); SEQ ID NO: 5932, TP63_SV (SV); SEQ ID NO: 5933, TP63_SV (SV); SEQ ID NO: 5934, TP63_SV (SV); SEQ ID NO: 5935, TP63_SV (SV); SEQ ID NO: 5936, TP63_SV (SV); SEQ ID NO: 5937, TP63_SV (SV); SEQ ID NO: 5938, TP63_SV (SV); SEQ ID NO: 5939, TP63_SV (SV); SEQ ID NO: 5940, TP63_SV (SV); SEQ ID NO: 5941, TP63_SV (SV); SEQ ID NO: 5942, TP63_SV (SV); SEQ ID NO: 5943, TP63_SV (SV); SEQ ID NO: 5944, TP63_SV (SV); SEQ ID NO: 5945, TP63_SV (SV); SEQ ID NO: 5946, TP63_SV (SV); SEQ ID NO: 5947, TP63_SV (SV); SEQ ID NO: 5948, TP63_SV (SV); SEQ ID NO: 5949, TP63_SV (SV); SEQ ID NO: 5950, TP63_SV (SV); SEQ ID NO: 5951, TP63_SV (SV); SEQ ID NO: 5952, TP63_SV (SV); SEQ ID NO: 5953, TP63_SV (SV); SEQ ID NO: 5954, TP63_SV (SV); SEQ ID NO: 5955, TP63_SV (SV); SEQ ID NO: 5956, TP63_SV (SV); SEQ ID NO: 5957, TP63_SV (SV); SEQ ID NO: 5958, TP63_SV (SV); SEQ ID NO: 5959, TP63_SV (SV); SEQ ID NO: 5960, TP63_SV (SV); SEQ ID NO: 5961, TP63_SV (SV); SEQ ID NO: 5962, TP63_SV (SV); SEQ ID NO: 5963, TP63_SV (SV); SEQ ID NO: 5964, TP63_SV (SV); SEQ ID NO: 5965, TP63_SV (SV); SEQ ID NO: 5966, TP63_SV (SV); SEQ ID NO: 5967, TP63_SV (SV); SEQ ID NO: 5968, TP63_SV (SV); SEQ ID NO: 5969, TP63_SV (SV); SEQ ID NO: 5970, TP63_SV (SV); SEQ ID NO: 5971, TP63_SV (SV); SEQ ID NO: 5972, TP63_SV (SV); SEQ ID NO: 5973, TP63_SV (SV); SEQ ID NO: 5974, TP63_SV (SV); SEQ ID NO: 5975, TP63_SV (SV); SEQ ID NO: 5976, TP63_SV (SV); SEQ ID NO: 5977, TP63_SV (SV); SEQ ID NO: 5978, TP63_SV (SV); SEQ ID NO: 5979, TP63_SV (SV); SEQ ID NO: 5980, TP63_SV (SV); SEQ ID NO: 5981, TP63_SV (SV); SEQ ID NO: 5982, TP63_SV (SV); SEQ ID NO: 5983, TP63_SV (SV); SEQ ID NO: 5984, TP63_SV (SV); SEQ ID NO: 5985, TP63_SV (SV); SEQ ID NO: 5986, TP63_SV (SV); SEQ ID NO: 5987, TP63_SV (SV); SEQ ID NO: 5988, TP63_SV (SV); SEQ ID NO: 5989, TP63_SV (SV); SEQ ID NO: 5990, TP63_SV (SV); SEQ ID NO: 5991, TP63_SV (SV); SEQ ID NO: 5992, TP63_SV (SV); SEQ ID NO: 5993, TP63_SV (SV); SEQ ID NO: 5994, TP63_SV (SV); SEQ ID NO: 5995, TP63_SV (SV); SEQ ID NO: 5996, TP63_SV (SV); SEQ ID NO: 5997, TP63_SV (SV); SEQ ID NO: 5998, TP63_SV (SV); SEQ ID NO: 5999, TP63_SV (SV); SEQ ID NO: 6000, TP63_SV (SV); SEQ ID NO: 6001, TP63_SV (SV); SEQ ID NO: 6002, TP63_SV (SV); SEQ ID NO: 6003, TP63 (Gene); SEQ ID NO: 6004, TP63 (Gene); SEQ ID NO: 6005, TP63 (Gene); SEQ ID NO: 6006, TP63 (Gene); SEQ ID NO: 6007, TP63 (Gene); SEQ ID NO: 6008, TP63 (Gene); SEQ ID NO: 6009, TP63 (Gene); SEQ ID NO: 6010, TP63 (Gene); SEQ ID NO: 6011, TP63 (Gene); SEQ ID NO: 6012, TP63 (Gene); SEQ ID NO: 6013, TP63 (Gene); SEQ ID NO: 6014, 3q28_DLBCL (FOCAL); SEQ ID NO: 6015, 3q28_DLBCL (FOCAL); SEQ ID NO: 6016, 3q28 DLBCL (FOCAL); SEQ ID NO: 6017, 3q28 DLBCL (FOCAL); SEQ ID NO: 6018, 3q28_DLBCL (FOCAL); SEQ ID NO: 6019, 3q28_DLBCL (FOCAL); SEQ ID NO: 6020, 3q28_DLBCL (FOCAL); SEQ ID NO: 6021, 3q28_DLBCL (FOCAL); SEQ ID NO: 6022, 3q28_DLBCL (FOCAL); SEQ ID NO: 6023, 3q28_DLBCL (FOCAL); SEQ ID NO: 6024, 3q28_DLBCL (FOCAL); SEQ ID NO: 6025, 3q28_DLBCL (FOCAL); SEQ ID NO: 6026, 3q28_DLBCL (FOCAL); SEQ ID NO: 6027, 3q28_DLBCL (FOCAL); SEQ ID NO: 6028, 3q28_DLBCL (FOCAL); SEQ ID NO: 6029, 3q28_DLBCL (FOCAL); SEQ ID NO: 6030, 3q28_DLBCL (FOCAL); SEQ ID NO: 6031, 3q28_DLBCL (FOCAL); SEQ ID NO: 6032, 3q28_DLBCL (FOCAL); SEQ ID NO: 6033, 3q28_DLBCL (FOCAL); SEQ ID NO: 6034, 3q28_DLBCL (FOCAL); SEQ ID NO: 6035, 3q28_DLBCL (FOCAL); SEQ ID NO: 6036, 3q28_DLBCL (FOCAL); SEQ ID NO: 6037, 3q28 DLBCL (FOCAL); SEQ ID NO: 6038, 3q28_DLBCL (FOCAL); SEQ ID NO: 6039, 3q28_DLBCL (FOCAL); SEQ ID NO: 6040, 3q28_DLBCL (FOCAL); SEQ ID NO: 6041, 3q28_DLBCL (FOCAL); SEQ ID NO: 6042, 3q28_DLBCL (FOCAL); SEQ ID NO: 6043, 3q28_DLBCL (FOCAL); SEQ ID NO: 6044, 3q28_DLBCL (FOCAL); SEQ ID NO: 6045, 3q28_DLBCL (FOCAL); SEQ ID NO: 6046, 3q28_DLBCL (FOCAL); SEQ ID NO: 6047, 3q28 DLBCL (FOCAL); SEQ ID NO: 6048, 3q28_DLBCL (FOCAL); SEQ ID NO: 6049, 3q28_DLBCL (FOCAL); SEQ ID NO: 6050, 3q28_DLBCL (FOCAL); SEQ ID NO: 6051, 3q28_DLBCL (FOCAL); SEQ ID NO: 6052, 3q28_DLBCL (FOCAL); SEQ ID NO: 6053, 4P (ARM); SEQ ID NO: 6054, NSD2 (Gene); SEQ ID NO: 6055, NSD2 (Gene); SEQ ID NO: 6056, NSD2 (Gene); SEQ ID NO: 6057, NSD2 (Gene); SEQ ID NO: 6058, NSD2 (Gene); SEQ ID NO: 6059, NSD2 (Gene); SEQ ID NO: 6060, NSD2 (Gene); SEQ ID NO: 6061, NSD2 (Gene); SEQ ID NO: 6062, NSD2 (Gene); SEQ ID NO: 6063, NSD2 (Gene); SEQ ID NO: 6064, NSD2 (Gene); SEQ ID NO: 6065, NSD2 (Gene); SEQ ID NO: 6066, NSD2 (Gene); SEQ ID NO: 6067, NSD2 (Gene); SEQ ID NO: 6068, NSD2 (Gene); SEQ ID NO: 6069, NSD2 (Gene); SEQ ID NO: 6070, NSD2 (Gene); SEQ ID NO: 6071, NSD2 (Gene); SEQ ID NO: 6072, NSD2 (Gene); SEQ ID NO: 6073, NSD2 (Gene); SEQ ID NO: 6074, NSD2 (Gene); SEQ ID NO: 6075, NSD2 (Gene); SEQ ID NO: 6076, NSD2 (Gene); SEQ ID NO: 6077, NSD2 (Gene); SEQ ID NO: 6078, NSD2 (Gene); SEQ ID NO: 6079, MSI (MSI); SEQ ID NO: 6080, MSI (MSI); SEQ ID NO: 6081, 4P (ARM); SEQ ID NO: 6082, 4P (ARM); SEQ ID NO: 6083, 4P (ARM); SEQ ID NO: 6084, 4P (ARM); SEQ ID NO: 6085, 4P (ARM); SEQ ID NO: 6086, 4P (ARM); SEQ ID NO: 6087, 4P (ARM); SEQ ID NO: 6088, 4P (ARM); SEQ ID NO: 6089, FP (FP); SEQ ID NO: 6090, 4P (ARM); SEQ ID NO: 6091, 4P (ARM); SEQ ID NO: 6092, 4P (ARM); SEQ ID NO: 6093, 4P (ARM); SEQ ID NO: 6094, 4P (ARM); SEQ ID NO: 6095, MSI (MSI); SEQ ID NO: 6096, MSI (MSI); SEQ ID NO: 6097, 4P (ARM); SEQ ID NO: 6098, 4P (ARM); SEQ ID NO: 6099, 4P (ARM); SEQ ID NO: 6100, 4P (ARM); SEQ ID NO: 6101, 4P (ARM); SEQ ID NO: 6102, 4P (ARM); SEQ ID NO: 6103, 4P (ARM); SEQ ID NO: 6104, 4P (ARM); SEQ ID NO: 6105, 4P (ARM); SEQ ID NO: 6106, SEL1L3 (Gene); SEQ ID NO: 6107, SEL1L3 (Gene); SEQ ID NO: 6108, SEL1L3 (Gene); SEQ ID NO: 6109, SEL1L3 (Gene); SEQ ID NO: 6110, SEL1L3 (Gene); SEQ ID NO: 6111, SEL1L3 (Gene); SEQ ID NO: 6112, SEL1L3 (Gene); SEQ ID NO: 6113, SEL1L3 (Gene); SEQ ID NO: 6114, SEL1L3 (Gene); SEQ ID NO: 6115, SEL1L3 (Gene); SEQ ID NO: 6116, SEL1L3 (Gene); SEQ ID NO: 6117, SEL1L3 (Gene); SEQ ID NO: 6118, SEL1L3 (Gene); SEQ ID NO: 6119, SEL1L3 (Gene); SEQ ID NO: 6120, SEL1L3 (Gene); SEQ ID NO: 6121, SEL1L3 (Gene); SEQ ID NO: 6122, SEL1L3 (Gene); SEQ ID NO: 6123, SEL1L3 (Gene); SEQ ID NO: 6124, SEL1L3 (Gene); SEQ ID NO: 6125, SEL1L3 (Gene); SEQ ID NO: 6126, SEL1L3 (Gene); SEQ ID NO: 6127, SEL1L3 (Gene); SEQ ID NO: 6128, SEL1L3 (Gene); SEQ ID NO: 6129, SEL1L3 (Gene); SEQ ID NO: 6130, SEL1L3 (Gene); SEQ ID NO: 6131, SEL1L3 (Gene); SEQ ID NO: 6132, 4P (ARM); SEQ ID NO: 6133, FP (FP); SEQ ID NO: 6134, 4P (ARM); SEQ ID NO: 6135, 4P (ARM); SEQ ID NO: 6136, 4P (ARM); SEQ ID NO: 6137, 4P (ARM); SEQ ID NO: 6138, 4P (ARM); SEQ ID NO: 6139, 4P (ARM); SEQ ID NO: 6140, 4P (ARM); SEQ ID NO: 6141, 4P (ARM); SEQ ID NO: 6142, 4P (ARM); SEQ ID NO: 6143, 4P (ARM); SEQ ID NO: 6144, 4P (ARM); SEQ ID NO: 6145, 4P (ARM); SEQ ID NO: 6146, 4P (ARM); SEQ ID NO: 6147, 4P (ARM); SEQ ID NO: 6148, 4P (ARM); SEQ ID NO: 6149, 4P (ARM); SEQ ID NO: 6150, 4P (ARM); SEQ ID NO: 6151, 4P (ARM); SEQ ID NO: 6152, 4P (ARM); SEQ ID NO: 6153, KIT (Gene); SEQ ID NO: 6154, KIT (Gene); SEQ ID NO: 6155, KIT (Gene); SEQ ID NO: 6156, KIT (Gene); SEQ ID NO: 6157, KIT (Gene); SEQ ID NO: 6158, KIT (Gene); SEQ ID NO: 6159, KIT (Gene); SEQ ID NO: 6160, KIT (Gene); SEQ ID NO: 6161, KIT (Gene); SEQ ID NO: 6162, KIT (Gene); SEQ ID NO: 6163, KIT (Gene); SEQ ID NO: 6164, KIT (Gene); SEQ ID NO: 6165, KIT (Gene); SEQ ID NO: 6166, KIT (Gene); SEQ ID NO: 6167, KIT (Gene); SEQ ID NO: 6168, KIT (Gene); SEQ ID NO: 6169, KIT (Gene); SEQ ID NO: 6170, KIT (Gene); SEQ ID NO: 6171, KIT (Gene); SEQ ID NO: 6172, KIT (Gene); SEQ ID NO: 6173, KIT (Gene); SEQ ID NO: 6174, 4P (ARM); SEQ ID NO: 6175, 4P (ARM); SEQ ID NO: 6176, 4P (ARM); SEQ ID NO: 6177, 4P (ARM); SEQ ID NO: 6178, 4P (ARM); SEQ ID NO: 6179, 4P (ARM); SEQ ID NO: 6180, 4P (ARM); SEQ ID NO: 6181, FP (FP); SEQ ID NO: 6182, 4q21.22_DLBCL (FOCAL); SEQ ID NO: 6183, 4q21.22_DLBCL (FOCAL); SEQ ID NO: 6184, 4q21.22_DLBCL (FOCAL); SEQ ID NO: 6185, 4q21.22_DLBCL (FOCAL); SEQ ID NO: 6186, 4q21.22_DLBCL (FOCAL); SEQ ID NO: 6187, 4q21.22_DLBCL (FOCAL); SEQ ID NO: 6188, 4q21.22_DLBCL (FOCAL); SEQ ID NO: 6189, 4q21.22_DLBCL (FOCAL); SEQ ID NO: 6190, 4q21.22_DLBCL (FOCAL); SEQ ID NO: 6191, 4q21.22_DLBCL (FOCAL); SEQ ID NO: 6192, 4q21.22_DLBCL (FOCAL); SEQ ID NO: 6193, 4q21.22_DLBCL (FOCAL); SEQ ID NO: 6194, 4q21.22_DLBCL (FOCAL); SEQ ID NO: 6195, 4q21.22_DLBCL (FOCAL); SEQ ID NO: 6196, 4q21.22_DLBCL (FOCAL); SEQ ID NO: 6197, 4q21.22_DLBCL (FOCAL); SEQ ID NO: 6198, 4q21.22_DLBCL (FOCAL); SEQ ID NO: 6199, 4q21.22_DLBCL (FOCAL); SEQ ID NO: 6200, 4q21.22_DLBCL (FOCAL); SEQ ID NO: 6201, 4q21.22_DLBCL (FOCAL); SEQ ID NO: 6202, 4q21.22_DLBCL (FOCAL); SEQ ID NO: 6203, 4q21.22_DLBCL (FOCAL); SEQ ID NO: 6204, 4q21.22_DLBCL (FOCAL); SEQ ID NO: 6205, 4q21.22_DLBCL (FOCAL); SEQ ID NO: 6206, 4q21.22_DLBCL (FOCAL); SEQ ID NO: 6207, 4q21.22_DLBCL (FOCAL); SEQ ID NO: 6208, 4q21.22_DLBCL (FOCAL); SEQ ID NO: 6209, 4q21.22_DLBCL (FOCAL); SEQ ID NO: 6210, 4q21.22_DLBCL (FOCAL); SEQ ID NO: 6211, 4q21.22_DLBCL (FOCAL); SEQ ID NO: 6212, 4q21.22_DLBCL (FOCAL); SEQ ID NO: 6213, 4q21.22_DLBCL (FOCAL); SEQ ID NO: 6214, 4q21.22_DLBCL (FOCAL); SEQ ID NO: 6215, 4q21.22_DLBCL (FOCAL); SEQ ID NO: 6216, 4q21.22_DLBCL (FOCAL); SEQ ID NO: 6217, 4q21.22_DLBCL (FOCAL); SEQ ID NO: 6218, HNRNPD (Gene); SEQ ID NO: 6219, HNRNPD (Gene); SEQ ID NO: 6220, HNRNPD (Gene); SEQ ID NO: 6221, HNRNPD (Gene); SEQ ID NO: 6222, HNRNPD (Gene); SEQ ID NO: 6223, HNRNPD (Gene); SEQ ID NO: 6224, HNRNPD (Gene); SEQ ID NO: 6225, HNRNPD (Gene); SEQ ID NO: 6226, 4q21.22_DLBCL (FOCAL); SEQ ID NO: 6227, 4q21.22_DLBCL (FOCAL); SEQ ID NO: 6228, 4q21.22_DLBCL (FOCAL); SEQ ID NO: 6229, MSI (MSI); SEQ ID NO: 6230, MSI (MSI); SEQ ID NO: 6231, 4q21.22_DLBCL (FOCAL); SEQ ID NO: 6232, 4q21.22_DLBCL (FOCAL); SEQ ID NO: 6233, 4q21.22_DLBCL (FOCAL); SEQ ID NO: 6234, 4q21.22_DLBCL (FOCAL); SEQ ID NO: 6235, 4q21.22_DLBCL (FOCAL); SEQ ID NO: 6236, 4q21.22_DLBCL (FOCAL); SEQ ID NO: 6237, 4q21.22_DLBCL (FOCAL); SEQ ID NO: 6238, 4q21.22_DLBCL (FOCAL); SEQ ID NO: 6239, 4q21.22_DLBCL (FOCAL); SEQ ID NO: 6240, WDFY3 (Gene); SEQ ID NO: 6241, WDFY3 (Gene); SEQ ID NO: 6242, WDFY3 (Gene); SEQ ID NO: 6243, WDFY3 (Gene); SEQ ID NO: 6244, WDFY3 (Gene); SEQ ID NO: 6245, WDFY3 (Gene); SEQ ID NO: 6246, WDFY3 (Gene); SEQ ID NO: 6247, WDFY3 (Gene); SEQ ID NO: 6248, WDFY3 (Gene); SEQ ID NO: 6249, WDFY3 (Gene); SEQ ID NO: 6250, WDFY3 (Gene); SEQ ID NO: 6251, WDFY3 (Gene); SEQ ID NO: 6252, WDFY3 (Gene); SEQ ID NO: 6253, WDFY3 (Gene); SEQ ID NO: 6254, WDFY3 (Gene); SEQ ID NO: 6255, WDFY3 (Gene); SEQ ID NO: 6256, WDFY3 (Gene); SEQ ID NO: 6257, WDFY3 (Gene); SEQ ID NO: 6258, WDFY3 (Gene); SEQ ID NO: 6259, WDFY3 (Gene); SEQ ID NO: 6260, WDFY3 (Gene); SEQ ID NO: 6261, WDFY3 (Gene); SEQ ID NO: 6262, WDFY3 (Gene); SEQ ID NO: 6263, WDFY3 (Gene); SEQ ID NO: 6264, WDFY3 (Gene); SEQ ID NO: 6265, WDFY3 (Gene); SEQ ID NO: 6266, WDFY3 (Gene); SEQ ID NO: 6267, WDFY3 (Gene); SEQ ID NO: 6268, WDFY3 (Gene); SEQ ID NO: 6269, WDFY3 (Gene); SEQ ID NO: 6270, WDFY3 (Gene); SEQ ID NO: 6271, WDFY3 (Gene); SEQ ID NO: 6272, WDFY3 (Gene); SEQ ID NO: 6273, WDFY3 (Gene); SEQ ID NO: 6274, WDFY3 (Gene); SEQ ID NO: 6275, WDFY3 (Gene); SEQ ID NO: 6276, WDFY3 (Gene); SEQ ID NO: 6277, WDFY3 (Gene); SEQ ID NO: 6278, WDFY3 (Gene); SEQ ID NO: 6279, WDFY3 (Gene); SEQ ID NO: 6280, WDFY3 (Gene); SEQ ID NO: 6281, WDFY3 (Gene); SEQ ID NO: 6282, WDFY3 (Gene); SEQ ID NO: 6283, WDFY3 (Gene); SEQ ID NO: 6284, WDFY3 (Gene); SEQ ID NO: 6285, WDFY3 (Gene); SEQ ID NO: 6286, WDFY3 (Gene); SEQ ID NO: 6287, WDFY3 (Gene); SEQ ID NO: 6288, WDFY3 (Gene); SEQ ID NO: 6289, WDFY3 (Gene); SEQ ID NO: 6290, WDFY3 (Gene); SEQ ID NO: 6291, WDFY3 (Gene); SEQ ID NO: 6292, WDFY3 (Gene); SEQ ID NO: 6293, WDFY3 (Gene); SEQ ID NO: 6294, WDFY3 (Gene); SEQ ID NO: 6295, WDFY3 (Gene); SEQ ID NO: 6296, WDFY3 (Gene); SEQ ID NO: 6297, WDFY3 (Gene); SEQ ID NO: 6298, WDFY3 (Gene); SEQ ID NO: 6299, WDFY3 (Gene); SEQ ID NO: 6300, WDFY3 (Gene); SEQ ID NO: 6301, WDFY3 (Gene); SEQ ID NO: 6302, WDFY3 (Gene); SEQ ID NO: 6303, WDFY3 (Gene); SEQ ID NO: 6304, WDFY3 (Gene); SEQ ID NO: 6305, 4q21.22_DLBCL (FOCAL); SEQ ID NO: 6306, 4q21.22_DLBCL (FOCAL); SEQ ID NO: 6307, 4q21.22_DLBCL (FOCAL); SEQ ID NO: 6308, 4q21.22_DLBCL (FOCAL); SEQ ID NO: 6309, 4q21.22_DLBCL (FOCAL); SEQ ID NO: 6310, 4q21.22_DLBCL (FOCAL); SEQ ID NO: 6311, 4q21.22_DLBCL (FOCAL); SEQ ID NO: 6312, 4q21.22_DLBCL (FOCAL); SEQ ID NO: 6313, 4q21.22_DLBCL (FOCAL); SEQ ID NO: 6314, 4q21.22_DLBCL (FOCAL); SEQ ID NO: 6315, 4q21.22_DLBCL (FOCAL); SEQ ID NO: 6316, 4q21.22_DLBCL (FOCAL); SEQ ID NO: 6317, 4q21.22_DLBCL (FOCAL); SEQ ID NO: 6318, 4q21.22_DLBCL (FOCAL); SEQ ID NO: 6319, 4q21.22_DLBCL (FOCAL); SEQ ID NO: 6320, 4q21.22_DLBCL (FOCAL); SEQ ID NO: 6321, 4q21.22_DLBCL (FOCAL); SEQ ID NO: 6322, 4q21.22_DLBCL (FOCAL); SEQ ID NO: 6323, 4q21.22_DLBCL (FOCAL); SEQ ID NO: 6324, 4q21.22_DLBCL (FOCAL); SEQ ID NO: 6325, 4q21.22_DLBCL (FOCAL); SEQ ID NO: 6326, 4q21.22_DLBCL (FOCAL); SEQ ID NO: 6327, 4q21.22_DLBCL (FOCAL); SEQ ID NO: 6328, 4q21.22_DLBCL (FOCAL); SEQ ID NO: 6329, 4q21.22_DLBCL (FOCAL); SEQ ID NO: 6330, 4q21.22_DLBCL (FOCAL); SEQ ID NO: 6331, 4q21.22_DLBCL (FOCAL); SEQ ID NO: 6332, 4q21.22_DLBCL (FOCAL); SEQ ID NO: 6333, 4q21.22_DLBCL (FOCAL); SEQ ID NO: 6334, 4q21.22_DLBCL (FOCAL); SEQ ID NO: 6335, 4q21.22_DLBCL (FOCAL); SEQ ID NO: 6336, 4q21.22_DLBCL (FOCAL); SEQ ID NO: 6337, 4q21.22_DLBCL (FOCAL); SEQ ID NO: 6338, 4q21.22_DLBCL (FOCAL); SEQ ID NO: 6339, 4q21.22_DLBCL (FOCAL); SEQ ID NO: 6340, 4q21.22_DLBCL (FOCAL); SEQ ID NO: 6341, 4q21.22_DLBCL (FOCAL); SEQ ID NO: 6342, 4q21.22_DLBCL (FOCAL); SEQ ID NO: 6343, 4q21.22_DLBCL (FOCAL); SEQ ID NO: 6344, 4q21.22_DLBCL (FOCAL); SEQ ID NO: 6345, 4q21.22_DLBCL (FOCAL); SEQ ID NO: 6346, 4q21.22_DLBCL (FOCAL); SEQ ID NO: 6347, 4P (ARM); SEQ ID NO: 6348, 4P (ARM); SEQ ID NO: 6349, 4P (ARM); SEQ ID NO: 6350, 4P (ARM); SEQ ID NO: 6351, 4P (ARM); SEQ ID NO: 6352, 4P (ARM); SEQ ID NO: 6353, 4Q (ARM); SEQ ID NO: 6354, 4Q (ARM); SEQ ID NO: 6355, 4Q (ARM); SEQ ID NO: 6356, 4Q (ARM); SEQ ID NO: 6357, 4Q (ARM); SEQ ID NO: 6358, TET2 (Gene); SEQ ID NO: 6359, TET2 (Gene); SEQ ID NO: 6360, TET2 (Gene); SEQ ID NO: 6361, TET2 (Gene); SEQ ID NO: 6362, TET2 (Gene); SEQ ID NO: 6363, TET2 (Gene); SEQ ID NO: 6364, TET2 (Gene); SEQ ID NO: 6365, TET2 (Gene); SEQ ID NO: 6366, TET2 (Gene); SEQ ID NO: 6367, TET2 (Gene); SEQ ID NO: 6368, TET2 (Gene); SEQ ID NO: 6369, TET2 (Gene); SEQ ID NO: 6370, TET2 (Gene); SEQ ID NO: 6371, TET2 (Gene); SEQ ID NO: 6372, TET2 (Gene); SEQ ID NO: 6373, TET2 (Gene); SEQ ID NO: 6374, TET2 (Gene); SEQ ID NO: 6375, TET2 (Gene); SEQ ID NO: 6376, TET2 (Gene); SEQ ID NO: 6377, 4Q (ARM); SEQ ID NO: 6378, 4Q (ARM); SEQ ID NO: 6379, 4Q (ARM); SEQ ID NO: 6380, 4Q (ARM); SEQ ID NO: 6381, 4Q (ARM); SEQ ID NO: 6382, 4Q (ARM); SEQ ID NO: 6383, 4Q (ARM); SEQ ID NO: 6384, 4Q (ARM); SEQ ID NO: 6385, 4Q (ARM); SEQ ID NO: 6386, 4Q (ARM); SEQ ID NO: 6387, 4Q (ARM); SEQ ID NO: 6388, 4Q (ARM); SEQ ID NO: 6389, ANKRD50 (Gene); SEQ ID NO: 6390, ANKRD50 (Gene); SEQ ID NO: 6391, ANKRD50 (Gene); SEQ ID NO: 6392, ANKRD50 (Gene); SEQ ID NO: 6393, ANKRD50 (Gene); SEQ ID NO: 6394, ANKRD50 (Gene); SEQ ID NO: 6395, ANKRD50 (Gene); SEQ ID NO: 6396, ANKRD50 (Gene); SEQ ID NO: 6397, ANKRD50 (Gene); SEQ ID NO: 6398, ANKRD50 (Gene); SEQ ID NO: 6399, ANKRD50 (Gene); SEQ ID NO: 6400, 4Q (ARM); SEQ ID NO: 6401, 4Q (ARM); SEQ ID NO: 6402, 4Q (ARM); SEQ ID NO: 6403, 4Q (ARM); SEQ ID NO: 6404, 4Q (ARM); SEQ ID NO: 6405, 4Q (ARM); SEQ ID NO: 6406, 4Q (ARM); SEQ ID NO: 6407, 4Q (ARM); SEQ ID NO: 6408, 4Q (ARM); SEQ ID NO: 6409, 4Q (ARM); SEQ ID NO: 6410, 4Q (ARM); SEQ ID NO: 6411, 4q35.1_DLBCL (FOCAL); SEQ ID NO: 6412, 4q35.1_DLBCL (FOCAL); SEQ ID NO: 6413, 4q35.1_DLBCL (FOCAL); SEQ ID NO: 6414, 4q35.1_DLBCL (FOCAL); SEQ ID NO: 6415, 4q35.1_DLBCL (FOCAL); SEQ ID NO: 6416, 4q35.1_DLBCL (FOCAL); SEQ ID NO: 6417, 4q35.1_DLBCL (FOCAL); SEQ ID NO: 6418, 4q35.1_DLBCL (FOCAL); SEQ ID NO: 6419, 4q35.1_DLBCL (FOCAL); SEQ ID NO: 6420, 4q35.1_DLBCL (FOCAL); SEQ ID NO: 6421, 4q35.1_DLBCL (FOCAL); SEQ ID NO: 6422, 4q35.1_DLBCL (FOCAL); SEQ ID NO: 6423, 4q35.1_DLBCL (FOCAL); SEQ ID NO: 6424, 4q35.1_DLBCL (FOCAL); SEQ ID NO: 6425, 4q35.1_DLBCL (FOCAL); SEQ ID NO: 6426, 4q35.1_DLBCL (FOCAL); SEQ ID NO: 6427, 4q35.1_DLBCL (FOCAL); SEQ ID NO: 6428, 4q35.1_DLBCL (FOCAL); SEQ ID NO: 6429, 4q35.1_DLBCL (FOCAL); SEQ ID NO: 6430, 4q35.1_DLBCL (FOCAL); SEQ ID NO: 6431, 4q35.1_DLBCL (FOCAL); SEQ ID NO: 6432, 4q35.1_DLBCL (FOCAL); SEQ ID NO: 6433, 4q35.1_DLBCL (FOCAL); SEQ ID NO: 6434, 4q35.1_DLBCL (FOCAL); SEQ ID NO: 6435, 4q35.1_DLBCL (FOCAL); SEQ ID NO: 6436, 4q35.1_DLBCL (FOCAL); SEQ ID NO: 6437, 4q35.1_DLBCL (FOCAL); SEQ ID NO: 6438, 4q35.1_DLBCL (FOCAL); SEQ ID NO: 6439, 4q35.1_DLBCL (FOCAL); SEQ ID NO: 6440, 4q35.1_DLBCL (FOCAL); SEQ ID NO: 6441, 4q35.1_DLBCL (FOCAL); SEQ ID NO: 6442, 4q35.1_DLBCL (FOCAL); SEQ ID NO: 6443, 4q35.1_DLBCL (FOCAL); SEQ ID NO: 6444, 4q35.1_DLBCL (FOCAL); SEQ ID NO: 6445, 4q35.1_DLBCL (FOCAL); SEQ ID NO: 6446, FBXW7 (Gene); SEQ ID NO: 6447, FBXW7 (Gene); SEQ ID NO: 6448, FBXW7 (Gene); SEQ ID NO: 6449, FBXW7 (Gene); SEQ ID NO: 6450, FBXW7 (Gene); SEQ ID NO: 6451, FBXW7 (Gene); SEQ ID NO: 6452, FBXW7 (Gene); SEQ ID NO: 6453, FBXW7 (Gene); SEQ ID NO: 6454, FBXW7 (Gene); SEQ ID NO: 6455, FBXW7 (Gene); SEQ ID NO: 6456, FBXW7 (Gene); SEQ ID NO: 6457, FBXW7 (Gene); SEQ ID NO: 6458, FBXW7 (Gene); SEQ ID NO: 6459, FBXW7 (Gene); SEQ ID NO: 6460, 4q35.1_DLBCL (FOCAL); SEQ ID NO: 6461, 4q35.1_DLBCL (FOCAL); SEQ ID NO: 6462, 4q35.1_DLBCL (FOCAL); SEQ ID NO: 6463, 4q35.1_DLBCL (FOCAL); SEQ ID NO: 6464, 4q35.1_DLBCL (FOCAL); SEQ ID NO: 6465, TLR2 (Gene); SEQ ID NO: 6466, TLR2 (Gene); SEQ ID NO: 6467, TLR2 (Gene); SEQ ID NO: 6468, TLR2 (Gene); SEQ ID NO: 6469, TLR2 (Gene); SEQ ID NO: 6470, 4q35.1_DLBCL (FOCAL); SEQ ID NO: 6471, 4q35.1_DLBCL (FOCAL); SEQ ID NO: 6472, 4q35.1_DLBCL (FOCAL); SEQ ID NO: 6473, 4q35.1_DLBCL (FOCAL); SEQ ID NO: 6474, 4q35.1_DLBCL (FOCAL); SEQ ID NO: 6475, 4q35.1_DLBCL (FOCAL); SEQ ID NO: 6476, 4q35.1_DLBCL (FOCAL); SEQ ID NO: 6477, 4q35.1_DLBCL (FOCAL); SEQ ID NO: 6478, 4q35.1_DLBCL (FOCAL); SEQ ID NO: 6479, 4q35.1_DLBCL (FOCAL); SEQ ID NO: 6480, 4q35.1_DLBCL (FOCAL); SEQ ID NO: 6481, 4q35.1_DLBCL (FOCAL); SEQ ID NO: 6482, 4q35.1_DLBCL (FOCAL); SEQ ID NO: 6483, 4q35.1_DLBCL (FOCAL); SEQ ID NO: 6484, 4q35.1_DLBCL (FOCAL); SEQ ID NO: 6485, 4q35.1_DLBCL (FOCAL); SEQ ID NO: 6486, 4q35.1_DLBCL (FOCAL); SEQ ID NO: 6487, 4q35.1_DLBCL (FOCAL); SEQ ID NO: 6488, 4q35.1_DLBCL (FOCAL); SEQ ID NO: 6489, 4q35.1_DLBCL (FOCAL); SEQ ID NO: 6490, 4q35.1_DLBCL (FOCAL); SEQ ID NO: 6491, 4q35.1_DLBCL (FOCAL); SEQ ID NO: 6492, 4q35.1_DLBCL (FOCAL); SEQ ID NO: 6493, 4q35.1_DLBCL (FOCAL); SEQ ID NO: 6494, 4q35.1_DLBCL (FOCAL); SEQ ID NO: 6495, 4q35.1_DLBCL (FOCAL); SEQ ID NO: 6496, 4q35.1_DLBCL (FOCAL); SEQ ID NO: 6497, 4q35.1_DLBCL (FOCAL); SEQ ID NO: 6498, 4q35.1_DLBCL (FOCAL); SEQ ID NO: 6499, 4q35.1_DLBCL (FOCAL); SEQ ID NO: 6500, 4q35.1_DLBCL (FOCAL); SEQ ID NO: 6501, 4q35.1_DLBCL (FOCAL); SEQ ID NO: 6502, 4q35.1_DLBCL (FOCAL); SEQ ID NO: 6503, 4q35.1_DLBCL (FOCAL); SEQ ID NO: 6504, 4q35.1_DLBCL (FOCAL); SEQ ID NO: 6505, 4q35.1_DLBCL (FOCAL); SEQ ID NO: 6506, 4q35.1_DLBCL (FOCAL); SEQ ID NO: 6507, 4q35.1_DLBCL (FOCAL); SEQ ID NO: 6508, 4q35.1_DLBCL (FOCAL); SEQ ID NO: 6509, 4q35.1_DLBCL (FOCAL); SEQ ID NO: 6510, 4q35.1_DLBCL (FOCAL); SEQ ID NO: 6511, 4q35.1_DLBCL (FOCAL); SEQ ID NO: 6512, 4q35.1_DLBCL (FOCAL); SEQ ID NO: 6513, 4q35.1_DLBCL (FOCAL); SEQ ID NO: 6514, 4q35.1_DLBCL (FOCAL); SEQ ID NO: 6515, 4q35.1_DLBCL (FOCAL); SEQ ID NO: 6516, 4q35.1_DLBCL (FOCAL); SEQ ID NO: 6517, 4q35.1_DLBCL (FOCAL); SEQ ID NO: 6518, 4q35.1_DLBCL (FOCAL); SEQ ID NO: 6519, 4q35.1_DLBCL (FOCAL); SEQ ID NO: 6520, 4q35.1_DLBCL (FOCAL); SEQ ID NO: 6521, 4q35.1_DLBCL (FOCAL); SEQ ID NO: 6522, 4q35.1_DLBCL (FOCAL); SEQ ID NO: 6523, 4q35.1_DLBCL (FOCAL); SEQ ID NO: 6524, 4q35.1_DLBCL (FOCAL); SEQ ID NO: 6525, 4q35.1_DLBCL (FOCAL); SEQ ID NO: 6526, 4q35.1_DLBCL (FOCAL); SEQ ID NO: 6527, 4q35.1_DLBCL (FOCAL); SEQ ID NO: 6528, 4q35.1_DLBCL (FOCAL); SEQ ID NO: 6529, 4q35.1_DLBCL (FOCAL); SEQ ID NO: 6530, 4q35.1_DLBCL (FOCAL); SEQ ID NO: 6531, 4q35.1_DLBCL (FOCAL); SEQ ID NO: 6532, 4q35.1_DLBCL (FOCAL); SEQ ID NO: 6533, 4q35.1_DLBCL (FOCAL); SEQ ID NO: 6534, 4q35.1_DLBCL (FOCAL); SEQ ID NO: 6535, 4q35.1_DLBCL (FOCAL); SEQ ID NO: 6536, 4q35.1_DLBCL (FOCAL); SEQ ID NO: 6537, 4q35.1_DLBCL (FOCAL); SEQ ID NO: 6538, 4q35.1_DLBCL (FOCAL); SEQ ID NO: 6539, 4q35.1_DLBCL (FOCAL); SEQ ID NO: 6540, 4q35.1_DLBCL (FOCAL); SEQ ID NO: 6541, 4q35.1_DLBCL (FOCAL); SEQ ID NO: 6542, 4q35.1_DLBCL (FOCAL); SEQ ID NO: 6543, 4q35.1_DLBCL (FOCAL); SEQ ID NO: 6544, 4q35.1_DLBCL (FOCAL); SEQ ID NO: 6545, 4q35.1_DLBCL (FOCAL); SEQ ID NO: 6546, 4q35.1_DLBCL (FOCAL); SEQ ID NO: 6547, 4q35.1_DLBCL (FOCAL); SEQ ID NO: 6548, 4q35.1_DLBCL (FOCAL); SEQ ID NO: 6549, 4q35.1_DLBCL (FOCAL); SEQ ID NO: 6550, 4q35.1_DLBCL (FOCAL); SEQ ID NO: 6551, 4q35.1_DLBCL (FOCAL); SEQ ID NO: 6552, 4q35.1_DLBCL (FOCAL); SEQ ID NO: 6553, 4q35.1_DLBCL (FOCAL); SEQ ID NO: 6554, 4q35.1_DLBCL (FOCAL); SEQ ID NO: 6555, 4q35.1_DLBCL (FOCAL); SEQ ID NO: 6556, 4q35.1_DLBCL (FOCAL); SEQ ID NO: 6557, 4q35.1_DLBCL (FOCAL); SEQ ID NO: 6558, 4q35.1_DLBCL (FOCAL); SEQ ID NO: 6559, 4q35.1_DLBCL (FOCAL); SEQ ID NO: 6560, 4q35.1_DLBCL (FOCAL); SEQ ID NO: 6561, 4q35.1_DLBCL (FOCAL); SEQ ID NO: 6562, 4q35.1_DLBCL (FOCAL); SEQ ID NO: 6563, 4q35.1_DLBCL (FOCAL); SEQ ID NO: 6564, 4q35.1_DLBCL (FOCAL); SEQ ID NO: 6565, 4q35.1_DLBCL (FOCAL); SEQ ID NO: 6566, 4q35.1_DLBCL (FOCAL); SEQ ID NO: 6567, 4q35.1_DLBCL (FOCAL); SEQ ID NO: 6568, 4q35.1_DLBCL (FOCAL); SEQ ID NO: 6569, 4q35.1_DLBCL (FOCAL); SEQ ID NO: 6570, 4q35.1_DLBCL (FOCAL); SEQ ID NO: 6571, 4q35.1_DLBCL (FOCAL); SEQ ID NO: 6572, 4q35.1_DLBCL (FOCAL); SEQ ID NO: 6573, 4q35.1_DLBCL (FOCAL); SEQ ID NO: 6574, 4q35.1_DLBCL (FOCAL); SEQ ID NO: 6575, 4q35.1_DLBCL (FOCAL); SEQ ID NO: 6576, 4q35.1_DLBCL (FOCAL); SEQ ID NO: 6577, 4q35.1_DLBCL (FOCAL); SEQ ID NO: 6578, 4q35.1_DLBCL (FOCAL); SEQ ID NO: 6579, 4q35.1_DLBCL (FOCAL); SEQ ID NO: 6580, 4q35.1_DLBCL (FOCAL); SEQ ID NO: 6581, 4q35.1_DLBCL (FOCAL); SEQ ID NO: 6582, 4q35.1_DLBCL (FOCAL); SEQ ID NO: 6583, 4q35.1_DLBCL (FOCAL); SEQ ID NO: 6584, 4q35.1_DLBCL (FOCAL); SEQ ID NO: 6585, 4q35.1_DLBCL (FOCAL); SEQ ID NO: 6586, 4q35.1_DLBCL (FOCAL); SEQ ID NO: 6587, 4q35.1_DLBCL (FOCAL); SEQ ID NO: 6588, 4q35.1_DLBCL (FOCAL); SEQ ID NO: 6589, 4q35.1_DLBCL (FOCAL); SEQ ID NO: 6590, 4q35.1_DLBCL (FOCAL); SEQ ID NO: 6591, 4q35.1_DLBCL (FOCAL); SEQ ID NO: 6592, 4q35.1_DLBCL (FOCAL); SEQ ID NO: 6593, 4q35.1_DLBCL (FOCAL); SEQ ID NO: 6594, 4q35.1_DLBCL (FOCAL); SEQ ID NO: 6595, 4q35.1_DLBCL (FOCAL); SEQ ID NO: 6596, 4q35.1_DLBCL (FOCAL); SEQ ID NO: 6597, 4q35.1_DLBCL (FOCAL); SEQ ID NO: 6598, 4q35.1_DLBCL (FOCAL); SEQ ID NO: 6599, 4q35.1_DLBCL (FOCAL); SEQ ID NO: 6600, 4q35.1_DLBCL (FOCAL); SEQ ID NO: 6601, 4q35.1_DLBCL (FOCAL); SEQ ID NO: 6602, 4q35.1_DLBCL (FOCAL); SEQ ID NO: 6603, 4q35.1_DLBCL (FOCAL); SEQ ID NO: 6604, 4q35.1_DLBCL (FOCAL); SEQ ID NO: 6605, 4q35.1_DLBCL (FOCAL); SEQ ID NO: 6606, 4q35.1_DLBCL (FOCAL); SEQ ID NO: 6607, 4q35.1_DLBCL (FOCAL); SEQ ID NO: 6608, 4q35.1_DLBCL (FOCAL); SEQ ID NO: 6609, 4q35.1_DLBCL (FOCAL); SEQ ID NO: 6610, 4q35.1_DLBCL (FOCAL); SEQ ID NO: 6611, 4q35.1_DLBCL (FOCAL); SEQ ID NO: 6612, 4q35.1_DLBCL (FOCAL); SEQ ID NO: 6613, 4q35.1_DLBCL (FOCAL); SEQ ID NO: 6614, 4q35.1_DLBCL (FOCAL); SEQ ID NO: 6615, 4q35.1_DLBCL (FOCAL); SEQ ID NO: 6616, 4q35.1_DLBCL (FOCAL); SEQ ID NO: 6617, 4q35.1_DLBCL (FOCAL); SEQ ID NO: 6618, 4q35.1_DLBCL (FOCAL); SEQ ID NO: 6619, 4q35.1_DLBCL (FOCAL); SEQ ID NO: 6620, 4q35.1_DLBCL (FOCAL); SEQ ID NO: 6621, MSI (MSI); SEQ ID NO: 6622, MSI (MSI); SEQ ID NO: 6623, 4q35.1_DLBCL (FOCAL); SEQ ID NO: 6624, 4q35.1_DLBCL (FOCAL); SEQ ID NO: 6625, 4q35.1_DLBCL (FOCAL); SEQ ID NO: 6626, 4q35.1_DLBCL (FOCAL); SEQ ID NO: 6627, 4q35.1_DLBCL (FOCAL); SEQ ID NO: 6628, 4q35.1_DLBCL (FOCAL); SEQ ID NO: 6629, 4q35.1_DLBCL (FOCAL); SEQ ID NO: 6630, 4q35.1_DLBCL (FOCAL); SEQ ID NO: 6631, 4q35.1_DLBCL (FOCAL); SEQ ID NO: 6632, 4q35.1_DLBCL (FOCAL); SEQ ID NO: 6633, 4q35.1_DLBCL (FOCAL); SEQ ID NO: 6634, 4q35.1_DLBCL (FOCAL); SEQ ID NO: 6635, 4q35.1_DLBCL (FOCAL); SEQ ID NO: 6636, 4q35.1_DLBCL (FOCAL); SEQ ID NO: 6637, 4q35.1_DLBCL (FOCAL); SEQ ID NO: 6638, FP (FP); SEQ ID NO: 6639, TERT promoter (SV); SEQ ID NO: 6640, 5P_DLBCL (ARM); SEQ ID NO: 6641, 5P_DLBCL (ARM); SEQ ID NO: 6642, 5P_DLBCL (ARM); SEQ ID NO: 6643, FP (FP); SEQ ID NO: 6644, 5P_DLBCL (ARM); SEQ ID NO: 6645, 5P_DLBCL (ARM); SEQ ID NO: 6646, 5P_DLBCL (ARM); SEQ ID NO: 6647, 5P_DLBCL (ARM); SEQ ID NO: 6648, 5P_DLBCL (ARM); SEQ ID NO: 6649, FP (FP); SEQ ID NO: 6650, 5P_DLBCL (ARM); SEQ ID NO: 6651, 5P_DLBCL (ARM); SEQ ID NO: 6652, 5P_DLBCL (ARM); SEQ ID NO: 6653, 5P_DLBCL (ARM); SEQ ID NO: 6654, 5P_DLBCL (ARM); SEQ ID NO: 6655, 5P_DLBCL (ARM); SEQ ID NO: 6656, 5P_DLBCL (ARM); SEQ ID NO: 6657, 5P_DLBCL (ARM); SEQ ID NO: 6658, 5P_DLBCL (ARM); SEQ ID NO: 6659, 5P_DLBCL (ARM); SEQ ID NO: 6660, 5P_DLBCL (ARM); SEQ ID NO: 6661, 5P_DLBCL (ARM); SEQ ID NO: 6662, 5P_DLBCL (ARM); SEQ ID NO: 6663, 5P_DLBCL (ARM); SEQ ID NO: 6664, 5P_DLBCL (ARM); SEQ ID NO: 6665, FP (FP); SEQ ID NO: 6666, 5P_DLBCL (ARM); SEQ ID NO: 6667, 5P_DLBCL (ARM); SEQ ID NO: 6668, 5P_DLBCL (ARM); SEQ ID NO: 6669, 5P_DLBCL (ARM); SEQ ID NO: 6670, 5P_DLBCL (ARM); SEQ ID NO: 6671, 5P_DLBCL (ARM); SEQ ID NO: 6672, 5P_DLBCL (ARM); SEQ ID NO: 6673, 5P_DLBCL (ARM); SEQ ID NO: 6674, 5P_DLBCL (ARM); SEQ ID NO: 6675, 5P_DLBCL (ARM); SEQ ID NO: 6676, 5P_DLBCL (ARM); SEQ ID NO: 6677, 5P_DLBCL (ARM); SEQ ID NO: 6678, 5P_DLBCL (ARM); SEQ ID NO: 6679, 5P_DLBCL (ARM); SEQ ID NO: 6680, 5P_DLBCL (ARM); SEQ ID NO: 6681, 5P_DLBCL (ARM); SEQ ID NO: 6682, 5P_DLBCL (ARM); SEQ ID NO: 6683, 5Q_DLBCL (ARM); SEQ ID NO: 6684, 5Q_DLBCL (ARM); SEQ ID NO: 6685, 5Q_DLBCL (ARM); SEQ ID NO: 6686, 5Q_DLBCL (ARM); SEQ ID NO: 6687, 5Q_DLBCL (ARM); SEQ ID NO: 6688, 5Q_DLBCL (ARM); SEQ ID NO: 6689, 5Q_DLBCL (ARM); SEQ ID NO: 6690, 5Q_DLBCL (ARM); SEQ ID NO: 6691, 5Q_DLBCL (ARM); SEQ ID NO: 6692, 5Q_DLBCL (ARM); SEQ ID NO: 6693, 5Q_DLBCL (ARM); SEQ ID NO: 6694, 5Q_DLBCL (ARM); SEQ ID NO: 6695, 5Q_DLBCL (ARM); SEQ ID NO: 6696, 5Q_DLBCL (ARM); SEQ ID NO: 6697, 5Q_DLBCL (ARM); SEQ ID NO: 6698, 5Q_DLBCL (ARM); SEQ ID NO: 6699, 5Q_DLBCL (ARM); SEQ ID NO: 6700, 5Q_DLBCL (ARM); SEQ ID NO: 6701, 5Q_DLBCL (ARM); SEQ ID NO: 6702, 5Q_DLBCL (ARM); SEQ ID NO: 6703, 5Q_DLBCL (ARM); SEQ ID NO: 6704, 5Q_DLBCL (ARM); SEQ ID NO: 6705, 5Q_DLBCL (ARM); SEQ ID NO: 6706, 5Q_DLBCL (ARM); SEQ ID NO: 6707, 5Q_DLBCL (ARM); SEQ ID NO: 6708, FP (FP); SEQ ID NO: 6709, 5Q_DLBCL (ARM); SEQ ID NO: 6710, MSI (MSI); SEQ ID NO: 6711, MSI (MSI); SEQ ID NO: 6712, 5Q_DLBCL (ARM); SEQ ID NO: 6713, 5Q_DLBCL (ARM); SEQ ID NO: 6714, 5Q_DLBCL (ARM); SEQ ID NO: 6715, 5Q_DLBCL (ARM); SEQ ID NO: 6716, 5Q_DLBCL (ARM); SEQ ID NO: 6717, FP (FP); SEQ ID NO: 6718, ADGRV1 (Gene); SEQ ID NO: 6719, ADGRV1 (Gene); SEQ ID NO: 6720, ADGRV1 (Gene); SEQ ID NO: 6721, ADGRV1 (Gene); SEQ ID NO: 6722, ADGRV1 (Gene); SEQ ID NO: 6723, ADGRV1 (Gene); SEQ ID NO: 6724, ADGRV1 (Gene); SEQ ID NO: 6725, ADGRV1 (Gene); SEQ ID NO: 6726, ADGRV1 (Gene); SEQ ID NO: 6727, ADGRV1 (Gene); SEQ ID NO: 6728, ADGRV1 (Gene); SEQ ID NO: 6729, ADGRV1 (Gene); SEQ ID NO: 6730, ADGRV1 (Gene); SEQ ID NO: 6731, ADGRV1 (Gene); SEQ ID NO: 6732, ADGRV1 (Gene); SEQ ID NO: 6733, ADGRV1 (Gene); SEQ ID NO: 6734, ADGRV1 (Gene); SEQ ID NO: 6735, ADGRV1 (Gene); SEQ ID NO: 6736, ADGRV1 (Gene); SEQ ID NO: 6737, ADGRV1 (Gene); SEQ ID NO: 6738, ADGRV1 (Gene); SEQ ID NO: 6739, ADGRV1 (Gene); SEQ ID NO: 6740, ADGRV1 (Gene); SEQ ID NO: 6741, ADGRV1 (Gene); SEQ ID NO: 6742, ADGRV1 (Gene); SEQ ID NO: 6743, ADGRV1 (Gene); SEQ ID NO: 6744, ADGRV1 (Gene); SEQ ID NO: 6745, ADGRV1 (Gene); SEQ ID NO: 6746, ADGRV1 (Gene); SEQ ID NO: 6747, ADGRV1 (Gene); SEQ ID NO: 6748, ADGRV1 (Gene); SEQ ID NO: 6749, ADGRV1 (Gene); SEQ ID NO: 6750, ADGRV1 (Gene); SEQ ID NO: 6751, ADGRV1 (Gene); SEQ ID NO: 6752, ADGRV1 (Gene); SEQ ID NO: 6753, ADGRV1 (Gene); SEQ ID NO: 6754, ADGRV1 (Gene); SEQ ID NO: 6755, ADGRV1 (Gene); SEQ ID NO: 6756, ADGRV1 (Gene); SEQ ID NO: 6757, ADGRV1 (Gene); SEQ ID NO: 6758, ADGRV1 (Gene); SEQ ID NO: 6759, ADGRV1 (Gene); SEQ ID NO: 6760, ADGRV1 (Gene); SEQ ID NO: 6761, ADGRV1 (Gene); SEQ ID NO: 6762, ADGRV1 (Gene); SEQ ID NO: 6763, ADGRV1 (Gene); SEQ ID NO: 6764, ADGRV1 (Gene); SEQ ID NO: 6765, ADGRV1 (Gene); SEQ ID NO: 6766, ADGRV1 (Gene); SEQ ID NO: 6767, ADGRV1 (Gene); SEQ ID NO: 6768, ADGRV1 (Gene); SEQ ID NO: 6769, ADGRV1 (Gene); SEQ ID NO: 6770, ADGRV1 (Gene); SEQ ID NO: 6771, ADGRV1 (Gene); SEQ ID NO: 6772, ADGRV1 (Gene); SEQ ID NO: 6773, ADGRV1 (Gene); SEQ ID NO: 6774, ADGRV1 (Gene); SEQ ID NO: 6775, ADGRV1 (Gene); SEQ ID NO: 6776, ADGRV1 (Gene); SEQ ID NO: 6777, ADGRV1 (Gene); SEQ ID NO: 6778, ADGRV1 (Gene); SEQ ID NO: 6779, ADGRV1 (Gene); SEQ ID NO: 6780, ADGRV1 (Gene); SEQ ID NO: 6781, ADGRV1 (Gene); SEQ ID NO: 6782, ADGRV1 (Gene); SEQ ID NO: 6783, ADGRV1 (Gene); SEQ ID NO: 6784, ADGRV1 (Gene); SEQ ID NO: 6785, ADGRV1 (Gene); SEQ ID NO: 6786, ADGRV1 (Gene); SEQ ID NO: 6787, ADGRV1 (Gene); SEQ ID NO: 6788, ADGRV1 (Gene); SEQ ID NO: 6789, ADGRV1 (Gene); SEQ ID NO: 6790, ADGRV1 (Gene); SEQ ID NO: 6791, ADGRV1 (Gene); SEQ ID NO: 6792, ADGRV1 (Gene); SEQ ID NO: 6793, ADGRV1 (Gene); SEQ ID NO: 6794, ADGRV1 (Gene); SEQ ID NO: 6795, ADGRV1 (Gene); SEQ ID NO: 6796, ADGRV1 (Gene); SEQ ID NO: 6797, ADGRV1 (Gene); SEQ ID NO: 6798, ADGRV1 (Gene); SEQ ID NO: 6799, ADGRV1 (Gene); SEQ ID NO: 6800, ADGRV1 (Gene); SEQ ID NO: 6801, ADGRV1 (Gene); SEQ ID NO: 6802, ADGRV1 (Gene); SEQ ID NO: 6803, ADGRV1 (Gene); SEQ ID NO: 6804, ADGRV1 (Gene); SEQ ID NO: 6805, ADGRV1 (Gene); SEQ ID NO: 6806, ADGRV1 (Gene); SEQ ID NO: 6807, ADGRV1 (Gene); SEQ ID NO: 6808, ADGRV1 (Gene); SEQ ID NO: 6809, ADGRV1 (Gene); SEQ ID NO: 6810, ADGRV1 (Gene); SEQ ID NO: 6811, ADGRV1 (Gene); SEQ ID NO: 6812, ADGRV1 (Gene); SEQ ID NO: 6813, ADGRV1 (Gene); SEQ ID NO: 6814, ADGRV1 (Gene); SEQ ID NO: 6815, ADGRV1 (Gene); SEQ ID NO: 6816, ADGRV1 (Gene); SEQ ID NO: 6817, ADGRV1 (Gene); SEQ ID NO: 6818, ADGRV1 (Gene); SEQ ID NO: 6819, ADGRV1 (Gene); SEQ ID NO: 6820, 5Q_DLBCL (ARM); SEQ ID NO: 6821, 5Q_DLBCL (ARM); SEQ ID NO: 6822, 5Q_DLBCL (ARM); SEQ ID NO: 6823, 5Q_DLBCL (ARM); SEQ ID NO: 6824, 5Q_DLBCL (ARM); SEQ ID NO: 6825, 5Q_DLBCL (ARM); SEQ ID NO: 6826, 5Q_DLBCL (ARM); SEQ ID NO: 6827, 5Q_DLBCL (ARM); SEQ ID NO: 6828, 5Q_DLBCL (ARM); SEQ ID NO: 6829, 5Q_DLBCL (ARM); SEQ ID NO: 6830, 5Q_DLBCL (ARM); SEQ ID NO: 6831, 5Q_DLBCL (ARM); SEQ ID NO: 6832, 5Q_DLBCL (ARM); SEQ ID NO: 6833, 5Q_DLBCL (ARM); SEQ ID NO: 6834, 5Q_DLBCL (ARM); SEQ ID NO: 6835, 5Q_DLBCL (ARM); SEQ ID NO: 6836, 5Q_DLBCL (ARM); SEQ ID NO: 6837, 5Q_DLBCL (ARM); SEQ ID NO: 6838, 5Q_DLBCL (ARM); SEQ ID NO: 6839, 5Q_DLBCL (ARM); SEQ ID NO: 6840, 5Q_DLBCL (ARM); SEQ ID NO: 6841, 5Q_DLBCL (ARM); SEQ ID NO: 6842, 5Q_DLBCL (ARM); SEQ ID NO: 6843, 5Q_DLBCL (ARM); SEQ ID NO: 6844, 5Q_DLBCL (ARM); SEQ ID NO: 6845, ZNF608 (Gene); SEQ ID NO: 6846, ZNF608 (Gene); SEQ ID NO: 6847, ZNF608 (Gene); SEQ ID NO: 6848, ZNF608 (Gene); SEQ ID NO: 6849, ZNF608 (Gene); SEQ ID NO: 6850, ZNF608 (Gene); SEQ ID NO: 6851, ZNF608 (Gene); SEQ ID NO: 6852, ZNF608 (Gene); SEQ ID NO: 6853, ZNF608 (Gene); SEQ ID NO: 6854, ZNF608 (Gene); SEQ ID NO: 6855, ZNF608 (Gene); SEQ ID NO: 6856, ZNF608 (Gene); SEQ ID NO: 6857, ZNF608 (Gene); SEQ ID NO: 6858, ZNF608 (Gene); SEQ ID NO: 6859, ZNF608 (Gene); SEQ ID NO: 6860, 5Q_DLBCL (ARM); SEQ ID NO: 6861, 5Q_DLBCL (ARM); SEQ ID NO: 6862, 5Q_DLBCL (ARM); SEQ ID NO: 6863, 5Q_DLBCL (ARM); SEQ ID NO: 6864, 5Q_DLBCL (ARM); SEQ ID NO: 6865, MSI (MSI); SEQ ID NO: 6866, MSI (MSI); SEQ ID NO: 6867, 5Q_DLBCL (ARM); SEQ ID NO: 6868, 5Q_DLBCL (ARM); SEQ ID NO: 6869, 5Q_DLBCL (ARM); SEQ ID NO: 6870, TGFBI (Gene); SEQ ID NO: 6871, TGFBI (Gene); SEQ ID NO: 6872, TGFBI (Gene); SEQ ID NO: 6873, TGFBI (Gene); SEQ ID NO: 6874, TGFBI (Gene); SEQ ID NO: 6875, TGFBI (Gene); SEQ ID NO: 6876, TGFBI (Gene); SEQ ID NO: 6877, TGFBI (Gene); SEQ ID NO: 6878, TGFBI (Gene); SEQ ID NO: 6879, TGFBI (Gene); SEQ ID NO: 6880, TGFBI (Gene); SEQ ID NO: 6881, TGFBI (Gene); SEQ ID NO: 6882, TGFBI (Gene); SEQ ID NO: 6883, TGFBI (Gene); SEQ ID NO: 6884, TGFBI (Gene); SEQ ID NO: 6885, TGFBI (Gene); SEQ ID NO: 6886, TGFBI (Gene); SEQ ID NO: 6887, 5Q_DLBCL (ARM); SEQ ID NO: 6888, 5Q_DLBCL (ARM); SEQ ID NO: 6889, 5Q_DLBCL (ARM); SEQ ID NO: 6890, MSI (MSI); SEQ ID NO: 6891, MSI (MSI); SEQ ID NO: 6892, 5Q_DLBCL (ARM); SEQ ID NO: 6893, MSI (MSI); SEQ ID NO: 6894, MSI (MSI); SEQ ID NO: 6895, 5Q_DLBCL (ARM); SEQ ID NO: 6896, 5Q_DLBCL (ARM); SEQ ID NO: 6897, 5Q_DLBCL (ARM); SEQ ID NO: 6898, 5Q_DLBCL (ARM); SEQ ID NO: 6899, 5Q_DLBCL (ARM); SEQ ID NO: 6900, 5Q_DLBCL (ARM); SEQ ID NO: 6901, 5Q_DLBCL (ARM); SEQ ID NO: 6902, PDGFRB (Gene); SEQ ID NO: 6903, PDGFRB (Gene); SEQ ID NO: 6904, PDGFRB (Gene); SEQ ID NO: 6905, PDGFRB (Gene); SEQ ID NO: 6906, PDGFRB (Gene); SEQ ID NO: 6907, PDGFRB (Gene); SEQ ID NO: 6908, PDGFRB (Gene); SEQ ID NO: 6909, PDGFRB (Gene); SEQ ID NO: 6910, PDGFRB (Gene); SEQ ID NO: 6911, PDGFRB (Gene); SEQ ID NO: 6912, PDGFRB (Gene); SEQ ID NO: 6913, PDGFRB (Gene); SEQ ID NO: 6914, PDGFRB (Gene); SEQ ID NO: 6915, PDGFRB (Gene); SEQ ID NO: 6916, PDGFRB (Gene); SEQ ID NO: 6917, PDGFRB (Gene); SEQ ID NO: 6918, PDGFRB (Gene); SEQ ID NO: 6919, PDGFRB (Gene); SEQ ID NO: 6920, PDGFRB (Gene); SEQ ID NO: 6921, PDGFRB (Gene); SEQ ID NO: 6922, PDGFRB (Gene); SEQ ID NO: 6923, PDGFRB (Gene); SEQ ID NO: 6924, TNIP1 (Gene); SEQ ID NO: 6925, TNIP1 (Gene); SEQ ID NO: 6926, TNIP1 (Gene); SEQ ID NO: 6927, TNIP1 (Gene); SEQ ID NO: 6928, TNIP1 (Gene); SEQ ID NO: 6929, TNIP1 (Gene); SEQ ID NO: 6930, TNIP1 (Gene); SEQ ID NO: 6931, TNIP1 (Gene); SEQ ID NO: 6932, TNIP1 (Gene); SEQ ID NO: 6933, TNIP1 (Gene); SEQ ID NO: 6934, 5Q_DLBCL (ARM); SEQ ID NO: 6935, TNIP1 (Gene); SEQ ID NO: 6936, TNIP1 (Gene); SEQ ID NO: 6937, TNIP1 (Gene); SEQ ID NO: 6938, TNIP1 (Gene); SEQ ID NO: 6939, TNIP1 (Gene); SEQ ID NO: 6940, TNIP1 (Gene); SEQ ID NO: 6941, TNIP1 (Gene); SEQ ID NO: 6942, 5Q_DLBCL (ARM); SEQ ID NO: 6943, 5Q_DLBCL (ARM); SEQ ID NO: 6944, 5Q_DLBCL (ARM); SEQ ID NO: 6945, 5Q_DLBCL (ARM); SEQ ID NO: 6946, HAVCR2 (Gene); SEQ ID NO: 6947, HAVCR2 (Gene); SEQ ID NO: 6948, HAVCR2 (Gene); SEQ ID NO: 6949, HAVCR2 (Gene); SEQ ID NO: 6950, HAVCR2 (Gene); SEQ ID NO: 6951, HAVCR2 (Gene); SEQ ID NO: 6952, HAVCR2 (Gene); SEQ ID NO: 6953, ITK (Gene); SEQ ID NO: 6954, ITK (Gene); SEQ ID NO: 6955, ITK (Gene); SEQ ID NO: 6956, ITK (Gene); SEQ ID NO: 6957, ITK (Gene); SEQ ID NO: 6958, ITK (Gene); SEQ ID NO: 6959, ITK (Gene); SEQ ID NO: 6960, ITK (Gene); SEQ ID NO: 6961, ITK (Gene); SEQ ID NO: 6962, ITK (Gene); SEQ ID NO: 6963, ITK (Gene); SEQ ID NO: 6964, ITK (Gene); SEQ ID NO: 6965, ITK (Gene); SEQ ID NO: 6966, ITK (Gene); SEQ ID NO: 6967, ITK (Gene); SEQ ID NO: 6968, 5Q_DLBCL (ARM); SEQ ID NO: 6969, 5Q_DLBCL (ARM); SEQ ID NO: 6970, EBF1 (Gene); SEQ ID NO: 6971, EBF1 (Gene); SEQ ID NO: 6972, EBF1 (Gene); SEQ ID NO: 6973, EBF1 (Gene); SEQ ID NO: 6974, EBF1 (Gene); SEQ ID NO: 6975, EBF1 (Gene); SEQ ID NO: 6976, EBF1 (Gene); SEQ ID NO: 6977, EBF1 (Gene); SEQ ID NO: 6978, EBF1 (Gene); SEQ ID NO: 6979, EBF1 (Gene); SEQ ID NO: 6980, EBF1 (Gene); SEQ ID NO: 6981, 5Q_DLBCL (ARM); SEQ ID NO: 6982, EBF1 (Gene); SEQ ID NO: 6983, EBF1 (Gene); SEQ ID NO: 6984, EBF1 (Gene); SEQ ID NO: 6985, EBF1 (Gene); SEQ ID NO: 6986, EBF1 (Gene); SEQ ID NO: 6987, EBF1 (Gene); SEQ ID NO: 6988, EBF1 (Gene); SEQ ID NO: 6989, 5Q_DLBCL (ARM); SEQ ID NO: 6990, 5Q_DLBCL (ARM); SEQ ID NO: 6991, 5Q_DLBCL (ARM); SEQ ID NO: 6992, 5Q_DLBCL (ARM); SEQ ID NO: 6993, 5Q_DLBCL (ARM); SEQ ID NO: 6994, 5Q_DLBCL (ARM); SEQ ID NO: 6995, 5Q_DLBCL (ARM); SEQ ID NO: 6996, 5Q_DLBCL (ARM); SEQ ID NO: 6997, 5Q_DLBCL (ARM); SEQ ID NO: 6998, 5Q_DLBCL (ARM); SEQ ID NO: 6999, 5Q_DLBCL (ARM); SEQ ID NO: 7000, 5Q_DLBCL (ARM); SEQ ID NO: 7001, 5Q_DLBCL (ARM); SEQ ID NO: 7002, 5Q_DLBCL (ARM); SEQ ID NO: 7003, 5Q_DLBCL (ARM); SEQ ID NO: 7004, FP (FP); SEQ ID NO: 7005, 5Q_DLBCL (ARM); SEQ ID NO: 7006, 5Q_DLBCL (ARM); SEQ ID NO: 7007, 5Q_DLBCL (ARM); SEQ ID NO: 7008, 5Q_DLBCL (ARM); SEQ ID NO: 7009, 5Q_DLBCL (ARM); SEQ ID NO: 7010, DUSP22 (Gene); SEQ ID NO: 7011, DUSP22 (Gene); SEQ ID NO: 7012, DUSP22 (Gene); SEQ ID NO: 7013, DUSP22 (Gene); SEQ ID NO: 7014, DUSP22 (Gene); SEQ ID NO: 7015, DUSP22 (Gene); SEQ ID NO: 7016, IRF4 (Gene); SEQ ID NO: 7017, IRF4 (Gene); SEQ ID NO: 7018, IRF4 (Gene); SEQ ID NO: 7019, IRF4 (Gene); SEQ ID NO: 7020, IRF4 (Gene); SEQ ID NO: 7021, IRF4 (Gene); SEQ ID NO: 7022, IRF4 (Gene); SEQ ID NO: 7023, IRF4 (Gene); SEQ ID NO: 7024, 6P_DLBCL (ARM); SEQ ID NO: 7025, FP (FP); SEQ ID NO: 7026, 6P_DLBCL (ARM); SEQ ID NO: 7027, FOXC1 (Gene); SEQ ID NO: 7028, FOXC1 (Gene); SEQ ID NO: 7029, FOXC1 (Gene); SEQ ID NO: 7030, FOXC1 (Gene); SEQ ID NO: 7031, 6P_DLBCL (ARM); SEQ ID NO: 7032, 6P_DLBCL (ARM); SEQ ID NO: 7033, 6P_DLBCL (ARM); SEQ ID NO: 7034, 6P_DLBCL (ARM); SEQ ID NO: 7035, 6P_DLBCL (ARM); SEQ ID NO: 7036, 6P_DLBCL (ARM); SEQ ID NO: 7037, 6P_DLBCL (ARM); SEQ ID NO: 7038, 6P_DLBCL (ARM); SEQ ID NO: 7039, 6P_DLBCL (ARM); SEQ ID NO: 7040, 6P_DLBCL (ARM); SEQ ID NO: 7041, 6P_DLBCL (ARM); SEQ ID NO: 7042, 6P_DLBCL (ARM); SEQ ID NO: 7043, CD83 (Gene); SEQ ID NO: 7044, CD83 (Gene); SEQ ID NO: 7045, CD83 (Gene); SEQ ID NO: 7046, CD83 (Gene); SEQ ID NO: 7047, CD83 (Gene); SEQ ID NO: 7048, 6P_DLBCL (ARM); SEQ ID NO: 7049, 6P_DLBCL (ARM); SEQ ID NO: 7050, 6P_DLBCL (ARM); SEQ ID NO: 7051, 6P_DLBCL (ARM); SEQ ID NO: 7052, 6P_DLBCL (ARM); SEQ ID NO: 7053, FP (FP); SEQ ID NO: 7054, 6P_DLBCL (ARM); SEQ ID NO: 7055, 6P_DLBCL (ARM); SEQ ID NO: 7056, 6P_DLBCL (ARM); SEQ ID NO: 7057, 6P_DLBCL (ARM); SEQ ID NO: 7058, 6P_DLBCL (ARM); SEQ ID NO: 7059, FP (FP); SEQ ID NO: 7060, 6P_DLBCL (ARM); SEQ ID NO: 7061, HIST1H3B (Gene); SEQ ID NO: 7062, HIST1H1C (Gene); SEQ ID NO: 7063, HIST1H1C (Gene); SEQ ID NO: 7064, HIST1H2BC (Gene); SEQ ID NO: 7065, HIST1H2AC (Gene); SEQ ID NO: 7066, HIST1H1E (Gene); SEQ ID NO: 7067, HIST1H1E (Gene); SEQ ID NO: 7068, HIST1H1D (Gene); SEQ ID NO: 7069, HIST1H1D (Gene); SEQ ID NO: 7070, HIST1H2BK (Gene); SEQ ID NO: 7071, HIST1H1B (Gene); SEQ ID NO: 7072, HIST1H1B (Gene); SEQ ID NO: 7073, HIST1H2AM (Gene); SEQ ID NO: 7074, 6P_DLBCL (ARM); SEQ ID NO: 7075, 6p21_HLA (FOCAL); SEQ ID NO: 7076, 6p21 HLA (FOCAL); SEQ ID NO: 7077, HLA-A (Gene); SEQ ID NO: 7078, HLA-A (Gene); SEQ ID NO: 7079, HLA-A (Gene); SEQ ID NO: 7080, HLA-A (Gene); SEQ ID NO: 7081, HLA-A (Gene); SEQ ID NO: 7082, HLA-A (Gene); SEQ ID NO: 7083, HLA-A (Gene); SEQ ID NO: 7084, HLA-A (Gene); SEQ ID NO: 7085, 6p21_HLA (FOCAL); SEQ ID NO: 7086, 6p21_HLA (FOCAL); SEQ ID NO: 7087, 6p21_HLA (FOCAL); SEQ ID NO: 7088, 6p21_HLA (FOCAL); SEQ ID NO: 7089, 6p21_HLA (FOCAL); SEQ ID NO: 7090, 6p21_HLA (FOCAL); SEQ ID NO: 7091, HLA-C (Gene); SEQ ID NO: 7092, HLA-C (Gene); SEQ ID NO: 7093, HLA-C (Gene); SEQ ID NO: 7094, HLA-C (Gene); SEQ ID NO: 7095, HLA-C (Gene); SEQ ID NO: 7096, HLA-C (Gene); SEQ ID NO: 7097, HLA-C (Gene); SEQ ID NO: 7098, HLA-C (Gene); SEQ ID NO: 7099, HLA-B (Gene); SEQ ID NO: 7100, HLA-B (Gene); SEQ ID NO: 7101, HLA-B (Gene); SEQ ID NO: 7102, HLA-B (Gene); SEQ ID NO: 7103, HLA-B (Gene); SEQ ID NO: 7104, HLA-B (Gene); SEQ ID NO: 7105, HLA-B (Gene); SEQ ID NO: 7106, 6p21_HLA (FOCAL); SEQ ID NO: 7107, LTB (Gene); SEQ ID NO: 7108, LTB (Gene); SEQ ID NO: 7109, LTB (Gene); SEQ ID NO: 7110, LTB (Gene); SEQ ID NO: 7111, 6p21_HLA (FOCAL); SEQ ID NO: 7112, 6p21_HLA (FOCAL); SEQ ID NO: 7113, 6p21_HLA (FOCAL); SEQ ID NO: 7114, 6p21_HLA (FOCAL); SEQ ID NO: 7115, HLA-DRA (Gene); SEQ ID NO: 7116, HLA-DRA (Gene); SEQ ID NO: 7117, HLA-DRA (Gene); SEQ ID NO: 7118, HLA-DRA (Gene); SEQ ID NO: 7119, HLA-DRA (Gene); SEQ ID NO: 7120, 6p21_HLA (FOCAL); SEQ ID NO: 7121, HLA-DMB (Gene); SEQ ID NO: 7122, HLA-DMB (Gene); SEQ ID NO: 7123, HLA-DMB (Gene); SEQ ID NO: 7124, HLA-DMB (Gene); SEQ ID NO: 7125, HLA-DMB (Gene); SEQ ID NO: 7126, HLA-DMB (Gene); SEQ ID NO: 7127, HLA-DMA (Gene); SEQ ID NO: 7128, HLA-DMA (Gene); SEQ ID NO: 7129, HLA-DMA (Gene); SEQ ID NO: 7130, HLA-DMA (Gene); SEQ ID NO: 7131, HLA-DMA (Gene); SEQ ID NO: 7132, 6p21 HLA (FOCAL); SEQ ID NO: 7133, 6p21 HLA (FOCAL); SEQ ID NO: 7134, 6P_DLBCL (ARM); SEQ ID NO: 7135, FANCE (Gene); SEQ ID NO: 7136, FANCE (Gene); SEQ ID NO: 7137, FANCE (Gene); SEQ ID NO: 7138, FANCE (Gene); SEQ ID NO: 7139, FANCE (Gene); SEQ ID NO: 7140, FANCE (Gene); SEQ ID NO: 7141, FANCE (Gene); SEQ ID NO: 7142, FANCE (Gene); SEQ ID NO: 7143, FANCE (Gene); SEQ ID NO: 7144, FANCE (Gene); SEQ ID NO: 7145, FANCE (Gene); SEQ ID NO: 7146, FANCE (Gene); SEQ ID NO: 7147, FANCE (Gene); SEQ ID NO: 7148, FANCE (Gene); SEQ ID NO: 7149, FANCE (Gene); SEQ ID NO: 7150, 6P_DLBCL (ARM); SEQ ID NO: 7151, CDKN1A (Gene); SEQ ID NO: 7152, CDKN1A (Gene); SEQ ID NO: 7153, CDKN1A (Gene); SEQ ID NO: 7154, PIM1 (Gene); SEQ ID NO: 7155, PIM1 (Gene); SEQ ID NO: 7156, PIM1 (Gene); SEQ ID NO: 7157, PIM1 (Gene); SEQ ID NO: 7158, PIM1 (Gene); SEQ ID NO: 7159, PIM1 (Gene); SEQ ID NO: 7160, PIM1 (Gene); SEQ ID NO: 7161, PIM1 (Gene); SEQ ID NO: 7162, 6P_DLBCL (ARM); SEQ ID NO: 7163, 6P_DLBCL (ARM); SEQ ID NO: 7164, 6P_DLBCL (ARM); SEQ ID NO: 7165, 6P_DLBCL (ARM); SEQ ID NO: 7166, 6P_DLBCL (ARM); SEQ ID NO: 7167, CCND3 (Gene); SEQ ID NO: 7168, CCND3 (Gene); SEQ ID NO: 7169, CCND3 (Gene); SEQ ID NO: 7170, CCND3 (Gene); SEQ ID NO: 7171, CCND3 (Gene); SEQ ID NO: 7172, CCND3 (Gene); SEQ ID NO: 7173, CCND3 upstream (SV); SEQ ID NO: 7174, CCND3 upstream (SV); SEQ ID NO: 7175, CCND3 upstream (SV); SEQ ID NO: 7176, CCND3 upstream (SV); SEQ ID NO: 7177, CCND3 upstream (SV); SEQ ID NO: 7178, CCND3 upstream (SV); SEQ ID NO: 7179, CCND3 upstream (SV); SEQ ID NO: 7180, CCND3 upstream (SV); SEQ ID NO: 7181, CCND3 upstream (SV); SEQ ID NO: 7182, CCND3 upstream (SV); SEQ ID NO: 7183, CCND3 upstream (SV); SEQ ID NO: 7184, CCND3 upstream (SV); SEQ ID NO: 7185, CCND3 upstream (SV); SEQ ID NO: 7186, CCND3 upstream (SV); SEQ ID NO: 7187, CCND3 upstream (SV); SEQ ID NO: 7188, CCND3 upstream (SV); SEQ ID NO: 7189, CCND3 upstream (SV); SEQ ID NO: 7190, CCND3 upstream (SV); SEQ ID NO: 7191, CCND3 upstream (SV); SEQ ID NO: 7192, 6P_DLBCL (ARM); SEQ ID NO: 7193, NFKBIE (Gene); SEQ ID NO: 7194, NFKBIE (Gene); SEQ ID NO: 7195, NFKBIE (Gene); SEQ ID NO: 7196, NFKBIE (Gene); SEQ ID NO: 7197, NFKBIE (Gene); SEQ ID NO: 7198, NFKBIE (Gene); SEQ ID NO: 7199, NFKBIE (Gene); SEQ ID NO: 7200, NFKBIE (Gene); SEQ ID NO: 7201, 6P_DLBCL (ARM); SEQ ID NO: 7202, 6P_DLBCL (ARM); SEQ ID NO: 7203, 6P_DLBCL (ARM); SEQ ID NO: 7204, 6P_DLBCL (ARM); SEQ ID NO: 7205, 6P_DLBCL (ARM); SEQ ID NO: 7206, 6P_DLBCL (ARM); SEQ ID NO: 7207, 6P_DLBCL (ARM); SEQ ID NO: 7208, 6P_DLBCL (ARM); SEQ ID NO: 7209, 6P_DLBCL (ARM); SEQ ID NO: 7210, 6P_DLBCL (ARM); SEQ ID NO: 7211, 6P_DLBCL (ARM); SEQ ID NO: 7212, 6Q_DLBCL (ARM); SEQ ID NO: 7213, FP (FP); SEQ ID NO: 7214, 6q12_HL_custom (FOCAL); SEQ ID NO: 7215, 6q12_HL_custom (FOCAL); SEQ ID NO: 7216, 6q12_HL_custom (FOCAL); SEQ ID NO: 7217, 6q12_HL_custom (FOCAL); SEQ ID NO: 7218, 6q12_HL_custom (FOCAL); SEQ ID NO: 7219, 6q12 HL_custom (FOCAL); SEQ ID NO: 7220, 6q12_HL_custom (FOCAL); SEQ ID NO: 7221, 6q12_HL_custom (FOCAL); SEQ ID NO: 7222, 6q12_HL_custom (FOCAL); SEQ ID NO: 7223, 6q12_HL_custom (FOCAL); SEQ ID NO: 7224, 6q12_HL_custom (FOCAL); SEQ ID NO: 7225, 6q12_HL_custom (FOCAL); SEQ ID NO: 7226, 6q12_HL_custom (FOCAL); SEQ ID NO: 7227, 6q12_HL_custom (FOCAL); SEQ ID NO: 7228, 6q12_HL_custom (FOCAL); SEQ ID NO: 7229, 6q12_HL_custom (FOCAL); SEQ ID NO: 7230, 6q12 HL_custom (FOCAL); SEQ ID NO: 7231, 6q12_HL_custom (FOCAL); SEQ ID NO: 7232, 6q12_HL_custom (FOCAL); SEQ ID NO: 7233, 6q12_HL_custom (FOCAL); SEQ ID NO: 7234, 6Q_DLBCL (ARM); SEQ ID NO: 7235, 6Q_DLBCL (ARM); SEQ ID NO: 7236, EEF1A1 (Gene); SEQ ID NO: 7237, EEF1A1 (Gene); SEQ ID NO: 7238, EEF1A1 (Gene); SEQ ID NO: 7239, EEF1A1 (Gene); SEQ ID NO: 7240, EEF1A1 (Gene); SEQ ID NO: 7241, EEF1A1 (Gene); SEQ ID NO: 7242, EEF1A1 (Gene); SEQ ID NO: 7243, 6q14.1_DLBCL (FOCAL); SEQ ID NO: 7244, 6q14.1_DLBCL (FOCAL); SEQ ID NO: 7245, 6q14.1_DLBCL (FOCAL); SEQ ID NO: 7246, 6q14.1_DLBCL (FOCAL); SEQ ID NO: 7247, 6q14.1_DLBCL (FOCAL); SEQ ID NO: 7248, 6q14.1_DLBCL (FOCAL); SEQ ID NO: 7249, 6q14.1_DLBCL (FOCAL); SEQ ID NO: 7250, 6q14.1_DLBCL (FOCAL); SEQ ID NO: 7251, TMEM30A (Gene); SEQ ID NO: 7252, TMEM30A (Gene); SEQ ID NO: 7253, TMEM30A (Gene); SEQ ID NO: 7254, TMEM30A (Gene); SEQ ID NO: 7255, TMEM30A (Gene); SEQ ID NO: 7256, TMEM30A (Gene); SEQ ID NO: 7257, TMEM30A (Gene); SEQ ID NO: 7258, 6q14.1_DLBCL (FOCAL); SEQ ID NO: 7259, 6q14.1_DLBCL (FOCAL); SEQ ID NO: 7260, 6q14.1_DLBCL (FOCAL); SEQ ID NO: 7261, 6q14.1_DLBCL (FOCAL); SEQ ID NO: 7262, 6Q_DLBCL (ARM); SEQ ID NO: 7263, FP (FP); SEQ ID NO: 7264, 6Q_DLBCL (ARM); SEQ ID NO: 7265, 6Q_DLBCL (ARM); SEQ ID NO: 7266, 6Q_DLBCL (ARM); SEQ ID NO: 7267, 6Q_DLBCL (ARM); SEQ ID NO: 7268, MSI (MSI); SEQ ID NO: 7269, MSI (MSI); SEQ ID NO: 7270, 6Q_DLBCL (ARM); SEQ ID NO: 7271, 6Q_DLBCL (ARM); SEQ ID NO: 7272, ZNF292 (Gene); SEQ ID NO: 7273, ZNF292 (Gene); SEQ ID NO: 7274, ZNF292 (Gene); SEQ ID NO: 7275, ZNF292 (Gene); SEQ ID NO: 7276, ZNF292 (Gene); SEQ ID NO: 7277, ZNF292 (Gene); SEQ ID NO: 7278, ZNF292 (Gene); SEQ ID NO: 7279, ZNF292 (Gene); SEQ ID NO: 7280, ZNF292 (Gene); SEQ ID NO: 7281, ZNF292 (Gene); SEQ ID NO: 7282, ZNF292 (Gene); SEQ ID NO: 7283, ZNF292 (Gene); SEQ ID NO: 7284, ZNF292 (Gene); SEQ ID NO: 7285, ZNF292 (Gene); SEQ ID NO: 7286, ZNF292 (Gene); SEQ ID NO: 7287, ZNF292 (Gene); SEQ ID NO: 7288, ZNF292 (Gene); SEQ ID NO: 7289, ZNF292 (Gene); SEQ ID NO: 7290, ZNF292 (Gene); SEQ ID NO: 7291, ZNF292 (Gene); SEQ ID NO: 7292, ZNF292 (Gene); SEQ ID NO: 7293, ZNF292 (Gene); SEQ ID NO: 7294, 6Q_DLBCL (ARM); SEQ ID NO: 7295, 6Q_DLBCL (ARM); SEQ ID NO: 7296, MSI (MSI); SEQ ID NO: 7297, MSI (MSI); SEQ ID NO: 7298, 6Q_DLBCL (ARM); SEQ ID NO: 7299, 6Q_DLBCL (ARM); SEQ ID NO: 7300, 6Q_DLBCL (ARM); SEQ ID NO: 7301, 6Q_DLBCL (ARM); SEQ ID NO: 7302, 6Q_DLBCL (ARM); SEQ ID NO: 7303, 6q21_DLBCL (FOCAL); SEQ ID NO: 7304, 6q21_DLBCL (FOCAL); SEQ ID NO: 7305, 6q21_DLBCL (FOCAL); SEQ ID NO: 7306, 6q21_DLBCL (FOCAL); SEQ ID NO: 7307, 6q21_DLBCL (FOCAL); SEQ ID NO: 7308, 6q21_DLBCL (FOCAL); SEQ ID NO: 7309, 6q21_DLBCL (FOCAL); SEQ ID NO: 7310, 6q21_DLBCL (FOCAL); SEQ ID NO: 7311, 6q21_DLBCL (FOCAL); SEQ ID NO: 7312, 6q21_DLBCL (FOCAL); SEQ ID NO: 7313, 6q21_DLBCL (FOCAL); SEQ ID NO: 7314, 6q21_DLBCL (FOCAL); SEQ ID NO: 7315, 6q21_DLBCL (FOCAL); SEQ ID NO: 7316, 6q21_DLBCL (FOCAL); SEQ ID NO: 7317, MSI (MSI); SEQ ID NO: 7318, MSI (MSI); SEQ ID NO: 7319, 6q21_DLBCL (FOCAL); SEQ ID NO: 7320, 6q21_DLBCL (FOCAL); SEQ ID NO: 7321, 6q21_DLBCL (FOCAL); SEQ ID NO: 7322, 6q21_DLBCL (FOCAL); SEQ ID NO: 7323, 6q21_DLBCL (FOCAL); SEQ ID NO: 7324, 6q21_DLBCL (FOCAL); SEQ ID NO: 7325, 6q21_DLBCL (FOCAL); SEQ ID NO: 7326, 6q21_DLBCL (FOCAL); SEQ ID NO: 7327, 6q21_DLBCL (FOCAL); SEQ ID NO: 7328, 6q21_DLBCL (FOCAL); SEQ ID NO: 7329, 6q21_DLBCL (FOCAL); SEQ ID NO: 7330, 6q21_DLBCL (FOCAL); SEQ ID NO: 7331, 6q21_DLBCL (FOCAL); SEQ ID NO: 7332, 6q21_DLBCL (FOCAL); SEQ ID NO: 7333, 6q21_DLBCL (FOCAL); SEQ ID NO: 7334, 6q21_DLBCL (FOCAL); SEQ ID NO: 7335, 6q21_DLBCL (FOCAL); SEQ ID NO: 7336, 6q21_DLBCL (FOCAL); SEQ ID NO: 7337, 6q21_DLBCL (FOCAL); SEQ ID NO: 7338, 6q21_DLBCL (FOCAL); SEQ ID NO: 7339, 6q21_DLBCL (FOCAL); SEQ ID NO: 7340, 6q21_DLBCL (FOCAL); SEQ ID NO: 7341, 6q21_DLBCL (FOCAL); SEQ ID NO: 7342, 6q21_DLBCL (FOCAL); SEQ ID NO: 7343, 6q21_DLBCL (FOCAL); SEQ ID NO: 7344, 6q21_DLBCL (FOCAL); SEQ ID NO: 7345, 6q21_DLBCL (FOCAL); SEQ ID NO: 7346, 6q21_DLBCL (FOCAL); SEQ ID NO: 7347, 6q21_DLBCL (FOCAL); SEQ ID NO: 7348, PRDM1 (Gene); SEQ ID NO: 7349, PRDM1 (Gene); SEQ ID NO: 7350, PRDM1 (Gene); SEQ ID NO: 7351, PRDM1 (Gene); SEQ ID NO: 7352, PRDM1 (Gene); SEQ ID NO: 7353, PRDM1 (Gene); SEQ ID NO: 7354, PRDM1 (Gene); SEQ ID NO: 7355, PRDM1 (Gene); SEQ ID NO: 7356, PRDM1 (Gene); SEQ ID NO: 7357, PRDM1 (Gene); SEQ ID NO: 7358, PRDM1 (Gene); SEQ ID NO: 7359, PRDM1 (Gene); SEQ ID NO: 7360, 6q21_DLBCL (FOCAL); SEQ ID NO: 7361, 6q21_DLBCL (FOCAL); SEQ ID NO: 7362, 6q21_DLBCL (FOCAL); SEQ ID NO: 7363, 6q21_DLBCL (FOCAL); SEQ ID NO: 7364, 6q21_DLBCL (FOCAL); SEQ ID NO: 7365, 6q21_DLBCL (FOCAL); SEQ ID NO: 7366, 6q21_DLBCL (FOCAL); SEQ ID NO: 7367, 6q21_DLBCL (FOCAL); SEQ ID NO: 7368, 6q21_DLBCL (FOCAL); SEQ ID NO: 7369, 6q21_DLBCL (FOCAL); SEQ ID NO: 7370, 6q21_DLBCL (FOCAL); SEQ ID NO: 7371, 6q21_DLBCL (FOCAL); SEQ ID NO: 7372, 6q21_DLBCL (FOCAL); SEQ ID NO: 7373, 6q21_DLBCL (FOCAL); SEQ ID NO: 7374, 6q21_DLBCL (FOCAL); SEQ ID NO: 7375, 6q21_DLBCL (FOCAL); SEQ ID NO: 7376, FP (FP); SEQ ID NO: 7377, 6q21_DLBCL (FOCAL); SEQ ID NO: 7378, 6q21_DLBCL (FOCAL); SEQ ID NO: 7379, 6q21_DLBCL (FOCAL); SEQ ID NO: 7380, 6q21_DLBCL (FOCAL); SEQ ID NO: 7381, 6q21_DLBCL (FOCAL); SEQ ID NO: 7382, 6q21_DLBCL (FOCAL); SEQ ID NO: 7383, FYN (Gene); SEQ ID NO: 7384, FYN (Gene); SEQ ID NO: 7385, FYN (Gene); SEQ ID NO: 7386, FYN (Gene); SEQ ID NO: 7387, FYN (Gene); SEQ ID NO: 7388, FYN (Gene); SEQ ID NO: 7389, FYN (Gene); SEQ ID NO: 7390, FYN (Gene); SEQ ID NO: 7391, FYN (Gene); SEQ ID NO: 7392, FYN (Gene); SEQ ID NO: 7393, FYN (Gene); SEQ ID NO: 7394, FYN (Gene); SEQ ID NO: 7395, FYN (Gene); SEQ ID NO: 7396, 6Q_DLBCL (ARM); SEQ ID NO: 7397, 6Q_DLBCL (ARM); SEQ ID NO: 7398, 6Q_DLBCL (ARM); SEQ ID NO: 7399, 6Q_DLBCL (ARM); SEQ ID NO: 7400, 6Q_DLBCL (ARM); SEQ ID NO: 7401, 6Q_DLBCL (ARM); SEQ ID NO: 7402, 6Q_DLBCL (ARM); SEQ ID NO: 7403, 6Q_DLBCL (ARM); SEQ ID NO: 7404, 6Q_DLBCL (ARM); SEQ ID NO: 7405, PTPRK (Gene); SEQ ID NO: 7406, PTPRK (Gene); SEQ ID NO: 7407, PTPRK (Gene); SEQ ID NO: 7408, PTPRK (Gene); SEQ ID NO: 7409, PTPRK (Gene); SEQ ID NO: 7410, PTPRK (Gene); SEQ ID NO: 7411, PTPRK (Gene); SEQ ID NO: 7412, PTPRK (Gene); SEQ ID NO: 7413, PTPRK (Gene); SEQ ID NO: 7414, PTPRK (Gene); SEQ ID NO: 7415, PTPRK (Gene); SEQ ID NO: 7416, PTPRK (Gene); SEQ ID NO: 7417, PTPRK (Gene); SEQ ID NO: 7418, PTPRK (Gene); SEQ ID NO: 7419, PTPRK (Gene); SEQ ID NO: 7420, PTPRK (Gene); SEQ ID NO: 7421, PTPRK (Gene); SEQ ID NO: 7422, PTPRK (Gene); SEQ ID NO: 7423, PTPRK (Gene); SEQ ID NO: 7424, PTPRK (Gene); SEQ ID NO: 7425, PTPRK (Gene); SEQ ID NO: 7426, PTPRK (Gene); SEQ ID NO: 7427, PTPRK (Gene); SEQ ID NO: 7428, PTPRK (Gene); SEQ ID NO: 7429, PTPRK (Gene); SEQ ID NO: 7430, PTPRK (Gene); SEQ ID NO: 7431, PTPRK (Gene); SEQ ID NO: 7432, PTPRK (Gene); SEQ ID NO: 7433, PTPRK (Gene); SEQ ID NO: 7434, PTPRK (Gene); SEQ ID NO: 7435, PTPRK (Gene); SEQ ID NO: 7436, PTPRK (Gene); SEQ ID NO: 7437, PTPRK (Gene); SEQ ID NO: 7438, PTPRK (Gene); SEQ ID NO: 7439, PTPRK (Gene); SEQ ID NO: 7440, PTPRK (Gene); SEQ ID NO: 7441, 6Q_DLBCL (ARM); SEQ ID NO: 7442, 6Q_DLBCL (ARM); SEQ ID NO: 7443, 6Q_DLBCL (ARM); SEQ ID NO: 7444, 6Q_DLBCL (ARM); SEQ ID NO: 7445, 6q23.3_HL_wide (FOCAL); SEQ ID NO: 7446, 6q23.3_HL_wide (FOCAL); SEQ ID NO: 7447, 6q23.3_HL_wide (FOCAL); SEQ ID NO: 7448, 6q23.3_HL_wide (FOCAL); SEQ ID NO: 7449, 6q23.3_HL_wide (FOCAL); SEQ ID NO: 7450, 6q23.3_HL_wide (FOCAL); SEQ ID NO: 7451, SGK1 (Gene); SEQ ID NO: 7452, SGK1 (Gene); SEQ ID NO: 7453, SGK1 (Gene); SEQ ID NO: 7454, SGK1 (Gene); SEQ ID NO: 7455, SGK1 (Gene); SEQ ID NO: 7456, SGK1 (Gene); SEQ ID NO: 7457, SGK1 (Gene); SEQ ID NO: 7458, SGK1 (Gene); SEQ ID NO: 7459, SGK1 (Gene); SEQ ID NO: 7460, SGK1 (Gene); SEQ ID NO: 7461, SGK1 (Gene); SEQ ID NO: 7462, SGK1 (Gene); SEQ ID NO: 7463, SGK1 (Gene); SEQ ID NO: 7464, SGK1 (Gene); SEQ ID NO: 7465, SGK1 (Gene); SEQ ID NO: 7466, SGK1 (Gene); SEQ ID NO: 7467, SGK1 (Gene); SEQ ID NO: 7468, 6q23.3_HL_wide (FOCAL); SEQ ID NO: 7469, 6q23.3_HL_wide (FOCAL); SEQ ID NO: 7470, 6q23.3_HL_wide (FOCAL); SEQ ID NO: 7471, 6q23.3_HL_wide (FOCAL); SEQ ID NO: 7472, 6q23.3_HL_wide (FOCAL); SEQ ID NO: 7473, 6q23.3_HL_wide (FOCAL); SEQ ID NO: 7474, 6q23.3_HL_wide (FOCAL); SEQ ID NO: 7475, 6q23.3_HL_wide (FOCAL); SEQ ID NO: 7476, 6q23.3_HL_wide (FOCAL); SEQ ID NO: 7477, 6q23.3_HL_wide (FOCAL); SEQ ID NO: 7478, 6q23.3_HL_wide (FOCAL); SEQ ID NO: 7479, 6q23.3_HL_wide (FOCAL); SEQ ID NO: 7480, 6q23.3 HL_wide (FOCAL); SEQ ID NO: 7481, 6q23.3_HL_wide (FOCAL); SEQ ID NO: 7482, 6q23.3_HL_wide (FOCAL); SEQ ID NO: 7483, 6q23.3_HL_wide (FOCAL); SEQ ID NO: 7484, TNFAIP3 (Gene); SEQ ID NO: 7485, TNFAIP3 (Gene); SEQ ID NO: 7486, TNFAIP3 (Gene); SEQ ID NO: 7487, TNFAIP3 (Gene); SEQ ID NO: 7488, TNFAIP3 (Gene); SEQ ID NO: 7489, TNFAIP3 (Gene); SEQ ID NO: 7490, TNFAIP3 (Gene); SEQ ID NO: 7491, TNFAIP3 (Gene); SEQ ID NO: 7492, TNFAIP3 (Gene); SEQ ID NO: 7493, 6q23.3_HL_wide (FOCAL); SEQ ID NO: 7494, 6q23.3_HL_wide (FOCAL); SEQ ID NO: 7495, 6q23.3_HL_wide (FOCAL); SEQ ID NO: 7496, 6q23.3_HL_wide (FOCAL); SEQ ID NO: 7497, MSI (MSI); SEQ ID NO: 7498, MSI (MSI); SEQ ID NO: 7499, ECT2L (Gene); SEQ ID NO: 7500, ECT2L (Gene); SEQ ID NO: 7501, ECT2L (Gene); SEQ ID NO: 7502, ECT2L (Gene); SEQ ID NO: 7503, ECT2L (Gene); SEQ ID NO: 7504, ECT2L (Gene); SEQ ID NO: 7505, ECT2L (Gene); SEQ ID NO: 7506, ECT2L (Gene); SEQ ID NO: 7507, ECT2L (Gene); SEQ ID NO: 7508, ECT2L (Gene); SEQ ID NO: 7509, ECT2L (Gene); SEQ ID NO: 7510, ECT2L (Gene); SEQ ID NO: 7511, ECT2L (Gene); SEQ ID NO: 7512, ECT2L (Gene); SEQ ID NO: 7513, ECT2L (Gene); SEQ ID NO: 7514, ECT2L (Gene); SEQ ID NO: 7515, ECT2L (Gene); SEQ ID NO: 7516, ECT2L (Gene); SEQ ID NO: 7517, ECT2L (Gene); SEQ ID NO: 7518, ECT2L (Gene); SEQ ID NO: 7519, 6q23.3_HL_wide (FOCAL); SEQ ID NO: 7520, 6q23.3_HL_wide (FOCAL); SEQ ID NO: 7521, 6q23.3_HL_wide (FOCAL); SEQ ID NO: 7522, 6q23.3_HL_wide (FOCAL); SEQ ID NO: 7523, 6q23.3_HL_wide (FOCAL); SEQ ID NO: 7524, 6q23.3_HL_wide (FOCAL); SEQ ID NO: 7525, 6q23.3_HL_wide (FOCAL); SEQ ID NO: 7526, 6q23.3_HL_wide (FOCAL); SEQ ID NO: 7527, 6q23.3_HL_wide (FOCAL); SEQ ID NO: 7528, 6q23.3_HL_wide (FOCAL); SEQ ID NO: 7529, 6q23.3_HL_wide (FOCAL); SEQ ID NO: 7530, 6q23.3_HL_wide (FOCAL); SEQ ID NO: 7531, 6q23.3_HL_wide (FOCAL); SEQ ID NO: 7532, 6q23.3_HL_wide (FOCAL); SEQ ID NO: 7533, 6q23.3_HL_wide (FOCAL); SEQ ID NO: 7534, ADGRG6 (Gene); SEQ ID NO: 7535, ADGRG6 (Gene); SEQ ID NO: 7536, ADGRG6 (Gene); SEQ ID NO: 7537, ADGRG6 (Gene); SEQ ID NO: 7538, ADGRG6 (Gene); SEQ ID NO: 7539, ADGRG6 (Gene); SEQ ID NO: 7540, ADGRG6 (Gene); SEQ ID NO: 7541, ADGRG6 (Gene); SEQ ID NO: 7542, ADGRG6 (Gene); SEQ ID NO: 7543, ADGRG6 (Gene); SEQ ID NO: 7544, ADGRG6 (Gene); SEQ ID NO: 7545, ADGRG6 (Gene); SEQ ID NO: 7546, ADGRG6 (Gene); SEQ ID NO: 7547, ADGRG6 (Gene); SEQ ID NO: 7548, ADGRG6 (Gene); SEQ ID NO: 7549, ADGRG6 (Gene); SEQ ID NO: 7550, ADGRG6 (Gene); SEQ ID NO: 7551, ADGRG6 (Gene); SEQ ID NO: 7552, ADGRG6 (Gene); SEQ ID NO: 7553, ADGRG6 (Gene); SEQ ID NO: 7554, ADGRG6 (Gene); SEQ ID NO: 7555, ADGRG6 (Gene); SEQ ID NO: 7556, ADGRG6 (Gene); SEQ ID NO: 7557, ADGRG6 (Gene); SEQ ID NO: 7558, ADGRG6 (Gene); SEQ ID NO: 7559, ADGRG6 (Gene); SEQ ID NO: 7560, ADGRG6 (Gene); SEQ ID NO: 7561, 6q23.3_HL_wide (FOCAL); SEQ ID NO: 7562, 6q23.3_HL_wide (FOCAL); SEQ ID NO: 7563, 6q23.3_HL_wide (FOCAL); SEQ ID NO: 7564, 6q23.3_HL_wide (FOCAL); SEQ ID NO: 7565, 6q23.3_HL_wide (FOCAL); SEQ ID NO: 7566, 6q23.3_HL_wide (FOCAL); SEQ ID NO: 7567, 6q23.3_HL_wide (FOCAL); SEQ ID NO: 7568, 6q23.3_HL_wide (FOCAL); SEQ ID NO: 7569, 6q23.3_HL_wide (FOCAL); SEQ ID NO: 7570, 6q23.3_HL_wide (FOCAL); SEQ ID NO: 7571, 6q23.3_HL_wide (FOCAL); SEQ ID NO: 7572, 6q23.3_HL_wide (FOCAL); SEQ ID NO: 7573, 6q23.3_HL_wide (FOCAL); SEQ ID NO: 7574, 6q23.3_HL_wide (FOCAL); SEQ ID NO: 7575, 6q23.3_HL_wide (FOCAL); SEQ ID NO: 7576, 6q23.3_HL_wide (FOCAL); SEQ ID NO: 7577, 6q23.3_HL_wide (FOCAL); SEQ ID NO: 7578, 6q23.3_HL_wide (FOCAL); SEQ ID NO: 7579, 6q23.3_HL_wide (FOCAL); SEQ ID NO: 7580, 6q23.3_HL_wide (FOCAL); SEQ ID NO: 7581, 6q23.3_HL_wide (FOCAL); SEQ ID NO: 7582, 6q23.3_HL_wide (FOCAL); SEQ ID NO: 7583, 6q23.3_HL_wide (FOCAL); SEQ ID NO: 7584, 6q23.3_HL_wide (FOCAL); SEQ ID NO: 7585, 6q23.3_HL_wide (FOCAL); SEQ ID NO: 7586, 6Q_DLBCL (ARM); SEQ ID NO: 7587, 6Q_DLBCL (ARM); SEQ ID NO: 7588, FP (FP); SEQ ID NO: 7589, 6Q_DLBCL (ARM); SEQ ID NO: 7590, 6Q_DLBCL (ARM); SEQ ID NO: 7591, 6Q_DLBCL (ARM); SEQ ID NO: 7592, 6Q_DLBCL (ARM); SEQ ID NO: 7593, 6Q_DLBCL (ARM); SEQ ID NO: 7594, 6Q_DLBCL (ARM); SEQ ID NO: 7595, ARID1B (Gene); SEQ ID NO: 7596, ARID1B (Gene); SEQ ID NO: 7597, ARID1B (Gene); SEQ ID NO: 7598, ARID1B (Gene); SEQ ID NO: 7599, ARID1B (Gene); SEQ ID NO: 7600, ARID1B (Gene); SEQ ID NO: 7601, ARID1B (Gene); SEQ ID NO: 7602, ARID1B (Gene); SEQ ID NO: 7603, 6Q_DLBCL (ARM); SEQ ID NO: 7604, ARID1B (Gene); SEQ ID NO: 7605, ARID1B (Gene); SEQ ID NO: 7606, ARID1B (Gene); SEQ ID NO: 7607, ARID1B (Gene); SEQ ID NO: 7608, ARID1B (Gene); SEQ ID NO: 7609, ARID1B (Gene); SEQ ID NO: 7610, ARID1B (Gene); SEQ ID NO: 7611, ARID1B (Gene); SEQ ID NO: 7612, ARID1B (Gene); SEQ ID NO: 7613, ARID1B (Gene); SEQ ID NO: 7614, ARID1B (Gene); SEQ ID NO: 7615, ARID1B (Gene); SEQ ID NO: 7616, ARID1B (Gene); SEQ ID NO: 7617, ARID1B (Gene); SEQ ID NO: 7618, ARID1B (Gene); SEQ ID NO: 7619, ARID1B (Gene); SEQ ID NO: 7620, ARID1B (Gene); SEQ ID NO: 7621, ARID1B (Gene); SEQ ID NO: 7622, ARID1B (Gene); SEQ ID NO: 7623, ARID1B (Gene); SEQ ID NO: 7624, ARID1B (Gene); SEQ ID NO: 7625, MSI (MSI); SEQ ID NO: 7626, MSI (MSI); SEQ ID NO: 7627, 6Q_DLBCL (ARM); SEQ ID NO: 7628, 6Q_DLBCL (ARM); SEQ ID NO: 7629, 6Q_DLBCL (ARM); SEQ ID NO: 7630, 6Q_DLBCL (ARM); SEQ ID NO: 7631, 6Q_DLBCL (ARM); SEQ ID NO: 7632, 6Q_DLBCL (ARM); SEQ ID NO: 7633, 6Q_DLBCL (ARM); SEQ ID NO: 7634, 6Q_DLBCL (ARM); SEQ ID NO: 7635, MSI (MSI); SEQ ID NO: 7636, MSI (MSI); SEQ ID NO: 7637, 6Q_DLBCL (ARM); SEQ ID NO: 7638, FP (FP); SEQ ID NO: 7639, 6Q_DLBCL (ARM); SEQ ID NO: 7640, 6Q_DLBCL (ARM); SEQ ID NO: 7641, 6Q_DLBCL (ARM); SEQ ID NO: 7642, 6Q_DLBCL (ARM); SEQ ID NO: 7643, 6Q_DLBCL (ARM); SEQ ID NO: 7644, 7P_DLBCL (ARM); SEQ ID NO: 7645, CARD11 (Gene); SEQ ID NO: 7646, CARD11 (Gene); SEQ ID NO: 7647, CARD11 (Gene); SEQ ID NO: 7648, CARD11 (Gene); SEQ ID NO: 7649, CARD11 (Gene); SEQ ID NO: 7650, CARD11 (Gene); SEQ ID NO: 7651, CARD11 (Gene); SEQ ID NO: 7652, CARD11 (Gene); SEQ ID NO: 7653, CARD11 (Gene); SEQ ID NO: 7654, CARD11 (Gene); SEQ ID NO: 7655, CARD11 (Gene); SEQ ID NO: 7656, CARD11 (Gene); SEQ ID NO: 7657, CARD11 (Gene); SEQ ID NO: 7658, CARD11 (Gene); SEQ ID NO: 7659, CARD11 (Gene); SEQ ID NO: 7660, CARD11 (Gene); SEQ ID NO: 7661, CARD11 (Gene); SEQ ID NO: 7662, CARD11 (Gene); SEQ ID NO: 7663, CARD11 (Gene); SEQ ID NO: 7664, CARD11 (Gene); SEQ ID NO: 7665, CARD11 (Gene); SEQ ID NO: 7666, CARD11 (Gene); SEQ ID NO: 7667, CARD11 (Gene); SEQ ID NO: 7668, CARD11 (Gene); SEQ ID NO: 7669, CARD11 (Gene); SEQ ID NO: 7670, 7P_DLBCL (ARM); SEQ ID NO: 7671, 7P_DLBCL (ARM); SEQ ID NO: 7672, 7P_DLBCL (ARM); SEQ ID NO: 7673, ACTB (Gene); SEQ ID NO: 7674, ACTB (Gene); SEQ ID NO: 7675, ACTB (Gene); SEQ ID NO: 7676, ACTB (Gene); SEQ ID NO: 7677, ACTB (Gene); SEQ ID NO: 7678, 7P_DLBCL (ARM); SEQ ID NO: 7679, MSI (MSI); SEQ ID NO: 7680, MSI (MSI); SEQ ID NO: 7681, 7P_DLBCL (ARM); SEQ ID NO: 7682, 7P_DLBCL (ARM); SEQ ID NO: 7683, 7P_DLBCL (ARM); SEQ ID NO: 7684, 7P_DLBCL (ARM); SEQ ID NO: 7685, 7P_DLBCL (ARM); SEQ ID NO: 7686, 7P_DLBCL (ARM); SEQ ID NO: 7687, 7P_DLBCL (ARM); SEQ ID NO: 7688, 7P_DLBCL (ARM); SEQ ID NO: 7689, 7P_DLBCL (ARM); SEQ ID NO: 7690, 7P_DLBCL (ARM); SEQ ID NO: 7691, 7P_DLBCL (ARM); SEQ ID NO: 7692, FP (FP); SEQ ID NO: 7693, 7P_DLBCL (ARM); SEQ ID NO: 7694, 7P_DLBCL (ARM); SEQ ID NO: 7695, 7P_DLBCL (ARM); SEQ ID NO: 7696, 7P_DLBCL (ARM); SEQ ID NO: 7697, IL6 (Gene); SEQ ID NO: 7698, IL6 (Gene); SEQ ID NO: 7699, IL6 (Gene); SEQ ID NO: 7700, IL6 (Gene); SEQ ID NO: 7701, IL6 (Gene); SEQ ID NO: 7702, 7P_DLBCL (ARM); SEQ ID NO: 7703, 7P_DLBCL (ARM); SEQ ID NO: 7704, 7P_DLBCL (ARM); SEQ ID NO: 7705, 7P_DLBCL (ARM); SEQ ID NO: 7706, 7P_DLBCL (ARM); SEQ ID NO: 7707, 7P_DLBCL (ARM); SEQ ID NO: 7708, 7P_DLBCL (ARM); SEQ ID NO: 7709, 7P_DLBCL (ARM); SEQ ID NO: 7710, 7P_DLBCL (ARM); SEQ ID NO: 7711, 7P_DLBCL (ARM); SEQ ID NO: 7712, 7P_DLBCL (ARM); SEQ ID NO: 7713, 7P_DLBCL (ARM); SEQ ID NO: 7714, 7P_DLBCL (ARM); SEQ ID NO: 7715, 7P_DLBCL (ARM); SEQ ID NO: 7716, 7P_DLBCL (ARM); SEQ ID NO: 7717, 7P_DLBCL (ARM); SEQ ID NO: 7718, 7P_DLBCL (ARM); SEQ ID NO: 7719, 7P_DLBCL (ARM); SEQ ID NO: 7720, 7P_DLBCL (ARM); SEQ ID NO: 7721, 7P_DLBCL (ARM); SEQ ID NO: 7722, 7P_DLBCL (ARM); SEQ ID NO: 7723, 7P_DLBCL (ARM); SEQ ID NO: 7724, 7P_DLBCL (ARM); SEQ ID NO: 7725, 7P_DLBCL (ARM); SEQ ID NO: 7726, 7P_DLBCL (ARM); SEQ ID NO: 7727, 7P_DLBCL (ARM); SEQ ID NO: 7728, 7P_DLBCL (ARM); SEQ ID NO: 7729, 7P_DLBCL (ARM); SEQ ID NO: 7730, 7P_DLBCL (ARM); SEQ ID NO: 7731, 7P_DLBCL (ARM); SEQ ID NO: 7732, 7P_DLBCL (ARM); SEQ ID NO: 7733, 7P_DLBCL (ARM); SEQ ID NO: 7734, 7P_DLBCL (ARM); SEQ ID NO: 7735, 7P_DLBCL (ARM); SEQ ID NO: 7736, 7Q_DLBCL (ARM); SEQ ID NO: 7737, 7Q_DLBCL (ARM); SEQ ID NO: 7738, 7Q_DLBCL (ARM); SEQ ID NO: 7739, 7Q_DLBCL (ARM); SEQ ID NO: 7740, 7Q_DLBCL (ARM); SEQ ID NO: 7741, 7Q_DLBCL (ARM); SEQ ID NO: 7742, MSI (MSI); SEQ ID NO: 7743, MSI (MSI); SEQ ID NO: 7744, 7Q_DLBCL (ARM); SEQ ID NO: 7745, 7Q_DLBCL (ARM); SEQ ID NO: 7746, 7Q_DLBCL (ARM); SEQ ID NO: 7747, 7Q_DLBCL (ARM); SEQ ID NO: 7748, 7Q_DLBCL (ARM); SEQ ID NO: 7749, 7Q_DLBCL (ARM); SEQ ID NO: 7750, 7Q_DLBCL (ARM); SEQ ID NO: 7751, FP (FP); SEQ ID NO: 7752, 7Q_DLBCL (ARM); SEQ ID NO: 7753, 7Q_DLBCL (ARM); SEQ ID NO: 7754, 7Q_DLBCL (ARM); SEQ ID NO: 7755, 7Q_DLBCL (ARM); SEQ ID NO: 7756, 7Q_DLBCL (ARM); SEQ ID NO: 7757, 7q22.1_DLBCL (FOCAL); SEQ ID NO: 7758, 7q22.1_DLBCL (FOCAL); SEQ ID NO: 7759, 7q22.1_DLBCL (FOCAL); SEQ ID NO: 7760, 7q22.1_DLBCL (FOCAL); SEQ ID NO: 7761, 7q22.1_DLBCL (FOCAL); SEQ ID NO: 7762, 7q22.1_DLBCL (FOCAL); SEQ ID NO: 7763, TRRAP (Gene); SEQ ID NO: 7764, TRRAP (Gene); SEQ ID NO: 7765, TRRAP (Gene); SEQ ID NO: 7766, TRRAP (Gene); SEQ ID NO: 7767, TRRAP (Gene); SEQ ID NO: 7768, TRRAP (Gene); SEQ ID NO: 7769, TRRAP (Gene); SEQ ID NO: 7770, TRRAP (Gene); SEQ ID NO: 7771, TRRAP (Gene); SEQ ID NO: 7772, TRRAP (Gene); SEQ ID NO: 7773, TRRAP (Gene); SEQ ID NO: 7774, TRRAP (Gene); SEQ ID NO: 7775, TRRAP (Gene); SEQ ID NO: 7776, TRRAP (Gene); SEQ ID NO: 7777, TRRAP (Gene); SEQ ID NO: 7778, TRRAP (Gene); SEQ ID NO: 7779, TRRAP (Gene); SEQ ID NO: 7780, TRRAP (Gene); SEQ ID NO: 7781, TRRAP (Gene); SEQ ID NO: 7782, TRRAP (Gene); SEQ ID NO: 7783, TRRAP (Gene); SEQ ID NO: 7784, TRRAP (Gene); SEQ ID NO: 7785, TRRAP (Gene); SEQ ID NO: 7786, TRRAP (Gene); SEQ ID NO: 7787, TRRAP (Gene); SEQ ID NO: 7788, TRRAP (Gene); SEQ ID NO: 7789, TRRAP (Gene); SEQ ID NO: 7790, TRRAP (Gene); SEQ ID NO: 7791, TRRAP (Gene); SEQ ID NO: 7792, TRRAP (Gene); SEQ ID NO: 7793, TRRAP (Gene); SEQ ID NO: 7794, TRRAP (Gene); SEQ ID NO: 7795, TRRAP (Gene); SEQ ID NO: 7796, TRRAP (Gene); SEQ ID NO: 7797, TRRAP (Gene); SEQ ID NO: 7798, TRRAP (Gene); SEQ ID NO: 7799, TRRAP (Gene); SEQ ID NO: 7800, TRRAP (Gene); SEQ ID NO: 7801, TRRAP (Gene); SEQ ID NO: 7802, TRRAP (Gene); SEQ ID NO: 7803, TRRAP (Gene); SEQ ID NO: 7804, TRRAP (Gene); SEQ ID NO: 7805, TRRAP (Gene); SEQ ID NO: 7806, TRRAP (Gene); SEQ ID NO: 7807, TRRAP (Gene); SEQ ID NO: 7808, TRRAP (Gene); SEQ ID NO: 7809, TRRAP (Gene); SEQ ID NO: 7810, TRRAP (Gene); SEQ ID NO: 7811, TRRAP (Gene); SEQ ID NO: 7812, TRRAP (Gene); SEQ ID NO: 7813, TRRAP (Gene); SEQ ID NO: 7814, TRRAP (Gene); SEQ ID NO: 7815, TRRAP (Gene); SEQ ID NO: 7816, TRRAP (Gene); SEQ ID NO: 7817, TRRAP (Gene); SEQ ID NO: 7818, TRRAP (Gene); SEQ ID NO: 7819, TRRAP (Gene); SEQ ID NO: 7820, TRRAP (Gene); SEQ ID NO: 7821, TRRAP (Gene); SEQ ID NO: 7822, TRRAP (Gene); SEQ ID NO: 7823, TRRAP (Gene); SEQ ID NO: 7824, TRRAP (Gene); SEQ ID NO: 7825, TRRAP (Gene); SEQ ID NO: 7826, TRRAP (Gene); SEQ ID NO: 7827, TRRAP (Gene); SEQ ID NO: 7828, TRRAP (Gene); SEQ ID NO: 7829, TRRAP (Gene); SEQ ID NO: 7830, TRRAP (Gene); SEQ ID NO: 7831, TRRAP (Gene); SEQ ID NO: 7832, TRRAP (Gene); SEQ ID NO: 7833, TRRAP (Gene); SEQ ID NO: 7834, TRRAP (Gene); SEQ ID NO: 7835, TRRAP (Gene); SEQ ID NO: 7836, 7q22.1_DLBCL (FOCAL); SEQ ID NO: 7837, 7q22.1_DLBCL (FOCAL); SEQ ID NO: 7838, 7q22.1_DLBCL (FOCAL); SEQ ID NO: 7839, 7q22.1_DLBCL (FOCAL); SEQ ID NO: 7840, 7q22.1_DLBCL (FOCAL); SEQ ID NO: 7841, 7q22.1_DLBCL (FOCAL); SEQ ID NO: 7842, 7q22.1_DLBCL (FOCAL); SEQ ID NO: 7843, 7q22.1_DLBCL (FOCAL); SEQ ID NO: 7844, GNB2 (Gene); SEQ ID NO: 7845, GNB2 (Gene); SEQ ID NO: 7846, GNB2 (Gene); SEQ ID NO: 7847, GNB2 (Gene); SEQ ID NO: 7848, GNB2 (Gene); SEQ ID NO: 7849, GNB2 (Gene); SEQ ID NO: 7850, GNB2 (Gene); SEQ ID NO: 7851, GNB2 (Gene); SEQ ID NO: 7852, GNB2 (Gene); SEQ ID NO: 7853, 7q22.1_DLBCL (FOCAL); SEQ ID NO: 7854, 7q22.1_DLBCL (FOCAL); SEQ ID NO: 7855, 7q22.1_DLBCL (FOCAL); SEQ ID NO: 7856, MSI (MSI); SEQ ID NO: 7857, MSI (MSI); SEQ ID NO: 7858, 7q22.1_DLBCL (FOCAL); SEQ ID NO: 7859, 7q22.1_DLBCL (FOCAL); SEQ ID NO: 7860, 7q22.1_DLBCL (FOCAL); SEQ ID NO: 7861, 7q22.1_DLBCL (FOCAL); SEQ ID NO: 7862, 7q22.1_DLBCL (FOCAL); SEQ ID NO: 7863, 7q22.1_DLBCL (FOCAL); SEQ ID NO: 7864, 7q22.1_DLBCL (FOCAL); SEQ ID NO: 7865, 7q22.1_DLBCL (FOCAL); SEQ ID NO: 7866, 7q22.1_DLBCL (FOCAL); SEQ ID NO: 7867, RELN (Gene); SEQ ID NO: 7868, FP (FP); SEQ ID NO: 7869, RELN (Gene); SEQ ID NO: 7870, RELN (Gene); SEQ ID NO: 7871, RELN (Gene); SEQ ID NO: 7872, RELN (Gene); SEQ ID NO: 7873, RELN (Gene); SEQ ID NO: 7874, RELN (Gene); SEQ ID NO: 7875, RELN (Gene); SEQ ID NO: 7876, RELN (Gene); SEQ ID NO: 7877, RELN (Gene); SEQ ID NO: 7878, RELN (Gene); SEQ ID NO: 7879, RELN (Gene); SEQ ID NO: 7880, RELN (Gene); SEQ ID NO: 7881, RELN (Gene); SEQ ID NO: 7882, RELN (Gene); SEQ ID NO: 7883, RELN (Gene); SEQ ID NO: 7884, RELN (Gene); SEQ ID NO: 7885, RELN (Gene); SEQ ID NO: 7886, RELN (Gene); SEQ ID NO: 7887, RELN (Gene); SEQ ID NO: 7888, RELN (Gene); SEQ ID NO: 7889, RELN (Gene); SEQ ID NO: 7890, RELN (Gene); SEQ ID NO: 7891, RELN (Gene); SEQ ID NO: 7892, RELN (Gene); SEQ ID NO: 7893, RELN (Gene); SEQ ID NO: 7894, RELN (Gene); SEQ ID NO: 7895, RELN (Gene); SEQ ID NO: 7896, RELN (Gene); SEQ ID NO: 7897, RELN (Gene); SEQ ID NO: 7898, RELN (Gene); SEQ ID NO: 7899, RELN (Gene); SEQ ID NO: 7900, RELN (Gene); SEQ ID NO: 7901, RELN (Gene); SEQ ID NO: 7902, RELN (Gene); SEQ ID NO: 7903, RELN (Gene); SEQ ID NO: 7904, RELN (Gene); SEQ ID NO: 7905, RELN (Gene); SEQ ID NO: 7906, RELN (Gene); SEQ ID NO: 7907, RELN (Gene); SEQ ID NO: 7908, RELN (Gene); SEQ ID NO: 7909, RELN (Gene); SEQ ID NO: 7910, RELN (Gene); SEQ ID NO: 7911, RELN (Gene); SEQ ID NO: 7912, RELN (Gene); SEQ ID NO: 7913, RELN (Gene); SEQ ID NO: 7914, RELN (Gene); SEQ ID NO: 7915, RELN (Gene); SEQ ID NO: 7916, RELN (Gene); SEQ ID NO: 7917, RELN (Gene); SEQ ID NO: 7918, RELN (Gene); SEQ ID NO: 7919, RELN (Gene); SEQ ID NO: 7920, RELN (Gene); SEQ ID NO: 7921, RELN (Gene); SEQ ID NO: 7922, RELN (Gene); SEQ ID NO: 7923, RELN (Gene); SEQ ID NO: 7924, RELN (Gene); SEQ ID NO: 7925, RELN (Gene); SEQ ID NO: 7926, RELN (Gene); SEQ ID NO: 7927, RELN (Gene); SEQ ID NO: 7928, RELN (Gene); SEQ ID NO: 7929, RELN (Gene); SEQ ID NO: 7930, RELN (Gene); SEQ ID NO: 7931, RELN (Gene); SEQ ID NO: 7932, RELN (Gene); SEQ ID NO: 7933, RELN (Gene); SEQ ID NO: 7934, 7q22.1_DLBCL (FOCAL); SEQ ID NO: 7935, RELN (Gene); SEQ ID NO: 7936, 7q22.1_DLBCL (FOCAL); SEQ ID NO: 7937, 7q22.1_DLBCL (FOCAL); SEQ ID NO: 7938, 7q22.1_DLBCL (FOCAL); SEQ ID NO: 7939, 7q22.1_DLBCL (FOCAL); SEQ ID NO: 7940, 7q22.1_DLBCL (FOCAL); SEQ ID NO: 7941, 7q22.1_DLBCL (FOCAL); SEQ ID NO: 7942, 7q22.1_DLBCL (FOCAL); SEQ ID NO: 7943, 7q22.1_DLBCL (FOCAL); SEQ ID NO: 7944, 7q22.1_DLBCL (FOCAL); SEQ ID NO: 7945, 7q22.1_DLBCL (FOCAL); SEQ ID NO: 7946, 7Q_DLBCL (ARM); SEQ ID NO: 7947, 7Q_DLBCL (ARM); SEQ ID NO: 7948, 7Q_DLBCL (ARM); SEQ ID NO: 7949, 7Q_DLBCL (ARM); SEQ ID NO: 7950, 7Q_DLBCL (ARM); SEQ ID NO: 7951, 7Q_DLBCL (ARM); SEQ ID NO: 7952, 7Q_DLBCL (ARM); SEQ ID NO: 7953, 7Q_DLBCL (ARM); SEQ ID NO: 7954, 7Q_DLBCL (ARM); SEQ ID NO: 7955, 7Q_DLBCL (ARM); SEQ ID NO: 7956, 7Q_DLBCL (ARM); SEQ ID NO: 7957, 7Q_DLBCL (ARM); SEQ ID NO: 7958, POT1 (Gene); SEQ ID NO: 7959, POT1 (Gene); SEQ ID NO: 7960, POT1 (Gene); SEQ ID NO: 7961, POT1 (Gene); SEQ ID NO: 7962, POT1 (Gene); SEQ ID NO: 7963, POT1 (Gene); SEQ ID NO: 7964, POT1 (Gene); SEQ ID NO: 7965, POT1 (Gene); SEQ ID NO: 7966, POT1 (Gene); SEQ ID NO: 7967, POT1 (Gene); SEQ ID NO: 7968, POT1 (Gene); SEQ ID NO: 7969, POT1 (Gene); SEQ ID NO: 7970, POT1 (Gene); SEQ ID NO: 7971, POT1 (Gene); SEQ ID NO: 7972, POT1 (Gene); SEQ ID NO: 7973, 7Q_DLBCL (ARM); SEQ ID NO: 7974, 7Q_DLBCL (ARM); SEQ ID NO: 7975, 7Q_DLBCL (ARM); SEQ ID NO: 7976, 7Q_DLBCL (ARM); SEQ ID NO: 7977, 7Q_DLBCL (ARM); SEQ ID NO: 7978, 7Q_DLBCL (ARM); SEQ ID NO: 7979, 7Q_DLBCL (ARM); SEQ ID NO: 7980, 7Q_DLBCL (ARM); SEQ ID NO: 7981, 7Q_DLBCL (ARM); SEQ ID NO: 7982, 7Q_DLBCL (ARM); SEQ ID NO: 7983, 7Q_DLBCL (ARM); SEQ ID NO: 7984, 7Q_DLBCL (ARM); SEQ ID NO: 7985, 7Q_DLBCL (ARM); SEQ ID NO: 7986, 7Q_DLBCL (ARM); SEQ ID NO: 7987, 7Q_DLBCL (ARM); SEQ ID NO: 7988, BRAF (Gene); SEQ ID NO: 7989, BRAF (Gene); SEQ ID NO: 7990, BRAF (Gene); SEQ ID NO: 7991, BRAF (Gene); SEQ ID NO: 7992, BRAF (Gene); SEQ ID NO: 7993, BRAF (Gene); SEQ ID NO: 7994, BRAF (Gene); SEQ ID NO: 7995, BRAF (Gene); SEQ ID NO: 7996, BRAF (Gene); SEQ ID NO: 7997, BRAF (Gene); SEQ ID NO: 7998, BRAF (Gene); SEQ ID NO: 7999, BRAF (Gene); SEQ ID NO: 8000, BRAF (Gene); SEQ ID NO: 8001, BRAF (Gene); SEQ ID NO: 8002, BRAF (Gene); SEQ ID NO: 8003, BRAF (Gene); SEQ ID NO: 8004, BRAF (Gene); SEQ ID NO: 8005, BRAF (Gene); SEQ ID NO: 8006, BRAF (Gene); SEQ ID NO: 8007, 7Q_DLBCL (ARM); SEQ ID NO: 8008, 7Q_DLBCL (ARM); SEQ ID NO: 8009, 7Q_DLBCL (ARM); SEQ ID NO: 8010, 7Q_DLBCL (ARM); SEQ ID NO: 8011, 7Q_DLBCL (ARM); SEQ ID NO: 8012, 7Q_DLBCL (ARM); SEQ ID NO: 8013, 7Q_DLBCL (ARM); SEQ ID NO: 8014, EZH2 (Gene); SEQ ID NO: 8015, EZH2 (Gene); SEQ ID NO: 8016, EZH2 (Gene); SEQ ID NO: 8017, EZH2 (Gene); SEQ ID NO: 8018, EZH2 (Gene); SEQ ID NO: 8019, EZH2 (Gene); SEQ ID NO: 8020, EZH2 (Gene); SEQ ID NO: 8021, EZH2 (Gene); SEQ ID NO: 8022, EZH2 (Gene); SEQ ID NO: 8023, EZH2 (Gene); SEQ ID NO: 8024, EZH2 (Gene); SEQ ID NO: 8025, EZH2 (Gene); SEQ ID NO: 8026, EZH2 (Gene); SEQ ID NO: 8027, EZH2 (Gene); SEQ ID NO: 8028, EZH2 (Gene); SEQ ID NO: 8029, EZH2 (Gene); SEQ ID NO: 8030, EZH2 (Gene); SEQ ID NO: 8031, EZH2 (Gene); SEQ ID NO: 8032, EZH2 (Gene); SEQ ID NO: 8033, EZH2 (Gene); SEQ ID NO: 8034, 7Q_DLBCL (ARM); SEQ ID NO: 8035, 7Q_DLBCL (ARM); SEQ ID NO: 8036, 7Q_DLBCL (ARM); SEQ ID NO: 8037, KMT2C (Gene); SEQ ID NO: 8038, KMT2C (Gene); SEQ ID NO: 8039, KMT2C (Gene); SEQ ID NO: 8040, KMT2C (Gene); SEQ ID NO: 8041, KMT2C (Gene); SEQ ID NO: 8042, KMT2C (Gene); SEQ ID NO: 8043, KMT2C (Gene); SEQ ID NO: 8044, KMT2C (Gene); SEQ ID NO: 8045, KMT2C (Gene); SEQ ID NO: 8046, KMT2C (Gene); SEQ ID NO: 8047, KMT2C (Gene); SEQ ID NO: 8048, KMT2C (Gene); SEQ ID NO: 8049, KMT2C (Gene); SEQ ID NO: 8050, KMT2C (Gene); SEQ ID NO: 8051, KMT2C (Gene); SEQ ID NO: 8052, KMT2C (Gene); SEQ ID NO: 8053, KMT2C (Gene); SEQ ID NO: 8054, KMT2C (Gene); SEQ ID NO: 8055, KMT2C (Gene); SEQ ID NO: 8056, KMT2C (Gene); SEQ ID NO: 8057, KMT2C (Gene); SEQ ID NO: 8058, KMT2C (Gene); SEQ ID NO: 8059, KMT2C (Gene); SEQ ID NO: 8060, KMT2C (Gene); SEQ ID NO: 8061, KMT2C (Gene); SEQ ID NO: 8062, KMT2C (Gene); SEQ ID NO: 8063, KMT2C (Gene); SEQ ID NO: 8064, KMT2C (Gene); SEQ ID NO: 8065, KMT2C (Gene); SEQ ID NO: 8066, KMT2C (Gene); SEQ ID NO: 8067, KMT2C (Gene); SEQ ID NO: 8068, KMT2C (Gene); SEQ ID NO: 8069, KMT2C (Gene); SEQ ID NO: 8070, KMT2C (Gene); SEQ ID NO: 8071, KMT2C (Gene); SEQ ID NO: 8072, KMT2C (Gene); SEQ ID NO: 8073, KMT2C (Gene); SEQ ID NO: 8074, KMT2C (Gene); SEQ ID NO: 8075, KMT2C (Gene); SEQ ID NO: 8076, KMT2C (Gene); SEQ ID NO: 8077, KMT2C (Gene); SEQ ID NO: 8078, KMT2C (Gene); SEQ ID NO: 8079, KMT2C (Gene); SEQ ID NO: 8080, KMT2C (Gene); SEQ ID NO: 8081, KMT2C (Gene); SEQ ID NO: 8082, KMT2C (Gene); SEQ ID NO: 8083, KMT2C (Gene); SEQ ID NO: 8084, KMT2C (Gene); SEQ ID NO: 8085, KMT2C (Gene); SEQ ID NO: 8086, KMT2C (Gene); SEQ ID NO: 8087, KMT2C (Gene); SEQ ID NO: 8088, KMT2C (Gene); SEQ ID NO: 8089, KMT2C (Gene); SEQ ID NO: 8090, KMT2C (Gene); SEQ ID NO: 8091, KMT2C (Gene); SEQ ID NO: 8092, KMT2C (Gene); SEQ ID NO: 8093, KMT2C (Gene); SEQ ID NO: 8094, KMT2C (Gene); SEQ ID NO: 8095, KMT2C (Gene); SEQ ID NO: 8096, KMT2C (Gene); SEQ ID NO: 8097, KMT2C (Gene); SEQ ID NO: 8098, KMT2C (Gene); SEQ ID NO: 8099, KMT2C (Gene); SEQ ID NO: 8100, KMT2C (Gene); SEQ ID NO: 8101, KMT2C (Gene); SEQ ID NO: 8102, KMT2C (Gene); SEQ ID NO: 8103, KMT2C (Gene); SEQ ID NO: 8104, KMT2C (Gene); SEQ ID NO: 8105, KMT2C (Gene); SEQ ID NO: 8106, KMT2C (Gene); SEQ ID NO: 8107, KMT2C (Gene); SEQ ID NO: 8108, KMT2C (Gene); SEQ ID NO: 8109, 7Q_DLBCL (ARM); SEQ ID NO: 8110, 7Q_DLBCL (ARM); SEQ ID NO: 8111, 7Q_DLBCL (ARM); SEQ ID NO: 8112, 7Q_DLBCL (ARM); SEQ ID NO: 8113, 7Q_DLBCL (ARM); SEQ ID NO: 8114, FP (FP); SEQ ID NO: 8115, 7Q_DLBCL (ARM); SEQ ID NO: 8116, 7Q_DLBCL (ARM); SEQ ID NO: 8117, 8P_CLL (ARM); SEQ ID NO: 8118, 8P_CLL (ARM); SEQ ID NO: 8119, FP (FP); SEQ ID NO: 8120, 8P_CLL (ARM); SEQ ID NO: 8121, 8P_CLL (ARM); SEQ ID NO: 8122, 8P_CLL (ARM); SEQ ID NO: 8123, 8P_CLL (ARM); SEQ ID NO: 8124, 8P_CLL (ARM); SEQ ID NO: 8125, 8P_CLL (ARM); SEQ ID NO: 8126, 8P_CLL (ARM); SEQ ID NO: 8127, 8P_CLL (ARM); SEQ ID NO: 8128, 8P_CLL (ARM); SEQ ID NO: 8129, 8P_CLL (ARM); SEQ ID NO: 8130, 8P_CLL (ARM); SEQ ID NO: 8131, 8P_CLL (ARM); SEQ ID NO: 8132, 8P_CLL (ARM); SEQ ID NO: 8133, 8P_CLL (ARM); SEQ ID NO: 8134, 8P_CLL (ARM); SEQ ID NO: 8135, 8P_CLL (ARM); SEQ ID NO: 8136, 8P_CLL (ARM); SEQ ID NO: 8137, 8P_CLL (ARM); SEQ ID NO: 8138, 8P_CLL (ARM); SEQ ID NO: 8139, 8P_CLL (ARM); SEQ ID NO: 8140, 8P_CLL (ARM); SEQ ID NO: 8141, 8P_CLL (ARM); SEQ ID NO: 8142, 8P_CLL (ARM); SEQ ID NO: 8143, 8P_CLL (ARM); SEQ ID NO: 8144, 8P_CLL (ARM); SEQ ID NO: 8145, 8P_CLL (ARM); SEQ ID NO: 8146, TNFRSF10B (Gene); SEQ ID NO: 8147, TNFRSF10B (Gene); SEQ ID NO: 8148, TNFRSF10B (Gene); SEQ ID NO: 8149, TNFRSF10B (Gene); SEQ ID NO: 8150, TNFRSF10B (Gene); SEQ ID NO: 8151, TNFRSF10B (Gene); SEQ ID NO: 8152, TNFRSF10B (Gene); SEQ ID NO: 8153, TNFRSF10B (Gene); SEQ ID NO: 8154, TNFRSF10B (Gene); SEQ ID NO: 8155, 8P_CLL (ARM); SEQ ID NO: 8156, TNFRSF10A (Gene); SEQ ID NO: 8157, TNFRSF10A (Gene); SEQ ID NO: 8158, TNFRSF10A (Gene); SEQ ID NO: 8159, TNFRSF10A (Gene); SEQ ID NO: 8160, TNFRSF10A (Gene); SEQ ID NO: 8161, TNFRSF10A (Gene); SEQ ID NO: 8162, TNFRSF10A (Gene); SEQ ID NO: 8163, TNFRSF10A (Gene); SEQ ID NO: 8164, TNFRSF10A (Gene); SEQ ID NO: 8165, TNFRSF10A (Gene); SEQ ID NO: 8166, 8P_CLL (ARM); SEQ ID NO: 8167, 8P_CLL (ARM); SEQ ID NO: 8168, 8P_CLL (ARM); SEQ ID NO: 8169, 8P_CLL (ARM); SEQ ID NO: 8170, 8P_CLL (ARM); SEQ ID NO: 8171, 8P_CLL (ARM); SEQ ID NO: 8172, 8P_CLL (ARM); SEQ ID NO: 8173, 8P_CLL (ARM); SEQ ID NO: 8174, 8P_CLL (ARM); SEQ ID NO: 8175, 8P_CLL (ARM); SEQ ID NO: 8176, MSI (MSI); SEQ ID NO: 8177, MSI (MSI); SEQ ID NO: 8178, 8P_CLL (ARM); SEQ ID NO: 8179, FP (FP); SEQ ID NO: 8180, 8P_CLL (ARM); SEQ ID NO: 8181, IKBKB (Gene); SEQ ID NO: 8182, IKBKB (Gene); SEQ ID NO: 8183, IKBKB (Gene); SEQ ID NO: 8184, IKBKB (Gene); SEQ ID NO: 8185, IKBKB (Gene); SEQ ID NO: 8186, IKBKB (Gene); SEQ ID NO: 8187, IKBKB (Gene); SEQ ID NO: 8188, IKBKB (Gene); SEQ ID NO: 8189, IKBKB (Gene); SEQ ID NO: 8190, IKBKB (Gene); SEQ ID NO: 8191, IKBKB (Gene); SEQ ID NO: 8192, IKBKB (Gene); SEQ ID NO: 8193, IKBKB (Gene); SEQ ID NO: 8194, IKBKB (Gene); SEQ ID NO: 8195, IKBKB (Gene); SEQ ID NO: 8196, IKBKB (Gene); SEQ ID NO: 8197, IKBKB (Gene); SEQ ID NO: 8198, IKBKB (Gene); SEQ ID NO: 8199, IKBKB (Gene); SEQ ID NO: 8200, IKBKB (Gene); SEQ ID NO: 8201, IKBKB (Gene); SEQ ID NO: 8202, 8P (ARM); SEQ ID NO: 8203, 8P (ARM); SEQ ID NO: 8204, 8P (ARM); SEQ ID NO: 8205, LYN (Gene); SEQ ID NO: 8206, LYN (Gene); SEQ ID NO: 8207, LYN (Gene); SEQ ID NO: 8208, LYN (Gene); SEQ ID NO: 8209, LYN (Gene); SEQ ID NO: 8210, LYN (Gene); SEQ ID NO: 8211, LYN (Gene); SEQ ID NO: 8212, LYN (Gene); SEQ ID NO: 8213, LYN (Gene); SEQ ID NO: 8214, LYN (Gene); SEQ ID NO: 8215, LYN (Gene); SEQ ID NO: 8216, LYN (Gene); SEQ ID NO: 8217, 8P (ARM); SEQ ID NO: 8218, 8P (ARM); SEQ ID NO: 8219, 8q12.1_DLBCL (FOCAL); SEQ ID NO: 8220, TOX (Gene); SEQ ID NO: 8221, TOX (Gene); SEQ ID NO: 8222, TOX (Gene); SEQ ID NO: 8223, TOX (Gene); SEQ ID NO: 8224, TOX (Gene); SEQ ID NO: 8225, TOX (Gene); SEQ ID NO: 8226, TOX (Gene); SEQ ID NO: 8227, TOX (Gene); SEQ ID NO: 8228, TOX (Gene); SEQ ID NO: 8229, TOX (Gene); SEQ ID NO: 8230, 8q12.1_DLBCL (FOCAL); SEQ ID NO: 8231, 8q12.1_DLBCL (FOCAL); SEQ ID NO: 8232, 8q12.1_DLBCL (FOCAL); SEQ ID NO: 8233, 8q12.1_DLBCL (FOCAL); SEQ ID NO: 8234, 8q12.1_DLBCL (FOCAL); SEQ ID NO: 8235, 8q12.1_DLBCL (FOCAL); SEQ ID NO: 8236, 8q12.1_DLBCL (FOCAL); SEQ ID NO: 8237, 8q12.1_DLBCL (FOCAL); SEQ ID NO: 8238, 8P (ARM); SEQ ID NO: 8239, 8P (ARM); SEQ ID NO: 8240, 8P (ARM); SEQ ID NO: 8241, 8P (ARM); SEQ ID NO: 8242, FP (FP); SEQ ID NO: 8243, 8P (ARM); SEQ ID NO: 8244, 8P (ARM); SEQ ID NO: 8245, 8P (ARM); SEQ ID NO: 8246, 8P (ARM); SEQ ID NO: 8247, 8P (ARM); SEQ ID NO: 8248, 8P (ARM); SEQ ID NO: 8249, 8P (ARM); SEQ ID NO: 8250, 8P (ARM); SEQ ID NO: 8251, 8P (ARM); SEQ ID NO: 8252, 8P (ARM); SEQ ID NO: 8253, 8P (ARM); SEQ ID NO: 8254, 8P (ARM); SEQ ID NO: 8255, 8P (ARM); SEQ ID NO: 8256, 8P (ARM); SEQ ID NO: 8257, 8P (ARM); SEQ ID NO: 8258, 8P (ARM); SEQ ID NO: 8259, 8P (ARM); SEQ ID NO: 8260, MSI (MSI); SEQ ID NO: 8261, MSI (MSI); SEQ ID NO: 8262, 8P (ARM); SEQ ID NO: 8263, 8P (ARM); SEQ ID NO: 8264, 8P (ARM); SEQ ID NO: 8265, 8P (ARM); SEQ ID NO: 8266, 8Q (ARM); SEQ ID NO: 8267, 8Q (ARM); SEQ ID NO: 8268, 8Q (ARM); SEQ ID NO: 8269, UBR5 (Gene); SEQ ID NO: 8270, UBR5 (Gene); SEQ ID NO: 8271, UBR5 (Gene); SEQ ID NO: 8272, UBR5 (Gene); SEQ ID NO: 8273, UBR5 (Gene); SEQ ID NO: 8274, UBR5 (Gene); SEQ ID NO: 8275, UBR5 (Gene); SEQ ID NO: 8276, UBR5 (Gene); SEQ ID NO: 8277, UBR5 (Gene); SEQ ID NO: 8278, UBR5 (Gene); SEQ ID NO: 8279, UBR5 (Gene); SEQ ID NO: 8280, UBR5 (Gene); SEQ ID NO: 8281, UBR5 (Gene); SEQ ID NO: 8282, UBR5 (Gene); SEQ ID NO: 8283, UBR5 (Gene); SEQ ID NO: 8284, UBR5 (Gene); SEQ ID NO: 8285, UBR5 (Gene); SEQ ID NO: 8286, UBR5 (Gene); SEQ ID NO: 8287, UBR5 (Gene); SEQ ID NO: 8288, UBR5 (Gene); SEQ ID NO: 8289, UBR5 (Gene); SEQ ID NO: 8290, UBR5 (Gene); SEQ ID NO: 8291, UBR5 (Gene); SEQ ID NO: 8292, UBR5 (Gene); SEQ ID NO: 8293, UBR5 (Gene); SEQ ID NO: 8294, UBR5 (Gene); SEQ ID NO: 8295, UBR5 (Gene); SEQ ID NO: 8296, UBR5 (Gene); SEQ ID NO: 8297, UBR5 (Gene); SEQ ID NO: 8298, UBR5 (Gene); SEQ ID NO: 8299, UBR5 (Gene); SEQ ID NO: 8300, UBR5 (Gene); SEQ ID NO: 8301, UBR5 (Gene); SEQ ID NO: 8302, UBR5 (Gene); SEQ ID NO: 8303, UBR5 (Gene); SEQ ID NO: 8304, UBR5 (Gene); SEQ ID NO: 8305, UBR5 (Gene); SEQ ID NO: 8306, UBR5 (Gene); SEQ ID NO: 8307, UBR5 (Gene); SEQ ID NO: 8308, UBR5 (Gene); SEQ ID NO: 8309, UBR5 (Gene); SEQ ID NO: 8310, UBR5 (Gene); SEQ ID NO: 8311, UBR5 (Gene); SEQ ID NO: 8312, UBR5 (Gene); SEQ ID NO: 8313, UBR5 (Gene); SEQ ID NO: 8314, UBR5 (Gene); SEQ ID NO: 8315, UBR5 (Gene); SEQ ID NO: 8316, UBR5 (Gene); SEQ ID NO: 8317, UBR5 (Gene); SEQ ID NO: 8318, UBR5 (Gene); SEQ ID NO: 8319, UBR5 (Gene); SEQ ID NO: 8320, UBR5 (Gene); SEQ ID NO: 8321, UBR5 (Gene); SEQ ID NO: 8322, UBR5 (Gene); SEQ ID NO: 8323, UBR5 (Gene); SEQ ID NO: 8324, UBR5 (Gene); SEQ ID NO: 8325, UBR5 (Gene); SEQ ID NO: 8326, UBR5 (Gene); SEQ ID NO: 8327, UBR5 (Gene); SEQ ID NO: 8328, UBR5 (Gene); SEQ ID NO: 8329, 8Q (ARM); SEQ ID NO: 8330, 8Q (ARM); SEQ ID NO: 8331, 8Q (ARM); SEQ ID NO: 8332, 8Q (ARM); SEQ ID NO: 8333, 8Q (ARM); SEQ ID NO: 8334, 8Q (ARM); SEQ ID NO: 8335, 8Q (ARM); SEQ ID NO: 8336, 8Q (ARM); SEQ ID NO: 8337, 8Q (ARM); SEQ ID NO: 8338, 8Q (ARM); SEQ ID NO: 8339, 8Q (ARM); SEQ ID NO: 8340, 8Q (ARM); SEQ ID NO: 8341, 8Q (ARM); SEQ ID NO: 8342, 8Q (ARM); SEQ ID NO: 8343, 8Q (ARM); SEQ ID NO: 8344, 8Q (ARM); SEQ ID NO: 8345, 8Q (ARM); SEQ ID NO: 8346, 8Q (ARM); SEQ ID NO: 8347, 8Q (ARM); SEQ ID NO: 8348, 8Q (ARM); SEQ ID NO: 8349, 8Q (ARM); SEQ ID NO: 8350, MYC_SV (SV); SEQ ID NO: 8351, MYC_SV (SV); SEQ ID NO: 8352, MYC_SV (SV); SEQ ID NO: 8353, MYC_SV (SV); SEQ ID NO: 8354, MYC_SV (SV); SEQ ID NO: 8355, MYC_SV (SV); SEQ ID NO: 8356, MYC_SV (SV); SEQ ID NO: 8357, MYC_SV (SV); SEQ ID NO: 8358, MYC_SV (SV); SEQ ID NO: 8359, MYC_SV (SV); SEQ ID NO: 8360, MYC_SV (SV); SEQ ID NO: 8361, MYC_SV (SV); SEQ ID NO: 8362, MYC_SV (SV); SEQ ID NO: 8363, MYC_SV (SV); SEQ ID NO: 8364, MYC_SV (SV); SEQ ID NO: 8365, 8Q (ARM); SEQ ID NO: 8366, 8Q (ARM); SEQ ID NO: 8367, 8Q (ARM); SEQ ID NO: 8368, 8Q (ARM); SEQ ID NO: 8369, 8Q (ARM); SEQ ID NO: 8370, 8q24.22_DLBCL (FOCAL); SEQ ID NO: 8371, 8q24.22_DLBCL (FOCAL); SEQ ID NO: 8372, 8q24.22_DLBCL (FOCAL); SEQ ID NO: 8373, 8q24.22_DLBCL (FOCAL); SEQ ID NO: 8374, 8q24.22_DLBCL (FOCAL); SEQ ID NO: 8375, 8q24.22_DLBCL (FOCAL); SEQ ID NO: 8376, 8q24.22_DLBCL (FOCAL); SEQ ID NO: 8377, 8q24.22_DLBCL (FOCAL); SEQ ID NO: 8378, 8q24.22_DLBCL (FOCAL); SEQ ID NO: 8379, 8Q (ARM); SEQ ID NO: 8380, 8Q (ARM); SEQ ID NO: 8381, 8Q (ARM); SEQ ID NO: 8382, 8Q (ARM); SEQ ID NO: 8383, 8Q (ARM); SEQ ID NO: 8384, 8Q (ARM); SEQ ID NO: 8385, 8Q (ARM); SEQ ID NO: 8386, 8Q (ARM); SEQ ID NO: 8387, 8Q (ARM); SEQ ID NO: 8388, FP (FP); SEQ ID NO: 8389, 8Q (ARM); SEQ ID NO: 8390, 8Q (ARM); SEQ ID NO: 8391, 8Q (ARM); SEQ ID NO: 8392, 8Q (ARM); SEQ ID NO: 8393, 8Q (ARM); SEQ ID NO: 8394, 8Q (ARM); SEQ ID NO: 8395, 8Q (ARM); SEQ ID NO: 8396, 8Q (ARM); SEQ ID NO: 8397, 9P (ARM); SEQ ID NO: 8398, FP (FP); SEQ ID NO: 8399, 9P (ARM); SEQ ID NO: 8400, 9P (ARM); SEQ ID NO: 8401, 9p24.1_DLBCL (FOCAL); SEQ ID NO: 8402, 9p24.1_DLBCL (FOCAL); SEQ ID NO: 8403, 9p24.1_DLBCL (FOCAL); SEQ ID NO: 8404, 9p24.1_DLBCL (FOCAL); SEQ ID NO: 8405, JAK2 (Gene); SEQ ID NO: 8406, JAK2 (Gene); SEQ ID NO: 8407, JAK2 (Gene); SEQ ID NO: 8408, JAK2 (Gene); SEQ ID NO: 8409, JAK2 (Gene); SEQ ID NO: 8410, JAK2 (Gene); SEQ ID NO: 8411, JAK2 (Gene); SEQ ID NO: 8412, JAK2 (Gene); SEQ ID NO: 8413, JAK2 (Gene); SEQ ID NO: 8414, JAK2 (Gene); SEQ ID NO: 8415, JAK2 (Gene); SEQ ID NO: 8416, JAK2 (Gene); SEQ ID NO: 8417, JAK2 (Gene); SEQ ID NO: 8418, JAK2 (Gene); SEQ ID NO: 8419, JAK2 (Gene); SEQ ID NO: 8420, JAK2 (Gene); SEQ ID NO: 8421, JAK2 (Gene); SEQ ID NO: 8422, JAK2 (Gene); SEQ ID NO: 8423, JAK2 (Gene); SEQ ID NO: 8424, JAK2 (Gene); SEQ ID NO: 8425, JAK2 (Gene); SEQ ID NO: 8426, JAK2 (Gene); SEQ ID NO: 8427, JAK2 (Gene); SEQ ID NO: 8428, 9p24.1_DLBCL (FOCAL); SEQ ID NO: 8429, 9p24.1_DLBCL (FOCAL); SEQ ID NO: 8430, CD274_SV (SV); SEQ ID NO: 8431, CD274_SV (SV); SEQ ID NO: 8432, CD274_SV (SV); SEQ ID NO: 8433, CD274_SV (SV); SEQ ID NO: 8434, CD274_SV (SV); SEQ ID NO: 8435, CD274_SV (SV); SEQ ID NO: 8436, CD274_SV (SV); SEQ ID NO: 8437, CD274_SV (SV); SEQ ID NO: 8438, CD274_SV (SV); SEQ ID NO: 8439, CD274_SV (SV); SEQ ID NO: 8440, CD274_SV (SV); SEQ ID NO: 8441, CD274_SV (SV); SEQ ID NO: 8442, CD274 (Gene); SEQ ID NO: 8443, CD274 (Gene); SEQ ID NO: 8444, CD274 (Gene); SEQ ID NO: 8445, CD274 (Gene); SEQ ID NO: 8446, CD274_3UTR (SV); SEQ ID NO: 8447, CD274_3UTR (SV); SEQ ID NO: 8448, CD274_3UTR (SV); SEQ ID NO: 8449, CD274_3UTR (SV); SEQ ID NO: 8450, CD274_3UTR (SV); SEQ ID NO: 8451, CD274_3UTR (SV); SEQ ID NO: 8452, CD274_3UTR (SV); SEQ ID NO: 8453, CD274-PDCD1LG2 intergenic region_SV (SV); SEQ ID NO: 8454, CD274-PDCD1LG2 intergenic region_SV (SV); SEQ ID NO: 8455, CD274-PDCD1LG2 intergenic region_SV (SV); SEQ ID NO: 8456, CD274-PDCD1LG2 intergenic region_SV (SV); SEQ ID NO: 8457, CD274-PDCD1LG2 intergenic region_SV (SV); SEQ ID NO: 8458, CD274-PDCD1LG2 intergenic region_SV (SV); SEQ ID NO: 8459, CD274-PDCD1LG2 intergenic region_SV (SV); SEQ ID NO: 8460, CD274-PDCD1LG2 intergenic region_SV (SV); SEQ ID NO: 8461, CD274-PDCD1LG2 intergenic region_SV (SV); SEQ ID NO: 8462, CD274-PDCD1LG2 intergenic region_SV (SV); SEQ ID NO: 8463, CD274-PDCD1LG2 intergenic region_SV (SV); SEQ ID NO: 8464, CD274-PDCD1LG2 intergenic region_SV (SV); SEQ ID NO: 8465, CD274-PDCD1LG2 intergenic region_SV (SV); SEQ ID NO: 8466, CD274-PDCD1LG2 intergenic region_SV (SV); SEQ ID NO: 8467, CD274-PDCD1LG2 intergenic region_SV (SV); SEQ ID NO: 8468, CD274-PDCD1LG2 intergenic region_SV (SV); SEQ ID NO: 8469, CD274-PDCD1LG2 intergenic region_SV (SV); SEQ ID NO: 8470, CD274-PDCD1LG2 intergenic region_SV (SV); SEQ ID NO: 8471, CD274-PDCD1LG2 intergenic region_SV (SV); SEQ ID NO: 8472, CD274-PDCD1LG2 intergenic region_SV (SV); SEQ ID NO: 8473, CD274-PDCD1LG2 intergenic region_SV (SV); SEQ ID NO: 8474, CD274-PDCD1LG2 intergenic region_SV (SV); SEQ ID NO: 8475, CD274-PDCD1LG2 intergenic region_SV (SV); SEQ ID NO: 8476, CD274-PDCD1LG2 intergenic region_SV (SV); SEQ ID NO: 8477, CD274-PDCD1LG2 intergenic region_SV (SV); SEQ ID NO: 8478, CD274-PDCD1LG2 intergenic region_SV (SV); SEQ ID NO: 8479, CD274-PDCD1LG2 intergenic region_SV (SV); SEQ ID NO: 8480, CD274-PDCD1LG2 intergenic region_SV (SV); SEQ ID NO: 8481, CD274-PDCD1LG2 intergenic region_SV (SV); SEQ ID NO: 8482, CD274-PDCD1LG2 intergenic region_SV (SV); SEQ ID NO: 8483, CD274-PDCD1LG2 intergenic region_SV (SV); SEQ ID NO: 8484, CD274-PDCD1LG2 intergenic region_SV (SV); SEQ ID NO: 8485, CD274-PDCD1LG2 intergenic region_SV (SV); SEQ ID NO: 8486, CD274-PDCD1LG2 intergenic region_SV (SV); SEQ ID NO: 8487, CD274-PDCD1LG2 intergenic region_SV (SV); SEQ ID NO: 8488, CD274-PDCD1LG2 intergenic region_SV (SV); SEQ ID NO: 8489, CD274-PDCD1LG2 intergenic region_SV (SV); SEQ ID NO: 8490, CD274-PDCD1LG2 intergenic region_SV (SV); SEQ ID NO: 8491, CD274-PDCD1LG2 intergenic region_SV (SV); SEQ ID NO: 8492, CD274-PDCD1LG2 intergenic region_SV (SV); SEQ ID NO: 8493, CD274-PDCD1LG2 intergenic region_SV (SV); SEQ ID NO: 8494, CD274-PDCD1LG2 intergenic region_SV (SV); SEQ ID NO: 8495, CD274-PDCD1LG2 intergenic region_SV (SV); SEQ ID NO: 8496, CD274-PDCD1LG2 intergenic region_SV (SV); SEQ ID NO: 8497, CD274-PDCD1LG2 intergenic region_SV (SV); SEQ ID NO: 8498, CD274-PDCD1LG2 intergenic region_SV (SV); SEQ ID NO: 8499, CD274-PDCD1LG2 intergenic region_SV (SV); SEQ ID NO: 8500, CD274-PDCD1LG2 intergenic region_SV (SV); SEQ ID NO: 8501, CD274-PDCD1LG2 intergenic region_SV (SV); SEQ ID NO: 8502, CD274-PDCD1LG2 intergenic region_SV (SV); SEQ ID NO: 8503, CD274-PDCD1LG2 intergenic region_SV (SV); SEQ ID NO: 8504, CD274-PDCD1LG2 intergenic region_SV (SV); SEQ ID NO: 8505, CD274-PDCD1LG2 intergenic region_SV (SV); SEQ ID NO: 8506, CD274-PDCD1LG2 intergenic region_SV (SV); SEQ ID NO: 8507, CD274-PDCD1LG2 intergenic region_SV (SV); SEQ ID NO: 8508, CD274-PDCD1LG2 intergenic region_SV (SV); SEQ ID NO: 8509, CD274-PDCD1LG2 intergenic region_SV (SV); SEQ ID NO: 8510, CD274-PDCD1LG2 intergenic region_SV (SV); SEQ ID NO: 8511, CD274-PDCD1LG2 intergenic region_SV (SV); SEQ ID NO: 8512, CD274-PDCD1LG2 intergenic region_SV (SV); SEQ ID NO: 8513, CD274-PDCD1LG2 intergenic region_SV (SV); SEQ ID NO: 8514, CD274-PDCD1LG2 intergenic region_SV (SV); SEQ ID NO: 8515, CD274-PDCD1LG2 intergenic region_SV (SV); SEQ ID NO: 8516, CD274-PDCD1LG2 intergenic region_SV (SV); SEQ ID NO: 8517, CD274-PDCD1LG2 intergenic region_SV (SV); SEQ ID NO: 8518, CD274-PDCD1LG2 intergenic region_SV (SV); SEQ ID NO: 8519, CD274-PDCD1LG2 intergenic region_SV (SV); SEQ ID NO: 8520, CD274-PDCD1LG2 intergenic region_SV (SV); SEQ ID NO: 8521, CD274-PDCD1LG2 intergenic region_SV (SV); SEQ ID NO: 8522, CD274-PDCD1LG2 intergenic region_SV (SV); SEQ ID NO: 8523, CD274-PDCD1LG2 intergenic region_SV (SV); SEQ ID NO: 8524, CD274-PDCD1LG2 intergenic region_SV (SV); SEQ ID NO: 8525, CD274-PDCD1LG2 intergenic region_SV (SV); SEQ ID NO: 8526, CD274-PDCD1LG2 intergenic region_SV (SV); SEQ ID NO: 8527, CD274-PDCD1LG2 intergenic region_SV (SV); SEQ ID NO: 8528, CD274-PDCD1LG2 intergenic region_SV (SV); SEQ ID NO: 8529, CD274-PDCD1LG2 intergenic region_SV (SV); SEQ ID NO: 8530, CD274-PDCD1LG2 intergenic region_SV (SV); SEQ ID NO: 8531, CD274-PDCD1LG2 intergenic region_SV (SV); SEQ ID NO: 8532, CD274-PDCD1LG2 intergenic region_SV (SV); SEQ ID NO: 8533, CD274-PDCD1LG2 intergenic region_SV (SV); SEQ ID NO: 8534, CD274-PDCD1LG2 intergenic region_SV (SV); SEQ ID NO: 8535, CD274-PDCD1LG2 intergenic region_SV (SV); SEQ ID NO: 8536, CD274-PDCD1LG2 intergenic region_SV (SV); SEQ ID NO: 8537, CD274-PDCD1LG2 intergenic region_SV (SV); SEQ ID NO: 8538, CD274-PDCD1LG2 intergenic region_SV (SV); SEQ ID NO: 8539, CD274-PDCD1LG2 intergenic region_SV (SV); SEQ ID NO: 8540, CD274-PDCD1LG2 intergenic region_SV (SV); SEQ ID NO: 8541, CD274-PDCD1LG2 intergenic region_SV (SV); SEQ ID NO: 8542, CD274-PDCD1LG2 intergenic region_SV (SV); SEQ ID NO: 8543, CD274-PDCD1LG2 intergenic region_SV (SV); SEQ ID NO: 8544, CD274-PDCD1LG2 intergenic region_SV (SV); SEQ ID NO: 8545, CD274-PDCD1LG2 intergenic region_SV (SV); SEQ ID NO: 8546, CD274-PDCD1LG2 intergenic region_SV (SV); SEQ ID NO: 8547, CD274-PDCD1LG2 intergenic region_SV (SV); SEQ ID NO: 8548, PDCD1LG2_SV (SV); SEQ ID NO: 8549, PDCD1LG2_SV (SV); SEQ ID NO: 8550, PDCD1LG2_SV (SV); SEQ ID NO: 8551, PDCD1LG2_SV (SV); SEQ ID NO: 8552, PDCD1LG2_SV (SV); SEQ ID NO: 8553, PDCD1LG2_SV (SV); SEQ ID NO: 8554, PDCD1LG2_SV (SV); SEQ ID NO: 8555, PDCD1LG2_SV (SV); SEQ ID NO: 8556, PDCD1LG2_SV (SV); SEQ ID NO: 8557, PDCD1LG2_SV (SV); SEQ ID NO: 8558, PDCD1LG2_SV (SV); SEQ ID NO: 8559, PDCD1LG2_SV (SV); SEQ ID NO: 8560, PDCD1LG2_SV (SV); SEQ ID NO: 8561, PDCD1LG2_SV (SV); SEQ ID NO: 8562, PDCD1LG2_SV (SV); SEQ ID NO: 8563, PDCD1LG2_SV (SV); SEQ ID NO: 8564, PDCD1LG2_SV (SV); SEQ ID NO: 8565, PDCD1LG2_SV (SV); SEQ ID NO: 8566, PDCD1LG2_SV (SV); SEQ ID NO: 8567, PDCD1LG2_SV (SV); SEQ ID NO: 8568, PDCD1LG2_SV (SV); SEQ ID NO: 8569, PDCD1LG2_SV (SV); SEQ ID NO: 8570, PDCD1LG2_SV (SV); SEQ ID NO: 8571, PDCD1LG2_SV (SV); SEQ ID NO: 8572, PDCD1LG2_SV (SV); SEQ ID NO: 8573, PDCD1LG2_SV (SV); SEQ ID NO: 8574, PDCD1LG2_SV (SV); SEQ ID NO: 8575, PDCD1LG2_SV (SV); SEQ ID NO: 8576, PDCD1LG2_SV (SV); SEQ ID NO: 8577, PDCD1LG2_SV (SV); SEQ ID NO: 8578, PDCD1LG2_SV (SV); SEQ ID NO: 8579, PDCD1LG2_SV (SV); SEQ ID NO: 8580, PDCD1LG2_SV (SV); SEQ ID NO: 8581, PDCD1LG2 (Gene); SEQ ID NO: 8582, PDCD1LG2 (Gene); SEQ ID NO: 8583, PDCD1LG2 (Gene); SEQ ID NO: 8584, PDCD1LG2_SV (SV); SEQ ID NO: 8585, PDCD1LG2_SV (SV); SEQ ID NO: 8586, PDCD1LG2_SV (SV); SEQ ID NO: 8587, PDCD1LG2_SV (SV); SEQ ID NO: 8588, PDCD1LG2_SV (SV); SEQ ID NO: 8589, PDCD1LG2_SV (SV); SEQ ID NO: 8590, PDCD1LG2_SV (SV); SEQ ID NO: 8591, PDCD1LG2_SV (SV); SEQ ID NO: 8592, PDCD1LG2_SV (SV); SEQ ID NO: 8593, PDCD1LG2_SV (SV); SEQ ID NO: 8594, PDCD1LG2_SV (SV); SEQ ID NO: 8595, PDCD1LG2_SV (SV); SEQ ID NO: 8596, PDCD1LG2_SV (SV); SEQ ID NO: 8597, PDCD1LG2_SV (SV); SEQ ID NO: 8598, PDCD1LG2_SV (SV); SEQ ID NO: 8599, PDCD1LG2_3UTR (SV); SEQ ID NO: 8600, PDCD1LG2_SV (SV); SEQ ID NO: 8601, PDCD1LG2_SV (SV); SEQ ID NO: 8602, PDCD1LG2_SV (SV); SEQ ID NO: 8603, PDCD1LG2_SV (SV); SEQ ID NO: 8604, PDCD1LG2_SV (SV); SEQ ID NO: 8605, PDCD1LG2_SV (SV); SEQ ID NO: 8606, PDCD1LG2_SV (SV); SEQ ID NO: 8607, PDCD1LG2_SV (SV); SEQ ID NO: 8608, PDCD1LG2_SV (SV); SEQ ID NO: 8609, PDCD1LG2_SV (SV); SEQ ID NO: 8610, 9p24.1_DLBCL (FOCAL); SEQ ID NO: 8611, 9p24.1_DLBCL (FOCAL); SEQ ID NO: 8612, 9P (ARM); SEQ ID NO: 8613, 9P (ARM); SEQ ID NO: 8614, 9P (ARM); SEQ ID NO: 8615, 9P (ARM); SEQ ID NO: 8616, 9P (ARM); SEQ ID NO: 8617, 9P (ARM); SEQ ID NO: 8618, 9P (ARM); SEQ ID NO: 8619, 9P (ARM); SEQ ID NO: 8620, 9P (ARM); SEQ ID NO: 8621, 9P (ARM); SEQ ID NO: 8622, 9P (ARM); SEQ ID NO: 8623, 9P (ARM); SEQ ID NO: 8624, 9P (ARM); SEQ ID NO: 8625, 9P (ARM); SEQ ID NO: 8626, 9P (ARM); SEQ ID NO: 8627, 9P (ARM); SEQ ID NO: 8628, 9P (ARM); SEQ ID NO: 8629, 9p21.3_DLBCL (FOCAL); SEQ ID NO: 8630, 9p21.3_DLBCL (FOCAL); SEQ ID NO: 8631, 9p21.3_DLBCL (FOCAL); SEQ ID NO: 8632, 9p21.3_DLBCL (FOCAL); SEQ ID NO: 8633, 9p21.3_DLBCL (FOCAL); SEQ ID NO: 8634, 9p21.3_DLBCL (FOCAL); SEQ ID NO: 8635, 9p21.3_DLBCL (FOCAL); SEQ ID NO: 8636, 9p21.3_DLBCL (FOCAL); SEQ ID NO: 8637, CDKN2A (Gene); SEQ ID NO: 8638, CDKN2A (Gene); SEQ ID NO: 8639, CDKN2A (Gene); SEQ ID NO: 8640, CDKN2A (Gene); SEQ ID NO: 8641, CDKN2A (Gene); SEQ ID NO: 8642, CDKN2B (Gene); SEQ ID NO: 8643, CDKN2B (Gene); SEQ ID NO: 8644, 9p21.3_DLBCL (FOCAL); SEQ ID NO: 8645, 9p21.3_DLBCL (FOCAL); SEQ ID NO: 8646, 9p21.3_DLBCL (FOCAL); SEQ ID NO: 8647, 9p21.3_DLBCL (FOCAL); SEQ ID NO: 8648, 9p21.3_DLBCL (FOCAL); SEQ ID NO: 8649, 9p21.3_DLBCL (FOCAL); SEQ ID NO: 8650, 9p21.3_DLBCL (FOCAL); SEQ ID NO: 8651, 9p21.3_DLBCL (FOCAL); SEQ ID NO: 8652, 9p21.3_DLBCL (FOCAL); SEQ ID NO: 8653, 9p21.3_DLBCL (FOCAL); SEQ ID NO: 8654, 9p21.3_DLBCL (FOCAL); SEQ ID NO: 8655, 9p21.3_DLBCL (FOCAL); SEQ ID NO: 8656, 9p21.3_DLBCL (FOCAL); SEQ ID NO: 8657, 9p21.3_DLBCL (FOCAL); SEQ ID NO: 8658, 9p21.3_DLBCL (FOCAL); SEQ ID NO: 8659, 9p21.3_DLBCL (FOCAL); SEQ ID NO: 8660, 9p21.3_DLBCL (FOCAL); SEQ ID NO: 8661, 9p21.3_DLBCL (FOCAL); SEQ ID NO: 8662, 9p21.3_DLBCL (FOCAL); SEQ ID NO: 8663, 9p21.3_DLBCL (FOCAL); SEQ ID NO: 8664, 9p21.3_DLBCL (FOCAL); SEQ ID NO: 8665, 9p21.3_DLBCL (FOCAL); SEQ ID NO: 8666, 9p21.3_DLBCL (FOCAL); SEQ ID NO: 8667, 9P (ARM); SEQ ID NO: 8668, 9P (ARM); SEQ ID NO: 8669, 9P (ARM); SEQ ID NO: 8670, 9P (ARM); SEQ ID NO: 8671, 9P (ARM); SEQ ID NO: 8672, MSI (MSI); SEQ ID NO: 8673, MSI (MSI); SEQ ID NO: 8674, 9P (ARM); SEQ ID NO: 8675, PAX5 (Gene); SEQ ID NO: 8676, PAX5 (Gene); SEQ ID NO: 8677, PAX5 (Gene); SEQ ID NO: 8678, PAX5 (Gene); SEQ ID NO: 8679, PAX5 (Gene); SEQ ID NO: 8680, 9P (ARM); SEQ ID NO: 8681, PAX5 (Gene); SEQ ID NO: 8682, PAX5 (Gene); SEQ ID NO: 8683, PAX5 (Gene); SEQ ID NO: 8684, PAX5 (Gene); SEQ ID NO: 8685, PAX5 (Gene); SEQ ID NO: 8686, PAX5_enhancer (SV); SEQ ID NO: 8687, PAX5_enhancer (SV); SEQ ID NO: 8688, PAX5_enhancer (SV); SEQ ID NO: 8689, PAX5_enhancer (SV); SEQ ID NO: 8690, PAX5_enhancer (SV); SEQ ID NO: 8691, PAX5_enhancer (SV); SEQ ID NO: 8692, PAX5_enhancer (SV); SEQ ID NO: 8693, PAX5_enhancer (SV); SEQ ID NO: 8694, PAX5_enhancer (SV); SEQ ID NO: 8695, PAX5_enhancer (SV); SEQ ID NO: 8696, PAX5_enhancer (SV); SEQ ID NO: 8697, PAX5_enhancer (SV); SEQ ID NO: 8698, PAX5_enhancer (SV); SEQ ID NO: 8699, PAX5_enhancer (SV); SEQ ID NO: 8700, PAX5_enhancer (SV); SEQ ID NO: 8701, PAX5_enhancer (SV); SEQ ID NO: 8702, PAX5_enhancer (SV); SEQ ID NO: 8703, PAX5_enhancer (SV); SEQ ID NO: 8704, PAX5_enhancer (SV); SEQ ID NO: 8705, PAX5_enhancer (SV); SEQ ID NO: 8706, GRHPR (Gene); SEQ ID NO: 8707, GRHPR (Gene); SEQ ID NO: 8708, GRHPR (Gene); SEQ ID NO: 8709, GRHPR (Gene); SEQ ID NO: 8710, GRHPR (Gene); SEQ ID NO: 8711, GRHPR (Gene); SEQ ID NO: 8712, GRHPR (Gene); SEQ ID NO: 8713, GRHPR (Gene); SEQ ID NO: 8714, GRHPR (Gene); SEQ ID NO: 8715, 9P (ARM); SEQ ID NO: 8716, 9P (ARM); SEQ ID NO: 8717, 9q21.13_DLBCL_trim (FOCAL); SEQ ID NO: 8718, 9q21.13_DLBCL_trim (FOCAL); SEQ ID NO: 8719, 9q21.13_DLBCL_trim (FOCAL); SEQ ID NO: 8720, 9q21.13_DLBCL_trim (FOCAL); SEQ ID NO: 8721, 9q21.13_DLBCL_trim (FOCAL); SEQ ID NO: 8722, 9q21.13_DLBCL_trim (FOCAL); SEQ ID NO: 8723, 9q21.13_DLBCL_trim (FOCAL); SEQ ID NO: 8724, 9q21.13_DLBCL_trim (FOCAL); SEQ ID NO: 8725, 9q21.13_DLBCL_trim (FOCAL); SEQ ID NO: 8726, 9q21.13_DLBCL_trim (FOCAL); SEQ ID NO: 8727, 9q21.13_DLBCL_trim (FOCAL); SEQ ID NO: 8728, 9q21.13_DLBCL_trim (FOCAL); SEQ ID NO: 8729, 9q21.13_DLBCL_trim (FOCAL); SEQ ID NO: 8730, 9q21.13_DLBCL_trim (FOCAL); SEQ ID NO: 8731, 9q21.13_DLBCL_trim (FOCAL); SEQ ID NO: 8732, 9q21.13_DLBCL_trim (FOCAL); SEQ ID NO: 8733, 9q21.13_DLBCL_trim (FOCAL); SEQ ID NO: 8734, 9q21.13_DLBCL_trim (FOCAL); SEQ ID NO: 8735, 9q21.13_DLBCL_trim (FOCAL); SEQ ID NO: 8736, 9q21.13_DLBCL_trim (FOCAL); SEQ ID NO: 8737, 9q21.13_DLBCL_trim (FOCAL); SEQ ID NO: 8738, 9q21.13_DLBCL_trim (FOCAL); SEQ ID NO: 8739, 9q21.13_DLBCL_trim (FOCAL); SEQ ID NO: 8740, 9q21.13_DLBCL_trim (FOCAL); SEQ ID NO: 8741, 9q21.13_DLBCL_trim (FOCAL); SEQ ID NO: 8742, 9q21.13_DLBCL_trim (FOCAL); SEQ ID NO: 8743, 9q21.13_DLBCL_trim (FOCAL); SEQ ID NO: 8744, 9q21.13_DLBCL_trim (FOCAL); SEQ ID NO: 8745, 9q21.13_DLBCL_trim (FOCAL); SEQ ID NO: 8746, 9q21.13_DLBCL_trim (FOCAL); SEQ ID NO: 8747, 9q21.13_DLBCL_trim (FOCAL); SEQ ID NO: 8748, 9q21.13_DLBCL_trim (FOCAL); SEQ ID NO: 8749, 9q21.13_DLBCL_trim (FOCAL); SEQ ID NO: 8750, 9q21.13_DLBCL_trim (FOCAL); SEQ ID NO: 8751, 9q21.13_DLBCL_trim (FOCAL); SEQ ID NO: 8752, 9q21.13_DLBCL_trim (FOCAL); SEQ ID NO: 8753, 9q21.13_DLBCL_trim (FOCAL); SEQ ID NO: 8754, 9q21.13_DLBCL_trim (FOCAL); SEQ ID NO: 8755, 9q21.13_DLBCL_trim (FOCAL); SEQ ID NO: 8756, PRUNE2 (Gene); SEQ ID NO: 8757, PRUNE2 (Gene); SEQ ID NO: 8758, PRUNE2 (Gene); SEQ ID NO: 8759, PRUNE2 (Gene); SEQ ID NO: 8760, PRUNE2 (Gene); SEQ ID NO: 8761, PRUNE2 (Gene); SEQ ID NO: 8762, PRUNE2 (Gene); SEQ ID NO: 8763, FP (FP); SEQ ID NO: 8764, PRUNE2 (Gene); SEQ ID NO: 8765, PRUNE2 (Gene); SEQ ID NO: 8766, PRUNE2 (Gene); SEQ ID NO: 8767, PRUNE2 (Gene); SEQ ID NO: 8768, PRUNE2 (Gene); SEQ ID NO: 8769, PRUNE2 (Gene); SEQ ID NO: 8770, PRUNE2 (Gene); SEQ ID NO: 8771, PRUNE2 (Gene); SEQ ID NO: 8772, PRUNE2 (Gene); SEQ ID NO: 8773, PRUNE2 (Gene); SEQ ID NO: 8774, PRUNE2 (Gene); SEQ ID NO: 8775, PRUNE2 (Gene); SEQ ID NO: 8776, PRUNE2 (Gene); SEQ ID NO: 8777, PRUNE2 (Gene); SEQ ID NO: 8778, PRUNE2 (Gene); SEQ ID NO: 8779, PRUNE2 (Gene); SEQ ID NO: 8780, PRUNE2 (Gene); SEQ ID NO: 8781, PRUNE2 (Gene); SEQ ID NO: 8782, PRUNE2 (Gene); SEQ ID NO: 8783, PRUNE2 (Gene); SEQ ID NO: 8784, PRUNE2 (Gene); SEQ ID NO: 8785, PRUNE2 (Gene); SEQ ID NO: 8786, PRUNE2 (Gene); SEQ ID NO: 8787, PRUNE2 (Gene); SEQ ID NO: 8788, PRUNE2 (Gene); SEQ ID NO: 8789, PRUNE2 (Gene); SEQ ID NO: 8790, PRUNE2 (Gene); SEQ ID NO: 8791, PRUNE2 (Gene); SEQ ID NO: 8792, PRUNE2 (Gene); SEQ ID NO: 8793, PRUNE2 (Gene); SEQ ID NO: 8794, 9q21.13_DLBCL_trim (FOCAL); SEQ ID NO: 8795, PRUNE2 (Gene); SEQ ID NO: 8796, 9q21.13_DLBCL_trim (FOCAL); SEQ ID NO: 8797, 9q21.13_DLBCL_trim (FOCAL); SEQ ID NO: 8798, 9q21.13_DLBCL_trim (FOCAL); SEQ ID NO: 8799, 9q21.13_DLBCL_trim (FOCAL); SEQ ID NO: 8800, 9q21.13_DLBCL_trim (FOCAL); SEQ ID NO: 8801, 9q21.13_DLBCL_trim (FOCAL); SEQ ID NO: 8802, 9q21.13_DLBCL_trim (FOCAL); SEQ ID NO: 8803, 9q21.13_DLBCL_trim (FOCAL); SEQ ID NO: 8804, 9q21.13_DLBCL_trim (FOCAL); SEQ ID NO: 8805, 9q21.13_DLBCL_trim (FOCAL); SEQ ID NO: 8806, 9q21.13_DLBCL_trim (FOCAL); SEQ ID NO: 8807, 9q21.13_DLBCL_trim (FOCAL); SEQ ID NO: 8808, 9q21.13_DLBCL_trim (FOCAL); SEQ ID NO: 8809, 9q21.13_DLBCL_trim (FOCAL); SEQ ID NO: 8810, 9q21.13_DLBCL_trim (FOCAL); SEQ ID NO: 8811, 9q21.13_DLBCL_trim (FOCAL); SEQ ID NO: 8812, 9q21.13_DLBCL_trim (FOCAL); SEQ ID NO: 8813, 9q21.13_DLBCL_trim (FOCAL); SEQ ID NO: 8814, 9q21.13_DLBCL_trim (FOCAL); SEQ ID NO: 8815, 9q21.13_DLBCL_trim (FOCAL); SEQ ID NO: 8816, 9q21.13_DLBCL_trim (FOCAL); SEQ ID NO: 8817, 9q21.13_DLBCL_trim (FOCAL); SEQ ID NO: 8818, 9q21.13_DLBCL_trim (FOCAL); SEQ ID NO: 8819, 9q21.13_DLBCL_trim (FOCAL); SEQ ID NO: 8820, 9q21.13_DLBCL_trim (FOCAL); SEQ ID NO: 8821, 9q21.13_DLBCL_trim (FOCAL); SEQ ID NO: 8822, 9q21.13_DLBCL_trim (FOCAL); SEQ ID NO: 8823, 9q21.13_DLBCL_trim (FOCAL); SEQ ID NO: 8824, 9q21.13_DLBCL_trim (FOCAL); SEQ ID NO: 8825, 9q21.13_DLBCL_trim (FOCAL); SEQ ID NO: 8826, 9q21.13_DLBCL_trim (FOCAL); SEQ ID NO: 8827, 9q21.13_DLBCL_trim (FOCAL); SEQ ID NO: 8828, 9q21.13_DLBCL_trim (FOCAL); SEQ ID NO: 8829, 9q21.13_DLBCL_trim (FOCAL); SEQ ID NO: 8830, 9q21.13_DLBCL_trim (FOCAL); SEQ ID NO: 8831, 9q21.13_DLBCL_trim (FOCAL); SEQ ID NO: 8832, 9q21.13_DLBCL_trim (FOCAL); SEQ ID NO: 8833, 9q21.13_DLBCL_trim (FOCAL); SEQ ID NO: 8834, 9q21.13_DLBCL_trim (FOCAL); SEQ ID NO: 8835, 9q21.13_DLBCL_trim (FOCAL); SEQ ID NO: 8836, 9q21.13_DLBCL_trim (FOCAL); SEQ ID NO: 8837, 9q21.13_DLBCL_trim (FOCAL); SEQ ID NO: 8838, 9q21.13_DLBCL_trim (FOCAL); SEQ ID NO: 8839, 9q21.13_DLBCL_trim (FOCAL); SEQ ID NO: 8840, 9q21.13_DLBCL_trim (FOCAL); SEQ ID NO: 8841, 9q21.13_DLBCL_trim (FOCAL); SEQ ID NO: 8842, 9q21.13_DLBCL_trim (FOCAL); SEQ ID NO: 8843, 9q21.13_DLBCL_trim (FOCAL); SEQ ID NO: 8844, 9q21.13_DLBCL_trim (FOCAL); SEQ ID NO: 8845, 9q21.13_DLBCL_trim (FOCAL); SEQ ID NO: 8846, 9q21.13_DLBCL_trim (FOCAL); SEQ ID NO: 8847, 9q21.13_DLBCL_trim (FOCAL); SEQ ID NO: 8848, 9q21.13_DLBCL_trim (FOCAL); SEQ ID NO: 8849, 9q21.13_DLBCL_trim (FOCAL); SEQ ID NO: 8850, 9q21.13_DLBCL_trim (FOCAL); SEQ ID NO: 8851, 9q21.13_DLBCL_trim (FOCAL); SEQ ID NO: 8852, 9q21.13_DLBCL_trim (FOCAL); SEQ ID NO: 8853, 9q21.13_DLBCL_trim (FOCAL); SEQ ID NO: 8854, 9q21.13_DLBCL_trim (FOCAL); SEQ ID NO: 8855, 9q21.13_DLBCL_trim (FOCAL); SEQ ID NO: 8856, 9q21.13_DLBCL_trim (FOCAL); SEQ ID NO: 8857, 9q21.13_DLBCL_trim (FOCAL); SEQ ID NO: 8858, 9q21.13_DLBCL_trim (FOCAL); SEQ ID NO: 8859, 9q21.13_DLBCL_trim (FOCAL); SEQ ID NO: 8860, 9q21.13_DLBCL_trim (FOCAL); SEQ ID NO: 8861, 9q21.13_DLBCL_trim (FOCAL); SEQ ID NO: 8862, 9q21.13_DLBCL_trim (FOCAL); SEQ ID NO: 8863, 9q21.13_DLBCL_trim (FOCAL); SEQ ID NO: 8864, 9q21.13_DLBCL_trim (FOCAL); SEQ ID NO: 8865, 9q21.13_DLBCL_trim (FOCAL); SEQ ID NO: 8866, 9q21.13_DLBCL_trim (FOCAL); SEQ ID NO: 8867, 9q21.13_DLBCL_trim (FOCAL); SEQ ID NO: 8868, 9q21.13_DLBCL_trim (FOCAL); SEQ ID NO: 8869, 9q21.13_DLBCL_trim (FOCAL); SEQ ID NO: 8870, 9q21.13_DLBCL_trim (FOCAL); SEQ ID NO: 8871, 9q21.13_DLBCL_trim (FOCAL); SEQ ID NO: 8872, 9q21.13_DLBCL_trim (FOCAL); SEQ ID NO: 8873, 9q21.13_DLBCL_trim (FOCAL); SEQ ID NO: 8874, 9q21.13_DLBCL_trim (FOCAL); SEQ ID NO: 8875, 9q21.13_DLBCL_trim (FOCAL); SEQ ID NO: 8876, 9q21.13_DLBCL_trim (FOCAL); SEQ ID NO: 8877, 9q21.13_DLBCL_trim (FOCAL); SEQ ID NO: 8878, PTCH1 (Gene); SEQ ID NO: 8879, PTCH1 (Gene); SEQ ID NO: 8880, PTCH1 (Gene); SEQ ID NO: 8881, PTCH1 (Gene); SEQ ID NO: 8882, PTCH1 (Gene); SEQ ID NO: 8883, PTCH1 (Gene); SEQ ID NO: 8884, PTCH1 (Gene); SEQ ID NO: 8885, PTCH1 (Gene); SEQ ID NO: 8886, PTCH1 (Gene); SEQ ID NO: 8887, PTCH1 (Gene); SEQ ID NO: 8888, PTCH1 (Gene); SEQ ID NO: 8889, PTCH1 (Gene); SEQ ID NO: 8890, 9q21.13_DLBCL_trim (FOCAL); SEQ ID NO: 8891, PTCH1 (Gene); SEQ ID NO: 8892, PTCH1 (Gene); SEQ ID NO: 8893, PTCH1 (Gene); SEQ ID NO: 8894, PTCH1 (Gene); SEQ ID NO: 8895, PTCH1 (Gene); SEQ ID NO: 8896, PTCH1 (Gene); SEQ ID NO: 8897, PTCH1 (Gene); SEQ ID NO: 8898, PTCH1 (Gene); SEQ ID NO: 8899, PTCH1 (Gene); SEQ ID NO: 8900, PTCH1 (Gene); SEQ ID NO: 8901, PTCH1 (Gene); SEQ ID NO: 8902, PTCH1 (Gene); SEQ ID NO: 8903, PTCH1 (Gene); SEQ ID NO: 8904, 9q21.13_DLBCL_trim (FOCAL); SEQ ID NO: 8905, 9q21.13_DLBCL_trim (FOCAL); SEQ ID NO: 8906, 9q21.13_DLBCL_trim (FOCAL); SEQ ID NO: 8907, 9q21.13_DLBCL_trim (FOCAL); SEQ ID NO: 8908, 9q21.13_DLBCL_trim (FOCAL); SEQ ID NO: 8909, 9q21.13_DLBCL_trim (FOCAL); SEQ ID NO: 8910, 9q21.13_DLBCL_trim (FOCAL); SEQ ID NO: 8911, 9q21.13_DLBCL_trim (FOCAL); SEQ ID NO: 8912, 9q21.13_DLBCL_trim (FOCAL); SEQ ID NO: 8913, 9q21.13_DLBCL_trim (FOCAL); SEQ ID NO: 8914, 9q21.13_DLBCL_trim (FOCAL); SEQ ID NO: 8915, 9q21.13_DLBCL_trim (FOCAL); SEQ ID NO: 8916, 9q21.13_DLBCL_trim (FOCAL); SEQ ID NO: 8917, 9q21.13_DLBCL_trim (FOCAL); SEQ ID NO: 8918, 9q21.13_DLBCL_trim (FOCAL); SEQ ID NO: 8919, 9q21.13_DLBCL_trim (FOCAL); SEQ ID NO: 8920, 9q21.13_DLBCL_trim (FOCAL); SEQ ID NO: 8921, 9q21.13_DLBCL_trim (FOCAL); SEQ ID NO: 8922, 9q21.13_DLBCL_trim (FOCAL); SEQ ID NO: 8923, 9q21.13_DLBCL_trim (FOCAL); SEQ ID NO: 8924, 9q21.13_DLBCL_trim (FOCAL); SEQ ID NO: 8925, 9Q_DLBCL (ARM); SEQ ID NO: 8926, 9Q_DLBCL (ARM); SEQ ID NO: 8927, 9Q_DLBCL (ARM); SEQ ID NO: 8928, 9Q_DLBCL (ARM); SEQ ID NO: 8929, 9Q_DLBCL (ARM); SEQ ID NO: 8930, 9Q_DLBCL (ARM); SEQ ID NO: 8931, 9Q_DLBCL (ARM); SEQ ID NO: 8932, 9Q_DLBCL (ARM); SEQ ID NO: 8933, 9Q_DLBCL (ARM); SEQ ID NO: 8934, 9Q_DLBCL (ARM); SEQ ID NO: 8935, 9Q_DLBCL (ARM); SEQ ID NO: 8936, 9Q_DLBCL (ARM); SEQ ID NO: 8937, 9Q_DLBCL (ARM); SEQ ID NO: 8938, 9Q_DLBCL (ARM); SEQ ID NO: 8939, 9Q_DLBCL (ARM); SEQ ID NO: 8940, 9Q_DLBCL (ARM); SEQ ID NO: 8941, 9Q_DLBCL (ARM); SEQ ID NO: 8942, 9Q_DLBCL (ARM); SEQ ID NO: 8943, 9Q_DLBCL (ARM); SEQ ID NO: 8944, 9Q_DLBCL (ARM); SEQ ID NO: 8945, 9Q_DLBCL (ARM); SEQ ID NO: 8946, 9Q_DLBCL (ARM); SEQ ID NO: 8947, 9Q_DLBCL (ARM); SEQ ID NO: 8948, 9Q_DLBCL (ARM); SEQ ID NO: 8949, 9Q_DLBCL (ARM); SEQ ID NO: 8950, 9Q_DLBCL (ARM); SEQ ID NO: 8951, FP (FP); SEQ ID NO: 8952, 9Q_DLBCL (ARM); SEQ ID NO: 8953, 9Q_DLBCL (ARM); SEQ ID NO: 8954, 9Q_DLBCL (ARM); SEQ ID NO: 8955, 9Q_DLBCL (ARM); SEQ ID NO: 8956, 9Q_DLBCL (ARM); SEQ ID NO: 8957, FP (FP); SEQ ID NO: 8958, 9Q_DLBCL (ARM); SEQ ID NO: 8959, 9Q_DLBCL (ARM); SEQ ID NO: 8960, 9Q_DLBCL (ARM); SEQ ID NO: 8961, ABL1 (Gene); SEQ ID NO: 8962, ABL1 (Gene); SEQ ID NO: 8963, ABL1 (Gene); SEQ ID NO: 8964, ABL1 (Gene); SEQ ID NO: 8965, ABL1 (Gene); SEQ ID NO: 8966, ABL1 (Gene); SEQ ID NO: 8967, ABL1 (Gene); SEQ ID NO: 8968, ABL1 (Gene); SEQ ID NO: 8969, ABL1 (Gene); SEQ ID NO: 8970, ABL1 (Gene); SEQ ID NO: 8971, ABL1 (Gene); SEQ ID NO: 8972, ABL1 (Gene); SEQ ID NO: 8973, ABL1 (Gene); SEQ ID NO: 8974, ABL1 (Gene); SEQ ID NO: 8975, ABL1 (Gene); SEQ ID NO: 8976, 9Q_DLBCL (ARM); SEQ ID NO: 8977, MSI (MSI); SEQ ID NO: 8978, MSI (MSI); SEQ ID NO: 8979, 9Q_DLBCL (ARM); SEQ ID NO: 8980, 9Q_DLBCL (ARM); SEQ ID NO: 8981, NOTCH1_3UTR (SV); SEQ ID NO: 8982, NOTCH1 (Gene); SEQ ID NO: 8983, NOTCH1 (Gene); SEQ ID NO: 8984, NOTCH1 (Gene); SEQ ID NO: 8985, NOTCH1 (Gene); SEQ ID NO: 8986, NOTCH1 (Gene); SEQ ID NO: 8987, NOTCH1 (Gene); SEQ ID NO: 8988, NOTCH1 (Gene); SEQ ID NO: 8989, NOTCH1 (Gene); SEQ ID NO: 8990, NOTCH1 (Gene); SEQ ID NO: 8991, NOTCH1 (Gene); SEQ ID NO: 8992, NOTCH1 (Gene); SEQ ID NO: 8993, NOTCH1 (Gene); SEQ ID NO: 8994, NOTCH1 (Gene); SEQ ID NO: 8995, NOTCH1 (Gene); SEQ ID NO: 8996, NOTCH1 (Gene); SEQ ID NO: 8997, NOTCH1 (Gene); SEQ ID NO: 8998, NOTCH1 (Gene); SEQ ID NO: 8999, NOTCH1 (Gene); SEQ ID NO: 9000, NOTCH1 (Gene); SEQ ID NO: 9001, NOTCH1 (Gene); SEQ ID NO: 9002, NOTCH1 (Gene); SEQ ID NO: 9003, NOTCH1 (Gene); SEQ ID NO: 9004, NOTCH1 (Gene); SEQ ID NO: 9005, NOTCH1 (Gene); SEQ ID NO: 9006, NOTCH1 (Gene); SEQ ID NO: 9007, NOTCH1 (Gene); SEQ ID NO: 9008, NOTCH1 (Gene); SEQ ID NO: 9009, NOTCH1 (Gene); SEQ ID NO: 9010, NOTCH1 (Gene); SEQ ID NO: 9011, NOTCH1 (Gene); SEQ ID NO: 9012, NOTCH1 (Gene); SEQ ID NO: 9013, NOTCH1 (Gene); SEQ ID NO: 9014, NOTCH1 (Gene); SEQ ID NO: 9015, NOTCH1 (Gene); SEQ ID NO: 9016, NOTCH1 (Gene); SEQ ID NO: 9017, NOTCH1 (Gene); SEQ ID NO: 9018, NOTCH1 (Gene); SEQ ID NO: 9019, NOTCH1 (Gene); SEQ ID NO: 9020, TRAF2 (Gene); SEQ ID NO: 9021, TRAF2 (Gene); SEQ ID NO: 9022, TRAF2 (Gene); SEQ ID NO: 9023, TRAF2 (Gene); SEQ ID NO: 9024, TRAF2 (Gene); SEQ ID NO: 9025, TRAF2 (Gene); SEQ ID NO: 9026, TRAF2 (Gene); SEQ ID NO: 9027, TRAF2 (Gene); SEQ ID NO: 9028, TRAF2 (Gene); SEQ ID NO: 9029, TRAF2 (Gene); SEQ ID NO: 9030, XP (ARM); SEQ ID NO: 9031, P2RY8 (Gene); SEQ ID NO: 9032, P2RY8 (Gene); SEQ ID NO: 9033, P2RY8 (Gene); SEQ ID NO: 9034, XP (ARM); SEQ ID NO: 9035, XP (ARM); SEQ ID NO: 9036, XP (ARM); SEQ ID NO: 9037, XP (ARM); SEQ ID NO: 9038, XP (ARM); SEQ ID NO: 9039, XP (ARM); SEQ ID NO: 9040, XP (ARM); SEQ ID NO: 9041, XP (ARM); SEQ ID NO: 9042, XP (ARM); SEQ ID NO: 9043, MSI (MSI); SEQ ID NO: 9044, MSI (MSI); SEQ ID NO: 9045, XP (ARM); SEQ ID NO: 9046, XP (ARM); SEQ ID NO: 9047, TMSB4X (Gene); SEQ ID NO: 9048, TMSB4X (Gene); SEQ ID NO: 9049, XP (ARM); SEQ ID NO: 9050, MSI (MSI); SEQ ID NO: 9051, MSI (MSI); SEQ ID NO: 9052, XP (ARM); SEQ ID NO: 9053, XP (ARM); SEQ ID NO: 9054, XP (ARM); SEQ ID NO: 9055, XP (ARM); SEQ ID NO: 9056, XP (ARM); SEQ ID NO: 9057, XP (ARM); SEQ ID NO: 9058, XP (ARM); SEQ ID NO: 9059, XP (ARM); SEQ ID NO: 9060, XP (ARM); SEQ ID NO: 9061, XP (ARM); SEQ ID NO: 9062, XP (ARM); SEQ ID NO: 9063, XP (ARM); SEQ ID NO: 9064, MSI (MSI); SEQ ID NO: 9065, MSI (MSI); SEQ ID NO: 9066, XP (ARM); SEQ ID NO: 9067, XP (ARM); SEQ ID NO: 9068, XP (ARM); SEQ ID NO: 9069, DDX3X (Gene); SEQ ID NO: 9070, DDX3X (Gene); SEQ ID NO: 9071, DDX3X (Gene); SEQ ID NO: 9072, DDX3X (Gene); SEQ ID NO: 9073, DDX3X (Gene); SEQ ID NO: 9074, DDX3X (Gene); SEQ ID NO: 9075, DDX3X (Gene); SEQ ID NO: 9076, DDX3X (Gene); SEQ ID NO: 9077, DDX3X (Gene); SEQ ID NO: 9078, DDX3X (Gene); SEQ ID NO: 9079, DDX3X (Gene); SEQ ID NO: 9080, DDX3X (Gene); SEQ ID NO: 9081, DDX3X (Gene); SEQ ID NO: 9082, DDX3X (Gene); SEQ ID NO: 9083, DDX3X (Gene); SEQ ID NO: 9084, DDX3X (Gene); SEQ ID NO: 9085, DDX3X (Gene); SEQ ID NO: 9086, XQ (ARM); SEQ ID NO: 9087, KDM6A (Gene); SEQ ID NO: 9088, KDM6A (Gene); SEQ ID NO: 9089, KDM6A (Gene); SEQ ID NO: 9090, KDM6A (Gene); SEQ ID NO: 9091, KDM6A (Gene); SEQ ID NO: 9092, KDM6A (Gene); SEQ ID NO: 9093, KDM6A (Gene); SEQ ID NO: 9094, KDM6A (Gene); SEQ ID NO: 9095, KDM6A (Gene); SEQ ID NO: 9096, KDM6A (Gene); SEQ ID NO: 9097, KDM6A (Gene); SEQ ID NO: 9098, KDM6A (Gene); SEQ ID NO: 9099, KDM6A (Gene); SEQ ID NO: 9100, KDM6A (Gene); SEQ ID NO: 9101, KDM6A (Gene); SEQ ID NO: 9102, KDM6A (Gene); SEQ ID NO: 9103, KDM6A (Gene); SEQ ID NO: 9104, KDM6A (Gene); SEQ ID NO: 9105, KDM6A (Gene); SEQ ID NO: 9106, KDM6A (Gene); SEQ ID NO: 9107, KDM6A (Gene); SEQ ID NO: 9108, KDM6A (Gene); SEQ ID NO: 9109, KDM6A (Gene); SEQ ID NO: 9110, KDM6A (Gene); SEQ ID NO: 9111, KDM6A (Gene); SEQ ID NO: 9112, KDM6A (Gene); SEQ ID NO: 9113, KDM6A (Gene); SEQ ID NO: 9114, KDM6A (Gene); SEQ ID NO: 9115, KDM6A (Gene); SEQ ID NO: 9116, KDM6A (Gene); SEQ ID NO: 9117, KDM6A (Gene); SEQ ID NO: 9118, XQ (ARM); SEQ ID NO: 9119, XQ (ARM); SEQ ID NO: 9120, PIM2 (Gene); SEQ ID NO: 9121, PIM2 (Gene); SEQ ID NO: 9122, PIM2 (Gene); SEQ ID NO: 9123, PIM2 (Gene); SEQ ID NO: 9124, PIM2 (Gene); SEQ ID NO: 9125, PIM2 (Gene); SEQ ID NO: 9126, XQ (ARM); SEQ ID NO: 9127, XQ (ARM); SEQ ID NO: 9128, XQ (ARM); SEQ ID NO: 9129, TAF1 (Gene); SEQ ID NO: 9130, TAF1 (Gene); SEQ ID NO: 9131, TAF1 (Gene); SEQ ID NO: 9132, TAF1 (Gene); SEQ ID NO: 9133, TAF1 (Gene); SEQ ID NO: 9134, TAF1 (Gene); SEQ ID NO: 9135, TAF1 (Gene); SEQ ID NO: 9136, TAF1 (Gene); SEQ ID NO: 9137, TAF1 (Gene); SEQ ID NO: 9138, TAF1 (Gene); SEQ ID NO: 9139, TAF1 (Gene); SEQ ID NO: 9140, TAF1 (Gene); SEQ ID NO: 9141, TAF1 (Gene); SEQ ID NO: 9142, TAF1 (Gene); SEQ ID NO: 9143, TAF1 (Gene); SEQ ID NO: 9144, TAF1 (Gene); SEQ ID NO: 9145, TAF1 (Gene); SEQ ID NO: 9146, TAF1 (Gene); SEQ ID NO: 9147, TAF1 (Gene); SEQ ID NO: 9148, TAF1 (Gene); SEQ ID NO: 9149, TAF1 (Gene); SEQ ID NO: 9150, TAF1 (Gene); SEQ ID NO: 9151, TAF1 (Gene); SEQ ID NO: 9152, TAF1 (Gene); SEQ ID NO: 9153, TAF1 (Gene); SEQ ID NO: 9154, TAF1 (Gene); SEQ ID NO: 9155, TAF1 (Gene); SEQ ID NO: 9156, TAF1 (Gene); SEQ ID NO: 9157, TAF1 (Gene); SEQ ID NO: 9158, TAF1 (Gene); SEQ ID NO: 9159, TAF1 (Gene); SEQ ID NO: 9160, TAF1 (Gene); SEQ ID NO: 9161, TAF1 (Gene); SEQ ID NO: 9162, TAF1 (Gene); SEQ ID NO: 9163, TAF1 (Gene); SEQ ID NO: 9164, TAF1 (Gene); SEQ ID NO: 9165, TAF1 (Gene); SEQ ID NO: 9166, TAF1 (Gene); SEQ ID NO: 9167, TAF1 (Gene); SEQ ID NO: 9168, MAGT1 (Gene); SEQ ID NO: 9169, MAGT1 (Gene); SEQ ID NO: 9170, MAGT1 (Gene); SEQ ID NO: 9171, MAGT1 (Gene); SEQ ID NO: 9172, MAGT1 (Gene); SEQ ID NO: 9173, MAGT1 (Gene); SEQ ID NO: 9174, MAGT1 (Gene); SEQ ID NO: 9175, MAGT1 (Gene); SEQ ID NO: 9176, MAGT1 (Gene); SEQ ID NO: 9177, MAGT1 (Gene); SEQ ID NO: 9178, XQ (ARM); SEQ ID NO: 9179, XQ (ARM); SEQ ID NO: 9180, XQ (ARM); SEQ ID NO: 9181, XQ (ARM); SEQ ID NO: 9182, XQ (ARM); SEQ ID NO: 9183, XQ (ARM); SEQ ID NO: 9184, XQ (ARM); SEQ ID NO: 9185, XQ (ARM); SEQ ID NO: 9186, BTK (Gene); SEQ ID NO: 9187, BTK (Gene); SEQ ID NO: 9188, BTK (Gene); SEQ ID NO: 9189, BTK (Gene); SEQ ID NO: 9190, BTK (Gene); SEQ ID NO: 9191, BTK (Gene); SEQ ID NO: 9192, BTK (Gene); SEQ ID NO: 9193, BTK (Gene); SEQ ID NO: 9194, BTK (Gene); SEQ ID NO: 9195, BTK (Gene); SEQ ID NO: 9196, BTK (Gene); SEQ ID NO: 9197, BTK (Gene); SEQ ID NO: 9198, BTK (Gene); SEQ ID NO: 9199, BTK (Gene); SEQ ID NO: 9200, BTK (Gene); SEQ ID NO: 9201, BTK (Gene); SEQ ID NO: 9202, BTK (Gene); SEQ ID NO: 9203, BTK (Gene); SEQ ID NO: 9204, BTK (Gene); SEQ ID NO: 9205, XQ (ARM); SEQ ID NO: 9206, MSI (MSI); SEQ ID NO: 9207, MSI (MSI); SEQ ID NO: 9208, XQ (ARM); SEQ ID NO: 9209, XQ (ARM); SEQ ID NO: 9210, XQ (ARM); SEQ ID NO: 9211, XQ (ARM); SEQ ID NO: 9212, XQ (ARM); SEQ ID NO: 9213, XQ (ARM); SEQ ID NO: 9214, UBE2A (Gene); SEQ ID NO: 9215, UBE2A (Gene); SEQ ID NO: 9216, UBE2A (Gene); SEQ ID NO: 9217, UBE2A (Gene); SEQ ID NO: 9218, UBE2A (Gene); SEQ ID NO: 9219, UBE2A (Gene); SEQ ID NO: 9220, XQ (ARM); SEQ ID NO: 9221, XQ (ARM); SEQ ID NO: 9222, XQ (ARM); SEQ ID NO: 9223, XQ (ARM); SEQ ID NO: 9224, XQ (ARM); SEQ ID NO: 9225, MSI (MSI); SEQ ID NO: 9226, MSI (MSI); SEQ ID NO: 9227, XQ (ARM); SEQ ID NO: 9228, XQ (ARM); SEQ ID NO: 9229, XQ (ARM); SEQ ID NO: 9230, XQ (ARM); SEQ ID NO: 9231, XQ (ARM); SEQ ID NO: 9232, XQ (ARM); SEQ ID NO: 9233, XQ (ARM); SEQ ID NO: 9234, XQ (ARM); SEQ ID NO: 9235, XQ (ARM); SEQ ID NO: 9236, XQ (ARM); SEQ ID NO: 9237, XQ (ARM); SEQ ID NO: 9238, XQ (ARM); SEQ ID NO: 9239, XQ (ARM); SEQ ID NO: 9240, XQ (ARM); SEQ ID NO: 9241, XQ (ARM); SEQ ID NO: 9242, XQ (ARM); SEQ ID NO: 9243, FP (FP); SEQ ID NO: 9244, P2RY8 (Gene).

[0178] Baits suitable for use in embodiments of the invention can include a set of polynucleotides selected from SEQ ID NOs: 1-9244. The set of polynucleotides (i.e., bait set) can include all or a sub-set of polynucleotides identified as targeting a particular variant. The set of polynucleotides can include all or a sub-set of polynucleotides targeting a particular variant class and/or variant (i.e., target) type. The set of polynucleotides can include all or a sub-set of polynucleotides with sequences provided in the sequence listing as any one or more of SEQ ID NOs: 1-9244 and targeting all of the variants listed in Table 3. The set of polynucleotides can include polynucleotides complementary or identical to about or at least about 1%, 2%, 3%, 4%, 5%, 10%, 25%, 50%, 75%, 80%, 85%, 90%, 95%, or 100% of regions collectively defined/targeted by a set of polynucleotides with sequences provided in the sequence listing as any one or more of SEQ ID NOs: 1-9244. The set of polynucleotides can include sequences having about or at least about 1%, 2%, 3%, 4%, 5%, 0%, 25%, 50%, 75%, 80%, 85%, 90%, 95%, or 100% sequence identity to any one or more of SEQ ID NOs: 1-9244. The sequence identity can be calculated across the full contiguous span of bases contained by a sequence(s) listed in SEQ ID NOs: 1-9244, or across 1%, 2%, 3%, 4%, 5%, 10%, 25%, 50%, 75%, 80%, 85%, 90%, 95% of a contiguous span of bases contained by a sequence(s) listed in SEQ ID NOs: 1-9244, or across about or at least about 5, 10, 15, 20, 25, 30, 35, 40, 45, 50, 55, 60, 65, 70 75, 80, 85, 90, 95, 100, 200, 300, 400, 500, or 1000 bp of a sequence(s) listed in SEQ ID NOs: 1-9244. The polynucleotides in the set of polynucleotides can individually include sequences complementary or identical to at least 10, 20, 30, 40, 50, 60, 70, 80, 90, 100, 120, 150, 200, 300, or 500 contiguous, and optionally terminal, base pairs of a set of polynucleotides selected from those polynucleotides listed in SEQ ID NOs: 1-9244. The polynucleotides in the set of polynucleotides can individually include contiguous sequences, optionally terminal sequences, that are complementary to chromosomal regions adjacent or proximal to (i.e., within about or at least about 10 bp, 50 bp, 100 bp, 500 bp, or 1000 bp of a terminal extent of a targeted region) those chromosomal regions targeted by sequences listed in SEQ ID NOs: 1-9244, where the contiguous sequences can be about or at least about 5, 10, 15, 20, 25, 30, 35, 40, 45, 50, 55, 60, 65, 70 75, 80, 85, 90, 95, 100, 200, 300, 400, 500, or 1000 bp in length, and/or no more than about 5, 10, 15, 20, 25, 30, 35, 40, 45, 50, 55, 60, 65, 70 75, 80, 85, 90, 95, 100, 200, 300, 400, 500, or 1000 bp in length.

[0179] In embodiments, the bait sets include oligonucleotides that can detect microsatellite instability (see MSI Target sequences indicated in the above List of Sequence Descriptions), tumor mutational burden, and/or Epstein Barr virus (see sequences provided in Table 2). Representative baits suitable for detection of Epstein Barr virus in a sample are provided in Table 2 below and as SEQ ID NOs: 9245-9316 in the Sequence Listing. The bait sets can be used to determine tumor mutational burden in a subject or for quantifying levels of circulating tumor DNA in a subject. The bait sets capture alterations necessary and sufficient to classify DLBCLs as belonging to C1-C5. The bait sets can also be used to measure microsatellite instability and/or tumor mutational burden.

TABLE 2
Baits for detection of the Epstein-Barr virus.

| SEQ | |
|---|---|
| ID NO | Bait Description |
| 9245 | EBV_LMP1_NC_007605_1_167702_169016_Human_gammaherpesvirus_4_0_1200 |
| 9246 | EBV_LMP1_AY961628_3_167613_to_168357_Human_herpesvirus_4_strain_GD1_0_720 |
| 9247 | EBV_LMP1_HQ020558_1_c163432_162195_Human_herpesvirus_4_strain_GD2_0_600 |
| 9248 | EBV_LMP1_NC_007605_1_167702_169016_Human_gammaherpesvirus_4_0_1200 |
| 9249 | EBV_LMP1_DQ279927_1_c169948_169188_Human_herpesvirus_4_strain_AG876_0_720 |
| 9250 | EBV_LMP1_NC_007605_1_167702_169016_Human_gammaherpesvirus_4_0_1200 |
| 9251 | EBV_EBNA1_DQ279927_1_96492_98417_Huma_herpesvirus_4_strain_AG876_1200_1920 |
| 9252 | EBV_LMP1_NC_007605_1_167702_169016_Human_gammaherpesvirus_4_0_1200 |
| 9253 | EBV_EBNA1_JQ009376_2_95779_97209Human_herpesvirus_4_strain_HKNPC1_480_1320 |
| 9254 | EBV_EBNA1_JQ009376_2_95779_97209Human_herpesvirus_4_strain_HKNPC1_480_1320 |
| 9255 | EBV_EBNA1_JQ009376_2_95779_97209Human_herpesvirus_4_strain_HKNPC1_480_1320 |
| 9256 | EBV_LMP1_AY961628_3_167613_to_168357_Human_herpesvirus_4_strain_GD1_0_720 |
| 9257 | EBV_LMP1_HQ020558_1_c163432_162195_Human_herpesvirus_4_strain_GD2_0_600 |
| 9258 | EBV_LMP1_AY961628_3_167613_to_168357_Human_herpesvirus_4_strain_GD1_0_720 |
| 9259 | EBV_LMP1_HQ020558_1_c163432_162195_Human_herpesvirus_4_strain_GD2_960_1200 |
| 9260 | EBV_LMP1_DQ279927_1_c169948_169188_Human_herpesvirus_4_strain_AG876_0_720 |
| 9261 | EBV_LMP1_JQ009376_2_168596_167294_Human_herpesvirus_4_strain_HKNPC1_960_1200 |
| 9262 | EBV_LMP1_JQ009376_2_c168596_167294_Human_herpesvirus_4_strain_HKNPC1_0_1200 |
| 9263 | EBV_LMP1_NC_007605_1_167702_169016_Human_gammaherpesvirus_4_0_1200 |
| 9264 | EBV_LMP1_JQ009376_2_168596_167294_Human_herpesvirus_4_strain_HKNPC1_960_1200 |
| 9265 | EBV_EBNA1_HQ020558_1_93224_94907_Human_herpesvirus_4_strain_GD2_840_1200 |
| 9266 | EBV_EBNA1_DQ279927_1_96492_98417_Huma_herpesvirus_4_strain_AG876_1200_1920 |
| 9267 | EBV_LMP1_NC_007605_1_167702_169016_Human_gammaherpesvirus_4_0_1200 |
| 9268 | EBV_LMP1_HQ020558_1_c163432_162195_Human_herpesvirus_4_strain_GD2_960_1200 |
| 9269 | EBV_EBNA1_DQ279927_1_96492_98417_Huma_herpesvirus_4_strain_AG876_0_240 |
| 9270 | EBV_LMP1_DQ279927_1_c169948_169188_Human_herpesvirus_4_strain_AG876_0_720 |
| 9271 | EBV_LMP1_NC_007605_1_167702_169016_Human_gammaherpesvirus_4_0_1200 |
| 9272 | EBV_EBNA1_DQ279927_1_96492_98417_Huma_herpesvirus_4_strain_AG876_1200_1920 |
| 9273 | EBV_EBNA1_HQ020558_1_93224_94907_Human_herpesvirus_4_strain_GD2_840_1200 |
| 9274 | EBV_EBNA1_HQ020558_1_93224_94907_Human_herpesvirus_4_strain_GD2_0_240 |
| 9275 | EBV_LMP1_DQ279927_1_c169948_169188_Human_herpesvirus_4_strain_AG876_0_720 |
| 9276 | EBV_EBNA1_V01555_2_107950_109875_Epstein_Barr_virus_EBV_genome_strain_B95_8_1440_1920 |
| 9277 | EBV_EBNA1_AY961628_3_95580_97505_Human_herpesvirus_4_strain_GD1_1320_1560 |
| 9278 | EBV_EBNA1_DQ279927_1_96492_98417_Huma_herpesvirus_4_strain_AG876_1200_1920 |
| 9279 | EBV_EBNA1_V01555_2_107950_109875_Epstein_Barr_virus_EBV_genome_strain_B95_8_1440_1920 |
| 9280 | EBV_EBNA1_JQ009376_2_95779_97209Human_herpesvirus_4_strain_HKNPC1_480_1320 |
| 9281 | EBV_EBNA1_JQ009376_2_95779_97209Human_herpesvirus_4_strain_HKNPC1_480_1320 |
| 9282 | EBV_LMP1_DQ279927_1_c169948_169188_Human_herpesvirus_4_strain_AG876_0_720 |
| 9283 | EBV_LMP1_NC_007605_1_167702_169016_Human_gammaherpesvirus_4_0_1200 |
| 9284 | EBV_EBNA1_DQ279927_1_96492_98417_Huma_herpesvirus_4_strain_AG876_0_240 |
| 9285 | EBV_LMP1_JQ009376_2_c168596_167294_Human_herpesvirus_4_strain_HKNPC1_0_1200 |
| 9286 | EBV_LMP1_AY961628_3_167613_to_168357_Human_herpesvirus_4_strain_GD1_0_720 |
| 9287 | EBV_LMP1_HQ020558_1_c163432_162195_Human_herpesvirus_4_strain_GD2_0_600 |
| 9288 | EBV_EBNA1_V01555_2_107950_109875_Epstein_Barr_virus_EBV_genome_strain_B95_8_1440_1920 |
| 9289 | EBV_EBNA1_JQ009376_2_95779_97209Human_herpesvirus_4_strain_HKNPC1_480_1320 |
| 9290 | EBV_LMP1_V01555_2_168286_168964_Human_herpesvirus_4_strain_B95_8_0_240 |
| 9291 | EBV_LMP1_V01555_2_168286_168964_Human_herpesvirus_4_strain_B95_8_0_240 |
| 9292 | EBV_EBNA1_AY961628_3_95580_97505_Human_herpesvirus_4_strain_GD1_1320_1560 |
| 9293 | EBV_EBNA1_V01555_2_107950_109875_Epstein_Barr_virus_EBV_genome_strain_B95_8_1440_1920 |
| 9294 | EBV_LMP1_DQ279927_1_c169948_169188_Human_herpesvirus_4_strain_AG876_0_720 |
| 9295 | EBV_LMP1_AY961628_3_167613_to_168357_Human_herpesvirus_4_strain_GD1_0_720 |
| 9296 | EBV_LMP1_HQ020558_1_c163432_162195_Human_herpesvirus_4_strain_GD2_0_600 |
| 9297 | EBV_LMP1_AY961628_3_167613_to_168357_Human_herpesvirus_4_strain_GD1_0_720 |
| 9298 | EBV_EBNA1_HQ020558_1_93224_94907_Human_herpesvirus_4_strain_GD2_0_240 |
| 9299 | EBV_LMP1_DQ279927_1_c170457_170190_Human_herpesvirus_4_strain_AG876_0_240 |
| 9300 | EBV_LMP1_HQ020558_1_c163432_162195_Human_herpesvirus_4_strain_GD2_0_600 |
| 9301 | EBV_EBNA1_JQ009376_2_95779_97209Human_herpesvirus_4_strain_HKNPC1_480_1320 |
| 9302 | EBV_LMP1_DQ279927_1_c170457_170190_Human_herpesvirus_4_strain_AG876_0_240 |
| 9303 | EBV_LMP1_NC_007605_1_167702_169016_Human_gammaherpesvirus_4_0_1200 |
| 9304 | EBV_EBNA1_DQ279927_1_96492_98417_Huma_herpesvirus_4_strain_AG876_1200_1920 |
| 9305 | EBV_LMP1_HQ020558_1_c163432_162195_Human_herpesvirus_4_strain_GD2_720_840 |
| 9306 | EBV_EBNA1_HQ020558_1_93224_94907_Human_herpesvirus_4_strain_GD2_1320_1440 |
| 9307 | EBV_LMP1_V01555_2_168286_168964_Human_herpesvirus_4_strain_B95_8_480_600 |
| 9308 | EBV_EBNA1_V01555_2_107950_109875_Epstein_Barr_virus_{——}EBV_genome_strain_B95_8_0_120 |
| 9309 | EBV_EBNA1_NC_007605_1_95662_97587_Human_gammaherpesvirus_4_1080_1920 |
| 9310 | EBV_EBNA1_NC_007605_1_95662_97587_Human_gammaherpesvirus_4_0_240 |
| 9311 | EBV_EBNA1_V01555_2_107950_109875_Epstein_Barr_virus_EBV_genome_strain_B95_8_1080_1200 |
| 9312 | EBV_EBNA1_AY961628_3_95580_97505_Human_herpesvirus_4_strain_GD1_1080_1200 |
| 9313 | EBV_LMP1_JQ009376_2_c168596_167294_Human_herpesvirus_4_strain_HKNPC1_0_1200 |
| 9314 | EBV_EBNA1_AY961628_3_95580_97505_Human_herpesvirus_4_strain_GD1_1680_1920 |
| 9315 | EBV_LMP1_AY961628_3_168601_to_168868_Human_herpesvirus_4_strain_GD1_0_240 |
| 9316 | EBV_LMP1_JQ009376_2_168596_167294_Human_herpesvirus_4_strain_HKNPC1_600_720 |

### Treatments

[0180] The methods described herein can be used for selecting, and then optionally administering, an optimal treatment for a subject. Thus the methods described herein include methods for the treatment of cancer, particularly DLBCL. Generally, the methods include administering a therapeutically effective amount of a treatment as described herein, to a subject who is in need of, or who has been determined to be in need of, such treatment. The treatments can be selected based upon the subtype (C1-C5) of a DLBCL.

[0181] The distinct genetic subtypes (C1-C5) of DLBCLs may differ in their responses to immunotherapies. For example, C3 includes EZH2 mutations and has, thus, been associated with decreased MHC class I and II expression and reduced T-cell infiltrates. MHC expression can be restored by inhibiting EZH2 in EZH2-mutated (e.g., C3) DLBCLs. Also, differences in abundance of conventional targets (e.g., CD20) in the different categories of DLBCL may be useful in predicting efficacy of immunotherapy (e.g., anti-CD20 therapy). An example of an anti-CD20 drug used in immunotherapy is Rituxan. Thus, the present invention provides a method for suggesting treatment targets.

[0182] As used in this context, to “treat” means to ameliorate at least one symptom of the cancer. For example, a treatment can result in a reduction in tumor size, tumor growth, cancer cell number, cancer cell growth, or metastasis or risk of metastasis.

[0183] For example, the methods can include selecting and/or administering a treatment that includes a therapeutically effective amount of a BCR/TLR signaling inhibitor and/or a BCL2 inhibitor, to a subject having a select DLBCL cancer/tumor (e.g., a DLBCL of the C5 class, as defined herein).

[0184] Therapeutic agents specifically implicated for administration in using the instant DLBCL classifier include inhibitors of the following genetic targets:

### BCL-2

[0185] B-cell lymphoma 2 (BCL-2) is the founding member of the Bcl-2 family of regulator proteins that regulate apoptosis. Bcl-2 is considered an important anti-apoptotic protein but not a proto-oncogene. Targeted selective BCL-2 inhibitors for clinical use include oblimersen, ABT-263, and Venetoclax (ABT-199).

### BCL-6

[0186] B-cell lymphoma 6 (BCL-6) is an evolutionarily conserved zinc finger transcription factor and contains an N-terminal POZ/BTB domain. This protein acts as a sequence-specific repressor of transcription and has been shown to modulate the STAT-dependent Interleukin 4 (IL-4) responses of B cells. This gene is found to be frequently translocated and hypermutated in diffuse large B cell lymphoma (DLBCL) and contributes to the pathogenesis of DLBCL. An exemplary BCL6 inhibitor is 79-6-Calbiochem from Millipore.

### BCR/TLR Pathway

[0187] The B-cell receptor (BCR) protein controls the activation of B-cells. Toll-like receptors (TLRs) are a class of proteins that play a key role in the innate immune system. TLR's are single, membrane-spanning, non-catalytic receptors typically expressed on cells such as macrophages and dendritic cells. TLR's recognize structurally conserved molecules derived from microbes. BCR and TLR signaling synergizes for induction of activation-induced cytidine deaminase (AID) and immunoglobulin class-switching.

### Notch

[0188] The Notch signaling pathway is a highly conserved cell signaling system present in most multicellular organisms. Mammals possess four different notch receptors, NOTCH1, NOTCH2, NOTCH3, and NOTCH4. Notch signaling promotes proliferative signaling during neurogenesis, and its activity is inhibited by Numb to promote neural differentiation. NOTCH also plays a major role in the regulation of embryonic development. No approved NOTCH small molecule inhibitors are currently in use.

### PI3K

[0189] Phosphatidylinositol-4,5-bisphosphate 3-kinases, also called phosphatidylinositol-3-kinases (PI3K), are enzymes involved in cellular functions such as cell growth, proliferation, differentiation, motility, survival and intracellular trafficking. PI3Ks perform their functions through phosphorylating the 3 position hydroxyl group of the inositol ring of phosphatidylinositol. All PI3-kinases are inhibited by the drugs wortmannin and LY294002.

### EZH2

[0190] Enhancer of zeste homolog 2 (EZH2) is a histone-lysine N-methyltransferase enzyme (EC 2.1.1.43) that participates in histone methylation and, ultimately, transcriptional repression. Methylation activity of EZH2 facilitates heterochromatin formation thereby silences gene function. EZH2 is also the functional enzymatic component of the Polycomb Repressive Complex 2 (PRC2), which is responsible for healthy embryonic development through the epigenetic maintenance of genes responsible for regulating development and differentiation. Several inhibitors of EZH2 have been developed as of 2015, including 3-deazaneplanocin A (DZNep), EPZ005687, Ell, GSK126, and UNC1999. UNC1999 was developed as an analogue of GSK126, and was the first orally bioavailable EZH2 inhibitor to show activity. However, UNC1999 also binds to EZH1 and may have off-target effects.

### CREBBP

[0191] CREB-binding protein (CREBBP), is a protein that carries out its function by activating transcription. Interaction with transcription factors is managed by one or more CREB domains: the nuclear receptor interaction domain (RID), the KIX domain (CREB and MYB interaction domain), the cysteine/histidine regions (TAZ1/CH1 and TAZ2/CH3) and the interferon response binding domain (IBiD). A small molecule inhibitor (I-CBP112) binding to the bromodomain domain of CBP/p300 has been developed for leukemia therapy.

### JAK/STAT

[0192] The Janus kinase/signal transducer and activator of transcription (JAK/STAT) signaling pathway transmits information from extracellular chemical signals to the nucleus resulting in DNA transcription and expression of genes involved in immunity, proliferation, differentiation, apoptosis and oncogenesis. JAK-STAT signaling consists of three main components: a cell surface receptor, a JAK and two STAT proteins. An example JAK/STAT small molecule inhibitors is ruxolitinib.

### BRAF/MEK1 Blockade

[0193] BRAF is a human gene that encodes a protein called B-Raf. The gene is also referred to as proto-oncogene B-Raf, v-Raf murine sarcoma viral oncogene homolog B, and serine/threonine-protein kinase B-Raf. B-Raf protein is involved in internal cell signaling that directs cell growth.

[0194] Mitogen-activated protein kinase (MEK1 or MAP2K1), is a chromosome-axis-associated kinase that slows sister chromatid recombination. BRAF/MEK1 inhibition is possible with Vemurafenib and Cobimetinib, small molecule inhibitors currently used for advanced melanoma treatment.

[0195] Further examples of methods, and agents and combinations thereof suitable for treating a DLBCL are described in International Patent Applications No. WO2016189014A1, WO2012041800A1, WO2014068114A1, WO2001087337A1, WO2013024097A1, WO2013024095A1, WO2018078123A1, WO2017207574A1, WO2017032679A1, WO2013004806A1, WO2018220040A1, WO2020225196A1, WO2020120730A1, and WO2020055040A1, and in European Patent Application Publications No. EP2799451A1, and EP1667717A2, the disclosures of all of which are incorporated herein by reference in their entirety for all purposes.

[0196] An effective amount of an agent can be administered in one or more administrations, applications or dosages. A therapeutically effective amount of a therapeutic compound (i.e., an effective dosage) depends on the therapeutic compounds selected. The compositions can be administered from one or more times per day to one or more times per week; including once every other day. The skilled artisan will appreciate that certain factors may influence the dosage and timing required to effectively treat a subject, including but not limited to the severity of the disease or disorder, previous treatments, the general health and/or age of the subject, and other diseases present. Moreover, treatment of a subject with a therapeutically effective amount of the therapeutic compounds described herein can include a single treatment or a series of treatments.

[0197] Dosage, toxicity and therapeutic efficacy of the therapeutic compounds can be determined by standard pharmaceutical procedures in cell cultures or experimental animals, e.g., for determining the LD50 (the dose lethal to 50% of the population) and the ED50 (the dose therapeutically effective in 50% of the population). The dose ratio between toxic and therapeutic effects is the therapeutic index and it can be expressed as the ratio LD50/ED50. Compounds which exhibit high therapeutic indices are preferred. While compounds that exhibit toxic side effects may be used, care should be taken to design a delivery system that targets such compounds to the site of affected tissue in order to minimize potential damage to uninfected cells and, thereby, reduce side effects.

[0198] The data obtained from cell culture assays and animal studies can be used in formulating a range of dosage for use in humans. The dosage of such compounds lies preferably within a range of circulating concentrations that include the ED50 with little or no toxicity. The dosage may vary within this range depending upon the dosage form employed and the route of administration utilized. For any compound used in the method of the invention, the therapeutically effective dose can be estimated initially from cell culture assays. A dose may be formulated in animal models to achieve a circulating plasma concentration range that includes the IC50 (i.e., the concentration of the test compound which achieves a half-maximal inhibition of symptoms) as determined in cell culture. Such information can be used to more accurately determine useful doses in humans. Levels in plasma may be measured, for example, by high performance liquid chromatography.

### Determining Course (Progression/Remission) of Disease

[0199] In one embodiment, this invention provides methods for determining the course of disease in a subject. Disease course refers to changes in disease status over time, including disease progression (worsening) and disease regression (improvement). Determining the course of disease in a subject can involve measuring levels of circulating tumor DNA (ctDNA) in the subject. A decrease in ctDNA levels is generally indicative of disease regression.

### Reporting the Status

[0200] Additional embodiments of the invention relate to the communication of assay results or diagnoses or both to technicians, physicians or patients, for example. In certain embodiments, computers will be used to communicate assay results or diagnoses or both to interested parties, e.g., physicians and their patients. In some embodiments, the assays will be performed or the assay results analyzed in a country or jurisdiction which differs from the country or jurisdiction to which the results or diagnoses are communicated.

[0201] In a preferred embodiment of the invention, a diagnosis is communicated to the subject as soon as possible after the diagnosis is obtained. The diagnosis may be communicated to the subject by the subject's treating physician. Alternatively, the diagnosis may be sent to a subject by email or communicated to the subject by phone. A computer may be used to communicate the diagnosis by email or phone. In certain embodiments, the message containing results of a diagnostic test may be generated and delivered automatically to the subject using a combination of computer hardware and software which will be familiar to artisans skilled in telecommunications. One example of a healthcare-oriented communications system is described in U.S. Pat. No. 6,283,761; however, the present invention is not limited to methods which utilize this particular communications system. In certain embodiments of the methods of the invention, all or some of the method steps, including the assaying of samples, diagnosing of diseases, and communicating of assay results or diagnoses, may be carried out in diverse (e.g., foreign) jurisdictions.

### Subject Management

[0202] In certain embodiments, the methods of the invention involve managing subject treatment based on disease status. Such management includes referral, for example, to qualified specialist (e.g., an oncologist). In one embodiment, if a physician makes a diagnosis of a neoplasm or cancer, then a certain regime of treatment, such as prescription or administration of therapeutic agent might follow. Alternatively, a diagnosis of non-caner might be followed with further testing to determine a specific disease that might the patient might be suffering from. Also, if the diagnostic test gives an inconclusive result on cancer status, further tests may be called for.

[0203] Additional embodiments of the invention relate to the communication of assay results or diagnoses or both to technicians, physicians, or patients. In certain embodiments, computers will be used to communicate assay results or diagnoses or both to interested parties, e.g., physicians and their patients. In some embodiments, the assays will be performed, or the assay results analyzed in a country or jurisdiction which differs from the country or jurisdiction to which the results or diagnoses are communicated.

### Pharmaceutical Compositions

[0204] Agents of the present disclosure can be incorporated into a variety of formulations for therapeutic use (e.g., by administration) or in the manufacture of a medicament (e.g., for treating or preventing a DLBCL cancer) by combining the agents with appropriate pharmaceutically acceptable carriers or diluents, and may be formulated into preparations in solid, semi-solid, liquid or gaseous forms. Examples of such formulations include, without limitation, tablets, capsules, powders, granules, ointments, solutions, suppositories, injections, inhalants, gels, microspheres, and aerosols.

[0205] Pharmaceutical compositions can include, depending on the formulation desired, pharmaceutically-acceptable, non-toxic carriers of diluents, which are vehicles commonly used to formulate pharmaceutical compositions for animal or human administration The diluent is selected so as not to affect the biological activity of the combination. Examples of such diluents include. without limitation, distilled water, buffered water, physiological saline, PBS, Ringer's solution, dextrose solution, and Hank's solution. A pharmaceutical composition or formulation of the present disclosure can further include other carriers, adjuvants, or non-toxic, nontherapeutic, nonimmunogenic stabilizers, excipients and the like. The compositions can also include additional substances to approximate physiological conditions, such as pH adjusting and buffering agents. toxicity adjusting agents, wetting agents and detergents.

[0206] Further examples of formulations that are suitable for various types of administration can be found in Remington's Pharmaceutical Sciences, Mace Publishing Company, Philadelphia, Pa., 17th ed. (1985). For a brief review of methods for drug delivery, see, Langer, Science 249: 1527-1533 (1990).

[0207] For oral administration, the active ingredient can be administered in solid dosage forms, such as capsules, tablets, and powders, or in liquid dosage forms, such as elixirs, syrups, and suspensions. The active component(s) can be encapsulated in gelatin capsules together with inactive ingredients and powdered carriers, such as glucose, lactose, sucrose, mannitol, starch, cellulose or cellulose derivatives, magnesium stearate, stearic acid, sodium saccharin, talcum, magnesium carbonate. Examples of additional inactive ingredients that may be added to provide desirable color, taste, stability, buffering capacity, dispersion or other known desirable features are red iron oxide, silica gel, sodium lauryl sulfate, titanium dioxide, and edible white ink.

[0208] Similar diluents can be used to make compressed tablets. Both tablets and capsules can be manufactured as sustained release products to provide for continuous release of medication over a period of hours. Compressed tablets can be sugar coated or film coated to mask any unpleasant taste and protect the tablet from the atmosphere, or enteric-coated for selective disintegration in the gastrointestinal tract. Liquid dosage forms for oral administration can contain coloring and flavoring to increase patient acceptance.

[0209] Formulations suitable for parenteral administration include aqueous and non-aqueous, isotonic sterile injection solutions, which can contain antioxidants, buffers, bacteriostats, and solutes that render the formulation isotonic with the blood of the intended recipient, and aqueous and non-aqueous sterile suspensions that can include suspending agents, solubilizers, thickening agents. stabilizers, and preservatives.

[0210] As used herein, the term “pharmaceutically acceptable salt” refers to those salts which are, within the scope of sound medical judgment, suitable for use in contact with the tissues of humans and lower animals without undue toxicity, irritation, allergic response and the like, and are commensurate with a reasonable benefit/risk ratio. Pharmaceutically acceptable salts of amines, carboxylic acids, and other types of compounds, are well known in the art. For example, S. M. Berge, et al. describe pharmaceutically acceptable salts in detail in J Pharmaceutical Sciences 66 (1977): 1-19, incorporated herein by reference. The salts can be prepared in situ during the final isolation and purification of the compounds (e.g., FDA-approved compounds) of the application, or separately by reacting a free base or free acid function with a suitable reagent, as described generally below. For example, a free base function can be reacted with a suitable acid. Furthermore, where the compounds to be administered of the application carry an acidic moiety, suitable pharmaceutically acceptable salts thereof may, include metal salts such as alkali metal salts, e.g. sodium or potassium salts; and alkaline earth metal salts, e.g. calcium or magnesium salts. Examples of pharmaceutically acceptable, nontoxic acid addition salts are salts of an amino group formed with inorganic acids such as hydrochloric acid, hydrobromic acid, phosphoric acid, sulfuric acid and perchloric acid or with organic acids such as acetic acid, oxalic acid, maleic acid, tartaric acid, citric acid, succinic acid or malonic acid or by using other methods used in the art such as ion exchange. Other pharmaceutically acceptable salts include adipate, alginate, ascorbate, aspartate, benzenesulfonate, benzoate, bisulfate, borate, butyrate, camphorate, camphorsulfonate, citrate, cyclopentanepropionate, digluconate, dodecylsulfate, ethanesulfonate, formate, fumarate, glucoheptonate, glycerophosphate, gluconate, hemisulfate, heptanoate, hexanoate, hydroiodide, 2-hydroxy-ethanesulfonate, lactobionate, lactate, laurate, lauryl sulfate, malate, maleate, malonate, methanesulfonate, 2-naphthalenesulfonate, nicotinate, nitrate, oleate, oxalate, palmitate, pamoate, pectinate, persulfate, 3-phenylpropionate, phosphate, picrate, pivalate, propionate, stearate, succinate, sulfate, tartrate, thiocyanate, p-toluenesulfonate, undecanoate, valerate salts, and the like. Representative alkali or alkaline earth metal salts include sodium, lithium, potassium, calcium, magnesium, and the like. Further pharmaceutically acceptable salts include, when appropriate, nontoxic ammonium, quaternary ammonium, and amine cations formed using counterions such as halide, hydroxide, carboxylate, sulfate, phosphate, nitrate, loweralkyl sulfonate and aryl sulfonate.

[0211] Additionally, as used herein, the term “pharmaceutically acceptable ester” refers to esters that hydrolyze in vivo and include those that break down readily in the human body to leave the parent compound (e.g., an FDA-approved compound where administered to a human subject) or a salt thereof. Suitable ester groups include, for example, those derived from pharmaceutically acceptable aliphatic carboxylic acids, particularly alkanoic, alkenoic, cycloalkanoic and alkanedioic acids, in which each alkyl or alkenyl moiety advantageously has not more than 6 carbon atoms.

[0212] Examples of particular esters include formates, acetates, propionates, butyrates, acrylates and ethylsuccinates.

[0213] Furthermore, the term “pharmaceutically acceptable prodrugs” as used herein refers to those prodrugs of the certain compounds of the present application which are, within the scope of sound medical judgment, suitable for use in contact with the issues of humans and lower animals with undue toxicity, irritation, allergic response, and the like, commensurate with a reasonable benefit/risk ratio, and effective for their intended use, as well as the zwitterionic forms, where possible, of the compounds of the application. The term “prodrug” refers to compounds that are rapidly transformed in vivo to yield the parent compound of an agent of the instant disclosure, for example by hydrolysis in blood. A thorough discussion is provided in T. Higuchi and V. Stella, Pro-drugs as Novel Delivery Systems, Vol. 14 of the A.C.S. Symposium Series, and in Edward B. Roche, ed., Bioreversible Carriers in Drug Design, American Pharmaceutical Association and Pergamon Press, (1987), both of which are incorporated herein by reference.

[0214] The components used to formulate the pharmaceutical compositions are preferably of high purity and are substantially free of potentially harmful contaminants (e.g., at least National Food (NF) grade, generally at least analytical grade, and more typically at least pharmaceutical grade) Moreover, compositions intended for in vivo use are usually sterile. To the extent that a given compound must be synthesized prior to use, the resulting product is typically substantially free of any potentially toxic agents, particularly any endotoxins, which may be present during the synthesis or purification process. Compositions for parental administration are also sterile, substantially isotonic and made under GMP conditions.

[0215] Formulations may be optimized for retention and stabilization in a subject and/or tissue of a subject, e.g., to prevent rapid clearance of a formulation by the subject. Stabilization techniques include cross-linking. multimerizing, or linking to groups such as polyethylene glycol. polyacrylamide, neutral protein carriers, etc. in order to achieve an increase in molecular weight.

[0216] Other strategies for increasing retention include the entrapment of the agent, such as a BCL2 inhibitor, PI3K inhibitor, BCR/TLR signaling inhibitor, JAK/STAT inhibitor, etc., in a biodegradable or bioerodible implant. The rate of release of the therapeutically active agent is controlled by the rate of transport through the polymeric matrix, and the biodegradation of the implant. The transport of drug through the polymer barrier will also be affected by compound solubility, polymer hydrophilicity, extent of polymer cross-linking, expansion of the polymer upon water absorption so as to make the polymer barrier more permeable to the drug, geometry of the implant, and the like. The implants are of dimensions commensurate with the size and shape of the region selected as the site of implantation Implants may be particles, sheets, patches, plaques, fibers, microcapsules and the like and may be of any size or shape compatible with the selected site of insertion.

[0217] The implants may be monolithic, i.e. having the active agent homogenously distributed through the polymeric matrix, or encapsulated, where a reservoir of active agent is encapsulated by the polymeric matrix. The selection of the polymeric composition to be employed will vary with the site of administration, the desired period of treatment, patient tolerance, the nature of the disease to be treated and the like. Characteristics of the polymers will include biodegradability at the site of implantation, compatibility with the agent of interest, ease of encapsulation, a half-life in the physiological environment.

[0218] Biodegradable polymeric compositions which may be employed may be organic esters or ethers, which when degraded result in physiologically acceptable degradation products, including the monomers Anhydrides, amides, orthoesters or the like, by themselves or in combination with other monomers, may find use. The polymers will be condensation polymers. The polymers may be cross-linked or non-cross-linked. Of particular interest are polymers of hydroxyaliphatic carboxylic acids, either homo- or copolymers, and polysaccharides. Included among the polyesters of interest are polymers of D-lactic acid, L-lactic acid, racemic lactic acid, glycolic acid, polycaprolactone, and combinations thereof. By employing the L-lactate or D-lactate, a slowly biodegrading polymer is achieved, while degradation is substantially enhanced with the racemate. Copolymers of glycolic and lactic acid are of particular interest, where the rate of biodegradation is controlled by the ratio of glycolic to lactic acid. The most rapidly degraded copolymer has roughly equal amounts of glycolic and lactic acid, where either homopolymer is more resistant to degradation. The ratio of glycolic acid to lactic acid will also affect the brittleness of in the implant, where a more flexible implant is desirable for larger geometries. Among the polysaccharides of interest are calcium alginate, and functionalized celluloses, particularly carboxymethylcellulose esters characterized by being water insoluble, a molecular weight of about 5 kD to 500 kD, etc. Biodegradable hydrogels may also be employed in the implants of the individual instant disclosure. Hydrogels are typically a copolymer material, characterized by the ability to imbibe a liquid. Exemplary biodegradable hydrogels which may be employed are described in Heller in: Hydrogels in Medicine and Pharmacy, N. A. Peppes ed., Vol. III, CRC Press, Boca Raton, Fla., 1987, pp 137-149.

### Pharmaceutical Dosages

[0219] Pharmaceutical compositions of the present disclosure containing an agent described herein may be used (e.g., administered to an individual, such as a human individual, in need of treatment with a BCL2 inhibitor, PI3K inhibitor, BCR/TLR signaling inhibitor, JAK/STAT inhibitor, etc.) in accord with known methods, such as oral administration, intravenous administration as a bolus or by continuous infusion over a period of time, by intramuscular, intraperitoneal, intracerobrospinal, intracranial, intraspinal, subcutaneous, intraarticular, intrasynovial, intrathecal, topical, or inhalation routes.

[0220] Dosages and desired drug concentration of pharmaceutical compositions of the present disclosure may vary depending on the particular use envisioned. The determination of the appropriate dosage or route of administration is well within the skill of an ordinary artisan. Animal experiments provide reliable guidance for the determination of effective doses for human therapy. Interspecies scaling of effective doses can be performed following the principles described in Mordenti, J. and Chappell, W. “The Use of Interspecies Scaling in Toxicokinetics,” In Toxicokinetics and New Drug Development, Yacobi et al., Eds, Pergamon Press, New York 1989, pp. 42-46.

[0221] For in vivo administration of any of the agents of the present disclosure, normal dosage amounts may vary from about 10 ng/kg up to about 100 mg/kg of an individual's and/or subject's body weight or more per day, depending upon the route of administration. In some embodiments, the dose amount is about 1 mg/kg/day to 10 mg/kg/day. For repeated administrations over several days or longer, depending on the severity of the disease, disorder, or condition to be treated, the treatment is sustained until a desired suppression of symptoms is achieved.

[0222] An effective amount of an agent of the instant disclosure may vary, e.g., from about 0.001 mg/kg to about 1000 mg/kg or more in one or more dose administrations for one or several days (depending on the mode of administration). In certain embodiments, the effective amount per dose varies from about 0.001 mg/kg to about 1000 mg/kg, from about 0.01 mg/kg to about 750 mg/kg, from about 0.1 mg/kg to about 500 mg/kg, from about 1.0 mg/kg to about 250 mg/kg, and from about 10.0 mg/kg to about 150 mg/kg.

[0223] An exemplary dosing regimen may include administering an initial dose of an agent of the disclosure of about 200 μg/kg, followed by a weekly maintenance dose of about 100 μg/kg every other week. Other dosage regimens may be useful, depending on the pattern of pharmacokinetic decay that the physician wishes to achieve. For example, dosing an individual from one to twenty-one times a week is contemplated herein. In certain embodiments, dosing ranging from about 3 μg/kg to about 2 mg/kg (such as about 3 μg/kg, about 10 μg/kg, about 30 μg/kg. about 100 μg/kg, about 300 μg/kg, about 1 mg/kg. or about 2 mg/kg) may be used. In certain embodiments, dosing frequency is three times per day, twice per day, once per day. once every other day. once weekly, once every two weeks, once every four weeks, once every five weeks, once every six weeks, once every seven weeks, once every eight weeks, once every nine weeks, once every ten weeks, or once monthly, once every two months, once every three months, or longer. Progress of the therapy is easily monitored by conventional techniques and assays. The dosing regimen, including the agent(s) administered, can vary over time independently of the dose used.

[0224] Pharmaceutical compositions described herein can be prepared by any method known in the art of pharmacology. In general, such preparatory methods include the steps of bringing the agent or compound described herein (i.e., the “active ingredient”) into association with a carrier or excipient, and/or one or more other accessory ingredients, and then, if necessary and/or desirable, shaping, and/or packaging the product into a desired single- or multi-dose unit.

[0225] Pharmaceutical compositions can be prepared, packaged, and/or sold in bulk, as a single unit dose, and/or as a plurality of single unit doses. A “unit dose” is a discrete amount of the pharmaceutical composition comprising a predetermined amount of the active ingredient. The amount of the active ingredient is generally equal to the dosage of the active ingredient which would be administered to a subject and/or a convenient fraction of such a dosage such as, for example, one-half or one-third of such a dosage.

[0226] Relative amounts of the active ingredient, the pharmaceutically acceptable excipient, and/or any additional ingredients in a pharmaceutical composition described herein will vary, depending upon the identity, size, and/or condition of the subject treated and further depending upon the route by which the composition is to be administered. The composition may comprise between 0.1% and 100% (w/w) active ingredient.

[0227] Pharmaceutically acceptable excipients used in the manufacture of provided pharmaceutical compositions include inert diluents, dispersing and/or granulating agents, surface active agents and/or emulsifiers, disintegrating agents, binding agents, preservatives, buffering agents, lubricating agents, and/or oils. Excipients such as cocoa butter and suppository waxes, coloring agents, coating agents, sweetening, flavoring, and perfuming agents may also be present in the composition.

[0228] Exemplary diluents include calcium carbonate, sodium carbonate, calcium phosphate, dicalcium phosphate, calcium sulfate, calcium hydrogen phosphate, sodium phosphate lactose, sucrose, cellulose, microcrystalline cellulose, kaolin, mannitol, sorbitol, inositol, sodium chloride, dry starch, cornstarch, powdered sugar, and mixtures thereof.

[0229] Exemplary granulating and/or dispersing agents include potato starch, corn starch, tapioca starch, sodium starch glycolate, clays, alginic acid, guar gum, citrus pulp, agar, bentonite, cellulose, and wood products, natural sponge, cation-exchange resins, calcium carbonate, silicates, sodium carbonate, cross-linked poly(vinyl-pyrrolidone) (crospovidone), sodium carboxymethyl starch (sodium starch glycolate), carboxymethyl cellulose, cross-linked sodium carboxymethyl cellulose (croscarmellose), methylcellulose, pregelatinized starch (starch 1500), microcrystalline starch, water insoluble starch, calcium carboxymethyl cellulose, magnesium aluminum silicate (Veegum), sodium lauryl sulfate, quaternary ammonium compounds, and mixtures thereof.

[0230] Exemplary surface active agents and/or emulsifiers include natural emulsifiers (e.g., acacia, agar, alginic acid, sodium alginate, tragacanth, chondrux, cholesterol, xanthan, pectin, gelatin, egg yolk, casein, wool fat, cholesterol, wax, and lecithin), colloidal clays (e.g., bentonite (aluminum silicate) and Veegum (magnesium aluminum silicate)), long chain amino acid derivatives, high molecular weight alcohols (e.g., stearyl alcohol, cetyl alcohol, oleyl alcohol, triacetin monostearate, ethylene glycol distearate, glyceryl monostearate, and propylene glycol monostearate, polyvinyl alcohol), carbomers (e.g., carboxy polymethylene, polyacrylic acid, acrylic acid polymer, and carboxyvinyl polymer), carrageenan, cellulosic derivatives (e.g., carboxymethylcellulose sodium, powdered cellulose, hydroxymethyl cellulose, hydroxypropyl cellulose, hydroxypropyl methylcellulose, methylcellulose), sorbitan fatty acid esters (e.g., polyoxyethylene sorbitan monolaurate (Tween® 20), polyoxyethylene sorbitan (Tween® 60), polyoxyethylene sorbitan monooleate (Tween® 80), sorbitan monopalmitate (Span® 40), sorbitan monostearate (Span® 60), sorbitan tristearate (Span® 65), glyceryl monooleate, sorbitan monooleate (Span® 80), polyoxyethylene esters (e.g., polyoxyethylene monostearate (Myrj® 45), polyoxyethylene hydrogenated castor oil, polyethoxylated castor oil, polyoxymethylene stearate, and Solutol®), sucrose fatty acid esters, polyethylene glycol fatty acid esters (e.g., Cremophor®), polyoxyethylene ethers, (e.g., polyoxyethylene lauryl ether (Brij® 30)), poly(vinyl-pyrrolidone), diethylene glycol monolaurate, triethanolamine oleate, sodium oleate, potassium oleate, ethyl oleate, oleic acid, ethyl laurate, sodium lauryl sulfate, Pluronic® F-68, Poloxamer P-188, cetrimonium bromide, cetylpyridinium chloride, benzalkonium chloride, docusate sodium, and/or mixtures thereof.

[0231] Exemplary binding agents include starch (e.g., cornstarch and starch paste), gelatin, sugars (e.g., sucrose, glucose, dextrose, dextrin, molasses, lactose, lactitol, mannitol, etc.), natural and synthetic gums (e.g., acacia, sodium alginate, extract of Irish moss, panwar gum, ghatti gum, mucilage of isapol husks, carboxymethylcellulose, methyl cellulose, ethylcellulose, hydroxyethylcellulose, hydroxypropyl cellulose, hydroxypropyl methylcellulose, microcrystalline cellulose, cellulose acetate, poly(vinyl-pyrrolidone), magnesium aluminum silicate (Veegum®), and larch arabogalactan), alginates, polyethylene oxide, polyethylene glycol, inorganic calcium salts, silicic acid, polymethacrylates, waxes, water, alcohol, and/or mixtures thereof.

[0232] Exemplary preservatives include antioxidants, chelating agents, antimicrobial preservatives, antifungal preservatives, antiprotozoan preservatives, alcohol preservatives, acidic preservatives, and other preservatives. In certain embodiments, the preservative is an antioxidant. In other embodiments, the preservative is a chelating agent.

[0233] Exemplary antioxidants include alpha tocopherol, ascorbic acid, acorbyl palmitate, butylated hydroxyanisole, butylated hydroxytoluene, monothioglycerol, potassium metabisulfite, propionic acid, propyl gallate, sodium ascorbate, sodium bisulfite, sodium metabisulfite, and sodium sulfite.

[0234] Exemplary chelating agents include ethylenediaminetetraacetic acid (EDTA) and salts and hydrates thereof (e.g., sodium edetate, disodium edetate, trisodium edetate, calcium disodium edetate, dipotassium edetate, and the like), citric acid and salts and hydrates thereof (e.g., citric acid monohydrate), fumaric acid and salts and hydrates thereof, malic acid and salts and hydrates thereof, phosphoric acid and salts and hydrates thereof, and tartaric acid and salts and hydrates thereof. Exemplary antimicrobial preservatives include benzalkonium chloride, benzethonium chloride, benzyl alcohol, bronopol, cetrimide, cetylpyridinium chloride, chlorhexidine, chlorobutanol, chlorocresol, chloroxylenol, cresol, ethyl alcohol, glycerin, hexetidine, imidurea, phenol, phenoxyethanol, phenylethyl alcohol, phenylmercuric nitrate, propylene glycol, and thimerosal.

[0235] Exemplary antifungal preservatives include butyl paraben, methyl paraben, ethyl paraben, propyl paraben, benzoic acid, hydroxybenzoic acid, potassium benzoate, potassium sorbate, sodium benzoate, sodium propionate, and sorbic acid.

[0236] Exemplary alcohol preservatives include ethanol, polyethylene glycol, phenol, phenolic compounds, bisphenol, chlorobutanol, hydroxybenzoate, and phenylethyl alcohol.

[0237] Exemplary acidic preservatives include vitamin A, vitamin C, vitamin E, beta-carotene, citric acid, acetic acid, dehydroacetic acid, ascorbic acid, sorbic acid, and phytic acid.

[0238] Other preservatives include tocopherol, tocopherol acetate, deteroxime mesylate, cetrimide, butylated hydroxyanisol (BHA), butylated hydroxytoluened (BHT), ethylenediamine, sodium lauryl sulfate (SLS), sodium lauryl ether sulfate (SLES), sodium bisulfite, sodium metabisulfite, potassium sulfite, potassium metabisulfite, Glydant® Plus, Phenonip®, methylparaben, Germall® 115, Germaben® II, Neolone®, Kathon®, and Euxyl@.

[0239] Exemplary buffering agents include citrate buffer solutions, acetate buffer solutions, phosphate buffer solutions, ammonium chloride, calcium carbonate, calcium chloride, calcium citrate, calcium glubionate, calcium gluceptate, calcium gluconate, D-gluconic acid, calcium glycerophosphate, calcium lactate, propanoic acid, calcium levulinate, pentanoic acid, dibasic calcium phosphate, phosphoric acid, tribasic calcium phosphate, calcium hydroxide phosphate, potassium acetate, potassium chloride, potassium gluconate, potassium mixtures, dibasic potassium phosphate, monobasic potassium phosphate, potassium phosphate mixtures, sodium acetate, sodium bicarbonate, sodium chloride, sodium citrate, sodium lactate, dibasic sodium phosphate, monobasic sodium phosphate, sodium phosphate mixtures, tromethamine, magnesium hydroxide, aluminum hydroxide, alginic acid, pyrogen-free water, isotonic saline, Ringer's solution, ethyl alcohol, and mixtures thereof.

[0240] Exemplary lubricating agents include magnesium stearate, calcium stearate, stearic acid, silica, talc, malt, glyceryl behanate, hydrogenated vegetable oils, polyethylene glycol, sodium benzoate, sodium acetate, sodium chloride, leucine, magnesium lauryl sulfate, sodium lauryl sulfate, and mixtures thereof.

[0241] Exemplary natural oils include almond, apricot kernel, avocado, babassu, bergamot, black current seed, borage, cade, camomile, canola, caraway, carnauba, castor, cinnamon, cocoa butter, coconut, cod liver, coffee, corn, cotton seed, emu, eucalyptus, evening primrose, fish, flaxseed, geraniol, gourd, grape seed, hazel nut, hyssop, isopropyl myristate, jojoba, kukui nut, lavandin, lavender, lemon, Litsea cubeba, macademia nut, mallow, mango seed, meadowfoam seed, mink, nutmeg, olive, orange, orange roughy, palm, palm kernel, peach kernel, peanut, poppy seed, pumpkin seed, rapeseed, rice bran, rosemary, safflower, sandalwood, sasquana, savoury, sea buckthorn, sesame, shea butter, silicone, soybean, sunflower, tea tree, thistle, tsubaki, vetiver, walnut, and wheat germ oils. Exemplary synthetic oils include, but are not limited to, butyl stearate, caprylic triglyceride, capric triglyceride, cyclomethicone, diethyl sebacate, dimethicone 360, isopropyl myristate, mineral oil, octyldodecanol, oleyl alcohol, silicone oil, and mixtures thereof.

[0242] Liquid dosage forms for oral and parenteral administration include pharmaceutically acceptable emulsions, microemulsions, solutions, suspensions, syrups and elixirs. In addition to the active ingredients, the liquid dosage forms may comprise inert diluents commonly used in the art such as, for example, water or other solvents, solubilizing agents and emulsifiers such as ethyl alcohol, isopropyl alcohol, ethyl carbonate, ethyl acetate, benzyl alcohol, benzyl benzoate, propylene glycol, 1,3-butylene glycol, dimethylformamide, oils (e.g., cottonseed, groundnut, corn, germ, olive, castor, and sesame oils), glycerol, tetrahydrofurfuryl alcohol, polyethylene glycols and fatty acid esters of sorbitan, and mixtures thereof. Besides inert diluents, the oral compositions can include adjuvants such as wetting agents, emulsifying and suspending agents, sweetening, flavoring, and perfuming agents. In certain embodiments for parenteral administration, the conjugates described herein are mixed with solubilizing agents such as Cremophor®, alcohols, oils, modified oils, glycols, polysorbates, cyclodextrins, polymers, and mixtures thereof.

[0243] Injectable preparations, for example, sterile injectable aqueous or oleaginous suspensions can be formulated according to the known art using suitable dispersing or wetting agents and suspending agents. The sterile injectable preparation can be a sterile injectable solution, suspension, or emulsion in a nontoxic parenterally acceptable diluent or solvent, for example, as a solution in 1,3-butanediol. Among the acceptable vehicles and solvents that can be employed are water, Ringer's solution, U.S.P., and isotonic sodium chloride solution. In addition, sterile, fixed oils are conventionally employed as a solvent or suspending medium. For this purpose any bland fixed oil can be employed including synthetic mono- or di-glycerides. In addition, fatty acids such as oleic acid are used in the preparation of injectables.

[0244] The injectable formulations can be sterilized, for example, by filtration through a bacterial-retaining filter, or by incorporating sterilizing agents in the form of sterile solid compositions which can be dissolved or dispersed in sterile water or other sterile injectable medium prior to use.

[0245] In order to prolong the effect of a drug, it is often desirable to slow the absorption of the drug from subcutaneous or intramuscular injection. This can be accomplished by the use of a liquid suspension of crystalline or amorphous material with poor water solubility. The rate of absorption of the drug then depends upon its rate of dissolution, which, in turn, may depend upon crystal size and crystalline form. Alternatively, delayed absorption of a parenterally administered drug form may be accomplished by dissolving or suspending the drug in an oil vehicle.

[0246] Compositions for rectal or vaginal administration are typically suppositories which can be prepared by mixing the conjugates described herein with suitable non-irritating excipients or carriers such as cocoa butter, polyethylene glycol, or a suppository wax which are solid at ambient temperature but liquid at body temperature and therefore melt in the rectum or vaginal cavity and release the active ingredient.

[0247] Solid dosage forms for oral administration include capsules, tablets, pills, powders, and granules. In such solid dosage forms, the active ingredient is mixed with at least one inert, pharmaceutically acceptable excipient or carrier such as sodium citrate or dicalcium phosphate and/or (a) fillers or extenders such as starches, lactose, sucrose, glucose, mannitol, and silicic acid, (b) binders such as, for example, carboxymethylcellulose, alginates, gelatin, polyvinylpyrrolidinone, sucrose, and acacia, (c) humectants such as glycerol, (d) disintegrating agents such as agar, calcium carbonate, potato or tapioca starch, alginic acid, certain silicates, and sodium carbonate, (e) solution retarding agents such as paraffin, (f) absorption accelerators such as quaternary ammonium compounds, (g) wetting agents such as, for example, cetyl alcohol and glycerol monostearate, (h) absorbents such as kaolin and bentonite clay, and (i) lubricants such as talc, calcium stearate, magnesium stearate, solid polyethylene glycols, sodium lauryl sulfate, and mixtures thereof. In the case of capsules, tablets, and pills, the dosage form may include a buffering agent.

[0248] Solid compositions of a similar type can be employed as fillers in soft and hard-filled gelatin capsules using such excipients as lactose or milk sugar as well as high molecular weight polyethylene glycols and the like. The solid dosage forms of tablets, dragees, capsules, pills, and granules can be prepared with coatings and shells such as enteric coatings and other coatings well known in the art of pharmacology. They may optionally comprise opacifying agents and can be of a composition that they release the active ingredient(s) only, or preferentially, in a certain part of the intestinal tract, optionally, in a delayed manner. Examples of encapsulating compositions which can be used include polymeric substances and waxes. Solid compositions of a similar type can be employed as fillers in soft and hard-filled gelatin capsules using such excipients as lactose or milk sugar as well as high molecular weight polethylene glycols and the like.

[0249] The active ingredient can be in a micro-encapsulated form with one or more excipients as noted above. The solid dosage forms of tablets, dragees, capsules, pills, and granules can be prepared with coatings and shells such as enteric coatings, release controlling coatings, and other coatings well known in the pharmaceutical formulating art. In such solid dosage forms the active ingredient can be admixed with at least one inert diluent such as sucrose, lactose, or starch. Such dosage forms may comprise, as is normal practice, additional substances other than inert diluents, e.g., tableting lubricants and other tableting aids such a magnesium stearate and microcrystalline cellulose. In the case of capsules, tablets and pills, the dosage forms may comprise buffering agents. They may optionally comprise opacifying agents and can be of a composition that they release the active ingredient(s) only, or preferentially, in a certain part of the intestinal tract, optionally, in a delayed manner. Examples of encapsulating agents which can be used include polymeric substances and waxes.

[0250] Dosage forms for topical and/or transdermal administration of an agent (e.g., a BCL2 inhibitor, PI3K inhibitor, BCR/TLR signaling inhibitor, JAK/STAT inhibitor, etc.) described herein may include ointments, pastes, creams, lotions, gels, powders, solutions, sprays, inhalants, and/or patches. Generally, the active ingredient is admixed under sterile conditions with a pharmaceutically acceptable carrier or excipient and/or any needed preservatives and/or buffers as can be required.

[0251] Additionally, the present disclosure contemplates the use of transdermal patches, which often have the added advantage of providing controlled delivery of an active ingredient to the body. Such dosage forms can be prepared, for example, by dissolving and/or dispensing the active ingredient in the proper medium. Alternatively or additionally, the rate can be controlled by either providing a rate controlling membrane and/or by dispersing the active ingredient in a polymer matrix and/or gel.

[0252] Suitable devices for use in delivering intradermal pharmaceutical compositions described herein include short needle devices. Intradermal compositions can be administered by devices which limit the effective penetration length of a needle into the skin. Alternatively or additionally, conventional syringes can be used in the classical mantoux method of intradermal administration.

[0253] Jet injection devices which deliver liquid formulations to the dermis via a liquid jet injector and/or via a needle which pierces the stratum corneum and produces a jet which reaches the dermis are suitable. Ballistic powder/particle delivery devices which use compressed gas to accelerate the compound in powder form through the outer layers of the skin to the dermis are suitable.

[0254] Formulations suitable for topical administration include, but are not limited to, liquid and/or semi-liquid preparations such as liniments, lotions, oil-in-water and/or water-in-oil emulsions such as creams, ointments, and/or pastes, and/or solutions and/or suspensions. Topically administrable formulations may, for example, comprise from about 1% to about 10% (w/w) active ingredient, although the concentration of the active ingredient can be as high as the solubility limit of the active ingredient in the solvent. Formulations for topical administration may further comprise one or more of the additional ingredients described herein.

[0255] A pharmaceutical composition described herein can be prepared, packaged, and/or sold in a formulation suitable for pulmonary administration via the buccal cavity. Such a formulation may comprise dry particles which comprise the active ingredient and which have a diameter in the range from about 0.5 to about 7 nanometers, or from about 1 to about 6 nanometers. Such compositions are conveniently in the form of dry powders for administration using a device comprising a dry powder reservoir to which a stream of propellant can be directed to disperse the powder and/or using a self-propelling solvent/powder dispensing container such as a device comprising the active ingredient dissolved and/or suspended in a low-boiling propellant in a sealed container. Such powders comprise particles wherein at least 98% of the particles by weight have a diameter greater than 0.5 nanometers and at least 95% of the particles by number have a diameter less than 7 nanometers. Alternatively, at least 95% of the particles by weight have a diameter greater than 1 nanometer and at least 90% of the particles by number have a diameter less than 6 nanometers. Dry powder compositions may include a solid fine powder diluent such as sugar and are conveniently provided in a unit dose form.

[0256] Low boiling propellants generally include liquid propellants having a boiling point of below 65° F. at atmospheric pressure. Generally the propellant may constitute 50 to 99.9% (w/w) of the composition, and the active ingredient may constitute 0.1 to 20% (w/w) of the composition. The propellant may further comprise additional ingredients such as a liquid nonionic and/or solid anionic surfactant and/or a solid diluent (which may have a particle size of the same order as particles comprising the active ingredient).

[0257] Pharmaceutical compositions described herein formulated for pulmonary delivery may provide the active ingredient in the form of droplets of a solution and/or suspension. Such formulations can be prepared, packaged, and/or sold as aqueous and/or dilute alcoholic solutions and/or suspensions, optionally sterile, comprising the active ingredient, and may conveniently be administered using any nebulization and/or atomization device. Such formulations may further comprise one or more additional ingredients including, but not limited to, a flavoring agent such as saccharin sodium, a volatile oil, a buffering agent, a surface active agent, and/or a preservative such as methylhydroxybenzoate. The droplets provided by this route of administration may have an average diameter in the range from about 0.1 to about 200 nanometers.

[0258] Formulations described herein as being useful for pulmonary delivery are useful for intranasal delivery of a pharmaceutical composition described herein. Another formulation suitable for intranasal administration is a coarse powder comprising the active ingredient and having an average particle from about 0.2 to 500 micrometers. Such a formulation is administered by rapid inhalation through the nasal passage from a container of the powder held close to the nares.

[0259] Formulations for nasal administration may, for example, comprise from about as little as 0.1% (w/w) to as much as 100% (w/w) of the active ingredient, and may comprise one or more of the additional ingredients described herein. A pharmaceutical composition described herein can be prepared, packaged, and/or sold in a formulation for buccal administration. Such formulations may, for example, be in the form of tablets and/or lozenges made using conventional methods, and may contain, for example, 0.1 to 20% (w/w) active ingredient, the balance comprising an orally dissolvable and/or degradable composition and, optionally, one or more of the additional ingredients described herein. Alternately, formulations for buccal administration may comprise a powder and/or an aerosolized and/or atomized solution and/or suspension comprising the active ingredient. Such powdered, aerosolized, and/or aerosolized formulations, when dispersed, may have an average particle and/or droplet size in the range from about 0.1 to about 200 nanometers, and may further comprise one or more of the additional ingredients described herein.

[0260] A pharmaceutical composition described herein can be prepared, packaged, and/or sold in a formulation for ophthalmic administration. Such formulations may, for example, be in the form of eye drops including, for example, a 0.1-1.0% (w/w) solution and/or suspension of the active ingredient in an aqueous or oily liquid carrier or excipient. Such drops may further comprise buffering agents, salts, and/or one or more other of the additional ingredients described herein. Other opthalmically-administrable formulations which are useful include those which comprise the active ingredient in microcrystalline form and/or in a liposomal preparation. Ear drops and/or eye drops are also contemplated as being within the scope of this disclosure.

[0261] Although the descriptions of pharmaceutical compositions provided herein are principally directed to pharmaceutical compositions which are suitable for administration to humans, it will be understood by the skilled artisan that such compositions are generally suitable for administration to animals of all sorts. Modification of pharmaceutical compositions suitable for administration to humans in order to render the compositions suitable for administration to various animals is well understood, and the ordinarily skilled veterinary pharmacologist can design and/or perform such modification with ordinary experimentation.

[0262] FDA-approved drugs provided herein are typically formulated in dosage unit form for ease of administration and uniformity of dosage. It will be understood, however, that the total daily usage of the agents described herein will be decided by a physician within the scope of sound medical judgment. The specific therapeutically effective dose level for any particular subject or organism will depend upon a variety of factors including the disease being treated and the severity of the disorder; the activity of the specific active ingredient employed; the specific composition employed; the age, body weight, general health, sex, and diet of the subject; the time of administration, route of administration, and rate of excretion of the specific active ingredient employed; the duration of the treatment; drugs used in combination or coincidental with the specific active ingredient employed; and like factors well known in the medical arts.

[0263] The agents and compositions provided herein can be administered by any route, including enteral (e.g., oral), parenteral, intravenous, intramuscular, intra-arterial, intramedullary, intrathecal, subcutaneous, intraventricular, transdermal, interdermal, rectal, intravaginal, intraperitoneal, topical (as by powders, ointments, creams, and/or drops), mucosal, nasal, bucal, sublingual; by intratracheal instillation, bronchial instillation, and/or inhalation; and/or as an oral spray, nasal spray, and/or aerosol. Specifically contemplated routes are oral administration, intravenous administration (e.g., systemic intravenous injection), regional administration via blood and/or lymph supply, and/or direct administration to an affected site. In general, the most appropriate route of administration will depend upon a variety of factors including the nature of the agent (e.g., its stability in the environment of the gastrointestinal tract), and/or the condition of the subject (e.g., whether the subject is able to tolerate oral administration). In certain embodiments, the agent or pharmaceutical composition described herein is suitable for topical administration to the eye of a subject.

[0264] The exact amount of an agent required to achieve an effective amount will vary from subject to subject, depending, for example, on species, age, and general condition of a subject, severity of the side effects or disorder, identity of the particular agent, mode of administration, and the like. An effective amount may be included in a single dose (e.g., single oral dose) or multiple doses (e.g., multiple oral doses). In certain embodiments, when multiple doses are administered to a subject or applied to a tissue or cell, any two doses of the multiple doses include different or substantially the same amounts of an agent (e.g., a BCL2 inhibitor, PI3K inhibitor, BCR/TLR signaling inhibitor, JAK/STAT inhibitor, etc.) described herein.

[0265] As noted elsewhere herein, a drug of the instant disclosure may be administered via a number of routes of administration, including but not limited to: subcutaneous, intravenous, intrathecal, intramuscular, intranasal, oral, transepidermal, parenteral, by inhalation, or intracerebroventricular.

[0266] The term “injection” or “injectable” as used herein refers to a bolus injection (administration of a discrete amount of an agent for raising its concentration in a bodily fluid), slow bolus injection over several minutes, or prolonged infusion, or several consecutive injections/infusions that are given at spaced apart intervals.

[0267] In some embodiments of the present disclosure, a formulation as herein defined is administered to the subject by bolus administration.

[0268] The FDA-approved drug or other therapy is administered to the subject in an amount sufficient to achieve a desired effect at a desired site (e.g., reduction of cancer size, cancer cell abundance, symptoms, etc.) determined by a skilled clinician to be effective. In some embodiments of the disclosure, the agent is administered at least once a year. In other embodiments of the disclosure, the agent is administered at least once a day. In other embodiments of the disclosure, the agent is administered at least once a week. In some embodiments of the disclosure, the agent is administered at least once a month.

[0269] Additional exemplary doses for administration of an agent of the disclosure to a subject include, but are not limited to, the following: 1-20 mg/kg/day, 2-15 mg/kg/day, 5-12 mg/kg/day, 10 mg/kg/day, 1-500 mg/kg/day, 2-250 mg/kg/day, 5-150 mg/kg/day, 20-125 mg/kg/day, 50-120 mg/kg/day, 100 mg/kg/day, at least 10 μg/kg/day, at least 100 μg/kg/day, at least 250 μg/kg/day, at least 500 μg/kg/day, at least 1 mg/kg/day, at least 2 mg/kg/day, at least 5 mg/kg/day, at least 10 mg/kg/day, at least 20 mg/kg/day, at least 50 mg/kg/day, at least 75 mg/kg/day, at least 100 mg/kg/day, at least 200 mg/kg/day, at least 500 mg/kg/day, at least 1 g/kg/day, and a therapeutically effective dose that is less than 500 mg/kg/day, less than 200 mg/kg/day, less than 100 mg/kg/day, less than 50 mg/kg/day, less than 20 mg/kg/day, less than 10 mg/kg/day, less than 5 mg/kg/day, less than 2 mg/kg/day, less than 1 mg/kg/day, less than 500 μg/kg/day, and less than 500 μg/kg/day.

[0270] In certain embodiments, when multiple doses are administered to a subject or applied to a tissue or cell, the frequency of administering the multiple doses to the subject or applying the multiple doses to the tissue or cell is three doses a day, two doses a day, one dose a day, one dose every other day, one dose every third day, one dose every week, one dose every two weeks, one dose every three weeks, or one dose every four weeks. In certain embodiments, the frequency of administering the multiple doses to the subject or applying the multiple doses to the tissue or cell is one dose per day. In certain embodiments, the frequency of administering the multiple doses to the subject or applying the multiple doses to the tissue or cell is two doses per day. In certain embodiments, the frequency of administering the multiple doses to the subject or applying the multiple doses to the tissue or cell is three doses per day. In certain embodiments, when multiple doses are administered to a subject or applied to a tissue or cell, the duration between the first dose and last dose of the multiple doses is one day, two days, four days, one week, two weeks, three weeks, one month, two months, three months, four months, six months, nine months, one year, two years, three years, four years, five years, seven years, ten years, fifteen years, twenty years, or the lifetime of the subject, tissue, or cell. In certain embodiments, the duration between the first dose and last dose of the multiple doses is three months, six months, or one year. In certain embodiments, the duration between the first dose and last dose of the multiple doses is the lifetime of the subject, tissue, or cell. In certain embodiments, a dose (e.g., a single dose, or any dose of multiple doses) described herein includes independently between 0.1 μg and 1 μg, between 0.001 mg and 0.01 mg, between 0.01 mg and 0.1 mg, between 0.1 mg and 1 mg, between 1 mg and 3 mg, between 3 mg and 10 mg, between 10 mg and 30 mg, between 30 mg and 100 mg, between 100 mg and 300 mg, between 300 mg and 1,000 mg, or between 1 g and 10 g, inclusive, of an agent (e.g., a BCL2 inhibitor, PI3K inhibitor, BCR/TLR signaling inhibitor, JAK/STAT inhibitor, etc.) described herein.

[0271] In certain embodiments, a dose described herein includes independently between 1 mg and 3 mg, inclusive, of an agent (e.g., a BCL2 inhibitor, PI3K inhibitor, BCR/TLR signaling inhibitor, JAK/STAT inhibitor, etc.) described herein. In certain embodiments, a dose described herein includes independently between 3 mg and 10 mg, inclusive, of an agent (e.g., a BCL2 inhibitor, PI3K inhibitor, BCR/TLR signaling inhibitor, JAK/STAT inhibitor, etc.) described herein. In certain embodiments, a dose described herein includes independently between 10 mg and 30 mg, inclusive, of an agent (e.g., a BCL2 inhibitor, PI3K inhibitor, BCR/TLR signaling inhibitor, JAK/STAT inhibitor, etc.) described herein. In certain embodiments, a dose described herein includes independently between 30 mg and 100 mg, inclusive, of an agent (e.g., a BCL2 inhibitor, PI3K inhibitor, BCR/TLR signaling inhibitor, JAK/STAT inhibitor, etc.) described herein.

[0272] It will be appreciated that dose ranges as described herein provide guidance for the administration of provided pharmaceutical compositions to an adult. The amount to be administered to, for example, a child or an adolescent can be determined by a medical practitioner or person skilled in the art and can be lower or the same as that administered to an adult. In certain embodiments, a dose described herein is a dose to an adult human whose body weight is 70 kg.

[0273] It will be also appreciated that an agent (e.g., a BCL2 inhibitor, PI3K inhibitor, BCR/TLR signaling inhibitor, JAK/STAT inhibitor, etc.) or composition, as described herein, can be administered in combination with one or more additional pharmaceutical agents (e.g., therapeutically and/or prophylactically active agents), which are different from the agent or composition and may be useful as, e.g., combination therapies. The agents or compositions can be administered in combination with additional pharmaceutical agents that improve their activity (e.g., activity (e.g., potency and/or efficacy) in treating a disease in a subject in need thereof, in preventing a disease in a subject in need thereof, in reducing the risk of developing a disease in a subject in need thereof, in inhibiting the replication of a virus, in killing a virus, etc. in a subject or cell. In certain embodiments, a pharmaceutical composition described herein including an agent (e.g., a BCL2 inhibitor, PI3K inhibitor, BCR/TLR signaling inhibitor, JAK/STAT inhibitor, etc.) described herein and an additional pharmaceutical agent shows a synergistic effect that is absent in a pharmaceutical composition including one of the agent and the additional pharmaceutical agent, but not both.

[0274] In some embodiments of the disclosure, a therapeutic agent distinct from a first therapeutic agent of the disclosure is administered prior to, in combination with, at the same time, or after administration of the agent of the disclosure. In some embodiments, the second therapeutic agent is selected from the group consisting of a chemotherapeutic, an antioxidant, an anti-inflammatory agent, an antimicrobial, a steroid, etc.

[0275] The agent or composition can be administered concurrently with, prior to, or subsequent to one or more additional pharmaceutical agents, which may be useful as, e.g., combination therapies. Pharmaceutical agents include therapeutically active agents. Pharmaceutical agents also include prophylactically active agents. Pharmaceutical agents include small organic molecules such as drug compounds (e.g., compounds approved for human or veterinary use by the U.S. Food and Drug Administration as provided in the Code of Federal Regulations (CFR)), peptides, proteins, carbohydrates, monosaccharides, oligosaccharides, polysaccharides, nucleoproteins, mucoproteins, lipoproteins, synthetic polypeptides or proteins, small molecules linked to proteins, glycoproteins, steroids, nucleic acids, DNAs, RNAs, nucleotides, nucleosides, oligonucleotides, antisense oligonucleotides, lipids, hormones, vitamins, and cells. In certain embodiments, the additional pharmaceutical agent is a pharmaceutical agent useful for treating and/or preventing a disease described herein. Each additional pharmaceutical agent may be administered at a dose and/or on a time schedule determined for that pharmaceutical agent. The additional pharmaceutical agents may also be administered together with each other and/or with the agent or composition described herein in a single dose or administered separately in different doses. The particular combination to employ in a regimen will take into account compatibility of the agent described herein with the additional pharmaceutical agent(s) and/or the desired therapeutic and/or prophylactic effect to be achieved. In general, it is expected that the additional pharmaceutical agent(s) in combination be utilized at levels that do not exceed the levels at which they are utilized individually. In some embodiments, the levels utilized in combination will be lower than those utilized individually.

[0276] The additional pharmaceutical agents include, but are not limited to, additional BCL2 inhibitors, PI3K inhibitors, BCR/TLR signaling inhibitors, JAK/STAT inhibitors, other epigenetic modifier inhibitors, etc., other anti-cancer agents, immunomodulatory agents, anti-proliferative agents, cytotoxic agents, anti-angiogenesis agents, anti-inflammatory agents, immunosuppressants, anti-bacterial agents, anti-viral agents, cardiovascular agents, cholesterol-lowering agents, anti-diabetic agents, anti-allergic agents, contraceptive agents, and pain-relieving agents. In certain embodiments, the additional pharmaceutical agent is an anti-proliferative agent. In certain embodiments, the additional pharmaceutical agent is an anti-cancer agent. In certain embodiments, the additional pharmaceutical agent is an anti-viral agent. In certain embodiments, the additional pharmaceutical agent is selected from the group consisting of epigenetic or transcriptional modulators (e.g., DNA methyltransferase inhibitors, histone deacetylase inhibitors (HDAC inhibitors), lysine methyltransferase inhibitors), antimitotic drugs (e.g., taxanes and vinca alkaloids), hormone receptor modulators (e.g., estrogen receptor modulators and androgen receptor modulators), cell signaling pathway inhibitors (e.g., tyrosine kinase inhibitors), modulators of protein stability (e.g., proteasome inhibitors), Hsp90 inhibitors, glucocorticoids, all-trans retinoic acids, and other agents that promote differentiation. In certain embodiments, the agents described herein or pharmaceutical compositions can be administered in combination with an anti-cancer therapy including, but not limited to, surgery, radiation therapy, transplantation (e.g., stem cell transplantation, bone marrow transplantation), immunotherapy, and chemotherapy.

[0277] Dosages for a particular agent of the instant disclosure may be determined empirically in individuals who have been given one or more administrations of the agent.

[0278] Administration of an agent of the present disclosure can be continuous or intermittent, depending, for example, on the recipient's physiological condition, whether the purpose of the administration is therapeutic or prophylactic, and other factors known to skilled practitioners. The administration of an agent may be essentially continuous over a preselected period of time or may be in a series of spaced doses.

[0279] Guidance regarding particular dosages and methods of delivery is provided in the literature; see, for example, U.S. Pat. Nos. 4,657,760; 5,206,344; or 5,225,212. It is within the scope of the instant disclosure that different formulations will be effective for different treatments and different disorders, and that administration intended to treat a specific organ or tissue may necessitate delivery in a manner different from that to another organ or tissue. Moreover, dosages may be administered by one or more separate administrations, or by continuous infusion. For repeated administrations over several days or longer, depending on the condition, the treatment is sustained until a desired suppression of disease symptoms occurs. However, other dosage regimens may be useful. The progress of this therapy is easily monitored by conventional techniques and assays.

### Kits

[0280] The instant disclosure also provides kits containing agents of this disclosure for use in the methods of the present disclosure. Kits of the instant disclosure may include one or more containers comprising an agent for treatment of a DLBCL and/or may contain agents (e.g., oligonucleotide primers, probes, etc.) for identifying a cancer or subject as possessing one or more variant sequences. In some embodiments, the kits further include instructions for use in accordance with the methods of this disclosure. In some embodiments, these instructions comprise a description of use of the agent to treat or diagnose, e.g., a DLBCL, according to any of the methods of this disclosure. In some embodiments, the instructions comprise a description of how to detect a DLBCL class of cancer, for example in an individual, in a tissue sample, or in a cell. The kit may further comprise a description of treatments suggested for an individual as suitable for treatment based on identifying whether that subject has a specific class of DLBCL.

[0281] Instructions supplied in the kits of the instant disclosure are typically written instructions on a label or package insert (e.g., a paper sheet included in the kit), but machine-readable instructions (e.g., instructions carried on a magnetic or optical storage disk) are also acceptable. Instructions may be provided for practicing any of the methods described herein.

[0282] The kits of this disclosure are in suitable packaging. Suitable packaging includes, but is not limited to, vials, bottles, jars, flexible packaging (e.g., sealed Mylar or plastic bags), and the like. Kits may optionally provide additional components such as buffers and interpretive information. Normally, the kit comprises a container and a label or package insert(s) on or associated with the container.

[0283] The practice of the present invention employs, unless otherwise indicated, conventional techniques of molecular biology (including recombinant techniques), microbiology, cell biology, biochemistry and immunology, which are well within the purview of the skilled artisan. Such techniques are explained fully in the literature, such as, “Molecular Cloning: A Laboratory Manual”, second edition (Sambrook, 1989); “Oligonucleotide Synthesis” (Gait, 1984); “Animal Cell Culture” (Freshney, 1987); “Methods in Enzymology” “Handbook of Experimental Immunology” (Weir, 1996); “Gene Transfer Vectors for Mammalian Cells” (Miller and Calos, 1987); “Current Protocols in Molecular Biology” (Ausubel, 1987); “PCR: The Polymerase Chain Reaction”, (Mullis, 1994); “Current Protocols in Immunology” (Coligan, 1991). These techniques are applicable to the production of the polynucleotides and polypeptides of the invention, and, as such, may be considered in making and practicing the invention. Particularly useful techniques for particular embodiments will be discussed in the sections that follow.

[0284] The following examples are put forth so as to provide those of ordinary skill in the art with a complete disclosure and description of how to make and use the assay, screening, and therapeutic methods of the invention, and are not intended to limit the scope of what the inventors regard as their invention.

### EXAMPLES

### Example 1: Genetic Analyses of DLBCL

[0285] To define the genetic features of discrete diffuse large B-cell lymphoma (DLBCL) subsets, recurrent mutations, somatic copy number alterations (SCNAs), and structural variants (SVs) were identified in 304 newly diagnosed DLBCLs from patients who were treated with state-of-the-art combination chemotherapy (Rituximab, cyclophosphamide adriamycin, vincristine, prednisone, R-CHOP) and had long term follow up (FIGS. 1A and 1B) (Goy A. Succeeding in Breaking the R-CHOP Ceiling in DLBCL: Learning From Negative Trials. J Clin Oncol. 2017; 35(31):3519-3522). To accomplish these goals, new computational methods were developed to characterize 1) formalin-fixed paraffin embedded tumor biopsies; 2) tumor specimens without paired normal DNAs; and 3) structural variants (SVs) using a 4-algorithm pipeline. Significantly mutated candidate cancer genes (CCGs) were found to be highly likely to reside within focal SCNAs (Fisher Exact test, p=1e-44) indicating that these driver genes may have been perturbed by multiple mechanisms (FIG. 1B).

### Example 2: Identification of Genetically Distinct DLBCL Subsets

[0286] Next, using the genetic information obtained in Example 1, subsets of DLBCL were defined. Non-negative matrix factorization (NMF) consensus clustering was applied to identified recurrent driver alterations, and 5 subsets of tumors (clusters) were defined with discrete genetic signatures (C1-C5; 51 to 72 samples each). These clusters included the following, which were each associated with the indicated biologic features: 1) high-risk ABC-DLBCLs with near-uniform BCL2 copy gain, frequent activating MYD88^{L265P} and CD79B mutations and extranodal tropism (C5); 2) previously unappreciated low-risk ABC-DLBCLs with genetic features of an extrafollicular, possibly marginal zone, origin (C1); 3) high-risk GCB-DLBCLs with BCL2 SVs, inactivating mutations and/or copy loss of PTEN and alterations of epigenetic enzymes (C3); 4) a newly defined group of low-risk GCB-DLBCLs with distinct alterations in JAK/STAT and BRAF pathway components and multiple histones (C4); and 5) an ABC/GCB-independent group of tumors with biallelic inactivation of TP53, 9p21.3/CDKN2A copy loss and associated genomic instability (C2) (FIG. 2A) (the biologic features mentioned here as well as further biologic features associated with each subtype are presented in Chapuy B, Stewart C, Dunford A J, et al. Molecular subtypes of diffuse large B cell lymphoma are associated with distinct pathogenic mechanisms and outcomes. Nat Med. 2018; 24(5):679-690). The C2 subtype was associated with increased genomic instability and arm level and focal SCNAs. Patients with the genetically distinct transcriptional subtypes (C1 and C5 ABC DLBCLs; C3 and C4 GCB DLBCLs) had marked differences in progression-free survival (PFS) with significantly higher risks for relapse in C5 ABC- and C3 GCB-DLBCLs, and patients with C2 DLBCLs had a distinct trajectory and steady rate of progression over time (FIG. 2B). Thus, the genetically defined clusters identified separate high- and low-risk categories of the transcriptionally-defined subsets “ABC” (C5 and C1, respectively) and “GCB” (Clusters C3 and C4, respectively) subsets. C2 was an additional category of DLBCLs unrelated to the cell-of-origin classification; therefore, the genetically defined clusters superseded the previously proposed transcriptional clusters (ABC and GCB), which have proven unsuccessful in guiding therapy.

[0287] Genetic alterations identified as characterizing each cluster revealed multiple complementary mechanisms used by specific categories (clusters) of DLBCLs. These complementary mechanisms may be targeted together to treat a particular category of DLBCL. For example, aberrant B-cell receptor signaling and deregulated BCL-2 expression (associated with decreased apoptosis) has been associated with C3 and C5 and this can, therefore, inform selection of a therapy for DLBCLs falling into these categories.

### Example 3: Validation of the Genetic DLBCL Substructure in an Independent Dataset

[0288] To increase the clinical utility of the genetic subclasses identified in Example 2, the genetic substructure was validated in an independent dataset. Then a robust molecular classifier was developed that allowed prediction in new samples.

[0289] To validate the genetic substructure, raw genetic data (mutations, SCNAs, and SVs) was obtained from a recently published independent series of patients with newly diagnosed DLBCLs who were treated with state-of-the-art therapy (Schmitz, et al. Genetics and Pathogenesis of Diffuse Large B-Cell Lymphoma. N Engl J Med. 2018; 378(15):1396-1407). To avoid batch effects, mutations and SCNAs were reanalyzed using published pipelines (Chapuy et al. Molecular subtypes of diffuse large B cell lymphoma are associated with distinct pathogenic mechanisms and outcomes. Nat Med. 2018; 24(5):679-690) including a newly generated tumor-only algorithm to harmonize datasets and avoid batch effects. In the combined set, low purity cases and samples with missing data were removed and non-negative matrix factorization (NMF) clustering was applied to all samples of the combined set using the previously characterized 158 genetic drivers (FIG. 3). NMF clustering in the combined set (n=721) identified 5 clusters. Notably, samples of each series contributed to each cluster in the same proportion (FIG. 3). It was confirmed that: 1) C1 and C5 DLBCLs were enriched in the ABC transcriptional subtype (C1 p=0.02; C5 p=2e-33); 2) C3 and C4 DLBCLs were enriched in GCB (C3 p=4e-26; C4 p=2e-6), and 3) C2 DLBCLs were ABC/GCB independent (p=ns).

[0290] The biologic features of specific clusters were also validated using orthogonal evidence. Specifically, it was found that MYD88^{L265P} mutations were enriched in C5 DLBCLs (q=8e-23), MYD88^{non-L26P} mutations were predominantly found in C1 (q=0.07) and genome doublings were enriched in C2 DLBCLs (q=2e-18). Also, outcome differences for the respective clusters were preserved (logrank p=0.011). In summary, identity, associated marker genes, and biology of the C1-C5 DLBCL clusters in the combined cohort were confirmed, which served with its C1-C5 labels as a gold standard for the development of a molecular classifier.

### Example 4: Development of the DLBCL Molecular Classifier

[0291] To match high-risk DLBCL patients with appropriate combination therapies, a robust molecular classifier was developed that can prospectively identify the newly defined tumor subsets. The classifier assigned single samples to specific clusters using a minimum number of easy-to-measure input features and designated as many samples as possible with high confidence. The labels from the combined set, composed of recently published DLBCL subtypes (Chapuy B, Stewart C, Dunford A J, et al. Molecular subtypes of diffuse large B cell lymphoma are associated with distinct pathogenic mechanisms and outcomes. Nat Med. 2018; 24(5):679-690) and the independent dataset (Schmitz R, Wright G W, Huang D W, et al. Genetics and Pathogenesis of Diffuse Large B-Cell Lymphoma. N Engl J Med. 2018; 378(15):1396-1407) served as a gold standard training and test dataset (FIG. 3 and the top of FIG. 4A).

[0292] The workflow and evaluation criteria for the DLBCL molecular classifier are presented in FIGS. 4A-4F. The overall design of the molecular classifier is presented in FIGS. 4A and 4B. To develop a genetic/molecular classifier, the combined datasets of DLBCL tumors from FIG. 3 was used as gold-standard to define the C1-C5 DLBCL classes. This cohort was divided into a training set (n=551) and a test set (n=149). Different feature (input variables) reduction technologies were evaluated and different computer-based classification methods were explored and optimized in the training set. The final model was evaluated in an independent test set suitable for application to different new datasets. The overall goals of the classifier were that it needed to be easy/simple (minimal learnable parameters), robust and probabilistic (assign classifications that are probabilistic (confidence)), and accurate for a large number of samples allowing an assignment into a given C1-C5 class and defining the specific probability (“certainty”) for the classification. FIG. 4C provides an overview of a performance score used to evaluate the molecular classifier. The evaluation of different classifier models leveraged a newly constructed “performance matrix”. This performance (P) matrix was defined as a weighted harmonic mean between two core metrics (accuracy and kappa), with accuracy (A) being weighted twice as much as the calibration factor, kappa (κ):

$$P = ( 1 + {2}^{2} ) * \frac{A * κ}{( {2}^{2} * κ ) + A} .$$

The performance metric was defined as the harmonic mean between accuracy and calibration (kappa) and was analogous to the “F2” score between sensitivity and specificity. To calculate the accuracy (FIG. 4D), correctly assigned cases were divided though all classified cases. An example of an high accuracy model is shown in the matrix of FIG. 4D. Kappa is a calibration factor that captures the correlation between confidence and accuracy (FIG. 4E). To calculate kappa, first correctly and incorrectly classified cases were plotted and grouped based on confidence bins. By analyzing the worst case residual, best case residual, and observed residual, mean calibration could be calculated relative to these bounds. A visualization of a model with good performance is shown in FIG. 4E.

[0293] FIG. 4F provides an overview of the steps used during the model construction and evaluation: 1) Optimal classification methods and data reduction technology, 2A) Selection of features, 2B/C) Evaluation of alteration classes and orthogonal features, 2D/E) Evaluation of sensitivity and false positive rate, 2F) Winning model—Recipe, 3) Contingency tables in training and independent test sets, 4) Portal (described further below).

### Step 1: Selecting Optimal Classification Method and Data Reduction Technology (FIG. 5)

[0294] Different classification methods, including artificial neural networks, random forest and naïve Bayes classifying methods, were evaluated. The input features/variables were either used as full features (n=163) or reduced in their complexity by different dimensionality reduction technologies (e.g., PCA, biological reduction (summing of biologically relevant groups)). The Accuracy, kappa (κ) and the computed performance was calculated for each combination and ranked by performance. A model with good performance was an artificial neural network that learned the classification from a biological reduced input feature set (metafeatures, see Table 3 and FIG. 9).

### Steps 2A-2E: Further Optimization and Testing of Robustness of the Molecular Classifier (FIGS. 6A-6E)

[0295] A model performing well in the prior step (FIG. 5) was further optimized. Features (i.e., metafeatures) were optimized by significance and size (FIG. 6A). It was explored if a more stringent selection of marker genes with increased q-value thresholds and/or the reduction of features increased the performance of the molecular classifier. Features were dropped by size of the feature in the genome space (larger features were removed first). Notably, with this step a final q-value at 0.05 was able to be determined and 5 features were dropped. The final list of metafeatures is provided in Table 3 and FIG. 9. It was next endeavored to determine if all datatypes (mutations, copy number alterations and structural variants) were necessary (FIG. 6B). Notably, all data types were important to use in combination because the removal of features or classes of alterations deteriorated the performance of the model. A further reduction of features (i.e., metafeatures) reduced the performance of the molecular classifier. The addition of orthogonal assays to capture molecular complexity in DLBCL, such as the cell of origin defined transcriptional subtypes and/or ploidy, did not significantly improve the performance of the molecular classifier (FIG. 6C). For this reason, the decision was made not to include these features in the molecular classifier. By simulating loss of input data (FIG. 6D) or adding of random noise/artifacts (FIG. 6E), the robustness of the model was evaluated and sensitivity and false positive rate of the model were determined.

[0296] As shown in Table 3 below and in FIG. 9, the metafeatures correspond to a compression of several measured features (i.e., the indicated variants). Each metafeature was calculated as a sum of variant classification-specific weighted values (see Table 1) determined based upon the measurement of each variant included in the metafeature. For example, the metafeature BCL6.C1 could range from 0 (no mutation and no SV) to 5 (non-synonymous mutation and SV). Typically, all of the variants and the indicated classifications were measured, see Table 3 and FIG. 9.

### Steps 3: Contingency Tables in Training and Independent Test Sets (FIG. 7)

[0297] The classification output of the molecular classifier as confusion matrix for the training and independent test sets is provided in FIG. 7. Since the classifier was probabilistic, it allowed for defining post-hoc thresholds on the confidence. In FIG. 7 the accuracy in training and test cohorts (top and bottom row, respectively) for no confidence threshold (left column, all cases are classified), the top 70% confident cases (middle panel) and above 90% confident cases, right column) are exemplified. The different confidence thresholds can be used to apply the classifier in a scenario in which all cases need to be classified with no confidence limit threshold. In a scenario in which the classifier is used to assign patients to a clinical trial, a high confidence threshold (e.g., 70% 75%, 80%, 85%, 90%, 95%, or 99%) might be used with the caveat of not classifying all patients.

TABLE 3
Input Variables (metafeatures) (see FIG. 9). The indicated 21 metafeatures, M1-M21, were composed of
the listed genetic features. The specific features are noted and the alteration types are indicated.

| Metafeature | | Associated | | Variant |
|---|---|---|---|---|
| No. | Metafeature value name | DLBCL Cluster | Variant | Classification |
| M1 | BCL6.C1.vec | C1 | BCL6 | Mutation |
| | | | BCL6 | SV |
| M2 | NOTCH2.C1.vec | C1 | NOTCH2 | Mutation |
| | | | SPEN | Mutation |
| | | | DTX1 | Mutation |
| M3 | NFKB.in.C1.vec | C1 | MYD88^{OTHER} | Mutation |
| | | | TNFAIP3 | Mutation |
| | | | TNIP1 | Mutation |
| | | | BCL10 | Mutation |
| | | | NFKBIE | Mutation |
| M4 | Ambiv.C1.vec | C1 | UBE2A | Mutation |
| | | | TMEM30A | Mutation |
| | | | ZEB2 | Mutation |
| | | | GNAI2 | Mutation |
| | | | 5p | SCNA.Arm.Gain |
| | | | POU2F2 | Mutation |
| | | | IKZF3 | Mutation |
| | | | 3q28 | SCNA.Focal.Loss |
| | | | EBF1 | Mutation |
| | | | LYN | Mutation |
| | | | HIST1H2BC | Mutation |
| | | | BCL7A | Mutation |
| | | | CXCR4 | Mutation |
| | | | CCDC27 | Mutation |
| | | | TUBGCP5 | Mutation |
| | | | SMG7 | Mutation |
| | | | RHOA | Mutation |
| | | | BTG2 | Mutation |
| M5 | Immunescape.C1.vec | C1 | CD70 | Mutation |
| | | | FAS | Mutation |
| | | | HLA-B | Mutation |
| | | | CD58 | Mutation |
| | | | B2M | Mutation |
| | | | FADD | Mutation |
| M6 | TP53.C2.vec | C2 | TP53 | Mutation |
| | | | 17p | SCNA.Arm.Loss |
| M7 | 21q.C2.vec | C2 | 21q | SCNA.Arm.Gain |
| M8 | C2.sumCN.arm.C2.vec | C2 | 17p | SCNA.Arm.Loss |
| | | | 21q | SCNA.Arm.Gain |
| | | | 11q | SCNA.Arm.Gain |
| | | | 6p | SCNA.Arm.Gain |
| | | | 11p | SCNA.Arm.Gain |
| | | | 7p | SCNA.Arm.Gain |
| | | | 13q | SCNA.Arm.Gain |
| | | | 7q | SCNA.Arm.Gain |
| | | | 12p | SCNA.Gain |
| | | | 1q | SCNA.Arm.Gain |
| | | | 5p | SCNA.Arm.Gain |
| | | | 18p | SCNA.Arm.Gain |
| | | | 3p | SCNA.Arm.Gain |
| | | | 19q | SCNA.Arm.Gain |
| M9 | C2.sumCN.focal.C2.vec | C2 | 1p36.11 | SCNA.Focal.Loss |
| | | | 1p31.1 | SCNA.Focal.Loss |
| | | | 1p13.1 | SCNA.Focal.Loss |
| | | | 2q22.2 | SCNA.Focal.Loss |
| | | | 16q12.1 | SCNA.Focal.Loss |
| | | | 14q32.31 | SCNA.Focal.Loss |
| | | | 1p36.32 | SCNA.Focal.Loss |
| | | | 4q35.1 | SCNA.Focal.Loss |
| | | | 9q21.13 | SCNA.Focal.Loss |
| | | | 15q15.3 | SCNA.Focal.Loss |
| | | | 4q21.22 | SCNA.Focal.Loss |
| | | | 9p21.3 | SCNA.Focal.Loss |
| | | | 8q24.22 | SCNA.Focal.Gain |
| | | | 12p13.2 | SCNA.Focal.Loss |
| | | | 2p16.1 | SCNA.Focal.Gain |
| | | | 8q12.1 | SCNA.Focal.Loss |
| | | | 19p13.2 | SCNA.Focal.Loss |
| | | | 17q25.1 | SCNA.Focal.Loss |
| | | | 1q42.12 | SCNA.Focal.Loss |
| | | | 3p21.31 | SCNA.Focal.Loss |
| | | | 18q23 | SCNA.Focal.Loss |
| | | | 19p13.3 | SCNA.Focal.Loss |
| | | | 13q34 | SCNA.Focal.Loss |
| | | | 7q22.1 | SCNA.Focal.Gain |
| | | | 10q23.31 | SCNA.Focal.Loss |
| | | | 9p24.1 | SCNA.Focal.Gain |
| | | | 1q23.3 | SCNA.Focal.Gain |
| | | | 3q28 | SCNA.Focal.Gain |
| | | | 11q23.3 | SCNA.Focal.Gain |
| | | | 17q24.3 | SCNA.Focal.Gain |
| | | | 3q28 | SCNA.Focal.Loss |
| | | | 13q14.2 | SCNA.Focal.Loss |
| | | | 18q21.32 | SCNA.Gain |
| | | | 19q13.32.1 | SCNA.Loss |
| | | | 6p21.1 | SCNA.Gain |
| | | | 13q31.3 | SCNA.Gain |
| | | | 18q22.2 | SCNA.Gain |
| | | | EP300 | Mutation |
| | | | CD274 | Mutation |
| | | | ZNF423 | Mutation |
| | | | PDE4DIP | Mutation |
| M10 | BCL2.C3.vec | C3 | BCL2 | Mutation |
| | | | BCL2 | SV |
| M11 | ChromatinModifier.C3.vec | C3 | CREBBP | Mutation |
| | | | EZH2 | Mutation |
| | | | KMT2D | Mutation |
| | | | EP300 | Mutation |
| M12 | Ambiv.C3.vec | C3 | GNA13 | Mutation |
| | | | TNFRSF14 | Mutation |
| | | | MAP2K1 | Mutation |
| | | | MEF2B | Mutation |
| | | | IRF8 | Mutation |
| | | | HVCN1 | Mutation |
| | | | GNAI2 | Mutation |
| | | | MEF2C | Mutation |
| | | | POU2AF1 | Mutation |
| | | | RAC2 | Mutation |
| | | | 12p | SCNA.Gain |
| | | | 12q | SCNA.Gain |
| | | | 6q14.1 | SCNA.Loss |
| M13 | PTENplus.C3.vec | C3 | PTEN | Mutation |
| | | | 10Q23.31 | SCNA.Focal.Loss |
| | | | 13Q14.2 | SCNA.Focal.Loss |
| M14 | MYC.C3.vec | C3 | MYC | SV |
| M15 | HIST.C4.vec | C4 | HIST1H2AC | Mutation |
| | | | HIST1H2BC | Mutation |
| | | | HIST1H1E | Mutation |
| | | | HIST1H1B | Mutation |
| | | | HIST1H2AM | Mutation |
| | | | HIST1H1C | Mutation |
| | | | HIST1H1D | Mutation |
| | | | HIST1H2BD | Mutation |
| M16 | SGK1.RAS.JAK.Immunescape.C4.vec | C4 | SGK1 | Mutation |
| | | | TET2 | Mutation |
| | | | NFKBIA | Mutation |
| | | | STAT3 | Mutation |
| | | | PTPN6 | Mutation |
| | | | BRAF | Mutation |
| | | | KRAS | Mutation |
| | | | CD83 | Mutation |
| | | | SF3B1 | Mutation |
| | | | CD274 | Mutation |
| | | | MEF2C | Mutation |
| | | | DUSP2 | Mutation |
| | | | KLHL6 | Mutation |
| | | | SOCS1 | Mutation |
| | | | CXCR4 | Mutation |
| | | | PTEN | Mutation |
| | | | RAC2 | Mutation |
| | | | SESN3 | Mutation |
| M17 | Ambiv.C4.vec | C4 | ZFP36L1 | Mutation |
| | | | CRIP1 | Mutation |
| | | | ACTB | Mutation |
| | | | LTB | Mutation |
| | | | YY1 | Mutation |
| | | | ZNF608 | Mutation |
| | | | PABPC1 | Mutation |
| | | | ARID1A | Mutation |
| | | | EEF1A1 | Mutation |
| M18 | Ambiv.C5.vec | C5 | TBL1XR1 | Mutation |
| | | | PIM1 | Mutation |
| | | | PRDM1 | Mutation |
| | | | ETV6 | Mutation |
| | | | ZC3H12A | Mutation |
| | | | BTG1 | Mutation |
| | | | BTG2 | Mutation |
| | | | IGLL5 | Mutation |
| | | | TMSB4X | Mutation |
| | | | GRHPR | Mutation |
| | | | HLA-C | Mutation |
| | | | MYD88 | Mutation |
| | | | TOX | Mutation |
| | | | LYN | Mutation |
| | | | POU2F2 | Mutation |
| | | | IKZF3 | Mutation |
| | | | HLA-A | Mutation |
| | | | ZFP36L1 | Mutation |
| | | | CARD11 | Mutation |
| | | | SF3B1 | Mutation |
| | | | HLA-B | Mutation |
| | | | IRF2BP2 | Mutation |
| | | | OSBPL10 | Mutation |
| | | | VMP1 | Mutation |
| | | | ATP2A2 | Mutation |
| M19 | MYD88CD79B | C5 | MYD88^{L265P} | Mutation |
| | | | CD79B^{mut} | Mutation |
| M20 | SumCN.C5.vec | C5 | 18q | SCNA.Arm.Gain |
| | | | 3p | SCNA.Arm.Gain |
| | | | 19q13.42 | SCNA.Focal.Gain |
| | | | 6q21 | SCNA.Focal.Loss |
| | | | 18p | SCNA.Arm.Gain |
| | | | 19q | SCNA.Arm.Gain |
| | | | 8q12.1 | SCNA.Focal.Loss |
| | | | 6q14.1 | SCNA.Focal.Loss |
| | | | 19p13.2 | SCNA.Focal.Loss |
| | | | 9p21.3 | SCNA.Loss |
| | | | 18q21.32 | SCNA.Gain |
| | | | 18q22.2 | SCNA.Gain |
| | | | 6p21.33 | SCNA.Loss |
| | | | 1q32.1 | SCNA.Gain |
| | | | 13q | SCNA.Gain |
| | | | 1q42.12 | SCNA.Loss |
| M21 | 2p16.1.vec | Miscellaneous | 2p16.1 | SCNA.Focal.Gain |

### Step 4: Development of an Online Tool

[0298] As one example of a tool that allows the commutation of the classification results for new cases, a web-portal was designed. The web portal (FIG. 8) was password protected, had a landing page, allowed for file/data upload, allowed for classification using the molecular classifier, and allowed for download of classification results (e.g., class and probability/confidence). In addition, the portal allowed visualization of the data in context to published, including the generation of heatmaps and UMAPs.

[0299] The web-portal was but one example of a tool that allows communication of classification results. Other tools might be apps for smartphones, etc.

### Example 5: Pilot Study

[0300] To match high-risk DLBCL patients with appropriate combination therapies, a robust molecular classifier was developed that can prospectively identify the newly defined tumor subsets. The classifier assigned single samples to specific clusters using a minimum number of easy-to-measure input features and designated as many samples as possible with high confidence. The labels from the combined set, composed of recently published DLBCL subtypes (Chapuy B, Stewart C, Dunford A J, et al. Molecular subtypes of diffuse large B cell lymphoma are associated with distinct pathogenic mechanisms and outcomes. Nat Med. 2018; 24(5):679-690) and the independent dataset (Schmitz R, Wright G W, Huang D W, et al. Genetics and Pathogenesis of Diffuse Large B-Cell Lymphoma. N Engl J Med. 2018; 378(15):1396-1407) served as a gold standard training and test dataset (FIG. 3 and the top of FIG. 4A). To develop a genetic/molecular classifier, the informative cases with C1-C5 assignments and full genetic marker availability were split into training and validation sets as well as an independent test set, composed of 50%, 25% and 25% of cases, respectively. During the supervised and iterative processes of classifier optimization, the training set and the validation set were used with k-fold cross validation. The test set was only used to measure the final performance of the candidate classifier.

### Input Features and Pilot Artificial Neural Network (ANN) Classifier

[0301] To avoid overtraining the classifier, the number of free parameters (input features, f1-n and hidden layers, h1-m) were limited to as few as possible while retaining classifier performance (FIG. 4A, bottom). In an initial pilot study, biological insights into distinguishing molecular features (e.g., the biologic features noted in Example 2 above) were used to reduce the 158 genetic features from NMF clustering (Chapuy B, Stewart C, Dunford A J, et al. Molecular subtypes of diffuse large B cell lymphoma are associated with distinct pathogenic mechanisms and outcomes. Nat Med. 2018; 24(5):679-690) to 21 input variables, see Table 3. As shown in Table 3 below, the 21 input variables each corresponded to a metafeature corresponding to a binning/compression of several measured features (i.e., the indicated variants). Each metafeature was calculated as a sum of variant classification-specific weighted values (see Table 1) determined based upon the measurement of each variant included in the metafeature. For example, the metafeature BCL6.C1 could range from 0 (no mutation and no SV) to 5 (non-synonymous mutation and SV). All of the variants and the indicated classifications were measured, see Table 3.

[0302] With the 21 input parameters, DLBCLs with known non-negative matrix factorization (NMF) clusters were visualized in uniform manifold approximation and projection (UMAP), a technique for dimensionality reduction. These 21 variables, which clearly separated the NMF-defined clusters, were used to train an artificial neural network (ANN) classifier. This pilot classifier was 99% and 95% accurate in assigning high confidence DLBCLs (>0.9 confidence) in the training/validation and test sets, respectively. Notably, the classifier output was designed to be probabilistic to reflect the heterogeneity in biology between patients. The probability estimate provided a cluster designation and the probability of accurate assignment, which are essential for treatment decisions.

### Optimization of the Classifier

[0303] The performance of the pilot ANN classifier with input parameters chosen for biological significance was compared to a classifier in which input parameters were selected solely by principal component analysis, by a neural network autoencoder, or by a Q-value-based method. The value of adding a confidence measurement of each assigned DLBCL cluster to the sample training vector was also assessed. The output of the ANN classifier was compared and benchmarked to that of other classifier algorithms (i.e. random forest, multinomial naïve Bayes). The robustness of the molecular classifier was assessed against various clinical scenarios (e.g., loss of sensitivity, loss of specificity, detection of only some of the alteration types, etc.). A significant deterioration of model accuracy was observed when variant classes were omitted, which confirmed that it was necessary to include all 3 classes of genetic alterations (mutations, SCNAs, and SV) to accurately predict C1-C5 DLBCLs.

### Example 6: Development of a Targeted Sequencing Assay

[0304] The next step towards the development of a broad-based clinical assay was to design a targeted sequencing panel that captured all of the genetic alterations needed to classify DLBCLs as clusters C1-C5 with the molecular classifier. The first version of this targeted bait set was designed using TWIST Biosciences chemistry. In additional to capturing the recurrent genetic alterations needed for the molecular classifier, the targeted sequencing assay also included bait sets to measure microsatellite instability, to measure tumor mutational burden, and detect Epstein Barr virus.

[0305] The sequencing assay and molecular classifier can be used as companion diagnostics and CLIA-approved tests for broader clinical use.

### Example 7: Targeted Sequencing Assay

[0306] The present example describes how the targeted sequencing panel is used to measure genetic alterations (variants) needed to classify DLBCLs as belonging to one of clusters C1-C5 using the molecular classifier.

### Library Construction

[0307] An aliquot of genomic DNA (100-250 ng in 50 μL) is used as the input into DNA fragmentation (aka shearing). Shearing is performed acoustically using a Covaris focused-ultrasonicator, targeting 150 bp fragments. For cfDNA (cell free DNA; e.g., circulating tumor DNA), no shearing is performed and 5-50 ng of DNA is used.

[0308] Library preparation is performed using a commercially available kit provided by KAPA Biosystems (KAPA HyperPrep Kit with Library Amplification product KK8504) and IDT's duplex UMI adapters. Unique 8-base dual index sequences embedded within the p5 and p7 primers (from IDT) are added during PCR. Enzymatic clean-ups are performed using Beckman Coultier AMPure XP beads with elution volumes reduced to 30 μL to maximize library concentration.

[0309] Following library construction, library quantification is performed using the Invitrogen Quant-It broad range dsDNA quantification assay kit (Thermo Scientific Catalog: Q33130) with a 1:200 PicoGreen dilution. Following quantification, each library is normalized to a set concentration (e.g., 35 ng/μL), using Tris-HCl, 10 mM, pH 8.0. All steps performed during the library construction process and library quantification process are performed on the Agilent Bravo liquid handling system.

### In-Solution Hybrid Selection

[0310] After library construction, hybridization and capture are performed using IDT's XGen hybridization and wash kit following the manufacturer's suggested protocol, with some alterations. A set of 12-plex pre-hybridization pools is created. These pre-hybridization pools are created by equivolume pooling of the normalized libraries, Human Cot-1, and IDT XGen blocking oligos. The pre-hybridization pools undergo lyophilization using the Biotage SPE-DRY. Post lyophilization, the targeted sequencing panel (TWIST Biosciences) along with hybridization mastermix is added to the lyophilized pool prior to resuspension. Samples are incubated overnight. Library normalization and hybridization setup are performed on a Hamilton Starlet liquid handling platform, while target capture is performed on the Agilent Bravo automated platform. Post capture, a PCR is performed to amplify captured DNA.

### Preparation of Libraries for Cluster Amplification and Sequencing

[0311] After post-capture enrichment, library pools are quantified using qPCR (automated assay on the Agilent Bravo), using a kit from KAPA Biosystems with probes specific to the ends of the adapters. Based on qPCR quantification, pools are normalized using a Hamilton Starlet to the required loading concentration. Up to 24 samples are loaded per flowcell lane for Illumina's NovaSeq S4 sequencing technology.

### Cluster Amplification and Sequencing

[0312] Cluster amplification of library pools is performed according to the manufacturer's protocol (Illumina) using Exclusion Amplification cluster chemistry and NovaSeq S4 flowcells. Flowcells are sequenced using Sequencing-by-Synthesis chemistry for NovaSeq S4 flowcells using paired 151 bp runs.

### Other Embodiments

[0313] From the foregoing description, it will be apparent that variations and modifications may be made to the invention described herein to adapt it to various usages and conditions. Such embodiments are also within the scope of the following claims.

[0314] The recitation of a listing of elements in any definition of a variable herein includes definitions of that variable as any single element or combination (or subcombination) of listed elements. The recitation of an embodiment herein includes that embodiment as any single embodiment or in combination with any other embodiments or portions thereof.

[0315] The present disclosure may be related to U.S. Patent Application Publication No. 2019/0292602 A1, published Sep. 26, 2019, the disclosure of which is incorporated herein by reference for all purposes. All patents and publications mentioned in this specification are herein incorporated by reference to the same extent as if each independent patent and publication was specifically and individually indicated to be incorporated by reference.

What is claimed is:

1. A method for characterizing a diffuse large B-cell lymphoma (DLBCL) in a subject, the method comprising:
(a) characterizing variants in a biological sample from the subject, wherein the variants are selected from the group consisting of 10q23.31, 11p, 11q, 11q23.3, 12p, 12p13.2, 12q, 13q, 13q14.2, 13q31.3, 13q34, 14q32.31, 15q15.3, 16q12.1, 17p, 17q24.3, 17q25.1, 18p, 18q, 18q21.32, 18q22.2, 18q23, 19p13.2, 19p13.3, 19q, 19q13.32.1, 19q13.42, 1p13.1, 1p31.1, 1p36.11, 1p36.32, 1q, 1932.1, 1942.12, 21q, 2p16.1, 2q22.2, 3p, 3p21.31, 3q28, 4q21.22, 5p, 6p, 6p21.1, 6p21.33, 6q14.1, 6q21, 7p, 7q, 7q22.1, 8q12.1, 8q24.22, 9p21.3, 9p24.1, ACTB, ARID1A, ATP2A2, B2M, BCL10, BCL2, BCL6, BCL7A, BRAF, BTG1, BTG2, CARD11, CCDC27, CD274, CD58, CD70, CD79B^{mut}, CD83, CREBBP, CRIP1, CXCR4, DTX1, DUSP2, EBF1, EEF1A1, EP300, ETV6, EZH2, FADD, FAS, GNA13, GNAI2, GRHPR, HIST1H1B, HIST1H1C, HIST1H1D, HIST1H1E, HIST1H2AC, HIST1H2AM, HIST1H2BC, HIST1H2BD, HLA-A, HLA-B, HLA-C, HVCN1, IGLL5, IKZF3, IRF2BP2, IRF8, KLHL6, KMT2D, KRAS, LTB, LYN, MAP2K1, MEF2B, MEF2C, MYC, MYD88, MYD88^{L265P}, MYD88^{OTHER}, NFKBIA, NFKBIE, NOTCH2, OSBPL10, PABPC1, PDE4DIP, PIM1, POU2AF1, POU2F2, PRDM1, PTEN, PTPN6, RAC2, RHOA, SESN3, SF3B1, SGK1, SMG7, SOCS1, SPEN, STAT3, TBL1XR1, TET2, TMEM30A, TMSB4X, TNFAIP3, TNFRSF14, TNIP1, TOX, TP53, TUBGCP5, UBE2A, VMP1, YY1, ZC3H12A, ZEB2, ZFP36L1, ZNF423, and ZNF608, by using a targeted sequencing panel to characterize classes of the variants in the sample based upon the characterization of alterations in the variants, wherein the alterations are selected from the group consisting of a mutation, a structural variant (SV), and a somatic copy number alteration (SCNA);
(b) assigning a classification-specific weighted value to each class of variant characterized, wherein each classification-specific weighted value reflects the magnitude of the characterized alteration in each class of variant;
(c) condensing the variant classification-specific weighted values into two or more metafeatures; and
(d) using the metafeatures as input variables for a computational analysis to assign the DLBCL to one of DLBCL subclasses C1 to C5, thereby characterizing the DLBCL.

2. The method of claim 1, further comprising characterizing the DLBCL as high-risk if the DLBCL is assigned to subclass C5 or C3.

3. A method for selecting a treatment for a subject having a diffuse large B-cell lymphoma (DLBCL), the method comprising:
(a) characterizing variants in a biological sample from the subject, wherein the variants are selected from the group consisting of 10q23.31, 11p, 11q, 11q23.3, 12p, 12p13.2, 12q, 13q, 13q14.2, 13q31.3, 13q34, 14q32.31, 15q15.3, 16q12.1, 17p, 17q24.3, 17q25.1, 18p, 18q, 18q21.32, 18q22.2, 18q23, 19p13.2, 19p13.3, 19q, 19q13.32.1, 19q13.42, 1p13.1, 1p31.1, 1p36.11, 1p36.32, 1q, 1932.1, 1942.12, 21q, 2p16.1, 2q22.2, 3p, 3p21.31, 3q28, 4q21.22, 5p, 6p, 6p21.1, 6p21.33, 6q14.1, 6q21, 7p, 7q, 7q22.1, 8q12.1, 8q24.22, 9p21.3, 9p24.1, ACTB, ARID1A, ATP2A2, B2M, BCL10, BCL2, BCL6, BCL7A, BRAF, BTG1, BTG2, CARD11, CCDC27, CD274, CD58, CD70, CD79B^{mut}, CD83, CREBBP, CRIP1, CXCR4, DTX1, DUSP2, EBF1, EEF1A1, EP300, ETV6, EZH2, FADD, FAS, GNA13, GNAI2, GRHPR, HIST1H1B, HIST1H1C, HIST1H1D, HIST1H1E, HIST1H2AC, HIST1H2AM, HIST1H2BC, HIST1H2BD, HLA-A, HLA-B, HLA-C, HVCN1, IGLL5, IKZF3, IRF2BP2, IRF8, KLHL6, KMT2D, KRAS, LTB, LYN, MAP2K1, MEF2B, MEF2C, MYC, MYD88, MYD88^{L265P}, MYD88^{OTHER}, NFKBIA, NFKBIE, NOTCH2, OSBPL10, PABPC1, PDE4DIP, PIM1, POU2AF1, POU2F2, PRDM1, PTEN, PTPN6, RAC2, RHOA, SESN3, SF3B1, SGK1, SMG7, SOCS1, SPEN, STAT3, TBL1XR1, TET2, TMEM30A, TMSB4X, TNFAIP3, TNFRSF14, TNIP1, TOX, TP53, TUBGCP5, UBE2A, VMP1, YY1, ZC3H12A, ZEB2, ZFP36L1, ZNF423, and ZNF608, by characterizing classes of the variants in the sample based upon the characterization of alterations in the variants, wherein the alterations are selected from the group consisting of a mutation, a structural variant (SV), and a somatic copy number alteration (SCNA);
(b) assigning a classification-specific weighted value to each class of variant characterized, wherein each classification-specific weighted value reflects the magnitude of the characterized alteration in each class of variant;
(c) condensing the variant classification-specific weighted values into two or more metafeatures;
(d) assigning the DLBCL as belonging to one of DLBCL subclasses C1 to C5 using a computational analysis, wherein the metafeatures are used as input variables for the computational analysis; and
(e) (i) if the DLBCL is assigned to class C1 or C5, administering to the subject a treatment comprising:
an agent selected from the group consisting of a NOTCH inhibitor, a BCL6 inhibitor and an activator of immune evasion, optionally an oligonucleotide inhibitor of NOTCH and/or BCL6, or
an agent selected from the group consisting of a BCR/TLR signaling inhibitor and a BCL2 inhibitor, optionally oblimersen, ABT-263, Venetoclax (ABT-199), an antibody or oligonucleotide inhibitor of BCR/TLR signaling and/or an oligonucleotide inhibitor of BCL2; or
(ii) if the DLBCL is assigned to DLBCL subclass C3 or C4 class, administering to the subject a treatment comprising:
an agent selected from the group consisting of a BCL2 inhibitor, a PI3K inhibitor and an epigenetic modifier, optionally oblimersen, ABT-263, Venetoclax (ABT-199), wortmannin, LY294002, an E2H2 inhibitor (optionally 3-deazaneplanocin A (DZNep), EPZ005687, ElIl, GSK126, and/or UNC1999), a CREBBP inhibitor, an oligonucleotide inhibitor of BCL2, an oligonucleotide inhibitor of PI3K and/or an oligonucleotide inhibitor of an epigenetic modifier; or
an agent selected from the group consisting of a JAK/STAT inhibitor and a BRAF/MEK1 inhibitor, optionally ruxolitinib, Vemurafenib, Cobimetinib, an oligonucleotide inhibitor of JAK/STAT and/or an oligonucleotide inhibitor of BRAF/MEK1; or
(iii) if the DLBCL is assigned to DLBCL subclass C2, selecting a treatment comprising a CDK inhibitor, thereby selecting a treatment for the subject having a DLBCL.

4. The method of claim 3, wherein the agent comprises an agent selected from the group consisting of rituximab, cyclophosphamide adriamycin, vincristine, prednisone, doxorubicin hydrochloride, and vincristine sulfate.

5. The method of claim 1, wherein less than 25 metafeatures are used as the input variables.

6. The method of claim 1, wherein, in step (a), characterization comprises (i) determining for the mutation classes of variants whether there is a mutation and, if there is a mutation, whether the mutation is a silent mutation or a non-synonymous mutation; (ii) determining for the SCNA mutation class of variants whether there is an SCNA and, if there is an SCNA, whether the SCNA is a low level copy number alteration or a high level copy number alteration; and/or (iii) determining for the SV mutation class of variants whether or not an SV is present.

7. The method of claim 1, wherein the computational method is an artificial neural network classification method.

8. The method of claim 1, wherein the biological sample comprises cell free DNA.

9. The method of claim 8, wherein the method comprises characterizing the variants in the cell free DNA.

10. A targeted sequencing panel comprising oligonucleotides suitable for use in targeted sequencing to characterize two or more classes of variants in a biological sample based upon the characterization of alterations in the variants, wherein the alterations are selected from the group consisting of a mutation, a structural variant (SV), and a somatic copy number alteration (SCNA), and wherein the variants are selected from the group consisting of 10q23.31, 11p, 11q, 11q23.3, 12p, 12p13.2, 12q, 13q, 13q14.2, 13q31.3, 13q34, 14q32.31, 15q15.3, 16q12.1, 17p, 17q24.3, 17q25.1, 18p, 18q, 18q21.32, 18q22.2, 18q23, 19p13.2, 19p13.3, 19q, 19q13.32.1, 19q13.42, 1p13.1, 1p31.1, 1p36.11, 1p36.32, 1q, 1932.1, 1942.12, 21q, 2p16.1, 2q22.2, 3p, 3p21.31, 3q28, 4q21.22, 5p, 6p, 6p21.1, 6p21.33, 6q14.1, 6q21, 7p, 7q, 722.1, 8q12.1, 8q24.22, 9p21.3, 9p24.1, ACTB, ARID1A, ATP2A2, B2M, BCL10, BCL2, BCL6, BCL7A, BRAF, BTG1, BTG2, CARD11, CCDC27, CD274, CD58, CD70, CD79B^{mut}, CD83, CREBBP, CRIP1, CXCR4, DTX1, DUSP2, EBF1, EEF1A1, EP300, ETV6, EZH2, FADD, FAS, GNA13, GNAI2, GRHPR, HIST1H1B, HIST1H1C, HIST1H1D, HIST1H1E, HIST1H2AC, HIST1H2AM, HIST1H2BC, HIST1H2BD, HLA-A, HLA-B, HLA-C, HVCN1, IGLL5, IKZF3, IRF2BP2, IRF8, KLHL6, KMT2D, KRAS, LTB, LYN, MAP2K1, MEF2B, MEF2C, MYC, MYD88, MYD88^{L265P}, MYD88^{OTHER}, NFKBIA, NFKBIE, NOTCH2, OSBPL10, PABPC1, PDE4DIP, PIM1, POU2AF1, POU2F2, PRDM1, PTEN, PTPN6, RAC2, RHOA, SESN3, SF3B1, SGK1, SMG7, SOCS1, SPEN, STAT3, TBL1XR1, TET2, TMEM30A, TMSB4X, TNFAIP3, TNFRSF14, TNIP1, TOX, TP53, TUBGCP5, UBE2A, VMP1, YY1, ZC3H12A, ZEB2, ZFP36L1, ZNF423, and ZNF608.

11. The targeted sequencing panel of claim 10, wherein the oligonucleotides are suitable for use in targeted sequencing to characterize all of the variant classes listed in Table 3.

12. The targeted sequencing panel of claim 10 further comprising oligonucleotide sequences suitable for use in targeted sequencing to measure microsatellite instability, tumor mutational burden, and/or to detect Epstein Barr virus.

13. The targeted sequencing panel of claim 10, wherein the targeted sequencing panel comprises polynucleotides sharing at least 85% sequence identity over a span of at least 80 nucleotides to at least one sequence of SEQ ID NOs: 1-9244 targeting microsatellite instability.

14. A method comprising:
instructing, by at least one processor, at least one computing device to render at least one diffuse large B-cell lymphoma (DLBCL) classification interface, the at least one DLBCL classification interface comprising at least one gene sample matrix (GSM) array input element configured to accept at least one GSM array input file storing at least one GSM array associated with at least one patient;
receiving, by the at least one processor, via the at least one GSM array input element the at least one GSM array input file, wherein the at least one GSM array input file represents at least one GSM array that characterizes classes of variants in the at least one sample of oligonucleotides, wherein the classes of variants are characterized using a targeted sequencing panel comprising the oligonucleotides suitable for use in targeted sequencing of the variant classes;
generating, by the at least one processor, at least one metafeature based at least in part on a weighted sum of the classes of the variants in the at least one GSM array;
utilizing, by the at least one processor, at least one DLBCL classification machine learning model to generate at least one cluster identification categorizing the at least one patient based at least in part on the at least one metafeature and at least one trained classification layer, wherein the at least one cluster identification characterizes DLBCL burden on a subject associated with the at least one patient; and
instructing, by the at least one processor, the at least one computing device to render at least one DLBCL classification results element in the at least one DLBCL classification interface, wherein the at least one DLBCL classification results element depicts a representation of the at least one cluster identification categorizing the at least one patient.

15. The method of claim 14, further comprising:
receiving, by the at least one processor, at least one DLBCL classification request from the at least one computing device associated with the at least one patient, wherein the at least one DLBCL classification request comprises at least one electronic request over a network; and
generating, by the at least one processor, at least one rendering instruction in response to the at least one DLBCL classification request, wherein the at least one rendering instruction is configured to instruct the at least one computing device to render the at least one DLBCL classification interface.

16. The method of claim 14, wherein the at least one trained classification layer comprises an artificial neural network having learned weights for each of a plurality of neural network nodes.

17. The method of claim 14, further comprising:
utilizing, by the at least one processor, at least one dimensionality reduction model to create a two-dimensional representation of the at least one metafeature; and
generating, by the at least one processor, the at least one DLBCL classification results element comprising a two-dimensional visualization of the two-dimensional representation of the at least one metafeature, wherein the two-dimensional visualization comprises at least one labelled data point representing the at least one metafeature and the at least one cluster identification associated with the at least one metafeature.

18. A system comprising:
at least one processor configured to execute software instructions which, upon execution, cause the at least one processor to perform steps to:
instruct at least one computing device to render at least one diffuse large B-cell lymphoma (DLBCL) classification interface, the at least one DLBCL classification interface comprising at least one gene sample matrix (GSM) array input element configured to accept at least one GSM array input file storing at least one GSM array associated with at least one patient;
receive via the at least one GSM array input element the at least one GSM array input file, wherein the at least one GSM array input file represents at least one GSM array that characterizes classes of variants in the at least one sample of oligonucleotides, wherein the classes of variants are characterized using a targeted sequencing panel comprising the oligonucleotides suitable for use in targeted sequencing of the variant classes;
generate at least one metafeature based at least in part on a weighted sum of the classes of the variants in the at least one GSM array;
utilize at least one DLBCL classification machine learning model to generate at least one cluster identification categorizing the at least one patient based at least in part on the at least one metafeature and at least one trained classification layer, wherein the at least one cluster identification characterizes DLBCL burden on a subject associated with the at least one patient; and
instruct the at least one computing device to render at least one DLBCL classification results element in the at least one DLBCL classification interface, wherein the at least one DLBCL classification results element depicts a representation of the at least one cluster identification categorizing the at least one patient.

19. The system of claim 18, wherein the at least one processor is further configured to execute software instructions which, upon execution, further cause the at least one processor to perform steps to:
receive at least one DLBCL classification request from the at least one computing device associated with the at least one patient, wherein the at least one DLBCL classification request comprises at least one electronic request over a network; and
generate at least one rendering instruction in response to the at least one DLBCL classification request, wherein the at least one rendering instruction is configured to instruct the at least one computing device to render the at least one DLBCL classification interface.

20. The system of claim 18, wherein the at least one trained classification layer comprises an artificial neural network having learned weights for each of a plurality of neural network nodes.

21. The system of claim 18, wherein the at least one processor is further configured to execute software instructions which, upon execution, further cause the at least one processor to perform steps to:
utilize at least one dimensionality reduction model to create a two-dimensional representation of the at least one metafeature; and
generate the at least one DLBCL classification results element comprising a two-dimensional visualization of the two-dimensional representation of the at least one metafeature, wherein the two-dimensional visualization comprises at least one labelled data point representing the at least one metafeature and the at least one cluster identification associated with the at least one metafeature.

The application's sequence listing, which the Patent Office published only in electronic form, follows.

SEQUENCE LISTING (9316 sequences)

SEQ ID NO: 1 - DNA, 121 bp, synthetic construct
  misc_feature 1..121: note = Description of artificial sequence: synthetic polynucleotide sequence
  source 1..121: mol_type = other DNA
gatctccagctggatctcccggtcacgcagcttgcgccagtggctgtagtacaaggtcaggggtgtcccctcttcccgggtcagcttctcccaggcttcctggggggttgggggagttcag

SEQ ID NO: 2 - DNA, 121 bp, synthetic construct
  misc_feature 1..121: note = Description of artificial sequence: synthetic polynucleotide sequence
  source 1..121: mol_type = other DNA
gttctgggccaggcttcagtgggctggacagtgatgggcctggccggggggccctgggtctcctggggctgcgtggctggggggtccctgtcctcacagattgcgtccgagctattgctgg

SEQ ID NO: 3 - DNA, 121 bp, synthetic construct
  misc_feature 1..121: note = Description of artificial sequence: synthetic polynucleotide sequence
  source 1..121: mol_type = other DNA
ggtgacgcgattccgcagccagagctgcgcggtgaggaagaccatggcgcctgcaggccggcgtcccgaacactcaacaacgcacgcgcagcgccgctgccatcttgcccgggtcggaaat

SEQ ID NO: 4 - DNA, 121 bp, synthetic construct
  misc_feature 1..121: note = Description of artificial sequence: synthetic polynucleotide sequence
  source 1..121: mol_type = other DNA
gcatctcccctcggccacagggttggaagcccagcgaggctagaggccagtcccaaagtttccaggcatcagggctgcagcccaggagcctcaaggcggcccggcgggcgactggacggcc

SEQ ID NO: 5 - DNA, 121 bp, synthetic construct
  misc_feature 1..121: note = Description of artificial sequence: synthetic polynucleotide sequence
  source 1..121: mol_type = other DNA
acctggtactgcatggcctgcttcccgacatccatgtccaggcctgcagcctgcgagccgttctcacccagcccattgtgcacggccgtcttcttcccccggagctccttcaccaccctga

SEQ ID NO: 6 - DNA, 121 bp, synthetic construct
  misc_feature 1..121: note = Description of artificial sequence: synthetic polynucleotide sequence
  source 1..121: mol_type = other DNA
actggcgttagttccagatcttgaggaagctatcccaggaccctgtcgccacagccatgccatcgtcagtcacgcccaggcagctgacgcggttgtcatgcccagccaagacacctgggag

SEQ ID NO: 7 - DNA, 218 bp, synthetic construct
  misc_feature 1..218: note = Description of artificial sequence: synthetic polynucleotide sequence
  source 1..218: mol_type = other DNA
cctgcccggtcggctttgagtgcatcccagacgttgcagttgaagtcgtcgtacccagcaaggaggaggcgcccgctcttggagaaggagacagaggtgatcccgcagatgatgttgtcatgggagtaagtcatgagctcctggtcagcacgaaggtcaaacagcctgcaggtggcgtcgtctgagccagtggcaaatgcattgccatttggaaagaa

SEQ ID NO: 8 - DNA, 203 bp, synthetic construct
  misc_feature 1..203: note = Description of artificial sequence: synthetic polynucleotide sequence
  source 1..203: mol_type = other DNA
cgcaaatggcattgatgtcagactcgtggccagtgaaggtctgccggcacatgccttctcgcacatcccagagtttggctgaagcatcacaagcaccagagacgaacagtctggtgtcaggagcaagagaaaggctcatgacatctccagtgtgtccggtaaacgtggtcgtctgctggccggtctcgatgtcccacagggca

SEQ ID NO: 9 - DNA, 121 bp, synthetic construct
  misc_feature 1..121: note = Description of artificial sequence: synthetic polynucleotide sequence
  source 1..121: mol_type = other DNA
actgcctgccccgggtcaggtacttaccacgtggtgtctccagagctggtgacgatctgattgtcatccaggaatcggcagcaggacaggtaacctggcaaagaacaggcctaagtgatga

SEQ ID NO: 10 - DNA, 164 bp, synthetic construct
  misc_feature 1..164: note = Description of artificial sequence: synthetic polynucleotide sequence
  source 1..164: mol_type = other DNA
cctgtgtgtcctgccagctcacgactcacgcgcacgttcccctcacgagttttcagattgtaaatggagcaaatgttatccaggccaccgcaggccacatagttcccagaaggggcatatgcacaggtcatgacccaggaggagcgcagagggatggcgtggac

SEQ ID NO: 11 - DNA, 121 bp, synthetic construct
  misc_feature 1..121: note = Description of artificial sequence: synthetic polynucleotide sequence
  source 1..121: mol_type = other DNA
ttcaaggaagggaatcctccagtccctaccttgttggtggtgtagctgtcccagatgataagtttaccatcctgcgaggcactgacgagaagcctggagggacagacaaaagcaaacctat

SEQ ID NO: 12 - DNA, 121 bp, synthetic construct
  misc_feature 1..121: note = Description of artificial sequence: synthetic polynucleotide sequence
  source 1..121: mol_type = other DNA
cgcctacctggagtctgtgccccagtgcatggcgtagatcttggccaggtgcccccgcagtgtcctcctcgtgcgcatttggattcttcccactgggtcgatgttgtttgtgatcttgaaa

SEQ ID NO: 13 - DNA, 121 bp, synthetic construct
  misc_feature 1..121: note = Description of artificial sequence: synthetic polynucleotide sequence
  source 1..121: mol_type = other DNA
ctcacaggcagatggctctgcgtgactcagtgggctcttacctgagagagagttgcatctgcacatgctttcctggcgtcctgggaagcaaggacagtgagaaattagcaacctttcagat

SEQ ID NO: 14 - DNA, 121 bp, synthetic construct
  misc_feature 1..121: note = Description of artificial sequence: synthetic polynucleotide sequence
  source 1..121: mol_type = other DNA
attaataaaaccaagcacacacaactacatactcgaatctggttcttaagttgctcggcctcctgccgtaactggtcaagctcactcatcttccgatcttagtgctcttcaatgccacctt

SEQ ID NO: 15 - DNA, 121 bp, synthetic construct
  misc_feature 1..121: note = Description of artificial sequence: synthetic polynucleotide sequence
  source 1..121: mol_type = other DNA
tgcatgtccgcctgggaggactccgtgccctctagctgctgctcagagaagctggtggcggctttgtcatacaagcttttatcttcgtaggtcaggagactgctctagagaggagaatcaa

SEQ ID NO: 16 - DNA, 121 bp, synthetic construct
  misc_feature 1..121: note = Description of artificial sequence: synthetic polynucleotide sequence
  source 1..121: mol_type = other DNA
gcgcagggccgcggcaccctccacagacggctgctgctccaccctgggggccctgcagggatcaggtgccgggcgctggggcagggacctggcgggggattccaggtgccctcctgccccg

SEQ ID NO: 17 - DNA, 121 bp, synthetic construct
  misc_feature 1..121: note = Description of artificial sequence: synthetic polynucleotide sequence
  source 1..121: mol_type = other DNA
aattccgccccttcattcgaaggctcccagagtttaaattttggtgagctaattcttcacggtatttgaagagaattgtgctcaagggtggctgagactgagactacactgatttttgttc

SEQ ID NO: 18 - DNA, 121 bp, synthetic construct
  misc_feature 1..121: note = Description of artificial sequence: synthetic polynucleotide sequence
  source 1..121: mol_type = other DNA
ccgagctgccggtctgagcctgaggcatggagcctcctggagactgggggcctcctccctggagatccacccccaaaaccgacgtcttgaggctggtgagcccccgagcctcctctccgtc

SEQ ID NO: 19 - DNA, 121 bp, synthetic construct
  misc_feature 1..121: note = Description of artificial sequence: synthetic polynucleotide sequence
  source 1..121: mol_type = other DNA
ccttaggtgctgtatctcaccttcctgggagccccctgctacgccccagctctgccgtcctgcaaggaggacgagtacccagtgggctccgagtgctgccccaagtgcagtccaggtaggt

SEQ ID NO: 20 - DNA, 121 bp, synthetic construct
  misc_feature 1..121: note = Description of artificial sequence: synthetic polynucleotide sequence
  source 1..121: mol_type = other DNA
tatcgtgtgaaggaggcctgcggggagctgacgggcacagtgtgtgaaccctgccctccaggcacctacattgcccacctcaatggcctaagcaagtgtctgcagtgccaaatgtgtgacc

SEQ ID NO: 21 - DNA, 157 bp, synthetic construct
  misc_feature 1..157: note = Description of artificial sequence: synthetic polynucleotide sequence
  source 1..157: mol_type = other DNA
gccatgggcctgcgcgcgagccggaactgctccaggacagagaacgccgtgtgtggctgcagcccaggccacttctgcatcgtccaggacggggaccactgcgccgcgtgccgcgcttacgccacctccagcccgggccagagggtgcagaagggag

SEQ ID NO: 22 - DNA, 121 bp, synthetic construct
  misc_feature 1..121: note = Description of artificial sequence: synthetic polynucleotide sequence
  source 1..121: mol_type = other DNA
tccctctcttctcaggcaccgagagtcaggacaccctgtgtcagaactgccccccggggaccttctctcccaatgggaccctggaggaatgtcagcaccagaccaagtaagtgaacccggg

SEQ ID NO: 23 - DNA, 144 bp, synthetic construct
  misc_feature 1..144: note = Description of artificial sequence: synthetic polynucleotide sequence
  source 1..144: mol_type = other DNA
ggtgcagctggctggtgacgaaggccggagctgggaccagcagctcccactgggtatggtggtttctctcagggagcctcgtcatcgtcattgtttgctccacagttggcctaatcatatgtgtgaaaagaagaaagccaaggg

SEQ ID NO: 24 - DNA, 121 bp, synthetic construct
  misc_feature 1..121: note = Description of artificial sequence: synthetic polynucleotide sequence
  source 1..121: mol_type = other DNA
gatcagacactgcccctccctgacctgtgtgtctgtgtattgcaggtgatgtagtcaaggtgatcgtctccgtccaggtattgatcctcctccccctctccctcccccctccaccttccca

SEQ ID NO: 25 - DNA, 121 bp, synthetic construct
  misc_feature 1..121: note = Description of artificial sequence: synthetic polynucleotide sequence
  source 1..121: mol_type = other DNA
gaaaagacaggaggcagaaggtgaggccacagtcattgaggccctgcaggcccctccggacgtcaccacggtggccgtggaggagacaataccctcattcacggggaggagcccaaaccac

SEQ ID NO: 26 - DNA, 121 bp, synthetic construct
  misc_feature 1..121: note = Description of artificial sequence: synthetic polynucleotide sequence
  source 1..121: mol_type = other DNA
tgcccgctccccacccgccccggcccccttaccttggccagctgtgtctccagctccagcacctgcaccatgtcctcctgcaccaggcagctgtccctgggcaggtttgcatcctcccgca

SEQ ID NO: 27 - DNA, 121 bp, synthetic construct
  misc_feature 1..121: note = Description of artificial sequence: synthetic polynucleotide sequence
  source 1..121: mol_type = other DNA
aatcacgcagaaaaataacacagcgaaatgacttttcaaaatgccattggtataattatcgtcttgcccattacactaaatgccgccatttatatctgtgatacttaagtatgcaaacagt

SEQ ID NO: 28 - DNA, 121 bp, synthetic construct
  misc_feature 1..121: note = Description of artificial sequence: synthetic polynucleotide sequence
  source 1..121: mol_type = other DNA
ggctggtctttattttgatgaggctgagaagggaaggctgcgggcatgtttaatccgcacgctttagactccccggctgtgatttttgacaatggctcggggttctgcaaagcgggcctgt

SEQ ID NO: 29 - DNA, 121 bp, synthetic construct
  misc_feature 1..121: note = Description of artificial sequence: synthetic polynucleotide sequence
  source 1..121: mol_type = other DNA
cagactccagcacacagggcacctctgactcccgcttcgctttcctcccagcagatctccgaagacctgggcagtgagaagttctgcgtggatgcaaatcaggcgggggctggcagctggc

SEQ ID NO: 30 - DNA, 121 bp, synthetic construct
  misc_feature 1..121: note = Description of artificial sequence: synthetic polynucleotide sequence
  source 1..121: mol_type = other DNA
agccagtgcgcaccgatgcaggtcctctgatctgtgtccagctcgtagccgcggggacatgtgcacaggggcccagcactggtgtggctgcagccatgggagcagccgccgttgttggcct

SEQ ID NO: 31 - DNA, 121 bp, synthetic construct
  misc_feature 1..121: note = Description of artificial sequence: synthetic polynucleotide sequence
  source 1..121: mol_type = other DNA
gcgcctaccatgctgtacgtcggtgaccccgcacggcacctcgccacggtaggtgtgacgcgccattcataggatctcttcggggactttgcgggggattttgctgcagtgtagggttcag

SEQ ID NO: 32 - DNA, 121 bp, synthetic construct
  misc_feature 1..121: note = Description of artificial sequence: synthetic polynucleotide sequence
  source 1..121: mol_type = other DNA
tttgtttctgacagctcagaactgcctggtgtggactgggctgatgtgggttctttgcagaactggctggcctcagagcagggacactagtgagaagtgtctggttcaggtgtggacagcc

SEQ ID NO: 33 - DNA, 121 bp, synthetic construct
  misc_feature 1..121: note = Description of artificial sequence: synthetic polynucleotide sequence
  source 1..121: mol_type = other DNA
taacagagggaggccagagctactcgcttaccagggctgatgcctctacaccgaaatcgttgtggtgatgggagtgagtgagagatctcttttctaatggatgaccccagttccgtttgga

SEQ ID NO: 34 - DNA, 121 bp, synthetic construct
  misc_feature 1..121: note = Description of artificial sequence: synthetic polynucleotide sequence
  source 1..121: mol_type = other DNA
ttttacatttttttgttcctactgaatccttcagatccagcgagtatttgacacagcacatctgggttaagaagagccacactgccgaacgtggccaggggctgtcagattggatagtgca

SEQ ID NO: 35 - DNA, 121 bp, synthetic construct
  misc_feature 1..121: note = Description of artificial sequence: synthetic polynucleotide sequence
  source 1..121: mol_type = other DNA
tctcaaaatgttcgtgaccacccgagtggcaataaggatgtaacttacaaaattggcagcatccatgattccatcttctacagggtgggtgcaatcaagagtgaacttcagaacttgcttc

SEQ ID NO: 36 - DNA, 121 bp, synthetic construct
  misc_feature 1..121: note = Description of artificial sequence: synthetic polynucleotide sequence
  source 1..121: mol_type = other DNA
tgccccccttcaccacaagctttttctaagaaaatacacaaatgataacagagatgaagtttcagtcagtcggaaaaacaagattaacagaaccagaaacgtcataggtataaaagtccat

SEQ ID NO: 37 - DNA, 121 bp, synthetic construct
  misc_feature 1..121: note = Description of artificial sequence: synthetic polynucleotide sequence
  source 1..121: mol_type = other DNA
cagtctcggtggctctgagaacagcccccaatgagcaaacgcactgatatttctgcagtaagacgtaaatacaccaagtgggaccaataagggcaatagatgatgtcagttcagattaaat

SEQ ID NO: 38 - DNA, 121 bp, synthetic construct
  misc_feature 1..121: note = Description of artificial sequence: synthetic polynucleotide sequence
  source 1..121: mol_type = other DNA
cgaaggaccccaggcagcaaggtccaagcacccgctgtgcccctccaggcctgtttccgcgggctcctggaagcaaaaagggttcccagaggccatcgccaagccccaagcctctcgagaa

SEQ ID NO: 39 - DNA, 142 bp, synthetic construct
  misc_feature 1..142: note = Description of artificial sequence: synthetic polynucleotide sequence
  source 1..142: mol_type = other DNA
gatgccccctggggtggactgccccatggaattctggaccaaggaggagaatcagagcgttgtggttgacttcctgctgcccacaggggtctacctgaacttccctgtgtcccgcaatgccaacctcagcaccatcaagcag

SEQ ID NO: 40 - DNA, 230 bp, synthetic construct
  misc_feature 1..230: note = Description of artificial sequence: synthetic polynucleotide sequence
  source 1..230: mol_type = other DNA
gctgctgtggcaccgcgcccagtatgagccgctcttccacatgctcagtggccccgaggcctatgtgttcacctgcatcaaccagacagcggagcagcaagagctggaggacgagcaacggcgtctgtgtgacgtgcagcccttcctgcccgtcctgcgcctggtggcccgtgagggcgaccgcgtgaagaagctcatcaactcacagatcagcctcctcatcggcaaag

SEQ ID NO: 41 - DNA, 231 bp, synthetic construct
  misc_feature 1..231: note = Description of artificial sequence: synthetic polynucleotide sequence
  source 1..231: mol_type = other DNA
ggcctccacgagtttgactccttgtgcgacccagaagtgaacgactttcgcgccaagatgtgccaattctgcgaggaggcggccgcccgccggcagcagctgggctgggaggcctggctgcagtacagtttccccctgcagctggagccctcggctcaaacctgggggcctggtaccctgcggctcccgaaccgggcccttctggtcaacgttaagtttgagggcagcgag

SEQ ID NO: 42 - DNA, 181 bp, synthetic construct
  misc_feature 1..181: note = Description of artificial sequence: synthetic polynucleotide sequence
  source 1..181: mol_type = other DNA
ggagagcttcaccttccaggtgtccaccaaggacgtgccgctggcgctgatggcctgtgccctgcggaagaaggccacagtgttccggcagccgctggtggagcagccggaagactacacgctgcaggtgaacggcaggcatgagtacctgtatggcagctacccgctctgccagttccag

SEQ ID NO: 43 - DNA, 151 bp, synthetic construct
  misc_feature 1..151: note = Description of artificial sequence: synthetic polynucleotide sequence
  source 1..151: mol_type = other DNA
gtacatctgcagctgcctgcacagtgggttgacccctcacctgaccatggtccattcctcctccatcctcgccatgcgggatgagcagagcaaccctgccccccaggtccagaaaccgcgtgccaaaccacctcccattcctgcgaagaag

SEQ ID NO: 44 - DNA, 121 bp, synthetic construct
  misc_feature 1..121: note = Description of artificial sequence: synthetic polynucleotide sequence
  source 1..121: mol_type = other DNA
cttccccggcccccagccttcctctgtgtccctgtggtccctggagcagccgttccgcatcgagctcatccagggcagcaaagtgaacgccgacgagcggatgaaggtggggctcctggga

SEQ ID NO: 45 - DNA, 223 bp, synthetic construct
  misc_feature 1..223: note = Description of artificial sequence: synthetic polynucleotide sequence
  source 1..223: mol_type = other DNA
gctggtggtgcaggccgggcttttccacggcaacgagatgctgtgcaagacggtgtccagctcggaggtgagcgtgtgctcggagcccgtgtggaagcagcggctggagttcgacatcaacatctgcgacctgccccgcatggcccgtctctgctttgcgctgtacgccgtgatcgagaaagccaagaaggctcgctccaccaagaagaagtccaagaaggcg

SEQ ID NO: 46 - DNA, 121 bp, synthetic construct
  misc_feature 1..121: note = Description of artificial sequence: synthetic polynucleotide sequence
  source 1..121: mol_type = other DNA
gtccttctgcaggactgccccattgcctgggccaacctcatgctgtttgactacaaggaccagcttaagaccggggaacgctgcctctacatgtggccctccgtcccaggtcggcccaggc

SEQ ID NO: 47 - DNA, 121 bp, synthetic construct
  misc_feature 1..121: note = Description of artificial sequence: synthetic polynucleotide sequence
  source 1..121: mol_type = other DNA
aagggcgagctgctgaaccccacgggcactgtgcgcagtaaccccaacacggatagcgccgctgccctgctcatctgcctgcccgaggtggccccgcaccccgtgtactaccccgccctgg

SEQ ID NO: 48 - DNA, 121 bp, synthetic construct
  misc_feature 1..121: note = Description of artificial sequence: synthetic polynucleotide sequence
  source 1..121: mol_type = other DNA
cccctggggacgctgagtgcagccgtttgttgcagatcttggagctggggcgacacagcgagtgtgtgcatgtcaccgaggaggaggtgagtggggtgggggtgtggggtggggggcatgg

SEQ ID NO: 49 - DNA, 169 bp, synthetic construct
  misc_feature 1..169: note = Description of artificial sequence: synthetic polynucleotide sequence
  source 1..169: mol_type = other DNA
gcagctgcagctgcgggaaatcctggagcggcgggggtctggggagctgtatgagcacgagaaggacctggtgtggaagctgcggcatgaagtccaggagcacttcccggaggcgctagcccggctgctgctggtcaccaagtggaacaagcatgaggatgtggcccag

SEQ ID NO: 50 - DNA, 121 bp, synthetic construct
  misc_feature 1..121: note = Description of artificial sequence: synthetic polynucleotide sequence
  source 1..121: mol_type = other DNA
atgctctacctgctgtgctcctggccggagctgcccgtcctgagcgccctggagctgctagacttcagcttccccgattgccacgtaggctccttcgccatcaagtcgctgcggaaactga

SEQ ID NO: 51 - DNA, 145 bp, synthetic construct
  misc_feature 1..145: note = Description of artificial sequence: synthetic polynucleotide sequence
  source 1..145: mol_type = other DNA
gggacgatgagctgttccagtacctgctgcagctggtgcaggtgctcaagtacgagtcctacctggactgcgagctgaccaaattcctgctggaccgggccctggccaaccgcaagatcggccacttccttttctggcacctccg

SEQ ID NO: 52 - DNA, 121 bp, synthetic construct
  misc_feature 1..121: note = Description of artificial sequence: synthetic polynucleotide sequence
  source 1..121: mol_type = other DNA
tcaccttccagctccgagatgcacgtgccgtcggtggccctgcgcttcggcctcatcctggaggcctactgcaggggcagcacccaccacatgaaggtgctgatgaagcaggtgaggccca

SEQ ID NO: 53 - DNA, 180 bp, synthetic construct
  misc_feature 1..180: note = Description of artificial sequence: synthetic polynucleotide sequence
  source 1..180: mol_type = other DNA
gggggaagcactgagcaaactgaaggccctgaatgacttcgtcaagctgagctctcagaagacccccaagccccagaccaaggagctgatgcacttgtgcatgcggcaggaggcctacctagaggccctctcccacctgcagtccccactcgaccccagcaccctgctggctgaagtctg

SEQ ID NO: 54 - DNA, 121 bp, synthetic construct
  misc_feature 1..121: note = Description of artificial sequence: synthetic polynucleotide sequence
  source 1..121: mol_type = other DNA
gcagcgtggagcagtgcaccttcatggactccaagatgaagcccctgtggatcatgtacagcaacgaggaggcaggcagcggcggcagcgtgggcatcatctttaagaacggggatggtga

SEQ ID NO: 55 - DNA, 121 bp, synthetic construct
  misc_feature 1..121: note = Description of artificial sequence: synthetic polynucleotide sequence
  source 1..121: mol_type = other DNA
tcccaccggccggtggcacagacctccggcaggacatgctgaccctgcagatgatccagctcatggacgtcctgtggaagcaggaggggctggacctgaggtgaggacccccaccccacat

SEQ ID NO: 56 - DNA, 169 bp, synthetic construct
  misc_feature 1..169: note = Description of artificial sequence: synthetic polynucleotide sequence
  source 1..169: mol_type = other DNA
ggatgaccccctatggctgcctccccaccggggaccgcacaggcctcattgaggtggtactccgttcagacaccatcgccaacatccaactcaacaagagcaacatggcagccacagccgccttcaacaaggatgccctgctcaactggctgaagtccaagaacccggg

SEQ ID NO: 57 - DNA, 121 bp, synthetic construct
  misc_feature 1..121: note = Description of artificial sequence: synthetic polynucleotide sequence
  source 1..121: mol_type = other DNA
gaggccctggatcgagccattgaggagttcaccctctcctgtgctggctattgtgtggccacatatgtgctgggcattggcgatcggcacagcgacaacatcatgatccgagagagtgggc

SEQ ID NO: 58 - DNA, 147 bp, synthetic construct
  misc_feature 1..147: note = Description of artificial sequence: synthetic polynucleotide sequence
  source 1..147: mol_type = other DNA
gctgttccacattgattttggccactttctggggaatttcaagaccaagtttggaatcaaccgcgagcgtgtcccattcatcctcacctacgactttgtccatgtgattcagcaggggaagactaataatagtgagaaatttgaacg

SEQ ID NO: 59 - DNA, 134 bp, synthetic construct
  misc_feature 1..134: note = Description of artificial sequence: synthetic polynucleotide sequence
  source 1..134: mol_type = other DNA
ggttccggggctactgtgaaagggcctacaccatcctgcggcgccacgggcttctcttcctccacctctttgccctgatgcgggcggcaggcctgcctgagctcagctgctccaaagacatccagtatctcaag

SEQ ID NO: 60 - DNA, 139 bp, synthetic construct
  misc_feature 1..139: note = Description of artificial sequence: synthetic polynucleotide sequence
  source 1..139: mol_type = other DNA
ggactccctggcactggggaaaacagaggaggaggcactgaagcacttccgagtgaagtttaacgaagccctccgtgagagctggaaaaccaaagtgaactggctggcccacaacgtgtccaaagacaacaggcagtag

SEQ ID NO: 61 - DNA, 121 bp, synthetic construct
  misc_feature 1..121: note = Description of artificial sequence: synthetic polynucleotide sequence
  source 1..121: mol_type = other DNA
actactgactgcaacataggggcagaatgaaataaatgggaaagtgaggaatcagtcgaataattttatggagcaaaggaaaaaaaaggtatgcccttttactcagaaaagcagacggata

SEQ ID NO: 62 - DNA, 121 bp, synthetic construct
  misc_feature 1..121: note = Description of artificial sequence: synthetic polynucleotide sequence
  source 1..121: mol_type = other DNA
actaaagtacaaaagcctcagaaaaaacgtgatgggcacatctgggcctccagttaccagaaagggcacctaagaaggcagaaagaaaaggaatattttaataatttgagcttcttcaaag

SEQ ID NO: 63 - DNA, 121 bp, synthetic construct
  misc_feature 1..121: note = Description of artificial sequence: synthetic polynucleotide sequence
  source 1..121: mol_type = other DNA
ccactcaccagccaatatagcactggcagaggttttcatgggatgtcgcttgtttgatgagcagctcaacttgcgttggaacatccaaagtgtcatcatgagagaagtcccgacctagcac

SEQ ID NO: 64 - DNA, 121 bp, synthetic construct
  misc_feature 1..121: note = Description of artificial sequence: synthetic polynucleotide sequence
  source 1..121: mol_type = other DNA
taaacacatgacacactcaccagtgagcttatctcgaaccctgttaataatctggatagctttcttatttagggcctctggtttcaccaaaccgtctccaactggaatacacaaaagtaga

SEQ ID NO: 65 - DNA, 121 bp, synthetic construct
  misc_feature 1..121: note = Description of artificial sequence: synthetic polynucleotide sequence
  source 1..121: mol_type = other DNA
tcctcagaggctgaacttactgaaagaatgaatagattctggcactgtggtccccgttttcttatgggctggctctccaagttccacaccgtccaaaatttctatgggaaaagaaatcaat

SEQ ID NO: 66 - DNA, 121 bp, synthetic construct
  misc_feature 1..121: note = Description of artificial sequence: synthetic polynucleotide sequence
  source 1..121: mol_type = other DNA
ctttgcgacctcccgtggatgcacctaccgactgactggccagcagagtaggaatccgtcctcgttcgggatcgcttgttgcctttggtatttgctagggagagaaataaagagtattgaa

SEQ ID NO: 67 - DNA, 137 bp, synthetic construct
  misc_feature 1..137: note = Description of artificial sequence: synthetic polynucleotide sequence
  source 1..137: mol_type = other DNA
ctgtccatcagcctccagttcagcaaggggtcatagacaaaggcttccagcacggccatgacactgtccttgtgctctcgcagcacctccatcactgtgtggcatgtgattctgtagttgccatccaggcctgtaac

SEQ ID NO: 68 - DNA, 121 bp, synthetic construct
  misc_feature 1..121: note = Description of artificial sequence: synthetic polynucleotide sequence
  source 1..121: mol_type = other DNA
gctcgttcccgatatccactcacctccatagcattggtcaacattcttgttagtctaaatggaatcttctctggaaacttctctcgggtcatagcaacctacagaataataaatgggaaaa

SEQ ID NO: 69 - DNA, 121 bp, synthetic construct
  misc_feature 1..121: note = Description of artificial sequence: synthetic polynucleotide sequence
  source 1..121: mol_type = other DNA
tggggttctagaacatgtgttcacctcaaagcagtccccaaagtcaatgtgcaggatcttcccactcagacggtccagcatcaggttggatgggtgtctttgagaaacagaagacagatca

SEQ ID NO: 70 - DNA, 121 bp, synthetic construct
  misc_feature 1..121: note = Description of artificial sequence: synthetic polynucleotide sequence
  source 1..121: mol_type = other DNA
accaaattaaattactcacctatctcccaggcctaaaatatacccaaccattgacatgaccgctaaagaacgggtataattggttcttcggtcaaaccacacctagaacacaggagtgcat

SEQ ID NO: 71 - DNA, 121 bp, synthetic construct
  misc_feature 1..121: note = Description of artificial sequence: synthetic polynucleotide sequence
  source 1..121: mol_type = other DNA
tcggagctggggcttttcagccacagcagcttggccaggtcgtccccagctgtattattgacggcatgctcaaacacctccaccttctgcatcagagtcaagtggtcatagtccggagcca

SEQ ID NO: 72 - DNA, 149 bp, synthetic construct
  misc_feature 1..149: note = Description of artificial sequence: synthetic polynucleotide sequence
  source 1..149: mol_type = other DNA
cccgcaacatgatgcgatgctcgatgttgagaaggatcttcttcttctccctgtagtcccggatgagggcgtgcagtgtgtcacagtggggaacccagccaatgaggcccgagttggtcgataaagggatgacagcgtatctctggatg

SEQ ID NO: 73 - DNA, 137 bp, synthetic construct
  misc_feature 1..137: note = Description of artificial sequence: synthetic polynucleotide sequence
  source 1..137: mol_type = other DNA
cctgaggtttttccgaagagatgttgggtcattggccagaagggtgttaaccaggccgaagagctgcatcacacgctcatcctggcgcagatcttcatggccttttagaaggaaaacaaactcatgtccgttgctgc

SEQ ID NO: 74 - DNA, 176 bp, synthetic construct
  misc_feature 1..176: note = Description of artificial sequence: synthetic polynucleotide sequence
  source 1..176: mol_type = other DNA
cccataagtgtcaatttccggggcctctgcttggatgtgatgacttgcaaagacggtgctatggactgaatgcgaatgattggctggttggggtcatatgttcctggcacagccaattcaaggtcccggcacatcagaagttttggggaaacatattgcagctctaaggatgtgag

SEQ ID NO: 75 - DNA, 136 bp, synthetic construct
  misc_feature 1..136: note = Description of artificial sequence: synthetic polynucleotide sequence
  source 1..136: mol_type = other DNA
cctgaggcagctgctttgagattcgtcggaacacatgataatagaggtcccaggcttgggtgaggtccttgacattccctgatttcatgtacttcctgcaccactcttgggcctccattaaatctcgaccataggc

SEQ ID NO: 76 - DNA, 184 bp, synthetic construct
  misc_feature 1..184: note = Description of artificial sequence: synthetic polynucleotide sequence
  source 1..184: mol_type = other DNA
cctgattaaaggatgtttccttcagagtctgggggccccgttccatcatagcatgcaagggctccagcacctcaaacatgcctttcacgttcctttccccaaagtacaaacgagatgcctcttccaggccttcatgccacatctcatgccagaggatggccactcggatcagctcctcgctcac

SEQ ID NO: 77 - DNA, 121 bp, synthetic construct
  misc_feature 1..121: note = Description of artificial sequence: synthetic polynucleotide sequence
  source 1..121: mol_type = other DNA
atcatggcctgctggaccagggtgttgctgtgctcacacatgttcttcagaatcttgttggctgcattgtgccgggctgtcgtggtagacttagaagccactgtcagtgggtagatgaggg

SEQ ID NO: 78 - DNA, 121 bp, synthetic construct
  misc_feature 1..121: note = Description of artificial sequence: synthetic polynucleotide sequence
  source 1..121: mol_type = other DNA
tctccacatacctgggggtggtaccgaccaatgtctgtgagaagctggtgaatgagacgtcccaccaagggtctgggcgtatcaattcttgcaatgagctgaggtataacctggtattcaa

SEQ ID NO: 79 - DNA, 121 bp, synthetic construct
  misc_feature 1..121: note = Description of artificial sequence: synthetic polynucleotide sequence
  source 1..121: mol_type = other DNA
aagtatcctcacctgtagccaggtatcaatctggatggctttcaccccctccactaaggcctcattgacatctggccagtgaccataatcaaaccataaggtgagaactctgaaaaagaaa

SEQ ID NO: 80 - DNA, 121 bp, synthetic construct
  misc_feature 1..121: note = Description of artificial sequence: synthetic polynucleotide sequence
  source 1..121: mol_type = other DNA
tctctgatacctgagtgtatcctggaggttgttgcctcgtgacaaggagatggaacggaagaagccctggacggcaggcaccgtgtacatcaggagggttttggacagatcctgttggaac

SEQ ID NO: 81 - DNA, 121 bp, synthetic construct
  misc_feature 1..121: note = Description of artificial sequence: synthetic polynucleotide sequence
  source 1..121: mol_type = other DNA
cctcagtgaccttcttctgcagcggcgatggggtggggctgttctcggtgctctcggcctcgctctcactgttgctgccctcggtgctggcagtggtggtggcagtggcggccgtggtggc

SEQ ID NO: 82 - DNA, 121 bp, synthetic construct
  misc_feature 1..121: note = Description of artificial sequence: synthetic polynucleotide sequence
  source 1..121: mol_type = other DNA
tggcgttggtgatgttggccccgctggcatgacgcagtttcttcttctcatcgcgggcttggttctgatgtttgtagtgtagcacagcttcgaagttcatcactgcccacgcatgccaggc

SEQ ID NO: 83 - DNA, 121 bp, synthetic construct
  misc_feature 1..121: note = Description of artificial sequence: synthetic polynucleotide sequence
  source 1..121: mol_type = other DNA
accttgtaccagctgcggtcgtgctctgtggcggcgctgtagtactgcagcactttggggattgtgctctcattgatgccctgtagattcagctgccactctccaagtttcaggaagcatc

SEQ ID NO: 84 - DNA, 121 bp, synthetic construct
  misc_feature 1..121: note = Description of artificial sequence: synthetic polynucleotide sequence
  source 1..121: mol_type = other DNA
caccgggccatgagcttgtgcagttcctgcttatgctgctggtcctcagtagcgatggcatgctgggcctgttgctgcatggtctggacaaaatgctgcatgtgctggaaggcatcgatct

SEQ ID NO: 85 - DNA, 133 bp, synthetic construct
  misc_feature 1..133: note = Description of artificial sequence: synthetic polynucleotide sequence
  source 1..133: mol_type = other DNA
ccttgcgggcactcttccacatgtttttcatgtaggcataggtcacctgagggtgaactgttggcagaggatggtcaagttgccgagacggatcaactcccaggagcaacactaaagttttatgagcaagagc

SEQ ID NO: 86 - DNA, 121 bp, synthetic construct
  misc_feature 1..121: note = Description of artificial sequence: synthetic polynucleotide sequence
  source 1..121: mol_type = other DNA
gcctgccactcttgccgcacaggcttgcatacttgagccaggttctcatgtcttcatgagggctgaccacaagggaccgcaccataaggattttctgccagtcctctacgatacgctggca

SEQ ID NO: 87 - DNA, 121 bp, synthetic construct
  misc_feature 1..121: note = Description of artificial sequence: synthetic polynucleotide sequence
  source 1..121: mol_type = other DNA
agctcacctgcagtctctcccaccagatctggcggatgatctctcgtcgctcggggacaagtttgtactggataacctcctccagctcggacagcatgtggcaagaaaccatggcctgatg

SEQ ID NO: 88 - DNA, 121 bp, synthetic construct
  misc_feature 1..121: note = Description of artificial sequence: synthetic polynucleotide sequence
  source 1..121: mol_type = other DNA
gtgcagaatagttgacacttaccccatatgcccgactgtaactctctcctgccatcgcagttaattcagcatccagcaggtccctggccttgtcaatgcactagaagagaaacaacccttg

SEQ ID NO: 89 - DNA, 121 bp, synthetic construct
  misc_feature 1..121: note = Description of artificial sequence: synthetic polynucleotide sequence
  source 1..121: mol_type = other DNA
tacctgttgtgccaaggagaagaggtcctgatgcagtgccagcacagctctataaaatgccccatcatgggtgtcccgagggatcatacaggtgtattcttccatgctgtcccactgacct

SEQ ID NO: 90 - DNA, 121 bp, synthetic construct
  misc_feature 1..121: note = Description of artificial sequence: synthetic polynucleotide sequence
  source 1..121: mol_type = other DNA
gaagctttacctaaaccccatgcagctgcagcagccatccgggccatcttggcttgggtctcatcattaaccagggtccacttttcacagcactgctggtggagttgacccctgaagaaaa

SEQ ID NO: 91 - DNA, 141 bp, synthetic construct
  misc_feature 1..141: note = Description of artificial sequence: synthetic polynucleotide sequence
  source 1..141: mol_type = other DNA
ccattcccccaaggcctcgaggcagcgcatgcggcccagcatcagctctgggtcgtccttgttggtgtccattttcttgtcataggccacaagggcatcctcccactcgtgcagtttctcataccaggtagcctggatctc

SEQ ID NO: 92 - DNA, 121 bp, synthetic construct
  misc_feature 1..121: note = Description of artificial sequence: synthetic polynucleotide sequence
  source 1..121: mol_type = other DNA
tccaaaaagaatgaggtgcttaccagctctccaaagtgtttcatggcatattctaacactccggccgctgcctccggctgctgtagcttattattaatgctgagaaaacaaagggaaaagg

SEQ ID NO: 93 - DNA, 147 bp, synthetic construct
  misc_feature 1..147: note = Description of artificial sequence: synthetic polynucleotide sequence
  source 1..147: mol_type = other DNA
cctgatgagagattctagaatggcaggggtggggcctttctggaactccagttctttgtagtgtagtgctttggcatatgctcggcacttggcagctctctcacccagcagaacaatgccattgtcatctctcagtggcagggggcc

SEQ ID NO: 94 - DNA, 164 bp, synthetic construct
  misc_feature 1..164: note = Description of artificial sequence: synthetic polynucleotide sequence
  source 1..164: mol_type = other DNA
ccttgtcactgtgttccatgaattcagccaagtttaagagggtctgtgtgacttcagcgatgtcttgtgaggtgagggccaactcgatgcttctgatgagctcatcctgttgatcttcattcagttcagaccagcaggacacaaatgcagcattgaagagatcc

SEQ ID NO: 95 - DNA, 144 bp, synthetic construct
  misc_feature 1..144: note = Description of artificial sequence: synthetic polynucleotide sequence
  source 1..144: mol_type = other DNA
cctggccatcgggttgtaggcctgtgccagggcccagcaggagcgcagggagggcgatgatgagtccttcagcagctccaggctcagccgtctcagccattccagccagtcatctttggagaccctcctggcagcgccccaggc

SEQ ID NO: 96 - DNA, 148 bp, synthetic construct
  misc_feature 1..148: note = Description of artificial sequence: synthetic polynucleotide sequence
  source 1..148: mol_type = other DNA
ccttttggaggttgatggtgctgacgtgcagtttcttcatgggtcctgtttccactggtccactagccaatgcatccccttggccactcctaagcatccgatgctggtaaatcaaaggatcctcctcttcatcagcaagtgtgtatcc

SEQ ID NO: 97 - DNA, 121 bp, synthetic construct
  misc_feature 1..121: note = Description of artificial sequence: synthetic polynucleotide sequence
  source 1..121: mol_type = other DNA
gaagtatagttcaccttgacaattctgcagatgagcacatcatagcgctgatgattgattcggtgtcgcaccagaactttattcaccattggaatgaaaatttggtactaaaacaggaggg

SEQ ID NO: 98 - DNA, 164 bp, synthetic construct
  misc_feature 1..164: note = Description of artificial sequence: synthetic polynucleotide sequence
  source 1..164: mol_type = other DNA
ccttcttccccagctgaaaaacaagtgaagacagcgtgtccatggctgtggagcgcagttctgggctctggtccagtgttcgaacaatagggtgaatgatccgggaggcatagtcagtgaaatccagggactccgtcaggcggtccacagtctctagcgctgcc

SEQ ID NO: 99 - DNA, 121 bp, synthetic construct
  misc_feature 1..121: note = Description of artificial sequence: synthetic polynucleotide sequence
  source 1..121: mol_type = other DNA
tcactttcgagatggcagtggagcttcaggggcatcaaacaacttaacaataggaggcagcagtaaatgcaggtagtcatccaggttggcgccaaacagctggattgcagccagtaactgc

SEQ ID NO: 100 - DNA, 169 bp, synthetic construct
  misc_feature 1..169: note = Description of artificial sequence: synthetic polynucleotide sequence
  source 1..169: mol_type = other DNA
ccttgatagagacaatgcggcctgggctgttgtcatgcatgaagacacgcagcatgtgtgggatcagctggggcaggtagagcttaaattcacccccaagagctaccacaatttgctcaatgagaagaatgatcgtgctctgaattgaggtgttcatgacccagaattc

SEQ ID NO: 101 - DNA, 121 bp, synthetic construct
  misc_feature 1..121: note = Description of artificial sequence: synthetic polynucleotide sequence
  source 1..121: mol_type = other DNA
cattaacttctactcactctcatgagggtgactatttcatccatataaggtctgatgtggctcttcacaaaggacaccaacattcccagctgctggaacaaaaactgaaatggacaagagg

SEQ ID NO: 102 - DNA, 121 bp, synthetic construct
  misc_feature 1..121: note = Description of artificial sequence: synthetic polynucleotide sequence
  source 1..121: mol_type = other DNA
cttcccggatggccccatcacagactcgaatgacgttaaggaacgtgggcatgacctggggcaggaactgcacacatttgagtcccagggacttgaagatgaaggtgatggcctggacaac

SEQ ID NO: 103 - DNA, 121 bp, synthetic construct
  misc_feature 1..121: note = Description of artificial sequence: synthetic polynucleotide sequence
  source 1..121: mol_type = other DNA
tgatgagagagtgactggtctcggaagatccgcatcagggccaccatggacacagctgggtagaactcatccagaggcaagtttcccatgttgaccagcatttcactagtgctatagtcag

SEQ ID NO: 104 - DNA, 121 bp, synthetic construct
  misc_feature 1..121: note = Description of artificial sequence: synthetic polynucleotide sequence
  source 1..121: mol_type = other DNA
atcctgacttgacttggattctgacaggctgacagcagaggcatcccgggactggtctatcatgccaatgttcactttgtgcttgtaaggatccaaagcccctaaaagccctaacacacgg

SEQ ID NO: 105 - DNA, 136 bp, synthetic construct
  misc_feature 1..136: note = Description of artificial sequence: synthetic polynucleotide sequence
  source 1..136: mol_type = other DNA
cctctctgcgtgtaccctggttctgctcagtcttcagaaaattcagtagcacctcaagcaaagtagggtacttcctgtagggctctactacatagccagtgctggccaccaactgtcccagggtccacagagccac

SEQ ID NO: 106 - DNA, 121 bp, synthetic construct
  misc_feature 1..121: note = Description of artificial sequence: synthetic polynucleotide sequence
  source 1..121: mol_type = other DNA
gcagtaatactcacctgccttttggccaacaaagaggaatcctggagcatgtccatgatgataataaaaagttcatcaacccatttcctcatttccaggccactaacctgcaaaatgaaaa

SEQ ID NO: 107 - DNA, 121 bp, synthetic construct
  misc_feature 1..121: note = Description of artificial sequence: synthetic polynucleotide sequence
  source 1..121: mol_type = other DNA
gtagctgcccctttacctgtgccaattctcctattgttgccaggacattattgatcacacctgggtttggatcagggtctggatctttcagtttcaaaattaatgcctagagaaagaagtt

SEQ ID NO: 108 - DNA, 121 bp, synthetic construct
  misc_feature 1..121: note = Description of artificial sequence: synthetic polynucleotide sequence
  source 1..121: mol_type = other DNA
ttcagaataggctccatgtaggggcggatgagtcggggggcattggagaccaggtgccccagcatgcgggcactctgctctttgattcttccaatcccactgtgctccaactctgtcaaaa

SEQ ID NO: 109 - DNA, 207 bp, synthetic construct
  misc_feature 1..207: note = Description of artificial sequence: synthetic polynucleotide sequence
  source 1..207: mol_type = other DNA
cctggatgagcatcttgcgcaggaaaggcatgacaaaggcagggttcatgctactgagtcggcccacagtgcagatggccagctcccggatctcaaacacctggtcattcagagccacaaacaaggcctgcaagttctccgcctgggccaggtgtgcatcaaagcgctcgtccagggacgccaagacacagtagcgaatgtcagggt

SEQ ID NO: 110 - DNA, 217 bp, synthetic construct
  misc_feature 1..217: note = Description of artificial sequence: synthetic polynucleotide sequence
  source 1..217: mol_type = other DNA
ccaggatctgttatcccaactacgagcagtttgctaagcacatctgccaccacttgcactgcggtctggctaaccacatgagcatggccactgatgaggtggatggagggtgtgagcaggcgggagcaggtgcgggcagcctccatgcggatctccttgtgctcactgttcaggaaatgatccgcacagtggcgaacaaattgggtcagagagtggc

SEQ ID NO: 111 - DNA, 121 bp, synthetic construct
  misc_feature 1..121: note = Description of artificial sequence: synthetic polynucleotide sequence
  source 1..121: mol_type = other DNA
ccttcaaattcaaagctgccaagcgttcggagggcaagagtgatgctgcccacatcgctggcctcagggagggtcgtgaggccaggagaggccagctgatgggccaggcccttgggcatgc

SEQ ID NO: 112 - DNA, 121 bp, synthetic construct
  misc_feature 1..121: note = Description of artificial sequence: synthetic polynucleotide sequence
  source 1..121: mol_type = other DNA
gtggcgaaggggtttgtgcataaggaccagggacagcattttcagtagcccatcttgaatgtccttctttagctgtggaatctgacggctcaggtcgtagagcactgcagtgagggcaggg

SEQ ID NO: 113 - DNA, 121 bp, synthetic construct
  misc_feature 1..121: note = Description of artificial sequence: synthetic polynucleotide sequence
  source 1..121: mol_type = other DNA
gtcccactgccagcatgggctccagcagctccttgatatcctgctggatgcctggccccattgctcgagccagcatgctgatgcaagtgaagactgtggcatccacctgcattgccttctg

SEQ ID NO: 114 - DNA, 188 bp, synthetic construct
  misc_feature 1..188: note = Description of artificial sequence: synthetic polynucleotide sequence
  source 1..188: mol_type = other DNA
cttatgggcgaagtcctttgggggcagggccgctcggatgatgtccagcacgcgaggcaaatagaccttaaactcagacctcacagccacagaaagtagccccagggcttggaaggccgctgtacgttccttctccttcttgacacagcttaggacatggttcatggtatcttggagatactgggtat

SEQ ID NO: 115 - DNA, 121 bp, synthetic construct
  misc_feature 1..121: note = Description of artificial sequence: synthetic polynucleotide sequence
  source 1..121: mol_type = other DNA
cctcacctgtgaaggcagaaggtcggaatgcagccaagcggggcaacaaattaaggattgtcatttggatcagcgagttcttgctattcctgcatttcagcacccactggcacacctgaga

SEQ ID NO: 116 - DNA, 277 bp, synthetic construct
  misc_feature 1..277: note = Description of artificial sequence: synthetic polynucleotide sequence
  source 1..277: mol_type = other DNA
cctgatcaaatttctcctccatcaagtctctgcaacaccggctctccaccagggtggacttagctggactgggggaggtcccaaatcccatgaggccttggtgagagctgtaccccagcagccccaccaaggcatttgactgctggggctgtacagcctggaaactggtgaagggggtaatgtgacgaggttttgttccgaagcccatgagatctttgcagtacttgtcgtgtaccagctgctgctgtgtgatttcttccatttcttctctcagacg

SEQ ID NO: 117 - DNA, 136 bp, synthetic construct
  misc_feature 1..136: note = Description of artificial sequence: synthetic polynucleotide sequence
  source 1..136: mol_type = other DNA
cctctccctccatgctgctgattcggaccagctcgttaaggatcaacaaggctccatggatccgatcatcccgattcatgcccttctctttggccaaggtctcatcaaatcccttctctgcttcttcaaatgtgtg

SEQ ID NO: 118 - DNA, 202 bp, synthetic construct
  misc_feature 1..202: note = Description of artificial sequence: synthetic polynucleotide sequence
  source 1..202: mol_type = other DNA
ccctgtaccactgaggcttctgcatctccttcggctcacgctgggttgtgagaatcagacaggcacgaagggcggctacagctccctcacggatggcctgtttggggtcccacacggccacaaaaatgttgtcaaagaagggttgcacttgctggaagaagaaggtagggacgctgatggccagctcacggagaaccaggac

SEQ ID NO: 119 - DNA, 234 bp, synthetic construct
  misc_feature 1..234: note = Description of artificial sequence: synthetic polynucleotide sequence
  source 1..234: mol_type = other DNA
cagctgcatgtctccggccctcattgcggtcagcacccagccattccagggctcgcttcacctcaaattccacgtactcagcggtaaaagtgtcccctgccatggcaagacggccaatggccttggatgccatttccatgacaactgggtcattggaggggaggaggttccgaagatagttggcaaatctgccaattcgggtggcattcccaccttccactcctatgaggctag

SEQ ID NO: 120 - DNA, 121 bp, synthetic construct
  misc_feature 1..121: note = Description of artificial sequence: synthetic polynucleotide sequence
  source 1..121: mol_type = other DNA
ccttacctatggccaagatgccacctttcctctcattggcatctgagctggaaaccaattcaaaaatgtgatggttcagttggtcatagaagcgagtagactcctcttgactcatctgcaa

SEQ ID NO: 121 - DNA, 163 bp, synthetic construct
  misc_feature 1..163: note = Description of artificial sequence: synthetic polynucleotide sequence
  source 1..163: mol_type = other DNA
cctctcggagttccatggtgacatagtgctggagctccttggcggctttggccctggtttcctcattccggctctttaggccactggcaaactgctgcaggacgctcacattgctagatgtggtggcagcggtggtggcggcggcaggtccggttccaagcat

SEQ ID NO: 122 - DNA, 121 bp, synthetic construct
  misc_feature 1..121: note = Description of artificial sequence: synthetic polynucleotide sequence
  source 1..121: mol_type = other DNA
ccttgcagtgaattttgctactgctgtctctacacccaagatacctaatactcctcaacgaatagcctaggttgaggcaaagctgttgaccaccttggagggctaatagcagtttccattt

SEQ ID NO: 123 - DNA, 121 bp, synthetic construct
  misc_feature 1..121: note = Description of artificial sequence: synthetic polynucleotide sequence
  source 1..121: mol_type = other DNA
gccaggccacctcacgtccggccccggggatgcgcgtcctcctcgccgcgctgggactgctgttcctgggggcgctacgagccttcccacaggtaagcgggtgacgggcgcctggggaggt

SEQ ID NO: 124 - DNA, 121 bp, synthetic construct
  misc_feature 1..121: note = Description of artificial sequence: synthetic polynucleotide sequence
  source 1..121: mol_type = other DNA
cttttctgacctgccaggatcgacccttcgaggacacctgtcatggaaaccccagccactactatgacaaggctgtcaggaggtgctgttaccgctgccccatgggtgagtgggggcgttg

SEQ ID NO: 125 - DNA, 121 bp, synthetic construct
  misc_feature 1..121: note = Description of artificial sequence: synthetic polynucleotide sequence
  source 1..121: mol_type = other DNA
agggctgttcccgacacagcagtgcccacagaggcctactgactgcaggaagcagtgtgagcctgactactacctggatgaggccgaccgctgtacagcctgcgtgacttgttctcgaggt

SEQ ID NO: 126 - DNA, 154 bp, synthetic construct
  misc_feature 1..154: note = Description of artificial sequence: synthetic polynucleotide sequence
  source 1..154: mol_type = other DNA
gacgacctcgtggagaagacgccgtgtgcatggaactcctcccgtgtctgcgaatgtcgacccggcatgttctgttccacgtctgccgtcaactcctgtgcccgctgcttcttccattctgtctgtccggcagggatgattgtcaagttcccag

SEQ ID NO: 127 - DNA, 121 bp, synthetic construct
  misc_feature 1..121: note = Description of artificial sequence: synthetic polynucleotide sequence
  source 1..121: mol_type = other DNA
ctgtcccccctgcaggcacggcgcagaagaacacggtctgtgagccggcttccccaggggtcagccctgcctgtgccagcccagagaactgcaaggaaccctccaggtgactccctggctt

SEQ ID NO: 128 - DNA, 165 bp, synthetic construct
  misc_feature 1..165: note = Description of artificial sequence: synthetic polynucleotide sequence
  source 1..165: mol_type = other DNA
gtggcaccatcccccaggccaagcccaccccggtgtccccagcaacctccagtgccagcaccatgcctgtaagagggggcacccgcctcgcccaggaagctgcttctaaactgacgagggctcccgactctccctcctctgtgggaaggcctagttcagatccag

SEQ ID NO: 129 - DNA, 121 bp, synthetic construct
  misc_feature 1..121: note = Description of artificial sequence: synthetic polynucleotide sequence
  source 1..121: mol_type = other DNA
aggtctgtccccaacacagccatgcccagaggggtctggtgattgcagaaagcagtgtgagcccgactactacctggacgaggccggccgctgcacggcctgcgtgagctgttctcgaggt

SEQ ID NO: 130 - DNA, 154 bp, synthetic construct
  misc_feature 1..154: note = Description of artificial sequence: synthetic polynucleotide sequence
  source 1..154: mol_type = other DNA
gatgaccttgtggagaagacgccatgtgcatggaactcctcccgcacctgcgaatgtcgacctggcatgatctgtgccacatcagccaccaactcccgtgcccgctgtgtcccctacccaatctgtgcagcagagacggtcaccaagccccagg

SEQ ID NO: 131 - DNA, 121 bp, synthetic construct
  misc_feature 1..121: note = Description of artificial sequence: synthetic polynucleotide sequence
  source 1..121: mol_type = other DNA
cgtcccctctgcagatatggctgagaaggacaccacctttgaggcgccacccctggggacccagccggactgcaaccccaccccagagaatggcgaggcgcctgccaggtgactcccccac

SEQ ID NO: 132 - DNA, 121 bp, synthetic construct
  misc_feature 1..121: note = Description of artificial sequence: synthetic polynucleotide sequence
  source 1..121: mol_type = other DNA
gcagcaccagccccactcagagcttgctggtggactcccaggccagtaagacgctgcccatcccaaccagcgctcccgtcgctctctcctccacggggaagcccgttctggatgcaggtaa

SEQ ID NO: 133 - DNA, 121 bp, synthetic construct
  misc_feature 1..121: note = Description of artificial sequence: synthetic polynucleotide sequence
  source 1..121: mol_type = other DNA
tgtgttccagggccagtgctcttctgggtgatcctggtgttggttgtggtggtcggctccagcgccttcctcctgtgccaccggagggcctgcaggaagcgaattcggcagagtaagtggc

SEQ ID NO: 134 - DNA, 121 bp, synthetic construct
  misc_feature 1..121: note = Description of artificial sequence: synthetic polynucleotide sequence
  source 1..121: mol_type = other DNA
gccacccccagccttcctcctggtgtcgtttcagagctccacctgtgctacccggtccagacctcccagcccaagctagagcttgtgggtgagtgtccagccgtccaaaggggctgcccga

SEQ ID NO: 135 - DNA, 121 bp, synthetic construct
  misc_feature 1..121: note = Description of artificial sequence: synthetic polynucleotide sequence
  source 1..121: mol_type = other DNA
gggggctgccagactccttggtgaagttgctgctcttgctttttgcagattccagacccaggaggagctcaacggtaagtacccctcccttgcccccacctcagcttcgtgcccctaaatc

SEQ ID NO: 136 - DNA, 209 bp, synthetic construct
  misc_feature 1..209: note = Description of artificial sequence: synthetic polynucleotide sequence
  source 1..209: mol_type = other DNA
gcagctgaggagtggtgcgtcggtgacagaacccgtcgcggaagagcgagggttaatgagccagccactgatggagacctgccacagcgtgggggcagcctacctggagagcctgccgctgcaggatgccagcccggccgggggcccctcgtcccccagggaccttcctgagccccgggtgtccacggagcacaccaataacaagattg

SEQ ID NO: 137 - DNA, 121 bp, synthetic construct
  misc_feature 1..121: note = Description of artificial sequence: synthetic polynucleotide sequence
  source 1..121: mol_type = other DNA
gagaaaatctacatcatgaaggctgacaccgtgatcgtggggaccgtgaaggctgagctgccggagggccggggcctggcggggccagcagagcccgagttggaggaggagctggaggcgg

SEQ ID NO: 138 - DNA, 121 bp, synthetic construct
  misc_feature 1..121: note = Description of artificial sequence: synthetic polynucleotide sequence
  source 1..121: mol_type = other DNA
taccccccactaccccgagcaggagacagaaccgcctctgggcagctgcagcgatgtcatgctctcagtggaagaggaagggaaagaagaccccttgcccacagctgcctctggaaagtga

SEQ ID NO: 139 - DNA, 121 bp, synthetic construct
  misc_feature 1..121: note = Description of artificial sequence: synthetic polynucleotide sequence
  source 1..121: mol_type = other DNA
tatcagctaggtgctctaacattcttttaggtagggaataaaacttaaaatagcacttatgttttagacagttatgtgatttcattttgagtgcatcttaatggtattaagattgtacttc

SEQ ID NO: 140 - DNA, 121 bp, synthetic construct
  misc_feature 1..121: note = Description of artificial sequence: synthetic polynucleotide sequence
  source 1..121: mol_type = other DNA
tgcttgctaagattccatattcagttgcctacttgacatttctacttgggcttctaataagtatctcaacttatcaagtctaaaatgagacactttatttgtacctgtatggattattctt

SEQ ID NO: 141 - DNA, 121 bp, synthetic construct
  misc_feature 1..121: note = Description of artificial sequence: synthetic polynucleotide sequence
  source 1..121: mol_type = other DNA
ttgactgcagcattcagtacagcaacatgctatacagatttgcaacttaggcacacacaagcggctataccatacagtttaggtaaataggaagctatatcatttaggtttgtgtaagcat

SEQ ID NO: 142 - DNA, 121 bp, synthetic construct
  misc_feature 1..121: note = Description of artificial sequence: synthetic polynucleotide sequence
  source 1..121: mol_type = other DNA
aaggaaggaaggaaggaagaaaggatgacaagtgaatacacagatggaagaatgaatctatctaggtggatggaaaaaaggataaatgaaaggttggacggatgggtggatggcagttttg

SEQ ID NO: 143 - DNA, 121 bp, synthetic construct
  misc_feature 1..121: note = Description of artificial sequence: synthetic polynucleotide sequence
  source 1..121: mol_type = other DNA
ctgacttctggagagagacagaacatgagaggttctagcccttcgactgaggagtatctgtgaatcaaacgcagcagcttccttttgcctggatatccctcggtgctttctctgatggact

SEQ ID NO: 144 - DNA, 121 bp, synthetic construct
  misc_feature 1..121: note = Description of artificial sequence: synthetic polynucleotide sequence
  source 1..121: mol_type = other DNA
cgccggcacgccgcccagcatggtccgggaaaccaggcatctctgggtgggcaacttacccgagaacgtgcgggaagagaagatcatcgagcatttcaaacggtgagtgacacgaggcccg

SEQ ID NO: 145 - DNA, 322 bp, synthetic construct
  misc_feature 1..322: note = Description of artificial sequence: synthetic polynucleotide sequence
  source 1..322: mol_type = other DNA
gatatggccgcgtggaaagtgtcaaaattcttcccaagaggggatctgaaggaggagtggctgcctttgtggattttgtggacatcaaaagtgcacagaaagctcacaactcggtcaacaaaatgggtgacagagacctacgcacggattataatgaaccaggcaccatcccgagtgctgctcggggattggatgatacagtttccatagcatctcgtagtagagaggtttctgggttcagaggaggtggtggagggcctgcttatggtcccccaccgtcacttcatgcacgagaaggacgttatgagcggagacttgatgg

SEQ ID NO: 146 - DNA, 478 bp, synthetic construct
  misc_feature 1..478: note = Description of artificial sequence: synthetic polynucleotide sequence
  source 1..478: mol_type = other DNA
gggcttcagataacagggagcgtgcttatgaacatagtgcctatggacaccatgaacgggggacgggaggatttgatcggacaagacattacgatcaggattactatagagatcctcgagagcggactttacaacatgggctctattacgcttctcggagtcgaagtccaaatcgctttgatgctcatgacccccgatatgaacctagggctcgcgagcagtttacactgcccagtgtggtacacagggatatctacagggatgatattacccgggaggtacgaggcagaaggccagagcggaattaccagcacagcaggagtcggtcaccacattcatcccagtctagaaatcagtctcctcagagactggctagccaagcatctagacccacaaggtcccctagcggcagcggctctagaagtagatcctccagtagtgattcaatcagcagcagcagtagtaccagcagtgacag

SEQ ID NO: 147 - DNA, 162 bp, synthetic construct
  misc_feature 1..162: note = Description of artificial sequence: synthetic polynucleotide sequence
  source 1..162: mol_type = other DNA
gcagtgattccagcagtagttcaagtgatgattctccagctcgatcagttcagtctgcagcagtccctgcacccacttcccagttgctttcatctctggaaaaagatgagccccgtaaaagttttggcatcaaggtccagaatcttccagtacgctctacag

SEQ ID NO: 148 - DNA, 202 bp, synthetic construct
  misc_feature 1..202: note = Description of artificial sequence: synthetic polynucleotide sequence
  source 1..202: mol_type = other DNA
gatacaagccttaaagatggccttttccatgaatttaagaaatttggaaaagtaacttcagtgcagatacatggaacttcagaagagaggtatggtctggtattctttcggcagcaagaggaccaagaaaaagccttgactgcatcaaaaggaaaacttttctttggcatgcagattgaagtaacagcatggataggtccag

SEQ ID NO: 149 - DNA, 153 bp, synthetic construct
  misc_feature 1..153: note = Description of artificial sequence: synthetic polynucleotide sequence
  source 1..153: mol_type = other DNA
gaaacagaaagtgaaaatgaatttcgccccttggatgaaaggatagatgaatttcaccccaaagcaacaagaactctctttattggcaaccttgaaaaaaccactacttaccatgaccttcgcaacatcttccagcgctttggagaaattgtg

SEQ ID NO: 150 - DNA, 121 bp, synthetic construct
  misc_feature 1..121: note = Description of artificial sequence: synthetic polynucleotide sequence
  source 1..121: mol_type = other DNA
tattgacattaagaaagtaaatggagttcctcagtatgcgtttctgcaatactgtgatattgctagcgtttgtaaagctattaagaagatggatggggaatatcttggaaataatcgcctc

SEQ ID NO: 151 - DNA, 121 bp, synthetic construct
  misc_feature 1..121: note = Description of artificial sequence: synthetic polynucleotide sequence
  source 1..121: mol_type = other DNA
tcagctgggttttggaaagagcatgcctacaaactgcgtgtggctagatgggctttcttcgaatgtgtcagatcagtatttaacacgacatttctgccgatatgggcctgtggtaaaggta

SEQ ID NO: 152 - DNA, 121 bp, synthetic construct
  misc_feature 1..121: note = Description of artificial sequence: synthetic polynucleotide sequence
  source 1..121: mol_type = other DNA
acaggtggtgtttgaccgcttaaaaggcatggccctggttctctacaatgaaattgaatatgcacaagcagctgtaaaagagaccaaagggaggaaaatcggtgggaataaaattaaggtg

SEQ ID NO: 153 - DNA, 121 bp, synthetic construct
  misc_feature 1..121: note = Description of artificial sequence: synthetic polynucleotide sequence
  source 1..121: mol_type = other DNA
ttttttaaaggtggattttgcaaatcgggaaagtcagctggctttttatcactgcatggagaaatctggtcaagacatcagagacttttatgaaatgttagccgaaagaaggtatgtattt

SEQ ID NO: 154 - DNA, 237 bp, synthetic construct
  misc_feature 1..237: note = Description of artificial sequence: synthetic polynucleotide sequence
  source 1..237: mol_type = other DNA
gagaggaacgaagggcatcctacgactataaccaagatcgtacatattatgagagtgttcgaactccaggcacttatcctgaggattccaggcgggactatccagctcgagggagagagttttattcagaatgggaaacttaccaaggagactactatgaatcacgatactacgatgatcctcgggaatacagggattacaggaatgatccttatgaacaagatattagggaatata

SEQ ID NO: 155 - DNA, 474 bp, synthetic construct
  misc_feature 1..474: note = Description of artificial sequence: synthetic polynucleotide sequence
  source 1..474: mol_type = other DNA
gttacaggcaaagggaacgagaaagagaacgtgaaagatttgagtctgaccgggacagagaccatgagaggaggccgattgaacgaagtcaaagtcctgttcacttgcgacgtccacagagtcctggagcgtctccctctcaggcagagaggttgccgagtgattctgagaggaggctttacagccgatcctcagaccggagtggaagctgtagctcactctcccctccaagatatgagaaactggacaagtctcgtttggagcgctatacaaaaaatgaaaagacagataaagaacgaacttttgatccggagagagtggagagagagagacgcttaatacggaaggaaaaagtggaaaaggacaaaactgacaagcagaaacgcaaaggaaaggttcactcccctagttctcagtcttcagaaacggaccaagaaaatgagcgagagcaaagccctgaaaagcccaggagtt

SEQ ID NO: 156 - DNA, 474 bp, synthetic construct
  misc_feature 1..474: note = Description of artificial sequence: synthetic polynucleotide sequence
  source 1..474: mol_type = other DNA
gtaataaactgagcagagagaaagctgacaaagagggaatagcgaaaaaccgcctggaactcatgccttgcgtggttttgactcgagtgaaagagaaagagggaaaggtcattgaccacactcctgtggaaaagttgaaagccaagcttgataatgacactgtcaaatcttctgccctggaccagaaacttcaggtctctcagacggagcctgcaaaatctgacttgtctaaactggaatcagttagaatgaaagtaccaaaggaaaaggggctttcaagccatgttgaagtggtggagaaggaaggcaggcttaaagccaggaagcacctcaagcctgagcagcctgcagatggggtaagtgctgtggatctggagaagctggaagccaggaaaaggcgctttgcagattccaatttaaaagcagaaaagcaaaaaccagaggtcaagaaaagcagtccagagatggaggatg

SEQ ID NO: 157 - DNA, 474 bp, synthetic construct
  misc_feature 1..474: note = Description of artificial sequence: synthetic polynucleotide sequence
  source 1..474: mol_type = other DNA
ctcgcgtgctttcaaaaaagcagcctgacgtgtcctctagagaggtcattctgctgagggaaggagaggctgaaagaaagcctgtgaggaaagaaattcttaaaagagaatctaaaaaaatcaaactggacagacttaatactgttgccagccccaaagactgtcaggagcttgccagtatttctgttgggtctggctcaaggcccagctcagacctacaagcaagactgggagaactagcaggtgaatctgtggaaaatcaagaagtccaatcaaaaaagcccattccctcaaaaccacagctcaaacagctgcaggtattagatgatcaaggaccagagagagaagacgttaggaaaaactattgcagtcttcgtgatgaaacacctgaacgtaaatcaggccaagagaaatcacattcagtaaatactgaagaaaaaattggcattgacatcgatcacacgcagagttacc

SEQ ID NO: 158 - DNA, 473 bp, synthetic construct
  misc_feature 1..473: note = Description of artificial sequence: synthetic polynucleotide sequence
  source 1..473: mol_type = other DNA
gaaaacaaatggaacagagtcgtaggaaacagcagatggaaatggaaatagccaagtctgagaagtttggcagtcctaaaaaagatgtagatgaatatgaaagacgtagcctcgttcacgaggtaggcaaaccccctcaagatgtcactgatgactctcctcctagcaaaaagaaaaggatggatcatgtcgattttgatatctgcaccaagcgagaacggaattacagaagttcacgccaaatcagcgaagattctgaaaggactggtggttctcccagtgtccgacatggttccttccatgaagatgaggatcccataggctcccctaggctactgtcagtaaaagggtctcctaaagtagatgaaaaagtcctcccctattctaacataacagtcagggaagagtctttaaaatttaatccttatgattctagcaggagagaacagatggcagatatggccaaaataaaa

SEQ ID NO: 159 - DNA, 474 bp, synthetic construct
  misc_feature 1..474: note = Description of artificial sequence: synthetic polynucleotide sequence
  source 1..474: mol_type = other DNA
ctatctgtcttgaattctgaagatgaactaaatcgttgggactctcagatgaaacaggatgctggcagatttgatgtgagtttcccaaacagcataattaagagagatagccttcgaaaaaggtctgtacgagatctggaacctggtgaggtgccttctgattctgacgaagatggtgaacacaaatcccactcacccagagcctctgcattatatgaaagttctcgattgtcttttttattgagggacagagaagacaagctacgtgagcgagatgaaagactctctagttctttagaaaggaacaaattttactcttttgcattggataagacaatcacaccagacactaaagctttgcttgaaagagctaaatccctctcttcatctcgtgaagaaaattggtcttttcttgattgggactcccgatttgcaaattttcgaaacaacaaagataaagaaaaggttgactct

SEQ ID NO: 160 - DNA, 474 bp, synthetic construct
  misc_feature 1..474: note = Description of artificial sequence: synthetic polynucleotide sequence
  source 1..474: mol_type = other DNA
gctccaagacctattccatcctggtacatgaaaaagaagaaaattaggactgattcagaagggaaaatggatgataagaaagaggaccataaagaagaagagcaagagaggcaggaattgtttgcttctcgttttttacacagctcaatctttgaacaagattccaagcgattgcagcatctagagagaaaagaggaagattctgacttcatttctggtaggatctatgggaagcagacatctgagggagcaaacagcacaactgattccattcaagaaccagtagttctgttccatagcagatttatggagctcacacggatgcaacagaaagaaaaagaaaaagaccagaaacccaaagaggttgagaaacaggaagatacagagaatcatcccaagaccccagaatctgctcctgagaataaagattcagaactgaaaactccaccttccgttgggcctccaagtgtcaca

SEQ ID NO: 161 - DNA, 474 bp, synthetic construct
  misc_feature 1..474: note = Description of artificial sequence: synthetic polynucleotide sequence
  source 1..474: mol_type = other DNA
gtcgtaactctagaatcagccccatcagcactagagaagaccactggtgacaaaacggtagaggcgcctttggtaacagaagagaagactgtggagccagctaccgtctcagaagaagcaaagcctgcatctgaacctgctcctgcccctgtggaacagctggaacaagtagacctgcccccaggagcagaccccgataaagaagctgccatgatgcctgcgggtgttgaggaaggttcatcaggtgaccagccgccttatctggatgccaagcctccaactcccggggcctcgttttcccaggcagagagcaacgtagatccagagcctgacagtacccagccactttcaaaaccagctcagaagtctgaggaagccaatgagccaaaggccgaaaagccagacgccactgcagatgctgagcctgatgcaaaccagaaagccgaagctgctcctgagtctcagcccccagct

SEQ ID NO: 162 - DNA, 474 bp, synthetic construct
  misc_feature 1..474: note = Description of artificial sequence: synthetic polynucleotide sequence
  source 1..474: mol_type = other DNA
tctgaagatttagaggttgatcctccagttgctgcaaaggataaaaagccaaacaaaagcaagcgttcaaagacccctgttcaggcagctgcagtgagtatcgtggagaagcccgtcacaaggaagagtgagaggatagaccgggaaaaactcaagcggtccaattctcctcggggagaagcacagaagcttttggaattgaagatggaggcagagaagattacaaggactgcttctaaaaactctgctgcagaccttgaacatcccgaaccaagtttgcctctcagccgaacaaggcgccggaatgtaaggagcgtctatgcaaccatgggtgaccatgaaaaccgctctcctgtcaaagagcccgttgagcaaccaagagtgaccagaaagagattggagcgagagcttcaggaggctgcagcggttcccaccacccctcggaggggaaggcctccaaagacacgccggcga

SEQ ID NO: 163 - DNA, 474 bp, synthetic construct
  misc_feature 1..474: note = Description of artificial sequence: synthetic polynucleotide sequence
  source 1..474: mol_type = other DNA
gccgatgaagaggaggagaacgaggccaaggaacctgcagaaacactcaagccacctgagggatggcggtcgccaaggtcccagaaaactgcagctggtggtggaccccaagggaaaaagggaaaaaatgaaccgaaggtggatgctacacgtcctgaggccaccactgaggtgggcccccaaataggcgtgaaagagagctccatggaacccaaggctgctgaggaggaggcagggagtgaacagaaacgtgacagaaaagatgctggcacagacaaaaacccccctgaaaccgcccctgttgaagttgtagagaaaaaaccggcccctgaaaaaaactccaaatcaaagagaggaagatctcgaaactccaggttagcagtggacaaatctgcaagtctgaaaaatgtggatgctgctgtcagtcccaggggggctgcagcacaggcaggggagagggaatctggggtggtg

SEQ ID NO: 164 - DNA, 474 bp, synthetic construct
  misc_feature 1..474: note = Description of artificial sequence: synthetic polynucleotide sequence
  source 1..474: mol_type = other DNA
gcagtctcccctgagaaaagtgagagtccccaaaaggaggatggtttatcatcccagttgaaaagtgatccagttgatccagacaaggaaccagagaaagaagacgtgtctgcctctgggccgtccccagaagccacccagttagccaagcagatggagctggagcaggccgtggaacacatcgcaaagctcgctgaggcctctgcctctgctgcctataaggcagatgcaccagagggccttgccccagaggacagggacaagcctgcacaccaagcaagtgaaacagagctggctgcggccatcggctccatcatcaatgacatttctggggagccagaaaacttcccagcacctccaccttatcctggagaatcccagacagatctgcaaccccccgcaggtgcacaggcgctgcagccttctgaggaaggaatggagacagatgaggctgtatctggcatcctggaaact

SEQ ID NO: 165 - DNA, 474 bp, synthetic construct
  misc_feature 1..474: note = Description of artificial sequence: synthetic polynucleotide sequence
  source 1..474: mol_type = other DNA
gaggctgctacagaatcttctaggcctccagtcaatgctcctgacccctcagccggcccaacagataccaaggaagccagaggaaatagcagtgaaacctcacactcagtgccagaagccaaagggtctaaagaagtggaagtcactcttgttcggaaagacaaagggcgccagaaaacaacccgatcacgccgcaagcgaaacacaaacaagaaagtggtggctcctgtagagagccatgtccctgaatccaaccaagctcaaggtgagagtcctgctgcaaatgaggggacaacagtacagcaccccgaagccccacaggaagaaaagcagagtgagaaaccccattccactcctcctcagtcatgtacttctgacctaagcaagattccctccacagagaattcgtcccaagaaatcagtgttgaggaaaggactccaaccaaagcatctgtgcccccagaccttccccca

SEQ ID NO: 166 - DNA, 473 bp, synthetic construct
  misc_feature 1..473: note = Description of artificial sequence: synthetic polynucleotide sequence
  source 1..473: mol_type = other DNA
cctccccagccagcaccggtggatgaggagcctcaagccaggttcagggtgcattccatcattgaaagtgacccggtgaccccacccagcgatccaagcatccccatacccacactgccttctgtaactgcagcaaagctctcacctcctgtcgcctctggggggatcccacaccagagcccccctactaaggtgacagagtggatcacaaggcaggaggagccacgggctcagtctactccatctccagctcttcccccagacacaaaggcctctgatgttgacaccagctccagcaccctgaggaagattctcatggaccccaagtatgtgtctgccacaagtgtcacttccacaagtgtcaccacagccattgcagagcctgtcagtgctgccccttgcctacatgaggccccgcccccgccagttgactctaaaaagcctttagaagaaaaaacagcacctccagtgac

SEQ ID NO: 167 - DNA, 474 bp, synthetic construct
  misc_feature 1..474: note = Description of artificial sequence: synthetic polynucleotide sequence
  source 1..474: mol_type = other DNA
aaacaactctgagatacaagcctcggaggtgctggtagctgctgacaaggaaaaggtggctccagtcattgctcccaaaattacctctgttattagccggatgcctgtcagcattgacctggaaaattcacagaagataaccttggcaaaaccagctcctcaaaccctcactggtctggtgagcgcactcactggcctggtgaacgtctccctggtcccggtgaatgccctgaaaggccccgtgaagggctcagtgaccacactgaaaagtttggtgagcacccctgctgggcccgtgaacgtcctgaaagggcctgtgaatgttcttacggggccagtgaatgttctcaccactccagtgaacgccacggtgggcacagtgaatgccgccccaggcacagtcaatgccgctgcgagtgcagtgaatgccacagcaagtgcagtgaccgtcacagcgggtgcggttactgctgc

SEQ ID NO: 168 - DNA, 474 bp, synthetic construct
  misc_feature 1..474: note = Description of artificial sequence: synthetic polynucleotide sequence
  source 1..474: mol_type = other DNA
atctggtggtgtaacggccacaacaggcacggtgacaatggcaggggcagtgattgcgccgtcaacaaagtgcaaacagagagcgagtgctaatgaaaacagtcggttccacccagggtccatgcctgtgatcgacgatcgtccggcagacgcgggctcaggggcggggctgcgtgtgaacacttctgaaggggttgtgctcctgagttactcagggcagaagaccgaaggcccacagcggatcagcgccaagatcagccagatccccccggccagtgcaatggacattgaatttcagcagtcagtgtccaagtcccaggtcaaacctgattctgtcacagcatcgcagcctccatccaaaggccctcaagctcctgcaggctatgcgaacgtggccacccattccacgttggtactgaccgcccagacatataatgcctctcctgtgatttcgtctgtgaaggccgataggcc

SEQ ID NO: 169 - DNA, 474 bp, synthetic construct
  misc_feature 1..474: note = Description of artificial sequence: synthetic polynucleotide sequence
  source 1..474: mol_type = other DNA
atccttggagaagcccgagcccattcacctctcggtgtccacgcctgtcacccagggaggcacagtgaaggttctcacccaggggatcaacacaccccctgtgctggttcacaaccagctggtcctcaccccaagcattgtcaccacaaacaagaagcttgctgaccccgtcacccttaaaatcgagaccaaggtccttcagccggccaacctggggtccacgctcacgccccaccaccctcctgctctgcccagcaaactgcctacagaagtcaaccatgtcccctcggggcccagcatcccagcagatcgaactgtctcccatttggcagctgcaaagctagatgctcattctcctcgaccaagtggacccgggccatcctcattcccaagggcaagccaccccagcagtactgcatctacggcgctctccaccaacgccacagtcatgctggctgcaggcatcccagtgcc

SEQ ID NO: 170 - DNA, 474 bp, synthetic construct
  misc_feature 1..474: note = Description of artificial sequence: synthetic polynucleotide sequence
  source 1..474: mol_type = other DNA
ccagttcatctccagcatccacccagagcagtctgtcatcatgccaccccacagcatcacccagactgtgtccctgagccacctctcccagggcgaggtgagaatgaacactcccacgctgcccagtatcacctacagcatccggccagaagcgcttcactctcctcgggctccgctgcagccccagcaaatagaggtcagggccccacagcgtgccagcaccccgcagccagccccagctggtgtgcctgcactggcctcccagcaccctcccgaggaggaagtgcattatcaccttcctgtcgctcgagccacagcccctgtgcagtcagaggtactagtcatgcagtctgagtaccgactgcacccctatactgtgccacgggatgtgaggatcatggtgcatccacatgtgacggcagtcagcgagcagcccagggccgcggatggggtggtgaaggtgccaccagccag

SEQ ID NO: 171 - DNA, 358 bp, synthetic construct
  misc_feature 1..358: note = Description of artificial sequence: synthetic polynucleotide sequence
  source 1..358: mol_type = other DNA
caaggcccctcagcagccagggaaggaagctgccaagacaccagatgccaaagctgcccccacccccacccctgcccccgtccctgtccctgtcccccttcctgcccctgctcctgcccctcatggtgaggcccgtatcctcacagttacccccagtaaccaactccaggggctgcctctgacccctcctgtggtggtgacccatggggtgcagattgtgcactccagcggggagctgtttcaagagtaccggtacggcgacatccgcacctaccaccccccggcccagctcacacacactcagtttcccgccgcttcctctgttggcctgccttcccggaccaagacagctgctcag

SEQ ID NO: 172 - DNA, 241 bp, synthetic construct
  misc_feature 1..241: note = Description of artificial sequence: synthetic polynucleotide sequence
  source 1..241: mol_type = other DNA
gggccctcctcctgaaggtgagcccctgcagcctcctcagcctgtgcagtccacacagcctgcccagcctgcaccaccctgcccgccctcccagctcggtcagcccggccagccaccaagcagcaagatgcctcaagtgtcccaggaggcaaaggggacccagacgggagtagagcagcctcgcctcccagctggacctgcaaacaggccacctgagcctcacacccaggttcagagggca

SEQ ID NO: 173 - DNA, 121 bp, synthetic construct
  misc_feature 1..121: note = Description of artificial sequence: synthetic polynucleotide sequence
  source 1..121: mol_type = other DNA
aagcagaaacaggcccgacttccttcccctcccctgtgtctgtctccatgaagcctgaccttccagtctctcttcccactcagactgccccaaaacagccgttgtttgtcccaacaacctc

SEQ ID NO: 174 - DNA, 121 bp, synthetic construct
  misc_feature 1..121: note = Description of artificial sequence: synthetic polynucleotide sequence
  source 1..121: mol_type = other DNA
tggccccagcaccccaccaggactggttctgccacacactgaattccagccagcccccaaacaagattcctctccacacctgacttcccagagacccgtggatatggttcaacttctgaag

SEQ ID NO: 175 - DNA, 196 bp, synthetic construct
  misc_feature 1..196: note = Description of artificial sequence: synthetic polynucleotide sequence
  source 1..196: mol_type = other DNA
gaagtaccccatcgtgtggcagggcctgctggccctcaagaatgacacagctgctgtgcagctccacttcgtctctggcaacaacgtcctggcccatcggtccctgcccctttctgaaggagggcccccactaaggatcgcccagaggatgcggctggaggcaacgcagctggaaggggttgcccgaaggatgacg

SEQ ID NO: 176 - DNA, 160 bp, synthetic construct
  misc_feature 1..160: note = Description of artificial sequence: synthetic polynucleotide sequence
  source 1..160: mol_type = other DNA
ggtggagacagattactgtctgctgctggctctgccctgtggccgtgaccaagaggatgttgtgagccagaccgagtccctcaaggctgccttcatcacttacctgcaggccaagcaggcggcagggatcatcaacgttcccaaccctggctccaatcag

SEQ ID NO: 177 - DNA, 133 bp, synthetic construct
  misc_feature 1..133: note = Description of artificial sequence: synthetic polynucleotide sequence
  source 1..133: mol_type = other DNA
gcctgcctacgtgctgcagatcttcccgccctgtgagttctctgagagtcacctgtcccgcctggcccctgacctccttgccagcatctccaacatctctccccacctcatgattgtcattgcctccgtgtga

SEQ ID NO: 178 - DNA, 121 bp, synthetic construct
  misc_feature 1..121: note = Description of artificial sequence: synthetic polynucleotide sequence
  source 1..121: mol_type = other DNA
taggtctgcttctgtagcccacacccaaattcttcttaccgcatccatcagtgcctgcttgtgatggggctctgatcctcagcttcatggaggacacagccatgattgagctcccactgtc

SEQ ID NO: 179 - DNA, 121 bp, synthetic construct
  misc_feature 1..121: note = Description of artificial sequence: synthetic polynucleotide sequence
  source 1..121: mol_type = other DNA
tgagcacctcggcccaatcaggcatctctccgcctccccagagttcacgcaaaacaaatgcctctataatgctctctcagagtccacggcaaccaggtctcattttatttttacctttctt

SEQ ID NO: 180 - DNA, 121 bp, synthetic construct
  misc_feature 1..121: note = Description of artificial sequence: synthetic polynucleotide sequence
  source 1..121: mol_type = other DNA
cacttccagaatctatctgggttgcctgcctaggtttatcctattgagtgaaggtgatgtttgctacaggagcaagaaataagctatagtgctgatggagggggaaggacatctgaaatga

SEQ ID NO: 181 - DNA, 121 bp, synthetic construct
  misc_feature 1..121: note = Description of artificial sequence: synthetic polynucleotide sequence
  source 1..121: mol_type = other DNA
gcaggtgagaaaatcaatgttcagagagggaaagtgatttgcccgagaagacacagctagtttgaggggctttgctcctttgctggcatgcagctgcttctgttggtattcatgggctcgc

SEQ ID NO: 182 - DNA, 121 bp, synthetic construct
  misc_feature 1..121: note = Description of artificial sequence: synthetic polynucleotide sequence
  source 1..121: mol_type = other DNA
ggaggatgaattcgagcagccaaccatgtcttttgaatcctacctcagctatgaccagccccggaagaaaaagaaaaagattgtgaaaacttcagccacggcacttggagataaaggactt

SEQ ID NO: 183 - DNA, 121 bp, synthetic construct
  misc_feature 1..121: note = Description of artificial sequence: synthetic polynucleotide sequence
  source 1..121: mol_type = other DNA
atgactctaaaagcactggtaaaaacttggactcagttcagaaattacccaaggtgaacaaaaccaagtcagagaagccggctggagctgatttagccaagctgagaaaggtaaccccttc

SEQ ID NO: 184 - DNA, 121 bp, synthetic construct
  misc_feature 1..121: note = Description of artificial sequence: synthetic polynucleotide sequence
  source 1..121: mol_type = other DNA
ccctggccctttcttactttttaaatcaagaactgaaaacgactttatttactcttcttgggacatggccacgcccatggaagtccccaaagtaggctggacaggccacagcagcacccgg

SEQ ID NO: 185 - DNA, 121 bp, synthetic construct
  misc_feature 1..121: note = Description of artificial sequence: synthetic polynucleotide sequence
  source 1..121: mol_type = other DNA
ccctctgtgccctccgtgatcctggatgaggatggcagcatgatcgacagccacctgccttcaggggagcccctgcagtttgtgtttgaggagatcaagtggcagcaggagctgagctggg

SEQ ID NO: 186 - DNA, 121 bp, synthetic construct
  misc_feature 1..121: note = Description of artificial sequence: synthetic polynucleotide sequence
  source 1..121: mol_type = other DNA
tctgctcagcttctctctcattttaggttattcaggaccggatttttggaacatcagctcacccctcactgctgtggaacagccccccaggggcactcctggccctgtctactttttccac

SEQ ID NO: 187 - DNA, 121 bp, synthetic construct
  misc_feature 1..121: note = Description of artificial sequence: synthetic polynucleotide sequence
  source 1..121: mol_type = other DNA
gatggagacactttattcagatcctcaccaccgagtccgcttccacaacccaagaaccagcacaagtaaggagttgtacagagtgttgcctgaggccaagaaggcaccgggcagcggggca

SEQ ID NO: 188 - DNA, 121 bp, synthetic construct
  misc_feature 1..121: note = Description of artificial sequence: synthetic polynucleotide sequence
  source 1..121: mol_type = other DNA
cagagtatacattttggaacctcttcgaggccatcctgcagttccagatgaaccatagcgtgcttcaggtaagaaagagttcagggctggccagatgggatgggatggaagaaaagattag

SEQ ID NO: 189 - DNA, 121 bp, synthetic construct
  misc_feature 1..121: note = Description of artificial sequence: synthetic polynucleotide sequence
  source 1..121: mol_type = other DNA
caggtcattgataagagcaagcgggatccttcagaagagattgagattcttctgcggtatggccagcaccccaacatcatcactctgaaagatgtgagtgggggtccttaagactggggtg

SEQ ID NO: 190 - DNA, 339 bp, synthetic construct
  misc_feature 1..339: note = Description of artificial sequence: synthetic polynucleotide sequence
  source 1..339: mol_type = other DNA
catggccgcgcaggtcgcccccgccgccgccagcagcctgggcaacccgccgccgccgccgccctcggagctgaagaaagccgagcagcagcagcgggaggaggcggggggcgaggcggcggcggcggcagcggccgagcgcggggaaatgaaggcagccgccgggcaggaaagcgagggccccgccgtggggccgccgcagccgctgggaaaggagctgcaggacggggccgagagcaatgggggtggcggcggcggcggagccggcagcggcggcgggcccggcgcggagccggacctgaagaactcgaacgggaacgcgggccctaggcccgccct

SEQ ID NO: 191 - DNA, 451 bp, synthetic construct
  misc_feature 1..451: note = Description of artificial sequence: synthetic polynucleotide sequence
  source 1..451: mol_type = other DNA
gaacaataacctcacggagccgcccggcggcggcggtggcggcagcagcgatggggtgggggcgcctcctcactcagccgcggccgccttgccgcccccagcctacggcttcgggcaaccctacggccggagcccgtctgccgtcgccgccgccgcggccgccgtcttccaccaacaacatggcggacaacaaagccctggcctggcagcgctgcagagcggcggcggcgggggcctggagccctacgcggggccccagcagaactctcacgaccacggcttccccaaccaccagtacaactcctactaccccaaccgcagcgcctaccccccgcccgccccggcctacgcgctgagctccccgagaggtggcactccgggctccggcgcggcggcggctgccggctccaagccgcctccctcctccagcgcctccgcctcctcgtcgtct

SEQ ID NO: 192 - DNA, 348 bp, synthetic construct
  misc_feature 1..348: note = Description of artificial sequence: synthetic polynucleotide sequence
  source 1..348: mol_type = other DNA
tcgtccttcgctcagcagcgcttcggggccatggggggaggcggcccctccgcggccggcgggggaactccccagcccaccgccacccccaccctcaaccaactgctcacgtcgcccagctcggcccggggctaccagggctaccccgggggcgactacagtggcgggccccaggacgggggcgccggcaagggcccggcggacatggcctcgcagtgttggggggctgcggcggcggcagctgcggcggcggccgcctcgggaggggcccaacaaaggagccaccacgcgcccatgagccccgggagcagcggcggcggggggcagccgctcgcccggacccctcag

SEQ ID NO: 193 - DNA, 214 bp, synthetic construct
  misc_feature 1..214: note = Description of artificial sequence: synthetic polynucleotide sequence
  source 1..214: mol_type = other DNA
gccatccagtccaatggatcagatgggcaagatgagacctcagccatatggcgggactaacccatactcgcagcaacagggacctccgtcaggaccgcagcaaggacatgggtacccagggcagccatacgggtcccagaccccgcagcggtacccgatgaccatgcagggccgggcgcagagtgccatgggcggcctctcttatacacagcag

SEQ ID NO: 194 - DNA, 454 bp, synthetic construct
  misc_feature 1..454: note = Description of artificial sequence: synthetic polynucleotide sequence
  source 1..454: mol_type = other DNA
gattcctccttatggacaacaaggccccagcgggtatggtcaacagggccagactccatattacaaccagcaaagtcctcaccctcagcagcagcagccaccctactcccagcaaccaccgtcccagacccctcatgcccaaccttcgtatcagcagcagccacagtctcaaccaccacagctccagtcctctcagcctccatactcccagcagccatcccagcctccacatcagcagtccccggctccatacccctcccagcagtcgacgacacagcagcacccccagagccagcccccctactcacagccacaggctcagtctccttaccagcagcagcaacctcagcagccagcaccctcgacgctctcccagcaggctgcgtatcctcagccccagtctcagcagtcccagcaaactgcctattcccagcagcgcttccctccaccgcag

SEQ ID NO: 195 - DNA, 121 bp, synthetic construct
  misc_feature 1..121: note = Description of artificial sequence: synthetic polynucleotide sequence
  source 1..121: mol_type = other DNA
aggagctatctcaagattcatttgggtctcaggcatcctcagccccctcaatgacctccagtaagggagggcaagaagatatgaacctgagccttcagtcaagaccctccagcttgcctgt

SEQ ID NO: 196 - DNA, 121 bp, synthetic construct
  misc_feature 1..121: note = Description of artificial sequence: synthetic polynucleotide sequence
  source 1..121: mol_type = other DNA
ggatctatctggttcaatagatgacctccccatggggacagaaggagctctgagtcctggagtgagcacatcagggatttccagcagccaaggagagcagagtaatccagctcagtctcct

SEQ ID NO: 197 - DNA, 121 bp, synthetic construct
  misc_feature 1..121: note = Description of artificial sequence: synthetic polynucleotide sequence
  source 1..121: mol_type = other DNA
ttctctcctcatacctcccctcacctgcctggcatccgaggcccttccccgtcccctgttggctctcccgccagtgttgctcagtctcgctcaggaccactctcgcctgctgcagtgccag

SEQ ID NO: 198 - DNA, 121 bp, synthetic construct
  misc_feature 1..121: note = Description of artificial sequence: synthetic polynucleotide sequence
  source 1..121: mol_type = other DNA
tctttgtctggagcaggcaaccagatgccacctcggccacccagtggccagtcggacagcatcatgcatccttccatgaaccaatcaagcattgcccaagatcgaggtgagagcctgggtg

SEQ ID NO: 199 - DNA, 169 bp, synthetic construct
  misc_feature 1..169: note = Description of artificial sequence: synthetic polynucleotide sequence
  source 1..169: mol_type = other DNA
ggttatatgcagaggaacccccagatgccccagtacagttccccccagcccggctcagccttatctccgcgtcagccttccggaggacagatacacacaggcatgggctcctaccagcagaactccatggggagctatggtccccaggggggtcagtatggcccacaag

SEQ ID NO: 200 - DNA, 314 bp, synthetic construct
  misc_feature 1..314: note = Description of artificial sequence: synthetic polynucleotide sequence
  source 1..314: mol_type = other DNA
ggtggctaccccaggcagccaaactataatgccttgcccaatgccaactaccccagtgcaggcatggctggaggcataaaccccatgggtgccggaggtcaaatgcatggacagcctggcatcccaccttatggcacactccctccagggaggatgagtcacgcctccatgggcaaccggccttatggccctaacatggccaatatgccacctcaggttgggtcagggatgtgtcccccaccagggggcatgaaccggaaaacccaagaaactgctgtcgccatgcatgttgctgccaactctatccaaaacag

SEQ ID NO: 201 - DNA, 147 bp, synthetic construct
  misc_feature 1..147: note = Description of artificial sequence: synthetic polynucleotide sequence
  source 1..147: mol_type = other DNA
ggccgccaggctaccccaatatgaatcaagggggcatgatgggaactggacctccttatggacaagggattaatagtatggctggcatgatcaaccctcagggacccccatattccatgggtggaaccatggccaacaattctgcag

SEQ ID NO: 202 - DNA, 121 bp, synthetic construct
  misc_feature 1..121: note = Description of artificial sequence: synthetic polynucleotide sequence
  source 1..121: mol_type = other DNA
ttacagggatggcagccagcccagagatgatgggccttggggatgtaaagttaactccagccaccaaaatgaacaacaaggcagatgggacacccaagacagaatccaaatccaaggtagt

SEQ ID NO: 203 - DNA, 211 bp, synthetic construct
  misc_feature 1..211: note = Description of artificial sequence: synthetic polynucleotide sequence
  source 1..211: mol_type = other DNA
gaaatccagttcttctactacaaccaatgagaagatcaccaagttgtatgagctgggtggtgagcctgagaggaagatgtgggtggaccgttatctggccttcactgaggagaaggccatgggcatgacaaatctgcctgctgtgggtaggaaacctctggacctctatcgcctctatgtgtctgtgaaggagattggtggattgactcag

SEQ ID NO: 204 - DNA, 209 bp, synthetic construct
  misc_feature 1..209: note = Description of artificial sequence: synthetic polynucleotide sequence
  source 1..209: mol_type = other DNA
ggtcaacaagaacaaaaaatggcgggaacttgcaaccaacctcaatgtgggcacatcaagcagtgctgccagctccttgaaaaagcagtatatccagtgtctctatgcctttgaatgcaagattgaacggggagaagaccctcccccagacatctttgcagctgctgattccaagaagtcccagcccaagatccagcctccctctcctg

SEQ ID NO: 205 - DNA, 134 bp, synthetic construct
  misc_feature 1..134: note = Description of artificial sequence: synthetic polynucleotide sequence
  source 1..134: mol_type = other DNA
gcgggatcaggatctatgcaggggccccagactccccagtcaaccagcagttccatggcagaaggaggagacttaaagccaccaactccagcatccacaccacacagtcagatccccccattgccaggcatgag

SEQ ID NO: 206 - DNA, 177 bp, synthetic construct
  misc_feature 1..177: note = Description of artificial sequence: synthetic polynucleotide sequence
  source 1..177: mol_type = other DNA
gcaggagcaattcagttgggatccaggatgcctttaatgatggaagtgactccacattccagaagcggaattccatgactccaaaccctgggtatcagcccagtatgaatacctctgacatgatggggcgcatgtcctatgagccaaataaggatccttatggcagcatgaggaaag

SEQ ID NO: 207 - DNA, 152 bp, synthetic construct
  misc_feature 1..152: note = Description of artificial sequence: synthetic polynucleotide sequence
  source 1..152: mol_type = other DNA
gctccagggagtgatcccttcatgtcctcagggcagggccccaacggcgggatgggtgacccctacagtcgtgctgccggccctgggctaggaaatgtggcgatgggaccacgacagcactatccctatggaggtccttatgacagagtgag

SEQ ID NO: 208 - DNA, 139 bp, synthetic construct
  misc_feature 1..139: note = Description of artificial sequence: synthetic polynucleotide sequence
  source 1..139: mol_type = other DNA
ggacggagcctggaatagggcctgagggaaacatgagcactggggccccacagccgaatctcatgccttccaacccagactcggggatgtattctcctagccgctaccccccgcagcagcagcagcagcagcagcaacg

SEQ ID NO: 209 - DNA, 121 bp, synthetic construct
  misc_feature 1..121: note = Description of artificial sequence: synthetic polynucleotide sequence
  source 1..121: mol_type = other DNA
tgcctcctatagacatgattcctatggcaatcagttctccacccaaggcaccccttctggcagccccttccccagccagcagactacaatgtatcaacagcaacagcaggtgaggagggta

SEQ ID NO: 210 - DNA, 441 bp, synthetic construct
  misc_feature 1..441: note = Description of artificial sequence: synthetic polynucleotide sequence
  source 1..441: mol_type = other DNA
gaattacaagcggccaatggatggcacatatggccctcctgccaagcggcacgaaggggagatgtacagcgtgccatacagcactgggcaggggcagcctcagcagcagcagttgcccccagcccagccccagcctgccagccagcaacaagctgcccagccttcccctcagcaagatgtatacaaccagtatggcaatgcctatcctgccactgccacagctgctactgagcgccgaccagcaggcggcccccagaaccaatttccattccagtttggccgagaccgtgtctctgcaccccctggcaccaatgcccagcaaaacatgccaccacaaatgatgggcggccccatacaggcatcagctgaggttgctcagcaaggcaccatgtggcaggggcgtaatgacatgacctataattatgccaacaggcagagcac

SEQ ID NO: 211 - DNA, 452 bp, synthetic construct
  misc_feature 1..452: note = Description of artificial sequence: synthetic polynucleotide sequence
  source 1..452: mol_type = other DNA
gggctctgccccccagggccccgcctatcatggcgtgaaccgaacagatgaaatgctgcacacagatcagagggccaaccacgaaggctcgtggccttcccatggcacacgccagcccccatatggtccctctgcccctgtgccccccatgacaaggccccctccatctaactaccagcccccaccaagcatgcagaatcacattcctcaggtatccagccctgctcccctgccccggccaatggagaaccgcacctctcctagcaagtctccattcctgcactctgggatgaaaatgcagaaggcaggtcccccagtacctgcctcgcacatagcacctgcccctgtgcagccccccatgattcggcgggatatcaccttcccacctggctctgttgaagccacacagcctgtgttgaagcagaggaggcggctcacaatgaaagacattg

SEQ ID NO: 212 - DNA, 121 bp, synthetic construct
  misc_feature 1..121: note = Description of artificial sequence: synthetic polynucleotide sequence
  source 1..121: mol_type = other DNA
ccggaggcatggcgggtaatgatgtccctcaagtctggtctcctggcagagagcacatgggcattagataccatcaacatcctgctgtatgatgacaacagcatcatgaccttcaacctca

SEQ ID NO: 213 - DNA, 345 bp, synthetic construct
  misc_feature 1..345: note = Description of artificial sequence: synthetic polynucleotide sequence
  source 1..345: mol_type = other DNA
gctcccagggttgctagagctccttgtagaatatttccgacgatgcctgattgagatctttggcattttaaaggagtatgaggtgggtgacccaggacagagaacgctactggatcctgggaggttcagcaaggtgtctagtccagctcccatggagggtggggaagaagaagaagaacttctaggtcctaaactagaagaggaagaagaagaggaagtagttgaaaatgatgaggagatagccttttcaggcaaggacaagccagcttcagagaatagtgaggagaagctgatcagtaagtttgacaagcttccagtaaagatcgtacagaagaatgatccatt

SEQ ID NO: 214 - DNA, 462 bp, synthetic construct
  misc_feature 1..462: note = Description of artificial sequence: synthetic polynucleotide sequence
  source 1..462: mol_type = other DNA
tgtggtggactgctcagataagcttgggcgtgtgcaggagtttgacagtggcctgctgcactggcggattggtgggggggacaccactgagcatatccagacccacttcgagagcaagacagagctgctgccttcccggcctcacgcaccctgcccaccagcccctcggaagcatgtgacaacagcagagggtacaccagggacaacagaccaggaggggcccccacctgatggacctccagaaaaacggatcacagccactatggatgacatgttgtctactcggtctagcaccttgaccgaggatggagctaagagttcagaggccatcaaggagagcagcaagtttccatttggcattagcccagcacagagccaccggaacatcaagatcctagaggacgaaccccacagtaaggatgagaccccactgtgtacccttctggactggcaggattctct

SEQ ID NO: 215 - DNA, 461 bp, synthetic construct
  misc_feature 1..461: note = Description of artificial sequence: synthetic polynucleotide sequence
  source 1..461: mol_type = other DNA
tgccaagcgctgcgtctgtgtgtccaataccattcgaagcctgtcatttgtgccaggcaatgactttgagatgtccaaacacccagggctgctgctcatcctgggcaagctgatcctgctgcaccacaagcacccagaacggaagcaggcaccactaacttatgaaaaggaggaggaacaggaccaaggggtgagctgcaacaaagtggagtggtggtgggactgcttggagatgctccgggaaaacaccttggttacactcgccaacatctcggggcagttggacctatctccataccccgagagcatttgcctgcctgtcctggacggactcctacactgggcagtttgcccttcagctgaagcccaggaccccttttccaccctgggccccaatgccgtcctttccccgcagagactggtcttggaaaccctcagcaaactcagcatccaggacaaca

SEQ ID NO: 216 - DNA, 467 bp, synthetic construct
  misc_feature 1..467: note = Description of artificial sequence: synthetic polynucleotide sequence
  source 1..467: mol_type = other DNA
atgtggacctgattctggccacaccccccttcagccgcctggagaagttgtatagcactatggtgcgcttcctcagtgaccgaaagaacccggtgtgccgggagatggctgtggtactgctggccaacctggctcagggggacagcctggcagctcgtgccattgcagtgcagaagggcagtatcggcaacctcctgggcttcctagaggacagccttgccgccacacagttccagcagagccaggccagcctcctccacatgcagaacccaccctttgagccaactagtgtggacatgatgcggcgggctgcccgcgcgctgcttgccttggccaaggtggacgagaaccactcagagtttactctgtacgaatcacggctgttggacatctcggtatcaccgttgatgaactcattggtttcacaagtcatttgtgatgtactgtttttgattggccagtcatga

SEQ ID NO: 217 - DNA, 121 bp, synthetic construct
  misc_feature 1..121: note = Description of artificial sequence: synthetic polynucleotide sequence
  source 1..121: mol_type = other DNA
gaagtcggctcccattgcggcagacatcatggcttccaagcttcgctgctcttgggctctgaaacagtatccattggctttatccacagcctgcaggactcgctggatgctctccttgtcc

SEQ ID NO: 218 - DNA, 121 bp, synthetic construct
  misc_feature 1..121: note = Description of artificial sequence: synthetic polynucleotide sequence
  source 1..121: mol_type = other DNA
ttccaggcttcctcgtaggggtctgccaccagcgtgtgtctgttgtaggaccgcagctgtgggagggacagcgtcagggcagtgcgggccccggaaggctctgctcatggaggggtggggg

SEQ ID NO: 219 - DNA, 121 bp, synthetic construct
  misc_feature 1..121: note = Description of artificial sequence: synthetic polynucleotide sequence
  source 1..121: mol_type = other DNA
ctgggctattccctgcaggtcacctgccagtgaagcttcctgactacaacaaccgtttgagagtgctggttgccacctatgtgaccttcagccccaatggcacagagctactagtcaacat

SEQ ID NO: 220 - DNA, 121 bp, synthetic construct
  misc_feature 1..121: note = Description of artificial sequence: synthetic polynucleotide sequence
  source 1..121: mol_type = other DNA
gaacaggtatgtacagcataaggtggttctgccccatcaccattccatgcccagcagccaggggcatgtaccttatgttcactgctgaggcagacaagacacaacagccttatggtaaatg

SEQ ID NO: 221 - DNA, 121 bp, synthetic construct
  misc_feature 1..121: note = Description of artificial sequence: synthetic polynucleotide sequence
  source 1..121: mol_type = other DNA
ggggggtcacctgatgccaggccacctcccgcacagcttcgtgctgcctgatgacagccaggccagccgccagcgtacaagggttgtgcgacgcagcctcagccctgtgttcaatcacacc

SEQ ID NO: 222 - DNA, 121 bp, synthetic construct
  misc_feature 1..121: note = Description of artificial sequence: synthetic polynucleotide sequence
  source 1..121: mol_type = other DNA
gtcacagcgtctacctccccccggccccgtttgcgtgggtgccccaactcagtaaggcccgggcccccgaccccagcggctgccacggccaccaccttctttttcttgccgatgccctcaa

SEQ ID NO: 223 - DNA, 121 bp, synthetic construct
  misc_feature 1..121: note = Description of artificial sequence: synthetic polynucleotide sequence
  source 1..121: mol_type = other DNA
tacttgactcttttttccccttttaagcccaaaccttgtcagtattgcaacataattgcagcatttattgggaataaatgccagcgctgcacaaattcagaaaagaagtatggaccaccct

SEQ ID NO: 224 - DNA, 121 bp, synthetic construct
  misc_feature 1..121: note = Description of artificial sequence: synthetic polynucleotide sequence
  source 1..121: mol_type = other DNA
agtgctgggattacaggtgtgagccaccgcgccaggccttgggtaattctttgttgcagtagactgttctgtgtcctgtggtgggtttaacagcagcactcactctgcctgctagatgcca

SEQ ID NO: 225 - DNA, 121 bp, synthetic construct
  misc_feature 1..121: note = Description of artificial sequence: synthetic polynucleotide sequence
  source 1..121: mol_type = other DNA
agcatccaggatgtttagaaaaagaagaaaatctggacgttcctctgaatgtctgagtcctcatgataattatgcacaatagattgttattctttttaattttttttttggagacagagtc

SEQ ID NO: 226 - DNA, 121 bp, synthetic construct
  misc_feature 1..121: note = Description of artificial sequence: synthetic polynucleotide sequence
  source 1..121: mol_type = other DNA
atagcttgtgacaaatgcagcttcaggggatgatctggcaggaaacatccacttttccaaagggcaccacggccctggtagaaataatgagggctttttttaggattgtaattattcccag

SEQ ID NO: 227 - DNA, 121 bp, synthetic construct
  misc_feature 1..121: note = Description of artificial sequence: synthetic polynucleotide sequence
  source 1..121: mol_type = other DNA
aatctgccatcagatgctgggcgtctaattaagtcccttggcattcagagagtgagactgtagagcctgttactcttccatcagttctcacttggctgtgcttgagggtgagcctctagtt

SEQ ID NO: 228 - DNA, 121 bp, synthetic construct
  misc_feature 1..121: note = Description of artificial sequence: synthetic polynucleotide sequence
  source 1..121: mol_type = other DNA
aaataggagggaatcttgctcggccaaataccagagtgacttaagtgttagtttcacctattgtaatggatggttgtaagttaaggtgagaacagtggtcacacatggctggctcccttct

SEQ ID NO: 229 - DNA, 121 bp, synthetic construct
  misc_feature 1..121: note = Description of artificial sequence: synthetic polynucleotide sequence
  source 1..121: mol_type = other DNA
gacttgatccctcaggctcagtggtgtgaacagacgggggttggggaagccctagtcgatgtatgtggaccacttgggatatgcagtaatcctggtcagagatgtcagtgaggactgagat

SEQ ID NO: 230 - DNA, 121 bp, synthetic construct
  misc_feature 1..121: note = Description of artificial sequence: synthetic polynucleotide sequence
  source 1..121: mol_type = other DNA
ggggaggagggcaagtaatctgaggggtgttaagagaaagaagaattaggactcagcctttggttagtgaggtgggtggtaggtggcctgcttggtgttttccctaagtggggtgtggtgg

SEQ ID NO: 231 - DNA, 121 bp, synthetic construct
  misc_feature 1..121: note = Description of artificial sequence: synthetic polynucleotide sequence
  source 1..121: mol_type = other DNA
actcttgactacatttccttatcctccctcacggggctgcagacttgctagctggcctactttccaggcccccaggctgctaagcacttccctcagcactcctttgcaccagcccttcgtt

SEQ ID NO: 232 - DNA, 121 bp, synthetic construct
  misc_feature 1..121: note = Description of artificial sequence: synthetic polynucleotide sequence
  source 1..121: mol_type = other DNA
atcctcattgtagctaacacttaacctcacacttcccacaagccaagcatgttcttatcatattaccattggcattaacatatttaaatcccacaatcaagcctgtgagggaagtactgct

SEQ ID NO: 233 - DNA, 121 bp, synthetic construct
  misc_feature 1..121: note = Description of artificial sequence: synthetic polynucleotide sequence
  source 1..121: mol_type = other DNA
ttatttttttcttatttttagagacattttaaatccaaaggatgtgatcagtgcccagtttgaaaacaccaccactagtaaagatttttgcagtcagtcatgtttgtcaacatatgaactg

SEQ ID NO: 234 - DNA, 121 bp, synthetic construct
  misc_feature 1..121: note = Description of artificial sequence: synthetic polynucleotide sequence
  source 1..121: mol_type = other DNA
acctattgttaccataaatacaaatagtatttcaaccaaatgcagcatgtgtcagaagaatgctgttgtaagttaccattttcctttattggggcaggagtctaatacgtttgtgcttaaa

SEQ ID NO: 235 - DNA, 121 bp, synthetic construct
  misc_feature 1..121: note = Description of artificial sequence: synthetic polynucleotide sequence
  source 1..121: mol_type = other DNA
ggaaggctttcaggacccatttttttttttcctgactcatgatgcataatgcaatcagatgacatttaaatattcatgtcataaaagaggatgcagatgcaagtgtgagactggtgggctg

SEQ ID NO: 236 - DNA, 444 bp, synthetic construct
  misc_feature 1..444: note = Description of artificial sequence: synthetic polynucleotide sequence
  source 1..444: mol_type = other DNA
tatgagtggcccctgtggagagaagcctgtcctggaagccagccccaccatgagtctgtgggaatttgaggacagccacagccgtcagggcaccccaaggccgggtcaagagctggccgctgaggaggcctcggccctggaactgcagatgaaggtggacttcttccggaagctgggctattcatccacggagatccacagcgtcctgcagaagctgggcgtccaggcagacaccaacacggtgctgggtgagctggtgaaacacgggacagccaccgagcgggagcgccagacctcaccggacccctgccctcagctccctctagtcccgcggggtggtggcacccctaaggctcccaacctggagcctccactcccagaagaggaaaaggagggcagcgacctgagaccagtggtcatcgatgggagcaacgtggccatgag

SEQ ID NO: 237 - DNA, 141 bp, synthetic construct
  misc_feature 1..141: note = Description of artificial sequence: synthetic polynucleotide sequence
  source 1..141: mol_type = other DNA
gccatgggaacaaggaggtcttctcctgccggggcatcctgctggcagtgaactggtttctggagcggggccacacagacatcacagtgtttgtgccatcctggaggaaggagcagcctcggcccgacgtgcccatcacag

SEQ ID NO: 238 - DNA, 236 bp, synthetic construct
  misc_feature 1..236: note = Description of artificial sequence: synthetic polynucleotide sequence
  source 1..236: mol_type = other DNA
gaccagcacatcctgcgggaactggagaagaagaagatcctggtgttcacaccatcacgacgcgtgggtggcaagcgggtggtgtgctatgacgacagattcattgtgaagctggcctacgagtctgacgggatcgtggtttccaacgacacataccgtgacctccaaggcgagcggcaggagtggaagcgcttcatcgaggagcggctgctcatgtactccttcgtcaatgacaa

SEQ ID NO: 239 - DNA, 121 bp, synthetic construct
  misc_feature 1..121: note = Description of artificial sequence: synthetic polynucleotide sequence
  source 1..121: mol_type = other DNA
tctgcaggtttatgccccctgatgacccactgggccggcacgggcccagcctggacaacttcctgcgtaagaagccactcactttggagcacaggaagcagccgtgtccctatggtatgga

SEQ ID NO: 240 - DNA, 432 bp, synthetic construct
  misc_feature 1..432: note = Description of artificial sequence: synthetic polynucleotide sequence
  source 1..432: mol_type = other DNA
ggaaggaaatgcacctatgggatcaagtgccgattcttccacccagagcggccaagctgcccccagcgctctgtggcagatgagctccgtgccaatgctctcctctcaccccccagagccccaagcaaggacaaaaatggccggcggccttcaccttcatcccagtccagctctctgctaacagagagtgagcagtgcagcctggatgggaagaagctgggggcccaggcatccccagggtcccgccaagagggtctaacacagacctatgccccatcaggcaggagcctcgcacctagcgggggcagtggcagcagctttgggcccacagactggctcccacagacgctggactcactcccgtacgtctcccaggattgcctggactcgggcattggctccctggagagccagatgtcggaactttggggg

SEQ ID NO: 241 - DNA, 444 bp, synthetic construct
  misc_feature 1..444: note = Description of artificial sequence: synthetic polynucleotide sequence
  source 1..444: mol_type = other DNA
gttcgaggaggaggccctggtgagccgggcccaccccgagccccttacacgggctacagtccctatggatctgagctcccagccaccgcagccttctctgcctttggccgggccatgggtgctggccacttcagtgtccctgccgactacccacccgcgccccctgcctttccacctcgagagtactggtctgaaccatacccactgcccccacccacatcagtccttcaggagcccccagtgcagagcccaggggctggcaggagcccgtggggcagggcaggcagcctggccaaggagcaggccagcgtgtatactaagctgtgtggtgtgtttcccccgcacctggtggaggctgtgatggggcgcttcccacagctcctggacccccagcagctggctgccgagatcctctcctacaagtcccagcaccccagtgagtaa

SEQ ID NO: 242 - DNA, 121 bp, synthetic construct
  misc_feature 1..121: note = Description of artificial sequence: synthetic polynucleotide sequence
  source 1..121: mol_type = other DNA
cccttttctagctgcgtcaccatgggcaatctgcttaagcttcagtttcctacctgcatagaattaagtgcagttaagtcacagatatgttgaagagactttataacgtaatatacataaa

SEQ ID NO: 243 - DNA, 121 bp, synthetic construct
  misc_feature 1..121: note = Description of artificial sequence: synthetic polynucleotide sequence
  source 1..121: mol_type = other DNA
aatggcacagtgctcagaagggatggatcaccactaatggcaggataattcgaggctgttgggctgaggaccctggagagccaggttgtctctcctggatggcgtgcggcggtcctcagtc

SEQ ID NO: 244 - DNA, 121 bp, synthetic construct
  misc_feature 1..121: note = Description of artificial sequence: synthetic polynucleotide sequence
  source 1..121: mol_type = other DNA
agattacaggcttgtgctactgcacctgctcaatttttgtttttctaaaaatggtatcatcctatgtacattcctcagcactcggccttcctcatggacagtctttctaggctacaggcca

SEQ ID NO: 245 - DNA, 121 bp, synthetic construct
  misc_feature 1..121: note = Description of artificial sequence: synthetic polynucleotide sequence
  source 1..121: mol_type = other DNA
gtcagatatgcaagaatccaaaagtttgatgacataccctactggcatgactgtgaagagtcagagacttgcatgcattgttagcaagaatgcagagtggtataacccctatggaactttt

SEQ ID NO: 246 - DNA, 121 bp, synthetic construct
  misc_feature 1..121: note = Description of artificial sequence: synthetic polynucleotide sequence
  source 1..121: mol_type = other DNA
ggggaatgtgatctctcgcctggaaaactcttaggatgcttttcttattcctcctctgcggagactctttgtgtgagcactcattttcctagggtgaggccaggtttggacccctgaacct

SEQ ID NO: 247 - DNA, 121 bp, synthetic construct
  misc_feature 1..121: note = Description of artificial sequence: synthetic polynucleotide sequence
  source 1..121: mol_type = other DNA
aaacataacttgcaccagctagtcctctgcagtgtacagcagtgtagaggaaggacaagaaatggatggagacaagcataattaataatggctgacgttttcaaagatgttcccaagtcta

SEQ ID NO: 248 - DNA, 121 bp, synthetic construct
  misc_feature 1..121: note = Description of artificial sequence: synthetic polynucleotide sequence
  source 1..121: mol_type = other DNA
agcctattacatgctaccaaagacacagcgatgattaagtggtgccccacctctgaggcgagcatgggagacaaagccagcaccactcactgaccacaatgtggggaggagtccagaggca

SEQ ID NO: 249 - DNA, 121 bp, synthetic construct
  misc_feature 1..121: note = Description of artificial sequence: synthetic polynucleotide sequence
  source 1..121: mol_type = other DNA
tactttcaggtcctcaaaatataagctcatctcatttatacccacttggccaaagtctcgggcttgatgaggatgttaaagtaggtcttcttcaactgctcagttatcattgtaaagacag

SEQ ID NO: 250 - DNA, 121 bp, synthetic construct
  misc_feature 1..121: note = Description of artificial sequence: synthetic polynucleotide sequence
  source 1..121: mol_type = other DNA
tggtggcccagtaatttgcatttctaacaagcctcacctgggaacaagggtcgggcccacactttagcaattattggagtagagtgcagattgagtcaggcgtcaaggtcttctatgaatg

SEQ ID NO: 251 - DNA, 121 bp, synthetic construct
  misc_feature 1..121: note = Description of artificial sequence: synthetic polynucleotide sequence
  source 1..121: mol_type = other DNA
gaacctgaacaatctcaacagtgacatgcaggtgataatacccacttggaacagtcgtcttgaagatcgaatgaggtcatagatacacaatgcctggcacatagtaggtgttcactgaatg

SEQ ID NO: 252 - DNA, 121 bp, synthetic construct
  misc_feature 1..121: note = Description of artificial sequence: synthetic polynucleotide sequence
  source 1..121: mol_type = other DNA
ccaggtggatacggtgagaaaaggcaatctaggaggatgggacatcaagtgcaaaagctcagagaagagcgagcaaggcatgctggggtctgcatgcagccagagggctggaaccctgatg

SEQ ID NO: 253 - DNA, 121 bp, synthetic construct
  misc_feature 1..121: note = Description of artificial sequence: synthetic polynucleotide sequence
  source 1..121: mol_type = other DNA
ataggggaaattagctaattccggaatgtctttgatccttggtttcctcctctgtaaatggaatcctgtctggaagagtacccggaacatggcagcaccttttcattcaccgctttgtgcc

SEQ ID NO: 254 - DNA, 121 bp, synthetic construct
  misc_feature 1..121: note = Description of artificial sequence: synthetic polynucleotide sequence
  source 1..121: mol_type = other DNA
tggaatacagcccctgactcccaggccagtgctcatctcatctcctgacactgcacttccccaggactctctccccaaactctgcatgtccttggctgcaaacaggctgagtttctcacta

SEQ ID NO: 255 - DNA, 121 bp, synthetic construct
  misc_feature 1..121: note = Description of artificial sequence: synthetic polynucleotide sequence
  source 1..121: mol_type = other DNA
aaaaaacctgaatggcggggggagggggtcagggggtggtgacagtggtgatggcaatgtgcctctttgtttaattagctgcactggcagtttttggagacaactggatgtgttttcctaa

SEQ ID NO: 256 - DNA, 121 bp, synthetic construct
  misc_feature 1..121: note = Description of artificial sequence: synthetic polynucleotide sequence
  source 1..121: mol_type = other DNA
gggatgttatttaacctccaatgaatcttttgctagcatttttcctcctcctcatgagatccagttgagtcccttgcagttgcagcattagtcactatcataggtctcaggataattaaca

SEQ ID NO: 257 - DNA, 121 bp, synthetic construct
  misc_feature 1..121: note = Description of artificial sequence: synthetic polynucleotide sequence
  source 1..121: mol_type = other DNA
gttcccgttttggggtgttttagaacggccttttgcttccttgttcatgtggaaaaattatcatcatcctcagtgctctgctgcatggcacagcacagtcccttctcctgtgtcctgaggc

SEQ ID NO: 258 - DNA, 121 bp, synthetic construct
  misc_feature 1..121: note = Description of artificial sequence: synthetic polynucleotide sequence
  source 1..121: mol_type = other DNA
cccctgagatccccaactgagcacttgtaaatacttacaggttactccaaggcagtttcattcctctaatcctgactcttacctcaactgtgccccttgccaacaggaagaagctagggtc

SEQ ID NO: 259 - DNA, 121 bp, synthetic construct
  misc_feature 1..121: note = Description of artificial sequence: synthetic polynucleotide sequence
  source 1..121: mol_type = other DNA
ttatagagttactacaataattgtcttttactgcctctacttcctatgatgacattacagttacactttcttccccaccactgtactgaaattaaaaaaataataataaaatggatttcct

SEQ ID NO: 260 - DNA, 121 bp, synthetic construct
  misc_feature 1..121: note = Description of artificial sequence: synthetic polynucleotide sequence
  source 1..121: mol_type = other DNA
accaactagctgctgccttagaatattttagtaaaaacagagagttggtatgttgttcctaagagtgatggagaacttggtgagggagcagaaatgatgaacttagggctttaaatatcca

SEQ ID NO: 261 - DNA, 121 bp, synthetic construct
  misc_feature 1..121: note = Description of artificial sequence: synthetic polynucleotide sequence
  source 1..121: mol_type = other DNA
gatccacctctcaccctgggcaattgacttcttggcttaattctatgtttctaaaatagtccccaagaccactagatttgatgacttgctaggaggtttcataggactcagcatacagtta

SEQ ID NO: 262 - DNA, 121 bp, synthetic construct
  misc_feature 1..121: note = Description of artificial sequence: synthetic polynucleotide sequence
  source 1..121: mol_type = other DNA
ctcttttgagtgactgtcaccatattcttgcagaccccctttcagatcatagctaggtgcgccatgggtaagcatattactcaagctgagccccttgatttttttttcttttttgtttata

SEQ ID NO: 263 - DNA, 121 bp, synthetic construct
  misc_feature 1..121: note = Description of artificial sequence: synthetic polynucleotide sequence
  source 1..121: mol_type = other DNA
ttattcatgcttcttattttaaaagtgcttcaaatccttcaataaggttctgaaagcttgtccgattggatggttggaattcccagcatttcctcataagttgataaacctgtaaaaagaa

SEQ ID NO: 264 - DNA, 121 bp, synthetic construct
  misc_feature 1..121: note = Description of artificial sequence: synthetic polynucleotide sequence
  source 1..121: mol_type = other DNA
gatacctcatctggacagttaggtgggcacggcaggcgttttccttcttttaacgtattcacaagtcttgtgactgtcatctggccatgggttgggcctatcattttcaggaacaactata

SEQ ID NO: 265 - DNA, 121 bp, synthetic construct
  misc_feature 1..121: note = Description of artificial sequence: synthetic polynucleotide sequence
  source 1..121: mol_type = other DNA
acagccatgggactagaatctgaatcacagtaagtcagcagctcatgcagagtgactccaaaagaccagacgtcagaggcaatataaaatttagattgcattaaacattctggagcatacc

SEQ ID NO: 266 - DNA, 174 bp, synthetic construct
  misc_feature 1..174: note = Description of artificial sequence: synthetic polynucleotide sequence
  source 1..174: mol_type = other DNA
ccaaaacacagggctgtcccggtcatccttgacggtgtaatactccttatcggtttcaattgctttggttaaaccgaagtctccaattttcacttggtgttcactctcaacaaggacatttcttgctgccaagtcccggtgaacgtattgccgagaacccaaatagtccatccc

SEQ ID NO: 267 - DNA, 121 bp, synthetic construct
  misc_feature 1..121: note = Description of artificial sequence: synthetic polynucleotide sequence
  source 1..121: mol_type = other DNA
tacaaatctgaacggcatattttagctgctgtttgaggtttattttgttcttattctttggaagatattccttaaggcttcccgaaggcagaaattccatgatgagcttaataccatttcc

SEQ ID NO: 268 - DNA, 194 bp, synthetic construct
  misc_feature 1..194: note = Description of artificial sequence: synthetic polynucleotide sequence
  source 1..194: mol_type = other DNA
ccgtcttctgtgcagattcctttgtacttcacaatgttctcatgatagaggttccttaagatctcgatttcctttttcagatcagctatgtggttacctccactctcaggcttcagagatttaacagccacctgctcccctgtattgtccccttcggggtcatacctgcagagctcaaccttcccaaagtggcc

SEQ ID NO: 269 - DNA, 249 bp, synthetic construct
  misc_feature 1..249: note = Description of artificial sequence: synthetic polynucleotide sequence
  source 1..249: mol_type = other DNA
tggatggcggagggctctgccatcagcagcaagcagcacgggtgtaacttacctctcccaagtcacggatcctctttaggaagcgcttttcaaaatgtgtggggtccacttcagttgctggttttttttctgaaacaatatctggatctaacagaagagaaaagaaaacagagtgaaaggcagtcgattgccagggattgccacccaggctcctgtttctccccaagctgggttaaagcagcacatggc

SEQ ID NO: 270 - DNA, 152 bp, synthetic construct
  misc_feature 1..152: note = Description of artificial sequence: synthetic polynucleotide sequence
  source 1..152: mol_type = other DNA
ctctgctcttcaagcttattaatgtctctcatgatggctcggaagaaaggcctctgattggggtcatagttcatgcagcgggtcatgaggtcagccagctccttacatgatggtgtcactggcctgcaccggctttcatagaatctctcttt

SEQ ID NO: 271 - DNA, 153 bp, synthetic construct
  misc_feature 1..153: note = Description of artificial sequence: synthetic polynucleotide sequence
  source 1..153: mol_type = other DNA
cctcaatcagcgtcttgtctttcaaggggatctcgccattgtagcagatttcccagagcgtggttccaaagctccacttgtcagcagccacactcaggttcttggagtcctcaacacactcaggagcaatccatgggattcgttcaatgcatt

SEQ ID NO: 272 - DNA, 137 bp, synthetic construct
  misc_feature 1..137: note = Description of artificial sequence: synthetic polynucleotide sequence
  source 1..137: mol_type = other DNA
ccttgcctagacagcaccgtaatggggatgccggggtcactgagcttgatgaatgggccacactcactgtcgatgccctcacgggccaggaggaggtttttagtacacacatttccatggaccaggtctttatcctc

SEQ ID NO: 273 - DNA, 121 bp, synthetic construct
  misc_feature 1..121: note = Description of artificial sequence: synthetic polynucleotide sequence
  source 1..121: mol_type = other DNA
gtagctcagggcactggccagctgtttggcaactttgaatttccatggtgtggtaaggacatcgcttttccggtgcatgaagagatccagaggacccccttccacaaactcttccaccatg

SEQ ID NO: 274 - DNA, 121 bp, synthetic construct
  misc_feature 1..121: note = Description of artificial sequence: synthetic polynucleotide sequence
  source 1..121: mol_type = other DNA
aaagagaacacacttactctccacgtcgcggacacagacgccatagaggtacacgatgtgtttgtgggagacctgtctcatcatgctggctgcctcgaagaaggcctgtgggcgagcagga

SEQ ID NO: 275 - DNA, 145 bp, synthetic construct
  misc_feature 1..145: note = Description of artificial sequence: synthetic polynucleotide sequence
  source 1..145: mol_type = other DNA
ccagggaaatatccctgtggctggggtctaagactttgaggatcacttttatcttcttctcttcagaagttccttcgtcatccttgtaatccatcagggtcccagaatagatgtgtgttctcgtgcctctcccaaggtgctcgcc

SEQ ID NO: 276 - DNA, 121 bp, synthetic construct
  misc_feature 1..121: note = Description of artificial sequence: synthetic polynucleotide sequence
  source 1..121: mol_type = other DNA
gactcacctgcaccagatccttcttgaggatccgatcgaaactcagctggctcatggggtagacgggctgccactcctgggctttcttagtagccaccagcaggttggagatttctgtgga

SEQ ID NO: 277 - DNA, 191 bp, synthetic construct
  misc_feature 1..191: note = Description of artificial sequence: synthetic polynucleotide sequence
  source 1..191: mol_type = other DNA
cctcggggcttgggctggcagcagcgttttagcatgaagctgatgttatccgtgcgcaggatctgcttcttgaggtggctcatgaggtctcccaagctggggaagctgcggtccgaaccgtgcagactgtagcggcccttctgcacctcgatctgaaagttcttgaactgcttctgggcaccctgcacctg

SEQ ID NO: 278 - DNA, 121 bp, synthetic construct
  misc_feature 1..121: note = Description of artificial sequence: synthetic polynucleotide sequence
  source 1..121: mol_type = other DNA
tcagacttctcaaagcaggtgacggtcatgaggatgttgtcaaagtcggtgcagctccacctcagcacgtacatcccctcctcgcttccttcttgccgcaatttattgatggcgtattctg

SEQ ID NO: 279 - DNA, 159 bp, synthetic construct
  misc_feature 1..159: note = Description of artificial sequence: synthetic polynucleotide sequence
  source 1..159: mol_type = other DNA
ccagattggaccatgacagccattctgtatgttgtggacgatcaacgggggggccacgtcggtgcagaggtaatgatgggcatctgctgtgagccggaagtagccatctaccagggacacaaaggacaaggcctcctcgtgggaagagagcttcagttc

SEQ ID NO: 280 - DNA, 187 bp, synthetic construct
  misc_feature 1..187: note = Description of artificial sequence: synthetic polynucleotide sequence
  source 1..187: mol_type = other DNA
ccattttcttgttgtcctgcttgttaatgctgaccacagactcctttattacaatgtgagtgatttcagggaagtaagaaaaattgttccactcttcccggatcttgtttttctcctcatccttcttgtgtttattttccagttttttccgcttcagtttatttttttccttttcaacagaaacaac

SEQ ID NO: 281 - DNA, 344 bp, synthetic construct
  misc_feature 1..344: note = Description of artificial sequence: synthetic polynucleotide sequence
  source 1..344: mol_type = other DNA
catttggtttatgcctccactggattccaagattcccagtcaccatcacttcgtagtagagaacgtttccaccgtcattcgaatgaaaccaattcatctcattttctgatgaaatcagtaacatggaagtctcaaatatttcagcaccgtaatgttttgtcaaagtttccaaggtagccaagtatttcaccttcaggtcatgcgtggacacgctgctgtcacaaatggtcttgttgttaaattcctttaggaaatccttgaaaacattatttatccgcatcctggtgagaaggttcctctgtctgatggacttattcaatgtttctggaatatatcgcttgtag

SEQ ID NO: 282 - DNA, 165 bp, synthetic construct
  misc_feature 1..165: note = Description of artificial sequence: synthetic polynucleotide sequence
  source 1..165: mol_type = other DNA
cctgatgtccttgggcagttctggcaactgcatcttcttcatcatggcatagtgtgagatggccaggacagccatccctagacactcgttctcaatatcatgtccatcctgctcggtcttggggtctcgaataggagccaggcatttcaccaaatcatactgtcc

SEQ ID NO: 283 - DNA, 155 bp, synthetic construct
  misc_feature 1..155: note = Description of artificial sequence: synthetic polynucleotide sequence
  source 1..155: mol_type = other DNA
cctgagcaaacagatactccagtgagctggcatcaaggagaggggttgcatctggaatcttttttttctcgtagccatttttctgcttctttggagaatgacgccacactgactgctcattgtcgttggttccatgccaattggtgaaatagaac

SEQ ID NO: 284 - DNA, 121 bp, synthetic construct
  misc_feature 1..121: note = Description of artificial sequence: synthetic polynucleotide sequence
  source 1..121: mol_type = other DNA
tcatccggtagtggagccggagggacatcttgtcatcaacggtgatggtgcgatttggagcataccagagcttggtgttctcgtcatacagggcaaagaggttgtgacaaagaggagagat

SEQ ID NO: 285 - DNA, 200 bp, synthetic construct
  misc_feature 1..200: note = Description of artificial sequence: synthetic polynucleotide sequence
  source 1..200: mol_type = other DNA
cggcatgcctgtgcagccctgatgcacagttcctctgctgtgtactctccactgcccagccggaggggctccctgtccgacagatagaagatcacttccacccctggctcaggggcctccaggttcacctcagtcttcttggagctcctcattttagcacagaaagccatggcattgcagtcctcttttatatttagata

SEQ ID NO: 286 - DNA, 121 bp, synthetic construct
  misc_feature 1..121: note = Description of artificial sequence: synthetic polynucleotide sequence
  source 1..121: mol_type = other DNA
catcaatttttttaaagccagatattttccttttttaaaaatatgcaaatctacatacctgcatttattcagctgtccagtgttctccaagaagcaaactggattttcttctctactttcc

SEQ ID NO: 287 - DNA, 121 bp, synthetic construct
  misc_feature 1..121: note = Description of artificial sequence: synthetic polynucleotide sequence
  source 1..121: mol_type = other DNA
ccagattgctgcagatactaatgatatcaaagcctggatatccatagccttgatttatggtgattttcaacaccagtcaattagaatgcatttcaagaaaagactgtgttcagagaaatcg

SEQ ID NO: 288 - DNA, 121 bp, synthetic construct
  misc_feature 1..121: note = Description of artificial sequence: synthetic polynucleotide sequence
  source 1..121: mol_type = other DNA
aaacatattataccaagaaaacagaagaatgtacttcaagatgtagctattgccaggttgtatgaattttaggggatttttagtgttgttttctatgtactctggtagttgtgagtttttc

SEQ ID NO: 289 - DNA, 121 bp, synthetic construct
  misc_feature 1..121: note = Description of artificial sequence: synthetic polynucleotide sequence
  source 1..121: mol_type = other DNA
tctggggaaacttctggcaaatgggagttgaaagagagtttctatattacttgcattttgtcacttgcattttggaaagatttcaatggctgctccgtgcagagtagattatagcgggcac

SEQ ID NO: 290 - DNA, 121 bp, synthetic construct
  misc_feature 1..121: note = Description of artificial sequence: synthetic polynucleotide sequence
  source 1..121: mol_type = other DNA
agggatcagcaatgtttgctgaagtcttccttaggatgtggaaaacctgacgatagtttcaaacatggagagagagagagatgcaatcacacaagtaatgctgacagacgagcatcaaagg

SEQ ID NO: 291 - DNA, 121 bp, synthetic construct
  misc_feature 1..121: note = Description of artificial sequence: synthetic polynucleotide sequence
  source 1..121: mol_type = other DNA
agcagtaacagtaatatttaagaaagatactttaaaaaatgtggctacagagatgtctcggaagttcaaagaaagagttccctgttggcacaagctactcacatttaactcaaacttcttc

SEQ ID NO: 292 - DNA, 121 bp, synthetic construct
  misc_feature 1..121: note = Description of artificial sequence: synthetic polynucleotide sequence
  source 1..121: mol_type = other DNA
cttagaagatcggacctgtgattctattcaaagtcagaaagagatttctcacaaattgacgtcatattaacatgtcaatatgaaaattaattgtttggtaaaccagaagtgacctgtctga

SEQ ID NO: 293 - DNA, 121 bp, synthetic construct
  misc_feature 1..121: note = Description of artificial sequence: synthetic polynucleotide sequence
  source 1..121: mol_type = other DNA
agcttgaccacctctcctttagctcccttccgcattctggaaaatgcttctccatttctgtagctccatggttaccatggaggcagccacgttgttttaagctactctgtgtcccaaccac

SEQ ID NO: 294 - DNA, 121 bp, synthetic construct
  misc_feature 1..121: note = Description of artificial sequence: synthetic polynucleotide sequence
  source 1..121: mol_type = other DNA
cattttctcccaattgtcttcttttgtctacagtgtgctcctaaaccagcagtctttggtgctgttaaggtcttccttgtaggtttttaaactaaagatctatctgggaaacagatttggg

SEQ ID NO: 295 - DNA, 121 bp, synthetic construct
  misc_feature 1..121: note = Description of artificial sequence: synthetic polynucleotide sequence
  source 1..121: mol_type = other DNA
ttgggatgctttctgtgtatatgtatgtttccctgttcattgtattgtagaaatagagctgaggtcaaaggctggaaagtcatcaggagaaaaaattggttgtggaagggcaacacttcgc

SEQ ID NO: 296 - DNA, 121 bp, synthetic construct
  misc_feature 1..121: note = Description of artificial sequence: synthetic polynucleotide sequence
  source 1..121: mol_type = other DNA
gtttattaaaaagctttagagcaggaaccaaaagaaggaaagtagacttggaagaaggccgagtgggtaacttgaaagacaagtgtgcagtttgacctttggacttggggttttatatgtt

SEQ ID NO: 297 - DNA, 121 bp, synthetic construct
  misc_feature 1..121: note = Description of artificial sequence: synthetic polynucleotide sequence
  source 1..121: mol_type = other DNA
ggcttacattgattacaatatgattgtagcctttatgcttggaaattatattaatttacatgaaagttctacagagccaaatgattccctatggttttcacttcaaaagaaaaatgacacc

SEQ ID NO: 298 - DNA, 121 bp, synthetic construct
  misc_feature 1..121: note = Description of artificial sequence: synthetic polynucleotide sequence
  source 1..121: mol_type = other DNA
gcacaacatggagaaccccaaagatccaggtggtgccgagaaggaacagaagagcgagggctcctcttgcacaagacctatcacatatgagaaatgcgtcagtgaagaaagctacgtatag

SEQ ID NO: 299 - DNA, 121 bp, synthetic construct
  misc_feature 1..121: note = Description of artificial sequence: synthetic polynucleotide sequence
  source 1..121: mol_type = other DNA
cagcgatgaagcctgctttatctgcttgatcgtggtggattagttttttgatgtgccaccaattcagtttgccagcattttgttgaggatttttgcattgatgttcatcaaggattattag

SEQ ID NO: 300 - DNA, 121 bp, synthetic construct
  misc_feature 1..121: note = Description of artificial sequence: synthetic polynucleotide sequence
  source 1..121: mol_type = other DNA
taatttagcctttcttggtgacacatttggaaatacataatgtgtgaaaacactgatacgggcatagaggcagatggcatgagcatgttgtcatccatcattcagccttctttttagacca

SEQ ID NO: 301 - DNA, 121 bp, synthetic construct
  misc_feature 1..121: note = Description of artificial sequence: synthetic polynucleotide sequence
  source 1..121: mol_type = other DNA
gaatattcatgaagtagtcaaggaactctgtctttaaggagtttctattttatgcatacctaattttgctaatagagaataataatgtaatataaataaaataagcaaaagcacatagtaa

SEQ ID NO: 302 - DNA, 121 bp, synthetic construct
  misc_feature 1..121: note = Description of artificial sequence: synthetic polynucleotide sequence
  source 1..121: mol_type = other DNA
aaactaacatactaattaaagataattcttatgtcagtaagaaaataaatggaagcattactgttttaagtccctttatgttttaaattatttaattataacaactatattaagatactga

SEQ ID NO: 303 - DNA, 121 bp, synthetic construct
  misc_feature 1..121: note = Description of artificial sequence: synthetic polynucleotide sequence
  source 1..121: mol_type = other DNA
aattcaagtaatattaactatgaggccacactgtgccacaaaagcaggaaacaagataggaggaaaccatctaaacatgtgttttataagaaatgacatatatgatgatgattagggaaca

SEQ ID NO: 304 - DNA, 121 bp, synthetic construct
  misc_feature 1..121: note = Description of artificial sequence: synthetic polynucleotide sequence
  source 1..121: mol_type = other DNA
ttcatatcctgtatcacttttttgatttatttaagttggacttcacctttctctagtgccttgttgattggcttaaaagttgactttctacattatttttctgacaattcagagattttat

SEQ ID NO: 305 - DNA, 121 bp, synthetic construct
  misc_feature 1..121: note = Description of artificial sequence: synthetic polynucleotide sequence
  source 1..121: mol_type = other DNA
ttcctaatttgtaccatgctttccacttttactagttctattccacatttattgcgattctcaggtcatttccttctgactacataaactgaaaaagccttcttgagaggaagaatggaaa

SEQ ID NO: 306 - DNA, 121 bp, synthetic construct
  misc_feature 1..121: note = Description of artificial sequence: synthetic polynucleotide sequence
  source 1..121: mol_type = other DNA
gtattttaacttaccttatttttatcctcctctttccaacttcatggtactcttgaaagtcaacagctcacaattacggtgacaatgagcagcctagcagccactggagatgacttaacag

SEQ ID NO: 307 - DNA, 121 bp, synthetic construct
  misc_feature 1..121: note = Description of artificial sequence: synthetic polynucleotide sequence
  source 1..121: mol_type = other DNA
aaaaatactaagcaaaagaaattgaaattacagaaaatataaattcaatcatcacactcaattattgtaagctttcctccctggcatttgaaatgaaacaaggatgtatattatcatcact

SEQ ID NO: 308 - DNA, 121 bp, synthetic construct
  misc_feature 1..121: note = Description of artificial sequence: synthetic polynucleotide sequence
  source 1..121: mol_type = other DNA
ttaaactaagtgacaatgaaaatacaacatgtctaaattttgtgctgctatagtactaccaccacagacttggtaatttacaatgaacagacactgattggctcctggttcaagaggctgc

SEQ ID NO: 309 - DNA, 121 bp, synthetic construct
  misc_feature 1..121: note = Description of artificial sequence: synthetic polynucleotide sequence
  source 1..121: mol_type = other DNA
ttcttccaattagtggtactgaaaagctgcggagaagatggaaaggagaaaaaaaaatcgatgtgtctattaacatttgccatttttgctggccagcaaggtcacgaagaagaacttttct

SEQ ID NO: 310 - DNA, 121 bp, synthetic construct
  misc_feature 1..121: note = Description of artificial sequence: synthetic polynucleotide sequence
  source 1..121: mol_type = other DNA
taatatacaggcagttaacattttcttggtatctagtctggctcaggcactaggatattaactgataccacaaggatcaatgattacatggtgtctaactttgagatcacagtaatagaaa

SEQ ID NO: 311 - DNA, 121 bp, synthetic construct
  misc_feature 1..121: note = Description of artificial sequence: synthetic polynucleotide sequence
  source 1..121: mol_type = other DNA
gacagtctattttcaagaggcagtcaacaacaccccttaaaaatctgcaaagaaccctacgatagtttcccatttctttcagaacaaaagccaaagtcctcaccatgtcctgagaagccac

SEQ ID NO: 312 - DNA, 121 bp, synthetic construct
  misc_feature 1..121: note = Description of artificial sequence: synthetic polynucleotide sequence
  source 1..121: mol_type = other DNA
agaggcacagcatggctcccaaaaggccaactacaagtcaaaggctatgcatcatcatgctttgacttttcaccatcaaaattcatctatcagtgagacacagatcatatgactaatcttg

SEQ ID NO: 313 - DNA, 121 bp, synthetic construct
  misc_feature 1..121: note = Description of artificial sequence: synthetic polynucleotide sequence
  source 1..121: mol_type = other DNA
aatatcctaacctattatctctaagtataataattacactttattttactttttaaacttgagagcatatggagtggtgagaacttcttgtgtgccagaggctttgaaggaatgtgttgtt

SEQ ID NO: 314 - DNA, 121 bp, synthetic construct
  misc_feature 1..121: note = Description of artificial sequence: synthetic polynucleotide sequence
  source 1..121: mol_type = other DNA
gttcttattaaaaagtctcctgaacattaaaaaactcctagaaatatatgtgttttgaaaatactaacgcacaaaaaaagaaaggcaactaacatatactcctggggagttgaagtaccag

SEQ ID NO: 315 - DNA, 121 bp, synthetic construct
  misc_feature 1..121: note = Description of artificial sequence: synthetic polynucleotide sequence
  source 1..121: mol_type = other DNA
caccttgaagggcaatgtgaacttaatgaaaatatgctgattcaagttaaagatgtttccgttatgagcaagggcattgaaggttaaccctgaccttctcagggaaattgctatgctgtgt

SEQ ID NO: 316 - DNA, 121 bp, synthetic construct
  misc_feature 1..121: note = Description of artificial sequence: synthetic polynucleotide sequence
  source 1..121: mol_type = other DNA
aattcttactatcccagctaaaatagtaatacagagttactatatttcaaattggcttattggtgtgaatgtgtgtgtgtgcatgtgtgtgtgtggtgtatggtatttgttttctctgaca

SEQ ID NO: 317 - DNA, 121 bp, synthetic construct
  misc_feature 1..121: note = Description of artificial sequence: synthetic polynucleotide sequence
  source 1..121: mol_type = other DNA
acgctatgacatagtcgaaacatctttcatatttaaccacctcttctttttggtgttccgtgttgctaaatatattttctaatccttcctaattcaattaaatgagttagctgccacccaa

SEQ ID NO: 318 - DNA, 121 bp, synthetic construct
  misc_feature 1..121: note = Description of artificial sequence: synthetic polynucleotide sequence
  source 1..121: mol_type = other DNA
taagtcttattatttaaaaatattgttctttttgataaatactttttgagtatgccacactataccataaaagacactgaaatgcaaaacagttattttagatcatagtaaattaccattt

SEQ ID NO: 319 - DNA, 121 bp, synthetic construct
  misc_feature 1..121: note = Description of artificial sequence: synthetic polynucleotide sequence
  source 1..121: mol_type = other DNA
taatcttccataaaatgttgaagcatgtctctctgctttttggcgcacctctaaccaggtctacaccttgatgatgatgacatttttaagccaaatgtgggccgaacacacagtttatagg

SEQ ID NO: 320 - DNA, 121 bp, synthetic construct
  misc_feature 1..121: note = Description of artificial sequence: synthetic polynucleotide sequence
  source 1..121: mol_type = other DNA
ataatttttaaaaccttagcactagaaatgaatacatatttataatggcaccagaaataagttagaccaaacaataaaacagagtaaaggaaaaagagagacacacacgattggctttagt

SEQ ID NO: 321 - DNA, 121 bp, synthetic construct
  misc_feature 1..121: note = Description of artificial sequence: synthetic polynucleotide sequence
  source 1..121: mol_type = other DNA
aaagggaattatatagatcctgtggagaattttaaatctaaaatttatctttttcatggtcattcaatagccgttttgtgagtaggagaaagaacattctaagtttaggaaaaagtatata

SEQ ID NO: 322 - DNA, 121 bp, synthetic construct
  misc_feature 1..121: note = Description of artificial sequence: synthetic polynucleotide sequence
  source 1..121: mol_type = other DNA
gatccatggctacttctccagtagaaacgacatggacgctcagaggagcagaatacatatcaaatgtggatacatttatgatttaaggcattggcaatgaaagatatataaataattgtat

SEQ ID NO: 323 - DNA, 121 bp, synthetic construct
  misc_feature 1..121: note = Description of artificial sequence: synthetic polynucleotide sequence
  source 1..121: mol_type = other DNA
gaatttgtgtagctcaaggagcatccactatagcaaccttcctgtgatccaggtcttgatgccacactccatttttgatttgtacattctcctccaacctgatttggtttaatttcttcag

SEQ ID NO: 324 - DNA, 121 bp, synthetic construct
  misc_feature 1..121: note = Description of artificial sequence: synthetic polynucleotide sequence
  source 1..121: mol_type = other DNA
gaattccttacgttgtactttgcaaagaaaccgaggtatcggatgactccaagccacacgagcatggtagaagtcccaagaagtatgctacagacatcataactagttagactctaagaga

SEQ ID NO: 325 - DNA, 121 bp, synthetic construct
  misc_feature 1..121: note = Description of artificial sequence: synthetic polynucleotide sequence
  source 1..121: mol_type = other DNA
tccacttctgcagcttcttgactgtcactgccggcggcctgaggaaggaggggccttcctggcggtctcctttgccactgcgtatcacagaggaccccgctggatccctgaaagggcttcc

SEQ ID NO: 326 - DNA, 357 bp, synthetic construct
  misc_feature 1..357: note = Description of artificial sequence: synthetic polynucleotide sequence
  source 1..357: mol_type = other DNA
gtcattgtcgtgaaacagtacgtgatcttaagggaagaaacatctcactagagtttgcacaagttccttcttcttctaactgtagatctggtggcaaaggaggagcccctgggtccccaggtctgggaagtgtagttgaagagaagatggtattttcagttctgcctacttctagaacaggcaaattcagagaagaattagtagaaaaaaagggcgtcgtgctggattctccttctggatggtacatgacagtggatgccctcagtttttcagagaaattactctcatctgaatttgatctggagaggttgttcgtggctccatctggaaaaggttcacaactgctacattttagtc

SEQ ID NO: 327 - DNA, 290 bp, synthetic construct
  misc_feature 1..290: note = Description of artificial sequence: synthetic polynucleotide sequence
  source 1..290: mol_type = other DNA
cctttcagatgttctagttttatatttctaagtttcagcacttcatctgtaatcttctgtatcaggaagttctgtgttttttctcgccgaatagattcaacaagggtgtccagaccttttgggttttcctgtaagtagtctaacaattttccagccctttttctacttgatgttcgacaagaaatttcttcagtgtcttctctactgagtattttttttgcacgtagatgatcaaaatgtctctcagctatgattttctcacacaggtatacacgtaaattttctaaggc

SEQ ID NO: 328 - DNA, 121 bp, synthetic construct
  misc_feature 1..121: note = Description of artificial sequence: synthetic polynucleotide sequence
  source 1..121: mol_type = other DNA
ccgcccgccctgggcacagctgcgttactcacgtccttcttcacttcagtgaggtcctcctcggtgagggacggtgcggtgggctccatggtggaggcgggagatggcgcttcttccgggt

SEQ ID NO: 329 - DNA, 121 bp, synthetic construct
  misc_feature 1..121: note = Description of artificial sequence: synthetic polynucleotide sequence
  source 1..121: mol_type = other DNA
tggaaaggcccacaaaaaattctctgcctgtaatagatgtcatggaacatagtgagcaggtggcaccagtgactgtacatcatttcttttatctataaataatgaccttaaagcatcacac

SEQ ID NO: 330 - DNA, 121 bp, synthetic construct
  misc_feature 1..121: note = Description of artificial sequence: synthetic polynucleotide sequence
  source 1..121: mol_type = other DNA
atctgcagaggtaagatgcttgtggtttggcccctttaaaaaaaatactagtccccatagtccagaagtttagtaattctgagaccatgtatggtgatgctttgttgttggtagcttggca

SEQ ID NO: 331 - DNA, 121 bp, synthetic construct
  misc_feature 1..121: note = Description of artificial sequence: synthetic polynucleotide sequence
  source 1..121: mol_type = other DNA
ctagccaatgaactcagggccagaaaggatggccaatactgcttacccattggaacaaaatattaaagtacctttgggccttgaattcctgggcttcctggcaagcctgatgaacccttta

SEQ ID NO: 332 - DNA, 121 bp, synthetic construct
  misc_feature 1..121: note = Description of artificial sequence: synthetic polynucleotide sequence
  source 1..121: mol_type = other DNA
ggagtcctgggtcacctgtttggccctaaaatggggggggaggatcaaagtataaacataaacttaataaacacaattaaaagaagaaacaggcatatggtaaacaaatagcagtcagtca

SEQ ID NO: 333 - DNA, 121 bp, synthetic construct
  misc_feature 1..121: note = Description of artificial sequence: synthetic polynucleotide sequence
  source 1..121: mol_type = other DNA
aatttacactttttcatatttacataaaattaatggtataaacattaccttgtctccaggatacccgggttctcctagctctcctgctgtgccttgttcaccctggaaagcacaatttcat

SEQ ID NO: 334 - DNA, 121 bp, synthetic construct
  misc_feature 1..121: note = Description of artificial sequence: synthetic polynucleotide sequence
  source 1..121: mol_type = other DNA
ataatatgttaagccatgctaatacttacactgttcattttgcaaacaagttgattttgttcttcatttttctttctaagctcagtttccagatctaatattttaatttgtaaagcactct

SEQ ID NO: 335 - DNA, 121 bp, synthetic construct
  misc_feature 1..121: note = Description of artificial sequence: synthetic polynucleotide sequence
  source 1..121: mol_type = other DNA
agtacaagtattcttgatctcagagacaagttcaatgaatctcttcaagtgaatactactgctctcatcccaaaggaagccaactctgaggaagtctttttgtttaaaccagaaaacatta

SEQ ID NO: 336 - DNA, 121 bp, synthetic construct
  misc_feature 1..121: note = Description of artificial sequence: synthetic polynucleotide sequence
  source 1..121: mol_type = other DNA
acctcagtacaatattgtggtctgtctcccccttgcatttgccatttaagttgactatacagctaagaactaactataattttccttcacaggcccatcaccttcgctgtctgaatgactt

SEQ ID NO: 337 - DNA, 121 bp, synthetic construct
  misc_feature 1..121: note = Description of artificial sequence: synthetic polynucleotide sequence
  source 1..121: mol_type = other DNA
gtaaaagcttagaggcttttttacacttaaattgattaagcaacttacatttttaccttatctcaactaaaccatccaatggaaggaatatactagaaaacagtacctttttggtttcaaa

SEQ ID NO: 338 - DNA, 121 bp, synthetic construct
  misc_feature 1..121: note = Description of artificial sequence: synthetic polynucleotide sequence
  source 1..121: mol_type = other DNA
aaaactttttctatgaaaagatttaccctaagtcgaactgagtataaggtgtgactattggattcttgaactaaaatttgaccctgtcttcacctttgttctcagctccacagtctggatt

SEQ ID NO: 339 - DNA, 121 bp, synthetic construct
  misc_feature 1..121: note = Description of artificial sequence: synthetic polynucleotide sequence
  source 1..121: mol_type = other DNA
tatgatgcatattttattagagaaaagcactaaatatagttaatgaaaaagaaggatcatcattaacaccttggtctataagctttctaagcttttttatatatacagtttgaatatccct

SEQ ID NO: 340 - DNA, 121 bp, synthetic construct
  misc_feature 1..121: note = Description of artificial sequence: synthetic polynucleotide sequence
  source 1..121: mol_type = other DNA
attcaccatctcacatagttacctttctttttttacagtacaagtacctaaaatctaccgtcttagcaaatttccagtatacaatatagtattattaactatggccctcatgttgcacatt

SEQ ID NO: 341 - DNA, 121 bp, synthetic construct
  misc_feature 1..121: note = Description of artificial sequence: synthetic polynucleotide sequence
  source 1..121: mol_type = other DNA
gctgctttttccttacccttctactgtaaattctaggagaggtaaaactttttaataggttatgagagagcagcctttagaactaggaagaggaatgagcatttgaaatatattttcaaga

SEQ ID NO: 342 - DNA, 121 bp, synthetic construct
  misc_feature 1..121: note = Description of artificial sequence: synthetic polynucleotide sequence
  source 1..121: mol_type = other DNA
aaaacagtctctctttgtgctagttagaaaacatatgtgaatgtactagcactcagcttgtagtgataaccttgttagtgtctatataactgcatgtaaccactcagcatgacatcctttt

SEQ ID NO: 343 - DNA, 121 bp, synthetic construct
  misc_feature 1..121: note = Description of artificial sequence: synthetic polynucleotide sequence
  source 1..121: mol_type = other DNA
gtagatttgtagtagaatttttagaggtttccttcttgcaaagcaaatctcatattgtggttcatttaccattaaggtccagaaatatcctgaattggacaactatcagagtagttacacc

SEQ ID NO: 344 - DNA, 121 bp, synthetic construct
  misc_feature 1..121: note = Description of artificial sequence: synthetic polynucleotide sequence
  source 1..121: mol_type = other DNA
tgttgttgttgtggttgttatcgttttacttgagtagaagaaactcagccctacaaaactagtccttggatttataaggaaattttaaaaggcaggaaataaatgagaattataattcaca

SEQ ID NO: 345 - DNA, 121 bp, synthetic construct
  misc_feature 1..121: note = Description of artificial sequence: synthetic polynucleotide sequence
  source 1..121: mol_type = other DNA
taaacactcataagttataatgttctgtagcttttaatgttttagctactaatatttcacgttaattctcataagaacactgtaaggaaaacaggacaggtattatattaaatatatagat

SEQ ID NO: 346 - DNA, 121 bp, synthetic construct
  misc_feature 1..121: note = Description of artificial sequence: synthetic polynucleotide sequence
  source 1..121: mol_type = other DNA
ctccagatactccaaataatgaccctcgttgttctactagcaacaatagattgaaggccttacaaaaacaattggatatagaacttaaagtaaaacaaggtgcagagaatatgatacagat

SEQ ID NO: 347 - DNA, 121 bp, synthetic construct
  misc_feature 1..121: note = Description of artificial sequence: synthetic polynucleotide sequence
  source 1..121: mol_type = other DNA
ttggtacctatttttaagtgcttatttccagaatatacaagccattcataaacctcatcgctgatgcagagtgtgtcatatttgatgcaaaggtcagcaattacttgcagttcctctctgt

SEQ ID NO: 348 - DNA, 121 bp, synthetic construct
  misc_feature 1..121: note = Description of artificial sequence: synthetic polynucleotide sequence
  source 1..121: mol_type = other DNA
tggcagacaggatttccagagcttctgaattcaccaccagatgccctttagtgttctcagtgaggcacactgggcctggcatgtggatctctgatgccatgttcagggcgttcctctgtct

SEQ ID NO: 349 - DNA, 121 bp, synthetic construct
  misc_feature 1..121: note = Description of artificial sequence: synthetic polynucleotide sequence
  source 1..121: mol_type = other DNA
tggagaatgcagtgataactctggcccagcgtgagaactcagcggccgtgcagagggcagctgactactacagccagcagatggcccagcgagtgaagctccccacagacacgctccagga

SEQ ID NO: 350 - DNA, 121 bp, synthetic construct
  misc_feature 1..121: note = Description of artificial sequence: synthetic polynucleotide sequence
  source 1..121: mol_type = other DNA
tatctgaaacagataatagtcaaagtcattttgtttgtgctcatcataacttatgttccatattttttaacccacatcactcttgaaatcgactgttcagttgatgtgcaggcttttacag

SEQ ID NO: 351 - DNA, 121 bp, synthetic construct
  misc_feature 1..121: note = Description of artificial sequence: synthetic polynucleotide sequence
  source 1..121: mol_type = other DNA
tctaaaacttgaaatcattaagaacgtaatgataccagccaccattgcacagctagacaatcttcaagagctctctctgcaccagtgttctgtcaaaatccacagtgcggcgctctctttc

SEQ ID NO: 352 - DNA, 121 bp, synthetic construct
  misc_feature 1..121: note = Description of artificial sequence: synthetic polynucleotide sequence
  source 1..121: mol_type = other DNA
gttactgtagatgatcacatgatgaaggtagagacagttcattgcagcgcttgcagtgtttatatccctgctttacatagttcagttcagcagcacttaaaatctcctgatcatatcaaag

SEQ ID NO: 353 - DNA, 121 bp, synthetic construct
  misc_feature 1..121: note = Description of artificial sequence: synthetic polynucleotide sequence
  source 1..121: mol_type = other DNA
ttcagtggcttttactggaatccaggaaagccctgatacaactctaataatcaccctccgaatgcaggtcatccatggtaagtgtgactggcctccccagtaaggtttcctattccatcct

SEQ ID NO: 354 - DNA, 121 bp, synthetic construct
  misc_feature 1..121: note = Description of artificial sequence: synthetic polynucleotide sequence
  source 1..121: mol_type = other DNA
tagaatttagagatagtttaaatacaggaagaatagcttctgctatagagaaagccaacacatttccttatagttacaaaatgtgttcggtaatatcttcccattatatgtgtgttttatt

SEQ ID NO: 355 - DNA, 121 bp, synthetic construct
  misc_feature 1..121: note = Description of artificial sequence: synthetic polynucleotide sequence
  source 1..121: mol_type = other DNA
aaaagacatatacttccacaaaattatcacctccagtgatctgatctaattctgtcaaatggcttctgttataaagttttcccttaaggatcccttaattatgacttcactctcttccttg

SEQ ID NO: 356 - DNA, 121 bp, synthetic construct
  misc_feature 1..121: note = Description of artificial sequence: synthetic polynucleotide sequence
  source 1..121: mol_type = other DNA
gctggtcaagatgtctcatgaggtggcattaagcttcggaccagaactgcatagtcccaacttacaaagaatcagcttccaagcttgcttatatggttattgacgtactattggactgagg

SEQ ID NO: 357 - DNA, 121 bp, synthetic construct
  misc_feature 1..121: note = Description of artificial sequence: synthetic polynucleotide sequence
  source 1..121: mol_type = other DNA
aaatcccaaatgaaatagctaatatgtttcaaagcaaagtatgaagaaactgatcagatttggcaatataggcatatacctgcatcggagaatgtaaacctcgtcagcaccatgaggtaat

SEQ ID NO: 358 - DNA, 121 bp, synthetic construct
  misc_feature 1..121: note = Description of artificial sequence: synthetic polynucleotide sequence
  source 1..121: mol_type = other DNA
agctgaagcctatttataggtagctttatttctgaaaagacaataaaatatctaagaaacagaaaatatttacctgttccactttaagttcatattttggtagatacatcacagtttcttt

SEQ ID NO: 359 - DNA, 121 bp, synthetic construct
  misc_feature 1..121: note = Description of artificial sequence: synthetic polynucleotide sequence
  source 1..121: mol_type = other DNA
tcaaagactgtggatgtactgtctagaaagttagcaacaaaaaagaaggctatttctacaaaagttatgaatagtgctgtgatgaggaaaactgccagttcttgcccagctagcctgacct

SEQ ID NO: 360 - DNA, 121 bp, synthetic construct
  misc_feature 1..121: note = Description of artificial sequence: synthetic polynucleotide sequence
  source 1..121: mol_type = other DNA
aagacaggcttgaagacaaagctgaatcgcttcttatccatgtcagcttgcgggataggaaagtgcactctcttgggactgtagaatttcacagattcatctttaggacaaatattctcaa

SEQ ID NO: 361 - DNA, 121 bp, synthetic construct
  misc_feature 1..121: note = Description of artificial sequence: synthetic polynucleotide sequence
  source 1..121: mol_type = other DNA
atatgattaatgctataatctatataattatttttagaaaatgaagaatgaatgcataccgcctgaaggaagaacaggcgtcacacaggtaatgcttaaaatgtgttttaaagaacagggg

SEQ ID NO: 362 - DNA, 121 bp, synthetic construct
  misc_feature 1..121: note = Description of artificial sequence: synthetic polynucleotide sequence
  source 1..121: mol_type = other DNA
aaagaatgaaagtcaggtatttttaaatgtgaccttgtgaaaataccttatttctgtaaataatgctgcatctttatatcttcttccagactacctccaaaccatacatagatagcatttg

SEQ ID NO: 363 - DNA, 121 bp, synthetic construct
  misc_feature 1..121: note = Description of artificial sequence: synthetic polynucleotide sequence
  source 1..121: mol_type = other DNA
ccggcagcccgcttcgggccgtacagcgcggccgggtggccaggctccggggcgggttcgcagaagaggcccaggccagcgccacgctccagggccccacacggtcggtagctctgcacca

SEQ ID NO: 364 - DNA, 121 bp, synthetic construct
  misc_feature 1..121: note = Description of artificial sequence: synthetic polynucleotide sequence
  source 1..121: mol_type = other DNA
gcttcacttaattgagtaaggagtcctttgttctgtgcagaaagatactgcactttctcctgtaggctaatcacctcttgttctgctcttcgaagatggttactattgatctggttctaat

SEQ ID NO: 365 - DNA, 121 bp, synthetic construct
  misc_feature 1..121: note = Description of artificial sequence: synthetic polynucleotide sequence
  source 1..121: mol_type = other DNA
cagactgttggtgtaattgtgcaaactcgatcactagctctgcgtgatgtggcagaagcgaagggaaccaggtttgcaaaagtaactgtggtgatggaaatgtgttagcctcagacactac

SEQ ID NO: 366 - DNA, 121 bp, synthetic construct
  misc_feature 1..121: note = Description of artificial sequence: synthetic polynucleotide sequence
  source 1..121: mol_type = other DNA
atttctccagaagtgtcagagtcgtttttaaagtatagaattgtgtttaaaattttagccttcactctttcacatttttttccctctaatgtagaggggtggtgcacttaagaaaggacca

SEQ ID NO: 367 - DNA, 121 bp, synthetic construct
  misc_feature 1..121: note = Description of artificial sequence: synthetic polynucleotide sequence
  source 1..121: mol_type = other DNA
cttcaaatgcagagcattcttcacttttattcattatctctttttaaattttagagctgaacgacaaaggaatgaagcactatataatgccgaagagctgagtaaagctttccaacaatat

SEQ ID NO: 368 - DNA, 121 bp, synthetic construct
  misc_feature 1..121: note = Description of artificial sequence: synthetic polynucleotide sequence
  source 1..121: mol_type = other DNA
agtggctgaaaaactggaaaaggtaaaaggcagttgtgcaaattcagtgttttgtattactgtctatattccaacagtaaaggtaggaataattaaaatatgtttatggttgagacagaga

SEQ ID NO: 369 - DNA, 121 bp, synthetic construct
  misc_feature 1..121: note = Description of artificial sequence: synthetic polynucleotide sequence
  source 1..121: mol_type = other DNA
gcagttaaaagaagaaaataacaacggaaaagaaaaattaaggatcatggcagtgaaaaattcagaagtcatggcacaactaactgaatctagacaaagtattttgaagctagagagtgag

SEQ ID NO: 370 - DNA, 121 bp, synthetic construct
  misc_feature 1..121: note = Description of artificial sequence: synthetic polynucleotide sequence
  source 1..121: mol_type = other DNA
tatactggtattctaccttaggacaaaaatttacttttgcttccttcttactattttgactacaccaagttctccctcatgcaaaagaaaaaattactcttttcaactttctttaccaaaa

SEQ ID NO: 371 - DNA, 121 bp, synthetic construct
  misc_feature 1..121: note = Description of artificial sequence: synthetic polynucleotide sequence
  source 1..121: mol_type = other DNA
cattagccaccacagaatgggccattttcacctggtattctccttggagagcaaataacgattccttcaagctaaaaacctccccaagaggctagacaggcaccatcccaggcctgagaaa

SEQ ID NO: 372 - DNA, 121 bp, synthetic construct
  misc_feature 1..121: note = Description of artificial sequence: synthetic polynucleotide sequence
  source 1..121: mol_type = other DNA
ctctcatttacagatgaggaaatgagtctctgaaagttgagtgtcgtgacctttcatacagttcagaagtggcagaggtagaggtggaagttaggctggctctaaagcctgtgcccttagc

SEQ ID NO: 373 - DNA, 121 bp, synthetic construct
  misc_feature 1..121: note = Description of artificial sequence: synthetic polynucleotide sequence
  source 1..121: mol_type = other DNA
ttctttttctccttgatctgtgttagggttctcttgttagactgtagtttatctgcattaaaattaatatacaaaccacccaactgcttgatactcagaccagggtctatgctgctgcttg

SEQ ID NO: 374 - DNA, 121 bp, synthetic construct
  misc_feature 1..121: note = Description of artificial sequence: synthetic polynucleotide sequence
  source 1..121: mol_type = other DNA
tggcttggatctgtcagagatttagccttacttcttctggctcctgtagttttttctgtaggaagcacaattctagaaatacctgaaacatgagattctgcttcagacactatttcttcag

SEQ ID NO: 375 - DNA, 121 bp, synthetic construct
  misc_feature 1..121: note = Description of artificial sequence: synthetic polynucleotide sequence
  source 1..121: mol_type = other DNA
caaagaagtaccagatctggggccctacttcttcccaggctttgaccaacttcctaacgtgttccagttcttcaaaagttgagttggcctaaaaccagacagagatcaagacagagacacg

SEQ ID NO: 376 - DNA, 121 bp, synthetic construct
  misc_feature 1..121: note = Description of artificial sequence: synthetic polynucleotide sequence
  source 1..121: mol_type = other DNA
cgttgtctagttctaaaggggaaaaatttcctgaaaacaaaaatatcaaggtaagtatatgttaaatgtgatcacatcataactccaaacaaagaagcactgagatcctaagatactagtc

SEQ ID NO: 377 - DNA, 121 bp, synthetic construct
  misc_feature 1..121: note = Description of artificial sequence: synthetic polynucleotide sequence
  source 1..121: mol_type = other DNA
aacctaatgtaaagaaaattgatgagtctgtgcatttgatgggattcctaggtcagcaccatgtcgtgaagacattttctgagatagtgagtttgctcaaaatgtcactccaacttttaaa

SEQ ID NO: 378 - DNA, 121 bp, synthetic construct
  misc_feature 1..121: note = Description of artificial sequence: synthetic polynucleotide sequence
  source 1..121: mol_type = other DNA
gccaaattgacacattataaaattgctcatagaaccctatgagcatagagttgacaacaatacccattaaaacataatttattacttgtaaaagggttacttaggtgttgcgaggaaaata

SEQ ID NO: 379 - DNA, 121 bp, synthetic construct
  misc_feature 1..121: note = Description of artificial sequence: synthetic polynucleotide sequence
  source 1..121: mol_type = other DNA
ctgcggtaggagagttcctgacaagttctaggaattgtgaggagaccaatgcctttggagcagaggcactgagtctccctcagtaatgggaactcaaagagtaggaggagccaggttgcat

SEQ ID NO: 380 - DNA, 121 bp, synthetic construct
  misc_feature 1..121: note = Description of artificial sequence: synthetic polynucleotide sequence
  source 1..121: mol_type = other DNA
cttcacgttccaccaggctccgttttatatcagcatctgcaggggtgtggggcactgtgcgctcagccctttggccaggctctcatatgcccccgtttttgccaggtgtttatcatgggct

SEQ ID NO: 381 - DNA, 121 bp, synthetic construct
  misc_feature 1..121: note = Description of artificial sequence: synthetic polynucleotide sequence
  source 1..121: mol_type = other DNA
ctgtgtgttctgcttccagggtccttcctgtgtgtttatagtttgaattccttcaactatacccacagtccaaaagcagactcactgtgtcccaggctaccagttcctccaaggtaaaagc

SEQ ID NO: 382 - DNA, 121 bp, synthetic construct
  misc_feature 1..121: note = Description of artificial sequence: synthetic polynucleotide sequence
  source 1..121: mol_type = other DNA
atgcttccaggtataacttgttcagaatgttctgtgtcttgtcaggattaaattttattgcaaagaatctaaaatctttgtgtgtattttgtttaatttcagggtagtatccacatgccat

SEQ ID NO: 383 - DNA, 121 bp, synthetic construct
  misc_feature 1..121: note = Description of artificial sequence: synthetic polynucleotide sequence
  source 1..121: mol_type = other DNA
ggtatctcgattaactctgaacagttgaccagggcccagtgtgtgactgtgaaagagaatttacttgagcaagcagagagccttttgtcggagcctatggttcatgagctggttctctgga

SEQ ID NO: 384 - DNA, 121 bp, synthetic construct
  misc_feature 1..121: note = Description of artificial sequence: synthetic polynucleotide sequence
  source 1..121: mol_type = other DNA
gtgccagggcagatgtcttcattccatatagagaatgcctagggtatcaaagttaggtcgagttctgatcattattgtgagaatacagatgaatttttaattggtcacagttttggtgaaa

SEQ ID NO: 385 - DNA, 121 bp, synthetic construct
  misc_feature 1..121: note = Description of artificial sequence: synthetic polynucleotide sequence
  source 1..121: mol_type = other DNA
gaacactggacacattgcaggttcatttttagaactgatcaacagccaaggaaaatgcaagatgagtgaactgatctatctttatacataaacacaaggcgtttaacctgcctgaacagtt

SEQ ID NO: 386 - DNA, 121 bp, synthetic construct
  misc_feature 1..121: note = Description of artificial sequence: synthetic polynucleotide sequence
  source 1..121: mol_type = other DNA
ttcccactgataggttctatggctttggtgagattacttaacctcttttcataacaggattaatagcagtgtttaatatttcaaaaggcagttaaagtgtctagcacaggacttgacacac

SEQ ID NO: 387 - DNA, 121 bp, synthetic construct
  misc_feature 1..121: note = Description of artificial sequence: synthetic polynucleotide sequence
  source 1..121: mol_type = other DNA
tatcattcttgtagtggtggcttagcaggagctagaagcccattcaatgttaaagtacaaagtaaacacttcctgtagatattgaaataaatgttttccattttactctaattcaattctg

SEQ ID NO: 388 - DNA, 121 bp, synthetic construct
  misc_feature 1..121: note = Description of artificial sequence: synthetic polynucleotide sequence
  source 1..121: mol_type = other DNA
tatttatagggctaatgttggcctagaataaaccttattctagacttaccttaaaattccggaaacaagctttgaaaggatcaaactaattctcaagtaattcagctgttcttaaagaaat

SEQ ID NO: 389 - DNA, 121 bp, synthetic construct
  misc_feature 1..121: note = Description of artificial sequence: synthetic polynucleotide sequence
  source 1..121: mol_type = other DNA
gtacctaggttcctaccttcaggcatcccttagcgcagtggagtagacagattgttatacggtataaaagagagaaaattgtattttcctttgagtagtaaaagtagtcttaatggcttga

SEQ ID NO: 390 - DNA, 121 bp, synthetic construct
  misc_feature 1..121: note = Description of artificial sequence: synthetic polynucleotide sequence
  source 1..121: mol_type = other DNA
ttaataaatggagatagaagaaagaaaataatcaaatatgaagacaataagttaacgaccatgctaagtgttcgtttctcaaaatcaaagtcaacttgcattcaatcttatcttcccagac

SEQ ID NO: 391 - DNA, 121 bp, synthetic construct
  misc_feature 1..121: note = Description of artificial sequence: synthetic polynucleotide sequence
  source 1..121: mol_type = other DNA
gatggactatcctaaaaagttttagagccaaagagtgagtgattagaagaataacaggaggttgaaactacttattttttctttgcagaatcgtcactgaggttgcagttggcgtgaaggt

SEQ ID NO: 392 - DNA, 121 bp, synthetic construct
  misc_feature 1..121: note = Description of artificial sequence: synthetic polynucleotide sequence
  source 1..121: mol_type = other DNA
atttggaatcttttccatagcacaatctttctctgcatattctaaggaaatggagttgcattggaaacaaaggatctggcttatgtattttctgaggtgctatgacccttggtcataattc

SEQ ID NO: 393 - DNA, 121 bp, synthetic construct
  misc_feature 1..121: note = Description of artificial sequence: synthetic polynucleotide sequence
  source 1..121: mol_type = other DNA
aaatggaataaaaattgccttacacaatggaatggaagcaaaggaaaacagaaaaatgaggtgatgaggaaaatgggactgctataaatatggagtaaaaaagcatacaggattcaggcta

SEQ ID NO: 394 - DNA, 121 bp, synthetic construct
  misc_feature 1..121: note = Description of artificial sequence: synthetic polynucleotide sequence
  source 1..121: mol_type = other DNA
caataggtctgattgctgtccctacacaaaatcagaataatcaatggttagcacactgaccacttgagtatactgtcttatattacttctattactatgatgtgatgacagcgtcactgga

SEQ ID NO: 395 - DNA, 121 bp, synthetic construct
  misc_feature 1..121: note = Description of artificial sequence: synthetic polynucleotide sequence
  source 1..121: mol_type = other DNA
aagtagtatttcttagtaaaaaaaatccattataatgtttataccttaattaaaatatatgatagacatttctatatgacttcaataatattttcttaccttatcaagagagaaagttttg

SEQ ID NO: 396 - DNA, 121 bp, synthetic construct
  misc_feature 1..121: note = Description of artificial sequence: synthetic polynucleotide sequence
  source 1..121: mol_type = other DNA
tcttcgaatcattgatgtgctggtggctggagttgcgctagcaagaccaaaaggatttataaacttcaatccggccatttctacactaatgtccaccagatcaataggagtgtaaaagagg

SEQ ID NO: 397 - DNA, 121 bp, synthetic construct
  misc_feature 1..121: note = Description of artificial sequence: synthetic polynucleotide sequence
  source 1..121: mol_type = other DNA
gttcttatcaggatttcttttccaatgtttcttgtctaatttcttggccgaagtggaacgcagagttgcatgagtttgtgttcgaggatttaaagccaggatactctaaagacagcataaa

SEQ ID NO: 398 - DNA, 121 bp, synthetic construct
  misc_feature 1..121: note = Description of artificial sequence: synthetic polynucleotide sequence
  source 1..121: mol_type = other DNA
aatgagaatggttgagttcttaaaagaagcaagtaaagaagaggatttgtgggctactaatctcattcagtgaatctcatacgacccttgcctagtgttaaatatgttaatgaattcatgt

SEQ ID NO: 399 - DNA, 121 bp, synthetic construct
  misc_feature 1..121: note = Description of artificial sequence: synthetic polynucleotide sequence
  source 1..121: mol_type = other DNA
gagcggaacttctgcaatatggaaagactagaggcttgcattctcacctgtttgttcacgttcaatttatttttatgcctgtaagcagagaacaaattataaagtgacttgcatcatacaa

SEQ ID NO: 400 - DNA, 121 bp, synthetic construct
  misc_feature 1..121: note = Description of artificial sequence: synthetic polynucleotide sequence
  source 1..121: mol_type = other DNA
aggaaggaaatatgaatattaggaatgttttttcgaagtgtactctatagtagctagcataaaattcagatgtattcttagtccaaatgaatgtttaaatttactatcacatagtcttaat

SEQ ID NO: 401 - DNA, 121 bp, synthetic construct
  misc_feature 1..121: note = Description of artificial sequence: synthetic polynucleotide sequence
  source 1..121: mol_type = other DNA
tgaaaaataaaaaatagcagtatacatatatacactaatatagtttggagtgagagggaatgaataaatgaataatgaacactcaggaaaacaaaaactgggctggcacagtggctcacac

SEQ ID NO: 402 - DNA, 121 bp, synthetic construct
  misc_feature 1..121: note = Description of artificial sequence: synthetic polynucleotide sequence
  source 1..121: mol_type = other DNA
aaggccactgaaaagcggatgtctggactctcagaggccctgcttcctgttgtacatgagtacgtgctttatagtgaaatgttaatggtaagaacacctaattctaattttacctcagtcc

SEQ ID NO: 403 - DNA, 121 bp, synthetic construct
  misc_feature 1..121: note = Description of artificial sequence: synthetic polynucleotide sequence
  source 1..121: mol_type = other DNA
atacagactaagacaacaaatttataatccttacttacggtcagatacatagctgcatagacactgagagctgcttctttggatggaaaggtttttcgggctctcatgatgagatctgggt

SEQ ID NO: 404 - DNA, 121 bp, synthetic construct
  misc_feature 1..121: note = Description of artificial sequence: synthetic polynucleotide sequence
  source 1..121: mol_type = other DNA
gtttggttaaatcactggttactataacctcaccaactttacacagaaaactaaccatcgtaccaagaaatgccaacagcacccagaagcaggaagagataaggaatgggtgcttccatag

SEQ ID NO: 405 - DNA, 121 bp, synthetic construct
  misc_feature 1..121: note = Description of artificial sequence: synthetic polynucleotide sequence
  source 1..121: mol_type = other DNA
caatctctaggagcctcagccctcagtaataacaccaaggatctgaaaataactaaattcagacttcaggtgacagacaacagttacataggttaagagattctgtgcctcctggttatac

SEQ ID NO: 406 - DNA, 121 bp, synthetic construct
  misc_feature 1..121: note = Description of artificial sequence: synthetic polynucleotide sequence
  source 1..121: mol_type = other DNA
ctcagtgtacaacattcttaacttctctgaacatcaattcccttctctcaatttccttcacataatgtatcctatgctattctcccaggattgttgtgaagattaaataaataatgttcca

SEQ ID NO: 407 - DNA, 121 bp, synthetic construct
  misc_feature 1..121: note = Description of artificial sequence: synthetic polynucleotide sequence
  source 1..121: mol_type = other DNA
gggaagactccaggccatcacagtaagtctgcatacagttataactcattaacgttgttacttagaggaaggcagaccgtggccggctgcccctgtcgctgagccctcgcaagtggaaaaa

SEQ ID NO: 408 - DNA, 121 bp, synthetic construct
  misc_feature 1..121: note = Description of artificial sequence: synthetic polynucleotide sequence
  source 1..121: mol_type = other DNA
caaaatgaatccacaaatactatataatttttcaaagcatatccacatttagattctattttttaaactgtattaatcatggagaattcttttttcttacagtctgtgaaagtggaaagag

SEQ ID NO: 409 - DNA, 121 bp, synthetic construct
  misc_feature 1..121: note = Description of artificial sequence: synthetic polynucleotide sequence
  source 1..121: mol_type = other DNA
ggggtaactcattcgactgtggagttcttttaattcttatgaaagatttcaaatcctctagaagccaaaatgggacacagtaaacagattcgaattttacttctgaacgaaatggagaaac

SEQ ID NO: 410 - DNA, 121 bp, synthetic construct
  misc_feature 1..121: note = Description of artificial sequence: synthetic polynucleotide sequence
  source 1..121: mol_type = other DNA
atgttgtgctagtggaagtacaagaggctatgatgaattagtgcctcatcaggtttgtttatatgttgtttcttaaaacctacatggccaacaactttgggcatttttattaaaaaaaatt

SEQ ID NO: 411 - DNA, 121 bp, synthetic construct
  misc_feature 1..121: note = Description of artificial sequence: synthetic polynucleotide sequence
  source 1..121: mol_type = other DNA
taagttctctaatagtggagtctcctttatattttctttcggttaagtctttattagccgcttctaactcagacagtctgttttgtagctggtggatgttttgttgatggaggatttctaa

SEQ ID NO: 412 - DNA, 121 bp, synthetic construct
  misc_feature 1..121: note = Description of artificial sequence: synthetic polynucleotide sequence
  source 1..121: mol_type = other DNA
agacatttgatgtggatgaatatgaacattatgaggtttgtacatttaattttttttacaaaacataatttcatgttgattaattttttccccctgtcacactcatgtattgcaaatcgag

SEQ ID NO: 413 - DNA, 121 bp, synthetic construct
  misc_feature 1..121: note = Description of artificial sequence: synthetic polynucleotide sequence
  source 1..121: mol_type = other DNA
ctcattcccattccacctccccacaggtagctcttctaatatattaaatgtgtacctttttgtttgcatgtgttcttgcaaaatgcatatttttgtgtacatcaaatttacataaataata

SEQ ID NO: 414 - DNA, 121 bp, synthetic construct
  misc_feature 1..121: note = Description of artificial sequence: synthetic polynucleotide sequence
  source 1..121: mol_type = other DNA
atcataactgattgtataactgcctgaagggaaaataatcaagcagttattatccatcatcctagaaactattgggcctataaatgaataaagccaagattcttttaagcaaattgcaacc

SEQ ID NO: 415 - DNA, 121 bp, synthetic construct
  misc_feature 1..121: note = Description of artificial sequence: synthetic polynucleotide sequence
  source 1..121: mol_type = other DNA
atggctctggtatgatggttaggacactttgtttcttcattttctactaggtttctgtcataattatttacttgagagaattaagttaaactatactgatttctgatgtcaacagactatg

SEQ ID NO: 416 - DNA, 121 bp, synthetic construct
  misc_feature 1..121: note = Description of artificial sequence: synthetic polynucleotide sequence
  source 1..121: mol_type = other DNA
tgcctttcccttctgtaacactaacagattgaattttgtttccaaagacttcaaaagctgccagattattgtgaaaggagaaacactgttttcgaaggctgctgataatgcctattagcca

SEQ ID NO: 417 - DNA, 121 bp, synthetic construct
  misc_feature 1..121: note = Description of artificial sequence: synthetic polynucleotide sequence
  source 1..121: mol_type = other DNA
aaacctacctgaaaatgcttggtcataagtgtctttcgatcatcttcaatctgccgaaattttgccttcagccctttcatttgggtttccatttttaaaacatattggaaatctctctgag

SEQ ID NO: 418 - DNA, 121 bp, synthetic construct
  misc_feature 1..121: note = Description of artificial sequence: synthetic polynucleotide sequence
  source 1..121: mol_type = other DNA
aggtctttacaagttcgggctggattggtctgagtacccattggaaatttcatatgctcaatgtcttgtttcagggaattgagggaaccaaatatttcttccattccatccgagtaatcaa

SEQ ID NO: 419 - DNA, 121 bp, synthetic construct
  misc_feature 1..121: note = Description of artificial sequence: synthetic polynucleotide sequence
  source 1..121: mol_type = other DNA
gcctctaaaaggttggcaacaagctttccctagaaaatcttcaatgtttccagcaatacatacaggctgccctggagctcctggagttccccttggacccagcaaacctcgtgggccctag

SEQ ID NO: 420 - DNA, 121 bp, synthetic construct
  misc_feature 1..121: note = Description of artificial sequence: synthetic polynucleotide sequence
  source 1..121: mol_type = other DNA
ataaatgaataatcaaatggattctcatgtgaaaaatgaggttttatgaatcaatcataacatttttacctcaacaggtcagagattgtcgtctggttggtcttcttgatcttgcactgga

SEQ ID NO: 421 - DNA, 121 bp, synthetic construct
  misc_feature 1..121: note = Description of artificial sequence: synthetic polynucleotide sequence
  source 1..121: mol_type = other DNA
tgcctgttctcaggatctcatgttctaatcagtgaagccagagctacactagtgaagaaatgagtatgtaatagaacagggattgataagagctcagtaggaaaaaaatatagagcaacat

SEQ ID NO: 422 - DNA, 121 bp, synthetic construct
  misc_feature 1..121: note = Description of artificial sequence: synthetic polynucleotide sequence
  source 1..121: mol_type = other DNA
gctgaaaataaccatgttattctgacaaacacagggggaaatctgtggactaatctgagattcctttaactggctattattattattattttgatatggagtctcgctttatcacccaggc

SEQ ID NO: 423 - DNA, 121 bp, synthetic construct
  misc_feature 1..121: note = Description of artificial sequence: synthetic polynucleotide sequence
  source 1..121: mol_type = other DNA
gggctaagtgcctgaaactgctgatatttgagcatcttagaacaacaaagcaccaattttatgtgattcaaccatcgaatcctcccaacagccttatatgaaggagttgttatcatccttg

SEQ ID NO: 424 - DNA, 121 bp, synthetic construct
  misc_feature 1..121: note = Description of artificial sequence: synthetic polynucleotide sequence
  source 1..121: mol_type = other DNA
gctgacctcccctcctctgctatcatgttgagaagatgcccttttgggttagaccctacaagactactggcttcagagatgggtacagggaacatcactttcctgcatggagtagaacaaa

SEQ ID NO: 425 - DNA, 121 bp, synthetic construct
  misc_feature 1..121: note = Description of artificial sequence: synthetic polynucleotide sequence
  source 1..121: mol_type = other DNA
accaagacccagacaacaaaatgtatgcatctaaattaggaaatggtgcactgccatgaatgagagaattgatctagctcagagataaatgccagtatatacaggcatacctcaaagatgt

SEQ ID NO: 426 - DNA, 121 bp, synthetic construct
  misc_feature 1..121: note = Description of artificial sequence: synthetic polynucleotide sequence
  source 1..121: mol_type = other DNA
ggggtctcggagcactgggttccagtccagacccagccatctattagctgcttgactttcattcatcagcaaacatttatagagtactgacatggtttggctgtgcctccacccaaaatct

SEQ ID NO: 427 - DNA, 121 bp, synthetic construct
  misc_feature 1..121: note = Description of artificial sequence: synthetic polynucleotide sequence
  source 1..121: mol_type = other DNA
atcatgtttattacagaaaaacaacccgaggacgacagctctcaggccttcatttcaacacagaatggatctccccgcctgaaccgggcagaggtcccagccaggcctgcaccccaggagc

SEQ ID NO: 428 - DNA, 121 bp, synthetic construct
  misc_feature 1..121: note = Description of artificial sequence: synthetic polynucleotide sequence
  source 1..121: mol_type = other DNA
acaacaaacgtcctagcatgtcctggcactcagcaggtcgggagaggaaaaggcgcagcaaagcagtgagcagctccatcttaacagctggaaatgtttccgacttcacattctcaacaaa

SEQ ID NO: 429 - DNA, 121 bp, synthetic construct
  misc_feature 1..121: note = Description of artificial sequence: synthetic polynucleotide sequence
  source 1..121: mol_type = other DNA
gcagcttgcggtcagccagctcctcatagggcacagggaagtggaagttctcatcaaaggtggggttcagggtcttgcggtgcacccgggtctgcagcttgcatttgcggtcaggcaggag

SEQ ID NO: 430 - DNA, 121 bp, synthetic construct
  misc_feature 1..121: note = Description of artificial sequence: synthetic polynucleotide sequence
  source 1..121: mol_type = other DNA
ctaaagagcaagagaagcagtttttgttttattttggctttgaaccatacctctagctgttgtaagagagattttcctttcttattaatttcattgataagggtgaaaatggccactttaa

SEQ ID NO: 431 - DNA, 121 bp, synthetic construct
  misc_feature 1..121: note = Description of artificial sequence: synthetic polynucleotide sequence
  source 1..121: mol_type = other DNA
tcttggttattccgtatgaactatccagaactctgaagttcagttctttttctgaagagtcacaatgttctaaagccaaatttaagagtttatctgggggaagtgcttctattttcttcca

SEQ ID NO: 432 - DNA, 121 bp, synthetic construct
  misc_feature 1..121: note = Description of artificial sequence: synthetic polynucleotide sequence
  source 1..121: mol_type = other DNA
gttacatcaccacacatggcaatcccatacaaccctgagtcccatcatcactgctgttgagttttttcattcggtactggcgtatttctcttaccagtgtgtaaaaagcatcttcaacacc

SEQ ID NO: 433 - DNA, 161 bp, synthetic construct
  misc_feature 1..161: note = Description of artificial sequence: synthetic polynucleotide sequence
  source 1..161: mol_type = other DNA
cctgtctggtcttggctgaggtttcaatgaatggaatcccgtaactcttggccagttcgtgggcttgttttgtatcaactgtccttgttggcaaatcacacttgtttcccactagcaccataggtacatcatccgagtcttttactcgcttaatctgctcc

SEQ ID NO: 434 - DNA, 180 bp, synthetic construct
  misc_feature 1..180: note = Description of artificial sequence: synthetic polynucleotide sequence
  source 1..180: mol_type = other DNA
cctgtagaggttaatatccgcaaatgacttgctattattgatggcaaatacacagaggaagccttcgcctgtcctcatgtattggtctctcatggcactgtactcttcttgtccagctgtatccagtatgtccaacaaacaggtttcaccatctataaccacttgttttctgtaagaatc

SEQ ID NO: 435 - DNA, 121 bp, synthetic construct
  misc_feature 1..121: note = Description of artificial sequence: synthetic polynucleotide sequence
  source 1..121: mol_type = other DNA
ctcacctctatggtgggatcatattcatctacaaagtggttctggattagctggattgtcagtgcgcttttcccaacaccacctgctccaaccaccaccagtttgtactcagtcatttcac

SEQ ID NO: 436 - DNA, 121 bp, synthetic construct
  misc_feature 1..121: note = Description of artificial sequence: synthetic polynucleotide sequence
  source 1..121: mol_type = other DNA
tagtcacttcactttctctctttctctcctccattctagtccccatataacatcctgagctatttggaaattaaattcactcaagaagttaggagtagaggagaattatatcaatttgata

SEQ ID NO: 437 - DNA, 121 bp, synthetic construct
  misc_feature 1..121: note = Description of artificial sequence: synthetic polynucleotide sequence
  source 1..121: mol_type = other DNA
cccctcgccccacttactgatccaagcacacattgcgactcccgcatggctccgcagcacccgaagaaccccacggccatcatcagggccccggctccaaccagaacatacagccctgtgg

SEQ ID NO: 438 - DNA, 121 bp, synthetic construct
  misc_feature 1..121: note = Description of artificial sequence: synthetic polynucleotide sequence
  source 1..121: mol_type = other DNA
gggcgctgcgggctctgcgaagggcagtgtcaagggaatgctgaagtttagtccagtgggcttgggggatggtgtgtcctgcagggacattgctctctgagtgtggttccgcctgtatgcc

SEQ ID NO: 439 - DNA, 121 bp, synthetic construct
  misc_feature 1..121: note = Description of artificial sequence: synthetic polynucleotide sequence
  source 1..121: mol_type = other DNA
gcaaggacatggaggacagcgtggggctggattgcaaacgctacctgggcctcaccgtcgcctcttttcttggacttctagttttcctcacccctattgccttcatccttttacctccgat

SEQ ID NO: 440 - DNA, 121 bp, synthetic construct
  misc_feature 1..121: note = Description of artificial sequence: synthetic polynucleotide sequence
  source 1..121: mol_type = other DNA
gcatgccctttggttacttacctcaagcacgatttctttcagttggaactgtttttgcgtgaccttatctgaagacaccggctcatggtagtagaggcaaagcaagtcatatttctttaaa

SEQ ID NO: 441 - DNA, 121 bp, synthetic construct
  misc_feature 1..121: note = Description of artificial sequence: synthetic polynucleotide sequence
  source 1..121: mol_type = other DNA
ctgacagccaacggcagtgagatccataagcacgtgcatttcagcagcagcttcacctccatcgcctcggaggtaacaacaggctgtttcaatcactaaataaatgtctctctttgtccac

SEQ ID NO: 442 - DNA, 121 bp, synthetic construct
  misc_feature 1..121: note = Description of artificial sequence: synthetic polynucleotide sequence
  source 1..121: mol_type = other DNA
accagtgagcattgttcttcttatttcccaatatttttctctttcttccagtcgtttggatttaacttgttggcctgttcaaattatcactggcagctgagcttcctccgtgctgagcagg

SEQ ID NO: 443 - DNA, 121 bp, synthetic construct
  misc_feature 1..121: note = Description of artificial sequence: synthetic polynucleotide sequence
  source 1..121: mol_type = other DNA
ttctgtagaagttcccgttacaaggaaacaggaattagtccttcagaactgaaaaactgatctttaatcaagccaacaaaggagtcagcctgaatggtggcagacacgaatttttggtttt

SEQ ID NO: 444 - DNA, 121 bp, synthetic construct
  misc_feature 1..121: note = Description of artificial sequence: synthetic polynucleotide sequence
  source 1..121: mol_type = other DNA
ctttttagtttttaaaataatttagttatgctgttgtcttcatcttctgttaccaatcaattggagctacaaaaaaaaatcatattattaacttgtaaaatgcagtaaatctgggctgcag

SEQ ID NO: 445 - DNA, 121 bp, synthetic construct
  misc_feature 1..121: note = Description of artificial sequence: synthetic polynucleotide sequence
  source 1..121: mol_type = other DNA
tgctgttgttctggcacagagtgcacagcctgcagtgtacttacttggttctgtctggttttctgtcacatttcagaatacctaaaaatgaagaaattgtcttctcaattaaagaactgaa

SEQ ID NO: 446 - DNA, 121 bp, synthetic construct
  misc_feature 1..121: note = Description of artificial sequence: synthetic polynucleotide sequence
  source 1..121: mol_type = other DNA
ttgttttaaaaagcatacataccattcatatacagcacaatacatgttgtaattactgctaatggtatgggtataagtgcatatctgtgtcttgaatgacctataaaaaagaaaagaaaag

SEQ ID NO: 447 - DNA, 265 bp, synthetic construct
  misc_feature 1..265: note = Description of artificial sequence: synthetic polynucleotide sequence
  source 1..265: mol_type = other DNA
ccgctgcttgggatacaggttgtcaaaatgattgatgatgttgtattaaataatggattgctaagagtacactgtattttttgtggaagatcattttccatcttaaaatatatactggttgagttacgtttacattgctccataggacaatcccatgagtacattataagtcctcgatggctgttgtaatgctctggtatcatgcattggacttcaatgcttccattagtcaatgcacaagttagtgtgggagatggaagagact

SEQ ID NO: 448 - DNA, 295 bp, synthetic construct
  misc_feature 1..295: note = Description of artificial sequence: synthetic polynucleotide sequence
  source 1..295: mol_type = other DNA
ccaagcacataaagaaagaacttcatggtatcagtaatatttggcgattccatttcatactcatcttcatctgatgatgttaagttgtagatagtgaggctacctgacacagtgtctaaataaaccctatttttaaaagatgagaaagctctgaattcagaattttccagttctgcaactttatccttttgttttttccataggacctcttttaaaggcacattgcttggtacatggaaagttacattcccatacacaacaccatatatttgttgggaaaaacagctgatgaaac

SEQ ID NO: 449 - DNA, 121 bp, synthetic construct
  misc_feature 1..121: note = Description of artificial sequence: synthetic polynucleotide sequence
  source 1..121: mol_type = other DNA
gggcccctggggcaggcttcactcaccaaagcagtgcagcaggcagaccacgctgaggacccccagggcccgccccgcgtcgctcccagcaaccatggctcgtcgggccggcctctgcgcg

SEQ ID NO: 450 - DNA, 121 bp, synthetic construct
  misc_feature 1..121: note = Description of artificial sequence: synthetic polynucleotide sequence
  source 1..121: mol_type = other DNA
attccttctgagggctgggcagccactcctccacatggcaggagtaattgcctgtatcttgggggcttgcctgcagcactgtgagccggtagagcaccggggagagcctctggaagcgaag

SEQ ID NO: 451 - DNA, 121 bp, synthetic construct
  misc_feature 1..121: note = Description of artificial sequence: synthetic polynucleotide sequence
  source 1..121: mol_type = other DNA
ggcaactggcaggaaatccaagaaaaggccgtggaagttgccaccgtggtgatccagccatcaggtgagctggaaacgatgcgttataggtgatgttattttgtgactaatgatagtgata

SEQ ID NO: 452 - DNA, 121 bp, synthetic construct
  misc_feature 1..121: note = Description of artificial sequence: synthetic polynucleotide sequence
  source 1..121: mol_type = other DNA
tggagcagaaggtgcagcagtgaaacacgcctgagtgtgggcggtgctttctcctcaccatcacagtgaatggcgagccctgcagtgttcagaccaaaagcaatgaacagcatcttacgag

SEQ ID NO: 453 - DNA, 121 bp, synthetic construct
  misc_feature 1..121: note = Description of artificial sequence: synthetic polynucleotide sequence
  source 1..121: mol_type = other DNA
cagcctctcccatcatcaacatcctgcatcagattggtatatttgttaaaactgatgagcctacctaggcacatcattatcacgcaaagcctatagtttaaattgaggttcactcttggtg

SEQ ID NO: 454 - DNA, 121 bp, synthetic construct
  misc_feature 1..121: note = Description of artificial sequence: synthetic polynucleotide sequence
  source 1..121: mol_type = other DNA
agatctttaaaatcctagcgagctgccctgatatccttttagcagctgtagtccttacagaattgtccaatttgttccttttaatgtttttgtatattttatatcagcctctgaaaagtat

SEQ ID NO: 455 - DNA, 121 bp, synthetic construct
  misc_feature 1..121: note = Description of artificial sequence: synthetic polynucleotide sequence
  source 1..121: mol_type = other DNA
ctagtgaaggtttgcacggacactgaccgctggagcctgatctccctctccaacaagaacgggaagaacgtggagctgaagtttgtcgactccattcggcgtcagtttgagttcagtgtgg

SEQ ID NO: 456 - DNA, 121 bp, synthetic construct
  misc_feature 1..121: note = Description of artificial sequence: synthetic polynucleotide sequence
  source 1..121: mol_type = other DNA
aagataactatactaactaatctgcaagaaagagcaaaacaatgttttccagaaacttcgttgacttctaagaaagttttcaagcatatgtgtgtgctgcttactgtgagtactcagggaa

SEQ ID NO: 457 - DNA, 462 bp, synthetic construct
  misc_feature 1..462: note = Description of artificial sequence: synthetic polynucleotide sequence
  source 1..462: mol_type = other DNA
ctcacgcataaacctgcatgttgttgtgtggtggctcagacatgtgtgtcccaggtccccgctgacctcctccagcacccccaggggtagggctggtggtcacatctgaccagtcagaagcagagtggggtgatgaacttgaccactggtcaggagactctggggatggtgtcaggtagggatgctcaccctggaggtgaccactgtgactgggtgttcgctcagcagcatttgaggaagcataactgtgctgtgaagggggtgtggggtacttgcccacagaggctgggaaaggatgataggctgggagaatggtctgagctacctgcccgtcctgctggggcatcatggcagtggggaaagccacactgggcaaacgggccatttctggaatctggtacatggtgggcagggggcccgcaacagctggagggcaggtggactgaggctggggagcccccg

SEQ ID NO: 458 - DNA, 461 bp, synthetic construct
  misc_feature 1..461: note = Description of artificial sequence: synthetic polynucleotide sequence
  source 1..461: mol_type = other DNA
ctggttgggcaatactgcctttagggatgagctggaaagtcacaatggggggcaagggctcccgaggggtggttatgtgcttcccttcaggtggcctgctctggggagctatgccaggatgggtgccctcagctggagccaggaccataccaaacatctcattgtactgggtctcattcacctccatgcggttcatccaatctgctgggactgggactggatggagcctactcaagcttccagcactgccactgcctggagacacaatgtggtggtgggatagcaactggctcactgagggaagcacagtgctggccccatgtgccaaaggctgcatttcatgaaggttagaaaaagatagtgcatgctgggcatggactggggcaggaggggcggcagtggccaacatagggttgggtgaggcctgtaagatcccaggggatgtaatcattggagaggat

SEQ ID NO: 459 - DNA, 467 bp, synthetic construct
  misc_feature 1..467: note = Description of artificial sequence: synthetic polynucleotide sequence
  source 1..467: mol_type = other DNA
gtggtgtcggaaacatacgtgtgaggagattctagggaatcaacaggggataaagttactgaactctcagacagttggaccttctcactcagagacttcttcctcctactacccttggcatcctttgcctccttggcaaggttagggaggctagtaggcatggtactcttggcactgggccgtctagacttcttgcccattggggtgtgcttcaggctgaggaaagatctgttgggcccacagatgacaggtgagagagcagaagtcaacacggtgcctggagggcttggggtcacattgtattcatccagaaggcgcacaatgtcatggtgcatgcgatcccgagccacatcccggggaagacgatccatatggtctgtgatgtctcgattggcaaaatggtctaacaggatcttggctgcttcatagctcccctcccgggcagcaagaaacagaggtgtctcttc

SEQ ID NO: 460 - DNA, 121 bp, synthetic construct
  misc_feature 1..121: note = Description of artificial sequence: synthetic polynucleotide sequence
  source 1..121: mol_type = other DNA
cacaaactgtaccttgttgtcctgcatgtctcggttggccccatttttcaacaacaaaagagttgcctccacattattgacagcagctgcccagtgaagagcagattttcctgcaggggag

SEQ ID NO: 461 - DNA, 149 bp, synthetic construct
  misc_feature 1..149: note = Description of artificial sequence: synthetic polynucleotide sequence
  source 1..149: mol_type = other DNA
ccatggtcatccactgcattcacatccgcttggcagttgatcagttctgccaccattccctccacagccaggcgggcagccaggatcaggggtgtagtaccatcattcatcctggcatctagatcagttactcggttgcgaatcagaat

SEQ ID NO: 462 - DNA, 303 bp, synthetic construct
  misc_feature 1..303: note = Description of artificial sequence: synthetic polynucleotide sequence
  source 1..303: mol_type = other DNA
cctggaagacaccttgggcatcagctgccactgcagcatggagtggacagcggcccatgttgtcctgggcattggcatctgcacctgcatccaggagacgcttggcagcatcagcccgtgagtagcgggctgcaaggtgcagggccatctcaccagtccggtctgtctgggcctggaggctggcaccctggtagaccaagtctgtgatgatgttagcagaagagtcctctgcatcttcatcttcatcactcaaatctgagctgcctcctcggagagaagccaacatcaatggggtgcagccat

SEQ ID NO: 463 - DNA, 170 bp, synthetic construct
  misc_feature 1..170: note = Description of artificial sequence: synthetic polynucleotide sequence
  source 1..170: mol_type = other DNA
cctgggccacggacattcacatctaacacatccacctcctgctctgcctgaggaggggtgagagccagcgatggtgtcctacggatgtctgcagcttcaaggtgctgctgtgtccatggccgtcgatcaatggggtcatcttcttctgagagtaaggcctcatcttcagc

SEQ ID NO: 464 - DNA, 121 bp, synthetic construct
  misc_feature 1..121: note = Description of artificial sequence: synthetic polynucleotide sequence
  source 1..121: mol_type = other DNA
tggccacctcacctttactttctttggctggggcccttcatcatcgacccagtgttcacttgttccagtaccaattaggttagcttctgagacttgcactgagagatttctaatatgatta

SEQ ID NO: 465 - DNA, 212 bp, synthetic construct
  misc_feature 1..212: note = Description of artificial sequence: synthetic polynucleotide sequence
  source 1..212: mol_type = other DNA
cttcagccccacagcatcctgtcccactggctcacgacgcttgtgattgcttgcatctcggcgaagagtgaaaccttcaggcagccagagagagccatgcttacgctttcgttttgccatgattacccccagcagaataataaacagaatgatgacaacagcaacagcaaggagatagaggagctgagtgcgttctggagtcagggattcac

SEQ ID NO: 466 - DNA, 144 bp, synthetic construct
  misc_feature 1..144: note = Description of artificial sequence: synthetic polynucleotide sequence
  source 1..144: mol_type = other DNA
ctgacgacagacacaagagggtatgacagggtcccctgtatggcgtgagaggccaggagagctgctgctgcatccgtgttcttgaagcagtggtctgagtcttgaacacactggcggttgtcaatttccagaaagactttagag

SEQ ID NO: 467 - DNA, 349 bp, synthetic construct
  misc_feature 1..349: note = Description of artificial sequence: synthetic polynucleotide sequence
  source 1..349: mol_type = other DNA
cccagccacctcctgttcttgttcaccaggaagggatctgcgtgtcatcctctgtttcttcatagcagctgacttctcaccataataggggtacaccatgagttccccctgggagtcccgcttaatgcgcaggttggtgtggagcagggtacccagtgcccgcaagaagctgcgagcatcctggagcagttgttcaggtggcatcaataccacaataaccagggtaccttctgccaggttctcaggttggtcagcagcacagtccagcccatcccaaccacactcctcactgttgcacccctggtcacagtggttgtctttgaagtggtctgcacagtatttgtcatac

SEQ ID NO: 468 - DNA, 193 bp, synthetic construct
  misc_feature 1..193: note = Description of artificial sequence: synthetic polynucleotide sequence
  source 1..193: mol_type = other DNA
cttgcatgtcttgctgttcccctggcattcaaagttgtcaaacaggcactcgaccgtgttgcacagctcatcacactggttgttgatataatcccagcagggaagtggggaggagcagttggcccaggggttctccatggtgagagaacagtcacccccatcccactggcaggcatggctgttgcaggcctca

SEQ ID NO: 469 - DNA, 314 bp, synthetic construct
  misc_feature 1..314: note = Description of artificial sequence: synthetic polynucleotide sequence
  source 1..314: mol_type = other DNA
tcacagacgccatcccgagctttgtcggcacaatactggctcagacaggtggcaggaggggtgctggggggtgccgtgtagagttcacagcggctacccgagaatggtggggcacactggcaggagtaataaggaggctggcgctgagggtggcagctgcccccgtgctggcaggggctactggcacagcctgactcgcagtcccggggactggggcagaagcagcggggtccagaggcggtgtgcacacactgctcccccttcctacatttcacttgtccacagctgctctggcaccttgccccggaaaatcc

SEQ ID NO: 470 - DNA, 121 bp, synthetic construct
  misc_feature 1..121: note = Description of artificial sequence: synthetic polynucleotide sequence
  source 1..121: mol_type = other DNA
ttaccgggggacaacggcaaatgaaaccatcaggcatgttactggccacagcacaagtccctccattcaggcagggcatctggggacacacatcgacgaaggtttcacagtgccggcctca

SEQ ID NO: 471 - DNA, 238 bp, synthetic construct
  misc_feature 1..238: note = Description of artificial sequence: synthetic polynucleotide sequence
  source 1..238: mol_type = other DNA
ccagtaaaggcactacggcaaacacacaggtagtcattggtgagctgtatacagtccaggctgccctcagagctgcaggggttggagaggcactcgttgatgtctccctcacaacgctccccagcaaagccaggcaagcagcgacaactgtagcctccaatcctatccatgcactgaccaccattaaggcaatggggaccccgggcacagtcatcaatgttctcttcacagagtaggc

SEQ ID NO: 472 - DNA, 187 bp, synthetic construct
  misc_feature 1..187: note = Description of artificial sequence: synthetic polynucleotide sequence
  source 1..187: mol_type = other DNA
tttataacttaagacaatgccctggatggaaaatggataaggatgatttcataccccgagtgcctggtgggcaagagcacttgaaatggttcacaaggtcaatacaggtgcctccattctggcagggctgattctggcactcatccacttcatactcacagttgacaccctgatagcctgggacaca

SEQ ID NO: 473 - DNA, 186 bp, synthetic construct
  misc_feature 1..186: note = Description of artificial sequence: synthetic polynucleotide sequence
  source 1..186: mol_type = other DNA
cctcgcatctgtatccaccaatgaagtcactgcatgttgccccgtgctggcaggggttggacgcacactcatcgagttgctcctcacagtagctcccagtatagcccagggggcactgacagtaatgcgtgttgccagcattgatgcagacacctgagtgctggcacaagtgttcaacaagcacac

SEQ ID NO: 474 - DNA, 155 bp, synthetic construct
  misc_feature 1..155: note = Description of artificial sequence: synthetic polynucleotide sequence
  source 1..155: mol_type = other DNA
cctctcctggaggctgctatgtcacaagagacattgggcacgtcacaataggcaccagcccatccagatggacataggcactgggactctgcttttttctgaacgcaagtacctttgtttttacatggagaccgactgcagagattcaccagggt

SEQ ID NO: 475 - DNA, 203 bp, synthetic construct
  misc_feature 1..203: note = Description of artificial sequence: synthetic polynucleotide sequence
  source 1..203: mol_type = other DNA
cctgacagtttttcccagtgtagcccagggggcagctgcagcggtaggtacccaggccatcaacacacgttccctcattcaggcatggatgagagctgcattcattgatctcatggaggcagaaggatccagtgaaacccacagggcacaagcaagagaaggagttaatcccatcaacacatgtgccaccattgaaacaggag

SEQ ID NO: 476 - DNA, 230 bp, synthetic construct
  misc_feature 1..230: note = Description of artificial sequence: synthetic polynucleotide sequence
  source 1..230: mol_type = other DNA
cctctcagtgcactcattgatgttgttctcacaatggactccatcaaatcctgcctggcacttgcaagtgtaactgttgacgtagtcagagcaggtccctccattcttacagggttcactcagacactcattcatgtctgtctggcacttatccccagtgaaacccggaaggcagaggcaggagaaagtattcactccatccatacaggaacctccattctggcaaggat

SEQ ID NO: 477 - DNA, 154 bp, synthetic construct
  misc_feature 1..154: note = Description of artificial sequence: synthetic polynucleotide sequence
  source 1..154: mol_type = other DNA
ctggcaaggcagtcatcaatgtcctcctcacagtccataccactgaagcctggtggacattcacacatgtagctgccctgggtgttatggcagagaccatggttcatgcagggcttggagatacactcgtcaatgtcaatggtacaccgctgac

SEQ ID NO: 478 - DNA, 121 bp, synthetic construct
  misc_feature 1..121: note = Description of artificial sequence: synthetic polynucleotide sequence
  source 1..121: mol_type = other DNA
ccttgccagccaggagcacacaagcaagtataactctcaaaatttggtgactctttgcaaacagcagcattctcacaagggtttggggaacagggagccaatactgtctgacaattcttgc

SEQ ID NO: 479 - DNA, 121 bp, synthetic construct
  misc_feature 1..121: note = Description of artificial sequence: synthetic polynucleotide sequence
  source 1..121: mol_type = other DNA
ccacctgtgtatggcagcacacagtggcaagtgtagccacttatgtcatcaaagcaggttccttggttcaggcatggatttgaggcacattcatcaatattcacctggcagttatagcctg

SEQ ID NO: 480 - DNA, 147 bp, synthetic construct
  misc_feature 1..147: note = Description of artificial sequence: synthetic polynucleotide sequence
  source 1..147: mol_type = other DNA
cctttaaagcccttcttgcaagtacacctgtatccattcaccagattgtcacaagttcctccattctggcatggattcgaaaggcattcatttttgtccacttcacagttgatgccaacccagcctgcatcacagagacacttatat

SEQ ID NO: 481 - DNA, 194 bp, synthetic construct
  misc_feature 1..194: note = Description of artificial sequence: synthetic polynucleotide sequence
  source 1..194: mol_type = other DNA
cccactgagacctccagtacagtttccatggatgcagggattgctcaggcattcgttcacctgtgagtagcagctggggtgatggggtccctcggggcatatacagcggaaaccattcacaccgttgatacatgttgcacccttgcgacagggattggaggcacactcatcaatgtcaatgttacatctctgcc

SEQ ID NO: 482 - DNA, 121 bp, synthetic construct
  misc_feature 1..121: note = Description of artificial sequence: synthetic polynucleotide sequence
  source 1..121: mol_type = other DNA
tttacctgtgaatcctggtgagcagacacaactgtagcgattaatgccatccatacagattccatggatacaagggttacttgcacagtcatcaaaattaatttcacaattaacccctgga

SEQ ID NO: 483 - DNA, 235 bp, synthetic construct
  misc_feature 1..235: note = Description of artificial sequence: synthetic polynucleotide sequence
  source 1..235: mol_type = other DNA
cctgacgtgcctggctggcagttgcactggtagccattgaccaggtcaatgcagcgaccatcgttcaggcaagggctgctgtaacattcatcaatctggtcactgcagatggcgcccatgtacccgggattgcagatgcaggtgtaggaatcaataccatcctgacactgaccatggtggcaaggatcggggtcacagttgtcaatgttctcctcacacaacacaccagtgaaac

SEQ ID NO: 484 - DNA, 121 bp, synthetic construct
  misc_feature 1..121: note = Description of artificial sequence: synthetic polynucleotide sequence
  source 1..121: mol_type = other DNA
ttacctgtggcacactggcattcatagccattcgggtgatcgatacactttgccccattcagacacggagtactggaacagtcatcaatatcaatctggcaaactggcccagtgaaacctc

SEQ ID NO: 485 - DNA, 121 bp, synthetic construct
  misc_feature 1..121: note = Description of artificial sequence: synthetic polynucleotide sequence
  source 1..121: mol_type = other DNA
ttaccaggaggacacaggcactggaaacgattgactttatccacacactgcccattgttcacacaagggttgctctgacattcatttatttctaattcacaatgcacacctttgaaaccta

SEQ ID NO: 486 - DNA, 190 bp, synthetic construct
  misc_feature 1..190: note = Description of artificial sequence: synthetic polynucleotide sequence
  source 1..190: mol_type = other DNA
cctggcatgcacagacatgtgaagcctccaatcttatccagacaggtagcatcattctggcaggggtctgaatggcactcattgatgtccatctcacaacgaggtcctgcataacccttcagacactcacagtggaaggcgccatccgtgttcacacattttcctgcatgctcacaaggattgctattgg

SEQ ID NO: 487 - DNA, 157 bp, synthetic construct
  misc_feature 1..157: note = Description of artificial sequence: synthetic polynucleotide sequence
  source 1..157: mol_type = other DNA
cccatggcacattcatccacatcttctgtgcagtcagcccctttgtagccttgtgggcaggtgcaaatatattgcccatttagggggttggtgtcacacagtgcccccttgtggcaaggattgctgatgcatgcatcatccagatgacacaggagac

SEQ ID NO: 488 - DNA, 235 bp, synthetic construct
  misc_feature 1..235: note = Description of artificial sequence: synthetic polynucleotide sequence
  source 1..235: mol_type = other DNA
cctgccttcccctctgggcacatgcaagagaaggaggccacacggtcgatgcaggtggagcctggagtacaggaggcgaaggcacaatcatcaatgttctcactgcagtcatctccactccagccgttgacacatacacagccatagcctccattgcggttggcacaggtgcccccattttgacaggcattgggctgcagcaggcattcatccacatcctctgtgcagaactgtc

SEQ ID NO: 489 - DNA, 121 bp, synthetic construct
  misc_feature 1..121: note = Description of artificial sequence: synthetic polynucleotide sequence
  source 1..121: mol_type = other DNA
tgtccattgtgggggacagcggcagttgtaagtgttgaccccatccacacaaacccctccattctgacacctgtggttagggcagtcatcaatattcctctcacaggtgctcccttcaaaa

SEQ ID NO: 490 - DNA, 337 bp, synthetic construct
  misc_feature 1..337: note = Description of artificial sequence: synthetic polynucleotide sequence
  source 1..337: mol_type = other DNA
cctggaaggcagttgcactcaaaagtgaagtcaccagtctgccgacaggtgcctccattgacacaaggtgagggtgcacagggcacatacaggctgtcacagtactggcctgtgaagccctgagggcactggcactggtaggaaccaggcaggttgaggcaggtgccaccatgctggcagtgtcctggaatgtcacactcattgacatcagtctcacatttctgccctgtgaagcctgtgaggcatttgcaggagaactggttggccacagtggtacaggtacttccatttgcacagggatgagacaggcaggcatccgtccattggcactccttac

SEQ ID NO: 491 - DNA, 261 bp, synthetic construct
  misc_feature 1..261: note = Description of artificial sequence: synthetic polynucleotide sequence
  source 1..261: mol_type = other DNA
cctgtaaacccgacttgacaggtgcactcataggtatcccggctgagcatatggcatgtgccgccattcaggcagggtcgagacacaaagcatggatgagatgttgagtactggcagtcctctcctgtaaaccctgaggcacatcggcacgtggctttccccagcatggcctgggccacacaagtcccaccattctggcagcggttcttctcacaggggtctcgatgttgacaatattcccccaagaagccttctggacat

SEQ ID NO: 492 - DNA, 121 bp, synthetic construct
  misc_feature 1..121: note = Description of artificial sequence: synthetic polynucleotide sequence
  source 1..121: mol_type = other DNA
atatgaagagaaaaacttacttgcagtatcctgtgccattgtggtaggtaacacacattccttcatttacacagggttcatagccatctcgacactgcaatgctaaaaataaaaacaaatg

SEQ ID NO: 493 - DNA, 121 bp, synthetic construct
  misc_feature 1..121: note = Description of artificial sequence: synthetic polynucleotide sequence
  source 1..121: mol_type = other DNA
agcgcccctcagcccgatactcaccatgcgcgggggccgcgcagcacagccagagcgccagcagcgcccacagcagagcggggcgcagggcgggcatcttctcggtcgcctcctcctccgc

SEQ ID NO: 494 - DNA, 121 bp, synthetic construct
  misc_feature 1..121: note = Description of artificial sequence: synthetic polynucleotide sequence
  source 1..121: mol_type = other DNA
ctcttctgagagttgtttcccctgaactgtgggggattccacaagactatgtaagactatgtaagaggaaaatgaaattgaacattttggttagctttaaaactaagctgaatgtaaactt

SEQ ID NO: 495 - DNA, 147 bp, synthetic construct
  misc_feature 1..147: note = Description of artificial sequence: synthetic polynucleotide sequence
  source 1..147: mol_type = other DNA
ctcagcagataggtagctgcacaaaagggggacaggcccacctttcctgctgttttaaggacttctggtggctgcgcttcttgcatggttcctggaaggcaagggtcacaaggctggagtacatggcagagcccttagggatttcac

SEQ ID NO: 496 - DNA, 121 bp, synthetic construct
  misc_feature 1..121: note = Description of artificial sequence: synthetic polynucleotide sequence
  source 1..121: mol_type = other DNA
accttttagtggatactagagactttttggattaccttttctgggacaggaataaggctttacagaggcaatcctgtaagtgctgctctaaagaggctcaggaaagagaagaattatcaga

SEQ ID NO: 497 - DNA, 121 bp, synthetic construct
  misc_feature 1..121: note = Description of artificial sequence: synthetic polynucleotide sequence
  source 1..121: mol_type = other DNA
ggcttggtgcctctgactggtgcagtagtttccttacctctaagttagtccttgccttctttaaaacatcatgtgttctggttactgaaacaacaaaagagcaccacagagtagaaaccac

SEQ ID NO: 498 - DNA, 140 bp, synthetic construct
  misc_feature 1..140: note = Description of artificial sequence: synthetic polynucleotide sequence
  source 1..140: mol_type = other DNA
cgctggctgacaatgaactgttccatgctctccttctgctggttggcgttcttcagatgctcagttgtgctctgaaggagtcgctcctgtttggatactttggttctcagttccagaagttccctttctgttgattctcc

SEQ ID NO: 499 - DNA, 145 bp, synthetic construct
  misc_feature 1..145: note = Description of artificial sequence: synthetic polynucleotide sequence
  source 1..145: mol_type = other DNA
ccactttgccaggcagcacagggatgtgggtgcttggcagggccgctctccagaacatggtgaggagggaagctgactcctctagggcatggtgcagggcactggtgctgctccgaagctcatgaatacctttgctgcctagcac

SEQ ID NO: 500 - DNA, 228 bp, synthetic construct
  misc_feature 1..228: note = Description of artificial sequence: synthetic polynucleotide sequence
  source 1..228: mol_type = other DNA
cctctgtgccttgggcttcaaggccagggaagctgcacgctgatctcacaagagacactatctttttgaccagcagcttgccctccgcaatctgctgtcttagggcactgtagtcatcaatgtggccaatgacatggcggccatgcttattggcaaaggagccatcagtagcatcaccctctagcttgggaggggtcttcattactggagaagtatccaaacccaagc

SEQ ID NO: 501 - DNA, 121 bp, synthetic construct
  misc_feature 1..121: note = Description of artificial sequence: synthetic polynucleotide sequence
  source 1..121: mol_type = other DNA
accatttgctctgttgattatgggcgtttctgagccaggagtagaggaagcagagctggggaagaccagagctggggaattcataccaacatcccggactggaggggacacagctgaatct

SEQ ID NO: 502 - DNA, 241 bp, synthetic construct
  misc_feature 1..241: note = Description of artificial sequence: synthetic polynucleotide sequence
  source 1..241: mol_type = other DNA
ccttggaggagcagctgcttgtttccagggtcagtgctggctgggaagttctggttaatggaggaggggctgaggctggctttgccagcaccgctctccagctgctgttgcagctgcagtcgcagacaattgttcccctgaatgctctgctccagctgccctctcagagctcgtacctctgccaccaggtggctcaggtcactgctcaaagggatttggtgacaggcatccaggctgtaag

SEQ ID NO: 503 - DNA, 121 bp, synthetic construct
  misc_feature 1..121: note = Description of artificial sequence: synthetic polynucleotide sequence
  source 1..121: mol_type = other DNA
ttcagccccttcttggaattgccataaagtgcctcgtagatttgtagctctgactggagggactcaaagagctgctgtttctcttcacactgttgctgcaggagaaccagcttgtgctgca

SEQ ID NO: 504 - DNA, 191 bp, synthetic construct
  misc_feature 1..191: note = Description of artificial sequence: synthetic polynucleotide sequence
  source 1..191: mol_type = other DNA
cctggagtcgttttcctggagggaaagacgttcctccctgaaatgcaagacctcttgctgcttctccctcaagtcttccaaaagctgctgcctttccaccttctggtgctccagctccttttccagctcttgaaggtgggatcgagaggacagcagagcctccctcaggctttctgtttcctgggagtgct

SEQ ID NO: 505 - DNA, 121 bp, synthetic construct
  misc_feature 1..121: note = Description of artificial sequence: synthetic polynucleotide sequence
  source 1..121: mol_type = other DNA
cctctggaaacatgactcagttgagcctgaagtcttcgattgtcttccctgaggactctgttctcattgcagagctgaggtatggactccaggccctgactgtagaagttagaagtggatc

SEQ ID NO: 506 - DNA, 133 bp, synthetic construct
  misc_feature 1..133: note = Description of artificial sequence: synthetic polynucleotide sequence
  source 1..133: mol_type = other DNA
ccccttccacgagcagtagaggtcagccggtgttccagttgctcccgtaggcggtcattgatgcagatggattcctccaggcgctggcgcaggttccggatttcaccaagatgctcttccagcaggtcagccc

SEQ ID NO: 507 - DNA, 253 bp, synthetic construct
  misc_feature 1..253: note = Description of artificial sequence: synthetic polynucleotide sequence
  source 1..253: mol_type = other DNA
cctgtgggtttggagttaagctggtacacagaggagcctgaggataggtccccagatacactccctttctgaggcctcatcacatcccacttgccactgctgcccaggtacccaggctctaggattcttcccagttctatggtgccccttggaggagagtgaggctgggcagagttgaggtagtaggaagagtcggcttccaagtcgttgctcagcaatgtagctgtggaagcaggaggaacagtgctggcac

SEQ ID NO: 508 - DNA, 187 bp, synthetic construct
  misc_feature 1..187: note = Description of artificial sequence: synthetic polynucleotide sequence
  source 1..187: mol_type = other DNA
ctttctcccaactgcttctgcagcatctgtagctcctgctgagcctcagccaaggagaccactggtgtctcacagcagccaaggaggagagggccagtggggctgaaaggcaggaagctggatggagctgagggcaatggtgcctgaggaaggctagccagcttgggtatggagtgaaaatgaaagc

SEQ ID NO: 509 - DNA, 154 bp, synthetic construct
  misc_feature 1..154: note = Description of artificial sequence: synthetic polynucleotide sequence
  source 1..154: mol_type = other DNA
cctgaatgggcctggttggcctccttgggggtattctggggagttggcaagctgatggggttgctgttggattcggccttagccccctgagatgcactggttgatgatggtttagaagacaacacagcagaatgactcgaatgatggatggaat

SEQ ID NO: 510 - DNA, 225 bp, synthetic construct
  misc_feature 1..225: note = Description of artificial sequence: synthetic polynucleotide sequence
  source 1..225: mol_type = other DNA
cctgagtgactgggagaagctttcttctcttcatagtgtgtgtactcgctgactatgtccatgtcagagcaggcttccagttcatcagacaggaaagaggtgctgctgggagagcggtgggagtcagacaaggcatggctgctggagggtgtgagggaccgagcatccagcttggcctgcaggacttcaatcactttctccttctcctgcagctccctgctgagc

SEQ ID NO: 511 - DNA, 121 bp, synthetic construct
  misc_feature 1..121: note = Description of artificial sequence: synthetic polynucleotide sequence
  source 1..121: mol_type = other DNA
tcccaatctctttcccagattctcctctgaattacctgagggccagtggctcaagtccagcttgatctttctcacttttatgatcctctgtaaaccaaatttagaaagagacgataagaaa

SEQ ID NO: 512 - DNA, 237 bp, synthetic construct
  misc_feature 1..237: note = Description of artificial sequence: synthetic polynucleotide sequence
  source 1..237: mol_type = other DNA
ctggtgctgagtttgctggtgagcctctctgtcagctggcttccctgggcgagttgctcccggaagctctgtcccaggtagtagtcaatgtcattgctccttaggagatcctcaaaagattttactgtatcttttgcatgccgggtgataagataacaaatacctctcccttctcgtattttttgccgtaggtaagacagttcccgggcctgatcctgaatcagggaatcatatttc

SEQ ID NO: 513 - DNA, 204 bp, synthetic construct
  misc_feature 1..204: note = Description of artificial sequence: synthetic polynucleotide sequence
  source 1..204: mol_type = other DNA
cccaggccacgaggctgatctcagctcctcagccagcttctcttctagtccattttttgggagctgggcctccagctgggatactctctggatgagactctccaggtcctttttggcctgaagccctggagagtagaaagccccagtgccatcagacagccacccctcatcctcatcagggacactatgaggtgaagacccctc

SEQ ID NO: 514 - DNA, 326 bp, synthetic construct
  misc_feature 1..326: note = Description of artificial sequence: synthetic polynucleotide sequence
  source 1..326: mol_type = other DNA
caaggtgccaacagctctcagcttccagggtctttccagactagacgaataatcacttgtaactgagagggaccggacccggctcttgaggttttgaatgaccttgttggcattctgcagctgggccttcagatctttgatgtcctttcgtaggaccaagatgttttctgactttccatatacccggaactcttcctgcttccctagctggttctccaagggcttcctctcagaggaactagccagtgttgagccccggcgtccctgctcagagcacagcccctccatcaggaccatttccttgaggctgttgtgctcctcacact

SEQ ID NO: 515 - DNA, 121 bp, synthetic construct
  misc_feature 1..121: note = Description of artificial sequence: synthetic polynucleotide sequence
  source 1..121: mol_type = other DNA
ccaggactggtggtttcctcccgttcagcctcattctcgcttcggccacaagtctcatagcccaggtcctggaggtccacctggatctgcttgctgtcctgcttcaccaaggattcacctg

SEQ ID NO: 516 - DNA, 194 bp, synthetic construct
  misc_feature 1..194: note = Description of artificial sequence: synthetic polynucleotide sequence
  source 1..194: mol_type = other DNA
ctaagcataactctgtatttctccagctcgttagcctgagcaaagacagtggcttctgatagcagcagcttctcctggagatcttgatagcgttgtttgcattgtgacagctgggagcgcaggtgctgggtggaccctggtaggctaaacgctgactgaggcccagggtcacgaggctgggactggttatccaa

SEQ ID NO: 517 - DNA, 437 bp, synthetic construct
  misc_feature 1..437: note = Description of artificial sequence: synthetic polynucleotide sequence
  source 1..437: mol_type = other DNA
cttggtgggcatccactgtgaaggtagccccaaggtcaaggctctggggtctggggaaaggcctcacagtcacattcccctcctcttggtgttggtgcttcccaggggaaccaaccagttctgtgtttattctttcaatggtgctggtcagatgcacaaggagctctggagtaagtttactattcccttccttgctactcagcacaagttgttctttgaggaggttgatgatattgtgggcattcttcagttttccctggagctttctgaactcagcctgaaggctactctcactcagaccctctttggttaccacagtctcaaccatcacctcgcccttctccttgtcttcctcgatctcccatccatcagacattgcttctcccatctgctctttcagctccgcattctcaaggcaaaggctcagcatggtgttc

SEQ ID NO: 518 - DNA, 234 bp, synthetic construct
  misc_feature 1..234: note = Description of artificial sequence: synthetic polynucleotide sequence
  source 1..234: mol_type = other DNA
cctgatgtgggacactgaggagaatcctgcttcctcaatttgagcctttagctccttcagttcctcctcagctttcctcttctcttctaagtgctggtggaactcagccctcaggtggagcatttcttcctgaagacacctgttactgtcccctcccatcggagaaggaggggaaaaagatgggttctgggtctccacagttgccagacttttctccaaagccaccttgacaag

SEQ ID NO: 519 - DNA, 121 bp, synthetic construct
  misc_feature 1..121: note = Description of artificial sequence: synthetic polynucleotide sequence
  source 1..121: mol_type = other DNA
ttacaaaaagcccaaggggaatgtgtccatcgtcttgcaagtaaaaatgcttctgaagctatagctacagagaataaataggggcaaaggtgggtaggagggggaaggaagcagaagaaag

SEQ ID NO: 520 - DNA, 121 bp, synthetic construct
  misc_feature 1..121: note = Description of artificial sequence: synthetic polynucleotide sequence
  source 1..121: mol_type = other DNA
cctgacactgacttacttgctggtgactatggtgtgcagcctcctcctcaatactgtcagtgaactcagtgcttgtatcttcggtgtcatcccctgcagctgcacctggaaacaagtccag

SEQ ID NO: 521 - DNA, 121 bp, synthetic construct
  misc_feature 1..121: note = Description of artificial sequence: synthetic polynucleotide sequence
  source 1..121: mol_type = other DNA
caatggcggccagggtctccagcctgtttaagcgctccaagcttcttccaagaacttcttctagccgactgcgtaacacctgagccccttccagttccacctgcagagttcggtctctctc

SEQ ID NO: 522 - DNA, 121 bp, synthetic construct
  misc_feature 1..121: note = Description of artificial sequence: synthetic polynucleotide sequence
  source 1..121: mol_type = other DNA
ttacctctctggatgggcatggaacttcaccagactgctatagagctgtctctctgcttgtaaggcctcattgagccgactccgttcatctactagtccttctagcatcagcagcaactga

SEQ ID NO: 523 - DNA, 139 bp, synthetic construct
  misc_feature 1..139: note = Description of artificial sequence: synthetic polynucleotide sequence
  source 1..139: mol_type = other DNA
cctgttgtcttcggtttcctgaaatttcttgaccctgggattctactgaagcaactttttcccgaagaagtaagacttcctgggtcaggcgttccatagctggtatgtcttcaggatcaaccagttgcatttgcaggtc

SEQ ID NO: 524 - DNA, 121 bp, synthetic construct
  misc_feature 1..121: note = Description of artificial sequence: synthetic polynucleotide sequence
  source 1..121: mol_type = other DNA
acctttatgagatcttctttaatctgtatgttcctggtcagagactccatatcagcagcctgcacctgcagctcttcttcctgcacagccatcatggactgtagagcagaaagttccatct

SEQ ID NO: 525 - DNA, 121 bp, synthetic construct
  misc_feature 1..121: note = Description of artificial sequence: synthetic polynucleotide sequence
  source 1..121: mol_type = other DNA
aactaaaaaactcacctgactttctctttcttttttagccatgagttcaagttcctctttggcattactcagttctttttccagccctgcaactgtgtccaagtctcctaaaatgaaaata

SEQ ID NO: 526 - DNA, 121 bp, synthetic construct
  misc_feature 1..121: note = Description of artificial sequence: synthetic polynucleotide sequence
  source 1..121: mol_type = other DNA
aaatgaaatttgatacttacctaatgtggatctgggtatgctgacatcctctttggcagtcaatgaagtgctatcatctctggaaggtatctgcattgaaccctaaaaaattgcaaaagtc

SEQ ID NO: 527 - DNA, 166 bp, synthetic construct
  misc_feature 1..166: note = Description of artificial sequence: synthetic polynucleotide sequence
  source 1..166: mol_type = other DNA
cttgatcagtctgttttccaagacagccagtgggggtaacttcagcttgttggttagagatgggtgcttgggacatcagggagtctctccctcctaaatattggcgcagggcctgtaattctgaatttctttccattaaggcttgcaccaacttctctgcagcagc

SEQ ID NO: 528 - DNA, 196 bp, synthetic construct
  misc_feature 1..196: note = Description of artificial sequence: synthetic polynucleotide sequence
  source 1..196: mol_type = other DNA
cttggctttcctgctccctggtgctcacagactgaagcaggccttgaatctccatttcatgttccagcacttgtttatttcgatcacttagaaggtcctgcagcatcctttcctttcgctgtagacgctggcacagctcctctgctatctcactctgccctggtccaagtttgcagagcagtgttgcactaagatc

SEQ ID NO: 529 - DNA, 181 bp, synthetic construct
  misc_feature 1..181: note = Description of artificial sequence: synthetic polynucleotide sequence
  source 1..181: mol_type = other DNA
cctccacttctttgttcctatcatgaagagacgtctgtaactgctgaatgatactctcttgttccttctgccaacggctaaatttggtttccatttcttctttcagccactggaggttttgacaggtagtagataactgttccacttccaggcctttggccctcaggagactctccatact

SEQ ID NO: 530 - DNA, 139 bp, synthetic construct
  misc_feature 1..139: note = Description of artificial sequence: synthetic polynucleotide sequence
  source 1..139: mol_type = other DNA
cttgcatagtagcttcattggaggagaggacatcgcgcagtctctctaagtcatgatctcgctctctcacagcaagacgaagctggcgcagttctttttctttctcttctagagcagagaatttttcatctatagcccg

SEQ ID NO: 531 - DNA, 121 bp, synthetic construct
  misc_feature 1..121: note = Description of artificial sequence: synthetic polynucleotide sequence
  source 1..121: mol_type = other DNA
atacctccagagcaacagctttatcatgtattcgctggcgaagtttctcaagcaacatttcatttgcttcaagggttttgtctgagttatctcgatactgtaggagctcccgaaattcctg

SEQ ID NO: 532 - DNA, 160 bp, synthetic construct
  misc_feature 1..160: note = Description of artificial sequence: synthetic polynucleotide sequence
  source 1..160: mol_type = other DNA
cctgaagcaactgctccttgtgactcagactatggtttaggtgctggatgttttgttcctgggttcgaatctcattgtatttttcagcctcccaggcacgaagctgttggctcttattctgcaattcttcttgtagctgctgcaaggcttttcgcaattc

SEQ ID NO: 533 - DNA, 214 bp, synthetic construct
  misc_feature 1..214: note = Description of artificial sequence: synthetic polynucleotide sequence
  source 1..214: mol_type = other DNA
cctggttatgtttccaagaagcctctttctgctgttcactctcgtgtgctgcagcctctacaaattgcacacattgtttggcatcagccagttggcgctctttctgtcgtaccaccctctggagcttctgtatttcaagttggctgcagaataaagcactctgaagatcaagcagagctacctgttgctgagctggagaagtaccctctgagct

SEQ ID NO: 534 - DNA, 121 bp, synthetic construct
  misc_feature 1..121: note = Description of artificial sequence: synthetic polynucleotide sequence
  source 1..121: mol_type = other DNA
tgaccctcacatacgtgaagttgtccaagctggctttggtgcagcatttctcgaagctttgccattgtgtcattttgaccttcaattacctggtacaactcctcagtctgaaaatgagaga

SEQ ID NO: 535 - DNA, 121 bp, synthetic construct
  misc_feature 1..121: note = Description of artificial sequence: synthetic polynucleotide sequence
  source 1..121: mol_type = other DNA
cctcacgttccctgcttttcagagtttccttgaggttctgaattgtaccatcttgcttttgagacgactcctgagcacactttagttcatagctcatttcattaagtttctcttgaagaat

SEQ ID NO: 536 - DNA, 133 bp, synthetic construct
  misc_feature 1..133: note = Description of artificial sequence: synthetic polynucleotide sequence
  source 1..133: mol_type = other DNA
ccttgttggtggcctctgtttgctggattttttcctggagttctgccaagtgggaatcagatacagactgctgagttatagtggtctcatgtgaattcagcttttgttgtttcagcaactcttcagtcatggg

SEQ ID NO: 537 - DNA, 335 bp, synthetic construct
  misc_feature 1..335: note = Description of artificial sequence: synthetic polynucleotide sequence
  source 1..335: mol_type = other DNA
cctggacccggagcggcaaataatcttcacagagatcatcccacagctcctgcaggtctgaaagctccaagggataactcacaggtgtcttgtaaaggggtttcaaagacctgttaaggaaaccggaactaactccatctgtcatgctagggccaggcttggctccaggtaggctggatttcactggaatcggaagcctgctccctcgggggctctggatgggcttataatcaagacctttaatcatgctaagagctaattccagcttgtgattacacccatgctgcggagcctgatcatctgaacaacagtcacactttccaagttcctttgca

SEQ ID NO: 538 - DNA, 446 bp, synthetic construct
  misc_feature 1..446: note = Description of artificial sequence: synthetic polynucleotide sequence
  source 1..446: mol_type = other DNA
cttctctcagtctcctcatctttctgttgtggagggctagcctggacgcttgcatccaaagattccacagaggaaccaggcgtctcttcctccatgctttctccatctgggggtacctttgtgcttgctaagtcgggtggcccaacctcagacaacgctggttcttcagtgcaaatgctggtcgaccacctgctagaagggccgcaggagatacttctggccacctttcgaggtaccttacaaatggcttcatagtcagaatcagcaacccgcaaagcggcacaaccacggcatctcctgggtcggtttccagggccttctgaaccatggcagctgtgtggctcctggatctgatcctcattctccacccagcactcaaaccctgaataggcgaagtcctcctggagcagtgcagagtatctcgcatcgggtaagacggacatgtc

SEQ ID NO: 539 - DNA, 345 bp, synthetic construct
  misc_feature 1..345: note = Description of artificial sequence: synthetic polynucleotide sequence
  source 1..345: mol_type = other DNA
aaccgtcccattccccgccttgatctccgcgccagagtcatcgttattcttccgatacatactggcaatgcagaacttgaggcgatccttctccagtagcagcttttgcaagcgctcaatagaaagcgcttcaatccgggcaataactgtgtcgaatcgatagattcgatcaagcatgaaagcacacttgctgcaagcgaactcggctttgccatcgcgggggacatccttgcccaagacgtgcgaaagcagaacctggagattgagcttggacgccgtgtggaagatccagcgccgctggtttccacacagctctcgggcacagatcctgcaaatctccttcat

SEQ ID NO: 540 - DNA, 121 bp, synthetic construct
  misc_feature 1..121: note = Description of artificial sequence: synthetic polynucleotide sequence
  source 1..121: mol_type = other DNA
acctgcacttccatgctagttggctcctccaacagatgtagcagttgttgtttctcccgagatagctgttctacaagcctctcctgggcagccaggctctgattcagttcttcaattctcc

SEQ ID NO: 541 - DNA, 181 bp, synthetic construct
  misc_feature 1..181: note = Description of artificial sequence: synthetic polynucleotide sequence
  source 1..181: mol_type = other DNA
cctacttgtccctctgggccagggcctcagtgtattggtcgggcttgacctggtctcctggtacatcttcccagtttttggtgactcccttcagtttctctgagagctccaggttacactccttctctgcttccaccagagctgccatccgcgcagcttcattctttgctagcctggattc

SEQ ID NO: 542 - DNA, 121 bp, synthetic construct
  misc_feature 1..121: note = Description of artificial sequence: synthetic polynucleotide sequence
  source 1..121: mol_type = other DNA
tcctgcagaagctggatcttattctccaagagctcataaacatgctccgtctcctgctgtcgctcctcaaactggcgtcggagctcagcttcattctgactgttgagattctccacatcag

SEQ ID NO: 543 - DNA, 121 bp, synthetic construct
  misc_feature 1..121: note = Description of artificial sequence: synthetic polynucleotide sequence
  source 1..121: mol_type = other DNA
agagcttaaaattacaacttaccatgttttatccagatgctgtttcttgtcctggagttctcgtttcaagctctccacttcaaccttcagctcaatgttctgaaaaacacacaggcattaa

SEQ ID NO: 544 - DNA, 142 bp, synthetic construct
  misc_feature 1..142: note = Description of artificial sequence: synthetic polynucleotide sequence
  source 1..142: mol_type = other DNA
cccgcttgtagatgtcctcccggctggcctcatacttctgttgcatgcgctcctccaggaagtagatgcgcagcttgaggctgaagttctccttcttcaggtcattgaggtgctgggacagagtgcgatatccattagacat

SEQ ID NO: 545 - DNA, 121 bp, synthetic construct
  misc_feature 1..121: note = Description of artificial sequence: synthetic polynucleotide sequence
  source 1..121: mol_type = other DNA
ctgctctgggtgctggagcgcagcacactttccttttttacctcagggagatatttgcggaatccctgacagaggaacatgctgcgtgaactcagacacaagtggtgtaacccgactccaa

SEQ ID NO: 546 - DNA, 153 bp, synthetic construct
  misc_feature 1..153: note = Description of artificial sequence: synthetic polynucleotide sequence
  source 1..153: mol_type = other DNA
ccttctcaaagtctcgaagagcctgggtctgtacctgagggggtttctcaaatgctctcaaggaatatgtctgcacaaacgggaccttttcaccacttctccagatctgtgactgcactggagggcctcgatctttagtgtcactaagaaaag

SEQ ID NO: 547 - DNA, 121 bp, synthetic construct
  misc_feature 1..121: note = Description of artificial sequence: synthetic polynucleotide sequence
  source 1..121: mol_type = other DNA
aatttaacaaggcaaggcccacagcatccttacctgctgtgtgactcgttctgggtaccatctccccatcatcctctgcaaaataatctctgtggaggcaaacacatcattaattaatgag

SEQ ID NO: 548 - DNA, 121 bp, synthetic construct
  misc_feature 1..121: note = Description of artificial sequence: synthetic polynucleotide sequence
  source 1..121: mol_type = other DNA
gaggaggaccaccaagtctggagcgcggcgagaaggaaacagcccacctacctcgtccaggtctgctccattttccaggctctttccttagtctcaggacgctcctcacccgggaggggaa

SEQ ID NO: 549 - DNA, 121 bp, synthetic construct
  misc_feature 1..121: note = Description of artificial sequence: synthetic polynucleotide sequence
  source 1..121: mol_type = other DNA
acacacacacacacacacacaagcacacagacacaatcattagtattattttgatgaaccatttgagagtaagatgtagattcttcacccctaaatatttaatgtgtatctcctaagaata

SEQ ID NO: 550 - DNA, 234 bp, synthetic construct
  misc_feature 1..234: note = Description of artificial sequence: synthetic polynucleotide sequence
  source 1..234: mol_type = other DNA
cctcatccagggtgtggccgccgcagctgcttcttcctcctcggccgctgctgcccagctcccggctggctccgggcgccgtctttcccggctcggggtctgccgtggggactgaggggttcgcgtcgcgtccccggaccggtaaggcgtgtagtgagcccggcgggacgcgcgacagcagcagccaaagtcgcatcggcggcggcagcaggacccgctgtctgtgcccttcat

SEQ ID NO: 551 - DNA, 121 bp, synthetic construct
  misc_feature 1..121: note = Description of artificial sequence: synthetic polynucleotide sequence
  source 1..121: mol_type = other DNA
accagcatttacttttgtctggaggagatcaccatgcatggtcctatacatgtctaatggcatggaatgatgaagggtagtgtcttttaggatagttggatacatatatatatatatatat

SEQ ID NO: 552 - DNA, 121 bp, synthetic construct
  misc_feature 1..121: note = Description of artificial sequence: synthetic polynucleotide sequence
  source 1..121: mol_type = other DNA
aaggaggccaccgccttttccccccacgaatggcactggaagacgagttcccccctgcattgcagaaccatgcagcctacctgggtgagcagcagagagttgcagaggacttacagggtag

SEQ ID NO: 553 - DNA, 121 bp, synthetic construct
  misc_feature 1..121: note = Description of artificial sequence: synthetic polynucleotide sequence
  source 1..121: mol_type = other DNA
agcaaagacaaatggctcttccagtgtgggtggaagaggggtgaggtcacccagtcctcagcctgtggtttgctttgcctcagtgccgggagcaatctcttgccctgatttgcattgtggg

SEQ ID NO: 554 - DNA, 121 bp, synthetic construct
  misc_feature 1..121: note = Description of artificial sequence: synthetic polynucleotide sequence
  source 1..121: mol_type = other DNA
cagacaatctatgagatagtttctcaataaagaaaaaggggataggcattttaccgaaagtgggatgtgaatgggggataaagagggcacatgtgtatatggaaaaggatatttaatatta

SEQ ID NO: 555 - DNA, 121 bp, synthetic construct
  misc_feature 1..121: note = Description of artificial sequence: synthetic polynucleotide sequence
  source 1..121: mol_type = other DNA
aaatcctatagtttaagagagttcacagaaaactagcttatcaatatcagagtttatcaatgccagcctttatacgtgtcttcctaatttttcagatttgcttgaaagatgcatcatttct

SEQ ID NO: 556 - DNA, 121 bp, synthetic construct
  misc_feature 1..121: note = Description of artificial sequence: synthetic polynucleotide sequence
  source 1..121: mol_type = other DNA
gcatcaggcccagcatggagatgaacaggatgattccaggctcccagcgccacatggagcctgggaataaccccattttccctcgaataccagttgagggccctctgagtccttctagggg

SEQ ID NO: 557 - DNA, 121 bp, synthetic construct
  misc_feature 1..121: note = Description of artificial sequence: synthetic polynucleotide sequence
  source 1..121: mol_type = other DNA
gagggcaaaagagggtgagagagggcaagagagggctaaaccacttttattataacaacgcacactctccataacgaacccactcccacaataatgacataaatccgtgtgtaagggcaga

SEQ ID NO: 558 - DNA, 121 bp, synthetic construct
  misc_feature 1..121: note = Description of artificial sequence: synthetic polynucleotide sequence
  source 1..121: mol_type = other DNA
ttccaactcagtgagacagccttttccttcgtgctcttggcagctcagcaaagtttccatacaccagtctgatgtaccagtgacggggtggtgccctgcctgacttacctaagcaggaggc

SEQ ID NO: 559 - DNA, 121 bp, synthetic construct
  misc_feature 1..121: note = Description of artificial sequence: synthetic polynucleotide sequence
  source 1..121: mol_type = other DNA
ctgttctacctcccttcactcacaactgatttggaaccaataaaggagggagtgcaaatgcctatcttccctctcaactttctccagactttattgcagcagcatgtgttgctcctggccc

SEQ ID NO: 560 - DNA, 382 bp, synthetic construct
  misc_feature 1..382: note = Description of artificial sequence: synthetic polynucleotide sequence
  source 1..382: mol_type = other DNA
ctcacttggagctggtgtacttggtgaccgccttggtgccctcggacacggcgtgcttggccagctcgccgggcagcagcaggcgcacggccgtctggatctcgcgggatgtgatggtggagcgcttgttgtagtgcgccaggcgggaagcctctcccgcgatgcgctcgaagatgtcgttgacgaaggagttcatgatgcccatggccttggacgagatgccggtgtcggggtggacctgcttcagcaccttgtacacgtagatggagtagctctctttgcggctgcgcttgcgcttcttgccgtctttcttctgggctttggtgacggctttcttggagccctttttaggggccggagcggattttgccggttcaggcat

SEQ ID NO: 561 - DNA, 121 bp, synthetic construct
  misc_feature 1..121: note = Description of artificial sequence: synthetic polynucleotide sequence
  source 1..121: mol_type = other DNA
ggttatccccgaatactgttgggcttgattgctctgagctctggcttggacaatggccatggtcacctgcagaggaaaggacattccatccttttggcttaggctgagtaagtgaaaagaa

SEQ ID NO: 562 - DNA, 121 bp, synthetic construct
  misc_feature 1..121: note = Description of artificial sequence: synthetic polynucleotide sequence
  source 1..121: mol_type = other DNA
tatggatgggctcattgaggacattaagcatcggcggtattatgagaagccatgccgccggcgacagagggaaagctatgaaaggtgccggcggatctacaacatggaaatggctcgcaag

SEQ ID NO: 563 - DNA, 121 bp, synthetic construct
  misc_feature 1..121: note = Description of artificial sequence: synthetic polynucleotide sequence
  source 1..121: mol_type = other DNA
cagcctttgtgggttccttcacatgtccccgcttcccactgttttccccattccaggaacgccagctccatttggggaccagagccatccagaacctgagtcctggaatgcagcccagcac

SEQ ID NO: 564 - DNA, 121 bp, synthetic construct
  misc_feature 1..121: note = Description of artificial sequence: synthetic polynucleotide sequence
  source 1..121: mol_type = other DNA
cagtaaggctatcttattagatatgccaaaccagctcctactccagcaacacctgcaaaagccagcagcacattcctgatgccaccttctaggtcctctacatggaagaactccacaaacc

SEQ ID NO: 565 - DNA, 121 bp, synthetic construct
  misc_feature 1..121: note = Description of artificial sequence: synthetic polynucleotide sequence
  source 1..121: mol_type = other DNA
cccagcctctttgtttaactagccagtcccgttttgtccttacgagaacgtctgtgatactttctgctaatggttcgatgcagctttcttggtttatggtcttcaagtgtttagccacaaa

SEQ ID NO: 566 - DNA, 121 bp, synthetic construct
  misc_feature 1..121: note = Description of artificial sequence: synthetic polynucleotide sequence
  source 1..121: mol_type = other DNA
aaagaaatgagagtcacaatcctgccccagtttgttacgccgtcgctgaaaacatggatcatcactcgagacaacgatttcacatcgtcttcgtttttgatgtccagtttccgaagcatgc

SEQ ID NO: 567 - DNA, 341 bp, synthetic construct
  misc_feature 1..341: note = Description of artificial sequence: synthetic polynucleotide sequence
  source 1..341: mol_type = other DNA
ccttggaaggccgtctcgtggttgcgctgcacgccatccccaacccgtcgtaaggtctccagcgccttcctgctggtggccccagacctgcccattggctttgtgtccttggcgccggtggcctgctcccgaaggtaccgagagataatctccagcgactgccggtacaactcgtcctcctcctcctctgctggcggcggcgtcgagggtagtgacccgtccgtactggtgttattaccagattccccgaccaactccagcagcggcaggacagccggccgcttcccgagaggctccggctcgtacccgtccagctcctcttcgggcgacatgatggcgtc

SEQ ID NO: 568 - DNA, 348 bp, synthetic construct
  misc_feature 1..348: note = Description of artificial sequence: synthetic polynucleotide sequence
  source 1..348: mol_type = other DNA
agcggccggggcttccatctcctcaagcggcgccgcgcggcgggtgggcgcgaagaaaagcagcctcgcgggggtcgcggtgacgtcggggacctcggcgccaatgggcggcggccgcgcgaccctccgggagtctggcgtgagggtggacggggggcttgcgccggcgcttccgccaatcaccgcgccggcctcccctccccctatctctcgccgggccgaggcctccttctccgtagccaaaagtcgccctcccgggcgggtggcgccgccgctgccggcccccaagccggcccccccacagtagaggttgagtccgattaccgcgtttcttttgaggccaaacat

SEQ ID NO: 569 - DNA, 121 bp, synthetic construct
  misc_feature 1..121: note = Description of artificial sequence: synthetic polynucleotide sequence
  source 1..121: mol_type = other DNA
aaagcatcataacatcctagcatcctaaaaaaaaaatcaaggattcatttttagactgaatgcatttccagaaaatagttattttcataaatttccatattatctcattactaaataatac

SEQ ID NO: 570 - DNA, 261 bp, synthetic construct
  misc_feature 1..261: note = Description of artificial sequence: synthetic polynucleotide sequence
  source 1..261: mol_type = other DNA
catgtcttcccttcctgggtgcattggtttggatgcagcaacagctacagtggagtctgaagagattgcagagctgcaacaggcagtggttgaggaactgggtatctctatggaggaacttcggcatttcatcgatgaggaactggagaagatggattgtgtacagcaacgcaagaagcagctagcagagttagagacatgggtaatacagaaagaatctgaggtggctcacgttgaccaactctttgatgatgcatccag

SEQ ID NO: 571 - DNA, 153 bp, synthetic construct
  misc_feature 1..153: note = Description of artificial sequence: synthetic polynucleotide sequence
  source 1..153: mol_type = other DNA
gggcagtgactaattgtgagtctttggtgaaggacttctactccaagctgggactacaataccgggacagtagctctgaggacgaatcttcccggcctacagaaataattgagattcctgatgaagatgatgatgtcctcagtattgattcag

SEQ ID NO: 572 - DNA, 121 bp, synthetic construct
  misc_feature 1..121: note = Description of artificial sequence: synthetic polynucleotide sequence
  source 1..121: mol_type = other DNA
tgtgtaagtctctgacactcattagagttcttctcgtccataggtgatgctgggagcagaactccaaaagaccagaaggtaagttaggatggtaagggaagggtgagagataagaatatga

SEQ ID NO: 573 - DNA, 121 bp, synthetic construct
  misc_feature 1..121: note = Description of artificial sequence: synthetic polynucleotide sequence
  source 1..121: mol_type = other DNA
cttttctacagctccgtgaagctatggctgccttaagaaagtcagctcaagatgttcagaagttcatggatgctgtcaacaagaagagcagttcccaggatctgcataaaggttagggtca

SEQ ID NO: 574 - DNA, 121 bp, synthetic construct
  misc_feature 1..121: note = Description of artificial sequence: synthetic polynucleotide sequence
  source 1..121: mol_type = other DNA
accttgagtcagatgtctggagaactaagcaaagatggtgacctgatagtcagcatgcgaattctgggcaagaagagaactaagacttggcacaaaggcacccttattgccatccagacag

SEQ ID NO: 575 - DNA, 203 bp, synthetic construct
  misc_feature 1..203: note = Description of artificial sequence: synthetic polynucleotide sequence
  source 1..203: mol_type = other DNA
gggccagggaagaaatacaaggtgaaatttgacaacaaaggaaagagtctactgtcggggaaccatattgcctatgattaccaccctcctgctgacaagctgtatgtgggcagtcgggtggtcgccaaatacaaagatgggaatcaggtctggctctatgctggcattgtagctgagacaccaaacgtcaaaaacaagctcag

SEQ ID NO: 576 - DNA, 121 bp, synthetic construct
  misc_feature 1..121: note = Description of artificial sequence: synthetic polynucleotide sequence
  source 1..121: mol_type = other DNA
tctgctgtcactcttcttttataggtttctcattttctttgatgatggctatgcttcctatgtcacacagtcggaactgtatcccatttgccggccacgtgagtgtttctcccttattcct

SEQ ID NO: 577 - DNA, 121 bp, synthetic construct
  misc_feature 1..121: note = Description of artificial sequence: synthetic polynucleotide sequence
  source 1..121: mol_type = other DNA
gtgaaaaagacttgggaggacatagaagacatctcctgccgtgacttcatagaggagtatgtcactgcctaccccaaccgccccatggtactgctcaagagtggccagcttatcaagactg

SEQ ID NO: 578 - DNA, 121 bp, synthetic construct
  misc_feature 1..121: note = Description of artificial sequence: synthetic polynucleotide sequence
  source 1..121: mol_type = other DNA
ggaaggcacgtggtggaagtcccgagttgaggaggtggatggcagcctagtcaggatcctcttcctggtactgttcttctctacaattttggaggcagaggttggtggggggggaacttaa

SEQ ID NO: 579 - DNA, 121 bp, synthetic construct
  misc_feature 1..121: note = Description of artificial sequence: synthetic polynucleotide sequence
  source 1..121: mol_type = other DNA
gacaaaagatgtgagtggatctatcgaggctctacacggctggagcccatgttcagcatgaaaacatcctcagcctctgcactggagaagaagcaaggacagctcaggacacgtccaaata

SEQ ID NO: 580 - DNA, 158 bp, synthetic construct
  misc_feature 1..158: note = Description of artificial sequence: synthetic polynucleotide sequence
  source 1..158: mol_type = other DNA
ggtgctgtgaggagcaaaggccctgttgtccagtacacacaggatctgaccggtactggaacccagttcaagccagtggaacccccacagcctacagctccacctgccccacctttcccacctgctccacctctatccccccaagcaggtgacagtga

SEQ ID NO: 581 - DNA, 160 bp, synthetic construct
  misc_feature 1..160: note = Description of artificial sequence: synthetic polynucleotide sequence
  source 1..160: mol_type = other DNA
gaagcttggaaagccagcttgcccagtcacggaagcaggtagccaaaaagagcacgtcctttcgaccaggatctgtgggctctggtcattcctcccctacatctcctgcactcagtgaaaatgtctctggtgggaaacctgggatcaaccagacatatag

SEQ ID NO: 582 - DNA, 308 bp, synthetic construct
  misc_feature 1..308: note = Description of artificial sequence: synthetic polynucleotide sequence
  source 1..308: mol_type = other DNA
gatcacctttaggctccacagcctctgccccagcaccctcagcactcccggcccctccagcacccccagtcttccatggcatgctggagcgggccccagcagagccctcctaccgtgctcccatggagaagcttttctacttacctcatgtctgcagctatacctgtctgtctcgagtcagacctatgaggaatgagcagtaccggggcaagaaccctctgctggtcccgttactatatgacttccggcggatgacagcccggcgtcgagttaaccgcaagatgggctttcatgttatctataagaca

SEQ ID NO: 583 - DNA, 326 bp, synthetic construct
  misc_feature 1..326: note = Description of artificial sequence: synthetic polynucleotide sequence
  source 1..326: mol_type = other DNA
ccttgtggtctctgccttcggacaatgcaggagatagaacgctaccttttcgagactggctgtgacttcctcttcctggagatgttctgtttggatccatatgttcttgtggaccgaaagtttcagccctataagcctttttactatattttggacatcacttatgggaaggaagatgttcccctatcctgtgtcaatgagattgacacaacccctccaccccaggtggcctacagcaaggaacgtatcccgggcaagggtgttttcattaacacaggccctgaatttctggttggctgtgactgcaaggatgggtgtcgggacaa

SEQ ID NO: 584 - DNA, 121 bp, synthetic construct
  misc_feature 1..121: note = Description of artificial sequence: synthetic polynucleotide sequence
  source 1..121: mol_type = other DNA
aggtccaagtgtgcctgccatcaactaactatccaggctacagcctgtaccccaggaggccaaatcaaccctaactctggctaccagtacaagagactagaagagtgtctacccacagggt

SEQ ID NO: 585 - DNA, 171 bp, synthetic construct
  misc_feature 1..171: note = Description of artificial sequence: synthetic polynucleotide sequence
  source 1..171: mol_type = other DNA
gggtatatgagtgtaacaaacgctgcaaatgtgacccaaacatgtgcacaaaccggttggtgcaacatggactacaagttcggctacagctattcaagacacagaacaagggctggggtatccgctgcttggatgacattgccaaaggctcttttgtttgtatttatgcag

SEQ ID NO: 586 - DNA, 305 bp, synthetic construct
  misc_feature 1..305: note = Description of artificial sequence: synthetic polynucleotide sequence
  source 1..305: mol_type = other DNA
ggcaaaatcctgacagatgactttgcagacaaggagggtctggaaatgggtgatgagtactttgcaaatctggaccatatcgagagcgtggagaacttcaaagaaggatatgagagtgatgccccctgttcctctgacagcagtggtgtagacttgaaggaccaggaagatggcaacagcggtacagaggaccctgaagagtccaatgatgatagctcagatgataacttctgtaaggatgaggacttcagcaccagttcagtgtggcggagctatgctacccggaggcagacccggggccagaa

SEQ ID NO: 587 - DNA, 325 bp, synthetic construct
  misc_feature 1..325: note = Description of artificial sequence: synthetic polynucleotide sequence
  source 1..325: mol_type = other DNA
agagaacggactctctgagacaacttccaaggactcccaccccccagatcttggacccccacatattcctgttcctccctcaatccctgtaggtggctgcaatccaccttcctccgaagagacacccaagaacaaggtggcctcatggttgagctgcaatagtgtcagtgaaggtggttttgctgactctgatagccattcatccttcaagactaatgaaggtggggagggccgggctgggggaagccgaatggaggctgagaaggcctccacctcaggactaggcatcaaggatgagggagacatcaaacaggccaagaaagag

SEQ ID NO: 588 - DNA, 121 bp, synthetic construct
  misc_feature 1..121: note = Description of artificial sequence: synthetic polynucleotide sequence
  source 1..121: mol_type = other DNA
acccgaggctgtgaaagcatttaacccttcacttgttcttttccaggacactgacgaccgaaacaagatgtcagtgtaagtgccttttgttttgttttgttttgagacagagtcttgcttt

SEQ ID NO: 589 - DNA, 134 bp, synthetic construct
  misc_feature 1..134: note = Description of artificial sequence: synthetic polynucleotide sequence
  source 1..134: mol_type = other DNA
gagttactgaaagctctcgaaattacggttacaatccttctcctgtgaagcctgaaggacttcgccgcccacctagtaagactagtatgcatcaaagccgaagactcatggcttctgctcagtccaaccctgat

SEQ ID NO: 590 - DNA, 167 bp, synthetic construct
  misc_feature 1..167: note = Description of artificial sequence: synthetic polynucleotide sequence
  source 1..167: mol_type = other DNA
ggatgtcctgacactgtccagcagcacagaaagtgagggggaaagtgggaccagccgaaagcccactgctggtcagacttcggctacagcggttgacagtgatgatatccagaccatatcctctggctctgaaggggatgactttgaggacaagaagaacatgactg

SEQ ID NO: 591 - DNA, 213 bp, synthetic construct
  misc_feature 1..213: note = Description of artificial sequence: synthetic polynucleotide sequence
  source 1..213: mol_type = other DNA
ggtccaatgaagcgtcaagtggcagtaaaatcaacccgaggctttgctcttaaatcaacccatgggattgcaattaaatcaaccaacatggcctctgtggacaagggggagagcgcacctgttcgtaagaacacacgccaattctatgatggcgaggagtcttgctacatcattgatgccaagcttgaaggcaacctgggccgctacctcaac

SEQ ID NO: 592 - DNA, 121 bp, synthetic construct
  misc_feature 1..121: note = Description of artificial sequence: synthetic polynucleotide sequence
  source 1..121: mol_type = other DNA
gtccttaaacctacagcacagttgcagccccaacctgtttgtccagaatgtcttcgtggatacccatgatcttcgcttcccctgggtggccttctttgccagcaagtaaggagtcaggaaa

SEQ ID NO: 593 - DNA, 121 bp, synthetic construct
  misc_feature 1..121: note = Description of artificial sequence: synthetic polynucleotide sequence
  source 1..121: mol_type = other DNA
agaagaatccgggctgggacagaacttacttgggactacaactacgaggtgggcagtgtggaaggcaaggagctactctgttgctgtggggccattgaatgcagaggacgtcttctttaga

SEQ ID NO: 594 - DNA, 121 bp, synthetic construct
  misc_feature 1..121: note = Description of artificial sequence: synthetic polynucleotide sequence
  source 1..121: mol_type = other DNA
ccacaatgacggccatgccggcaatgaaggcaatcaggtaaaatgtgaatctccagctggcagaggaagcagaaatggctaggtcagaggatagcacagtcccccagcagcccccaaatac

SEQ ID NO: 595 - DNA, 121 bp, synthetic construct
  misc_feature 1..121: note = Description of artificial sequence: synthetic polynucleotide sequence
  source 1..121: mol_type = other DNA
gtaggcatcaatctcttccaggaggatgggctcaggtcccccggatcgcccacctggggtcagcaccttcagcactgtcccatcattggagccaaggaacatgactgtgatgttactgtgg

SEQ ID NO: 596 - DNA, 121 bp, synthetic construct
  misc_feature 1..121: note = Description of artificial sequence: synthetic polynucleotide sequence
  source 1..121: mol_type = other DNA
ctggcagtggcatctgacttagagcgctggtgagtccttttggagggagacagccctgtgtcaggggccgggctcaaggagggcagctccctcttcctgtgagctggctttagctcatctg

SEQ ID NO: 597 - DNA, 121 bp, synthetic construct
  misc_feature 1..121: note = Description of artificial sequence: synthetic polynucleotide sequence
  source 1..121: mol_type = other DNA
agcctcactttgttcagcttgctggttcatccttagccctccccaagtctggtcctctcacccatccccactaggtggatcagctgaggacagagctcatgcaggaaaggtctgctcggca

SEQ ID NO: 598 - DNA, 121 bp, synthetic construct
  misc_feature 1..121: note = Description of artificial sequence: synthetic polynucleotide sequence
  source 1..121: mol_type = other DNA
tatgcaaaacactcaccgtcacctcacaccaatactcgccccaccgtgtgataggctcttctggtaactttaatgtatgtggggcaaccacaacaccaagctgcaaaaaaaaaaaaaaaaa

SEQ ID NO: 599 - DNA, 121 bp, synthetic construct
  misc_feature 1..121: note = Description of artificial sequence: synthetic polynucleotide sequence
  source 1..121: mol_type = other DNA
ggcaaactgatgagtgccgggctccagaagccgcccatggcccttcccttcttgggattttatctccccgacttggcggtgcctctgttcctccttctgctggcggcggatgtgttcttcc

SEQ ID NO: 600 - DNA, 121 bp, synthetic construct
  misc_feature 1..121: note = Description of artificial sequence: synthetic polynucleotide sequence
  source 1..121: mol_type = other DNA
gctcacctggtagagggaagaccctgaacgtccagaccgttcccctgaccggccacgtgtggactcttggtggctctgctgtctcagcccagcctttccgtggcctgacactgattgtgtg

SEQ ID NO: 601 - DNA, 121 bp, synthetic construct
  misc_feature 1..121: note = Description of artificial sequence: synthetic polynucleotide sequence
  source 1..121: mol_type = other DNA
ccctcccaagtgtactcctaagtgtcctcccaagtgtcccccaaaatgccctccccagtgttcagccccatgcccacctccagtctcttcctgctgtggttccagctctgggggctgctgc

SEQ ID NO: 602 - DNA, 121 bp, synthetic construct
  misc_feature 1..121: note = Description of artificial sequence: synthetic polynucleotide sequence
  source 1..121: mol_type = other DNA
agtcaccactgcagcgatgtccacctcctgctccacgtccacgtctgcgcccagaaccatgcataagtctagaaccacgcccgcgtcctctaccacgacaactttcagaaccttgtttgta

SEQ ID NO: 603 - DNA, 121 bp, synthetic construct
  misc_feature 1..121: note = Description of artificial sequence: synthetic polynucleotide sequence
  source 1..121: mol_type = other DNA
gtgccatcaaagttcctgagcaaggatacaccaaagttcctgtgccaggctacacaaagctaccagagccatgtccttcaacggtcactccaggcccagctcagcagaagaccaagcagaa

SEQ ID NO: 604 - DNA, 121 bp, synthetic construct
  misc_feature 1..121: note = Description of artificial sequence: synthetic polynucleotide sequence
  source 1..121: mol_type = other DNA
cccctcagcccccagtggactgcgtgaagacctctggcggcggtggcggtggcggcggcagcggcggtggtggctgcggcttcttcggcggcggcggctcagggggcggtagcagcggttc

SEQ ID NO: 605 - DNA, 121 bp, synthetic construct
  misc_feature 1..121: note = Description of artificial sequence: synthetic polynucleotide sequence
  source 1..121: mol_type = other DNA
cgactatgtccaacatgactttctcacctagagggatattcatctttgctttcaaaaagccttcaggaaataaaaacaatgattgttttccttctctagtgaatgactgatattaagaaga

SEQ ID NO: 606 - DNA, 121 bp, synthetic construct
  misc_feature 1..121: note = Description of artificial sequence: synthetic polynucleotide sequence
  source 1..121: mol_type = other DNA
gggccttgccacttatagaaatgatgtcactattgtgatttgctcattttacgtattgttctttgtagattctcgggattcgaagatggctgcacagtcagcgccgaaagttgtgctaaaa

SEQ ID NO: 607 - DNA, 121 bp, synthetic construct
  misc_feature 1..121: note = Description of artificial sequence: synthetic polynucleotide sequence
  source 1..121: mol_type = other DNA
ctgtcctgcctactgcttcaactccgaagagaaaagtgagttccacttctggggctctttagccctcaattttaacatcccaagagctgctgtggtctaaagggcttctgtcctcctcctt

SEQ ID NO: 608 - DNA, 121 bp, synthetic construct
  misc_feature 1..121: note = Description of artificial sequence: synthetic polynucleotide sequence
  source 1..121: mol_type = other DNA
ccaatgaggtgtactgctcagaagcatctcctggcagtgacagtggcatctctgaggacccctgccatccagacagtccccctgcccccagggcaaccagttctcctatgctctatgaggt

SEQ ID NO: 609 - DNA, 121 bp, synthetic construct
  misc_feature 1..121: note = Description of artificial sequence: synthetic polynucleotide sequence
  source 1..121: mol_type = other DNA
acatcttggtgcagttgctgtctgctttctgtgcttcgggagccacctatgttctctaccatggtgacagagggaacagagggagctgtgccttgagagcacctgtgggtgggcaggggtg

SEQ ID NO: 610 - DNA, 121 bp, synthetic construct
  misc_feature 1..121: note = Description of artificial sequence: synthetic polynucleotide sequence
  source 1..121: mol_type = other DNA
ctccccttgctcttcccgcagagggtccttcctggtgctgctcctgagggaatgcttccgagacctgagctggctggcactcatccatagcgtccgtggggaggcggggctgctggtgacg

SEQ ID NO: 611 - DNA, 121 bp, synthetic construct
  misc_feature 1..121: note = Description of artificial sequence: synthetic polynucleotide sequence
  source 1..121: mol_type = other DNA
tccaggctgatgtacaggatgcgctcgtaggtcatggctatccgccagtcatccgcgccattgtcgatcacgaagagctggtgggagcagaaagtccattagtgtggccaggaccaggaag

SEQ ID NO: 612 - DNA, 121 bp, synthetic construct
  misc_feature 1..121: note = Description of artificial sequence: synthetic polynucleotide sequence
  source 1..121: mol_type = other DNA
ctggctcctgctccctggggccttgctccctgatggccttgtcaccctgtgggcctctacccccactgaggcacaccccatctgggccccggacacagtcggcctccagcccctggagccg

SEQ ID NO: 613 - DNA, 121 bp, synthetic construct
  misc_feature 1..121: note = Description of artificial sequence: synthetic polynucleotide sequence
  source 1..121: mol_type = other DNA
gatacagtacctgatctactaccactcttgtctttcagctcacagtcctcaggcccatgacaatccacaggagaagagacttgcagcaggtgggtagctggagcaaactgggcctggggca

SEQ ID NO: 614 - DNA, 121 bp, synthetic construct
  misc_feature 1..121: note = Description of artificial sequence: synthetic polynucleotide sequence
  source 1..121: mol_type = other DNA
catactgccggctgggtcggtgctggatcacagctgggtcctgagggcagagacccgggtctcagctggcacccagtgccacctaggggaattcccagggaccattcccaaactgcctgtg

SEQ ID NO: 615 - DNA, 121 bp, synthetic construct
  misc_feature 1..121: note = Description of artificial sequence: synthetic polynucleotide sequence
  source 1..121: mol_type = other DNA
ccattttttccagggattttttcaaggagattgagcaagatctggttgagtcgttcccgttggttatgccgtcgttcctcaggggtacaggttgactggggttcttgactactttcctctg

SEQ ID NO: 616 - DNA, 121 bp, synthetic construct
  misc_feature 1..121: note = Description of artificial sequence: synthetic polynucleotide sequence
  source 1..121: mol_type = other DNA
tcaccctcactgacgttagcagtggccccttcccgttctggctcctccaggctgggtatctcattggctgcttgctcttgactggctagaacctcttcaatcaagggtagagcatcatcct

SEQ ID NO: 617 - DNA, 121 bp, synthetic construct
  misc_feature 1..121: note = Description of artificial sequence: synthetic polynucleotide sequence
  source 1..121: mol_type = other DNA
ggtgtggccagccaactcaaggaggacgaagcaacctttgcctctaaactgcctggaactaaatgtcgatttttctgacccctcccagggagtgctgagtagtgatggtgtctggagggtc

SEQ ID NO: 618 - DNA, 121 bp, synthetic construct
  misc_feature 1..121: note = Description of artificial sequence: synthetic polynucleotide sequence
  source 1..121: mol_type = other DNA
aacactggatgaatcttctggcttccctggggggctactaagcctcacttcaggatccattgaggacaaagcattctttgatgatcctttgttcacatctgtccctgaggttccttcatca

SEQ ID NO: 619 - DNA, 121 bp, synthetic construct
  misc_feature 1..121: note = Description of artificial sequence: synthetic polynucleotide sequence
  source 1..121: mol_type = other DNA
gtgggggcctcgggcgtagaccctgcgttgctgcctgctgagggtgctggggtccgggatatcccaaaggagccaaggctgtaggcaagagagaccaagaggtaggagatggcatccaaga

SEQ ID NO: 620 - DNA, 121 bp, synthetic construct
  misc_feature 1..121: note = Description of artificial sequence: synthetic polynucleotide sequence
  source 1..121: mol_type = other DNA
cccgtgtggccctccaggcgccccagcgggatcccagagaaggatctgcacagtgttatggcaccctacttcctgcagcaacgggacaccctgcggcgccatgtgcagaaacaggaggccg

SEQ ID NO: 621 - DNA, 121 bp, synthetic construct
  misc_feature 1..121: note = Description of artificial sequence: synthetic polynucleotide sequence
  source 1..121: mol_type = other DNA
gcacaggcgagaggccaaggacgcacacgtacttcatgctgggggaccgcagagcaatacccagaattcaaagccacagcaaagagctcacagcctcacttaccagatctaaatggtcctc

SEQ ID NO: 622 - DNA, 121 bp, synthetic construct
  misc_feature 1..121: note = Description of artificial sequence: synthetic polynucleotide sequence
  source 1..121: mol_type = other DNA
ttgtcccgcagacttcagtgattctaggatctctgtttctaaagattttactgcctctacgctctcttctttgagtgactttaagaactcttgattctcattttcaagaggtctagctatc

SEQ ID NO: 623 - DNA, 121 bp, synthetic construct
  misc_feature 1..121: note = Description of artificial sequence: synthetic polynucleotide sequence
  source 1..121: mol_type = other DNA
gcctgagcttccagagggcctaggagcagtaagggagtgagtgggcaactcggcgcatgaaggaggtactcctcattttcgttctctctctctgtgccccagcccgttggcagacccggat

SEQ ID NO: 624 - DNA, 121 bp, synthetic construct
  misc_feature 1..121: note = Description of artificial sequence: synthetic polynucleotide sequence
  source 1..121: mol_type = other DNA
tcaggccgccctcatctgcctggcaccctctgtacccccgatcttgacggtgaagtcctgggacaccatgcagttgcgggctgctagatctcggtgcacaaacttgttggcagcaaggtag

SEQ ID NO: 625 - DNA, 213 bp, synthetic construct
  misc_feature 1..213: note = Description of artificial sequence: synthetic polynucleotide sequence
  source 1..213: mol_type = other DNA
gatgctgcgaggcggacggcgcgggcagcttggctggcacagctgggctgcggggccgggcagcctgctggcttggctgatactggcatctgcgggcgccgcaccctgccccgatgcctgctgcccccacggctcctcgggactgcgatgcacccgggatggggccctggatagcctccaccacctgcccggcgcagagaacctgactgagct

SEQ ID NO: 626 - DNA, 121 bp, synthetic construct
  misc_feature 1..121: note = Description of artificial sequence: synthetic polynucleotide sequence
  source 1..121: mol_type = other DNA
actcccatccgctctccccacagctacatcgagaaccagcagcatctgcagcatctggagctccgtgatctgaggggcctgggggagctgagaaacctgtgagggaaacggggactgtggg

SEQ ID NO: 627 - DNA, 121 bp, synthetic construct
  misc_feature 1..121: note = Description of artificial sequence: synthetic polynucleotide sequence
  source 1..121: mol_type = other DNA
ctgatcctcctgcacccctccccagcaccatcgtgaagagtggtctccgtttcgtggcgccagatgccttccatttcactcctcggctcagtcgcctgtgagtgtggccagtgctgggcag

SEQ ID NO: 628 - DNA, 121 bp, synthetic construct
  misc_feature 1..121: note = Description of artificial sequence: synthetic polynucleotide sequence
  source 1..121: mol_type = other DNA
gtcttgctgtgtctccacgcccgcaggaatctctccttcaacgctctggagtctctctcctggaaaactgtgcagggcctctccttacaggaactgtgagtgggggcgcttccaggggcaa

SEQ ID NO: 629 - DNA, 147 bp, synthetic construct
  misc_feature 1..147: note = Description of artificial sequence: synthetic polynucleotide sequence
  source 1..147: mol_type = other DNA
gggtcctgtcggggaaccctctgcactgttcttgtgccctgcgctggctacagcgctgggaggaggagggactgggcggagtgcctgaacagaagctgcagtgtcatgggcaagggcccctggcccacatgcccaatgccagctgtg

SEQ ID NO: 630 - DNA, 144 bp, synthetic construct
  misc_feature 1..144: note = Description of artificial sequence: synthetic polynucleotide sequence
  source 1..144: mol_type = other DNA
ggtgtgcccacgctgaaggtccaggtgcccaatgcctcggtggatgtgggggacgacgtgctgctgcggtgccaggtggaggggcggggcctggagcaggccggctggatcctcacagagctggagcagtcagccacggtgatg

SEQ ID NO: 631 - DNA, 134 bp, synthetic construct
  misc_feature 1..134: note = Description of artificial sequence: synthetic polynucleotide sequence
  source 1..134: mol_type = other DNA
gaaatctgggggtctgccatccctggggctgaccctggccaatgtcaccagtgacctcaacaggaagaacgtgacgtgctgggcagagaacgatgtgggccgggcagaggtctctgttcaggtcaacgtctcct

SEQ ID NO: 632 - DNA, 328 bp, synthetic construct
  misc_feature 1..328: note = Description of artificial sequence: synthetic polynucleotide sequence
  source 1..328: mol_type = other DNA
gtcccggccagtgtgcagctgcacacggcggtggagatgcaccactggtgcatccccttctctgtggatgggcagccggcaccgtctctgcgctggctcttcaatggctccgtgctcaatgagaccagcttcatcttcactgagttcctggagccggcagccaatgagaccgtgcggcacgggtgtctgcgcctcaaccagcccacccacgtcaacaacggcaactacacgctgctggctgccaaccccttcggccaggcctccgcctccatcatggctgccttcatggacaaccctttcgagttcaaccccgaggaccccatccctg

SEQ ID NO: 633 - DNA, 121 bp, synthetic construct
  misc_feature 1..121: note = Description of artificial sequence: synthetic polynucleotide sequence
  source 1..121: mol_type = other DNA
gactgctttctctcctccctctgactgctttctctcctccctcctgctgcagtctccttctcgccggtgggtgagtagcccaaggtggagggcaggttctgcctggtctctggagctgagg

SEQ ID NO: 634 - DNA, 121 bp, synthetic construct
  misc_feature 1..121: note = Description of artificial sequence: synthetic polynucleotide sequence
  source 1..121: mol_type = other DNA
aaggctcacccctcctgccctgtgtccctacagacactaacagcacatctggagacccggtggagaagaaggacgaaacaccttttggggtgagataggaagtagaagcttgtgcagactt

SEQ ID NO: 635 - DNA, 121 bp, synthetic construct
  misc_feature 1..121: note = Description of artificial sequence: synthetic polynucleotide sequence
  source 1..121: mol_type = other DNA
ccccaccaggtctcggtggctgtgggcctggccgtctttgcctgcctcttcctttctacgctgctccttgtgctcaacaaatgtggacggagaaacaagtttgggatcaaccgtgagtcgg

SEQ ID NO: 636 - DNA, 148 bp, synthetic construct
  misc_feature 1..148: note = Description of artificial sequence: synthetic polynucleotide sequence
  source 1..148: mol_type = other DNA
ggcccggctgtgctggctccagaggatgggctggccatgtccctgcatttcatgacattgggtggcagctccctgtcccccaccgagggcaaaggctctgggctccaaggccacatcatcgagaacccacaatacttcagtgatgcct

SEQ ID NO: 637 - DNA, 121 bp, synthetic construct
  misc_feature 1..121: note = Description of artificial sequence: synthetic polynucleotide sequence
  source 1..121: mol_type = other DNA
caccacatcaagcgccgggacatcgtgctcaagtgggagctgggggagggcgcctttgggaaggtcttccttgctgagtgccacaacctcctgcctgagcaggacaagatgctggtggctg

SEQ ID NO: 638 - DNA, 174 bp, synthetic construct
  misc_feature 1..174: note = Description of artificial sequence: synthetic polynucleotide sequence
  source 1..174: mol_type = other DNA
ggcactgaaggaggcgtccgagagtgctcggcaggacttccagcgtgaggctgagctgctcaccatgctgcagcaccagcacatcgtgcgcttcttcggcgtctgcaccgagggccgccccctgctcatggtctttgagtatatgcggcacggggacctcaaccgcttcctccg

SEQ ID NO: 639 - DNA, 121 bp, synthetic construct
  misc_feature 1..121: note = Description of artificial sequence: synthetic polynucleotide sequence
  source 1..121: mol_type = other DNA
gatcccatggacctgatgccaagctgctggctggtggggaggatgtggctccaggccccctgggtctggggcagctgctggccgtggctagccaggtcgctgcggggatggtgtacctggc

SEQ ID NO: 640 - DNA, 121 bp, synthetic construct
  misc_feature 1..121: note = Description of artificial sequence: synthetic polynucleotide sequence
  source 1..121: mol_type = other DNA
gggtctgcattttgtgcaccgggacctggccacacgcaactgtctagtgggccagggactggtggtcaagattggtgattttggcatgagcagggatatctacagcaccgactattaccgt

SEQ ID NO: 641 - DNA, 160 bp, synthetic construct
  misc_feature 1..160: note = Description of artificial sequence: synthetic polynucleotide sequence
  source 1..160: mol_type = other DNA
ggtgggaggccgcaccatgctgcccattcgctggatgccgcccgagagcatcctgtaccgtaagttcaccaccgagagcgacgtgtggagcttcggcgtggtgctctgggagatcttcacctacggcaagcagccctggtaccagctctccaacacggag

SEQ ID NO: 642 - DNA, 187 bp, synthetic construct
  misc_feature 1..187: note = Description of artificial sequence: synthetic polynucleotide sequence
  source 1..187: mol_type = other DNA
ggcaatcgactgcatcacgcagggacgtgagttggagcggccacgtgcctgcccaccagaggtctacgccatcatgcggggctgctggcagcgggagccccagcaacgccacagcatcaaggatgtgcacgcccggctgcaagccctggcccaggcacctcctgtctacctggatgtcctgggctag

SEQ ID NO: 643 - DNA, 121 bp, synthetic construct
  misc_feature 1..121: note = Description of artificial sequence: synthetic polynucleotide sequence
  source 1..121: mol_type = other DNA
cccgcaccctgtcccagccctgccaagagaggaagccctggaaaatgccaggcccctgggaggctcctaggtcctgggagcaggatgtctggcttaaaagcccctgggagctgctgctctg

SEQ ID NO: 644 - DNA, 121 bp, synthetic construct
  misc_feature 1..121: note = Description of artificial sequence: synthetic polynucleotide sequence
  source 1..121: mol_type = other DNA
ggggcagagggggacaaaagaggggaatctcacatgtgtggagaacattgcacgtctcacttttcataattttctcattgcagccatggcatgtgccctataaagaaagtgggtgtattct

SEQ ID NO: 645 - DNA, 121 bp, synthetic construct
  misc_feature 1..121: note = Description of artificial sequence: synthetic polynucleotide sequence
  source 1..121: mol_type = other DNA
ccggaaaccggggttgacgccaccttaacttcagagtagatgataggggaaccctaggaggcaagagcacatgcgtgaggaccagggtgggcctgggggtgggggagggcatgcagaaggg

SEQ ID NO: 646 - DNA, 121 bp, synthetic construct
  misc_feature 1..121: note = Description of artificial sequence: synthetic polynucleotide sequence
  source 1..121: mol_type = other DNA
tatgctgctgcatatgagagccactttttctcctttgaaggctgtggaccatggaggattgaggagaagtacagcttttggggccacccctaaacaggaaatagaaagatgaaggcagggg

SEQ ID NO: 647 - DNA, 121 bp, synthetic construct
  misc_feature 1..121: note = Description of artificial sequence: synthetic polynucleotide sequence
  source 1..121: mol_type = other DNA
ccagagggggccgacctgctccccagggtgatatcctcgtgataaaaccagtacaggatcggaggagagcctctcagggcctcacagtgaagctccagcacatcctccactgcagcctggg

SEQ ID NO: 648 - DNA, 121 bp, synthetic construct
  misc_feature 1..121: note = Description of artificial sequence: synthetic polynucleotide sequence
  source 1..121: mol_type = other DNA
ccacagacggtgcaggagggtgagcgtgttgtctttacctgccaggccacagccaaccccgagatcttgggctacaggtgagggggtcagaggctgggagcgctctggggagtgataagga

SEQ ID NO: 649 - DNA, 121 bp, synthetic construct
  misc_feature 1..121: note = Description of artificial sequence: synthetic polynucleotide sequence
  source 1..121: mol_type = other DNA
caagcaggagctgaaaaacttacagtcactgttccagttatacttccatagttttatccagatagtgcaagcttctgctggtcaatttcagcttgaatgtaagttcgttgctctaagctga

SEQ ID NO: 650 - DNA, 121 bp, synthetic construct
  misc_feature 1..121: note = Description of artificial sequence: synthetic polynucleotide sequence
  source 1..121: mol_type = other DNA
attttaaggatttctgaaggtaaagattcaagatgtttttcaagagcgcacaggtatagattatatgtcagcattctgaaatggtttccagggttatgaaaaaaaatctctgccttgatca

SEQ ID NO: 651 - DNA, 121 bp, synthetic construct
  misc_feature 1..121: note = Description of artificial sequence: synthetic polynucleotide sequence
  source 1..121: mol_type = other DNA
tcagcctgtgaggcatcctcacaggagacgttaaggagtggagagatatcacaaaagtagtgattgatctgaggcatgccacagtagtgaagttgtgctataaaaaccatcttaatcatgg

SEQ ID NO: 652 - DNA, 121 bp, synthetic construct
  misc_feature 1..121: note = Description of artificial sequence: synthetic polynucleotide sequence
  source 1..121: mol_type = other DNA
gcactgagtagaccactgccagggcctggtcatagtccagtgagtagctcttcttcagctgcacatacatggaaaggatgctcccatagaagatgagaaccacagtgaagtgggaggcaca

SEQ ID NO: 653 - DNA, 121 bp, synthetic construct
  misc_feature 1..121: note = Description of artificial sequence: synthetic polynucleotide sequence
  source 1..121: mol_type = other DNA
gtccacagccatgggccgttccccatctcccaagacctcattgtcagctccacccaacagttcttcaactgaggtacactcttcctggtcccattttgctttgtttttttcaacccaaagt

SEQ ID NO: 654 - DNA, 121 bp, synthetic construct
  misc_feature 1..121: note = Description of artificial sequence: synthetic polynucleotide sequence
  source 1..121: mol_type = other DNA
cgaagatgtatggaattcttcctatggtgtgaatgattccttcccagatggagactatggtgccaacctggaagcagctgccccctgccactcctgtaacctgctggatgactctgcactg

SEQ ID NO: 655 - DNA, 121 bp, synthetic construct
  misc_feature 1..121: note = Description of artificial sequence: synthetic polynucleotide sequence
  source 1..121: mol_type = other DNA
tatacattggtcattctcccaagaatgctctccagcctcgtaggtatgagccagcccatatcattggcagggtgtgccacacagatgttcttttttgtaacctttggcatcactaactgct

SEQ ID NO: 656 - DNA, 121 bp, synthetic construct
  misc_feature 1..121: note = Description of artificial sequence: synthetic polynucleotide sequence
  source 1..121: mol_type = other DNA
tttttttttttgagactgttcatgcagtcttagaccccacccccatacctcagatcaaatctctcccatagcctggggtggcccttacctgtctggccaaaagcatgagagaggctggtca

SEQ ID NO: 657 - DNA, 121 bp, synthetic construct
  misc_feature 1..121: note = Description of artificial sequence: synthetic polynucleotide sequence
  source 1..121: mol_type = other DNA
ctgcctcctgcagagggggctgtggaggggggccgcaggaacgaagcgctgcctcgcccactgctctggctggtgaggctgcctcgaggggcagcagggagaaggcctggcagcagccgct

SEQ ID NO: 658 - DNA, 121 bp, synthetic construct
  misc_feature 1..121: note = Description of artificial sequence: synthetic polynucleotide sequence
  source 1..121: mol_type = other DNA
ctatttcttctctgcacagggccatagccaccaaagggcaaaggaaatcctgactcgaggtggacccaatactgttaccccaccccccaccactccagaatgggtcaaattctgtaagcaa

SEQ ID NO: 659 - DNA, 121 bp, synthetic construct
  misc_feature 1..121: note = Description of artificial sequence: synthetic polynucleotide sequence
  source 1..121: mol_type = other DNA
gaagactcttttcgagccctctgcctcctgctttaccaaacacaggttctagattgccagttccacactcggatggtctgatcatcggaggcactcagaatccagggatattcctgaaaga

SEQ ID NO: 660 - DNA, 121 bp, synthetic construct
  misc_feature 1..121: note = Description of artificial sequence: synthetic polynucleotide sequence
  source 1..121: mol_type = other DNA
aacaccctcatgatgtaggtgctgttgtcctctttctggaccttagagatgtacagtgcgccactctgaggatcaagtctgaccctgcctttaaatttggattcaaagtacttagattttc

SEQ ID NO: 661 - DNA, 121 bp, synthetic construct
  misc_feature 1..121: note = Description of artificial sequence: synthetic polynucleotide sequence
  source 1..121: mol_type = other DNA
cctggccttgccttcctctttcatcagcctcactcttccaaggctttattaaccatattcttttgtggatttttggctcacaggtggtgccaccaccacaacagaatgatcttgagattcc

SEQ ID NO: 662 - DNA, 121 bp, synthetic construct
  misc_feature 1..121: note = Description of artificial sequence: synthetic polynucleotide sequence
  source 1..121: mol_type = other DNA
tatgaagaggcacaacagtttcctctcgacttgcgcctttgtccccatcgcgatcaggctcccgacacaacagccgccgaaggactcctgggaacagacacagctccgcgactacagcgag

SEQ ID NO: 663 - DNA, 121 bp, synthetic construct
  misc_feature 1..121: note = Description of artificial sequence: synthetic polynucleotide sequence
  source 1..121: mol_type = other DNA
tacaatttactgaagtgtttgcctcctgaaagatgaggggaggtcactcaccggaagacgggcaggtccttagtaaacttgatgacttgcagtaccatgaaagtgttgatgtctgcgaagt

SEQ ID NO: 664 - DNA, 121 bp, synthetic construct
  misc_feature 1..121: note = Description of artificial sequence: synthetic polynucleotide sequence
  source 1..121: mol_type = other DNA
gatcagaatcctatgagaggggacagtccaaagatagaatctgaaaaacaaaagtaaacgttaaagaaatggagaatgggaacttacctggttggcactgtagttagtggccatgatcttg

SEQ ID NO: 665 - DNA, 121 bp, synthetic construct
  misc_feature 1..121: note = Description of artificial sequence: synthetic polynucleotide sequence
  source 1..121: mol_type = other DNA
cacatcagcattttcccattcaacaagcatttcccaatatcttatggcctttgtccccatatgtgccccactgggtcaatccaagaccatgaagctgactcaccagtccgcatgccagctg

SEQ ID NO: 666 - DNA, 121 bp, synthetic construct
  misc_feature 1..121: note = Description of artificial sequence: synthetic polynucleotide sequence
  source 1..121: mol_type = other DNA
cattacaggatgaatgaggggtttgagtggcaactgaaattataccaggcaatgggatacgaagtggatacctctagtgcaatttataagcaatatcgtttacaaaaggttacagagaagt

SEQ ID NO: 667 - DNA, 121 bp, synthetic construct
  misc_feature 1..121: note = Description of artificial sequence: synthetic polynucleotide sequence
  source 1..121: mol_type = other DNA
atgatgcagattgactgtcaggtgatggacaccaggatcctccatatcaaaagttcgtcagttcctccttacctccgagatcagcagaggaatcaaaccaacaccttctttggctcccctc

SEQ ID NO: 668 - DNA, 121 bp, synthetic construct
  misc_feature 1..121: note = Description of artificial sequence: synthetic polynucleotide sequence
  source 1..121: mol_type = other DNA
cacaagctgagcctgcagcacacgcagcagaatgcagatggccaggaagatggagagagcgagaggaacagcaacagctcaggagacccaggtaggcactgcggcttctgtggatgtgggt

SEQ ID NO: 669 - DNA, 121 bp, synthetic construct
  misc_feature 1..121: note = Description of artificial sequence: synthetic polynucleotide sequence
  source 1..121: mol_type = other DNA
ctgtgtcagaaactgctctaaacactttataaatattaatcttcacggcaactctagtcggtaggtctttttattaagtaggtcttatttctttttctacattaatttttttttttttttt

SEQ ID NO: 670 - DNA, 121 bp, synthetic construct
  misc_feature 1..121: note = Description of artificial sequence: synthetic polynucleotide sequence
  source 1..121: mol_type = other DNA
ctgattggctgcttggtggccatcatctttatcctcctggccatcattgtcatcatcctctggaggcagttctggcagaaaatgctggagaaggtgaggaggtgcagaatggtcatgatat

SEQ ID NO: 671 - DNA, 121 bp, synthetic construct
  misc_feature 1..121: note = Description of artificial sequence: synthetic polynucleotide sequence
  source 1..121: mol_type = other DNA
cctttagaggagctgaagcttatagtctacctaaaaccaaaaacctctagacctggagactgaatggataatgaaatttaatcacagtcatcctgtgagtcagaggtgaataagcttgcag

SEQ ID NO: 672 - DNA, 121 bp, synthetic construct
  misc_feature 1..121: note = Description of artificial sequence: synthetic polynucleotide sequence
  source 1..121: mol_type = other DNA
ggcagcctcccttgagtaaagattctccatatctgcatctcttaaacaaaaataacttggttctcacctttccaggcatgagtggggcaaagctgcaagtcctttgcacattttggcaggt

SEQ ID NO: 673 - DNA, 121 bp, synthetic construct
  misc_feature 1..121: note = Description of artificial sequence: synthetic polynucleotide sequence
  source 1..121: mol_type = other DNA
gctgtgttaagttctgttccagttgaagagcaagaagagttcaagcagctttcagatggaattcaggagctacaacaatcactaaatcaggattttcatcaaaaaacggtatctgttgtga

SEQ ID NO: 674 - DNA, 121 bp, synthetic construct
  misc_feature 1..121: note = Description of artificial sequence: synthetic polynucleotide sequence
  source 1..121: mol_type = other DNA
gcacctacctttggcatatgagtttatttttggagagggcaactcaagagttaacctgggctgcaagctgccttaggcatgcagagcccagaatgatttgaaaaccctgctctgtatccac

SEQ ID NO: 675 - DNA, 121 bp, synthetic construct
  misc_feature 1..121: note = Description of artificial sequence: synthetic polynucleotide sequence
  source 1..121: mol_type = other DNA
aggcgtaagccactgctcctggccctaatcattctttctaactacatttgacctccttaagcatccctactcctctttctacaccccctactatcattcccagcctctgataaccattctt

SEQ ID NO: 676 - DNA, 121 bp, synthetic construct
  misc_feature 1..121: note = Description of artificial sequence: synthetic polynucleotide sequence
  source 1..121: mol_type = other DNA
acgtatcaggcaatactccatgggtggttgtacatatgttctccaagagatttcaagatggttgatccataattctaatgagtctttctaatcattgtattatcttgcctaaaatcaatga

SEQ ID NO: 677 - DNA, 121 bp, synthetic construct
  misc_feature 1..121: note = Description of artificial sequence: synthetic polynucleotide sequence
  source 1..121: mol_type = other DNA
tctgtttttcacaggccccagatattctttttcatagccttgaggagtgattgctctctagaatgactgaatatagagttttctgctttaattattctatttttagtttattttaggaagg

SEQ ID NO: 678 - DNA, 121 bp, synthetic construct
  misc_feature 1..121: note = Description of artificial sequence: synthetic polynucleotide sequence
  source 1..121: mol_type = other DNA
aaataacagatgctggtgaggttgcaaagaaaaggaaatatgtatacacttctagtgggcggtaaattagtttagccactgtggaaagcagtgtggcaattttttatagaacttaaaacag

SEQ ID NO: 679 - DNA, 121 bp, synthetic construct
  misc_feature 1..121: note = Description of artificial sequence: synthetic polynucleotide sequence
  source 1..121: mol_type = other DNA
taggagttaggcaggacttgtttctcaagacacaggtcacaaagaccccactgcttgaataggatgtggtaaagaggccagccaaaaccagccagaatcaagacggtgaagaaagcacctc

SEQ ID NO: 680 - DNA, 121 bp, synthetic construct
  misc_feature 1..121: note = Description of artificial sequence: synthetic polynucleotide sequence
  source 1..121: mol_type = other DNA
ataatcctcctcgggtctgtgtctctataatttatgatgctttcagattaccaaacacaattcatttggcaatgaaagagaatagttttgtgctattgtcctccatgtgtgggaaattgca

SEQ ID NO: 681 - DNA, 121 bp, synthetic construct
  misc_feature 1..121: note = Description of artificial sequence: synthetic polynucleotide sequence
  source 1..121: mol_type = other DNA
gaggctgcatcttctagaactgtgagatgtgtaaggttcaaggagctattctcttttggggtatttcacttgagcttatcttcaccctatagaatataacttaatataagaacttggggac

SEQ ID NO: 682 - DNA, 121 bp, synthetic construct
  misc_feature 1..121: note = Description of artificial sequence: synthetic polynucleotide sequence
  source 1..121: mol_type = other DNA
ataagcagttcgggtgaagagactgggtttttctaatcttctagataatgtgcacctggatactgataaatgccctcccctctgctgtctctgcacatcccttctgtagaggaggatagtg

SEQ ID NO: 683 - DNA, 121 bp, synthetic construct
  misc_feature 1..121: note = Description of artificial sequence: synthetic polynucleotide sequence
  source 1..121: mol_type = other DNA
gacaaactcatcacccttctgaagctgtcgctcgcagacacagcagcagaagcagctcaggtggtatacactcttctgggcccgcataacaaactcattgggagcgatggcctcgaagcag

SEQ ID NO: 684 - DNA, 121 bp, synthetic construct
  misc_feature 1..121: note = Description of artificial sequence: synthetic polynucleotide sequence
  source 1..121: mol_type = other DNA
gtggcacttttcagggagtgtctgcttctgcatgtacctgaggatctgtctccacagatggcacagatgtgtttaaccagagatccggggctggtggatgggtagttcatgtttccaatcc

SEQ ID NO: 685 - DNA, 121 bp, synthetic construct
  misc_feature 1..121: note = Description of artificial sequence: synthetic polynucleotide sequence
  source 1..121: mol_type = other DNA
aagcagatactaggatgggtagaaggagaggcaggggttagaactttaattccttccctggggacaggagatgccctggaggggaaggcgcttccggctctgcaggtatgtgctgttgggc

SEQ ID NO: 686 - DNA, 121 bp, synthetic construct
  misc_feature 1..121: note = Description of artificial sequence: synthetic polynucleotide sequence
  source 1..121: mol_type = other DNA
ctttgcaggaaggaggagacagttactgtctatcccgcagacgtggtgctctttgaagggatcctggccttctactcccaggaggtacgagacctgttccagatgaagctttttgtggata

SEQ ID NO: 687 - DNA, 121 bp, synthetic construct
  misc_feature 1..121: note = Description of artificial sequence: synthetic polynucleotide sequence
  source 1..121: mol_type = other DNA
aagttgtcattcatgctgacggagaacctggagatcttgttggtggggccaaccagggtcacagtttctgtggtgttcccgtaccaagggtagctcaccccatctgagtcactgatggctt

SEQ ID NO: 688 - DNA, 121 bp, synthetic construct
  misc_feature 1..121: note = Description of artificial sequence: synthetic polynucleotide sequence
  source 1..121: mol_type = other DNA
ccaatttaatttggagcacaacttttatggaggtcgttgtcaaatgcatcactgacacccacataatgctgctgcactcctgtcacctgctttcttccagggtgtccttttcactctcctc

SEQ ID NO: 689 - DNA, 121 bp, synthetic construct
  misc_feature 1..121: note = Description of artificial sequence: synthetic polynucleotide sequence
  source 1..121: mol_type = other DNA
caagtacatgggcagacagaagaaggaaagcccagcatctaccaatctttgaccatcaacacttagaagtaaatgacctgcttcagtgacttctcatactccatcactttccaaataacat

SEQ ID NO: 690 - DNA, 121 bp, synthetic construct
  misc_feature 1..121: note = Description of artificial sequence: synthetic polynucleotide sequence
  source 1..121: mol_type = other DNA
gatttccctggtgtttaactgatgagtgtacaagaaaaatctttgcattctaagaattgtaatatctgcagtattacagcattggacagaactgtttacatggtacagtggggattaaaaa

SEQ ID NO: 691 - DNA, 121 bp, synthetic construct
  misc_feature 1..121: note = Description of artificial sequence: synthetic polynucleotide sequence
  source 1..121: mol_type = other DNA
gttcgagactggcgcaaagtgaagccacagcttcaaaacgcccacgccatgcggcgggcattccgaggccccaagaatgggaggtttgctctggtggaccagcgtgtggccgaatatgtca

SEQ ID NO: 692 - DNA, 121 bp, synthetic construct
  misc_feature 1..121: note = Description of artificial sequence: synthetic polynucleotide sequence
  source 1..121: mol_type = other DNA
tgacagagcctctccttcagccctaggtccccatgtctcacccacccctgggcactggagagaaaaggggcctactcacctgcacagagtgtccacaacacaggccacatcttccccacca

SEQ ID NO: 693 - DNA, 121 bp, synthetic construct
  misc_feature 1..121: note = Description of artificial sequence: synthetic polynucleotide sequence
  source 1..121: mol_type = other DNA
tggcgggcgcgttccctaggtccgaggaggaggctgcccttcctttccggagggtctacggcgaggctgacttacgttatagagctggttctggccctgctggtacgcgggggcgtctgcg

SEQ ID NO: 694 - DNA, 121 bp, synthetic construct
  misc_feature 1..121: note = Description of artificial sequence: synthetic polynucleotide sequence
  source 1..121: mol_type = other DNA
gaaccatagcaatttcttccatccccttcattttaaagatgacgaaattgaacataagcaatttaccaatggtcgtacttaaagtcagttagtagccaagtcaagagttaaaaccaaggtc

SEQ ID NO: 695 - DNA, 121 bp, synthetic construct
  misc_feature 1..121: note = Description of artificial sequence: synthetic polynucleotide sequence
  source 1..121: mol_type = other DNA
cccggccagattttcttaccttttaatgacgttggaggtgacaggtttttcagtctgacaccacttgtgaggtgacagacttcttcactttccttatcactatggagagtaaccatgttta

SEQ ID NO: 696 - DNA, 121 bp, synthetic construct
  misc_feature 1..121: note = Description of artificial sequence: synthetic polynucleotide sequence
  source 1..121: mol_type = other DNA
caagggatgactgtaatttggtttacttacagaagctcctgaagaatcatcagaggatgtgacaaaatatcaggaaggagtatctgcagaaaacccagttgagaaccatatcaatataagt

SEQ ID NO: 697 - DNA, 121 bp, synthetic construct
  misc_feature 1..121: note = Description of artificial sequence: synthetic polynucleotide sequence
  source 1..121: mol_type = other DNA
tcctcattctttcctgcggtcagcatcaaatcacatcttctgagcacctactgtgtaccgtgttcttctaggcagtgggataggaaagtgattaagacatagtttcagggccgggagcggt

SEQ ID NO: 698 - DNA, 121 bp, synthetic construct
  misc_feature 1..121: note = Description of artificial sequence: synthetic polynucleotide sequence
  source 1..121: mol_type = other DNA
tgtagcgtccactccctgatgcgacggagggctggatacagatttattcgcctcagaactctgatgtttgtgcagggcacttccagcacaccatgtaaccaaatcctatccatttacaaaa

SEQ ID NO: 699 - DNA, 121 bp, synthetic construct
  misc_feature 1..121: note = Description of artificial sequence: synthetic polynucleotide sequence
  source 1..121: mol_type = other DNA
aatataatgcataaagtaagtaccgtgtgctgactggtgagagaggccttgttgacacacaaattgtaacattatcaacaagtggatttcatttattcttttccattgctgaaaatgaact

SEQ ID NO: 700 - DNA, 121 bp, synthetic construct
  misc_feature 1..121: note = Description of artificial sequence: synthetic polynucleotide sequence
  source 1..121: mol_type = other DNA
agacaaaggactcactgcccaggctgccatttgcaagtagccggccattctgtctatagcgttgagtcatcagagtatacatatggacatgcaaacaccaaaacatctgaactatttggtg

SEQ ID NO: 701 - DNA, 121 bp, synthetic construct
  misc_feature 1..121: note = Description of artificial sequence: synthetic polynucleotide sequence
  source 1..121: mol_type = other DNA
tagaaaggctgtctgtttctgagcttaatcggcgtacttgcaaaatgacttgtttttccgttgctcttatttgtattttaaactgtagcctcaattatgtaccctcttatgttgttagaat

SEQ ID NO: 702 - DNA, 121 bp, synthetic construct
  misc_feature 1..121: note = Description of artificial sequence: synthetic polynucleotide sequence
  source 1..121: mol_type = other DNA
aaatacataattgtgacagtttcccaaacatattcctttcgttttcaaaataatttttaaaagtagtagtgtcttctagtggaggaacttccaaatcaactaactggtccttgaacttaag

SEQ ID NO: 703 - DNA, 121 bp, synthetic construct
  misc_feature 1..121: note = Description of artificial sequence: synthetic polynucleotide sequence
  source 1..121: mol_type = other DNA
tacagctggagccataggcaaaagcagtgagcggatgaacacagtccatggttccttcactgggggcttccaggtgctgacactgcacagctggagagaataaccaaggataaagagaaag

SEQ ID NO: 704 - DNA, 121 bp, synthetic construct
  misc_feature 1..121: note = Description of artificial sequence: synthetic polynucleotide sequence
  source 1..121: mol_type = other DNA
gtgaattcctctcctaaaccaagttctgatggaaccttaaggggcctttcttgtgatgacacttttggcggctcgatttggtctgcgtcatcccccctttgtacaaggctaatcttttggg

SEQ ID NO: 705 - DNA, 121 bp, synthetic construct
  misc_feature 1..121: note = Description of artificial sequence: synthetic polynucleotide sequence
  source 1..121: mol_type = other DNA
cccaaacattcaatcacaaactcctcttcttcatcattagagatctgggctgcaaggtccccaacataatcctgaataaaacataattttaatataaatttaaattattttttatttaatc

SEQ ID NO: 706 - DNA, 121 bp, synthetic construct
  misc_feature 1..121: note = Description of artificial sequence: synthetic polynucleotide sequence
  source 1..121: mol_type = other DNA
agttcacacctgcatttggaaccttagcaagaataagaaggctgcaattttcctgcacctttgggttaaatacgtgtacagaaaggatttgggttattgcaagaagaacgaaaggatgtcc

SEQ ID NO: 707 - DNA, 121 bp, synthetic construct
  misc_feature 1..121: note = Description of artificial sequence: synthetic polynucleotide sequence
  source 1..121: mol_type = other DNA
tcagggtggtgaggtcccccaggcctcaggtgggtccagaggtgccatcttggagtcaggcactacagtcaaaaaccttagaagtctccctggtgttctactgtattgtggctgagtggca

SEQ ID NO: 708 - DNA, 121 bp, synthetic construct
  misc_feature 1..121: note = Description of artificial sequence: synthetic polynucleotide sequence
  source 1..121: mol_type = other DNA
atgtagaagccgatgaagagactttggagcttgaggtggaggtcgagagattgctacacgaacaagaagtagaatcaaggagaccagtggttcgtttagagaggccatttcagcctgcgga

SEQ ID NO: 709 - DNA, 121 bp, synthetic construct
  misc_feature 1..121: note = Description of artificial sequence: synthetic polynucleotide sequence
  source 1..121: mol_type = other DNA
gtaggtttagggagcccagcaaagaaaaccaagatttagtgtgggacaggttgattttgagacgattaagtagacattcaaataagcatgtgtgagaaacaaactcatccaacccaaagaa

SEQ ID NO: 710 - DNA, 121 bp, synthetic construct
  misc_feature 1..121: note = Description of artificial sequence: synthetic polynucleotide sequence
  source 1..121: mol_type = other DNA
tcccttactgcagtttgaatctcagttgaagataatagagtcatcctttggaatgctagttgtcatgccaagtcttgacaaagtaaaagaaatggggagcagttatgagtacattgaggac

SEQ ID NO: 711 - DNA, 121 bp, synthetic construct
  misc_feature 1..121: note = Description of artificial sequence: synthetic polynucleotide sequence
  source 1..121: mol_type = other DNA
tacaagcatccagatggatttgagggaaaacgcatcctggtgattggaatgggaaactcaggctcagatattgctgttgagctgagtaagaatgctgctcaggtgtgatgctctctgctta

SEQ ID NO: 712 - DNA, 121 bp, synthetic construct
  misc_feature 1..121: note = Description of artificial sequence: synthetic polynucleotide sequence
  source 1..121: mol_type = other DNA
aagtggtggaaaagaggatagcttgtggtcctccacaggctaaactgaatggacagcaggctgctctcgcttcccagtatagagctatgatgcctccttatgtgagtattgttaaatgaac

SEQ ID NO: 713 - DNA, 121 bp, synthetic construct
  misc_feature 1..121: note = Description of artificial sequence: synthetic polynucleotide sequence
  source 1..121: mol_type = other DNA
cctttgtaatattttcttgcatgacatcaataacttcatccacttgattctgaacactagtttaaaaaagatacacaattatttatccttcttttgagaatgcttacaatttttaaaactt

SEQ ID NO: 714 - DNA, 121 bp, synthetic construct
  misc_feature 1..121: note = Description of artificial sequence: synthetic polynucleotide sequence
  source 1..121: mol_type = other DNA
gtggaactggattcttgacctcagtgcttcttggagcagggggtgggcagtatttgtgtgatttgtctgtctttctcttcctatctcctttcttttgcctgtttccctttccttgtttctt

SEQ ID NO: 715 - DNA, 121 bp, synthetic construct
  misc_feature 1..121: note = Description of artificial sequence: synthetic polynucleotide sequence
  source 1..121: mol_type = other DNA
ttttattttttcactcactccatgaacatttatcagacgcctgtgatgttagactctgtcctggagatactaaggtagaaaatacaaactttataccttcaaggagtttgcttgggatgac

SEQ ID NO: 716 - DNA, 121 bp, synthetic construct
  misc_feature 1..121: note = Description of artificial sequence: synthetic polynucleotide sequence
  source 1..121: mol_type = other DNA
ttcatcccaaggcccatgaatgttttctttaaaaagctgcaagcgaatgaggtagaatggacacagacatgagatagacatcagcagaagggcaaagagtacggctcccacagcactaatg

SEQ ID NO: 717 - DNA, 121 bp, synthetic construct
  misc_feature 1..121: note = Description of artificial sequence: synthetic polynucleotide sequence
  source 1..121: mol_type = other DNA
ttggaagtctttaatgaaattgttgttgatagggtatttggcactagcatggtggaagaatatgaagaaattgctgattcccagtatcactcagaacgccaggaactatttgatgaggact

SEQ ID NO: 718 - DNA, 121 bp, synthetic construct
  misc_feature 1..121: note = Description of artificial sequence: synthetic polynucleotide sequence
  source 1..121: mol_type = other DNA
ctccagaaataataggtcacttggcacccacttcttcaaaacagtgagcttcatgaacattcttatttatttgacgtggatattgcatgcctggtagatgtgttccacaagaaattcttgg

SEQ ID NO: 719 - DNA, 121 bp, synthetic construct
  misc_feature 1..121: note = Description of artificial sequence: synthetic polynucleotide sequence
  source 1..121: mol_type = other DNA
ttataatcactttaaactgaaacgtaaactaaagaattgtgcagtttggcagccactgacgtcacatcatttcatccagttctaaccagaagcttcccaggaacacaatagctgttgaatc

SEQ ID NO: 720 - DNA, 121 bp, synthetic construct
  misc_feature 1..121: note = Description of artificial sequence: synthetic polynucleotide sequence
  source 1..121: mol_type = other DNA
gacttctggccttcagaactctcagagaataaattttgttgttttaagccacttcgttcgtggtaattttttacagcagatatagaaaactaatagagtgttagtctcaaagagtctgatg

SEQ ID NO: 721 - DNA, 121 bp, synthetic construct
  misc_feature 1..121: note = Description of artificial sequence: synthetic polynucleotide sequence
  source 1..121: mol_type = other DNA
gatgactgaattaatcagaaaaaaagccaagctacgcaggaacaccaccaaaatagtaagagcttaacagaacaaaggctaactcaaagtttgctgtgggcctaggagaccttggagcaac

SEQ ID NO: 722 - DNA, 121 bp, synthetic construct
  misc_feature 1..121: note = Description of artificial sequence: synthetic polynucleotide sequence
  source 1..121: mol_type = other DNA
aaggtctaccccttacccatgacattggtgttactatttctttgggtaagctcagatgcttggattatcagcagcttgcttaaatcagaagttccctgaacctagaggagaaaagtcaaaa

SEQ ID NO: 723 - DNA, 121 bp, synthetic construct
  misc_feature 1..121: note = Description of artificial sequence: synthetic polynucleotide sequence
  source 1..121: mol_type = other DNA
ttgagagcttgtataatagtaaaatcaaaaggatttggtgaacatggagtgaggaagagatagtgttataaatgactccaaacttaggaaaccagatgccgccatgataagattaaaaaga

SEQ ID NO: 724 - DNA, 121 bp, synthetic construct
  misc_feature 1..121: note = Description of artificial sequence: synthetic polynucleotide sequence
  source 1..121: mol_type = other DNA
atgcggaagcggggcatgtggaccaccagcatcatctcctccaattcatccagccactcttgcagcacctctggggtgagttccttctctaccttggccaggctcttctcaggcttgggca

SEQ ID NO: 725 - DNA, 121 bp, synthetic construct
  misc_feature 1..121: note = Description of artificial sequence: synthetic polynucleotide sequence
  source 1..121: mol_type = other DNA
ggcatgtgacctaggcttttcagccagacatctgtgttagacctttgactcacagctaaggagacaagcaacagtttttttcctctctctcccttctcccttcctccttctgtgtttctct

SEQ ID NO: 726 - DNA, 121 bp, synthetic construct
  misc_feature 1..121: note = Description of artificial sequence: synthetic polynucleotide sequence
  source 1..121: mol_type = other DNA
tttttaattttttgaggaaccaccatagtgtttttcatagtggttgtaccaatttgtatatctaccaatagtgttcaagggttcccttttctccacatccttggaaacacttacttttgct

SEQ ID NO: 727 - DNA, 121 bp, synthetic construct
  misc_feature 1..121: note = Description of artificial sequence: synthetic polynucleotide sequence
  source 1..121: mol_type = other DNA
cgcattttacacatccaactaaagtcatgtccgttctacttatgtaacatcatcaaattcatctccttcattctgttctcattgcccttgctgaggttgaggcccacatgtcctcttgcca

SEQ ID NO: 728 - DNA, 121 bp, synthetic construct
  misc_feature 1..121: note = Description of artificial sequence: synthetic polynucleotide sequence
  source 1..121: mol_type = other DNA
ctgagagtagtgatatgttggagataaggtcgtaagaacaggtaatacctaatctaaactgggagaataactactgttcaatcccactattgggccatagtagtcactgtttatataataa

SEQ ID NO: 729 - DNA, 121 bp, synthetic construct
  misc_feature 1..121: note = Description of artificial sequence: synthetic polynucleotide sequence
  source 1..121: mol_type = other DNA
atgatgcctctgaaacctatagggagaatattttcttgcctcttcctagctcctggtgatttatgggcactctctggcatgccttaacttaaagcttcttaagcccatctgtcttcatatt

SEQ ID NO: 730 - DNA, 121 bp, synthetic construct
  misc_feature 1..121: note = Description of artificial sequence: synthetic polynucleotide sequence
  source 1..121: mol_type = other DNA
cagatggagaagtagaaaataaaaaccctgtcatgagtggaatcaaaaggccttgtaacctcagtgaaagtggcatggtggcagaaacaaaggcttaacacagctccatctctaattagct

SEQ ID NO: 731 - DNA, 121 bp, synthetic construct
  misc_feature 1..121: note = Description of artificial sequence: synthetic polynucleotide sequence
  source 1..121: mol_type = other DNA
ttcactggatactcggcatgattcaggcactgtgttaacaactttatgtgcattatctcattcaatcttcagcataatcccttcaagtactgtggctatccctattttctataaagaaagc

SEQ ID NO: 732 - DNA, 121 bp, synthetic construct
  misc_feature 1..121: note = Description of artificial sequence: synthetic polynucleotide sequence
  source 1..121: mol_type = other DNA
aggcacctctattgtggtttccttgggaaggaataagtgaggcaggttaagtaggcttaagattggattgtttggataatttcactgggcattccataataggggttgtccctggttgttt

SEQ ID NO: 733 - DNA, 121 bp, synthetic construct
  misc_feature 1..121: note = Description of artificial sequence: synthetic polynucleotide sequence
  source 1..121: mol_type = other DNA
cattgggtcggctgggctgggagggcgtcctttctgtgcagtgggctaggctgtttctccggatggagtcttctttttgggggctatggggagggaagcatgcttctgaagagctcaccat

SEQ ID NO: 734 - DNA, 121 bp, synthetic construct
  misc_feature 1..121: note = Description of artificial sequence: synthetic polynucleotide sequence
  source 1..121: mol_type = other DNA
ggattgatcttttgctatgtcacccaccacctatgtgaccatcagggaagttacttagttcctttcagtcttgcttctcttcctgtaaaatggggtttataatagcacttgccacatgggc

SEQ ID NO: 735 - DNA, 121 bp, synthetic construct
  misc_feature 1..121: note = Description of artificial sequence: synthetic polynucleotide sequence
  source 1..121: mol_type = other DNA
aatttttacctaattttaaattcttatttgataacctaaaaaccctggaaatgtgagaatgctcttcccttatcctctttcctatcatgacgttgacataacagaaaaggaaacagcattg

SEQ ID NO: 736 - DNA, 121 bp, synthetic construct
  misc_feature 1..121: note = Description of artificial sequence: synthetic polynucleotide sequence
  source 1..121: mol_type = other DNA
gcagagccttcactcttagctactttgttatagaagttctagtttatcttggttttcagtaccatttcaataccactattatgaaaaaggagattccttcagtcccacaaagagatatgat

SEQ ID NO: 737 - DNA, 121 bp, synthetic construct
  misc_feature 1..121: note = Description of artificial sequence: synthetic polynucleotide sequence
  source 1..121: mol_type = other DNA
tgctgaactgattgggatctttagagcaaggcagggcaccagagaggaaagagctaaacagaaaggagactcaaaaatctgggtaggggttcttcatgaatccttggctaaggtctagact

SEQ ID NO: 738 - DNA, 121 bp, synthetic construct
  misc_feature 1..121: note = Description of artificial sequence: synthetic polynucleotide sequence
  source 1..121: mol_type = other DNA
ataccacagtatcatctgaaaacctggtaagtttgccttctatgtttctggccaactcaacgatacaaaaacattcaccagatcaggagtgaggaaagagccctgagaaacgataagcatt

SEQ ID NO: 739 - DNA, 121 bp, synthetic construct
  misc_feature 1..121: note = Description of artificial sequence: synthetic polynucleotide sequence
  source 1..121: mol_type = other DNA
tattagagacattaacccttttactgtaaaacacattgcaaattaaacacatttttctttcggaaacatatttccctgtgctctatattggattttcttttctgaatattgacctaactgc

SEQ ID NO: 740 - DNA, 121 bp, synthetic construct
  misc_feature 1..121: note = Description of artificial sequence: synthetic polynucleotide sequence
  source 1..121: mol_type = other DNA
gtgcagggaagttgggacgatggagttgatgatgctactgagagtcatgtctgaaaaaatggatggtggattctaggccagcaacaactaaaaccaagaaatgaataacagaccgaaaaag

SEQ ID NO: 741 - DNA, 121 bp, synthetic construct
  misc_feature 1..121: note = Description of artificial sequence: synthetic polynucleotide sequence
  source 1..121: mol_type = other DNA
aatcaataatgactttctagtggaaaagtgaataaaaaataataactaaaaagtttaatgtaaccacactacactaacaagcaggagagcttacggtgaaaaagttatggataggtaataa

SEQ ID NO: 742 - DNA, 121 bp, synthetic construct
  misc_feature 1..121: note = Description of artificial sequence: synthetic polynucleotide sequence
  source 1..121: mol_type = other DNA
gttagattccaatgcgcaactttatccacttaagtgctgaactgcccaaagcacaaatacccagaggtactagctttaaacaaaacatataatatttatttctaagaaacaactatactca

SEQ ID NO: 743 - DNA, 121 bp, synthetic construct
  misc_feature 1..121: note = Description of artificial sequence: synthetic polynucleotide sequence
  source 1..121: mol_type = other DNA
ggccaagaagaataagggacatggacactggagagtgattagagtaggatttgttaagcgaaatgatagctttcagcaaagaaaggggacctgaaatagggttgccagagatggggctaaa

SEQ ID NO: 744 - DNA, 121 bp, synthetic construct
  misc_feature 1..121: note = Description of artificial sequence: synthetic polynucleotide sequence
  source 1..121: mol_type = other DNA
tcatcacagcgcagggaatacacaaggcttaatccactaacagaataggttgaaaatactgagattcaccctccaccccaacaatgcaaggagactcaaagaaattaatgatcacaggctg

SEQ ID NO: 745 - DNA, 121 bp, synthetic construct
  misc_feature 1..121: note = Description of artificial sequence: synthetic polynucleotide sequence
  source 1..121: mol_type = other DNA
tgctttagtcatgatcagtgaaagcatgtgcaagtatatcttagagatattgaggattctgttccagagcaccgcaataaagtttatatcataataaaacaagttttgtggatttattttt

SEQ ID NO: 746 - DNA, 121 bp, synthetic construct
  misc_feature 1..121: note = Description of artificial sequence: synthetic polynucleotide sequence
  source 1..121: mol_type = other DNA
tatctttgactcagctatcatccaggatctcaaactcttggcttactctttggcaaaaatctacttatttctaagcttttcattcactcattcctacagttttgcatgatcatttttaatt

SEQ ID NO: 747 - DNA, 121 bp, synthetic construct
  misc_feature 1..121: note = Description of artificial sequence: synthetic polynucleotide sequence
  source 1..121: mol_type = other DNA
tgcttggacaggtaggaaggcagcaagtagaccaatgtgacaagagtggagcaagcaaatagttgtgtaatgggaaaccgtatcagcgaggtggatggggacatattctgtagggatgctc

SEQ ID NO: 748 - DNA, 121 bp, synthetic construct
  misc_feature 1..121: note = Description of artificial sequence: synthetic polynucleotide sequence
  source 1..121: mol_type = other DNA
ggcagaaaagcaagctcagacatggccatgtgggcaaagtacagattttattctaagcatgatgggaaaccactggagggcaataaacaaacagggtgacatggaccactctgacctgtct

SEQ ID NO: 749 - DNA, 121 bp, synthetic construct
  misc_feature 1..121: note = Description of artificial sequence: synthetic polynucleotide sequence
  source 1..121: mol_type = other DNA
tgatagacatatagtctccatcagtgtctggcagcaagccaagagtaattttcgatcctagaaatgcatcttactaagatagttaacaaatatttgtcattctcttctctgagagttccat

SEQ ID NO: 750 - DNA, 121 bp, synthetic construct
  misc_feature 1..121: note = Description of artificial sequence: synthetic polynucleotide sequence
  source 1..121: mol_type = other DNA
tccccagagatcaagattaacacaaaggtgttcattcttaccacttctattctacattgtattggtgatcctggtcagtgcaacatggtaagaaaaagaaatagcagttacatatattgga

SEQ ID NO: 751 - DNA, 121 bp, synthetic construct
  misc_feature 1..121: note = Description of artificial sequence: synthetic polynucleotide sequence
  source 1..121: mol_type = other DNA
ctctttaatgatctatatagtagagtagccaaaaatgatgaccttcaagtaagacagatctggattttaattctcgctatgctatttcttagctatgcaaccctgagtgagttaatttacc

SEQ ID NO: 752 - DNA, 121 bp, synthetic construct
  misc_feature 1..121: note = Description of artificial sequence: synthetic polynucleotide sequence
  source 1..121: mol_type = other DNA
gccaccctgaatgtacttggcacatactcttcagataaacgacgtcagcataaatcagagttacttcatatggatatctcatggggttttatattttcattttggcttgtttttaaaaaaa

SEQ ID NO: 753 - DNA, 121 bp, synthetic construct
  misc_feature 1..121: note = Description of artificial sequence: synthetic polynucleotide sequence
  source 1..121: mol_type = other DNA
gtttctgatttcatgaagttggaacttatcctgaactgatggttctacaataacctgattttatatgtacctgatgtactgaaattaatgctaacttcaaaattattccacttcctttctc

SEQ ID NO: 754 - DNA, 121 bp, synthetic construct
  misc_feature 1..121: note = Description of artificial sequence: synthetic polynucleotide sequence
  source 1..121: mol_type = other DNA
ggcggagtctattggaataataaagttatgctaatgaagaccatggactagcaaagtcacgttaatgtaaccatcagttgtgtctgtagtaggtagtttccattttaggtgtaagtttaga

SEQ ID NO: 755 - DNA, 121 bp, synthetic construct
  misc_feature 1..121: note = Description of artificial sequence: synthetic polynucleotide sequence
  source 1..121: mol_type = other DNA
ctaggagagaggattattcttatttctattttcaagatgggaaaactgaggtaaagagaggtaaaataacttgtccaaggtcacacagttagaaaagggaagatgcaggatctgaacctca

SEQ ID NO: 756 - DNA, 143 bp, synthetic construct
  misc_feature 1..143: note = Description of artificial sequence: synthetic polynucleotide sequence
  source 1..143: mol_type = other DNA
catgagccacgggaagggaaccgacatgctcccggagatcgccgccgccgtgggcttcctctccagcctcctgaggacccggggctgcgtgagcgagcagaggcttaaggtcttcagcggggcgctccaggaggcactcacag

SEQ ID NO: 757 - DNA, 336 bp, synthetic construct
  misc_feature 1..336: note = Description of artificial sequence: synthetic polynucleotide sequence
  source 1..336: mol_type = other DNA
gagcactacaaacaccactggtttcccgaaaagccgtccaagggctccggctaccgctgcattcgcatcaaccacaagatggaccccatcatcagcagggtggccagccagatcggactcagccagccccagctgcaccagctgctgcccagcgagctgaccctgtgggtggacccctatgaggtgtcctaccgcattggggaggacggctccatctgcgtcttgtacgaggaggccccactggccgcctcctgtgggctcctcacctgcaagaaccaagtgctgctgggccggagcagcccctccaagaactacgtgatggcagtctccagctag

SEQ ID NO: 758 - DNA, 121 bp, synthetic construct
  misc_feature 1..121: note = Description of artificial sequence: synthetic polynucleotide sequence
  source 1..121: mol_type = other DNA
ttggactacctgagcaccttgttggagctctagctgtttgacaagttgtgtgcagagctactaaccctgttctctaggtctgttacatattcccctagagcagttttgacacactaagatg

SEQ ID NO: 759 - DNA, 121 bp, synthetic construct
  misc_feature 1..121: note = Description of artificial sequence: synthetic polynucleotide sequence
  source 1..121: mol_type = other DNA
agtagactgaacacctgggcttgtgtctaaacaaaaattggcaagaattcagaagcgtctccggatccagtaaatgctgcctagcctggacgccacatctggtgaccacagcacattctat

SEQ ID NO: 760 - DNA, 121 bp, synthetic construct
  misc_feature 1..121: note = Description of artificial sequence: synthetic polynucleotide sequence
  source 1..121: mol_type = other DNA
gccttccaaactatttctgattatcttaacttggtttctgctaatatggaggactttcattgacacacacagtcacagactcctggacacaattacaaagggggcaaaacttgacgtcacc

SEQ ID NO: 761 - DNA, 121 bp, synthetic construct
  misc_feature 1..121: note = Description of artificial sequence: synthetic polynucleotide sequence
  source 1..121: mol_type = other DNA
gagagcacctgccaacctgcaaaaggcatgtaatgtgagcgagaaaggagtctgttatttcagggcactcagctgtggagcttattactacagcataacctaacttgtcctgactcttaca

SEQ ID NO: 762 - DNA, 121 bp, synthetic construct
  misc_feature 1..121: note = Description of artificial sequence: synthetic polynucleotide sequence
  source 1..121: mol_type = other DNA
gaacatgatgtctctggaaaaaatcagtgttgttggagtataggctacatagtgaggaatggtagttgattaaatggattggagcttacttgtaaaaaaatatatgcattttttccctata

SEQ ID NO: 763 - DNA, 121 bp, synthetic construct
  misc_feature 1..121: note = Description of artificial sequence: synthetic polynucleotide sequence
  source 1..121: mol_type = other DNA
cctgacttgtcctgagagtccccctatttctataaaatgctgctcccaccttgatacaacttcttattaaagtccctgtatttagatttgataccaagactgggagcagggactggcactg

SEQ ID NO: 764 - DNA, 121 bp, synthetic construct
  misc_feature 1..121: note = Description of artificial sequence: synthetic polynucleotide sequence
  source 1..121: mol_type = other DNA
aatgatctctaaggccttccagcagtgacatctggggcgtgaggatctttctcaggttcggtattccctacctacaggagagcaaccggcctcactggggaggtcaccaataacctggcct

SEQ ID NO: 765 - DNA, 121 bp, synthetic construct
  misc_feature 1..121: note = Description of artificial sequence: synthetic polynucleotide sequence
  source 1..121: mol_type = other DNA
ctaactttctggccttcaacaaggaccttctggattgggttgatctctctttgccttcaatgggagtactgctagcaggatgcactgctgaagtcactccttgttagagggttggctttgc

SEQ ID NO: 766 - DNA, 121 bp, synthetic construct
  misc_feature 1..121: note = Description of artificial sequence: synthetic polynucleotide sequence
  source 1..121: mol_type = other DNA
ctgcctcctaagaagctcacagagagatggcagcacagacagtggtgcccagtgtgagagcggcacagtagaggcacagagattgttggggaattgcagaatcagggcagcaaacctgaaa

SEQ ID NO: 767 - DNA, 121 bp, synthetic construct
  misc_feature 1..121: note = Description of artificial sequence: synthetic polynucleotide sequence
  source 1..121: mol_type = other DNA
tgaatgaaaactttaatttactcttacctaatgttggttgatggtcattggttaatggttgttagtcaatgtctgtgtgacagaattggtcagggtacttagagttggcacaaaaaataat

SEQ ID NO: 768 - DNA, 121 bp, synthetic construct
  misc_feature 1..121: note = Description of artificial sequence: synthetic polynucleotide sequence
  source 1..121: mol_type = other DNA
atgagtctggagttttggaggaactggatgaggacttggtagacaaacttgtactgagcgatagtctggatcatgaacatcctctgctccctgaggagcctcagcatcatgggcacttcca

SEQ ID NO: 769 - DNA, 165 bp, synthetic construct
  misc_feature 1..165: note = Description of artificial sequence: synthetic polynucleotide sequence
  source 1..165: mol_type = other DNA
cttcgttatgttccaagcagtagatcatcagctcagaaagaatgagcacgccggtccttcccaccccagcactacagtggaccacgatgggcgggtgccggttcttggtgccttccagcatgctgttggtatggcgacggaccgactggatctcctccaagtagg

SEQ ID NO: 770 - DNA, 236 bp, synthetic construct
  misc_feature 1..236: note = Description of artificial sequence: synthetic polynucleotide sequence
  source 1..236: mol_type = other DNA
cataaaaatccttggacatcttctggacagccgtgatctggccagtcagtatattgtaaatgccacaccgtcctttcttgcccagacaaaaggtgcttgaccttcaagcccgtggttgcatagcaaacagaatccgttcgaaacttcgtggtgaccttgaacttgccataggtggctgagctgtgctttgaacctagtttgggccagtatcggtggcttttggttcgtccaccctc

SEQ ID NO: 771 - DNA, 121 bp, synthetic construct
  misc_feature 1..121: note = Description of artificial sequence: synthetic polynucleotide sequence
  source 1..121: mol_type = other DNA
tctgcagtgaccatggcaatcacattcactccctgctcccacaccatctgccagaagtcgtggcacgtgtgtggcaggggcccctgggtggctatgtagtgccattctgccccgccaacca

SEQ ID NO: 772 - DNA, 220 bp, synthetic construct
  misc_feature 1..220: note = Description of artificial sequence: synthetic polynucleotide sequence
  source 1..220: mol_type = other DNA
ccttgatgtgggaggcattaatgtatcctgtgttattttctttggttggtatcagctctactcgattctcctcataggggacaacttcacggattcggctgcgctcggcgttttctggcagagctgctgtgctgaaaatgccattcgcctttttctttggaatttgctcatattctgtgaacaccattccctcttctagtttcttcttcagggttctgaa

SEQ ID NO: 773 - DNA, 145 bp, synthetic construct
  misc_feature 1..145: note = Description of artificial sequence: synthetic polynucleotide sequence
  source 1..145: mol_type = other DNA
ccctctcgtccatgggaacccgggtggcatcaactcgattctcttcccgccctgagactcgagccaccgagagcccattcaatgctgccaacatcagcggcctcttctgtgcctccaggcctgccatcttctgcttctctagatt

SEQ ID NO: 774 - DNA, 226 bp, synthetic construct
  misc_feature 1..226: note = Description of artificial sequence: synthetic polynucleotide sequence
  source 1..226: mol_type = other DNA
ccctgatcatcatctctctctctataatgctgtcttccagggaaaacatttcagacacaggtctctccttcacaggctcttttttgacccgctccttcacactagtcaggtcgggttccgagatggatgggccgagagaggccccgttgacagccggcgggtcagtccgagacatgctgatggccttggctggcccatgcctcagcaccctggctctggccatggc

SEQ ID NO: 775 - DNA, 454 bp, synthetic construct
  misc_feature 1..454: note = Description of artificial sequence: synthetic polynucleotide sequence
  source 1..454: mol_type = other DNA
gggaggaaggctggcttggtcctgcctcagagccccattgctcacactcttccttggaccggggtactcaggcgggggcttgttggggatgcgggccagggccgcctgcagctgggcactgtactccatcttctcccggagcatggggatctggggcaccgattctggagcctcctcctcctcctcctcactctcgctgctgtggattagcatagtggcatcagagaaggtcttcttgtggtgatactgagggagctgggggacctcgtggctgcctgacccctcctcgggcggtccctgctcccggagcgtgttgcggcgagccatggggaggtggagcgacttgagcgtcatggcctccatgccccgcaccatgctgttcatcacctccaggctgtggcgcttgttcacagtgccgtggtgcttggtggccgtgaggggctcgctcacctcc

SEQ ID NO: 776 - DNA, 452 bp, synthetic construct
  misc_feature 1..452: note = Description of artificial sequence: synthetic polynucleotide sequence
  source 1..452: mol_type = other DNA
tggagagactgatgaaccaccggagagctgtcctcttggaaggtcttcaccgagagctgcaccttccgggtcaccaggtccgggctgctgccgctgacgtacttgtggcggtggctggccaggtctggggtgctggtggcaggtcgtggccgtgggtaggggggcggtggcctgaagagatagttcttaagcatgtgggccgtgctgtagttatggctgccctgcagctgcatgttggccagctctggggtgctcaccgtgtgcgagatggcgcttgcccccggcttgcttggtaccacattattctttgggttcctctggtcagatggactgacaagtttgttgctgtagaccccctgtggcccataagggacagtgtaggggtgcctctcccgcatctccggttggctgtacaccagatcctctggctggttgtaggcatgggtgttgat

SEQ ID NO: 777 - DNA, 347 bp, synthetic construct
  misc_feature 1..347: note = Description of artificial sequence: synthetic polynucleotide sequence
  source 1..347: mol_type = other DNA
aatgttgaggtttctcagagactggctctggctgtctgtatgcaggatccccctcttcatctggcgcatgactgtctcataatcgggggttggcctgtacgagggcacgatgatcgcgctgtgccggtggctcgggatgtagtcggcccgcatgatgtcactcccagggatactgaggttggaggatacaggggaggcctggatgaaactttgcgagcagttgagggagttgacgctgtgaacgctacacacgctgccattggtgacagtgccatttaaataatttaagtccaggctgttgtgagagttgcaatacaaggcttcttcattcccatgaaaaatgctgt

SEQ ID NO: 778 - DNA, 121 bp, synthetic construct
  misc_feature 1..121: note = Description of artificial sequence: synthetic polynucleotide sequence
  source 1..121: mol_type = other DNA
agaacggcaagccagagttaccttgcgaggtgtgcgtttccgagtagtgctcaccacactggacgtgaacgggaggcaggatgtacggctgctgcctgggctgaaacagagaacacagagg

SEQ ID NO: 779 - DNA, 121 bp, synthetic construct
  misc_feature 1..121: note = Description of artificial sequence: synthetic polynucleotide sequence
  source 1..121: mol_type = other DNA
gatcacttgatcactgcagcttctatacataccagagaggatcggctccaggtgggctggcgtctgatggggggtggagaatttgactgtctacatgaagaggtgaaaaaatgagaatggt

SEQ ID NO: 780 - DNA, 121 bp, synthetic construct
  misc_feature 1..121: note = Description of artificial sequence: synthetic polynucleotide sequence
  source 1..121: mol_type = other DNA
ggattaaatgtttacttactcagtgcagattttgttttgtttgtaaaacttgtgtcgtgtggcaaacaaccgagaaatatacttggcattttcgatatcatccttggaaaagaagagacag

SEQ ID NO: 781 - DNA, 121 bp, synthetic construct
  misc_feature 1..121: note = Description of artificial sequence: synthetic polynucleotide sequence
  source 1..121: mol_type = other DNA
ttgtctgttgtgcttaccgtgtgaaagagggcagtctcttctttgttgatgagctccactagaatggtcgacttgttatgagtgatattccccatgtcattccacctggttagaagaaatg

SEQ ID NO: 782 - DNA, 121 bp, synthetic construct
  misc_feature 1..121: note = Description of artificial sequence: synthetic polynucleotide sequence
  source 1..121: mol_type = other DNA
aaacaaataagactacctgtatattaccgcttgtcttccaattctgttcctcacgaaaatccccataaagaaaatgccaaggtgtacacagtttccatgattgtcctgggtaagaccaaca

SEQ ID NO: 783 - DNA, 121 bp, synthetic construct
  misc_feature 1..121: note = Description of artificial sequence: synthetic polynucleotide sequence
  source 1..121: mol_type = other DNA
agggcacagcatattacctttacagggaagatttcctgtccaaatccatccaaacgttcaacttcattgatgtacatcagttcagcttctgctggcaggattccactaaaatcaaaatagc

SEQ ID NO: 784 - DNA, 121 bp, synthetic construct
  misc_feature 1..121: note = Description of artificial sequence: synthetic polynucleotide sequence
  source 1..121: mol_type = other DNA
gccccttaccctctgcctgccttacctgtgggctttgtgttcttgggctaccttctgggtcagctcctccagaacagcctcttccagggccaaatcctataagaatagaaagtgcttaagg

SEQ ID NO: 785 - DNA, 121 bp, synthetic construct
  misc_feature 1..121: note = Description of artificial sequence: synthetic polynucleotide sequence
  source 1..121: mol_type = other DNA
aattaagaaaaatgaaattacacttaccataggaaatagcacatactctctgaggaaatcttgagaatcaaactgattatagtctccaaaatcagctgagaagaaaagaagatggaagggc

SEQ ID NO: 786 - DNA, 121 bp, synthetic construct
  misc_feature 1..121: note = Description of artificial sequence: synthetic polynucleotide sequence
  source 1..121: mol_type = other DNA
actatgtcttaccttgcacagctaggccggctagccgaatcacctggtccaatgtacatcgtaatcgcccttcaagcacatcttttttgacttgcaggtaatactgatatctgttcatggg

SEQ ID NO: 787 - DNA, 171 bp, synthetic construct
  misc_feature 1..171: note = Description of artificial sequence: synthetic polynucleotide sequence
  source 1..171: mol_type = other DNA
ccttgtggcctcttgctgaagccatgacacatttggcacatagaacatgactccaaagaaaagcaaaggctcattagcgaatttgtccagatgtttcttcagaggtttctccagctccacccatcgtgcttgctggctcttgctgagaaaccaaaggccaaagtagtgcgt

SEQ ID NO: 788 - DNA, 175 bp, synthetic construct
  misc_feature 1..175: note = Description of artificial sequence: synthetic polynucleotide sequence
  source 1..175: mol_type = other DNA
cctctcgcagctccagcctctgggccacagcctccaggcattcttgccctgtgctttccaccgacagcgtgcactcgataacattgctgtccagcaggcgaatccgtgtgacaaagcagttcttgctcaggacgttgtagcgccgtgtccggcggagcttcagaccaaaaggcat

SEQ ID NO: 789 - DNA, 121 bp, synthetic construct
  misc_feature 1..121: note = Description of artificial sequence: synthetic polynucleotide sequence
  source 1..121: mol_type = other DNA
ggagagaaagagaagagaaagtttgtgcagctgatcgagaggccgtttagaatttatgattcgcttcctccacagtctttttgataaacctttgcttcaggtgtttggggatcagaatgat

SEQ ID NO: 790 - DNA, 121 bp, synthetic construct
  misc_feature 1..121: note = Description of artificial sequence: synthetic polynucleotide sequence
  source 1..121: mol_type = other DNA
atgcattattttctttaacactgacaactccaaaaaataagaattgttgttgtcattgctgtaaagaggagggaatggattcttagaggggctaacccattttacagggccatacaaatat

SEQ ID NO: 791 - DNA, 121 bp, synthetic construct
  misc_feature 1..121: note = Description of artificial sequence: synthetic polynucleotide sequence
  source 1..121: mol_type = other DNA
accccagtcttccctaagcctccactcctaccctttcacgcctgcacactgtatatttgttgtcactgtttattaaagataactatgccctaagtctttatttacttctgtttattgctat

SEQ ID NO: 792 - DNA, 121 bp, synthetic construct
  misc_feature 1..121: note = Description of artificial sequence: synthetic polynucleotide sequence
  source 1..121: mol_type = other DNA
cccggctgctggagctccgatcggttggcgcccggcggccccgaacattaacgacacccgggagcctggcctcgaagctcaggcccgtgaacagactccaactacaacagcaccggcgact

SEQ ID NO: 793 - DNA, 121 bp, synthetic construct
  misc_feature 1..121: note = Description of artificial sequence: synthetic polynucleotide sequence
  source 1..121: mol_type = other DNA
gttaattattcttttgaattttcactaaattatatgagtattttatataggatacttacgtcctcttctgtatatgtgattggttatacagtggtccctcttatccatgattttgctttct

SEQ ID NO: 794 - DNA, 121 bp, synthetic construct
  misc_feature 1..121: note = Description of artificial sequence: synthetic polynucleotide sequence
  source 1..121: mol_type = other DNA
ccaggaatatacaattcacccttcagaaaagagcctgatccatgggagctgcaattacagaaggcaaagcctttaacacaccgaagacctaaagttaagcagaaggactccaccagcctta

SEQ ID NO: 795 - DNA, 121 bp, synthetic construct
  misc_feature 1..121: note = Description of artificial sequence: synthetic polynucleotide sequence
  source 1..121: mol_type = other DNA
aggtggggcttcactggaaacctgtccctttctgcccaggagcctatctgcctcattccgtcatcaatcacatcgtccacagcatccagtctgtttctgccaaagggtgcctgcaagccct

SEQ ID NO: 796 - DNA, 121 bp, synthetic construct
  misc_feature 1..121: note = Description of artificial sequence: synthetic polynucleotide sequence
  source 1..121: mol_type = other DNA
tggggtccatgttatagaactgagtacatgaaataggtaacgttttagctactaatatctgcattgataatgtttatacagtgagatgccatctgctgcatgaacatttgcacatattaat

SEQ ID NO: 797 - DNA, 121 bp, synthetic construct
  misc_feature 1..121: note = Description of artificial sequence: synthetic polynucleotide sequence
  source 1..121: mol_type = other DNA
aagctgggcatggatgaatttgttaagaagggagtgcatgtaagcagacacttgaaggatgttagagagtaatctgggactacctggggaagggcattctattctgttccattctggcaga

SEQ ID NO: 798 - DNA, 121 bp, synthetic construct
  misc_feature 1..121: note = Description of artificial sequence: synthetic polynucleotide sequence
  source 1..121: mol_type = other DNA
acttttgatgttatcttcaactatatataagacgctgtatatgtatgcaaagcacagaatatagcagtgctttcctttattgatttttactttcatgagatttttttttttttttttctga

SEQ ID NO: 799 - DNA, 121 bp, synthetic construct
  misc_feature 1..121: note = Description of artificial sequence: synthetic polynucleotide sequence
  source 1..121: mol_type = other DNA
accaaacaaatagttgcatttcaaggggcctacaaaggaacttgttttaacttccaccatagagctgttaatttctagttaatgaaagtcaaaggttcttttggaattttttttcttttgg

SEQ ID NO: 800 - DNA, 121 bp, synthetic construct
  misc_feature 1..121: note = Description of artificial sequence: synthetic polynucleotide sequence
  source 1..121: mol_type = other DNA
catttcactatccacgctggtgagaaaacacagcatcttagactttcatctcctttcttctgagtttcacaccccctcaacttggaacagagagagtccatgttcaaattgcttgctttct

SEQ ID NO: 801 - DNA, 121 bp, synthetic construct
  misc_feature 1..121: note = Description of artificial sequence: synthetic polynucleotide sequence
  source 1..121: mol_type = other DNA
atcaactgtggaagaaaaaaaaaaaactctttacacaggggcttgaaataaatgagctgcggccagaacaaggtaagcaagaaaagagaggcacaagggtgcattggtagggtacattcct

SEQ ID NO: 802 - DNA, 121 bp, synthetic construct
  misc_feature 1..121: note = Description of artificial sequence: synthetic polynucleotide sequence
  source 1..121: mol_type = other DNA
attcgtactcgtagacatcggagtagtcatttgacaaagatctgcctcccatatgaaagcgtaagttcctatgagagaaaagaccataattatttttattcttcttcatattccaacttgc

SEQ ID NO: 803 - DNA, 121 bp, synthetic construct
  misc_feature 1..121: note = Description of artificial sequence: synthetic polynucleotide sequence
  source 1..121: mol_type = other DNA
agatctctagttcggaaggcaattttttccacatcgttaaataaatatggtcagcattcaacaattgtgctgatgaagtgagtatgtggatatattacagaatcaattttcttacctattt

SEQ ID NO: 804 - DNA, 121 bp, synthetic construct
  misc_feature 1..121: note = Description of artificial sequence: synthetic polynucleotide sequence
  source 1..121: mol_type = other DNA
agagaagttaagacacttgcccaaggtaacaaatccaataaacaggaaagctggaattagagccgaggtcagctccaccacccctatccttactgcttcagggttttcataccccagtgcc

SEQ ID NO: 805 - DNA, 121 bp, synthetic construct
  misc_feature 1..121: note = Description of artificial sequence: synthetic polynucleotide sequence
  source 1..121: mol_type = other DNA
gaggagggcttatcactctttcagacagaaactgtaacccttatttcaaagacctgatactaactagagaaagacagaagttcaagggaaatctttattattgttgctttttccatttgtg

SEQ ID NO: 806 - DNA, 121 bp, synthetic construct
  misc_feature 1..121: note = Description of artificial sequence: synthetic polynucleotide sequence
  source 1..121: mol_type = other DNA
tctcacaaatatgacaaagttttatgaaacacataagcacaatttaatgaaaagacaacctgggagtgagaaggactcaatttgaatctcaagtctatcactcatagtgaccatcagtata

SEQ ID NO: 807 - DNA, 121 bp, synthetic construct
  misc_feature 1..121: note = Description of artificial sequence: synthetic polynucleotide sequence
  source 1..121: mol_type = other DNA
tgaatacctaccaccacattgcaccactgattgagcttgatgggcaggtctctgtgtgactgtacccattttgcatatgcaggatacattactgaaagacacgggaaaatagagacagtca

SEQ ID NO: 808 - DNA, 121 bp, synthetic construct
  misc_feature 1..121: note = Description of artificial sequence: synthetic polynucleotide sequence
  source 1..121: mol_type = other DNA
ttactatggcacaaataataaaaagtaaccgaatttaaaaaccgtaaatggcgctataagtaaatgtgacagcctcattaattagctgttggctctaccaacagtagatgcaattaaattg

SEQ ID NO: 809 - DNA, 121 bp, synthetic construct
  misc_feature 1..121: note = Description of artificial sequence: synthetic polynucleotide sequence
  source 1..121: mol_type = other DNA
ctcacttgtctagcagcacttgctgagcaggcatttcatcttgccaggatttgcatctgcgcaaagctaaggaatgggtaaggtgtcaggcttccagggttaagggaaaggaagaaaatgg

SEQ ID NO: 810 - DNA, 121 bp, synthetic construct
  misc_feature 1..121: note = Description of artificial sequence: synthetic polynucleotide sequence
  source 1..121: mol_type = other DNA
aagtgtatttacagcaaaataaggaaaaaatatttataagtattacagggcttgtttctgtaactggtcatgtggttgtaggtggtatttataattacctccttcaactactgattccata

SEQ ID NO: 811 - DNA, 121 bp, synthetic construct
  misc_feature 1..121: note = Description of artificial sequence: synthetic polynucleotide sequence
  source 1..121: mol_type = other DNA
ctcacatcaacacagtaataatgaacacagaagacttctatgacctcaaaatatgtgggtatttctctctaccagcaagcaagcaatgaattctgtagatgacacccaaatggtcatcctc

SEQ ID NO: 812 - DNA, 121 bp, synthetic construct
  misc_feature 1..121: note = Description of artificial sequence: synthetic polynucleotide sequence
  source 1..121: mol_type = other DNA
ggcagagactgtggcaatgaggcagctaagtggttcaccaacttcttgaaaactgaagcgtatagattggttcaatttgagacaaacatgaagggaagaacatcaagaaaacttctcccca

SEQ ID NO: 813 - DNA, 121 bp, synthetic construct
  misc_feature 1..121: note = Description of artificial sequence: synthetic polynucleotide sequence
  source 1..121: mol_type = other DNA
gacaaggacaaggaggctggcgagaagccatcaggtggagccccggctgcggatggcgagcaggacgagaggagccccagccgttctgaaggcgaggctgagagcgagagcagcgactccg

SEQ ID NO: 814 - DNA, 121 bp, synthetic construct
  misc_feature 1..121: note = Description of artificial sequence: synthetic polynucleotide sequence
  source 1..121: mol_type = other DNA
gctcttcttactagtggaaatatgtctagtggtctcatccttttctcagatgtctgttaacttcactaaaccactgcatgttttggcatagtgtgttagcttctagggagaggcctccaga

SEQ ID NO: 815 - DNA, 121 bp, synthetic construct
  misc_feature 1..121: note = Description of artificial sequence: synthetic polynucleotide sequence
  source 1..121: mol_type = other DNA
agggatttaagcttattttccttctttctgtgtttggaggaggcaaattctgggacactagtaaccgtgccttttcttatttggaccttgcactaccttggtcagtgaagtatgtcagaca

SEQ ID NO: 816 - DNA, 121 bp, synthetic construct
  misc_feature 1..121: note = Description of artificial sequence: synthetic polynucleotide sequence
  source 1..121: mol_type = other DNA
tacaaattctgtccttaactttcagcatgtagcaaactgataagaaaatgacaagaatagctaaagaatgctaactgaagtgccataaatattgaaaacagagatgataataagtttcaca

SEQ ID NO: 817 - DNA, 121 bp, synthetic construct
  misc_feature 1..121: note = Description of artificial sequence: synthetic polynucleotide sequence
  source 1..121: mol_type = other DNA
aatttgaccgcacaacgagattgacacctatgaacagtttacagaccaacagtgcaccagtgaacacagcctcagaattgctggctgagtgtgacacagccagatgatataggtgggccac

SEQ ID NO: 818 - DNA, 121 bp, synthetic construct
  misc_feature 1..121: note = Description of artificial sequence: synthetic polynucleotide sequence
  source 1..121: mol_type = other DNA
tctctcttcagggactcgaggactatgtgaagtggctgggagggcatcactcggcttggttcattggtattctcatcataaactataatttctttggaaaagatcctcttgaaagagtcct

SEQ ID NO: 819 - DNA, 121 bp, synthetic construct
  misc_feature 1..121: note = Description of artificial sequence: synthetic polynucleotide sequence
  source 1..121: mol_type = other DNA
ttatgacacaggaggagcagaggtcaacaagcaatgtgtgaacacagagaatgggcactatcatcttctatctgcaggaagaaggagggaaaaagggggaagcggcagccaagaacaccta

SEQ ID NO: 820 - DNA, 121 bp, synthetic construct
  misc_feature 1..121: note = Description of artificial sequence: synthetic polynucleotide sequence
  source 1..121: mol_type = other DNA
tcatctttcattcactaaatcttggtgccttatgttcactccaaaacaatctgaacgcaacaactatgcagactaagtgtgtggttacttcctgacttttcctcagagttaactagttcca

SEQ ID NO: 821 - DNA, 121 bp, synthetic construct
  misc_feature 1..121: note = Description of artificial sequence: synthetic polynucleotide sequence
  source 1..121: mol_type = other DNA
aattaataagccatgctatgtttaagtttatatattatgaaaactcagcagcagccacataaattgttgagaactcagaccagcaaaatattttttggtagggtattttgtcactgagtgg

SEQ ID NO: 822 - DNA, 121 bp, synthetic construct
  misc_feature 1..121: note = Description of artificial sequence: synthetic polynucleotide sequence
  source 1..121: mol_type = other DNA
tggaatatcactaagataataatgtttccttcactctcttcatgatgctggcagagaagttagaagtgtctgtttctggcagcatggcagataagatgcctcaaatgattctctcaataaa

SEQ ID NO: 823 - DNA, 121 bp, synthetic construct
  misc_feature 1..121: note = Description of artificial sequence: synthetic polynucleotide sequence
  source 1..121: mol_type = other DNA
caagccacatgacttagatggcatagccaccttcctctcaaggctcaggaaaatttaaagctcccaccaggtgcagtggcaaatgcttgtaatctcagtactttgggaggccaaggtggga

SEQ ID NO: 824 - DNA, 121 bp, synthetic construct
  misc_feature 1..121: note = Description of artificial sequence: synthetic polynucleotide sequence
  source 1..121: mol_type = other DNA
ataagcatgcctcaaggttctgtgctcttctctccacaatgtacaccctgtggaatgcaccaactcatagaactccaactttcatctatgcaggtaactgcccagcccatggatcttgccc

SEQ ID NO: 825 - DNA, 121 bp, synthetic construct
  misc_feature 1..121: note = Description of artificial sequence: synthetic polynucleotide sequence
  source 1..121: mol_type = other DNA
acctcttcaaacctgttctggcccacgtccccacagaatatccggcctcggccctggcgcgtgatggggtcccctcggtccacagcacaacgccacatgttcctgatcccataggcataga

SEQ ID NO: 826 - DNA, 121 bp, synthetic construct
  misc_feature 1..121: note = Description of artificial sequence: synthetic polynucleotide sequence
  source 1..121: mol_type = other DNA
tggaaagggggcccgtaatccaggcactgggggtgtccctgcagcaagcccacctggcccaacaagaatatgaggcagaggcagagaatgccagaagagagccagggggcccggcaatgca

SEQ ID NO: 827 - DNA, 121 bp, synthetic construct
  misc_feature 1..121: note = Description of artificial sequence: synthetic polynucleotide sequence
  source 1..121: mol_type = other DNA
taacttgccctaaggtgccctgtttttaattttctagttgttttgtttcattatggagattgacggtttccagcagttagacctagagaagagtgtaccttccaaaaagactactcctaaa

SEQ ID NO: 828 - DNA, 121 bp, synthetic construct
  misc_feature 1..121: note = Description of artificial sequence: synthetic polynucleotide sequence
  source 1..121: mol_type = other DNA
atgtaacaaattcacttctgattaaagagtcagggctgggtgctgcagctcatggctgcggggattacagaatcccaacacttcgggaggttgaggtggaaggattgcttgagcccaggac

SEQ ID NO: 829 - DNA, 121 bp, synthetic construct
  misc_feature 1..121: note = Description of artificial sequence: synthetic polynucleotide sequence
  source 1..121: mol_type = other DNA
gagttccagagtacctacctcttcacactggcttatgaaaagatgcatcagttttataaagaggtggactcgtggatatccagtgagctgagttcggcccctgaaggcctcagcaatggtt

SEQ ID NO: 830 - DNA, 121 bp, synthetic construct
  misc_feature 1..121: note = Description of artificial sequence: synthetic polynucleotide sequence
  source 1..121: mol_type = other DNA
taagacttcctcttcatcacaaccttccgtggaaagagagaagagggaaaccccagagaacgagtcagggtacacacaatatatgtctgcaggaggcccagctatagtgacattggtgtga

SEQ ID NO: 831 - DNA, 121 bp, synthetic construct
  misc_feature 1..121: note = Description of artificial sequence: synthetic polynucleotide sequence
  source 1..121: mol_type = other DNA
atctttctctaggcctgacctcacttgtacttaaagtgtgtgtttcagttgactctagaacatttcctttttaacatcagactcaatatgtctcaaagtgacttgatattttgaattttga

SEQ ID NO: 832 - DNA, 121 bp, synthetic construct
  misc_feature 1..121: note = Description of artificial sequence: synthetic polynucleotide sequence
  source 1..121: mol_type = other DNA
tgcaaaacattataaatcctcaaacctctacaacatagaagcaaataagtcttcctttctctagtgtcgaaatgcagactgtactatcattatagggcagaaaacaaaacaaaacagaaaa

SEQ ID NO: 833 - DNA, 121 bp, synthetic construct
  misc_feature 1..121: note = Description of artificial sequence: synthetic polynucleotide sequence
  source 1..121: mol_type = other DNA
cgctgaccactggttctcacacaagcccatcagaaggaagggaggacagcctctcttttacatttcttttgttgccagagagaaaatcctccctagtagttctctagaaggcttcccttgc

SEQ ID NO: 834 - DNA, 121 bp, synthetic construct
  misc_feature 1..121: note = Description of artificial sequence: synthetic polynucleotide sequence
  source 1..121: mol_type = other DNA
aattattgtatcttcataaagccaagctcacacttgggaggctgaggcaggataattatggaggccaggagttccagactagcctgggcaatatagcgagaccccatctctacacacacac

SEQ ID NO: 835 - DNA, 121 bp, synthetic construct
  misc_feature 1..121: note = Description of artificial sequence: synthetic polynucleotide sequence
  source 1..121: mol_type = other DNA
gctgacccccagtttatcattggaggagccacccgcacagacatctgccaaggagccctgggtaagtgatagattcagagcaagctgggggatcttgtctgtaaggctgtgggtggaagag

SEQ ID NO: 836 - DNA, 121 bp, synthetic construct
  misc_feature 1..121: note = Description of artificial sequence: synthetic polynucleotide sequence
  source 1..121: mol_type = other DNA
aaatgagatcatccagctgttcactcagtgtgcttcagaggagaggtgctttccacaactgaagggctgcaaagagggcaggtagaatctctgggtgtaggtgttctaactgcaaacaaaa

SEQ ID NO: 837 - DNA, 121 bp, synthetic construct
  misc_feature 1..121: note = Description of artificial sequence: synthetic polynucleotide sequence
  source 1..121: mol_type = other DNA
gacagccaaaactcaacctgagaaactctaattccaagaacatttgggggaattcctgatcatgttaagggaaaaagaaatggtttctgaaaagaaagagaaaaataaaagcccaaaatca

SEQ ID NO: 838 - DNA, 121 bp, synthetic construct
  misc_feature 1..121: note = Description of artificial sequence: synthetic polynucleotide sequence
  source 1..121: mol_type = other DNA
tcatttcaagacacattagcaatgacaagtatgtaacttagaactcttagaatttctcatgagactggatgtagaggaaaaaaaaccaacccagaattttaacacttaacccagtaacttg

SEQ ID NO: 839 - DNA, 121 bp, synthetic construct
  misc_feature 1..121: note = Description of artificial sequence: synthetic polynucleotide sequence
  source 1..121: mol_type = other DNA
cgctgcttgagtttattatccacgaaccctgcaggtctgggcttcatcgcgtcggtcttccaagccacagctcggaccgccagctcctagtcaaccgggggcctcgtaggggttgcccgcc

SEQ ID NO: 840 - DNA, 121 bp, synthetic construct
  misc_feature 1..121: note = Description of artificial sequence: synthetic polynucleotide sequence
  source 1..121: mol_type = other DNA
ctgtaggccattgtcaaaaaagtttgaaaaacgttcctataagccagtccagactagactagaaggcaactcaagaaataggtgttggatatataattaacaaatcactagtactgcccac

SEQ ID NO: 841 - DNA, 121 bp, synthetic construct
  misc_feature 1..121: note = Description of artificial sequence: synthetic polynucleotide sequence
  source 1..121: mol_type = other DNA
gcctggagggaaatcatgccacaggccagagcttaacattcctttctgctgaccgccaatattataccctttctgctgaccccaagattatagagaaagcctggcttccttaacccgattg

SEQ ID NO: 842 - DNA, 121 bp, synthetic construct
  misc_feature 1..121: note = Description of artificial sequence: synthetic polynucleotide sequence
  source 1..121: mol_type = other DNA
tggggctgattgcggggccttctcatgctattttagcagaacccctaacctcccctctcatttctttcttgtgcatcctgatagagggaacggttgaggaacatcgagcgcatctgcttcc

SEQ ID NO: 843 - DNA, 121 bp, synthetic construct
  misc_feature 1..121: note = Description of artificial sequence: synthetic polynucleotide sequence
  source 1..121: mol_type = other DNA
ttggtccagaagtcagaactcagctgaagtgagcgaattacaatgcttctccaggacgtcttggaactagaatggagaaggagagataagtctttttcagaagttaaagctgttgtgttaa

SEQ ID NO: 844 - DNA, 121 bp, synthetic construct
  misc_feature 1..121: note = Description of artificial sequence: synthetic polynucleotide sequence
  source 1..121: mol_type = other DNA
gtaacagacactttttgcaactgctgtcagttacctttaaaactgcagctcttgccagttgctcatcagtcaccacaaatcccaaaaggtcatatgctctctcagtacaaactaaccctgg

SEQ ID NO: 845 - DNA, 121 bp, synthetic construct
  misc_feature 1..121: note = Description of artificial sequence: synthetic polynucleotide sequence
  source 1..121: mol_type = other DNA
ttatcagaataaagctatttgcttaggttcacacagttagtaaatactgaggctgggatcgaaaataagtttctctgattttaaggcctcttaatataaactctgtggcaaagagacacac

SEQ ID NO: 846 - DNA, 121 bp, synthetic construct
  misc_feature 1..121: note = Description of artificial sequence: synthetic polynucleotide sequence
  source 1..121: mol_type = other DNA
gacatatattttcgaattatcataccataccacccctcaatcttcatttagccatttgcgaaacaaacatcttctaaatgcctatcaggaattcccagtgccagacagcaagtgggataag

SEQ ID NO: 847 - DNA, 121 bp, synthetic construct
  misc_feature 1..121: note = Description of artificial sequence: synthetic polynucleotide sequence
  source 1..121: mol_type = other DNA
cttctcttcttggacgaaggctatactgtgttgctatgtaactgctttcttgtgacaaactgaatttttcctaaatgaaaaatttaaaaattaaatatctgcagtgaacaattaccattaa

SEQ ID NO: 848 - DNA, 121 bp, synthetic construct
  misc_feature 1..121: note = Description of artificial sequence: synthetic polynucleotide sequence
  source 1..121: mol_type = other DNA
ttcatgcagactcttcagtcagaatacctgcattcgtgtattttctcagtcagcttcgcctcggatgcattacttcacttctgtgcctccgtctctcagctgtgaaataggatcctaccag

SEQ ID NO: 849 - DNA, 121 bp, synthetic construct
  misc_feature 1..121: note = Description of artificial sequence: synthetic polynucleotide sequence
  source 1..121: mol_type = other DNA
tattcacaaaataacaacctaaccaaataagcaaatatgtaagtgtacttccaggccctatacattatcctttcataccacaaaagacgttctagtactgagtgacagcttttagactatg

SEQ ID NO: 850 - DNA, 121 bp, synthetic construct
  misc_feature 1..121: note = Description of artificial sequence: synthetic polynucleotide sequence
  source 1..121: mol_type = other DNA
gaccaatttcctttaagtggggtaatctgggcagggtaatttttcttcctcaccttttctgcttgaccccacatcctccacacatgcacattggactgttgactcttccctaattttctca

SEQ ID NO: 851 - DNA, 121 bp, synthetic construct
  misc_feature 1..121: note = Description of artificial sequence: synthetic polynucleotide sequence
  source 1..121: mol_type = other DNA
tcatctcctactggcggaatgaatttgactggaagaagcaggtggagattctcaacagataccctcacttcaagactaagattgaaggtatgtttgcaaaacgccagccagagagggatgt

SEQ ID NO: 852 - DNA, 121 bp, synthetic construct
  misc_feature 1..121: note = Description of artificial sequence: synthetic polynucleotide sequence
  source 1..121: mol_type = other DNA
ttctgtctgcagataacagcaaaaacttgcgatgataaacaaaactgatctctgtgaacaaacaccctccaaacacacagactattaacacccggaataatagtaccagctggcaccaagc

SEQ ID NO: 853 - DNA, 121 bp, synthetic construct
  misc_feature 1..121: note = Description of artificial sequence: synthetic polynucleotide sequence
  source 1..121: mol_type = other DNA
tactggtatctgttagttaggactggccagacttgcctttgtatagaatgatgacactatcaacagagaagtttcctgggcagaacaactgctgacaagactcactgtctgagccacatga

SEQ ID NO: 854 - DNA, 121 bp, synthetic construct
  misc_feature 1..121: note = Description of artificial sequence: synthetic polynucleotide sequence
  source 1..121: mol_type = other DNA
cagtacactgggctgcgcagcaataaagtattccatgccctcaaacttcacctttttttttcttgctcttccttctctattttgtgggacgcaacatatgttgaaaagagatggcaacacc

SEQ ID NO: 855 - DNA, 121 bp, synthetic construct
  misc_feature 1..121: note = Description of artificial sequence: synthetic polynucleotide sequence
  source 1..121: mol_type = other DNA
atgagcaacaaatagaacatagtaataaacacggtagatatttattactatatgataatccaactacatcaacaaccactttgaaatctactttaaacataaagacacagatagattaaaa

SEQ ID NO: 856 - DNA, 121 bp, synthetic construct
  misc_feature 1..121: note = Description of artificial sequence: synthetic polynucleotide sequence
  source 1..121: mol_type = other DNA
aagaccagctgacccgagcattcctcgcagggaaggagggcaccgaacaccatgccatcagctactcggtccaagatctgcagccagtggagaaacatgtcagagggcaaatgcgggacta

SEQ ID NO: 857 - DNA, 121 bp, synthetic construct
  misc_feature 1..121: note = Description of artificial sequence: synthetic polynucleotide sequence
  source 1..121: mol_type = other DNA
cagagagggaggtgaatgggagcctgggaaatcaatggtatgtagacttcatgttaaacgaggtcagctctgggattgtaatgttgatgttacacaaccataagctaaactattttcatat

SEQ ID NO: 858 - DNA, 217 bp, synthetic construct
  misc_feature 1..217: note = Description of artificial sequence: synthetic polynucleotide sequence
  source 1..217: mol_type = other DNA
ctcaggcgagtggggcatcctgggacatctcggtcaggatgtcgacgaggttattgagccccgagaggtagccatcctcccggttcccctcctgccaggggacgtcatgctgcagggtctggccctcaggcaggggcgtggttttcccaaagtcgatcatccacactttggcctgttccttcttgtcgtggatgaagaggagggagctgccaatgac

SEQ ID NO: 859 - DNA, 121 bp, synthetic construct
  misc_feature 1..121: note = Description of artificial sequence: synthetic polynucleotide sequence
  source 1..121: mol_type = other DNA
aagagggcaaaagcccagtatctacctcgtggcacttgaagaagggagaaacttctagagtggttcgaatggccttcagccggtcccgataggcgatctgggaatagaaagaggaccagat

SEQ ID NO: 860 - DNA, 121 bp, synthetic construct
  misc_feature 1..121: note = Description of artificial sequence: synthetic polynucleotide sequence
  source 1..121: mol_type = other DNA
ccagactcaccaggatgttatggtttcctttagtgaactctctgaaggcctcggtgacctgctccctcgttttggtcttcttgaagtcccggttcacggtgccgtcttctttctgagaaag

SEQ ID NO: 861 - DNA, 206 bp, synthetic construct
  misc_feature 1..206: note = Description of artificial sequence: synthetic polynucleotide sequence
  source 1..206: mol_type = other DNA
ccttgattccctcgatcctgaaccccagggtggccgtggagctgatggtctcccgccactgcatgtaccgtggcttggtcacagcccgctgtgctttttcctcctcggtgggggcctcggggtccacctcgatcatcttctggtacatgtccttccgcaggctgggcttcttccgggccttcgtgagctcctcctccaggtaggtc

SEQ ID NO: 862 - DNA, 215 bp, synthetic construct
  misc_feature 1..215: note = Description of artificial sequence: synthetic polynucleotide sequence
  source 1..215: mol_type = other DNA
cctgattcccatcttgcagtccatcacacagggcgagtcgaagtcggccagcaggtcgtccatctggttgtagcgctccccgtccttcaccacatccccatggtaggcaggtacgaagggcctcagcacatccaccatcagccggtccaggcagcgctgctctgactcacagtgcttcttcaggatcctgccattggcagctgccttgaaactcc

SEQ ID NO: 863 - DNA, 121 bp, synthetic construct
  misc_feature 1..121: note = Description of artificial sequence: synthetic polynucleotide sequence
  source 1..121: mol_type = other DNA
gctgtgtctacctgcgtgtcctgccagctggatccaggggtacttcttcttgaaggacatgacgaagggagaccagtgcaccatgttttttatcttcctccatgatttgctctagaaacaa

SEQ ID NO: 864 - DNA, 121 bp, synthetic construct
  misc_feature 1..121: note = Description of artificial sequence: synthetic polynucleotide sequence
  source 1..121: mol_type = other DNA
ggacttcggattttatgtcagtgagataggaagctgctggagggttttgagtgaggagtgtcatagtctggcttatgttctaaaaggctcacgctgcttctgtgtgtacacctggggaaca

SEQ ID NO: 865 - DNA, 225 bp, synthetic construct
  misc_feature 1..225: note = Description of artificial sequence: synthetic polynucleotide sequence
  source 1..225: mol_type = other DNA
ccactctaggtttctgctggtccagggtatgcaggaaggctgagttggggtccagggtgcgctcagggtcactggagatgtcctcctctgagtcttcgtaggatgaggagaagcccgtggaggaggccgaggaagaggacagtttcctcaggggcaggttgccccgagggcttccctgcgtctcctccaaggccccatcctcctgggtgcccatgtctgtaatga

SEQ ID NO: 866 - DNA, 453 bp, synthetic construct
  misc_feature 1..453: note = Description of artificial sequence: synthetic polynucleotide sequence
  source 1..453: mol_type = other DNA
tgacagcaggtatgttgctggggctgcaggccttcctcaggaaaggcttgtccggatcttggggtagcagctccggacttgggagggcatcactgtcctgccgctggctttcccaagtcccctctgattgcacccctgtgccacgcgtccaagccaaaccggctttctccatggtgccctgccaaaccctggagttcccaggctgcacacccaccctgtccccaggagggcactgaggttctttcagatctttcgcagcgtcccaacagggcaaaggctccagcattctgccagaaggaattcccgcctccacattcccggtccccggctgtgctgaggggctgcccccaagcaagcccagcgttggggaccctccctccactctgtcggagagctgccaacgccccccgcccacgggggccccacttcgggcctcctcagggcctacggagg

SEQ ID NO: 867 - DNA, 454 bp, synthetic construct
  misc_feature 1..454: note = Description of artificial sequence: synthetic polynucleotide sequence
  source 1..454: mol_type = other DNA
ccagggccctgggcagcctggaccagctcagggaatcagaggactctgcgctttgcacgctcacagtcgtctcctctggccttttgcccacttcaggctccccagagcccggcatgccacagggcagatatcctttccccatcttcccagggggttctccatcgcggggcccgcccctttctggggctgggcttgtctcactgcccagaaactgcccctgcctctccaccagggcctctgggggctgcaggtcctcaagctcacgggctctcccagacggctcagtgagggcaagatcctgtggacggtgtggcccagtggatgtaactctcgctgccacttccgtggccatcgttaagctagctccgaacagccccaatgagggagctaggcagctccgagttcccggggtaggagagccccttttgtcaatttccatagctgtgggtgagcc

SEQ ID NO: 868 - DNA, 454 bp, synthetic construct
  misc_feature 1..454: note = Description of artificial sequence: synthetic polynucleotide sequence
  source 1..454: mol_type = other DNA
acagcggggactggcagggatacccttctccatccttacaaaagcggatggaccctgagcctctgatcctgtaggggcagcccggccgggaagaggtggcattcctttcttcacctgcgaggagcataggctgggccctcctttcctcccggagtcggttcctgaagtctctggacattgctccccccaggactttgtcctccgttcctcgctccgggcgccctgaaccaggacccttccagggggctgactgctgctgcggaaggggcacggggagggcgagcgagccctgcccaaacgcgggctgcggggcgcttgaatggcggagctctgtgcctggatgtgcgcctcaaacatgcccactttctggttcacctgcacgttctgcaactcgcgctgcaagatccgcagcttcctcttggcctcctccggccctggcggggagagggtaccg

SEQ ID NO: 869 - DNA, 347 bp, synthetic construct
  misc_feature 1..347: note = Description of artificial sequence: synthetic polynucleotide sequence
  source 1..347: mol_type = other DNA
gctgccaccacctgctgccggtcccctcgcaggcgaccagcccaacttgggctgctcacgctactgccgctgctgccgctgccactgccgctgctactattcagcctgcgccggccgctccgccagcccccggggctccggggctcctcgggggacagcgactcggctggggggaagaggaaagaggcgcctctcccggggctgaaaacgctgccggggctcagcactgccctcctcgggggcgggggcgtctcgctgccactgggccccgggccgccgccgctcttcatctcgttggcgctattcatgatcaccaggctattgagcgcatagcagtacacagccat

SEQ ID NO: 870 - DNA, 121 bp, synthetic construct
  misc_feature 1..121: note = Description of artificial sequence: synthetic polynucleotide sequence
  source 1..121: mol_type = other DNA
aacttcctgacaaacaaacaaaatttttttaaagaaaccaaagcagtgtgtgtaggtcacatgcagtgtgtctaatgaaaacatctctggcgggttttcagctgttgctttgactttcgga

SEQ ID NO: 871 - DNA, 121 bp, synthetic construct
  misc_feature 1..121: note = Description of artificial sequence: synthetic polynucleotide sequence
  source 1..121: mol_type = other DNA
ccttcgcgctgtccacagatctgctacaacatcctggttctgtgcctgagggagctgttcgagttccacttcatgcaaacagaccccaactggtccaacttcttctatgacccccagcagc

SEQ ID NO: 872 - DNA, 121 bp, synthetic construct
  misc_feature 1..121: note = Description of artificial sequence: synthetic polynucleotide sequence
  source 1..121: mol_type = other DNA
tgcattcctgaaaggtctgctgagaagacctcatgtatttgccaaaatacatactgctcttaggttttacaatcaaatatatgtacattttttttttgtgacaggaaaagggatggagaga

SEQ ID NO: 873 - DNA, 121 bp, synthetic construct
  misc_feature 1..121: note = Description of artificial sequence: synthetic polynucleotide sequence
  source 1..121: mol_type = other DNA
atttattgtctccattcactaatacatccctttcttcacgaaaacatgctgtctgaaacacaaaaagaaaatttttagagcatactttatgtaaaactaggaaatatacaaagaattacta

SEQ ID NO: 874 - DNA, 121 bp, synthetic construct
  misc_feature 1..121: note = Description of artificial sequence: synthetic polynucleotide sequence
  source 1..121: mol_type = other DNA
tcagtagctttagttacattcataatgttgtacaaacattaggatcactatttctacaatttcatcaccccacacagaactctgtaaacattaagcaataattccccatcccctccccgac

SEQ ID NO: 875 - DNA, 121 bp, synthetic construct
  misc_feature 1..121: note = Description of artificial sequence: synthetic polynucleotide sequence
  source 1..121: mol_type = other DNA
tctcttctcaatggagaattattgcattcatcataaaggcagatgagtatatccagtaatgtctccacactgaagcactgcccattggtctgagcgggcccgtccaaaataaactgctcca

SEQ ID NO: 876 - DNA, 121 bp, synthetic construct
  misc_feature 1..121: note = Description of artificial sequence: synthetic polynucleotide sequence
  source 1..121: mol_type = other DNA
actgccagggctgcagaatagttgatggttttttaaacccaaagcttacccacagtgttttgattgctttaagatttcctctttaacccaaatatatcttcagatctactctggtgactta

SEQ ID NO: 877 - DNA, 121 bp, synthetic construct
  misc_feature 1..121: note = Description of artificial sequence: synthetic polynucleotide sequence
  source 1..121: mol_type = other DNA
tgttatgatgcctaaagttattttttgtaagaataacccaagggtaggccataggcataggacctttgagcctattgtttgagccaacctcacagagaggacagttagtggttttccctgg

SEQ ID NO: 878 - DNA, 121 bp, synthetic construct
  misc_feature 1..121: note = Description of artificial sequence: synthetic polynucleotide sequence
  source 1..121: mol_type = other DNA
ttgtgactgtcttttatcctacacaatcattgtttgccagtctccataagggattcttcattctccatccaacacttgcagggtgatgttccctgaacttccagccatagatcttttcctt

SEQ ID NO: 879 - DNA, 121 bp, synthetic construct
  misc_feature 1..121: note = Description of artificial sequence: synthetic polynucleotide sequence
  source 1..121: mol_type = other DNA
tccttcagaggcagaagaggcctggaccttggcgcacacagacccaggaacagatgagcagggatgtctgcatccacacctggccgtgcacctactacctggagcccaagaggcgatgggt

SEQ ID NO: 880 - DNA, 121 bp, synthetic construct
  misc_feature 1..121: note = Description of artificial sequence: synthetic polynucleotide sequence
  source 1..121: mol_type = other DNA
ccataaagaaatgcacagatgctggaaaaaataaaaaaagaaatgcacagataagtacctgaaaagaggtgtggcctgcccagatcggcaagaccagagggaaaaaggaaaaaaaagaatg

SEQ ID NO: 881 - DNA, 121 bp, synthetic construct
  misc_feature 1..121: note = Description of artificial sequence: synthetic polynucleotide sequence
  source 1..121: mol_type = other DNA
atgcgccgctgcttccgctccagcttcagccggtcgcaggccttgtagtgcgcctgggcagccgcctctggctccagggtcagcgggaggatggtcaggggctcgctgcccgtcagcctgg

SEQ ID NO: 882 - DNA, 121 bp, synthetic construct
  misc_feature 1..121: note = Description of artificial sequence: synthetic polynucleotide sequence
  source 1..121: mol_type = other DNA
tgaagagaatatgtagataagtaagggagaatttgaggctgaatcagttacaggtacatggataacaccaactacaaaaagtcatttaggaaaagaaaagtcatcataatatatgacactt

SEQ ID NO: 883 - DNA, 121 bp, synthetic construct
  misc_feature 1..121: note = Description of artificial sequence: synthetic polynucleotide sequence
  source 1..121: mol_type = other DNA
cagcacgcatggggtggcggctcctcacccaggatgaaggcccagccctggtgcccgggggccggctcggggacttgtgggattatcaccagcaccgatacctgcaaggtatgggtggggt

SEQ ID NO: 884 - DNA, 121 bp, synthetic construct
  misc_feature 1..121: note = Description of artificial sequence: synthetic polynucleotide sequence
  source 1..121: mol_type = other DNA
tcccttgcgcctccccttccaggccttctctccccagttctgccttcctgacctagatgttggtggtcaccgtgtgcatcttgccttccccagagcccaaggtggtgtttgccaaggagca

SEQ ID NO: 885 - DNA, 121 bp, synthetic construct
  misc_feature 1..121: note = Description of artificial sequence: synthetic polynucleotide sequence
  source 1..121: mol_type = other DNA
aagtggtcctcgccgtcacgcagcctcttccacttccctgggaggcacctgccgctggatgagcctgcagagctggggctgcgtgagagagtgaaggcctccgtggagcacatctcccgga

SEQ ID NO: 886 - DNA, 121 bp, synthetic construct
  misc_feature 1..121: note = Description of artificial sequence: synthetic polynucleotide sequence
  source 1..121: mol_type = other DNA
aaggcattctaagtcacaggatgagacaggaggttagcacaagatacaggtcataaagacgctgctcataaaacaggttgcagtaaacaagctgccccaaacccaccaaaaccaagatggc

SEQ ID NO: 887 - DNA, 121 bp, synthetic construct
  misc_feature 1..121: note = Description of artificial sequence: synthetic polynucleotide sequence
  source 1..121: mol_type = other DNA
gtagtattcttttttacccaataacaggtgatgaatgaaattaaagcattagaataatattttagagctagaaagaacaaacttttctatcaaagatttgacttttatagagattgtccat

SEQ ID NO: 888 - DNA, 121 bp, synthetic construct
  misc_feature 1..121: note = Description of artificial sequence: synthetic polynucleotide sequence
  source 1..121: mol_type = other DNA
ggcgtcaagtgcgtgctggtcggcgacggcgcggtgggcaagacgagcctggtggtgagctacaccaccaacggctaccccaccgagtacatccctactgccttcgacaacttctccggtg

SEQ ID NO: 889 - DNA, 121 bp, synthetic construct
  misc_feature 1..121: note = Description of artificial sequence: synthetic polynucleotide sequence
  source 1..121: mol_type = other DNA
gcctgttcccagttttcacgtgtgtccacagaagcccagagaggtcagacgatgcatccaaagtcacatggctgagccaaggtggatgaaggactggcatcaaggcctccagcttccccct

SEQ ID NO: 890 - DNA, 121 bp, synthetic construct
  misc_feature 1..121: note = Description of artificial sequence: synthetic polynucleotide sequence
  source 1..121: mol_type = other DNA
gcggcctgcagcctagtttctctcagtgtgccttacagccaaagccaaagactgaggccgactcccaggacagggccgctaccctggcctcaacaccacaaatgactggacgcagctgctg

SEQ ID NO: 891 - DNA, 121 bp, synthetic construct
  misc_feature 1..121: note = Description of artificial sequence: synthetic polynucleotide sequence
  source 1..121: mol_type = other DNA
agcaccttctccatgtcattcccctgcttcaaagccttcctggtcagtgtcttcaattccgaacaacttttgcatacgtgtcaaaacgacccatgtgttgcacactgatcagaaaatatca

SEQ ID NO: 892 - DNA, 121 bp, synthetic construct
  misc_feature 1..121: note = Description of artificial sequence: synthetic polynucleotide sequence
  source 1..121: mol_type = other DNA
tctattaccctgcaatggaatcatccatgtacccatctatctccccagctagaataggtacaccttggggatagcatctgtgtctgattcatctttgtatggagcaaacaatatctggcac

SEQ ID NO: 893 - DNA, 121 bp, synthetic construct
  misc_feature 1..121: note = Description of artificial sequence: synthetic polynucleotide sequence
  source 1..121: mol_type = other DNA
agtttctggcccagcccttcctgcacttgcccaggcagtgaaaggctcagcctgctaaagtgtgaagtcatcaatcaggctagcaaagtgccatgagaagaactcaatccttagacacatg

SEQ ID NO: 894 - DNA, 121 bp, synthetic construct
  misc_feature 1..121: note = Description of artificial sequence: synthetic polynucleotide sequence
  source 1..121: mol_type = other DNA
cctgggcagacttttatattaggttggtgtcaaaataattgcaccaagtaataacttccccagtgaaggtaaaatggggtgagaaagggcctgcagagctcctgaggataaaagagaaaaa

SEQ ID NO: 895 - DNA, 121 bp, synthetic construct
  misc_feature 1..121: note = Description of artificial sequence: synthetic polynucleotide sequence
  source 1..121: mol_type = other DNA
atttatatcccaactgtatgcatgcttttctgaagaatcatctaattcccatttactgatgtttgaactcgtcaggctataaaagcttgatctctctctatcccagagaacacttgaaagc

SEQ ID NO: 896 - DNA, 121 bp, synthetic construct
  misc_feature 1..121: note = Description of artificial sequence: synthetic polynucleotide sequence
  source 1..121: mol_type = other DNA
tctgtaggaagcatagatgacctgcctacggtcctaaagtgtgcacgcctggttgaaagaatgtacagccacatcgccgcacgagctgaggagtttgctgtgttttccccatttatggtgg

SEQ ID NO: 897 - DNA, 121 bp, synthetic construct
  misc_feature 1..121: note = Description of artificial sequence: synthetic polynucleotide sequence
  source 1..121: mol_type = other DNA
tcacaacaatttaatgcgacccaatgtggaggggatttcttcccaccaccaagcaagccatcggttctgtagtggacaccaactgggtgtcctccaattcaattcccacactgtctacctg

SEQ ID NO: 898 - DNA, 121 bp, synthetic construct
  misc_feature 1..121: note = Description of artificial sequence: synthetic polynucleotide sequence
  source 1..121: mol_type = other DNA
caggctaacatgtactgagctcttgcaatgagcatgcacttggatgaagtgtattacatcgattgtttcattaatcttcccaacaccttcaaagatgtgagtattatttatacttttatca

SEQ ID NO: 899 - DNA, 121 bp, synthetic construct
  misc_feature 1..121: note = Description of artificial sequence: synthetic polynucleotide sequence
  source 1..121: mol_type = other DNA
tggaaatgattttcaaaaaatcaagtggaaatgctagaaatgtttaaaagaaacccatgttatcaaagatgaattccttttacatacttaaagggaaggtggacatcattgttgaggaaag

SEQ ID NO: 900 - DNA, 121 bp, synthetic construct
  misc_feature 1..121: note = Description of artificial sequence: synthetic polynucleotide sequence
  source 1..121: mol_type = other DNA
cctcatgccaagcaaggataataaaaaaggaatctttgataaaatagagagaaatacagcctcaatgaataaaattacactacgaatatgaaggaaagaaaacttggtttctcttgcagct

SEQ ID NO: 901 - DNA, 121 bp, synthetic construct
  misc_feature 1..121: note = Description of artificial sequence: synthetic polynucleotide sequence
  source 1..121: mol_type = other DNA
tcctccaggaactctgactggacgcatgcatgcagtcaatttgtgtgttaagtcggcctccctgtcatctttccagctcctggatgagtcatgaagccctgagccacagttctttcatatg

SEQ ID NO: 902 - DNA, 121 bp, synthetic construct
  misc_feature 1..121: note = Description of artificial sequence: synthetic polynucleotide sequence
  source 1..121: mol_type = other DNA
gaggaagtggccagtctcttgtcaacaccctgtttcttttcctggctggcaggttttgattggaacttggtattcaagtgggattacatgacgcctgagcagagaaggtcccggcagggga

SEQ ID NO: 903 - DNA, 121 bp, synthetic construct
  misc_feature 1..121: note = Description of artificial sequence: synthetic polynucleotide sequence
  source 1..121: mol_type = other DNA
tgaattaggggaatatatatggcatcactatcttccttctacccacataaatagcatcgcttgtggaagtgagttcaagttcctaacctaacgtctccaaactgagatgatgtgtccctgc

SEQ ID NO: 904 - DNA, 121 bp, synthetic construct
  misc_feature 1..121: note = Description of artificial sequence: synthetic polynucleotide sequence
  source 1..121: mol_type = other DNA
ataaataaatattaaaaataaaaagaagggaatccccgcagcccttcttactgcctttaggaggtacttattttaacccccaagtttcaggttagacatttccctactccttttacctgga

SEQ ID NO: 905 - DNA, 121 bp, synthetic construct
  misc_feature 1..121: note = Description of artificial sequence: synthetic polynucleotide sequence
  source 1..121: mol_type = other DNA
tgtttaaataaagggaggatgttgttacaattcctgaatgttagaactggtgcaagaagggaaagcaacagtttaattgtccacatcaaggcactgagggtgccaggatggaaaaggaggt

SEQ ID NO: 906 - DNA, 121 bp, synthetic construct
  misc_feature 1..121: note = Description of artificial sequence: synthetic polynucleotide sequence
  source 1..121: mol_type = other DNA
tcagctctcgcagagcttgttgctgctgccaaggaccaggcaacagcagagcagccttaagcatcttggaagatcccgaggttagattcttaagcaagagaagagttggacttccaggctg

SEQ ID NO: 907 - DNA, 121 bp, synthetic construct
  misc_feature 1..121: note = Description of artificial sequence: synthetic polynucleotide sequence
  source 1..121: mol_type = other DNA
tggctgttttttagcctccaaagccaactccacctgaccaggagacagaggaggagcagcggtttcgggctctgtttgaacaagtcgctggtgaggtaggacatgccccacttccatctcc

SEQ ID NO: 908 - DNA, 121 bp, synthetic construct
  misc_feature 1..121: note = Description of artificial sequence: synthetic polynucleotide sequence
  source 1..121: mol_type = other DNA
ggagaagagtctgtgtttagcacctcaatcatcgatcttaacgttggaaacgtttctgatactgatggaagagtcttataagaaggtgaaatactgaaaaagaaaaacacaaagtagcggc

SEQ ID NO: 909 - DNA, 121 bp, synthetic construct
  misc_feature 1..121: note = Description of artificial sequence: synthetic polynucleotide sequence
  source 1..121: mol_type = other DNA
gttttgaaatccttgaggatttcagaaagtatacatttgcttgttctaatattatcttgtattatttcagaaatcctgccagaaacctgtagacaaatatatcgagtatgatcctgttatc

SEQ ID NO: 910 - DNA, 121 bp, synthetic construct
  misc_feature 1..121: note = Description of artificial sequence: synthetic polynucleotide sequence
  source 1..121: mol_type = other DNA
tttaaggggatatattttggatggggacattcatacttttattttccatttcttctttagaacaaactgcctattttattggcatttttaccttcctgtgggtagaacggcccatgacggc

SEQ ID NO: 911 - DNA, 121 bp, synthetic construct
  misc_feature 1..121: note = Description of artificial sequence: synthetic polynucleotide sequence
  source 1..121: mol_type = other DNA
agcccaacttcattttgctgctgaaagcattattattatctagctacggaaaactcttgctgattccagctgtcatttgggaacatgactacacatctgtgtgcctcaaactcattaaagt

SEQ ID NO: 912 - DNA, 121 bp, synthetic construct
  misc_feature 1..121: note = Description of artificial sequence: synthetic polynucleotide sequence
  source 1..121: mol_type = other DNA
ggttatgaggaatcagataaattcggcatgtaaagagctcagcacttagcaagctgtcggttgttattcttattgctattaatgggaagtcaccagttgctactgatcctgtcccacctca

SEQ ID NO: 913 - DNA, 121 bp, synthetic construct
  misc_feature 1..121: note = Description of artificial sequence: synthetic polynucleotide sequence
  source 1..121: mol_type = other DNA
aagatcttggaagaaactctttatgtgtatgagcttctaggggttcctaaaccaaaagagtctacaactgtacgtgagcttgattttagcttaattgagagaatgtgctgactgacacatc

SEQ ID NO: 914 - DNA, 121 bp, synthetic construct
  misc_feature 1..121: note = Description of artificial sequence: synthetic polynucleotide sequence
  source 1..121: mol_type = other DNA
agttataagtagatttttcagcagaaactctgcagaccagaagggagtggaatgatatactcaaaattccagtcaacgtgagaaagccaatttttaaaatcctgaaataaaacaattgtca

SEQ ID NO: 915 - DNA, 121 bp, synthetic construct
  misc_feature 1..121: note = Description of artificial sequence: synthetic polynucleotide sequence
  source 1..121: mol_type = other DNA
tgtgacgacatgagcaacaaagaaggtggcgtccttaacaacacggggcgttatttatccggagggggaggttctccagtctttctatgcagttttccccttttcacccttgaaggatgcc

SEQ ID NO: 916 - DNA, 121 bp, synthetic construct
  misc_feature 1..121: note = Description of artificial sequence: synthetic polynucleotide sequence
  source 1..121: mol_type = other DNA
taagataggaagtaataatgcttattttgtgggcctattgtgaggatcatgtaagatgagagataaaagggcttagcaaacggtagcatattacaggtggcctgcagcctgccgctgtgca

SEQ ID NO: 917 - DNA, 121 bp, synthetic construct
  misc_feature 1..121: note = Description of artificial sequence: synthetic polynucleotide sequence
  source 1..121: mol_type = other DNA
gatgggagccaaagctgccagcttggacgggcctcacgaggacccgcgatgtctctctcggcccttcagtctcttggctacacgggtctctgcagacttggcccaggccgcaaggaacagc

SEQ ID NO: 918 - DNA, 121 bp, synthetic construct
  misc_feature 1..121: note = Description of artificial sequence: synthetic polynucleotide sequence
  source 1..121: mol_type = other DNA
ttttcccttcttctctcccacaacgtgctgtaggaaaccatttctggacggctaaagacctcaccgaggagattagatcattaacatcagagagagaagggctggagggactcctcagcaa

SEQ ID NO: 919 - DNA, 121 bp, synthetic construct
  misc_feature 1..121: note = Description of artificial sequence: synthetic polynucleotide sequence
  source 1..121: mol_type = other DNA
gaaaaagagtctctgtcctagcttttcagcgaccttttcaaaaggaacagaaaatcgtcgcattctcttgcttctacaatgccagtgattgtctgatgcatcctgggtttgacaaaggcag

SEQ ID NO: 920 - DNA, 121 bp, synthetic construct
  misc_feature 1..121: note = Description of artificial sequence: synthetic polynucleotide sequence
  source 1..121: mol_type = other DNA
gtccactgcttgggaaagtgtgggaagctgacttggaagcttgtcgattgcttatccagagcctacagctccaggaagccaggggaagcctgtctgtagaagatgagaggcagatggatga

SEQ ID NO: 921 - DNA, 121 bp, synthetic construct
  misc_feature 1..121: note = Description of artificial sequence: synthetic polynucleotide sequence
  source 1..121: mol_type = other DNA
aggctgcgagggagattctcagcgagtctgcaaagtcatggtgaacttgtttcttttgtattccaatgcactccttatgtcccactagcaggcaggaggctctgggacaaggcagtgtcgg

SEQ ID NO: 922 - DNA, 121 bp, synthetic construct
  misc_feature 1..121: note = Description of artificial sequence: synthetic polynucleotide sequence
  source 1..121: mol_type = other DNA
aagaaaatagcaagttccagagaaagtataactctcaatggacaggtctactataccaaaaatagggcacttctggggagagattgggtcctgagatatgggaaggggacatcttggttga

SEQ ID NO: 923 - DNA, 121 bp, synthetic construct
  misc_feature 1..121: note = Description of artificial sequence: synthetic polynucleotide sequence
  source 1..121: mol_type = other DNA
aaaaaccattctgtgaatttccgcagctgagctgtcgcggtctgggactcctcctgcagtctcatgttgtcctgtctcaggtgctgcacttctgcttggagaacggccttgtcttgttttt

SEQ ID NO: 924 - DNA, 121 bp, synthetic construct
  misc_feature 1..121: note = Description of artificial sequence: synthetic polynucleotide sequence
  source 1..121: mol_type = other DNA
ggagaccttcctctttttaaaagtgttgcagggtttacgttgctgtaagaagtattggaacaatctccatcctgattcataaagcttactgaggaacacttctaagctgagcaccacaaac

SEQ ID NO: 925 - DNA, 121 bp, synthetic construct
  misc_feature 1..121: note = Description of artificial sequence: synthetic polynucleotide sequence
  source 1..121: mol_type = other DNA
agctccttggaacagtcctttttaggaggccattcagacacccttgctctcacacccatcttgggcacagctggggtaccattagccggaccaccaccgccagtctcattggaattcgagg

SEQ ID NO: 926 - DNA, 121 bp, synthetic construct
  misc_feature 1..121: note = Description of artificial sequence: synthetic polynucleotide sequence
  source 1..121: mol_type = other DNA
atataaaagagtctgatctaataatgtacagacagcatttctttgggaggacaggtaaaggtgccaaataatataatcaaattctaaaaagcatgatggaaagaatcagctaaaataaagc

SEQ ID NO: 927 - DNA, 121 bp, synthetic construct
  misc_feature 1..121: note = Description of artificial sequence: synthetic polynucleotide sequence
  source 1..121: mol_type = other DNA
gatagcaggcagcgatgccttttgctccggtttctcgtgagaccccggggcttcagcttctcgtttgcggagcccgcggcggcgtttcctggggcaacagcaatggcggcctcgctgtccg

SEQ ID NO: 928 - DNA, 121 bp, synthetic construct
  misc_feature 1..121: note = Description of artificial sequence: synthetic polynucleotide sequence
  source 1..121: mol_type = other DNA
agaaggataatgcaaatgaatgtggtcccagtagcttgtttttattatgtagcatttcaaacattcagaagaataaataacacaacgaactcctatgtacacatcacccagatttaactca

SEQ ID NO: 929 - DNA, 121 bp, synthetic construct
  misc_feature 1..121: note = Description of artificial sequence: synthetic polynucleotide sequence
  source 1..121: mol_type = other DNA
ccccgtgctgagcaccgccttttctgggctgttctgcgctgctctcctggctgccaccactcggggcattgttgccacctgtcgtcggggcccctcctccgtccacgtcttcaatgttgcc

SEQ ID NO: 930 - DNA, 121 bp, synthetic construct
  misc_feature 1..121: note = Description of artificial sequence: synthetic polynucleotide sequence
  source 1..121: mol_type = other DNA
ttcatttgctccctcccccttctcctcctcccctgcccctttctcctctttttgtaaactgtcataattcttgattatatttctaagaggcaggattcacttccagaagtgttctcagcac

SEQ ID NO: 931 - DNA, 121 bp, synthetic construct
  misc_feature 1..121: note = Description of artificial sequence: synthetic polynucleotide sequence
  source 1..121: mol_type = other DNA
acagggctggatcatgtagcctaggtagaatagggaggaaactgaagatggcaagggctgcaaggtaagagaaatatggtggggcaaattgctggagaggactgaggaacatctgaggaag

SEQ ID NO: 932 - DNA, 121 bp, synthetic construct
  misc_feature 1..121: note = Description of artificial sequence: synthetic polynucleotide sequence
  source 1..121: mol_type = other DNA
tccttcctacagcagacatgtgggaatgtaccttactgtgcttcttcaaaacatagaccgtcacatcacagacggaccatgtctgatggaaatccgaccccaagtaggttgcattaattag

SEQ ID NO: 933 - DNA, 121 bp, synthetic construct
  misc_feature 1..121: note = Description of artificial sequence: synthetic polynucleotide sequence
  source 1..121: mol_type = other DNA
agcttccagggggtggagagtcagagaagttactgctaagggaaagttaatcaacatgacgacgtaactgcccagatagagctgatttatcatgacaggggaattgcaatagagaaagagt

SEQ ID NO: 934 - DNA, 121 bp, synthetic construct
  misc_feature 1..121: note = Description of artificial sequence: synthetic polynucleotide sequence
  source 1..121: mol_type = other DNA
acctcccattttttcactatttgtgctataattgtctataattatcctgcacaagtcccatcatattattttcagtgtgttggagccagacgacttgtctctttagttcacaggtcagtgg

SEQ ID NO: 935 - DNA, 121 bp, synthetic construct
  misc_feature 1..121: note = Description of artificial sequence: synthetic polynucleotide sequence
  source 1..121: mol_type = other DNA
tgttttcacacattagccttgttcctatgctgggtctgattacatgctgatagattctggttttttttaagcaagtaattctccttttcccattaaatgcagaggtagagggaggagtttc

SEQ ID NO: 936 - DNA, 121 bp, synthetic construct
  misc_feature 1..121: note = Description of artificial sequence: synthetic polynucleotide sequence
  source 1..121: mol_type = other DNA
gccaagcaaaaacaaagggcgcttctctgtcatgagaaatccaacacaatttagtcccagagttcctaaacatgagggctgggtgactttcagctgaacaaactcgatggcaagacttttt

SEQ ID NO: 937 - DNA, 121 bp, synthetic construct
  misc_feature 1..121: note = Description of artificial sequence: synthetic polynucleotide sequence
  source 1..121: mol_type = other DNA
tttaaatacatcaccctttgatagtgctccaagttagcttgatctggctagtttcattacaacaatactaaaataatgcaatatttactaagctttataatgacagagaatttctatgaaa

SEQ ID NO: 938 - DNA, 121 bp, synthetic construct
  misc_feature 1..121: note = Description of artificial sequence: synthetic polynucleotide sequence
  source 1..121: mol_type = other DNA
ctaccacagctgatgctctctcgaaagcgccacctcctggcaggagggcaaccagcacagaactacaataaacaacaataatataattaaggaccctcccagagtccatttcactcccctg

SEQ ID NO: 939 - DNA, 121 bp, synthetic construct
  misc_feature 1..121: note = Description of artificial sequence: synthetic polynucleotide sequence
  source 1..121: mol_type = other DNA
tcctgggttggctcctggggcagaaaacagagtggaaaacagagtggaaaatgggagatttgaataaagcctatagtctagtgaagagagccattatcaatggttactttctcagctttga

SEQ ID NO: 940 - DNA, 121 bp, synthetic construct
  misc_feature 1..121: note = Description of artificial sequence: synthetic polynucleotide sequence
  source 1..121: mol_type = other DNA
atatgatgttaaatttttagtatctcatttatgtgaagacagagaaaatctaccatacttacttttccataacaatatttgccgcacagtcatgtccaaggttttctatgaaggtctgtac

SEQ ID NO: 941 - DNA, 121 bp, synthetic construct
  misc_feature 1..121: note = Description of artificial sequence: synthetic polynucleotide sequence
  source 1..121: mol_type = other DNA
cttaaaccttaagcaagtcagacctagggtctacctgactgtagattttattagttcccagagccattaagttccctttatagtttaagcctatttgagtaggattttctgtgatttttgc

SEQ ID NO: 942 - DNA, 357 bp, synthetic construct
  misc_feature 1..357: note = Description of artificial sequence: synthetic polynucleotide sequence
  source 1..357: mol_type = other DNA
gtcacgagtctctctcttttttcactttcacatctccagcaaggatggttgcaatttccccttgcataaaggcccaggggacattggagcccacaagagggcatttttccccactgggacaatagacctctccactagctccctgctgtttgatgctttgtctggagcaagggaagcagaacttgtgcgaagggacggacgggcactgcacaaaatgggtgtcctccagccgctcgtggcagagggtgcagcacagcggggcactggttgccagagaggagtccgggaggctggcagggtgcactggctccagtcctcctgtgttgcctgctccctggccccccacctctctggggc

SEQ ID NO: 943 - DNA, 360 bp, synthetic construct
  misc_feature 1..360: note = Description of artificial sequence: synthetic polynucleotide sequence
  source 1..360: mol_type = other DNA
ccagccttctttggttcatagaggacggagagggcggactgttgctattcctcctggtagtggagtgaacctggttggcatcttttgaggcatgactgccccctgcattgtctgctactaagatcagggctgccatgggggactggccattctgggccgcttcaggcggtgtggtccggttggaatgaggtgaggcagtgggtggtggcggagacacaaaagaggatgtaggagtcatggggatcttgagcccctctgtggatgtggacagccacggctgggcctctccgttgatcttagggggcccgacttcaccttctggttctggagagggcttccttttccttgctgttcttgcaa

SEQ ID NO: 944 - DNA, 233 bp, synthetic construct
  misc_feature 1..233: note = Description of artificial sequence: synthetic polynucleotide sequence
  source 1..233: mol_type = other DNA
cctgctttagacccgttggccccgttggcctcgaaacccaacaacctgcctgcagtcagggccggctccttcttaaacttgctctcgaagggccccgagtggccgtgctggtgcagcgccagcagcgtgtcgcgcacggtcttgggcctgttgacccagtcctgctctccagacccgcggctcttgcccgcaccttccgcgctcagctcggcggccccggccgcggtggacag

SEQ ID NO: 945 - DNA, 463 bp, synthetic construct
  misc_feature 1..463: note = Description of artificial sequence: synthetic polynucleotide sequence
  source 1..463: mol_type = other DNA
gctgtcggccgggccccggtgcgcaggcggcggcggttgtttctccttggctgccgcctcacgctgctcgtgctccacggcagcgctgctcgacacggatgccggccgcttgtgggcgcccagatcggtgggctgcgcggagcccaggctggcggccgcggttccggacaccgcggctaaggaggcggcagcgcggccgccgaggccgagcgcggtgggcagcggcgtggccgagccgttcatgagcggcaccagggtgggcggcaccgcgtggccgcgccgcgggttcgggctctggcgattcagctcgggcggctcctctagcttggagaagccgttgggcaccaggatgccgttcacgggcggcggctgcggcgtcggcggctgggccaggctcgctgccgggcggctgctgccgaagtcagagccgaggcgcgggggcctctcggccgcggccgccaac

SEQ ID NO: 946 - DNA, 353 bp, synthetic construct
  misc_feature 1..353: note = Description of artificial sequence: synthetic polynucleotide sequence
  source 1..353: mol_type = other DNA
gggtagcgctccaaggcctgcggcgcgcgcggggccgcctcggggccgccgtggccaagctgctgctgctgctgcaaaaggatgtccttggcggagagcggcggcggcttggcggcggccgaggccgcggcgccgggtggggagcgaccctccgggaagcagccgtgcgcccgcttgagctgccgcgccgtctcgatgacgaactcgacgcggtcggcgccctcgtagttgacgcagccgcggcagacgggttcggtgaagtcccagatcatggcccagggcatgcggggcaggtcacacaggtagcacgactgccgccgggacgcggccgccaccgccaccgccgcggccat

SEQ ID NO: 947 - DNA, 121 bp, synthetic construct
  misc_feature 1..121: note = Description of artificial sequence: synthetic polynucleotide sequence
  source 1..121: mol_type = other DNA
tcatggcttgctccaggcgtctctccccacttcacagtggccagcgagacaccttgcatgtggctcaccagaagaagccacgttttctctagaggcggcatacacatctggaacgcgtctc

SEQ ID NO: 948 - DNA, 121 bp, synthetic construct
  misc_feature 1..121: note = Description of artificial sequence: synthetic polynucleotide sequence
  source 1..121: mol_type = other DNA
ttgacataatgttcagtgaagactaggagatgcaggaggggtttcataggctcaaggaaacagtattgaaatgggtgggccatgggcctacagtggagtagaggatggataaagtcagaca

SEQ ID NO: 949 - DNA, 121 bp, synthetic construct
  misc_feature 1..121: note = Description of artificial sequence: synthetic polynucleotide sequence
  source 1..121: mol_type = other DNA
aaaagagagaaaatatacacacatttcttttcattttaaaaccaaatgcaacacaaatctaaaagctgtttgcctaacagatcatatctgtgcaagataagttttacatgttctctttctg

SEQ ID NO: 950 - DNA, 121 bp, synthetic construct
  misc_feature 1..121: note = Description of artificial sequence: synthetic polynucleotide sequence
  source 1..121: mol_type = other DNA
cctgaaccttctcccaccggcacaaccgtctgtaaccagcccctgctaactcctcagaacgagtggatgccggagaatgttgacttcctcccaagaagaaagtgaaggaagcagaaacctc

SEQ ID NO: 951 - DNA, 121 bp, synthetic construct
  misc_feature 1..121: note = Description of artificial sequence: synthetic polynucleotide sequence
  source 1..121: mol_type = other DNA
tggggctccagagaactgaagagggacgccagccgaccggtgccacctctggaatggtgttcgccgcgaaataagctactggcgacctgtccaagcctgtagtcttccggcggactcccgc

SEQ ID NO: 952 - DNA, 121 bp, synthetic construct
  misc_feature 1..121: note = Description of artificial sequence: synthetic polynucleotide sequence
  source 1..121: mol_type = other DNA
tcataatgatgtactacggtatgactctattaatttattcggtacctagtgagcaatttcaatgtaaagatttgtgtctgtcagttctggaatttttctttagttatttgctttttttttt

SEQ ID NO: 953 - DNA, 121 bp, synthetic construct
  misc_feature 1..121: note = Description of artificial sequence: synthetic polynucleotide sequence
  source 1..121: mol_type = other DNA
agatttccagtaagaaggaattgattacacaaaatacagaacatctgaatagtggaatgttgagccaccattaaataaatttcttatcataggaagagttacatgtcacattgcatttctt

SEQ ID NO: 954 - DNA, 121 bp, synthetic construct
  misc_feature 1..121: note = Description of artificial sequence: synthetic polynucleotide sequence
  source 1..121: mol_type = other DNA
atgaagtgatacacattgctgatcagctcagacacctggaagtccttaatgtcaggtatgaactcttggttgctgaatcttcattaacaataaagctcatctctccttgcttcctcacagc

SEQ ID NO: 955 - DNA, 121 bp, synthetic construct
  misc_feature 1..121: note = Description of artificial sequence: synthetic polynucleotide sequence
  source 1..121: mol_type = other DNA
caaagtgctgggattacaggcatgagccaccacacccggccttcccaggtgcttttaatgtgcagccgcgtttgagacacactgctcaagtctgcatctagctggagcatcccacactttg

SEQ ID NO: 956 - DNA, 121 bp, synthetic construct
  misc_feature 1..121: note = Description of artificial sequence: synthetic polynucleotide sequence
  source 1..121: mol_type = other DNA
gttccaccaatttcgtgcagaatgccttgaatagttttatattcagtaggttggagattctttagatgatgaggttctaataagatgctctgaacttcttttgagctgaagggtctttgag

SEQ ID NO: 957 - DNA, 121 bp, synthetic construct
  misc_feature 1..121: note = Description of artificial sequence: synthetic polynucleotide sequence
  source 1..121: mol_type = other DNA
tctgataaaaggtgtctaagaaaaactgagagttcatatcacatttaatggtgaaatacctcatgcttctccttaggtcagacactaaaccaggaggtccactttcactacttccatctgc

SEQ ID NO: 958 - DNA, 121 bp, synthetic construct
  misc_feature 1..121: note = Description of artificial sequence: synthetic polynucleotide sequence
  source 1..121: mol_type = other DNA
aagtagagtgttgctgtgaaatacttggaaaggaaataaggcactcttgtcttcatttctgttcgatacagtcaactcccaaggtgttgtcagggcaacggcaggtcctgctccctggggt

SEQ ID NO: 959 - DNA, 121 bp, synthetic construct
  misc_feature 1..121: note = Description of artificial sequence: synthetic polynucleotide sequence
  source 1..121: mol_type = other DNA
cttacttctagcattccttatgctcattagtgagccctctcactaattgcagacttaaacagcactgctcgaagcacttggcattcttgcccttagtagtggactgacttccccttggcag

SEQ ID NO: 960 - DNA, 121 bp, synthetic construct
  misc_feature 1..121: note = Description of artificial sequence: synthetic polynucleotide sequence
  source 1..121: mol_type = other DNA
tgtaacacatatactttaattttttcatcaacagaaaaaacaccttggatctgcctattcctaaattctaattcaatgaacaatgaggacattttaataaaaagcttggactcagtggaaa

SEQ ID NO: 961 - DNA, 121 bp, synthetic construct
  misc_feature 1..121: note = Description of artificial sequence: synthetic polynucleotide sequence
  source 1..121: mol_type = other DNA
aaaataaaacttgccttaatgtgctgttaattgctcccagtttattagcttgctcacaatcttctaattctttggtattgtttgccattttcaagtactgcaaagaagttcgtaagtttag

SEQ ID NO: 962 - DNA, 121 bp, synthetic construct
  misc_feature 1..121: note = Description of artificial sequence: synthetic polynucleotide sequence
  source 1..121: mol_type = other DNA
tcctgcttgctccgggcccccaccataagtgacttgctcaatgatcaggacttactagacgtgatcaggataaagctggatccgtgtcacccaacggtgaaaaactggaggaattttgcaa

SEQ ID NO: 963 - DNA, 121 bp, synthetic construct
  misc_feature 1..121: note = Description of artificial sequence: synthetic polynucleotide sequence
  source 1..121: mol_type = other DNA
tccctgtcgattgtggccgcttccttagggtcaaataacaaagaagcaacttcatctctagataagaggctggcatcactttgagggagggcgagtcgttgcagctgctgggctaaggacg

SEQ ID NO: 964 - DNA, 121 bp, synthetic construct
  misc_feature 1..121: note = Description of artificial sequence: synthetic polynucleotide sequence
  source 1..121: mol_type = other DNA
tcacacattggatattattctctagcggaacagaagacccagacttttccaacagagtacggatgtctatttgcaaactacagaggaatttgctgtcatgtttcctcatctgttcttagac

SEQ ID NO: 965 - DNA, 121 bp, synthetic construct
  misc_feature 1..121: note = Description of artificial sequence: synthetic polynucleotide sequence
  source 1..121: mol_type = other DNA
catgtaataaagtggatatattttagtttatttagctgtttccctatgggtagatatttcggatgtttgttattgttactataaatgtgcgtatcttggtttttatctcccagtgcttctg

SEQ ID NO: 966 - DNA, 121 bp, synthetic construct
  misc_feature 1..121: note = Description of artificial sequence: synthetic polynucleotide sequence
  source 1..121: mol_type = other DNA
aaatctaaaggatgaatactttgaggaaatcatggaagaatatgaagatattagacaggaccattatgagtctctcaaggtaagtggtagaaacagatttttgcttgtttttaatgtgact

SEQ ID NO: 967 - DNA, 121 bp, synthetic construct
  misc_feature 1..121: note = Description of artificial sequence: synthetic polynucleotide sequence
  source 1..121: mol_type = other DNA
tcagcttccgaacactgtcctacgtttgggaacctcactgttgcgtgagtcatggcatcacctacaacggaagctgaaaaggtcagtacctgctttctccatatcctgctgcccagggcat

SEQ ID NO: 968 - DNA, 121 bp, synthetic construct
  misc_feature 1..121: note = Description of artificial sequence: synthetic polynucleotide sequence
  source 1..121: mol_type = other DNA
acaattttactaatgcttcattaataagcagaagagtttgtatatagataaggaaatgattgacaaactgagaagagaaagaaaatacttactaggactagattattaaataatcatatag

SEQ ID NO: 969 - DNA, 121 bp, synthetic construct
  misc_feature 1..121: note = Description of artificial sequence: synthetic polynucleotide sequence
  source 1..121: mol_type = other DNA
gatgctctcagcaagaaagcgaaggcttccacagtcgatttgcctatagagtccgtaagcctaagtctgcaggatctcattggctacttccaccccccagatgagcatttagagcatgaag

SEQ ID NO: 970 - DNA, 121 bp, synthetic construct
  misc_feature 1..121: note = Description of artificial sequence: synthetic polynucleotide sequence
  source 1..121: mol_type = other DNA
gaataaaattgagcttggctggcagtatggtccggtatgtaattttgaaatttattttcagattctgtgaatacatctttctgaaaacataactttttctgccttttcccgctatggggtg

SEQ ID NO: 971 - DNA, 121 bp, synthetic construct
  misc_feature 1..121: note = Description of artificial sequence: synthetic polynucleotide sequence
  source 1..121: mol_type = other DNA
tctatgatgcagcacttactcagaagattagtatttgatgttccattattaaatgaacacgcaaagatgcctcttaaagtaagtataggaaatgtttgtagatatttgattactggcttct

SEQ ID NO: 972 - DNA, 121 bp, synthetic construct
  misc_feature 1..121: note = Description of artificial sequence: synthetic polynucleotide sequence
  source 1..121: mol_type = other DNA
aagaaagaagggagttttaggaaaagggaatttggtcctgggtatgaaatgccactgaacggttggaaagatgagttgtaaaagtgcaattttgctgcacagtgaaaagcagctttgttcc

SEQ ID NO: 973 - DNA, 121 bp, synthetic construct
  misc_feature 1..121: note = Description of artificial sequence: synthetic polynucleotide sequence
  source 1..121: mol_type = other DNA
atgtgaaggccgtcaggctctcgcaagcctatgagtctttggttaatgtgcataactacgcattttttttttttgtcattgcagactgaactccattgatgtgaagtatcagatgtggaaa

SEQ ID NO: 974 - DNA, 121 bp, synthetic construct
  misc_feature 1..121: note = Description of artificial sequence: synthetic polynucleotide sequence
  source 1..121: mol_type = other DNA
ttgacagctgggactgaggggctctctggaacctcttcgcagaccttgaggatgttgcaggaagaagagagagggcctcgtttgggagctgttcacctctgtcctaatacagggcaccagg

SEQ ID NO: 975 - DNA, 121 bp, synthetic construct
  misc_feature 1..121: note = Description of artificial sequence: synthetic polynucleotide sequence
  source 1..121: mol_type = other DNA
gagtaggcccttacttacaacatacacatcccgaagttatgaattcaactcaaacacttcagtctcactgctcatgcttctgtaagtctgtgagagaaggaagaggattcttagctatgag

SEQ ID NO: 976 - DNA, 121 bp, synthetic construct
  misc_feature 1..121: note = Description of artificial sequence: synthetic polynucleotide sequence
  source 1..121: mol_type = other DNA
cttctgtttgttaacttcggtagtttccagtattttaaaattacaaatacttctgtaatgaatggccttcttcatatgtattttgtgttgttgaaggtatattttcagtgcaaattcttag

SEQ ID NO: 977 - DNA, 121 bp, synthetic construct
  misc_feature 1..121: note = Description of artificial sequence: synthetic polynucleotide sequence
  source 1..121: mol_type = other DNA
ctcagggagggcagaaaagtgtgacaaattgatgctctaaaatgcatgcttagctaaatgttgtggaaaaaatttaataagagtaaaacatacataatgcgtattcatgtgatagcagtaa

SEQ ID NO: 978 - DNA, 121 bp, synthetic construct
  misc_feature 1..121: note = Description of artificial sequence: synthetic polynucleotide sequence
  source 1..121: mol_type = other DNA
accctctctgcttctggagatctccacttcctcttggttgcattggattctcattgaaagtcctattccattctgttgtttttcccagactcatttcagtggcaatgtaaatttgggagaa

SEQ ID NO: 979 - DNA, 121 bp, synthetic construct
  misc_feature 1..121: note = Description of artificial sequence: synthetic polynucleotide sequence
  source 1..121: mol_type = other DNA
tgtcggagatcttttaagcagggcagggaagcaactggatgaaaattttaggaaggtcacgtcactgagatacctctgtgcaagtggatacagaattggcttggtccttttaagatctaaa

SEQ ID NO: 980 - DNA, 121 bp, synthetic construct
  misc_feature 1..121: note = Description of artificial sequence: synthetic polynucleotide sequence
  source 1..121: mol_type = other DNA
aaagaaacagaaacataatgttaaacaagaaaatcaagatacaaaggaaaacacattgtatgagtcattcatataaagttcaaaatgaggcaaaacaaatccatattcagaatgcatatct

SEQ ID NO: 981 - DNA, 121 bp, synthetic construct
  misc_feature 1..121: note = Description of artificial sequence: synthetic polynucleotide sequence
  source 1..121: mol_type = other DNA
cacttggcagtttgtaacagacgaagcaataactaccttttactgaatatcacgattgcagttcagaataaaaatggcctgggtatgctgatttctctgggtgaggagttgatatttttga

SEQ ID NO: 982 - DNA, 121 bp, synthetic construct
  misc_feature 1..121: note = Description of artificial sequence: synthetic polynucleotide sequence
  source 1..121: mol_type = other DNA
tagaatatatttacaatttcttaaaagtccatcaaaaacaacattggtttacaatgaaggcataaacatatctgatgtttgagaaattcctggaggtactaaaggagttggaataagacca

SEQ ID NO: 983 - DNA, 121 bp, synthetic construct
  misc_feature 1..121: note = Description of artificial sequence: synthetic polynucleotide sequence
  source 1..121: mol_type = other DNA
ctcagtggaaagacagaggtagaagactgcaaaaggcaaatctcagaattcacaaaagccgagcaggtgccattcaatgaagacatgaactggcctaggtatttctgggacctgaatggtc

SEQ ID NO: 984 - DNA, 121 bp, synthetic construct
  misc_feature 1..121: note = Description of artificial sequence: synthetic polynucleotide sequence
  source 1..121: mol_type = other DNA
ccatctccagtagcttctgtgaagttaaggccaactctacccctctccaagagagaaaccatcagttggagcagcattctagttctcaaaccaattcattttctgcatatttctataaggt

SEQ ID NO: 985 - DNA, 121 bp, synthetic construct
  misc_feature 1..121: note = Description of artificial sequence: synthetic polynucleotide sequence
  source 1..121: mol_type = other DNA
attggattatgaagaccaatgatgctgtagagcccctggccctcagagcaggatctctacatgatttttgatttacagaattcccaattgagaggaaaagaatattttccatacccttgca

SEQ ID NO: 986 - DNA, 121 bp, synthetic construct
  misc_feature 1..121: note = Description of artificial sequence: synthetic polynucleotide sequence
  source 1..121: mol_type = other DNA
ggagatataattaccggtgttctattgtccctttagatatcccctcaactatgttatttatcccaacaaggaaaatttaaatgtaggggcaaacaagcctaggaaagggagctacttttga

SEQ ID NO: 987 - DNA, 121 bp, synthetic construct
  misc_feature 1..121: note = Description of artificial sequence: synthetic polynucleotide sequence
  source 1..121: mol_type = other DNA
gctgagtgttagcagtaaaacattttcatcaaatttccattcttttttttttgaagcctacttgcatagttctaaggagtgtcatagctcacacatagtgacactgattagtaaaaataag

SEQ ID NO: 988 - DNA, 121 bp, synthetic construct
  misc_feature 1..121: note = Description of artificial sequence: synthetic polynucleotide sequence
  source 1..121: mol_type = other DNA
gtaaacagtatattctgttgattcttccaacatcgtcaatcatgtgtgacagagctcatttccgtttgattgtagaagtctcggatggtaggttagaggctttgctatgttcattcattta

SEQ ID NO: 989 - DNA, 121 bp, synthetic construct
  misc_feature 1..121: note = Description of artificial sequence: synthetic polynucleotide sequence
  source 1..121: mol_type = other DNA
cctcaaactgggggtagatttgcatatatctgctcaccatggaacagaaacaaaaaatcataataagtgaccaataaacaaattggaatggctgaaaaattaaatactaactacaccaaca

SEQ ID NO: 990 - DNA, 121 bp, synthetic construct
  misc_feature 1..121: note = Description of artificial sequence: synthetic polynucleotide sequence
  source 1..121: mol_type = other DNA
cctctccgtcagaaaaatctccctttttaacacctgagcaggacgaatgcagcagctttttaaatgagagctctctagggacctgcttcaaccatgggccagggtcgtgcaggggccagga

SEQ ID NO: 991 - DNA, 121 bp, synthetic construct
  misc_feature 1..121: note = Description of artificial sequence: synthetic polynucleotide sequence
  source 1..121: mol_type = other DNA
agccgagggtccagaactgccctggcctccgtagccgccccggccaagaagcaccgggccgacggcggccttgcggccggcctgagccgctcggctgactggacggaggagctaggcgccc

SEQ ID NO: 992 - DNA, 121 bp, synthetic construct
  misc_feature 1..121: note = Description of artificial sequence: synthetic polynucleotide sequence
  source 1..121: mol_type = other DNA
agggtttagtctctgaaatagactgtgcacttgcttcacaagagggattttttctctccaacagctgagttagagcaggctaaggtggtgggctgaaatcctagttggccctaggatggta

SEQ ID NO: 993 - DNA, 121 bp, synthetic construct
  misc_feature 1..121: note = Description of artificial sequence: synthetic polynucleotide sequence
  source 1..121: mol_type = other DNA
agagcgagtcttttgcatcctgttccagtccacattttcagaaagcatttgctcaattcgtcgcaaactggaattactacagaaattgtgtgaggtgagttctggtccaaagagagctgaa

SEQ ID NO: 994 - DNA, 121 bp, synthetic construct
  misc_feature 1..121: note = Description of artificial sequence: synthetic polynucleotide sequence
  source 1..121: mol_type = other DNA
gaaatggacacaagcaaattggtagttgcgtcgtgggagggagtagcatgtgatgaggccgaacgtgtattcctggctgagggacttaggcttcatccagaagtcttggggagcagaagtt

SEQ ID NO: 995 - DNA, 121 bp, synthetic construct
  misc_feature 1..121: note = Description of artificial sequence: synthetic polynucleotide sequence
  source 1..121: mol_type = other DNA
tcagcgtgcattccaggttgttatgaacaggccatcccaggggaatgacagataaatttacaggaacaccttggcattctctaataataaataaataaattttcttctacttggaaaaaca

SEQ ID NO: 996 - DNA, 121 bp, synthetic construct
  misc_feature 1..121: note = Description of artificial sequence: synthetic polynucleotide sequence
  source 1..121: mol_type = other DNA
gcacggagagttattttattttaagtgcaattcacagccctgttgaccactggaccattttgtctccttcagtgtgtgacacagatatgtcagtggaagcagagtagggctcagatttggg

SEQ ID NO: 997 - DNA, 121 bp, synthetic construct
  misc_feature 1..121: note = Description of artificial sequence: synthetic polynucleotide sequence
  source 1..121: mol_type = other DNA
ggacagttctctctcctagaattattaggaggtaaaaatttggagctcttctacttatgattaaacagaaagaggcatgaggagaaaaccaaatgatgtcatcagaataaaaaggcactgc

SEQ ID NO: 998 - DNA, 121 bp, synthetic construct
  misc_feature 1..121: note = Description of artificial sequence: synthetic polynucleotide sequence
  source 1..121: mol_type = other DNA
cacagcaaaaagtgatagtttctggttcttgggtatttttcatcatgtttagtgcaaaccgtaaacgctgaataacaccatgggacccacatgaaatatcactagtgatgccagaagtgct

SEQ ID NO: 999 - DNA, 121 bp, synthetic construct
  misc_feature 1..121: note = Description of artificial sequence: synthetic polynucleotide sequence
  source 1..121: mol_type = other DNA
gaaattaaaaatgcagacaaccactcaactaatacgtcagcgagatacgttttctgtccttattgccttactgatgaaattgcctttattcataaaaaataaatgtgggagtcttgtttat

SEQ ID NO: 1000 - DNA, 121 bp, synthetic construct
  misc_feature 1..121: note = Description of artificial sequence: synthetic polynucleotide sequence
  source 1..121: mol_type = other DNA
acttctcctgctctgagggacttctcctgcatgcaaacctgtcaaaggcaaataaagctcatctgtgctattgccaccttgtggtcatgtattgctttttaaaaaatcagcccccatatcc

SEQ ID NO: 1001 - DNA, 121 bp, synthetic construct
  misc_feature 1..121: note = Description of artificial sequence: synthetic polynucleotide sequence
  source 1..121: mol_type = other DNA
tgatagccatcagcagtacctacctacttatacactacatgtcaccacgatctttcctccgcttgagaagaccatggaactggatagctcacttccggaatacaacatgtttccccgcaaa

SEQ ID NO: 1002 - DNA, 121 bp, synthetic construct
  misc_feature 1..121: note = Description of artificial sequence: synthetic polynucleotide sequence
  source 1..121: mol_type = other DNA
gaactaatttgtacccctttggggggcaatatcttctctgttgagatacacggatgagggtggtaatactagggtatgacacctgttcacttgcctttctttcctaagagtttgcaattat

SEQ ID NO: 1003 - DNA, 121 bp, synthetic construct
  misc_feature 1..121: note = Description of artificial sequence: synthetic polynucleotide sequence
  source 1..121: mol_type = other DNA
gaagtgacttctgcagctgtcgatgaaagtggatttctttttgccacaggagcgtataatggtcagactaacatccagaatgtggcgtccctgctttagtgtcctgagaatttccgccaaa

SEQ ID NO: 1004 - DNA, 121 bp, synthetic construct
  misc_feature 1..121: note = Description of artificial sequence: synthetic polynucleotide sequence
  source 1..121: mol_type = other DNA
acagttagtactggtgataggaagattcctagtcacagttgatataatggattggaagcggcatacaatccaataggcctggatttgaattctcactctgtcatctttttagttgagtcgt

SEQ ID NO: 1005 - DNA, 121 bp, synthetic construct
  misc_feature 1..121: note = Description of artificial sequence: synthetic polynucleotide sequence
  source 1..121: mol_type = other DNA
tgtgtcgcagttaaagagcgaggagtccagtgacgatgagtctcatcccttacgagaagaggcatgttcttcacagtcccaggaaagtggagaattctcactgcagagttcaaatgcatca

SEQ ID NO: 1006 - DNA, 121 bp, synthetic construct
  misc_feature 1..121: note = Description of artificial sequence: synthetic polynucleotide sequence
  source 1..121: mol_type = other DNA
ccttggtgtcaacccagatatggcagccagctggtctttctagtccctaaattcaactggtttcaacaacatccactgaggctaagccaggagaaccaggaaactctgcaggcatcacatg

SEQ ID NO: 1007 - DNA, 121 bp, synthetic construct
  misc_feature 1..121: note = Description of artificial sequence: synthetic polynucleotide sequence
  source 1..121: mol_type = other DNA
gctattctccttcaatgtgatttttggatgattggtattccaacatgtggatgatccactgtttaattctaaaaaccgtgctgcagtgtacgtctttgtacataatctttgtgaacctaac

SEQ ID NO: 1008 - DNA, 121 bp, synthetic construct
  misc_feature 1..121: note = Description of artificial sequence: synthetic polynucleotide sequence
  source 1..121: mol_type = other DNA
aacatgtaagctaacaagctatacattctatgaacttattaaatcagccaaagtgtccatcagaaatattaaatcctatggacaaggctgaagttagttaaaaagtgagatttaagtatat

SEQ ID NO: 1009 - DNA, 121 bp, synthetic construct
  misc_feature 1..121: note = Description of artificial sequence: synthetic polynucleotide sequence
  source 1..121: mol_type = other DNA
ttatgttcaagctgcaacattccattatccaggagacatttgttcatataagtgaaatgtcccatgctccaccactgtcagtgtttccaaaggaggttgttgaccaggattcagaagagtg

SEQ ID NO: 1010 - DNA, 121 bp, synthetic construct
  misc_feature 1..121: note = Description of artificial sequence: synthetic polynucleotide sequence
  source 1..121: mol_type = other DNA
acctggaaatgaaattctggaatgtataaggcaaataaacacagactctgtccttgtttttattataagcagaaccattacttaaaataaatggaaataaaacttgggcgtaatatcttgc

SEQ ID NO: 1011 - DNA, 121 bp, synthetic construct
  misc_feature 1..121: note = Description of artificial sequence: synthetic polynucleotide sequence
  source 1..121: mol_type = other DNA
acacacacatgtgcacacacacacgtgcacacacatgcacacacacaaaattaatcactcttgtattcattcttccacatatgagaaaaatgaggtttaccttggggaaaatattatagga

SEQ ID NO: 1012 - DNA, 121 bp, synthetic construct
  misc_feature 1..121: note = Description of artificial sequence: synthetic polynucleotide sequence
  source 1..121: mol_type = other DNA
agctccattataatcttatggtaccactgccgtgtatgtggtctgccgttatgggatgcatgactctaattacaaaacagaagaactgaggaaaatgatgcaaaagaatgaaagaaaatgt

SEQ ID NO: 1013 - DNA, 121 bp, synthetic construct
  misc_feature 1..121: note = Description of artificial sequence: synthetic polynucleotide sequence
  source 1..121: mol_type = other DNA
atccagtgtgaccagttgaggaaggagctggagaggcaggcggagcgacttgaaaaagaacttgcatctcagcaagagaaaagggccattgagaaagacatgatgaaaaaggaaataacga

SEQ ID NO: 1014 - DNA, 121 bp, synthetic construct
  misc_feature 1..121: note = Description of artificial sequence: synthetic polynucleotide sequence
  source 1..121: mol_type = other DNA
caagcccttcaggcccagcaaagagagcaggagctgacacagaagatacagcaaatggaggcccagcatgacaaaactggtaggtggtagggaaagattagagcctgggcactagctcaca

SEQ ID NO: 1015 - DNA, 121 bp, synthetic construct
  misc_feature 1..121: note = Description of artificial sequence: synthetic polynucleotide sequence
  source 1..121: mol_type = other DNA
aaacggtcttttgtctggaaggaatatttcaaggacttgaaataaaaaaaagaaaaaatgttacattataatcctgtattcttataattataatagtactaaaaatagaacacatagaaat

SEQ ID NO: 1016 - DNA, 121 bp, synthetic construct
  misc_feature 1..121: note = Description of artificial sequence: synthetic polynucleotide sequence
  source 1..121: mol_type = other DNA
gcacaaagactgccttctgaatactccctagaggccaatcagccaggtgtgagaattctgaggttagggaaactctttgaaacagagttcaagaagagctacttagaaataaagaaacaaa

SEQ ID NO: 1017 - DNA, 121 bp, synthetic construct
  misc_feature 1..121: note = Description of artificial sequence: synthetic polynucleotide sequence
  source 1..121: mol_type = other DNA
attttacaaataaaccctgtggctccagtagtgaaatattgtcccttttttaacagatttgaagacttgtcagtaaggctcagaggtttgcttgatgacactgggtgatcagacatatgag

SEQ ID NO: 1018 - DNA, 121 bp, synthetic construct
  misc_feature 1..121: note = Description of artificial sequence: synthetic polynucleotide sequence
  source 1..121: mol_type = other DNA
ataacccctcacctagacccaaaaggctcttagtccacatgccttccctactgtacctctgtccaatccattcctcacacggccaacataataatcttcctctttgtatgccacttagtgc

SEQ ID NO: 1019 - DNA, 121 bp, synthetic construct
  misc_feature 1..121: note = Description of artificial sequence: synthetic polynucleotide sequence
  source 1..121: mol_type = other DNA
tcataaaatacacagttcccaaccagctctcaaaatgacaactctttctaggcagtgaacgacaggcaggcacaaagccatggctcctgggagagaaaactcacaagcaagtccagaagcc

SEQ ID NO: 1020 - DNA, 121 bp, synthetic construct
  misc_feature 1..121: note = Description of artificial sequence: synthetic polynucleotide sequence
  source 1..121: mol_type = other DNA
cttcttaagtttgccagattagtaactaccacagaactgaaaaacatcctaagtctatcggtgactgctactctgaccatagacagggttgagtatacaggacaccctctggagattgctg

SEQ ID NO: 1021 - DNA, 121 bp, synthetic construct
  misc_feature 1..121: note = Description of artificial sequence: synthetic polynucleotide sequence
  source 1..121: mol_type = other DNA
gcacacaacacacttagattctttacagtgactctaactgaagccaaagaatctatgacaagcctgttttctctgaaagttccttgacagtacaggtccatacaactctacgcacaacaaa

SEQ ID NO: 1022 - DNA, 121 bp, synthetic construct
  misc_feature 1..121: note = Description of artificial sequence: synthetic polynucleotide sequence
  source 1..121: mol_type = other DNA
aatgaaaagaaacaaacaaacaaaaaacagtctgatatccatactaattgcataattgcgtaaccttaagcaaatctcttaacatctttgattcaacgttacactgtgagggagagacact

SEQ ID NO: 1023 - DNA, 121 bp, synthetic construct
  misc_feature 1..121: note = Description of artificial sequence: synthetic polynucleotide sequence
  source 1..121: mol_type = other DNA
cctagctccatctggtcgccgtccagagcggagattccttcctcctcctcttcctcttcctcctcctcttcatcgccgccggccgcggcctcctgctcgaggcctgctcccgagcgcccag

SEQ ID NO: 1024 - DNA, 121 bp, synthetic construct
  misc_feature 1..121: note = Description of artificial sequence: synthetic polynucleotide sequence
  source 1..121: mol_type = other DNA
attcttttgggtgcatatccaggagtggaattgctggatcatgtggtagttctgtgtttgatatttgaggaaccactgtactgttttccacagcggctgcgccatgctgcattcccaccag

SEQ ID NO: 1025 - DNA, 121 bp, synthetic construct
  misc_feature 1..121: note = Description of artificial sequence: synthetic polynucleotide sequence
  source 1..121: mol_type = other DNA
tttttcacttattttccatctctgtctctgtgttctctctggtagatttcttgaactttgtcttccaatatttttattgagtttctcatttctgttgtgttttaaatttccagtagcttgt

SEQ ID NO: 1026 - DNA, 121 bp, synthetic construct
  misc_feature 1..121: note = Description of artificial sequence: synthetic polynucleotide sequence
  source 1..121: mol_type = other DNA
cgtctccagtcaagcctttcagcctcctttccccaggaggcaacaattattctattttttttccaccatagaaaaaagttagaacagtggttctcatagttttgtgtgttttagaattgca

SEQ ID NO: 1027 - DNA, 121 bp, synthetic construct
  misc_feature 1..121: note = Description of artificial sequence: synthetic polynucleotide sequence
  source 1..121: mol_type = other DNA
cttgttccactcggaagggaaggcagagggcttgcatctgaagccatgcctccttcatcagtgctgtatcgagctctaggtttgggttcttggcacttcggtgcttcccttctcactcagt

SEQ ID NO: 1028 - DNA, 121 bp, synthetic construct
  misc_feature 1..121: note = Description of artificial sequence: synthetic polynucleotide sequence
  source 1..121: mol_type = other DNA
acagaaggttgactgactcacaaggcaacccagaagatttgaagcaggaagaaataagaagtgagggttcccaattggcagaatttaaggagaacatgagttctccttaaattcttggtgc

SEQ ID NO: 1029 - DNA, 121 bp, synthetic construct
  misc_feature 1..121: note = Description of artificial sequence: synthetic polynucleotide sequence
  source 1..121: mol_type = other DNA
gcagaggtcagctccgcacacacttcctgggactttgcagtcaatggttactgaagttacttaatacccacttgtcccacgactggtgagtcccgcctattgcctgctgtcctgtggtgca

SEQ ID NO: 1030 - DNA, 121 bp, synthetic construct
  misc_feature 1..121: note = Description of artificial sequence: synthetic polynucleotide sequence
  source 1..121: mol_type = other DNA
gacacgcctctctggaagagtggggcctggggcaaaaaggcggccttctccggctgcttcgtggagctgatggaggccgcaggatgtagttgagagctcaggtcttgcagtcagtctgtgg

SEQ ID NO: 1031 - DNA, 121 bp, synthetic construct
  misc_feature 1..121: note = Description of artificial sequence: synthetic polynucleotide sequence
  source 1..121: mol_type = other DNA
gtcagcatcacacagttcttgcccctcccgaagatgagcctggatgagaaggcccaggacgcagggagcagacgctcttccatcagctcctggctgagcgagatgagcgcgggcagtgagg

SEQ ID NO: 1032 - DNA, 121 bp, synthetic construct
  misc_feature 1..121: note = Description of artificial sequence: synthetic polynucleotide sequence
  source 1..121: mol_type = other DNA
gctgctctttctaaaggcttcaaggtcacttaagcttgtgccggctctgctaagagctccgatgaggaataaactttaagatcttctactagacagaattttggaattcccagcagacctg

SEQ ID NO: 1033 - DNA, 121 bp, synthetic construct
  misc_feature 1..121: note = Description of artificial sequence: synthetic polynucleotide sequence
  source 1..121: mol_type = other DNA
agcaccttcagctggtagatgttgatatcgggaagccgttcagaattgctgcttatgattgcctggcacatggccagaacctgctcccactctgttattaaccttagttaaggattcattg

SEQ ID NO: 1034 - DNA, 121 bp, synthetic construct
  misc_feature 1..121: note = Description of artificial sequence: synthetic polynucleotide sequence
  source 1..121: mol_type = other DNA
ctcatgcaagaggctctatccttgggagcccagggaatgtatgtgcacacaaagggttacgtagggttgaggccagacagagggtggtctggagagttgtgttgaggcagggcaacccaga

SEQ ID NO: 1035 - DNA, 121 bp, synthetic construct
  misc_feature 1..121: note = Description of artificial sequence: synthetic polynucleotide sequence
  source 1..121: mol_type = other DNA
gagcctccaagggccttcccccagggagtcacaagggaggcacttcactcctcctacaaaaagctgtgataacgtgagaaatgtcccagtcagggaaacccattagagactcagtacccag

SEQ ID NO: 1036 - DNA, 121 bp, synthetic construct
  misc_feature 1..121: note = Description of artificial sequence: synthetic polynucleotide sequence
  source 1..121: mol_type = other DNA
ggaccatcatgtcacatatatactcttacatggcacgacagcttaaaatccccacttttccttcaaatggcacaattgagcttccaaagagacaaatgctgatatcattctgtcatttacc

SEQ ID NO: 1037 - DNA, 121 bp, synthetic construct
  misc_feature 1..121: note = Description of artificial sequence: synthetic polynucleotide sequence
  source 1..121: mol_type = other DNA
attgggatattcacatgtcagcagctctcagtataaacaaaacaacaataaaaagtcagaaaatcagcaagaggaataaacatgtcagaaatattgtgggatccagtgaccatcacatgtc

SEQ ID NO: 1038 - DNA, 121 bp, synthetic construct
  misc_feature 1..121: note = Description of artificial sequence: synthetic polynucleotide sequence
  source 1..121: mol_type = other DNA
gctgctgaggtcagcagcaccacggcagctgtgaaaggttagcagttttgtttttgtgtgttgaggccttggctcaagatcccatctgtgctgacttcagactgaagggaacacatttcct

SEQ ID NO: 1039 - DNA, 121 bp, synthetic construct
  misc_feature 1..121: note = Description of artificial sequence: synthetic polynucleotide sequence
  source 1..121: mol_type = other DNA
cttgcttttattctttttactcaccgtaagtggtctattacagtggcgctgcgcctcccaaaacagtgctttaacaagtgaaaaaatatattatagttcataggtgttaagttcttggtaa

SEQ ID NO: 1040 - DNA, 121 bp, synthetic construct
  misc_feature 1..121: note = Description of artificial sequence: synthetic polynucleotide sequence
  source 1..121: mol_type = other DNA
cctgcttttacaacctaagcaccaagggatggggagccttggccgttagcagcctaagggagctcttgttcccacgcatttttcaaattccactggagtttcatgaggttcgttttaagac

SEQ ID NO: 1041 - DNA, 121 bp, synthetic construct
  misc_feature 1..121: note = Description of artificial sequence: synthetic polynucleotide sequence
  source 1..121: mol_type = other DNA
ttctcatctgcctaaggcgtaagtttggttttcttccaattagaagatcttttttatctatgttatattttagcttattttgatttgattttcaggctttgggtttgcatgtaagcattta

SEQ ID NO: 1042 - DNA, 121 bp, synthetic construct
  misc_feature 1..121: note = Description of artificial sequence: synthetic polynucleotide sequence
  source 1..121: mol_type = other DNA
tcagttccttgaaccgggcttaagtgattcaattctgaaaatgcctctgctgcaactaagagatcctttgtttctgcatcttctaaattgcctataagtcatacaaataagaatattattt

SEQ ID NO: 1043 - DNA, 121 bp, synthetic construct
  misc_feature 1..121: note = Description of artificial sequence: synthetic polynucleotide sequence
  source 1..121: mol_type = other DNA
gtgtgagccaccacacccagcctaaacgttacatattaaaaggattatatattaaaaagccactggattgagaatagattgtaagaagacaagggtagaggcaaggacagctgttagaaga

SEQ ID NO: 1044 - DNA, 121 bp, synthetic construct
  misc_feature 1..121: note = Description of artificial sequence: synthetic polynucleotide sequence
  source 1..121: mol_type = other DNA
ccggcggaaactcgggtcggcaccgcggggaggtccgggttcgccacaaccgcttcctggcggttcccttttccccttcccgagacacctggccggcacactcaccatttcccagtctccg

SEQ ID NO: 1045 - DNA, 121 bp, synthetic construct
  misc_feature 1..121: note = Description of artificial sequence: synthetic polynucleotide sequence
  source 1..121: mol_type = other DNA
ctctgcaaatgttatggtttaaatatttgtctcctccaaagctcatgttgaaatttaatcgccaatgtggcagtactaagaagtgatgagaggttaatccattcatgaactcatgaattaa

SEQ ID NO: 1046 - DNA, 121 bp, synthetic construct
  misc_feature 1..121: note = Description of artificial sequence: synthetic polynucleotide sequence
  source 1..121: mol_type = other DNA
ccacgagctgctgacagagagcacggtgcatgagaacggcatagtgcaggggcttgcagatggccacgtagcggtccagggccatggcggccaggacgatgcactccgtgcatcccagcca

SEQ ID NO: 1047 - DNA, 121 bp, synthetic construct
  misc_feature 1..121: note = Description of artificial sequence: synthetic polynucleotide sequence
  source 1..121: mol_type = other DNA
tgtgagatgagatgagcatgttgagaaggccttcctcttgccttctactgtgcggatacggagaatagcaacaatgataaaaccataggagatgcaggtaagaataaagtcccctatggcc

SEQ ID NO: 1048 - DNA, 121 bp, synthetic construct
  misc_feature 1..121: note = Description of artificial sequence: synthetic polynucleotide sequence
  source 1..121: mol_type = other DNA
aggagcagagtggggtttaggggtctgtcaagacacactgccaagaaagggggaaaccacgccatctcctgagaatggggtctgggccctgtggctgctgaaagggaatgagtacatggtc

SEQ ID NO: 1049 - DNA, 121 bp, synthetic construct
  misc_feature 1..121: note = Description of artificial sequence: synthetic polynucleotide sequence
  source 1..121: mol_type = other DNA
gtatttcctacttagtcagctctccctcattgacctaaattacatctccaccattgttcctaagatggcatctgattttctgtctggtaacaagtctatctccttcactgggtgtgggatt

SEQ ID NO: 1050 - DNA, 121 bp, synthetic construct
  misc_feature 1..121: note = Description of artificial sequence: synthetic polynucleotide sequence
  source 1..121: mol_type = other DNA
atcatagtgcttgcagctgtcctgtcattttcttactgcagctctctggaaattcatcactttttctgtgatgttgctgcccttttacctctatcctgcacagaaacatctgcatttgaaa

SEQ ID NO: 1051 - DNA, 121 bp, synthetic construct
  misc_feature 1..121: note = Description of artificial sequence: synthetic polynucleotide sequence
  source 1..121: mol_type = other DNA
ctattttttaaatgttttcttcccacttttaaaagtttgctgcctaacaattaattcacatgttgttattttactgccctgggaatgctatcatcttatttggaagatattaccttatatc

SEQ ID NO: 1052 - DNA, 121 bp, synthetic construct
  misc_feature 1..121: note = Description of artificial sequence: synthetic polynucleotide sequence
  source 1..121: mol_type = other DNA
cctcacaggaaaccagggccaacacatgagggatgtcacggaagaactggtggatcacactggatctgcaaacgtgctcccgaaacatgttgccagtgtggacggctgcgtaggaaaagca

SEQ ID NO: 1053 - DNA, 121 bp, synthetic construct
  misc_feature 1..121: note = Description of artificial sequence: synthetic polynucleotide sequence
  source 1..121: mol_type = other DNA
actcctgcctgcccttctctgcctccctcctctcggccctccccagaaccccatctccctaagtcctacctaattctcttggggccaatttgtgcagtgtcctcatcccaggccggggttg

SEQ ID NO: 1054 - DNA, 121 bp, synthetic construct
  misc_feature 1..121: note = Description of artificial sequence: synthetic polynucleotide sequence
  source 1..121: mol_type = other DNA
tgagaagggggagggaggaatgggggcgagggatgaaaaactacctgtcaggtgcagcgctcaccgtttgggtaatgggcactctagaagctcaatcccctcagtgcgcaatacacccatg

SEQ ID NO: 1055 - DNA, 121 bp, synthetic construct
  misc_feature 1..121: note = Description of artificial sequence: synthetic polynucleotide sequence
  source 1..121: mol_type = other DNA
ctgctgggatgacaggtgtgagccacagtgcccagccacaatgccatttttatttgatgttggataatgattctcccttatgatgatagtgaagccagctggaagacacatgctcttaaat

SEQ ID NO: 1056 - DNA, 121 bp, synthetic construct
  misc_feature 1..121: note = Description of artificial sequence: synthetic polynucleotide sequence
  source 1..121: mol_type = other DNA
ccaaggtcacgtaagatgtttatgtgtcttcttttaacacagttgattttaatcacgaatgtacctgtgcccaggtgaaagcactgaaaatcaagatcgtctttaagatcaagggaactca

SEQ ID NO: 1057 - DNA, 121 bp, synthetic construct
  misc_feature 1..121: note = Description of artificial sequence: synthetic polynucleotide sequence
  source 1..121: mol_type = other DNA
gtgctgaatgcacgaacccctctcttggaatttatcttaagaaacagcacagaagtaaagatgtgtgcttacatgtattgacacaggcagtgaaatggggaaaggcctagtgtccctcctg

SEQ ID NO: 1058 - DNA, 121 bp, synthetic construct
  misc_feature 1..121: note = Description of artificial sequence: synthetic polynucleotide sequence
  source 1..121: mol_type = other DNA
tcagatattttacaatgatgctgaattttgtctctgttatattagtcacctatctctcatcaggatagcagattaattagtctattgcctacaaatttcaattacaatattaaaatgattt

SEQ ID NO: 1059 - DNA, 121 bp, synthetic construct
  misc_feature 1..121: note = Description of artificial sequence: synthetic polynucleotide sequence
  source 1..121: mol_type = other DNA
tacactttatttagttatcttaattaaattagcacattcatattggtaaaactcaaatagcattaaaagctgtatggtaaactcaaccagacaccctcatccagtcattctctccttcttg

SEQ ID NO: 1060 - DNA, 121 bp, synthetic construct
  misc_feature 1..121: note = Description of artificial sequence: synthetic polynucleotide sequence
  source 1..121: mol_type = other DNA
agacccaagcttctcgtcaggttgggacaggaccatgccacagtcattccttaccctccatattcaacaggtctaagtgggggaatagtgcaagtgagtgcagatgcaaagtcagcaattc

SEQ ID NO: 1061 - DNA, 121 bp, synthetic construct
  misc_feature 1..121: note = Description of artificial sequence: synthetic polynucleotide sequence
  source 1..121: mol_type = other DNA
tatgggaagagctgtgtatattttgcagagtggataaactgttagtggttcaatgatttctgaaagcgatttgcaaaactgctgtggggaacagataggtaaatgttgactgattcattga

SEQ ID NO: 1062 - DNA, 121 bp, synthetic construct
  misc_feature 1..121: note = Description of artificial sequence: synthetic polynucleotide sequence
  source 1..121: mol_type = other DNA
gggaaattctggctagtcatattatctacctggtctaattgataaatttttatggtttatgtctttgaggcaatggctggttgtattactggtttctgaccttcaatttccagagcagatc

SEQ ID NO: 1063 - DNA, 121 bp, synthetic construct
  misc_feature 1..121: note = Description of artificial sequence: synthetic polynucleotide sequence
  source 1..121: mol_type = other DNA
gcagttctcactctcctactaagatgtagtaactctgtgctgagactaactaggttctgtgtatacaaactggaatcccaactctgaaaatcccaagccccaaacctgaaactttttgagg

SEQ ID NO: 1064 - DNA, 121 bp, synthetic construct
  misc_feature 1..121: note = Description of artificial sequence: synthetic polynucleotide sequence
  source 1..121: mol_type = other DNA
aaaggctgtcagttttgcatttttataaaagtgtcctggggaggcagggcaaagaacctggttggtgtacaaaaggatactttagatgtaacgtttgggaacatttcagaacgtcatcctg

SEQ ID NO: 1065 - DNA, 121 bp, synthetic construct
  misc_feature 1..121: note = Description of artificial sequence: synthetic polynucleotide sequence
  source 1..121: mol_type = other DNA
atgcaggtggaaggaaatgagaaaatggacgttttataggcattgtaatctgtaaaaataggagatatatttcactttcagaacggcatagtttttcatggccaggtgcagtggctcatgc

SEQ ID NO: 1066 - DNA, 121 bp, synthetic construct
  misc_feature 1..121: note = Description of artificial sequence: synthetic polynucleotide sequence
  source 1..121: mol_type = other DNA
ggacagaacagccaagaaggggagaaaaacagatcaaagtaggggaagcaagtctttgctagaaaatcatccaaaccaaacaacaaacatgggttttggcaataatggaattgcctttctt

SEQ ID NO: 1067 - DNA, 121 bp, synthetic construct
  misc_feature 1..121: note = Description of artificial sequence: synthetic polynucleotide sequence
  source 1..121: mol_type = other DNA
taaaatgtgtgccatttagtgactttgtggtcatggtgagtggtagtgattattatatgtgatgagtttcttggtcctgcttgatgtttcgggcatacattctgccactggacttttaatt

SEQ ID NO: 1068 - DNA, 121 bp, synthetic construct
  misc_feature 1..121: note = Description of artificial sequence: synthetic polynucleotide sequence
  source 1..121: mol_type = other DNA
cagccaaaaggaaggagagaaggctgcactgtggacatgggtagattgctatattcggctctctctgccataaccctcactcctcacgtagattgtttgacaaaattcaatcccatacagc

SEQ ID NO: 1069 - DNA, 121 bp, synthetic construct
  misc_feature 1..121: note = Description of artificial sequence: synthetic polynucleotide sequence
  source 1..121: mol_type = other DNA
atatatctttcataactgattcgttatttaaatataacatggtctgtctcccccagtagttcataggcttcttggagcggggaccatgtcactcttatctttgtcttcctgccctacccaa

SEQ ID NO: 1070 - DNA, 121 bp, synthetic construct
  misc_feature 1..121: note = Description of artificial sequence: synthetic polynucleotide sequence
  source 1..121: mol_type = other DNA
cactagcacaggcaccgggggcttggaccaggctggtggtcttagagaaggagcaaagcgcgtggactctggatacacgctggcgattgggtcaacagggcaggctgctgtattgagggag

SEQ ID NO: 1071 - DNA, 121 bp, synthetic construct
  misc_feature 1..121: note = Description of artificial sequence: synthetic polynucleotide sequence
  source 1..121: mol_type = other DNA
tcactttatggagtaaagtcacatggaacagacccaactgaccccactgcatttcccccgtagctaatgctgtgtggcatgtgtgcaagactgtggataatgagaaacaaaatctgtctgc

SEQ ID NO: 1072 - DNA, 121 bp, synthetic construct
  misc_feature 1..121: note = Description of artificial sequence: synthetic polynucleotide sequence
  source 1..121: mol_type = other DNA
tccaggaaagcttcctggaggagtcagagtatgatcttaggggaaagtaaagagcttcaactggactcctggtttcatgcagcacggtagtcatcactctaagtcatcaacaggtgctgca

SEQ ID NO: 1073 - DNA, 121 bp, synthetic construct
  misc_feature 1..121: note = Description of artificial sequence: synthetic polynucleotide sequence
  source 1..121: mol_type = other DNA
gggagtccaaggaggcagagccttatggtgactggagactatatagcggccatgaatggcgatatgaagtggttgtattttggctaggcttttaggaggtgaaaagccaagatcttaacat

SEQ ID NO: 1074 - DNA, 121 bp, synthetic construct
  misc_feature 1..121: note = Description of artificial sequence: synthetic polynucleotide sequence
  source 1..121: mol_type = other DNA
aagattgagtcatacagaattatatctttaacagaactagatccacctaaaagaatgataaacaggatgtgtcaaacatcatagtatgaggctgaagttaaagaaacaaactctatttaag

SEQ ID NO: 1075 - DNA, 121 bp, synthetic construct
  misc_feature 1..121: note = Description of artificial sequence: synthetic polynucleotide sequence
  source 1..121: mol_type = other DNA
gaatggtgccaggacttccaattccccatccagtgctctgcaccagtgtggatcatcttcagcaggcttcaccactgagacgtgagatatgactttgcctacaacagcaattaggaggggg

SEQ ID NO: 1076 - DNA, 121 bp, synthetic construct
  misc_feature 1..121: note = Description of artificial sequence: synthetic polynucleotide sequence
  source 1..121: mol_type = other DNA
actcctaggggctgtggcagcagtcacagagaagcaggacacaagggcatgtctgcatgccagggaagctttgagaaagagaaagagagggagagacagagagagagagagagagagagag

SEQ ID NO: 1077 - DNA, 121 bp, synthetic construct
  misc_feature 1..121: note = Description of artificial sequence: synthetic polynucleotide sequence
  source 1..121: mol_type = other DNA
tacttttgtagccacatatctccatataataatgcaaagtacaagattgcgtatgttaacacagtctgttagtaaattaatctgcctccgtgaatctatgaatgattcaacccacctggaa

SEQ ID NO: 1078 - DNA, 121 bp, synthetic construct
  misc_feature 1..121: note = Description of artificial sequence: synthetic polynucleotide sequence
  source 1..121: mol_type = other DNA
acattggaggtcacatttcaacatgagacttgaaggggacaaaacatccaaatcatatcgctactcaaactaaaacaaacctttagtgagggctagtgtgggattcttatgtctacttctt

SEQ ID NO: 1079 - DNA, 121 bp, synthetic construct
  misc_feature 1..121: note = Description of artificial sequence: synthetic polynucleotide sequence
  source 1..121: mol_type = other DNA
tgctttgtttctacccacatgcaatacactgaatatttgtgttgccctgaaattcgtattttgaagcctgaatccccaatgggatggtgtctggaggtagaatccttgggagataattagg

SEQ ID NO: 1080 - DNA, 121 bp, synthetic construct
  misc_feature 1..121: note = Description of artificial sequence: synthetic polynucleotide sequence
  source 1..121: mol_type = other DNA
aaaatgaagattgccaaatatttaaatgtcagttactattaatttaaatgtccatcagggttctccttgaagtcaaaactgctgttttccccaatgccagaactcctaacagtggacccca

SEQ ID NO: 1081 - DNA, 121 bp, synthetic construct
  misc_feature 1..121: note = Description of artificial sequence: synthetic polynucleotide sequence
  source 1..121: mol_type = other DNA
caaatcttgaaattgggtagtgttacccccctgattttcttcttttctaatactgcgttatctgttcttgttttttttgtttttgtttttgtttttttttggtttttgtttttgttttagc

SEQ ID NO: 1082 - DNA, 121 bp, synthetic construct
  misc_feature 1..121: note = Description of artificial sequence: synthetic polynucleotide sequence
  source 1..121: mol_type = other DNA
aaagcagaccagaagaatgacatactcccatttctgtctagcacagttcttcaggtacaccttctcttcccttccctgtccctgtatctgttcattctcttactcggctgagggaattctg

SEQ ID NO: 1083 - DNA, 121 bp, synthetic construct
  misc_feature 1..121: note = Description of artificial sequence: synthetic polynucleotide sequence
  source 1..121: mol_type = other DNA
tctcccccctccccgacacacactcacaggccgggcattgatggtaatgtatgcgaggaaacagcagagactcagtgatgggtaaattgtcttttcgtttcgggccgggcggcggcggggg

SEQ ID NO: 1084 - DNA, 121 bp, synthetic construct
  misc_feature 1..121: note = Description of artificial sequence: synthetic polynucleotide sequence
  source 1..121: mol_type = other DNA
gcgccgtgtcttatgtcgctgccttctcttcctgtttttcagctgtcacgaccggaggggggactcgcagccttaccaggtaccagccgaggccggggtggagggattggaaggggccgga

SEQ ID NO: 1085 - DNA, 197 bp, synthetic construct
  misc_feature 1..197: note = Description of artificial sequence: synthetic polynucleotide sequence
  source 1..197: mol_type = other DNA
ggcacttaagtattcatcgaagagtcaccccagtagcggtgatcacagacatgaaaagatgcgagacgccggagatccttcaccaccaaataaaatgttgcggagatctgatagtcctgaaaacaaatacagtgacagcacaggtcacagtaaggccaaaaatgtgcatactcacagagttagagagagggatggtg

SEQ ID NO: 1086 - DNA, 121 bp, synthetic construct
  misc_feature 1..121: note = Description of artificial sequence: synthetic polynucleotide sequence
  source 1..121: mol_type = other DNA
ttttaagggaccagttactctccacaagaaaattcacacaaccacagtgctcttcatagttcaaattcacattcttctaatccaagcaataacccaagcaaaacttcagatgcagtaagta

SEQ ID NO: 1087 - DNA, 121 bp, synthetic construct
  misc_feature 1..121: note = Description of artificial sequence: synthetic polynucleotide sequence
  source 1..121: mol_type = other DNA
aagccttatgattctgcagatgactggtctgagcatattagctcttctgggaaaaagtactactacaattgtcgaacagaagtttcacaatgggaaaaaccaaaagagtggcttgaaaggt

SEQ ID NO: 1088 - DNA, 121 bp, synthetic construct
  misc_feature 1..121: note = Description of artificial sequence: synthetic polynucleotide sequence
  source 1..121: mol_type = other DNA
ttagagaacagagacaaaaagaagcaaacaagatggcagtcaacagcttcccaaaagatagggattacagaagagaggtgatgcaagcaacagccactagtgggtttgccagtggaagtaa

SEQ ID NO: 1089 - DNA, 310 bp, synthetic construct
  misc_feature 1..310: note = Description of artificial sequence: synthetic polynucleotide sequence
  source 1..310: mol_type = other DNA
gtggaagacaagcattccagtgatgccagtagtttgctcccacagaatattttgtctcaaacaagcagacacaatgacagagactacagactgccaagagcagagactcacagtagttctacgccagtacagcaccccatcaaaccagtggttcatccaactgctaccccaagcactgttccttctagtccatttacgctacagtctgatcaccagccaaagaaatcatttgatgctaatggagcatctactttatcaaaactgcctacacccacatcttctgtccctgcacagaaaacagaaagaaaag

SEQ ID NO: 1090 - DNA, 121 bp, synthetic construct
  misc_feature 1..121: note = Description of artificial sequence: synthetic polynucleotide sequence
  source 1..121: mol_type = other DNA
gaatctacatcaggagacaaacccgtatcacattcttgcacaactccttccacgtcttctgcctctggactgaaccccacatctgcacctccaacatctgcttcagcggtccctgtttctc

SEQ ID NO: 1091 - DNA, 121 bp, synthetic construct
  misc_feature 1..121: note = Description of artificial sequence: synthetic polynucleotide sequence
  source 1..121: mol_type = other DNA
ccacagtcgccaatacctcccttacttcaggacccaaatcttcttagacaattgcttcctgctttgcaagccacgctgcagcttaataattctaatgtggacatatctaaaataaatgaag

SEQ ID NO: 1092 - DNA, 121 bp, synthetic construct
  misc_feature 1..121: note = Description of artificial sequence: synthetic polynucleotide sequence
  source 1..121: mol_type = other DNA
tcttacagcagctgtgacacaagcctcactgcagtctataattcataagtttcttactgctggaccatctgctttcaacataacgtctctgatttctcaagctgctcagctctctacacaa

SEQ ID NO: 1093 - DNA, 150 bp, synthetic construct
  misc_feature 1..150: note = Description of artificial sequence: synthetic polynucleotide sequence
  source 1..150: mol_type = other DNA
gcccagccatctaatcagtctccgatgtctttaacatctgatgcgtcatccccaagatcatatgtttctccaagaataagcacacctcaaactaacacagtccctatcaaacctttgatcagtactcctcctgtttcatcacagccaaag

SEQ ID NO: 1094 - DNA, 121 bp, synthetic construct
  misc_feature 1..121: note = Description of artificial sequence: synthetic polynucleotide sequence
  source 1..121: mol_type = other DNA
ggttagtactccagtagttaagcaaggaccagtgtcacagtcagccacacagcagcctgtaactgctgacaagcagcaaggtcatgaacctgtctctcctcgaagtcttcagcgctcaagg

SEQ ID NO: 1095 - DNA, 191 bp, synthetic construct
  misc_feature 1..191: note = Description of artificial sequence: synthetic polynucleotide sequence
  source 1..191: mol_type = other DNA
gtagccagagaagtccatcacctggtcccaatcatacttctaatagtagtaatgcatcaaatgcaacagttgtaccacagaattcttctgcccgatccacgtgttcattaacgcctgcactagcagcacacttcagtgaaaatctcataaaacacgttcaaggatggcctgcagatcatgcagagaagcag

SEQ ID NO: 1096 - DNA, 121 bp, synthetic construct
  misc_feature 1..121: note = Description of artificial sequence: synthetic polynucleotide sequence
  source 1..121: mol_type = other DNA
tcaagattacgcgaagaagcgcataacatgggaactattcacatgtccgaaatttgtactgaattaaaaaatttaagatctttagtccgagtatgtgaaattcaagcaactttgcgagagc

SEQ ID NO: 1097 - DNA, 121 bp, synthetic construct
  misc_feature 1..121: note = Description of artificial sequence: synthetic polynucleotide sequence
  source 1..121: mol_type = other DNA
ttctaatgtctgcttttttttttcaggatactatttttgagacaacaaattaaggaacttgaaaagctaaaaaatcagaattccttcatggtgtgaagatgtgaataattgcacatggttt

SEQ ID NO: 1098 - DNA, 121 bp, synthetic construct
  misc_feature 1..121: note = Description of artificial sequence: synthetic polynucleotide sequence
  source 1..121: mol_type = other DNA
ttggtctgagaaactccaactacatgaaggcagatgcttcgcctcttggtttctcaaccaaattgtgctccaggggactcctaatccacatctttcctactaatttacccttcattcatca

SEQ ID NO: 1099 - DNA, 121 bp, synthetic construct
  misc_feature 1..121: note = Description of artificial sequence: synthetic polynucleotide sequence
  source 1..121: mol_type = other DNA
gaactataggcacacgcccggctattttgtaatttttttgtagagacagagtctggctatggagtcccgttatggggtcccacctgggctggtcttgaactcctggcctaaggagattctc

SEQ ID NO: 1100 - DNA, 121 bp, synthetic construct
  misc_feature 1..121: note = Description of artificial sequence: synthetic polynucleotide sequence
  source 1..121: mol_type = other DNA
cccccagcttataaaaattctttccaagagagggaaaggcaaagtcgaattccagcagtaaaagtgacttactttgcacattttcttcttcctcttcccgcctccccgagtgcaccaccat

SEQ ID NO: 1101 - DNA, 121 bp, synthetic construct
  misc_feature 1..121: note = Description of artificial sequence: synthetic polynucleotide sequence
  source 1..121: mol_type = other DNA
ctggaaacactgcaggaaacaggggggctcctttccctggagaacctggaccttccgatttaaacagaggtaaataggtaaggggcgcggggctttcaaagtcctaaaaacaatacatgcc

SEQ ID NO: 1102 - DNA, 121 bp, synthetic construct
  misc_feature 1..121: note = Description of artificial sequence: synthetic polynucleotide sequence
  source 1..121: mol_type = other DNA
tggcacacaaaggaaagctgaggaacgaaaccaacagaagcatcaggtccccagccatatgacccagttaagccaccttagctatgtggtattccaggtaaggttccctgctatgtggtat

SEQ ID NO: 1103 - DNA, 121 bp, synthetic construct
  misc_feature 1..121: note = Description of artificial sequence: synthetic polynucleotide sequence
  source 1..121: mol_type = other DNA
gatgctgtgggagtaaccagaggccagggtggaaggcccaagagttttggctggttccagtagggagagattttgtctagagatatttttggttgatgcaattcggtatgtaggtgaggac

SEQ ID NO: 1104 - DNA, 121 bp, synthetic construct
  misc_feature 1..121: note = Description of artificial sequence: synthetic polynucleotide sequence
  source 1..121: mol_type = other DNA
tgattcattaccgaccagtagagaaacaatctaacacattggtaataagaggcaggaagcaaactaaagaatgagggaatcaacggagagtgatggggcagttattttagataaggagatc

SEQ ID NO: 1105 - DNA, 121 bp, synthetic construct
  misc_feature 1..121: note = Description of artificial sequence: synthetic polynucleotide sequence
  source 1..121: mol_type = other DNA
aacacttattcccagctcctctcgtgcccaggagggaggaatttttccctgaacactctggcttctcaccctgattggtgagactgggacaaaaaactgggtgggcatagcttgacccttt

SEQ ID NO: 1106 - DNA, 121 bp, synthetic construct
  misc_feature 1..121: note = Description of artificial sequence: synthetic polynucleotide sequence
  source 1..121: mol_type = other DNA
aaaaaaataccaatggctctaccttataaatagatctatagtttgattgatactcaaaagctggaccactacttctatgaatccaggcaaccatcatatttcaactggactactgcagaaa

SEQ ID NO: 1107 - DNA, 121 bp, synthetic construct
  misc_feature 1..121: note = Description of artificial sequence: synthetic polynucleotide sequence
  source 1..121: mol_type = other DNA
ccgtggccccagcgcgcacgggcgatggcgaaggcgacgtccggtgccgcggggctgcgtctgctgttgctgctgctgctgccgctgctaggcaaaggtgagttctgccggccgccggctc

SEQ ID NO: 1108 - DNA, 265 bp, synthetic construct
  misc_feature 1..265: note = Description of artificial sequence: synthetic polynucleotide sequence
  source 1..265: mol_type = other DNA
gtggcattgggcctctacttctcgagggatgcttactgggagaagctgtatgtggaccaggcagccggcacgcccttgctgtacgtccatgccctgcgggacgcccctgaggaggtgcccagcttccgcctgggccagcatctctacggcacgtaccgcacacggctgcatgagaacaactggatctgcatccaggaggacaccggcctcctctaccttaaccggagcctggaccatagctcctgggagaagctcagtgtccgca

SEQ ID NO: 1109 - DNA, 289 bp, synthetic construct
  misc_feature 1..289: note = Description of artificial sequence: synthetic polynucleotide sequence
  source 1..289: mol_type = other DNA
gaccgcggctttcccctgctcaccgtctacctcaaggtcttcctgtcacccacatcccttcgtgagggcgagtgccagtggccaggctgtgcccgcgtatacttctccttcttcaacacctcctttccagcctgcagctccctcaagccccgggagctctgcttcccagagacaaggccctccttccgcattcgggagaaccgacccccaggcaccttccaccagttccgcctgctgcctgtgcagttcttgtgccccaacatcagcgtggcctacaggctcctggagg

SEQ ID NO: 1110 - DNA, 121 bp, synthetic construct
  misc_feature 1..121: note = Description of artificial sequence: synthetic polynucleotide sequence
  source 1..121: mol_type = other DNA
ggtgagggtctgcccttccgctgcgccccggacagcctggaggtgagcacgcgctgggccctggaccgcgagcagcgggagaagtacgagctggtggccgtgtgcaccgtgcacgccggcg

SEQ ID NO: 1111 - DNA, 121 bp, synthetic construct
  misc_feature 1..121: note = Description of artificial sequence: synthetic polynucleotide sequence
  source 1..121: mol_type = other DNA
gcgcgaggaggtggtgatggtgcccttcccggtgaccgtgtacgacgaggacgactcggcgcccaccttccccgcgggcgtcgacaccgccagcgccgtggtggagttcaagcggaaggag

SEQ ID NO: 1112 - DNA, 197 bp, synthetic construct
  misc_feature 1..197: note = Description of artificial sequence: synthetic polynucleotide sequence
  source 1..197: mol_type = other DNA
ggacaccgtggtggccacgctgcgtgtcttcgatgcagacgtggtacctgcatcaggggagctggtgaggcggtacacaagcacgctgctccccggggacacctgggcccagcagaccttccgggtggaacactggcccaacgagacctcggtccaggccaacggcagcttcgtgcgggcgaccgtacatgactata

SEQ ID NO: 1113 - DNA, 201 bp, synthetic construct
  misc_feature 1..201: note = Description of artificial sequence: synthetic polynucleotide sequence
  source 1..201: mol_type = other DNA
gggctggttctcaaccggaacctctccatctcggagaaccgcaccatgcagctggcggtgctggtcaatgactcagacttccagggcccaggagcgggcgtcctcttgctccacttcaacgtgtcggtgctgccggtcagcctgcacctgcccagtacctactccctctccgtgagcaggagggctcgccgatttgcccag

SEQ ID NO: 1114 - DNA, 260 bp, synthetic construct
  misc_feature 1..260: note = Description of artificial sequence: synthetic polynucleotide sequence
  source 1..260: mol_type = other DNA
gatcgggaaagtctgtgtggaaaactgccaggcattcagtggcatcaacgtccagtacaagctgcattcctctggtgccaactgcagcacgctaggggtggtcacctcagccgaggacacctcggggatcctgtttgtgaatgacaccaaggccctgcggcggcccaagtgtgccgaacttcactacatggtggtggccaccgaccagcagacctctaggcaggcccaggcccagctgcttgtaacagtggaggggtcat

SEQ ID NO: 1115 - DNA, 121 bp, synthetic construct
  misc_feature 1..121: note = Description of artificial sequence: synthetic polynucleotide sequence
  source 1..121: mol_type = other DNA
gtggccgaggaggcgggctgccccctgtcctgtgcagtcagcaagagacggctggagtgtgaggagtgtggcggcctgggctccccaacaggcaggtgtgagtggaggcaaggagatggca

SEQ ID NO: 1116 - DNA, 121 bp, synthetic construct
  misc_feature 1..121: note = Description of artificial sequence: synthetic polynucleotide sequence
  source 1..121: mol_type = other DNA
tgcagggatcaccaggaacttctccacctgctctcccagcaccaagacctgccccgacggccactgcgatgttgtggagacccaagacatcaacatttgccctcaggactgcctccgtaag

SEQ ID NO: 1117 - DNA, 121 bp, synthetic construct
  misc_feature 1..121: note = Description of artificial sequence: synthetic polynucleotide sequence
  source 1..121: mol_type = other DNA
gggggcagcattgttgggggacacgagcctggggagccccgggggattaaagctggctatggcacctgcaactgcttccctgaggaggagaagtgcttctgcgagcccgaagacatccagg

SEQ ID NO: 1118 - DNA, 258 bp, synthetic construct
  misc_feature 1..258: note = Description of artificial sequence: synthetic polynucleotide sequence
  source 1..258: mol_type = other DNA
gatccactgtgcgacgagctgtgccgcacggtgatcgcagccgctgtcctcttctccttcatcgtctcggtgctgctgtctgccttctgcatccactgctaccacaagtttgcccacaagccacccatctcctcagctgagatgaccttccggaggcccgcccaggccttcccggtcagctactcctcttccggtgcccgccggccctcgctggactccatggagaaccaggtctccgtggatgccttcaagatcctg

SEQ ID NO: 1119 - DNA, 149 bp, synthetic construct
  misc_feature 1..149: note = Description of artificial sequence: synthetic polynucleotide sequence
  source 1..149: mol_type = other DNA
ggaggatccaaagtgggaattccctcggaagaacttggttcttggaaaaactctaggagaaggcgaatttggaaaagtggtcaaggcaacggccttccatctgaaaggcagagcagggtacaccacggtggccgtgaagatgctgaaag

SEQ ID NO: 1120 - DNA, 121 bp, synthetic construct
  misc_feature 1..121: note = Description of artificial sequence: synthetic polynucleotide sequence
  source 1..121: mol_type = other DNA
atttcagagaacgcctccccgagtgagctgcgagacctgctgtcagagttcaacgtcctgaagcaggtcaaccacccacatgtcatcaaattgtatggggcctgcagccaggatggtaagg

SEQ ID NO: 1121 - DNA, 216 bp, synthetic construct
  misc_feature 1..216: note = Description of artificial sequence: synthetic polynucleotide sequence
  source 1..216: mol_type = other DNA
ggcccgctcctcctcatcgtggagtacgccaaatacggctccctgcggggcttcctccgcgagagccgcaaagtggggcctggctacctgggcagtggaggcagccgcaactccagctccctggaccacccggatgagcgggccctcaccatgggcgacctcatctcatttgcctggcagatctcacaggggatgcagtatctggccgagatgaag

SEQ ID NO: 1122 - DNA, 121 bp, synthetic construct
  misc_feature 1..121: note = Description of artificial sequence: synthetic polynucleotide sequence
  source 1..121: mol_type = other DNA
tcgttcatcgggacttggcagccagaaacatcctggtagctgaggggcggaagatgaagatttcggatttcggcttgtcccgagatgtttatgaagaggattcctacgtgaagaggagcca

SEQ ID NO: 1123 - DNA, 121 bp, synthetic construct
  misc_feature 1..121: note = Description of artificial sequence: synthetic polynucleotide sequence
  source 1..121: mol_type = other DNA
tgtctttattccatcttctctttagggtcggattccagttaaatggatggcaattgaatccctttttgatcatatctacaccacgcaaagtgatgtgtaagtgtgggtgttgctctcttgg

SEQ ID NO: 1124 - DNA, 139 bp, synthetic construct
  misc_feature 1..139: note = Description of artificial sequence: synthetic polynucleotide sequence
  source 1..139: mol_type = other DNA
gatggtcttttggtgtcctgctgtgggagatcgtgaccctagggggaaacccctatcctgggattcctcctgagcggctcttcaaccttctgaagaccggccaccggatggagaggccagacaactgcagcgaggagat

SEQ ID NO: 1125 - DNA, 121 bp, synthetic construct
  misc_feature 1..121: note = Description of artificial sequence: synthetic polynucleotide sequence
  source 1..121: mol_type = other DNA
cttcccaccaggtaccgcctgatgctgcaatgctggaagcaggagccggacaaaaggccggtgtttgcggacatcagcaaagacctggagaagatgatggttaagaggagagtgagtgcct

SEQ ID NO: 1126 - DNA, 181 bp, synthetic construct
  misc_feature 1..181: note = Description of artificial sequence: synthetic polynucleotide sequence
  source 1..181: mol_type = other DNA
ggactacttggaccttgcggcgtccactccatctgactccctgatttatgacgacggcctctcagaggaggagacaccgctggtggactgtaataatgcccccctccctcgagccctcccttccacatggattgaaaacaaactctatggtagaatttcccatgcatttactagattctag

SEQ ID NO: 1127 - DNA, 159 bp, synthetic construct
  misc_feature 1..159: note = Description of artificial sequence: synthetic polynucleotide sequence
  source 1..159: mol_type = other DNA
ggcatgtcagacccgaactggcctggagagagtcctgtaccactcacgagagctgatggcactaacactgggtttccaagatatccaaatgatagtgtatatgctaactggatgctttcaccctcagcggcaaaattaatggacacgtttgatagttaa

SEQ ID NO: 1128 - DNA, 121 bp, synthetic construct
  misc_feature 1..121: note = Description of artificial sequence: synthetic polynucleotide sequence
  source 1..121: mol_type = other DNA
acaaagccctccccaggcttccctctgaaccacacctttcctatgaggccctctgggaagctgaaccagacccacagtgcctctcgcccctccttcaagttatactcccaggtgcctgcct

SEQ ID NO: 1129 - DNA, 121 bp, synthetic construct
  misc_feature 1..121: note = Description of artificial sequence: synthetic polynucleotide sequence
  source 1..121: mol_type = other DNA
aggagagggaggcagggtcttcccagggtgctgagagaggtcagggtcaggcacttcacagagactgaaggtggggcctgctgggtagagatgggcagttccacaataccccagcactgag

SEQ ID NO: 1130 - DNA, 121 bp, synthetic construct
  misc_feature 1..121: note = Description of artificial sequence: synthetic polynucleotide sequence
  source 1..121: mol_type = other DNA
catgacgtctcagcccacattcaccctgggtgtgccagtggcaactgcctcgttgctgggtcattggggcagacaaggccagccctcagagacagcttctgccctgggaaggcaaagctgc

SEQ ID NO: 1131 - DNA, 121 bp, synthetic construct
  misc_feature 1..121: note = Description of artificial sequence: synthetic polynucleotide sequence
  source 1..121: mol_type = other DNA
gagagagcgatacataagaatgaacatccacagacagacagcgtggacttaaaggctaggtcgttaagtgaagaatgcagaaaattccttaaggctgccccgcaaatcactctgtgctaat

SEQ ID NO: 1132 - DNA, 121 bp, synthetic construct
  misc_feature 1..121: note = Description of artificial sequence: synthetic polynucleotide sequence
  source 1..121: mol_type = other DNA
gaagatgacggcattcccaacgctccctcaaatgcactgcctttcccaaagcttcccgataagtggctgatgccaccagctgccggcaggaggctgggcagctggagtaagccacactcct

SEQ ID NO: 1133 - DNA, 121 bp, synthetic construct
  misc_feature 1..121: note = Description of artificial sequence: synthetic polynucleotide sequence
  source 1..121: mol_type = other DNA
aaaatgttataggactctgtgttggtaaggatgtggtaaacaggcacttgtgcttgatagaggcagagtaagttgacaaaatgtctacagagcaatctggcattgtcaaaaaaatctaaag

SEQ ID NO: 1134 - DNA, 121 bp, synthetic construct
  misc_feature 1..121: note = Description of artificial sequence: synthetic polynucleotide sequence
  source 1..121: mol_type = other DNA
gtcacgtggagacacaaaagtaaacacattaaaaaatctaaaaaaaagagtgaatgacaaagagttaaataccacaaggttcagctaaaagagttgaaggagaataggaaaaggcgctgtt

SEQ ID NO: 1135 - DNA, 121 bp, synthetic construct
  misc_feature 1..121: note = Description of artificial sequence: synthetic polynucleotide sequence
  source 1..121: mol_type = other DNA
acatcccttgctggacatgagactatgttccagtgcagaaacacaacagggtccagtgtgatttaaactgcctgaactttgttccctaactgacacacagatccattgggaaaagtaagag

SEQ ID NO: 1136 - DNA, 121 bp, synthetic construct
  misc_feature 1..121: note = Description of artificial sequence: synthetic polynucleotide sequence
  source 1..121: mol_type = other DNA
acgtgacagaaggtgactgagtccttgaattcctacttagaagacagcaattttaagagaaggaatattgtcagtattcaagtttttttgaaaaataaacttctatccatattttccccaa

SEQ ID NO: 1137 - DNA, 121 bp, synthetic construct
  misc_feature 1..121: note = Description of artificial sequence: synthetic polynucleotide sequence
  source 1..121: mol_type = other DNA
cctagcatgtttgtgatacagcaagctggaatcggcaatggggagggtaaccagaggactaggaatggtataaagatcggtgaaaacaggacttagtagaacctggtaagtaatttgaatt

SEQ ID NO: 1138 - DNA, 121 bp, synthetic construct
  misc_feature 1..121: note = Description of artificial sequence: synthetic polynucleotide sequence
  source 1..121: mol_type = other DNA
ttgaggtcacccctaggagaccattacctctgtttcaaagatctcatagatagaggctatcagctaaccaacagtctttgaaggtaggcagcaagtactttcctgtcaagagacctgagtg

SEQ ID NO: 1139 - DNA, 121 bp, synthetic construct
  misc_feature 1..121: note = Description of artificial sequence: synthetic polynucleotide sequence
  source 1..121: mol_type = other DNA
gtattagagtattctgaatttgactgtttttttttttttttttaaggtttacttttaggttcagcggtccatgtgcatgtttgttctgtaggtaaattatatgtcatggaagtctggtgta

SEQ ID NO: 1140 - DNA, 121 bp, synthetic construct
  misc_feature 1..121: note = Description of artificial sequence: synthetic polynucleotide sequence
  source 1..121: mol_type = other DNA
gacctcatttctcaaatggggcagttaatggtagtacttacctcctgaggtagttttgaaaatgaagaggaaaaaggtgtatgtaagtcatcccagtgctggcaacataggaagtgctgaa

SEQ ID NO: 1141 - DNA, 121 bp, synthetic construct
  misc_feature 1..121: note = Description of artificial sequence: synthetic polynucleotide sequence
  source 1..121: mol_type = other DNA
caagaaaagactgaggaattgacacatcccagaggagattaaggaaatgtgacaactaattgaaatgtgggctcttggactgaatcctggaataggagaaggacattagtggaaaatctgg

SEQ ID NO: 1142 - DNA, 121 bp, synthetic construct
  misc_feature 1..121: note = Description of artificial sequence: synthetic polynucleotide sequence
  source 1..121: mol_type = other DNA
agtgcataagcagtaactcttccctgctagaacttctaagaaatattgctaagctgtcattaggaattaaggtgaaaatctagcacaggtcctcgatcctttaaacacaattccaaaaccc

SEQ ID NO: 1143 - DNA, 121 bp, synthetic construct
  misc_feature 1..121: note = Description of artificial sequence: synthetic polynucleotide sequence
  source 1..121: mol_type = other DNA
gatcaacttacaagtgaagaacaacatgaagaatggttatatatatctgcagtaacatcataagtatagttcatgagtcttttgcccagcctttctcaaaagtctttgtggccatttagta

SEQ ID NO: 1144 - DNA, 121 bp, synthetic construct
  misc_feature 1..121: note = Description of artificial sequence: synthetic polynucleotide sequence
  source 1..121: mol_type = other DNA
cctacccccaatcttagccttcaaggagggcttgagggagtctggtaaggaagatagatgagaaaatagccaagttcaattcagcaagataagtgggtaagaatgggatgctatgaggaac

SEQ ID NO: 1145 - DNA, 121 bp, synthetic construct
  misc_feature 1..121: note = Description of artificial sequence: synthetic polynucleotide sequence
  source 1..121: mol_type = other DNA
caatgggaccccagagttttctgggtgtctcagggcacaagaggattgggactgagccagtagaggtttgcacactcgaactgcactgcaacaagacagcatgtttttgttatagaaattt

SEQ ID NO: 1146 - DNA, 121 bp, synthetic construct
  misc_feature 1..121: note = Description of artificial sequence: synthetic polynucleotide sequence
  source 1..121: mol_type = other DNA
gccaacaagtttggagagaatgttgagttcaatcaattcagaacgtcgagatggagcccaactcactccaggtatttcgctctcctccgctcctccgatcccggcaccccccggcaccccc

SEQ ID NO: 1147 - DNA, 256 bp, synthetic construct
  misc_feature 1..256: note = Description of artificial sequence: synthetic polynucleotide sequence
  source 1..256: mol_type = other DNA
gtgggtcggctcaccgtgtggcttgcacggaccttacattttctacaaggcttttcaattccaccttgaaggcaaaccaagaattttgtcccttggcgactttttctttgtaagatgtacgccaaaggatccgatttgcatagcggagctccagctgttgtgggaagagaggaccagccggcaacttttatccagctctaaactttatttcctcccagaagacactccccagggcagaaatagcgaccatggcgag

SEQ ID NO: 1148 - DNA, 227 bp, synthetic construct
  misc_feature 1..227: note = Description of artificial sequence: synthetic polynucleotide sequence
  source 1..227: mol_type = other DNA
ggatgaagtcattgctgtttccgaaaaggtgattgtgaagcttgaagacctggtcaagtgggtacattctgatttctccaagtggagatgtggcttccacgctggaccagtgaaaactgaggccttgggaaggaatggacagaaggaagctctgctgaagtacaggcagtcaaccctaaacagtggactcaacttcaaagacgttctcaaggagaaggcagacctgg

SEQ ID NO: 1149 - DNA, 232 bp, synthetic construct
  misc_feature 1..232: note = Description of artificial sequence: synthetic polynucleotide sequence
  source 1..232: mol_type = other DNA
ggggaggacgaggaagaaacgaacgtgatagttctcagctacccccagtactgccggtaccgctcgatgctgaaacgcatccaggataagccatcttccattctaacggaccagtttgcattggccctggggggcattgcagtggtcagcaggaaccctcagatcctgtactgtcgggacacctttgaccacccgactctcatagaaaacgagagtatatgcgatgagtttg

SEQ ID NO: 1150 - DNA, 121 bp, synthetic construct
  misc_feature 1..121: note = Description of artificial sequence: synthetic polynucleotide sequence
  source 1..121: mol_type = other DNA
tcacatgctgtagctttcatgagcacaggcatcagtcaggcagatgtttgtcgactggaatgggtaatcgctactttctctttgcttgatttttgtttgtgagcttgtttacctttggtaa

SEQ ID NO: 1151 - DNA, 121 bp, synthetic construct
  misc_feature 1..121: note = Description of artificial sequence: synthetic polynucleotide sequence
  source 1..121: mol_type = other DNA
tcagcgccaaatcttaaaggcagaccacgcaaaaagaaaccatgcccacaaagaagagattcattcagtggtgttaaggattccaacaacaattccgatggcaaagccgttgccaaggtac

SEQ ID NO: 1152 - DNA, 203 bp, synthetic construct
  misc_feature 1..203: note = Description of artificial sequence: synthetic polynucleotide sequence
  source 1..203: mol_type = other DNA
ggtgaaatgtgaggccaggtcagccttgaccaagccgaagaataaccataactgtaaaaaagtctcaaatgaagaaaaaccaaaggttgccattggtgaagagtgcagggcagatgaacaagccttcttggtggcactttataaatacatgaaagaaaggaaaacgccgatagaacgaataccctatttaggttttaaacaga

SEQ ID NO: 1153 - DNA, 121 bp, synthetic construct
  misc_feature 1..121: note = Description of artificial sequence: synthetic polynucleotide sequence
  source 1..121: mol_type = other DNA
atgcttatctaaatacttattgtccctctaacagttaacctttggactatgtttcaagctgctcaaaaactgggaggatatgaaacagtaagtgtttaagcaacttaaatgaaataatttt

SEQ ID NO: 1154 - DNA, 121 bp, synthetic construct
  misc_feature 1..121: note = Description of artificial sequence: synthetic polynucleotide sequence
  source 1..121: mol_type = other DNA
ccattttttcagataacagcccgccgtcagtggaaacatatttatgatgaattaggcggtaatcctgggagcaccagcgctgccacttgtacccgcagacattatgaaaggtaagaaacca

SEQ ID NO: 1155 - DNA, 200 bp, synthetic construct
  misc_feature 1..200: note = Description of artificial sequence: synthetic polynucleotide sequence
  source 1..200: mol_type = other DNA
gattaatcctaccatatgaaagatttattaaaggagaagaagataagcccctgcctccaatcaaacctcggaaacaggagaacagttcacaggaaaatgagaacaaaacaaaagtatctggaaccaaacgcatcaaacatgaaatacctaaaagcaagaaagaaaaagaaaatgccccaaagccccaggatgcagcagag

SEQ ID NO: 1156 - DNA, 121 bp, synthetic construct
  misc_feature 1..121: note = Description of artificial sequence: synthetic polynucleotide sequence
  source 1..121: mol_type = other DNA
ggtttcatcagagcaagaaaaagaacaagagactttaataagccagaaaagcatccctgagcctctcccagcagcagacatgaagaaaaaaatagaagggtatcaggaattttcagcgaag

SEQ ID NO: 1157 - DNA, 241 bp, synthetic construct
  misc_feature 1..241: note = Description of artificial sequence: synthetic polynucleotide sequence
  source 1..241: mol_type = other DNA
cccctggcatccagagtagacccagagaaggacaacgaaacagaccaaggttccaacagtgagaaggtggcagaggaggcgggagagaaggggcccacacctccactcccaagtgctcctctggccccagaaaaagattcagccttggtccctggggccagcaaacagccactcacctctcctagtgccctggtggactcaaaacaagaatccaaactgtgctgttttacagagagccctg

SEQ ID NO: 1158 - DNA, 121 bp, synthetic construct
  misc_feature 1..121: note = Description of artificial sequence: synthetic polynucleotide sequence
  source 1..121: mol_type = other DNA
aaagtgaaccccaagaagcatccttccccagcttccccaccacacagccaccgctggcaaaccagaatgagacggaggatgacaaactgcccgccatggcagattacattgccaactgcac

SEQ ID NO: 1159 - DNA, 361 bp, synthetic construct
  misc_feature 1..361: note = Description of artificial sequence: synthetic polynucleotide sequence
  source 1..361: mol_type = other DNA
cgtgaaggtggaccagctgggcagtgacgacatccacaatgcgctcaagcagaccccaaaggtccttgtggtccagtcgtttgacatgttcaaagacaaagacctgactgggcccatgaacgagaaccatggacttaattacacgcccctgctctactctaggggcaacccaggcatcatgtccccactggccaagaaaaagcttttgtcccaagtgagtggggccagcctctccagcagctacccttatggctccccaccccctttgatcagcaaaaagaaactgattgctagggatgacttgtgttccagtttgtcccagacccaccatggccaaagcactgaccatatggcggtcagc

SEQ ID NO: 1160 - DNA, 121 bp, synthetic construct
  misc_feature 1..121: note = Description of artificial sequence: synthetic polynucleotide sequence
  source 1..121: mol_type = other DNA
cggccatcagtgattcagcacgtccagagtttcagaagcaagccctcggaagagagaaagaccatcaatgacatctttaagcatgagaaactgagtcgatcagatccccaccgctgcagct

SEQ ID NO: 1161 - DNA, 361 bp, synthetic construct
  misc_feature 1..361: note = Description of artificial sequence: synthetic polynucleotide sequence
  source 1..361: mol_type = other DNA
tctccaagcatcaccttaacccccttgctgactcctacgtcctgaagcaagaaattcaggagggcaaggataaactcttagagaaaagggccctcccccattcccacatgcctagcttcctggctgacttctactcgtcccctcatctccatagcctctacagacacaccgagcaccatcttcataatgaacagacatccaaatacccttccagggacatgtacagggaatcggaaaacagttcttttccttcccacagacaccaagaaaagctccatgtaaattatctcacgtccctgcacctgcaagacaaaaagtcggcggcagcagaagcccctacggatgatcagcctacagatct

SEQ ID NO: 1162 - DNA, 121 bp, synthetic construct
  misc_feature 1..121: note = Description of artificial sequence: synthetic polynucleotide sequence
  source 1..121: mol_type = other DNA
gagccttcccaagaacccgcacaaacctaccggcaaggtcctgggcctggctcattccaccacagggccccaggagagcaaaggcatctcccagttccaggtcttaggcagccagagtcga

SEQ ID NO: 1163 - DNA, 361 bp, synthetic construct
  misc_feature 1..361: note = Description of artificial sequence: synthetic polynucleotide sequence
  source 1..361: mol_type = other DNA
gactgtcaccccaaagcctgtcgggtatcacccatgaccatgtcaggccctaaaaaataccctgaatcgctttcaagatcaggaaaacctcaccatgtgagactggagaatttcaggaagatggaaggcatggtccacccaatcctgcaccggaaaatgagcccgcagaacattggggcggcgcggccgatcaagcgcagcctggaggatttggaccttgtgattgcagggaaaaaggcccgggcagtgtctcccttagacccatccaaggaggtctctgggaaggagaaggcctctgagcaggagagtgaaggcagcaaagcagcgcacggtgggcattccgggggcggatcagaaggcc

SEQ ID NO: 1164 - DNA, 121 bp, synthetic construct
  misc_feature 1..121: note = Description of artificial sequence: synthetic polynucleotide sequence
  source 1..121: mol_type = other DNA
acaagcttcccctctcctcccctatcttcccaggtctgtattccgggagcctgtgtaactcgggcctcaactccaggctcccggctgggtattctcattctctgcagtacttgaaaaacca

SEQ ID NO: 1165 - DNA, 241 bp, synthetic construct
  misc_feature 1..241: note = Description of artificial sequence: synthetic polynucleotide sequence
  source 1..241: mol_type = other DNA
gactgtgctttctccactcatgcagcccctggctttccactcgcttgtgatgcaaagaggaatttttacatcaccgacaaattctcagcagctgtacagacacttggctgcggctacacctgtaggaagttcatatggggaccttttgcataacagcatttaccctttagctgctataaatcctcaagctgcctttccatcttcccagctgtcatccgtgcaccccagtacaaaactgtag

SEQ ID NO: 1166 - DNA, 121 bp, synthetic construct
  misc_feature 1..121: note = Description of artificial sequence: synthetic polynucleotide sequence
  source 1..121: mol_type = other DNA
taacacccagattttcctggctgcatcacttcctggttaatctcatggcatctaattctttgaccagattgttcttgccaaggcaaggctgagactttagacaactccctttgtcctaggg

SEQ ID NO: 1167 - DNA, 121 bp, synthetic construct
  misc_feature 1..121: note = Description of artificial sequence: synthetic polynucleotide sequence
  source 1..121: mol_type = other DNA
gattatattatttatgcaatgacatttcccctttcacacaatactgggatctgtctttggaatacccagacatgtacatcatctttccattatgtaattttaaaaatatagtgctttacca

SEQ ID NO: 1168 - DNA, 121 bp, synthetic construct
  misc_feature 1..121: note = Description of artificial sequence: synthetic polynucleotide sequence
  source 1..121: mol_type = other DNA
atgctttggcattggcaaggctcttataaaagaaacataagatttcacgctgattattcttcctacgttgtatacctgccaagtactattgttaaaggcaaaaataattctagcaataggg

SEQ ID NO: 1169 - DNA, 121 bp, synthetic construct
  misc_feature 1..121: note = Description of artificial sequence: synthetic polynucleotide sequence
  source 1..121: mol_type = other DNA
ctataaattctttctaaggatgagcatctctactatttgaattccttttgtagagcgtcattttcacaagggcacctctggtatgtctggaaacgtagagaactcttatgcagggatgaac

SEQ ID NO: 1170 - DNA, 121 bp, synthetic construct
  misc_feature 1..121: note = Description of artificial sequence: synthetic polynucleotide sequence
  source 1..121: mol_type = other DNA
aataataggtcagttagtccacaaaattttgttgaatacttactgttaggtgctagtagctttgtattaatgaaacaaacattgttcctgcctttgtaaaacatatgttcttgtgagaagg

SEQ ID NO: 1171 - DNA, 121 bp, synthetic construct
  misc_feature 1..121: note = Description of artificial sequence: synthetic polynucleotide sequence
  source 1..121: mol_type = other DNA
atctgttccttgaaaataatctagtttaaaattaacacttaagtgtctgcctaccttgcttcacggtttagcaccaggggaggaagctgctgatggtcccccactaacacaaatctccgtg

SEQ ID NO: 1172 - DNA, 121 bp, synthetic construct
  misc_feature 1..121: note = Description of artificial sequence: synthetic polynucleotide sequence
  source 1..121: mol_type = other DNA
agggggcccagacaaattggttggctaatttgagaggcttcatccacaatacaaaaatcaaaaattttacgggaaaatattggatggtttattcccatacatgttgttgcaactataagct

SEQ ID NO: 1173 - DNA, 121 bp, synthetic construct
  misc_feature 1..121: note = Description of artificial sequence: synthetic polynucleotide sequence
  source 1..121: mol_type = other DNA
gtccaaagctatagagttaccaagcggtgggtggagttgggcttcatgccccaagcctgcgttctaaaccacctcactgtgtgtggagttagcagtgtagggactgtccctccaatacaat

SEQ ID NO: 1174 - DNA, 121 bp, synthetic construct
  misc_feature 1..121: note = Description of artificial sequence: synthetic polynucleotide sequence
  source 1..121: mol_type = other DNA
cccacctctctcctccagacacctaggcttcgctcccagaagttgtccttttctgctttctcagtgtcctctccagtagtctatgcacacacatgatgatgatggtgatggtgatgatgat

SEQ ID NO: 1175 - DNA, 121 bp, synthetic construct
  misc_feature 1..121: note = Description of artificial sequence: synthetic polynucleotide sequence
  source 1..121: mol_type = other DNA
gtcacagggccatgaatgggcttgttattacttgtctgttgggtaagactggagatacaggagcgtaacaattgtactgtgttccctgtcagagtgctttttgtcatatctgtgatagaaa

SEQ ID NO: 1176 - DNA, 121 bp, synthetic construct
  misc_feature 1..121: note = Description of artificial sequence: synthetic polynucleotide sequence
  source 1..121: mol_type = other DNA
tggtttcttccaagctctgaagagctggctatctctctgccttccacttatgtagggttggactgagaaataatacaggctctagggagaatactgactctatttctgagcccacactctt

SEQ ID NO: 1177 - DNA, 121 bp, synthetic construct
  misc_feature 1..121: note = Description of artificial sequence: synthetic polynucleotide sequence
  source 1..121: mol_type = other DNA
gaaggtgctagttatggtggattcttactgtggtggcccccaatgaaccacacttcctagtagttcccttttatatctagttcccttttatggtgactctggacttggcaaatgggacatt

SEQ ID NO: 1178 - DNA, 121 bp, synthetic construct
  misc_feature 1..121: note = Description of artificial sequence: synthetic polynucleotide sequence
  source 1..121: mol_type = other DNA
ctgagaaagttactatcccttgtactggtttctggtgctgggtatatacttgcttttgtaagactaaataaattgataaattcagctgattcagagcgtttacataatctttccaatgtca

SEQ ID NO: 1179 - DNA, 121 bp, synthetic construct
  misc_feature 1..121: note = Description of artificial sequence: synthetic polynucleotide sequence
  source 1..121: mol_type = other DNA
tggagaaatttacacatatacttttttattgaggtgaggtttatgtcacgtaaaattaagcaggctatagtatacaattcagtgacattttgtatattcccaatgtcctgcaaccacatct

SEQ ID NO: 1180 - DNA, 121 bp, synthetic construct
  misc_feature 1..121: note = Description of artificial sequence: synthetic polynucleotide sequence
  source 1..121: mol_type = other DNA
acagagatcatctgctgtaaccctgtaaattccctcccaacttccagtgggcagtatggcatgaaacccctgcaactcagagatggctggtttaattggagaagtgaaggatttgtattca

SEQ ID NO: 1181 - DNA, 121 bp, synthetic construct
  misc_feature 1..121: note = Description of artificial sequence: synthetic polynucleotide sequence
  source 1..121: mol_type = other DNA
cctgtctggtttgaatcttaatttctccatttcccagctgtgtgacctcgataagattacttcatcctctgggtctgcttcctcatatgaaaacaggaacaagaagtgcataaacacattt

SEQ ID NO: 1182 - DNA, 121 bp, synthetic construct
  misc_feature 1..121: note = Description of artificial sequence: synthetic polynucleotide sequence
  source 1..121: mol_type = other DNA
agttagcctcttgggatctatctttaaggatttgctctttcaggttcacatttgttcacgtcttttaccacctgtatgaccctgggcatggaattttgcttttctgacactaaaattaaat

SEQ ID NO: 1183 - DNA, 121 bp, synthetic construct
  misc_feature 1..121: note = Description of artificial sequence: synthetic polynucleotide sequence
  source 1..121: mol_type = other DNA
tcttgaacttgcctatgtatttgttactcttggttatcagggagccaccagacttcaggcattctttgaagctttctttgattaggaaaaccagtcttccccagagactgggcagggtttt

SEQ ID NO: 1184 - DNA, 121 bp, synthetic construct
  misc_feature 1..121: note = Description of artificial sequence: synthetic polynucleotide sequence
  source 1..121: mol_type = other DNA
gtgcaggtaatgactgtggcttgggagggccccaggccctgcctgtcaggcccagctgccggagttactgcaggattgtgctgggggaggctggggtgtctgagctaattagatttcttag

SEQ ID NO: 1185 - DNA, 121 bp, synthetic construct
  misc_feature 1..121: note = Description of artificial sequence: synthetic polynucleotide sequence
  source 1..121: mol_type = other DNA
ctgccatcaatctcaggtagaccaggctagttctcagctcatggctgctccacacccttcggatgtcattcttcctttatgtttagggggtagtcctcaagcaaatgtctgcagatgagct

SEQ ID NO: 1186 - DNA, 121 bp, synthetic construct
  misc_feature 1..121: note = Description of artificial sequence: synthetic polynucleotide sequence
  source 1..121: mol_type = other DNA
aggccagagtctgtttcctcatctgtagtcagaacagtaggaaaggaaccgaacatgctcttatgatcttttctgctctgaattttgatgattttgacatatgatccactgtctttcgggg

SEQ ID NO: 1187 - DNA, 121 bp, synthetic construct
  misc_feature 1..121: note = Description of artificial sequence: synthetic polynucleotide sequence
  source 1..121: mol_type = other DNA
aaatgcaagaattttagaaagttgataaaacatgagaagatcctgggagacacatgtgaatctcaagagcaggaactctagtgtattcacctgtacacagttactatcactagtgacagaa

SEQ ID NO: 1188 - DNA, 121 bp, synthetic construct
  misc_feature 1..121: note = Description of artificial sequence: synthetic polynucleotide sequence
  source 1..121: mol_type = other DNA
ccaaggtcactattccaataaattgagaaactgggacacagcctgaaacatcaatctaatccaaactcaatactttcttcttattctgtgctgcttctccctaccccaccccagccaataa

SEQ ID NO: 1189 - DNA, 121 bp, synthetic construct
  misc_feature 1..121: note = Description of artificial sequence: synthetic polynucleotide sequence
  source 1..121: mol_type = other DNA
caagcaggttttgaggacgcaaataactgcttgggtaaatgcctgagactctcatggtatcttttgttcctgctttgccacctttttctcaacccaaatctatgatttcatggaccttttt

SEQ ID NO: 1190 - DNA, 121 bp, synthetic construct
  misc_feature 1..121: note = Description of artificial sequence: synthetic polynucleotide sequence
  source 1..121: mol_type = other DNA
gcctgcatgtgttcatgagtgcaaatgtgtgtgtgtgcacttacatacgtacataagtaaaaggcttctggatttgagggttgaatattctctctctctctctttttttctttctttcttt

SEQ ID NO: 1191 - DNA, 121 bp, synthetic construct
  misc_feature 1..121: note = Description of artificial sequence: synthetic polynucleotide sequence
  source 1..121: mol_type = other DNA
agaagattgtcttaagtttactgtagttacttatgcttccaagtaagttttggaaactgtcactagaagtgttctggatcaaattatggctccagtgtgtattctatcatttacttttccc

SEQ ID NO: 1192 - DNA, 121 bp, synthetic construct
  misc_feature 1..121: note = Description of artificial sequence: synthetic polynucleotide sequence
  source 1..121: mol_type = other DNA
ctttggagcatttcacatccatgcttgcaattcaacatgacaatcagacattgttatttctatgatttcaaaagggtatgtcacgttgagggaaaaattaagataaaggtttgtttctaca

SEQ ID NO: 1193 - DNA, 121 bp, synthetic construct
  misc_feature 1..121: note = Description of artificial sequence: synthetic polynucleotide sequence
  source 1..121: mol_type = other DNA
ctgaagcagcagttaggaaggtctcagaccttaaaatatcaactgatacagaatttctcagtataattacctccagccaggttgcttttttagctcaaaagaaagataaaaggcggagtcc

SEQ ID NO: 1194 - DNA, 121 bp, synthetic construct
  misc_feature 1..121: note = Description of artificial sequence: synthetic polynucleotide sequence
  source 1..121: mol_type = other DNA
attctcatgcgttacagccattataaatggggaataattttaccccaagagtttcctgaccaatatgtgcttatttcagctgtgcggattagtaagatgttagtgttcctttttcacactt

SEQ ID NO: 1195 - DNA, 121 bp, synthetic construct
  misc_feature 1..121: note = Description of artificial sequence: synthetic polynucleotide sequence
  source 1..121: mol_type = other DNA
ttggggagaacatgcattcactgaaacgatgacattcctctaaggtgcaaatgttaaaaggtcatgcaaccagaactattacataaaatcaaaaattttccagtttgaattatactctcaa

SEQ ID NO: 1196 - DNA, 240 bp, synthetic construct
  misc_feature 1..240: note = Description of artificial sequence: synthetic polynucleotide sequence
  source 1..240: mol_type = other DNA
cctggagcgggggggagaagcggcggcggcggcggccgcggcggctgcagctccagggagggggtctgagtcgcctgtcaccatttccagggctgggaacgccggagagttggtctctccccttctactgcctccaacacggcggcggcggcggctggcacatccagggacccgggccggttttaaacctcccgtgcgccgccgccgcaccccccgtggcccgggctccggaggccgccg

SEQ ID NO: 1197 - DNA, 360 bp, synthetic construct
  misc_feature 1..360: note = Description of artificial sequence: synthetic polynucleotide sequence
  source 1..360: mol_type = other DNA
gcggaggcagccgttcggaggattattcgtcttctccccattccgctgccgccgctgccaggcctctggctgctgaggagaagcaggcccagtcgctgcaaccatccagcagccgccgcagcagccattacccggctgcggtccagagccaagcggcggcagagcgaggggcatcagctaccgccaagtccagagccatttccatcctgcagaagaagccccgccaccagcagcttctgccatctctctcctcctttttcttcagccacaggctcccagacatgacagccatcatcaaagagatcgttagcagaaacaaaaggagatatcaagaggatggattcgacttagacttgacct

SEQ ID NO: 1198 - DNA, 121 bp, synthetic construct
  misc_feature 1..121: note = Description of artificial sequence: synthetic polynucleotide sequence
  source 1..121: mol_type = other DNA
cttaactaaagtactcagatatttatccaaacattattgctatgggatttcctgcagaaagacttgaaggcgtatacaggaacaatattgatgatgtagtaaggtaagaatgctttgattt

SEQ ID NO: 1199 - DNA, 121 bp, synthetic construct
  misc_feature 1..121: note = Description of artificial sequence: synthetic polynucleotide sequence
  source 1..121: mol_type = other DNA
gttaatggtggctttttgtttgtttgttttgttttaaggtttttggattcaaagcataaaaaccattacaagatatacaatctgtaagtatgttttcttatttgtatgcttgcaaatatct

SEQ ID NO: 1200 - DNA, 121 bp, synthetic construct
  misc_feature 1..121: note = Description of artificial sequence: synthetic polynucleotide sequence
  source 1..121: mol_type = other DNA
aaaagataactttatatcacttttaaacttttcttttagttgtgctgaaagacattatgacaccgccaaatttaattgcagaggtaggtatgaatgtactgtactatgttgtataacttaa

SEQ ID NO: 1201 - DNA, 240 bp, synthetic construct
  misc_feature 1..240: note = Description of artificial sequence: synthetic polynucleotide sequence
  source 1..240: mol_type = other DNA
gttgcacaatatccttttgaagaccataacccaccacagctagaacttatcaaacccttttgtgaagatcttgaccaatggctaagtgaagatgacaatcatgttgcagcaattcactgtaaagctggaaagggacgaactggtgtaatgatatgtgcatatttattacatcggggcaaatttttaaaggcacaagaggccctagatttctatggggaagtaaggaccagagacaaaaag

SEQ ID NO: 1202 - DNA, 143 bp, synthetic construct
  misc_feature 1..143: note = Description of artificial sequence: synthetic polynucleotide sequence
  source 1..143: mol_type = other DNA
gggagtaactattcccagtcagaggcgctatgtgtattattatagctacctgttaaagaatcatctggattatagaccagtggcactgttgtttcacaagatgatgtttgaaactattccaatgttcagtggcggaacttgca

SEQ ID NO: 1203 - DNA, 287 bp, synthetic construct
  misc_feature 1..287: note = Description of artificial sequence: synthetic polynucleotide sequence
  source 1..287: mol_type = other DNA
gatcctcagtttgtggtctgccagctaaaggtgaagatatattcctccaattcaggacccacacgacgggaagacaagttcatgtactttgagttccctcagccgttacctgtgtgtggtgatatcaaagtagagttcttccacaaacagaacaagatgctaaaaaaggtttgtactttactttcattgggagaaatatccaaaataaggacagattaaaagctatattttattttatgacatgtaaggaactataatttgttttctattagatctgcaggtgtttt

SEQ ID NO: 1204 - DNA, 226 bp, synthetic construct
  misc_feature 1..226: note = Description of artificial sequence: synthetic polynucleotide sequence
  source 1..226: mol_type = other DNA
ggacaaaatgtttcacttttgggtaaatacattcttcataccaggaccagaggaaacctcagaaaaagtagaaaatggaagtctatgtgatcaagaaatcgatagcatttgcagtatagagcgtgcagataatgacaaggaatatctagtacttactttaacaaaaaatgatcttgacaaagcaaataaagacaaagccaaccgatacttttctccaaattttaag

SEQ ID NO: 1205 - DNA, 187 bp, synthetic construct
  misc_feature 1..187: note = Description of artificial sequence: synthetic polynucleotide sequence
  source 1..187: mol_type = other DNA
ggtgaagctgtacttcacaaaaacagtagaggagccgtcaaatccagaggctagcagttcaacttctgtaacaccagatgttagtgacaatgaacctgatcattatagatattctgacaccactgactctgatccagagaatgaaccttttgatgaagatcagcatacacaaattacaaaagtctga

SEQ ID NO: 1206 - DNA, 121 bp, synthetic construct
  misc_feature 1..121: note = Description of artificial sequence: synthetic polynucleotide sequence
  source 1..121: mol_type = other DNA
tttaaatgtgcagtgttgaatcatttcttcatagtgctcccccgagttgggactagggcttcaatttcacttcttaaaaaaaatcatcatatatttgatatgcccagactgcatacgattt

SEQ ID NO: 1207 - DNA, 121 bp, synthetic construct
  misc_feature 1..121: note = Description of artificial sequence: synthetic polynucleotide sequence
  source 1..121: mol_type = other DNA
gtagacttgccctgcctgtttcaccgaacggctccagggagcaaatgtaatattgtataagaaggcactttgtaaactgtaagaagtgggtcagcgtaatgtgattttattgttctaagat

SEQ ID NO: 1208 - DNA, 121 bp, synthetic construct
  misc_feature 1..121: note = Description of artificial sequence: synthetic polynucleotide sequence
  source 1..121: mol_type = other DNA
agttgccttacaagaaccaactcacggccagtggagctctctattaaaccaattcactgcccatgacttcatggccagtggagctcttgtctattttatagactggatgctgtctggttca

SEQ ID NO: 1209 - DNA, 121 bp, synthetic construct
  misc_feature 1..121: note = Description of artificial sequence: synthetic polynucleotide sequence
  source 1..121: mol_type = other DNA
ttttacaggctttttcaggcaacaaagacttcttgcctaaaacctcatttaaaaaattcattggttcaaagctgtgtccactacagatttttgataagatttgcctcaatatcttgtttat

SEQ ID NO: 1210 - DNA, 121 bp, synthetic construct
  misc_feature 1..121: note = Description of artificial sequence: synthetic polynucleotide sequence
  source 1..121: mol_type = other DNA
atattttttcaaaatggctaaaagtataaacttacacaatctgtagcattaacttcgacgccagcatcaagtagcattcgtacaagagcctcattctgctttgtctttgatacctattaca

SEQ ID NO: 1211 - DNA, 121 bp, synthetic construct
  misc_feature 1..121: note = Description of artificial sequence: synthetic polynucleotide sequence
  source 1..121: mol_type = other DNA
acggagttggggaagctctttcacttcggaggattgctcaacaaccatgctgggcatctggaccctcctacctctggtgagccctctcctgcccgggtggaggcttaccccgtcttagtcc

SEQ ID NO: 1212 - DNA, 167 bp, synthetic construct
  misc_feature 1..167: note = Description of artificial sequence: synthetic polynucleotide sequence
  source 1..167: mol_type = other DNA
ggttcttacgtctgttgctagattatcgtccaaaagtgttaatgcccaagtgactgacatcaactccaagggattggaattgaggaagactgttactacagttgagactcagaacttggaaggcctgcatcatgatggccaattctgccataagccctgtcctccag

SEQ ID NO: 1213 - DNA, 139 bp, synthetic construct
  misc_feature 1..139: note = Description of artificial sequence: synthetic polynucleotide sequence
  source 1..139: mol_type = other DNA
ggtgaaaggaaagctagggactgcacagtcaatggggatgaaccagactgcgtgccctgccaagaagggaaggagtacacagacaaagcccatttttcttccaaatgcagaagatgtagattgtgtgatgaaggacatg

SEQ ID NO: 1214 - DNA, 121 bp, synthetic construct
  misc_feature 1..121: note = Description of artificial sequence: synthetic polynucleotide sequence
  source 1..121: mol_type = other DNA
ttctaggcttagaagtggaaataaactgcacccggacccagaataccaagtgcagatgtaaaccaaactttttttgtaactctactgtatgtgaacactgtgacccttgcaccaagtaagt

SEQ ID NO: 1215 - DNA, 121 bp, synthetic construct
  misc_feature 1..121: note = Description of artificial sequence: synthetic polynucleotide sequence
  source 1..121: mol_type = other DNA
tttgaatttctcctgtatttttttttctagatgtgaacatggaatcatcaaggaatgcacactcaccagcaacaccaagtgcaaagaggaaggtaattatttttttacggttatattctcc

SEQ ID NO: 1216 - DNA, 121 bp, synthetic construct
  misc_feature 1..121: note = Description of artificial sequence: synthetic polynucleotide sequence
  source 1..121: mol_type = other DNA
tataaaatgtccaatgttccaacctacaggatccagatctaacttggggtggctttgtcttcttcttttgccaattccactaattgtttggggtaagttcttgctttgttcaaactgcaga

SEQ ID NO: 1217 - DNA, 121 bp, synthetic construct
  misc_feature 1..121: note = Description of artificial sequence: synthetic polynucleotide sequence
  source 1..121: mol_type = other DNA
aatttctttgttctttcagtgaagagaaaggaagtacagaaaacatgcagaaagcacagaaaggaaaaccaaggttctcatgaatctccaactttaaatcctgtaggtattgaaataggta

SEQ ID NO: 1218 - DNA, 121 bp, synthetic construct
  misc_feature 1..121: note = Description of artificial sequence: synthetic polynucleotide sequence
  source 1..121: mol_type = other DNA
agatatatttttatttgtctttctctgcttccattttttgctttctaggaaacagtggcaataaatttatctggtaaggcttttatcattttatttcatagagatggcatcctttagagta

SEQ ID NO: 1219 - DNA, 333 bp, synthetic construct
  misc_feature 1..333: note = Description of artificial sequence: synthetic polynucleotide sequence
  source 1..333: mol_type = other DNA
gatgttgacttgagtaaatatatcaccactattgctggagtcatgacactaagtcaagttaaaggctttgttcgaaagaatggtgtcaatgaagccaaaatagatgagatcaagaatgacaatgtccaagacacagcagaacagaaagttcaactgcttcgtaattggcatcaacttcatggaaagaaagaagcgtatgacacattgattaaagatctcaaaaaagccaatctttgtactcttgcagagaaaattcagactatcatcctcaaggacattactagtgactcagaaaattcaaacttcagaaatgaaatccaaagcttggtctag

SEQ ID NO: 1220 - DNA, 121 bp, synthetic construct
  misc_feature 1..121: note = Description of artificial sequence: synthetic polynucleotide sequence
  source 1..121: mol_type = other DNA
catgtttgtttcaggatccacagctgtcagtttccctccagacccctcagaatgcagggtccagagaaccaaacagaccaccaaccccaagaaccgcattttcattctgtataataaaaca

SEQ ID NO: 1221 - DNA, 121 bp, synthetic construct
  misc_feature 1..121: note = Description of artificial sequence: synthetic polynucleotide sequence
  source 1..121: mol_type = other DNA
gcagccatggaacgagactctatgtttgcatttgcctacacagacctggccaacatgtacgctgaaggaggccagtatagcaatgctgaggacattttccggaaagctcttcgtctggaga

SEQ ID NO: 1222 - DNA, 121 bp, synthetic construct
  misc_feature 1..121: note = Description of artificial sequence: synthetic polynucleotide sequence
  source 1..121: mol_type = other DNA
agaggcatcagcaaatttttggaagatgaaaagcaaatagacctgtggcaactgccttagtataacagaggaagttgatacctaagtgcctttaactgaggttgagaggagatgctgggaa

SEQ ID NO: 1223 - DNA, 121 bp, synthetic construct
  misc_feature 1..121: note = Description of artificial sequence: synthetic polynucleotide sequence
  source 1..121: mol_type = other DNA
cctctcagctcagctatggtggacacccaaaggtgggcagagagagtaagagaacctcaaatcaccatggagtcctccaaagaggaatcttttggtcagaactcttgccatgaagaaataa

SEQ ID NO: 1224 - DNA, 121 bp, synthetic construct
  misc_feature 1..121: note = Description of artificial sequence: synthetic polynucleotide sequence
  source 1..121: mol_type = other DNA
ccaaatatgtaaacaacccatatatctacaaactgatgggtggataaacaaaacgtgatgtgcccatacaacaaaatggtcttgagtcacaaagaatgaaatactaatacatgctacaaca

SEQ ID NO: 1225 - DNA, 121 bp, synthetic construct
  misc_feature 1..121: note = Description of artificial sequence: synthetic polynucleotide sequence
  source 1..121: mol_type = other DNA
ctcaaaagatgaagttaaaccttccctaggttataggaagtagcaggattgaagttgccatcttgcctccaggtttgcaggaaagatgcatgcagccacaccctgccctctgcattggcct

SEQ ID NO: 1226 - DNA, 121 bp, synthetic construct
  misc_feature 1..121: note = Description of artificial sequence: synthetic polynucleotide sequence
  source 1..121: mol_type = other DNA
gtttacagaatctgtaggatcagcatattggttagtgggtcttgaactctgatggccatgtactctgccagaggatcaggagtacatgcagctgctgtgatgtggttgtgagctttttttt

SEQ ID NO: 1227 - DNA, 121 bp, synthetic construct
  misc_feature 1..121: note = Description of artificial sequence: synthetic polynucleotide sequence
  source 1..121: mol_type = other DNA
cagaactgattttctcgtatcagtcaatggcagttgaggggtacaggtggaatgcaactatctaccacaaccatcacagtatatttgttatcttgtagcatttatccttgatattttgaag

SEQ ID NO: 1228 - DNA, 121 bp, synthetic construct
  misc_feature 1..121: note = Description of artificial sequence: synthetic polynucleotide sequence
  source 1..121: mol_type = other DNA
acattacttaagactcagtcagatgcgataataacacagcagcttgtaaaagacaaactacgagccaccacacaaaatttaggttctttttatatgcagagtccacttttaaattcagaac

SEQ ID NO: 1229 - DNA, 121 bp, synthetic construct
  misc_feature 1..121: note = Description of artificial sequence: synthetic polynucleotide sequence
  source 1..121: mol_type = other DNA
actataattgttcagacttcaaaaggattcttaataccattgaacattactaacaagcctgggctaccagttattcctggaaatgcacttccattggttaattcacaaggtatccctgctt

SEQ ID NO: 1230 - DNA, 121 bp, synthetic construct
  misc_feature 1..121: note = Description of artificial sequence: synthetic polynucleotide sequence
  source 1..121: mol_type = other DNA
gaaatgttaggcccaaaatttcaactgcttattgacttaaacgacaaaaactggaagaacgtcctcattaaaaacatccttccggggcagtgatggacacccagaggttcaggagaaccaa

SEQ ID NO: 1231 - DNA, 121 bp, synthetic construct
  misc_feature 1..121: note = Description of artificial sequence: synthetic polynucleotide sequence
  source 1..121: mol_type = other DNA
ccaaattgcattgtaaggactattaaggtttacttacctttaaatttaatatccagaccactaaattccaattcaaccccttgaagtgcttctcccagagtttcatggtaatgactgatac

SEQ ID NO: 1232 - DNA, 121 bp, synthetic construct
  misc_feature 1..121: note = Description of artificial sequence: synthetic polynucleotide sequence
  source 1..121: mol_type = other DNA
tgaccccacacagaatggaagtgaaaagtacttatatgtttcttgacgattatggtagggcccaacagtattcatccataagacaacttcctctttatcttgatactgaaacaagaaaagc

SEQ ID NO: 1233 - DNA, 121 bp, synthetic construct
  misc_feature 1..121: note = Description of artificial sequence: synthetic polynucleotide sequence
  source 1..121: mol_type = other DNA
taagcccataccatttgtcttatctctgattacatatatttccagtcctcttgctagtggttgccttaggtctgggcatgtgataggtattcagcggtctaacaattggccaatgagtcat

SEQ ID NO: 1234 - DNA, 121 bp, synthetic construct
  misc_feature 1..121: note = Description of artificial sequence: synthetic polynucleotide sequence
  source 1..121: mol_type = other DNA
gctgagatcacaccactgcactccagccaggatgacagagcaagactctgtctcagggtgaaaaaacaagtatacagctgaaagcccaacgcacctttcaaacctccagtgactcctaagt

SEQ ID NO: 1235 - DNA, 121 bp, synthetic construct
  misc_feature 1..121: note = Description of artificial sequence: synthetic polynucleotide sequence
  source 1..121: mol_type = other DNA
aggactcaacagtcactagtggctgagaaaagagttttgtctaggttggagccatgatgcgcttatctgttgatagacatgtcacataagcatttctccagtacagaaacatgcagtaaat

SEQ ID NO: 1236 - DNA, 121 bp, synthetic construct
  misc_feature 1..121: note = Description of artificial sequence: synthetic polynucleotide sequence
  source 1..121: mol_type = other DNA
cttcacccagctttcttcagaaggacctgacttcagtacacataaatcatcctgcttggttgtgaatgcaattagttttactttcacaagaatcgtgtcctcttgttgatctctttccatt

SEQ ID NO: 1237 - DNA, 121 bp, synthetic construct
  misc_feature 1..121: note = Description of artificial sequence: synthetic polynucleotide sequence
  source 1..121: mol_type = other DNA
aatcttcaagattcagctcaagctgagctagaattaaagtcttccctgatctttatctttgctctcttaaactagtcagaggatctgtacccagagcatgcatggaattctgtgccctgta

SEQ ID NO: 1238 - DNA, 121 bp, synthetic construct
  misc_feature 1..121: note = Description of artificial sequence: synthetic polynucleotide sequence
  source 1..121: mol_type = other DNA
ttgtttctccatggcttttgtctttctgtactccacacaatgtccaatgtattatgacaactttatcaagataacatatagtcaatcagatacaacttatctggtcagtatacttttacct

SEQ ID NO: 1239 - DNA, 121 bp, synthetic construct
  misc_feature 1..121: note = Description of artificial sequence: synthetic polynucleotide sequence
  source 1..121: mol_type = other DNA
tcaaataaaaattggaaagagagttatagggagtaaatggcctataaagtacattgatattaacgctgttctcaagagctagttatcttttagtctaattgcccttttagcaaaagaagag

SEQ ID NO: 1240 - DNA, 121 bp, synthetic construct
  misc_feature 1..121: note = Description of artificial sequence: synthetic polynucleotide sequence
  source 1..121: mol_type = other DNA
gatatgtacacatgcacactggaatattaaaatgtagacagaaggatggaaatgacaatgaggatctgaagtttacatgctgtcttcagaatgttttatccatctgattttcaatcattta

SEQ ID NO: 1241 - DNA, 121 bp, synthetic construct
  misc_feature 1..121: note = Description of artificial sequence: synthetic polynucleotide sequence
  source 1..121: mol_type = other DNA
gttaaattcattaacccctttctttgtcagaacatgatggtttccaccatttgaacccacttagtgatgcactgtgaaatcccagaaatccagctgcactctttcaaatccctgctatgca

SEQ ID NO: 1242 - DNA, 121 bp, synthetic construct
  misc_feature 1..121: note = Description of artificial sequence: synthetic polynucleotide sequence
  source 1..121: mol_type = other DNA
cgagattactattaagtctccagagaaaatcgaagaagtcctgtcacctgaaggctccccttcaaaatcgccatccaagaaaaagaagaaattccgcactccttcttttctgaaaaagaac

SEQ ID NO: 1243 - DNA, 121 bp, synthetic construct
  misc_feature 1..121: note = Description of artificial sequence: synthetic polynucleotide sequence
  source 1..121: mol_type = other DNA
aggagaaagttgaggcctaaataaagtctttttataattattattataacaatgtgacattgcacatctaaataccacatttaagttgatcattaatatgcaatggtagatcagattgggg

SEQ ID NO: 1244 - DNA, 121 bp, synthetic construct
  misc_feature 1..121: note = Description of artificial sequence: synthetic polynucleotide sequence
  source 1..121: mol_type = other DNA
cctctgtcccaagtttctcccttatagtcagggctctgccctttactactcactttcttgtttgttgtcttaatcgtgggttacaatgcttctctaagactaacaggaagacacttttatt

SEQ ID NO: 1245 - DNA, 121 bp, synthetic construct
  misc_feature 1..121: note = Description of artificial sequence: synthetic polynucleotide sequence
  source 1..121: mol_type = other DNA
tgtgtgacaaagtgctgggggctgctatcaatgggcaagtggatgacagaagagggttacgtcaggagagccacactcagctgtccgggcaggcaggagtgtaagggggggtagggcagct

SEQ ID NO: 1246 - DNA, 121 bp, synthetic construct
  misc_feature 1..121: note = Description of artificial sequence: synthetic polynucleotide sequence
  source 1..121: mol_type = other DNA
tcctttaaggaggtaattgtctgctccttcaccgcactctcagaggctcacctccacatgctgaggtcaatactggattgagttttcatgttcccttggggtaaaacttgcagactctcag

SEQ ID NO: 1247 - DNA, 121 bp, synthetic construct
  misc_feature 1..121: note = Description of artificial sequence: synthetic polynucleotide sequence
  source 1..121: mol_type = other DNA
attagctctcctttattacttgctatgtccctcacatcatactaagcacttagcatgccatatctcattcctattttacaggagaggaaactaagtctcagaacaattaagtgacttgccc

SEQ ID NO: 1248 - DNA, 121 bp, synthetic construct
  misc_feature 1..121: note = Description of artificial sequence: synthetic polynucleotide sequence
  source 1..121: mol_type = other DNA
gttaaaatagaaagtaaagaattataacacatgacagagaggagatgcagatgaagtgactaccccaggatcggtagagatgaacatctaagaggaagaagcacatgtaaaggcaagtggt

SEQ ID NO: 1249 - DNA, 121 bp, synthetic construct
  misc_feature 1..121: note = Description of artificial sequence: synthetic polynucleotide sequence
  source 1..121: mol_type = other DNA
acagggccctggtggaggtgcagttcgtgggtactctgtcctacactgaaatctgaaacggtcaagccataacctcagtcaagggaataaaatcaccttaaaggcccaaagtctatcttca

SEQ ID NO: 1250 - DNA, 121 bp, synthetic construct
  misc_feature 1..121: note = Description of artificial sequence: synthetic polynucleotide sequence
  source 1..121: mol_type = other DNA
ggacattagagtggaaggtatctagaagtcatccagtttgaccccatgcctcttacacagttgtcctgtaccaccttgctgataccaagaaggtgaaaatgaagatctgaccgcaaactgc

SEQ ID NO: 1251 - DNA, 121 bp, synthetic construct
  misc_feature 1..121: note = Description of artificial sequence: synthetic polynucleotide sequence
  source 1..121: mol_type = other DNA
tgtgctgtaaagaacaaagctcatttctggagccagtttgtggcttgaggcatcttcaacttatagcagttgttacaaaatgtacctgacttcgcgtttcaaaagaactggctggaacatg

SEQ ID NO: 1252 - DNA, 121 bp, synthetic construct
  misc_feature 1..121: note = Description of artificial sequence: synthetic polynucleotide sequence
  source 1..121: mol_type = other DNA
agatagagcatggctgacatttcaattgcgaaggtgggaggtaagcggtctgaagactcgattatggaaaaactgcacagggtgaccagatgacattactaatactttaatgagctcgagg

SEQ ID NO: 1253 - DNA, 121 bp, synthetic construct
  misc_feature 1..121: note = Description of artificial sequence: synthetic polynucleotide sequence
  source 1..121: mol_type = other DNA
ctggttaggaaaagcatccgatgccgagcgtctccattcaagctctccaaactttcagcattttttcatttgaagcttgtagccatacaaacctctggtaatgagttccctgcccgagaca

SEQ ID NO: 1254 - DNA, 121 bp, synthetic construct
  misc_feature 1..121: note = Description of artificial sequence: synthetic polynucleotide sequence
  source 1..121: mol_type = other DNA
aatggcactcacatgtcgggcaacctggaaagagaaactttttattagaaagttttcctggactggtgactgaaggctgaaagggcatcgtgccaacggtggtttcagctgtccctgttcc

SEQ ID NO: 1255 - DNA, 121 bp, synthetic construct
  misc_feature 1..121: note = Description of artificial sequence: synthetic polynucleotide sequence
  source 1..121: mol_type = other DNA
cagcatgaaaacagactaatacaccctctctactaggaacccctgaggaatcatcactgcgtctgatgatgggatgccagggctgcccatctttgtcagaccaaacgcatgggattctgaa

SEQ ID NO: 1256 - DNA, 121 bp, synthetic construct
  misc_feature 1..121: note = Description of artificial sequence: synthetic polynucleotide sequence
  source 1..121: mol_type = other DNA
aataaatccccaccttgacttaaaatgttttgtcatccatgttttatgcttccttttcttggcctattgaaatagaaatggtattttacagccagattaagtttcatctcctccgtgaagc

SEQ ID NO: 1257 - DNA, 121 bp, synthetic construct
  misc_feature 1..121: note = Description of artificial sequence: synthetic polynucleotide sequence
  source 1..121: mol_type = other DNA
tgtgtgtgtgtgtgtgtgtgtgtgtctttgcctatgtgtgtatgtgatggccttaggaggccggaagtgtctatggtgttctgaacggtgcatttgattttccttcttccagccaaagcct

SEQ ID NO: 1258 - DNA, 121 bp, synthetic construct
  misc_feature 1..121: note = Description of artificial sequence: synthetic polynucleotide sequence
  source 1..121: mol_type = other DNA
ccctgatttgtgagctacatactgtgaaaactacgcactgtgaaaaatattggcacctgtgaaaacttacagcgttttgaagcgcaagaagagagggagtcggggtgagagggtgaaccaa

SEQ ID NO: 1259 - DNA, 121 bp, synthetic construct
  misc_feature 1..121: note = Description of artificial sequence: synthetic polynucleotide sequence
  source 1..121: mol_type = other DNA
tatcaactcagctgagaaattggaagcggggattgttctggctggaagggaaggttagattgttaatcctgcatcctggccctgatctcaccgagtgtgaagcatgttcccacaatggtgt

SEQ ID NO: 1260 - DNA, 121 bp, synthetic construct
  misc_feature 1..121: note = Description of artificial sequence: synthetic polynucleotide sequence
  source 1..121: mol_type = other DNA
ggaggggtggaagccatgagctagcagaaatcctgcataaggggcagtaggagcagagcattgctgagttgtcataatgtgggagccctcgagtcaggatgaattgatgttgtctctgagc

SEQ ID NO: 1261 - DNA, 121 bp, synthetic construct
  misc_feature 1..121: note = Description of artificial sequence: synthetic polynucleotide sequence
  source 1..121: mol_type = other DNA
ccagaattaaaagcctcttaaaatacggtcagatgcagcataggccaacccatgctgctttgagctgcttccagtggtcttggttggaaagaatggactgcctaggatggagggggagtgg

SEQ ID NO: 1262 - DNA, 121 bp, synthetic construct
  misc_feature 1..121: note = Description of artificial sequence: synthetic polynucleotide sequence
  source 1..121: mol_type = other DNA
agccttttggatgaaatcgagtgaacgtgagtaggatctgtgacttgtttctaactgacgtaatattgcaaatgtgatgggttgttactcctgggatgtgtgtgtgtgtgtgtgtgtgtat

SEQ ID NO: 1263 - DNA, 121 bp, synthetic construct
  misc_feature 1..121: note = Description of artificial sequence: synthetic polynucleotide sequence
  source 1..121: mol_type = other DNA
tatatctggcaatacttatatagccattatacttctatatatctttttctctgacttagcgtagacgcgccatgggaaatattggataatgcataaaaactttcagggaaggaaataaaaa

SEQ ID NO: 1264 - DNA, 121 bp, synthetic construct
  misc_feature 1..121: note = Description of artificial sequence: synthetic polynucleotide sequence
  source 1..121: mol_type = other DNA
ccaagtcaggcgcccagtttctacataaatggcaccccacagcctctcttcaccctacggttccttttccctggctccaaggctgctccgacagacgggcttcgggccacagctggcagca

SEQ ID NO: 1265 - DNA, 121 bp, synthetic construct
  misc_feature 1..121: note = Description of artificial sequence: synthetic polynucleotide sequence
  source 1..121: mol_type = other DNA
aactctatttgaaaatgggtatatgggtatatgggataccaagagtaacacattcactgaaaatcaaagagaatccattgttgctccaatagccgaggcatctatctcctacagaggtgac

SEQ ID NO: 1266 - DNA, 121 bp, synthetic construct
  misc_feature 1..121: note = Description of artificial sequence: synthetic polynucleotide sequence
  source 1..121: mol_type = other DNA
tctctgtgatgctgttgctgaaggatgtttgtggcatgtgccatgagcccccagagtctgctcatctgcgggtggctgaggctggatcttctgggcatccattcactgctttgggccatgg

SEQ ID NO: 1267 - DNA, 121 bp, synthetic construct
  misc_feature 1..121: note = Description of artificial sequence: synthetic polynucleotide sequence
  source 1..121: mol_type = other DNA
atttatttgttcctttatttttaccacgactgctctgagtaccaggaactcctttttgggatgtcacagatcaccaacttccttctctgtgctgtgtcaatagggacgtcacccctgtggg

SEQ ID NO: 1268 - DNA, 121 bp, synthetic construct
  misc_feature 1..121: note = Description of artificial sequence: synthetic polynucleotide sequence
  source 1..121: mol_type = other DNA
caggaggatgggtttatggatcacctcatctaggtctaaggaaatcattcccttcaaaaagtgggttgcaaagagtcctgagaagaagattggagattgaagatgttacacgtaatgcaaa

SEQ ID NO: 1269 - DNA, 121 bp, synthetic construct
  misc_feature 1..121: note = Description of artificial sequence: synthetic polynucleotide sequence
  source 1..121: mol_type = other DNA
tccagggtataatatctgtttcctggaccttgactgatataaaaattatcaccaggagttgtctcaggaaacaaacactcaaaatggtatttggggattgttttggtcgcatttttaggct

SEQ ID NO: 1270 - DNA, 121 bp, synthetic construct
  misc_feature 1..121: note = Description of artificial sequence: synthetic polynucleotide sequence
  source 1..121: mol_type = other DNA
gtcaggagtctgggcgtcaggaaggtacctggaggtgatttctgtgaggaacgtcgacatgggcatttggggccacagtgctcagacagcaacctctggttcttaccaatcctccataaca

SEQ ID NO: 1271 - DNA, 121 bp, synthetic construct
  misc_feature 1..121: note = Description of artificial sequence: synthetic polynucleotide sequence
  source 1..121: mol_type = other DNA
ggaaatcagcctcagacaggcaatggaccacatgacacagccatgctgacattccagggccaccaagcctggggccacaaaccgcatgatgtggccacatcagcatcccagggtcaccgtg

SEQ ID NO: 1272 - DNA, 121 bp, synthetic construct
  misc_feature 1..121: note = Description of artificial sequence: synthetic polynucleotide sequence
  source 1..121: mol_type = other DNA
tgctaagagaggaggagaaggagagactgtctgttgctaaggtgggaagggttgtctacaaacaagttcaaggcatgtctgggcatgtccaggtatggtaaagggttgtttatagaataag

SEQ ID NO: 1273 - DNA, 121 bp, synthetic construct
  misc_feature 1..121: note = Description of artificial sequence: synthetic polynucleotide sequence
  source 1..121: mol_type = other DNA
ttcctcaagttcctgcctacagagactccaagtctttcttttttgcccagaacttctctgaaaatctatcgctctttgttaaagatgctctacaagctggaattcaaagccgcctcgttga

SEQ ID NO: 1274 - DNA, 121 bp, synthetic construct
  misc_feature 1..121: note = Description of artificial sequence: synthetic polynucleotide sequence
  source 1..121: mol_type = other DNA
agatggatgaaaacaggccacataataacccaggaggcaaagtccctttttttgccactgattcaggcatctctgcccaaccttgatttggaggatctgaatgaattctgtctccctaaat

SEQ ID NO: 1275 - DNA, 121 bp, synthetic construct
  misc_feature 1..121: note = Description of artificial sequence: synthetic polynucleotide sequence
  source 1..121: mol_type = other DNA
agcattaactgctgccatctactatccccatgctcctaccgaggccacatttcccagaaactgttcccagtgatccagcataatagggacatagaataggcccatttggaactgcacactt

SEQ ID NO: 1276 - DNA, 121 bp, synthetic construct
  misc_feature 1..121: note = Description of artificial sequence: synthetic polynucleotide sequence
  source 1..121: mol_type = other DNA
ttactgccttatggatccccctaaccccttagcctgaatgaggatctactaatacttacataacattctctagtgatcttgtctaacatcttgcagagttatgattaaatgatctaacata

SEQ ID NO: 1277 - DNA, 121 bp, synthetic construct
  misc_feature 1..121: note = Description of artificial sequence: synthetic polynucleotide sequence
  source 1..121: mol_type = other DNA
aaaggctttatataactttcttgaacccataatctaccatccttccctttattccttactgaagcaaatacatcaggaatgccatgtttgcacagtggcaaaccctcagggaaaacttaag

SEQ ID NO: 1278 - DNA, 121 bp, synthetic construct
  misc_feature 1..121: note = Description of artificial sequence: synthetic polynucleotide sequence
  source 1..121: mol_type = other DNA
catattgtgagcttttcagggtggggaaactttctgtctcattcatttgctctcgtctaccagtatagagcacagtccccagtgcatagcagctgactggacattgagcagggattcaaca

SEQ ID NO: 1279 - DNA, 121 bp, synthetic construct
  misc_feature 1..121: note = Description of artificial sequence: synthetic polynucleotide sequence
  source 1..121: mol_type = other DNA
gtgctctggttatcctttttctgacctggtaacaatcttttcttgcccttcgctgatcaactctgctctgtgccccagtgggctgcacacacgcatgcgcacacacacacacacaccacac

SEQ ID NO: 1280 - DNA, 121 bp, synthetic construct
  misc_feature 1..121: note = Description of artificial sequence: synthetic polynucleotide sequence
  source 1..121: mol_type = other DNA
ggggatgacgtcccatgatctggttggaggaaggggagatttgtgcacagctatggttcaatgccggcccacattccccactgcccacatgccccaggctgaggtgcgagctgcggcagca

SEQ ID NO: 1281 - DNA, 121 bp, synthetic construct
  misc_feature 1..121: note = Description of artificial sequence: synthetic polynucleotide sequence
  source 1..121: mol_type = other DNA
atgtaacataatgcaggcccaatatgtggaaatctggattcacagaaaaactaaggtacgtggttataaatcactttagtaaaataataatagcatcactcctataacagaatatgaacta

SEQ ID NO: 1282 - DNA, 121 bp, synthetic construct
  misc_feature 1..121: note = Description of artificial sequence: synthetic polynucleotide sequence
  source 1..121: mol_type = other DNA
cagagtattatgggtcatcccgcatcagctcatcaacccatgtgattaacctgagtcaaggcaactctggccaaagtgaagaaggagaaagtcagactatatatattctttattttttggt

SEQ ID NO: 1283 - DNA, 121 bp, synthetic construct
  misc_feature 1..121: note = Description of artificial sequence: synthetic polynucleotide sequence
  source 1..121: mol_type = other DNA
ggggattacgtgagggcaaggataccaggaggcacagatcataggaggctggctacttccgtctacctctgactcctgatgattcatagctttcccattgaacatacacttgtcccttccc

SEQ ID NO: 1284 - DNA, 121 bp, synthetic construct
  misc_feature 1..121: note = Description of artificial sequence: synthetic polynucleotide sequence
  source 1..121: mol_type = other DNA
gacagccattttgacaactactatgtcagtctgggtgcaaactagctgaatatcagccccgttgatagctaacattagtttcttgcctagtacattccagatgcccagctaagctccttga

SEQ ID NO: 1285 - DNA, 121 bp, synthetic construct
  misc_feature 1..121: note = Description of artificial sequence: synthetic polynucleotide sequence
  source 1..121: mol_type = other DNA
tgccaatgtttactcatattatcctcttctgctgaacaccccgttctcagcacctgaacggaattcctttaaacaaagactttttacaacatagatttcctgcctcttctccatctctgag

SEQ ID NO: 1286 - DNA, 121 bp, synthetic construct
  misc_feature 1..121: note = Description of artificial sequence: synthetic polynucleotide sequence
  source 1..121: mol_type = other DNA
aaagtgtaaaaaatttatcaagcacattctgtgcaccagggactatgctgggttctgtgaaaataaagatggataaggtcatagactctattttctaggatcttgtagttttaagggaaac

SEQ ID NO: 1287 - DNA, 121 bp, synthetic construct
  misc_feature 1..121: note = Description of artificial sequence: synthetic polynucleotide sequence
  source 1..121: mol_type = other DNA
aggtttaagtgccttttctctgctactaaatagcccctttcagtggctctctgcccaggtctgctttgagggccctctctgtgagtcggcaggctcctcttccacaggcgcctgtttctct

SEQ ID NO: 1288 - DNA, 121 bp, synthetic construct
  misc_feature 1..121: note = Description of artificial sequence: synthetic polynucleotide sequence
  source 1..121: mol_type = other DNA
atataatctgtagtaaccagatcagaataattaacatatctgtcatttcaaacattgcagttcttgacaactcttactgtatgtcctggaagccaccactgctccttattattagtttgtt

SEQ ID NO: 1289 - DNA, 121 bp, synthetic construct
  misc_feature 1..121: note = Description of artificial sequence: synthetic polynucleotide sequence
  source 1..121: mol_type = other DNA
gtccttccttagggtgaggtagaggggagtcaggtgggtactagcaggcatgaaaatcaaggcttctactttagacagctgctcttatagaatctctccccaaagcaatgcacatgcttac

SEQ ID NO: 1290 - DNA, 121 bp, synthetic construct
  misc_feature 1..121: note = Description of artificial sequence: synthetic polynucleotide sequence
  source 1..121: mol_type = other DNA
ttcatttcaagtacaggtgattttttgacccctaggggacatttgacagtgtctggagacgtatttggttatcacaactggagtgatggtttgttactagcatctaaagggtagaggctga

SEQ ID NO: 1291 - DNA, 121 bp, synthetic construct
  misc_feature 1..121: note = Description of artificial sequence: synthetic polynucleotide sequence
  source 1..121: mol_type = other DNA
ccccaggcttatggctggtctagcagagccaggtgccaggcctggcgggagcatccttgtctcttaactgacagtgcctccacctggccttgcagctccactcgacaaatactaaataaca

SEQ ID NO: 1292 - DNA, 121 bp, synthetic construct
  misc_feature 1..121: note = Description of artificial sequence: synthetic polynucleotide sequence
  source 1..121: mol_type = other DNA
tccatctcatagctgaagaaactaaaactcagggagagtgggtggcttggtcaaggtcttcctgacagtgacagggctaagatttggtcccagttctgctaactccagataataatcaaca

SEQ ID NO: 1293 - DNA, 121 bp, synthetic construct
  misc_feature 1..121: note = Description of artificial sequence: synthetic polynucleotide sequence
  source 1..121: mol_type = other DNA
ctttaattgtcttcatagcacttactactattaaccatactatgtggcatgacttacttattttatttgttgtctatttttccttaatagcaaatgtctgtacagcatttgctatatgcca

SEQ ID NO: 1294 - DNA, 121 bp, synthetic construct
  misc_feature 1..121: note = Description of artificial sequence: synthetic polynucleotide sequence
  source 1..121: mol_type = other DNA
aagggcagttctaatctgaccagctagtatgtaattgtggcaactggtaggggtgagccgggagtcttgtcttcttattggagctttttagcatttggtgtcaaaagctgaaggtcgtcaa

SEQ ID NO: 1295 - DNA, 121 bp, synthetic construct
  misc_feature 1..121: note = Description of artificial sequence: synthetic polynucleotide sequence
  source 1..121: mol_type = other DNA
actggctcacctgttgaagttctgcctgaagctggaggcccagttctgcttcctctagagcgaggccttctctgactaactcagtctggtgacatttcttcttcttccgagccactcttct

SEQ ID NO: 1296 - DNA, 121 bp, synthetic construct
  misc_feature 1..121: note = Description of artificial sequence: synthetic polynucleotide sequence
  source 1..121: mol_type = other DNA
gatgtcatttacacacataccagagaggccaagagaggttcagagagataaagaaatcaattagaggtggttgcatgcctcttaaccccagacatgcgtagaatttttcaaaaggtttctc

SEQ ID NO: 1297 - DNA, 121 bp, synthetic construct
  misc_feature 1..121: note = Description of artificial sequence: synthetic polynucleotide sequence
  source 1..121: mol_type = other DNA
tggtcactgactctgttggagtagcgctggttttatggggcatttggtttggctttccagtatattttcaatcatgtacatacagacatgaacagtaaattggataagggtggtagaagat

SEQ ID NO: 1298 - DNA, 121 bp, synthetic construct
  misc_feature 1..121: note = Description of artificial sequence: synthetic polynucleotide sequence
  source 1..121: mol_type = other DNA
ttaagctgtgaacacctcaaggacagaagccatgccttagtcatcttgatattgccagcatctagcagagtagaacctcaggacatatttgctgcaagttcctgattcataggatgcactg

SEQ ID NO: 1299 - DNA, 121 bp, synthetic construct
  misc_feature 1..121: note = Description of artificial sequence: synthetic polynucleotide sequence
  source 1..121: mol_type = other DNA
ttacaaataagcctgtcccccagtagttagtttatatttggggaataactgttcttacttcttgatggactgcatcatatagtaacaactacaagtggtaatgagaatgtatttctgttcc

SEQ ID NO: 1300 - DNA, 121 bp, synthetic construct
  misc_feature 1..121: note = Description of artificial sequence: synthetic polynucleotide sequence
  source 1..121: mol_type = other DNA
ttttaaggtcaatgaatcaaaggcatgcccatagattgcttttctctaccactcgtttattggctaacaataaaacagcagtctctttttcaaggtcacaccactgaatattttctccatt

SEQ ID NO: 1301 - DNA, 121 bp, synthetic construct
  misc_feature 1..121: note = Description of artificial sequence: synthetic polynucleotide sequence
  source 1..121: mol_type = other DNA
tagaaatttgacatgtatatagaaagatacagtcacataaaattcatggatacaattgcgtttggggaaaaacagtaaaataacaccagggatgtttacaaagagcacttctgctgtacca

SEQ ID NO: 1302 - DNA, 121 bp, synthetic construct
  misc_feature 1..121: note = Description of artificial sequence: synthetic polynucleotide sequence
  source 1..121: mol_type = other DNA
ttgtaagagagttttggtgtgcaataattaggtagaaaatacagttttgggaatagctactggcagttatggggggatactcagctcttttcatgtttggatcagagaagcatgctcttgg

SEQ ID NO: 1303 - DNA, 121 bp, synthetic construct
  misc_feature 1..121: note = Description of artificial sequence: synthetic polynucleotide sequence
  source 1..121: mol_type = other DNA
gagttgcttctgtaaggtgctccaaagttgtcactgcctgggacatcactggccttagctacctttcatatttacttcccagctggggaagtgtggcatgtgattttagaactgcacacat

SEQ ID NO: 1304 - DNA, 121 bp, synthetic construct
  misc_feature 1..121: note = Description of artificial sequence: synthetic polynucleotide sequence
  source 1..121: mol_type = other DNA
ggatctagagatataataaataaatgcactcataaacaaaagtaaactagtactatttaatcacttccattgcctgtctctcctcagggtccatttaaaattcttctaagtgattatcctt

SEQ ID NO: 1305 - DNA, 121 bp, synthetic construct
  misc_feature 1..121: note = Description of artificial sequence: synthetic polynucleotide sequence
  source 1..121: mol_type = other DNA
gaagcaccactgagctttaggctttgtccattggagcagaagaatcagacctaatctgacgagtaaaacacgtaagatagaccttctttgccattcctcctggttattgaaaaggtaaagc

SEQ ID NO: 1306 - DNA, 121 bp, synthetic construct
  misc_feature 1..121: note = Description of artificial sequence: synthetic polynucleotide sequence
  source 1..121: mol_type = other DNA
aaacccaaaagataaagctaagacctcattatctgggcatcaggtaaggaagcattattgaacacatagagcataaataaggatttacaaaatatggaattaacagtttacagacatttcc

SEQ ID NO: 1307 - DNA, 121 bp, synthetic construct
  misc_feature 1..121: note = Description of artificial sequence: synthetic polynucleotide sequence
  source 1..121: mol_type = other DNA
cataaattaaagacatcttttaagtatataaagtcgttctttgatgttaagcttgtcaagatcataaattgtttcctttatctactgcttgtgagcttatcaaaaataaggctcatgtctt

SEQ ID NO: 1308 - DNA, 121 bp, synthetic construct
  misc_feature 1..121: note = Description of artificial sequence: synthetic polynucleotide sequence
  source 1..121: mol_type = other DNA
aaacacacaaacatacataccacatacacaaccacacacacaaaaataaaacacacacaatgttcctgctattatccagtaatttccctccccaccaagtaatacaatctaaactatagca

SEQ ID NO: 1309 - DNA, 121 bp, synthetic construct
  misc_feature 1..121: note = Description of artificial sequence: synthetic polynucleotide sequence
  source 1..121: mol_type = other DNA
gctatgtcacctgaacttctctgagcttgtttttcagcagcaaaatgggagtaagagtatatatgatggtaagaatcacatgatataatacatgtgaagcacatgggccggggtctggtgc

SEQ ID NO: 1310 - DNA, 121 bp, synthetic construct
  misc_feature 1..121: note = Description of artificial sequence: synthetic polynucleotide sequence
  source 1..121: mol_type = other DNA
aaagagagccaggatagccctttgaccctcaaagagtattgttttcactgtaccatagagacattgcttctgaaagggagtacaattataatataaagttatgtatatgtatacattatac

SEQ ID NO: 1311 - DNA, 121 bp, synthetic construct
  misc_feature 1..121: note = Description of artificial sequence: synthetic polynucleotide sequence
  source 1..121: mol_type = other DNA
taatggcagagacatgacctataaacaagagtaactaatgacagaaatgtaaacagactgtaggctctttgagggcaggttcacgtcatatacgccagggacttagaggaggcagtcaata

SEQ ID NO: 1312 - DNA, 121 bp, synthetic construct
  misc_feature 1..121: note = Description of artificial sequence: synthetic polynucleotide sequence
  source 1..121: mol_type = other DNA
tcctgtagcctgcagaaaccttccccttccttacagtagtcactcatcagccatcagtaagtcttgtctcaggaagataggcatggggataaggttgccagatgaagcaaataaaaataca

SEQ ID NO: 1313 - DNA, 121 bp, synthetic construct
  misc_feature 1..121: note = Description of artificial sequence: synthetic polynucleotide sequence
  source 1..121: mol_type = other DNA
tctttataaatgaagaattcattcccttaactgcttggactgctgccagttgacaattcacagttgtcagccttcctcgggcaccttaactgaagtgagccacttcactcaaagacatgtt

SEQ ID NO: 1314 - DNA, 121 bp, synthetic construct
  misc_feature 1..121: note = Description of artificial sequence: synthetic polynucleotide sequence
  source 1..121: mol_type = other DNA
atgagaccagatccgatgtgaaaacaagaggcctgatgactttggcattcttgcatccagtcattatgaaaccacttccacctcatctctttttgaagtttgcttcatgtaccctttccac

SEQ ID NO: 1315 - DNA, 121 bp, synthetic construct
  misc_feature 1..121: note = Description of artificial sequence: synthetic polynucleotide sequence
  source 1..121: mol_type = other DNA
aggcaaggattcaagtacaaatatttcatttgggagctgaaggagacatctgtagaaaatttagataatcaaaaaagggaaaaaaaacagttaatagaagatatgctatcaagagtgtaca

SEQ ID NO: 1316 - DNA, 121 bp, synthetic construct
  misc_feature 1..121: note = Description of artificial sequence: synthetic polynucleotide sequence
  source 1..121: mol_type = other DNA
tacagagacacaagggactgtgaaacttttaggattgctatggttttaatgtgtgcctcgaaatttcatgtgttggaaacttaatcttcagtgcaacagtgttgagaggtggggcctttaa

SEQ ID NO: 1317 - DNA, 121 bp, synthetic construct
  misc_feature 1..121: note = Description of artificial sequence: synthetic polynucleotide sequence
  source 1..121: mol_type = other DNA
gcaaccacctaatgatgcatttctcagagtatttccctgtcgttaagcagcacatgactgtagttatgaaccacactctctattatcagtgttatgaataatacaggtgataatttaaggc

SEQ ID NO: 1318 - DNA, 121 bp, synthetic construct
  misc_feature 1..121: note = Description of artificial sequence: synthetic polynucleotide sequence
  source 1..121: mol_type = other DNA
gcctaggctggtagatttctttatttttaaaatagaaatggtggggaaatgtaccatccgggtcactgaaaagctggagcaaagatgtatggaactcagggacatggactctactttgcat

SEQ ID NO: 1319 - DNA, 121 bp, synthetic construct
  misc_feature 1..121: note = Description of artificial sequence: synthetic polynucleotide sequence
  source 1..121: mol_type = other DNA
attgttctgtcattaggagtctgaaggttttggaccaggccagtggtctggagatatggctctgagagagggtagaggagggattgaagaagtgagagactggaacaagttgtctactgca

SEQ ID NO: 1320 - DNA, 121 bp, synthetic construct
  misc_feature 1..121: note = Description of artificial sequence: synthetic polynucleotide sequence
  source 1..121: mol_type = other DNA
tctgttgccacataatgaggtttcttccctttttttgtcaccctggtctccccttgtcaattaaggccaagcacagaagagattggttacaggagggtgaacgagcctggaggcagctgat

SEQ ID NO: 1321 - DNA, 121 bp, synthetic construct
  misc_feature 1..121: note = Description of artificial sequence: synthetic polynucleotide sequence
  source 1..121: mol_type = other DNA
gaccctagatgacctggatccaggctacctccccaaatccatcccttacaattgtccacatttatactgctccagacagtttcgatattcaccaaatatacaatgtgcttttccatatcct

SEQ ID NO: 1322 - DNA, 121 bp, synthetic construct
  misc_feature 1..121: note = Description of artificial sequence: synthetic polynucleotide sequence
  source 1..121: mol_type = other DNA
ccagaacctggcaccagtctgtgggcatttcatagctgtagatacaagtgaaaataatcatgctttggctgaatggtggtgaatcatttgctgacaaggacaagataccaacaggaggagg

SEQ ID NO: 1323 - DNA, 160 bp, synthetic construct
  misc_feature 1..160: note = Description of artificial sequence: synthetic polynucleotide sequence
  source 1..160: mol_type = other DNA
aatgacaacacccagaaattcagtaaatgggactttcccggcagagccaatgaaaggccctattgctatgcaatctggtccaaaaccactcttcaggaggatgtcttcactggtgggccccacgcaaagcttcttcatgagggaatctaagactttgggg

SEQ ID NO: 1324 - DNA, 121 bp, synthetic construct
  misc_feature 1..121: note = Description of artificial sequence: synthetic polynucleotide sequence
  source 1..121: mol_type = other DNA
ggctgtccagattatgaatgggctcttccacattgccctggggggtcttctgatgatcccagcagggatctatgcacccatctgtgtgactgtgtggtaccctctctggggaggcattatg

SEQ ID NO: 1325 - DNA, 121 bp, synthetic construct
  misc_feature 1..121: note = Description of artificial sequence: synthetic polynucleotide sequence
  source 1..121: mol_type = other DNA
ctctccatctcccccacctctcttttttacagtatattatttccggatcactcctggcagcaacggagaaaaactccaggaagtgtttggcaagtaaccatatgtccttctttcccacatg

SEQ ID NO: 1326 - DNA, 121 bp, synthetic construct
  misc_feature 1..121: note = Description of artificial sequence: synthetic polynucleotide sequence
  source 1..121: mol_type = other DNA
gtgacgtccaatggagatgaaaggcagtagagtgtgtgatggtgcttcacaggctataaagtactacactgtggtcttgcccataaaacccctagggactcatctagatccagaggaaact

SEQ ID NO: 1327 - DNA, 238 bp, synthetic construct
  misc_feature 1..238: note = Description of artificial sequence: synthetic polynucleotide sequence
  source 1..238: mol_type = other DNA
ggtcaaaggaaaaatgataatgaattcattgagcctctttgctgccatttctggaatgattctttcaatcatggacatacttaatattaaaatttcccattttttaaaaatggagagtctgaattttattagagctcacacaccatatattaacatatacaactgtgaaccagctaatccctctgagaaaaactccccatctacccaatactgttacagcatacaatctctgttcttg

SEQ ID NO: 1328 - DNA, 121 bp, synthetic construct
  misc_feature 1..121: note = Description of artificial sequence: synthetic polynucleotide sequence
  source 1..121: mol_type = other DNA
tgtttttcagggcattttgtcagtgatgctgatctttgccttcttccaggaacttgtaatagctggcatcgttgagaatgaatggaaaagaacgtgctccagacccaaatctgtaagtagt

SEQ ID NO: 1329 - DNA, 220 bp, synthetic construct
  misc_feature 1..220: note = Description of artificial sequence: synthetic polynucleotide sequence
  source 1..220: mol_type = other DNA
gaacatagttctcctgtcagcagaagaaaaaaaagaacagactattgaaataaaagaagaagtggttgggctaactgaaacatcttcccaaccaaagaatgaagaagacattgaaattattccaatccaagaagaggaagaagaagaaacagagacgaactttccagaacctccccaagatcaggaatcctcaccaatagaaaatgacagctctccttaa

SEQ ID NO: 1330 - DNA, 121 bp, synthetic construct
  misc_feature 1..121: note = Description of artificial sequence: synthetic polynucleotide sequence
  source 1..121: mol_type = other DNA
acttggcagtgcctgggcctggcatgcctggcgtgccagggcagcggcagcagcagccggactgtcagtaaggagctggagaggcccccagagccctcctgttggggcactggtcctgggt

SEQ ID NO: 1331 - DNA, 121 bp, synthetic construct
  misc_feature 1..121: note = Description of artificial sequence: synthetic polynucleotide sequence
  source 1..121: mol_type = other DNA
tgggatacagaaattggggaaagtgaataggagagaggcagaaaggagggatgaacttgacgtagatcattccacctggaggtctaggatgcccaactgttggtgggcttttgctctctaa

SEQ ID NO: 1332 - DNA, 121 bp, synthetic construct
  misc_feature 1..121: note = Description of artificial sequence: synthetic polynucleotide sequence
  source 1..121: mol_type = other DNA
gggccttgtgctgggtccaattcacaagaaccagaaggatgatgtcgctcagactgacttgctgcagatcgaccccaattttggctccaaggaagattttgacagtctcttgcaatcggct

SEQ ID NO: 1333 - DNA, 121 bp, synthetic construct
  misc_feature 1..121: note = Description of artificial sequence: synthetic polynucleotide sequence
  source 1..121: mol_type = other DNA
agagtgggtatcctggggttcccaaggaaacagctagaaaggacttggccagaggaaaagtaggctagaacttttgtctggtttcctgctaactggctctgagttttcctagggcaggtag

SEQ ID NO: 1334 - DNA, 121 bp, synthetic construct
  misc_feature 1..121: note = Description of artificial sequence: synthetic polynucleotide sequence
  source 1..121: mol_type = other DNA
gtacagcagcaactaaatatctgtgtggaagaaaacaaacattaacccataccttatacactgcccagaaagctcaaaacggaccaaagtcctaaacgagttaaaactataaagcttctgg

SEQ ID NO: 1335 - DNA, 121 bp, synthetic construct
  misc_feature 1..121: note = Description of artificial sequence: synthetic polynucleotide sequence
  source 1..121: mol_type = other DNA
tgctcactgttttggtcaccttgtctctactcgcttcactgtgtgtctttctctcctaatgcgtgagtctgtacttgaacatagcattggaggggtggtttcatgtaggtaggtagaatgg

SEQ ID NO: 1336 - DNA, 6301 bp, synthetic construct
  misc_feature 1..6301: note = Description of artificial sequence: synthetic polynucleotide sequence
  source 1..6301: mol_type = other DNA
ctcgttttctggatggggaaactgaggctcagggagctcgcttgtcttctctacaccccagggtgtgctggggcagccctgtgcctgtgattctggggcccaagttagccccgcagcccatgtaggtggcagaacagcccagatgagcactggggccagagctggggccagctctcggggttgtggggggaaatgctacaggtcttgtgctaaccactgagagactcccagcccacctttgctgttcctttcatcccggtcccttggggggaggttctgggtcctgcccaaccaggcccaggagggtttgggactggccaaagcaggaggcaggataggaagcttcctctgttcctctcatggggatcacatgctcccgaaattgtccaagccatcttccttctcccagctcagaggccatctcttccaggaggtccacacacatcatcctggccaggaagagggtctcccacaccctctgtgccttggccgtcgtcctctttatcatgtcttgtggattcgttattttaatcagttattggccaaacaaacccctctcacacccgagtgcacagctcgtgccaacagcactgcaaagcatgtgatgtccccaccccttccacacggcattcaacacctgaccactccctgccacagccccagtcctctctggtccaagctgccctggcttcctgcaggggcatctccatggccctcgatctgttaacatctgagcctcgaccctgcccttcctctgctcaccctccaagggttcatctcagaggaggcagcaaagtcctctgcgggcctgcccctccaacctcatcttgcctctcccgaccctgttcctccactccagccgctatggcatccctgcagctgctcatacttttggggcagctgataccccaggcctttgccctggctgggccctctgcctgtgacgctctttcccagacacccatgtgatttgcttcctcctcttcttcaagtctttgctcaaatgaaggcctgcacaatgagccttccctggccccctatttatagttgcctctcccaatattttggagcacttggcaccatctgacatgctgggcctctgtccgtgagcaggccagcttctgggtggcagggatttgggctgtgcattccctgctctcacaccactcctacaaccatgcctggcacgtcataggaatgccaacaagccatgtagggtgaaggcgggagtagccctgtgggctgggtcatgcggtctcctacattgtatatgtgcagaagctgcagccacgaggcctgcttgaggttgcctggctcttgctcctgcgggtctgaacccagctagatgtgactgtaagtcccagctttccaaaggctcccactgccttaggtgcacagtgtgccacctagcacgggaagtggagcccgccaggcagcacctgggatacgggctgctccagggatgccctgggaggaggggatggggatgcatcccagggaagaggttcctgggctatgacgggggtgcaactcagcttcccctggggtcggggagtgggaagaccattctgagagtgggaacagctcttgcaaacatggccgacatgcaggttggggcagatttggtgatgagtgccttgggcctgattggaggtcccgtgggggtgggtggctgtggggcccccaggcagggcctgaagcaggcggagggggtgagtggggggttctgatgggccactgggagtggcctgaagtgcactggagcaggaggtggcattgtccggatcctgtttgaaagaccccttttctgatagaaggagggcagattgccgggtgagtcaggggtggtggcagctatctgggcagaggctagtgtggggtgggaggcgtgaggcagatgtgagagctcaaggagggagactacatgcagctcagtgacctgggtctcaatgtgttcccaggtttgcagctggggcaactggaagcaggagagggacctggagaaaggaaggcaaagaggtgggttccttttggggcacactgaggttgagctgcttaagagactcccacgggtgaggcagaagccttgagctgctgggttagcagctccgggctcaggggagatcttggccagagaaaaattctgggggtcctagtattcacatagtgacttcagcatggagggggcaaggtccctccagaagcaggtgtctggaggagagagggctatggcctccactccaggcccagctggcccctaacggaccctcccgcccgcagcacctgccctcagggccacagggggctgctggcacctggctcgctgggaatgctccagaggtcccctgtctgctgctcatgatttcacagacttggcaaccaggacaggattgctattatttttcaccagaaaacaatgtatggattttgggctcttgctgatgattctagaggaaaacagctgagaggatgcgtgttttcaagggaacattcctctttggactcggtccactcagtgtcctcttggaaaaccacagggagggctggaaacagtcttagactcacatgagggggaaagggagaccagatccttctcccagctctgcttgtggctctctgtgtgatcccatgaagagaggaggagcagtgactctcacctgaaatgctcccagccaaacatggcctaaaccaaacgggatggcctccctgcccctatcctggtcctccatgggctgtccccatctcatggaatggggccaagcctcacacatgggtgtcacacgtccttctggggattcctgtcccttgtatctcttgaatcaggctcttagattcttctgcttcattccatcattgtaacctccttccacgactctcaaatccgtctccttctccatatctccactgccgtccctatgttcctctctgcctttggctctgcacggtacgagcaggtggtctctgtccagccaatgtgggccctttgcacactggtgtgagtgcttctaagtctcgttccagctctcagttcggcctctcccaatctccttgtgtcttcccacagcatgtgggaaaagactaggaggacggcactggggccacaaagataagtccattgtccctgcactccagggatctgagccccgtgggcccccggcatgagtataatgtggaaaggaagcctgcggaaaggctccaagaggacggtacgttagaactgggtctcgagacatgggtgtctgggccgtaggggtgcagaaaccaggtcctgacttggcctggatgcaagtgccaggggctgttctgtctctgtcagctccaggaccattcaggggtggcacagagcttgggaaggaatgaataacagtcctggacattatgccaacattcagtgagtgcctactgtgtgatccagtagaccctgggtgatgtattaacttgccagtcctcccagtaacccagattagtcccagtctgcagacgtggaggtggaagctcagaacagttcggtcacttgcttgaggccacacagcgaggggggcaaagccaggccacctgctccagagcctaggcatggatgggggtggaggggagtcctgagccggggggttctttgctgcctttgggcagggtgggcacagaggtcccagtctcgctcttggccacgccgagtgctcccttccgctgactgtggctgtagtaccgacaggtgtctctattgatgctacagcccccacctttcattgtctctgggacaaaggctcctcgggctcctagctttgggacaagactgtggctgctccctgccattggctaggcctcccactggggcctcctgcccactacctccccatgccttgtggcaagcctgtgagtcagcgtacccatttcacagcagggacacagaaagcccctgaaaccagggactttcccagcacaagagtgtccaagactagaatccaactttgtctcggtccagccacctgcagagtgacccatgcggatagttgtcagcccttgctgagccatcctttgtttcctgttcatactttcccataagtcacagaatcctccaggcaacccagtgatgtaggcactgtcactattccttcctacagacctggaaactgagtcacaaaaagcaagctgctttcccagaccccactgctctgctaggtggaggccaagctcgtgtgtgaacccagaccgctgctctgaacttctccacaccacactgtgtagaggaaataagagctgggagacttctgccttcagggactgtgtttttccaagaagcctggaggaaaggatctaacatttattgagcacctactaagtgctggctgatctcatagcattactttgcaaagtgaatattcttcatcttattttatagatgaggaaatgagactcaaggaagcaatattgacttgttccaggtcgcctagctagtgaggacgcgaggagaggcaagactctccccagcctgggaccccagggaccctgctagtgaggacgcctgctccaagcctggcccctccagggaggctagctctcactagcagggcagcctccttccttctccctccttcccgcctcgggagaattaagtggtaaatgttttcaaagtcaactgtcaaaagaaaatggttagaggaaggaaatgtgcaattaggagcttcagagtaattttcatcgtgtggtttgagctcgactgtaaacactcaggaaggagagaacgcggctgtttcccccccggctggtttcctgccaactctgctgagtcccagaaccgggtgggctccaggctgaggcactagcagggaggccggtgggcagccagccttggactggggaggtgctgggggctgtgggacactcccattcccaagagaagcttcttccagcagaatgtgccggcattacagaaaggaaatattaacattataattataattctgtttatttaattaagttattaaacaggcccagcttggggcggggcaggggggagaaaaaaaaaaaaacaacccatagtttcattctaattgtttctcccaggatgtaattagagccttatagaaggagtcagagccagagaaggcaggggctctgccaggctgggtccaggcctggtgcacagctccgggcaggctgggcctgggggagtggaaggtagaggctggctgtgggaatgcagcctctatgagggctggaactcaggcctgtgtccccatgcctggcatgtactaggtgctcaagaaatagttgtggaataattgcctagtggactttgagcaagcagaaagggctggtggagtgactttctcagctgccctaaagacattcagcagatgatttttctagaagggatgcagcagcctcctcctggggctgctcttggccattacctctgctctgacctccctggtggcccaccgtggcttgcaggtgaccacaccgagcagcctgtcttagattgagaccttcacctcttccttctgtgccctggtcactgtgggctgagccctggggcagaacaaacaaatgtcaccagctcccaggctccagtgtggaggctgcccctgtgcatcccaaagggacgggagtatgagggccccaaagggttcaggaggctaaaacccctactccaggtcccccagtctgagaagccctttctgggaccttggaccaggcccagcagagcccctcttgagggggccaagggaggcgctggccctgaacagcctccagatccggtcctgtgcccctcgcgctgacagctgcccacaggctccatgcagaacctcccgtcagacgggaagtgtcttgttccagctggcacggctttatcgaacagtcctggctttgtaagtgtggacagctgcggggagaggagctggctctggggaggtgtgggggccgggtcgggggctagactggggaagctgaggagtgggaggtcaaagccagcagcatctgcaagtgggttgggggccatgaaggtttggtttagggggcatcccctggaaagccgagcccctaaacaggaagatgggatgggaggccaaattggggaatgaccatgaaagagagagaggtgtgtgggggggaagatgggaggggctgacgtggcctccagcgcttgctcagctctggtacagtcaagaagctgtcttcatatgggccacactgaggcaccacaaaaccaacaacttcagagagatggtagggcttctatatgccacctacccacccatccacccattcacccactcatccacccacacatccatccatc

SEQ ID NO: 1337 - DNA, 6361 bp, synthetic construct
  misc_feature 1..6361: note = Description of artificial sequence: synthetic polynucleotide sequence
  source 1..6361: mol_type = other DNA
ccattcgtccatccacgcatccattcatccatccatccatccatccattcatccatccatcccccccatccatctaaccactcattcacacacacacacatatccatccatccatccatccatccacccatccatccatccacccatccatccatccactcattcgcccatccatccacccacccatccacccattggtccatccatccacccatccatccatccatccatccatccacccacccttcggactcatccactcatccatccacccctccttgtacccatccatctactagtacatctatccatccatccatccatccatccatccatccatccattcatccattcacccatccatccactaattcatccatccatccatccatccattcatccactcaaccatccatccttccatccatccaacattcatacaagacttgcactagggcacatcttctactggcctccaaagacccagaaaataatcaaattgtccctgccctgttgggcatatatagacacttccagtgtgtatatatgagcagtggaggcaggggagacagaagacaaataaatccccctgataggtcaggaaacttctataactaagaagatgtaaacccacccactcaccctaagcctcaatttctcatctgaaaagtggggataaggtagtgcaatggtgaactgctatagtgttagatgagatgatagacacaaggtatttgttactgtgcctggcatggaaggtgctaagtaactgttatgattatttttagcatcaccatttccatcattattctctctgtctgaagagaataggaggatgagagtgggcagtttaggaaagccttctcaagtggggtcatttggactgggtgttgaaggatgagtaggagttcattgggtactagtattgtgcttccccactagcagcccacattcatactacactcatccctgcctttgcatcatacttctcacccttactcctcctccccaaggcccccttcctttaggtccacctctaaccctaactcctccaggaagacttcttgcctaccccaggcattatcttgctccttcctcttgtcttgtggcacaaagatcacaccacacatcaggccctcagaacttcattctgaattttgaaatgcttcagctgactcttcaggatggggcagagtcttctcctcaaatcccttatatctggagcctcagagctggataaatttgttgactctgccccaggggacagccaacagtgaccagggcacagaagaaagaggtgaaggtctaaatctaagtcccaagaaggtgtagacctatctacaaacaggagcagcctcctaggactttgcctgcatctgcctacaaggttaatgcagttcctacctggagcagctcacagtataaggaacagagggaagaggaggacaaggctgggagtttctctagcatagatttcatgtcctggttaaacttgggtcttcagcaccaagcacagagtgggggctaagaatcattggatggatgggtatgtaggtgtatgtgtatggttagaaggatgcatggaaggataagtacatggatggatatatggatggatggatggataatggttggataaatggatgatggataactgaataggtgggtggatgggtgatggatggacagttggatgtgtggatgatggacagatgattagatgaataagtggaaagttaaacaatacaactagaatctttagattctgattaaaccatagaagcaggaactttgagactgtatagatcaacccaaattaatttacctgatcagtgcttctgagtgtctctttttgccagatattgtatgaggtgctggggataccacagggaacaagatacaatccatgacctcatggagcttggcatctagttgagaagctaggaaatatgcaaataaagcccaaacaaaatgttttaaaggtgatgactgcctgaagcttactggggggcactttagttaggggcatcagggagagttgatgagaggataagattggaactgaggactgaatggcaagagtcagctgtatgaagatctggggaagacatgagaacagtaagtgcactggtcctgaggcaggagcaaagttggacttgttcaataatgtaaaaagatttgagtacttggagtggaataagagagggagctgtggcctgaaatagcaatagagaaacaggacagggcagatcacactggactttgtaggccatggccagaggcatggattttgttctgtgtaggttggaaggcacaggagggtgttaaacaggaggaggaatggtctgagttctgtaaaggatcactgtggctactccatggggctatacagaaaggcacgtgaggggaaagcaggaaggcagtgagagggcatcaccatggaccaggctagagagggaggtagtgcagctggggagatggggcaggttcaggacatgtttgaaggcacagacaacagagttgatttatgatttggctgttggggagaaggatgcttcccagccgtttcacctcagcaactggactggcctaaccctaaccgtaaccctaaccctagctgccacccaccccctactcctctgctgagactcactggagccttgacctcccaggttcaaatgatcctaccaccaattgctatggtgatagagttgttgtttctgatgatggtggctgtggtagtggtttatttcctccatcagcaggctcttccaccatgacaatgagccatttccagccattttcagggactctggaagaaattggcttgaagaacagctggacacacatccagtctcagagcctagaggtgaagcacacggactctggagtcagagagacctatgtttgaatcctggtcctaccactttctctctcatccttatgttagtcacttgacttctttaggtctctgtgttgtcacctggaaaatggaactttccacctcctcgggatgttatgatgatagatgtaacaagctcagcacagtgcctgtacaggtgagagctcagataaagactctgctgttaacaattacctctcctctgatggggagtttatcaccccatctcagcagccctgctcctgttcctagttccaacaggccctgggaactgggttgccaagaccagctcctgacagctgccacccaccccctacactcctctgctgaggttccggagcctaggggcatggggcattgcgaaggcctcactgggtttagaatcgagcaagattatagagcacattttgcaagagtgggaggaggtggaagtagcccaattcatagtagctttcccaacccgtggctctaattggcagagaacatcccctaaggcacctctatgctccatgaggagcttgtaattaataggtggggatcctgaggggcaaggttgacaaggctatgcttgggggatggagccctctgagggacgggattgaaagggtgtttgcagtcacatagcctgtctagggatcagtgtttgtttgtttgtttgtttggttggttggttggttttacctccccagtggggcataggctgaagtaaggatcacaccagtgtccacaggcttcctgcatgagttcctccatccttacctctgtactgatgacttgcagacctctctcccagcctggcctccctcctgaatttcagagtcatgtctcccagtgtatgtgttaatgtctctgtttggataccctacagacatcatggtgtgtttcaaactaaggaattcattatctcattcagtgactttttcatttcagttgttattttcagttctagaatttccatttggttcttttgattgtagtttttgtttctctgcttagagtccttatctgctcccttatgacaatcatattttccattaatttgtcaagcatatttttctctaacttttttggacatatttattattgctgctttgaatgatttttctgccaaatctgttattcgggctatgtcaggattggtttctacggatggtttttggttttccttttgcctatgagtcatgttttcctgtttctttgtgtgtttgataattgttggattatattttggaccttgtgggtgataagttgcagaaactctggattctgatatcctgctctgaaaagggttgatttttattccaggaggcatttcaattactggtggattacttgagtgtgtgtagtcttggtcttattatttgttatggctgatctgtgggaagcctaatgtgtttcccaaatttctctcaacttggtgagcatccagctccaatatgcaaatctttttgaggcttagttctaaaggctttgttagagaagatctacagcaggctttactcaaggatgtggaccttattactaagatgaggcttttctggccttgcagatagatgcctgctgtgttaatgagttctctgtactctggttaggaaagaactccaaagtccccgagcactgcttgacatctggaatctctgtttcactctcaacgttataggagtcattcttcattaagcctgaggtggtctcaccagcaggcagggcccctcagctggacttcttcctccttcccctatgcagctccctcttctccaaggccctgccttgaagattctaggtgcttcagtgatacaggttgaatgtttgtaccctactaatctcatgctgaaaggtaatccccagtgtttgaggtggggcctggtgggaggtgtttggatcatgggggtggatccttcatgaatgacttagtgccatccccttagtgatgagtgagttcatgtgagatcttgtttaaaagtgtgtggcacctgccccttctctctcttgcttctgctcttgcatgtgacatacctgttcccacttcaccttccaccatgactggaagcttcctgaggccctcaccagaagcacatgccagcactacacttcctgtacacccagcagaacagtgagccaattaaacctcttttctttataaattacccactctcgggtattcctttatagtaaagcaatggaccaacacattcagctattccagactctagtctctgtccgctctgaacacagtgtgagggccattgtattcaatgtggatcccagctcactgcaccctgattgtgaatttgtccccaagcacagatccagggagatcatggggctcatctcatatttttttcttcttcttttggggattgaaagcttgttctgtcagggatacaatgttggccttctgtattctgtccagtcttctgattgcttatagcttaagttactatgccatgaccagacatgagcaatgcatatctttacccaaaaccttcctctctcatattcttcattcactcatttctccaaaatagaatctttgccaccgccctctctatcactccctatgggcgattcatcagcaaaattggctcctttgacatttcactggagcccttgagtctgtcaaactttccttctctcctccccttgcccaggtccaggtcactgcctgtcttcactaggaccaaccaactgcctcctcgctggccgccagcctccagtcttgctctgttctggtccattccccacccagcagccagaggccccctttaaacctacagatctgatgttggctgtgccttacataaagccctgaagttgtagtcttggctggcaaaattcttgaaatctgcaacccccacctagctctgtcccccttttattgtcacttccccacattcctgccacatggatctatttgcaactcctagatgccatcagaccacctgttgtctgggagcccttgctccaagtgtgactgctgtccctggatattctgtctagcaaggtttccagtgtagtccattgtcacccacactgggtggccttcaaggccgagtgaggcctttctctatgtgcaggcacagtgcctgtgtttcctccctcagcaggctctgagctccgctaaagcagaaagggaggtgggttcaccgcacttcccagagcctggaggacacgctcccttactgtctgacgagggagtcaatgtcaaaggctacagaggggcaggaaggcggaggtgtttgtgcaccacgatgctggacgtggagcctggggacttcccaacatggatgcaagctctgcagagggaaggggtgctctacaggctgaccactggcaacgactctgggcgttctgctggcacccacagggacagtggtggtgagttctgctccttgcaagaaggcagtgagcacagcccaggatgaaggggtgcgtgtagatggggccatgtgcacgttggtc

SEQ ID NO: 1338 - DNA, 5221 bp, synthetic construct
  misc_feature 1..5221: note = Description of artificial sequence: synthetic polynucleotide sequence
  source 1..5221: mol_type = other DNA
cagtcaggaggaggagggaattcacagactgcctgtgcaaaggccctgtggtcagaaagaatgtggttcattccataaactgccagaaggaccagtattagtggggagagatgagtgtgaccaagcaggaaaatgtagacattggtgatgagctgtgtcctaaagtccagacaatggggagatcttgcagggtattaaattgatacagtcacatttagtggcttagacatccctctgaccacagtctgacctgtcatctgggggtaagaatggccgtaaaaccctcactccccagtcattgtgatgtggttgccttggaatccctcctcagaattccctcctcaagatccctctcaagatccctcctcaggatccctcctcaggatcccttctcaggattccctccttaggatccctccttaaggtccctcctcagaatctcctcctcaagattcctcctcaggatccctcctcagaatcccctcctcaagatttcgcctcaggatccctcctcagaatcccctcttcaagattcctcctcaggatccccactcaggatccctcttcaagattcctcaggattccctcctcgggatccctcttcaggatccctcctcagaatctctcctaatgattccctcctcaggatccctcctcaggattcctcctcaggaccccctccctcaggattcccccctaggatctctcctcagggctccctctcaggaagccagcatgtccagttggtttcatctggaaaccaaccccattgctaggcctgacttagaaggacatgcaagtgacagaaacagcaaactcattatgaaagggatgggggaggaggaagaggaggaagcgacgaggacaggaggaaggaggcagcgccctgaggacagccgaggctgagggccctgtggagtctgggaagcctagagagcggagcagctggggcgctgtcctcagcccagctgtgggtgcaagaccaccgggggcctgcagagcccccagaagcatgcttgtgtgggggtggccagagaagggacatgaagagcgagggggtccacatcgggggggctcagtagggcgtagggtgtggggtgggtgtggtgagcaagacagaggccacagtggggaccaggaagggggctctgggcagcaggatgtgggggggcccggggcaaatgctgactccgggatccctgggcaccagcagccacgccagccaccccacccctcacgtgcccacagcaggctgggcacgggcagcaccgagctgtgctgtgtaccacactgagatgtttaaatgacggggtaaatgcactctccccctccctcctgctgccagcattcctgaggccgggcctgggttttggttaccaggcagccgaggagccagagggcacccccgcaaggcagcctgagccagaaactgctgacggctctttttctgcagcagcaatttagcaagtcccaactggtgacctcggttagcaacaaggaacgtggaaaatactcaccatcgtggatgactgtgggccgacgtgcatgtgcatgcgtgtgcatgtgtgcatgtgtgtgtaggggtattgcgtgtctgtgagtcagcctgtgtgctgtgtgagttggtcaagggcacccatgtgagttgatgagcatgcacacccacatgggagcacacacgtctttgcccgtgtgcactggggcatgggcctgtgtttgcagggcgtgtgcctcgtgtggcctgcagctacagtttggtgtgcacctgagctaacatgcccaggcacctgtcagggcacaggtctctctgtggatatctgggaacatacatgtgtgcacgtgtgtacttgcacagacactctgtgtgtgggtgtgggtgcctgggcgagtctgtgtgcttttgtgtctgggcatgtgagaatatctgtgtgtgctttcacatgagtggtgcgtgtgtttgaggaaacgccctgctctcaccagagtccccatgtggggcacaggacccagcatacggaggggacacgggaggcactagaatgtggagggacattagtcagggttttccagagaaacagaatcaatagggtgtgtgtatatagaggagaattatattgaagaactggctcacacagtgatggaggccagtgagttccaggctctgccatcaggaagctggaggcccaggagggcctgtggtgtggttccagtccagaggctggtgggctctaaacccaggaggagcccacggtttagtttgaatctgaaggcaggaaaagaccagtggcccagctcagggaggcaggagaatccccactggcctgggggagggtgggcccctgtgttctctacaggccctggatggatggggtgaggcccatccctgggagtgggggtaggggggcacactgcttattccatctacacatcgttgtgctaatcacatccagaaacaccctcacagacacacccagaatcatttgacccaatatctgggcaccctgtggcccaatcaagttgacacatacagttaaccatcataggtaggaagatggctggatgggtgagtgggtggataaacgggtggatgggtgggtgagttggaggcagttccagggaggtctgtacccactgggctccctgaggcagagaagggatggtaggaagaacaggtccatctggggagtacaagaggaatttgccttattatcattctgagagaaacccccaaactggagaaaattctagatctgtgtaacatggtcagtagctcaccccatgtagcaagaaaaggaccagaaatgccactgtcttctctgagacaggagcatgcatgatgcagctgcccacaccccaccccaccccagagccctgcctagtgggtcctcaaactgcactatgcttccttcagttccccaggagccaaaaccctcttcgcctccagatctttgcctctttcccccaccctgacccttcccttcctgtggctgcttccccgtgatcctttgggttatagcgggaacaactccctctcctcctgcccacccccaccggttctcaggctgggtgggtgccctccctgggggccgcccctgccctctcctggcactgcaggatggtgaggggtccagggcccgacagtgtgctcaggttccaggcctgccccatcctgagccagcagcaccccatgccgccgtttccttgtttgtgacaagtcactcgcagtgttgcctggaagatcccctgagtcacacgtgaaatgtgttcagcacagggcctaggagaaagcaaagtcgtggaaaatgccggcaattcccacggtcatgactgcggtccttcccatgctgcatttccacacaaggtgaggtgctgtgtcctccaggcctggcactctacgtggctcctttgagggtagagtcccctcagaggcggcagggactgagtgaagcgacctgtcttgcctctgtcctggccttgcttgcaccccattttcctggaggctgccaagcagaagctgcaggtgttccctgctggcacaggcgcctgggaggctgttggccctcggagcaggtgccaggccctgtggttgggatcagggatgagctccgtgtcagggtaacatgaacttcctaggagccttcatccagaggagggagcctcagcaggcagcgggcacctcagacctgccaagtcagagaaaagagagattcagagagagaccgagagtgagacagaaacagagacaggatgcgagaaggagagatgacactggaaacacaaaaaccaagtaagtcagagcccggaatgcggagaggcagggctggaggggaagggacaagggagggggaggagcaggtgacacacatgcccacagccaaaggggcatggcctgtccactgggaatcccacccgattcccacctgccaagagaatgccagtgagggctctaagagggacagcaaaaatccactcttgaggccttttgcagtagataaagtaggtccacttccaggacctcctgttgtgagacagaaagtgagatagcaggaggtgttggcaggaggatagaaaaacccaaaaagctgaaacaggaactaggcgaagaaaccacaagataacagaaaacccaaaataagggagagaaaacggcctgagccacagcggtcagggtgatatatccaggactcttccaggcaaacccaaattagagagaaagagggcagtaaccagggggcgtccctgaaatcccctctttttccagaacacctgatgattccaccctttaattaaagaaacgtccacaaaattagaaactcaaacttctcatgagtacactgtgcttccctcttgagtgtgtactttggatttgcaataaaagctccttgcctttcgcttcacctgacttgtctctaaattctttcttgtgatggtgtcaataacctggaaactggctggggctggggtttcaccagcatccagagaccctgataagtctcccagcaacagtctgggcaggtgaatttatcaccttgactggaaaggcagagacccaagcctagaaggcagagggccttgcctgaggtctccctgtggcagcagaagctgaacgctgagccccatcttctcacacagagtggatgccgtccaggccatggggactgcagagctacctggctgtgaggtccctaggctctgggacttgaactgccatgactccaagaaccctccacatgagaacagtggggaagaggaagccaggcatggcggaggatggctctgaccttagagtttcagtcaacagtaagctcaaaatgaaccaacaatgtcacgtgtctgccaaagaggtggtgtggaatgggagattacagtaacagaagatgagacaccaggttaaagacttgagagccctcccatagctctgtgctgagaggagcaaagatagctgggtcttgttgtggggctagcatagcaaggacattcagaaaccccatgctacttccaccagaaggactatactgacaaaggccaactaaaccaagtgttggagacaatatggagcaactggaatgctcacattcagctggcgagagtaagtggcgctcccacagtagagaaaggtttggtggtctctacaaagctgcaacatgcctaatgatgtggtttggctgtgtccctacctaaatctcatcttcagttgtagctcccacaattcccacatgtt

SEQ ID NO: 1339 - DNA, 1561 bp, synthetic construct
  misc_feature 1..1561: note = Description of artificial sequence: synthetic polynucleotide sequence
  source 1..1561: mol_type = other DNA
tgcccagtctcaggtatatctttatcagcagcgtgaaaacagactaattcacctaccctatgtctcagctacttcacccctcggtaaacacgcaagaaacacacatatatgtgtcccaaaagacatatatgagaatgttcttaacataaaaagcccatcagtagtggaatggataaatggtggtatcttcatatgatgatgaatctgatcaatgatgatgaatggactatgttacacataacgtcatagatgaatctcactgataccatgttcagtgaaagaagctaggcacaaaagagcacattctgcatgatcacattaagtcgagttcaaaacaggcaaaactcatctgtggcgacagaagccaggctggtggctcccttgcagggtgcgatgactggaaaggatgctgggcttctggggaggattctggtcaacctctgtctcaagctgtaaacttcgatttgtgtacttttctgtctgtgagtcatgcccttcaataaagcatgtgctataaaaatagcagaacaggagctatgaggaagatttggaggaattcggggtggatggtctggggacgaggcctcttgggggatgtcatactgtctttgagcatctggaggtgagtcccatgaaaggacattcacttttgtcttcacaactccatggaggagaacaggccccacagttggagctggtggggtcagggagatgcagggagactgacttggggaagtaggagaagaactttctggtatgcagaactttccaaagagaagccatccgtggctccctgtcaagcttcagctgtgtgctcccctgtaggggctgtgaacatccgaggcccccccacaagcccaggtgcaatgacctccacttagtctgtgcttcctgctaagaggtccttgtcacatagtgaggaccctaaatttcccagccagggcagcagagctcaggggtccagatggccctgcgtccaaccctgcccagcttctctgctaataaccattattatcacaaggagagcaccagcacaggtggtacatttcatgtcttgtgctgagacattgcttcaaacccaccagtttataacctttggctgttgcaggcacatgcttgaagcagaaggcgggagggaggagcttgaaccaacagcctcctttcattattattattattttgggggaacaatccattcctgtaacagatttacttctactttttattgtggtaaaatacacataaaatcatatttattattttaatcatttgtgagtgtacaattcagtgtcattaaatacattcacagtgttgtatgatcattaccatcatcaatcttcagaaagttttcatcttcccaaaaggaaactctgtacccataaaacaataatcttcctctccccctcctccagccctagtaacctgtattctactttctgtttatgaatttgcctatcacaggcacctcatatttgtggagtcatatggtatttgtccttctgtatttggcttatttcacttgatatatatatatatatatatatatatatatatatatata

SEQ ID NO: 1340 - DNA, 541 bp, synthetic construct
  misc_feature 1..541: note = Description of artificial sequence: synthetic polynucleotide sequence
  source 1..541: mol_type = other DNA
ttttagtagaaacggggttttacggtgttggccgggctggtctcaaacccctgacctcaggtgattcacccgccttagcctcccaaagactgttgccataatgtttttcaggtccattcatgttgcagcatgtatcaaaatttcatgtattttcatagttttcatagttgaataatattccattgtctggatgtattatactttgtttatccattcatctgttgatgaacacttaggtcgatcccaccttttggctctgaataatgttactgtgaacactggtgtgctttcagttcttttgagtacgtatctaggcatgaaattgctgggtcatatttagttctatgtctaagtttttgaggaaccaccaaactgcacaaagcttccagtttctccacaccctcaccaacatttgctattttcctttttttttccttcaagtaatagccaccctagtaagcatgaggtggtatctcattgtggttttgatttgaatttccctaatgacttttcctatgcctgttggctatttgtatatctt

SEQ ID NO: 1341 - DNA, 301 bp, synthetic construct
  misc_feature 1..301: note = Description of artificial sequence: synthetic polynucleotide sequence
  source 1..301: mol_type = other DNA
cttgtgatctgcccatctcagcctcccaaagtgctgggattacaggcttgagccaccgcgcccggccatcttctttaaagaaatgtctctttgtgtcctttgcccattttgaattgcattgttggtttttattgttgttgagttgtaggggttgtttatgtattctggatattaatctcttctcagatatacaatttgcaaacattttcttccattctgtagattgtcttttcacagtgtgtgtcatttttttgcttcattttgtttttagagatagcatctctctctgtcacccaggctg

SEQ ID NO: 1342 - DNA, 1141 bp, synthetic construct
  misc_feature 1..1141: note = Description of artificial sequence: synthetic polynucleotide sequence
  source 1..1141: mol_type = other DNA
ttgctaattttttttgtagagttagggtctcactacattgcccaggctgttctcaaactcctggcatcaagcaatcctcctgcttcagcctctcaaagtattggagttacagatgtgagccctacaccgagcctttttcacgttttaaataatgtcctttgatgcaaaaaaaaatcttaattttgatgaattccaatttatctatctcatttctttcgttgtttgtgcttttgatgtcatacctatgaagttgttataaaatccagtgttaaaaagatttttccagtgttttctaactaagagttgtatggttttagctcttcagtttaggtctttgatcctagttaacttttgtatatagtgcaaggtaaaagtccaatttcattcttctgtatgtgaatagccagttttcccaacaccatttattgaaaaacctattctttccccatttgagtggtcttggtactcttgtcaaaaatcaattgatcatatatgtgagggttcatttctgagctatctattctatttcatcagtctatatgtctgttcttatgctagtaccatactcttaattaatgtaactttctagtaatttttttgaagttgggaaatgtgtgttctccaactttattctttttcaaagtaattttgacagtttggggcaccttgcaatttatacacatttcaagattggattttccatttctgtgaaaaaggctcttggaattttgataggaattatgttgtatctatagaacattttggatagtattgacatcttaacaatgttaaatctttctatctgtgaacatgggatgtcttttcatttatttagatatcctttcattctgttcagcagtgttttgtagtttttagcatgaaagtctttcatttctttggctaggtattttcctaagtatttaattattttaaatgctattatatatggaattgctttcttaattttcttttcagattattcattgctggtgtatagaaacgcaacagacttttgtgtgctgatgttttgccatgcagctttgatgaattcatttattagcctagtcactttcttgtgtattctttggaattttctttataaaagattatgaggccaggtgcagtgtctcacagctataat

SEQ ID NO: 1343 - DNA, 3541 bp, synthetic construct
  misc_feature 1..3541: note = Description of artificial sequence: synthetic polynucleotide sequence
  source 1..3541: mol_type = other DNA
cctggtcaacatagtgagaccttagctctatactttttttttaaataaccaagtattgtggaacacacctttagtcccagctgcttggaaggctgaggtgggaggatcgcttcagcccaggactttgaggctccaatgagatatgattgtgccacaacactccagcctgggtaacagagcaagaccctgtctctataattaatgaaggaagcaaaggggaggtgaggggaggggaggggatgtcatctgtgaatatggatagttttacctcttccttcccaatttggatgcctgttattactttttcttgctgaatggctctggctagaactgccagtacaatgttaaatagaaatggcaaaggggatatctttagcttgttcctgatctcagtgggaaagctttcaccccttcaccattgaatatgatgttagctatagattttccataaataccctttatcacgttgagaagttttccctttattcctagttcacttagatttttatcataaaaggtgctgagtgttttcaaatgcctcttccacatcaactgtgatgatcatgtggggtttttattttcccttcattctattatttttttatttattggacttaggatctcactctgtcatccaggctggagtgcggtggcacaatcagagctcactgcagtctcaaactcttaagcccgagtgatcccctcatctcagcttcccaagttgttgggattacaggcacacaccaccaagcctggctaattaaaaagaaaacaaaactgtagagatgaggtctcgctattttttccagaccggtcttgaaatcctggcttcaagcaatcctctcatcttggccttccaaagtgttgggattacaggtgtgagccactgtgctcagccccttcattctcctaatgatcaattatactggttgattttcttgtgctgaatcaccttgctttcttgagataactcccacttggccatggtgaataatctttttaatacgttatagaatttggttagttaatattttgttgaggatttttgcatttgtattcctgagtggtattggtctgtagttttcttttcttatgatgtccttgtccggctttggcgtgagagtaacgctgacctcatggaacgagttaagaaatgttctgtcttctgcactttcctggaagagtttgagaagaattggtattaattcttctttaaatgtttggtagaattcactcctgaagccatcaggtccagggctttctttgttgggaggcttttgattaatgattcatgcttcttactaattgtaggcctattagattgctatttcttcttgagtcaggttaggtaacttgtgtgtttctaggaatttgtccatttcttctaggttatctaatttgttggtgctcagttgtccatagtatttattatcttatcatcctttcatccctgtaaggttggtagtattgtctccactttctaattttagctatttgtgtcctacccttattctggagataaataacttggtcattacccactaactatactgaaaacacagttctcccctgaactgagccaggtgaaagttattcccatcccacgcctgcccagggcttccatgagcagtttccatttctgtcctcccgccagctccaggcatctctgctagtacttgttgatgaccttgggttgaacctgcctcatctggacccctatctgccccaatgagggggttggggggccctggccttcctcacacctgtgttctatttccaagatggagagtggggccccattcctggggatacccaccttgtggaggggcaggagagggactctcttcctgaggaagccctgcttagagctccacaggattctctgccacccccagcacatccttctgcaatgcccctttacaaagcgtcatagtcatgtggggtgagaagggcttattcaggcaggaatccactgtctctccactgtcccaaggaggacagacctgtgaatctttgggatggtgggggaagtaaaatgcttgttcttctcaggagttactacataatcgttcaaaccactccaaatgcaagaactgggcattacagtatcattggctttcttggtggggccaaaagccatgtatttccagacatttaacttgtaagatggggaactctggagtccaaagacccctcctcacataaccctgagcccctccctgcctctccttggctatcactccctcccaccatagcaccttaggtggggactcacagggacctgacaaaatgcccgcaacggcacctgctatgcacacactaatttagcgtgttgcgaaggtggcattttaatccttagggaagatgggacggtctaattaggggtccgggatccgttaaagcgaagtcccagtctcatcactgattccagaatgaattcctggggcctctgcccacagagcacctccctgcccctcgcctggaacactgatccgcaaccactgtgtgcttcaaccagaccctcctcaagtgtctcaagtgtctctgcttgaacgagacttcccctccccactctccttcccacgtctaaaatgtcccacatcctgccccacccagctctgtcccctgcctggcttcatgccctccccgctgctgagcttatctcatcctcccatggttggttgattcttctttcactatcaagctcatccactgctgaatcctcagtcttggcactgggaatgaatgaatgaatgaatgaatgaatgaatgaatgagcaaacccagggacacatgagtagttggaaaatatagaaccatataaaagctaggacaaatgtgtgtcctcatgtaaaagctaggacaaatggggggacccatttacagataggaatgagaccacaggagcatgcacacctaaggtatactgtcccgtcaccctcccaccccatcacacccgccatcagccctcccacccccgccaaaggctccagtcctgggcgtctcctgccagtgcagaaagggggctgtctgactctacagctgcagcctcctgtctgggtgacgccacacctgtgggatcagaggaggaagggtctggacattgccaaggctgtggccttctctgtctaggtggtggtccagggtcctctgaactactgggctgtgacatccacacagtgtctgctgagctgggccaccttctgcagagagagagcagagcaccccctttctgtaggctttgctgaacattctagggtgggatcaccctacaggccatttctgtcccccagataccccctcaccgaagcctcccccagtgaagcaggtacaagcctgagggccgcaggttcaccacttctccctgcaacgaaaaacgccacattccagctgaggtgctgctgggccccagctgcagaaacagaaatgcacagttaaccaagctctagttaagaaagatctttctgaacttaaaaaagaacaaaataagatcaagaccatcctggccaacatggtgaagccctgtctctactcaaaatac

SEQ ID NO: 1344 - DNA, 1021 bp, synthetic construct
  misc_feature 1..1021: note = Description of artificial sequence: synthetic polynucleotide sequence
  source 1..1021: mol_type = other DNA
actccagcctggcgacagagcaagactgtcaaaaaaaaaagaacaaaataatagtgaccaaaaagaagttcaagacatttgatcatgaaataaaagtctctatattaagaaaaaaaccaaactgattactcaaaagacactgctaaaataccacaacgcagaaaacaaaagattaatatattgttatatataaaaagcgcttaaaaatcaacaagaccaatgaccactagatgactgactaaaagctacataggaatttcatgagcaaaatacaaatggttgataatcctatttttaaaaaggtgtttgttctcactagtaagcaaagaaatgtgatttgcagccattatagacaaaatatccttactcagcagtgttgatggccgtattctcttacaacgttggtgggaatataattgctaccagctttctggaggacagtttggcactatgcagctagacttcatatctaacttctaagaatgactctaaaaaacccttctgcatgtgtgcaaagacctgtgtgcaagtaggaacatcacagcacttcctgtaatgcgtaaaagctggaaacagcaaaaacaggtcattgatgaaacatctgctctataaaacattattcagccattaaaaatcatgtttcaaaaatgacttaacactatggggaaataatcacggtctgttaagtgaaatgcaggagacaaaactggtaccgcaatatgatactgattacataaaatgaaacgtctgcatacgcataacaaatataccacagtgaagcataccagcctgtaaacacagacactgagcagtttccaatgctccaaatttttcaagttttctacaataagcatgagctatggtgaactttttctttttgtttgtttgtttctttcttttgagacagattcttgctctgtcacccaggctgagtgcagtggcactcaaagctcgctgcagcctccaccttctgagccaagcgatcctccaacctcagcctcccatgtagctgggactacag

SEQ ID NO: 1345 - DNA, 301 bp, synthetic construct
  misc_feature 1..301: note = Description of artificial sequence: synthetic polynucleotide sequence
  source 1..301: mol_type = other DNA
aaagtgctgggattaaaggcgtgagacactgcacccggccaaaggtcttgttattattatctttttgaaggctatttaacaacacagggctgggcttatgataagacatttaacgaaccaaatatcatacgagatagacagatagattaataggttacctctgtgtggagtaacaggccatttcaatttttaaatgatcctctggctggcagcagagctggggagcgcaaggcggtgctcattaatagcagttggggccgggcgcggtggctcacgcctgtaatcccagcactttgggagg

SEQ ID NO: 1346 - DNA, 961 bp, synthetic construct
  misc_feature 1..961: note = Description of artificial sequence: synthetic polynucleotide sequence
  source 1..961: mol_type = other DNA
aaaaaaaaaaaaaaaaaaaaaatagttggctgactgaatgaatgactgaatgaatgaacgagtactttgctgtacttcctggatttcctacactgaagtgtagtaaagaaaaaagatttttaatataaagaagaaggcactccccgaactcatcaataaccctgtgtgcaatgttaagggcccatcctcttgctttcctcagaaacacagaggcacctcccataggaatcaacgtgtaaaatttgcaaaccctttaatccagaaatcctccctccaggaacttagcccacagcgctattcgcatgcgtgttaaaggacacgtgtccaaggtggctccgtacagagtcgctgataagaggagaactgggaacagcactcacgtccatcaacatgagaatggtccctaaaatgatgatgcaaccatgcaggggatgctgccaggcaatggagattatgccctgctttctgtttttattgacatgcaaagatgacctcgctgtaccaatctgtgagcaaaacaggtttcaggaaagcaggtctagaacaatcccattttttaagcagccaatgtatatctccatgtgtctctaggcatgggcagctgcccacggggtcacctctagccctccaagtagtgttgggtggtgatggccgtgttctcccctgcacacatggcatgggttgccagcttggtcgtacccattgcaccactctactggcctcacccctgcccagtagagaccagcagctccttccacagagacagcatgaggcccagagagggagtgtgtgactccaagtcagatttcccaatacctgcatgctcttacctcggccctaaggcaggcccagaggtgatgtgaggattcacaaccagacactggaacactgagatattttttaaaaatgtgtttgggccgggcgtggcagctcaaacctgtaattccagcactttgggagg

SEQ ID NO: 1347 - DNA, 3841 bp, synthetic construct
  misc_feature 1..3841: note = Description of artificial sequence: synthetic polynucleotide sequence
  source 1..3841: mol_type = other DNA
tcgaatcatggaggcaggtctttcctgtgctgtttttgtgatagtgagtaaatctcacaagatccaatgattttataaaggggagtgggagtttccctgcacgcactctcttgtctgctgccatgtaagatgtgcttttgctcctccttgccttccaccatgatggtgaggcctctgcagccacgtgcaactgtgagtccattaaacctccttcctttataaattacccagtatcaggtattgtctttattagcagcgtgagaacagactaatacagtacactacaatttagacttctagtgactatacctggagccccctgttctccacctctctctcacaggtacacacacaaccatccacttattgaagaggatgagcaagggcacagcctcaagcccactgcctgtgtttgaattctgagtggtttgctaactatgtagatttgggcaaatcacttaaaactcgttttcttgtctgaaaaattgatagtaaaggtgcttaccttgcgggctattgcaaaggacaaaataaagtctagtatgtgtatttgttcgtcactgcatttccagagcctagaacagggcctggtgtgcagtaggtgcacaatgcgtgtccgtggaaccagcagcaggccctctacctgcctgccagtgcaggcactggtcagtcaccatgacaaagctgatctgcctgcccctcacacacttgctccccaatcccttcacttggtgacagccttccccgacacccttgggcgcccggcccctgggacgcctgtggagctgttggggagaaggaaatctgaggcccccacatcctgacccaggaccagctggccttgcggattccagaactttctgaagcagccagccggccaccagccaggaagcggaaggtgcagaaatagaaacgcacagagaggcaattgctccttttgccctgcaaggaagggaagccgggggagaggggccaggagaggaagctgaggggcagaggagaggatggggaggccaaggacggcgggatggggttccagagcttgccggacctcggcccccgcctgctcccatgtccagtgccctgggtcagggctgtggggagcagctttcaacaccttcattttcctgacaagatcccaaaatgaggagctctgatttgctctgaatgcgacttgaagccaggccccggggaaagtatttgtggcaactttcaagggttgatgctgtggctggcagcagaggtggggggcaggaggggggtgctcacaatggtcgttggctgactgactgactgaatgaatgaatgaatgagtgagtgagttgtggccagccctataccccagcagagccactgggcttgaggacaggaccctgcctgctggccacgtacctagacagccacagacagaaaacacgcttagcaggctgcactgaggcggagaaatgagatctggccccagctcagctctgctgcatcccaggtcatccgaggatgtcactggccttctcagcctcacaccccttcctcccagtctggggtgagaccctcacactccacagagcgtcaatgggagcccagggcgagcctggctggtactggcctactgagacctgggcttttcctgtattctcccacgcagagtatagcaggaggccccccaaaagtgtcctctagtccagactcccccactgcagccagcctacattctagagctgacatgggccaagaccaggaaggaagggccaccttccctgaaggacactgactcctcaacccctgtgctcagccgaccttgcgaagttggaaacacactgccctcctaggctgagctgagcccttcccagctcgcagcccagcgggtccctgaggtcccatagagggggctggcagtggcttcttccaggcagggccccaatgcccaccacccaccttggaaggtctggctggaggggtctctgaggacagggaccatgacaaggttccccttgcctcccccatgctatggccctggccctcctgcagagcccacggtcctggcaggggccacacaggatccctgcacccgtggcccaaccacaggctcggccaccatgcacacggcacaagcatctgctccctggccttcctgacaggcagcgggcgccctggcactggcgggcgggcaggcggcgtgtgcaggttggggccgcccaggggcaggagtgcaggcctgcagttgacaaggcctggtttcctgctctcactctggggaggaagaggaagatgacaagcaaaccagtgcttgtcaaggagtcatctaaacacgcactcagaggccacttccaaagaccgccctgaggcagtccagggtccatcgccgaccaccctccccaaaaaagaatgacatcagccaggtgacagcagcaggcaggtacagatggggtcctctagggatggcagattgccagggagcctggtcacccttccctaagggtcaactcagtttctcagccatggaccaaggtgcccctttgtcctgtgaactttgagaagcagagggcccttctctttggagtctgagagaagcccaggagaagaaggaatgaaaccctgcacatctcatcttcttaaaatgcagattcaggcctgtttttccaagtccatcaccaaacacaaggtctttccaaattaggtgctgagctgagctcatattcccaaaatgcacactcccctccttttttttttttttttgcttgggaatgctaaaaaataaaaagttatatgacgtgtctttttaaatagcacacacttttccgctaatcaagaaaaatcgagcctgtgttttgctgaagtgatgtgatttttttccccctcattttattgtgcaaaggaattcgagtcaggcggccacatccagaggcaggaagggtgtatagaaagttcaaaattagcaattccctggactccctttcagatgcaagggcgaaaacggacttggtctgagagctacgttttcctccttggaatctaggaggtttcattagtaggagttccttttttatggccttgttttcctgcaagttaaaagaagagggtttgatttcacctcggcaggtcgctgagggtctgagcctccagtgagccttctcacgtgtccactgccctgatcaatgtattggcttcagaaagaacaaacaagccaagcccgtcacaggtgatttatagcatctgcgcctgatgggtggtcatgattcatggcacttcattaaacctgagcgcagccgcttcctctgcacccgccactggggacaggccaccctccctcctggttactggccccctctgagccccagacaaaagggcctctcacttgcttacatattttcccacatgtgagccagcaattggaaacttcctcccgataactgcaaacctcggagctggaatttatgagaaggggcttcgggtgacgtcggcggcctgggcacacccaggcgcacaaggcaggcctttcatgaggagctgcccgggcggcgtggctgagctgatgagaagtgtccccaagacccacctgcagatccagcgggccagctgccacttgggcaggaaggggctctgggcagccctgggccacaggacaatagtcaggtggcaggaacgacagtcagtgtggtttctgtccctgtgtaagctgcccactgtgtggatttgagaggggcagggggcacggtgttacagacacaccctgctgctggggcagcctgctaaaattctcccagggatacgcctgtccatacctggttacctgggtcactctgtcttctgcctgggagaggcggggaggacgtgggaacccgct

SEQ ID NO: 1348 - DNA, 7681 bp, synthetic construct
  misc_feature 1..7681: note = Description of artificial sequence: synthetic polynucleotide sequence
  source 1..7681: mol_type = other DNA
actgctctgctgtgctgctcacatcctggtaactccatgcctccgttttctctcctgtcaaatgggtggcaaagccacacccttttgaatagaatacctgcccggtcttcacctggtgtggaacccagcaggtgtagccctttcccagaagaataaagcaagaacagttttactcttagctgatcacagtcaccaagtccaaaggctgggatccacgtactgggatgtctcctgtcacgcccacccaaaagggagcctcttgtactgcagtgtagaggggtcttgatgctctcactctctctacccatcagtcttttccaccctctgcctccctggggacacaaggctctggggctcagagggtaaccaggggctccaccctgaggctgggggaagcggtttctccctgcgtgtccctggatgggccctggatctccacttctccctggcggagtagcttcaacctaaaccctgactctcatgactagagacaccattcatgtcctctctctgaagtaccatctgtgtcaccaggtctctctctatggaccggggtgctgatgggggtgaggctgtggatctgcagagacaggatgcacaggtctgtggatggattcctgatcgtggatatggacagggagaagcaaggagattgtagaggtttctggatggagctagtggaggggtggcagtgggatttactgagatggggaagatgggagttgagttgcctgggaaaggattggacaccagcttggacacgatctgcttgacatgtctgggagaccccaaagggagatgtcaagtggatggccggatatatgggtccagagtttggaggagaggtcatggctgaagagacaaatttggaagtcattggcataaggatatttcaatccatgggaactgatgaggtcacccagggagaagaagggttgaaagagaaaaaaaccaaggaaccctcaaatcccatgggaccagaagccccaggcgatcagggatcataatgtttcacgcatcgctgcactccagccccagaggagcggccccctcaacaggcacccaccaaatccttgctgactgcaggagcgatgatgtctgggggactccaggggaccagcaagtggggcagcaggaaaagcgggcagtggagaactggagatgctgggagaagagagtactaggaggacggagtggcctcctgcaggggaggggagcatgggacttaggatgagggctggggtggctgggggggacagtctctgatggaaccacctgcataggtttgtgggctaaggccaagaagtccttggggagtggggaggggcagggtatgatcacaagggggaagcagcagaatgagacctgagacggggcagatatttgacacactgggagactgaggcctggggaggggacatggctgcccaggccacaccgccagtgacagtagctgagactggtacctgggcagctgaggccaaagtgcagaggctcaacctccgcaggacatctgcagagccgtgaggatctgccgcgactttcaggagttttctttctttttctctatttgtggaattaaaattaaatgctcaaatcagctagggaagctggagcgctggtcccaaccccgacaggacccacgcctccccatgcccagccccaccccggcccaggcaggccactctggatttccagggcccgacccttccctgctctggctggctccgacttccaggccccaggccctggggagggagggctccagactgaattcctaaggccggatggtgcagggtgggaagacccacctcctgggaggttgctggttcatgaattcgaaggatcctcctttgaattttcaagaggtgacacctgagacctgcgagaaaaagagcaaagctgccactgcctgggaaacccaaggccagacaaaggcaaaggcaggaggctggtcagggcccaggagtggggcgaagctggggggcttcaggaagagtgggcaggccaggcccacgtgctctcagctatcctggaggcccaaactcatgggcccccagggcccaaatgcacccttcacagcactccctagagaaaggggcaggaaggaaggggcaggccctactccaaaagtcgggacctagagcctgctggttccctccaggttcagtgcagggctcccagcattgaactgaggaggggaccacacctcatccaggggaacagatgaggtcacccagggagaagaagggtagagagaaaagagaagaaaccaaggaacccccaaatcccaaggaccggtgctgggagccccacattgaacttgctggggaggcttacaagtaggtgccatagaagaccagagacctacccaggcaggggtctgcatcctgtgaccatgccctcacctgggacctcaagggggatgtgggcatcggactgccccaggcacttggactgctgctgtgtgaccatgggaggctcacagccctctctgagcctgggcatccaggagcaaagtcccttggagtgagtgatcagcacctagcgaggacacgcttccttaaagagttgcccatatccttaccctgggccagatgttaggaatttgagctgccggcacaggtcaggggccagctcggggcaggcacggggtgggagggtccacccaggagcaaactgcattcttgtaggttttttttttttttaacggtctgccctcttgtccttccccttttgtgtttgtccctttcttcttctgccaccctcttctgaggcttttggtatcttcaaattagttgaatgctgggacgacaacgggtttggaaacacacaagtcaactctaatttgatcctccacatttggaggaagagacaagacttttgtccccccggggcagtgcctccgccaccgcagtgacgtttcagaagtcttccaacagctcagattctctggcagtccctctttgcataatccaccggaatctgccagacaaaagccacttgggagtgaatttgggatataggcaacatggaggaaggtgttctgttgagacagatgttctcaggatatccacagcctcagatcacaccaagaagagcaggagctcatgtttgggctctgaacccaaaccagcagcgacttgaaccagaacgtggggctgggattcccccaggtgtgggcttgtgtgggcttctgggcagccccatctcaacagagtgttgggaaaccgagctaggtccgtcttgcctgtgggatggcaggggtgcctctgctccagcaaggtgtggcggccgctgaccactcggccaggagttctggctgcccatggtgcagagtgtccaagcatgacccaaggggtcttcccagcctggggccactgacgggcaggtgacgcagataccttgcctggcttggtgcacctacaaattgtatcctggatttgttagccattcagcaatggtctgctaaatgatgagaacaagccggcaccccaggaattgcaggtgtaacagcaaatgggataaagacgccgccctcacagggcttaccgtggaagagatgggaaatccagacccacagctaagggcagggccagagggtgctgagtgctggacgaagtgagacgagggaagcgggtgtggactgaattgcaacccccctccaacaagatgtttgtgttgaagtcttaacccccaggaccccggaacatttcctgatttggagatagggcctttacagtggtcaccaagttctgaggaggccattagggtgggccctaatccaatatgaccgcagtcctactaaaagaggaagttcaggcacagaggccgcatgggagggaagctgatgtggagaggcatgggccacctgcaagccaaggagagaaacctgggccagttccttccccgcagcctcagaaggagcctgccctgctgacaccttgatcttggactttcatttctatcagttaagctgcctggtctgcggatcttttggcctagcgtatggggcttgtactccacacgtctcccagggctctgcaggccagcaccggggaccccacccatgttatgctccactttccagggagggaaactgaggctcacagaggtgaagtcaccctgacaagccccacagaccatggcccaggcttgctagactctagggacagagcccttcttcccctcaatgaggccactgacctctccaggtgaacgttgttggtgcagcagggcatgaaccagctcacgtgcctggcccactggccagaccacagcatggctctagctgccctgtccctggctgcattgctcacagccgacaggggcagacaggtgtagacacagccgcccagccctgcagcccggcatcccaggaatgtggtcagccacccacaccactgcccccaccccagccaggcgtgctgtgtcagccctgggccctcctgcccttccctccaagccccgcaggtcgcccaactcccagggcggctgcattcactgttcatcccccaggggaagaaaggccgggaccaggggctggccctgggcctgcaccaaccagggatcctgctctaaggacctgacagctgctgctttgcccttagaggaaaggagacctttagagagacaggaggaaagagagagcaagagagagtgagagagagagagagagagagagacagggagagagggagagagagagagagacagagagaaagggagagagagagacagagaggcagagacggagaacactccaacccaaatatcctgtcccagttttgagcacagcttggaggtgtccccctgctaggggaggggttccagactccaatgtgtctctttagtgaagaatgccctgaaagccttctagagaattgtgggtgcttctcccacccaccccatcttgttgggagccttgctgattgaatacctggctcccctgaatatgtctcgggacactgcaagtcagagggcgggcacaagtgccggcaccaggcttcaccgccacagtgaccctcagggtgggtctggggggcagaaaggtcacgcccttcctttgaagacaaggggccaacgggggtggggaggggtcttccctctgaacacctcctcctcccctctcttgctgcactggggccccagcggctgcctttcctcatacaaaccaggttgtacagcctgatccactagggagagcctggcgtgggggcaggcgagtcctgactgcaggggagacgtgcaagtgaggaagggtggtcctgaggaagggtggtccgcagggagacttcagcctccagagacaggtggccgcagctcccctaagtcgcatcccatcccctagtccaaagcgcagtgtctggtcacagtgaggccccagaaaggctgggcctgtgtggacacacttctcgcttattgcttccactaaccccacaaagaagacagctccatttcacagatgaggaacctgagtcgtgagaggttaaaagactagggtgagggcacgggattgcagtgggcaaagccaggctccttgcacggtgcgccctggcactcactcagaggaggctctgaatacaaaaccaggattgcactgagatagccctgctgtttccgcgcggacgtggaatgaagtcagccctggcgatgccagagagagacaggcggagagacgatcagagcctcccggctcctagtggctcaggtgtggcccggtgtgaaaacctcaaccgtcccagaattgaggtgttgaaggctcctcttgttccctgatcagccagacattggctccgggaccaaggcggggcccacgtagggtctggttggtggggtgggcctgcccatggccctgacagcccccgttgtcctaggcagggagtgggggacaggtattcagggcctggagaggtattcccaggacaggcgggctgtggggtgtgtgggcgctcccgggaggtcctggcagccgctgagtgcagaccaggcctgcagacaaaggagagagtacagacacagtcagcccccagacccaccgccagcgcccgggtgcactgggccctgcgtctaaggaagccccttaccccttgggtttgcctcttttctttggaaacacagcaagacagaccagcctgatttcctgctgcactctgtacagacgtccccacacgcccccagggtcctcccagggaccaccccaaggctccatctccccctccaccccttgcaagacacatatttacaccccctcccaggaccacctctgcatccctgaacctagtgggaatccattagcccacctttgtcctgcagggaactctctcactcccagccctagagcccctgctggctcctgctgtctgcagaacaaagccctgagacctcccacacctggccctcccagcctcatcctgaggcactcagccctccacccccaaggcctccagcacacttgtcatctttcccctggaggccccacaccctgccaaggtcctgcacctccctgcatctgagcttcccacgtggactcccctttctcgcagcaatgactccccttaagacccaaattagcaccccctcctccaggaagtcttccagttgtcctggtggtggcttctgcctgtccctcctacttagagccctggagtggctgaatgctgcacccattcgcccccgcaacaccaaagagtacggccagggaaacccgtgagtgtgaccttatttgcaaaaggaatcgttgtgcatgcagggaaggcaaaagatcttgagatgagatcatcctggactagggtgggccctaaatccaataacaagtgtccttataagaagaagaaaggacaaagagagaccggggagagggtctgctgcgtcaagctggctttgaggccgagcaaggagccaatgaccttgggtggaccttggccacaccttggctgttgaccccggcccaggcccactgctcccacctcttgctttcctcagagaggcccatgaagagcaaggccacatgatgatggaggcagagggtgaagcgatgaggccacaaaccagggaacgccaagggcggctgaagctaccagaagagccaggagaggaaccagggatgggttctttgccttacagccctcagaggcgccaaccccgctgacacctggatctccattcctagcctccagaactgtgcaagagtacgtttctgcctctttctgtaggaaaccacccagggtgtggtgatttgtatggcagcccccgacactctggcaagctccatcccagcgtcccctcctcccatcagctgtgacctcatgttcctctcctggactctgttggactcatggcaagaatatctcaataaacgcatgttaaaggaatgatctgtcaggggtgcttcaccacctcatgcttccatctgaagactcagctcctcccaagggcttatctggatggttcatccaacttcttgcaagcataataagagcaggaagccaggtgtgtaagaatgatgtactgatcaggattctggttaggctattatagcaaagactgcaaaatacagtagcagaagcctggctgttgatttctttttcccacaggagcccacatagtcaatccaggacaaatatggcagcatgggctgggcatggtggctcacgcctgtaatcccggcactttgggcggc

SEQ ID NO: 1349 - DNA, 781 bp, synthetic construct
  misc_feature 1..781: note = Description of artificial sequence: synthetic polynucleotide sequence
  source 1..781: mol_type = other DNA
aacaacaacaacaaaaaccaaacaaacaaaaaacaaaaaacaaatatggcagcatgatactggtcacccaggctctgtcacacctgagggttgccctgtctacgagggccaaattgacccatgcctcatttataccccagcctgtggaaggcggagaagaagggaaaagctcattggtcagaggcaggatgtggccactgcaatgactccttcactcacagatctatcatgttgcccagcaccatggaggatggctcacagtccattcagccagggtatggcatggccggacctagccacaagaaggctgggaaatgaagctttcgccaggcacccgccgcccagctcaatctgctctctgtagagcagttctcaaagtgtggtttcaggaggtctgagaggttgcagttaatttcatgaagacactgaggcatgaattgtcttttttcctttcattctctcttcattctctcatgactgtgcagtggagtttcccagaggccataggacccatgatgacactgtcactctgagagctaacagaatgtatgcttgcagaatcatgcattttacaaatttctatgttttcatttctaactcagtaaatatcagtagataaaacccatatcaacaaaatctctctggggtcctcgataacttttaagaggcaaatgggtcccaagaccagaaattttacaaactgctgaactagaaggttaaaaacagatactgggcattaggctggcagaaatagatgctacaggccaggcaaggtggctca

SEQ ID NO: 1350 - DNA, 3841 bp, synthetic construct
  misc_feature 1..3841: note = Description of artificial sequence: synthetic polynucleotide sequence
  source 1..3841: mol_type = other DNA
agagcgaaactccatctcaaaaaaaaagaaaaaaaaaatagatgctacaactggaaatctacatgaatttgtcaggccgccccctgctgcatactcatggcctcacgaatctacctgggagaccagagtctggctcatagaaatttgggagcaggtacatttctcaccagttctgatcctaaccactgcagcaatgagtcagtgcctgccccagtgtttagtgatctgcccgcatttttttgctgaagcctcctcacaccagtccctgtgggcgtgcagcacctgggtgtgcctttcccctatggcatcaggcagagatagggtccagtcctggtctcgccactcccaaattgtgggaccctttgcagattactctgaacctcagttttctcatctttaaaatggggctcatcaaggggtcacaggaagctgtttgcacagttctaatttggaagttccataaaaggtcaccccagccatgctcagggtaggtgtgttggcagagaagtccctgccggggaagagtcaagcttctgaaacactccggaatctcactctgcatctcaccagccttccatgactccccagggcttgggacacctcctcactttggcattcgaggccttcctcatcctggcctcaacccaccttgcaaaagcactttctagacagctttgaattctggcttctgctgagtctaattttcccgagtagggggtcttcccctgaagagcaggcccattctgtcagccacacaatcacttcatctggggaggtgaggccggaagctggcccattaaccacgctctccccaatgagcatttgtaaacacatgccttctttataacatcagcaaacagaacatgttttcctacttaacaggaaatgcagcggaatggctgggttccccgacaggggccccagccgcttcatgcacgtggcatatgaagctaggacaaggccagtgaccaagaggggtggccaaagccctctggtttgcaggcgaagttcccagcagtttgcacgtgtccgccccccccagcactggccaggaaggggccccacctcctcccacggccctgtctttgtccccagcagggctgcctgcttacacggaaaggctgccgttctttccctggaactggaatcagcccgggctataggcaaagaaattcatttctaactatgcaagccctttcactgtcacaagaccttgaatgtcaaccttggaagcccaagggctattgtcaggagctccagccaagcctcagattgacacaattgcaccagaaccctgaacagtctgggggaaagaaaaaatcccctgctcctcctccctcggggggaggcggcccccgcaaggtaggcggtggctgcaggcagctgaggctgcgccattcatggctgcaggaccgaggccccacgcggagcggagaccaggcggccacagccgctgattgggcgtcgcggccgggggttcagccaatcggctgtttgggaagcggggccattcatgaaagcgcagcggagaggaagcgcgggggcggggagcccgggttatcaccgcgccccgccagccccatcacggccgccgtgccttctgccgggccatgctgcggctcgagcggcgctggctcctcgcagggaagaccccggccagaggctgcggaagaggccaggctttctggaagcgcctcccaggcagggcctggcagccgaacgccgcttgcttcggtcaactgtggccatgaagtcatttttttcccctgctgattgaaatcatctgttttcagttccctgacaaattcattgagttccctctgaggctggggcccctcggctgctgagtctcagtctgtagctgcggcccagacccacacaatttcatcttcttggatttacatggtctccggtttccagagccccagtgaaagacgcatttgtgtgggagatgtggggttgggtttagcagccctggtcctggggagaatgcttctaagatggctatctgctgggctctgggccccaaaccctggccctcgggtctgtaaggttcctggggccccagatgacggcatggccaagaacggcgcagaatcctccacatcagctctctgaaaagggaaatggcccagtggaatgctggcctctccctgcaggatgagcactcatttcctcttgggatctagcaagtagcttaaaaatacactcatgcaaagggcccacatagagctatacctgtggggaggggaggggtctgcttttgcatgtacctcagggaggtgtggggtggcagcctgctgacaagggccccgaccccaccgccttgcctgtgtcctcctctataaaatgggcgtaggagcacctagcccttggtcatgcacgcgcccaggaaaatcacaaacgcaggggcccagcatagtgcctgatacgcggcgagagtttagtcaccgacgtcggttgttggtggtgacgtgagcagtgacatagaggacaaaagcgatgctcaattccatttccgggcgcgacacagctccggcagggggcgctgggctctggagccctggggacccctgcttctcacaccaccgtcacccccagccacatacctgagccactgggagcatgagcaccagggaactttttctcaatggaaagatttcttcacagcaagtgtttcgcaagcctctctgaggctgtcagtaatgagtccttacttcttgacttccaagtgtgttacataagcctaagaggttggtcaaaacacaacacacacacacacacacacacacacacacaaatgtggctggagagagtggacgggcaggctctgcagctgttcaaactttctcggccaccttcccaggccatgaggactccccactcatgggcctgtcggaaccgtgctggggaatgtgaggtatgagatccgggagaggagagcccagtaagccagggctgcgggggagacggagggcggggcccggacacgggcttttcccagcggccagcacccctcccgcaggacctcgggttccaccccagcagcctctgtttggtggggggcagagaagggtgcccctgcctgtgggcccctcacgttggctctgcagcacccacgcaggaagagggtgcacacagagggacgcggacaccaaggcctggggttggacaaaattgttgcccgccacagctggtccctccacaggccacataagccagggagttgggggctgcccggcacaaatagaggaagcagacagaggagctgggcggcctggggcagccggatcctaccactcctcatttctgctctgggctggaccggcttcccttttcttctgttgttttaaacggttggtgttgggatagaaaggcccatgggtctccttctgcctctgcgtcctggcttccacaatgcagacaaaacttaaaaattctcaggggcttctcattttagcgtgggtggcagaggcctggagaagcccgaggtcacttcagaccggccacctccttggaccttcccttcctgacataaaatgatgactgtaatggaggctctgcactcagcccgtggagacaggccagaagcgctttgctacagtactaatatagcgcacgttttgctcatgagacggcactcagaagttctcggcatgattagaaagtgtatcggtcagaatgcgctaggccatgctatggcaacaaacaggcccccagatctcaatggctgccagcaggatcagcaaatggtttctgtaaagagtgacgtgtacttttgttgttgctattgtttttggagacacagtctcactctgttgcccaggctggagtgcagtgg

SEQ ID NO: 1351 - DNA, 901 bp, synthetic construct
  misc_feature 1..901: note = Description of artificial sequence: synthetic polynucleotide sequence
  source 1..901: mol_type = other DNA
atccacccgcctcagcctcccaaagtgctgacattacagttgtgagccaccgtgcccggctacttttaatatatattttaggctttgcaggccattcagtctctgtcgcaactcctcaactctgctattgtaacacaaaagcgtggcagacagcacaccaatgagtgggctgcattcctataaaatgatattgagaaattgcccacaggctggcgtctgctgaccgccagcttcagataaccaacgtttgtcttcttcttgtgccacacatgcaaggagtgagggcccgctccagacgtgctccagggacccaggctgatggaggatcgagtcccacccagacctccatcatcatggaggccagatgcacgagctggttcttaaaacttctgctcacaagtgactgagacctcttccactcacatttcactggtcaatcaagtcatgccaccacacctgatttcaacggggatgagaagaacaattctatttgctcagaaagcagagatctggaaattttcgtaaacagtctttagtcttcaaccatccaagctagaagacctggtttctgggcccctcctttgccaccaactaacttcgtgtccccccggcaggcctcctcccttctctggcctgtagatccccacctgcaaaaaggtgtggagcatgttcctcaggtttttctgggcctgagaacagcaccactatcatggcctctgcttttcctaatgggggacaatgaatttatttccactgctcttccacggagcaaggacaggatgacattcaggccagagcatgactcagcctttggggagtctcccaaatatcccaagttttgaacctccacattcttttttttttttctgagatggagtctctctctgtcacccaggctaga

SEQ ID NO: 1352 - DNA, 8041 bp, synthetic construct
  misc_feature 1..8041: note = Description of artificial sequence: synthetic polynucleotide sequence
  source 1..8041: mol_type = other DNA
ttaggtgatccaaccacctcggcctcccaaagtgttgggattacaggcgtgagccacgccgcctggcctgaagctccacattcaactgttactctgggaatggtgtgtgggcacagctgctgctcctgccagccaggcatgagtttccaaagctggacccaggcttggttctggttggggctgggtggaactcccgggaggggaggagagaagggaagttggttaatgatgagggataaagtgggcaggagaaaatgggctgatggtacagctcatccagctacttgtccaggccccgtcagaccatcagaagggggtcgacgagggagttccagtggccttggagtcctgtcctccttgctgttcttggaattgcttggatatttcacagcctcagggcctttgcagggtctgtggcttccctgaggtgtccatgtgcccctctgcctcacctccttcaaatctcaatcaactttcaaggccttccccaaccactctctctaaaacagcaatcccttccctcagctctggggcctccctgtgtccccactgcctgggattgtctccacagctgtgatctccttctaaatgactttggagttttattcattttgactatgaggtttccactctccagaagctgagctgcgtcaggacaggagctttcgcctattttgttctctgcatcacccctgcacctggatgagagcctggtgggtagtaggacctctgtgcatggttgccaattgaatgaatttatatcgctgaggccagggagccacaagctacctctgagtcagctgttaaggaggaaatataaacaaactccaggcccagccatgccagccatgccagccgtgcctgacaagcactgtggctgcacggagcctgctcaggtgtgcaaaggctcacatgacagtgcaaagcctccttgcagctcacctggccatctggggcacagcaacactcaggcaacagaaggcacctcagctgatggctgaatgcggtggctcatgcctgtaatcccagcactttcggaggcaggaggatcacttgagaccaggagtttaagaccagcctgggcaacataatgagacccccaccatctctattatttttaaaaacagaaggcaccccagcttaggtctagagaggctccccctccttagcctcccacagagcatcatctgcagttttgcaaaaccgtcctgtgttctctgtgccctgcggaaatggccaaacagctcctcagtgccccaagagatagaatcatgaaaaaagcagctcgtagttcaaaatggaagaacatgataaaagcaaggcccctccatgggtgtgaagagatttctcttttacagaggaaatttgggtgggggaggcaggacttctgctggatccacagaggatcttccattagcaaaaggacaatcattgtgagtgaaaagtgaaaattctaaacttagaaccagaaggtggggaagtgaagaaagttcttccttatcttcccccaacccttgtggttttcacccccatctcagcccatgtcttttgcccctgacttcccaggtgtgggagtagactgaagatgtggaacgtgtgggaggctagagagtagggagaatgtgggtctgcgtcttttttggaaggattgcagccaaaaatgcagcgttatacagcagccagaatgcactcaggtgtgggggccaatgccggccacacctttccagaaggttctgttgggcccctaggggaccaggcagcatggggactgcagcggagcccgggaggacaagggctgggcaagctctgttacccatttgttgggctctgagaggcttgggccacacctctgagccccgtgtcactatagacattgagaagtggactctcgctagcccaaactcaactttgtggctcttggaaaggacagggcctgtcacgtgatactcctggcccagcacaaagctcccaatacaatggaccatgctgtgtatccacgggtggcagcgaaggcagtgtgctgaagtctgggcaaatgcatggccgatcccaggttattaccatattggatcgtgtggtctctgctccaggctggctcggttcagggttggatgagtttctgcatccccccaaccccggcccaactacccccaaccctgcatgctaatggaggcggaattaggcagaattctgcacgcctccaagtcaggcgtttccgatgactcttcctgtgggagtcagagggcaggatgggatggggtcagctgagccctacatctgaagccttgcctctaaaaatagccctttcttcctgtgtccagggctctgccacgggccctgcaggaaaacgtctgtttccaaggcggacggagcatctggaagctccgagcagccacgcgcttatgctcaggcctcagccaagtgtcaccggggccctgggggcaccatctggctttcacttcctcgaggctcctgtccccttcactgaataaatcctgcatgtttagagcctgggtcacagcagatccagcgggtgtgttgggtgcagcaggtgtgcatcccagggggcgctgaggcgaacctaccagaaccttctcttcctgctgccctgggaggctgtgtctgcccaagccagccaccgggccgggtccactgcctggggatggctgtcccctgagctgctgctctgtccccaccacggaggctcgtccagctgcccgggcatgagtcatgggccagccctgggcgctgctgcggattcagaagctcgagccgtttcctgcagataagcgacaagcgccagggaaacctggcgggggtggccgccctgtgagatagcgcttccttcaaagccccccaagcactaattagccattccaagcatagtttcaacagcatttagggatttcctcatcaaaataaacttcctcccatgttatcttcatttttggcatctgatgggatcctttttttgtcttatttatttatttattttctttctctccaagattcagggcggacacacttagtcctgctgtggttggatgggcaggtgaggacactgggatgctggcagctggcccatccacctcttgtccgtggaaagtggcaagtccccaccccatctctgctctcagaggagcttccgaggggcctggttctgtggtgaggaccaggacgggtggtccacagtggcctgccccacctctccttagctccccagaccgaggggccggctagccctgcaggcgatttcaagccttggggcttccagggtcagcctccgctggaatggttgggatgccatcaaggcaaattagtgctgggggctcccccagccctgtgggcctcctggcatgctgggagtcagatggtggacttccccttgggccccaacaggattgctgtggaagtcagggcttgagatgaaaactcaagatggaaaagctactcatttgcaacttcctcctggaaagaaacccctcgccggtgcctgtgggttgagcctcctcagcccggcagggcaaaggcctgctttgtgtaccgagtctccaggcatcctggctgttgcttcctgcggctccgcacacgccttggagtgcgaattttagccacaataggtgatttcctgaaagatctgctgatgcctggagttgacaggctgctccgagatggaactagataagacgagttttgtttggggctggacaatttgtcaggaaatgaggtagtggttggtatggaactagtgtcactgtggattattttgggggaaagtgtccctgggaggcctccatcagccttccaaacacagccaggtggggccatgcacacaaccttgcttctgggggaataggacaccggctccgggagatcctcctgatgccagcaacggaataggtggggcctactctccaaagaacagctgccaggccaggcccagctcatgacagggtacggagccttcacgtaacaccaagggcgtttctgctatggagcagggtgcttgtgttctcaaccaaaggctggctgcatacagcccagggttgcagtgctcacagcccagcaaagagctgggttgtcaggaaccaaatgaaaaaaggagggaagaaaagggcagatggaaggatggaaggagcaatggatggatggatggatggatgcatggatgcatggatgcatggatgcatggatggatgcatggatgcatggatggatggatgaatggatggatgagtggatggaaggaagaagaaatgggtggttggatggatggaagaaaagatggatggatggtgatggatgggcagatagatggaaggatgaaaggagcaatggatggatggatggatgcatggatggatggatgcacagatgaatggatgaatggatggaaggaagaagaaatgggtggatggatggatggatggagagacagatggatagtgatggatggatagatagaaggagggaagaagagaaagatgaatggatggatgattagaaggagggattgatggatggatgatggatggatgaaaggaagaaaagagggaagatggaagggaaaaagggagggaggttgaatggaaggaaagaaggaaggagagattaagttggttttgtaggacacttcttatcttttttttttagaagaaagaaagaaacacgttaaataaaagtcagttctataaccttcttgactgtggcagctcagccaggagtatggagagcctatttcccaggcatacaagatggggggcagctttacagataataaccctctggtggccctgggaggaagtccacacacctgctctctgcctccaccacccagatggtctcccccaaccatagtgcagcctcccaggccccatctctgcccaccacaggtctgcccaacaaagtgctgaccagccacgtctgcaagccccatcccagccagcctgtccccttgcaatgaccccaaccatgacaatagttacaaccaccgcatgtgtggcgtactccccatgtaccagaccctgaaccctcacacacggggtctcatttcctcctctgaggatcattgtccagatgaggccagtgagggccagtgaagccttcgtgtgaccagtggatgcagaaccaggactggaacaggtcagtttgggtccagagtctctggactcaagaggacgatgcagaggtgggaaaggaaagaagaaggaagaagcagggaaccaaggcaggaagtggaggctgcggctctggggagcagtgagggagagtgtgggagggagcagcttccagggaaagggaaccatttaaaaggaggttttgaagatattttctgcatcgtggtcagtatcactccttcttacctagtaaaatctacatgagaaactgaggcagacattactaattgccttcccaaggttcctttctctaccaacagaacacagccactgttcagggtggcattgtgaccagctagaacattctatttcctaacctcccttgcagtaagggttggccatcaggctcagctttggccagtagaatacagaagtcgtggggcttacagggaaagggttgacagccctcatctagtgctgctccttattccttccacgttttccttcctgcaatgaaagctgaagcaatgcctggagcacagcagccattttgcaaccatgaggactaaagtcacatgccaaggatggtagagtggagaggtagaaggaacctgggccagtgatggcatggtggagctgccacaccagccctgaactgccagctgtgggtagacaacagctactgtgttgtcaccactgtggcatggcttcctgctccctgcatccagatgtggccccatgtgacacagccataagtaaaaaaacagaggcacacattaaaattcctctcaataaaccagggtaaagccattccaaagtcacagaggccttgatttgtggggcggggtggagggggtggttccttctcaccagcagctgccctgaccgaaggctccacaggtaaggccagaggcagggatgcctgctgggaatccatggaccaaatccctttgcatttatgtggtttcagccttcctctctgcccctagacttcacttgccactagactcagcaagaatgcctctttggttggccttgggccaggtttgtatcccccgctctggtccatgtgcccacagggtactctgtccctctcagcctgggacccaggagccagctccacagtcagcccttgactgggtccacgggagagtgacctcagcaatgccagtggggttggctgccccgggagaccctgcagggaactgcatattagtcagggttctccagagaaacagaacccagagggtgcgtgtgcgtgtgtgtgtgtgtgtgtgtgtgtgtgtgtgcgcgtgcgtgcgcacagagagagagagattcaagatagccagggaaggcccagggaagagctgatgccacagcttgaggctgaaggccatctttggcagaattctttcctagctgagggacctcagtctatttctcttaaggccttcggctgtttagatgaggcccacttacgctatggagggtcatctacttcactcaaaatcgactgattcacatgtcaatctcatctgaaaaataccttcacagcagcttgtagaataatgtttgaccaaacactgggtaccgaggactaagaaagttgacacatacaagtaaccaacacaaggcctcccaagctgtgtctgcacccaagagccctcctgtgttacccacagtcacagaattagagtctaagtttcatatgacccaggaggacctctagtgcagccacccacttgaggcacaaatgtcctctccctggaatctcctaaccagatgtggggaccttctcagctctccttcctgactttcccaacaacgtttcagaagctacgccttcggatgtacacacacacacacacacacacacaatgcacaagcacacacatgcacacacatgaatgcacacaggcacatgcacacatacactttcacatatgtgcacacacctctctcagacaactcagtcctaccagggacaaaggtctctgcaaccaggatgaagcaagggctaatccgcagcagcgagagccacctctgccccagggacattacttatatgcaaataatgctgccattcctgcacattggagaggtggcaggtggtcctgaggttcctcccctagcagtgcggggggacaagacagacccatccatgtatcttctcgggcgaggaagccagcctacacagacctcgtgagctgatgagtctcaccatcttattatttattctttattattaacaaagccagacatgcacgcaggactccccgtgaccattcccggggaagaaaggacgagctgaggttcgggacatatctagccccatatcctcgatgatcaagcccgtaggttccatgcagggagagaatccctcaggcccacccccacctctcctttgagacagcagagttgagagaaaagcagggatgcaggcgttcaatccatccacgcagaggctggggccaaaaccaatactggtcctctactgctgacctcaggcccgtgttacatgaacggggtgtttgcaccgatgaccatgccagatgcttgggaatgctgcttgtccttttgcgtttctctggcagacttgcaatgaagccaggtcagtcccaagacctgcgttccagttccagcccccttaccagccttggaagccagcatgtatgggggtgggggggggaagcactctgtgactcagtttcctattctgtaatatgggaacaatagtaccacccaccatccagactatgacacagaaccatcctaggccagaataagtgatgtctctacatccccaaagcttggagttccccaaacttgtctgatcataagagtctcccaagatgcttgtgatagatagaggttctctcaccccatcacgtgtgcatttttacagagcacccttcccacagtgattttttttttttttgaga

SEQ ID NO: 1353 - DNA, 3241 bp, synthetic construct
  misc_feature 1..3241: note = Description of artificial sequence: synthetic polynucleotide sequence
  source 1..3241: mol_type = other DNA
gtgctgggattacaggcctgagccacagcgcctggcctccccgcagtgatttatatgagaaaggaattctgggaaatgcttttcttacttgacaatctggcagaaggagacacagcctgacttcccagcaagcttggacccagtgcacgaggaatcaatgtgtgaggaatttgagaggcaagtagtctcgtgtgggtttaagttgtcgccagggctcctccggtataggaagcaggtatcctgggtcccattcccagtagacccagcagagtgtggcttggtccttggatcatcctctctaacgtggatagagtaggacgtgtcagctctgggccattccaaggctgtggcttgggagtcaggcaggcctttgattacagcctaattctgtgacttggggtggggtggtcttgggcacatcctgaccctcttactgatcaaggcgaggcccccgggctagcagcatccacatcaccaggagcttgctagacacgcaggcccccaggccctaccccagacctgctgagtcagaatccacatttcagcaagatctgaaggggattcttatgcactcagaagcttgagagcagtgtgcttacctctttgagtctgatctcttcagctgcaaagtgaggaaagactatatcaataactatccctgcagctccaagtaacaccaagcctgtttcaaactagcctgaacaatcaggaaacgtgctgactgctgtaagtggcactctggggccagacaggcatcagggtcagtgtggttcagagtactacgtctgcagcagaagcgtcctgcctctgccctgctgcactgtggctgcagctcaccatgctcacacctgcgcagggcaatgtccagagggaagatcctctaggatcctgtctcttgcatcccactggcctgcaccaatccatggtcagtcattgaactgacttaggcctgcattcctacaccaggtgctggctaagggacaggatcacactcaggtccagccatcaactaagaatatagctgcgtgccacagcatctcatatcaatggcatgaccccaaatcaggacagtagagtagaggagggaagcagatgctgggtagatgcctgatgctggtcattacaggatggccctatctcatggggtggtttcccacttaatacaatccctggaacacaggaaatactcaaatacccaatctcaatcgttaaacagctctggcaaattggattttccaaacatgaacacagctatatttctgttcccacgtgctcttccactcctcattaagaggtagagtctattttcccctcccttgacactgggtgggattttgtgacagcttgacaaattcaatgtgcagatgagatgctgcctaacttccaaggctaggtcgcaaacagtgatgcagcttcctcctggttttatctgtcagaagcttcacctgtggcacccagctgccatattgtaaggaagcccaggccacatggggaggctgtgtgcaggcgttccagccaatggccccagctgaatctcagccaaaagcccacatcaactgccagacgcataagtgagtgcactcgctcagctgaaatcagctgatgtcagcccccagccaaggtcccagatatcatggtctaaggctgagcagcccccactgtgccctgtcagaattcctaacccacagaatcaatgaacattagaaaaaaaatgattaatttatgccactgtggtaagcagattaatgatcctccaatgtacccatgtctgtgtatatgtgacctcctatggcaaaaaggactttgcagatgtgattaagccaagaatcttgagatgggaagattatcctggattaaccaagtatgcataatgtaatcgaaagggccttcataagaggaaggcagcgggaatacagttagtagtaggagatatgaggacagaagcaggtagtcagagtggtgggaggaaggggccccaggctaaggaatgtaggtggcctctaaaagctgaaaaagatatttttccctgaagtcttcagaaggaatgtgtagccctgccaactccttgattttaaacttctgatgcccagaagtgtaagagaataaatgtgtgttgttttaagccaccatgttggtggtaatttgttacaaactaatgtagaaggtttttgataatggattcaatttttaaaaatagatatagagctcttcggattttctgttttttcttgtgtctgttttggtaagttaaattttttgaggaatttttttattctatcattgtcacacattttttgacataatgtcattcataatatcattatattgccttttcctttttaatatctgtaggatctgtaataatggcccctcttttcattcttgccatttgtgatttgtgttctctctcttttttcttctctttttctcttgatcaattttgttgatcttttcaaagaaccagcttttagctttgtcaattttctccattgtctctctgctttgaatttcattgatgtcttctcttacctttattatttcctttcctttgcttaccttgggcttattttgctcttccttttttagctttggatggtgggatcttgggtcattgattttagatctttcttattttcaaatataagtatttaaaggtatgtttctctttaagcaatactttagctacatcctatatactttggtatgttcttgttatcattcaggatttcaatacttttaaatttattgatatttgctttataaaccagcatccgacctaacttgatgggtgaaccatgtgtacttcaaaagaatctttatttcataatatccaaaagcagtttctataaatatcaagtcatatgctgagatggttattattatttttcaaatcctttatgtatttacagactttttaatctagttgttctatcaattgatgagagagggagagttgaatactccactgtgattgtaaagttatttgtttctccgtttaatacttttcatctttgctcatgcatttgtgaggttctactaaaattgctgtgacttcctgatgaattgtctttttcattattataaaatgtgattttttatctcaaagattacactttatctcaaagtttattttctctattattaatacagccagtttgactttattatgcttattacttgcatggcataactttttttttttttttttttttgagacagagtcttgctctgtcacccaggc

SEQ ID NO: 1354 - DNA, 11041 bp, synthetic construct
  misc_feature 1..11041: note = Description of artificial sequence: synthetic polynucleotide sequence
  source 1..11041: mol_type = other DNA
ctgccctcaaatgatccacctgccttggcctcccaaagtgctgagattacaggcatgagccactgtgcccagccacatggtataactttttccatccagttactttcaacctgtatttttatatttaaagtgcatctcttttggcatctggttgagtcttttaatcagataaccacttcctttcaattaaaatattcatgttgttagtatttagtgtaattattgatatggttgggtttaggtctaccatgttataatttttcttcaatttgtcccctgtagttgttattcttccatttcccccttcctgtcttcttttgaatatttgaatttcttttttttagtatttcatattgcagttaaaattatttcttttgggttatttttatatttcttatttttctgctgagacataatttttttcattcattgtcagtgtatttttcttcacctcattgagcaaaattatagtagttcttgtaaactccttgtctgataattccaacatatgggtcattagaggttggcatttattgttaatgggtcacattttattggctctttgtatgtcaagtaattctgagctacaccctagacgttgtaaatatatattgtgttgccagtgggctttggcactttttagtggaagcactctttcactggagagtgtttgaccattttgtttcagcagcggttcacctggttagacttacactgtaagctctgccttaccatctgtgtatggtgttgaatttttagttcaattatttaagccttttcagcagtgctgttgagactgtcctatacatgcatggttctgggccagcctgagacgtgtgtggtgggcgtatgcagaattaggagacccctcatctgtctcccttctgagccctccccttcactctccagtgacagctgtggctgcctgggctaatttccctggttcctccagccagaaagatggtggggtttctcttagcatctttgccccttgtcccttgccacattgctctgagactgcatcccactccagaggcaaagtcgtaagcaatgaagaactcacttccagaccatcagcacaccaagttctgactcccttcaacaactttcctgcttttgtttacttttcagaatccttgggtagtttttaagttttgtccaaagttcacacttgttatcagtgggagagctggtctatagaggagtccatctattgtaccagaagccaacaccctaggcaaagggttggcagtgctggctgacatcttgctgcttgtgatgaaagtaagggacagagacaagccaaagaaggaacactcaatgtcaagaagccaagacttgctgggtttgaaaatcaaactgtttcttattcctaacttcttcaaaattcagattaagaaaaggcttcacagcaaagatattcacactgaaattataagagcctttgttaagctctcagaaagacctaaattggtgccacagtgtactgtctagccaacagaagtccctctaaggacctgaagtgcatgcctcacaggtcctctccatgaaataaaagcctcttcataaatcttaagagcaatttcccacagcattctcacaggaagcccaaagtagagaagaatttatcttgaagagatgtgtggctcaagctcttgtctagcagaatggattataaattgatgccttaaaaaccacaaagttgtgtttttaaagaagtgtatcagcttggactaaaagagacacagacagcacaaaatacaaagagatctttggatccccaaaacttctacgtcaggaagcaggctgagaaatgactcaattgcaaacacaggctatgttttagggaaaagggaggctgattcagagggtggagcaagagcctggaagacagagccaaaagccacagtgactcactctcaggtagtaggactgagccccaaacagggaactggcaacacatgcccagctggatttcagaattgctatggaccaattacatctgtgtgctcattatatttacacattctgaattggagtgtctatggtggctctcctctacctggctcaccactgtatttgggtgagatgggcaagaaaccacaacttaagaccatcattcacctggagctgatggagaggatgctttcctggactttgagcctgatgctgtgatgggatgagagattggggaagtgcaatgtagataaaaggaaaagtctattttgcatgcagtaagaatgtaaatgatggagtccagagggaagcctgtattgtattttccaaaaatggccagaacaatatatccaggcccatgtgctcttccagaaccctgccactccccatcaacaggcagggtctatttcctctctccatgaacctgggcaggattttgtgactgtcttgaataggctgtggcagaagtggagctatgactttcaagtcatcaaaaatgatgcagcttccatctcaatctgtctccctctcccactctcacgccccacgcccatctcttaattctcacccttcaaatctagccaccatgttgtgaggaagcccaacccacatgaaaaggccacatgtaggttttctagccaacagctccagctgaggtctcagccaagagccagcatcaactgccaggcatgtgagggagcctcccctggtgtgctcccatttcttgagccacagaatctgtgagcataacaaagggtggtttatgccactaagtttggggtgttttgttatgcaaccagagtaaatggaacaatgtatttgcagcagattgccagagtcccagaggtgcacacaccccccaggtcacgattcccccactggaaaagggaatgggtcctcagggtaagaagcctggatagccacaggagaaggctgattccagcccggagtgggagatggaaacctcgccctgagccggcccagccctccccaggccatccaaagggagtgactgttttcaggggaacaaacctcacccactgttcttctcccttgtagcaactggagtctggaagtacagagaaggagaaaagcccagcgcatttctgaaaaggggaaggagcatggccctgcagctttctctagatcctggttcttcagcatggatggaaaaacatctcatccaatcaaaatgcaagccttggctccattctatggtgtctggcatttttcttcttccattctcttcacccctgtttcattatttcagtgttgtctgaacccttgctgttcccagtgtggttctccaaccagcaacagtggcattgcctggggagctggtttgagaggtaggatctgaggctagctccaagtctgcagagtatgaatctgcaggattcccgggcacagagcttgagaaaagcagctctatgcagactcactggtgagtccagctggctgggagggcagagggacgctcagcccaggggaggccagagcatggataacccgcacagtgacagcatggctgctgtcgatgggaacggcaccagctctacacccactggaggctggggaccatctgcagacactgatgctgaggggcagcacctggcccagggatagcagagaagggtctgtctcatgtgcaaacctggttgccgggtgttggccagggttgctgggctgaggatgatttgggagggagagtctagacgctggaggaaagaactctgtcatcaattagctgtgtctgccggcgcatgagaggggagtggcgccttgtgggtgttatttgctctccttgcctagaatgtgcagaattgcttttgtgccatttaaactttctttcctcccctccttcctgctagaagattttccaagagacgttgccatttgtgagcccatcactgcacgtgccagtcacccatcaaccttccctgggttcatgtggacaggacgaacgtgggacccgtagtgtctggcctggacccggccccagacatccatggccacaccagttgctcaagagccaaagaatcttccaagccagcagtgtggggccccagcccgtgcgattcactgctgtgctcattcctgacagcatgctttccgcagcctctgctgtatggtccagcagcaaggtacccaggtctcgatatgtctggttccagtttcttttctgaaaaccaaaacagctgtgtgtcttggatctgaggacactgcacaattcctcttatccccaaatacctgcttccccatgggacatcccagtccctcagaaggggctgctgaatagcttgcagaaccccttagctcagaccttctcccccacccgaaagccgggcaaggaaagctgttcccatttacagatgaggaaattgaggttctgagaggcgaggggagctgtagatcacatgagcacccagaggcaaagctgggatggacgagtgggggaagccatggccccgtgtcctgcacatgggctgagtgccccatggggcacctctctgagttcacccgcaccgaatgccagccggtggggctgggcacaggcaccgtggctggtgggaaacctccccagttccttctaaggagcatgctggacccacaccctcccacagaagcttttctggaaacaagcctgatgacctcagcacattttttccaaacacacccttcctccctctcccaaaatctcagtgactttggaccatttccctaaggattggctaaggcagggctgagggccttctcaggggactccctccttgagcagccctgcagcccccatcccaccccagccaccgtcctggcctgcttagctgggatcttcaacagaaaaaccacaaataattgagctgtttaggagaacatcagtctgggtttccatggcaacaacctctggagccagctgccccgacagctaacagctcagggccaggccagcctgcctccagttcagtggcggacccgggtccacgctggcttctggggttccagactaggagcctggtcctccacaacagaggtcaggctgggcaccaggaggggaagcctagagggctgaagccagaaacccccagagccatccccccgccccaaatcatcacacacaggccagctgctgggggccggcacagcttcaaggcttcacttcttcccttctggcctcagcctcaccctcctgcagggccagtcccactccccccagcagggcaggtggggaaacagaggccccgcagggatctgtggctggccccggcacacagcaggcgcctggttcccgagaccattctgcaatttgtctcagcctgtggctattcccactcctggagtacagacaaccccaggggcctctgcctgcccagcctctaaggagcagagagtcttctgcccctgcagaatcctaagggtagcagaggctgcgctggttccctgggctttatctgccctttcttgttctctccccataaaaagcctactctctttacccattttgtttatgagaaaaggaaggcacggagagggcaaggaagtcacccggagtcacacagctcctaagcagcagggcccgggtggagccaggacagttcataacctgtgccatctgggagcatcatcaatcccaccacacctggggttgccaggctgcccacagtcccccacccagcatagaaccgacttttgagggacacagcctcttggagactctgaagccgctcagcagacaactccctggtgccccacagggctcatgccctgtgcctgggaccccacccggggggtacagagagaaataagagtgggctgctaccaacctgaaccttgccattgggtggaagggagagttttgtggaccaactgccactaagccatgaaacaacataggtgtggctctacctggcagcaagtctcaccaggaaaggtttccgaaagagggaggactggggagagggcagggtgaagtcctccatgtgatgggaccaggagcccacagaccaccgggaggcccagccaggggctgtgggagatggagctgtgctggagccactgctgagtgggtgatgggtggggccggagcagcgccgtatgcaaagagagaggagctaacaactctgcaaccaaagagcaactagagaaaagaagcctgtcttttatttgtggatttgtgactttacgtacctactttgtcacaaaaagaagattctaggaggcttacaaaattacaaaaatgcacacaatacaatgtgatttttagtaggtgaggaaaacataagatgaagcagaagtcaaaatatatgccctaagtcctcaatgtgtactgtgtgatgtagtagtaaaattgactctgagttccccggcagccaatgtgaaaaggaaaacacaccctgcctttgaatttacaaggagcatgggataaaactaacaagctgctgggagacactgggctacagctacttctgaaaaagaagaggaacttcttatcaggatcatgttgacagtgtcagcatgaatagcaactggacagtgtcccagcacacacacagggatgcctctggcccattttaatcatagcatccctggggacaagaggttggctcaggccccctgcaagggataagctgaggtagaggggcctgcagctgtctggtggctgcgcctgaagaggcttgagcacagcttcgagggtgaggcatagtggaatccaaaccttgcaactcccatggggatggggactttgcagaatcccacaagattctgcaaagtccccgtcccccgctcctgccctccttccagttggaactaagttacagaagcacccacttggagcctggtgctcagacttggctgcaagctgcaatcacctgggagtttacaaagttactgggcgctgggttccacccccagttctgacctaatctgtccggggtgcggtctgggcatgaaaagtttttcaggctctccaggtgattctcgtgtgcagccaagttagagaacactgactcccggggaggtggattacctgtcctcccggcaaagcgcaggactcgcagtttggcaagcttccagcagcagcgagttcgggtggctccgtggggagccttaccccaaggcgacagctgggtggagggtgccccccaacaagccgtggggctgaagggaagccacccacctcagagcaggggttcaccatcagccatgggggtcctcaaaaaataatgtgggtgggctcttcttctaagcgccagttatataagtgatctggacctgtaattttattccttagataagcttttccccaagattgtgttctgcatggcgctcatttcatgatggtgtgagtcagtggcacgccagaagatatgccatggcaaagaggctgtggagcccgtggcagccaacattaagcagagatttttcacagccaaagatgctgactcagctctcgtgcccggttccccaaactctgggccatgaaaccctattttccagatctagtgtttttcaggagctggtttcatggcactgtgttctacagcctattcattgagaaaggctgctgtaataatttcagccaaacctgattattaaaaaaaaaaaaatcattaattaaggagctctaggggccaacagaagcagaacaccaagctttggatacagaggcttcctgaaggaaccttggagataaagtagctgaaacatgtacccgcaggtaacccaatgagtcgaatcagacttgttagcgctgtgttggctaaatgttgaaagaggtttactaaaaatgacaattcacgttttggaacaattgaatctatgccattctttctggcagtagtccaatcctaggtccaatcacctgtttaaggagattttcagctggtgacaaaataattccattaataagacttaatatttttaatataaggaaaaaaatactataaatcaacagaaaaggacaaaggacaagaaaaaaaaacaatggaaaaactaagaaatgcaggcagccagcagaggcctggtgaataggctgggttatgccacagtaaaaagcatcctccccaaagctgagtgacttaaaccacaatgtctgttttttgctcacgctccgtggcaagtgagagtcccaggcctttcttcccatcagtctagagcagaggctttcggaggctcaatctcagcctgggctctaagatctcaggaggaccagggacagtggaaggagtgaacatttactggctcttaaagttccatccagaagatacacacactgctttcacttgcacccccttggtcaaaaaagtcccgtgaccacacccactctcagagctggtgaggagtgcaatcttacctgagccctggaggagaaaccaaattcagtgggaacaaagacgacatcagaacaaccaggagacactgtgcaattgtttgccaaagttgacaaaagctaaagcaaaagtgaatggaaccttgcctttaggcagtttatctttttagccttttggtggagagaagggaagagagagggctggggacctggggaggagtggggacatccagctcagtgccagggaaagtgatgtcaggcacaggttagggaagggcagggcagaacacctctcgctggctctgctggaaggtcactcatgcacagtggttctcattaggattaggatgcaagcaccttagaagcaccctttgccttgcggatgcctgtggctaatcctcacgcagagagaaaggccgagggaaggtcaggacaaacagcatatcctcatcttccccctggggttttccaggaccggatgataggacaatagtcaataacaggagaccaagaagcaaagaccacctatgccacggaagaaacttgcaatgtatgaataaggaaagtggccattgcaggaattatccagcccaggcgtcaaggtgtctaggaagacatgagacctacgtgagtaggcggtgcggtggggttagggagtgtggctgtggtttatgaaaatgagcttctgatcagaggggccttatctagagagtcagcaaagcaaggtgagttagaggccagggtcagagccgcccttcagggaggccccgaggagtctcagaggctgggccctggagcccaggtgggcacattgccaggacccaggcggacagacactgggatgtgtacatttcaggggagctggtctcagcttctagacctgaagaaagccgtcagccctgacctcaccacccagattctcattctgccctggtactagaacattgacccaaacacagacagaagagaggagagagggcactgggaagaagcagctagaggtgggaaggatggggggaaggtgctgccaagaaaatgaggcgtttctggaaggtggtggtcttcatgtcaaagccagcagagccaagtacaaattgggcaaaagacccacctgggtgtcctctgcaagacagggctccgggagtagccaggacaaagggcacagaattccttacagcaagagcagtttcactgatttactaataggtcatatttagcgagcattggcccgcactggtcataggccgtgcactgagctaggtattggggaagtggtttgtccactcgttcattcatttattcattcattccatgggtttcttgcgcatccactgtgggccaggcgctgtgctaggtgcttggaatgaggcggtgaactgagtagatacagtgtctgccgcagactccattctcatagaggagacagacaggaagtgcgtaaacctgtaataggatagaaaaatggggtacaaggtgacagggtggtcacggagtcatagcggttagtgtttcctaagcacaaactcagtaccttgaatgtgtcaaagccattttcatcctcaccgcaggagaaagttctgttatttcccccattccacagaggaggaagctaagtcacagagagccaaggtgacctgcccagggtcccacagctcataaggggtagcctgggaagttgaagccaggcagaccagctgcagaaaacccacaggaacctcagtgcaaggtggttttattggggctgaggcctcaagcaggggaatgtggcctcctgagacactctgggcggccagggcctgcctgaggtgggaccaagcatggtggagtggctggagcccggtggggaagggaaggagggagaaggccttggcaggagcagacatgaaaagcaggttgattttattctacttgaaacgggatgccattgatgccgcctcgctgtggtggaagcggacacggggcggccggagccaggcgttctggggtcaaggccacagtgtattttaaatggtcggagatgggtgtacagagcaggtttctgggcccacttccagagattctatcgttgcaggtctgggcaggggctccggggccgcctttgaaactctctccaatgcacacacacccactgtgagcctctggacgcactcctgcccccaggaaactgaaactccctgtggataccagggccctcctcccagaggaagaacagttgagctgctccctgatggaagaaagacagttccagaacacgtgacggtgaggacaagaatttcaagccagggggaagacatgaaggaaggaccggacacctggaggtggaaatcgcagacaagggctgagctggagggggctttggggtgactggatcacagagggtagaaaggggtgaagcaagcctgggtcataagttggggctccttcaaagcagccacagacccagggggagaggctgtgggcacagctaagcccctcgtttggttggtgaactctgaccctcctgaggcaatcctagtaatcatagcagcaatacgcattgcattttcggggtgggccaggccgggcactacccacattcctagcagtgattgtatttgatctgtttggttttgtctgagacaaggtcttgtgctgtcgcccaggttggagtgcagtggcacaatcacgactctctgaacctcaacctcccaagcccaagcaatcttctagcctcagctttccaagtgactgggaccccaggtgtgtgccaccatgccc

SEQ ID NO: 1355 - DNA, 7141 bp, synthetic construct
  misc_feature 1..7141: note = Description of artificial sequence: synthetic polynucleotide sequence
  source 1..7141: mol_type = other DNA
caaattcctgggctcaagtgatcctcctgcctcagcctcccgaagtgctgggattatgggtgtgagccaccgtgctgggcctcatttgatccttttaacagctctgtaagcagatgcaatgatcacctccaatctattggtggaataactggggctcgagtcagaccacatgagccatcattagcagaggctaggtctctttggggaccaagccttcagataataaaaatagccgtacggacagtaacacaaacccacctcacttatccaaattctgaaatccaaaaacctctgaatcccagaattttctcataacttacttggcatcaaaacctgacctggaatttttggcaacagaaaaagttccaccagaacaaatcttcacttgtgttctttagggtgaacagccatctgtttcgtggattcgaatacgggacacagcccagccgcactgggagggttgcaataatagatgatattctcacccaattccctttctaaaatccacaaaaaggcccagtcttttggcagaagggtggcctttggcccttctgcaaagatcctgctgtcagttggaaggaggtcaggagtccacatttctagttcccgtcctgccactcctggtttctctctgtggcagaatggaagcggctcctgagtgaggctgccgggcaggtgaataagaagctccctgaatgaagccccctgcacgaagggaagctgtcggccaccctgtttctgggactgatggcccttgaggaagggttggtcttattgccccgtgggaaagagatttgggtccaggagacctgggtcctcgtggtggagctcccttctataggtggaataattggggctcatcgtggcctcatttttctctttgcaaagcatgaggactgggagcagagatcagcagtccccacgactggggccgcctgggacgcgctaagccggacacaaggcattttctcagacccagcccccccagaccccccaggcccccaggtcctaggacgagctctgcacaccccgtgctttcattgacgggtggtcaggcccagcgtcctcgctttccatgactagtcctgcttttcggggtggagagcaggggccttcccggagcctcgattcccacgggtgggggcctgggagggggccgtggtgggcgctgagcaggcccagggaggccgcgcacccccggccccctcgccgcccgtcgtccaggcggccccggagccggctgcgggcagcaagggccgcggggccccgcgctcaatgtctgccccactcaaaccccagggtagggaaggatttccatggggcttacggtgatttataatgggaaacctccgctttcctcacacattgttctccctgacagaggaaagaaagagggcactaaatctcctctcatcatagtaatgatgaagcccgcggcgtcccggccccatcccaatgccctcgacgacaacaaagtgctctattgtgatctatcacatttttctcaaaaaaccttcaaccgcgcacaaggccagcgccatatcctgcactggccctccctcattgtcctcgccgagggaaacggaatgtgtcagtctgagtaatgcgccttcaatgcttctcaggagccgctggctcggccgggataaagcagcccccacgctttctcaggccccggcccgggatgaaagctgcccgcgccgccgggcagccaccgcgccacctggtccacgggccggggccagttcggccggcagggctggtggccggccccttccctgctctcacccccaatcgtaggcccgggagggtgagaatgggggcaggggggactaggagaggggaagcagagggttacaggggcaacagggagccggccttcaggagctggaggggaaaatgagggactcaagagctgggaggaagcaggtatgggggaatgagcctggccacaatcctggggcgacactgccttgctctgccctgccccacacagccccagccccagccccagcccctgccctgcgggtgaccaagaggctgcaactcccaccacagtctgaattacaaagccctaaacacacccttcccatggcttccatgtgcatggctatcaaaatcaaacccggctacctacatggtgtcattcattcattcactcacatgcattcattctcactctgatgggtgctttaatgagtggggaatgggcaggtgcaggtggggggcaggggtgaaggtggttctgcctgccccttgggtcccacctgatgccgtgatccccagcaggacctgctgcatctgctgcaggaccctgtgccaagtgagaatgcagactcctgtgtttcccaaaactgctgcaggctgttcagcggggacagcatagcattgaaccaaacgctgacacctactgaggctggccttgtgtgaccgcaccatcgccagccgtctggccctgctcttcataactctccattccctccgcgtgctgggactcggcccatgcaagggcgttgactccagggtgggggagttgtcagcctgtgactgagtctggcctccctcttgctgaccgggtgaggctgagcctacacatacttgacaactctggaaaatcgggggttcaaccagacaaactcaaagccccctacagcccagctccacaccccagctccacacacaatgcagtgttcaccccatgactgctgtggacccctgctctgcaatcgctcgccggcgattgagggtttgcagtggtaaggaccttgaaggtcacctcgtccaactgctttattgattagatggggaaactgaggcccagagtccatctccagcccccacgtggccgcctgcctgcccttatgagcctcccctccaaggagcagcaggctgtgaaaggcaggccccagtctcccctccagctggtcttcagcagctggaccagagcagagctgaccaggagcaagcctggaccacagagttgcatgtggtccccagacctctgcggctgtcactcactgtgcccagaggaagaacaaggccagtcttccagatagctgggccctggagggacccaagaagagcctgtctccaagggcctgtgctgctccggcatccttttcctggggaaatcaagacgccacctcagggcctcttggccagtgtggagcctctgcctgggcaccaggacccaatattctcacaggccttcatgcctgcccccataagcctgagtatagacaaactggcaagatgggctctgaggctgtgtgccagctggagatgcaaggtgagagggcagagacactgtggcaggtaggagctcgccccaagctggtaccttctcatggaagaattgagggagcggactgagaacaaacaccctacccagccatgccgtttgcaaagagactctacagtgtctcccgtggagaatggggttatgtctccccaccctgaacctggacttgctgtatgactcactttgaccaacagaatatggtggaagtggcagagtgctgattctagcccaggcctccagggaccttgcgtgctgccctgtggtctcacacctccacacagccctggcagcctgcaagagaatgacaaatttgtggggccaagccaagctggtccagatgttccagccaaagcccagagataagagagaacccaggcaatatcagtgatgctgcctacctgacttgctgctgatgctggacacaccagtgagcccagcccaaagcagaaaaccaccaagctgagcccagccttatctgccaagctaaagattcagacattgttttaagccctgtgttttgggatagtttgtaatgcagaaattaattgcatctacagtgccaggcggctaaaaaagccactgttcacacagttgctgtctttctctcttttcttcagtatcaattctttccctaccctagaagctcagctcaagtaccccctgccctgaagcctgttctgaccatgccagcctgtagtgtggagacagcaaagtgtagcagaaagagctctgcaaaagggagtggaaagccccacttcacagcatcattcactcattccctgagatttgtgcagaggagacccagaaagcagggcagggagccagccttcccatagcttccagtcgaatggcagagacaggctaggagacagacaaggaccacatggcctcttccctgctctagtcaggtaagcccatgggaatgcaaaaactttcccaggaaaacatggtgtccagacctgagcccacgtccctggctacctcactggcccacctctgacaatttcctgtgtcctgtggactctggccccactggattggaagggccaggaaggcagacaaggaggcacttcctctacatctcacagtgcagacaggacccaggctagcgtgccaccctcagaggtacttggaaaacctttgctcagttggactggatgagactgggttgcactgaattgaattaactgagttcagtggaaatgaactaaatcaaatcaataacacccttgtctggcagtaacacagtctcatctccaacaatgtctctagggtgggaaccatgtttcacccactctggtctccccctccagatgagcacagggctgggaagtaggccagggctcgaggctgtttggctgacacaggttgaccatatttgtaaagattgcctctcctctggatccaaaaactccagaataggaattgtctacccatctccttcatctgtgtttatgccgcgatttttggagggtagggggctccaaccgtgggccagaggctttgctgggtcttggggatgttagggtaaattcccttatttaagtgatcttgtttatgatttattattatttaatttgcttactttgctgcctccagggcccagcagaatttgctgagccccaaagctcatgacccggcaggtgaggtgagcacaaagaagcctcagaggtgggggtggagggaaagctacgcaggagctctgcggaaggcccaaggggtgttcggggcacacgaggggtgttctgccccaacagtggggtccgggaaggcttcacagatgagggaacccgggcaaaaatcacacacaggacttggcaggatgggcacagcagagtagcagttctggaggagacagaagcctgaacctgcgtgtcgggttggcacagccagaggtggccagggaggggtaggtcaaggaggccttccttgcctccttgaggagttcagggttgtcccaaaagcaagtgaggaaacctggaggatggcgtgattgatggtgccacggttcccaggccttccccactcccagatccatgccctctgctgcgtgactttgctgttcctcacctggacatgcgcacctcctgccccacagaggctgggctccagccaacgggccatgggcagcagtggtgggaacagaggtttgaattgtccctgcacagagccaatgctgagagcaggtgcccagcagctgccgaccccaggaagcagagaggccttgtgcagacccagagcctgagcccagccgagccccctggaaccagcctcatcccctcccattgcttcccggggtcgcttcccaaatcagatgctgtctccgtcagttcagactgccaacacaacaccacagactgtgcggtttaaatcgcaaacatttatttctcacagttctggaggctggaactccacgaccaagtcactggcagattcaatggctgtttgcaggtggccgtcttcttgtggggtcctcgtgcgacagagagcagagacagagccggttctctgggcctcttcttatcaggccactaatttcatcacggggccgcaccctcaggactcaactacattccacaggtcccctctcctaatgccatcacattgggagttaaggcttcaacatatgtatttagggaggacgcacacatttggtccgtagcgagaattcagactcaagcccttgcctcaggctctaatgcacccaaacccagcagccacgcaccgcacaccctggagagcgtgcaggggacccctgggtgggtgaggacaggttttgggactcaggagctagtccctgggtttgtctcgtcagccttcgcccaccccttgacctcgaatgggcctcctgacccagaacatggggatcggggcctgggaaggttgagggaagcattaaatgaggtggccctttgtcatgtatctggcaccccataggcgctcaaatggtgcaacgaggatgccacggccctaacctgcaaacacgtttccacgacttcacgccggaggcagccaaaacgcttcccggctccccttccctggggccctcctggcagtccctggagccagccccttggctcctgcctggcccctcctaggcagccggcctgtcccagagtccccacccagccctggcaccggcaggcaacagacgcttgctggtgggtggtcgggagcacgtgcctggggagagctgcctccacaccattcactgatctaatcaatatcctgctcctcccgagaacccgatcacaggcccatccaagtgggggtctggctgtgaccccttcttcaccccgaacttcccccatggccaccacctcccccttccctctccccagcccgctggggtgggccgctgggaggaagcccatctctgacgtggaccccgcatacagggggtcgtgggcctgtcagattgggtcacccgaatcaagggtgatgataaaacctgtccctccaaattaggccagagcccccggagccccgctgattacagcctgtgcaccgaggacaaagggtccctctagggtcattaatatggattgaggcccattgttttctcaaattaggccacagggagcgcttcttggggaagcacatagcgggtgagggttcctggggtcccgcccagggtcctgcgaggccaggctggagagccagcaaggaagaggccagaccattcccaggctgaaggctcgggctcgggggtgaggccagggccagtgggcttccccagctcacctgcagaatgttctggagaaataaaaggatccctctgagtacctgctgggactgagtgagcattcttaacttacacagagggtcttgctgtctgca

SEQ ID NO: 1356 - DNA, 1381 bp, synthetic construct
  misc_feature 1..1381: note = Description of artificial sequence: synthetic polynucleotide sequence
  source 1..1381: mol_type = other DNA
gagtataattccacatgagatttgggtggggacacagatccaaaccatatctgttggtttagccacaagtgagcccctcctgccatatgctgggcagccagggaagctacccaggatgcctctgccatcagggtccgtcactgtgagcccaggggaggccattgatgaaggtgggtgggtgaggcttaaggtaaatgaaggtggggcacaaggtgggaaggttctggaacatctgggcatacttccccatggggtgtacaccaggaggcacagagggcagcccacatcaccaagggcctccagtggccggctgactttaggctgagtcggcagaccacacgcccaagagtgacaaggccagtcactggaagcggaagaaacgctagacatttatccttattttctcagacctttttagaaataacagcgttattgaccaagaataccatacaattcatccatttccagtgtaaattcggtggtttcgagtatattcacagagttgtgcaaccatcaccactcctaattttagaacatttttatcacccccgagaaaccccacaccattagcagccaccccacatccgccgctccacttcagtcccagcaaccactaatccacgttctggctcggtggattgactgcttctggacatttcatacaaatggaacatacactgcgtgtggctttggtgactggctgctttcagggttcatccgtgttgtagtgtgtgtcaatgcaaaccttcttttatggttgaatagcaccccatggtttgggcacagtacaggctatttatccatccttcagttgatgagcttttgagttgtttcgttttttggctggtattacactgctgggaatgttcacgtccaagtgctaccatttctcttgggaagatatctaggagtggagttgctgggtcacacagtaactctacgtttaacatttcgaggaatcgccaggttgtatcattttacattcccaccacaacgaatgaggttccagtttctccacatcctcaccaatacctaacaccatctgcctttttaattttagctatcctagtggctgtggagtgccatcctagtcttctctggatttgtgattccctaatgactaataatgttgagcatcttttcatggacttattggccatttgcatgttttctttggagaaacgtctattcaagccctttgcccatttctatttggtttgtctttttactgttgaattgtaagagtcctctatatattctggatactagacctttatcagatatgacattcgcaaatattttctcccattctgtgggttgtcttttcactttcttgattgtctcccttgaaatacacgagtttttaatttttgtttttttg

SEQ ID NO: 1357 - DNA, 7261 bp, synthetic construct
  misc_feature 1..7261: note = Description of artificial sequence: synthetic polynucleotide sequence
  source 1..7261: mol_type = other DNA
ccaaagtgctggagttacagacgtgagccaccatagcagccaagtttttaattttgatgaaattaatctatgattttttgaattggatgaaaaccaactcatctaattttgatgaaatctaattcatctattttcatatatttatgaattggatgaataaatctaattcatctattctagatcttttctttttgtttggttacttgttttttgattttttttcttggtgtcatattaagaatgcaaggtcataaagacttaaacccacactttcttctacaagttttatagttttcttccatttaggtctttgatctattttgagttaatttttgtattcagtatggggtagaggtccgattgcatcttttacacgtggatacccagttgttccagcaccatttgttgaaaagacattccttgttaaatggccttgacactttttgcaaaattcagttgactataaatacatgagtttatatttgatttgttcattgctagtgtatagaaataaaaggaatttttatatattgatcttatatcctgcaaccatacctaactcatctattaactccaatagttttttatttaatttcttaggattttctacatgtaagatcatctgcaaatagaaatagctttactttttcctttccatcttgatgccttttatttctttttcttgcctaattaccccctctagaacctccagaacagcgtagaagtgataagaatggacatcttaccatgtcccttatcttaggggaaagtctagtctctcagtattaagtagaatattagatacagggttgtttggtttggtttcaatgtcctttatcaggtacaggaagtacctgtcttcatatctttttactgaggtataattctcatagagtgaagttgacaaatcataagtgtataaacaaatcttaagcttgatgaatttttatgtgtgtgtgtgtgtgtgtgtacacccatgaaaccaccaccaagatctggctataggacatttcatttcacacacccagagagtcccgttatgggattccccattaggtttgcaaaatgcagcaaaaaaacaaaaaacaaacaaaaaaaaaacccaaataggatgcccagtaaggcttacaatgagggatgaacaaataaaattttagtataagtatgtcttatgaaatatttgggacatatcctgggacatatttacacacacgaaaaaaactattgatcatttatctgaaacacaaattttaactgggtattttgcatttgaccacactgccatgaatgagttttccccatccttgaacctcatacagctgaaatcatagtgcatgaaccttgtttcttgtcctaatgtttctgagatccatccatgttattgcctctatcagaaccactcttcttcactcctgagaagtgttccattgcccaaggtctatgtttgttttcctgttgacgcctgagctgtttccactttgaggctcttctagatggagctgccatgtgtgctctggtgggtgtcttgctatacacacatgcacttatttcttttgggtaaatacttagaagcggaattgctgggtcccaggtgggcatatattagctctgttagaaactaatttcttttctgcatacgtgtaaaaaatacattagttcctcacccccctaaacacacacacacacacacaaacacaatagtaactatgtgaagtgatgggtgtgttaattaatttgattgtgataatcatttcacagtctatatgtatatcagattctcatggtgtacaccttgactataagcaattttaatttgttgattattcctcagtaatgctggggagaaaagagtaaaacaaaatcaagaccactccatgcttagagtaaaatcaataagataacactctaaaaaaataataaagatgtgagtacaatagtatgtggggtgtatgataggaggatcttgattgatggtggttgtgatctaaagagttgaggagttccgcagattggggacactgatggtttgggggcaggaaggggaggtgatcagaggcacgctttagggaggaagtctgactcatgtttgtgccgggtgccgagcccatagggatggtgcttccagaaagtccacaggactccagataaacagcaaaccacttgttggtataagtatgtatcaatgtatgtccccaagaacgcacagggcatattgacaaaatagtattccttatttatctgaaaatgaaatgaatgtacatgaaatctcaatttaattgactgtcctctatttctatgtgctaaatccagcaggtccacacaggcgtgcccacagagcatggggaggcacggtcgccatggcacaagtgaggaaggactcgctctgggcagccacctcctcaccactgggcacctgacacctgggtccaggctggctgggcaggggcagatgtggtgcctgctgagcccctcagaccacagctcagaccaactgacacagccaggcccctggccagcacctgcaggcactagagcccaggcctggctctctctgcagggctctggagttcaggctccccacagagaccagctggtactgcctgcccaccccttcaccgaccaccaccaccaccaggcatcccgactgagagacgaaggccttgagagcaaaggggactcttcagcagggtgtgccctgggggcagcaaagatgactgctgctcttccctcctaaggatttggtaccctacccatgcccagggataacagtgcccagttcagcccagactgaggtccaggcctcctggcagggggatgcaggaagtggagcagtttctgcacaaaaacatcaaggattcgagcagagcccgcggccagctcaacaagcctggcactggcacatccattcatttgttcagtacttatgtgttcagcacttgtgtattcacagccggccacgtgccaggctctggacacccaggggggcacagtgcttctatgtgctaaatccagcatgtagaaactgggagaagtctgggtggggctctgccagcatcctgagtcctggtggagatggtcggcatggtcagccctggccactcatgtcagctccctcccacggccccatgctgcccacacttacagggaacccaaatagcctgacaggcccgcctctccaggtagcccacacgtaacgtatcatgccactcagaatacccaaatgagagattccagttttcaacttgcttctcaaagttctgccttcctcatctgagcatgtccagcggcctgtccttgcccgactgcagtggctggtcccgagctaagaccccggggaccttcttcaggagcgtatttaccatctgggaatggggtatctggcaagcccccaggagagagccaacaatctcattttgcagatgggaagaccgagattgggagacgagaagagtagtctggaggccaggtctgcagactgagcctagagctgctcccacagcccctgctgggtctggcacgctcatgtccagtgctcgagcccctccctgtagatcacacccacttctgactcaggccccaacaagcccttgctagcccagcttccccctcccccgcccaggcaatacaggcttctgcaacccctgactctgggatgtgaggcagaatccagagacccaggcctgggggctgtttcagcaggtgtgagcatctacctgcaggaaagtaggtgcttccagcaacctgtgatcaccttgacctgcacacctgtacaccaacaagccccagagggaggtaggagccacccgacctggtcagcatcccactgggacagactgcacgtgaatccaaagatcctggaccgaagctcaggtctgtctgggtcactgagttccttaagaccccaccctctgggggactctatgaagcctgactgtgaccactgcgtgggtcagatcaggatagatggggtgactagaggctccatctcacacacatctccagcccggcttcttggaaggtctgggcatgacaacttctcttctctgaagatgcatctctgtctgctggcgggcctggcatcttctgggggtgcttctggcatcttctaacaggtctgtgcttctcagtgaggcagcttggccacttggaaatggccacgctgggtcagtaaggacaaaggaagccttggggtccaaacggtgactgggttcagctcacaagaaagcggggatcccttgaacttcaaaaattagcagttctgtccacagggaggggtggccgaggcagaagatctgaaactcatcaactctgggcctggacggggcagcatctcagcaaacctttcagaggtgcagatctgtagggagctacacagggcagtggctcatgcccacagccccgggctccagcttggttttccggcctcctagcaagacactacaccaacagtgcaggacgctatgccgagggtggggtccatctcctttcacagaggaaataaatcaaagccttcaagtccgagtttgatggaaatatttcaatccttcatgggtaatgcccatcattctaaatgttttgtggtaacatacagtggaaatgactgcaacatgacgttgttattccgtattctgagccaaactcctgaggtcggtcttgtttgcatcacatgtggccggggaatcgtcccttgagggcttctgtctgcttcttgccaagcggctgaatggatcgatgacggaggcatctcctaattgccacagggctgctcgtccctgctcagtgcaccaaccagaaagcccagtgagggagggggatgcatctgtttggaaacagcgcatcattgccatcctgttgtggggtgtgccatgaacctagtagtcacaccgggggttctgaatgcggtccaagcaaccggtggatgccggaggaagcatttgctttcctctaatccttcctacagccccaccagaggcccgcactatgattgttgcgctgtcactaattttccaagggtcattttcccccatccagaggaaagtgatgtttagaattccaagtcgctcaccccttccattggaagtggaaagtgaggatgcctgcccacccgtccagggtcgatcctcggccctcggctgtcagtgcacagtggagagatggagcccaagggccagaaggcggaggtctaggggccagcagaagggatgccgtcagcttggctgctgctgcaagcccactcatctctgcacctggagggtgacattcattcggccagggtggggcaaggggatcttgccttctcagcccagggcctggtctcatgagtgggagtatttggggtccatgcagaaagagcaggggagatgggggtggcctccaaagttgctgtcagcatgcccttggctcaggctttgaagtatgtttcctggtggggctccaggtgcacaggtgcacgcacctagccagccactgaaaggagcgagaccccagggccatggtcggtgctgataggtgcacctctgagtggctgtggcttctgttttgactggatggtcaaaactggggtgtctttaatctgcctggcagcctcccaggtaccctgagggttccagaagttggtggggcccaccatgtgggcagggctgcgagagcccccgagatcaccctgaagtgcagggacagatccgggcacctggggaagtggagacaggtggagactttgcggtgacttgctcccaagtgggacactttctccagcatctgggcttgcaagctgccagtgatggtgtcctgtcctcgggccggggcccctttgccttcaggatgaaactcctctccccgacacaacccaagatagaaagcgtcgttcagctgccaagttgttctgaacactgtgatgctcggaaccagaaacaacccaagacattgacccgcttgtgggacgcagcaggaggcccctccgtgcccaccagtccttcctgagagtgcaagtatgtcagagctcggctttggccttcacccgccaacctctctggggtcagcggaggggccgccctctcactgttgctctctcgctccctggccaggtcacagtggaggtctctccctcctccctgacccctgagctcctgaagactcccagcctgcaggatgaccttcctgagtttccacaccctcccctccatggggtctgggccttgttgctgcggtgtctgtctgtgtcctgcacgcggatggcgtccagggccgggaagaggggctcacctccttctcctcctatctggcctgggtaattggggacagtggggagacaactgaggtgacctctgcaagacccgccccccaccacctggtgacagcgggtgtacggcacttcctgccgcacagaagtcagcttccatcagcctccacgaagagagaatgttagggtcttgctcgtgggggccagattcccccttctctccctcccttctcttctccctccctgcttcccatcttccctttttcctttccttccttctcaccttcctctcttcctccgtctccttctttccttcgctccctctcatcctcctccctttttccctccccatggggagagctgtgatgactctctccttacatagaagggggtgagccaggcacaaggaggagacacgaaggccagggaaggagcctctgcttgaatagccctggggacggggagttcactccctctgcagactgtgtccaccccatctggagatcttgcctcaagctgaaagctcagtgctggtgtccccggcccgggtccccttcccgtccatgggaagcgagggagatttgcaggcccagagcctcttccttggctttttcctccagccccacctcttggcttctctgcaactccgcattacatctctttaggccccaaacagccacccaggccccaagaagcctgtcaaaccccagatgtttgccgacaccgtgagaggccccgggtgttctagaacacttggaggcctggaagcactgtgtggaaggaacacctggcggacaggctgctgaatggctttctgtagatgctggacaatggacagaacagcctccttcaggtgacagagccacaggggcctcagaaggaggggtgactctctccacctctgtcccactcttccccaggcacccaggctctgcctcctggtgtcacaaagtcccaccaagactcatgcattgggccaggcgcggtggctcatgcctgtaatcccagcactttgggaggctg

SEQ ID NO: 1358 - DNA, 4021 bp, synthetic construct
  misc_feature 1..4021: note = Description of artificial sequence: synthetic polynucleotide sequence
  source 1..4021: mol_type = other DNA
gccgagatcgtgccactgcactccaacctgcgtgacagagtgagattccatctcaaaaaaaaaaaaaaaaagactcatgcattgaggaatgtcccagtagaaaggatctcaggcaaaaaaataaataaataaaaaataagaaccaaaaaagaggtaaagggacaaatgtctgccacaacttggttctgtcctcacaacacactctgtgtaggaggatgcgggtgttcacagctggcgttgaaagtgcagtgtgactggggctttggtggctgcgagagtcaaaggaggggcatctccactccacagatcaattccaggagcccagtgaggaaggcagaggccctgatgcttcttgcttcacagaggagcaaactggtgctcagagaggttgtgctacttgcctaggaacacacagcccagcagcagaagagccaggactagacactgagtctcacaaccccacagcatggctctagcattgaatgtgcccaagagagctggacctgccgtggccccacatggagacagggaaacgtccacacaggacaacgtcttccatgatgaagatgtttggatggttcagatctcacccaaacctcctgttgaactgaaatccccagtgttggaggtggggcctggtgggaggtgattggatcacgggggtggagatcttgtgaatggtttggcaccatccccccttggtcctgtatagtgagtgagttctccccaaagctgttttttttaaaagtatgtggcacctcccgctccccacatggtgacttcaggcagctccaccgagcactccatacaggagacctgcacaggtgccctgagctggcatgactccgcccatgccctctgggatcctgtttacctaaaatccacagtaaccagagctctcagtcatcctgaccttgggcctgcagatccatctctgcaaatcaggtcaaataaaccagttgtttaatttaggggaaacaagaggcatacctgagcttccaggtgtctccaccccaggagtgatcctctagcagacggccctgtggctgctgcctgcccaaaggcttctggctgggcttgctcttcctggacacttggtgctgtggtctgcgtgtttctcacctccgaaactcgtgttgaaatgtaattctcaacgtagcaggatggaggggtagggcctttaagcggtgattgggtcgtgacacctctgccctcatgaatggattaagacattcatagatgagtgaattaatagtttaatggattgatgaggttgtcatgggagtggaactgaaggctttataaaaagaggaagagagatctgagccagcacacccagccccggtcatgtgtattcagcagtttcacatcaatataaagacattcttaaggctgcgaaatgtttaaaggaaagaggtttaattggctcacagttctgcaggctgtgcaggaagcatggtgcccacatctgcttggcttctggtgaggcctcagggagcttttactcatgatgaaaggccaagtgggagcaggcatcacatggttaaagtggaagcaagagagagaagggggagggccacacacttttaagcaaccagatatcaagagaacttactcactatcttgaggacagcaccaagccattcatgaggagtccaccccatgatcaaaactctttccaccaggccccacctccaacattggggattatgtttcaatgtgagatttggagaggacaaacatccaaaccatatcaccatgtgatttcttgcactgccttgagacttggcagagagtccccagcagcaagaaggccctcgccagatgcaacccctcgatctggacttctcagcctacagaactgtaagatacaaatttcttttctttatagatgattacctagtttcaggtattctgttataagcaatagaaaatgggcagagacatctagctcctcttggtttagtcacagccgacagcagagacatagatgagggatcctggcttctaaccaggtggaggaggaggagagggtgccagaagcttcctctaaactgcagcagttgtgccaggtcctgagggcaggagtgagctgctcccgtgctgggaagagcttggctcaggtccatgggaacatggcggcattgaggccatctttctggaagaccacttgtgtgagtcacccaccttcttaaaactcttcagcagctgaaggtgataaaaagtcatgattaaacatgatgctgagtcaaagaagggtcaggaaggaccacatgttgtgtgattccactcccatgaaggtctagagcagggaaatcctcaccggaaacccacagtcaacccagcacctcctgccctcacttccacactccctctgtccactggcactgtccacttcacctcctgcaccacctctgagctgccccctcctgccacctgcattgccattgccttagcccaagcatctcttccctggatggctccatcagccttccctggtctccatttgcagccctccagcccattctctagttctgccaagccctgtaggaattccccctcttcccctccagcctttcccactggccctggccctgtcagctgctctccactgacctaggctcctgggctctgtccaccctgtgcttcttcctacagcagggccttgacatatctaatccattcccatccatccccagagctcagctaaaccatccgtttctctgggaagactgagaccctgacctccttggatggtcaactccgcccatgtgtgcctccttagcagaactcaccaaaattgtaattttatatttttccctctcttccatgaggacatgaattccatgacaacagaaattgcatctgtttttttgttttgttttgttttgttttgttttgccactgcaccctaggccacccagcatagagatgaatactcactgaattttaggaagaaacttcgtttgcacctcaacccccaaccccactgcttccccagtcatggcactgcctgattagcttaaggcggggtgggctgctcctcggtgcagcttcatcttccccgtggtgaaatgcagcatttccaccaggcagtctctaagacctctgcacaatcttaaattctgcagccatttccctgatgtcttcttgcacctggtatggctgagaggttcatgcccatcagattctcatttccttgaatgtgacctgttttcacccttggaagcttttaggagtttctatctatactaccctgaaatttcacccaactaaatatttattgtgtgtggatggggcagggcggggtgtatgggagatgtatatcaaaggataccaagttgcaattacataagatgaataaatccagagatccagagacctacagtacagcatgagaactctagctaataatattgcattttacaatgaaaagttttctaagagtggattttaggtgctcttaccacacatgaaaaggtaactatgttagatgaaggatatgttaaattgcttacctgtagtaatcatttcactgtatgtgtatgtatattaaaacatcacactgtacactcaaaatttatacagtaaattttaaaaaatctttaatgtgaatcatctttcagatttttttaagaatcttttcccctttcacaactgttctgccttatatggagtagatcccagcaacctaagactcatatcctgccccaactggggaaaacatctaccatgatgatatggtttgggtctcacccaaacctcatgttgaaatgcaatccccagtgttggaggtggggcctggtgggaggtgactggatcatgggggcagagttctcatgaatgttttaacgccaacccttcttggtactgtatagtgagtgagttttcacaagatctggtttgtttaaaagtgcaagacacctcccattctctcttcctcctgctcctgcctgtaagatgcctgctcctcctttgccttctgccatgatcctgaggcctccccagaagcagatgctgc

SEQ ID NO: 1359 - DNA, 1201 bp, synthetic construct
  misc_feature 1..1201: note = Description of artificial sequence: synthetic polynucleotide sequence
  source 1..1201: mol_type = other DNA
ttacccaggcttgggtatttctttatagcagtgtgagaacagactaatacacatgacttcttccatcattacttcatctttgtttgcacttttaattctttctggaaattccatccgcggatgtgggaacatctggatcttcctcttggttcattccttctgggtactgggagaattcttcagcttggaattccagctcatgaatttgttcttcagctgtgtccattatggtatttatcccatcaattgatttttattttctttttgacaatcaaatatgtaattcccaagctctgcaactgcttctattttggacatcctcagcattccctgaagatggtaatgtttatgagtgtgtatattttaaatctcttccctttgctgtttaattttatttctgcagcatttgtttttctgttgttgggtctggtcttctttttactcaaagtcctggggatccccggttgccagatcagtgctgtagccagaactactcgttcctctgccccctggtctgaagccatccctgacaatggtgtgggggcaaggagggagccaagctcttgttcttccagggcctgccccctgggcacagcacttactctcacagatggtgagggagcaaatgtctctgctgcccatggcctgaggaaaaccaccatgctggggtcagggaccccaacctgtaccctacctgcccacttttcagccacctagctccgaagttggctcccctgctctctaggcagccttctacaaatgcttcagagctgtggctgtttttctatagctattcctgtctgcttcccaccttccaagaatcccagatgtttttaagtcactaaagatgatgtttcttatgacacattcacagcacctctttggacatctcatgtgatttttcaaggatgtagccttgtgtgtgctgactgccaccttgattggatctttccaagggaattagtgagaacccacgagacacaatccccaccccacagagggcacttcagactacttgatggtggccagggacagaaagttctccctcggctggtgggtcccttcagtggaaaggtgtgaggagcacagttgacttgcttaccctttacagcaggacttactaacattcagtattcccgttgccacatgtatcaggctcttcttgatacagagaaataccagctgggcacagtggctcatg

SEQ ID NO: 1360 - DNA, 181 bp, synthetic construct
  misc_feature 1..181: note = Description of artificial sequence: synthetic polynucleotide sequence
  source 1..181: mol_type = other DNA
gagaccagcctgggcaacatggtgaaagctcatctgtacaaaaattacaaaaaaatatatatatatatatagctgggcatggtagcatgtgccaccagtagtcctagctacttgggagactgagatgggaggatcacctgaacccgggaggttgatgcttcagtgagccataattgcacca

SEQ ID NO: 1361 - DNA, 541 bp, synthetic construct
  misc_feature 1..541: note = Description of artificial sequence: synthetic polynucleotide sequence
  source 1..541: mol_type = other DNA
aagaaaagaaaagaaaagaaaaaggaatatgcgaggttgggtaatttataatgaaaagtggtttaattggctcatggttctgtgggctttacaggaagcatggtgctggcatctcctcagcttctggtgaagaccaaggaagctttcaattgtggcagaaggctaagggagagcaggcatttcacatggcaaaagcaggaagaagagagagagagagagagtgggagttgccacatactttgaaatgaccagatctcaggagaactcactttcacaaagaaagcactaagcaatgagggatccacccccatgacccaaacacctccccccaggccccacttccagcattgtggactacaattcaacacaagatttgggtggggacaaaggtccaaactatatcattccacccctggctcttcccaaatctctttccactctatctcttcctcctgttcctgccatgtaagcaggagcatcatgaggggaagagatgtcattcttacattgcaaaatacaatcatgccttctcaagagtccc

SEQ ID NO: 1362 - DNA, 1321 bp, synthetic construct
  misc_feature 1..1321: note = Description of artificial sequence: synthetic polynucleotide sequence
  source 1..1321: mol_type = other DNA
gcaaatccctttcacttatgagcctgtaaaatcaaaaacaagttagttacccccaagattcaatgggggtataggcattggataaacatctccattccaaaagggagaaactggctaaaagaaaggggttatagcccccatgcaagttcaaaacccagcagggcagtcattaaatcctgcagttccaaaataatctcctttgacttcatatcctgcatccagggcacactgatgcaaggggcagcttccaaggccttggggagctctgcctctgtggattcacagggttcagcccccacagctgctttcatgggctggtgttagtgcctataactcttgcaggtgcatggtgcaagctgccaaaaaatctaccattcttgagtctggaggatggtggcccccttctcacagctgcactagtcagttccccagtagatactctgtgtgggagctccaaccccacattttctccccacactgccctagtcgaggttctctgtgaaggctccacccctgcagcaggctcgtgcctggataaccaaccttttccatgcatcttcggaaatctaggcagaaactgccaaacctctttcactgttgcactattctgtgcacctcaggcttaacaccatggggaagccacaaaggtttacagcttgcattctccaaagtagcagcttgggctatacctggacacctttgagccccagctagagctggagcagcctggatgcaggaagcaatgtcctgaggctgcacagggcaggaaggccctggacttgggccctgaaaccaatcttcccttctaggtctcggggcctgtgatgggaggggctgccgtgaaggtctctgaaatgcctttgaggtcttttcccattgtcttggatagtagcacttggcttccttttagttatgcaaatatctctagcaaattaagctcaagcttccacagacccctagggcatgaccacgatgcaaccgaattctttactaaggcttaacacatgtgatctttgttccagttcccaataagtttctcatttccacctgagactttggcagcctagacttcactgtccatatcactatcagcattttggtcacaatcatttaaccattctctaagaggttccaaactgtctctcatcttcatgtcttcttctgagctctccaaactcttctaacctctgctccttacccagttccaaagctgcttccacattttcaggtatcctcatattaatacctccataccccactcttagtaccaattttctacattaggccattgttgtattgctataaagaaatacccaagact

SEQ ID NO: 1363 - DNA, 4561 bp, synthetic construct
  misc_feature 1..4561: note = Description of artificial sequence: synthetic polynucleotide sequence
  source 1..4561: mol_type = other DNA
gctgggattacaggcgtgagccaccgcgcccagctgagtctgagtaatttataaagaaaaagatttaattggctcacagttctgcgggctttacacaaatcatggagctggcatcttcttggcttctggggagacctagggaagcttacgatcatggcagaaggtgaagcaggagcaagagagagagagagtgaagccggtgccagataaacaaccagatctcacaagaactcactatcacaaagacagcaccaagccatgagggatctgcctccaggaccccgacacctcccagcaggcctgacctccagcattgaggattacagttcaacacgagatgtgggcaaggacaaatatctgaactatgtcaccacagaactcaggaagttcaggtaagtctcctggtcataagtggtagctgcaggaccctaatccaagtattctctttccaaaacctcagcttatctgggatgctcacaatctataaggaccccattatcagcataacctaccatcccctgattctagaatatttctattccaatccctccctccacaattcacagcctccttggagtcaaagctaatcaggtctgctgacaggccactggagtctggaagaaccctctctgcagctcacttgctgaggacagtgaagagactacctcgtttcactgtgcccatatcctgacctgcacaagggcattatggctgttgtgaggacaggtgaggtggcacaggcaaaagaggttagtgcacagtagaagagaataaacgtgcatttccctgctctgtttttctcaaagctgtgcttgtagaagggcactgccactttggagccacattcagagcccagattccaggtcatcccagaaggttgaatggatggccccagcccagagactggatggcttagagtctgatggcaggagctgatcccatagtaggtttagatctccccagactgcccatgtgtgacagctaggtggtttctgcagagtccaccccactccaaattgcagagtggcgtctgtttggtctaagataatcacgatcatcttaacccccttgccagagtgactcctttagggatcaaaaacaactcagctgatcagcaagcacacagcacttccctggccacagtgattaactcaggttggtctaaccagaacaaggctcaagacttctgttagattaagacctctctctcgctctgaccagtaaggggtgcagatacaaagcctggagctactgcagctactttgttgccatgaggtaacctagcccaataacagcaccaacaagaagcagacacagcaagagaactgctgaactctgaagccagagccctggttaaactgcaccggaagcctacctgccaccacccttcccaactgggtgggccactttggggtgggttttctgcttcctgtcacaaaacagcccaaactgacagagaagccaaggataggttgctaccagttccactagcaattcaagagctgagcctgataatgtggaatgagattcctctactaagcatcccaaggtttggtctgggaaaccttttctcttctgtgtcttccatatggtctgaaccagtcaataatggctcctgggtggttttccacctaggaaccaggacaccagagccagaaggaggcacaaacttgtctaatgtcacccagctagtgaatgccaaatccagggctcgaacccaggccttctgaactccaggctatatgccattcctgaatagaaactcaaccagctggcctgccccgcctggccaattgaactagttgctaaattgatactttgcaaaacatgcatgtttccaattgcagagcgttgctgtgactttgaagcagcgtgtagccttcccctgatgtggtgaaggacggaggtggctggcctggtatggagagggatcttaggaaactctccgcagaagccccagggcacccactcactggaaagagatcagaaagcagcctctctcccgaggccgcaggcagccagctccccacttaaaaaggacctggtatcaatttcactttttttgtccttattggtgcctccctaatgagatgatgttagagttggaaataaagagatgagttgctgggtaaatagataaatagataaataaagcctgggcttcttccaggaatgcagccctctccctcccggcggctggaggaggcgtgggtgtcgcctgacagcggcccaacttcttgccaaggcgctggggagtgggggccctgaggacacagctatcggccaccacttcctgcacacctaccagatgctggcctctgctttgcttgccgtccctcctttagtctttgcaatgactcatgaaataggcaggcgtcacccctcaagttcagacaaaacagtggagaccgagaaaggaaagtgaccggaaccaagtcatggcttgcaagtgatggggcagagatttcaggtcaggtctgtctgtgtccaaagacaaatatcgctgctgtcatggaagccccaaggagctcacggtccccttgggggcaaatggctccctcgggaaatgacagcaaaacacccaagatggagaattttcatcaccctgcgcggtgtgatgaggggctggggggaactggggctggagttgccagggggcctgaaaggagaggctgcacaggtagagaggcaccctggagggccaccgcgggacctgctccctgggcctgcccccatgtctgcctgccccgtccccacacttgccccctctgccctcatccctgcccgccccgtccccatgcttgcctccacgggcctctcctcgcacaggaggaggggctgttcctgccgcacacctgcggtggccatcctctcactcagcatgacagctgctggtccgtggtgctcaggggtggctgcgcaggctattagaatgtgtccctacatccacagtggttattatgcactgctttccgaggagccgccagacttccccataatctggcaactaaagggttggcacttggcacgggaagtggggactccagaacctgcttcagggtctggttgtggtgccccacctggtaaacatttcggaacttaccctcgattaggatagaactcagggtccctgctggagcccaccacatcctcagagccagcctcctagagcctctcccctgccccactccagccagggcctcgttgctgtttctcaggaacgccaagcaaaagtgcacccaggatgcctgcacctgcagatcctgctgcgggaactcgctgtccccgactcccctcagcctctgtgcggcatcaccttgctggggggtccccaccgccctgtaccaaagagcagcaccagcaacccccagcactcccttctcctccaccccattttacctcttcccagattctctgtcctcagactcatattactatggattgagttacccttgtcgaatcctcttgccaactaggagagcccatgcaggccacgccttgttccctgtcacacccgtgcctggaacagtgcctggcacaggcaaggcacactggggtgctgagctgagtgattgaatgaacaaataaatagatgtttccactcgcctttcctgagccctactgtgtgcatgactctgcactccaggctatggggcagccaggcaggggtgccgagctgtgcacacagtagggctgctgatttccagaactcctgggaatgagtggggttaaagcgggaggggcacaggggaagagctgaggggtcagcatgagcccaggagagtggagggagacagtgtcctaagcacatgccctgtgggaaggaagaggcccagagcacacgccgggaccagagcagggccccagttttggagcgagtcaggcctctgtgtcctgacctccagcaaaggagaggagactccgagtgtcccaggccccccaggagggttgctcaagggagccctgggcatcagtccttagaaatgggcccctgcacatgtgtgtgctgtcgggagcccagattttcttgaaaggaagactcagccactgtgcccctttcttaatttaaaacactcccttggcagggtgtgggggcttacgcctattaacccagcactttggaaggccaaggtgggtggatcgctgcacctgggagtttgagacgagcctgggcaacacgatgaaacctcgcctccacaaaaaataccaaaatgagccaggtatggtggcgtacacctgtagtcgcagctgaggcgagaagatggtttgagcccagaagttcgaggctgcagggagccatgatcgtgccactgcactccagtctgggcgagagagtaaaaccctgtctcgacaaaaaaataaaaatgaacataaaataaaataaaaacacccccagatagttctgttgtgggtgatgtttatttctttttgaaagtttttagtattttccaagttgtccagaaaattgtaaccagaaaaaataagccataattgctgttaaatgtttttgtttttgttttttttgagagggagtctcgctctgtcgcccaggctggagtgc

SEQ ID NO: 1364 - DNA, 301 bp, synthetic construct
  misc_feature 1..301: note = Description of artificial sequence: synthetic polynucleotide sequence
  source 1..301: mol_type = other DNA
cgttatctgcctgcctcggcctcccaaagtgctgagattacaggcatgagccgtgccgtcctgttaaatgtttttattattttaaaaacactacagaaaggaacaatcacttgtgttaataaattcatataatggaattttacagaatctttaaaatatttatgaattgattttaatgccatgaaaaatagatagtgggaaaaaatccagatactgaattgttggctctgagcaacataaacttgtatgtacatagtaggctgggtgtggtggctcacgcccgtaatcccagcactttggg

SEQ ID NO: 1365 - DNA, 421 bp, synthetic construct
  misc_feature 1..421: note = Description of artificial sequence: synthetic polynucleotide sequence
  source 1..421: mol_type = other DNA
catgagaatggtttgaactcgttaggtggagtttggagtgagcagagattgagccactgcactccagcctgggcaacagagagagactccacctcaaaaaaaaaaagcatgtttacatatatttatatgcatgggcatgtgtgtgtacacatgcatatatagacatacagagtgtgcatacacaggcatgtgtacacacatgcacacacaagcaggcacacacacccaaaccaacatctggaagggaaaatgccagcaagtagtggtgatgtctgggtggtggcattctggatttatttgcctttttaatcattttctgtactttccacatttctctcaactattttaaatgttatcatcaaggctgggcagcatagcacgaccctgtctctacaaaaaatttaaaaattagccatgcatg

SEQ ID NO: 1366 - DNA, 481 bp, synthetic construct
  misc_feature 1..481: note = Description of artificial sequence: synthetic polynucleotide sequence
  source 1..481: mol_type = other DNA
agagtgagaccctgtctcaaacataattaattcactgaatgttattattggaaagcatttttgtttcaaataagggttgaagcatagacatcagagagaaaagcaaccacctctcttgtttatttttccaaccaacattacagcccttgaacaggacacgcaggtgcccaaggagacccgtgccacactgtttgacctcataatcccatgcctaagaagccgtaagaaaataattccacagaaaataacaactatacaatctgctaatgtgtggatcgcagagctatgtataaaggggtggggtgggggaggggcggggagtgaaactgacctagtaccagccaaatactgtttggagagatgacggctttggagaagtcagggggcatttgggaggtggctacaaactcggctgtcacgaagcacggtgagatctcaaaacatgaaaaatattttgtgttggctgggtacggtggctcac

SEQ ID NO: 1367 - DNA, 3841 bp, synthetic construct
  misc_feature 1..3841: note = Description of artificial sequence: synthetic polynucleotide sequence
  source 1..3841: mol_type = other DNA
ctctctctccatatatatatatatatatatatggtgttaatggtgaagttaatatagtgaaaaggtgtaggtgggccctgacacccaagctctgtcagggtgtggaccaggacccaagcgccaaatccactcactgagcatccagcaaccctgtgacttggctccaacacgtctgactgtgcccagtgatgctccaggcagagaagacagcagtgagcagaacagacgggcccggctctcatggagttgatcttctgcgggggtcgggaggcttgacagacgctccatcaatacctaatcagtcccatggcacaggcaccgggggaaagctaaggcaggtggggccatgtgccacccgtctcctgggggtgccgccggcccccgtctccctgctttctgcagtcacctgtagccaacagaagagaagtgcagtgatccacctcctgtccaggcccggcccatggagacctcccctgtgcaattctttctctcttctgctgactgctgtccaatgtagggaaaccaggagaggactccaggaccttggggaaatggagccacagatggaagatgcctgggtccttgagttgctgctcagaggcgagctgctcactggtcaaggtcacccatgtgggctggataaggaacaaatgtgtattgtgttgagttaacgtatgtttggggagggtctttggtgcagcagctcacctgcctaatggaggggctaggaaatgtttgcatggggtgagaaggaggctttgcccttgagagagaatggtcaggaaggaaggtcctgcggcccaagaggacgtcagaactgagattgggaggaaatggagagcaagccacggggctacctgaagggaacccaccccaagcagagggcatgagtgtgcccggaagggtccatgaaggaggaggaggcctcgggggagggggtgggggcagggcaacagagcgaggggtggaaagagatgaggttacacaggcctgggaaccagagacacagagcctggcaggtgtgttcagagctcagcaccgactctgggtgagacagaagccacagccaaggagttcatgacccaatcaactttctaaagaatctgaaggcatcgctctgtgttattgaggacgcactgcaggaggcgctgcacagagcttgcaggagacccgagggtggaacacaacgagcagaaagaagcacccaggatgccccaggctggagcctaagtcagtggggagagggctgccacagggtcagctggggagatggagagatgagctgtcctgtgtggctttgaacccaggacgctgccaggaggtctcctagatggttgggtctctgagtctggagtccaggagggaggtcaggctggaattacaaagcggggacttcagggtatagcaggtgatggaaatgaagagagacgctgacctggggaggagggaaagaagggccgagggtgggggccccctgcggctcacgggtctggagcctccgaaggtgggtcagggagatgaagggagtgaggaggccacagtgacccactggccaggccaaatcagccctgagggctgacccttaggtccggcgacaagagagccatgggggaggggcctggggtgaggtgcagcttctcccaagaggcaggagagagggcagccaggggtgcccacatggtcagaagtgctgttggaaagaggaacagagtagggtagtggccggaaggagaagcagtgtctagggaggtttgacttatttttaaggtgaaggcgtgtttatcagctgatggaatcacccagccaagagacaaggctggggctggtgagggtctgggcccagcatggagggggctcctgagccaggagagggggcacagcacatacgggcagcaggtagagtcctggaggctggcagagggcagagaaggtgggaaatccaagtcggggagaggggacctcggacgccaaggtcagttggccggtcggtggtgggaatttcaggtgacagttctgtgcccaggtgcagcagcgtgaagacagaggccacagaaggacgtgagaagggaaatcccagtgcagaggtgaggggtgcggggcagtgaccgtgtggatgagagggacaggagaggtgggatctgggggttgaggtgctgggggtggtgcttgaagttgagatggggagatggtaacgagaagggaggggaggagagaagaggaggaggtgaaggctctgggaggccgggaccacccacagggatgttcaagaactgggcaggagtgatgtggggaagcgaccgtgaatccggggttaaaatcttccaggagtgagggacgacctgggattcgtagatgactccagagtaaaaggcagagtctgaaggtcccagctcaaagcctgggtaggagggaagtagaacattctggaaagaaagtgaggagtgagaggacacctcccccctccccagcaccaggggaaacagaacctctgggtgagttgcagtgcaggaagcttcaggcagagcaagaaggtgaggggacccttgcgggagatgagaggaggcagcaccagcgccagggcgtcccctctgcctgtctgcacctgcctggggcagctgccttctctgctcctctgcctagggtttctccagcccagacccctagagttgttctattcagcacctgagaggagaccctcagcagccaggagaggaagccgtcggggagaaccccatgtcccagcctctccaccttctggaggaccaagggtctccagtggaatggaccctgggttcccattgaggttacctgctcatcaaaagacacactttgggcttttctctctgtctcacctgagcttcctgggaccacctcccctgtccctacatctttagctcagggtcagccttgggaggaacgctaaccaagcccagggactctctggacgctggatattagctgcaaaggccaccgtgggaacgctgtgggtgaggattaggatagaggagccaaaaaggaaagatctcacctagtgggaggcaggtgaacacccagtgccccaggttcccttgtgggcagggtcggggggatgtgacggggagagggggcttagagggctttgtcctaccatccagctgtcaggaggggcttcccctcgttcacgccaatggcagcgccaggtgttcagggagctcttgcgttcaaaccacgaagaagacgcagtttaatctcatcccacgcagataaagagtaagttatttttttctgtttcagaatgtcatattcattttttacatctaacaaaaccactttttagaaagctaatcacagtctaaccgaatatgcagtgcagcaattatgctcctcgcctttatccaaaggagttgagacgtccacgcaaaaacctgcacaccgatgtgtacagcagccttattcataatgaccaaaacttggaagcaacccacaagtccttcagtaggtgaagggttgagccgcggtgcatccagacagtgcaatattattcagcgctaaaaagacacgagctatcaaggcctgaaaagacatggaggaaacttccacgatattagtaggtgagagaagcccatctgaaaaggctacacaccgtatgagtccaactctttgacattctagaaaggacaaaactacagagaaagtaaaataatcagtggttgccaggaatttggagagaggggtgaacaggtggagacagatttttagggcagtgaaactctttgtatgatgttaaaatggggatacagggcattagacatttggtaaaacccagagaatttacaatagaaggccaggtgtggtggctcat

SEQ ID NO: 1368 - DNA, 241 bp, synthetic construct
  misc_feature 1..241: note = Description of artificial sequence: synthetic polynucleotide sequence
  source 1..241: mol_type = other DNA
agtgagatttttgtctcaaaaaaaaaataaaaaagagagagagagaatttacaatagaaaattagagtgaaccccgatgtaaactacggcctttagttaataataatgtatcaacactgctcatcaattgtaaaaatgtgccacattaatgcatgatgttaataccagggggaattgtgctgggggggagagggtgatatgatttggatctgtgtcccccacaaatctcatattgaattgt

SEQ ID NO: 1369 - DNA, 1261 bp, synthetic construct
  misc_feature 1..1261: note = Description of artificial sequence: synthetic polynucleotide sequence
  source 1..1261: mol_type = other DNA
ctcaggtgatctgcccacctcggcctctgcaagtgctgggattacaggtgtgagccacggtgcctggccaggccgtgtgagaatgaacgagtacaggggggtatatgggaattctctggactttctgctcaatattattgtaaacctaaaacttctctaagaaataaaggctatcaagtcgaaacaaaaacaaaaacaagaaaagctctaaacccggatttcacaggagccacgcttgctggcgaccacagctggtagggaaccctgtttctctgaggctgacgtacctctccttggtcagaaccccgccctcgtcctacccacccccactcagccccttccggctgctccggaggctgggagaccaaagcagcgagagctgggacccctcaccgccttccccacacccttgtcagggccgggcagcagtcagggcggtggtggcaggcgccagccgatgtctggtccaggagtccctggccaaccccagagatgaggctgtggccctgccaagcttcctgggctgcacctcctgaagggggaccccatcccattgtctatgtctgagccacacctggacaaacatgttctgtctctgagccctaaagctccgtttcctctggtgcgagaataagatcaggaagtccttatacacagtgtccctgtcctggccaccctggaatgggaacaaagcctctcctttcatggggtctttctgagactcagtgacattcccatgagacccatggctatggcccgggctccctgttcaaacacaagtcgtcagtgacctgacccaagggacatgccggtctgataccagccagcagccggtgtgccggaggcttatcagagctgctcgggttaccccggggagtgccgccctggccccggccccatcagtgcacctggccgtgcccagcctctaatccagccggactgtgggctgctttctggagacctggggttctgtgaatgtgaccagcaactacctgcaggagtggggtcgctgcgtgggagggactcaggcccccgagtccctttataactgttcctttaggacagcctgtagggctttttggaaaaatgacactggctacaacacagatggaccctgaggatattgtggtgagcaaaataagcccgtcataaaagaaggaatgctctggggtcccacttccatgagctccctagagccgtcacacccacagagatgtggccaggcgcagtggctcacacctggaatcccagcacgttggga

SEQ ID NO: 1370 - DNA, 661 bp, synthetic construct
  misc_feature 1..661: note = Description of artificial sequence: synthetic polynucleotide sequence
  source 1..661: mol_type = other DNA
aaacaaacaaacaaacaagcaacaaaaaaatccacagagatgtaaagggagagtggtggggtcaggagctgggggatgggagggggagtgagtgttcaatgagggcagagtttaagtctgggaagacaagaatgttctagagatgatggtggtaatgattgtataaccatgtgaatgtatggttgaaatggtgaactgttactacaaacataaaataaaacacaaatgctgctcaccccaaactctagaataggaaataattgtttttccttcaaaatgtagatgagagaggtgctgccaaaaattctgtaagacctcttcttctaagctttgcacaagaaacttgcacaataattaatcaaagtacttgaaatataaaaaatgaaaatgtttgggccgggtgcggtggttcttgcctgtaatcccagtgctttgggaggctgaggcaggaggatcggttgaggccaggagttcaagactagcctgggcaaaatagcgaaaacttgtccgtacaaaacattaaattaaaaagaaatgaaaaagaaaaaacgactctactaataaaatattatgattattatcagagacagggtctcacactgtcacccaggctggagcagtggcatgatcatagttcactacagcctggagttcctgggct

SEQ ID NO: 1371 - DNA, 9301 bp, synthetic construct
  misc_feature 1..9301: note = Description of artificial sequence: synthetic polynucleotide sequence
  source 1..9301: mol_type = other DNA
acccagctaatttttttgtattttttagagaacgagtctcgctatgtatgatgcccaggctgttcttggaacttctctggggctaagtgattctcccgtatcagcctcccaaagtgctggggattacagacaggagccaccatgcctggcataaaatatattttttaagagtatgaaaatcacttctgtttcaccctctacaacaatgcaagaatgttccagagtgtgaaggagctgcttgtggcatcccacagtcccttgtcacccataagaaaagtccatgcccttccacagcatccggccctcctgctgctcagccccgctgctctacagagcccccccacactcgccccagggttcccgcctgcccagaccacttcttgcctggcccagctagcatccccctcctcggcccaggcccctccctcccctcatgcccatcatgccccatccatccccagcaccctagtcctctttccagaagctcctgcctgcaggctctgccatagccgcatcctgtctgctcactgagctcattccccaccagcagcaccagtcttgtgagaagctcctcgggccctgccccctgtctccttgaactgggatggactgaactatgtctcctggaatagactgaactgtgtctttcccatgctcctatgaggacatcctcatccccagagtgaaggtatttggagacagggtctttgggagatgactatggttagggaaggtctgagagtggggccctatgatggaattagtgcccttatgagaagcaacaccagaaagagagtccttgcgagctgtctctccacccccaccatgtgaacacagagcggacgcagccttgcacaccggcaaggcagggagccctcaccaggaactgaatcagccatcaccttgttcctggacctccagcctccaggtgggtcaggtgcactgagtcagtgaatgaatgaagggctggttcctgtgcccatgtctgcacgtgtcctccctctgcccgggcatctcctggagcccggtataggcagactccagcaggacctgtgctgcacgcctcaactccccaggcccctcccttcacttgtttagaaatgcactggaaatactgtgggcgccattttcaccaatcgagtgtgcggaagcttttagtaaacacgggttactttgatgctaattatatttaaataacatgtgtgtctacaattatataattatacatatatgtaaatacagaaaaaaataccaaaaaataatgaactattcccaggcaggggtcttctgaaggttatgggatcattttgacttgctcttctttatacccttgagtattctccaacttgcttacaatgagcgcggattctttttttaataagcagaaaaaaatgttgcttttaacatttaggaagctgtcctgagtatctggcacattaaagggagcttgctgggcactgtgggattcatcgataggtaagaaggagaggcagagtccctgaactccatcagcctccagtctggacaagaccagacacccacacgcaaagtggagccaggtggtgccctgtgggaagccagcatgtgccaggcacctggagaaggagccagaactgggtctgggctgacggaggggagacccacaggctacgtggagagaagaagcatgtctggcaacggagggcacgcggctggaggggctgaggggatgcatgagaaaatgagtttggcttcaaatatggatgtcaccaaatgccagcacagggcctcagactggacacacggcccgtgggtcacctggtgcctgtaaaggggcaccgtgtttcttctgaaatatctctggccactggggaaacgccgtgtgtgtgctggagtcacattgcatcccttgcctggacacaagagcaggccccaccttgctctatcttcaaaacgctacagcacggagcccccagaagcaggggtaccccttgggtggccgcctaagtcaagaggccttgataaccggaaagtcacacttttttctttctgaatggtgcaaatcaataggaaaaatcgagattgtctgaggaagctttcttcaaacattacagaacattgtccacactgaatgttttgttcatgtttgagggctgtgtagaggggattgatggagatggtggggctgctaaggcccccatatgttccagagcttgaggcacaggcccagcacccagtgggtgcccggtgtgattgcagagccttctgaacggtgctgtgtgggtcatgggagcacttgacccatcccaaccagaggatggccatgttgggggatgtggctccagaacccccagtgcccagcccctaccagtcttcttcccgagctgatttccgagggcataaatctgcttccctcctgcccctcactcctctaaagaaaggcctcctgcatccctggatccccgatttcatctttgaggccaccaaaaagtcacttcctccttccttggtctagatggtcctgaccccagcagagcagggactcggcagggccactgcttagggagcattgagagcaaaggggctgctttcagccggtggttctcaaagtcaaggcttgatgaagacacgtgcagaaaggagatgggctggaactggggggcctcaactctgcagctggggaacctgacccaagttgaccaaagctgggggacgcaggcagagtctggctctggcacctccagctgagccaccacagagggtcctcagctgtaaagcagggacccagggaccagcagccacaaggcagggttgctgggaggggccatgagctgagcagctccgaggctacaccccaactgtgtctgattaagtcctttctgttactctttaggactcgcccccaacgccaaccctcctgaccttgtcccaagtctcccctggctggtttctcacattgtcctgggtcttgatcactgacagttgacatagctgtcccccacccccaatcatcctcccccaggacaagtgacatgtcatagtcaatgctgtctctctccggcacccactcagtggagccactcagggccagttaattcaaggaaggaaggaaggaaggaagggagggagggagggagggacggagggaggaaggaagcaatgcctctgttggaaaggtacccaggctgccttttcctcctggagatcagggcctgcagcagggctggagtgggcaggaggaagccctggcaggacatgcccagcccctctcatgtggatggcagccatccagcaagagaatgtgggcagaggaggtggattggtcagggctctgcttcaagccagactcctgcctgtgggccaggctaggggactgaggccttgggtgaggacctgaggctctgagctatggtggacccaaaacccagacctctgctttcgccagtaagcggaatagcatcagggatgatgggccctggctcacaggccacccgctgctgagaacgtggcgggggaccgagccaggggcttcaggccagctgcagtgaaaggacgggaggggcagcctccgacttgcctggtgccagcacctgcagcccacagtgcaccgagccttcccaaccaggccccaccatcagatccagcagcaggcccctggattccctgatttcatctttgaggcctccaaaaagtcactttctctttcctgtcaggcacccactcaacaaagccactcacagccagttagtcagaaggaaggaaggaaagagggaagggaagggaagggaagggaaggaagagggaagggaagggagagggaaagagatgggaaggaaaggagacttctcaggccccagaattctggaaggctccaaaaacctggttagacagtggcatgaggaagcagcgtgcccaagagtgaggcagcatttgccacagcgggatatagaagggagaggtaagacggcgtgtgccggtgcccacagcctctcagccgcaggggaccgagggagctgtggcttcccttcattgcctacttttaggttttgtaaccacgtgaatgcctcatccactgaaaaaattaaacttacaaacttgccagaatttgcccctgagggcccgaagcccccctgggcgaggacgctgcagcagtgcatgtgagtaagaccctgtatctgcagggccacccctctaccacccatctcggcacccacaccccctcagcaccccaggctcctctgcagaactgaggcccctcccctccacggaggcacttccctgtctcagaagggaggaagtctctgcttgagtgccacctgactggaatctcacaggaggaattgaaaatcagcgtcacaggccccactcctggcctccaccccagcctggcttaaagcagaaaatcaacacatagaaggagatggctattttgagtgctgggagccagtttctctcccttttctccctcgtcttcctccccctttccaagggcctggcccctcctgggaaggcagggaaaggacaaagaccctgggagagggacgcgcctgccactgcccagcctgggcggcagaatgacacaggcgctggaactcaccctggcattggcctggcaggaaggcccagctgcccgctggcccggctcctcctgggcagctccgtgggaattccctgggggcagagcgcattacaggaagcggccgctgggtgcagggcgggcttctctggttcccatagaccatcccctccccatgaactggagcaggcttcccgtgcaagcccatttggcctggaagtaggaaaaataccgctcctatggttctgtgttctgctggagaaaagtctccggggccgggccccaccccgatccccgcttcttacccaccccacctaccctggccgtccctccactttctccttacttcccccaactcaaccacactccacagggtcatggctgctttctctgagctgacaatgctggtgccactgcacacaggaccaccttctgcacccctaaagggacaatggccggttgctgggcttggtgatggttcagggtcttgaaaaccttttctctgcccgcccctgcccccaccaacccaccacagactgagacagcaatcccagggcctccgtgggagaggagaagagcgtcccaggacaccacccaccagagcagctcaagcccccaagccaatccctgccctggttccacaccccagcccccactgaaaccccggaggcaaagcgtcgctctagctcttattcttagcatcgaacttgctcccactacggtgggaataaggtacctggcgccggtgcatgtaacaatgggccgggggctcaggcggcaggttcattctgagaaccctccacctccttaagacatttcttgaggacttgggtttatgatgagtgagtcatggagccacataattagagataggaaaggcagctttgccagggcctcgacttggaccagaacgttctacttttagattcatggaacaatcacatctcactggacctgagacaagtgaggaaactgagccccagagaggcaaccgggactctcggtggagtacatggggagcagggacaagatgaatgggggtcccacatctccagaggtctggtgatctggctaatacatggcatcagaagtaccaacagctgtaggaagggaggctgcatctccagccccccaggaaggcatgggaccagtccagtctgaagaaggagctgggggcaaccctgagggtcagctcaggcctcagagcagaggacagctgggatcatgattggtttttttcaatctcagcctcagagcaatgctccaagaacaggaacctaaaggaagccaggctacgagatctggcacttgcatctgctcctggaagccagcctggcctctggaggcctgagaacctggtgccactgtgaggacctcatgccactgtgaggacctggtgccagtgtgaggacctggtgccactgggctctcgctctgggcttttcctttcagttatcagtctgcagtggagactggtttccactgccagggtgaggatgtttggacaccatgagaaccctctcgaaattccagggttttgaatttcaagctgagctgggtcccggtagtattcaggttcacaggaagttggcacaaatcagcctcctgcttatgatgggcagtggggagggggtcaaggaaagcctcttaggaggtcacaatgacatctcagacaccagcgagtgcttgtgacacatactgctgaatgaagtctgggtgaatcagaaacacgaggctgcatttcccttggaatacactcggggttaataattacatgagaaatcacttggcaaatccatgtggggtgttgctgaacccaaaacattcaagaagatgtttgactaatcccatccctgggcatggcccattctttccaagagggcaggggatggctttaaacaactatgggccacatgcttgcaacccacaaggcctggctgctttccaagagtgtttctctgcccttgaacatctaggaatcgagttcacctggggagaggggatttttttcccaagtgattctatgggaattgattacctgattctctggttctaaaacttcaacagcatctactgggaaaatgaggtggggggaacacggggcgggggacggggggaggtgaggtgggcgatggctcctgggggacttgttaagaaatattttggatgattcaatgactctccggactagaagccttttgattttgattaaccacgaaaaaaactccaccggcaacagtgagatcattgcgtgagtggggctgcttcgtattgtcatgagagttccatgaaggccccgagggcactccgaaatatcacagtggcttccaggaaattctctgccagcatctgcaggcgggagacaaagtgttgccttggtcccatttctggggcaaaggcgacgctccgcaccctgcacttggcgctctgcgctccgcactccgcaggccatagtctgcactccgcagtccccagcccgcaccccacactctgctctgcactccgcactccgcaccctactgtccgcactcctcactccacagtccataccccacactctgcagtccgcactccgcagtctgcactctgcattccacactccgcagtcctcactgccgcagtccacactctgcagtctgcactcctcgggctgctggcagggccctgcgtatctttgctcagaactttccttcccagagcctcagcttttccggctgcctgggtggcctcagagggtctaaacagctttccatgctccttcgcaccatacctctgggctcggggcacaacttctgccacattctgtgccacgtggtcactagcactgcgcggccagatttccacaggcgtccatgccgcagttgtgtgctaagggtctactgtgtggcagagacgcccagacaaagaagacacagctcacgggcttgcgtgacttacgggtagggggacccacccacctggtcatggcaaacccctgagagaagtagaatgcgctgccttgtccatcccccgccacccatccatcggttcattcattccatgaatatgtgttgggacatgtaagacttgctttcatcccctgtagttgctatgacaaagtcccacaaactgggtgtcttaaaacaatagacatttactccctcagagtttcagaggccagccatccagaatcaaaatgtcagcagggacaatgcagtatggcttaactgtgtcccccaaaagttcatgtgttggaaacatggttcccagtgcagccgtcttgagaggtgggaccttcaggaagttgctgggccatgaggatcctgccctcgtgagtggattaatccattcaggggataatggattcatggcttatggagggaatggggtagttatcacgagagtgggtctatgatgaaactcacttcagccatatctcatgagcccccgggcatctgaggccctgtgcccctcgggactctgcagagagtccctgccagcaagaagccccacatcagaggcacccctcaacctgggacctcccagcctccagaactatgagaaataaatatcttttcttcataaatcacgcaggtaattacttataacaacagaaaatggactaacacagccacactgtctctgaaggctccagggaggatcctaccttgccttgtctggcttctggtggttggtggcacccttggcattgcttggctcatggcccaatagtctcaccttcaatagtcacgtggcctcctcctgtctgcgtccctgtaatcaaatgtccttcttcttcaaaggacccattggatttagggcccaccccactccattctgacctcgtgctagcttattacatcttcttctgtctgcacccaccctatttccatgggagaaccctgaggtcctaaaaggccatggactctgtggggtcaccttccagcccagcacaagcatgttgcaggagcaggcactgttctagtctctgccatcacgtaccttgcatttccggtaagggagatggatttgaaagccatagtccgcaggtaacagaacgcccggtggagcacagctctatggagagaatgaagcaggggcaaaggctccagggtgatggggacaccgttgtctgcagggcagcccaggaaggccgctgtgaggagcttacaactgcagggaggtagtgggactccccaggggaggactgctccgggtacagaaagcagtcagtgccatgggcttgaatgagaagtgtgcccgatttcccaaggcctagcaaggaggcagagtggtggctgggcagggactgaaggaggaggagaagcaggcagggcggccactgccaagtcccagagcagggcatctttcccgagcatgctaaggacgtgggagttgaactgtgggcttgggggagccttaaaagagaagtggcctggacagagtctgtgccaggcctgccctggccaagatggggagagccaggtgaggggcaagcggggaggaggaagagcagccacggagaggccagcagcaccacagagcgaggctgaagcgggggcgatgcggggttctggacgtaggtctcagtcatgctgacggacatcgctgagctgcaggatgggaccaaaagagcaacaccatggacaactacgaggtttggggtctgagcacctgccaggtggccgtgctgttgctgttggctgatgggagagtaatcaagcggaagataaaatgctctgtggtcggctgggcacagtggctcac

SEQ ID NO: 1372 - DNA, 2521 bp, synthetic construct
  misc_feature 1..2521: note = Description of artificial sequence: synthetic polynucleotide sequence
  source 1..2521: mol_type = other DNA
tgggcgacagagcaagactccgtctcaaaaaaaaaaaaaaaatgctctgtggtcacagcagaaactgagaggaaacctgcctagattcaacattcagggaaggggacttctgagctgggttttgaaggatgactaggagtaccccactgtgcccaaagtgagcaggtccttcaggggaggggtcagtatgcccttgtgtcaaagcctctgatgaaggcagtttctgtctcctctcctaagcctccagcccctcctctcctgagcctccagccctcgaggcaggtcctgcgtcaccgtcaccgggagcagcagtgggcaggaagaaaggggcaactgtgatgtttgcagcccggcacccactcttagctggcagcattcccttgggccttgtatgaggttggattgtgtccccataaaaagttacgtccacatcctaacccccgagcctgtgaatgcacccttctttggacataaggtcttgacagatgtaatcaagtgaagatgaggtcgttctgggttcgggtgggccccaggtaaaaggcctagcattgttccaaggagagggagattcgggggcacatggacacaccgagggaagaaggccagtgaagacagaggaggagattggggggatgaacactgaagactgcccacagcctcccgtagcccctcagagagcctccaggaggaaccaacctggccgacaccttgattttggacttctggcttccacaactgtgagagaaggaaactctgttgctttcagccctgctgtgtgtggaaccttgtttcagcagcccaggacactcacacaagccccaatgccatcctctggaagacaggcacagtgcccgccactcagcctcgggcactgttccacggggcagtgtcctgtgctccaccagcacagctgacacttgtcttagtcaggggcctctggagctgggccactcaaaacgtggtcaagcgaccagccacattgacgtcacgtggaagcttgttagactggcccacttggacccagtaagccagaatgtgcattgtgataagatcccctgatctcccctgcaccgcatgctttgagaagctctgctctaggacgcggagcctgaggccaggacgttggtgccgaccctggctgagggaggggtcagccaaggcgggggagtgaggaagagggccatgaagaaggcacaggcacgacgacacgagggaaccagaggggtcctgggcagaagcaccccagctgtcccagcaggagccgcacctccaagtggcccacagagagtaaggaggagggggtttgtcagcctggctgcctgtcactcctctcccactgttaaaagtttaccccatggtagagggtggcagaggatgaggagcaactcctcaatggctccagggcgtttggggtgaggacaatgttttagatcttgagggaggtggtggttgcacaactcattaatgtactaaataccaccgagttgttcacttgaaaatgattaatcgatgttaaacgaatctcaccgacgttttttaaaagtgtatctgtgagatgctaacctctcctgcactcccgggtgcttctcagaacaccaggtcttgcacgctgagtcatggcatctgggtaccatcgaggagggagaggtggagtgcaagaagacgatggcagagtcgtgtgtggtgactactttctcattattgtcaccatcctctccaaaagttgactcagtttcatagcgcatctggcaaggctcaggcgcacccgggagcatcctcaccagcctacaaccaagaatggagccaccctgagaaagaagcatggaagaaaagactgtgcaactgagagaacggtgctgcacacagtggggcttccaggagcaccagggtgtgatttattgcatttatcattcaactccaggtgatctgtgtgccacaggattgcagctcaggcgtgcgccacgccaccctgagtcaaagtgaagcttgggcaagtcactcagcctttctgagtttcagttttcttatctgtaaaatggaagtgatatccacctactcagagctgttgggagcaacgaaagtagatgccacttcaaacctagccccgaaaacttcctatagatagagctttatggaaaattagtagctcacagacaaaaattgcaacacattagaataaatctagcagaagtaagagacagcaaaatcaaacccacaaagagttcaaaattgaaattatcaaacataaaaaataatataaatatgtttaatatgtttaaagaaataaaagtgaaacttaaaacatgatcgagggatccataaaaaatgaccaacaagttttgaaaaaaggcagaatttctagaaatgaaaaatgtaattactaaaattaaaaactcgctgtgtgttgagtagctacattaatttcagacaaagtcaactttggagcaaagaaaagctccagcataaaaaggggcattacattctgctaaaaaggatcaggccaggcgtggtggttcatgcc

SEQ ID NO: 1373 - DNA, 2101 bp, synthetic construct
  misc_feature 1..2101: note = Description of artificial sequence: synthetic polynucleotide sequence
  source 1..2101: mol_type = other DNA
gagcgagactccatctcaaaaaaaaaaaaaaagaaaaaaagaatcaattcactacggacactacaaaaaccccaaatgtgtatcacctaagagcagagcttccaaagacataaagcttacagactgacagaactgaaaaaagaaatagataaatccatagttaatagttggaaacttcaacactcctccctcaataacagaactaatagaaaatcatcaaggatagagaagaacctaacaatactattatcatctggatctatgagacatttagaacattctgccaaccaggggtggtggctcttgcctgcaatcccagcactttggggggctgaggagggtggatctcttgagcccaagagtttgaggctgcagtgagctatgatcacataacttcaacagagtgagaccctgcctcaaaaaaaaaaaaaaagagcattctacccaaaaaagcataaaacatatttttcaagtgcacatggagtattcagcaagacagactatattatgtcataaaacaaacattaacaaagttaagggaatttaaattatacaaaatatgtcctataatgcaattaaactacaaattaataacagaaaaatcagagaaaaatattcaagcgcttggaagttaaacaccacactttgaaataatgtatgactcaaagtctcaagagaaacttcaaaacattttgaactaaacataaatgaaaatacaacatgtcaaaatgtatgaaaagcagctacagcagggcttagagggaaatttatagtattaaatgctattataaagaagaaacgtctcaaatcaataagctaagcttttattcttaagaaactagaaaaggaagagcaaaataaatccaaagtaaacagaaggaaggaaataataaagacaagaacagaaatcaatgacattgaaatcagaaaaaccaaagagaaaaatcaataaaaccaaaatatggctctttaaaaagatcgataaaattgatgaagctttagcaaactaacaaagagaaaagaatacctcacaggtgtcaataatgattgaaaggaatactatgaacaattctgtgcacctaaattctacatcttagacaaaatgaatgaatttcttggacacaaactaccaaaattcatccaagattaaataaataacttgaatactcctataactattaaacacgtttaatgcatagttttctatttgttttcaaaaaataaatatccagtcccacatggtttcactggctaattctaccaaacattgaaagaagaaataacattgattgttacccagaaaataaaagattaaagactacttcatgacacattatatgagcattgcctcaaaactagaaaaagactgtaccaaaaaggaaaactacagaccagattcctacataaacacaaacacagaagtcctcagcaaaatatccgtaaataaagtccagcattatatgaaatacaccaccacccagtggggtttattctcagaaggcaaggatggttcagtactcaaatatccatcagtggaatccaccttatcaataacctaaagaaaaaacatatgatcatttcaacagacacagaaaaagcatttaacaaaatgaagcatccattcatgataaagttctcagcaaaataccgatagaagggaacttcttccatctgataaaggacatcaacaaaaatcctatatctagcatcatgcttaataagtaaagactttcccccaaagattgggaacaaggcaagcatagacactctcaccattctattcaatatcatagtagaaatcttagccaataaaataagacaagaaaaaagaaatgaaagccttgcagattggaaagaaataaaactgtccctgtcctcaggcaacataaccacactgaaaatcccaagaagcctatatttttttaaaaaaagactcctggaactaacaagcaggttttcaaggtcctaagatagaagatcaccacacaaaaattaatcttatttctatacactaacaatgcacaactggagtgatttttttttttttaatttcgagatggagtctcgctctattgaccaggctggagtgcaatggcacaat

SEQ ID NO: 1374 - DNA, 961 bp, synthetic construct
  misc_feature 1..961: note = Description of artificial sequence: synthetic polynucleotide sequence
  source 1..961: mol_type = other DNA
acccacccacctcagcctcccaaagtgctggggttacaggcataatccagccaaatggagtgattttttaaaaagattccatatcacaaattatcagatgcaacacacacaatacttataaggaaatgtagagttctaaatgatgagtaataaatcacatacaagtcaggtttatcccaggaatacaagcctgatttatacaaatatgttaattagatttaaatctattaattagatataaaaatctaattaatgtaatttaccacaataacagattaaaaaagcaaattatatcttagtaaatgaaaaagaaagcattcaataaatgtccatatccaatcatggtttgaaaattttagcaaaataggaatagaagggaatttccttcatctgataaagagtctctcccaaaaatacctacaataaccatcatgcttggagaaaagctaaaagcattcctgttaagaccacaaaagagcctctcccaaaaatacctgcaataaccatcatgcttggagaaaaattaaaagcattcctgctaagaccacgtcccagactcttctgtataacaccaaactggagttgctaacctgtgcagtaagacatgaaaagaaaatataaaggaagaaagacacagaaaactcttcttagttacaaatgaaaatactgtctacatagaaacctgaaaagaacctatggaaaattatcaataagacatttaaataaagtgggtgggtacaaaaccagcatataaacctcaattgcatttctataaagcagcaacaactagcaaacacaagtcttaaaaagatgccacttacaacagcaacatcaacaaacacaggtatatgatgcatacatatatgtaaataaactgggaataaatctaacaaagatgtatccaaatggcgctttttttttttttgacggagtctcactttgttgccaagctggagtgcag

SEQ ID NO: 1375 - DNA, 2821 bp, synthetic construct
  misc_feature 1..2821: note = Description of artificial sequence: synthetic polynucleotide sequence
  source 1..2821: mol_type = other DNA
gatccccccgtctcagcttcccaaagtgctgggattataggcatgagccaccacgcccggatgagcatttttttgataaaagactcagtatcttagaggtatggttctcccccaaattgtatacagattcagcacagttccagtacaaaaagaaatccttccactctttgatgtatttcagtgcagttccatcattttcaccatagagggattatcactcacttgccctgtgatcttggacaaggtcttgagttttctcagctgagaaaataaaaggatgggaacagaagatccctaacccccctcctgtgctgaaagcctaagatccttcaggaggaagaggcaggtgaggtacatctgacacttcggcgtggctcctgctgagggcaatgaaatgataaaccaggctggggtgggtctgagactccaccctatgaccttggcatctaacaggaggtaaaatggaaagcaaatcatgacacgtcccaaacattatgtaatcattgtaaatagcttttaaaggattacatagacatggaaaatattcacgacatgttaagtgggaaaaaaatcacacacatcctataattacaattctaaaggcaaagacaagatccaggaggcaaggccgctcaaactcttaagtttcactgtttgatactgttgagaagcacaataatgaccaatgagcagaaagagcatcagtaaacgctcccactttctaagtcctctggcaggaagtctttatttgcttcccggagttaggactgcggcatcaggggtttcaggcctaggatttggggtatggggtgtgtcaggcctaggatttggggcatcgtgggtttcaggcctaggatttagggcatcggggatttcaggcctaggatttggggcatcggggatttcaggcctaggatttggggcatcggggatttcaggcctaggatttggggcatcggggatttcaggcctaggatttggggtatcgggggtttcaggcctaggatttggggtatcgggtgtttcaggcctaggatttggggcatcagggatttcaggcctaggatttggggcattggggatttcaggcctaggatttggggtatcggggatttcagacctaggatttggggtatcgggtgtttcaggcctaggatttggggcatcagggatttcaggcctaggattcggggtatcaggggtttcagacctaggatttggggcatcagggatttcaggcctaggatttggggtatcgggtgtttcaggcctaggatttggggtatcgggtgtttcaggcctaggatttgcttcctgtcaaggtacatgtgtctgggagctggggatgcttcaccttcgtgcctggctcctgggaacatcaccagatcctggtctgtctgtctgggacagtgcacactttcccagcccacaggcgaagttgatgctcctgggagcacttccactccccgacaagtctcttcctgtgtcgtggttgcttacttatcgttgtctcaccctagaaggcaagcgcccaaggccagggctgagtttttcttgttcagagctgtgtccccagcattcctgtccacagatgtttgttgaatgactgaatgaatgtataggaatcagaagcattgggagggagcaaaggccagagttttgctagaaagtctgagggtgctggccctagaaatccccaaggtccctccctcatgtcctacgtcgtggctacccttaagtctgacatgccctgggccatggcttccaatgtcaggaagaggccagccaggtcccagccatgtctccggccttgaccttgggctagtcctctgtatgccaggtccagaccctctgcttaagtccaagtaggtgaaggtgaagtcagtctttccgctacctggctccagcccttggccaggcccagccccaggtagaccttccccagacacctcttcctctgtcaaagctctggagaaacttgctggggctctgccaccaggcccctccccaccaccaggccctgccctcccagggtccaccccctgggtcttactttgaggcctccctgtttcagatggtcccctgctgtgaagtcctgtcttggccaaaaagggtgcatgtggcagggtgattaagccgtggggcctggttatggatgtggagtgggggtgcctgtgctggggccggaacacagcagccacgttcctccacacacgcacacagcagtagctgaggttggccccatgctgtcacgggtgttctcacctgtgcctctccatagtcgggaagcaggaaagtgagggtcatcccgcagttctagatgaggagcccaatgtgatgggactgcaagtggaggagcgggacctagagcccaggctcccgtttccctgcccagggccctcccaggggcgcaacctctatgcactgctgtgttgctaccacctcactgcaggagccagaggagtgaggacagcccctttgtgccaacactatgaatgaatgtatgggaatcataagaagatgaccaggccgtgttggagccaggggccacattgccccgcttgagtgtccatccactggcccctgactcctttccccaccatgcccccagctgttgccagccccactcccacctgggaaagcaagatttgtgcaggcccctcattcccccggctcctgcctggccagagcccaccactgcaccacaggataaacatacatgctgcgaagggagactttgtgtgtgtctcatgaggctcaacaacggtgatgacccccgagaagatgcaataaaaaggacaacctagccgggtgcggtggc

SEQ ID NO: 1376 - DNA, 781 bp, synthetic construct
  misc_feature 1..781: note = Description of artificial sequence: synthetic polynucleotide sequence
  source 1..781: mol_type = other DNA
tgggcgaaagagcaagactccgtctctcaaaaaaaaaaaaaaaaaaaaaaaaaaaagacaacctaattttgaaattggcagaggaattgaacagacatttctccaaaggagctatacaaatggccaaagagcccatgaaaagatggccaacaatgctccgtgcatcttacaaacaaacctttttaaaacccagctaggaagttcagggtcaaatctggaatttcacactggcaacattagctcagggaagtggtggggcagccctcaggcagctgagccatgcaggaatgagtatcccgtgaaacatcagctgtcaaaggcccagccgacccaggagggtcacactgcttccgcctcagtgccgccctaccctgggcagcttcaggattccagaggggtcatgtgctctgaggagtgaccctaaatgtggcagagggatctagtgaccgcccaaagcaagcaggacagatccctggagtgccagcccctttccatgggtgaaaggtgattctggtctgctgttctgggtccgaggaagggctgaaaaatgggagcagaggaccgttcgagccccttccctgtccccagatcctccttcagggctgccagttgttctgtgctcgttccatacatgcctgcggggtctgtctctgaatttcctgcatgacacggtcaatccaggggatagtaaaaggaaggcagaaggtttgccctgaatactggaaaagagttcaaaagtgtgttagtctagcatttctctggggatattttgtagatagcc

SEQ ID NO: 1377 - DNA, 841 bp, synthetic construct
  misc_feature 1..841: note = Description of artificial sequence: synthetic polynucleotide sequence
  source 1..841: mol_type = other DNA
aagcgatccgccctcctcggcctcccaaagtgctgggattacaggtgtgagccactgcgcccggccgatatcccactttgctgaaggcttttgtgatctaatatatttggaaaatactaatgccattttttttaaagaaggctttttgttgttgttgtttcaagtctacacagatccctgaatatgcaaaactgccctggatttttccaagagaaaaatttgcaccgtttcacaaactcactttttggagggactttgtctcagtgaaccatgaggtatcagtgttccatgaaatatacatgagggaatcccaatctagccctgttccttcatcttgcagacggggagaccaaggcaagagggagtggtagacagctgattaaggccacacagagaaccaggatgagggccctggtccccaggtggctgtctctcagttccttcccctgttcttacatcatttgctgggctagtgcaaaatgaaaatgcaagatcccttgttcaaaccctagtaagaatttcaagatggtgatcgcagggcattgcagcaggtgcaggcccgtctaggcacgctgggctcgcctgtgcagccggctctgctccctcagcagcccagaagggccctagaggacactcccctgagcacaaacccaaacaccccagctctgctcctcactagcccagccacctgggatacagcactcagtctctctgagcctcagtttccacttcctgaaagtggggttgtaatgtcacctgtttcactgctgtggaggagtggttgcacaacattgcaaacagaaatcagggccgggaatggtggctcacacctggaatccca

SEQ ID NO: 1378 - DNA, 1021 bp, synthetic construct
  misc_feature 1..1021: note = Description of artificial sequence: synthetic polynucleotide sequence
  source 1..1021: mol_type = other DNA
cggaagttgcagcgagctgagatcactgcgctccagcctgggcgacagaacaagactctatctcaaaaaaaaaaaaaaaaaaagagagagaaatcatttccagtcttattcaaaatttaaaaagatccaagcctgtgcctagagggggctaggcctgcccacttcttggaccctagagcctcgaaatcccctccgcctttggcctggggtctttgttcagttgtattgctataaaggaatacttgaggctgggtaattgctaagaaaagaggttcatttggctcatggttctgcaggctgtacaggaatcatggtgctggcatctgcttctggtgaggcctcaggaagcttccactcaccttggcagaaggcaatgggaagctggcgagagaggaaggaagagagagcagagggcccagatcttcaaccatcagttctcacacaaactaatagtgagaactcactcattaccaggagaacgcaccaagtcattcatgaaggattcgcctccatgacccaaacaactcccaccaggaccctcctccaagcttgggggtctaattccaacatgggatttggagaagacatgggaactgtacccaaaacatggcagctggatgcttctgaacacactgacggtggctgctaccaagagggagagcgaagtcacaacaataccggcctgcaggttcacctccccataccaggcactttacagcaccatttccaattcccgggaaacagggccacaaacataggaggcaagactccattccaggtccgtctgctctgaggcctccattccctcctctatatggggggtttagtttcccaccttacttaaagcctgtctgcactaagtaaactcagtgagaaaggcagggtgcccagtgcctgggtacagcaaaggctaaatgcatttggcagttattgctagtatcattttttgttttgttttgctttttatgagatagactcttgttctgtcacccaggctggcgttcagtggcacgatcttggc

SEQ ID NO: 1379 - DNA, 1861 bp, synthetic construct
  misc_feature 1..1861: note = Description of artificial sequence: synthetic polynucleotide sequence
  source 1..1861: mol_type = other DNA
cggcctcccaaagttctgggattataggcgtcagccaccacgcccaatctgtatcattattcggtgattattttgggtgcggtttgggacttgcagcataatataatttttctcattgatttttacatgtatcacagcaccactgctttcccaccataaccttgggcaagtcccctcacccctctctgcctcagtttcccgtctgtgaaatgtccctaatgcaagcccccatcccagagggctgctgagctgattaaatcagctactacatggaaaactcccaggagagcgttcggcagaaagaagatgttttgataaatgttggctattcttagtatctacaccatgtaaagtaagcttacgagtctaactgggcagcggtcttagcttgttcattcactctgtgccagtgtaactcattccctaggcctccttaaggacaaaccaggcacgcttggatgcgttagtctgagatcctttggccacctgtctcctgtggggtccaggaaagggccccatatgaaccagctgcatctggtggatagaggcaccccaaacactgctttcaccactgtcatcgagcgctttcttgtttggtctcgtaggttcagtggaaatctctgactttttcctcccacattctgctccttgcctatgtcttagaaataacaacccattctcaaactagaaagaagctaaggccacgtgggccttttcttgttgtttcacgtgggtgaaacaacaccccgaacccaacaaagcgctctcttttctttctctgattttccttccgctcccacagcctctcccaccaccacatctgtcggttatctgtcacatcacatcctgtaagtatgaggatgctttttgatctaccggttacatgataagaataaagactttcctaaagcgactttatgtggtgccgttaaaagaacacaaacctaggctcacacataatgccacatctgggaaatgacggctctggggtttctctgcctcccgggtccctctcagatcagccctggatgctgagcgtcaggggttgtgggggcgaggggaagggatggggaatgtgcctatttctatgaaaaattgagtaaaagaagactcagttctccagtgctgcaatgaagtgtgcaaatgccagcctcggccagcagacctccatccgtgtacctaaaggcttattttaagtagctgtgtctggtcaaaaagggttcacctggtcaggaagtggtcacaggctttttaggagggccaagccaacacataaagggaagatagaggcacacatagcagcctcagagccccggctctttgtcattcctgggtccaaggcgaggacccttcactggagaaagagccctggggctgaaggggccttggaatctgcagctgagatgggccagacagatagccctgggttcccacaaaggaagttcctgctcaataaggctctcccagcgactcatatgctgttctcagaggtcctgccccacactcccctaaaatgggcaaaaagaggccatgcacccataaagagatcctgcgttttcctgttttctcttcaaatgctcttgctctgcgttttttctctcttttattcagatgataatcacatatgacataaaatttaccattttaaagtgaaaaattactgtctagtcccaaaccattttatcaccctctccagaaacatccattcattagcaatcacacaccctacccccagcctggaggccaccaatctactctccgtctccatagattggcctggtctggacatttcagagaaataggattgtacaatatgtggtcttttgtgtctaacttttctttctttatttattttttgaga

SEQ ID NO: 1380 - DNA, 1501 bp, synthetic construct
  misc_feature 1..1501: note = Description of artificial sequence: synthetic polynucleotide sequence
  source 1..1501: mol_type = other DNA
agtgctaggattacaggcatgagccaccatgcctggcctaaaaaatgtatatcttaattttaaaatattgccaaaaagtgctaacaatcacctgaacgctcagcgggttgtcatctttttgctggtggaaggtcttgcctcgatgttgatggctgctggctgatcagggtggtggttgctgaaggctggggtggctgtggcaatttgtaaaaataagataacaatgaagttggctaccttgatgattgactcttcctttcaggaaagatttttctgtagaatgcaatgctgttagacagcattttagccacagtggaaattctttcaaaattggagtctgctccaattttatccactcaatttatccactcaatttatggaatattctaaatcctgtgttgtcatttcaacagtgggcatagacttttcactaggagtaaattccatctcgataaatcactttctctgctcacccacaagaagcaactcctcactcattcaaattttctcataagattgcaggaacccagtcccttcttcaggctccacctctaattctaattctcactatatccaccacatctgcagtgacttcctccactgaagccttgaaatcctcaaagtcaacaatgagggttggaatcaaacttctaaactcctgctagtattgatgttttcaccttctctcatgaatcatgagtgttcttaatggcatctggaatgatgaatcctttccagaaggtttttaatttactttgcccagatccatcagaggaatcgctatctaaggcagcaatagtcctgtgagacacattagatgtttcttaaataataagatttgaaagttgaaatgactcctttatctgtgggctacaggatggatgttatgctttccggtatgattacattaatgtcaacattatctccttgcacgtctctaccagagcacatgattcaatgaccaggtgcattgtcaatgaacagtaatattttgaatggaatattttttctgagcagtaagttctcaacagtagccttaaaatattcagcaaaccatgttgtaaacagatatgctgtcatccaggctttgttattccatttatagagcataggcagagtagatttagcataattgttacgggtcctagaatttttagaatggcaagtgagtgtaggattcaatttaaagtcatcagctgcattagcctctaacaagagtgtaagcctgtcctttgaagctttgacttctccttctctagctgtgaaagtcctcgatgccatcttctactagaaagctgttttgtctacattgaaaacctgatctttagtgtagccaccttcatcaatggtctcagctagatcatctggataacttgctgcagcttctccgtcagcacttgctgcttcaccttgcacttctattttatggaaatggcttctttccttaacctcatgtacaacctccgctagtttccttctttttttctgcagcttcctcaca

SEQ ID NO: 1381 - DNA, 3301 bp, synthetic construct
  misc_feature 1..3301: note = Description of artificial sequence: synthetic polynucleotide sequence
  source 1..3301: mol_type = other DNA
ttgcagtgagtcaagatcaagccactgtgttgccactgttactccagcctgggtaacagagccagactctatctcaaaaaataatgataataaattaaaataaattaaatttaaaaaaagaagaattgaagagagttagggtcttgccttgggttaggctttggcttaagggaatgttgtgcctggtttgatctatccagaacactcaaacattctccagatcagcaataaggctggtccactttcttatcattcatgtgtccactgcagaagcacttttaatttccttcaagaacttctcctttgcattcacaacttggctaactggtgtaagaggcctcgttttctgcctagctcagctttcaacctgccttcccctccaagttttatcatttctaaactttgatttaaagtgagaggtacacaactcttcctttcgcctgaacacttacaggccatgataagtttcaaatatcacgataatttccaaaatgtgacacggatatacaaagtgagcacatgctgttgggaaaattgcaccaatagacttgctgtactcagagtggcaaaccttcaatttatacgaaacacaacatctgtgaagcacaataaagtgaagtacaataaaatgaggtatgcttgtatcagtgtctcatttctttttcatggctgaataatattccatcctatggacagaacacattttgttgatctgctcatccactggtggacgtttgtgctgttcccaccttttggctgctgtaaacagtgctgctgtggacatttgtgtacatgtgttatttcaacaccagttttaagctctttcaggcatatacctaggagtggaactgctggtcacatggtcattccatgttttgctctgctatgtttttgttttttcctcttttggctccattttcccaaaacctcaagatgtttcttcctcagtgaggtatcttgacatgcactcattggggtctagttgcattatttagacctctttggggatccacctataccctgaggatgctggagctactattcctaaaaaggaaaccccagttcccctcccgggtcaagggcagggctgtggccggtgggggggccctttgtacctttcagtgctgttgcctcttggattctgtgcctttgctgtcaggggtcaggtcggggctggggagggtctcccttctcgcaggacccactgccttcatggatcatgacccaggacagtcaccagtgccacccattcagggtctgttgctgtggtccctctgagtcaagagcctctggagtcactgggaacctcccagccaaatcaagactgcccctgcatcctctgggggccttgtccacatgctgactttgttacccaggacatgaagagaactcggaacatccaaagacctagagtccatgggcctaaccatactttttctccaaagaatgggacctgtgctgacaaaggagcccagttacaaagggaaagaaatggggggccaggcgtgacccctgaaaggcctctgtgtcatcatggcagctcccaggattgcagaggagggaagcaaatgaaacttcatcctcaatgtctatctcctgacacaccagccatggccctgggatttgaaatgcaaaggaggttccggagtagtgaggctgggatctgggtgtttggagcagggacctggctgggagtttgggcaaaggcccgccccatattgcaatggccagagggaccaacaagaggggagcagcaattgataaataagttagcaaatgcaaaaagcccaacagtcaccttcatctgtagcaaatatttacgaccctttgctctgtgcaagatgctgtgctaagaactccacctacattgtatggttgaattccctcaacagcccaggaggcacatatattattatccctattctagagatggagaaactgagactcgaagaggtcaaagttcttgcccaaggccacatggagcccaaatgcttatccaccaggccatgccgcagcccatggtccaaagtgcccataagaactctgccatcattcactgtttgatgatcattcaaccactggacaaacccagctcggtcttttgaagggctgatcggtatcacagactatggcaaaaatagaaataagtagaatataaaaagaatagatttctcagcgttccttaaattgtcattaaagattagagggctcctaggaaatggggcacatgaagatggtgtcctgaggccaccctttccggaagtctgtggtggggcccttgtggcagggagagacgagcacccacgttatttgtcaagtacccagagcctggagtgcgaggtccaccctcacctctcagggagtgcagcctgagaagtccctcatcctgtctaagccagtgcttccttctctgtaaaaaggaggtagtactcatcataagttgcactgtggcccctaaaagctatgtccacatcctgacccctggtacctgcaatgtgaccttatttggaaaaaagacctttgcagtgaagtgaaggctcttaagagatgagatcatccaggcttaacagggtgggccctaaatcccccgacaagtgtcctaggaagaggaaaaacgagggggaggccatgtgaagaggaggcagaagtgagagtcatgagtccacaagccacagaatgccaggaattgtcgccagccacaagaagtcaggagagaggcctggaggagattccttcctggagcttccagtaggaaccctccctgcagacaccttaatttcaggtttctgggcagcagaactgtgaaagaagaaattcctgcagctttaagcctgcaggcttgtggtcatctgttaggacagccccaggacactcacagccacccaggactcaaatgtgcacctcatacagtgcagactcacgtcggagcaggtgtagactcatgttggagcatgtggtccacctgccctggtaggctattgactgtctctacccaaaaccttccaaatgtgcaggtcttccctttgatttagaacttccccctctaggaatttatcctaaggaaatgagcagacggatgtgcaaagatgcatgtacaagatcacatggtgggattatttaaaatagaaaaaaggggaaaatggctccaatacactggttaaatatgtttggatatatctatttcggggaaaactatgaatccatgtaaagtgatcaagtagatggatttttttgacatgcagagatgttcattttacatatatatatatatatatatatatatatatatatatatatatat

SEQ ID NO: 1382 - DNA, 1141 bp, synthetic construct
  misc_feature 1..1141: note = Description of artificial sequence: synthetic polynucleotide sequence
  source 1..1141: mol_type = other DNA
cctcaggagatccacctgcctcagcctcccaaaatgctgggattacagggcatgagccactacgcccagcccattgtatattattaagtaaatacatgattccaattatttgacttttgggaaaatgcaaaaccacagagacaattactagatcactggctgccagagactgggggttagaagggatgatgaggtggacggagcacaggggatttttagggcagtgaaccaattctgtgtgatactataaaggtggatacagcacattatgctccaaacccatagaatgcacagcaccagcaccaggaataaaacttaatgtgaactatggactttagttaataataatctatcaataccggttcactaattgaaacaaatgtaccgcaccaatacatgatgttaataatggggggaactgtgtgcttcagagggagttatataggagcactctgtactatctgtttagctttttttgtgtgtgaatctaaaaatgttctagacccctgaaacacaagcaacaaaagcaaaaataaaaaaataaataaacaaaggacctagacggacacttctcaaaaaaatgacatacaaatggccaacagatatatagaaaaatgatcatcattactgataaccagggaaacgcacattaaaatcacaatgagataccaccctacacctgttagaaccgcaattatcagaaagacgaaagataacaagtgctggtgaggaggtgaagaaaagggaagccttatgcacagtgctaatgtaaattagcacagtcagtttagaaagctgtatggcagttcctcaaacaactgaaaacagaacaagcatgtgatccacaatcccacttctgggtagatactcatgggaactgaaatcagtatgttgaagaggtgtttgcactgccatgttcattgcagcactattcacaacagctaagatacagcagcaacctagatgttcatcatcagatgaacagataaagacactgtgatacacatacaccatggaatactacacatccttttaaaaggaaggaaatcctgacatttgtgacaacgtggatgaaccaggaggacgttatgctgagtgaaataagccaggcacacaaagacaagtacaaatacaacatgac

SEQ ID NO: 1383 - DNA, 781 bp, synthetic construct
  misc_feature 1..781: note = Description of artificial sequence: synthetic polynucleotide sequence
  source 1..781: mol_type = other DNA
cttgaacccaggaggcagaggttgcagtgagctgagattgcgccgctgcgcttcagcctgggtgacagagcaagactccatcttgaggggaaaaaaaaaacaaagttgaactcatagaagcagaaggtagaatgatgagtaccagaggctgggggccgatggggcatagatgaggcaaaaaggtgttgatcaaaggccatacagttttcgttagacaggaggagtaagctttagggatcaattacgtagactggggactataataactaatcatgcactggatattccaaaactaccaaaagagttgattttaaatgttttcatcacaaagaaaagtagtaagtatatgaggttatgaatttgttaattagcctgatttaatcattccaccctgtaaacatatcaaaacatcacattgtaccccataaatatatctgcaatgattatgtcaattaaaaataaaattttaagaaataaaatgttctaaaataaagactattaatttttaaaaaataatacatcttacaaaaaaatgcatattgaattatctcactttttaaaggaaatatgtatctttctgcatagaacctggactccaagcccccatgtaaaggcagcccatctctgtgtgctgtgattccagttggctgtccttctgctcactttattttctgatcttttgagacaaacaagggctacttgggtagtaattttgtgttgattgactttgtaaaatgtttgaatttttttttttttttgagacagagttttgctcttgttg

SEQ ID NO: 1384 - DNA, 9421 bp, synthetic construct
  misc_feature 1..9421: note = Description of artificial sequence: synthetic polynucleotide sequence
  source 1..9421: mol_type = other DNA
gtgtgagccattgcgcctggccaaatgtttgaagttttataagtttatccaatgcatgcatgcataaaatttgaagaatcaaatattctgactggtgaaagttcttgagagcaggaaggacagcggccacacacctggcccttagggtaggacttgcaccctggagactggagaccccagacccggtgttgtggtcccagactgagctgtttccagctgcagcgcccctatccgtggccccaggctgcccaagggtttgtgcagctcttggaaatgtcaggaatgtccacccgtacttgcaacctgtgggtcatgcagctggtatttcctcagcccttcctcgagggcccctccatgccctccgattgcaaccccagccctggaggtggctggcatgtcctcctggcagactttgcccatcacataaccaccctcgcttggccatcatgggctacacctggtcacgtcacgaaatactccacacaaagaggtctcagtgcagggaacaggccccacttgttcagacagacaaactcagtgaggacagtggggtcaacagtttcagcggctgaaactgtttccggctgggtcttctagtgcccaacatcaaaggtgcctgcagagcaactcacattggctaagagcaaacaaagaactcagactcgagaaagggggatttcatccaagcactatagactggtgtgtgtgtgcactgtgtatggaaacctgtgtttgtgtgtgtgtgcactgcatgtggaaacctgtgtgtgtgtgtacactgcgtatggaaatccgtgtgcgtgtactgcatacggaaacctgtgtttgtgtgtgcactgcatatggaaacctgtgtttgtgtgtgtgtgcaccgcatatggaaacctgtgtttgtgtgtgtgtgcaccgcatatggaaacctgtgtttgtgtgtgtgtgcactgcatgtggaaacctgtgtttgtgtgtgtgtgcactgcatatggaaacctgtgtgtgtgtgccctgagtatggaaacctgtgtgtgtgtgtgcactgcatatagaaacctgttttgtgtgtgtgtgcactgcatgtggcaacctgtgtgtgtgtgcactgcgtatggaaacctgtgtgtgcactgcatgtggaaacctgtctgtgtgtgtgcactgtgtatggaaacctgtgtgtgtgtgttcactgcgtatggaaatctctgtgtgtgtgtgtgtgtgtgcactgcgtatggaaatctgtgtgtgtgtgtgtgtgtgcactgcgtgtggaaacctgtgtgtgtgtgcactgtgtatggaaacctctgtgtgtgtgtgcacacttcatatggaaacctgtgtgtgtgtgtgcactgcatgtggaaaactgtgtgtgtgtgtctgtgtgtgtgtaattgctttattttgaaaactatttctgggatatttttcatgctccatggtgtggctatccccacttctccccgctgcagagaggacaaaacaaagatggacgcatggaagaacacctcataaactattgtagtcacataaaacttaatacaccattccctctgattcttcaaagcagtggttctaactggggggtggtttcgccctccaggggatcttcagctgtatctggagatgtttttggttgtcccaatcttgtggttaggttgacactggcatccagcggtggggaagccaggaggctgcagagccccccagccccgccaggcactggaccgtcccctctaccaagaatcatcagccccaaatgccagcagtgtgcatgctgaaaaacccgtttctgagacttcgtgatcccagcttctgtggtcctagggttagcgtttatttttgctgttagttttcaataaggccctgagcgccacacacacaggctccctgtgggcgcaaatgtgcaccttccccactctcctgtggccttgggagccagttctgggcaaagccaaggaagtagccacccttcggtggggctcccaggaaaaggaaggcaccactggcttagcctgtaacccctgtctctgtccccttcttcttgcctgggcagggacgggttatgggcattgtcttggaaccctgaggacacgctgatgtggaaatggctttgaacaccatccacaggccaacagctctcacctcgcacctccctcctagccctcccttcccacatgccagttggcgtctccccatatacgatccacggacaggcctcccgatcctcccctgcaaatctgcttcgcccacaccctcctctgacccatctggcggcagcttctgcacatgcaccaggattgttgaattcacggtctactggtctactcctccccttgagtagggctcagggcccccagtggaggcaggctggaagatacggcccctctgtaatgcccttgctgtgacaacctgctccaatgtcccagagagtcttttccagcccttcttgggggccctgggctttgggcttgcctcctgccttttggagggatgtgagagagcaggggctgccaggaagtcacgtcttacattcctgctgtgggttaggggatgctgtaggacaggacggagggccaggtccaggcctaggcaggaccgtggccatctatccatctatctcctgctctcagaggggatgcctggggcaggatcctggtcaacctatcagtacagagatagccagagaattctgactctcctcgcctgcctcatctccccttgccagactctaaggacagttgcccaggactccagagctgagtagctggagataagcacgtggtcctgccagctcctagtttaaagtgctgcttctctttaattcaggggcatctgcacctcaggaaacccacctgtgtgcattctctcattcctggggggatcccatcctcacttcccaccaaccgcccactcaaaaaacaccttttcagccttttttccagttactgctaatgcccaaggggcactcccagtgggcacccccagaggctgtgtgttttccatttcctccactgggctctcaacgatcccatttcacatgtgcctgtgggaagtgggagtttctgtggcaatatcgtgatgactagaccccagttccctatgagaatcagtccactgtcacggagttcggtggccttgaagccaaagaattggtcaaaacccaacagagtatctactctcatgtcccgaggccctgtgactagtggaccaggagaatttgcaacctttaaaccagctcagctgagatcccggtgaaggtgcaaattacttacaaaagcaatgctcttggggattcctgggtttggtcatcgggatccacaggttcatggggctgcaacttagacagttgggtttcccagacccctcctgatcctcagtgcaaaatgtgctccttggatagcaaatgtgctttttcaatctgacttagcaagcttaaggattattctgtagtcagcctccaacagccacagccaggcttattttgcaaagttgggccaaaggcttctgccacatgggaaccccattcctatactgaacataaggactttcagggcagcaatgaaaatgcaagttcctgggctgccccagcagttctgattcattgagtctgagcaggggtcatgaatttgtgtttttaaccagcttttcatatgatgttgacccaagaggtctgaggaactctgctctaagaaaaaaggtctagtgattttttgaggatgatcatctttaaacaaaccacgttcccaaaagacctgcctttacggatggtgagtacaacttcttgcttgtgttgagagttttggctgtgggtctgagccaaagaaacaacaaataatgaggacctttcatgttgtgtgatcaacttccaaaatttcataacgcttttgcaaaccagatatttgatgccaaggactttacctgcctcttaccgaagaaaacaaaaatatagggatgttggtggtcttgtacaaagactcacacccagaaaatccttcatccaggaataagaaccattatgggagtggaaataacttgattggggtgtatgttatatatcatataattcactggttttgagtgtgccagtgaatgatgtctttgtaaatttaccaagcggtgcgatcatcaacatatagctgcagggccattcatcaccccaagaaggttcctcctgctcctcactggtaattcccactgtacccactccacctcccacccctgcctagccaaccactgagctcctttttgcccctatagatttaccttttctggacatttcatctgaatggaatcacgcaacgtgtggtctcttgtggtgggcttttctctcttgggcaaaatgttttctatccatcctgctgtggcatgcagccttagtttgttcccctcaattgctgaacagcattcctctatgtggatggacggcactgtgtttatccattcacttgatgatggacatttaggttgcttttaatttttgaaaacaccccttttgaaataccacaatctggctgcttctcggaagagatgtcacacttggacgtcctgtccaggtggatagatgggtggggggtggggcgctgttggaagtgctgcagtgggtcacatcttccgggctctcctgtctacccaaggggcagccatcagcacgtggggacgtcagacctggcacaaggcacatgtggcctgggtgagaccaggctctctggacaccaagcccaaagtagagttgtggagtgcgggctcctggggaagctgctgggagggatcagcagggtgaggcaagaggaggaactgggcctggctctggcctcagcaaaaggctgcccctagcccaatgctcagggcagctcaggggcatgagtcccactgcaccactggcgccgaggctgggccagcctttgatccacctccagcagtcaccggtgtgggctgccccttgaggtggggtgttccataactgcctgggcagcaagatcgggggctcccaagagcacccaccaggtgccattgacagccaagaccctcagcaactgggaggtggatgccctcactcaaaaaggggatctgggcaggcaccaatggtgtttgttacatactcacacaagctctggtccccatgaacccagcagcaacatcagctcgctcctgccagctctccaacctcctgctgcctgggctgggacccccaagacaatgagcttgtccccacctcagggcccccacacatgctgctgtctcttctcccattgcacgctttgccacctggtcctcccaaatatacacagcacacgtgtgtgtgcatgcaggtctccagggtggggggctcaggaaaaggtgggaccaccctgccagcggcctccaagtagctctgacttcaagatctgtctcacaaacggtttaggaaaggtcaaccatgcccaaggtgcctgctcatgctgtactgaaatccagtcctgtgtgcaaacacagaagtgaaggcaatcgcaggtcagggagggaagagatattgggaagacacactggagtgccgtagccacactgaggcaggcctggaccacaccttccatggatattagagggcttcctggaggaggtgtcagttgaggagaccctaggaaggtaggactcagtccagtgatgaagaggagccatgaaatccaagggggagaaattggcacccaaggtgaggcagcagaagaggtcttgctcagttaggtgcccacaactggctggagttcaggctgagggcgggggactaagggtgaggctaaaaatggggtcaggaagggccttctgtgtttgagttttagctcaaggcccttgaaaagcaaagaaagacttgaccacattggttatgatctgctcaccagccttatttttcctatggaatttgacacttatcatccatgtggctttcactgggtgactctgagggtcctgggaggactccaaccatcagaactctacttgtactctatgtcgcttctttgagtcttccagtcttaagctgggcacacccctgagatgcttatggatgcgaccatcttgttaattaagactttaacttctgaagaatgcagaaaagggtagctacacattaaaattgttctctgcagtatccaacgaaggaatactggaaggaatgcaatatgtttttactgttttaggctgccaagctcttgcatgcaaaggctctggcatccaacagcgattcacagtcttttctccttcaaatactctgtgtttgccaggtaataagccagctctttggtactagggccaggcagcaaagtcctgggtcctaagcgggctggtatctgcacttgggaggaagggaaaaaataatccatgcatttcccattggcttaggagagcagcaccacctgcctggatcaggggtcccttggtagctgagttcactgagacagaagccaccaccagccctggaaaggcgactgataagaagctttcagagcaccatggggagaatgcaggggccgggaacgaggcccacggctctgccgcgcttggaaagagtaaagatgttatggaaattcaactataaggtctagaaaaacccactggagagctttaggtggttttgactgaaatttcaaccgtgtgtgcctccctctgttaatgtgagtctgggggcttcctggctgagcagctcaagggtggattccccagccaagcccagccaagcctagcccagcccagcccagagacagggaggtggcaggtccacaaagccaacgggccatgctccggcccagctctgttcccagggccctactcctggctgtacctgttgctgaggcctgggagtctggcttttccccatcaccccaggcctcatcaagtctgccccagcaccgaggtggcagaagtgcagtgcattcagatgctgagaaccacgtggctggagggaggccttgcccccaccctccctcccaccatccactcagggtccggctgtcctgtgtcacccccaggtgtccccgactccctgcaactctcccttcacccggcttgagcctacggcttcctgcccccactatcccatcacctgcttttgctcccgtctgcacctaccttgtcccccaagccaacagcctcatgtctcatcatcaagaccaccgaggcccagggaagtcagaggtaggccagggtcgcagagcgagggcgagaactcagggcctccttcaccagcctgggcgccctgcctcttcccaccaagctgcgggtccaggccatttctacagggagagacgctcattgctctgtgtgtcccccctggaccttggtcagaccaaagccacttgaagttggggacagccttggaggtgtttatattcctcaggggtgtgaggcagtgggtgcggctaggacattgggggcaccctatcaagactgacagcctggtgggggctgggtctccgtggtttctttactcaagtcctgaagagttgatgctttcaatcacctgtctctccctctccatctctctctgtgtctctctgttgttgtctctctctgtctctgtctccctgtctctctctactgctatcccaatgtgtctcttgctgtctccccctctgtctctctctgtctccccgtgtcccacgtctctctctctgtgtctttctcttgtgtctctttgtccttgtttctctctctgtttctttctgcctctccctctctgactccatcttcccctctctgtctctctctgcccttctgtctccctctctctgtgtgtctctctctgtgtctccctcctgtgtctctttgcccttgtctctgtctccttctgtctctctctgtctccctctttctgtctgtctccatctccctctttctgtctctctctactgtctccctctccctatgtctctctccctttctctctccccacactgactgagctttgagaccttcctccagcctgtccctcttccaggacggctgcccaaaggtctctgagatatgtgggatggacccacaccccccggagggttcccaggcccaggagaagtggtggtggtggaggtggaaggaatttagaacgcccaaggcgttaagcggcgggagatactgactcttgtgggctttagtgtctttgtccgcctggttttcaggtattccagaggtagaaaggtcacttgtatgagcacacagaatcgcttcggctgagcgggcagtgtctggccagctgtggggctgtcctgggaaggcagtgggctcgtggtctgcccaggccaagctctcctggatgcgtgaccctgggtcagtcaccgcacacttccagcctgtttcctccagggacccttccagctcctctgtgcttcttatcagtgccaggctggttgcggggggtggggaggcccaagcacattccttccccttttcagactggagcagggcaggttgcacatctgtgagctccagagcagaggacccagccctacctgtgaacctttcaagatgcacacctgacccggtgactttgggcagagcctggctggccaaggtaccctgactctgaccttagccaggacagggctgccctcccagcccggccatctccgggtatttgcagttggccccaagaggaactggagagagactgattgcagaacagcctaaatccattcactgcttgcaaagcaaacccaagctctttccttcctgctggtgggacagtggcagaatcttagaagaatggggccaccgagtgtggggttcagggcacagtaatgagactggcctgggtccaacacatgagagctcactctgcaaagaagtccgattagagatcccgatgccaagcctggctcagagcaatttgggcactgctcatgggatacttagccatgctaggaaattcttcccgtgactttattatcacacatcaaaagtggctcccccacccagccgcataaccttctctgcacagagctgcatacctcctgctgatcagtcctaaaagcagtgaccacctctgaagagtgtgctcaggacgtacaccctgtataaggctgcctcgttgtcccagaatctaccctcggaaaagagagaccccccttataaaggagtccttaccagatcgctcatgttataggtctccctctcgatattttgttttatatttaatagacaattttttagccgttttaggtttacagaaaaattgagcagaaagtacagagaattcccgtctactccctcatccctcctccagctttccctatcactaacatcttgcattgatttggtacatttgctgcaagtgatgaaccaaccgcagtacattattatttgctagagtccacagtttacagtagggttcactcttggggtcatgcattctgtgggttttttttttaatttttgattttattttttttga

SEQ ID NO: 1385 - DNA, 1201 bp, synthetic construct
  misc_feature 1..1201: note = Description of artificial sequence: synthetic polynucleotide sequence
  source 1..1201: mol_type = other DNA
gccacagtcatgttggattagtgcccgtcctaatgacctcatcttaatcatctgcagagaccctatttccaaacaaggtcacattcccgttcatgggtaccagggctcaggactccagcatcacttaagggggccaatcccacaggataggggaggccagtgcttcgtgtcccttcccaccaggccaggaggtgcattggcccgtgggactccaggcacagagtgtagaacattcaggagaaagtcctctctctagtccagcaaaatctccaggcctctgtgcactgggagctgaggaaatggcgtagaatttgtctcatcttatggtgattccaagtagacacagtgttggtgccagacacaagacactggcaataccaggccagccttttaaaattttattattatcattataatcattgtcactgttacaattgatgcagcctgagatttacttagaaaaaaggaatggccatgagcttttgtgagaactggggactgacgtcaggacaggtgtccccatggtgtgagcacctggggtaggaaggacttgcttatgtgctcacagcccctgagtccttgtgctgtcaagaggaagcagagttccccggaaatatggccagagggatgtaaccacttccttatgcatggcacatgggttccgggtccccatagttggtgctgacagccacccggtgggcaggagtagcatggctctgcctactcttgcgtcaggctcagggtccactcagcagccccagcctctagcctggaagggtctggacaggtggttggtcatccctggagggccactgatcaagtgtggccctggtcaaattagggtgtagctctagtctgataggactgtggccctataggaagagcaagagacaccagacagcctactccctctcttcctccaccatgcaaagacacagcaagaaggcggcagtctggcagccaggaagggagccctcaccaggagctaaacccaacaggaaccttggtcttggacgtctggcttccagaattgtgagaaaattctgttgtttaagccacccagtctgtggtattttgttataacaccctaagcagatggaggcagctctccttgctttgctaataataatcatttacctaggtacatgaattcaggtgttcagaaagctttcctggccaggtatggtggttcacacctgta

SEQ ID NO: 1386 - DNA, 5761 bp, synthetic construct
  misc_feature 1..5761: note = Description of artificial sequence: synthetic polynucleotide sequence
  source 1..5761: mol_type = other DNA
gtggcactcctgcagtcccagctacttgagaggctgagaggtaggaggatcgcttgagcccaagagttcgaggctgtagtgagccatgacagcaacactccactccagcacagtgactcactcctttaatcccagcactttgggaggccaaggtgggagaattgctggagcccaggagttcaagaccagaaagctttcctacccttacctctcaatcttaacactccatggtgcaaatgctttgggggtggtggggccaggccagagcccagggctcagccccctggctcagtactacgtcccatactccaaagttagatttcagagctgtttgtgatcagtctacttgggcacttgagaatgaaacccatttctcagattgaaaacagaggccagaggagttaaacaaaggcctagaagtccgaggagcctggctgtacatattcatttatagcataaacaaactgaccaattgtaataaaatgggttaaagaggctggagaggcaaagagagtttctgagttcctgcccaccaggcacaccctgcaggtttctccagagatgttcctgttctcttcgcagccagggatctcccccttggagttcccagccgtgcacctaatcctgcctcatgaaactggatcccaccagacagctaagccttcggatgcctgtaattccttggctaatgctaggcttaattaagacatcgactttaatagcattctcaccgattaagaaatggcaggtctgaaagatgatatttcctggtgtgcaaagatatcatgatgaaatctccaagtcatcgtttcaacacaggaagttatcggctacctggggcagtgcccgtcctgctgcacaattggcccgctgttagcagcgttatttaagaggctgaggcatccatgtttcccaggagccggtcagtggggaaaaaaaggatcaattgagtattttagctctgcatataggtcttctcgatgtttggtttgctttgatgcggagtaaaagtaagcgttatacgtttgaacttgttgctttatcttttccagacttctgtcatgtctcaaagtcagctaaaaaaaaaaaaaaaagtcagcttgagttaaattagcatttctgcctctcttcctttgcctgtcagttttaaaaataagtatcgtagttttataaaaatcgagtaccagaatctttacagttccacatggcatagctgccacccaagtcgaacgtgaagctgagctcccgttagatctgcagacactccccatcaatgtccatctggtgcatcagggttgcggggtacactggagaggaaacacaatttctataaggaatggagtacagtttataaaacaagctatttgtttccaccatgaggtggtctatctctagcagggtgttgccctttttataacatgggtctctgtttttgaaagaaattgtctgttatgtgcaaattattatttttggaaggaggaaaccaaaatgtcagtgcattcctaagccaccctaggggtaggggtgaggagactttcctgggatcctcctccatcgtccaagcagaatcaaagctggggcaagatttcacttgagtcagcaccaccctccacccccatgtctccatccctggagcttagatggattcagtagagtgatgagttaatactagtttccttccttagccaactggccacttagggtccagagaagagaccttccgtgggcactgaccaaggccagcacccacagcaggaagaactgctggcaacgggcagctccagaccccatatctgcgcctcttgggagggacagtggcctgcggagcggcacccacatgggagcgtgtgcgtcccaacagaactctccctgtgtaaaccccttctcgcctgggacccagtgccacattcagacctcggaaattcatgtgtactcaggaaattcaaacacattatcattttccaacatgcggtgatgacggtaatgacactgggaggccttcactcaaagcaaccgtggatggagctgacagggcaagtgttaataggaccaccactgatgaacagggaaggaagcaaagccaaccatatttccactcctccttggctctcgataacccctgggctccatacccccaccaggccccaggactgtggccagtcctcgcctgcctttgttctttggcaggcccgctggcctctccaccaggcagccacatcctctgcagagatgcacatattcgtttatttattcaattcattttgacttattcatcagatttaaatggactctttttcataaaagcccaaagagtagaagggaggtggctctccagatgcaggcgctgggccccatgagtttcctgttaaacccttgatgaggtccctacatgtgcaagaccacggtggcagagaggaggccgagagcagaggccatgggagacaacagctgcttcacgcccagctttgagggccagcctggccaggagaaacctgaaggtgggaacctgcagcttcctgggcccagctgagcctggggtgaatccacatgtttacaagagggtgcagtatgcaggaccggccgcacagctcagatggaaactcccctcctacagtcaaagtccagattcctggcttggccttcaagtctctccagaccgactacttttccagcatccacttcagagccctgtggtcaacacagcagagcagccgctttctcatccccaagctcaccatccaggtcccctgtgttggcctggcttctgggagcatcccctagtctctgatgaaagctgctgaggactgacagccatgtcctgagccaagaattgacattgactgcatgaaagccacctggcctggaacatcccaccagaaccaccctgcctggtagggccatagtcagtgactgactgactgaccctgggggtctaagggcccccatgcctcactgtgggactgactctgtgatgcaggtcacactccagagccccctgtggggctgaaaccaccactgtgctgagcctcccctgccccatctagcctctctcactttctttctcttgaaagccctctgtcaatcaatcccatggacccaaacccttgtctcaggctctgcatctgagaagcctggccagagaccctgccctttcatatccttctggctttgctgactctgtcccctccatggaaaggcctctttctcccttagcacgggttgaattatgtccctcaaatatttatgtgttgatgtcctaaccccccatatctcaggatgtgacactgtttttgggaacagggacttcgaagaggtaatttaagtccagtgagatcacatgggtgggccttaatcccatctgatcgatgtccctgtaagaggagaggaggacacagacacgcacagaaagaccaccctggaggacacagggagaaagcagtcaactataaaccatagagagaagactcaggagcaaccagccctgtgacaccttaatctgggacttccagccccaggatggtgagaggatcaatttctgttgtttaagcctccccatctgcaatagctcatcatggcagccccagcagatcaagacactactacattcactgacactgcatttgcccttcaggatccagctgtcatccacctgcagtgcctccccacttctccaagatagaatcatttctgcagcacattctcgtgcccctcttaatatacataccacatccccacttgcattatgctagttatgtacattcctaccttcagcagagactctgtcttttaatgtattcctccttgcattccacgtaagacctactaaattgtcaatcaatgttcatcgagttaaaaatggacttggattgaatttcttgactccctggggcaggccaccttcctcctccccagcaggccgagctcagtggcaactgagatggtatcgcacacgggcacagcgcaggatcacgctccggtctccgacactggccccatttaaatgactctggggacagagaataggaacttaaatttctttccatgcagctgaaggcttcctcctaggaagtcgctgactgaacacacctcaccgaaaagatcacagatgaaactgaaaccctagacccatctcaggtcccctaggggctcctgatctgtggacctggcttcccctaagaccccctttgggagcgaggctgctgggagtctgtgcaccaagaggtcaattgtccgatatcactgagccaaagctatctgtttaaccgacaacatatctgagtgtcagaatcagcgaccatcatccaagatgctggagttttttcttccgcgttgaaatggatcctttgagagtcagtcaaggggaaagaatgtggaaggatgaagctcagtagagcacctcggagaaggaggccctcggttataagggggacatgaaaaacggggaatttcctctcccatcacaggcttccctcagttacctctacacctttctgtagaaaaaccactcatttgtttttctgaagacaggagggcagggggtgtggggatcatccacagcaaggcatgtttcctgagaatgtttttgattgtcaggaggagacttttcaaagtaaacgcatgagagtctccctacccccaccctccatacgaatactgggggctgctttgcataagcagcttgtcggcaggaagaaggcaagtcgatgcatcccaggatgaatgataactgcgcggccctgggcttatgaacaatagctttctggccagacaacattagccacagccaggttgcatttttaaaagaatgtttgtgcattttttttctccctcctaaaactcggaagtctcttaaaagacatcaaaactgttaagtgcagatattcggaataaatcaaccctttttccctccagtatggttgctgttgtaataacagacttcttatttgttggatacttatgtaacttaagatgaaaagacatcttatagccttctggcaaaatgatgggaaaccaacagcacaccggagtctcctttacgcccaggagggagtcagtttcaggccatgagaaaggggcacttttcactgcttcttgagaccaacctcctgcctttcaatatttccatacagtgacttttcataaaggcatgtaaaaaataccttggttaattggttgtgatgaaagaacatgataacacagtggtcacggagacccattgagggtttgtccaagaattcgttaagtaactggtttctgagtagatttgcttaaatgtgcatgttcctctctgatttggagacatttggcaagctgaggttcaaaacaggaaagtcgggttccaaggctctaagcaaatcggttcatcttaatgggcctcaaatgacccagctaagaaatgggtctaattatacccacggccttggatcgttgtgaagtttaattaatgcttgaaaatgttttgagatcctcggatgaaaacagaccacagatacagagtgttattacagaatcctgccagaggctttctttttctgcaataacatgctgtgggcattatctgaactttgtccctgccagcaatggggatttctgagatgtgcctctgtccactacacctgctttcaaaccctttaaagccctttgacagctacgggccacttatacgtaaatgccccaagacaacagacatgagatctgaagagattccttagcaactcaatttccaagaagtggccaggcacggtggctcatgcctgtaatc

SEQ ID NO: 1387 - DNA, 1861 bp, synthetic construct
  misc_feature 1..1861: note = Description of artificial sequence: synthetic polynucleotide sequence
  source 1..1861: mol_type = other DNA
aagactgtgtctcaaaaacaaacaaacaaacaaacccaggctggagtgcagtgggtgacaaagcaagaccctgtctcaaaaacaaacaaacaaacaaacaaacaaaaatttccaagaagaaaaatgtgtctgtgctctctcctgtggactttggttaatttctccaccatcaacggtatcatttgaggatgactgtggtccctcccacacctggctgagattgctcaaaatcaaaatggtctttcttaatgaacagccaaggagagggctcgggttcaccatcttttatttatccttctgtactataataaagtagaaaagacggatcttaactaaatttggtctctaataaagggattccggatgcacacagttttgccttccttttgatcttcatcttttaaatataattttcttgctgggctcatgtgcccggggtaagagatggatggaaggctctgcatggtctgtaggtcacaggctcactggcatgtggagttcttgtataatctggctaggcccagttctcaggggtctgatgggaagctgaagatttgttatttctcaatgctgaacagattggaaagaaagggaccctcacctccctgatgtggtcccttatgtcccctctgcccaggacactctgccctgatatggccacttggctgtcctctttggcccacttggaggtccatacaaatccccccagccccctgtgctaactgcttccctgctcccctctccttccacccacggtcactctcaatttcttacctggcattattccctttgtgttattactcattcagtgacatggcattctctgcttctccctctagaatttggtgtccatggggtggtggggagaagtgtctgtttaattcactgttgtgtccccagcccgagtatcctacctcatacatcgtgagagctcgatcaatattaccgggtaaatggcctcagcgcccagtggtgcagagtacgcagaggctgaaacaaaggcttgagtgtgagcccttcatggagaagtatgatctgaggtggggtgagcaaggctggaaggacagggggcgacacaaaggcacagacttgaacttgctattgctaccctcactggtcgctcaaaccaagagattccccaaggagtgtgtgactgttttcctggactttcctctggagaggggaaaacattaatcccgccttcatccatcagcaaccaccctctgctagagtcatccacaaactccggtacggtgcacgagtgggtcgcagtgtgaccacgagaggcgtcactcctactgcccatgaattcctggggacacagccccgtgtgccggccattagctcagtgcattcaccacacactggaagacggggtcccaatgccactgggtgttgccctgagctgacaccttagcagagtctttagcaagatgctctcacattcccttggactgatgcttctggcttatgggaatatatctgttgtaagcctgacagatctcaccagtgtgtgctccagagagtgtctccctcactgtaaaatgtgtccttgcttcaaggcatctgccaattccttggagacagattctgtcagccctttgattgatgtgggcagagcactgtgaacgcagaaggcaaatacatatctagagtaatgccaattcctaaaaagacaagtgttatctcctttagactagaaggggaccaatataatcaacttaccactaagtggttggtcagagccctcaaggaatgaggccttattgaaggtttgtcattactgtctgcttttgtgtgtgtgtgtgtgtgtgtgtgtgtgtgtgtgtttgtttgtttgtttgttcgagacagggtcttg

SEQ ID NO: 1388 - DNA, 121 bp, synthetic construct
  misc_feature 1..121: note = Description of artificial sequence: synthetic polynucleotide sequence
  source 1..121: mol_type = other DNA
ctgggctcaagtgatcctcccacctcagcctccccagtagctgagaccacaggtacacgacactacacctggctaatttttcatttttcatagagatgggatttcactatgttactcaagc

SEQ ID NO: 1389 - DNA, 5821 bp, synthetic construct
  misc_feature 1..5821: note = Description of artificial sequence: synthetic polynucleotide sequence
  source 1..5821: mol_type = other DNA
ttacaggcatgagccaccacacccagtctagtgtctgcctttgaaaggttgggcagaccagcatgatctgtagaatatcaagatgattatggtacctgtgaagtatattctttggagaacaggagttattataacatagatctggagtgagattgtgaatatccttcctatctaatgataaattgctttttatcctctttactgatcaggatggagaacacatttgctatagcaatagctgcacaccttccaacttccaattctggccaaaagtaactttcctgccacaaacaactctaaaactggggaacgggggagggatatgaagcaactgtgctcaggcattggctacaggcagcaaagactgtgatctctaagagaagggaaactcctgatgtgagcccatggattgccctgcctctctccctaaggaaaatgtcctaactgtggtccagggggcttagcgagagcatagcaattttacccagctgaagaggctgccaaatagctggatctatgggtcagggcaccagaaacaggggaagctcttccaagcatgggtacctcaaaagtttgtgtgggggtcacccacagtcctcggacaaaggtggagctgtgtatatacagggaaagattgaagaattaccagagatcagttgctatgcagttgagagggagaatgatgctgagacatattggaactccagctcagccagaggggagtggtttcatttatatcccagacataagagacatcagaaaaatcatgcctcaggagtaaggaccataatctagaataaggtctactctatactctctaactaaacctaaaactaagcctcaacaagagtaccacatatagctggaaggcaaaacttggaggatgagttaaatcaacttagtggggcttgggaaacactagatcctagtctatgcaaattcaagttatctgtcagaatcaaactgcctgctagaatagaaatcaacggtactcagaagcaaatagcagaatcctagatttctagggtctgttatcggcaatgtccagaatataataaaaacaaattctagacatccaagcaacaggaaaacgtgagccatactcagaaaaaaaggcatcaattggaaatgacactgagatgtcccagatgttgcacttagcagacatagactttaaaactgttattataataaatatgttaagggtttaaagaaaaatatggtgttaatgactgaatggatagggaatttcagcagagaaattaaaacttagagaaggaaccaaatggaaattctacaactcaaaaacacaaagcaaatgaaaaagtagctggattgacttaaaagaagattagaaatgacagaataaatgatctaaagacaaatcagtggaaactatgcaatctaaataacagagataaaaaaaatgtaaagaaagtaacagatcctgagataactatggaataaaatcaaatggcctagcaatgtgtaattatagtcctagaaggaaagagggtgataacaaggcagaaaaaagtctgaagaaataaggcaaaacttttccaaaagttgatgggaatcatcaacttacagatccaagtaaatcagtgaaccctaaacagaacaattgccaagaaaaaccacacctaggcacaccatagtaaaactgctgaaaaccaaagataaagagaaaatcttgaaaacattcaggggaaaaaaatgtacattacaaggagggaaacaaagatacaaatcgtactgatgcctcatcagaaacaataaaatcagaagaaagtgccaagagagacttaatgtgttgaaaaaatttttcaactcagaattctatatccagtgacaatacccttcaaaaacaagagtggaggaaaggatgaaataaaggtctctttagacccataaaacctgaaagcatttcccaccagcggatctgtactgccagggtgttctttagtttgaacggatattataccaatggaaataagaacccacacaaatgaatgaagactatctgaactggtaaataagtgggtaaatagtcacatgccaaatatcagagattgtgtcaatctgctccagtaaattcaccacatctggcacagcagcagcaacgaggttaagtttacatggtaaaatttaccataccatcatgcaccatgatctgtctgttttggcaggggccagagaggtgaattggatgacaatgccacagcgcagcatcactacatactttaggttttttgtgatggtcctaaatccctgcagttccccctggtttatagtattgcttctgattttaccatcttagccaggaggtgacagtttcaggggcttccacttggttcttcccacttcatggctcttttcccacaagtcagagaatcaaagcaaaagtcctgccaattctgaagtctggctactccaattactacaataagggagaggggaaatgactatgagatgagtccttggatccaatggctccactgtgtgatgaccttgggcaggaactccatttatcacctggtcttcttaggaaggccccccaccgtccgctgccagtataaccaggggataatcaggagtttcagattgcctgatatcaggccctatatccaacaatccctgaaagtgtaagtaatcctctctcttcagtgcacagttactccggtagatagccacatgtcacctcaggaaagcatcagggaaataattgctgcataaactggcagtggtatcacaggatcctccctcaaggatactcaacttcccttttagttaattagttaattaattaattaattaatggagtctgggtttgtaaactgaaacctactactatgtatacgtccctggttcccattggtacatattcattagctcctgatttcttcactagtgagctctttcctcttagagcaggaaatacatttcctcacatgggccatgctcagggctgaccctagctattagccttatcggcttggatgtactgaggtgggaacacatactgaaaatggctaatgtcatgttacatacctgcttcaagtgagactttgtgaattggaggaagctctaggcaaagggggcatttctcatcgaagggataaggatatctgctgatgtagaggactcaaaagaatctggatgtacaggattttcaggttcatccacctaaatgttaccatcttggatctcaaagtcccactcttttcctaccaggaccctaatttggacaaagcaggtctgtgcattcagtcttctttgctgctctgccactcttacaatcagatcctgagcctgattttcagtacagtctgccttacagaaaatgaaaatctataaatgctgccagagaccctctggattccacagcttgacatgaactgacagatggctaatctaaacctatcactttcttttttcaaggctcccagggccatttaactaaaggaagcacactccatgctattcaagtgccacagccctgcacagcccaatgcctcattttccatgtgcacctcatcccaggcaaccacaggtgagagccttggcaatgtgtgccataatcatcaccactaccaggaacggggccctcattgatgtttgactagtgagtgatccaataccaaaatcccatcctggggctctgctttcagaggttatttcttttttccaactatcttagcccaatgttcttagcaaatcctgaaacaaagacttaactgcaagtacttggttgggaagtgagaatgagtgaacaggactgagggagagggggaacaaggaagggaagaggggaaagccaagtcaacctgtgtcatttggttaacctccaaacacctgccatttcaaatcaataaacatcttctgggtaatagacaaactgcaatgctgagtatgtcttaactgagaagcaggaaaccaaggcaattgcctggattttaaattcaggagcaaactttaggcagaggtgagagtgtttgggaatgattctcattcttgcctcagttccttgaatgtgaggggaaggggaagaagtcctggcccacttgtaagtatgacattggtttcatttgcaattccatacccagccagccctccaaaacactatgtactttgtttaagtaaggacaggaaattaacatgggcagatgacatgctgctcatcttacaagtaaaaatactgggatctgaagatatacaggtatctgttagaagttccaaaattcaaactagagtctgcttccctccgaagttcttgcttcccctagtagactgtgctgagaactttgtcctgagaatccagagtccatcaaccccaaacaggccccaaattatccaaagaataatttgggtgaggtaagtgaggttcagagtcatttaagggaaattgcctgttaaatcagtggattcatctgagtctgagatcacacatgagcccagcagaaccatattctggcctccatggccaggaagatttcttttttcaagagattgttttctaaagtgaaaacacagccttttttcttcttctgtttctgtgggattttcctctttgactgtacaatttgctgaaaatatacattttgataagagaaatatttggacatctgggcaggagggaagttgtgaaatctctgcccaccgtcccaggagggaatggaaagtgaggaggcagctggacttccgggctctgggatcaaagtgactctgcttgtctccatcagaccttcctgatgatgccagtgtgaccagctctttccctggatacatgggcacccacctggccggggagccctcgcggcaagagggacagggaaaaagaccaaagcgcctatcacgaatgccatcctcaaggtcacagcctgcagggtcaccggcctcagcccactcccactgttaggaaggaaatggccgctggcagcttgggatcacctgggctctgcacaccctgaccacgagcaatcattttccacagggatcaccgtggtgtttgtgcaccagccaaagggtagctgcagaaaacccaagcacatccccttcctcccgggttccccagccttggagaggactcccagcacctcagggaaaccacgtggcttagaaccaaaaaatgatgtccagggagccctgttcaagggattggggcccttggcatcatggcacgaggcaagcctgggcctgagcagtgagaatgtgttgtcatgacctctatagatccaggcaggcttcctggaggaggtgaggcccagaagagctttgagaaacatgaaacattggaataggtagggagtggttagggatgcggggagggcagtgaacaatgtaaacaaagctaaggaagcccaagtgggcctgtccagttagctgagagccgatggcctgggggccatattcttgggtgggtgggccacccacgatttctccatgaggtttttaaaattggtgttcatttcagtgaccatgtcctccatgcatcacatccacatggaatcatctggaatcatctggatgcttctgatttcagggctcagatttgcatttctcattcagtggacaggaaaagaagataaccagggcaggggctctgagccctttctgcaatgtagactttatgggaaatttttaaattctatggaccccttctcagaataacacttatcagtgcaaaacacaaaatatataggattacaaaggaagcaaattacactgaaatcagttaaccaaatattcttaaaaaaaaaaaaaaaaaaaaaaagtgggctgggcgcagtaatcccagcactttgggaggctgaggtgg

SEQ ID NO: 1390 - DNA, 3601 bp, synthetic construct
  misc_feature 1..3601: note = Description of artificial sequence: synthetic polynucleotide sequence
  source 1..3601: mol_type = other DNA
gcagtgagccaagattgtgcctctctgcactccagcctgtgtgacagaatgagactcagtctcaaaatagataaataaataaatttaaaattaaaattttaaaaaaacaagtgtatcatatggaaactgtcctgcttttccagcacatgcaataaaggcagcagcaggtcttctcacttccatggcttcgaagggcacaccagcacaaacaacattccgagatgtctgcagcaaccgtattgtgacttgaaaaaatccacaatttctacaaacgacaaagccacacgccctgctgctatggctgtggctcatggcctaccctccagtgccaccgtgcagttagaggttggtaaaaatcaagatgtaactttcccctgccccaagttaatgggccacaggttaggagctcctgacctcttcacatgttgggaaatacatgtctggctgccgtcatattagcaagtggtggtggcgtgaccacggttccgcacaccttggtcctcagggggaagtccttcaccagctggaaatggaaagatggttccttggacaaagccttaatgtgccacactggggctttagtttggcatcttgaaaatggtgccctgtcttagtgtcttgtaataccgaatccctttcacagacaggggctaacagtggtgaacttgatacacagacagcatctttgttccacgcaaaggatacgcaaggaatgagacataccacctccctcaaacaggtccacgttttactccttaagggagtgtgatggtttcaggtgggctagggaagaggcagccagccctagctgggagcctggctctccaatgcagagcctcccacctccaccccagcaaggaaatccaacccagcccacggcaggatgcaggaaggtgctctcaggtcagtgcctgacccagggtgctgggccacagtggcagaggatacagaagagacaggagcagggcaggggacagtagaagggcccccaagcaaggtgagagcacggcaggcacaaatctgaccctctgaggtctcaggcaggggcacgagaggacctcaggaatggacctccttctctacctcgaaacgttcgaagctgcgaacaccataagataggacaaaaaaaaaaaaaaagcagcttcgggtgtctgtgctcccccaccacacacaccctcaaaccattttttcttttaaaaaagccatttttgactgcacctcttccgaagcgcagggagagggctggcagcaggcctgcccatctacacacggaaactttgcagaggagggaatgctgcctgtggtccgctgaccaaaacaagcccatttgcaaattggcaggtggaattcgccctgtgaagataaagggcttgattggggaatgtttaaaaaagtgatttaaatgtttttatggagtgaaaaaacaagagaggggaaaaaattaagttaataaaaattttactgaattaagatagaaacgatggcagtattttaccacagccgcttccattgaggtttttaaaacagacttttatgagttactttttttcttttttttttctttttaaaccttgctcagtgaaaagccttctaaattactgctgaccacattattttcaattcctgagccatgatttttccctgcgctgagggaggctccatctcccaatttacagatgggcaggcccgttgccctactggcggcttctgcaatttgactctgagatttgttaatgagtctggcgtttaatgttaaagccatttaatggtaaccaaactcctcagggatcccacagggctttgatggaagccccaatcctgttggcccctgctaattgctccgaggcccggctccccagttctcccctacccataacccccccaccgaaaaaaagtggatatggagtgaggatgttgtaacgaggagacctttgagactagaaggagtggtggctcaagagaaagatggtgtatatattgcaaatccacccaggaatgtcatcaacaggcaagagactatgaggatggggcttctcagatgtcatactggaaacatttggtaaattttggagtaaggagccaagacttacctggtgccaaaccccaaaggcttgattcaccaatgtgaccggacgctagtgaggacccatgtgtgccaaggcacaattactgcccaagaaacccctgaaccaaggggtcctggatgctagcagggccctagaaacagacccagaagtgacacagcctccacctccggcccccatcctgcatgccctgggccaggcaaccgcactggaaggctgcatctgctgagaggctgggccatgcaggggccagagaggcctctgggagcctggactctggaccaggggcctgtgatgagcactcataggagctgccagcatagccctgcggcccgacacagtaaacagcaccagactctcagctccagccaaggggcccagctgaaatgaagttgcggggtgtcagtcccagactttggggtcctcgaattgactcccacctgccttgggtgtaacaggcacaagtcaaggactgggaaagtgcttgtcttcacctcccccgggtcaggaaccagcgcctgcgtcatccccagcctgccctcctgcaggcagcccccaggaggcagaacctctgccgcatcttctgccctgggccatggcacaagccccagcatgtatttgagtagggggctctgaagcatgaaacaagagctggtcctgcagaagcccctgggcggggaggagcctgcaaatgtgaccagggccgtctcacgcttcccgtaagaggtggataaacccgcaggcaaggtttccacggcaggctttcctgctcccaaagaatgccaatattagtggggtttattctctctcatgcctttggcagacacattggagagctccgagatgtaaaatgcattcttgaagcagagttgagggtggacgctgactgctgagggctggctggagaggcccaggaaccgccttcctgcctctggtaaacccatcctccaaactgccccacctgcttccccacctggtcacgcagctctctaacctgaacatctccagtgcatcctgctgacagatggacggagcccagcccggaggcccccacacaggcccggccgacgcttcccaccatctctcctgactcttgccacagacactcctggaaccccccagctgccctccaaccatccttgccaggcctcatagtctttctaaatcaaattcaatttaactttgaacccaaagaggcaagaaatgccattttggaactaataatctaggtaagggggtcaccctggcaacacacacaaagcccttcgtaaaacgcctggtgcatcctaagcgctcgaggtgttgatccactcgacaaactggcagagagccacttccgtgagcacctgcagggtgcacagctgagcccaaacccaggccctgcctcacagggtgcacggtctactgcaaggatttacacaataaataccatacattacagagcatgctgggaaagcaatgcataccacagagcaaaagaaaatgggctgggtgcggtggctcacgcctgtaatccc

SEQ ID NO: 1391 - DNA, 1681 bp, synthetic construct
  misc_feature 1..1681: note = Description of artificial sequence: synthetic polynucleotide sequence
  source 1..1681: mol_type = other DNA
ctccgtctcaaaataaataaatacataaataaataaataaataaaaatggcaagggggtggggtgcactgggcagggggtaccctgtagcatcagatgggatggatggggacagccacatccagagcacagcatttgaagagttcaagcccaggaggacgccagccttgcagctagctagggaaagagcattccgggtcaagggagtagccagtgcaagggccctgaggcaggagtgtgcctgatgcatcagaggctcagcagagaagctggccgggctcagcagggtgagtgtgggggaaactgtaggggcagaggccagagagagtggggaggacccactgagggtggggagaaatggtgcaggacctcagggcagcagaaggaattgatcttttctctgagtgaaacagagaatgtcctgggggacgaggggcactgggaccagccacagatgtcccagctctgtctcatgtcagacacaggatagattgcactatcctccccactcaaaggccaacaaaatgtcgcaagggtgatgtcccttgagtagacactttcagagccaggacagctcagccacgccctctcttcctctggcatggtgaccagctggcgcccagggccccgagccccctggcacacagtgggtgcccagcacgaaggagaacagagcctttgttgtttccagccacagagatggggttttttgttactgcagcgaaaccagcctgactctgatatgggggcggagacagagggacagctaggggactatagcgataatcccagtgacagacaacgcagctgaggccagaaaaggagcagaagaggtgctgagaagcagtcggggttaggaatattctgaagggaaagctgggagggggtgggtatggggtgtgaggggaaaaggtgagtcagggatgactgcaaggtttgggcttgaacaactagagaaatggagtctccaccagctgagattgggaggggatcaggggttcagttgtgaacacgtttggtacgtctcattaacctgaagcctgaaatattcacgaggtggcaggggcaggtgtcccatgaatgaatgtggggaccaggggaggtttccaggtgggagacatcaacgtgggggtgggtggtcagtatcgagatgggacttaaatccctgagctgaatgagatcactgagggaatgcatgtccacagaagaaaggccaggttcaaggacaatcctgggattccagaaagttagcatcatctgggtcacacaagcatttggtaagttacatggttccacggtgggagagaggacgctggtctttggtccatctgggctgcccaggagtggctctcgttggccacgtgaaggtgggctccatcctgctatgccaggatgcacagggatcctaagaagtgagccccaccccaaaactgtctccttctctctcccctacttctcagagacctgctactttcctgggtgctctggaggaacaccgcaagggtctttcccactcttggaatgtcccctcttttaaatagagcctccatcttgtctgccaggtctggccacatttagttaggccactccttcccaggccctgttgcaaaccctagagcttcctctaacccttgagaaatttcaacccttttctaaaagtggagtgtctgttttgtttgttt

SEQ ID NO: 1392 - DNA, 455 bp, synthetic construct
  misc_feature 1..455: note = Description of artificial sequence: synthetic polynucleotide sequence
  source 1..455: mol_type = other DNA
catcagcctcccaaagtgctgggattataggtgtgagccaccacgcccagccaagaaaagtgtcttaacccttccctggggccagagcagcttggtcctcttatctctcttatctcaaggtatcacttgccctctggaaggagaagtaggaaacagaaaaaaaaaaaaatagctctcgttttctttggattcttctagaacagcaaagaacacagaatattatcacagtatattaaccttctacacatgtttatcaacttagttcaaaccatgaaaaattagtatccttcaaggaacaaataatccttccactaaatcaactattagaaatatatataaaatgggggacacaatgggagtatgacacgattagagttttgaatcaaactaagaacagcgaagctttaaagattagtcatgaacatggaccttggctatcctaacacaaataagaa

SEQ ID NO: 1393 - DNA, 360 bp, synthetic construct
  misc_feature 1..360: note = Description of artificial sequence: synthetic polynucleotide sequence
  source 1..360: mol_type = other DNA
tcacagttctgcatggctggggaggcctaaggaaacttacaatcatggcaaaagaaacctcttcacagggcagcaggagagagaatgagtgctgagtggaagaagaaatccctgataaaaccatcagatctcacaagaagtcactcgctctcatgagaacagcatggtggaaaccacctctatgatccaattatctccacctggccccacccttgacatgtggagattattacaattcaaggtgagagttgggtgggggcacagagctaaactatatcaaacagtaatatatcagtgttggtttcttagctttggcaaatgtactgtggttatgtgagatgttaacaataggagaaacca

SEQ ID NO: 1394 - DNA, 121 bp, synthetic construct
  misc_feature 1..121: note = Description of artificial sequence: synthetic polynucleotide sequence
  source 1..121: mol_type = other DNA
aggatactctcttgaacctgggaggtggaggttgcagtgagccgagatcacaccattgcaccctagcctgggccctgggcgacaagcgagattctgtctcaaaaaaataaaaattatttca

SEQ ID NO: 1395 - DNA, 240 bp, synthetic construct
  misc_feature 1..240: note = Description of artificial sequence: synthetic polynucleotide sequence
  source 1..240: mol_type = other DNA
gaataaaaggtttatcttaaaattccaaatacaagcagagactcttgccagttaaaaaaaaaaaaaaaagggtctatagcaaccaagaagagtttatcccaagactatatcggtggcattcaagcaggaaaatgatttacatgatttatcatattagcatgagaaatagcaaggtccatttaattatctcaataaatatcaaggaggcatttgaaaaaaagtcactacaaatttgtggga

SEQ ID NO: 1396 - DNA, 121 bp, synthetic construct
  misc_feature 1..121: note = Description of artificial sequence: synthetic polynucleotide sequence
  source 1..121: mol_type = other DNA
tctacctccccaggctcaggcaatcttcccacctcaagtctcatgagtagctgggactacaggtgcactctaccacagtcggctaagtgtttgcattttgtgtagagacaggtttttgcca

SEQ ID NO: 1397 - DNA, 121 bp, synthetic construct
  misc_feature 1..121: note = Description of artificial sequence: synthetic polynucleotide sequence
  source 1..121: mol_type = other DNA
caaaagccaccaggcacagtggtgtgtgcctgtagtcccagctactcagaaggctgaggcagggagatgaactaagcttaggaattcaaggctgcacagtgagctatgatcatgcatgtag

SEQ ID NO: 1398 - DNA, 239 bp, synthetic construct
  misc_feature 1..239: note = Description of artificial sequence: synthetic polynucleotide sequence
  source 1..239: mol_type = other DNA
acagctactgcagtccagcctgggcagcatagcaaaaccctagctctttaaaaaaaaaaaaaaaggccaattattgcttaaggaatagaaagtcattagcactaaaaatctggacatgctctcgcttgtctggttaccactcctattttaatataaaactaaattaaaactagaaacactggcaaaagctatcaataagaaaaagaaataacatgtaaatataagaatagaagacatta

SEQ ID NO: 1399 - DNA, 361 bp, synthetic construct
  misc_feature 1..361: note = Description of artificial sequence: synthetic polynucleotide sequence
  source 1..361: mol_type = other DNA
aaatgtgaattgtcttttagccatgattataaacctaggaaagcaaccaaaagtaccagtaaattacttccagaagatacataagaagacatttaatcaagtgcatcttacatgaatataatgcaactagaaaatgcatgtaaaataaaagagaattcaagagcaatttaaaaatcaaataattgtatatccatttaattggcgacataagatgcttacccaaagggcattgtgagaccctaataggagaaataaaggaagataaataaaaaacagaatttttcccgctcctgttaggaagaagcagcataataaagatgaaaaatttatccctgccagctggcaagagacaactcttaaa

SEQ ID NO: 1400 - DNA, 241 bp, synthetic construct
  misc_feature 1..241: note = Description of artificial sequence: synthetic polynucleotide sequence
  source 1..241: mol_type = other DNA
cagtgtgggtatttccatcaagcagtcaacaaatgcaccaatcagggcttttctttccagagagctgtttttcctacacaccatttagtaaaggccaaatgatttttcactgttacttttaggaatgtaatgaattgattgagaaatccccaaattcctctttttatttactcatttacttatttaggttttgagacaaggtcccactctgtcgcccaggcaggagtgcagtggcatgatc

SEQ ID NO: 1401 - DNA, 361 bp, synthetic construct
  misc_feature 1..361: note = Description of artificial sequence: synthetic polynucleotide sequence
  source 1..361: mol_type = other DNA
catttttacttaaaattgttctagctttattgaggtatcattgacatgaagctaattaacatatccatcccctcacagagttaaccattttgtcttttgcggtgagaacatttaagatctctcttagcaattgtcaagtatgtgatacattattactaactctagtcaccatgtggtacaagagagatccagaatttactcatcctggggaaaaaatttaatttgttatatttaaacattgagagaagtctgaaaagatctacaaaaaatattaccgatactgtctgagtagcgagatttcaggtgcttttttccatttatttatttatttatttatttatttatttatttatttattcat

SEQ ID NO: 1402 - DNA, 360 bp, synthetic construct
  misc_feature 1..360: note = Description of artificial sequence: synthetic polynucleotide sequence
  source 1..360: mol_type = other DNA
cccgcctcagcctcccaaagtgctgggattacaggcgtgaaccaccacacctggaccccttatttttaattatttttattttttctataataaacatgtattatttgtgtgatgagaaaacattctttttattttttttatttattttaacaagctagaagaaaataaaatcacattttttgcccatctgtgtaaaggaaacaaactctgactaaagaaacggaaacatcttattagagacaagatgggggtctgttgagcatctttaaaaagttgtgaactcctagggccgggcgcagtggctcacatctataatccctgcattttgggaggctgaggcaggccgataacttaaggtca

SEQ ID NO: 1403 - DNA, 359 bp, synthetic construct
  misc_feature 1..359: note = Description of artificial sequence: synthetic polynucleotide sequence
  source 1..359: mol_type = other DNA
tgtgaactccttacagaatcataggcacaataaaacacaattagaacaacagcattggaaaatgtgtaataaatgtaagtaaaaaggtaactgtccagatatatgaagtattgctgtgaaatatgcaagctcaagatccagtttcaagttaatgagtgatcagagaagaaaaaaatgcaatttatacaccaggaaaaatttggacaacaaagcatcccatgaaaaaaatgcagagcgtcactagcaattcaagaaaatacaactcaaaacaatacgaaaatcgttagacacctgcgaaccagctgaaggaagcaaaacctgtgttgtgaggactaaagggaaacaggtttccacattgt

SEQ ID NO: 1404 - DNA, 360 bp, synthetic construct
  misc_feature 1..360: note = Description of artificial sequence: synthetic polynucleotide sequence
  source 1..360: mol_type = other DNA
ttgaggtgcctgctataatttggttttgtttctcgagaatattctgacagcccttcttggctcttgaggaaaaaaaaagacaaactatttatacctttttgtatcactttggaaaatatgttctgggcagcatcttccaagtaatatttctggaatacttccaaaggatgttgatagatattatatagaaagagtattgtgattgcaaacacagatatttctatatttcaggacttgtcagtgccttttacctgctaatgtgcattgtggatctccaaaactatgtaccatttactcaattaatttgaccccagaatctttgtcatggtaactttattaacagctcacagagcattaggc

SEQ ID NO: 1405 - DNA, 239 bp, synthetic construct
  misc_feature 1..239: note = Description of artificial sequence: synthetic polynucleotide sequence
  source 1..239: mol_type = other DNA
tttgtattaagatgttattggtataagtaaaatctctgaaacaacctggatttttgccagccgaggaaagtttatccaattcatctgcatttagtaacagtcctttgagtgtaagttctctcttgtttgacagttagataagcaggctttgtagacttcttacttaagtcactgagcagagagttgaacagtaacagagagccctgtggcttgtcactagagacccatttccttggcgg

SEQ ID NO: 1406 - DNA, 478 bp, synthetic construct
  misc_feature 1..478: note = Description of artificial sequence: synthetic polynucleotide sequence
  source 1..478: mol_type = other DNA
ccactgctcaatggtccctgtttaattgggaaaacccaccgaactccattatcatctagcccagagatgctatcaagaatcacatgcccgaagtcaaaccggaaagtatatttagtgctggatgtttgtgtatctttgctaacctttagaaagaggaagaagctggagcttggtttcccatcaatggtatcagctcagctaactgacccctgcttcgatcttaaagttaggacaaggaatttgcgctgtataaactccttcatgtcttattcattcttacattctgttggtttggttgccttcaatttcctaggacgcatttctgtttcaaagtttccagtctcctcccagccaaatggaggggcagcaggaattcagcccatattggtcacaacgggttgggaggagttgaaccaaagaaatatcgtataaaatcagagcctcaaagactccacggacaccaacgtgtagcatacgc

SEQ ID NO: 1407 - DNA, 478 bp, synthetic construct
  misc_feature 1..478: note = Description of artificial sequence: synthetic polynucleotide sequence
  source 1..478: mol_type = other DNA
tcgcaaagacactgtgctgaatgcgagcccaggtgtaccctgcaggagcagagagggggtaggaagcctcggctgtggatattatttatccctcccctaccccaccccactactccatccctccctccctcacgctatcctgcttccaccccacccctcctgattttccacatttctctctctctctctctcacacacacacacacgtgcacacacacagacacacacacacagagtttgtcttctcagtagccttctgatctcggtgatttaggaatccagaaaaatgcacaaaagcagtcattagccaaaaagaacccatgtgttcctggtaacattcaaatgaccctggtactcaggaaggtttcttggggccatcaccctacctggaatggccatcactcttcaagcccaaaacatgtttttaaacacttctgtccattcattccttcattccttggtccaacacatctgtgca

SEQ ID NO: 1408 - DNA, 360 bp, synthetic construct
  misc_feature 1..360: note = Description of artificial sequence: synthetic polynucleotide sequence
  source 1..360: mol_type = other DNA
aagctcctacagtggacagtaccccaggacacacgtggtttccctcctgcctcaaaacatttatagtctagggcaagcctgtccaacccacggcccacaggcctcatgcggcccaggatggctttgaatgtgacccaacacaaattcgtaaactttcttcaaacactatgagattttggggggatttttttagcttatcagctatgttaatgttagtgcattttatatgtgacccaagacaattcttcttccaaagaggcccagggaagccaaagaatgggacacccctggtctagggcatggataatatcaaacactgatatctagcaaatatgaaactcaatagcagggtgcatttag

SEQ ID NO: 1409 - DNA, 239 bp, synthetic construct
  misc_feature 1..239: note = Description of artificial sequence: synthetic polynucleotide sequence
  source 1..239: mol_type = other DNA
gagccaagatcacgccattgcactccagcctgggtgacaaagcaagactccatctcagaaaaaaaaaaaaagaactagatgataaacatgaccagtgacttttatctccaaactcccaacaccagccataaaagggctcttcccaactgccttccagagtgccaccttcctggcccttcccagcctcaggagtgtttgcagcatgtctttaatgatggctcgtggtggccaggcacttc

SEQ ID NO: 1410 - DNA, 478 bp, synthetic construct
  misc_feature 1..478: note = Description of artificial sequence: synthetic polynucleotide sequence
  source 1..478: mol_type = other DNA
ggtcacaagcagaggtttgcaaggttatcacattaactgtgcctgatcccttgcacccaagttacaggctgaagccacaaaattgtctcccaatcagaggcctcttgccgaacgcccccacaaacaccaaggccccttaatcagagttgagtggatgtgccggtgaactctgcaacagggagaatgctgatttttccaattgtgcaaagtacctcagcagtctccctctaattttccttttcatgttcttttgaggaggtttgtgtattgccagtcaaggttctatggcaaaacaaaaaacaaaacacaaaaaaaagcccacaacagcgaaaacaacgacgactaaatacagaaagcagcagagagctgcctgctgagcctccgcctgggctgaggctccctgggagtccggctccatccagccatggtgctcgagttgggcatcttagcatgagaagctggaagtacatgatctcgg

SEQ ID NO: 1411 - DNA, 478 bp, synthetic construct
  misc_feature 1..478: note = Description of artificial sequence: synthetic polynucleotide sequence
  source 1..478: mol_type = other DNA
tgttttcatgacttctcacgagctgcctttgcagacagaccccctacctcctggcactccacgcctgcttcaaatctcaagccagcccgccttctccaaagagaagccacgtgggatccctccctctcctgagctcctagagagcccaggatggcagtgggagggaatgggtggtcacagactctggaggaagtcactcttccgtagagcaacacgtatggtgcctgagacacgtcggcaggtgtgggtggcggctgtgcgcagctggttgcaatgtggcgaggtgggaccgcggtggggtcttgtgttgaaggtccaggtgccgtgcacttgggggcaggggcaccactacaagaacagctgagtcccatgggctggaaaagaggtgtggtaggcccccgggggtggggaaaagttgacttgggtgaagagggtcttggaacgccaggtagtgattttagaacaccttcaggattcc

SEQ ID NO: 1412 - DNA, 121 bp, synthetic construct
  misc_feature 1..121: note = Description of artificial sequence: synthetic polynucleotide sequence
  source 1..121: mol_type = other DNA
ccggggagccactgagggtgcctgagtgcagagtagcatcgtgagagaagtccttgagtgtagcctgccaggcgggtgggcaaagggaatggtgacatacagcaagcttcacaggcccgac

SEQ ID NO: 1413 - DNA, 359 bp, synthetic construct
  misc_feature 1..359: note = Description of artificial sequence: synthetic polynucleotide sequence
  source 1..359: mol_type = other DNA
gtcaagctgtgtgatgagcgtaacagcagctgacaccttcagcaccagctatgtgaaggccctaggtcagggcactttacaggaattgacttgttaagtcctcccattgttatcaccccattttacagggaagtaaaacaaggcacatggagaaagcaactcaattaagaccacacagccagcaagcagcagagctaagactggaagcccagggtctggccccagagccgcacatgtcatcaccgcacagccttgcttggctgggctgtaatccatcggcagacccgggaggcaaggaggaggacaggcctgtatgcttgcttagaaatgaaaggactgaatcaggagctggaaacatg

SEQ ID NO: 1414 - DNA, 478 bp, synthetic construct
  misc_feature 1..478: note = Description of artificial sequence: synthetic polynucleotide sequence
  source 1..478: mol_type = other DNA
cctctccttttgtattagttattcattgctgtgtaacaagctgccccaaaatgttgtttaaaacaatgcccatttgttatcacctaggtgatgtgggtcaggaatcggcgtggggcttagcttggtcccctggctcagggtctctcacaggctgcaataaagggctcttggggggctggagccatctcaagggtggacttacaggctcacacccgtggctgtcagcagcctgcaaggccttgctggctgtgggctggggactgcagttcctggccatgtggacaacccagaggacaactcacaacatagcagctggcttctccaagggcaagggctccaagaccgccagcaaggcagacagcacagccttttcagaacccggtcttggaagggatgtctcatcacatttccttggaagtcacaggcctcacccacactcaaggagcacgggattgcacaagggcacgagtgtcaggag

SEQ ID NO: 1415 - DNA, 479 bp, synthetic construct
  misc_feature 1..479: note = Description of artificial sequence: synthetic polynucleotide sequence
  source 1..479: mol_type = other DNA
acaggactactgggtgccattctagagaccgtctgccacaacttttaaaatcagagcttattttatagttcttttttgttattaaaaaaaaattcatgatcagcattgaaaaacacaaaaaattcatgatcagcactgaaaaatgcaaaaaagtgtaaaataaaaactctccagcttttctgtctcctctttcatcattagcccttgttggacctcctttgtcccttgctactgctgtggctcagcctgggtcccgcttcatccctcagaactgggacttttctccttgtctgggtactttgtcctcatacacgccccacactcccagaagcccccatcccagcatttatgaccactgactctcctgtctcttccatgaatgcagacaaaccattcatgttcccagccagagccagttctctgcctgtgcaccgggccccgccccacagcctcctgaagggctttgcaatgtttgcctc

SEQ ID NO: 1416 - DNA, 478 bp, synthetic construct
  misc_feature 1..478: note = Description of artificial sequence: synthetic polynucleotide sequence
  source 1..478: mol_type = other DNA
tcccctgcatcattttccctttctcctggaatgttcccattcaacaaacaagtctgctgctatttctcccgttgaaaagaaaataaccccccgcacccccccacccgtgacccattctcctctccaacttccttccctttccagcaaagctgatttctcccctggcagctctgctctcagacttcctgctcctccccgaaaatcctgaccccactaagggccactaccactttgccattgactgtgtctctgtggcatcactgttcttgcttcttaatcttcatggcagaggacaggcctcactgagggctaagagagctaagggaatcatagtgtggaagggaacaagttaagttccacaatttgagtcactgcccatcattcctgggaagcaccacaggaagttcagccctgcacagggccccctcatccctgtccctgtgccctaagacccagcgtgggcaattccaagtctctt

SEQ ID NO: 1417 - DNA, 478 bp, synthetic construct
  misc_feature 1..478: note = Description of artificial sequence: synthetic polynucleotide sequence
  source 1..478: mol_type = other DNA
cctctcatctagagcactgcccccttcaagcctcttgcccttccaatctctgcctgtcttcaaggaaaccactcccactgccaatatcatgaatacaaagtggctgaaataaggcataatgtattttttcctctcatgtacaaaacttggtatggtggcactactctataattgagtaaagggccctcatcaatgtgacattcctcatccacatcattcaagaaaagtcactgccatgtttgcgcctcatcaggaagaggaaaaggagaaggggatagcatgcccctgccttttaatgccccaacccaggagtttcaatcagcagttgctctcacagccaactggctaggacttagtcacatggccatcccctgctgcaagggatgctgggaaatgtagtctttagctgagtagtaggtgcccagttaaaaactctattgctatggaagaaggagagtattaaagatatcaaagggca

SEQ ID NO: 1418 - DNA, 479 bp, synthetic construct
  misc_feature 1..479: note = Description of artificial sequence: synthetic polynucleotide sequence
  source 1..479: mol_type = other DNA
ctgagcaatgcctgccacccagaaccctatcccgcagcactgccttttcccacctgtgaatacaatgctcctgggaggaattgagggagactctggaggtctagcagccttcaaagtgtcctgatttgccctagtagacagcaggctgctgctggatcagacacacacgtctcccaaggacctcatgaattcttagaggtagcgtggtcaaagttcatgctaaggaaaacacggctgccttactgcttcttactcagcagccaccccaccggccctgtgccgaaagcattgtatgttgatgctataactgtcatttctctttccatttcctcctgctttcggcccatgccctgcatcttaggaggcagaatccaggcctcctgtgctcctaagttgtcatcatccagtgacacgaaggcctgcctttgtatttacgtgcagcatctgccctgggaccagaccaattaaactctacctga

SEQ ID NO: 1419 - DNA, 360 bp, synthetic construct
  misc_feature 1..360: note = Description of artificial sequence: synthetic polynucleotide sequence
  source 1..360: mol_type = other DNA
aacaccagcctcccattccactgcctgctggaaaggaggtcatggggaatttaggatcctcctgagcctggtaactgggggctgggcaaggggctcctccctccatgacggagagaatctcatgtagctactgcccaataaaacacatgggatttggctcaggtgttccctgagccagggagcctgggacctggaaaatacctgggtgtcttttgaagttgtttctggttggattcttttctctactataaaggtagtatttgttcataatagaatacagtatgtgaaagtacataacagagtatagaaaaggaaaaaattggccaggtgtggtggttcatgcctgtaatcccagcactt

SEQ ID NO: 1420 - DNA, 479 bp, synthetic construct
  misc_feature 1..479: note = Description of artificial sequence: synthetic polynucleotide sequence
  source 1..479: mol_type = other DNA
tccagcctgggagacagagcaagcctctgtctcaacaaaaaaaaaaaaaaaaaaaaaaaaaaaaaagggaaaaatcactccaatcatcccaagtctcagctcctactcttttgctatatgtccttcaaaccagctatgtatttattttgctgaatttatgctggttttatcttttgtatcttgctttttttcatttaatgtttttccatccagtgaacacaccctaatttgccattcccctcttcttgaacatgagattgtctctagggtatctcttgcaaataggataattgtcaatgatgtaacgggtctctatgcaacttgcaaaagtgatcagtcttggtgtcctcctcatcctagtgtttggttccaagcaacagaaaccaatgctggcagatttcagcagaaaaggaaaatcagatgcagaagataggcaggaacaagggaggcaagacagcacgaatcacaatggaagcatg

SEQ ID NO: 1421 - DNA, 478 bp, synthetic construct
  misc_feature 1..478: note = Description of artificial sequence: synthetic polynucleotide sequence
  source 1..478: mol_type = other DNA
ctgcagatcttctctgatgagaagccagggctacccctacctatcccaacaccagaccctccagtaaaactgcagcggcccacaccaccttgtcaccagagcccacagctctatgatgggcagcacagatactgctgctcataaacttgaatgcctcacccagttctacactagaaaacatttcctaccttttctgattcttcccaccaccagctcccaattcaaaatcttgatccaaaaagatgaaatgtataaataatactatttataatgacatcaaaatatcaagtacttaagaagaaatctaataaaagatgcacaacacccaacacacacacacacactcacacacacacacctgcaattaaattaaggacaatctaaataaacagaggtctatatcatgcccatgaattgaatgactctgttagtaaaagtgtcaattccctcaaaattgatctatagatccaatacaatc

SEQ ID NO: 1422 - DNA, 479 bp, synthetic construct
  misc_feature 1..479: note = Description of artificial sequence: synthetic polynucleotide sequence
  source 1..479: mol_type = other DNA
ccaatcaaaattccagcattgtgtgtgtgcacatgtgtaagttgattctgaaatgtttatggagccccaagggccaggagtagccagggcaaccataaaagagaagtgggttggaggatttagcccgccagatatcaagaattcgtagcgtatagcttccatgatgcttctggggtaaggactgaaaaagagaccagtggaacgggatagaaagtccagaaacaagagatttgtgttaagtgagcagattttagctgctctgttcacaaaaaaaagtaactatgtgagatgacaggtatgttacactaattcactatggtaaccattttactatgtatatgtatcttataacatcatgctgtcaagtttatttcaaaaataaattttacataaaatcttagcagtgttattcataatagacaaaaagtgggaaaattctatttttttaaagtacagaaactttattcctcaaaggggaa

SEQ ID NO: 1423 - DNA, 239 bp, synthetic construct
  misc_feature 1..239: note = Description of artificial sequence: synthetic polynucleotide sequence
  source 1..239: mol_type = other DNA
ggaggtcaaggctacagtaaggtatgatcgtgccactgcactccagcatgggcaacagagcaagaccctgtatctagggggaaaaaaatgataagccttgtgaaagagaaatgaaaacagcatccacacataaacttgtacctctgtgttcatcggcagcattgtccacagtaaccaaaggtagaaaccatcctaaggcccattgactgatgaatggataagcaaaatgtggtctatca

SEQ ID NO: 1424 - DNA, 478 bp, synthetic construct
  misc_feature 1..478: note = Description of artificial sequence: synthetic polynucleotide sequence
  source 1..478: mol_type = other DNA
atacgattgatagtattcaaccataaagaggaatgaaccatggacacatgccacatgtgggccttgaaaacgtgatgctaagtggaaaaagccagatgcaagaggctgcatagcatatgattccatctgttggaaatgtccagaaaaggcagatccacagagaaagattagtggttgccaggggctggggaaaagggggaagaaaagggtgaataactacaaatgggtacagggtttctttggcggatgatgaaaatgttctcagatggtgatggtggctgtccaacataacaaaatccatcgaactatatactctaaacgagtgaactttacggtatgtaagttatttttcaataaagtggtttcaaaaaaataaaaaggtgaaccctaccatttctaggtgctttggagtttaccgtttttctccttgcattctggagtcagagtgagaaggcatctcagctctaccacagctgaa

SEQ ID NO: 1425 - DNA, 480 bp, synthetic construct
  misc_feature 1..480: note = Description of artificial sequence: synthetic polynucleotide sequence
  source 1..480: mol_type = other DNA
tgatgtgttgggcttcggtttcctcatctgtaaaatggggataaagggcctctccttggagctgccatgaagattgaattagatgccctctgtgaagatgcagggcaggtggagagcacagtaagcgtctcggggggccacgccatcaccgccagcagggctcaccagtatctttgcccagagaatagccggggtctagggagcagccagggtctagggagaagggctgcttccctgtggaggctcctaactttcccatctcctccctgtttctcccctgcccaccccttactcctggaagtgtgactcgctgcctcctcccgtgactcccctacattgcatctccccagttactgtcgttatctctcatctcttctttccaaacagcctctgtctagcaccttggagctcgcatgggaattcatgggtgggtggattccaagcttggcttcatcagatgacaactaaaaggcagaggcc

SEQ ID NO: 1426 - DNA, 478 bp, synthetic construct
  misc_feature 1..478: note = Description of artificial sequence: synthetic polynucleotide sequence
  source 1..478: mol_type = other DNA
tgggggggcaagggagctccaggatctgtctccctttggagaagcccaggttcaccttcccagcaagctgctccggccccacgcccctggccctcaataaccttcagtggctcccttcttgcagctataattcccctcttgggatgctacaaaagggattccagagatttttttttcaataactcaaaagggagggagtaaacgatatatgtgcccaggacaaggcagctaagggaaggcctcaggcttcctttgcctttgcctggaagtataccaacccgcagcccggagggccagcagagaaccaatgctcagagcctgggggcccaaggaatgctttccaggctggcggtcccaggagccccctctcccttccctatagcaagatactaagagcagaggctggcctggcaggccgtgtcgaggccctgagctcacatggccttggcagcttcttgacagtcgtgtctttttgttt

SEQ ID NO: 1427 - DNA, 478 bp, synthetic construct
  misc_feature 1..478: note = Description of artificial sequence: synthetic polynucleotide sequence
  source 1..478: mol_type = other DNA
ccagcagtgacactcactgacccacacctttggccagcgtcccttgtgactgccccctcccgcttgagcagaatggctcctattacacaatgggtgccaggaacctggccagtccatccagagacagggcagagccctgggctaccgaccctctggggccagcagaaaccctccctatggctctgcctctcatcctggcattgacacttgtgcccttaattaaagtgcttctttttaaaatcaacatttctactccttttgcagagtaagagaaagaagagttaggggagaagaaagaaggaaggattcatggggttattttttttttttcatgtaaaagtttgttccgtgatttaaatctcatgtccacaaacagctcaggagaagtcagcatagagaagcaagctgacagattataaagtcatttgtaaaatcctctttctgcatataaactgaaatgtgtaattaattccacata

SEQ ID NO: 1428 - DNA, 240 bp, synthetic construct
  misc_feature 1..240: note = Description of artificial sequence: synthetic polynucleotide sequence
  source 1..240: mol_type = other DNA
ctgcgtgtggcacatggccttcatcctgcataagaacaaatacatgaatgaataaatcgagcaggccttgacactcaccaggccctgtgctaaatgctttctacatattaccttaattactcctcaccgtggccttgcgaagaaaacgatcacagcccgttttacagatggggacagagatttgtccaaggccacacaactagtggcagatgtaggtctgtatgtgacattcttgttcag

SEQ ID NO: 1429 - DNA, 239 bp, synthetic construct
  misc_feature 1..239: note = Description of artificial sequence: synthetic polynucleotide sequence
  source 1..239: mol_type = other DNA
tttcataaatgtggctgccacctgcctgaaattttgagggaaaaaaaagtggtttggctttgcatgaattcttgaaaaagtagatttttatctttaccagcttctaagcaagctggatttattctgacagtgtccatgaaatggctacagaccatcaccgttgccaatgttgtgaacctgaacaaggcacctggtttctctgtgcctcggtttccttaccattaaacgcatttccctga

SEQ ID NO: 1430 - DNA, 478 bp, synthetic construct
  misc_feature 1..478: note = Description of artificial sequence: synthetic polynucleotide sequence
  source 1..478: mol_type = other DNA
gattaagtgtgtgaaactataagttggctggaggaaacacctcatagaagtgagaagatgaggatgggtggtgagtgaaggctttttctccaaaccctacaggagatggacctcaaagcaaatggccatgcttcccttagactgggtgaactggtgctgctcagggctagaagtgtgtctagaagcatggggaccaatgcagccccctccaccctagggcacataacctgtctctctcccataggatagcagagacagctctctaagtcaggattcagcgagatggtccaggaggggcctaaggattcctctgacttatccaagcctggggaggcaacacaacctagcctgtgtctcagggggccccaatcatgccctgaacctcatgagcccaggcaggcatcctgttggttaaggtcggcctcagggtccagggatgcactagattctttatcttaaagtgaccctcaagaaaaaa

SEQ ID NO: 1431 - DNA, 478 bp, synthetic construct
  misc_feature 1..478: note = Description of artificial sequence: synthetic polynucleotide sequence
  source 1..478: mol_type = other DNA
aaaataaaatgtagctataggcagtttctggacgttttcctatttgttaagcaccttcttgctccgagctttccagccacagtgcactggacgccatcggaaggctgcagctgctatttggtgctttaccaccgctgagaaggtggaatggtcacggcccggttctgtcactttcttcagccggacagtcgccttattacggattccagtagggccgagcacactccttcctgcccgtctttacagatgaacatgctatcgctccagcagtacaacccgccttattacgtaaaaaagcagcccctatctacccgcagggaaggagtatgttcggcaccacagctggactggtgctcgagttaagcgtcctgggaggtccgcatgcgctccggaaccgtaatgcgcgctttttctaagccttacggtaaacgcggacgcagggcaaccacgtggcggtggaaccgaggcccggcgggaa

SEQ ID NO: 1432 - DNA, 479 bp, synthetic construct
  misc_feature 1..479: note = Description of artificial sequence: synthetic polynucleotide sequence
  source 1..479: mol_type = other DNA
tgcgcggaatgcgcggcgcggcctcgcgcggttcccgagccacggcccagggtccggcggcgcgcgctctcgcctcctcccctcacctctcccagccgcaccccggccctggccctgccgcccagaactcgctgggcaagtcgtgccccgcgtgaacacacagaaggggcttggggaccgagcgcggcccatcagtccctcagaccctgaggacccagaattccctaaggggtccgaatccgagtcctgcccccagcccttaaggcacgggctccagggaccccaggggaagggcgcggggcattaggtacgcaacccgtttccccgcacctggaaaaaaactccctttccctcccctcccctgcttgttgagtgtccggataaccagaactctaaggcgccccgtaataacgaccccgctgtccctccacccacccccaagtgccaaagcgagggatggaagcgctttcaagcgttcc

SEQ ID NO: 1433 - DNA, 478 bp, synthetic construct
  misc_feature 1..478: note = Description of artificial sequence: synthetic polynucleotide sequence
  source 1..478: mol_type = other DNA
aagggcattgaggagcgagctggagaggcgcggggatgcggggtcctccccgcagtcttccggaaagggcgggggagggcgcggcaagttccggagtggggcatgccgtgggagcccacgagggcctcagcgcggatcctccgccggaaaaccggctcccgcgagccgccgccgcaggtttcctaggccccgcgagtcccgcagcgaagccctgcgtctccgtccgacgcgggggtctgctcagcctcgggtgggccgcggccaggcctgactgcgggggagagggccgaacgtgacctccgaggtcacccccagccagctttctctcctgtggtcggaagtggttttcttctcgatctgggcgcctactccccaccacttggtctgagaggggctggggccggaaggccagggaatctctggtggatttgggggttcatattgctcagggtaccagccgatgcgttttgaggggcgg

SEQ ID NO: 1434 - DNA, 240 bp, synthetic construct
  misc_feature 1..240: note = Description of artificial sequence: synthetic polynucleotide sequence
  source 1..240: mol_type = other DNA
gagtcgaggaattagaatcgcctttaaccctcaagagttgcgccttcagcctcgggatcccagatgcgtcgttggagccagggccgcccccctacctgttgggtttgcgttttaactccagcgcacaccttgccggcagccctcggagctaggggaggggtctcgtttccccgcagcccgccggacagacgactggggcacgggaggggcggtggcagggtggtctgtgtgtggctgaaa

SEQ ID NO: 1435 - DNA, 239 bp, synthetic construct
  misc_feature 1..239: note = Description of artificial sequence: synthetic polynucleotide sequence
  source 1..239: mol_type = other DNA
ctaattgatctggagcggaaacgcacgtctgcggttggggcgatggggggggcggtgcggctgtccatgtgccgagcgtgtggctgtctcgggtgggcactggggccggagttcgccccggcccacctcgcagttttggggcgcctgggatcggcgctacgtaagcgaagcagagctgccatagcacgtgggccgccacgcgcaccccaaaagcaagcagtgtggggggaaggggagct

SEQ ID NO: 1436 - DNA, 479 bp, synthetic construct
  misc_feature 1..479: note = Description of artificial sequence: synthetic polynucleotide sequence
  source 1..479: mol_type = other DNA
cgagcgccttcggagcccaggggccggctttcggaagcgttttcccgggcgacttaagggcttaacaatggaaaactcgcggagcctgagccaagtcctttcaagtcgccgccaggtatgcggctgcaggtgaccccacctgggtgcgcccgcccgccagccgccctggtggaaaagcgggtgcgggaggtcgctggcgaaaggtcgggactggtccctgcaccacccgcccccaacccaagccccgagccccgcggcgcgcagccgcgctgagtcccggggtctgcgtcgcggcgcgccggttcctgaatgaacgcgctcccttcccccgcctgaatgaaggttcccacagccagggacggtggcgaacacgcgcctgcagcggaattcgctttctcctgaccgaccatccgcccaggccgcggtcaccggggcgggggccagggggcgaggaaagcgtgaaggtgatttcagttaat

SEQ ID NO: 1437 - DNA, 479 bp, synthetic construct
  misc_feature 1..479: note = Description of artificial sequence: synthetic polynucleotide sequence
  source 1..479: mol_type = other DNA
tttggattttctttcaaacaacgtggttaccctcccgactgggccacttgccctttgtctccaaatggtcaccaagaaataagaacagagcactttaaatgagcccagaatccgcagttcctgcttcgtggtgggttttaagaagacagtgtaaagtaaaactgcaaccgaaaagttttttaaagttgcttttctctttggaaaaaataaaatcaaaatgctttctctgcgcttcttgaagcaatgaccctcaaaagcccagaggtattggccccctcgggggacccgggggccgccaagcagggttcccccaggtgggggctgggcagctggcgctccccgccgggccccaaattccagcgccgggccccaaattccagcgcctcccccgcgggttcctggacggctctttacgctcgctaaccgggcttgcaattttgcgctcgtccctgagccgggaaatcaacgaagttcctagt

SEQ ID NO: 1438 - DNA, 479 bp, synthetic construct
  misc_feature 1..479: note = Description of artificial sequence: synthetic polynucleotide sequence
  source 1..479: mol_type = other DNA
cgagatctgcccggtccgcctagtaacagcgccgcgcccccattggctcatgctaattccagtttcctctgtcttgcgcccgggatgggggggtgaagctccctcctggacccagagccggttgtgccggagtgggcgagcctctttatgccctgctgcccctagccgacttcggcccgcttcgcgcctcgggctgggccagggcgcacgcggggctcggggcccctcgccccacgggatgggagaggccgggtgatagctccgggccccataaatcatccaggcggccgccgggtcgggattttatgaatgaaaaagcagctgggccgcccttgtgcgcgggctgatgctctgaggcttggctatgcgggggccaacgcgattgtgggtgctcggggagtgggggggggcacgaccgtaggtgctccctgctggggcaacccatcgctccccatgcggaatccgggggtaattacccc

SEQ ID NO: 1439 - DNA, 241 bp, synthetic construct
  misc_feature 1..241: note = Description of artificial sequence: synthetic polynucleotide sequence
  source 1..241: mol_type = other DNA
cccaggacccggaatattagtaatcctaattcccggcgggggagggggcgcgggaggaattcaccctgaaaggtgggggtggggggggtcgcatcttgctgtgagcaccctggcgaaggggagagggctttttctatcagttttctttgagcttttactgttaagagggtacggtggtttgatgacactgaactatattcaaaaggaagtaaatgaacagttttcttaatttggggcaggt

SEQ ID NO: 1440 - DNA, 239 bp, synthetic construct
  misc_feature 1..239: note = Description of artificial sequence: synthetic polynucleotide sequence
  source 1..239: mol_type = other DNA
actgtaaaaataaaaacaaaagttaagacagtaaaatgtccttttattttttaatgcaccaaagagacagaacctgtaattttaaaaactgtgtattttaatttacatctgcttaagtttgcgataatattggggaccctctcatgtaaccacgaacacctatcgattttgctaaaaatcagatcagtacactcgtttgtttaattgataattgttctgaattatgccggctcctgcca

SEQ ID NO: 1441 - DNA, 478 bp, synthetic construct
  misc_feature 1..478: note = Description of artificial sequence: synthetic polynucleotide sequence
  source 1..478: mol_type = other DNA
gccccctcacgctcacgaattcagtcccagggcaaattctaaaggtgaagggacgtctacacccccaacaaaaccaattaggaaccttcggtggtcttgtcccaggcagaggggactaatatttccagcaatttaatttcttttttaattaaaaaaaatgagtcagaatggagatcactgtttctcagctttccattcagaggtgtgtttctcccggttaaattgccggcacgggaagggagggggtgcagttggggacccccgcaaggaccgactggtcaaggtaggaaggcagcccgaagagtctccaggctagaaggacaagatgaaggaaatgctggccaccatcttgggctgctgctggaattttcgggcatttattttattttattttttgagcgagcgcatgctaagctgaaatccctttaacttttagggttacccccttgggcatttgcaacgacgcccctgtgcgccg

SEQ ID NO: 1442 - DNA, 479 bp, synthetic construct
  misc_feature 1..479: note = Description of artificial sequence: synthetic polynucleotide sequence
  source 1..479: mol_type = other DNA
gaatgaaacttgcacaggggttgtgtgcccggtcctccccgtccttgcatgctaaattagttcttgcaatttacacgtgttaatgaaaatgaaagaagatgcagtcgctgagattctttggccgtctgtccgcccgtgggtgccctcgtggcgttcttggaaatgcgcccattctgccggcttggatatggggtgtcgccgcgccccagtcaccccttctcgtggtctccccaggctgcgtgtggcctgccggccttcctagttgtcccctactgcagagccacctccacctcaccccctaaatcccgggggacccactcgaggcggacggggccccctgcacccctcttccctggcggggagaaaggctgcagcggggcgatttgcatttctatgaaaaccggactacaggggcaactccgccgcagggcaggcgcggcgcctcagggatggcttttgggctctgcccctcgctgctc

SEQ ID NO: 1443 - DNA, 478 bp, synthetic construct
  misc_feature 1..478: note = Description of artificial sequence: synthetic polynucleotide sequence
  source 1..478: mol_type = other DNA
ccggcgtttggcgcccgcgccccctccccctgcgcccgcccccgcccccctcccgctcccattctctgccgggctttgatctttgcttaacaacagtaacgtcacacggactacaggggagttttgttgaagttgcaaagtcctggagcctccagagggctgtcggcgcagtagcagcgagcagcagagtccgcacgctccggcgaggggcagaagagcgcgagggagcgcggggcagcagaagcgagagccgagcgcggacccagccaggacccacagccctccccagctgcccaggaagagccccagccatggaacaccagctcctgtgctgcgaagtggaaaccatccgccgcgcgtaccccgatgccaacctcctcaacgaccgggtgctgcgggccatgctgaaggcggaggagacctgcgcgccctcggtgtcctacttcaaatgtgtgcagaaggaggtcctgccgtccat

SEQ ID NO: 1444 - DNA, 478 bp, synthetic construct
  misc_feature 1..478: note = Description of artificial sequence: synthetic polynucleotide sequence
  source 1..478: mol_type = other DNA
gcggaagatcgtcgccacctggatgctggaggtgcggggcttcgggcggctctcttaagacttccctgcaacttgttgcccagacccacgtttctttgctactcacccccctcccttctctcccgctagaactttgaagtttgccgtggtgtttctagggatccgtattttcaaaataaaaattgcgggtattttctgaaggaggaaggggtgggggtgggggtgctagaagtagcgtttcgtgggaggggagaagggggtccgggaggggtgccttcgggagaagccagtgccaggggcaccccaatgggcccgagggtgcgggctggcaggctgggtgcgctttgtgtcccccgcctgcgccccagcccggctgcgcctcagcggccgggagccgccaactccggggggagggggcatagatttgatttttaaattaatatccatggacacgtatgcaagggccgctcgtgccagt

SEQ ID NO: 1445 - DNA, 479 bp, synthetic construct
  misc_feature 1..479: note = Description of artificial sequence: synthetic polynucleotide sequence
  source 1..479: mol_type = other DNA
attatgcgccatctttgctcttttattgcaaagcaaaagtgtttattaataattgggggcagggtgggggcggggagcggccgccgggcgctggggccgcagctaagggccgcgcggctgccgggagcccgcgggaggggcgcagggacgcggcatgggtagttttggggggacgccgctagggaagggggggcctttgttcaagcagcgagtcccggggcgccccgaacgggcagcctgggccggagagcacggcgagctgcaaggtcgcgtggcccccaagacgccagggcttgatccccgtctgcagggatatcggcttggaggaccttctccgagcgagccgggggcctgggagcacattttcagaccttcggtgggcgcctgaggggcccgcaagtattttaaaataatttttgaaagtgcggcgtggtgcccttgcgagagggaaacgccgcccgcgcccagggggaaggggg

SEQ ID NO: 1446 - DNA, 479 bp, synthetic construct
  misc_feature 1..479: note = Description of artificial sequence: synthetic polynucleotide sequence
  source 1..479: mol_type = other DNA
ggccccggagtttgaattcctggggctccccccggagcctgtaacgaactcccaacccccggcctgggtaaagggtcgcccgagggtcattttcagggtttttttatgcacttagttatttttttaatatttttaaatattttttgaaaagatgacgtctggggaaatgcggcgcggcggcctgggacgccacctttgtgtctcgcaggcgcggcgcccaaccccgcggcccgttccgcggccccgcaccccagttggtgtcgacccccagtcagagggaccacggagctccagggcgggccagggtcccgggggccggcagcccgcgccgccgcgcacgccgcccagctgtgcccgctcccgcccccaccgtgccagcctcgcggggactttccctttcagtttcggggagggtgggtactggggacgcgcgggggagggggcgcatcacgggaagctcctgccgcccccagccccga

SEQ ID NO: 1447 - DNA, 478 bp, synthetic construct
  misc_feature 1..478: note = Description of artificial sequence: synthetic polynucleotide sequence
  source 1..478: mol_type = other DNA
cggggagcgggcgggatcctagccgccctcgtcccgccgccctgtgtgcgcttgcctgcgactcccaccgcgttcgcgccccgcggtgtggccgaaaagtgggcggcgcgcgccctccagcggctgcacgaggagcgccgcgctcggcgctgagcctccagttccaggtggtgggaggtctttttgtttccacttgcagagtcttttcacgcggcgggcgccttttctgttttgatctgggattgcgtgttgccccagctcccttgagtccccagcattcgccagccctcccctccaacatccaggaccgcacgagacgcaggggccagtgctctgagccggaggtgcggcgtggcccggcccccgtgctgccggcttccccgcgcccccgggctggcccgcacctcccctgatggccgctcaccctgtgttcgcagcaaatggagctgctcctggtgaacaagctcaagtggaacct

SEQ ID NO: 1448 - DNA, 360 bp, synthetic construct
  misc_feature 1..360: note = Description of artificial sequence: synthetic polynucleotide sequence
  source 1..360: mol_type = other DNA
ggccgcaatgaccccgcacgatttcattgaacacttcctctccaaaatgccagaggcggaggagaacaaacagatcatccgcaaacacgcgcagaccttcgttgccctctgtgccacaggtagggcaggcccggcagcccccggcctccccttgagagccggctccttaggtgaccctggccggcttcttgctctccacctgggtgctgtctgggaagatgtccccagaccccctcctgcgctggagagcgctcttccagctctggtgagcagaggccctggattgtttgtcgcgctggatggagggagatttgctccctcacggccaccatgcagtaccttgggcattggtgtggacgg

SEQ ID NO: 1449 - DNA, 478 bp, synthetic construct
  misc_feature 1..478: note = Description of artificial sequence: synthetic polynucleotide sequence
  source 1..478: mol_type = other DNA
cccctcggcgccctccagacctggcggccctgccaagcgcgatggggggtgcgggggcgtgcgggggggcggcgcgacctggcggcggcggtcacgggccccgtgcctccgtaggtctgcgaggaacagaagtgcgaggaggaggtcttcccgctggccatgaactacctggaccgcttcctgtcgctggagcccgtgaaaaagagccgcctgcagctgctgggggccacttgcatgttcgtggcctctaagatgaaggagaccatccccctgacggccgagaagctgtgcatctacaccgacaactccatccggcccgaggagctgctggtaaccactggaccccgccgccccccgccccccgcgagccgcacgcaggaccacggggccggggaaggtgcaggcggtggcggccggcccgcctctgacatatctgctcctccgagggagggcggccccgccgccgggcgtccctgtc

SEQ ID NO: 1450 - DNA, 150 bp, synthetic construct
  misc_feature 1..150: note = Description of artificial sequence: synthetic polynucleotide sequence
  source 1..150: mol_type = other DNA
gatgtgaagttcatttccaatccgccctccatggtggcagcggggagcgtggtggccgcagtgcaaggcctgaacctgaggagccccaacaacttcctgtcctactaccgcctcacacgcttcctctccagagtgatcaagtgtgacccg

SEQ ID NO: 1451 - DNA, 166 bp, synthetic construct
  misc_feature 1..166: note = Description of artificial sequence: synthetic polynucleotide sequence
  source 1..166: mol_type = other DNA
ggactgcctccgggcctgccaggagcagatcgaagccctgctggagtcaagcctgcgccaggcccagcagaacatggaccccaaggccgccgaggaggaggaagaggaggaggaggaggtggacctggcttgcacacccaccgacgtgcgggacgtggacatctga

SEQ ID NO: 1452 - DNA, 121 bp, synthetic construct
  misc_feature 1..121: note = Description of artificial sequence: synthetic polynucleotide sequence
  source 1..121: mol_type = other DNA
aaacccctgtcacaagggcttcatagggttgaagaggacacagctttgtcttcaacttgggagtttcattcagcgaacaaacgttggttgagcacctaggatgtgccccacacgcccctgg

SEQ ID NO: 1453 - DNA, 121 bp, synthetic construct
  misc_feature 1..121: note = Description of artificial sequence: synthetic polynucleotide sequence
  source 1..121: mol_type = other DNA
tcacctagagaacttctgacagtctggtctgaagctgttctggttgcccaagaggaagatgacaggaaaggtggggtggtgatgaaggctgagggaacaacacaggcttgcgggggtctag

SEQ ID NO: 1454 - DNA, 121 bp, synthetic construct
  misc_feature 1..121: note = Description of artificial sequence: synthetic polynucleotide sequence
  source 1..121: mol_type = other DNA
ttattcccgggacagaacattttatggatttcttggtgcagagtcctcatcaccatggataatattggatggacactgatagtgtgtgtctttgtgactcttaaatacttttaatacattg

SEQ ID NO: 1455 - DNA, 121 bp, synthetic construct
  misc_feature 1..121: note = Description of artificial sequence: synthetic polynucleotide sequence
  source 1..121: mol_type = other DNA
gggaaaagctcataatcaaacttctttgtccatggcaatattatgggtaatatctgtgatgaattatgagttgctgagagcacaaaagagtgatctacatttattatgaacccattaacta

SEQ ID NO: 1456 - DNA, 121 bp, synthetic construct
  misc_feature 1..121: note = Description of artificial sequence: synthetic polynucleotide sequence
  source 1..121: mol_type = other DNA
ctagaatacaccaacctagaaacaggcttcaagatgacccctcaggccatagtcttctgtttctgggcaatatggagcaatagtgactggatttttctcatgtgcctgaaacagccataac

SEQ ID NO: 1457 - DNA, 121 bp, synthetic construct
  misc_feature 1..121: note = Description of artificial sequence: synthetic polynucleotide sequence
  source 1..121: mol_type = other DNA
gtccctggggttttggggagttgaagggaagacccaggagtcaccaggagccaccaaaaaatcaactcagctgatgagaggagggctaggacttttctgagaacagtctctgcataggaca

SEQ ID NO: 1458 - DNA, 121 bp, synthetic construct
  misc_feature 1..121: note = Description of artificial sequence: synthetic polynucleotide sequence
  source 1..121: mol_type = other DNA
caaggatagatgagtttggtgagggtaagacttatccaaaatcccacagctcataactaatacagcccgcatctaaacccaggctgggctgactccaaagcctttgtcctttcctcggacc

SEQ ID NO: 1459 - DNA, 121 bp, synthetic construct
  misc_feature 1..121: note = Description of artificial sequence: synthetic polynucleotide sequence
  source 1..121: mol_type = other DNA
aatgaacgaatgactcaaaaggagagaaataaaatgaatgaatgaatgactcactctattcttcatgtgcattaggatggcttatcaaaaaaacagaaaataacaagcattggcaaaaatg

SEQ ID NO: 1460 - DNA, 121 bp, synthetic construct
  misc_feature 1..121: note = Description of artificial sequence: synthetic polynucleotide sequence
  source 1..121: mol_type = other DNA
atggcttctaccctcagtaagctcaccctggagcaacagaagtacttttagaaggaaaatgatgtaagtgggcatattctttagactaaatgtgttctttagtctgctgggggaggggggt

SEQ ID NO: 1461 - DNA, 121 bp, synthetic construct
  misc_feature 1..121: note = Description of artificial sequence: synthetic polynucleotide sequence
  source 1..121: mol_type = other DNA
tagtaatatggacagtgaagtctaggctgttgatgtttcagaaggaaatgaggaacttattaagaactgaagcaaagatcacgcacgctatgccttagcaaagaacttggttgctttctgt

SEQ ID NO: 1462 - DNA, 121 bp, synthetic construct
  misc_feature 1..121: note = Description of artificial sequence: synthetic polynucleotide sequence
  source 1..121: mol_type = other DNA
caaagcgttaccataatgcttgccttcccattggcctcatacaagaaaggccatttgttattgggtgtaacaatgtctcacatttactggaacacatttgtgctcttggtactatactaac

SEQ ID NO: 1463 - DNA, 121 bp, synthetic construct
  misc_feature 1..121: note = Description of artificial sequence: synthetic polynucleotide sequence
  source 1..121: mol_type = other DNA
aagagaggaagggattgggtctggaacgtggtaggaagaaggccccttgagagtgatatcctaagacccctgtctcacaaatagggaaactgagattcagagtccctaagtggtgtctcta

SEQ ID NO: 1464 - DNA, 121 bp, synthetic construct
  misc_feature 1..121: note = Description of artificial sequence: synthetic polynucleotide sequence
  source 1..121: mol_type = other DNA
aaataagcatgagtttgctcacacctaggaaagaggagcttgtggccaaagtcctgaagcttacagggtctatccccatccttcctcaggtcataacactccccatacagagctcacactc

SEQ ID NO: 1465 - DNA, 121 bp, synthetic construct
  misc_feature 1..121: note = Description of artificial sequence: synthetic polynucleotide sequence
  source 1..121: mol_type = other DNA
aggctagaataactttatgcaagaagagaaaaaaggcactttatgcagataggaacaatactaaatcaataataagggctaaaatctcatctataatgttcacatgaaaatgaatacagtc

SEQ ID NO: 1466 - DNA, 121 bp, synthetic construct
  misc_feature 1..121: note = Description of artificial sequence: synthetic polynucleotide sequence
  source 1..121: mol_type = other DNA
ttcttttgtttactttttttttttaaccatccatcataataacaataatgcatttctccatagtaaagaccaggcaggattactgttcctaataaaagattcaagttccctacacttgggg

SEQ ID NO: 1467 - DNA, 121 bp, synthetic construct
  misc_feature 1..121: note = Description of artificial sequence: synthetic polynucleotide sequence
  source 1..121: mol_type = other DNA
ctggacagtgaatgtagaggtcccatgggtgctactctggaaaccttgccctcaaggtcttagctatgtcttgaagatctctgaaatgcctttgtggtcattatcccattgtcttggtgaa

SEQ ID NO: 1468 - DNA, 121 bp, synthetic construct
  misc_feature 1..121: note = Description of artificial sequence: synthetic polynucleotide sequence
  source 1..121: mol_type = other DNA
tgcatttgcgtatacatgtttacgtatttgcttcaaatctcttactgctttgtattcctttgactccagatctttgctctagctgtttcaaccttctgcgtgttcttttttttcttgcaga

SEQ ID NO: 1469 - DNA, 121 bp, synthetic construct
  misc_feature 1..121: note = Description of artificial sequence: synthetic polynucleotide sequence
  source 1..121: mol_type = other DNA
gtgactgatgagagaaggaaagtctgggaggttaacttgcttccccaatttggcaagtaatggaatctgtatttgaactcaaaatgcacatacatgccttggaagtcggtaagtaaggctg

SEQ ID NO: 1470 - DNA, 121 bp, synthetic construct
  misc_feature 1..121: note = Description of artificial sequence: synthetic polynucleotide sequence
  source 1..121: mol_type = other DNA
atttttaccagcaattactataaagctcaattataatttagtaaatagagaacaaagccagacatagctgttttgtgtctagaagctgctgcagtcaggaagactttgtggaggaattcag

SEQ ID NO: 1471 - DNA, 121 bp, synthetic construct
  misc_feature 1..121: note = Description of artificial sequence: synthetic polynucleotide sequence
  source 1..121: mol_type = other DNA
agttaaaatgaatccataaatatgccttatagagtaattctgtcagaaatgtacgtggctattagttaaccttacaagcactctttcatggcccagctaaaaaaaaatcaattatatttgt

SEQ ID NO: 1472 - DNA, 121 bp, synthetic construct
  misc_feature 1..121: note = Description of artificial sequence: synthetic polynucleotide sequence
  source 1..121: mol_type = other DNA
gtcaatcttaaaagtgagatttgattgataaaagaggtaatgtggatttacattcttagctgtgactatgttgactatcattagctataagaggataggtatgcagaaatgctatcactgg

SEQ ID NO: 1473 - DNA, 121 bp, synthetic construct
  misc_feature 1..121: note = Description of artificial sequence: synthetic polynucleotide sequence
  source 1..121: mol_type = other DNA
ggactgtctgtggcggcttcacccctgtggcaggtttttccacgggcctgcaagctgtttgatacatcttttgaaatctaaatgaaagttgccatgaccccaaagcccacgcactctctat

SEQ ID NO: 1474 - DNA, 121 bp, synthetic construct
  misc_feature 1..121: note = Description of artificial sequence: synthetic polynucleotide sequence
  source 1..121: mol_type = other DNA
cctaaaaggatgacgggtaacttcccagcccagcaaaccagttataggaggggcgagtcgtttccaacttgaaacttgtcaatccccatccctcccactctcattcctgctggataagtaa

SEQ ID NO: 1475 - DNA, 121 bp, synthetic construct
  misc_feature 1..121: note = Description of artificial sequence: synthetic polynucleotide sequence
  source 1..121: mol_type = other DNA
aggaccagttactgaccaacacatcagagctcagatcttcagacttctagcccattgctcttctagtcaaggaaggggaaatctggaaacagtataggtagccaaaccttaagttacctgg

SEQ ID NO: 1476 - DNA, 121 bp, synthetic construct
  misc_feature 1..121: note = Description of artificial sequence: synthetic polynucleotide sequence
  source 1..121: mol_type = other DNA
gcatgcgcttacacgtcaggagaaactgcacatgggaacaaatgtgggaaagtgcacaatgagcaacaaacgtgggcacctttggaaaacagtgcagtaaagtcatcactgatgcagtaca

SEQ ID NO: 1477 - DNA, 121 bp, synthetic construct
  misc_feature 1..121: note = Description of artificial sequence: synthetic polynucleotide sequence
  source 1..121: mol_type = other DNA
gaagtcagtttttttttttcctttcccataatgtaatgaaaacgtgagtggtagtttgagctgctgtaagattcagggagtgtatgagagagtgaaattgtgtgtgggaggggactgacaa

SEQ ID NO: 1478 - DNA, 121 bp, synthetic construct
  misc_feature 1..121: note = Description of artificial sequence: synthetic polynucleotide sequence
  source 1..121: mol_type = other DNA
aaattgaactaaattgtagcatacccatttggagtataggaagtcaaataactggttgaggtgtggaacaaacaacaacaaaacacaaatttggtatcataactgttgagagtagaattaa

SEQ ID NO: 1479 - DNA, 121 bp, synthetic construct
  misc_feature 1..121: note = Description of artificial sequence: synthetic polynucleotide sequence
  source 1..121: mol_type = other DNA
caaggtgaggatgattttgaatgactccaaaggcccaggattacacagacagaaatctaagggttgtgtcttactagggagtcctctactcttgaaatccttttctttctttacttgtacc

SEQ ID NO: 1480 - DNA, 121 bp, synthetic construct
  misc_feature 1..121: note = Description of artificial sequence: synthetic polynucleotide sequence
  source 1..121: mol_type = other DNA
ttcacgggtggagaaatggcaagccaccccatcttaggaagtagaaatgtgtagtgaaccggaaattcctacatcattatctggaatctggcctatgaaagagatgtcggctaatggggat

SEQ ID NO: 1481 - DNA, 121 bp, synthetic construct
  misc_feature 1..121: note = Description of artificial sequence: synthetic polynucleotide sequence
  source 1..121: mol_type = other DNA
atcagttagcgtagagatatctggctaggcttttcagattctttttggtcaggcttttccaattctctttcatcaggttaaactacaacagatagacctaaagaattcttatttagccagg

SEQ ID NO: 1482 - DNA, 121 bp, synthetic construct
  misc_feature 1..121: note = Description of artificial sequence: synthetic polynucleotide sequence
  source 1..121: mol_type = other DNA
tcactaacatgcctggcttcaaataccaccattttgccaaaggctcctgtcttaggtcaagttccaagaaacagcctgagatgaggatccttgttaaaattgtttattgacagaatgctct

SEQ ID NO: 1483 - DNA, 420 bp, synthetic construct
  misc_feature 1..420: note = Description of artificial sequence: synthetic polynucleotide sequence
  source 1..420: mol_type = other DNA
tatgaacatagtagaaaacagcatattcttatcaaatttgatgaaaagcgccaacacgtttgaactgaaatacgacttgtcatgtgaactgtaccgaatgtctacgtattccacttttcctgctggggttcctgtctcagaaaggagtcttgctcgtgctggtttctattacactggtgtgaatgacaaggtcaaatgcttctgttgtggcctgatgctggataactggaaaagaggagacagtcctactgaaaagcataaaaagttgtatcctagctgcagattcgttcagagtctaaattccgttaacaacttggaagctacctctcagcctacttttccttcttcagtaacaaattccacacactcattacttccgggtacagaaaacagtggatatttccgtggctcttattcaaa

SEQ ID NO: 1484 - DNA, 434 bp, synthetic construct
  misc_feature 1..434: note = Description of artificial sequence: synthetic polynucleotide sequence
  source 1..434: mol_type = other DNA
ctctccatcaaatcctgtaaactccagagcaaatcaagatttttctgccttgatgagaagttcctaccactgtgcaatgaataacgaaaatgccagattacttacttttcagacatggccattgacttttctgtcgccaacagatctggcaaaagcaggcttttactacataggacctggagacagagtggcttgctttgcctgtggtggaaaattgagcaattgggaaccgaaggataatgctatgtcagaacacctgagacattttcccaaatgcccatttatagaaaatcagcttcaagacacttcaagatacacagtttctaatctgagcatgcagacacatgcagcccgctttaaaacattctttaactggccctctagtgttctagttaatcctgagcagcttgcaagtgcgggtttttattatgtgg

SEQ ID NO: 1485 - DNA, 121 bp, synthetic construct
  misc_feature 1..121: note = Description of artificial sequence: synthetic polynucleotide sequence
  source 1..121: mol_type = other DNA
attaattttaggtaacagtgatgatgtcaaatgcttttgctgtgatggtggactcaggtgttgggaatctggagatgatccatgggttcaacatgccaagtggtttccaaggtaattgttt

SEQ ID NO: 1486 - DNA, 121 bp, synthetic construct
  misc_feature 1..121: note = Description of artificial sequence: synthetic polynucleotide sequence
  source 1..121: mol_type = other DNA
tttattttctttacattttaggtgtgagtacttgataagaattaaaggacaggagttcatccgtcaagttcaagccagttaccctcatctacttgaacaggtagggcaagttcttttttta

SEQ ID NO: 1487 - DNA, 121 bp, synthetic construct
  misc_feature 1..121: note = Description of artificial sequence: synthetic polynucleotide sequence
  source 1..121: mol_type = other DNA
tatatatatatatatatatattttttttttctgcagctgctatccacatcagacagcccaggagatgaaaatgcagagtcatcaagtaagtacaatggataataatgaatgcatttaaata

SEQ ID NO: 1488 - DNA, 121 bp, synthetic construct
  misc_feature 1..121: note = Description of artificial sequence: synthetic polynucleotide sequence
  source 1..121: mol_type = other DNA
gttatccattttgaacctggagaagaccattcagaagatgcaatcatgatgaatactcctgtgattaatgctgccgtggaaatgggctttagtagaagcctggtaaaacagacagttcaga

SEQ ID NO: 1489 - DNA, 121 bp, synthetic construct
  misc_feature 1..121: note = Description of artificial sequence: synthetic polynucleotide sequence
  source 1..121: mol_type = other DNA
aaaatcctagcaactggagagaattatagactagtcaatgatcttgtgttagacttactcaatgcagaagatgaaataagggaagaggagagagaaagagcaactgaggaaaaagaatcaa

SEQ ID NO: 1490 - DNA, 256 bp, synthetic construct
  misc_feature 1..256: note = Description of artificial sequence: synthetic polynucleotide sequence
  source 1..256: mol_type = other DNA
gatgatttattattaatccggaagaatagaatggcactttttcaacatttgacttgtgtaattccaatcctggatagtctactaactgccggaattattaatgaacaagaacatgatgttattaaacagaagacacagacgtctttacaagcaagagaactgattgatacgattttagtaaaaggaaatattgcagccactgtattcagaaactctctgcaagaagctgaagctgtgttatatgagcatttatttg

SEQ ID NO: 1491 - DNA, 121 bp, synthetic construct
  misc_feature 1..121: note = Description of artificial sequence: synthetic polynucleotide sequence
  source 1..121: mol_type = other DNA
cttatttgtcatagtaatgctttttctttttctcccttagtgcaacaggacataaaatatattcccacagaagatgtttcaggtaatagtactaatattttaaatcaatagagaacattgt

SEQ ID NO: 1492 - DNA, 195 bp, synthetic construct
  misc_feature 1..195: note = Description of artificial sequence: synthetic polynucleotide sequence
  source 1..195: mol_type = other DNA
gatctaccagtggaagaacaattgcggagactacaagaagaaagaacatgtaaagtgtgtatggacaaagaagtgtccatagtgtttattccttgtggtcatctagtagtatgcaaagattgtgctccttctttaagaaagtgtcctatttgtaggagtacaatcaagggtacagttcgtacatttctttcatga

SEQ ID NO: 1493 - DNA, 121 bp, synthetic construct
  misc_feature 1..121: note = Description of artificial sequence: synthetic polynucleotide sequence
  source 1..121: mol_type = other DNA
gtctggagctcaggatagtagtaaagcctggtggtcaaagcagaataaagatcaatgctatggctcagtggatggtagcatctgtccttgccctgcccttgcgggattgtaatgtattgtg

SEQ ID NO: 1494 - DNA, 121 bp, synthetic construct
  misc_feature 1..121: note = Description of artificial sequence: synthetic polynucleotide sequence
  source 1..121: mol_type = other DNA
gcctcagataaggacggactgttgtactggccaaccaataaggttatattagggtgaacgtgagcgagtgtttttcagaaaaatatttctgggtaaacataatagggtcagtgctgtgaca

SEQ ID NO: 1495 - DNA, 121 bp, synthetic construct
  misc_feature 1..121: note = Description of artificial sequence: synthetic polynucleotide sequence
  source 1..121: mol_type = other DNA
gactttgaaaagtctcaataaaaacagttaaagtccactatgaaactctctccttatggaattactactaaatcacacaaatccaggccaaggagactattttcagcagcgtttttataag

SEQ ID NO: 1496 - DNA, 121 bp, synthetic construct
  misc_feature 1..121: note = Description of artificial sequence: synthetic polynucleotide sequence
  source 1..121: mol_type = other DNA
gcctttagaccttttttactggaaacattggagctacagaaaaaggttaagggacactacgaggaagcaattgaccaaacccagaattctactagacaaataatacatcccgagatcattc

SEQ ID NO: 1497 - DNA, 121 bp, synthetic construct
  misc_feature 1..121: note = Description of artificial sequence: synthetic polynucleotide sequence
  source 1..121: mol_type = other DNA
gatgtgtgttctgaaattgtgaaccatgagtctagtacttaatgatctgcttatctgctgccgtcaactagaacatgatagagctacagaacgaaaggtagtaaattacttaaattcaatt

SEQ ID NO: 1498 - DNA, 121 bp, synthetic construct
  misc_feature 1..121: note = Description of artificial sequence: synthetic polynucleotide sequence
  source 1..121: mol_type = other DNA
tcagaaagaagttgagaaatttaagcgcctgattcgagatcctgaaacaattaaacatctagatcggcattcagattccaaacaaggaaaatatttgaattgggatgctgtttttaggtat

SEQ ID NO: 1499 - DNA, 155 bp, synthetic construct
  misc_feature 1..155: note = Description of artificial sequence: synthetic polynucleotide sequence
  source 1..155: mol_type = other DNA
gatttttacagaaatatattcagaaagaaacagaatgtctgagaatagcaaaaccaaatgtatcagcctcaacacaagcctccaggcagaaaaagatgcaggaaatcagtagtttggtcaaatacttcatcaaatgtgcaaacagaagtaagtga

SEQ ID NO: 1500 - DNA, 166 bp, synthetic construct
  misc_feature 1..166: note = Description of artificial sequence: synthetic polynucleotide sequence
  source 1..166: mol_type = other DNA
ggagcacctaggctaaaatgtcaagaactcttaaattatatcatggatacagtgaaagattcatctaatggtgctatttacggagctgattgtagcaacatactactcaaagacattctttctgtgagaaaatactggtgtgaaatatctcagcaacagtggttag

SEQ ID NO: 1501 - DNA, 167 bp, synthetic construct
  misc_feature 1..167: note = Description of artificial sequence: synthetic polynucleotide sequence
  source 1..167: mol_type = other DNA
gaattgttctctgtgtacttcaggctctatctgaaaccttcacaagatgttcatagagttttagtggctagaataattcatgctgttaccaaaggatgctgttctcagactgacggattaaattccaaatttttggactttttttccaaggctattcagtgtgcgag

SEQ ID NO: 1502 - DNA, 240 bp, synthetic construct
  misc_feature 1..240: note = Description of artificial sequence: synthetic polynucleotide sequence
  source 1..240: mol_type = other DNA
gacaagaaaagagctcttcaggtctaaatcatatcttagcagctcttactatcttcctcaagactttggctgtcaactttcgaattcgagtgtgtgaattaggagatgaaattcttcccactttgctttatatttggactcaacataggcttaatgattctttaaaagaagtcattattgaattatttcaactgcaaatttatatccatcatccgaaaggagccaaaacccaagaaaaag

SEQ ID NO: 1503 - DNA, 165 bp, synthetic construct
  misc_feature 1..165: note = Description of artificial sequence: synthetic polynucleotide sequence
  source 1..165: mol_type = other DNA
ggtgcttatgaatcaacaaaatggagaagtattttatacaacttatatgatctgctagtgaatgagataagtcatataggaagtagaggaaagtattcttcaggatttcgtaatattgccgtcaaagaaaatttgattgaattgatggcagatatctgtcaccag

SEQ ID NO: 1504 - DNA, 171 bp, synthetic construct
  misc_feature 1..171: note = Description of artificial sequence: synthetic polynucleotide sequence
  source 1..171: mol_type = other DNA
ggtttttaatgaagataccagatccttggagatttctcaatcttacactactacacaaagagaatctagtgattacagtgtcccttgcaaaaggaagaaaatagaactaggctgggaagtaataaaagatcaccttcagaagtcacagaatgattttgatcttgtgccttg

SEQ ID NO: 1505 - DNA, 373 bp, synthetic construct
  misc_feature 1..373: note = Description of artificial sequence: synthetic polynucleotide sequence
  source 1..373: mol_type = other DNA
ggctacagattgcaacccaattaatatcaaagtatcctgcaagtttacctaactgtgagctgtctccattactgatgatactatctcagcttctaccccaacagcgacatggggaacgtacaccatatgtgttacgatgccttacggaagttgcattgtgtcaagacaagaggtcaaacctagaaagctcacaaaagtcagatttattaaaactctggaataaaatttggtgtattacctttcgtggtataagttctgagcaaatacaagctgaaaactttggcttacttggagccataattcagggtagtttagttgaggttgacagagaattctggaagttatttactgggtcagcctgcagaccttcatg

SEQ ID NO: 1506 - DNA, 196 bp, synthetic construct
  misc_feature 1..196: note = Description of artificial sequence: synthetic polynucleotide sequence
  source 1..196: mol_type = other DNA
gtcctgcagtatgctgtttgactttggcactgaccaccagtatagttccaggaacggtaaaaatgggaatagagcaaaatatgtgtgaagtaaatagaagcttttctttaaaggaatcaataatgaaatggctcttattctatcagttagagggtgacttagaaaatagcacagaagtgcctccaattcttcacag

SEQ ID NO: 1507 - DNA, 121 bp, synthetic construct
  misc_feature 1..121: note = Description of artificial sequence: synthetic polynucleotide sequence
  source 1..121: mol_type = other DNA
tttttctttgtagtaattttcctcatcttgtactggagaaaattcttgtgagtctcactatgaaaaactgtaaagctgcaatgaattttttccaaagcgtgccagaatggtatgttatcta

SEQ ID NO: 1508 - DNA, 227 bp, synthetic construct
  misc_feature 1..227: note = Description of artificial sequence: synthetic polynucleotide sequence
  source 1..227: mol_type = other DNA
gtgaacaccaccaaaaagataaagaagaactttcattctcagaagtagaagaactatttcttcagacaacttttgacaagatggactttttaaccattgtgagagaatgtggtatagaaaagcaccagtccagtattggcttctctgtccaccagaatctcaaggaatcactggatcgctgtcttctgggattatcagaacagcttctgaataattactcatctgag

SEQ ID NO: 1509 - DNA, 121 bp, synthetic construct
  misc_feature 1..121: note = Description of artificial sequence: synthetic polynucleotide sequence
  source 1..121: mol_type = other DNA
tacaaattcagaaactcttgtccggtgttcacgtcttttggtgggtgtccttggctgctactgttacatgggtgtaatagctgaagaggaagcatataagtcagaattattccagaaagcc

SEQ ID NO: 1510 - DNA, 121 bp, synthetic construct
  misc_feature 1..121: note = Description of artificial sequence: synthetic polynucleotide sequence
  source 1..121: mol_type = other DNA
tctaatgcaatgtgcaggagaaagtatcactctgtttaaaaataagacaaatgaggaattcagaattggttccttgagaaatatgatgcagctatgtacacgttgcttgagcaactgtacc

SEQ ID NO: 1511 - DNA, 121 bp, synthetic construct
  misc_feature 1..121: note = Description of artificial sequence: synthetic polynucleotide sequence
  source 1..121: mol_type = other DNA
tttgtcttaattgcagaagagtccaaataagattgcatctggctttttcctgcgattgttaacatcaaagctaatgaatgacattgcagatatttgtaaaagtttagtaagtatgcttcct

SEQ ID NO: 1512 - DNA, 173 bp, synthetic construct
  misc_feature 1..173: note = Description of artificial sequence: synthetic polynucleotide sequence
  source 1..173: mol_type = other DNA
ggcatccttcatcaaaaagccatttgaccgtggagaagtagaatcaatggaagatgatactaatggaaatctaatggaggtggaggatcagtcatccatgaatctatttaacgattaccctgatagtagtgttagtgatgcaaacgaacctggagagagccaaagtaccatag

SEQ ID NO: 1513 - DNA, 201 bp, synthetic construct
  misc_feature 1..201: note = Description of artificial sequence: synthetic polynucleotide sequence
  source 1..201: mol_type = other DNA
ggtgccattaatcctttagctgaagaatatctgtcaaagcaagatctacttttcttagacatgctcaagttcttgtgtttgtgtgtaactactgctcagaccaatactgtgtcctttagggcagctgatattcggaggaaattgttaatgttaattgattctagcacgctagaacctaccaaatccctccacctgcatatg

SEQ ID NO: 1514 - DNA, 121 bp, synthetic construct
  misc_feature 1..121: note = Description of artificial sequence: synthetic polynucleotide sequence
  source 1..121: mol_type = other DNA
ttccctcctaccatcttagtatctaatgcttttaaaggagcttcctggagaagagtaccccttgccaatggaagatgttcttgaacttctgaaaccactatcgtaagaaattaaaacctta

SEQ ID NO: 1515 - DNA, 157 bp, synthetic construct
  misc_feature 1..157: note = Description of artificial sequence: synthetic polynucleotide sequence
  source 1..157: mol_type = other DNA
gcaatgtgtgttctttgtatcgtcgtgaccaagatgtttgtaaaactattttaaaccatgtccttcatgtagtgaaaaacctaggtcaaagcaatatggactctgagaacacaagggatgctcaaggacagtttcttacagtaattggagcattttg

SEQ ID NO: 1516 - DNA, 121 bp, synthetic construct
  misc_feature 1..121: note = Description of artificial sequence: synthetic polynucleotide sequence
  source 1..121: mol_type = other DNA
ttggaaaacttacttgatttcaggcatctaacaaaggagaggaaatatatattctctgtaagaatggccctagtaaattgccttaaaactttgcttgaggtgagtttttgcatttttttag

SEQ ID NO: 1517 - DNA, 121 bp, synthetic construct
  misc_feature 1..121: note = Description of artificial sequence: synthetic polynucleotide sequence
  source 1..121: mol_type = other DNA
tccttattcaaaatgggccattcttaatgtaatgggaaaagactttcctgtaaatgaagtatttacacaatttcttgctgacaatcatcaccaagttcgcatgttggctgcagagtcaatc

SEQ ID NO: 1518 - DNA, 121 bp, synthetic construct
  misc_feature 1..121: note = Description of artificial sequence: synthetic polynucleotide sequence
  source 1..121: mol_type = other DNA
agattgttccaggacacgaagggagattcttccaggttactgaaagcacttcctttgaagcttcagcaaacagcttttgaaaatgcatacttgaaagctcaggaaggaatgagagaaatgg

SEQ ID NO: 1519 - DNA, 175 bp, synthetic construct
  misc_feature 1..175: note = Description of artificial sequence: synthetic polynucleotide sequence
  source 1..175: mol_type = other DNA
gtcccatagtgctgagaaccctgaaactttggatgaaatttataatagaaaatctgttttactgacgttgatagctgtggttttatcctgtagccctatctgcgaaaaacaggctttgtttgccctgtgtaaatctgtgaaagagaatggattagaacctcaccttgtgaaaaag

SEQ ID NO: 1520 - DNA, 171 bp, synthetic construct
  misc_feature 1..171: note = Description of artificial sequence: synthetic polynucleotide sequence
  source 1..171: mol_type = other DNA
ggttttagagaaagtttctgaaacttttggatatagacgtttagaagactttatggcatctcatttagattatctggttttggaatggctaaatcttcaagatactgaatacaacttatcttcttttccttttattttattaaactacacaaatattgaggatttctatag

SEQ ID NO: 1521 - DNA, 121 bp, synthetic construct
  misc_feature 1..121: note = Description of artificial sequence: synthetic polynucleotide sequence
  source 1..121: mol_type = other DNA
gatcttgttataaggttttgattccacatctggtgattagaagtcattttgatgaggtgaagtccattgctaatcagattcaagaggactggaaaagtcttctaacagactgctttccaaa

SEQ ID NO: 1522 - DNA, 121 bp, synthetic construct
  misc_feature 1..121: note = Description of artificial sequence: synthetic polynucleotide sequence
  source 1..121: mol_type = other DNA
tgtaaatattcttccttattttgcctatgagggtaccagagacagtgggatggcacagcaaagagagactgctaccaaggtctatgatatgcttaaaagtgaaaacttattgggaaaacag

SEQ ID NO: 1523 - DNA, 121 bp, synthetic construct
  misc_feature 1..121: note = Description of artificial sequence: synthetic polynucleotide sequence
  source 1..121: mol_type = other DNA
cagattgatcacttattcattagtaatttaccagagattgtggtggagttattgatgacgttacatgagccagcaaattctagtgccagtcagagcactgacctctgtgacttttcagggt

SEQ ID NO: 1524 - DNA, 121 bp, synthetic construct
  misc_feature 1..121: note = Description of artificial sequence: synthetic polynucleotide sequence
  source 1..121: mol_type = other DNA
tttggatcctgctcctaatccacctcattttccatcgcatgtgattaaagcaacatttgcctatatcagcaattgtcataaaaccaagttaaaaagcattttagaaattctttccaaaagc

SEQ ID NO: 1525 - DNA, 201 bp, synthetic construct
  misc_feature 1..201: note = Description of artificial sequence: synthetic polynucleotide sequence
  source 1..201: mol_type = other DNA
ggattcctatcagaaaattcttcttgccatatgtgagcaagcagctgaaacaaataatgtttataagaagcacagaattcttaaaatatatcacctgtttgttagtttattactgaaagatataaaaagtggcttaggaggagcttgggcctttgttcttcgagacgttatttatactttgattcactatatcaaccaaag

SEQ ID NO: 1526 - DNA, 176 bp, synthetic construct
  misc_feature 1..176: note = Description of artificial sequence: synthetic polynucleotide sequence
  source 1..176: mol_type = other DNA
ggccttcttgtatcatggatgtgtcattacgtagcttctccctttgttgtgacttattaagtcaggtttgccagacagccgtgacttactgtaaggatgctctagaaaaccatcttcatgttattgttggtacacttataccccttgtgtatgagcaggtggaggttcagaaacag

SEQ ID NO: 1527 - DNA, 166 bp, synthetic construct
  misc_feature 1..166: note = Description of artificial sequence: synthetic polynucleotide sequence
  source 1..166: mol_type = other DNA
ggtattggacttgttgaaatacttagtgatagataacaaggataatgaaaacctctatatcacgattaagcttttagatccttttcctgaccatgttgtttttaaggatttgcgtattactcagcaaaaaatcaaatacagtagaggacccttttcactcttggag

SEQ ID NO: 1528 - DNA, 134 bp, synthetic construct
  misc_feature 1..134: note = Description of artificial sequence: synthetic polynucleotide sequence
  source 1..134: mol_type = other DNA
ggaaattaaccattttctctcagtaagtgtttatgatgcacttccattgacaagacttgaaggactaaaggatcttcgaagacaactggaactacataaagatcagatggtggacattatgagagcttctcagg

SEQ ID NO: 1529 - DNA, 121 bp, synthetic construct
  misc_feature 1..121: note = Description of artificial sequence: synthetic polynucleotide sequence
  source 1..121: mol_type = other DNA
aaattatttctagataatccgcaagatgggattatggtgaaactagttgtcaatttgttgcagttatccaagatggcaataaaccacactggtgaaaaagaagttctaggtaaactacagt

SEQ ID NO: 1530 - DNA, 173 bp, synthetic construct
  misc_feature 1..173: note = Description of artificial sequence: synthetic polynucleotide sequence
  source 1..173: mol_type = other DNA
gaggctgttggaagctgcttgggagaagtgggtcctatagatttctctaccatagctatacaacatagtaaagatgcatcttataccaaggcccttaagttatttgaagataaagaacttcagtggaccttcataatgctgacctacctgaataacacactggtagaagattg

SEQ ID NO: 1531 - DNA, 143 bp, synthetic construct
  misc_feature 1..143: note = Description of artificial sequence: synthetic polynucleotide sequence
  source 1..143: mol_type = other DNA
gtgtcaaagttcgatcagcagctgttacctgtttgaaaaacattttagccacaaagactggacatagtttctgggagatttataagatgacaacagatccaatgctggcctatctacagccttttagaacatcaagaaaaaag

SEQ ID NO: 1532 - DNA, 178 bp, synthetic construct
  misc_feature 1..178: note = Description of artificial sequence: synthetic polynucleotide sequence
  source 1..178: mol_type = other DNA
gtttttagaagtacccagatttgacaaagaaaacccttttgaaggcctggatgatataaatctgtggattcctctaagtgaaaatcatgacatttggataaagacactgacttgtgcttttttggacagtggaggcacaaaatgtgaaattcttcaattattaaagccaatgtgtgaa

SEQ ID NO: 1533 - DNA, 179 bp, synthetic construct
  misc_feature 1..179: note = Description of artificial sequence: synthetic polynucleotide sequence
  source 1..179: mol_type = other DNA
ggtgaaaactgacttttgtcagactgtacttccatacttgattcatgatattttactccaagatacaaatgaatcatggagaaatctgctttctacacatgttcagggatttttcaccagctgtcttcgacacttctcgcaaacgagccgatccacaacccctgcaaacttggattcag

SEQ ID NO: 1534 - DNA, 121 bp, synthetic construct
  misc_feature 1..121: note = Description of artificial sequence: synthetic polynucleotide sequence
  source 1..121: mol_type = other DNA
atatttttgtttgtcagagtcagagcactttttccgatgctgtttggataaaaaatcacaaagaacaatgcttgctgttgtggactacatgagaagacaaaagaggtaatgtaatgagtgt

SEQ ID NO: 1535 - DNA, 157 bp, synthetic construct
  misc_feature 1..157: note = Description of artificial sequence: synthetic polynucleotide sequence
  source 1..157: mol_type = other DNA
gaccttcttcaggaacaatttttaatgatgctttctggctggatttaaattatctagaagttgccaaggtagctcagtcttgtgctgctcactttacagctttactctatgcagaaatctatgcagataagaaaagtatggatgatcaagagaaaag

SEQ ID NO: 1536 - DNA, 121 bp, synthetic construct
  misc_feature 1..121: note = Description of artificial sequence: synthetic polynucleotide sequence
  source 1..121: mol_type = other DNA
gttcttgtgacaaacagaagtcttgcatttgaagaaggaagccagaatacaactatttctagcttgagtgaaaaaagtaaagaagaaactggaataagtttacaggtaaatattagaggct

SEQ ID NO: 1537 - DNA, 121 bp, synthetic construct
  misc_feature 1..121: note = Description of artificial sequence: synthetic polynucleotide sequence
  source 1..121: mol_type = other DNA
gtttccatgttttcaggatcttctcttagaaatctacagaagtataggggagccagatagtttgtatggctgtggtggagggaagatgttacaacccattactaggtaaattgcatttttc

SEQ ID NO: 1538 - DNA, 121 bp, synthetic construct
  misc_feature 1..121: note = Description of artificial sequence: synthetic polynucleotide sequence
  source 1..121: mol_type = other DNA
ttcttatagactacgaacatatgaacacgaagcaatgtggggcaaagccctagtaacatatgacctcgaaacagcaatcccctcatcaacacgccaggcaggaatcattcaggtacatttt

SEQ ID NO: 1539 - DNA, 150 bp, synthetic construct
  misc_feature 1..150: note = Description of artificial sequence: synthetic polynucleotide sequence
  source 1..150: mol_type = other DNA
ggccttgcagaatttgggactctgccatattctttccgtctatttaaaaggattggattatgaaaataaagactggtgtcctgaactagaagaacttcattaccaagcagcatggaggaatatgcagtgggaccattgcacttccgtcag

SEQ ID NO: 1540 - DNA, 121 bp, synthetic construct
  misc_feature 1..121: note = Description of artificial sequence: synthetic polynucleotide sequence
  source 1..121: mol_type = other DNA
tctcacagcaaagaagtagaaggaaccagttaccatgaatcattgtacaatgctctacaatctctaagagacagagaattctctacattttatgaaagtctcaaatatgccaggtattatg

SEQ ID NO: 1541 - DNA, 121 bp, synthetic construct
  misc_feature 1..121: note = Description of artificial sequence: synthetic polynucleotide sequence
  source 1..121: mol_type = other DNA
gagtaaaagaagtggaagagatgtgtaagcgcagccttgagtctgtgtattcgctctatcccacacttagcaggttgcaggccattggagagctggaaagcattggggagcttttctcaag

SEQ ID NO: 1542 - DNA, 236 bp, synthetic construct
  misc_feature 1..236: note = Description of artificial sequence: synthetic polynucleotide sequence
  source 1..236: mol_type = other DNA
gatcagtcacacatagacaactctctgaagtatatattaagtggcagaaacactcccagcttctcaaggacagtgattttagttttcaggagcctatcatggctctacgcacagtcattttggagatcctgatggaaaaggaaatggacaactcacaaagagaatgtattaaggacattctcaccaaacaccttgtagaactctctatactggccagaactttcaagaacactcag

SEQ ID NO: 1543 - DNA, 169 bp, synthetic construct
  misc_feature 1..169: note = Description of artificial sequence: synthetic polynucleotide sequence
  source 1..169: mol_type = other DNA
gctccctgaaagggcaatatttcaaattaaacagtacaattcagttagctgtggagtctctgagtggcagctggaagaagcacaagtattctgggcaaaaaaggagcagagtcttgccctgagtattctcaagcaaatgatcaagaagttggatgccagctgtgcagcg

SEQ ID NO: 1544 - DNA, 121 bp, synthetic construct
  misc_feature 1..121: note = Description of artificial sequence: synthetic polynucleotide sequence
  source 1..121: mol_type = other DNA
acagaacaatcccagcctaaaacttacatacacagaatgtctgagggtttgtggcaactggttagcagaaacgtgcttagaaaatcctgcggtcatcatgcagacctatctagaaaaggta

SEQ ID NO: 1545 - DNA, 219 bp, synthetic construct
  misc_feature 1..219: note = Description of artificial sequence: synthetic polynucleotide sequence
  source 1..219: mol_type = other DNA
ggcagtagaagttgctggaaattatgatggagaaagtagtgatgagctaagaaatggaaaaatgaaggcatttctctcattagcccggttttcagatactcaataccaaagaattgaaaactacatgaaatcatcggaatttgaaaacaagcaagctctcctgaaaagagccaaagaggaagtaggtctccttagggaacataaaattcagacaaacag

SEQ ID NO: 1546 - DNA, 209 bp, synthetic construct
  misc_feature 1..209: note = Description of artificial sequence: synthetic polynucleotide sequence
  source 1..209: mol_type = other DNA
gatacacagtaaaggttcagcgagagctggagttggatgaattagccctgcgtgcactgaaagaggatcgtaaacgcttcttatgtaaagcagttgaaaattatatcaactgcttattaagtggagaagaacatgatatgtgggtattccgactttgttccctctggcttgaaaattctggagtttctgaagtcaatggcatgatgaag

SEQ ID NO: 1547 - DNA, 121 bp, synthetic construct
  misc_feature 1..121: note = Description of artificial sequence: synthetic polynucleotide sequence
  source 1..121: mol_type = other DNA
gtagagagacggaatgaagattccaacatataaatttttgcctcttatgtaccaattggctgctagaatggggaccaagatgatgggaggcctaggatttcatgaagtcctcaataatgta

SEQ ID NO: 1548 - DNA, 160 bp, synthetic construct
  misc_feature 1..160: note = Description of artificial sequence: synthetic polynucleotide sequence
  source 1..160: mol_type = other DNA
gctaatctctagaatttcaatggatcacccccatcacactttgtttattatactggccttagcaaatgcaaacagagatgaatttctgactaaaccagaggtagccagaagaagcagaataactaaaaatgtgcctaaacaaagctctcagcttgatgag

SEQ ID NO: 1549 - DNA, 140 bp, synthetic construct
  misc_feature 1..140: note = Description of artificial sequence: synthetic polynucleotide sequence
  source 1..140: mol_type = other DNA
ggatcgaacagaggctgcaaatagaataatatgtactatcagaagtaggagacctcagatggtcagaagtgttgaggcactttgtgatgcttatattatattagcaaacttagatgccactcagtggaagactcagagaa

SEQ ID NO: 1550 - DNA, 121 bp, synthetic construct
  misc_feature 1..121: note = Description of artificial sequence: synthetic polynucleotide sequence
  source 1..121: mol_type = other DNA
tcttcatttttaaatacagaaggcataaatattccagcagaccagccaattactaaacttaagaatttagaagatgttgttgtccctactatggaaattaaggtaatttgcaattaactct

SEQ ID NO: 1551 - DNA, 142 bp, synthetic construct
  misc_feature 1..142: note = Description of artificial sequence: synthetic polynucleotide sequence
  source 1..142: mol_type = other DNA
ggtggaccacacaggagaatatggaaatctggtgactatacagtcatttaaagcagaatttcgcttagcaggaggtgtaaatttaccaaaaataatagattgtgtaggttccgatggcaaggagaggagacagcttgttaag

SEQ ID NO: 1552 - DNA, 121 bp, synthetic construct
  misc_feature 1..121: note = Description of artificial sequence: synthetic polynucleotide sequence
  source 1..121: mol_type = other DNA
agggccgtgatgacctgagacaagatgctgtcatgcaacaggtcttccagatgtgtaatacattactgcagagaaacacggaaactaggaagaggaaattaactatctgtacttataaggt

SEQ ID NO: 1553 - DNA, 151 bp, synthetic construct
  misc_feature 1..151: note = Description of artificial sequence: synthetic polynucleotide sequence
  source 1..151: mol_type = other DNA
ggtggttcccctctctcagcgaagtggtgttcttgaatggtgcacaggaactgtccccattggtgaatttcttgttaacaatgaagatggtgctcataaaagatacaggccaaatgatttcagtgcctttcagtgccaaaagaaaatgatg

SEQ ID NO: 1554 - DNA, 167 bp, synthetic construct
  misc_feature 1..167: note = Description of artificial sequence: synthetic polynucleotide sequence
  source 1..167: mol_type = other DNA
ggaggtgcaaaaaaagtcttttgaagagaaatatgaagtcttcatggatgtttgccaaaattttcaaccagttttccgttacttctgcatggaaaaattcttggatccagctatttggtttgagaagcgattggcttatacgcgcagtgtagctacttcttctattg

SEQ ID NO: 1555 - DNA, 121 bp, synthetic construct
  misc_feature 1..121: note = Description of artificial sequence: synthetic polynucleotide sequence
  source 1..121: mol_type = other DNA
gtttcttttttctccagttggttacatacttggacttggtgatagacatgtacagaatatcttgataaatgagcagtcagcagaacttgtacatatagatctaggtaagtaataaaatcta

SEQ ID NO: 1556 - DNA, 121 bp, synthetic construct
  misc_feature 1..121: note = Description of artificial sequence: synthetic polynucleotide sequence
  source 1..121: mol_type = other DNA
taggtgttgcttttgaacagggcaaaatccttcctactcctgagacagttccttttagactcaccagagatattgtggatggcatgggcattacgggtgttgaaggtgtcttcagaaggta

SEQ ID NO: 1557 - DNA, 121 bp, synthetic construct
  misc_feature 1..121: note = Description of artificial sequence: synthetic polynucleotide sequence
  source 1..121: mol_type = other DNA
atccgtatttataatgtgtttgactctagatgctgtgagaaaaccatggaagtgatgagaaactctcaggaaactctgttaaccattgtagaggtaaagtattttataaggaagactttat

SEQ ID NO: 1558 - DNA, 138 bp, synthetic construct
  misc_feature 1..138: note = Description of artificial sequence: synthetic polynucleotide sequence
  source 1..138: mol_type = other DNA
ggtccttctatatgatccactctttgactggaccatgaatcctttgaaagctttgtatttacagcagaggccggaagatgaaactgagcttcaccctactctgaatgcagatgaccaagaatgcaaacgaaatctcag

SEQ ID NO: 1559 - DNA, 185 bp, synthetic construct
  misc_feature 1..185: note = Description of artificial sequence: synthetic polynucleotide sequence
  source 1..185: mol_type = other DNA
gtgatattgaccagagtttcaacaaagtagctgaacgtgtcttaatgagactacaagagaaactgaaaggagtggaagaaggcactgtgctcagtgttggtggacaagtgaatttgctcatacagcaggccatagaccccaaaaatctcagccgacttttcccaggatggaaagcttgggtgtga

SEQ ID NO: 1560 - DNA, 121 bp, synthetic construct
  misc_feature 1..121: note = Description of artificial sequence: synthetic polynucleotide sequence
  source 1..121: mol_type = other DNA
gtgaaatgtgcagaataggcaagtatatatataaacagaaagtagactgaaatttgcttagagctggtgggaatagagagattggagagggtggtagctaaagggtataatgcttcttttt

SEQ ID NO: 1561 - DNA, 121 bp, synthetic construct
  misc_feature 1..121: note = Description of artificial sequence: synthetic polynucleotide sequence
  source 1..121: mol_type = other DNA
ctctaccctgaagcattttctgcctttcaatgccttgttccatgtgctggaatgctgatccttaaccatgttgccaactggctcccttgcctgcaagcttccacttgtgttcagccaatgg

SEQ ID NO: 1562 - DNA, 316 bp, synthetic construct
  misc_feature 1..316: note = Description of artificial sequence: synthetic polynucleotide sequence
  source 1..316: mol_type = other DNA
cctaaaagccttccacagagagagtgtggttaagcgcataggcgtcgctatcctcttcctccaaaagcagcttgtcgatggtcaacgagctggcggctcttctggggtcttccatgtcctgaaggactggctctgggatagagatggggagctggacaaactggggcccaggtagggctggggccggaggctggtactgcagggtggaggtgggtagtgtggaaaggggctgaggccacgggaaataggtgaggggtgcctggtgctctgggccctccagcgggggccccactgcgggcgtggcggagcttcttgt

SEQ ID NO: 1563 - DNA, 267 bp, synthetic construct
  misc_feature 1..267: note = Description of artificial sequence: synthetic polynucleotide sequence
  source 1..267: mol_type = other DNA
ccgtgacattggtgatgagtggcggagaggcataggtcaacactgaggagggccccaccaccgtgtagctggggcacacgggctgcacatacatgtcagctgagtaggggcagctgacagcttcatggggcacatactcggtgtaaggtgtccatggggccaggggctgcagggtggccggggtgggctgggagagccagccggcacacagggcagcctcctctgtcactgcagacacagaaccttccatgtccaggcaggaaggac

SEQ ID NO: 1564 - DNA, 121 bp, synthetic construct
  misc_feature 1..121: note = Description of artificial sequence: synthetic polynucleotide sequence
  source 1..121: mol_type = other DNA
agaggcctgggggccaccagggctacggggcactcttacccactgtggtgtaggtcgccaggggctgatggggcagcaccacctagaggggagaggagaagaccagggtcaatgtttagcc

SEQ ID NO: 1565 - DNA, 121 bp, synthetic construct
  misc_feature 1..121: note = Description of artificial sequence: synthetic polynucleotide sequence
  source 1..121: mol_type = other DNA
taggtgcaggtgctgccccactgctggcgtggcctcgcttcctcctcagcagttccttcactggctccttcacacggacgccctggtatggccgggccggggctggggcttgctccggagc

SEQ ID NO: 1566 - DNA, 121 bp, synthetic construct
  misc_feature 1..121: note = Description of artificial sequence: synthetic polynucleotide sequence
  source 1..121: mol_type = other DNA
ccctgccccgctggcactcgcttgggtctgacagccacagccaaaccacttacgtttttgccagagcatggcctgtgacaggatgttgccttttctctttgaagccgacagtttggcttct

SEQ ID NO: 1567 - DNA, 121 bp, synthetic construct
  misc_feature 1..121: note = Description of artificial sequence: synthetic polynucleotide sequence
  source 1..121: mol_type = other DNA
aaaactctgattctgcctcccagtccccaggtttacacagtcatccaactatttggtcggtgttggccggcgtgggtcccactctgtcttgtggccagtctctggcagacagtgggacaaa

SEQ ID NO: 1568 - DNA, 121 bp, synthetic construct
  misc_feature 1..121: note = Description of artificial sequence: synthetic polynucleotide sequence
  source 1..121: mol_type = other DNA
caccagcatgtgccgttctttttatatgcatctctcatttaatctcccctcatccaaccatgagaagtgagaccaaagaccctggagtccgatggactccgctgcgcagcagtgaccttgg

SEQ ID NO: 1569 - DNA, 121 bp, synthetic construct
  misc_feature 1..121: note = Description of artificial sequence: synthetic polynucleotide sequence
  source 1..121: mol_type = other DNA
taaaatctagtagtagattttaaccttttgtggaatgtaacacacgttcagagatgtctgtgaaatggatgtatgcatgcagatgacatcacaaaacaaattttgttgtaaccattctcgg

SEQ ID NO: 1570 - DNA, 121 bp, synthetic construct
  misc_feature 1..121: note = Description of artificial sequence: synthetic polynucleotide sequence
  source 1..121: mol_type = other DNA
tgctaggagtttatacatgatcctaagggcagcaggaaccacatgatcagattcgcctttcgaataggtgattctgacagcactgtggagaacggagaggaggggcccagagtggaagcgg

SEQ ID NO: 1571 - DNA, 121 bp, synthetic construct
  misc_feature 1..121: note = Description of artificial sequence: synthetic polynucleotide sequence
  source 1..121: mol_type = other DNA
gacagtgtgcccgggctgctcaacctggaggaaatggctgtgtgctcagggaatgaatgtgcataaaaagaaatatcaccttaggtacaaggacatccataattcctccgaccagagagct

SEQ ID NO: 1572 - DNA, 121 bp, synthetic construct
  misc_feature 1..121: note = Description of artificial sequence: synthetic polynucleotide sequence
  source 1..121: mol_type = other DNA
agaaaagtaccattttagggcactgaaagatggggcccaacagacaggccaaatcgtcaatcagtctgtaggtgtagagaaatggaaagctcactgcagtcatagggtagccagtaaaggc

SEQ ID NO: 1573 - DNA, 121 bp, synthetic construct
  misc_feature 1..121: note = Description of artificial sequence: synthetic polynucleotide sequence
  source 1..121: mol_type = other DNA
ctggtgagtagggggactcagcctggagcccccagcccccatactgcctgttggttacactgtggctgctgctgccaccactggcatacgttcagatggttccctgagttccacatcaggg

SEQ ID NO: 1574 - DNA, 121 bp, synthetic construct
  misc_feature 1..121: note = Description of artificial sequence: synthetic polynucleotide sequence
  source 1..121: mol_type = other DNA
agttactggggctgagagaaattagcagatgagtacagaggcagacttgaatttccccatcaaagcaagttgggcaagagcagaactgaccaggcttaaatggcagaagtgtagacaaaag

SEQ ID NO: 1575 - DNA, 121 bp, synthetic construct
  misc_feature 1..121: note = Description of artificial sequence: synthetic polynucleotide sequence
  source 1..121: mol_type = other DNA
cgttacaccaaaggctgtgcctttgaccacccaccacagggtcctctacattcataacctatttttgtaaaagggactaaaataagaattgtcaccaggcacagtggctcacacctgtaat

SEQ ID NO: 1576 - DNA, 121 bp, synthetic construct
  misc_feature 1..121: note = Description of artificial sequence: synthetic polynucleotide sequence
  source 1..121: mol_type = other DNA
gtcctccttctgtacgtcagagatgtacagcccgccgtggtaggtaataaaaaacctgtgttctggagacacaatcaggacatagttcgttacttcccggtttcgtacagcctcagaggca

SEQ ID NO: 1577 - DNA, 121 bp, synthetic construct
  misc_feature 1..121: note = Description of artificial sequence: synthetic polynucleotide sequence
  source 1..121: mol_type = other DNA
gctcccaagcctgccctgccctccccgcaccttccccaggccctcctagcatacctgctgttacggctcatcttcattgatttgcctggtgggggaaggaaaagcaacaggtgagagggca

SEQ ID NO: 1578 - DNA, 121 bp, synthetic construct
  misc_feature 1..121: note = Description of artificial sequence: synthetic polynucleotide sequence
  source 1..121: mol_type = other DNA
ctgctgggtgcagtgtcctgctgcagggatcttacctccatcttgctgtaaatccagggaagaacttctgtcactttggtgtacacaccaggtttgtttctctggccacagcctgtgcccc

SEQ ID NO: 1579 - DNA, 121 bp, synthetic construct
  misc_feature 1..121: note = Description of artificial sequence: synthetic polynucleotide sequence
  source 1..121: mol_type = other DNA
gtctgtccatgcatggggaggcaagcagggtggatgtgagctgcaacaagacctccagacgtcagtgaaggaacaaggctgagactttcagtagggggagggagaaggagcacaaccactc

SEQ ID NO: 1580 - DNA, 121 bp, synthetic construct
  misc_feature 1..121: note = Description of artificial sequence: synthetic polynucleotide sequence
  source 1..121: mol_type = other DNA
gatccctgtgtggccctgccagaactggactagagaaaaagaagcagacagctgggtcatggccagccccactgagatgagacactgagcagcccaaggacctgggggttctgagacaccg

SEQ ID NO: 1581 - DNA, 121 bp, synthetic construct
  misc_feature 1..121: note = Description of artificial sequence: synthetic polynucleotide sequence
  source 1..121: mol_type = other DNA
ggccccggacgatgcggcgcgcccaggatgctgccgtgcctcgtagtgctgctggcggcgctcctcagcctccgtcttggctcagacgctcatggtaaggctccgggacgcggcccttccc

SEQ ID NO: 1582 - DNA, 121 bp, synthetic construct
  misc_feature 1..121: note = Description of artificial sequence: synthetic polynucleotide sequence
  source 1..121: mol_type = other DNA
ggacagagctgcccagccctccgtctgtgtggtttgaagcagaatttttccaccacatcctccactggacacccatcccaaatcagtctgaaagtacctgctatgaagtggcgctcctgag

SEQ ID NO: 1583 - DNA, 180 bp, synthetic construct
  misc_feature 1..180: note = Description of artificial sequence: synthetic polynucleotide sequence
  source 1..180: mol_type = other DNA
ggtatggaatagagtcctggaactccatctccaactgtagccagaccctgtcctatgaccttaccgcagtgaccttggacctgtaccacagcaatggctaccgggccagagtgcgggctgtggacggcagccggcactccaactggaccgtcaccaacacccgcttctctgtggatgaag

SEQ ID NO: 1584 - DNA, 171 bp, synthetic construct
  misc_feature 1..171: note = Description of artificial sequence: synthetic polynucleotide sequence
  source 1..171: mol_type = other DNA
gtgactctgacagttggcagtgtgaacctagagatccacaatggcttcatcctcgggaagattcagctacccaggcccaagatggcccccgcaaatgacacatatgaaagcatcttcagtcacttccgagagtatgagattgccattcgcaaggtgccgggaaacttcacg

SEQ ID NO: 1585 - DNA, 152 bp, synthetic construct
  misc_feature 1..152: note = Description of artificial sequence: synthetic polynucleotide sequence
  source 1..152: mol_type = other DNA
gttcacacacaagaaagtaaaacatgaaaacttcagcctcctaacctctggagaagtgggagagttctgtgtccaggtgaaaccatctgtcgcttcccgaagtaacaaggggatgtggtctaaagaggagtgcatctccctcaccaggcagt

SEQ ID NO: 1586 - DNA, 121 bp, synthetic construct
  misc_feature 1..121: note = Description of artificial sequence: synthetic polynucleotide sequence
  source 1..121: mol_type = other DNA
atttcaccgtgaccaacgtcatcatcttctttgcctttgtcctgctgctctccggagccctcgcctactgcctggccctccagctgtatgtgcggcgccgaaagaagctacccagtgtcct

SEQ ID NO: 1587 - DNA, 461 bp, synthetic construct
  misc_feature 1..461: note = Description of artificial sequence: synthetic polynucleotide sequence
  source 1..461: mol_type = other DNA
gctcttcaagaagcccagccccttcatcttcatcagccagcgtccctccccagagacccaagacaccatccacccgcttgatgaggaggcctttttgaaggtgtccccagagctgaagaacttggacctgcacggcagcacagacagtggctttggcagcaccaagccatccctgcagactgaagagccccagttcctcctccctgaccctcacccccaggctgacagaacgctgggaaacagggagccccctgtgctgggggacagctgcagtagtggcagcagcaatagcacagacagcgggatctgcctgcaggagcccagcctgagccccagcacagggcccacctgggagcaacaggtggggagcaacagcaggggccaggatgacagtggcattgacttagttcaaaactctgagggccgggctggggacacacagggtggctcggccttgggcc

SEQ ID NO: 1588 - DNA, 467 bp, synthetic construct
  misc_feature 1..467: note = Description of artificial sequence: synthetic polynucleotide sequence
  source 1..467: mol_type = other DNA
accacagtcccccggagcctgaggtgcctggggaagaagacccagctgctgtggcattccagggttacctgaggcagaccagatgtgctgaagagaaggcaaccaagacaggctgcctggaggaagaatcgcccttgacagatggccttggccccaaattcgggagatgcctggttgatgaggcaggcttgcatccaccagccctggccaagggctatttgaaacaggatcctctagaaatgactctggcttcctcaggggccccaacgggacagtggaaccagcccactgaggaatggtcactcctggccttgagcagctgcagtgacctgggaatatctgactggagctttgcccatgaccttgcccctctaggctgtgtggcagccccaggtggtctcctgggcagctttaactcagacctggtcaccctgcccctcatctctagcctgcagtcaagtgagtga

SEQ ID NO: 1589 - DNA, 121 bp, synthetic construct
  misc_feature 1..121: note = Description of artificial sequence: synthetic polynucleotide sequence
  source 1..121: mol_type = other DNA
catcccctggccagggggcagctccagctatcaggatgtggcagaacgtgaatcagaaatgatcctgtggggctgggtgcggtggctcacgccataatcacagcactttgggaggctgagg

SEQ ID NO: 1590 - DNA, 121 bp, synthetic construct
  misc_feature 1..121: note = Description of artificial sequence: synthetic polynucleotide sequence
  source 1..121: mol_type = other DNA
aggctgaagcgtgtgttcacctccccttcacatctttcaaaatggcagggtttttcttttatctctggattagtcttcttcgtgttcttcaccaagactgtagaattcactgaactgcaag

SEQ ID NO: 1591 - DNA, 121 bp, synthetic construct
  misc_feature 1..121: note = Description of artificial sequence: synthetic polynucleotide sequence
  source 1..121: mol_type = other DNA
ccacttggttaaggtgtatgactatcaagaagatggttcggtacttctgacttgtgatgcagaagccaaaaatatcacatggtttaaagatgggaagatgatcggcttcctaactgaagat

SEQ ID NO: 1592 - DNA, 121 bp, synthetic construct
  misc_feature 1..121: note = Description of artificial sequence: synthetic polynucleotide sequence
  source 1..121: mol_type = other DNA
atggaatctgggaagtaatgccaaggaccctcgagggatgtatcagtgtaaaggatcacagaacaagtcaaaaccactccaagtgtattacagaagtatgtaatcccctttggtctgtttg

SEQ ID NO: 1593 - DNA, 121 bp, synthetic construct
  misc_feature 1..121: note = Description of artificial sequence: synthetic polynucleotide sequence
  source 1..121: mol_type = other DNA
gtgaggacggacgataggatgaagggctaccagaaaggatctgggaagacacagagacaaaaaaggaacacttggaggagaatgtggagcaccaggaagggttccctgaagtaggtgccat

SEQ ID NO: 1594 - DNA, 121 bp, synthetic construct
  misc_feature 1..121: note = Description of artificial sequence: synthetic polynucleotide sequence
  source 1..121: mol_type = other DNA
cgtccccacctcttccctgggcacaggctttcctctgacacacagagatcaaataacttctcactcaaagggaaagatatgatctccttttactattcagcaccaacaccagcggaccgac

SEQ ID NO: 1595 - DNA, 121 bp, synthetic construct
  misc_feature 1..121: note = Description of artificial sequence: synthetic polynucleotide sequence
  source 1..121: mol_type = other DNA
gcatccaccacccggcgtgcacatcacacaaagacggttctgcttccctcgcctgtttagtatgaaactcagtgagaattgatgaagtcatttttcaagccataaagcactgcaaacacat

SEQ ID NO: 1596 - DNA, 121 bp, synthetic construct
  misc_feature 1..121: note = Description of artificial sequence: synthetic polynucleotide sequence
  source 1..121: mol_type = other DNA
gtctggtgttgaagtgctgaataaaaaatgctcactcctgagagcatggtaagatgtttgtgggtagtgttcacatagaatgccctgcagcttgatgttcgagaatgatcttttgtgtggg

SEQ ID NO: 1597 - DNA, 121 bp, synthetic construct
  misc_feature 1..121: note = Description of artificial sequence: synthetic polynucleotide sequence
  source 1..121: mol_type = other DNA
atgaatgaatgaatgagatgtggacagtgagagcatggaaggggaggatgcattctaaattctagcttgattgacaggtggatcatgtgacattcacaaacagggaaccaagggagggaag

SEQ ID NO: 1598 - DNA, 121 bp, synthetic construct
  misc_feature 1..121: note = Description of artificial sequence: synthetic polynucleotide sequence
  source 1..121: mol_type = other DNA
attctctgataacagcttagacactaggagaaacggtgttcacagtgtgtttcatcctcacacgtataaacacacatagtcacaaactcatttaggttagaaaggacttttaatgggacat

SEQ ID NO: 1599 - DNA, 121 bp, synthetic construct
  misc_feature 1..121: note = Description of artificial sequence: synthetic polynucleotide sequence
  source 1..121: mol_type = other DNA
attcattaggaaaacaaaaccgaagactcgcatgcacgtatatgtacacacacaaaatgaacaaatagtgggaagaattattgtaagtcttaagtcacaggaaatttgatttgcttcaact

SEQ ID NO: 1600 - DNA, 121 bp, synthetic construct
  misc_feature 1..121: note = Description of artificial sequence: synthetic polynucleotide sequence
  source 1..121: mol_type = other DNA
tggtcagatgcagtctgccagtgagggagctgtgataagggcactcaggaaacatcttgattgggtatttgaggctgcactgtaagcatgcatggccaggctgtggtcctgggggtggggg

SEQ ID NO: 1601 - DNA, 121 bp, synthetic construct
  misc_feature 1..121: note = Description of artificial sequence: synthetic polynucleotide sequence
  source 1..121: mol_type = other DNA
tgaaacattggctatgacaaaaatgttccctgatttgaaacaagttacatcctagaaagcaaggcaattactgatcctatgtaaggatgttaagtgaagacagattcaaggagaaaatggt

SEQ ID NO: 1602 - DNA, 121 bp, synthetic construct
  misc_feature 1..121: note = Description of artificial sequence: synthetic polynucleotide sequence
  source 1..121: mol_type = other DNA
gaaataaaaatgtctgatttatttacttagaaaggtggattggagacttctagattaacatgaatgactgaaaacatacagctaattctgcatcctccaaaaactccattacaacaacagc

SEQ ID NO: 1603 - DNA, 121 bp, synthetic construct
  misc_feature 1..121: note = Description of artificial sequence: synthetic polynucleotide sequence
  source 1..121: mol_type = other DNA
tcactaacactgttaaaatttctctatttcccccacccagaaaagtaagaaaacgaataatttagaatcacagataacttctgacattgtacaccaaatggggcacctattatttaaatag

SEQ ID NO: 1604 - DNA, 121 bp, synthetic construct
  misc_feature 1..121: note = Description of artificial sequence: synthetic polynucleotide sequence
  source 1..121: mol_type = other DNA
gagtgagaagcaggtaagcaatgacaaaaggaaggaccacctcagtccttagcaccgtgttaacacctttcatgtcccagtatatccaaagaactcaaacttgccttccttcttggccccc

SEQ ID NO: 1605 - DNA, 121 bp, synthetic construct
  misc_feature 1..121: note = Description of artificial sequence: synthetic polynucleotide sequence
  source 1..121: mol_type = other DNA
tgctattctttgctttttccttgggcttttccccccgtgtctcaatcatggacctcacaggtttcttggccttttcagaatcttcaaatttcttcatggtagtgggagcacggatcttact

SEQ ID NO: 1606 - DNA, 121 bp, synthetic construct
  misc_feature 1..121: note = Description of artificial sequence: synthetic polynucleotide sequence
  source 1..121: mol_type = other DNA
ttttctacgtgtggagaccgaatcagggctgtgtagagaaaccagtgcgcgttttgatgccactcattctgggttttcaggtctgctcatctgtttactagaaatgagtggttctggatga

SEQ ID NO: 1607 - DNA, 121 bp, synthetic construct
  misc_feature 1..121: note = Description of artificial sequence: synthetic polynucleotide sequence
  source 1..121: mol_type = other DNA
acacacacatgcacacacgggtggtgggaggcttattcccacctctcaggcttgctaaattggaagtttcacaagcttcctggcactttctcctggaaattgtgtgagaatgtgctccttg

SEQ ID NO: 1608 - DNA, 121 bp, synthetic construct
  misc_feature 1..121: note = Description of artificial sequence: synthetic polynucleotide sequence
  source 1..121: mol_type = other DNA
ggggaggcctcagaaagctgttactcattgtagaagaaaaagtaagaacaggtatgtcatgtggtgaaagtaagacctagagagagtgggggaggagacgtcacagacttaatcagatctt

SEQ ID NO: 1609 - DNA, 121 bp, synthetic construct
  misc_feature 1..121: note = Description of artificial sequence: synthetic polynucleotide sequence
  source 1..121: mol_type = other DNA
gcaaaatcaaacaagttaggagtggaccagacaagagggccttctctttcagttacgaatgcatctggcctgtgtccatggctagatcatatatctgacaatatcctcccttttaatgctt

SEQ ID NO: 1610 - DNA, 217 bp, synthetic construct
  misc_feature 1..217: note = Description of artificial sequence: synthetic polynucleotide sequence
  source 1..217: mol_type = other DNA
atcactcgtcggcatctggcttgacgtccagcatggcgtgcagctcctcaggggtgtaccccagcaggctctgcaggtcacacacaaagcggtacacgtagcgtttccccgctgtcttgtggatgatgtttttgtcgtaatagtagcgtaggccacggctcagtttctcataattcatcttaggtttgtttttcctctttccccatctcctggccac

SEQ ID NO: 1611 - DNA, 121 bp, synthetic construct
  misc_feature 1..121: note = Description of artificial sequence: synthetic polynucleotide sequence
  source 1..121: mol_type = other DNA
cctcatctgggtcagaaagtttgaattcccagccatctcctgtccagctgataaaagactgacaggatttatcagtgagtaattccagaagaaactgccatagctggattggtccactgcc

SEQ ID NO: 1612 - DNA, 262 bp, synthetic construct
  misc_feature 1..262: note = Description of artificial sequence: synthetic polynucleotide sequence
  source 1..262: mol_type = other DNA
cctgtgtagccagctagggcagcagcaggaatgacaggcttgtccttattgaggtcagcacggtcccgcacatagtccttgaaggtgcccttgggcttgtggttgggcagggcagccggatagtcctctgagtcgaagctgtcataggagggaacacgctgcaggctgttgaaagatgactggctgctccaggactgggtgaggcgatcacaactatcgtagctctctatgctttcaaaagagtcctggcccccgagtttac

SEQ ID NO: 1613 - DNA, 121 bp, synthetic construct
  misc_feature 1..121: note = Description of artificial sequence: synthetic polynucleotide sequence
  source 1..121: mol_type = other DNA
ccacgactggtcctccccatgcacatgttgtctggggtgacgacttcttgtttgatagcaaagtagtcattctgcaaggtgtctgtctggagagggtctcggagaatgaccgaggggtagt

SEQ ID NO: 1614 - DNA, 121 bp, synthetic construct
  misc_feature 1..121: note = Description of artificial sequence: synthetic polynucleotide sequence
  source 1..121: mol_type = other DNA
tacttgagggagaggagctcttccgagctgatgggatggagcgtctgataggactctgtgatgaagctgggctctgagaactccgatggtggaacacactgggcatgctcaataccatagc

SEQ ID NO: 1615 - DNA, 121 bp, synthetic construct
  misc_feature 1..121: note = Description of artificial sequence: synthetic polynucleotide sequence
  source 1..121: mol_type = other DNA
agaggggtagaaatgaacttactaatgaagtaatccgaggtatagcgggattctggataggctgggttgactccattaacttgatatggtttcacatcctctgtaatgaacagatagggaa

SEQ ID NO: 1616 - DNA, 202 bp, synthetic construct
  misc_feature 1..202: note = Description of artificial sequence: synthetic polynucleotide sequence
  source 1..202: mol_type = other DNA
cctttctgcaggatctctagatgttcccataagatgtccccaacaaagtctggggccagctcgagaaagcagtctttacccagggcgcagagggctgctccattcatacagaacttctggaagtctacacctttcaggctgaattcattcacagcccacatcacccagtcccgaacatgggtttctgtccactgccgggggt

SEQ ID NO: 1617 - DNA, 121 bp, synthetic construct
  misc_feature 1..121: note = Description of artificial sequence: synthetic polynucleotide sequence
  source 1..121: mol_type = other DNA
ccttttgggatccccagtcgttgctgttctttagtgaaaccactgaaagtagcttttaatgcttgagacatcatttctttgctgcttggagttaatagtgggacatctgcacattccatat

SEQ ID NO: 1618 - DNA, 121 bp, synthetic construct
  misc_feature 1..121: note = Description of artificial sequence: synthetic polynucleotide sequence
  source 1..121: mol_type = other DNA
cctcggccgtcgccactcacccggggaggggaaaagctccagatcgactttttccgtcttgatgatggtgagagtcggcttgagatcgacggccgccttcatggtgccaggagtgggggac

SEQ ID NO: 1619 - DNA, 146 bp, synthetic construct
  misc_feature 1..146: note = Description of artificial sequence: synthetic polynucleotide sequence
  source 1..146: mol_type = other DNA
cctgagacacagtgttcaagaccagtaggaacttcctgagttgccatctcatcccaaaaggggtagcaaggtctttgctggtgataattggactggaaaccacagttcattcgaggatcttcataagtgttgctaggtccttgcct

SEQ ID NO: 1620 - DNA, 121 bp, synthetic construct
  misc_feature 1..121: note = Description of artificial sequence: synthetic polynucleotide sequence
  source 1..121: mol_type = other DNA
ggggcagggaaggggccaccactcaccaccactgcaggacgaggcgctgagtaagggacggggctgctcccagcagaatccacaaagtagctcattctgctctcagcacctgtgtgagaga

SEQ ID NO: 1621 - DNA, 121 bp, synthetic construct
  misc_feature 1..121: note = Description of artificial sequence: synthetic polynucleotide sequence
  source 1..121: mol_type = other DNA
cgtagatgttctatctgatcctgtgtggctcttctcccataatctcagggctacattttgtactgtggagtgaccctcaaggccaggtgaaggcaggggctctcagcaggtgcttggtgag

SEQ ID NO: 1622 - DNA, 121 bp, synthetic construct
  misc_feature 1..121: note = Description of artificial sequence: synthetic polynucleotide sequence
  source 1..121: mol_type = other DNA
ctcacgaattagtgaatttattgtgaagaagtgaattagtcagggaaggtcaacttgcaaaataaaccttttaatttcagtatcctgatgataaatatatgttttatttcttgttatggca

SEQ ID NO: 1623 - DNA, 121 bp, synthetic construct
  misc_feature 1..121: note = Description of artificial sequence: synthetic polynucleotide sequence
  source 1..121: mol_type = other DNA
gaacaaaagtagtgatgctggccatttgaacatgcctaggagaagctgggaagtgctttcgttaagtgaaaaggtgagagctcttgacttaataacgaaagaataaaaattgcaatattaa

SEQ ID NO: 1624 - DNA, 121 bp, synthetic construct
  misc_feature 1..121: note = Description of artificial sequence: synthetic polynucleotide sequence
  source 1..121: mol_type = other DNA
ttggtagtgtgataagtcccatttgacacatgagacaattaggcacaaagaggttgaatcgcttgcccaaggtcactcagatatcaagtgggagagccagggttcaaattgagtctggcag

SEQ ID NO: 1625 - DNA, 121 bp, synthetic construct
  misc_feature 1..121: note = Description of artificial sequence: synthetic polynucleotide sequence
  source 1..121: mol_type = other DNA
ctgctttcccctaggagaggccttgcaggagaaacaagtctacatagcctgagggctcccagacataaagtttgaaagtcattggcttagtgaataagactatcttgctgtgaccatggca

SEQ ID NO: 1626 - DNA, 121 bp, synthetic construct
  misc_feature 1..121: note = Description of artificial sequence: synthetic polynucleotide sequence
  source 1..121: mol_type = other DNA
ttttactatgtcacaccaagacaaaattcagagtatacagtttgccaggtaacaatgtgcttgtgagcataatataaatcaatgtgtgaagttgggagtgtccagaagacccctgaatgtg

SEQ ID NO: 1627 - DNA, 121 bp, synthetic construct
  misc_feature 1..121: note = Description of artificial sequence: synthetic polynucleotide sequence
  source 1..121: mol_type = other DNA
tgtaggatgctgtgatgagagcccctatagtcagttcatgcatgaacctgaaaaccatgtgcaaaactgtgggacttgttctaataaaaatacaccagcacattttaagcaggagagcaaa

SEQ ID NO: 1628 - DNA, 121 bp, synthetic construct
  misc_feature 1..121: note = Description of artificial sequence: synthetic polynucleotide sequence
  source 1..121: mol_type = other DNA
tggtaggagtgcccctgggcacatgtgtgaaaatcaagaaacaacgtgtcactcactgtctgtgaactactactacattatggtgtggttgagtggatcaaataatggttataatgatgtc

SEQ ID NO: 1629 - DNA, 121 bp, synthetic construct
  misc_feature 1..121: note = Description of artificial sequence: synthetic polynucleotide sequence
  source 1..121: mol_type = other DNA
atttgccccagtttagcatttgagaatgcccgaccctaaagtttatttccatgtctgtgttaagaaatgtgccacctgcccataaatgagcttaatcacataagcacctagatgctttagc

SEQ ID NO: 1630 - DNA, 121 bp, synthetic construct
  misc_feature 1..121: note = Description of artificial sequence: synthetic polynucleotide sequence
  source 1..121: mol_type = other DNA
ggccacttgtgacttagtagagcaagaaattgggtgaatcatagagagttgacaatcaattgtggtgcataactactgcctggtaaacaactaaaatgaaaatgggaaagagacctgaaag

SEQ ID NO: 1631 - DNA, 121 bp, synthetic construct
  misc_feature 1..121: note = Description of artificial sequence: synthetic polynucleotide sequence
  source 1..121: mol_type = other DNA
gaaaaaaaaaatgttatggggggtatagctgcaaaggtagtaagggatattaagagattttggttgcagaatctgatcattgatgaaatgtgggagatgaagaataggagggagtcaaagc

SEQ ID NO: 1632 - DNA, 121 bp, synthetic construct
  misc_feature 1..121: note = Description of artificial sequence: synthetic polynucleotide sequence
  source 1..121: mol_type = other DNA
gtggtgggaatcagagggagacaatgttccctttcccctgtgaagagagtgctcagagacggctatgcgcgttgctcacggaggcctcccagggagttctggtggggctagcctttcccgc

SEQ ID NO: 1633 - DNA, 121 bp, synthetic construct
  misc_feature 1..121: note = Description of artificial sequence: synthetic polynucleotide sequence
  source 1..121: mol_type = other DNA
agaaactcccatgaaacttttcaactctcctaccgcccgggaccgcttcaggtccatcaagccctgatttctggtggtgaggccaggatacctgtgtattatcaataatttcactggtgaa

SEQ ID NO: 1634 - DNA, 121 bp, synthetic construct
  misc_feature 1..121: note = Description of artificial sequence: synthetic polynucleotide sequence
  source 1..121: mol_type = other DNA
tcttacaacctatgtggtagatgggtatataaaagctaaatgttttcaggaaataatacatggttgaatttaggccaaaatcaagttcttcaagtgattcatcttcatttcagctggaaat

SEQ ID NO: 1635 - DNA, 121 bp, synthetic construct
  misc_feature 1..121: note = Description of artificial sequence: synthetic polynucleotide sequence
  source 1..121: mol_type = other DNA
accgtacgggcaacttctgaagggataccaggagtgacagaatagtctctagcctgggccttcgagaccgcatacaaagagggcaaaggaattttacttctttagcttgccagctggatcc

SEQ ID NO: 1636 - DNA, 121 bp, synthetic construct
  misc_feature 1..121: note = Description of artificial sequence: synthetic polynucleotide sequence
  source 1..121: mol_type = other DNA
tgggaacttgatttaggaagaggaacacagctgttatggaaccagtctttgcagagctcacactgtagcataaacccactggctgtcttgcggcaaatgcaaaattttacttcttctatgc

SEQ ID NO: 1637 - DNA, 121 bp, synthetic construct
  misc_feature 1..121: note = Description of artificial sequence: synthetic polynucleotide sequence
  source 1..121: mol_type = other DNA
agcattctcttctgttaaaattgccactaattatgtgttttttctaaatcatattgtctgcttttctccaaaacagttgaataatgtactcattttcataaaattttagaaaaattagtga

SEQ ID NO: 1638 - DNA, 121 bp, synthetic construct
  misc_feature 1..121: note = Description of artificial sequence: synthetic polynucleotide sequence
  source 1..121: mol_type = other DNA
cagcaatgcatcgccttgtcagggtcctgcagcaacggtgcttacctgttacagtcgtgatggaagcttttgtttccacaaaccagtaaattctccagtctccctcacagagaccctgaac

SEQ ID NO: 1639 - DNA, 121 bp, synthetic construct
  misc_feature 1..121: note = Description of artificial sequence: synthetic polynucleotide sequence
  source 1..121: mol_type = other DNA
agtgcctggtctttactgcaggaaatgacgcaggaggacgtcgagatcatttgcaagttatttccttgtctctggccatctggatggctcataaggttgcttggaaccacgttagggtttt

SEQ ID NO: 1640 - DNA, 121 bp, synthetic construct
  misc_feature 1..121: note = Description of artificial sequence: synthetic polynucleotide sequence
  source 1..121: mol_type = other DNA
gactacaaaagggcatgaaggactttctggggtgatagaaatgttctagattttggttatggtggtgcttacacaggtatacatttgtcaaagcccttttactgaaccagaagcttaaaac

SEQ ID NO: 1641 - DNA, 121 bp, synthetic construct
  misc_feature 1..121: note = Description of artificial sequence: synthetic polynucleotide sequence
  source 1..121: mol_type = other DNA
tttccttcccagacagccctgagtgacacggacaagaggattcttgggaggggcctgactgaactgcagccacctaggcattaccagtgtggttgagaagacggtgagctgactttcacca

SEQ ID NO: 1642 - DNA, 121 bp, synthetic construct
  misc_feature 1..121: note = Description of artificial sequence: synthetic polynucleotide sequence
  source 1..121: mol_type = other DNA
actcaatgagaagatgatccattttttaatatgagcaaaagacatgaataggcatatcagcccagcagatgtacttaatcactaaaaaacatatgaaaagatgctccatatcattagtcat

SEQ ID NO: 1643 - DNA, 121 bp, synthetic construct
  misc_feature 1..121: note = Description of artificial sequence: synthetic polynucleotide sequence
  source 1..121: mol_type = other DNA
tgtgtcgatagcttgcacaatgggtagagttgatgaaggaaggcttcctagagaaagacagccatttactacaattccaaggagggggatgaagctatttggttggcactacataaagagc

SEQ ID NO: 1644 - DNA, 121 bp, synthetic construct
  misc_feature 1..121: note = Description of artificial sequence: synthetic polynucleotide sequence
  source 1..121: mol_type = other DNA
gacaactaagtagagatgtccagtaggcaactgcatatctgtgcctagagccctggaacgatctgggactgatggagatctgagaatcatcgtggaaagagcggcggaagccctaggaatg

SEQ ID NO: 1645 - DNA, 121 bp, synthetic construct
  misc_feature 1..121: note = Description of artificial sequence: synthetic polynucleotide sequence
  source 1..121: mol_type = other DNA
ctactacatgcagacaggcaggtgtgaccaagttgcacacagataaatacagtagagaatggaacaggccctttgaggtcatatagaacaatttcctcctttttttacagattaggaaact

SEQ ID NO: 1646 - DNA, 121 bp, synthetic construct
  misc_feature 1..121: note = Description of artificial sequence: synthetic polynucleotide sequence
  source 1..121: mol_type = other DNA
ctcagccccgccccctgcggccctctgccgtggcttccccctccctacagagagatgctgtcccgtgggtaagtcccgggcaccatcggggtcccagtctcctgttagttttggagggagg

SEQ ID NO: 1647 - DNA, 121 bp, synthetic construct
  misc_feature 1..121: note = Description of artificial sequence: synthetic polynucleotide sequence
  source 1..121: mol_type = other DNA
cagactagctgcacctcctcattccctgcgcccccttcctctccggaagcccccaggatggtgaggtaagggcctgccacccacggtagacaggaggcaagggtgcctggtgcccacggga

SEQ ID NO: 1648 - DNA, 121 bp, synthetic construct
  misc_feature 1..121: note = Description of artificial sequence: synthetic polynucleotide sequence
  source 1..121: mol_type = other DNA
tggtttcaccgagacctcagtgggctggatgcagagaccctgctcaagggccgaggtgtccacggtagcttcctggctcggcccagtcgcaagaaccagggtgacttctcgctctccgtca

SEQ ID NO: 1649 - DNA, 196 bp, synthetic construct
  misc_feature 1..196: note = Description of artificial sequence: synthetic polynucleotide sequence
  source 1..196: mol_type = other DNA
gggtgggggatcaggtgacccatattcggatccagaactcaggggatttctatgacctgtatggaggggagaagtttgcgactctgacagagctggtggagtactacactcagcagcagggtgtcctgcaggaccgcgacggcaccatcatccacctcaagtacccgctgaactgctccgatcccactagtgagag

SEQ ID NO: 1650 - DNA, 191 bp, synthetic construct
  misc_feature 1..191: note = Description of artificial sequence: synthetic polynucleotide sequence
  source 1..191: mol_type = other DNA
ggtggtaccatggccacatgtctggcgggcaggcagagacgctgctgcaggccaagggcgagccctggacgtttcttgtgcgtgagagcctcagccagcctggagacttcgtgctttctgtgctcagtgaccagcccaaggctggcccaggctccccgctcagggtcacccacatcaaggtcatgtgcgag

SEQ ID NO: 1651 - DNA, 121 bp, synthetic construct
  misc_feature 1..121: note = Description of artificial sequence: synthetic polynucleotide sequence
  source 1..121: mol_type = other DNA
agggtggacgctacacagtgggtggtttggagaccttcgacagcctcacggacctggtggagcatttcaagaagacggggattgaggaggcctcaggcgcctttgtctacctgcggcaggt

SEQ ID NO: 1652 - DNA, 121 bp, synthetic construct
  misc_feature 1..121: note = Description of artificial sequence: synthetic polynucleotide sequence
  source 1..121: mol_type = other DNA
ccagccgtactatgccacgagggtgaatgcggctgacattgagaaccgagtgttggaactgaacaagaagcaggagtccgaggatacagccaaggctggcttctgggaggagtttgaggtg

SEQ ID NO: 1653 - DNA, 121 bp, synthetic construct
  misc_feature 1..121: note = Description of artificial sequence: synthetic polynucleotide sequence
  source 1..121: mol_type = other DNA
cccacatctcagagtttgcagaagcaggaggtgaagaacttgcaccagcgtctggaagggcagcggccagagaacaagggcaagaaccgctacaagaacattctcccctgtgagcacccag

SEQ ID NO: 1654 - DNA, 121 bp, synthetic construct
  misc_feature 1..121: note = Description of artificial sequence: synthetic polynucleotide sequence
  source 1..121: mol_type = other DNA
ctcctctccgcccactcccagttgaccacagccgagtgatcctgcagggacgggacagtaacatccccgggtccgactacatcaatgccaactacatcaaggtcagcagtgtgggccacgt

SEQ ID NO: 1655 - DNA, 151 bp, synthetic construct
  misc_feature 1..151: note = Description of artificial sequence: synthetic polynucleotide sequence
  source 1..151: mol_type = other DNA
gaaccagctgctaggccctgatgagaacgctaagacctacatcgccagccagggttgtctggaggccacggtcaatgacttctggcagatggcgtggcaggagaacagccgtgtcatcgtcatgaccacccgagaggtggagaaaggccgg

SEQ ID NO: 1656 - DNA, 133 bp, synthetic construct
  misc_feature 1..133: note = Description of artificial sequence: synthetic polynucleotide sequence
  source 1..133: mol_type = other DNA
gaacaaatgcgtcccatactggcccgaggtgggcatgcagcgtgcttatgggccctactctgtgaccaactgcggggagcatgacacaaccgaatacaaactccgtaccttacaggtctccccgctggacaat

SEQ ID NO: 1657 - DNA, 156 bp, synthetic construct
  misc_feature 1..156: note = Description of artificial sequence: synthetic polynucleotide sequence
  source 1..156: mol_type = other DNA
gggagacctgattcgggagatctggcattaccagtacctgagctggcccgaccatggggtccccagtgagcctgggggtgtcctcagcttcctggaccagatcaaccagcggcaggaaagtctgcctcacgcagggcccatcatcgtgcactgcag

SEQ ID NO: 1658 - DNA, 121 bp, synthetic construct
  misc_feature 1..121: note = Description of artificial sequence: synthetic polynucleotide sequence
  source 1..121: mol_type = other DNA
tctgatggcacccccgtctttccccagcgccggcatcggccgcacaggcaccatcattgtcatcgacatgctcatggagaacatctccaccaagggtgaggggcacctgggggtttggggg

SEQ ID NO: 1659 - DNA, 153 bp, synthetic construct
  misc_feature 1..153: note = Description of artificial sequence: synthetic polynucleotide sequence
  source 1..153: mol_type = other DNA
ggcctggactgtgacattgacatccagaagaccatccagatggtgcgggcgcagcgctcgggcatggtgcagacggaggcgcagtacaagttcatctacgtggccatcgcccagttcattgaaaccactaagaagaagctggaggtcctgcag

SEQ ID NO: 1660 - DNA, 121 bp, synthetic construct
  misc_feature 1..121: note = Description of artificial sequence: synthetic polynucleotide sequence
  source 1..121: mol_type = other DNA
tccctctgcccacagtcgcagaagggccaggagtcggagtacgggaacatcacctatcccccagccatgaagaatgcccatgccaaggcctcccgcacctcgtccaagtgagtggccctga

SEQ ID NO: 1661 - DNA, 259 bp, synthetic construct
  misc_feature 1..259: note = Description of artificial sequence: synthetic polynucleotide sequence
  source 1..259: mol_type = other DNA
ggagcttggagtctagtgcagggaccgtggctgcgtcacctgtgagacggggtggccagaggggactgccagtgccgggtccccctgtgctgtctcctgacctgcaccaactgcctgtacttgcccccctgcacccggctgcagacacaaggaggatgtgtatgagaacctgcacactaagaacaagagggaggagaaagtgaagaagcagcggtcagcagacaaggagaagagcaagggttccctcaagaggaagtga

SEQ ID NO: 1662 - DNA, 121 bp, synthetic construct
  misc_feature 1..121: note = Description of artificial sequence: synthetic polynucleotide sequence
  source 1..121: mol_type = other DNA
cttttatcatttcaaacgtcctagggaccttaataattatgctaaatgtacctgccaatgctctatgaatgaaacaatgacgtctagatgaaagcacatttgtttatagcattgtttactg

SEQ ID NO: 1663 - DNA, 121 bp, synthetic construct
  misc_feature 1..121: note = Description of artificial sequence: synthetic polynucleotide sequence
  source 1..121: mol_type = other DNA
aggaaaaatgatatcagtgacacaataaatgggacaattgcaaacaggttaaagagagtcaagggttcaaagtatggtattttactcacatggaacatttcagtaatgtttcttttatgtt

SEQ ID NO: 1664 - DNA, 121 bp, synthetic construct
  misc_feature 1..121: note = Description of artificial sequence: synthetic polynucleotide sequence
  source 1..121: mol_type = other DNA
ttcaacacagttgaataccaatgtaataatattacccagagcaaaccaactctggagactgccagagcagcaataatttgatcagctgaggagatcttttgtctcttgacccaggcaatga

SEQ ID NO: 1665 - DNA, 121 bp, synthetic construct
  misc_feature 1..121: note = Description of artificial sequence: synthetic polynucleotide sequence
  source 1..121: mol_type = other DNA
gagaaaaggggataaaactggttaagctgagaagagtttttaaaatagagagtttatcatagagagttttactttcatctaaatataaagtcagattacttttatctattatattgagtga

SEQ ID NO: 1666 - DNA, 121 bp, synthetic construct
  misc_feature 1..121: note = Description of artificial sequence: synthetic polynucleotide sequence
  source 1..121: mol_type = other DNA
aggtggcccctggggctttccagcaggaggtgcctgaggctgctggggattgcctcctgctgggggtgggccttgtggctttccaggaggtgggggaccttgaggcttgttgccttcttgt

SEQ ID NO: 1667 - DNA, 121 bp, synthetic construct
  misc_feature 1..121: note = Description of artificial sequence: synthetic polynucleotide sequence
  source 1..121: mol_type = other DNA
ggacaaggcccaggagcaggaatgtgggctacacttttcttcatcaagctgaatcttggcaccctgtgtgttgtttgtcccaactgcagtgggcagagagggaaccaacacttcatgagca

SEQ ID NO: 1668 - DNA, 121 bp, synthetic construct
  misc_feature 1..121: note = Description of artificial sequence: synthetic polynucleotide sequence
  source 1..121: mol_type = other DNA
gtggaaaaaacctgagaacttcctgatctctctcgctgtgagacatgtctgagactcctgctcagtgtagcattaaggtaaaaatcttctcccctccttctacgtggtggaaaccctgagc

SEQ ID NO: 1669 - DNA, 121 bp, synthetic construct
  misc_feature 1..121: note = Description of artificial sequence: synthetic polynucleotide sequence
  source 1..121: mol_type = other DNA
actccagagccccagtcttagccacgtcagggtggtctaggagaactggatcgaagtagataccttacgggcaaaggaagccgaccacctcatggaagagtctggtgtatacaggaaaaga

SEQ ID NO: 1670 - DNA, 240 bp, synthetic construct
  misc_feature 1..240: note = Description of artificial sequence: synthetic polynucleotide sequence
  source 1..240: mol_type = other DNA
ttatttttaacagcaggaacgaatttcatatacacctccagagagcccagtgccgagttacgcttcctcgacgccacttcatgttccagtgcctcgagcgctcaggatggaggaagactcgatccgcctgcctgcgcacctgcgtgagtgttcgtgacccgagagggacagaggattgatggcgtggggcgggggtggcaggcagtgggctccaggccagagaggggcaagctctgaggt

SEQ ID NO: 1671 - DNA, 241 bp, synthetic construct
  misc_feature 1..241: note = Description of artificial sequence: synthetic polynucleotide sequence
  source 1..241: mol_type = other DNA
ggttttcacaggacttcgccacgctgctttggaatctttcacacccccctacccccagatacctttgaaaaatttgaggttcctgttccttgtttctcagtgtattcatttcttccctgactatgacatgttaaaaaaaaaagaaacctggaaacatgcagtatatggcagagccaactaaatctcctagtagacaagatgatttctgtgtgtgtgcaaagtttatctgtattctcaaatt

SEQ ID NO: 1672 - DNA, 240 bp, synthetic construct
  misc_feature 1..240: note = Description of artificial sequence: synthetic polynucleotide sequence
  source 1..240: mol_type = other DNA
cacgcttactcaactttaatattttctttggtcctaaattttgctcagtttgtgagtcagactcacttctgctttgtttttaagctgtgcgctcgtcctttctttccagggccctccctcccctccctgtctgtgctggctacttttcttcccttcgttttctaggcctgcataggtcctctctcttgcctcctctttccttcacctccactctctcttgcttctcttgtgcttgctttg

SEQ ID NO: 1673 - DNA, 241 bp, synthetic construct
  misc_feature 1..241: note = Description of artificial sequence: synthetic polynucleotide sequence
  source 1..241: mol_type = other DNA
cctcagcagctgcagtctgtagtggttccacctttctctcccaaatcatctctaccccttggcctaccacttccccgtctcagtcctcagctgcaacttggcagaggtttggggcccacacacctgtgctgctgatactggcctccaaagccgttgacacctgctgtgtcctttttgtctgcctttctcatactgccacccagctcaggtgataaaacaggattggggcagctggagagac

SEQ ID NO: 1674 - DNA, 240 bp, synthetic construct
  misc_feature 1..240: note = Description of artificial sequence: synthetic polynucleotide sequence
  source 1..240: mol_type = other DNA
tgaatcacctgattcccaccctcttcacagtgtccaagaaaatgccagcttctctgccttgaatgttatcctgagggcacaagactagcttatagaggacacttgaggtcaccttggcccttccagtgacttaaatggtggcacagtcttgctcaccatctctctccagcagggtgatgctctccagttcttctcctcctgttccaccctcctcagaaggttgctttctgaatgcagaga

SEQ ID NO: 1675 - DNA, 479 bp, synthetic construct
  misc_feature 1..479: note = Description of artificial sequence: synthetic polynucleotide sequence
  source 1..479: mol_type = other DNA
acaggagacagaggatgcaggttcttcctttctctctctggtaattcagggaatcagatgactgtgatatgggggctcctgggggaacactgccgccggcttatgccttctgccccagagggcagacggttgctgggatgtttgtgaggagttggaggcatgagaatcctttccctcctgcagcttgctgcgtccatcagtatttacgaagttgctgcctactatggtcaagacatttctgcttcatttgggcagggaagtaaaggacacagccctactctaccatcttttcctctacttttaaggaggttcgaactgtaaaggtgccagggtcatggctgggaacatcagtgttcttaggaaactggaatgttgtggcaccatgggagcagacacaactggaaaagaaacagcagccaagtgataggaaattttcctccagaagtcatcctgtgaccgatatattcacttcagaaata

SEQ ID NO: 1676 - DNA, 480 bp, synthetic construct
  misc_feature 1..480: note = Description of artificial sequence: synthetic polynucleotide sequence
  source 1..480: mol_type = other DNA
ttcgcctcaggatggaacatactcatgccacacaggcagaacacttctgctacctaattcattcatttattcatctcacaaatagttattgattgcctctgctgtgcccggcactcttctgtgtcctgggggtgcagaaatgaacaaagcagaaaaaactcccctgctcttgtggaacttaaattctagcacagagaaaaaaaaagtatcaaacactcatcacaaacaggctgagatttctttcataacgttttattcctatagattgcaacatcccccaaggaggccctcgctcctggttcacttctggatgccttgacatatggaagctccttaactatcttccacgagatgttatcctgacaaaacaaataagaaagcaaacaaacacactgaactggaggtcaggagatcttaacttttagctagttctgctgttcgactgtgggtaatttaactcagttctcctagcatacaata

SEQ ID NO: 1677 - DNA, 480 bp, synthetic construct
  misc_feature 1..480: note = Description of artificial sequence: synthetic polynucleotide sequence
  source 1..480: mol_type = other DNA
ctgtgtgttgacaagaaaatgtttaacagccttcctaactttaaagtactatgattctcatctgaggcatcattctccttgctttgaattgtttcttccatactaacacttgaattttttcttgagtagacagtttccttattgagccgtgtctgtgctgcttaccagcattttggtagtgccttctgtgtgcctagcacacaaccataatagctaatatttatcacgggattaccctgtagcaggcactgtgtgaagtcctttacaggaattcttttaattcattctcacaatacctgtcaggtaggtcttctttctatctccatgtcacacataagggcttagacaatttaagtaatttttcaaggtcgatcacagaaccagtaagagatagagtcaaggctcaaactcagttctggctgactccagagcctaggatcttatatccactataccaccaaaaagtgtgtgtttagtaaa

SEQ ID NO: 1678 - DNA, 478 bp, synthetic construct
  misc_feature 1..478: note = Description of artificial sequence: synthetic polynucleotide sequence
  source 1..478: mol_type = other DNA
tatttattggatggatggatggatggatgaattcagggttgacacttagccagtgttcactggtgtggccgtagcattggtttatggctggaatctattctaattgctgttctgtctgttctatctgttgttgaatggcttgcatatcacccttcgaaggatggatgggtccccacgtagacagctataaaatatagaactgcagcacattcccggaaacctttccatttcatcagtagttagactatggattcagattatggtaatgattttgcctgaatgcctactctatggcagtctaactttatatacctctccttggtagtctgcatgagacctattgtgacaccattggttctgacatctgtattgaatcctctggaagtggaggttcccaggctcttgctgtttgccctcagctgggactttccaaatgaggctgagcttctgtcctcccgctcccgtttcagggttctgc

SEQ ID NO: 1679 - DNA, 478 bp, synthetic construct
  misc_feature 1..478: note = Description of artificial sequence: synthetic polynucleotide sequence
  source 1..478: mol_type = other DNA
tgcttgtcatcctgtttgagaggagcatatagcccctacgatgactgaagctgtgccacacacttaaagatgcatcccagctgagtttccaaacctaaaagaaaataaatattctaaccagggaattgggttattgctgttttaatctgggattccagacaattcccagtggaatgctcatggaaagtacggggaagaatctcaaagccaagacaacagcgggacatttatggtattgctaagtccaaggcacttgtagctgcttattttaaagagatactcatcagattggtatgcctcaaagtgggttcttttcaccattttccattgattaccagataaatcctctcccttaattcttcctttctcttctttcattcttaaatcaacttatattcttgtggatgggggtaaagaggagcagagatcatattatttaaggttctcatacagagagtttctcaccattttattctgc

SEQ ID NO: 1680 - DNA, 479 bp, synthetic construct
  misc_feature 1..479: note = Description of artificial sequence: synthetic polynucleotide sequence
  source 1..479: mol_type = other DNA
aaacacagagctatacccaaactgaagacacagcatgacaaattagcaagttattgagaagtagagagtgatgccttttccttttatttgccagtgataaaagcaaagtgataaatggagtaaagtgttaagtgctgattagagaggacttgaaaaggactggcaaagaagcctgggcagagtgcaagaggagagcccagggaagaaaggccagaccgtgccatcctgctctgactcactgcccagattaccaggacagtgcccttcaacagtcctacagcagaacccctctgcttaccgggagagcaaacacaagtatgtttgttgagaggatagaaagggcatcattttttcttcttcttcctcttcttccataaagggtactgaattttttttgaagcttgagggtagaagagccgaagtacaattacagtagacaggtgggaaaaaaaaagttgcattctttaaaggaacataag

SEQ ID NO: 1681 - DNA, 241 bp, synthetic construct
  misc_feature 1..241: note = Description of artificial sequence: synthetic polynucleotide sequence
  source 1..241: mol_type = other DNA
cttttcattgtagcttgaaaacacttgaaagaccaaggacccccaagggtgcccaggcaaggtcactcttgactctacgcagagaagggctgttgctgggagcaaaggatacctttgcccagttctcaccaggggacttgtagtctcgcaagggagggatgttttctgatttgtctacccaaaggccgccctttttctaaactcatgggggagtggctgctgaagggggcagttacagcac

SEQ ID NO: 1682 - DNA, 240 bp, synthetic construct
  misc_feature 1..240: note = Description of artificial sequence: synthetic polynucleotide sequence
  source 1..240: mol_type = other DNA
ctcacgaggtgctgccagcctgctcattggcagaggcttaccttatgaaacactgggcctcagacagtgatgctcaggccccgccttaggataacaatataagtatagttcagattgatggggcagaatttaaataattaaatgtcgttattttaaatttcttttaaacatgatcatttcacatttagttgacattgcgccatttgcccgcagactgtgcattttgcagtgtccatttgg

SEQ ID NO: 1683 - DNA, 480 bp, synthetic construct
  misc_feature 1..480: note = Description of artificial sequence: synthetic polynucleotide sequence
  source 1..480: mol_type = other DNA
ccttctaaaatccctgtgaattatatttaaaaatcggaacgtaggactcattcatcatatttaatagggttagggtttatgatgttgcaggttaataaatagccataatagccgctcggcgttttctggagtcagaacaccagaaatagtcccttggctctctttcctttccttgtgaatctttcaaaattcttacattactactcctgcttgtgtgtgtttaataatttaatttaatgccttcctttggaaacattacctcgctgctcacccactcggctgttttgccttctcagcagagtaactgagtttaagacagccacgtgacaggcacagctatattagaaccagcatagtgagaagggatgcagtgcctctcttttctaattgggtagagcaacaattttatatgctttcacattatgtttgttcccaaaaaaaaagaggcaaaattgggagctgaacgtgatcatcattatt

SEQ ID NO: 1684 - DNA, 240 bp, synthetic construct
  misc_feature 1..240: note = Description of artificial sequence: synthetic polynucleotide sequence
  source 1..240: mol_type = other DNA
attttatatttttatacataacaagatgcgctcatacttattgtctcacttaattgtacagcagtccttgaagcaggtgctattgattctgtttgatgagctgaccgtgtctccgataggtcaactggattgtccaggttcacacagcatgtgaaaggccgaatgtgatttctacttcttgaaaccacctttcagcttttttaggagaaaacataatgacataaagagtttcatggactt

SEQ ID NO: 1685 - DNA, 239 bp, synthetic construct
  misc_feature 1..239: note = Description of artificial sequence: synthetic polynucleotide sequence
  source 1..239: mol_type = other DNA
gaaagtagaggcactgctgaccgctgaagtctgggcagccacaggtgcagggactgggaccggtgtggttctagtgatgccacctgatcatgaagttgtgctgaatcctcagcagactggcttctccctcgtagtaggatgagggagaggaatcaggataacagcctgtccctgtggatggtttattctggttttgttcaccagtcctgctgcctccccgtttgttctcttgcgagctc

SEQ ID NO: 1686 - DNA, 241 bp, synthetic construct
  misc_feature 1..241: note = Description of artificial sequence: synthetic polynucleotide sequence
  source 1..241: mol_type = other DNA
aggttagagttgaatttctccctacaaccagaatgccagggctggtcctgtaggccctgatgggccagctctgagagtgggctcaatccagtacccaattccccagcattttgctaggggtgcccttctaggagcagggtctcactgcttttggaagtctccaaataaaaaaccatggtaatagaaagggcttgggtctggatagacgtgaatggacttgaatttcagggttggctctatt

SEQ ID NO: 1687 - DNA, 241 bp, synthetic construct
  misc_feature 1..241: note = Description of artificial sequence: synthetic polynucleotide sequence
  source 1..241: mol_type = other DNA
agagagatgatttaacctctctaagactcaagtttctaacgacacctactaatgagggcttcttagaagtatcagagctcatttatgtatagcacctggcatagtgcctggcctgcagtggccaggtagctcaccaaagctccatttctgtttccggttatggtgaatagcctgttgaggaggtggcttccccatgcaggagccaagggaagcagacatgtcgttgtctgtgtgtttcatt

SEQ ID NO: 1688 - DNA, 481 bp, synthetic construct
  misc_feature 1..481: note = Description of artificial sequence: synthetic polynucleotide sequence
  source 1..481: mol_type = other DNA
aaagaaaggacctagggttctgtctgtgtattattgagactaatcttcctaagtcacaatggaaataagctttgctttcaaacgatcccctgtgatttccaggggctcagttttgctctagggcactccatcccaggaccttttcctacccacatgtctctccctcagtctggaactttcttcccgttctcgcctgaatctgtgaatctccttcagccttccccactcttctaatacctatcaagtcctcccctgtcctttgctatcacatcagtgttccaaaaatggcctctcctcacagctgcctgtgacgtgcagtgatatcaccagcagagttgagacaaggacaaggagaagagatttaattctctgtcagtgtcttacaaagcagtaatgacttctaacaaagccgaccagccactagcattttctactttgttcccccttaagccttcttttgggtgccttcactttttacatc

SEQ ID NO: 1689 - DNA, 480 bp, synthetic construct
  misc_feature 1..480: note = Description of artificial sequence: synthetic polynucleotide sequence
  source 1..480: mol_type = other DNA
caaatgcttgaagctttctactttccccgcggcacatgtggctgtacgagggccctggttagctgcttcaaacagcttgaagagcaaaaacagcccacagcagaacagccaggatgctttggaagggaaatttcctttttgggtttgctgtctgaaagaatttccgatgcaggcagacgttaattcctagctccatgcttcctgataaggaagcagcttcaataaatgcagctatttatagatgtctttttttttttaagaaaaaaaatatataaccagaggtttactgaccttttctttcacttcacatttcatgcagtgagctctgtgtacatttaaggcagttcctccagcgtcagctctgacaaagtggccctggtttcgctgtgggggatggggaggggaggatgaagatggcacggcccctcattagtgtcacgggctctccctttcctcagagttctgaagtagacatttgga

SEQ ID NO: 1690 - DNA, 241 bp, synthetic construct
  misc_feature 1..241: note = Description of artificial sequence: synthetic polynucleotide sequence
  source 1..241: mol_type = other DNA
aactgttgacaatgggttgtccctacctggtgctctgtgttatttatgtgagcccagaggtgcccagctttattctagactcaacactgaaaggttatagcagactaagagaaccctttaaaaaataaaagacgatgagaaccagtccattttatgaaacttgaacagcaacaggaaatcagaaactttatttccatttcttcttttcttctgtccgttgcttcctcttggattttcccaa

SEQ ID NO: 1691 - DNA, 240 bp, synthetic construct
  misc_feature 1..240: note = Description of artificial sequence: synthetic polynucleotide sequence
  source 1..240: mol_type = other DNA
ccctcaatacgtctgtggtctttctctcgtcttgatgggtttccgcagattgaggagttcctgtccatgagctccacagtcacccttacatgtatctacctaatgctttctggcaggtgtgataaaggttcagtgtgttggcttgaatgtgcttctctaagttacttctcacctcctctgattatcagaaagcattggttgagctgagtatatacaaatacagcagtttccatgctcaaa

SEQ ID NO: 1692 - DNA, 241 bp, synthetic construct
  misc_feature 1..241: note = Description of artificial sequence: synthetic polynucleotide sequence
  source 1..241: mol_type = other DNA
taactgatattttctcccattttgcttcatgtgtgagttacaccacattagtaattcaaacttttggggtttctggcaggatgaccttgacaacttcatcagaggtaaacgttagcagcgacgtttagatgttgctgcttttgctgttgccatgggtggattctgattctcagttgcctgtaccatgtgtgagtgttttgtggttcatttttctgatctcttctgaaggaggggtagagca

SEQ ID NO: 1693 - DNA, 239 bp, synthetic construct
  misc_feature 1..239: note = Description of artificial sequence: synthetic polynucleotide sequence
  source 1..239: mol_type = other DNA
ggacttgagagatttaaactggccctggctctggccacatgctgactgtaaattcccaagtataattagtcacactgccccaatatttactgcctccatcttgggtgtgtggacaaaaccccattctttcaacattggtctccatttctgcttccagcagatcatggataccagtagctctcaaatggggctgtaagattccagtaatagaaatgcagatgatgggtacggataatgga

SEQ ID NO: 1694 - DNA, 478 bp, synthetic construct
  misc_feature 1..478: note = Description of artificial sequence: synthetic polynucleotide sequence
  source 1..478: mol_type = other DNA
taaagaactgtagatgtggggtggatgacgattggatacctagaagggaaagttgactgcacagggctacgcagtgaataccctattttaccaggtcagctgaggctaaattctctacttctggggtgggggtactaactgaaatggttcactgaggagggtgaaggtttgtaagggaagatgtaacaatacttttttaaaagcacctaggacaagttttagggtgttgaatagcaccatttaaaaattataggggtatccagcaatttatggagctctgattgagaagtatcattgttaggattttattacccatttgttttccagaagtagctcatctttgcaaatgagctttagttttttggtcattgtaccctacctgccagctcacaggagcctgtgtttctccttaggagccactctgaggtcaaccgtgtttaagatcataaagccactctagagaatctctgtggcattg

SEQ ID NO: 1695 - DNA, 241 bp, synthetic construct
  misc_feature 1..241: note = Description of artificial sequence: synthetic polynucleotide sequence
  source 1..241: mol_type = other DNA
ttgtgtggaagaagaaataatgatcactactattattatatatatgtgtgtgtgtgtgtgtgtgtgtgtgtgtgtatataaaagtatatgtgtgtgtgtgtatatatgtatatatgtgtgtatatgtatatgcttcatatatattatcctgaataataacaaactctgcacagtagatattatacctgaggctcaggtaaaccacttgcccgaggtcacccagagaaagtggaggagcccc

SEQ ID NO: 1696 - DNA, 241 bp, synthetic construct
  misc_feature 1..241: note = Description of artificial sequence: synthetic polynucleotide sequence
  source 1..241: mol_type = other DNA
aatttgaatccgtatctaattccaaaacccagacttttattttccacttcaccctattactctttaaaagtctgaggagcaaatgaaagttgtttcattctatctattggttagaaggagaatatccaagctaacaggctgatttttttttccaatttttaagcataatataaattactgacaagagggcccagatggataaaatcagagctataaaccaaattatcttttgaacttgaag

SEQ ID NO: 1697 - DNA, 480 bp, synthetic construct
  misc_feature 1..480: note = Description of artificial sequence: synthetic polynucleotide sequence
  source 1..480: mol_type = other DNA
gaagataaatttccatatccaatcctgtatgcacactgttatctgccagatagtctcaggtatgtgtgtaaattctggagtgttagaaacaaaactaaatgaagtaaaaagaggttccttgtctattattttccatcttttttaaagagatgatctacctcacagatggttattaaacagtaagaaagatgctgtgattgaatgaagattgtgttactgagtttacaccttaaaacactgaacttcctgataatttgtgttaagccaacacgcttcagaaaaattgcctgacgtttggtgccttagtttacccacatggcatgtgtgccagaacacgctacaacagggtaagagggcagagaacatgctcttgtaggggtcagttccttgagctctggttctacgtggctgattacttgggtcatcccagcagttcattccatctctcaggactgtggtttccacatctgcaaagtgaaa

SEQ ID NO: 1698 - DNA, 240 bp, synthetic construct
  misc_feature 1..240: note = Description of artificial sequence: synthetic polynucleotide sequence
  source 1..240: mol_type = other DNA
tggcctgagtatatgattcctaagttctccccaactcaatcgtcgcattgttctcttattccagaagagaaacacaaggggtatcagcagtggaacattatctgtaaatgccagatttcatgatcattcacttgatttttaggactcaacatcaaattttagtgcagatggtggtactttcatgacacaggaaattgtccttcgttttacctgtgattgttttgggaggaagccctcctg

SEQ ID NO: 1699 - DNA, 241 bp, synthetic construct
  misc_feature 1..241: note = Description of artificial sequence: synthetic polynucleotide sequence
  source 1..241: mol_type = other DNA
caaggaaatagggaaatccaacacccagctctgttgagcatttccctatggttcctgtgattgaaatcgggttaatgcttttgtgggatgagaactggtgccagctcctaggccttgcagggcttctaaagactgtccctgccactcttgccttatgctggttcccaggaccttacagccagatcacaggcctgctcccctgttctcatagccccctttctggcctgagaattgtctgtgg

SEQ ID NO: 1700 - DNA, 240 bp, synthetic construct
  misc_feature 1..240: note = Description of artificial sequence: synthetic polynucleotide sequence
  source 1..240: mol_type = other DNA
cttggccctttgccccatgcaacatgcacaggtgtggcttctgctaactatctacttgaccccaactgtgtgattagcggcaatcccctctgcaactcaaggcgtgtttgcctttcctgtaacctgtaaaaaatttcagtctgcgtttttctccctctggagatggtatccactgggttttaggctttacagagccagctgatctgcgtggatgggccacactatcctcccttagccggc

SEQ ID NO: 1701 - DNA, 240 bp, synthetic construct
  misc_feature 1..240: note = Description of artificial sequence: synthetic polynucleotide sequence
  source 1..240: mol_type = other DNA
tccgtagcacatgcacaattaatactgcattaattaattatgggagaaaaaaagcacagttggcaagggaatgaaggctttcagcttctaaagtgaaggctttgatgctgagcttgaaagtacatttccatccgcctcagccagcagagagaatctgtgacacttataccatcccctgggcatgaaaactcacacccaaggaaagtatttctaaatagaggccctcaactagttgctgga

SEQ ID NO: 1702 - DNA, 240 bp, synthetic construct
  misc_feature 1..240: note = Description of artificial sequence: synthetic polynucleotide sequence
  source 1..240: mol_type = other DNA
atcatctactcattgccatgggctgtgaaaagggggtgtaagattagggagaaaagactcgcccaaagcagcagtgattcgtgaccaaagctgatgaggggttttattttttctccttaagtagctcttaagtcaccaacatcaggaactctttgtagagaaacaaatatgagtaagtgatttggtgccagccctcttgaggacataaaatgactctttctccttcctcctcctcctcgc

SEQ ID NO: 1703 - DNA, 241 bp, synthetic construct
  misc_feature 1..241: note = Description of artificial sequence: synthetic polynucleotide sequence
  source 1..241: mol_type = other DNA
atgccttgcttcaggaaggaaccctaaggtggtgcaggttcccaaacctgttattcggatgggttggaaggttcatctctgttaggcatggtttcccactagatatgaacaaagtcggggagaaaatgctttcctttttcattctgattccttcacgccattgttcttgaactcctcagctcccacactgactcctttcacttctcctatgaggtggtagtgaagccacctcacaaagtcc

SEQ ID NO: 1704 - DNA, 241 bp, synthetic construct
  misc_feature 1..241: note = Description of artificial sequence: synthetic polynucleotide sequence
  source 1..241: mol_type = other DNA
cctctctgaacagacgcagttctcgttcccctatttacaactctgtcaagcatttttcgtgggggctcttgctgaccttaaaatttggccgtgattcaaatattcatccaggtatctggggttttattaaaggtcttttaggaacacaaaagtaggaattccctgagagaggttttcttcacttgagactcatgggttataaatgaaactactggaatgccctgaccaagtgctgagagga

SEQ ID NO: 1705 - DNA, 240 bp, synthetic construct
  misc_feature 1..240: note = Description of artificial sequence: synthetic polynucleotide sequence
  source 1..240: mol_type = other DNA
gcttcagagacccacaaaaacctaaaaagatgtgaaatttgtctctgatcaaatagattttggaccttatgaaagaaaataagcttttcttttgattcttagagaaaaatttttgcttcagatgaatccaagtgtgtgtgcacgcacgtgctttcgttgggatcgtcttatagctgttattccagatacctgcttcacaaagcttctgtgattattcctactactgtgacgattcctgcc

SEQ ID NO: 1706 - DNA, 479 bp, synthetic construct
  misc_feature 1..479: note = Description of artificial sequence: synthetic polynucleotide sequence
  source 1..479: mol_type = other DNA
accccagtgatcggggaaaagaacttgaaatacaactgggtattgtagcattggcactgtgcagacgctgtgtagctctctcatgtctggtacttctttgtttgctaaaggagtattgagattcagaaagtggctgccttctaaacctttattgttcagatagcattactttggacccaggacagagggcttatagttgactgtgaacggggtgaatgttatacttaagcagggaatgtggtcacccagttgcaatgatttagagtgctttgaacataaatatctcccacgatgaatgaccagggtgcctgaaattccattgttgagacattccttttggatcaggcattatttccacatagctccacttttaaaagtaaatcattatggcaggagatagttatggagagagataattaatacctcaagtccctaatatcttaatgaaaattagcttatcagatctcctgaattttttg

SEQ ID NO: 1707 - DNA, 240 bp, synthetic construct
  misc_feature 1..240: note = Description of artificial sequence: synthetic polynucleotide sequence
  source 1..240: mol_type = other DNA
aagtggaaggaccgtggccagcacggagtgggtagagttggaaataagcactataatttgcttagggctggccttctctgtggataagacagatggaaaactagatggaaaatccaggcctcctgatttagacaaaacattgtgagcctggagctctgaggccaggatgagcagtctgctacttactgtgcgtggccattgctctcaagacattgccatcatcagtcttggccaaagaag

SEQ ID NO: 1708 - DNA, 241 bp, synthetic construct
  misc_feature 1..241: note = Description of artificial sequence: synthetic polynucleotide sequence
  source 1..241: mol_type = other DNA
gtcaggtctcctctagtacactggcgatttgagaatgtgcaagtcatctgcatttctttgacaggagtagtgaatttgggagtataaatctgaatccttaagcctttcaaccattctcactaaatgtctttacttcagggatgatcacgtttgatcgtaatgccaagatcttgcagatgtataaagggcatggtaatccaagtcttgagttgaagtaagtggtcaggaaaatcttgaccct

SEQ ID NO: 1709 - DNA, 241 bp, synthetic construct
  misc_feature 1..241: note = Description of artificial sequence: synthetic polynucleotide sequence
  source 1..241: mol_type = other DNA
tggggaaggagctaccagagctgggtggcctatgtgtgtgtgacagggaggaggtgtgcagaatttgggggaaagatcctttgtagttctccatgtggaataataacttccatttattgagtgcttatggtaggcgcttttcacatgtattgtatcatttaaccctctaggcagtcctgtgaactgggttttattatcctcatcttactgatgaagagtcaaacttaaagaggaaaaggaa

SEQ ID NO: 1710 - DNA, 241 bp, synthetic construct
  misc_feature 1..241: note = Description of artificial sequence: synthetic polynucleotide sequence
  source 1..241: mol_type = other DNA
cttgaccagagtcacagaggtggtaggtgggagacaggtccatccaatatacaccttgccttccaatagaagccaaagccctattgcctaatctcttcactttaagaacatgaagaatagtgttgagttcccctttgagatctgactgtggttaaagcttcacaaatttcagaaaaacagaataactcactaaaataaaaatttaaagctaccccacagaaaacatctaccacaacccaaa

SEQ ID NO: 1711 - DNA, 241 bp, synthetic construct
  misc_feature 1..241: note = Description of artificial sequence: synthetic polynucleotide sequence
  source 1..241: mol_type = other DNA
acttcagggtttatatatccagattttagtgaactatatgactctccctagtcccttgctctgtctcctggtaaatactgtccctttcagagccctggcacatacatagtgtaataagatcagaccccatccccctaccattccaatgcaatctaattgcaaagtgaaaatccagggccgtcttagatcctcatctgtctacgtctctcttggtccccactgcttgatacgcagtctcagg

SEQ ID NO: 1712 - DNA, 239 bp, synthetic construct
  misc_feature 1..239: note = Description of artificial sequence: synthetic polynucleotide sequence
  source 1..239: mol_type = other DNA
ttcaataccattctctctttttgtgctttaggtctctgtattgtttccttttcaccacttttttttttttaatgaagtgattttaaatggaaaattaaaaacttaactgtgaatctggcagtttcctgctaatgcctctttgctaagaagcttcataaaatactgtatcttattcacttcagcacagctgctgtgggctctcaccacttaaccattcacaatatgtctgagagattaat

SEQ ID NO: 1713 - DNA, 478 bp, synthetic construct
  misc_feature 1..478: note = Description of artificial sequence: synthetic polynucleotide sequence
  source 1..478: mol_type = other DNA
ttttgtaaggctgtggtttgagatatctcccccttccttgttttacttaaaatcctcagtgggaaagcgtgcatggggaaaaaaaaaaccaccaccaccctggataaaaggtactttggtaacatacgtgctttaggaactataatttgtcattttattttcttgtgccctcttcatttgaaatgctgcagcctttctgccagaagtctcaagtttgtgtatgagactgagggggaaacgagagtaggtaccttgtgctgagactgtcctgggacagtcccgtggtgggtgtgagcgtctgtgtgatgcaggtatgcttatttcttcatgaaagccgcaggtactggttgcctctcgcagggttaaaactcttggcggctcacaggaggtgatgaagagcaagggcacgggagaatgaagaagcaggaggaaggtgtgggccagggtcggtttcggtggggtccccacttgctgggtg

SEQ ID NO: 1714 - DNA, 480 bp, synthetic construct
  misc_feature 1..480: note = Description of artificial sequence: synthetic polynucleotide sequence
  source 1..480: mol_type = other DNA
aaagctgaactgtttatccacacatcccagcagcagcagaaagccaaggggtgttttcaggactcagctgccaaagtttcttgaagcagctctgctcaaaggcatatgctgggctcacttctgagggaaatttcctttttggggaagttgaagcaaaggaatttcctgtgtgggcagacagagcttcctgacttgaaggcttcttggaagggaaacagtttcataatgaaatgacaaattaaagacataccagccgggttcacttcaaaacagctattgagagtgcaggcaaagccctattatactccctcacagaacaaaaataaatcccatcctgacaggtttctgtatgccggattatatccgtccccccacacctttcttcacagccttcttcatgcttcccttcctcccacccccgccattagctgccaccagctccatcttgaacagctctcgagagcagccggcagccaggcc

SEQ ID NO: 1715 - DNA, 241 bp, synthetic construct
  misc_feature 1..241: note = Description of artificial sequence: synthetic polynucleotide sequence
  source 1..241: mol_type = other DNA
gggagcctgtttcttgctcccttgctttgtggctttgcccatccctgacctgcgtggaggccttataggttatgtgacagccctatgctgccaagacacagaaatgacctctttccttccccttttgacataaagcaatgattgaagacgtcttcagcaatggggtgggggcgggcagtcaggggagaatgcagccatttcctcaggccggcctttaaaatcttgaaggcagtaaatgtaa

SEQ ID NO: 1716 - DNA, 241 bp, synthetic construct
  misc_feature 1..241: note = Description of artificial sequence: synthetic polynucleotide sequence
  source 1..241: mol_type = other DNA
gtgctattccggtcttgggagctgggtctgaattctttgctttgttgaaggaaatagggctctgtgctgggtggacgatattcttgtacctgaacatgtcattttcttcagttccatcagcctgcatgtggtgctttgttttgtttctgaaattgacatgatgatgccttaggaactaaatttttttctttaatggaacaggctaggagaaagaaggatggcggtatcatttggggcgtga

SEQ ID NO: 1717 - DNA, 240 bp, synthetic construct
  misc_feature 1..240: note = Description of artificial sequence: synthetic polynucleotide sequence
  source 1..240: mol_type = other DNA
gaacagtcattattaattaggcttaagttaatgaaataaaaaaggcacaggctttgaaatcagttgtctaaatttaagggccagctctaacaatatacaaccagcaatgtaaccttgaacaagtcactgaacctcccagcctcagtttccttatctctaaaatgggtacagtcatacctttttcacattgttgtgaggaaattagattatgatttcagaggcactttgtgaattcctata

SEQ ID NO: 1718 - DNA, 240 bp, synthetic construct
  misc_feature 1..240: note = Description of artificial sequence: synthetic polynucleotide sequence
  source 1..240: mol_type = other DNA
agccttcatacttcttattaaaccactattgggatctctggagactgaaatatagtattaggctaagacagcagaattgtagaatttgtagatcaatttggcaaatatttagtagaagtcttctatgtgtgcagcatggctcgactctgtgggggaaaataaacaagtggaaagtttcaggtggccgcatggtatagcagaaagaatattggacttggggccaggaggccagggttcaat

SEQ ID NO: 1719 - DNA, 479 bp, synthetic construct
  misc_feature 1..479: note = Description of artificial sequence: synthetic polynucleotide sequence
  source 1..479: mol_type = other DNA
cctggctgtcactcagttgcctgtgacttggtatgaactgtttaaccttgatgagcctcagttgctcatctgtaaaactgggagaaatcaaactctatgaccttaataaactctgtccaactctaacattgtataatcagttttaagaggtttttgcctttagcagctgtttataggatttattctaaagagtagggaagaaatattcattgtataagagcttgtctgatgaagaagattgcatgaaaaagctacacttttttaataagtatatctgatgtaaacaggaaaaatgggtgcttgccagatatgtcatctatagcaacttgttttgagggggtctctgaatgctgacatgaaaatgactaggatcatgggttgaacgtgagtttgctcaagagaaggttctcttggggctttggtttacttcctcccagctgctccagggaacactcaggatatttccaaatggctgctca

SEQ ID NO: 1720 - DNA, 481 bp, synthetic construct
  misc_feature 1..481: note = Description of artificial sequence: synthetic polynucleotide sequence
  source 1..481: mol_type = other DNA
tttaagccattcccgttatggttctccttgtccaaattggcttccatggtacagtcccagtgttgactggttctgctaatttgattctttttttttttaatgtgctgatatgtagttttaggactgctgcattattgttcctctatctttccgtttgtattagtaaagaactattagcaattttgcctcagtcttctaagcacgctttttgattggagaaaaccaaggtaccagaaaacttagataccatgtggaaagtcacagtttactgggtgtgtactatgtgttactagtgctttaataaatttcctcattaattttattctcccagcaagcctggcaggtagctgatagtatctttgctttacacatacagaaactagggcttagagatggtaagtaattgggtcaaggccacagaactggctggtagcagagccagaatttgaactcatgtctgcctgctccaaagcctgtgttc

SEQ ID NO: 1721 - DNA, 480 bp, synthetic construct
  misc_feature 1..480: note = Description of artificial sequence: synthetic polynucleotide sequence
  source 1..480: mol_type = other DNA
tttatcccctcagtgcacccctactgttttgactgctgttaaattgaccttatgcttagaaccgaagtcaaacccgtaccagggctgcaaaaagaaacaaaattaacctcatagtctgcatactctcgaaatggcaaaaaagcctgcaactttccgttgtggaaaataatatacctgggtgataaactgagcaaacatcacccttgcccttgcctctgaaagagagcctgttctagttcatcctggggccagcttggcctggaaccccactggccagctctgtccacaccttgcatattaggacagaaatctgcctaccacattccagctacataaagaaggtggccagcacctgactgcctctttctccttgtgaaattccttggaaataccatttgtgactgcttgggcttgttctgaagaaaattcaaatcttgttctgtttaacaaggattgattgaagaacccgtaggctcagtg

SEQ ID NO: 1722 - DNA, 479 bp, synthetic construct
  misc_feature 1..479: note = Description of artificial sequence: synthetic polynucleotide sequence
  source 1..479: mol_type = other DNA
ctagtacaaagataagcaaggaaggaactcagaataagagagaaaaaacttggataataattatcaaaaccagtatttattgagcacctactgtgcccagtagagtagtaattacaggaggtaaatatctaaaacttacatagctcttcacagaacatacatctgttcttgcttctgtgtttgattttattagctttcctctgtacacataagcttttagtgtatgtcctattattgaagtccagagttttattatttttcacttatttgggcatagatagttccagaatttacttgtcttcctcattctcattgttaatctcatttttcttccctggagaatatggactttcaaaactatttttcaatcaaggccaaaatatttcttaaaattcacttctatttaaaacacagataacatccaggagaaaatctgagaagaaaaaaaaaaacgattttgatggtacctgattataaaa

SEQ ID NO: 1723 - DNA, 481 bp, synthetic construct
  misc_feature 1..481: note = Description of artificial sequence: synthetic polynucleotide sequence
  source 1..481: mol_type = other DNA
gactcacagtactaagttattctttggcacgtgtagcaaaatactatgtaggtgtcatttcgagttcatagtaaggggagaaatggtgtcatttttcctgcagagaaatttaatctttcactttaatctttcattggcctatagcagccagtggggtcttttaaaaaattcttttccttcatattccccgtttgagcttaaggtacaaaaaaagaaaatactcttgaaatgctgtgaccagatctagactgtaacatgccccttcactcctctggtgaggaagtgcgggaaggtggaagacattgaggggttgattatttacttcgtttggaagtaagaagggaggtagctcttatttggaataagagctgtcttcagaacaggtgtgtgctctcctgaagcccagagctgtgactccctgggtgtgtctcttacctgtgcccttgggcaggtggcacgggagaagaatacgataagagga

SEQ ID NO: 1724 - DNA, 480 bp, synthetic construct
  misc_feature 1..480: note = Description of artificial sequence: synthetic polynucleotide sequence
  source 1..480: mol_type = other DNA
ggatggtacagacagaggagtcacaggctgaacaggctgtcaccggggcaagatgactgacaggtggatggaattcaccatcctttcctttcaatcaaaaaaaaggtagaaagttgctcataagtaagtttgagttatatcatcttcttcatagccgttgctcttcagacacaggtgctggtaatcaggaaaatgcaaggaaacagctctggggaaaaggaacaagcctcgttggccttgagagccccagtagaccatcaggccttgctttggatattgggaggtgacagtgccttctcacgtgcctgacagtttccctgcaccaccaagactctgtgtgactgaggccgtggcccgggtttcaggatgggcattcagaggaaggaagttccccctccttcacttacctcacgcttactagatgctgggttgcctatgcccatgttaaaggaagccagataactttctgtccccatgtga

SEQ ID NO: 1725 - DNA, 241 bp, synthetic construct
  misc_feature 1..241: note = Description of artificial sequence: synthetic polynucleotide sequence
  source 1..241: mol_type = other DNA
tccaggcccatcctgaagcctgggggttctgaacataagtatggcggttgcagccttccttctgtgacttctggaattcctgacagagagggtcatatctagccactgtcaaccggatgctagacttgttttgttaggcccttcctccttcccttcctctacttatcttccaataaccttaggatttggaggaaattaaaataaaccttcttctagaaaggtgtcagggacccatgcacaa

SEQ ID NO: 1726 - DNA, 121 bp, synthetic construct
  misc_feature 1..121: note = Description of artificial sequence: synthetic polynucleotide sequence
  source 1..121: mol_type = other DNA
atgtagcctttttgatgcttgagaaagaatgcctttttgacttccgtgaataaagaataagtcacggctaatgagtaagtaacagcacgtgcctgtggtcccagttattcaggagactgag

SEQ ID NO: 1727 - DNA, 241 bp, synthetic construct
  misc_feature 1..241: note = Description of artificial sequence: synthetic polynucleotide sequence
  source 1..241: mol_type = other DNA
ctatgcaatggctctgaggcaccctcatggttgatccaatggccttgcctagtgattttgacatgctttaacttgtgaccaacatctagtctatttgtctcccattagagactggttgtgacagcattgccattgacctgccatatataggaactccagtgtctgaaaacatagcaggactttgtaggtattaacattgagcagtgctttcacattttacagcttaccgtgatgagcaaga

SEQ ID NO: 1728 - DNA, 479 bp, synthetic construct
  misc_feature 1..479: note = Description of artificial sequence: synthetic polynucleotide sequence
  source 1..479: mol_type = other DNA
tattgtgtcaaaaatagtgcattgcagatatcaataagaggtagggtaggcagtgatttcagtggtgtcccactccacactgtaattttgtttctttggtcaactaatgtaagaactgagtctgtaactctaacctagggagccattgctgtgtgtcaactttgttgctttaaaatcttgagacaccttttcagtatctcccactttgtctgagtagtcatacttttaatgatatttaaaagtcaaactctaaatactttggagctaaatctcagcagagataaacttcaaactggtgggagtgggggtagagaaacccttctgggagtcagaatgagatacttgtgtgtctggactggtggcaggtttgtatgttaccagagtgatctccatggtaacggatcaacatggcgccaatgacaactctacactaagagcttcaggttcccatgagaaagtggatcctcacagcaaatagg

SEQ ID NO: 1729 - DNA, 478 bp, synthetic construct
  misc_feature 1..478: note = Description of artificial sequence: synthetic polynucleotide sequence
  source 1..478: mol_type = other DNA
aagaaatcaagaaatatggatccacactccccttccctgtagaattctggccgtgaagtttcagttcatataaccaacaccatgtcctatttaaccacttgggtccctctgagtaaaccaagactcttctgagaatgcagtgttctctcagatttcaactaaattcatacaaagtttaatcagacttgcatagcaaagaactatattgcagtggagcaagaatgtaacttggagtcaggaagcctggcctccagacccagctctgacactgtgatatgaggaaatcacctcgcaggttcttattttccagattctcaaattcccaccagtgctgatggtcaatcatccaattatattgaaagcccttagtatgatacatcagcagtaggaaaggtagatgactaaatataatacagtgtgccttttcctacaccatcaaaggtatgataatgttgtgatcatgtgtataaaaactttc

SEQ ID NO: 1730 - DNA, 240 bp, synthetic construct
  misc_feature 1..240: note = Description of artificial sequence: synthetic polynucleotide sequence
  source 1..240: mol_type = other DNA
agacacctaaaaagtagaaggtgtgattcatctctgttaaagcttaatctctgagcataacaaccaacatctggaagctaggcagccaacagaggggttaatttttctggaaccttggttgcaaaaggttattagtttgcagaaagactcagagatcactgtttatcttaaaccacaagagaatgtttttgaattcagaagaacagtgatatagttcggtaatttcatgaacctcttccc

SEQ ID NO: 1731 - DNA, 240 bp, synthetic construct
  misc_feature 1..240: note = Description of artificial sequence: synthetic polynucleotide sequence
  source 1..240: mol_type = other DNA
tgggaaaccttatgactcaacagtcaaaggtgtccgaatagtaaagatggttttcagtgatcaggtctgtgcccatgcctggccttggatagactctgaaatgagattctttgtttgattgatggggtgatggtttctgttgtgtacatttgaaggaaaccagtttccccacccaaaatttctaaggagtttaatctttggggtataggggagttaaactacactgagtcaaggaagtaa

SEQ ID NO: 1732 - DNA, 361 bp, synthetic construct
  misc_feature 1..361: note = Description of artificial sequence: synthetic polynucleotide sequence
  source 1..361: mol_type = other DNA
ttgattgcatatttcctctaaaagtcagctatggacttgatattgactaaaacaaactagcagttctcttccaccaccaagtcagagcgtctgttcaccattctgcatgattaaaagaacaactaagaatggtaatgctccatttaaactttccttgtgattctctctggtctaccttcaatcaacaaaagcctaaaatttttattttagaatcatgatgttggaagatctttagattgctcataccataaagctgtttctaagattggtctcgggaaggtccaagatcaggattgaagtatgaaaaatcttggccaggtgcagtggctcatgcctgtaatcccagcactttgggaggccg

SEQ ID NO: 1733 - DNA, 360 bp, synthetic construct
  misc_feature 1..360: note = Description of artificial sequence: synthetic polynucleotide sequence
  source 1..360: mol_type = other DNA
aaaaaaaaaaaaatgaaatcttgatcttattgccttgtcacctttttgtcttaagtttactttgttggtataaagaattttttttaattcagcaagagctcaaagagccatatatatatatataaatttttttttaattaaaaatctttctgctcaagtctcaactacagtgagactgaatggaaaatgcaaaagctcttgacatgatgtcggaatgaacaagatggagaggttgaatttgagaacatggtttccttattgtgaaattccagtttcagaacattggcactgtctggttcaaatataaatacacattattttattgtaatccgctagtttaaattgtttattctgcttata

SEQ ID NO: 1734 - DNA, 480 bp, synthetic construct
  misc_feature 1..480: note = Description of artificial sequence: synthetic polynucleotide sequence
  source 1..480: mol_type = other DNA
aggaagagatccatgatagctgtgaacccctttgaaggagactttatccatggctcagtccaaggtgtttgaagcacttttctcatggcctggctggaaagactttcagaaataagcagggttctggtaggaaaatgaaggcagttgaggaaaacagtgcacatatttgtaagaggactatacttggtatcttggaaaacataaacagaccctagactgtctaccccaagtctgggaaggcggtcctctgaagctgaggttctcctggaactcccttccacagggctgcgttgcaaatgccattgtggaggcatcacccgatgtggtggacctgaacattggggaaatgcagtgctgcctgctgctgcgctggctggcatctgccctcctccgtctcctgggtgctgccacagagaagagagagagagtgaagcgggcagagactggctgttgccatcacacaactgagggcggacctgg

SEQ ID NO: 1735 - DNA, 480 bp, synthetic construct
  misc_feature 1..480: note = Description of artificial sequence: synthetic polynucleotide sequence
  source 1..480: mol_type = other DNA
agctcagccggctgagggtttgagagaccgttgggagcaagacccaaccacaaggcccatggaagaggaagttggcagatctcagaaaggggaggaaaaggagaggtgcttatttgttcatcttgtttttgcttttaaggaaaggaggagagttaaatgagaaaggagggcgagttgagaaggttctgagcagtttcaggtccacggttgagcaatgttcttcctggtcaacaaactgcctggatttcattttggcctgacaacagccccaccacctagggaactgcacagagatcctgtgtgttaaccacgcaagagagtctgcagttagaatactggggcttgtgcagagagaagaattcagaaagtcaaaggctggatgtaggtgaagagactatggactctgccttcatgtcatcagttaaagtgccctgcacacctgcctgtcctaggtcctgtagggatgtgatataacaagca

SEQ ID NO: 1736 - DNA, 480 bp, synthetic construct
  misc_feature 1..480: note = Description of artificial sequence: synthetic polynucleotide sequence
  source 1..480: mol_type = other DNA
tgagctataccttagtgtctgtgttccagaactttgttggctcccgaagcacctttccctcctcccaagaggaataaacaaatgtaaataaatggtgcccaggttttcatttggctcacaaaagattatataaaactcatagtctgtctgaagtatgttacctgtaaacctgtttcagctaaccaccttttctagcacaatcaagctggtaaaatacatgcctgcacgccagccacggtactgaggaccacatcaaaactgctccttgaaggaacttggagaaaatgaacaaccagcaacttgttagctggtctctgaatgacagagggtactgctttagatgtcccccaggaattctgagtttatgcagcagagggaccgtagccccggggtcaggcaggacaaggggatcagaccttcctcttgctatgtgtggatcattattcagctgaatgtctctaatcaggaactctgggcata

SEQ ID NO: 1737 - DNA, 480 bp, synthetic construct
  misc_feature 1..480: note = Description of artificial sequence: synthetic polynucleotide sequence
  source 1..480: mol_type = other DNA
aaaacacgatctctgcagacttgtgtgtggctagacgccctctgtgtgctgtatttgtaattctctgtctctgtatggtttcagccttggaagaagctttgaaccagtgatgagtttgctttccgcagtcaaaactgtggtttgagaatttcactgttaataattgggagtaaaggaaaaagctgggctattgaagggtaaagccgatgtccctaggactgtggcctcaggaagatgactggatggcggcagcagaactgatggcagaaaccagggaagctgatgttgtattgcagcctccctcacacagattctaatcctagaaagtggactgtggaaaaaaacttaactattcacaacaaacgtttaccagtcttatttagtggcaggccttgtgatgagtgctggggttaaaccataagtcaaatacagacactgctgtctttattattcattaaaatgtctttagggtaattttgt

SEQ ID NO: 1738 - DNA, 480 bp, synthetic construct
  misc_feature 1..480: note = Description of artificial sequence: synthetic polynucleotide sequence
  source 1..480: mol_type = other DNA
atttacatcttcagcaaatattaactgagcacctgtgatcaaccacatagctgctaggcactgtgaataccgtggtagacaagaacagacgcttttcttgttaatccgtggaatttacaatctagaggggagactccacctaccccaccagatgtgtgcagaaggcgccatcactgctttagtttcaggtctttgctcaggtcattgctcacactgagtccacatttataagttttcctgtcgggtgagctgccgaagggccagggaacgtgataaaccatacaagcagcgcatccaagaagtggtttctgagcagtcactgagacagcgagggttccctgcactgagcaccaagttattactattttccatacacgtcaatatgttattgattgcttcactgtgctgatctgtttttgtttcatgtggctctttgggtctgtctaacctggtattttcagtctcaccagcatttctaaa

SEQ ID NO: 1739 - DNA, 481 bp, synthetic construct
  misc_feature 1..481: note = Description of artificial sequence: synthetic polynucleotide sequence
  source 1..481: mol_type = other DNA
gttctagagacccatttcatccaccttacaccatgtctaccacagtgccaggcatcaagcctgctaattgtgcttgatggtgattattaccagccccggatttgtaagagtcaccagcagtggcatttcaagatttagcctgggagctcacggttatgtggaaagaggggctcaagactaagcccagggaggttttggggtgatagaattgattctttacactgaacgtgaatcctcagtgatgttttgatgaggatgcgggacattgtgctatgctaaagcccgtcacagcagcattaaaaatgtcccagtatggagacctgacttacaccttggctcaatcattaaattaaataactcaccaaagaataaataccaacaaatactagaaatgttgatttttagaataataaaatatcagtttttgttttttgaactggcagggaatttttttttttttctttttgtagagacagtatca

SEQ ID NO: 1740 - DNA, 361 bp, synthetic construct
  misc_feature 1..361: note = Description of artificial sequence: synthetic polynucleotide sequence
  source 1..361: mol_type = other DNA
ttaattttcaatacacatgtagctatgaggagatggacacattctttctatctgacacacctggtcactccaaacgttcagcacttcacatgggaggctacatatggaagtgaaatgaaaaatcaccagcagccgcagaacaaaaatataatccagtgagcataacttttatggaagcacttcagcaatatgggtaaaggacctgaaaacacttttgctctttggctcactaattccttttctaataacccatccctagggaacactctccgatgctgacaaaccttcttacacatggttctgcagagcagcagaggccaccaccagcaaggttcaataaattaaggcaggtcattatgtg

SEQ ID NO: 1741 - DNA, 240 bp, synthetic construct
  misc_feature 1..240: note = Description of artificial sequence: synthetic polynucleotide sequence
  source 1..240: mol_type = other DNA
tcatataatataattgaaaaggcagggtacaaatctctctcttcagagtcatctcaattgtttttaatccataaaaataaaccaaaaggctatggaggaaaatagttattgtggttatctctaggtagaaggattgtgggtagaatttctttctctttactgtggagtttttttgttttttttttcttctggcattgcccaggattatttctgtccatcagggcgtagtgggtcacttct

SEQ ID NO: 1742 - DNA, 479 bp, synthetic construct
  misc_feature 1..479: note = Description of artificial sequence: synthetic polynucleotide sequence
  source 1..479: mol_type = other DNA
gtacccagcagcttgcacctagatttattgtgtcaaaatgcaaatctgggcgtgcattttccattgtcccctccccacctgcgcttaaaacccctccttgtcttcctgctgtaagtaggataaatgcaccagctgtactgggcctttcccatttcccatgctgatcacattctctcgcctctttcttctggctacaacacacttcttcattccaaacccttccccctgacccacctccaccccccaccctagcaagattaattccctgtaattctagttcatccttttggccccagtttaagccatttattcatgccaggctttacagaagactcaccagcacctccaatgggcttccaaggtgctctcaacttcccttaacacaggttcccagtttatcctcaccactgaagcccaagagctgggactgtgccagattgatcaccagtgcattcccccagcacacagcaggactcggc

SEQ ID NO: 1743 - DNA, 240 bp, synthetic construct
  misc_feature 1..240: note = Description of artificial sequence: synthetic polynucleotide sequence
  source 1..240: mol_type = other DNA
tcaccctggatggttcttaagcatttatgaatgggtggatctcacctacgtgacctggaacttctctgttctcagagcaagccatgtcaaatagcagaaaatgcaccggctttggagcctactgcaggactagatgtctcagggtcgcagtttcctcatccctaaaaaggggaatcacgatgcttatctcatgcagttattgtgaggttacaagagttactgcttatgaagggccctgtc

SEQ ID NO: 1744 - DNA, 239 bp, synthetic construct
  misc_feature 1..239: note = Description of artificial sequence: synthetic polynucleotide sequence
  source 1..239: mol_type = other DNA
cagcatctggcacgtggcaggtcctccgtgaatgacagcgccttcctgggcagcctggcgagcgcacacgcgtgtgcacacacacacactcctgtgtttaatatagccctgtctgttgtgagccacttgaggagaggtgtccctagaagaaacttttttcccagaaaatgaggcctggctggtgctcatcctgagttcctggaaggcagtgttttcttgtaaccatctgagattcctgg

SEQ ID NO: 1745 - DNA, 241 bp, synthetic construct
  misc_feature 1..241: note = Description of artificial sequence: synthetic polynucleotide sequence
  source 1..241: mol_type = other DNA
ggctgggtatagtgcctgatgctctcaatatatgcgtgttgaatcaaaccagaagaagcaggctgaggcactgagtgaaaacctatgtggatgtcctgctgccttttccttgtggagggtagatcattcccaactctgcctgaaactttgatgccttattggaggaagagaaaggtaactcccttgttgagccatagagctcttagtttttctttcttaaaaaaaaaatcactcttctttc

SEQ ID NO: 1746 - DNA, 239 bp, synthetic construct
  misc_feature 1..239: note = Description of artificial sequence: synthetic polynucleotide sequence
  source 1..239: mol_type = other DNA
aaacaccattaaattagtccagttatgtacactgggcttgtattgcatggtttatataaaagctaagttctttctttaagattggagccctccgtgtgagtgatttcaggataaaaggccttagaggattagacacattattcgtttgtaaaactgattgctcaagtgatacagccctagggctgcccccttattgtagcttcttgaacactgtcaaactgtcagacttgggttggtgg

SEQ ID NO: 1747 - DNA, 479 bp, synthetic construct
  misc_feature 1..479: note = Description of artificial sequence: synthetic polynucleotide sequence
  source 1..479: mol_type = other DNA
ttattttatctcgcaaacaaccaaaaccagatttacattgtaagtagatactagcgtggcttttgtccttcctatatctaggccctgaatacttcagagccagattaaatgctttgctctattttttcatagatttgggcttcgaccaaacatacaagttgagcctgttgacttctctctttgtggatgcacacgtgcgtctctgcgtatatttgtgcatgctttcccgaataagtcctcttttaaaactcagcctttcatcattttagaaatgatttgctcttttacagcttgtactttttatggttcttagaggatcactgcagcaaatatatttggcagaaattgagcacacaagcccttccccagaactcagtactgaatttgttcagttcccatcttaaaaacttgaaactcctttgacttttcctgtgatgtgcttatttctgatctgaaactgtagttcaaagctagacttg

SEQ ID NO: 1748 - DNA, 481 bp, synthetic construct
  misc_feature 1..481: note = Description of artificial sequence: synthetic polynucleotide sequence
  source 1..481: mol_type = other DNA
gtaatcattcacgtcaagaaaggaatggattgctcaaaaaagaagtcagactctaaaaatagcctccataccgaggcccacttttctacctagggaatcaagacagaaatatttccaggattgaaatgacatagttcaagtgacgcaaccatttggctgcctgctatttttctcttttctgccagaaggaaaatatataatgtagaaaaattcccctagagttgttaaaataatcactgaaataacctttggtgcttagtatggtaccctggaaaacttggatctctagaatggttcatttcagagcttttccagatagccaagtttttattagaaaattggttggtatagacggtgctcactgtgactgttcagtgcatgatgagaatccttctttacagagataaaaagtgtgaagagaattgctgagaagtaaccattcattcccttctgcatttgcctagtgtgctgtgtaattaaa

SEQ ID NO: 1749 - DNA, 241 bp, synthetic construct
  misc_feature 1..241: note = Description of artificial sequence: synthetic polynucleotide sequence
  source 1..241: mol_type = other DNA
tgagctgataaaatttacaagaaataaagctttatgcaattacaaatagatgacatgactttttaaaaggttttgcccatatttttcacacacgctctacctttagccttctctgctttcacacagatgctgaaaaacaaaagagttaattagaaaccattccttttctctctttctggtacagagaaggcttccactaagtatgtgctgaataaatgacccagtctgaaagttttaattt

SEQ ID NO: 1750 - DNA, 241 bp, synthetic construct
  misc_feature 1..241: note = Description of artificial sequence: synthetic polynucleotide sequence
  source 1..241: mol_type = other DNA
attacacagtatattcatagaactgtaactgttacaacctctagtttgatagatgtagctgtttttgtttttttaagttgagattatattaatatctgtcacttgggttgccagccttttagaagaaaatttggggtttatattagaataggttttaggttcagtagcctgtatccttttttactgccctgggacaacagcaaatattcacctaaattcattctgtggtgtaacactttag

SEQ ID NO: 1751 - DNA, 480 bp, synthetic construct
  misc_feature 1..480: note = Description of artificial sequence: synthetic polynucleotide sequence
  source 1..480: mol_type = other DNA
aagtataccagttcttccttgcaaataacaacaaaaagctctgaacaacttaatcacagagaaaaaaaaagcttttattggaggtatattgggcagctcattggctgataaggtagcagaagcaaaaggatacttggcagcccggagcttagctgagatggagccataaggacagttttattaggatgccaccacagctcggctgccagtggacacatgaattcgtgagactagcacctctgccataaataacatctcaccatccctggggaattggtcactcccttaagactcaaacactgtggcaagtgcatctaattggctgagtccaggttatgttccagggaacaggggagaaagctctgccaatcttgggattcccccacatgcggtatgtggatgctgagcagacaaaaatatagaagtctagtagatgattgtaagttactgtatagcagtgtgtttcatcttgttcttacg

SEQ ID NO: 1752 - DNA, 240 bp, synthetic construct
  misc_feature 1..240: note = Description of artificial sequence: synthetic polynucleotide sequence
  source 1..240: mol_type = other DNA
tcctgtggaagctttcttcatggcgaagttaagcagttccacatctgcattcccccagatcagcacaccaaaggtgaacagcttgggtttccccctactttcagttacaggtacaagatgttagcaaactatgcaaatctcaatgagttttgtttcctaattctgtttgcatgctaggaaacttgcctcatgatacaacagtaaacccctgctttaagaaaaacatgaggctggtttaat

SEQ ID NO: 1753 - DNA, 240 bp, synthetic construct
  misc_feature 1..240: note = Description of artificial sequence: synthetic polynucleotide sequence
  source 1..240: mol_type = other DNA
atgtacaatgtccaactcttaggaagtgtttatttttcaattgcctttaataatttctcataaagatcgatgagtctaagaattgtgaaggacctcagagatgatatatttcaacttgtcatccacgtcacgactgtctctttagcatcccagagatagcaggacagtcctcccctgcttgtgtgtattcagtgggaagtacttccctgcccccttttcgtcccgttcttggatggtgct

SEQ ID NO: 1754 - DNA, 240 bp, synthetic construct
  misc_feature 1..240: note = Description of artificial sequence: synthetic polynucleotide sequence
  source 1..240: mol_type = other DNA
agatgtgaaaaatagagttgaaactcacctcactgtcactttgctcttggttctagttttgccatgtgaaaccagatagggtgtattctttctacattaagtctagagacagaactttggaatcagatatggatttgatgctcagctttgccatttacccaaaatgaaacagttactttaacagtatttttcgtctaatatgtgcaaactaattgctgaatggataggcagttattttat

SEQ ID NO: 1755 - DNA, 240 bp, synthetic construct
  misc_feature 1..240: note = Description of artificial sequence: synthetic polynucleotide sequence
  source 1..240: mol_type = other DNA
taatgcaacaaaaggttatgttagcattttaatatttgtgttgtattcacattgatcgtttttacttggactatagccaaagtcagaactcttcttttgtggattttttaaacttaaaatatatgcctttacatttaaccctattacgttttatttaagttggctgaggtaatgcctatcatcccttctataaactcctctttcctactttatggcttctatattagatgagtactttct

SEQ ID NO: 1756 - DNA, 241 bp, synthetic construct
  misc_feature 1..241: note = Description of artificial sequence: synthetic polynucleotide sequence
  source 1..241: mol_type = other DNA
ctgtacctttatgttaattatttggaagggaaaaagattgaatgggacgggacctgtgaaagatccctgtggcataccgctagagactgccttccaggtaggcatagttttaaaactataaagttaactttatagttaacaagtatattgtgattatgttttctggcaaataaatctctttgctgccatatgccataaatgacacattatcatttttgcaaatatgcacaatggtactaca

SEQ ID NO: 1757 - DNA, 240 bp, synthetic construct
  misc_feature 1..240: note = Description of artificial sequence: synthetic polynucleotide sequence
  source 1..240: mol_type = other DNA
tatcaattgactgtcagcctaacccataagaaaaagtcaggatagactgtcaagttatttgctgaaatcagatgcactgcttggctctctgtaaaatctttaccaagtaccctctttcactttactcgtctactcatggcaaatctaaaaccttctacttcagcttaggcaagacatcttcttgggtcagtggtagatgtgaacaatcttcgtgggtcagtggtagtttaacagtttgtt

SEQ ID NO: 1758 - DNA, 241 bp, synthetic construct
  misc_feature 1..241: note = Description of artificial sequence: synthetic polynucleotide sequence
  source 1..241: mol_type = other DNA
aaactgttgttaatcaatgtatctactctcggtgattttaagagagaaaagaagactttttgtttttgtctgagaggagtttttaacctggaaagacagctgaaacgttatctgaaatgtgaaatgttaaacattttattattaagagacagtgtgttttttattttactcacacagtatgtgtgcatttgtgttttctgcgactgcacatttgtaataataggctcatattttgtttttc

SEQ ID NO: 1759 - DNA, 240 bp, synthetic construct
  misc_feature 1..240: note = Description of artificial sequence: synthetic polynucleotide sequence
  source 1..240: mol_type = other DNA
attttaaaattggctttgtaggatgttcactaatgtggaaagacagagggattggggaatcactgggaaatgcttggagtcagtctgttatgtagatgtgcaaggtattgactacagagtgagacactcttgcttggttatgtcctatttctctctgaattttttaattctcaaaaagtaatttagaactataacaccttggtttgtatgagtgtaaaatgatttataagataacctcag

SEQ ID NO: 1760 - DNA, 480 bp, synthetic construct
  misc_feature 1..480: note = Description of artificial sequence: synthetic polynucleotide sequence
  source 1..480: mol_type = other DNA
gtgtgttgacagaagaaatgcaattaaattgtttccatgtttaagaaaaatatgggaggtatatgtattataagtatacatctattgactggctaaagaagaaaagatgactagggtatgccatgctaaggagtttagattttgtgctggaagtttaaataggggagagaagggatgtgtgttcagaaggcttttgtaggtagcagctgtagcaatgatctaggtgagaaaaaaataagtacaagccaaagcagtgtcagagagatggagtgaaagagaaacattcaagtgattaagcagattgattgggcaaggtgagtggcagatcagatgaggagcaagggatgggaagcagaaaagacaagtctccgtggagcccattatctagagtggcaagacgagaaggaagagcctataagagggctccccagagagacaggagggaaatcacagagatcaaggaaggagaatttcaggaag

SEQ ID NO: 1761 - DNA, 240 bp, synthetic construct
  misc_feature 1..240: note = Description of artificial sequence: synthetic polynucleotide sequence
  source 1..240: mol_type = other DNA
gaaagaatgatcctgcccaatcagatgctgcatagaattcaggtaagatgaggactgaaggtgtctttggcttttccaagtagggaagtcatcagtgacccagtaagcacaatttctgtggcggggagaggcaggtggaaacctgattgctgtgggttgaaatgtggaagaaagtgattatagatgactctcttactggattggaatcgagagaaaagataggatctggaaggcaacagc

SEQ ID NO: 1762 - DNA, 240 bp, synthetic construct
  misc_feature 1..240: note = Description of artificial sequence: synthetic polynucleotide sequence
  source 1..240: mol_type = other DNA
gggtgaagggaggtttttgcttttgttttgtttatttaatggacggtatttagccatgtagaattgttggtaagaatcagagagttgaaaataaaggagaaatatggggtgatttatggaacagagtccttgtagaagtgagaaaaaataagaggcaaagtaaaaatggaggtattatttcattttcaatggaaagatggacacttgttacactgaaatcagaggaaaggtgtgtgtgaa

SEQ ID NO: 1763 - DNA, 240 bp, synthetic construct
  misc_feature 1..240: note = Description of artificial sequence: synthetic polynucleotide sequence
  source 1..240: mol_type = other DNA
cataagacagttgtttgtatgggggcaggcttcataacttgtggaaactcccacttcacagcctttttgtttgtggttggttgtttttttgtttgtttgtttgtttgttttgcctgagaagccaaagatacaggaggtggcagtgaaggaaatgggagagtgcctgattgagccaagctggggtccccccaccgcgtggcatcgcctcccagtgggaggcctggagtttgtattgatact

SEQ ID NO: 1764 - DNA, 121 bp, synthetic construct
  misc_feature 1..121: note = Description of artificial sequence: synthetic polynucleotide sequence
  source 1..121: mol_type = other DNA
aatttgtctgtctgtgtggtttccccctgtgctgctcaacaccgtagtgtaggaggggtgaaaggagatggtgagacccattctttcaggaaatattaactgagcacctgctatgtgccaa

SEQ ID NO: 1765 - DNA, 361 bp, synthetic construct
  misc_feature 1..361: note = Description of artificial sequence: synthetic polynucleotide sequence
  source 1..361: mol_type = other DNA
aatttaacacaggaggagcaagccatgtgactatgtgagttcaaagtattccaagcacaaacaacaataaagaccttgaggagggaaagtgtttgatgtattaaaaggaacgcgaggaagcaaatgtgtctaaagtgattggcaagtgaggaagagcggagttcggaaacaggagtggggcaagaggacttgggaggaggctgtaggccactgtaaagatactgtgttttttgtcattttctgagacaggctcttgcctcggctggagtgcagtggtgtaatcatagctcactgcagccgcaaactcttgggctcatgatccttccgccgcagcctccagagtagctggaactacaagtgt

SEQ ID NO: 1766 - DNA, 360 bp, synthetic construct
  misc_feature 1..360: note = Description of artificial sequence: synthetic polynucleotide sequence
  source 1..360: mol_type = other DNA
ctcccaaaatgctaggattacaggcatgaaccactgcgcctggccgggactttggcttgtattaataatttgccaatgagaattgtaagcaatggattgacatgctctttgaattttaaggaatcattctagctattgtgtagaggataggaagagggagagtgggagaaaggagggggaagtgtgaaagtagagaggcctgttagggatctcttaataagtctggcaagacatgatggcaggccgtaccaagcatgttcctacctcaggcctttgcacttgctgacctcgctcgctgggatgctcttctaccaaatatatacttgaaccactgcgtccctccttcagagatatctgctg

SEQ ID NO: 1767 - DNA, 121 bp, synthetic construct
  misc_feature 1..121: note = Description of artificial sequence: synthetic polynucleotide sequence
  source 1..121: mol_type = other DNA
aaatgtgaggtcttcatagtaaacctcaccccttcacttgtataccctttccatgacattttttcctctataacatttatcaccatttgacacagtgtatattttacttgtttatttactt

SEQ ID NO: 1768 - DNA, 359 bp, synthetic construct
  misc_feature 1..359: note = Description of artificial sequence: synthetic polynucleotide sequence
  source 1..359: mol_type = other DNA
agtgcctgatttcctgactaggatgtaagctcaagaacagggatttttctgtttcgttcattgctgtgtccctgatgcctagaacaatgcctgcagtgaggaggtactcaataagtatttgttgaatcaattagggaatgaagctcttccatctccattatcaccaataccacctctacagttataattagtgagaattatggcagtgctaatgttattttttcatttccatgtgtgcctttttggaaagacttgctgcaacaagcttcacatatcttcctctgcagagtagaagtatgtcactaagccatggagttgatttcttggctccttgtatagcaaatagccttgcatttggt

SEQ ID NO: 1769 - DNA, 121 bp, synthetic construct
  misc_feature 1..121: note = Description of artificial sequence: synthetic polynucleotide sequence
  source 1..121: mol_type = other DNA
tcgtgtcagtctttgcatctttttttagtcacgttgcctacacccttcacaatcctctagcttaaactcttgagtaactctggacactggcgttagctggaaacttgagaaccagaggaat

SEQ ID NO: 1770 - DNA, 359 bp, synthetic construct
  misc_feature 1..359: note = Description of artificial sequence: synthetic polynucleotide sequence
  source 1..359: mol_type = other DNA
gatactgccaataacatgccttatgtgcttggcatctaattttggcacttgttttagcaggtttgattgcataatttagccattggctacaaaaaaaaatggccacatatcctgggaggaagggaagatttggaggtataagatggaatctgtcctagggatttgaggacgggctacggttcttgttttttttaaaatattccttcattttcaatactcttgggattattccaggccttatgcattgaccatcactcaatattacttcctttggggagtatggtatgacgccatcatttctggtcttttcatatgaagtctccatttttattatatttttcatgcctgaatctcaggtt

SEQ ID NO: 1771 - DNA, 479 bp, synthetic construct
  misc_feature 1..479: note = Description of artificial sequence: synthetic polynucleotide sequence
  source 1..479: mol_type = other DNA
ttgcaatattttctctaccacaaaatctgttatcaattaagtacaacttaatttgttttttttttcacttttccctaattaaagatatatatacgctaattcagaataagtatgaaatataataactggaaataggacatataattgacataatcccaaaataaaaacaaataatttgtagatttagtcctcatagtctcactggatcaatataggatttctgatcaaatatgatgcattttgagaaccctcagtttatgtctagaggagagtcttttatttttaatgtgcgggatttaagttgtaagtgaagaggactgcgtcaagaggcaggatagtagttctaccccaaaacagatgtgtgatgttgaacgagtcacttggagaaggatgccatggagagtattgggccaggtgatttctaaagactcttccagcattaaaatacattaattctttgcatacatccatgccttttg

SEQ ID NO: 1772 - DNA, 479 bp, synthetic construct
  misc_feature 1..479: note = Description of artificial sequence: synthetic polynucleotide sequence
  source 1..479: mol_type = other DNA
ctgcttttgcagctttcagggttaatgagagctgtcaggagcagtatgaccttagagggaaatggctcatatcaagagagcagatgccaatcccttctagtactctccctgggcagatgacccactccctatttaaatccttggctttttttcttctctgataagtgcctgcataattgatactgttgccagtgatcaaacgctgaaatgactaaatgatagagctgaaaaagaccctaaggtgttatctagtccaattatgccccctaaaccccaaagagtctgaaagagtaatggggcccatgagccaagtttagtatttcaaatgtctcgtggtaattctatatttggagacaatattgtaaggttaagcaagctgtggaagcatgaggttgctctgcttatggctggagttataaatgtgaaaatggatcagttattcctagtaactgctcttgagtaagcagaatctttcaaaa

SEQ ID NO: 1773 - DNA, 480 bp, synthetic construct
  misc_feature 1..480: note = Description of artificial sequence: synthetic polynucleotide sequence
  source 1..480: mol_type = other DNA
tgtcatagctttgttgtctaatacataatggccactcaccacatacggctttcaagcacttgaatgtgactgatccttactgagttacgctgtgagtgtaaaccacacatcagatttcaaaaacttagtataaaaaagtgaatatttcattaatttatattgattatctgtttaaatgatattttcaatacattgggttatataaaatattttattaaaagtgatgtcgattgtgtgtttttacttctctttactgtggggactaaaatattttaaattccattatatgggtaacatttctattgggagtactgctctagagtaagagatttctgggtgtgaaaaggctgagactcactccttgttttgcaggtgagtaaggtgggtcagagaggttaggccatttgttcaagatcacacagcaagtaggtagccaagttaggagtaggccagcatactttcctttaccaaaaatggcca

SEQ ID NO: 1774 - DNA, 121 bp, synthetic construct
  misc_feature 1..121: note = Description of artificial sequence: synthetic polynucleotide sequence
  source 1..121: mol_type = other DNA
aagggatcatagtgatttttttacatggagtctatgacattgctgctttgggtcaaagccaaaaatattgtgtagaatattagcagttttctaaagccctaagcccaagttgtatcaccca

SEQ ID NO: 1775 - DNA, 360 bp, synthetic construct
  misc_feature 1..360: note = Description of artificial sequence: synthetic polynucleotide sequence
  source 1..360: mol_type = other DNA
gtatcaaatccaatcaaaaatatattaaaaagaatacaaggaagaaaaggaaagaggagaaacctccctatagaagacccagtaagcaatctgttttcattcttgaacagatttctttcacaccagtgccctggtattactggaaaaaagtacattaattacgggagtaaagcacaataagaaaacatttacaaggagtccagccctcatccatcatgcctttccctccaacaaagcaagaatctctttaacaaatacccattaaaagattaagcctaagaataaattgtttcttagtccccaggcagttcatttgacatcatttccataggattagggactccagcaatatgtgtttag

SEQ ID NO: 1776 - DNA, 121 bp, synthetic construct
  misc_feature 1..121: note = Description of artificial sequence: synthetic polynucleotide sequence
  source 1..121: mol_type = other DNA
cacagggctatagtcacactgcatagtattggtctaaaccattccaaaatatttttttagatctcgaactaataagacttttatgtggctggtaattatactaatatttcacccacaaatt

SEQ ID NO: 1777 - DNA, 361 bp, synthetic construct
  misc_feature 1..361: note = Description of artificial sequence: synthetic polynucleotide sequence
  source 1..361: mol_type = other DNA
gggcctttttccccctccacagtgtgtaaccaaacgcagcaattctgcctttaaaaaaaacgaaccaccacctgttaaaaagtggtctaggaagtatagcaatgtcatggagctcttgaggatgtgtataattgaatagaaaggaaacctagcatctggcgcactcagttcttagtcccttttcctctgagccatcatttctcttctgataactgtatttggttcttataattactgatactatgatgtgtggagtttaaagtacccaacagttgtataaggcttgttacaaacaccttcaatgtccccactcccctcccttcactcttgatttctttttgatttcctgctcaccagggca

SEQ ID NO: 1778 - DNA, 361 bp, synthetic construct
  misc_feature 1..361: note = Description of artificial sequence: synthetic polynucleotide sequence
  source 1..361: mol_type = other DNA
accacattcaaatcttttaactgattcttttgtcattcacctcctccaattcttaaatcacgtgcttgtattggtttttttttttttttttcatttctaaatattatctagcattatttcactgtaggaaatgacagtttgtcctttcttccccctaccccaacccctcccatagatgcatcctcgtaatcataattttggacagaacaatttagtgtttacatattaagattatataagtgccatttgaagctgagtcacctactcttttatggttcttcttttccagtcacttttctttttccctggagttgataatgatgcttttatagtatatttattgtttttgttgttgttgttg

SEQ ID NO: 1779 - DNA, 480 bp, synthetic construct
  misc_feature 1..480: note = Description of artificial sequence: synthetic polynucleotide sequence
  source 1..480: mol_type = other DNA
cagcctcccaaagtgctgggattacaggggtgagccacgatcgtatttcttgttttaatgtccttcttacttggttttttatctccttcactaattcatccgccctgcctcactctcctctcagtagttcagatgccataggtgtgatgagccttgaagcaagagcttctacctgcttcggtctgggcttcagcttggtgcccagctatgacctttgttcactttttctctccttcgggtgtgagtccctttcctgaattctggccttaatggaggacaatttccaatagcttcctgagaaagggtaggggggaggcaactttattgagaccttgcgtgtctgaagaatgtctttcttctttcctcatacttgatagattatttcctcatacttgatagattatttgtcttactgtatgattttagacatggggtaattttcccccagaattttgaaggtagcactccattgcatttttt

SEQ ID NO: 1780 - DNA, 240 bp, synthetic construct
  misc_feature 1..240: note = Description of artificial sequence: synthetic polynucleotide sequence
  source 1..240: mol_type = other DNA
ttcagtgccattgttgagaagaccatgccattccgatctttaatcttttgcataaacctttgtttgttgacttattgttccctggaagcatttttttattccccagattctgcagttttacagtaatgtgccttagtctgggtctgtgctaatcctgatgctctttcaatctggatattcatttcctttcattctgggaactgtcctcctgttttcttcattctttctccagaactccca

SEQ ID NO: 1781 - DNA, 239 bp, synthetic construct
  misc_feature 1..239: note = Description of artificial sequence: synthetic polynucleotide sequence
  source 1..239: mol_type = other DNA
ttattaggatgtaggtccaataattatctttatttttcacctcttaatattttaagttcctcttggagagattcctcaaccttttttgtcagcacttcttttttttttgtttctgatatcatacttttaatattcaagtactttttttgttcgacttgttcttcattatagcatcttgtttttgtttcatagttgcaatatcttatttctctctggatgatatttttctttccctgagt

SEQ ID NO: 1782 - DNA, 240 bp, synthetic construct
  misc_feature 1..240: note = Description of artificial sequence: synthetic polynucleotide sequence
  source 1..240: mol_type = other DNA
tgtctgttttccccacgttgcctttgtctggttttggtctttgttttgctgtctgccttctatactcaaacgtctggtgatccctgcatgtctgcccatttctgagagttgatggacccctcaagcactgaaggcaagttctccgtgcctgggtgaacgtgctctctagggtggcctgcccacacatttccttgggatgccattgggtaaatatctccaggtcttttgtctttggctgct

SEQ ID NO: 1783 - DNA, 241 bp, synthetic construct
  misc_feature 1..241: note = Description of artificial sequence: synthetic polynucleotide sequence
  source 1..241: mol_type = other DNA
tagattcccaagagatggttgactcttctagtagccatcctggagggtagattctagctgccaacctcctaggagcacagtgggagaagaaggggtagggggcacagtgagcacagtggtcaacatatgcatgttcttttaatctttcatataatttccgttaattccacctagtcattttggtaccagaggataaacttttttttttttttttttttgagacagagtatctgttgcccat

SEQ ID NO: 1784 - DNA, 240 bp, synthetic construct
  misc_feature 1..240: note = Description of artificial sequence: synthetic polynucleotide sequence
  source 1..240: mol_type = other DNA
gagccattgcgcccggccagagcttaagcttctaatctgccatggtaggggaggagccgtgactcgactgtccagattttcacatgtaactagtgacaccagtccccaatcctttcacggattctgccatgtgaatttggttatatcacatctttccttactatgagtttagaattccgctttcttgggtttgctaagtaaattaccaccggttcttctgctttcaagtttctggtttgt

SEQ ID NO: 1785 - DNA, 241 bp, synthetic construct
  misc_feature 1..241: note = Description of artificial sequence: synthetic polynucleotide sequence
  source 1..241: mol_type = other DNA
ttttctttctttttctcccctccctccacccccttatctcttctggtgtctttgtccttgtagatttgtgccttcttaaaaatctcttcactgttactttagaggatttgggggaacgagaacagagctaaaattaacttcctcctctgatgaatgttgacagtcttcctgccatagggatgttgtccaaaatacgtgttcatgtgtatgtcaaactagagcttctcaggaggaaagctct

SEQ ID NO: 1786 - DNA, 481 bp, synthetic construct
  misc_feature 1..481: note = Description of artificial sequence: synthetic polynucleotide sequence
  source 1..481: mol_type = other DNA
ttgtccattgaaattgttgtcactattgatagtctttttacccttagaccagtacaacttgagtcacacgtgtggcccataaagattcctgtaaggtcgtgcataagggacaagtagttgtagctttgtattcgtgtccagttgatgaaaacaaattgctatatctcctttgttacaagaaatctatggaagaatctggatagaacccagatagttatatttttgtttttacactgacccctttaattcaataaagacatcaatatgtgaatacataataactgacacatactactatataagtgttcattgatattgttatatgctgtttttttttaataatacttgtaaattttccaagagttttatctaatgtttctcaaacccagctgcacaacagattcacctggtggtcgtttaaaaaaaaagatttcatttcccaccttgggcctactaatcttcagggtgggtgcagtagcaa

SEQ ID NO: 1787 - DNA, 241 bp, synthetic construct
  misc_feature 1..241: note = Description of artificial sequence: synthetic polynucleotide sequence
  source 1..241: mol_type = other DNA
aacagagcttccattttctggagaagaagtgagacattttgagaaccccgttgggagggtcgtacacatcactgatggtcatttagaaagacagcaagatgaagcaaggagccagctctgagagctgcggctaaaagcaaagcctgtatccacagcaaatagataaatcaatatacacgtgtagtataaatgtatagaacacctggaaaccaaggcactatgctgggccctccttctgtac

SEQ ID NO: 1788 - DNA, 241 bp, synthetic construct
  misc_feature 1..241: note = Description of artificial sequence: synthetic polynucleotide sequence
  source 1..241: mol_type = other DNA
agaacacttaggcagtatgttgccccctttctttatgatgttttgcccctttgtttcagtcagattttacctggataggaggatgagcagaagaggctggtgtggatgtgcattttgttcctgctctcccagtgacagacattgaagtgttggccggagctagctaagaatttactttagacaaaatcctgaataggacccacacaactctgagacggattacatttaaaaattaatcctc

SEQ ID NO: 1789 - DNA, 360 bp, synthetic construct
  misc_feature 1..360: note = Description of artificial sequence: synthetic polynucleotide sequence
  source 1..360: mol_type = other DNA
actgcacttcagcctgggcaacagaacaagattccatctcaaaaaaaaaaaaaattaatcctctttcagtgtcaggtcccatttgctaatggggttcaattttcattcatctactgtaaaaccaaacaattcttatttgcagctgagctaaggggcagaaaaaggaggaaataaaaagcattaagttttatttccatgtatgcaacccagaaggttctaaatggttactttatttgagcaacttactttattaatagcaacttcttgtttaactagagcagtgttggaaaaataatttaacagaaattttagttagggggctacgggaggggtgggagatgaaaaactgaagaatgacga

SEQ ID NO: 1790 - DNA, 121 bp, synthetic construct
  misc_feature 1..121: note = Description of artificial sequence: synthetic polynucleotide sequence
  source 1..121: mol_type = other DNA
aattcacatccactaatgtttacatttttaaagctttaatgtctgtttttaaggaatagttctttaatttaaaaaaaaaaaaaccttaacatattctctgtatactctagtgttggaacaa

SEQ ID NO: 1791 - DNA, 360 bp, synthetic construct
  misc_feature 1..360: note = Description of artificial sequence: synthetic polynucleotide sequence
  source 1..360: mol_type = other DNA
tggtgactgatatcggagctttcagttggtacagtaataatagctaaagctcacccagcactaactgtggcagatattgtcctaagcactttacatctgctagctcattttatcctcccaagagccctttgagaagtttctgttattacctccaatttaagatgaggaaactgaggcaccaacggcaagcttgctcatgagtggtggagctcccctgttcatttaaccatgttgctgtattgcctggtgctgcttaccacaggtgcctggcccataggactttatgtcctggactgggcaaggttatagaagatgttttagttattagacaaagaaagccatgctgttccttccacacac

SEQ ID NO: 1792 - DNA, 121 bp, synthetic construct
  misc_feature 1..121: note = Description of artificial sequence: synthetic polynucleotide sequence
  source 1..121: mol_type = other DNA
catctcattcaaaaccaatggtcactctgtttgggggccactaggagagatgaggttcagagaactccagtaaattaaggtcacaaggtcacacagatgaacagtggctaccactatcagc

SEQ ID NO: 1793 - DNA, 359 bp, synthetic construct
  misc_feature 1..359: note = Description of artificial sequence: synthetic polynucleotide sequence
  source 1..359: mol_type = other DNA
taggattcaacccaggtcggactctacagctggtgggatgcctcccttctcttagtatatgtgctctgttttgccgctcaggaggcaggaaagaaagatcaaggatgagtaggtgcctgtactcctagttaccttgcgtagcgctatgtgactcttacttgtatttcccaggcataaacctggctgcatggcaaagaaagccaggaaggcagcgttctccttttttgtgtagaagaaaatactcttgcctcagcagcagagaactgtgtccacctactgtttattttcctccccctttttctttttttcttcatcaaaaagatatgaatgctgagatcatcccagagaaatctagaata

SEQ ID NO: 1794 - DNA, 121 bp, synthetic construct
  misc_feature 1..121: note = Description of artificial sequence: synthetic polynucleotide sequence
  source 1..121: mol_type = other DNA
aataccatgagaaaatagtccctctggaaggcgtcttgtactcctgctgtttgtaaatgtgaaaagctcagcaaccgggcagctggatgggtataaatatagcccacagcactgacgcccg

SEQ ID NO: 1795 - DNA, 360 bp, synthetic construct
  misc_feature 1..360: note = Description of artificial sequence: synthetic polynucleotide sequence
  source 1..360: mol_type = other DNA
ctgaatcctgctttcttagaggcacaatgggaacccacggaagtcagagaaggagcagtaaagcccagtcgatcaatcagcctctctctttctctctctccatcctggaccttagtgtgggcgtgaggatagaagcagctttaagagtgcacttaaaatagctcttggaactggacattggctaagctcaaagacaaggaagatgcttcctatgaaaccgacctctgcctgacccttacctggggctattttgaccattctggtccgtgatcttagggctgtgttctttctcagttcagctgcttgggcacaagcaggttttctagtgcacgctccaggcgtttggcgcctctctgctgc

SEQ ID NO: 1796 - DNA, 479 bp, synthetic construct
  misc_feature 1..479: note = Description of artificial sequence: synthetic polynucleotide sequence
  source 1..479: mol_type = other DNA
ctccgtactcagagatcttattctaactagactcagctgtctgaagcctggtgattaaaaatagcctcctggtgctagctgtggaatcaagggagagatactcagtgagcagagaggtcagcttgacgcaagacacctgactgtcatacctgtgggtttccttgcacctgagttttttatctcttgaggtattttccttttatactctatcagtgcccattttttatggctatgcaagataaaccagtcatttcagatttgtggggattagtagaagtctgcattttggcaggagaaaaccattattttacttggtggttcccagaaataaagtctctagttatcattccatgcagacatcaatgagatttgccattgaggcatacatttatttgttttctctttctcatttggtggtaaatacttcaaagtaaagaaccatgtcctctacttccgttgtaactgcccacaaaacttaa

SEQ ID NO: 1797 - DNA, 480 bp, synthetic construct
  misc_feature 1..480: note = Description of artificial sequence: synthetic polynucleotide sequence
  source 1..480: mol_type = other DNA
taattcatcttacatgtcttgttttgtgaccgttgaactgaccgtaacagcctttctctgatgtccatggcatgccattagtaagagtcacaaatactgtgatactcgcctaatccatttttaaagtctgttcagggatagtctaagagtacaaggcatatgtgcatatttgcttttagttgtttcattcaatgtaagctggatctgtgccttacttttaacttctaagattgcttccttcaaattggacctcagcatataatatttataaaaataaagcaggaactgttatttggttaaagcagaatatacttaaaatattaaacttgggataacttagagaaagccctgaagttgaagagcttggggctctgtcagtccgctggtggccggagtgccccagcaccgggccttcctcacaaaacattctgcctctgattccctatccttggaactggtgcccagttagcaaagagcacc

SEQ ID NO: 1798 - DNA, 121 bp, synthetic construct
  misc_feature 1..121: note = Description of artificial sequence: synthetic polynucleotide sequence
  source 1..121: mol_type = other DNA
agctgttctggccttggggacgatgcatggaggaggggcaccctccaaggaaaccaggccaatagagccaaagtgaacaatttcagtcatcattgggaaccatgatagattatgtagcact

SEQ ID NO: 1799 - DNA, 360 bp, synthetic construct
  misc_feature 1..360: note = Description of artificial sequence: synthetic polynucleotide sequence
  source 1..360: mol_type = other DNA
ttaatgattgatttcctaaaaaccattcatgcagtctttggaagttcagcttgtcacttactggcgtgccctccagggcttctgtccacatcgatttcaccactacatctccacccatggaaggcatgggccaaacccattcatattccagagaacaaggtgcagtttccatggtatacagaaaggtaatattgtacagtgggcaataacattccagttccggctctgctacttcctacttctgagcaacttggaaggttgcctaacctctccaaagacctagataaaatggggttaagaatagtgtccacttcatagggtggttcgaagaaataagtgaaaatataaatgtaaaacact

SEQ ID NO: 1800 - DNA, 121 bp, synthetic construct
  misc_feature 1..121: note = Description of artificial sequence: synthetic polynucleotide sequence
  source 1..121: mol_type = other DNA
tagtacagtgtctgtcacacagcaaggactcagtaaatgttagccaagaggggaggaaggaggctgccacccttatctgttagctcagcttcaaaaagcctagcaaaataacatcatgaat

SEQ ID NO: 1801 - DNA, 361 bp, synthetic construct
  misc_feature 1..361: note = Description of artificial sequence: synthetic polynucleotide sequence
  source 1..361: mol_type = other DNA
ttgatctgagtggtcacagcaaatccattccctcactgatgaagctcaaattaccttggccacattctttagatttttccctttgcctctgaatgaagcattcacttgacgtagataaaatacagacacctcagcctccagttcagccactgtccagtcaagcaggaaagtacattgtgagtgagtcttaagtgaaaaggactagttatgatgcatttgagacaagaaagtagatcgagctttaggcttttccttttcttgccggaaaggaaaaaaacaacattgcattaatcatcatctggtcctcggccaagattcgtatttacctgttatgtgccatattcatactcaccctgtaatg

SEQ ID NO: 1802 - DNA, 361 bp, synthetic construct
  misc_feature 1..361: note = Description of artificial sequence: synthetic polynucleotide sequence
  source 1..361: mol_type = other DNA
tggcagcctcgtgccatttatcattccaacagcccataacagatgaggagacacagatgacttgtccagggtcatcaagcttgtcaatggcagagtgaatgttggagctcagaccttctgactctcaacccaatgagatacaaataaaatagtggaaaccaccagccagccctcccaagtgtttaggggcattaaagacactggccatcctaaaggcgcctcttactcttatacatcatctaccactgaaaccagagcttccgctgtgcactgtccatgcgtggggccgatcaaggacaccaaggctgtgcaatgacaggtttcttctctataaactttccttgtctctttcttttaagac

SEQ ID NO: 1803 - DNA, 479 bp, synthetic construct
  misc_feature 1..479: note = Description of artificial sequence: synthetic polynucleotide sequence
  source 1..479: mol_type = other DNA
aacatggctcactgcagcctccacctcctgggctcaagcaatcctcctacctgagcttcccatgtatgtgggaccacaagcatgccgcaccatgctcagctaatttttaaaatttttgtagacacaaggtctcactatgagctaccatgcctggcctagggtaatttcttaaagtagagctttatctccttgtcgagaggcatttagatgtcctttcttcaatgaaagattctttttctcctctaaagaacccagaaataatttgttggtcctttactatgatgtccctaacagatctaatcatgcctctccattttgagaccattcattctttcaaacaccattatttttattcagacagtgtacctagcaatagtcccggcactgggaacacagaaatgaaaagttactctctttaagaaattcacagttccaaaacctcggctgtacccacagagtcagggtcatagggaagtttc

SEQ ID NO: 1804 - DNA, 241 bp, synthetic construct
  misc_feature 1..241: note = Description of artificial sequence: synthetic polynucleotide sequence
  source 1..241: mol_type = other DNA
agtaccagatagtgggaggagggccagggctgccagtcgttggtgaatgtggtaaggtggcaggctgttggcagttgagagctggcatccagcattaaccttagaaacaaagagctcaaggagcagaaatccagccacagagactgggattcggtcataggacttctgttattgagaaggactggaagacagagctgggtaggaaccaagataggcatcccattacagcaaaggcttgttt

SEQ ID NO: 1805 - DNA, 240 bp, synthetic construct
  misc_feature 1..240: note = Description of artificial sequence: synthetic polynucleotide sequence
  source 1..240: mol_type = other DNA
ttaggtggcagacaagggcacagaaaagccagcaggagtgactcaatactggttccctgaaccactggtcccaagcttcctcttgataaagggtaggcctggtcccggagtctgggtggagctgaacttcaaagtaaaggagggttaagtaagcctaactggaaaggttctgggccgtaggggcagacagccaagcatctcactgcagctaaaacccaagtaaaataaataggacttatg

SEQ ID NO: 1806 - DNA, 240 bp, synthetic construct
  misc_feature 1..240: note = Description of artificial sequence: synthetic polynucleotide sequence
  source 1..240: mol_type = other DNA
gtatgcacaaatctctcataccagagaaagtggacattccaagtttgtgtgatttgaaggaaaagattttagttccgtggttcttgtaggttgttactagattgctagaatgcttataatataagatagttttgtgtgatgggtttatttgggaatgtgatgatagaaacaaaaggaaattcctttgttttttattaccatacaaggataagattttgagattatctttccaaggaaaac

SEQ ID NO: 1807 - DNA, 241 bp, synthetic construct
  misc_feature 1..241: note = Description of artificial sequence: synthetic polynucleotide sequence
  source 1..241: mol_type = other DNA
ttatcaactatctattatgtatcaggcacaatcctttgtactgggattccaaagacaaataagatagttcttgacctcaaggaacttgtaattcgttggggaagacagataagtaaccaacaaattagaacgtagggtgattggagtgtgtttcatgtcactgcgccacagaagagaagcagttgacttaggagaggagaaagtttaatttgggccatgaaggaaattaaaagtaaagacc

SEQ ID NO: 1808 - DNA, 480 bp, synthetic construct
  misc_feature 1..480: note = Description of artificial sequence: synthetic polynucleotide sequence
  source 1..480: mol_type = other DNA
tccaaattggtgggcagccattgaaggattttaggaaagtgatgtgctgagggatggattataagatcgggggcagaaagaccagttacaagggaaaatcatgctggtcatgccccagtacttacatttttctcataccacctcttagagcccctgaaagtgtagactccactatggagaagcaacacaaatgtgaaatactagcttgcgagccacgtgggtagctctttcctcttcaggaaaggggaatgctagtgtctagaagtgggagagattgaaatgattctgtaatgaggaaataagttacgttagggcacatatataaagaaacagcagaaaaaatgtaaaatctcaatcactctgtagccatgacatttataaaaatgaaaattttacaagagtatttctaaatgctttgaagttggcccccaaaaagcctgcctaccttcactttgagttacaaataaaatccctagtgtt

SEQ ID NO: 1809 - DNA, 481 bp, synthetic construct
  misc_feature 1..481: note = Description of artificial sequence: synthetic polynucleotide sequence
  source 1..481: mol_type = other DNA
gcatagctgtgtgagtggtatttacattctcacacatttcagatctcttgagtccattttgctagtatttgttttccttggagataggagttaattcagtcacactttcttcccctgacaataactgcatttttttctctaaggtagctttccctccaaccgttgcttgttgttcttacccaagacccagtatctgccaaaacaaatgtatgtgagtgataaacgctgagaggaatgtctgttggaccacaggaaatttcctgttcaggaagagatcttgggaacttcctgtggaggagtgcattgtgggacttttggctgcagtcccttgaccacagctgcaattaactaaaggcagagggggaggggagaggaagaagaggagacagctacccacagacattcttatccatgtagcccgaggagagaatgggctcatacaggttcacaactttgcaagtgaactagatgtctagtgcag

SEQ ID NO: 1810 - DNA, 479 bp, synthetic construct
  misc_feature 1..479: note = Description of artificial sequence: synthetic polynucleotide sequence
  source 1..479: mol_type = other DNA
aacaagatcactgtgcccaacctcctttactgccatccatctttcacagccttcccggtgctttcctagggctcctaaaaacagtcactgtcacattatccatgtgcattccccagtccctcataagcacacatgaagtgtccatgccctctgtagccccaccaactgtttggaatctcttgattagcttctagaatccaggcattggagttggtggtctttctccatcccaacttaagtatgaaagagaggagaggagaacccgtggctctttgacataccttcatgtgaccctaaaagcattagggaaacgttatggaactgttacgaaaaaagaggttaataaatccaattgataagcacaatcaaaaccaacaggagaaccatgcattcttgtgctgcaatgccattacgaaatgaagtcctcgttaatacctcatactccccttcttggtccccaaactgggcacgtctacttt

SEQ ID NO: 1811 - DNA, 240 bp, synthetic construct
  misc_feature 1..240: note = Description of artificial sequence: synthetic polynucleotide sequence
  source 1..240: mol_type = other DNA
gcattcaagtgcctgatgtgtgtgcgtgtgtgtgttttattttttattttttatttttttgagacaacctattgcctaggttggagtacagtggcatgatcactgctcactgcagcctcgatggcctgggctcaagtgatcctcctgccttagcctctgggtccctgggacagacaggcataccaccatgccctgctaatttttaacaattacttgtagagacaaagtgttgctatgttg

SEQ ID NO: 1812 - DNA, 241 bp, synthetic construct
  misc_feature 1..241: note = Description of artificial sequence: synthetic polynucleotide sequence
  source 1..241: mol_type = other DNA
cccaggctcttgatgtttctttacagccttcactcagtgcttttatggagtccatctctgaagagcagggcttatatttgagtttcaaaaatctaaagtctcagctggtggcaatttacatctgataatatatatgaccttggaagtctctggcagacataggaaaggggagtggacatctaaggactgaaaaatatcccaggccattttctgggtcatggaaaagtaacctgaccttctt

SEQ ID NO: 1813 - DNA, 481 bp, synthetic construct
  misc_feature 1..481: note = Description of artificial sequence: synthetic polynucleotide sequence
  source 1..481: mol_type = other DNA
atcccacctcctattcatcatccatctcacctcccatccccatcacattttaaattttaattaatttttcattggcagataaaagtcatatgtttatggtatacatacataaaacatgatattttaatgtatgtatacatgtggactggctagatcaagctaattaacatagccattaactcacatacctgttttttgtggtgagaacatttaaaatctaccatcttcataattttcaaacatacacagtgttattaaccataatcaccgtgttatacaacagatctcctgagcttattcctcccatctaactgacgttttgtatcctttgaccaacacctccccacccgcatcccttcttttactctgcttgagttcaacttttagattccacatgtaagcgagatcgtgtaatatatatcttttcattactggcttatttcacttagcataatgtgcaccagattcacccatgttgctg

SEQ ID NO: 1814 - DNA, 240 bp, synthetic construct
  misc_feature 1..240: note = Description of artificial sequence: synthetic polynucleotide sequence
  source 1..240: mol_type = other DNA
cagatggacttcaaaatgtaaaatattcttcatgagaatgaagttacccccccagaaagggggaccagttactccccagaaagaattaaaaagtagccgggcatggtggcacacacctgtaatccagctaatagggaggcttagttggggggatcacttgagcccaggagtttgagaccagtctcacagtctcagcaacatagccagaccctgtctcatatttttaaaacaagaattaaa

SEQ ID NO: 1815 - DNA, 241 bp, synthetic construct
  misc_feature 1..241: note = Description of artificial sequence: synthetic polynucleotide sequence
  source 1..241: mol_type = other DNA
aagcaagaatagtttgcagcaaacattttctgagacttttctagataatactaggtttagtccgccctccaaagtagtataattacatcatggttttaaaattaaaagcaaaaatataggtgaagcaaaagtgagctttattcatcgaaaatttgtcctcactcatcccatgtgactttttaaagtgtaattctaaggagactcccagcatccggatggcaaatacgtgaacagagaaaca

SEQ ID NO: 1816 - DNA, 479 bp, synthetic construct
  misc_feature 1..479: note = Description of artificial sequence: synthetic polynucleotide sequence
  source 1..479: mol_type = other DNA
taaattaactggaagggaacaaaatagacctctcagctgaccaattctttgtagctttgacattggcctttaaaagaacgaggcaaacttttttaaagaaagttatctaatttaatgcaagaggtaactctctggctatgacttagggtaattaggcctattttctacattttggacgtgtttcctatggctggaatgtaaaagcttatttaatattgatgtaaccccaaaatttaagtaattggaatgcactatttctatcacattctattgagctgaagtataggttgtgctctgttcaattcaggttgtcttgacaaagactgagaaatagaatggccctccaagggcatacctgactattctgcggataacacagtcacgcaggcatttgctatagtgaaaatactgttatggttaagctagtggtatcttgtatttcaatgataccttacggtttaccagttttcatgtaatat

SEQ ID NO: 1817 - DNA, 480 bp, synthetic construct
  misc_feature 1..480: note = Description of artificial sequence: synthetic polynucleotide sequence
  source 1..480: mol_type = other DNA
attaacctatctcatttaatcattacagtgttccttggtgtacagatgaggaatcaaactcagatatgacgaatcaaactcagataggctaagggtggaggtagaccaggagaacctgcacccgcatgcattcttctcactgcaagttcaggcaggccaggagatgaaagccagcatgagccagtgaataagcaattatctgacaaacccaaggccagcagaagtaagataacatctttgttcccctccatttcttcctatgccatccagccctcaacccctgctaccttcaagccctgttgatactcacgccctcctgcccacattccttcggtggggcactgaagttttggtggaggggagcagagcgaggaactctttgtttgtgcagtaaggacttccttacaggaaatttcctgtgatggaaactctggggaaacttcctgttggttaggccactgccgggggctgataacctga

SEQ ID NO: 1818 - DNA, 241 bp, synthetic construct
  misc_feature 1..241: note = Description of artificial sequence: synthetic polynucleotide sequence
  source 1..241: mol_type = other DNA
accacttaaaaccttcagggctctgctgctgagaggatgggatggcccttccctgcttctccaagtctgggagggcaagaaagtccaagcgtacagaagcctcaggaatctccctgggatggtattttccaggagctaaaagctatggctctcatcagctgatcttattctagaagaccagccctcatggttaaatggactgcttagatttataacgagaatggtacctgcagcgacatac

SEQ ID NO: 1819 - DNA, 240 bp, synthetic construct
  misc_feature 1..240: note = Description of artificial sequence: synthetic polynucleotide sequence
  source 1..240: mol_type = other DNA
tagctggatgcattaatagggctttggaaaccatctcaaagttctgggtctggttcttcatacatcattttaaaacatattcctgttatattactctccagtgttaagggtttatgagcactgcaaacatttattttcagctctcacttatgaacttggaattctaattaatccttgtcattgtcagacatggttgacactgtatgctgtgtgggtcacttagcaccaagtgtaaatcat

SEQ ID NO: 1820 - DNA, 240 bp, synthetic construct
  misc_feature 1..240: note = Description of artificial sequence: synthetic polynucleotide sequence
  source 1..240: mol_type = other DNA
ctggggtatgtcttgcaggacgaccaatcttaagccatagcacaaaattcttaaatagactttacaatcatttcacctagtttggacttctggtggattattttgttctttgtcagcactccagcaaagataattactcctaaatcatgccttggattgaactgagctttgaatgtctccaatgttgggaattccgtaggttcccatagcagctctcctggcccagctcttagtttgaaa

SEQ ID NO: 1821 - DNA, 239 bp, synthetic construct
  misc_feature 1..239: note = Description of artificial sequence: synthetic polynucleotide sequence
  source 1..239: mol_type = other DNA
gtttggtctcctaattagcctgaattttctctagtgacctataagcccattattgtaagccctgtccttattgtgtcataaaaataattgactccttgtcttcaatctatttcatataggtagacagctgccacatcaagaacgtcttgtaagtgcttgatttaccaaagtccatttctccacaagtttcttcatagttgttttcctggattgggggttattttagccttactttctaa

SEQ ID NO: 1822 - DNA, 240 bp, synthetic construct
  misc_feature 1..240: note = Description of artificial sequence: synthetic polynucleotide sequence
  source 1..240: mol_type = other DNA
aatgactggatttaatggaggcctctgtcagtcccaactctccaaatttctgccccagcttggtgctctttgctttgtttatagtaaataatcatttcagcatcagaataaatcagtgaactggacatgtctttaggtggacttttgagattatattcctggtccacattgcaaattagggaagaatgaaagaaattataattaactaggaagaaatttgtccgctgagaagtctccctt

SEQ ID NO: 1823 - DNA, 240 bp, synthetic construct
  misc_feature 1..240: note = Description of artificial sequence: synthetic polynucleotide sequence
  source 1..240: mol_type = other DNA
gttagactcctagaaaatagagaccataatattttataattttttgtcacagtttccatacatatttgttgaatgaatcctaaaagtcaaaagggagctgcttattggatttgagttgcttctagaacatgttaaaaattatgtgaattttctcaatgtatttgtaagaataagctgtcctcgtgattgagtattgatcttcaaaatggagaattatcagtggtgagtgatgctgcatgt

SEQ ID NO: 1824 - DNA, 478 bp, synthetic construct
  misc_feature 1..478: note = Description of artificial sequence: synthetic polynucleotide sequence
  source 1..478: mol_type = other DNA
aatgtacttataaaggataggaaaaatattttgtaaaaatgccttgggataagctttaaatataaaaatccaaaatggtgatttagtttggggcactcagaggaagaataagaatagggcctgtttaaattttttgcaacatgattactcctggttttacatttgattttgtattatagaatgagattaactggaatatgttataaatacagaaagtctgtcattataaacactagtcagcaccttttgtcttcataagaataattgctattttcaatgcatacttgctctaaaatagaccatattgatgtcataatatgtagactgagcaaaaatattattagtatcatcatcatcatcatcatcttctgatcttcatcaaagttgtattaaaatattttggtattctaaatatcattatcttttttgaaagcctacttagggtaatagaaggatcaggaactttggactctttgac

SEQ ID NO: 1825 - DNA, 479 bp, synthetic construct
  misc_feature 1..479: note = Description of artificial sequence: synthetic polynucleotide sequence
  source 1..479: mol_type = other DNA
agatttctagttttttctatttttttgctattctgtaaattctttcaaaagatttttatcaggtgtttactgcatactctgaagtgctgggatatatcagtgaccaaaacagatatgacccctgccttcatgttgcttacagtttaataggggagataagtgtctaccaaggaattcacactagccagagagcacattgcccacacagcatccagagtaatctgttgtaagataaatcagactgttacttccctgtgccaaaacctccactggcttccagtttcatttggaaaccttctgagttctcagtatgaactgccaggccctgtgtgatctgaaatttgtaaatctcgtcaacctctccaccctcatcctccatcaccttgtgttctgctagttcctcttcagccaccctgatctttttgctattcttggaacacacaagtttatgttctacctcagggcatttgcacttgctg

SEQ ID NO: 1826 - DNA, 241 bp, synthetic construct
  misc_feature 1..241: note = Description of artificial sequence: synthetic polynucleotide sequence
  source 1..241: mol_type = other DNA
cccttctgcctatgaagctgtttctccagatactctcatgttagagtccctcaccttatccaggcctctgcttaaatatcacctccttagagaagcttccccaacagcattatccaaacgacaccttccttcactctccatcacctttatcctgcactatttttcttcttggcaattttcaccacctgacatgtaattttttaaaacactggatggtgacccttaggtatctattcaaaat

SEQ ID NO: 1827 - DNA, 239 bp, synthetic construct
  misc_feature 1..239: note = Description of artificial sequence: synthetic polynucleotide sequence
  source 1..239: mol_type = other DNA
ggccattcttgtgcacagctggggtatgatgccagtgggtccacctgtagggtaattggatgggcctggctgtctcatgggagactccagagtcttttcttttgggaaggcaagtttgtccaaaaagaaatcctgtgggctcctccttagaaagagtcaatatatgatggcacttgagcttttaccatgaagatttccactgagttcccctatattccagagctgctcacccttgctcc

SEQ ID NO: 1828 - DNA, 241 bp, synthetic construct
  misc_feature 1..241: note = Description of artificial sequence: synthetic polynucleotide sequence
  source 1..241: mol_type = other DNA
ctcctgaacttggcgttctcagattcatcctgattccagcaagggaaatgtcctttcatctgcaaggaggtgcaggttgctgggctgggggagggtggaatacagccatgccacagatgctttattagtcttctctgttccctgcctgccttcagaggcacttggaacccccagtttctgaggttttatgaagttctggtaggaaaacgagtttgtttattggtatctccccctgcaggca

SEQ ID NO: 1829 - DNA, 240 bp, synthetic construct
  misc_feature 1..240: note = Description of artificial sequence: synthetic polynucleotide sequence
  source 1..240: mol_type = other DNA
gattgagttaagattttctgctcagctgagtcagataccaattgtccgtctgttccagcttccaaaattttgtgcacctccctcaactgccattgtttcctctcccattctgttgtcttgtgggtttgtaccttttttattcctctatctggtttagtgggacgtcagacaggagcagggatagacaagatatgtctcatcaatgtagttacatgtggaggtaaaagcattgatgtagca

SEQ ID NO: 1830 - DNA, 241 bp, synthetic construct
  misc_feature 1..241: note = Description of artificial sequence: synthetic polynucleotide sequence
  source 1..241: mol_type = other DNA
gtacaggatgctttgaaagcataaaatacagaaatctggtctggtgtgtcgcatacatttaagaggagacttgaaagctaagtaggagttaattgggcaaagaagaaggtaggattatttctggggaggggaacagagcctgtgaaggccctgagactggaagaggatttgttctacagggaatggaaagcccagcccaactggcattcattgaatttgctgtggaaaagcagagtgacac

SEQ ID NO: 1831 - DNA, 239 bp, synthetic construct
  misc_feature 1..239: note = Description of artificial sequence: synthetic polynucleotide sequence
  source 1..239: mol_type = other DNA
attgctttggtgaggattgcagatggtgaggtagaacaagacagtcacgttaaggattttgatctttatcctaagagcaacaagcatccgtgtctgtgttacctcagtaaccttggacctcgtaaactctgggttcttttataaaccaggcacagtaatatctacctcacagagctgtgtgcattgcatgacatcatatacacactatattgacttaagactgtcatatttgtttgctc

SEQ ID NO: 1832 - DNA, 479 bp, synthetic construct
  misc_feature 1..479: note = Description of artificial sequence: synthetic polynucleotide sequence
  source 1..479: mol_type = other DNA
aactcatggatatgaagggcagactgtataccttgtcaggtacttttttctttttattgtatcccatgggggaaatggatggtagattggtggaggtggctagaattgtaaagaaaaatatgaaattcacatgaaggctggagttactcatatgacaacaacagcttatggggcccaattctattgctcttgcgtctgtcacacagttgaggttttggaatgaactacgtatgccatccttgttggacagtgacaagtcactgtagccccctaggagaagaacagtataatcaagatgtcaggttgaggaataatctttgtgatcaactgagtgaaaggtacaaagtaagaaacaattgagaggcattgctctgggcccaaaagtctagtaacaggcaattagaggttaaaggataagcatttgatagtgttctagctatactgcaaaatgaatgctgcatgaaggctaactgagaagc

SEQ ID NO: 1833 - DNA, 241 bp, synthetic construct
  misc_feature 1..241: note = Description of artificial sequence: synthetic polynucleotide sequence
  source 1..241: mol_type = other DNA
ttatcagttggtagttgggaactaaagaggaagcaggcaccaaggaaagatggaaagttctacacacctttgttagttacacatggaggtaaatgcattgatgatgaatctgccatttttaggttttcatgtttaaaaagtttcctgacaatgtgtctagcaatgtgctagacactgtagataatatacaataaaatattaaagaggcggctcgtcctcaaggaactttcaagcattcata

SEQ ID NO: 1834 - DNA, 239 bp, synthetic construct
  misc_feature 1..239: note = Description of artificial sequence: synthetic polynucleotide sequence
  source 1..239: mol_type = other DNA
catttctgtttgattgtaacatatttattattttaaagaactggccagagagttgcatgttctgtgtagggataaatagcaagtttcaggcccctgcatttattggcacttacgtacatggtagtcctcacacctttgccggacagcaccaaaaatcctgcggagctcaactctgtgacctcaccctttgagcctggaaatcagcatgaactcatgatctgacaatcccgaacaagcta

SEQ ID NO: 1835 - DNA, 479 bp, synthetic construct
  misc_feature 1..479: note = Description of artificial sequence: synthetic polynucleotide sequence
  source 1..479: mol_type = other DNA
agcatttcttaaaagaaagcagtgacttttaataggtctcactgatggtgttccaccgattaaatcagtcaaacagaattgtcacattgaagattatcttgggtttctagaattcattctaggttttaaagatgcagacagattctgagggtcacaaacgtcagtttgccaagtatgtttaggctgtaaagttatccatgaaaagaccgtgtggtttgcatgagattgattgtgatcggatgtaactacattgctttttacagctcagtagaaaccactttcaattgcaaattgtagcagaagcaggcgtctacttaattttgatcttaaagaatttcaaagagaataaatgcacactaaatagtggtggattttggtagtatacgccaacatcactttttatttaacacatgcagaaatgtgtactggtagagaaaattggtagagtgaattaaagtacagacagatccacattgact

SEQ ID NO: 1836 - DNA, 241 bp, synthetic construct
  misc_feature 1..241: note = Description of artificial sequence: synthetic polynucleotide sequence
  source 1..241: mol_type = other DNA
ttaaatgaatacatgcacggtcagaaaacggtaaccctgggcaggaatctttaagttttcagggctcattagacagtgagcaggtgaggctcaaggctgagtttgcaactgtgctgtgaaaactcaaaaatgaaagtttttttcatttctgagcctgttgaaaagtgggtaagaagggaaagggcagtctcataataaaataatatgtaaaggctaaccaaataacccactttagtcttta

SEQ ID NO: 1837 - DNA, 239 bp, synthetic construct
  misc_feature 1..239: note = Description of artificial sequence: synthetic polynucleotide sequence
  source 1..239: mol_type = other DNA
cttactggcaggcagcaacatgtcctatttacagagggaggctttacctaagtggttatatgtaaatgaaccaccttttcaatgaaacaggatgcacctgtctagaggtgtctgttactagagcaatggatgtttgattggactgacaaattttatttcctttttggaaaaaagaatgtaggtggtatcaaatcaccctttctcctggtaacaataggaattacttcttgaacttgaga

SEQ ID NO: 1838 - DNA, 480 bp, synthetic construct
  misc_feature 1..480: note = Description of artificial sequence: synthetic polynucleotide sequence
  source 1..480: mol_type = other DNA
aaccagtagttgcttgacctatgttttttgcatttagcatagtcttctaaagtagtaggagcatacgtttttgtctttaattccctgcagaccccttccccaatgatcatcagcaatacatccacccataaatcaatgaaatcataaaaaagaaacataaaattcacttgaaaaagaatacctacaaggcattcctagaattctcaatgtaagtcattttttgccagcaaagctaattgttctcaaatatttgataacaaggatggcatacgtagttcattccaaaacctcaactgtgtgacagacgcaagggcagtagaattgagccccataagctgttgttgtcatgtgagtaactccagccttcatgtgaatttcatatttttctttacaattctagccacctccaccaatctaccatccatttcccccatgggatacaataaaaagaaaaaagtacctgacaaggtatacagtctg

SEQ ID NO: 1839 - DNA, 240 bp, synthetic construct
  misc_feature 1..240: note = Description of artificial sequence: synthetic polynucleotide sequence
  source 1..240: mol_type = other DNA
cccttcatatccgtgagttgcacatccgtgattccatccagccacagatagaaaatattcagaaaaacaaaaaacaaaaaaaaaaaacccacaaatgcaacaataaaaaaatacagactttcagaatagcatataacaactatttagatagcatttacattgtattcgttacaagtaatctagagatgatttaaaatatacaggaggatgcacataggttatatgcaaatatacaccatt

SEQ ID NO: 1840 - DNA, 240 bp, synthetic construct
  misc_feature 1..240: note = Description of artificial sequence: synthetic polynucleotide sequence
  source 1..240: mol_type = other DNA
ttatataagggatttgagcatccttggattttggtatctgggcggggggtcctggagccaatcccttgtgtatgcagaggaatgactgtactggaaagcaaagtaaagctacaccaaagagggtaatagcaggctataaagtactgagagaaactaagagaagaaagtgaggtacctctgacaaaggagtgcttggaagagaaaggatgaatagaaaaatgggatttcagggaattcatt

SEQ ID NO: 1841 - DNA, 358 bp, synthetic construct
  misc_feature 1..358: note = Description of artificial sequence: synthetic polynucleotide sequence
  source 1..358: mol_type = other DNA
caggaggttaaggctgtggtgagccgtgatcgtgccactgcactccagcctgggtgacacagggagaccctgtgtcaaaaaaaaaaaagataggaagtgagcaaaagagaggtcatagataatggcatgatgaaacagaggaaaaaaaggataagaaggaggaagaaaaaatgtacaataaaacgagaaggaaggatgcaaaatgaatataggaaaaacaagagaactgaagacaagaggaaaaaaggagatggtagaagggaggaatgaaagtaagtaaaataggaatgaagttcaagatctatttagccatagctaaaggaacgtattatcagctattgatttcctcttctaataa

SEQ ID NO: 1842 - DNA, 360 bp, synthetic construct
  misc_feature 1..360: note = Description of artificial sequence: synthetic polynucleotide sequence
  source 1..360: mol_type = other DNA
agaggagaatgatatggatagtccagaataatggatcatttgcaaaacattaatgtgtcttgacttaaggtacatgtttataattacctcgaactgtatatttgtcttcttccatgtgtggttttaaattattttaccaaaatggggaagccaggagatacatacttgattcagtaaaaccagctttttattcgtagtttacttcctgctgcatccttttttcggctgagagggatcaatgtctgcaggtgtcccttaatccataattaaaccatatgcacatctaccctcccagtttccctgcccaccataaaaccttcatcttggctattgcttggaaaatggggagggaatagagct

SEQ ID NO: 1843 - DNA, 479 bp, synthetic construct
  misc_feature 1..479: note = Description of artificial sequence: synthetic polynucleotide sequence
  source 1..479: mol_type = other DNA
ctgacctcgtgatccgcccacttcaacctcccaaagtgctgggattacaggcgtgagccaccgcacctggctggaatggagcattttacttgagacctctgtgagctggtcctgagtatgagtagtgaattccaacccacttttctcctaatccctgtcgtgtcctagagtgagaatatacagaggggttggaagtgggtttatgttcatgggctttctagatggactttcaagtccaagtagaagtccaacttgagagctcgtgtagaaagcccttgaatgtaaacccgtgaagaaaagcacttccttatttcagaaagagcacaaaagaccagcaatccaaaggcatttcgaagaccttgaaagagctgggagtggcttaggtatggagggtgcatgtgtgagtacaaatggcccctcagctcagaaccaagcatctgtgtgccatgatccatggttcctaaatatcatggagggca

SEQ ID NO: 1844 - DNA, 480 bp, synthetic construct
  misc_feature 1..480: note = Description of artificial sequence: synthetic polynucleotide sequence
  source 1..480: mol_type = other DNA
aaaagtataaatgtgaattaatgcaagagaaaccacactgaaataaaaaatacctgtggtctcttgagattcaagttggcaaaatccaatctaaaagatgtctgactatcacaattagtgaagtccacaggtcagattttcctctctgttcctgattaggattaacctggaaaggtggattgggtccatctttaataataactacaccttctgaaagatttgaaactattattatctctttgtttgctgctgctttcatagatttatggtaggacttggggttagatggatgatccaggtcacctattccagcctcacactctgcctctattccaaatatgacatcactgagcgatggccacccaccttcccttggatacctctaacaatgggaatctcactgtttcacaggcagctcttttttttttaaacacctccaattccaatttttaaacacctccaatgtccagaaagttcttt

SEQ ID NO: 1845 - DNA, 479 bp, synthetic construct
  misc_feature 1..479: note = Description of artificial sequence: synthetic polynucleotide sequence
  source 1..479: mol_type = other DNA
aaactcttaaatacatgacatttattaaaacaaagcctcaaaccactttcagagtggtggtacagcaaataattgattcttttcagggtttttcccccctgtgttttttgtcttctctaactcaaatcattgcccggatattgcttataacaggagctcagcctcaaccagtctttctgcttttaccacatgctctagtggaatctagattaccggactcatttcgaatctaactaaaaatgagaaatgctctgtttatataaagcttggcaatcaataggaaaaggaaaggctgtttagcaaaggccagtgataattccaagaagcagtgtcttttggaatatgctatggtgacctggccactgcagctatctgcttatctgtctggtttcagatttccagaaaggactcgctgccttcgaaacacttcccagcccttccttgggtgcctggatttctaccattagcagtttactcct

SEQ ID NO: 1846 - DNA, 241 bp, synthetic construct
  misc_feature 1..241: note = Description of artificial sequence: synthetic polynucleotide sequence
  source 1..241: mol_type = other DNA
tgagcatggatttttgcagaaagacatgtagaccagggagatggctcattaagctcttggtggtcatttcaccagagcatttagcatttttaaatcccttcctggatgcttgttttagtgatgatggtggtggtgagatgaagcagggatgtgtagatcatgaagggatgggaaaggggatgatttggttggaacgaagcaaaataacatttctgagtgcctgctaaggtccagcactttt

SEQ ID NO: 1847 - DNA, 240 bp, synthetic construct
  misc_feature 1..240: note = Description of artificial sequence: synthetic polynucleotide sequence
  source 1..240: mol_type = other DNA
cacacgtaaaattttcacaacaatccctgtgagttgggatccagtttctacagatgaggaaatgaagacaggagactagatgacctgaccaggtcctaggccagtcaggaacagagctgggatttaaaccagagctgcctggtccaaaacctgtgctggtcctgctattttatgacacctagaagggaaaagggcagagaactggaaagctgagatggaatcacctacttaagaattttg

SEQ ID NO: 1848 - DNA, 240 bp, synthetic construct
  misc_feature 1..240: note = Description of artificial sequence: synthetic polynucleotide sequence
  source 1..240: mol_type = other DNA
cagaaggctaaccctgtctaaaagcatcgctttgcaatcagacacatgtggcagtaaaaatgtcccaatgctaactcattttaagccttggttttagtctacctaaaatttatagaacactgtaaaatatgctacatgtaataagatatttattaggagtcttcttgcacttgttcagaatgctttttattatgtttctgctcattattgtagatattctcccattttggagaaattgac

SEQ ID NO: 1849 - DNA, 240 bp, synthetic construct
  misc_feature 1..240: note = Description of artificial sequence: synthetic polynucleotide sequence
  source 1..240: mol_type = other DNA
cgcgtgcacactcttcactggagttttgcacaaatcttaccagaaaactggtgaagatcagtcctgaggccccttccgcctctaattccttgcagtattttggctgtactatgtgctgttacactagatcacaataagcagctgccagtttcctcacaggttcccttggggaaggatatgggaataattcttaggaaccccccacaaattatagcaaccaatgcagtaaaacccctttag

SEQ ID NO: 1850 - DNA, 478 bp, synthetic construct
  misc_feature 1..478: note = Description of artificial sequence: synthetic polynucleotide sequence
  source 1..478: mol_type = other DNA
ctcactcctccccctgtgctcactcacatactcaaatatatttagtgctttccttcctctcactccgacacttttgggagagccctgggggtggttgagtaccttgtccttgggtggattttcttgttttctgagactggctgccatcagacttcgggagaggatcttaccagaggcgggtctcttcttcccccgccaccgccctcagtattctttcacagccaccacaaagccacgctttctctgctaagtacacattcctaggactgtaacaaaaggcttctgtgagtttgaaagctgcaggggaggctcctgcgtgaaggcctaagatttaaagggtttcatttctcctgtgctggggactgtattgagtgcagtttgaaatctgcttcaccaccacaaggggaaatagaaatcagccctaaagctgcatggagaccccggctggtctttatcctcatagcttagtgatttcctg

SEQ ID NO: 1851 - DNA, 479 bp, synthetic construct
  misc_feature 1..479: note = Description of artificial sequence: synthetic polynucleotide sequence
  source 1..479: mol_type = other DNA
ccacccaagaggcagtgaggggctccctgacattccggaggccccaggaaccctggctgcggtgacccggtgctggggagggagtgcatggggtaggctcctggttgtgagccttcagttcgccgggatgtctatgctgtgctgtgtggctacttagccaaggctgtgcatgccagccggagccaacagcttcagcaaacctgccctccggggagagtggatttcattgttttcaaagagatacaggaaatcagaattttccatccttccatggagagacttggattggactgagaagagaaccagcattaaaaaggaagtctccttccctttcttccctgcccctcctcaccccagccccagcccacccgccaggggcacaccctccctctgccggcctttgggtggaaaccttcctgcctgcagcacaggcagtgtgaactgcggggctgtctgagcaacccagctcttgccttttc

SEQ ID NO: 1852 - DNA, 480 bp, synthetic construct
  misc_feature 1..480: note = Description of artificial sequence: synthetic polynucleotide sequence
  source 1..480: mol_type = other DNA
agtagcagaggtaatgtggccacgactcagaattatgggaccccagatgctgaggaagtaaactgacttcttttcagctcacagcagacgcatagacaacagagtagatttcatgttctaatgaaacagtgtagaaactctgtccttggtggctcagtactgtgtggtatgagcctctgcctccctccctccctccctctttccttctcttttcctcccccaccccttcacggcctgccctttcctgattcttcagaactgacaactataaatccagcccaaattcctttaaacaaagggtcaccaagagcacgaccttgaaaagacttcttgtgatatgcacttgcagagttgcatattgttccttggatttaggacaggccaaagaaatcttccactttatttaagaagagcctgtgtggttcgaggccagggccgtggacataggattaaccacaataataatacaatgaagtacac

SEQ ID NO: 1853 - DNA, 241 bp, synthetic construct
  misc_feature 1..241: note = Description of artificial sequence: synthetic polynucleotide sequence
  source 1..241: mol_type = other DNA
atgcaaaatgaaaacttaataatgaagaactactgattttttccagggagtatcaagcacttccttgtaaattcttacaaggcatgaattatttcctagaaatgatttaggctcttttggaaaagtgcattgattcttttaacatcataattccagttacggtaaaacctccattatctgattttctgtgaattgcaaagctattattaactggtacattttatattttaccagtacagtg

SEQ ID NO: 1854 - DNA, 239 bp, synthetic construct
  misc_feature 1..239: note = Description of artificial sequence: synthetic polynucleotide sequence
  source 1..239: mol_type = other DNA
acagctgatatttataatggtgaccccaaagttctgtaaaatgccgaattacccactcaggaatcaaagaaagattaaattgtgttaaatagagtttttcatgttaagtgtcttattttattcagatcttgttttagaaagtccaagtgtacatccaccataattttcgagggcagtaccaacttaaaatgttttatcttttcttggctttgtaaacaaaaccttgtaaaaaaaaattt

SEQ ID NO: 1855 - DNA, 479 bp, synthetic construct
  misc_feature 1..479: note = Description of artificial sequence: synthetic polynucleotide sequence
  source 1..479: mol_type = other DNA
tttttttcaatactttgggttcaaactacagatcattcgatctcaaacctgacaggtaaacaaatttttttttcagagtaagtattgcagacatgaaagatcataaatgtgttcaccaaagtgagtgtgagacagatcaccccaaacactctccactatttctctatgatcttagcccagctgtgtgtgttgtgagtcatgcctgggtctgacaccagcattcagaggctggcatagcttagcatccacatcataaagggctcagatcgatggctctccttgtcaagctctgcagccctctctcaggctttgtgagatgtggtttgcatcattttcctttaaggaaatgttatgcagaaacataaatgcagtatacaacgaggaggctttcaccaagaaattaaaagggtacagatgtctaggaatgcaggggttaagacaaaaatgtactgcagggaaagaaatgtgagcagaatgcc

SEQ ID NO: 1856 - DNA, 480 bp, synthetic construct
  misc_feature 1..480: note = Description of artificial sequence: synthetic polynucleotide sequence
  source 1..480: mol_type = other DNA
cctcttttcgcctgcttctgccttgcatccagcccttcccggggagtgtgatgtgaactgccatccaaggtggctgtggtacaggggcagggtctgggggctgcttctgcagcttcagcgcagaaaacccagagctcagtcccagcaaaagcctaaaggagaaggaaacagaggccctaacacaacagaaaatgatgcaccccactttcctgtggttcatcagttcacatacttcccaggagaagtcaaatcacgccccagaataggatacctacttaggacttagtgatgttttatagtcatgtcgaagaaccttcacatccatggcctcatttgatctcacagcaagatgggcatgattaaaaaaaagaagttactcccactttccagatgagaaaacaaattcaaagacagtgagtgccttagctgagtcctatccaagcaaggcagggggcaaagccaggactaaaacacaaggtt

SEQ ID NO: 1857 - DNA, 480 bp, synthetic construct
  misc_feature 1..480: note = Description of artificial sequence: synthetic polynucleotide sequence
  source 1..480: mol_type = other DNA
ctaattccttctccatgatttcctgatgcccatcataccctaatagaataggatcaccctgcaaggcaactggtccacatggagagtcctcttggaggacaccgacccgtggtgccacctctgatttgcaagttggtgcattagacaagccctggaatgacagccagaagatctctattctgatcctggccctccgtctacttgggccactttgatcaagccatttagccccgttcccttcaggtggctcagctggaagtaagaatgataatgcccatgcagctgactcacctggtgactgtgaaggccaaatgagatgatgtgtttgagagcactttgcaaactgtggagtattgccagccatttctcctaatttggctcagggcagaaagacatccaggtgaagagcttgatgtgtgtgatgacttaggcttggggatatttgtgaacaggacacaacaaataaattcgtttgacggg

SEQ ID NO: 1858 - DNA, 241 bp, synthetic construct
  misc_feature 1..241: note = Description of artificial sequence: synthetic polynucleotide sequence
  source 1..241: mol_type = other DNA
cagagggacagtatgctgggtatagtagaaactcttggaacctgcagttattgaagggtttaaaactcaaaaatgatacagaaggcagttctattacagtttctgcttttttgctgttcaacacctctgaagatggtgcgtttaatccttcctgggatggcaggttatagatgacttcatgctgaaagtgacccgtaaggaatatccgtatattttgaagtgtatgtggttcaccaggcag

SEQ ID NO: 1859 - DNA, 240 bp, synthetic construct
  misc_feature 1..240: note = Description of artificial sequence: synthetic polynucleotide sequence
  source 1..240: mol_type = other DNA
aaaacagtctgccaagtctctcatcccaggcagaaggggtggcacatgcgaaggccagagaatgcagtgcctctgagaactgtcagatgtcagtgtggctggagccaggtctgctagagggtgaggttggaagttaaccaggagtttaggaggccctgggaagcctctgaaaatatttaagcaaaaacagttagctttatgtttttgttgttgttgttgtttgagacggagtctcgctgt

SEQ ID NO: 1860 - DNA, 360 bp, synthetic construct
  misc_feature 1..360: note = Description of artificial sequence: synthetic polynucleotide sequence
  source 1..360: mol_type = other DNA
aggtgtgagccactgcgcccggccagctttatgtttttaaaagatcattgcctcgttcttggttctcagctctctgatccttttagtttttattggatagaggagagaccttaatgtatacagagactaaggaacttggaattggaaatctgcctggctccctttccctcaacgtgcctgcagtcagccatctttctccagctaagccaaaggatggtgggggcaccacacaacagagagctgagttagaaagggtgggagggaggtggctgaagggtccccactgcagttgacaatttgaaataaactcccactttccttcaatattttcctatagcaaatggaaactttgaccagata

SEQ ID NO: 1861 - DNA, 480 bp, synthetic construct
  misc_feature 1..480: note = Description of artificial sequence: synthetic polynucleotide sequence
  source 1..480: mol_type = other DNA
ccagcttctttccatccttccattagactcacagcccagttaggatgttcacagtcccaagccagggatagcacatgccattaccatagtgggctggatagggggcaggaagcaatgctttccagcccttagaagcctctggtgatgtgctgtgaacatggtgagggaacccgaactttagagtcaaacaggctggtctgcaaaccccggttccagcactcactggactcaggatcttcccaagttagttaactcctctgaccatgtctgcattttctcatctggaaaatgggaacagtaatatccaccctccagagctgttatgaagatgaaattgaaagtgtctccaacgcaccaggtatatagtataatctcaatttatgcttttgcccttagatgccagaagttaatattctttcaatacttattctcgtagaagcaaaagagatcctgtttgtgtgatgttcctacagcctctgc

SEQ ID NO: 1862 - DNA, 480 bp, synthetic construct
  misc_feature 1..480: note = Description of artificial sequence: synthetic polynucleotide sequence
  source 1..480: mol_type = other DNA
tgtactgtattatgaaagctcaagaaataggagttaatgatgaggcacagcaggaagaaaaatgtctctaagatgccaaacagggaaaatttaggaagaaataagaaccaaaaaataaatcagttgatcagggtaaaaaatgtcttatgctctgaacttataactctatggagtaatttccactaatgatctcagtgtctacttaactaatcatgtacttttctagccagaaagacagtacttgtagggtacgttccattttaatgcacaaatcattgttgcttttcaaaaagtcatctttttttccctggccacacacagcaccccgaggcctggccagcccccatgccagctcaagagcatgaactcttaccggaatgggttctgtggggagtacaaagtcaaacataagtaggcttgcattcagagctcactgcctagcgggaaaaaagacatatgcactcataactctaatttaac

SEQ ID NO: 1863 - DNA, 361 bp, synthetic construct
  misc_feature 1..361: note = Description of artificial sequence: synthetic polynucleotide sequence
  source 1..361: mol_type = other DNA
acggcgtcctagaaattccatatccatcttcaaagttctctggaagcaaaaagacaggaggaaagacatttttagaaggaggcttcctggaaggagtgacttcagtttcaggccttaaaggagatgtgagtttccacatgcaaggagggaggaaaagcatgttgcagacagacgaagcaagtgtgtgagcaaaggcctgcggggtgacagggaggggtgttgggaggtgtgtatctggatgaaggcaggtatggaaagtgctgggaaaaaaggtctgggaaagggccttgggggccaggtgataaggaagttgaatgcctctttgaagagtggggttttattttatgtgcctttggtgggg

SEQ ID NO: 1864 - DNA, 360 bp, synthetic construct
  misc_feature 1..360: note = Description of artificial sequence: synthetic polynucleotide sequence
  source 1..360: mol_type = other DNA
agcctggccaacatggcgaaaccccatctctactaaaaaatacataagtaacaaaaattagctgagcgtggtgatgcatgcgtgtaatcccagctatgcaggaagttgaggcacaacaatcgcttgaacctgggaggcggaggttgcaatggcctgggattgtgccactgcaccccagcctgggcgacagagcgagagagactctgtctcaaaaaaaaaaaaaaaaaagcaatgggaatggttcttaaggaagatttctctgggcacactgtatgttctcactgaatatttggtgtggtttgggttttataccagttacgatatggggcttggtatctctgagcctaaaatctgtgcttt

SEQ ID NO: 1865 - DNA, 478 bp, synthetic construct
  misc_feature 1..478: note = Description of artificial sequence: synthetic polynucleotide sequence
  source 1..478: mol_type = other DNA
ccaaggacagtagaaatgctagtgttcactttgctcagtactcttccctccacttggcactcatgctgcttctcaagccttggggtgtccctggttctggagtccctcctacccctgcagcccttttctaagctatagtctcacccctcctctgcaggctcccaggcagcctcacctcctcctgcagagggatcagctgtcaccctgctcctccctcctggccctcagcctaccctacccacatgcattcaccatcttaccagtggaacaggcgtccctctcctgtatacagaggtcccttcccctgagctcttctgcctcagcctccccagtgggcttctcccctccttcacagtcagcctctttctcatttgcacctagttccattccatcttcaaagaagcccacttggattgcacatctctcttcactaccacaaatctggttcctcacagccaagttctggaaagagttctcc

SEQ ID NO: 1866 - DNA, 479 bp, synthetic construct
  misc_feature 1..479: note = Description of artificial sequence: synthetic polynucleotide sequence
  source 1..479: mol_type = other DNA
acatggtgtcctcctcctcacctcccattagcgcctcaaccctccgtgatctggtttctacgcctgctgcccctctgccctggctgcagtccccagatgccgaatccatctgccatctgctgcccgaaactctcctggcttgcaagataccactgtcctctgacttgtccccggtcttgtcccctgctgttccctcctttaagaatacaccttttctaaattgcctgctgcctaaatgttttcctctggaaaactcacctactccagcggcttcaacgatcatcagtgcgatggggacttccaaatattttttatctctagcctgggcctttctcttaaataacagatgcatgtgtacaactgcctactgggcctctttacctagatgttgtacagttacctcacattcaacaaagctgaatatatcccccgccaatccatcctctgtgggatgagatgggcgggcccctctattcatc

SEQ ID NO: 1867 - DNA, 479 bp, synthetic construct
  misc_feature 1..479: note = Description of artificial sequence: synthetic polynucleotide sequence
  source 1..479: mol_type = other DNA
tagtttcaggaatcaggagcttggattttgtcattgactgcttcctccacattgaattaatctcttaagttccatcaattctaccccatggtatcttcagcccatcctttctccatcccttctgctttagttcaggctaacaatatctgtcatctccatttctgcaacagcctctgactggccgccttgtaccagtcttgccctgttctaattcattctctactctgcagctggagtgatcctttgaaaacaatatccgattatgttacgcccttgtttaaaattcttcagtgactccttgtagccttaggataaagcctgaactccttagtacagcagacaaggccttccaaggccttcctaataatagctaacacttatgaagttcgcaatccataccccacactgttctaaggtccttacacatatgtcaacatacttaatgctcataattcctgacgtaggtcctgttactatcc

SEQ ID NO: 1868 - DNA, 121 bp, synthetic construct
  misc_feature 1..121: note = Description of artificial sequence: synthetic polynucleotide sequence
  source 1..121: mol_type = other DNA
gagttttacagtggaggaaatcgaggcacagaaaggtaaggcaccttgcacaaggtcacacagctaggaagtgggagaaccaagattcaaacccaggaaacctgactccaggcccacactc

SEQ ID NO: 1869 - DNA, 358 bp, synthetic construct
  misc_feature 1..358: note = Description of artificial sequence: synthetic polynucleotide sequence
  source 1..358: mol_type = other DNA
cttagcaccatgctgcactgtctccatcatgtgccgtagcttctcatccattcagaaatattatattgagtactgaaaatgggctagaagctgcttgagacactggggatatagcaggaatccaaacaaaggtccgttcacatgctagtgaagaaaatgagtaagaaacagcatgattagtaaaattattaggtagattagggatgaatgctaagagaaaacaaaaataagcaagaaagaagaccgggggagtctgagaacagatatgcgatgttagaaggagtgtccagggaggacttgaaggaagtgaggatgtctaggagaagaatatcagctgaaggaacagcaagtccaaagg

SEQ ID NO: 1870 - DNA, 480 bp, synthetic construct
  misc_feature 1..480: note = Description of artificial sequence: synthetic polynucleotide sequence
  source 1..480: mol_type = other DNA
ccctgaggtgggaatagttcctggtaggtctgaggaacagcagagaggtcagcgtggctggagcagaatgaaggagggaaaggatgatggcaggaaaggatggtgggagctgggtacagacaggtcaggtcatatagggcccagaagatcattgtaaagaccttggcatgaactgtgagtgagagataggaagccactgggggattctgggcagagtgacatgatgaaacttacaaacagaggagtgatgtgatttgaatcaatctctggcaggtctgttgaggatagatgcagggaaggaacagtggaagctggcagaccagtcagggaccagtaacaatgatccaggcaagagaggatggtggctgggactaatgtagtagcagcagaggtggcggaagtgggcagagctggatacatttggaaggcagagccaataacacttaccaatggaccagaagggggtgtaaaagaagaaac

SEQ ID NO: 1871 - DNA, 240 bp, synthetic construct
  misc_feature 1..240: note = Description of artificial sequence: synthetic polynucleotide sequence
  source 1..240: mol_type = other DNA
gatggcgccactgcactccagcctgggcaacagagtgagactcagtctcaaaaaaataaagaaagaaagaagaaacaagggcgactggaaggtgtggggccttggccacagaaagaatggagtttgccttctctgtgatgggaaagattgggaacagcagatttagatgagtgacatctggaggttggttggcctcattaagcctaacgtgcctattaagcatcaaaatggagatgttga

SEQ ID NO: 1872 - DNA, 360 bp, synthetic construct
  misc_feature 1..360: note = Description of artificial sequence: synthetic polynucleotide sequence
  source 1..360: mol_type = other DNA
aaaaatgtgttttagattagccgggtatggtggctcacttgtagtcctaaccacttggaaggctgaggcaaggggatcacttgaagccaggagttcgaggctgcagtgaaccatgatcccaccaccatacaacaactctgttgtctgggcaacagagggagattctgtctcttaaaaacaaacatggagatgcattgtcacctcccaccctcacccccatttgaacacacactcacatatatctcacgtcctaatcctactgaactactcaacatttccccaaaccggttgtgctcttttcatgtgtgcaggccttgcatccgctgttcctctgactggaaagctgttggcccatccagt

SEQ ID NO: 1873 - DNA, 480 bp, synthetic construct
  misc_feature 1..480: note = Description of artificial sequence: synthetic polynucleotide sequence
  source 1..480: mol_type = other DNA
tgagaaagtcttccctggccgtgcacgaatgcactaacttgtaaatgtctctttacattcctttcttcccttccagaccgcaaaatccagtctcattcaccttgacatgccctgcgcctgatccgggacgcgaggcatagtgggcatctcctaggttagacggatgggtgagtgggtgagtgaacggagaggtggacaaaatgagtgctcagcagttagacccaactgtgttttgatggtagtgatgggaattcccctggcacatggccaggtgagatgatcattcagcctgaaatgaaagaaacagcagatgtcaggaagtttttgttaatcctgccttgtgcgttagaactctcccgcatacgtcccctttcccgcacactctctctacctttctcccccatttctagctcctggtcttattcatctgtagcatcagtaaacatataccctttactgttcacatccaggtctgtaggg

SEQ ID NO: 1874 - DNA, 480 bp, synthetic construct
  misc_feature 1..480: note = Description of artificial sequence: synthetic polynucleotide sequence
  source 1..480: mol_type = other DNA
gaaattttggttataaaaccggaagagtgtttaacctaatgtcctgctgcgggcttgctttccacgggcctccgggtctgttaaaatgatcaggcctcattatttaggaagctgcctcagccaggcattactaatttgggcattactaattcagatgcctattcaggcaaatgagcaatgaatgtaaagtgcttttgtcagtgaattgcaagtgaagagaagagggagtgggggaagtaaagggaaagtgatagaatgtttgagctttgcttcatttccagaaaggacagccattgcttcctggaagctgggcttggcaacaggcatggaggaatgggaaagatttatttccctttgccaaagctcaataattcagcttgagtatttcaaatcaatacatttcttgcaaagtttccaagggctgcattaaaacagccatttttaaaaattatcagtacatgacagcatcctccgacgaga

SEQ ID NO: 1875 - DNA, 481 bp, synthetic construct
  misc_feature 1..481: note = Description of artificial sequence: synthetic polynucleotide sequence
  source 1..481: mol_type = other DNA
ctggcatgtcagggatgagtcgagtcttccaaatagacaagactccagtgagaaaggaggctgccacaagcaggaaaagcgaagttagagctgacagcaagaccaaccgcacctgtagggcctctggcgttcacacacctcattggttttgtgggggctctttctgagatgagcagctggatcgctcctcctaagggcttgcatgggggaatctgtgactataactccgtatttctttgaagatgcaattcatcactgaacttgggaaagactaacttggggaggtctccaccacgatctaggattgctaagatgtctgacaggctgagtcactcatacttttgtgaactattaaaaatttcatagttctgacatctggacatcttgactttcggtgataggagatatggaaagacagtaaaaggctgtgtctttactgttgttttaatccccactagagagtcctttttttctttttttt

SEQ ID NO: 1876 - DNA, 361 bp, synthetic construct
  misc_feature 1..361: note = Description of artificial sequence: synthetic polynucleotide sequence
  source 1..361: mol_type = other DNA
ggcctcccaaaatgcgggattacaggtgtgagccaccgcacccggccagtaattccttctatttcgatgtttcatcttcactagaatcgttccttagttctttcggtgggagaagccattcagccccccttgactgccagtgccctttgaggctctcagccatttgattcttcctgtgtatcccctgtggttgttgtctctgtttctagagtgcagtggttcctgcactttgggctgtaaccccctttggtggggccagagaccccttagattaattatcacatttctttcacttactgccacaaaacccagcagcgattcactaggagaacccgaagattggtgctcttctttatgagac

SEQ ID NO: 1877 - DNA, 121 bp, synthetic construct
  misc_feature 1..121: note = Description of artificial sequence: synthetic polynucleotide sequence
  source 1..121: mol_type = other DNA
accaaaggggctctgtgtttcccagcatgaagtcttcagtgacagagtctgggaggacagcacaggcagcagcagtgtaactctcagaatccccacggaagagcagagcagctcaatagca

SEQ ID NO: 1878 - DNA, 241 bp, synthetic construct
  misc_feature 1..241: note = Description of artificial sequence: synthetic polynucleotide sequence
  source 1..241: mol_type = other DNA
aaaccaaaacccagcgacgagacatccccaagtcccaccttaatgggacttttggtagcctttggaacagggaaaacccaaaaatagccaagaggtattcaccagaaagcctgaaagtgggagtggttttgctcgttcctatagtagtgagggcaagtggcgtcgaggaggtctgaaaggtgtagagttctctgggccctgtgaactctgccactaaccagccacgctgatggccagcttt

SEQ ID NO: 1879 - DNA, 360 bp, synthetic construct
  misc_feature 1..360: note = Description of artificial sequence: synthetic polynucleotide sequence
  source 1..360: mol_type = other DNA
gaggcaggattgaaccctggaggcggaagttgctgtgagcctagatcgcgctaatgcactccagcctgagcgacagagcaagactccatctcaaaaagaaaaagaaaaagaaaaggatggggcagcagagacttagatgcaaggtctcccaaaggaaacagaaccaggagatttcagaaagccagctgccatttatttgaatgctacatgaaaacaatagaagagagggtttgctaaggctggaaccatgccatttcataaaaatttcggaacattgtcttcagatgaaaatgagcaacagaaaagtagtgaggtcaaatcccacacaaagtttttataagataaaggaacagaaggagc

SEQ ID NO: 1880 - DNA, 479 bp, synthetic construct
  misc_feature 1..479: note = Description of artificial sequence: synthetic polynucleotide sequence
  source 1..479: mol_type = other DNA
agaatagcatccctcaagaaagcgtgccaaaacaacatgcctttagaacaattcaaaaccctacttacctccaaatgagctaaaaggtaagaagaaaaagatacgaagcgtggggcaaacacaacatcaatcagaattagaaaaacttccaaatgaaatgacagactctggaaagaattaaaagtaaaagaaaaatcatttcagaaatgaagagttaactagtgagaatacaagatgaatctttacaaaaggtgattttttaaaagagaaacacaagggggaagcaggaaattttttaaagaagaaacaagaaaggttttaaaaacaactcaagaaaaagtgacaaatattgaagaacggcaaagaaatttcaccacgtggataataggagtctctggggaaaaaaccacaaagcaagctttcgcctgcatcgctcctgtctctgcccctgtcttcacatggccatctcctctcctctg

SEQ ID NO: 1881 - DNA, 121 bp, synthetic construct
  misc_feature 1..121: note = Description of artificial sequence: synthetic polynucleotide sequence
  source 1..121: mol_type = other DNA
cgtctctcctctgtttccatataaggacacctgtcattgaatttggggcccacctgcataatcttgagatccttaacttaatgacgtctgcaaagagccattctcaaattaggtcttattc

SEQ ID NO: 1882 - DNA, 240 bp, synthetic construct
  misc_feature 1..240: note = Description of artificial sequence: synthetic polynucleotide sequence
  source 1..240: mol_type = other DNA
acaggttctggggattaggacacggacatttctatttggcagccaacattcagccatctccagtcactgagctagtaagtgacaaaaacaggatttgaatttcgttgtttcattttattataacgtggttaagagagattttaaatatttccattaagttagcaattcttgccaacaacagtagaaagcatgcctttttttttttttttttttttaaagtcagagcctcattctgtcacc

SEQ ID NO: 1883 - DNA, 358 bp, synthetic construct
  misc_feature 1..358: note = Description of artificial sequence: synthetic polynucleotide sequence
  source 1..358: mol_type = other DNA
agccacaggacctggccaacagcatgcttttacaaatagtagggtagcaggaggccagcctgcagaccgcccagagacctcaccccatcttacgctctgcccaacctcaggggagcatttttgcacttggtggattagcattacttgctccatccatgatgagccactcatgctcttcacagattttccagactcccatgtcaaagttaaaaaacagacatcggcctctttccagaactcagaatattcacatctatattgttaacactcataccttttccagcacagaatgaaaagcacctttgaagaatcgtaagccatgaatgatgacgggccgaagggagtgagggctcctacc

SEQ ID NO: 1884 - DNA, 480 bp, synthetic construct
  misc_feature 1..480: note = Description of artificial sequence: synthetic polynucleotide sequence
  source 1..480: mol_type = other DNA
tcttgtcactcctaccatcctgcctccaggacccctgccacctacttgggagtctgcccttaaaactcaagggtcacctgactcattcctccccactcattcatctgactacccaccaaagctaagtgtgaacagcctgtattgatttatcattttccttttgcctgcttcctctggtacagagatcttcatgctttcatccaaacgaatgaataatgtaaaatcccaggtggggtgacagagccaaggagaaaagtgttctgcagcaagggagggcctcccagtatgagccttggagtctcagataagcccagggacaaagcatgagacatccagttacatatctgtggccctggaaggggagacggggttcgctttgtggtggtgtttagctttcctgactccaagtgaccatcttaagccaggggattagtaacctttacaactctaatactagggaatatattaataactggtgag

SEQ ID NO: 1885 - DNA, 480 bp, synthetic construct
  misc_feature 1..480: note = Description of artificial sequence: synthetic polynucleotide sequence
  source 1..480: mol_type = other DNA
aaaaaagattacagcttttttattgataggtctataaaagccatttccgtatgaatgtcctcagaaaggaggaataaggggatgagatagaatagaatagagagaagtctgtctcacacacacacacacacacacacacacacacacacacacacaaatgcaacacaattatctttaaatagaagttgcttctccaagtttgtttttttttgtttgtttgtttcatgaggcgtcagcaacgctgttaaaatgatttcatcctgcctgtgtgtcacagcagtctgccccgcgaaatgctgaatcagcagcagcccagacagcctttcggtggagggtagattcgacacccaaaggcaaccaaccgggcctttgaaagcacttggaagcactctccaaagagccagggaagaggacaaggaagaagggggtgcagtggaattctccttaaaaaacagcatgttctagaaaagccatgctttg

SEQ ID NO: 1886 - DNA, 480 bp, synthetic construct
  misc_feature 1..480: note = Description of artificial sequence: synthetic polynucleotide sequence
  source 1..480: mol_type = other DNA
gaggtgctgtaggtcagatttgcctttgggtccctatgtgtattttctgaggtctgttcatgtaaaagttcaacacctctttcgcactcccttctcccagcccccgcgccctgcccccacacctcctgtccacctccacctcctcctcctggaattcagtgattatcaggactgtctccatcctgagaagaggctttttaaaatttcgcaggagaatagagacacccgagagggctgggaacaggcacagctgagccacacaaagccaagcctcctccatgcaagtgacggacagatcaggtcccagttcagaatgagaatgagttttactctggttacactttgcacaggaatgttctgcagactgtgccgggcaccagagatggtccgtgtgcggtttaaaagagcaggaggggaaagaattttcatccctctttattcaggcaccctcaggagagtatccatgttctgtgaatcatg

SEQ ID NO: 1887 - DNA, 121 bp, synthetic construct
  misc_feature 1..121: note = Description of artificial sequence: synthetic polynucleotide sequence
  source 1..121: mol_type = other DNA
caaatcctgcaggatctttatgttctctgtaccccatccatttctgctgaggattacaaacattcttgcaccaactttcctccagcagtttcgatttctcaataaatctgtttgaggaaca

SEQ ID NO: 1888 - DNA, 360 bp, synthetic construct
  misc_feature 1..360: note = Description of artificial sequence: synthetic polynucleotide sequence
  source 1..360: mol_type = other DNA
tttcaactcttaatatctattttcctactttttttttcttcttaaactcaggcttctttgtaagcatacatatcagtaagtttgataataaaaatgacctttctgccctgcagtataggaaatgctgccttaatgcctctttgctttagaaactcatccttgtatagtatctctccttgcatagccaagttgcctcattgtacgtaaattaaggttatttgcagtgattgaccctaactactatgaagaaaaactttcaatatgttagcaatgatgtctataataactgaagaagggacattccctatttaaggtcaggactgtgcgtttcaaataaagaaatgacagctcaaacatttc

SEQ ID NO: 1889 - DNA, 121 bp, synthetic construct
  misc_feature 1..121: note = Description of artificial sequence: synthetic polynucleotide sequence
  source 1..121: mol_type = other DNA
attgtacccccacttctaagtgagaagagggcacccttcgtgtctctcttttctgtttttctccctgaaatatcaggagagacatatatctctcttaaacctgatttggttttcgcattac

SEQ ID NO: 1890 - DNA, 358 bp, synthetic construct
  misc_feature 1..358: note = Description of artificial sequence: synthetic polynucleotide sequence
  source 1..358: mol_type = other DNA
ctcacaggtacatattgtcagaactatttgcatacacgagactaaaaaaaatactaaacggattctccagggatccatggataaacttgaggtagtctataagctttgaaatcacaagcaaatatttgtgtccatgtgcctgtgcattttgaaggggggtttgtttatgaactctggctgaattctcaaagaatcctgtaccttcttcctaacgctgagaagtacttgctctaatctcttccccactccctttttgctgtcccctccccattatcttttttctttttgatatggactttaattaaaatgttgatgcttacgtcaccatacattttctgcattaattttgatttttaaa

SEQ ID NO: 1891 - DNA, 481 bp, synthetic construct
  misc_feature 1..481: note = Description of artificial sequence: synthetic polynucleotide sequence
  source 1..481: mol_type = other DNA
atattgcgttacatgacttaatcttgattactgaaactttttaaaggtaccccttaaattttgctcctggggcaaatgtcttacttgcctcagcctagcctggggcctgagcgggcacctccttcagccttctttcctccaacctctccctgatccaggctgttttccgcaaccccacctgagccattttcccagcctgcaagatgacaattcagtcccctcctcaaagcactgtactgggcctcatagctcctgccagagccgtcatgcaccttccaagaatgcttgctccagcttctgcagctccagggagctgctgaaagtattttggtcttctggagacacgggacaaagtacaactcatctactatccagtccttgtcctacccaaccccccaaaatgcattgagcacttgctctgtaccaggcactgtgcaacatctctatagggatcacctcatttcatgctcacatttgccct

SEQ ID NO: 1892 - DNA, 479 bp, synthetic construct
  misc_feature 1..479: note = Description of artificial sequence: synthetic polynucleotide sequence
  source 1..479: mol_type = other DNA
aagaggtaagtactattctggactccatcttaccgctggagaaacagattcagacgcgtaactaacccagcgctagtaagtggtgcagccggtgttttaacccaggacaatttgactgcgaaacccaaggtctgatctaaaatgctacatggctctcaccacattgggcttgctacccagaagcaaaaatgagaagaactcttctaagtcacgtttgtgaggctgagcggcaagctctgggtcagttttgctgtcaacaggttttctgctaaaaacccgtttgtagctaaaactagataaaagtcagaaaaatccacaaaatgaagtttataagaaaaaacatcattcgagggaattgactgtgactttggatctgaacatgaacatagagtgttcttgttcttggactttgggctgaaagacatgagtataaccttccgacctccacttggaaacttagtgctgagatacaggctaac

SEQ ID NO: 1893 - DNA, 479 bp, synthetic construct
  misc_feature 1..479: note = Description of artificial sequence: synthetic polynucleotide sequence
  source 1..479: mol_type = other DNA
cttgaggacagaaataggaaatgttttggaacttccaattccctagtgacaggatttgtttgcagaaagcagctttggtcagatagcacattcaagattacaggcagacccagaggagtgagatgtggagcttgtcagaatgcatccaaggctggcctgggggttttgagcagatttgcagagagcaggccggtggggaagggaaaggaggcagaaaagtctccggaaaagtgcctctgggaagcagcttgaagggctctgaggacacttggttttcttttgaagggcagagtacacagggaagaactctaagtaaaccctgccctcggcaagcagaggtcagaaggtgctctgtgggcaccgagcagtattcgggatctgcagctagaccaggcctgccatgagaagttgagtttatggtttattattcctcattcccttaacatttttacagtgcattttagagtgcaaggggcttt

SEQ ID NO: 1894 - DNA, 121 bp, synthetic construct
  misc_feature 1..121: note = Description of artificial sequence: synthetic polynucleotide sequence
  source 1..121: mol_type = other DNA
tacatccattatttcctttaacccaggggaagttcactgggtaatacagaaagcctggagctggagttttggtcttaggttcattgtgaccttgggaaagtccctcgatttctgaacttca

SEQ ID NO: 1895 - DNA, 358 bp, synthetic construct
  misc_feature 1..358: note = Description of artificial sequence: synthetic polynucleotide sequence
  source 1..358: mol_type = other DNA
gtttcttctgaaaatacagttgtgccagctttagctccctcgcagaatagatgatggcatgacatggatgcggaagcatctggtaatgttttgaactgcacagagctgagtgtcctgaccatcaaagccagagctggagtaagtgatcagatgtgtcggggaggagaggggtgccaatcacagactgcagagctggctcagatgtggactgcctaggaatggaaatctttggctgtacagtctggcattaaacctggggactgttatgtgccaggcaccgtgtgcaaatcactgcaaaatccccttcagctacatgcatggacatgttaactcttaacacatgtacctaacaattcac

SEQ ID NO: 1896 - DNA, 121 bp, synthetic construct
  misc_feature 1..121: note = Description of artificial sequence: synthetic polynucleotide sequence
  source 1..121: mol_type = other DNA
aatttcatctcccagaaggtggaagatgcattgaggagcattgctaatttgcactcaaatctgacaaatgaggaattgtctggaaaagtagaaatgatagcagagggtgagaataaaaaca

SEQ ID NO: 1897 - DNA, 241 bp, synthetic construct
  misc_feature 1..241: note = Description of artificial sequence: synthetic polynucleotide sequence
  source 1..241: mol_type = other DNA
tgattttaggattggggaagggaaatgagagacaagaacagatgtgttttcttgacttaagacaaatttttaaaatgtagggaaaagtatttatgatctcatgatctgaatgctgagacacaactcagagtcatttgggctgctcttgaaaatgaaatcctgacttatcaactgcatatgacccttattggaataagaaggaagggagacaactaaagaaactgatgaggcgatattgggg

SEQ ID NO: 1898 - DNA, 240 bp, synthetic construct
  misc_feature 1..240: note = Description of artificial sequence: synthetic polynucleotide sequence
  source 1..240: mol_type = other DNA
cacccagcccttaaatagttttttaaatataaaagtaaaacatgcttaatagagaatgagaaataagaaagaaaaaaggaaaaggagacagggaatatcacctacaattttactgagtgtcaattctttgaatatttttacgtttcattgtatttttctatgcattgagattattacatatgtacacatactatttttcaatatgaatacatactcttcatcatgttactggctgcatta

SEQ ID NO: 1899 - DNA, 480 bp, synthetic construct
  misc_feature 1..480: note = Description of artificial sequence: synthetic polynucleotide sequence
  source 1..480: mol_type = other DNA
attttctatcatagatattgtcagtaactattacttatttccttattgctgttcctagtttttcattattaaaaataacactgcaatagacatctttgtgcatgaaagattcttccacatactaagttatttctttaaggtagattctgagaagttaacatttacagggttcttaaaatatcactaagttgtttgccagagagatgatgccaatttatcttctcactgttttgtgagtaccagtctaatgagctccgatttttaaaaagatgtatataatggatgaaaaagcaacttaatgaaaagaaacatataaaggagagtttctgagctctagaattttaaaacgtaagtgagctgaaaaccatggaatacgcttaagaaaacaataaatgtgggcagcaggataagaataagcatgatgtcagcctgctgatggggttggatggggtaacatcagcaaatggcaaagaaaccaaa

SEQ ID NO: 1900 - DNA, 480 bp, synthetic construct
  misc_feature 1..480: note = Description of artificial sequence: synthetic polynucleotide sequence
  source 1..480: mol_type = other DNA
actgttcaacttctttctctctcccatgaaggagaatgattgtcagactgaaacaggtagtgcaaacattgacagaagggaattgaagcctgagatgggtgaattgattgtaaaagcaaactaagttctgaataaatgcaaggctcttggcccggacaaatgacatcccagggtcgagaactcagaggggtgaaagataagccactggcagtgatccttcagggttgtgggaaatggaagctgtactaaaagaataggaactgttggtaacctgattttaggaagagaagctggggaaaatgtgggtacgaaataaaacagctaacctgatggaacttccagataaaattcaggacagattttcaaacatacatgttacgagtggaagacattatcactttggagccagccatctgctcctcatcctctctcctcatcttctttaataaggttgctctaagtgttgtagttgctgtattt

SEQ ID NO: 1901 - DNA, 480 bp, synthetic construct
  misc_feature 1..480: note = Description of artificial sequence: synthetic polynucleotide sequence
  source 1..480: mol_type = other DNA
caggatatcaggaaggcgtttcgttgaatttctgatgttgctttcatggatgagcttggaaaatgtccaaaaaccagagtatttagatggattgatcattgaacaactcttcccaaaaggagtcaataacttgatcagtatccgtccaaaaggaggtgactggtgtgtcaccagggtactcccatctcagccctatacgatctgcactttgtcagtaacctgtggaggtgacagatgcttagcaaagccacagatgacgtgaaattacagagtatagatgctagaaatcgatggaaatctggagaagactgcagcaggctgggatgatggttaaaaataataagataaaatgtaatatcaattaatatacattcttacagttgggttccaagtgctagctatatatgttcaggtagggtgagattataaaggtgattataacaataacagtacaaaagcaatagctaatgttttttaagt

SEQ ID NO: 1902 - DNA, 480 bp, synthetic construct
  misc_feature 1..480: note = Description of artificial sequence: synthetic polynucleotide sequence
  source 1..480: mol_type = other DNA
gattgctctatgccagatattggcctgtgtgtttcatatcatcatcatgtgtataattttactctacactagttttatgtcatctgaaaattgtataagtacattatctatgattcaatgatatttaattcacaggatgaaagttgtcctcatttttcagttgacaccagcaagacacagagaggttaagtaacttgtacaaggtcacacagctgggaaatagaggttccatgcttgtgctcagtgcctgcatgctgaactaccgtgaaactttttctttttaaaatttagtcataaatttaatttgatatcctgccaaaacaccaaataagcttagagagttaggtagtttttaacgtgggctcggagccaggtcacctggattcaaatgtcagctcttccatttcctggctgagtgactttgggcaagtcgtttaacttccctgtgttctagttttctcctccataaatggggatcat

SEQ ID NO: 1903 - DNA, 480 bp, synthetic construct
  misc_feature 1..480: note = Description of artificial sequence: synthetic polynucleotide sequence
  source 1..480: mol_type = other DNA
tcctgtcttacaggattgctgcagggattaaatgagttacatatgcaaagcatttagaatgactcctggcacatagcaatcacttgcttacaagtaagtgcattgctgttattaggctacacaaaaagcactatggtggggtgttaagagttgacactgtagagctagaccacctggatctctgtcatggcaccaccacttccatctctgtgtgctacagttttctcatctgtaaaaaaagaataataatcattgcagtgataagattcagtgtaaatgttcagtaattgctagctgttactatcaatagaagtatattgtccagagaaagaaaaatgctagtcctgttcctactgctgcgtttaggaattgaagccacatagatctctggaggaggcaggcaggttggtaagggtctacaaactgcagtggaggagttatctttggaccaattaaggacgtttcatctggaggcaaaat

SEQ ID NO: 1904 - DNA, 480 bp, synthetic construct
  misc_feature 1..480: note = Description of artificial sequence: synthetic polynucleotide sequence
  source 1..480: mol_type = other DNA
gactaagcaaggacgtgataactgtcctcactgtgttgagggttacaaaattggtgtgggtcattgaatcaagttatgagacaacatgggatgttgggaaaagtcaggggatcaggggcaggttgatcctgagtcagtctcttaacttccaggcttcagcttccatctttcacattttatgattctgtctccagcacgtagaacctagagcaaattcctgtttatacagaaagtttggataaggagtggttttgctgaatggctactgtagcagaaaagcttgaactgagtgttgctcaaatcaataaaatcacctgatgactaagccctgttttctattaaactgaaaagagaatgcaacagacttcactgggcttttgtgagaattacatgaggtaatatgtatgaaagcaccttatcaactctgaagtactaccccgatgcaagcagttatgttgattattgccatagctagattat

SEQ ID NO: 1905 - DNA, 480 bp, synthetic construct
  misc_feature 1..480: note = Description of artificial sequence: synthetic polynucleotide sequence
  source 1..480: mol_type = other DNA
aacttttccaagaattagaatataatgaaacacacttaagcattaatctgtcttctgtgattcagaagatccttcaggaagttacaaaatctcagggtcatggccatgggcatggagtaattctgtagaaaaagatcctggctgtaaggtattctttggttttttggattcaaattaaataggagcatattgactacatgaaaccctgaagggaatagagatcacatactctaagcccgtcattgtacagatgaagtcactgagccacagagaagctgagtggcctgcccagaatcaaatgttaattcatggcagatctgggaataaaatccaggctcctgtctcccaacatgtttgtcatcattagtttaagaacatctcagaaagtctgaaacagggtcaaaatgtactgatgaatgtggctgcccattaaagcatggaattgaagaaatattagaagtaagtttaagggcctgggtg

SEQ ID NO: 1906 - DNA, 480 bp, synthetic construct
  misc_feature 1..480: note = Description of artificial sequence: synthetic polynucleotide sequence
  source 1..480: mol_type = other DNA
tgtcactgaaggatatgacacaatatactggacctactcgggagaggggagaagtacagtagaatttttagtaactttcttaatcacagcagttcactttctctgtacaaaattcttttcaaatattctctgaaactaattggcattaaaaatgctgatcttagtaaatggccctcaagaggcacgctatgcgcacagggaatagtataatataggtgcagagtaatggtctctctccttctctcctttttttccttttcctaatgatcattaacatctatattctttgactttgttgaattaaagttgcaagagatggccgtaaataaagcaagttatgtatgtgcctccctcattctgcccatgcagcttctgttccatttgcagctgtgagccgtgtaagactctcaagaccaagcacccatgagtgcctgggagcaagtagcctgtgaagggaggactttattcctggatgcatta

SEQ ID NO: 1907 - DNA, 480 bp, synthetic construct
  misc_feature 1..480: note = Description of artificial sequence: synthetic polynucleotide sequence
  source 1..480: mol_type = other DNA
aaagcagagtcccacctacacctccctcctcttcccatttataaatctacttctccagggatctacagattttttggctatatttttagtctgttgataatttgagaaagtctccaaggatctaagtcttggatgggtaggagtcaattcactcagtcttttttgaatccctaatggatgttcaaaaccagtctcaattctggatctggatgggacatgcatgtcgaagtacagtgtgatggataagagcacagattctggaaccagattgcctgggttcagatctccgcttctgtcattactagggttatgtgaccttgggcaagtcccttaaatgcgttgggcctcagtttcctaatctgaatccctatcatagggttgtgtgagcatgcagttgaatgagctaatatctattcatataaagtgcttagagcagtactaggtgcatagtagtgcttagtaaatgactattaagtaaat

SEQ ID NO: 1908 - DNA, 480 bp, synthetic construct
  misc_feature 1..480: note = Description of artificial sequence: synthetic polynucleotide sequence
  source 1..480: mol_type = other DNA
taaatcagcctgattagaattgcctccaggtgcaaggctctatcccatttagacacgctaacacacaaggtcttaagggctttaggtttaaggaaaaggggctttttcccccctcaattctacaccacaacctttttattctattgaattacaaaggaaataacagtgggacttgactttgaacaccaaagtttatccagcctctttccagctcggtgaacgtgtccacctacttcactctttatgctaaaggaagagcagcgacgctgataaatgtattgagtggcctcgagcaggtggcttgctctgtcaagatcacttttgtatgactgctgggatcaccacagtctcccctgtaacttgctgggttcctcttgtacataagccgagggcatttgcatcggttcctggtgagggggtttccacacggtggccctggttgcttcaggggctgggctgtgggagacattaatgggaagt

SEQ ID NO: 1909 - DNA, 480 bp, synthetic construct
  misc_feature 1..480: note = Description of artificial sequence: synthetic polynucleotide sequence
  source 1..480: mol_type = other DNA
gaaaagagaaactgttgtgcttaaccggcagagctgtttggagtgtgactcttcttgtatttagggaaaagattactcatgagtattttcttccatagaatataaagaacctcaaattactacttgcatcccccacccccttctcacccacctccctccgttgcagcgtgtcctctgcagaaacttcagcattttactctcaattcccctcccaagcaggattcagttctgtatttgctttggggcccatgtttccaataagccaccctgtactttttcctgtttctgcctgagcatcttctgctcactggacctctcacctccaggcaccttcctaggcctgaggaaccagaccttcacatgtgtcccctaatgggaactccctgtgtgaaggagaggaaggtccataataacaaatcgcagcgccattcttgttcaaaggtgacaccattgacagtaaggagttaggtttaaggtttt

SEQ ID NO: 1910 - DNA, 480 bp, synthetic construct
  misc_feature 1..480: note = Description of artificial sequence: synthetic polynucleotide sequence
  source 1..480: mol_type = other DNA
taccagttcaaaaactgagattttgctgagtaaccctcactgccactcccacctccctgtgattctagatacgtgttttcaaggtcattggagagagctggtacttcccatatccatggactgtttttaataggcatcactttctggccagtcaggagtcaaaaacaaaaacttttagtggctgtattttattctaaagatcataaagcagtaatgcaccataaattattatttgaaattctaatttgtttccatgtgaaaaaaaaattatcctaaaaacaccaagaaaaaagctcttaaatgctcatctctaatgatttccagtgcccagtagttctttttttggtgcactacaaaaaaggaattttggttttgaggggacttccacaggtttagaggaagccaactaccattcctcaaaactacactttgcaaaggagccacttggaagacaatcatgcccagaggccctggacattt

SEQ ID NO: 1911 - DNA, 480 bp, synthetic construct
  misc_feature 1..480: note = Description of artificial sequence: synthetic polynucleotide sequence
  source 1..480: mol_type = other DNA
tccagggcatttgagccgtttgttccccacttcagcaggtaggaagagcagccccatatagcaaaccagattgttctttggcatgcctggtttaggatgaaaggtaattttttccaggatcaaactgagggacacttttataacacacttgtgaagtcttcgtagcaagtttaagtaacttatagtgagagacggaagctcctcttagcaacactgatgccattgctctgtttgagctattgattcacaccatgtgattttagagaatgaagatccattgaacatccagcttcttctgacccagcagttcttaaatttggtctcatgtctccttttgattcttaaaaattaatggagaccccaaagagcttttgcttatatgggttatagttatctgtagttaccatattattacataaattaaacctgggtatttacaaaatatttatgaatttagcaagtaaaatagccaactctata

SEQ ID NO: 1912 - DNA, 480 bp, synthetic construct
  misc_feature 1..480: note = Description of artificial sequence: synthetic polynucleotide sequence
  source 1..480: mol_type = other DNA
ttaatgcaaacatattttaaaatatattttcccaaaccaaaaataatttgtgagaagagtagcattgttacacatttttgaaagtctcttaaaatctggcttaatggaagatggctggacgctcatctctgtttctgcattcaatctgttgcaagatcacatcatatgccttctagaacattccacctaagaaagaatgagagcgaaaaaggcaaataattaatattgttatgacaagatgttttacttcataggcaccctacaaaggtctcgggaaccctgatgggtcccaagatcacattttgagaaccactgttctaacttatcaaagatttctcacaacagcaaaataaaataaaactatagacttacagtcaggctcccagagagccaacctgagccaacctctcagcccctgctctgtacccccctcctgcccacttggttcctactcagagttcaagtaccaccccaccagga

SEQ ID NO: 1913 - DNA, 480 bp, synthetic construct
  misc_feature 1..480: note = Description of artificial sequence: synthetic polynucleotide sequence
  source 1..480: mol_type = other DNA
agctctaatgtcagtgagtagaataaaaaggcagaagaccttttatccttactttgccctcttattgccagaggccagcctgatggtttcccagaggctgagtgaattgctcttcctggaagaagtttcagggaacatttcattatttggcagctctggaaggtcaagctcagctctggaacattctttcttcagaaggacgctgggctgcaatcagatcagctctgaatctgaggaccctccaaccacactgacacgtgtcatagttctgagcccctgtgggtgctgtgggcaccctggaacagcccctggaactgggcaaggaagggcaggtctctaagacctaccatcccttaaacacataaaagatctttttctcattttgcctctaaataaaaagttaatctgacagcacaccccagagtagggtttggtgtacaaactgctccctggactcctcttggaggctgcttctgggct

SEQ ID NO: 1914 - DNA, 361 bp, synthetic construct
  misc_feature 1..361: note = Description of artificial sequence: synthetic polynucleotide sequence
  source 1..361: mol_type = other DNA
tcgagaagcccccagtggggcggctcaaacaagggctggagaggggactcagagttgaacataagggctcttgagatgtggagactcattttgttaactattcagagaccttctccctttattccagctgtctaactgacaagacctttctctctttctttctgcctcatgctctctccaacaggcttgcagccaatttactggagcagggatgacgtagcccagtggctcaagtgggctgaaaatgagttttctttaaggccaattgacagcaacacgtttgaaatgaatggcaaagctctcctgctgctgaccaaagaggactttcgctatcgatctcctcattcaggtgagagtctgg

SEQ ID NO: 1915 - DNA, 136 bp, synthetic construct
  misc_feature 1..136: note = Description of artificial sequence: synthetic polynucleotide sequence
  source 1..136: mol_type = other DNA
ggtgatgtgctctatgaactccttcagcatattctgaagcagaggaaacctcggattcttttttcaccattcttccaccctggaaactctatacacacacagccggaggtcatactgcatcagaaccatgaagaag

SEQ ID NO: 1916 - DNA, 213 bp, synthetic construct
  misc_feature 1..213: note = Description of artificial sequence: synthetic polynucleotide sequence
  source 1..213: mol_type = other DNA
gataactgtgtccagaggacccccaggccatccgtggataatgtgcaccataaccctcccaccattgaactgttgcaccgctccaggtcacctatcacgacaaatcaccggccttctcctgaccccgagcagcggcccctccggtcccccctggacaacatgatccgccgcctctccccggctgagagagctcagggacccaggccgcaccag

SEQ ID NO: 1917 - DNA, 334 bp, synthetic construct
  misc_feature 1..334: note = Description of artificial sequence: synthetic polynucleotide sequence
  source 1..334: mol_type = other DNA
gagaacaaccaccaggagtcctaccctctgtcagtgtctcccatggagaataatcactgcccagcgtcctccgagtcccacccgaagccatccagcccccggcaggagagcacacgcgtgatccagctgatgcccagccccatcatgcaccctctgatcctgaacccccggcactccgtggatttcaaacagtccaggctctccgaggacgggctgcatagggaagggaagcccatcaacctctctcatcgggaagacctggcttacatgaaccacatcatggtctctgtctccccgcctgaagagcacgccatgcccattgggagaatagcag

SEQ ID NO: 1918 - DNA, 144 bp, synthetic construct
  misc_feature 1..144: note = Description of artificial sequence: synthetic polynucleotide sequence
  source 1..144: mol_type = other DNA
gactgtagactgctttgggattacgtctatcagttgctttctgacagccggtacgaaaacttcatccgatgggaggacaaagaatccaaaatattccggatagtggatcccaacggactggctcgactgtggggaaaccataag

SEQ ID NO: 1919 - DNA, 121 bp, synthetic construct
  misc_feature 1..121: note = Description of artificial sequence: synthetic polynucleotide sequence
  source 1..121: mol_type = other DNA
gaacaaacagaacagaacaaacatgacctatgagaaaatgtccagagccctgcgccactactacaaactaaacattatcaggaaggagccaggacaaaggcttttgttcaggtagcacttc

SEQ ID NO: 1920 - DNA, 121 bp, synthetic construct
  misc_feature 1..121: note = Description of artificial sequence: synthetic polynucleotide sequence
  source 1..121: mol_type = other DNA
ttccaaaggtttatgaaaaccccagatgaaatcatgagtggccgaacagaccgtctggagcacctagagtcccaggagctggatgaacaaatataccaagaagatgaatgctgaaggaacc

SEQ ID NO: 1921 - DNA, 121 bp, synthetic construct
  misc_feature 1..121: note = Description of artificial sequence: synthetic polynucleotide sequence
  source 1..121: mol_type = other DNA
gtttcagctgtggaccccaaagtcatttccattgccaaccgagtagctgaaattgtttactcctggccaccaccacaagcgacccaggcaggaggcttcaagtccaaagagatttttgtaa

SEQ ID NO: 1922 - DNA, 121 bp, synthetic construct
  misc_feature 1..121: note = Description of artificial sequence: synthetic polynucleotide sequence
  source 1..121: mol_type = other DNA
tttttccttataagcaaggagctgggcacttgcttcatccatcttaaatagtttctccaagtgatctgaggatccaaacttctgagaaagtgtgtctctccatgagatatcggtgggcttt

SEQ ID NO: 1923 - DNA, 121 bp, synthetic construct
  misc_feature 1..121: note = Description of artificial sequence: synthetic polynucleotide sequence
  source 1..121: mol_type = other DNA
caccagcctcggtgagctgttagttctccttacctcagctcccagtaacgctgttgtctgattctttagaagggtttcccaaacaatcttaatagcaaaacaaatagtaatgggctatatc

SEQ ID NO: 1924 - DNA, 476 bp, synthetic construct
  misc_feature 1..476: note = Description of artificial sequence: synthetic polynucleotide sequence
  source 1..476: mol_type = other DNA
gatgtcaaacgtgcgagtgtctaacgggagccctagcctggagcggatggacgccaggcaggcggagcaccccaagccctcggcctgcaggaacctcttcggcccggtggaccacgaagagttaacccgggacttggagaagcactgcagagacatggaagaggcgagccagcgcaagtggaatttcgattttcagaatcacaaacccctagagggcaagtacgagtggcaagaggtggagaagggcagcttgcccgagttctactacagacccccgcggccccccaaaggtgcctgcaaggtgccggcgcaggagagccaggatgtcagcgggagccgcccggcggcgcctttaattggggctccggctaactctgaggacacgcatttggtggacccaaagactgatccgtcggacagccagacggggttagcggagcaatgcgcaggaataaggaagcgacctgcaaccgacg

SEQ ID NO: 1925 - DNA, 121 bp, synthetic construct
  misc_feature 1..121: note = Description of artificial sequence: synthetic polynucleotide sequence
  source 1..121: mol_type = other DNA
attcttctactcaaaacaaaagagccaacagaacagaagaaaatgtttcagacggttccccaaatgccggttctgtggagcagacgcccaagaagcctggcctcagaagacgtcaaacgta

SEQ ID NO: 1926 - DNA, 121 bp, synthetic construct
  misc_feature 1..121: note = Description of artificial sequence: synthetic polynucleotide sequence
  source 1..121: mol_type = other DNA
agagtgagccaagcagaacacagtccaaggctgcaagtcagagaagagctttgaaagaatgtgcttgtggctggggggcagtgagccaatggcagaaggaatgagtgctgtggctggagtg

SEQ ID NO: 1927 - DNA, 121 bp, synthetic construct
  misc_feature 1..121: note = Description of artificial sequence: synthetic polynucleotide sequence
  source 1..121: mol_type = other DNA
tacagactttgtgataaggctgaagcttggggcatcgtcctagaaacggtggccacagccggggttgtgacctcggtggccttcatgctcactctcccgatcctcgtctgcaaggtgcagg

SEQ ID NO: 1928 - DNA, 121 bp, synthetic construct
  misc_feature 1..121: note = Description of artificial sequence: synthetic polynucleotide sequence
  source 1..121: mol_type = other DNA
tcctttttttatctctcttgtgtgcttttaggtgtctcaagaccagctgctaatcttgtatgcctttcggggatgaatggcagcacactgtggtctagtcttctccctgaggaggctcgag

SEQ ID NO: 1929 - DNA, 121 bp, synthetic construct
  misc_feature 1..121: note = Description of artificial sequence: synthetic polynucleotide sequence
  source 1..121: mol_type = other DNA
ttgggctcagaggcctgacaattactacctctagaatataagacttgtagttatttggcctttgcagagattttctcgcccttggatttctgtgggtgttgttttgaccacttccaaccca

SEQ ID NO: 1930 - DNA, 121 bp, synthetic construct
  misc_feature 1..121: note = Description of artificial sequence: synthetic polynucleotide sequence
  source 1..121: mol_type = other DNA
aaacataaaaaaacccacatcagtctgatatgatattgtgctactttgaatctgttactagtaccatcttgacagaggatacatgctcccaaaacgtttgttaccacacttaaaaatcact

SEQ ID NO: 1931 - DNA, 121 bp, synthetic construct
  misc_feature 1..121: note = Description of artificial sequence: synthetic polynucleotide sequence
  source 1..121: mol_type = other DNA
ggcagcagatggtatatgaacaaaagaccacaaaagttcagtacacaattctgcaggctaactgaagagattgtaaacccagcttcttctaatgaccaaagacgtaggtcgaattggaata

SEQ ID NO: 1932 - DNA, 121 bp, synthetic construct
  misc_feature 1..121: note = Description of artificial sequence: synthetic polynucleotide sequence
  source 1..121: mol_type = other DNA
gtatatgtatgtgtatttggggagaaactctgtaggtcagtatagaaaagtgtttatacaattgtgcatttacttctgcctgggtccaaaaagtcacaatagcctagtgcaatttttaaca

SEQ ID NO: 1933 - DNA, 121 bp, synthetic construct
  misc_feature 1..121: note = Description of artificial sequence: synthetic polynucleotide sequence
  source 1..121: mol_type = other DNA
attcatagcatttataactgggtagtaagcatttagaattagctggacagtgggctaggggaatttgtttagccttcacatttagtccttacagttaatgtatgaaatgtgggttttacta

SEQ ID NO: 1934 - DNA, 121 bp, synthetic construct
  misc_feature 1..121: note = Description of artificial sequence: synthetic polynucleotide sequence
  source 1..121: mol_type = other DNA
ttttgctctgggaacgtgccacaggaaaaaagagacaaaggatcagaaggtgtctgtgacctgtgatcatattgatggatcatggcatctaagctgagtaaataaggaaagaagggaatgc

SEQ ID NO: 1935 - DNA, 121 bp, synthetic construct
  misc_feature 1..121: note = Description of artificial sequence: synthetic polynucleotide sequence
  source 1..121: mol_type = other DNA
ttcatagaagagatgaaattgtaaaatactaatagccattctttattgcacagttgctacgttataggcactggactgagcacctcaaagactgatttagttctcacaacaatgctctgtt

SEQ ID NO: 1936 - DNA, 121 bp, synthetic construct
  misc_feature 1..121: note = Description of artificial sequence: synthetic polynucleotide sequence
  source 1..121: mol_type = other DNA
ggagtccccgttggggaagaattcctcctgaagggagtaaggaagggtatactaaggaatagagtcaccgggaggagcaacttcacatacacataatctgagagatttaaaatcttttgta

SEQ ID NO: 1937 - DNA, 121 bp, synthetic construct
  misc_feature 1..121: note = Description of artificial sequence: synthetic polynucleotide sequence
  source 1..121: mol_type = other DNA
gaaggaattaactctcagtcccttaccatcttagaagagccttggacaaaagcaaaataatcagcattacaataaatgtagcatgttctaactgtttttaaaatatttcttttggatctga

SEQ ID NO: 1938 - DNA, 121 bp, synthetic construct
  misc_feature 1..121: note = Description of artificial sequence: synthetic polynucleotide sequence
  source 1..121: mol_type = other DNA
atttacataattacacactttgtctttgacttctttttcttctttttaccatctttgctcatcttttctttatgttttcgaatttctcgaactaatgtatagaaggcatcatcaacaccct

SEQ ID NO: 1939 - DNA, 121 bp, synthetic construct
  misc_feature 1..121: note = Description of artificial sequence: synthetic polynucleotide sequence
  source 1..121: mol_type = other DNA
attacattataatgcattttttaattttcacacagccaggagtcttttcttctttgctgatttttttcaatctgtattgtcggatctccctcaccaatgtataaaaagcatcctccactct

SEQ ID NO: 1940 - DNA, 161 bp, synthetic construct
  misc_feature 1..161: note = Description of artificial sequence: synthetic polynucleotide sequence
  source 1..161: mol_type = other DNA
cctgtcttgtctttgctgatgtttcaataaaaggaattccataacttcttgctaagtcctgagcctgttttgtgtctactgttctagaaggcaaatcacatttatttcctactaggaccataggtacatcttcagagtccttaactcttttaatttgttct

SEQ ID NO: 1941 - DNA, 180 bp, synthetic construct
  misc_feature 1..180: note = Description of artificial sequence: synthetic polynucleotide sequence
  source 1..180: mol_type = other DNA
cctataatggtgaatatcttcaaatgatttagtattatttatggcaaatacacaaagaaagccctccccagtcctcatgtactggtccctcattgcactgtactcctcttgacctgctgtgtcgagaatatccaagagacaggtttctccatcaattactacttgcttcctgtaggaatc

SEQ ID NO: 1942 - DNA, 121 bp, synthetic construct
  misc_feature 1..121: note = Description of artificial sequence: synthetic polynucleotide sequence
  source 1..121: mol_type = other DNA
tttacctctattgttggatcatattcgtccacaaaatgattctgaattagctgtatcgtcaaggcactcttgcctacgccaccagctccaactaccacaagtttatattcagtcattttca

SEQ ID NO: 1943 - DNA, 121 bp, synthetic construct
  misc_feature 1..121: note = Description of artificial sequence: synthetic polynucleotide sequence
  source 1..121: mol_type = other DNA
tggggttcccttttctccatactctcaccaacatttgttattatatctcttgtcttttttggaataaccatccttatgaagtgtgaagtgatagctcataacgattttaatttgcttttat

SEQ ID NO: 1944 - DNA, 121 bp, synthetic construct
  misc_feature 1..121: note = Description of artificial sequence: synthetic polynucleotide sequence
  source 1..121: mol_type = other DNA
tcactgaccagcaattacatagttgcgagaaccagcagaaagggggtgtaggtgaccctatgttgttcttgttgtaccccatgccactctcagaggaaagaggatgaatactgggtcaaac

SEQ ID NO: 1945 - DNA, 121 bp, synthetic construct
  misc_feature 1..121: note = Description of artificial sequence: synthetic polynucleotide sequence
  source 1..121: mol_type = other DNA
gttcctcttccatgtatacactttttgatagaattaagatttctctggtttgaagtctatgttgaaattcccactgggctgaaacatggataccatgacactccctgcattccaatatcaa

SEQ ID NO: 1946 - DNA, 121 bp, synthetic construct
  misc_feature 1..121: note = Description of artificial sequence: synthetic polynucleotide sequence
  source 1..121: mol_type = other DNA
tacaaatggaaagcagaaagccaagaaacacttatctgacctacctattggattcatcagttttcttaagatctttccccaatatttgtctctctccatttccattatacaagattacagt

SEQ ID NO: 1947 - DNA, 121 bp, synthetic construct
  misc_feature 1..121: note = Description of artificial sequence: synthetic polynucleotide sequence
  source 1..121: mol_type = other DNA
agagtcattcttgatttgcatactgaattccatattcaatccatcaggaaatcctctccattctatctccagatctgtctacttcactcgcattccattattgttatcctcctctaaagca

SEQ ID NO: 1948 - DNA, 121 bp, synthetic construct
  misc_feature 1..121: note = Description of artificial sequence: synthetic polynucleotide sequence
  source 1..121: mol_type = other DNA
gcagtgaagcaaatcatgcaggctacaggatgaatctttgaaagccttgattacacctagtcttcataccaagttatcacagaaacagatctcagggcagcacctacctattgagagccaa

SEQ ID NO: 1949 - DNA, 121 bp, synthetic construct
  misc_feature 1..121: note = Description of artificial sequence: synthetic polynucleotide sequence
  source 1..121: mol_type = other DNA
aaatggtatacacaatgaaggacaagttggcaacatccttcaaacttacccatacaaatgacgatgcaaaccagcaattccacttcaagggatttacccttcacacatattatgtgtgcaa

SEQ ID NO: 1950 - DNA, 121 bp, synthetic construct
  misc_feature 1..121: note = Description of artificial sequence: synthetic polynucleotide sequence
  source 1..121: mol_type = other DNA
ctaagatgtggttgcaaatcagcacaccccacctatctctgtttgactactatttatgcgttctcagcagacataaatgtgttaagagtagtagatcggccgggtgcagtggctcacgcct

SEQ ID NO: 1951 - DNA, 121 bp, synthetic construct
  misc_feature 1..121: note = Description of artificial sequence: synthetic polynucleotide sequence
  source 1..121: mol_type = other DNA
gtatacaggaacttcctgattagaaatacagggccagggccaccgactttagtgtcaggaacatggaaattctctgaaagcctggatgagcagttccatggcagtagacatcagtcatgga

SEQ ID NO: 1952 - DNA, 121 bp, synthetic construct
  misc_feature 1..121: note = Description of artificial sequence: synthetic polynucleotide sequence
  source 1..121: mol_type = other DNA
atgtggaattcaagaagccaaagacaagaatacatactatattatcctagttatgtaaagttcaatcacaagtagaatcaacctatggtgagaagctatgatagtagttgcatttgggtct

SEQ ID NO: 1953 - DNA, 121 bp, synthetic construct
  misc_feature 1..121: note = Description of artificial sequence: synthetic polynucleotide sequence
  source 1..121: mol_type = other DNA
attattgaagagacagaatagaaaaattagaaggaatacttaagagactgaaattcttaggtttgcaaacagaccaagtaagtcgactagtatttgtagctatgaagatttttgagggtga

SEQ ID NO: 1954 - DNA, 121 bp, synthetic construct
  misc_feature 1..121: note = Description of artificial sequence: synthetic polynucleotide sequence
  source 1..121: mol_type = other DNA
agacataattttaagagacagactattaaatatcatgcatcttctaatttttagagatgtgttggctgaacgtgtggccctggaacacatttgcatgcacatagatacctatacattgttc

SEQ ID NO: 1955 - DNA, 121 bp, synthetic construct
  misc_feature 1..121: note = Description of artificial sequence: synthetic polynucleotide sequence
  source 1..121: mol_type = other DNA
acaatgaataaaaacaaggtttttcaaaggcctactatgtcccaaggagctcagcagggtctcagggaaaattaaataaagggtaaagccaacgtacattccccgggttgtagaatgaggc

SEQ ID NO: 1956 - DNA, 121 bp, synthetic construct
  misc_feature 1..121: note = Description of artificial sequence: synthetic polynucleotide sequence
  source 1..121: mol_type = other DNA
aacccaatgagaatacttagtgaagttttactaggaagtagtagtgaggaggtatttcaatggggcttcttaatggagtgggcttcaggaatgatgtgatggtgatattttctgaacaatt

SEQ ID NO: 1957 - DNA, 121 bp, synthetic construct
  misc_feature 1..121: note = Description of artificial sequence: synthetic polynucleotide sequence
  source 1..121: mol_type = other DNA
caattacttgcctaatagatgatgtcccacttagggcatattaagtagtcacttagggcggcaataaatcaggggtaatatgagactcagggaacaatatgagaaaagtttttgttttata

SEQ ID NO: 1958 - DNA, 121 bp, synthetic construct
  misc_feature 1..121: note = Description of artificial sequence: synthetic polynucleotide sequence
  source 1..121: mol_type = other DNA
attaggtgcccctctggtatattttcacagcaccctgtgtttacttctgttagggcactcaaatcaaccctgaaactgctaatttacatatctggaccccagttttaaaccatatgaataa

SEQ ID NO: 1959 - DNA, 121 bp, synthetic construct
  misc_feature 1..121: note = Description of artificial sequence: synthetic polynucleotide sequence
  source 1..121: mol_type = other DNA
aaaagggctgaagaaaacagaaacagagaacaaaaagcagatgctttgtttcaaggttagtaccctgatagtgttaaagcagaagggacttcctggtcataccatcttaaggtaagctgct

SEQ ID NO: 1960 - DNA, 121 bp, synthetic construct
  misc_feature 1..121: note = Description of artificial sequence: synthetic polynucleotide sequence
  source 1..121: mol_type = other DNA
taagacattaaataggtaaataagcagttttaatctggactcaacaactgcaaagcaaacgtcatcatatctcctacagaaatccacacaattattaaaagaccagattgctaccatggac

SEQ ID NO: 1961 - DNA, 121 bp, synthetic construct
  misc_feature 1..121: note = Description of artificial sequence: synthetic polynucleotide sequence
  source 1..121: mol_type = other DNA
atagggaatttctgagcattaatttcccagatacaccgtcaccttaagaggcctgaagtttcctcctacaagacagatgacaaaaagggtgcaaatatactagagacaaaaccacgcaaag

SEQ ID NO: 1962 - DNA, 121 bp, synthetic construct
  misc_feature 1..121: note = Description of artificial sequence: synthetic polynucleotide sequence
  source 1..121: mol_type = other DNA
agcctcaaagcttcttagttcatccatttccgacaattccaggctccacagtggcaggggatcttgtgctgatcgtcctcaaaatcaaactgatagtcataggttagctgaaaagagaaga

SEQ ID NO: 1963 - DNA, 121 bp, synthetic construct
  misc_feature 1..121: note = Description of artificial sequence: synthetic polynucleotide sequence
  source 1..121: mol_type = other DNA
tctcacctcctctcctttggggattcgccggctggagatgatgatgattttgtcctctttgtcaaatgtcacgacttcggccacacagttaggggcacaggaatggttaatgtacctgggc

SEQ ID NO: 1964 - DNA, 121 bp, synthetic construct
  misc_feature 1..121: note = Description of artificial sequence: synthetic polynucleotide sequence
  source 1..121: mol_type = other DNA
ccctccttcctcgtcatctctcacctggcagggccgccggtcaacgtagcatcaatcacatgttcattgtttattcggaacatgtagatgcctcgattctagaaaggcagaggttgcagaa

SEQ ID NO: 1965 - DNA, 287 bp, synthetic construct
  misc_feature 1..287: note = Description of artificial sequence: synthetic polynucleotide sequence
  source 1..287: mol_type = other DNA
cctgctcttcgtagattttctcccgccggttggccacctcgttccgaatgatggtgccaatgtactcgataaccattgtgtgcttttctaggtccttggctgcatagagccccaggccctggatacgggagcgagccaggtacacgttgttcttccattcggtgcgcagccgccggtactgagatgacttggagtgcacaaactgcttgctgtagggggtgttggtctcgcctgtgaaggtgctctgatatgccttagacatgctggtgctgttcagggtatggggc

SEQ ID NO: 1966 - DNA, 121 bp, synthetic construct
  misc_feature 1..121: note = Description of artificial sequence: synthetic polynucleotide sequence
  source 1..121: mol_type = other DNA
gtagtgtgtgaggattttaggctctgatcgggcacagccagtggggttgatcatgagtggcagctccataagggggtggcgcccatagcggaataaatagttttgacagctctccaccccg

SEQ ID NO: 1967 - DNA, 138 bp, synthetic construct
  misc_feature 1..138: note = Description of artificial sequence: synthetic polynucleotide sequence
  source 1..138: mol_type = other DNA
ctgattcagctatgcgaagcacggcatgcaccgtcagcccaaagagctcctcgcccttcagatactcagggaagagtcgcagcatgtcagcctcttttctcatggcagccacaggctcaatgatgcgattccacacgg

SEQ ID NO: 1968 - DNA, 340 bp, synthetic construct
  misc_feature 1..340: note = Description of artificial sequence: synthetic polynucleotide sequence
  source 1..340: mol_type = other DNA
ccctggggagaggcgtcagtgaagaccaggtcctccaggccctgctcgatgactttgattacaaactccggccgcccgttgttctcaccaatagaacagcgatagcagcagcgacgattgttggtgcggaggctccaatagatgcgcgtggcctcgtagcccacgggatagagggcagtggcactatgaaagtcagccatctggtgaggcagcagctgtccgatggcgtggaacacaaggccccccacacggaacatgtgcagccgttctccccgctgaatgatgctagcgatttgcttcacctcgtcccgctcaatgtagacccgccggaagacagcaa

SEQ ID NO: 1969 - DNA, 454 bp, synthetic construct
  misc_feature 1..454: note = Description of artificial sequence: synthetic polynucleotide sequence
  source 1..454: mol_type = other DNA
aagagctcagctcttgctcacagggccccttgatcttatgcattggacacagcatggtcttgtccttgaagaacatgcacttggcacggatggcacaagcaaaatggtagacattggggcaacgcatgcgattgcagctgctggtggcaccagttcgctggcacagggagcacttggttagcagtcctcggtgcagggcaacctccacattcatcagtgccccgccctgggtctcatacacctccgtggaccaaagggcacagttgaggtgcacccacaggtccaggtccaggttcagcagacgggcaggcccatcagtggccccgtcaccctcctcatgacagaaacagcagcgacgcatgtctcgcggtaccttgtcaggtcgcaaggctgtgccaagctgctccataaactctgccacttcccgctcatcctcctgccgcccactgccctt

SEQ ID NO: 1970 - DNA, 348 bp, synthetic construct
  misc_feature 1..348: note = Description of artificial sequence: synthetic polynucleotide sequence
  source 1..348: mol_type = other DNA
ctggatggtcagcagcagccgaagccgcttccagcgcactcctttccatttcttgaggcgaggaggacgggaatcttcaccttcttcagggggccgggcacggggcttgggtcgggctgattcaggggatgaggccagtggcagaggtgaggggacgggtggctcagccaagggttcggtgggaagttcaaccaagggctcagtagggggactggcaggagaaggtgccaagggggaagggggcggggagggttcttcaggaggtggggccgagagctgtcgcacatccagattggagacattgtaggtatagctgtgctgagtgggtggctctggggcggggctctc

SEQ ID NO: 1971 - DNA, 121 bp, synthetic construct
  misc_feature 1..121: note = Description of artificial sequence: synthetic polynucleotide sequence
  source 1..121: mol_type = other DNA
tttcaggaggctcaagatgtctagttggctcttcagggtatagccaggcaacactgcatcaaactgcttcagccaatcagggccagtgtctgggctcttgccttccagacccttttccttc

SEQ ID NO: 1972 - DNA, 134 bp, synthetic construct
  misc_feature 1..134: note = Description of artificial sequence: synthetic polynucleotide sequence
  source 1..134: mol_type = other DNA
ccaggaccctcagcttcccccttctttggctcagtgcctgcccgggcggggctctctgggaacagcacctcataggagttggggatcttcatgctcagcagctccgccactgccaccatcacgccattcaggtt

SEQ ID NO: 1973 - DNA, 121 bp, synthetic construct
  misc_feature 1..121: note = Description of artificial sequence: synthetic polynucleotide sequence
  source 1..121: mol_type = other DNA
ctgcagcagcagagactgtgagcatgactgacacctcacttcctttgcccttttcccaagttgtgacaggcagctttccagggacctccaggccaagggccccataaggtttggtatctgg

SEQ ID NO: 1974 - DNA, 177 bp, synthetic construct
  misc_feature 1..177: note = Description of artificial sequence: synthetic polynucleotide sequence
  source 1..177: mol_type = other DNA
cctgggatgctggcccgaggaatgagggggatgacaggggagagggcccggtcctcttgctcccaccggcctgagcccagatgagggaaacgaggggcctcctcccccaagatgctctcaggggatgaagctggcacaatgctgtcaggagaatcgctatcctcatcactctccatc

SEQ ID NO: 1975 - DNA, 121 bp, synthetic construct
  misc_feature 1..121: note = Description of artificial sequence: synthetic polynucleotide sequence
  source 1..121: mol_type = other DNA
cccatttctggccccgcccctacctgacatcctcagtctgattgtgagggggtgtaggcaaggcagccagcaggtctagactcttcacctctgaagtatctgaggggtgggtagggagaag

SEQ ID NO: 1976 - DNA, 161 bp, synthetic construct
  misc_feature 1..161: note = Description of artificial sequence: synthetic polynucleotide sequence
  source 1..161: mol_type = other DNA
cccctcagtgccctttcactatcccgggcagaggcagcatccttggggtgctcccccagctcttcagatggggtgacgccattcaccatcttctgctgcaccgatgggggtggggtggggggcagcgacgagggtggtgtcggcgggttactcaggttatt

SEQ ID NO: 1977 - DNA, 169 bp, synthetic construct
  misc_feature 1..169: note = Description of artificial sequence: synthetic polynucleotide sequence
  source 1..169: mol_type = other DNA
ccttggtaagcagctgggaatagtagtcagggccagtgggcagcgccccacttccaaaggcccccctcagctggctctgcccattgactgggcagccactgccaaagggggcaaagaggctaaaattggcggtgatagcaggctccgttaggggcagcagggacagctc

SEQ ID NO: 1978 - DNA, 142 bp, synthetic construct
  misc_feature 1..142: note = Description of artificial sequence: synthetic polynucleotide sequence
  source 1..142: mol_type = other DNA
cctgtttcagctgtttcagcaaggcctcgctggccctgaccccgtcctccttccgcagcttctttcgggagctcaccaacctgtcgcttgccttctgtacccgcttgggcttcggtgtcaaaggcttccttgctgctgcatc

SEQ ID NO: 1979 - DNA, 464 bp, synthetic construct
  misc_feature 1..464: note = Description of artificial sequence: synthetic polynucleotide sequence
  source 1..464: mol_type = other DNA
cctccttgttgctgggggtaccctgtagtttctgctccagcccagccagcttgctgtcaatgtgcccgttgatctcagctcgcagcccctcggacccccgcccagtgctgagttgcacattctttgcccggagtagcttctgcaagagcagatgcccagcttctgagcgagggcctgccagcaggaggtggttgctggttcctggtgcccctattggctccccattggcctccctcttcactgactgggctcccagggcacatggctcttcccgaggttcctgcttgatgctgagttgggatgcctcaggcaccacctgtccattcacctggtccagatgcccaggtaccaggctgctctgctctggcttctgggtttctgctaggttgtctgggggatcccaaggtcccagacccttgctaaacaaggtatctgcaagctgggcagcagcaggtgagaccctc

SEQ ID NO: 1980 - DNA, 465 bp, synthetic construct
  misc_feature 1..465: note = Description of artificial sequence: synthetic polynucleotide sequence
  source 1..465: mol_type = other DNA
ccaggaggcggctccaaggttggcccctgaggtttgggggtccctggatgggtgggagggagctgggcctcagtgggaagctgggagctgggggaaggtaattgtgaaggtctctttggctcttgagggctggatggtggaggtgtgggatggacagggccaaggactggtcctgtagataaggctcctggtggggcagggagccggggtgggccctgaggtcgaggccctgcccctagctcctggagggggcctgtctgtggtccagggaagcccccaagttgaggttggcagcccaggaggccctggaggggagaggtctgggtcccaggctcctggtagggtggggtctggcgtactgcctgactctgctgcagctgccgctgcatgaggagtgcctgtagctgctgctgctgctgaggacttaagtgccgcagctgtgggtttttggccaggactccttgg

SEQ ID NO: 1981 - DNA, 464 bp, synthetic construct
  misc_feature 1..464: note = Description of artificial sequence: synthetic polynucleotide sequence
  source 1..464: mol_type = other DNA
agctgtgctcgaagctgacccaccgtaggcatgattccaaccccaggcagaccctgcccagactggaggacaggtcctggtttgggaggttgtggccctgtattattttgcatgggccgctctagcatgggctgttgggggcccagaaggttctgggtcatggacccaggctgatcccctaaggaaacagagggctgagccagcaggtggggcacagatgaggcctcagaagatgatccactgcctagctgcccatggcttcctccacctgctgtgtggagcaggctaacttgctgctgctgttgtcctggaagcctcagaggtggctgcagctgcagagagctgggctgaggctggggctggggttggacaagcaggagttgtgagtccccagagagtgagggctttacctctcctggttcagtggccattgactcaggggtagttcctattgctaacggccc

SEQ ID NO: 1982 - DNA, 463 bp, synthetic construct
  misc_feature 1..463: note = Description of artificial sequence: synthetic polynucleotide sequence
  source 1..463: mol_type = other DNA
tccctgatgtgtagagggcccctcagtggcctctgaagaaacggctgggtctacggtgttttgttccttgcccgtcaggaggagggttggacccagggctccagggctagaaaagtgttgaagaggctttgctggcatgccagggccaagtgccacttgctgctgctgttgttgctgaggagacagtaaagttcgactctggtttaaaaggcccatctgctgctgttgctgctgctgttgaaactgctgctgttgttgttgctgttgctgttgtagctgctgttgctgctgttgaagctgttgctgctgctgttgttgaagctgctgctgctgttgctgctgttgaagctgttgctgctgaagttgctgttgctgttgtagctgctgctgctgctgctgctgaagttgctgttgctgttgcagctgctgctgctgctgaagctgctgtaaagagcccatgggc

SEQ ID NO: 1983 - DNA, 465 bp, synthetic construct
  misc_feature 1..465: note = Description of artificial sequence: synthetic polynucleotide sequence
  source 1..465: mol_type = other DNA
tgagcgctcagtttgggctgcccactgtgtgacatcagactctgctgaagatgggacagccctgccatggacccttgctgttggtgctgttgttgctgctgctgctgctgggctgtgaccagcctgtgtcccataaggccctgaccctgctgtgccagctggggggaactgagcacccgggactgggtcataagcacctgtctgtgagggccctgggggcccaaagctccagggtgctgctgctgcaacacagccacctgggcagggcccagcatgccctggggcccctggggtggttgaggggacagctgctggaccaggaggccttggtggctgctgggaggcataaggccctggggcttgggacccagagcttggtttgtctgtactccaggaccctgctgctgttgctgctggattgccacctgtcctagaaggtgctgctgctgctgttgctgctgctgc

SEQ ID NO: 1984 - DNA, 470 bp, synthetic construct
  misc_feature 1..470: note = Description of artificial sequence: synthetic polynucleotide sequence
  source 1..470: mol_type = other DNA
tgctgctgcagtttctgggccagctgcatacgttgctgctgcagctgcagctgcctttcctgtaaaagccttgaatcaggtccgaggcttcgaagagcaaggttgccagggaagaagccccctgaagggccagccagggatccagccccaccagaatgttgctgttgctgctgttgggccagagctgtattaaggaaggggccaccaggctgtccaggtagtgccatacccccaggggtcaggcgaagacctccggcttgcccacccggaggcccctgtggtggctgcagcccatggccagggagcagctgaccagggagcttggtgagcagccggggactctgggaagggctgagagccagcacagctgagtgctgttgctgttgttgctgctgctgctgctgttgttgctgctgcttgttccgatattctgccatgagattagtgtgctccttctgctgtttccggac

SEQ ID NO: 1985 - DNA, 234 bp, synthetic construct
  misc_feature 1..234: note = Description of artificial sequence: synthetic polynucleotide sequence
  source 1..234: mol_type = other DNA
cctgatccagttgtttctggatcttgctctgctgctctgtaaccagcttgagcttctcagcatcagcttctgggaactcacggccagcttttttggcagtgcgctgcttggcacacagagccttccgggacttgcggtgtacaccaatctgctcctctagcaccttcagctgcatctgtaggagctgctgggtatggaacagccactcctcatactgccgctggtcagcttcat

SEQ ID NO: 1986 - DNA, 121 bp, synthetic construct
  misc_feature 1..121: note = Description of artificial sequence: synthetic polynucleotide sequence
  source 1..121: mol_type = other DNA
caccttcctcccacgccccatactcactgatcactccctgagcaaaagtgggcgggttgggacgaggctgggagggatcaccagcactccgctcctgcaatgagagaggctgctaaagggt

SEQ ID NO: 1987 - DNA, 121 bp, synthetic construct
  misc_feature 1..121: note = Description of artificial sequence: synthetic polynucleotide sequence
  source 1..121: mol_type = other DNA
tcccacctgaccacttacctggccactcccagctgccacatggttctgcagatcactgctaggtccccccgagagcctctgggctagcagagacacttgctgtctggagtccaccaaagca

SEQ ID NO: 1988 - DNA, 121 bp, synthetic construct
  misc_feature 1..121: note = Description of artificial sequence: synthetic polynucleotide sequence
  source 1..121: mol_type = other DNA
tgttcataccaggtgccaccccaatgctgccctgagccatcactttcttgatgcctttcaaagccaccatcttggcctttgcaatgggatcaatgatatcttctgcagcaaatttgtccag

SEQ ID NO: 1989 - DNA, 466 bp, synthetic construct
  misc_feature 1..466: note = Description of artificial sequence: synthetic polynucleotide sequence
  source 1..466: mol_type = other DNA
cctgtatctgggaagaagctgtttgccagctgctgctgcattgccaattgctgcggcttcatgcacatggaaggtggcatggtgcccatgggcttctgtgatagcactggctgtgagctctgctggggtaccaagcctgcctgccctccatgctgcccacttagcatatgcccttgattggacaccatagccatggatggagccaggcgttgctggagggcatgagctggtggctgggtgggcatcagtggctggggcaaacctggctgtcgggcacctgcaagacccagggaaagctgctgttgggacccagccaaactgggagaagagccctcatgtggcaaagacatggcctgggcagggcctggtgcagacagtagggaatgctgctgctgctgttgctgctgctgctgggcaggctgcaactgtgctgaaagctgctgcttcttctgcagctccttcttct

SEQ ID NO: 1990 - DNA, 466 bp, synthetic construct
  misc_feature 1..466: note = Description of artificial sequence: synthetic polynucleotide sequence
  source 1..466: mol_type = other DNA
catgctccaacaggtcctcaatgagcaggggtaactcgctggctaccagtgagctctccatcttgtctagctcatccccagatgctgcaggtccaccaggcaaggtcaaagccccactctcgagctcaaacttttccagcagggaggatcctcctgggccactcagtgggctgggggtcagcaggtgagctggtggtcctcccgtggccccaaaggaggccttctcagctgtgtgcccactgctagaaaatggccctgtgcccatccgggtatcccggctgcccatcatgctctgtcctggctttagccccaggccaagggaattggcagcaggtgcgggctctaccttgggggtagcaatggtgaattggcaaggagaagggtggcgtccaccctcctccaccttgggcttcacctcagggagcacagatgccaggcggggttcagaggcatcagcagcaggggg

SEQ ID NO: 1991 - DNA, 464 bp, synthetic construct
  misc_feature 1..464: note = Description of artificial sequence: synthetic polynucleotide sequence
  source 1..464: mol_type = other DNA
agggcgctcctcagggcccaagggtcctggctccaccccccgcagcagggcctcccgttcagccttctcattagccgattctaccagcctcaggtgctcattgaagatatccttcttgtccccagtgtccagctcaggatcagtatatgccagcaggtcaaactcgtctccattgagcaggtcatccaagtgggggtcattggtctccaggttttctaaggtgccaagttcatcatcacccttggccacatccacacccagacccaggtgagcaagctcttcatcatcctctagggccttgtgggcatcaaaatcgtcatccagctcgggatcctcacagggcaacttcccagcttccagggccagaggattggggcggccaagctcagtgctcgacgggggccggttgaccagctccaaaccagttggcagggtaggacccttggtgtggggtgttggatgaa

SEQ ID NO: 1992 - DNA, 470 bp, synthetic construct
  misc_feature 1..470: note = Description of artificial sequence: synthetic polynucleotide sequence
  source 1..470: mol_type = other DNA
gactgttgttcaattcaggggccggtggggctgagggtttctgtgggggaagacctgataccgccaggccccgaagcccttcaggagccagtcggtgggggtcctcacttacagggtaaaaacggggtctctgaggtgggccctgaccaggaaacggagtgcccccaggtcccagtcctttctgtacattgtgccgcagctcaatgaactgggcaggaccagctggaccaggcactggctcaccagggcctggcagacgggtggaaattcccgccaacggggaacctagggcttggcggccaagttcaggtccaggagttgatggaaagcgagctgacatggcaaatcgcatggaggttgctgctgttgcctgttgttgctgccacagttgttgctgttgctgctgtaagggcagggacccaggatagggtgctcgctgatagaaagcttgggagcctcctaccagttgc

SEQ ID NO: 1993 - DNA, 138 bp, synthetic construct
  misc_feature 1..138: note = Description of artificial sequence: synthetic polynucleotide sequence
  source 1..138: mol_type = other DNA
ccggctgttcacatccatagaggaaggcgtggctggtggaggtggccgggagagtcggtcatcgctagggaaggaccctggccccaggatggggccactcagcttgcttgggggcaaccccacaaggctgctcttgtc

SEQ ID NO: 1994 - DNA, 184 bp, synthetic construct
  misc_feature 1..184: note = Description of artificial sequence: synthetic polynucleotide sequence
  source 1..184: mol_type = other DNA
cctgtgtcccagcaaagggggtctggcctcgactcagctgctcaaaggcagggctgctgggctcagcaccccagctgcctggaggccccactgctcctgcagctgctgcagctgtttccttctcctgccgcagggtgttgcgctggatctgctgccgaatcagcagctctcgtagtcgctggcg

SEQ ID NO: 1995 - DNA, 121 bp, synthetic construct
  misc_feature 1..121: note = Description of artificial sequence: synthetic polynucleotide sequence
  source 1..121: mol_type = other DNA
cctgccgttgcttctccagctctgtttggctaaggccggacatgcctgggtcctgggtacctgggagttcagctgtcgccaaagagctacccattccagtccctgggtcttctcgcttttc

SEQ ID NO: 1996 - DNA, 241 bp, synthetic construct
  misc_feature 1..241: note = Description of artificial sequence: synthetic polynucleotide sequence
  source 1..241: mol_type = other DNA
gacaggagaggtgatgcctgatcgctgtgaggctccatgggacaggtaggggagggatccgtcgggtgcaggtggtggcagaaccgacggagggcgtagtggggacagcccatagctctcccctgtggacccgctgctgggccccagggggctgcccgatgggtggaagttccctgtggctactgtgtagtttgtgctttgaggcttgcccaaggtggggccgggcccaaaatggctgttg

SEQ ID NO: 1997 - DNA, 121 bp, synthetic construct
  misc_feature 1..121: note = Description of artificial sequence: synthetic polynucleotide sequence
  source 1..121: mol_type = other DNA
atcccatggggtggcgggagaccaggctgagggacagggggctttagggaaggctcccctactgcctgagggaaagtgaaacgcatgggagagggggtgcccacaaatgcacccgtcccag

SEQ ID NO: 1998 - DNA, 241 bp, synthetic construct
  misc_feature 1..241: note = Description of artificial sequence: synthetic polynucleotide sequence
  source 1..241: mol_type = other DNA
gggaccggacaaaattggggggctgcccacttgggaccttggcatggagctcacctgctggccccgcgggcagggctgctgggaaccccccagcccccagcgaagtgtgggctagagacccagccttaaaggcaacttcagggggctggggtcggggtggcttatgcaatggggcaaatgggtcacgggactgagggcgtgagggtgggcgagaataagggtcaggggactggaagcgagg

SEQ ID NO: 1999 - DNA, 241 bp, synthetic construct
  misc_feature 1..241: note = Description of artificial sequence: synthetic polynucleotide sequence
  source 1..241: mol_type = other DNA
gtaacgggtgatgggcaaaaagcttcagcagacagaggccggggtgtcagtggagactgggagctggactgggactgaggactggcaggcactcgggagaaagggtcggagggcagtgagcgagggggcagagcacagcagctctcagggggcggaggttggggccgaggagtcaatgggggctgagcatatgggtcagtgtaggagccagggcgaaagatgtctgggtgacttggaggag

SEQ ID NO: 2000 - DNA, 241 bp, synthetic construct
  misc_feature 1..241: note = Description of artificial sequence: synthetic polynucleotide sequence
  source 1..241: mol_type = other DNA
aaggtgccaaagcctgggcagggggtggctcctggggccttaggcccaagcccgggctctggggctctacctgagatgcccgaggggtcaggggggctttgaagacatcaggtgtctttaactccaggccacccaggtgggtgcctgaggagggtgagtcaacaaagcccaggtttgggggcccatagctaggagaggatgccccaagctcttccttcttcacctctagggccttccggga

SEQ ID NO: 2001 - DNA, 241 bp, synthetic construct
  misc_feature 1..241: note = Description of artificial sequence: synthetic polynucleotide sequence
  source 1..241: mol_type = other DNA
tccccaaaaggtgggggcgagagcaggggctcggaagctttgcctccccctaccccagggctctcaggcacagccaagttatccagcgaggggcagcggggtttgaggaatgggtcaggtgtggagggctggtgtctgggggtgccaggtggggtagtgtggaattcccctggctggccagccccaggacgagatgaggcgcccagcatcgggggctgcgcaggggcccccgtaggactag

SEQ ID NO: 2002 - DNA, 121 bp, synthetic construct
  misc_feature 1..121: note = Description of artificial sequence: synthetic polynucleotide sequence
  source 1..121: mol_type = other DNA
ataggggggataggtgggcggtgccgtggggaagcggggctccaggggataggcaggggccagtccaaaggggtcctgcgaaggcacttgggcgggcacctggggtgggagcttgaggaag

SEQ ID NO: 2003 - DNA, 121 bp, synthetic construct
  misc_feature 1..121: note = Description of artificial sequence: synthetic polynucleotide sequence
  source 1..121: mol_type = other DNA
agctcaccaggcgagtcagggccaggcaccgagcccgccggcggcttcaggaacccgtccgcagaggtagacaagccggcgggggtagtggggctgccaatgaaaatggtgggggcagcag

SEQ ID NO: 2004 - DNA, 121 bp, synthetic construct
  misc_feature 1..121: note = Description of artificial sequence: synthetic polynucleotide sequence
  source 1..121: mol_type = other DNA
cggggggcgggctgcccagtgcccctggctgcgggggaatgcggagatgtagggccggtcggtcagtcttacgggctatgtcgcccaccttggtctgcttgttgatctggctctcagcctg

SEQ ID NO: 2005 - DNA, 121 bp, synthetic construct
  misc_feature 1..121: note = Description of artificial sequence: synthetic polynucleotide sequence
  source 1..121: mol_type = other DNA
agaggactgctacaccccagcccagccccactcaccttctgcaccttgttgatgcggtgagctgcccggttatctttggccttttgctgagggatatgggacacagccttagggcctagtg

SEQ ID NO: 2006 - DNA, 121 bp, synthetic construct
  misc_feature 1..121: note = Description of artificial sequence: synthetic polynucleotide sequence
  source 1..121: mol_type = other DNA
aatccatgctcctttctgcctcaccaggtagggggctttgtcagctgctggaacctttctccagagcttcatgatttgtttgcaacggcttgaccagtctggagggcagagagagtgagtc

SEQ ID NO: 2007 - DNA, 121 bp, synthetic construct
  misc_feature 1..121: note = Description of artificial sequence: synthetic polynucleotide sequence
  source 1..121: mol_type = other DNA
cctgggtagtcttgcttgagattaggaaaattaatgttggcatagagcacaggtgagatggtggacagctggcccaactcctcatccttctcccagcgctgaagactccgctggttatagg

SEQ ID NO: 2008 - DNA, 121 bp, synthetic construct
  misc_feature 1..121: note = Description of artificial sequence: synthetic polynucleotide sequence
  source 1..121: mol_type = other DNA
gagtccgtcgccctcaccctccgtggtgggggttgtgggggtggagggcgtggtgccacctgagcccgtccaggggctgtcgggctcaccgggttccgggctaaagaagcccccgcgctcc

SEQ ID NO: 2009 - DNA, 121 bp, synthetic construct
  misc_feature 1..121: note = Description of artificial sequence: synthetic polynucleotide sequence
  source 1..121: mol_type = other DNA
ttacgcagagacaccaacctagaatccaggaacggggactggcagaggcctgggtaggagtccattgggctgctggagggcagattgcccaaagggagtccacctacaagacggacaggat

SEQ ID NO: 2010 - DNA, 139 bp, synthetic construct
  misc_feature 1..139: note = Description of artificial sequence: synthetic polynucleotide sequence
  source 1..139: mol_type = other DNA
ccttgaagaaagggcctctgcagtggcgtacggctgccttctaggccaggggttccacaacccagatgctgttctcgttcagagcccagaacatccttgaagagctgctgcaggtccttggattccatcttgggcagtt

SEQ ID NO: 2011 - DNA, 121 bp, synthetic construct
  misc_feature 1..121: note = Description of artificial sequence: synthetic polynucleotide sequence
  source 1..121: mol_type = other DNA
ctcaccttctgtggaaatcctgtctaagtcagagctaagcatcccttcacctggggtgcctggcttctcagggtcactgggcactggggatgccttcacgcccccatcctcaggtcctgta

SEQ ID NO: 2012 - DNA, 121 bp, synthetic construct
  misc_feature 1..121: note = Description of artificial sequence: synthetic polynucleotide sequence
  source 1..121: mol_type = other DNA
aggacacagtaaccccggcagccctcacctggtgtatcggctttgccctcgaggccacgggattcttcatctgcaatatctggaccatcatctcctatgagcaagagtcccccctccaatc

SEQ ID NO: 2013 - DNA, 149 bp, synthetic construct
  misc_feature 1..149: note = Description of artificial sequence: synthetic polynucleotide sequence
  source 1..149: mol_type = other DNA
cctttctgcgatgtggggagttccttcctttctgagcctccatctcccttggcttttggggtccctagtccaaagcttggccggcccaccccaactgcaaaaagggccttacggctcaggtccagcagctccttcccaaagaaggcttc

SEQ ID NO: 2014 - DNA, 121 bp, synthetic construct
  misc_feature 1..121: note = Description of artificial sequence: synthetic polynucleotide sequence
  source 1..121: mol_type = other DNA
agtaagcagggaacatgtcctccagtttgctcttcttgcgccctcgccgctgttgcttcttcttctcatccccttcagctaagctctgctccacggcgccctctgcaggcaggtcagcagg

SEQ ID NO: 2015 - DNA, 121 bp, synthetic construct
  misc_feature 1..121: note = Description of artificial sequence: synthetic polynucleotide sequence
  source 1..121: mol_type = other DNA
cgtctcaccctcgtcgggctgcccatccccactcaacacctccgcctgtgcagcaggcccctttttcgtgcgtgtgtgggatttccgctgtcgcaccatgaaaccaccaatgcctatgagg

SEQ ID NO: 2016 - DNA, 121 bp, synthetic construct
  misc_feature 1..121: note = Description of artificial sequence: synthetic polynucleotide sequence
  source 1..121: mol_type = other DNA
ccaggccgatatggtttacgcttgcgttttttgctttcctcggtctcctctttgccaggctccacatcagggctgacggggccctccagtttaatttcgcactccatgtgctccacaccac

SEQ ID NO: 2017 - DNA, 223 bp, synthetic construct
  misc_feature 1..223: note = Description of artificial sequence: synthetic polynucleotide sequence
  source 1..223: mol_type = other DNA
ccttcacccttgagcagctcatcggtgtccaggtccccatccttcttgtcatcagggccaagggcatctgagggctcagaaccctccaatcctgcctcgcctgggaggccaagccgtcctcgccgttggcgccgcttgtgcagtggtgacatggtcaggttacgcagcaaggccatgccagtttctgtcagccacacaccttcgaagcgaaagtactggggct

SEQ ID NO: 2018 - DNA, 121 bp, synthetic construct
  misc_feature 1..121: note = Description of artificial sequence: synthetic polynucleotide sequence
  source 1..121: mol_type = other DNA
tggtctggctttggcattcaaaatttctgtgactcacctggctctttcaccttcatgggcaccagctctggaggtgcaacaggcgctatggagagaaggacaaacggaggtggctgaggtc

SEQ ID NO: 2019 - DNA, 121 bp, synthetic construct
  misc_feature 1..121: note = Description of artificial sequence: synthetic polynucleotide sequence
  source 1..121: mol_type = other DNA
actcacccacaggctttaccacgtagggctggcaggagacacagtcaaagccttcatcggctgcctgctccacatcgtcctctgtgaagaggctctcacagcctgcatgcatccacctgga

SEQ ID NO: 2020 - DNA, 166 bp, synthetic construct
  misc_feature 1..166: note = Description of artificial sequence: synthetic polynucleotide sequence
  source 1..166: mol_type = other DNA
ccgttcacagtggcggcactggattagtaggtcctcttctacgtaaggagcatgacagatagggcaggtcaccaggctggcacagggcccacagtgtgtgtaactattctgccattcacagtggaagccaggggaagcagccccacactgcatacaggacacacac

SEQ ID NO: 2021 - DNA, 183 bp, synthetic construct
  misc_feature 1..183: note = Description of artificial sequence: synthetic polynucleotide sequence
  source 1..183: mol_type = other DNA
ccacttgcacttccagccgcccttggggacggtgagcagtggggggtccaggcagtatgtgtggtagctaatatcacagtcatcacagagcagcaggcgtgaggggtcggaggcctggccacacacctcacacacaatacactccacacaacgccagcccttgagcagcatcaccttggtgat

SEQ ID NO: 2022 - DNA, 121 bp, synthetic construct
  misc_feature 1..121: note = Description of artificial sequence: synthetic polynucleotide sequence
  source 1..121: mol_type = other DNA
gaactcaccttgctgttgacacagtaagggtgatagcactgagagcactgcgaacaggcaaggaggtggccctctgccccccggccaaagctgccacataccacacacatgtcctggggaa

SEQ ID NO: 2023 - DNA, 121 bp, synthetic construct
  misc_feature 1..121: note = Description of artificial sequence: synthetic polynucleotide sequence
  source 1..121: mol_type = other DNA
ggtacctgcattaggacaaatttgtctgtgttggagaagagaaccacggtattctgcatggtgtcatcatcttcttcctcctcctccttactgggagagctatcaatgtcagcaacctgat

SEQ ID NO: 2024 - DNA, 121 bp, synthetic construct
  misc_feature 1..121: note = Description of artificial sequence: synthetic polynucleotide sequence
  source 1..121: mol_type = other DNA
ttactaccagagtctcaatggaagaagcagttgactttagccgggcccgtcctctaccacgtcctccatgggctcctccacgaggccggcgtcttcctgggaaactgctgctgcgaccctg

SEQ ID NO: 2025 - DNA, 330 bp, synthetic construct
  misc_feature 1..330: note = Description of artificial sequence: synthetic polynucleotide sequence
  source 1..330: mol_type = other DNA
cctgtttgatgcgggaacgggctggggagctgcgccgccgccccttctccccctcagctttgcctccgctgatagctgtcccagcatcgcacaatagtgagtcatcagtctctggcagtgagtcagtacagagccgtagggagccctcatctcgggctggactaacatccgtagagacccccaactccatggacagggagccacccccctccgggtctggagagcccaggaggggctctgagccaggaaaactggcactggcatcaccctggctcagattagagatctcgttaacgatgtcggatttgatgagagtgggtggtgtggggg

SEQ ID NO: 2026 - DNA, 439 bp, synthetic construct
  misc_feature 1..439: note = Description of artificial sequence: synthetic polynucleotide sequence
  source 1..439: mol_type = other DNA
ccaccggtgcacgtggctcttcctgttcttcacatggtgagccctgccctgctgtctgcttgcattcggggtagacctccataggggtcacaggggccagctcctcggggtccaggagcacaggggagcctttaagttcactagccaaactgccaggggtctgtccaggctctggctgtgaacccggagcatcaatcccatccagaggggctgtgtcttcccctaggccagagaagtcatccagggctggggcagggctgggggcggggcaggaaaggtcccccattggggaagggagaggactggtggcactgggttccaaggctgggcattcaggttctgaaactttctcagtctccatctcgtgcagctcagcctcatctgagacccccactaccttccctatgggactcaacggggagggaacggacagtggtag

SEQ ID NO: 2027 - DNA, 341 bp, synthetic construct
  misc_feature 1..341: note = Description of artificial sequence: synthetic polynucleotide sequence
  source 1..341: mol_type = other DNA
ggcaggaggagagcactgggaaggaggggagttttggggaaccagggaatgctgaaggagtggcgaacactgaggaggaaggggctccatcaggatgggagaagccggccccactggggagcctggagatgggggaaggatcataggggggacaggctcagggtcagtgcagttagcttctggtggagggctgatgggtgtctccaggatgggggcagccaacggtgactcagggtcactgtcccctttggcaccaaaggggtactctaactcccccaaaggagacagggccggtggggccgcagctgtgatgatgggtgagagtggaggaggaaggggat

SEQ ID NO: 2028 - DNA, 236 bp, synthetic construct
  misc_feature 1..236: note = Description of artificial sequence: synthetic polynucleotide sequence
  source 1..236: mol_type = other DNA
cctggtggcatcagctgaggcgacaaggatggctccccagatggggacaacggcagctcctcgggcagaggggacagaggtggttccccaggctcagacagggctggctctccaagcaagggagataaggatggttccccagggggagggaacaagggcagctcctcaggtgcagggcattggcctggctcctcagggggcttttcaggccgaggggacaggggtggcttctcaag

SEQ ID NO: 2029 - DNA, 474 bp, synthetic construct
  misc_feature 1..474: note = Description of artificial sequence: synthetic polynucleotide sequence
  source 1..474: mol_type = other DNA
ctcaggggacagatgcgattcctcaggccggggggacaggcatggctcctcagactggggggacaggtgtgattcctcaggttggggggacaagcatggctcctcaggcacaggagacaggtgcggctcctcagtctggggggacaggtgcaattcctcaggctgaggggacagatgtggtccctcagcctggggggacaagtgtggctcctcaggcacagcgcataggcatggctcctcaggctggggggacaggtgtggctcctcagcctgcggagataggtgtggctcctcaggccggggggacaggtgcggctcctcaggccggggtgacaggtgcggcccctcggaccgggggcagagttgcggctcctcaggtagtggcaacaggggtgactcctccagcggcagggacatgagcgagtcctccggtggtggggaagcaggtgagtcctcaggtggtggggatgtggg

SEQ ID NO: 2030 - DNA, 473 bp, synthetic construct
  misc_feature 1..473: note = Description of artificial sequence: synthetic polynucleotide sequence
  source 1..473: mol_type = other DNA
ggagtcctcaggtggtggggagaggcgtgaagcctcaggtggaggggacgtgggagactcctcaggcggtggggacaagggagattcctcaggcggtggagacaggcgtgacaccacaggcaggggggataggcgcgatacctcaggtgggggggacataggtgattcttcaggtggtggggacataggcgagtcctcaggtggtggggacaggcgtgatgcctcaggtggtggggaaaggggagactcctcaggtggaggggacagaggagactcttcaaatggtgggaacagacgagatgcctccggtggtggagacatgggtgactcttcaggtggaggggacatgggtgactcctcaggtggtggagacaggcgagatgcttcaggtggcggggaagtgggcaattcctcaggtggcggggacaaaggagattcttcaaatggtggggacaggggcgatgcttcaggtg

SEQ ID NO: 2031 - DNA, 357 bp, synthetic construct
  misc_feature 1..357: note = Description of artificial sequence: synthetic polynucleotide sequence
  source 1..357: mol_type = other DNA
gtggggatagaggcgtctcaagtgcaggagatgggggtgactcttccggtggagacaagggcgactcctccagtggagaaaaaggtgatgattcaggtgggggagacagaggagactcctcaggcggcggagagaggggcgattcctccagcggccgggacaggtgcaatgcctcaggaagtggggatgcgggcaattcctcaggtggtggtgacaggcgtgatgcctcaggtggtggggacgtgggtgattcctcaggtggtggggacaggggtgactcctcaggtgggggcagcagtggcatctcctcgtttaggggggcctccaactggggctcaagttggacccctgctttcc

SEQ ID NO: 2032 - DNA, 147 bp, synthetic construct
  misc_feature 1..147: note = Description of artificial sequence: synthetic polynucleotide sequence
  source 1..147: mol_type = other DNA
cctagtggtttggcttcacattgcaggggccctggttccttgggttgcatagaggtcacgtgcccaccctttggctgcccttggcatgcaacgtacagagcatcgggctcgtcagtgggggtatcgccaggctctgggggtgaaaat

SEQ ID NO: 2033 - DNA, 159 bp, synthetic construct
  misc_feature 1..159: note = Description of artificial sequence: synthetic polynucleotide sequence
  source 1..159: mol_type = other DNA
cctgctacacaccggggtatgctgctcagcaacggagcggatagtctgacctccctgggctttgtgacagcggtgacagagagagtagttctcaaaccactccgagttgggattcagttctgctgagcccgccccacaggcccggcacacccggcacgc

SEQ ID NO: 2034 - DNA, 121 bp, synthetic construct
  misc_feature 1..121: note = Description of artificial sequence: synthetic polynucleotide sequence
  source 1..121: mol_type = other DNA
caccttgcacttccaagagtgagcaggcagttcctccatgggtggttttaggcagaaagtatggtatcctttgtcacacgtctcacaaaccaacatcttagagtcattcccaggtttcctg

SEQ ID NO: 2035 - DNA, 167 bp, synthetic construct
  misc_feature 1..167: note = Description of artificial sequence: synthetic polynucleotide sequence
  source 1..167: mol_type = other DNA
cctgcaggcttggcacactttgcattcagggcactgccagccagcacgtttgcgggcagtcagagcagtgtccaggcaggccccgtgatagtgatgcccacagctggtacagaagaacaggtcacacaactcccctggcccctcacacactgcacagcgagcctcct

SEQ ID NO: 2036 - DNA, 164 bp, synthetic construct
  misc_feature 1..164: note = Description of artificial sequence: synthetic polynucleotide sequence
  source 1..164: mol_type = other DNA
cccagatatgcagccccctcactgtgctctgggcatagcagctgcagtgttttcatggataggaaggaaccgctggcagtcgcgcaggggaagtggtaaagccgtggacatccaggtgagcggcaagggatggaggcaccgagcctggtgcagtgggagcagcg

SEQ ID NO: 2037 - DNA, 121 bp, synthetic construct
  misc_feature 1..121: note = Description of artificial sequence: synthetic polynucleotide sequence
  source 1..121: mol_type = other DNA
ccccacctgtgagatccctgagaagatggccttgtccacaccacatagttctgggccctcctgcccccatacgcctgccgaccatgcagcacaccaatggtgagcccagcaggacccttta

SEQ ID NO: 2038 - DNA, 225 bp, synthetic construct
  misc_feature 1..225: note = Description of artificial sequence: synthetic polynucleotide sequence
  source 1..225: mol_type = other DNA
cctccaggttctcctaggtgggcaggtgtaaggccctcagggaaaccaatctgtgataggtcctcactgggcagcactgcctcattgggccctgggctccccccaggggacaccactggacaccggggccaatcaaatggcaactcaaagcgccgtagctcccgctgcccgtgtagactgggctccccgcagttacagagagcacaacgccgcaccggaccccca

SEQ ID NO: 2039 - DNA, 121 bp, synthetic construct
  misc_feature 1..121: note = Description of artificial sequence: synthetic polynucleotide sequence
  source 1..121: mol_type = other DNA
cagtcctgaggagtctcctgaagcctgggactcccagaactaaggacagagacctctcccacatgtgggttgggcaggtctgactcagtggcacttgggtcctcagaagctgcaggtccat

SEQ ID NO: 2040 - DNA, 121 bp, synthetic construct
  misc_feature 1..121: note = Description of artificial sequence: synthetic polynucleotide sequence
  source 1..121: mol_type = other DNA
aaatctaaaagcaaacaaacaatttgtcctactcacctgccggttctgaatctttatcctcaccagccagcttctggctgtccatccctctctccgactgggcagggccctctcggggaga

SEQ ID NO: 2041 - DNA, 121 bp, synthetic construct
  misc_feature 1..121: note = Description of artificial sequence: synthetic polynucleotide sequence
  source 1..121: mol_type = other DNA
aaatgatgaaagcttaccctctaaagaagcaaaatattcattttattagggcatatttagtaggaccatggagtccaaggttttacatacattagggctgctattgcttcctgcaagactg

SEQ ID NO: 2042 - DNA, 121 bp, synthetic construct
  misc_feature 1..121: note = Description of artificial sequence: synthetic polynucleotide sequence
  source 1..121: mol_type = other DNA
tcacgtggacctgattctgccaccttctggctgcgtcacctggggcaagttatttaacgcctctaagcctcaggttccccatctgtaatctgaagccctggcctagtagatctctagataa

SEQ ID NO: 2043 - DNA, 121 bp, synthetic construct
  misc_feature 1..121: note = Description of artificial sequence: synthetic polynucleotide sequence
  source 1..121: mol_type = other DNA
agcctttcctaccttccttttttcctttctcccttcccccttccttcatcacgtatttattgagtacttgtttaacgccaggccctctggttagctctgaggctgtaacagtgaaccgcca

SEQ ID NO: 2044 - DNA, 121 bp, synthetic construct
  misc_feature 1..121: note = Description of artificial sequence: synthetic polynucleotide sequence
  source 1..121: mol_type = other DNA
agtaatgcttctgctgcagttggatttctgtgcctccaatgtaattgatcattttatctgtgactcttctccaatgctgcagctctcttgcacaaacactcactttctagaactcatggca

SEQ ID NO: 2045 - DNA, 121 bp, synthetic construct
  misc_feature 1..121: note = Description of artificial sequence: synthetic polynucleotide sequence
  source 1..121: mol_type = other DNA
tagctgtggtaacactgatggtcaccttgacattagttattctctcctacacaaacatcatccggacaattctgaaaattccttctatgagtcaaaggaaaaaagccttttccacttgctc

SEQ ID NO: 2046 - DNA, 121 bp, synthetic construct
  misc_feature 1..121: note = Description of artificial sequence: synthetic polynucleotide sequence
  source 1..121: mol_type = other DNA
ttagagatcctcccacacaggagggcagagggggattagtgctggttcaggaggaagcaactgccatctctgcatggtgccccctcctcactgcacagtcacctccaagcaatgactcccc

SEQ ID NO: 2047 - DNA, 121 bp, synthetic construct
  misc_feature 1..121: note = Description of artificial sequence: synthetic polynucleotide sequence
  source 1..121: mol_type = other DNA
tgtagcgtagcttgctgttgtcaccacctgcagggccctggacgaccttgacagccacactgttctccttgaacctcactgagaacctggagagggaacagaaaaccaagtctagtgccca

SEQ ID NO: 2048 - DNA, 191 bp, synthetic construct
  misc_feature 1..191: note = Description of artificial sequence: synthetic polynucleotide sequence
  source 1..191: mol_type = other DNA
atcaccaactggggttggcccttaggtccatgtgggacattgagatcccagattgcccatagtgggagggctgcaggaggggctgtgcccccaaggaccctccccccgactccccttgcccctccaggagaagcttagtgaggtcctgttcagtgggaggcagcagaggagggaatatgtcttcaccaatc

SEQ ID NO: 2049 - DNA, 121 bp, synthetic construct
  misc_feature 1..121: note = Description of artificial sequence: synthetic polynucleotide sequence
  source 1..121: mol_type = other DNA
tgccctgaggaaacgctgtcactggctggctcaggcagctgtcttccaccatggtcacatctgagcagagcagggggtcagggctggacacagcatgctcctgaggctggcacggcagcag

SEQ ID NO: 2050 - DNA, 121 bp, synthetic construct
  misc_feature 1..121: note = Description of artificial sequence: synthetic polynucleotide sequence
  source 1..121: mol_type = other DNA
tggggtcaggaggggctttgtcactcactgggggtgaggctggtcaaagggcaggctcatctggcccaggctggggggcatctgcaggtgaggcctggaagtagggagagcacagttagag

SEQ ID NO: 2051 - DNA, 121 bp, synthetic construct
  misc_feature 1..121: note = Description of artificial sequence: synthetic polynucleotide sequence
  source 1..121: mol_type = other DNA
ggtttttcacttactcctggaaggctgacaacacgttgactgattcttctggggagaggccttgatacggggggatggagtgagagtgtggtgggtacacctggggcctggggaaagaaaa

SEQ ID NO: 2052 - DNA, 121 bp, synthetic construct
  misc_feature 1..121: note = Description of artificial sequence: synthetic polynucleotide sequence
  source 1..121: mol_type = other DNA
cttacaccatatctgggccaagctgcatgctcatggaggaatcaggggccattccaaggtcataagaaggcaccatggtaggcatctggagctctggggtaggaagtggttggtccctgga

SEQ ID NO: 2053 - DNA, 121 bp, synthetic construct
  misc_feature 1..121: note = Description of artificial sequence: synthetic polynucleotide sequence
  source 1..121: mol_type = other DNA
ctacccactgtccataccaccacactcacctttccacggtcatcttgatggtagctgggacataacccctgccatccttacccatctgttcagctgttgtgagaaggaaaagacagccatg

SEQ ID NO: 2054 - DNA, 148 bp, synthetic construct
  misc_feature 1..148: note = Description of artificial sequence: synthetic polynucleotide sequence
  source 1..148: mol_type = other DNA
cgcttgtagtggctccggaaagcctcatccttgggcttcttgggatagagatttttgagctgagcaagatcccggattcggtcccccagtgagcgaatggacaggtctttggcagagaatggctggatgttctctatctgtggagagc

SEQ ID NO: 2055 - DNA, 138 bp, synthetic construct
  misc_feature 1..138: note = Description of artificial sequence: synthetic polynucleotide sequence
  source 1..138: mol_type = other DNA
ccatcctggccccggatgacatgggcaatggtgatgcccccaatctctgagtcgctgaagcggaggagaaaggttccgtcgggctcattgagaagaaggctagtaacgtactgtttgctgatgaagccaatgatcagc

SEQ ID NO: 2056 - DNA, 121 bp, synthetic construct
  misc_feature 1..121: note = Description of artificial sequence: synthetic polynucleotide sequence
  source 1..121: mol_type = other DNA
ggtggggactcaccggtcagaccagtagctccggagacagcgtttggtgaggtccaggacaccatcaaaccactgccaaaaggtgaagccacggcccagcaggatctcctagggggagagg

SEQ ID NO: 2057 - DNA, 208 bp, synthetic construct
  misc_feature 1..208: note = Description of artificial sequence: synthetic polynucleotide sequence
  source 1..208: mol_type = other DNA
ccttgttgaactgcgaccaggacacagaacggtgctggaaggcctccatactgaggctgttgtcattgaagatcttctgggccaggaagaggaagtgctctgggagcagcccccggttggtccccacctcagccatgaacttcaggttcagagtttcacacatcttctcccagggcacccgctcagccaccacaaagggcacgcggtc

SEQ ID NO: 2058 - DNA, 121 bp, synthetic construct
  misc_feature 1..121: note = Description of artificial sequence: synthetic polynucleotide sequence
  source 1..121: mol_type = other DNA
aggactttcctcaccatctcagagaaggcattgtcccacaggatagtggctttggcattgttgtcttggttgccatggacgatgaccaccaggggcagagacagggcctgaagagggtgag

SEQ ID NO: 2059 - DNA, 121 bp, synthetic construct
  misc_feature 1..121: note = Description of artificial sequence: synthetic polynucleotide sequence
  source 1..121: mol_type = other DNA
tggagctggatggggagtttgccggggccaagtgtgaagctggcagagaagagcacagcgcacttctcctctgtgacagactcagtgcccttccgctcacaccgcttgatcttcttgagaa

SEQ ID NO: 2060 - DNA, 121 bp, synthetic construct
  misc_feature 1..121: note = Description of artificial sequence: synthetic polynucleotide sequence
  source 1..121: mol_type = other DNA
accccaaagcccctcaccaggttcttgaacagggcagagcagcagttcccaggaatgctgttctccaagggcacagtgttgttgatgatttctccagtgctttctctgccaggggaggtca

SEQ ID NO: 2061 - DNA, 190 bp, synthetic construct
  misc_feature 1..190: note = Description of artificial sequence: synthetic polynucleotide sequence
  source 1..190: mol_type = other DNA
cgctccagccccaggaccctgaggcacactcagctcccgcgcctgcttctctgtcaccatgtcggccctgaccagcggaggcttggctggggcccccaggaacctcaagcccaacaggaatcgaactccagcctggaacttggtctgagtcttcagtacctgggggggctgcttctccaccaggaagcaa

SEQ ID NO: 2062 - DNA, 133 bp, synthetic construct
  misc_feature 1..133: note = Description of artificial sequence: synthetic polynucleotide sequence
  source 1..133: mol_type = other DNA
cctggtgacgagggttctcaggacttcatccagccggccagtcagcgatgcccgggtcttgggctcaagctccccaccagccgcccctacctcctgctgtagctgggaataaatgtccaccaggctttcacac

SEQ ID NO: 2063 - DNA, 150 bp, synthetic construct
  misc_feature 1..150: note = Description of artificial sequence: synthetic polynucleotide sequence
  source 1..150: mol_type = other DNA
cctctcctggagtggggccaggctctcctcaaacggtgcgccattccctgccagctgctgctgccgtttccaaatctggatcctcttcagcactagggctttggctgcctctagctctccagtggtctcctgcagtagcatggccagggc

SEQ ID NO: 2064 - DNA, 121 bp, synthetic construct
  misc_feature 1..121: note = Description of artificial sequence: synthetic polynucleotide sequence
  source 1..121: mol_type = other DNA
gaccaaggtctccacctgtcagcccattactcacctcacttggcccagtcccattagcaggagtttctatcaagctgtgcagagacactgagggttgggggcagaaatcaagggtgcagac

SEQ ID NO: 2065 - DNA, 140 bp, synthetic construct
  misc_feature 1..140: note = Description of artificial sequence: synthetic polynucleotide sequence
  source 1..140: mol_type = other DNA
ccttggccagcctcagcccccttctgcagggcttctcggagaaggtggatctcccctactcggtgctgcagcctccgcaagcctgtcttaaacttgagttcttcctgcttccagtggaaaggcattggcaagtggcggaa

SEQ ID NO: 2066 - DNA, 121 bp, synthetic construct
  misc_feature 1..121: note = Description of artificial sequence: synthetic polynucleotide sequence
  source 1..121: mol_type = other DNA
aggtggaatatcacaatacctgttccataacagcttttttctctccttgaagtatttgtctgaaagtggccaccagcttcagggggtccctctgatatatgctctacagaaatgagggtgg

SEQ ID NO: 2067 - DNA, 140 bp, synthetic construct
  misc_feature 1..140: note = Description of artificial sequence: synthetic polynucleotide sequence
  source 1..140: mol_type = other DNA
cctcaagggtgctgatgtgttgcaagatggtgctcccctccccctgctctcccaccgaggcctgaaggtgctggacagtgtctgaaagtagggcactagccaagttgcagcagaaggcgtcggagccgaccaggaactcc

SEQ ID NO: 2068 - DNA, 121 bp, synthetic construct
  misc_feature 1..121: note = Description of artificial sequence: synthetic polynucleotide sequence
  source 1..121: mol_type = other DNA
caccagggctggctctccagccagtcacccagaagatgccgcaggtgttggggaaagtcgacatagagccgctgcactttttctgggggcatcttggagaccagaccccacagagacatga

SEQ ID NO: 2069 - DNA, 121 bp, synthetic construct
  misc_feature 1..121: note = Description of artificial sequence: synthetic polynucleotide sequence
  source 1..121: mol_type = other DNA
agatggcccaatggttgcaggtgagatggggtgacaagaaggaagatttgggcatgttgcatggtgacacctgggtactcctgtcttctcccattctagttgctgagcctgtcagggtggt

SEQ ID NO: 2070 - DNA, 121 bp, synthetic construct
  misc_feature 1..121: note = Description of artificial sequence: synthetic polynucleotide sequence
  source 1..121: mol_type = other DNA
aaatgagatagatacctcagaagggatgaattctaccagaggcaatgaagtgtagcactgatgatgactcactggggatgctatgtgaacagaagaggcggagaaagcccatctacagagt

SEQ ID NO: 2071 - DNA, 121 bp, synthetic construct
  misc_feature 1..121: note = Description of artificial sequence: synthetic polynucleotide sequence
  source 1..121: mol_type = other DNA
ccttatgaatactgagtatgttctttacccaaataaatcatcttaaaagcctatattcctggtcatggagaaattaaataagaaaatgtatacccaaattttaaaaatgaaaacatggctg

SEQ ID NO: 2072 - DNA, 121 bp, synthetic construct
  misc_feature 1..121: note = Description of artificial sequence: synthetic polynucleotide sequence
  source 1..121: mol_type = other DNA
ggttggacttgttcaacatgcaaatggaaattccttctgaatttcccaaatcgaaaggatcagatctcactgtttggtacccagaaaagacactcatctgtctggacacagatgacaaatt

SEQ ID NO: 2073 - DNA, 121 bp, synthetic construct
  misc_feature 1..121: note = Description of artificial sequence: synthetic polynucleotide sequence
  source 1..121: mol_type = other DNA
actgtatcctcttgggagaactcacacttcttgcatctggaggggaacactgatggggcgtaagactaataatactggaataggagatgtggtttcattgcgacctgacaagaagtgaaag

SEQ ID NO: 2074 - DNA, 121 bp, synthetic construct
  misc_feature 1..121: note = Description of artificial sequence: synthetic polynucleotide sequence
  source 1..121: mol_type = other DNA
aactgaaaatatctcctcagtgttctttttctctacactgcattatgaaatggaggtctttgtaatgaacaagaaacaagccaacaaaataatggggaagatctggtttttgtattctcct

SEQ ID NO: 2075 - DNA, 121 bp, synthetic construct
  misc_feature 1..121: note = Description of artificial sequence: synthetic polynucleotide sequence
  source 1..121: mol_type = other DNA
caattaagccaagcttcgcaattcatggataaaggtcatgctgatatccatggcataaatgaagggaactcgacggctactgacagcaggggatatagggtgtacatgagtaagagcatat

SEQ ID NO: 2076 - DNA, 121 bp, synthetic construct
  misc_feature 1..121: note = Description of artificial sequence: synthetic polynucleotide sequence
  source 1..121: mol_type = other DNA
cttaattgcaataagttacagccccctccccagcctttcagtagtttgtttctaaaaaactccttgcaggcaaacttcttgtaggttaaaaaaacacaaggaatttacattgaaattaaca

SEQ ID NO: 2077 - DNA, 121 bp, synthetic construct
  misc_feature 1..121: note = Description of artificial sequence: synthetic polynucleotide sequence
  source 1..121: mol_type = other DNA
gtggcaatggtccttatcagaaatatattggaaggaaattgatagggaaggtgtgtggcgagcttacaaaaatcaaacatgagtgctcatcacacaggaaactggctgactaaagttcagc

SEQ ID NO: 2078 - DNA, 121 bp, synthetic construct
  misc_feature 1..121: note = Description of artificial sequence: synthetic polynucleotide sequence
  source 1..121: mol_type = other DNA
tactgtgttctgctctagggactgcttttctcccgatgtcatttagctttttccccagcattctcaatcctctttatttccaaatcagagaatactcatgattgttgttcttttaacgtgg

SEQ ID NO: 2079 - DNA, 121 bp, synthetic construct
  misc_feature 1..121: note = Description of artificial sequence: synthetic polynucleotide sequence
  source 1..121: mol_type = other DNA
acaccacagtcagcttgcttcagtttgctgctcttcatagctagctctagccctagaaacctggttgttcacagcagggaatacaaactgaattgagccctcctgccttctgtgggaaaaa

SEQ ID NO: 2080 - DNA, 121 bp, synthetic construct
  misc_feature 1..121: note = Description of artificial sequence: synthetic polynucleotide sequence
  source 1..121: mol_type = other DNA
actttcccagaagactgacttttccttccaaaatgcatactgtgtccacataaggcaaagactccatataatcatgtttctttcttgaggattgagccatgactcctcttttaattggatg

SEQ ID NO: 2081 - DNA, 121 bp, synthetic construct
  misc_feature 1..121: note = Description of artificial sequence: synthetic polynucleotide sequence
  source 1..121: mol_type = other DNA
tgatgcttaggccacagagcaaataccagaatagtctctaagggggagagaccaggaaactttgagccaggaaattttgtctacaagcagctagggatcctgagccaagcatgagaagcca

SEQ ID NO: 2082 - DNA, 121 bp, synthetic construct
  misc_feature 1..121: note = Description of artificial sequence: synthetic polynucleotide sequence
  source 1..121: mol_type = other DNA
aacagagaagttcaagcatagaaacagttttaggtatgacatgatatatgtgttcaaatgagatagtcaagaatagctcacaaggtaagtcttcactaccgatttgcttttatctttgttg

SEQ ID NO: 2083 - DNA, 121 bp, synthetic construct
  misc_feature 1..121: note = Description of artificial sequence: synthetic polynucleotide sequence
  source 1..121: mol_type = other DNA
acactgcagaaataaatatatctgagatttacaactgccataaaagagataataaacaggaaggaacttaacatattaagcccctaccttgtttcaatccatgtcttaggcatttgcatgt

SEQ ID NO: 2084 - DNA, 121 bp, synthetic construct
  misc_feature 1..121: note = Description of artificial sequence: synthetic polynucleotide sequence
  source 1..121: mol_type = other DNA
tgtacaggtaagggaggttaagcaactctcctaggatcactgagctggcattagagccaggactgtctgatatcaggtcctctgcttccacctcctttctcctgcatcattgttctttcag

SEQ ID NO: 2085 - DNA, 121 bp, synthetic construct
  misc_feature 1..121: note = Description of artificial sequence: synthetic polynucleotide sequence
  source 1..121: mol_type = other DNA
aagaaatgcaaaccttattaatcaaaatgggctcaaaggagatttgtctgacagcactgcagagagcagtaataaaattaaataagtgtctgtgagtagttacacaggaaaaaatgtttct

SEQ ID NO: 2086 - DNA, 121 bp, synthetic construct
  misc_feature 1..121: note = Description of artificial sequence: synthetic polynucleotide sequence
  source 1..121: mol_type = other DNA
cataaaatctgtcaatccttcaccaagtacataatgtgggaattttactaaatgatttctctgacacctttcagtgctaacatgtgaaggtctgtaattgactatggcattttgctgcaag

SEQ ID NO: 2087 - DNA, 121 bp, synthetic construct
  misc_feature 1..121: note = Description of artificial sequence: synthetic polynucleotide sequence
  source 1..121: mol_type = other DNA
ttgggttttgccagagagtgggaggggaaagagggtggaggcagcatactcacctcatagaaaaccttggcccacatgtgaccagacttttctcaagttccactggtaagaacaactcaca

SEQ ID NO: 2088 - DNA, 121 bp, synthetic construct
  misc_feature 1..121: note = Description of artificial sequence: synthetic polynucleotide sequence
  source 1..121: mol_type = other DNA
tatatgtcgtcactcagactaaaataatgactaaaggatggaaagtggagagtagctatataagtcagtaggtgggagttgtttttaaaaaggagttaatgaatacatttgaaaagaaaga

SEQ ID NO: 2089 - DNA, 121 bp, synthetic construct
  misc_feature 1..121: note = Description of artificial sequence: synthetic polynucleotide sequence
  source 1..121: mol_type = other DNA
aatgatctcagttaacccagtaagaaaccgtcatggcaacatcgcgtgttagtgtgaacgtcagccagccctgttcagagctcgagggggaggtcctttcaggccaggctttcccctgacc

SEQ ID NO: 2090 - DNA, 121 bp, synthetic construct
  misc_feature 1..121: note = Description of artificial sequence: synthetic polynucleotide sequence
  source 1..121: mol_type = other DNA
tcaactcattagcaggaaaacactaaaacatacaatttttaaaaaattaatggatggttagagcacttggctgtgagattgggtagtgccatctacatttgggtaatggcccctcatattt

SEQ ID NO: 2091 - DNA, 121 bp, synthetic construct
  misc_feature 1..121: note = Description of artificial sequence: synthetic polynucleotide sequence
  source 1..121: mol_type = other DNA
ccacagccagaatgctccttttaaaacataaatgtaatcatattactttcttctaatggtttctaatcccattcagaataaaccatggcctacaaatcctttaggatctggcagcttcctt

SEQ ID NO: 2092 - DNA, 121 bp, synthetic construct
  misc_feature 1..121: note = Description of artificial sequence: synthetic polynucleotide sequence
  source 1..121: mol_type = other DNA
cttaacctgatacagtcatcatattgtagtttttggaagggctcgttctgcccaagagaagttcctccttacagctgattcggctgtctaccatttgcacgttggtgctgttttgagtgct

SEQ ID NO: 2093 - DNA, 121 bp, synthetic construct
  misc_feature 1..121: note = Description of artificial sequence: synthetic polynucleotide sequence
  source 1..121: mol_type = other DNA
tcctgctggtgaggcttcatacagcacacagatggagccatcctctccaattctgtaggacacttcataggggtcaacccagagtgtgagttcacttgggagaagcctgaacagctcctga

SEQ ID NO: 2094 - DNA, 121 bp, synthetic construct
  misc_feature 1..121: note = Description of artificial sequence: synthetic polynucleotide sequence
  source 1..121: mol_type = other DNA
ctcagtccaatccgctgtgctgcctgtccaatcagaggatccattttatggttgatgcgaatacaacggtaacccgatcccttgcatggcttttctgggaaccagtgatgtttataatgtt

SEQ ID NO: 2095 - DNA, 149 bp, synthetic construct
  misc_feature 1..149: note = Description of artificial sequence: synthetic polynucleotide sequence
  source 1..149: mol_type = other DNA
cctgccagcagctcctgcaggctctggctgaaggtctgcagctgtcgctcgctcgtgagccccttggtgcggagaaacttggagatgaaggacacggcggcggcgatctcgcctatcatggtggcggcccgggtgtagaagggatgcat

SEQ ID NO: 2096 - DNA, 121 bp, synthetic construct
  misc_feature 1..121: note = Description of artificial sequence: synthetic polynucleotide sequence
  source 1..121: mol_type = other DNA
agggaatcaacaggacttaaatagaaggaacattgagctgtggtgagggccaagtgtacaaaaaagtggacaggtctcaagggttagtgagtttttccaacaatgtttaacaactcatggc

SEQ ID NO: 2097 - DNA, 121 bp, synthetic construct
  misc_feature 1..121: note = Description of artificial sequence: synthetic polynucleotide sequence
  source 1..121: mol_type = other DNA
gctggcctagggagagaaaaaaaaccatcacttcaactcctgtcttccagggtgttgacatcattaactgccccacatccaccagatttccccagatcttagttgacatagagacattcat

SEQ ID NO: 2098 - DNA, 121 bp, synthetic construct
  misc_feature 1..121: note = Description of artificial sequence: synthetic polynucleotide sequence
  source 1..121: mol_type = other DNA
tcttaagctctcacaagaataaaacattgttttctatctatgtagtgttggttggattgatagtattaatggacattctaccatgtatgagacttatgaccttaggcaaattactctgttc

SEQ ID NO: 2099 - DNA, 121 bp, synthetic construct
  misc_feature 1..121: note = Description of artificial sequence: synthetic polynucleotide sequence
  source 1..121: mol_type = other DNA
ctggtagtactgccaaactacagccaccaccaccgacagccagatacttactggtataggcagttgctgaagatactcactgcttgatgtacttcatataccggagaaacaacagctaaat

SEQ ID NO: 2100 - DNA, 121 bp, synthetic construct
  misc_feature 1..121: note = Description of artificial sequence: synthetic polynucleotide sequence
  source 1..121: mol_type = other DNA
atagtggaatatagaaatactaaattgcagccctggctttttgaagggccttgggataacgggcagaatttggttagacagggagaatagagaaaaacattccaagtgaaggatcagagca

SEQ ID NO: 2101 - DNA, 121 bp, synthetic construct
  misc_feature 1..121: note = Description of artificial sequence: synthetic polynucleotide sequence
  source 1..121: mol_type = other DNA
caagaaacctgatgggaaaatcagattgacataaggcagctttgctaacaagaaatgctgtatttttcaaaaatttgaatgctgccagtatcattccccttccccacttatgcctattcta

SEQ ID NO: 2102 - DNA, 121 bp, synthetic construct
  misc_feature 1..121: note = Description of artificial sequence: synthetic polynucleotide sequence
  source 1..121: mol_type = other DNA
tagtagtaataattcttcaggaatttcccaccccctgacctgccttgttctgctcacaaaaaatcatctttccttggagtccccttggggtggggaatacaggattacctctgattcctct

SEQ ID NO: 2103 - DNA, 121 bp, synthetic construct
  misc_feature 1..121: note = Description of artificial sequence: synthetic polynucleotide sequence
  source 1..121: mol_type = other DNA
ccaaccagtagtcatgattcctctgctgggcacctctgctgcccagccctcttgggttcggagttccactgtgatatatggcatagttgtttgaggatgagggtgaggttgaagtgagttc

SEQ ID NO: 2104 - DNA, 121 bp, synthetic construct
  misc_feature 1..121: note = Description of artificial sequence: synthetic polynucleotide sequence
  source 1..121: mol_type = other DNA
agaaaagaaaatgttagggaccatgatatatgtgtctctggtttcctaggtcctagcacaatgtctcactcatagtggaaccccataaatattgaatgagtggagggtagaagggaagaaa

SEQ ID NO: 2105 - DNA, 121 bp, synthetic construct
  misc_feature 1..121: note = Description of artificial sequence: synthetic polynucleotide sequence
  source 1..121: mol_type = other DNA
tgagctaccgtgcctggcctccacctgtatggttttaaatgtacagataagcaagaatagaacacgaccctggaattccaagttttcagatcacgtgtttgatgtcatgtggactccacac

SEQ ID NO: 2106 - DNA, 121 bp, synthetic construct
  misc_feature 1..121: note = Description of artificial sequence: synthetic polynucleotide sequence
  source 1..121: mol_type = other DNA
tttaatttcattttatagggtccagaaatgtgttgtaaactgcacagcttaaaggtctcatccgtattttcatctatggcttgcttctccatttcattcacaaagatgttgggagagatgt

SEQ ID NO: 2107 - DNA, 121 bp, synthetic construct
  misc_feature 1..121: note = Description of artificial sequence: synthetic polynucleotide sequence
  source 1..121: mol_type = other DNA
ttttatcattatttatcattatcatcatacttccctaaaaaaacacttgtccttactacttatccaatttggctatcctgaaacatagtatctatgattattgtaggcatcctcctgactt

SEQ ID NO: 2108 - DNA, 121 bp, synthetic construct
  misc_feature 1..121: note = Description of artificial sequence: synthetic polynucleotide sequence
  source 1..121: mol_type = other DNA
gtcgtctaccgtggaccagtcgctgctgctttgggacttttaaaatgacagcacgtcttatagacgccgttcacctctcctagtgagcctggaattctggggctcagaggagcaaggttga

SEQ ID NO: 2109 - DNA, 121 bp, synthetic construct
  misc_feature 1..121: note = Description of artificial sequence: synthetic polynucleotide sequence
  source 1..121: mol_type = other DNA
gtgattaaatggctatataaacctgcatggtcagggcttgcaggaagtctcacttcactaacaaagctaagttcatcaactcctatcccttctacaccaacttctctgcatgcttacctgg

SEQ ID NO: 2110 - DNA, 121 bp, synthetic construct
  misc_feature 1..121: note = Description of artificial sequence: synthetic polynucleotide sequence
  source 1..121: mol_type = other DNA
atctttttcatctccagacaaaataattgaattaacctttcccccaaatgacaaataccgtcttgaatatcaaacacccttttcatataaatggagaattccagagtggcccatttaacaa

SEQ ID NO: 2111 - DNA, 121 bp, synthetic construct
  misc_feature 1..121: note = Description of artificial sequence: synthetic polynucleotide sequence
  source 1..121: mol_type = other DNA
catttgtttgaagactcactatgtgttaggctcatgcaaagcaatgctgattcaggcaatttcattcattctgaaaatcgttactgggtgcttagtgcataccaggaactgttctagacac

SEQ ID NO: 2112 - DNA, 121 bp, synthetic construct
  misc_feature 1..121: note = Description of artificial sequence: synthetic polynucleotide sequence
  source 1..121: mol_type = other DNA
cacagatgaaaggataagaaactgcagtgcacaatggaatcttcttcagccatagaaattcgcaaaatcacgttatctgcagccacatggagagacctggaaggcatgatgttaaatgaaa

SEQ ID NO: 2113 - DNA, 121 bp, synthetic construct
  misc_feature 1..121: note = Description of artificial sequence: synthetic polynucleotide sequence
  source 1..121: mol_type = other DNA
aacccaaatgcctgcagaggctaggccagtaatgtcaatgaatgaagacggacaggtggatgctatcgtgacccgaggggtatatgcttggcctaaggaaggaagccaccactcagcatca

SEQ ID NO: 2114 - DNA, 121 bp, synthetic construct
  misc_feature 1..121: note = Description of artificial sequence: synthetic polynucleotide sequence
  source 1..121: mol_type = other DNA
cttctttttgaggggagctggtccgggtctagttcacttcaccaagaagtccatgctgtcgcaatagtttgttaagtctttcaatttcttgttcctattgcaaaagcagacaaacactgga

SEQ ID NO: 2115 - DNA, 121 bp, synthetic construct
  misc_feature 1..121: note = Description of artificial sequence: synthetic polynucleotide sequence
  source 1..121: mol_type = other DNA
ttaccttctcagagcagctgaactcaaggtgttgaatcttggcggccaattgtacattcatctgttttaaccttaagagttgccgttctgaacgtgtcttaactgagatgataatccctga

SEQ ID NO: 2116 - DNA, 233 bp, synthetic construct
  misc_feature 1..233: note = Description of artificial sequence: synthetic polynucleotide sequence
  source 1..233: mol_type = other DNA
ccattgatgatccgggccacccgccacagccggagcagaatcagcaggcccagagcctcaaactggtgctcctggaacaggaggacaatgtcgaggatgaatgagaccaccaccacgacggcatccaggatctcaaacttgtggtgaaagaactccaggcggaagacaaataatttaaagatgatctccatcataaaaaagaccaagatggtgatgctcatgtagtggaatac

SEQ ID NO: 2117 - DNA, 121 bp, synthetic construct
  misc_feature 1..121: note = Description of artificial sequence: synthetic polynucleotide sequence
  source 1..121: mol_type = other DNA
acccctaccatggcagcatagttattcttgtcgggctggatgatcttcaggtccaggatgagctcagcaagcaccaggagggcatccagaaccaccaagcagatgatgatgacctgtgggc

SEQ ID NO: 2118 - DNA, 286 bp, synthetic construct
  misc_feature 1..286: note = Description of artificial sequence: synthetic polynucleotide sequence
  source 1..286: mol_type = other DNA
cctgaaacctgtgggagctgaacagtttcctcaacatgcccctgaagtcaaggggggccctgggtgcggggccaggggcaggggcaacgtcaggggctgcagctctgccttcctcgcctgagactggtgtgggtggtggctgctcctcctcctcctcctcctcttcattctcccatttcttgtagttgatgttccaggcatggtagtcgtctcccacgaccgtgaagtgccttaagaacttgctcatcctctcagcgggagccaccttggccctgcgggtgactgc

SEQ ID NO: 2119 - DNA, 121 bp, synthetic construct
  misc_feature 1..121: note = Description of artificial sequence: synthetic polynucleotide sequence
  source 1..121: mol_type = other DNA
tctcaaggctgggatatcctctaatgctgcaagaccacagaatccattaccttttcgtcccaggtggccatgtccctgttgcctctggatctgaaaaataaaaagacatttgtccagatct

SEQ ID NO: 2120 - DNA, 121 bp, synthetic construct
  misc_feature 1..121: note = Description of artificial sequence: synthetic polynucleotide sequence
  source 1..121: mol_type = other DNA
cattttacaggacaggaaaatgagacccacagaagttcaagtcaccaggccagttattgttgggctagcacttgaagccaggtctgcctgaatttagggcctcagctctttcccacgcatt

SEQ ID NO: 2121 - DNA, 121 bp, synthetic construct
  misc_feature 1..121: note = Description of artificial sequence: synthetic polynucleotide sequence
  source 1..121: mol_type = other DNA
agtatttggaagtttaaaagagtgggaacatggggacgcatagggagtggtgaaactggctcagggaaagtccattgcagcaagatagaggttgccaaaccgtaagcagaacaagttgaaa

SEQ ID NO: 2122 - DNA, 121 bp, synthetic construct
  misc_feature 1..121: note = Description of artificial sequence: synthetic polynucleotide sequence
  source 1..121: mol_type = other DNA
ggctacaagatgtcggggagtggccgggagttgggcgagtacgggctgcaggcatacactgaagtgaaaactgtgagtgtgggacctgctgggggctcagggcctgttggggcttgagggt

SEQ ID NO: 2123 - DNA, 260 bp, synthetic construct
  misc_feature 1..260: note = Description of artificial sequence: synthetic polynucleotide sequence
  source 1..260: mol_type = other DNA
catgtcacggccaggccacggtgggctgatgcctgtgaatggtctgggcttcccaccgcagaacgtggcccgggtggtggtgtgggagtggctgaatgagcacagccgctggcggccctacacggccaccgtgtgccaccacattgagaacgtgctgaaggaggacgctcgcggttccgtggtcctggggcaggtggacgcccagcttgtgccctacatcatcgacctgcagtccatgcaccagtttcgccaggacacag

SEQ ID NO: 2124 - DNA, 337 bp, synthetic construct
  misc_feature 1..337: note = Description of artificial sequence: synthetic polynucleotide sequence
  source 1..337: mol_type = other DNA
ggcaccatgcggcccgtgcggcgcaacttctacgacccgtcgtcggcgccgggcaagggcatcgtgtgggagtgggagaacgacggcggcgcatggacggcctacgatatggacatctgcatcaccatccagaacgcctacgagaagcagcacccgtggctcgacctctcatcgctaggcttctgctacctcatctacttcaacagcatgtcgcagatgaaccgccagacgcgccggcgccgccgcctgcgccgccgcctggacctcgcctacccgctcaccgtgggctccatccctaagtcgcagtcgtggcccgtgggcgccagctcgggccagc

SEQ ID NO: 2125 - DNA, 346 bp, synthetic construct
  misc_feature 1..346: note = Description of artificial sequence: synthetic polynucleotide sequence
  source 1..346: mol_type = other DNA
cctgctcctgccagcagtgcctgctggtcaacagcacgcgcgccgcctccaacgccatcctggcctcgcagcgccgcaaggcgccccccgcgcccccgctgccgccgccgccgccacctggagggcctccaggcgcgcttgccgtgcgccccagcgccaccttcacaggcgccgcgctctgggcagcgcccgccgccggccccgccgagcccgcgccgcctcccggggcgcccccacggagcccgggcgcccccggcggagcgcgcaccccggggcagaacaacctcaaccggcccgggccccagcgcaccaccagcgtgagcgcgcgcgcctccatcccgccggg

SEQ ID NO: 2126 - DNA, 121 bp, synthetic construct
  misc_feature 1..121: note = Description of artificial sequence: synthetic polynucleotide sequence
  source 1..121: mol_type = other DNA
cagctgcggcctcttctcttctccccgcagggtccccgcactcccggtgaagaacttgaatggtactgggccggtccatccggccctggcaggtgaggtctggcccagggcgggaaagaag

SEQ ID NO: 2127 - DNA, 163 bp, synthetic construct
  misc_feature 1..163: note = Description of artificial sequence: synthetic polynucleotide sequence
  source 1..163: mol_type = other DNA
gggatgaccgggatactgctgtgcgcggccgggctgcccgtgtgcctgacgcgggcccccaagcccatcctgcacccgccgcccgtgagcaagagcgacgtgaagcccgtgcctggcgtgcccggggtgtgccgcaagaccaagaagaagcaccttaaaaaga

SEQ ID NO: 2128 - DNA, 121 bp, synthetic construct
  misc_feature 1..121: note = Description of artificial sequence: synthetic polynucleotide sequence
  source 1..121: mol_type = other DNA
cctcaaacccaccccgctgtgtccctgcaggtaagaatcccgaggatgtggttcgaagatacatgcagaaggtgaaaaacccacctgatgaggtgaggaggggatgggggggctgggggag

SEQ ID NO: 2129 - DNA, 160 bp, synthetic construct
  misc_feature 1..160: note = Description of artificial sequence: synthetic polynucleotide sequence
  source 1..160: mol_type = other DNA
ggactgcaccatctgcatggagcgactggtcacagcatcaggctacgagggcgtgcttcggcacaagggcgtgcggcctgagctcgtgggccgcctgggccgctgtggccacatgtaccacctgctgtgcctcgtggccatgtactccaatggcaacaag

SEQ ID NO: 2130 - DNA, 163 bp, synthetic construct
  misc_feature 1..163: note = Description of artificial sequence: synthetic polynucleotide sequence
  source 1..163: mol_type = other DNA
ggatggcagcctgcagtgccccacctgcaaggccatctacggggagaagacgggtacgcagccgcctgggaagatggagttccacctcatcccccactcgctgcccggcttccctgatacccagaccatccgcatcgtctatgacatccccacaggcatccag

SEQ ID NO: 2131 - DNA, 121 bp, synthetic construct
  misc_feature 1..121: note = Description of artificial sequence: synthetic polynucleotide sequence
  source 1..121: mol_type = other DNA
ctgtccctctctgcagggccctgagcaccccaaccccgggaagaagttcaccgcaagaggattccctcgccactgctatctacccaacaacgagaaaggccggaaggtgggtgcccagccg

SEQ ID NO: 2132 - DNA, 226 bp, synthetic construct
  misc_feature 1..226: note = Description of artificial sequence: synthetic polynucleotide sequence
  source 1..226: mol_type = other DNA
ggtgctgcggctgctcatcacggcctgggagagaagactcatcttcactatcggcacgtccaacaccacgggcgagtcggacaccgtggtgtggaacgagatccaccacaagaccgagtttggatccaacctcacgggccacggctacccggacgctagctacctagacaacgtgctggctgagctcacagcccagggcgtatccgaggctgcagccaaggcttga

SEQ ID NO: 2133 - DNA, 121 bp, synthetic construct
  misc_feature 1..121: note = Description of artificial sequence: synthetic polynucleotide sequence
  source 1..121: mol_type = other DNA
cttcctgagggaggaagactctgaactaagcatgcaaatacaggcaagactgggacatcatgccaatgaagagatgttggaaacaaagcagcctggactgaggctctttccttcctcctct

SEQ ID NO: 2134 - DNA, 121 bp, synthetic construct
  misc_feature 1..121: note = Description of artificial sequence: synthetic polynucleotide sequence
  source 1..121: mol_type = other DNA
catttggttgctattatgaatgaacaaacccagcaaagctgaaacaggaaaaacggcaatgttgagcatctcagtgggctagagagaggcccagtgcccctgaggctaagtaatcccaaat

SEQ ID NO: 2135 - DNA, 121 bp, synthetic construct
  misc_feature 1..121: note = Description of artificial sequence: synthetic polynucleotide sequence
  source 1..121: mol_type = other DNA
aagaggccctaggcgaagttctgctgatgattgtgtaaactgagcctcttgcacaatcccagtgcaaatcacactgtggacgatgtcagtggccctccctagagtcatccatcacctaacc

SEQ ID NO: 2136 - DNA, 121 bp, synthetic construct
  misc_feature 1..121: note = Description of artificial sequence: synthetic polynucleotide sequence
  source 1..121: mol_type = other DNA
cccaggggccccaggctcctccctgctcacatcttcctgctaagtcttggtcaaacttatctcctctgccctgtattttaatttttcaaagtccaggttttttctctgtctttctctcatt

SEQ ID NO: 2137 - DNA, 121 bp, synthetic construct
  misc_feature 1..121: note = Description of artificial sequence: synthetic polynucleotide sequence
  source 1..121: mol_type = other DNA
ttcattttctttaagtagctcccagtctattgggaaagcagaagtgtgaaccattcttattctgtgtgattattgaaacgtctgcttggtagtaatgattatagttaacatgtgttgggta

SEQ ID NO: 2138 - DNA, 121 bp, synthetic construct
  misc_feature 1..121: note = Description of artificial sequence: synthetic polynucleotide sequence
  source 1..121: mol_type = other DNA
gagctttcttctctgcctccgacaactgagctgattctctggggttgaaattgacttccattcctccagccatattctcttgcctagtgtccctttaattttttattttattttattttat

SEQ ID NO: 2139 - DNA, 121 bp, synthetic construct
  misc_feature 1..121: note = Description of artificial sequence: synthetic polynucleotide sequence
  source 1..121: mol_type = other DNA
acctcccccttataaggacttttgtccttataatctccccatcacaagagccttaacttaaacacacctgcgaagtcccttttaccatgtaaagtaacacaataaattcacaggttccaag

SEQ ID NO: 2140 - DNA, 121 bp, synthetic construct
  misc_feature 1..121: note = Description of artificial sequence: synthetic polynucleotide sequence
  source 1..121: mol_type = other DNA
tcctgaccttgggtagtcagcgcttgagttcagaaacatggatttgcatcaggtgaggagtaaaagagagagagagtttttctgcaagggctatttccaggctgggcaggcactgagtgct

SEQ ID NO: 2141 - DNA, 121 bp, synthetic construct
  misc_feature 1..121: note = Description of artificial sequence: synthetic polynucleotide sequence
  source 1..121: mol_type = other DNA
ggcaggtagggtgagcttctcctaactttttttgaaataagaagggaaaaaactaataattgcattgaaacaatgcaagttcgatgacagtcatgtggcacatgtaccccacttctctctc

SEQ ID NO: 2142 - DNA, 121 bp, synthetic construct
  misc_feature 1..121: note = Description of artificial sequence: synthetic polynucleotide sequence
  source 1..121: mol_type = other DNA
ggagtctcctaagtgttaaaggcctcttaacagccaactagtgatgggtagaagtcccagtcgacctctgatctggatactgttttcacctccattgtcaatgctaagcctttgtttgttt

SEQ ID NO: 2143 - DNA, 121 bp, synthetic construct
  misc_feature 1..121: note = Description of artificial sequence: synthetic polynucleotide sequence
  source 1..121: mol_type = other DNA
tagaaaggacgtgggatttatttgctatatgtatttctgaagcctaagaaaaaaaatgtgcaagcactttgacccagagattccattgctaagaatttatcccaaagaaacaatgaaggat

SEQ ID NO: 2144 - DNA, 281 bp, synthetic construct
  misc_feature 1..281: note = Description of artificial sequence: synthetic polynucleotide sequence
  source 1..281: mol_type = other DNA
gtgggggcctgccgattggattctttcgcgtgtgtgtagaagcggccgccgccgccgccgcggcggagacgacaacaacttgctggttttcaggttgggttaacggcatggagaacagtcaccccccccaccaccaccaccagcagcccccgccgcagcccggcccttcgggcgagaggaggaaccaccattggagaagttacaagttgatgattgacccggctctgaaaaaggggcatcataaactgtaccgctacgatgggcagcatttcagcctggcg

SEQ ID NO: 2145 - DNA, 121 bp, synthetic construct
  misc_feature 1..121: note = Description of artificial sequence: synthetic polynucleotide sequence
  source 1..121: mol_type = other DNA
tctccccacagatgtccagcaaccgcccggtggaaattgtcgaagatccccgggtcgtcgggatctggaccaaaaacaaggagctggagctgtcggtgcccaaattcaaggtaggacccct

SEQ ID NO: 2146 - DNA, 272 bp, synthetic construct
  misc_feature 1..272: note = Description of artificial sequence: synthetic polynucleotide sequence
  source 1..272: mol_type = other DNA
gatcgatgagttctacgtgggcccggtgcctccgaagcaggtgacatttgccaagctgaatgataacatccgtgaaaacttcctgagggacatgtgcaagaagtatggggaggtggaggaggtggagattttgtacaaccccaagaccaagaagcacctgggcatcgccaaggtggtctttgccacggtccggggagccaaggatgccgttcagcacttgcacagcacttccgtcatgggcaacattatccacgtggagctggacaccaaag

SEQ ID NO: 2147 - DNA, 121 bp, synthetic construct
  misc_feature 1..121: note = Description of artificial sequence: synthetic polynucleotide sequence
  source 1..121: mol_type = other DNA
acaggggaaacccgaatgcggttctatgaactgttggtcactggccgatacaccccccagaccctcccagtgggcgagctggacgctgtctctccaatcgtgaatgagaccctgcaggtgg

SEQ ID NO: 2148 - DNA, 333 bp, synthetic construct
  misc_feature 1..333: note = Description of artificial sequence: synthetic polynucleotide sequence
  source 1..333: mol_type = other DNA
gctgtcagatgccctgaagcgcctcaaggatggaggcctgtctgcaggctgtggctccggctcctcctctgtcacccccaatagcggtgggacacccttctcccaggacacagcttattccagctgccgcctggacacacccaactcctatggacagggcaccccgctcacaccgcgcctgggcacccctttctcacaggactccagctactccagccgccagcccacaccctcatacctcttcagccaggaccctgcagtgaccttcaaggcccggcgccacgagagcaagttcacggacgcctacaaccgccgccacgaacatcattatgt

SEQ ID NO: 2149 - DNA, 446 bp, synthetic construct
  misc_feature 1..446: note = Description of artificial sequence: synthetic polynucleotide sequence
  source 1..446: mol_type = other DNA
acacaattctcccgcggtcactgcggtggccggggccacagccgctttccggggttcctcggacctcccgttcggagcagtcggcggcactgggggcagcagcggtcccccgttcaaggctcaaccacaggattcagccacatttgcccacactccaccacccgcccaagcaacccctgctcctggattcaagtctgctttctctccgtatcagaccccagtggcccacttccctccacccccggaagagcccaccgccacagccgcttttggggcccgcgacagtggggagttccggagggcaccggcgcccccacccctgccacctgctgagcctctggccaaggagaagccaggcacgccacccggcccgccgccccccgacaccaacagcatggagctgggcggccggcccaccttcggctggagtcctgagccctgtgaca

SEQ ID NO: 2150 - DNA, 455 bp, synthetic construct
  misc_feature 1..455: note = Description of artificial sequence: synthetic polynucleotide sequence
  source 1..455: mol_type = other DNA
gccctggcacgcccacgctggagtcgtcccctgcagggccagagaaaccccacgacagcctggactcgcgcatcgagatgctgctgaaggagcagcgcaccaagctgctcttcctgagggagccggactcggacaccgagctgcagatggagggcagccccatctcctcctcctcctcccagctctccccactggccccctttggcaccaactcccagccaggcttccggggccccacgcccccctcgtcacgcccctccagcaccggcctggaggatatcagcccaacacccctcccagactccgacgaggacgaggagctcgacctgggccttgggcctcggcctccacctgagccaggccccccggaccctgctgggcttctgagccagacagctgaggtggccttggacctggttggagacagaaccccgacctcagagaagatggatgag

SEQ ID NO: 2151 - DNA, 352 bp, synthetic construct
  misc_feature 1..352: note = Description of artificial sequence: synthetic polynucleotide sequence
  source 1..352: mol_type = other DNA
gggccagcagtcctcaggcgaggacatggagatctcggatgacgagatgccctcggcccccatcaccagcgctgactgccccaagcccatggtggtgaccccaggagcggcagccgtggcagccccttctgtgctagccccaaccctgccgctgcccccgccacctggcttccccccgctgccccccccaccaccaccacccccaccgcagcctggcttccccatgcccccaccgctgcccccaccgccgcccccaccccctccagcccaccctgctgtgacagtgcccccaccacccttgccagcgccgcctggagtcccgcccccacccatcctgccaccactgcccccc

SEQ ID NO: 2152 - DNA, 474 bp, synthetic construct
  misc_feature 1..474: note = Description of artificial sequence: synthetic polynucleotide sequence
  source 1..474: mol_type = other DNA
tttccgccgggcctgttccctgtgatgcaggtggacatgagccacgtgctgggtggccagtggggcggcatgcccatgtccttccagatgcaaacgcaggtgctcagccggctgatgacgggccagggcgcctgcccctacccgcccttcatggccgctgcggccgccgctgcctcagctgggctccagtttgtcaacctgccgccctaccggggccccttctccctgagcaactccggcccaggccgcgggcagcactggccaccactgcccaagtttgacccgtcagtgcctccaccaggctacatgccacgccaggaggacccacacaaagccacggtggatggcgtcctgctggtggtcctcaaagaactcaaggccatcatgaagcgtgacctgaaccgcaagatggtggaagtggtggctttccgggcctttgacgagtggtgggacaagaaggagcggatggccaag

SEQ ID NO: 2153 - DNA, 263 bp, synthetic construct
  misc_feature 1..263: note = Description of artificial sequence: synthetic polynucleotide sequence
  source 1..263: mol_type = other DNA
ggcctcgctgaccccggtgaagtcgggcgagcacaaggacgaggacaggccgaagcccaaggaccgcatcgcctcgtgcctgctggagtcatggggcaagggcgagggcctgggctacgagggcctgggcctgggcattgggctgcgtggggccattcgcctgccctccttcaaggtcaagaggaaggagccaccagacaccacctcatctggcgaccagaagcggctgcggccctcgacctctgtggatgaggaagatgaag

SEQ ID NO: 2154 - DNA, 336 bp, synthetic construct
  misc_feature 1..336: note = Description of artificial sequence: synthetic polynucleotide sequence
  source 1..336: mol_type = other DNA
gagtccgagcgagagcgagaccgggatatggcagacaccccctgtgagctcgccaagcgggaccccaagggcgtgggtgtgcggcggcggccggcgcggcctctggagctggacagtggtggggaggaggacgagaaggagtcattgtcggcgtcctcgtcctcatccgcgtcatcatcctcggggtcctcaaccacctcaccctcgtcctcggcctccgacaaggaggaggaacaggagagcaccgaggaggaagaggaggcggaggaggaggaggaggaggaagtccccaggagccagctctcctcctcctcaacctcatccacatcagataag

SEQ ID NO: 2155 - DNA, 121 bp, synthetic construct
  misc_feature 1..121: note = Description of artificial sequence: synthetic polynucleotide sequence
  source 1..121: mol_type = other DNA
tcccccaggatgacgacgatgacgacagtgatgaccgggacgagtctgagaacgatgacgaggacacagccctgtcagaggcgagtgagaaggacgaaggggactcggatgaaggtgagca

SEQ ID NO: 2156 - DNA, 121 bp, synthetic construct
  misc_feature 1..121: note = Description of artificial sequence: synthetic polynucleotide sequence
  source 1..121: mol_type = other DNA
gaggagacagtgagcattgtaacctccaaggccgaagccacgtcgtccagtgagagttccgagtcttctgagtttgagtcaagctccgagtcctcgccctcatcctcggaggatgaggagg

SEQ ID NO: 2157 - DNA, 121 bp, synthetic construct
  misc_feature 1..121: note = Description of artificial sequence: synthetic polynucleotide sequence
  source 1..121: mol_type = other DNA
tagtggccagggaagaggaggaagaagaggaggaggaggagatggtggccgaggaaagcatggcttctgcaggccctgaggactttgagcaggacggggaggaagcggctctggccccggg

SEQ ID NO: 2158 - DNA, 121 bp, synthetic construct
  misc_feature 1..121: note = Description of artificial sequence: synthetic polynucleotide sequence
  source 1..121: mol_type = other DNA
cctgcagtggactcgttgggcatggaagaggaggtggacatcgagactgaggctgtggcccctgaggagcggccctccatgctggacgagccccccttgcctgtgggtgttgaagagccag

SEQ ID NO: 2159 - DNA, 121 bp, synthetic construct
  misc_feature 1..121: note = Description of artificial sequence: synthetic polynucleotide sequence
  source 1..121: mol_type = other DNA
gactccagggagccgcctgaggaaccaggcctgagccaggaaggggccatgttgctgtctccagagccccctgccaaggaggtggaggctcgacccccattgtcccctgagcgagctccag

SEQ ID NO: 2160 - DNA, 342 bp, synthetic construct
  misc_feature 1..342: note = Description of artificial sequence: synthetic polynucleotide sequence
  source 1..342: mol_type = other DNA
gaacatgacctggaagtggagccggagccccctatgatgctccccttgccgctgcaaccaccattgccgcccccacgaccaccccggccacccagcccaccgccggagcctgagaccacagatgcctcacacccatctgtccctccggagccccttgccgaggaccaccccccgcatactccaggcctctgtggcagcctggccaagtcgcagagcacagagacggtgccagccacaccaggcggggagcccccgctatcagggggcagcagtggcctgtccctgagctctccgcaagtgcccggcagccccttctcctacccagccccgtcccctagcttg

SEQ ID NO: 2161 - DNA, 456 bp, synthetic construct
  misc_feature 1..456: note = Description of artificial sequence: synthetic polynucleotide sequence
  source 1..456: mol_type = other DNA
agcagtgggggcctccctcggacacctggccgggacttcagcttcacacccaccttctccgagcccagcgggcccttgctcctgcccgtctgcccactccccactggccgacgcgatgaacgctccgggcccctggcctccccggtgctcctggagacgggcctgcccctccctctgccccttcccctgcccttgcccttggcattgcccgccgtcttgcgggcccaggctcgtgcgcccaccccgctgccacccctgctgcccgcccccctggcctcttgccctcccccaatgaagaggaagccgggccggccccggcgatccccaccatctatgctctccttggatgggcccttggtccgaccaccagcaggggccgcccttggaagggaactcctgctcctgccgggccagccacagacccccgtcttccccagcacccatgacccccggacg

SEQ ID NO: 2162 - DNA, 463 bp, synthetic construct
  misc_feature 1..463: note = Description of artificial sequence: synthetic polynucleotide sequence
  source 1..463: mol_type = other DNA
gtgaccctggacttccggaacgcggggatcccagcccctccaccaccccttcccccccagccacccccacccccacctcccccacctgtagagcccaccaagctgccctttaaggagctagacaaccagtggccctccgaggccattcctccgggcccccgtgggcgcgatgaggtcactgaggaatacatggagttggccaagagccgggggccgtggcgccggccacctaagaagcgccatgaggacctggtgccacctgcgggctcgcccgaactctcgccaccccagcccctcttccggccccgctcggagtttgaggagatgaccatcctgtatgacatctggaacggtggcatcgatgaggaggacatccgcttcctgtgtgtcacctacgagcgactgctacagcaggacaatggcatggactggcttaacgacacgctctgggtctaccatccct

SEQ ID NO: 2163 - DNA, 168 bp, synthetic construct
  misc_feature 1..168: note = Description of artificial sequence: synthetic polynucleotide sequence
  source 1..168: mol_type = other DNA
cccaccagcctctcttcagctaagaagaagaaacgggacgatggcatccgcgagcacgtgacgggctgtgcccgcagtgagggcttctacaccatcgacaagaaggacaagctcagatacctcaacagcagccgtgccagcaccgatgagccccccgcagacacccag

SEQ ID NO: 2164 - DNA, 133 bp, synthetic construct
  misc_feature 1..133: note = Description of artificial sequence: synthetic polynucleotide sequence
  source 1..133: mol_type = other DNA
gggcatgagcatcccagcacagccccacgcctccacccgggcaggctcggagcggcgttcggagcagcgccgcctgctgtcctccttcactggcagctgtgacagtgacctgctcaagttcaaccagctcaag

SEQ ID NO: 2165 - DNA, 121 bp, synthetic construct
  misc_feature 1..121: note = Description of artificial sequence: synthetic polynucleotide sequence
  source 1..121: mol_type = other DNA
gttccggaagaaaaagctcaagttctgcaagagccacattcacgactggggcttgttcgccatggagcccatcgcggctgacgagatggtcatcgagtacgtgggccagaatatccgtcag

SEQ ID NO: 2166 - DNA, 139 bp, synthetic construct
  misc_feature 1..139: note = Description of artificial sequence: synthetic polynucleotide sequence
  source 1..139: mol_type = other DNA
ggtgatcgcagacatgcgggagaagcgttatgaggacgagggcatcgggagcagctacatgttccgggtggaccatgacaccatcatcgacgccaccaagtgcggcaacttcgcgcgcttcatcaaccacagctgcaac

SEQ ID NO: 2167 - DNA, 175 bp, synthetic construct
  misc_feature 1..175: note = Description of artificial sequence: synthetic polynucleotide sequence
  source 1..175: mol_type = other DNA
gcccaactgctatgccaaggtgatcacggtggagtcacagaagaagatagtcatctactcgaagcagcacattaacgtcaatgaggagattacctatgactataagttccccatcgaggacgtcaagatcccctgcctctgtggctccgagaactgccgggggaccctcaactag

SEQ ID NO: 2168 - DNA, 121 bp, synthetic construct
  misc_feature 1..121: note = Description of artificial sequence: synthetic polynucleotide sequence
  source 1..121: mol_type = other DNA
ctccccgccggaaccatgtcgggcaggtcggttcgagccgagacgaggagccgggccaaagatgatatcaagagggtcatggcggcgatcgagaaagtgcgcaaatggtaagcggaggcgc

SEQ ID NO: 2169 - DNA, 121 bp, synthetic construct
  misc_feature 1..121: note = Description of artificial sequence: synthetic polynucleotide sequence
  source 1..121: mol_type = other DNA
ctcttcctcatcctcctcagggagaagaaatgggtgaccgttggtgacacatccctacgaatctacaaatgggtccctgtgacggagcccaaggttgatgacgtgagtatggagggctggt

SEQ ID NO: 2170 - DNA, 121 bp, synthetic construct
  misc_feature 1..121: note = Description of artificial sequence: synthetic polynucleotide sequence
  source 1..121: mol_type = other DNA
tttcccctgcagaaaaacaagaataagaaaaaaggcaaggacgagaagtgtggctcagaggtgaccactccggagaacagttcctccccagggatgatggacatgcatggtgagtgcccat

SEQ ID NO: 2171 - DNA, 169 bp, synthetic construct
  misc_feature 1..169: note = Description of artificial sequence: synthetic polynucleotide sequence
  source 1..169: mol_type = other DNA
gacgataacagcaaccagagctccatcgcagatgcctcccccatcaaacaggagaacagcagcaactccagccccgctccagagcccaactcggctgtgcccagcgacggcaccgaggccaaggtggatgaggcccaggctgatgggaaggagcacccaggagctgaag

SEQ ID NO: 2172 - DNA, 186 bp, synthetic construct
  misc_feature 1..186: note = Description of artificial sequence: synthetic polynucleotide sequence
  source 1..186: mol_type = other DNA
gatgcttctgatgagcagaattcacagtcctcgatggaacattcgatgaacagctcagagaaagtagatcggcagccgtctggagactcgggtctggccgcagagacgtctgcaatctctcaggtacctcgctcgaggtctcagaggggcagccagatcggccgggagcccattgggttgtcgggg

SEQ ID NO: 2173 - DNA, 121 bp, synthetic construct
  misc_feature 1..121: note = Description of artificial sequence: synthetic polynucleotide sequence
  source 1..121: mol_type = other DNA
gttccccttttctcctctccccaaggatttggaaggagtgccaccctctaaaaagatgaaactggaggcctctcaacaaaactccgaagagatgtagacgatgctttaaagcctccgatcc

SEQ ID NO: 2174 - DNA, 121 bp, synthetic construct
  misc_feature 1..121: note = Description of artificial sequence: synthetic polynucleotide sequence
  source 1..121: mol_type = other DNA
agcagagatggcgccattgtactccaagaaagtaggtcaatgaagctatgggcaaactgttcaattactacctacaatgagtgctatttaacaggtatgatctcggctgggcatgctggct

SEQ ID NO: 2175 - DNA, 121 bp, synthetic construct
  misc_feature 1..121: note = Description of artificial sequence: synthetic polynucleotide sequence
  source 1..121: mol_type = other DNA
tccggtcggttagaagccattcacaggtcctgcctatactcaaagggaaaggattacataatggtgtgaaattccaaaacacgtaggtgggtcagcatcttagaggcttcctgccatatta

SEQ ID NO: 2176 - DNA, 121 bp, synthetic construct
  misc_feature 1..121: note = Description of artificial sequence: synthetic polynucleotide sequence
  source 1..121: mol_type = other DNA
aggtactactatgaatttagtgtgtattggtagttggtgataaaccccctgactaatccaaaatatgtctttccaattcgttctcaaaagcccaaaccagtaatatagaaatggctgtttt

SEQ ID NO: 2177 - DNA, 121 bp, synthetic construct
  misc_feature 1..121: note = Description of artificial sequence: synthetic polynucleotide sequence
  source 1..121: mol_type = other DNA
aaatattatcatcatatccaagcagactgacacttgagtttctcaacctgactgttcattgctaccatataaaagagtatatacgtgcttcagcgccttccagaccaactaagtcagaaat

SEQ ID NO: 2178 - DNA, 121 bp, synthetic construct
  misc_feature 1..121: note = Description of artificial sequence: synthetic polynucleotide sequence
  source 1..121: mol_type = other DNA
aaaatggatttcaagtaaaatcacaccaagtagctactagctagaagttcatccacatcgtgaggttaacccatcatccaaaaagcagatgccacaaatcttttagggaaatacaacagtg

SEQ ID NO: 2179 - DNA, 121 bp, synthetic construct
  misc_feature 1..121: note = Description of artificial sequence: synthetic polynucleotide sequence
  source 1..121: mol_type = other DNA
tgggttttccttgcagagttctagaccaaagatgtggaggagtagatttgccatgactgcacggctgcctcaagatcttccaggtttcctcttctccaagacttggacataggagggggct

SEQ ID NO: 2180 - DNA, 121 bp, synthetic construct
  misc_feature 1..121: note = Description of artificial sequence: synthetic polynucleotide sequence
  source 1..121: mol_type = other DNA
taggaaattttggttctggcaagaccaacagatctgagatgactgccattcaaatgatatctgtcactcacagttcccaagaggaggggacacttctcaccccacgtgatgcaccagggtt

SEQ ID NO: 2181 - DNA, 121 bp, synthetic construct
  misc_feature 1..121: note = Description of artificial sequence: synthetic polynucleotide sequence
  source 1..121: mol_type = other DNA
cccgactggccaaggaaaagcgggaacatgagcagttctaggaatccgctagtgagcgacgggtaggtctggagattgtggagtttttggagatttgatgaacctttaactcaaactgcct

SEQ ID NO: 2182 - DNA, 121 bp, synthetic construct
  misc_feature 1..121: note = Description of artificial sequence: synthetic polynucleotide sequence
  source 1..121: mol_type = other DNA
aatttttttttctccatttttttactgacagctgaagaccatgtcaagatttgggataattgtgaaacagacagtgaagatagtaatttgcatttataaagtgtccataataaagaaaagg

SEQ ID NO: 2183 - DNA, 121 bp, synthetic construct
  misc_feature 1..121: note = Description of artificial sequence: synthetic polynucleotide sequence
  source 1..121: mol_type = other DNA
gggtggtaaaactgcagggcatgtccacggctctgcagagctcctggggctgtcgatgatcttcagtggctttctagaccacgcttcagaaaatatggcctgcaggccacatccagcttgc

SEQ ID NO: 2184 - DNA, 121 bp, synthetic construct
  misc_feature 1..121: note = Description of artificial sequence: synthetic polynucleotide sequence
  source 1..121: mol_type = other DNA
cggcttctcctatattcaactactgaatccacataaacctgttttacagatgggcttatagaagtgcagcgatgcaaatccagaccgtttagcttccaagttcatacccaccatcatcttc

SEQ ID NO: 2185 - DNA, 121 bp, synthetic construct
  misc_feature 1..121: note = Description of artificial sequence: synthetic polynucleotide sequence
  source 1..121: mol_type = other DNA
aagtcagggtaatagttacctttaagaaaaaaatcagcatatcaggtaatcagcatatcgtgtaatcagcatatcaggacatatgaaaagtccataacttttttgttgttgtttgtttgtt

SEQ ID NO: 2186 - DNA, 121 bp, synthetic construct
  misc_feature 1..121: note = Description of artificial sequence: synthetic polynucleotide sequence
  source 1..121: mol_type = other DNA
gtgtgtcagcatgggggatctgaggaagccctcccctctcttgcagtctgtggctctgcctcatgaatattattacagaaacctctgcgtgaagaccataaagtgcatactttttgacatc

SEQ ID NO: 2187 - DNA, 121 bp, synthetic construct
  misc_feature 1..121: note = Description of artificial sequence: synthetic polynucleotide sequence
  source 1..121: mol_type = other DNA
gcattacttgtgtcagtaaatgaaaaaggtgattaaagtctacgcctgactttcccgttagtttccaggtggcctttggggtaacttttttcctactgtctcttaacagtaatgaagcatg

SEQ ID NO: 2188 - DNA, 121 bp, synthetic construct
  misc_feature 1..121: note = Description of artificial sequence: synthetic polynucleotide sequence
  source 1..121: mol_type = other DNA
tttattcaacaaacgtgtgatgctctcccgtaccaggtacctagctatgtactcagtattccacggccaacaatacatacctgcaccctgcccttgagaaaccatatcatccacgtgcagt

SEQ ID NO: 2189 - DNA, 121 bp, synthetic construct
  misc_feature 1..121: note = Description of artificial sequence: synthetic polynucleotide sequence
  source 1..121: mol_type = other DNA
gtacttacctttctttatgtacagaggggtcaaaagacaaacagtcctgtcaggtctagcaaatatggtcaaataaaaacaacaaaagagcaaactagtatcacatccaaatggacccacc

SEQ ID NO: 2190 - DNA, 121 bp, synthetic construct
  misc_feature 1..121: note = Description of artificial sequence: synthetic polynucleotide sequence
  source 1..121: mol_type = other DNA
cagaaccatgttttatatgtagtatgcatgtcccaaacaaactctagtacaatgtcttatacaaagtatgtgctcagaaaattttttctggatattttcccctaaagaaattctgatctaa

SEQ ID NO: 2191 - DNA, 121 bp, synthetic construct
  misc_feature 1..121: note = Description of artificial sequence: synthetic polynucleotide sequence
  source 1..121: mol_type = other DNA
atgtactgatcagctgttgcatgcccccaaaaatctaaagccatcaccttttaagtaatgggatgtgctgacttctcactgtatttgcacaaggacgacatatcaaagtaaaatagaaata

SEQ ID NO: 2192 - DNA, 121 bp, synthetic construct
  misc_feature 1..121: note = Description of artificial sequence: synthetic polynucleotide sequence
  source 1..121: mol_type = other DNA
tcattttactctcttcctacaatgtactcagtccactaccagagtggtcagaacagacatctttgctcccaaatagatacatcagcaggataaaataaaatcttcttatcctgtccatgcc

SEQ ID NO: 2193 - DNA, 121 bp, synthetic construct
  misc_feature 1..121: note = Description of artificial sequence: synthetic polynucleotide sequence
  source 1..121: mol_type = other DNA
aacagcaataccgttgtgcccagcatgacaacattttagtcactgatgcctcgcctacaggacagcagccccatgacattataataccacatttctatgccttttctacatttgggtgtgt

SEQ ID NO: 2194 - DNA, 121 bp, synthetic construct
  misc_feature 1..121: note = Description of artificial sequence: synthetic polynucleotide sequence
  source 1..121: mol_type = other DNA
tggcaagtcactgaaatatggtagagattgaaatttttagtttgtctagacagctttcactgcttcttcgcttaattgacacagaagaatagcttgtggtatagcaaaggctgccaggtgt

SEQ ID NO: 2195 - DNA, 474 bp, synthetic construct
  misc_feature 1..474: note = Description of artificial sequence: synthetic polynucleotide sequence
  source 1..474: mol_type = other DNA
aatgaaccccagcacccccagctacccaacggcctcgctctacgtgggggacctccaccccgacgtgactgaggcgatgctctacgagaagttcagcccggcagggcccatcctctccatccggatctgcagggacttgatcaccagcggctcctccaactacgcgtatgtgaacttccagcatacgaaggacgcggagcatgctctggacaccatgaattttgatgttataaagggcaagccagtacgcatcatgtggtctcagcgtgatccatcacttcgaaaaagtggagtgggcaacatattcgttaaaaatctggataagtccattaataataaagcactgtatgatacagtttctgcttttggtaacatcctttcgtgtaacgtggtttgtgatgaaaatggttccaagggttatggatttgtacactttgagacacacgaagcagctgaaagagctattaaaaaaat

SEQ ID NO: 2196 - DNA, 474 bp, synthetic construct
  misc_feature 1..474: note = Description of artificial sequence: synthetic polynucleotide sequence
  source 1..474: mol_type = other DNA
gaacggaatgctcctaaatggtcgcaaagtatttgttggacaatttaagtctcgtaaagaacgagaagctgaacttggagctagggcaaaagagttccccaatgtttacatcaagaattttggagaagacatggatgatgagcgccttaaggatctctttggcaagttcgggcccgccttaagtgtgaaagtaatgaccgatgaaagtggaaaatccaaaggatttggatttgtaagctttgaaaggcatgaagatgcacagaaagctgtagatgagatgaatggaaaggagctcaatggaaaacaaatttacgttggtcgagctcagaaaaaagtggaacggcagacggaacttaagcgcacatttgaacagatgaagcaagataggatcaccagataccaggttgttaatctttatgtgaaaaatcttgatgatggtattgatgatgaacgtctccggaaagcgttttctcc

SEQ ID NO: 2197 - DNA, 473 bp, synthetic construct
  misc_feature 1..473: note = Description of artificial sequence: synthetic polynucleotide sequence
  source 1..473: mol_type = other DNA
atttggtacaatcactagtgcaaaggttatgatggaaggtggtcgcagcaaagggtttggttttgtatgtttctcctccccagaagaagccactaaagcagttacagaaatgaacggtagaattgtggccacaaagccattgtatgtagctttagctcagcgcaaagaagagcgccaggcttacctcactaacgagtatatgcagagaatggcaagtgtacgagctgtgcccaaccagcgagcacctccttcaggttacttcatgacagctgtcccacagactcagaaccatgctgcatactatcctcctagccaaattgctcgactaagaccaagtcctcgctggactgctcagggtgccagacctcatccattccaaaataagcccagtgctatccgcccaggtgctcctagagtaccatttagtactatgagaccagcttcttcacaggttccacgagtcatgtcaacgc

SEQ ID NO: 2198 - DNA, 476 bp, synthetic construct
  misc_feature 1..476: note = Description of artificial sequence: synthetic polynucleotide sequence
  source 1..476: mol_type = other DNA
agcgtgttgctaacacatcaacacagacagtgggtccacgtcctgcagctgctgctgctgctgcagctacccctgctgtgcgcacggttccacggtataaatatgctgcgggagttcgcaatcctcagcaacatcgtaatgcacagccacaagttacaatgcaacagcttgctgttcatgtacaaggtcaggaaactttgactgcctccaggttggcatctgcccctcctcaaaagcaaaagcaaatgttaggtgaacggctctttcctcttattcaagccatgcaccctactcttgctgggaaaatcactggcatgttgttggagattgataattcagaacttctttatatgctcgagtctccagagtcactccgttctaaggttgatgaagctgtagctgtactacaagcccaccaagctaaagaggctacccagaaagcagttaacagtgctaccggtgttccaactgtttaa

SEQ ID NO: 2199 - DNA, 121 bp, synthetic construct
  misc_feature 1..121: note = Description of artificial sequence: synthetic polynucleotide sequence
  source 1..121: mol_type = other DNA
tacacctgcaatgctctgctttttctctgcacagccaaatcataatcattcttataagcctatttcaaatggcttcctgaatgaaattgccctgtttctttggcccccattgagactggca

SEQ ID NO: 2200 - DNA, 121 bp, synthetic construct
  misc_feature 1..121: note = Description of artificial sequence: synthetic polynucleotide sequence
  source 1..121: mol_type = other DNA
cgcggctgcttctcatccctggagcttctcatcgcctcctcttgtcctgttggttagtcgtctccttcttggggtcctaattaaaaaaaaaaaaaactggcttccactggcttctgggaat

SEQ ID NO: 2201 - DNA, 121 bp, synthetic construct
  misc_feature 1..121: note = Description of artificial sequence: synthetic polynucleotide sequence
  source 1..121: mol_type = other DNA
agccgtgcacagcagccagatctctgggaaggaactgaagttaaacccttggtaaatgctagttctgtgctagttttagtgtgtgaataataagctgtaccgactcctaatgactcacttc

SEQ ID NO: 2202 - DNA, 121 bp, synthetic construct
  misc_feature 1..121: note = Description of artificial sequence: synthetic polynucleotide sequence
  source 1..121: mol_type = other DNA
aataacaaaacacggcatatgcatacaatggaatattagcctcaagagggaaacaaattctaacagatgatatgacgtggatgaactttgaatacattaggttcagtaaaataagccagtc

SEQ ID NO: 2203 - DNA, 121 bp, synthetic construct
  misc_feature 1..121: note = Description of artificial sequence: synthetic polynucleotide sequence
  source 1..121: mol_type = other DNA
ggtaaaagttcttcaaaggttttgattctttccaggctcatgaacttgaaagcatttacgtatctaatgaagaaacagaaagaattatcaagacaggaaaaggcatccagctctaatgagt

SEQ ID NO: 2204 - DNA, 121 bp, synthetic construct
  misc_feature 1..121: note = Description of artificial sequence: synthetic polynucleotide sequence
  source 1..121: mol_type = other DNA
atataagttataaaaattgatcacatgattgtgggaggagggtacaggcatgccaaaccaatagtatatattcctacaacaccaacacccctcaccccaaaacccttctcagcctggtcct

SEQ ID NO: 2205 - DNA, 121 bp, synthetic construct
  misc_feature 1..121: note = Description of artificial sequence: synthetic polynucleotide sequence
  source 1..121: mol_type = other DNA
ttccaggatgggattcaagtatgtatattaacaaacgtctccagagccgaaatctgaagagcatccctgctgtaggaccccaactttgaaactaagaggatttgttaaactctattctgtt

SEQ ID NO: 2206 - DNA, 121 bp, synthetic construct
  misc_feature 1..121: note = Description of artificial sequence: synthetic polynucleotide sequence
  source 1..121: mol_type = other DNA
ggggcctccagcatgggagacttacgtatagggctgagtttgttttggaaaggtcacttcgaggggtggttggagtagagtccattcagaagtctcttcataaccatgaccttatttggcc

SEQ ID NO: 2207 - DNA, 121 bp, synthetic construct
  misc_feature 1..121: note = Description of artificial sequence: synthetic polynucleotide sequence
  source 1..121: mol_type = other DNA
cctgacatgttcattacaagcaaagatgtctggaaagatgttggatgatgaggggaagcagtgccaaatctggagtctgggtctgaatcctggctttgcctcctacttgctgtgtgatctt

SEQ ID NO: 2208 - DNA, 121 bp, synthetic construct
  misc_feature 1..121: note = Description of artificial sequence: synthetic polynucleotide sequence
  source 1..121: mol_type = other DNA
tggttggcaagtgcaaatggtgagggctccatccatttttcatgaagttataattaacacgctgtctgcctcccacaggttcaacctttgggaatgaagaacagccagttctgaaggcatc

SEQ ID NO: 2209 - DNA, 121 bp, synthetic construct
  misc_feature 1..121: note = Description of artificial sequence: synthetic polynucleotide sequence
  source 1..121: mol_type = other DNA
agcttactttctacctatttctcttttccaactatacacaggaacaaagaaagatgctcagaaagatcaagatacgaataaacctgctgtttcatctcctaagagagtagcagcttcaacc

SEQ ID NO: 2210 - DNA, 121 bp, synthetic construct
  misc_feature 1..121: note = Description of artificial sequence: synthetic polynucleotide sequence
  source 1..121: mol_type = other DNA
ggtcatcatggcctcctccctttgccctgcaccattgtcctgacctcaggttcagtgtccactagcatgattgctacttatttgtcattgtgcccatgcagacagctgtcggaggaaaatg

SEQ ID NO: 2211 - DNA, 121 bp, synthetic construct
  misc_feature 1..121: note = Description of artificial sequence: synthetic polynucleotide sequence
  source 1..121: mol_type = other DNA
gccagcacgccgggggcgttcagagtcatgtgtgtccgtgagaactccccgatgggtctgcctatcagctcgtcgaaggtggcgctccaggccctcgctacgcttgaagtacctgccacaa

SEQ ID NO: 2212 - DNA, 121 bp, synthetic construct
  misc_feature 1..121: note = Description of artificial sequence: synthetic polynucleotide sequence
  source 1..121: mol_type = other DNA
aaggaatggtttttgaataacgagtacaaatagcatcaagataactaacattatgtcagtcagtgctctaattttgagtgctgaactataaatgttctgtgggtgaaactttttttgaaat

SEQ ID NO: 2213 - DNA, 121 bp, synthetic construct
  misc_feature 1..121: note = Description of artificial sequence: synthetic polynucleotide sequence
  source 1..121: mol_type = other DNA
tgccaattggtgtaaccatgtgacctagttctgaccagcgagatgcaagtggaactgatgtatgcaacttctgacatgtccttaaatggaagggacatgctcgtctttgtccccctcttca

SEQ ID NO: 2214 - DNA, 121 bp, synthetic construct
  misc_feature 1..121: note = Description of artificial sequence: synthetic polynucleotide sequence
  source 1..121: mol_type = other DNA
caaagaatatgaatttctctgttacatgaaaatagatgatcagttctaaaaattcataaccctggtggtgagtttgttttgagagtttaatgattattttttatttcctttcctatagttg

SEQ ID NO: 2215 - DNA, 121 bp, synthetic construct
  misc_feature 1..121: note = Description of artificial sequence: synthetic polynucleotide sequence
  source 1..121: mol_type = other DNA
ttattaatctttattatgttggccatttattaaatatctactatgtgccaatcactgttctaggcagttaatatacatatgtatgatatatatgtaccatctcaatcttaaagagtagata

SEQ ID NO: 2216 - DNA, 121 bp, synthetic construct
  misc_feature 1..121: note = Description of artificial sequence: synthetic polynucleotide sequence
  source 1..121: mol_type = other DNA
agtataaatatcttttttaacatcacaaagctctgatatctgcaggtttatgactaactactagctcactcccatgaatacacgtatgtaaacaggctctatacaatctacaatcccagac

SEQ ID NO: 2217 - DNA, 121 bp, synthetic construct
  misc_feature 1..121: note = Description of artificial sequence: synthetic polynucleotide sequence
  source 1..121: mol_type = other DNA
ccttccacttaaaaagactaatgaccaacacgctctcagtaatgagaaaccagtatctttaacatcgtgttctgtgggtgatgctgcctcagctgaaacagcctcagtaactcaccctaaa

SEQ ID NO: 2218 - DNA, 121 bp, synthetic construct
  misc_feature 1..121: note = Description of artificial sequence: synthetic polynucleotide sequence
  source 1..121: mol_type = other DNA
actgcattcacgcctaaaacaggagcagtgcctgccttaattcggtagatcattatttgtgttggattgatatacatgttttaatttgttgacttgtcttttatgactcagaatccaaaca

SEQ ID NO: 2219 - DNA, 121 bp, synthetic construct
  misc_feature 1..121: note = Description of artificial sequence: synthetic polynucleotide sequence
  source 1..121: mol_type = other DNA
aggagtgctcgtattttggattttgcatccaacttgtacttagttttaaattctgcacaaaaatgttccactaacttttcatcgaagttttttcctcctaagaaaggatcaaaagctgttc

SEQ ID NO: 2220 - DNA, 121 bp, synthetic construct
  misc_feature 1..121: note = Description of artificial sequence: synthetic polynucleotide sequence
  source 1..121: mol_type = other DNA
ccctttggcatctcagtatctccaggctccagcacttgcttagctgttatgactccggcgagcctgtgtttctgggagagcgctacggctacggcctgggcactggtggctacagctacat

SEQ ID NO: 2221 - DNA, 121 bp, synthetic construct
  misc_feature 1..121: note = Description of artificial sequence: synthetic polynucleotide sequence
  source 1..121: mol_type = other DNA
tattaagagtacacacactttactctgtaataaaaaaaaaatccttgcaactgaggtttgtaaattgctctccaggtgacactggagcaaggcaggggaggaatgtggtctattcccaaag

SEQ ID NO: 2222 - DNA, 121 bp, synthetic construct
  misc_feature 1..121: note = Description of artificial sequence: synthetic polynucleotide sequence
  source 1..121: mol_type = other DNA
gatgatgcactttaagaccacaacatttctgaacagtattaaagactcttggtacccatcatttttggtggctgcataatgtttcttttacatatagactataatttccttaacccctccc

SEQ ID NO: 2223 - DNA, 121 bp, synthetic construct
  misc_feature 1..121: note = Description of artificial sequence: synthetic polynucleotide sequence
  source 1..121: mol_type = other DNA
ttttttggattatgtaatctgcaaatattgtgagtaacctctttctcatattgtaggtataattttaagcaaagactaaaaggatagaatggtactttttcaaggctcgacttgattgtag

SEQ ID NO: 2224 - DNA, 121 bp, synthetic construct
  misc_feature 1..121: note = Description of artificial sequence: synthetic polynucleotide sequence
  source 1..121: mol_type = other DNA
taattgctttgggttttcattgtcgtcaacagggatctgtctagcaatacgataacggaactatcacctcacctttttaaagacttgaagcttctacaaaagctgtaagttctacttctca

SEQ ID NO: 2225 - DNA, 121 bp, synthetic construct
  misc_feature 1..121: note = Description of artificial sequence: synthetic polynucleotide sequence
  source 1..121: mol_type = other DNA
agagactctaataattattcttgcatatattctttttctttctaggaaaagccattgacaaaatctctgcaacgtggagaagacccccaatttgatcaggtatgtgatatatatgttatat

SEQ ID NO: 2226 - DNA, 121 bp, synthetic construct
  misc_feature 1..121: note = Description of artificial sequence: synthetic polynucleotide sequence
  source 1..121: mol_type = other DNA
gacttatttaccaagcattggaggaatatcgtaggtaaaaatgcctattggatccaaagagaggccaacattttttgaaatttttaagacacgctgcaacaaagcaggtattgacaaattt

SEQ ID NO: 2227 - DNA, 121 bp, synthetic construct
  misc_feature 1..121: note = Description of artificial sequence: synthetic polynucleotide sequence
  source 1..121: mol_type = other DNA
gatttaggaccaataagtcttaattggtttgaagaactttcttcagaagctccaccctataattctgaacctgcagaagaatctgaacataaaaacaacaattacgaaccaaacctattta

SEQ ID NO: 2228 - DNA, 121 bp, synthetic construct
  misc_feature 1..121: note = Description of artificial sequence: synthetic polynucleotide sequence
  source 1..121: mol_type = other DNA
caaaggaaaccatcttataatcagctggcttcaactccaataatattcaaagagcaagggctgactctgccgctgtaccaatctcctgtaaaagaattagataaattcaaattagacttag

SEQ ID NO: 2229 - DNA, 121 bp, synthetic construct
  misc_feature 1..121: note = Description of artificial sequence: synthetic polynucleotide sequence
  source 1..121: mol_type = other DNA
tttcaggaaggaatgttcccaatagtagacataaaagtcttcgcacagtgaaaactaaaatggatcaagcagatgatgtttcctgtccacttctaaattcttgtcttagtgaaaggtatga

SEQ ID NO: 2230 - DNA, 121 bp, synthetic construct
  misc_feature 1..121: note = Description of artificial sequence: synthetic polynucleotide sequence
  source 1..121: mol_type = other DNA
aaaataacctaagggatttgctttgttttattttagtcctgttgttctacaatgtacacatgtaacaccacaaagagataagtcaggtatgattaaaaacaatgctttttattcttagaat

SEQ ID NO: 2231 - DNA, 121 bp, synthetic construct
  misc_feature 1..121: note = Description of artificial sequence: synthetic polynucleotide sequence
  source 1..121: mol_type = other DNA
aaaataaaacttaacaattttcccctttttttacccccagtggtatgtgggagtttgtttcatacaccaaagtttgtgaaggtaaatattctacctggtttatttttatgacttagtaatt

SEQ ID NO: 2232 - DNA, 121 bp, synthetic construct
  misc_feature 1..121: note = Description of artificial sequence: synthetic polynucleotide sequence
  source 1..121: mol_type = other DNA
cagggtcgtcagacaccaaaacatatttctgaaagtctaggagctgaggtggatcctgatatgtcttggtcaagttctttagctacaccacccacccttagttctactgtgctcataggta

SEQ ID NO: 2233 - DNA, 121 bp, synthetic construct
  misc_feature 1..121: note = Description of artificial sequence: synthetic polynucleotide sequence
  source 1..121: mol_type = other DNA
gataatatacaatacacataaatttttatcttacagtcagaaatgaagaagcatctgaaactgtatttcctcatgatactactgctgtaagtaaatatgacattgattagactgttgaaat

SEQ ID NO: 2234 - DNA, 121 bp, synthetic construct
  misc_feature 1..121: note = Description of artificial sequence: synthetic polynucleotide sequence
  source 1..121: mol_type = other DNA
tgcagaatgtgaaaagctatttttccaatcatgatgaaagtctgaagaaaaatgatagatttatcgcttctgtgacagacagtgaaaacacaaatcaaagagaagctgcaagtcatggtaa

SEQ ID NO: 2235 - DNA, 332 bp, synthetic construct
  misc_feature 1..332: note = Description of artificial sequence: synthetic polynucleotide sequence
  source 1..332: mol_type = other DNA
ggatttggaaaaacatcagggaattcatttaaagtaaatagctgcaaagaccacattggaaagtcaatgccaaatgtcctagaagatgaagtatatgaaacagttgtagatacctctgaagaagatagtttttcattatgtttttctaaatgtagaacaaaaaatctacaaaaagtaagaactagcaagactaggaaaaaaattttccatgaagcaaacgctgatgaatgtgaaaaatctaaaaaccaagtgaaagaaaaatactcatttgtatctgaagtggaaccaaatgatactgatccattagattcaaatgtagcaaatcagaagcc

SEQ ID NO: 2236 - DNA, 442 bp, synthetic construct
  misc_feature 1..442: note = Description of artificial sequence: synthetic polynucleotide sequence
  source 1..442: mol_type = other DNA
ctttgagagtggaagtgacaaaatctccaaggaagttgtaccgtctttggcctgtgaatggtctcaactaaccctttcaggtctaaatggagcccagatggagaaaatacccctattgcatatttcttcatgtgaccaaaatatttcagaaaaagacctattagacacagagaacaaaagaaagaaagattttcttacttcagagaattctttgccacgtatttctagcctaccaaaatcagagaagccattaaatgaggaaacagtggtaaataagagagatgaagagcagcatcttgaatctcatacagactgcattcttgcagtaaagcaggcaatatctggaacttctccagtggcttcttcatttcagggtatcaaaaagtctatattcagaataagagaatcacctaaagagactttcaatgcaagtttttcaggt

SEQ ID NO: 2237 - DNA, 343 bp, synthetic construct
  misc_feature 1..343: note = Description of artificial sequence: synthetic polynucleotide sequence
  source 1..343: mol_type = other DNA
catatgactgatccaaactttaaaaaagaaactgaagcctctgaaagtggactggaaatacatactgtttgctcacagaaggaggactccttatgtccaaatttaattgataatggaagctggccagccaccaccacacagaattctgtagctttgaagaatgcaggtttaatatccactttgaaaaagaaaacaaataagtttatttatgctatacatgatgaaacatcttataaaggaaaaaaaataccgaaagaccaaaaatcagaactaattaactgttcagcccagtttgaagcaaatgcttttgaagcaccacttacatttgcaaatgctgattcag

SEQ ID NO: 2238 - DNA, 352 bp, synthetic construct
  misc_feature 1..352: note = Description of artificial sequence: synthetic polynucleotide sequence
  source 1..352: mol_type = other DNA
ggtttattgcattcttctgtgaaaagaagctgttcacagaatgattctgaagaaccaactttgtccttaactagctcttttgggacaattctgaggaaatgttctagaaatgaaacatgttctaataatacagtaatctctcaggatcttgattataaagaagcaaaatgtaataaggaaaaactacagttatttattaccccagaagctgattctctgtcatgcctgcaggaaggacagtgtgaaaatgatccaaaaagcaaaaaagtttcagatataaaagaagaggtcttggctgcagcatgtcacccagtacaacattcaaaagtggaatacagtgatactgactttc

SEQ ID NO: 2239 - DNA, 469 bp, synthetic construct
  misc_feature 1..469: note = Description of artificial sequence: synthetic polynucleotide sequence
  source 1..469: mol_type = other DNA
aatcccagaaaagtcttttatatgatcatgaaaatgccagcactcttattttaactcctacttccaaggatgttctgtcaaacctagtcatgatttctagaggcaaagaatcatacaaaatgtcagacaagctcaaaggtaacaattatgaatctgatgttgaattaaccaaaaatattcccatggaaaagaatcaagatgtatgtgctttaaatgaaaattataaaaacgttgagctgttgccacctgaaaaatacatgagagtagcatcaccttcaagaaaggtacaattcaaccaaaacacaaatctaagagtaatccaaaaaaatcaagaagaaactacttcaatttcaaaaataactgtcaatccagactctgaagaacttttctcagacaatgagaataattttgtcttccaagtagctaatgaaaggaataatcttgctttaggaaatactaaggaacttca

SEQ ID NO: 2240 - DNA, 469 bp, synthetic construct
  misc_feature 1..469: note = Description of artificial sequence: synthetic polynucleotide sequence
  source 1..469: mol_type = other DNA
tgaaacagacttgacttgtgtaaacgaacccattttcaagaactctaccatggttttatatggagacacaggtgataaacaagcaacccaagtgtcaattaaaaaagatttggtttatgttcttgcagaggagaacaaaaatagtgtaaagcagcatataaaaatgactctaggtcaagatttaaaatcggacatctccttgaatatagataaaataccagaaaaaaataatgattacatgaacaaatgggcaggactcttaggtccaatttcaaatcacagttttggaggtagcttcagaacagcttcaaataaggaaatcaagctctctgaacataacattaagaagagcaaaatgttcttcaaagatattgaagaacaatatcctactagtttagcttgtgttgaaattgtaaataccttggcattagataatcaaaagaaactgagcaagcctcagtcaattaat

SEQ ID NO: 2241 - DNA, 469 bp, synthetic construct
  misc_feature 1..469: note = Description of artificial sequence: synthetic polynucleotide sequence
  source 1..469: mol_type = other DNA
actgtatctgcacatttacagagtagtgtagttgtttctgattgtaaaaatagtcatataacccctcagatgttattttccaagcaggattttaattcaaaccataatttaacacctagccaaaaggcagaaattacagaactttctactatattagaagaatcaggaagtcagtttgaatttactcagtttagaaaaccaagctacatattgcagaagagtacatttgaagtgcctgaaaaccagatgactatcttaaagaccacttctgaggaatgcagagatgctgatcttcatgtcataatgaatgccccatcgattggtcaggtagacagcagcaagcaatttgaaggtacagttgaaattaaacggaagtttgctggcctgttgaaaaatgactgtaacaaaagtgcttctggttatttaacagatgaaaatgaagtggggtttaggggcttttattctgctc

SEQ ID NO: 2242 - DNA, 470 bp, synthetic construct
  misc_feature 1..470: note = Description of artificial sequence: synthetic polynucleotide sequence
  source 1..470: mol_type = other DNA
atggcacaaaactgaatgtttctactgaagctctgcaaaaagctgtgaaactgtttagtgatattgagaatattagtgaggaaacttctgcagaggtacatccaataagtttatcttcaagtaaatgtcatgattctgttgtttcaatgtttaagatagaaaatcataatgataaaactgtaagtgaaaaaaataataaatgccaactgatattacaaaataatattgaaatgactactggcacttttgttgaagaaattactgaaaattacaagagaaatactgaaaatgaagataacaaatatactgctgccagtagaaattctcataacttagaatttgatggcagtgattcaagtaaaaatgatactgtttgtattcataaagatgaaacggacttgctatttactgatcagcacaacatatgtcttaaattatctggccagtttatgaaggagggaaacactcag

SEQ ID NO: 2243 - DNA, 470 bp, synthetic construct
  misc_feature 1..470: note = Description of artificial sequence: synthetic polynucleotide sequence
  source 1..470: mol_type = other DNA
attaaagaagatttgtcagatttaacttttttggaagttgcgaaagctcaagaagcatgtcatggtaatacttcaaataaagaacagttaactgctactaaaacggagcaaaatataaaagattttgagacttctgatacattttttcagactgcaagtgggaaaaatattagtgtcgccaaagagtcatttaataaaattgtaaatttctttgatcagaaaccagaagaattgcataacttttccttaaattctgaattacattctgacataagaaagaacaaaatggacattctaagttatgaggaaacagacatagttaaacacaaaatactgaaagaaagtgtcccagttggtactggaaatcaactagtgaccttccagggacaacccgaacgtgatgaaaagatcaaagaacctactctattgggttttcatacagctagcgggaaaaaagttaaaattgcaaa

SEQ ID NO: 2244 - DNA, 468 bp, synthetic construct
  misc_feature 1..468: note = Description of artificial sequence: synthetic polynucleotide sequence
  source 1..468: mol_type = other DNA
ggaatctttggacaaagtgaaaaacctttttgatgaaaaagagcaaggtactagtgaaatcaccagttttagccatcaatgggcaaagaccctaaagtacagagaggcctgtaaagaccttgaattagcatgtgagaccattgagatcacagctgccccaaagtgtaaagaaatgcagaattctctcaataatgataaaaaccttgtttctattgagactgtggtgccacctaagctcttaagtgataatttatgtagacaaactgaaaatctcaaaacatcaaaaagtatctttttgaaagttaaagtacatgaaaatgtagaaaaagaaacagcaaaaagtcctgcaacttgttacacaaatcagtccccttattcagtcattgaaaattcagccttagctttttacacaagttgtagtagaaaaacttctgtgagtcagacttcattacttgaagcaaaaaaatg

SEQ ID NO: 2245 - DNA, 470 bp, synthetic construct
  misc_feature 1..470: note = Description of artificial sequence: synthetic polynucleotide sequence
  source 1..470: mol_type = other DNA
gcttagagaaggaatatttgatggtcaaccagaaagaataaatactgcagattatgtaggaaattatttgtatgaaaataattcaaacagtactatagctgaaaatgacaaaaatcatctctccgaaaaacaagatacttatttaagtaacagtagcatgtctaacagctattcctaccattctgatgaggtatataatgattcaggatatctctcaaaaaataaacttgattctggtattgagccagtattgaagaatgttgaagatcaaaaaaacactagtttttccaaagtaatatccaatgtaaaagatgcaaatgcatacccacaaactgtaaatgaagatatttgcgttgaggaacttgtgactagctcttcaccctgcaaaaataaaaatgcagccattaaattgtccatatctaatagtaataattttgaggtagggccacctgcatttaggatagccagtg

SEQ ID NO: 2246 - DNA, 470 bp, synthetic construct
  misc_feature 1..470: note = Description of artificial sequence: synthetic polynucleotide sequence
  source 1..470: mol_type = other DNA
gtaaaatcgtttgtgtttcacatgaaacaattaaaaaagtgaaagacatatttacagacagtttcagtaaagtaattaaggaaaacaacgagaataaatcaaaaatttgccaaacgaaaattatggcaggttgttacgaggcattggatgattcagaggatattcttcataactctctagataatgatgaatgtagcacgcattcacataaggtttttgctgacattcagagtgaagaaattttacaacataaccaaaatatgtctggattggagaaagtttctaaaatatcaccttgtgatgttagtttggaaacttcagatatatgtaaatgtagtatagggaagcttcataagtcagtctcatctgcaaatacttgtgggatttttagcacagcaagtggaaaatctgtccaggtatcagatgcttcattacaaaacgcaagacaagtgttttctgaaatagaagat

SEQ ID NO: 2247 - DNA, 470 bp, synthetic construct
  misc_feature 1..470: note = Description of artificial sequence: synthetic polynucleotide sequence
  source 1..470: mol_type = other DNA
agtaccaagcaagtcttttccaaagtattgtttaaaagtaacgaacattcagaccagctcacaagagaagaaaatactgctatacgtactccagaacatttaatatcccaaaaaggcttttcatataatgtggtaaattcatctgctttctctggatttagtacagcaagtggaaagcaagtttccattttagaaagttccttacacaaagttaagggagtgttagaggaatttgatttaatcagaactgagcatagtcttcactattcacctacgtctagacaaaatgtatcaaaaatacttcctcgtgttgataagagaaacccagagcactgtgtaaactcagaaatggaaaaaacctgcagtaaagaatttaaattatcaaataacttaaatgttgaaggtggttcttcagaaaataatcactctattaaagtttctccatatctctctcaatttcaacaagacaa

SEQ ID NO: 2248 - DNA, 356 bp, synthetic construct
  misc_feature 1..356: note = Description of artificial sequence: synthetic polynucleotide sequence
  source 1..356: mol_type = other DNA
acaacagttggtattaggaaccaaagtgtcacttgttgagaacattcatgttttgggaaaagaacaggcttcacctaaaaacgtaaaaatggaaattggtaaaactgaaactttttctgatgttcctgtgaaaacaaatatagaagtttgttctacttactccaaagattcagaaaactactttgaaacagaagcagtagaaattgctaaagcttttatggaagatgatgaactgacagattctaaactgccaagtcatgccacacattctctttttacatgtcccgaaaatgaggaaatggttttgtcaaattcaagaattggaaaaagaagaggagagccccttatcttagtgg

SEQ ID NO: 2249 - DNA, 121 bp, synthetic construct
  misc_feature 1..121: note = Description of artificial sequence: synthetic polynucleotide sequence
  source 1..121: mol_type = other DNA
tatttctttttaggagaaccctcaatcaaaagaaacttattaaatgaatttgacaggataatagaaaatcaagaaaaatccttaaaggcttcaaaaagcactccagatggtaaaattagct

SEQ ID NO: 2250 - DNA, 121 bp, synthetic construct
  misc_feature 1..121: note = Description of artificial sequence: synthetic polynucleotide sequence
  source 1..121: mol_type = other DNA
tgtaatataaaataattgtttcctaggcacaataaaagatcgaagattgtttatgcatcatgtttctttagagccgattacctgtgtaccctttcggtaagacatgtttaaatttttctaa

SEQ ID NO: 2251 - DNA, 429 bp, synthetic construct
  misc_feature 1..429: note = Description of artificial sequence: synthetic polynucleotide sequence
  source 1..429: mol_type = other DNA
gcacaactaaggaacgtcaagagatacagaatccaaattttaccgcacctggtcaagaatttctgtctaaatctcatttgtatgaacatctgactttggaaaaatcttcaagcaatttagcagtttcaggacatccattttatcaagtttctgctacaagaaatgaaaaaatgagacacttgattactacaggcagaccaaccaaagtctttgttccaccttttaaaactaaatcacattttcacagagttgaacagtgtgttaggaatattaacttggaggaaaacagacaaaagcaaaacattgatggacatggctctgatgatagtaaaaataagattaatgacaatgagattcatcagtttaacaaaaacaactccaatcaagcagtagctgtaactttcacaaagtgtgaagaagaacctttag

SEQ ID NO: 2252 - DNA, 183 bp, synthetic construct
  misc_feature 1..183: note = Description of artificial sequence: synthetic polynucleotide sequence
  source 1..183: mol_type = other DNA
gatttaattacaagtcttcagaatgccagagatatacaggatatgcgaattaagaagaaacaaaggcaacgcgtctttccacagccaggcagtctgtatcttgcaaaaacatccactctgcctcgaatctctctgaaagcagcagtaggaggccaagttccctctgcgtgttctcataaacag

SEQ ID NO: 2253 - DNA, 189 bp, synthetic construct
  misc_feature 1..189: note = Description of artificial sequence: synthetic polynucleotide sequence
  source 1..189: mol_type = other DNA
gctgtatacgtatggcgtttctaaacattgcataaaaattaacagcaaaaatgcagagtcttttcagtttcacactgaagattattttggtaaggaaagtttatggactggaaaaggaatacagttggctgatggtggatggctcataccctccaatgatggaaaggctggaaaagaagaattttatag

SEQ ID NO: 2254 - DNA, 172 bp, synthetic construct
  misc_feature 1..172: note = Description of artificial sequence: synthetic polynucleotide sequence
  source 1..172: mol_type = other DNA
gggctctgtgtgacactccaggtgtggatccaaagcttatttctagaatttgggtttataatcactatagatggatcatatggaaactggcagctatggaatgtgcctttcctaaggaatttgctaatagatgcctaagcccagaaagggtgcttcttcaactaaaatacag

SEQ ID NO: 2255 - DNA, 356 bp, synthetic construct
  misc_feature 1..356: note = Description of artificial sequence: synthetic polynucleotide sequence
  source 1..356: mol_type = other DNA
gatatgatacggaaattgatagaagcagaagatcggctataaaaaagataatggaaagggatgacacagctgcaaaaacacttgttctctgtgtttctgacataatttcattgagcgcaaatatatctgaaacttctagcaataaaactagtagtgcagatacccaaaaagtggccattattgaacttacagatgggtggtatgctgttaaggcccagttagatcctcccctcttagctgtcttaaagaatggcagactgacagttggtcagaagattattcttcatggagcagaactggtgggctctcctgatgcctgtacacctcttgaagccccagaatctcttatgttaaag

SEQ ID NO: 2256 - DNA, 157 bp, synthetic construct
  misc_feature 1..157: note = Description of artificial sequence: synthetic polynucleotide sequence
  source 1..157: mol_type = other DNA
gatttctgctaacagtactcggcctgctcgctggtataccaaacttggattctttcctgaccctagaccttttcctctgcccttatcatcgcttttcagtgatggaggaaatgttggttgtgttgatgtaattattcaaagagcataccctatacag

SEQ ID NO: 2257 - DNA, 146 bp, synthetic construct
  misc_feature 1..146: note = Description of artificial sequence: synthetic polynucleotide sequence
  source 1..146: mol_type = other DNA
gtggatggagaagacatcatctggattatacatatttcgcaatgaaagagaggaagaaaaggaagcagcaaaatatgtggaggcccaacaaaagagactagaagccttattcactaaaattcaggaggaatttgaagaacatgaag

SEQ ID NO: 2258 - DNA, 121 bp, synthetic construct
  misc_feature 1..121: note = Description of artificial sequence: synthetic polynucleotide sequence
  source 1..121: mol_type = other DNA
aaaacacaacaaaaccatatttaccatcacgtgcactaacaagacagcaagttcgtgctttgcaagatggtgcagagctttatgaagcagtgaagaatgcagcagacccagcttaccttga

SEQ ID NO: 2259 - DNA, 200 bp, synthetic construct
  misc_feature 1..200: note = Description of artificial sequence: synthetic polynucleotide sequence
  source 1..200: mol_type = other DNA
gggttatttcagtgaagagcagttaagagccttgaataatcacaggcaaatgttgaatgataagaaacaagctcagatccagttggaaattaggaaggccatggaatctgctgaacaaaaggaacaaggtttatcaagggatgtcacaaccgtgtggaagttgcgtattgtaagctattcaaaaaaagaaaaagattcag

SEQ ID NO: 2260 - DNA, 165 bp, synthetic construct
  misc_feature 1..165: note = Description of artificial sequence: synthetic polynucleotide sequence
  source 1..165: mol_type = other DNA
gttatactgagtatttggcgtccatcatcagatttatattctctgttaacagaaggaaagagatacagaatttatcatcttgcaacttcaaaatctaaaagtaaatctgaaagagctaacatacagttagcagcgacaaaaaaaactcagtatcaacaactaccg

SEQ ID NO: 2261 - DNA, 140 bp, synthetic construct
  misc_feature 1..140: note = Description of artificial sequence: synthetic polynucleotide sequence
  source 1..140: mol_type = other DNA
ggtttcagatgaaattttatttcagatttaccagccacgggagccccttcacttcagcaaatttttagatccagactttcagccatcttgttctgaggtggacctaataggatttgtcgtttctgttgtgaaaaaaacag

SEQ ID NO: 2262 - DNA, 121 bp, synthetic construct
  misc_feature 1..121: note = Description of artificial sequence: synthetic polynucleotide sequence
  source 1..121: mol_type = other DNA
ggacttgcccctttcgtctatttgtcagacgaatgttacaatttactggcaataaagttttggatagaccttaatgaggacattattaagcctcatatgttaattgctgcaagcaacctcc

SEQ ID NO: 2263 - DNA, 121 bp, synthetic construct
  misc_feature 1..121: note = Description of artificial sequence: synthetic polynucleotide sequence
  source 1..121: mol_type = other DNA
gcgaccagaatccaaatcaggccttcttactttatttgctggagatttttctgtgttttctgctagtccaaaagagggccactttcaagagacattcaacaaaatgaaaaatactgttgag

SEQ ID NO: 2264 - DNA, 148 bp, synthetic construct
  misc_feature 1..148: note = Description of artificial sequence: synthetic polynucleotide sequence
  source 1..148: mol_type = other DNA
gaatattgacatactttgcaatgaagcagaaaacaagcttatgcatatactgcatgcaaatgatcccaagtggtccaccccaactaaagactgtacttcagggccgtacactgctcaaatcattcctggtacaggaaacaagcttctg

SEQ ID NO: 2265 - DNA, 121 bp, synthetic construct
  misc_feature 1..121: note = Description of artificial sequence: synthetic polynucleotide sequence
  source 1..121: mol_type = other DNA
gatgtcttctcctaattgtgagatatattatcaaagtcctttatcactttgtatggccaaaaggaagtctgtttccacacctgtctcagcccagatgacttcaaagtcttgtaaaggggag

SEQ ID NO: 2266 - DNA, 121 bp, synthetic construct
  misc_feature 1..121: note = Description of artificial sequence: synthetic polynucleotide sequence
  source 1..121: mol_type = other DNA
aagagattgatgaccaaaagaactgcaaaaagagaagagccttggatttcttgagtagactgcctttacctccacctgttagtcccatttgtacatttgtttctccggctgcacagaaggc

SEQ ID NO: 2267 - DNA, 121 bp, synthetic construct
  misc_feature 1..121: note = Description of artificial sequence: synthetic polynucleotide sequence
  source 1..121: mol_type = other DNA
tttcagccaccaaggagttgtggcaccaaatacgaaacacccataaagaaaaaagaactgaattctcctcagatgactccatttaaaaaattcaatgaaatttctcttttggaaagtaatt

SEQ ID NO: 2268 - DNA, 121 bp, synthetic construct
  misc_feature 1..121: note = Description of artificial sequence: synthetic polynucleotide sequence
  source 1..121: mol_type = other DNA
aatagctgacgaagaacttgcattgataaatacccaagctcttttgtctggttcaacaggagaaaaacaatttatatctgtcagtgaatccactaggactgctcccaccagttcagaagat

SEQ ID NO: 2269 - DNA, 121 bp, synthetic construct
  misc_feature 1..121: note = Description of artificial sequence: synthetic polynucleotide sequence
  source 1..121: mol_type = other DNA
tctcagactgaaacgacgttgtactacatctctgatcaaagaacaggagagttcccaggccagtacggaagaatgtgagaaaaataagcaggacacaattacaactaaaaaatatatctaa

SEQ ID NO: 2270 - DNA, 121 bp, synthetic construct
  misc_feature 1..121: note = Description of artificial sequence: synthetic polynucleotide sequence
  source 1..121: mol_type = other DNA
tgataatatcaaggtaaaaccacaatggatgatgatcaaaggtcataagtttttgtttattctcctcttcactgttcctttctgaaattctatctttttcttctcccaaagtaatttttag

SEQ ID NO: 2271 - DNA, 121 bp, synthetic construct
  misc_feature 1..121: note = Description of artificial sequence: synthetic polynucleotide sequence
  source 1..121: mol_type = other DNA
gatatatttatgtttataacaagacagttgaaggggctagaggatacaaagagcccacaattcaataggtatttttatttacttgaggtaagcaatatcttgtatcttgagatgacatttt

SEQ ID NO: 2272 - DNA, 121 bp, synthetic construct
  misc_feature 1..121: note = Description of artificial sequence: synthetic polynucleotide sequence
  source 1..121: mol_type = other DNA
ttattgatggtgactatcccgagagcatgaagaataacctttcatctattctgcctgattttactgaatctgagaaaaagttcatcaaaggaactgctgacttttttgctctttgctttgg

SEQ ID NO: 2273 - DNA, 121 bp, synthetic construct
  misc_feature 1..121: note = Description of artificial sequence: synthetic polynucleotide sequence
  source 1..121: mol_type = other DNA
ctatgttctcaatagaagaagagcaaaaaagaacaggtttcaactggatttcgattcaacttagaaatagtttaatggctatgaagaccagaaacacacaagacaccatgcaatcgtcaat

SEQ ID NO: 2274 - DNA, 121 bp, synthetic construct
  misc_feature 1..121: note = Description of artificial sequence: synthetic polynucleotide sequence
  source 1..121: mol_type = other DNA
agagaagaaagtgatatggtatataacaaaaaagggaagactttaatcagcaggaataggttaatagaaaaggactgaaaattgatacctctgaagtcactaaaagttggtaattatgaag

SEQ ID NO: 2275 - DNA, 121 bp, synthetic construct
  misc_feature 1..121: note = Description of artificial sequence: synthetic polynucleotide sequence
  source 1..121: mol_type = other DNA
tttgtcagacacttacatctttgcccatttatttattatttggattgagtgatgatttacacttccagaggatcaaaggctgtaaagcaaagattccctctcatcttcaatttttctctct

SEQ ID NO: 2276 - DNA, 121 bp, synthetic construct
  misc_feature 1..121: note = Description of artificial sequence: synthetic polynucleotide sequence
  source 1..121: mol_type = other DNA
ataataatgttagatgataaaatgtggatggattgctcaacaaatagtgctaaaataaatcgctaaccactgagggaaacacagttagatatttacttcaaatcaaatcccaaagatcatt

SEQ ID NO: 2277 - DNA, 121 bp, synthetic construct
  misc_feature 1..121: note = Description of artificial sequence: synthetic polynucleotide sequence
  source 1..121: mol_type = other DNA
tttctggaaaatcaccagttcaacaactcttaaaaaacttccaacgggagatgagaaatttacctctcccaatagtctagccacccgccatctttgggactagcattctgacttataccag

SEQ ID NO: 2278 - DNA, 121 bp, synthetic construct
  misc_feature 1..121: note = Description of artificial sequence: synthetic polynucleotide sequence
  source 1..121: mol_type = other DNA
tggttaatggctaccttattggataggacagatgcagaacatttctctcattgcagaaggttctattggacagcactgctttaggtgtctggtacttatgacttggactgggtttttacaa

SEQ ID NO: 2279 - DNA, 121 bp, synthetic construct
  misc_feature 1..121: note = Description of artificial sequence: synthetic polynucleotide sequence
  source 1..121: mol_type = other DNA
accgtctatacccagacaactcccaaaatttgtatgtaactatccatcttcatttttttttcctagaagcaaaaaaaaaaatctcctttcgaaacattgaagcccaccagatatctaacta

SEQ ID NO: 2280 - DNA, 121 bp, synthetic construct
  misc_feature 1..121: note = Description of artificial sequence: synthetic polynucleotide sequence
  source 1..121: mol_type = other DNA
ctttaggcatgtggctcatgtaactggatggacgggggtactatttctgagatgagaaaaactggaagaggaacaggctactgttcaggttaggggtgtgttaaactttggaggagattat

SEQ ID NO: 2281 - DNA, 121 bp, synthetic construct
  misc_feature 1..121: note = Description of artificial sequence: synthetic polynucleotide sequence
  source 1..121: mol_type = other DNA
cttggctgcaactcactagtaggtcacccacagtttgacaagcagacttattttgccaataacttgctgaatgcctatttagggcccagatcaatttcccagaatgtgccttttgacaagt

SEQ ID NO: 2282 - DNA, 121 bp, synthetic construct
  misc_feature 1..121: note = Description of artificial sequence: synthetic polynucleotide sequence
  source 1..121: mol_type = other DNA
ctttctgctgcaagatttgtgaaggggaaagtctacaaaattttcaatgttttaacaccactggaatgagagaagaggacagcttcaaaagggcctgagaaaatagctatttccaaagccc

SEQ ID NO: 2283 - DNA, 443 bp, synthetic construct
  misc_feature 1..443: note = Description of artificial sequence: synthetic polynucleotide sequence
  source 1..443: mol_type = other DNA
ctcagcctgacacccagctatgtgtcgttgtcttgacactgtgtgggaagctttggttgggcaacacattgtcaaagttaaaatccaatgtatctccatccatgaggtcattccgaatgatggattccatgtcacagtctaagcgctcaatgaacatgccatccaagtcacttgggagcttctcctggtggagaaggcccattctgccatagccattgcagctgctcacggaggagtagccccccagggcactcatctgcatggggtggggcagaggcacttgtacaggtgtcttcacttgggtcaggcggttcatacccgaggtgtggggcatggtgcttaccgtgtggggcaggggacgcccgttaactgcagatgtctgctgagcatgtccagggtgggtatgggagctgggattcatcattttgttatgagatgcctgg

SEQ ID NO: 2284 - DNA, 443 bp, synthetic construct
  misc_feature 1..443: note = Description of artificial sequence: synthetic polynucleotide sequence
  source 1..443: mol_type = other DNA
ctgccataggttgacatgaccgaattagggcccatcatgacgttctggcccagaacccggctgttgggctgggctaccccaggatcaactggtgtcataatgtcattatggggaggagagtcagaagtcagcaactccttcaagagtccaggcgcacagttatactgactcatacctccataactcgacttattgtcctgaagtgtttgtataggcatctggggcaaagggctcatgctggattggccatatgtatatttttggtagtttgggctgggtgaattcaaactggtgtttggtggcgcaaacgagtagcacggcgtctgctgcatcatggtgccaggtgaggactgggtcgaaacagttaatgatgttggtgatgagagaaggttgagattatccaaaagattttccatgttttcgggattgcttatctcagacag

SEQ ID NO: 2285 - DNA, 453 bp, synthetic construct
  misc_feature 1..453: note = Description of artificial sequence: synthetic polynucleotide sequence
  source 1..453: mol_type = other DNA
actgggtaaagtagaggccatctttgcggcagatggcgggtacaccatagaatgcacatccccttctccaagatcatcctgttcggtcataatgggtgagagtctcccactaatagtactagcatttgagctagttcgagggcgaaatgtactccagttatcaaagtcatcattgctgtgagagccagggcttgcaggccatttggaaaactgtgatccagggctgtccccagcaccctcctggccagactggagagatgctttcttcttggcagctcggcttcggctcttagcaaatttactgttgttgtccatggatgcagctcttctcctaggagatttcccgctcttgccaccctctggattgagcatccaccaagaactttttccagttccttcattctgcacacgaatgaacttgctgtgtagggacagattatgacgaattgaatt

SEQ ID NO: 2286 - DNA, 306 bp, synthetic construct
  misc_feature 1..306: note = Description of artificial sequence: synthetic polynucleotide sequence
  source 1..306: mol_type = other DNA
ccttccagcccgccgagctgttgctgtcacccttatccttgaagtagggcacgctcttgaccatccactcgtagatctgcgacagcgtgagccgcttctccgccgagctctcgatggccttggtgatgaggtcggcgtaggacaggttgccccacgcgttgcggcgggacgagctgctcttgcgcggctgccccgcgagcggcccagcggcggcggggggcaccggcgggtgctgcgacagcggcccgggcggcgggggctgcggtggcgctgggtgcaggcagcccgcctccgggccctggaagt

SEQ ID NO: 2287 - DNA, 325 bp, synthetic construct
  misc_feature 1..325: note = Description of artificial sequence: synthetic polynucleotide sequence
  source 1..325: mol_type = other DNA
ccccgcacagccccccggtggcggccgcggcggccgccgccgccaccgccgccgccacggagccgggcgcctgcgggaagtcctcgctctcctccagcaagctcaggttgctcatgaagtcggcgctgacagcggcagccgaggccgagggcaggcccgccgcggcgtcggggttggcagccgcgctgcccgacggcgccgggctggaggtggccgagttggactggctaaactccggcctgggcagcggccaggtgcacgagcgcggccggggcagcggctcgaagtccgggtcgatctccaccacctgaggcgcctcggccat

SEQ ID NO: 2288 - DNA, 121 bp, synthetic construct
  misc_feature 1..121: note = Description of artificial sequence: synthetic polynucleotide sequence
  source 1..121: mol_type = other DNA
tctacattgatgataaaactttattcattggtagtacactaatggatatatgtgagaccattggtttggagcaaacaacatgtaaactagagacatgaacacatgcatattaggccatttt

SEQ ID NO: 2289 - DNA, 121 bp, synthetic construct
  misc_feature 1..121: note = Description of artificial sequence: synthetic polynucleotide sequence
  source 1..121: mol_type = other DNA
gtgatagcactgtcgttggaaatacaaagccactaagcctcaggcagctggtgtctgttttagggccaggtcagccattacacaaagaagcaccacacaatataattctgggtattacagt

SEQ ID NO: 2290 - DNA, 121 bp, synthetic construct
  misc_feature 1..121: note = Description of artificial sequence: synthetic polynucleotide sequence
  source 1..121: mol_type = other DNA
ataaatcgaataaaggcaggtatcgaatggattcatgtttcagacatctaattataagacgttaccacctgtacattctataggcaccatagacatctaatgagcaaagctgaacttgcca

SEQ ID NO: 2291 - DNA, 121 bp, synthetic construct
  misc_feature 1..121: note = Description of artificial sequence: synthetic polynucleotide sequence
  source 1..121: mol_type = other DNA
gtgagccctcctcggatgcttgcttctggctacacgcccctttacccttttctctgcactgttttcatctttataaagtcagagttggtgtctataggctctctactgccacattcaagac

SEQ ID NO: 2292 - DNA, 121 bp, synthetic construct
  misc_feature 1..121: note = Description of artificial sequence: synthetic polynucleotide sequence
  source 1..121: mol_type = other DNA
ctgctaggaatcgggaaactgagtcagatttgtatgtttcctctggtttgtactctgccagtttgagtcagtagaaaggtaagaaatttttttttgcaagaacccctgtctgctaattaat

SEQ ID NO: 2293 - DNA, 121 bp, synthetic construct
  misc_feature 1..121: note = Description of artificial sequence: synthetic polynucleotide sequence
  source 1..121: mol_type = other DNA
gagaatggaaagcacagttcctatgttagctcagacaggaaatgatggacattcaattccataagcccagcgtgtgacagcattctgaaatagattgccttcaagtttctttttttttttt

SEQ ID NO: 2294 - DNA, 121 bp, synthetic construct
  misc_feature 1..121: note = Description of artificial sequence: synthetic polynucleotide sequence
  source 1..121: mol_type = other DNA
cagcacttctaaccggctcctagatgcccccggtctgagcactacacttagagcaagcaggtttgaacattgcgacttataacagtggacccatggtgtagacaagtccagaaatgactgc

SEQ ID NO: 2295 - DNA, 121 bp, synthetic construct
  misc_feature 1..121: note = Description of artificial sequence: synthetic polynucleotide sequence
  source 1..121: mol_type = other DNA
aatatgaatagccctatgtgacaaggcactatataaaggctttttttcccctttgtattgtagtgtttctaagacctcagagaaatttggaatctatagacccgcagtttacaatccggag

SEQ ID NO: 2296 - DNA, 121 bp, synthetic construct
  misc_feature 1..121: note = Description of artificial sequence: synthetic polynucleotide sequence
  source 1..121: mol_type = other DNA
ttggttcgattttcagagtcgactgtccagttaaatgcatcagaagtgttagcttctccggagttaaagtcattactgtagagcctggtgtcatcatttaattgcattagggagttcgtag

SEQ ID NO: 2297 - DNA, 121 bp, synthetic construct
  misc_feature 1..121: note = Description of artificial sequence: synthetic polynucleotide sequence
  source 1..121: mol_type = other DNA
actcatggcatagcaagtaggctgaacatcagcatattttatattggttccctgagaccgaatccccacgaggcattgtgaatagggccagatgatacctacacatgtggttggttgtgtt

SEQ ID NO: 2298 - DNA, 121 bp, synthetic construct
  misc_feature 1..121: note = Description of artificial sequence: synthetic polynucleotide sequence
  source 1..121: mol_type = other DNA
ccttgttttccacagtactccaggcagcaattcccgtctggaagcctagttgggatgccatatgtacttccaaaagtttcattttccacttaagttagtttggctttattttactttcaac

SEQ ID NO: 2299 - DNA, 121 bp, synthetic construct
  misc_feature 1..121: note = Description of artificial sequence: synthetic polynucleotide sequence
  source 1..121: mol_type = other DNA
agctgatcatggggaagtcctagtttctgctggccactgggctgtgctgaaactagttgttaccagagtcaaacgtgtttcagaaacccagtagacacccacctagaaaaagacaccagaa

SEQ ID NO: 2300 - DNA, 121 bp, synthetic construct
  misc_feature 1..121: note = Description of artificial sequence: synthetic polynucleotide sequence
  source 1..121: mol_type = other DNA
aggagttagccatgccaagatgggagaagaggatacgggcttacctgaccaggcaactaacccctgcaaaggtcaggaatttatggggaaatgcacatgaaggaacttcaagtaggtcaga

SEQ ID NO: 2301 - DNA, 121 bp, synthetic construct
  misc_feature 1..121: note = Description of artificial sequence: synthetic polynucleotide sequence
  source 1..121: mol_type = other DNA
ttgttcctttttgatgccttcttcaatatcaataggttctttaattattgcttcaggagactcagcagcaacatcttcaatgttgacaccaccatgtgaacttcctattaatacaggaccc

SEQ ID NO: 2302 - DNA, 121 bp, synthetic construct
  misc_feature 1..121: note = Description of artificial sequence: synthetic polynucleotide sequence
  source 1..121: mol_type = other DNA
tagattgaagctttgttcattacacttgcattctaaacatgcctctcagtactctagtcaatcatttcttatgttaagtttccagggtgccaaacttctgcggtatgtgttggttttgttt

SEQ ID NO: 2303 - DNA, 121 bp, synthetic construct
  misc_feature 1..121: note = Description of artificial sequence: synthetic polynucleotide sequence
  source 1..121: mol_type = other DNA
attcttttagattttttatttattgtaaaatagaagacgtttgattccagccataacagcgtagcttatattgagctaaccctcccgttgaaaacaactgtaccagatggactaagtacat

SEQ ID NO: 2304 - DNA, 138 bp, synthetic construct
  misc_feature 1..138: note = Description of artificial sequence: synthetic polynucleotide sequence
  source 1..138: mol_type = other DNA
catgccgcccaaaaccccccgaaaaacggccgccaccgccgccgctgccgccgcggaacccccggcaccgccgccgccgccccctcctgaggaggacccagagcaggacagcggcccggaggacctgcctctcgtcag

SEQ ID NO: 2305 - DNA, 121 bp, synthetic construct
  misc_feature 1..121: note = Description of artificial sequence: synthetic polynucleotide sequence
  source 1..121: mol_type = other DNA
tgagtttgaagaaacagaagaacctgattttactgcattatgtcagaaattaaagataccagatcatgtcagagagagagcttggttaacttgggagaaagtttcatctgtggatggagta

SEQ ID NO: 2306 - DNA, 121 bp, synthetic construct
  misc_feature 1..121: note = Description of artificial sequence: synthetic polynucleotide sequence
  source 1..121: mol_type = other DNA
cagggaggttatattcaaaagaaaaaggaactgtggggaatctgtatctttattgcagcagttgacctagatgagatgtcgttcacttttactgagctacagaaaaacatagaaatcaggt

SEQ ID NO: 2307 - DNA, 121 bp, synthetic construct
  misc_feature 1..121: note = Description of artificial sequence: synthetic polynucleotide sequence
  source 1..121: mol_type = other DNA
gtgtccataaattctttaacttactaaaagaaattgataccagtaccaaagttgataatgctatgtcaagactgttgaagaagtatgatgtattgtttgcactcttcagcaaattggaaag

SEQ ID NO: 2308 - DNA, 121 bp, synthetic construct
  misc_feature 1..121: note = Description of artificial sequence: synthetic polynucleotide sequence
  source 1..121: mol_type = other DNA
tacgaaaaaatgttaaaaagtcataatgtttttcttttcaggacatgtgaacttatatatttgacacaacccagcagttcgtaagtagttcacagaatgttatttttcacttaaaaaaaaa

SEQ ID NO: 2309 - DNA, 121 bp, synthetic construct
  misc_feature 1..121: note = Description of artificial sequence: synthetic polynucleotide sequence
  source 1..121: mol_type = other DNA
tttttctgctttctatttgtttaataggatatctactgaaataaattctgcattggtgctaaaagtttcttggatcacatttttattagctaaaggtaagttcattatatttattaaatgc

SEQ ID NO: 2310 - DNA, 121 bp, synthetic construct
  misc_feature 1..121: note = Description of artificial sequence: synthetic polynucleotide sequence
  source 1..121: mol_type = other DNA
ttcaggggaagtattacaaatggaagatgatctggtgatttcatttcagttaatgctatgtgtccttgactattttattaaactctcacctcccatgttgctcaaagaaccatatagtaag

SEQ ID NO: 2311 - DNA, 144 bp, synthetic construct
  misc_feature 1..144: note = Description of artificial sequence: synthetic polynucleotide sequence
  source 1..144: mol_type = other DNA
gaaacagctgttatacccattaatggttcacctcgaacacccaggcgaggtcagaacaggagtgcacggatagcaaaacaactagaaaatgatacaagaattattgaagttctctgtaaagaacatgaatgtaatatagatgag

SEQ ID NO: 2312 - DNA, 121 bp, synthetic construct
  misc_feature 1..121: note = Description of artificial sequence: synthetic polynucleotide sequence
  source 1..121: mol_type = other DNA
gttgtaacttcatctttttcaggtgaaaaatgtttatttcaaaaattttataccttttatgaattctcttggacttgtaacatctaatggacttccagaggtaatctgaaaggaaatttaa

SEQ ID NO: 2313 - DNA, 121 bp, synthetic construct
  misc_feature 1..121: note = Description of artificial sequence: synthetic polynucleotide sequence
  source 1..121: mol_type = other DNA
ttcaaggttgaaaatctttctaaacgatacgaagaaatttatcttaaaaataaagatctagatgcaagattatttttggatcatgataaaactcttcagactgattctatagacaggtatt

SEQ ID NO: 2314 - DNA, 121 bp, synthetic construct
  misc_feature 1..121: note = Description of artificial sequence: synthetic polynucleotide sequence
  source 1..121: mol_type = other DNA
gacttcacttattgttatttagttttgaaacacagagaacaccacgaaaaagtaaccttgatgaagaggtgaatgtaattcctccacacactccagttaggtatgaattttcctactttta

SEQ ID NO: 2315 - DNA, 121 bp, synthetic construct
  misc_feature 1..121: note = Description of artificial sequence: synthetic polynucleotide sequence
  source 1..121: mol_type = other DNA
atttttatcccctctaggactgttatgaacactatccaacaattaatgatgattttaaattcagcaagtgatcaaccttcagaaaatctgatttcctattttaacgtaagccatatatgaa

SEQ ID NO: 2316 - DNA, 121 bp, synthetic construct
  misc_feature 1..121: note = Description of artificial sequence: synthetic polynucleotide sequence
  source 1..121: mol_type = other DNA
agaactgcacagtgaatccaaaagaaagtatactgaaaagagtgaaggatataggatacatctttaaagagaaatttgctaaagctgtgggacagggttgtgtcgaaattggatcacaggt

SEQ ID NO: 2317 - DNA, 121 bp, synthetic construct
  misc_feature 1..121: note = Description of artificial sequence: synthetic polynucleotide sequence
  source 1..121: mol_type = other DNA
aggctcttatttttctttttgtttgtttgtagcgatacaaacttggagttcgcttgtattaccgagtaatggaatccatgcttaaatcagtaagttaaaaacaatataaaaaaatttcagc

SEQ ID NO: 2318 - DNA, 121 bp, synthetic construct
  misc_feature 1..121: note = Description of artificial sequence: synthetic polynucleotide sequence
  source 1..121: mol_type = other DNA
tcaattaaacaacttctttttttttttttaaattatctgtttcaggaagaagaacgattatccattcaaaattttaggtaaattttttacttttagtaaaaaatttttttctttttataga

SEQ ID NO: 2319 - DNA, 121 bp, synthetic construct
  misc_feature 1..121: note = Description of artificial sequence: synthetic polynucleotide sequence
  source 1..121: mol_type = other DNA
aatctttttttttttcctttagcaaacttctgaatgacaacatttttcatatgtctttattggcgtgcgctcttgaggttgtaatggccacatatagcagtaagttaaattttcataaata

SEQ ID NO: 2320 - DNA, 198 bp, synthetic construct
  misc_feature 1..198: note = Description of artificial sequence: synthetic polynucleotide sequence
  source 1..198: mol_type = other DNA
ggaagtacatctcagaatcttgattctggaacagatttgtctttcccatggattctgaatgtgcttaatttaaaagcctttgatttttacaaagtgatcgaaagttttatcaaagcagaaggcaacttgacaagagaaatgataaaacatttagaacgatgtgaacatcgaatcatggaatcccttgcatggctctca

SEQ ID NO: 2321 - DNA, 121 bp, synthetic construct
  misc_feature 1..121: note = Description of artificial sequence: synthetic polynucleotide sequence
  source 1..121: mol_type = other DNA
ggattcacctttatttgatcttattaaacaatcaaaggaccgagaaggaccaactgatcaccttgaatctgcttgtcctcttaatcttcctctccagaataatcacactgcagcagatatg

SEQ ID NO: 2322 - DNA, 147 bp, synthetic construct
  misc_feature 1..147: note = Description of artificial sequence: synthetic polynucleotide sequence
  source 1..147: mol_type = other DNA
ggtatctttctcctgtaagatctccaaagaaaaaaggttcaactacgcgtgtaaattctactgcaaatgcagagacacaagcaacctcagccttccagacccagaagccattgaaatctacctctctttcactgttttataaaaaag

SEQ ID NO: 2323 - DNA, 147 bp, synthetic construct
  misc_feature 1..147: note = Description of artificial sequence: synthetic polynucleotide sequence
  source 1..147: mol_type = other DNA
gtgtatcggctagcctatctccggctaaatacactttgtgaacgccttctgtctgagcacccagaattagaacatatcatctggacccttttccagcacaccctgcagaatgagtatgaactcatgagagacaggcatttggaccaa

SEQ ID NO: 2324 - DNA, 121 bp, synthetic construct
  misc_feature 1..121: note = Description of artificial sequence: synthetic polynucleotide sequence
  source 1..121: mol_type = other DNA
tttactagattatgatgtgttccatgtatggcatatgcaaagtgaagaatatagaccttaaattcaaaatcattgtaacagcatacaaggatcttcctcatgctgttcaggaggtaggtaa

SEQ ID NO: 2325 - DNA, 121 bp, synthetic construct
  misc_feature 1..121: note = Description of artificial sequence: synthetic polynucleotide sequence
  source 1..121: mol_type = other DNA
tcagacattcaaacgtgttttgatcaaagaagaggagtatgattctattatagtattctataactcggtcttcatgcagagactgaaaacaaatattttgcagtatgcttccaccagggta

SEQ ID NO: 2326 - DNA, 165 bp, synthetic construct
  misc_feature 1..165: note = Description of artificial sequence: synthetic polynucleotide sequence
  source 1..165: mol_type = other DNA
gccccctaccttgtcaccaatacctcacattcctcgaagcccttacaagtttcctagttcacccttacggattcctggagggaacatctatatttcacccctgaagagtccatataaaatttcagaaggtctgccaacaccaacaaaaatgactccaagatcaag

SEQ ID NO: 2327 - DNA, 121 bp, synthetic construct
  misc_feature 1..121: note = Description of artificial sequence: synthetic polynucleotide sequence
  source 1..121: mol_type = other DNA
atatggttttttattactaattggtatttcatcttaacttgacagaatcttagtatcaattggtgaatcattcggggtgagtattttctttctatgaaatataatagtatgcattgtaagt

SEQ ID NO: 2328 - DNA, 144 bp, synthetic construct
  misc_feature 1..144: note = Description of artificial sequence: synthetic polynucleotide sequence
  source 1..144: mol_type = other DNA
gacttctgagaagttccagaaaataaatcagatggtatgtaacagcgaccgtgtgctcaaaagaagtgctgaaggaagcaaccctcctaaaccactgaaaaaactacgctttgatattgaaggatcagatgaagcagatggaag

SEQ ID NO: 2329 - DNA, 121 bp, synthetic construct
  misc_feature 1..121: note = Description of artificial sequence: synthetic polynucleotide sequence
  source 1..121: mol_type = other DNA
taaatacacatgaaatgttttgcatttttttaatctgcagtaaacatctcccaggagagtccaaatttcagcagaaactggcagaaatgagtaagtacttttttcaccttgtgtaaatgaa

SEQ ID NO: 2330 - DNA, 121 bp, synthetic construct
  misc_feature 1..121: note = Description of artificial sequence: synthetic polynucleotide sequence
  source 1..121: mol_type = other DNA
aacagttcttcatcctttttccagcttctactcgaacacgaatgcaaaagcagaaaatgaatgatagcatggatacctcaaacaaggaagagaaatgaggatctcaggaccttggtggaca

SEQ ID NO: 2331 - DNA, 121 bp, synthetic construct
  misc_feature 1..121: note = Description of artificial sequence: synthetic polynucleotide sequence
  source 1..121: mol_type = other DNA
ggagaagctgccttaaatgaaaaggccattgtttgtgttaagaaacaactttgctaatcccagaaatagctcctgctctacaggccccgatggcaccagtggaaggaagccagcatgtcac

SEQ ID NO: 2332 - DNA, 121 bp, synthetic construct
  misc_feature 1..121: note = Description of artificial sequence: synthetic polynucleotide sequence
  source 1..121: mol_type = other DNA
ctcctctcttcttccacgtggaaagaattaccagatgcttttctgctttaggctgcaacacaggatctaattcaggagcgacaagttggttatccctcagacctcactgcccacacttgaa

SEQ ID NO: 2333 - DNA, 121 bp, synthetic construct
  misc_feature 1..121: note = Description of artificial sequence: synthetic polynucleotide sequence
  source 1..121: mol_type = other DNA
ccggtgaccgctgtgtgcctgtgcctgttcgtcgtcggggtgagcggcaacgtggtgaccgtgatgctgatcgggcgctaccgggacatgcggaccaccaccaacttgtacctgggcagca

SEQ ID NO: 2334 - DNA, 121 bp, synthetic construct
  misc_feature 1..121: note = Description of artificial sequence: synthetic polynucleotide sequence
  source 1..121: mol_type = other DNA
gatttgataaacctaattttgaagcattttatatttataagcgacatcaaaagatgggagaaaaaaatggtaggttgaagaacacactgttacactttatatctaaaagtataaaagtata

SEQ ID NO: 2335 - DNA, 121 bp, synthetic construct
  misc_feature 1..121: note = Description of artificial sequence: synthetic polynucleotide sequence
  source 1..121: mol_type = other DNA
gatgcaaaaactttctggatggagctagaagatgatggaaaagtggacttcatttttgaacaagtacaaaatgtgctgcagtcactgaaacaaaagatcaaagatgggtctgccaccaata

SEQ ID NO: 2336 - DNA, 121 bp, synthetic construct
  misc_feature 1..121: note = Description of artificial sequence: synthetic polynucleotide sequence
  source 1..121: mol_type = other DNA
aataaaggtaatggtgatgctgtttttctgtctttaacagaatacatccaagcaatgattctagtgaatgaagcaactataattaacagttcaacatcaataaagggtatgtacatctcta

SEQ ID NO: 2337 - DNA, 121 bp, synthetic construct
  misc_feature 1..121: note = Description of artificial sequence: synthetic polynucleotide sequence
  source 1..121: mol_type = other DNA
ctttttaattttatttttctttctttaattccctgcctcacaggagcatcacagaaagaagtgaatgcccaaagcagtggtgagatttgagagcacattataccaccctaataggtgaaag

SEQ ID NO: 2338 - DNA, 121 bp, synthetic construct
  misc_feature 1..121: note = Description of artificial sequence: synthetic polynucleotide sequence
  source 1..121: mol_type = other DNA
ttttttgtgtagatcctatgcctgtgactcagaaggaacaggaaaacaaatccaatgcatttccctctacatcatgtgaaaactcctttccagaagactgtacatttctgtatgtatataa

SEQ ID NO: 2339 - DNA, 222 bp, synthetic construct
  misc_feature 1..222: note = Description of artificial sequence: synthetic polynucleotide sequence
  source 1..222: mol_type = other DNA
gaacaacagaaaataaggaaattctctctcttgaagataaagttgtagactttagagaaaaagactcatcttcgaatttatcttaccaaagtcatgactgctctggtgcttgtctgatgaaaatgccactgaacttgaagggagaaaaccctctgcagctgccaatcaaatgtcacttccaaagacgacatgcaaagacaaactctcattcttcagcactcc

SEQ ID NO: 2340 - DNA, 343 bp, synthetic construct
  misc_feature 1..343: note = Description of artificial sequence: synthetic polynucleotide sequence
  source 1..343: mol_type = other DNA
acgtgagttataaaaccccttgtggaaggagtctacgaaacgtggaggaagtttttcgttacctgcttgagacagagtgtaactttttatttacagataacttttctttcaatacctatgttcagttggctcggaattacccaaagcaaaaagaagttgtttctgatgtggatattagcaatggagtggaatcagtgcccatttctttctgtaatgaaattgacagtagaaagctcccacagtttaagtacagaaagactgtgtggcctcgagcatataatctaaccaacttttccagcatgtttactgattcctgtgactgctctgagggctgcatagacat

SEQ ID NO: 2341 - DNA, 121 bp, synthetic construct
  misc_feature 1..121: note = Description of artificial sequence: synthetic polynucleotide sequence
  source 1..121: mol_type = other DNA
agaacaaaatgtgcatgtcttcaactgacagcaaggaatgccaaaacttcccccttgtcaagtgacaaaataaccactggatataaatataaaagactacagagacagattcctactgggt

SEQ ID NO: 2342 - DNA, 171 bp, synthetic construct
  misc_feature 1..171: note = Description of artificial sequence: synthetic polynucleotide sequence
  source 1..171: mol_type = other DNA
gcatttatgaatgcagccttttgtgcaaatgtaatcgacaattgtgtcaaaaccgagttgtccaacatggtcctcaagtgaggttacaggtgttcaaaactgagcagaagggatggggtgtacgctgtctagatgacattgacagagggacatttgtttgcatttattcag

SEQ ID NO: 2343 - DNA, 227 bp, synthetic construct
  misc_feature 1..227: note = Description of artificial sequence: synthetic polynucleotide sequence
  source 1..227: mol_type = other DNA
ggaagattactaagcagagctaacactgaaaaatcttatggtattgatgaaaacgggagagatgagaatactatgaaaaatatattttcaaaaaagaggaaattagaagttgcatgttcagattgtgaagttgaagttctcccattaggattggaaacacatcctagaactgctaaaactgagaaatgtccaccaaagttcagtaataatcccaaggagcttactgt

SEQ ID NO: 2344 - DNA, 121 bp, synthetic construct
  misc_feature 1..121: note = Description of artificial sequence: synthetic polynucleotide sequence
  source 1..121: mol_type = other DNA
ttcctttttagggaaacgaaatatgataatatttcaagaattcaatatcattcagttattagagatcctgaatccaagacagccatttttcaacacaatgggaaaaaaatggtaaaaaatg

SEQ ID NO: 2345 - DNA, 121 bp, synthetic construct
  misc_feature 1..121: note = Description of artificial sequence: synthetic polynucleotide sequence
  source 1..121: mol_type = other DNA
cttgtttttttaaggaatttgtttcctcggagtctgtcactccagaagataatgatggatttaaaccaccccgagagcatctgaactctaaaaccaagggagcacaaagtaggctttgttt

SEQ ID NO: 2346 - DNA, 342 bp, synthetic construct
  misc_feature 1..342: note = Description of artificial sequence: synthetic polynucleotide sequence
  source 1..342: mol_type = other DNA
gaggactcaagttcaaaccatgttgatgagtttgaagataatctgctgattgaatcagatgtgatagatataactaaatatagagaagaaactccaccaaggagcagatgtaaccaggcgaccacattggataatcagaatattaaaaaggcaattgaggttcaaattcagaaaccccaagagggacgatctacagcatgtcaaagacagcaggtattttgtgatgaagagttgctaagtgaaaccaagaatacttcatctgattctctaacaaagttcaataaagggaatgtgtttttattggatgccacaaaagaaggaaatgtcggccgcttccttaat

SEQ ID NO: 2347 - DNA, 121 bp, synthetic construct
  misc_feature 1..121: note = Description of artificial sequence: synthetic polynucleotide sequence
  source 1..121: mol_type = other DNA
tatttttatttaacagcatagttgttgcccaaatctcttggtacagaatgtttttgtagaaacacacaacaggaattttccattggtggcattcttcaccaacaggtttgaaattgatttc

SEQ ID NO: 2348 - DNA, 121 bp, synthetic construct
  misc_feature 1..121: note = Description of artificial sequence: synthetic polynucleotide sequence
  source 1..121: mol_type = other DNA
aggtatgtgaaagcaagaacagagctaacatgggattatggctatgaagctgggactgtgcctgagaaggaaatcttctgccaatgtggggttaataaatgtagaaaaaaaatattataaa

SEQ ID NO: 2349 - DNA, 121 bp, synthetic construct
  misc_feature 1..121: note = Description of artificial sequence: synthetic polynucleotide sequence
  source 1..121: mol_type = other DNA
atgcacttccgctgcttaagatcagaaacaggctgagtctagagagattccaggaccactgctgggagctccggggctgcagtgccctcactggggaggggctgcccgaggccctgcagag

SEQ ID NO: 2350 - DNA, 121 bp, synthetic construct
  misc_feature 1..121: note = Description of artificial sequence: synthetic polynucleotide sequence
  source 1..121: mol_type = other DNA
cacaaacatttcaacaaatgcaattttctctaacaaatatgcatagtttcaagattacaagtcaactgtccttggaagagaactattgaaattaaactctatgacaagaaggctttttgcc

SEQ ID NO: 2351 - DNA, 121 bp, synthetic construct
  misc_feature 1..121: note = Description of artificial sequence: synthetic polynucleotide sequence
  source 1..121: mol_type = other DNA
taaataatttttttttgctcttcctgaggtttctatgtctatatagtacttttatgctacgaaaaattaaacttaacagaaaaatgcttaatttttgtatatggaagtttcattgcattat

SEQ ID NO: 2352 - DNA, 121 bp, synthetic construct
  misc_feature 1..121: note = Description of artificial sequence: synthetic polynucleotide sequence
  source 1..121: mol_type = other DNA
acagggtagagattacaacttggggacttcgtgatattttgtctgtgtgcagtttgtcagaaggcaatttatctaaagctggaaaaggatatggtttggctgactaaactgtgtagtgata

SEQ ID NO: 2353 - DNA, 121 bp, synthetic construct
  misc_feature 1..121: note = Description of artificial sequence: synthetic polynucleotide sequence
  source 1..121: mol_type = other DNA
aaggaaagaggaatggaactgcatgagtattagtgtgggaagggaagtggatattcacaagaagtaaggcaattcagggaacatgcattttcattgagcttagggacagaacagaatatgt

SEQ ID NO: 2354 - DNA, 121 bp, synthetic construct
  misc_feature 1..121: note = Description of artificial sequence: synthetic polynucleotide sequence
  source 1..121: mol_type = other DNA
ttcttcactcattagccaggagttgaagctgaaagaaatgtagcataatatctcaaatgcttgctttgcattttttatattcattgattcaacaattatttactgagcactatattgcatt

SEQ ID NO: 2355 - DNA, 121 bp, synthetic construct
  misc_feature 1..121: note = Description of artificial sequence: synthetic polynucleotide sequence
  source 1..121: mol_type = other DNA
cgggatgggattctctctgggacagctggccccgcattttggtcacacgtcatagcaagccgcggttttcaaacccggaagcgccgaaaaggaccgagcgtgtttcccgggccctgatccc

SEQ ID NO: 2356 - DNA, 121 bp, synthetic construct
  misc_feature 1..121: note = Description of artificial sequence: synthetic polynucleotide sequence
  source 1..121: mol_type = other DNA
acagatgtgttaacatgggcattttgattcaatgtagagttattttattttatatgggcgttttgaaaataggatggtattaaaagtgaatatgatttatagactggtgtgtcaggaaaga

SEQ ID NO: 2357 - DNA, 121 bp, synthetic construct
  misc_feature 1..121: note = Description of artificial sequence: synthetic polynucleotide sequence
  source 1..121: mol_type = other DNA
ccatccggcccgtgcactacggcaaggaaatcgtgcgcttcaccgtctactgtcgctacgacaactatgctgacagcctcaggttctaccagctgattctccggaggagccccagccagaa

SEQ ID NO: 2358 - DNA, 121 bp, synthetic construct
  misc_feature 1..121: note = Description of artificial sequence: synthetic polynucleotide sequence
  source 1..121: mol_type = other DNA
caagttgagagtgtcttcccctcatcattttcctaaggaacagacttaagtatgccctggaaggagatgaagtaaagaagatttgcatgcagcggtttattaaaattgatggcaaggtcta

SEQ ID NO: 2359 - DNA, 121 bp, synthetic construct
  misc_feature 1..121: note = Description of artificial sequence: synthetic polynucleotide sequence
  source 1..121: mol_type = other DNA
ggtaccaacaagaggagtgctttcactcaaatgaaaagcatctttagcttttctcatcaatcagaggaagatgggtcgatgaggtgtttgtggaccaataaactatcagaagagacattat

SEQ ID NO: 2360 - DNA, 121 bp, synthetic construct
  misc_feature 1..121: note = Description of artificial sequence: synthetic polynucleotide sequence
  source 1..121: mol_type = other DNA
ggcccactatgagctcatgcatcagttccctaagttagttaaaaaactgttcttgttccatcttttctcaacatgttccttcactctggcttgactgacatgaacactactctcatggcct

SEQ ID NO: 2361 - DNA, 121 bp, synthetic construct
  misc_feature 1..121: note = Description of artificial sequence: synthetic polynucleotide sequence
  source 1..121: mol_type = other DNA
tgcgcattagtccttttattttgcatggctataaataaatacctgaggctggatgatgcataaagaaaagagatttagttggtgcacagttctgcaggctgtacaggaaggatggtgctgg

SEQ ID NO: 2362 - DNA, 121 bp, synthetic construct
  misc_feature 1..121: note = Description of artificial sequence: synthetic polynucleotide sequence
  source 1..121: mol_type = other DNA
cagtaatctgccccagcaaacacagacttctgtggaacaagctgctgtatgtaggaaccaacaaactcttctcaagtaggtgtgtctaactaaaataaaaccactgaggaaaatggcttga

SEQ ID NO: 2363 - DNA, 121 bp, synthetic construct
  misc_feature 1..121: note = Description of artificial sequence: synthetic polynucleotide sequence
  source 1..121: mol_type = other DNA
ctgtaaggccaacaactcttaggttcaccctcttgaagctgttttctagatcttgtatgtgtacttatttcttttttattcttttttcttttgtcttctctgtgtattttcaaatagtcta

SEQ ID NO: 2364 - DNA, 121 bp, synthetic construct
  misc_feature 1..121: note = Description of artificial sequence: synthetic polynucleotide sequence
  source 1..121: mol_type = other DNA
gtggaaggtaagtgtgttaggcttgcttgttcaactatatggtgcttcgtgctcagtgacgtggttggaaattctattgggactaataataatagtcttaataataacaatagcatgtgct

SEQ ID NO: 2365 - DNA, 121 bp, synthetic construct
  misc_feature 1..121: note = Description of artificial sequence: synthetic polynucleotide sequence
  source 1..121: mol_type = other DNA
attcacaaagagagacgcagcattattggtttctgaaataccagtgtgacttaatttcttcagtaaatgggctaaaatagatgcatttaaaaaataatggtggatgggaaattttaatatg

SEQ ID NO: 2366 - DNA, 121 bp, synthetic construct
  misc_feature 1..121: note = Description of artificial sequence: synthetic polynucleotide sequence
  source 1..121: mol_type = other DNA
ctcttttcatcaagggggagcttgcaggccccatgccataagtaggattgtgacttcttggcagggaatccctagatctctgctccccttgtaggctctgtattgcttaacctgcagtaaa

SEQ ID NO: 2367 - DNA, 121 bp, synthetic construct
  misc_feature 1..121: note = Description of artificial sequence: synthetic polynucleotide sequence
  source 1..121: mol_type = other DNA
ttgtctttaagttatatccaaattcgttcttgatatccccacttgagtggaaaacttgatttgatgaatttgaattgtacaatgtgaactactgatctttccctccctaaacatgttccaa

SEQ ID NO: 2368 - DNA, 121 bp, synthetic construct
  misc_feature 1..121: note = Description of artificial sequence: synthetic polynucleotide sequence
  source 1..121: mol_type = other DNA
aatataccatatatacagggtgtatagaaaaattaagtaacaaaggaagaaatgggataggataatgatcatagcactcactacactatatcaaaattttaagtcaagtatctctttagtt

SEQ ID NO: 2369 - DNA, 121 bp, synthetic construct
  misc_feature 1..121: note = Description of artificial sequence: synthetic polynucleotide sequence
  source 1..121: mol_type = other DNA
aaataaattatttaccagccctaaaccagagccaataggaaatgagattgtggaagaaacttaaatgaccagaaaagatagacaaaatatactgagagtaaaaaggagcaggttatcaata

SEQ ID NO: 2370 - DNA, 121 bp, synthetic construct
  misc_feature 1..121: note = Description of artificial sequence: synthetic polynucleotide sequence
  source 1..121: mol_type = other DNA
ttgtaacagcagatctacattaacataacatagtaaggcaacagcttatcgtttgattcaatctggcatcatcaaatgaattgttcatttttatatctttagttttgaaatgattgtgcaa

SEQ ID NO: 2371 - DNA, 121 bp, synthetic construct
  misc_feature 1..121: note = Description of artificial sequence: synthetic polynucleotide sequence
  source 1..121: mol_type = other DNA
ttggcttcctgattttggggtcccaagatttattttcctttcacaaaacatataatacatgcaaagcaacagtttccaggtgtattggcttcctctgaccactgtaacaaagtaacaaaat

SEQ ID NO: 2372 - DNA, 121 bp, synthetic construct
  misc_feature 1..121: note = Description of artificial sequence: synthetic polynucleotide sequence
  source 1..121: mol_type = other DNA
ggtacccagatcagtgagagacaggaagtcaaagggtaaaaagtccaagtgtgagtttgcttagaagataatctactgcacgccaaggaaggtaatgggccttgacttggtgtgctatata

SEQ ID NO: 2373 - DNA, 121 bp, synthetic construct
  misc_feature 1..121: note = Description of artificial sequence: synthetic polynucleotide sequence
  source 1..121: mol_type = other DNA
aataacagtggataaccataaaacagatggcttccagaggtggacccaaatgacaaacactttaatgaaaaaatgggcaaaggatgaaaacagatgattcacaggaaatatttcaattcat

SEQ ID NO: 2374 - DNA, 121 bp, synthetic construct
  misc_feature 1..121: note = Description of artificial sequence: synthetic polynucleotide sequence
  source 1..121: mol_type = other DNA
cacagattggagaaacccaggaaaacacaactactaaattcagtgtgggatcttggaattaatactggaacaaaaaaaggacattggggaaaagctagagaacataacttgaacttgacat

SEQ ID NO: 2375 - DNA, 121 bp, synthetic construct
  misc_feature 1..121: note = Description of artificial sequence: synthetic polynucleotide sequence
  source 1..121: mol_type = other DNA
gtttttttgagatataattggcatgcaatgaatggtgtttaaagtatacaatttgataaacttgggtatactggtatacccataaaaaccatcaccacaatcaaagcaatgaacatattga

SEQ ID NO: 2376 - DNA, 121 bp, synthetic construct
  misc_feature 1..121: note = Description of artificial sequence: synthetic polynucleotide sequence
  source 1..121: mol_type = other DNA
gggccgggcacagtggctcgcgcctgtaatcccaacactttgggaggtggagaggagttttcagaaacttttcctctagttctcattcagtactgcacagtggtttaaaacaggcctggtg

SEQ ID NO: 2377 - DNA, 121 bp, synthetic construct
  misc_feature 1..121: note = Description of artificial sequence: synthetic polynucleotide sequence
  source 1..121: mol_type = other DNA
ttgttctaatcttgcttctatcactgttgctgcatggcttcctcattatattcagtcttcttactggcattcatcacagctaaagtaaattagtatttgtaaaggtatttcttttatacct

SEQ ID NO: 2378 - DNA, 121 bp, synthetic construct
  misc_feature 1..121: note = Description of artificial sequence: synthetic polynucleotide sequence
  source 1..121: mol_type = other DNA
gttctaaaaagtgtgggcatttctgcacactccacatcccagagcaaactcttccccagtgggtggatgaacaacatggagtggacattcagttccttctaactgcttgcctttgggacct

SEQ ID NO: 2379 - DNA, 167 bp, synthetic construct
  misc_feature 1..167: note = Description of artificial sequence: synthetic polynucleotide sequence
  source 1..167: mol_type = other DNA
cctgcaggacagtgtggtagttcttccttaggaatgctagtcattctttgaaaatcatcatgacaagcattacaaaaatgtgttgttccaaaacagaaaaaaacagccactgaacagcagtagcgacatttatattccaaaaagtctgtgccatgtttgggacacat

SEQ ID NO: 2380 - DNA, 121 bp, synthetic construct
  misc_feature 1..121: note = Description of artificial sequence: synthetic polynucleotide sequence
  source 1..121: mol_type = other DNA
tgcctacctgagccctggaaacatcagaacaggcaccacaaatgagctctctgggatcataatcatctccccgtccagcctcagcatcgcagcgagcttcaccaccaaaatatgcctgtgg

SEQ ID NO: 2381 - DNA, 211 bp, synthetic construct
  misc_feature 1..211: note = Description of artificial sequence: synthetic polynucleotide sequence
  source 1..211: mol_type = other DNA
cctttctgcatttgtagcacacataatatgcatatctattcattgcatagccagctgggtcattataaaacctcacaccaggagttgtgatagcttcactcttatgcagaccttcatattccaatctcattaaggcttttcttctgacatcctcatagagttcttttattggatcaagtaggtcttttagtactatgtgattaattttgtt

SEQ ID NO: 2382 - DNA, 121 bp, synthetic construct
  misc_feature 1..121: note = Description of artificial sequence: synthetic polynucleotide sequence
  source 1..121: mol_type = other DNA
tccataccttgcaaatgggacaagatataaatccaaatgttatccttgggccaagccatcgattttctaatactcgccgacagcactgtaagtggaatatgtgactacaatccagcttaaa

SEQ ID NO: 2383 - DNA, 190 bp, synthetic construct
  misc_feature 1..190: note = Description of artificial sequence: synthetic polynucleotide sequence
  source 1..190: mol_type = other DNA
cctgaatggctggtgctgccgagagcgcttcggtgaaacatatcatgcacatgtcatcggcgtcttgcttcaggcttgtggcacttttgtcacagccgtgtagacagggcagacagtgctcttcgtttttaacacccccgcatggatggccacaaggatgcgtcttactacaggctatcttagcgtattc

SEQ ID NO: 2384 - DNA, 121 bp, synthetic construct
  misc_feature 1..121: note = Description of artificial sequence: synthetic polynucleotide sequence
  source 1..121: mol_type = other DNA
tatactcacctggcaatctgcatcagaacaaacactgccaacagcagataactctgttccactcctggaaccacagaagcgacatgcttctgagctactcgtggtgggtttgcctaggttc

SEQ ID NO: 2385 - DNA, 134 bp, synthetic construct
  misc_feature 1..134: note = Description of artificial sequence: synthetic polynucleotide sequence
  source 1..134: mol_type = other DNA
cctgtgtgttctcggaattccaccattgccttcattgttttagaatctgccagtgccatcaaccagaacaatttggttctaccacaaccttcatgaaggtcaacctttatagcttcttcttcttctttgaagac

SEQ ID NO: 2386 - DNA, 121 bp, synthetic construct
  misc_feature 1..121: note = Description of artificial sequence: synthetic polynucleotide sequence
  source 1..121: mol_type = other DNA
ctttgatgagttttggttcttcgatgaaggtgaaggaatctgtcacagtctgtacataaatttccacagacattgcataaaatgattgctgcagtttcaccatcatcatggttatcacaca

SEQ ID NO: 2387 - DNA, 121 bp, synthetic construct
  misc_feature 1..121: note = Description of artificial sequence: synthetic polynucleotide sequence
  source 1..121: mol_type = other DNA
ctgatcttaccatttgtttttgttgtccatcctttcccatccatctccccgaggagagacgatctacgtggtcctgatcaagaacacatagggatgcgagagcaagccagagctgttgaaa

SEQ ID NO: 2388 - DNA, 121 bp, synthetic construct
  misc_feature 1..121: note = Description of artificial sequence: synthetic polynucleotide sequence
  source 1..121: mol_type = other DNA
ctctagttgttgcaatacatctcactggagacctaaattcttcttccatcttggtcaaggcaatgatggtttctgcaatagcattttttgtcactcgggaccaagcttctgacagatgacc

SEQ ID NO: 2389 - DNA, 121 bp, synthetic construct
  misc_feature 1..121: note = Description of artificial sequence: synthetic polynucleotide sequence
  source 1..121: mol_type = other DNA
atgggaacttactgctgccatatccttgataagtttaatgatgatctctgagatctgggtaggggttgagcccttcatccaccaatgactttcacctcgtcggagataactacaagaaaaa

SEQ ID NO: 2390 - DNA, 285 bp, synthetic construct
  misc_feature 1..285: note = Description of artificial sequence: synthetic polynucleotide sequence
  source 1..285: mol_type = other DNA
cctggaattgaaaatcatcggaagagtaactgttgtaactcctttgcccacagtggtaccagctgttccagtgatggtggttcctttggcttttagctgtacagtgagtgctttggcaatgcatcctagaaacatgtccaagatacccagcttattccagtctcctttctctgttgagtgaatgatatcactgatatctgctggggggagggatttcactcctatgatgctggccagacgactaggggttacttcaggcaaaactcttcttagtaaagaggttac

SEQ ID NO: 2391 - DNA, 268 bp, synthetic construct
  misc_feature 1..268: note = Description of artificial sequence: synthetic polynucleotide sequence
  source 1..268: mol_type = other DNA
cctgtctctggactctaggagaggctgtgtgaagcagcgagaagagatcctgaagcagggttagctgttgagccagatattgccggccaacgttagagccactcagtgctaaaaccatagagagcagctcaaagcagtaggcatcagaggaggcatcttcatcatttggctgagaattggcattttctttgcttgatatagcatgttcccattcttcacggactctggtagcttccatgcgaatagcttggacaatatgagcacacac

SEQ ID NO: 2392 - DNA, 121 bp, synthetic construct
  misc_feature 1..121: note = Description of artificial sequence: synthetic polynucleotide sequence
  source 1..121: mol_type = other DNA
tgaaatagctgttaaccaacctgtttttgtaagttagtcagcttactcctgctgaatatgattccaaccatatgttctttcaggtcagcatctgatgttgcctttacatagaaaaagaaaa

SEQ ID NO: 2393 - DNA, 121 bp, synthetic construct
  misc_feature 1..121: note = Description of artificial sequence: synthetic polynucleotide sequence
  source 1..121: mol_type = other DNA
caaataaatacattgtatactttttcttctccttcaggtgatgacaatagtgctttttcctcttgttctggtgtaggttcagcatctccagagatgagctttccaaatacctgatgaagat

SEQ ID NO: 2394 - DNA, 241 bp, synthetic construct
  misc_feature 1..241: note = Description of artificial sequence: synthetic polynucleotide sequence
  source 1..241: mol_type = other DNA
cttgagacgtaatcagtctgaatactcgcagagtctcagcttcacagttcctctgctgggccacactggctgaaatctggccagctatttttgtgctttcaccatctttccagcccaggactttgacttgtcgaactctcagtgtattttctgggccttttaattcaatttttatgatgtgattatcccctcctggaagttcacttgttacccagccaatgtgcctggaatccagatcaac

SEQ ID NO: 2395 - DNA, 121 bp, synthetic construct
  misc_feature 1..121: note = Description of artificial sequence: synthetic polynucleotide sequence
  source 1..121: mol_type = other DNA
aaacatttaatgacaaaatttcaattacctgctttattctgcacaaatcttctactgctttgccagttaagaaggtcattgaggtaactttattctgaaatagacaattcacaatagttaa

SEQ ID NO: 2396 - DNA, 226 bp, synthetic construct
  misc_feature 1..226: note = Description of artificial sequence: synthetic polynucleotide sequence
  source 1..226: mol_type = other DNA
ccccaagatctcgggaattgtccacgtgaacagacacatagcgggcattgattccttttacacagttgatggtgatgttcttagttttgtttttatcttcatctcctgattcccaaaaggtttctgtggagccgtctgtcaaactgccaatcatggcaggtcggcttgaagtttttatgtcaacaatgctggttaagtcctttaagcacattactatgcataattc

SEQ ID NO: 2397 - DNA, 158 bp, synthetic construct
  misc_feature 1..158: note = Description of artificial sequence: synthetic polynucleotide sequence
  source 1..158: mol_type = other DNA
cctgactcatagcttcaaagccagactgtatactgatgctaaaactctcttcactatcgccatcatctgactttgacaaaatattgttaatgtgatgaaagacgttgctctgatgaaggaactggtgatcagattgcttgaatttgagactccagcac

SEQ ID NO: 2398 - DNA, 162 bp, synthetic construct
  misc_feature 1..162: note = Description of artificial sequence: synthetic polynucleotide sequence
  source 1..162: mol_type = other DNA
cctcagggccatttgctgtaatgaactgccgctggggagagacatcataaggtctgagatggtctgcagcaagcggtgaaaggtgtgtggtaaaggatgagcagcttccccggcaatcactatgtctgagagtggatgttcacatactcttgtatctttctc

SEQ ID NO: 2399 - DNA, 151 bp, synthetic construct
  misc_feature 1..151: note = Description of artificial sequence: synthetic polynucleotide sequence
  source 1..151: mol_type = other DNA
cttgttctgaattttctttgcttgttttattttcttcatcctcttcttcctctggttccactggtgcaggagtcagtgatgccacaaaatgccacagaatatcatggagagaagtggtttggatgacattacacagaagccagttgaaagc

SEQ ID NO: 2400 - DNA, 201 bp, synthetic construct
  misc_feature 1..201: note = Description of artificial sequence: synthetic polynucleotide sequence
  source 1..201: mol_type = other DNA
cctccatagcaaaaactcgacaagcagatttccttagggcctgtttcattgctatttcaagaccttctagatcatgatgttgtataacaaaagctaaaactggccactggaaatttcgttctcctttagaaagagagctgtgggctgagattagccgagaaagctcaggagacggatgtctcaaaagggaagaaccaactt

SEQ ID NO: 2401 - DNA, 159 bp, synthetic construct
  misc_feature 1..159: note = Description of artificial sequence: synthetic polynucleotide sequence
  source 1..159: mol_type = other DNA
ccagtgtctccactgttaactcttcttctaggaatagctttaactcgtgcaggtaaaatggagtgttgtttatcatattcggaagcaacaactgagtatgatctttggaagacagttctctttgcaagatcagtatcagttatgggactggtttctaaa

SEQ ID NO: 2402 - DNA, 169 bp, synthetic construct
  misc_feature 1..169: note = Description of artificial sequence: synthetic polynucleotide sequence
  source 1..169: mol_type = other DNA
ccttggtggcatagacttcatattgctctctggctcttcaaatacattaggacttgcatcaggagttactgatatatacggggcaggtacagatgttgaacgtagatatctcatttcatcctggaatagattgtcatcttgatagcccacaaaattttcatgatgatgc

SEQ ID NO: 2403 - DNA, 121 bp, synthetic construct
  misc_feature 1..121: note = Description of artificial sequence: synthetic polynucleotide sequence
  source 1..121: mol_type = other DNA
cctagctaatgtctgcaggtagagacaaggcattttcacaggaagatcctcagaaatgccttcttttacactgggcaactgagattggaatggctttgcaggatggtaacacagaatgctc

SEQ ID NO: 2404 - DNA, 121 bp, synthetic construct
  misc_feature 1..121: note = Description of artificial sequence: synthetic polynucleotide sequence
  source 1..121: mol_type = other DNA
ctgctgcactgctcagggacagcaggaagagtgcattggctttaatcacctggtgagcttccatggtgggcaaggcacgaggggtcttgacttgcattggttttctcctagattgtttgac

SEQ ID NO: 2405 - DNA, 171 bp, synthetic construct
  misc_feature 1..171: note = Description of artificial sequence: synthetic polynucleotide sequence
  source 1..171: mol_type = other DNA
ccttctcccttgcagcagcctgtttttcgcggaggtatttttctctacagcgatcacataccagataccaagtgcttcctcctatgccaccatcaccacagttaccagcccatcctccacaaaaatgcccaatgctattgtaaccttgtccaccagcatatcggccacaac

SEQ ID NO: 2406 - DNA, 351 bp, synthetic construct
  misc_feature 1..351: note = Description of artificial sequence: synthetic polynucleotide sequence
  source 1..351: mol_type = other DNA
cctgggtgagcttgtctcatgtgataggtcaccgggtatggatgtgactccccacacagttcacagatggtatctttctctggtcctcctactgccagctgggccatctctccaaacaaattacccctgggcctaacttctgccttttcttttttctttttttcctttttggacttcttattctctttctcacactctttctttttaagaactgcacaggaaccaggacttggaaaaatcatattctgggaagcagctttgatagtagccaaagagatgtcttcccaaaaagccactaaatgttgtaaagttaagggaagaggagacttagacttcattgtgttatgcatg

SEQ ID NO: 2407 - DNA, 470 bp, synthetic construct
  misc_feature 1..470: note = Description of artificial sequence: synthetic polynucleotide sequence
  source 1..470: mol_type = other DNA
gacatttcaaaagtggtctcggttttcccatcctcacatttttcatgcagaggtggttccttaagcatagacaataccttgtttttgttgatgctacccatcttagatatatctggtccatggggtgcaatattaaacatattcagtgcagatgatatttctaatgaatgtctattttttaacttggtttctttttcctctgtaggttgttggctatttaaactactccttataggagcatgttctttggaaagttcaggatgaaactttaggaaagaagaacaagccattgcatcatgtactatgccttcatgccagaggaaggaagcaaacacagctctggcacattcggccacagaaggagacatggcttgcttggctggctctaaaggcttggatccatctcctttgaaaagaaaactcgatttttcttttttgggcctggtgtgtctattagcacattttcgact

SEQ ID NO: 2408 - DNA, 469 bp, synthetic construct
  misc_feature 1..469: note = Description of artificial sequence: synthetic polynucleotide sequence
  source 1..469: mol_type = other DNA
tattttgggagatgctctcatttcctgttcatctttcagtggtgcttttccaatgctaaaatgaactttatttgaaccttcatccacactcttaaattcactgctgtcatcgcaggtgctgtctgttagactatttgtttttaaagtacttgaggtgcagacttcgaccacctcactgtggaggttttcctgtaccacatggggagagggagctctattttcagatccaggggaatctgtagaatcctttggtactgattttggttttggtgacgttgaccgtcctctcaaaggttctgtgaggggcattttcttcttgcggagggtatctggatcaagtgtgtaagagtctgatttagaacgttcccgaggaggatcaagctttgtcttaacaggagcagtacttttttgaggtagatttttatcatgtggtgaggaggagcgtggagaactagcacccgatgggcta

SEQ ID NO: 2409 - DNA, 355 bp, synthetic construct
  misc_feature 1..355: note = Description of artificial sequence: synthetic polynucleotide sequence
  source 1..355: mol_type = other DNA
gacctattggctgggagagtctttggcttaggagatgacaaccgagaacctggtcctggggattcagctctggagctagaaggcatcctcccatcagatttcaatgtctgcaaggtgttatggttgggggataatgacctactgtgggaatctgacctcaactttgcagcatcagattttaagatgagggattcactagcagataaactttctgtgccccttggcttcttctgatcagcagtagtccggctcatacgtccatcaggtttaagcgatctgctgtgtttagaggacagctctgattttcctgatgtagaggctggtttagaagatgttgagatgtttcctcgatcac

SEQ ID NO: 2410 - DNA, 121 bp, synthetic construct
  misc_feature 1..121: note = Description of artificial sequence: synthetic polynucleotide sequence
  source 1..121: mol_type = other DNA
tttgctatttccgagtccataatcaaatccttgggcactgcaacttgcccctttattaaaagcttgcactgagaaagggcttggaggaggagtttgagaattctgatccagaagagcttgt

SEQ ID NO: 2411 - DNA, 134 bp, synthetic construct
  misc_feature 1..134: note = Description of artificial sequence: synthetic polynucleotide sequence
  source 1..134: mol_type = other DNA
ccatcttcatgtcggaggtactggtttccgcctctgtctctagctaaggaccatgcctctccttcatcactctcacagaactctaccatgctgttctgatccagttgcacccatgtcccttcagaattggttac

SEQ ID NO: 2412 - DNA, 226 bp, synthetic construct
  misc_feature 1..226: note = Description of artificial sequence: synthetic polynucleotide sequence
  source 1..226: mol_type = other DNA
cctctcccactgctttgactttgtttcccagaactaacattccaattgggatacctctaaggttagggcagcttctgatgttgtgacctgaaggtcccgtcttcactaccttgtacatgcctggccctcctcgcaagaatggcatatcttgttcttgcattgttgcttcctgtgggcagcaggagtttatgtctttgaaaaagtcatcagtattagttttagattc

SEQ ID NO: 2413 - DNA, 142 bp, synthetic construct
  misc_feature 1..142: note = Description of artificial sequence: synthetic polynucleotide sequence
  source 1..142: mol_type = other DNA
cgtcaacagggaccagaagactcttgccaagatgttgattaaaagagaggcaccaggcttcagtgtaaccattcatgttagggacatacttctttattgtctcatcattcagcctcagccacacaccatcatcattatggat

SEQ ID NO: 2414 - DNA, 121 bp, synthetic construct
  misc_feature 1..121: note = Description of artificial sequence: synthetic polynucleotide sequence
  source 1..121: mol_type = other DNA
acctcatcaataaaagtgatagttccattgactttcactatgcctatctgctcactctgaagggaagggtggctacggatgcgaagccccgcactgtccttggccacaaattttcgaacct

SEQ ID NO: 2415 - DNA, 121 bp, synthetic construct
  misc_feature 1..121: note = Description of artificial sequence: synthetic polynucleotide sequence
  source 1..121: mol_type = other DNA
ttctgccctaaccttattaggctgaggttcagactttggtttgaccaactgagttcctggtggtatcatcccttttggtgggtcttttacttttacttccagaccagcatctgtcagaaaa

SEQ ID NO: 2416 - DNA, 121 bp, synthetic construct
  misc_feature 1..121: note = Description of artificial sequence: synthetic polynucleotide sequence
  source 1..121: mol_type = other DNA
taccgatttcaatgccatcaatggtaacatgaagagtgtagagtccaatagcccctggagtccaatttgcacaataagtcccatcattattgacacggatcagcatattctcactgggtct

SEQ ID NO: 2417 - DNA, 121 bp, synthetic construct
  misc_feature 1..121: note = Description of artificial sequence: synthetic polynucleotide sequence
  source 1..121: mol_type = other DNA
gttttggttatactttgagaaaacgatccttacctcttaggagttggtgatgcaaaacgtagttcttcaaatgaataattttcataaacctttaagaaagagaccagtctgaacaatcgta

SEQ ID NO: 2418 - DNA, 217 bp, synthetic construct
  misc_feature 1..217: note = Description of artificial sequence: synthetic polynucleotide sequence
  source 1..217: mol_type = other DNA
ccttcatcattgttatggcaatatatcgagcttccttcactatcattggttcatatgaaacatctagctttggtgatgccagccctccataagtcatgtcagtattagaagatgcagctgttactgcaggactgccaggaatcctttgaggtttctttgcttgatcttgttgtaaagacatttttttctgagaaacagggacagctttcacttccac

SEQ ID NO: 2419 - DNA, 146 bp, synthetic construct
  misc_feature 1..146: note = Description of artificial sequence: synthetic polynucleotide sequence
  source 1..146: mol_type = other DNA
ccttcatattgggaacatgtaccacatccccatactggtcttttgtttgaacagttatggtggtaggccaaccacaacgaatatcatccttattcaggatcaaagatgttttctgaggatccgcatatgaatctggctgaagccac

SEQ ID NO: 2420 - DNA, 174 bp, synthetic construct
  misc_feature 1..174: note = Description of artificial sequence: synthetic polynucleotide sequence
  source 1..174: mol_type = other DNA
ccttgcaagccttccaccacttgatcctgggacacaggcaataaaatcatccagaaaagactgttcattgctttggatttggagtggtaaatttccctcaagtgcttctaatatagttggtgaatgagaaagagctagaccctttccaagaattccagaatgggttttgcacac

SEQ ID NO: 2421 - DNA, 121 bp, synthetic construct
  misc_feature 1..121: note = Description of artificial sequence: synthetic polynucleotide sequence
  source 1..121: mol_type = other DNA
gtacaaagtttatccttaaaacatttgggacaatacctgcaatgcagcctcctcaagaatttcaaggtcttcttctaattcattacctgttgtgtaaataaagagttttactaaaatatgt

SEQ ID NO: 2422 - DNA, 121 bp, synthetic construct
  misc_feature 1..121: note = Description of artificial sequence: synthetic polynucleotide sequence
  source 1..121: mol_type = other DNA
gtattggccacacttaccaataggaagtgctaggtccttcttcatcagagctgctgcacaaaccccaccaagattggctaattctttttccaattggatgactccctatggaattgcataa

SEQ ID NO: 2423 - DNA, 121 bp, synthetic construct
  misc_feature 1..121: note = Description of artificial sequence: synthetic polynucleotide sequence
  source 1..121: mol_type = other DNA
cctcatcaggtccagggctaaattcatatccaattgcaaaacacttaaaaccatagaaagaagctttgtcatctttcacataatctgatgcagtctccaatgaaaaaagggcctcatttcc

SEQ ID NO: 2424 - DNA, 227 bp, synthetic construct
  misc_feature 1..227: note = Description of artificial sequence: synthetic polynucleotide sequence
  source 1..227: mol_type = other DNA
cctggcaacaccaaaaccatagtaggccacccagaggatcctgaaaatttctttaattctatccatgaattaagattttcatgaacagatgtcaattttggtccatatcctgaattctgaacagttctgacaggaatcaacaaacgaaggacatcttctgactgtgcagtaccacactgagggtcaaattcgattgtcatccacctcacacattctgggaatgtcac

SEQ ID NO: 2425 - DNA, 220 bp, synthetic construct
  misc_feature 1..220: note = Description of artificial sequence: synthetic polynucleotide sequence
  source 1..220: mol_type = other DNA
ccttgtaatgcatcacacaggcaggtttatacgggtgctcactctctatgacagcatagtgactggaggttgtacaagcagagaggccctgttcaggctggtttcctgtggtgctatctgtcgactgattagggttgaaggcaggcggtgcatacttctgattcaaaatggcaactgacggaagcaattgttggacaaggccaaagacttctacagccac

SEQ ID NO: 2426 - DNA, 121 bp, synthetic construct
  misc_feature 1..121: note = Description of artificial sequence: synthetic polynucleotide sequence
  source 1..121: mol_type = other DNA
aattacacaccttgggaatagcagcagctactggtcctatgtaggctataataagggggagcagcatggaaaacagactggaagaactcagcagttctggaatgtcatcagctaaaaaaag

SEQ ID NO: 2427 - DNA, 144 bp, synthetic construct
  misc_feature 1..144: note = Description of artificial sequence: synthetic polynucleotide sequence
  source 1..144: mol_type = other DNA
ccatccacagcaagagctctgtgcaggaggtccttagaggctcgaacgacagtgcttacaacagacaatgctctgctacagtttttatcttcttcattggctttactcagaagttgggattgtaaatctccatcaaattcactc

SEQ ID NO: 2428 - DNA, 180 bp, synthetic construct
  misc_feature 1..180: note = Description of artificial sequence: synthetic polynucleotide sequence
  source 1..180: mol_type = other DNA
cctatagtagagtatctgtgggatctgtcctctggtttggtttgtgccgttactgctcaagctgcacgtgctgaatgtgaatgtcacaccatcagggcactgaactgtggtcattcctccatctccattggctgtacggcttccatagttcctcaagcgcacagcatatttaacattttc

SEQ ID NO: 2429 - DNA, 133 bp, synthetic construct
  misc_feature 1..133: note = Description of artificial sequence: synthetic polynucleotide sequence
  source 1..133: mol_type = other DNA
cctttaaaggaaccactttgtcaagtctgatctcagctatatcactgggtgagtcatccgttgtgtacgttcctttcactaattccagagatgtccatctgtgggaatgagttgaatctcctgcatgttcact

SEQ ID NO: 2430 - DNA, 208 bp, synthetic construct
  misc_feature 1..208: note = Description of artificial sequence: synthetic polynucleotide sequence
  source 1..208: mol_type = other DNA
catcatcaaccaacacctctaattcatattcatgaattccacctcctccatagacagagaaaccaaccacaactattccaggtttgtctactgaaaaacagattgcatcaggggacccgttcccagtgttccaacttctgccctgacttgtttttgtaaatcggttagcactagcttttacagagtgaagagaattaagtccatcaac

SEQ ID NO: 2431 - DNA, 193 bp, synthetic construct
  misc_feature 1..193: note = Description of artificial sequence: synthetic polynucleotide sequence
  source 1..193: mol_type = other DNA
cctcagatcccagggctgacgctgtcagttcactgacaatgctggccagtaatccacaggtgttagagacgaggtgggaggagaagagttcattttctctcctcaggctgttcctgactggtagcacaacaatgaccagcattttctccagaacttcacggaagcttgtcatccctgagatattctcttcact

SEQ ID NO: 2432 - DNA, 223 bp, synthetic construct
  misc_feature 1..223: note = Description of artificial sequence: synthetic polynucleotide sequence
  source 1..223: mol_type = other DNA
cctggctgagtttttccatatgtgccaccaaaaggggaaaacgatgaactagtgttgagtcgttctctgtactaacttgtttaacaattgatcgtagtaatacttctccatcatacgcaatcgggaagatggaagtcagcttaacagacgtgtgacacagagctgacataacagctgcaaggagtcggctacttgatgtcttgaagtttgcttcttggatatc

SEQ ID NO: 2433 - DNA, 276 bp, synthetic construct
  misc_feature 1..276: note = Description of artificial sequence: synthetic polynucleotide sequence
  source 1..276: mol_type = other DNA
cctgatccaaacaattcagcagatcacaaaggcaagcccactgtaaggcaggagttgggtagaaagaatgaaagcaggcagtgaaagtattatgacattcctgaaggacagcttctagaagactcaagggttgactgagatatccttgaggatcattatccaatttcaccatgcagtgatcaactccttctgataaaatttttcttaacaaagttctggtttttccaatacactctgctaatttgctagtttcttctacaactgcttttcctgtag

SEQ ID NO: 2434 - DNA, 194 bp, synthetic construct
  misc_feature 1..194: note = Description of artificial sequence: synthetic polynucleotide sequence
  source 1..194: mol_type = other DNA
cctgacactgggtaaatttcacaggtatagacacgcaataacctcagacaacaggtacccacaaagcgcagtctctctaaatctaggagtgtagctgtgaactggaatccttttaatcctctaagttcttcaactcctaagactaaggtggtccagctccagtgaagaatactcaacaatgactcaaaacattc

SEQ ID NO: 2435 - DNA, 121 bp, synthetic construct
  misc_feature 1..121: note = Description of artificial sequence: synthetic polynucleotide sequence
  source 1..121: mol_type = other DNA
aacatggcttaccactgagacagttcttgcaaaagacctctttaaaatgtgtacaggttcactggtttgctgtttgccttttgaagcactgccatcactggttggaagtctaaaggcagta

SEQ ID NO: 2436 - DNA, 121 bp, synthetic construct
  misc_feature 1..121: note = Description of artificial sequence: synthetic polynucleotide sequence
  source 1..121: mol_type = other DNA
gtataaatatgctaaatacctgtataataactgaggtatctgacccgcattaacatctgtaccattatttgatttctttgaactcttgaactggaaaacaaccctaagaagagaaaacaat

SEQ ID NO: 2437 - DNA, 136 bp, synthetic construct
  misc_feature 1..136: note = Description of artificial sequence: synthetic polynucleotide sequence
  source 1..136: mol_type = other DNA
cccatcatctgtggtaatagatgcctgtccatgagatccacagtcactgctgggtcctgacactcgggcccatgccacataccaccacccagcttgcaggagaacaggctcatcaaacatcattgcatatttttct

SEQ ID NO: 2438 - DNA, 121 bp, synthetic construct
  misc_feature 1..121: note = Description of artificial sequence: synthetic polynucleotide sequence
  source 1..121: mol_type = other DNA
gcacaaattatttacctagcagcacagtcataagccaatacatcagtctctgcaagaaggtcaccatcagtttcatgatctcctccatcaggacccaattcaaacagctaaggaaaggaga

SEQ ID NO: 2439 - DNA, 121 bp, synthetic construct
  misc_feature 1..121: note = Description of artificial sequence: synthetic polynucleotide sequence
  source 1..121: mol_type = other DNA
aattttagcagtatattctcctctacctccaaacagaccaagaccaccaagtaaaatatcagtgtcggcactgaaacgtatagcttctactgaatgggcagaataaccccagcctcctcca

SEQ ID NO: 2440 - DNA, 121 bp, synthetic construct
  misc_feature 1..121: note = Description of artificial sequence: synthetic polynucleotide sequence
  source 1..121: mol_type = other DNA
tcaaacctgtttaccacactataatcttctttagaataaaccttcattactgcttgagtctcttcctctgtacttgcaacacccatttttaagtcctgcatagctgccaaggtatcaagac

SEQ ID NO: 2441 - DNA, 174 bp, synthetic construct
  misc_feature 1..174: note = Description of artificial sequence: synthetic polynucleotide sequence
  source 1..174: mol_type = other DNA
cctaaaatgtgcaaagctgcatgagatcgggtagtgagggcccttgatcctgttggtaaggcaagttcaggacttaggatactacatctggactgcatgtctgctgcagagggaagcctggcatcagcaaccaccgcattgtaacaccacagctctctagtatttggtcgaaac

SEQ ID NO: 2442 - DNA, 155 bp, synthetic construct
  misc_feature 1..155: note = Description of artificial sequence: synthetic polynucleotide sequence
  source 1..155: mol_type = other DNA
cctccaaattacatcatatacaggatcaagacacacaccaaatccttgcagatcctcttgttctgagtcattaaaagttttacaactcccatccactttatttatcagaaggcatttaaatggaggaggttctgatatagaagcaggtaccaagc

SEQ ID NO: 2443 - DNA, 206 bp, synthetic construct
  misc_feature 1..206: note = Description of artificial sequence: synthetic polynucleotide sequence
  source 1..206: mol_type = other DNA
cctattatgtgtttactggcaaaaatttctgatgtagcaagtacatgagaattaataagtgcttcatcaattcgtaaaaaagtttggtccccacttgcacctatccaagtagcttttcttccatattttgatccaatgttaggcatgggagctggctttgcattccaatatggcacatccaaaattggtctgcccagttgtccttt

SEQ ID NO: 2444 - DNA, 121 bp, synthetic construct
  misc_feature 1..121: note = Description of artificial sequence: synthetic polynucleotide sequence
  source 1..121: mol_type = other DNA
acagaaaaacttccaaatgtgaagacctgtccatccattaaaagtactgccgtatggttgctgcctgcagtgacttgtgtgctagggcctggcaatgcttgaacaagagtgggacatcccc

SEQ ID NO: 2445 - DNA, 121 bp, synthetic construct
  misc_feature 1..121: note = Description of artificial sequence: synthetic polynucleotide sequence
  source 1..121: mol_type = other DNA
aatgaaaagttagcaagtacctggagttgacatctccatgtcctagctgcccatgctgcccataaccaaatgtatagacatctccattttccattaaaaccactgcaaccaaaacacacag

SEQ ID NO: 2446 - DNA, 121 bp, synthetic construct
  misc_feature 1..121: note = Description of artificial sequence: synthetic polynucleotide sequence
  source 1..121: mol_type = other DNA
cctgaatggtgaaatccacagctgacttggactgcccggagctcacagtcaaatcgcacagagcctggagggtatgttgtgattttgcttgcatccttttcgcctctttctccacttccat

SEQ ID NO: 2447 - DNA, 121 bp, synthetic construct
  misc_feature 1..121: note = Description of artificial sequence: synthetic polynucleotide sequence
  source 1..121: mol_type = other DNA
caaatacctttgtgcttgtcccgtttatgctttagctgtgctggatgggatctgagtctggctagagcctgttctcgatggttcataaaaataggaccagcaaatacaagggggcctgagg

SEQ ID NO: 2448 - DNA, 121 bp, synthetic construct
  misc_feature 1..121: note = Description of artificial sequence: synthetic polynucleotide sequence
  source 1..121: mol_type = other DNA
tacatcttacctcttccttcctctaatctgtgccttctgattacacgttgccgtttttcttcttgtcgtaactgaaggtgttcttcaatgttaaccccgggcactgggacagctagatgat

SEQ ID NO: 2449 - DNA, 147 bp, synthetic construct
  misc_feature 1..147: note = Description of artificial sequence: synthetic polynucleotide sequence
  source 1..147: mol_type = other DNA
cctaaaagaagatctaaaggtatcatttctttcactgcatcaagaattcctctttgtcttgcctcttgaccatctaactctcttgcacaggccttgcaacatccacacacagcacaaccagattctccggaaccacaaccacagatc

SEQ ID NO: 2450 - DNA, 206 bp, synthetic construct
  misc_feature 1..206: note = Description of artificial sequence: synthetic polynucleotide sequence
  source 1..206: mol_type = other DNA
ccctccggggactctgtctggccgtccactactgacacagctggctccataacctgtacagtctccacagacagtgcaaaccatgcactgctccagcttccatttgtgcatgcctggagggcacatcatagacttctcatctttttcatctagttcttcttccaggtcttcatccattgctgttgccatattttcaactccaaacc

SEQ ID NO: 2451 - DNA, 160 bp, synthetic construct
  misc_feature 1..160: note = Description of artificial sequence: synthetic polynucleotide sequence
  source 1..160: mol_type = other DNA
cctttcccaccttggttcatggcaccagtatctcgtccacactgtcctttattatttacaccaaatgtccacacctctccattcttcattaaaacacaagtgtgagctttgcccatagctacctgagttacaaaatggcccttcaaatcagttaccaaac

SEQ ID NO: 2452 - DNA, 166 bp, synthetic construct
  misc_feature 1..166: note = Description of artificial sequence: synthetic polynucleotide sequence
  source 1..166: mol_type = other DNA
cttgaactatcagagtaaatggcatcttttccaaacatgtagagttctccatctttagaaataacagaactacttccattattgcaggctgtatataccacaatctttccttccatcttaattatctttttaggtttataaggtttggattgccgtctgctcttag

SEQ ID NO: 2453 - DNA, 206 bp, synthetic construct
  misc_feature 1..206: note = Description of artificial sequence: synthetic polynucleotide sequence
  source 1..206: mol_type = other DNA
cttgattctccatcttctcctttactagcagatcctgtaaagaatatgctcccatcttctgcaactaaaagggcgtgagagccatcgtgtccaactgagaagtgtactatctttggagattttgtaattggtagctcaacccattttcctgctgaaggaccaccttgtttgattccaagactctggtatttgccagtgtaatatat

SEQ ID NO: 2454 - DNA, 121 bp, synthetic construct
  misc_feature 1..121: note = Description of artificial sequence: synthetic polynucleotide sequence
  source 1..121: mol_type = other DNA
taatccaaagagaataatttacctttccatttgctgttttcattagcgcaaactctcgtcctgcaccaagaattgctgactcctcatcaaatcctgtacctgaaatacgagactaataaat

SEQ ID NO: 2455 - DNA, 140 bp, synthetic construct
  misc_feature 1..140: note = Description of artificial sequence: synthetic polynucleotide sequence
  source 1..140: mol_type = other DNA
cttataatatgcaagtccttttccagatcgaatagtgagataccacaggcatgtaagcattttctagccagtttaagttgcaattcttgctgtagaacaggttcagtgcttgtggcaaatattctgacaacaaagccatc

SEQ ID NO: 2456 - DNA, 121 bp, synthetic construct
  misc_feature 1..121: note = Description of artificial sequence: synthetic polynucleotide sequence
  source 1..121: mol_type = other DNA
ctacttaagattcaggatacttacatctcttgaagcagctatctgattaatatattctccatcagtgaataaaatattttgaccttcagtgtggcaatctgtgcaaaagaaaaagtattta

SEQ ID NO: 2457 - DNA, 121 bp, synthetic construct
  misc_feature 1..121: note = Description of artificial sequence: synthetic polynucleotide sequence
  source 1..121: mol_type = other DNA
cttgaaacatacctggtaacatcacagtaccatcttgctccagtgtttcagggcttatccttatggctgtcatgctgtggttattcacatctctatataataaataaccctgataacagca

SEQ ID NO: 2458 - DNA, 121 bp, synthetic construct
  misc_feature 1..121: note = Description of artificial sequence: synthetic polynucleotide sequence
  source 1..121: mol_type = other DNA
tggtttattgtggatagtttcttacctgagcataccctaaccaagactttttttcttttctgtttctaatacgggatgtagaattgtatatatggccctgcaaaaaaaacaaaagttagta

SEQ ID NO: 2459 - DNA, 121 bp, synthetic construct
  misc_feature 1..121: note = Description of artificial sequence: synthetic polynucleotide sequence
  source 1..121: mol_type = other DNA
ccctaactgttccactgtatccagagcctattttatataatccatccttgcataatagataaagaaaaaatccatcattctgaagtagacattggtcatcttcatcaacagatatttcttt

SEQ ID NO: 2460 - DNA, 121 bp, synthetic construct
  misc_feature 1..121: note = Description of artificial sequence: synthetic polynucleotide sequence
  source 1..121: mol_type = other DNA
atggccacttgtgcattaaagctgctttcttaatgccattactaaaccagtcctgaatttgaatttttcccaccaaaactgcttgtacacttctctgtagcgaatttagaattgttggcac

SEQ ID NO: 2461 - DNA, 198 bp, synthetic construct
  misc_feature 1..198: note = Description of artificial sequence: synthetic polynucleotide sequence
  source 1..198: mol_type = other DNA
cctgaatagtttggcaagcatggcttccattgttggtgaggatagcagagatggcctgaagtgtccttcctgtttctccccaagaagccaccagactaaagaggcaagcacaggaaagtgctgttaaggactgtcctgtgctgtcattcatcccagtacttcgaacggtgatttccaaaagaagctggaagagagact

SEQ ID NO: 2462 - DNA, 155 bp, synthetic construct
  misc_feature 1..155: note = Description of artificial sequence: synthetic polynucleotide sequence
  source 1..155: mol_type = other DNA
cctaggacctcaggtggctcagactggaggccttctggctgctggccctgcagcacgttgagcagggcttggagactcctgagacacagggatggatgagaaaatcgtgtctctttgatcaattcaaaaacttcacaaaggccaacctcaataat

SEQ ID NO: 2463 - DNA, 217 bp, synthetic construct
  misc_feature 1..217: note = Description of artificial sequence: synthetic polynucleotide sequence
  source 1..217: mol_type = other DNA
cctttggaagcttgatagggggctctttggattcctcttcttcatcactatctgattctccactctgcacagagttcttagatgcggctgccaatgatatttcctttttctgccattccagaacgcaatggcgtacattacagtaaatattgaaagcagaaggattgctatgtagtttgatatctggtatgattactgtattctctaagttttcaga

SEQ ID NO: 2464 - DNA, 121 bp, synthetic construct
  misc_feature 1..121: note = Description of artificial sequence: synthetic polynucleotide sequence
  source 1..121: mol_type = other DNA
ttatcaattaccagcagctttaccttgcttcttgtcttcacttttgatttgctcttctgttttcttttcaatttcttcttatttaaaattttcttattcctaaatattaaaagaaaaatgg

SEQ ID NO: 2465 - DNA, 303 bp, synthetic construct
  misc_feature 1..303: note = Description of artificial sequence: synthetic polynucleotide sequence
  source 1..303: mol_type = other DNA
cctggaggctgggtgtccagcgctgccgcccccctggtccctgtcattgagcgcagcggtataaatcctccggtagcggtcggccagggcccggcctgacagcagcagctggtagtgaccccgggagtccgcggcgggtagccccagccccagccccgcagcagccacggagccgtcgggaaccggcatgaacagcgcccccggcgccggggaggaagagaaggtggcggctgggtagaatccgtccccgccgagccccgaggaggcggcggcgggggaggcagtcgctgcgcacatcatcat

SEQ ID NO: 2466 - DNA, 121 bp, synthetic construct
  misc_feature 1..121: note = Description of artificial sequence: synthetic polynucleotide sequence
  source 1..121: mol_type = other DNA
ctttgtcagtatttcccatgagccataaatagtctgacattctagtctgacaatggagagcctaatatcaaatatatttcaacatgtgtttgaaaggatttcctatgcttttaaacatcag

SEQ ID NO: 2467 - DNA, 121 bp, synthetic construct
  misc_feature 1..121: note = Description of artificial sequence: synthetic polynucleotide sequence
  source 1..121: mol_type = other DNA
atcatcggctatagagcagccacctacttcaaacccagcaccgcagattgtgcaggctgcgtcttcagcaccagcacttgaaactgactcttcccctccaccatatagtagtattactgtg

SEQ ID NO: 2468 - DNA, 121 bp, synthetic construct
  misc_feature 1..121: note = Description of artificial sequence: synthetic polynucleotide sequence
  source 1..121: mol_type = other DNA
tgaggctgaagttcaagggtgaggtctatgcttgagatagaaatttgagagttgtcaaagtatatgttacttaaggttgtgataggcagaataatagcatccaaagatatctatttcctgg

SEQ ID NO: 2469 - DNA, 121 bp, synthetic construct
  misc_feature 1..121: note = Description of artificial sequence: synthetic polynucleotide sequence
  source 1..121: mol_type = other DNA
aacatacgcatgtgtgtatctttataatagaataatttatattcctttgggtatataaccgataatgggattgctgggtcaaatagtattctggtttgaggaattgccacattgtcttcca

SEQ ID NO: 2470 - DNA, 121 bp, synthetic construct
  misc_feature 1..121: note = Description of artificial sequence: synthetic polynucleotide sequence
  source 1..121: mol_type = other DNA
agctcccatcttagagcaggaccaggaagccaagtctctttatttccaaacatattggtgtctaggtagtaaaaaataataagtaaaattaagtaaaccttttattatcagcaggattaat

SEQ ID NO: 2471 - DNA, 121 bp, synthetic construct
  misc_feature 1..121: note = Description of artificial sequence: synthetic polynucleotide sequence
  source 1..121: mol_type = other DNA
agacacaagtaatggcagcagaagctagcaagtgggtgtgtataagaaaacaggtaaagccagtacagttattgcagttttattttaggttgaatgttgcaggaatgaatgcccacctgta

SEQ ID NO: 2472 - DNA, 121 bp, synthetic construct
  misc_feature 1..121: note = Description of artificial sequence: synthetic polynucleotide sequence
  source 1..121: mol_type = other DNA
agtttatagtatctgttgttgtcatctttatgtacataagtacctaatgtttagctcacatttataagttagaacatgcagtatttggttttctgttccgccattaattgtttaggataat

SEQ ID NO: 2473 - DNA, 121 bp, synthetic construct
  misc_feature 1..121: note = Description of artificial sequence: synthetic polynucleotide sequence
  source 1..121: mol_type = other DNA
ttggacaaaatatttttaaaactatccaagggtattagagagtagacaaaagcaagcaggtactacagaagacttcacacttggaacaaagaatggcacgaagcaagttttccatttttaa

SEQ ID NO: 2474 - DNA, 121 bp, synthetic construct
  misc_feature 1..121: note = Description of artificial sequence: synthetic polynucleotide sequence
  source 1..121: mol_type = other DNA
gaagtgaagtggttaaaagctagggttctgatgaggaggagtgtttcttatataagatgaacctattactgtgtcatcaagaatcagtatcttcatgattttcagccttagtttccaaatt

SEQ ID NO: 2475 - DNA, 121 bp, synthetic construct
  misc_feature 1..121: note = Description of artificial sequence: synthetic polynucleotide sequence
  source 1..121: mol_type = other DNA
taaatacaataaattccaataacaataggaaaaataatactttttaaatgaaatgtaagcattctgacttctggctaaaaacctagggttatttttcaggcccaaccacaggcaattgcaa

SEQ ID NO: 2476 - DNA, 121 bp, synthetic construct
  misc_feature 1..121: note = Description of artificial sequence: synthetic polynucleotide sequence
  source 1..121: mol_type = other DNA
ccattatctccaacttatgtgcgttattcaaccatttattttcacctccttagttcctagtcactattatctcttttgcaacagcatatcaacctgtctctaagtttgcatctgatctact

SEQ ID NO: 2477 - DNA, 121 bp, synthetic construct
  misc_feature 1..121: note = Description of artificial sequence: synthetic polynucleotide sequence
  source 1..121: mol_type = other DNA
tcaacagttaccttgttgctctacagtacctgatgcttttagtgtgctccttttacaagacaatccattcatggccttctactaatcctctgagtttttccctgtggccttgtggatgaag

SEQ ID NO: 2478 - DNA, 121 bp, synthetic construct
  misc_feature 1..121: note = Description of artificial sequence: synthetic polynucleotide sequence
  source 1..121: mol_type = other DNA
tactattaaaaagcagatatataaggcacatattactgtgaagttgaaacaagctctccggtgatccctggaggcagctttagaaacaactacctgaagatgaggacatttagagggaatt

SEQ ID NO: 2479 - DNA, 121 bp, synthetic construct
  misc_feature 1..121: note = Description of artificial sequence: synthetic polynucleotide sequence
  source 1..121: mol_type = other DNA
attatatgtcttctgtcattttgtcatttaaatgggcctatcacacagcactttagaaagctgtgctcttatcagagataagaaagctgaatgtttatagattttatgacaggttttaaat

SEQ ID NO: 2480 - DNA, 121 bp, synthetic construct
  misc_feature 1..121: note = Description of artificial sequence: synthetic polynucleotide sequence
  source 1..121: mol_type = other DNA
ttggtcaagatgaaaactacaatggtttattgttcatatacaaggtagatctttccacattggtcataaaagaagaagcttcagtcttcctacatgttgcatttgtccccaaatgtatttt

SEQ ID NO: 2481 - DNA, 121 bp, synthetic construct
  misc_feature 1..121: note = Description of artificial sequence: synthetic polynucleotide sequence
  source 1..121: mol_type = other DNA
ttgagttttgggcttacttgagtcctgttactcctctcctttcttaccactaccttttgcaatagaaatgtctgtcctatgcttgtctcaccattggattttgaaagcacataacttgttt

SEQ ID NO: 2482 - DNA, 121 bp, synthetic construct
  misc_feature 1..121: note = Description of artificial sequence: synthetic polynucleotide sequence
  source 1..121: mol_type = other DNA
tgaggattaatggttgaagcaaaatataaatttagtttttgagtccaaagggcagttggctgagaagatttctgggcattgagctctaagttcctttagatggtgacatgaggacatcaga

SEQ ID NO: 2483 - DNA, 121 bp, synthetic construct
  misc_feature 1..121: note = Description of artificial sequence: synthetic polynucleotide sequence
  source 1..121: mol_type = other DNA
aatttaggtcacatttttgtcctataatatcttcatatcttttctcttttgttcgagtaactctttccctccctgatatctccgtgataaagatctattttttgtcagtgctttggagcat

SEQ ID NO: 2484 - DNA, 121 bp, synthetic construct
  misc_feature 1..121: note = Description of artificial sequence: synthetic polynucleotide sequence
  source 1..121: mol_type = other DNA
accttagctattaggaaaattactttctcttttgttgtaatatatatggaataatggtaattaaacacgcacaaataaagacatatttttatttatgagaaacagctcaaatttttctggc

SEQ ID NO: 2485 - DNA, 121 bp, synthetic construct
  misc_feature 1..121: note = Description of artificial sequence: synthetic polynucleotide sequence
  source 1..121: mol_type = other DNA
gatgtatttactcctgacatgcagccatatgcatcttcatggcttgataatttagaagcaaacgatcccctatacttgcctaatgctaaatcacaacgcctaccatcattcacctcacttc

SEQ ID NO: 2486 - DNA, 121 bp, synthetic construct
  misc_feature 1..121: note = Description of artificial sequence: synthetic polynucleotide sequence
  source 1..121: mol_type = other DNA
taaatttttttttctgtgagatgtatggtaatattcccacatatgtttgcacaagatcaaattaaaacttttgaagtatggatggtttctggttttaaaccaatcagtgtagtttgctata

SEQ ID NO: 2487 - DNA, 121 bp, synthetic construct
  misc_feature 1..121: note = Description of artificial sequence: synthetic polynucleotide sequence
  source 1..121: mol_type = other DNA
caagtgatgagtacactcaaagcccagacttcaccactacacaatatatgaatgtaaaagtatgcacttgtgcccactaaatctgtgaaaataaaaaattaaagaaaataaaaattaaaaa

SEQ ID NO: 2488 - DNA, 121 bp, synthetic construct
  misc_feature 1..121: note = Description of artificial sequence: synthetic polynucleotide sequence
  source 1..121: mol_type = other DNA
ccaagagtctctggaaccccagcaggaggagactctatgaccaaagagacagttgaagtggcgggaagagctgctaagagaagtggtggggtggtgagccagctgatgcggagcccagagg

SEQ ID NO: 2489 - DNA, 121 bp, synthetic construct
  misc_feature 1..121: note = Description of artificial sequence: synthetic polynucleotide sequence
  source 1..121: mol_type = other DNA
agaaggttacctactagacgggagaatctcaggtccataattcacttagagcagaatagggtatgtgaaaaataaactgttacacaatctagctgttacagtgtctagtattacttactgt

SEQ ID NO: 2490 - DNA, 121 bp, synthetic construct
  misc_feature 1..121: note = Description of artificial sequence: synthetic polynucleotide sequence
  source 1..121: mol_type = other DNA
tatgtagtacaaccaccagtagatgaatcctaaaacacaactgcaatcataaccctcctctattcctaaatgttaaatgatttctccaattctacagaatacatttttggttatatcttac

SEQ ID NO: 2491 - DNA, 121 bp, synthetic construct
  misc_feature 1..121: note = Description of artificial sequence: synthetic polynucleotide sequence
  source 1..121: mol_type = other DNA
ggcaaaggaacctgacaagatgtggaagtttatttgactttaaggtttataaattatagctaagccatgaagaactttcatatcaagaaaatgttatttattatgtataagtaatgagtac

SEQ ID NO: 2492 - DNA, 121 bp, synthetic construct
  misc_feature 1..121: note = Description of artificial sequence: synthetic polynucleotide sequence
  source 1..121: mol_type = other DNA
attggaattctaagtataccaataaatttaactgtgcactttactttttctggaacttagtatttgtcttgcaaaatgatcccctcttactcaatgatgcctaaaacatcttaaaactcta

SEQ ID NO: 2493 - DNA, 121 bp, synthetic construct
  misc_feature 1..121: note = Description of artificial sequence: synthetic polynucleotide sequence
  source 1..121: mol_type = other DNA
atccacagttttggttgagctttctattaattgcatgtgaaaacattctaatacatttatttcaactgacttgtctttttattgacaaggtgacttttaatcctgttttcgattcttctct

SEQ ID NO: 2494 - DNA, 121 bp, synthetic construct
  misc_feature 1..121: note = Description of artificial sequence: synthetic polynucleotide sequence
  source 1..121: mol_type = other DNA
acccaagaaaatttttgtgtaacaaattcaaatcaaaatttaaacacataaagtcaaatatcctcccaaggcaaattaaatattcagtgatcgaatagtcttgatttaatagctattgtca

SEQ ID NO: 2495 - DNA, 121 bp, synthetic construct
  misc_feature 1..121: note = Description of artificial sequence: synthetic polynucleotide sequence
  source 1..121: mol_type = other DNA
ctataatctttcacttcaacagtaaaaaacttgtttcccaccatccaccatcggttaacgtaaatgttcagtttcagtatagatgcatagcagtatcagaattgctaagccttttccttgg

SEQ ID NO: 2496 - DNA, 121 bp, synthetic construct
  misc_feature 1..121: note = Description of artificial sequence: synthetic polynucleotide sequence
  source 1..121: mol_type = other DNA
ttcagcactgcctttttgggacatttgacttacaaaaactgtgtgatcatgaatcagtattgtttttaagctgctgaaattgtactttgtgacaaaagaataagaaacaaatatatatact

SEQ ID NO: 2497 - DNA, 121 bp, synthetic construct
  misc_feature 1..121: note = Description of artificial sequence: synthetic polynucleotide sequence
  source 1..121: mol_type = other DNA
tctgtgtatgacctgatcccaggctacctctgtctcttctatacttactctttaattcacactttatgtgcctcaacactaaactgcttctgtgtctacatatgcactgtgagttccctca

SEQ ID NO: 2498 - DNA, 121 bp, synthetic construct
  misc_feature 1..121: note = Description of artificial sequence: synthetic polynucleotide sequence
  source 1..121: mol_type = other DNA
agtccaaccaggtcacaggagcagtcccaggggttatcctcaaggtcaatctgggttagcaaatcaagatcatccaaaatattacttacaggtagatgggtaaactggtttgttttaagat

SEQ ID NO: 2499 - DNA, 121 bp, synthetic construct
  misc_feature 1..121: note = Description of artificial sequence: synthetic polynucleotide sequence
  source 1..121: mol_type = other DNA
tctttcgctcagaggtgaggtttcatcagggatccatccctatctgcccaggcatttggctacctcctgtaactatcagctgtacaaaagctttttcacttgatgtattcctatttgtctg

SEQ ID NO: 2500 - DNA, 121 bp, synthetic construct
  misc_feature 1..121: note = Description of artificial sequence: synthetic polynucleotide sequence
  source 1..121: mol_type = other DNA
tgtgaagattaagaaagcttcttgcagctacatcaaggggaaagccacagaaaatgttattgataggcaactaacatagcacgaggaaatgctaaaatgtacaaacacccagaggctaaaa

SEQ ID NO: 2501 - DNA, 121 bp, synthetic construct
  misc_feature 1..121: note = Description of artificial sequence: synthetic polynucleotide sequence
  source 1..121: mol_type = other DNA
caacaaggggttattaaatgtccaatatgattccatctctgactaggacctattcatacatatgcgtgtgtgtgcgcaggtgtgtgtgtgtgcaggtgtgtgtgtgtgtgtgtattctatt

SEQ ID NO: 2502 - DNA, 121 bp, synthetic construct
  misc_feature 1..121: note = Description of artificial sequence: synthetic polynucleotide sequence
  source 1..121: mol_type = other DNA
aggttaaaaagaaagtattttttgacatgggggcaatcacttatgatttagaagtcaatgttctggcaaggacactcacagcccttcttctgtgtttgcagggatggctccttgaagactg

SEQ ID NO: 2503 - DNA, 121 bp, synthetic construct
  misc_feature 1..121: note = Description of artificial sequence: synthetic polynucleotide sequence
  source 1..121: mol_type = other DNA
caaagttctgcccactgtgaagttcactgtttaacattggttttcaaaacaaaccctgtgtaaggctgtttttcagcagccatttaattctggatgatgccagtttaacatacagactcag

SEQ ID NO: 2504 - DNA, 121 bp, synthetic construct
  misc_feature 1..121: note = Description of artificial sequence: synthetic polynucleotide sequence
  source 1..121: mol_type = other DNA
ccatgtcttaggttagactccaaattttcttattttccccccaaaaatattcaacttatgaaacaagatcatgaggtgtcctaatttagactttgaactaaagtcaactaggtaatgattt

SEQ ID NO: 2505 - DNA, 121 bp, synthetic construct
  misc_feature 1..121: note = Description of artificial sequence: synthetic polynucleotide sequence
  source 1..121: mol_type = other DNA
aggcttcaggattttaatcaaatccaaacaatgtcacttaaaagttatatatgccttttaattcacatagcaataatattttaatcactttactgatgtatgtttgacataaataaggctc

SEQ ID NO: 2506 - DNA, 121 bp, synthetic construct
  misc_feature 1..121: note = Description of artificial sequence: synthetic polynucleotide sequence
  source 1..121: mol_type = other DNA
aactgaaataaacacctggttacatttatgttaatacactgtcattctgtctttcttgcacagttcaaataagggcggtgaatggggatgtggtaagaattatcaactcaacatcttttaa

SEQ ID NO: 2507 - DNA, 121 bp, synthetic construct
  misc_feature 1..121: note = Description of artificial sequence: synthetic polynucleotide sequence
  source 1..121: mol_type = other DNA
aaatgttatttcagccgcaattagaaaataagagaacattctgaaaaatgcactgaaaagtaagtgtaggtactaagaatgacaatactaaaacagctgagagtatgatatgtaatgaatt

SEQ ID NO: 2508 - DNA, 121 bp, synthetic construct
  misc_feature 1..121: note = Description of artificial sequence: synthetic polynucleotide sequence
  source 1..121: mol_type = other DNA
tcatgcaaatgaaaagggaggttgtgagaattaaaatgagggaagatgcactagcctggggattataaaaatattatagaagaggaggtatactcaagtgtttgaaaaataagttaaaaat

SEQ ID NO: 2509 - DNA, 121 bp, synthetic construct
  misc_feature 1..121: note = Description of artificial sequence: synthetic polynucleotide sequence
  source 1..121: mol_type = other DNA
cacttaaaaccgtggatgcatagatagacttgaaatcatgtcaagtgaaaaaaataatattgcagaatgatacgaagacaatgaagccatttatgtaattttaaaacacaaataataatat

SEQ ID NO: 2510 - DNA, 121 bp, synthetic construct
  misc_feature 1..121: note = Description of artificial sequence: synthetic polynucleotide sequence
  source 1..121: mol_type = other DNA
ctttcttcacccctctcttatcattgccttcaccttaccataaacccccatcatttctggtctgaactataaaattagccttgtggtggtattactactgtttccctaaacacctctttac

SEQ ID NO: 2511 - DNA, 121 bp, synthetic construct
  misc_feature 1..121: note = Description of artificial sequence: synthetic polynucleotide sequence
  source 1..121: mol_type = other DNA
ctcactaatttagctccgctcactatgtaatactttttctcactgctttagctctgcctattatgtaacactttcccccaaacagaaaattgtacatgtccaatttcacaattaagcttaa

SEQ ID NO: 2512 - DNA, 121 bp, synthetic construct
  misc_feature 1..121: note = Description of artificial sequence: synthetic polynucleotide sequence
  source 1..121: mol_type = other DNA
agcacaaattcaaaccagagcctttcatttttattccttaccatgtgccaagcaacattttaatatccatcatttaatctttacaaaaatgctatgaagtcaataatattagtgttcccag

SEQ ID NO: 2513 - DNA, 121 bp, synthetic construct
  misc_feature 1..121: note = Description of artificial sequence: synthetic polynucleotide sequence
  source 1..121: mol_type = other DNA
cataggtgagtaaacctttaatggtttaatctgcaatggtgaaagaataaaaagttggctgaatcttgaagggagccaaatttggaaaatcagttgaagtatgattcaatctacattatgc

SEQ ID NO: 2514 - DNA, 121 bp, synthetic construct
  misc_feature 1..121: note = Description of artificial sequence: synthetic polynucleotide sequence
  source 1..121: mol_type = other DNA
tcacataggtaagtctttctcaccagactgacgtatccataaagacagttacgttgtatcgcagagaagcatgctagctatgtacatggtcgtttcagttaaactaaggtgatttgaatat

SEQ ID NO: 2515 - DNA, 121 bp, synthetic construct
  misc_feature 1..121: note = Description of artificial sequence: synthetic polynucleotide sequence
  source 1..121: mol_type = other DNA
tttttcttccgcatttgtgcatgttcataacatacatcccaattaattttactatattcaccaacaggcctgtaacgtgtattccttcacttccttatgctatatctagaaggtaccatat

SEQ ID NO: 2516 - DNA, 121 bp, synthetic construct
  misc_feature 1..121: note = Description of artificial sequence: synthetic polynucleotide sequence
  source 1..121: mol_type = other DNA
agatgagattacagagcagctggcccatcatgagacaaactcaggcaaatatttcaattatcatcttagtgaaaaacccaaattttggctggtgcactactgtggtgttttgggtccctaa

SEQ ID NO: 2517 - DNA, 121 bp, synthetic construct
  misc_feature 1..121: note = Description of artificial sequence: synthetic polynucleotide sequence
  source 1..121: mol_type = other DNA
tactctcatatattattttgtttgtctcttttcttatcttggtcccccaagagcctaatccgtagatgtggtttctattaatagctcaggatttctatcctgcaattacaatgtcgtttac

SEQ ID NO: 2518 - DNA, 121 bp, synthetic construct
  misc_feature 1..121: note = Description of artificial sequence: synthetic polynucleotide sequence
  source 1..121: mol_type = other DNA
atttcaattgcttacattcgttttatctttgattttctatgtttgactggctttagaaggctaactaatgaatatttacattgacaatttttagttaacaccattttaccttgtggtttgc

SEQ ID NO: 2519 - DNA, 121 bp, synthetic construct
  misc_feature 1..121: note = Description of artificial sequence: synthetic polynucleotide sequence
  source 1..121: mol_type = other DNA
tttatgtgtatacttgaaaacaaaatgtgtacaattgttgcactagtttgaagatattagtggcaaaagttacctaatcagttgtcagtactgtatctataaatcaattttggaaatgtgt

SEQ ID NO: 2520 - DNA, 121 bp, synthetic construct
  misc_feature 1..121: note = Description of artificial sequence: synthetic polynucleotide sequence
  source 1..121: mol_type = other DNA
acatgtatcgtcgattggatgttataaaaagcaaaaatatgttttgaaatggaggatagttctcataaagtaaaaataaagaaaataagatcagaagaagtactttccaaacaacatagta

SEQ ID NO: 2521 - DNA, 121 bp, synthetic construct
  misc_feature 1..121: note = Description of artificial sequence: synthetic polynucleotide sequence
  source 1..121: mol_type = other DNA
cagcaaacacatgctgcttctttaataaagaaaggaagaatggatccaagagcctagaggacgaagtcaaaagctatgggtgattactcccagtccttgaaacctaataaaaaattctaaa

SEQ ID NO: 2522 - DNA, 121 bp, synthetic construct
  misc_feature 1..121: note = Description of artificial sequence: synthetic polynucleotide sequence
  source 1..121: mol_type = other DNA
aatgcagcttatcctacaaatacaagtttggttaaacatttgaaatgcagtcagtgtaattcgccatatcaacaaactaaaacatgagaaataaaagacatctagaatgaaaagcaaggaa

SEQ ID NO: 2523 - DNA, 121 bp, synthetic construct
  misc_feature 1..121: note = Description of artificial sequence: synthetic polynucleotide sequence
  source 1..121: mol_type = other DNA
ttcaaatatatttaagattccaactctctccctgtctttagggtagtaataaagactaaataagtagtgtctgaatctatggcagatatcaatgaaatatcaaaaatctttgcatgcccat

SEQ ID NO: 2524 - DNA, 121 bp, synthetic construct
  misc_feature 1..121: note = Description of artificial sequence: synthetic polynucleotide sequence
  source 1..121: mol_type = other DNA
actacacagaatttccaaggaaagatgtccatttatttcagtgatgctgtcattgctcaaaacactttatttggtcctctttcatcttacctctagaccagcagcattttctttttaatat

SEQ ID NO: 2525 - DNA, 121 bp, synthetic construct
  misc_feature 1..121: note = Description of artificial sequence: synthetic polynucleotide sequence
  source 1..121: mol_type = other DNA
agatttagctgagaagcctatcttttgtatcatatgcccttggttggtataaagtccaggcatcctgattcaagtgaattctgtgtaaaaataaaaatgagttgtcaagcttttacccaat

SEQ ID NO: 2526 - DNA, 121 bp, synthetic construct
  misc_feature 1..121: note = Description of artificial sequence: synthetic polynucleotide sequence
  source 1..121: mol_type = other DNA
ccaggttcagtttctttcaagtggaacaagaacttaagactagctcaaagttacaattaaagacactataaccagctgagaactgacttttgggttttcataatttttttctccactgtca

SEQ ID NO: 2527 - DNA, 121 bp, synthetic construct
  misc_feature 1..121: note = Description of artificial sequence: synthetic polynucleotide sequence
  source 1..121: mol_type = other DNA
attagctctttttccttcattaaactctttatattgtgatgatgatagattcacaggccgttgtaagtagtaatatggagattccatgtacactttacctaggtttccctgcttggtgaga

SEQ ID NO: 2528 - DNA, 121 bp, synthetic construct
  misc_feature 1..121: note = Description of artificial sequence: synthetic polynucleotide sequence
  source 1..121: mol_type = other DNA
ctttatctagctaatgttaatgctactcctcatttctgtgttgcgaatagataccactaactatgggaagctttcctctgtagaaatggttgggtaactttgtaatgtactctggcaacac

SEQ ID NO: 2529 - DNA, 121 bp, synthetic construct
  misc_feature 1..121: note = Description of artificial sequence: synthetic polynucleotide sequence
  source 1..121: mol_type = other DNA
aagttctcgttaaccataccacagctgtcctcttcttacctcaatacatcaaaggctacttcaagttacaatttctccctcagtttttccctagtctaagtccacgtggatttctccatat

SEQ ID NO: 2530 - DNA, 121 bp, synthetic construct
  misc_feature 1..121: note = Description of artificial sequence: synthetic polynucleotide sequence
  source 1..121: mol_type = other DNA
aggaaagggagatattgaccctacaagagggctagggtagtactggggactgagaatcacgaatcgggtgggatcctggatatatctgaatcacgcaattatatttcttgctcagagactt

SEQ ID NO: 2531 - DNA, 121 bp, synthetic construct
  misc_feature 1..121: note = Description of artificial sequence: synthetic polynucleotide sequence
  source 1..121: mol_type = other DNA
atacagagcctagaaattgacccacatgaatatagtcaactgattttgacaaaggagcaaaggaaatgcgatggtgcaaaatagtcttttcaagaaatgatgctggaacgactggatttac

SEQ ID NO: 2532 - DNA, 121 bp, synthetic construct
  misc_feature 1..121: note = Description of artificial sequence: synthetic polynucleotide sequence
  source 1..121: mol_type = other DNA
atttctgtatgtctctcctactgctaccttatttcaggttcttactctttctaattgagtttggtgaatcattacataaatgacgatcttcctctgaatgctttccagggatctccatata

SEQ ID NO: 2533 - DNA, 121 bp, synthetic construct
  misc_feature 1..121: note = Description of artificial sequence: synthetic polynucleotide sequence
  source 1..121: mol_type = other DNA
ttccttatctctttttatatcattgtggatatttgtattagtaattaaataaaatcatatgacattcagttaagctatgacaggccatcagttcttttaaaatatgtctctatgcattttt

SEQ ID NO: 2534 - DNA, 121 bp, synthetic construct
  misc_feature 1..121: note = Description of artificial sequence: synthetic polynucleotide sequence
  source 1..121: mol_type = other DNA
aaaaatcttaaggattacagtaaaaaactattagaattaataagtttagcaaggttacatggtacaagatcaatatgcaaaaatcaattgtatttttttcacactagcaattaacaactta

SEQ ID NO: 2535 - DNA, 121 bp, synthetic construct
  misc_feature 1..121: note = Description of artificial sequence: synthetic polynucleotide sequence
  source 1..121: mol_type = other DNA
ctactctatcaaatggaagtagtttaagcttacatatctcagccttctgcctctcattctcattctttagcactcagtttctaaaatctctttggttaaatttaataattttagcttcttt

SEQ ID NO: 2536 - DNA, 121 bp, synthetic construct
  misc_feature 1..121: note = Description of artificial sequence: synthetic polynucleotide sequence
  source 1..121: mol_type = other DNA
ttccaggcttctccctgaaacaccgcaagcgtaagtggaaatgagttccctagtgttatgtgtccatcaaacatcatggtctgtttttttcctttttccccattaccttaagcccaacaaa

SEQ ID NO: 2537 - DNA, 121 bp, synthetic construct
  misc_feature 1..121: note = Description of artificial sequence: synthetic polynucleotide sequence
  source 1..121: mol_type = other DNA
tttggtgtgaactggtttttattggggtgtaggacacggggtaggaaatgtcaccttggcgtatggcatgccttacacattctaatcttcctggggtagttgatggaactatttcttcttc

SEQ ID NO: 2538 - DNA, 121 bp, synthetic construct
  misc_feature 1..121: note = Description of artificial sequence: synthetic polynucleotide sequence
  source 1..121: mol_type = other DNA
tgtagaaataaccagaatatcaattaactggtgagtggctaaatatatgtggagtaaccgtacagtggaatattatttagtcataaaaaagtgaaatactgatacatgctgcaatatggat

SEQ ID NO: 2539 - DNA, 121 bp, synthetic construct
  misc_feature 1..121: note = Description of artificial sequence: synthetic polynucleotide sequence
  source 1..121: mol_type = other DNA
ttttgttgttagattgaaccctgatctattgttaatgctgctttggagaggaaatttttgtctataccacaaattaatttgacatgtactcatgtagagaaagcaaaaagtaagttgtttg

SEQ ID NO: 2540 - DNA, 121 bp, synthetic construct
  misc_feature 1..121: note = Description of artificial sequence: synthetic polynucleotide sequence
  source 1..121: mol_type = other DNA
ccctttatctaactctcaccaagccagtatttctttaccctaaatcatctcatgaccaagtaacagatgactagagacaccgctagaacccactgaagttactcaaattacccaaccttaa

SEQ ID NO: 2541 - DNA, 121 bp, synthetic construct
  misc_feature 1..121: note = Description of artificial sequence: synthetic polynucleotide sequence
  source 1..121: mol_type = other DNA
tgaagctctctaaaaaggtctggtcagcattaccctacactatctgcaaggacgagagcgtgacagcgggcacgtccaacgaggaggaatgctggaacgggcacagcaaagccaggtgagg

SEQ ID NO: 2542 - DNA, 121 bp, synthetic construct
  misc_feature 1..121: note = Description of artificial sequence: synthetic polynucleotide sequence
  source 1..121: mol_type = other DNA
aaggagaattctcaggtggaagatatcccatttgaaatggtgttactaaacccagatgccgaagggaatccatttgatcattttagtgctggagaatctggtaagaatatgtatttgaata

SEQ ID NO: 2543 - DNA, 121 bp, synthetic construct
  misc_feature 1..121: note = Description of artificial sequence: synthetic polynucleotide sequence
  source 1..121: mol_type = other DNA
cagtgtatatactgttgaacgccaaggggctacatggcttctagctcatgaaattcactctgcacttgttgatggggtcccgtcatcacagctgcaagacccgcgcagtctacagcccact

SEQ ID NO: 2544 - DNA, 121 bp, synthetic construct
  misc_feature 1..121: note = Description of artificial sequence: synthetic polynucleotide sequence
  source 1..121: mol_type = other DNA
tcttataaaaggggcaggtaaggacgctatgacttgcatacctgaggtatgattgacatcttcttccttaaatcgtgaagtccaatttcagttgtcaagatcttatcaatccaaattttac

SEQ ID NO: 2545 - DNA, 121 bp, synthetic construct
  misc_feature 1..121: note = Description of artificial sequence: synthetic polynucleotide sequence
  source 1..121: mol_type = other DNA
ccgaggagcacgtaggtggtgaaggtcacaaacacgatgattttgcttgcactgaaaaatgaagccaaattcatccctctgaggcaggaacttctcagaatcttggaaatctccttcctga

SEQ ID NO: 2546 - DNA, 121 bp, synthetic construct
  misc_feature 1..121: note = Description of artificial sequence: synthetic polynucleotide sequence
  source 1..121: mol_type = other DNA
ctgtcctaaatacagtttccagagagttttccaaggtaacagctcacctgcgggcttgggagaatcatcagtgtcctcgatttcgcttccctcggtcccgtccgcgtcacttttcactgtg

SEQ ID NO: 2547 - DNA, 121 bp, synthetic construct
  misc_feature 1..121: note = Description of artificial sequence: synthetic polynucleotide sequence
  source 1..121: mol_type = other DNA
cagtatcctgttttccagaaacgatatccatccatttccctgcggctatcacaaaatggagtatacccataaggagctccatccagatcgaaatctcgaagttcttttagatcatgtctca

SEQ ID NO: 2548 - DNA, 121 bp, synthetic construct
  misc_feature 1..121: note = Description of artificial sequence: synthetic polynucleotide sequence
  source 1..121: mol_type = other DNA
aatcattctcttcccaaggtctcctgctaagcaaaatagccctagatgattgcataagtctaagtggctactgtgacatctcatgaccatgttcccttggccatagcagagataagggatg

SEQ ID NO: 2549 - DNA, 121 bp, synthetic construct
  misc_feature 1..121: note = Description of artificial sequence: synthetic polynucleotide sequence
  source 1..121: mol_type = other DNA
gtatcccatgaaccacacttgactttgtagcctgaaaacattcctgaatgattgtgtaactgttattatattgtactgttatctttctgttcagtgctcttacaatttataattgtttgta

SEQ ID NO: 2550 - DNA, 121 bp, synthetic construct
  misc_feature 1..121: note = Description of artificial sequence: synthetic polynucleotide sequence
  source 1..121: mol_type = other DNA
cctccttgtaagtatttcaaggctactaccttgcctagcagtatctgcctgaacatggcggttttaattacacaggaagcactcttgccctgccattgactgatatgtagttaaaggcata

SEQ ID NO: 2551 - DNA, 121 bp, synthetic construct
  misc_feature 1..121: note = Description of artificial sequence: synthetic polynucleotide sequence
  source 1..121: mol_type = other DNA
gattaactgtcaacctactgtatccaccagtaggattcctggagtgagccagtctgtttgggtagctctggatcattgtctgattgggcagtgatctgtgctcctggccaccctatagggt

SEQ ID NO: 2552 - DNA, 121 bp, synthetic construct
  misc_feature 1..121: note = Description of artificial sequence: synthetic polynucleotide sequence
  source 1..121: mol_type = other DNA
gtggtatagcaaagtgtcactatcaccaaggggaggcagaaagtagttgcagtcaaaatcaggttgtaccacttaatagtattgagttcatccgaactggtgaggtcgagacaggctgatc

SEQ ID NO: 2553 - DNA, 121 bp, synthetic construct
  misc_feature 1..121: note = Description of artificial sequence: synthetic polynucleotide sequence
  source 1..121: mol_type = other DNA
tgcatttctcctaagcacatagtggccagcacctggtgttttacagtttgacaattttacgcccacagttgggtacgcctccaaaagcaccttgcccagctctgacaggaaggtaaaatgg

SEQ ID NO: 2554 - DNA, 121 bp, synthetic construct
  misc_feature 1..121: note = Description of artificial sequence: synthetic polynucleotide sequence
  source 1..121: mol_type = other DNA
tcatttatatcatataggagaagaaaagtgttcacccttggatgacatatgggttgttagatggtctgaggacaagattcccatctcagcatgagagccacagaaatgatcctcagaattc

SEQ ID NO: 2555 - DNA, 121 bp, synthetic construct
  misc_feature 1..121: note = Description of artificial sequence: synthetic polynucleotide sequence
  source 1..121: mol_type = other DNA
ctcaaataccccgtaaagatgagctaggtcctctatttcattatttgtttgaaaatatctgagcctctgcctcacacaggagttactaggcacattctcagaaacggagaaaataacagta

SEQ ID NO: 2556 - DNA, 121 bp, synthetic construct
  misc_feature 1..121: note = Description of artificial sequence: synthetic polynucleotide sequence
  source 1..121: mol_type = other DNA
taattctgagtcttaggattttatgaattgacatgtgttcccctaatatttatatgttggcatcccaacctcttgtacctccgaatgtagccttattaggaaatagggtcattgcaaatat

SEQ ID NO: 2557 - DNA, 121 bp, synthetic construct
  misc_feature 1..121: note = Description of artificial sequence: synthetic polynucleotide sequence
  source 1..121: mol_type = other DNA
atgggtaatattggacactttaaatgtattacaggttctagtacttactatgcgtatgagaaaaactagggcatggatataagaaaggacagaagagccaggtgtggtggccacacatgtt

SEQ ID NO: 2558 - DNA, 121 bp, synthetic construct
  misc_feature 1..121: note = Description of artificial sequence: synthetic polynucleotide sequence
  source 1..121: mol_type = other DNA
ggcgtatggtgctccttctcggtgtcctgctcgaagtcagcggtggcccccatgtcctctggccccacaggcttcgccgagcgggtggacctgtacaccacgtcgaggctctcaggcgccg

SEQ ID NO: 2559 - DNA, 121 bp, synthetic construct
  misc_feature 1..121: note = Description of artificial sequence: synthetic polynucleotide sequence
  source 1..121: mol_type = other DNA
tgtaagcgatgcccaccaaagtgtcaggagtccgtccaaacaaaaggttgactaactggcgttcccgtgttgcaggtggatggaagtgatccgcagtgccaccagctctgcctcgcgaccc

SEQ ID NO: 2560 - DNA, 121 bp, synthetic construct
  misc_feature 1..121: note = Description of artificial sequence: synthetic polynucleotide sequence
  source 1..121: mol_type = other DNA
tgattgggggcccacactagaagcgtgtggcgttggccctgcttgaagtcgtcagttacagcagtgactggtgatccaggagaagaaatgtttatccttgtcagtttgtttacatcaaaag

SEQ ID NO: 2561 - DNA, 121 bp, synthetic construct
  misc_feature 1..121: note = Description of artificial sequence: synthetic polynucleotide sequence
  source 1..121: mol_type = other DNA
aatctttgaattcaatgcaaatcgcaatatttctagcctgcagcaataaacaaaacagaataagaaaaaacaacagaaagtcagactatgtaagtatttataaaagaacatgggacgctga

SEQ ID NO: 2562 - DNA, 121 bp, synthetic construct
  misc_feature 1..121: note = Description of artificial sequence: synthetic polynucleotide sequence
  source 1..121: mol_type = other DNA
tccagacacgtgctgaggttcatgaggaaggtggtaaaggctccccagggattgtaactgttctcccccgttcccagcatcaggaaagcgaaacagatgtggaagggcataaagcagacga

SEQ ID NO: 2563 - DNA, 121 bp, synthetic construct
  misc_feature 1..121: note = Description of artificial sequence: synthetic polynucleotide sequence
  source 1..121: mol_type = other DNA
taccatgcagtagagtggtggagtcacgtgatgactctgtgttaaccttctcaggacccgccaggttggtttccataccagctgcaccactttacaatcccactgatgggctatgagggtt

SEQ ID NO: 2564 - DNA, 121 bp, synthetic construct
  misc_feature 1..121: note = Description of artificial sequence: synthetic polynucleotide sequence
  source 1..121: mol_type = other DNA
aggggtctctgcctccctctactcatccaaagatcatggtgcttgttcaccagccttatgatgatccaaagaaatagtgatctttcatgtttaaataaacctacttaattacgtgcatctg

SEQ ID NO: 2565 - DNA, 121 bp, synthetic construct
  misc_feature 1..121: note = Description of artificial sequence: synthetic polynucleotide sequence
  source 1..121: mol_type = other DNA
atattctctacgcccggcaaaagattgttgtcatagcgaaagcctttggtctccaagccatagatctggtgtacattgactttcgagatggagctgggctgcttagacagtcacgagaagg

SEQ ID NO: 2566 - DNA, 121 bp, synthetic construct
  misc_feature 1..121: note = Description of artificial sequence: synthetic polynucleotide sequence
  source 1..121: mol_type = other DNA
attaatgttgagtctcatttcctgcttttacaggatgcagaagaagctgtcagaattgcaagggaaattggtaagtccttaaattaactttggtaggatttctgtgtctttcagcagatac

SEQ ID NO: 2567 - DNA, 121 bp, synthetic construct
  misc_feature 1..121: note = Description of artificial sequence: synthetic polynucleotide sequence
  source 1..121: mol_type = other DNA
tttcttggtatgtttgctcagggctccgaatccaaaagtcagcagcacacagtacccaacgctggggaggtagaggacacgctctgcgaccacgaagcccactcggaagaacaggttactc

SEQ ID NO: 2568 - DNA, 121 bp, synthetic construct
  misc_feature 1..121: note = Description of artificial sequence: synthetic polynucleotide sequence
  source 1..121: mol_type = other DNA
tagtgatagtccttgtcgctaagttaggtgtgaagggagtgcatattctaggaagaaacagccaagctacacaccctccagcaagctccaccttccagcaagctccacccttcagcagatt

SEQ ID NO: 2569 - DNA, 121 bp, synthetic construct
  misc_feature 1..121: note = Description of artificial sequence: synthetic polynucleotide sequence
  source 1..121: mol_type = other DNA
aggcatgaaacaacaacccactcccatacctctcttttatcatccaccatgttccatattatttgaaagtggcgaagatcattgtaacttaaaagctggtcctcctcagtggaataaaaca

SEQ ID NO: 2570 - DNA, 121 bp, synthetic construct
  misc_feature 1..121: note = Description of artificial sequence: synthetic polynucleotide sequence
  source 1..121: mol_type = other DNA
acttactgcatttttaaaactcttaccctcggaaacgtagtaaatctgtccagttcttcgacaaagcagaacatctgcaaactaattgctgacataacaatcaagaggctggcagtaaata

SEQ ID NO: 2571 - DNA, 121 bp, synthetic construct
  misc_feature 1..121: note = Description of artificial sequence: synthetic polynucleotide sequence
  source 1..121: mol_type = other DNA
gatggaagtggacttgtgtatggtaaattttgtgagtgtgacgatagagaatgcatagacgatgaaacagaagaaatatgtggaggtatgtatattggctctgtagaaattaataaaagta

SEQ ID NO: 2572 - DNA, 121 bp, synthetic construct
  misc_feature 1..121: note = Description of artificial sequence: synthetic polynucleotide sequence
  source 1..121: mol_type = other DNA
gctagaaggggggcaccattcttgatgtattatctcctatatcctaggattttgcgctgtgccaagcatacagtagacactccattagtacttgttaaatcaattattaaggtaatgtaac

SEQ ID NO: 2573 - DNA, 121 bp, synthetic construct
  misc_feature 1..121: note = Description of artificial sequence: synthetic polynucleotide sequence
  source 1..121: mol_type = other DNA
gatgagttacatcaaaaatatttgtattgacagggttttaaatgtctgtcatctaccacatttcttgcaaagtcgttcccgctgaaacataggccttcttggcctctttttacagcaaaga

SEQ ID NO: 2574 - DNA, 121 bp, synthetic construct
  misc_feature 1..121: note = Description of artificial sequence: synthetic polynucleotide sequence
  source 1..121: mol_type = other DNA
tcatatgtttatcgctgcactgttcacaatagcaaagccatgaagtcaacctaaatgtttaccactggtctattgggtaaagaaaatgtggtatttatacatcataaaatactatgcagcc

SEQ ID NO: 2575 - DNA, 121 bp, synthetic construct
  misc_feature 1..121: note = Description of artificial sequence: synthetic polynucleotide sequence
  source 1..121: mol_type = other DNA
ctaggttcccttctggtagcttcccaccctgagcctacattcaccatgtctgttgtatagactttttgaaaggcaaatgaatctcaggaccccaaaatcactaagccaaagggaaatgtca

SEQ ID NO: 2576 - DNA, 121 bp, synthetic construct
  misc_feature 1..121: note = Description of artificial sequence: synthetic polynucleotide sequence
  source 1..121: mol_type = other DNA
atgttgaattactccgttaatatatacgatgatggaaacctgctctccattgtgaccagtggaggtatcccatttcagattgaccaatgagatatagatttatgaggtgataaagtggtac

SEQ ID NO: 2577 - DNA, 121 bp, synthetic construct
  misc_feature 1..121: note = Description of artificial sequence: synthetic polynucleotide sequence
  source 1..121: mol_type = other DNA
ttccaaattaccttttaaaatatatggggatttggccacatgttgcccttggaatttaatttccaccttcagatttttgtagcttgcatacattctgtatcttactatgaaggacccatct

SEQ ID NO: 2578 - DNA, 121 bp, synthetic construct
  misc_feature 1..121: note = Description of artificial sequence: synthetic polynucleotide sequence
  source 1..121: mol_type = other DNA
tgctttttggggccatttgtgattaacaaacattccaatggaaacaggaacaacgagagaaaccagagatgtacctaaagatgacagaagggcaatgtgatcagcagaacaggtgacacag

SEQ ID NO: 2579 - DNA, 121 bp, synthetic construct
  misc_feature 1..121: note = Description of artificial sequence: synthetic polynucleotide sequence
  source 1..121: mol_type = other DNA
ggaaagggttccattggtacagcggataaaaagcacccatccattggctctgttgggtcgcagctactactgaggctttctcccatgccccccctcgtggctgttggactccactttgcct

SEQ ID NO: 2580 - DNA, 121 bp, synthetic construct
  misc_feature 1..121: note = Description of artificial sequence: synthetic polynucleotide sequence
  source 1..121: mol_type = other DNA
actttgaatggttaaatattgtttctaatcctccaggctaattgatttgatacatctgttggatcaatgtgcctcctaattcagcaactcttgtgaaaaatgttttagatcaaatataaat

SEQ ID NO: 2581 - DNA, 121 bp, synthetic construct
  misc_feature 1..121: note = Description of artificial sequence: synthetic polynucleotide sequence
  source 1..121: mol_type = other DNA
atttttgtcaagtacaatcactctacaatcaaaaactgaatttatttcttatagcttacgtatgtttgtatcttttaaaccaattatcattatccttcccaacctccctccactcaccctt

SEQ ID NO: 2582 - DNA, 121 bp, synthetic construct
  misc_feature 1..121: note = Description of artificial sequence: synthetic polynucleotide sequence
  source 1..121: mol_type = other DNA
ttaaagcactctcagaaactccaagaaagctgttgattggtcagatttctcacttttgtcccctcaaaacaagattgtcctgaacttataggaaatatactcaaaagtagtatgatttaag

SEQ ID NO: 2583 - DNA, 121 bp, synthetic construct
  misc_feature 1..121: note = Description of artificial sequence: synthetic polynucleotide sequence
  source 1..121: mol_type = other DNA
ctttcaaatcaaagaacagttttaatttttcttagtcagaacacaatatcctgaaaatcagaatagacaggaaacaaaagaaactatcacaacatttctaaaagtgcaatttgctgaccac

SEQ ID NO: 2584 - DNA, 121 bp, synthetic construct
  misc_feature 1..121: note = Description of artificial sequence: synthetic polynucleotide sequence
  source 1..121: mol_type = other DNA
attgttctctggcgcgtgtaattgtctaagttgcaagctagactagctgcatcttttgcatgaagcaccatttttccttgaaagaaaaactgacagaaaacctatggttattcagaggtgg

SEQ ID NO: 2585 - DNA, 121 bp, synthetic construct
  misc_feature 1..121: note = Description of artificial sequence: synthetic polynucleotide sequence
  source 1..121: mol_type = other DNA
gttatgatttttgaccatatatttcaacttcaatttaaaacttgattcttactgttagggcattagtgcattaagcaacatttttatacatcgttccttttttttcagaaattaagcaacg

SEQ ID NO: 2586 - DNA, 121 bp, synthetic construct
  misc_feature 1..121: note = Description of artificial sequence: synthetic polynucleotide sequence
  source 1..121: mol_type = other DNA
actaaaaactcatgaatccaaaggatgttgaggtctgaacaaaagtttgcaatgttaaacgcagtttggaccacatgttcaggtagaaatgcagacatcactatggataccaatgttggtg

SEQ ID NO: 2587 - DNA, 121 bp, synthetic construct
  misc_feature 1..121: note = Description of artificial sequence: synthetic polynucleotide sequence
  source 1..121: mol_type = other DNA
aatgacagaggttttgtctataaaacattagactatgtagactattaactctatggaaatctaataagccatgtttactttatttaacctatcccaagtaattttaggctgctttagccat

SEQ ID NO: 2588 - DNA, 121 bp, synthetic construct
  misc_feature 1..121: note = Description of artificial sequence: synthetic polynucleotide sequence
  source 1..121: mol_type = other DNA
gaaataaggaagtgcaaaaaaaaatagacaggtaaaggtaaaaaataaagcaagagccagtttgaaggagtccacgctgaccagatgtagaacaatttgggcatcaaaataaaggttcaat

SEQ ID NO: 2589 - DNA, 121 bp, synthetic construct
  misc_feature 1..121: note = Description of artificial sequence: synthetic polynucleotide sequence
  source 1..121: mol_type = other DNA
tatatctctcaatactaggttctgcctgtttttcaagaaaagactaattttacagtattgttgctccagaacagctatctacagttaaaatgcagccaatataaaaattctgatactcaag

SEQ ID NO: 2590 - DNA, 121 bp, synthetic construct
  misc_feature 1..121: note = Description of artificial sequence: synthetic polynucleotide sequence
  source 1..121: mol_type = other DNA
gtgatgacacttgactccggtgatgaggttacctttcacaagacctggccaactgagaccggatctccttacaggcttgaagaagtaagcagccatgttggaaaagtcttcatggcaagaa

SEQ ID NO: 2591 - DNA, 121 bp, synthetic construct
  misc_feature 1..121: note = Description of artificial sequence: synthetic polynucleotide sequence
  source 1..121: mol_type = other DNA
aaaccatctggagctctttcttaccttcatggaattataatccaatagtttgattcactgcagttaacctagaggaaaaaaataaaaacatattaatatttctaaatttcctatatacatt

SEQ ID NO: 2592 - DNA, 121 bp, synthetic construct
  misc_feature 1..121: note = Description of artificial sequence: synthetic polynucleotide sequence
  source 1..121: mol_type = other DNA
cccacgctgagggggcagggcccatgctgcactagtggttaaatattttctgtatcaccagagtacatcaacatacatcttgggagttttctgaatctaaacatacactccatttgaaatt

SEQ ID NO: 2593 - DNA, 121 bp, synthetic construct
  misc_feature 1..121: note = Description of artificial sequence: synthetic polynucleotide sequence
  source 1..121: mol_type = other DNA
aaggtcagccatgggagaaggcttagagatgagaggaaaaggacgtttagagcaggaaatgtaaaaagaggaatgggaagagatgagatgagaaagtgggcaagaatctgatcaaagagca

SEQ ID NO: 2594 - DNA, 121 bp, synthetic construct
  misc_feature 1..121: note = Description of artificial sequence: synthetic polynucleotide sequence
  source 1..121: mol_type = other DNA
ctctcaaattgcaggttgcgatagaaaacagtgaatgatattcagaatattgtgcttaaaaggaatgtgatacatgagagagatacataagggaaagagaagccaccagaacacccctctt

SEQ ID NO: 2595 - DNA, 121 bp, synthetic construct
  misc_feature 1..121: note = Description of artificial sequence: synthetic polynucleotide sequence
  source 1..121: mol_type = other DNA
gaaaccaggtgcccctttcatgatttaacacctttgttaactgtctacaactggccagaaactgtgctgctataattagtattattttccttgtgccgtatgcctgtgtacctggtgtata

SEQ ID NO: 2596 - DNA, 121 bp, synthetic construct
  misc_feature 1..121: note = Description of artificial sequence: synthetic polynucleotide sequence
  source 1..121: mol_type = other DNA
caactcctaaaattcagccatgctttgattaattacttcatacaatgactttgcaaattatagttctatgtgatttatgtcatttttagcttcaatcagattttttttttttggttgctct

SEQ ID NO: 2597 - DNA, 121 bp, synthetic construct
  misc_feature 1..121: note = Description of artificial sequence: synthetic polynucleotide sequence
  source 1..121: mol_type = other DNA
cactgtcaaatgcctagttccccctgtttctgaaggattaaaatacttgaaggccccatgttagtttcccatgatgccatgagatagtgccataaactcactggcttaaaacaaaagaagt

SEQ ID NO: 2598 - DNA, 121 bp, synthetic construct
  misc_feature 1..121: note = Description of artificial sequence: synthetic polynucleotide sequence
  source 1..121: mol_type = other DNA
tcttgttctatttccatgaatacctctaacatctattacctgcattggttacattgctacagagccctggtaccactcttgcatacacaaagccatcaaaagcaggctttattaattagag

SEQ ID NO: 2599 - DNA, 121 bp, synthetic construct
  misc_feature 1..121: note = Description of artificial sequence: synthetic polynucleotide sequence
  source 1..121: mol_type = other DNA
ggatatatacaaattgtgatatatacatacaatgggatactactcagcctggaaacagaacgacatattgatacatggatgaaactttgacaaacatgactgaaccttgaaaacattattc

SEQ ID NO: 2600 - DNA, 121 bp, synthetic construct
  misc_feature 1..121: note = Description of artificial sequence: synthetic polynucleotide sequence
  source 1..121: mol_type = other DNA
tggagtaactaagaatgggcaaagcactggtaattttcactcgcaatcccacagagatatcacttggcaaacaactttccaagtgtcagggcatatcttattcttctggatgatgaatata

SEQ ID NO: 2601 - DNA, 121 bp, synthetic construct
  misc_feature 1..121: note = Description of artificial sequence: synthetic polynucleotide sequence
  source 1..121: mol_type = other DNA
aggaggtcctcagctcccactgtggtgctgcaccatgggcaacctggccttccctggtgcctccatttttacaacaccaagcaacctctagggggaaaagatggatctttccatggaagct

SEQ ID NO: 2602 - DNA, 121 bp, synthetic construct
  misc_feature 1..121: note = Description of artificial sequence: synthetic polynucleotide sequence
  source 1..121: mol_type = other DNA
gtacttctccaaagaagacatacaacggcccacaatcgtgacaaaatgctcaatataacaatcatcaaagaaatgcaagttacaaccacaatgagatatcatctcataccagtcagaatgg

SEQ ID NO: 2603 - DNA, 121 bp, synthetic construct
  misc_feature 1..121: note = Description of artificial sequence: synthetic polynucleotide sequence
  source 1..121: mol_type = other DNA
gcattctccaccgtgaagcactggcccgaggacgcgccctgggggtaacaagtctccaggcgccacacgggcttggcagagtttcctagaaaaagagccttgccccggtcgtctttgcctc

SEQ ID NO: 2604 - DNA, 121 bp, synthetic construct
  misc_feature 1..121: note = Description of artificial sequence: synthetic polynucleotide sequence
  source 1..121: mol_type = other DNA
ttgtcatctcttatcttttcaattcgtggaaaacgcaaggtgcagccagttttatacatatcactgggtacgatctctgctgctttaatctgaacaatgacagaattacaaggttcaatgt

SEQ ID NO: 2605 - DNA, 121 bp, synthetic construct
  misc_feature 1..121: note = Description of artificial sequence: synthetic polynucleotide sequence
  source 1..121: mol_type = other DNA
aagtatgacccttctgatggaggctggcttgaagtttgcttaaaagggattccactcacgataggtggaacaaagagacccccacagaaggatggactgcccagaggctaaaaggtgagtc

SEQ ID NO: 2606 - DNA, 121 bp, synthetic construct
  misc_feature 1..121: note = Description of artificial sequence: synthetic polynucleotide sequence
  source 1..121: mol_type = other DNA
tcatgtggttatttgtcttgttgaagtattattttgtgcagatgccaaaattaaggcagttctcctggtataccacattcagatgagtgacatagactggtgacttagaagaatattttac

SEQ ID NO: 2607 - DNA, 121 bp, synthetic construct
  misc_feature 1..121: note = Description of artificial sequence: synthetic polynucleotide sequence
  source 1..121: mol_type = other DNA
agatgcaacaaaaggtctgtgtaagcagcagtctcaggacagcatccctgaaaaccccatgatgagcggttccaccaaacccgagcaggtaatcatgctttcactgtgtgtctaccagtac

SEQ ID NO: 2608 - DNA, 121 bp, synthetic construct
  misc_feature 1..121: note = Description of artificial sequence: synthetic polynucleotide sequence
  source 1..121: mol_type = other DNA
gatccttctataaaagttatcagaggatttttagcacgccagcacctgcttcagagaataagcatcagacaacaagaggtgacttctatcaatagctttctgcagaacacagaggacatgg

SEQ ID NO: 2609 - DNA, 121 bp, synthetic construct
  misc_feature 1..121: note = Description of artificial sequence: synthetic polynucleotide sequence
  source 1..121: mol_type = other DNA
ccaggttaccccaccagacaaggaaccatgatgagctgaagttcttgctgagattaaagaaatatgaactgggtattggggaaaccaatgtataaatacaagttttgactctgtgtctaga

SEQ ID NO: 2610 - DNA, 121 bp, synthetic construct
  misc_feature 1..121: note = Description of artificial sequence: synthetic polynucleotide sequence
  source 1..121: mol_type = other DNA
gtcttttctgggagaagcacacggctgctgaaatggtagataaaacaggtgcacaaggatgacccatagtgtaacaaatgtgcatattcactttaagaacctagttaggatgttagcttgt

SEQ ID NO: 2611 - DNA, 121 bp, synthetic construct
  misc_feature 1..121: note = Description of artificial sequence: synthetic polynucleotide sequence
  source 1..121: mol_type = other DNA
aaagaaaactgcaagcagcttcgggctgaaacagtgctgagcgtcttcttttaatgatactctctgacatgtgacatcctggtgataaagccagacagatcttcactctgaaaaagaaagg

SEQ ID NO: 2612 - DNA, 121 bp, synthetic construct
  misc_feature 1..121: note = Description of artificial sequence: synthetic polynucleotide sequence
  source 1..121: mol_type = other DNA
ccacggccgtgacactcgatgaatggcgcacttctaaactcctccaggcaggagccgggggacgccagggcttggccagagccttctgcaccagcgctggtgtgctgcagaacagatgcga

SEQ ID NO: 2613 - DNA, 121 bp, synthetic construct
  misc_feature 1..121: note = Description of artificial sequence: synthetic polynucleotide sequence
  source 1..121: mol_type = other DNA
ttcttgcagggaagccgaggcctggatggctatcaagggcctgatggaccccggggacccaaggtgagcccgtttctcatgtctttgccacttatggtgtctcgcccaccctggctggcct

SEQ ID NO: 2614 - DNA, 121 bp, synthetic construct
  misc_feature 1..121: note = Description of artificial sequence: synthetic polynucleotide sequence
  source 1..121: mol_type = other DNA
agaaaataatttccccactgctcgcactgatgaaagacttcgcactgtgcaatttcgttttcatgatgtggaaaagctaaatctatcccacctgaatggatatccagttgacttccaaata

SEQ ID NO: 2615 - DNA, 121 bp, synthetic construct
  misc_feature 1..121: note = Description of artificial sequence: synthetic polynucleotide sequence
  source 1..121: mol_type = other DNA
gcacgccccacgtcccccgcacctcagacccgctttccccgactcccactggacagccggggaaaatggcgccttaaagcgttcgcacccaccttgccgaaatgcgcggcccagtgcacgg

SEQ ID NO: 2616 - DNA, 121 bp, synthetic construct
  misc_feature 1..121: note = Description of artificial sequence: synthetic polynucleotide sequence
  source 1..121: mol_type = other DNA
ctcggccttgtccgcggcgtccccgctgccggccacggcgctcagcgcttgtgctctgtattgcaggtctaccccgagccccggagcgagagcgagtgcctgagcaacatccgcgagttcc

SEQ ID NO: 2617 - DNA, 121 bp, synthetic construct
  misc_feature 1..121: note = Description of artificial sequence: synthetic polynucleotide sequence
  source 1..121: mol_type = other DNA
agagtggctttgttttcgggggtgacacttgtgtatgtctgtgcttttgcagtgtgtgacgttcctctgtatgacatttgtgactacaacgtctccagggaccgatgccaggagctcgggt

SEQ ID NO: 2618 - DNA, 121 bp, synthetic construct
  misc_feature 1..121: note = Description of artificial sequence: synthetic polynucleotide sequence
  source 1..121: mol_type = other DNA
gagcctcccagggagaataatacacctcctgtttgtttgaaataaactaggcacaagaaatgagattaatgatatgtccagacccagtgtaatcactaaaattagcagaggcaagttgcat

SEQ ID NO: 2619 - DNA, 121 bp, synthetic construct
  misc_feature 1..121: note = Description of artificial sequence: synthetic polynucleotide sequence
  source 1..121: mol_type = other DNA
cttcttccgcctgggcttccgcgtgtgccatctcctttcccctttaccacctgctgcactttgcagaggattttctagacgcagagttttagtaagtgcccagggctggacaggctgtgag

SEQ ID NO: 2620 - DNA, 121 bp, synthetic construct
  misc_feature 1..121: note = Description of artificial sequence: synthetic polynucleotide sequence
  source 1..121: mol_type = other DNA
aaaattgaacagtttaagacaggagggaactggctcccatgagggcgtcgggttggacagattccctctgagcatgtcctgttgccgtgatcacacagttgtgggctcgcaggggactgct

SEQ ID NO: 2621 - DNA, 121 bp, synthetic construct
  misc_feature 1..121: note = Description of artificial sequence: synthetic polynucleotide sequence
  source 1..121: mol_type = other DNA
cttgttgaaatagaaaaagtgtgtgtgtgtagaagtagcctacagataatttcttgtcccgatggtctcaggggtaaaaaaaattgtttgtgtcaaatatcagctattcttccctaatatt

SEQ ID NO: 2622 - DNA, 121 bp, synthetic construct
  misc_feature 1..121: note = Description of artificial sequence: synthetic polynucleotide sequence
  source 1..121: mol_type = other DNA
gtgggattctctctgcagaagaacagagaattctctctgggtgtggtctggcctcagagccggtgtgtgccatcatccctccctccgcttcctgcccctgcagattcctgcaggcactggg

SEQ ID NO: 2623 - DNA, 121 bp, synthetic construct
  misc_feature 1..121: note = Description of artificial sequence: synthetic polynucleotide sequence
  source 1..121: mol_type = other DNA
cgactctaacgtgatcttgtgtgcttctcccaagatgaaattctggtccaggagattttagatctgaataaaacaacaccgagcgaaatgccaagtacagcatcaacattatcaacaccgt

SEQ ID NO: 2624 - DNA, 121 bp, synthetic construct
  misc_feature 1..121: note = Description of artificial sequence: synthetic polynucleotide sequence
  source 1..121: mol_type = other DNA
tggttctgagaattaccatgaattattagagaatttacaattctctcctggcattgaggtcaaaatttccaatgatggtaaatgcaacccagtaattaccccttcccaagtccagctgtaa

SEQ ID NO: 2625 - DNA, 121 bp, synthetic construct
  misc_feature 1..121: note = Description of artificial sequence: synthetic polynucleotide sequence
  source 1..121: mol_type = other DNA
agtgccagacgcgcgtgggaaagacgcgcgtgggaaagacgtgcatgggaaagtcgcgcgtgggaaagtcgcgcgtgggaaagtcgcgcgtgggaaagacgtgcgtgggaaagacgcgcgt

SEQ ID NO: 2626 - DNA, 121 bp, synthetic construct
  misc_feature 1..121: note = Description of artificial sequence: synthetic polynucleotide sequence
  source 1..121: mol_type = other DNA
aactcaccataaggcaagacacacttgcgccctggtcatcacccttgctcttcctctctgtaggtgtggctatttacacgggaatggaaaccaagatggcattaaattatcaatcaaaatc

SEQ ID NO: 2627 - DNA, 121 bp, synthetic construct
  misc_feature 1..121: note = Description of artificial sequence: synthetic polynucleotide sequence
  source 1..121: mol_type = other DNA
atcctttgtgtgcccgggaagggcgttccgggagccgggtcgggggctcctgactcgcactgggcagcatgacggtgcgccggctgtcactgctgtgccgggacctctgggcgctgtggct

SEQ ID NO: 2628 - DNA, 121 bp, synthetic construct
  misc_feature 1..121: note = Description of artificial sequence: synthetic polynucleotide sequence
  source 1..121: mol_type = other DNA
ggaagagggagacagagtaatcacttacttggaccacagcacacagtaagtaccgtttgctcgctgagcgttcgtatcttcaccatggctggaaggttctcctggctggttattgaaataa

SEQ ID NO: 2629 - DNA, 121 bp, synthetic construct
  misc_feature 1..121: note = Description of artificial sequence: synthetic polynucleotide sequence
  source 1..121: mol_type = other DNA
agcaccgtgctcctcggcatgctggtgacgcaggacgtgcagctcgggctcttcatggccgtcatgccgactctcatacaggcgggcgccagtgcatcttctaggtaaacgctttgtgtac

SEQ ID NO: 2630 - DNA, 121 bp, synthetic construct
  misc_feature 1..121: note = Description of artificial sequence: synthetic polynucleotide sequence
  source 1..121: mol_type = other DNA
tggaagtggctggaagcccagcccatgggggaggactggttcctggacttcagggtcctagggaaagggggcttcggggaggtgtcggcctgccagatgaaggcgaccggcaagctgtatg

SEQ ID NO: 2631 - DNA, 121 bp, synthetic construct
  misc_feature 1..121: note = Description of artificial sequence: synthetic polynucleotide sequence
  source 1..121: mol_type = other DNA
ggggtggggtacttgtacgatgtctaccagacagaggtgagcaggagcactgagattcatgtgggttttgctcagctaaccccgccgaccccacgcggttttccctgcacataggcgtggt

SEQ ID NO: 2632 - DNA, 121 bp, synthetic construct
  misc_feature 1..121: note = Description of artificial sequence: synthetic polynucleotide sequence
  source 1..121: mol_type = other DNA
agatcattctggatccagactttctgccaacgtgtctcgggtgcagagtttccacttaacgttgacccatgaagataccaacctcaaaataaaacacttcatcgaactggggattgttggt

SEQ ID NO: 2633 - DNA, 121 bp, synthetic construct
  misc_feature 1..121: note = Description of artificial sequence: synthetic polynucleotide sequence
  source 1..121: mol_type = other DNA
gaccacttatgtgaatttttccctccagaagaaccccaggacatctattggttggctcagtgtctttacctgacagcacaatatcacagagccgcccatgcacttcggtcacgaaaactgg

SEQ ID NO: 2634 - DNA, 222 bp, synthetic construct
  misc_feature 1..222: note = Description of artificial sequence: synthetic polynucleotide sequence
  source 1..222: mol_type = other DNA
ttcagtcatcagcatcttcactggagtctgagttagctggcatcataggatcatcaatgagtgagaagtccctttctgagctatcatagccctgagataagtcatcatcatcttcttcatcctcatcgtcatcctcctcaggttgcagtggtggcaaccgcaaggtagtaccagaggcggtagtcactggtgaagaggggtagccaggggctctcaagcctg

SEQ ID NO: 2635 - DNA, 343 bp, synthetic construct
  misc_feature 1..343: note = Description of artificial sequence: synthetic polynucleotide sequence
  source 1..343: mol_type = other DNA
gatggtgatggtggtgatggtgggggtgggggtggtggtggtggtgatgaagcatggtgctggagtctacatgaggggatgatggtgcaccacccatcacaaatggcataaaaggcaaagatgcagaagtggcactgctgtgacccaaagatgacacagactgtaggccactactgctgtgttggaacgtgttatgcagagatagagacccagtgcttccaccctgcatgagggccatcatcttagaaaggtctggtcgcatcctacgggcccgcttcttgctgctctctggtgcaataggccctggcaaaacccggttgaacaccgtttcagtgtgatgacc

SEQ ID NO: 2636 - DNA, 121 bp, synthetic construct
  misc_feature 1..121: note = Description of artificial sequence: synthetic polynucleotide sequence
  source 1..121: mol_type = other DNA
acctttttcccatttctagagttagctgtctgtactggttccattcccaaacagttcaattctgccttattattttttttacatctttgccacttctgttttctgcgatcctccatatact

SEQ ID NO: 2637 - DNA, 181 bp, synthetic construct
  misc_feature 1..181: note = Description of artificial sequence: synthetic polynucleotide sequence
  source 1..181: mol_type = other DNA
ccgctagaaatcggggatcaacagcaaactctggatgaccctgtaaccacatctccagttcagcccggcgaggggcatcctcacccaccagcaaagtaccatccaccttattgatgacagggatccgggtctccaggtccacatcaaggtgattaggctcttccatgcactccacctccag

SEQ ID NO: 2638 - DNA, 121 bp, synthetic construct
  misc_feature 1..121: note = Description of artificial sequence: synthetic polynucleotide sequence
  source 1..121: mol_type = other DNA
tcacctctactagcttctttctgttccccttcttcttatgaaacagtggatgtccatctcccattactccattcgccatcaacttgtgcttctggaatgttaacttcaatccttcctccta

SEQ ID NO: 2639 - DNA, 304 bp, synthetic construct
  misc_feature 1..304: note = Description of artificial sequence: synthetic polynucleotide sequence
  source 1..304: mol_type = other DNA
catctttgatttgaactgtaaactccttttcatccatgcctcggcgaagtttggtgaactgggctgccgctgtgctgactgcagatgcttcctcctctgccatggaagctgcactactacttcgtggtgtggggactggagagtcaccatattctccaggagtcaatgagggactgtctagcaagtggttgcctggccccaaaattcctcctgttaccatttcctggctcctacggctagaaggccacttccctgagagtacagcctggcagacgaggtcaatacggtttatcaggacacgatc

SEQ ID NO: 2640 - DNA, 150 bp, synthetic construct
  misc_feature 1..150: note = Description of artificial sequence: synthetic polynucleotide sequence
  source 1..150: mol_type = other DNA
ccttgggccactcagaggctctttgtctttcctgcagtagcagaagctcaggggtcatttgttctccatcttcatttgggaatccatcttgggacatagtgagggacaggagactctcttcatcatagagctttgagcgggactggtcag

SEQ ID NO: 2641 - DNA, 360 bp, synthetic construct
  misc_feature 1..360: note = Description of artificial sequence: synthetic polynucleotide sequence
  source 1..360: mol_type = other DNA
cttagcttctcttccttctcatcctcactctcatcagtgctggagctggagctggatgaggatgaggaagaagaagaagatggtgacagcttgctcaagtccagctcagagtccgaatcatcctcatcctccagtttgactggtggaacactccgggaaaccagaggggtagtatcagagggggatactcgcatctcatagtcttgtggggttggtcggctcctggccaccacctcgtgctctagctttaaagtcagactctccagactggggacctgggtagctgtctcctcgggtgacttttcaacaggagcatctgggcgcaggggcagtggtgaggcagtgcgtgaggtatactgc

SEQ ID NO: 2642 - DNA, 361 bp, synthetic construct
  misc_feature 1..361: note = Description of artificial sequence: synthetic polynucleotide sequence
  source 1..361: mol_type = other DNA
tggtgcagcagtggagtagagcagcgtgacaaggatggagctggtgctcctgcttgatggttctgcatataattcatacgggcagccagaaaagagaagtctgggtcctgcatgatgttgcagtctgtttggctcaccccatggcgggctgcccctcttagaagctccccatcatgccgaacaggctcccaccatttgggcaattcaggaccaggaggctgacacaatgccagccgatcttccaaaagggggtggcataaaacttgttcccgtaagcgccgaagcaattctatacggtagagagtccgtgaggctctctcctcagtgatgggctcaatgaacaggttagggtcggggggtt

SEQ ID NO: 2643 - DNA, 210 bp, synthetic construct
  misc_feature 1..210: note = Description of artificial sequence: synthetic polynucleotide sequence
  source 1..210: mol_type = other DNA
ccatctccagctgctgggggaaggcggcatacttggcggcacatggccacaaagccatggaagtacttggtaaggctttcatctgtctttttgtctagtcgagcaaaagtgcggaagcgatcccaatggaactgcatggtgtcagggtcatattccacaccaaacgtagacaccactcgataaaaatcagtttgttcacgccttgtccat

SEQ ID NO: 2644 - DNA, 209 bp, synthetic construct
  misc_feature 1..209: note = Description of artificial sequence: synthetic polynucleotide sequence
  source 1..209: mol_type = other DNA
ccgttgttgtttctcccgccgtgcaatttctttcagcttgaaggctgcttcacaacgccgccttcgccggtccccacgttctgcagcctctatcttcatttgttctctcttgtagctgcgctgatacgctgttactagacgccgaagcctagctgttagggcagagcccggaggccagaataaatggcctggctgttgggtcacctggg

SEQ ID NO: 2645 - DNA, 121 bp, synthetic construct
  misc_feature 1..121: note = Description of artificial sequence: synthetic polynucleotide sequence
  source 1..121: mol_type = other DNA
cacagaattatactagttgacctagaagtttaccttcatctccatcaatcactgagatctcctcatccatcatcatcaagggatcaccctagagaaggagatccacccaataggatggagc

SEQ ID NO: 2646 - DNA, 121 bp, synthetic construct
  misc_feature 1..121: note = Description of artificial sequence: synthetic polynucleotide sequence
  source 1..121: mol_type = other DNA
agactcaaatgagaattccttacctcatcatcttggtcctttgggggaccttggagtggtttatattcaggatcttcacaatctttatcaaagtcaaccctaaaattatggagaggcacaa

SEQ ID NO: 2647 - DNA, 121 bp, synthetic construct
  misc_feature 1..121: note = Description of artificial sequence: synthetic polynucleotide sequence
  source 1..121: mol_type = other DNA
ctactatgtcagagaagttatccaacactcgatgttctgctgcaattgctttgtcatctggtcggccagccttttctaggaaacataaggctgggtctgccctcatggtattatatttctc

SEQ ID NO: 2648 - DNA, 121 bp, synthetic construct
  misc_feature 1..121: note = Description of artificial sequence: synthetic polynucleotide sequence
  source 1..121: mol_type = other DNA
gatacgtaccatgtttaaagactccaatgagcagcgacttgtcagcctcactgtcccaccaagttgttggaacctccagttgatccactactgggaaccatatgtcaatctcactaaaggt

SEQ ID NO: 2649 - DNA, 121 bp, synthetic construct
  misc_feature 1..121: note = Description of artificial sequence: synthetic polynucleotide sequence
  source 1..121: mol_type = other DNA
tatagcagaattttacctggcaatcgcaccccctaacaccttttctgcttggtctccaataacctcctgcctcaggtagtatagcattcgtacccgcaacagtaccctagaaaggacagag

SEQ ID NO: 2650 - DNA, 158 bp, synthetic construct
  misc_feature 1..158: note = Description of artificial sequence: synthetic polynucleotide sequence
  source 1..158: mol_type = other DNA
cttgttacactgatgtttcaagtgcttcttataactttcatcttggaacaaagtgtcagggttatatttccggatccaatctgccttatggatatcaaaagtgctttgtgactttactttttttcctttgcgtccacgaggcacagggatagatagac

SEQ ID NO: 2651 - DNA, 201 bp, synthetic construct
  misc_feature 1..201: note = Description of artificial sequence: synthetic polynucleotide sequence
  source 1..201: mol_type = other DNA
cctgaatgattctgcaattcttttgtcttgccattttcagctgggctaatcaagtcccagatgaagcctttaatattttcatccccacggtagtgtagaagacagtacacgagaatggcccgacaaatggtctccacatctcgttcagtcatacgtcgcttgaagcgtccatgagataaaatatctcgccatcgtccccaa

SEQ ID NO: 2652 - DNA, 198 bp, synthetic construct
  misc_feature 1..198: note = Description of artificial sequence: synthetic polynucleotide sequence
  source 1..198: mol_type = other DNA
cccatataccaggagatgcttttccacccgaaagcagtcagtgcgcccataggcatgatgacggtcatgtctgcgggagcgtggccgctcatcatcctcactttccaaatcagagaattccaccaggtcatcatctttcagagtgctaaagtggcgcgtttgttttcgtactctaggtgtgtcaattaccaaattatt

SEQ ID NO: 2653 - DNA, 121 bp, synthetic construct
  misc_feature 1..121: note = Description of artificial sequence: synthetic polynucleotide sequence
  source 1..121: mol_type = other DNA
ctcaccttgctgttgagcagatccatgtctaggtcagcctttttggcccacttttgccaaaagttggggtcatccaaagaaatatctgtcctgttttcagaagcaacaaagcttgcctaga

SEQ ID NO: 2654 - DNA, 181 bp, synthetic construct
  misc_feature 1..181: note = Description of artificial sequence: synthetic polynucleotide sequence
  source 1..181: mol_type = other DNA
ccttagcaaaggtggaaccttttccttcagattcaatggtgatggttgtagttcgtcttaacaagatctggtcaatgtcctcttcacaaaacttggagccttcatcatcttcctccatgatggctgcatatgctccttttcttaaaagatcttcaatctccttcttagagaactgttggat

SEQ ID NO: 2655 - DNA, 169 bp, synthetic construct
  misc_feature 1..169: note = Description of artificial sequence: synthetic polynucleotide sequence
  source 1..169: mol_type = other DNA
ctccagtaatgttgccatcccgaccactcatggattgaagcacagccttatccaaccccaacttgaggctggccttatcaaacatctctctctcgtaggaattacgagtgatgaggcggtacaccttcacagctttgctctgcccaattcgatgacatcgtgcctgggc

SEQ ID NO: 2656 - DNA, 197 bp, synthetic construct
  misc_feature 1..197: note = Description of artificial sequence: synthetic polynucleotide sequence
  source 1..197: mol_type = other DNA
cctgcaggtcattttgtggattccagtctgaatcaaagatgatgcaggtatcagcagctgtaagattaataccaagtccaccagcccgggtacacagtaagaagacaaagcggtctgagtcaggcttgctgaagcggtcaatggcagcctgtcgaaggttgcctctaactcgcccatcaatacgttcatataagtac

SEQ ID NO: 2657 - DNA, 212 bp, synthetic construct
  misc_feature 1..212: note = Description of artificial sequence: synthetic polynucleotide sequence
  source 1..212: mol_type = other DNA
cctcctctggattaaataatcctctaggatgtctaggcagcgcaccatctgagagaagatcagaactttatggccaccagctttaagctttggaagcaacttgtcaataagaaccagtttgccggctgaacgaaccatggcctgcaggtgaaagtcatgaggtataatatggcaagcttcacggaattctgttaggattttttcttcagcac

SEQ ID NO: 2658 - DNA, 257 bp, synthetic construct
  misc_feature 1..257: note = Description of artificial sequence: synthetic polynucleotide sequence
  source 1..257: mol_type = other DNA
ccattgatgagatatgggtggttgcagcacttgcgcaactccatcattgtgttaagtagattaggcatgttggtatgacctgcccctttggaaaggaaggagaaattcttctccaaaatagcccgatagtatttcttctggatattagtcagctctacttcaataattgtttcctgtttgggtgccaagtttttttcaacatcctctttgagtcttctcagcatcattggcttaagaatggcctgtagcttttgaac

SEQ ID NO: 2659 - DNA, 145 bp, synthetic construct
  misc_feature 1..145: note = Description of artificial sequence: synthetic polynucleotide sequence
  source 1..145: mol_type = other DNA
cctgttcctctgtcttgagatccccaaagtccttgagaaactctgattctgagggaaattgtgacggttccaagaaatgaagcaagctaaacagttcttctacagtattttgcaatggtgttcctgtgagtagcaccttgtgttc

SEQ ID NO: 2660 - DNA, 178 bp, synthetic construct
  misc_feature 1..178: note = Description of artificial sequence: synthetic polynucleotide sequence
  source 1..178: mol_type = other DNA
ccaggtccatgtgcttgagactatcaagcagcttgcaattacggtttttcagtcgatgggcttcatcaatgataacacaacgccattcaatttcacgaagctcaggacaatctgacaaaatcatctcaaaagtggtgatcagagcgtcaaacttgtatgcgcctgggatgaggcgtcc

SEQ ID NO: 2661 - DNA, 121 bp, synthetic construct
  misc_feature 1..121: note = Description of artificial sequence: synthetic polynucleotide sequence
  source 1..121: mol_type = other DNA
cccgtgaatctttgcagtacatttcatactgttgaatcatctgcctgctggccagactgccatggtacacaatagtgttcatttctgtccatgtattaaattctcgctcccagttagtaat

SEQ ID NO: 2662 - DNA, 121 bp, synthetic construct
  misc_feature 1..121: note = Description of artificial sequence: synthetic polynucleotide sequence
  source 1..121: mol_type = other DNA
ggacagtggggcaatgaccaagaagggaccatggatgcccacattatatacttcctgcaagaaggcaatggactgaatagttttgcccaatcccatctcatcagccaggatgcagttctgc

SEQ ID NO: 2663 - DNA, 121 bp, synthetic construct
  misc_feature 1..121: note = Description of artificial sequence: synthetic polynucleotide sequence
  source 1..121: mol_type = other DNA
ctgttataccaattaaagagcagccaattaaccccttccaactgatattcccgtagctggtttctgtttttatattcatgtgatagctccaatttcttccaggcacttgcctgcggacgat

SEQ ID NO: 2664 - DNA, 139 bp, synthetic construct
  misc_feature 1..139: note = Description of artificial sequence: synthetic polynucleotide sequence
  source 1..139: mol_type = other DNA
ccacccttttgagttctgggtgccttgactgaatccgtttaaattctcgaatcttgccctcatcaacatcttcttttagctcccatgtgctatcctcatagggcagagagcaccatttcaccaggtagtaaataacggg

SEQ ID NO: 2665 - DNA, 121 bp, synthetic construct
  misc_feature 1..121: note = Description of artificial sequence: synthetic polynucleotide sequence
  source 1..121: mol_type = other DNA
ccatgcctcaacaactcacctccccattgtccttgtcaatactgtgagactcatccaatatcctatccacctctacgtagtctggattaaagggctcttcatcctagatgagttaggaaac

SEQ ID NO: 2666 - DNA, 121 bp, synthetic construct
  misc_feature 1..121: note = Description of artificial sequence: synthetic polynucleotide sequence
  source 1..121: mol_type = other DNA
acctcatggaagaagtgtctcatctgagccattttggttttgaagcgctttaatttttgatgtatcctcttatccttctctagttgggagatagtagcccattcacaatgcagataggagc

SEQ ID NO: 2667 - DNA, 121 bp, synthetic construct
  misc_feature 1..121: note = Description of artificial sequence: synthetic polynucleotide sequence
  source 1..121: mol_type = other DNA
tggggtgacaagctttttgcacagatcacgtactagttcttgtacttgacaaagaattcttctgcttcagtatattgtccagaagggagctaagaaaaaagaaataaattagtcactagtc

SEQ ID NO: 2668 - DNA, 121 bp, synthetic construct
  misc_feature 1..121: note = Description of artificial sequence: synthetic polynucleotide sequence
  source 1..121: mol_type = other DNA
taataataataataaaaagccctcacctccttcttcacaatccgcatagaaagcactttgtctacaatggctgcatcttcttcactgggattctcctgcagcaaaagatgcagtcagtcaa

SEQ ID NO: 2669 - DNA, 184 bp, synthetic construct
  misc_feature 1..184: note = Description of artificial sequence: synthetic polynucleotide sequence
  source 1..184: mol_type = other DNA
ccacaaagaactgcatggaaggcaaagtctcgccatctggttcttgcactggttcagggaggataggctcaggttttattggaccagttacatccacctcttcttcttcttcatcatctgtgatctttatatccaggtcctctgtatatttttttcgcttaacttggcggtttgagcgtctctt

SEQ ID NO: 2670 - DNA, 121 bp, synthetic construct
  misc_feature 1..121: note = Description of artificial sequence: synthetic polynucleotide sequence
  source 1..121: mol_type = other DNA
tacctgaatgctgctttcttcatcttctcgaggtgactgtgcaggcatgacttccacatctgaattatcagatgaggtattacgttttctcttcttacccactacaggagtgatggtgcta

SEQ ID NO: 2671 - DNA, 387 bp, synthetic construct
  misc_feature 1..387: note = Description of artificial sequence: synthetic polynucleotide sequence
  source 1..387: mol_type = other DNA
cttgagcttgctcttgccctttgttttggaggcaccagatgttttactcttctttggcttctcctctttcagcctctccccagcactcttcttcctgcgtttcttctcgccttcctcctctggccgaacgctgggcaactcgtcctcatttaagactcgaggtatgttctgctcaccgcgggcacgggctctcgcaatggcctctgctacaatccgatttgctttctcttgcttcttctggtgttccaatctgcggttttcctccattcctgtctttccccccgaatgaggagcagagcttgctggtgatgacaaagctgccacttcactggcactcagaactttaactacagagagcccagaagaggccccttgggaagagccagc

SEQ ID NO: 2672 - DNA, 373 bp, synthetic construct
  misc_feature 1..373: note = Description of artificial sequence: synthetic polynucleotide sequence
  source 1..373: mol_type = other DNA
cctgtggctgcagtaccaccttgactggtactgaaagtctttgtcctgggctttgtcctggtcccattatctgagcctgctgtacagaggacagagtcactggctgggtggagggtggctgctggggctgtggctgcgatgatggtggttgtggtacaatctggattttttgctgtggctgctgcacctgcagctggatagttactaccttggcaggctgcccttgggcattcttggcttgagtcagggctgccagctggttgccctgtaacactatcttgcctggtagactccctagcacaacatgccgatgtccttggggacctccagactgtggctgctggaggaccagggtgatgcgtttcgattcacc

SEQ ID NO: 2673 - DNA, 361 bp, synthetic construct
  misc_feature 1..361: note = Description of artificial sequence: synthetic polynucleotide sequence
  source 1..361: mol_type = other DNA
cctgggtaggtgtagaggtcagtgtaactgcaggcttcagtgggggccctgtggccccagggtttccagcaggagctgaacccttaactggctggaggaccagctgctttactggtcggctgggctggacaatgcgctgaacagcagcctggttcccagggaccttggcggccaacactgtattaccagagacaatggaaacacctggtcgaaggggtgtgccggttagcactttggtaaaagtgacttttccaccattggctgtgcctgccaccaggggctgagctgtgctggtgataccttgggcctgaatttgtgccacatgggcaccagtgactgaggagcttggtggggccttaag

SEQ ID NO: 2674 - DNA, 121 bp, synthetic construct
  misc_feature 1..121: note = Description of artificial sequence: synthetic polynucleotide sequence
  source 1..121: mol_type = other DNA
gataacaatcttaggggctgactgaggtggctgccctccagcactactggaggagacagctgtggcagagacacccatgaaaggattcccttggctcaggatctcctggctcttggagact

SEQ ID NO: 2675 - DNA, 241 bp, synthetic construct
  misc_feature 1..241: note = Description of artificial sequence: synthetic polynucleotide sequence
  source 1..241: mol_type = other DNA
tgcaaaagtcctgatgttggcgtcgatgtctgtaagacaggttgggctggctgctcctggctggcaggctgagtggtataatcatgcaaggttatggattctggagctggagctgtggattctttggaaagttctgtgggagctgtttcctctggtggagggaccagttcacttgctgatgaattccccacatcaccacctccaccatcctggttcatctgatccaaggagtccagagagc

SEQ ID NO: 2676 - DNA, 121 bp, synthetic construct
  misc_feature 1..121: note = Description of artificial sequence: synthetic polynucleotide sequence
  source 1..121: mol_type = other DNA
ttggcagtccaagggcttcctcaatggggtcttgtgtgacctggttaaagctgtcatcagtcagagagtccaggccaaataaatttgggtcatcgaacagatccatgatggggtctgccat

SEQ ID NO: 2677 - DNA, 121 bp, synthetic construct
  misc_feature 1..121: note = Description of artificial sequence: synthetic polynucleotide sequence
  source 1..121: mol_type = other DNA
agaggactactcttcaagtatagaggcaagaaacaagtgcatgtcagattgtcctgaccttcatggagcaagatggctacgtcttcagaggaagatggtggaactcctgttgtaggaatac

SEQ ID NO: 2678 - DNA, 121 bp, synthetic construct
  misc_feature 1..121: note = Description of artificial sequence: synthetic polynucleotide sequence
  source 1..121: mol_type = other DNA
gatagatcaggcctcaatgaacagattaataaaagaaaaacacaggagaaagtcatgataatcacattatagaggcttataaaataagaacaattcctccaatttagaagttggaggaatt

SEQ ID NO: 2679 - DNA, 121 bp, synthetic construct
  misc_feature 1..121: note = Description of artificial sequence: synthetic polynucleotide sequence
  source 1..121: mol_type = other DNA
ctgtgcagagacagctgtgtcacccatctccactgattctgcaagggacttgtcataaatactgaataaggccaaggttcaggctctttagagtggttacttccctaggaatagaagtgtc

SEQ ID NO: 2680 - DNA, 121 bp, synthetic construct
  misc_feature 1..121: note = Description of artificial sequence: synthetic polynucleotide sequence
  source 1..121: mol_type = other DNA
tgaaccatcagaacagatgagagagtctagaaacaaaccctgtgtatatgtgaatccaatacattattaaggtggcatttaaatcaatgaggaaagaatggattatttatttggggaaact

SEQ ID NO: 2681 - DNA, 121 bp, synthetic construct
  misc_feature 1..121: note = Description of artificial sequence: synthetic polynucleotide sequence
  source 1..121: mol_type = other DNA
ccataatctgttgtctgggaactcaggggtgggctggggacggtgggtacaaaggtcaaggcataaaaagcagtggtcagtggtgagtcattggatggccaggtagccacgctgtgccatc

SEQ ID NO: 2682 - DNA, 121 bp, synthetic construct
  misc_feature 1..121: note = Description of artificial sequence: synthetic polynucleotide sequence
  source 1..121: mol_type = other DNA
ttacccattttttagctgatgtgctgctctgcgatgccagcaagacatcgttaaaagtgacaattcagaaacagttcttttaggagttccacttcagcatatgagaatggtgaaatttctg

SEQ ID NO: 2683 - DNA, 121 bp, synthetic construct
  misc_feature 1..121: note = Description of artificial sequence: synthetic polynucleotide sequence
  source 1..121: mol_type = other DNA
agtgatattttgtcgtttatcctggtttttgccgaggtaggggaaaatctcttgtttagcgagagaaaatgcaagtgctatagatagccagaagagagacgacagtcctagatctaatagt

SEQ ID NO: 2684 - DNA, 121 bp, synthetic construct
  misc_feature 1..121: note = Description of artificial sequence: synthetic polynucleotide sequence
  source 1..121: mol_type = other DNA
aagttgggcagctgtccatcatcagtaagacacttttcagtatccatttagaaacaacatgcagctcagggtgtatttccctcctccccagtaggggtcgtagactctatgatataacttg

SEQ ID NO: 2685 - DNA, 121 bp, synthetic construct
  misc_feature 1..121: note = Description of artificial sequence: synthetic polynucleotide sequence
  source 1..121: mol_type = other DNA
ccttttgcttttggaaaggagagagaagagtaaaggactttatattgcaaattggttactagtttagccacagtaaaataaaacaccaagtagagtcctaaagtccccattccaggatcta

SEQ ID NO: 2686 - DNA, 121 bp, synthetic construct
  misc_feature 1..121: note = Description of artificial sequence: synthetic polynucleotide sequence
  source 1..121: mol_type = other DNA
ttgctgtatcacagtctatgcccagatgggtgggttggctcaggctgttgatccagttagagaaggaatgctatgaacacctgaatttctgcctggagattggagagataggaccccagtg

SEQ ID NO: 2687 - DNA, 121 bp, synthetic construct
  misc_feature 1..121: note = Description of artificial sequence: synthetic polynucleotide sequence
  source 1..121: mol_type = other DNA
acaggccctttgtgatgctgtcttgccttagcttctgaatgttcccagttttaaacagctttcctgtctttttcatttgcaatgtgtctcttatgtctaatcttgtggttcccttcaggaa

SEQ ID NO: 2688 - DNA, 121 bp, synthetic construct
  misc_feature 1..121: note = Description of artificial sequence: synthetic polynucleotide sequence
  source 1..121: mol_type = other DNA
caaggaagccctctctgactcccagagtacatcaagtcctctctgttctacactctcataataccctatactttgcttccagagaagccattccattttatgagtgtatttttgcactatt

SEQ ID NO: 2689 - DNA, 121 bp, synthetic construct
  misc_feature 1..121: note = Description of artificial sequence: synthetic polynucleotide sequence
  source 1..121: mol_type = other DNA
gtgatgccttctataaagacttgggctaagtggagaagtttgcttggctgaagcaatacgaaaaggatagttcatttttattttggataaagtgaaacttcagctttaaaaaaaagctgtt

SEQ ID NO: 2690 - DNA, 121 bp, synthetic construct
  misc_feature 1..121: note = Description of artificial sequence: synthetic polynucleotide sequence
  source 1..121: mol_type = other DNA
tcagacatttaaaaaaaaagtctgtggactcagaagccctttaaaagcctgactgttggtgataatgaaatggagttgctagtaaagagtactactaatagcgtttttggcctagggactt

SEQ ID NO: 2691 - DNA, 121 bp, synthetic construct
  misc_feature 1..121: note = Description of artificial sequence: synthetic polynucleotide sequence
  source 1..121: mol_type = other DNA
tgtgcaggtttgttacaaggatattttgcttggtgctgaggttcgggcttctactagtcgtgtcacccaaatagtaaacatagtacctaatagaaagttttccagcccttaccccccaaac

SEQ ID NO: 2692 - DNA, 121 bp, synthetic construct
  misc_feature 1..121: note = Description of artificial sequence: synthetic polynucleotide sequence
  source 1..121: mol_type = other DNA
aaatatacaagtccatgttctttcagcccctttgcgctcataacgtcagacgctggcctccaaacacacagtcatcatagggcagctgaaaacaaggggaaaaaagacacgttaagcttcc

SEQ ID NO: 2693 - DNA, 271 bp, synthetic construct
  misc_feature 1..271: note = Description of artificial sequence: synthetic polynucleotide sequence
  source 1..271: mol_type = other DNA
cctcgtcctctgtgaactccgtgaactctgactctgtgtcatagctctcctcatcctcactctctggcagcatctgaaggttttctagtgtcagctggcccagctgctgctgtatccgggtgcttgggcggccccaggtgagctggtagggagaatagccctggtaggtaactctgttgacatcagccccacacttcaacaggagtgacaccaggtcaggattttgcaggtccactgcgaggtgaagggcagtccggccattacagggctc

SEQ ID NO: 2694 - DNA, 121 bp, synthetic construct
  misc_feature 1..121: note = Description of artificial sequence: synthetic polynucleotide sequence
  source 1..121: mol_type = other DNA
ggcaggaagcaccaacctgagcattgacatcagcacccaaggacaccaaaagctccacgatgcccaggtagccatggatagaggctaagtgtagacacgtgtggcctggaagaacaaaagg

SEQ ID NO: 2695 - DNA, 212 bp, synthetic construct
  misc_feature 1..212: note = Description of artificial sequence: synthetic polynucleotide sequence
  source 1..212: mol_type = other DNA
ccattgtagttggtagccttcaggatggagtggaggtgcggggtggtgcaggactgagtcaggactcccacgctggccaggcagccctgctcacaggcaaggtgtaggggggtatttcctcgaaagtctcggagctcaggatcacagccagctcccagaagtgcctcagcaatttctggctggttggtgatcacagccaagtggagtggagt

SEQ ID NO: 2696 - DNA, 121 bp, synthetic construct
  misc_feature 1..121: note = Description of artificial sequence: synthetic polynucleotide sequence
  source 1..121: mol_type = other DNA
gcgcacctgctgcaggttgttctggaagttgaggaaggccaggtctcccttcacctggcggatcacttccatggtcagtgccttttcttcatggatgatggccaagtgcaggaacctgtgg

SEQ ID NO: 2697 - DNA, 228 bp, synthetic construct
  misc_feature 1..228: note = Description of artificial sequence: synthetic polynucleotide sequence
  source 1..228: mol_type = other DNA
cgagtccccgtcctcggtgagctgctgcttccagggctccgagccgcgcggcacctcctgcggctcgaggcggatctcctgcagctccttgaccatctgctcgtactcctcgtctttcatggagtccaggccgctgtcgtggcggtcgtccagtagccgctccttcttcagcccgtcgcgggggccctccatggcccactcctgggggcgctcggccgcctggaacat

SEQ ID NO: 2698 - DNA, 121 bp, synthetic construct
  misc_feature 1..121: note = Description of artificial sequence: synthetic polynucleotide sequence
  source 1..121: mol_type = other DNA
gtgtatggcacttaaaaattacagttagacaacctaaattcctttttattctaagtgcaaactccttttcatggcacagggtgcccttcagaaactgaaatctcagcctatcttcttgact

SEQ ID NO: 2699 - DNA, 121 bp, synthetic construct
  misc_feature 1..121: note = Description of artificial sequence: synthetic polynucleotide sequence
  source 1..121: mol_type = other DNA
aggtaaaagaaaggtcccatccatggtctcttagaaaaaaggcttatgatcccagaaagtcacttaatcagacctcagatttgactgtcttttctttcagtctttcaaaaatgatgttcac

SEQ ID NO: 2700 - DNA, 121 bp, synthetic construct
  misc_feature 1..121: note = Description of artificial sequence: synthetic polynucleotide sequence
  source 1..121: mol_type = other DNA
ctgtatcctgggagtcttagatgattaatgcactatctccgtcctcaaggaaccaatacagttgttggtagaacttaagcccaattaaatataacataatatggagaatgtcatgataata

SEQ ID NO: 2701 - DNA, 121 bp, synthetic construct
  misc_feature 1..121: note = Description of artificial sequence: synthetic polynucleotide sequence
  source 1..121: mol_type = other DNA
ctgtagtaggaacaatgaagagatgctgaatgaacacattttcatctcccctttcctgtaaaatcagcatatatgtatgtgtaaatactggctaactaatcaagtccaccaaaagacaagt

SEQ ID NO: 2702 - DNA, 121 bp, synthetic construct
  misc_feature 1..121: note = Description of artificial sequence: synthetic polynucleotide sequence
  source 1..121: mol_type = other DNA
gtagaaacatacgtagacacacataaatgcacatttgtgaatttacattttctggaaggatacatacataggcaaaaagtagatgggagtactttctagggtgggaggttctagggtagga

SEQ ID NO: 2703 - DNA, 121 bp, synthetic construct
  misc_feature 1..121: note = Description of artificial sequence: synthetic polynucleotide sequence
  source 1..121: mol_type = other DNA
gtgcagactctgtcttgtccacaaggagaaagtctagggcagtttggtgtctgtaataatcttggtcaataagttgaagtgtacctgaatgtctttcagggcagaggtgatgttattaatg

SEQ ID NO: 2704 - DNA, 121 bp, synthetic construct
  misc_feature 1..121: note = Description of artificial sequence: synthetic polynucleotide sequence
  source 1..121: mol_type = other DNA
taaaagcatagcatgaggaacaccacaataacacacagaaaacaaggaagatttcaatagtatataacatgccccacacagaggcataaaaaattatggcatgttctaagaattatgagca

SEQ ID NO: 2705 - DNA, 121 bp, synthetic construct
  misc_feature 1..121: note = Description of artificial sequence: synthetic polynucleotide sequence
  source 1..121: mol_type = other DNA
gggggacaggtgtgtaatgctatagtctgatatttgtgtctcatgaaaattcgtacgtcgaattcctaactctcaattgtgatggtaacaggaggtgggactttgggaggtgattaggcca

SEQ ID NO: 2706 - DNA, 121 bp, synthetic construct
  misc_feature 1..121: note = Description of artificial sequence: synthetic polynucleotide sequence
  source 1..121: mol_type = other DNA
gtaatagacaactaatacagccacgattatcaattaaaattaattaggcacctaccctgcgtaagacagcatgtgccccatgtatgtatgtatatacggcatccttcctgaataggtcttg

SEQ ID NO: 2707 - DNA, 121 bp, synthetic construct
  misc_feature 1..121: note = Description of artificial sequence: synthetic polynucleotide sequence
  source 1..121: mol_type = other DNA
atatttcaggctatcacaaggaagagagactaacacaatgaatacccatttttttatctaacagcttaagaaacaaagcattaccgatatgatagaagcctctgtagaactctcaagatcc

SEQ ID NO: 2708 - DNA, 121 bp, synthetic construct
  misc_feature 1..121: note = Description of artificial sequence: synthetic polynucleotide sequence
  source 1..121: mol_type = other DNA
ggtcaggatatgacactgatatctactggttaaaggagagtctgaaggactgttgtgtctctttgaattctcagacattgtcagtagcacagagcaactcaggagagagtacacaatacac

SEQ ID NO: 2709 - DNA, 121 bp, synthetic construct
  misc_feature 1..121: note = Description of artificial sequence: synthetic polynucleotide sequence
  source 1..121: mol_type = other DNA
gaaaggaaggagaactgagcagggttcccagcatccaggatgaatgatgacgttgtcctcgatatattggtcctttggccaatcctaagacgtggctattgctagtggatctccacttaaa

SEQ ID NO: 2710 - DNA, 121 bp, synthetic construct
  misc_feature 1..121: note = Description of artificial sequence: synthetic polynucleotide sequence
  source 1..121: mol_type = other DNA
tgctgggcctgaagcacaaaaatttctttacttttcactgtgggaagaagagtactaaggaccactcagacttttagaaacaaccaacatacaacaaatttagcacacacaacacaagtaa

SEQ ID NO: 2711 - DNA, 121 bp, synthetic construct
  misc_feature 1..121: note = Description of artificial sequence: synthetic polynucleotide sequence
  source 1..121: mol_type = other DNA
ggttagggaggcatgaaatgagcaaccaagcaggaatcagaaactcagaccagcagcagacaaggaaaataccaggtgatatcacttataaaggggaacccttgggatcaagtaaggagtg

SEQ ID NO: 2712 - DNA, 121 bp, synthetic construct
  misc_feature 1..121: note = Description of artificial sequence: synthetic polynucleotide sequence
  source 1..121: mol_type = other DNA
tagatgtggttaacattatcattcagctgactacaggtaaaagagattacccttaataacgtgagtaagcgtcatccagtcaggtgaaaggccttagagccaaaactggtttctcagagaa

SEQ ID NO: 2713 - DNA, 121 bp, synthetic construct
  misc_feature 1..121: note = Description of artificial sequence: synthetic polynucleotide sequence
  source 1..121: mol_type = other DNA
gtatctcagagctattcatgcaggggagaaaggagagggacttactggttcaatcccttactatctcttgtctcccactggtacagattgacctcattggcaactaccttctccccagctt

SEQ ID NO: 2714 - DNA, 121 bp, synthetic construct
  misc_feature 1..121: note = Description of artificial sequence: synthetic polynucleotide sequence
  source 1..121: mol_type = other DNA
agagtgctcagaggagaggacttcttaaggggtgaaccacttaagttgattcttaaaagaaagtgagaaattaggtaggaagtgctaaggactgggaattagggaagaacctttagatgag

SEQ ID NO: 2715 - DNA, 121 bp, synthetic construct
  misc_feature 1..121: note = Description of artificial sequence: synthetic polynucleotide sequence
  source 1..121: mol_type = other DNA
aaagtccagtaattgtccggggatatcaaggagtcctggctaactgagagatgaagctggatgtaaggttttggaaggagttggtgggaacagtggagatgaagccttggtggggcagcat

SEQ ID NO: 2716 - DNA, 121 bp, synthetic construct
  misc_feature 1..121: note = Description of artificial sequence: synthetic polynucleotide sequence
  source 1..121: mol_type = other DNA
ctttaggtggggagtggacattttccacagcagataaacccgttttcctcattttgattctacacttatatttagcatcgaaccatttccgtaataccaaattataatattgtaaaggtct

SEQ ID NO: 2717 - DNA, 121 bp, synthetic construct
  misc_feature 1..121: note = Description of artificial sequence: synthetic polynucleotide sequence
  source 1..121: mol_type = other DNA
tgtgattgggaaaagcagctaagaggcactggctcccatttgctttctatattgaccatatggcaccagtaaatgatattaaactacttcaaagacaagttaaaagtacaagtttccctcc

SEQ ID NO: 2718 - DNA, 121 bp, synthetic construct
  misc_feature 1..121: note = Description of artificial sequence: synthetic polynucleotide sequence
  source 1..121: mol_type = other DNA
gtggataagcagggtgctctggaagaatgcaacaagaacatctgacttaatctcagggaagtgtgtaacagtcatgaccctcactcctcagagctagataaggtagctgtggatgtgcacc

SEQ ID NO: 2719 - DNA, 121 bp, synthetic construct
  misc_feature 1..121: note = Description of artificial sequence: synthetic polynucleotide sequence
  source 1..121: mol_type = other DNA
cacaataggcaagatatagagtcaacataagtgtccatcagcaggtgaatggatcaagaaaatgtatatgagcctgagagtttggaatgaaccagtcacacatgtgtattctggtgaagag

SEQ ID NO: 2720 - DNA, 121 bp, synthetic construct
  misc_feature 1..121: note = Description of artificial sequence: synthetic polynucleotide sequence
  source 1..121: mol_type = other DNA
gcacttcgccttgcttctgtaagcctttctcacctgaggctaaagctatttcacctagtagttgttaagattattgtgtataaaggtaaaagaaggtcctcagaagtaatggtcgtgatta

SEQ ID NO: 2721 - DNA, 121 bp, synthetic construct
  misc_feature 1..121: note = Description of artificial sequence: synthetic polynucleotide sequence
  source 1..121: mol_type = other DNA
cctcttccatggtaacagtggaagccgtatgtttaaggttgcaatatctccagctggaagaagcttggatgcctaagttgctacttggaggagaattgcccaactgtgtccaactatgata

SEQ ID NO: 2722 - DNA, 121 bp, synthetic construct
  misc_feature 1..121: note = Description of artificial sequence: synthetic polynucleotide sequence
  source 1..121: mol_type = other DNA
atagggtcctgatagagagatggctttatggaagaagtacaaggacccttacgggccaggttaggagatgtaaggagattcctcaggatttgatcgccagtgtttttgtctaagtgttgga

SEQ ID NO: 2723 - DNA, 121 bp, synthetic construct
  misc_feature 1..121: note = Description of artificial sequence: synthetic polynucleotide sequence
  source 1..121: mol_type = other DNA
acagagctcctagagggaggagtgggctgccattttttctgtctcagcaacttccgtagtttacagactttggagagcccaagctaactaggggcagaagtggtacacccacacagcacag

SEQ ID NO: 2724 - DNA, 121 bp, synthetic construct
  misc_feature 1..121: note = Description of artificial sequence: synthetic polynucleotide sequence
  source 1..121: mol_type = other DNA
tgaccaatttgcattggaaaccacagtgagcatggaagaaatataaccttgatcctctggcctaataaacattcttgcaattctaaatgtacctagagtttgtgacaagtgtgtattggaa

SEQ ID NO: 2725 - DNA, 121 bp, synthetic construct
  misc_feature 1..121: note = Description of artificial sequence: synthetic polynucleotide sequence
  source 1..121: mol_type = other DNA
gaagctagctccagacagaatcaaaaaccaagatgcattggccagtgatatttaccctagtgagagcaagagagcggcagttgtggcaagaatttgacagagaagattgaggtagggccga

SEQ ID NO: 2726 - DNA, 121 bp, synthetic construct
  misc_feature 1..121: note = Description of artificial sequence: synthetic polynucleotide sequence
  source 1..121: mol_type = other DNA
tccttttttctctccttttcctttctccactgtctatgctttaggcctacccaagccactgtggatattttgtagccattcaaaactaaaaagggcagctgagcccaattccagaagagtt

SEQ ID NO: 2727 - DNA, 480 bp, synthetic construct
  misc_feature 1..480: note = Description of artificial sequence: synthetic polynucleotide sequence
  source 1..480: mol_type = other DNA
cttagtcatctgagatggaaagtctgctgaagatgggcaggcgtcttgagttgtccaaggtcggggagtctgagccactgtggctgctgctggagctgctcaggtagccctcctggtccgagagagaatcctgagggctggggggagagtcaaacatgtgaggggactcggacatgggccggaagaggaaggtggtcggggagccacccccgggcagccccatgctaggggcaaagaggcttgccagctcctggctggagaaggcaaaagggttattggtgccatcgggcagggtaggtgagcccaggaggtcatcggcgctcagaatagggggtggggtgatggacgtggggctgtccagcagcccggtggcagcggcggtggcagcggcactgggaaacccagcaaagctaaagctatgctggaggcggggacggtcagcggagaggtcccgggccccggccagggcacggcgctctt

SEQ ID NO: 2728 - DNA, 481 bp, synthetic construct
  misc_feature 1..481: note = Description of artificial sequence: synthetic polynucleotide sequence
  source 1..481: mol_type = other DNA
cagcgttgtggatgaagtggcagcggggcccgtaggggcaaaagccgatggtgtggaaggtgcggcacagctccgtcttgtacttggggtggcgggtcaggctgcggagctcgtggatgccgtgtgcgaactggcacttgtccccgtacttacaggcaccgttttcctcaaaggggcggcacagctccgtcttgtagcggctggagttgacctggccgcccccgggctgcttctgggtgggcagcagccgctcgcccccttccgagaaggagcggtctcggaagcggctgtctcgcgagctcagagcgggggctggctcacccttgaggctgctgaggagctggttctggtggaacttggagctgggcagggtgactgagtgcctccgagggaagcccccaccagcaggggtgcccactgcctttctgtccagcaggcaaccccctgcactgggagcactatagttgagcatcttgttacc

SEQ ID NO: 2729 - DNA, 190 bp, synthetic construct
  misc_feature 1..190: note = Description of artificial sequence: synthetic polynucleotide sequence
  source 1..190: mol_type = other DNA
ccttgcataaaacttcgctcaagtcgaagatggtggcagacacgagggtggtggtcatcctgtgcgttcgcgcgagccaggggcgaggatctggtgtgtcgcgaaggtcccggtgcggggaaggcgcagcctctcctgtctggagtcccacacgccagttcccggcgcccctcgcctttctgactccggg

SEQ ID NO: 2730 - DNA, 121 bp, synthetic construct
  misc_feature 1..121: note = Description of artificial sequence: synthetic polynucleotide sequence
  source 1..121: mol_type = other DNA
ccccaggctggccgccgcctcacctgcactgccgcttccgaccgggaggcggtgggccggctcctctgtcccaggcccgacttccgggccctccccattcgcctggagcgcgtcccttcgt

SEQ ID NO: 2731 - DNA, 121 bp, synthetic construct
  misc_feature 1..121: note = Description of artificial sequence: synthetic polynucleotide sequence
  source 1..121: mol_type = other DNA
caggctaaacccagcccacagtgctcctttagcaccccatcatggcgctgactacattacattaaacagatttcttcatattttggtctttcccaccagacaatatagtctttgagaacct

SEQ ID NO: 2732 - DNA, 121 bp, synthetic construct
  misc_feature 1..121: note = Description of artificial sequence: synthetic polynucleotide sequence
  source 1..121: mol_type = other DNA
ggaatcactgtgctcgaagatgacagttctacaccttggcctgacagttttgagattcttgcttctaaaataagatggaacctgaaagatgggatgattctagcatactaagtatttgact

SEQ ID NO: 2733 - DNA, 121 bp, synthetic construct
  misc_feature 1..121: note = Description of artificial sequence: synthetic polynucleotide sequence
  source 1..121: mol_type = other DNA
gtccctggggctttcttaggcatgggcaggatgtggattgaaggaagaaacccagtgtcatgggcagcaaaggttgaatgtcttctgtgtctagtcctaacactgacttggagcccattcc

SEQ ID NO: 2734 - DNA, 121 bp, synthetic construct
  misc_feature 1..121: note = Description of artificial sequence: synthetic polynucleotide sequence
  source 1..121: mol_type = other DNA
tggaagaaaaccttattattggattagggatttaatctttcctctgcccttcaggttccgtgagccacctcacaggttatgaaacagaaagacagcgtcacaacactgctcttctggctgc

SEQ ID NO: 2735 - DNA, 121 bp, synthetic construct
  misc_feature 1..121: note = Description of artificial sequence: synthetic polynucleotide sequence
  source 1..121: mol_type = other DNA
ggaaggagaagagaaagaccaggcagtatcctgaaagtcttgagaggcttaaagaacatgatgtgtataatacacttaggatggtgctttacccagagaaaactggagctgagtgtgtttg

SEQ ID NO: 2736 - DNA, 121 bp, synthetic construct
  misc_feature 1..121: note = Description of artificial sequence: synthetic polynucleotide sequence
  source 1..121: mol_type = other DNA
tagtgtttttttcaagcatgttacatttagaattaagacctgcctagaaaataagctacttagtgctgaagaaacaaaaacttgacaagattcctaagttatcatttatatgtaatattct

SEQ ID NO: 2737 - DNA, 121 bp, synthetic construct
  misc_feature 1..121: note = Description of artificial sequence: synthetic polynucleotide sequence
  source 1..121: mol_type = other DNA
tataaaactaaataagacattgtttgtaatgatcacgaatgctggtggtaggggtgagcggcttttattagaagtggaggtaggtggtgactttgcaaggatgagatgagatattctaagg

SEQ ID NO: 2738 - DNA, 121 bp, synthetic construct
  misc_feature 1..121: note = Description of artificial sequence: synthetic polynucleotide sequence
  source 1..121: mol_type = other DNA
aatcaaatgtttttaattgaaaggggaaagaaaatatcagagaacttaaagatggccttcgtgactttgactcaaaatcaatgcatttcattatgtatgggtcctacaccttgcttcctca

SEQ ID NO: 2739 - DNA, 121 bp, synthetic construct
  misc_feature 1..121: note = Description of artificial sequence: synthetic polynucleotide sequence
  source 1..121: mol_type = other DNA
agtttgggctgaggcttatttctgggacaaaatccaaaagaatgggcagaaccttgtacggtgtcaatgagggaggcttgcttttattgtccaagtcacatgtggtatgcacagactctcc

SEQ ID NO: 2740 - DNA, 121 bp, synthetic construct
  misc_feature 1..121: note = Description of artificial sequence: synthetic polynucleotide sequence
  source 1..121: mol_type = other DNA
tgggggcggaatccacctctctgtgttttcatgagctctgtgggtgactgtagcaccacgactttaggggtttggaggtcagacacctgagaagtagctggtgagggtaggatatttgcag

SEQ ID NO: 2741 - DNA, 121 bp, synthetic construct
  misc_feature 1..121: note = Description of artificial sequence: synthetic polynucleotide sequence
  source 1..121: mol_type = other DNA
acttacatctttgtctctgaccctattcctaatgggctagaataacagaggtcctataactttttttctattctccaccctacaacatgtcttctttgtgtgcaagctcagaaaggccttt

SEQ ID NO: 2742 - DNA, 121 bp, synthetic construct
  misc_feature 1..121: note = Description of artificial sequence: synthetic polynucleotide sequence
  source 1..121: mol_type = other DNA
agccttaagttcttgattatagcatcctgaaatgattaggacacctcatgaagccactttgttttatttggcttttttataaggcaactacagaaaaaaagtaaccaaattcatcttattt

SEQ ID NO: 2743 - DNA, 121 bp, synthetic construct
  misc_feature 1..121: note = Description of artificial sequence: synthetic polynucleotide sequence
  source 1..121: mol_type = other DNA
aagaagataatgccactttacatcatttacaatgagactggagcagcagaaagcaagcaggttgcaagtgtacagctcacatagcttccttgaggctttccgattctcagaaacaatgcat

SEQ ID NO: 2744 - DNA, 121 bp, synthetic construct
  misc_feature 1..121: note = Description of artificial sequence: synthetic polynucleotide sequence
  source 1..121: mol_type = other DNA
ggataccgtcgtaaatgggtgatggatggctcacaggtttagtagatccagtaacaattttaacctccttcattctatcaacagtttcctgaggcctgacaaacaagatcttcctgcctgt

SEQ ID NO: 2745 - DNA, 121 bp, synthetic construct
  misc_feature 1..121: note = Description of artificial sequence: synthetic polynucleotide sequence
  source 1..121: mol_type = other DNA
tgccatgggggaagccattatttttatttcttagagggagatgacctagttactagtgaacgagtattattcagaaagggaactggcctttgattctccagtagcccaaagggaccttcgc

SEQ ID NO: 2746 - DNA, 121 bp, synthetic construct
  misc_feature 1..121: note = Description of artificial sequence: synthetic polynucleotide sequence
  source 1..121: mol_type = other DNA
cactattaatgcgtcagcaagcatgagaccatttccattcagctactgtatcaatgccaattcaggaacagaatcagaataattggctcaatatgcctctagtcacttgtttatctaagag

SEQ ID NO: 2747 - DNA, 121 bp, synthetic construct
  misc_feature 1..121: note = Description of artificial sequence: synthetic polynucleotide sequence
  source 1..121: mol_type = other DNA
ctttacattaaaatgggaataatctcaaactgttttgatattttcatttcttgattctgataaggccactgttttgttttgatgtggaaagcatgtcatatttgcaaagaatagtggaagg

SEQ ID NO: 2748 - DNA, 121 bp, synthetic construct
  misc_feature 1..121: note = Description of artificial sequence: synthetic polynucleotide sequence
  source 1..121: mol_type = other DNA
caagtgccacaagagagttgggatcaaaatgctatgggaattcagagcagaaaagattaatctcatcatgggaatatggtactcctggactgacccagatagattttacaaatgtaaaagt

SEQ ID NO: 2749 - DNA, 121 bp, synthetic construct
  misc_feature 1..121: note = Description of artificial sequence: synthetic polynucleotide sequence
  source 1..121: mol_type = other DNA
cattttaataaaacaagggcaaagcacataaacaattcaaatgattgcacaaataaaccgtgctataaagacaaagacggaaaaactggtgaaattgatctgctggctggcaggccacggt

SEQ ID NO: 2750 - DNA, 121 bp, synthetic construct
  misc_feature 1..121: note = Description of artificial sequence: synthetic polynucleotide sequence
  source 1..121: mol_type = other DNA
aagaaaaaaagaaaattaactctacaatgagacactactactcacctatgagacaggcaaatgcccagaagtttgagaatacgttctgtggagaaacaggcactctcaaacaatgctgatg

SEQ ID NO: 2751 - DNA, 121 bp, synthetic construct
  misc_feature 1..121: note = Description of artificial sequence: synthetic polynucleotide sequence
  source 1..121: mol_type = other DNA
cattattatgaatcaaattttgctttctttgacaatggtaacgtatcttccttatcttcatcctcatcatcatcttcatcatcatcaggataatctaccagacccacgaggcctccctgtt

SEQ ID NO: 2752 - DNA, 228 bp, synthetic construct
  misc_feature 1..228: note = Description of artificial sequence: synthetic polynucleotide sequence
  source 1..228: mol_type = other DNA
cctttgtagtaatagctgccgtctgagatgtatttttaggtacggatccaggagagcctggagatcctggggatccaggtgatcccggagaaccaggcagatttgttgtagatgactggctggtgaggttagtcttcgttccactggacagggaaagcttgaaacttgggctctgccgtccagaaaggtttgttttcagaagcacttccttttcctcactttctttta

SEQ ID NO: 2753 - DNA, 192 bp, synthetic construct
  misc_feature 1..192: note = Description of artificial sequence: synthetic polynucleotide sequence
  source 1..192: mol_type = other DNA
catttcttcctttccatgaatttacttattggatccataatatcatcatcatttttagttttgtcagatggagacactacagcttctccatcttccatgtcatcttcatctgtgttaaaccacatctcttcttcatcttctagtgttctggcatctcttcgatatctgtgattcctcaaaatggaacgcata

SEQ ID NO: 2754 - DNA, 144 bp, synthetic construct
  misc_feature 1..144: note = Description of artificial sequence: synthetic polynucleotide sequence
  source 1..144: mol_type = other DNA
cctgtcaagtttgggattatcttgcctttctctttgttgttcaaatctcagttttaatcctttaaatgtctgtacataatctacatcttccagtgctttccagtaattttcaattacatgagcagttaatgattttatatcttc

SEQ ID NO: 2755 - DNA, 171 bp, synthetic construct
  misc_feature 1..171: note = Description of artificial sequence: synthetic polynucleotide sequence
  source 1..171: mol_type = other DNA
ccactctaataaattcaaacatctctattatggcagagttcatcagattgtagcgggatccattgttgagaaatgctttcactactggttcaaacaaaaaacttttcattatgtagcggttgtaaaactcatcttttaatccaataatctttcttttaaaacgaagggcac

SEQ ID NO: 2756 - DNA, 160 bp, synthetic construct
  misc_feature 1..160: note = Description of artificial sequence: synthetic polynucleotide sequence
  source 1..160: mol_type = other DNA
cataatgccaagaaagcatgcttcgaggccataagaactagcactctccggaggatatccttattaataatgtagttctttatgtggtaggtatggtgctccacacaaaatgttaacaattccaatacaagtgccaatagttgggcagtctgaaaatcat

SEQ ID NO: 2757 - DNA, 121 bp, synthetic construct
  misc_feature 1..121: note = Description of artificial sequence: synthetic polynucleotide sequence
  source 1..121: mol_type = other DNA
ttatcttacctttactaggtttgtcttctgttgtatttgctagtaaaggagcagtgagaacatgcatacagtgcttgtagaagaaacccagaaattcagtcttttctgttttctaaggaaa

SEQ ID NO: 2758 - DNA, 133 bp, synthetic construct
  misc_feature 1..133: note = Description of artificial sequence: synthetic polynucleotide sequence
  source 1..133: mol_type = other DNA
cattggcagtggctagcatgttctctgggtcaactaaagttcgaagcaggcccataagctggactgctcctccaagttcaggatctgtatcacaaatcatatgttctataatgaggttgatgagcaaaatatc

SEQ ID NO: 2759 - DNA, 157 bp, synthetic construct
  misc_feature 1..157: note = Description of artificial sequence: synthetic polynucleotide sequence
  source 1..157: mol_type = other DNA
ccttgctggttattttttgctctgttaacttcttacttacatcatcattctgttgtgcctcctgcatgacaaactctcgtaccatggatggattatattcaaccaagtatgagaatatatcagtagcagcacttcgcacctgtgtatcatccatgcc

SEQ ID NO: 2760 - DNA, 121 bp, synthetic construct
  misc_feature 1..121: note = Description of artificial sequence: synthetic polynucleotide sequence
  source 1..121: mol_type = other DNA
acaaggatgacttctaaagctggtaatatgcccatgtttgacaaagtcttgaaaaaagcatctctgttttgaggctgtagcgtttgggaaaacgcacaaaattcttttaaaaagttaacct

SEQ ID NO: 2761 - DNA, 121 bp, synthetic construct
  misc_feature 1..121: note = Description of artificial sequence: synthetic polynucleotide sequence
  source 1..121: mol_type = other DNA
ttcatagtatctaatttcttaccaattcctgtcttttttcctcatctgttgcttcatctgttagttgtgcaaacaaatctgtcagaaatttttcatcttcctgtgaaacaaaggacaaatg

SEQ ID NO: 2762 - DNA, 299 bp, synthetic construct
  misc_feature 1..299: note = Description of artificial sequence: synthetic polynucleotide sequence
  source 1..299: mol_type = other DNA
cctgcaacatgccaacaatctctaccttattgaaaaagataaaagagtgaagtgttgataacatgttttcttcaaagaccgaaggagttggtagaaccatatcttgtatatactgaactctgtatgtctgatgaattttttgtttcagctcaggatctgatatgggaatcacttctttaaacttggctgtttttgttagaaattccctgtgttttcgtggttgtgataaagcaggatcatattctaaacatccaatgacgtccattatacattcttcagagaacataacttcaaaaaga

SEQ ID NO: 2763 - DNA, 320 bp, synthetic construct
  misc_feature 1..320: note = Description of artificial sequence: synthetic polynucleotide sequence
  source 1..320: mol_type = other DNA
gcagttcgattcaagagaaagatgcctttgataatttcatacaagtggtgcagtccttcaatattttccaaatcttcacacacatgaaaaagctccaggagctttttaatataaccctcattttctagtgccagtgcaagtttttcacgacgaagaggtgaaggtaaagatgatgccacaagttctgcaatttcttcaaggcgacttaattcacaagatggcaattctaagcctggcgatgacatatcatcaaaacgctcctcttcagattcatccacaaggtcctgagtgatgtccacggaagggtcctttccttgaac

SEQ ID NO: 2764 - DNA, 121 bp, synthetic construct
  misc_feature 1..121: note = Description of artificial sequence: synthetic polynucleotide sequence
  source 1..121: mol_type = other DNA
taaaaaattacctgacatattttctcccaaatttcatcacatccagctttttcttgaaagctaagggccaagtcataattttctgcttcagaccacacaatcagagtgtcctttggagaca

SEQ ID NO: 2765 - DNA, 121 bp, synthetic construct
  misc_feature 1..121: note = Description of artificial sequence: synthetic polynucleotide sequence
  source 1..121: mol_type = other DNA
tatgcaagataaaacacatcttcaaaattttacctgttgtttctggtatgcagtgttaggatttattttcgactctaaaagtagagaacctaggaaacagaaaaagacattccattatgtt

SEQ ID NO: 2766 - DNA, 143 bp, synthetic construct
  misc_feature 1..143: note = Description of artificial sequence: synthetic polynucleotide sequence
  source 1..143: mol_type = other DNA
ccgtcgctctcagccctgacaagcagggacatgcccttcagccgctccacgtagccagacgacacatgcccggtgccccggtcgtcccactgccggtcctcgttgagcgtgtacaccttcacccgccgccgggtgtcggtcat

SEQ ID NO: 2767 - DNA, 121 bp, synthetic construct
  misc_feature 1..121: note = Description of artificial sequence: synthetic polynucleotide sequence
  source 1..121: mol_type = other DNA
tgaggtctgaggtgggattttccagagacgtctgatggtgggatcgcttacatctctaccttgttggtcaatctgggaggattcttggcttcctaaggagcttgtgttttgctccagctgc

SEQ ID NO: 2768 - DNA, 121 bp, synthetic construct
  misc_feature 1..121: note = Description of artificial sequence: synthetic polynucleotide sequence
  source 1..121: mol_type = other DNA
gcacccctccctcctgactctcagggcatcttgacctcatcgcccaggctgaccacaagttccaaacaggactttcttgtggccattgctcaggtcccaggcatgcacaaacccactcaca

SEQ ID NO: 2769 - DNA, 121 bp, synthetic construct
  misc_feature 1..121: note = Description of artificial sequence: synthetic polynucleotide sequence
  source 1..121: mol_type = other DNA
ttgtggtttagccaatgttagttgggttttctcttataggcagtcaaatcatcttaacgaatgtctctcaggcctggctgagagtcttgaaaacatgtcaaggacctggttcagccctgaa

SEQ ID NO: 2770 - DNA, 121 bp, synthetic construct
  misc_feature 1..121: note = Description of artificial sequence: synthetic polynucleotide sequence
  source 1..121: mol_type = other DNA
aatctctatagggggcataagtacagcttgtctcaaagtaatttgactgcagaattcttttggataaatcctgaactggtgacacagagcaagcagagtgcagatgggaccaacaagccaa

SEQ ID NO: 2771 - DNA, 121 bp, synthetic construct
  misc_feature 1..121: note = Description of artificial sequence: synthetic polynucleotide sequence
  source 1..121: mol_type = other DNA
acgtaggtaattgcctgctgaaggtagagggaagaggagcaggaacctttcacctcaccatctgctcaggctcagccccatccctgcagaatcctgagcaggggctccactctcctctctt

SEQ ID NO: 2772 - DNA, 121 bp, synthetic construct
  misc_feature 1..121: note = Description of artificial sequence: synthetic polynucleotide sequence
  source 1..121: mol_type = other DNA
ctaagaggggtcaggctccagtggagctcaccatacatcagtcatctggcagcagctcgagaagcatgtcctccacgccgtcaatctgagaggcagagagagagagaaggcattgatcggc

SEQ ID NO: 2773 - DNA, 178 bp, synthetic construct
  misc_feature 1..178: note = Description of artificial sequence: synthetic polynucleotide sequence
  source 1..178: mol_type = other DNA
ccttgatgtggtacactaagcgccagaaactggagtctgaggatcggtatcgtccatcagggtagagctgccacatgataggcagcaggcttgggcctatctgggtgggggtcataggcctccccaggacgacgtcttcccgacgcaagagcacccgtaactgtaacctatcctttat

SEQ ID NO: 2774 - DNA, 121 bp, synthetic construct
  misc_feature 1..121: note = Description of artificial sequence: synthetic polynucleotide sequence
  source 1..121: mol_type = other DNA
cctcgatggttaagggcagccaggcgtgctgcttctcgtccaaatacacgaacttctcccaggcccacaggcggtccgggtggtcggtgactgcctccccgagtgtcgggcactcggccat

SEQ ID NO: 2775 - DNA, 121 bp, synthetic construct
  misc_feature 1..121: note = Description of artificial sequence: synthetic polynucleotide sequence
  source 1..121: mol_type = other DNA
ccaaattagaaccacacatatataagtccaattgattttcaacaaagatgcagtgtaattgaatgagaaaataataatcttttcaagcaacatcactggaacacctagatatccaaatgaa

SEQ ID NO: 2776 - DNA, 121 bp, synthetic construct
  misc_feature 1..121: note = Description of artificial sequence: synthetic polynucleotide sequence
  source 1..121: mol_type = other DNA
atggccaagctactgggtatgttggaagtccgaattttacaatttctctctgcacattttactttttagaatcgtacacatgaatcaactgatctacagcaaggatctaataagtaaaatg

SEQ ID NO: 2777 - DNA, 121 bp, synthetic construct
  misc_feature 1..121: note = Description of artificial sequence: synthetic polynucleotide sequence
  source 1..121: mol_type = other DNA
tgtggctccataatattttcacactccaccttcctcagcatgttgtgagcacagttccaagtactgcagaaagacgcagatgaaatagtggagtgggactgcagaggttgtcgtgttccaa

SEQ ID NO: 2778 - DNA, 121 bp, synthetic construct
  misc_feature 1..121: note = Description of artificial sequence: synthetic polynucleotide sequence
  source 1..121: mol_type = other DNA
cagaaagtctgtagacttcagaatcagatagccctgcattcaaatcccaagtgctgccccttgtaatgtgaacatgcctgattgactccaactcctgccagccttggcatgctcatttgtg

SEQ ID NO: 2779 - DNA, 121 bp, synthetic construct
  misc_feature 1..121: note = Description of artificial sequence: synthetic polynucleotide sequence
  source 1..121: mol_type = other DNA
tgtaaaattaaagggtggtatcaaatcaatggttctcaaacctggttagacactagactttctcggggaacccaaaagtatttttgctcaagccccatgcccagagattctgattctgttg

SEQ ID NO: 2780 - DNA, 121 bp, synthetic construct
  misc_feature 1..121: note = Description of artificial sequence: synthetic polynucleotide sequence
  source 1..121: mol_type = other DNA
gccaagacctcctaagggttccaagatagaagaattgaaaaactgacatgtttctgtacatggtccaactcctgcgcctccttgaatgcacccctgacttccctgctatctcttcccaaat

SEQ ID NO: 2781 - DNA, 121 bp, synthetic construct
  misc_feature 1..121: note = Description of artificial sequence: synthetic polynucleotide sequence
  source 1..121: mol_type = other DNA
gggaaaccaagctgccttggaactgggctgcccccatgcaccatggccatttggaactgggtagtgagaggctgccctgtccattgtagaatgtttagcagcatcctctgggagtagcaaa

SEQ ID NO: 2782 - DNA, 335 bp, synthetic construct
  misc_feature 1..335: note = Description of artificial sequence: synthetic polynucleotide sequence
  source 1..335: mol_type = other DNA
catggcctcgggcgacaccctctacatcgccacggacggctcggagatgccggccgagatcgtggagctgcacgagatcgaggtggagaccatcccggtggagaccatcgagaccacagtggtgggcgaggaggaggaggaggacgacgacgacgaggacggcggcggtggcgaccacggcggcgggggcggccacgggcacgccggccaccaccaccaccaccatcaccaccaccaccacccgcccatgatcgctctgcagccgctggtcaccgacgacccgacccaggtgcaccaccaccaggaggtgatcctggtgcagacgcgcgaggagg

SEQ ID NO: 2783 - DNA, 345 bp, synthetic construct
  misc_feature 1..345: note = Description of artificial sequence: synthetic polynucleotide sequence
  source 1..345: mol_type = other DNA
tggtgggcggcgacgactcggacgggctgcgcgccgaggacggcttcgaggatcagattctcatcccggtgcccgcgccggccggcggcgacgacgactacattgaacaaacgctggtcaccgtggcggcggccggcaagagcggcggcggcggctcgtcgtcgtcgggaggcggccgcgtcaagaagggcggcggcaagaagagcggcaagaagagttacctcagcggcggggccggcgcggcgggcggcggcggcgccgacccgggcaacaagaagtgggagcagaagcaggtgcagatcaagaccctggagggcgagttctcggtcaccatgtggtcctcag

SEQ ID NO: 2784 - DNA, 164 bp, synthetic construct
  misc_feature 1..164: note = Description of artificial sequence: synthetic polynucleotide sequence
  source 1..164: mol_type = other DNA
gatgaaaaaaaagatattgaccatgagacagtggttgaagaacagatcattggagagaactcacctcctgattattcagaatatatgacaggaaagaaacttcctcctggaggaatacctggcattgacctctcagatcccaaacaactggcagaatttgctag

SEQ ID NO: 2785 - DNA, 121 bp, synthetic construct
  misc_feature 1..121: note = Description of artificial sequence: synthetic polynucleotide sequence
  source 1..121: mol_type = other DNA
tctgtctgtctctctttttcttttgataagaatgaagccaagaaaaattaaagaagatgatgctccaagaacaatagcttgccctcataaagtaagtaatgctagagggagagtgttcatt

SEQ ID NO: 2786 - DNA, 160 bp, synthetic construct
  misc_feature 1..160: note = Description of artificial sequence: synthetic polynucleotide sequence
  source 1..160: mol_type = other DNA
gggctgcacaaagatgttcagggataactcggccatgagaaaacatctgcacacccacggtcccagagtccacgtctgtgcagaatgtggcaaagcttttgttgagagttcaaaactaaaacgacaccaactggttcatactggagagaagccctttcag

SEQ ID NO: 2787 - DNA, 184 bp, synthetic construct
  misc_feature 1..184: note = Description of artificial sequence: synthetic polynucleotide sequence
  source 1..184: mol_type = other DNA
gtgcacgttcgaaggctgtgggaaacgcttttcactggacttcaatttgcgcacacatgtgcgaatccataccggagacaggccctatgtgtgccccttcgatggttgtaataagaagtttgctcagtcaactaacctgaaatctcacatcttaacacatgctaaggccaaaaacaaccagtga

SEQ ID NO: 2788 - DNA, 121 bp, synthetic construct
  misc_feature 1..121: note = Description of artificial sequence: synthetic polynucleotide sequence
  source 1..121: mol_type = other DNA
agggaatgttcccatcagctcgggcacacacgtgtcttttctgaggtaaattctgcctcttctgtcattgactgttgagatgaggcccgcagaacatggctccacctcacctcctccaagc

SEQ ID NO: 2789 - DNA, 121 bp, synthetic construct
  misc_feature 1..121: note = Description of artificial sequence: synthetic polynucleotide sequence
  source 1..121: mol_type = other DNA
acaggtagctcagggtgaggtcgggatccccggtgtgggcaagctccttggccaccgtgcgcttcaggagcagctccttcctgtacatctccaagagcttatgcgaaacctcatctgaaag

SEQ ID NO: 2790 - DNA, 121 bp, synthetic construct
  misc_feature 1..121: note = Description of artificial sequence: synthetic polynucleotide sequence
  source 1..121: mol_type = other DNA
ggctgcctgggaccagagctgatgaaggcagccccgtggagcccagccaagagcaggacatcctaaccagcatggaggcctctggccacctcagcacaaatctctggcatgctgtcactga

SEQ ID NO: 2791 - DNA, 121 bp, synthetic construct
  misc_feature 1..121: note = Description of artificial sequence: synthetic polynucleotide sequence
  source 1..121: mol_type = other DNA
cgtggcggggtctcctgcccggccataataaacaggcccaagacttgttcacacaggtcccaggaatatgctgggtttgccttacgtataatttgtgattcatacctctcagtcttccaga

SEQ ID NO: 2792 - DNA, 302 bp, synthetic construct
  misc_feature 1..302: note = Description of artificial sequence: synthetic polynucleotide sequence
  source 1..302: mol_type = other DNA
gatgccggccatggtggagaagggccccgaggtctcagggaagcggagagggaggaacaacgcggccgcctccgcctccgccgccgccgcctccgccgccgcctcggccgcctgcgcctcgccagccgccactgccgcctcgggcgccgccgcctcctcagcctcggccgccgccgcctcagccgccgccgcccccaataatggccagaataaaagtttggcggcggcggcgcccaatggcaacagcagcagcaactcctgggaggaaggcagctcgggctcgtccagcgacgaggagcacg

SEQ ID NO: 2793 - DNA, 121 bp, synthetic construct
  misc_feature 1..121: note = Description of artificial sequence: synthetic polynucleotide sequence
  source 1..121: mol_type = other DNA
cgctgaccgccgtattctgcttcccccgcaggtggcggtggcatgagggtcggaccccagtaccaggcggtggtgcccgacttcgaccccggtgagtagcggccccggccggccggcggcg

SEQ ID NO: 2794 - DNA, 121 bp, synthetic construct
  misc_feature 1..121: note = Description of artificial sequence: synthetic polynucleotide sequence
  source 1..121: mol_type = other DNA
cttttttctttctcccaagccaaactggcaagacgcagtcaagaacgggacaatcttggcatgttggtctggtcacccaatcaaaatctgtcagaagcaaagtgtaagtcttggagcactt

SEQ ID NO: 2795 - DNA, 121 bp, synthetic construct
  misc_feature 1..121: note = Description of artificial sequence: synthetic polynucleotide sequence
  source 1..121: mol_type = other DNA
agtttgtttaatggcatctcttcttgtttttcagtggatgaatacattgccattgccaaagaaaagcatgggtacaacatggaacaggtaatatcatggttttctttcttttgctgttaaa

SEQ ID NO: 2796 - DNA, 163 bp, synthetic construct
  misc_feature 1..163: note = Description of artificial sequence: synthetic polynucleotide sequence
  source 1..163: mol_type = other DNA
ggctcttgggatgctcttctggcataaacataatatcgaaaagtcattggctgatttgcccaactttacccctttcccagatgagtggactgtggaagataaagtcttatttgagcaagcctttagttttcatgggaaaacttttcatagaatccaacaaatg

SEQ ID NO: 2797 - DNA, 121 bp, synthetic construct
  misc_feature 1..121: note = Description of artificial sequence: synthetic polynucleotide sequence
  source 1..121: mol_type = other DNA
gcttccagataaatctatagcaagtctggtgaaattttactattcttggaagaagacgaggactaaaactagtgtgatggatcgccatgcccggaaacaaaaacgggagcgggaggagagg

SEQ ID NO: 2798 - DNA, 121 bp, synthetic construct
  misc_feature 1..121: note = Description of artificial sequence: synthetic polynucleotide sequence
  source 1..121: mol_type = other DNA
taacttgttcttgtcttccagcgaggatgaactggaagaggcaaatggaaacaatcccattgacattgaggttgatcaaaacaaggaaagcaaaaaggaggtattttttccccctagtatt

SEQ ID NO: 2799 - DNA, 196 bp, synthetic construct
  misc_feature 1..196: note = Description of artificial sequence: synthetic polynucleotide sequence
  source 1..196: mol_type = other DNA
ggttccccctactgagacagttcctcaggtcaaaaaagaaaaacatagcacacaagctaaaaatagagcaaaaaggaaacctccaaaaggaatgtttctttctcaagaagatgtggaggctgtttctgccaatgccactgctgctaccacggtgctgagacaactagacatggaattggtttcagtcaaacgacag

SEQ ID NO: 2800 - DNA, 121 bp, synthetic construct
  misc_feature 1..121: note = Description of artificial sequence: synthetic polynucleotide sequence
  source 1..121: mol_type = other DNA
aaaattattttttccttcctagatccagaatattaaacagacaaacagtgctctcaaagaaaaacttgatggtggaatagaaccatatcgacttccagaggtaggattatgttaacatcat

SEQ ID NO: 2801 - DNA, 121 bp, synthetic construct
  misc_feature 1..121: note = Description of artificial sequence: synthetic polynucleotide sequence
  source 1..121: mol_type = other DNA
aatgtgctaaaatgactcatttggatatccaggtcattcagaaatgtaatgcacgttggactacagaagagcagcttctcgccgtacaaggtagggggaagttcttctaaagagtttagga

SEQ ID NO: 2802 - DNA, 231 bp, synthetic construct
  misc_feature 1..231: note = Description of artificial sequence: synthetic polynucleotide sequence
  source 1..231: mol_type = other DNA
gccatcaggaaatatggccgagattttcaggcaatctcagacgtgattgggaacaaatcagtggtacaagtgaaaaacttttttgtaaattatcgacgccgcttcaacatagatgaagttttacaagaatgggaggcagaacatggtaaagaagagaccaatgggcccagtaaccagaagcctgtgaagtccccagataattccattaagatgcccgaagaggaagacgag

SEQ ID NO: 2803 - DNA, 121 bp, synthetic construct
  misc_feature 1..121: note = Description of artificial sequence: synthetic polynucleotide sequence
  source 1..121: mol_type = other DNA
ctctttgatccttttttttttttttttcctcttggcctcaggctcctgttctggatgtcagatatgcatctgcctcctgagaaactggtggctttgaacacttggtgtggactactgtgtt

SEQ ID NO: 2804 - DNA, 121 bp, synthetic construct
  misc_feature 1..121: note = Description of artificial sequence: synthetic polynucleotide sequence
  source 1..121: mol_type = other DNA
gtgggaagagtgagaaagaaggaggtgaggccagaggatttggaaggctaccagagagaagcagccgaggcctgattgtggaaatgatgcttagacttgctttcagcaggagtgatgaagc

SEQ ID NO: 2805 - DNA, 121 bp, synthetic construct
  misc_feature 1..121: note = Description of artificial sequence: synthetic polynucleotide sequence
  source 1..121: mol_type = other DNA
aatggagtcgagtaaaaagatggactctcctggcgcgctgcagactaacccgccgctaaagctgcacactgaccgcagtgctgggacgccagtttttgtccctgaacaaggaggttacaag

SEQ ID NO: 2806 - DNA, 121 bp, synthetic construct
  misc_feature 1..121: note = Description of artificial sequence: synthetic polynucleotide sequence
  source 1..121: mol_type = other DNA
agtttgtgaagaccgtggaggacaagtacaagtgtgagaagtgccacctggtgctgtgcagcccgaagcagaccgagtgtgggcaccgcttctgcgagagctgcatggcggccctgctgag

SEQ ID NO: 2807 - DNA, 121 bp, synthetic construct
  misc_feature 1..121: note = Description of artificial sequence: synthetic polynucleotide sequence
  source 1..121: mol_type = other DNA
tccactctaatgcagtcacttgtgtttccctgcagctcttcaagtccaaaatgtacagcgtgtcaagagagcatcgttaaagataaggtattctggggttttttttaatcattttgtcaca

SEQ ID NO: 2808 - DNA, 121 bp, synthetic construct
  misc_feature 1..121: note = Description of artificial sequence: synthetic polynucleotide sequence
  source 1..121: mol_type = other DNA
attttcaggtgtttaaggataattgctgcaagagagaaattctggctcttcagatctattgtcggaatgaaagcagaggttgtgcagagcagttaatgctgggacatctgctggtgagtag

SEQ ID NO: 2809 - DNA, 169 bp, synthetic construct
  misc_feature 1..169: note = Description of artificial sequence: synthetic polynucleotide sequence
  source 1..169: mol_type = other DNA
ggtgcatttaaaaaatgattgccattttgaagaacttccatgtgtgcgtcctgactgcaaagaaaaggtcttgaggaaagacctgcgagaccacgtggagaaggcgtgtaaataccgggaagccacatgcagccactgcaagagtcaggttccgatgatcgcgctgcag

SEQ ID NO: 2810 - DNA, 121 bp, synthetic construct
  misc_feature 1..121: note = Description of artificial sequence: synthetic polynucleotide sequence
  source 1..121: mol_type = other DNA
agtactttctctctctgtagaaacacgaagacaccgactgtccctgcgtggtggtgtcctgccctcacaagtgcagcgtccagactctcctgaggagcgaggtaggggcggccgggcccgg

SEQ ID NO: 2811 - DNA, 121 bp, synthetic construct
  misc_feature 1..121: note = Description of artificial sequence: synthetic polynucleotide sequence
  source 1..121: mol_type = other DNA
ctcacgtctctttcccgttgcagttgagtgcacacttgtcagagtgtgtcaatgcccccagcacctgtagttttaagcgctatggctgcgtttttcaggtcagtatccgacatttgtcctt

SEQ ID NO: 2812 - DNA, 121 bp, synthetic construct
  misc_feature 1..121: note = Description of artificial sequence: synthetic polynucleotide sequence
  source 1..121: mol_type = other DNA
gtttgctctcgcaggggacaaaccagcagatcaaggcccacgaggccagctccgccgtgcagcacgtcaacctgctgaaggagtggagcaactcgctcgaaaagaaggtgggctgcacact

SEQ ID NO: 2813 - DNA, 142 bp, synthetic construct
  misc_feature 1..142: note = Description of artificial sequence: synthetic polynucleotide sequence
  source 1..142: mol_type = other DNA
ggtttccttgttgcagaatgaaagtgtagaaaaaaacaagagcatacaaagtttgcacaatcagatatgtagctttgaaattgaaattgagagacaaaaggaaatgcttcgaaataatgaatccaaaatccttcatttacag

SEQ ID NO: 2814 - DNA, 176 bp, synthetic construct
  misc_feature 1..176: note = Description of artificial sequence: synthetic polynucleotide sequence
  source 1..176: mol_type = other DNA
gcgagtgatagacagccaagcagagaaactgaaggagcttgacaaggagatccggcccttccggcagaactgggaggaagcagacagcatgaagagcagcgtggagtccctccagaaccgcgtgaccgagctggagagcgtggacaagagcgcggggcaagtggctcggaacacag

SEQ ID NO: 2815 - DNA, 226 bp, synthetic construct
  misc_feature 1..226: note = Description of artificial sequence: synthetic polynucleotide sequence
  source 1..226: mol_type = other DNA
ggcctgctggagtcccagctgagccggcatgaccagatgctgagtgtgcacgacatccgcctagccgacatggacctgcgcttccaggtcctggagaccgccagctacaatggagtgctcatctggaagattcgcgactacaagcggcggaagcaggaggccgtcatggggaagaccctgtccctttacagccagcctttctacactggttactttggctataaga

SEQ ID NO: 2816 - DNA, 347 bp, synthetic construct
  misc_feature 1..347: note = Description of artificial sequence: synthetic polynucleotide sequence
  source 1..347: mol_type = other DNA
tgtgtgccagggtctacctgaacggggacgggatggggaaggggacgcacttgtcgctgttttttgtcatcatgcgtggagaatatgatgccctgcttccttggccgtttaagcagaaagtgacactcatgctgatggatcaggggtcctctcgacgtcatttgggagatgcattcaagcccgaccccaacagcagcagcttcaagaagcccactggagagatgaatatcgcctctggctgcccagtctttgtggcccaaactgttctagaaaatgggacatatattaaagatgatacaatttttattaaagtcatagtggatacttcggatctgcccgatccctga

SEQ ID NO: 2817 - DNA, 121 bp, synthetic construct
  misc_feature 1..121: note = Description of artificial sequence: synthetic polynucleotide sequence
  source 1..121: mol_type = other DNA
tctcccgggccagccagcgggctttgacccaggtctccaaggaagatacgggcctgttccggcgaagctcctgctccctgttccggtccttccggcaagccctgaatgacggcccagctac

SEQ ID NO: 2818 - DNA, 121 bp, synthetic construct
  misc_feature 1..121: note = Description of artificial sequence: synthetic polynucleotide sequence
  source 1..121: mol_type = other DNA
gcgcacctttgagcaggaccctacggccttcgcgcggcgcgctatggacgtgtgcctgctttacgacgggctggcagccgagatcggcgccatcgtgcgcgagacgctggacagcgacggt

SEQ ID NO: 2819 - DNA, 121 bp, synthetic construct
  misc_feature 1..121: note = Description of artificial sequence: synthetic polynucleotide sequence
  source 1..121: mol_type = other DNA
gccattctggcgctgcgccgactgggccgccagcggaaccagcatctcttgcagcacactcaagacctgctgagagctgcggccggggcggcgggtgcggaggcccctcggggccgcgtgc

SEQ ID NO: 2820 - DNA, 121 bp, synthetic construct
  misc_feature 1..121: note = Description of artificial sequence: synthetic polynucleotide sequence
  source 1..121: mol_type = other DNA
tttatgggaaaattaatactcagaagtaggatttctacttacttttatttctctcacctataggtgaagtatttgactatttggttgcacatggcaggatgaaggaaaaagaagcaagatc

SEQ ID NO: 2821 - DNA, 121 bp, synthetic construct
  misc_feature 1..121: note = Description of artificial sequence: synthetic polynucleotide sequence
  source 1..121: mol_type = other DNA
tgctcacctggttgatgcacagcacagggctctggaaggcactgctcagctcacgcagcgtggcccccagggactgcagatgcctggccctgggggcggaggcctggctgtcaaattcaca

SEQ ID NO: 2822 - DNA, 121 bp, synthetic construct
  misc_feature 1..121: note = Description of artificial sequence: synthetic polynucleotide sequence
  source 1..121: mol_type = other DNA
tcatcataacccagagaagagagagaacatgtatatgtttaaaggagctaagctacagcataaacgatggaggtttaactatgaatggtgctttttccttcaatgcctaacatacattcct

SEQ ID NO: 2823 - DNA, 121 bp, synthetic construct
  misc_feature 1..121: note = Description of artificial sequence: synthetic polynucleotide sequence
  source 1..121: mol_type = other DNA
ccgccccagccgctgccgcctgcaccggacccggagccgtcatgcccaagtgtcccaagtgcaacaaggaggtgtacttcggtgagcgcgcccacaccggccccgcgaggaggcgccgccg

SEQ ID NO: 2824 - DNA, 121 bp, synthetic construct
  misc_feature 1..121: note = Description of artificial sequence: synthetic polynucleotide sequence
  source 1..121: mol_type = other DNA
tgtgcctctgcagccgagagggtgacctctctgggcaaggactggcatcggccctgcctgaagtgcgagaaatgtgggaagacgctgacctctgggggccacgctgaggtaggtgggaccc

SEQ ID NO: 2825 - DNA, 121 bp, synthetic construct
  misc_feature 1..121: note = Description of artificial sequence: synthetic polynucleotide sequence
  source 1..121: mol_type = other DNA
atggcaccccctcacggcccttctctttgcagcacgaaggcaaaccctactgcaaccacccctgctacgcagccatgtttgggcctaaaggtatgctcccgtcatccccaccccaccccac

SEQ ID NO: 2826 - DNA, 121 bp, synthetic construct
  misc_feature 1..121: note = Description of artificial sequence: synthetic polynucleotide sequence
  source 1..121: mol_type = other DNA
ctccaccccagcctgttgactttttccaccttctctgcaggctttgggcggggcggagccgagagccacactttcaagtaaaccaggtaggtaggaccccaccccctatcctgcctcctgg

SEQ ID NO: 2827 - DNA, 350 bp, synthetic construct
  misc_feature 1..350: note = Description of artificial sequence: synthetic polynucleotide sequence
  source 1..350: mol_type = other DNA
tgccatccgcctccgccatgacaacagacacattgatgtgggtgggtttacccgccatgcggtcgatggtcttctgtgtgaaggccagcggcagggcctcgtggcccaccatgcaggagaaggtctcccccttcttccagtcctcagctgccacgcgcagtatgctggttacagcgtaggtggtggtgccctggctgggctcctgccgggatgcccaagtcaggtacttctcgcggggcagctcctgtgacccctgcagccagcgaaccagcacatccttggggctgaagccacgtgccaggcacgtcagcgtcaccagctcgttcagggccagctcctccgacggcggc

SEQ ID NO: 2828 - DNA, 466 bp, synthetic construct
  misc_feature 1..466: note = Description of artificial sequence: synthetic polynucleotide sequence
  source 1..466: mol_type = other DNA
ggcagcaggtggacctcgggccggaatgtgtttcctggagggtagagagccaggtcagggggctgggcaggggatgagagagcccctctgctctggtgggcaccctgggctgtgtcctggcccctcagcctgcctcagtttccctctgtacttggcatgagcactggagcccaggattgggagggaggaggcaggccgggaatatgctttgcaaaccagagcactgagcagggccccgagcagggtctggacccaccggattttgtgatgttggcggttagtggggtcttcaactcggggtgggcagcagtgcaggtgaaggtctccccatggttccatggctgggcacagccaggcaggacactggacacgctgtagcagccacagaggtcacgctcaggtggtccttgaacagcgctcttcccacttgagggcgtccaggtgaaggtggcaccagaggcatctc

SEQ ID NO: 2829 - DNA, 468 bp, synthetic construct
  misc_feature 1..468: note = Description of artificial sequence: synthetic polynucleotide sequence
  source 1..468: mol_type = other DNA
tcaggccggtcagtgtgcacgtgaggttcgcttctgaacctaagagcaggtcctcgagggccggtcggtgcagcgacagtcgggggtggcagcatgggggaggtgggggaactggagtggagagatggcctgagctggtcagaacgcccttccccgtgcccccgcctcgcccctcctggcctgtccaccaccacctcctggggctcggcccgcggtccactctggtgtgagtgaaggggcggctccctgtggggaacacgggtgcaggcgcagtgtcagggcaggacggggtggccccgccccactccccagcctgccctctgacctcggcagggcacagtcacatcctggctggaattcgtgtagtgcttcacgtggcatgtcacggacttgccgtctgggcactgtgtggccggcagggtcagctggctgctcgtggtgtacaggtccccggaggcatcctggcta

SEQ ID NO: 2830 - DNA, 468 bp, synthetic construct
  misc_feature 1..468: note = Description of artificial sequence: synthetic polynucleotide sequence
  source 1..468: mol_type = other DNA
ggtgggaagtttctggcggtcacgttctgtccgctttcgctccaggtcacactgagtggctcctgggggaagaagccctggaccaggcatgcgacgaccacgttcccatcttggggggtgctgtcgaggctcagcgggaagaccttggggctggtcggggatgctggaacacagaatgcgctgtgaggacgcggccctcatgccatgtccccaggaggacaggctgtacctgcctctcctctacactggaggaacccagcacagagaggcctggtgacagccccaaggttacacagctcctgcaccatgggcctgcggttggacccagctgtctcatcccagcgacacagtttctgaacatgctccttagatagggcctctgacccaggccatcccagacacaagttatattaaacagggctctgccatggagtggctgagtcccctgagctccctgaccccagttcc

SEQ ID NO: 2831 - DNA, 467 bp, synthetic construct
  misc_feature 1..467: note = Description of artificial sequence: synthetic polynucleotide sequence
  source 1..467: mol_type = other DNA
tgctctgggtgggggacatgtcttgctctttcccctgcccctagagaggattttggtgggggctctgaggagggggcctgggctctgagtgctgtgtgcatggggtaggggtggagtggcttggctgtgaccccatccccctgtccctggtcagagtctcagtccaacacccaccactccatgagccccaccccaggcccaaacaagccacagtggacccctgtggcctatgaggtctcgggactagaggccaacaggctaagccatgtccctgccaggccctccaggacagggcctgttacccaggggagctctgggcccagcccactccaaatttccttcaggcagtgggcaagagagaagacagaatcatggtgcaacagagctgcgtggccctcagaacccctaagaacacagctgggctcagggctctgcaggtggagtcacactcaacccacggcctcctt

SEQ ID NO: 2832 - DNA, 468 bp, synthetic construct
  misc_feature 1..468: note = Description of artificial sequence: synthetic polynucleotide sequence
  source 1..468: mol_type = other DNA
cccacattagcagccacctcagctcatccagcccagcccagcccaggccagtccagctcagtccagctcagtccagcccagcccagctcagcccagctcagcccagcccaccccagggcagctcagtacagctcatcccagcccagcccagcccagctcagctcagctcagcccagcccagcccagctcagtccacctaagctcacccagctcagcccagtctagctcagctcagtccagctcagcccagtctagcccagcccagtacaggtcagcccagctcagcttagcccaggtcagtccagctcagtacagctcagctcagcccagcccagtccaacccagcccagcccagtccaacccagcccagctcagctcagcccagcccagctcagctcagctcagcccagcccagtccaacccagcccagcccagctcagcccaggtcaacgcaacccagctcagctc

SEQ ID NO: 2833 - DNA, 467 bp, synthetic construct
  misc_feature 1..467: note = Description of artificial sequence: synthetic polynucleotide sequence
  source 1..467: mol_type = other DNA
agcatagctcagtccagctcagcccagcccagctcagcccagctcagctcagcccagcccagctcagcccagctcagctcagcccagaccagctcagtccacctaagctcacccagttcagcccagtccagctcagatcaggtcagcccagcccagcccagcctagcccagctcagctcagcccagcccggcccagtccagctcagctcagctcagctcagctcagcctagcccagtccagtttagcccagctcagcccagcccagctcagcccagcccagcctagcccagcctagctcaccccagcctagtccagctcagcccagctcagctcagcccagctcagcacagcccagctcagcccagctcagcccagctcagcccagtctagctcagcccagctcagcccggcccagccgagctcagcccagcccagcccagtccagctcagcccagtctagctcagc

SEQ ID NO: 2834 - DNA, 355 bp, synthetic construct
  misc_feature 1..355: note = Description of artificial sequence: synthetic polynucleotide sequence
  source 1..355: mol_type = other DNA
ccagctcagcccggcccagccgagctcagcccagcccagcccagtccagcccagcccaatctagcccagcccagctcagcccagcccagcccagcccagcccagtccagcccagcacagtccagcccagcacagtccagcccagcccagtctagcccagtctagcccagtccagctcagcccagcccaggccagcccagcccaggccagcccaggccagcccagcccagcccagcccagctcagtccagctcagctcagcccagctcagcctagcccagtccagcccagcccaatctagcccagcccagcccagcctagcccagcccagcccagcccagcccagcccagcccagc

SEQ ID NO: 2835 - DNA, 121 bp, synthetic construct
  misc_feature 1..121: note = Description of artificial sequence: synthetic polynucleotide sequence
  source 1..121: mol_type = other DNA
agcccagcccagcccagcccagctcagtccagctcagctcagcccagctcagcctagcccagtccagcccagcccaatctagcccagcccagcccagcccagcccagcctagcccagccca

SEQ ID NO: 2836 - DNA, 121 bp, synthetic construct
  misc_feature 1..121: note = Description of artificial sequence: synthetic polynucleotide sequence
  source 1..121: mol_type = other DNA
cagcccagctcagcccagcccagcccagctcagtccagctcagctcagcccagctcagcctagcccagtccagcccagcccaatctagcccagcccagcccagcccagcccagcccagccc

SEQ ID NO: 2837 - DNA, 237 bp, synthetic construct
  misc_feature 1..237: note = Description of artificial sequence: synthetic polynucleotide sequence
  source 1..237: mol_type = other DNA
agaaccctggcccagatagtgcggtctgtacagcgtggcccttcgcccctggcctggagtcccaagtccccagcccatcctgcccctggagcccagtttagcttggtcttgaagtctgctctaggtacccccaaaatcacagtatccagccccgctctgcccaccgggacagccaagttcagctgagactggcctaccgggggagtcgccctctgaagttcactctaagccagcctg

SEQ ID NO: 2838 - DNA, 474 bp, synthetic construct
  misc_feature 1..474: note = Description of artificial sequence: synthetic polynucleotide sequence
  source 1..474: mol_type = other DNA
gttcagcctggcccaggtcagcccaggacctccccttgcaggcagcaaactcttatttcagtccagccagctcaaccagcttgcttctgactcagctcctcttagccaggtgagaatggtcagtccagatcaatttagcccggtccagtttagctcagcaaagctggacctaaagtagccacctcaccccagcttcatccagatgaatacagtccagatcagcttagtcagttaagcctagcctagctagttaaatccagttacgaccagctcaactaatcctgctcaggcctgctcagcccagcccagctgaacccagtttagccgaggccaggccagcccagctgaatacagttgcccagtctagctcagcccagtccagcactgcccagtttagctgagctcagcctggcccagcccagctcatatcagcccatctcagctgaaccagtttgacccagtctaacccaaccc

SEQ ID NO: 2839 - DNA, 473 bp, synthetic construct
  misc_feature 1..473: note = Description of artificial sequence: synthetic polynucleotide sequence
  source 1..473: mol_type = other DNA
cgctcagctgaacccagcccagcccagcccagcccagccaaacccagtttagcctagctcagctcagcccatttccacccaacccagctcagcccagcttacccagtccagcccagcagcccagttcagcccactcaggctagcccagtttagcccagcccagctaggttcagctctgctcagttcagcccagcgtagatcagcttatcccagcagaactcagtttaaatcaccccaacccaattcggttcaataatccaagcccagctcagtccagcttcttataaccctgtccatctcaggtcactcacccagcctagtcctccccagctcaacccagtttagcccaaaccagcttagtcagcccaactagctaagcttggctcaggtctgtccagctcagcccaggtcttccaatcacagctcaggcccggccaggccagctcagcccagctccatccacctcagtccag

SEQ ID NO: 2840 - DNA, 357 bp, synthetic construct
  misc_feature 1..357: note = Description of artificial sequence: synthetic polynucleotide sequence
  source 1..357: mol_type = other DNA
ttggcccagcccagccaaacccagtttaggccaggccaggccagcccagcccatgtgaactcagttgagctcagcccaggtcagcccagttcagttaacctcaacctgacccagcccagcccatattagcatatctcagctgaacccagtttagcccaacccagcccaacctaggccagctgaacccaggttaggttaggttagcttagcctagagcagcccagcccaacccagcccaacccagcccagcctgccccagtctaacctagctcagcccagcccagcccagctgaacccagttgagaccaacccagctgagtccactcaggcgagcctagtttagcccagttcacgtgg

SEQ ID NO: 2841 - DNA, 338 bp, synthetic construct
  misc_feature 1..338: note = Description of artificial sequence: synthetic polynucleotide sequence
  source 1..338: mol_type = other DNA
caggaggctgcactgcactttcaccagctctcagctgtctgctgccggcaactacccagctcctgccaaagtctaggagctgagtgatgcctcccaccagccctgctcacctgtggctgccttgccctgagctctagtgcctgtcccctgctcgtcctgcctcccaccggccctgctgacctgcggcggctctgccctggtcccctgacctccaggagctgccccttgctcctcctgccccccaccggcccttttcacctgaggctgctctgccccggtcgcctgagctccaggaggtgccccctgctcctcctgccccccacctgcccctgctcacc

SEQ ID NO: 2842 - DNA, 450 bp, synthetic construct
  misc_feature 1..450: note = Description of artificial sequence: synthetic polynucleotide sequence
  source 1..450: mol_type = other DNA
tgcggcggctctgccctggtcccctgagctccaggagctgtcccctgctctgcaacctcccactggccctgctcaccttctgatgctctcccctgtttcctgagttccaggagccgccccctgttcatcctgcctcccacctgcccctcctcccctgtggctgctctgccctggtcctctgagctccaagagctgccccctactccttctgccccccacctgcccctgctcacctgtggctgctctgccctggtcccctgagctccaagagctgccccctgctcctcctgcccccccacctgcccctgctcacctgcggcgtctctgccctggtcccctgagctccaagagctgccccctgctcctcctgccccccctcccctctcctgtttgcctgtggctgctctgccctggtcccctgagttccaggagctgccccctgctccttct

SEQ ID NO: 2843 - DNA, 451 bp, synthetic construct
  misc_feature 1..451: note = Description of artificial sequence: synthetic polynucleotide sequence
  source 1..451: mol_type = other DNA
acccccacctgccctgctcacctgtggctgctcggtcctggtaccctgaactccaatgcctgccccctgctcactctgtcctccctcaacccggggcagcaatgtcactcaggccactgttgcccccctgcctgtcctggcaccctctgtccaggtttgggctgtttttctggcctcatttttgtttttgcagcacttggcttgttccctatgctgtggagcagccccagtgtccagtcaggtctccccaacagagccccttgcctatgtgcccctcctggatgagctcccggatcctcccgtccctgcactgctcctgctctggaagcctctccggaacctcagctcctcagtggcctctgctctgctgggcctcagcccctcccctcgccccaggcctgctgcactctgggcctttctgggcctccctggactcttccctcctcccgcc

SEQ ID NO: 2844 - DNA, 460 bp, synthetic construct
  misc_feature 1..460: note = Description of artificial sequence: synthetic polynucleotide sequence
  source 1..460: mol_type = other DNA
cgtgcactcagcacagctctcccctcctctccgctgctgaccacagccctgctccccgccagcaggtgccccagccccatcagctggctctgagcccagcccctgtccctcccctgtccctgcctctgcctctgggctccttggcttccacccttctgtcctgctgccacactcaccctcgctgctctgctcccggctcacctgctgtccttggtcctggctgagaggagggccctacggccagctctgctgaccctgccctgggctctggtgatgctgccggcctggacaagcccctccgttcacctggggcctctcctcctccctcgctctgctgcctcctgagctcaggtcggtcgtgcccatcctggcatcaccccacagccggttctgccgcatcccgtcatgttcctcgtgctcccagcccggtcgtcctggaggcctcagtcagcctctggtg

SEQ ID NO: 2845 - DNA, 349 bp, synthetic construct
  misc_feature 1..349: note = Description of artificial sequence: synthetic polynucleotide sequence
  source 1..349: mol_type = other DNA
ggagtggacagtttggcctttggggtcggcttaggtcaggggcagggtcctcccggatatggcttttggcaggtctgagccaagcacctgcccctgtgtgtgaagggcctggggtaggggcacccagcctgtgcctgcctggagcctggtggaaaaagccagaagaccctctccctgagcatgagtggggcgggcagaggcctccgggtgaggagacagatggggcctgccttgctgccctgggctggggctgcacagccggggtgcgtccaggcaggagggctgagcctggcttccagcagacaccctccctccctgagctggcctctcaccaactgtcttgtccacc

SEQ ID NO: 2846 - DNA, 466 bp, synthetic construct
  misc_feature 1..466: note = Description of artificial sequence: synthetic polynucleotide sequence
  source 1..466: mol_type = other DNA
ttggtgttgctgggcttgtgatctacgttgcaggtgtaggtctgggtgccgaagttgctggagggcacggtcaccacgctgctgagggagtagagtcctgaggactgtaggacagccgggaaggtgtgcacgccgctggtcagagcgcctgagttccacgacaccgtcaccggttcggggaagtagtccttgaccaggcagcccagggccgctgtgctctcggaggtgctcctggagcagggcgccagggggaagaccgatgggcccttggtggaggctgcaagagaggtggtgccatgtgaccgcggtgtgggacagagctgggcccagggcgcagaggcccctcggttcttgtctatctgcgagggtccaggcagggtccagtgtctgggctcacgggcattgggtgtgcacctggctggcgccacctgcgtcaccttagccccctccctgccccaaagccaaa

SEQ ID NO: 2847 - DNA, 466 bp, synthetic construct
  misc_feature 1..466: note = Description of artificial sequence: synthetic polynucleotide sequence
  source 1..466: mol_type = other DNA
gtcaggcccggcctgccccagaaagcttgcaggaccggtggccctgtggtgcccttctgcaggcacccctgcagcctaggaggcggggctcggcagccaggtcagcgctctgtgcctgccgggagtcagcacagtccagggcctctagcttggcctcagctctggccatcggtgccacctcagggacggctcatgcccattggccccactccagccttttatgggtgcctggcttgaccagtggacactgttctcagatggcttctcgtgggtcccccgagtcccctgaagctcctgaccctgccgccccagcgtggccctccgctagtgagtgggcctgacttgcccagggccctggtcatagcctgccctctgccctccaaggcccttttcttctgtgcagcagaggggccagacactgcatagggtcggcgcccttcagccccagggccccggaaccccctgc

SEQ ID NO: 2848 - DNA, 466 bp, synthetic construct
  misc_feature 1..466: note = Description of artificial sequence: synthetic polynucleotide sequence
  source 1..466: mol_type = other DNA
cttggaatagcctcctggagcctcctcctcagcctctcccctcctttccccttagccccagtgtgcagcagcccaggtcagggccctgagtgcctggatgccccctgcctcccagtgtcctgcattacttctggaggctcagtcaccacaacctcaccctcccagccctggcctggccttctcggccaccagcccacctcctccctctctccagagcttcccccggcaaggtccctgctgggctcaacccaggccccccagcacaggtaggagccttgcacctgcccttggccctccccaccctgcgtggtgccaggacccccaggccacagggaggccccatttctctctgccgctggcccagtggccctggagtcccactgcaggtggggtgtgcccctgacctctgaggaggctaagtgccctgccctcagccaggccatcccctctgctcagccccagggcc

SEQ ID NO: 2849 - DNA, 466 bp, synthetic construct
  misc_feature 1..466: note = Description of artificial sequence: synthetic polynucleotide sequence
  source 1..466: mol_type = other DNA
ccgctcaccaccccttcccctcacctgcaccacaggctctggctgactctgcccaggccctgaatgggcccctctggcagccctctgctgctacactgccctgcaccacctccactcagcttcattgtgctggtggccctggctcctggcagcccatcttgctccttctggggcgccagcctcagaggccttcctgcctagggtccgctggggccagccctgggaccctcctggtctcaagcacacattccccctgcagccacacctgcccctgcctgagagctcagccccgagccctggaatgccttcccttctccatcccagctcacccttgccaactgctcagtgggatgggctcacactcccttcctggcaccaggaggctgcactgcactttcaccagccctcagctgtctgctgccagcaactacccagctcctgccaaaatctaggagctgagtgatgc

SEQ ID NO: 2850 - DNA, 466 bp, synthetic construct
  misc_feature 1..466: note = Description of artificial sequence: synthetic polynucleotide sequence
  source 1..466: mol_type = other DNA
ctcccaccggccctgctcacctgtggttgccttgccctgagctctagtgcctgtcccctgctcgtcctgcctcccaccggccctgctcacctgtggctgctctgctctgattccctgaggctaagcctcagtcctgctcaccttctgatgctctcctctgtcccctgagctccaggggctgtcccctgctcgtcctgcctcctacctgcccctgcttacctgagggtgctctgccctggtgctctgagctccaggggctgtcccctgctcctcctgcttcctaccagcccctgctcacctgtggctgctctgccctggtcccctgagctccaggggcttccccctgctcttcctgcccccaccagcccctgttcaccttcagatgccctcccctggtcccctgaagtcccagagctgccccctgttcctcctgcctcccaccagcccgtgctcacctgccgctgct

SEQ ID NO: 2851 - DNA, 466 bp, synthetic construct
  misc_feature 1..466: note = Description of artificial sequence: synthetic polynucleotide sequence
  source 1..466: mol_type = other DNA
ctgccctggtcccgagttccaggggctgcaccctgttcgcccacctcccactagccatgctcagctcttgatgctctgtcctggtcccctgagctccaggagctgtcccctactcgtcctgccacccaccagcccctgctcacctgaggcacctgaggctgctctgccctggtcccctgagctccagggtcttccccctgctcatcctgcctcccacctgcccttgttcaccttcagttgctctgccctggtctgctgagctccaggaggtgccccctgctccttctgcccccacctgccctgctcacctgtggctgctcggtcctggtaccctgaactccaatgcctgccccctgctcactctgccctccctcaacccgggcagcaatgtcactcaggtcactgttgcccccctgcctgtcctggcaccctctgtccaggtttgggctgtttttctggcctcatt

SEQ ID NO: 2852 - DNA, 355 bp, synthetic construct
  misc_feature 1..355: note = Description of artificial sequence: synthetic polynucleotide sequence
  source 1..355: mol_type = other DNA
tttgtttttgcagcacttggcttgttccctatgctgtggagcagccccagtgtccagtcaggtctccccaacagagccccttgcccttgcccatgtgcccctcctgggtgagctcccagatcctcccgtccctgcactgctcctgctctggaagcctctccagaacctcagctcctcagtggcctctgctctgctgggtcagctccctgaacgcacggagcctcacccctcccctcgccccaggcctgctgcactctgggcctttctgggcctccctggactcttccctcctcccatctgtgcactcagcacagctctcccctccactccgctgctgaccacagccctgctcccc

SEQ ID NO: 2853 - DNA, 351 bp, synthetic construct
  misc_feature 1..351: note = Description of artificial sequence: synthetic polynucleotide sequence
  source 1..351: mol_type = other DNA
attcaggggtggggacaggcgggcggctcagtagcaggtgccgtccacctccgccatgacaacagacacattgacatgggtgggtttacccgccaagcggtcgatggtcttctgtgtgaaggccagcggcagggcctcgtggcccaccatgcaggagaaggtgtcccccttcttccagtcctcggctgccacgcgcagtatgctggtcacagcgaaggtggtggtgccctggctgggctcctgccgggatgcccaagtcaggtacttctcgcggggcagctcctgtgacccctgcagccagcgaaccagcacatccttggggctgaagccgcgtgccaggcacgtcagcgt

SEQ ID NO: 2854 - DNA, 469 bp, synthetic construct
  misc_feature 1..469: note = Description of artificial sequence: synthetic polynucleotide sequence
  source 1..469: mol_type = other DNA
caccagctcgttcagggccagctcctccgacggcggcggcagcaggtggacctcgggccggaatgtgtttcctggagggtagagagccaggtcagggggctgggcaggggatgagagagcccctctgctctggtgggcaccctgggctgtgtcctggcccctcagcctgcctcagtttccctctgtacttggcatgagcactggagcccaggattgggagggaggaggcaggccaggaatatgctttgcaaaccagagcactgagcagggccccgagcagggtctggacccaccggattttgagagggtggcggttagcggggtcttggactcggggtaggcagcagtgcaagtgaaggtcttcccatggttccatggctcggcacagcccggcaggacactggacacgctgtagcagccacagaggtcacgctcaggtggtccttgaacagcgctcttcccacttgag

SEQ ID NO: 2855 - DNA, 468 bp, synthetic construct
  misc_feature 1..468: note = Description of artificial sequence: synthetic polynucleotide sequence
  source 1..468: mol_type = other DNA
ggcgtccaggtgaaggtgacacctgaggcatctctcaggccggtcagtgtgcacgtgaggttcgcttctgaacctaagagcaggtcctcgagggccggtcggtgcagtgacagtcgggggtggcagcatgagggagatggggtaggtggagttgagggagatggggtaggtggagttgagggaactggagtggagagatggcctgagctggtcagcacatacttccccatgcccccgcctcgcccctcctggcctgtccaccaccacctcctggggctcggcccgcggtccactctggtgtgagtgaaggggcggctccctgtggggaacacgggtgcaggcgcagtgtcagggcacgacggggtggccccgccccactccccagcctgccctctgacctgggcagggcacagtcacatcctggctgggattcgtgtagtgcttcacgtggcatgtcacggacttgcc

SEQ ID NO: 2856 - DNA, 469 bp, synthetic construct
  misc_feature 1..469: note = Description of artificial sequence: synthetic polynucleotide sequence
  source 1..469: mol_type = other DNA
ggctaggcactgtgtggccggcagggtcagctggctgctcgtggtgtacaggtccccggaggcatcctggctgggtgggaagtttctggcggtcacgccctgtccgctttcgctccaggtcacactgagtggctcctgggggaagaagccctggaccaggcaggcgatgaccacgttcccatctggctgggtgctgcagaggctcagcgggaagaccttggggctggtcggggatgctggaacacagaatgcactgtgaggacgcggccctctcctctatactgcctctcctctatactggaggaacccagcacagagaggcctggtgacagccccatggtcacacagctcctgcaccacaggcctgcagttggaccctgctgtctgatcccagcaacatggtttctgaacatgctccttagatagggtctctgattcaggccatcccagacacaagttgtattaaaca

SEQ ID NO: 2857 - DNA, 467 bp, synthetic construct
  misc_feature 1..467: note = Description of artificial sequence: synthetic polynucleotide sequence
  source 1..467: mol_type = other DNA
gggctctgccatggagtggctgagtcccctgagctccctgaccgcagcccctgctctgggtgggggacatgtcttgctctatcccctgcccctagagaggattttggtgggggctcttaggagagggtctgggctctgagtgctgtgtgcatggggtaggggtggagtggcttggctgtgaccccatccccctgtccctggtcagagtctcagtccaacacccaccactccatgagccccaccccaggcccaaacaagccacagtggacccctgtggcctatgaggtctcgggactagaggccaacaggctaagccatgtccctgccaggccctccaggacagggcctgctatacaggggagctctgggcccagcccactccaaatttccttcaggcagtgggcaagagagaagacagaatcatggtgcaacagagctgcgtggccctcagaacccctaagaacaca

SEQ ID NO: 2858 - DNA, 468 bp, synthetic construct
  misc_feature 1..468: note = Description of artificial sequence: synthetic polynucleotide sequence
  source 1..468: mol_type = other DNA
gctgggctcagggctctgcaggtggaatcacactcaacccacggcctctttcccacattagcagccacctcagcccatcccgcccagcccagcccaggccagtccagctcagtccagcccagcccagctcagcccaggccagtccagctcagtcccgcccagtccagcccaagtcatcctagcccatcccatcccagcccaggtcagcccagcttagtccagctcagcccaggtcaacccagcccaggccagctcagtacagctcagcccagcccaggccagcttagtacagctcagcccagcccagctcagcctggcccaggccagctcagtacagctcagctcagctcagcccagcccagcccagcccagcccagtccagcccagtccagcccagttcagctcagcccaacccagctcagctccgcccagcctagcttagcctagcccagctcaacacagctcagt

SEQ ID NO: 2859 - DNA, 468 bp, synthetic construct
  misc_feature 1..468: note = Description of artificial sequence: synthetic polynucleotide sequence
  source 1..468: mol_type = other DNA
ccatgtcaaccaaacccagctcagctcagcctagctcagcccagctcagcccaccccagctcagcctagctcagcccaccccagctcagcccagctcagcccagtctagctcagttcggcccagcccagtccagctcagctcagcccagcccagctcagtccacctaagctcacccagctcagctcagtctagctcagctcagtccagctcagcccagcctagtccagcccagcccagcacaggtcagcccagcttagcttagcccaggtcagtccagctcagctcagtccacttaagctcacccaggtcagctccgtccagctcagcccagcctagcccagcttagcccagcccagcccaacacaggtcagcccagctcagcctagcccagcccagctcagcacaggtcagaccagctcagtacagctcaggtcagcccagaccagtccaacccagcccagcgcagt

SEQ ID NO: 2860 - DNA, 469 bp, synthetic construct
  misc_feature 1..469: note = Description of artificial sequence: synthetic polynucleotide sequence
  source 1..469: mol_type = other DNA
ccaacccagcccagctcagctcatccaagcctagctcagctcagcccagcccaggtcagcctagcccagccgaacccagctcagcccaggtcaacccaattcagctcagctcagcccaggtcaacccaaccaagctcagctcagcctagcccagtccagctcagcccagctcagctcagcccagtccagctcaatccacctaagctcacccagctcagcccagtctggctcagcttaggtcagcccagcccagcctagcccagatcagtccagcttagcccagcccaggtcagcccagcccaggtcagcccagctcagctcagcccagcccagctcagcccagcccagcccagcccagctcagcgcagcccagcctagctcaccccagccaggtccagcttagcccagctcagcccagcccaactcagctcagcccagctcagcccaactcagctcagcccagctcagc

SEQ ID NO: 2861 - DNA, 473 bp, synthetic construct
  misc_feature 1..473: note = Description of artificial sequence: synthetic polynucleotide sequence
  source 1..473: mol_type = other DNA
ccaactcagcccagcccagttcagcccaacccagcccagcccagtccagcttagcccagctcagcccagcccagcccagcccagtctagctcagcccaacccagcccagcccagctcaccccagcccagctcagctcagctcagctcaacccagggcagcccagctcgtccaagcccagcccagcccagcccagcctagcccagcccagctcaggccagcccagctcagctcagctcagctcagctcaacccaggccagcccagctcgtcccagcccagcccagcccagcccgtcccagcccagcccagcccagcccagcccagcccatcccatcccggcccagcccggcccagcccaacccggcccagcccagcccagcctagctcaccccagcctggtctagctcaacccagctcagctcagcccaccctagctcagctcagcccagcccagctcatcccagcccagccca

SEQ ID NO: 2862 - DNA, 4501 bp, synthetic construct
  misc_feature 1..4501: note = Description of artificial sequence: synthetic polynucleotide sequence
  source 1..4501: mol_type = other DNA
gctctggccatcggtgccacctcagggacggctcatgcccattggccccactccagccttttatgggtgcctggcttgaccagtggacactgttctcagatggcttctcgtgggtcccccgagccccctgaagcccctgaccctgccgccccagcgtggccctcccctagtgagttggcctgacttgcccagggccctggtcatagcctgccctctgccctccaaggcccttttcttctgtgcagcagaggggccagacactgcatagggtcggcgcccttcagccccagggccccggaaccccctgccttggaatagcctcctggagcctcctcctcagcctctcccctcctttccccttagccccagtgtgcagcagcccaggtcagggccctgagtgcctggatgccccctgcctcccagtgtcctgcattacttctggaggctcagtcaccacaccgtcaccctcccagccctggcctggccttctcggccaccagcccacctcctccctctctccagagcttcccccggcaaggtccctgctgggctcaacccaggccccccagcacaggtaggagccttgcacctgcccttggccctccccaccctgcatggtgccaggacccccaggccacagggaggccccatttctctctgccgctggcccagtggccctggagtcccactgcaggtggggtgtgcccctgacctctgaggaggctaagcgccctgccctcagccaggccatcccctctgctcagccccagggccccgctcaccaccccttcccctcacctgcaccacaggctctggctgactctgcccaggccctgaatgggcccctctggctgccctctgctgctacactgccctgcaccacctccactcagcttcattgtgctggtggccctggctcctggcagcccatcttgctccttctggggcgccagcctcagaggccttcctgcccagggtccgctgggaccagccgtgggaccctcctggtctcaagcacacgttccccctgcagccacacctgcccctgcctgagagctcagccctgagccctggaacgccttcccttctccatcccagctcgcccttgccaactgctcagtgggatggactcacactcccttcccggcaccaggaggctgcactgcactttcaccagccctcagctgtctgttgccagcaactacccagctcctgccaaagtctaggagctgagtgatgcctcccaccagccctgctcacctgtggctgccttgccctgagctctagtgcctgtcccctgctcgtcctgcctcccaccggccctgctgacctgcggctgctctgccctggtcccctgagctccagtgcctgccccctgctcctcctgccccccacctgcccctgctcacctgcggctgctctgccctggtcccctgagctccagtgcctgccccctgctcctcctgccccccacctgcccctgctcacctgcggctgctctgccctggtcccctgagctccagtgcctgccccctgctcctcctgccccccacctgcccctgctcacctgcggctgctctgccctggtcccctgagctccagtgcctgacccctgctcctcctgccccccacctgcacctgctcacctgcggctgctctgccctggtcccctgagctccaggagctgccccctgctcctcctgccccccacctgcccctgttcacctgcgactgctctgccctggtcccctgagctccaggagctgccccttgctactcctgccccccacctgcccctgttcacctgcgactgctctgccctggtcccctgagctccagtgcctgccccctgctcctcctgcaccccacctgcccctgctcacctgcggctgctctgccctggtcccctgagctccaggagctgccccctgctcctcctgccccccacctgcacctgctcacctgcggctgctctgccctggtcccctgagctccaggagctgccccttgctcctcctgcccctgttcacctgcgactgctctgccctggtcccctgagctccaggagctgctccttgctcctcctgccccccacctgcccctgttcacctgcgactgctctgccctggtcccctgagctccaggagctgccccttgctcctcctgcttcccaccagcccctgctcacctgcggatgatcttccctggctctctgagctccaggggctgcccacctgctcctcctgcttcccaccggccctgctcacctgcagctgctctgccctggctccctgaggctgagcctcagtcctgctcaccttctgatgctctccccttgtcccctgagctccaggggctgacccctgatctttctgcttcctacctgcccctgctcacctgtggctgctctgccctgatcccctgagctccaggagctgcctcctgctcttcctgcctcccacctgcccctgctcacctgcagatctgccctggctctctgaggtccaggggctgccccctgctcgcccacctcccaccagccatgctgacgttgtgatgctctgccctggtctcctgaggtccaggggctgtcccctgcttattctgcctcccacctgccccttctcacctgaggctcttctgccctggtgctctgagctccaaaagctgcccacttgctcctcctgcttcctaccagcccctgctctcctgtggatgatctgccctggctctctgagctccaggggctgcccacctgctccccatgcttcccacctgcccctgctgacctgcggctgctctgccttggctccctgagctccaggagcttccccctgctcatcctgccccccactggcccctgttcaccttcagatgccctccctggtcccctgaagtccaggagctgccccctgttcctcccgcctcccaccagcccgtgctcacctgcggctgctctgccctggtcccctgagttccaggggctgccccctgctcgcccacctcccactagccatgctcacctcctgatgctctgtcctggtcccctgagctccaggggctgccccctgcttgcccatctcccactagccatgctcaccttctgatgctctgccctggtcccctgagctccagggtcttccccctgctcatcctgccgcccaccagcccctgctcacctgaggctgctctgccctggtcccctgagctccaggaggtgccccctgctccttctgcccccacctgccctgctcacctgtggctgcttggtcctggtccctgagctccaatgcctgctccctgctcactctgccctccctcaacccgggcagcaatgtcactcaggtcactgttgcccccctgcctgtcctggcaccctctgtccaggtttgggctgtttttctgccctcatttttgattttgcagcacttggcgtgttccctatgctgtggagcagccccagtgtccagtcaggtctccccaacagagccccttgcccttgcccatgtgcccctcctgaatgagctcccggatcctcctgtccctgcactgctcctgctctggaagcctctctggaacctcagctcctcagtggcctctgctctgctgggtcagttccctgaacgcacggagcctcagcccttcccctcgccccaggcctgctgcactctgggcctttctgggcctccctggactcttcccttctcccgcccgtgcactcagcacagctctcccctcctctccactgctgaccacagccctgctccccgccagcaggtgccccaaccccatcagctggctctgagcccagcccctgtgcctcccctgtccctgcctctgcctctgggctccttggcttccaccctcctgtcctgctgccacactcaccctccctgctctgctcccggctcacctgctgtccttggtcctggctgagaggagggccccacggccagcactgctgaccctgccctgggctccggtgatgctgccggcctggacaagcccctccgttcacctggggcctctcctcctccctcgctctgctgcctcctgagctcaggtcggtcgtgcccatcctggcatcaccccacggccggctctgccgcatccagtcatgttcctcgtgctcccagcccggtcgtcctggaggcctcagtcagcctctggtgtgtcctgccctgttggcttggaagcccctgcccacggtccccgtcgtctcgcactgggtgggcatcggtgcctgaaggctgcccacctcccccgtgctggctccgcttgggcctccatgtggggccggcctcgaccccatgtctccccagcctcttggagcctgttcagcatctcaggtccaggagcgcccacggctgcccccaggctctgtcctcctcccgagcctgtgcccctgccctgtgctgaccccactcaccgaggtgggggtctcagcccttcctgttctggcgaggtacatgtgggcagccccgcccctgccgtcagccgc

SEQ ID NO: 2863 - DNA, 2341 bp, synthetic construct
  misc_feature 1..2341: note = Description of artificial sequence: synthetic polynucleotide sequence
  source 1..2341: mol_type = other DNA
accccctgccttggaatatcgccccgggagcctcctcctcagcctctcccctcctttccccttagccccagtgtgcagcagcccaggtcagggccctgagtgcctggatgccccctgcctcccagtgtcctgcattacttctggaggctcagtcaccacaccgtcaccctcccagccctggcctggccttctcagccaccagcccacctcctccctctctccagagcttcccccggcaaggtccctgctgggctcaacccaggccccccagcacaggtaggagccttgcacctgcccttggccctccccaccctgcgtggtgccaggacccccaggccacagggaggccccatttctctctgctgctggcccagtggccctggagtcccactgcaggtggggtgtgcccctgacctctgaggaagctaagcgccctgccctcagccaggccatcccctctgctcagccccagggccccgctcaccaccccttcccctcacctgcaccacaggctctggctgactctgcccaggccctgaatgggcccctctggctgccctctgctgctacactgccctgcaccacctccactcagcttcattgtgctgatggtcctggctcctggcagcccatcttgctccttctggggcaccagcctcagaggccttcctgcccagggtccgctggggccagccctgggaccctcctggtctcaagcacacgttccccctgcagccacacctgcccctgcctgagagctcagccccgagccctggaacgccttcccttctccatcccagctcgcccttgccaactgctcagtgggatggactcacactcccttcccggcaccaggaggctgcactgcactttcaccagccctcagctgtctgctgccggcaactacccagctcctgccaaagtctaggagctgcgtgctgcctcccaccgtccctgctcacctgtggctgctctgccctggtgctctgagctccaggagatgccccctgctcctcctgccccccacctgcccctgctcacctgcagcggctctgccctggtcccctgagctccaagagctgccccctgctcctcctgtcccctgaccctgctcctgtttgcctatggctgctctgcccttgtcccctgagctccaggagctgcccctgctcattctgccgcccacctgcccctgttcacctgtggctgctcttccctggtcctctgagctccatgagctgccccttgctcctcctgctttccaccagcccctgctcacctaccgatgatcttccccggctctctgagctccaggggctgcccacctgctacccctgcttcccaccagccctgcttacctgcagctgctctgccctggctggcagagctgcagaagctgccccctgctctgcaacctcccaccggcccttctcatcttctgatgttctcccctgttccctgagctccaggagctgccccctactcgttctacctcccaccaacccgtgctcacctgcgactgctctgccctggtcccctgagctccaggggctgccccctgctcgcccacctcccaccagccatgctcaccttctgatgctctgccctgatcccctgagctccaggactgccccctgctcgtcctgcccctcacctgcccctgctcacctgaggctgctctgccctggtcccctgagctaaaggggctgccccttactcatcctgcctcccaccagcccctgctcaccttctgatgccctcccctggtcccctgagctccaggggctgccccctgctcgtcctgcctcccaccagcccctgctcacctgcagctacactgccctggttccctgagctccaggagctgccacctgcttgtcctgccttccaccagcccctgctcacctgcagctacactgccctggttccctgagctccgggagctgccgcctgcttgtcctgcctcccaccagcccctgctcacctgtggctacactgccctggtgccctgagctccaggagctgccccctgcttgcccatcttccactgagccctgctcacctgcaactgctctgccctggctctatgagctccaggggctgccccctgctggtcctgcctcccacctgccctgcgcacctgtggctgcctcctcacctgtggctgctctgccctggtcccctgagctccagggtcttcctcctgctcatcctgcccctccaccggctcctgttcaccttcagatgctctcccgtggtcccctgagctccaggagctgccccctgttcttcctgcctcccacctgccctgtgcacctgtggctgcttggtcctggtcccc

SEQ ID NO: 2864 - DNA, 12961 bp, synthetic construct
  misc_feature 1..12961: note = Description of artificial sequence: synthetic polynucleotide sequence
  source 1..12961: mol_type = other DNA
gcccagtatagcccagcccagctaagcatagttcagcacagcccagctcagctcagcacagttcaacccagctcagcccagctcagtgcagcacagcccagctcagcccagcccagctcagctcagcccaacccagcccagctcgctcaaccttgctcggctcagcttagcccagcccagcccagctcaatccagcctggctcagcccagcccagcccagtttggctcaacccagcttggctcagcccaggtcagcctggctcaactcagcccagcccagcccagctctgctcaacccagctctgctcaactcagcccagctcagcccagctcagcccagttcagctcagccctgctcagcacagcacagcagagcccagctcagcccagctcagctcagttcagctcagccctgttcagcacagcacagcagagcccagcccagcccagcccagctcatcccagctcagcccagcccagcctagcttagctcaacccagctcagctcagttcagctcagccctgctcagcacagcacagcagagcccagctcagcccagctcagctcagttcagctcagccctgttcagcacagcacagcagagcccagcccagcccagctcaacctagcctggctcagcccagcccagcccagcccggatcggctcaacccagcttagctcagcccaggtcagcccagcttaactcagcccaggtcagcccagcttaactcagcccagcccagcccagctcagcccccagctctgctcaacccagcccagctcagctcagctccgctcagcccagttcagcccagctcagcccagcccagcctagcttggctcaacacagctcagctcagccagcccagaccagctcagctcagcccagtccagctcagctcagcccaacccagtccggctcagcccagcccaacccagcccagcccaacccagctcggcttaacccagctcggctcagcccagatcagcctggctcaactcagcccagcccagctcaacccagcccagttcagcccagctcatccaagctcagctcagcccagcccagttcagcccagcccagttcagctcagctcagcccagcccagttcagcccagcccagttcagctcagctcagctgagcccagcccagcccagtccggctcagctcagccccgccccactcagcccagctcagctcagcccagctcagcccagctcagcttagcccagctcagttcagccaggcacaatctggctcagcccagcccagcccagctcagcccagcccagcctagctcagcacagcccagttcagctcagctcagcttaactcagctcagctcagctcagcccagcccagcccaggtcagctcagcccagcccagcccagcccagatcatcccagctcagctcagctcagctcggcttagcccagctcaacctggcccagcctggtccaggtcagcccagcctggaccacccagcccagctcagctcagcccagctcatcctggttcagctcagctcaacccggctcagcccaggtctgctcaacccagcccaaatcagctcagcccagcccaggtcatcccagctcagcccagcacagcctacttcagctcagctcagctcagcctaggtcagctcagttgaggtcagctcaactcagcccaatccagcctggctcagcccagctcaccctagctcagcttagctcagcccaactcaacccagcccagccttgcccaacccagctcagctcagcccagcccaggttagcccagcccagcctcggcttagctctgctcagctcggccctgctcgcctcagcccgttcagcccagttcagctcagctcagctcagcccagctcagcccagccctggttagctcagcccagctaagctcagctcggcttggctctgctgagcttggcccagcttggcttagcctgatacaacctgctcagcccagttcagctcggctcagcccagcccagcccagcgtagctcagctcagctgagcccagcccaggttagctcagccccagtccaggtcagctcaactcagcccaaaccagcctggctcggcccagctcaccctagttcagcttagctcagcccagcccagccctgcccaacccagctcagctcagcccagcccaggttagcccagcccagcctcggcttagctctgctcagctcggcccagcccaggttagcccagcccagcctcggcttagctctgctcagctcggccctgctcgcctcagcccgttcagcccagttcagctcagctcagctcagcccagctcagcccagccctggttagctcagcccagctaagctcagctcggctcagctctgctgagctcggcccagcttggctcagcccgacacagcctgctcagcccagttcagctcggctcagcccagcccagcccagcgtagctcagctcagctgagcccagcccaggttagctcagccccagcccaggttagctcagcccagctcagctctgcccaggttagctcagccccagtccaggttagctcagcccagctcagctctgcccaggttagctcagccccagtccaggttagctcagcccagctcagccttgcccaggttagctcagcccagctaagctcaacttggctcagctcagcctagcttggctcagcccagcacagcacgctcaacccggttcagcttggctcagcccagcccagcccagcctagctcagctcagccccgctcagcccagcctagctcagctcagccccgctcagccccgctcagcccagcccagcccagcctagctcagcccagctcagcccagcctagcccagctcagcccagcccagctcagcgcagcccagcccagctcagcgcagcccagctcagctcagctcagcctagccttgctcggcccagctcagctcagcccagctcagcctagccttgctcagcccagctcagcccagctcagcccagctcagcccagcccagcctagctcagctcagccccgctcagacccgctcagcccagcccagcccagcccagctcagcccagcccagctcagctcagcccagccctgcccagctcagcccagcttagtgcagccaagcccagctcagctcagctcacctggtgcaacttagcccagctcagctcagctcagctcaacccagttcaactcagcccagttcagctcagctcagcccagttcagccttgtttagtctaggtcagcttaggtcagttttgcccatctgagtccatttctgaaagctggatggagttgtcatggccagaaatggtcagcccaccagacctgcttgtctcagctaaagccatctcattgccaggttcctgcacagccaggctggcttccatcttttgtctccctctacttgataccccagttccctgcagtcctgccccagcgccacctgggttttggttccaaagcattaccaatcattaccaccctccactacctgggtggaatatttctttgctgctttaaagtcattaaaacatcttgagaatgagaccaagaatttaggagcctgtgctgtgataaaaatgagcaggtccccttgctctagaagtggcagcatatcttctgcaccaagaggagggtattgagatgctcagagcctccaccttcccggagcatcccctcccttctgagtctgcagtaaacccctgcctttaaattccctctagataacagtcatcattggaaacaaccaagaaatgcattttatctgaatttgccacttaaaattctgccatttaccataaatcgctttggaaggcatgggctactttcaagggtgcgatgatgacctacagtcaatgacttagacaagggcgatgccagtggggcttggtatgttctcaagcatcattacccatgccatccccattcagaggttgtggagcagctcgtgcgacctctccttcaaatgggctttagggaaagttaaatgggagtgacccagacaatggtcactcaaaagactcacataaatgagtctcctgctcttcatcaagcaattaagaccagttccccttctagtggaaataagacgtcaaatacaaagttttaagagaagcaaatgcagcagcggcggctgcctgtctcttaccatgtcgggcgcctggtcactgcgagccttgcaaagctttggcatggaatcattcctccaagtccattaacaagggctggggcctgagcagccagtcggcccggcagcagaagccacgcatcccagctctgggtagtccggggagacccaaagcccaggccgggcctggcagccaccctcccagagcctccgctaggccagtcctgctgacgccgcatcggtgattcggaacagaatctgtccttctaaggtgtctccacagtcctgtcttcagcactatctgattgagttttctcttatgccaccaactaacatgcttaactgaaataattcaggataatgatgcacattttacctaaaacttatcctaaagtgagtagttgaaaagtggtcttgaaaaatactaaaatgaaggccactctatcagaatatcaaagtgtttctccttaatcacaaagagaaaacgagttaacctaaaaagattgtgaacacagtcattatgaaaataatgctctgaggtatcgaaaaagtatttgagattagttatcacatgaagggataacaagctaatttaaaaaactttttgaatacagtcataaactctccctaagactgtttaatttcttaaacatcttactttaaaaatgaatgcagtttagaagttgatatgctgtttgcacaaactagcagttgataagctaagattggaaatgaaattcagatagttaaaaaaagccttttcagtttcggtcagcctcgccttattttagaaacgcaaattgtccaggtgttgttttgctcagtagagcactttcagatctgggcctgggcaaaaccacctcttcacaaccagaagtgataaatttaccaattgtgtttttttgcttcctaaaatagactctcgcggtgacctgcttcctgccacctgctgtgggtgccggagacccccatgcagccatcttgactctaattcatcatctgcttccagcttcgctcaattaattaaaaaaataaacttgatttatgatggtcaaaacgcagtcccgcatcggggccgacagcactgtgctagtatttcttagctgagcttgctttggcctcaattccagacacatatcactcatgggtgttaatcaaatgataagaatttcaaatacttggacagttaaaaaaattaatatacttgaaaatctctcacatttttaagtcataattttcttaaccatttttctcagaagccacttcaaacatatcctgtcttttaacagtaagcatgcctcctaagataaacaatccttttctcttggaaaccagcttcaaggcactgaggtcctggagcctccctaagcccctgtcaggacggcagccaccgtttctgggctacccctgcccccaaccctgctctcatcaagaccggggctacgcgtccctcctggctggattcacccactccgacagttctctttccagccaataaagaatttaagatgcaggttgacacacagcgcacctcataattctaaagaaaatatttcacgattcgctgctgtgcagcgatcttgcagtcctacagacaccgctcctgagacacattcctcagccatcactaagacccctggtttgttcaggcatctcgtccaaatgtggctccccaagcccccaggctcagttactccatcagacgcacccaacctgagtcccattttccaaaggcatcggaaaatccacagaggctcccagatcctcaaggcaccccagtgcccgtcccctcctggccagtccgcccaggtcccctcggaacatgccccgaggaccaacctgcaatgctcaggaaaccccacaggcagtagcagaaaacaaaggccctagagtggccattcttacctgaggagacggtgaccgtggtccctttgccccagacgtccatgtagtagtagtagtagtaatcacaatggcagaatgtccatcctcaccccacaaaaacccagccacccagagaccttctgtctccgggcgtcacatggaagctgactgtccgtggccctgtcctgcccttctcatggaaccctctgctggcctcccacgtaccccacattctggcctgacccctcagaagccagaccactgtcggcctgggaagtccaactgcaagcagacggctgctaagtcacccccaggagtccaaaaaccccggggggcacccgtcccagagagcgggtgccttggagcgggacagagtcccaccacgcaatcatcacgacagcccctgagaatgctccaggtgaagcggagagaggtcaccccagaccagccgaaggagccccccagctgccgacatctgtggccggacttggggaggacaggctgggttcccattcgaagggtccctctccccggctttctttcctgacctccaaaatgcctccaagactctgaccctgagaccctggcaagctgagtctccctaagtggactcagagagggggtggtgaggactcacctgaggagacggtgaccagggttccctggccccaggggtcgaaccagttgtcacattgtgacaacaatgccaggaccccaggcaagaactggcgccccgctacgtccctgggaccctctcagactgagcccggggagggcccgggggttgttgggcattggaccccagaggcctagggtggccctggccacagagagacccgtgctgctgggctcaggaggaaggagcatctggagcccttgcccctcgtctgtgtggccgctgttgcctcagggcatcctcctgagccccccaggatgctccggggctctcttggcaggagacccagcacccttatttccccccagaaatgcagcaaaacccttcagagttaaagcaggagagaggttgtgaggactcacctgaggagacggtgaccagggttccctggccccagtagtcaaagtagtcacattgtgggaggccccattaaggggtgcacaaaaacctgactctccgactgtcccgggccggccgtggcagccagccccgtgtcccaaggtcattttgtccccagcacaagcatgactctgcccaccctttgccccagcagcagagtcccagttcccaaagaaaggccttctgctgaacgtggtcccaaacagccggagaaggagccccggagggccccacatggcccagcgcagaccaaggagcccccggacattatctcccagctccaggacagaggacgctgggcccagagaaaggaggcagaaggaaagccatcttacctgaagagacggtgaccattgtcccttggccccagatatcaaaagcatcacacagggacacagtccctgttcctgcccagacacaaacctgtgcccgtgcaggacactcgaatgggtcacatggcccaagcacagagcagaggcagccggcgtccctgtccccagccacacagacccccgggctgagacccaggcagggaggggtgacgttcccagggagacggtggccgggctgccctggccccagtgctccaagcacttgtagccacactaaagcgcaggcctggtccccggcacatgaacagccagcgcccagccccagcccaggctctgcccacaacttctccttcccgtccctgccctcggcctgcttgctacctgtggagggtccctgacggggctgaagcccagcggggtccctgcctgtccttgggggctccagctggccccagggctaagtgacagcagggctctggcatgcagcccatggcggagaccccagggatggcagctggtgtggcctcaggccagacccaggccggctgcagaccccagatacctggcctggtgcctggacagagaagactgggagggggctgcagtgggactcacctgaggagacagtgaccagggtgccacggccccagagatcgaagtaccagtagcacagcctctgccctcctgcttctcccatacaaaaacacaccctccgccctcctgccgacctcctttgctgagcacctgtccccaagtctgaagccaaagcccttgcctggcccagtacacctggctccccgctatccccagacagcagactcacctgaggagacggtgaccagggtgccctggccccagtgctggaagtattcagccacggtgagtcagccctgagccaggggctacagaaacccacagcccggggtcccgggggagcatggtttttgtagagctgccaatcactgtgtccccagttagcacagtggttctcagctcagccaaaaccctgcggctggtagggggcctgtggggctgggggctgatgtggctgcggtctccagggcgggtcgggtccaggggcccccagcacctttgccagtgctctcccttccgctgttagccccaaaacacgtgggagaccccagccctcaaccctgccagtcactctggagtcttgtgccaataatttgctgctgttaagaatcattagagtgctgaaggctgccaagtgtgtttttccttttcttttgtaaattagagcagatctgaagctgggtctgtcacgccacctctcatccacttgctttctgacttgttttcccagcagcagagaggcccgggtggcggtggccaggggagcctcctcgcctggagggccacggcccccgccagggctcctcgctggcctgcaggggcaggaagcctttcctgctctgatcccgtctgtggggcccggcgggggttgcctggttggttccacctgttcaccgtcgtcccactgaacgggaggcctcagtgggtggcactgggcctcactcaccacggcgccctggcgtgggctccctgcgtgtccaccagtgctgggtcccttctctgagcctcagctggtcctcagtgagtctcagctcttcccatggtgggtgccagggaaggtgcaaggtggtctaaggagagcccctccccaggcctgcactggctgccttccgccgagtctgggtgaggggctttgcacgcaccactggccagacgcgggctgggtggggccctcagggaggctgaggcctgcggccaggtgtgagcatgggggtgtgcctggtgagggcctctgctggggatgaactgatgggcacagggtgtctgggggcaggggaggtgccctgcgggcttgctggggagggtctgtgtcggggcagagttccagggagaggaacaggcaaggcaaaggctgggaggctgggacctgtcgttggaggacacaggtggtttcctgaggctgggtggaaagggggcctgtgtgccttgaaggggccgaagggtgctgggggcttgcttaggcgctgcccaagaaggccccctcaggcaccgtgcgggcagggatgaggggtctgggagggaagcctggatgtggggagagggttggggctcctgtaggggtgtggacagaatggcggcggtttgtggagtttcctacagggttccaggcaggacgggggaccctgaggtgctgtctgggacagtggatctctctagacatggttgaacagctgccagcatggggatggagtcttaggctgggaatggtgagagaacccacctccagccacgaggggccgagaacccatttgtttaggggtggttgggccctgatggcctgggaggcacctgtgagggggtgaggtgggggagtgaggaagagggtggtctggcgctgggggagtggctctctggcctgaggaccctctgcccccacctgccacaagcacacaccagggaaagcacacgagtgtcacaggcgtggcggctggatcctacaatgggtggccagggcagggcccacaggccaggtcgagttggtcccccagcctctcccaacagctggcatctcctggggcacctgtcccccctgagggtcacttagcctggatggtacctcctggcctggctgccctgagcagggctgggagctgagctgggagctgcggccccgagggcagtggagagggcgctccgctcacgtggcccacacactgtttaggacgcggcctttagagtctgctccgctcccgtggcccacgcactgtttaggacgcggcctttagagcctgctccgctcacgtggcccacgcgctgtttaggacgcggcctttagagcctgctccgctcacgtggcccacgcactgtttaggacgcggcctttagagcctgctccgctcacgtggcccacgcactgtttaggacgcggcctttagagcctgctccgctcacgtggcccacgcactgtttaggacgcggcctttagagcctgctccgctcacgtggcccacgcactgtttaggacgcggcctttagagcctgctccgctcacgtggcccacgcattgttcaggacgcggcctttcgatcccgcggaagacagtccttgagcaggagcagctccccagctgagacagggccctggatgtccaagccagagggaaaggcccggggtcaggaacaagggagggtctgggcctagaagcaggggggcaacacctactccaggcactgagcctctggaccgtgcggtcctggagaaggagaagccagaggcgacccctggcagggatggcaggcctcacgggaggacagggcactgccgcaggtctccacgccttccaggcctatggtgcagcttggcgagctggccaggctccaggttggtgaggggctggctctgggctggctctgggctggctctgtcatgggccagatggctagaacacagggtatcactgtgaggaatgacgctgtctgtcactcccaggttagggagaacgcgttgtttcccttatacccgaggctccgcttctgatggtctctgctgtaggagacgtggtttccacgcttccaccactgctcctgccggcctgggtactctgctctggggggatggcccttctgggcaaagacacagcagaaagagtcttgctgcttcatttcccaggtcagaagcaacgcaggagcacaccactgcttcagctgataatcgacagagtctccctcctctaacacccaattccttccctaagaggactgggagagtgaggagaaggtctgaggagaatcatcttccctggcatggagcttggcattttgtcccaaaggaaacagtggaatttgcttggggtgaattttgcccaagttttttcagcttttcccattttgtgtgtaatactcatatgctatatagagttgggttttatcttgtggtccaatttgaaagtctcttccttttaataggcaagttaaggccattgatgtttgttgttttcatagatctgtttggcttcaatcttatcttagtagtttatattttctatttttatgcttccaaaaagttttccatcttaagttttcttgttctttgctatcttctatgtgtagtggctacctttataactttccaaaatattctttgttcttctttggacaatgtactttagttctttactatatacgagtatgaaattacctggtttcctcttccttttcccctccatctctagcatcatgtgattgtaatcagtaatattattttcttagaatttgtttgtactgtctaatatgcccaatttggttttactgaagtcctttggctgagagttatttggagtgaggcagtaattcagaagtgctctctatctcatattctgtgttttgatcattgtaaaatgtccactttgtcaggcagacaccatttcacctctgttgaggccacatggtcccccacagtcatttctatcttagtctcgcagttaaggacacttaatatttacttttggttcttggccctgggttctccaagcaccttttgatggctggtggtcttcctctagtagtttcatcatgagattatggattatagaatgtttggaactccttttcagcagccttttttcttcaagaacagttggctgtatatagactctggactatccactacttctttcccccttaaggaccctacaggttttgtcctaccatttactgatcttgaatgtggctggtgagaaatctaggactggtcatcatcccccttatagatgattgtgtgtgtgtttttttctttttttttttggatttagaattttttcaaatttgtgcccaaattagttctttctaaaattaattaccaaaagtaatagaacagaaagcatacttaaatctataatttcaaaaactctatcctgaaataaaacaagattgcccacgtattggtagggtgactgagagaaccagagaaaattggcttagaatggtggctcctgagatgcactggactccattctttcttaggtactcggattatgtggatgtcgtctcttctttgcctgtcttccatatctgtcacctctttttatatattttattttacagaatttttatgggtacatagaagatgtatatatttatggggtacattggatgttttgatctaggcgtgcaatgtgaaataatcacatcatggaaaatggggtatccatcctcttaagcattatcctttgtgttagaaacaatccaattatacacctttcattattaaaaatatacaactaaattactgactatagccaccttgctgtgctatcaagtagtaagtcttattcattctttctatttttttgtacccgttaaccactgccacctttccctatccccccaccaccgttctcagcatctggtaaccatccttttactctttatgaacatgggtgcaattgttttgatttttagatctcattaataagtaagaacattgtaatgttt

SEQ ID NO: 2865 - DNA, 359 bp, synthetic construct
  misc_feature 1..359: note = Description of artificial sequence: synthetic polynucleotide sequence
  source 1..359: mol_type = other DNA
ttacaggtgggagccaccatgtccagcctatttgtcaatattctttattgtacatattgaataaataaaataaaaatgaaccatcttacacataaaaatagacatacacatttatgaatatgcttaaacaccacgtaggatttacgcagtgagagaagcactcaagcgaccacattccctgagtgtgtccgggtagaaaatatgccagctttgttgggcataacattcttgaatcatattttctttccaacagacttttacaggcattgataagtttttgtgtttttcaagaaatccgaggcgacactgacttccccttcataagggattgttgtgcatggggctcatgttacttacac

SEQ ID NO: 2866 - DNA, 121 bp, synthetic construct
  misc_feature 1..121: note = Description of artificial sequence: synthetic polynucleotide sequence
  source 1..121: mol_type = other DNA
tgaagtctggtaactttaatgaaatccatttgctatggaatggtctggatttctggctgcctctcacttccttagtctcggctagtggagcggttggagctggaagcctcacccccaccct

SEQ ID NO: 2867 - DNA, 359 bp, synthetic construct
  misc_feature 1..359: note = Description of artificial sequence: synthetic polynucleotide sequence
  source 1..359: mol_type = other DNA
gcctgcccctgggcaccctgaggctgccttcagtgaggaggtgaccccaagctcagggctgacctgcacctggcactctgcggcatgaacccaatgcaggaagaaaggaaggagggaggagggagggaacacaggggcgctgggagcgaatgcagacagaaatggcagtgacccgagtgccaggccgtcctggtttggggttgaactgtgtggaaacagctccctggcttgtgtgtaagtggttgggggagggcatggaggtctggggcaggaaggggtggcaggaaggcagctcccggccctgagggtctgaagcttatcttcttcctgtgagctggcagtgggcggctccctggggc

SEQ ID NO: 2868 - DNA, 121 bp, synthetic construct
  misc_feature 1..121: note = Description of artificial sequence: synthetic polynucleotide sequence
  source 1..121: mol_type = other DNA
tgtgccctggactggtggtctggtggtgcccaggcctcccagggagagcagggcagctggggctggaggagccctggggcccagtacccacacctgtgcccagcgccgtcaggggggaccg

SEQ ID NO: 2869 - DNA, 358 bp, synthetic construct
  misc_feature 1..358: note = Description of artificial sequence: synthetic polynucleotide sequence
  source 1..358: mol_type = other DNA
gggcacgaggctcctttgcccaggaagggaagcgagtgagtgagacctggagcccccaccctatgggcggctccaaccctcctggagggggactgggcagggggtaggtgtgtgtgtgcaggtgtggggggatgaggaggggtgggctccagcctctgggaatcctgccaagggcttgggcactgcagggttgctggacccgggctgcctggtgtggccatggtggctgcatccccagagccgggatggaggcgcagtggggaccggcgccagggagttgcctagtggtggctgcatggaggacctgccctgcatgatgcccctatcttggggggcatggggtccacatgagaggaag

SEQ ID NO: 2870 - DNA, 478 bp, synthetic construct
  misc_feature 1..478: note = Description of artificial sequence: synthetic polynucleotide sequence
  source 1..478: mol_type = other DNA
gggcacaagccccctcctgggggtcttcctgagaccacctcagtcagggctctgtgcttggtgactttccagaaggtcctccctgcacagaccccaaagtctgtgttgccccagggcaggaaagaaaaatctgtgtcctggtcgaggttgggccccacaatggtggcccctaaacctgagtctgctccaaagcacccgcccctcagcaggccctgagtgagggacagagacagcggtggggtctttgatccaggtggacacgggggtggatcccagtgggaagtcaccagggccagggtcccccagggtattggggtgtctgtgttcctggtgtcggctctggatttggggtttgtgcctgtgctgcctgggggtgatgttgggaggtgcagatggccccggcccccatcctcaccatccaatggggacactgtggagctccaagtgctgggggtcatgagggctgggaaggtcgtat

SEQ ID NO: 2871 - DNA, 478 bp, synthetic construct
  misc_feature 1..478: note = Description of artificial sequence: synthetic polynucleotide sequence
  source 1..478: mol_type = other DNA
gttcgggcggctggtcccttctctggctgggcctccagcagtggccgggagacagttttggacatagcttttctcacagtggtagtagctcccactatacccaccgtgactcggggctgttcagaatccacccaggcgccctgagctctggggcctcctgggtaggggctgggctgctgggtggggtctcctgtggaggctctggcggctgtggctcaccttaggtgtggggtgaggactggcagccccagctagcggcacccacagagcctgaagcctgcacacattctgcctgggtgtgtggggtgggtccgggcccctctgggcaggatggcctcaatggggagggggctgggattcccgcctggctcctcctcggggtagaggggacccatctcctggccctggatcccctcaggctgcccctgttttctcaggaacactgaacagggcagggcgccctggaggggagacatct

SEQ ID NO: 2872 - DNA, 478 bp, synthetic construct
  misc_feature 1..478: note = Description of artificial sequence: synthetic polynucleotide sequence
  source 1..478: mol_type = other DNA
gttggcttgagtgtcaggtgtggcctcagatcctaaatgtgtcctgcctgctctctctgccttcggctgacttgggatggggtttctgtcctgcccagtgtcattgtggtagccgctgctatacccgactgtgacacagacagcttcagaaacctcctggtttgtttgggggccttccattgctgggctcagcgcgcctcttggacttggctgccctggacaggggtgtccctcaacactggttctggggggcctgtccctctgtctggtgtctggaatgggggtccgagacagaggccagctgcctcacagccagcaggggccggagacaggtgttccacccatggtgggtcctggtgggcctggatggagctgaggtctgtgccagtattggggtccccatatcttgctccttcatggctctgagctccccctggcaggacttcttcggggtgctgggtctgtcctctgtgggagg

SEQ ID NO: 2873 - DNA, 121 bp, synthetic construct
  misc_feature 1..121: note = Description of artificial sequence: synthetic polynucleotide sequence
  source 1..121: mol_type = other DNA
ggctgcccccaggcccagcactgcagtggagggctcactgaggggcttttgtatctggcctgagccgctgtggaggtattccactgtgagagggtcccgcacagattctcccatcctgctt

SEQ ID NO: 2874 - DNA, 358 bp, synthetic construct
  misc_feature 1..358: note = Description of artificial sequence: synthetic polynucleotide sequence
  source 1..358: mol_type = other DNA
ctcctcccagagcctggaggggatgggatccgggggtcccaaaggtggatcctagacccaggggaggggggcctcttcactgacctccccttcctccattcctccctccccaaagctgccctggcggcccccctgcaccccagcctctgtctgcactggctctgccggctctggtgtaggtgggactcaggatggtgtggacgacgtgtggccagggtggagaggaggtgggcgggtcggtggatgagagggatgggctcatccaagatggagcacctgcagggccctgagccctcccccacaccgtccctggtccttccccgcagcctgccacggtgggagccccaggcagggtgga

SEQ ID NO: 2875 - DNA, 478 bp, synthetic construct
  misc_feature 1..478: note = Description of artificial sequence: synthetic polynucleotide sequence
  source 1..478: mol_type = other DNA
ccataccctctaggaggctggcacttccctgggttcacgaagacggagcctcctgcccggtggtgcagtggccccgcttcctccttcagcccttcctgatggcttcctggggattctggattcccatggagtgatgagaggagagcagaggggaggaggggcagggctgggtcctgggtaagggggtgctcgggctggggtccctggagagaagttctgggttcctgggggacaattaggcaggcgtcctttctgtccacaccccaagggtcccggcaggagccaggtgggggaaccataaggagagggcctgtgtcctgtccccccaactcctctagacagggtgggggctgaggggtcctccccagggcagggccaggcagtgactctggtgttgggttgttggtcgtcatgggctgacctggggagtgggggttgcagagtagaaaggggcggacttaggtagggcatggcacag

SEQ ID NO: 2876 - DNA, 121 bp, synthetic construct
  misc_feature 1..121: note = Description of artificial sequence: synthetic polynucleotide sequence
  source 1..121: mol_type = other DNA
tcatccctgtgttcaggccatttcctgtcctgggtgcctgcactgaacctcggcaaggacaggggtggcctcccagcctacagcctgcctgggatctgctctggccctagaactggggaca

SEQ ID NO: 2877 - DNA, 358 bp, synthetic construct
  misc_feature 1..358: note = Description of artificial sequence: synthetic polynucleotide sequence
  source 1..358: mol_type = other DNA
gaagccatcctggaggtcagcagcctcctaggacagcaggaggagaccaggccagcccctagcaggggaggcagtggggattttggtagggtctgcgttgagagccagtacccagtagtcacagagcaagatgccccagcaatatgtcctatctgcagccgtctgcccaccctgtcttagccagggcaagagagggtactgtgcccctggcaggcccagcctttggccttccttggagggatgagggcctgggaagccgagctgttggtggcgctgggaagaggttcccaggacagggggatggagcttaatcaagcggcctggttggggttgggtccttctgcaggctggccactca

SEQ ID NO: 2878 - DNA, 478 bp, synthetic construct
  misc_feature 1..478: note = Description of artificial sequence: synthetic polynucleotide sequence
  source 1..478: mol_type = other DNA
gtgatggggatctccgggtggtccctgcacctagtgccaggatacacacagtgctctgggcccactgtctgggctccccgccttgtttccagggggctgggtggttctccaaggctcagtttccccactgtggagtggatgctgctggagggatgaggatcgtagagcacagcttggcagcttctgtgcctgctgcccctggggacctgggctgtgggacggggcaggcttccccatcagggctgggcctgccgggagcccagcaccctcacacgcccacactgggggctccgtggctctgtgactccatggctctgtggtgctgcctgcacctctcagggcgggaagctgcctttccctgccagcctttgatttctatctcagtcatccctgccctggagcacagacctcccactgagggaaccctccccacagagggccagagggcagacagcagccttgagagccccaggagaag

SEQ ID NO: 2879 - DNA, 479 bp, synthetic construct
  misc_feature 1..479: note = Description of artificial sequence: synthetic polynucleotide sequence
  source 1..479: mol_type = other DNA
caggtgagctggaggcctggggctgcgtggcaggggtctgtctacttggcctggttgctgctatgggcggcaccactgtggtaattgtagccatctctaccacggcctggcaccccctgacaataaccacacctggaactggaggcggggctgtcaggaggagcttcccagggaacagggagggtccagacagctgtgccaggggcccccagtgctagagagcctgggggctgctcagggaccagacatgcactgtgtccccctggagaggcctctgcagcctcctgggctctgggacgggtctctggtcagcaggaggctgggtgctccccggcatgtgctctcctgccctcactggtgagctcctatgtggcccagtgtgggcccagctccagcgtccactcctgtcggcctggccgagggtcccggcagaactgggcatggctccttcttaggggcctcgaggactctctctacag

SEQ ID NO: 2880 - DNA, 479 bp, synthetic construct
  misc_feature 1..479: note = Description of artificial sequence: synthetic polynucleotide sequence
  source 1..479: mol_type = other DNA
ctgtacctggggctgggggctccacaagtggtctttgccaggtggggacgacaatggcaggtgtttctacatgggcaggtgaggggaactgtctgcggcctggccctgcggaacacagcggcctctcagaggagggtgtgtgggagtcctgcctgttgggagcctggcggatgctgccctcttgattccagccaggatgggaatccaggcaattggcaggaggtactggaatgaggctggtgtctacagtaattcccggccccaggaattggcttttggaactggggcatctctcggaacagggtctggtgcagctggcagtgaagggaccagggcacctgtggtcatgagtgaagtcacctcagagccctctgaagcccctgtttggcagcacacggtgtgcagggcaccagcccatcggctaagatggcccgggtgtccctagaggccgagggtctgggcagaaaccctcgggcctg

SEQ ID NO: 2881 - DNA, 478 bp, synthetic construct
  misc_feature 1..478: note = Description of artificial sequence: synthetic polynucleotide sequence
  source 1..478: mol_type = other DNA
gctcttgtgctcctggagagctccgagccgagaagtgtgcataaaccctgcgagtccagtcagtttttgctgctggtttcatcactgtgggagttaccaccgtagtcacacagcaggagggcccttcacaaaaagcccctgagtgtggccagaggcctttcccacacaggccctggtccaggcgtctggggcccccattgacagtggtgctgcgtcctggggatctcaggcctttctgaatcttccccgcctgccattgagggcaggtgggtctgactcaccctcccgggctcctgtcccctccaggagggggctgaggtgatatctggcaggagggtgtgcaggagtcaggcctcctggagtttgagccctggggcaggtgcaaggtggggataccttttaggggtctgggaagggctgggctgtccccatgggccatcgcgtgttctgggggccgtcctgatccagatgtgcgttc

SEQ ID NO: 2882 - DNA, 479 bp, synthetic construct
  misc_feature 1..479: note = Description of artificial sequence: synthetic polynucleotide sequence
  source 1..479: mol_type = other DNA
ccgctgtgatgctgctgaggactgtcctggaagagggtgggagagaagagaaaccctggaagagggtttctctcactggggagagaaacagggatttctggaaggttcgttgtctctgactgtgtgaggtgagtcctctgttggcttccctggtgaggtctggaaatgagcaggactcaggacagccaggcaggatgagcgactcccagctccggctgtccctgggaatgtcttggaaatgacccaggagaggctcaggtgtcagggccaggcaggccagggaccacaggggcagtgacagtgcacagggccagccccgccctcctgctgcccctactctgacatggggggctcgcagggttcacacacgtggcccagcgttcagggaggggcttccgggactgctgggtggacggcagcagatggtgctatggggccggccctgtctccatctggtttggcgttgggagggcagcagc

SEQ ID NO: 2883 - DNA, 121 bp, synthetic construct
  misc_feature 1..121: note = Description of artificial sequence: synthetic polynucleotide sequence
  source 1..121: mol_type = other DNA
gatgcagaccccttggagccagatctggatgacctgtagggtgaccttggccatctgtttcatggtctctggggctggtgggctggagcccatcatggtcacttgtgggcctgtccattgt

SEQ ID NO: 2884 - DNA, 358 bp, synthetic construct
  misc_feature 1..358: note = Description of artificial sequence: synthetic polynucleotide sequence
  source 1..358: mol_type = other DNA
ttctgctgccccgtgtgtttgggtcatgggctgcactgctgtggtagccaccatacccatggcgccgtgtcctcgatcaaaatcctaacacggcatgcagcggtcccccgcagggagggctgtggtgggaggctcccaggcatgagtttttgatggactctgtgacactgtggtagtaataaccactactatcatagtaataccacagtgacacagacctcacttcaaacctaccgccaggcctggggaaacccgggatgtccagggctgacctgaggaggcagcagggccccgaggggaggctgtgggcccagcgctctcaggtctactgcagggacactcgggtctgtccctcgct

SEQ ID NO: 2885 - DNA, 479 bp, synthetic construct
  misc_feature 1..479: note = Description of artificial sequence: synthetic polynucleotide sequence
  source 1..479: mol_type = other DNA
taggtggacactgtccatgcccacctgtgtcctgaggcttcacctcaggctgacatctgtccctactgtccctacccaccccatggccatgtcctttcgggttcataaattgcccccaaatcacacaggcatcattctggggctttttatattccctgggccaccaggtgcctccacccagaaaggtcagatgtgggagagttgcagagtcattccccaaccctggatgagtccctacagcctcagtgctactcaggctccagcaagacctggagcaggtgcaggtgaggcccgaggccaggtgaggtccaggtcaggtgaagcccaggccaggtgaggtccaggtcaggtgaagcccaggccaggtgaagcccaggccaggtgaagcccaggccaggtgaggtccaggtcaggtgaggcccaggccaggtgaggtccaggtcaggtgaagcccaggccaggtgaagcccaggccaggt

SEQ ID NO: 2886 - DNA, 478 bp, synthetic construct
  misc_feature 1..478: note = Description of artificial sequence: synthetic polynucleotide sequence
  source 1..478: mol_type = other DNA
gaggcccgaggccaggtgaggtccaggtcaggtgaagcccaggccaggtgaagcccaggccaggtgaggtccaggtcaggtgaggcccaggccaggtgaggtccaggtcaggggaggctgaggtggatgtgtgaggcttctgcagttttctctgggtgctcaccctgcctggtgtccctgcccctcctctcagcacccactctgtgcctgcaaggtggtggcccgtgcgcaggtggtggtggctgcggaggtgctgggctctgcctccctgtgcatgggtgtgcatcttgggttctggccagggagtgtggctgagttgcttctctctggaatgcactgactgtaccttccttggggatatacagctctgtgcctgctccacatcaggccccaggagctgccagcaggtgcctgcctgccctgccacacagtgagcctgcagcctgtccggggatgcccagggaggtgattgccacca

SEQ ID NO: 2887 - DNA, 478 bp, synthetic construct
  misc_feature 1..478: note = Description of artificial sequence: synthetic polynucleotide sequence
  source 1..478: mol_type = other DNA
cacatcaggccttttctctttaaagtcatttctttggggatacatcatcgatgtctcatatactgaatgtatgtctgtatcattgtgcaattgcctgtgtcatcgcttatttatccaacctgggttaatgtctttgctattatgaacagtgctggactgagaattttctaaacacaggtgtgtgcattttcctcttcttgcgatttagaagtttaactgctgttttcaaggtactgtaatgtatttgttctgttcttgttaggagacttgccgactctgtgtgtctcagctcataccctcttccttccccagtagaagtaaccaccactgtgtttatgtgatcatcgttttcttgattttccttatagtttttccaggggaaagtttatcccttaagaagatagttcattttgccgggtgtaaattttatttagaagaaatcacattaaaagtattttttgggctttcctctgttact

SEQ ID NO: 2888 - DNA, 121 bp, synthetic construct
  misc_feature 1..121: note = Description of artificial sequence: synthetic polynucleotide sequence
  source 1..121: mol_type = other DNA
ccaattactcagcattgtcatgaactcaaccgcaaagccgcctgtagctctctactgttgtcctctggctgtcctagtttgcatttcatgaacctgccatcgtttatttgtctgttgtcct

SEQ ID NO: 2889 - DNA, 360 bp, synthetic construct
  misc_feature 1..360: note = Description of artificial sequence: synthetic polynucleotide sequence
  source 1..360: mol_type = other DNA
tcagatggacgtttgctttgtccagccccatagtttggggctatgacaaacagctgttctgcacatctttgcccatgaggttctcaggaagggctctagggctggcattgcctgagggttctgctttgtcacaggcagttcctgccagtgcttttcagagtgtctgtgcccagcagcaatgcctgaaggtgcccactgaactttgccttggcatcaggcactttctgtgtgcttgcttctgtgctgctccacattctggaggatttattcagatctgtgctgcaaatgcatttcactgattctctctttagctgtgtctacatcagctgttaagcatcccatgatgcagcattgtgggca

SEQ ID NO: 2890 - DNA, 121 bp, synthetic construct
  misc_feature 1..121: note = Description of artificial sequence: synthetic polynucleotide sequence
  source 1..121: mol_type = other DNA
cagggcaaactttcaaaagatgacagtgtaggatagcggctgctcctccttccctgtgctcttcccacactgtcctcctgggctcactcccagccattgatcctgaataccagtttatgga

SEQ ID NO: 2891 - DNA, 359 bp, synthetic construct
  misc_feature 1..359: note = Description of artificial sequence: synthetic polynucleotide sequence
  source 1..359: mol_type = other DNA
actctctgcacaggaaagcagaaacagcaaaaggccctgctcaggctctgcccacatcccctcttgcacacctgccaaagctctttccttggggcctgtgcaagcttcccagctgcttctcattttctgtttactctgctcactggctggtggggtgatgtcttggggagagtctggtgcattttgggcattgatggacacccctaggccatacttcccagatgctcccccagcccctcagccccaggagtgggtgcgtttgcagtagggctttaggaatggggttgtgtcactgtgggaatagcagtcaccaccacaatatgctcacagtgacacgaacccccacaaaatcctcctgt

SEQ ID NO: 2892 - DNA, 480 bp, synthetic construct
  misc_feature 1..480: note = Description of artificial sequence: synthetic polynucleotide sequence
  source 1..480: mol_type = other DNA
ccctacaggagactggtgtcaccgagtctcctcttgctggctctggcctggctctcctgctgagactgtgcattccagcgggttgttgtctgaaactgagcctgtctcagagaggactctgagcccagtgctgtacagggggctcctcctttgtcctgggggagttgcgtggaccctgtttttggtcaagggaagcatttgatggtgaaggagacctcccctcctctctttctcaggagccccctctgatgctgttgcctagtgtttcttggggctggtgctgggggctcagcagtgtctgccctgttccaggtgggactgtgggtctgttctgtttccacggggtgttctggggccgccagtgaggggctcgggatgttagcggctggtctctgtccctatggtctgggctccggttcactgctcccctgccctccaggtcggtcactgactcggttactatccagcgacctccgtggc

SEQ ID NO: 2893 - DNA, 478 bp, synthetic construct
  misc_feature 1..478: note = Description of artificial sequence: synthetic polynucleotide sequence
  source 1..478: mol_type = other DNA
tgttcagtggtggctgcaggtctcttcccaggagaggcctgcgagagggctgggctgtctgggagccctgcattctcccgtgatgttgctgcctggatccctcatctttagagggagtgcggagcctccctgcaggtgcaggcagtgagagacacaggcggacgtgtgtcaaggcactggaggccgatttctttcagtgccttctgcctgtggaagagctgagctccctgcttctgcgcacaggaggctcccgtgtaaccaggcagtgagggcaagggcctgcatggggaagacttgggtgagcctttgtcctggaaataccagggccgggtctgagagggaggggagcgtggtcagagtgtccaggaggaaggtgatggcatgggcagtgtgtgggtgggagtgtagggtcagtgccatggctcaagggctccaggagaggaagaactcaagttgtgggcaggaggggttagggggt

SEQ ID NO: 2894 - DNA, 479 bp, synthetic construct
  misc_feature 1..479: note = Description of artificial sequence: synthetic polynucleotide sequence
  source 1..479: mol_type = other DNA
gggcacaggtaggaaaacctgaggctcttgtggcagaagagcggagggcctgcaggtgcagagttggcctgggaggggtgtttagagggagggacaggggtctggttgcagatcagggtgaggactgcagggtcacgtacccagggttgtttgggtgggcggcaagtgcagcaggtagaaaaggcccgaggcagggtggggtctccccagcgtgtgggctgcagggaggggctgcacagggtgttccccagaaggagggagcacagaggcactgggagggaatggagagggaaatggcagtgaccctagtgccaggcagtcccggtttggggttgatctgtgtgggaacagctccctggcctgtgtgtaagtggtggcaggaaggcaggtcccgccctggggtctggagcttatcttcttcctgtgagctgtgtgtgggtggctcctgtgggctgtgccctggacctgtggtctggtgg

SEQ ID NO: 2895 - DNA, 479 bp, synthetic construct
  misc_feature 1..479: note = Description of artificial sequence: synthetic polynucleotide sequence
  source 1..479: mol_type = other DNA
agcccaggcttcccaggaacggcagtgctgtctgggctggagcagccttagatgccaggtcagggtggccctggggccactgcctccagctgtgtctagtgctgcagggatctcggcatgaggccccttctcccaggaggggaggcacgtgagtgagaccctaagtccataccccatggtggcttggccctcctgcagagggtctgggcagtggtaggtggctgtgtgcagatggggggtggggggtggggaggttagcccctcccagacgcaccctgctctgctccagagtgtgggcttgcccactgcagggtggctgggcctgggcttcctggtgtgcttgtggtggctgcattcccagagcagggactgaggtccagtggggtcccgggaggagtctgaagggggctccatggaggacctgccttggatggcacccctatcttggggaggacctggggtccagctgggaggaagtg

SEQ ID NO: 2896 - DNA, 478 bp, synthetic construct
  misc_feature 1..478: note = Description of artificial sequence: synthetic polynucleotide sequence
  source 1..478: mol_type = other DNA
gagtggccacctcctgagggccttcttggggccacctcggcctgggggctctgtgattggccaccagccagtagttcttccctgcccagaccccaaagtctgtgctgccccaggaaaggaaggaagggtcagtggcctcatcaaagttggggcccacagtggtgtcccctaagaccgagtctgctcccaagcgctcgccctgcaggaggccctgagtgagggacagagacagggcagggcctttggtcctggtagactctggggcggattccagtggggagttatcacggttggggtcccccagagtgttggggtgtctctgctcctggagttggctctggatgtggggtttgtgtctgtgctgcctggggttgatattgggaggtgccggtgatccctgtctttctgaggacacttgtcagaagggtcaactccagccagaggcaatggggccacagcagaaggatgtgatcaagtc

SEQ ID NO: 2897 - DNA, 479 bp, synthetic construct
  misc_feature 1..479: note = Description of artificial sequence: synthetic polynucleotide sequence
  source 1..479: mol_type = other DNA
cctgccgcaaaccaccggagcccccagcccttgtcctcattatccaacggggacaccgtggggctctgggtgctgggggtcatgggaaccggcaggacatgggttcagggcggctgctcccctctctggcggggcctccgactgctgccaggagtcagttttggacacagtttttctcacggtggtcgttccagttatacccactgtgactcggggctgttcagaatccgaccaggcgccctgagctctggggcctcctgggtgggggcaggggctgggctgctgggcggggaatgcttagggggctctggaggctggggctcgctttaggtgtggggtgagcactgggggccccagctagcggaacacccacagagactggggcctgcacacattccgccccggtgtgtggggtgggcccaggcccgtctgggcaggtcagcctcaatggggacggtgctcgggtcctgcctggctcc

SEQ ID NO: 2898 - DNA, 478 bp, synthetic construct
  misc_feature 1..478: note = Description of artificial sequence: synthetic polynucleotide sequence
  source 1..478: mol_type = other DNA
tccttggggtagaggggacctatcgcctggccctggaccccctcaggccgcccctattcttgaagaaacgcaggacggtggagggtgccctggaggggagacgtctgctgccctgggtgtcaggtgcggcctcagatcctaaacgtgtcctccctgctctctctgcttccgctgacttgggacggggtttctggcctggcgagtgtcactgtggtaccagccactgctataccccactgtgatacagacagcttcagaaacctcctcgtctgtttgggagccttcccttgctggggtcagtgccccttggtcttgtctgccttgacggatcatccctcaaccctggttttggggggcctgcccctctgtctggtgtctggagtggggtccgagacagaggccagccacctcacaacccggagacaggtgttcctcccatggtgggtcccggtgggcctggatggagctgaggtctgtg

SEQ ID NO: 2899 - DNA, 479 bp, synthetic construct
  misc_feature 1..479: note = Description of artificial sequence: synthetic polynucleotide sequence
  source 1..479: mol_type = other DNA
cctgtatcggggaccccatatcctgctctttcatggctctgagctccccctggcaggacttcttcggggtgctgggtctgtcctctgtgggaggggctgctacccaggcccaggactgcagtggagggctcactgaggggcttttgggtctggcctgagccgctgtggggatattccactgtgagagggtcccgcacagattctcccatcctgcttctcctcccagagccaggaggggatgggagccgggggtcccagaggaggatcctggacccaggggaagggggcctcttcactgacctcccctccctccatccttccctccccgaagctgccctggcagcccccctgcaccccagcctttgtctgcactggctttgctggctctggtgtaggtaggactcaggatggtgtggaagacgtgcagccagggtggagaggaggtgggcgggacggtgggtgaagggggaggctcaccg

SEQ ID NO: 2900 - DNA, 478 bp, synthetic construct
  misc_feature 1..478: note = Description of artificial sequence: synthetic polynucleotide sequence
  source 1..478: mol_type = other DNA
aagatggaggagcacccgcagggccctgagccctcccccacaccgtccctggtccttccccgcagcctgccacggtgggagccccaggcagggtggaccataccctctaggaggctggcacttccctgggttcacgaagacggagcctgctgcccggtggtgcacggccccgcttcctccttcagcccttcctgatggcttcctggggataccggattcccatggggtgatgagaggagagcagaggggaggaggggcagggctgggtcctgggtaagggggtgctcgggctggggtccctggagagaagttctgtgttcctgggggccaattaggcaggtgtcctttctgtccacaccccaagggtcccggccggaggcaggtgggggaaccataaggagagggcctgtgtcctgtccccccaagtcctctagacagggtgggggctgaggggtccgccccagggccgggccaggca

SEQ ID NO: 2901 - DNA, 479 bp, synthetic construct
  misc_feature 1..479: note = Description of artificial sequence: synthetic polynucleotide sequence
  source 1..479: mol_type = other DNA
gtgactctgatgtggggccctggttttcgtggactggcctggggggtgcggggtacagagcaggagggggctgactctgttgggggatggcgcagtcatccctgtgttaaggccatttcctaccttggtcacctccagtgaaccctgggaaggagggggtggcctcccagtctgcagccggcctgggatctgctctcgccctggaactggggacggagacattctggaggtcagcagcctcctaggactgcaggagatcaggccagcccctagcaggggaggctgtggggattttggtgaggactgcgttgtttgggagccagtgccccactaggcacagtgacagacaccccagcagtatgtactgtcccccgccaggctgcccaccctatcttagccgcggcatgtgaggttgcccatccattggccttccgtgcagacatgaggccctgggatgttgagaacagacctcccactga

SEQ ID NO: 2902 - DNA, 478 bp, synthetic construct
  misc_feature 1..478: note = Description of artificial sequence: synthetic polynucleotide sequence
  source 1..478: mol_type = other DNA
gagaaccctccccacagagggcagagtacagacaacagtgaccttgagagccccaggagaagcaggtgagctggaggcctggggctgcacagcaggggcctgtctacttggcctggttgctgctatgggcagcaccactgtggtaaccatagctgtatccaccacagtctgacaccccctgacaataaccacacctggaactggaggcggggctgtcaggaggagcttcccagggaacagggagggtccagacagctgtgccaggggcccccaggactggggacatggggggctgctcagggaccagacatgcacagtgtccccctggagaggcctctgcagcctcctgggctctggggcaggcctctggtcagcaggaggctgggtgctccccggcatgtgctctcctgccctcactggtgagctcctatgtggcccagtgtgggcccagctccagtgtccactcctgtcggcctgg

SEQ ID NO: 2903 - DNA, 478 bp, synthetic construct
  misc_feature 1..478: note = Description of artificial sequence: synthetic polynucleotide sequence
  source 1..478: mol_type = other DNA
ccgagggtcccggcagaactgcgcatggctccttcttagatccctcggggagtctctctacagctgtacctggggctgggggctccacgagtggtcttttccaggtggggacgacaatggcaggtgtttctctagtggcaggtgaggggaactgtccagggcctggccctgcggaacacagcggcctctcagaggagggtgtgcgggagtcctgcctgttgggagcctggcggatgctgccctcttgattccagccaggatgtgaatccaggcaattggcaggaggtgctggaacgaggctggtgtctacagcaattctgggccccaggaattggctgttggaactggggcagctgttgggacagggttcggtgtagctggcggggaaggggccagggcacctgtggtcatgagtgaagtcacctcagagccctctgaagcccctgtttggagcagatggcatgtggggcaccagccc

SEQ ID NO: 2904 - DNA, 478 bp, synthetic construct
  misc_feature 1..478: note = Description of artificial sequence: synthetic polynucleotide sequence
  source 1..478: mol_type = other DNA
atccgctgtgatggccagggtgtccctagaggccgagggtctggctacaaaccctcagacctgactcttctggtcctggagagctccaagctgagaagtgtgcatggtccctgggtgtccggccagtttttgctgctagtttcatcactgtggtagtcaccgtagtcacacagtaggaggggccttcacaaaaagcccctgagtgtgcccagcggcctttcccacgcaggccctggtccaggcgtctggggcccccattgacagtggtgctgcgtcctggggatctcaggcctttctgaatcttccccgcctgccatcgagggcaggtgggtctgactcaccctcccgggctcctgtcccctccaggagggggctgaggtgatgtctggctggagggtatgcgggagtcaagcctcctggatttttagccctggggcaggtgcagggggtgggacgccttttaggggtctgggaaggc

SEQ ID NO: 2905 - DNA, 478 bp, synthetic construct
  misc_feature 1..478: note = Description of artificial sequence: synthetic polynucleotide sequence
  source 1..478: mol_type = other DNA
ctgggttgtggggctgtccccatgggccatcttgtgttctgggggccgtcctgatccagatgtgggtgcctgctgtgatgcgaccgaggaatgtcctggaagaaggtgcccactggggagtgagacagggatttctggaaggttctttgtctctgactgtgtgaggtgagtcctctgttggcttccctggtgaggtctggaaacaagcaggactcaggacggccgggcaggatgagcgacgcccagctccggctgtccccgggaatgtcttctatcttagaaatgactcagaagaggctcaggtgtcagggccaggcaggcgagggaccatgggtgcagggacagtgcacagggccagccccgcccttctgctgcccctactctgacatggggtgctctcagggttcacacatgtggctcagccatgagggaggggcttctgggaccactgggtggacagcaggagatggtaatgtgg

SEQ ID NO: 2906 - DNA, 479 bp, synthetic construct
  misc_feature 1..479: note = Description of artificial sequence: synthetic polynucleotide sequence
  source 1..479: mol_type = other DNA
ggttggccttgtccccatctgggctggtgttagagggcagcagcgatgcagaccccacggagccatgtctggctgaactgtggggtgaccttggccatctgtttcatggtctccggggctggcgggctggagcccagcatggtcactcacaggcctgtccattgtgcctgctgccctgtgtgtttgggtcatgggctgcactgctgtggtagccaccatacccatggcgctgtgtcctcgatcaaaattgtaacatggcacgcggcggtcccctgcggggagggctgtggcatgggtttctgatggaccgtgtgatgctgtgggtataacgataactcccccaaacgtaatcataataccacagtgacacagacctcacttcaaacctaccgccaggcctggggaaacccgggatgtccagggctgacctgaggaggcagcagggcaccgaggggaggctgtgggcccagcgctctcag

SEQ ID NO: 2907 - DNA, 479 bp, synthetic construct
  misc_feature 1..479: note = Description of artificial sequence: synthetic polynucleotide sequence
  source 1..479: mol_type = other DNA
gtctactgcaggaacactcgggtctgtccctcgcttatgtggatagtgtccgcgtccaactgtgtcctgaggctccacctcaggctggcatctgtccctatgtccctacccaccccatggccatgtcctttcgggttcataaattgcccccaaatcacgcaggcaccattctggggctttttatattcccagggccaccagatgcctccacccagaaaggtcagatgtgggagagttccagagtcattccccaaccctggatgagcttctgcagcctcagtgctactcaggttccagcaagacctggagcaggtgcaggtgaggccggaggccaggtgaggtccaggtcaggtgaagcccaggccaggtgaggtccaggtcaggtgaggcccaggccaggtgaggtccagaccaggtgaggtccaggtcaggggaggctgaggtggatgtgtgaggcttctgcagttttctctgggtgc

SEQ ID NO: 2908 - DNA, 478 bp, synthetic construct
  misc_feature 1..478: note = Description of artificial sequence: synthetic polynucleotide sequence
  source 1..478: mol_type = other DNA
tcaccctgcctggtgtccctgcccctcctctcagcacccactctgtgcctgcaaggtggtggcccgtgcacaggtggtggtggctgtggaggagctgggctctgcctccctgtgcgtgggcgtccctctcgggctctgcctgggcagtgtggctgagctgcttctctctggaattcactgactgtgccatccttgggggtatacagccctgcgcttgctccacatcaggccccaggagctgccagcatgtaccagcctgccctgccacacagtgtgcctgcaacctgtccggggatcccagggaggtgagtgccaccacacatcaggccttttctctttaaagtcatttctttggggatacatcatcgatgtctcatgtactaaatgtatgtctgtatcattgtgcaattgcctgtgtcatcatttatttatccaacctgggttaatgtctttgctattatgaatagtgctggactga

SEQ ID NO: 2909 - DNA, 478 bp, synthetic construct
  misc_feature 1..478: note = Description of artificial sequence: synthetic polynucleotide sequence
  source 1..478: mol_type = other DNA
gaattttctaaacacagctgtgtgcattttcctcttcttgcgatttagaagtttaactgctgtattcaaggtactgtaatgtattcgttctgtgcttgcttggagacttgccgactctgtgtgtctcagctcataccctcttccttccccagtagaagtaaccacaactgtgtttatgtgatcatcgttttcttaattttccttgtagtttttccaggggaaagtttatcccttaagaagacagttcattttgcctggtgtaaattttatttagaagaaatcacattaaaagtattttttgggctttcctctgttactccaattactcagcattgtcatgaactcaaccgcaaagccgcctgtagccctctactgttgtcccctggctgtctgggtttgcattgcatgaacctaccattgcttatttgactgttcttcagatggacgtttgctctgttctcagtttgagtctatgata

SEQ ID NO: 2910 - DNA, 478 bp, synthetic construct
  misc_feature 1..478: note = Description of artificial sequence: synthetic polynucleotide sequence
  source 1..478: mol_type = other DNA
atcagctgttctgcacatctttccccatgacgctctcagggagggctctggggctggcattgcctgagggttctgctttgtcgcagggagatcctgccagggcttttcagagtgtctgtgcccagcagcaatgcctgaaggtgcccactgaactttgtccttgcatcaggcactttctgtgtgtttgcttctgtactgctccacattctggagagtttattcagatctatgctgcaaattcatctcactgattctctctttagctgtgtctacatcagctcttaagcatcccatgatgcaatagtgtggtcacaaggcaaacttttgaaagatgacagtgtaggatagcggctgctcctccttccctgtgctcttcccacagactgccctcctgggctcattcccagccactgatcttgaacaccagtttatggaactctctgcacaggaaagcagaaacagcaaaaggccctgctca

SEQ ID NO: 2911 - DNA, 121 bp, synthetic construct
  misc_feature 1..121: note = Description of artificial sequence: synthetic polynucleotide sequence
  source 1..121: mol_type = other DNA
ggctctgcctgcatcccctcttgcacacctgccaaagctctttccttggggcctgtgcaagcttcccagagcctctcattttctgtttaccctgctcgctggctggtggggtggtgtttgg

SEQ ID NO: 2912 - DNA, 358 bp, synthetic construct
  misc_feature 1..358: note = Description of artificial sequence: synthetic polynucleotide sequence
  source 1..358: mol_type = other DNA
cggggagtctggtgcattttggacattgatagacacccctggaccctacttcccagacgctcccccagcccctcagccccaggagtgggtgtgtttgcagtagggctttgggaatgggtctgtgtcactgtgggagtagcagctaccaccactacaatatcctcacagtgacacgagcccccacaaaatcctcctgtccctactggtgtcaccgaggtcccttttgctggctttggtctgttctcctgctgagactgtgcattccagcgggttgttgtctgaaactcagggtgtctcagagaggactctgagcccagtgctgtatagggggctcctcctttgtcctgggggagttgcg

SEQ ID NO: 2913 - DNA, 478 bp, synthetic construct
  misc_feature 1..478: note = Description of artificial sequence: synthetic polynucleotide sequence
  source 1..478: mol_type = other DNA
tggaccctgtttttggtcaagggaagcatttgatggtgaaggagatctcccctcctctctttctcgggagccccctctgatactgttgcctggtgtttcttggggctggtgctgggggctcagcagtctctgccctgttccaggtggggctgtgggtgtgttatgtttcctaggtgtgttatggggccaccattgaggagctcgggatgtcagcggctggtctctgtccctatggtatgggctccggctcactgctcccctgccctccaggtcggtcattgactcagttactatccagcagcctctgtggctgtttggtggtggctgcaggtctcttcccaggagaggcctgtgagaggactgggatgtctgggagccctgcattctcccgtgatgctgctgcctggatcccttgtctttagagggagtgcggagcctccctgcaggtgcgggcagtgagagacacgggcggacgtgt

SEQ ID NO: 2914 - DNA, 480 bp, synthetic construct
  misc_feature 1..480: note = Description of artificial sequence: synthetic polynucleotide sequence
  source 1..480: mol_type = other DNA
gtcaaggtgctggaggccgatttctttcagtgccttctgcctgtggaagggctgagctccctgcttctgtgcacaggaggctcccgtgtaaccgggaagtgagggcaagagcccaggcctgcctgggaaagacttgggtgagcctttgtcctggaaataccagggcttggcctgagagggggcggggtcggagtggccaggaggaaggtgagggcatgggctgtgggtggtgggagggcagggtcaatgccatggctcaggggctccaggagaagaagagttagagttgtgggcaggaggaggtagggtgtgggcacaggggggagaaactgaggctctagcgacagaagaggacagggcctgcaggtgcagggttggcctgggaggggtgtctggagtgatacacaggggtctgggtggagaccagggtagggactgcagggacaggaccccagagttttctgggtgggcagtaagagc

SEQ ID NO: 2915 - DNA, 479 bp, synthetic construct
  misc_feature 1..479: note = Description of artificial sequence: synthetic polynucleotide sequence
  source 1..479: mol_type = other DNA
agcagggttggaagggccccaggcagggttgggtctccccagggtgtgggctgcagggactggctgcacaggctgttcccccgaaggaggaaccagggaggacagaggcgctgggagcaaatggagaaggaaatggcagccacctgagtgccaggcggtcctggtttggggttgttctgtgtgggaacagcttcctggcctgtgtgtaagtggacgggggagggcgcccaggtctggggcaggaagcagtagcaggaaggcaggttctggccctgggggtctggagcttatcttcttcctgtgagctgtgtgtgggtggctcctgcacccggtgccctggacctgtggtctggtggagcccaggcctcccagggacagcagggcagcctgggctgcaggaacctcagggaccaggtcagggtggccctcgggcctctgcctccacttgcgacaggcgctgctgtgggaacctgggcttg

SEQ ID NO: 2916 - DNA, 479 bp, synthetic construct
  misc_feature 1..479: note = Description of artificial sequence: synthetic polynucleotide sequence
  source 1..479: mol_type = other DNA
aggccccttcactcatgatgggagccacgtgagtgagaccctaagtccataccccatgtggggctctgaccctcctgcagagccgctgggcaggggtgggtggggtgtgcaggtgggggtggggtggggagctcagcccctcccagaggcaccctgctctgctccagagtgtgtgcttgggcactgcagggtggctgggcctgggctgcctggtgtgcttgtggtggcttcatccccagagctgggactgaggcccagtggggtccagggaggagtctgaatggggctccaaggagcacctgccttggatggcacccttatcttggggaggacatggggtccagctgggaggaaggggagtggccacctcctggaggtctttccagggccacctcagcctgtggcctctgtgcttggcgacctgccagaagttcctcctggcccagaccccaaagtctgtgctgccccaggaaaggaag

SEQ ID NO: 2917 - DNA, 121 bp, synthetic construct
  misc_feature 1..121: note = Description of artificial sequence: synthetic polynucleotide sequence
  source 1..121: mol_type = other DNA
gaaaggtctgcgtcctggtcaaggtcggggtcacactggtgtcccctaagcccaagtctgctcccaaggcctcgcccggcagcaggtcctgagtgagggacagaggcagaggcagggtctt

SEQ ID NO: 2918 - DNA, 358 bp, synthetic construct
  misc_feature 1..358: note = Description of artificial sequence: synthetic polynucleotide sequence
  source 1..358: mol_type = other DNA
tggtcctggtggactctacggcgaattccagtgggaagtcatcagggtcggggtcccccagggtattggggtgtctctgctcctggagttggctctggatgtggggtttgtgcctgtgctgcctggggttgatgttgggaggcgccggtgatgcctgtctctctgaggacacttgtcagaagggtcaactccagccaggggcactggagccacggcagaaggatgcgatcaagcccctgccccgacccgccggaatccccagctcttgtcctcccatccagtggggacactgtggggctccgcgtgctgggggtcatgggagccggcaggacatgggatcagagtggctgctgccctc

SEQ ID NO: 2919 - DNA, 479 bp, synthetic construct
  misc_feature 1..479: note = Description of artificial sequence: synthetic polynucleotide sequence
  source 1..479: mol_type = other DNA
tctggcggggcctccggcagtggccactggacagtttttgacgtagctattctgacagtggtggttccggttatacccgctgtgactcggggctgttcggaatccgacggggcgccctgagctctggggcctcctgggtgggggctgggcttgtgggcggggtctcctgcgggggctccggaggctgtggctcattttaggtgtggggtgagcactgtgagccccagctagcggaacacccacagagaccgaggcctgcacacattccgccccggtgtgtggggtgggcccaggactctctgggcaggtcagcctcaatggggagagtgctcgggacctgcctaactcctccttggtgtacaggggacccatctcctcaccctagaccccccctcaggccgcccctgatcttgcagaaatgcaggacagggtggggtgccctggaggggagacgtctgctggcctgggtgtcaggtgca

SEQ ID NO: 2920 - DNA, 479 bp, synthetic construct
  misc_feature 1..479: note = Description of artificial sequence: synthetic polynucleotide sequence
  source 1..479: mol_type = other DNA
gtctcagatcctaaacgtgtcctccctgctctctctgcttccgctgacttggaatggggtttctggctgggtgagtgtcactgtggtaccagctgctgctataccccactgtgacacagacaccttcagaaacctcctggtctgtttgggggccttcccttgctgggctcaacaccccttggttttgtctggctttgacggggcgtccctcaaccctggttctggggggcctgcgcctctgtctggtgtctggaataggggtccaagtcaggggtcagctgcctcccgacctgcagaggctggagacagacgttcctctcagggtgtgggctgggtggtcctggatggagctgacatctgtgcctgtatcgggggccccatatcttgctccttcatggctcttagctccccctggcaggacctcctcagggtgctgggtctgtcctgtctgggtggggctgccacccaggcccagttgt

SEQ ID NO: 2921 - DNA, 478 bp, synthetic construct
  misc_feature 1..478: note = Description of artificial sequence: synthetic polynucleotide sequence
  source 1..478: mol_type = other DNA
tggacgtcgtgggctggcctggggggtgcagggtgcagagcaggaaggggcgcactctggtggggcatgtcccggtcatccctgtgctcatgccatttcctgccttgggcacctgcattcaaccccggcaagggcaggggtggcctcccagcctacagcctgcctgggatctgctctcgccctggaactggggacggagccatcctggaggtcagcagcctcctaggacagcaggattccaggccagcccctagcgggaggcagtggggattttggcagggtctgcgtttttgtcagagctaccacccagaagtgacagtgagaaatgccccagcaatatgtcccgtccacagccgtctgcccaccctgtcttagccagggctagggagggtgctgtgtttctggcaggcccagcccttgaccttccttgcagggatgaggccctgagaagctgagctgctggtggtactggaagagg

SEQ ID NO: 2922 - DNA, 121 bp, synthetic construct
  misc_feature 1..121: note = Description of artificial sequence: synthetic polynucleotide sequence
  source 1..121: mol_type = other DNA
tctccagggcagggggttgagcattaatcgagtggcctgggtggggccggatcctcctgtaggctggtcactcagggtttggcatctctggctgatccctgcagccaggtactgccggggt

SEQ ID NO: 2923 - DNA, 359 bp, synthetic construct
  misc_feature 1..359: note = Description of artificial sequence: synthetic polynucleotide sequence
  source 1..359: mol_type = other DNA
actcacagtgctctgggcccactgtctgggctcacagcctcatttccagggggccgggtggtgctccaagcctcagtttccccactgtggaggggatgctgctggagggatgaggatcatagaggacaacctggcagcttctgtgcccgctgcccgtgggacccgggctgtgggatgggacaggcttccccatcagggctgggcctgccgggggcacagcactctcaaatgcccacaatgggggctccgtggctctgtgactccgtggctccgtggtgctgcctgcacctctcagggcgggaagctgcctttccctgccagcctttgatttctatctcaatcatccctgccctggagca

SEQ ID NO: 2924 - DNA, 479 bp, synthetic construct
  misc_feature 1..479: note = Description of artificial sequence: synthetic polynucleotide sequence
  source 1..479: mol_type = other DNA
cagacctcccactgagggaaccctccccacagagggccagaggacagacagcagccttgagagccccaggagaagcaggtgaagtggatgcctggggctgcgcagcaggggcctgtctacttggcctggttgctgctatgggcggcaccactgtggtaatcgtagccactatatccaccacagtctgacatcgcctgacaataaccacacctggaactggaggcggggctgtcaggaggagcttcccagggaacagggagggtccagacagctgagccaggggcccccaggactggggacgtggggggctgcttaggtaccagacatgcacagtgtctccctggagaggcctctgcagcctcctgggctctggggcaggcctctggtcagcaggaggctgggtgctccccggcatgtgctctcctgccctcactggtgagctcctatgtggcccagtgtgggcccagctccagcgtcca

SEQ ID NO: 2925 - DNA, 480 bp, synthetic construct
  misc_feature 1..480: note = Description of artificial sequence: synthetic polynucleotide sequence
  source 1..480: mol_type = other DNA
ctcctgtcggcctggccgagggtcccggcagaactgggcatggctccttcttaggggcctcgaggactctctctacagctgtacctggggctgggggctccacgagtggtcttttccaggtggggacgacaatggcaggtgtttctctagtggcaggtgaggggaactgtccagggcctggccctgcggaacacagcggcctctcagaggagggtgtgcgggagtcctgcctgttgggagcctggcggatgctgccttcttgattccagccaggatgggaatccaggcaattggcaggaggtactggaatgaggctggtgtctacagctattcagggtcccaggaattggctgttggaatcggggcatctgtcaagacagggtctggtatagctggcagggaagggccaggtcacctgtggtcatgagtgaggtcacctcagagccctctgaagcccctatttggaggaagatggtgtgc

SEQ ID NO: 2926 - DNA, 478 bp, synthetic construct
  misc_feature 1..478: note = Description of artificial sequence: synthetic polynucleotide sequence
  source 1..478: mol_type = other DNA
agggcaccagcccaggctgagatggcccaggtgtccctagaggctgagggtctgggcacaaatccttgggcccggctcttgtgctcctggagagctccaagctgaggcgtgcacacagcccctgggtttccagccagtttttgccactgggttcatcactatggtagttactgtagtcacacagcaggagggcccttcacaaaaagcccgagtgtggccagagacctttcccacgcaggccctggtccaggcatttggggcccctattgacagcggtgctgcgtcctggggatctcaggccgctgtgatgccactgaggactgtcctggaagagggtgtccactggggagagaggcagggatttctggaaggttctttgtctctgaatgtgggaggcgagtcctctgttggcttccccggtgaggtctggaaatgagcaggactcaggacggccgggcaggatgagcgacgcccagct

SEQ ID NO: 2927 - DNA, 479 bp, synthetic construct
  misc_feature 1..479: note = Description of artificial sequence: synthetic polynucleotide sequence
  source 1..479: mol_type = other DNA
ccggctgtccccaggaatgtcttctgtcttggaaatgacccaggagaggctcaggtgtcagggccaggcaggccagggaccacaggggcagggacagtgcacagggccagcccctccctcctggtgcccctactcagacatgagggctctcagtgtccacacatgtggcccagccttgagggaggggcttctgggatcgctggcctgatggcagcagatggtgctgtgaggccgtccctgtcccatttggactggcgttgggagggcagcagcgatgcagacccctcggagccagatctggatgacctgtagggtgaccttggccatctgtttcatgatctccagggctggcaggctggagcccagcgtggtcagtcacgggcctgtccatcgtgcctgctgccctgcgggtttgggtcacaggctgcactgctgtggtagccaccatacccatggtgctgtctcctcgatcaaaatcc

SEQ ID NO: 2928 - DNA, 121 bp, synthetic construct
  misc_feature 1..121: note = Description of artificial sequence: synthetic polynucleotide sequence
  source 1..121: mol_type = other DNA
taacatggcacgtaccggtcccctgcagggagggctgtggcgggaggctcccagggatgggtttttgatggactctgtgacactgtggttataataactccccgaaccatagtaataccac

SEQ ID NO: 2929 - DNA, 358 bp, synthetic construct
  misc_feature 1..358: note = Description of artificial sequence: synthetic polynucleotide sequence
  source 1..358: mol_type = other DNA
agtgacacagacctcaccccaaacctaccgcccagcctggggaaacccgggatgtccggggctgacctgaggaggcagcagggccccatggggagggctgtggcgggaagcttccaggcatgggtttttgatggactctgtgacactgtggttataataaccagtcaaaatatcgtaataccacagtgacacagacctcattctaaacctaccggcaggcctggggaaacctgggatgtccagggctgaccggaggaggcagcagggctctgaggggaggctgtgggcccagcgctctcaggtctgctgtggggacactcgggtctatccctcgcttatgtggatagtgtccgtgccc

SEQ ID NO: 2930 - DNA, 478 bp, synthetic construct
  misc_feature 1..478: note = Description of artificial sequence: synthetic polynucleotide sequence
  source 1..478: mol_type = other DNA
acctgtgtcctgaggctccacctcaggctggcatctgtccctatgtccctacccaccccatggccatgtcctttcgggttcataagttgcccacaaatcacagagtcatcattctggagatttttatattcccagggccaccagctgcctccacccagaaaggtcagatgtgggagacttctagagtcattccccaaccctggatgagcttctgcaccctcagtgctactcaggctccagcaagacctggagcaggtgcaggtgaggcccgaggccaggtgaggtccaggtcaggtgaagcccaggccaggtgaagtccaggccaggtgaggtccaggccagatgaggtccaggtcaggtgaggcccaggccaggtgaagcccaggccagatgaggtccaggtcaggggaagccaaggccaggtgagttccaggacaggttaaacccaggtcaggagacgttcaggtgagttgaggcc

SEQ ID NO: 2931 - DNA, 480 bp, synthetic construct
  misc_feature 1..480: note = Description of artificial sequence: synthetic polynucleotide sequence
  source 1..480: mol_type = other DNA
caggtcaggtaaagcttgggacaggcgaggtccaagtcaggtgaggccaaggtcaggtgaagcccaggttaagtgaggcccaggccagtgaggtccaggtcaggggaggctgaggtggatgtgtgaggcgtctgcagttttctctgggtgctcaccctgcctggtgtccctgcccctcctctcagcacccactctgtgcctgcaaggtggtggcccgtgcacaggtggtgctggctgcggaggtgctgggctctgcctccctgtgcgtgggcgtccctctcgggctctgcctggggagtgtggctgagttgcttctctctggaattcactgactgtgccgtcctccgggatatatggccctgcgcttgctccacatcaggccccaggaactgccagcaggtacccgcctgccctgctgcacagtgagcctgcaacctgtccggggatcccagggaggtgaatgccaccacacatcagccc

SEQ ID NO: 2932 - DNA, 479 bp, synthetic construct
  misc_feature 1..479: note = Description of artificial sequence: synthetic polynucleotide sequence
  source 1..479: mol_type = other DNA
tttatctctttaaagtcgtttatttggggatacatcatcgatgtctcatatactaaatatatgtctgtatcattgtgcaattgcctgtgtcatcgcttatttatccgacctgggttaatgtctttgctattatgaacagtgctggactgagaattttctaaacacaactgtgtccattttcctcttcttgcaatttagaagtttaactgctgttttcaaggtactgtaatgtattcgttctgttcttgttaggagacttgcccaccctgtgtatctcagttcataccctcttccttccccagcagaagtaaccaccactgtgtttatgtgatcatccttttcttggttttctttatggttttctaactgggaaatgtatcccttaagaagacagttcattttgcagggtgtaaattttatttagaagaaatcacattgaaagtattttttggagtttactttgttactccaattactca

SEQ ID NO: 2933 - DNA, 479 bp, synthetic construct
  misc_feature 1..479: note = Description of artificial sequence: synthetic polynucleotide sequence
  source 1..479: mol_type = other DNA
gcattgtcatgaactcaaccagagtcgcttataaccctgtacttttgtgcttgtggctgtctgggtttgcatttcatgaacctgccatcgtttatttgcctgttctccttcagatggacgtttgctttgctctcagtttggggctatgagaaacacctgttgtgcacatctttgcccatgaggctctcagggagggctctggggctggcattgcctgagggttctgctttgtcacagggagttcctgccagggcttttcagagtgtctgtgcccagcagcaatgcctgaaggtgcccactgaactttgtccttgcatcaggcactttctgtgtgcttgcttctgtgctgctccacattctggagaatttattcagatctgtgctgcaaatccatctcactgattctctctttagctgtgtctacatcagctgttaagcatcccatgatgcagcagtgtgggcacaaggcaaactttcga

SEQ ID NO: 2934 - DNA, 478 bp, synthetic construct
  misc_feature 1..478: note = Description of artificial sequence: synthetic polynucleotide sequence
  source 1..478: mol_type = other DNA
aagatgacagtgtaggatagcggctgctcctccttccctgtgctcttcccacgctgtcctcctgggctcactcccagccattgatctcgaacaccagtttatggaactctctgcacaggaaagcagaaacagcaaaaggccctgctcaggctctgcccgcatcccctcttacacacccgccaaagctctttccttggggcctgtgcaagcttccccagcttgcttctcattttctgtttactctgctcgctggctggtgggtgtgatgtatggaggggagtctggtgcgttttgggcattgatggacacccctgagccctatttcccagacgctcccccagcccctcagccccagaagtggaatgcgtttgcagtagggctttgggaatggggctgtgtcactgtgggtatagcatacaccattagtacaatatcctcacagtgacacgagcccccacaaaatcctcctgtccctgcg

SEQ ID NO: 2935 - DNA, 479 bp, synthetic construct
  misc_feature 1..479: note = Description of artificial sequence: synthetic polynucleotide sequence
  source 1..479: mol_type = other DNA
ggtgtcactgagccccatcttgctggctctggctggctctcctgctgagactgtgcattccagggggtttttgtctgaaactctgggtgtcttggagaggactctgagcccagtgctgaacaaggggctcctcctttgtcctgggggagttgcatggatcctgtcttcggtcaagggaagcgcctgctggtgaaggagacctcccctcctctgttctgccagagccccctctgatgctgttgcctggtgtttcttggttggttctggtgctgggtctcagcagtctctgccctggtccaggtgggactgtgggtctgtcctctttccatggggtgttgtgggaccaccagtgagtggcttgggatgtcagtggctgtcctctggccctatggtgtgggctcgggctcactgctcccctgcctccaggtctggcaatgactccgttactacccatcggcctccagggaggtttggtgtta

SEQ ID NO: 2936 - DNA, 479 bp, synthetic construct
  misc_feature 1..479: note = Description of artificial sequence: synthetic polynucleotide sequence
  source 1..479: mol_type = other DNA
gactccgttgactgggcgtcttcaggtctcttcccaggagaggcctgtgagaggactgggatgtctggtagccctgcattctcctgtgatgctgctgcctggatccctcgtctttagagggagtgccgagcctccctgcaggtgcgggcagtgagagacacaggcagacgtgtgtcaaggcgctggaggccgatttctttcagtgccttctgcctgtggaagggctgagctccctgcttctgtgcacaggaggctgccctgtaaccgggcagtgagggtaagggcccaggcctgcatgggaaagacttgggtaaggctttgtcccagaaataccagagccaggcctgagaggggagtggggctggagtggccaggaggaatgtgagggcatgggcagtgtgtgggtgcgagggcacggtcaatgccatccctcaggggccctaggagaggaagagctcgagctgtgggcaggaggagca

SEQ ID NO: 2937 - DNA, 478 bp, synthetic construct
  misc_feature 1..478: note = Description of artificial sequence: synthetic polynucleotide sequence
  source 1..478: mol_type = other DNA
cgggggtgggcacaggcaggagaaactgagggtctttggcagtggaggggagggcctgcaggtgtagggttggcctgggagaggtgtttagagggaggaagacgggtctaggtagagaactgggtgggggctgtagggacaggaccccagggctgtcttggtgggtggcaagagcagcgggggagaaagggctggaggagggtcaggtctccccagggtgtgggctgcagggtcgggtctccccagggtgtggactgcagggaggagctgcacagggtgctcccccgaaggaaggaggagggaggaagcacagaggcattggaagtgaatggagaaggaaatggcagtgacctgagtgccaggtggtccccgtctggggttggtctgtgtgggaacagcttcctggcctgtgtgtaagtggacgggggagggcaacgaggtctggggcaggaagtcgtagcagcaaggcaggtcccgg

SEQ ID NO: 2938 - DNA, 478 bp, synthetic construct
  misc_feature 1..478: note = Description of artificial sequence: synthetic polynucleotide sequence
  source 1..478: mol_type = other DNA
gcctgggggtctggagcttatcttcttcctgtgagctgtgtgtgggcggccccagtgtgggcggtgccctagacctgtggtctggtggagcccaggcctcccagggacagcagggcagccagggctagaggagcctgaggggccaggtcagggtggccctggggccactgcctctacctgtgaccagcgctgctggggggatctgggcatgagaccccttctcccaggaggggaggtgcgtgagtgagaccctaagtccatatcccatgggggctctgaccctcctgcagggggcccgggcaagggtgggtggggtgtgcaggtgggggtgggggtggggagcccagcccctcccagacgcaccctgctctcctccagggtgtgggcttgggcactgcagggtggctgggcctgggctgcctggtgtgcccgtggtggctgcattcctagagtggggactgaggcccagtggggtctg

SEQ ID NO: 2939 - DNA, 478 bp, synthetic construct
  misc_feature 1..478: note = Description of artificial sequence: synthetic polynucleotide sequence
  source 1..478: mol_type = other DNA
gagaggagcctgaagggggctccatggaggacctgccttggatggcacccctatcttggggaagacatggggtccagctgggaggaagggtagtgggccacctgctggggttccccctggggccacctcagcctgggggctctgtgcttggtgacctgccagaagttcctccctgcccagaccccaaagtctgtgctgcaccagggcaggagggaagggtctgtggcctgctcgaggtcaggcccacagtggtgtcccctaatcctgagtttgctcccaggtgctcgccccgcagcaggccccaagtgagggacagagatgggacgggagtcatcagggttggggtcccccagggtattggggtgtctctgttcctggagttggccctggatgtggggtttgtgcctgcgctgcgtggggttgatgttagggaggtgccactgatccctgactctctgaggacacttgtcagaagggt

SEQ ID NO: 2940 - DNA, 479 bp, synthetic construct
  misc_feature 1..479: note = Description of artificial sequence: synthetic polynucleotide sequence
  source 1..479: mol_type = other DNA
caactccagccaggggcactggagccacggcagaaggaagccatcaagcccctgccccgacccgccggagcccccggcccttgtcctcccatccagtggggacactgtggggctccaggtgcacggggtcatgggagccggcagaacatgggtttggggtggctgctcccctctctggcggggcctccgactgtggccaggagaccgttttggacgaagcttttctcacagtggtagttccagttatacccactgtgactcggggctgttcagaatccgacggggcgccctgtgctctggggcctcctgggtgggggctgggcttgtgggcggggtctccttcaggggctctgaggctgtggctcgttttaggtgtggggtgagcactgtgagccccagctagcggaacacccacagagaccgaggcctgcacacattccgccccggtgtgtggggtgggcccaggaccctctgggcag

SEQ ID NO: 2941 - DNA, 478 bp, synthetic construct
  misc_feature 1..478: note = Description of artificial sequence: synthetic polynucleotide sequence
  source 1..478: mol_type = other DNA
gtcagcctcaatggggagggggcttgtgtcctgcctggctccttctctgggtagaggggacccatctcctggtcctggacccccttcagcctgcccttgttcttccagaaatgcaggacatggcagggtgccatggacaggagacgtctgctggcctgggtgtcaggtgcggcctcagatcctaaacatgtcctccctgctctctctgcattccgctgacttgggatggggtttctggcctggcgagtgtcactgtgggacgagctgctatactccactgtgacacagacaccttcagaaacttcctggtttgtttggggaccttcccttgctgggctcagcacaacttggtcttttctggccttgacggggcgtcctcatccctggttctggggggcctgcccctctgtctggtgtctggaataggcgtccaagtcaggagtcagctgcctcctggcctgcagggactagagaaagg

SEQ ID NO: 2942 - DNA, 478 bp, synthetic construct
  misc_feature 1..478: note = Description of artificial sequence: synthetic polynucleotide sequence
  source 1..478: mol_type = other DNA
ggttcctcccagggcaggacgtggcagtcctgaatggagctgaggtctgtgcctgtatcgggggtcccatatcctgctccttcatggctctgagctccccctggcaggacatcctcggggtgctgggttcatcctctgtgggaggggctgctacccaggcccaggactgcagtggagggctcactgaggggcttttgggtcttgcctgagccgctgtggaggtattccactgtgagagggtcccgcacagattctcccatcctgcttctcctcccagagcctggaggggatgggatccgggggtcccagaggaggatcctggacccaggggaggggggcctcttcactgaactccccttcctccatccttccctccccaaagctgccctggcggcccccctgcaccccagcctctgtctgcactggctgtgccggctctggtgtaggtgggacttaggatggtgtggacgacgtgtgg

SEQ ID NO: 2943 - DNA, 478 bp, synthetic construct
  misc_feature 1..478: note = Description of artificial sequence: synthetic polynucleotide sequence
  source 1..478: mol_type = other DNA
ccagggtggagaggaggtgggtgagtccgtgggtgagagagatgggctcatccaagatggagcacccgcggggccctgagccctcccccacaccgtccctggtccttccctgcagcctgccactgtgggagccataggcagggtggaccataccctctaggaggctggcacctccctgggttcacaaagacggagcctcctgcctggtggtgcagtggccccacttcctccctcagcccttcctgatggcttcctggggattctggattcccatggggtgatgagaggagagcagatgggaggaggggcagggctgggtcctgggtaagggggtgctcgggctggggtccctggagagaagttctgggctcctgggggccaatcaggcaagcgtcctttctgtccacaccccaagggtcccagccagagccaggtgggggaaccataaggagagggcgtgtcctgtcctccccagtcc

SEQ ID NO: 2944 - DNA, 478 bp, synthetic construct
  misc_feature 1..478: note = Description of artificial sequence: synthetic polynucleotide sequence
  source 1..478: mol_type = other DNA
tctagacagggtgggggctgaggggtcctccctagggcagcaccgggcagtgactctggtgtggggttgtcggatgtcatgggctggccttgggggtgcggggtacagagcaggagggggtggactctgttgggggatggcccggttatccctgtgttcaggccatttcctgccctggtcacctgcagtgaaccctgggaaggagggggtggcctcccagtctgcagccggcctgggatctgctctcgccctggaactggggacggagccattctggaggtcagcagcctcctaggactgcaggagatcaggccagcccctagcgggggaggccgtggggattttggcgaggactgcgttgtttgggagccagtgccccactaggcacagtgacagataccccagcaggatgtcctgtccccgccaggctgcccaccctatcttagccgcggcatgtgaggttgcccatccattggcc

SEQ ID NO: 2945 - DNA, 478 bp, synthetic construct
  misc_feature 1..478: note = Description of artificial sequence: synthetic polynucleotide sequence
  source 1..478: mol_type = other DNA
ttccttgcaggaatgaggccctgggatgttgagaacagatctcccactgagggaaccctccccacagaggggagagtgcagaaaacagcagccttgagagccccaggagaagcaggtgagctggaggcctggggctgcacagcaggggcctgtctacttggcctggttgctgctatgggcagcaccactgtggtaaccatagctgtatccaccacagtctgacaccccctgacaataaccacacctggaactggaggcggggctgtcaggaggagcttcccagggaatagagagggtccagacagctgtgccaggggcccccaggactggggacatggggggctgctcagggaccagacatgcacagtgtccccctggagaggcctctgcagcctcctgggctctgggacgggcctctggtcagcaggaggctgggtgctccccggcatgtgctctcctgccctcactggtgagctcc

SEQ ID NO: 2946 - DNA, 121 bp, synthetic construct
  misc_feature 1..121: note = Description of artificial sequence: synthetic polynucleotide sequence
  source 1..121: mol_type = other DNA
tatgtggcccagtgtgggcccagctccagcgtccactcctgtcagcctggccgagggtcccggcagaactgggcatggctacttcttaggggcctcagagactctctctatggctgtacct

SEQ ID NO: 2947 - DNA, 359 bp, synthetic construct
  misc_feature 1..359: note = Description of artificial sequence: synthetic polynucleotide sequence
  source 1..359: mol_type = other DNA
ggggctgggggctccatgagtggtcttttccaggtggggacatctacagcaggcatttgtctagtggcaggtgagggggactgtctgcagcctggccctacggaacacagcggcctctcagaggagggtgtgggagtcctgcctgttgggagcctgggggatgctgtcctcttgattccaaccgggatgggaatccaggcaattggcaagaggtgttggaaggaggctggtgtctacagcgattcctggccccaggaattggctgttggaatcggggcatctgtcaggacggggtctggtgcagctggcggggaaggggccagggcacctgtggtcatcagtgaggtcacctcagagcc

SEQ ID NO: 2948 - DNA, 121 bp, synthetic construct
  misc_feature 1..121: note = Description of artificial sequence: synthetic polynucleotide sequence
  source 1..121: mol_type = other DNA
ctctgaagcccttgtttgaaggcagacgatgtgtggggcaccagcccatgggctgtcatggccaagatgtccctagaggccgagggtctgggcagaaacccttgggcccggctcttctgat

SEQ ID NO: 2949 - DNA, 358 bp, synthetic construct
  misc_feature 1..358: note = Description of artificial sequence: synthetic polynucleotide sequence
  source 1..358: mol_type = other DNA
cctggagagctctgagcggagaagtgtgcataaaccttgggagtccggtcagtttttgctgctgggttcatcactgtggtagttactgtagtcacacagtaggaggacccttcacaaaaagcccctgagtgtgcccagaggcctttcccacgcaggccctggtccaggcgtctggggcccccattgacagtggtgctgcgtcctggggatctcagacctttctgaatcttctccgcctgccatcgagggcaggagggtctgactcacccttgcgcgctcctgtcccttccaggaggggctgaggtgatgtctggcaggagggtgtgcaggagtcagtcctcctggagtttgagccctg

SEQ ID NO: 2950 - DNA, 121 bp, synthetic construct
  misc_feature 1..121: note = Description of artificial sequence: synthetic polynucleotide sequence
  source 1..121: mol_type = other DNA
gggcagatgcagggggtgggacgccttttaggggtctgggaagggctgggctgtggggctgtccctgtgggccatcttgtgttctgggggcagtcccgatccagatgtgggttcccactgt

SEQ ID NO: 2951 - DNA, 358 bp, synthetic construct
  misc_feature 1..358: note = Description of artificial sequence: synthetic polynucleotide sequence
  source 1..358: mol_type = other DNA
gatatcactgaggactgccctggaagagggtgcccactggggagagagacagagatttctggaaggtctttgtctctgcctgtgggaggtgattcctctgttggcttcccgggtgaggtttggaaaggcgcaggactcaggatggccaggcaggatgatggactcccagctccagctgtcctgggaatgtcttctgtcttggaaatgacccaggagaggcccaggtgtcagggccaggcaggccagggaccacaggggcagtgacagtgcacagggccagccccaccttcctggtgcccctactcagacatggggggctctcagggtccacacatgtggcccagccttgagggagggg

SEQ ID NO: 2952 - DNA, 478 bp, synthetic construct
  misc_feature 1..478: note = Description of artificial sequence: synthetic polynucleotide sequence
  source 1..478: mol_type = other DNA
cttctgggactgttggccggatggcagcaaatggtaatgtgggccggccctgtccccatccggactggtattggagggcagcagcgatgcagacctgttggactgaggtctggctgacctatgggataatcctggccatctgtttcatggtctccagggctggcaggcaggagctcagggtggtcacttgtgggcttgtctgttgtgcctgctgccctgtgtgtttgggtcacaggctgcactgctgcggtagccaccatacccatggtgctgtgtcctcagtcaaaatcctaacatggcacgcggcggtgccccacagggagggctgtggcagcaggttcccagggatgggtttttgatggactctgtgacactgtgggtataataaccactccaaaaatcgtaataccacagtgacacagacctcaccccaaacctaccgccaggcctggggaaacccgggatgtccagggctgac

SEQ ID NO: 2953 - DNA, 121 bp, synthetic construct
  misc_feature 1..121: note = Description of artificial sequence: synthetic polynucleotide sequence
  source 1..121: mol_type = other DNA
ctgaggaggtagcagggcaccgaggggaggctgtgggcccagcgctctcaggtctactgcggggacactcgggtctgcccctggcttaggtggacagtgtccgtgcccacctgtgccctga

SEQ ID NO: 2954 - DNA, 359 bp, synthetic construct
  misc_feature 1..359: note = Description of artificial sequence: synthetic polynucleotide sequence
  source 1..359: mol_type = other DNA
ggctccatttcaggctgatatctgtctgtattgtccctacccgctgcatggccatgtccttttgggtttataaattgcccccaaatcacgcaggcatcattcaggctttttatattccctgggccaccaggtgcctccacccagaaagctgagatgtgggaggttctagagtcattctgcaaccctggatgagcccctgcagcctcagtgctactgaggttccagcaagacctggagcaggtgcagatgaggcctgaggccaggtgaagcccaggccaggtgaggtccaggccagtgaggcccaggtcagatgaggcccaggtcaggtgaagcccaggtcaggtgaaacccaggtcagg

SEQ ID NO: 2955 - DNA, 478 bp, synthetic construct
  misc_feature 1..478: note = Description of artificial sequence: synthetic polynucleotide sequence
  source 1..478: mol_type = other DNA
tgaggcccagatcatgtgagctcaggacaggcaaggtccaagtcaggtgaggccgagctcaggtgaagcccagaggtgaggtctaggccaggtgaggtccaggccaggtgaggtccaggtcaggtgaggcccaggtcaggcaaggctgaggtagatgtatgagacttctgtaattttcagttggtgccaaccctgcctggtgtccctgcccctcctcccagcccatgctctgtgcctgccagatggcggcccctgcacaggtgctgctggctgtggaggagctgggctctgcctccctgtgcatgggcgtccctctcgggctctggcctgggagtgtggctgagttgcttgtctccggaatgtaccaactgtgccgtccttgggggtatatgtcctcggggggatacggctctgtgcctgctccacatcaggccccaggagctgccagcaggtaccagcctgccctgccacacagtgt

SEQ ID NO: 2956 - DNA, 478 bp, synthetic construct
  misc_feature 1..478: note = Description of artificial sequence: synthetic polynucleotide sequence
  source 1..478: mol_type = other DNA
gcctgcagcctgtccggggatgcccagggaggtgagtgccaccacatatcaggccttttctctttaaagtcatttctttggggatacatcatcaatgtctcatatactgaatgtatgtctgtatcattgtgcaattgcctgtgtcatcgtttatttatccaacctgggttaatgtctttgctattatgaacagtgctggactgagaattttctaaacacagctgtgtgcattttcctcttcttgcaatttagaattttaactgctgttttcaaggtactgtaatgtatttgttctcttcttgttaggagacttgccaaccctgtgtgtctcagttcataccctcttccttccccagtagaagtaacgaccactgtgtttatgtgatcatccttttcttgattttccttatagttttcctagtggaaagtttatcccttaagaagatagttcattttgccggctgtaaattttatttag

SEQ ID NO: 2957 - DNA, 478 bp, synthetic construct
  misc_feature 1..478: note = Description of artificial sequence: synthetic polynucleotide sequence
  source 1..478: mol_type = other DNA
aagaaatcacattgaaagtattttttggactttcctttgttactccaattactcagcattgtcatgaactcaaccacagagtcacctgtaaccctcactgttgtccttctggctgtctgggtttgcatttcatgaacctgccatcgtttatttgcctgttttccttcagatggctgtttgcttcattctcagtttggggctatgacaaacatatgttctgcacatctttgcccatgaggctctcagggagggctctggagctggcattgcctgcagggctctgctttgttgcagggagttcctgccaaggcttttcagagtgtctgtgcccagcctgaaggtacacactgtactttgcccttgcatcaggcactttccttgtgcttgcttctgtgtggctccacattctggagaatttattcagatctgtgctgcaaatccatttcactgattctctctttagctgtgtctacatcag

SEQ ID NO: 2958 - DNA, 478 bp, synthetic construct
  misc_feature 1..478: note = Description of artificial sequence: synthetic polynucleotide sequence
  source 1..478: mol_type = other DNA
ctgttaagcatcccatgatgcagcattgtgggcacagggcaaactcttgaaagatgacagtgtaggatagcggctgcttctccttccctgtgcccttcccacactgtcctcctgggctcactcccagccatcgatcttgaacaccagtttatggaactatctgcacaggaaagcagaaacagcaaaaggccctgctcaggctctgcccgcatcccctcttgcacacccgccaaagctctttccttggggcctgtgcaagcttcccagctgcttctcattttctgtttactctgctcactggccagtggggtgatgtctgggggggagtctggtgcgttttgggcattgatggccacccctaggccctacttcccagacgctccccccagcccctcagctccagaagtggaagcgtttacagcagggctttgggaatggggctgtgtcactgtgggcatagcagctggtactactacaa

SEQ ID NO: 2959 - DNA, 480 bp, synthetic construct
  misc_feature 1..480: note = Description of artificial sequence: synthetic polynucleotide sequence
  source 1..480: mol_type = other DNA
tatcctcacagtgacacgagcccccacaaaatcctcctgtccccgcgggagtcactgagtcccctcttgctgtctctggctagttctcctgctgatactatgatttccagggggtttttgtctgaaactcagggtgtgttggagaggactctgagcccagtgctgtacagggggctcctcctttgtcctgggggagttgcgtggaccctgtttttggtcaagggaagtacttgctggtgaaggagacctcccctcctttctttctcaggagccccctctgatgccgttgcctggtgtttctcagggctggtgctgggggctcagcagtgtctgccctgttccaggtgggaatgtgggtctgttctgtttccacgcggtgttctggggccgccagtgaggggctcgggatgtcagcggctggtctctgtccctatggtctgggctccggttcactgctcccctgccctccaggtcggtcac

SEQ ID NO: 2960 - DNA, 121 bp, synthetic construct
  misc_feature 1..121: note = Description of artificial sequence: synthetic polynucleotide sequence
  source 1..121: mol_type = other DNA
tgtcgtccctttgatggggacagtactgaggctagaatttgtctctcaagggtagcttcctccagatattgaaggaggagtttttctgtctacaaatggggcatggagcctggtacccagt

SEQ ID NO: 2961 - DNA, 121 bp, synthetic construct
  misc_feature 1..121: note = Description of artificial sequence: synthetic polynucleotide sequence
  source 1..121: mol_type = other DNA
aggcacagttggaaattgtaccttgccactttgtgtggctgagagagagaaaaatgtgctagctgaatgtgtggactgtctttgccagtggaggctgggatgcaaatacttgtaattcttg

SEQ ID NO: 2962 - DNA, 121 bp, synthetic construct
  misc_feature 1..121: note = Description of artificial sequence: synthetic polynucleotide sequence
  source 1..121: mol_type = other DNA
tgacctcaaaagaacagacggtaggtgtgtctgggctggtgaggactcccagcctcttgatctttcctggttacttgatgagatccctggggaggatgttcaagaccattgcatttcttta

SEQ ID NO: 2963 - DNA, 121 bp, synthetic construct
  misc_feature 1..121: note = Description of artificial sequence: synthetic polynucleotide sequence
  source 1..121: mol_type = other DNA
atgacctgagcacatggcacacgttttccatctttcacaggtcaaaagctacacacaatgtaaacgtgctgtctgttatcactaatctctcttcacagcttgttcctcttgagtttttccc

SEQ ID NO: 2964 - DNA, 121 bp, synthetic construct
  misc_feature 1..121: note = Description of artificial sequence: synthetic polynucleotide sequence
  source 1..121: mol_type = other DNA
acgttcttcatttagagagggacagagcagcacgtcaaccccagccaacctaattgcaggcacctactctttacactgtgctctgttgcccaaagaaccaagtccaggggtctacaaagtg

SEQ ID NO: 2965 - DNA, 121 bp, synthetic construct
  misc_feature 1..121: note = Description of artificial sequence: synthetic polynucleotide sequence
  source 1..121: mol_type = other DNA
tcccttccctgtgttagggttggcagagcctgaaaagctgggaaagtggcacagactgtgtcgatatctttcccactttgtgaatgacctcctcatattctccaggaccaaccaagctctt

SEQ ID NO: 2966 - DNA, 121 bp, synthetic construct
  misc_feature 1..121: note = Description of artificial sequence: synthetic polynucleotide sequence
  source 1..121: mol_type = other DNA
aagataacaaatcccaacactgtcaggcatttggcgagcagaatcccgtcagatatcctatgctgtaagagagaaaccacagctcatttactctgcacaaccttctgactcctgcagcgtg

SEQ ID NO: 2967 - DNA, 121 bp, synthetic construct
  misc_feature 1..121: note = Description of artificial sequence: synthetic polynucleotide sequence
  source 1..121: mol_type = other DNA
gttcttcatggctctctgtgtctgatccaagaggcgaggccagtttcatttgagcattaaatgtcaagttctgcacgctatcatcatcaggggccgaggcttctctttgtttttaattaat

SEQ ID NO: 2968 - DNA, 121 bp, synthetic construct
  misc_feature 1..121: note = Description of artificial sequence: synthetic polynucleotide sequence
  source 1..121: mol_type = other DNA
tggttctgggggtgggatctaacttgcatcactagaccaccaatggtacctaaatgtgaatgattaagaaaagacaggctgggcatggtggctcatgcctgtaatcctagcactttgggag

SEQ ID NO: 2969 - DNA, 121 bp, synthetic construct
  misc_feature 1..121: note = Description of artificial sequence: synthetic polynucleotide sequence
  source 1..121: mol_type = other DNA
ttccctctgtctttagtttgtggcccttcatttgatatggattcatttgagttagtcctatttagcattctctacatttatttaatctgtgggtttacgtctttgatcaaacttgggaggt

SEQ ID NO: 2970 - DNA, 121 bp, synthetic construct
  misc_feature 1..121: note = Description of artificial sequence: synthetic polynucleotide sequence
  source 1..121: mol_type = other DNA
aggcggaatccttgttttgctcctgatcttagaaagaaaacattcggtttatcaccattaagtacaatgtcagctgtaggattttgtaggtgttttttatcgaggtcacttagttcttctg

SEQ ID NO: 2971 - DNA, 121 bp, synthetic construct
  misc_feature 1..121: note = Description of artificial sequence: synthetic polynucleotide sequence
  source 1..121: mol_type = other DNA
gccctgtggtgaggttctatggggaccatggtgggcactatgcattgagaaactagcctacatcaggccgttgttcctgttgtgccagggattattgctgtcacatgcaggcagaacaaaa

SEQ ID NO: 2972 - DNA, 121 bp, synthetic construct
  misc_feature 1..121: note = Description of artificial sequence: synthetic polynucleotide sequence
  source 1..121: mol_type = other DNA
acggtccccagcatgttagaagttctcatgtgcaggtcattgtgctgagtgtacttgcgtgcattttccctttaacgtggagtgtttaactatttgatccagattgcccaggagatgcagt

SEQ ID NO: 2973 - DNA, 121 bp, synthetic construct
  misc_feature 1..121: note = Description of artificial sequence: synthetic polynucleotide sequence
  source 1..121: mol_type = other DNA
tcagagattatttgagttcacattagagtgaaatacatagaaaagaaacttaaagtttgtatattatagaagatcattaggaaatgccttcctttgactctagagccaaaggactaatcta

SEQ ID NO: 2974 - DNA, 121 bp, synthetic construct
  misc_feature 1..121: note = Description of artificial sequence: synthetic polynucleotide sequence
  source 1..121: mol_type = other DNA
ggtgtaaggggtgaggaggtgtttagccctgtttgtgttacaactccttcagtcctgccgtttggccagcaccgagttcttgtctcacatccaggaagaacgaggtacaaccggagcaaaa

SEQ ID NO: 2975 - DNA, 121 bp, synthetic construct
  misc_feature 1..121: note = Description of artificial sequence: synthetic polynucleotide sequence
  source 1..121: mol_type = other DNA
ttgctggtcaattaactaactggaggcagtacttatactcatggctttgactgaggataaaagagatttgaagagaaggtacaatatatgtgtgcatgtcattttggtaaaatacatgatc

SEQ ID NO: 2976 - DNA, 121 bp, synthetic construct
  misc_feature 1..121: note = Description of artificial sequence: synthetic polynucleotide sequence
  source 1..121: mol_type = other DNA
tggaagccttccacccattctaactatattctcaactaatggcaacatagcttttcattgcaaagagaacctaagaaaaccttagtctggccttattagagggagttagaaacttggtcaa

SEQ ID NO: 2977 - DNA, 121 bp, synthetic construct
  misc_feature 1..121: note = Description of artificial sequence: synthetic polynucleotide sequence
  source 1..121: mol_type = other DNA
atctgttgcgtgacgcttccctatcatggccaagcctaaggtccagctccctcagaagcattttcatggatttaagagcatctttggaaggttctgtatggacagttttctaatgtacaaa

SEQ ID NO: 2978 - DNA, 121 bp, synthetic construct
  misc_feature 1..121: note = Description of artificial sequence: synthetic polynucleotide sequence
  source 1..121: mol_type = other DNA
tgggtgggccacagcttgctgcacgtcttcagtaccgagttccgagctcagcccctggcctactatgaggccgcggtccgggcgggccgcctgcaactcaacgagaagccggtgcaggacc

SEQ ID NO: 2979 - DNA, 121 bp, synthetic construct
  misc_feature 1..121: note = Description of artificial sequence: synthetic polynucleotide sequence
  source 1..121: mol_type = other DNA
cctttcctctctgcagacacgagtggctttgacgagctccagcgcatccatttccccagtgacaaaggtgagatcctccccaggtgccctggatcagggcagacgctgacactgccatcct

SEQ ID NO: 2980 - DNA, 121 bp, synthetic construct
  misc_feature 1..121: note = Description of artificial sequence: synthetic polynucleotide sequence
  source 1..121: mol_type = other DNA
acttatccaggaatcgatcttctccaaggctggacagggagggagtgtggaaaccacagtctttctgataggataaaaagtgtcacttggagacactctggtttcctgaggaaaggaagac

SEQ ID NO: 2981 - DNA, 121 bp, synthetic construct
  misc_feature 1..121: note = Description of artificial sequence: synthetic polynucleotide sequence
  source 1..121: mol_type = other DNA
cgtatcttccttgtttatttgacttttggctctaataataaggtctctcttgcaggcaaccaagttgttaaaagccttgaaaggctacattaaacatgaggcaagaaaaggaaatgagaat

SEQ ID NO: 2982 - DNA, 121 bp, synthetic construct
  misc_feature 1..121: note = Description of artificial sequence: synthetic polynucleotide sequence
  source 1..121: mol_type = other DNA
ctggagcggaggccggtctgagttggcatcaccaccgcccctatttcctttcttcaccaactgcactgctggggctgcaccagctgcgagaaactgactctggaagtgcagcaggtccacc

SEQ ID NO: 2983 - DNA, 235 bp, synthetic construct
  misc_feature 1..235: note = Description of artificial sequence: synthetic polynucleotide sequence
  source 1..235: mol_type = other DNA
catggaggagaaacagcagattatattggctaatcaagatggtggaacagtggcaggagcagcacctaccttctttgtcatcttaaagcagccaggaaatggcaaaactgatcaaggaattttggttactaatcaggatgcctgtgctttggctagtagtgtgtcatcaccagtaaaatctaaagggaagatttgccttccagctgattgtactgtgggtggaatcactgttacc

SEQ ID NO: 2984 - DNA, 473 bp, synthetic construct
  misc_feature 1..473: note = Description of artificial sequence: synthetic polynucleotide sequence
  source 1..473: mol_type = other DNA
ctcgataacaatagtatgtggaatgagttctatcatcgaagcacagagatgattctgaccaagcaaggaagacgcatgtttccttactgtcgttattggataacaggtttagattcaaatttgaagtatattcttgtcatggatatatctcctgtggataaccatcgttataagtggaatggtcgttggtgggaacctagtgggaaggctgaacctcatgttttggggagggttttcattcatccagaatctccttccacaggtcattattggatgcatcaaccagtatctttctataaactcaaacttaccaacaatacactggaccaagaagggcatatcatcttgcactctatgcatcgttacctgccgaggcttcatttggtgcctgcagaaaaggctgtggaggtgatacaattaaatggccctggtgtccacacttttaccttcccacagactgaattctttgcagt

SEQ ID NO: 2985 - DNA, 357 bp, synthetic construct
  misc_feature 1..357: note = Description of artificial sequence: synthetic polynucleotide sequence
  source 1..357: mol_type = other DNA
aacagcttatcagaacattcagattactcagctgaaaatagattacaatccatttgccaaaggctttcgggatgatgggctgaataataagccccagagagatggaaaacaaaagaacagctctgaccaagaagggaataatatttccagttcttctggtcatcgggtccgtcttacagaaggtcaggggtcagagatacaaccaggtgatttggatcctttgtcaaggggtcatgaaacatcaggcaagggtttggagaagacttcccttaatataaaacgagactttcttggtttcatggatactgattcagcacttagtgaagttcctcaattgaagcaagagatttctgaatg

SEQ ID NO: 2986 - DNA, 474 bp, synthetic construct
  misc_feature 1..474: note = Description of artificial sequence: synthetic polynucleotide sequence
  source 1..474: mol_type = other DNA
gtcttattgccagcagttttgaagatgactcccgtgtagcctcaccgttagaccagaacggaagcttcaatgttgttattaaagaggaacctctagatgattatgactacgaacttggtgagtgcccagaaggggtcactgtgaaacaggaagagacagatgaagagacggatgtatactcaaacagtgatgatgatcctatactagagaaacagctaaagaggcacaataaagttgacaacccagaagctgaccatctatcttctaaatggcttccaagcagcccatcaggtgttgctaaagctaaaatgttcaaattagacactggaaagatgccagtagtctatctggagccctgtgctgtcaccagaagcacagttaagatttctgaactccccgataacatgctttccacatctcgaaaggataaatcttctatgttggcagaattggaatatttgcctacatacattg

SEQ ID NO: 2987 - DNA, 476 bp, synthetic construct
  misc_feature 1..476: note = Description of artificial sequence: synthetic polynucleotide sequence
  source 1..476: mol_type = other DNA
aaaattccaatgagactgccttctgcttaggcaaggaatcagaaaatggtcttagaaaacattcaccagatctcagagtggtacaaaaatatcccttactgaaagagcctcagtggaaatatcctgatatatctgacagcattagcacagaaagaatactcgacgattcaaaggattcagttggagactcactttcaggaaaagaggacttgggcagaaagagaacaactatgcttaagattgcaacagccgcaaaggtagtgaatgctaatcagaatgcctctccaaatgtccctggaaaaagaggaaggccacgaaaattgaaactctgtaaggcaggacgaccacctaagaacacaggaaagtctttaatttctacaaagaatacacctgtaagccctgggagtacctttccagatgtgaagcctgatctggaagatgtggatggtgttctctttgtttcctttgaatcaaag

SEQ ID NO: 2988 - DNA, 121 bp, synthetic construct
  misc_feature 1..121: note = Description of artificial sequence: synthetic polynucleotide sequence
  source 1..121: mol_type = other DNA
ttttttttttttgatgtataggaagctctagacattcatgcagttgatgggacaacagaagaatcttctagtctccaggcatcaaccacaaatgactcaggtattataaaatagtataaaa

SEQ ID NO: 2989 - DNA, 121 bp, synthetic construct
  misc_feature 1..121: note = Description of artificial sequence: synthetic polynucleotide sequence
  source 1..121: mol_type = other DNA
attttgggtgtaggttacagagcaagaatttcccagttggaaaaggaattgatagaagatttgaagactttgcggcacaagcaggtgatacatcctggtcttcaagaaggtaatagactag

SEQ ID NO: 2990 - DNA, 133 bp, synthetic construct
  misc_feature 1..133: note = Description of artificial sequence: synthetic polynucleotide sequence
  source 1..133: mol_type = other DNA
gtgggcttaaaattgaattcagtggatccaacaatgagcattgatcttaaatacttgggagtacagttacctttggctccagctactagctttcctttttggaaccttacaggaaccaaccctgcctctcctg

SEQ ID NO: 2991 - DNA, 121 bp, synthetic construct
  misc_feature 1..121: note = Description of artificial sequence: synthetic polynucleotide sequence
  source 1..121: mol_type = other DNA
ttttatagatgcgggatttccctttgtttctaggacagggaaaaccaatgatttcactaagatcaagggatggaggggaaaatttcatagtgcttctgcatctaggaatgaaggtaattag

SEQ ID NO: 2992 - DNA, 323 bp, synthetic construct
  misc_feature 1..323: note = Description of artificial sequence: synthetic polynucleotide sequence
  source 1..323: mol_type = other DNA
ggtggaaattcagaaagttcactgaaaaatcgttctgctttctgtagtgataagctagatgaatacttggaaaatgaaggcaagctgatggaaacaagcatgggtttttcttctaatgctcccacatctcctgtggtgtaccagcttcccactaagagtaccagttatgtacgaacacttgatagtgtactaaagaagcaatctactatttccccttctacctcttattctttgaaacctcattctgtaccccctgtctctcgaaaggcaaagtctcaaaacagacaggcaactttcagtggccgaactaaatcatcttataa

SEQ ID NO: 2993 - DNA, 337 bp, synthetic construct
  misc_feature 1..337: note = Description of artificial sequence: synthetic polynucleotide sequence
  source 1..337: mol_type = other DNA
atccattttaccataccctgtttcaccaaagcagaaatactctcatgtgattctaggagataaggttaccaagaattcttcaggcatcatctcagaaaatcaggcgaataactttgttgtgccaactttggatgaaaatatatttccaaagcagattagtttgcggcaggcacagcagcagcagcaacagcaacagggaagtcgccctccaggcttgtctaaatctcaggtgaagctaatggacctggaagactgtgcactttgggaaggaaaaccaaggacatacatcacagaagagcgagcagatgtatccttaacaactctacttacagctcaa

SEQ ID NO: 2994 - DNA, 347 bp, synthetic construct
  misc_feature 1..347: note = Description of artificial sequence: synthetic polynucleotide sequence
  source 1..347: mol_type = other DNA
ggcatccctcaaaactaaacctatccacacaatcataaggaaacgagcccctccctgcaacaatgacttctgtcgactgggttgtgtatgttccagtctagctttggagaagcgccaacctgctcactgccgccgaccagactgcatgtttggttgtacttgtttgaaaagaaaagttgtacttgttaaaggaggatccaaaactaagcattttcagaggaaggctgctcatcgagatccagtattttatgatactctgggagaggaggcaagggaggaggaagaaggaatcagggaggaggaggaacaattgaaagagaaaaagaagagaaagaagctagaataca

SEQ ID NO: 2995 - DNA, 228 bp, synthetic construct
  misc_feature 1..228: note = Description of artificial sequence: synthetic polynucleotide sequence
  source 1..228: mol_type = other DNA
gctatatgtgagacagagcctgaacagcctgttcgacattacccattatgggtaaaagtagaaggtgaagtagatccagaaccagtttatatccccacgccttctgtcattgagcctatgaaaccattgttattgcctcagccagaagttttatctcctactgtgaagggcaaactgctcactggaattaaatctccacggtcatatactcccaaacccaatcctgtg

SEQ ID NO: 2996 - DNA, 187 bp, synthetic construct
  misc_feature 1..187: note = Description of artificial sequence: synthetic polynucleotide sequence
  source 1..187: mol_type = other DNA
gattcgggaagaggacaaagatccagtctacttgtactttgaaagtatgatgacttgtgctcgagttcgagtatatgagcgaaaaaaagaggaccagagacaaccatcttcctcctcctccccatctccatcatttcagcagcaaacttcatgtcattctagccctgagaaccataataatgcaaag

SEQ ID NO: 2997 - DNA, 121 bp, synthetic construct
  misc_feature 1..121: note = Description of artificial sequence: synthetic polynucleotide sequence
  source 1..121: mol_type = other DNA
tttctgtgttactgtctccttcaggaacctgattctgaacagcagcccttaaaacaactcacctgtgacttggaggatgattctgataaattacaaggtcagaatgaaaactagatcttaa

SEQ ID NO: 2998 - DNA, 199 bp, synthetic construct
  misc_feature 1..199: note = Description of artificial sequence: synthetic polynucleotide sequence
  source 1..199: mol_type = other DNA
gaaaagagctggaagtcttcctgcaatgaaggagaatcctcttctacttcttatatgcatcagaggtcacctggtggtcccaccaaactgattgagatcatctcagactgcaactgggaggaagatcggaacaagattttgagcatcttatcccagcacatcaatagcaacatgccacaatcacttaaggtgggcagct

SEQ ID NO: 2999 - DNA, 320 bp, synthetic construct
  misc_feature 1..320: note = Description of artificial sequence: synthetic polynucleotide sequence
  source 1..320: mol_type = other DNA
tcatcattgagttggcttctcagcgaaagagccggggtgagaagaaccctcctgtttattcttctcgtgtgaaaatctctatgccatcatgtcaagaccaagatgatatggctgagaaatctggatcagagactcctgatggtccattgtcccctgggaaaatggaggatatctctcctgtgcagacagatgccctggattcagtgagggagagattacatggaggcaaaggtctgcctttttatgcagggctttctcctgcagggaagcttgtggcctataaacgtaaacccagttcaagtacatctgggcttatccag

SEQ ID NO: 3000 - DNA, 152 bp, synthetic construct
  misc_feature 1..152: note = Description of artificial sequence: synthetic polynucleotide sequence
  source 1..152: mol_type = other DNA
ggtagcatccaatgccaaggtggctgcatccaggaaaccacgtaccctgttgccttcaacatccaattccaaaatggcatcctcctctggcactgcaacaaatcgccctgggaagaatctgaaggcgtttgtcccagcaaaacggccaattg

SEQ ID NO: 3001 - DNA, 304 bp, synthetic construct
  misc_feature 1..304: note = Description of artificial sequence: synthetic polynucleotide sequence
  source 1..304: mol_type = other DNA
gcggctcgaccctctcctggtggtgtgttcacacagtttgtgatgagtaaagttggagccttgcagcagaagatacctggagttagcacaccccaaaccctggcagggacacagaagttcagtatcagaccttctccagtaatggtcgtcacacctgtggtttcttctgagccagttcaggtgtgcagccctgtgactgctgctgtcactactaccacccctcaagtgtttttagaaaatactactgctgtgacacctatgactgctatttctgacgtggaaactaaagaaactacttattctt

SEQ ID NO: 3002 - DNA, 324 bp, synthetic construct
  misc_feature 1..324: note = Description of artificial sequence: synthetic polynucleotide sequence
  source 1..324: mol_type = other DNA
ctggtgccaccactacaggggttgttgaggtctctgaaactaataccagcacctctgtaacatctacccagtctacagccactgtgaaccttaccaaaaccactgggataactacccctgtggcttcagttgcttttcctaagtctttggtagcatctccttcaaccataactcttcctgttgcttccactgcttccacctccttagtcgtggtgactgcagctgcatcttcctccatggtgaccacaccaacttcatctctgggctctgttcctattatactctcaggaattaatgggagtccaccagtgagccagagaccag

SEQ ID NO: 3003 - DNA, 292 bp, synthetic construct
  misc_feature 1..292: note = Description of artificial sequence: synthetic polynucleotide sequence
  source 1..292: mol_type = other DNA
gaaaatgctgctcaaattccagtggctactccacaggtctctcctaacacagtgaaacgtgctggacctcgattgttgttgattccagtgcagcagggttctcctactcttagacctgtctcaaacacacaacttcagggacatcggatggtcttgcagcctgttaggagtccaagtggaatgaacttattcaggcaccctaatgggcagattgtccagcttctacctttgcatcagcttcgaggctctaatacccagcccaacttacagcctgtcatgtttcggaacccag

SEQ ID NO: 3004 - DNA, 231 bp, synthetic construct
  misc_feature 1..231: note = Description of artificial sequence: synthetic polynucleotide sequence
  source 1..231: mol_type = other DNA
gggtctgtgatgggaatccggttacctgctccttccaaaccctctgagactccgccatcttccacttcgtcctctgctttctctgtcatgaatcctgtaattcaagctgttgggtcttcttcagcagtgaatgttatcactcaggcaccatcattgctttcctctggagctagttttgtgtctcaggctggtacattgaccctgaggatttctcctcctgaaccacaaagc

SEQ ID NO: 3005 - DNA, 462 bp, synthetic construct
  misc_feature 1..462: note = Description of artificial sequence: synthetic polynucleotide sequence
  source 1..462: mol_type = other DNA
tttgcaagtaaaacaggctctgaaaccaaaataacttatagctcaggaggacagcctgttggtacagccagtcttattcctctccagtctggtagttttgccttgttacagctcccaggacaaaagcctgttcctagctccattcttcagcatgttgcttcccttcagatgaagagagaatctcagaatccagaccagaaagatgaaacaaactcaataaaaagagagcaagaaacgaagaaggttctacagtcagaaggagaggctgtagaccctgaggctaatgtaataaaacaaaactcaggagctgctacctcagaagaaactctgaatgattccttggaagataggggtgatcatttggatgaagaatgccttccagaagaaggttgtgcaactgtcaaaccatctgagcattcctgtatcactgggtcacatacagatcaagattataaagatgtt

SEQ ID NO: 3006 - DNA, 462 bp, synthetic construct
  misc_feature 1..462: note = Description of artificial sequence: synthetic polynucleotide sequence
  source 1..462: mol_type = other DNA
aatgaagaatatggggctaggaatcgtaagagttccaaagaaaaagtggctgttctggaagttaggaccatttctgaaaaagccagtaataagacagtccaaaatttaagtaaagtacagcatcaaaaacttggtgatgtgaaggtggaacagcagaaaggatttgacaatccagaagaaaactcaagtgaatttccagtcacctttaaggaagaaagtaaatttgaattgtcaggaagcaaagttatggagcagcaatctaatctacagccagaggccaaagagaaggaatgtggagactctctggagaaagacagggaaagatggagaaaacatctgaagggccccttaaccaggaaatgtgttggagcttcacaggaatgtaagaaagaggcagacgagcagttaattaaagaaacaaagacatgtcaggaaaattcagatgtgtttcagcaagaacaa

SEQ ID NO: 3007 - DNA, 351 bp, synthetic construct
  misc_feature 1..351: note = Description of artificial sequence: synthetic polynucleotide sequence
  source 1..351: mol_type = other DNA
ggcatctctgacttacttggaaaaagtggaattactgaagatgccagagttttgaaaactgaatgtgattcttggagtaggatttctaatccttcagccttctccattgttcctaggagagctgcaaaaagcagcagagggaatggacattttcagggtcacttactgctacctggagaacagatacaaccaaagcaagagaagaagggtgggagaagcagtgctgacttcactgttttggatttggaagaagatgatgaagatgataatgagaaaactgatgattctattgatgaaattgtggatgttgtttctgactaccagagtgaggaggttgatgatgtagaaaag

SEQ ID NO: 3008 - DNA, 121 bp, synthetic construct
  misc_feature 1..121: note = Description of artificial sequence: synthetic polynucleotide sequence
  source 1..121: mol_type = other DNA
ctgtgtagaatacattgaggatgatgaggagcacgtggacattgagactgtagaagagctctcagaggaaattaatgttgctcacctgaagaccacagcggcccacacacagtcattcaaa

SEQ ID NO: 3009 - DNA, 121 bp, synthetic construct
  misc_feature 1..121: note = Description of artificial sequence: synthetic polynucleotide sequence
  source 1..121: mol_type = other DNA
tcagtaagacactgaaaaatcctgtctttatccaggtcctgtactcacatctctgcagatgaaaaagcagctgaaaggagtcgaaaggtatttaggatatatttagtgataattactcatt

SEQ ID NO: 3010 - DNA, 208 bp, synthetic construct
  misc_feature 1..208: note = Description of artificial sequence: synthetic polynucleotide sequence
  source 1..208: mol_type = other DNA
ggctccaccaattcctctaaaactgaagcctgattactggagtgacaaactacagaaagaagcagaagcgtttgcttattatcgccggacacacactgccaatgagcggcggcggcgtggtgaaatgagggatctctttgagaaattaaagatcacattgggattacttcattcttccaaggtttccaaaagtctcattcttactcga

SEQ ID NO: 3011 - DNA, 121 bp, synthetic construct
  misc_feature 1..121: note = Description of artificial sequence: synthetic polynucleotide sequence
  source 1..121: mol_type = other DNA
tctaggccttcagtgaaattcagggactaacagatcaggcagacaaattgataggacagaaaaatctcctgactcgaaaacggaatattctgatacggaaagtatcgtctctttcaggtga

SEQ ID NO: 3012 - DNA, 235 bp, synthetic construct
  misc_feature 1..235: note = Description of artificial sequence: synthetic polynucleotide sequence
  source 1..235: mol_type = other DNA
ggtaagacagaagaagtggtcctgaagaagctagagtatatttatgcaaaacagcaagcactagaggcacaaaaaagaaaaaagaagatgggatcagatgagtttgacatatctcccagaattagcaaacagcaggaaggatcttctgcatcatctgtagatcttggacagatgtttataaataacaggagggggaaacctttgattctttccagaaaaaaagaccaggccacag

SEQ ID NO: 3013 - DNA, 178 bp, synthetic construct
  misc_feature 1..178: note = Description of artificial sequence: synthetic polynucleotide sequence
  source 1..178: mol_type = other DNA
gaaaatacctcacccttgaacactccacacacctctgccaaccttgtgatgactccgcaagggcaattgctcaccctaaaaggtcccctattctcaggaccagtggtagctgtttctcctgatctcttagaatctgatcttaagcctcaagttgccggtagtgctgtggctctaccag

SEQ ID NO: 3014 - DNA, 347 bp, synthetic construct
  misc_feature 1..347: note = Description of artificial sequence: synthetic polynucleotide sequence
  source 1..347: mol_type = other DNA
gaaaatgacgacttatttatgatgccacgaattgttaatgtgacatcattggccacagagggaggtttggtagatatgggtggcagcaaatatcctcatgaagttcctgatagcaagccatctgaccatctgaaagacaccgtcaggaatgaagataattccttagaggataagggtagaatctcttccagaggaaacagagatggcagagtgacgttgggtccaacgcaggtttttctggcaaacaaagattctggttatccacaaatagttgacgtttccaatatgcagaaagcacaagagttcttacctaaaaagatttctggtgatatgagagggattcagta

SEQ ID NO: 3015 - DNA, 462 bp, synthetic construct
  misc_feature 1..462: note = Description of artificial sequence: synthetic polynucleotide sequence
  source 1..462: mol_type = other DNA
taaatggaaagagagtgaatcaagaggggagagagtgaagtcaaaggattcttcatttcataaattaaagatgaaagatctcaaggactcaagcatagagatggaactgaggaaagtaacatcagctatagaggaagcagctcttgattccagtgaactgctgactaacatggaagatgaggatgatactgatgagacactgacttcactgctcaatgaaattgcctttcttaatcaacaactaaatgatgactctgttggcctggctgaactacccagctctatggatacagagttcccaggggatgctcggcgggcttttattagtaaggttcctcctggaagcagagcaactttccaggttgagcacttgggaactggtttgaaagagttgcctgatgttcaaggggagagtgactctatcagtcccctcctcttgcacttggaagacgatgacttttc

SEQ ID NO: 3016 - DNA, 469 bp, synthetic construct
  misc_feature 1..469: note = Description of artificial sequence: synthetic polynucleotide sequence
  source 1..469: mol_type = other DNA
tgagaatgaaaaacaacttgcagaaccagcctctgagccagatgtccttaagattgttattgactctgaaataaaggattccctcctttccaacaagaaagctattgatggagggaagaatacttctggcctccctgcagagcccgaaagtgtgtcctcaccccccaccctacacatgaagactggcttggagaacagcaacagcacagacactttgtggaggcctatgccaaagttggcccctctaggtttaaaagtagctaatccttccagtgatgcagatggtcagagtctcaaggtgatgccttgtttggcacctatagctgccaaagttgggtcagttggacacaaaatgaacttaacagggaatgaccaggaaggccgggaaagcaaggtgatgcctacattggcacctgttgtggctaaattgggcaactcgggggcctcaccaagttctgcagggaaatga

SEQ ID NO: 3017 - DNA, 121 bp, synthetic construct
  misc_feature 1..121: note = Description of artificial sequence: synthetic polynucleotide sequence
  source 1..121: mol_type = other DNA
ttgatgaggtcgttgagcttgcgcaccgctgccttctgggggaggctctggatgtctctaaagaggtcctgggcctcagcctcgaagagccggcggttgtccgtgttctgcaggggctgcg

SEQ ID NO: 3018 - DNA, 121 bp, synthetic construct
  misc_feature 1..121: note = Description of artificial sequence: synthetic polynucleotide sequence
  source 1..121: mol_type = other DNA
ctctcccgagcctggtgccggtccagagccagctggagggcgcacttcaaggtctccacgttgttcaggacgttgtatcgactgagggccaccagccgataaaagtcctggggctcatagg

SEQ ID NO: 3019 - DNA, 121 bp, synthetic construct
  misc_feature 1..121: note = Description of artificial sequence: synthetic polynucleotide sequence
  source 1..121: mol_type = other DNA
ggtggccacttcaaacccccatccctctccttttaatactgtttgtatctattccagttttgctgaccagaggggtcattatcccagcaagtgtgtggtggagaagatcttggtcttaggc

SEQ ID NO: 3020 - DNA, 121 bp, synthetic construct
  misc_feature 1..121: note = Description of artificial sequence: synthetic polynucleotide sequence
  source 1..121: mol_type = other DNA
aatgtagtatctaaacagccaggcccggtgacaaatggtcagcttcagcaaccaacaacgggagcagccagtggtggatacattaaacggtatgccaactcctcctgatattcctgtacct

SEQ ID NO: 3021 - DNA, 121 bp, synthetic construct
  misc_feature 1..121: note = Description of artificial sequence: synthetic polynucleotide sequence
  source 1..121: mol_type = other DNA
gtctcccccttcctctccctgtgtcaccagctgctcttggagaagtgactctgcctggcgcaccagatctgccaccagtgtagccctgcagcagggacagcaaggttggggatggttggag

SEQ ID NO: 3022 - DNA, 121 bp, synthetic construct
  misc_feature 1..121: note = Description of artificial sequence: synthetic polynucleotide sequence
  source 1..121: mol_type = other DNA
caaagacctaacagaaatcaggaacactgtactgagtgagaatgaagaaagcagactagaaactatgctcaacaaatcaactactttaggaaacacaacttgtggatgagggagaaaggat

SEQ ID NO: 3023 - DNA, 121 bp, synthetic construct
  misc_feature 1..121: note = Description of artificial sequence: synthetic polynucleotide sequence
  source 1..121: mol_type = other DNA
gcttcctccctccccgggcacgccagggacctcaccatggcacacaccactctgctgacgtagacggggcttccccgcagagcacagtctgtggctgggtcagtctggaagtgcaggctct

SEQ ID NO: 3024 - DNA, 121 bp, synthetic construct
  misc_feature 1..121: note = Description of artificial sequence: synthetic polynucleotide sequence
  source 1..121: mol_type = other DNA
ttgtggtgatacagtggactcaggcaggagaggggggttttctaactccactggttcaccactttgaagtttcttctgaaaaggctctcctccttcttcagataacactgacgtgtccatt

SEQ ID NO: 3025 - DNA, 121 bp, synthetic construct
  misc_feature 1..121: note = Description of artificial sequence: synthetic polynucleotide sequence
  source 1..121: mol_type = other DNA
ttcgagagtcgcatctccgacacgggctctgcgggcctcatgctcgtcgagttcttcgccccctggtgagtccattctgccgaggcgggggaagaaaggcggggctgggccgggggcgaga

SEQ ID NO: 3026 - DNA, 121 bp, synthetic construct
  misc_feature 1..121: note = Description of artificial sequence: synthetic polynucleotide sequence
  source 1..121: mol_type = other DNA
caacctcatctcacttaaccagaggcagagcctctgaaacgtggctgaggcagaagctgcggatgtgctttcagacaagtaccattgggtccctcaacttgttagtttcctgaaggttctc

SEQ ID NO: 3027 - DNA, 121 bp, synthetic construct
  misc_feature 1..121: note = Description of artificial sequence: synthetic polynucleotide sequence
  source 1..121: mol_type = other DNA
tgcccagcaacaatggggagggagtctaccctggaacaagaaggctggtgatccatgcagtgagaaaaggtgcatacagaagatgagacaagacaatgctggaaaggggggtagcagagag

SEQ ID NO: 3028 - DNA, 121 bp, synthetic construct
  misc_feature 1..121: note = Description of artificial sequence: synthetic polynucleotide sequence
  source 1..121: mol_type = other DNA
caaagcacagctgctggtctccactactgtctacaggaatacactttgtgccaagggaaaaacactgcatgccctgggtctccaaatcccagagggtaatggtatagcccatcctttccac

SEQ ID NO: 3029 - DNA, 121 bp, synthetic construct
  misc_feature 1..121: note = Description of artificial sequence: synthetic polynucleotide sequence
  source 1..121: mol_type = other DNA
cctgaagctgacagcattcgggccgagatgtctcgctccgtggccttagctgtgctcgcgctactctctctttctggcctggaggctatccagcgtgagtctctcctaccctcccgctctg

SEQ ID NO: 3030 - DNA, 280 bp, synthetic construct
  misc_feature 1..280: note = Description of artificial sequence: synthetic polynucleotide sequence
  source 1..280: mol_type = other DNA
ggtactccaaagattcaggtttactcacgtcatccagcagagaatggaaagtcaaatttcctgaattgctatgtgtctgggtttcatccatccgacattgaagttgacttactgaagaatggagagagaattgaaaaagtggagcattcagacttgtctttcagcaaggactggtctttctatctcttgtactacactgaattcacccccactgaaaaagatgagtatgcctgccgtgtgaaccatgtgactttgtcacagcccaagatagttaagtggg

SEQ ID NO: 3031 - DNA, 121 bp, synthetic construct
  misc_feature 1..121: note = Description of artificial sequence: synthetic polynucleotide sequence
  source 1..121: mol_type = other DNA
tttaaaagtaaaacttaatgtcttccttttttttctccactgtctttttcatagatcgagacatgtaagcagcatcatggaggtaagtttttgaccttgagaaaatgtttttgtttcactg

SEQ ID NO: 3032 - DNA, 121 bp, synthetic construct
  misc_feature 1..121: note = Description of artificial sequence: synthetic polynucleotide sequence
  source 1..121: mol_type = other DNA
gttgtctgtggggcagtctaaggagttcctgcaaatctctgatgctgtccatttcttcacggtgggtgagccctgggccttgaacaatcccttagaaaaactaggaaaaatatttcatagg

SEQ ID NO: 3033 - DNA, 121 bp, synthetic construct
  misc_feature 1..121: note = Description of artificial sequence: synthetic polynucleotide sequence
  source 1..121: mol_type = other DNA
ccgtgcctcgtgacaggatgatgcccacgagggtggtctgtgcaatgtccgagggtggcgaggcaaagccatagtctggggccggagtgaggttacatcagcttggcacaggtggccaagg

SEQ ID NO: 3034 - DNA, 121 bp, synthetic construct
  misc_feature 1..121: note = Description of artificial sequence: synthetic polynucleotide sequence
  source 1..121: mol_type = other DNA
ggccctaggcagaggtagcagttggatgggagtttcagagctagggcttacgctttgatgttttggagataaaacaggctcatgctcacacaatacatgagggtgtttgaaggcaagggag

SEQ ID NO: 3035 - DNA, 121 bp, synthetic construct
  misc_feature 1..121: note = Description of artificial sequence: synthetic polynucleotide sequence
  source 1..121: mol_type = other DNA
aactctacagtggctccccatttcactgtggagggaagcacaagtctttatcatagcttgcaaggccctccctggcctggtcatcctggccttgcctactcctcttgcttgcactcacact

SEQ ID NO: 3036 - DNA, 121 bp, synthetic construct
  misc_feature 1..121: note = Description of artificial sequence: synthetic polynucleotide sequence
  source 1..121: mol_type = other DNA
gcaatttcatgtgacatagtgatttttaggaacacatatgtcaccttatggcagaactacatataaacaagcaaactgccaaataaacaagataattccatgtaatgggaagtagtttgag

SEQ ID NO: 3037 - DNA, 121 bp, synthetic construct
  misc_feature 1..121: note = Description of artificial sequence: synthetic polynucleotide sequence
  source 1..121: mol_type = other DNA
ccatattgggactcctcaaagtcattggcagattggagttcttgttggcttgaatgtaattgtgcaacatctgtcagtcatgctttgcagtcggggtcttatgctaattgaattatccttt

SEQ ID NO: 3038 - DNA, 121 bp, synthetic construct
  misc_feature 1..121: note = Description of artificial sequence: synthetic polynucleotide sequence
  source 1..121: mol_type = other DNA
taggcataacaatcatttcatttatgttcagcccttggattgtctcaggatgttgcaggcacaactttcatggcagcgggcagttcagctcctgaattagttactgctttcctaggtaaat

SEQ ID NO: 3039 - DNA, 121 bp, synthetic construct
  misc_feature 1..121: note = Description of artificial sequence: synthetic polynucleotide sequence
  source 1..121: mol_type = other DNA
ccactcacaaaatccctgggcagttaggcaaaatgaatatatacacagggtcttccacagtgggccattattcaagctgaagtacaacgggctggacatgtaggaactcagtgagggtaag

SEQ ID NO: 3040 - DNA, 121 bp, synthetic construct
  misc_feature 1..121: note = Description of artificial sequence: synthetic polynucleotide sequence
  source 1..121: mol_type = other DNA
ccaccagaagctgcagtctctcgtggacaataacaatgaaaatagctgccatttatcacatgttcagggcagaggtggtaccaagagcctcacgtatatcaccttacttaattttcacact

SEQ ID NO: 3041 - DNA, 121 bp, synthetic construct
  misc_feature 1..121: note = Description of artificial sequence: synthetic polynucleotide sequence
  source 1..121: mol_type = other DNA
cccaagccgagcgtggaagaatggggttcctcgggaccggcacttggattctggtgttagtgctcccgattcaagctttccccaaacctggaggaagccaaggtatgtgaacacttttctt

SEQ ID NO: 3042 - DNA, 121 bp, synthetic construct
  misc_feature 1..121: note = Description of artificial sequence: synthetic polynucleotide sequence
  source 1..121: mol_type = other DNA
caattaaatttatattcacatgtgtttattctagacaaatctctacataatagagaattaagtgcagaaagacctttgaatgaacaggtaggtcaaaagtaacattatgaatgctatttca

SEQ ID NO: 3043 - DNA, 121 bp, synthetic construct
  misc_feature 1..121: note = Description of artificial sequence: synthetic polynucleotide sequence
  source 1..121: mol_type = other DNA
tgattttaaaccaagtctatctcctgtttgcttcacagattgctgaagcagaagaagacaagattaaaaaaacatatcctccaggtaaaaagaaatcatattgatgttaatttaaataatg

SEQ ID NO: 3044 - DNA, 217 bp, synthetic construct
  misc_feature 1..217: note = Description of artificial sequence: synthetic polynucleotide sequence
  source 1..217: mol_type = other DNA
gaaaacaagccaggtcagagcaactattcttttgttgataacttgaacctgctaaaggcaataacagaaaaggaaaaaattgagaaagaaagacaatctataagaagctccccacttgataataagttgaatgtggaagatgttgattcaaccaagaatcgaaaactgatcgatgattatgactctactaagagtggattggatcataaatttcaag

SEQ ID NO: 3045 - DNA, 144 bp, synthetic construct
  misc_feature 1..144: note = Description of artificial sequence: synthetic polynucleotide sequence
  source 1..144: mol_type = other DNA
gatgatccagatggtcttcatcaactagacgggactcctttaaccgctgaagacattgtccataaaatcgctgccaggatttatgaagaaaatgacagagccgtgtttgacaagattgtttctaaactacttaatctcggcctt

SEQ ID NO: 3046 - DNA, 151 bp, synthetic construct
  misc_feature 1..151: note = Description of artificial sequence: synthetic polynucleotide sequence
  source 1..151: mol_type = other DNA
gatcacagaaagccaagcacatacactggaagatgaagtagcagaggttttacaaaaattaatctcaaaggaagccaacaattatgaggaggatcccaataagcccacaagctggactgagaatcaggctggaaaaataccagagaaagtg

SEQ ID NO: 3047 - DNA, 179 bp, synthetic construct
  misc_feature 1..179: note = Description of artificial sequence: synthetic polynucleotide sequence
  source 1..179: mol_type = other DNA
gactccaatggcagcaattcaagatggtcttgctaagggagaaaacgatgaaacagtatctaacacattaaccttgacaaatggcttggaaaggagaactaaaacctacagtgaagacaactttgaggaactccaatatttcccaaatttctatgcgctactgaaaagtattgattcag

SEQ ID NO: 3048 - DNA, 121 bp, synthetic construct
  misc_feature 1..121: note = Description of artificial sequence: synthetic polynucleotide sequence
  source 1..121: mol_type = other DNA
agaaaaagaagcaaaagagaaagaaacactgattactatcatgaaaacactgattgactttgtgaagatgatggtgaaatatggaacaatatctccagaagaaggtgtttcctaccttggt

SEQ ID NO: 3049 - DNA, 121 bp, synthetic construct
  misc_feature 1..121: note = Description of artificial sequence: synthetic polynucleotide sequence
  source 1..121: mol_type = other DNA
ctttccttcctccctccagaaaacttggatgaaatgattgctcttcagaccaaaaacaagctagaaaaaaatgctactgacaatataagcaagcttttcccaggtatgattatttaactat

SEQ ID NO: 3050 - DNA, 139 bp, synthetic construct
  misc_feature 1..139: note = Description of artificial sequence: synthetic polynucleotide sequence
  source 1..139: mol_type = other DNA
gcaccatcagagaagagtcatgaagaaacagacagtaccaaggaagaagcagctaagatggaaaaggaatatggaagcttgaaggattccacaaaagatgataactccaacccaggaggaaagacagatgaacccaaag

SEQ ID NO: 3051 - DNA, 121 bp, synthetic construct
  misc_feature 1..121: note = Description of artificial sequence: synthetic polynucleotide sequence
  source 1..121: mol_type = other DNA
agttctcttacctcttccaggaaaaacagaagcctatttggaagccatcagaaaaaatattgaatggttgaagaaacatgacaaaaagggaaataaagaaggtaggaccaagtgtggttgt

SEQ ID NO: 3052 - DNA, 121 bp, synthetic construct
  misc_feature 1..121: note = Description of artificial sequence: synthetic polynucleotide sequence
  source 1..121: mol_type = other DNA
gattatgacctttcaaagatgagagacttcatcaataaacaagctgatgcttatgtggagaaaggcatccttgacaaggaagaagccgaggccatcaagcgcatttatagcagcctgtaaa

SEQ ID NO: 3053 - DNA, 121 bp, synthetic construct
  misc_feature 1..121: note = Description of artificial sequence: synthetic polynucleotide sequence
  source 1..121: mol_type = other DNA
tgagattgtggtctgatcacagtctcattgatcatgaccacagcatttctcaggttcccgtctgcagccaaagcaaggtgcttttccctagagccacctcttcctgcctggcgacctcttt

SEQ ID NO: 3054 - DNA, 121 bp, synthetic construct
  misc_feature 1..121: note = Description of artificial sequence: synthetic polynucleotide sequence
  source 1..121: mol_type = other DNA
ggcagaaagggctatggtatgtgggagagaataagggcagagaatctgacattttcactctcagacacagagactattcaactgtaaaagtcaactggtacacagagccacgctgatgata

SEQ ID NO: 3055 - DNA, 121 bp, synthetic construct
  misc_feature 1..121: note = Description of artificial sequence: synthetic polynucleotide sequence
  source 1..121: mol_type = other DNA
taggcttcaacatttatcattcactttgctacacctccatagtaataatgtaagagttacgtagcgcaagagttatttctgtacttttcttttaaaaataatgatagcaatgacctcttac

SEQ ID NO: 3056 - DNA, 121 bp, synthetic construct
  misc_feature 1..121: note = Description of artificial sequence: synthetic polynucleotide sequence
  source 1..121: mol_type = other DNA
tatattttggaaaataactcatcaggagcctagttcatagtatttcttccatcagtggaactttttcctacaggtaagtcctatttcatgagggcaagctttgctcccgtgacactgcacc

SEQ ID NO: 3057 - DNA, 121 bp, synthetic construct
  misc_feature 1..121: note = Description of artificial sequence: synthetic polynucleotide sequence
  source 1..121: mol_type = other DNA
cccagagaaggacatttggggatgtagaggataaagagggaaaaaacaatgggagaaagacattgcaggcctatagaaaacacagcatgagtgaccgaagagaaggcattggccggcatga

SEQ ID NO: 3058 - DNA, 121 bp, synthetic construct
  misc_feature 1..121: note = Description of artificial sequence: synthetic polynucleotide sequence
  source 1..121: mol_type = other DNA
tagtcctagtatatatagatcaaggccatggatgtaggggtgcctaagcaagtacagagaaattttgagaaaagcacttcaggggtttgtatacataaagaacgaaggaacttcatggggg

SEQ ID NO: 3059 - DNA, 121 bp, synthetic construct
  misc_feature 1..121: note = Description of artificial sequence: synthetic polynucleotide sequence
  source 1..121: mol_type = other DNA
aactcagcaaactgcatcttcctcctggagatcaatatttagccttaacatatttaagactgaaaaatgttacagtaaaagttttgtttaatcctgcatttgccaaacatacttgctcata

SEQ ID NO: 3060 - DNA, 121 bp, synthetic construct
  misc_feature 1..121: note = Description of artificial sequence: synthetic polynucleotide sequence
  source 1..121: mol_type = other DNA
ggattaccttttcagattacataaaacccagccatgagtttgattttgattggaattgtattgcatatgcaggttaattagtgatgaacaacatgttgatgaggttaagtattcctacata

SEQ ID NO: 3061 - DNA, 121 bp, synthetic construct
  misc_feature 1..121: note = Description of artificial sequence: synthetic polynucleotide sequence
  source 1..121: mol_type = other DNA
atatgtgaccttttctggtcaggcttattgcactcagccccatgtttttgaggcttattcgagctgtagcatgtgtaaatacttcattcttttttgtgaccgaataattgtatggcgatgt

SEQ ID NO: 3062 - DNA, 121 bp, synthetic construct
  misc_feature 1..121: note = Description of artificial sequence: synthetic polynucleotide sequence
  source 1..121: mol_type = other DNA
tttctcgtcttcactgagccacctgctaacccatgacttgttctcctaagtggactcaatcatgaggaaggagtattcagagccagggaccagttactggtagcttaccaggccacctttc

SEQ ID NO: 3063 - DNA, 121 bp, synthetic construct
  misc_feature 1..121: note = Description of artificial sequence: synthetic polynucleotide sequence
  source 1..121: mol_type = other DNA
aactataaggagacaaatagcttcatcctcagccctttctctttggactgacacatctggtttacaaatgaggccatttatactggatagattgggaacagatggctgctacctggggtct

SEQ ID NO: 3064 - DNA, 121 bp, synthetic construct
  misc_feature 1..121: note = Description of artificial sequence: synthetic polynucleotide sequence
  source 1..121: mol_type = other DNA
aaatgtagactgtattaggtaaagaagaataaaataaattatcctcttccaaccaacccatcagtaggaggacattccagacatgtgataaaacagaaagattttaggcccaagttctaga

SEQ ID NO: 3065 - DNA, 121 bp, synthetic construct
  misc_feature 1..121: note = Description of artificial sequence: synthetic polynucleotide sequence
  source 1..121: mol_type = other DNA
ggtcagagtcacgggcaatatactatatctgcgttagtctggcttgagaacagcgaaaccgtgcctccttctctaattagtcactttaagtatcagtgatgggcagtctctgtgacaatga

SEQ ID NO: 3066 - DNA, 121 bp, synthetic construct
  misc_feature 1..121: note = Description of artificial sequence: synthetic polynucleotide sequence
  source 1..121: mol_type = other DNA
gcagcctcctcgccagcttccaccagaaatccaacaatcccagacctattgtgattgttcgtgttactgaaggtctgcagagccatggcgggggagttcccatcagagagtctctttccat

SEQ ID NO: 3067 - DNA, 121 bp, synthetic construct
  misc_feature 1..121: note = Description of artificial sequence: synthetic polynucleotide sequence
  source 1..121: mol_type = other DNA
ttcctttcctaagagctttcagaatggctctggcttttgtctctctacctagtggttccgttgaccttctaacagaaaagcctgaaactgcataagttccctgtgcaaccagcaaggtgaa

SEQ ID NO: 3068 - DNA, 121 bp, synthetic construct
  misc_feature 1..121: note = Description of artificial sequence: synthetic polynucleotide sequence
  source 1..121: mol_type = other DNA
atgtgactattaatgggttaattcatataaagtattttgaagagtgactgctgaatagtaaatcctcaataaatgtcaactactttcactgtcattaccattaacatcatcagagcatgca

SEQ ID NO: 3069 - DNA, 121 bp, synthetic construct
  misc_feature 1..121: note = Description of artificial sequence: synthetic polynucleotide sequence
  source 1..121: mol_type = other DNA
ttgtttcaaggtgtaaataggagacggccaatttgccgatcattttcgcctatgtgaattttggagaggaagcggcagacacggcggttctgctagcacacttaaccctcctaacaatttg

SEQ ID NO: 3070 - DNA, 121 bp, synthetic construct
  misc_feature 1..121: note = Description of artificial sequence: synthetic polynucleotide sequence
  source 1..121: mol_type = other DNA
tgaacacacagggcccacatccttatgactcagcagatgcggctgtcctcaaccacatcgcccagaatgtcactctgacctgcctcagaggtctgacagcagaatagattctgcaaagcct

SEQ ID NO: 3071 - DNA, 121 bp, synthetic construct
  misc_feature 1..121: note = Description of artificial sequence: synthetic polynucleotide sequence
  source 1..121: mol_type = other DNA
ggcacaagccatgcccaacagtccccaactcaagcccattcagcccaagcccactgttatgggagaacctttcacagtcaaccctgccttgactccagccaaggacaagaaaaagaaagac

SEQ ID NO: 3072 - DNA, 121 bp, synthetic construct
  misc_feature 1..121: note = Description of artificial sequence: synthetic polynucleotide sequence
  source 1..121: mol_type = other DNA
agaaggaatcttcaaaggaacttgaaagtcctctgacccctgggaaggtgtgtcgagcagaggaaggcaaaagcccattcagggaatcttcaggagatgggatgaaaatggaggggctcct

SEQ ID NO: 3073 - DNA, 121 bp, synthetic construct
  misc_feature 1..121: note = Description of artificial sequence: synthetic polynucleotide sequence
  source 1..121: mol_type = other DNA
agcgcgttacccgggtccaaaatgcccaagaagaagccgacgcccatccagctgaacccggcccccgacggctctgcagttaacgggaccagctctgcggagtaagtatggggcgggcggt

SEQ ID NO: 3074 - DNA, 212 bp, synthetic construct
  misc_feature 1..212: note = Description of artificial sequence: synthetic polynucleotide sequence
  source 1..212: mol_type = other DNA
ggaccaacttggaggccttgcagaagaagctggaggagctagagcttgatgagcagcagcgaaagcgccttgaggcctttcttacccagaagcagaaggtgggagaactgaaggatgacgactttgagaagatcagtgagctgggggctggcaatggcggtgtggtgttcaaggtctcccacaagccttctggcctggtcatggccagaaag

SEQ ID NO: 3075 - DNA, 148 bp, synthetic construct
  misc_feature 1..148: note = Description of artificial sequence: synthetic polynucleotide sequence
  source 1..148: mol_type = other DNA
gctaattcatctggagatcaaacccgcaatccggaaccagatcataagggagctgcaggttctgcatgagtgcaactctccgtacatcgtgggcttctatggtgcgttctacagcgatggcgagatcagtatctgcatggagcacatg

SEQ ID NO: 3076 - DNA, 121 bp, synthetic construct
  misc_feature 1..121: note = Description of artificial sequence: synthetic polynucleotide sequence
  source 1..121: mol_type = other DNA
ggtctggtattctcgatcttaggatggaggttctctggatcaagtcctgaagaaagctggaagaattcctgaacaaattttaggaaaagttagcattgctgtgagtatgttatgaagtttt

SEQ ID NO: 3077 - DNA, 121 bp, synthetic construct
  misc_feature 1..121: note = Description of artificial sequence: synthetic polynucleotide sequence
  source 1..121: mol_type = other DNA
gtattttcttttcttttacattccctttcctctaggtaataaaaggcctgacatatctgagggagaagcacaagatcatgcacagaggtaagaagttatttgctagttattttgctttgaa

SEQ ID NO: 3078 - DNA, 121 bp, synthetic construct
  misc_feature 1..121: note = Description of artificial sequence: synthetic polynucleotide sequence
  source 1..121: mol_type = other DNA
gtcaagccctccaacatcctagtcaactcccgtggggagatcaagctctgtgactttggggtcagcgggcagctcatcgactccatggccaactccttcgtgggcacaaggtcctacatgt

SEQ ID NO: 3079 - DNA, 203 bp, synthetic construct
  misc_feature 1..203: note = Description of artificial sequence: synthetic polynucleotide sequence
  source 1..203: mol_type = other DNA
gccagaaagactccaggggactcattactctgtgcagtcagacatctggagcatgggactgtctctggtagagatggcggttgggaggtatcccatccctcctccagatgccaaggagctggagctgatgtttgggtgccaggtggaaggagatgcggctgagaccccacccaggccaaggacccccgggaggccccttagct

SEQ ID NO: 3080 - DNA, 121 bp, synthetic construct
  misc_feature 1..121: note = Description of artificial sequence: synthetic polynucleotide sequence
  source 1..121: mol_type = other DNA
gtattttttctttttataaaatttgtagcatacggaatggacagccgacctcccatggcaatttttgagttgttggattacatagtcaacgaggtaagtactgcctggtttccttcacctt

SEQ ID NO: 3081 - DNA, 121 bp, synthetic construct
  misc_feature 1..121: note = Description of artificial sequence: synthetic polynucleotide sequence
  source 1..121: mol_type = other DNA
catttttcttatctcaacatgtgtttgcagcctcctccaaaactgcccagtggagtgttcagtctggaatttcaagattttgtgaataaatggtaagttggctccttgttctctggaagcg

SEQ ID NO: 3082 - DNA, 121 bp, synthetic construct
  misc_feature 1..121: note = Description of artificial sequence: synthetic polynucleotide sequence
  source 1..121: mol_type = other DNA
ccaggcaacagctcttaccttgtctttcttcctttaagcttaataaaaaaccccgcagagagagcagatttgaagcaactcatggtgagtctatttattccggattcttacagtacctgtt

SEQ ID NO: 3083 - DNA, 121 bp, synthetic construct
  misc_feature 1..121: note = Description of artificial sequence: synthetic polynucleotide sequence
  source 1..121: mol_type = other DNA
gcaggttcatgcttttatcaagagatctgatgctgaggaagtggattttgcaggttggctctgctccaccatcggccttaaccagcccagcacaccaacccatgctgctggcgtctaagtg

SEQ ID NO: 3084 - DNA, 121 bp, synthetic construct
  misc_feature 1..121: note = Description of artificial sequence: synthetic polynucleotide sequence
  source 1..121: mol_type = other DNA
ctggctgctctaagggaatatatgggagttttggtctgcttggggggatttctctgagatagacaaacacctggaggaaaccacagatgaagaattggttggtattagttttgtttttttt

SEQ ID NO: 3085 - DNA, 121 bp, synthetic construct
  misc_feature 1..121: note = Description of artificial sequence: synthetic polynucleotide sequence
  source 1..121: mol_type = other DNA
aaaaggtagtgagctggcttctgcctggtgagtaagttgttccctgctttaaagtgagatgattagggcggagccatgactgaggaaaataatgtaccagggagagccctgagggagcagt

SEQ ID NO: 3086 - DNA, 121 bp, synthetic construct
  misc_feature 1..121: note = Description of artificial sequence: synthetic polynucleotide sequence
  source 1..121: mol_type = other DNA
tgaaggagtgttgcagtggcagagagaaacttaccctctctccaaatctgtcccaggaatgaacacacacgtatgcacacatgcacacgcacacagatatacatgtatgcacgcacgtgca

SEQ ID NO: 3087 - DNA, 121 bp, synthetic construct
  misc_feature 1..121: note = Description of artificial sequence: synthetic polynucleotide sequence
  source 1..121: mol_type = other DNA
gagtcttctctaacagctgagacccctttttaggatgatgatgatggtgattttgtttaccattcactgagtgtctgatacgtgacgctggagaccggggctggcactgtcaagtgagaga

SEQ ID NO: 3088 - DNA, 121 bp, synthetic construct
  misc_feature 1..121: note = Description of artificial sequence: synthetic polynucleotide sequence
  source 1..121: mol_type = other DNA
gctaccaagtgtattaaccctgtgctgaaaaaagaaaggtgaaaagaccagatctttgtatttgatgagcttatactctaaaaggggcacagaatacaaacagtgaatgatcatgcaataa

SEQ ID NO: 3089 - DNA, 121 bp, synthetic construct
  misc_feature 1..121: note = Description of artificial sequence: synthetic polynucleotide sequence
  source 1..121: mol_type = other DNA
cttcctaggaccaaagcgggatagaggagaaaaggtgttgcctttaatgtacagtgacctggtggtttaccagtaaaatgtggcccagtgaatattctggactctgacctgtcagattagc

SEQ ID NO: 3090 - DNA, 121 bp, synthetic construct
  misc_feature 1..121: note = Description of artificial sequence: synthetic polynucleotide sequence
  source 1..121: mol_type = other DNA
ttcactgttaggttgttatagaggtgagtagtaacatttgagatagcttaaaaaagaaatggtgaacaggcttaggaaggtaaaggtagaggtctctgtccccttgaattggtgtaggctt

SEQ ID NO: 3091 - DNA, 121 bp, synthetic construct
  misc_feature 1..121: note = Description of artificial sequence: synthetic polynucleotide sequence
  source 1..121: mol_type = other DNA
aggggcattttgttgggggctcttggagagggagcacagccaagatcagaccagttggatgagacagtccctgacttggttttgtgcccccattaacttcccggtatcccactctaggcca

SEQ ID NO: 3092 - DNA, 232 bp, synthetic construct
  misc_feature 1..232: note = Description of artificial sequence: synthetic polynucleotide sequence
  source 1..232: mol_type = other DNA
gttaaggggctttgaatactgtgccgtatttgacacgatacttgttaatgctcacaaaatgcagggtctctgtatcacaggtggtggtacagggcaccaggccctccagcccctcacccatgagccacttgctggtctctgctgccatttcacggggcacatgctccttggtccatttatctacccaggcctggaatctctgatgtagacgcttgcttacacgctcatggga

SEQ ID NO: 3093 - DNA, 209 bp, synthetic construct
  misc_feature 1..209: note = Description of artificial sequence: synthetic polynucleotide sequence
  source 1..209: mol_type = other DNA
cctgatgagcccggagcagggcggtcctccgatacatatagtcctctgatttgatcacatacaccatcttgtaggaattcagcttgaatctacactccagcttatccagactatccacattctccatggtcttcttgctgtttccttccttcccttccttttcctgctgctctcgaccacgttgacacttccggatccgccgtagattc

SEQ ID NO: 3094 - DNA, 121 bp, synthetic construct
  misc_feature 1..121: note = Description of artificial sequence: synthetic polynucleotide sequence
  source 1..121: mol_type = other DNA
atggctcactcacctggggagaaatactggtttctgtgctagatgttcacgaagctcaggcgaggtagtatctgaattcatgtatcgctccacgtagtctgaccagcgctaagatggcaaa

SEQ ID NO: 3095 - DNA, 121 bp, synthetic construct
  misc_feature 1..121: note = Description of artificial sequence: synthetic polynucleotide sequence
  source 1..121: mol_type = other DNA
gtacttgctcatacctctgcttccacagggtcatccgaattctcctcttctgtgtccagaagctcaatagtcagctggacctggccttggctctgaataaacataagctgcaaataagaaa

SEQ ID NO: 3096 - DNA, 175 bp, synthetic construct
  misc_feature 1..175: note = Description of artificial sequence: synthetic polynucleotide sequence
  source 1..175: mol_type = other DNA
ccttaaagcaattctcatctgacattagctgctcagctttccgctgatacgttgactccaggaggctccttgagttctgtgtgttcagctggcctccggtggccccattattattttctgccaggtaaaggtcagtcacctgcacacagatctcatcactcacgatatgctgcag

SEQ ID NO: 3097 - DNA, 171 bp, synthetic construct
  misc_feature 1..171: note = Description of artificial sequence: synthetic polynucleotide sequence
  source 1..171: mol_type = other DNA
cctgtctgacaatgctctggatcagtttgtccatggtaaaggcaatgtaggcatgaatggtgaacatctctctcagtgaatcttcatactgtgatgagtctatgttgccatccagcaggctccgcaccatgtccaggaaagctgggtaataatcttctacatcaacatcca

SEQ ID NO: 3098 - DNA, 227 bp, synthetic construct
  misc_feature 1..227: note = Description of artificial sequence: synthetic polynucleotide sequence
  source 1..227: mol_type = other DNA
ctaggttctttgagacgtagctgaatggcagggctgtcactcttgtctcgctttatgcccagcacttcccgttcccattctctctctcggttttcttcttcaatttgccgttcggcttgggaacaaatccgtagcagcctcaggcagagaatctggtgcagtcgcataaaaatataccagttgttgttgacatagaagaggttgtatacttcatccattcctcttaa

SEQ ID NO: 3099 - DNA, 348 bp, synthetic construct
  misc_feature 1..348: note = Description of artificial sequence: synthetic polynucleotide sequence
  source 1..348: mol_type = other DNA
tttttgagctgctgtgttactaaacagtaacttggacttagggggactgcccccaacaccattgtgcttcttaactgcccctgtggcttcatctacatccatctcttcttcttcctcttcctccacatctgagagatcacctctttgggcaaagagcaaatctggaataaaatgatgcatgatttgttttatcttatatttgtcctccttctgaatgcctgtctgcctcttcacatggtggataatcagagcagcagcatcttccagtatttgtttgtcttcatacgcaagtgagaggtgtgggccaacaggtacaccagcattctcctccgtagcctgctcttgcct

SEQ ID NO: 3100 - DNA, 185 bp, synthetic construct
  misc_feature 1..185: note = Description of artificial sequence: synthetic polynucleotide sequence
  source 1..185: mol_type = other DNA
cctcatcatagatactctcaatctcattgagtaagctcttagacctcaggaccttggtgtcattctgtttaaagttgatcccctggtggtccagagacttcaagtagtatttctcattttgttctcgccatactttgttaaagcctctctgagcttctcgccattcttcctctttcatcttcaac

SEQ ID NO: 3101 - DNA, 240 bp, synthetic construct
  misc_feature 1..240: note = Description of artificial sequence: synthetic polynucleotide sequence
  source 1..240: mol_type = other DNA
ccttttaaggacaattggaacagcaatggagggattctttctcagaccatcaatgatgtcagctgctttatcagcatatatcctctggagtgcttttctatggatgacttctgatgtgcccccaagggtgttgtccaagcgaaatttggcttgttcttcagcagacaagcgggaaagcttcttctgtattgcttccagaacccggattgttgccagattggtctctaaaactacatcaag

SEQ ID NO: 3102 - DNA, 121 bp, synthetic construct
  misc_feature 1..121: note = Description of artificial sequence: synthetic polynucleotide sequence
  source 1..121: mol_type = other DNA
acctcaaagcgttcatcttcacaacgataaatatgttcttcatattgagtcttcttggaactcacaaaggtagagtcctcagaccacgaagggaaggaaacccaggtatcatttaaaacct

SEQ ID NO: 3103 - DNA, 212 bp, synthetic construct
  misc_feature 1..212: note = Description of artificial sequence: synthetic polynucleotide sequence
  source 1..212: mol_type = other DNA
cctctttacagagaggagtccgtcctgtacacttgggctgctggtaactctttggtaaggctcgatagctggagcccaatcgtttacaagaagcataatctatctccatagcaatgccctctgtggctcgctcctttggataagtttccagatgtacagactccttatagcccagaaagtttttaaaccaattaaacaactcagggaatttc

SEQ ID NO: 3104 - DNA, 121 bp, synthetic construct
  misc_feature 1..121: note = Description of artificial sequence: synthetic polynucleotide sequence
  source 1..121: mol_type = other DNA
ccccaggaaaggagagactagttgcacaagctcagcacgagagatcacctcctggttaaaaataacaagacagcgtaggaaattttcgtaggcttctgcactccgaagagcctttcggacc

SEQ ID NO: 3105 - DNA, 121 bp, synthetic construct
  misc_feature 1..121: note = Description of artificial sequence: synthetic polynucleotide sequence
  source 1..121: mol_type = other DNA
ctcatccattactcaccttatcaaaaaataacgattctgttccaccaccatgtttgctggcatctgccatagaagaatccttcagattgagcagtttgggtttcttctgcaaaagaaagat

SEQ ID NO: 3106 - DNA, 157 bp, synthetic construct
  misc_feature 1..157: note = Description of artificial sequence: synthetic polynucleotide sequence
  source 1..157: mol_type = other DNA
ccttaactggaggggtggttcctgtaggatgtctgcggatctggcagccattctggctgggcctctgcggcttgttgttcagttggggcttcttgacagtgcctccatgatcatttctcacagaatcaaccttctcagcagttgttttgcttaaaag

SEQ ID NO: 3107 - DNA, 154 bp, synthetic construct
  misc_feature 1..154: note = Description of artificial sequence: synthetic polynucleotide sequence
  source 1..154: mol_type = other DNA
ccacggagctgttggcatctggtaggaattgtccaaactctgacaacaaatcttcctggtttttaaagagacgagcaacctgggcatacacctcctgctctgtcaatgctggagtgtagtttcctccagcttccttggcatttctctgctcttt

SEQ ID NO: 3108 - DNA, 253 bp, synthetic construct
  misc_feature 1..253: note = Description of artificial sequence: synthetic polynucleotide sequence
  source 1..253: mol_type = other DNA
cctgatatgtgtgcaaaatctccaggaatgctttgtagatgtctggttggccctgaaatctgttcttgatcttattaacatagttgatggcatgattaaactccacaggttgattgttctgcaaggatggggccgttcccaacgagattgtcactggtgtgtgaggctggaccggcggagaacgtggggatgcatacggtggaagtgggggagtctgctgactggccggagtatgtgcttgcagttgggaggg

SEQ ID NO: 3109 - DNA, 284 bp, synthetic construct
  misc_feature 1..284: note = Description of artificial sequence: synthetic polynucleotide sequence
  source 1..284: mol_type = other DNA
ccttgctgactttggcaggtgggggctgaggagctggctgggcaggagctggggctgactgggctgaaggctgggaaggatgttggggtggtggttgaggctgtggctggatgccatgggtgggaatctgatgaacctggccaggagttgtcacattcaccatgtcattggtttgcacctcaattttgtagccagggggcaagaaggtgttgaatcccattatcagatcggggtggcctttgaatagctgggacacacgactaatcactcctggggtgtcgatg

SEQ ID NO: 3110 - DNA, 121 bp, synthetic construct
  misc_feature 1..121: note = Description of artificial sequence: synthetic polynucleotide sequence
  source 1..121: mol_type = other DNA
cttttacctctgagatttaaattccttcatgatgtcaaggaaatcattgtagacctgaggctgactaccaaactgcagcttcacctggtcaagataagatagcgcatcctccacctgaggc

SEQ ID NO: 3111 - DNA, 178 bp, synthetic construct
  misc_feature 1..178: note = Description of artificial sequence: synthetic polynucleotide sequence
  source 1..178: mol_type = other DNA
ccttcagcctctgaaattgctgctgtccctgcactggtgcaactggtggggctggatgagcatgactctggaccacctggcctccgtggggctgcaccgctgttgggtgatgatggctgctatgaactgctgctatagcgggcccatgactgccggagctctgtggcatggctgaaac

SEQ ID NO: 3112 - DNA, 190 bp, synthetic construct
  misc_feature 1..190: note = Description of artificial sequence: synthetic polynucleotide sequence
  source 1..190: mol_type = other DNA
cctggtagctgggtgttacagagtactgaattcccgtagctgactgcatggtctcagacactgcttcatacacaggaggggcaggggcaagcacccggtgctggtgaggaaaagcctctgtgctgccagggatccgacgctgctgggctgcatacaccggtgactcctggtcatccaaacgccgcttcat

SEQ ID NO: 3113 - DNA, 121 bp, synthetic construct
  misc_feature 1..121: note = Description of artificial sequence: synthetic polynucleotide sequence
  source 1..121: mol_type = other DNA
caagagcaagaaaataacatgtatgggagctatcatctcctgatgacaatgctttatcctggaataccacctaaggacctgccaaaggctgttttacagttagctttctttttgttaagca

SEQ ID NO: 3114 - DNA, 121 bp, synthetic construct
  misc_feature 1..121: note = Description of artificial sequence: synthetic polynucleotide sequence
  source 1..121: mol_type = other DNA
tacagatgtgagccaccatgcccggcctctgcactttcttgccatgtaacttcagcagcatgagcctccaatttctcagatgtaaaacagaaataataatagtacctccctcctcatgttg

SEQ ID NO: 3115 - DNA, 121 bp, synthetic construct
  misc_feature 1..121: note = Description of artificial sequence: synthetic polynucleotide sequence
  source 1..121: mol_type = other DNA
cctctccccggatgttccacgcacacagtggctcccacggacccaaactagagaacaaccctgactggtgctgctctgatgctagcgggagcaacagtgaaagcctgcgggtcaaggcctt

SEQ ID NO: 3116 - DNA, 121 bp, synthetic construct
  misc_feature 1..121: note = Description of artificial sequence: synthetic polynucleotide sequence
  source 1..121: mol_type = other DNA
agcctcttcaccaggccatcctctaggtccctaacagaggagaacagtgccacagagtccaaaattgccagcatctccaactcgcccagagactggcgcaccatcacttataccaaccgtg

SEQ ID NO: 3117 - DNA, 121 bp, synthetic construct
  misc_feature 1..121: note = Description of artificial sequence: synthetic polynucleotide sequence
  source 1..121: mol_type = other DNA
tcactagtaataatccatgattttagcatgtttcagttagttacttcttacagcccttatagtacatgatgagagagagaagctccagtccaagatagctgtcataaaaattgagagagaa

SEQ ID NO: 3118 - DNA, 121 bp, synthetic construct
  misc_feature 1..121: note = Description of artificial sequence: synthetic polynucleotide sequence
  source 1..121: mol_type = other DNA
taaggatggagttgtaattgattgggaaaccttatggtttgctgtaaatatccaacttgctctgaatagaggttctctgggtatagatgtacgtaaaaatctactgagttgcatactcaag

SEQ ID NO: 3119 - DNA, 121 bp, synthetic construct
  misc_feature 1..121: note = Description of artificial sequence: synthetic polynucleotide sequence
  source 1..121: mol_type = other DNA
aggtgaaagggaaaggacgttttacaccgactgtcgtcatgcattcttgccaagctgcctacagtgaactgactgctggatactccctcagaatctgtcgtccagcctttgagaaaatctc

SEQ ID NO: 3120 - DNA, 121 bp, synthetic construct
  misc_feature 1..121: note = Description of artificial sequence: synthetic polynucleotide sequence
  source 1..121: mol_type = other DNA
aatgctgagaaacaagtgatgaatgctgagaggaagagaagaaccagacagaacacgcaacttagtcacagggctgcagaaatgcgtgagtacctgacgtcagacaagaagaggggcacta

SEQ ID NO: 3121 - DNA, 121 bp, synthetic construct
  misc_feature 1..121: note = Description of artificial sequence: synthetic polynucleotide sequence
  source 1..121: mol_type = other DNA
tgttacatgctgttattggtggtgacggcctgattactattcataaatcgctagaggctgattactggctgcctctagtttcagctcttcctgtgtctgactgcttattgctgaatccagg

SEQ ID NO: 3122 - DNA, 121 bp, synthetic construct
  misc_feature 1..121: note = Description of artificial sequence: synthetic polynucleotide sequence
  source 1..121: mol_type = other DNA
agacttcccacaggcacctctcataattgagaacttgcagcacttagtcttacctgtcctcagaatagatcattcatcatgcttgtcgggatgatttagtctgggggtgtgaaactgcaat

SEQ ID NO: 3123 - DNA, 121 bp, synthetic construct
  misc_feature 1..121: note = Description of artificial sequence: synthetic polynucleotide sequence
  source 1..121: mol_type = other DNA
gatagaagcagacagtaatactctgagatacttctaggaaccagtatatgacaagagatgcatttcaccctgtcagttcctccagcacaaatgacatgatagtgcttttctaaataatttt

SEQ ID NO: 3124 - DNA, 121 bp, synthetic construct
  misc_feature 1..121: note = Description of artificial sequence: synthetic polynucleotide sequence
  source 1..121: mol_type = other DNA
ctggaaggtcttagtctggcagagcatgaagtcagccacagatcacacaaagatggcaatggcagaatgcacaagaaagctttctgtcccctcattatcctgtgagaaatgatggcaggca

SEQ ID NO: 3125 - DNA, 121 bp, synthetic construct
  misc_feature 1..121: note = Description of artificial sequence: synthetic polynucleotide sequence
  source 1..121: mol_type = other DNA
tagttcagggctggccctgtgtgggacttccaaagctatgacacagaagcactgcactccctgtgtcactcactgtggtggaagccagctgccatgtcatgaggacactcaagcagctcca

SEQ ID NO: 3126 - DNA, 121 bp, synthetic construct
  misc_feature 1..121: note = Description of artificial sequence: synthetic polynucleotide sequence
  source 1..121: mol_type = other DNA
gttcaaaattagacaaaatttatctgtgatgttagaagtcaggatagcagtttccttggcggggcaagttaggagggagtccctagaatactcgtaatgtacttgatctggatgctagtta

SEQ ID NO: 3127 - DNA, 121 bp, synthetic construct
  misc_feature 1..121: note = Description of artificial sequence: synthetic polynucleotide sequence
  source 1..121: mol_type = other DNA
atgggtggcgcctccccctactgcctgcccagggctctgtccaggttgctcttgatggtgtcgaggaagtccgtggtgttcaggaagtgctcgttcagcttcacactgcagagagagcacc

SEQ ID NO: 3128 - DNA, 121 bp, synthetic construct
  misc_feature 1..121: note = Description of artificial sequence: synthetic polynucleotide sequence
  source 1..121: mol_type = other DNA
cccaggccacgcacttgctgaggccgtgaatgcagcccgccaggtccttggtcatggctccactctccaccgtctccacgcacaccttctccagcatctgggcaaacctatggggatgggg

SEQ ID NO: 3129 - DNA, 121 bp, synthetic construct
  misc_feature 1..121: note = Description of artificial sequence: synthetic polynucleotide sequence
  source 1..121: mol_type = other DNA
ctccatgctcacctgatgaggtcttggttcccatccagcttcccccggtgctccaggccacgtgtccaggcaaagatgctggcgatggggttggtgctggtgggccggccctggggacggg

SEQ ID NO: 3130 - DNA, 121 bp, synthetic construct
  misc_feature 1..121: note = Description of artificial sequence: synthetic polynucleotide sequence
  source 1..121: mol_type = other DNA
tcaccttctggtgctcccgatagtggcgggtgacggtcccatgagcggcctcagcctcaatcgtcttcccatcagggcagaccaggacggacgtcatcaggccaagggagccaaagcctgg

SEQ ID NO: 3131 - DNA, 153 bp, synthetic construct
  misc_feature 1..153: note = Description of artificial sequence: synthetic polynucleotide sequence
  source 1..153: mol_type = other DNA
ccctgggccaggatgtctgactgcacatctccgtcatagttcttgcaggcccacacaaagccacccgaagacttgaggacctgagccaccatgtcatcaatgagccggtgctcataccagatcttattcttgtcgaagtcggtcttatagtgc

SEQ ID NO: 3132 - DNA, 138 bp, synthetic construct
  misc_feature 1..138: note = Description of artificial sequence: synthetic polynucleotide sequence
  source 1..138: mol_type = other DNA
cttgtcaaagatctcctggaagatgtccttgaaacgcccatcgtaggctttcagtatggtgttcttggtgctcatgtacagcggccatttcttctggatggcatactggaagcagctgtgcgcaaaacctgagatgga

SEQ ID NO: 3133 - DNA, 145 bp, synthetic construct
  misc_feature 1..145: note = Description of artificial sequence: synthetic polynucleotide sequence
  source 1..145: mol_type = other DNA
cctcgtcggtgttgtacatgcccatgcccacgccgcctgcggggaagttgtacacttcccactccttgacaccactgccatcttttggggtgaagaccattttgaaagtgccggcccggtctgccacaaagtctgtggccttgta

SEQ ID NO: 3134 - DNA, 162 bp, synthetic construct
  misc_feature 1..162: note = Description of artificial sequence: synthetic polynucleotide sequence
  source 1..162: mol_type = other DNA
cctggtcgccatgggcgtgcctgccaatggtgatgggcttggtccagccagggactaggcgtgggatgtttttgcagatgatgggctcccggaagacagtcccccccaggatgttccggatagttccattgggacttttccacatcttcttcagcttgaact

SEQ ID NO: 3135 - DNA, 167 bp, synthetic construct
  misc_feature 1..167: note = Description of artificial sequence: synthetic polynucleotide sequence
  source 1..167: mol_type = other DNA
ccttccacacgggcctcatcaggggtgatggtggcacacttgacagccacactgtacttctgggtggccagtgcagagtcaatggtgacctggtcatcagtctggtcacggtttgggagcccgaggtcaaaatactttagctggatgtccacgtggggcaggatgag

SEQ ID NO: 3136 - DNA, 121 bp, synthetic construct
  misc_feature 1..121: note = Description of artificial sequence: synthetic polynucleotide sequence
  source 1..121: mol_type = other DNA
aggagggggcactaccttctccttgatgaactgccagataatacgggtcatctcatcaccatccatctccaccacgggcttcgccaccttgatccttttgtcggcatctagaagcagggac

SEQ ID NO: 3137 - DNA, 121 bp, synthetic construct
  misc_feature 1..121: note = Description of artificial sequence: synthetic polynucleotide sequence
  source 1..121: mol_type = other DNA
cacagtggcgccgcggctgctcttgcgaggtgggggctgtcagggccgccggcgcccaggccggccgcgagcctgaggctctgcagagcgagcgcacgacccgcaggtagccggccatccc

SEQ ID NO: 3138 - DNA, 121 bp, synthetic construct
  misc_feature 1..121: note = Description of artificial sequence: synthetic polynucleotide sequence
  source 1..121: mol_type = other DNA
tgagttctgcaactggaagagaatgtcagcaacaaattaaagcttctgaacagttgaaatggtggcttcagttaccaatggcttttcttaggatttgttaaagagcaacttaaggactgag

SEQ ID NO: 3139 - DNA, 121 bp, synthetic construct
  misc_feature 1..121: note = Description of artificial sequence: synthetic polynucleotide sequence
  source 1..121: mol_type = other DNA
ccaccctaggaaagacaggattctctgccaccaggaagaatctttttgaaaggcctttattcaatacccatttacagaagtcctttgtaagtagcaactgggctgaaacaccaagactagg

SEQ ID NO: 3140 - DNA, 121 bp, synthetic construct
  misc_feature 1..121: note = Description of artificial sequence: synthetic polynucleotide sequence
  source 1..121: mol_type = other DNA
atgaaagctcttatttcccaggaaatgttctcacaagcactgctgtgaaagatcagaataaacatactgcttcaataaatgacttagaaagagaaacccaaccttcctatgatattgataa

SEQ ID NO: 3141 - DNA, 121 bp, synthetic construct
  misc_feature 1..121: note = Description of artificial sequence: synthetic polynucleotide sequence
  source 1..121: mol_type = other DNA
gatctaatccattgattttttttttccagggcttcccattgtcctttagggtttcaagacggcatttttaaggtccttccaccccaatttcaaccacttgtgagagagagatatatataat

SEQ ID NO: 3142 - DNA, 121 bp, synthetic construct
  misc_feature 1..121: note = Description of artificial sequence: synthetic polynucleotide sequence
  source 1..121: mol_type = other DNA
atcagtcgttgacatctgcagagagaagggtagacagagggacagaagaatgtcggtggatatagccagcacatagaccttcgagtgcccctttaaataatggaataatggaatagaagca

SEQ ID NO: 3143 - DNA, 121 bp, synthetic construct
  misc_feature 1..121: note = Description of artificial sequence: synthetic polynucleotide sequence
  source 1..121: mol_type = other DNA
aagtgtggccaaccatccacagcctgggctagaaagcagaaatggggatgttgattgtgatgagggtcccaaactgtactggggagaagatagatggaagcaaagaaactctatacacaga

SEQ ID NO: 3144 - DNA, 121 bp, synthetic construct
  misc_feature 1..121: note = Description of artificial sequence: synthetic polynucleotide sequence
  source 1..121: mol_type = other DNA
tcgagggaaagtcagtcttttaattgtattttggccttcaactgactagatgtagtacacttgcattaggggagggcaattaacttcactcagtctactgatttaaatgttaacctcatcc

SEQ ID NO: 3145 - DNA, 121 bp, synthetic construct
  misc_feature 1..121: note = Description of artificial sequence: synthetic polynucleotide sequence
  source 1..121: mol_type = other DNA
gcctagagctccctcctcactgtcaatcttggcatgcgatgcttaacatctctaagtcagttggaggaagaaaaatgccgaactcatagggttgggacagggatgaaaagagtaaatccac

SEQ ID NO: 3146 - DNA, 121 bp, synthetic construct
  misc_feature 1..121: note = Description of artificial sequence: synthetic polynucleotide sequence
  source 1..121: mol_type = other DNA
cgtggaggtgggaatgccaagactgatcccaggcagcctggctctgcatacgaaactgctgtattctttgccctgtggtatctcatacctggaaggcaggcagggaacagaggagaaaggt

SEQ ID NO: 3147 - DNA, 121 bp, synthetic construct
  misc_feature 1..121: note = Description of artificial sequence: synthetic polynucleotide sequence
  source 1..121: mol_type = other DNA
ttcctggggattctggccacggaaacttctcctgttcctcaggggcaataagggtatgcgaaaattcctccccgactcaggatccagtgggcttgccatggtgcattcagaggctctgcca

SEQ ID NO: 3148 - DNA, 121 bp, synthetic construct
  misc_feature 1..121: note = Description of artificial sequence: synthetic polynucleotide sequence
  source 1..121: mol_type = other DNA
ataggaaatcagtgctagaaattgcgccgtcaccactccccagtatgagagagagtgttcaagattagataaaggataagaattcacatctcctctggatgatgagccaataccctcattg

SEQ ID NO: 3149 - DNA, 121 bp, synthetic construct
  misc_feature 1..121: note = Description of artificial sequence: synthetic polynucleotide sequence
  source 1..121: mol_type = other DNA
ttatgctaagttagttgggatttaaaaatgtgaaatgagaattggactgacacttaaagatgaaggtattcacataagaaaatggaaagaaagtcaacaggaaggcagctctgtccaatta

SEQ ID NO: 3150 - DNA, 121 bp, synthetic construct
  misc_feature 1..121: note = Description of artificial sequence: synthetic polynucleotide sequence
  source 1..121: mol_type = other DNA
agaagtccaggttctccactttgtctccatgacactcaaggcagagagggctcctcactcctgacaagtggaaatagaagttctgtctctccccagggtcttcactgacattgtgttgggt

SEQ ID NO: 3151 - DNA, 121 bp, synthetic construct
  misc_feature 1..121: note = Description of artificial sequence: synthetic polynucleotide sequence
  source 1..121: mol_type = other DNA
gtcacctaccttcccaaaagtggccagcaaaatgagaaatgctgttagtcaactttcaatgtcctctctgcccagtgctttgattccaacagcctgtaaatgctgtttctacactggatta

SEQ ID NO: 3152 - DNA, 121 bp, synthetic construct
  misc_feature 1..121: note = Description of artificial sequence: synthetic polynucleotide sequence
  source 1..121: mol_type = other DNA
gacttggcgcacagccaccgcgtggcagtgaagatagggagaagtgggcagattagagatatcctttggaggtagaaccaatggtatctgtggctgaattgggttgaggacaggaagggaa

SEQ ID NO: 3153 - DNA, 121 bp, synthetic construct
  misc_feature 1..121: note = Description of artificial sequence: synthetic polynucleotide sequence
  source 1..121: mol_type = other DNA
taaattcatatgccagtgagcacggcctgctggaatctgaaggcgtttggacgagttacattcctccctggacctcagtctcccgtttcattcataaagagagaatgacatctgacacgta

SEQ ID NO: 3154 - DNA, 121 bp, synthetic construct
  misc_feature 1..121: note = Description of artificial sequence: synthetic polynucleotide sequence
  source 1..121: mol_type = other DNA
aaaataaaatatacagtcaatcctcattattcacatatgctgtatctgcatattcacctggtggctgacatttatttgtatcccccaaactaacacctgcggcactttggtgtcatgtgta

SEQ ID NO: 3155 - DNA, 121 bp, synthetic construct
  misc_feature 1..121: note = Description of artificial sequence: synthetic polynucleotide sequence
  source 1..121: mol_type = other DNA
tcatggcgggtgcgaacgggtctctgctgcaggcggctccgtgacagctcctgcttcacatgggtagaggagagacggcaaacgtcggggctcccaggacttcgcggcggcagtcctaacc

SEQ ID NO: 3156 - DNA, 168 bp, synthetic construct
  misc_feature 1..168: note = Description of artificial sequence: synthetic polynucleotide sequence
  source 1..168: mol_type = other DNA
gaggggttttctggtgcgtcctggtccaccatggccaaaccaacaagcaaagattcaggcttgaaggagaagtttaagattctgttgggactgggaacaccgaggccaaatcccaggtctgcagagggtaaacagacggagtttatcatcaccgcggaaatactgaga

SEQ ID NO: 3157 - DNA, 121 bp, synthetic construct
  misc_feature 1..121: note = Description of artificial sequence: synthetic polynucleotide sequence
  source 1..121: mol_type = other DNA
ctttcatctctctccaggaactgagcatggaatgtggcctcaacaatcgcatccggatgatagggcagatttgtgaagtcgcaaaaaccaagaaatttgaagaggtaggtttatccagttg

SEQ ID NO: 3158 - DNA, 121 bp, synthetic construct
  misc_feature 1..121: note = Description of artificial sequence: synthetic polynucleotide sequence
  source 1..121: mol_type = other DNA
gacagcacgcagtggaagcactctggaaggcggtcgcggatctgttgcagccggagcggccgctggaggcccggcacgcggtgctggctctgctgaaggccatcgtgcaggggcaggtaag

SEQ ID NO: 3159 - DNA, 146 bp, synthetic construct
  misc_feature 1..146: note = Description of artificial sequence: synthetic polynucleotide sequence
  source 1..146: mol_type = other DNA
gggcgagcgtttgggggtcctcagagccctcttctttaaggtcatcaaggattacccttccaacgaagaccttcacgaaaggctggaggttttcaaggccctcacagacaatgggagacacatcacctacttggaggaagagctgg

SEQ ID NO: 3160 - DNA, 121 bp, synthetic construct
  misc_feature 1..121: note = Description of artificial sequence: synthetic polynucleotide sequence
  source 1..121: mol_type = other DNA
agctgactttgtcctgcagtggatggatgttggcttgtcctcggaattccttctggtgctggtgaacttggtcaaattcaatagctgttacctcgacgagtacatcgcaaggatggttcag

SEQ ID NO: 3161 - DNA, 121 bp, synthetic construct
  misc_feature 1..121: note = Description of artificial sequence: synthetic polynucleotide sequence
  source 1..121: mol_type = other DNA
cagtgctgccgggactgagctcggtgctccctgcaggatgatctgtctgctgtgcgtccggaccgcgtcctctgtggacatagaggtcagtgcctcccctccccagggccggcccatttca

SEQ ID NO: 3162 - DNA, 121 bp, synthetic construct
  misc_feature 1..121: note = Description of artificial sequence: synthetic polynucleotide sequence
  source 1..121: mol_type = other DNA
ctccctgcaggtgctggacgccgtggtctgctacaactgcctgccggctgagagcctcccgctgttcatcgttaccctctgtcgcaccatcaacgtcaaggagctctgcgagccttgctgg

SEQ ID NO: 3163 - DNA, 121 bp, synthetic construct
  misc_feature 1..121: note = Description of artificial sequence: synthetic polynucleotide sequence
  source 1..121: mol_type = other DNA
cctgacacgcattgtgtctcgcagctgatgcggaacctccttggcacccacctgggccacagcgccatctacaacatgtgccacctcatggaggacaggtgagtgtggtgggtggggcgca

SEQ ID NO: 3164 - DNA, 121 bp, synthetic construct
  misc_feature 1..121: note = Description of artificial sequence: synthetic polynucleotide sequence
  source 1..121: mol_type = other DNA
ctacatggaggacgcgcccctgctgagaggagccgtgttttttgtgggcatggctctctggggagcccaccggctctattctctcaggaactcgccgacatctgtgttgccatcattttac

SEQ ID NO: 3165 - DNA, 145 bp, synthetic construct
  misc_feature 1..145: note = Description of artificial sequence: synthetic polynucleotide sequence
  source 1..145: mol_type = other DNA
ggccatggcatgtccgaacgaggtggtgtcctatgagatcgtcctgtccatcaccaggctcatcaagaagtataggaaggagctccaggtggtggcgtgggacattctgctgaacatcatcgaacggctccttcagcagctccag

SEQ ID NO: 3166 - DNA, 139 bp, synthetic construct
  misc_feature 1..139: note = Description of artificial sequence: synthetic polynucleotide sequence
  source 1..139: mol_type = other DNA
gaccttggacagcccggagctcaggaccatcgtccatgacctgttgaccacggtggaggagctgtgtgaccagaacgagttccacgggtctcaggagagatactttgaactggtggagagatgtgcggaccagaggcct

SEQ ID NO: 3167 - DNA, 121 bp, synthetic construct
  misc_feature 1..121: note = Description of artificial sequence: synthetic polynucleotide sequence
  source 1..121: mol_type = other DNA
ttttgacaggagtcctccctcctgaacctgatctcctatagagcgcagtccatccacccggccaaggacggctggattcagaacctgcaggcgctgatggagagattcttcaggtaggggg

SEQ ID NO: 3168 - DNA, 121 bp, synthetic construct
  misc_feature 1..121: note = Description of artificial sequence: synthetic polynucleotide sequence
  source 1..121: mol_type = other DNA
agcaggctgccgtcccgcaggagcgagtcccgaggcgccgtgcgcatcaaggtgctggacgtgctgtcctttgtgctgctcatcaacaggcagttctatgaggtgcgtgtccaggcggccg

SEQ ID NO: 3169 - DNA, 157 bp, synthetic construct
  misc_feature 1..157: note = Description of artificial sequence: synthetic polynucleotide sequence
  source 1..157: mol_type = other DNA
ggaggagctgattaactcagtggtcatctcgcagctctcccacatccccgaggataaagaccaccaggtccgaaagctggccacccagttgctggtggacctggcagagggctgccacacacaccacttcaacagcctgctggacatcatcgagaag

SEQ ID NO: 3170 - DNA, 121 bp, synthetic construct
  misc_feature 1..121: note = Description of artificial sequence: synthetic polynucleotide sequence
  source 1..121: mol_type = other DNA
aggtgatggcccgctccctctccccacccccggagctggaagaaagggatgtggccgcatactcggcctccttggaggatgtgaagacagccgtcctggggcttctggtcatccttcaggt

SEQ ID NO: 3171 - DNA, 121 bp, synthetic construct
  misc_feature 1..121: note = Description of artificial sequence: synthetic polynucleotide sequence
  source 1..121: mol_type = other DNA
ccaagctgtacaccctgcctgcaagccacgccacgcgtgtgtatgagatgctggtcagccacattcagctccactacaagcacagctacaccctgccaatcgcgagcagcatccggctgca

SEQ ID NO: 3172 - DNA, 121 bp, synthetic construct
  misc_feature 1..121: note = Description of artificial sequence: synthetic polynucleotide sequence
  source 1..121: mol_type = other DNA
ctgacaggcctttgacttcctgttgctgctgcgggccgactcactgcaccgcctgggcctgcccaacaaggatggagtcgtgcggttcagcccctactgcgtctgcgactacatgtacgcg

SEQ ID NO: 3173 - DNA, 152 bp, synthetic construct
  misc_feature 1..152: note = Description of artificial sequence: synthetic polynucleotide sequence
  source 1..152: mol_type = other DNA
gggagccagagagaggctctgagaagaagaccagcggccccctttctcctcccacagggcctcctggcccggcgcctgcaggccccgccgtgcggctggggtccgtgccctactccctgctcttccgcgtcctgctgcagtgcttgaagcag

SEQ ID NO: 3174 - DNA, 121 bp, synthetic construct
  misc_feature 1..121: note = Description of artificial sequence: synthetic polynucleotide sequence
  source 1..121: mol_type = other DNA
agtctgactggaaggtgctgaagctggttctgggcaggctgcctgagtccctgcgctataaagtgctcatctttacttccccttgcagtgtggaccagctgtgctctgctctctgctccat

SEQ ID NO: 3175 - DNA, 136 bp, synthetic construct
  misc_feature 1..136: note = Description of artificial sequence: synthetic polynucleotide sequence
  source 1..136: mol_type = other DNA
gctttcaggcccaaagacactggagcggctccgaggcgccccagaaggcttctccagaactgacttgcacctggccgtggttccagtgctgacagcattaatctcttaccataactacctggacaaaaccaaacag

SEQ ID NO: 3176 - DNA, 191 bp, synthetic construct
  misc_feature 1..191: note = Description of artificial sequence: synthetic polynucleotide sequence
  source 1..191: mol_type = other DNA
gcgcgagatggtctactgcctggagcagggcctcatccaccgctgtgccagccagtgcgtcgtggccttgtccatctgcagcgtggagatgcctgacatcatcatcaaggcgctgcctgttctggtggtgaagctcacgcacatctcagccacagccagcatggccgtcccactgctggagttcctgtcca

SEQ ID NO: 3177 - DNA, 121 bp, synthetic construct
  misc_feature 1..121: note = Description of artificial sequence: synthetic polynucleotide sequence
  source 1..121: mol_type = other DNA
ctccattaccgcagctctggccaggctgccgcacctctacaggaactttgccgcggagcagtatgccagtgtgttcgccatctccctgccgtacaccaacccctccaagtgagtggtcgcc

SEQ ID NO: 3178 - DNA, 121 bp, synthetic construct
  misc_feature 1..121: note = Description of artificial sequence: synthetic polynucleotide sequence
  source 1..121: mol_type = other DNA
tcatctcaggtttaatcagtacatcgtgtgtctggcccatcacgtcatagccatgtggttcatcaggtgccgcctgcccttccggaaggattttgtccctttcatcactaaggtgggctca

SEQ ID NO: 3179 - DNA, 121 bp, synthetic construct
  misc_feature 1..121: note = Description of artificial sequence: synthetic polynucleotide sequence
  source 1..121: mol_type = other DNA
ctcactctgccagggcctgcggtccaatgtcctcttgtcttttgatgacacccccgagaaggacagcttcagggcccggagtactagtctcaacgagagacccaagaggtacggcctgcgg

SEQ ID NO: 3180 - DNA, 121 bp, synthetic construct
  misc_feature 1..121: note = Description of artificial sequence: synthetic polynucleotide sequence
  source 1..121: mol_type = other DNA
aggatagccagaccccccaaacaaggcttgaataactctccacccgtgaaagaattcaaggagagctctgcagccgaggccttccggtgccgcagcatcagtgtgtctgaacatgtggtcc

SEQ ID NO: 3181 - DNA, 166 bp, synthetic construct
  misc_feature 1..166: note = Description of artificial sequence: synthetic polynucleotide sequence
  source 1..166: mol_type = other DNA
gcaggatacagacgtccctcaccagtgccagcttggggtctgcagatgagaactccgtggcccaggctgacgatagcctgaaaaacctccacctggagctcacggaaacctgtctggacatgatggctcgatacgtcttctccaacttcacggctgtcccgaagag

SEQ ID NO: 3182 - DNA, 154 bp, synthetic construct
  misc_feature 1..154: note = Description of artificial sequence: synthetic polynucleotide sequence
  source 1..154: mol_type = other DNA
ggtctcctgtgggcgagttcctcctagcgggtggcaggaccaaaacctggctggttgggaacaagcttgtcactgtgacgacaagcgtgggaaccgggacccggtcgttactaggcctggactcgggggagctgcagtccggcccggagtcgag

SEQ ID NO: 3183 - DNA, 121 bp, synthetic construct
  misc_feature 1..121: note = Description of artificial sequence: synthetic polynucleotide sequence
  source 1..121: mol_type = other DNA
tcagctccagccccggggtgcatgtgagacagaccaaggaggcgccggccaagctggagtcccaggctgggcagcaggtgtcccgtggggcccgggatcgggtccgttccatgtcgggtga

SEQ ID NO: 3184 - DNA, 214 bp, synthetic construct
  misc_feature 1..214: note = Description of artificial sequence: synthetic polynucleotide sequence
  source 1..214: mol_type = other DNA
gggggccatggtcttcgagttggcgccctggacgtgccggcctcccagttcctgggcagtgccacttctccaggaccacggactgcaccagccgcgaaacctgagaaggcctcagctggcacccgggttcctgtgcaggagaagacgaacctggcggcctatgtgcccctgctgacccagggctgggcggagatcctggtccggaggcccacag

SEQ ID NO: 3185 - DNA, 205 bp, synthetic construct
  misc_feature 1..205: note = Description of artificial sequence: synthetic polynucleotide sequence
  source 1..205: mol_type = other DNA
gggaacaccagctggctgatgagcctggagaacccgctcagccctttctcctcggacatcaacaacatgcccctgcaggagctgtctaacgccctcatggcggctgagcgcttcaaggagcaccgggacacagccctgtacaagtcactgtcggtgccggcagccagcacggccaaaccccctcctctgcctcgctccaacacag

SEQ ID NO: 3186 - DNA, 121 bp, synthetic construct
  misc_feature 1..121: note = Description of artificial sequence: synthetic polynucleotide sequence
  source 1..121: mol_type = other DNA
tggccgcacacggccttcccttgcagtggcctctttctcctccctgtaccagtccagctgccaaggacagctgcacaggagcgtttcctgggcaggtatcgcctctcagagggaagcggtt

SEQ ID NO: 3187 - DNA, 121 bp, synthetic construct
  misc_feature 1..121: note = Description of artificial sequence: synthetic polynucleotide sequence
  source 1..121: mol_type = other DNA
actccgccgtggtcatggaggagggaagtccgggcgaggttcctgtgctggtggagcccccagggttggaggacgttgaggcagcgctaggcatggacaggcgcacggatgcctacagcag

SEQ ID NO: 3188 - DNA, 121 bp, synthetic construct
  misc_feature 1..121: note = Description of artificial sequence: synthetic polynucleotide sequence
  source 1..121: mol_type = other DNA
gtcgtcctcagtctccagccaggaggagaagtcgctccacgcggaggagctggttggcaggggcatccccatcgagcgagtcgtctcctcggagggtggccggccctctgtggacctctcc

SEQ ID NO: 3189 - DNA, 121 bp, synthetic construct
  misc_feature 1..121: note = Description of artificial sequence: synthetic polynucleotide sequence
  source 1..121: mol_type = other DNA
ccagccctcgcagcccctgagcaagtccagctcctctcccgagctgcagactctgcaggacatcctcggggaccctggggacaaggccgacgtgggccggctgagccctgaggttaaggcc

SEQ ID NO: 3190 - DNA, 121 bp, synthetic construct
  misc_feature 1..121: note = Description of artificial sequence: synthetic polynucleotide sequence
  source 1..121: mol_type = other DNA
gtcacagtcagggaccctggacggggaaagtgctgcctggtcggcctcgggcgaagacagtcggggccagcccgagggtcccttgccttccagctccccccgctcgcccagtggcctccgg

SEQ ID NO: 3191 - DNA, 121 bp, synthetic construct
  misc_feature 1..121: note = Description of artificial sequence: synthetic polynucleotide sequence
  source 1..121: mol_type = other DNA
cccgaggttacaccatctccgactcggccccatcacgcaggggcaagagagtagagagggacgccttaaagagcagagccacagcctccaatgcagagaaagtgccaggcatcaaccccag

SEQ ID NO: 3192 - DNA, 121 bp, synthetic construct
  misc_feature 1..121: note = Description of artificial sequence: synthetic polynucleotide sequence
  source 1..121: mol_type = other DNA
cccaccatcccctccctgtgcagtttcgtgttcctgcagctctaccattcccccttctttggcgacgagtcaaacaagccaatcctgctgcccaatgaggtaggcgtggcctccctctcct

SEQ ID NO: 3193 - DNA, 121 bp, synthetic construct
  misc_feature 1..121: note = Description of artificial sequence: synthetic polynucleotide sequence
  source 1..121: mol_type = other DNA
tctgtgtgccacagtcacagtcctttgagcggtcggtgcagctcctcgaccagatcccatcatacgacacccacaagatcgccgtcctgtatgttggagaaggccaggtgaggctgcgggg

SEQ ID NO: 3194 - DNA, 188 bp, synthetic construct
  misc_feature 1..188: note = Description of artificial sequence: synthetic polynucleotide sequence
  source 1..188: mol_type = other DNA
gagcaacagcgagctcgccatcctgtccaatgagcatggctcctacaggtacacggagttcctgacgggcctgggccggctcatcgagctgaaggactgccagccggacaaggtgtacctgggaggcctggacgtgtgtggtgaggacggccagttcacctactgctggcacgatgacatcatgcaag

SEQ ID NO: 3195 - DNA, 141 bp, synthetic construct
  misc_feature 1..141: note = Description of artificial sequence: synthetic polynucleotide sequence
  source 1..141: mol_type = other DNA
gccgtcttccacatcgccaccctgatgcccaccaaggacgtggacaagcaccgctgcgacaagaagcgccacctgggcaacgactttgtgtccattgtctacaatgactccggtgaggacttcaagcttggcaccatcaag

SEQ ID NO: 3196 - DNA, 121 bp, synthetic construct
  misc_feature 1..121: note = Description of artificial sequence: synthetic polynucleotide sequence
  source 1..121: mol_type = other DNA
ccctttctcttgtccgggcagggccagttcaactttgtccacgtgatcgtcaccccgctggactacgagtgcaacctggtgtccctgcagtgcaggaaaggtagggccgggtggggccctg

SEQ ID NO: 3197 - DNA, 121 bp, synthetic construct
  misc_feature 1..121: note = Description of artificial sequence: synthetic polynucleotide sequence
  source 1..121: mol_type = other DNA
accaagtctccccagacatggagggccttgtggacaccagcgtggccaagatcgtgtctgaccgcaacctgcccttcgtggcccgccagatggccctgcacgcaaatgtgagtgggggtgg

SEQ ID NO: 3198 - DNA, 121 bp, synthetic construct
  misc_feature 1..121: note = Description of artificial sequence: synthetic polynucleotide sequence
  source 1..121: mol_type = other DNA
tacgtccccagatggcctcacaggtgcatcatagccgctccaaccccaccgatatctacccctccaagtggattgcccggctccgccacatcaagcggctccgccagcgggtagggaatat

SEQ ID NO: 3199 - DNA, 166 bp, synthetic construct
  misc_feature 1..166: note = Description of artificial sequence: synthetic polynucleotide sequence
  source 1..166: mol_type = other DNA
gatctgcgaggaagccgcctactccaaccccagcctacctctggtgcaccctccgtcccatagcaaagcccctgcacagactccagccgagcccacacctggctatgaggtgggccagcggaagcgcctcatctcctcggtggaggacttcaccgagtttgtgtga

SEQ ID NO: 3200 - DNA, 121 bp, synthetic construct
  misc_feature 1..121: note = Description of artificial sequence: synthetic polynucleotide sequence
  source 1..121: mol_type = other DNA
atatttctgcagaattctgtacttttctaagcaaagcacctccacttgcagtatcttacataatgttactataattccataaaatcaagccatgtattattaacttcatatgaagacccaa

SEQ ID NO: 3201 - DNA, 360 bp, synthetic construct
  misc_feature 1..360: note = Description of artificial sequence: synthetic polynucleotide sequence
  source 1..360: mol_type = other DNA
gctacaagccctccacaaacttctctagcgtgtcccccgtggtgtccccgaccagggacagttcgctggacagcgcactcctgctgggggtgttcagctgggggagcattgcactctgttcggggttccccaagtgtccctgatctatggagctggccatggtgactgcgagtccggggtggggggaaccagtctggggtgagacgtggtgtggcgaaggctggggctgtatccgtggtgacgggctggaatgtggaggctgggactggggccgtggagactggacaggggctggagaccgcacctggttactaagggacgtggcgatctgctggccagggagatgcgaggcctgtggct

SEQ ID NO: 3202 - DNA, 479 bp, synthetic construct
  misc_feature 1..479: note = Description of artificial sequence: synthetic polynucleotide sequence
  source 1..479: mol_type = other DNA
gtcctgagagcatgtgttgctgggggctcatggggttcggctggcctggggacccaatctgctgcttcatctgctgttgctgcagaatccgctgctgcagggcttgctggatgttgggggtgctgtctgcccccagccccggctgccccatctggccaagctgtcccatctgagccgccatctggcccatggagctgccctggagggggagatgctgctgcatgcgctgctgctgctgcatggccggtgggtagcctccgggtccttgaggctgctggaactggccgtgccccgccatgcccccagccatgccggcactcccttgctgctgctgctgttgctgctgttgttgctgctgctgttgctgctgctgctgcagcagctgcctccgtaacatttctcggtactgtggattcatactcgccatgttggggttgtgtcctgggttcatgatgttcaaggcctggccctgggggttc

SEQ ID NO: 3203 - DNA, 478 bp, synthetic construct
  misc_feature 1..478: note = Description of artificial sequence: synthetic polynucleotide sequence
  source 1..478: mol_type = other DNA
aggcctcccatcgcctgctgctgtggaggcacaccgggccgcggcacgccagcctgcatggcattcaggttctgcaggctgggctgctggtgcatgccaggctggggttgcatgccgggctgggactggaggccaggctggggctgcatgccgggctgattggccacgtacttggctgtgcgctgtttgatgaaagctgccattagctgcgggtttgatttgagaatgttcagcacctgctgttgctgctgaggggagctgggcgacttcagggtccgcagcaggtcttgcagagcgctgggtgagatgctcctgggtggctgcacgctgggcatccggggcccagccacggccgcctgggcctgcatggatatcacaggcctgggcaagcctggcatgggctgctgctggggaaggggcgcctgctgccactgcccgggaggcatgctgggcatgacgggcccgctcacctggttgg

SEQ ID NO: 3204 - DNA, 121 bp, synthetic construct
  misc_feature 1..121: note = Description of artificial sequence: synthetic polynucleotide sequence
  source 1..121: mol_type = other DNA
gtcggggcacattcaggctcacgggggccatctggctccccggggtccccatgcccgtgcgtcctgggggcatgctgttgttgatgttcacccggtacaggtgctgctgctgctgggcctc

SEQ ID NO: 3205 - DNA, 359 bp, synthetic construct
  misc_feature 1..359: note = Description of artificial sequence: synthetic polynucleotide sequence
  source 1..359: mol_type = other DNA
acgctcgatctgccgagccgcttccaccgctgcaggagggggctgggccgggggtgggggggccggcacctggctggtaggcttccctgtggacaccgtggtggggggctgagtccgggccacgctggggaagccagctggtgacatgctcacgggtgagggttggggctgggcagggggctgcggcgtctggggtgtgctgggctgctgtgtgggggtcccgggcggtgctgaggtaggagaaggcagactctgctgaggcacgttgcgggtgttcatggtggccatccgccggcgcatgagctgggcctgctgcaggcggtgctggatctgctgctggcggagcttgtgtttgatgt

SEQ ID NO: 3206 - DNA, 121 bp, synthetic construct
  misc_feature 1..121: note = Description of artificial sequence: synthetic polynucleotide sequence
  source 1..121: mol_type = other DNA
tgaggcagaagggcacggggcatttgttttcttggcagtgcttggcgtggtagcagcagagggcgatgagctgcttgcacaccgggcagcccccgttggtcttgcgtttgcagcccttggt

SEQ ID NO: 3207 - DNA, 240 bp, synthetic construct
  misc_feature 1..240: note = Description of artificial sequence: synthetic polynucleotide sequence
  source 1..240: mol_type = other DNA
gtgctgcaccacccgcttcatcttctggcaggatggcagcgagcagttggcgttgcggcactggcacgcgtgcaccagcgactggatgcagcgctggatgctcagccggcgtgactcctgggggctctttgactgtggctcgccctggctgctgccctcgtcatccaggcccagcccccacttcaccatcttatgggcatggctcttcgtgttatagcagttgatgcagaggtcgtagtc

SEQ ID NO: 3208 - DNA, 283 bp, synthetic construct
  misc_feature 1..283: note = Description of artificial sequence: synthetic polynucleotide sequence
  source 1..283: mol_type = other DNA
cctcgcacacagtgcagtgccagcgcgtctccacgtggtgcttgcactcgttgcaggtgtagacaaagcggtcctggccctgggtgtgcagctccaccagcatgcagagcgtggaccacttggagcggcgcaaggaggagaactcccagtgcttgtctctggcgagggtgaggaaggcgtcgcgcccatccatgaggtcacagctgagcagggggtcggggtcgacgatggggggcagggtgttgatgacaggcccagcgtgcaggtggatcacgaagaagac

SEQ ID NO: 3209 - DNA, 163 bp, synthetic construct
  misc_feature 1..163: note = Description of artificial sequence: synthetic polynucleotide sequence
  source 1..163: mol_type = other DNA
cctccttgtgcttctccatggtggcatacagcttctgggacaggtcattggacacgttgggcatgctgggcttcttcttgttggcgcggctgatgctgcttttgttcttgttggttttcttgttgttcttcttcttggcattcttgctgtcgccctgactgcc

SEQ ID NO: 3210 - DNA, 169 bp, synthetic construct
  misc_feature 1..169: note = Description of artificial sequence: synthetic polynucleotide sequence
  source 1..169: mol_type = other DNA
cctcagtggtttcactggctgcagtgctctcttcctttttcctctcctcttcttcttgttctagttccttaatgctctcttctaacacattgggccagaaatcaccttcaaaatagggcagttccttggcactggtgagcctgtcttcagttgcttgtttgaaaatatc

SEQ ID NO: 3211 - DNA, 167 bp, synthetic construct
  misc_feature 1..167: note = Description of artificial sequence: synthetic polynucleotide sequence
  source 1..167: mol_type = other DNA
ccttgtagtcatggatgatccgctctgcaaacgccttgtccagcatctttttgtaccactcctgcagtcgttttggcttgggtattttttgatcaggtgggtggcaatggaagatgtaatcatctccttcacttggaggacaggcccagatgtgccctgtcacatac

SEQ ID NO: 3212 - DNA, 121 bp, synthetic construct
  misc_feature 1..121: note = Description of artificial sequence: synthetic polynucleotide sequence
  source 1..121: mol_type = other DNA
tcaccctaatttcttcacatactctaaatatccaataaggatctcatggtaaacggctgtgcggaggcaacgtggccggaagaaatgaatactatccagataagaaatgtacacacgcctg

SEQ ID NO: 3213 - DNA, 148 bp, synthetic construct
  misc_feature 1..148: note = Description of artificial sequence: synthetic polynucleotide sequence
  source 1..148: mol_type = other DNA
cctcgtgtttggaggggggcaatcagagccgtattcttggacgtgcattccaaaaaagcagacatccacgccgtcaatttcctcaaaagcaaacagagctttggttcgatatgggaaagattcagacatttccccagaatccacaaac

SEQ ID NO: 3214 - DNA, 152 bp, synthetic construct
  misc_feature 1..152: note = Description of artificial sequence: synthetic polynucleotide sequence
  source 1..152: mol_type = other DNA
ccgtgacttcatcccgggcttgacctccaccgtcttgtctgagctggccaccactcggacaaaaacctccccggcttcagggtgattctggcgccgcaaaaatttgttcactcggtcttccaagtggtttcccagtcttgtggtctgcagcc

SEQ ID NO: 3215 - DNA, 121 bp, synthetic construct
  misc_feature 1..121: note = Description of artificial sequence: synthetic polynucleotide sequence
  source 1..121: mol_type = other DNA
ggaaacagaaagcttcccgaaacttactcttagcactgaatttgttttcttttcgaggtctgccagttttcttcaagcagttgtcgcacacaaaactgcaaaataatagtggtatgatgag

SEQ ID NO: 3216 - DNA, 121 bp, synthetic construct
  misc_feature 1..121: note = Description of artificial sequence: synthetic polynucleotide sequence
  source 1..121: mol_type = other DNA
caggccaggggaaacaactcaccctgaaggccaaatgatgtcatagtgcagaacgcaaatctgatgcatcttccggccacactccttgcaatcaacgaaactaggaggcaaagaaggcgca

SEQ ID NO: 3217 - DNA, 121 bp, synthetic construct
  misc_feature 1..121: note = Description of artificial sequence: synthetic polynucleotide sequence
  source 1..121: mol_type = other DNA
tgaaagtaaaaaagaaatagctatatacttacggttcggggtctaaggtatcatttttcttcttttcaaactgatcctttgaaattgtccttgttttaaaataagaaaacatgttttatta

SEQ ID NO: 3218 - DNA, 121 bp, synthetic construct
  misc_feature 1..121: note = Description of artificial sequence: synthetic polynucleotide sequence
  source 1..121: mol_type = other DNA
aatgacaggacggtacttacgtctggggctgtgaagggtcgtcacccagggtcacattctcgccctggatctctgtgaaacacttctcacagaaatgatacctgtcagcaagaaggccata

SEQ ID NO: 3219 - DNA, 121 bp, synthetic construct
  misc_feature 1..121: note = Description of artificial sequence: synthetic polynucleotide sequence
  source 1..121: mol_type = other DNA
gctgcttgacgcttacctattctgatagctgtagtaggcagcatcgcgaggaatggtacacagctgcttcccatagcagcacaaagtctgtggggaaaactcatactgcaaaaataaagga

SEQ ID NO: 3220 - DNA, 241 bp, synthetic construct
  misc_feature 1..241: note = Description of artificial sequence: synthetic polynucleotide sequence
  source 1..241: mol_type = other DNA
ccttgcgtccacagcaatatccaagggactgcatgacagggtcaatttcctgctcaaagacctctgcaagcttactgcaaaacttatagactcgggatgtcttgcgattatagagccaggcattgttgaacatgagccagacgtcgtccacgtactgccagggctcttggtattgccctgtgtccagcttccgcttgatggtggagaggtccatgggattctttacgatgtcaaaatagtc

SEQ ID NO: 3221 - DNA, 121 bp, synthetic construct
  misc_feature 1..121: note = Description of artificial sequence: synthetic polynucleotide sequence
  source 1..121: mol_type = other DNA
ctggaattccgaggagctggggatctacaggctgccggaaaggtaatgactctgggtcctgtcgatacagtgcttctagggttggcatgagggcctggcgtaactcctctggtttaaagac

SEQ ID NO: 3222 - DNA, 191 bp, synthetic construct
  misc_feature 1..191: note = Description of artificial sequence: synthetic polynucleotide sequence
  source 1..191: mol_type = other DNA
ctttttttgcgcggctgcgaaggagatgttgactgagaggctgtgccgttactgctactctcttcttcctctttaacttctactttcacttcaggtttcttttcatccacttccattggttctgatttctgctctgctatgtctgtttcttctttaacttgggaagctccttgcaaatcctcctccatcat

SEQ ID NO: 3223 - DNA, 181 bp, synthetic construct
  misc_feature 1..181: note = Description of artificial sequence: synthetic polynucleotide sequence
  source 1..181: mol_type = other DNA
cctcagacctgggctcccctttggattcaccaggatcgggctcagtgtcctctgcttgggtctccgtcttcatttccagcacaggtacgtcaggtcctggctgctgggaattggtttctgcgctggccaccgaggagggggtagggactctgttatcaatgctggctgctgcctgggaaag

SEQ ID NO: 3224 - DNA, 418 bp, synthetic construct
  misc_feature 1..418: note = Description of artificial sequence: synthetic polynucleotide sequence
  source 1..418: mol_type = other DNA
ccggtgtgccaggaggctgggcgtgcacaggcgtcggctgttgctgcgatgactgaggggtagccacagacgggggctgaactggggtttgaggctgcggggtcacctgggcctgggctgctgcctggactgtaggggtgctctgggtttgggtagcactgggcactgagccaggagtcggggtgggagtctgcccggaagacgacacaggagttgatggctgagtgggagctgctggctggggaggagtcatcccaggtggtgtcgtgtgctggagagatggcatgccagcagccgtggaagcaggaggcggtgttgggtgcagtggtgactgtgtcactggagggcaaggtagctggctggcctgaggccccagcatgttgagagggttaggaagagcagcaccaggcacctgtcc

SEQ ID NO: 3225 - DNA, 181 bp, synthetic construct
  misc_feature 1..181: note = Description of artificial sequence: synthetic polynucleotide sequence
  source 1..181: mol_type = other DNA
cctgtgacacgcctgtttgggctggcggctgccccatgcccacactcatcgccccgctggatgacgggaactggttctgtggcagaaactggctctgagcgggcgcctgggccatcatgttgttggtgtgtgcacccatcatgttcggaggctgaggcattcgggaaggagaaatggccat

SEQ ID NO: 3226 - DNA, 121 bp, synthetic construct
  misc_feature 1..121: note = Description of artificial sequence: synthetic polynucleotide sequence
  source 1..121: mol_type = other DNA
ctggcactgagcccatgctgttcatctggacagagtggttcattggggaggctgcacgaggtcccatgggtgcttgtggcaactggacgttccccaaggacatggggttaaatgaattcat

SEQ ID NO: 3227 - DNA, 121 bp, synthetic construct
  misc_feature 1..121: note = Description of artificial sequence: synthetic polynucleotide sequence
  source 1..121: mol_type = other DNA
taaaactaaaatatgattcaccacaaacagttcaataccttgagaaacttgcatgcgattcactggcagggacaggggtccatctatggtggcaaaacaaaaacaaaaacaaaaccaccct

SEQ ID NO: 3228 - DNA, 173 bp, synthetic construct
  misc_feature 1..173: note = Description of artificial sequence: synthetic polynucleotide sequence
  source 1..173: mol_type = other DNA
cttggaggtctcacaggttgtgcctgtggaatcacagggggctgagcccccggggctggtaaggctggctggttccccaagatgccttgtttatgtaaacgcgacctccgtttttcttctagttctttttgtatcttgtagattttctctgctaataagtgataatattcatc

SEQ ID NO: 3229 - DNA, 121 bp, synthetic construct
  misc_feature 1..121: note = Description of artificial sequence: synthetic polynucleotide sequence
  source 1..121: mol_type = other DNA
accctgctgttggcagactcgtacatgtccccttccactttcttagcataggctaccaggttttccatgcggcgatcctttagagctgcgggatcaggtgttgggaagatggcttggacgc

SEQ ID NO: 3230 - DNA, 148 bp, synthetic construct
  misc_feature 1..148: note = Description of artificial sequence: synthetic polynucleotide sequence
  source 1..148: mol_type = other DNA
cagtttatgcactagatggctccgcaggtcctgagtgacatgttcgtgccagcctttccttacaccggtgctagaaggaggagctgctgttggtatagtgctgagggttccaatgttaccagagttggagccatcgttcatcagtggg

SEQ ID NO: 3231 - DNA, 121 bp, synthetic construct
  misc_feature 1..121: note = Description of artificial sequence: synthetic polynucleotide sequence
  source 1..121: mol_type = other DNA
gggtcttactttgtggcccccagggaagtcggaagagctgattctgaaatcaagtttgggggctgctgatctgttgttattcctcctgctggaatgttcattggattatttcctttaaaga

SEQ ID NO: 3232 - DNA, 121 bp, synthetic construct
  misc_feature 1..121: note = Description of artificial sequence: synthetic polynucleotide sequence
  source 1..121: mol_type = other DNA
cccagggggttgagagtcctcatctgctggtgggtttgaggctgtgctggttgctggccaggaacctgaggctgcagctgcgtctggggctggttcatgtaggggagtccgagagcagcat

SEQ ID NO: 3233 - DNA, 121 bp, synthetic construct
  misc_feature 1..121: note = Description of artificial sequence: synthetic polynucleotide sequence
  source 1..121: mol_type = other DNA
gctcgctgcatggagctggggtctatgggatttgggttacttaaagaagtggcattctgttgccctgtgccaacagaaccaattgtgttttgaattccactagctggagaccccaggatgg

SEQ ID NO: 3234 - DNA, 121 bp, synthetic construct
  misc_feature 1..121: note = Description of artificial sequence: synthetic polynucleotide sequence
  source 1..121: mol_type = other DNA
ttactttgttggtttcgcttgtcactggcatttttcaaagggaggcaaacaggacagtcatgtcgtgtgcagttcttccaatgagagatgatttgtcgtgaagatgcacaatgggcaacta

SEQ ID NO: 3235 - DNA, 121 bp, synthetic construct
  misc_feature 1..121: note = Description of artificial sequence: synthetic polynucleotide sequence
  source 1..121: mol_type = other DNA
ccttggcaggctttcccagcctgacaatgcgtcatgtgattcaaaacgtttttcatggttcgacaatgcgggagcgagcaggcccgaacctctccgtttgcttgctctcgtctctgacact

SEQ ID NO: 3236 - DNA, 121 bp, synthetic construct
  misc_feature 1..121: note = Description of artificial sequence: synthetic polynucleotide sequence
  source 1..121: mol_type = other DNA
tatgagcatgaagcagtagaaccagctgctgctgtatcagtttgcgtttttcaggatctgcagtggggcctgttgcaattgcttgtgtgggtacaattcccactgatgtttgcatctgaga

SEQ ID NO: 3237 - DNA, 178 bp, synthetic construct
  misc_feature 1..178: note = Description of artificial sequence: synthetic polynucleotide sequence
  source 1..178: mol_type = other DNA
ccatatttggcacgttggtgactgaagtattcttgatatctgtagggaaggtgggcaaactgttgaccatgctctgtttgctggctaactgggggttcactccagtggctcccattggctgccctccagcttgactaaagggctgtccaaatggacttgtgttcccagttattcccat

SEQ ID NO: 3238 - DNA, 356 bp, synthetic construct
  misc_feature 1..356: note = Description of artificial sequence: synthetic polynucleotide sequence
  source 1..356: mol_type = other DNA
ccttggccatgcctcctgcctgtgcggtgttcagtcccgcgtgaccagtcatttgcggggaaacctgcgttagggtctcagccagcacgctgctcgaggcgccctgcatggctggagtagggtacggcattccagctccccttcctctgccagcagccccaagagatccattcatgacttgcgcctgcccttgtgaagcctgattaattaagctatggccagagttactattgaggaggcctgggtgggtctggttaaagttagcattcatgcagataccaggtccagtctgtgacgtggcagggctgctagtcgccagccccacttgcttttgtgcttgcggattcagtgcttgg

SEQ ID NO: 3239 - DNA, 358 bp, synthetic construct
  misc_feature 1..358: note = Description of artificial sequence: synthetic polynucleotide sequence
  source 1..358: mol_type = other DNA
gaggcagcgggggtgggcccagaggtgctggctgcctgtttaggcaggctgggggctgaagaatctccctggctcagagggctcttgcccatggcactgaggctggccatgttagcactgttcggctgcccttgagcctggccacccaggccctgctgcacggggctgctggcgctcacatttcctattcctgggttgatactagagccgctgcctcctcgtagaagctccgacagttgtttatgtttggaagcagcatctggaacaaggttcccactgtttaaaaggcctaattctcctccattgggtatcagctcatcaggaagatcattttccaagtcaaacaatgatccaaaat

SEQ ID NO: 3240 - DNA, 121 bp, synthetic construct
  misc_feature 1..121: note = Description of artificial sequence: synthetic polynucleotide sequence
  source 1..121: mol_type = other DNA
cccggaccccctcctcacctgtgctgtcattcgccgagaaaccgggcgagctgagtttggctcttttggggttgggcggtccgtccagcaagttctcagccattttcacctgctcgcgaaa

SEQ ID NO: 3241 - DNA, 121 bp, synthetic construct
  misc_feature 1..121: note = Description of artificial sequence: synthetic polynucleotide sequence
  source 1..121: mol_type = other DNA
aaatatgaacacacatgttaattaagtaacacatttccctcttgcggttacatacattcggtctgcagaggagccttggtcatattaatgaggctttgctttgctttaaggctaattccaa

SEQ ID NO: 3242 - DNA, 121 bp, synthetic construct
  misc_feature 1..121: note = Description of artificial sequence: synthetic polynucleotide sequence
  source 1..121: mol_type = other DNA
ataattttgctgtgcaccaaatgatgcatatgagagatcagaaaaatctgtaaccagagaggaaaaacggctgctaatgtagtggtaatagggtagtttaggcgagacttccagggaagag

SEQ ID NO: 3243 - DNA, 121 bp, synthetic construct
  misc_feature 1..121: note = Description of artificial sequence: synthetic polynucleotide sequence
  source 1..121: mol_type = other DNA
tgatgccaagtctttctgtattgtgccgtcccaacagggatggcttcttagcagcgaatatggggtgagtaatttgaatcaccgccatcaacctgaaaagccaaagttgttccaggataac

SEQ ID NO: 3244 - DNA, 121 bp, synthetic construct
  misc_feature 1..121: note = Description of artificial sequence: synthetic polynucleotide sequence
  source 1..121: mol_type = other DNA
gactggtccgtgcctgggcatatcgcccaactcagtccaatgagattaaatctcaggaatttacatggaattctttggaaagagactcgatttcctctgggcatgctgaactgatagaatg

SEQ ID NO: 3245 - DNA, 121 bp, synthetic construct
  misc_feature 1..121: note = Description of artificial sequence: synthetic polynucleotide sequence
  source 1..121: mol_type = other DNA
ttgccttgctatgcgctgttgcttatacatttctggaagacattttcccatcctctgcagtttaccttgtacttttattttctccttgttgaattacaaatagattaacacgctcaatagg

SEQ ID NO: 3246 - DNA, 121 bp, synthetic construct
  misc_feature 1..121: note = Description of artificial sequence: synthetic polynucleotide sequence
  source 1..121: mol_type = other DNA
acattacacaagtactaagcaaaaatatacaaagaaagacatctgcaaatcatcccatacgttatcatcctaaagaaccatcattaatattaggtgaatatcacggttaatatcattctgt

SEQ ID NO: 3247 - DNA, 121 bp, synthetic construct
  misc_feature 1..121: note = Description of artificial sequence: synthetic polynucleotide sequence
  source 1..121: mol_type = other DNA
ttgtatttttaaatcacctccttctttgacatatgaaaagcatatttaatgtatgcaacttgatgaatttagagatcagtactcacccatggagtcatgacagccatccatgtaataaaca

SEQ ID NO: 3248 - DNA, 121 bp, synthetic construct
  misc_feature 1..121: note = Description of artificial sequence: synthetic polynucleotide sequence
  source 1..121: mol_type = other DNA
gaaagaatgaccactgagaagacctgacagatgcgtaactacttggctagcacacaagggaaaatttacaacatcttctgtttatttggtggttgtaaaatcccccgtttcagtgatttag

SEQ ID NO: 3249 - DNA, 121 bp, synthetic construct
  misc_feature 1..121: note = Description of artificial sequence: synthetic polynucleotide sequence
  source 1..121: mol_type = other DNA
atgttcaccaccatccaccctggctttaaaatctttagtggtttctttctgctcttatagcaaagatgcaacacccaaatgtggcctgagggtctcagcacggttctgctctgacctcctt

SEQ ID NO: 3250 - DNA, 121 bp, synthetic construct
  misc_feature 1..121: note = Description of artificial sequence: synthetic polynucleotide sequence
  source 1..121: mol_type = other DNA
agatttaagagccaacacatttttcactatgtcttttctcctctcgtctgccatgagattggcaatgttccacttagaggttctcccatctgccaggtcccagagtgaagaaggcatggag

SEQ ID NO: 3251 - DNA, 121 bp, synthetic construct
  misc_feature 1..121: note = Description of artificial sequence: synthetic polynucleotide sequence
  source 1..121: mol_type = other DNA
aataacaaataacaacaaaagcctagtggtgcaaacactttttttgcagagacatcaaagcaatgtggaagtcaagatctggccttaccagccactttagcttcaaggaaaataaggtgct

SEQ ID NO: 3252 - DNA, 121 bp, synthetic construct
  misc_feature 1..121: note = Description of artificial sequence: synthetic polynucleotide sequence
  source 1..121: mol_type = other DNA
acacaatccatatcatggggcagattatgaggcccagccagaagattcgtgcttcagcttctgtggcagcaatgctattcggagagacctgttaaaggaaagtaattcaaatgtcaaaaca

SEQ ID NO: 3253 - DNA, 3781 bp, synthetic construct
  misc_feature 1..3781: note = Description of artificial sequence: synthetic polynucleotide sequence
  source 1..3781: mol_type = other DNA
tccttggggaagctgagggcacgaggaggggctgccagactccgggagctgctgcctggctgggattcctacacaatgcgttgcctggctccacgccctgctgggtcctacctgtcagagccccaaggtaaaaaggccgggaaagcatcttaatttagcgtgcagtctcagctggtcctgccattccagataaacagagaaaccattctgaattggggatgggggtgaggatgggaacaggagtctgtgtcctgctggggcaggccattggaagatgtgaaagagttgtctatttccttccaccggagggagacttcaggtcagccaggtgtctggagtatgaaccatgtatcagcaccgaaaggttctagaagtcagactttcgggcagtgtgtcactaactctcagcatgctggcctggctcggcccacagcaaggtcttctcgcctccctttgggtaaatactgaggggtgcctctgcaggacgggacctctgccagactccactccatacccagagaagcagggaaaccaaaattggagtcagccttgaggtgtagctgttgagccctcagcagctggggagagctggcggatgctgccctccccccagtttcctaatggtgttgtttaaaaagggtcaggggacgggggaacagatggtgggaagagcacagtgcagacacctggcaccggctctgaaggcagcatggcagctacaccgttggctgggaagggtgtgcccctgaagaagtcgtttacattctcgagtcaattttcctggagtgtacaatggacctgtgggaaagcctgtatgaaagggtaatgatgagggacctagcacagtgtccaatattttataggaactggaattgagctcataggagctcaattttattggcattgctgttgttggatggttaaaggggtggtatcccttttctcagactcccctgaaatgtatggtttgctttgaacccagagactgatgacaggtctgccggtgtggttgggtgcagccttaagttgctacgggaaagtgttggagggggagaagtcagaggtaaccttgccccctccctcaattccagatgaggaaattcaggcctgaaaagggaaagtgaccacctcaaagtctcatgccttggaggacccagcaggaatccaagacctctgaaaaggaccggcagggctcttgccacggctgggggtgtggtcatggtaacacaggttttccatccatggaaggtacctgagggattttctcttcctccctagggccagcatcagaggagtgaatagctcagttagctcatctcaggggccatgtgccctcggaggtggtttgccactttcacggttggactgagttggagagaaacagagacccacccaggggtggggacaagctccctgcaactcaggacttgcagatcacttgcccaagtggctccctagctcctggctcctggcccggggcctgggactctccccgaagtggggctggccactgtgaggaaccgactggaggcagggacctcttggatgccccaggcagttgggatgccacttctgataaagcacgtggtggccacagtaggtgcttggttgctccacagcctggcccgagctcagcgctgcagaaagaaagtgaaagggaaaaagaactgcggggaggcggggaggtaggatgaccagcggacgagctgccacagacttgccgcggccccagagctggcgggagggagaggccaccagcagcgcgcgcgggagcccggggaacagcggtaggtgaccaaagtctcctctgtaacccctaaggtcgggctgagaatcgaggctccgagactgtcagctacttgctcaaggtcacacagcaagtctgggaggatggggggatggaatatgcaaaatgtagggccgggaaacacctcgtttccagcatccccgcaacgactctgcgcgggaaccaggagccgggaacccggagcttggcttgctgtgcccagagctccggggccgtgggcgggtggcaggaaagcctggcggcagcttctgcagagaagccggagcgcagactgggagcgcggagcagacacactcccccggccacccttggccgactccgcgcgcccgggatcctgcagaggtgcgcgcccttcttgtacgccagactttggaccagggccgccgttccctgagcttcactttccctgttgggtcatattccatctctaactctggaatcttgggtattgggctctccaggcggggggccctgctcagggaggcagtagggagccaaacctttaaccagaggatgggataagtcctcaactctcgttgaacatcttggcgaaggtgtgtgttgttgggaggggtgggggagggatccccccggactgaaccgatctcttgatctctcacttctctacctcgctttggggccctgagtcacaccctctaaggagagaggctaaagcgccccggaaagccagcgtgcgaatgccggggtgggagtgggagattggatctccctggggtccaggaaagccggaatcggagccaccatgcttagcttagtctggaactcttaaaagccgcggtcctcctgagtcccacagcccctctccaccctaggtggcacaggagaggtggcaaaagcctagaagttcaaggcatggctccctccccagccgcagcctggagtgtctaactttggcaggaagtcttccgtttctgctccccactccagagaaaaaataaataaatacttctccggagtgagattaaggaaacaggtacttcttcctcttggagaaagaggagccaaaggaacttgactccaacaaatgatcaccttgcaaacccccggctcccttaggggatgacctggtctccaacaatctcagagcgtttggaggcagggtctttggagatgactgagtggggaatcccaggctccccacacatgaacatcacctgggatgatcaacctgttcaggatgtaggttcccgggctcacccccaggcccggttggctaggcctggggtgaggctgagatcctgcaggttaaaccatctatcccaggtgactccaatgttcgtttgtggggcaaaagtccctcaagtcagagacactgggaggcgctgatgtggtctcatctctttactctctccctgttacaaaacctctatcagaaaaggagtaccaggaggtgttttgttttgttttgcttaacgccacatagcaagcagtttgcagacgcaggatttgaaccctggtctactgagagcccagcccagtgcagcaagcagatgtgaacctccacaaatgcagggcaggtcccaggcagtcagagagaaacctgttgatacccagtctgtctgatggctggggcttggtttcatgtcctaagacccagcctcagataccttgagaagagcagaatcagaaattaacccaaggaaactctggattagttccaggcaatcagggaagtggctggagggaggtaggaaacttctggacttagcctcagatttgccttgagtcacactgacaagtgacttcccctctctgaggttcatctgtaaaatggataaaacatgagagcttgcttgatgatgtctgatgtgtacagaaaaagcactttagaaaaccaccaaagaatattcatgcattgggaataattattatagatcctaaagggattgtttagaaagatcagagaggggccgggagcagtggttcacacctgtaatcctagcactttgggag

SEQ ID NO: 3254 - DNA, 360 bp, synthetic construct
  misc_feature 1..360: note = Description of artificial sequence: synthetic polynucleotide sequence
  source 1..360: mol_type = other DNA
gggcaacagagcaagactgtctcaggaaaaaaaaaagagagagaaaaaagtcagagaggaaagcataggcagatgggaggtttccaaagaccaagacacacacagtcaaaagacagttcagaaaggggcattagttaccaccgattctcataggaaggacatagatagttttcagattccttcaatccttctgacatcaaggacaaagtctctgattttccctgatgtttgacagtgccctaatgcttgctaagatttctttttaacaaagtggtaaagaagctgagattattttagtaacattgtttctttttcaaccacaagtgatactgttggtttggttttgcttttccgtttata

SEQ ID NO: 3255 - DNA, 480 bp, synthetic construct
  misc_feature 1..480: note = Description of artificial sequence: synthetic polynucleotide sequence
  source 1..480: mol_type = other DNA
catggaaaaaaaagttttctttttgtaaaatcatggtaaaatacatataacataaaatttaccattttaaccactttcaaatgtacatttcagtggcattaaatatttcaaactgttgtgcaacctccgctaccatccatctccagaactttttcatcctcccaaactgaaactctacccaataagcaataactccccactgccccttccacccagctcgtggtaactccaacttcctgtctctatgttttgggctactctagacaccgcctataaatagaattacgtgatatttgtctttttgtgcctggcttctttcacttagcataatgtcttccaggttcatccatgtcgtgccatgtgtaattcctttctatggcggaatagtattctaatatgtggatatcccatattttgttcatccattcatttgttgatagacacttgggttgttcctacctcttgactattgtgaataat

SEQ ID NO: 3256 - DNA, 481 bp, synthetic construct
  misc_feature 1..481: note = Description of artificial sequence: synthetic polynucleotide sequence
  source 1..481: mol_type = other DNA
cttgctaggtacatgggtggacaaatatctgtctgactccccgctttcaactctagaaagctttcttttaaaatcggtctatttaagtttctttaaaaagttaatttaagaaaaatactaaggtaaattgtagaacaggtgatatgtcaatatgaccccaaaaattgtaaagatggaagacgaatgcctgcagtttgggaaaccggatgagaggaaagacctggaagctattgtaaaatctatgctgagggtctggtgactactagaccaagggcatggcagcagagggcagctgaaagacttcaggaaggaaagatataagaattaagaaaggggcctggtgcagtggctcatgcctgtaattccatcaccttgggaggtcaaggcaggatgatggcttgagaccaggagttcaagaccagcctgggcaacagagcaagacctttttttaggaaaaaaatatataaattaataaaaataa

SEQ ID NO: 3257 - DNA, 240 bp, synthetic construct
  misc_feature 1..240: note = Description of artificial sequence: synthetic polynucleotide sequence
  source 1..240: mol_type = other DNA
gaatcactgggggtgaggcccaggacgctgtgtttttaacacccttcccaggtaattctcactcacagccaagcctgccgatggctggactccgtagtcagatctcagcaagcaggactggctcgtggttcatcttggggtctccagcacccagcagagtgctggcggggggactgtgttaagtagagccggatgggtcaggactggagtgtggggcctggctttgctaactgcagtcac

SEQ ID NO: 3258 - DNA, 241 bp, synthetic construct
  misc_feature 1..241: note = Description of artificial sequence: synthetic polynucleotide sequence
  source 1..241: mol_type = other DNA
aagatcctcatcactccaccccctaccccagcaccagggtcaggttcccttccaggaaaaacttgttggactcctttccaggtcattgactgcagttaggagtggcatgcagaagggaggctatctggagctgggacagaccaggcaagcggggaagggaactcttatcccaaccctgcattctggacagggaccgaaggtctcctggctgcagctcatacagctcatcttcattctcatc

SEQ ID NO: 3259 - DNA, 481 bp, synthetic construct
  misc_feature 1..481: note = Description of artificial sequence: synthetic polynucleotide sequence
  source 1..481: mol_type = other DNA
ctgggaccaccaggcccctcacccacaataactttaccctttactggcaaatgcacaagctggagatgatggcccattcgagttttaagattttccaagttgttatgaggtcagtgtcctcaatcgggacccagagaagataggtggcttgcctgaactttcagagggggcatctgtggtgtcttttgtggggtcctgtaggatttccacgtccctcttggaggaaaaatagaagtaagttgtctcaggtcagattgtctgggaagccaagtaggagatggagatttgcatataggaggtttactggggacattcacaggagggaacacccgaaggaaaagggaagaaagcagggttgggaagcagcaggagttgaggtgcaatgcagtcacaacagaggtcttagccaatcccatagggagcactcaagctgggacagcaaggaagctagaccttcacatccctcatctacctccgtcct

SEQ ID NO: 3260 - DNA, 481 bp, synthetic construct
  misc_feature 1..481: note = Description of artificial sequence: synthetic polynucleotide sequence
  source 1..481: mol_type = other DNA
cccatacaggcatagcctcccccatgatgaacactcagcaccagactgatacatttgttataatcaatgaacctacattgatgcatcattattacccaaggtccatggtttgtttacatgagggtttactcttggtgttgtacattctgtgggtttggacagatacatgatgtaatgtatatgacattatagtatcacacagactcatttcacttgtgactgagcttgtccttctttctttaacctgcctccaactgctgagaagccctttggctagggattgcagccaattttaatttgttttccactttcctgctctgaagttactttgtttgccagaggctggttggttcaaacccaaagggcagggagctgcaatggaaatccattcaacggtgctggaattgggatggcaaaaaggagcagcaggcaggtgtcagcagggagcagctctttgcatcccacagttcccagggagctt

SEQ ID NO: 3261 - DNA, 480 bp, synthetic construct
  misc_feature 1..480: note = Description of artificial sequence: synthetic polynucleotide sequence
  source 1..480: mol_type = other DNA
ggtctcaaactcctggcctcaagtcatcctccctcctcagcctcccaaagtgctgggattacaggtgtgatctcagacagcttacctcttaatcacctttccatctgagctggcagcagagctgggaaagtgcacccaacaccccagatgctgcaactttagtgcttcctgctccttctctgtgtggaactggcctgtttgggtacccagggccagtcccctccaagaccctctgtagaaaaagaccctactgtacacctcaattccattgcaggacaggacataattgaatcctgcctctccctgccccagtcacccatccctcccaagccattatcttgggacctgcaagggcctccaagccaagggtggcaaatccaaataccaaaggggccataatgatgtaaaatgtgtccaggcagaaggcaatagggagtagtggggcctctggtaacaattgtgtgtactctatatagagac

SEQ ID NO: 3262 - DNA, 480 bp, synthetic construct
  misc_feature 1..480: note = Description of artificial sequence: synthetic polynucleotide sequence
  source 1..480: mol_type = other DNA
attgtgatggtgatttagacacacacacacttatattggcttgggaaacaaaacaaataggcctatcgactggattcaacttttgattttgcagccaagcccctgtggcacagctgaggagcttgcaggtcagaaaggggatttagagccaaccaatagcaatatctccagacctctcctgacacgaagctcatctgacctcctgcccccattacacacatacacatgcacacacatgcatgcaggcacatgcacgcacgtcttctagtctccctgccttgaggacaaatgatcagatcctgcaactgtttccaggcccataagcccctgagcattgcagtgttgctacatgccttagtttcctctccgtctcctgtgacctcctcgtgccactccaggaagtgaaagtcttgagtgagaccagtagtttctcttaagtcctctctctgtctcgttctcctgggatatctacacttggtt

SEQ ID NO: 3263 - DNA, 481 bp, synthetic construct
  misc_feature 1..481: note = Description of artificial sequence: synthetic polynucleotide sequence
  source 1..481: mol_type = other DNA
tgcaaacagcaggctggagagtgaggggcttcttcctctacatccagctcctcccccatcctgctccaagtccagcatgttcctatctcttccccaggaccctgggctcttgggcacaaatcaagccatcaccagacagcctgtggggtggcaagagcagaggtttgtttctttgtgaacatctataggtaccaggctctgtgcaggccctattgttggtgagccatagaggtaccaacctcaccccatgaatcctcctttgtttcttttcttttcaacccctgggcctttaaaccttcgattaactgcccagtgcagcccaggtcatggtacactatgatctttggttcacatgagggttttctcttcattaatgtccctatttcccatactgggtgcccattctaatgcatttcaggtgtatctttctgtttgtatgtgctcttataaaacatgttttgccttttttttttttttttag

SEQ ID NO: 3264 - DNA, 360 bp, synthetic construct
  misc_feature 1..360: note = Description of artificial sequence: synthetic polynucleotide sequence
  source 1..360: mol_type = other DNA
cccaaagtgctggaattacaggtgcgagtcaccacgcctggccacagtttcttacttttgcattctgtactatgtttttaggatctacttgccttgcttctgatgcatttgatctttgcttctaatcacggacattgttctctatggagtgcaggggttacttttcacctgtccacacccccagtgatggacacctaggtgacctccaactctctgtcaccacaaataacacagcagtaaccatcctcagatgggttctcctggggagttgtgggaacatttcttcaggatatatagacccaagagctgaattgccaggtggtaggatctacatatccttagatattctacatgatgcca

SEQ ID NO: 3265 - DNA, 480 bp, synthetic construct
  misc_feature 1..480: note = Description of artificial sequence: synthetic polynucleotide sequence
  source 1..480: mol_type = other DNA
ggtcgttctccagagcggccccatccatctacattcccacaaacccgtgtaaccaacacttggcatttcccagatgtctaacttttgccagttgtacagtatcaagtgtcactttgctgttttatttttggagtttacatcttagtaccacttactcgctaagtcactttaggtaagtcacaacaacccagtgacataagcactgtgccaacaaaatgcagtcgattctgtgactcagagaggttgagtaacatttgcaaagtcacacagcaagtgtggaactaagatttgaacccagagcctgcacccttaaccactatgctattattatgttttgtctctctcctaaaatatcatctgggtctacattgcaagcctctttggcagggactgtgtggtaaacctctttggggccagtaaggaactgagctcagtgactttcttacggggtgctcagtgaatcattgttttacagcttta

SEQ ID NO: 3266 - DNA, 481 bp, synthetic construct
  misc_feature 1..481: note = Description of artificial sequence: synthetic polynucleotide sequence
  source 1..481: mol_type = other DNA
gaggggaaaagtgagagatgtttcttagagtttatctggaggactacagggtgcatgagcaaaagcggaactcatttgagctactacccccacaaagaagctgtttggggtctggtcatggtagataggcattcctaggcccctggcttcccaacaccatttggcccccggaagcagcttgtcatgaggttggggagcaggttggtgttggggggggccttgggggaaaggaaaaggagaagactgccaggcaacgaggaatcagaatctcaaaaagactcaattgaaggggctccaacactcgttgaaacggaggctcagagggctaaggtaatgtactcaggatcaaaggcagagcagaaactcaaaccatgtctctaggcacacagttcagaggtcttcccattattcctcaggaggagaagttcatggtcaagagtagggaagtattccttctcaagctttttttttttttgtctga

SEQ ID NO: 3267 - DNA, 360 bp, synthetic construct
  misc_feature 1..360: note = Description of artificial sequence: synthetic polynucleotide sequence
  source 1..360: mol_type = other DNA
caaagtgctaggattataggcgtgagccaccacccctggcctccttctcatgctctttaatcacagttcagagcagtgctggaggcttttaggggtagcaaaagagccttcttctccctttcagtgcctccttagaccctcaaagatagactccccgcctctgggaagaaaacatctaatgaactggacgtaatctcagcgcctgcgtctgtaaaatggctataataacaacaatctcccagagttgccgttaacagttgaaacagaatagtaaatgcaaggcatctagcacagccccagacacagagaaatctcccctggtcactctcacagaggtaagaagcacattaataataaaaa

SEQ ID NO: 3268 - DNA, 121 bp, synthetic construct
  misc_feature 1..121: note = Description of artificial sequence: synthetic polynucleotide sequence
  source 1..121: mol_type = other DNA
tggtcatcacgcatattgtactcaccatgcagaagttgtgctgccttaagctactgttcattgagcacttactggtcgccagtcccctttctaagggctccatgcaacttaactcccctaa

SEQ ID NO: 3269 - DNA, 361 bp, synthetic construct
  misc_feature 1..361: note = Description of artificial sequence: synthetic polynucleotide sequence
  source 1..361: mol_type = other DNA
tcctatgagttgccaattattatcccccactttacagataaggaaactgaggctccaagtggtttaaaaaatgaacttacccagattgtagtgcgttggtaggtagggataacctgaaagttgggaaatttcaccccaaagctcaccatctgagctccattcatctcccaccagctgagatggaacgttatgctgttcccagaagagatgcatgcactgatcttcagatagtttaagtctgagttagaacattgtggcgacacctgatttccctcgggggagagagaggtgaattgttatttcagacacctgtttagtgtctacacttagcctttcaaatcctgcatgcagtgtgaagtgg

SEQ ID NO: 3270 - DNA, 121 bp, synthetic construct
  misc_feature 1..121: note = Description of artificial sequence: synthetic polynucleotide sequence
  source 1..121: mol_type = other DNA
ggatgaaaataaaccccaaaaaggacttttgatggcaaaaagatcaggaatattttctcgagttggatgtggaaggtggtggcccagggggaagcacagtttcaaagaggaccttctaaaa

SEQ ID NO: 3271 - DNA, 360 bp, synthetic construct
  misc_feature 1..360: note = Description of artificial sequence: synthetic polynucleotide sequence
  source 1..360: mol_type = other DNA
atactgcccatttaccaaaaagacacagaccgcgcctctgccctgcccccacatggctcctcaaaaggagaaattgtcttgccacccacgccttccctcgccggggtgctggggggccaacagcaattcaaaaaggctatagagtgggctgagactttggagatgggtagtttggttcaaatctcagcccactaatccctctgagcctgtctcttcatctgaaaaacaggaatacaaatagctgatgtgtaagttagaccaaatggggtaatgcctacgagtcatgtcatttggtacctggcacttgctggacactgtgaattctagttctatatcattgccacggatgaagagaggctg

SEQ ID NO: 3272 - DNA, 360 bp, synthetic construct
  misc_feature 1..360: note = Description of artificial sequence: synthetic polynucleotide sequence
  source 1..360: mol_type = other DNA
ccatgcgcagaaacatgctgagagctgggagaaggtgagctagagggatacagtccctgccctcagggagagctgaagggctctctctcctgccacgggatgatcagggccatcttttccctccatcccgctctggcaatgtggtttggagaaacagtccaatgaaggggcctttgaagcacttcctaagcatctatagacataggaaacttggctctggggatagaggaaggtcccatgccaagattcaagtagatcttggtgtgactgggaggcagctgtggcgttgtggggaaacctagagtcttgggcctgaatttcagctttgacaccctctaatgtaatgggcttcctttgact

SEQ ID NO: 3273 - DNA, 121 bp, synthetic construct
  misc_feature 1..121: note = Description of artificial sequence: synthetic polynucleotide sequence
  source 1..121: mol_type = other DNA
gtaggcttcccacatagctggcaccccacacagaactcccttggccttctgatgatcctgcaggacaatcttttttgttttttgttttttgttttttttttgagatggtatctcactttgt

SEQ ID NO: 3274 - DNA, 480 bp, synthetic construct
  misc_feature 1..480: note = Description of artificial sequence: synthetic polynucleotide sequence
  source 1..480: mol_type = other DNA
aatcttcattctccagaactaatattgggaaaactgatgttcagagaggtcaagtgacttggctaaggcatcacagccagaattcagatgcaagctcctaaaccacatgaccttggacaagccatttcactgaggcgtgtgaacctcctctaagctcaaatgggcataacactctaccctgccttttccccagagctttttgggaactcagatggtgtggaggatggaggcagaagtccactgtgagctgcaaatccttgatcacccaagaggaagtgcttaaggtgcaggcttcagtcttagggaagcaggaagtggggcgctgaaatgtgtattgggggcttctgggagggggtttcttcttgtccaggttgagccaatgacgcagatcttaggccctctggtgactttttgcccaggcaacttctcagtggtggtgatggggagcgtggccagaccatccaagctgccctgctggct

SEQ ID NO: 3275 - DNA, 240 bp, synthetic construct
  misc_feature 1..240: note = Description of artificial sequence: synthetic polynucleotide sequence
  source 1..240: mol_type = other DNA
ctgaggtgatactcctgccttggactcccaaagtgctggaatttctacagatgtgagccaccatgcccggcctatggggcccttcttgttcctatgaagtctgcagggtccccttatgcaaaagaacagaaagctcggcttcacaaagtttgacctcggaagaaatggaagggaaagggtccctttgtcactctcacaaacgtaagaagcaaactaataatgatggccatcacacatatt

SEQ ID NO: 3276 - DNA, 241 bp, synthetic construct
  misc_feature 1..241: note = Description of artificial sequence: synthetic polynucleotide sequence
  source 1..241: mol_type = other DNA
atactcaccatgtagaagctgtgctgccttaaacttctgttcattcagcacttactgattgccagtcccattgctaagggctccgcgtgacttaactcccctaatccttgtgagttgccaattattattcgcattttatagatatggaaactgaggctccaagtggtttaaaaaatgaacttgcccaggttacagtgtgttggtaggtaggggtagtctcaaagttggtaaattttacgcc

SEQ ID NO: 3277 - DNA, 241 bp, synthetic construct
  misc_feature 1..241: note = Description of artificial sequence: synthetic polynucleotide sequence
  source 1..241: mol_type = other DNA
aaagctcacgatacttgccttctttcccttctcaatttatttctctgactgtgtgcttaaccacacagcagtgtcatccagagtttgaagcagagctcatcaataagtgggggtgggctaaatgtctccaggctcctccctgcggtccctcccaccatcccccatctgtgataccacctgtgtctctatgcttgagcccagacaggacaagggtgatcatttcattgggaacattttgact

SEQ ID NO: 3278 - DNA, 241 bp, synthetic construct
  misc_feature 1..241: note = Description of artificial sequence: synthetic polynucleotide sequence
  source 1..241: mol_type = other DNA
ggggggaaagagcaccagcctgggagtcttggcagggggagtgggggagaaggggcaggggcagccaccgacaggctatgaggtcttgtgcaagtcacgtccttcccggggtctcagtcttgtcatctgcagagtgaaggaaagaggtcaagcttgaaggtccctggcagacccaatgccctgtgagaaaactgagtttgggtaacttattattttatagatatggaattatcttatagaa

SEQ ID NO: 3279 - DNA, 239 bp, synthetic construct
  misc_feature 1..239: note = Description of artificial sequence: synthetic polynucleotide sequence
  source 1..239: mol_type = other DNA
atgttatagatatggaatcattttatagatatggcccaaagtccaaagtcacacaactcattcacggagttgctaggatcagtctggagctcttgtcacgagatcacactgcctcaaagaggaggcagattgctgcaatgtaggttcttaataaagagcatgggtggaatgggaggcgggcatcaggcaggagctggggcaaaggtgtcttttctcactgctctgagagaacagatttt

SEQ ID NO: 3280 - DNA, 240 bp, synthetic construct
  misc_feature 1..240: note = Description of artificial sequence: synthetic polynucleotide sequence
  source 1..240: mol_type = other DNA
gtgcctgtgtccctgaccaaggggctgggagaggtggagcatctcacccccaaccatctcccagctttggccctgctccaggaaaagggcggtggccccatctttcagttctgcttcctctagtcatggttggctgggatctcgctgcaagccggttatgtttgggttcctgcagcccccgctcaaccgtcatgaacaagtgggcccagccagtgccccagcttggactggaaagatcat

SEQ ID NO: 3281 - DNA, 121 bp, synthetic construct
  misc_feature 1..121: note = Description of artificial sequence: synthetic polynucleotide sequence
  source 1..121: mol_type = other DNA
tctctgtgacatccgggggtctgtgctgagcctctccccaggcagtgaaagctgtggatgcgtgaaagaaaatgggtctctgggccgggtgtggtggctcacacctgtaatcccagcactt

SEQ ID NO: 3282 - DNA, 241 bp, synthetic construct
  misc_feature 1..241: note = Description of artificial sequence: synthetic polynucleotide sequence
  source 1..241: mol_type = other DNA
gtctcaaaaaaaaaaagaaaaagaaaatgagtctcaggaatggggtggcaagttgagtgtgtgttttctcatgagcttactcttcaatgtattctcttctgggcccagaacagggcagtaggagcctccctctggtcttccagcttcagggccagctctcctcttacctcctccaggaagctccctctgtttctttccagccttcatctgcatgtcatgtgtggtgggttgaaaggtggcc

SEQ ID NO: 3283 - DNA, 121 bp, synthetic construct
  misc_feature 1..121: note = Description of artificial sequence: synthetic polynucleotide sequence
  source 1..121: mol_type = other DNA
ccccaaaagatatgtccatgtcaaatccctggaacctgtcagtgtgactttatttgggaaaagggtctttgcagatagaattaagttaaggggctgggtgcagtggctcatgcctgtaatc

SEQ ID NO: 3284 - DNA, 240 bp, synthetic construct
  misc_feature 1..240: note = Description of artificial sequence: synthetic polynucleotide sequence
  source 1..240: mol_type = other DNA
agcctctgtctcaaaagaaggcaaaaaaagaattaaagatcttgaaatgacatcatcctggattatctaggtgggtcctaaatccaatgacaagtgtctttataagagaaagagacttgctacatgaggagtaggtgatgtggccactaaagctgagtttagagtgatgcagccacaagaccacaagtcaaggatcaccagtagttcccagcagctagaggaggcaaggaagcattctcc

SEQ ID NO: 3285 - DNA, 360 bp, synthetic construct
  misc_feature 1..360: note = Description of artificial sequence: synthetic polynucleotide sequence
  source 1..360: mol_type = other DNA
cctcgagcctccagaggcagcgtggccctgctgacaccttggcttcaacttctggcctccagaaccatgagagaataaagtgctgttgttctgagctacctggatgctggtaccttgtttcagcagccctgggaaatgaatataccatggaaacatggacctgaaccacggatcctggcaggagccttagagccacacagatgagccttcagcttggctttccccagcaagagctacatgatcttgaggaagctgcttgtcttctctgggtctcaagttcttcatctgccaatggagacaataatgcttacttcctaggttttaacagctttattgagatgtaattcacatatacaattt

SEQ ID NO: 3286 - DNA, 241 bp, synthetic construct
  misc_feature 1..241: note = Description of artificial sequence: synthetic polynucleotide sequence
  source 1..241: mol_type = other DNA
gattgcacccctgcactccagcctgggtgacagagactccgtcttaaaaaaaaaaaaaaaaaaaaaaaaaaaaaagtagagttcagtgttcttttgggaatactcagagagttgtgtgaccatctcccatccccacagtcaattttagcacatttcatcaccccctaaagaaactccagacccatcagcagttgttccccatttccttccaaaatccctctctgccaagccctaggcaacc

SEQ ID NO: 3287 - DNA, 360 bp, synthetic construct
  misc_feature 1..360: note = Description of artificial sequence: synthetic polynucleotide sequence
  source 1..360: mol_type = other DNA
gggatttcaggcatgagccaccacgccccacccctcctactttatgtctccatggatttgcctgttttggtcatttcaaataaatagaatcatacaatatgtgaccctttgtgtccggcttcttcacttagcattttttttaaggttcatccatgttccagcatgtatcagtgctttctccctttaatggtggaatactttattgtatagataagcaacattttgtttatccatttattttttggtggatatttgggctgtttttatattttggctattttgaattatccttctgtgaacattcgtgtataggtttttgtgtggatatatctggtttttcttgttttcttttgttttatt

SEQ ID NO: 3288 - DNA, 480 bp, synthetic construct
  misc_feature 1..480: note = Description of artificial sequence: synthetic polynucleotide sequence
  source 1..480: mol_type = other DNA
aatacataatatgatacatatttatggggtatatgtgaatatttattacatgcatagaaggtataatgatcatgtcaggatatttgaggtatccacatttgggattgtttaaagattaaatgaaatagtgttaaaagtatttaatatgcccttcaacaaatgatgaggaaatcttagaatctgctcagactccttcagtttacatattaggaaactgaggcacagaaaggagcagagacttgctcaagtccacccaaagcagtagagcattgtggttaaatgcaggacttcagtcagactgtctgggttcaaatcctggttccacttggacatgggtttccttacataaatcacttcacctctctgagcctcagttttctcatatgcaaagtgaggataataataataccttccttacatggttactgatatgagtattaaatgtgccagctcatgtgcctggcgtataggaggtgcttt

SEQ ID NO: 3289 - DNA, 481 bp, synthetic construct
  misc_feature 1..481: note = Description of artificial sequence: synthetic polynucleotide sequence
  source 1..481: mol_type = other DNA
ataaaccttagctgttaccactcatggcattgccaaatgtgggacgggtctcctgactctctggtgtgagattgatggaatccacactttccagttcccttttctacctcctgggtatcttctcatatggttgtaagttccttggaggaagggaatgtggcttgctctctccaccacgctgagcatataagaggtgctgaatgagcgcttttattcactcctctcatccccagccctcaccagctgggagttgttgtaggtgtcaattttctgcctctttccaacaccctgtgaggtgactgagcattgtcttccctcccaggcagctcacagtgtgccaccatggagttggggcccctagaaggtggctacctggagcttcttaacagcgatgctgaccccctgtgcctctaccacttctatgaccagatggacctggctggagaagaagagattgagctctactcaggtgggccctcct

SEQ ID NO: 3290 - DNA, 121 bp, synthetic construct
  misc_feature 1..121: note = Description of artificial sequence: synthetic polynucleotide sequence
  source 1..121: mol_type = other DNA
cttttcctcccagaacccgacacagacaccatcaactgcgaccagttcagcaggctgttgtgtgacatggaaggtgatgaagagaccagggaggcttatgccaatatcggtgaggaagcac

SEQ ID NO: 3291 - DNA, 121 bp, synthetic construct
  misc_feature 1..121: note = Description of artificial sequence: synthetic polynucleotide sequence
  source 1..121: mol_type = other DNA
attgactgcgcttttccttgtctgggcagcggaactggaccagtatgtcttccaggactcccagctggagggcctgagcaaggacattttcagtaagtttgtggtgggtggggaggtcttg

SEQ ID NO: 3292 - DNA, 121 bp, synthetic construct
  misc_feature 1..121: note = Description of artificial sequence: synthetic polynucleotide sequence
  source 1..121: mol_type = other DNA
gtctctggtttttctcaaagtagagcacataggaccagatgaagtgatcggtgagagtatggagatgccagcagaagttgggcagaaaagtcagaaaagacgtgagtgagcccctccctga

SEQ ID NO: 3293 - DNA, 121 bp, synthetic construct
  misc_feature 1..121: note = Description of artificial sequence: synthetic polynucleotide sequence
  source 1..121: mol_type = other DNA
ctctccctggggcagctgatcacatgttttctctgcagccttcccagaggagcttccggcagacctgaagcactggaagccaggtgtgcagggcaggtgggctggggttgggaagggtgga

SEQ ID NO: 3294 - DNA, 148 bp, synthetic construct
  misc_feature 1..148: note = Description of artificial sequence: synthetic polynucleotide sequence
  source 1..148: mol_type = other DNA
gctgagccccccactgtggtgactggcagtctcctagtgagaccagtgagcgactgctccaccctgccctgcctgccactgcctgcgctgttcaaccaggagccagcctccggccagatgcgcctggagaaaaccgaccagattccca

SEQ ID NO: 3295 - DNA, 145 bp, synthetic construct
  misc_feature 1..145: note = Description of artificial sequence: synthetic polynucleotide sequence
  source 1..145: mol_type = other DNA
gtgcctttctccagttcctcgttgagctgcctgaatctccctgagggacccatccagtttgtccccaccatctccactctgccccatgggctctggcaaatctctgaggctggaacaggggtctccagtatattcatctaccatg

SEQ ID NO: 3296 - DNA, 166 bp, synthetic construct
  misc_feature 1..166: note = Description of artificial sequence: synthetic polynucleotide sequence
  source 1..166: mol_type = other DNA
ggtgaggtgccccaggccagccaagtaccccctcccagtggattcactgtccacggcctcccaacatctccagaccggccaggctccaccagccccttcgctccatcagccactgacctgcccagcatgcctgaacctgccctgacctcccgagcaaacatgacag

SEQ ID NO: 3297 - DNA, 121 bp, synthetic construct
  misc_feature 1..121: note = Description of artificial sequence: synthetic polynucleotide sequence
  source 1..121: mol_type = other DNA
tctggcacctgcttctccatctccagagcacaagacgtcccccacccaatgcccggcagctggagaggtctccaacaagcttccaaaatggcctggtgagtgatgcgggatctctctgccc

SEQ ID NO: 3298 - DNA, 353 bp, synthetic construct
  misc_feature 1..353: note = Description of artificial sequence: synthetic polynucleotide sequence
  source 1..353: mol_type = other DNA
gagccggtggagcagttctaccgctcactgcaggacacgtatggtgccgagcccgcaggcccggatggcatcctagtggaggtggatctggtgcaggccaggctggagaggagcagcagcaagagcctggagcgggaactggccaccccggactgggcagaacggcagctggcccaaggaggcctggctgaggtgctgttggctgccaaggagcaccggcggccgcgtgagacacgagtgattgctgtgctgggcaaagctggtcagggcaagagctattgggctggggcagtgagccgggcctgggcttgtggccggcttccccagtacgactttgtcttctctgtcccctg

SEQ ID NO: 3299 - DNA, 470 bp, synthetic construct
  misc_feature 1..470: note = Description of artificial sequence: synthetic polynucleotide sequence
  source 1..470: mol_type = other DNA
ccattgcttgaaccgtccgggggatgcctatggcctgcaggatctgctcttctccctgggcccacagccactcgtggcggccgatgaggttttcagccacatcttgaagagacctgaccgcgttctgctcatcctagacggcttcgaggagctggaagcgcaagatggcttcctgcacagcacgtgcggaccggcaccggcggagccctgctccctccgggggctgctggccggccttttccagaagaagctgctccgaggttgcaccctcctcctcacagcccggccccggggccgcctggtccagagcctgagcaaggccgacgccctatttgagctgtccggcttctccatggagcaggcccaggcatacgtgatgcgctactttgagagctcagggatgacagagcaccaagacagagccctgacgctcctccgggaccggccacttcttctcagtcacagccaca

SEQ ID NO: 3300 - DNA, 472 bp, synthetic construct
  misc_feature 1..472: note = Description of artificial sequence: synthetic polynucleotide sequence
  source 1..472: mol_type = other DNA
gccctactttgtgccgggcagtgtgccagctctcagaggccctgctggagcttggggaggacgccaagctgccctccacgctcacgggactctatgtcggcctgctgggccgtgcagccctcgacagcccccccggggccctggcagagctggccaagctggcctgggagctgggccgcagacatcaaagtaccctacaggaggaccagttcccatccgcagacgtgaggacctgggcgatggccaaaggcttagtccaacacccaccgcgggccgcagagtccgagctggccttccccagcttcctcctgcaatgcttcctgggggccctgtggctggctctgagtggcgaaatcaaggacaaggagctcccgcagtacctagcattgaccccaaggaagaagaggccctatgacaactggctggagggcgtgccacgctttctggctgggctgatcttccagcctcccgc

SEQ ID NO: 3301 - DNA, 357 bp, synthetic construct
  misc_feature 1..357: note = Description of artificial sequence: synthetic polynucleotide sequence
  source 1..357: mol_type = other DNA
ccgctgcctgggagccctactcgggccatcggcggctgcctcggtggacaggaagcagaaggtgcttgcgaggtacctgaagcggctgcagccggggacactgcgggcgcggcagctgctggagctgctgcactgcgcccacgaggccgaggaggctggaatttggcagcacgtggtacaggagctccccggccgcctctcttttctgggcacccgcctcacgcctcctgatgcacatgtactgggcaaggccttggaggcggcgggccaagacttctccctggacctccgcagcactggcatttgcccctctggattggggagcctcgtgggactcagctgtgtcacccgtttcag

SEQ ID NO: 3302 - DNA, 206 bp, synthetic construct
  misc_feature 1..206: note = Description of artificial sequence: synthetic polynucleotide sequence
  source 1..206: mol_type = other DNA
ggtctagcctggtcaccgtgcctgggtctgaggccctccctccacagggctgccttgagcgacacggtggcgctgtgggagtccctgcagcagcatggggagaccaagctacttcaggcagcagaggagaagttcaccatcgagcctttcaaagccaagtccctgaaggatgtggaagacctgggaaagcttgtgcagactcagag

SEQ ID NO: 3303 - DNA, 121 bp, synthetic construct
  misc_feature 1..121: note = Description of artificial sequence: synthetic polynucleotide sequence
  source 1..121: mol_type = other DNA
ccctaacattgcctgttctctccaggacgagaagttcctcggaagacacagctggggagctccctgctgttcgggacctaaagaaactggagtttgcgtaagcaaaggggtggattgtctt

SEQ ID NO: 3304 - DNA, 360 bp, synthetic construct
  misc_feature 1..360: note = Description of artificial sequence: synthetic polynucleotide sequence
  source 1..360: mol_type = other DNA
taacatggtcattcccatcactcattcaacagaggtattgagcacttgaatgactgaggctgctgtcctcatgagctgacagtctaatcaactcccctctggaggaggtcagggggacttcctggaggaggtgatatctgcactgaagcttcagtgaggataaggaatgagctgagtggggagaggggagtaagaaaggctttccaggaattgtaatttcgccagggatcagaaaaggcccaatgtgtccccaaccttccataggaggatgccactatgactatggagtccttttccctcctgtggccaggaactgcacaacgtcccttgtgcctgagcttgtttacttccacagccaag

SEQ ID NO: 3305 - DNA, 361 bp, synthetic construct
  misc_feature 1..361: note = Description of artificial sequence: synthetic polynucleotide sequence
  source 1..361: mol_type = other DNA
ggatggcctccccagggagaatctttcccccattttgaaattcccaggagcttttgatgtgcagctaggatgaaaaagcaaccctacttgcctgggactatcctggtttgaaaactgaaagtcttgcatcccaagaagccccttagtcccaggcaaactgggacagttggttgctctatgtgtggccagggctgggggccacaccctaggcagtgttgctggggtgacagaaatggagacctaggcaaggctctagggagtccagttgtgtctgggtcactgaggaggggcagcccaccatacatgggccccaagaaagcacaataattattatatttagatctgtcagaatatagctttt

SEQ ID NO: 3306 - DNA, 121 bp, synthetic construct
  misc_feature 1..121: note = Description of artificial sequence: synthetic polynucleotide sequence
  source 1..121: mol_type = other DNA
tctttccttcttttctttctttcctttctctcctttctctttctttctttccattctctttctttctctttccttccctcccttccttctcttccttccttctttttcctttccttttctt

SEQ ID NO: 3307 - DNA, 121 bp, synthetic construct
  misc_feature 1..121: note = Description of artificial sequence: synthetic polynucleotide sequence
  source 1..121: mol_type = other DNA
ccttgctctttgcctcctaggctgggccctgtctcaggcccccaggctttccccaaactggtgcggatcctcacggccttttcctccctgcagcatctggagtgagtatagactctgggac

SEQ ID NO: 3308 - DNA, 121 bp, synthetic construct
  misc_feature 1..121: note = Description of artificial sequence: synthetic polynucleotide sequence
  source 1..121: mol_type = other DNA
gattccacctgcagcctggatgcgctgagtgagaacaagatcggggacgagggtgtctcgcagctctcagccaccttcccccagctgaagtccttggaaaccctcaagtgagtgagctggg

SEQ ID NO: 3309 - DNA, 121 bp, synthetic construct
  misc_feature 1..121: note = Description of artificial sequence: synthetic polynucleotide sequence
  source 1..121: mol_type = other DNA
tcactgtgtccccgcagtctgtcccagaacaacatcactgacctgggtgcctacaaactcgccgaggccctgccttcgctcgctgcatccctgctcaggctaaggtgagtggggccccgga

SEQ ID NO: 3310 - DNA, 121 bp, synthetic construct
  misc_feature 1..121: note = Description of artificial sequence: synthetic polynucleotide sequence
  source 1..121: mol_type = other DNA
tggcctctgtttccgacagcttgtacaataactgcatctgcgacgtgggagccgagagcttggctcgtgtgcttccggacatggtgtccctccgggtgatggagtgagtgtgggagtctgg

SEQ ID NO: 3311 - DNA, 121 bp, synthetic construct
  misc_feature 1..121: note = Description of artificial sequence: synthetic polynucleotide sequence
  source 1..121: mol_type = other DNA
ggtgagtttctcttgccagcgtccagtacaacaagttcacggctgccggggcccagcagctcgctgccagccttcggaggtgtcctcatgtggagacgctggcgtaagtccaggcaaccct

SEQ ID NO: 3312 - DNA, 121 bp, synthetic construct
  misc_feature 1..121: note = Description of artificial sequence: synthetic polynucleotide sequence
  source 1..121: mol_type = other DNA
ctgagtcccatccccccttgcaggatgtggacgcccaccatcccattcagtgtccaggaacacctgcaacaacaggattcacggatcagcctgagatgatcccagctgtgctctggacagg

SEQ ID NO: 3313 - DNA, 309 bp, synthetic construct
  misc_feature 1..309: note = Description of artificial sequence: synthetic polynucleotide sequence
  source 1..309: mol_type = other DNA
gtcaaatctggaaggggaaggagctcaggtagtcgcggaggacggggttgagggggatgcgagccaggttctcgcggcccacggtggccacgatgcgctggcggcacagctcctgcagcggccgcacgcggcgctggcgcagcggggcccccagcatgcggcgcggcgccgccacgtagtgctccagcagctcgaagaggcagtcgaagctctcgcggctgccatccaggtgaaagcggccggcctgaaagtgcacgcggatgctcgtgggtcccgaggccatcttcacgctaagggcgaaaaagcagt

SEQ ID NO: 3314 - DNA, 328 bp, synthetic construct
  misc_feature 1..328: note = Description of artificial sequence: synthetic polynucleotide sequence
  source 1..328: mol_type = other DNA
tccgctggcggctgtcgcgcaccaggaaggtgcccacgggctcggcgcgcagccgctcgtgcgccccgtgcacgctcaggggcccccagtagaatccgcaggcgtccaggagcgcgctggcgcgcgtgatgcgccggtaatcggcgtgcgaacggaatgtgcggaagtgcgtgtcgccgggggccggggccgggaccgcggggcacggccgcgggcgcgcgggggccgcgggcgaggaggaggaagaggaggaaggttctggccgccgtcggggctctgctgctgtggagactgcattgtcggctgccacctggttgtgtgctaccat

SEQ ID NO: 3315 - DNA, 121 bp, synthetic construct
  misc_feature 1..121: note = Description of artificial sequence: synthetic polynucleotide sequence
  source 1..121: mol_type = other DNA
ctttggtggcgccttgctgggaaaagtagctcctggccagggtgtgtaatcgtgaaactagcctctgccccggaattcctcagccctgcttttcctctaacccatgtgtcgggaaggttcc

SEQ ID NO: 3316 - DNA, 121 bp, synthetic construct
  misc_feature 1..121: note = Description of artificial sequence: synthetic polynucleotide sequence
  source 1..121: mol_type = other DNA
ttctgtgaaatcctctgcatgggcttttgaaattccaaggttctcttcttaagggcaggctgcacagtaatttcccgaggaaggctttgttccataaacccaggccttacaaacaacagtt

SEQ ID NO: 3317 - DNA, 121 bp, synthetic construct
  misc_feature 1..121: note = Description of artificial sequence: synthetic polynucleotide sequence
  source 1..121: mol_type = other DNA
atacttcatgccactgaacggtacacttaaaatggttaaggtggtacatgtaacgttacgtatattctgccatgctaaaagaaaagagaagaaaccaccaaagttatcaatatactcatga

SEQ ID NO: 3318 - DNA, 121 bp, synthetic construct
  misc_feature 1..121: note = Description of artificial sequence: synthetic polynucleotide sequence
  source 1..121: mol_type = other DNA
aattccggctgcataaattgatagacatggaacaggtgtggtgtacagtagattgttgatgtatctcatgcccatttctggagaaccttgtggtggaactccaatgtgggatttccacaac

SEQ ID NO: 3319 - DNA, 121 bp, synthetic construct
  misc_feature 1..121: note = Description of artificial sequence: synthetic polynucleotide sequence
  source 1..121: mol_type = other DNA
taaaagatcatgttgaatggaatatgtaagacttggctcatagaaacctaatcagatggttagagatgctggcagtttaggacctgctgccataaatgtgtgaacaaccttttgtaatcta

SEQ ID NO: 3320 - DNA, 121 bp, synthetic construct
  misc_feature 1..121: note = Description of artificial sequence: synthetic polynucleotide sequence
  source 1..121: mol_type = other DNA
tccatgttcgagtgcaagaaaagaaaagccattcacaatgagcccataaagaactgctgcaggacacagaaaagaaaatgccaccatgaacacttggaagaaaatagtggagttttctcaa

SEQ ID NO: 3321 - DNA, 121 bp, synthetic construct
  misc_feature 1..121: note = Description of artificial sequence: synthetic polynucleotide sequence
  source 1..121: mol_type = other DNA
tcccttcacaagagacagattagcagaggctggcttggggtcaggctgatgaaaggcctactattcccaattccttaaacccaagaggtaaaggaggagggggaaatgccgtgcaggctgg

SEQ ID NO: 3322 - DNA, 121 bp, synthetic construct
  misc_feature 1..121: note = Description of artificial sequence: synthetic polynucleotide sequence
  source 1..121: mol_type = other DNA
aaaggtctagaaatcgatcacgtggcaacccctagctgcaagggaagctggaaagtgaatatctcgcttgtttagtctccatagtggaaaacaggaaaaggtgaaggcgtattgaaaatga

SEQ ID NO: 3323 - DNA, 174 bp, synthetic construct
  misc_feature 1..174: note = Description of artificial sequence: synthetic polynucleotide sequence
  source 1..174: mol_type = other DNA
gatggctgacccggctgcggggccgccgccgagcgagggcgaggagagcaccgtgcgcttcgcccgcaaaggcgccctccggcagaagaacgtgcatgaggtcaagaaccacaaattcaccgcccgcttcttcaagcagcccaccttctgcagccactgcaccgacttcatctg

SEQ ID NO: 3324 - DNA, 121 bp, synthetic construct
  misc_feature 1..121: note = Description of artificial sequence: synthetic polynucleotide sequence
  source 1..121: mol_type = other DNA
gggccccccgggctgcctgacatacacctccttctgcttttgcaggggcttcgggaagcagggattccagtgccaaggtaggctctggggctttggggatgctatttgtgggaagagaggg

SEQ ID NO: 3325 - DNA, 121 bp, synthetic construct
  misc_feature 1..121: note = Description of artificial sequence: synthetic polynucleotide sequence
  source 1..121: mol_type = other DNA
ctgattttctcttttgcagtttgctgctttgtggtgcacaagcggtgccatgaatttgtcacattctcctgccctggcgctgacaagggtccagcctccgatgtaagtaatgggcatcgat

SEQ ID NO: 3326 - DNA, 121 bp, synthetic construct
  misc_feature 1..121: note = Description of artificial sequence: synthetic polynucleotide sequence
  source 1..121: mol_type = other DNA
tccaggacccccgcagcaaacacaagtttaagatccacacgtactccagccccacgttttgtgaccactgtgggtcactgctgtatggactcatccaccaggggatgaaatgtgacagtaa

SEQ ID NO: 3327 - DNA, 121 bp, synthetic construct
  misc_feature 1..121: note = Description of artificial sequence: synthetic polynucleotide sequence
  source 1..121: mol_type = other DNA
catgatgaatgtgcacaagcgctgcgtgatgaatgttcccagcctgtgtggcacggaccacacggagcgccgcggccgcatctacatccaggcccacatcgacagggacgtcctcattgtc

SEQ ID NO: 3328 - DNA, 158 bp, synthetic construct
  misc_feature 1..158: note = Description of artificial sequence: synthetic polynucleotide sequence
  source 1..158: mol_type = other DNA
gtaagagatgctaaaaaccttgtacctatggaccccaatggcctgtcagatccctacgtaaaactgaaactgattcccgatcccaaaagtgagagcaaacagaagaccaaaaccatcaaatgctccctcaaccctgagtggaatgagacatttagatt

SEQ ID NO: 3329 - DNA, 136 bp, synthetic construct
  misc_feature 1..136: note = Description of artificial sequence: synthetic polynucleotide sequence
  source 1..136: mol_type = other DNA
gtcagctgaaagaatcggacaaagacagaagactgtcagtagagatttgggattgggatttgaccagcaggaatgacttcatgggatctttgtcctttgggatttctgaacttcagaaagccagtgttgatggctg

SEQ ID NO: 3330 - DNA, 121 bp, synthetic construct
  misc_feature 1..121: note = Description of artificial sequence: synthetic polynucleotide sequence
  source 1..121: mol_type = other DNA
gtctcccttcaggtttaagttactgagccaggaggaaggcgagtacttcaatgtgcctgtgccaccagaaggaagtgaggccaatgaagaactgcggcagaaatttgaggtgaggtttctt

SEQ ID NO: 3331 - DNA, 148 bp, synthetic construct
  misc_feature 1..148: note = Description of artificial sequence: synthetic polynucleotide sequence
  source 1..148: mol_type = other DNA
gagggccaagatcagtcagggaaccaaggtcccggaagaaaagacgaccaacactgtctccaaatttgacaacaatggcaacagagaccggatgaaactgaccgattttaacttcctaatggtgctggggaaaggcagctttggcaag

SEQ ID NO: 3332 - DNA, 121 bp, synthetic construct
  misc_feature 1..121: note = Description of artificial sequence: synthetic polynucleotide sequence
  source 1..121: mol_type = other DNA
agcttccctctttcctgtattcccactgttcctggccaccgccccccacagccatgtacaatgcattggcgaattctgacagttccttcaaagtatatcatgtattcactaacttctcttc

SEQ ID NO: 3333 - DNA, 175 bp, synthetic construct
  misc_feature 1..175: note = Description of artificial sequence: synthetic polynucleotide sequence
  source 1..175: mol_type = other DNA
ggtcatgctttcagaacgaaaaggcacagatgagctctatgctgtgaagatcctgaagaaggacgttgtgatccaagatgatgacgtggagtgcactatggtggagaagcgggtgttggccctgcctgggaagccgcccttcctgacccagctccactcctgcttccagaccatg

SEQ ID NO: 3334 - DNA, 121 bp, synthetic construct
  misc_feature 1..121: note = Description of artificial sequence: synthetic polynucleotide sequence
  source 1..121: mol_type = other DNA
gctgtcctcttccaggaccgcctgtactttgtgatggagtacgtgaatgggggcgacctcatgtatcacatccagcaagtcggccggttcaaggagccccatgctgtgtaagtgagaacta

SEQ ID NO: 3335 - DNA, 121 bp, synthetic construct
  misc_feature 1..121: note = Description of artificial sequence: synthetic polynucleotide sequence
  source 1..121: mol_type = other DNA
catcgctttttttttttttttaatttcagattttacgctgcagaaattgccatcggtctgttcttcttacagagtaagggcatcatttaccggtaagtgaacactgctgtactttccatct

SEQ ID NO: 3336 - DNA, 140 bp, synthetic construct
  misc_feature 1..140: note = Description of artificial sequence: synthetic polynucleotide sequence
  source 1..140: mol_type = other DNA
gtgacctaaaacttgacaacgtgatgctcgattctgagggacacatcaagattgccgattttggcatgtgtaaggaaaacatctgggatggggtgacaaccaagacattctgtggcactccagactacatcgcccccgag

SEQ ID NO: 3337 - DNA, 121 bp, synthetic construct
  misc_feature 1..121: note = Description of artificial sequence: synthetic polynucleotide sequence
  source 1..121: mol_type = other DNA
gggtgccttctcttttctagataattgcttatcagccctatgggaagtccgtggattggtgggcatttggagtcctgctgtatgaaatgttggctgggcaggtaattgaattttaagtgat

SEQ ID NO: 3338 - DNA, 121 bp, synthetic construct
  misc_feature 1..121: note = Description of artificial sequence: synthetic polynucleotide sequence
  source 1..121: mol_type = other DNA
catacaggcaccctttgaaggggaggatgaagatgaactcttccaatccatcatggaacacaacgtagcctatcccaagtctatgtccaaggaagctgtggccatctgcaaaggggtaagt

SEQ ID NO: 3339 - DNA, 142 bp, synthetic construct
  misc_feature 1..142: note = Description of artificial sequence: synthetic polynucleotide sequence
  source 1..142: mol_type = other DNA
gctgatgaccaaacacccaggcaaacgtctgggttgtggacctgaaggcgaacgtgatatcaaagagcatgcatttttccggtatattgattgggagaaacttgaacgcaaagagatccagcccccttataagccaaaagct

SEQ ID NO: 3340 - DNA, 160 bp, synthetic construct
  misc_feature 1..160: note = Description of artificial sequence: synthetic polynucleotide sequence
  source 1..160: mol_type = other DNA
gtgtgggcgaaatgctgaaaacttcgaccgatttttcacccgccatccaccagtcctaacacctcccgaccaggaagtcatcaggaatattgaccaatcagaattcgaaggattttcctttgttaactctgaatttttaaaacccgaagtcaagagctaa

SEQ ID NO: 3341 - DNA, 154 bp, synthetic construct
  misc_feature 1..154: note = Description of artificial sequence: synthetic polynucleotide sequence
  source 1..154: mol_type = other DNA
gagagacaagagagacacctccaacttcgacaaagagttcaccagacagcctgtggaactgacccccactgataaactcttcatcatgaacttggaccaaaatgaatttgctggcttctcttatactaacccagagtttgtcattaatgtgtag

SEQ ID NO: 3342 - DNA, 121 bp, synthetic construct
  misc_feature 1..121: note = Description of artificial sequence: synthetic polynucleotide sequence
  source 1..121: mol_type = other DNA
acctgcctcagccacccaaaatgctgggattacaggcatgtgccactgtgcccagcatacaaagtgctacgtaaatattagctattgttatgcctaagggacttacctgtgtgaagatcgg

SEQ ID NO: 3343 - DNA, 121 bp, synthetic construct
  misc_feature 1..121: note = Description of artificial sequence: synthetic polynucleotide sequence
  source 1..121: mol_type = other DNA
catcctaaccactaagccttttgatcctgatgaaacatgctctgagatggatcttgctcatgattggaatggtgtaaaattgttgtataaaatgggaattgtatatggtgaagaaactcag

SEQ ID NO: 3344 - DNA, 121 bp, synthetic construct
  misc_feature 1..121: note = Description of artificial sequence: synthetic polynucleotide sequence
  source 1..121: mol_type = other DNA
ctttttagtactttttaaagaagtggtcttgcattttcattgtcactgtgccccaaaaatttatgtagctgattctgggagctcaggtggacaggtgttctaagcaggtaaattaaggcag

SEQ ID NO: 3345 - DNA, 121 bp, synthetic construct
  misc_feature 1..121: note = Description of artificial sequence: synthetic polynucleotide sequence
  source 1..121: mol_type = other DNA
gggccaggggagagtccagactggggagctggggaggccaaggctcacacatccaggttcgggccagcccagtcctgctgggacagctggccaccgctgggactggaggcaaggctgccct

SEQ ID NO: 3346 - DNA, 121 bp, synthetic construct
  misc_feature 1..121: note = Description of artificial sequence: synthetic polynucleotide sequence
  source 1..121: mol_type = other DNA
ctctgcaggtgccttggcatctcccaatggggtggctttgctctgggctcctgttccctgtgagctgcctggtcctgctgcaggtggcaagctctggtaagtcaccacttctcaatcattc

SEQ ID NO: 3347 - DNA, 121 bp, synthetic construct
  misc_feature 1..121: note = Description of artificial sequence: synthetic polynucleotide sequence
  source 1..121: mol_type = other DNA
agatttctgacctaaactactgggaaggacgcggttgtcatttctgaaatgcagaaggatgccagaagagaaggtactttggggaggggcgggaatcaggagttagttttggacatgagat

SEQ ID NO: 3348 - DNA, 140 bp, synthetic construct
  misc_feature 1..140: note = Description of artificial sequence: synthetic polynucleotide sequence
  source 1..140: mol_type = other DNA
gggaacatgaaggtcttgcaggagcccacctgcgtctccgactacatgagcatctctacttgcgagtggaagatgaatggtcccaccaattgcagcaccgagctccgcctgttgtaccagctggtttttctgctctccga

SEQ ID NO: 3349 - DNA, 153 bp, synthetic construct
  misc_feature 1..153: note = Description of artificial sequence: synthetic polynucleotide sequence
  source 1..153: mol_type = other DNA
gagcccacacgtgtatccctgagaacaacggaggcgcggggtgcgtgtgccacctgctcatggatgacgtggtcagtgcggataactatacactggacctgtgggctgggcagcagctgctgtggaagggctccttcaagcccagcgagcatg

SEQ ID NO: 3350 - DNA, 153 bp, synthetic construct
  misc_feature 1..153: note = Description of artificial sequence: synthetic polynucleotide sequence
  source 1..153: mol_type = other DNA
gtgaaacccagggccccaggaaacctgacagttcacaccaatgtctccgacactctgctgctgacctggagcaacccgtatccccctgacaattacctgtataatcatctcacctatgcagtcaacatttggagtgaaaacgacccggcagat

SEQ ID NO: 3351 - DNA, 158 bp, synthetic construct
  misc_feature 1..158: note = Description of artificial sequence: synthetic polynucleotide sequence
  source 1..158: mol_type = other DNA
gttcagaatctataacgtgacctacctagaaccctccctccgcatcgcagccagcaccctgaagtctgggatttcctacagggcacgggtgagggcctgggctcagtgctataacaccacctggagtgagtggagccccagcaccaagtggcacaact

SEQ ID NO: 3352 - DNA, 121 bp, synthetic construct
  misc_feature 1..121: note = Description of artificial sequence: synthetic polynucleotide sequence
  source 1..121: mol_type = other DNA
cccacttccagcctacagggagcccttcgagcagcacctcctgctgggcgtcagcgtttcctgcattgtcatcctggccgtctgcctgttgtgctatgtcagcatcaccaagtgagtcctg

SEQ ID NO: 3353 - DNA, 121 bp, synthetic construct
  misc_feature 1..121: note = Description of artificial sequence: synthetic polynucleotide sequence
  source 1..121: mol_type = other DNA
ccttttccttttgtttttcaggattaagaaagaatggtgggatcagattcccaacccagcccgcagccgcctcgtggctataataatccaggatgctcaggtaggagtaggcgtggatgag

SEQ ID NO: 3354 - DNA, 121 bp, synthetic construct
  misc_feature 1..121: note = Description of artificial sequence: synthetic polynucleotide sequence
  source 1..121: mol_type = other DNA
cactctgctctttcattggctgtctctgtattttaggggtcacagtgggagaagcggtcccgaggccaggaaccagccaagtgcccgtatgtatctgaacttaggtcacagcctgcatgca

SEQ ID NO: 3355 - DNA, 336 bp, synthetic construct
  misc_feature 1..336: note = Description of artificial sequence: synthetic polynucleotide sequence
  source 1..336: mol_type = other DNA
gacactggaagaattgtcttaccaagctcttgccctgttttctggagcacaacatgaaaagggatgaagatcctcacaaggctgccaaagagatgcctttccagggctctggaaaatcagcatggtgcccagtggagatcagcaagacagtcctctggccagagagcatcagcgtggtgcgatgtgtggagttgtttgaggccccggtggagtgtgaggaggaggaggaggtagaggaagaaaaagggagcttctgtgcatcgcctgagagcagcagggatgacttccaggagggaagggagggcattgtggcccggctaacagagagcctgttcc

SEQ ID NO: 3356 - DNA, 450 bp, synthetic construct
  misc_feature 1..450: note = Description of artificial sequence: synthetic polynucleotide sequence
  source 1..450: mol_type = other DNA
tggacctgctcggagaggagaatgggggcttttgccagcaggacatgggggagtcatgccttcttccaccttcgggaagtacgagtgctcacatgccctgggatgagttcccaagtgcagggcccaaggaggcacctccctggggcaaggagcagcctctccacctggagccaagtcctcctgccagcccgacccagagtccagacaacctgacttgcacagagacgcccctcgtcatcgcaggcaaccctgcttaccgcagcttcagcaactccctgagccagtcaccgtgtcccagagagctgggtccagacccactgctggccagacacctggaggaagtagaacccgagatgccctgtgtcccccagctctctgagccaaccactgtgccccaacctgagccagaaacctgggagcagatcctccgccgaaatgtcctccagcatg

SEQ ID NO: 3357 - DNA, 449 bp, synthetic construct
  misc_feature 1..449: note = Description of artificial sequence: synthetic polynucleotide sequence
  source 1..449: mol_type = other DNA
gggcagctgcagcccccgtctcggcccccaccagtggctatcaggagtttgtacatgcggtggagcagggtggcacccaggccagtgcggtggtgggcttgggtcccccaggagaggctggttacaaggccttctcaagcctgcttgccagcagtgctgtgtccccagagaaatgtgggtttggggctagcagtggggaagaggggtataagcctttccaagacctcattcctggctgccctggggaccctgccccagtccctgtccccttgttcacctttggactggacagggagccacctcgcagtccgcagagctcacatctcccaagcagctccccagagcacctgggtctggagccgggggaaaaggtagaggacatgccaaagcccccacttccccaggagcaggccacagacccccttgtggacagcctgggcagtggcatt

SEQ ID NO: 3358 - DNA, 345 bp, synthetic construct
  misc_feature 1..345: note = Description of artificial sequence: synthetic polynucleotide sequence
  source 1..345: mol_type = other DNA
gtctactcagcccttacctgccacctgtgcggccacctgaaacagtgtcatggccaggaggatggtggccagacccctgtcatggccagtccttgctgtggctgctgctgtggagacaggtcctcgccccctacaacccccctgagggccccagacccctctccaggtggggttccactggaggccagtctgtgtccggcctccctggcaccctcgggcatctcagagaagagtaaatcctcatcatccttccatcctgcccctggcaatgctcagagctcaagccagacccccaaaatcgtgaactttgtctccgtgggacccacatacatgagggtctcttag

SEQ ID NO: 3359 - DNA, 121 bp, synthetic construct
  misc_feature 1..121: note = Description of artificial sequence: synthetic polynucleotide sequence
  source 1..121: mol_type = other DNA
tttcctgccttgacagccatggaaaatcagagatggagcatcctttatccaggtccccagtgaggtcaccatgaagtagagccccccactgacctgctatggacatgtcacgggagtaaga

SEQ ID NO: 3360 - DNA, 121 bp, synthetic construct
  misc_feature 1..121: note = Description of artificial sequence: synthetic polynucleotide sequence
  source 1..121: mol_type = other DNA
cggagagtctgaccaccatgccacctcctcgcctcctcttcttcctcctcttcctcacccccatggaagtcaggcccgaggaacctctagtggtgaaggtggaaggtatgtccaaagggca

SEQ ID NO: 3361 - DNA, 268 bp, synthetic construct
  misc_feature 1..268: note = Description of artificial sequence: synthetic polynucleotide sequence
  source 1..268: mol_type = other DNA
gagggagataacgctgtgctgcagtgcctcaaggggacctcagatggccccactcagcagctgacctggtctcgggagtccccgcttaaacccttcttaaaactcagcctggggctgccaggcctgggaatccacatgaggcccctggccatctggcttttcatcttcaacgtctctcaacagatggggggcttctacctgtgccagccggggcccccctctgagaaggcctggcagcctggctggacagtcaatgtggagggcagcg

SEQ ID NO: 3362 - DNA, 205 bp, synthetic construct
  misc_feature 1..205: note = Description of artificial sequence: synthetic polynucleotide sequence
  source 1..205: mol_type = other DNA
ggggagctgttccggtggaatgtttcggacctaggtggcctgggctgtggcctgaagaacaggtcctcagagggccccagctccccttccgggaagctcatgagccccaagctgtatgtgtgggccaaagaccgccctgagatctgggagggagagcctccgtgtctcccaccgagggacagcctgaaccagagcctcagccagg

SEQ ID NO: 3363 - DNA, 277 bp, synthetic construct
  misc_feature 1..277: note = Description of artificial sequence: synthetic polynucleotide sequence
  source 1..277: mol_type = other DNA
gacctcaccatggcccctggctccacactctggctgtcctgtggggtaccccctgactctgtgtccaggggccccctctcctggacccatgtgcaccccaaggggcctaagtcattgctgagcctagagctgaaggacgatcgcccggccagagatatgtgggtaatggagacgggtctgttgttgccccgggccacagctcaagacgctggaaagtattattgtcaccgtggcaacctgaccatgtcattccacctggagatcactgctcggccag

SEQ ID NO: 3364 - DNA, 121 bp, synthetic construct
  misc_feature 1..121: note = Description of artificial sequence: synthetic polynucleotide sequence
  source 1..121: mol_type = other DNA
cctagtactatggcactggctgctgaggactggtggctggaaggtctcagctgtgactttggcttatctgatcttctgcctgtgttcccttgtgggcattcttcatcttcaaagaggtgag

SEQ ID NO: 3365 - DNA, 121 bp, synthetic construct
  misc_feature 1..121: note = Description of artificial sequence: synthetic polynucleotide sequence
  source 1..121: mol_type = other DNA
gcccctcctctgatcacgccctttaactcccaccagccctggtcctgaggaggaaaagaaagcgaatgactgaccccaccaggaggtaatgcaaccagtgcaccccgcggtaacaccctcc

SEQ ID NO: 3366 - DNA, 121 bp, synthetic construct
  misc_feature 1..121: note = Description of artificial sequence: synthetic polynucleotide sequence
  source 1..121: mol_type = other DNA
cctcttctcccgccagattcttcaaagtgacgcctcccccaggaagcgggccccagaaccagtacgggaacgtgctgtctctccccacacccacctcaggcctcggtaagaggcaccgccc

SEQ ID NO: 3367 - DNA, 121 bp, synthetic construct
  misc_feature 1..121: note = Description of artificial sequence: synthetic polynucleotide sequence
  source 1..121: mol_type = other DNA
ccaggacgcgcccagcgttgggccgcaggcctggggggcactgccccgtcttatggaaacccgagcagcgacgtccaggcggatggagccttggggtcccggagcccgccgggagtgggtg

SEQ ID NO: 3368 - DNA, 121 bp, synthetic construct
  misc_feature 1..121: note = Description of artificial sequence: synthetic polynucleotide sequence
  source 1..121: mol_type = other DNA
acccccaggcccagaagaagaggaaggggagggctatgaggaacctgacagtgaggaggactccgagttctatgagaacgactccaaccttgggcaggaccagctctcccagggtaaggct

SEQ ID NO: 3369 - DNA, 121 bp, synthetic construct
  misc_feature 1..121: note = Description of artificial sequence: synthetic polynucleotide sequence
  source 1..121: mol_type = other DNA
catggacacccctccttctccaccagatggcagcggctacgagaaccctgaggatgagcccctgggtcctgaggatgaagactccttctccaacggtaacttggggcctttgtgggacctc

SEQ ID NO: 3370 - DNA, 121 bp, synthetic construct
  misc_feature 1..121: note = Description of artificial sequence: synthetic polynucleotide sequence
  source 1..121: mol_type = other DNA
gggtccctggagttctctctcttctgccacagctgagtcttatgagaacgaggatgaagagctgacccagccggtcgccaggacaatgggtgtgtgtgaggatggcaacagtccagggggg

SEQ ID NO: 3371 - DNA, 121 bp, synthetic construct
  misc_feature 1..121: note = Description of artificial sequence: synthetic polynucleotide sequence
  source 1..121: mol_type = other DNA
gaggaatagtaacctccctcttccctttccagacttcctgagccctcatgggtcagcctgggaccccagccgggaagcaacctccctgggtgagagatgctttcaatcagactgccttgcc

SEQ ID NO: 3372 - DNA, 121 bp, synthetic construct
  misc_feature 1..121: note = Description of artificial sequence: synthetic polynucleotide sequence
  source 1..121: mol_type = other DNA
tcccccgcccaagcagggtcccagtcctatgaggatatgagaggaatcctgtatgcagccccccagctccgctccattcggggccagcctggacccaatcatgaggaaggtgggtgcttct

SEQ ID NO: 3373 - DNA, 121 bp, synthetic construct
  misc_feature 1..121: note = Description of artificial sequence: synthetic polynucleotide sequence
  source 1..121: mol_type = other DNA
cctggtcctatccagatgcagactcttatgagaacatggataatcccgatgggccagacccagcctggggaggagggggccgcatgggcacctggagcaccaggtgatcctcaggtggcca

SEQ ID NO: 3374 - DNA, 121 bp, synthetic construct
  misc_feature 1..121: note = Description of artificial sequence: synthetic polynucleotide sequence
  source 1..121: mol_type = other DNA
actggccggtgcagcctttgcgcgcgggtttcgttgacccgcggcgttcacgggaattgttcgctttagtgccggcgccatggggtcggagctgatcgggcgcctagccccgcgcctgggc

SEQ ID NO: 3375 - DNA, 121 bp, synthetic construct
  misc_feature 1..121: note = Description of artificial sequence: synthetic polynucleotide sequence
  source 1..121: mol_type = other DNA
gggtgtctgccagctgtgagtgctggactcgggactggaaagaaccaaacgggtataaatgctgctctggcagggaaaagtgggtggaagaacacaatgattccactcgagtggggggtta

SEQ ID NO: 3376 - DNA, 121 bp, synthetic construct
  misc_feature 1..121: note = Description of artificial sequence: synthetic polynucleotide sequence
  source 1..121: mol_type = other DNA
tgggaccacactgtgagtaccactgcaacaggagcatggcagattactgaaagcaacagtgagaggtggccttttccctcctttggtagtggcaggagacatgtttggaccaatatggatt

SEQ ID NO: 3377 - DNA, 121 bp, synthetic construct
  misc_feature 1..121: note = Description of artificial sequence: synthetic polynucleotide sequence
  source 1..121: mol_type = other DNA
gtgtccatctccatctgccaaaagaaacttcaagagtccattaatagtcacaaaataaagtgttcttgtatggtatattaaatttactatttgttcaaagtctacatcaatctggataaaa

SEQ ID NO: 3378 - DNA, 121 bp, synthetic construct
  misc_feature 1..121: note = Description of artificial sequence: synthetic polynucleotide sequence
  source 1..121: mol_type = other DNA
aaatgccaaagttctacaagtcttttttcttaatttaggaaatgtttttctttttctctgtccagggctgttcgtggtcagttatatttgtggatctcgatgctcacaatcgcaacaggca

SEQ ID NO: 3379 - DNA, 121 bp, synthetic construct
  misc_feature 1..121: note = Description of artificial sequence: synthetic polynucleotide sequence
  source 1..121: mol_type = other DNA
cttagaaaaatggaatttgaataatggatttaaataatagaggccattattcaggatgagcttaatgcagtccccatacagatgaaagatttaggcaatgagcagataaaagccttacaga

SEQ ID NO: 3380 - DNA, 121 bp, synthetic construct
  misc_feature 1..121: note = Description of artificial sequence: synthetic polynucleotide sequence
  source 1..121: mol_type = other DNA
aacaaggggggtgttgtctctgtatctcatctgatagtctctgaaggtgatctccccacggctgggccagtccttgggacaggtccccactttgaggggatgagtgcattcaggaacacag

SEQ ID NO: 3381 - DNA, 121 bp, synthetic construct
  misc_feature 1..121: note = Description of artificial sequence: synthetic polynucleotide sequence
  source 1..121: mol_type = other DNA
gggatgatgaacaaggttatacttgtcaggctctggacaagcccgcacttctccaatagtttcctttccttccttcttaggtctgggaaataaaaaagaaatacaccaaagataaccacaa

SEQ ID NO: 3382 - DNA, 121 bp, synthetic construct
  misc_feature 1..121: note = Description of artificial sequence: synthetic polynucleotide sequence
  source 1..121: mol_type = other DNA
caggagtcagagccacagaagggcttggaaccatagatgatacacagccactgtggaagatgcagagcaagaggggggaaatggttgatccccacatctcaccctaccgtactctggtctt

SEQ ID NO: 3383 - DNA, 121 bp, synthetic construct
  misc_feature 1..121: note = Description of artificial sequence: synthetic polynucleotide sequence
  source 1..121: mol_type = other DNA
acttacaccctacaccctctgctccctgaccctggacagtgtccaagaccacatagactgctgtgtttctgccccatctttcggagttgccctacacacattcccttcggataaagactgt

SEQ ID NO: 3384 - DNA, 121 bp, synthetic construct
  misc_feature 1..121: note = Description of artificial sequence: synthetic polynucleotide sequence
  source 1..121: mol_type = other DNA
ctgtgcagcagagaaacattttaatgaacaccacagggtttactgatcactgttaatgaatgaagaacgagtatcctgcagaaaccttctgtctatctttagaaaacagtcctggatgatg

SEQ ID NO: 3385 - DNA, 121 bp, synthetic construct
  misc_feature 1..121: note = Description of artificial sequence: synthetic polynucleotide sequence
  source 1..121: mol_type = other DNA
agaacaaaaaaaaaaaaaaaaaaaagaagaaattgatggatgcgtaatttactctaaaaccccagcagatgactgttggcacccagcaaatctccttcctgtaaactgtgttttgatacag

SEQ ID NO: 3386 - DNA, 121 bp, synthetic construct
  misc_feature 1..121: note = Description of artificial sequence: synthetic polynucleotide sequence
  source 1..121: mol_type = other DNA
cggcttttatgccatcgccaatatcatcctccccctggtgctgtcagggaagctgggcttgtaattcttccagggaaggcattagaaagaaagaaattaagttcaatcaaagtgtcaggcc

SEQ ID NO: 3387 - DNA, 121 bp, synthetic construct
  misc_feature 1..121: note = Description of artificial sequence: synthetic polynucleotide sequence
  source 1..121: mol_type = other DNA
tctgagcctcagtttcctcatctgtgaaatggggtcgctgtgtgcctccccggatgtggttcagcactggccgggcctcatgaacatgggccttcacccccatggtctttggcggcccttt

SEQ ID NO: 3388 - DNA, 121 bp, synthetic construct
  misc_feature 1..121: note = Description of artificial sequence: synthetic polynucleotide sequence
  source 1..121: mol_type = other DNA
atattgtggtcccgcagccggtgattctgcagcagcacctccatggtgtaggccgccccacagatgtcacagccgtacatgggctccgacgcgtccacgtcatcctcgctggcctcatggc

SEQ ID NO: 3389 - DNA, 121 bp, synthetic construct
  misc_feature 1..121: note = Description of artificial sequence: synthetic polynucleotide sequence
  source 1..121: mol_type = other DNA
aatacattttgggaaatgccaatataaatttatttcccatcctcacaaccacaactttacacatggccagctgaatcttagaaaggaagaacttgcttctttctcgttacagggtcaggtt

SEQ ID NO: 3390 - DNA, 121 bp, synthetic construct
  misc_feature 1..121: note = Description of artificial sequence: synthetic polynucleotide sequence
  source 1..121: mol_type = other DNA
gtgtctatattcaacaaagaagggtgtttggagattgtgttaaagtatttaagtaggtttcctaccaatgttgacctggctatttcagtaggtaagtgaagaaaaggtgatgacttattaa

SEQ ID NO: 3391 - DNA, 121 bp, synthetic construct
  misc_feature 1..121: note = Description of artificial sequence: synthetic polynucleotide sequence
  source 1..121: mol_type = other DNA
tccccctgcctgctgccacctcctgagggaatggaccccttcccagcccccatctcaccgcagctgcccccgcccacaggccctgctgctccaagtccgatgacttctacacctttgggtc

SEQ ID NO: 3392 - DNA, 121 bp, synthetic construct
  misc_feature 1..121: note = Description of artificial sequence: synthetic polynucleotide sequence
  source 1..121: mol_type = other DNA
ttaacgtcccagcactgggctcccccaacccctgctcaatgcctctgctctgtcttcttgtaggagctcgtgggcgacgtgttgagagacacgctcagcgaggaagaggaggacgactttc

SEQ ID NO: 3393 - DNA, 121 bp, synthetic construct
  misc_feature 1..121: note = Description of artificial sequence: synthetic polynucleotide sequence
  source 1..121: mol_type = other DNA
cagcagctccaggcagcacaggtcagccctgatgacatttctcttggcttcctggtgcgtgccaaaggtgtcgtgccagggagtacggcgcccctggaattccttcacatcactttccagt

SEQ ID NO: 3394 - DNA, 121 bp, synthetic construct
  misc_feature 1..121: note = Description of artificial sequence: synthetic polynucleotide sequence
  source 1..121: mol_type = other DNA
tgctgggcacccttaagttccctaactccagccacactggcctgccctatgcccctgaatcttgccaagctccttcctgctgtgccgtctttgcacagctcttttctctgccagtaatgcc

SEQ ID NO: 3395 - DNA, 121 bp, synthetic construct
  misc_feature 1..121: note = Description of artificial sequence: synthetic polynucleotide sequence
  source 1..121: mol_type = other DNA
taaaattgtgctaaagtgatgctatgcaaggatacttaatagcactaaggaatgtttatgttatggtgttagtaataatactaaaaagtataaataatatttattgagtgctattacatgc

SEQ ID NO: 3396 - DNA, 121 bp, synthetic construct
  misc_feature 1..121: note = Description of artificial sequence: synthetic polynucleotide sequence
  source 1..121: mol_type = other DNA
gtgaaagctcttccacaaatagtgcaagcaaagggtttctctccagtgtgagttctctcgtgaatctgcagggcactcgatgaggagaaggttttgccacatgtgttgcagtagtgctgct

SEQ ID NO: 3397 - DNA, 121 bp, synthetic construct
  misc_feature 1..121: note = Description of artificial sequence: synthetic polynucleotide sequence
  source 1..121: mol_type = other DNA
acacggggcatggttcagcccatagcaataccctagttattttccatatgtcagtcttccttaccagattgggagcggcgtcaaaaagaccctcatctcatcttttccttctcctctgtct

SEQ ID NO: 3398 - DNA, 121 bp, synthetic construct
  misc_feature 1..121: note = Description of artificial sequence: synthetic polynucleotide sequence
  source 1..121: mol_type = other DNA
taagcagacaaggctggggaacattccaaaagctcctcagaggctcctaaggaaaccaaactcacaatagtaataccctgatgagacaccctcatttcaactttccttctttccaggtgta

SEQ ID NO: 3399 - DNA, 121 bp, synthetic construct
  misc_feature 1..121: note = Description of artificial sequence: synthetic polynucleotide sequence
  source 1..121: mol_type = other DNA
aattccatggaggatgatggaaagccacagaagaggttcatgctgctaagtgacagggggttacatggcaagattattacttagaagcatgtttgcacattttattatttgaaggcattgt

SEQ ID NO: 3400 - DNA, 121 bp, synthetic construct
  misc_feature 1..121: note = Description of artificial sequence: synthetic polynucleotide sequence
  source 1..121: mol_type = other DNA
tgtacagtaaggaaagacagaggaacagagatcaggggaagctaagtgaagactacacagagaatctatgcactttcttagcaacttttatataaatctaaaattattccaaataaaagaa

SEQ ID NO: 3401 - DNA, 121 bp, synthetic construct
  misc_feature 1..121: note = Description of artificial sequence: synthetic polynucleotide sequence
  source 1..121: mol_type = other DNA
gctgggcacagaatctggcacagggtctttgctgaatatatgtatgttgcactgaattaggtggaaagggtgtcctgtttcccataatttttcttttctactattagatagcttcattgca

SEQ ID NO: 3402 - DNA, 121 bp, synthetic construct
  misc_feature 1..121: note = Description of artificial sequence: synthetic polynucleotide sequence
  source 1..121: mol_type = other DNA
tgagaggctggctgggggctcccgatggcagggatgggggatgttatctgagaggcgacaggggagtgctgccgaggagaaggctgagactggtgctgcatgtgttgcagctgctgcagct

SEQ ID NO: 3403 - DNA, 121 bp, synthetic construct
  misc_feature 1..121: note = Description of artificial sequence: synthetic polynucleotide sequence
  source 1..121: mol_type = other DNA
cctaaagcatgaagaaaaatcctttgctctaaagcagtttcccaaattccagctgatcatgtttcaccttcatgggttaggccacatccctgtcctatacaccatgtgtatatttctgtac

SEQ ID NO: 3404 - DNA, 121 bp, synthetic construct
  misc_feature 1..121: note = Description of artificial sequence: synthetic polynucleotide sequence
  source 1..121: mol_type = other DNA
aaacatacgttagcctcagtctacacaacgtcagggtcatcaatttcaccatctttcacctccacgtcttctcccactagaaggtcttctgggacaacaacacgcatggagctgtcatctc

SEQ ID NO: 3405 - DNA, 121 bp, synthetic construct
  misc_feature 1..121: note = Description of artificial sequence: synthetic polynucleotide sequence
  source 1..121: mol_type = other DNA
ggcatccttgcagtctgctgcctgggtgccggtctccagacctggctctcttccctcgcgctcttcttcaagcttctgggactcagctgccaccgtggtgctcttgctggagtggcacccc

SEQ ID NO: 3406 - DNA, 121 bp, synthetic construct
  misc_feature 1..121: note = Description of artificial sequence: synthetic polynucleotide sequence
  source 1..121: mol_type = other DNA
cactgtgagtgggccacagaagagcagcttttgaaagataaaaggatccagcagaaaatcaaacgattcaaattgagacaagcacaaagagcacatttttttgcagacgtaagaaaaaaat

SEQ ID NO: 3407 - DNA, 121 bp, synthetic construct
  misc_feature 1..121: note = Description of artificial sequence: synthetic polynucleotide sequence
  source 1..121: mol_type = other DNA
aaggcgacagccctgtactgtgtctgaaattttccatttttgttgggtgctttttatatatgcaaaaggtaagaaaatagtaatatttatttagatttaatatgtctatttacattttcag

SEQ ID NO: 3408 - DNA, 121 bp, synthetic construct
  misc_feature 1..121: note = Description of artificial sequence: synthetic polynucleotide sequence
  source 1..121: mol_type = other DNA
cacatcatcttttccttgctgcattttctcagtattctcttttacctcatctacactgccttcttgtgaaacctgaagaaatcaaagcacactggtatatttataattgcttagatcacat

SEQ ID NO: 3409 - DNA, 121 bp, synthetic construct
  misc_feature 1..121: note = Description of artificial sequence: synthetic polynucleotide sequence
  source 1..121: mol_type = other DNA
gtgtagctttttattgtatggttccataacttatgtaaccagacttctactgtctttagtcttctgcttttacaaataatattgtagtgagtatcctaatacataacgtttttcacaagtg

SEQ ID NO: 3410 - DNA, 121 bp, synthetic construct
  misc_feature 1..121: note = Description of artificial sequence: synthetic polynucleotide sequence
  source 1..121: mol_type = other DNA
actatgaaaaacagtgcaatggagtgtcctcttccatgaggttagattttaaatgtagcgcttaaggtaggcatcatggaggtgagaattatacatggaaatcccttcaatttgtacatca

SEQ ID NO: 3411 - DNA, 121 bp, synthetic construct
  misc_feature 1..121: note = Description of artificial sequence: synthetic polynucleotide sequence
  source 1..121: mol_type = other DNA
cccgccagccagtccccctggcccctcaacctcggggtttcttaccgcctgggcacgggctggaaagctgtcttgagtaactttttctccacttccaaggcactacagcgatctaagggaa

SEQ ID NO: 3412 - DNA, 121 bp, synthetic construct
  misc_feature 1..121: note = Description of artificial sequence: synthetic polynucleotide sequence
  source 1..121: mol_type = other DNA
aaaccctgagtaggcactggggattggaataacccttgcactcaagtcactcatggttattgaaaaagattgggttcggcagctgtaatggttcctgctatttcagatactacaatcttta

SEQ ID NO: 3413 - DNA, 121 bp, synthetic construct
  misc_feature 1..121: note = Description of artificial sequence: synthetic polynucleotide sequence
  source 1..121: mol_type = other DNA
atggtgggacaaaagttcccatttgtctgcacagggcacaaagagactgtgataggaaggttcactcttattttaattcttaaggaaaagacctgtttgcatatggtgtaaatgccacctc

SEQ ID NO: 3414 - DNA, 121 bp, synthetic construct
  misc_feature 1..121: note = Description of artificial sequence: synthetic polynucleotide sequence
  source 1..121: mol_type = other DNA
attaattgtaagtcagaaggaaatatatgtcagagcgggtccccaaggtgtctttctcaggttaagcactgtacttatttaagttactctagggtatagcttcctttgtcctggagacaaa

SEQ ID NO: 3415 - DNA, 121 bp, synthetic construct
  misc_feature 1..121: note = Description of artificial sequence: synthetic polynucleotide sequence
  source 1..121: mol_type = other DNA
tgagttgtactatcaagtagacaacagaacagacagtctgtcaacactgacagtgagtccatatctcagctgatatctgaaggcttgggcatgacaaggggtccatggaagtttatgaggg

SEQ ID NO: 3416 - DNA, 121 bp, synthetic construct
  misc_feature 1..121: note = Description of artificial sequence: synthetic polynucleotide sequence
  source 1..121: mol_type = other DNA
gaagttcccctgcagagcctgaggtcaccagggatgacaaagagagacagccaggttttccttccagtcaattattgccacaataatgccgagtaaccagaaacaaccataacctgtcaga

SEQ ID NO: 3417 - DNA, 121 bp, synthetic construct
  misc_feature 1..121: note = Description of artificial sequence: synthetic polynucleotide sequence
  source 1..121: mol_type = other DNA
caggtgttctccccaggggcctctcctgacattgaccttggcaccggccccacccccacgctgggccctgtcactcctgagatctgcaaacaggacattgtatttgatggcatcgctcaga

SEQ ID NO: 3418 - DNA, 121 bp, synthetic construct
  misc_feature 1..121: note = Description of artificial sequence: synthetic polynucleotide sequence
  source 1..121: mol_type = other DNA
ttcctgcaccccacccctcctggttccctccagatgggaggcatggaggctgtcatcacgggcctggcagatgacttccaggtcctgaagcgacaccggaaactcttcacatttggcgtca

SEQ ID NO: 3419 - DNA, 121 bp, synthetic construct
  misc_feature 1..121: note = Description of artificial sequence: synthetic polynucleotide sequence
  source 1..121: mol_type = other DNA
ggtaggaggtggcttctcgcaagttatcccagggcgatgcaggctgcgggttcgtaaatcgcagggatcccagcgggggagcagcaaaggggactccgaggaacacgttcacaggcacagg

SEQ ID NO: 3420 - DNA, 121 bp, synthetic construct
  misc_feature 1..121: note = Description of artificial sequence: synthetic polynucleotide sequence
  source 1..121: mol_type = other DNA
cttcacatttgagcaactctgcatgctgataatattcaaccccacggtgtctcatgtaccacttaccctagttcttgcctctcttgtgagaacaggtccagtgtgtcacaggtaacacaga

SEQ ID NO: 3421 - DNA, 121 bp, synthetic construct
  misc_feature 1..121: note = Description of artificial sequence: synthetic polynucleotide sequence
  source 1..121: mol_type = other DNA
gccatcctcagctacctggacagcctggatcggattggggccgccgactaccagcccaccgagcaggacatcctccgaaccagggtcaaaaccactggcatcgtagaaacccacttcacat

SEQ ID NO: 3422 - DNA, 121 bp, synthetic construct
  misc_feature 1..121: note = Description of artificial sequence: synthetic polynucleotide sequence
  source 1..121: mol_type = other DNA
acaattgccaccaataatcgcaagaggggaagaaatgtctcccaatgtccccagcacaattgcatttgccccatctgctacctaagaaaagtaaaaggacacattatcttagacacgataa

SEQ ID NO: 3423 - DNA, 121 bp, synthetic construct
  misc_feature 1..121: note = Description of artificial sequence: synthetic polynucleotide sequence
  source 1..121: mol_type = other DNA
gacactcatggactcactgctgtaccttctgcatcttactcactgcccactgcctttttcgcttccttgcaggtggctcctgtgcctgcgccggctcctgcaagtgcaaagagtgcaaatg

SEQ ID NO: 3424 - DNA, 121 bp, synthetic construct
  misc_feature 1..121: note = Description of artificial sequence: synthetic polynucleotide sequence
  source 1..121: mol_type = other DNA
cacagttcgatatgattcttgggaaactagagaatgacggaagtagaaaggtgagttaaatgcatccttagagaaatgttcgttagccattggggatttataaatatcaaaaaatacactt

SEQ ID NO: 3425 - DNA, 121 bp, synthetic construct
  misc_feature 1..121: note = Description of artificial sequence: synthetic polynucleotide sequence
  source 1..121: mol_type = other DNA
gtgacggccagaggaaaggggctcagagcagaagcttgacgctcaggtaccttggagggatctattgccttaggagagggatatgatatgggggaaagtccgaggcaagggagagcagggg

SEQ ID NO: 3426 - DNA, 121 bp, synthetic construct
  misc_feature 1..121: note = Description of artificial sequence: synthetic polynucleotide sequence
  source 1..121: mol_type = other DNA
acctttctgctttcacatactctttctttcttctatataatccagtcatatatgcatgactattaagtaaaagtgaaaactgagaccaagatcactaactatttggtggaaaaaccaagac

SEQ ID NO: 3427 - DNA, 121 bp, synthetic construct
  misc_feature 1..121: note = Description of artificial sequence: synthetic polynucleotide sequence
  source 1..121: mol_type = other DNA
agcctgcggcgcgggcccagcctgtcgaggctgcagcgccttcacgccccttggcttttgatctttcagggtggccaattcgattcggagggtcttcatcgctgaggttcccataataggt

SEQ ID NO: 3428 - DNA, 121 bp, synthetic construct
  misc_feature 1..121: note = Description of artificial sequence: synthetic polynucleotide sequence
  source 1..121: mol_type = other DNA
ttggggattgtggtacagaacaccaaagtagccaacctcacggagcccgtggtgctcactttccagcaccagctacagccggtgagtgggggccagccatcaagagaacaagcgcccctcg

SEQ ID NO: 3429 - DNA, 121 bp, synthetic construct
  misc_feature 1..121: note = Description of artificial sequence: synthetic polynucleotide sequence
  source 1..121: mol_type = other DNA
gactttcaaatagagaaaatccaagggcaggaggctgagcaggtccatctgaaatcccagtgggacaccatgggggtaaaacggatgactccagggtggaaggtgaggggagtgagaggcg

SEQ ID NO: 3430 - DNA, 121 bp, synthetic construct
  misc_feature 1..121: note = Description of artificial sequence: synthetic polynucleotide sequence
  source 1..121: mol_type = other DNA
gcgcagagggcgacgtgggggatggggatggggactttggggccggggtcaacaaggacgggggcagccgcgtggtggtgcagatggaggaggtggcacggacggtgaacgtggtgatggt

SEQ ID NO: 3431 - DNA, 121 bp, synthetic construct
  misc_feature 1..121: note = Description of artificial sequence: synthetic polynucleotide sequence
  source 1..121: mol_type = other DNA
ctggagtttgtataggggacacatgtcaagatctttcacgaagattttcctcaggacactcatcgtcatgtgatttcctgtctggaccatgcaacagagagcccagggattattaacgaga

SEQ ID NO: 3432 - DNA, 121 bp, synthetic construct
  misc_feature 1..121: note = Description of artificial sequence: synthetic polynucleotide sequence
  source 1..121: mol_type = other DNA
ctgaagctggctccttgtcctcaggtggagtgcaactccaaactggacccgaccactacgaccttcctgaaggtgaggctttcttccccagccctgggccagcttccctagcatgggccca

SEQ ID NO: 3433 - DNA, 121 bp, synthetic construct
  misc_feature 1..121: note = Description of artificial sequence: synthetic polynucleotide sequence
  source 1..121: mol_type = other DNA
cctccttcttgaggttggagaccagttgagtccgcatgccaatgatgcggtcagccatgactttcacttcttgcagcctgtaaagaaaccctgagatgcagctcattctgcctaagcactg

SEQ ID NO: 3434 - DNA, 121 bp, synthetic construct
  misc_feature 1..121: note = Description of artificial sequence: synthetic polynucleotide sequence
  source 1..121: mol_type = other DNA
ttctttctcttcagtttcacccacctcacaatgacttctgatttgttttcaaagcacaggatctcttcttgtgcaaagcactcttgtacccttccttccctgccctaggtacctgctgggg

SEQ ID NO: 3435 - DNA, 121 bp, synthetic construct
  misc_feature 1..121: note = Description of artificial sequence: synthetic polynucleotide sequence
  source 1..121: mol_type = other DNA
gtaggaagaagtgtagaacattagataatcttgatggtcattagtgttttatactcattcgtttagcttttctttttgcaactgcttttgcaaaaattataagtgggaaaattatggcagt

SEQ ID NO: 3436 - DNA, 121 bp, synthetic construct
  misc_feature 1..121: note = Description of artificial sequence: synthetic polynucleotide sequence
  source 1..121: mol_type = other DNA
aaatattattccattgtgtgtgtctgtttgtgtatgtattccttttttgtgtttgtttctatttagtgtgtccacattttctttatccaatcatccactgatgaacacttaggttgattct

SEQ ID NO: 3437 - DNA, 121 bp, synthetic construct
  misc_feature 1..121: note = Description of artificial sequence: synthetic polynucleotide sequence
  source 1..121: mol_type = other DNA
tatacattttcttccttttttacaatcattcttatgttgaattcattaaccttgaaatgacaggcagctgcagctgcagacttcaatctgtagtgcgtatcaagcaattcaactttttctt

SEQ ID NO: 3438 - DNA, 121 bp, synthetic construct
  misc_feature 1..121: note = Description of artificial sequence: synthetic polynucleotide sequence
  source 1..121: mol_type = other DNA
ctattgataatgaccatggttgtgaccaggataaattaagatctactgactataagatacattttgccagaatgaactccattaaaattaattttcaatgagtagaaagatgaggatgggt

SEQ ID NO: 3439 - DNA, 121 bp, synthetic construct
  misc_feature 1..121: note = Description of artificial sequence: synthetic polynucleotide sequence
  source 1..121: mol_type = other DNA
aagtcacctaactagaaagtgtcagaaatggaattgggacttgtctgtgttaggacacgtctgtattatttcgaacatgccacgttatcttagaagcaaaataagcaaggatataaaaaag

SEQ ID NO: 3440 - DNA, 121 bp, synthetic construct
  misc_feature 1..121: note = Description of artificial sequence: synthetic polynucleotide sequence
  source 1..121: mol_type = other DNA
gatggaagataatagatgaaatatactttctccaaacaaaagaaggggaattctgatacgaagagtaagctcattaccatctagaggaaaggatcagagaaacaagcgaaaatatgaaagt

SEQ ID NO: 3441 - DNA, 121 bp, synthetic construct
  misc_feature 1..121: note = Description of artificial sequence: synthetic polynucleotide sequence
  source 1..121: mol_type = other DNA
ccagcagactggggttcccctctcactcctttacttactggctgtgtgtccttgggcaagtttcagaacctctctgatttctgatttccttatctaaaaattgcaggttctcatttctacc

SEQ ID NO: 3442 - DNA, 121 bp, synthetic construct
  misc_feature 1..121: note = Description of artificial sequence: synthetic polynucleotide sequence
  source 1..121: mol_type = other DNA
acacacacacgcgcacacacacacgcacacacacacacaatggtcattacttcatggaactgcattcattataatctgtgataacacaagtcgttaaataccttatgatgatatgatcaat

SEQ ID NO: 3443 - DNA, 121 bp, synthetic construct
  misc_feature 1..121: note = Description of artificial sequence: synthetic polynucleotide sequence
  source 1..121: mol_type = other DNA
ggaaaataactccatcagccacttttgagtctccggagtccactttctgaatcacctggcctttgacaaagctggtaaggtcggaatgcagaagtatgttggactggacatgtctttggta

SEQ ID NO: 3444 - DNA, 121 bp, synthetic construct
  misc_feature 1..121: note = Description of artificial sequence: synthetic polynucleotide sequence
  source 1..121: mol_type = other DNA
ccagcttcagaagcagatacagagcctcaaatcttcaaagattgccctgagcgaaagtcctatctcctgtagaaaaaagagctgaaattgtggaaaaacagacacaagctcttataatgca

SEQ ID NO: 3445 - DNA, 121 bp, synthetic construct
  misc_feature 1..121: note = Description of artificial sequence: synthetic polynucleotide sequence
  source 1..121: mol_type = other DNA
gcaaacattatgtgcccatagacaaatcactggctttcagcatacttgtttgataaatatgaaggatggactaaattaattgtaccttctatgaggtgttccacaggctcttatgagaacg

SEQ ID NO: 3446 - DNA, 121 bp, synthetic construct
  misc_feature 1..121: note = Description of artificial sequence: synthetic polynucleotide sequence
  source 1..121: mol_type = other DNA
ctaatgcctggagagagagggacattcattggatctggttaactggagcagaagattctagagccgtaactggtaagaacattaaactgtcaattttgaagaatggctggaaactgaataa

SEQ ID NO: 3447 - DNA, 121 bp, synthetic construct
  misc_feature 1..121: note = Description of artificial sequence: synthetic polynucleotide sequence
  source 1..121: mol_type = other DNA
tttcagtatttctctcaaaagatgtttgagacagtttctgaaaaatttcagtctcttctaggtgatagttaagggcagacacagttgatggcccgaggtaagttcttaggggctctggaaa

SEQ ID NO: 3448 - DNA, 121 bp, synthetic construct
  misc_feature 1..121: note = Description of artificial sequence: synthetic polynucleotide sequence
  source 1..121: mol_type = other DNA
ccagccactgaccctcggccttcatagccatatatctgaatggagtcatatggcggggccgtgggatcattatctgcctcatgcagccttacatttataaattcatcgacatcaacaccat

SEQ ID NO: 3449 - DNA, 121 bp, synthetic construct
  misc_feature 1..121: note = Description of artificial sequence: synthetic polynucleotide sequence
  source 1..121: mol_type = other DNA
ctctgtctacaatggtgtttggccagcagtagcatggagtggactgtactaccacacactggaagggcaagaaaagaaaaacccgctcacccagacacgtgctagcaaagctatgtgggga

SEQ ID NO: 3450 - DNA, 121 bp, synthetic construct
  misc_feature 1..121: note = Description of artificial sequence: synthetic polynucleotide sequence
  source 1..121: mol_type = other DNA
ccagaaactagaactggaggaaaagggactacagttcaaggaagcagaccaacaaaaagaatactaaatcggagaaggcaagacagccagtatatcatgggacagttttctgagaatctgc

SEQ ID NO: 3451 - DNA, 121 bp, synthetic construct
  misc_feature 1..121: note = Description of artificial sequence: synthetic polynucleotide sequence
  source 1..121: mol_type = other DNA
aagtttcatgcagctcatttttttaaagaatgagtgtcattttataagtggttaagaaatgtggatatacatcactagcttcattgtacagctgaaggaaatggaggtctagaaatgtaag

SEQ ID NO: 3452 - DNA, 121 bp, synthetic construct
  misc_feature 1..121: note = Description of artificial sequence: synthetic polynucleotide sequence
  source 1..121: mol_type = other DNA
atacatacgtccatgaatgcctccaatcttaacggatgtgttttttgcacaaagtaccatgacaggcatgaaggataagacacagataaaattgtatctcatgatgtaccttccatctgga

SEQ ID NO: 3453 - DNA, 121 bp, synthetic construct
  misc_feature 1..121: note = Description of artificial sequence: synthetic polynucleotide sequence
  source 1..121: mol_type = other DNA
ttcacttaccttgttgagcatgcctcagttctgctgagaataggtctcagagcttgtcatggatgctacagctccatctgcctggcttccagctggaatagcatccatttactcatgatac

SEQ ID NO: 3454 - DNA, 121 bp, synthetic construct
  misc_feature 1..121: note = Description of artificial sequence: synthetic polynucleotide sequence
  source 1..121: mol_type = other DNA
ggcctcttcaactctaacagtctgtgacttcatccaagtacaccaaagcaaagatgaccgtgtagattcagattagctagtggcctattttagctagtgtggagagtgacgggaaaagagg

SEQ ID NO: 3455 - DNA, 121 bp, synthetic construct
  misc_feature 1..121: note = Description of artificial sequence: synthetic polynucleotide sequence
  source 1..121: mol_type = other DNA
tgaagggtttcaggtggttaaagtgggggccaatggagaggtggagacactagaacaaggggaacttccaccccaggaagatcctagttggcaaaaagacccagactatcagccaccagcc

SEQ ID NO: 3456 - DNA, 121 bp, synthetic construct
  misc_feature 1..121: note = Description of artificial sequence: synthetic polynucleotide sequence
  source 1..121: mol_type = other DNA
acaaagaaaaccaaaaagagcaaactgcgttatacagaggagggcaaagatgtagatgtgtctgtctacgattttgaggaagaacagcaggagggtctgctatcagaggttaatgcagaga

SEQ ID NO: 3457 - DNA, 121 bp, synthetic construct
  misc_feature 1..121: note = Description of artificial sequence: synthetic polynucleotide sequence
  source 1..121: mol_type = other DNA
gagaattagatgagatgatattggtgacaactctttgtaggtattcagtgatcagttatccatttggaaagataattctacagggagcatggggtgggcaggaggggagacaagcaggaag

SEQ ID NO: 3458 - DNA, 121 bp, synthetic construct
  misc_feature 1..121: note = Description of artificial sequence: synthetic polynucleotide sequence
  source 1..121: mol_type = other DNA
ctgcattccacgtaagtttagattactgtaccctatgaaagttgcattatcttgttcttgaagtctgtggctaattaggggacatctggtgactaaaagagagtctcattgaaagacaaca

SEQ ID NO: 3459 - DNA, 121 bp, synthetic construct
  misc_feature 1..121: note = Description of artificial sequence: synthetic polynucleotide sequence
  source 1..121: mol_type = other DNA
aggccgaggggggccggaggacaacggtgagaattggacattgcaatgtcagagtattcagaattcagaaggtttcccagaactgctgctgtctccgctgatttatttcttcatttccatt

SEQ ID NO: 3460 - DNA, 121 bp, synthetic construct
  misc_feature 1..121: note = Description of artificial sequence: synthetic polynucleotide sequence
  source 1..121: mol_type = other DNA
gtcgcctcagtttgtctaaattaccaaggaccgctggaatttccctgggaatatgtttcgggaaaggtcagaaactcttcagtcgtcttcacgcttccactcagtagcaacgtttttgcac

SEQ ID NO: 3461 - DNA, 121 bp, synthetic construct
  misc_feature 1..121: note = Description of artificial sequence: synthetic polynucleotide sequence
  source 1..121: mol_type = other DNA
ttttatcggcaacaaaacaatcagctcttggaaaggaagctcagtgcttggaacaagtattggctcaagcaaacacatacttcaaactgactcctctcagtgtcatgagctgccagccaaa

SEQ ID NO: 3462 - DNA, 121 bp, synthetic construct
  misc_feature 1..121: note = Description of artificial sequence: synthetic polynucleotide sequence
  source 1..121: mol_type = other DNA
tgtcatcccaagaagcctcttaagaaacaaacagctcatccatgagccccacgtgagttattttcctatttggaatatctatggtccaactgggatattcccactgtctcatgttacctta

SEQ ID NO: 3463 - DNA, 121 bp, synthetic construct
  misc_feature 1..121: note = Description of artificial sequence: synthetic polynucleotide sequence
  source 1..121: mol_type = other DNA
ataacattttcttggattcctaagcaagaattcactcttcaagccagtactccaatccctagaggcaaattgtccgaaatgatgatgaaattatccattgaaggttcacctaagactttga

SEQ ID NO: 3464 - DNA, 121 bp, synthetic construct
  misc_feature 1..121: note = Description of artificial sequence: synthetic polynucleotide sequence
  source 1..121: mol_type = other DNA
gatgattctggagacttaaacagaggctggcacatgtaggtcttgtaaacgtgtataatatgtaaaccacattaaataattctctcagggtcaaagagtatttccttgtagagttttagac

SEQ ID NO: 3465 - DNA, 121 bp, synthetic construct
  misc_feature 1..121: note = Description of artificial sequence: synthetic polynucleotide sequence
  source 1..121: mol_type = other DNA
tgagaaataagggtaaacattagcattatttcaaagcacattaaccatctacaagaattgtactctaagctaagccaagcgacaagaccatactgagttgttctcagtccactggtagctg

SEQ ID NO: 3466 - DNA, 121 bp, synthetic construct
  misc_feature 1..121: note = Description of artificial sequence: synthetic polynucleotide sequence
  source 1..121: mol_type = other DNA
gagaggaatactggctttttttgtattcttggagtatctggcagcaggatcaggcaaaaatcacaataaattttatatgtcagtacacctaggaaaaacagatcaaccaaatgcttgcctt

SEQ ID NO: 3467 - DNA, 121 bp, synthetic construct
  misc_feature 1..121: note = Description of artificial sequence: synthetic polynucleotide sequence
  source 1..121: mol_type = other DNA
agcaggctggagggaagggcgggggcggtcagaggagagatagagcacttcagattccaatcgaatacattagagcattagagcttttctcttcctcagggtgctctctctctctgggttg

SEQ ID NO: 3468 - DNA, 121 bp, synthetic construct
  misc_feature 1..121: note = Description of artificial sequence: synthetic polynucleotide sequence
  source 1..121: mol_type = other DNA
ttaatgagaaaagctgttgagcaccagagcaaccccgcctcttctaaataccatctgacatatacattcagcagaggaaaaatgatgtgaggtctggggcttgctttaaaatactttgggg

SEQ ID NO: 3469 - DNA, 121 bp, synthetic construct
  misc_feature 1..121: note = Description of artificial sequence: synthetic polynucleotide sequence
  source 1..121: mol_type = other DNA
ttctgtgaccgtgcaaacatgcagattatacatgcactataggagtggaatgtatgtgacttaatagcgtaatattttgtccattattttaaaacttgctttatttggtcaagacatacgg

SEQ ID NO: 3470 - DNA, 121 bp, synthetic construct
  misc_feature 1..121: note = Description of artificial sequence: synthetic polynucleotide sequence
  source 1..121: mol_type = other DNA
taaatatttgttttgtactgagaacaaaacagtgaccataatgcagtgaaggtaacacaattctgctatttctaactgtccaggtctcactcttgggctgtcatgttccccagaaatgggc

SEQ ID NO: 3471 - DNA, 121 bp, synthetic construct
  misc_feature 1..121: note = Description of artificial sequence: synthetic polynucleotide sequence
  source 1..121: mol_type = other DNA
ccctgcctctcctgagccaacgataggccaaagtttctcaaagagtggtcttgagttatctacatcaaaatccctaagactcttattaccttcagattcctaggtcctactgtaaatgcac

SEQ ID NO: 3472 - DNA, 121 bp, synthetic construct
  misc_feature 1..121: note = Description of artificial sequence: synthetic polynucleotide sequence
  source 1..121: mol_type = other DNA
aggatgttacagagcctctggagtacttaataagacgctgcatctgcccactgcagggacttgaaagttcaggtgtttctccttcgtgccgtttcgtgtacacaacatgggaatgaagaaa

SEQ ID NO: 3473 - DNA, 121 bp, synthetic construct
  misc_feature 1..121: note = Description of artificial sequence: synthetic polynucleotide sequence
  source 1..121: mol_type = other DNA
ctagggcagacctgccaggcacagcaaatgttgtttgcccagcacagagctgtgaacacgcacagtggacaaagaccattctccttgggatggtgaactgtaatctcttagtcacatcaga

SEQ ID NO: 3474 - DNA, 121 bp, synthetic construct
  misc_feature 1..121: note = Description of artificial sequence: synthetic polynucleotide sequence
  source 1..121: mol_type = other DNA
aataatgcaaaatggatgactaattataaaacaagttaaaatttaaaatatatatttcacggatgcagtaataaagcaaggaaaaagtgagcataggatttgggataatggttacttcaga

SEQ ID NO: 3475 - DNA, 194 bp, synthetic construct
  misc_feature 1..194: note = Description of artificial sequence: synthetic polynucleotide sequence
  source 1..194: mol_type = other DNA
aatgtccaccacggtcaatgtagattcccttgcggaatatgagaagagccagatcaagagagccctggagctggggacggtgatgactgtgttcagcttccgcaagtccacccccgagcggagaaccgtccaggtgatcatggagacgcggcaggtggcctggagcaagaccgctgacaagatcgagggcttct

SEQ ID NO: 3476 - DNA, 145 bp, synthetic construct
  misc_feature 1..145: note = Description of artificial sequence: synthetic polynucleotide sequence
  source 1..145: mol_type = other DNA
gtggatatcatggaaataaaagaaatccgcccagggaagaactccaaagatttcgagcgagcaaaagcagttcgccagaaagaagactgctgcttcaccatcctatatggcactcagttcgtcctcagcacgctcagcttggcag

SEQ ID NO: 3477 - DNA, 121 bp, synthetic construct
  misc_feature 1..121: note = Description of artificial sequence: synthetic polynucleotide sequence
  source 1..121: mol_type = other DNA
tttctccactccagctgactctaaagaggatgcagttaactggctctctggcttgaaaatcttacaccaggaagcgatgaatgcgtccacgcccaccattatcgagaggtagttggctttt

SEQ ID NO: 3478 - DNA, 121 bp, synthetic construct
  misc_feature 1..121: note = Description of artificial sequence: synthetic polynucleotide sequence
  source 1..121: mol_type = other DNA
tctttctctctttcttttgtctcatatttctttccagttggctgagaaagcagatatattctgtggatcaaaccagaagaaacaggtaagagtcattcagtttttttctgatcactttgga

SEQ ID NO: 3479 - DNA, 121 bp, synthetic construct
  misc_feature 1..121: note = Description of artificial sequence: synthetic polynucleotide sequence
  source 1..121: mol_type = other DNA
ggtctccctcttttgcagcatcagtctccgagagttgaagaccatcttgcccctgatcaactttaaagtgagcagtgccaagttccttaaagataagtttgtggtaagtttcatggctcag

SEQ ID NO: 3480 - DNA, 121 bp, synthetic construct
  misc_feature 1..121: note = Description of artificial sequence: synthetic polynucleotide sequence
  source 1..121: mol_type = other DNA
acttttttcatatttacaggaaataggagcacacaaagatgagctcagctttgaacagttccatctcttctataaaaaacttatgtttgaacagcaaaaatcggtaagatgattcttgagc

SEQ ID NO: 3481 - DNA, 121 bp, synthetic construct
  misc_feature 1..121: note = Description of artificial sequence: synthetic polynucleotide sequence
  source 1..121: mol_type = other DNA
gtctaaggttcttttttttgtgtgtgctttccatttcagattctcgatgaattcaaaaaggattcgtccgtgttcatcctggggtgaggcagctcttgtgtgtcgttcggggcggctgtgc

SEQ ID NO: 3482 - DNA, 121 bp, synthetic construct
  misc_feature 1..121: note = Description of artificial sequence: synthetic polynucleotide sequence
  source 1..121: mol_type = other DNA
tgcaccccctttccccgaggataggaacactgacaggccggatgcctctgctgtttacctgcatgacttccagaggtttctcatacatgaacagcaggtgagagcacaaggtgtgtgggtg

SEQ ID NO: 3483 - DNA, 121 bp, synthetic construct
  misc_feature 1..121: note = Description of artificial sequence: synthetic polynucleotide sequence
  source 1..121: mol_type = other DNA
tcattttaaggagcattgggctcaggatctgaacaaagtccgtgagcggatgacaaagttcattgatgacaccatgcgtgaaactgctgagcctttcttgtttgtggatgaggtgagtagg

SEQ ID NO: 3484 - DNA, 121 bp, synthetic construct
  misc_feature 1..121: note = Description of artificial sequence: synthetic polynucleotide sequence
  source 1..121: mol_type = other DNA
gttcctcacgtacctgttttcacgagaaaacagcatctgggatgagaagtatgacgcggtggacatgcaggacatgaacaaccccctgtctcattactggatctcctcgtcacataacacg

SEQ ID NO: 3485 - DNA, 121 bp, synthetic construct
  misc_feature 1..121: note = Description of artificial sequence: synthetic polynucleotide sequence
  source 1..121: mol_type = other DNA
ctgccttctctcctgcaggtaccttacaggtgaccagctgcggagcgagtcgtccccagaagcttacatccgctgcctgcgcatgggctgtcgctgcattgaacgtgagtagctccttctt

SEQ ID NO: 3486 - DNA, 121 bp, synthetic construct
  misc_feature 1..121: note = Description of artificial sequence: synthetic polynucleotide sequence
  source 1..121: mol_type = other DNA
tggactgctgggacgggcccgatgggaagccggtcatctaccatggctggacgcggactaccaagatcaagtttgacgacgtcgtgcaggccatcaaagaccacgcctttgttacctcgag

SEQ ID NO: 3487 - DNA, 170 bp, synthetic construct
  misc_feature 1..170: note = Description of artificial sequence: synthetic polynucleotide sequence
  source 1..170: mol_type = other DNA
gcttcccagtgatcctgtccatcgaggagcactgcagcgtggagcaacagcgtcacatggccaaggccttcaaggaagtatttggcgacctgctgttgacgaagcccacggaggccagtgctgaccagctgccctcgcccagccagctgcgggagaagatcatcatcaag

SEQ ID NO: 3488 - DNA, 121 bp, synthetic construct
  misc_feature 1..121: note = Description of artificial sequence: synthetic polynucleotide sequence
  source 1..121: mol_type = other DNA
cccctcagcataagaagctgggcccccgaggcgatgtggatgtcaacatggaggacaagaaggacgaacacaagcaacagggggagctgtacatgtgggattccattgaccaggtgggcct

SEQ ID NO: 3489 - DNA, 121 bp, synthetic construct
  misc_feature 1..121: note = Description of artificial sequence: synthetic polynucleotide sequence
  source 1..121: mol_type = other DNA
cagtttcactttctagaaatggactcggcactactgcgccattgccgatgccaagctgtccttcagtgatgacattgaacagactatggaggaggaagtgccccaggtagggggacaccct

SEQ ID NO: 3490 - DNA, 177 bp, synthetic construct
  misc_feature 1..177: note = Description of artificial sequence: synthetic polynucleotide sequence
  source 1..177: mol_type = other DNA
ggatataccccctacagaactacattttggggagaaatggttccacaagaaggtggagaagaggacgagtgccgagaagttgctgcaggaatactgcatggagacggggggcaaggatggcaccttcctggttcgggagagcgagaccttccccaatgactacaccctgtccttctg

SEQ ID NO: 3491 - DNA, 202 bp, synthetic construct
  misc_feature 1..202: note = Description of artificial sequence: synthetic polynucleotide sequence
  source 1..202: mol_type = other DNA
ggcggtcaggccgggtccagcactgccggatccgctccaccatggagggcgggaccctgaaatactacttgactgacaacctcaccttcagcagcatctatgccctcatccagcactaccgcgagacgcacctgcgctgcgccgagttcgagctgcggctcacggaccctgtgcccaaccccaacccccacgagtccaagcc

SEQ ID NO: 3492 - DNA, 121 bp, synthetic construct
  misc_feature 1..121: note = Description of artificial sequence: synthetic polynucleotide sequence
  source 1..121: mol_type = other DNA
ggtggtactatgacagcctgagccgcggagaggcagaggacatgctgatgaggattccccgggacggggccttcctgatccggaagcgagaggggagcgactcctatgccatcaccttcag

SEQ ID NO: 3493 - DNA, 182 bp, synthetic construct
  misc_feature 1..182: note = Description of artificial sequence: synthetic polynucleotide sequence
  source 1..182: mol_type = other DNA
gggctaggggcaaggtaaagcattgtcgcatcaaccgggacggccggcactttgtgctggggacctccgcctattttgagagtctggtggagctcgtcagttactacgagaagcattcactctaccgaaagatgagactgcgctaccccgtgacccccgagctcctggagcgctacaatatg

SEQ ID NO: 3494 - DNA, 121 bp, synthetic construct
  misc_feature 1..121: note = Description of artificial sequence: synthetic polynucleotide sequence
  source 1..121: mol_type = other DNA
tttctttctttctttttttttccaggaaagagatataaactccctctacgacgtcagcagaatgtatgtggatcccagtgaaatcaatccgtccatggtacggtgccgaacctccaattca

SEQ ID NO: 3495 - DNA, 121 bp, synthetic construct
  misc_feature 1..121: note = Description of artificial sequence: synthetic polynucleotide sequence
  source 1..121: mol_type = other DNA
tgaaagcctcagagaaccgtgaaagctctgtatgactacaaagccaagcgaagcgatgagctgagcttctgccgtggtgccctcatccacaatgtctccaaggagcccgggggctggtaag

SEQ ID NO: 3496 - DNA, 121 bp, synthetic construct
  misc_feature 1..121: note = Description of artificial sequence: synthetic polynucleotide sequence
  source 1..121: mol_type = other DNA
ctaccatttattgaagtctttctaagtggcaagcagtctgctaattgctttccatgcattgtctaaccaaatcttcaaccaaatcttcattactccctgtgacaaaagatgcggcaaatga

SEQ ID NO: 3497 - DNA, 121 bp, synthetic construct
  misc_feature 1..121: note = Description of artificial sequence: synthetic polynucleotide sequence
  source 1..121: mol_type = other DNA
cttcttatccaggtggaaaggagactatggaaccaggatccagcagtacttcccatccaactacgtcgaggacatctcaactgcagacttcgaggagctagaaaagcaggtgagtccccct

SEQ ID NO: 3498 - DNA, 121 bp, synthetic construct
  misc_feature 1..121: note = Description of artificial sequence: synthetic polynucleotide sequence
  source 1..121: mol_type = other DNA
cgtgagttatgtcttgtttcttcacagattattgaagacaatcccttagggtctctttgcagaggaatattggacctcaatacctataacgtcggtacgtgcacacatcatcttagcctgg

SEQ ID NO: 3499 - DNA, 159 bp, synthetic construct
  misc_feature 1..159: note = Description of artificial sequence: synthetic polynucleotide sequence
  source 1..159: mol_type = other DNA
gtgaaagcccctcagggaaaaaaccagaagtcctttgtcttcatcctggagcccaagcagcagggcgatcctccggtggagtttgccacagacagggtggaggagctctttgagtggtttcagagcatccgagagatcacctggaagattgacaccaag

SEQ ID NO: 3500 - DNA, 121 bp, synthetic construct
  misc_feature 1..121: note = Description of artificial sequence: synthetic polynucleotide sequence
  source 1..121: mol_type = other DNA
tccaaacaggagaacaacatgaagtactgggagaagaaccagtccatcgccatcgagctctctgacctggttgtctactgcaaaccaaccagcaaaaccaaggacaacttaggtaacatct

SEQ ID NO: 3501 - DNA, 211 bp, synthetic construct
  misc_feature 1..211: note = Description of artificial sequence: synthetic polynucleotide sequence
  source 1..211: mol_type = other DNA
gaaaatcctgacttccgagaaatccgctcctttgtggagacgaaggctgacagcatcatcagacagaagcccgtcgacctcctgaagtacaatcaaaagggcctgacccgcgtctacccaaagggacaaagagttgactcttcaaactacgaccccttccgcctctggctgtgcggttctcagatggtggcactcaatttccagacggcag

SEQ ID NO: 3502 - DNA, 147 bp, synthetic construct
  misc_feature 1..147: note = Description of artificial sequence: synthetic polynucleotide sequence
  source 1..147: mol_type = other DNA
gataagtacatgcagatgaatcacgcattgttttctctcaatgggcgcacgggctacgttctgcagcctgagagcatgaggacagagaaatatgacccgatgccacccgagtcccagaggaagatcctgatgacgctgacagtcaag

SEQ ID NO: 3503 - DNA, 121 bp, synthetic construct
  misc_feature 1..121: note = Description of artificial sequence: synthetic polynucleotide sequence
  source 1..121: mol_type = other DNA
caggttctcggtgctcgccatctccccaaacttggacgaagtattgcctgtccctttgtagaagtggagatctgtggagccgagtatgacaacaacaagttcaagacgacggttgtgagta

SEQ ID NO: 3504 - DNA, 169 bp, synthetic construct
  misc_feature 1..169: note = Description of artificial sequence: synthetic polynucleotide sequence
  source 1..169: mol_type = other DNA
gatgataatggcctcagccctatctgggctccaacacaggagaaggtgacatttgaaatttatgacccaaacctggcatttctgcgctttgtggtttatgaagaagatatgttcagcgatcccaactttcttgctcatgccacttaccccattaaagcagtcaaatcag

SEQ ID NO: 3505 - DNA, 121 bp, synthetic construct
  misc_feature 1..121: note = Description of artificial sequence: synthetic polynucleotide sequence
  source 1..121: mol_type = other DNA
ccttgttctgcttcaggattcaggtccgttcctctgaagaatgggtacagcgaggacatagagctggcttccctcctggttttctgtgagatgcggccagtcctggtgagtggagaaacac

SEQ ID NO: 3506 - DNA, 186 bp, synthetic construct
  misc_feature 1..186: note = Description of artificial sequence: synthetic polynucleotide sequence
  source 1..186: mol_type = other DNA
ggagagcgaagaggaactttactcctcctgtcgccagctgaggaggcggcaagaagaactgaacaaccagctctttctgtatgacacacaccagaacttgcgcaatgccaaccgggatgccctggttaaagagttcagtgttaatgagaaccagctccagctgtaccaggagaaatgcaacaagag

SEQ ID NO: 3507 - DNA, 121 bp, synthetic construct
  misc_feature 1..121: note = Description of artificial sequence: synthetic polynucleotide sequence
  source 1..121: mol_type = other DNA
catggcccactgctgatggtgaaatctgttttatttcaggttaagagagaagagagtcagcaacagcaagttttactcatagaagctggggtatgtgtgtaagggtattgtgtgtgtgcgc

SEQ ID NO: 3508 - DNA, 121 bp, synthetic construct
  misc_feature 1..121: note = Description of artificial sequence: synthetic polynucleotide sequence
  source 1..121: mol_type = other DNA
actctgcattccctggccctttaggcttaactctgccttccaaccctgaataattccttggtttggtcctaaaaacttgatggagatcccaggcttgtgctccaggcattgtgcaggacta

SEQ ID NO: 3509 - DNA, 121 bp, synthetic construct
  misc_feature 1..121: note = Description of artificial sequence: synthetic polynucleotide sequence
  source 1..121: mol_type = other DNA
gccacactgtataacctggggtttaactactttttgagcttctgattccttaaatgtgagaagggtatacaggcctaccttgttgatattgaggatttgattccagacaacggcaatcaag

SEQ ID NO: 3510 - DNA, 121 bp, synthetic construct
  misc_feature 1..121: note = Description of artificial sequence: synthetic polynucleotide sequence
  source 1..121: mol_type = other DNA
gttttattttggaacggctttttaaccttcagaagtacattttgtctggaggaccagagtatcgatgtgatcctacctgtagattcttggcaagagagaaaatgttcttattaatgcagaa

SEQ ID NO: 3511 - DNA, 121 bp, synthetic construct
  misc_feature 1..121: note = Description of artificial sequence: synthetic polynucleotide sequence
  source 1..121: mol_type = other DNA
acactcatgacagaaggggcctcctatggtttgtccgctgctgtgtccggcattaagaaaggcgctcagcacggcgtcatcagccataaatatttgtggaatgtacagacaggggattgaa

SEQ ID NO: 3512 - DNA, 121 bp, synthetic construct
  misc_feature 1..121: note = Description of artificial sequence: synthetic polynucleotide sequence
  source 1..121: mol_type = other DNA
aggggggctgatggcattcaaggtctggtcctcagccttgatggatagaaacccaagttcttcattccttagaggcagctcaagacaaagaaatctgactcacatccacaaaacccacaga

SEQ ID NO: 3513 - DNA, 121 bp, synthetic construct
  misc_feature 1..121: note = Description of artificial sequence: synthetic polynucleotide sequence
  source 1..121: mol_type = other DNA
atttcaggattccaaactgataaggccttgcctctgtgtggaaccgtccacggctcctgtggtgtggagtctcctctctccctgagaggcctgccctggtccccagcctcgtcccactcct

SEQ ID NO: 3514 - DNA, 121 bp, synthetic construct
  misc_feature 1..121: note = Description of artificial sequence: synthetic polynucleotide sequence
  source 1..121: mol_type = other DNA
agcagcgagtcgtcccccgtgtcctctccggccaccaaccacagctcccccgccagcacacccaagcgcgtgcccatgggccctatcatcgtcccccctgggggccacagcgtgcccagca

SEQ ID NO: 3515 - DNA, 121 bp, synthetic construct
  misc_feature 1..121: note = Description of artificial sequence: synthetic polynucleotide sequence
  source 1..121: mol_type = other DNA
cgtggtgaccatcgctccaaccaaaaccgtgaatggtgtctggaggagtgagagccggcaggtgagtggggcggggcagggagcctagcgtcctctaagtggggaggctggattcaggcat

SEQ ID NO: 3516 - DNA, 121 bp, synthetic construct
  misc_feature 1..121: note = Description of artificial sequence: synthetic polynucleotide sequence
  source 1..121: mol_type = other DNA
tttgcactcagggctgtgaggtcatggaggccagcattgccttctcatggcaggtgtcccggagtccctgaatctgtgggtttcccccaagccagcacctttgctgcaaacctctgagttt

SEQ ID NO: 3517 - DNA, 176 bp, synthetic construct
  misc_feature 1..176: note = Description of artificial sequence: synthetic polynucleotide sequence
  source 1..176: mol_type = other DNA
ggatgtgtgaccggaatggtggtcggcggcttcgacagtggctgatcgagcagattgacagtagcatgtatccaggactgatttgggagaatgaggagaagagcatgttccggatcccttggaaacacgctggcaagcaagattataatcaggaagtggatgcctccatttttaag

SEQ ID NO: 3518 - DNA, 185 bp, synthetic construct
  misc_feature 1..185: note = Description of artificial sequence: synthetic polynucleotide sequence
  source 1..185: mol_type = other DNA
ggcctgggcagtttttaaagggaagtttaaagaaggggacaaagctgaaccagccacttggaagacgaggttacgctgtgctttgaataagagcccagattttgaggaagtgacggaccggtcccaactggacatttccgagccatacaaagtttaccgaattgttcctgaggaagagcaaaaat

SEQ ID NO: 3519 - DNA, 121 bp, synthetic construct
  misc_feature 1..121: note = Description of artificial sequence: synthetic polynucleotide sequence
  source 1..121: mol_type = other DNA
gtctggttttctgtaggcaaactaggcgtggcaactgctggctgcgtgaatgaagttacagagatggagtgcggtcgctctgaaatcgacgagctgatcaaggaggtaagcagaggcagca

SEQ ID NO: 3520 - DNA, 121 bp, synthetic construct
  misc_feature 1..121: note = Description of artificial sequence: synthetic polynucleotide sequence
  source 1..121: mol_type = other DNA
ctgtgcagccttctgtggacgattacatggggatgatcaaaaggagcccttccccgccggaggcctgtcggagtcagctccttccagactggtgggcgcagcagcccagcacaggtgaggg

SEQ ID NO: 3521 - DNA, 121 bp, synthetic construct
  misc_feature 1..121: note = Description of artificial sequence: synthetic polynucleotide sequence
  source 1..121: mol_type = other DNA
gggtggctctgagcttgcttttctgtttctcctgcaggcgtgccgctggtgacggggtacaccacctacgacgcgcaccattcaggtacggggtggtccgggctgagaggggcgtgggcac

SEQ ID NO: 3522 - DNA, 388 bp, synthetic construct
  misc_feature 1..388: note = Description of artificial sequence: synthetic polynucleotide sequence
  source 1..388: mol_type = other DNA
gcattctcccagatggtgatcagcttctactatgggggcaagctggtgggccaggccaccaccacctgccccgagggctgccgcctgtccctgagccagcctgggctgcccggcaccaagctgtatgggcccgagggcctggagctggtgcgcttcccgccggccgacgccatccccagcgagcgacagaggcaggtgacgcggaagctgttcgggcacctggagcgcggggtgctgctgcacagcagccggcagggcgtgttcgtcaagcggctgtgccagggccgcgtgttctgcagcggcaacgccgtggtgtgcaaaggcaggcccaacaagctggagcgtgatgaggtggtccaggtcttcgacaccagccagttcttccgag

SEQ ID NO: 3523 - DNA, 121 bp, synthetic construct
  misc_feature 1..121: note = Description of artificial sequence: synthetic polynucleotide sequence
  source 1..121: mol_type = other DNA
cagagctgcagcagttctataacagccagggccggcttcctgacggcagggtggtgctgtgctttggggaagagtttccggatatggcccccttgcgctccaaactcattctcgtgcaggt

SEQ ID NO: 3524 - DNA, 178 bp, synthetic construct
  misc_feature 1..178: note = Description of artificial sequence: synthetic polynucleotide sequence
  source 1..178: mol_type = other DNA
gattgagcagctgtatgtccggcaactggcagaagaggctgggaagagctgtggagccggctctgtgatgcaggcccccgaggagccgccgccagaccaggtcttccggatgtttccagatatttgtgcctcacaccagagatcatttttcagagaaaaccaacagatcaccgtctaa

SEQ ID NO: 3525 - DNA, 121 bp, synthetic construct
  misc_feature 1..121: note = Description of artificial sequence: synthetic polynucleotide sequence
  source 1..121: mol_type = other DNA
tagaagctcaataatgatgattatgataatagtagcaaaaccagcaccaataatattagtaaccgcagtaataataaggatttcactaaacaaataccatgcaggagattttgttggggga

SEQ ID NO: 3526 - DNA, 121 bp, synthetic construct
  misc_feature 1..121: note = Description of artificial sequence: synthetic polynucleotide sequence
  source 1..121: mol_type = other DNA
agttataatccgaacgttcggcatttggggggaaataaatgcacccacataattaattacagaaaggccactagggaggctctcagagtttctagggtttgagtttgtcttgggttccaaa

SEQ ID NO: 3527 - DNA, 121 bp, synthetic construct
  misc_feature 1..121: note = Description of artificial sequence: synthetic polynucleotide sequence
  source 1..121: mol_type = other DNA
cccatctgaccctgcactgggagcaggtcccaggctgcccagtccacacagggctgaccgcactgaagagagttgctcaaaacctctcctctccagcctcaatggttttcattgattcctg

SEQ ID NO: 3528 - DNA, 187 bp, synthetic construct
  misc_feature 1..187: note = Description of artificial sequence: synthetic polynucleotide sequence
  source 1..187: mol_type = other DNA
gtcatgccggcaacaatacaaagtcgtcgttgacgtcgaccatgggcacgtagaaggagggcacctcgttcacgcacagggacttgtgcccggcggggtccagttcctgcaccttcagctgccactccatcctctgcacggcgttcagggccgcggcctcgtgctgctgccgcatgaggaggcaagt

SEQ ID NO: 3529 - DNA, 121 bp, synthetic construct
  misc_feature 1..121: note = Description of artificial sequence: synthetic polynucleotide sequence
  source 1..121: mol_type = other DNA
cgcgcaacaccgaccttcatgcggtcatacttgtcatccacgtcctggagccaggagatgaactggcgggcgttgaaacggtcgcgcactgacttgttctcgtcaccctgtggaaaccaaa

SEQ ID NO: 3530 - DNA, 145 bp, synthetic construct
  misc_feature 1..145: note = Description of artificial sequence: synthetic polynucleotide sequence
  source 1..145: mol_type = other DNA
cctggctctccaggggcatgttgtagacctcggagtccagcagcatcgtgcaggcgctgaatggcactgcctggttggcgatggtcctggccgcccggcagtgaacccgcagaatctcctgctcacaggatacgatcagcttctc

SEQ ID NO: 3531 - DNA, 121 bp, synthetic construct
  misc_feature 1..121: note = Description of artificial sequence: synthetic polynucleotide sequence
  source 1..121: mol_type = other DNA
agcccacttacccgctcgatgctgtgctgtagacgcagctttccccggacggcctcctgctgcctgaacagctccttcaggggctccgccagggagggagggggtgcgatctacaggcaaa

SEQ ID NO: 3532 - DNA, 358 bp, synthetic construct
  misc_feature 1..358: note = Description of artificial sequence: synthetic polynucleotide sequence
  source 1..358: mol_type = other DNA
ccacggggatgtggagcttgctgagcggcttgccgtccaggaggtaggagcccgtgtaggtgacgtactcggcgtagcactggggcgcctgcggcgtgatacagcacaggatcttgcgcttctcctcgatcttcttcctgatctgcaggtattcgaagtaggggttggccctgtcgctgtggtagggctcgatggcatccagcttgatggcgtccacgatggcggccagcgtctgctggatcacctcccgcgtctgctgcgtggacgtgttcagctgctgctgcagctgctgggtggagcgctgaaagcggcgtttgcgcggatgctgggcctgggcgtcgtcgtcctcggagccgcg

SEQ ID NO: 3533 - DNA, 478 bp, synthetic construct
  misc_feature 1..478: note = Description of artificial sequence: synthetic polynucleotide sequence
  source 1..478: mol_type = other DNA
ggccttggccctggtgaccggggcaggggtgggggcgcactccttctcggaggggggcgggccctgcttgctctggttcgcgagcatctgcgcccggttcctggtcatgcgctgagggatctcctccactcggggggccttcggggcttcggccgtgggttttggttctgcggcttccggctggatgccgccaggagggccttcggctggggcggcggcacgggaggcctcagtgtcgtcctcggggccggcaccgtctgcggcctgagcttgtgccacagtgttcggggcggggccgtcaggggcacagagggacgcggcgggggggccttcagcctcagccccctggtctccgctccccagtgggcgctgttctgggggaacgggcgcgggctccacgctggagtccggatccccacgggccctctcttccggcaccgtctccgcctccaccgcagcttctagagccacgtccagc

SEQ ID NO: 3534 - DNA, 478 bp, synthetic construct
  misc_feature 1..478: note = Description of artificial sequence: synthetic polynucleotide sequence
  source 1..478: mol_type = other DNA
tttggctcccctgagggctcaggctcgagctctgcagggagccgggtggaggcctggtcaggaggcagtgccggcggctcctcagccactacggtggaaacatccccaccgtttatgaccccgggggcccctggaggcatctcttctggaggagcaagactttcttccacgggttccgcttcaccatctgcggcatctttagtctgcaggggaagctccggcagggagaagggccccaggtccaggtcgtcctcggggccggcgaaggcgtccgcccagggcaccggctccacctggccgaggtgagacaggccgcggctgccgtccaggaagctattttccaggggccccagagcctccacctgagccacagcggctacacaggcgggctcgggggccacgtccagcggggcttccggaagtgacttgcagttgctgaagaaggactccagcccggagggaggggcgtagggagccg

SEQ ID NO: 3535 - DNA, 479 bp, synthetic construct
  misc_feature 1..479: note = Description of artificial sequence: synthetic polynucleotide sequence
  source 1..479: mol_type = other DNA
cctctgaggtggagatggcggcggggacggcgtccactccgtccttgacgtcctccagccccggctcagcgacgggcagagcgtacggggcaggagaggcgggaggggcggggtacggcgcctccgaggcgctgaagggccctggggcggcagagtggagggggtccgcggggcagaaacgctttggggactcggggaatctctgtggagacttcagcaggaggtccgagcccacaggccagctcacagggttttcagaggtgcccccgatcaggctagaggcaagcgcctgctcggaggggtgggcccactcaacgggctcctcggtgatgacggcgctgaagggaccctcgtccagcggctccaggtagctgggctccggggggatgatggcggccgtcgcctgctggtcctcggaggtgtccaggtccgggggaagggccccttcgagggaaggaaccagcagctcggctctgggg

SEQ ID NO: 3536 - DNA, 478 bp, synthetic construct
  misc_feature 1..478: note = Description of artificial sequence: synthetic polynucleotide sequence
  source 1..478: mol_type = other DNA
gaaggggaaggttttgcttgtaaacttgagaagacgccctctggagacggggtgacagtgacaacggcagccggtgggcagtgcaaagcgtcgactttgggcgacgggaggccatagtctggggagtagtaccctggcgacaagcaggcaaacttctccgcgggaaccgggggcaggggcgccctgtcttccatcgagggtggcatgggagagtcgtagctggaggcagcaggaacgctctgctgcctgaagagcttgtctccgacgctgaattcttcctcgggggtcctcctaatgtcgacagagaccgagcggtaaaggtttgtggagagaggcctggcaggagcctggctggcgttttccgaaagcccacttgaagccacggagaacctgtcgaaaaaggagggggagcaggcgctggtgggagcggtgggcacgggcgtggagtgctgcgagtcggcgcagtcgaacacgaggt

SEQ ID NO: 3537 - DNA, 121 bp, synthetic construct
  misc_feature 1..121: note = Description of artificial sequence: synthetic polynucleotide sequence
  source 1..121: mol_type = other DNA
ccgcgtagtcatcggcgctgcaggacggggtcctgggcgtgtgcatcacctcctcgtagctggggcaggatagcaccgacgtaggggtgggcacgccagtgggccggctctggtcaggcct

SEQ ID NO: 3538 - DNA, 358 bp, synthetic construct
  misc_feature 1..358: note = Description of artificial sequence: synthetic polynucleotide sequence
  source 1..358: mol_type = other DNA
gggggacgcaggcaggacctctttcatgtgagggcctgccagccagtctttggagtctgcacctgatgctgggtgtagcttattttccgcggcaggtggaataggagtcgactctttgagctttttgtctttaaatggagggtccagccccggcggtttcttagcaggaatgtccagacccttcttccgcccgtcgtctgccggcttcgccttctccttgagcttggggtctccggaccggtgcctcagcttctccatttgcttcatcctctccttgtgccgcttgtggcgctcctcgatctccaggtccttctgggacagcatcctctcgaagctggtcatcatcaggtcgccgtcc

SEQ ID NO: 3539 - DNA, 478 bp, synthetic construct
  misc_feature 1..478: note = Description of artificial sequence: synthetic polynucleotide sequence
  source 1..478: mol_type = other DNA
cccaggagcttctccctgggcctggcgtctttcttgcctgggtctttggatggcgctaccttatcattcccgttgctcatcttcactgggtcgcccttttctttctctgcaccgtccttgaatttctccttcagtttggcatcgccgagcctcgggccctcgtccctggacttgtctttgagcacgcggggcgggctgtccttgtccctggtggcgggcttctgctcgtccctgtgatgccgcaggagctcgtccctgtgatgccgcagcagcccatccgcatgcctgtcccggtgcctctccttctcgtctctccatttctccctgtgtttctctctcttcttcttctcttttaggatgttgatggcactagatccataaggctttagttccttttctattttcttggaaggttctctctcggaatcatttttatctttcttttcggtagaaaacaattcaatggttttatctagct

SEQ ID NO: 3540 - DNA, 478 bp, synthetic construct
  misc_feature 1..478: note = Description of artificial sequence: synthetic polynucleotide sequence
  source 1..478: mol_type = other DNA
catcttctatgtcagctttcatgttgtaagaaactccgtaagcatccgcctccaggaagtccttttcgtactggccggagtccttcctgctaccgccctccttgtaatcttcgcccttctctttcttctcggccttctctttcttggctcgctctcggtcgtggctcttcttggatgaagatgaggagtgtctgtgcctctccttctctttcagcttctcagggaggcaggcgctctccctcggcttgtcgtctccaggtggctccgtgaaagagacctccaggaaggcagtcagccccggctcctgccctcggtccgtgaagctgtcagaggagacctcgctgattttatcgttggagtcttctctgtactcatggagagcctcttcttccaacttttcaagcaggcttttttccgcgtcggcacttctcgaggacttcctctccttggaatgttctttgtccgacttctctttgtg

SEQ ID NO: 3541 - DNA, 478 bp, synthetic construct
  misc_feature 1..478: note = Description of artificial sequence: synthetic polynucleotide sequence
  source 1..478: mol_type = other DNA
tttgcttttagccttgtcttcggcagcgtgcttcttttcagccttctcggggagcttctgtttatttttcttatcttgcgtggagtccactgaggctctgtccttcctgtccttgtacttttctgtggactctttatccttcttctccttgtgcttttcaaagactttctcttttttgtctctccccgcgtcggcagcccctcggtcctttctcctgtctctgggctccttgtccttctgcctctcagggtgctgcttgtcagaagacttcctgtgtctgtcggaggcataggcctcccgtccttcctccttctcctggaggccgtccgtcctcggcaagtcgctggcctctcccatcttgaacccgctccccatgcagctgtctctgtcgtcctcactctcatctgtgaagatgtctgcgatgtaccagcttttctctttgcctttcttgtcatcttttttttcagagaagtcttct

SEQ ID NO: 3542 - DNA, 478 bp, synthetic construct
  misc_feature 1..478: note = Description of artificial sequence: synthetic polynucleotide sequence
  source 1..478: mol_type = other DNA
gagatgatcccagggaaagccttctccttcttctctttcccttggtcgagagacgctttcctttctttgtctttgccatgtgtgtctttatgtttttccttggtatcttttttctctttaaaacatttatcaaattctttgtccttctgacatttttccaggattgatttctcacttttgtccttgtcactggatttctctttgtatctttctggttttgtcttctccttcctttccttatcggggccatccttcttctccttctctcgtgctgggtggtgccgttcccacggctccaggcccttcccaaagtcgccgtcggacttgtccttgaagccactctcgcagccacactccttcagctcctcccggtgcgcctcctcgggcttggccctgccgtccctgcgctccttgcagctctccagggcgtcctttctgtcccgcccggcctctgcggactctctcctcttcttgtcct

SEQ ID NO: 3543 - DNA, 478 bp, synthetic construct
  misc_feature 1..478: note = Description of artificial sequence: synthetic polynucleotide sequence
  source 1..478: mol_type = other DNA
tttccgaaaggtagccagggacacttttatgcttttcggtctgctctttcctcttctcagagtttttatccaaatagtccctgtccttctttcggaagaagggctctctgtagtctcgcttctcccgggcccggctgtcccgcctcctctccttgctgtcctccttcaccgtctccaagatgagcttggccacagagtcgctcttcatgtccctgtagtctgtcactggcgagtcccagctgtcctcccctttgaaatcaaaggatgaatcggacaagtcagaaaaccaccgatctcgctgatcgtcagaaaggctaaatttggtgtcttcattctccagaaactgatttttgttacaatattcgtcaaaagcagaatcttccctataaaccttttcttttttgagtttttctttatcttctttaaaaatcttctccttctcttttgaaattttgtcctcttttaaatcattcttctt

SEQ ID NO: 3544 - DNA, 479 bp, synthetic construct
  misc_feature 1..479: note = Description of artificial sequence: synthetic polynucleotide sequence
  source 1..479: mol_type = other DNA
ctctaattttgagggccggtcttttgatttcttctttctctcctctttgtacagtctcagtttttcttctttcggagacttttccttcagcgatctctccttttctgctttattcgaacggtctttctcttctcggaaagacctgctgatgtctttgtttgtgtctttgattctcttcagtgatttttcatctttaaagagccattctttttcttctaatttcattttgctaagtttctcttcttttttaaagtggtcgcgatcgtgctttaacacttttagcttgttttcagtggaaagatcattctctaacagtatagccttatctgacttctgcttggagtcctcatattcgtaagtaaaacttttcaacttcagctcttggctgatggaacactgtcccttctccttgtttttgtgtttgtgttttgttttatgttttttgacaactttcccctccttgtccagtttggggacag

SEQ ID NO: 3545 - DNA, 480 bp, synthetic construct
  misc_feature 1..480: note = Description of artificial sequence: synthetic polynucleotide sequence
  source 1..480: mol_type = other DNA
cgccctccgcgctggacaggaaggggctcttcttctccgacagggaggctcgcttcctgtgctcctgcctcttcctcactggcttcagcgattccacactggagccctcagaggagtagtcagactcgcttgtcagtctcgtccttgtggagtctgataaagaactgacctctgaccaagccggggaagaaatggttttccaattgtctgtccgccagtgcttggtgtgctggtctgtgtggctggggttctgcttctgggcggcagagctcccgtgagacgaggtggaggaggcagagagggagctgaacagggaggggtccttcagcaccagcggggaccccttgaggcagccagagctccccagagagtccctgtcatcctccccactctctgaggactcgctctccgactccgaggagcagaacttgtcgctccgctttccgaagcgaacctctctgccttttgtttctttctttc

SEQ ID NO: 3546 - DNA, 480 bp, synthetic construct
  misc_feature 1..480: note = Description of artificial sequence: synthetic polynucleotide sequence
  source 1..480: mol_type = other DNA
gcttctttttcactttatttttttccttctgctgcttggcattagaaggctctcgtgtcttactaccaggcaatatcgtatgtgccgagagtctcagcttctctcctgtccccacggtgacactcgcgtcctcctcgtccgacgtgtctgacaggatacgatgggacgctttctttggtgcaatcgtgttatttttagtgtaacttttaacctccattttgggtatagagataaaactattggatttcgtttcttttctgtagtcctttttcaataggtgcttgtcgtccaccggaggaaccctgtcctgctcgtcgtcctcatcaaactcatactcgtccttgacgggggccgtggccttctgtggctctgggttcttggccttgtgcttgaggcctttttcgaactcggagtccgtgttgttgccgtcgactgaactggaaggtgcgaaggatggtgcgtcttcctcttctgagctct

SEQ ID NO: 3547 - DNA, 149 bp, synthetic construct
  misc_feature 1..149: note = Description of artificial sequence: synthetic polynucleotide sequence
  source 1..149: mol_type = other DNA
cccgtcgagctctcctcgctggaagtgtaagtgcctttgcctaacaggaggttcaccatcgtgggggagttggccactttcagcggcgtctcgcctttcctgttgctctgctgcgggttccctccgtaccgcagcagcagcttcaccac

SEQ ID NO: 3548 - DNA, 144 bp, synthetic construct
  misc_feature 1..144: note = Description of artificial sequence: synthetic polynucleotide sequence
  source 1..144: mol_type = other DNA
ccttgtagtgcccgttgttggcagcgtcgtgcaaaggcgtgtcgtcatctaggcccttggtgttcacctccgcacctgcagccagcagctgcttcgcgacgtcgtagtagccccggttacaggcctcgtgcagcgccgtccagc

SEQ ID NO: 3549 - DNA, 205 bp, synthetic construct
  misc_feature 1..205: note = Description of artificial sequence: synthetic polynucleotide sequence
  source 1..205: mol_type = other DNA
cctgcgaagtccttgacgttgacgtctgccccctcgctgatgagctctttgatgcgccgggcgtccccgcggatggcggctcggtgcaggcgggtctctccacgctcgtttctcttgttcactttatctttggtttttgaggcagagttgggcgttcccttctgacacactgtagactgggaggggtgctttggtgttgtgtcca

SEQ ID NO: 3550 - DNA, 172 bp, synthetic construct
  misc_feature 1..172: note = Description of artificial sequence: synthetic polynucleotide sequence
  source 1..172: mol_type = other DNA
cctgggctgttggcagactcctcggccgtcatctgcatgagaagggccacctgctggcgctcggagagggggtagccggctcggattccagacagccccatgccaaacagcagcccggccttccgggtgacaggctccttcttaatcctcttccgctcagggccctgcttct

SEQ ID NO: 3551 - DNA, 140 bp, synthetic construct
  misc_feature 1..140: note = Description of artificial sequence: synthetic polynucleotide sequence
  source 1..140: mol_type = other DNA
cctgtgtccgagtccttctgctccccattggcgcccgcggtgaagggcagcttccgcttgctggctcgctccctcacctccttcccgccatcgccacgctccagttttggggtcttggttagagaaactttatctttatc

SEQ ID NO: 3552 - DNA, 121 bp, synthetic construct
  misc_feature 1..121: note = Description of artificial sequence: synthetic polynucleotide sequence
  source 1..121: mol_type = other DNA
ggagggggcagcattacctttttcccagtctgcttctccaccatgtcgctgctgaggggaagctcttcctgctgtggtgctttagggcacccacccttgggcatcgtcctgctcctcaccc

SEQ ID NO: 3553 - DNA, 121 bp, synthetic construct
  misc_feature 1..121: note = Description of artificial sequence: synthetic polynucleotide sequence
  source 1..121: mol_type = other DNA
agaagagcacagcaccgtgtactgaagaagcgactgtggatctcatctcaacggctcacattccaccccaaggaatcaaagtgaaacacgggaatgacacaaataccaacatgaaaaatat

SEQ ID NO: 3554 - DNA, 121 bp, synthetic construct
  misc_feature 1..121: note = Description of artificial sequence: synthetic polynucleotide sequence
  source 1..121: mol_type = other DNA
agcccacacgatccctgcccctgggaaacagccatgtgtaaccctcccctcgagtgtgggtggaatgaggaagagggaggtgtgtctctcctgcgattagctcactcatccattgagtttg

SEQ ID NO: 3555 - DNA, 121 bp, synthetic construct
  misc_feature 1..121: note = Description of artificial sequence: synthetic polynucleotide sequence
  source 1..121: mol_type = other DNA
cacacgtatcgtccggtttttgcccacatacctcttctctcagttccctcggtttccttgtcactaattttccaatcatgttccttccaagtccctgactctccaggcaaatcattggcta

SEQ ID NO: 3556 - DNA, 121 bp, synthetic construct
  misc_feature 1..121: note = Description of artificial sequence: synthetic polynucleotide sequence
  source 1..121: mol_type = other DNA
gagcagtttagcactcagttgcaacagtcttccctaggtttcctctcctccactccatatcttctagtttgtcacaatccttgacttcttcttatatataacaaaaatgcttttgaaagtc

SEQ ID NO: 3557 - DNA, 121 bp, synthetic construct
  misc_feature 1..121: note = Description of artificial sequence: synthetic polynucleotide sequence
  source 1..121: mol_type = other DNA
acccacgtgatcacagtactagtggaataacctcacaaacatgttaccttagtatgacacgtcaacctcatatggattttaaactcaaaaaagaggccagaaagccactcagatcatctat

SEQ ID NO: 3558 - DNA, 121 bp, synthetic construct
  misc_feature 1..121: note = Description of artificial sequence: synthetic polynucleotide sequence
  source 1..121: mol_type = other DNA
agtgccatgtttctcaattggagacctacaacaacaaaaacaacattatatagtcaattcatcaattacaaaagaattaactgtaagtaggttttatccatattagatttatttgacaaca

SEQ ID NO: 3559 - DNA, 121 bp, synthetic construct
  misc_feature 1..121: note = Description of artificial sequence: synthetic polynucleotide sequence
  source 1..121: mol_type = other DNA
gagtgatctgcctgagatcctatggccagtgagcagtgagtctagctgcggagtacaggttctgaagcaggatgcgagaccgcctgcacgtgcgcatggatgatcttgaacttccccttca

SEQ ID NO: 3560 - DNA, 121 bp, synthetic construct
  misc_feature 1..121: note = Description of artificial sequence: synthetic polynucleotide sequence
  source 1..121: mol_type = other DNA
attgtagcatattgttaagtataacagtttgctaagtaaggtgagtggtataatcatatatttgtaaaaagcaaaacaaaataaagccaaaactcgaacctatctttgtgtgtttgcctat

SEQ ID NO: 3561 - DNA, 121 bp, synthetic construct
  misc_feature 1..121: note = Description of artificial sequence: synthetic polynucleotide sequence
  source 1..121: mol_type = other DNA
agaggagcacagaggaggggtgcagggagagtccagggggcttcattcctcctccagctatttatgtcttcaggcccaggtgcttcctacctatgggttctccaggttatccttgtgtcct

SEQ ID NO: 3562 - DNA, 121 bp, synthetic construct
  misc_feature 1..121: note = Description of artificial sequence: synthetic polynucleotide sequence
  source 1..121: mol_type = other DNA
atctagaataaatttcccctctgaagattcttaattttatcacaacttttgccatgtaaagtaagactcataggttctaggcataaggacaaggagatatcttttggggggcaccactcac

SEQ ID NO: 3563 - DNA, 121 bp, synthetic construct
  misc_feature 1..121: note = Description of artificial sequence: synthetic polynucleotide sequence
  source 1..121: mol_type = other DNA
tgaagatataatctgatggtcacttgtggtagaatcgcgggttctggctgtgttggatgaaggggagccgagggccaggttggctggtagctgcaaagcccgactggtggtggtgatgaaa

SEQ ID NO: 3564 - DNA, 121 bp, synthetic construct
  misc_feature 1..121: note = Description of artificial sequence: synthetic polynucleotide sequence
  source 1..121: mol_type = other DNA
ttaccattcttacctttcctgctggctgcatctgcacagggagctggggggaagcaaggagtccaggggctggatgcagagcctgggggtgcatggggcgcagagaggactgcagagaaca

SEQ ID NO: 3565 - DNA, 121 bp, synthetic construct
  misc_feature 1..121: note = Description of artificial sequence: synthetic polynucleotide sequence
  source 1..121: mol_type = other DNA
ctcccaaggtgccatactcactgagtcggagaagccagtctgctggttagcatgttccatctgcttttgcaaggacagggcaccaccaggctggaggaaacctaggtggggaagaggggca

SEQ ID NO: 3566 - DNA, 121 bp, synthetic construct
  misc_feature 1..121: note = Description of artificial sequence: synthetic polynucleotide sequence
  source 1..121: mol_type = other DNA
catgggatgttatcacctgtctgagtgggctgaaagtggccatgcacagcatagggctgtggctgtggctgagataggtactgcactgcagggaatgccgaaggagctgagaaaggaaaag

SEQ ID NO: 3567 - DNA, 155 bp, synthetic construct
  misc_feature 1..155: note = Description of artificial sequence: synthetic polynucleotide sequence
  source 1..155: mol_type = other DNA
cctctgagctgctgactaggactataagctggctgtgtgggcccatagtgaggtgggggctgagcagtcccataggcaccaccaggactgccttggaattgtccatgctctggtgtccctgcaaaagcagctgctgagcccacgtagtgccgggt

SEQ ID NO: 3568 - DNA, 121 bp, synthetic construct
  misc_feature 1..121: note = Description of artificial sequence: synthetic polynucleotide sequence
  source 1..121: mol_type = other DNA
catccaatcctactctcaccgtaagcacttggggtccaaacatttgtttggctctgtcagctgccatgagggtgcctgggcgattgtgtcctccagggctccctagaaagggagaagggct

SEQ ID NO: 3569 - DNA, 121 bp, synthetic construct
  misc_feature 1..121: note = Description of artificial sequence: synthetic polynucleotide sequence
  source 1..121: mol_type = other DNA
ggtggtttctttagtcctcaccctgcatgctgaggagatgagttcctgtgtgaacagtcaggctctgctggtatgcagctgatgttagggtggtcaggtcactggagtgaaaggaagacag

SEQ ID NO: 3570 - DNA, 121 bp, synthetic construct
  misc_feature 1..121: note = Description of artificial sequence: synthetic polynucleotide sequence
  source 1..121: mol_type = other DNA
ccacctctgttcctttcgcctccgtttttcttcctcatgtaaaactttcttgagctgcaggaaaagctggtgcttctcttcctgtagagccaaaagcttctcctccaacttcagaatctgg

SEQ ID NO: 3571 - DNA, 121 bp, synthetic construct
  misc_feature 1..121: note = Description of artificial sequence: synthetic polynucleotide sequence
  source 1..121: mol_type = other DNA
gcttacttgttccttggtctcctctaatgacattctctcttccatctcctttttcttccttctctcctgttcttccttcatcttctgttccatcatcttatccacctcttcttcctctgga

SEQ ID NO: 3572 - DNA, 121 bp, synthetic construct
  misc_feature 1..121: note = Description of artificial sequence: synthetic polynucleotide sequence
  source 1..121: mol_type = other DNA
tggccccggctcaccctgccgcttgcgctcccgctccatcataatgtgccggtgcagcgccctggccatggcgttggaaagcttggggcgctccaggagtgcgggcatggtgctgccgtgg

SEQ ID NO: 3573 - DNA, 121 bp, synthetic construct
  misc_feature 1..121: note = Description of artificial sequence: synthetic polynucleotide sequence
  source 1..121: mol_type = other DNA
ggaacaagaagtggagaatgtcagtctgagtcaggcccttctgtcttgaacatgagttttttatggcgggaggtagactgaccctttttggacttcaggtggctgtaggagacagaagcag

SEQ ID NO: 3574 - DNA, 121 bp, synthetic construct
  misc_feature 1..121: note = Description of artificial sequence: synthetic polynucleotide sequence
  source 1..121: mol_type = other DNA
cactcacctggagtgagccctgctcccccctggctccttcccagcctgggcatccttgagttccaaggcctcattcagctctcggaacatctcgaagcgctcacgcccacggatctgcagc

SEQ ID NO: 3575 - DNA, 121 bp, synthetic construct
  misc_feature 1..121: note = Description of artificial sequence: synthetic polynucleotide sequence
  source 1..121: mol_type = other DNA
ttacgacgagtttatcaggaagtaacaccatcgtaagtcaagtagcatctgtatcaggcaaagtcatagaaccattttcatgctctctttaacaattttctttttgaaagctggtctggtc

SEQ ID NO: 3576 - DNA, 121 bp, synthetic construct
  misc_feature 1..121: note = Description of artificial sequence: synthetic polynucleotide sequence
  source 1..121: mol_type = other DNA
ataagaggtcccaagacttagtacctgaagggtgaaatattctccatccagtggtttcttctttggctggggagaggagctggtgttgttgggcagtgctaggaaagaggcaaggaaaggt

SEQ ID NO: 3577 - DNA, 138 bp, synthetic construct
  misc_feature 1..138: note = Description of artificial sequence: synthetic polynucleotide sequence
  source 1..138: mol_type = other DNA
cctcgcttagtgctccctgggggcagctcgtggtgaggctcccctttcttgcggagattctcttcctctgtgcgccggtctctcccaggacaggcacaaacacgcacctcaaagctgttccgtcccagtagattacca

SEQ ID NO: 3578 - DNA, 121 bp, synthetic construct
  misc_feature 1..121: note = Description of artificial sequence: synthetic polynucleotide sequence
  source 1..121: mol_type = other DNA
cctgacctggagtcttccagtgtgatgatggtgaggatgggcctccggttcatgccgcccatgcaggaactgttacacatgtagttgtagtggatggtggtacagtcagagccaacctagg

SEQ ID NO: 3579 - DNA, 121 bp, synthetic construct
  misc_feature 1..121: note = Description of artificial sequence: synthetic polynucleotide sequence
  source 1..121: mol_type = other DNA
agacctcaggcggctcatagggcaccaccacactatgtcgaaaagtgtttctgtcatccaaatactccacacgcaaatttccttccactcggataagatgctgaggaggggccagacctaa

SEQ ID NO: 3580 - DNA, 185 bp, synthetic construct
  misc_feature 1..185: note = Description of artificial sequence: synthetic polynucleotide sequence
  source 1..185: mol_type = other DNA
ccatcgctatctgagcagcgctcatggtgggggcagcgcctcacaacctccgtcatgtgctgtgactgcttgtagatggccatggcgcggacgcgggtgccgggcgggggtgtggaatcaacccacagctgcacagggcaggtcttggccagttggcaaaacatcttgttgagggcaggggagta

SEQ ID NO: 3581 - DNA, 280 bp, synthetic construct
  misc_feature 1..280: note = Description of artificial sequence: synthetic polynucleotide sequence
  source 1..280: mol_type = other DNA
ccgtgcaagtcacagacttggctgtcccagaatgcaagaagcccagacggaaaccgtagctgccctggtaggttttctgggaagggacagaagatgacaggggccaggagggggctggtgcaggggccgccggtgtaggagctgctggtgcaggggccacggggggagcagcctctggcattctgggagcttcatctggacctgggtcttcagtgaaccattgttcaatatcgtccggggacagcatcaaatcatccattgcttgggacggcaaggggga

SEQ ID NO: 3582 - DNA, 121 bp, synthetic construct
  misc_feature 1..121: note = Description of artificial sequence: synthetic polynucleotide sequence
  source 1..121: mol_type = other DNA
ccctccaggtccccagccctccaggtccccagcccaacccttgtccttaccagaacgttgttttcaggaagtctgaaagacaagagcagaaagtcagtcccatggaattttcgcttcccac

SEQ ID NO: 3583 - DNA, 121 bp, synthetic construct
  misc_feature 1..121: note = Description of artificial sequence: synthetic polynucleotide sequence
  source 1..121: mol_type = other DNA
tgcccttccaatggatccactcacagtttccataggtctgaaaatgtttcctgactcagagggggctcgacgctaggatctgactgcggctcctccatggcagtgacccggaaggcagtct

SEQ ID NO: 3584 - DNA, 167 bp, synthetic construct
  misc_feature 1..167: note = Description of artificial sequence: synthetic polynucleotide sequence
  source 1..167: mol_type = other DNA
gatgtccagcaaagctgagaagaagcagcgattgagtggccgaggaagctcccaggcaagctggtcagggcgggccactcgggctgctgtggccacacaggagcaggggaatgccccggctgtcagtgagccagagctgcaggctgagctccccaaggaggagcctg

SEQ ID NO: 3585 - DNA, 121 bp, synthetic construct
  misc_feature 1..121: note = Description of artificial sequence: synthetic polynucleotide sequence
  source 1..121: mol_type = other DNA
ccttcctttttgtatgtttattcttcctagagccacggttggagggacctcaagcacagagtgaagaatcagtggagcccgaggcagatgtggtaggcttgggtcttccctgtggcagata

SEQ ID NO: 3586 - DNA, 172 bp, synthetic construct
  misc_feature 1..172: note = Description of artificial sequence: synthetic polynucleotide sequence
  source 1..172: mol_type = other DNA
gaagcccctcttcctttcccgagctgcgctgacaggactggcggatgcagtgtggacacaggagcatgatgccattctggaacactttgcccaggaccctacagaatccatcctcaccatcttcattgacccttgttttgggctgaagctagagctgggcatgcctgtacag

SEQ ID NO: 3587 - DNA, 230 bp, synthetic construct
  misc_feature 1..230: note = Description of artificial sequence: synthetic polynucleotide sequence
  source 1..230: mol_type = other DNA
gacccagaaccagcttgtctacttcattcgccaagcaccagttcccatcacctgggagaacttcgaggcaactgtgcagtttgggacggtgcggggcccctatatcccggccctgcttcggctgctcggtggagtctttgcccctcagatctttgcaaacacaggctggcctgagagcattagaaatcattttgcttctcatctgcacaagttcttggcctgcctgacag

SEQ ID NO: 3588 - DNA, 121 bp, synthetic construct
  misc_feature 1..121: note = Description of artificial sequence: synthetic polynucleotide sequence
  source 1..121: mol_type = other DNA
cttagacactcggtacaaactggaggggcacacggtcctctacatccctgcagaggccatgaacatgaagcctgagatggtgataaaggacaaagagctggtgcaacggctagagagtgag

SEQ ID NO: 3589 - DNA, 240 bp, synthetic construct
  misc_feature 1..240: note = Description of artificial sequence: synthetic polynucleotide sequence
  source 1..240: mol_type = other DNA
gcctccatgatccactggacccggcagataaaggagatgctcagtgcccaggagactgtggagacaggagaaaatttaggtcctctggaggagattgagttctggcgcaaccgatgcatggacctgtctggcatcagtaagcagctggtgaagaagggagtgaagcacgttgaatccatcctgcaccttgccaagtcgtcctacttggcgccctttatgaaactggcacagcagatccag

SEQ ID NO: 3590 - DNA, 193 bp, synthetic construct
  misc_feature 1..193: note = Description of artificial sequence: synthetic polynucleotide sequence
  source 1..193: mol_type = other DNA
ggatggctctcgtcaagcacagtcaaacctgacctttttgtcaatcctgaaggaaccttaccaggagttggctttcatgaagcccaaggacatctctagcaagctccctaagctgatcagtctcatccgcatcatctgggtcaactctccccactacaacactcgggagagactgacctcgctcttccgaaag

SEQ ID NO: 3591 - DNA, 159 bp, synthetic construct
  misc_feature 1..159: note = Description of artificial sequence: synthetic polynucleotide sequence
  source 1..159: mol_type = other DNA
gatgagcaatgagatcatccgcttatgctgccacgccatctccctggaccggatctttgagggatatgtctcttccagcaaggaggacctgcaaggctgcattctctgttgtcacgcttggaaagatcactacgtacaggctgtgcagatgcacatcca

SEQ ID NO: 3592 - DNA, 121 bp, synthetic construct
  misc_feature 1..121: note = Description of artificial sequence: synthetic polynucleotide sequence
  source 1..121: mol_type = other DNA
cctttctcctgacacaggttctccagtcggggctgggtcctagatcagaccagcatctttgctcaggttgatgcctttgtgcagcgctgcaaggaccttattgaggtgggaagactgaaga

SEQ ID NO: 3593 - DNA, 207 bp, synthetic construct
  misc_feature 1..207: note = Description of artificial sequence: synthetic polynucleotide sequence
  source 1..207: mol_type = other DNA
ggtatgtgactgtcagtatcacttcgcccgctgggaagatggcaagcagggtccccttccttgcttctttggtgcccaggggccacagataacacggaacttgctggagattgaggacatctttcataaaaatctgcacacgctgcgagccgttcgcgggggtatcctggatgtcaagaacacctgttggcatgaagactacaataa

SEQ ID NO: 3594 - DNA, 121 bp, synthetic construct
  misc_feature 1..121: note = Description of artificial sequence: synthetic polynucleotide sequence
  source 1..121: mol_type = other DNA
cgtgccggaatcaaggacctggaggtgatgacccagaacctgatcacctcagccttcgagttggtgcgggacgtgccgcacggcgtgcttctgctggacaccttccacaggcttgcctccc

SEQ ID NO: 3595 - DNA, 184 bp, synthetic construct
  misc_feature 1..184: note = Description of artificial sequence: synthetic polynucleotide sequence
  source 1..184: mol_type = other DNA
ggctatcaagcggacttatgacaagaaggcggtggatctctacatgctgttcaatagcgagctggccctggtgaaccgtgaacggaacaagaaatggccagacctggagccctacgtggcccagtattccggaaaggcgcgctgggtgcacatcctccggcgtcgcatcgacagagtcatgacc

SEQ ID NO: 3596 - DNA, 459 bp, synthetic construct
  misc_feature 1..459: note = Description of artificial sequence: synthetic polynucleotide sequence
  source 1..459: mol_type = other DNA
gtgccttgctggtgctcatttcctgccccgtattgggactggaaaggagagtgtgcacacctatcagcagatggtccaggccattgatgagctggttcgaaaaaccttccaagagtggacatcaagtctggacaaggattgcattcggcggttggataccccattgctgcgaatcagccaggagaaggcgggcatgctggatgtcaactttgacaagtacaggagccacctggccccttttccctatactccccttctgcagctctcccaagaatttcactcccatcttttgactcctctcttcattattctctctctttctcatacaatatgtttgctatcgtcattttacttttttttttcttcttttatttttgtctctccccacctcccaccctgctatcaacattttaattttacaacttatcttaaaacacaacaaaacaaaacaatgatcgg

SEQ ID NO: 3597 - DNA, 148 bp, synthetic construct
  misc_feature 1..148: note = Description of artificial sequence: synthetic polynucleotide sequence
  source 1..148: mol_type = other DNA
ggtcccttctgattctctttgcggaaattgactactgggagcggctgctgtttgagacgccccattacgtggtgaacgtagctgagcgagccgaggacctgcgcattctgcgtgaaaatctgctactcgttgctagagactacaatag

SEQ ID NO: 3598 - DNA, 158 bp, synthetic construct
  misc_feature 1..158: note = Description of artificial sequence: synthetic polynucleotide sequence
  source 1..158: mol_type = other DNA
ggattattgccatgctgtccccagatgagcaggccctattcaaagagcgtattcggctcctggataagaagatccacccgggactcaagaaactgcactgggccttgaagggggccagtgccttcttcatcacggagtgccgtatacatgccagcaag

SEQ ID NO: 3599 - DNA, 241 bp, synthetic construct
  misc_feature 1..241: note = Description of artificial sequence: synthetic polynucleotide sequence
  source 1..241: mol_type = other DNA
ggtgcagatgattgtgaatgagttcaaggcatccactctgaccattggctggcgagcccaagagatgtcagagaagctgctggtacgcattagtggcaaacgggtatacagggacctggaatttgaagaggaccaaagagagcatcgggcagctgtacagcagaaattgatgaacctgcaccaggatgtggtgaccatcatgaccaactcctatgaggtcttcaagaatgatggtcctgag

SEQ ID NO: 3600 - DNA, 190 bp, synthetic construct
  misc_feature 1..190: note = Description of artificial sequence: synthetic polynucleotide sequence
  source 1..190: mol_type = other DNA
gattcagcagcagtggatgctgtacatgattcggctggaccgcatgatggaggatgccctgcgcctgaatgtgaagtggtcactgctagaactatccaaggctatcaacggggatggaaagaccagcccaaacccactcttccaagtccttgtcattttgaagaatgatctgcaaggaagtgtggcacag

SEQ ID NO: 3601 - DNA, 149 bp, synthetic construct
  misc_feature 1..149: note = Description of artificial sequence: synthetic polynucleotide sequence
  source 1..149: mol_type = other DNA
ggtggaattctcacccactctgcagactttggcaggtgtggtcaatgacattggcaaccacctcttttccaccatctctgtcttctgccacctccctgacattctcaccaagcgcaagttacatcgtgaacccatccaaacagttgtgg

SEQ ID NO: 3602 - DNA, 194 bp, synthetic construct
  misc_feature 1..194: note = Description of artificial sequence: synthetic polynucleotide sequence
  source 1..194: mol_type = other DNA
gagcaagatgaggacatcaagaagatccagacccaaatcagcagcggcatgactaacaacgcaagcctgctgcagaactacctcaagacctgggacatgtaccgggagatctgggagatcaacaaggactccttcattcatcgctaccagcgcctcaaccctcctgtctcttcttttgttgccgacattgcccg

SEQ ID NO: 3603 - DNA, 202 bp, synthetic construct
  misc_feature 1..202: note = Description of artificial sequence: synthetic polynucleotide sequence
  source 1..202: mol_type = other DNA
gctacacggaagttgctaataacgtgcagaaggaggagacagtcaccaacatccagtttgtgctgctggactgttcgcacctcaagttctccctggtgcagcactgcaatgaatggcagaacaagttcgcgactctgctcagggagatggctgctgggcgcctcctggagctgcacacctacctgaaggagaacgcagagaa

SEQ ID NO: 3604 - DNA, 158 bp, synthetic construct
  misc_feature 1..158: note = Description of artificial sequence: synthetic polynucleotide sequence
  source 1..158: mol_type = other DNA
gaatcagccgccctccgcagacactggaggaactgggggtcagcttgcagctcgtggatgccctgaagcacgacttggccaacgtggagactcagatccctcccatacacgagcaatttgccattcttgaaaagtacgaggtgccagtcgaggacagt

SEQ ID NO: 3605 - DNA, 176 bp, synthetic construct
  misc_feature 1..176: note = Description of artificial sequence: synthetic polynucleotide sequence
  source 1..176: mol_type = other DNA
ggtcctggagatgctggacagtctcaacggggagtgggttgtcttccaacaaactctgctggacagtaagcaaatgctgaagaaacacaaggagaaattcaagacaggcctgatccactcggcagatgacttcaagaagaaagcacatacacttctggaagatttcgaattcaaag

SEQ ID NO: 3606 - DNA, 165 bp, synthetic construct
  misc_feature 1..165: note = Description of artificial sequence: synthetic polynucleotide sequence
  source 1..165: mol_type = other DNA
ggccatttcaccagcaacgtgggatacatgtctgccttagaccagattacacaagtgcgggccatgctgatggccatgcgggaagaggaaaatagtctccgagccaacctgggcatcttcaagatcgagcagccaccctccaaggaccttcagaacctggagaag

SEQ ID NO: 3607 - DNA, 163 bp, synthetic construct
  misc_feature 1..163: note = Description of artificial sequence: synthetic polynucleotide sequence
  source 1..163: mol_type = other DNA
ggagctcgatgccctccagcaaatctgggagatcgcacgagactgggaggagaactggaatgagtggaagactggccggttcctgatcctgcagacggaaaccatggagaccacggcccacgggctgtttcgtcgcctcacaaaattagccaaagagtataag

SEQ ID NO: 3608 - DNA, 121 bp, synthetic construct
  misc_feature 1..121: note = Description of artificial sequence: synthetic polynucleotide sequence
  source 1..121: mol_type = other DNA
tttgctcaggaccgaaactgggaaattattgaaaccactcgctcaaaaatagagcagttcaagaggaccatgcctctcatctcagacctgcggaaccctgcccttagagagaggtgaggct

SEQ ID NO: 3609 - DNA, 158 bp, synthetic construct
  misc_feature 1..158: note = Description of artificial sequence: synthetic polynucleotide sequence
  source 1..158: mol_type = other DNA
ggcactgggaccaggtccgggatgagatccagcgggagtttgatcaggaatctgaaagcttcaccttggagcagattgtggagcttgggatggatcagcatgtggagaaaattggggagatctctgcttcagcaactaaagagctggctatagaagtg

SEQ ID NO: 3610 - DNA, 121 bp, synthetic construct
  misc_feature 1..121: note = Description of artificial sequence: synthetic polynucleotide sequence
  source 1..121: mol_type = other DNA
ccccaatttctctccacaggctttacaaaacattgccaagacctgggatgtgactcagctcgacatagtaccctacaaggataagggccatcatcggctcaggtcaggggagctggggctc

SEQ ID NO: 3611 - DNA, 182 bp, synthetic construct
  misc_feature 1..182: note = Description of artificial sequence: synthetic polynucleotide sequence
  source 1..182: mol_type = other DNA
gaggtacagaagaagtattccaggcactggaagataaccaggtagctctgtctaccatgaaggcatcacgctttgtcaaggcctttgagaaggatgtggaccactgggaacgctgcctctccctcattttggaggttattgagatgattctcacagtgcagcgtcagtggatgtacttagag

SEQ ID NO: 3612 - DNA, 140 bp, synthetic construct
  misc_feature 1..140: note = Description of artificial sequence: synthetic polynucleotide sequence
  source 1..140: mol_type = other DNA
gaatatcttcctaggagaagacatccgcaagcagctgcccaatgaatcgaccttatttgaccaggtcaacagcaactggaaagccatcatggacaggatgaacaaggacaacaatgctctccggagcacccatcacccag

SEQ ID NO: 3613 - DNA, 219 bp, synthetic construct
  misc_feature 1..219: note = Description of artificial sequence: synthetic polynucleotide sequence
  source 1..219: mol_type = other DNA
ggcctcctggacacattgatagaaatgaatacaatcctggaagatattcagaaatctctggatatgtatttagagaccaagcgacatattttcccccgcttctacttcttgtccaatgatgacctgctggagattctgggccagtcccgaaacccagaggctgtgcagccacacctcaaaaaatgctttgacaacatcaagttgctgagaatccagaag

SEQ ID NO: 3614 - DNA, 121 bp, synthetic construct
  misc_feature 1..121: note = Description of artificial sequence: synthetic polynucleotide sequence
  source 1..121: mol_type = other DNA
ctttctgcaggttggagggcccagcagcaaatgggaagctgtggggatgttctcgggcgacggcgagtacattgacttcctccactcagtatttttagaaggccctgtggaggtgagttgt

SEQ ID NO: 3615 - DNA, 121 bp, synthetic construct
  misc_feature 1..121: note = Description of artificial sequence: synthetic polynucleotide sequence
  source 1..121: mol_type = other DNA
ctggcttggcgatgtggaacagaccatgagggtgaccctgcgggaccttctccggaactgccacctggccctcaggaagttcctcaacaagagggacaaatgggtgaaggagtgggctggc

SEQ ID NO: 3616 - DNA, 121 bp, synthetic construct
  misc_feature 1..121: note = Description of artificial sequence: synthetic polynucleotide sequence
  source 1..121: mol_type = other DNA
cccaggtggtgatcactgccagtcagatccagtggacggctgatgtcaccaagtgcctgctgacagcgaaggagcgggcagacaagaaaatcctcaaggtcatgaagaagaaccaggtgag

SEQ ID NO: 3617 - DNA, 190 bp, synthetic construct
  misc_feature 1..190: note = Description of artificial sequence: synthetic polynucleotide sequence
  source 1..190: mol_type = other DNA
ggtgtcaatcctgaataagtattcagaagccatcagggggaacttgaccaagatcatgcggcttaaaattgtggctctggtgacgatagaaattcatgcccgggatgtgttggagaagctttacaagagtggcctcatggatgtcaattcctttgactggctcagccaacttcggttctactgggagaag

SEQ ID NO: 3618 - DNA, 121 bp, synthetic construct
  misc_feature 1..121: note = Description of artificial sequence: synthetic polynucleotide sequence
  source 1..121: mol_type = other DNA
tttccccaggatcttgatgactgtgtcatccgccagaccaacacgcaatttcagtataattatgagtacttgggtaactcgggccggctcgtcatcacccccctgacggacaggtctgcca

SEQ ID NO: 3619 - DNA, 191 bp, synthetic construct
  misc_feature 1..191: note = Description of artificial sequence: synthetic polynucleotide sequence
  source 1..191: mol_type = other DNA
ggtgttacatgacactgaccacggcattgcacctgcaccgagggggctcccccaaaggccctgcaggcacaggcaagaccgagaccgtcaaggacctgggcaaggccctgggcatatatgtcattgtggtcaactgctctgagggcctggactacaagtccatgggccgaatgtactcaggtctggcccag

SEQ ID NO: 3620 - DNA, 182 bp, synthetic construct
  misc_feature 1..182: note = Description of artificial sequence: synthetic polynucleotide sequence
  source 1..182: mol_type = other DNA
gactggagcttggggctgctttgatgagtttaaccgcatcaacatcgaggtgctgtcagtggtggcccaccagatcctgtgcatcctgtctgccctggctgccggcctcacccatttccattttgatggctttgaaataaatctggtgtggtcctgtgggatcttcattaccatgaatcctg

SEQ ID NO: 3621 - DNA, 121 bp, synthetic construct
  misc_feature 1..121: note = Description of artificial sequence: synthetic polynucleotide sequence
  source 1..121: mol_type = other DNA
atgctggccgcacagagcttcccgaaaatcttaaatccatgttccgcccaattgccatggtggtgcctgactccaccctcattgcagaaatcattctctttggagagggctttggcaactg

SEQ ID NO: 3622 - DNA, 154 bp, synthetic construct
  misc_feature 1..154: note = Description of artificial sequence: synthetic polynucleotide sequence
  source 1..154: mol_type = other DNA
gattctggccaagaaggtgtacacactctactcactggctgtgcagcagctgtccagacaggaccactatgactttggcctgcgtgccctcacctcccttctgcgctatgctggcaagaagcgccgcctacagccggatctgactgatgaagag

SEQ ID NO: 3623 - DNA, 121 bp, synthetic construct
  misc_feature 1..121: note = Description of artificial sequence: synthetic polynucleotide sequence
  source 1..121: mol_type = other DNA
tctgctgctctcaatgagagatatgaacatcgccaagctcacttcagttgatgcacccctgttcaatgccatcgtgcaagatctgtttcccaacattgagctgcctgtcattgactatggc

SEQ ID NO: 3624 - DNA, 220 bp, synthetic construct
  misc_feature 1..220: note = Description of artificial sequence: synthetic polynucleotide sequence
  source 1..220: mol_type = other DNA
gctgcgggagaccgttgagcaggagattcgagacatgggcctgcaaagcacgccgttcaccctcaccaaggttttccagttgtatgaaaccaagaactcccgccactccaccatgatcgtgggctgcacgggcagcggcaagactgcctcatggcgcattctacaggcctccctgtcctctctgtgccgcgccggagaccctaacttcaacattgttaga

SEQ ID NO: 3625 - DNA, 121 bp, synthetic construct
  misc_feature 1..121: note = Description of artificial sequence: synthetic polynucleotide sequence
  source 1..121: mol_type = other DNA
aggagttccctttgaaccccaaggcattgtccctaggggaactgtatggggaatatgacctcagcaccaatgaatggacagatggcatcttgtccagtgtcatgcggacggcatgtgcagg

SEQ ID NO: 3626 - DNA, 138 bp, synthetic construct
  misc_feature 1..138: note = Description of artificial sequence: synthetic polynucleotide sequence
  source 1..138: mol_type = other DNA
gatgagaaacccgacgagaagtggatcctgttcgatggccccgtggacacactgtggatcgagaacatgaactccgtcatggacgataacaaggtgttgaccctcatcaacggcgagcgcatcgcgatgcccgagcag

SEQ ID NO: 3627 - DNA, 139 bp, synthetic construct
  misc_feature 1..139: note = Description of artificial sequence: synthetic polynucleotide sequence
  source 1..139: mol_type = other DNA
ggtgtctctcctgtttgaagtggaggacctggcaatggcctctccggccactgtatcccgctgcgggatggtctacactgactacgctgacctgggctggaagccctatgttcagtcatggctggagaagaggccaaag

SEQ ID NO: 3628 - DNA, 160 bp, synthetic construct
  misc_feature 1..160: note = Description of artificial sequence: synthetic polynucleotide sequence
  source 1..160: mol_type = other DNA
ggctgaggtggagccccttcaacgcatgttcgaaaagctcatcaacaagatgctggcctttaagaaggacaactgcaaggagctggtgcccctgcccgagtacagcggtatcacctccctctgcaagctgtactctgccctggccacgccagagaatggg

SEQ ID NO: 3629 - DNA, 154 bp, synthetic construct
  misc_feature 1..154: note = Description of artificial sequence: synthetic polynucleotide sequence
  source 1..154: mol_type = other DNA
ggtgaacccagctgacggcgagaactatgtcaccatggtagagatgacatttgtgttcagcatgatctggtctgtgtgtgcctctgtggatgaggagggccggaagaggatcgacagctacctccgagagatcgagggctcctttcccaataag

SEQ ID NO: 3630 - DNA, 121 bp, synthetic construct
  misc_feature 1..121: note = Description of artificial sequence: synthetic polynucleotide sequence
  source 1..121: mol_type = other DNA
acatgccctccttaggacacggtatatgagtattttgtggaccccaaaatacggagttggacatcatttgaggacaagctccctaagagttggcgctaccctccaaagtaagagctgggcc

SEQ ID NO: 3631 - DNA, 200 bp, synthetic construct
  misc_feature 1..200: note = Description of artificial sequence: synthetic polynucleotide sequence
  source 1..200: mol_type = other DNA
gcgcccccttctataagatcatggtgcccaccgtcgacactgttcgctacaactacctggtgagcagcttggtggccaaccagaatcccattctgctggtgggtcccgtggggactgggaagacctccatcgcccagagcgttctgcagtccctgccctccagccagtggtcggtgctcgttgtcaacatgtccgcacag

SEQ ID NO: 3632 - DNA, 226 bp, synthetic construct
  misc_feature 1..226: note = Description of artificial sequence: synthetic polynucleotide sequence
  source 1..226: mol_type = other DNA
gaccacatccaataacgtgcagagcatcattgagagcagggttgagaagcgaaccaagggtgtctacgtgccattcgggggcaaaagcatgatcacctttatggatgacctaaatatgcccgctaaggacatgtttgggtcccagccacccctggagctgatccgcctctggattgactatggcttctggtatgaccgtacgaagcagaccatcaagtacattcga

SEQ ID NO: 3633 - DNA, 121 bp, synthetic construct
  misc_feature 1..121: note = Description of artificial sequence: synthetic polynucleotide sequence
  source 1..121: mol_type = other DNA
ctctctaggaaatgttcctgatggctgccatgggcccccctgggggtggacggactgtcatctccccaaggctacggagtcgcttcaacattatcaacatgaccttccccacagtgaggac

SEQ ID NO: 3634 - DNA, 190 bp, synthetic construct
  misc_feature 1..190: note = Description of artificial sequence: synthetic polynucleotide sequence
  source 1..190: mol_type = other DNA
gaagtcccagatcatccgcatattcggcaccatgatcaatcagaagcttcaggactttgaggaagaggtgaagcccattgggaacgtggtgacagaggccaccctggacatgtacaacaccgtggtacagcgcttcctgcccacgcccaccaagatgcattacctcttcaaccttcgagacatctccaag

SEQ ID NO: 3635 - DNA, 121 bp, synthetic construct
  misc_feature 1..121: note = Description of artificial sequence: synthetic polynucleotide sequence
  source 1..121: mol_type = other DNA
agtcagtcctcttcccaggtgttccagggcatgcttagagccaacaaggacttccatgataccaagtccagcatcacacggctctggatccatgaatgtttcaggtgacatgcatgtgccc

SEQ ID NO: 3636 - DNA, 121 bp, synthetic construct
  misc_feature 1..121: note = Description of artificial sequence: synthetic polynucleotide sequence
  source 1..121: mol_type = other DNA
tctctgaccggctggttgatgcggcagacacagaagccttcatgggcatcataagcgacaagctcggctccttctttgacctcacatttcatcatctctgtcccagcaagcgtcctcctat

SEQ ID NO: 3637 - DNA, 151 bp, synthetic construct
  misc_feature 1..151: note = Description of artificial sequence: synthetic polynucleotide sequence
  source 1..151: mol_type = other DNA
ggggatttcctgaaggagcccaaggtgtatgaagacctcacggatctgacagtgctgaagacagtcatggagacagctctaaatgagtataacctgtcaccctctgtcgtgcccatgcagctagtgctcttccgagaggctattgaacaca

SEQ ID NO: 3638 - DNA, 169 bp, synthetic construct
  misc_feature 1..169: note = Description of artificial sequence: synthetic polynucleotide sequence
  source 1..169: mol_type = other DNA
gtcacacggatcgtgcgggtcattggacagcctcggggcaacatgctcctggtgggtatcgggggcagcggacgccagagtctggcccgcctggcttcatccatctgcgactacaccaccttccagatcgaggtcaccaaacattatcggaagcaggagttccgagatg

SEQ ID NO: 3639 - DNA, 162 bp, synthetic construct
  misc_feature 1..162: note = Description of artificial sequence: synthetic polynucleotide sequence
  source 1..162: mol_type = other DNA
gatatcaagcgtctgtatcgccaggctggggtggagctcaagaccacgtccttcatttttgtggacacccaaatagctgatgagtccttcctagaggacatcaacaacatcctcagctcaggcgaggtgcccaatctctacaagcctgatgaatttgaagag

SEQ ID NO: 3640 - DNA, 141 bp, synthetic construct
  misc_feature 1..141: note = Description of artificial sequence: synthetic polynucleotide sequence
  source 1..141: mol_type = other DNA
gatccagtcgcatatcatagaccaggcccgggtggagcaggtgcctgagtcatcggacagcctcttcgcctacctcattgaacgcgtgcagaacaacctgcacatcgtgctctgcctcagccccatgggggatcccttcag

SEQ ID NO: 3641 - DNA, 134 bp, synthetic construct
  misc_feature 1..134: note = Description of artificial sequence: synthetic polynucleotide sequence
  source 1..134: mol_type = other DNA
ggaactggatccgccagtacccagccttggtgaactgcacaaccatcaactggttctcagagtggccccaagaggccctgctcgaggtggctgagaagtgcctcataggagtagacctgggaactcaggagaat

SEQ ID NO: 3642 - DNA, 141 bp, synthetic construct
  misc_feature 1..141: note = Description of artificial sequence: synthetic polynucleotide sequence
  source 1..141: mol_type = other DNA
gatccacaggaaggtggcccagatctttgtcactatgcactggtcagtagctcagtattcccagaagatgctgttggaactgcggagacacaactatgtcacacccaccaaatacctggaactcctgtctggatataagaa

SEQ ID NO: 3643 - DNA, 212 bp, synthetic construct
  misc_feature 1..212: note = Description of artificial sequence: synthetic polynucleotide sequence
  source 1..212: mol_type = other DNA
ggttgctgggagaaaaacggcaggagctgctggcccaagccaataaactgcggacaggcttgttcaagatcgacgaaactagggaaaaggtgcaagtgatgtcgttggagctggaggatgccaagaagaaggtggctgagttccagaagcagtgtgaggagtacctggtcatcattgtgcagcagaagcgggaggcagatgagcagcagaag

SEQ ID NO: 3644 - DNA, 121 bp, synthetic construct
  misc_feature 1..121: note = Description of artificial sequence: synthetic polynucleotide sequence
  source 1..121: mol_type = other DNA
aggccgtaacagccaacagtgaaaagattgcagttgaggaaatcaagtgtcaggcactggctgacaatgcccagaaagatctagaagaggcactgcccgccctggaagaggccatgcgggt

SEQ ID NO: 3645 - DNA, 143 bp, synthetic construct
  misc_feature 1..143: note = Description of artificial sequence: synthetic polynucleotide sequence
  source 1..143: mol_type = other DNA
ggccctggagtctctgaacaagaaggatataggagagatcaagtcttatggacggcccccagcccaagtggagatagtgatgcaggcagttatgattcttcgaggcaacgagcccacatgggcagaggccaagaggcagctag

SEQ ID NO: 3646 - DNA, 171 bp, synthetic construct
  misc_feature 1..171: note = Description of artificial sequence: synthetic polynucleotide sequence
  source 1..171: mol_type = other DNA
ggggaacagaacttcatcaagtcactgatcaactttgataaagacaatatctcagataaggttctgaagaagattggggcctactgcgcccagcctgacttccagcctgatatcatcggccgcgtctccctggctgccaagtccctctgcatgtgggtgcgggccatggag

SEQ ID NO: 3647 - DNA, 121 bp, synthetic construct
  misc_feature 1..121: note = Description of artificial sequence: synthetic polynucleotide sequence
  source 1..121: mol_type = other DNA
agctgtatgggcggctatatcgggtggtggagcccaagcgaatccgaatgaacgctgccttggctcagcttcgggagaagcaagccgcgctcgctgaggcccaggagaagctgcgggaggt

SEQ ID NO: 3648 - DNA, 166 bp, synthetic construct
  misc_feature 1..166: note = Description of artificial sequence: synthetic polynucleotide sequence
  source 1..166: mol_type = other DNA
ggtagctgagaaactggagatgctaaagaaacagtatgatgagaagctggcacagaaggaggagcttcgcaagaagtctgaagagatggagctgaagctggagcgagctgggatgctcgtgtcggggttggctggcgagaaggccagatgggaggagacagtccag

SEQ ID NO: 3649 - DNA, 121 bp, synthetic construct
  misc_feature 1..121: note = Description of artificial sequence: synthetic polynucleotide sequence
  source 1..121: mol_type = other DNA
cctggaggaggacctgggctacctggtgggggactgtctcctggcagctgccttcctgtcctacatgggacccttcctgaccaactaccgggatgagattgtcaaccaaatctggatcggg

SEQ ID NO: 3650 - DNA, 150 bp, synthetic construct
  misc_feature 1..150: note = Description of artificial sequence: synthetic polynucleotide sequence
  source 1..150: mol_type = other DNA
gatctgggagcttcaggttccttgctccccttctttcgccatcgataacttcctgtgcaatcctaccaaagtccgggactggaacatccaagggttgccctcagacgccttctccactgagaatggcatcatcgtcacccgaggcaacag

SEQ ID NO: 3651 - DNA, 121 bp, synthetic construct
  misc_feature 1..121: note = Description of artificial sequence: synthetic polynucleotide sequence
  source 1..121: mol_type = other DNA
cacctctgacctgtactccccttccaggtgggcactgatgatcgaccctcaggcccaggccctgaaatggattaagaacatggaaggaggccaggtgtgaggctggggggtcaggttagcc

SEQ ID NO: 3652 - DNA, 152 bp, synthetic construct
  misc_feature 1..152: note = Description of artificial sequence: synthetic polynucleotide sequence
  source 1..152: mol_type = other DNA
gggcctgaagatcatcgacctgcagatgagcgattacctgcgaatcctagaacacgccattcactttggatacccggtgctacttcagaacgtgcaggaatatctggaccccacactgaaccccatgctcaacaaatctgtagcccgaatcg

SEQ ID NO: 3653 - DNA, 150 bp, synthetic construct
  misc_feature 1..150: note = Description of artificial sequence: synthetic polynucleotide sequence
  source 1..150: mol_type = other DNA
ggtggtcggctgttgatgcgcattggcgataaggaggtggaatataataccaatttccgtttctacatcaccaccaagctctccaacccccactacagcccagagacctcagccaagaccaccatcgtcaactttgctgttaaagaacag

SEQ ID NO: 3654 - DNA, 135 bp, synthetic construct
  misc_feature 1..135: note = Description of artificial sequence: synthetic polynucleotide sequence
  source 1..135: mol_type = other DNA
gggcctggaggcccagctgctgggcattgtggtgcggaaggagcggcctgagctggaggagcagaaggactcactggtcatcaacatcgcggctggtaaaaggaagctcaaggagctggaggatgagatcctgcg

SEQ ID NO: 3655 - DNA, 146 bp, synthetic construct
  misc_feature 1..146: note = Description of artificial sequence: synthetic polynucleotide sequence
  source 1..146: mol_type = other DNA
ggctgctgaatgaggccaccggctccctgctggatgatgtgcagctggtgaacacgctgcatacctccaagatcacagccacagaggtgactgagcagctggagaccagtgagaccacagagatcaacactgacttggcgcgggag

SEQ ID NO: 3656 - DNA, 201 bp, synthetic construct
  misc_feature 1..201: note = Description of artificial sequence: synthetic polynucleotide sequence
  source 1..201: mol_type = other DNA
ggcttaccgcccatgcgcccagcgggcatcaatcctgttcttcgtgctcaatgatatgggctgcatcgaccccatgtaccagttctcactggatgcctacatcagcctctttattctcagcattgacaaaagccaccgcagcaataagctggaggaccgcattgactacctgaatgactaccacacctacgctgtctacag

SEQ ID NO: 3657 - DNA, 121 bp, synthetic construct
  misc_feature 1..121: note = Description of artificial sequence: synthetic polynucleotide sequence
  source 1..121: mol_type = other DNA
cacctgccgtacccttttcgaacgccacaaactactattcagttttcatatgtgtgccaaaatcttggagacttctggcaagctcaacatggatgaatacaacttctttctacgtgggggt

SEQ ID NO: 3658 - DNA, 188 bp, synthetic construct
  misc_feature 1..188: note = Description of artificial sequence: synthetic polynucleotide sequence
  source 1..188: mol_type = other DNA
ggtcttggatcgggagggccaaatggacaatccatgtagtagctggcttgcagatgcctactgggataacatcacagagctagacaaactgaccaacttccacggactcatgaactcctttgagcagtaccctcgtgactggcacctgtggtataccaatgctgccccggagaaggcgatgctgccag

SEQ ID NO: 3659 - DNA, 150 bp, synthetic construct
  misc_feature 1..150: note = Description of artificial sequence: synthetic polynucleotide sequence
  source 1..150: mol_type = other DNA
ggtgagtgggaaaatgcctgcaatgaaatgcaacggatgctgatcgttcgctccctgcgccaggaccgcgtggccttctgcgtgacctccttcatcatcaccaaccttggctcccgcttcatcgagccgcctgtgctgaatatgaagtcg

SEQ ID NO: 3660 - DNA, 185 bp, synthetic construct
  misc_feature 1..185: note = Description of artificial sequence: synthetic polynucleotide sequence
  source 1..185: mol_type = other DNA
ggtgctggaggattcaaccccacgatccccactcgtgttcatcctgtcccctggtgtggaccccaccagtgccctgctgcagctggcagagcacatgggcatggcccagcgcttccacgccctgtccctgggccagggccaggcccccatcgctgctcggctcctccgagagggtgtgactcagg

SEQ ID NO: 3661 - DNA, 192 bp, synthetic construct
  misc_feature 1..192: note = Description of artificial sequence: synthetic polynucleotide sequence
  source 1..192: mol_type = other DNA
ggacactgggtgttcctggcaaactgccacctgtcactgtcttggatgcctaatctggacaagctggtggagcagctgcaggtggaggatcctcatccatccttccgcctctggctcagctccatcccccacccagacttccctatctcaatcttgcaggtcagcatcaagatgaccacagagccaccaaag

SEQ ID NO: 3662 - DNA, 193 bp, synthetic construct
  misc_feature 1..193: note = Description of artificial sequence: synthetic polynucleotide sequence
  source 1..193: mol_type = other DNA
gggcctaaaggccaacatgacacgtctttaccaactgatgtcagaaccacagttttcccgctgctccaaacctgccaaatataagaagctgctgttttcactctgtttcttccactctgtgttacttgaacgcaaaaagttcctgcagcttggctggaacatcatctatggcttcaatgactccgactttgag

SEQ ID NO: 3663 - DNA, 186 bp, synthetic construct
  misc_feature 1..186: note = Description of artificial sequence: synthetic polynucleotide sequence
  source 1..186: mol_type = other DNA
ggtgtcagaaaacttgctgagcctctatctcgatgagtacgaggagacaccttgggacgcacttaagtacctcattgccggcatcaactatggtggacatgtcacagatgactgggaccggcgcctgctgaccacctacatcaatgattatttctgtgaccagtctctatcaactcccttccaccg

SEQ ID NO: 3664 - DNA, 230 bp, synthetic construct
  misc_feature 1..230: note = Description of artificial sequence: synthetic polynucleotide sequence
  source 1..230: mol_type = other DNA
ggttgtcagcactggagacttatttcatccccaaggatggcagcctcgcttcttacaaggaatacatcagcttattgcctggcatggacccccctgaggcctttggccagcaccccaatgctgatgtggcctctcagatcactgaggcacaaaccctctttgatactttgctttccttgcaacctcagattacacccaccagggctggaggccagacccgggaagagaag

SEQ ID NO: 3665 - DNA, 153 bp, synthetic construct
  misc_feature 1..153: note = Description of artificial sequence: synthetic polynucleotide sequence
  source 1..153: mol_type = other DNA
ggtccttgagttggccgctgatgtgaagcagaagatccctgaaatgatcgactatgaggggactcaaaaactgctagctctcgacccctcccccctcaatgtggtccttctgcaggagatccagagatacaacacactgatgcagaccatcct

SEQ ID NO: 3666 - DNA, 121 bp, synthetic construct
  misc_feature 1..121: note = Description of artificial sequence: synthetic polynucleotide sequence
  source 1..121: mol_type = other DNA
caggttctcactgacagacctagagaaaggcatccagggtctcatcgtcatgtctacaagcctggaagagattttcaattgcatctttgatgcccatgttcctccgctctggggaaaggca

SEQ ID NO: 3667 - DNA, 178 bp, synthetic construct
  misc_feature 1..178: note = Description of artificial sequence: synthetic polynucleotide sequence
  source 1..178: mol_type = other DNA
ggcatacccctcacaaaagccattggctgcctggacccgggacttggccatgcgtgtggagcagtttgagctgtgggccagccgggcccggcctcctgtgatcttctggttgtctggtttcacctttcccactggcttcctcactgctgtgctgcagtcttcagctcgccaaaacaac

SEQ ID NO: 3668 - DNA, 121 bp, synthetic construct
  misc_feature 1..121: note = Description of artificial sequence: synthetic polynucleotide sequence
  source 1..121: mol_type = other DNA
ttattctcaccttcaacccccaggtttcagtggacagcctctcctgggagtttatcgtttccactgtggatgacagcaacctagtgtatccccccaaggtgggagccagttgtgcttgggg

SEQ ID NO: 3669 - DNA, 152 bp, synthetic construct
  misc_feature 1..152: note = Description of artificial sequence: synthetic polynucleotide sequence
  source 1..152: mol_type = other DNA
ggatggtgtctgggtccggggcctgtacctggaaggtgctggctgggaccggaagaactcctgcttggtggaggcagagcccatgcagcttgtctgcctcatgcccacgatccacttccggcctgcagagagccgcaagaagagcgccaagg

SEQ ID NO: 3670 - DNA, 156 bp, synthetic construct
  misc_feature 1..156: note = Description of artificial sequence: synthetic polynucleotide sequence
  source 1..156: mol_type = other DNA
ggcatgtactcctgcccctgctattactatcccaaccgggcaggcagctcagaccgagcctcctttgtcatcggcattgacctgcggtctggggccatgacacctgatcattggatcaagaggggcactgctctactcatgagcctggacagctga

SEQ ID NO: 3671 - DNA, 121 bp, synthetic construct
  misc_feature 1..121: note = Description of artificial sequence: synthetic polynucleotide sequence
  source 1..121: mol_type = other DNA
gtccatcccaaagtgccccgtgctgaagggtcgagtgcagaagatcctacattggcggtggggggagccacctgtagcagtgccagcccctcaacaggcagatggaaatccagatgtccca

SEQ ID NO: 3672 - DNA, 121 bp, synthetic construct
  misc_feature 1..121: note = Description of artificial sequence: synthetic polynucleotide sequence
  source 1..121: mol_type = other DNA
cgtcctcttcaaggcagatcagagcgagagttctttgtcaagtgggtaggactatcctactggcactgctcctgggccaaggagcttcaggtactaggaccttttctttccctctccccca

SEQ ID NO: 3673 - DNA, 121 bp, synthetic construct
  misc_feature 1..121: note = Description of artificial sequence: synthetic polynucleotide sequence
  source 1..121: mol_type = other DNA
aacagtcccctttatccagatgtcgccactccccacagactccgagacaccaagattttttgaacattcctttatattcctgcctggtgcctgtagacattgagcttaggactccttagca

SEQ ID NO: 3674 - DNA, 121 bp, synthetic construct
  misc_feature 1..121: note = Description of artificial sequence: synthetic polynucleotide sequence
  source 1..121: mol_type = other DNA
cgcattctaaaaccagggcagacattggcaatcaacggcagcatgctttcctcctaagtcgagaaatgatcttataatattagactcctcaatataactccttaggcagaattagcccatg

SEQ ID NO: 3675 - DNA, 121 bp, synthetic construct
  misc_feature 1..121: note = Description of artificial sequence: synthetic polynucleotide sequence
  source 1..121: mol_type = other DNA
gcgtgggaagcgggggctcatgcgtggtgccatgatccgccccgcgctggggagaacatgaggactagaactcagagttcatgcccccaactttgacctctttctactttatattagaagc

SEQ ID NO: 3676 - DNA, 121 bp, synthetic construct
  misc_feature 1..121: note = Description of artificial sequence: synthetic polynucleotide sequence
  source 1..121: mol_type = other DNA
ccacagctgccacattaaagaaggaatgacagtgtgaaggaggctgagtatagccaagatgagttcattcagagaagaaacaagggggaatccattgcccttggagaactgggtgcaatag

SEQ ID NO: 3677 - DNA, 121 bp, synthetic construct
  misc_feature 1..121: note = Description of artificial sequence: synthetic polynucleotide sequence
  source 1..121: mol_type = other DNA
taaaccacaacctaaataaagtctgtcaacttcctacctttgagacacttgccatcacccggaagaagcaaacctgtataaagaaaaaataataatttgacaacgggtgaggtggctcttg

SEQ ID NO: 3678 - DNA, 121 bp, synthetic construct
  misc_feature 1..121: note = Description of artificial sequence: synthetic polynucleotide sequence
  source 1..121: mol_type = other DNA
gtgcaggcttgttatatagcaccctctatccatggattttggctgttccatttattggtgtttcctctttcttcaaaagctgtgaccttcagagggaagcaaagttggaatgtcatcagta

SEQ ID NO: 3679 - DNA, 121 bp, synthetic construct
  misc_feature 1..121: note = Description of artificial sequence: synthetic polynucleotide sequence
  source 1..121: mol_type = other DNA
aaagtgtcatgtgccaaggaaactgggatctcagtcctgcaagagccagaaacaaaatccttccaacaattcaaaggggtttgtaccctttgatttcagccttgcagaactctgagcagaa

SEQ ID NO: 3680 - DNA, 121 bp, synthetic construct
  misc_feature 1..121: note = Description of artificial sequence: synthetic polynucleotide sequence
  source 1..121: mol_type = other DNA
agagcaattctccccaacaaccacccacttccttagttttaaggcagttttgcaactgccctgctttattcagcctgggaattcattccaagtgtaaactgcaattgaatgcttcaagtag

SEQ ID NO: 3681 - DNA, 121 bp, synthetic construct
  misc_feature 1..121: note = Description of artificial sequence: synthetic polynucleotide sequence
  source 1..121: mol_type = other DNA
tgttgttaagtgatgcataactgtactttcaaccctgagttttttctgtccccaagcaaagtggaatgtagtctagggctagagaggagtggagaaaaagtagatttttccttcttttctg

SEQ ID NO: 3682 - DNA, 121 bp, synthetic construct
  misc_feature 1..121: note = Description of artificial sequence: synthetic polynucleotide sequence
  source 1..121: mol_type = other DNA
tcttgggtggtaacctgtaccctactactttgcattctagcttagtggtacagaaaccctttaaacaattttttttccctactccatggctgaattcttatgccacagcttccctcatttt

SEQ ID NO: 3683 - DNA, 189 bp, synthetic construct
  misc_feature 1..189: note = Description of artificial sequence: synthetic polynucleotide sequence
  source 1..189: mol_type = other DNA
ttcagtcatcactatccgacagggtctcgtactgtgctgagagcagtggggcaggctctcgctcccagatcctgttctgttggtgaggagctgcttggttcaccgcagagggagcacatgcaatcggtgttggtggagtactgctgagcatccgcatagtcagagggttataaggaaactgagttgagc

SEQ ID NO: 3684 - DNA, 181 bp, synthetic construct
  misc_feature 1..181: note = Description of artificial sequence: synthetic polynucleotide sequence
  source 1..181: mol_type = other DNA
cctgttgaagagggcctgtcttcccaggcccaccctggcgtctgcctatggtaatccccttctgaatgtacagaggagactgaagagggccgttccgttcctaagtagccttgcccaggtataggagacttagatttcctgctgtttgacttgctgatcagctttggtttgcaaactcctc

SEQ ID NO: 3685 - DNA, 223 bp, synthetic construct
  misc_feature 1..223: note = Description of artificial sequence: synthetic polynucleotide sequence
  source 1..223: mol_type = other DNA
cctgaatgaggtgatgggtccccttcctctcttcgtgtctcaccactggtcacaactgaggtgttggcagtaccaggcactactcccataggctgggacatgacaactccatgatcctcaactttgtcatcaaagcttcccatgagagccttcctgataatgtcttccagcccaagattactggcaggatcagcaaaagaatggcctctagagctaactgagc

SEQ ID NO: 3686 - DNA, 121 bp, synthetic construct
  misc_feature 1..121: note = Description of artificial sequence: synthetic polynucleotide sequence
  source 1..121: mol_type = other DNA
tttgtattggtaaataatgtcttttcaatcttacctgacgtagtaactgctggcagattaaagatctcagttcctggctgagcagctgctatatttaagcaaacattcaagttaattaaga

SEQ ID NO: 3687 - DNA, 144 bp, synthetic construct
  misc_feature 1..144: note = Description of artificial sequence: synthetic polynucleotide sequence
  source 1..144: mol_type = other DNA
cccatatcagagtcacctccaccagaggagttcaacttacgaaaaatctcctgcttctttgatttaaccatgggtgatgtattttcaagcttggtgaagaatgaaggcaagtagcttatactccctggtgagcgggcatcattc

SEQ ID NO: 3688 - DNA, 145 bp, synthetic construct
  misc_feature 1..145: note = Description of artificial sequence: synthetic polynucleotide sequence
  source 1..145: mol_type = other DNA
cctctgctctgcaggctctgcgcccctctgagacaagagcagcaagctgtcctgtttctcatgcacaaccggaacctggggtggggagatgggctcgtagggctccgaagagacgtgactcctctctggggattttccaggccta

SEQ ID NO: 3689 - DNA, 225 bp, synthetic construct
  misc_feature 1..225: note = Description of artificial sequence: synthetic polynucleotide sequence
  source 1..225: mol_type = other DNA
ccttcccctggatttgtccacaagattttctggagagacccttgaacctggtctttgatgatggacagactgagcctgggattctgggctgtaacggtttgatgttttagtcctcacaggtgtagataccaaagcagaaggtgagttctggaatgtagaagtaggaggctgctggggagtctgcgaggaaacttgatttctagcaaaatcttgtgtgataatttg

SEQ ID NO: 3690 - DNA, 159 bp, synthetic construct
  misc_feature 1..159: note = Description of artificial sequence: synthetic polynucleotide sequence
  source 1..159: mol_type = other DNA
cacagatgtgatcagcaagtgtgatcagccgatgggtcctgggcacttgccccattccctctgcctgtgaagaagggggcagctgttgttggggagatggtgattcctgctgtggtcgatagtgatgtaatggtccttcatattgtctggtaggatcat

SEQ ID NO: 3691 - DNA, 121 bp, synthetic construct
  misc_feature 1..121: note = Description of artificial sequence: synthetic polynucleotide sequence
  source 1..121: mol_type = other DNA
cgcttgatttgccttaacaacctctggctgataggtctgcagtttctcctggggtggcgcaggtgagctggcaggacttatcacctcaatagcatcgctaggtgtttcatacctgtgagaa

SEQ ID NO: 3692 - DNA, 187 bp, synthetic construct
  misc_feature 1..187: note = Description of artificial sequence: synthetic polynucleotide sequence
  source 1..187: mol_type = other DNA
cagctactagaagagtctgaactttgagagccacgttccctcgcatccttgtccgaggcaatttgccgggtgatgatcacgtctatgaagttagctgcagtaatggtagtcttccctctggtccttagctcttcctcatatctggattttggaggaggccctttatctttcccagcctcagaataaa

SEQ ID NO: 3693 - DNA, 308 bp, synthetic construct
  misc_feature 1..308: note = Description of artificial sequence: synthetic polynucleotide sequence
  source 1..308: mol_type = other DNA
ctactgaagaatgaggctggggcttgccacttggaaaggctgaagaagtgtataaacactgaacagatctcttctccacctccagggttttctgctctagctgctgctgttcactaactgctgctgacctgcttctcaaattttcttctaacctggcagcttcatgcttactctcttttgttttggacacatccatctggggtgcagaagctgcagcatccacaagagcagccagggcatccgcagcagtgttgtaacgggaggctggcaggccttggcttattgaagggcccccagcaggcagtggc

SEQ ID NO: 3694 - DNA, 167 bp, synthetic construct
  misc_feature 1..167: note = Description of artificial sequence: synthetic polynucleotide sequence
  source 1..167: mol_type = other DNA
catgattcgtagctgagcagttggatccaaaggtgtgattacactggttccattggttccttggaaaacactgggtctctgttgcaacatggtctcctgagttcttactgaaggggaaggggagcgaacatatccatgactgccaggtcggccaggctgttctgagc

SEQ ID NO: 3695 - DNA, 121 bp, synthetic construct
  misc_feature 1..121: note = Description of artificial sequence: synthetic polynucleotide sequence
  source 1..121: mol_type = other DNA
cctggccgcaggtagaggtcggaggaagctgcagcaatccgttcccgctcccgctccttctcccgctcccgttcccgttccctctcagcacttgcagcagctgcaaggtgtgttgggtgtc

SEQ ID NO: 3696 - DNA, 151 bp, synthetic construct
  misc_feature 1..151: note = Description of artificial sequence: synthetic polynucleotide sequence
  source 1..151: mol_type = other DNA
cctggagacatggaagcagagttgtacggcctgggagggaaagtaatctgtgtaccaggaatataagtgattctgtccatgggaggagtgcttgttccccctggatgaggcactaaaattgttggaggcatattggtcaggtcaatgattc

SEQ ID NO: 3697 - DNA, 211 bp, synthetic construct
  misc_feature 1..211: note = Description of artificial sequence: synthetic polynucleotide sequence
  source 1..211: mol_type = other DNA
cctctcgttgctgggtatgggagacccagtggctgctctcttggggagagtcctctggccacatctggacgcaagttcacttgcatctgttgtgaggtaatgtaatcatttaagattgtctgtcttgtgttctccattgcgtaaagctgatactgacttgggtaacctggagttggtgaaagctgtctctgaaacaggtaagcagccgctg

SEQ ID NO: 3698 - DNA, 229 bp, synthetic construct
  misc_feature 1..229: note = Description of artificial sequence: synthetic polynucleotide sequence
  source 1..229: mol_type = other DNA
ccaggatccaaagccctgtgaaaaggcatggctggatccaagtgcgtgggcaggtggctccgataaacctcgcctgcagtgctgcctctgtgatggggatcaaacggactgtggctcacgacagggtccaccccaggcactggagacttcgctgggatactttccctctgggtaggggtcagtgtcgatttcctttcatgattggtagacttgttagaagaaattgtaa

SEQ ID NO: 3699 - DNA, 241 bp, synthetic construct
  misc_feature 1..241: note = Description of artificial sequence: synthetic polynucleotide sequence
  source 1..241: mol_type = other DNA
ccatcagaagttctgttcatcatgggtgagcctctggacatggtgttttgataactcacaggggtcctccgtgcactggtgtcatcataaatcccagggctcagttgtgctttgggagcttcatgcagtgtggacctaagaacggaggggccagagcttaccactgacgtgtgccgggaacgcacggtctcgcctgctttcacatcctcatattttccccgttctaccacttttatgttct

SEQ ID NO: 3700 - DNA, 121 bp, synthetic construct
  misc_feature 1..121: note = Description of artificial sequence: synthetic polynucleotide sequence
  source 1..121: mol_type = other DNA
ctggcacaatttccagcggaggcattccacgggatagtttgctaggccccgtgattaaggatttgacattgtgtttgatggcagattgacctgagttgttgtcaaactttattggtgtgcc

SEQ ID NO: 3701 - DNA, 258 bp, synthetic construct
  misc_feature 1..258: note = Description of artificial sequence: synthetic polynucleotide sequence
  source 1..258: mol_type = other DNA
cctgggaaatggaaccctcaattatcggccgtgtgctctggaccacttctggagttttccgactttcctgagttaaaatatcttgccttggaatctcatgaatggaacgccccatttctttgatggtggtgatgccatcatatggttttcctttggtaatggcaccttcaaatgctcgtatgggaggactttcccttttaatttgtttgggatatttaaggccatcttcaaagctttcagttgttgctcttggtgtcc

SEQ ID NO: 3702 - DNA, 121 bp, synthetic construct
  misc_feature 1..121: note = Description of artificial sequence: synthetic polynucleotide sequence
  source 1..121: mol_type = other DNA
aaacaagcagaaagtttaccctgcattatggagccagacaatacagtcctttctttgaggtcagaatgaggactccccctgggtaatgctcggcatatcagcccttccaaaacaagaaagc

SEQ ID NO: 3703 - DNA, 142 bp, synthetic construct
  misc_feature 1..142: note = Description of artificial sequence: synthetic polynucleotide sequence
  source 1..142: mol_type = other DNA
ccctctaacggtgctgatacaggagactccctcattgacatcccttgctttatatttccttccactgattcatagcttctctttaaactgatttcatgagctgttcttggactcctagtcccttctcgggcattcttaatat

SEQ ID NO: 3704 - DNA, 170 bp, synthetic construct
  misc_feature 1..170: note = Description of artificial sequence: synthetic polynucleotide sequence
  source 1..170: mol_type = other DNA
ctatcatatgacaagatatgtccacttttgccttcataaataacatggcctttggatgcagcttcctctctgcctttctcaggactgctgtcttcaatgggcattctcgaaatggaccccttcaccaaagcctctgttggtatgccagtctggggcagagccggggtgcc

SEQ ID NO: 3705 - DNA, 121 bp, synthetic construct
  misc_feature 1..121: note = Description of artificial sequence: synthetic polynucleotide sequence
  source 1..121: mol_type = other DNA
cgtgactaacctgagtgatagagccccgtagggatggaatgctctccactgaaattttgctggttggagttccccgagttatacttccttcttgtatggctcctgcggtacctgaatacaa

SEQ ID NO: 3706 - DNA, 121 bp, synthetic construct
  misc_feature 1..121: note = Description of artificial sequence: synthetic polynucleotide sequence
  source 1..121: mol_type = other DNA
catattttacctctgactacaccttcatgttgggccctgaccaacagaccctcaggttgtgagttttggcttcggggagaaaattcttcctgcttgatgtagggcaaagtagctgtggaaa

SEQ ID NO: 3707 - DNA, 121 bp, synthetic construct
  misc_feature 1..121: note = Description of artificial sequence: synthetic polynucleotide sequence
  source 1..121: mol_type = other DNA
ctgatttggcagattcctgttgccgtggcagtccaagagagatagatcccactgacggcttgggtgtttcttgagtgtaggaagcctgattatgagaagtcaaataagtgcctggtgttcc

SEQ ID NO: 3708 - DNA, 162 bp, synthetic construct
  misc_feature 1..162: note = Description of artificial sequence: synthetic polynucleotide sequence
  source 1..162: mol_type = other DNA
cctgtgagatggagcctcccattataaaagatggtttttctgaagccactgtggttttggatgacgggatgagagggggcggtggcctggttggtcgagttgtcggaagccgaacgccttcagggagattagttatcacttgatgtggagcaggctgaagga

SEQ ID NO: 3709 - DNA, 205 bp, synthetic construct
  misc_feature 1..205: note = Description of artificial sequence: synthetic polynucleotide sequence
  source 1..205: mol_type = other DNA
tctacctaccttcccactctctgtttggactcttggatgtgccacatggacttgtagaacttctacattccaaatctatctgttcttgtctctgccgctgctcctccaggagtgctgactcatgcattgctttaatgtgtcgctggtagagagcatagccgctcactggggttccaattggtatgttacatggggtgcaggatac

SEQ ID NO: 3710 - DNA, 121 bp, synthetic construct
  misc_feature 1..121: note = Description of artificial sequence: synthetic polynucleotide sequence
  source 1..121: mol_type = other DNA
ggtgggataacagcagctcgatgctgaagctgtggcagatccagtggatttggttttaacggagatgagacgagtatagatccagtggggtttaacagtgaaggctttgagtccataggaa

SEQ ID NO: 3711 - DNA, 218 bp, synthetic construct
  misc_feature 1..218: note = Description of artificial sequence: synthetic polynucleotide sequence
  source 1..218: mol_type = other DNA
cctctgcctctctggctctccatccacatcctcatcagcgctgcacgtggcactggaatcattgtctgactggggctcgggcctttgggcatttatttgctgagctaccaccaaatcttcatctctaggttccaccttctcactggctctatccaagtctctttctttggtattatcaccttcaactttagatgcatggttttctggcaccctcactt

SEQ ID NO: 3712 - DNA, 339 bp, synthetic construct
  misc_feature 1..339: note = Description of artificial sequence: synthetic polynucleotide sequence
  source 1..339: mol_type = other DNA
caacgtccacagagtcagctttggtagcgggtgggggatcacaaacagaaccctcttcagcactgtgctcctgctgatctacatccatctgctctgctgtctcagcactgatgctgtcattcacctgggtctccacactttcatcttcagctggttttgtacttggaactgctaaggagggagatgtactgggtgcagtttccgtggtgggctcaagctcaaccgcaggttctgtgtttcctcgagaagtagcattttcaggactgtcctcgctgggcttgacagcttcaactggtgaaggagaaggagcactttctgtatcagaactattttctgcac

SEQ ID NO: 3713 - DNA, 121 bp, synthetic construct
  misc_feature 1..121: note = Description of artificial sequence: synthetic polynucleotide sequence
  source 1..121: mol_type = other DNA
cgctgtcttctggattttcttcttcattggaggcttcaatatcttcatcctcctgagcagaaacagtggaagcgacactttcacattgagacacatctcgctcttcacgaggttttcgtga

SEQ ID NO: 3714 - DNA, 141 bp, synthetic construct
  misc_feature 1..141: note = Description of artificial sequence: synthetic polynucleotide sequence
  source 1..141: mol_type = other DNA
ctttctgtttatgctgctgtaagaggttgtcaagattgtgtcgccttttatagttaaaatagaagtttttacattgagcttcacttttcgttcccaccattttagcaattgctgcccagttacgaccatgttctactagac

SEQ ID NO: 3715 - DNA, 121 bp, synthetic construct
  misc_feature 1..121: note = Description of artificial sequence: synthetic polynucleotide sequence
  source 1..121: mol_type = other DNA
cctgagaaaccagaactactacaatttaccttttttagcaacttccatttcttcttctgtccatcgagaggtctccacaggctctgtagaaactaaaataaagagagaacccaatcaggca

SEQ ID NO: 3716 - DNA, 219 bp, synthetic construct
  misc_feature 1..219: note = Description of artificial sequence: synthetic polynucleotide sequence
  source 1..219: mol_type = other DNA
ctgggttctggtggcggtggcagaggtggtgggggctcttcagtagccgctgcggctgcagcactggcagctgcagcttcgtttgtcatggacctggtgatccggcccttacggcggccctgactgttggcagtctttcgcccccggggtgtggcttgctctctttcctcagtttcttctgctgtaccatctatcttgtccttttccttggtattttct

SEQ ID NO: 3717 - DNA, 121 bp, synthetic construct
  misc_feature 1..121: note = Description of artificial sequence: synthetic polynucleotide sequence
  source 1..121: mol_type = other DNA
ggagtcttctttttcatctttttcctcttcatctttcttttcttcttcttttttttctgttttttctgctttatcctcttctttttcttctactttttcttcttgcgagggtcgagcaatt

SEQ ID NO: 3718 - DNA, 121 bp, synthetic construct
  misc_feature 1..121: note = Description of artificial sequence: synthetic polynucleotide sequence
  source 1..121: mol_type = other DNA
gaaaacacacctggtttctgcctctgcgtttcccataattccttctgacgagggctttataattctcatttttcttggttaaatagtaatacaaaacacaatcaggaacactctgtaagaa

SEQ ID NO: 3719 - DNA, 121 bp, synthetic construct
  misc_feature 1..121: note = Description of artificial sequence: synthetic polynucleotide sequence
  source 1..121: mol_type = other DNA
ctacaaacactcccaatgcaaaccatgtcttaccttcctctccaagtatgatgcaattagtccaaagttttttggatgctggataaacctgagtgaaaacgaaaacaaaaacacacttgcg

SEQ ID NO: 3720 - DNA, 180 bp, synthetic construct
  misc_feature 1..180: note = Description of artificial sequence: synthetic polynucleotide sequence
  source 1..180: mol_type = other DNA
cttgtccttaaagatctccttttcatggtcagtccaaacattcataaactgcctatctttatacactttcatagggtcctccataagcccattcatgttaatgaacttgactcgtctttgttctgcatcaaacatcataggtggaatcacagagagctgccgcatttgtttctcattatt

SEQ ID NO: 3721 - DNA, 121 bp, synthetic construct
  misc_feature 1..121: note = Description of artificial sequence: synthetic polynucleotide sequence
  source 1..121: mol_type = other DNA
aatttattttcttacctcctgctcagagagcccatcaataatttcagaaatctcatgctcactcctagcaatggtggctgaaagaccagctcccctctgcccaactctaaacatgagggag

SEQ ID NO: 3722 - DNA, 174 bp, synthetic construct
  misc_feature 1..174: note = Description of artificial sequence: synthetic polynucleotide sequence
  source 1..174: mol_type = other DNA
ccgctgaaatctttcttgctgttctctttgttttcgaatttctggaaactgcttttcatagtattcccttgttttgctttctttagctttcctccgaggattattttctattctgtccacttttttctcccatgcctccatgagctgatcataacgctggcagattttttgttc

SEQ ID NO: 3723 - DNA, 121 bp, synthetic construct
  misc_feature 1..121: note = Description of artificial sequence: synthetic polynucleotide sequence
  source 1..121: mol_type = other DNA
tttcagttaacaaggataggacctcaccctttgttttcttgcatgatttcttcttttaaaaaataaaatgagttttttcctcatcacctggtttctagaagagaaaaatatggttgcatga

SEQ ID NO: 3724 - DNA, 121 bp, synthetic construct
  misc_feature 1..121: note = Description of artificial sequence: synthetic polynucleotide sequence
  source 1..121: mol_type = other DNA
taattgaagaactccaaagatgatcaatacttacgtcttgatgttctcatggtacaccttggtatctgatggctggttatacagtggctataaaagaaatcaaatatttatgtataaaatg

SEQ ID NO: 3725 - DNA, 121 bp, synthetic construct
  misc_feature 1..121: note = Description of artificial sequence: synthetic polynucleotide sequence
  source 1..121: mol_type = other DNA
aaaaatcactggaaatgaaaaaatttacttaccagttcaacttttgggccaagaccttcaaaaattttatgagcttcttctgcttttttctagagataaagacattgttgtatcatataat

SEQ ID NO: 3726 - DNA, 121 bp, synthetic construct
  misc_feature 1..121: note = Description of artificial sequence: synthetic polynucleotide sequence
  source 1..121: mol_type = other DNA
ttacccgattctcatcataaataatttggacaatactgcggtgtttctgctccacaggaggaggggacacgggcttctcaggctcaggaggtttagctgcctcttcttcaagctgttgcta

SEQ ID NO: 3727 - DNA, 184 bp, synthetic construct
  misc_feature 1..184: note = Description of artificial sequence: synthetic polynucleotide sequence
  source 1..184: mol_type = other DNA
cttgtttctttttcagtttaaggatctgctgttctacttttgcaatttctcgatctacacgatccatactctgtattaactcttcctttgagagttttgaaggtgaagcattttgatcatctccacatggttgccccgaaattggagaggatggagcttcatgtttgcctccgaatgctggatc

SEQ ID NO: 3728 - DNA, 194 bp, synthetic construct
  misc_feature 1..194: note = Description of artificial sequence: synthetic polynucleotide sequence
  source 1..194: mol_type = other DNA
ccttcttagcatctgcagaagccctcagcccttctggcagcgggtgcactaaaggcaaaaccgcagcactgacacgctgaaaatgagaatcagaaacctgttccagacgtggtcgcttcgattccagtgaatcatgatccactggggatgggcctggatgaaacggttcataactagttctcctttcttgaggc

SEQ ID NO: 3729 - DNA, 135 bp, synthetic construct
  misc_feature 1..135: note = Description of artificial sequence: synthetic polynucleotide sequence
  source 1..135: mol_type = other DNA
cctgtcagaacctgggtgaaattctgaaagcaaggaaggtcgccttcgaagctgttgctgctgctgttgctgcaaaagctgtgatgcctgactcacttcaagatgagaggaacgataatcagggactgcgaactc

SEQ ID NO: 3730 - DNA, 121 bp, synthetic construct
  misc_feature 1..121: note = Description of artificial sequence: synthetic polynucleotide sequence
  source 1..121: mol_type = other DNA
tccttacctgctggtggcgggtgttgggaaatgtatactggacagagtgaggaggataacgactttgttctgtgctgaatgctccttggttgggaggataacctgaacttgacattatcag

SEQ ID NO: 3731 - DNA, 121 bp, synthetic construct
  misc_feature 1..121: note = Description of artificial sequence: synthetic polynucleotide sequence
  source 1..121: mol_type = other DNA
ctgacactgtccacgacaaggatgaggcttgaagactccactaagagaaataagctcggaacgagaggacaaataccgcatgaggccacttacgtgagggaccaagagtatctaatcattc

SEQ ID NO: 3732 - DNA, 121 bp, synthetic construct
  misc_feature 1..121: note = Description of artificial sequence: synthetic polynucleotide sequence
  source 1..121: mol_type = other DNA
aggaagattcttgggtttccatggaaacttggtgagttcctgctctggccatttcaagacggagagaatgggcactgtcacattcctgggaaagcagcaagtgattctgagtgctgttagt

SEQ ID NO: 3733 - DNA, 121 bp, synthetic construct
  misc_feature 1..121: note = Description of artificial sequence: synthetic polynucleotide sequence
  source 1..121: mol_type = other DNA
ggcttttactctctctgactttctttttctgtccttcacagaaattgaagttgaagtataaggagaatttttacatcacccaggttctaatttggaaggtttctaacagccctctgtcctc

SEQ ID NO: 3734 - DNA, 121 bp, synthetic construct
  misc_feature 1..121: note = Description of artificial sequence: synthetic polynucleotide sequence
  source 1..121: mol_type = other DNA
cccaagtgatcctcctgcctcagcctcctgagtagctgggactacacatctacccagcaagatcattataatcacacctgtaccctctggtcaccaaaggatgtgaattttaagtggaggt

SEQ ID NO: 3735 - DNA, 121 bp, synthetic construct
  misc_feature 1..121: note = Description of artificial sequence: synthetic polynucleotide sequence
  source 1..121: mol_type = other DNA
gattcatagggtatgctcatgttgagctttagtagttaactaccaattagttttccagaatatttgaactaaaaggcactccctccatcaatgtatgagagttccagttgccccacatctt

SEQ ID NO: 3736 - DNA, 121 bp, synthetic construct
  misc_feature 1..121: note = Description of artificial sequence: synthetic polynucleotide sequence
  source 1..121: mol_type = other DNA
ccattagctctggctccagaagttgttttgatatcaaaaatggcagcaattatggcaccatagggcaataactggtggcttgatcgaccctgatgtttgaggaagggtctgtcctatcagg

SEQ ID NO: 3737 - DNA, 121 bp, synthetic construct
  misc_feature 1..121: note = Description of artificial sequence: synthetic polynucleotide sequence
  source 1..121: mol_type = other DNA
cgtgctccatccatgttcacagaatggaggaaatcaaaaaggagcagatgatgcggctgcaggcttctgggatattaacaggacaaagctactgagaaaacaggggtttctggctgaaggt

SEQ ID NO: 3738 - DNA, 121 bp, synthetic construct
  misc_feature 1..121: note = Description of artificial sequence: synthetic polynucleotide sequence
  source 1..121: mol_type = other DNA
taataaagcattgctttgtctactctgtgaatatattgtagaaatagtttatggaggagtgcaaataccggaacgatctcaagcagtgttgttctaaagtcaacttttaaggcaatatctc

SEQ ID NO: 3739 - DNA, 121 bp, synthetic construct
  misc_feature 1..121: note = Description of artificial sequence: synthetic polynucleotide sequence
  source 1..121: mol_type = other DNA
ctattgactgtgtgtccttcgatgagtggcttagcatctctgggtctcagttttttcatgtacagcaaggacaagaggaatgctttcttcataggattgtgaaaaccgaatggaataacac

SEQ ID NO: 3740 - DNA, 121 bp, synthetic construct
  misc_feature 1..121: note = Description of artificial sequence: synthetic polynucleotide sequence
  source 1..121: mol_type = other DNA
accatgaagaattggaaactgagcctcgaaatgcagattggcaagacaatagagagccattgatggactgggacaaagtagtgacatattgagagctgtgtttcagacagggccatttggt

SEQ ID NO: 3741 - DNA, 121 bp, synthetic construct
  misc_feature 1..121: note = Description of artificial sequence: synthetic polynucleotide sequence
  source 1..121: mol_type = other DNA
caccagccctaactacagctttgactggacaagagactgattttagtaactttcttctgataacaagaccaccaaccatggactgcttctggctggtttcgattctgagcacttgagtgcc

SEQ ID NO: 3742 - DNA, 121 bp, synthetic construct
  misc_feature 1..121: note = Description of artificial sequence: synthetic polynucleotide sequence
  source 1..121: mol_type = other DNA
aaaacctctttgccaccaataccatgaagctctgcgtgactgtcctgtctctcctcatgctagtagctgccttctgctctccagcgctctcagcaccaagtaagtctacttttgcagctgc

SEQ ID NO: 3743 - DNA, 121 bp, synthetic construct
  misc_feature 1..121: note = Description of artificial sequence: synthetic polynucleotide sequence
  source 1..121: mol_type = other DNA
cagtgggctcagaccctcccaccgcctgctgcttttcttacactgcgaggaagcttcctcgcaactttgtggtagattactatgagaccagcagcctctgctcccagccagctgtggtgtg

SEQ ID NO: 3744 - DNA, 121 bp, synthetic construct
  misc_feature 1..121: note = Description of artificial sequence: synthetic polynucleotide sequence
  source 1..121: mol_type = other DNA
cgctccttgttctacagattccaaaccaaaagaagcaagcaagtctgtgctgatcccagtgaatcctgggtccaggagtacgtgtatgacctggaactgaactgagctgctcagagacagg

SEQ ID NO: 3745 - DNA, 121 bp, synthetic construct
  misc_feature 1..121: note = Description of artificial sequence: synthetic polynucleotide sequence
  source 1..121: mol_type = other DNA
ttacccaagcataggccttaggtagcccaagctcctccacaagagtgtgtgactcctctttgtggtaaggaaagggtgagggattcttctccctctgctacagatgaaggaatggagactt

SEQ ID NO: 3746 - DNA, 121 bp, synthetic construct
  misc_feature 1..121: note = Description of artificial sequence: synthetic polynucleotide sequence
  source 1..121: mol_type = other DNA
ccatcgatcagtccagaacacccctcaggggccccctgccaaaaatattaatgtaaaaacggcccagtctgactggggtgatggacctgcagcctacacaagccaatgtcttcaccatggt

SEQ ID NO: 3747 - DNA, 350 bp, synthetic construct
  misc_feature 1..350: note = Description of artificial sequence: synthetic polynucleotide sequence
  source 1..350: mol_type = other DNA
ttcacttcagcagggctctgtgttctcctctggctatgtgagacgagaactcataccgatcatggcttcgatatccacacatgttacactcgaaagggtcacggaagccgtggcagcccatgtgaatcgtgaacatcacatagtccaggaagaggacgcggcagtggtcacaccgatacacatccatcacctccccttccttgttgatcactttgacggagtctcttgggcagatgggcgggggcttgaggagttcgtaagagcggggaacctccttcagaagtggcatcccattgcgggcccgagacaggaccatgtgattttgctgatagatgtgattctggcgttct

SEQ ID NO: 3748 - DNA, 355 bp, synthetic construct
  misc_feature 1..355: note = Description of artificial sequence: synthetic polynucleotide sequence
  source 1..355: mol_type = other DNA
tcatggttgctgtcagtgtccgtggagtcgtggccactattgttgggagagaggcctctctcagaaggcacgctcttctctggaaggtggatgcttttcttttccagctcttgaggggcaccgtttgacatctcagcccgggtgagggctatgggatacatgctgctgataactggaaccatctccgaggtgggagcaggcggtgtctggaccaaggggcgcagggcttcggcgccaagatagctgatggcgttattgatggcttggtccatcatgcgggtctgtatgagctcactctctttctcatacatgtaacttgaattatagttgacatcaaagcagtggcgcttctcac

SEQ ID NO: 3749 - DNA, 121 bp, synthetic construct
  misc_feature 1..121: note = Description of artificial sequence: synthetic polynucleotide sequence
  source 1..121: mol_type = other DNA
accaatgaatttctgaggcattgagctttttcgttttgccacattgcttgctaatctgtccagtacgagagctctttcacttcccatctctgctttgatgtgtcttgcctccgcacttgct

SEQ ID NO: 3750 - DNA, 121 bp, synthetic construct
  misc_feature 1..121: note = Description of artificial sequence: synthetic polynucleotide sequence
  source 1..121: mol_type = other DNA
accagtgtcccctgggtcagtgctctgaagaaatgtacggcagcgctccttgtgctcctcaagggaacttctctgcttgtaactccttccacaaaactcacatttgtagggtttctccact

SEQ ID NO: 3751 - DNA, 169 bp, synthetic construct
  misc_feature 1..169: note = Description of artificial sequence: synthetic polynucleotide sequence
  source 1..169: mol_type = other DNA
ccagaatgtgtcctaagatgccccgtgagcgcatctcttctttggcatgcatagttgcagaggtgacacttaaaaggtttttcccctgtgtgcagtttaatgtggcggaggaggttacctttctgagtaaaagatgccccacactgattacactggaatgggcgttcac

SEQ ID NO: 3752 - DNA, 262 bp, synthetic construct
  misc_feature 1..262: note = Description of artificial sequence: synthetic polynucleotide sequence
  source 1..262: mol_type = other DNA
ccagtatggcttcgcttatgaaccattaagacattgaagctgatgcaggataatccacacacatcgcagttcatctttccactggttggcctgctactatcgaatgagacaacatgtctctccaacttaatgttttcatattcattatattctcttgaatagctgtaagggatttcaggctcttctgcatttcccatgggttctgactttaaaacattctcatctctttcactgtattcatctttcactttcattgaatcat

SEQ ID NO: 3753 - DNA, 121 bp, synthetic construct
  misc_feature 1..121: note = Description of artificial sequence: synthetic polynucleotide sequence
  source 1..121: mol_type = other DNA
tacggctcacctcctatgtcttcatcttcattggctgggccttctccactgtccacattttccatttcatgagatttggttaaactgtagtcattcaaaaccgctgcactttctaaaagat

SEQ ID NO: 3754 - DNA, 121 bp, synthetic construct
  misc_feature 1..121: note = Description of artificial sequence: synthetic polynucleotide sequence
  source 1..121: mol_type = other DNA
ggtatatttccagagaggaaagacctgatgttacctgcgggcacagactgctcctgagtgcttttcagttccgcatttgtttgtatatctgaaaagaaagaggttataaatattagctact

SEQ ID NO: 3755 - DNA, 121 bp, synthetic construct
  misc_feature 1..121: note = Description of artificial sequence: synthetic polynucleotide sequence
  source 1..121: mol_type = other DNA
ttgcacaggttaagtttctcaaagaccccggagaaaagaagcgggctggaggctcaccttccatgtcgctgccgggccgggctggagctgccgctgtggctactcggcctctccacgtgct

SEQ ID NO: 3756 - DNA, 121 bp, synthetic construct
  misc_feature 1..121: note = Description of artificial sequence: synthetic polynucleotide sequence
  source 1..121: mol_type = other DNA
gtattggcattctattgattactgtggtagaacatctgtgctgagtatggtggcaaataaaggtatgtccctggtgccttgttactagagttgaccactttgagttctctctaagagaaaa

SEQ ID NO: 3757 - DNA, 121 bp, synthetic construct
  misc_feature 1..121: note = Description of artificial sequence: synthetic polynucleotide sequence
  source 1..121: mol_type = other DNA
cgattgtgcgtgcgggatccactgactgtccattggccggcccaggagctcctccacacgccgcgctacgtccattgtgtcctccagatcgaagtccccatcggtgtcaaggactgagtca

SEQ ID NO: 3758 - DNA, 121 bp, synthetic construct
  misc_feature 1..121: note = Description of artificial sequence: synthetic polynucleotide sequence
  source 1..121: mol_type = other DNA
cacctacttctgtgggtacatgttatagtgagcctggggacacacagctggggagggggcctggtccatgtacgtggcgctgccgcccccggcatctgcagatgcgttcacaaacctgcag

SEQ ID NO: 3759 - DNA, 121 bp, synthetic construct
  misc_feature 1..121: note = Description of artificial sequence: synthetic polynucleotide sequence
  source 1..121: mol_type = other DNA
ggcagaaggagagccacagccacctggacacttactcagggaccacttgcttgatctgtggcttcacgtatccatcaacagctttagctgccaagggaagaatgtagtaaatcaaagttct

SEQ ID NO: 3760 - DNA, 172 bp, synthetic construct
  misc_feature 1..172: note = Description of artificial sequence: synthetic polynucleotide sequence
  source 1..172: mol_type = other DNA
ccagtagcagactcgcagggaactggtgtgtagtatttggagtatacttcatcttttggccgatcaggaaacacgtagataaggtaattcaagtctcccaagcggtcggctagggaccgaatggagaagtctctggtggtaaaaggcatcagattccaaaacattctttcct

SEQ ID NO: 3761 - DNA, 121 bp, synthetic construct
  misc_feature 1..121: note = Description of artificial sequence: synthetic polynucleotide sequence
  source 1..121: mol_type = other DNA
tcaaacttccaagcaatggtgatgccgccaatttctgagtcactgaatctcaggaggaaggtcccatctggcttgttaatgagtaggtcatgggcctgttgcttgtttacaaaccccaaaa

SEQ ID NO: 3762 - DNA, 121 bp, synthetic construct
  misc_feature 1..121: note = Description of artificial sequence: synthetic polynucleotide sequence
  source 1..121: mol_type = other DNA
taatgattctcacccatcattccaatgaggcttgagatgtttttttaacacttccatcacaccgtcaaaccattgccagaaagtgtaattccgtcctggtaaattctcctggttggagata

SEQ ID NO: 3763 - DNA, 208 bp, synthetic construct
  misc_feature 1..208: note = Description of artificial sequence: synthetic polynucleotide sequence
  source 1..208: mol_type = other DNA
ccctgttgaactgggaccaggacacagacaggccactgtagtcctccaggtggctgctgctgttgttgaacagtttctgcgccaggaacacgaggttctccttggtcaggccccggttgctctgcacttcggccttgaatttcatgttgagcgcctcacacagctgtggccacagcactttgtcaggcacggcaaatggcaccctgcc

SEQ ID NO: 3764 - DNA, 121 bp, synthetic construct
  misc_feature 1..121: note = Description of artificial sequence: synthetic polynucleotide sequence
  source 1..121: mol_type = other DNA
aggaatacactcacaggctctgcaaaagcattgtcccagagaacagtggccgtcgcattgttgtcctggctgccatgaacgatcaccaccactggcagggacagggtctaaaaagacacaa

SEQ ID NO: 3765 - DNA, 121 bp, synthetic construct
  misc_feature 1..121: note = Description of artificial sequence: synthetic polynucleotide sequence
  source 1..121: mol_type = other DNA
ttgacttgaaaaaccagctcatttccaccaacactgaactgggattcaaacaggattgtaaatttttcttctgtcaccgactctgccccacgacggtctgacctcttaattcgtttcaggg

SEQ ID NO: 3766 - DNA, 121 bp, synthetic construct
  misc_feature 1..121: note = Description of artificial sequence: synthetic polynucleotide sequence
  source 1..121: mol_type = other DNA
tcttcttccaccctcaccatattcctgaagtgggcactaagggtgcctgtggcttggtggtactccatgacgcagcagttgttcaagatctcgccactgtaatcactgcaaatcagagaga

SEQ ID NO: 3767 - DNA, 181 bp, synthetic construct
  misc_feature 1..181: note = Description of artificial sequence: synthetic polynucleotide sequence
  source 1..181: mol_type = other DNA
cttgcgggtgttctcgttcttgagcagagacttggcctgctgctcactgatgatggtggccttcacctggggggggttcatgtgcacgttcagcttcccgcccaccagcaggcgcacagtggctgcaaacttggtctgggtcttcaggacctgaggaggctgcttctcaatgatgaacgtg

SEQ ID NO: 3768 - DNA, 157 bp, synthetic construct
  misc_feature 1..157: note = Description of artificial sequence: synthetic polynucleotide sequence
  source 1..157: mol_type = other DNA
cctggtcaccagggctgagataatgtccgtgatggtggcgttgacctcggccagcatctcctccactgggccggggatgggcagctgctggcagaggtgctcagccctgcggatctgctgccggttctgccagatgatctcggccaacttctcacac

SEQ ID NO: 3769 - DNA, 153 bp, synthetic construct
  misc_feature 1..153: note = Description of artificial sequence: synthetic polynucleotide sequence
  source 1..153: mol_type = other DNA
ccaggactgtagcacgtccaggctgccctcggggggcccgccgttcccggccagctgctgccgccgcttccactggatcagctcgtcatccaggatgatggtctgctgcttccgcagcagctgcagggtcttctggtgcttctcggccagctc

SEQ ID NO: 3770 - DNA, 121 bp, synthetic construct
  misc_feature 1..121: note = Description of artificial sequence: synthetic polynucleotide sequence
  source 1..121: mol_type = other DNA
ggtactgctgcagtgtctgtgcctcacgctgcaaccaggcctccagagacacctgcttctgctggagggccgtctcccggctcagacgctcctgggggctcagctgggccagcgggccaaa

SEQ ID NO: 3771 - DNA, 176 bp, synthetic construct
  misc_feature 1..176: note = Description of artificial sequence: synthetic polynucleotide sequence
  source 1..176: mol_type = other DNA
ccttggatcctcaggctctcctggtactggatgatgaagtactcctgagtctgctgcagcttttttaactcattctctgtgtcctgcgtgaccagtcgcagctcctcaaacgtctggttgatctggaggtgtttctgggacatggcatcagcaaggcttccagctggagagctacc

SEQ ID NO: 3772 - DNA, 121 bp, synthetic construct
  misc_feature 1..121: note = Description of artificial sequence: synthetic polynucleotide sequence
  source 1..121: mol_type = other DNA
cctatgggacactcacattgttggcttctcggaccaacctctgttcattgtacaatatatggcggatgcagcggaccagctccatggggcagcggtcatacgtgttctgaaagaatccaac

SEQ ID NO: 3773 - DNA, 158 bp, synthetic construct
  misc_feature 1..158: note = Description of artificial sequence: synthetic polynucleotide sequence
  source 1..158: mol_type = other DNA
cctggagctgtgtggcatagtgccccagcttgatcttcagtaaaaacccatcttcccccacctggtgctctgccttcttctgcagctcctgcaccaggccctccaggagctgggtggccttaatgttctcctgtggattatcaagatctactgagtcc

SEQ ID NO: 3774 - DNA, 121 bp, synthetic construct
  misc_feature 1..121: note = Description of artificial sequence: synthetic polynucleotide sequence
  source 1..121: mol_type = other DNA
gcttggctttcaatccactgggataaataatgccgcacctcaatgggaaaatgctggccatataacgcttgcatctgatgaagggcttctccttggagctgctgagcttgtatccacacag

SEQ ID NO: 3775 - DNA, 121 bp, synthetic construct
  misc_feature 1..121: note = Description of artificial sequence: synthetic polynucleotide sequence
  source 1..121: mol_type = other DNA
tcgtatctttctgcagcttccgttctcagctcctcacatgggggaggtagcgcactccgaggtcaactccatgtcaaaggtgagggactctggagggacagacagggaaaactagttcagt

SEQ ID NO: 3776 - DNA, 121 bp, synthetic construct
  misc_feature 1..121: note = Description of artificial sequence: synthetic polynucleotide sequence
  source 1..121: mol_type = other DNA
tcaccaaactgccctcctgctgagggttcagcaccttcaccattatttccaaactgcatcaatgaatctaaagtgcggggggacatcggcaggtcaatggtattgctgcaggtcgttctgt

SEQ ID NO: 3777 - DNA, 121 bp, synthetic construct
  misc_feature 1..121: note = Description of artificial sequence: synthetic polynucleotide sequence
  source 1..121: mol_type = other DNA
ttagaaatgaaggcaaaacggggaaaggaagccacttacggtgtcacacagataaacttggtcttcaggtatggggcagcgcctgggaagaagaaaaccagttttcttactgactgtgact

SEQ ID NO: 3778 - DNA, 214 bp, synthetic construct
  misc_feature 1..214: note = Description of artificial sequence: synthetic polynucleotide sequence
  source 1..214: mol_type = other DNA
ctacctgggtcagcttcaggatgctcctggctctctggccgacaatactttccgaatgcctcctccttgggaatgtcaggatagagatagaccagtggagacaccaggatattggtagcatccatgatcttatagcccatgatgatttcagcaaatgacatgttgttcagctgctgctttgtgtatggttccacggactggatctgggtcttac

SEQ ID NO: 3779 - DNA, 141 bp, synthetic construct
  misc_feature 1..141: note = Description of artificial sequence: synthetic polynucleotide sequence
  source 1..141: mol_type = other DNA
ccgctgatgtccttctccacccaagtgaaagtgacgcctccttctttgctgctttcactgaatcttagcaggaaggtgcctggaggcttagtgctcaagatggcccgctcccgctccttactgataaagcccatgatgtac

SEQ ID NO: 3780 - DNA, 121 bp, synthetic construct
  misc_feature 1..121: note = Description of artificial sequence: synthetic polynucleotide sequence
  source 1..121: mol_type = other DNA
ctgtccaacctacccttcgttccaaagggccaggatgtactttttcacaaggtcaatgatattgtccagccagacccagaaggagaagcccttgccagccatgttttcctggagaaaagag

SEQ ID NO: 3781 - DNA, 121 bp, synthetic construct
  misc_feature 1..121: note = Description of artificial sequence: synthetic polynucleotide sequence
  source 1..121: mol_type = other DNA
cccattcccacgagaatttaacaagattgcttactttgcaaaatttagcccatgtgatctgacaccctgaataattcacaccaggtcctgaaggaaagaaaaagagtcaagtagtacattt

SEQ ID NO: 3782 - DNA, 137 bp, synthetic construct
  misc_feature 1..137: note = Description of artificial sequence: synthetic polynucleotide sequence
  source 1..137: mol_type = other DNA
cccaagagtttctctgccagtgtagtcagctgctcgatgctcagtcctcgcttggtggtggaggagaactgccagctcaggacctcggccacttgatcccaggttccaattgggggcttggtaaaaaagtttacatt

SEQ ID NO: 3783 - DNA, 121 bp, synthetic construct
  misc_feature 1..121: note = Description of artificial sequence: synthetic polynucleotide sequence
  source 1..121: mol_type = other DNA
ggggcactaaccttgggattgttggtcagcatgttgtaccacaggatggacgcccaggcatttggcatctgacagatgttggagatcaccacaactggcaaggagtgggtctgcggaggga

SEQ ID NO: 3784 - DNA, 121 bp, synthetic construct
  misc_feature 1..121: note = Description of artificial sequence: synthetic polynucleotide sequence
  source 1..121: mol_type = other DNA
attctgctgcagaacttacctctaggtcaatcttgaggccttggtgatacacctcggtctcaaaggtgatcaggtgcagctcctcagtcacaatcagggaagcctacagtaacgagaagga

SEQ ID NO: 3785 - DNA, 121 bp, synthetic construct
  misc_feature 1..121: note = Description of artificial sequence: synthetic polynucleotide sequence
  source 1..121: mol_type = other DNA
aacaccccagttgtctttcatccccaacaaaacttacatcacaattggctcggcccccattcccacatctctgctccctcagggtctgtaagaaaagaaaaaggcaggtgtcctgtgaggc

SEQ ID NO: 3786 - DNA, 121 bp, synthetic construct
  misc_feature 1..121: note = Description of artificial sequence: synthetic polynucleotide sequence
  source 1..121: mol_type = other DNA
ctcctcccacataccaagtgtttgaattctgcagagaggctgccgttgttggattcttccatgttcatcacttttgtgtttgtgcccagaatgttaaatttccgggatctgaatcacaggg

SEQ ID NO: 3787 - DNA, 121 bp, synthetic construct
  misc_feature 1..121: note = Description of artificial sequence: synthetic polynucleotide sequence
  source 1..121: mol_type = other DNA
aagttaggttaaacggaacaaaaggaagcctctaggctgaacttaccctctgagagctgcaacgtccccagagtctctgtaagaacacagactgttgttaataaaataggctctgtgtttc

SEQ ID NO: 3788 - DNA, 121 bp, synthetic construct
  misc_feature 1..121: note = Description of artificial sequence: synthetic polynucleotide sequence
  source 1..121: mol_type = other DNA
tgaaaaacagagctaagataggagtacttacttgtcaatgcacactttaattttaagctgataattcaactcagggaatttgaccagcaacctatttaaaaagaaaaaatccaaggaaaaa

SEQ ID NO: 3789 - DNA, 121 bp, synthetic construct
  misc_feature 1..121: note = Description of artificial sequence: synthetic polynucleotide sequence
  source 1..121: mol_type = other DNA
gtggcatggcctacctgactttagtagtgaactggacgccggtcttgatgacgaggggccggtcaggatgcatgggcatgcagggctgccgctccaccacaaaggcactgaggaaagagaa

SEQ ID NO: 3790 - DNA, 160 bp, synthetic construct
  misc_feature 1..160: note = Description of artificial sequence: synthetic polynucleotide sequence
  source 1..160: mol_type = other DNA
ccttttcattaagtttctaaacagctccacgattctctcctccagcatcggccggtgctgtacaatggggtcccctttgtaggaaactttttgctgcaactcctccagtttcttaatttgttgacgggtctgaagttgagattctgctaatgacgttatc

SEQ ID NO: 3791 - DNA, 153 bp, synthetic construct
  misc_feature 1..153: note = Description of artificial sequence: synthetic polynucleotide sequence
  source 1..153: mol_type = other DNA
ccagttttctagccgatctaggcagatgttgggcgggcctccaatgcaggcaatctgttgccgcctcttccagtcagccagctcctcgtccgtgagagttttctgcacgtactccatcgctgacaaaagccccgccagctcactcacgatgct

SEQ ID NO: 3792 - DNA, 121 bp, synthetic construct
  misc_feature 1..121: note = Description of artificial sequence: synthetic polynucleotide sequence
  source 1..121: mol_type = other DNA
cctatgcccttactctccgcatctggtccagcgcagtgagcatctgttccagctgctgcatcttctgcctggtcactgactggttgtttccattcagatcttgcatgtctgcgaaggaaga

SEQ ID NO: 3793 - DNA, 121 bp, synthetic construct
  misc_feature 1..121: note = Description of artificial sequence: synthetic polynucleotide sequence
  source 1..121: mol_type = other DNA
catctctaatattcacttgcctccttgactcttgagggttttatagttgaaatcaaagtcatcctggagattctctaccactttcattttctgttctagatcctgtttaaaataagcaaac

SEQ ID NO: 3794 - DNA, 121 bp, synthetic construct
  misc_feature 1..121: note = Description of artificial sequence: synthetic polynucleotide sequence
  source 1..121: mol_type = other DNA
taacttgcatcacctgcactctcttccggacatcctgaaggtgctgctccagcatctgctgcttctccgtcaccacggctgctgtggggtggttggcctggcccccttgctgccaaaaagg

SEQ ID NO: 3795 - DNA, 121 bp, synthetic construct
  misc_feature 1..121: note = Description of artificial sequence: synthetic polynucleotide sequence
  source 1..121: mol_type = other DNA
tcaggtctcacctgggccgcagtggctgcagtctgtagaaggcgtgattcttcccacaggcaccgggccacaatccgggcaatctccattggcttctcaagatacctgctctataagtagg

SEQ ID NO: 3796 - DNA, 146 bp, synthetic construct
  misc_feature 1..146: note = Description of artificial sequence: synthetic polynucleotide sequence
  source 1..146: mol_type = other DNA
cctgaagaaactgcttgattcttcgtagattgtgctgatagagaacattcgactcttgcaggaagcggctatactgctggtcaatctctcccaggagattatgaaacaccaaagtggcatgtgattctttgctggccgcatatgcc

SEQ ID NO: 3797 - DNA, 121 bp, synthetic construct
  misc_feature 1..121: note = Description of artificial sequence: synthetic polynucleotide sequence
  source 1..121: mol_type = other DNA
tcttgactctcaatccaaggggccagaaactgccgcagctccattgggaagctgtcactgtagagctgatggagctgctccaggtaccgtgtgtcaagctgctgtagctgattccattggg

SEQ ID NO: 3798 - DNA, 121 bp, synthetic construct
  misc_feature 1..121: note = Description of artificial sequence: synthetic polynucleotide sequence
  source 1..121: mol_type = other DNA
gcacaccaggaggtggagctgaggatgaggagcgcagggcagctgcgcaggcctcctgcacgctactcatgctgctgcccgaaggccaggttgcaggagagctgcccttgagctcttgcct

SEQ ID NO: 3799 - DNA, 121 bp, synthetic construct
  misc_feature 1..121: note = Description of artificial sequence: synthetic polynucleotide sequence
  source 1..121: mol_type = other DNA
caaattaattcacttctgcaatactttcctgaatagcacagtagtattggaaatctgcctattacagaacctggatggagtccagagaggcacgggcatccatgggcaaagggctcgtgag

SEQ ID NO: 3800 - DNA, 121 bp, synthetic construct
  misc_feature 1..121: note = Description of artificial sequence: synthetic polynucleotide sequence
  source 1..121: mol_type = other DNA
agtagtggctgtgggggatctggggtatcaggtaggtgtccagctcctggcactggtagagtgctacactgtccaacacccactctcgggtcaccacaggtgcctcacacatctgcccaat

SEQ ID NO: 3801 - DNA, 121 bp, synthetic construct
  misc_feature 1..121: note = Description of artificial sequence: synthetic polynucleotide sequence
  source 1..121: mol_type = other DNA
atatagcacaggtacatgcaggcaccttaccatggaagccattgtcctctgtccaggcatctggctgcacaaccacaattgggtggacaccctggatccccaggaaggaaagagcattcaa

SEQ ID NO: 3802 - DNA, 121 bp, synthetic construct
  misc_feature 1..121: note = Description of artificial sequence: synthetic polynucleotide sequence
  source 1..121: mol_type = other DNA
tctgacagggcacccaatacttactgtgccaagggtgaatgatgaaagctccttcaccacagaagcaccacacagctgtaccatccattccagttgatctaaaatggacatttagatgtaa

SEQ ID NO: 3803 - DNA, 121 bp, synthetic construct
  misc_feature 1..121: note = Description of artificial sequence: synthetic polynucleotide sequence
  source 1..121: mol_type = other DNA
tgctggaactctggggttctcccaggctcttacctgtgggcatgttggtgaagggcccatagcaacagatttctagccccctgaagatctggaagaagagaggaagagagagggacagggg

SEQ ID NO: 3804 - DNA, 121 bp, synthetic construct
  misc_feature 1..121: note = Description of artificial sequence: synthetic polynucleotide sequence
  source 1..121: mol_type = other DNA
ttgagggagggagctttacctttctgtcctgggattctcttgctcgctttggaccttggtggtttcttccattgaccacatctcctctgacttcaaaatcatgctgaaagaaaccaaacac

SEQ ID NO: 3805 - DNA, 121 bp, synthetic construct
  misc_feature 1..121: note = Description of artificial sequence: synthetic polynucleotide sequence
  source 1..121: mol_type = other DNA
aatgaatatctctggttagtttgtaacatcaagtacttacctcattcagcatttttctttctttaatagactgggtcacccctaaagagatcatagaaaagacaggttacatacagcagaa

SEQ ID NO: 3806 - DNA, 121 bp, synthetic construct
  misc_feature 1..121: note = Description of artificial sequence: synthetic polynucleotide sequence
  source 1..121: mol_type = other DNA
ggagaaatagtattatacttacagaaatagctaactacccattttcctcccgcaattcctagaaaatatttcagtgtccgttcacacacaaactcagcatctgcagaatgaaaaacactca

SEQ ID NO: 3807 - DNA, 121 bp, synthetic construct
  misc_feature 1..121: note = Description of artificial sequence: synthetic polynucleotide sequence
  source 1..121: mol_type = other DNA
aaaggttcttggtatacctgttttcataacaacatgagtagtctcttcagtaattagattagttaaagtgatgtggtgttttctggcaaacttgtacacgagcatctgaaattaaatcaaa

SEQ ID NO: 3808 - DNA, 312 bp, synthetic construct
  misc_feature 1..312: note = Description of artificial sequence: synthetic polynucleotide sequence
  source 1..312: mol_type = other DNA
caaattcttctggggtcaggccagacaccaccatggacattcttttgttgaccctttctgttgaagctgtcaattctggcttctccctgctcacactttcttccattgcattatacccagcagtatcagtagtatgagcagcagctggactctgggcagattctgcaactttcaattggggaactttcaatgcagaggttgaagatggtatgttgccaacacgagctgactctggggctctgtcttcagaaggatcagattcagggtcatcagagaagaggctgattccagattccaggtaaggggttccct

SEQ ID NO: 3809 - DNA, 192 bp, synthetic construct
  misc_feature 1..192: note = Description of artificial sequence: synthetic polynucleotide sequence
  source 1..192: mol_type = other DNA
cctagatcttgccttggcaagtaagatgtttccgtcaaatcgtgtggcccagactcttccagctgttgctcctccacatcaacaaccttaatgagctcctcttgagatgggtagtttctattctgaagactcccagagcaactgtgcatgtaccacctatcatctaatgatgggcatttagaaggggatgac

SEQ ID NO: 3810 - DNA, 121 bp, synthetic construct
  misc_feature 1..121: note = Description of artificial sequence: synthetic polynucleotide sequence
  source 1..121: mol_type = other DNA
tccactcctggttctttatttttactggtagaactatctgcagacacctcaaacttgtcagcagaaaggccttctggattctggcttatagggtattcactacttttctgtgaagttaata

SEQ ID NO: 3811 - DNA, 121 bp, synthetic construct
  misc_feature 1..121: note = Description of artificial sequence: synthetic polynucleotide sequence
  source 1..121: mol_type = other DNA
cgaacacaaagggaaagaggagaggcacctgatatatgttctctaggccttttagaaaacatggagttgttcctttggccatgtatatgcgaatctgtaagaaaggtgaaattgtagacat

SEQ ID NO: 3812 - DNA, 173 bp, synthetic construct
  misc_feature 1..173: note = Description of artificial sequence: synthetic polynucleotide sequence
  source 1..173: mol_type = other DNA
cctttttctgatgtgctttgttctggatttcgcaggtcctcaagggcagaagagtcacttatgatggaagggtagctgttagaaggctggctcccatgctgttctaacacagcttctagttcagccatttcctgctggagctttatcaggttatgttgcatggtatccctctg

SEQ ID NO: 3813 - DNA, 121 bp, synthetic construct
  misc_feature 1..121: note = Description of artificial sequence: synthetic polynucleotide sequence
  source 1..121: mol_type = other DNA
cacacacgctttttacctgagtggttaaaatgtcactctgagaggatagccctgagcagtcttcagagacgcttgtttcactctcacacccagatgctgcttcaccttaaataacaaaaac

SEQ ID NO: 3814 - DNA, 235 bp, synthetic construct
  misc_feature 1..235: note = Description of artificial sequence: synthetic polynucleotide sequence
  source 1..235: mol_type = other DNA
cctaagtttgaatccatgctttgctcttcttgattattttcttccaagcccgttcctctttcttcatcatctgaaaccaattccttgtcactcagaccaactccctggctttcagactgatgcctcatttgtttggaagaaccaatcaagaaaggatcctgggtgtttgtatttgcagtcaagtcttccaattcactgcactgtgaagaaaacaagctagcagaacattttgttt

SEQ ID NO: 3815 - DNA, 474 bp, synthetic construct
  misc_feature 1..474: note = Description of artificial sequence: synthetic polynucleotide sequence
  source 1..474: mol_type = other DNA
cctcactaaggtgatgttcctgagatgcctttgccaatattacctggttactgcagtcatttaagctattcttcaatgataataaattctcctctgtgttcttagacagacactcggtagcaacggtgctatgcctagtagactgagaaggtatattgtttactttaccaaataacaagtgttggaagcagggaagctcttcatcctcactagataagttctcttctgaggactctaatttcttggcccctcttcggtaaccctgagccaaatgtgtatgggtgaaagggctaggactcctgctaagctctcctttctggacgcttttgctaaaaacagcagaactttccttaatgtcattttcagcaaaactagtatcttcctttatttcaccatcatctaacaggtcatcaggtgtctcagaacaaacctgagatgcatgactacttcccataggctgttctaagttatctg

SEQ ID NO: 3816 - DNA, 472 bp, synthetic construct
  misc_feature 1..472: note = Description of artificial sequence: synthetic polynucleotide sequence
  source 1..472: mol_type = other DNA
aaatcagatatggagagaaatctgtattaacagtctgaactacttcttcatattcttgcttttttatttcaggatgcttacaattacttccaggaagactttgtttatagacctcaggttgcaaaacccctaatctaagcatagcattcaattttggccctctgtttctacctagttctgcttgaatgttttcatcactggaacctatttcattaatactggagcccacttcattagtactggaacctacttcattaatattgcttgagctggcttctttaaaaacattttctctaatgttattacggctaattgtgctcactgtacttggaatgttctcatttcccatttctctttcaggtgacattgaatgttcctcaaagttttcctctagcagatttttcttacatttagttttaacaaatgacttgatgggaaaaagtggtggtatacgatatgggttttgtaaaag

SEQ ID NO: 3817 - DNA, 471 bp, synthetic construct
  misc_feature 1..471: note = Description of artificial sequence: synthetic polynucleotide sequence
  source 1..471: mol_type = other DNA
tccatgtttatttggagtaatgagtccagtttcgttgcctctgaactgagatgatagacaaaacctagagcctcctttgatactacatttggcattatcaactggcttatctttctgaccaaccacaggaaagcctgcagtgatattaactgtctgtacaggcttgatattagactcattctttccttgattttcttccttttgttcacattcaaaagtgacttttggactttgtttctttaaggacccagagtgggcagagaatgttgcacattcctcttctgcatttcctggatttgaaaacggagcaaatgactggcgctttgaaaccttgaatgtattctgcaaatactgagcatcaagttcactttcttccatttctatgcttgtttcccgactgtggttaacttcatgtcccaatggatacttaaagccttctgtgtcatttctattatctttggaacaaccatg

SEQ ID NO: 3818 - DNA, 472 bp, synthetic construct
  misc_feature 1..472: note = Description of artificial sequence: synthetic polynucleotide sequence
  source 1..472: mol_type = other DNA
aattagtcccttggggttttcaaatgctgcacactgactcacacatttatttggttctgtttttgccttccctagagtgctaacttccagtaacgagatactttcctgagtgccataatcagtaccaggtaccaatgaaatactgctactctctacagatctttcagtttgcaaaaccctttctccacttaacatgagatctttggggtcttcagcattattagacactttaactgtttctagtttctcttctttttcttctcttggaaggctaggattgacaaattctttaagttcactggtatttgaacacttagtaaaagaaccaggtgcatttgttaacttcagctctgggaaagtatcgctgtcatgtcttttacttgtctgttcatttggcttgttactcttcttggctccagttgcaggttctttaccttccatgagttgtaggtttctgctgtgcctgactggc

SEQ ID NO: 3819 - DNA, 473 bp, synthetic construct
  misc_feature 1..473: note = Description of artificial sequence: synthetic polynucleotide sequence
  source 1..473: mol_type = other DNA
atttggttgtacttttttttctttatctcttcactgctagaacaactatcaatttgcaattcagtacaattaggtgggcttagatttctactgactactagttcaagcgcatgaatatgcctggtagaagacttcctcctcagcctattctttttaggtgcttttgaattgtggatatttaattcgagttccatattgcttatactgctgcttataggttcagctttcgttttgaaagcagattctttttcgagtgattctattgggttaggatttttctcattctgaatagaatcaccttttgttttattctcatgaccactattagtaatattcatcacttgaccattctgctccgtttggttagttccctgatttatcatttcaggagtcttttgaactgccaaatctgctttcttgataaaatcctcaggatgaaggcctgatgtaggtctccttttacgctttaattt

SEQ ID NO: 3820 - DNA, 472 bp, synthetic construct
  misc_feature 1..472: note = Description of artificial sequence: synthetic polynucleotide sequence
  source 1..472: mol_type = other DNA
atttgtgaggggacgctcttgtattatctgtggctcagtaacaaatgctcctataattagattttcagttacatggcttaagttggggaggcttgccttcttccgataggttttcccaaatattttgtcttcaatattactctctactgatttggagtgaactctttcacttttacatattaaagcctcatgaggatcactggccagtaagtctattttctctgaagaaccagaatattcatctacctcatttagaacgtccaatacatcagctactttggcatttgattcagactccccatcatgtgagtcatcagaacctaacagttcatcacttctggaaaaccactcattaactttctgaatgctgctatttagtgttatccaaggaacatcttcagtatctctaggattctctgagcatggcagtttctgcttattccattcttttctctcacacaggggatcagca

SEQ ID NO: 3821 - DNA, 358 bp, synthetic construct
  misc_feature 1..358: note = Description of artificial sequence: synthetic polynucleotide sequence
  source 1..358: mol_type = other DNA
ttcagatctacctttttttctgtgctgggagtccgcctatcattacatgtttccttacttccagcccatctgttatgttggctccttgctaagccaggctgtttgcttttattacagaattcagccttttctacattcattctgtctttagtgagtaataaactgctgttctcatgctgtaatgagctggcatgagtatttgtgccacatggctccacatgcaagtttgaaacagaactaccctgatacttttctggatgcctctcagctgcacgcttctcagtggtgttcaaatcattattactgggttgatgatgttcagtatttgttacatccgtctcagaaaattcacaagcag

SEQ ID NO: 3822 - DNA, 121 bp, synthetic construct
  misc_feature 1..121: note = Description of artificial sequence: synthetic polynucleotide sequence
  source 1..121: mol_type = other DNA
agttggcaaactttgccattacccttttttgcagaatccaaactgatttcatccctggttccttgaggggtgatttgtaacaattcttgatctcccacactatagggaaaagacagagtcc

SEQ ID NO: 3823 - DNA, 121 bp, synthetic construct
  misc_feature 1..121: note = Description of artificial sequence: synthetic polynucleotide sequence
  source 1..121: mol_type = other DNA
aataccagcttcatagacaaaggttctctttgactcacctgcaataagttgccttattaacggtatcttcagaagaatcagatcctaaaaaatttccccccaaaaaataaatcaataaaag

SEQ ID NO: 3824 - DNA, 121 bp, synthetic construct
  misc_feature 1..121: note = Description of artificial sequence: synthetic polynucleotide sequence
  source 1..121: mol_type = other DNA
acccttacccaattcaatgtagacagacgtcttttgaggttgtatccgctgctttgtcctcagagttctcacagttccaaggttagagagttggacactgagactggtttcctgctaaaca

SEQ ID NO: 3825 - DNA, 141 bp, synthetic construct
  misc_feature 1..141: note = Description of artificial sequence: synthetic polynucleotide sequence
  source 1..141: mol_type = other DNA
ccaaggaaggattttcgggttcactctgtagaagtcttttggcacggtttctgtagcccatactttggatgatagaaacttcatcttttagatgttcaggagagttattttccttttttgcaaaattatagctgtttgcat

SEQ ID NO: 3826 - DNA, 121 bp, synthetic construct
  misc_feature 1..121: note = Description of artificial sequence: synthetic polynucleotide sequence
  source 1..121: mol_type = other DNA
gatattcaacacttacactccaaacctgtgtcaagctgaaaagcacaaatgattttcaatagctcttcaacaagttgactaaatctcgtactttcttgtaggctcctgaaattaaattgtt

SEQ ID NO: 3827 - DNA, 121 bp, synthetic construct
  misc_feature 1..121: note = Description of artificial sequence: synthetic polynucleotide sequence
  source 1..121: mol_type = other DNA
gcatcattaccaaattatataccttttggttatatcattcttacataaaggacactgtgaaggccctttcttctggttgagaagtttcagcatgcaaaatctataaattataaagaaagaa

SEQ ID NO: 3828 - DNA, 121 bp, synthetic construct
  misc_feature 1..121: note = Description of artificial sequence: synthetic polynucleotide sequence
  source 1..121: mol_type = other DNA
taataatggagccacataacacattcaaacttacttgcaaaatatgtggtcacactttgtggagacaggttccttgatcaactccagactagcagggtagggggggagaaaaagaaaataa

SEQ ID NO: 3829 - DNA, 121 bp, synthetic construct
  misc_feature 1..121: note = Description of artificial sequence: synthetic polynucleotide sequence
  source 1..121: mol_type = other DNA
tacactcttgtgctgacttaccagatgggacactctaagattttctgcatagcattaatgacattttgtacttcttcaacgcgaagagcagataaatccatttctttctgttccaatgaac

SEQ ID NO: 3830 - DNA, 121 bp, synthetic construct
  misc_feature 1..121: note = Description of artificial sequence: synthetic polynucleotide sequence
  source 1..121: mol_type = other DNA
actactttgcaatgcactctcatttctcttaaatacacaaccagttctccctttgataagttcatggggggaaagaatagagtaggccaaggttatcgctttcgctcccctctctgtgtcc

SEQ ID NO: 3831 - DNA, 121 bp, synthetic construct
  misc_feature 1..121: note = Description of artificial sequence: synthetic polynucleotide sequence
  source 1..121: mol_type = other DNA
tccttttccttgcgctcctgcttggctagtttgtctctctccctctgcagcttgtcctgttccttcttcctttgggattcatcccgaagtgagtctcgctccagttttcgggcattaagga

SEQ ID NO: 3832 - DNA, 121 bp, synthetic construct
  misc_feature 1..121: note = Description of artificial sequence: synthetic polynucleotide sequence
  source 1..121: mol_type = other DNA
tctagactgcacagcaggataataccagccatggagagagaagtctggatgccctttcaaggagcctacagccaagctgtgcctgcttcaagctgaggtgaggacaagatgaccttcctga

SEQ ID NO: 3833 - DNA, 121 bp, synthetic construct
  misc_feature 1..121: note = Description of artificial sequence: synthetic polynucleotide sequence
  source 1..121: mol_type = other DNA
ctgaaagctttcttcctgacttcaacagtcaaggagacctactgccatcacccaataaaaaggattccatcttgtgtccaaaagggccatttggtacaaacaccctgccagtatttgaatc

SEQ ID NO: 3834 - DNA, 121 bp, synthetic construct
  misc_feature 1..121: note = Description of artificial sequence: synthetic polynucleotide sequence
  source 1..121: mol_type = other DNA
ctggttttccttagacaaaaccctccttccctgccttgctcctggctgttatggctacatgagacaatttgctgatggactctctagggaggacaacttccttggagtccccttcccacct

SEQ ID NO: 3835 - DNA, 121 bp, synthetic construct
  misc_feature 1..121: note = Description of artificial sequence: synthetic polynucleotide sequence
  source 1..121: mol_type = other DNA
agaatgtgtggtgagaggtgtttgtgtatgtatgtgtgtggggaaaaggagggacacacatcttgaaatggatattacatagtgtaatgtgatatagatgaaacagtgtcctacaaatgag

SEQ ID NO: 3836 - DNA, 121 bp, synthetic construct
  misc_feature 1..121: note = Description of artificial sequence: synthetic polynucleotide sequence
  source 1..121: mol_type = other DNA
caccctccttgcctctcccactccagcaagtctccagacccaccttcttcgcccggaagttcgagtcgactgtgaaccaggaggtgctggaaatcctggacttccacctgtatggcagcta

SEQ ID NO: 3837 - DNA, 121 bp, synthetic construct
  misc_feature 1..121: note = Description of artificial sequence: synthetic polynucleotide sequence
  source 1..121: mol_type = other DNA
cggcacgccagccctcaaggcctactgggagaacacctacgacgcggctgatggccccagtgggctcagtgatgtcatgctcactgcttacacagccttcgcccgcctcagcctgcaccat

SEQ ID NO: 3838 - DNA, 121 bp, synthetic construct
  misc_feature 1..121: note = Description of artificial sequence: synthetic polynucleotide sequence
  source 1..121: mol_type = other DNA
agattgccctgaggagtcccagatccagtcccaaatccacctgcccccaacacacagagcagccaactctttagtgtcttactccaaaatattgagacagccaagccgcaagaatcaccac

SEQ ID NO: 3839 - DNA, 121 bp, synthetic construct
  misc_feature 1..121: note = Description of artificial sequence: synthetic polynucleotide sequence
  source 1..121: mol_type = other DNA
ctctgtcacacccaaggtaacttgactcaccccctattagaggactcactcttttcctcgtgtgccgtgatgtgaaaactcttggaagcctcgtggtgccggcaagcatgccttggggccc

SEQ ID NO: 3840 - DNA, 121 bp, synthetic construct
  misc_feature 1..121: note = Description of artificial sequence: synthetic polynucleotide sequence
  source 1..121: mol_type = other DNA
cttgaactgcatctttaacagcaggaggtgatcagtttgtagctgggaatcgggtagggtgtcaaggccactgtagacagagcaatgctagaaaaagagtcaaggaaggagtggtgtgtac

SEQ ID NO: 3841 - DNA, 121 bp, synthetic construct
  misc_feature 1..121: note = Description of artificial sequence: synthetic polynucleotide sequence
  source 1..121: mol_type = other DNA
taatgagaggtgtttgggtcatagaggcagatcccttatgaatggcttggtaccacctttatagtaatgagcaagttattgctctattggttcctgtaagagcttgttaaaaagaacctgg

SEQ ID NO: 3842 - DNA, 121 bp, synthetic construct
  misc_feature 1..121: note = Description of artificial sequence: synthetic polynucleotide sequence
  source 1..121: mol_type = other DNA
agttcagtcagagagttctcaaagttcttccagatacccacaaacaaaggtattggcctactgcagacaccaaagccttgtcatttctacatgtgacagcaggatggcaagtttggtgggt

SEQ ID NO: 3843 - DNA, 121 bp, synthetic construct
  misc_feature 1..121: note = Description of artificial sequence: synthetic polynucleotide sequence
  source 1..121: mol_type = other DNA
attttctcatgtgcttatttgccctatgtgtatcttcttcagtgaaatatcccttcctgcgcttcgctaattttctttcttcttttttttttttattatactttacgttataggatacatg

SEQ ID NO: 3844 - DNA, 121 bp, synthetic construct
  misc_feature 1..121: note = Description of artificial sequence: synthetic polynucleotide sequence
  source 1..121: mol_type = other DNA
acctgtcaaatggtactcagcagatatctcaagaccaaagctttcagagctacaaaaacaatacttttagttgtcctatcccaacaagcaacagaacaaatgttttcaaattggctctgtg

SEQ ID NO: 3845 - DNA, 121 bp, synthetic construct
  misc_feature 1..121: note = Description of artificial sequence: synthetic polynucleotide sequence
  source 1..121: mol_type = other DNA
ctaataaatctggcacatagtcttaatttccacagccaaagtttatgagtaccgtcaaaagagtttctagcattaatggactttgctgaaaagtttctagcttgccagctgctacaatgaa

SEQ ID NO: 3846 - DNA, 121 bp, synthetic construct
  misc_feature 1..121: note = Description of artificial sequence: synthetic polynucleotide sequence
  source 1..121: mol_type = other DNA
tgctccaaattcattctctccctctttctttttactggaaccctgattttgttggaaatggcaatgtaactaacaaaaatctatacctttcagtcttccttgtagatagaagtaaacattt

SEQ ID NO: 3847 - DNA, 121 bp, synthetic construct
  misc_feature 1..121: note = Description of artificial sequence: synthetic polynucleotide sequence
  source 1..121: mol_type = other DNA
gtagatttctttgacagcttgtgatgttgcctgaatggtaaatatatcctcagactccaagtaaatagtccgtggcatgtaacttgggtataaaagaggaaattttacacaacgtggccac

SEQ ID NO: 3848 - DNA, 121 bp, synthetic construct
  misc_feature 1..121: note = Description of artificial sequence: synthetic polynucleotide sequence
  source 1..121: mol_type = other DNA
caaggggtgtgcctctggggaccaaggatatgccacactgggggtgtaatggggaaaaatctggcaagctgggtgcacagttgcatcctggggccgagagccaggggtgggctcggaggga

SEQ ID NO: 3849 - DNA, 121 bp, synthetic construct
  misc_feature 1..121: note = Description of artificial sequence: synthetic polynucleotide sequence
  source 1..121: mol_type = other DNA
cgccttttcctctgtgggtgtcgggcagagaggctggatttttgcaagttgaacagactgctggtactggggcagatgctggaggcgtcaactgggccaggggctggctcagggagggccc

SEQ ID NO: 3850 - DNA, 121 bp, synthetic construct
  misc_feature 1..121: note = Description of artificial sequence: synthetic polynucleotide sequence
  source 1..121: mol_type = other DNA
caactagtgacagttatctggcctctgcctgttcccatctagaaaagtgtcatggctccggtcataccctaacggctcccctgctttttttcttgagacagagtctcgctctgtcgcccag

SEQ ID NO: 3851 - DNA, 121 bp, synthetic construct
  misc_feature 1..121: note = Description of artificial sequence: synthetic polynucleotide sequence
  source 1..121: mol_type = other DNA
ctcaagagttactgatctatgaaatggcagagaatggaaaaaattgtgaccagagacgtgtagcaatgaacaaggaacatcataatggaaatttcacaggtaaattttgatggtttgcagg

SEQ ID NO: 3852 - DNA, 137 bp, synthetic construct
  misc_feature 1..137: note = Description of artificial sequence: synthetic polynucleotide sequence
  source 1..137: mol_type = other DNA
gacccctcttcagtgaatgaaaagaagaggagggagcgggaagaaaggcagaatattgtcctgtggagacagccgctcattaccttgcagtatttttctctggaaatccttgtaatcttgaaggaatggacctcaaa

SEQ ID NO: 3853 - DNA, 121 bp, synthetic construct
  misc_feature 1..121: note = Description of artificial sequence: synthetic polynucleotide sequence
  source 1..121: mol_type = other DNA
ttatttgtttttaagattatggcatcgtcaaagcattgtggtgtcttttttactgctgcttgctgtgcttatagctacgtattatgttgaaggagtgcatcaacaggtgagaggtcgagca

SEQ ID NO: 3854 - DNA, 121 bp, synthetic construct
  misc_feature 1..121: note = Description of artificial sequence: synthetic polynucleotide sequence
  source 1..121: mol_type = other DNA
ttcagtatgtgcaacgtatagagaaacagtttcttttgtatgcctactggataggcttaggaattttgtcttctgttgggcttggaacagggctgcacacctttctgctttatctggtaag

SEQ ID NO: 3855 - DNA, 169 bp, synthetic construct
  misc_feature 1..169: note = Description of artificial sequence: synthetic polynucleotide sequence
  source 1..169: mol_type = other DNA
gggtccacatatagcctcagttacattagctgcttatgaatgcaattcagttaattttcccgaaccaccctatcctgatcagattatttgtccagatgaagagggcactgaaggaaccatttctttgtggagtatcatctcaaaagttaggattgaagcctgcatgtgg

SEQ ID NO: 3856 - DNA, 133 bp, synthetic construct
  misc_feature 1..133: note = Description of artificial sequence: synthetic polynucleotide sequence
  source 1..133: mol_type = other DNA
gggtatcggtacagcaatcggagagctgcctccatatttcatggccagagcagctcgcctctcaggtgctgaaccagatgatgaagagtatcaggaatttgaagagatgctggaacatgcagagtctgcacaa

SEQ ID NO: 3857 - DNA, 121 bp, synthetic construct
  misc_feature 1..121: note = Description of artificial sequence: synthetic polynucleotide sequence
  source 1..121: mol_type = other DNA
ctaaatttgcctttttacaggactttgcctcccgggccaaactggcagttcaaaaactagtacagaaagttggattttttggaattttggcctgtgcttcagtaagtgaattgtattaaaa

SEQ ID NO: 3858 - DNA, 121 bp, synthetic construct
  misc_feature 1..121: note = Description of artificial sequence: synthetic polynucleotide sequence
  source 1..121: mol_type = other DNA
agattccaaatcctttatttgatctggctggaataacgtgtggacactttctggtacctttttggaccttctttggtgcaaccctaattggaaaagcaataataaaaatgcatatccaggt

SEQ ID NO: 3859 - DNA, 121 bp, synthetic construct
  misc_feature 1..121: note = Description of artificial sequence: synthetic polynucleotide sequence
  source 1..121: mol_type = other DNA
aatttattttaactggtgttttctttacagaaaatttttgttataataacattcagcaagcacatagtggagcaaatggtggctttcattgggtaagtaattcttcaaggactaatattaa

SEQ ID NO: 3860 - DNA, 121 bp, synthetic construct
  misc_feature 1..121: note = Description of artificial sequence: synthetic polynucleotide sequence
  source 1..121: mol_type = other DNA
tgcttccagtgctgtccccggcataggtccatctctgcagaagccatttcaggagtacctggaggctcaacggcagaagcttcaccacaaaagcgaaatgggcacaccacaggtaagactt

SEQ ID NO: 3861 - DNA, 145 bp, synthetic construct
  misc_feature 1..145: note = Description of artificial sequence: synthetic polynucleotide sequence
  source 1..145: mol_type = other DNA
gggagaaaactggttgtcctggatgtttgaaaagttggtcgttgtcatggtgtgttacttcatcctatctatcattaactccatggcacaaagttatgccaaacgaatccagcagcggttgaactcagaggagaaaactaaataa

SEQ ID NO: 3862 - DNA, 473 bp, synthetic construct
  misc_feature 1..473: note = Description of artificial sequence: synthetic polynucleotide sequence
  source 1..473: mol_type = other DNA
catggcggggctgtactcgctgggagtgagcgtcttctccgaccagggcgggaggaagtacatggaggacgttactcaaatcgttgtggagcccgaaccgacggctgaagaaaagccctcgccgcggcggtcgctgtctcagccgttgcctccgcggccgtcgccggccgcccttcccggcggcgaagtctcggggaaaggcccagcggtggcagcccgagaggctcgcgaccctctcccggacgccggggcctcgccggcacctagccgctgctgccgccgccgttcctccgtggcctttttcgccgtgtgcgacgggcacggcgggcgggaggcggcacagtttgcccgggagcacttgtggggtttcatcaagaagcagaagggtttcacctcgtccgagccggctaaggtttgcgctgccatccgcaaaggctttctcgcttgtcaccttgccatgtggaagaaactgg

SEQ ID NO: 3863 - DNA, 230 bp, synthetic construct
  misc_feature 1..230: note = Description of artificial sequence: synthetic polynucleotide sequence
  source 1..230: mol_type = other DNA
gcggaatggccaaagactatgacgggtcttcctagcacatcagggacaactgccagtgtggtcatcattcggggcatgaagatgtatgtagctcacgtaggtgactcaggggtggttcttggaattcaggatgacccgaaggatgactttgtcagagctgtggaggtgacacaggaccataagccagaacttcccaaggaaagagaacgaatcgaaggacttggtgggag

SEQ ID NO: 3864 - DNA, 121 bp, synthetic construct
  misc_feature 1..121: note = Description of artificial sequence: synthetic polynucleotide sequence
  source 1..121: mol_type = other DNA
taatgaacaagtctggggtgaatcgtgtagtttggaaacgacctcgactcactcacaatggacctgttagaaggagcacagttattgaccagattccttttctggcagtagcaagagcact

SEQ ID NO: 3865 - DNA, 192 bp, synthetic construct
  misc_feature 1..192: note = Description of artificial sequence: synthetic polynucleotide sequence
  source 1..192: mol_type = other DNA
ggtgatttgtggagctatgatttcttcagtggtgaatttgtggtgtcacctgaaccagacacaagtgtccacactcttgaccctcagaagcacaagtatattatattggggagtgatggactttggaatatgattccaccacaagatgccatctcaatgtgccaggaccaagaggagaaaaaatacctgatg

SEQ ID NO: 3866 - DNA, 121 bp, synthetic construct
  misc_feature 1..121: note = Description of artificial sequence: synthetic polynucleotide sequence
  source 1..121: mol_type = other DNA
gggtgagcatggacaatcttgtgccaaaatgcttgtgaatcgagcattgggccgctggaggcagcgtatgctccgagcagataacactagtgccatagtaatctgcatctctccagaagtg

SEQ ID NO: 3867 - DNA, 121 bp, synthetic construct
  misc_feature 1..121: note = Description of artificial sequence: synthetic polynucleotide sequence
  source 1..121: mol_type = other DNA
caatcagggaaactttaccaatgaagatgagttatacctgaacctgactgacagcccttcctataatagtcaagaaacctgtgtgatgactccttccccatgttctacaccaccagtcaag

SEQ ID NO: 3868 - DNA, 219 bp, synthetic construct
  misc_feature 1..219: note = Description of artificial sequence: synthetic polynucleotide sequence
  source 1..219: mol_type = other DNA
gtcactggaggaggatccatggccaagggtgaattctaaggaccatatacctgccctggttcgtagcaatgccttctcagagaattttttagaggtttcagctgagatagctcgagagaatgtccaaggtgtagtcataccctcaaaagatccagaaccacttgaagaaaattgcgctaaagccctgactttaaggatacatgattctttgaataatag

SEQ ID NO: 3869 - DNA, 340 bp, synthetic construct
  misc_feature 1..340: note = Description of artificial sequence: synthetic polynucleotide sequence
  source 1..340: mol_type = other DNA
ccttccaattggccttgtgcctactaattcaacaaacactgtcatggaccaaaaaaatttgaagatgtcaactcctggccaaatgaaagcccaagaaattgaaagaacccctccaacaaactttaaaaggacattagaagagtccaattctggccccctgatgaagaagcatagacgaaatggcttaagtcgaagtagtggtgctcagcctgcaagtctccccacaacctcacagcgaaagaactctgttaaactcaccatgcgacgcagacttaggggccagaagaaaattggaaatcctttacttcatcaacacaggaaaactgtttgtgtttgctga

SEQ ID NO: 3870 - DNA, 121 bp, synthetic construct
  misc_feature 1..121: note = Description of artificial sequence: synthetic polynucleotide sequence
  source 1..121: mol_type = other DNA
gtacttcttatgatgccaggcaatcctttgtgtgctgcagaaatcactgttcagtttacttggttggtgaccacacatttttcccgcttccaaatactagggacacctgtctgtagtatta

SEQ ID NO: 3871 - DNA, 121 bp, synthetic construct
  misc_feature 1..121: note = Description of artificial sequence: synthetic polynucleotide sequence
  source 1..121: mol_type = other DNA
gggggttctggaggggacagtgaagtgcagcgcacgatgctggagttgctcaaccagctcgacggctttgaggccaccaagaacatcaaggtaaggtggtagcatccttgggatgggccca

SEQ ID NO: 3872 - DNA, 121 bp, synthetic construct
  misc_feature 1..121: note = Description of artificial sequence: synthetic polynucleotide sequence
  source 1..121: mol_type = other DNA
cgacctggctctcactcctggcctgggtgctcacctacagaccacttcacttcccctgtccgcagcgtcactatgtcctcataggtggctgtctggtcaatgtccaggccctggagacatt

SEQ ID NO: 3873 - DNA, 121 bp, synthetic construct
  misc_feature 1..121: note = Description of artificial sequence: synthetic polynucleotide sequence
  source 1..121: mol_type = other DNA
cccgaggactcagagctgctgggcctgcccctctccttacctcgtaggtgtgatcttcctccatgccagccttgctgtcatcctgggggcggagagggatggagatcagagtgttagtgtc

SEQ ID NO: 3874 - DNA, 121 bp, synthetic construct
  misc_feature 1..121: note = Description of artificial sequence: synthetic polynucleotide sequence
  source 1..121: mol_type = other DNA
ccttgtccagcagcaggaagataggcacgatgatgaagaggatgatcagcagcgtctggatcatgatgataccatccttcagcgtgttcctctgcttcagctgtgccaaggtgctgaatcc

SEQ ID NO: 3875 - DNA, 313 bp, synthetic construct
  misc_feature 1..313: note = Description of artificial sequence: synthetic polynucleotide sequence
  source 1..313: mol_type = other DNA
cccatgactcgcagctctgtgccgcagccctggtagacctccgaggtgttgttgcacttctgctgacagaagtagatgccattgtcctcaaaccggatgccttggatggtgagggtggcgagagattcgttctgggactcttccatgcggcccttttccagcttcagctgctggggattctcgtccatctcctgcttccagagccagctcacattgccggaggcgctgttcatgtagcagtgcattttcaccgtgaagccccgtttcctggctatgaaacgtgggctctgccagatccgcgaacaagcactac

SEQ ID NO: 3876 - DNA, 121 bp, synthetic construct
  misc_feature 1..121: note = Description of artificial sequence: synthetic polynucleotide sequence
  source 1..121: mol_type = other DNA
cttgccctcagaagcggcaggcgaggctactgacctttgggattccggtaccggtcctccgatctggctgctggtactggctcagctgctgggtgggaggaagtgggcggggccagtcagg

SEQ ID NO: 3877 - DNA, 121 bp, synthetic construct
  misc_feature 1..121: note = Description of artificial sequence: synthetic polynucleotide sequence
  source 1..121: mol_type = other DNA
ccacaggcctcgtcgtgggttctgtacctgagagcagcagcagcaacgccaccatccagtggctgggcacaggagacaacgccagcctggccatggtcaccgctctgtccccgaccccaaa

SEQ ID NO: 3878 - DNA, 121 bp, synthetic construct
  misc_feature 1..121: note = Description of artificial sequence: synthetic polynucleotide sequence
  source 1..121: mol_type = other DNA
tgatgaccctaatggtccctacccctcaaagtttggtgcatcctctttctctctcccagccgtgtgaggacacaacatgaagttggtcatctcaggaccaggaagagagccctccccagaa

SEQ ID NO: 3879 - DNA, 226 bp, synthetic construct
  misc_feature 1..226: note = Description of artificial sequence: synthetic polynucleotide sequence
  source 1..226: mol_type = other DNA
atcactgtagcataagctgcttgaggttgtcatgcagaatagtatccttcacgtcacggaaaacaaggcggatgttctccgtgttgatagcagtggtgaagtggtggtataagggcttctgttgctggtcccggcgtttgttccggaaacattccaccaggaatttttggacgtctcttaagcagtggggatccccttcaaattctaggaaatagtctttgatgct

SEQ ID NO: 3880 - DNA, 348 bp, synthetic construct
  misc_feature 1..348: note = Description of artificial sequence: synthetic polynucleotide sequence
  source 1..348: mol_type = other DNA
cacaatttgcaccttctcctcaagcaagtctgtcttgtttaagaacagaattatggagacattgctgaaaacccggttattgacgattgtttcaaaaatgttcagagactctgtaaggcgattggtcagtcgatcttccataagcacctggtcaaattcacttgaggaaacaaggaaaagtattgatgtcacactgtcgaaacattcaaaccaacgtttcctttctgatctctgaccacctacatcaaccattttgaaaggaacattttttatttcaaagtcgtattcatggatgcctttggtgggtcttctggcaagcagaatatcttgttgtgatggaatataatc

SEQ ID NO: 3881 - DNA, 121 bp, synthetic construct
  misc_feature 1..121: note = Description of artificial sequence: synthetic polynucleotide sequence
  source 1..121: mol_type = other DNA
ggcactaaacataaacatttggtttaaacacttactggttctccaagtttatccaagttatccaggaaatattttacagattcaccctaaaaacaagaagaaaacaaatagttattagggc

SEQ ID NO: 3882 - DNA, 228 bp, synthetic construct
  misc_feature 1..228: note = Description of artificial sequence: synthetic polynucleotide sequence
  source 1..228: mol_type = other DNA
ccagttgaaattctcgacgccggtcataggcattctgtatgccgctgtctgcccataatgctcttatagcaggaagatattgtaagaaaacccttgtttccaccattccttgggctgccatgggggcccgggtatcaaacgacatcatcttatctccatgttgttggtttgagttgtctccccagggaatatgaagcttctctcgagcatcaaccagcaccctcatac

SEQ ID NO: 3883 - DNA, 284 bp, synthetic construct
  misc_feature 1..284: note = Description of artificial sequence: synthetic polynucleotide sequence
  source 1..284: mol_type = other DNA
cctttgatcacgttgctgtagatggtggggcggaactcctcgcgcgcgcgctggtcgaagtcctgcccgtggatgatccgcatctgcttcaggaaggtggacttgccgctctcgcccgcgcccagcagcaggatcttcaccagccgcttcacataggtcttttcccgagacaggcatttgtcgatctccttggacttgcgttgctgctcggcctcgccactcgtcagcaggcagccggggaagcacacggacagcacggaccgcgacggcaggaagtccgccat

SEQ ID NO: 3884 - DNA, 121 bp, synthetic construct
  misc_feature 1..121: note = Description of artificial sequence: synthetic polynucleotide sequence
  source 1..121: mol_type = other DNA
ctgtgttcattttgctgactgctatggcctcagcatttagcatggtgcctggcatatggtagcaactcaatacaataaatatttgctgatgaatgaacgaatcacacagagcttacaacct

SEQ ID NO: 3885 - DNA, 121 bp, synthetic construct
  misc_feature 1..121: note = Description of artificial sequence: synthetic polynucleotide sequence
  source 1..121: mol_type = other DNA
gtaaaaggagatgtattccacaggtatagtaccagcttccatggtgcctggcaaagcataaagaagcttgggttttggcctcttgaaattaatttaaagcatgagatgggcttaagcccat

SEQ ID NO: 3886 - DNA, 121 bp, synthetic construct
  misc_feature 1..121: note = Description of artificial sequence: synthetic polynucleotide sequence
  source 1..121: mol_type = other DNA
ctcagccttatttttcccatcccttattcaagatggagtcactctggttcaaatgcctgcgacattagggtccatcttagtcgctaaagaggcatttatttggtctctcagatcagagtgc

SEQ ID NO: 3887 - DNA, 121 bp, synthetic construct
  misc_feature 1..121: note = Description of artificial sequence: synthetic polynucleotide sequence
  source 1..121: mol_type = other DNA
agtctctgcctgttctccattggtgcctccaagtaatttattggttacctgatggcttctttcccacagaattctggagacactggttcaaaacagtcattaggtgtaggatcagaatctg

SEQ ID NO: 3888 - DNA, 121 bp, synthetic construct
  misc_feature 1..121: note = Description of artificial sequence: synthetic polynucleotide sequence
  source 1..121: mol_type = other DNA
gatgttaattttaaatgatctttaaaattaaacatactattaattattacataaaacatgagtttataggagatcaacaaaaaattactaggtttgaggttttaaggttcatctgaatgag

SEQ ID NO: 3889 - DNA, 121 bp, synthetic construct
  misc_feature 1..121: note = Description of artificial sequence: synthetic polynucleotide sequence
  source 1..121: mol_type = other DNA
cagcagttggctttgtgatcccagatatcattctaatagatgaactttttccagcaccattgggtcctagcaatcccaaaatttcacctgaaagaaagaatcagactatcaatattggaag

SEQ ID NO: 3890 - DNA, 121 bp, synthetic construct
  misc_feature 1..121: note = Description of artificial sequence: synthetic polynucleotide sequence
  source 1..121: mol_type = other DNA
tgatgcttcagtgattttataaaatcttcaatatttgattctaatatgaagttaataagagaaggccatagaaaagtaagaaaatacatatcaaacttttaaaataagtcatatacataat

SEQ ID NO: 3891 - DNA, 121 bp, synthetic construct
  misc_feature 1..121: note = Description of artificial sequence: synthetic polynucleotide sequence
  source 1..121: mol_type = other DNA
tcttgaatgttttgcatgtccaattccaataatattcgttgtacctatatgagaaaatacgcaacttttaaaatccaaaatgaagaagacatttatgcagccaaaagacacatgaaaaaat

SEQ ID NO: 3892 - DNA, 121 bp, synthetic construct
  misc_feature 1..121: note = Description of artificial sequence: synthetic polynucleotide sequence
  source 1..121: mol_type = other DNA
ggcgctcatctccatctaattaaccaagaggcaacaaaatatgatcagtaatagtaaaagaatgcgcaaagaagccttgctaacaacaatgcagaatgccttgaagttttaagcatcatag

SEQ ID NO: 3893 - DNA, 121 bp, synthetic construct
  misc_feature 1..121: note = Description of artificial sequence: synthetic polynucleotide sequence
  source 1..121: mol_type = other DNA
aaatatgaccatgaagccagtcatgactataatttgggtgaatgttatgataattgtaacgaatatggaaataataaagatgaagccagcatagattagaccccaggagagcctaaataaa

SEQ ID NO: 3894 - DNA, 121 bp, synthetic construct
  misc_feature 1..121: note = Description of artificial sequence: synthetic polynucleotide sequence
  source 1..121: mol_type = other DNA
acatttaaatttggcataccttgaataagatttcacggggctatgaatcttatgcaatatatatatttaggtagaaaatgttccttactattaaggttgttaaaagaatggttttattgac

SEQ ID NO: 3895 - DNA, 121 bp, synthetic construct
  misc_feature 1..121: note = Description of artificial sequence: synthetic polynucleotide sequence
  source 1..121: mol_type = other DNA
tgtgttgcctcttatataagtcgaatactctacttacacgagaaaatgaagtgctctccatttgaataagctccgtgaagttaaaaattcccataagggcattgctaacaattcccataag

SEQ ID NO: 3896 - DNA, 121 bp, synthetic construct
  misc_feature 1..121: note = Description of artificial sequence: synthetic polynucleotide sequence
  source 1..121: mol_type = other DNA
ttaacttaccacagcaaggaactttacagtataaaaatataatccataatgaaatgccaataagcttcctagcatcaaaataagaatgataaaaaataaggggatatcaacaacagcttgt

SEQ ID NO: 3897 - DNA, 121 bp, synthetic construct
  misc_feature 1..121: note = Description of artificial sequence: synthetic polynucleotide sequence
  source 1..121: mol_type = other DNA
atcactcttaggttttattcaggttcattactatgtgttatttctctcggctacccttctcaatccttgctcaccatgctatttggaaatctctaaaggaagggtggggtgaatcccatga

SEQ ID NO: 3898 - DNA, 121 bp, synthetic construct
  misc_feature 1..121: note = Description of artificial sequence: synthetic polynucleotide sequence
  source 1..121: mol_type = other DNA
taaacttggacagtagctgactttatgtccatctcttggctcccagtgaaatcggaccataataccatgatctctgttaaagttggggtgtgcgtgtatgtgtatgcttgtgtgtgtgtct

SEQ ID NO: 3899 - DNA, 121 bp, synthetic construct
  misc_feature 1..121: note = Description of artificial sequence: synthetic polynucleotide sequence
  source 1..121: mol_type = other DNA
tggaagtgtaattgacagacctcctaactaccagtgagcgtggggatgagaaaatgccacacaataaagttgcttgagaaagagagagattgagcgacagatcatgtgtgagatggagtag

SEQ ID NO: 3900 - DNA, 121 bp, synthetic construct
  misc_feature 1..121: note = Description of artificial sequence: synthetic polynucleotide sequence
  source 1..121: mol_type = other DNA
cagaccacctgctggtaagtgacagagctggaatcccagcccaggtctttctgggctaatgcacttgtccttcctgcccccactctgtcttggggatgtggcattgctctagggcaggtgg

SEQ ID NO: 3901 - DNA, 121 bp, synthetic construct
  misc_feature 1..121: note = Description of artificial sequence: synthetic polynucleotide sequence
  source 1..121: mol_type = other DNA
aagaccccgggctccctaaggccttgtgcagacagaagcttcagccactgagaatgattgaaccacatcgagcctgtctttcccactatgctcagcagttttgcttggaaaatgatgatag

SEQ ID NO: 3902 - DNA, 121 bp, synthetic construct
  misc_feature 1..121: note = Description of artificial sequence: synthetic polynucleotide sequence
  source 1..121: mol_type = other DNA
tggtgacccagggcctcaccctgggcttccccacgtgtatcggcatcttcttcactgaattgcaatgggagttccaggccagcaacagcgagacctcttggttcccctccatcctcacggc

SEQ ID NO: 3903 - DNA, 121 bp, synthetic construct
  misc_feature 1..121: note = Description of artificial sequence: synthetic polynucleotide sequence
  source 1..121: mol_type = other DNA
catctccccaccactggccggtgaggagctgggagggagggcagccagatagtgtggtaaaaggggaacagtttagacagatctgggcccagtccagcatctccagaggttgtgctacagc

SEQ ID NO: 3904 - DNA, 121 bp, synthetic construct
  misc_feature 1..121: note = Description of artificial sequence: synthetic polynucleotide sequence
  source 1..121: mol_type = other DNA
gtggtacttcagcagggggctggtgcagatgaagacctgcgtgctgcggagaaggacgcggttaccgccgggagccaggagcccgcccaggactccgcccgcccccctctctccttactcc

SEQ ID NO: 3905 - DNA, 121 bp, synthetic construct
  misc_feature 1..121: note = Description of artificial sequence: synthetic polynucleotide sequence
  source 1..121: mol_type = other DNA
atctctgtctcaaaaaaaaagaaagaaaaaaaaattgctagtcatgtgcttttgaacttggttaagtgattgaactaacaaaatcgtccagggacaagtatttcccccaaactttacttct

SEQ ID NO: 3906 - DNA, 121 bp, synthetic construct
  misc_feature 1..121: note = Description of artificial sequence: synthetic polynucleotide sequence
  source 1..121: mol_type = other DNA
gcagccttcagcaagctgggggacaggcccttgaagaagcccagggcgccttccttttgcagcacctgcttggcacagtccatgaggcccttgtatctccgtacctggggagaggaaaggg

SEQ ID NO: 3907 - DNA, 233 bp, synthetic construct
  misc_feature 1..233: note = Description of artificial sequence: synthetic polynucleotide sequence
  source 1..233: mol_type = other DNA
cttagacgttccggttcacgggggtgacataattgcggggaaacatgccggtctgcccgtggcaagctcctttccaccagttggggtctgagttatccatgacatggataaaatctccccggcggaagcccagctctccatcctcctggggatcaaagtcaaagagggcctggacgtatgtcggctgctgcaaaacaggagcaggaaaaacccacattgcattcctggtctgt

SEQ ID NO: 3908 - DNA, 170 bp, synthetic construct
  misc_feature 1..170: note = Description of artificial sequence: synthetic polynucleotide sequence
  source 1..170: mol_type = other DNA
cctgtggcacctgttctatgtcccgcaggaatatctgctggtttctggagacagatgtagatctgtgataatccaccagctcattcaaagaattgaacttcaccacccagaggaagtacttcccggctccatctcggagcaccttgaagtgctgcacatcgtttccaaac

SEQ ID NO: 3909 - DNA, 121 bp, synthetic construct
  misc_feature 1..121: note = Description of artificial sequence: synthetic polynucleotide sequence
  source 1..121: mol_type = other DNA
tgacagagagggagaagtccccaggagcgctctcactctctcggataagaaaggccccatcgtgccgctgtttgctaagcatttcttctgccttggctctggggattttgccaaaaaacca

SEQ ID NO: 3910 - DNA, 121 bp, synthetic construct
  misc_feature 1..121: note = Description of artificial sequence: synthetic polynucleotide sequence
  source 1..121: mol_type = other DNA
agcttaacttacggatgtggtttcatttctatgtagttcttgggaatgaagccgtcttttccattaagctctgccttgtaccagttctgatcacattcttcgttcaaaacctgaaaagaaa

SEQ ID NO: 3911 - DNA, 121 bp, synthetic construct
  misc_feature 1..121: note = Description of artificial sequence: synthetic polynucleotide sequence
  source 1..121: mol_type = other DNA
cttaataggtgccataatctacctctgtaaaccccactaattggttttgctttttggcttgtatggcaatttcatgaactggaaggtgcatgccacttttatgtgttttaacatctctaaa

SEQ ID NO: 3912 - DNA, 121 bp, synthetic construct
  misc_feature 1..121: note = Description of artificial sequence: synthetic polynucleotide sequence
  source 1..121: mol_type = other DNA
tgtgctcggcatcagcacttaccttgaggatgtccccccttttgaagctcagctcgtcgtctgcagtagctttgaagtcatatttggcgatggcttccattctgagcgctgctcagtgctc

SEQ ID NO: 3913 - DNA, 121 bp, synthetic construct
  misc_feature 1..121: note = Description of artificial sequence: synthetic polynucleotide sequence
  source 1..121: mol_type = other DNA
aatatttcttatcttactattgtgttagtgttgtttttacgatggtgtctttctttacccaaatgataggatttaaaaatattgtttaaagcccgtttccaagcaggcctgggtttgttta

SEQ ID NO: 3914 - DNA, 121 bp, synthetic construct
  misc_feature 1..121: note = Description of artificial sequence: synthetic polynucleotide sequence
  source 1..121: mol_type = other DNA
ctgtgtgatgccagcgtcaccgagcgcctgtgccgattctccgaccacctgtgcaacatcgccctgcaagagagccacagcgccgtgctgcccgtccatgtgccctggggcctctgcgagc

SEQ ID NO: 3915 - DNA, 121 bp, synthetic construct
  misc_feature 1..121: note = Description of artificial sequence: synthetic polynucleotide sequence
  source 1..121: mol_type = other DNA
ttgtgggccgctgtggctaggagctgctgtttcttgctagcccggcccttggcaagggagctgcccccagaggaactttttgccttcttctcaggggagggccccccatagtgagcgctgc

SEQ ID NO: 3916 - DNA, 121 bp, synthetic construct
  misc_feature 1..121: note = Description of artificial sequence: synthetic polynucleotide sequence
  source 1..121: mol_type = other DNA
acctgctgccctaccccagctctaggatgtccccataaaagaatgtccctatttggcccagtatgttgaggactttggctttcacaagggcagtttgatgatttgagccttaaataccata

SEQ ID NO: 3917 - DNA, 121 bp, synthetic construct
  misc_feature 1..121: note = Description of artificial sequence: synthetic polynucleotide sequence
  source 1..121: mol_type = other DNA
ctgatagtaactcaggtaaccttcttggtgggagctatggggtatgggaaccaggaagtgttgcccgacttagggtgggacaaggaatcgccccattcatcctttggcccgcaccctaaga

SEQ ID NO: 3918 - DNA, 121 bp, synthetic construct
  misc_feature 1..121: note = Description of artificial sequence: synthetic polynucleotide sequence
  source 1..121: mol_type = other DNA
gtccaaaagggaagactgtacacacaatgtgggtacaatttgggtagctcccattgctacggccggcatgaatttgcaccatgtttggttagaattgaactgaggaaacagcattcagggt

SEQ ID NO: 3919 - DNA, 121 bp, synthetic construct
  misc_feature 1..121: note = Description of artificial sequence: synthetic polynucleotide sequence
  source 1..121: mol_type = other DNA
cggaggaggtactgcggtggggaggcaggggggaggcgcatctgcctccgcacaaggggtctaatggcttgcttattccttctaggccaggttgaaaggtttttaaaagcaggtgggggtg

SEQ ID NO: 3920 - DNA, 121 bp, synthetic construct
  misc_feature 1..121: note = Description of artificial sequence: synthetic polynucleotide sequence
  source 1..121: mol_type = other DNA
ggggcccgcccaggcacggtgcctcctggcatccggtaggcatctttcagcccaagttgcattaggccatctcactgtggatcaaacttaacagtgaacttcacttcctcaaataacaaca

SEQ ID NO: 3921 - DNA, 121 bp, synthetic construct
  misc_feature 1..121: note = Description of artificial sequence: synthetic polynucleotide sequence
  source 1..121: mol_type = other DNA
aacacacaactactttcctaccaaactgtggtgttttttaccatctatcactaacatccgagaaagctttcaagaatactgtagaatatctactgatctcacctgtgccactgagcgggca

SEQ ID NO: 3922 - DNA, 121 bp, synthetic construct
  misc_feature 1..121: note = Description of artificial sequence: synthetic polynucleotide sequence
  source 1..121: mol_type = other DNA
atggactcctgaccgcagcatctcaaagaggaacgaaggctcgcacgagctgggacagcggaaagagcagaagagtgggcacagaaaagcgcctgggggccagatcctagaggggcttcag

SEQ ID NO: 3923 - DNA, 121 bp, synthetic construct
  misc_feature 1..121: note = Description of artificial sequence: synthetic polynucleotide sequence
  source 1..121: mol_type = other DNA
ctaagactggaacatttctccaccaagtgtttatttctaaccaagcttttaatgtcagtccttgggccagttaacaccagcctatcttaggttggctccccagacgcagaccctggaaaaa

SEQ ID NO: 3924 - DNA, 121 bp, synthetic construct
  misc_feature 1..121: note = Description of artificial sequence: synthetic polynucleotide sequence
  source 1..121: mol_type = other DNA
cttatatgcatctcaaggaattaatcaccaaagctattctctcttttgggtgctaggccccaaaataaacaggcctcacaataaacagtttgagacacatctaaaaccaacattttcaagt

SEQ ID NO: 3925 - DNA, 121 bp, synthetic construct
  misc_feature 1..121: note = Description of artificial sequence: synthetic polynucleotide sequence
  source 1..121: mol_type = other DNA
agattggtcaatagggtaaattagacatgattacatgttgacccatctctgacccaattaaattgtaccttatctggagtttcataaatatgttctattggacttgatttctttgtgtttt

SEQ ID NO: 3926 - DNA, 121 bp, synthetic construct
  misc_feature 1..121: note = Description of artificial sequence: synthetic polynucleotide sequence
  source 1..121: mol_type = other DNA
tcagcttatagtggcttcacctaaaatgtaaccatcctggtgactgtttcctttcacaatcacctcttgcacactgaagcatggtttctgacgtcatgctgactgcttcaatttgccaaca

SEQ ID NO: 3927 - DNA, 121 bp, synthetic construct
  misc_feature 1..121: note = Description of artificial sequence: synthetic polynucleotide sequence
  source 1..121: mol_type = other DNA
cacctggagaatcctcctcattagcctctcagttctgaccaggaggctgaatgttcacaacatggaaagtcataatatttcaacaatcattggccccaaagcacttgttcaaacagtaata

SEQ ID NO: 3928 - DNA, 121 bp, synthetic construct
  misc_feature 1..121: note = Description of artificial sequence: synthetic polynucleotide sequence
  source 1..121: mol_type = other DNA
aacccaagaaatatgcaccctgtagaatacaaacatatgaaggagcatccactaacagatattctaactccaccggctgcgggcacagggaaagctagagtaattggctgcagatgtttga

SEQ ID NO: 3929 - DNA, 121 bp, synthetic construct
  misc_feature 1..121: note = Description of artificial sequence: synthetic polynucleotide sequence
  source 1..121: mol_type = other DNA
tgtacagtcccctggcacattgtacatcctcattaataacaatagcacacttatattttatgtgtgtgttgactcatttaattctcatgaaaaccatagcatgcagattgtttttcaaaat

SEQ ID NO: 3930 - DNA, 121 bp, synthetic construct
  misc_feature 1..121: note = Description of artificial sequence: synthetic polynucleotide sequence
  source 1..121: mol_type = other DNA
cctgacagatcatttactttcatatcttatggtgtagctgggaaaactgaagtctccagagttaaagcaaagtactcactcaaacactggggtagcaaatccaaaacctgaatttgagtct

SEQ ID NO: 3931 - DNA, 121 bp, synthetic construct
  misc_feature 1..121: note = Description of artificial sequence: synthetic polynucleotide sequence
  source 1..121: mol_type = other DNA
aggaaaacacaaagaggccaagcagtgtcttccagctcgatcagatccctctctccactgtaggaagagtgcagagttctctcctacatggccccaaagcccacacttccccgctcttgcc

SEQ ID NO: 3932 - DNA, 121 bp, synthetic construct
  misc_feature 1..121: note = Description of artificial sequence: synthetic polynucleotide sequence
  source 1..121: mol_type = other DNA
ttcccaaactgaaactatccagacttccagaagctcttgatgtagtgccagttttgaaataatcttcaaggatgtttcccaaggaaggtcccccttccaaataaagccagtatgaaaggaa

SEQ ID NO: 3933 - DNA, 121 bp, synthetic construct
  misc_feature 1..121: note = Description of artificial sequence: synthetic polynucleotide sequence
  source 1..121: mol_type = other DNA
atgatgagtgtgcgaccagactgcggcagagaacgagccatgctctctgagtgtaaaagctgcattgtgagcacacgtgacgatccgaaggagttaattctcccccgggggctgacttgtt

SEQ ID NO: 3934 - DNA, 121 bp, synthetic construct
  misc_feature 1..121: note = Description of artificial sequence: synthetic polynucleotide sequence
  source 1..121: mol_type = other DNA
ctttgtagtccaggttcccatcagtgcccttggccttaccctctgtgagcaggagcttcgtactctctagcaaggtttcagattagttttctgtgctggaggagttggaggcatttttggt

SEQ ID NO: 3935 - DNA, 121 bp, synthetic construct
  misc_feature 1..121: note = Description of artificial sequence: synthetic polynucleotide sequence
  source 1..121: mol_type = other DNA
agatgcacgggtggatggagcttttccctctgacccagtccttcaactgcatgtgatgcttttgggacccacgcattccatcctttctgccctgtccttctcctggatgtcatacattggg

SEQ ID NO: 3936 - DNA, 121 bp, synthetic construct
  misc_feature 1..121: note = Description of artificial sequence: synthetic polynucleotide sequence
  source 1..121: mol_type = other DNA
tgagcctcagaactcaggtagaccattcttattccattgataggtcacagatataaacaaaaaccttatcagcacttggacttgaagtctagacattggctgccttctcatttctcttgga

SEQ ID NO: 3937 - DNA, 121 bp, synthetic construct
  misc_feature 1..121: note = Description of artificial sequence: synthetic polynucleotide sequence
  source 1..121: mol_type = other DNA
tgtgaaaaactgctttcctgggtgaaaagcagtggctgtgccagagtcattgttctttcaagcagtcattcatatcagcgtaatgatctgcagcttcgtaggtatgtttctgcctctggaa

SEQ ID NO: 3938 - DNA, 121 bp, synthetic construct
  misc_feature 1..121: note = Description of artificial sequence: synthetic polynucleotide sequence
  source 1..121: mol_type = other DNA
catatggttggaatcatagagtacgtagcctttcagagtagcttcttcatttagtaatatgcgtttcatgttctcctatgcctttttgtggcttgatagctcattttttttgttttttttt

SEQ ID NO: 3939 - DNA, 121 bp, synthetic construct
  misc_feature 1..121: note = Description of artificial sequence: synthetic polynucleotide sequence
  source 1..121: mol_type = other DNA
tccctgcccttgactgattcattctgtacctgctggacctggaaatgcattaaaagctcaggaaagcttactgatcaattgcactggagattgagtctggtttggggctttacatttgtaa

SEQ ID NO: 3940 - DNA, 121 bp, synthetic construct
  misc_feature 1..121: note = Description of artificial sequence: synthetic polynucleotide sequence
  source 1..121: mol_type = other DNA
actgcacatgtaagttttaggaattgcaagtacctcttttgagccactggggttgaggcttcagttctctaccactgagaagaatcaggcagatagagaccattttatgacatagattaag

SEQ ID NO: 3941 - DNA, 121 bp, synthetic construct
  misc_feature 1..121: note = Description of artificial sequence: synthetic polynucleotide sequence
  source 1..121: mol_type = other DNA
gactcctcctcaagaagaattacctactcgagtgtcatctcctgtatttggagctacctctagtatcaaaagtggtttagatttgaatacaagtttgtccccttctcttttacagcctggg

SEQ ID NO: 3942 - DNA, 121 bp, synthetic construct
  misc_feature 1..121: note = Description of artificial sequence: synthetic polynucleotide sequence
  source 1..121: mol_type = other DNA
acatctgaaaacactcccttttagcaacacttgtatatctagattagaaaaaactagatcaaaatctgaagatagtgcccttttcacacatcacagtcttgggtctgaagtgaacaagatc

SEQ ID NO: 3943 - DNA, 121 bp, synthetic construct
  misc_feature 1..121: note = Description of artificial sequence: synthetic polynucleotide sequence
  source 1..121: mol_type = other DNA
ttctcccaggctttagttttgcactgtgattctccaaggggaagataagaatatgcaggtatgctatgtttaaccagcttatttgaccaggaaaattcctatttatactgtagcctgtgag

SEQ ID NO: 3944 - DNA, 121 bp, synthetic construct
  misc_feature 1..121: note = Description of artificial sequence: synthetic polynucleotide sequence
  source 1..121: mol_type = other DNA
ctaagctcagtgcaaggtattctacaaatgacagctgaaaatagccttaaaaatgccaacataaaataatgtgtcattagtttgtaatcatatcagaaaatgcttaaggaaatactttgga

SEQ ID NO: 3945 - DNA, 121 bp, synthetic construct
  misc_feature 1..121: note = Description of artificial sequence: synthetic polynucleotide sequence
  source 1..121: mol_type = other DNA
aattcatcccagcgcattttacagcttaacagaaggttttgatttcctggtggagtcttgattgattctgaattctttagcattcaaccttccttgtggtgattgttataagatttaatac

SEQ ID NO: 3946 - DNA, 121 bp, synthetic construct
  misc_feature 1..121: note = Description of artificial sequence: synthetic polynucleotide sequence
  source 1..121: mol_type = other DNA
agcttatggaattgcatttgtacatcaaacccctatggagagagtgatattcaaagtgtcttcagttgagtgatttgcataattgtgtcagttatttgtatgtaaacggacttttaaaaag

SEQ ID NO: 3947 - DNA, 121 bp, synthetic construct
  misc_feature 1..121: note = Description of artificial sequence: synthetic polynucleotide sequence
  source 1..121: mol_type = other DNA
tgaccctgagaaaagttagtgcgcaagggtgaattaaaggatgtgagattgctcaaagggcagcactagctggaaggggaatggagaaattgccaccagtttacactgtagctgagagagt

SEQ ID NO: 3948 - DNA, 121 bp, synthetic construct
  misc_feature 1..121: note = Description of artificial sequence: synthetic polynucleotide sequence
  source 1..121: mol_type = other DNA
ctctgtttttcccccaatatacctcttgcagtttagaagtaagattattctcctttcctaatccactgtagaatagccacatgcctatagattttttcaatctatctttttttttcctcct

SEQ ID NO: 3949 - DNA, 121 bp, synthetic construct
  misc_feature 1..121: note = Description of artificial sequence: synthetic polynucleotide sequence
  source 1..121: mol_type = other DNA
aggggatgccatcttgaagaagtgaagcccaaggtttagtagtagttaactaggtgactgtgttagagggatgacagaaaagtttcagggagaagtaactacagataaaaccatttggagg

SEQ ID NO: 3950 - DNA, 121 bp, synthetic construct
  misc_feature 1..121: note = Description of artificial sequence: synthetic polynucleotide sequence
  source 1..121: mol_type = other DNA
agaggcctcctccacccccacgttggccagcgctcctctctcaccacctaaggcagaagcgtctcttggtccatctaactggagagtccataagaaattcaagatcctgactccaaatgtt

SEQ ID NO: 3951 - DNA, 121 bp, synthetic construct
  misc_feature 1..121: note = Description of artificial sequence: synthetic polynucleotide sequence
  source 1..121: mol_type = other DNA
cccttggcatacaaaactgaaaaaccacttctgaggtattcctggtctaacaggcactcattctccaaattaacaaatatatgacattactggaggtgttcttactagtagcttttctaat

SEQ ID NO: 3952 - DNA, 142 bp, synthetic construct
  misc_feature 1..142: note = Description of artificial sequence: synthetic polynucleotide sequence
  source 1..142: mol_type = other DNA
gttatttgttgtatggtacacaagagggcagaataactgtcacacaggcagggcctgccaacggttctgctacatctccttcgagttctgtccaggttcctttctctggacaatagcatattgtagatgacttgtaggcccc

SEQ ID NO: 3953 - DNA, 159 bp, synthetic construct
  misc_feature 1..159: note = Description of artificial sequence: synthetic polynucleotide sequence
  source 1..159: mol_type = other DNA
ccatactccagctgtagcctcccacaaggtaaatgctgtcatcaagcactgcacagccagggccacttcgaccctccaaaatgggagtttggagtatattccactggtcaccttttgggtcatagcattccacaagcattacatcaaggtgggagaaac

SEQ ID NO: 3954 - DNA, 160 bp, synthetic construct
  misc_feature 1..160: note = Description of artificial sequence: synthetic polynucleotide sequence
  source 1..160: mol_type = other DNA
cctttcaaatgatttcctccaattgcatacaagcgatcattcattacagccaaagtgtgaattgcacgttttgtgttcatatcttgttttcgagcccagacatccattactgggtcatagcaatatagccatgggacatattctccattgtgtacacccc

SEQ ID NO: 3955 - DNA, 192 bp, synthetic construct
  misc_feature 1..192: note = Description of artificial sequence: synthetic polynucleotide sequence
  source 1..192: mol_type = other DNA
cctgaaatgtatattttcccattgtgcactgctcccgcatgagccgccagaggctgtggcaaagaggacacatagcgccattcattcgtttctaggttatagcactccacgctggacaagtagccagtttcattccttccaccaattacgtataaatgcttgtccaaccgacatgcatagaaactggctctt

SEQ ID NO: 3956 - DNA, 121 bp, synthetic construct
  misc_feature 1..121: note = Description of artificial sequence: synthetic polynucleotide sequence
  source 1..121: mol_type = other DNA
gtgcaagaaataaacacttacctttcctgcatgggtggaagttgaatccagctattaaatcgaggatcatatcggctgacaaaatttgtactgtgttttcctgtaaaaatgcattcgagac

SEQ ID NO: 3957 - DNA, 121 bp, synthetic construct
  misc_feature 1..121: note = Description of artificial sequence: synthetic polynucleotide sequence
  source 1..121: mol_type = other DNA
gttgttcaatagttaccattcggattccactggtcctctccacccaacacgaacaagaagttttccacctccacaacgcagtggtgggcactgttgtatggcataactgaaattaagaaaa

SEQ ID NO: 3958 - DNA, 121 bp, synthetic construct
  misc_feature 1..121: note = Description of artificial sequence: synthetic polynucleotide sequence
  source 1..121: mol_type = other DNA
ttgtgagtattttccatgtcttcttttcatcgtcgtaatactgaaccaaattgctggggagccggtccggtccaggaggcagccctccaaccaataacagcattttcttgttagagcgaat

SEQ ID NO: 3959 - DNA, 472 bp, synthetic construct
  misc_feature 1..472: note = Description of artificial sequence: synthetic polynucleotide sequence
  source 1..472: mol_type = other DNA
cctgctggccaggctctgcctgcagtgctgcctgaagggcatcaggtggtagttcatggcgtccagcagcagcttctggcagaccgggtcggttcgcatgaaatccactgactggacccgctccaccagctccggggccgggatgagggcgaagcggaggcgcttcatgaggtcaggcgcatactgcatgcgggtctcgcggtcgtgctccagccacagcacggacatctggaagagcgccagctccgactccacggggggcggcagcgagtccagcagggcgcgcatctcctcgaagttgagcagcagcacatcctccaccaggtacttgttggccagcttcttggtctcctccaggccgtgcagcgcggcgatcttgcacacctgcttgtagttctgcaccgagatctggtcgttgaggaactgcacgcagagcttggtgacctgggggatgtgcaggatcttgctgacc

SEQ ID NO: 3960 - DNA, 476 bp, synthetic construct
  misc_feature 1..476: note = Description of artificial sequence: synthetic polynucleotide sequence
  source 1..476: mol_type = other DNA
gacagcacctcctccaccgtgtccagggacagggtcacgttggccgtgtagaggtactcgagcaccaggcgcagcccgatggacgagcagccctgcagcaccaggttgttgatggcccgggggctggtcagcagcttgtcgtcgggggaggaagaaggagtcccgggctcctcctgcggcggcggctgctgctgctgtgacggctgctgctgcggcggctgctgctggtccttgggggcccccaggccgtcctggccgccgacccctcccccgagaggggggtggctggagaagagcgatcggaagtactgcgagcaggaggccagcacggccttgtggcaatggaactgctggccctgggccgtcagggtcacgtcgcaaaacagctgcttcctccacagcaggttgaggccgtgcagcaggttgtcgctgtggctggggtcgaaggtggaggtcctgtccccggatctggacat

SEQ ID NO: 3961 - DNA, 121 bp, synthetic construct
  misc_feature 1..121: note = Description of artificial sequence: synthetic polynucleotide sequence
  source 1..121: mol_type = other DNA
ttgccagtgaatttccagcacccatacaagtgccctgcacataggttcatatgagtggcttaacaagtatctgttgaataagatgaaataattgagcatgagtaaacaataaatcaattaa

SEQ ID NO: 3962 - DNA, 121 bp, synthetic construct
  misc_feature 1..121: note = Description of artificial sequence: synthetic polynucleotide sequence
  source 1..121: mol_type = other DNA
cttgacacatcctattgcttctgccttacatgttcttgtgccttttgtcacctgtgatgtgtcattcatcctctggatctctgtcccttacattgagaagcatttgcagctcctccatcct

SEQ ID NO: 3963 - DNA, 121 bp, synthetic construct
  misc_feature 1..121: note = Description of artificial sequence: synthetic polynucleotide sequence
  source 1..121: mol_type = other DNA
gacttgtgtggcctgggatgtcacctaggaatggatggatggaaggggcgagggaattttggtctgaggattctgtctgaaagcagagttggtgctgtcctgaatcacagtgctctcataa

SEQ ID NO: 3964 - DNA, 121 bp, synthetic construct
  misc_feature 1..121: note = Description of artificial sequence: synthetic polynucleotide sequence
  source 1..121: mol_type = other DNA
gttagcatcagtgatgaccagcgggtgtgtgtatttccacttgatcttcaccccagtcatgtgagaggagcatttaggacctgcattttacagattaagaaactggcacagggagggtcgg

SEQ ID NO: 3965 - DNA, 121 bp, synthetic construct
  misc_feature 1..121: note = Description of artificial sequence: synthetic polynucleotide sequence
  source 1..121: mol_type = other DNA
gtttcatgaaaacagtcaaagatggcgtaagagaatctgtgaatgccagggtctgcagtatatacaatttgagtagcatatattagtttaaggtatttttaagctggttttccattaaaga

SEQ ID NO: 3966 - DNA, 121 bp, synthetic construct
  misc_feature 1..121: note = Description of artificial sequence: synthetic polynucleotide sequence
  source 1..121: mol_type = other DNA
cacctaacaggagtacttctgatattccccatgccaccgccaccccaagagtccattagcctcagcttagaattactgccagttaaaaaacaaaaactgcctactaacatattaaggatgt

SEQ ID NO: 3967 - DNA, 121 bp, synthetic construct
  misc_feature 1..121: note = Description of artificial sequence: synthetic polynucleotide sequence
  source 1..121: mol_type = other DNA
gccataaacggagtaaacagacaacctacagaatgggacaaaatattggccaactatgcgtcctacaaaattatagtatctagaatctataaaaaatttaaacaattgaacaagcaaaata

SEQ ID NO: 3968 - DNA, 121 bp, synthetic construct
  misc_feature 1..121: note = Description of artificial sequence: synthetic polynucleotide sequence
  source 1..121: mol_type = other DNA
tcacctttgagagggagatttgtgtttaaacttgatgggagaaaagggtcagaattagaggtagaggattattgattacatagtagtaaaatgtcacttacattttcttgtgtcttagcct

SEQ ID NO: 3969 - DNA, 121 bp, synthetic construct
  misc_feature 1..121: note = Description of artificial sequence: synthetic polynucleotide sequence
  source 1..121: mol_type = other DNA
ttgcacaaagactcgactatttattcatttcatttgactactttttaatctcagtttttctgaagacactaatgaccctcacagattgttaccctccagtgaaataacagagctttggcag

SEQ ID NO: 3970 - DNA, 121 bp, synthetic construct
  misc_feature 1..121: note = Description of artificial sequence: synthetic polynucleotide sequence
  source 1..121: mol_type = other DNA
agaaaatagactaaaagaaaaaataaatagagatcaagggatctgtgggacaataacaaagatctgacattagaatcatcataattttgatgaagaagagaaatggagaggagctaagaaa

SEQ ID NO: 3971 - DNA, 121 bp, synthetic construct
  misc_feature 1..121: note = Description of artificial sequence: synthetic polynucleotide sequence
  source 1..121: mol_type = other DNA
gaacctgaaaaagtagtgatatgatgcacaactggctctcagacagatacggcatctacagtgtcatttaatactcacttacgtgtgcatgaggtaaggattaacatcaccatttgtcaat

SEQ ID NO: 3972 - DNA, 121 bp, synthetic construct
  misc_feature 1..121: note = Description of artificial sequence: synthetic polynucleotide sequence
  source 1..121: mol_type = other DNA
taacatttgttgagagttctgacctatcctggcagcagatgaaacaaagcaaaagatgtcatatatacttgtctgcaattaacatgtatgaaacttaaatgagatgtaagaaaaaatgata

SEQ ID NO: 3973 - DNA, 121 bp, synthetic construct
  misc_feature 1..121: note = Description of artificial sequence: synthetic polynucleotide sequence
  source 1..121: mol_type = other DNA
taatgagtttctaaaatgtcaattgctactatggtcaagggcatgctgtggtggaagataagaagagagtaaacaagaacacataggaaaacatgttttagtgcagagaaaacagaacttt

SEQ ID NO: 3974 - DNA, 121 bp, synthetic construct
  misc_feature 1..121: note = Description of artificial sequence: synthetic polynucleotide sequence
  source 1..121: mol_type = other DNA
atactagattgagttctcttttaaattggcatggtactaagacaattttggcaagactgctgttcttatttttacactaagaataatagcactgatggagtccctttaacctcccagctga

SEQ ID NO: 3975 - DNA, 121 bp, synthetic construct
  misc_feature 1..121: note = Description of artificial sequence: synthetic polynucleotide sequence
  source 1..121: mol_type = other DNA
tctggacttgactttggcattgcatccatcggagcgtcaccgcactgcactgtggttgctccaatgaaggtcagacctgcaaggtttgggcagcacatctgtatcctaagacccacagcca

SEQ ID NO: 3976 - DNA, 121 bp, synthetic construct
  misc_feature 1..121: note = Description of artificial sequence: synthetic polynucleotide sequence
  source 1..121: mol_type = other DNA
aatgcttgccttgcctcttatttgaacttcaaatattcctgcaaaagctaccactcctttgaaagcctcacatttgagaagggttttgcagttttaacacagcatttcgcctttgacacac

SEQ ID NO: 3977 - DNA, 121 bp, synthetic construct
  misc_feature 1..121: note = Description of artificial sequence: synthetic polynucleotide sequence
  source 1..121: mol_type = other DNA
attatctcatggtttccatggttcaggagtccaggtgaggcttagccgtgttctccactcagggtctcacaaggtagaaattcaggtgtcaggcagctgtggttctcatctagagcttggg

SEQ ID NO: 3978 - DNA, 121 bp, synthetic construct
  misc_feature 1..121: note = Description of artificial sequence: synthetic polynucleotide sequence
  source 1..121: mol_type = other DNA
ttatttggtacacgtgcctacgtacttttaagcatgtgtagcatcattaaaacataacaatagaagcatgcatgctgagacagagcagaactaacacctgagattccatttcttattgaat

SEQ ID NO: 3979 - DNA, 121 bp, synthetic construct
  misc_feature 1..121: note = Description of artificial sequence: synthetic polynucleotide sequence
  source 1..121: mol_type = other DNA
ttctatacttagctccgggcttcagttttaggtaacgcactgacttttgagtccctcaggttctctgtgcaacttcccaagagcagcctgatcatccagtctgtcatttaggaaatatgat

SEQ ID NO: 3980 - DNA, 121 bp, synthetic construct
  misc_feature 1..121: note = Description of artificial sequence: synthetic polynucleotide sequence
  source 1..121: mol_type = other DNA
gtgacgcatcccccaagcccaggcataattctataaggcactatgggattaagtgatgagtgatataaaatggcacatgtgtttttactttattgaagtgtattaccatgtttatggagag

SEQ ID NO: 3981 - DNA, 121 bp, synthetic construct
  misc_feature 1..121: note = Description of artificial sequence: synthetic polynucleotide sequence
  source 1..121: mol_type = other DNA
catagaaagatctttaagctgtaagaaatgggaatgagcagcgttcagaatagtgcatacagtgtgtatctggctattctccatttttctctaaccagattgataattcactgcccacccc

SEQ ID NO: 3982 - DNA, 121 bp, synthetic construct
  misc_feature 1..121: note = Description of artificial sequence: synthetic polynucleotide sequence
  source 1..121: mol_type = other DNA
acccattctattagctcgaaggctcaaaacacaaaatttgaaacttctaaaagtcataccttgattttcaatacttcattctctttgttcatttctaagagctgtaggtcttttcctttta

SEQ ID NO: 3983 - DNA, 121 bp, synthetic construct
  misc_feature 1..121: note = Description of artificial sequence: synthetic polynucleotide sequence
  source 1..121: mol_type = other DNA
tgattcgatgcgtctcccattccagggtgtgggccggccaaggagagagggggaggctctgaggacaccttctcttcctcccttcttttcagacacgcagctttcggattcagattccttt

SEQ ID NO: 3984 - DNA, 121 bp, synthetic construct
  misc_feature 1..121: note = Description of artificial sequence: synthetic polynucleotide sequence
  source 1..121: mol_type = other DNA
tccagcaattcaaacttctaaggatacagaagtcgatagatcaaacattttaatcaagagtaagcttttaaaatacaagttacataaatatttacctctgctgtcctcttccatatgaata

SEQ ID NO: 3985 - DNA, 121 bp, synthetic construct
  misc_feature 1..121: note = Description of artificial sequence: synthetic polynucleotide sequence
  source 1..121: mol_type = other DNA
tccttaatactgtattgaaaattacgatcggggattcgtacattgctcatctcgagctggtgagtgcccagaacagttttctttattctcacaagactagaatttaatggaaccagccctc

SEQ ID NO: 3986 - DNA, 121 bp, synthetic construct
  misc_feature 1..121: note = Description of artificial sequence: synthetic polynucleotide sequence
  source 1..121: mol_type = other DNA
actgagtcaattatcattatcatacctctcttctaacatttgttgataacttcttgttctctgttgtgccttctcctactcaatttgtctttaagggtttatataattttatttctttatt

SEQ ID NO: 3987 - DNA, 121 bp, synthetic construct
  misc_feature 1..121: note = Description of artificial sequence: synthetic polynucleotide sequence
  source 1..121: mol_type = other DNA
agaggcataaaccatccaactaacaaacaaacgcttgatttacaaataatccatgcatacgaatgtctgccaacatcccaccaaacccattccactataagaaatctcaccccttgccaca

SEQ ID NO: 3988 - DNA, 121 bp, synthetic construct
  misc_feature 1..121: note = Description of artificial sequence: synthetic polynucleotide sequence
  source 1..121: mol_type = other DNA
ttgaaatttgatccccagtgtggtgttggaaggtggggcctaatgggaattgttctggcaatgtgggtgaatctcttatgaatagattgatgtcatccctgggttgggaagtgagttcttt

SEQ ID NO: 3989 - DNA, 121 bp, synthetic construct
  misc_feature 1..121: note = Description of artificial sequence: synthetic polynucleotide sequence
  source 1..121: mol_type = other DNA
gccaacaaagagtgaaaggaaagcaaggaaggacagacggggacccacagagctcgagcctggcctcaccctctcatggtgaacttgaccacggcgagtctggagcccgcgccgctcagct

SEQ ID NO: 3990 - DNA, 121 bp, synthetic construct
  misc_feature 1..121: note = Description of artificial sequence: synthetic polynucleotide sequence
  source 1..121: mol_type = other DNA
caactaatctgctttctgcttttacatttgggtctgtggtcttaggtgagagaagccgcgcaggccctgcttctggcggaactgagaagaattgagcaggcaggcaggaaggaagccattg

SEQ ID NO: 3991 - DNA, 121 bp, synthetic construct
  misc_feature 1..121: note = Description of artificial sequence: synthetic polynucleotide sequence
  source 1..121: mol_type = other DNA
tgaattcctggtggcccagaaagaagcagctgtgccagcactccctccagagccagaaggccaggaccctccagctccgtctcaggacacttcctaagaatatgcctgacagcttttgaaa

SEQ ID NO: 3992 - DNA, 121 bp, synthetic construct
  misc_feature 1..121: note = Description of artificial sequence: synthetic polynucleotide sequence
  source 1..121: mol_type = other DNA
attcgtgcccattacgaattctctcacccaggaactccaagagaaaccttctaagtggaaatttaatcggacagcgtttttacatcaaaggtaggataggaggaaaagatccaaaaggtgc

SEQ ID NO: 3993 - DNA, 121 bp, synthetic construct
  misc_feature 1..121: note = Description of artificial sequence: synthetic polynucleotide sequence
  source 1..121: mol_type = other DNA
ctccccctctcacaaagccctttgatagattcgtctgtttgaggacccaaccagggcattggaccaacctatgcgaaagatagacgaatgcgtaagtggactatgcctcctgacggtctgt

SEQ ID NO: 3994 - DNA, 121 bp, synthetic construct
  misc_feature 1..121: note = Description of artificial sequence: synthetic polynucleotide sequence
  source 1..121: mol_type = other DNA
tccacaatgccccgatttcagtggaatgaatgtgccttcaaaggccagctttaaatcaggcccatcgagacacacttacccatccagttctgctgtttccacatagcagaggctgttaggc

SEQ ID NO: 3995 - DNA, 121 bp, synthetic construct
  misc_feature 1..121: note = Description of artificial sequence: synthetic polynucleotide sequence
  source 1..121: mol_type = other DNA
tgttctaatgaggtgactcctggtggctcctggatggcagctggtcactagaaagacgataccatgattagaagcatagaactttcagcctcatgcccccattttctgggaaggagcaagg

SEQ ID NO: 3996 - DNA, 121 bp, synthetic construct
  misc_feature 1..121: note = Description of artificial sequence: synthetic polynucleotide sequence
  source 1..121: mol_type = other DNA
cctcagaatacggagatctggggtccgcagacccattgtgggatgcacattgatttagttagatcttgagtgaagagatactgtgttagctgactgcgtgataaacgttagcctgagaaat

SEQ ID NO: 3997 - DNA, 121 bp, synthetic construct
  misc_feature 1..121: note = Description of artificial sequence: synthetic polynucleotide sequence
  source 1..121: mol_type = other DNA
atcgaattatggatgctgtgttcttgattagtatatgaccattgtcaaggtggattattaacagtctgtagattcaaaatttgtcaaaaccaccaagctttagataaaaggaaatagacca

SEQ ID NO: 3998 - DNA, 121 bp, synthetic construct
  misc_feature 1..121: note = Description of artificial sequence: synthetic polynucleotide sequence
  source 1..121: mol_type = other DNA
ggttacccagggacgttaggttttcttttcgcctggggtctcaggccctgccttctttattgtcatagagtttgtttgaactttgcttttcccaatgctcggctgcttctgtttctggttg

SEQ ID NO: 3999 - DNA, 121 bp, synthetic construct
  misc_feature 1..121: note = Description of artificial sequence: synthetic polynucleotide sequence
  source 1..121: mol_type = other DNA
tctgggaaagcaatgtagataaaaaacacagcgggggcctctggggcccttcggagtctttcatcctttcatgccgcaccaaatctgaaaaaaaaaaaaatccccgacatcaccatttgtt

SEQ ID NO: 4000 - DNA, 210 bp, synthetic construct
  misc_feature 1..210: note = Description of artificial sequence: synthetic polynucleotide sequence
  source 1..210: mol_type = other DNA
catgtcgctgttgggggacccgctacaggccctgccgccctcggccgcccccacggggccgctgctcgcccctccggccggcgcgaccctcaaccgcctgcgggagccgctgctgcggaggctcagcgagctcctggatcaggcgcccgagggccggggctggaggagactggcggagctggcggggagtcgcgggcgcctccgcctcag

SEQ ID NO: 4001 - DNA, 168 bp, synthetic construct
  misc_feature 1..168: note = Description of artificial sequence: synthetic polynucleotide sequence
  source 1..168: mol_type = other DNA
gttgcctagacctggagcagtgttctcttaaggtactggagcctgaaggaagccccagcctgtgtctgctgaagttaatgggtgaaaaaggttgcacagtcacagaattgagtgatttcctgcaggctatggaacacactgaagttcttcagcttctcagccccccag

SEQ ID NO: 4002 - DNA, 121 bp, synthetic construct
  misc_feature 1..121: note = Description of artificial sequence: synthetic polynucleotide sequence
  source 1..121: mol_type = other DNA
gaataaagattactgtaaacccagagtcaaaggcagtcttggctggacagtttgtgaaactgtgttgccgggcaactggacatccttttgttcaatatcagtggttcaaaatgaataaaga

SEQ ID NO: 4003 - DNA, 152 bp, synthetic construct
  misc_feature 1..152: note = Description of artificial sequence: synthetic polynucleotide sequence
  source 1..152: mol_type = other DNA
gattccaaatggaaatacatcagagcttatttttaatgcagtgcatgtaaaagatgcaggcttttatgtctgtcgagttaataacaatttcacctttgaattcagccagtggtcacagctggatgtttgcgacatcccagagagcttccaga

SEQ ID NO: 4004 - DNA, 180 bp, synthetic construct
  misc_feature 1..180: note = Description of artificial sequence: synthetic polynucleotide sequence
  source 1..180: mol_type = other DNA
ggaagtgttgatggcgtctctgaatccaagttgcaaatctgtgttgaaccaacttcccaaaagctgatgccaggcagcacattggttttacagtgtgttgctgttggaagccctattcctcactaccagtggttcaaaaatgaattaccattaacacatgagaccaaaaagctatacatg

SEQ ID NO: 4005 - DNA, 121 bp, synthetic construct
  misc_feature 1..121: note = Description of artificial sequence: synthetic polynucleotide sequence
  source 1..121: mol_type = other DNA
atattgatataggtgccttatgtggatttggaacaccaaggaacctactggtgtcatgtatataatgatcgagacagtcaagatagcaagaaggtagaaatcatcataggtaagaagtatt

SEQ ID NO: 4006 - DNA, 121 bp, synthetic construct
  misc_feature 1..121: note = Description of artificial sequence: synthetic polynucleotide sequence
  source 1..121: mol_type = other DNA
atcatgaattacaatatattcaaatttgttttttctgaaacaaggaagaacagatgaggcagtggagtgcactgaaggtagtgtaagtctttggtttgaaaccaaatctcctgcatgctag

SEQ ID NO: 4007 - DNA, 121 bp, synthetic construct
  misc_feature 1..121: note = Description of artificial sequence: synthetic polynucleotide sequence
  source 1..121: mol_type = other DNA
aattggtgtttagattacttaatctattttctcttactttgttttagatgaattaaataatcttggtcatcctggtgagtaatacaaacataaaactttagttttagatttttaagttgtt

SEQ ID NO: 4008 - DNA, 121 bp, synthetic construct
  misc_feature 1..121: note = Description of artificial sequence: synthetic polynucleotide sequence
  source 1..121: mol_type = other DNA
tataccatggatcttacatgttttgcttttttatctttgtatagataataaagagcaaacaactgaccagcctttgggtgagtagaactttaaaatgcattatcaaagtataattattgtg

SEQ ID NO: 4009 - DNA, 205 bp, synthetic construct
  misc_feature 1..205: note = Description of artificial sequence: synthetic polynucleotide sequence
  source 1..205: mol_type = other DNA
gcgaaggacaaggttgcccttttgataggaaatatgaattaccgggagcaccccaagctcaaagctcctttggtggatgtgtacgaattgactaacttactgagacagctggacttcaaagtggtttcactgttggatcttactgaatatgagatgcgtaatgctgtggatgagtttttactccttttagacaagggagtatatg

SEQ ID NO: 4010 - DNA, 179 bp, synthetic construct
  misc_feature 1..179: note = Description of artificial sequence: synthetic polynucleotide sequence
  source 1..179: mol_type = other DNA
gggttattatattatgcaggacatggttatgaaaattttgggaacagcttcatggtccccgttgatgctccaaatccatataggtctgaaaattgtctgtgtgtacaaaatatactgaaattgatgcaagaaaaagaaactggacttaatgtgttcttattggatatgtgtaggaaaag

SEQ ID NO: 4011 - DNA, 121 bp, synthetic construct
  misc_feature 1..121: note = Description of artificial sequence: synthetic polynucleotide sequence
  source 1..121: mol_type = other DNA
cctcctccgcctcccttaaatagaaatgactacgatgataccattccaatcttggatgcactaaaagtcaccgccaatattgtgtttggatatgccacgtaagaacatttgatgtttacgt

SEQ ID NO: 4012 - DNA, 121 bp, synthetic construct
  misc_feature 1..121: note = Description of artificial sequence: synthetic polynucleotide sequence
  source 1..121: mol_type = other DNA
tcaaggagcagaagcttttgaaatccagcattctggattggcaaatggaatctttatgaaatttttaaaagacagattattagaagataagaaaatcactgtgttactggatgaagttgca

SEQ ID NO: 4013 - DNA, 151 bp, synthetic construct
  misc_feature 1..151: note = Description of artificial sequence: synthetic polynucleotide sequence
  source 1..151: mol_type = other DNA
gatatgggtaagtgtcaccttaccaaaggcaaacaggctctagagattcgaagtagtttatctgagaagagagcacttactgatccaatacagggaacagaatattctgctgaatctcttgtgcggaatctacagtgggccaaggctcatg

SEQ ID NO: 4014 - DNA, 159 bp, synthetic construct
  misc_feature 1..159: note = Description of artificial sequence: synthetic polynucleotide sequence
  source 1..159: mol_type = other DNA
gaacttccagaaagtatgtgtcttaagtttgactgtggtgttcagattcaattaggatttgcagctgagttttccaatgtcatgatcatctatacaagtatagtttacaaaccaccggagataataatgtgtgatgcctacgttactgattttccactt

SEQ ID NO: 4015 - DNA, 121 bp, synthetic construct
  misc_feature 1..121: note = Description of artificial sequence: synthetic polynucleotide sequence
  source 1..121: mol_type = other DNA
tctagatattgatccaaaagatgcaaataaaggcacacctgaagaaactggcagctacttggtatcaaaggatcttcccaagcattgcctctataccagactcagttcactgcaaaaatta

SEQ ID NO: 4016 - DNA, 439 bp, synthetic construct
  misc_feature 1..439: note = Description of artificial sequence: synthetic polynucleotide sequence
  source 1..439: mol_type = other DNA
ggaacatctagtcttcacagtatgtttatcatatcagtactcaggattggaagatactgtagaggacaagcaggaagtgaatgttgggaaacctctcattgctaaattagacatgcatcgaggtttgggaaggaagacttgctttcaaacttgtcttatgtctaatggtccttaccagagttctgcagccacctcaggaggagcagggcattatcactcattgcaagacccattccatggtgtttaccattcacatcctggtaatccaagtaatgttacaccagcagatagctgtcattgcagccggactccagatgcatttatttcaagtttcgctcaccatgcttcatgtcattttagtagaagtaatgtgccagtagagacaactgatgaaataccatttagtttctctgacaggctcagaatttctgaaaaatga

SEQ ID NO: 4017 - DNA, 121 bp, synthetic construct
  misc_feature 1..121: note = Description of artificial sequence: synthetic polynucleotide sequence
  source 1..121: mol_type = other DNA
cacaggcactgcccagactccagacgtacctttaccaaacgtttgatgctggagaagcacgtccagctgatgcatggcatcaaggaccctgacctgaaagaaatgacagatgccaccaatg

SEQ ID NO: 4018 - DNA, 121 bp, synthetic construct
  misc_feature 1..121: note = Description of artificial sequence: synthetic polynucleotide sequence
  source 1..121: mol_type = other DNA
aacacagagactcaagcgtccatgatcaacagcctcaagccctgctgcggcacccatgtcagctttgctacaactcaccaggctgcccttggaggtcggggtggcccttctggaattcctc

SEQ ID NO: 4019 - DNA, 121 bp, synthetic construct
  misc_feature 1..121: note = Description of artificial sequence: synthetic polynucleotide sequence
  source 1..121: mol_type = other DNA
tatccaattcttgttgaaagtgctcaaattcctcctgatacttttctttttccttttccgaaatttctttatctggtgtgggcttttttttggagttttggaatagatcattaaaaagata

SEQ ID NO: 4020 - DNA, 121 bp, synthetic construct
  misc_feature 1..121: note = Description of artificial sequence: synthetic polynucleotide sequence
  source 1..121: mol_type = other DNA
tgcatttatgcacattttctaagttaaagaaatgatcatactaggccatcagctccaattcgacctcttccagtcactcgaaatgtcacctcaacttcccagttctcaaaggccgcttttg

SEQ ID NO: 4021 - DNA, 121 bp, synthetic construct
  misc_feature 1..121: note = Description of artificial sequence: synthetic polynucleotide sequence
  source 1..121: mol_type = other DNA
tatattccatgaacatctgaagttgatagactttgaatgattagttgtgaataaagtcagacaatatcttttttatattacataccttctgggatgcattgtccaagaacaaatttatatc

SEQ ID NO: 4022 - DNA, 121 bp, synthetic construct
  misc_feature 1..121: note = Description of artificial sequence: synthetic polynucleotide sequence
  source 1..121: mol_type = other DNA
aaaatggcttagcaccctatttaaccaggagtaagtattccttagctattaactgaaaaaaagcaattgtagaataaacccatttctgtaagtggtaggtctaaggatatcttagcatatg

SEQ ID NO: 4023 - DNA, 121 bp, synthetic construct
  misc_feature 1..121: note = Description of artificial sequence: synthetic polynucleotide sequence
  source 1..121: mol_type = other DNA
agattagagatgctggatcaaaacaacggaagaaaaggctgtacagagccattctgtaaacacaggccaaattttactatttgctgctctacctaatgttgtgattactactgagtgcttc

SEQ ID NO: 4024 - DNA, 121 bp, synthetic construct
  misc_feature 1..121: note = Description of artificial sequence: synthetic polynucleotide sequence
  source 1..121: mol_type = other DNA
cagaaactaatttcatgcagaacagtgattctcaaactttaatgagcatatgaatcccctgagaatctcgctagaatgtatgtcctgatggtgagtccggcatgaagcctgagatttttgc

SEQ ID NO: 4025 - DNA, 121 bp, synthetic construct
  misc_feature 1..121: note = Description of artificial sequence: synthetic polynucleotide sequence
  source 1..121: mol_type = other DNA
agatataagaacttaactctcaccattcattcttttctttttctctcacattacgattcacaagacatgtttttctctacttcagggataattcctttacctcccctctggatcccatgtt

SEQ ID NO: 4026 - DNA, 121 bp, synthetic construct
  misc_feature 1..121: note = Description of artificial sequence: synthetic polynucleotide sequence
  source 1..121: mol_type = other DNA
aataaagttttggaaaataaacacaaatatgctgctctaaaggttatatggctgcttcagtgagcttcaaatttatttttaaagcaataaagacactgttatgtaagcaattctgattatc

SEQ ID NO: 4027 - DNA, 121 bp, synthetic construct
  misc_feature 1..121: note = Description of artificial sequence: synthetic polynucleotide sequence
  source 1..121: mol_type = other DNA
gggctagtttctaagatgttggataggacaactatagaaatgtttgagctagataaactgtctgcaatttttcattattagcaatctttaagtattagctaatgactaattaaaataattg

SEQ ID NO: 4028 - DNA, 121 bp, synthetic construct
  misc_feature 1..121: note = Description of artificial sequence: synthetic polynucleotide sequence
  source 1..121: mol_type = other DNA
ttactctgtagactattctaaatggggtgatattgaccttgggggattaccttgtttcagcaaaaactacagccattatgtgtgacatttgtggcgtgtttagcgtgtgccaggttctgtt

SEQ ID NO: 4029 - DNA, 121 bp, synthetic construct
  misc_feature 1..121: note = Description of artificial sequence: synthetic polynucleotide sequence
  source 1..121: mol_type = other DNA
tctttagctttgacttgaggaattgtgtctcatgcctattcagtatagtcctgctgatacgagatgccaaatatttgaaactggccagcaaaaaatcttcttgagacaacatgctgagggt

SEQ ID NO: 4030 - DNA, 121 bp, synthetic construct
  misc_feature 1..121: note = Description of artificial sequence: synthetic polynucleotide sequence
  source 1..121: mol_type = other DNA
gctgttaccttactcagatttaagtgtgacctatacccaaaagccagaaaacaaaggaacccattgagacataccctcagagctgagcgaaaaagggtagaaactaaatctggagcaagac

SEQ ID NO: 4031 - DNA, 121 bp, synthetic construct
  misc_feature 1..121: note = Description of artificial sequence: synthetic polynucleotide sequence
  source 1..121: mol_type = other DNA
ggcatcgtgtttaccatcgacgacaccactggagacatccacgccattcagaggctcgaccgagaggaaagagcccagtatactctaagggctcaagccctagacaggcggacgggcaggc

SEQ ID NO: 4032 - DNA, 121 bp, synthetic construct
  misc_feature 1..121: note = Description of artificial sequence: synthetic polynucleotide sequence
  source 1..121: mol_type = other DNA
atggcgatgacagccaggacctccgggtcgtccgggagctgcgacacggagaagccgggaggcagcttggtgacaccgcggcaccaggggcaccgcacatccttctggctggtcctcatct

SEQ ID NO: 4033 - DNA, 121 bp, synthetic construct
  misc_feature 1..121: note = Description of artificial sequence: synthetic polynucleotide sequence
  source 1..121: mol_type = other DNA
gcccagctaataatttgattcatgagaggcagtccttgcttcctgagtagactactctgagtgctatacacaacatacatggagagcactgtgctcagcacctaaagacaaagatgaaata

SEQ ID NO: 4034 - DNA, 121 bp, synthetic construct
  misc_feature 1..121: note = Description of artificial sequence: synthetic polynucleotide sequence
  source 1..121: mol_type = other DNA
ccacagctgtaccttccttggaaagagagtagaacatcatgggacagagaaatccgatgcggtttgcagttcttctctgccagctagaaaaccaccaaatggtatgtttaaaaagagcctg

SEQ ID NO: 4035 - DNA, 121 bp, synthetic construct
  misc_feature 1..121: note = Description of artificial sequence: synthetic polynucleotide sequence
  source 1..121: mol_type = other DNA
tttttagatgtgaatttggacattggctctggacatgacacatgtggagaaacatcttcagagagttacagttctccatctagtccccgacatgatggaagagaaagttttgaaagtgaag

SEQ ID NO: 4036 - DNA, 121 bp, synthetic construct
  misc_feature 1..121: note = Description of artificial sequence: synthetic polynucleotide sequence
  source 1..121: mol_type = other DNA
aataggttcaccaagttgaagagtcttaacctttccaataatcatttaggggacttcccactggcagtctgcagtattccaaccctggcagagctgaacgtgtcctgcaatgccctgcgat

SEQ ID NO: 4037 - DNA, 359 bp, synthetic construct
  misc_feature 1..359: note = Description of artificial sequence: synthetic polynucleotide sequence
  source 1..359: mol_type = other DNA
gccacccatctatgcattttctatgcctaaaaataataaattttcacttcctttccaaaccttatgcattttatttatttgttgcttactgcattcgctagtattttctgtgtaaagttgactggggtggtgatggctgccctgcttgccttttcttggttttaatagggataatccagaaagatgtgatatgattgctttaggtttttgataaaaacccttcatcaaattaaggaagttctcttccatttctagcttcctaagagtttttcttttagataagagaaggtgttgaatttatagaataaaatgtgtcattttatttctttttgatctataaatgttgtaaagttctcctg

SEQ ID NO: 4038 - DNA, 121 bp, synthetic construct
  misc_feature 1..121: note = Description of artificial sequence: synthetic polynucleotide sequence
  source 1..121: mol_type = other DNA
atggatatttctgacattcttaccttcctgggaaacatcaaaattagttgtgatcgttaaaaaaaaaatactctggttggattccatttgctaatatttattcaggaattttaatctacat

SEQ ID NO: 4039 - DNA, 360 bp, synthetic construct
  misc_feature 1..360: note = Description of artificial sequence: synthetic polynucleotide sequence
  source 1..360: mol_type = other DNA
tataagtgagataacctatagtttctgtctcttgtactgtccttgtttcattttggtgttaattctacactatctaaactcagtggcctactgtccttttctgttgtctgggaagcttatataagatagcaatgaccttttccttaaaggtttgatgaaattcactgctgaaatcagctaagactagtgtctttttggggaggtggcttgagggcaggtatatttgattgtcaaatcaatttctttaatgctaattgttttattcagtttttctattttaaaattcagccaatttcagaatagacataaaattgtgccacagattcccttatgattttgtttctgctgcatatgtggtta

SEQ ID NO: 4040 - DNA, 121 bp, synthetic construct
  misc_feature 1..121: note = Description of artificial sequence: synthetic polynucleotide sequence
  source 1..121: mol_type = other DNA
cattatattttctattcctaatgtttatttgttcatttttctttatttatcagccttaatggggatttattttattagcattatttttcttttctaagactcattctgtcatttctatttt

SEQ ID NO: 4041 - DNA, 240 bp, synthetic construct
  misc_feature 1..240: note = Description of artificial sequence: synthetic polynucleotide sequence
  source 1..240: mol_type = other DNA
acttttgtttccttttcttatttttttgtttttatctttaatatttctttccatcacattttttttgcctaaactcgttgttctttttctatcttcttgaattgacatgagttcatttatttcatctttcttatggttctaaaaatatttgtagtgctataaatatttcccttaactattgctgtaccctaagtcttggtatttttctgtgctttcattaataatcagttttaaaatact

SEQ ID NO: 4042 - DNA, 121 bp, synthetic construct
  misc_feature 1..121: note = Description of artificial sequence: synthetic polynucleotide sequence
  source 1..121: mol_type = other DNA
gtattatttttaacagcttcattgagatatatttcacaccctatacaactcatccatttaaagtgtataactcaatggcttctaatatattcacagagttgttgatatggtttggctgtcc

SEQ ID NO: 4043 - DNA, 480 bp, synthetic construct
  misc_feature 1..480: note = Description of artificial sequence: synthetic polynucleotide sequence
  source 1..480: mol_type = other DNA
aataagtttcatgagatcagatggtttataaccatcttttcgcttggctttcattctgtttgcctgccaccatgtaagatatggctttgctcctccttaccttccgccatgattgtgaggtccccccagctatgttgaattttgagtcaattaaacctctttttttaaataagttaccccatctcaggtatgtctttatcagcagtgtgaaaacggactaatacagttgtacaacctatcatcacaatcaactttacttactcagttatcagttgatgcatacttgggtagtttccagtttgggctattataaataatgctgctatgaacatttgtgtgcaagtttttgtggacatgtgattcatttggcgtgagtatatatgaggagtagaattgctaggtcatttggtaactttatgtttaagcttttgaggaactgaagactgtttccgaatgactgtaccatgtcagtgtaagagg

SEQ ID NO: 4044 - DNA, 241 bp, synthetic construct
  misc_feature 1..241: note = Description of artificial sequence: synthetic polynucleotide sequence
  source 1..241: mol_type = other DNA
gttctaatttttcaacatcctcaccaatgcttgctatatttgtcttttttactataatcatcttagtggctgtgaaatgatatttcgttgtggtttgatttgcatttccctgatggatatttaagggtactccgtgatactgggttgatcattctatttccaggtgacttcacttctaggtattttttcatttatgtttcctaaaaaattaatttttaaagagaaaaatcatcataggata

SEQ ID NO: 4045 - DNA, 241 bp, synthetic construct
  misc_feature 1..241: note = Description of artificial sequence: synthetic polynucleotide sequence
  source 1..241: mol_type = other DNA
ctcaaatttccattttaaatttaagatcacagggttttattctttggtttgtatttggatctctttttctctcacattgaaaatctggtttctaatgacattagcataattacatatttgtttcattctacaaaatacatataatagtttcacaagaacaaaaccaatatttaaaaattttgttctattctttttgtccttattgtatgccaaactggatgtacaattagattactgcaat

SEQ ID NO: 4046 - DNA, 479 bp, synthetic construct
  misc_feature 1..479: note = Description of artificial sequence: synthetic polynucleotide sequence
  source 1..479: mol_type = other DNA
gcaccaaattggtggttcttaacaggaaacagctgcaatcctaagaatctttgagaagcgtccatcagctgtctaagcatgcagcaatgaagcaggtggttctcaagtattcactgggcatatcaggtctgccccaacacctggttacatccttatttggagactgatagcctcaactcttcccctaccaatcagatttcatgggactgcaaactttaacacagagtaatacagagaaggggatgctgggaaatgcagtttcaggcttctaccttacacaattcagagaagactgtaggaggaagtggtgatgatgccaagctgatacagacacagacacatccattcagtgcatcaatctttatgtcttctcttgtcttactagcctccaggaaaatgttgaatggaagtactgagagtgaacatctttgtcccgttcttgattttatagggcatgcttccaacaattcttctgtaag

SEQ ID NO: 4047 - DNA, 480 bp, synthetic construct
  misc_feature 1..480: note = Description of artificial sequence: synthetic polynucleotide sequence
  source 1..480: mol_type = other DNA
gatgttttttgtacatactttctcaggttaaggaagtttattcacttctaatcctagtttactatgttgttttttttttttaaatcatgagttagtgttgaatttatcaaatgctttatctgtaactattgaaacaatcatatgatcttctttcttaatcttttaaagtggtaaatatcatttgattatcttttcatcctgaaccatccttgcattctagggataaatcctaaatgattttttaaaaatagatctctggatttcgtttgctaatattatgttaagactttgataatgtctgtgattgagattggcttgtgattttcctttcttatcttccccttgtttggttttggcatccaggttttactagttttatggaattcttactacagccacaggccctgcatgagacaggccatcactacttctctaatcgcatttcctaccaccctccctgttacacactctactcagtct

SEQ ID NO: 4048 - DNA, 480 bp, synthetic construct
  misc_feature 1..480: note = Description of artificial sequence: synthetic polynucleotide sequence
  source 1..480: mol_type = other DNA
tacaggttccatgctgtttctcagacaaatgagtgcacatccccgcctgaccaccctctcttaaagctctgtctcctcaatctctttcattgttctgcttagctcttatcattacctgatatatgatcaacttactgtgttctgtctccctccctcttccagaaggcagtgtctatgagggcaaggactttgcctgttttgttccctgtcattccctcagcacagtgaaccatatttatcaaataataaatatttgttcatcagtgaataaatgaatatatttatccatgtttgaagaaaagaggaaggtttctgtacgtgatccactcagaagtcagatttttcatttgaaaaaattgtaacttctatttatactagaaaagggaggaaattcttacacataagcagcatgcagagaaatactgctgaagatatcagtctgctctgctgcagctggtagcaggaataagactgattggc

SEQ ID NO: 4049 - DNA, 481 bp, synthetic construct
  misc_feature 1..481: note = Description of artificial sequence: synthetic polynucleotide sequence
  source 1..481: mol_type = other DNA
caactgtccattctattccaaactttccttgtctttttccagcatctcagttggttgaaattctttgcttgagaaagagacctacgttttcagtcctgaggagtttgagtccttggtgatgctgcccatgtggggttgatgtgtagtgctttgttaaccttgaccatgaagcaggcagtacagacatcctaaggggtacccctgggcatccatgaatactgctccggctcccactgtgtagctctcccagcgcccttgatagtgccagtctctccagaaatcactggggcctcccttcttgcttatcccctccatgacctgaggacattgaaatgccaggcagcagtttcaatgtctactcaatgaaactggtaatgggttcacagctgtggggattgttatttaacttcctatgtgtgtgttatggtgttggggaaaaacaggcatgcagagtatagctatagctctttctatcatcaaa

SEQ ID NO: 4050 - DNA, 240 bp, synthetic construct
  misc_feature 1..240: note = Description of artificial sequence: synthetic polynucleotide sequence
  source 1..240: mol_type = other DNA
tggccctctagcaattccactcctaggtatatatccaaaggaattgaaaacagccaggagcgtgtagcctgtgcttgtagtcccagttgtgcagaagactggggcaggaggatcacttaagccaggagtttgaggctgagtaggcaatgatgattgctcctgtgaatagcccctgcactccagcctgggcaacatagcaagatcccatttcttaaaaaaaaaaaaagaattgaaaactgg

SEQ ID NO: 4051 - DNA, 241 bp, synthetic construct
  misc_feature 1..241: note = Description of artificial sequence: synthetic polynucleotide sequence
  source 1..241: mol_type = other DNA
tgaccaaacaaatccatgtacccacatgtttatagctgcactattcacaatagccaaaaggcagaaacagcccagatgtccatcaatagatgaatggataaacaaattgtggcatagacatataacagaatattattaagctataaaaaggaatgaagtactgattcatgttacaatacggataaacctcaaaaacataatgctaagtgaaggaagccatgcacaaaggtcacatactata

SEQ ID NO: 4052 - DNA, 241 bp, synthetic construct
  misc_feature 1..241: note = Description of artificial sequence: synthetic polynucleotide sequence
  source 1..241: mol_type = other DNA
tggagacagagagcaggttagtagttgccaggggctggggagaggaaagattgaggaacaactgcttgataggtacggggctattttttaaggtgatggaaatgatttgcaaataggcagaggcggtggttgcacaatattgtgaacatataaaatgtcacggaattgttcactttagaatagttagttttatgtttattgttgttgttgttgttgttgttttttgagacagagttttgtt

SEQ ID NO: 4053 - DNA, 241 bp, synthetic construct
  misc_feature 1..241: note = Description of artificial sequence: synthetic polynucleotide sequence
  source 1..241: mol_type = other DNA
ttacagatgtgagccaccgtgcccaacaattttatgttaagtgaatttcacttcaataaaaacagatgaaaccctctacgttcttacatgcagagatagtcattgcacatttaagagacagattgaatgagcatttgtctttgatggcatatgtgctatagaaactcctttgagagagctgtgtttttagtgagaaattaacacataaacaaaatcatttttacttataagcctggagccc

SEQ ID NO: 4054 - DNA, 479 bp, synthetic construct
  misc_feature 1..479: note = Description of artificial sequence: synthetic polynucleotide sequence
  source 1..479: mol_type = other DNA
cgtgagacatcatttatgtagtgagtgttttaaagctgaagtagcagcctacatttttgatggttacaattggtccctttgaagagatgatgccctgtggatggaagcagcacagcacagtccttgccctcacccccacctgccaggacagcacgggtgccctttccatgacaagacccttttcaggatcatgatacagaccaattaggtagaggcaaacccagatgcgtctcaatttgtcagaagccttgctctgtttcccctacgtgggtggggtctgataaaatcccatatagggtttggcgggggtaggggggcattcttcttagtatttacatcccaaaaggagttttaagggacatttaattttcatgtttctggttcatttccctttaactcatcaaaatgagattacgaaagattgctttgatctttaacaggacttgttcacaggagacatgaaaccattaccttctaaa

SEQ ID NO: 4055 - DNA, 479 bp, synthetic construct
  misc_feature 1..479: note = Description of artificial sequence: synthetic polynucleotide sequence
  source 1..479: mol_type = other DNA
aggaaagctgtgcgttgccaagagtttggggagttaacagcatgatgtttcagcttcgtctggggctccagacccttgatacctaactgggtcctaaacttggcttagggaggcctcccgacctccagcctaataaagcccattaattaactgtcaggccagctgtgtaacaaatgaacttttagaggctgtgccattttcttggttccaggccagaaactatcgtataaaactcacaccactagtgagacatttcagaggaaaactggtacttgcgtaagtgttcccttatgagtcaaatgtgcatcaccagatgcgtatttttttttaattaaaatgtaaataactctgttccagcagcctttttttggttcttccagatactctacacttgagcatgagtgactatgaggctaattggaatctctccgattgctttaatgtacgtggacttcggcactcagggtataaggacggga

SEQ ID NO: 4056 - DNA, 240 bp, synthetic construct
  misc_feature 1..240: note = Description of artificial sequence: synthetic polynucleotide sequence
  source 1..240: mol_type = other DNA
aataagaatattataaaatgatgacccaaatcccttcttaaatgaacttgaactatcttctggtgagatgatatttaaaaggcacgagatgggggttgcagttacagttctttagtttgtcagtagtaagaactgagtcaggtcagtttgaacatagagaggaatttgttgcaaagctatcaaggtgttttgcaatgttaaagcatgagttggacacaatcccaggcactggagcagctc

SEQ ID NO: 4057 - DNA, 239 bp, synthetic construct
  misc_feature 1..239: note = Description of artificial sequence: synthetic polynucleotide sequence
  source 1..239: mol_type = other DNA
agaggcctccacagctgcagctcctgatgctccctcactttcagatggtactgaggactaaaagcagaaatgtcatagagagttaggcatgggagaagattctgcagaaggttgagaggacaggctaggtaatctatgaccatcctcccaaataaggtggctacacagcagttaaatatttaaacaaccagggagaatgcttgatgtcatcccttcttcaacagccccaacacttgggc

SEQ ID NO: 4058 - DNA, 240 bp, synthetic construct
  misc_feature 1..240: note = Description of artificial sequence: synthetic polynucleotide sequence
  source 1..240: mol_type = other DNA
attcagcatctgtttgaacatcttccatgatggggagcatactacttatgaggacaacctatccccattattggaccatatgacataagaaaaagtcattatattgaagggaaacttgacttataccctttggcctgccatctagactttgagcacatagatcaagtcttactcagtatccacatgattgtcttttgcatattgaagataaatcaacacacagtcttcctagagttttct

SEQ ID NO: 4059 - DNA, 240 bp, synthetic construct
  misc_feature 1..240: note = Description of artificial sequence: synthetic polynucleotide sequence
  source 1..240: mol_type = other DNA
cttattctaactcaagcgtatttaatgccttcagacagttttcctatgatggtggctttcactctgtccaaccccttctgcacataatggctgttttaaaatgcagtagccaggatttgatatatactccagacgtggtctggacaataagcttctaggcctgcggctttgaattgcattagcatcacttcattggctcgggctgtgcttgcaggctattcgtgaaccatcgccagatca

SEQ ID NO: 4060 - DNA, 360 bp, synthetic construct
  misc_feature 1..360: note = Description of artificial sequence: synthetic polynucleotide sequence
  source 1..360: mol_type = other DNA
actctctcctgttatatttttgtgcaattaatttttaaaacacaaatgcaggatggtatacgagtcaaataaaaaaggcacaatgagtagtctttattcagattattttgattttgaccctgcctttcattatactaactgtcttcctaccaccaattaaaagacatagattctatgtctaattcaaagtcattgatgggaaaaaaatattgagctgattagggcaagtgcaaagccttttgatctagacagaactagcaatgtctctacaaatggacactgagcagtagtctctgagtacagttattaaaccatctatgaatcgtcccaaattcaggctatctcagaatgtgtctgata

SEQ ID NO: 4061 - DNA, 240 bp, synthetic construct
  misc_feature 1..240: note = Description of artificial sequence: synthetic polynucleotide sequence
  source 1..240: mol_type = other DNA
ataaataaatgaataaataaaaaagctctcagggtctttattattgttgctcccagggacttgttaagaatgcggactactttgtgttattgctcccagggacttgttaagaatgcggactactttgtatatatgtgtctgtatgtgaggatatcttcttatggagtcccataaaacacactcgggaaacagtgatctaattatgttaccatgcagcatgcaagtttccagtctgttcca

SEQ ID NO: 4062 - DNA, 241 bp, synthetic construct
  misc_feature 1..241: note = Description of artificial sequence: synthetic polynucleotide sequence
  source 1..241: mol_type = other DNA
ctgggatttaaatgagaggctttatcaagtgttctgctgtaatcgtgatatgctataggcatagtgtgtatgtctgtgttcttccaatctattagctctatcaaagcagaaaataaggggaaagaatcaagaactgagccagagagttgaagactaataaaggtccatgttgaccaggagatttcagggacatgagatcctgggtcttggagtggcccaaacgtcaggttgaagaatgaaa

SEQ ID NO: 4063 - DNA, 481 bp, synthetic construct
  misc_feature 1..481: note = Description of artificial sequence: synthetic polynucleotide sequence
  source 1..481: mol_type = other DNA
gacaaagattgaatcataggttgagtcatttaccagtgaagatccagaagaaaacccccaaaatggaggtcaggacaatcagctggtgtggtcatgagcagtggcagctgagttttaagtccaaatcctgtggcatcggcttcacccagtgtggctgaggtgcttccagagtggccactggacctgttccctgacagccagagttaagaagcttctttctctttgctacctgctacgattgtgctgtctaccctcgcggggtctagcatgtctttgtccttctaagctagggatgaaaataataaactgtttttgtggcctttaggataaaccacaagccttgattactttgggcttgagttctcctttgacatgcttcttttttctgccttctttttaaaatcccatctttttatctctaatacatttatttatttttgtcttttacttgttctacgtactcaatattaacacctacatt

SEQ ID NO: 4064 - DNA, 241 bp, synthetic construct
  misc_feature 1..241: note = Description of artificial sequence: synthetic polynucleotide sequence
  source 1..241: mol_type = other DNA
tgttcttggacttaaatggcaatatcttatagctcgatttattaatgtttgtaaaataggtgtattcatggaacatgcattttagtatattgaatggtacttttaacatctatagggaacttgaaatttacagatacttcctaaggatctttttctttaaagttgaaaaatgcttttgtagatcatataacctctaatttgccaattttgtaagtctgtagatttagtttttttaaaaaaa

SEQ ID NO: 4065 - DNA, 241 bp, synthetic construct
  misc_feature 1..241: note = Description of artificial sequence: synthetic polynucleotide sequence
  source 1..241: mol_type = other DNA
tcatggttaatctgaatcagtaaacactacattttgaagtttaacaagtagcagagtgtctgatcagttgactagaattaattggtgtgattttaggactgtgtacggctttacagtatgatttaagattggcacttagtaaattaagtgagattattttataactacgcatagtagaaggctgactcttaatgtgtgatgtacatgatggaataataaccctacagtagcccagattgtt

SEQ ID NO: 4066 - DNA, 360 bp, synthetic construct
  misc_feature 1..360: note = Description of artificial sequence: synthetic polynucleotide sequence
  source 1..360: mol_type = other DNA
caagcaatcctcctgccttgtcctcccaacgtactgagattacaggcatgagccaccatgccccagcccagatggtactttctgttgttgcccttaacattacgtattcatccaccaagtattattgagtgcctagaatattctggaaactgggaatacaaatgcccctggtgtaattcacatcacacaattacttagagtcattcactgtcaggcacccaatcctacctaattaacatattaggcacccaaacctaatatgttaattactaactagatagggacgagcaaagtctaaggaattgatcaggcctacaggcattctagaatcaaactggaaagatgtacaaatgggacctt

SEQ ID NO: 4067 - DNA, 479 bp, synthetic construct
  misc_feature 1..479: note = Description of artificial sequence: synthetic polynucleotide sequence
  source 1..479: mol_type = other DNA
caccgatgatggaacccaagcaagggcctgttccttggacgtggaaggggccaagattcaatgttgagtctatgggaaactgacaaatttaagtccaattctagtcctgttttggtagctaaggggataagaataagaatagataacatctactgtgtgctccctgtgagccaggcattgttctaagcactgtgcatgtattgattccttcagtccttataacacccctatgatatagattctgttataatgcctgtcttataaatgaggcttctgaggcacagagaggttaaatattttacccaaggttgcacaacatgtaaacagccaggctggagcccaatccaggcagtctgtccctggagcctatgccttggtggtcacagggctaaagcgaggaaacagttggtggacagcctcttggctctgtgaagatgcgcaagtggagatattattaggcgctgctgcaaatcactgag

SEQ ID NO: 4068 - DNA, 479 bp, synthetic construct
  misc_feature 1..479: note = Description of artificial sequence: synthetic polynucleotide sequence
  source 1..479: mol_type = other DNA
tcaggatctcagcctttctcccccacacagatgctcttgatttacccagtaataacttaatcgaatgatgtatacacaccatgtcctgttggaacgagtaaacagcaacttagttctggtgtgttatgaaatagagattttaaaaatccgaacgacttgtggcaaaacgggttttaccctgggaatggagagagagagaatagctcaggtccaaggaacctcacgcgctccctgtttagaattctgcctcccccaccccattgtacacttgactatctcccacatcctcataaatctgagtgccctgggtgtctggataatgaatgagagatgggtattgatggatgagtacatatgagataggacatttaaaaagtgattcattaacctaggcaaccctttatagcaaaaaatatcaaagctaggggttatctttttaaaacacaaatctggccatttgtcccctctgcttaaaactc

SEQ ID NO: 4069 - DNA, 478 bp, synthetic construct
  misc_feature 1..478: note = Description of artificial sequence: synthetic polynucleotide sequence
  source 1..478: mol_type = other DNA
attaatggccctcttctacccacagggtaaattcttaatgccatgccttgctcaaggccctcccaaggttgaccccttccccactgcccccagcaggccctgcataccacaaattccgatcagcttctgataccccatggccttttctccctacctctgcacctcaccctccagcctcctgttacccagggttcctgctgcttcagtcccagctcagatccgcctcccaaggaacctcttgtgtcagacctggtgctgagacagccaaagcatccggtccagcccaggccagagccaggaaacccttgtgatccggaaaattagaaatgtggtcaaggtcgggacccggaactgagcaggccttcggtgggctgtcccagggtggagaccaaggagaaggggaggctcagccaagactttcacccagggcaacgaggggcagccagtcctacggggtcaccttcagggctcagtggct

SEQ ID NO: 4070 - DNA, 121 bp, synthetic construct
  misc_feature 1..121: note = Description of artificial sequence: synthetic polynucleotide sequence
  source 1..121: mol_type = other DNA
gcagttatgatactgaagggataagaggagtcagaggaagggaagaaaccccgtatctggccaggcggagagctcactggttctggagcaaaatctttcgggacaactgcaacagggccgg

SEQ ID NO: 4071 - DNA, 359 bp, synthetic construct
  misc_feature 1..359: note = Description of artificial sequence: synthetic polynucleotide sequence
  source 1..359: mol_type = other DNA
gagaggtgagagctcaacaacctcaacggaggcagagaatctcacagcatcaccagaggtacggagtggggatggcctctaagctgacatctcctggactccacttcattaccaacctatactgagagcccattggatggttcttaagaacacaggagatgatagtgaattaaagccccccaaggatgggctggtagatttccagccaggcacctactttgcagttcatgttattcttgttcactcatctgttcaatccacaatttacgtttgtggccatgtgtcccaggcactgtactctgggctgggcgtgcaaagcaggaaagacggcccctgccctccaggaactcggggacccc

SEQ ID NO: 4072 - DNA, 360 bp, synthetic construct
  misc_feature 1..360: note = Description of artificial sequence: synthetic polynucleotide sequence
  source 1..360: mol_type = other DNA
tgggcacccaagcacaaggaggcacaaagggaatcctggtggtgttaagggagccgcagggttgatcagagaagtgtggaggcttcttccacaggggctcaccccgggacttggcttgtcttccctctcctggaccggttcttctcacccgactcctctggttcagattcgacttctctatcggggtctgcctcagcttccagctcctccacgaagcatctcctcctccagctctcagctgtctctctcttcccggcatttgcacagccatagtgacctgtggcatcaaattaagtgcttgagtaaattgttgtgtttggctttttttttttctcctgactagattggaaatgacttgag

SEQ ID NO: 4073 - DNA, 479 bp, synthetic construct
  misc_feature 1..479: note = Description of artificial sequence: synthetic polynucleotide sequence
  source 1..479: mol_type = other DNA
ctcctgcctcagcctcccaggtagctgggactacagcgagcactatcacacctggctaatatatatatattctgtagagatgcgggaggggtctcactatgttacgcaggctggtctccaaatcttggcctcaagggatcctcctaccttggcctcccaaagtgttgggattacaggcgtgagccattgcactcagccaaggggttatacatcttatactttgctttatctgcgacagtgcttaggacatagttagtgtccaactaatgtttggggtgggtaaaaacgatgtaaaagaaattctctttctttctccctgcctcccttccttgatccctgtctctcttctaacctctacctctttccccctccttccccctccctctccctctcttccttctctttctcccttccatccctctttccaggatttcagcaggcagattacacagactgagctgaggacctatgagccccct

SEQ ID NO: 4074 - DNA, 480 bp, synthetic construct
  misc_feature 1..480: note = Description of artificial sequence: synthetic polynucleotide sequence
  source 1..480: mol_type = other DNA
ttctggcttgtccaggaaggcctcgttggggaagttctttggagggtggaaggaaggattttgcagatggaggacaaaatcaggctgtgggcctttggaggaggcaaaattatcatttgcatttctctgtggagtgagaactctgtaatttcagattttgcctaattgctgtttagagttccccgggccggctgctcttcaggcaggcgtgtgtttgtgggagaggtgcactgttaatggctctgaggctctgaagctccgtccaactatggcttaaaggtaagatgactcagatagggagcgggtcaattccagagttctgcttttcttcaggagcgcagatttgttcagccacagggaggggaggagaagctggcgctgctgaggagtcccaagcacatatattatttgcaggcagcatctttggtctgtgacagctccaatttaagctctgagcagctggtagccagaaaccaggca

SEQ ID NO: 4075 - DNA, 241 bp, synthetic construct
  misc_feature 1..241: note = Description of artificial sequence: synthetic polynucleotide sequence
  source 1..241: mol_type = other DNA
acgtcaaagacaggcacatgcgtgttctctctttagccatgggctctcccggcacatgtgtgcgaggccgcaagactgtttctcatttgcaccctggacattttggagagttacctacttcctttgaaaattattttcaagtgttcctaagtgctagtgagaatgacacacaggctgcctgtgcctggggaggaactggggctacgggctaccctctccctgggcttcccacgtggattca

SEQ ID NO: 4076 - DNA, 239 bp, synthetic construct
  misc_feature 1..239: note = Description of artificial sequence: synthetic polynucleotide sequence
  source 1..239: mol_type = other DNA
aactcaaccaaaccaaaccaaaccaagcctgctctgtctccctccatctgaggttgggttgtcaccagcaactgattttttttttttttaagtagagcacattaaaggacgagaaggtatggccattttaatctatcattggcaaacaccttggcaaatgtgaaacaaatgcattttgctttcaactttttagtaactggcaactccttgtgcttttgagttaaggccacaggggtgaa

SEQ ID NO: 4077 - DNA, 241 bp, synthetic construct
  misc_feature 1..241: note = Description of artificial sequence: synthetic polynucleotide sequence
  source 1..241: mol_type = other DNA
tgccacagggagtagtttcagctgggcagggcccagctaggagtgggtgctctccagaggtcgctgtccagggccacggctggattcggaccccttcccctctggccagacctctacacaggccaggcctggctgaaatgaacatcctggaagtcttgaaacggacaaaagcacatcagagtttgctgccacacatgcagggctacacacagagcagaggctactggtgtgtgtgtgtgtg

SEQ ID NO: 4078 - DNA, 240 bp, synthetic construct
  misc_feature 1..240: note = Description of artificial sequence: synthetic polynucleotide sequence
  source 1..240: mol_type = other DNA
tgtgtttatggtagtgtgatatgcatgatgtgttgtgtgttgtatgttatgtgtgtgatttatgtggtgtgtatgtggtgtgtctttgtgtctttgtgtggtttgtgtgtggtgtggtgtatttgtgcgtgtctggtgtggtctatgtggtgtggtgcatagtgtggtttgtgtggggtgtgtgtgcatgtggtatggtgtgtttgtgtatttgtgtgtatggagcatgttgtgtttgta

SEQ ID NO: 4079 - DNA, 241 bp, synthetic construct
  misc_feature 1..241: note = Description of artificial sequence: synthetic polynucleotide sequence
  source 1..241: mol_type = other DNA
tttgtgtgtgtgtgtggtgtatggtatggtgtgtgtggcatggtttgtagtgtgtgtgagtgtggtatgatgtgagtgtggtgtcatctgtgtgagtgtggtgtgtgtacggtgtgtagtgtatgagtgtggtgtggtgtgtaggatgagtgtggtgtgtgtggtgtgtgtagtgtgtgtatttgtgtgtggtatgtagtgtgtgagtggatgttgtgtgtgtggtgtgcgtggtgtgtgt

SEQ ID NO: 4080 - DNA, 240 bp, synthetic construct
  misc_feature 1..240: note = Description of artificial sequence: synthetic polynucleotide sequence
  source 1..240: mol_type = other DNA
gagagcgtggtgtggtgtgtagtgtgtgcatttgtgagtgtggtgtgtgagtctggtgtgtgtagtgtatttgtgggtgtggtatgtagtatgtgagtgggtgtagtgtgtgtggtgtgtgtagtgtgtgtgaatgggtgtggtgtgtgtgagtgtggtgtggtatgtagtgtgtgagtgggtgtggtgtgtggtgtgtgtagtgtgtgtgagtgtggcatggcatgtagtgtgtgtggt

SEQ ID NO: 4081 - DNA, 478 bp, synthetic construct
  misc_feature 1..478: note = Description of artificial sequence: synthetic polynucleotide sequence
  source 1..478: mol_type = other DNA
gtgtgtagtgtgtgtgtgagtggatgtggtgtgtagcatgtgtacttctgtgcatggtatgtattgtgtgagtgggtgtggtgtgtgtggtgtggtgtgtgtgtggtgtgtggtgtgagtgggtctggtgtgtgtgagtgtggtgtggtatgtagtgtgtgtatttctgtgcatagtatgtattgtgtgagtgggcgcagtgtgtgtggtgtggtgtgtgtgtgtggtgtgtaatgtgagtgggtgtgtgtgtgtggtgtgtagagtgggtgtggtgtgtgtgagtgtggtgtggtgtgtagtgtgtatttctgcgcatggtaggtattgtgtgagtgtgtgtggtgtgtgtggtgtggtgtgtagtgtgtgtttgcatgtgtagggaggcaagcactgttgacaggagtggcgtcctgtggagagccagccccctcaaaattgcagaacatcaccaacagtgaccatgtattgagga

SEQ ID NO: 4082 - DNA, 241 bp, synthetic construct
  misc_feature 1..241: note = Description of artificial sequence: synthetic polynucleotide sequence
  source 1..241: mol_type = other DNA
cacatgaggacatgctcggcacacatgtccttatttaaatcttggaaagaatgtggcaaaccctttcacaacctgtgaaaccctgtgtggcccagttcctaagaggccacagatagtacctaggcctgtgaggaaccgggccatgcggcaggaggtgagcagcaggcgggcaaacaaaacttcctctgcatttacagctgccccccatcgctcacatgaccacctgcgctccgcctcctgt

SEQ ID NO: 4083 - DNA, 240 bp, synthetic construct
  misc_feature 1..240: note = Description of artificial sequence: synthetic polynucleotide sequence
  source 1..240: mol_type = other DNA
cagatcagcggaggcattagattctcataggaccgcgaaccctattgtgaactgcacatgggagggatctaggttgcggctccttaggagaatccaatgcttgatgacctgttgctgtctccatcacccctggatgggtctgtctagttgcaggaaaacaagctcggggctcccattggttctacaattatcatgaattgtataattattccattatatattaccatgtaatcataatat

SEQ ID NO: 4084 - DNA, 480 bp, synthetic construct
  misc_feature 1..480: note = Description of artificial sequence: synthetic polynucleotide sequence
  source 1..480: mol_type = other DNA
aaagtgcacagtaaatgcaatgcacttgaatcatcctgaaaccatcccccccggcccctgtccgtggaaaaattgtctccacgaaactagtccctggtgccaaaaaggttggggaacattactgtaaagtatcactctcccacctttatagatgaggaaactgagactcagataatgcactagtttcctagggctgacacagcaaagcaccacaaactggatggcttaaaacaacagaaacgtatctgtcatagttctggaggttggaagccagaaagcaaggtgccagcagggccatgctctcaccgactctagatggaacctttccttgcctcttcctggctcccggtggttgttgttgaccctcgacactttttggtttgcagctgcgtcagttccatctctgcctctgccaccgtggcattcttctctcttatgaggtatctgtgtctcctcataagaacaccagtcatgttgaat

SEQ ID NO: 4085 - DNA, 479 bp, synthetic construct
  misc_feature 1..479: note = Description of artificial sequence: synthetic polynucleotide sequence
  source 1..479: mol_type = other DNA
taaggatccaccctaccctagtaagactttatctacttaattaatatctcaatgaccccgtttccaaataaggccacattctgagatactggggattaggtcttcaacgtgtcttttgggagacacaattcaactcgttaaacataaggaaaatatcttgcttaagataaccctacctgcaagtggcagagaaaatttgaatccaatgctgactcccaaactccttttcttttctgtacactaatttatgcaattgcattgattgatgtgtacaatttacttaggttcatttaagctttgtattttctttcccacaaccccctttgcaccggcagtttctcagctgctatattgcccacataagatttcctatgatagcttttctttcttttcattagctctctcttagctgagtaggaagatggaaggtcagggctgaggagctaagtcagactcagggatggtgtctgtgccagaga

SEQ ID NO: 4086 - DNA, 241 bp, synthetic construct
  misc_feature 1..241: note = Description of artificial sequence: synthetic polynucleotide sequence
  source 1..241: mol_type = other DNA
cacagagggatcatgtccagtcaggaaaagagaaatcaagtatttcaaacagagaggatttaacacaggaattggttataggagcattggattggaaaggctgagggaaagagagagaaagagagagagagagactacagtaggaacaacaacaaaaaaagacagaagccattagtaggaaatcataggtgggcatatggcagccaaggtatctggagaaacttcttttatataatgaaat

SEQ ID NO: 4087 - DNA, 240 bp, synthetic construct
  misc_feature 1..240: note = Description of artificial sequence: synthetic polynucleotide sequence
  source 1..240: mol_type = other DNA
ccctcttatataatagcttgtatggcaaaagaaaaggaagccatcaaatcccccaaatgacagaagagaagaccaaagttgttgtttgttccacaggcatttgtcatccatggtgggcttgaccttgggttttaagaggctatgcccctggtggcaaaggttaagcccagcaccacacaagatagaatgttagaccagagctagtacacaaagccggatccctgaagagtgccattcctg

SEQ ID NO: 4088 - DNA, 480 bp, synthetic construct
  misc_feature 1..480: note = Description of artificial sequence: synthetic polynucleotide sequence
  source 1..480: mol_type = other DNA
aacgagaaaaaacgcccagacagagaaacacgaagaatacttgcttatctagatcttagctcttggtaaagcgacaaaccaaaccaaaagttgcccatgaaaagactcccaaaaaagtctctaatgaaagaggttatacctatttattttcattctgacacttgctgattgggagagctcttgacttatgtttgatagcaggaaactgcctactcagaagaaaataggttacctgcttgggaaaagaaagatctagaaaatcaaaaatttttagttattttggttgtcttttgcttcttgttgttgttgttgttgtttgttttatagcatttctaatccagatttttatacttcttatacaagattatttttcttgatagaaaataatagaagtttttttgttttgttttttgcttttgtttttgtttttgtgatggagtcttgctttctcgctctgttgcccaggctggagtgcagtgg

SEQ ID NO: 4089 - DNA, 7261 bp, synthetic construct
  misc_feature 1..7261: note = Description of artificial sequence: synthetic polynucleotide sequence
  source 1..7261: mol_type = other DNA
ggcgatccacccgcctcggcatcccaaagtgttaggattacaagcatgagccaccatgcccggcaataggaattctttttagaaagagagaaaaatacatcaatttaaaagggagtgtgttgtccatgtatctctacttgtaatgggtgaagagttggaaagttgttaaataatcccaggttccacgcagcttcgtggaagctgtccccttcgacaggcacctgaacccttatttggatgtcatggagatgcggcaagaagctcgtggtttatctttaacaccagtgatttacactaagaatttactttgggcatttcagtgatgtcttgtggagcctgaactaggctatcaaaaataaatatgtaacagtattttcctgcaaggaatactgacgtacttaaaataaggcatccttggcaggcagtgtaaagtcagagagctcctgccttcagcccatggttccaattaatacgcttccaatagcatcatagctacaaccttgaggatttctatctcccacctggactaataaattgatctcttagaaacaagctgtgagcacaattttaaatttaaataactatgtctctcagattgctgtgctttcagtcacgatattagctcaaatgaaggacatactgaattgaatatctggctatgttggcagaagccttcagcctaatcaaaaaatttatgggcagacaaatttgctcggcagccagacatcttctctaaatctagacatacaagtcatttaaccactgatctacagtgtccctgagcttcctcgaggtcaattagaggaccttatccatttagttcagcttcatgactttaacaaatgatttgctgtttctttttttttcttggttaccagaagctaataaaaacttcacggagatttagagacaactaatgacatcaggaacgttggctgccatgcctacctgctctagttctcgtttggaaattccccatgctcagctgtgaaagaacagaatggaaaccaatcaagggacgggggatattgatatctagcctacatggatggagaagacatcgaaagatagggagaatgacatcacaaaaccttcaatgccttccagtccacagggaggcggtcactcacagatgcaataacctttcggggtctgcctctgaaaacattcagtgaaagttggtgacttggttcatttttcaggcaaagaaatgaaggcatgggttgaaaatagacagagctataaggctttaagagtggcagctttctgtccaaattccaacaaaaatagttatcagatctctctctctttttttttaaaggcagcaggagaacatagatccaaaattctgtgtaatccactcaactaagactataacaacaacaaacagttctatagtgcagtttatgttattcttggcagagctcagatctcaggtgacatcaaaggtgactacatagatatatatacaatgaagtcagcttataattcatttctattagatttacaaatttaaactgcttagggcttacaagtttccgagagacagagaataccacaaagaagtggatagatggcagatgacacatgcgagacccaaagtgctaatttcctgaatatacaaagagctcttacaagttaatcaaaagacaaataactcaatgaagtaatgggctcttgcctatgttatgaatattttcatctggtatgacatttactctttgatttcattatttttgtgattttcataggcttgtattttatgtagtcaaatctctatgtctttctatcacttttgtgtttagaaggacgttcctccttctgaagtacacatatttgattttggatttgagatggcattcatttctgatccatctataaagtttttggtgtgtggttaaaggtaaaaatagactcacattttcctaaataattagccagttgttccagctccatttattgagtggtccttcctttcccaactgatgcgcggtgtaacctttatcatatattaaatactcatgtgtgctaaaaataaaaagtcatttcagttgagtgctgtgaattaatccaaggagtttgcagaggtggcgtttgcagcatgagattgtccttcctttccactcctccccagagactgaaaacagagggaaggaagccagggaaacattaaacaaggtctgctgctctggataatgtctatgaggaaaaaaaacgcaggctgagattttatgatttaaagactattatgctgcttaaagaaccctgcaagagtaacaatagctgctatttattgggcgcttgctctatgccaggcactgttcccagcggccccgccatgacgtcactccatccttacgacctaaccctaacccacgctatggacacttttatcatcgccccgattttagacatgaggaaactgagactctgagacactgtgtcccttaccccacagtcattcagaagaacaaccaccccaaatgtggctaagccagccagtcaacaagagcgctaggattgttaccttcttcaaaacaatacctctcagcaaagccatcaaatgtcaaccaacacaccaaggaaggtccttgcagatggaacacagggaaactgttatctcacaggagtggtaccagcacgtaagggagtcaagcgcagcaaattctaaggtgcagagaaatggaccactgtcaatttccaggaactcatttcactcctgtcttttcacattaatgtttctcctttccaggaaagccaaggaaaagacttttcatccaactggcttaggaggcaagacagaaaccttttccgcataagatcctatcacagctgggcaaattctgtacctaaatctttggagatgagtggcctctcggtgttttcattatttataattaattgttcatttatcagactttgtggagtgtctcaatgggcagcgaggtgtgaggcacagggagtatgtggtaaagccctcaagccctctgccttcacgcagcatccatttggggggatgcacccccaacccaaggcgggggtgtgtgctgtggtgtcacaggaagtgctgcctttctcgaatggggctgtgtttacacagggccaggagaactagatgctgaattggggtcaggcttcaggagtcctggcttttgggaccactttgacacttcctgtcttcacagccgtcatcctatttcaggattcttatccccaaaacaggaatattaacacagctccgcctgtctctgcaggtcatcaagagcaagcacctagtgagtgtgaaagcatcttcagtgtgggagttgctgtatagatgcagagttttactactgaaaggaggaatactactgttgatttgtttttgtttctcggttgttgtgcgtgtgttttgttgttgttgttgttgttttaccatcttggtcctaagtagctcgtttgccggcccagccttaatggccagttggctccaagtcagaagacatgatctcctcccccattctccatgccattgtttaaagcccctcctgaggaatgggctgccttggtgttttgtcagttcaaaccacatcctgcctgtttccactttccataagacaactcgcaacaccggtggttttcagatgtggccggcttcttggtgaagcgatagcagaggccttgttcacagaagtgaaaataattcacccagtggttagcacatcaggtgtgggcattgagtgtaccccgctccctgcttgatcccaatccctggttgggtttgggagtggacggctgcccaacctcctggcactgtcttgacccacagccttctctgggatgaggactaagccagaagcagtaaggacagaggtgtctcaggctgtccaggcctggcctgaatcccatgacagcaagggtgtggcctgcagaagctggaaacgaccacggtggccttctagtaactttacagatgaggaaactgagtccagagagggctggtcagttgcaggcagagcctggactggcacctgggtctctgggctccaggctcaagttcattctaagcagaccagttgtacccatcgctgtaattgaaagacttgttggcatcaacagaactagtaactgggtttggtcctggtgaccaaggggcacatctcccagctggaagctgtttgctaagagcaaggttacggcccgcactgggctaccaaacaacagagcaagcccacgctcagggcatcagcaagcagggttatgaaataaaacaaacatttgaaagaattcgacacttgaagaagaaaaagaggaggtgaaggagggcagaaggaaagtcggaagcagcagcagcagccagtcatcatgagaaaatcagagctttgtgggattttaaaacttgtggtttggaaacgtttttattatttagatgcatgagggcagacaccaccatcttttaaatgttcacaggaggccaaagtatgcaagagccacggcctaaagcagggctgtgggcagagccagacctgggccgtcagagtccagggaagggctcaggaccgggctgtgcagcgtgtcccgagtgtatcacccacagccccacgatgtgcagtgggcagaccaggccagcagacacatggccctctatctctacttccttctgggagggtctgggaggctaaggtagccctgaccatagaaaacatggattttccaagacgtcttccctggagacttctgctcttgaacaatgcttatctatcacaaggttgagggctctccttatctttcaagagtatgaggtggcctgtaaatgcttcacttattaactcagctctgattctccctgggaggccaagggctgagtgaaactctaacgtgggcatgtggacagcttgtggtgccctgtagctctgcaccatgggcctgcaggtgcacagccagtcccatggcctccagaggagcagcgcaaacccttagcctgggtggggaaggagcacagcgccaacagaactactgctggagtgggcccctgtctatcaccagcacctggaagtgccccatcccaggcctgtcccagcccggcatctgagctaattacagctccgttgtggggagagtcagccgtgtcagtttaactgacagcccagataagaggtactgggcagagtctcacaggttgcacaacaaaccactctgccaactgagggcagaggcaagtctttttcagtccctatggtcagaaacgaatttcctggatggctgtcttctccacctcctctccatctcttatttttagttttcaggttggtctgaattaggttttggctttttgggggtggggtggggggaggatgatgggtgattttttctttcactcatttaagcatcagcctcgtatctggcatctggcctgtgccttcctttcatggttcaagatgtgcccagggctgtcgtatgtcattggccagggttgggagcccataacgccaaggccaccagctccactgtgatgagcagatgagcttggccatgtggcaaacagtgaatttagtgctgcagcatgttcagcggattcatgaagtcttctgctcattcaagaagggatgttctccctgacagctgcatccccaaactcacaccaaacagcttgccagtcaggtgcccccacccccgtgctatgaagctctccccatagaagatcaatcagccttcctctcctgtgggctccacctgcacccctcgctccaacaccatctgcccacaccgtcctgtgtagttgctgtccatttattccatctccattatagtgtctgtctgaacagcaaatatgaggcttcacagaagcattgaagatctaaaaagcatttgtaactgactgtaagcgaattcagcatgaggcctcaggtggcatacgagcctctggcactttcgtcttacccacacttgagacactgtagatctcaaggcaacatcaggaccatccagggcaggtggcaacaattttcttttaaaattccaaggtagcttaagccaagcctgtaagtggattgataggcctcaggttcaagaccagagaaaaagaataggagagaaaagtgaccctcaaatggccaagaaaaagaaggcaggagagaaaagagggagggccacccacggtttgcacaggtgccatctccagagccatggggtgctgcacctgaggctgcagctcctgggcacagcggacccgaccctcctgaaccaggggaccagcagcacaggcagccgatgtgtggctctctccaagctctgagcttgggggcactgagtggaggggaatatccagttcggaggacctgacgcttctggctctctgctcctccaggctcagctgttgagtgcagacacaggctctgggaggccaaggacttcatgactgggctcactcccagcagggcaagtggggtcctggggcctgagcccctggctatctgccactgctctctcagacaccacgaaggaggctccgcaaaacaccatgtccctaacaaaacgggatttgaccgattctgttgcacattcaaggtgttaaagctccaacctgaataaaggctgtgcaactacataatgctgtaaacagagcctctgtggagcgcgtgcgtgtgtgagcttagctccgagcccacattctcctagagtggtggagggtctcatcccacctcccagtccctcctgggcccgcccccaggagctaaccagcgtccggaatggcctggctttgggtcttcgccgtggctatagcctctctacctggaccatctgattcctgttctgagctgagcctccagccctagggtgtagggaggcggagctcaccctcttttccctccccgtgaagccgccttcctgtgcgctaatgttttaccctggctgaatttaaacagatgtggtcaaggatggcgggtccccaacgtgacctccctggctctgctatgcatgcctaatccccgtcccccaatcgatcactccccggactctccccttctcccctctcctatgcgaccaccagttgctcaccaataattcgaaactgcctttttgacagagaaaatgagtgtcagctgtttgcctaccacgcctgattctaagaattaaagtgaacaaaaagttaagagagtgaatgttgatcacaacagagttcactggtaatgaaatgagattcctggaaacgtactcttcaccctggagctggttaagaaggagatagagaccatcctggctaacatggtgaaaccccgtc

SEQ ID NO: 4090 - DNA, 241 bp, synthetic construct
  misc_feature 1..241: note = Description of artificial sequence: synthetic polynucleotide sequence
  source 1..241: mol_type = other DNA
aaaagaaaaagaaaagaaatatttttcctggtctgcttctccatcccccatcatggctctgacggtcccaggtcactggtgggagctttcccaactgggcctgcctgggaatccacagcctcttgtcacttgctgtgagcgagtagatgaacacctgctgagtaagaagctcctcctgggatgtggaggtggaggcagggaatcctctccttgcaaattagctcagccataatgaagaggc

SEQ ID NO: 4091 - DNA, 239 bp, synthetic construct
  misc_feature 1..239: note = Description of artificial sequence: synthetic polynucleotide sequence
  source 1..239: mol_type = other DNA
gctgatggaccgataggaattcacacccttctttattcggcattccaatgtgaagttgtccacactaggacaagaggttgaaaggaggatgatgtcacagattgaaatggaaacttggtgggagacatgtgatgtgtgtggtatgatatgtgtgtggtgtgtgtgtatgctgtgatgtgtggtgtgtgtgtgatgtgtggtgtggtgtgatgtgtggtgtgtgtgcaggtgtgtagtgt

SEQ ID NO: 4092 - DNA, 240 bp, synthetic construct
  misc_feature 1..240: note = Description of artificial sequence: synthetic polynucleotide sequence
  source 1..240: mol_type = other DNA
ggtttgtggtgtgatgtgtggtgtggtgtgtgtgtggtgtgatgtgtgttgtgcatgtggtgtgatgtgtggtttggtgtgtgtgtggtgtgtgcatgtgtgtgtatagtgtggtgtggtgtataatatgggtgtggtgtggtgtataatatgggtgtggtgtggtgtagtgtgatatgtggtgtgttgtgttgtggcacattgtggtgtttgtggtttgttgtggtttgctctgtgtgt

SEQ ID NO: 4093 - DNA, 239 bp, synthetic construct
  misc_feature 1..239: note = Description of artificial sequence: synthetic polynucleotide sequence
  source 1..239: mol_type = other DNA
tgtgtgtgtgtgggggtgtgtatgggtgtggtgtggtgttttgtggtgtggtctgtgtgtgtggtggcgtggtgtgtgtgatacgcgtggtgtggtgtcacatgtgtgtggtgttgtgtgtggtgctttgtgatttggtctgtgtgtgtgtggtgtgtgcatgtgatgtgtgtatggtgtgtggggtatggtatgttgtgtgtgtggtgtggagtgtgtgtgtatagtgtgttgtgtgt

SEQ ID NO: 4094 - DNA, 241 bp, synthetic construct
  misc_feature 1..241: note = Description of artificial sequence: synthetic polynucleotide sequence
  source 1..241: mol_type = other DNA
gtatggtgtgtggtgtggtgtgattttgtgtgtggtgggtgtggtgtggtatgtgtgtgtatggtgtgttgtgctgtggtgtgatgtgtgtgtggtgtgatgtggtatggggtgggtgtgtgtgtggtgtgtggagttgtgtgtggggatgtatgtgtgtgtgtgtgtgtgtgtgtgtgtgtgtgtgtggcgggggtgtatgtggcgtgtgcatgtgctggaaaagacaggatttccgaca

SEQ ID NO: 4095 - DNA, 239 bp, synthetic construct
  misc_feature 1..239: note = Description of artificial sequence: synthetic polynucleotide sequence
  source 1..239: mol_type = other DNA
tgaagaccggggaagcctctggctgctgtgccccatcctcagctgggggcagccctctctgctgcagggtggagggaggtaggcgaggatgccgaggctcagcttcaaaaggggaggactccctggagttgcggaagcctttagtaggggggaagtaggtggaatgcgggggtcactccttgctttccggaaaccccagtgtcccctggggtggggtttctggaaactttcccctggcc

SEQ ID NO: 4096 - DNA, 241 bp, synthetic construct
  misc_feature 1..241: note = Description of artificial sequence: synthetic polynucleotide sequence
  source 1..241: mol_type = other DNA
gttttctctccatgcgcctctcctgctgctctctcctctccgcagctgtcggggagcaggctgggtacttatttcagtcccctgtacctggctcctacagctaagggcccttccagaacaggtttttcccaaagtcccagagaaagtgctcaccaagtgcgtgttgatgatgaaccccgaaatcaacgtgtggattttccttctggtatttgggattttttttaaaaaaagagcacacctt

SEQ ID NO: 4097 - DNA, 240 bp, synthetic construct
  misc_feature 1..240: note = Description of artificial sequence: synthetic polynucleotide sequence
  source 1..240: mol_type = other DNA
tgagtttttctctcttctctataatatgccacacggcgaggtttcaaaggttatagcaaattgagaacgaaaaaggttttgaaggagccaagaggaaaagactccaggttcatcctaatgtgaatatacaagcaggcctcgtctcatctgtatagagcacaggtctatgggaccacgcagagtgaggggatgagactcctgcactcaagactttgcagtcctattggggaccaggtggaa

SEQ ID NO: 4098 - DNA, 240 bp, synthetic construct
  misc_feature 1..240: note = Description of artificial sequence: synthetic polynucleotide sequence
  source 1..240: mol_type = other DNA
aacgttatggaacatgtggaaacagaggaaaaccaaacccatgcctgcaggagaagtgcaggctaggggatctctgcgccgggattttcggggaaggattcatgggggcggtgggaacgagggggccccagaggatgagtaaggcctacgtagggggaaggaggggaagaaatcctcgaagctggtatgagtgtgagtgtatctgaagcggggtttgctggggatgtttggctctgaatg

SEQ ID NO: 4099 - DNA, 239 bp, synthetic construct
  misc_feature 1..239: note = Description of artificial sequence: synthetic polynucleotide sequence
  source 1..239: mol_type = other DNA
agagggatgaccacttgttgagcttcccatgtgcccggccccgcagtgacatgtgttagctcgcctcatgcttaccacagccctgagtcaggtctcattatgttcattttgcagatgataaaaccaaggttcagagaggcttgagtcatgcggtccagaaggaaaagcaatgggactcaaattcatgttggcctccaaagcccctgctctcagtcctacctctcaggaccggcctgggg

SEQ ID NO: 4100 - DNA, 479 bp, synthetic construct
  misc_feature 1..479: note = Description of artificial sequence: synthetic polynucleotide sequence
  source 1..479: mol_type = other DNA
gaagacgggagtgtggtgttgagtggaaaaaatatggctgcccagagagggtgaagggtcaatatgggagacacaagacggagcagaaaatcctagccttatctcaggaggacgtagagagtcatggtagttctttgcttatgggagggatgtggagaaacgggtgtttagaacaaatgagttggtctgggtttcctggaagatgccagagggcagggagaccacccaggagtgggcaacatggccctggctcaaggtggaggatggcaggagaggagagaatggagcagacagacatctgcccaagtgttccatggtacattagtcagtgtcccataaaaaagaaggcctatgggtggtcaaatttggagtgttctgggttgaacagagtaacagagtaatagagtcattgctctattgtggaacttctttttttaagatggagtttcactcttgttgcccaggccggagtgcaatgg

SEQ ID NO: 4101 - DNA, 4801 bp, synthetic construct
  misc_feature 1..4801: note = Description of artificial sequence: synthetic polynucleotide sequence
  source 1..4801: mol_type = other DNA
tcaagcaatctgcctgcctgccttggcctcccaaagggctgggattacaggcgtaagccaccatgcccggcctactgtggaacttctcataacctttgatatgctgatatgactgcagagggaaatgtaatctgcagtgtttctcagactcatttgaccatgaaacccagtttctgccaagcacctcctgcagctggcgttccacagaacactctgagaaatattgtggcgcctggtcgcccttacgtcatgggtaatgtggatgatacgctaagttggaactttgggtgcagagcccaggctcttgtttcactgacctactgagttttcttgcttgttttgttttctgaaccttgctttaaccttccctagcaactgggatctcttccccagagtgtgctgctgaggggatcttgggacaacgcacttgctctcattgtgccaggcctgcaggcgggagtggactcaccttgccaatggcccttctctatccttgctgaggaccatgatgggcttatcctgcttggcagctctggccaggcctggaagacctacactcacatatgagtagttacaactcagccatcctctgtctgaagaacattctgccccagggaagacatcaacagggatgtcagaacagcctgggggtcatggccagatcacagtaaaaatggcaatacgactggcttgctacagaagagaattcagaataagaagttctctcggactccatccagagggtgttgcaaagaaaccaaaagaaccaccttagaaggtctcactggtggggcagttttgagccctcagggacttctagatggtaagagtgaagagtgtttaggaagaaagacttgtctgtcggcgtagctactagctacatgcatgtctccactgaggacacaaggaccaggctctagagacaattcagccgattgggagtctagagaccagaacttctaacatcagcccagacaccaatgggctggctgacctcagggcaaatcattttatgtggtttcctcctttggaaaaaaaaaagagagagagagatatatatataaaatctgatctacctcttagaggttcagggtggtttctgttttgctttttgtgaggagcaactcataaaaatgataccaaactcctctgaaaataaatacaggctctatgcatttctaacaataatagcaagtattctcattgggattgtggctcaatttaccatgataaaatcactggtaaatttctaaaaagttacctctttgtgcacataccttctcttagaaaatggttttctgttagaggaaaattaaaggacactcggagttactcatttgggagtttatgtttttcctttcccccattgaatagctctctggggaggtttccattttggtcatatttcagaaatgactgaacgtcagattctgcactctcacttactgagaacgaatttagaaaaaatagtgagattagcagataagtaaacaaacattaattgaggctcaaattgtagaagtacttcgggcagtatggaattacatgtttccatattctttgttagtctgcatgaaaccaaaacccagaaggttatattaaacataatcacctaactccatggggccctgggaggaatttttaatgtggcaattgaaaggcgtgtgattgtgcaaaacacaatggcacaaatgagtgttcctgttgctttcgtttctttcagaagggaattagctctgggggagcacagaagagtaccaaatttcagacctccctcccaccccaaagaggagaaacaccctgttggacctcactgatcccctaggaaggtggatatgagtcctatctggaatgaggtcttaatacaggttttatgttgtgagaacctggcccctggctcccaggagtgcttctaagttaaaaacttcattgcattcattttttttgttggtatttaatacatatttcatagactcccatcttaaaagctttctgattgattggcggcagagagccagctcccttatctaacaggactaagtccccgctttctccgtagtggccaagtcatcggtgtctgcagttagactgagaacatccaaaaaggccgaacagaaggtggaagaggctgctctgttatttctcgtctgatgtcatgcccttagttagttgcacctgataagtattcacccagttcctcatcctttctcctttggagcctaagtggtcttgcgggtgtgtggtttactgggtactgtggccttcccttctgcatccagctgccagtggctgagaggtccttttagcagaggagtagctctccgcagtaggataactatagacctggatcccaaggccttcctgctcagccctggggtattcacctctacctctccattgtatttacatcaacgaggaaccccttggacctgtcctgtccaatacataaccactagccacatgtggctatttaaatttagattaagttaaattaaattaatttttttctcagtcatttcagtcacatttcaagtgctcaatagccgccctgtggcaggtggctactgtatcagacagtgaaggtgcagaatactgctgtcattgcggaaggtctattggaaggtgctgcttcagagatcacccagccaatgccttgatttttctagaataagaaacggagacccataaagtttaaatgacttttccaagaatatccaggaacgtataataatatgtttcctggccattttggaattcttatcagaggaagatgttctttatttaagtcttgatttttgaaagaaatattccccttcagatataatttgatttttacaagtaagataatgtaatataacaatggtcttgaactatgaaaacactggatacattttggagaggctcaccgtgatatattcaatactatcgaaatgattttcttatctttagtggccagtgaaatttcacaagagagaagtctagattagtttttggagaccaagaaacattggtgtatttattccttacctgggagtgtgctattaatacgattatgctcctgaagactcttggaaacctgagatcagttatatgagaaaaccaaagggccagctgtgccctggagtcataggaatcattattataacgtccacagtctgtcggcatcattggtcagacacagggtgagaggacagtaatacaggctcaccacgacacgtgtgtctttaacatacttcataaacacttagcctcccttacagccaagacagacaataaatgtctctctcactcaactgtgtccaggatttacacagtgcctcatgcaaggtctcactgcaggccagaattcacagagggtgggagggctgaagacttgctccattgcagaaatcaacacaaagagccattgagtgttaaagatgggggaattcagcacttgaggactcaaaaaaggtcctcctgtagaaggggcccaaaaagttcctctgagagtcgcctttcttgctagacttctttgtatacaatttgtcgctatggagagagatcaaagggaattctaggcaattgtttttagttactaactcaatgaaattgatctgcaattattctaacaggtaactgaaccatggtacagagagaacataaaataaagaatctgggcttgctgtggtctttattaatttcttctttattatgaatacctctgctatgttcttctaagcccccaccctaccatatgcgataagaaaatataaaagagagcagcatagtgtctaccattggcacaatgggttgtgtttctctgactttggggcctcgacttgttggagaagacatcatgaaatgcttgtgtcccccaaggatgtgagtttattgagcagaccctcgaaactggggcagcagtagaagctctggtgagcgtttggggtaaattttatgataggaggctagcatgccagaataggaaaccaacttgtaaggatgcagagggcaagacactaggtccagacgggtcagagagcaccaatcaaatgacacacatctgggtgagtcaaattcagagcccagaaggtcagaaaattagcaaactcaacactggtatgctgctctcttttgtaattctaccccatatgagtaagcaagggctccttgaattttctgacagtcaagagggaggattaaggaaggacagatgatggggtcttcatagtggttccaagagtatcttccacctatcgggatgggcctttctcccacttgggactcagcctggagatgtgcatgcagcttccttgatggggctgctggttcacagcaccctaaccattcaggggctggtaaatttccctttcttgggaataattcttggtcccacaaggtattcttccttactcttgacctattttgaggaggaaatggggacaggaacgattatacagcaggtattatccctgtatactttgggaatagagctagggaagaattttgagagattcagagtggcggtgagggcaagatgaaatgaaactggagaaaattgctgagctgtggctgtgtaattggaggaggctaatccttgcagagaggcacttctgggcaccagaacttctcttctgcagatgaccatctccctgaaggctggcgcttctggttcaagatggcatggatggctgggagctgcctgcaccagctggtggtggtggtggggacccacaggcctgggtgatatggtctggctgtgcccccacccaaatctcatcttgaattataatccccacatgttacaggagggacccagtgg

SEQ ID NO: 4102 - DNA, 240 bp, synthetic construct
  misc_feature 1..240: note = Description of artificial sequence: synthetic polynucleotide sequence
  source 1..240: mol_type = other DNA
cagccatgtggaactctgagtcaattaaatcttctttctttataaattagcagcattaatttagacagactaatacactgaggaagagtagggtgaaggttagactttacatacatagtaccatgctgagtttggtttcaagggccaaactggtgaactcagaaagggaagcctgatgtagttggaaaagtcaaacctcagctccactactactagctatgaggctttgtgaaaataaat

SEQ ID NO: 4103 - DNA, 479 bp, synthetic construct
  misc_feature 1..479: note = Description of artificial sequence: synthetic polynucleotide sequence
  source 1..479: mol_type = other DNA
taaccactctgaacctcagcctctttatctgtggtggtaggctgaataatgactcctccaaagatgtccacatccaaatgttctgaaacttgtgaatatgtaaacttacatggtaaaattgactttgcagttgtgatttagttaaggatcttgagatgggggcagaattttggattgtctgggtgggcccaacctaaccctagagttgttgtaagagagaggcagatcagagtgagagtgaggaaagcaaaggctggagtgatgggaggaagggtcaccacctacggaatgttggggggcctctagaagctggaaaaggcaaggatacaattctcccctagggcctccagaagggaggcagctctgtctacaacttgattttagcccagtgagacctataaaatgcaaaataaaggtactcatctcataaggctgttgccacagattaaaggagacaatgtatctgaagcacttagcat

SEQ ID NO: 4104 - DNA, 480 bp, synthetic construct
  misc_feature 1..480: note = Description of artificial sequence: synthetic polynucleotide sequence
  source 1..480: mol_type = other DNA
agtgtctgccacacactaggtgctgggtaaaaggtagattattttatgctttttttttagaaattatacgatccgagccagggttggattccatctgacttaaagcccaaccactacattatagttaaaacaacttgtagtggttggaagtggatgcagttcttccaaagaatccgtggtaaaacattttaggattgctggaactcaaggagatgcttccaaattctttatctcagaaaacttttgggaccccagcatcccctttggataacctgttgcatcatcaggcctccagacatgaggctgaattcctgcatctgagttctgcacatcttggtggtttttgcaggattgcatgtgctcttgaagcactgtctcatataatgtggcaatggagacaaaaaaatgtcaccaaggtgtggctatggagtgggagaggaggacttagaggatgtcattagcaaattgctgggtggctgc

SEQ ID NO: 4105 - DNA, 480 bp, synthetic construct
  misc_feature 1..480: note = Description of artificial sequence: synthetic polynucleotide sequence
  source 1..480: mol_type = other DNA
cagggtgttgcagaagtctggtgacttcatttgataatttgctgatcattcaagtttattcctttctaggttcctgtcatcctcactggctttgttttgcagctgagagactgaatatacaaatgggcaatggccagaccagatataaaaatagaattcagacccacagtctacagcagccagcccaggaaaccagctcatgacctactgttaccggcccaggaaacaggtctgctataaatcagacttgcaggaagtcagatcactgtctgtagaaacaacccatgaagccagacaataacctctgtacaattgcccccaaatggccaggagttaattaataatggactgcttccttgattttcttccctgattccaatttaggaccaaccagagaaagccaatatgcacctctaattattcatgtaggatgtcctgcttctaattagcccacctccatgtaggcgcccccaccctatg

SEQ ID NO: 4106 - DNA, 240 bp, synthetic construct
  misc_feature 1..240: note = Description of artificial sequence: synthetic polynucleotide sequence
  source 1..240: mol_type = other DNA
ccaacaacctcccatcagggtgagctcaaagccttccctctttgccattttaaagctttcccacttatctgtttgcctttgattctctgccaaaatgcaaaagatagtgagtggccgactcccttagtatatatagcaagctctgaataaatagcctttgcttttctcatttggttggtctgcatttatttccacatgccgtacaactagcacatgtgaatttggaggtaaggacacgtt

SEQ ID NO: 4107 - DNA, 241 bp, synthetic construct
  misc_feature 1..241: note = Description of artificial sequence: synthetic polynucleotide sequence
  source 1..241: mol_type = other DNA
ctacactcttggacccagacaaatttggtctcacgtgattggatcagagggacaacacttgtggtctcatgaagcgccaaggccttcttggttcctgtctttgtggcgtgtggatgacttctctaggagcaggagatgactgtgatggaatagtgactaagttctatttgaacttgaattagttatggcacaaatgggtggaacataaaagaagtaattagtaaaggcaaatgggaaaagc

SEQ ID NO: 4108 - DNA, 479 bp, synthetic construct
  misc_feature 1..479: note = Description of artificial sequence: synthetic polynucleotide sequence
  source 1..479: mol_type = other DNA
ccaaaattggaattttgtttttaaataacacttgggagagaacaaattaggaatgaagacaacctatttccccattccctggcacacagatctcattttaaataaaacaataaggaggtaagttttaagtggtgtcatagggaatgttagaagctaatgttactaatctaaaaactatcactgcaaggaaatatccaggtggttatggggcagagatattgcaggaagtctctgcagatatctcaaattgttggtctttgaaaaaaaggtccacatgtgatgctctctgcagtgtcattgtcaagatcataactaagtttattgtaagccattatcaagatgcattctcatgttgtgtacctggctccaaggaccacagttgattattatcttgggggacgtttattattccctctctgtctttgtaaataaaaatgacaagtcaaagtttggtagtagttgagaaaattgttgacgtg

SEQ ID NO: 4109 - DNA, 478 bp, synthetic construct
  misc_feature 1..478: note = Description of artificial sequence: synthetic polynucleotide sequence
  source 1..478: mol_type = other DNA
taattacaggaatttgcttctttggttcagtttgttactttgaatctttacactgtctgcgtagctattgtggatttattattttctgtagctgcacagaaaataatgttttaatggtttttcataataaataatattattttccattttatgtggcatgaaaactctttcacattcatcactttgatctccctgactccactaccccgtatgaggctggtagaatatggtgggacaagtgtcacaacccattgaactgatgatcaaagatgcaaagaggccacatgttttgcccaaagtcgtgcacttagcaagccagaattcaaaccctgacctgatatcaagagtttactgcctgtcaagaggacttgcaatccttccactggacacatttcagatttagtttcccctttgaactgataacaactgtttcaaaagtaagaacctttttggattaagcttgaaaaaggagaattga

SEQ ID NO: 4110 - DNA, 480 bp, synthetic construct
  misc_feature 1..480: note = Description of artificial sequence: synthetic polynucleotide sequence
  source 1..480: mol_type = other DNA
gggagttggagaagatgttttcctgttttaacaacttaattaacaagtatggggtgaggtggggagcagcgggggcctgaagaggaagtcgttttgcagacacatcacttgtgcatgagatgtcaaatatctgtacacagggtctggtccggtgctatggtccagcatggtggccaccagccacatgtggctcttgagcacttgaaatgtggctcactcacactgagatatgctgccactgtcaattccacattgacttcaaagccttagtatgaaaaaaaaaaaatagcctattgtggtgttatgataggtactggttttcctccgtggttcctggcttgtgactcgcatagcctttgttaccatcttttattatgatgttgggtgtgttaagtctctgacctacttctgccccttttcacctgccccagggcaggactctactgcttttctgattgaggttcttttctttttttcagg

SEQ ID NO: 4111 - DNA, 241 bp, synthetic construct
  misc_feature 1..241: note = Description of artificial sequence: synthetic polynucleotide sequence
  source 1..241: mol_type = other DNA
cttaattcactttatttttcttgtataaaaaccctatgttgtagccacagctggagcctaggtccactgcacagagactccgtgcagctgattgaggtccttaagaccttcctatgagtggttcctaccctgtgccctggggaaaggaatgctgacatcatgaagcttccataaaaacccagcggacagggttcaaggagcctccagacagctgaacatgctgaggttcctggagggtggc

SEQ ID NO: 4112 - DNA, 239 bp, synthetic construct
  misc_feature 1..239: note = Description of artificial sequence: synthetic polynucleotide sequence
  source 1..239: mol_type = other DNA
accgagggagggcgtagaagctccacaccctgtcccccattcctcatcccacgtgtctcttcatctgtatcctttgcaatatcttttaccataaaccggtaaacataagtaagtacttccctgagttctgtgagctgctccagcaaattcactgaagccaaagagggggctctggggaccccaacttgaagcttgttggtcagcagttccaaaggcctggacttctgactggtgtggtc

SEQ ID NO: 4113 - DNA, 241 bp, synthetic construct
  misc_feature 1..241: note = Description of artificial sequence: synthetic polynucleotide sequence
  source 1..241: mol_type = other DNA
ggaggcagtcttggggactgagccctcaacctgtgggatctgacaaggtctccaggtagacagtgttggaactgaattagaggacagccagctagtgttccctgcttggtgtgtggggaaaaatacccatacattaggtcacagaagtcttctgtgttgatgattgttgtggtatgatggtagaggaaagacacagtttgagagttttccctacatgcctatctcaaaatttttgtattat

SEQ ID NO: 4114 - DNA, 121 bp, synthetic construct
  misc_feature 1..121: note = Description of artificial sequence: synthetic polynucleotide sequence
  source 1..121: mol_type = other DNA
atgttaacatgataaattgggttaaataaaatatatttaacaattaatttcatgggtttattgaaaaaatttttaaatgtggctactaacaaattaaaaattacatacgccggccaggtac

SEQ ID NO: 4115 - DNA, 360 bp, synthetic construct
  misc_feature 1..360: note = Description of artificial sequence: synthetic polynucleotide sequence
  source 1..360: mol_type = other DNA
ccagcctgggtggcagagagagactccgtctgacaaaaaaaaaaaaaaaattacatatgtggctcacacctgtggctcacatttaatttctgttgggtagtgctgttcccgaggtttaccctttgtatatgacagtcactttgtaggtgagggtgaggccaggagtccagctgtggctcaaataggacagagacacttgcagtagagggtggaaagaaagaccgctggtccaccctgctttcccctgggaatgggattcttgttatgcaagaacattaaagaagaggcaagagctccatgtggcattttcagtggaagcatattcacttctgaaacctagtttctctcctaaactccacc

SEQ ID NO: 4116 - DNA, 478 bp, synthetic construct
  misc_feature 1..478: note = Description of artificial sequence: synthetic polynucleotide sequence
  source 1..478: mol_type = other DNA
caaggcaaaatggattattgcttcctggaaatcgaaccaggggactttaaagtgtttcatattaaaaacagaaaagcccaagaaggagaaaaataattacatttctaaaagctcttagaacaaatgcttgcttgtgagaaataacttttctataaatattttattcctcttttttcctctttttgttctccagctgagaggttccacatggatataggagatgatgttccccttgggagagaggatcaaagctcccctgagctgcttgctgctgagttttactcataataatctttgtggcttctaccccaacctgcctgcagggctctgagatggagtaagctcaaaactgtggaaaaacaaagaatacggagaaaaatccattgctccttagcatccaagctggtgttccaaacagaaagatccaaggcttggctgcagagagagagagagagagagagagaaatgtttatggttt

SEQ ID NO: 4117 - DNA, 480 bp, synthetic construct
  misc_feature 1..480: note = Description of artificial sequence: synthetic polynucleotide sequence
  source 1..480: mol_type = other DNA
acctgtgggaacccagcctgggtcttaataatttataaagcctggagcccacctcaccaccctctgcatgaagctcaacacatatttgtcaaatggctggatccattcatcaacccacaaaatgagcactgtgtgagctgaggtgcctacggtgttgaacctggaaacctgaggaaatgatgataccagcaagaggaaggggaagctgaggaaggacctagtcttgggagtaggttgtaaatttgatttggcccatgaatggccttagataatatgatagtcaagatccagtgtccgtggacagcaggtggctgaaaaaagaggacttaaggttgactttgatgatcagcagcatagagtcagttctcgcctagggaaacatgatcatatttggagttttaaagagatgttgctatgtgaaatatgtccaaatggaggaactaggatggtgtagggctgagattgtggctagaacatttg

SEQ ID NO: 4118 - DNA, 121 bp, synthetic construct
  misc_feature 1..121: note = Description of artificial sequence: synthetic polynucleotide sequence
  source 1..121: mol_type = other DNA
gcttcatagagcaatgcctataaggatatattttgctgtcattgcatttgatcacctcacatgcaacaagagtagacttgtcctgtgtcactgctgatggataattctccatggatctctc

SEQ ID NO: 4119 - DNA, 359 bp, synthetic construct
  misc_feature 1..359: note = Description of artificial sequence: synthetic polynucleotide sequence
  source 1..359: mol_type = other DNA
atgtttctgtctatgttgtaagtaaggtgctgattgctctgttctggactcttttcaaaaacacgtatatagcgaacagccttggaacacagagataatatctctttccagaacaaaaggcagacatgcttactgcctaatacagaagattcaagctccctaaattcagacttctcctatattatgactcattgtgtctgtcatatccacattttcctgagagaattggggcttggggaccccacttaaatatgctgataactctggcaactgcaattactgagtaatctgaccccaggagtgttacgttttcaaccagcatccataaaattgtggccgaccgacttgataacttgcaa

SEQ ID NO: 4120 - DNA, 479 bp, synthetic construct
  misc_feature 1..479: note = Description of artificial sequence: synthetic polynucleotide sequence
  source 1..479: mol_type = other DNA
gtagggaaaaactcaggcctttcagagtttttgacagtcaccctctgagattcttgttgtggggtccatggaggagctgtaggagactctgaaaggagtctgtaattaaagtcaagtcacctgctataggcagtgagagaaaagaacagggcctgattgctttggggctatggctttcattgtggatgtgggctgagatagctgtgattcaggatacagacagacagacagaaaaaactaatgacaagtatggtaaggtgggcaatgagctaccattttttaatgcaaaataacaaaaaggaatttttgcatatgtttgcaacaaaaagaatacaaacaggcacagatatttacagatgatatagagaaagaagaagacttggctctttcttttgcctttattcagcaaattatgaagtgcaaaaagataaaaagaagaaattatagtctgtgtttgatggagagctatttggagaaca

SEQ ID NO: 4121 - DNA, 478 bp, synthetic construct
  misc_feature 1..478: note = Description of artificial sequence: synthetic polynucleotide sequence
  source 1..478: mol_type = other DNA
gcacagggctctatttttggccttgacctgttttgtaattttatcaaagacttagacaaaggtgtagaagactgtcttatcagatctgtagacgacacaaatttggagggctagataatgagacacaggtaagaattgagactcagaatgttcacatggcttggcatggagggcagagaccaagaaaatgaaattttacagaggtgtcaagacttgagtttgtgctaaaagaaatcaattgtgtaaattttcacaggcatcctagtggttcatgaaaaaaaaaaaagagctggggttaatgtcaatctcaatgtaacagacaacaatacagaacactgggtaaaacatgaatgtggctctgatccctgtcactaagatgtggcttccaggctaggaagggagtagccccaaagcacttgggacaggacagttgctgaccagggaatgatattcatttggtgtcatcttctaaagggat

SEQ ID NO: 4122 - DNA, 121 bp, synthetic construct
  misc_feature 1..121: note = Description of artificial sequence: synthetic polynucleotide sequence
  source 1..121: mol_type = other DNA
gtcgaaaaattaagtgcattcaaatgggggcaactaggataatgaaggcttgtaaatggctgggacattcagcgtgaaggagcaaaacccattgagacatattttactgtctttgcatttg

SEQ ID NO: 4123 - DNA, 361 bp, synthetic construct
  misc_feature 1..361: note = Description of artificial sequence: synthetic polynucleotide sequence
  source 1..361: mol_type = other DNA
ctgttttgacagcttcaggtgtttgtgaacctcctgttgaagatgatggcatcacaaaatagaaagaggttgggttcctcagtcacttcctggataagaggttctcaggaagagtttcccaacctacattagattatggcatgagcgtacatctctttgtcgaggtacttatatttggaggtttatttgttattgcagcctaatttagcctaccttaactaatgtacctctcttagcctcattttctacatctggacaatggggataatcacatctacttcatgaaattcctgtgagattcaagtaagatgatgacacaataatcataatagaaggcttcctacttccttagacatccttc

SEQ ID NO: 4124 - DNA, 240 bp, synthetic construct
  misc_feature 1..240: note = Description of artificial sequence: synthetic polynucleotide sequence
  source 1..240: mol_type = other DNA
tggggttacaggcatgagccaacacacccagccctctttttgtgctggttcctttgtgaaagttctgctgttggaagtgctctaggaccctaccctcacctactgtctccttccccaggaaatgtcacacaaatccatgtctatatactatccatatgctgatgactgattgaagttctgtatcgagattgagacccctactatctattcaagaggagacttagacatgagtctggcact

SEQ ID NO: 4125 - DNA, 478 bp, synthetic construct
  misc_feature 1..478: note = Description of artificial sequence: synthetic polynucleotide sequence
  source 1..478: mol_type = other DNA
caggagagatacaggatggagttatcaactgacaagagttttctcttgattctcctccactagatctgatcctcactcacctcactttctcaatccttttctaattcaataaatgacaccactatccactcagttgtttgggcaaaaatcccagcagtcatgtttgaactcaccagggcagatggcccatgctttgctaaggaaggtcccttgagagtggtgttagtaaccagagagacatatgtagcaaagtagagaagctaatcaactttaaacattaaaaaatagcacccaaaattaaatagggggagaggggtaaaaaatgtaaatttggggagtaaaagaaacaatgtcaaatttctgttacaagaaaacttgtttctgtgttttccatgtagatggtgtttgagtgttaaatcattgagggacttagattcccattgtatacatttacagtttgtatacatttgcatacagt

SEQ ID NO: 4126 - DNA, 480 bp, synthetic construct
  misc_feature 1..480: note = Description of artificial sequence: synthetic polynucleotide sequence
  source 1..480: mol_type = other DNA
tgaatagttttttgtgtatgtatctcttccaaaaagaattgctgaatggccaaattggcccagaaatggtcctgtctggcaaatcctccgttcttagtatgaggttgccagggacctgagatgccgtcctccacttggtggcagtgtgtggtgggacaccaaaaaagggtgactaaatccattgccttctccacattcttccagtaaatgtgggattgtagagggttttgagggtagagtcctggagcacttcaacagcagaactttcacaaaggaaccagcacaaaaacaaagagggctgagcgcagtggctcatgcctatgttgataggaatcacaaccagatttgttttatatcactttaaaaatgtatacaatggaagctaagtaccacaatggtttgataattgaaaactatctacataaaacatacagaaacaagttcttttttaacacttggaaatttggcactttctctcct

SEQ ID NO: 4127 - DNA, 240 bp, synthetic construct
  misc_feature 1..240: note = Description of artificial sequence: synthetic polynucleotide sequence
  source 1..240: mol_type = other DNA
caaattcacattttcacccccattttttcccagatgagattccttaatgttaacatttaaaattgattagcttttcatacttttctacagccaagattaagcttatgcatttaaatgcattttagtgaccttaaggctttactttttgttcccagattgagtaattattacaactattatttttatccaattacttgtttccttggtgctgacagaaagattaatttaaataaaatactc

SEQ ID NO: 4128 - DNA, 240 bp, synthetic construct
  misc_feature 1..240: note = Description of artificial sequence: synthetic polynucleotide sequence
  source 1..240: mol_type = other DNA
cgctgggtagtatctgcttttcagtttccaataaagtccagaggagtgcctggaggggccttccgggaaggggtcttctgatgaatcagccgatgtgccaccccaacttgacagaaggcccccttgtcagcagtttgaaagacatataccacgcttgcccatgtatgacggttcatttttaaaatttaaatgtcaatagttgctaaggatataatttccaatgcactctttaatagcata

SEQ ID NO: 4129 - DNA, 479 bp, synthetic construct
  misc_feature 1..479: note = Description of artificial sequence: synthetic polynucleotide sequence
  source 1..479: mol_type = other DNA
agaaagaaaattgttcccaaactgtctgtggcagaacttttttgtatgatgtcatttgtaaccccttccatgaagtaattatgattcctgataaaatgcttgggtaatttccggatagactttaatgggattaagaactgctgagaagtcagggtctccactcagctctctaaaccacgccaaccagtctcgagctgttcttctgttgtggtgccatttcttttttctgtttgtgtctcttccaaaaaagaatcactgaattggctggcttgctgggagcctcttctcttgaggccagtctgaaatagaattctgacacaggctaataacaagtttgtctgacaagttattttaagaattcacattttaaaaataaatttgttacatcattttcaaacgatatccattggaatcgaaataccatactggcatgatactcaataccctacatgaaaaatataggagttactttttgacac

SEQ ID NO: 4130 - DNA, 479 bp, synthetic construct
  misc_feature 1..479: note = Description of artificial sequence: synthetic polynucleotide sequence
  source 1..479: mol_type = other DNA
ttggacattttacatttctttttcttctcctcaaattcataattctgcctctcattttatcctaatataatatttcttacaactaaatttacaacttacaatttcttaaaattgatttacctcaggatcatctatggcaaatctgtaaatttttgtggccataaggttttttgtgttcctgagttgagtatacaattactattacccaactcataaaaatgcacaaatatattacagttttgacaaataattattaagtataaaatttaaattttattggaaataaatctcttaaaagagatgggactagtttattccctctctcctccatccccagaaagacacataaccataaataaaaactacataatgctagagggaactagtgttcaccagtgagtctattcttgttttttatctttacggatataagctctgaggagggctgttcatgtaacaactacatgagattggaaaga

SEQ ID NO: 4131 - DNA, 360 bp, synthetic construct
  misc_feature 1..360: note = Description of artificial sequence: synthetic polynucleotide sequence
  source 1..360: mol_type = other DNA
gttttgttatagcaacgttattcaactatttgaatttctggtatattcaaaagtcacattaaaaaatctatcggctgtcttcactagaaactctttcaactttgttgaaagcaaagaattggaaaaccagtttccaaaaagatttgctccccagtcattacagtccaatatagctccaggatttcaaatcatgcctttcagtaacccaagaattctaacactccagggccatgcccagtggtgtgtaggtaaatttactctctggggaaaaaagaaaaaggcaaagaaaagaaagccctgctttatagcttttgttcgtttacatggtataaaggcttccaccacagccaattttttttt

SEQ ID NO: 4132 - DNA, 6661 bp, synthetic construct
  misc_feature 1..6661: note = Description of artificial sequence: synthetic polynucleotide sequence
  source 1..6661: mol_type = other DNA
caaagtgctgggattacaggcgtgagccaccgcacccggccaccaaggccaattacaagccactaacctgacctcactgacacacgcttgggatgacaggcacacagtcagctctccgggccagtatgagacactcagtaccgcagggcatcacagttagattcagacagagggaggagtgtgtccctcttctgagaagtgtgacagatgattgtgaaaggggagagtgaggagagttgtctgaactcaggggtgtgctcacggaaatcggtttatgaaggagtacccatgggtgttgagaacattgattcttctaaacatcccatgcctgggtactccttgggaaggctgtgccaccatggttccaagtgcagcaatttggaggctaccgattcaaaggatggagtatggaccttggagtcagccacaccagggctcaaatactgcctctgtaatttatgattattgagaacttgggcatatagtttcaacgtcttgagtctcagttatctcctacaaaatacaagaggccaatacctaccttgaaaggtttgagagcaaaaggtagtatgcatacagtgttgtatccagcaggtgctcaacagatgaatgctactatcagagtccttttaattgagtctaagtgatgtgacttgaagggttgaggattagggtatcaggacctgaacccagtgggaaacatcagatcccttgccatttagggttcacctgctccaaagcaagtagctgctttggttccatctaaaaatgttgacttcaaaacagaactttcagcttatttccctctttttcatacacatttcatcttataaaatgcagaggctgggatctctggtctatatggaagaacacactcaacagcaacagtagctctcccagggagtagaactcaagactggtctatcttgtacctaaccaggagggttattaccaagaaacaagagtctccttctaaggtggtttcacctgtaaggcaatcccttagcctggtccctgagggcttcattagagtagggtcctggtgattttactggcttgttaagaaggcttttcaaagtcttgtgtaatgatgatgaatggcagggcaaaatcatgttaacacattataaacaattccaggcacaaccagtatctcacactgtactttatttttcttcacaatattaactagacagacaaggaaagtttaatggcaatgtgactttttccaacaacacaaacaaagtgccattatagctaatggtggccaactggagacttactttaccttaaccatgtaaagtatccttaccgtattttttatgtgtacagtgttgcagaatatcagccacctcttaaaagtatcaatcttaaaaagagccatggaaggtaaaagtatgaaaatcttgataacaaaagctttcaatacaaaaacacttattgtacacttatttttatttaaaacaaaaataaccccagtaactcaaaacaaaagcaaaccttggttgaaaacttaagaaggtataataaacaaaaccaccaaaagaaagcttccccaaaagaaatgcaatccactgtcactcttgcaaattctaccttggagggaaaaacttaatgaaatgagctatctggagggcccacggcagattttccaaaaggtttaggtgcatggatttactcagtatctacactacagtcttatttattaatagtctcagaattttcttgattgagcgagcctttccatcctccaccagtgttcccatcttctgtgctcagcttggtatgcagaacaaccttgttgttgataggatgtttgcttgaagttatttttctggggcagtccagatgaaccggtacagtaccattcatgctccatctgattttctttgcatccagtgagatgcatatttcatgattgtccaaggtcatggttgtccaaagacatggaacagaatgattcactgggtaagactaaaggacttgtattatcactctccaattcagtttcacattgcttaattttataaaatttttttctgtattgtacataataaacatttagaaacagatgtccctaccaaccagaaggttgtcattaaatatcctgttagttaaaactgcacatttattgtttaaatacccattagacatatccagcttgaaatttataccattgcactgccaaacggagctgcactttgagccatgctgatgtctctggaatctaaaggtcgtaccacaaacttcaaaatgtttctcatttgtcacacaaggttcttcgcagaggcatcacatcgaccccaatacaggtccttcatacccttagttctggttattctgaaaacttccaactccctgatccaaacttgggaatgttttacatttaaaaattcttcctccctcccacccctccaacaaatgtcctttgtcccataataatttaaaaaaaaaatccctgaaagatccaaattgaataacaataaagatctgattggaaccttcataagcttgacaatgtagaattgtatttcttaaaaagtgtgtaaccacatttgtctgggctgcaaaagacaccacagaataagatcagaatagaatttcaactgactccctaatttccttagaatggcttgtatttcgagcctttcctgtttttctctgatagagtaggtgtacattactaactataagtgataagaaagtctaaaaacagccactgccttaaaagtacagttggaattaattagagtttaagttcacatttataaactatttgttttaggataagttcaattacaaatagagactatttgcaattctgttcactcaatagatcctggaggtgaaagctagacatgtgttgggattgccctgattatttacatttaatcttgattattataactcctctcgatttataatcacttcctaatttttcccactgggccagagctacatctttagatgataagcatttactaataaaacaaagatcacatataaatggaaggccacatctgaacacagagaggtaagtgagctgtggagagaatgttggcgtcttgtttgaactaaattgaggtgcttccttaattctgtgactttattccaaatcttaagcctgccagagttttctgcccctgccaaatcttcggagacgacccgatggccatagaccctgtcagctgtcattctggcctctcttgcggagtatttgtgcagcgagggactgggagggccgaggaggttctcagatgttcttctccttttggggctttttttagagcccttgtccccaatttggaaagtgcatatactctatttaactctgaccctggccagtgtaaagaggagtacatacagaggactgttttttcattcataaagagcagttaagatgcagatgtgaatccctcttcaatacaaaatagggatggttctctgttgcccaactgcaaaataattagatataatgaaaaaaaagaagaggagaaaaaaatgactagttgaggcttttatatacattcattgcttctaacatgtttttaacaataaggaaaatgcaacatcaactactcttagagcaagtgcagccacaatactgtacagttctggggccaagaggctgggcacatttactgttattaaaaccaggtaacaaaaccccacagcaaaaggcagccagccagcaattagcccccgtgacctcttaatatatatacatttttcaaatactctgtgaatcccgtttgaacaacaacaaaagacaaaacaggctttatattaaaaacgtccacgttcttcattgttacttctaaagcagcttggaggatcttaccacgtggagcatactgcaaactgactccattaaaatgattttggcaggatagcagcacaggattggatattccatattcatcactttgacaatgtaaacctttcataaaataatattttgcttaaaaattagaatcattcaaaggtctgatcattctgttccctgaggcccgccggggaggtctggcttcataccacaggtttcctgctttcttggtggagcgtaagcaccactgcatttcaggaagaccctgaaggacagccatgagaaagcccccgcggaaggagggcaggagggctctgggtgggtctgtgttgaaacaggccacgtaaagcaactctctaaaggtcaaaccaccatagatttgaatctgctggtcatttgccatctggatttttaactgaatgaatctcatgggtttaaccaaacatgcatgtaatcctgaataccatgaattaaatgcggaattgcccagggacgaggaaaccttcaagaaacaaggtcaaagggacaacagatataactgtcacaataaacaattctgttgacgtggaaatgcacatgacttggttgaaacaaagctcctcagtggccagtgacatccaggtttttcttaggtagctgagactcagggcttatctcaccttctcagaatgcttttgaagaatcaagagataaaaatctcaaacagaaaacgatcacctttgctcacaaatagtgtataggccataactaaatacaattaaaaacaaaaaaacgctgagatgcatgtatttttttaaagcagctttcgaaatatcaaccacagcattaaacattgaacagagtacattccaaagttaatacagataaatggtatataatgcaataatgccacagagttattccatcaatgtttcaaggctgattctaaactggaagaaaaaaaaatttcctagtttatttgctgaagatgtcacttcttttgttacttctttatagttccccaccattgattttttttttaatgccccaggatgtacagataacccccatattccacacctggaactttttttttgtcaggttttcaaataaaaccaaactacagtgacaagataatgttttacatgtaattccatagacaggggtcaattaatccatgacacctcacttcaatgcttcttttaggatttgtgaccctctccaaagtcatttaaagccttgctttaaactcacaggtgggccaaggccacacagccaacgtgccatgtgctacagccaaaatgggccgtggccattgcctctcctcacgttcccagccttcaccatgtccttctgataggaagggcccagggcctctgttccttccctctacagtgatacatgtcttaagaagggtcgtggctcccatgctccacgtgaaaacgggcctacctggagggccccagggtgacaggcccagccacacccctctactgctctttcttgacagtggaattctgagctccatcagcttccagacattcggagaccacactgccctgttgatcatccctggaggaggccagtgagggccccggctcagttccaggaccaggcctccaagctgggacacaggcaggttctgcggacttcggtctcctaaaagcaggcacttgtggcggcctgatgctctgggtaactctagccttcctgatgcggaagtcaccgaaatgttcacttcctcaagttccagaggattctgtttcttactcagacagagccagtattgggagttggggggtgcgtatccaaaatatatgaatatacacaatcagggcttaaggtactggatgatattgtataaattgctaaaatgcttttctcggcacaattggtagcttaaaaaaatactttcctatgatttaagggcatttttcccatcgctgtccttcggcgtggaaatctcagtgggtactaggtccatctgaagttcccaactcttttcctcccaccaggtatgcatcatgtgagtcatatgcaaagagtctcttcttcaggccagggaggcatggacttccccccacaggaaccctccctctgttaatatcacagcccccagggcaaagaaatgcaagtgaatgaacaccttctccccagcctccagcagccagaaagccagcttccccaatgatcaggtcctttttccatccgtctgctcttcagatggtgatccggccaacaacatggaaagcgaatctatgtttacaggcacagaacatccaggtggagccacacgaagcggtgcttggcaattagtggtcggatttccaaagacaggagttttgatgggactgtcttaaataaataaatctttttttcttaataatgtaaaaaataaatgatatttccctttggcagtaaatagctgattcgacgttttgcctgaagactgttaattgttgtgtgtgtgtgtgtctgtctgtgtgtgtgatgtttatatgtgtgttattttttcttaaacagcctgcagctttgtttcatggtacatcactgacaatgcatattatttctactgctttagtgaaccttttgcatatttgtttggggcaggcatgttgacttcacttgtggcccagataggcacccagggtgatgcaagctcccaccagggccaaactgagcagagtcttcagagacagccaggagaaatcaaacagaggccgcatgctggggccgtacagttccacaaaggcatcctgcagttgggggagaggagggaagaaaaagaaagagtattagagagagagcagagaatgccaccccacagagaaagaggcatcctgccagggcagcctg

SEQ ID NO: 4133 - DNA, 3721 bp, synthetic construct
  misc_feature 1..3721: note = Description of artificial sequence: synthetic polynucleotide sequence
  source 1..3721: mol_type = other DNA
attttatttcgccggctccacagcctcccattgccccaggagcccacccgcactccaacccccgcatctcggacctgtggcctcagcccagactcacatcaccaagtgcacctacccagcctccgttatcctggatccaggtgtgcaggtgccggttcaggtactcagtcatccacagggcgatgttgtccaccaggggcgacatctcccggttgacgctctccacacacatgaccccaccgaactcaaagaaggccacaatcctcccccagttcaccccgtccctgaagagctcctccaccaccgtggcaaagcgtccccgcgcggtgaagggcgtcaggtgcagctggctggacatctcggcgaagtcgcggcggtagcggcgggagaagtcgtcgccggcctggcggagggtcaggtggaccacaggtggcaccgggctgagcgcaggccccgcggcggcgccgggggcagccggggtctgcagcggcgaggtcctggcgaccgggtcccgggatgcggctggatggggcgtgtgcccgggctgggaggagaagatgcccggtgcgggggcggcccccgggggcgcggcgcccacatctcccgcatcccactcgtagcccctctgcgacagcttataatggatgtacttcatcactatctcccggttatcgtaccctgttctcccagcgtgcgccatccttcccagaggaaaagcaacgggggccaacggcacctctcgccccagctcccaccccacggcccccagagaaagaagaggagttataatccagctattttattggatgtgctttgcattcttggacgagggggtgtcttcaatcacgcggaacacttgattctggtgtttcccccttggcatgagatgcaggaaatttttattccaattcctttcggatctttatttcatgaggcacgttattattagtaagtattgttaatatcagtctacttcctctgtgatgctgaaaggttaaagaaaaaacaaactaataagtaaaaaatcaggtgcgtttccctgtacacactgagtgaaagcagggcatacacactacaagtaacacggctaaaaagaatgtattaagctgcctggaaattaaatttactcgaatgcactttaagtaaaaaatctcaaaggtttccattgaaagttacattaaaccaatttcctgtgcagagaacttacttgtattttttaagtacagcatgatcctctgtcaagtttcctttttgtaaaaccaaaacaaatgcataaggcaacgatcccatcaatcttcagcactctccagttatagctgatttgaaacttcccaatgaatcaggagtcgcggggagagggagtaaaaattaggaggatttccagatcgattcccagacttctgcttcacagaaatgtcaatccgcaggaatcccaaccggagatctcaagagctcgagaaaaaaaaaaggcagcggcggcggcagatgaattacaattttcagtccggtattcgcagaagtcctgtgatgttttccccttctcggcaatttacacgcgcgcacacacgcgcgggcacaggcatgaatctctatccacgggaccgcttcacgcctccccaggagagagacaggggagaggggacgatgaaggagccggggacggaggcaggaatcctcttctgattaaactccgaacagcaaatgcattttccgaaaagctgctggataaatgaaggcaggacgcgcctggcccgccggtgccgagcgctagaagcccgcgctgtgtgtggtgcggcgaggggtggggagaaggaggtggtgggggagggttttattttttccctcttttcctaaaaaggatgactgctacgaagttctcccccctggaccccctcttccgctgcaccccaccggcgcaccccgcctccgggctgcgcaccctttctcctcctcctggtcctgcgcggcggcgctggctacggccgcctcccggagctcccgccgcgcagcccgctccgagcgctgacggccgccggcagggagggcccggagccccggcaccttcgctggcagcggcggcggcggcagcgcggcggggccacggagagcggcgggcgggagcgcggcgggcgggcgggcaggcggcgcggaggggcgggcgcgggaggaagggggcgggagcggggctgtggtgcctgtcctcttacttcattctctgcacagcccgaccggtttcctgtgcgtaacgtcacacggttcattcaaaaaaagaagaaagaaagagccctcctctgagccacccgaccgccccctccgccccgctccctggcccgggttaaaggcgccgcggcaggcccgggagtggcgcgtcccgccgggggcacatggcgcgcggggccgcggccggggagggcgcgtccgggccggccacccgcccgctccgctgcgcccgcggggcccggccagtgggtggcgcgggcggcacaggcctcccgcgcggccgcggcgcggtgggtgtgcgcggggccttctgctcaggcctgcggcaggccgcgtgcggacttggtggtcgctggggtccgcgacggggtgggggctcccggggaaccgcacgcggccgggccgggcggacgacggagtgcggaggggggcggctggcgggagggtgcgccatgaaaacaagggctggaaaagcgccgggaaccgcctggaccctttctggccgtgtgagtgtgtgtggagtgtgtgtgtgtgtgtgtgtgtgtgtgtgtgtctcgcctggaccttttctagccgtgtatgtgggagtgtgtgtgtcgcctggaccctttctagccgtgtatgagagtgtgtacacgcgcctacacacacacacgttgtgttaccggcgctcggccgccgggggaagacccaggccaatgccgccccccaccgcccccagcagtgggacctcagcgctgccctgctgtgaagacaggtgactctgcacgttttaagcaatgtctagggacgccccgagcgtggtgtttactttcaagtagcttcctaggtgtccgcgcactacacacgcacgcgcatccccgcccgtgtccacctgaacacctagtccgtggcccaggccatgcagaactcagcgctccagggaaggggtttatcaagggctttacgacagtttaagtcaatgttttccctctgtccctaacaccttttacactggtttagtgctacacgatgaggacttccatatagtaactttcaggcccaccgtcctaacgctggggtgggtgggctcctaaaggtctccacctttgcctcgtagccaatcctagttggccgcactttctcaaatgaggtacatagatacacacatacacattcacactcgcagacgtgtgtacgcgcaagcagacagttttaaattaatcagcatgaatagcccctagcaaaaaaggacaagaggacaaacaagttgcacgtgtgtatttttatctccaagagtctttgacaaagcaccaagaaaagaaaaaggtcttctagaagcacagcggcttacttaatagggctcgagtgcaaatatatagggacactggattattggggtcaagaaagatgacaaatgagtactacaatgtgtacaaatatgctatgactttttttttttttttgagacagagtcttgctctgttgtatcttggaggctggtgtgcagtggtgcgatctc

SEQ ID NO: 4134 - DNA, 358 bp, synthetic construct
  misc_feature 1..358: note = Description of artificial sequence: synthetic polynucleotide sequence
  source 1..358: mol_type = other DNA
cctgcctcagcctcccaaagtgctgggattacagacatgagccactgtgccctgcctgacatctttattttgtctcattcctactctaaaatcaaaacattctttaaaaagccagaaaagcacaccaaattatgatttttttaatttttacttagttggccttttttttttttttttaagagatggcttttgctatgttgcccaggctggactcgaacttctgggctcgaaggattctcccacctcagcctcatgaatagctgggactatacgcactgccatctctcttgggtgtttttattttatttcttcatttattgtatcccatcagcccaacaagccaacttctctcacatag

SEQ ID NO: 4135 - DNA, 478 bp, synthetic construct
  misc_feature 1..478: note = Description of artificial sequence: synthetic polynucleotide sequence
  source 1..478: mol_type = other DNA
gaatgggggcctgggtacaaatttcttatccaggcaagaggggatgaaaggagatcctccttcttgcccttctgatggttgggacagagtcccttttatgcgcgtgggaggtgttttggtctggatagacactgggtatagattgacctagaataaatgttctcacataaattcataccaattgcacaacagtatggtttagaaatcttgaaagcgtattttaaagccccaaaattacctaagaggaattgaaaggcttcaagctcctaatactcagcatatgagtgaggaaatgataggacaaacctgcaaaagaaactgtacttctgcaaagggggcagccagaaggaaacggatcccctacttccagagaaagaaaagctgactgattttcgtcttcctttgctcccacagagcctcactctatggattttcccagactgattccttatgtggcatcttggctataatcagtctt

SEQ ID NO: 4136 - DNA, 480 bp, synthetic construct
  misc_feature 1..480: note = Description of artificial sequence: synthetic polynucleotide sequence
  source 1..480: mol_type = other DNA
gagacaggtctgtattgcagtctttggctaggggttatattttccctgggaatgttctagatactctttcaaatgaaagagtgaaaccattcctgcgttcagattccatgtttattagattccattttaaagcataagggcaagtattcccaggaagtatgtgacattgactactcgtctttgggcaatgctgaggtgggggagggaacaccagcctgaggcaggagtaactggatttgaatcctagatctatgcctgagaccttccaacaaccttacaaacatatgcacagtggacttttcactttccaagatgttttctacttgtaagagccaatggatgacccttttggcagctttacctggttggattctacaagtagcgtggcaccaggaagagaaaaaaaacaagatgcagggaatggagattgtatcaagagtctgaatggcctgtgttttctttccgtcttcattccccagg

SEQ ID NO: 4137 - DNA, 121 bp, synthetic construct
  misc_feature 1..121: note = Description of artificial sequence: synthetic polynucleotide sequence
  source 1..121: mol_type = other DNA
aagacacatctgatttctctggaatgtcagagaccaagggagtggccctatcaaatgttatccacaaagtgtgcttagaaataactgaagatggtggggattccatagaggtgccaggagc

SEQ ID NO: 4138 - DNA, 121 bp, synthetic construct
  misc_feature 1..121: note = Description of artificial sequence: synthetic polynucleotide sequence
  source 1..121: mol_type = other DNA
gcacaattgacccttcatctgtaatggtcctggtgaatgccatatatttcaaaggacaatggcaaaataaatttcaagtaagagagacagttaaaagtccttttcagctaagtgaggtaag

SEQ ID NO: 4139 - DNA, 121 bp, synthetic construct
  misc_feature 1..121: note = Description of artificial sequence: synthetic polynucleotide sequence
  source 1..121: mol_type = other DNA
attcaacttgagcaactcggaagaaatacactctgatttccaaacacttatctcagaaatcctcaagcccaacgatgactacttacttaaaacagccaatgcgatatatggagagaaaacg

SEQ ID NO: 4140 - DNA, 121 bp, synthetic construct
  misc_feature 1..121: note = Description of artificial sequence: synthetic polynucleotide sequence
  source 1..121: mol_type = other DNA
ctgattaaattttttaaaaaatgaattgaggccaaacacaagtcttaatatgtcccaatggctcttcctagtaattgcatttataaaatgctaagaaaatgtttgttgtattaaatttgag

SEQ ID NO: 4141 - DNA, 121 bp, synthetic construct
  misc_feature 1..121: note = Description of artificial sequence: synthetic polynucleotide sequence
  source 1..121: mol_type = other DNA
tgcaagccctttgaaaacttctcccctgtatttctggaaaacctataaggctgtctaatatctgttcatttaaacagtgtctaccatccgtgtagaatctaccattttctttctcacatta

SEQ ID NO: 4142 - DNA, 121 bp, synthetic construct
  misc_feature 1..121: note = Description of artificial sequence: synthetic polynucleotide sequence
  source 1..121: mol_type = other DNA
gttgatgcaaatatttttgctaagtctcctatgttgaatcaaaggtattctagaagtccagagtttgcatgctgatgtgctgattattgtctcttgtaaaaagaaacatctactttagagg

SEQ ID NO: 4143 - DNA, 121 bp, synthetic construct
  misc_feature 1..121: note = Description of artificial sequence: synthetic polynucleotide sequence
  source 1..121: mol_type = other DNA
atctcttgaaatagataaaataaaccacaaagtaatgagaggattatgcaactgattcacgtgttgactaggcttattaatttatgctagacttgaattcactgtttttcctttataagtg

SEQ ID NO: 4144 - DNA, 121 bp, synthetic construct
  misc_feature 1..121: note = Description of artificial sequence: synthetic polynucleotide sequence
  source 1..121: mol_type = other DNA
tcagataactcaaatagggcactccagcattgagggaattattatagataggacaaaaaaagatggctgggcaaggtggctcatgcctgtaatcccagcactttggaaggccgaggcgggt

SEQ ID NO: 4145 - DNA, 121 bp, synthetic construct
  misc_feature 1..121: note = Description of artificial sequence: synthetic polynucleotide sequence
  source 1..121: mol_type = other DNA
aagaatttcaatctattttattgggcaatatattgataataacattgagttatatgttacgtctacactggcaagaatttgaaatgacagttgtgctcagagggtaacaaacccttgggag

SEQ ID NO: 4146 - DNA, 121 bp, synthetic construct
  misc_feature 1..121: note = Description of artificial sequence: synthetic polynucleotide sequence
  source 1..121: mol_type = other DNA
agtatttcagtgagggcagaaataaatagagacagagattaaataagtttgatcatgacctaaataactgtggaatctaagtaaatagtgtgtaagtgtttaacaaactactctagtttca

SEQ ID NO: 4147 - DNA, 121 bp, synthetic construct
  misc_feature 1..121: note = Description of artificial sequence: synthetic polynucleotide sequence
  source 1..121: mol_type = other DNA
tgtattttagcagtacttcacctaggtcatgatcacaagtgctaatgttaaccaccttgcaggcaaacatgattaaccaaagcatgtgtttatagatattaattttcaaatcccatcttga

SEQ ID NO: 4148 - DNA, 121 bp, synthetic construct
  misc_feature 1..121: note = Description of artificial sequence: synthetic polynucleotide sequence
  source 1..121: mol_type = other DNA
attgtaaaatcttgagaagaaagtaggtgggcctaagaagcccagaaaaactcactcatgagaagaaaatttggtaaggaaacttactgagagttgtatatgcctaaacaacataagctta

SEQ ID NO: 4149 - DNA, 121 bp, synthetic construct
  misc_feature 1..121: note = Description of artificial sequence: synthetic polynucleotide sequence
  source 1..121: mol_type = other DNA
cgctttctgagcttgggtccgttcagtgacacgacaactgtgaagataattgtggaagatgtagatgagccccctgtgttctcttcacccttgtaccctatggaggtgtcggaagctaccc

SEQ ID NO: 4150 - DNA, 121 bp, synthetic construct
  misc_feature 1..121: note = Description of artificial sequence: synthetic polynucleotide sequence
  source 1..121: mol_type = other DNA
aaaaaatatgtcaggagaaaatcagtaggcaattaaaattacatgcagtaatgagattccttggaagatgatgtacaataatgaagaaattgtgagatattttgtacatggagtacaacgt

SEQ ID NO: 4151 - DNA, 121 bp, synthetic construct
  misc_feature 1..121: note = Description of artificial sequence: synthetic polynucleotide sequence
  source 1..121: mol_type = other DNA
ataatttttcctttaccttatagatgactttctggaatgcctcagactattctaatcctaaaaacttcaccaatgagacataccttatgtcttcatacagtttttaatgccctctctctgg

SEQ ID NO: 4152 - DNA, 121 bp, synthetic construct
  misc_feature 1..121: note = Description of artificial sequence: synthetic polynucleotide sequence
  source 1..121: mol_type = other DNA
gaccttacagacatacctgataggagatttcctattgtctgggtctgtggcagacaccacgcctacaaatgatccctgtggggtttcttcaaaaacttcaaatacataatatggaaggagg

SEQ ID NO: 4153 - DNA, 121 bp, synthetic construct
  misc_feature 1..121: note = Description of artificial sequence: synthetic polynucleotide sequence
  source 1..121: mol_type = other DNA
ataattatagtaccatttccaaatagcaggccaccaaatctagaagcctctatgcccacattcctatggcttctaattccaccatttgaatatctccaattttctcaactgttgcatttat

SEQ ID NO: 4154 - DNA, 121 bp, synthetic construct
  misc_feature 1..121: note = Description of artificial sequence: synthetic polynucleotide sequence
  source 1..121: mol_type = other DNA
gataacagtcggtgaaagtggactaaaaataagcagcacctactctcttgctctggtagaaagtattaacatactgtgtgggtctacacagtctcattgcttcaaatgccatctgcatgct

SEQ ID NO: 4155 - DNA, 121 bp, synthetic construct
  misc_feature 1..121: note = Description of artificial sequence: synthetic polynucleotide sequence
  source 1..121: mol_type = other DNA
cctctgctgttattgaccctgctattcttcctctgatcatgtacgactacacctttccagtctctgttctcccctcagagtcctgctgatttgtgtgctctcgctatgattttctaagctg

SEQ ID NO: 4156 - DNA, 121 bp, synthetic construct
  misc_feature 1..121: note = Description of artificial sequence: synthetic polynucleotide sequence
  source 1..121: mol_type = other DNA
acttcagggtattttggacacacaacttccatcatcttagatctcctttgccttttgtatgtatttctgcattatttttgcctgagatccctgaagaggaggatcatattggtctaattag

SEQ ID NO: 4157 - DNA, 121 bp, synthetic construct
  misc_feature 1..121: note = Description of artificial sequence: synthetic polynucleotide sequence
  source 1..121: mol_type = other DNA
gcagctggagacattgatatatggcccataaaagacatatgcaattcttgtgattgtgggttccatctgaaaagtaacattaacaaattgagtccatcgttttttaaattcagcagcttgc

SEQ ID NO: 4158 - DNA, 121 bp, synthetic construct
  misc_feature 1..121: note = Description of artificial sequence: synthetic polynucleotide sequence
  source 1..121: mol_type = other DNA
ggaatatatagccatatgggtgtctaattgtagggaaatctgaataatgtagtctagctgaaggagaaagcattcaagaagaaagagaaatttctttggtggagagcaatctccaaagata

SEQ ID NO: 4159 - DNA, 121 bp, synthetic construct
  misc_feature 1..121: note = Description of artificial sequence: synthetic polynucleotide sequence
  source 1..121: mol_type = other DNA
attattattcacatttttttatgttttctagacttctttattaaatatattaaccatcatagaatttctccaaagtcagctgggctttgttttgttttatattttcatagtcacttttgta

SEQ ID NO: 4160 - DNA, 121 bp, synthetic construct
  misc_feature 1..121: note = Description of artificial sequence: synthetic polynucleotide sequence
  source 1..121: mol_type = other DNA
ttttattttgcctttagttttacagactttgctcatttctgaagttacttaggtgagcgttttcttctccccaattccttcagtgatattctttcatacatttataatggagtcagatcct

SEQ ID NO: 4161 - DNA, 121 bp, synthetic construct
  misc_feature 1..121: note = Description of artificial sequence: synthetic polynucleotide sequence
  source 1..121: mol_type = other DNA
caggaacaacttcacccatcaaatatttagaactggctggagctgcttccatgtaccaccagaacctaagccacactgttgaactgtactcattagaaatatgccactgcatccccccaga

SEQ ID NO: 4162 - DNA, 121 bp, synthetic construct
  misc_feature 1..121: note = Description of artificial sequence: synthetic polynucleotide sequence
  source 1..121: mol_type = other DNA
tttaatctattatctatctttagcacattttgtagaaatttcactctaattctttcacattcactatctcttcacctctactcagagtacatcctgcttatgcaaagatttatttatatat

SEQ ID NO: 4163 - DNA, 121 bp, synthetic construct
  misc_feature 1..121: note = Description of artificial sequence: synthetic polynucleotide sequence
  source 1..121: mol_type = other DNA
tgcactgccaactggagagaaaaatggagtaaagttcgagctgaaaggaacagtgccagggaggaaggaagacaactcagaataaaactagagatggcgatgaaagaattgagtacactga

SEQ ID NO: 4164 - DNA, 121 bp, synthetic construct
  misc_feature 1..121: note = Description of artificial sequence: synthetic polynucleotide sequence
  source 1..121: mol_type = other DNA
aacccaagacttaattcttcagcttaacatacaaaaattatggcaactgaaaatgcatgtcatacttattttaaattattttaacagctttattaaaatataattaatacaccatacattt

SEQ ID NO: 4165 - DNA, 121 bp, synthetic construct
  misc_feature 1..121: note = Description of artificial sequence: synthetic polynucleotide sequence
  source 1..121: mol_type = other DNA
actctgtcaaaaaaaaaaagaaaagcacaaaaatatactgagttcttatttcttatttcgaaatgtgcatagagtagagtttgagaaacaattcgtttggcaaacagtacgtggttctgtt

SEQ ID NO: 4166 - DNA, 121 bp, synthetic construct
  misc_feature 1..121: note = Description of artificial sequence: synthetic polynucleotide sequence
  source 1..121: mol_type = other DNA
attccacccttaccccagaggaggttggcgtatctctgaggatgccgattggtgtgccatcctagactaggacatgataccctttttctatataatctacagtaattctaaggctcctatt

SEQ ID NO: 4167 - DNA, 121 bp, synthetic construct
  misc_feature 1..121: note = Description of artificial sequence: synthetic polynucleotide sequence
  source 1..121: mol_type = other DNA
gaggccgaggagtggtgcaagcacctctgcatggagtgtctggggaccaggctcaatgatatcagccttggggagcccgaccttctggccgcaggagtgcagcgggaacagaatggtaggt

SEQ ID NO: 4168 - DNA, 121 bp, synthetic construct
  misc_feature 1..121: note = Description of artificial sequence: synthetic polynucleotide sequence
  source 1..121: mol_type = other DNA
tggatagttgacataaatatcctctcttgtatcatccatggattgattggtaggttgactggtagagatgggacttctatagttattgggtgcctagaaagacaaacagcagagagtgtca

SEQ ID NO: 4169 - DNA, 121 bp, synthetic construct
  misc_feature 1..121: note = Description of artificial sequence: synthetic polynucleotide sequence
  source 1..121: mol_type = other DNA
atgcaagtatcttcttaccaatcgccgctgtccagtgcttggccagggccacggtaacaaacgggagtgtgatggcaccagctttcctcaggagcatggccagaagattaaataaatgtgt

SEQ ID NO: 4170 - DNA, 121 bp, synthetic construct
  misc_feature 1..121: note = Description of artificial sequence: synthetic polynucleotide sequence
  source 1..121: mol_type = other DNA
ttcttaaatacatgcacagctgctgcaggcaggacaccgactgtaatgccaggcgatgctttccatctccaaaggccagtttcaacagagataaaaggctctgaaatcaagaagagccgtg

SEQ ID NO: 4171 - DNA, 343 bp, synthetic construct
  misc_feature 1..343: note = Description of artificial sequence: synthetic polynucleotide sequence
  source 1..343: mol_type = other DNA
aatgaagaaaattagtcttaaaaccttacggaaatcttttaacttgaataaaagtaaagaagaaactgatttcatggtagtacaacaaccatcgctagccagtgactttggaaaagatgattccttatttggtagctgctatggtaaagatatggccagctgcgatatcaacggtgaagatgaaaaaggcggaaaaaacagatcaaaaagcgagagcctgatgggtacgctaaaaaggcggctttctgcaaaacagaagtcaaaaggcaaggcgggcacaccctctgggagctctgccgacgaggacaccttctcctcctcctcagcacccatagtctttaaa

SEQ ID NO: 4172 - DNA, 458 bp, synthetic construct
  misc_feature 1..458: note = Description of artificial sequence: synthetic polynucleotide sequence
  source 1..458: mol_type = other DNA
gacgtgagagctcagaggccgataaggtccacgtcgctccgcagccatcactacagtcccgcgccgtggcctctgcggcccacaaactccgaggagacctgcatcaagatggaggtgagagtcaaggccttggttcactcttccagcccgagtccagccctgaatggcgtccggaaggatttccacgacctccagtctgagaccacgtgccaggagcaagccaattcactgaagagctcggcttctcataatggagacctgcatcttcacctggatgaacatgtgcctgtcgttattggacttatgcctcaggactacattcagtatactgtgcctttagatgaggggatgtatcctttggaaggatcacggagctattgtctggacagctcttctcccatggaagtctctgcggttcctcctcaagtgggagggcgcgctttccccgaggatgagag

SEQ ID NO: 4173 - DNA, 458 bp, synthetic construct
  misc_feature 1..458: note = Description of artificial sequence: synthetic polynucleotide sequence
  source 1..458: mol_type = other DNA
tcaggtagaccaggacctagttgtcgccccagagatcttcgtggatcagtccgtgaatggcttgttgattggcaccacgggagtcatgttgcagagcccgagagcgggtcacgatgatgtccctccactctcaccattgctacctccaatgcagaataatcaaatccaaaggaacttcagtggactcactggcacagaagcccacgtggctgaaagtatgcgctgtcatttgaattttgatccgaactctgctcctggggttgcaagagtttatgactcagtgcaaagtagtggtcccatggttgtgacaagccttacagaggagctgaaaaaacttgcaaagcaaggatggtactggggaccaatcacacgttgggaggcagaagggaagctagcaaacgtgccagatggttcttttcttgttcgggacagttctgacgaccgttaccttttaagct

SEQ ID NO: 4174 - DNA, 350 bp, synthetic construct
  misc_feature 1..350: note = Description of artificial sequence: synthetic polynucleotide sequence
  source 1..350: mol_type = other DNA
tgagctttcgctcccatggtaaaacacttcacactagaattgagcactcaaatggtaggtttagcttttatgaacagccagatgtggaaggacatacgtccatagttgatctaattgagcattcaatcagggactctgaaaatggagctttttgttattcaaggtctcggctgcctggatctgcaacttaccccgtcagactgaccaacccagtgtcccggttcatgcaggtgcgctcgttgcagtacctgtgtcgttttgttatacgtcagtataccagaatagacttaattcagaaactgcctttgccaaacaaaatgaaggattatttacaggagaagcactactga

SEQ ID NO: 4175 - DNA, 121 bp, synthetic construct
  misc_feature 1..121: note = Description of artificial sequence: synthetic polynucleotide sequence
  source 1..121: mol_type = other DNA
gttacataggtaaacttgtgtcacgggagtttgttgtacagattatttaatcacccagatgttaagcctagtacctaatagtcatcttttctgctcccttccctcctccaccctccacctt

SEQ ID NO: 4176 - DNA, 121 bp, synthetic construct
  misc_feature 1..121: note = Description of artificial sequence: synthetic polynucleotide sequence
  source 1..121: mol_type = other DNA
aaatagagaatcctggttcaaatttgtcactcatctgaggatatgacatcaccacacagccgactttagaaaagtaatcttaaagacttgggaggccactcagaactgcatcagtgttaca

SEQ ID NO: 4177 - DNA, 121 bp, synthetic construct
  misc_feature 1..121: note = Description of artificial sequence: synthetic polynucleotide sequence
  source 1..121: mol_type = other DNA
ctcagatgatttaacacccccactgtgggccatcctcacagatcaaaagcagtggcaagagttccacattcacttctctgaggttaaattggtgttgatagggaagcatgctttctcttaa

SEQ ID NO: 4178 - DNA, 121 bp, synthetic construct
  misc_feature 1..121: note = Description of artificial sequence: synthetic polynucleotide sequence
  source 1..121: mol_type = other DNA
atgacagcttaatctcattttctctattccatggagaaatgctgccttccatccatattctgtgtctgtctcatgttcaataaaatcaaatgtggtattgcttggtgtcactgagccatgt

SEQ ID NO: 4179 - DNA, 121 bp, synthetic construct
  misc_feature 1..121: note = Description of artificial sequence: synthetic polynucleotide sequence
  source 1..121: mol_type = other DNA
ctcatagagaaggtacatctgaattattgataggttcactcattcaagagttggccagggcgactgtggttccagcctccgctgggtcctgcctcgtcctccactgccagttgttctccat

SEQ ID NO: 4180 - DNA, 121 bp, synthetic construct
  misc_feature 1..121: note = Description of artificial sequence: synthetic polynucleotide sequence
  source 1..121: mol_type = other DNA
tctaacttcctgggctcctaaacaatgcctgggcccacccacctagcttcctagacagcgtatctaatcacaagcctataatgctctccaaactgttttcttgtgttttctaaatatacta

SEQ ID NO: 4181 - DNA, 121 bp, synthetic construct
  misc_feature 1..121: note = Description of artificial sequence: synthetic polynucleotide sequence
  source 1..121: mol_type = other DNA
ttgtactacagaaatagtatgcagaaaacaatgaaaaactcttctaaattaaaagcgacaggtgacaattaagataaattttcaaaatactccctggcattttcagaaattctcaggatca

SEQ ID NO: 4182 - DNA, 121 bp, synthetic construct
  misc_feature 1..121: note = Description of artificial sequence: synthetic polynucleotide sequence
  source 1..121: mol_type = other DNA
actgtaatctccaggttaaatttatctgatagaattctgaattatttctctgtgttgtcatgtatttctttgaatttcttcaaaacatctatttcaagttctctgtctgaaagaaaacata

SEQ ID NO: 4183 - DNA, 121 bp, synthetic construct
  misc_feature 1..121: note = Description of artificial sequence: synthetic polynucleotide sequence
  source 1..121: mol_type = other DNA
taatatcttagagaaatcttaggtgagcttcctttttcaatctgttctttttatgtttgacaactaagaggattatttccttatgcccggattataaaacaaaaatcagcagtagcatttc

SEQ ID NO: 4184 - DNA, 121 bp, synthetic construct
  misc_feature 1..121: note = Description of artificial sequence: synthetic polynucleotide sequence
  source 1..121: mol_type = other DNA
atattaaagacaacagcctgactgagaccactcaaccagcattcacaatggtgtataggaaaatctccatgcaaagcaaacaaacaaacatacaaaagtccatccatatatatatatatat

SEQ ID NO: 4185 - DNA, 121 bp, synthetic construct
  misc_feature 1..121: note = Description of artificial sequence: synthetic polynucleotide sequence
  source 1..121: mol_type = other DNA
gcgggcagtagcagcaacagcagggccagcgccacccccaggcaggatccgcagccgcccggctcgcgcagcgccccccggcgcccgggcatcatcagccgcagcccgagtggcccccggc

SEQ ID NO: 4186 - DNA, 121 bp, synthetic construct
  misc_feature 1..121: note = Description of artificial sequence: synthetic polynucleotide sequence
  source 1..121: mol_type = other DNA
acaggagtcacactgtatctaaactacccttagggaatggctctgccagcatctctgaatgaagagaggggccagaaggtaaaaaggaggaaaaggagaggcaaacaatgagaacagctcc

SEQ ID NO: 4187 - DNA, 121 bp, synthetic construct
  misc_feature 1..121: note = Description of artificial sequence: synthetic polynucleotide sequence
  source 1..121: mol_type = other DNA
acttaatgtttctacgtgaagaatatattctattatcaaacccattaagtctttaagccctgaatcaccctaatattgtaaacttttcacaaggccatacatttatttgattattcagatt

SEQ ID NO: 4188 - DNA, 121 bp, synthetic construct
  misc_feature 1..121: note = Description of artificial sequence: synthetic polynucleotide sequence
  source 1..121: mol_type = other DNA
ggtcaggcactcagcctctaggaggggcaggaataattttttaaatggtgaaaaatcttctgcaatgagaatctgctttgtggggtcgcctactgggacccaacagaaacctcatatggag

SEQ ID NO: 4189 - DNA, 121 bp, synthetic construct
  misc_feature 1..121: note = Description of artificial sequence: synthetic polynucleotide sequence
  source 1..121: mol_type = other DNA
tcaagtttgttcaggtgagtgctggtgaaagaaattatatgggatcaattctgaatttgttaagggaaaagtctctctctttgactctgtgtgtgtttgtgggtatgtataggcatatata

SEQ ID NO: 4190 - DNA, 121 bp, synthetic construct
  misc_feature 1..121: note = Description of artificial sequence: synthetic polynucleotide sequence
  source 1..121: mol_type = other DNA
attggctaggtgcctgagacaagccctctttctagcacggcagtgtttaatgaacacagcgtcggtaccttctgccatacttttctcactatacttcattctttttaaaatatttgttttg

SEQ ID NO: 4191 - DNA, 121 bp, synthetic construct
  misc_feature 1..121: note = Description of artificial sequence: synthetic polynucleotide sequence
  source 1..121: mol_type = other DNA
atcctgtctgagatatcaaccctccactctagctttcaccctgaaagccaacctctgatcctatctgctcagccagggcacagccaggccacccacagttaatcctcagaggtcagaggag

SEQ ID NO: 4192 - DNA, 121 bp, synthetic construct
  misc_feature 1..121: note = Description of artificial sequence: synthetic polynucleotide sequence
  source 1..121: mol_type = other DNA
aatcttatcctagaagaactattatcattgaagataatcgatcccaagatgattaaaatagggtttctgatggatgttgaatggcgtggactcgctactccgttcttcacagctgccttcc

SEQ ID NO: 4193 - DNA, 121 bp, synthetic construct
  misc_feature 1..121: note = Description of artificial sequence: synthetic polynucleotide sequence
  source 1..121: mol_type = other DNA
ggccagagagtggctacttctctgcctcctgcagctccctcagtgtggcttggaggagttggcgaagcttccagaacacgctggaggctgctctccgggtgttcccactggggaccccagg

SEQ ID NO: 4194 - DNA, 121 bp, synthetic construct
  misc_feature 1..121: note = Description of artificial sequence: synthetic polynucleotide sequence
  source 1..121: mol_type = other DNA
gggccacctttaaatgtgtcaagtgcacagagccctttgattctgaacagaatttatttttacatattaaaggacagcatgaggaattgctgcgggaggtgaataagtatatagtggaaga

SEQ ID NO: 4195 - DNA, 121 bp, synthetic construct
  misc_feature 1..121: note = Description of artificial sequence: synthetic polynucleotide sequence
  source 1..121: mol_type = other DNA
atttttgtaggaaagtagaaagataattaaggaggaagcaaatcttttcatgagaaagtataggataggtttcacagcgttgtcctgagaaggagaattgcttgatattggaatagattgc

SEQ ID NO: 4196 - DNA, 121 bp, synthetic construct
  misc_feature 1..121: note = Description of artificial sequence: synthetic polynucleotide sequence
  source 1..121: mol_type = other DNA
cagggcgagcacatggatctggtggagtccgacggggagatctcgcagatcatcgtgacggaggagctggtccaggccatggtgcaggagtccagtggcggcttctccgagggcaccacgc

SEQ ID NO: 4197 - DNA, 121 bp, synthetic construct
  misc_feature 1..121: note = Description of artificial sequence: synthetic polynucleotide sequence
  source 1..121: mol_type = other DNA
gcccatttcaaaggctcttcctctcgagaagagaaggaggatccgcagtgtcccgacagcgtctcgtacccccaggacagcctggcacagatcaaagctgtgtatgcaaacttgttctccg

SEQ ID NO: 4198 - DNA, 121 bp, synthetic construct
  misc_feature 1..121: note = Description of artificial sequence: synthetic polynucleotide sequence
  source 1..121: mol_type = other DNA
tattaattttcattggaagccctgccattttgtgaacttataagaaataaacagaagtattgttagcctcaggatgtatctcttttctttaagaaaaaagaaacccattgataaatgtctc

SEQ ID NO: 4199 - DNA, 121 bp, synthetic construct
  misc_feature 1..121: note = Description of artificial sequence: synthetic polynucleotide sequence
  source 1..121: mol_type = other DNA
tcattactgtgtcttctaatccatgaacatagtatacttctccatttatttaggtctctccagattctgttcaggcacactctcttcttttttaggtagcatatttactcagcagtacttc

SEQ ID NO: 4200 - DNA, 121 bp, synthetic construct
  misc_feature 1..121: note = Description of artificial sequence: synthetic polynucleotide sequence
  source 1..121: mol_type = other DNA
ctcctctgcatctggtcaactgatccttatattgctgagtgaccagatgctgcttagactggggggccacaagctttgttctgtaaagggcagagtaaatatttcagattttgcaggccaa

SEQ ID NO: 4201 - DNA, 121 bp, synthetic construct
  misc_feature 1..121: note = Description of artificial sequence: synthetic polynucleotide sequence
  source 1..121: mol_type = other DNA
cagcggccacacgtggccacagaaatgagggagagacaggagagtgaggaattctccccaatgctggtgtgaaagtgggagacacctgagccagcaaacaaacgggtaggtttcataaagc

SEQ ID NO: 4202 - DNA, 121 bp, synthetic construct
  misc_feature 1..121: note = Description of artificial sequence: synthetic polynucleotide sequence
  source 1..121: mol_type = other DNA
ctgatgcttttgtaaccattgggctgaatccacgggggagccacggagttgcagctgacgcggtgccagatgcgtttgtgcatccacaggacctcggggtagtaggtcttgtggctgcagt

SEQ ID NO: 4203 - DNA, 121 bp, synthetic construct
  misc_feature 1..121: note = Description of artificial sequence: synthetic polynucleotide sequence
  source 1..121: mol_type = other DNA
tgctgaggaattttcaaaggagatttcttcctaaggacaggtcttcacgggggagctgcgtttagatcctcaagtagctgaaggccaggacacagccagctagggctggggcagccggagt

SEQ ID NO: 4204 - DNA, 121 bp, synthetic construct
  misc_feature 1..121: note = Description of artificial sequence: synthetic polynucleotide sequence
  source 1..121: mol_type = other DNA
ggaagcctgaaaaggaaaggaacggattctctcttagaggttccagaaggcaacacgaccaggcaacaccttgattttaacccagagaagctcattccagacttctgacctttgaaactgt

SEQ ID NO: 4205 - DNA, 121 bp, synthetic construct
  misc_feature 1..121: note = Description of artificial sequence: synthetic polynucleotide sequence
  source 1..121: mol_type = other DNA
gttttctttgtctgcataacaggagctctgcaggagtctgcaggtcacccggagcaggacggggaggagctgagccggaccctccacctggaggaggtggtgcaggaggccgccggcgagt

SEQ ID NO: 4206 - DNA, 121 bp, synthetic construct
  misc_feature 1..121: note = Description of artificial sequence: synthetic polynucleotide sequence
  source 1..121: mol_type = other DNA
ggcatcggcgtggagaacttcgtcacgctggtggtgttcggcctgatcttcgcgctgggtgtgctgggcaacagcctagtgatcaccgtgctggcgcgcagcaagccgggcaagccgcgga

SEQ ID NO: 4207 - DNA, 121 bp, synthetic construct
  misc_feature 1..121: note = Description of artificial sequence: synthetic polynucleotide sequence
  source 1..121: mol_type = other DNA
ctttcagatggctgagaattgagttcaattcattcccatagtttatcattcccacagattttatggtccagcgtagacagcatgcatgccagagatatgatggagtgtggtctaaatgtaa

SEQ ID NO: 4208 - DNA, 121 bp, synthetic construct
  misc_feature 1..121: note = Description of artificial sequence: synthetic polynucleotide sequence
  source 1..121: mol_type = other DNA
aatgtctttaagtagttgccgtaagcttgtgaggctgtgctgggagtgcctcagcttttcgtggactggtcctggtgcagctgtggtatgcagaggggaccactgaccagccagttgaact

SEQ ID NO: 4209 - DNA, 121 bp, synthetic construct
  misc_feature 1..121: note = Description of artificial sequence: synthetic polynucleotide sequence
  source 1..121: mol_type = other DNA
actacttctggcggtgggaagtgagcaaaagtaaatacaaaggcatactttattaagtgcatgagcaatcctttttattagaacacatggaaaacaaagatgataaaaggatttttcactc

SEQ ID NO: 4210 - DNA, 121 bp, synthetic construct
  misc_feature 1..121: note = Description of artificial sequence: synthetic polynucleotide sequence
  source 1..121: mol_type = other DNA
ctctggtaagcttttaccaggtcctgatagccctgcccgtgctgccttctcctcagcaacgtcagcttgtttgtaggacccacgcagctctgagtggcataggtgagtgaaagggacagaa

SEQ ID NO: 4211 - DNA, 121 bp, synthetic construct
  misc_feature 1..121: note = Description of artificial sequence: synthetic polynucleotide sequence
  source 1..121: mol_type = other DNA
aatagaacctgaagaaatctgaccaaatatttaagattcagggaaatactcaaattcgtttcagcaccatccatcatttattctcggtgctctactcttatccttgaagttcttggtgctg

SEQ ID NO: 4212 - DNA, 121 bp, synthetic construct
  misc_feature 1..121: note = Description of artificial sequence: synthetic polynucleotide sequence
  source 1..121: mol_type = other DNA
tttctccatgcacagcccactcttaaggaatgggaagttaatgctccaattttgaggacagaatgtaatatctgcataaactattggaattcccgtacacggaagatttgcattttctccc

SEQ ID NO: 4213 - DNA, 121 bp, synthetic construct
  misc_feature 1..121: note = Description of artificial sequence: synthetic polynucleotide sequence
  source 1..121: mol_type = other DNA
tgtgtggtgaggcgttttacacactaagtggcaagtccatgtctctagggcttactggtgtagacacgggcaaggtcagggcagtcccaggacccctctgctgctcctctcaagcatgtgc

SEQ ID NO: 4214 - DNA, 121 bp, synthetic construct
  misc_feature 1..121: note = Description of artificial sequence: synthetic polynucleotide sequence
  source 1..121: mol_type = other DNA
acttccccatccgtgaagtgctcatgtctgtgctgaactcaggccaccttccatgggatcgcagcagtgtttccaagctcatcacgtccttgtctgtaaccgacacttttctgtgaatctg

SEQ ID NO: 4215 - DNA, 121 bp, synthetic construct
  misc_feature 1..121: note = Description of artificial sequence: synthetic polynucleotide sequence
  source 1..121: mol_type = other DNA
cgagcccccggcggcttggtgaccgtgatccagtcccgggcagcgtcctgacatagtcgtacttcactaacggtttgagccaccaggtactgtgacacacgccatctctcggggaaaggga

SEQ ID NO: 4216 - DNA, 121 bp, synthetic construct
  misc_feature 1..121: note = Description of artificial sequence: synthetic polynucleotide sequence
  source 1..121: mol_type = other DNA
tggacagcaagcccgtgctgcccaccgtgcccacgtccgtggggctgcaactgccgcccactgtccctggcgcgcacggctacgccgactctcccagcgccaccccagccagccgctcccc

SEQ ID NO: 4217 - DNA, 121 bp, synthetic construct
  misc_feature 1..121: note = Description of artificial sequence: synthetic polynucleotide sequence
  source 1..121: mol_type = other DNA
tcttttgtttcatacagttgctgtggttggctgataaatatttgtcgaagaaagaaagagctgaaagctcgcacagtatggcttggatgtcctgaaaagtgtgaagaaaaacatcccagga

SEQ ID NO: 4218 - DNA, 121 bp, synthetic construct
  misc_feature 1..121: note = Description of artificial sequence: synthetic polynucleotide sequence
  source 1..121: mol_type = other DNA
tctctttgctctatctttaattatgtgacgtttcatattctaaagatgcagtctcaagctggtggaaacaatactggttcaactccactaagaaaagcccaatcttcagctcccaaagtta

SEQ ID NO: 4219 - DNA, 121 bp, synthetic construct
  misc_feature 1..121: note = Description of artificial sequence: synthetic polynucleotide sequence
  source 1..121: mol_type = other DNA
tgattgtgcctcctgtgtgcccttctcctgtagaattctctggtggttgagatcccgccatttcggaatcagaggataaccagccccgttcacgtcagtttctacgtctgcaacgggaaga

SEQ ID NO: 4220 - DNA, 121 bp, synthetic construct
  misc_feature 1..121: note = Description of artificial sequence: synthetic polynucleotide sequence
  source 1..121: mol_type = other DNA
gtctggaagtttgcccccaatctgataactgtgaagaaatatgtatacttccagggcacgggtgatatgaatgcgccccctgggtcccgagaatctcagacgagaaagaaaggtgggtaac

SEQ ID NO: 4221 - DNA, 121 bp, synthetic construct
  misc_feature 1..121: note = Description of artificial sequence: synthetic polynucleotide sequence
  source 1..121: mol_type = other DNA
gcggcaccacagagccgaccacaagctccagtctgtgtgggatcgatcatgaggcgctcaacaagcagattatggagtacaaaaggaggaaagataaagggctcgggggcctggtgtggca

SEQ ID NO: 4222 - DNA, 121 bp, synthetic construct
  misc_feature 1..121: note = Description of artificial sequence: synthetic polynucleotide sequence
  source 1..121: mol_type = other DNA
ccggtgctctccgccaggcccccgggtaccatgcgcgagatgaagatgccgggcaccttctccagcccgtgcggggtcacgcgcacgctggcgccatcgcggatgtagaagcccagcggct

SEQ ID NO: 4223 - DNA, 121 bp, synthetic construct
  misc_feature 1..121: note = Description of artificial sequence: synthetic polynucleotide sequence
  source 1..121: mol_type = other DNA
cgagcgaggaggcccgggagcgccgagcgtcgccgccgccgccgccatgaacaactcgggcgccgacgagatcgggtgaggacgagcggcgcgggcctgcgtctccgccccgagcccggcc

SEQ ID NO: 4224 - DNA, 121 bp, synthetic construct
  misc_feature 1..121: note = Description of artificial sequence: synthetic polynucleotide sequence
  source 1..121: mol_type = other DNA
gcgctgtcttgatcctgaatgttttctcattgaatcgcaggaagctcttcgtgggcggtcttgactggagcacgacccaaggtaggtggggaaggggtgtcaggtgggtactgcagatggg

SEQ ID NO: 4225 - DNA, 168 bp, synthetic construct
  misc_feature 1..168: note = Description of artificial sequence: synthetic polynucleotide sequence
  source 1..168: mol_type = other DNA
gagactctgcgcagctacttttcccaatatggagaagtcgtagattgtgttatcatgaaagataaaaccaccaaccagtctcgaggctttgggtttgtcaaatttaaagacccaaactgtgtggggacggtgctggccagcagaccgcacacgctagatggccgaaac

SEQ ID NO: 4226 - DNA, 121 bp, synthetic construct
  misc_feature 1..121: note = Description of artificial sequence: synthetic polynucleotide sequence
  source 1..121: mol_type = other DNA
caaccagctgatttgaaatttcctgcagatcgaccccaagccatgcacaccccgggggatgcagccggagagaacacggccgaaggaaggatgggtaaggggctgggccgggcggcctcct

SEQ ID NO: 4227 - DNA, 121 bp, synthetic construct
  misc_feature 1..121: note = Description of artificial sequence: synthetic polynucleotide sequence
  source 1..121: mol_type = other DNA
aacagcagaaaggacccaggagcgataacagtaaatcaaataagatatttgtcggtggaattcctcacaattgtggtgagacagagctcagggaatacttcaagaagttcggagtggtgag

SEQ ID NO: 4228 - DNA, 121 bp, synthetic construct
  misc_feature 1..121: note = Description of artificial sequence: synthetic polynucleotide sequence
  source 1..121: mol_type = other DNA
cctggtgtccgtgctgacgccaccctctccttccaggtcacggaggtagtcatgatctatgacgccgagaagcagaggccccgaggtaagggcagatctagtttgacctcggccttctccc

SEQ ID NO: 4229 - DNA, 121 bp, synthetic construct
  misc_feature 1..121: note = Description of artificial sequence: synthetic polynucleotide sequence
  source 1..121: mol_type = other DNA
actcttcgtcgttggctaggttttggatttattactttcgaggacgaacaatcagtggaccaggctgtcaacatgcattttcacgacatcatgggcaaaaaagtgtgtagttgtagtttta

SEQ ID NO: 4230 - DNA, 155 bp, synthetic construct
  misc_feature 1..155: note = Description of artificial sequence: synthetic polynucleotide sequence
  source 1..155: mol_type = other DNA
ggtggaagttaaacgagctgagcctcgggacagcaagagccaagcgccgggacagccaggtgccagccagtgggggagccgggttgtgcccaacgctgccaatggctgggcaggccagcccccgcccacgtggcagcaaggatatggcccgcaag

SEQ ID NO: 4231 - DNA, 121 bp, synthetic construct
  misc_feature 1..121: note = Description of artificial sequence: synthetic polynucleotide sequence
  source 1..121: mol_type = other DNA
agctggtggacacggcgccaacctcctcttctgttctcttatctaggaatgtgggtgccggcaggacaggcgattggtaagtccttgtttatagagcaaaggcggggacagaagccacatg

SEQ ID NO: 4232 - DNA, 142 bp, synthetic construct
  misc_feature 1..142: note = Description of artificial sequence: synthetic polynucleotide sequence
  source 1..142: mol_type = other DNA
ggtggctatggaccgccccctgcaggaagaggagcccccccgccacccccaccgttcacctcctacatcgtgtccacccctcctggaggctttccccctccccagggcttccctcagggctacggtgccccgccacagttca

SEQ ID NO: 4233 - DNA, 178 bp, synthetic construct
  misc_feature 1..178: note = Description of artificial sequence: synthetic polynucleotide sequence
  source 1..178: mol_type = other DNA
ggttttggctacgggcctccacctccaccgccagatcagtttgcccctccgggggttcctcctccaccagccactcccggggcagcacctctggctttcccaccgcctccgtctcaggctgccccggacatgagcaagcccccgacagctcagccagacttcccctatggtcagtatg

SEQ ID NO: 4234 - DNA, 121 bp, synthetic construct
  misc_feature 1..121: note = Description of artificial sequence: synthetic polynucleotide sequence
  source 1..121: mol_type = other DNA
tctcgtctcttgccaggcctgggttcctattctccagccccgccgggctgcggcccacactttgtttacagtcttatggtcaggctgagcagtgatgtggcctaggtaggtgccgcctcct

SEQ ID NO: 4235 - DNA, 177 bp, synthetic construct
  misc_feature 1..177: note = Description of artificial sequence: synthetic polynucleotide sequence
  source 1..177: mol_type = other DNA
gcaggttacgggcaggacttgagtggcttcggacagggcttctcagaccccagccagcagcctccttcctacgggggtccctccgtgccagggtcggggggcccccccgccggcggcagcggctttggacgagggcagaaccacaacgtgcaagggttccacccctaccgacgctag

SEQ ID NO: 4236 - DNA, 121 bp, synthetic construct
  misc_feature 1..121: note = Description of artificial sequence: synthetic polynucleotide sequence
  source 1..121: mol_type = other DNA
agtctcgcgataactgcgcaggcgcggaccaaagcgatctcttctgaggatccggcaagatggtgagtgttgcgatttggcgcgtctctgccgggcctatccggctccatccaacctctga

SEQ ID NO: 4237 - DNA, 121 bp, synthetic construct
  misc_feature 1..121: note = Description of artificial sequence: synthetic polynucleotide sequence
  source 1..121: mol_type = other DNA
ttcgtccccgcggctacggcggcttgctcccgaccctgcaggcggctggatgttggggcgaggggcggacttggtgggtgtcgggacgacgcggggctgggaaggcctgtccgggccttca

SEQ ID NO: 4238 - DNA, 121 bp, synthetic construct
  misc_feature 1..121: note = Description of artificial sequence: synthetic polynucleotide sequence
  source 1..121: mol_type = other DNA
cgatccgcgcccgcacaggcagaagtagagcagaagaagaagcggaccttccgcaagttcacctaccgcggcgtggacctcgaccagctgctggacatgtcctagtaagggcggccgcggg

SEQ ID NO: 4239 - DNA, 236 bp, synthetic construct
  misc_feature 1..236: note = Description of artificial sequence: synthetic polynucleotide sequence
  source 1..236: mol_type = other DNA
gcgagcagctgatgcagctgtacagtgcgcgccagcggcggcggctgaaccggggcctgcggcggaagcagcactccctgctgaagcgcctgcgcaaggccaagaaggaggcgccgcccatggagaagccggaagtggtgaagacgcacctgcgggacatgatcatcctacccgagatggtgggcagcatggtgggcgtctacaacggcaagaccttcaaccaggtggagatcaag

SEQ ID NO: 4240 - DNA, 121 bp, synthetic construct
  misc_feature 1..121: note = Description of artificial sequence: synthetic polynucleotide sequence
  source 1..121: mol_type = other DNA
gcagcccgagatgatcggccactacctgggcgagttctccatcacctacaagcccgtaaagcatggccggcccggcatcggggccacccactcctcccgcttcatccctctcaagtaatgg

SEQ ID NO: 4241 - DNA, 121 bp, synthetic construct
  misc_feature 1..121: note = Description of artificial sequence: synthetic polynucleotide sequence
  source 1..121: mol_type = other DNA
ggatgcaccttgaggacgtcacactcaatgagagacgccagacacaaaaggccacacggtgcgtgatcccatttccatgaaatgtcctgaaatgtccaggacaggcccatccacagagaca

SEQ ID NO: 4242 - DNA, 121 bp, synthetic construct
  misc_feature 1..121: note = Description of artificial sequence: synthetic polynucleotide sequence
  source 1..121: mol_type = other DNA
tgtccaccacaccactcagaattcccatctgcaatgggtcccttctgccccgtttttaccaagcccagttccctctctgcaactgagaggcagcctcttgccccaccccctctcttccaga

SEQ ID NO: 4243 - DNA, 121 bp, synthetic construct
  misc_feature 1..121: note = Description of artificial sequence: synthetic polynucleotide sequence
  source 1..121: mol_type = other DNA
gacagattctggggctcctgtcaaggacacactgcgctcgggtaggccaccgctgtctgaaaagaggagatagagtcagtgccctccctggcccacaggcagagaaaggcctgccttggac

SEQ ID NO: 4244 - DNA, 121 bp, synthetic construct
  misc_feature 1..121: note = Description of artificial sequence: synthetic polynucleotide sequence
  source 1..121: mol_type = other DNA
tctgtgacagcagtctaaactctggctcggtctcaggctgcctgcgctcttggctcccatgctaagactgtccagaatctcgctcaacaaatccagttcttctccagaccccaagaagctg

SEQ ID NO: 4245 - DNA, 180 bp, synthetic construct
  misc_feature 1..180: note = Description of artificial sequence: synthetic polynucleotide sequence
  source 1..180: mol_type = other DNA
ctcaacggtttacgcctctgttttcctcatctgtgaaatgggaacaatgatgattcctccagctttgtagggcttgcatgaacacgagctgagttaatgggataaaacagtgtgcagtccatattaaatgccgtaagaagcacttgactttgagtccccagttccaaaatccaaaaagcc

SEQ ID NO: 4246 - DNA, 387 bp, synthetic construct
  misc_feature 1..387: note = Description of artificial sequence: synthetic polynucleotide sequence
  source 1..387: mol_type = other DNA
gtcaggggcgcacccactgcactccaaagaaggtctcatcagtgtttcgggaaggcaaaagtgtcccagtgaggttggtgcagagtgtgtcccctcgggccaggggcgtcaggcgctgggaggcaatggtacaaccttggtggaagctgagacgcagcaggctgatgctacgggaggcgggagagcagattcccacggccagggtggtggggtggtgcctggaggccgtcgtggaggagcagatggccagcgtcacctggatgtgtaccatgtagatgccatcacgatggatacgtagctgccccttgtccagctctggtccatgcaggaaggagcggcccagtgctgggcccccctgccagtatagcctggggtcctgctgaggtc

SEQ ID NO: 4247 - DNA, 121 bp, synthetic construct
  misc_feature 1..121: note = Description of artificial sequence: synthetic polynucleotide sequence
  source 1..121: mol_type = other DNA
ctgtgcctcttcttctccccgtccctccacgtcccccgtgttacctgtgtgattcagctgcagctcagctacgtcccactggaagaaaagaccagaaaacagggcacggacgtaagcagag

SEQ ID NO: 4248 - DNA, 163 bp, synthetic construct
  misc_feature 1..163: note = Description of artificial sequence: synthetic polynucleotide sequence
  source 1..163: mol_type = other DNA
ccccaagtgactcgagcggcagctgctgctgagcctgtgcgaagcgctggatgcacaccacgaggcagatcaccaagcccgcgaccaatgggaccaaagcagcccgcaggacgcacccatagggcctgcgccgcaccgagcagcccgaaccctcctccggcat

SEQ ID NO: 4249 - DNA, 121 bp, synthetic construct
  misc_feature 1..121: note = Description of artificial sequence: synthetic polynucleotide sequence
  source 1..121: mol_type = other DNA
cttgttcagctttccatcctccttttccggatggtagaaccgggtacagctttcctctgcgggcagatgtgatgtgaagatgagaggataagggcctccctccaaagaccatgcctgggag

SEQ ID NO: 4250 - DNA, 121 bp, synthetic construct
  misc_feature 1..121: note = Description of artificial sequence: synthetic polynucleotide sequence
  source 1..121: mol_type = other DNA
gcactcaccacgaccttcagggacttcctgacaccgtcactgatgaaatgatggtagacagcagccttgacttccacttcctgcaggccggtctttagcggcacgatgacatatggaacgg

SEQ ID NO: 4251 - DNA, 121 bp, synthetic construct
  misc_feature 1..121: note = Description of artificial sequence: synthetic polynucleotide sequence
  source 1..121: mol_type = other DNA
agatggtgctgaggtcctgctgtgggtggtacctggcgggacaggaggccgtggtaccaaggttggccagcaaggtcttctccatcctgtggcacctgcatggagctcttgggaacagagg

SEQ ID NO: 4252 - DNA, 205 bp, synthetic construct
  misc_feature 1..205: note = Description of artificial sequence: synthetic polynucleotide sequence
  source 1..205: mol_type = other DNA
catggagctgtggcgccaatgcacccactggctcatccagtgccgggtgctgccgcccagccaccgcgtgacctgggatggggctcaggtgtgtgaactggcccaggccctccgggatggtgtccttctgtgtcagctgcttaacaacctgctaccccatgccatcaacctgcgtgaggtcaacctgcgcccccagatgtcccag

SEQ ID NO: 4253 - DNA, 121 bp, synthetic construct
  misc_feature 1..121: note = Description of artificial sequence: synthetic polynucleotide sequence
  source 1..121: mol_type = other DNA
agttcctgtgccttaagaacattagaaccttcctgtccacctgctgtgagaagttcggcctcaagcggagcgagctcttcgaagcctttgacctcttcgatgtgcaggattttggcaaggt

SEQ ID NO: 4254 - DNA, 121 bp, synthetic construct
  misc_feature 1..121: note = Description of artificial sequence: synthetic polynucleotide sequence
  source 1..121: mol_type = other DNA
ggctcactgagtggccactgccccgtcacaggtcatctacaccctgtctgctctgtcctggaccccgatcgcccagaacagggggatcatgtgagtaaccacctgggccttgggccattta

SEQ ID NO: 4255 - DNA, 121 bp, synthetic construct
  misc_feature 1..121: note = Description of artificial sequence: synthetic polynucleotide sequence
  source 1..121: mol_type = other DNA
tggctcacaccctcctgaccccccaggcccttccccaccgaggaggagagtgtaggtgatgaagacatctacagtggcctgtccgaccagatcgagtgagtgctcaggcctgtggccgcac

SEQ ID NO: 4256 - DNA, 121 bp, synthetic construct
  misc_feature 1..121: note = Description of artificial sequence: synthetic polynucleotide sequence
  source 1..121: mol_type = other DNA
ccacagcgacacggtggaggaggatgaggacctgtatgactgcgtggagaatgaggaggcggaaggcgacgagatctatgaggacctcatgcgctcggagcccgtgtccatgccggtgcgt

SEQ ID NO: 4257 - DNA, 121 bp, synthetic construct
  misc_feature 1..121: note = Description of artificial sequence: synthetic polynucleotide sequence
  source 1..121: mol_type = other DNA
ccctcgctctcagcccaagatgacagagtatgacaagcgctgctgctgcctgcgggagatccagcagacggaggagaagtacactgacacgctgggctccatccagcaggtgggcgcctcc

SEQ ID NO: 4258 - DNA, 121 bp, synthetic construct
  misc_feature 1..121: note = Description of artificial sequence: synthetic polynucleotide sequence
  source 1..121: mol_type = other DNA
gtcatctttctctcccttccccgcagcatttcttgaagcccctgcaacggttcctgaaacctcaagacattgagatcatctttatcaacattgaggtgagccggccgatccccagccctct

SEQ ID NO: 4259 - DNA, 121 bp, synthetic construct
  misc_feature 1..121: note = Description of artificial sequence: synthetic polynucleotide sequence
  source 1..121: mol_type = other DNA
tccgagtaggacctgcttcgtgttcatactcacttcctaaaggagatgaaggaagccctgggcacccctggcgcagccaatctctaccaggtcttcatcaaatacaaggagaggtgagacc

SEQ ID NO: 4260 - DNA, 121 bp, synthetic construct
  misc_feature 1..121: note = Description of artificial sequence: synthetic polynucleotide sequence
  source 1..121: mol_type = other DNA
tctccctgtaggttcctcgtctatggccgctactgcagccaggtggagtcagccagcaaacacctggaccgtgtggccgcagcccgggaggacgtgcagatgaagctggaggtgggcgccg

SEQ ID NO: 4261 - DNA, 121 bp, synthetic construct
  misc_feature 1..121: note = Description of artificial sequence: synthetic polynucleotide sequence
  source 1..121: mol_type = other DNA
tctgattccccaggaatgttctcagagagccaacaacgggaggttcaccctgcgggacctgctgatggtgcctatgcagcgagttctcaaatatcacctccttctccaggtgccaggcaca

SEQ ID NO: 4262 - DNA, 121 bp, synthetic construct
  misc_feature 1..121: note = Description of artificial sequence: synthetic polynucleotide sequence
  source 1..121: mol_type = other DNA
gacgtctgacgtcttggttctctcaggagctggtgaaacacacgcaggaggcgatggagaaggagaacctgcggctggccctggatgccatgagggtgagtgggtgtagggtgctggtgac

SEQ ID NO: 4263 - DNA, 121 bp, synthetic construct
  misc_feature 1..121: note = Description of artificial sequence: synthetic polynucleotide sequence
  source 1..121: mol_type = other DNA
ccctgccccctccccaggacctggctcagtgcgtgaacgaggtcaagcgagacaacgagacactgcgacagatcaccaatttccagctgtccattgagaacctggtgaggcggtggagccg

SEQ ID NO: 4264 - DNA, 121 bp, synthetic construct
  misc_feature 1..121: note = Description of artificial sequence: synthetic polynucleotide sequence
  source 1..121: mol_type = other DNA
cccctgcctactgcataggaccagtctctggctcactatggccggcccaagatcgacggggaactcaagatcacctcggtggaacggcgctccaagatggacaggtgggtggagtcaacat

SEQ ID NO: 4265 - DNA, 134 bp, synthetic construct
  misc_feature 1..134: note = Description of artificial sequence: synthetic polynucleotide sequence
  source 1..134: mol_type = other DNA
ggtatgccttcctgctcgacaaagctctactcatctgtaagcgcaggggagactcctatgacctcaaggactttgtaaacctgcacagcttccaggttcgggatgactcttcaggagaccgagacaacaagaag

SEQ ID NO: 4266 - DNA, 121 bp, synthetic construct
  misc_feature 1..121: note = Description of artificial sequence: synthetic polynucleotide sequence
  source 1..121: mol_type = other DNA
ctgcagtggagccacatgttcctcctgatcgaggaccaaggtgcccagggctatgagctgttcttcaagacaagagaattgaagaagaagtggatggagcagtttgagatggccatgtgag

SEQ ID NO: 4267 - DNA, 121 bp, synthetic construct
  misc_feature 1..121: note = Description of artificial sequence: synthetic polynucleotide sequence
  source 1..121: mol_type = other DNA
cccctgccagctccaacatctatccggagaatgccaccgccaacgggcatgacttccagatgttctcctttgaggagaccacatcctgcaaggcctgtcagatgctgcttaggtgagaatc

SEQ ID NO: 4268 - DNA, 121 bp, synthetic construct
  misc_feature 1..121: note = Description of artificial sequence: synthetic polynucleotide sequence
  source 1..121: mol_type = other DNA
cctgcatctcagaggtaccttctatcagggctaccgctgccatcggtgccgggcatctgcacacaaggagtgtctggggagggtccctccatgtggccgacatgggcaaggtacgagtggg

SEQ ID NO: 4269 - DNA, 121 bp, synthetic construct
  misc_feature 1..121: note = Description of artificial sequence: synthetic polynucleotide sequence
  source 1..121: mol_type = other DNA
tctctttggaggatttcccgttctcaccatttcctttaccctcccgtagatttcccaggaactatgaagaaggtaagactttcccgtggtccttcctgtgtaccacaaataatgggcaaca

SEQ ID NO: 4270 - DNA, 121 bp, synthetic construct
  misc_feature 1..121: note = Description of artificial sequence: synthetic polynucleotide sequence
  source 1..121: mol_type = other DNA
aggctttctttgtttctccttccaggacaaactacatcgcagggctcaggacaaaaagaggaatgagctgggtgagttggcaggggttgctgtgtgggggcaggaggaaaattcatctcta

SEQ ID NO: 4271 - DNA, 138 bp, synthetic construct
  misc_feature 1..138: note = Description of artificial sequence: synthetic polynucleotide sequence
  source 1..138: mol_type = other DNA
ggtctgcccaagatggaggtgtttcaggaatactacgggcttcctccaccccctggagccattggaccctttctacggctcaaccctggagacattgtggagctcacgaaggctgaggctgaacagaactggtgggag

SEQ ID NO: 4272 - DNA, 121 bp, synthetic construct
  misc_feature 1..121: note = Description of artificial sequence: synthetic polynucleotide sequence
  source 1..121: mol_type = other DNA
ttcctgtttttgtctcctgggtgtttagggcagaaatacatctactaatgaaattggctggtttccttgtaacagggtgaagccctatgtccatgtgagtgcctcaagtctgaatggaata

SEQ ID NO: 4273 - DNA, 121 bp, synthetic construct
  misc_feature 1..121: note = Description of artificial sequence: synthetic polynucleotide sequence
  source 1..121: mol_type = other DNA
gctggggtctttacactaagttggggtctctctctgtattcttagggccctcctcaggacctgtctgttcatctctggtgagtagaaacatttatttttgtttcaatgagaggtttctggg

SEQ ID NO: 4274 - DNA, 121 bp, synthetic construct
  misc_feature 1..121: note = Description of artificial sequence: synthetic polynucleotide sequence
  source 1..121: mol_type = other DNA
aggtacgcaggccccatggagcgggcaggggcagagagcatcctggccaaccgctcggacgggactttcttggtgcggcagagggtgaaggatgcagcagaatttgccatcagcattaagt

SEQ ID NO: 4275 - DNA, 121 bp, synthetic construct
  misc_feature 1..121: note = Description of artificial sequence: synthetic polynucleotide sequence
  source 1..121: mol_type = other DNA
tgaccatctggttccagatataacgtcgaggtcaagcacattaaaatcatgacagcagaaggactgtaccggatcacagagaaaaaggctttccgggggcttacggtaagggtcaatgtcc

SEQ ID NO: 4276 - DNA, 121 bp, synthetic construct
  misc_feature 1..121: note = Description of artificial sequence: synthetic polynucleotide sequence
  source 1..121: mol_type = other DNA
taggagctggtggagttttaccagcagaactctctaaaggattgcttcaagtctctggacaccaccttgcagttccccttcaaggagcctgaaaagagaaccatcagcaggccagcaggta

SEQ ID NO: 4277 - DNA, 153 bp, synthetic construct
  misc_feature 1..153: note = Description of artificial sequence: synthetic polynucleotide sequence
  source 1..153: mol_type = other DNA
gtgggaagcacaaagtattttggcacagccaaagcccgctatgacttctgcgcccgagaccgatcagagctgtcgctcaaggagggtgacatcatcaagatccttaacaagaagggacagcaaggctggtggcgaggggagatctatggccgg

SEQ ID NO: 4278 - DNA, 121 bp, synthetic construct
  misc_feature 1..121: note = Description of artificial sequence: synthetic polynucleotide sequence
  source 1..121: mol_type = other DNA
aggttgcactgatgaactcctcgtctgtttccaggttggctggttccctgccaactacgtggaggaagattattctgaatactgctgagccctggtgccttggcagagagacgagaaactc

SEQ ID NO: 4279 - DNA, 121 bp, synthetic construct
  misc_feature 1..121: note = Description of artificial sequence: synthetic polynucleotide sequence
  source 1..121: mol_type = other DNA
tcttatctgctcaccctcttccactgcttctcagatatcaatgagtgcctcaccagcagcgtctgccctgagcattctgactgtgtcaactccatgggaagctacagttgcagctgtcaag

SEQ ID NO: 4280 - DNA, 121 bp, synthetic construct
  misc_feature 1..121: note = Description of artificial sequence: synthetic polynucleotide sequence
  source 1..121: mol_type = other DNA
taatgactggagagaagaaagacggcttctcagatccaatcatctacactctggagaacattcaggtttgtgaagaggtctctactgagattcttgtctacctgttgggaactcctcgtct

SEQ ID NO: 4281 - DNA, 121 bp, synthetic construct
  misc_feature 1..121: note = Description of artificial sequence: synthetic polynucleotide sequence
  source 1..121: mol_type = other DNA
cagagaaagggaagggtcaggaaagccagcccatgtcccacccccactggactcaccacgtgatggcaggtgaagcccttcatgaccgaggcctcattgaggaactcaatccgctctcgga

SEQ ID NO: 4282 - DNA, 121 bp, synthetic construct
  misc_feature 1..121: note = Description of artificial sequence: synthetic polynucleotide sequence
  source 1..121: mol_type = other DNA
ttcatttatttaatatttattccagaccctcagtcactcattcatccaaccagcaaatatgtcttgagcaccttttatacgacagctgattctgaaaccaacccgatagtctcatagacag

SEQ ID NO: 4283 - DNA, 121 bp, synthetic construct
  misc_feature 1..121: note = Description of artificial sequence: synthetic polynucleotide sequence
  source 1..121: mol_type = other DNA
ctgcaccttttccagccggtggaaagaaatactgatggagctctgtttcccacgtgtgttgagtgctgggctgagcaggatcgtagcatctcttcttagggccctgttttacagagggaag

SEQ ID NO: 4284 - DNA, 121 bp, synthetic construct
  misc_feature 1..121: note = Description of artificial sequence: synthetic polynucleotide sequence
  source 1..121: mol_type = other DNA
ctagacttggggactcacctccctccatctctcttggcagggagtggctgaggtgcttcaagatggtgactgccctgctgtcctcatccccagcaaaccctgtgagtcaggggatcccagg

SEQ ID NO: 4285 - DNA, 121 bp, synthetic construct
  misc_feature 1..121: note = Description of artificial sequence: synthetic polynucleotide sequence
  source 1..121: mol_type = other DNA
atagtagctgggatgacaggcagcgccactgtgccctgctgtcgtgtttattattgcacagtgattacatgtcaagtctggtgctggttgctgggaacgaaatggtgaacctgctcccaac

SEQ ID NO: 4286 - DNA, 121 bp, synthetic construct
  misc_feature 1..121: note = Description of artificial sequence: synthetic polynucleotide sequence
  source 1..121: mol_type = other DNA
tactcagagggatctagaagaatctttaatgacccagaaagctgcacaagacctgttaggtaccagatgaaatgggctgtgggatcctgtcttgtttaaaacgattgtatttgctcagtga

SEQ ID NO: 4287 - DNA, 121 bp, synthetic construct
  misc_feature 1..121: note = Description of artificial sequence: synthetic polynucleotide sequence
  source 1..121: mol_type = other DNA
aaatcacgttggagactataaaacagcaagtttttcatttgcacacctcacatgacctcaagcctgctgtccatacacaggaaatggggatgtgcggaaaaaaaacccgaagtggaggaca

SEQ ID NO: 4288 - DNA, 121 bp, synthetic construct
  misc_feature 1..121: note = Description of artificial sequence: synthetic polynucleotide sequence
  source 1..121: mol_type = other DNA
ttcattcaacaaagcatttctccccgcagtccatgcgcaccctgcccacagctctttctcattttcagcatctctcttccctttctagaacatgccgagtttttgcactgcaagtccaaaa

SEQ ID NO: 4289 - DNA, 121 bp, synthetic construct
  misc_feature 1..121: note = Description of artificial sequence: synthetic polynucleotide sequence
  source 1..121: mol_type = other DNA
ctaagaacgaaggcgcttccactctcagctcacttgtaggcctgctcccgttttgtgacctcaggcttcagaagccctcccactggaccctttttcctggcgtactaatgactcacaactc

SEQ ID NO: 4290 - DNA, 121 bp, synthetic construct
  misc_feature 1..121: note = Description of artificial sequence: synthetic polynucleotide sequence
  source 1..121: mol_type = other DNA
ctgaacttgtggtgggcagggtgtggcctggatgaggtgtccccatgggcttccttttctgacactcagctttgaggttttgggcagaacaatatgaaaacccctgtgtttttcctctgac

SEQ ID NO: 4291 - DNA, 121 bp, synthetic construct
  misc_feature 1..121: note = Description of artificial sequence: synthetic polynucleotide sequence
  source 1..121: mol_type = other DNA
gagagccatccccaatcaggtagcacacccctctgcagtctcccgctctaccctgggggcgggaggacgctaagtgacagctaagcccccgtgatggagctcggcctgtgtaaagccccac

SEQ ID NO: 4292 - DNA, 121 bp, synthetic construct
  misc_feature 1..121: note = Description of artificial sequence: synthetic polynucleotide sequence
  source 1..121: mol_type = other DNA
cattgcaagtctagttttcagatctcctcttccttcacgtgaggggcccttcgtgtttttctcatctgagagttgaaagccagagcccccgaccctcccgtggagccccacactggagtct

SEQ ID NO: 4293 - DNA, 223 bp, synthetic construct
  misc_feature 1..223: note = Description of artificial sequence: synthetic polynucleotide sequence
  source 1..223: mol_type = other DNA
gatgtccactccagacccacccctgggcggaactcctcggccaggtccttccccgggccctggcccttcccctggagccatgctgggccctagcccgggtccctcgccgggctccgcccacagcatgatggggcccagcccagggccgccctcagcaggacaccccatccccacccaggggcctggagggtaccctcaggacaacatgcaccagatgcacaag

SEQ ID NO: 4294 - DNA, 134 bp, synthetic construct
  misc_feature 1..134: note = Description of artificial sequence: synthetic polynucleotide sequence
  source 1..134: mol_type = other DNA
gcccatggagtccatgcatgagaagggcatgtcggacgacccgcgctacaaccagatgaaaggaatggggatgcggtcagggggccatgctgggatggggcccccgcccagccccatggaccagcactcccaag

SEQ ID NO: 4295 - DNA, 406 bp, synthetic construct
  misc_feature 1..406: note = Description of artificial sequence: synthetic polynucleotide sequence
  source 1..406: mol_type = other DNA
ggttacccctcgcccctgggtggctctgagcatgcctctagtccagttccagccagtggcccgtcttcggggccccagatgtcttccgggccaggaggtgccccgctggatggtgctgacccccaggccttggggcagcagaaccggggcccaaccccatttaaccagaaccagctgcaccagctcagagctcagatcatggcctacaagatgctggccagggggcagcccctccccgaccacctgcagatggcggtgcagggcaagcggccgatgcccgggatgcagcagcagatgccaacgctacctccaccctcggtgtccgcaacaggacccggccctggccctggccctggccccggcccgggtcccggcccggcacctccaaattacagcaggcctcatg

SEQ ID NO: 4296 - DNA, 121 bp, synthetic construct
  misc_feature 1..121: note = Description of artificial sequence: synthetic polynucleotide sequence
  source 1..121: mol_type = other DNA
cctacatgtaggtatgggagggcccaacatgcctcccccaggaccctcgggcgtgccccccgggatgccaggccagcctcctggagggcctcccaagccctggcctgaaggtgagctccct

SEQ ID NO: 4297 - DNA, 260 bp, synthetic construct
  misc_feature 1..260: note = Description of artificial sequence: synthetic polynucleotide sequence
  source 1..260: mol_type = other DNA
ggacccatggcgaatgctgctgcccccacgagcacccctcagaagctgattcccccgcagccaacgggccgcccttcccccgcgccccctgccgtcccacccgccgcctcgcccgtgatgccaccgcagacccagtcccccgggcagccggcccagcccgcgcccatggtgccactgcaccagaagcagagccgcatcacccccatccagaagccgcggggcctcgaccctgtggagatcctgcaggagcgcgagtacag

SEQ ID NO: 4298 - DNA, 121 bp, synthetic construct
  misc_feature 1..121: note = Description of artificial sequence: synthetic polynucleotide sequence
  source 1..121: mol_type = other DNA
gcaggctcgcatcgcacaccgaattcaggaacttgaaaaccttcccgggtccctggccggggatttgcgaaccaaagcgaccattgagctcaaggccctcaggctgctgaacttccagagg

SEQ ID NO: 4299 - DNA, 175 bp, synthetic construct
  misc_feature 1..175: note = Description of artificial sequence: synthetic polynucleotide sequence
  source 1..175: mol_type = other DNA
gctgcgccaggaggtggtggtgtgcatgcggagggacacagcgctggagacagccctcaatgctaaggcctacaagcgcagcaagcgccagtccctgcgcgaggcccgcatcactgagaagctggagaagcagcagaagatcgagcaggagcgcaagcgccggcagaagcaccag

SEQ ID NO: 4300 - DNA, 175 bp, synthetic construct
  misc_feature 1..175: note = Description of artificial sequence: synthetic polynucleotide sequence
  source 1..175: mol_type = other DNA
ggaatacctcaatagcattctccagcatgccaaggatttcaaggaatatcacagatccgtcacaggcaaaatccagaagctgaccaaggcagtggccacgtaccatgccaacacggagcgggagcagaagaaagagaacgagcggatcgagaaggagcgcatgcggaggctcatg

SEQ ID NO: 4301 - DNA, 169 bp, synthetic construct
  misc_feature 1..169: note = Description of artificial sequence: synthetic polynucleotide sequence
  source 1..169: mol_type = other DNA
ggctgaagatgaggaggggtaccgcaagctcatcgaccagaagaaggacaagcgcctggcctacctcttgcagcagacagacgagtacgtggctaacctcacggagctggtgcggcagcacaaggctgcccaggtcgccaaggagaaaaagaagaaaaagaaaaagaag

SEQ ID NO: 4302 - DNA, 121 bp, synthetic construct
  misc_feature 1..121: note = Description of artificial sequence: synthetic polynucleotide sequence
  source 1..121: mol_type = other DNA
ggtcagggcctgaccgtgtctctctctatttccagaaggcagaaaatgcagaaggacagacgcctgccattgggccggatggcgaggtgaggaagcagggtttcttgtggaagtatcaagc

SEQ ID NO: 4303 - DNA, 121 bp, synthetic construct
  misc_feature 1..121: note = Description of artificial sequence: synthetic polynucleotide sequence
  source 1..121: mol_type = other DNA
ggacgagaccagccagatgagcgacctcccggtgaaggtgatccacgtggagagtgggaagatcctcacaggcacagatgcccccaaagccgggcagctggaggcctggctcgagatgaac

SEQ ID NO: 4304 - DNA, 121 bp, synthetic construct
  misc_feature 1..121: note = Description of artificial sequence: synthetic polynucleotide sequence
  source 1..121: mol_type = other DNA
gatttgtatgaaagcccttacattttttctaggtatgaagtagctccgaggtctgatagtgaagaaagtggctcagaagaagaggaagaggtaagagtgcatttcctggctttcaaggctc

SEQ ID NO: 4305 - DNA, 121 bp, synthetic construct
  misc_feature 1..121: note = Description of artificial sequence: synthetic polynucleotide sequence
  source 1..121: mol_type = other DNA
gaggaggaggaagagcagccgcaggcagcacagcctcccaccctgcccgtggaggagaagaagaagattccagatccagacagcgatgacgtctctgaggtggacgcgcggcacatcattg

SEQ ID NO: 4306 - DNA, 152 bp, synthetic construct
  misc_feature 1..152: note = Description of artificial sequence: synthetic polynucleotide sequence
  source 1..152: mol_type = other DNA
ggaatgccaagcaagatgtcgatgatgaatatggcgtgtcccaggcccttgcacgtggcctgcagtcctactatgccgtggcccatgctgtcactgagagagtggacaagcagtcagcgcttatggtcaatggtgtcctcaaacagtaccag

SEQ ID NO: 4307 - DNA, 165 bp, synthetic construct
  misc_feature 1..165: note = Description of artificial sequence: synthetic polynucleotide sequence
  source 1..165: mol_type = other DNA
gatcaaaggtttggagtggctggtgtccctgtacaacaacaacctgaacggcatcctggccgacgagatgggcctggggaagaccatccagaccatcgcgctcatcacgtacctcatggagcacaaacgcatcaatgggcccttcctcatcatcgtgcctctctc

SEQ ID NO: 4308 - DNA, 121 bp, synthetic construct
  misc_feature 1..121: note = Description of artificial sequence: synthetic polynucleotide sequence
  source 1..121: mol_type = other DNA
ttgactctcatttccttgttccatcagaacgctgtccaactgggcgtacgagtttgacaagtgggccccctccgtggtgaaggtgtcttacaaggtaggtcacagccactgaggtttcctc

SEQ ID NO: 4309 - DNA, 121 bp, synthetic construct
  misc_feature 1..121: note = Description of artificial sequence: synthetic polynucleotide sequence
  source 1..121: mol_type = other DNA
tgcagggatccccagcagcaagacgggcctttgtcccccagctccggagtgggaagttcaacgtcttgctgacgacgtacgagtacatcatcaaagacaagcacatcctcgccaaggtaac

SEQ ID NO: 4310 - DNA, 121 bp, synthetic construct
  misc_feature 1..121: note = Description of artificial sequence: synthetic polynucleotide sequence
  source 1..121: mol_type = other DNA
gatccgttggaagtacatgattgtggacgaaggtcaccgcatgaagaaccaccactgcaagctgacgcaggtgctcaacacgcactatgtggcaccccgccgcctgctgctgacgggcaca

SEQ ID NO: 4311 - DNA, 121 bp, synthetic construct
  misc_feature 1..121: note = Description of artificial sequence: synthetic polynucleotide sequence
  source 1..121: mol_type = other DNA
gctgcagaacaagcttcccgagctctgggcgctgctcaacttcctgctgcccaccatcttcaagagctgcagcaccttcgagcagtggtttaacgcaccctttgccatgaccggggaaaag

SEQ ID NO: 4312 - DNA, 121 bp, synthetic construct
  misc_feature 1..121: note = Description of artificial sequence: synthetic polynucleotide sequence
  source 1..121: mol_type = other DNA
ccaggtggacctgaatgaggaggaaaccattctcatcatccggcgtctccacaaagtgctgcggcccttcttgctccgacgactcaagaaggaagtcgaggcccagttgcccgaaaaggtg

SEQ ID NO: 4313 - DNA, 121 bp, synthetic construct
  misc_feature 1..121: note = Description of artificial sequence: synthetic polynucleotide sequence
  source 1..121: mol_type = other DNA
cctgcaggtggagtacgtcatcaagtgcgacatgtctgcgctgcagcgagtgctctaccgccacatgcaggccaagggcgtgctgctgactgatggctccgagaaggacaagaaggtgggc

SEQ ID NO: 4314 - DNA, 121 bp, synthetic construct
  misc_feature 1..121: note = Description of artificial sequence: synthetic polynucleotide sequence
  source 1..121: mol_type = other DNA
tctcatctgccttccagggcaaaggcggcaccaagaccctgatgaacaccatcatgcagctgcggaagatctgcaaccacccctacatgttccagcacatcgaggtgagcccgccgcggct

SEQ ID NO: 4315 - DNA, 121 bp, synthetic construct
  misc_feature 1..121: note = Description of artificial sequence: synthetic polynucleotide sequence
  source 1..121: mol_type = other DNA
cctgcctgtcactgacccctctctccttgccttgcaggagtccttttccgagcacttggggttcactggcggcattgtccaagggtgagaagcttcccaactggatggggtgggcaggtgg

SEQ ID NO: 4316 - DNA, 168 bp, synthetic construct
  misc_feature 1..168: note = Description of artificial sequence: synthetic polynucleotide sequence
  source 1..168: mol_type = other DNA
ggctggacctgtaccgagcctcgggtaaatttgagcttcttgatagaattcttcccaaactccgagcaaccaaccacaaagtgctgctgttctgccaaatgacctccctcatgaccatcatggaagattactttgcgtatcgcggctttaaatacctcaggcttgatg

SEQ ID NO: 4317 - DNA, 165 bp, synthetic construct
  misc_feature 1..165: note = Description of artificial sequence: synthetic polynucleotide sequence
  source 1..165: mol_type = other DNA
ggaaccacgaaggcggaggaccggggcatgctgctgaaaaccttcaacgagcccggctctgagtacttcatcttcctgctcagcacccgggctggggggctcggcctgaacctccagtcggcagacactgtgatcatttttgacagcgactggaatcctcaccag

SEQ ID NO: 4318 - DNA, 229 bp, synthetic construct
  misc_feature 1..229: note = Description of artificial sequence: synthetic polynucleotide sequence
  source 1..229: mol_type = other DNA
ggacctgcaagcgcaggaccgagcccaccgcatcgggcagcagaacgaggtgcgtgtgctccgcctctgcaccgtcaacagcgtggaggagaagatcctagctgcagccaagtacaagctcaacgtggaccagaaggtgatccaggccggcatgttcgaccagaagtcctccagccatgagcggcgcgccttcctgcaggccatcctggagcacgaggagcaggatgag

SEQ ID NO: 4319 - DNA, 121 bp, synthetic construct
  misc_feature 1..121: note = Description of artificial sequence: synthetic polynucleotide sequence
  source 1..121: mol_type = other DNA
tttatccacagagcagacactgcagcacgggcagcggcagtgccagcttcgcccacactgcccctccgccagcgggcgtcaaccccgacttggaggagccacctctaaaggtgagaggggt

SEQ ID NO: 4320 - DNA, 121 bp, synthetic construct
  misc_feature 1..121: note = Description of artificial sequence: synthetic polynucleotide sequence
  source 1..121: mol_type = other DNA
ctgacagtttgcaatcttataggaggaagacgaggtgcccgacgacgagaccgtcaaccagatgatcgcccggcacgaggaggagtttgatctgttcatggtaagcgctgcaggctggatg

SEQ ID NO: 4321 - DNA, 220 bp, synthetic construct
  misc_feature 1..220: note = Description of artificial sequence: synthetic polynucleotide sequence
  source 1..220: mol_type = other DNA
gcgcatggacctggaccgcaggcgcgaggaggcccgcaaccccaagcggaagccgcgcctcatggaggaggacgagctcccctcgtggatcatcaaggacgacgcggaggtggagcggctgacctgtgaggaggaggaggagaagatgttcggccgtggctcccgccaccgcaaggaggtggactacagcgactcactgacggagaagcagtggctcaag

SEQ ID NO: 4322 - DNA, 121 bp, synthetic construct
  misc_feature 1..121: note = Description of artificial sequence: synthetic polynucleotide sequence
  source 1..121: mol_type = other DNA
aattttgttgtagaaaattacaggaaaagatatccatgacacagccagcagtgtggcacgtgggctacaattccagcgtggccttcagttctgcacacgtgcgtcaaaggtggggagagtt

SEQ ID NO: 4323 - DNA, 264 bp, synthetic construct
  misc_feature 1..264: note = Description of artificial sequence: synthetic polynucleotide sequence
  source 1..264: mol_type = other DNA
gaccctgaaggccatcgaggagggcacgctggaggagatcgaagaggaggtccggcagaagaaatcatcacggaagcgcaagcgagacagcgacgccggctcctccaccccgaccaccagcacccgcagccgcgacaaggacgacgagagcaagaagcagaagaagcgcgggcggccgcctgccgagaaactctcccctaacccacccaacctcaccaagaagatgaagaagattgtggatgccgtgatcaagtacaaggacag

SEQ ID NO: 4324 - DNA, 121 bp, synthetic construct
  misc_feature 1..121: note = Description of artificial sequence: synthetic polynucleotide sequence
  source 1..121: mol_type = other DNA
ttgcagcagcagtggacgtcagctcagcgaggtcttcatccagctgccctcgcgaaaggagctgcccgagtactacgagctcatccgcaagcccgtggacttcaagaagataaaggtaacc

SEQ ID NO: 4325 - DNA, 121 bp, synthetic construct
  misc_feature 1..121: note = Description of artificial sequence: synthetic polynucleotide sequence
  source 1..121: mol_type = other DNA
tccactgcaggagcgcattcgcaaccacaagtaccgcagcctcaacgacctagagaaggacgtcatgctcctgtgccagaacgcacagaccttcaacctggagggctccctggtgagggca

SEQ ID NO: 4326 - DNA, 134 bp, synthetic construct
  misc_feature 1..134: note = Description of artificial sequence: synthetic polynucleotide sequence
  source 1..134: mol_type = other DNA
gatctatgaagactccatcgtcttgcagtcggtcttcaccagcgtgcggcagaaaatcgagaaggaggatgacagtgaaggcgaggagagtgaggaggaggaagagggcgaggaggaaggctccgaatccgaat

SEQ ID NO: 4327 - DNA, 144 bp, synthetic construct
  misc_feature 1..144: note = Description of artificial sequence: synthetic polynucleotide sequence
  source 1..144: mol_type = other DNA
gctcggtccgtcaaagtgaagatcaagcttggccggaaggagaaggcacaggaccggctgaagggcggccggcggcggccgagccgagggtcccgagccaagccggtcgtgagtgacgatgacagtgaggaggaacaagaggag

SEQ ID NO: 4328 - DNA, 121 bp, synthetic construct
  misc_feature 1..121: note = Description of artificial sequence: synthetic polynucleotide sequence
  source 1..121: mol_type = other DNA
caggggtggccaacgcacactctctcctcctgtcccctctccaggaccgctcaggaagtggcagcgaagaagactgagccccgacattccagtctcgaccccgagcccctcgttccagagc

SEQ ID NO: 4329 - DNA, 121 bp, synthetic construct
  misc_feature 1..121: note = Description of artificial sequence: synthetic polynucleotide sequence
  source 1..121: mol_type = other DNA
ggggcgactggaggtaatggtccggattcgggagccactgacagcccagcagttggagacgacgacagagaggtggctggtcattgaccctgtgccggcagctgtgcccacagtgagaccc

SEQ ID NO: 4330 - DNA, 121 bp, synthetic construct
  misc_feature 1..121: note = Description of artificial sequence: synthetic polynucleotide sequence
  source 1..121: mol_type = other DNA
ttgaaggcatagtccacgcggttgccagccgcctcgctgtcatcatccacgtacacggaacgcaggacgtacaggaccccacacaccatgaaggcgttggatgccgagcgcttgtcgtaac

SEQ ID NO: 4331 - DNA, 121 bp, synthetic construct
  misc_feature 1..121: note = Description of artificial sequence: synthetic polynucleotide sequence
  source 1..121: mol_type = other DNA
acctgggcagagactccaagacaagctcagccgaggtcaccatccaggtaagggcaggatgctgggggaccccaggacagtgtagaatcagctagcggaggcttccatgtggccagagaga

SEQ ID NO: 4332 - DNA, 121 bp, synthetic construct
  misc_feature 1..121: note = Description of artificial sequence: synthetic polynucleotide sequence
  source 1..121: mol_type = other DNA
aaacagagaaacccccacttccttgcaagccccggaacatgacaggtgagagctgacagttggagtcttcctgctcacctggctgaagcccttcttgaaatgactttctcatctcttctag

SEQ ID NO: 4333 - DNA, 121 bp, synthetic construct
  misc_feature 1..121: note = Description of artificial sequence: synthetic polynucleotide sequence
  source 1..121: mol_type = other DNA
ggaaatcctcagtatagagaaaacaattttatagtaagagaaaaatattccagtgaaggaaatcacacccaggacgccagttgcaaagtatatcaccacgttattaatgaaggtgtcagaa

SEQ ID NO: 4334 - DNA, 121 bp, synthetic construct
  misc_feature 1..121: note = Description of artificial sequence: synthetic polynucleotide sequence
  source 1..121: mol_type = other DNA
agaccctggcctcctgccgagacactctgaacttctgcttcaaggagcggctccaagccgtggacctcatgaaccagcctctggacaaggttctggagcaggccagacgccactcatgggt

SEQ ID NO: 4335 - DNA, 121 bp, synthetic construct
  misc_feature 1..121: note = Description of artificial sequence: synthetic polynucleotide sequence
  source 1..121: mol_type = other DNA
gcagcacccccaagagctcccctgcactcactggggtcacagtcattgatgtcctgatcgcaggaagggccagtgtaccctccatggcaggtgcagctgaaactccctgccaggttggtgc

SEQ ID NO: 4336 - DNA, 121 bp, synthetic construct
  misc_feature 1..121: note = Description of artificial sequence: synthetic polynucleotide sequence
  source 1..121: mol_type = other DNA
gagtccggctcaggtagtctccaaggatgaccccatccagggcgccattgaggaaggccatggttaacagagatgccttggggtccaaaagcgtaaaggtccgaggggcagagagctggtc

SEQ ID NO: 4337 - DNA, 121 bp, synthetic construct
  misc_feature 1..121: note = Description of artificial sequence: synthetic polynucleotide sequence
  source 1..121: mol_type = other DNA
tgcatcccctctgccctgcaggatgtcgctgctgagcctgccctggctgggcctcagaccggtggcaacgtccccatggctactcctgctgctggttgtgggctcctggctactcgcccgc

SEQ ID NO: 4338 - DNA, 121 bp, synthetic construct
  misc_feature 1..121: note = Description of artificial sequence: synthetic polynucleotide sequence
  source 1..121: mol_type = other DNA
ggagccttggaatggacaaaaacagagagaggggccccgcacctcagggtccggccacacagctgggttgtgatgggttccgaaaacactgatgaggcagataatgcctgtgggagagaag

SEQ ID NO: 4339 - DNA, 121 bp, synthetic construct
  misc_feature 1..121: note = Description of artificial sequence: synthetic polynucleotide sequence
  source 1..121: mol_type = other DNA
tcccccgtctgtccccctccctctcagcacgcctctgcagacgtcgaaaagatgatactcgggaacaagtgtgatgtgaatgacaagagacaagtttccaaggaacggggagaaaaggtgg

SEQ ID NO: 4340 - DNA, 121 bp, synthetic construct
  misc_feature 1..121: note = Description of artificial sequence: synthetic polynucleotide sequence
  source 1..121: mol_type = other DNA
gggtaccaggccctgccctgggtgcgttatatcacgcagaatggaggtgagtgaggccctacccgtggggtggggttgtactgaggggtcctctgtggctgcccccagggtggagccatcg

SEQ ID NO: 4341 - DNA, 121 bp, synthetic construct
  misc_feature 1..121: note = Description of artificial sequence: synthetic polynucleotide sequence
  source 1..121: mol_type = other DNA
tcctttctccccgggtcccggccatggcgctgagtgaacccatcctgccgtccttctccactttcgccagcccgtgccgcgagcgcggcctgcaggaggtgagggcggcggggacggcggg

SEQ ID NO: 4342 - DNA, 347 bp, synthetic construct
  misc_feature 1..347: note = Description of artificial sequence: synthetic polynucleotide sequence
  source 1..347: mol_type = other DNA
gcgctggccgcgcgccgaacccgagtccggcggcaccgacgacgacctcaacagcgtgctggacttcatcctgtccatggggctggatggcctgggcgccgaggccgccccggagccgccgccgccgcccccgccgcctgcgttctattaccccgaacccggcgcgcccccgccctacagcgcccccgcgggtggcctggtgtctgagctgctgcgacccgagctggatgcgccgctggggcccgcactgcacggccgctttctgctggcgccgcccggccgcctggtcaaggccgagccccctgaagcggacggcggcggcggctacggctgcgcccccgggctga

SEQ ID NO: 4343 - DNA, 471 bp, synthetic construct
  misc_feature 1..471: note = Description of artificial sequence: synthetic polynucleotide sequence
  source 1..471: mol_type = other DNA
cccgtggaccgcgcggcctcaagcgcgagggcgccccgggcccggcggcttcgtgcatgcgaggtcccgggggccgccccccgccgccgcccgacacaccgccgctcagccccgacggccccgcgcgcctgcccgcgcccggtccgcgcgcctccttcccgccgcctttcggtggccctggtttcggcgcgcccgggcccggcctgcattacgcgccgcctgcgcccccagccttcggtctcttcgacgacgcggccgccgccgcggcagccctgggcctggcgccccccgccgcccgcggtctcctcacgccgcctgcgtccccgctggagctgctggaggccaagccaaagcgcggccgccgctcttggccccgcaaacgcaccgccactcacacctgcagctacgcgggctgcggcaagacctacaccaagagttcgcatctgaaggcgcatctgcgcacgcacacag

SEQ ID NO: 4344 - DNA, 177 bp, synthetic construct
  misc_feature 1..177: note = Description of artificial sequence: synthetic polynucleotide sequence
  source 1..177: mol_type = other DNA
ggtgagaagccctaccactgcaactgggacggctgcggctggaagtttgcgcgctcagacgagctcacgcgccactaccgaaagcacacgggccaccggccattccagtgccatctgtgcgatcgtgccttctcgcgctccgatcacctggcgctgcacatgaaacggcacatgtag

SEQ ID NO: 4345 - DNA, 121 bp, synthetic construct
  misc_feature 1..121: note = Description of artificial sequence: synthetic polynucleotide sequence
  source 1..121: mol_type = other DNA
gttaatcacgtgcttcataccttggtttcgccccaggtggccttgccaaaattatctgcgtactcttcatcatctgtgatcagaaagttatcaaaaatggttccagatctcacctgcagat

SEQ ID NO: 4346 - DNA, 121 bp, synthetic construct
  misc_feature 1..121: note = Description of artificial sequence: synthetic polynucleotide sequence
  source 1..121: mol_type = other DNA
tggagccagggtaccaagaagctcatcactctgccacttgtggggaaaccactgaacttggaccgaaaggtgaggtacctgggacccccattccccacctgcaacctccaccctgcctggc

SEQ ID NO: 4347 - DNA, 121 bp, synthetic construct
  misc_feature 1..121: note = Description of artificial sequence: synthetic polynucleotide sequence
  source 1..121: mol_type = other DNA
tggctgggggagtaccagctgccgagggagaggtagctgggcaggtactgagcccccacaggcttcccgttcagtgccatcaccttggtctgagaagagaagatgcttagatcaacacccg

SEQ ID NO: 4348 - DNA, 121 bp, synthetic construct
  misc_feature 1..121: note = Description of artificial sequence: synthetic polynucleotide sequence
  source 1..121: mol_type = other DNA
tcggagaagcagaaggcagaagagaaggagagggaagccctggaagccgcaagagcaggtgctgaggagggcggacagggtcaggcggctggagggcagcaggtagctgagcaggggccgg

SEQ ID NO: 4349 - DNA, 121 bp, synthetic construct
  misc_feature 1..121: note = Description of artificial sequence: synthetic polynucleotide sequence
  source 1..121: mol_type = other DNA
caagagccccctgccgctgggcttctcccccgtctgcgaccccatggattccagtaagggctgcttcggaggcgagagttgtccgggtcccttgcagggaggagcgggggaggagggacga

SEQ ID NO: 4350 - DNA, 121 bp, synthetic construct
  misc_feature 1..121: note = Description of artificial sequence: synthetic polynucleotide sequence
  source 1..121: mol_type = other DNA
agctgacccagctccttggctgcattgaagatcatctgggttccctgcaggtaacaacatacagctgggtgagggcaggggtgctacagctgacactccagccccagagaccatcttggtt

SEQ ID NO: 4351 - DNA, 121 bp, synthetic construct
  misc_feature 1..121: note = Description of artificial sequence: synthetic polynucleotide sequence
  source 1..121: mol_type = other DNA
actgaagcctgcctcccacagcggcatccgcacgtctggcgtgcgggctccatcgcaacgcctgtcctcctttgacccctgcttctaccgagacctgctgctggtgcaccgcttcctacct

SEQ ID NO: 4352 - DNA, 169 bp, synthetic construct
  misc_feature 1..169: note = Description of artificial sequence: synthetic polynucleotide sequence
  source 1..169: mol_type = other DNA
gctatgaaaaggacagggagtggtgtttgccctctgggtgagcagtgaaggcatgagtctcacacccccggcttccgctccacagcatgtccagctgggggcccagggcgctgaatgatggccggtcctgtgggctaggggcccagcacagcttcatgagctcgtgaac

SEQ ID NO: 4353 - DNA, 121 bp, synthetic construct
  misc_feature 1..121: note = Description of artificial sequence: synthetic polynucleotide sequence
  source 1..121: mol_type = other DNA
ctcacctcagcagggcaggcaggaggcgccggcagcctctggccctcctccagcagttccaagaggcggcagagggcggggacatcccgctcacatcccatcatccgcaggaactcctgga

SEQ ID NO: 4354 - DNA, 121 bp, synthetic construct
  misc_feature 1..121: note = Description of artificial sequence: synthetic polynucleotide sequence
  source 1..121: mol_type = other DNA
acggccgaggggctgcagcttttgtcgcagtaggtgaagagctcgtacaggacgaccccgaagctccagacgtctgactggcgagagaagatgttgtccgagagggattcgggggcatacc

SEQ ID NO: 4355 - DNA, 174 bp, synthetic construct
  misc_feature 1..174: note = Description of artificial sequence: synthetic polynucleotide sequence
  source 1..174: mol_type = other DNA
ccagaaaatggggctctggcctggctcgcggaccacgtagtagtctttgtcaagcggcagcagcttagctaggccgaagtcagcgatcttgacgtgtgcctcgctctccacgaggatgtttcgggcggccaggtcgcggtgcacgcagcggcgggagcccaggtactccatgcc

SEQ ID NO: 4356 - DNA, 121 bp, synthetic construct
  misc_feature 1..121: note = Description of artificial sequence: synthetic polynucleotide sequence
  source 1..121: mol_type = other DNA
tgcagatctgcgaggaatagagaaggaggcggctggcatcgaggcgcgcgcggtgccgctgcaggaagtcgcgcaagcagccgctgggcaggtactccatgaccagccgcaggctctggcg

SEQ ID NO: 4357 - DNA, 191 bp, synthetic construct
  misc_feature 1..191: note = Description of artificial sequence: synthetic polynucleotide sequence
  source 1..191: mol_type = other DNA
cccgggccatagctgacaccacgatacttgacaatgaaatcactgtgcagtgctttgaggatctgaatctcccgctgaaagtccctctgctggtctggcccgctgtgctgcagctgtttcacggccaccagggcacctgtattgtcgcctagcgggtcatagcggcacagctccacgctgccaaagttgcc

SEQ ID NO: 4358 - DNA, 141 bp, synthetic construct
  misc_feature 1..141: note = Description of artificial sequence: synthetic polynucleotide sequence
  source 1..141: mol_type = other DNA
ccttgcccagctgtgagatgtacttgaggtgtctctcctcgaagatcgtggggtcttggcaggcatagagctgggcaccattccacagcccatcacgaggtgccagggcaccaggtgtggggtctgagaggagctcatagt

SEQ ID NO: 4359 - DNA, 152 bp, synthetic construct
  misc_feature 1..152: note = Description of artificial sequence: synthetic polynucleotide sequence
  source 1..152: mol_type = other DNA
cctgaagagatgaggctattgaggtcacgaatgacggctcggaaggagggcctctggaccggctcataggccatgcactgttgaatcagcagggccagctctgtccacttgggggccggcagctgctgccggtcctcataaaattggagttt

SEQ ID NO: 4360 - DNA, 153 bp, synthetic construct
  misc_feature 1..153: note = Description of artificial sequence: synthetic polynucleotide sequence
  source 1..153: mol_type = other DNA
ccttagcaggatccagggcactgatgggcatggtgacgccactaaacacttcccagaccgtggcgccgaagccccacttgtcagcttccaagctaagtgtctgcgcctcccggagacactcgggggccacccaggggatcctgtcggtgagca

SEQ ID NO: 4361 - DNA, 134 bp, synthetic construct
  misc_feature 1..134: note = Description of artificial sequence: synthetic polynucleotide sequence
  source 1..134: mol_type = other DNA
ctctccaggcttaacacagcggggctgaccccagggtcactcagcttgatgaagggcgggctcccatcagccccctcccgagccaggagcaccttccgggcagagacattgccatggggcaggcctttgtcctc

SEQ ID NO: 4362 - DNA, 121 bp, synthetic construct
  misc_feature 1..121: note = Description of artificial sequence: synthetic polynucleotide sequence
  source 1..121: mol_type = other DNA
atagttgagggcgtaggccagctgtttgaccacctgcagcttccagctggctggcaccaggtggccacgttttcgcagatacatgtctatggcccccaggtgtacaaattcctgcaccatg

SEQ ID NO: 4363 - DNA, 121 bp, synthetic construct
  misc_feature 1..121: note = Description of artificial sequence: synthetic polynucleotide sequence
  source 1..121: mol_type = other DNA
tgggtggggggctctcactgtctccagccatgcacacgccgtggagcagcacgagatgccggtacgacacttggctcatcaagctcgctgcttccaggaatgactggggaaggtgggaagg

SEQ ID NO: 4364 - DNA, 133 bp, synthetic construct
  misc_feature 1..133: note = Description of artificial sequence: synthetic polynucleotide sequence
  source 1..133: mol_type = other DNA
cctccatgcagttcttgtgcttggcatccatgaccttcagcagcacctctgtctttcgggcctccccatccaccacctcatggcgacagccccggtaaatcttggtgaaggacccatggcccaggttctcatg

SEQ ID NO: 4365 - DNA, 121 bp, synthetic construct
  misc_feature 1..121: note = Description of artificial sequence: synthetic polynucleotide sequence
  source 1..121: mol_type = other DNA
ctccaggctgtcagcagggatcttgtgaaatgtcatctgactcagctggtattgggattggggctgaaccaaggatgatgtgggtgggctgtgacctctctggaccacgatcaggttggac

SEQ ID NO: 4366 - DNA, 188 bp, synthetic construct
  misc_feature 1..188: note = Description of artificial sequence: synthetic polynucleotide sequence
  source 1..188: mol_type = other DNA
cctttgggtctggggatacagcaggaagtgagggtcactgccaccccatctacgtgcagccccccatcccagcaggttgccaggagctctcgaagactgctgtggggtcggctgaggccaaccagaaggaaggttcctgtggggctgcgccggatgaggcagcccttataatcaggaccaagggggtt

SEQ ID NO: 4367 - DNA, 121 bp, synthetic construct
  misc_feature 1..121: note = Description of artificial sequence: synthetic polynucleotide sequence
  source 1..121: mol_type = other DNA
ccgacctggacacagacagtgaggaggaagctgtcaaagtcctgggggctgcggcggagaacataggagccaggacgtgagcccccagtcttgagcttgttgatggcaaagtccagactgt

SEQ ID NO: 4368 - DNA, 159 bp, synthetic construct
  misc_feature 1..159: note = Description of artificial sequence: synthetic polynucleotide sequence
  source 1..159: mol_type = other DNA
cgtgatggggccgtggcactgctcggccacttcctccagcagcctcggcggtgccacctccttgcagaagaagtgctgggagtccgtggtcagccggaagtagccgtccacgagcgccacgaacgacagagcctcgggcagccctgggaactcggcctc

SEQ ID NO: 4369 - DNA, 121 bp, synthetic construct
  misc_feature 1..121: note = Description of artificial sequence: synthetic polynucleotide sequence
  source 1..121: mol_type = other DNA
aaaatctggttgtctgtcctggtaacagtgaccaggcggtgctctccggccgggccaacgcgcggggcctgcttgatgctaatgtctacgatttctggaaagtcgcagaagggctggagga

SEQ ID NO: 4370 - DNA, 296 bp, synthetic construct
  misc_feature 1..296: note = Description of artificial sequence: synthetic polynucleotide sequence
  source 1..296: mol_type = other DNA
cctcctgttctccctgggtccaggcgatgccgccgtcaccagccacgcggagcagccccagcccgtcgtggccaccaagggccccagggaggcccacgtggaaggtctcggcggccccggctggatccagccgctccaggtccatgatgtacttggccatgagcgagtgccggtctgcctggcaggcggccacgcggcgcagggctctgcgcaccgtcctccgaatacgcctccgcgtcacgaagctcaggccctggatcaggtcgcgcaggcttgggggtaggcaggccttgtag

SEQ ID NO: 4371 - DNA, 147 bp, synthetic construct
  misc_feature 1..147: note = Description of artificial sequence: synthetic polynucleotide sequence
  source 1..147: mol_type = other DNA
cctgacagtcttcagcagctctcccggccgctgggcctgctctcgcgccatccgggccaggtccaacacggccaggctgagacactcaccctgctccttgagactgaggcccacggggaggcgcccactcaccaggtcactgcggtg

SEQ ID NO: 4372 - DNA, 121 bp, synthetic construct
  misc_feature 1..121: note = Description of artificial sequence: synthetic polynucleotide sequence
  source 1..121: mol_type = other DNA
cccacctgggcaaagaggtgctccaggactggcaggtcaaggatagcactggccaaatccttgcgtagcccgaagcggtggcacttctccagcccaaaccaattggggaagtaaaagctgt

SEQ ID NO: 4373 - DNA, 121 bp, synthetic construct
  misc_feature 1..121: note = Description of artificial sequence: synthetic polynucleotide sequence
  source 1..121: mol_type = other DNA
gaatcctgtacagcaggacttgggtgctggcatcctccacggagaagatgtggctcggggggaaccagcaggacaggtcctccgtggccagagcaaagagggagtggtacacaggcaggat

SEQ ID NO: 4374 - DNA, 185 bp, synthetic construct
  misc_feature 1..185: note = Description of artificial sequence: synthetic polynucleotide sequence
  source 1..185: mol_type = other DNA
ccgctggccttggcagcctgcacgcacaggtcctcagccaagtggtccccaaaggagaaagataggcgctgggggggcccggggccccgagcgggcagcagcacatgcagggcaccagcctccgtggacaagaggctgcatgaacgctgagggatcaggggcgtctcttcacttggaggtgccat

SEQ ID NO: 4375 - DNA, 121 bp, synthetic construct
  misc_feature 1..121: note = Description of artificial sequence: synthetic polynucleotide sequence
  source 1..121: mol_type = other DNA
gtttccagtgttctctgaggcttaatgggaacatttctcttaggaggatccaaacccactcttgggggacatgaggccgcgctgcatgacttgctgaacggcacagggacccctcgaggaa

SEQ ID NO: 4376 - DNA, 121 bp, synthetic construct
  misc_feature 1..121: note = Description of artificial sequence: synthetic polynucleotide sequence
  source 1..121: mol_type = other DNA
tgggccacgtcggcggcatgtaggctgttgtggtaggccacattggcgtggtagtgaccttccagcatcagcaggtaggtggccagtgtgtctgctgggatctggaatgtcttcagcaggt

SEQ ID NO: 4377 - DNA, 121 bp, synthetic construct
  misc_feature 1..121: note = Description of artificial sequence: synthetic polynucleotide sequence
  source 1..121: mol_type = other DNA
aaccatcttcccctttggcccacagcgtcttctgggacctgtactgcgcggcgcctgacagaagagaggcctgcgagcactccggcgaggccaaggccttccaggactatgtgagtcctgg

SEQ ID NO: 4378 - DNA, 121 bp, synthetic construct
  misc_feature 1..121: note = Description of artificial sequence: synthetic polynucleotide sequence
  source 1..121: mol_type = other DNA
gaggctccaagtggggccctctccctcttggacttgttttccaccctctgcaatgaccttgtcaactcagcccagggatttgtctcctccacctggacatactacttgcagactgacaatg

SEQ ID NO: 4379 - DNA, 121 bp, synthetic construct
  misc_feature 1..121: note = Description of artificial sequence: synthetic polynucleotide sequence
  source 1..121: mol_type = other DNA
tgcgccaggtacgctctatacaggaagacgtccctctccacgtctctctctgggcttgatagctgtgggaaccaatgtgagtcaggacgcacagtgggaggcccagcgcagcccacacagg

SEQ ID NO: 4380 - DNA, 121 bp, synthetic construct
  misc_feature 1..121: note = Description of artificial sequence: synthetic polynucleotide sequence
  source 1..121: mol_type = other DNA
gagggaaccttcctggtcaacgatgtttagagctcgacctctggcctggacttgactgccgcccctaagcacagagtcagcctccccaggatggtccacgtcataatcccgactctccttc

SEQ ID NO: 4381 - DNA, 330 bp, synthetic construct
  misc_feature 1..330: note = Description of artificial sequence: synthetic polynucleotide sequence
  source 1..330: mol_type = other DNA
gtcactgttgggtcttctctgaagaggcctggagggaggtggggtccccacgtgccctcgccgtacctggcgagcgctctgggctggtgccaccgggtgatctcctaccggggccagccgtcggccaagggcagccggcgcagggcgggcccaggccgcagaggctctgccagggaccgggcgaggagcaagggataggggaaggtcttaggaaagtcgccggggcccccgggggccggagagaggcgctcagacttgatgctgactgggggggtcggcggggaggcgccgcgggttgggggaccctcctcgcccaggcttcggccccca

SEQ ID NO: 4382 - DNA, 121 bp, synthetic construct
  misc_feature 1..121: note = Description of artificial sequence: synthetic polynucleotide sequence
  source 1..121: mol_type = other DNA
cttacctgggctgggaggacacggcggggggcccatcacccctcgagggctgccagggggccagggtggggggctgcaacaagccagggggcggtggagggtctcccaggccatattctgg

SEQ ID NO: 4383 - DNA, 121 bp, synthetic construct
  misc_feature 1..121: note = Description of artificial sequence: synthetic polynucleotide sequence
  source 1..121: mol_type = other DNA
gttaggggatgtacctggggggcctccggggaggaaggggaagctccccagtgggggtccgggagttgcagtggagcaggggttctgcaggccactgtagaggcttctctgtgcggagaga

SEQ ID NO: 4384 - DNA, 135 bp, synthetic construct
  misc_feature 1..135: note = Description of artificial sequence: synthetic polynucleotide sequence
  source 1..135: mol_type = other DNA
cggaggtgtttagtccccctcggggcccagccaggccaccaggcaggtctgacctccgcccttccgtcggcaggtacagtgggggtggtgtcttgctggtgaggtggcttggtgagaagagagggtgcaccaggc

SEQ ID NO: 4385 - DNA, 149 bp, synthetic construct
  misc_feature 1..149: note = Description of artificial sequence: synthetic polynucleotide sequence
  source 1..149: mol_type = other DNA
cctgggggcccggctttgggggctgctggtcggaagggagatgggcggctctgggcgggcagtgcttccccaagcccactggggtcacagcctggtggcggtaaggccccgtataccacatctgggctgggcatagcaggagctgcagg

SEQ ID NO: 4386 - DNA, 136 bp, synthetic construct
  misc_feature 1..136: note = Description of artificial sequence: synthetic polynucleotide sequence
  source 1..136: mol_type = other DNA
catacagccggggtcggggcaaggccggatcacccccttcgcctgccagcctccgaaacttctctcctggctcctcaggcccttcatccggctccagctctggcccatcgaggccaatgcccctccgcttcagcgt

SEQ ID NO: 4387 - DNA, 205 bp, synthetic construct
  misc_feature 1..205: note = Description of artificial sequence: synthetic polynucleotide sequence
  source 1..205: mol_type = other DNA
cctcgaggatgtcagtgttggtgcggctctcgtggggctcgctgtactctgtgtacttcagcagcacacggtccatgtccgtgctggcatactggaagaggcggttggcgctgttgaagatgatgagggctatctcacagtcacagagcacgctcagctcataggccttcttcatcagcccgaacttccgcttggtgaacgtcac

SEQ ID NO: 4388 - DNA, 121 bp, synthetic construct
  misc_feature 1..121: note = Description of artificial sequence: synthetic polynucleotide sequence
  source 1..121: mol_type = other DNA
ctttcccagccactgttccacccagtgaactcacctgccgattcctttggtccaggatgcgggagatctggatttttttcctccccatcgtcccaggctgagtggaatgatctttgtctag

SEQ ID NO: 4389 - DNA, 121 bp, synthetic construct
  misc_feature 1..121: note = Description of artificial sequence: synthetic polynucleotide sequence
  source 1..121: mol_type = other DNA
gcgttatggcgatacccgtagttgcgcaggcccccgttggcatcaccgccgccccctgcactcccggtcccccccaggccgccgcagggctcccggggccggttcacggggtattgcactg

SEQ ID NO: 4390 - DNA, 121 bp, synthetic construct
  misc_feature 1..121: note = Description of artificial sequence: synthetic polynucleotide sequence
  source 1..121: mol_type = other DNA
cggatgcccggcagtgtcatacccccgcccctggtccgaggtgggcagcaggcgtcctcgaagctggggccacaggcgagctcacaggtcgtcatgcccccactcgtcaggggggctcagg

SEQ ID NO: 4391 - DNA, 121 bp, synthetic construct
  misc_feature 1..121: note = Description of artificial sequence: synthetic polynucleotide sequence
  source 1..121: mol_type = other DNA
agaactgagaaaactgaaggctttaccacattctttacatttgtagggtttttctccagtgtgagttctttcatgagttcgaaagtatgtgggacaactgaaagccttaccacattgctta

SEQ ID NO: 4392 - DNA, 121 bp, synthetic construct
  misc_feature 1..121: note = Description of artificial sequence: synthetic polynucleotide sequence
  source 1..121: mol_type = other DNA
tttgatttccgttgagtatatactcagaagtggaattgctaagccatgtggtaactctatgctaacctcaggaggaactgccaaaatgttttccaaaactgctgcctaattttgccactgc

SEQ ID NO: 4393 - DNA, 121 bp, synthetic construct
  misc_feature 1..121: note = Description of artificial sequence: synthetic polynucleotide sequence
  source 1..121: mol_type = other DNA
ttcttttttgggcaatgatcaggtaagagagcagagtcacatcaagtggttgatgggcctggagatatatgacattgccccctatggacagggaccaggcaggagactcacatcaccttgg

SEQ ID NO: 4394 - DNA, 121 bp, synthetic construct
  misc_feature 1..121: note = Description of artificial sequence: synthetic polynucleotide sequence
  source 1..121: mol_type = other DNA
aggaaaaatcctccagaacataaactccttttctattttcccctcggatgcactgtcctggaagcagttagttatgtgcctcatgggagagaatgccctgatactaagctgtgtgcttgac

SEQ ID NO: 4395 - DNA, 121 bp, synthetic construct
  misc_feature 1..121: note = Description of artificial sequence: synthetic polynucleotide sequence
  source 1..121: mol_type = other DNA
cctgagctcacagcaggctgtcacatatgctggccttgttcaggccctagaaatggcttttggatcagtgtttctttcctgcaccttcttcaagagagctgaggctcagcagggcccaggc

SEQ ID NO: 4396 - DNA, 121 bp, synthetic construct
  misc_feature 1..121: note = Description of artificial sequence: synthetic polynucleotide sequence
  source 1..121: mol_type = other DNA
tgtggcccccttaagcctgaagaacacaggactctgggctgtaattcagatctatttggtacccagttatcactaccaaaaacgcagctcagccgggtcccatgccagagagggaagccca

SEQ ID NO: 4397 - DNA, 121 bp, synthetic construct
  misc_feature 1..121: note = Description of artificial sequence: synthetic polynucleotide sequence
  source 1..121: mol_type = other DNA
ctaccaaatattttaaaaaaaagagctaacatcaatctttttcaaatgctaccccccaaagaaatggagaagagggaatatttctcaactcttttttataaggccagcataaccctgacac

SEQ ID NO: 4398 - DNA, 121 bp, synthetic construct
  misc_feature 1..121: note = Description of artificial sequence: synthetic polynucleotide sequence
  source 1..121: mol_type = other DNA
ggggtgccccatcccctggaggagtctgtgtgtgcagaggggccataattgtgctgatgttatagagacttaagtgaccaccccagggctgccgttgctcaggtgtgtttctggcattccc

SEQ ID NO: 4399 - DNA, 121 bp, synthetic construct
  misc_feature 1..121: note = Description of artificial sequence: synthetic polynucleotide sequence
  source 1..121: mol_type = other DNA
ttacctctgagtaatagagaagtgtccacgtcatgtttatgtagagaacaagtatggcacggaggacagtccctcgtcttctaccaatgccgtacgttttccatctaaatacaaagaacat

SEQ ID NO: 4400 - DNA, 121 bp, synthetic construct
  misc_feature 1..121: note = Description of artificial sequence: synthetic polynucleotide sequence
  source 1..121: mol_type = other DNA
attacaattggagttaaaatggaatccctttaaggagcatgtacaaaatagatcatcccttctttcttaagtacatttgtgaacccgcccgtgatgaattattgcagcccgggaagtggcc

SEQ ID NO: 4401 - DNA, 121 bp, synthetic construct
  misc_feature 1..121: note = Description of artificial sequence: synthetic polynucleotide sequence
  source 1..121: mol_type = other DNA
ccagaacagtgcttggcacatcagaagtctttggtatacctctgttgagtgactgaataagtgaatggctgtatgagcagcaccacagcctctaatttacttaaccaacttcctgctgtta

SEQ ID NO: 4402 - DNA, 121 bp, synthetic construct
  misc_feature 1..121: note = Description of artificial sequence: synthetic polynucleotide sequence
  source 1..121: mol_type = other DNA
gactatacctccctgtgcttccgttttctcatgtgtaaaatacagtacctagctcttattgtggttgtgagaatttattgcaggtaaaactctcggcctggcacagtgtaaatgctcagta

SEQ ID NO: 4403 - DNA, 121 bp, synthetic construct
  misc_feature 1..121: note = Description of artificial sequence: synthetic polynucleotide sequence
  source 1..121: mol_type = other DNA
agagaaaccttgtgaatgtgggaaagcttccattcagatgtcacacctcagccagcagagaatttacagtggggaaaacccctttgcctgtaaggtatgtggaaaagtcttcagccacaaa

SEQ ID NO: 4404 - DNA, 121 bp, synthetic construct
  misc_feature 1..121: note = Description of artificial sequence: synthetic polynucleotide sequence
  source 1..121: mol_type = other DNA
tgttatggattcagcacagggcctggccctctgctgacccccagcatatgcttgtccagagaatgaatatgtacggacccatggtggcctggggcatcatgaggtcggctgcccacattct

SEQ ID NO: 4405 - DNA, 121 bp, synthetic construct
  misc_feature 1..121: note = Description of artificial sequence: synthetic polynucleotide sequence
  source 1..121: mol_type = other DNA
ctggaaggtggatgtcattcaggagaccttggaagacctagagtgtcctctgcacaaatgaagtggaggatggggttaaattacggagttggatgacactcattacctgacttcacttctc

SEQ ID NO: 4406 - DNA, 121 bp, synthetic construct
  misc_feature 1..121: note = Description of artificial sequence: synthetic polynucleotide sequence
  source 1..121: mol_type = other DNA
taaccaacccactgggagaagatgcctgggggtccaggagtcctccaagctctgcctgccaccatcttcctcctcttcctgctgtctgctgtctacctgggtatgtggccaaagggcagga

SEQ ID NO: 4407 - DNA, 301 bp, synthetic construct
  misc_feature 1..301: note = Description of artificial sequence: synthetic polynucleotide sequence
  source 1..301: mol_type = other DNA
ggccctgggtgccaggccctgtggatgcacaaggtcccagcatcattgatggtgagcctgggggaagacgcccacttccaatgcccgcacaatagcagcaacaacgccaacgtcacctggtggcgcgtcctccatggcaactacacgtggccccctgagttcttgggcccgggcgaggaccccaatggtacgctgatcatccagaatgtgaacaagagccatgggggcatatacgtgtgccgggtccaggagggcaacgagtcataccagcagtcctgcggcacctacctccgcgtgcgcc

SEQ ID NO: 4408 - DNA, 121 bp, synthetic construct
  misc_feature 1..121: note = Description of artificial sequence: synthetic polynucleotide sequence
  source 1..121: mol_type = other DNA
gagccgccccccaggcccttcctggacatgggggagggcaccaagaaccgaatcatcacagccgaggggatcatcctcctgttctgcgcggtggtgcctgggacgctgctgctgttcaggg

SEQ ID NO: 4409 - DNA, 121 bp, synthetic construct
  misc_feature 1..121: note = Description of artificial sequence: synthetic polynucleotide sequence
  source 1..121: mol_type = other DNA
ggcacccaccccacccacccctacagaaacgatggcagaacgagaagctcgggttggatgccggggatgaatatgaagatgaaaacctttatgaagtgagtgaagggtggggatggggtag

SEQ ID NO: 4410 - DNA, 121 bp, synthetic construct
  misc_feature 1..121: note = Description of artificial sequence: synthetic polynucleotide sequence
  source 1..121: mol_type = other DNA
ccagggcctgaacctggacgactgctccatgtatgaggacatctcccggggcctccagggcacctaccaggatgtgggcagcctcaacataggagatgtccagctggagaagccgtgacac

SEQ ID NO: 4411 - DNA, 121 bp, synthetic construct
  misc_feature 1..121: note = Description of artificial sequence: synthetic polynucleotide sequence
  source 1..121: mol_type = other DNA
gggagagtgcggagcccgagcgcggaggcttcggttccggtggcggcgatggcttctctttccacctggagcaggtgagggacgcggtccccagcgggtgtcagaccctgactctgcacgt

SEQ ID NO: 4412 - DNA, 121 bp, synthetic construct
  misc_feature 1..121: note = Description of artificial sequence: synthetic polynucleotide sequence
  source 1..121: mol_type = other DNA
ctcccaccctcctaaccacagcccctcctcttcctccagccctgcagagcccagggagatggaagacttcgcccgaggggcggtgagtggacagagcaaggggtgaggcgactctggggct

SEQ ID NO: 4413 - DNA, 121 bp, synthetic construct
  misc_feature 1..121: note = Description of artificial sequence: synthetic polynucleotide sequence
  source 1..121: mol_type = other DNA
gccctccctttccacaggcctccccaggcccctcccggcctggcctggttcccgtcagcatcatcggggctgaggatgaggattttgagaacgagctggagacagtgagtgggagataggg

SEQ ID NO: 4414 - DNA, 121 bp, synthetic construct
  misc_feature 1..121: note = Description of artificial sequence: synthetic polynucleotide sequence
  source 1..121: mol_type = other DNA
ccagaactcagaagagcaaaacagccagttccagagcctggagcaggtgaagcggcgcccagcccacctcatggccctcctgcagcacgtggccctgcagtttgagccaggacccctggtg

SEQ ID NO: 4415 - DNA, 121 bp, synthetic construct
  misc_feature 1..121: note = Description of artificial sequence: synthetic polynucleotide sequence
  source 1..121: mol_type = other DNA
gtctcccccagctttgctgtctgcatgccgacatgctgggctcactgggccccaaggaggccaagaaggccttcctggacttctaccacagcttcctggagaagacagcggtgagagacct

SEQ ID NO: 4416 - DNA, 121 bp, synthetic construct
  misc_feature 1..121: note = Description of artificial sequence: synthetic polynucleotide sequence
  source 1..121: mol_type = other DNA
ccaagtcctcctcttcaccccattctctctcttgagcaggttctccgggtgccggtccctcccaacgtcgcctttgaacttggtaaggagaaggatgggatgagggagaggtgtctagcgg

SEQ ID NO: 4417 - DNA, 121 bp, synthetic construct
  misc_feature 1..121: note = Description of artificial sequence: synthetic polynucleotide sequence
  source 1..121: mol_type = other DNA
gaccgcactagggctgacctcatctccgaggatgtccagcggcggttcgtgcaggaggtggtgcaaagccagcaggtagccgtgggccggcagctggaggacttccgttccaagcggctca

SEQ ID NO: 4418 - DNA, 121 bp, synthetic construct
  misc_feature 1..121: note = Description of artificial sequence: synthetic polynucleotide sequence
  source 1..121: mol_type = other DNA
tgacgccctgggagcaggagctggcccagctggaggcttgggttgggcgggaccgagccagctacgaggcccgggagcggcacgtggcggagcggctgctcatgcacctggaggagatgca

SEQ ID NO: 4419 - DNA, 121 bp, synthetic construct
  misc_feature 1..121: note = Description of artificial sequence: synthetic polynucleotide sequence
  source 1..121: mol_type = other DNA
cccaggcctagcaaatatgtcacaaacatctctcttcctcctacagacataccatctctaccgacgaagaaaagaggtgaggggggcaggggaggcgtgcggcctcctgggtttgagggag

SEQ ID NO: 4420 - DNA, 121 bp, synthetic construct
  misc_feature 1..121: note = Description of artificial sequence: synthetic polynucleotide sequence
  source 1..121: mol_type = other DNA
cttccctacagtgctgccgtggtcaacgccattggcctgtacatgcgccaccttggggtgcggaccaagagtggagacaagaagtcggggaggaacttcttccggaaaaaggtgcttccct

SEQ ID NO: 4421 - DNA, 121 bp, synthetic construct
  misc_feature 1..121: note = Description of artificial sequence: synthetic polynucleotide sequence
  source 1..121: mol_type = other DNA
gccctctcacaggtgatggggaaccggcggtcggacgagcctgccaagaccaagaaggggctgagcagcatcctggatgccgcccgctggaaccggggagagccccagggtaaggcggctc

SEQ ID NO: 4422 - DNA, 121 bp, synthetic construct
  misc_feature 1..121: note = Description of artificial sequence: synthetic polynucleotide sequence
  source 1..121: mol_type = other DNA
ccccagctgctcccactcactgtctcattctctctcgtttcagttccagattttcgacacctcaaagcagaggttgatggtaatgtacctgtagccatagcatccatactgggggcctgtg

SEQ ID NO: 4423 - DNA, 139 bp, synthetic construct
  misc_feature 1..139: note = Description of artificial sequence: synthetic polynucleotide sequence
  source 1..139: mol_type = other DNA
gccgagaagccaggtgctacagaccggaagggaggcgtggggatgccctctcgggaccggaatatcggggctcctgggcaggacacccctggagtctctctgcaccctctgtccctggacagcccagaccgggaaccag

SEQ ID NO: 4424 - DNA, 121 bp, synthetic construct
  misc_feature 1..121: note = Description of artificial sequence: synthetic polynucleotide sequence
  source 1..121: mol_type = other DNA
ccccacaggtgctgacgcccccctggagctgggggactcatccccgcagggcccaatgagcctggagtccttggcgcccccagagagtaccgacgagggggccgaaaccgagaggtgccca

SEQ ID NO: 4425 - DNA, 147 bp, synthetic construct
  misc_feature 1..147: note = Description of artificial sequence: synthetic polynucleotide sequence
  source 1..147: mol_type = other DNA
gccccgagcctggagatgagggggagccggggcggtcgggactggagcttgaaccagaagagcctcccggctggcgggaactcgtccccccagacaccctgcacagcctgcccaagagccaggtgaagcggcaggaggtcatcagcg

SEQ ID NO: 4426 - DNA, 148 bp, synthetic construct
  misc_feature 1..148: note = Description of artificial sequence: synthetic polynucleotide sequence
  source 1..148: mol_type = other DNA
gagctgctggtgacagaggcggcccacgtgcgcatgctgcgggtgctgcacgacctcttcttccagcccatggcagaatgcctgttcttccccttggaggagctgcagaacatcttccccagcctggacgagctcatcgaggtgcatt

SEQ ID NO: 4427 - DNA, 121 bp, synthetic construct
  misc_feature 1..121: note = Description of artificial sequence: synthetic polynucleotide sequence
  source 1..121: mol_type = other DNA
tttcctcctgcccccacagccctgttcctcgatcgcctgatgaagcggaggcaggagagtggctacctcatcgaggagatcggagacgtgctgctggcccgggtgagatgcccagccctcc

SEQ ID NO: 4428 - DNA, 121 bp, synthetic construct
  misc_feature 1..121: note = Description of artificial sequence: synthetic polynucleotide sequence
  source 1..121: mol_type = other DNA
tgatggtgctgagggctcctggttccagaaaatctcctcccgcttctgcagccgccagtcatttgccttagagcagctcaaagccaagcaacgcaaggaccctcggttctgtgccttcgtg

SEQ ID NO: 4429 - DNA, 121 bp, synthetic construct
  misc_feature 1..121: note = Description of artificial sequence: synthetic polynucleotide sequence
  source 1..121: mol_type = other DNA
caggaagctgagagccgcccgcggtgccgccgcctgcagctgaaggacatgatccccacggagatgcagcggctgaccaagtaccccctgctcctgcagagcatcgggcagaacacaggta

SEQ ID NO: 4430 - DNA, 121 bp, synthetic construct
  misc_feature 1..121: note = Description of artificial sequence: synthetic polynucleotide sequence
  source 1..121: mol_type = other DNA
ttgcctgcagaagagcccacagaacgggagaaagtggagctggcagccgagtgctgccgggaaattctacaccacgtcaaccaagccgtgcgtgacatggaggacctgctggtgagcctgg

SEQ ID NO: 4431 - DNA, 121 bp, synthetic construct
  misc_feature 1..121: note = Description of artificial sequence: synthetic polynucleotide sequence
  source 1..121: mol_type = other DNA
aatgctcccgtctctgccccagaggctcaaggactatcagcggcgcctggacttgtcccaccttcggcagagcagcgaccctatgctgagcgagttcaaggtgtgaccataccctcctgcc

SEQ ID NO: 4432 - DNA, 121 bp, synthetic construct
  misc_feature 1..121: note = Description of artificial sequence: synthetic polynucleotide sequence
  source 1..121: mol_type = other DNA
accatcaccccctcctgccccagaacctggacatcaccaagaagaaattggtccacgagggcccactgacgtggcgggtgactaaggacaaggcagtgggtgagtgccagagcagctgcct

SEQ ID NO: 4433 - DNA, 169 bp, synthetic construct
  misc_feature 1..169: note = Description of artificial sequence: synthetic polynucleotide sequence
  source 1..169: mol_type = other DNA
gaggtgcatgtgctgctgctggacgacctgctgctgctgctccagcgccaggacgagcggctgctgctcaagtcccatagccggacactgacgcccacgcccgatggcaagaccatgctgcggcccgtgctgcggctcacctccgccatgacccgcgaggtggccaccg

SEQ ID NO: 4434 - DNA, 121 bp, synthetic construct
  misc_feature 1..121: note = Description of artificial sequence: synthetic polynucleotide sequence
  source 1..121: mol_type = other DNA
tccccctctccctgcagatcacaaagccttctacgtcctttttacctgggaccaggaggcccagatatacgagctggtggcacagactgtgtcggagcggaaaaagtgagggggggtctga

SEQ ID NO: 4435 - DNA, 121 bp, synthetic construct
  misc_feature 1..121: note = Description of artificial sequence: synthetic polynucleotide sequence
  source 1..121: mol_type = other DNA
ttggcctttctccccagctggtgtgctctcatcactgagactgccggatccctgaaagtccctgcccctgcctctcgccctaagccccggcccagcccgagcaggtgaggggggccatgga

SEQ ID NO: 4436 - DNA, 121 bp, synthetic construct
  misc_feature 1..121: note = Description of artificial sequence: synthetic polynucleotide sequence
  source 1..121: mol_type = other DNA
gggtcacccagcacttcctcccctcagcacccgagaacccctcctcagcagctctgagaacggcaatggtggccgagagacgtctccagctgatggtgagaccagagggatgctgggtgag

SEQ ID NO: 4437 - DNA, 121 bp, synthetic construct
  misc_feature 1..121: note = Description of artificial sequence: synthetic polynucleotide sequence
  source 1..121: mol_type = other DNA
tctgttccccaatccagcccggaccgagagaatcctcagtgacctcctgcccttctgcagaccaggccccgagggccagctcgctgccacggcccttcggaaaggtagcccagctctgccc

SEQ ID NO: 4438 - DNA, 165 bp, synthetic construct
  misc_feature 1..165: note = Description of artificial sequence: synthetic polynucleotide sequence
  source 1..165: mol_type = other DNA
gtgctgtccctgaagcagcttctgtttccggcggaggaagacaatggggcggggcctcctcgagatggggatggggtcccagggggcggccccctgagcccagcacggacccaggaaatccaggagaacctgctcagcttggaggagaccatgaagcagctggag

SEQ ID NO: 4439 - DNA, 121 bp, synthetic construct
  misc_feature 1..121: note = Description of artificial sequence: synthetic polynucleotide sequence
  source 1..121: mol_type = other DNA
atgacccccaccccaccaggagttggaggaggaattttgccgcctgagacccctcctgtctcagcttggggggaactctgtcccccagcctggctgcacttgaggttcccgcccaggaagg

SEQ ID NO: 4440 - DNA, 121 bp, synthetic construct
  misc_feature 1..121: note = Description of artificial sequence: synthetic polynucleotide sequence
  source 1..121: mol_type = other DNA
gggctgcaccggctgcccccagcaccagattcccgctgccatcaaggctggtaaggggcagggttccaccagaggccagggctggcggggagagagagaggctgggctaagggcatgccgg

SEQ ID NO: 4441 - DNA, 207 bp, synthetic construct
  misc_feature 1..207: note = Description of artificial sequence: synthetic polynucleotide sequence
  source 1..207: mol_type = other DNA
cttaccccgtgctggggttcaggcctgacaagccgatagccgagtggctgccttgagggctggggtttgtgctgttggtggtggccgggggtgggggagtgacagaggggatggaattgagggggggcgcagccccgcccccgcccccaccccctccagctgtccggctggggtggagcgtccccacagctgaggataaggtagtaa

SEQ ID NO: 4442 - DNA, 121 bp, synthetic construct
  misc_feature 1..121: note = Description of artificial sequence: synthetic polynucleotide sequence
  source 1..121: mol_type = other DNA
ccctcaccattttctgccctccctgacctgttgtgctcagactgctggaagcttgggacaacggtaaggtccccgcgcccccttggggtgtgacctgaggagagaagaaaggaggtgtggt

SEQ ID NO: 4443 - DNA, 178 bp, synthetic construct
  misc_feature 1..178: note = Description of artificial sequence: synthetic polynucleotide sequence
  source 1..178: mol_type = other DNA
ccatatgggggctgtagctggccggcttccctgggctgggcagcatgggggccgcactgcaggggttgatgcgtttctccttctggcgccggttgcagaaccagacgcggatcacttccttctccatgtgcagctgctcggcgatcagcaggatctcctctgaggtaggcttctggtt

SEQ ID NO: 4444 - DNA, 150 bp, synthetic construct
  misc_feature 1..150: note = Description of artificial sequence: synthetic polynucleotide sequence
  source 1..150: mol_type = other DNA
ccgctagaaaactcttctctaaggcgaagcggacgtttgtctcgatgctggtcctcttcttgcgtctccggccgggcaggccgtcgaaacccaggctggggctgctcagctggttggggctgggcaggcttgagtccacagacatagtct

SEQ ID NO: 4445 - DNA, 143 bp, synthetic construct
  misc_feature 1..143: note = Description of artificial sequence: synthetic polynucleotide sequence
  source 1..143: mol_type = other DNA
cctgcatcgttgagccacttctccaggaggggcttgagtttgcacatgttcttgaagctcaggttgagggcctcgaagcgggaaatggtcgtctggctgaagtcgttgccgtagagcttgcccatggccaggcccacatcacc

SEQ ID NO: 4446 - DNA, 163 bp, synthetic construct
  misc_feature 1..163: note = Description of artificial sequence: synthetic polynucleotide sequence
  source 1..163: mol_type = other DNA
cctgcgtgaagcccagcttgatgcggcgttgcttgaaggtgcgggcgaattgctccagctcctccagatcactgggctcctcggggtgggatggtggctccaagcatttggggggctgcgggtgcgagaggtgcgggtcgggcagcgtagggcgggtcacggc

SEQ ID NO: 4447 - DNA, 121 bp, synthetic construct
  misc_feature 1..121: note = Description of artificial sequence: synthetic polynucleotide sequence
  source 1..121: mol_type = other DNA
aatggacagtctcacctgtgtgggaagcccggcccggggctgggaggtcagaagagctccctgggtttgctgaggtagctggaatagatttggtgtcggtagcaggcctggaaagacaagg

SEQ ID NO: 4448 - DNA, 121 bp, synthetic construct
  misc_feature 1..121: note = Description of artificial sequence: synthetic polynucleotide sequence
  source 1..121: mol_type = other DNA
ggccttacctggctggctctgctgggcctgcggtagcaggaactgagcaggtggctggaggtggtggcctggcacaagcaccagctgctggagctggaggagctgctgtatgtcctggcag

SEQ ID NO: 4449 - DNA, 121 bp, synthetic construct
  misc_feature 1..121: note = Description of artificial sequence: synthetic polynucleotide sequence
  source 1..121: mol_type = other DNA
accccagctagctggctgcccgtcaacatgagttgggcctggggcagatgaggctgggccggctgagggggcaggggtgctgctggggctgaatcgccactggggtcttcagccttgatct

SEQ ID NO: 4450 - DNA, 121 bp, synthetic construct
  misc_feature 1..121: note = Description of artificial sequence: synthetic polynucleotide sequence
  source 1..121: mol_type = other DNA
ccacttccctggctgttctgacaggtgcttacctttgtactggggccagttggggacacggagaatggggaggtcttattttgggggttctgcaaagagaaagtaggagcaaggggatggg

SEQ ID NO: 4451 - DNA, 121 bp, synthetic construct
  misc_feature 1..121: note = Description of artificial sequence: synthetic polynucleotide sequence
  source 1..121: mol_type = other DNA
ccattccttcccaccccctcccgcttatccactccctcctaacctgatgattagtgtctggtccatttctttcggtgtctgcaaagagagggaaaggatgtgttgtcatcagccaccccca

SEQ ID NO: 4452 - DNA, 121 bp, synthetic construct
  misc_feature 1..121: note = Description of artificial sequence: synthetic polynucleotide sequence
  source 1..121: mol_type = other DNA
cctgcccccctgctccctgcccacccacctgtgtgctctgatggggagtccagaccttgcttctcggcctccaggggcttagacattcttatttctggggacagaggaggaatggaagtgg

SEQ ID NO: 4453 - DNA, 121 bp, synthetic construct
  misc_feature 1..121: note = Description of artificial sequence: synthetic polynucleotide sequence
  source 1..121: mol_type = other DNA
tgtgctgcctgtcctctgagcagtggcacaggcaccagcccccttacctggagcccccatgctggagtgaaccatgctgcccgccccgccagggctgggggaacaactgtgtcatctcccc

SEQ ID NO: 4454 - DNA, 121 bp, synthetic construct
  misc_feature 1..121: note = Description of artificial sequence: synthetic polynucleotide sequence
  source 1..121: mol_type = other DNA
atattttcagacagactaacacttgaggttttcacctccaatttttctactaaccccaatatactatcctattgcctaagggcaaaaagaactaaagaaggtaaaaacaaactgcaagctt

SEQ ID NO: 4455 - DNA, 121 bp, synthetic construct
  misc_feature 1..121: note = Description of artificial sequence: synthetic polynucleotide sequence
  source 1..121: mol_type = other DNA
gccatgaggtggaaagagactgttgggggcagaattgtaaagcgagggacaagaagagtcaggggtctccaagctttgagcctgagccactgcaaggatgaagctgccatttctgaggcca

SEQ ID NO: 4456 - DNA, 215 bp, synthetic construct
  misc_feature 1..215: note = Description of artificial sequence: synthetic polynucleotide sequence
  source 1..215: mol_type = other DNA
ctcaggcctcgccggccgcctcagggtgcttctgccgcaggtgtttgtccagggtggctcgcaggccgaagggcacatggcagtgggggcactcgaagcgggtgctgccaggcgtcatgccgtgcatgcggcggtggcggttgagcttactgctctgggcgcaggcgtagttgcagaactcacaggtgtaggggcgctccccggtgtgtgagcgc

SEQ ID NO: 4457 - DNA, 430 bp, synthetic construct
  misc_feature 1..430: note = Description of artificial sequence: synthetic polynucleotide sequence
  source 1..430: mol_type = other DNA
cggtgcaccgtcaggttgctgctgttggtaaaatgcttcccgcagaactcacagctgcccccgggcccgcggctcttgccccctgacttgggcatctttttgggtgatgccttctggctgtttgcagggtcagttctttgttccgtggtgatggctccccaagtgtctccaccagggccggcttgagccccactgccaggagccccgggttcctggacacctgctgtggcggcggctccagccccctcaccaccgctgcatggaagggtgctggtgggggcagcagcatggacagccggctccggaggggctgcagaggcctgctcctggctggtgtcggccatgagggggctctggggcggcacctgccggtgggtcttcttgtggcggttgagcttgctgctctgggcgcaggcgtagggacactggt

SEQ ID NO: 4458 - DNA, 336 bp, synthetic construct
  misc_feature 1..336: note = Description of artificial sequence: synthetic polynucleotide sequence
  source 1..336: mol_type = other DNA
cgcaagcatagggccgctcgcctgtgtgtgagcgcatgtgcactttgaggttgctgaaggagctgagggtcttcttgcacacaggacaggtggggctccgccgggtgaggccgctgccacttgcacgggggctcttggcctcagctgctggccccaccactgccgacacggctgcagccacctcggccaggcccaggagcggggcctccggggcctctgattctgtctggtagatggacagtccgtggtcccactgggcgtgacgcagcagcttccaggccactgtgaactgtttgccacagcgcaggcagctcaaggccttcagctcctctcgtt

SEQ ID NO: 4459 - DNA, 151 bp, synthetic construct
  misc_feature 1..151: note = Description of artificial sequence: synthetic polynucleotide sequence
  source 1..151: mol_type = other DNA
cctgagccctggccgcggctggggcctctgaagagctgacagcccagcttcttgtggtccatgaaggcagtgatggcctccaacgggaaggtctgcaggcagcggccgcaggtcaacagatctgggtgtttgtcggtccagggctggcggt

SEQ ID NO: 4460 - DNA, 299 bp, synthetic construct
  misc_feature 1..299: note = Description of artificial sequence: synthetic polynucleotide sequence
  source 1..299: mol_type = other DNA
ccgggatagttcggggtcaacggcgtccacagggtccacgggttccgcgggccgagggcgaggagggcggccccggcgggcatggggccaggggagtggtggggttcgccgccgaaccgccccgccgaggacacctccttcggggagaagggccccagccttggggcctgttggggctgcgcgtctggctcgggcttgagttcgatgacgaggtcctgcatttccatctcgtcgtctgggttggcggcgggcgcgggctctactcggcggggcgcgctgccggccttgcggcgggacat

SEQ ID NO: 4461 - DNA, 121 bp, synthetic construct
  misc_feature 1..121: note = Description of artificial sequence: synthetic polynucleotide sequence
  source 1..121: mol_type = other DNA
acccctgggggtggcaggaagcagcagctggtgaccagaagctggtgctgctacaaggcagtaaatttaataagattattcggatctgttctcatggaggctgggcacgcagggacctgcc

SEQ ID NO: 4462 - DNA, 121 bp, synthetic construct
  misc_feature 1..121: note = Description of artificial sequence: synthetic polynucleotide sequence
  source 1..121: mol_type = other DNA
ttcaggggtgagtttgaggtctgattattgtggcacagatttgaggagtgacaccccgttctgattctgcaccctcactccatccccactctagtttcatccaggatcgagcagggcgaat

SEQ ID NO: 4463 - DNA, 121 bp, synthetic construct
  misc_feature 1..121: note = Description of artificial sequence: synthetic polynucleotide sequence
  source 1..121: mol_type = other DNA
gaggcacccgagctggccctggacccggtgcctcaggatgcgtccaccaagaagctgagcgagtgtctcaagcgcatcggggacgaactggacagtaacatggagctgcagaggtgtgggc

SEQ ID NO: 4464 - DNA, 121 bp, synthetic construct
  misc_feature 1..121: note = Description of artificial sequence: synthetic polynucleotide sequence
  source 1..121: mol_type = other DNA
gccagcagggccagatggcggcagtgagtgacacagtacttcaggggcttccagggttccgatttcatcctagaatgtacgttttcagacgcagggaattttcatccctcaggttggcttc

SEQ ID NO: 4465 - DNA, 121 bp, synthetic construct
  misc_feature 1..121: note = Description of artificial sequence: synthetic polynucleotide sequence
  source 1..121: mol_type = other DNA
tggtagggcccgcgacagattctctcagggccagaggcctttgctgggacaccacaggatttgtgagcacttttgattttgctgtgagaactcacccagaacttgaccaggaagaaggcat

SEQ ID NO: 4466 - DNA, 121 bp, synthetic construct
  misc_feature 1..121: note = Description of artificial sequence: synthetic polynucleotide sequence
  source 1..121: mol_type = other DNA
gccacgatcatatagctctcggaggccaccctttttctcagggaatttgtcgtagatctgccggacgtccacactctcgagcggcggcgctccggggctggggcagtgctggctgatgtgc

SEQ ID NO: 4467 - DNA, 121 bp, synthetic construct
  misc_feature 1..121: note = Description of artificial sequence: synthetic polynucleotide sequence
  source 1..121: mol_type = other DNA
atagggttggcggctgcagcgggcggcaaacagcccgcccggcaccaccatgctcgccctggaggctgcacagtaagtgagggcccccaaacctgcacccggggtccccacctgcactgcc

SEQ ID NO: 4468 - DNA, 121 bp, synthetic construct
  misc_feature 1..121: note = Description of artificial sequence: synthetic polynucleotide sequence
  source 1..121: mol_type = other DNA
gtggctggaggcagcctcagcatgcccctgtgtctctccccctccaggctcgacgggccacacttcagctgtctggtgagttggggcccctgggggccagggaggggtggcccacagtgac

SEQ ID NO: 4469 - DNA, 121 bp, synthetic construct
  misc_feature 1..121: note = Description of artificial sequence: synthetic polynucleotide sequence
  source 1..121: mol_type = other DNA
cttccctcctgcaccccgtatcagtacccagatggcgtcttctatgacctggacagctgcaagcattccagctaccctgattcagagggggctcctggtgagtgaccccagccctgtgccc

SEQ ID NO: 4470 - DNA, 216 bp, synthetic construct
  misc_feature 1..216: note = Description of artificial sequence: synthetic polynucleotide sequence
  source 1..216: mol_type = other DNA
gactccctgtgggactggactgtggccccacctgtcccagccaccccctatgaagccttcgacccggcagcagccgcttttagccacccccaggctgcccagctctgctacgaaccccccacctacagccctgcagggaacctcgaactggcccccagcctggaggccccggggcctggcctccctgcataccccacggagaacttcgctagccag

SEQ ID NO: 4471 - DNA, 152 bp, synthetic construct
  misc_feature 1..152: note = Description of artificial sequence: synthetic polynucleotide sequence
  source 1..152: mol_type = other DNA
gaccctggttcccccggcatatgccccgtaccccagccctgtgctatcagaggaggaagacttaccgttggacagccctgccctggaggtctcggacagcgagtcggatgaggccctcgtggctggccccgaggggaagggatccgaggcag

SEQ ID NO: 4472 - DNA, 300 bp, synthetic construct
  misc_feature 1..300: note = Description of artificial sequence: synthetic polynucleotide sequence
  source 1..300: mol_type = other DNA
gggactcgcaagaagctgcgcctgtaccagttcctgctggggctactgacgcgcggggacatgcgtgagtgcgtgtggtgggtggagccaggcgccggcgtcttccagttctcctccaagcacaaggaactcctggcgcgccgctggggccagcagaaggggaaccgcaagcgcatgacctaccagaagctggcgcgcgccctccgaaactacgccaagaccggcgagatccgcaaggtcaagcgcaagctcacctaccagttcgacagcgcgctgctgcctgcagtccgccgggcctga

SEQ ID NO: 4473 - DNA, 121 bp, synthetic construct
  misc_feature 1..121: note = Description of artificial sequence: synthetic polynucleotide sequence
  source 1..121: mol_type = other DNA
aacacatcgctcctgcgtacggctgggatgagtcactggcaccagacgtgccctcctgcaaaaaacagctatgaaactggacaaaatacaggagggccactgttttcaggcgttgaacagt

SEQ ID NO: 4474 - DNA, 121 bp, synthetic construct
  misc_feature 1..121: note = Description of artificial sequence: synthetic polynucleotide sequence
  source 1..121: mol_type = other DNA
gagggagtacagttttcaacagagtggtcctggaaagtgcaactgagtaggtgtcaccttcataagacccaagggatgcttttgcatttgttgctgctgccactactattgttgttattta

SEQ ID NO: 4475 - DNA, 121 bp, synthetic construct
  misc_feature 1..121: note = Description of artificial sequence: synthetic polynucleotide sequence
  source 1..121: mol_type = other DNA
ttcagcacattgtttacaagtgaccagatgtccacaaggaataaaaacaacagcgatatgtctgtccatgcagattttacaaagcttctcctcttgcagacgccttagcggctcttcaggg

SEQ ID NO: 4476 - DNA, 121 bp, synthetic construct
  misc_feature 1..121: note = Description of artificial sequence: synthetic polynucleotide sequence
  source 1..121: mol_type = other DNA
acctcacatgccatcatagacttcatactggagagaaagcttacaagtgtaatgagtgcggcaagacctttagttggaagtcatcccttacctgccatcgtagacttcattctggagagaa

SEQ ID NO: 4477 - DNA, 121 bp, synthetic construct
  misc_feature 1..121: note = Description of artificial sequence: synthetic polynucleotide sequence
  source 1..121: mol_type = other DNA
agaccacagcgctccagagggaggtatgtcaatcagatgatcatcaattatgtcaaaagacctgctactagagaaggcacccctcctagaacacatcagagacatcataaggagaattcct

SEQ ID NO: 4478 - DNA, 121 bp, synthetic construct
  misc_feature 1..121: note = Description of artificial sequence: synthetic polynucleotide sequence
  source 1..121: mol_type = other DNA
gctgggccatttccaggggaccggccttctccatgcttccccaggggatcttgccttctcccagctctgtcgcggtccccaggtataacttgaacttcttcagttccacagcctcgagttc

SEQ ID NO: 4479 - DNA, 121 bp, synthetic construct
  misc_feature 1..121: note = Description of artificial sequence: synthetic polynucleotide sequence
  source 1..121: mol_type = other DNA
tctttctatccggtgattcccttaaacttcccctgtcccttaccggcagcctcctgctccggaagtttggaatggctggttctgaaagagagagacacacgtgaaaggatgggatgtgaag

SEQ ID NO: 4480 - DNA, 121 bp, synthetic construct
  misc_feature 1..121: note = Description of artificial sequence: synthetic polynucleotide sequence
  source 1..121: mol_type = other DNA
agccctggacgaggtcatgttccccctccttgtacagaacgaatatgtcatagccgacatcagagcgacactgcagggtcaggctgcctccgcgggccacgacagagccctgcgggatcag

SEQ ID NO: 4481 - DNA, 121 bp, synthetic construct
  misc_feature 1..121: note = Description of artificial sequence: synthetic polynucleotide sequence
  source 1..121: mol_type = other DNA
agatggcggccaacgtgggtgatcaacgtagcacagattggttagtgaggcgagagggacggaggccagtcgggagggaaagaggaagcaagacccagtgctgtcctctggggtgggacct

SEQ ID NO: 4482 - DNA, 121 bp, synthetic construct
  misc_feature 1..121: note = Description of artificial sequence: synthetic polynucleotide sequence
  source 1..121: mol_type = other DNA
gtgacctcaggaaagagcgtgaccctgctgtgtcagtcacggagcccaatggacactttccttctgatcaaggagcgggcagcccatcccctactgcatctgagatcagagcacggagctc

SEQ ID NO: 4483 - DNA, 121 bp, synthetic construct
  misc_feature 1..121: note = Description of artificial sequence: synthetic polynucleotide sequence
  source 1..121: mol_type = other DNA
cacatggacgcaaacaaggcagggcgctatcagtgccaatataggatagggcactacagattccggtacagtgacaccctggagctggtagtgacaggtaaggaaacatccagggtccaca

SEQ ID NO: 4484 - DNA, 121 bp, synthetic construct
  misc_feature 1..121: note = Description of artificial sequence: synthetic polynucleotide sequence
  source 1..121: mol_type = other DNA
gctcaggaccgtggacgcgctgggtgtgctgaccggggcgcagcttttctcgctgcagaaggaggagctgcgggcggtgagccccgaggagggggcacgtgtgtacagccaggtcaccgtg

SEQ ID NO: 4485 - DNA, 121 bp, synthetic construct
  misc_feature 1..121: note = Description of artificial sequence: synthetic polynucleotide sequence
  source 1..121: mol_type = other DNA
aggctgggccacggctgaacacacagggtgcagctctccagggcggagaagtcaacggctaagagaccgaagagcgcgaacagcagcatggccacgacccactcgcaggccgcagagacgc

SEQ ID NO: 4486 - DNA, 121 bp, synthetic construct
  misc_feature 1..121: note = Description of artificial sequence: synthetic polynucleotide sequence
  source 1..121: mol_type = other DNA
gaggcacccaacctgctggttgttcagagcggggcagctgaggagttgctcactggcccgggccccggggaggcgggggatggcgaggccagcactggtgtggtccaggatgtcctctttg

SEQ ID NO: 4487 - DNA, 121 bp, synthetic construct
  misc_feature 1..121: note = Description of artificial sequence: synthetic polynucleotide sequence
  source 1..121: mol_type = other DNA
ttccgctgcccgctgtgcccccgccgcttccgcgaggcgggcgagctggcgcaccaccaccgcgtgcactcgggggagcgcccgtaccagtgccccatctgccggctgcgctttacagagg

SEQ ID NO: 4488 - DNA, 121 bp, synthetic construct
  misc_feature 1..121: note = Description of artificial sequence: synthetic polynucleotide sequence
  source 1..121: mol_type = other DNA
ctggataaggtcagttttctcagactcccgccactgatgaggagagaggcgatttcttcacattcgctggctcgcaaatcacatttcatcaagctgtaagaggaattcagaaatgaaaaga

SEQ ID NO: 4489 - DNA, 121 bp, synthetic construct
  misc_feature 1..121: note = Description of artificial sequence: synthetic polynucleotide sequence
  source 1..121: mol_type = other DNA
gatgagtgacgtgaatccaccctctgacacccccattcccttttcatcctcctccactcacagttctcatattccgccctggacattctcttgctaccccggctccccatgtgaaaatggg

SEQ ID NO: 4490 - DNA, 121 bp, synthetic construct
  misc_feature 1..121: note = Description of artificial sequence: synthetic polynucleotide sequence
  source 1..121: mol_type = other DNA
catgctgtacatgagaaacgtgagccatgaggagctacaacggttcaagcagctcttactgactgagctcagtactggcaccatgcccatcacctgggaccaggtcgagacagccagctgg

SEQ ID NO: 4491 - DNA, 121 bp, synthetic construct
  misc_feature 1..121: note = Description of artificial sequence: synthetic polynucleotide sequence
  source 1..121: mol_type = other DNA
gaggtggttcatctcttgatagagcgtttccctggacgacgcgcttgggatgtgacttcgaacatctttgccattatgaactgtgataaaatgtgtgttgtagtccgcagagagataaatg

SEQ ID NO: 4492 - DNA, 121 bp, synthetic construct
  misc_feature 1..121: note = Description of artificial sequence: synthetic polynucleotide sequence
  source 1..121: mol_type = other DNA
cagcctccttttttctgttacagccattctgcctaccttggaaccagaggacttgaatgtgggagaaacacaggtgaatctggaggaaggagaatctggtatgtgcctgtatcacagcaga

SEQ ID NO: 4493 - DNA, 341 bp, synthetic construct
  misc_feature 1..341: note = Description of artificial sequence: synthetic polynucleotide sequence
  source 1..341: mol_type = other DNA
ggtaaaatacggcggtataaatcgaatgtgatggaaaagtttttccccatatgggacattacgacttggcctggaaaccagagggacttcttctaccaaggtgtacacaggcacgaggagtacttaccatgtctgcttctgcccaaaagaccccagggtagacagcccaagaccgtggccatacagggagctcctgggatcggaaaaacaatcctggccaaaaaggtgatgtttgagtgggccagaaacaagttctacgcccacaagcgctggtgtgctttctacttccattgccaagaggtgaaccagacgacagaccagagcttctccgagctgattga

SEQ ID NO: 4494 - DNA, 455 bp, synthetic construct
  misc_feature 1..455: note = Description of artificial sequence: synthetic polynucleotide sequence
  source 1..455: mol_type = other DNA
gcaaaagtggcctggatctcaggacctcgtgtcaaagattatgtccaaacccgaccaacttctgctgctcttggatggctttgaggagctcacatctaccctcattgacagactggaggacctgagtgaagactggaggcagaaattgcctgggtctgtcctactgagcagtttgctgagcaaaacgatgcttccagaggccacgctactgatcatgataagatttacctcttggcagacatgcaagcccttgctgaaatgtccctctctcgtaacccttccggggtttaatacgatggaaaaaatcaagtatttccagatgtattttggacacacagaggagggagaccaagtcttgagtttcgccatggaaaacaccattctcttctccatgtgccgggtccctgtggtttgctggatggtctgctctggtctgaaacagcaaatggagagag

SEQ ID NO: 4495 - DNA, 456 bp, synthetic construct
  misc_feature 1..456: note = Description of artificial sequence: synthetic polynucleotide sequence
  source 1..456: mol_type = other DNA
gaaacaatctcacacagtcatgtccaaatgccacctctgtgttcgtccggtatatttctagcttgtttcccaccagagctgagaacttttccagaaagatccaccaagcacaactggaaggtctgtgtcacttggccgcagacagcatgtggcacaggaaatgggtgttaggtaaagaagatcttgaggaagccaagctggatcagacgggagtcaccgccttccttggcatgagtattcttcggagaattgcaggtgaggaagaccactatgtctttaccctcgtgacttttcaggaattttttgcggccttgttttatgttctctgtttcccacaaagactcaaaaattttcatgtgttgagccacgtgaatatccagcgcctgatagcgagtcccagaggaagcaaaagctatctctctcacatgggacttttcttattcggttttctgaacg

SEQ ID NO: 4496 - DNA, 349 bp, synthetic construct
  misc_feature 1..349: note = Description of artificial sequence: synthetic polynucleotide sequence
  source 1..349: mol_type = other DNA
aggcctgcgcttcggccgtggaacagtcattccaatgcaaggtgtctttcggtaataagaggaaactgctgaaagtcatacctctgttgcataaatgtgacccaccttctccgggcagtggggtcccgcagttattctactgtctgcatgaaatccgggaggaagcctttgtaagccaagccctaaatgattatcataaagttgtcttgagaattggcaacaacaaagaagttcaagtgtctgctttttgcctgaagcggtgtcaatatttgcatgaggtggaactgaccgtcaccctgaacttcatgaacgtgtggaagctcagctccagctcccatcctggctctga

SEQ ID NO: 4497 - DNA, 172 bp, synthetic construct
  misc_feature 1..172: note = Description of artificial sequence: synthetic polynucleotide sequence
  source 1..172: mol_type = other DNA
gagcgccagagagcaatgggctgcatcgttggtggcaagacttatgctctgtgtttgcaacgaatgataagctggaagtcctgactatgaccaacagtgttttggggcctccttttttgaaggctctcgcggccgcactgaggcaccctcagtgcaaactgcaaaagctact

SEQ ID NO: 4498 - DNA, 169 bp, synthetic construct
  misc_feature 1..169: note = Description of artificial sequence: synthetic polynucleotide sequence
  source 1..169: mol_type = other DNA
gcctaaggcgtgtgaatagcaccatgttgaaccaggacttaatcggtgttttgacggggaaccagcatctgagatacttggaaatacaacatgtggaagtggagtccaaagctgtgaagcttctatgcagggtgctgagatccccccggtgccgtctgcagtgtctcag

SEQ ID NO: 4499 - DNA, 154 bp, synthetic construct
  misc_feature 1..154: note = Description of artificial sequence: synthetic polynucleotide sequence
  source 1..154: mol_type = other DNA
ggttggaagactgcttggccacccctagaatttggactgatcttggcaataatcttcaaggtaacgggcatctaaagactctcatactaagaaaaaactccctggagaactgtggggcgtattacctgtctgtggcccagctggagaggctgtc

SEQ ID NO: 4500 - DNA, 172 bp, synthetic construct
  misc_feature 1..172: note = Description of artificial sequence: synthetic polynucleotide sequence
  source 1..172: mol_type = other DNA
ggatagagaactgcaaccttacacagcttacttgtgaaagccttgcctcctgtctcaggcagagtaagatgctgacccacctgagcttggcagaaaacgccttgaaagatgaaggggccaagcatatttggaatgccctgccacacctgagatgtcctctgcagaggctggt

SEQ ID NO: 4501 - DNA, 172 bp, synthetic construct
  misc_feature 1..172: note = Description of artificial sequence: synthetic polynucleotide sequence
  source 1..172: mol_type = other DNA
gactgagaaagtgtgacttgacctttaattgctgtcaggatatgatctctgcgctctgtaaaaataaaaccctgaaaagtcttgacctaagttttaatagcctgaaggatgatggggtgatcctgctgtgtgaggccctgaagaaccctgactgtacattacagatcctgga

SEQ ID NO: 4502 - DNA, 172 bp, synthetic construct
  misc_feature 1..172: note = Description of artificial sequence: synthetic polynucleotide sequence
  source 1..172: mol_type = other DNA
ggctggaaaactgcctgttcacctccatctgctgccaggccatggcttccatgctccgcaaaaaccaacatctgagacatctggacttgagcaagaatgcgattggagtctatggtattctgaccttgtgcgaggccttctcaagccaaaagaagagagaagaggtcatttt

SEQ ID NO: 4503 - DNA, 121 bp, synthetic construct
  misc_feature 1..121: note = Description of artificial sequence: synthetic polynucleotide sequence
  source 1..121: mol_type = other DNA
cctccctccagctgtattcctgcctggactcgaataactagcttctccccaactcctcacccacccgacttcacgggaaaaagtgactgcctatcccagattaatccttaggccgtccagt

SEQ ID NO: 4504 - DNA, 121 bp, synthetic construct
  misc_feature 1..121: note = Description of artificial sequence: synthetic polynucleotide sequence
  source 1..121: mol_type = other DNA
ttggacacgggacattcttatccttggcttgggtaattacagtgacttcattgaggccagtctccctttttctttgtcttccaggacattcaccagaagatcctgaagcaacgatgactga

SEQ ID NO: 4505 - DNA, 121 bp, synthetic construct
  misc_feature 1..121: note = Description of artificial sequence: synthetic polynucleotide sequence
  source 1..121: mol_type = other DNA
gtccagccagcggacctcctctgtgaaccagatgtgtccggaggaaggccaggccagccaagagctgcagaccctgcccagggtccctgcactgttcaggaggcaggtgggtgtgtgaggc

SEQ ID NO: 4506 - DNA, 121 bp, synthetic construct
  misc_feature 1..121: note = Description of artificial sequence: synthetic polynucleotide sequence
  source 1..121: mol_type = other DNA
caacatcagagaattcatactggagagaaaccttatgaatgtaatgtttgtgggaaagcatttagctatagtggatctcttactctacatcagagaattcatactggagaaagaccctatg

SEQ ID NO: 4507 - DNA, 121 bp, synthetic construct
  misc_feature 1..121: note = Description of artificial sequence: synthetic polynucleotide sequence
  source 1..121: mol_type = other DNA
gctgtgtcctggtcccaccacggctggacgaccccacagaaaagggggcctgtccacccgtaaggcgtggcaagaacttctccagcacttcagacctcagtaagccccccatgccctgcga

SEQ ID NO: 4508 - DNA, 121 bp, synthetic construct
  misc_feature 1..121: note = Description of artificial sequence: synthetic polynucleotide sequence
  source 1..121: mol_type = other DNA
aaagaatggactgagtgaggtggtgaggactctcttctgttccgggtcatgtcgtcgtcgctggtcacgtcactgttgttgtcgtctaagaggacaccggtcgccaagttactatctctgg

SEQ ID NO: 4509 - DNA, 121 bp, synthetic construct
  misc_feature 1..121: note = Description of artificial sequence: synthetic polynucleotide sequence
  source 1..121: mol_type = other DNA
agaattacttgggaatgttaaaaaagtcatttcagcagttgcagaaatattttctggcaacatgcagaatgatgctcatgagtttttaggtcagtgtttagaccagctgaaagaagacatg

SEQ ID NO: 4510 - DNA, 121 bp, synthetic construct
  misc_feature 1..121: note = Description of artificial sequence: synthetic polynucleotide sequence
  source 1..121: mol_type = other DNA
atcaaaggattcatactgggagaaaccctaccattgtaacagatgtgggaagaccttttatgactgcacagacttcagtcaacatccaggaacttttattagggaaagagtttttgaatat

SEQ ID NO: 4511 - DNA, 121 bp, synthetic construct
  misc_feature 1..121: note = Description of artificial sequence: synthetic polynucleotide sequence
  source 1..121: mol_type = other DNA
cattcagtcccgaaccgacagccacaagtggcgcccgaacagggacgtgagtgaagaaggtctgctggagcagagaaagtgaaactgaccagaagaatgagaaaccccaggacaagtctgc

SEQ ID NO: 4512 - DNA, 121 bp, synthetic construct
  misc_feature 1..121: note = Description of artificial sequence: synthetic polynucleotide sequence
  source 1..121: mol_type = other DNA
ttggcaggggaatcatcatgcaggctccatttttataccactgcactgaagtataagtacattttttgtcacactctgctaactgcctgctcatagatattcaaatttagtagatgtagac

SEQ ID NO: 4513 - DNA, 121 bp, synthetic construct
  misc_feature 1..121: note = Description of artificial sequence: synthetic polynucleotide sequence
  source 1..121: mol_type = other DNA
atctgcggggggtggggggcacagtaatcttgggcctggctaagatttgacgggagaacattgacccaagtccccaggagaacattgaagagaactgtggctgactgtcaaagggagaagc

SEQ ID NO: 4514 - DNA, 121 bp, synthetic construct
  misc_feature 1..121: note = Description of artificial sequence: synthetic polynucleotide sequence
  source 1..121: mol_type = other DNA
gagcagctgaaagggacttgagcactacttgggccttctgacgccagagttacagaatgctcttttgccaaatcatggatggccactcgagcacacagatattcaggatcctcttgtcccc

SEQ ID NO: 4515 - DNA, 121 bp, synthetic construct
  misc_feature 1..121: note = Description of artificial sequence: synthetic polynucleotide sequence
  source 1..121: mol_type = other DNA
ctccacccacgcggccccacacctgtctccactcacacggctccacacgtgtcctctgttctccattcaacgcattgaaactacaactggaaacggtagaggacatttctgggaataattt

SEQ ID NO: 4516 - DNA, 121 bp, synthetic construct
  misc_feature 1..121: note = Description of artificial sequence: synthetic polynucleotide sequence
  source 1..121: mol_type = other DNA
ctcttaaagtttctatatctgtcaaaattattttatctctttccccactataccttttaacaactttatcacagtaattttaaacttcatgcctgataattccaacagctgaatcatctct

SEQ ID NO: 4517 - DNA, 121 bp, synthetic construct
  misc_feature 1..121: note = Description of artificial sequence: synthetic polynucleotide sequence
  source 1..121: mol_type = other DNA
ggtttgaaatcacccacaggtgtcaagtgggggaacacatgggctattttatggacttggccagatatggggcaagagaggaagggcaaggggtggagcttgaccactctcagtgatgaaa

SEQ ID NO: 4518 - DNA, 121 bp, synthetic construct
  misc_feature 1..121: note = Description of artificial sequence: synthetic polynucleotide sequence
  source 1..121: mol_type = other DNA
tcccttctgtttaaactacttttttggaggctgtggccctgtctcattaatctcagtgttcctagcacctcacgttaggcctatcagatgattggcgctcagcaaatgtttgctgcatgaa

SEQ ID NO: 4519 - DNA, 121 bp, synthetic construct
  misc_feature 1..121: note = Description of artificial sequence: synthetic polynucleotide sequence
  source 1..121: mol_type = other DNA
tccactctgaccaattactaaactaaagatcctagacactctttcatttgactgttctattccgctcctgttacagttctaggcacagcttggccctcaattcatgttttttgattatgag

SEQ ID NO: 4520 - DNA, 121 bp, synthetic construct
  misc_feature 1..121: note = Description of artificial sequence: synthetic polynucleotide sequence
  source 1..121: mol_type = other DNA
tgacggaggcaggtcaagaacacaggatgaaagcaccttagaaaacttcaagtgctgagagaaatggaaatagaagaaattggcaataccccttaacttcttgactcaagtgtgcctgccc

SEQ ID NO: 4521 - DNA, 121 bp, synthetic construct
  misc_feature 1..121: note = Description of artificial sequence: synthetic polynucleotide sequence
  source 1..121: mol_type = other DNA
ccttaattctaccagaggtattgctaacatctccagttaataatttccactaacaacgcagaactcaattagcataataagcatttcccatctgcactgagcactcttcccgtcatcagtc

SEQ ID NO: 4522 - DNA, 121 bp, synthetic construct
  misc_feature 1..121: note = Description of artificial sequence: synthetic polynucleotide sequence
  source 1..121: mol_type = other DNA
ggctggggacaggatcaatggcctcagtggttaggaacaatgacatcaatgtgctaattatctctgtgattctgagtgtaaatgctctggtccctacagtccataggcatgacagatgatg

SEQ ID NO: 4523 - DNA, 121 bp, synthetic construct
  misc_feature 1..121: note = Description of artificial sequence: synthetic polynucleotide sequence
  source 1..121: mol_type = other DNA
gccagagcatcaaccttgagaacgctagagacaaacaggaaactgaagattgctttccattggcttactgacctgagaggacagaagcctgaagtctcctggatccactatgtggggagca

SEQ ID NO: 4524 - DNA, 121 bp, synthetic construct
  misc_feature 1..121: note = Description of artificial sequence: synthetic polynucleotide sequence
  source 1..121: mol_type = other DNA
ctcctgtgttagacaagaggaaaaggagtgggtgcctctcgactgggaccagtggacattattatgggaatataccagtggtggcaggttgatgaccttatctccctgcagggtagtattt

SEQ ID NO: 4525 - DNA, 121 bp, synthetic construct
  misc_feature 1..121: note = Description of artificial sequence: synthetic polynucleotide sequence
  source 1..121: mol_type = other DNA
tagggtttttctttagtgaataaaatagtgaaaacggttgtattcaaattgggtacattcctcagcactgtaatttttgcttggcaaatagtcttttactttcaagtaattatcaatacat

SEQ ID NO: 4526 - DNA, 121 bp, synthetic construct
  misc_feature 1..121: note = Description of artificial sequence: synthetic polynucleotide sequence
  source 1..121: mol_type = other DNA
ccaaacactggaattggcctgtggtatacaaaataaaactccttcaccagttgattaccgtattatttcctagcataaaaacaaaaacaacttaaatataatgatccaaattaggccacac

SEQ ID NO: 4527 - DNA, 121 bp, synthetic construct
  misc_feature 1..121: note = Description of artificial sequence: synthetic polynucleotide sequence
  source 1..121: mol_type = other DNA
tctgaaacttttgctacacaccatcttttccatcattgcacattagtcatgcttctctaatagcttagtggtggctagtcctactacctaatctgttaataattttttttttaaatgaagg

SEQ ID NO: 4528 - DNA, 121 bp, synthetic construct
  misc_feature 1..121: note = Description of artificial sequence: synthetic polynucleotide sequence
  source 1..121: mol_type = other DNA
ttcaaaattattttaaggaagtgcctgccaagtatgatttaacatatgatgtggtagacagtgagattacaatcactctacagagcatgactttgcagttagatcaaattattccttaaat

SEQ ID NO: 4529 - DNA, 121 bp, synthetic construct
  misc_feature 1..121: note = Description of artificial sequence: synthetic polynucleotide sequence
  source 1..121: mol_type = other DNA
taggcaggctgtcatggcaaagaaacataagctgcgggtgcacatagtatcacagagttccattaatgtgattatatataacaggaaaagggaaatttaaaatagtagaatttttacaaga

SEQ ID NO: 4530 - DNA, 121 bp, synthetic construct
  misc_feature 1..121: note = Description of artificial sequence: synthetic polynucleotide sequence
  source 1..121: mol_type = other DNA
tccagactccttattttggctaagattcccagaatatgagcacaacacacgtttttagtttctccactcattatttctgaaaaaaaaatcattatctatatcattggttttcaaccctagc

SEQ ID NO: 4531 - DNA, 121 bp, synthetic construct
  misc_feature 1..121: note = Description of artificial sequence: synthetic polynucleotide sequence
  source 1..121: mol_type = other DNA
tcaaatggagggtgattatatatgtgatggactaaaccaggacacttttgagaatgaacttgggtgctattggtaatcacaccgagacacagcaacgtccgggaccaactcaaccctcagt

SEQ ID NO: 4532 - DNA, 121 bp, synthetic construct
  misc_feature 1..121: note = Description of artificial sequence: synthetic polynucleotide sequence
  source 1..121: mol_type = other DNA
aattataataccacgtgacacataaagaaaatgccatgggctgtaccctcactattggtggttgtctctgcaattgatgtgctcctgggttcccaccacaaaagctctatcaacagctcac

SEQ ID NO: 4533 - DNA, 121 bp, synthetic construct
  misc_feature 1..121: note = Description of artificial sequence: synthetic polynucleotide sequence
  source 1..121: mol_type = other DNA
tgggtgaattatgtggtatatgaatgatatctcaataaagctgttcaaaacagaaagagtgagtataaagagtggatctgctgaatgttaaagggtccacatggaaagcctcaacagagaa

SEQ ID NO: 4534 - DNA, 121 bp, synthetic construct
  misc_feature 1..121: note = Description of artificial sequence: synthetic polynucleotide sequence
  source 1..121: mol_type = other DNA
tccttaagctgggacatcaatctcctgtcctcagtggttttcagtgctcctagttctccggccttcagatcttgactggaatctacaccatctgttgcctctctggctctcaggcctttga

SEQ ID NO: 4535 - DNA, 121 bp, synthetic construct
  misc_feature 1..121: note = Description of artificial sequence: synthetic polynucleotide sequence
  source 1..121: mol_type = other DNA
gtcttctctgaagcttctgttctcacacatagcacatcactcaataaatatctggtcatatatctgcctttgccatcagaacacaagctttgcaagatgaagaacctagtcttatatctta

SEQ ID NO: 4536 - DNA, 121 bp, synthetic construct
  misc_feature 1..121: note = Description of artificial sequence: synthetic polynucleotide sequence
  source 1..121: mol_type = other DNA
ccacttggctgagaagggaaagctcagggaatggaggtcatcacattgtcaacaactagtgtttcaacgacacgggagagaaaggaagctcccatgaagacattagtccgtctccttcctt

SEQ ID NO: 4537 - DNA, 121 bp, synthetic construct
  misc_feature 1..121: note = Description of artificial sequence: synthetic polynucleotide sequence
  source 1..121: mol_type = other DNA
tgaaggatgattctaaatcaccatggactctattatcaacgcaaagggcactaacttaaatctgcacaacaaacttgtcttgtgtgcagtgcttttcttggtcacctcccattactgacct

SEQ ID NO: 4538 - DNA, 121 bp, synthetic construct
  misc_feature 1..121: note = Description of artificial sequence: synthetic polynucleotide sequence
  source 1..121: mol_type = other DNA
cactattgagctgatgagctcactaaagaagatgatcgtcatggtagatgtgctatgcctggggagaagcaaaactagagccaaataactgggaatcagaagctgagaaaaagctgaggga

SEQ ID NO: 4539 - DNA, 121 bp, synthetic construct
  misc_feature 1..121: note = Description of artificial sequence: synthetic polynucleotide sequence
  source 1..121: mol_type = other DNA
gaacttgctaatggcattcaaaagtgatgtaacacaagtcacatttcacacttatactttctctttattcgcatagtacccatactactctagaaaacagtatttttagctccctcacttt

SEQ ID NO: 4540 - DNA, 121 bp, synthetic construct
  misc_feature 1..121: note = Description of artificial sequence: synthetic polynucleotide sequence
  source 1..121: mol_type = other DNA
cacagatatccaattcatcaatagcctccacaataagatgtctatccactaaacacatagagctttggcctcagttgttcctcctgtggcctaactaacctcccatcccagcatttcccct

SEQ ID NO: 4541 - DNA, 121 bp, synthetic construct
  misc_feature 1..121: note = Description of artificial sequence: synthetic polynucleotide sequence
  source 1..121: mol_type = other DNA
aagtagctgctcacctgacatcacagaacaccttggctggggtctgcaaggacatcctcgtgcagcgtgagcatccgccgcctctctgcccccttccttcaaggggccctgcccactgggc

SEQ ID NO: 4542 - DNA, 121 bp, synthetic construct
  misc_feature 1..121: note = Description of artificial sequence: synthetic polynucleotide sequence
  source 1..121: mol_type = other DNA
caacagaaaatgctctaagattttaaactgatgagataagataaattatacaagctattcaggtcattttcagtatcacgtcattttcagtgtcacgacattttcagtatcacgtcatttt

SEQ ID NO: 4543 - DNA, 121 bp, synthetic construct
  misc_feature 1..121: note = Description of artificial sequence: synthetic polynucleotide sequence
  source 1..121: mol_type = other DNA
gcctccaccatggccagccccatgaggatggagcagacggcgtggtcctcccggtagtcgggcaagccgcagatgcagtagtagcagtcgcccaggatcttaatccgcagctggtggtatt

SEQ ID NO: 4544 - DNA, 143 bp, synthetic construct
  misc_feature 1..143: note = Description of artificial sequence: synthetic polynucleotide sequence
  source 1..143: mol_type = other DNA
cttacacacacgcaaaatactccttcagcggagcgaagaggtggcggatgactggcacgctccatgaccggcccagcagtctctgcctcgccaagcggctcatgttggagacgtcagtatagtggactgggaaaccaaatacc

SEQ ID NO: 4545 - DNA, 121 bp, synthetic construct
  misc_feature 1..121: note = Description of artificial sequence: synthetic polynucleotide sequence
  source 1..121: mol_type = other DNA
cctttccatttcagtgcaccataagatgtcctctttctcattcatgaagacaggaaaatgctggtctttgccctgctttatggagtttgacctcgtagtaatggtcctcactttgctgaac

SEQ ID NO: 4546 - DNA, 121 bp, synthetic construct
  misc_feature 1..121: note = Description of artificial sequence: synthetic polynucleotide sequence
  source 1..121: mol_type = other DNA
cagaggttctagacgctggagctgaccttggctatcctgccatgctccagacactcctgcagctccagcttatcattcacagtggatgccaacggcctaggaggcagaagagagactgtaa

SEQ ID NO: 4547 - DNA, 121 bp, synthetic construct
  misc_feature 1..121: note = Description of artificial sequence: synthetic polynucleotide sequence
  source 1..121: mol_type = other DNA
ccaggagctttcaccaacctgttcataccgggaaggttaccccagaagtagcgggccctgtgtgcagctgacacttctttggcatcaatcatcacagggttggactacaaaacaggagacg

SEQ ID NO: 4548 - DNA, 150 bp, synthetic construct
  misc_feature 1..150: note = Description of artificial sequence: synthetic polynucleotide sequence
  source 1..150: mol_type = other DNA
cctcgagaaatcgcgagatgtccctcttgtcactaacgcccatggccaccacattctcaaagagccagaagaaggggcgatcatctccctccttgggccgcgcatcatgcaggaggcggtagaactcaaagaagagccggccagtgccct

SEQ ID NO: 4549 - DNA, 121 bp, synthetic construct
  misc_feature 1..121: note = Description of artificial sequence: synthetic polynucleotide sequence
  source 1..121: mol_type = other DNA
caggatggtacctaccgtagaggcccttgcgagcagggttgacgatggagaggtcattgcagggactgcccccaatcaccagatcgaatgggccccactcctggatctgggaggataaagg

SEQ ID NO: 4550 - DNA, 147 bp, synthetic construct
  misc_feature 1..147: note = Description of artificial sequence: synthetic polynucleotide sequence
  source 1..147: mol_type = other DNA
catgcttctgtgtgacgctgcggacgtccccgacgtacatgatcttcccctggtgccgcaccatgcccaccgtgatggagtcctcacacacctccgaggcaatgtagcggtccacctgaatgcccaagtccttcagcaccaggagcc

SEQ ID NO: 4551 - DNA, 121 bp, synthetic construct
  misc_feature 1..121: note = Description of artificial sequence: synthetic polynucleotide sequence
  source 1..121: mol_type = other DNA
tgggcctgcacccctcacctgtagcgattccatcaaagagagacagcacccggatgggcttcctcttctcagctgggacaggtgggtaaacctttggagggtcctaagcagtgagcacaac

SEQ ID NO: 4552 - DNA, 185 bp, synthetic construct
  misc_feature 1..185: note = Description of artificial sequence: synthetic polynucleotide sequence
  source 1..185: mol_type = other DNA
caaattcctggtcgtggttattagcgaagaacatctggagccgggagggccagtcctctcgccgccgcagcagcccgtaggtacccttgtgcccgcacatgtagcagttccaggggtcttccttaatggctgcctgggcagcccccggccccaccaagaggtccacacactccacgcaaaagcac

SEQ ID NO: 4553 - DNA, 121 bp, synthetic construct
  misc_feature 1..121: note = Description of artificial sequence: synthetic polynucleotide sequence
  source 1..121: mol_type = other DNA
tcacctgcagcagttgttgtttccgcacatgagcacctcacggcccccacagcagatggtgcagtaggactggtagccgtcgtcgtcgtactggtacgcacactccagaaagcagttctag

SEQ ID NO: 4554 - DNA, 121 bp, synthetic construct
  misc_feature 1..121: note = Description of artificial sequence: synthetic polynucleotide sequence
  source 1..121: mol_type = other DNA
cctgggtgggtgtgctcctaccttgcagttttggcacattcctccaacgaagagggggtgttccagggtaacattgaggctcccacaggagatgcagatgtctggaaagcagagggagggg

SEQ ID NO: 4555 - DNA, 121 bp, synthetic construct
  misc_feature 1..121: note = Description of artificial sequence: synthetic polynucleotide sequence
  source 1..121: mol_type = other DNA
acactaggagtgccagagttcccaggcaacaaacttaccctcaatgttccggcacttctgccgcacctcgtacaccagccgctctgcaaggggaggagagctggcgtcagaggaggccgcg

SEQ ID NO: 4556 - DNA, 151 bp, synthetic construct
  misc_feature 1..151: note = Description of artificial sequence: synthetic polynucleotide sequence
  source 1..151: mol_type = other DNA
cctcttgtgcgctcatcaataatctccttgaccttgggcttctccgctgtgctcttccggggctttttggctggtggaggtggtgcgtaggcagctgcctcaggttccacccacatgtccgtgtacacttctttgtagggattcttctctt

SEQ ID NO: 4557 - DNA, 158 bp, synthetic construct
  misc_feature 1..158: note = Description of artificial sequence: synthetic polynucleotide sequence
  source 1..158: mol_type = other DNA
ccttctggtggctccaggcccttagggccagaaggctggaagccccccagggcccattcaatcatgggcttgttctgcacctccacggccttggcagtgtcactctcatcgctgtcgtggcacaccgggaacagcttccccgcgcggctgctggccac

SEQ ID NO: 4558 - DNA, 121 bp, synthetic construct
  misc_feature 1..121: note = Description of artificial sequence: synthetic polynucleotide sequence
  source 1..121: mol_type = other DNA
cactcacctgcaggacctcgtagatggctttgcggtacatgggctgcttgttgtacgtggcctggtggaacgcactgcaaaacgagctcagcggcatcagcttctcaacacacacctgggg

SEQ ID NO: 4559 - DNA, 160 bp, synthetic construct
  misc_feature 1..160: note = Description of artificial sequence: synthetic polynucleotide sequence
  source 1..160: mol_type = other DNA
ccactgagaatttgccgtctccgaaccacatgacccagcgggtgccttcagctgctcggctccggcccgtcatccaccaagacacaatgcggcctggccaccaggagaagccccgcagtttcccccacaccagctccccaatgccaaagccccggccgtc

SEQ ID NO: 4560 - DNA, 217 bp, synthetic construct
  misc_feature 1..217: note = Description of artificial sequence: synthetic polynucleotide sequence
  source 1..217: mol_type = other DNA
cctcgtactctggctcgtcatcgcctgctttggtggcattcttgtccccagcatcggaccccacgggctcaggcgtggtagccacagtgggggatgcggggtcagtgggctgctgcacagcaggagggctggcctcctccaccttctgagactccccgggcccctggttttcttccacagcattcattcctgcaatgaccttggctttcttctcagc

SEQ ID NO: 4561 - DNA, 121 bp, synthetic construct
  misc_feature 1..121: note = Description of artificial sequence: synthetic polynucleotide sequence
  source 1..121: mol_type = other DNA
cccattgcacagcctccatcctttcaccgtatcacactcgtctttcaggctacgatccacgcgcccattccttctcacaacccgctccaggatccctacaaaggagaatgaaatccttgat

SEQ ID NO: 4562 - DNA, 184 bp, synthetic construct
  misc_feature 1..184: note = Description of artificial sequence: synthetic polynucleotide sequence
  source 1..184: mol_type = other DNA
ccactgcccgggctcccggccggctgctcttcctgtcccccgagggcgccaggtgccactggagccctcgaggagtggggccttggggctcgtgggcaggaaggcggcgggccagcactaagtcagcatctccagaactcgggccaggccgggacgccgcggctgctgcgggccggggaggcat

SEQ ID NO: 4563 - DNA, 121 bp, synthetic construct
  misc_feature 1..121: note = Description of artificial sequence: synthetic polynucleotide sequence
  source 1..121: mol_type = other DNA
ccaccggccctgccgcctccccgcccccggtctccccggggctccgtccaggaacctacccataaggccaggtgcagcccctctgcagtcgcgctcaggtgtgagccgcggccctgaagct

SEQ ID NO: 4564 - DNA, 148 bp, synthetic construct
  misc_feature 1..148: note = Description of artificial sequence: synthetic polynucleotide sequence
  source 1..148: mol_type = other DNA
cctcccttttccagcgtgccagccactcgtcccgcttgcgcttgctgatgtagtaggggtcccccgcctggaaggtgagcctcggcatgggccgctgacggaggctggactcccagcccaagccaccccgcagccggccccgggagcc

SEQ ID NO: 4565 - DNA, 121 bp, synthetic construct
  misc_feature 1..121: note = Description of artificial sequence: synthetic polynucleotide sequence
  source 1..121: mol_type = other DNA
aatcaggatccacagagcccctgggggtggaacacttgcctccattttcatggattcgatgttggtctccttctgttctttgcctgtggagagggaagaacaaagggaccagttcgttggt

SEQ ID NO: 4566 - DNA, 325 bp, synthetic construct
  misc_feature 1..325: note = Description of artificial sequence: synthetic polynucleotide sequence
  source 1..325: mol_type = other DNA
ctcagggtatgctggtgggcccagaagaggctgcccctggtgctgaggactcacccgcttctgcaggggctcctcggccctccttgggggtgcagcagccattttccactgctcttgaggcttcaggcagggtctcagctgcaccctctccctctgctggggccccgcccttctgccccccagcagggctcccctcctctggctggggctcactccgcttctccaagtccccattgggtaatagctctgaggcgcctgagtcctgggccatggatggggacttggagatcaccgcagggtcctttggcgtgtcaccgctttccac

SEQ ID NO: 4567 - DNA, 121 bp, synthetic construct
  misc_feature 1..121: note = Description of artificial sequence: synthetic polynucleotide sequence
  source 1..121: mol_type = other DNA
acactcaccggggggtgcttgcgcttcctcccaggccgccccaccttccgtgccgtggtgctgggctcttggcgctcctccttgccacgcggctcctcctgctcctctccgtcctgcaggc

SEQ ID NO: 4568 - DNA, 121 bp, synthetic construct
  misc_feature 1..121: note = Description of artificial sequence: synthetic polynucleotide sequence
  source 1..121: mol_type = other DNA
gtccccagcagagcccgctgctcacctttcggtcctcctcccgctccgcagcagagctgctggtgtccccggggccgctggagggcatggcgggcatctgggcgccgggaggcaggctggg

SEQ ID NO: 4569 - DNA, 121 bp, synthetic construct
  misc_feature 1..121: note = Description of artificial sequence: synthetic polynucleotide sequence
  source 1..121: mol_type = other DNA
catatgtacaaaggcccatgtgccaacaggctggccaatgacctgcatgtacgagagactgtatgcctaggcatggggcagtgaagttggcacagtgggcagttaataatgtcggctctga

SEQ ID NO: 4570 - DNA, 121 bp, synthetic construct
  misc_feature 1..121: note = Description of artificial sequence: synthetic polynucleotide sequence
  source 1..121: mol_type = other DNA
ccaaaaggtgtatggttccactgtgagcccatctggctatcccccgagtaaccagtagcgttggaagggacttaagagatggcccaggactcagccaacatcctccatttactaaaaggga

SEQ ID NO: 4571 - DNA, 347 bp, synthetic construct
  misc_feature 1..347: note = Description of artificial sequence: synthetic polynucleotide sequence
  source 1..347: mol_type = other DNA
ctcagggcccaggctggttcatgctattcttgcttttcagaatggtatcctcgtaatgaccagctccaggggcagtagcggcttctaagggcaagccctgttgctggtagccgtaattgacattcccacaagggaagtgacgtagcctgaacagaggtacctccttcatattggcagtcagcgaagagggctctaggagcagtgaggcccccggaagtctcccagttgcaacgttaggtgggacagtacagcttccctccagccccaggttacccctgtcgtgtggctccttctttgctataggattattctttttggtgggtttctctgtaaaccaggagccgtac

SEQ ID NO: 4572 - DNA, 353 bp, synthetic construct
  misc_feature 1..353: note = Description of artificial sequence: synthetic polynucleotide sequence
  source 1..353: mol_type = other DNA
gttgggttccacaagctggtgggcttgtttctggatccgtggaccttgtgcaactccgaaggagggttggactgagagaatgccatattcacgtgtcccccttccacggccggccctctagggactcgaacagagatctctgcagctgtgggtttctttgcagccttgccagaggaggtggtaggcagaggtggtggggcagctgggctgcgctcctcctcccgttttgcctgttgagagaccaggagaggaggaaccccctcagggtccttgggcctcacaggcactttctcttcctcttccacaagtggaccatattctatcggcaaagcggtgttgattacatccgggtc

SEQ ID NO: 4573 - DNA, 121 bp, synthetic construct
  misc_feature 1..121: note = Description of artificial sequence: synthetic polynucleotide sequence
  source 1..121: mol_type = other DNA
gagaaaatgttttacctgggtgcagtattcaatcctctccaaaatgatggcaaagttgggcctgtcttcaggctgatgttgccagcactgagtcattatccggtatctaaaagaagaagca

SEQ ID NO: 4574 - DNA, 136 bp, synthetic construct
  misc_feature 1..136: note = Description of artificial sequence: synthetic polynucleotide sequence
  source 1..136: mol_type = other DNA
cacaggcccagggcagttcttgggtgggtccatccggcctccactggtgacaaactccagaacttcctggttgcttttgctggggtatggcatatatccaagagaaaagatttcccatagcagcactccaaaggac

SEQ ID NO: 4575 - DNA, 121 bp, synthetic construct
  misc_feature 1..121: note = Description of artificial sequence: synthetic polynucleotide sequence
  source 1..121: mol_type = other DNA
gctgacttaccatgtgtctgttttagaagtgaatattccttccatgaaggcctctgggggcatccacttaactggcagcatggcacagcctccctttctatagtagctcgccctgtgggga

SEQ ID NO: 4576 - DNA, 121 bp, synthetic construct
  misc_feature 1..121: note = Description of artificial sequence: synthetic polynucleotide sequence
  source 1..121: mol_type = other DNA
cagtctttactcacctgtagatgtctcgggccatcccgaagtctccaatcttggccactcttccagggcctggacaggtcaagaggcagtttctggcagcaatgtctctgggaagaaagga

SEQ ID NO: 4577 - DNA, 121 bp, synthetic construct
  misc_feature 1..121: note = Description of artificial sequence: synthetic polynucleotide sequence
  source 1..121: mol_type = other DNA
actttgactcaccggtggatgaagtggttttcctccaaatactgacagccacaggcaatgtcccgagccacgtgcagaaggtccagcatggccagggaggagggctggctctgtggggaga

SEQ ID NO: 4578 - DNA, 121 bp, synthetic construct
  misc_feature 1..121: note = Description of artificial sequence: synthetic polynucleotide sequence
  source 1..121: mol_type = other DNA
cgagggcgggtctctcggaggaaggacttgaggtctccccccgccatgagctccagcaggatgaaccggggcagggattgcaggctcaccccaatgcagcgaacaatgttctggtggttga

SEQ ID NO: 4579 - DNA, 121 bp, synthetic construct
  misc_feature 1..121: note = Description of artificial sequence: synthetic polynucleotide sequence
  source 1..121: mol_type = other DNA
gggtgagggtgtctctctgtggctttacctgatgatcagggcttccatgaggaaatccagttcgtcctgttcagagcacacttcaggcagcgtctgggcagagaaggggagggtggggagg

SEQ ID NO: 4580 - DNA, 121 bp, synthetic construct
  misc_feature 1..121: note = Description of artificial sequence: synthetic polynucleotide sequence
  source 1..121: mol_type = other DNA
tgagccacttcttaccttcacagccacttgcagggggcttgggtcgttgggcattccggacacctggccttcatacacctccccaaaggcgccatggcccagacccctgtgcaaaggagaa

SEQ ID NO: 4581 - DNA, 154 bp, synthetic construct
  misc_feature 1..154: note = Description of artificial sequence: synthetic polynucleotide sequence
  source 1..154: mol_type = other DNA
ccaatgcaggagacgccatcctcagccagcaccgtcccgtggtcacagaagcagatgaccttgtggctttcagggtccatgtgacattcgtctacctcacagtgactgcagtttagataatgcttaatattcacttccccgtggccttccatca

SEQ ID NO: 4582 - DNA, 121 bp, synthetic construct
  misc_feature 1..121: note = Description of artificial sequence: synthetic polynucleotide sequence
  source 1..121: mol_type = other DNA
agagaagctaccttttaaagctggggtgtacaggatgcccagtggactgatgaaggaaaccccatcttccccatccatttcggggtcattgtttgaggctgcattgccgcctgagtagcaa

SEQ ID NO: 4583 - DNA, 184 bp, synthetic construct
  misc_feature 1..184: note = Description of artificial sequence: synthetic polynucleotide sequence
  source 1..184: mol_type = other DNA
cctatatatcctccgcctcctccacctgaggagcacccccctccaccccctccgaaaccccctcttgtctcccacccccacttcttcatggcctgggggcaggaatgtcctccggtggcaccctcctgcaaagattttccggcccagagcaaggaagtgttatcattccagccacctccaccac

SEQ ID NO: 4584 - DNA, 146 bp, synthetic construct
  misc_feature 1..146: note = Description of artificial sequence: synthetic polynucleotide sequence
  source 1..146: mol_type = other DNA
cctgcggctccggaattgccgtttagccctagaaccgaggagttattctccagtctctctgggtggaacgtgtctgtcttggccccgtaggccctgccaccacctccggctgcaatgatcaggggcaccggcactccatccttcat

SEQ ID NO: 4585 - DNA, 133 bp, synthetic construct
  misc_feature 1..133: note = Description of artificial sequence: synthetic polynucleotide sequence
  source 1..133: mol_type = other DNA
ccttaaatacgtaggtggctccaccccctcctcctccgcctcctgcccactcatgcacgcttctgttcacacggatttcttcttctatcacattgttctctccaatgcagactttctggattaactggtttgt

SEQ ID NO: 4586 - DNA, 152 bp, synthetic construct
  misc_feature 1..152: note = Description of artificial sequence: synthetic polynucleotide sequence
  source 1..152: mol_type = other DNA
cactggggcaggcgtcctctccctgctgcccaaccaggatgtacagcatgtcatccttctccaggttgaagatgcccagcacagacacgccgtgggaccgcatcatggtgttcttcccgcctttcccgccagcagctccgtagcccgagatg

SEQ ID NO: 4587 - DNA, 164 bp, synthetic construct
  misc_feature 1..164: note = Description of artificial sequence: synthetic polynucleotide sequence
  source 1..164: mol_type = other DNA
cctgtaggtgtcggtggctggcaccttccagatctggatgcctttcagggggccctcgctccccacctccacgctcaggttggagttctggtaggcgttgttgcactgtgcctgggtggggccatggggcccgctggccccacatgtggtgaacagccaatgaa

SEQ ID NO: 4588 - DNA, 121 bp, synthetic construct
  misc_feature 1..121: note = Description of artificial sequence: synthetic polynucleotide sequence
  source 1..121: mol_type = other DNA
agggtcaaagatgggggtctgtcttggtgaattttccccgggtttcagctccttgtttgggtttctctcaaacaggtttcttgatttgggtgctgtattctgcaggatcttgtcctctccg

SEQ ID NO: 4589 - DNA, 121 bp, synthetic construct
  misc_feature 1..121: note = Description of artificial sequence: synthetic polynucleotide sequence
  source 1..121: mol_type = other DNA
agagtgaactcactggtgaggtagcagtccaggctgatggagatattgtcaaaagccacgatggctctggatccttgtccccaccatgcgaccatctgcagccagaacctgtacacatcaa

SEQ ID NO: 4590 - DNA, 171 bp, synthetic construct
  misc_feature 1..171: note = Description of artificial sequence: synthetic polynucleotide sequence
  source 1..171: mol_type = other DNA
cctgtcagacacatcgaggagaggcaacaccatccactgccacaggctcaagccttcataggcggcgacatgccagaccatcctgccttgctccttcccggttttgttctccactagcaccaaggacacgtttcccctcaagactccacgaatgagccaggacattcggag

SEQ ID NO: 4591 - DNA, 121 bp, synthetic construct
  misc_feature 1..121: note = Description of artificial sequence: synthetic polynucleotide sequence
  source 1..121: mol_type = other DNA
ggagacttgcctcacatggagagctcttgatcggtgcaggaaacgtagcactggtcactgtagcactttcagaagcggggacatcagtggtactgagcaatagagcatggtctaggagaga

SEQ ID NO: 4592 - DNA, 133 bp, synthetic construct
  misc_feature 1..133: note = Description of artificial sequence: synthetic polynucleotide sequence
  source 1..133: mol_type = other DNA
ccttggtggtcctggaaccgggcatcctttagggtcctgacctgccattgaggagtgtggggtgacagtgtgccttgggtccagccacagaagccatcttcaaagttgcagtaaaaacccacaggcagtttcc

SEQ ID NO: 4593 - DNA, 133 bp, synthetic construct
  misc_feature 1..133: note = Description of artificial sequence: synthetic polynucleotide sequence
  source 1..133: mol_type = other DNA
cggcacatctggctctcatcttctccctgggcacagtcctggtggaagtcacaggcctgcccaagctggaggactgtcccattccaacaagtgaaggagctctgcagggccatcttggagcctggggatgttc

SEQ ID NO: 4594 - DNA, 121 bp, synthetic construct
  misc_feature 1..121: note = Description of artificial sequence: synthetic polynucleotide sequence
  source 1..121: mol_type = other DNA
cactgcagttcttcagggcaaagaagtccactgcagacaagctgcggtttccactggagatgtattccagggccactcgaaatgggttgtctggacgcccgattcttccctggagcactgt

SEQ ID NO: 4595 - DNA, 203 bp, synthetic construct
  misc_feature 1..203: note = Description of artificial sequence: synthetic polynucleotide sequence
  source 1..203: mol_type = other DNA
cccatgcttccctggagtgggcatcaggaggatctctcttgcagcctcgttgtggggcagcagctgggcaatgtaccttccagagggctgcaggtgcctgtgcaccgagacggccagtgtgcagtgctcactgctgctcctcatccacggactcaggatggtgtgcttggagtcagctgaggtgttgagaaggagaaaggagc

SEQ ID NO: 4596 - DNA, 166 bp, synthetic construct
  misc_feature 1..166: note = Description of artificial sequence: synthetic polynucleotide sequence
  source 1..166: mol_type = other DNA
cctctgggcatctccttagaacgctctgccccaggcccatccagcaagtccatctgggaggcctcctcggaggggatgcggcgccaggaccagctctggttcctgaggtcatgcagtggaggggaatactccagctcacaggggaagtcaaagctgcactccagac

SEQ ID NO: 4597 - DNA, 121 bp, synthetic construct
  misc_feature 1..121: note = Description of artificial sequence: synthetic polynucleotide sequence
  source 1..121: mol_type = other DNA
ccatatcggctgcgatgagacaggaaagggaaggagtctttcattatccaggtgagattccatgtaaaataatcaggagaaggagaaggcatgtttgttggtgattccaaggagctatgac

SEQ ID NO: 4598 - DNA, 328 bp, synthetic construct
  misc_feature 1..328: note = Description of artificial sequence: synthetic polynucleotide sequence
  source 1..328: mol_type = other DNA
ccagtcccgaagatctggaagagaaggcggggctgggaggcgcgaattgccgcggacagccttccctctctgcccacttccgacgccttcttctcgggcatcaggcggatcctcagtcgcccttcgccttggcgaatccaccaactgaacagctcgctgagattgaactggagcagccccacagccgcctccccggggggcccgacgcaaccctccaagatcgcctcctcgcccagctccagcaccaactgcttggcacgccggagcttgcgcacggagccgcccttcagcaccctggacagcgtccgggcctctgccggggctggtg

SEQ ID NO: 4599 - DNA, 340 bp, synthetic construct
  misc_feature 1..340: note = Description of artificial sequence: synthetic polynucleotide sequence
  source 1..340: mol_type = other DNA
aaccggcggtccaggagacccccggcgccggccccagcaacctgagcagcggggcgcagtccagagctagcgagccgcgggcctcgggcctgccagccttcagctccgaggaggatggtggcagcagtaggtcccgggcgtagacacggaagagcgagggcaccacgaagtcaactgccagactcttcctctgcaggcgcgagtagctgagtggctcccggggctgcagcggcggccccgcagctggggagcccgcgcgctggccggtccccatcccggagcccacagctgccgtggaaagcagcagcggcaggagccacaggagcccgatggctcccat

SEQ ID NO: 4600 - DNA, 121 bp, synthetic construct
  misc_feature 1..121: note = Description of artificial sequence: synthetic polynucleotide sequence
  source 1..121: mol_type = other DNA
ttatgtggcaaatttaaaggatgcaggagtcagggcttgctagttacatgtgtgagcaaaggaaccaatctagataatgcatatgaaaagtatttgaaactgtgaagtgctgcacaggttg

SEQ ID NO: 4601 - DNA, 121 bp, synthetic construct
  misc_feature 1..121: note = Description of artificial sequence: synthetic polynucleotide sequence
  source 1..121: mol_type = other DNA
tgtaatgcatcacactcctcagattctttccacgatgagctgctgctgccttgtgcttactgtgaggcctggagggccagaggggctattccttgtttcttctctactctcagctctcagc

SEQ ID NO: 4602 - DNA, 121 bp, synthetic construct
  misc_feature 1..121: note = Description of artificial sequence: synthetic polynucleotide sequence
  source 1..121: mol_type = other DNA
ccttacttagtaaggtgaaatcctttaaaagagggctgaacccttcatgaaaagagagaatctgctggtcttgaagaatcaagttgccattagttctatagccacaaggaaatgaattctg

SEQ ID NO: 4603 - DNA, 121 bp, synthetic construct
  misc_feature 1..121: note = Description of artificial sequence: synthetic polynucleotide sequence
  source 1..121: mol_type = other DNA
tctggacaatcacctttccatgtggtttctctgaaagatttcacactctctataactgaagcaaggaaaatagaacacctttaatgagcaattacaattaacacactgactcactgaaaag

SEQ ID NO: 4604 - DNA, 121 bp, synthetic construct
  misc_feature 1..121: note = Description of artificial sequence: synthetic polynucleotide sequence
  source 1..121: mol_type = other DNA
ccttcagaggtaatttcctgggttggcggttgtgaagtttatgatgcgatgcagtatgtatcgtaaggagaccacagctattgtgggcagggagatttcagggtgagccctggtcctgaca

SEQ ID NO: 4605 - DNA, 121 bp, synthetic construct
  misc_feature 1..121: note = Description of artificial sequence: synthetic polynucleotide sequence
  source 1..121: mol_type = other DNA
acatgtgcaaatcttttgtcacttctcctattgattggtgatgggtaggacacttctacctgaatctgggctgaccttagagacttgttcataacttattcataactaatgaatacagcag

SEQ ID NO: 4606 - DNA, 121 bp, synthetic construct
  misc_feature 1..121: note = Description of artificial sequence: synthetic polynucleotide sequence
  source 1..121: mol_type = other DNA
tactctgcattgtaacgtatgtttgcttttaaggcgatagatgggtagatagatgctctgtaattgaatagcctactgggcttctgtgtagcacagcactgtgtaagtcgcaggtgttcag

SEQ ID NO: 4607 - DNA, 121 bp, synthetic construct
  misc_feature 1..121: note = Description of artificial sequence: synthetic polynucleotide sequence
  source 1..121: mol_type = other DNA
atggcatattctaaagcacgctatatctgtcgcagtaaaatatctcatagcagcaaaatgtctcaaggtgtaaaaatgctttggggaaaaagtactgattttaaatttacttgtagggttt

SEQ ID NO: 4608 - DNA, 121 bp, synthetic construct
  misc_feature 1..121: note = Description of artificial sequence: synthetic polynucleotide sequence
  source 1..121: mol_type = other DNA
gaaggtagaaacacattccacagccatgtgaattccaacttcggagaaaggtgagctacagaacagttctaatataaactgatgtcatgagattctagagtctgctgtcatcacattctgt

SEQ ID NO: 4609 - DNA, 121 bp, synthetic construct
  misc_feature 1..121: note = Description of artificial sequence: synthetic polynucleotide sequence
  source 1..121: mol_type = other DNA
tgtgtcaatgtgggttatcaattgtgacaaatgtaccactctggtggaagggacgttgataagagggtggctatgtatgtggggggcagggaggatgtgagatatttctgtatcttctggt

SEQ ID NO: 4610 - DNA, 121 bp, synthetic construct
  misc_feature 1..121: note = Description of artificial sequence: synthetic polynucleotide sequence
  source 1..121: mol_type = other DNA
ttgcagagattcgtcggggttgggtacagatgatgttggctaccttctcaggtggtccattcagagaatcatccagaataaactgcggaatttgtgtggttttcccacatctgtacattaa

SEQ ID NO: 4611 - DNA, 121 bp, synthetic construct
  misc_feature 1..121: note = Description of artificial sequence: synthetic polynucleotide sequence
  source 1..121: mol_type = other DNA
aggccagaatgtcatgcatggatggtgagggatgggtcctggggaggcaaaacctttccagcagagaagagggagttctactgaggtctcctagggagtgttggctcatttagagaagagt

SEQ ID NO: 4612 - DNA, 121 bp, synthetic construct
  misc_feature 1..121: note = Description of artificial sequence: synthetic polynucleotide sequence
  source 1..121: mol_type = other DNA
atcaagtgaaataagctagacacagaaagacaatactgtctcacttacattagaataaaaaacagtcgaaaactcacagaagcagaaagtaggacagcagttgccagggactagggtgagg

SEQ ID NO: 4613 - DNA, 121 bp, synthetic construct
  misc_feature 1..121: note = Description of artificial sequence: synthetic polynucleotide sequence
  source 1..121: mol_type = other DNA
cagctgggctacccaaaccccatggtcaggcagaggcaaggcagggagtgaaagaggaatgagcaaagtggtcatgaatctctcatgtagagggacagttcatctctggcagtctttcctc

SEQ ID NO: 4614 - DNA, 121 bp, synthetic construct
  misc_feature 1..121: note = Description of artificial sequence: synthetic polynucleotide sequence
  source 1..121: mol_type = other DNA
ttaaaaaaaaatcagagaaggtacctgaaataaactgaaccagctacatcagtgcttgtgttagtttctcaaaaggactgggtgcacgtttgcagttcccagaatagggaagatccaccgt

SEQ ID NO: 4615 - DNA, 121 bp, synthetic construct
  misc_feature 1..121: note = Description of artificial sequence: synthetic polynucleotide sequence
  source 1..121: mol_type = other DNA
catggctgttgcggggagcccaaggtggataccaccacccagtctgggttcttctaccgtgtcagggctgtgggttccaggcatggtggcaaggaatttttacccagaaccccaaagtgta

SEQ ID NO: 4616 - DNA, 121 bp, synthetic construct
  misc_feature 1..121: note = Description of artificial sequence: synthetic polynucleotide sequence
  source 1..121: mol_type = other DNA
aaattaaggtagttgatggtgatgttagggctacatgtaaagctaagatttgtgtcttactgaaatgaaactaaaccagtggtccagacagcttaaagtgttggtaatttattgaaactat

SEQ ID NO: 4617 - DNA, 121 bp, synthetic construct
  misc_feature 1..121: note = Description of artificial sequence: synthetic polynucleotide sequence
  source 1..121: mol_type = other DNA
cttaaaatcattctaccaatatgggatcaaaggatatagttaacatggaaatgagacccacattattcagacaagaacatctttagggcatcgagcagccaaatggaagtgaactccattg

SEQ ID NO: 4618 - DNA, 121 bp, synthetic construct
  misc_feature 1..121: note = Description of artificial sequence: synthetic polynucleotide sequence
  source 1..121: mol_type = other DNA
ttgcaaatcataggaaaatcctaggcaaaatcctgagccatgaagcagtattcattaagagaattgtaagtatttctgttgggttgaagccagggttgtatggttagaggtgtcacctata

SEQ ID NO: 4619 - DNA, 121 bp, synthetic construct
  misc_feature 1..121: note = Description of artificial sequence: synthetic polynucleotide sequence
  source 1..121: mol_type = other DNA
acctagtgtcaatgtgactatgatggaagccataagtgacaccctcagcaaaataattcgaattcattctagtgctcctgggctcccatagcaccttgtatatacctctttgataaaactt

SEQ ID NO: 4620 - DNA, 121 bp, synthetic construct
  misc_feature 1..121: note = Description of artificial sequence: synthetic polynucleotide sequence
  source 1..121: mol_type = other DNA
aattttagattttgttaaggcagcaccccatttcagaatccaaattatctctcaactatatcttgctatgtgtcagagtgcccccaaatttagtaacttgagacagcaaacattcatttga

SEQ ID NO: 4621 - DNA, 121 bp, synthetic construct
  misc_feature 1..121: note = Description of artificial sequence: synthetic polynucleotide sequence
  source 1..121: mol_type = other DNA
tgttaaactctttattagggattcatggagactccagatctttcacagggcatttcatcctcagaaggagaccatctgccttccccagaatgcctcacggtgcccaagagaggaacagcca

SEQ ID NO: 4622 - DNA, 121 bp, synthetic construct
  misc_feature 1..121: note = Description of artificial sequence: synthetic polynucleotide sequence
  source 1..121: mol_type = other DNA
gatgaggaaactggcaacatggatgtctgaaagggaatcactgcagaaaatggaactgcgaggccctggggagagcatgagcgttttcagggaacagaaaggaagctggtgagactgagca

SEQ ID NO: 4623 - DNA, 121 bp, synthetic construct
  misc_feature 1..121: note = Description of artificial sequence: synthetic polynucleotide sequence
  source 1..121: mol_type = other DNA
aggcaaataaattagtgtatagggcccacttgggaagaatatataatgatgccagatacggtggtccagatctaacaactagatgttacccctattataagagatccaaaacattgaactg

SEQ ID NO: 4624 - DNA, 121 bp, synthetic construct
  misc_feature 1..121: note = Description of artificial sequence: synthetic polynucleotide sequence
  source 1..121: mol_type = other DNA
cttggtatgaatttgaacctgcactgattcttcttttcctatcttctcagcctatcaagatttacactgaaaaataaacaggtctgttgcttgcagttagttttatccacttctcaggact

SEQ ID NO: 4625 - DNA, 121 bp, synthetic construct
  misc_feature 1..121: note = Description of artificial sequence: synthetic polynucleotide sequence
  source 1..121: mol_type = other DNA
tgtggcagcagaaacatgagacccagacccggagccaacctgactccatcaatatcttcctgctcagcacttcagaaatgtttcctgtattaacttctttggacagtaattaaggaaggaa

SEQ ID NO: 4626 - DNA, 121 bp, synthetic construct
  misc_feature 1..121: note = Description of artificial sequence: synthetic polynucleotide sequence
  source 1..121: mol_type = other DNA
tattttcacagttggatgtactggaatatatacatgaaaatgaatatgttcatggtgatataaaagcagcaaatctacttttgggttacaaaaatccagaccaggtaaatacatacttttg

SEQ ID NO: 4627 - DNA, 121 bp, synthetic construct
  misc_feature 1..121: note = Description of artificial sequence: synthetic polynucleotide sequence
  source 1..121: mol_type = other DNA
atgtgtatgaaggagagggtgagatgggggtggagagagacaacagtgactgaattccatgtacactctgtctatgaacccctgtctttagagtcccatgtgtcattcatggggttttgga

SEQ ID NO: 4628 - DNA, 121 bp, synthetic construct
  misc_feature 1..121: note = Description of artificial sequence: synthetic polynucleotide sequence
  source 1..121: mol_type = other DNA
atataaaacatacagcacaggtttgatgaatatttttaagtgaacattcatgcaccttttgttctagtcaagaaaagagcattcccaacatgctaggagctcccttcttctttagcaccca

SEQ ID NO: 4629 - DNA, 121 bp, synthetic construct
  misc_feature 1..121: note = Description of artificial sequence: synthetic polynucleotide sequence
  source 1..121: mol_type = other DNA
ttaaagtaactactacaacatccagactattgagcttaagtataaacttctcaaacttcgttttatcctttaattttagcttttggaatttgttgaaatgcctcttcagttcattaagcag

SEQ ID NO: 4630 - DNA, 121 bp, synthetic construct
  misc_feature 1..121: note = Description of artificial sequence: synthetic polynucleotide sequence
  source 1..121: mol_type = other DNA
acatggggctagaaagtcaagagctgcatccagtgtcccatttttgtttagggcagaacgtatcattattacaatttccacattccttgggcttggggatgccacctctgtaggggttcac

SEQ ID NO: 4631 - DNA, 121 bp, synthetic construct
  misc_feature 1..121: note = Description of artificial sequence: synthetic polynucleotide sequence
  source 1..121: mol_type = other DNA
agatgtttaaaggggttccacagtaagagaggggaggctttccaggggaagaccttgctatcatccttacatgatcccccaaagcagattttctttagtgaattaaccttttgcccttgtc

SEQ ID NO: 4632 - DNA, 121 bp, synthetic construct
  misc_feature 1..121: note = Description of artificial sequence: synthetic polynucleotide sequence
  source 1..121: mol_type = other DNA
aaaaaaaagagaggcattttttttttctttaagagcctgctttgtgtcttctgagcagcgagcaaggttcaatcatgagccagtgagactgaacacctgggagcaagggcagatggacagc

SEQ ID NO: 4633 - DNA, 121 bp, synthetic construct
  misc_feature 1..121: note = Description of artificial sequence: synthetic polynucleotide sequence
  source 1..121: mol_type = other DNA
gctggttctcattccctagattctcagtatcttggtctcatgatgagttgttgcatctaattattattctccctgagattattagggactatgccaacagaatcatttgcatccctggaaa

SEQ ID NO: 4634 - DNA, 121 bp, synthetic construct
  misc_feature 1..121: note = Description of artificial sequence: synthetic polynucleotide sequence
  source 1..121: mol_type = other DNA
tcaccctacctcaagccactattaaaaccttgatatcataccacctcctaatggaagcacagccgctggttgactgaggagtggagtgccgggtaaagctgtgagaatcaagtctggtaat

SEQ ID NO: 4635 - DNA, 121 bp, synthetic construct
  misc_feature 1..121: note = Description of artificial sequence: synthetic polynucleotide sequence
  source 1..121: mol_type = other DNA
atcactaagcttcatggttagaatccctttccaattggagtgttcctatcctcgtggcacgaatcacggtactttctatttttctgattttccaaaagaactgaaaaaggaagggatgctt

SEQ ID NO: 4636 - DNA, 121 bp, synthetic construct
  misc_feature 1..121: note = Description of artificial sequence: synthetic polynucleotide sequence
  source 1..121: mol_type = other DNA
attatccttcccaaaacacaactttcaaccagtcagtctcctattcagtgactgccaatagcatcccatattataccacatcaagccaaattgccacatcaattttatttttctcagcctg

SEQ ID NO: 4637 - DNA, 121 bp, synthetic construct
  misc_feature 1..121: note = Description of artificial sequence: synthetic polynucleotide sequence
  source 1..121: mol_type = other DNA
acaccgcctacttgtcttttgtgtttagcaaccatttccactgggtttgcaccactgcccctttcaatcccaccttctgagtcccatctaagacatctgaactggcagtctacaatgcaag

SEQ ID NO: 4638 - DNA, 121 bp, synthetic construct
  misc_feature 1..121: note = Description of artificial sequence: synthetic polynucleotide sequence
  source 1..121: mol_type = other DNA
cctgggggcttcaaattttctcagaacttaagggctctcgagcttccatccgaaaactgccacacatcttgagctctctgggtactacgccgaatgggggtgtgtgaagaacctagaaaga

SEQ ID NO: 4639 - DNA, 239 bp, synthetic construct
  misc_feature 1..239: note = Description of artificial sequence: synthetic polynucleotide sequence
  source 1..239: mol_type = other DNA
tctattcagtttttatatcattattcaacactcgatcactgtgccattttttcatgtgtttctccagggtactgtacacgctaaaaggcatcttacaaatttcacatttgtaaacgtccttccccacctggccatgcgttttcatgtgcctggtgagcttgctactctgggcacaggcatagttgcacagctcgcatttataaggcctttcgcccgtgtggcttctcctgtggacagtg

SEQ ID NO: 4640 - DNA, 475 bp, synthetic construct
  misc_feature 1..475: note = Description of artificial sequence: synthetic polynucleotide sequence
  source 1..475: mol_type = other DNA
agattgctacagttcttgaagactttcccacagtactcacaagtgtcgctgcgtctgccctcttttgagctgggcctgcccgggcccggaccactaatatggggcgtgctccctccacttcccgtgccgctgcgccccgagatccctccgtccagctccccgggcggtgtggagaagcgcaaactcccgttctccgaggagtgctccgacgaggaggcaaaaggcgattgtctggagtctccgaagctaaggaagggatctttgagctgcctggaggccgcgtagccggcgagccactgcgagtacacgttctccgtgttgggcatcgcggccgggggcaggtcgaactccttctcgagcttgatgcgcttagagaaggggctcagcgagctggggctgcccagcagcagctttttggacaggccccccgaggccgactcgcccggggagcagccgcggccattaacagtgccat

SEQ ID NO: 4641 - DNA, 474 bp, synthetic construct
  misc_feature 1..474: note = Description of artificial sequence: synthetic polynucleotide sequence
  source 1..474: mol_type = other DNA
cgtctatgcggtccgactcgccggccaccgagtcttcgtcgcaagtgtccctgtggccctcggcctcggccaggtggccgcgcttatgcttctcgcccaggacctggtggaaggcctcgctgaagtgctgcatggagctgagcaccatgccctgcatgacgtcgggcagggcgcggctctcgtcgcccacgcccacgaccgcgccccgcgagctgttctcgtggtggcgcgccgcctccaggctcagcccgaagccgtagtccaccctctcgctctccgtcagctcctcctcctcctcttcctcctcttcttcctcttcctcgtcgtcctcctcttcctcctcgtccccgttctccgggatcaggttggggtcgttctcgctcttgaacttggccaccacggacttgagcgcgctgctggcgctgcccaccaagtcgctggtgccgggttccggggagctggcggtggagagac

SEQ ID NO: 4642 - DNA, 475 bp, synthetic construct
  misc_feature 1..475: note = Description of artificial sequence: synthetic polynucleotide sequence
  source 1..475: mol_type = other DNA
cgtcgtcggacttgaccgtcatgggggacgatttgtgcatgtgcgtcttcatgtggcgcttcagcttgctggcctgggtgcacgcgtggtcgcacaggttgcacttgtagggcttctcgcccgtgtggctgcgccggtgcaccaccaggttgctctgaaatttgaacgtcttgccgcagaactcgcatgacttggacttgaccgggggctgggagggaggaggggcggattgcagaggagggagggggggcgtcgccaggaagggcggcttgctacctggctggaatggttgcagtaacctttgcatagggctgggccggcctggggacagcggtgggctagacgtgttccctgccagctctctaagtctcctagagaaatccatggcgggaggctccatagccattggattcaaccgcagcaccctgtcaaaggcactcgggtgatgggtggccagggccatctcttccgcccc

SEQ ID NO: 4643 - DNA, 359 bp, synthetic construct
  misc_feature 1..359: note = Description of artificial sequence: synthetic polynucleotide sequence
  source 1..359: mol_type = other DNA
caggcgctctatgcggtgggggtccaagtgatgtctcggtggtggactaaacagggggggagtgggtggaaagcgcccttctgccaggccggaagcctctctcgatactgatcctggtattcttagcaggttaaaggggttattgtctgcaatatgaatcccatggagaggtggctgggaaggacattctgcacctagtcctgaagggataccaacccgcggggtcaggggacttccgtgttcgctttctaagtagattcttaatccatgagtgttctgtgcgtgttgcaagagaaaccatgcactggtgaatggctgtttgcaagttgtacatgtgtagctgctgggctcatctttac

SEQ ID NO: 4644 - DNA, 121 bp, synthetic construct
  misc_feature 1..121: note = Description of artificial sequence: synthetic polynucleotide sequence
  source 1..121: mol_type = other DNA
ctcaacttacaaataccctgcggggcatattctgcactcatcccaggcgtggggattagagctccatgtgcagaacgaggggaggagaggcccctccagtgcagaagtttatctgtgaaag

SEQ ID NO: 4645 - DNA, 331 bp, synthetic construct
  misc_feature 1..331: note = Description of artificial sequence: synthetic polynucleotide sequence
  source 1..331: mol_type = other DNA
cctgctatgtgttcctgtttggggcaaattcctctagatgacgttgataaacaatcgtcatcctctggcgtgacctggatgccaacctccacgggattggatgcttttttcatctcgattggtgaaggggaaggtggcttatccacagctttttctaagcagaggctgccattgcattgtttccgtttgtgctcgataaaaataagaatgtcccccaatgggaagttcatctggcactgcccacaggtgaggaggtcatgatccccttctggagctcccaacgggccgtggtctggttcatcatctgtaagaatggcttcaagaggctcgg

SEQ ID NO: 4646 - DNA, 121 bp, synthetic construct
  misc_feature 1..121: note = Description of artificial sequence: synthetic polynucleotide sequence
  source 1..121: mol_type = other DNA
aataattattattactattattgggttacttacgcgagaattcccgtttgcttaagtgctggggtttgccttgcttgcggcgagacatggtgggctgcggggcgggcggcggcggcggcgg

SEQ ID NO: 4647 - DNA, 121 bp, synthetic construct
  misc_feature 1..121: note = Description of artificial sequence: synthetic polynucleotide sequence
  source 1..121: mol_type = other DNA
ggaaagtcagattggtccaaactacttgagccaccgaatttctttcaaaagtataggtacgtgaaattttgtattttgtatgtatgtgatttttttttttttaaagaagaatgttaaacat

SEQ ID NO: 4648 - DNA, 121 bp, synthetic construct
  misc_feature 1..121: note = Description of artificial sequence: synthetic polynucleotide sequence
  source 1..121: mol_type = other DNA
ccgcctccggccaggacgctgggagctgcctgcgggaaggtgcggggagcggagccatggcctccggtgagtgttcatggggcgcgggcctgggccgggggaaaggagctcttctgaaggg

SEQ ID NO: 4649 - DNA, 144 bp, synthetic construct
  misc_feature 1..144: note = Description of artificial sequence: synthetic polynucleotide sequence
  source 1..144: mol_type = other DNA
ggtgcgtataacccgtatatagagataattgaacaacccaggcagaggggaatgcgttttagatacaaatgtgaagggcgatcagcaggcagcattccaggggagcacagcacagacaacaaccgaacatacccttctatccag

SEQ ID NO: 4650 - DNA, 150 bp, synthetic construct
  misc_feature 1..150: note = Description of artificial sequence: synthetic polynucleotide sequence
  source 1..150: mol_type = other DNA
gattatgaactattatggaaaaggaaaagtgagaattacattagtaacaaagaatgacccatataaacctcatcctcatgatttagttggaaaagactgcagagacggctactatgaagcagaatttggacaagaacgcagacctttgtt

SEQ ID NO: 4651 - DNA, 121 bp, synthetic construct
  misc_feature 1..121: note = Description of artificial sequence: synthetic polynucleotide sequence
  source 1..121: mol_type = other DNA
tttttttcctgctagtttccaaaatttgggtattcgatgtgtgaagaaaaaagaagtaaaagaagctattattacaagaataaaggcaggaatcaatccattcaatggtaagtatgtttga

SEQ ID NO: 4652 - DNA, 142 bp, synthetic construct
  misc_feature 1..142: note = Description of artificial sequence: synthetic polynucleotide sequence
  source 1..142: mol_type = other DNA
gtccctgaaaaacagctgaatgatattgaagattgtgacctcaatgtggtgagactgtgttttcaagtttttctccctgatgaacatggtaatttgacgactgctcttcctcctgttgtctcgaacccaatttatgacaacc

SEQ ID NO: 4653 - DNA, 121 bp, synthetic construct
  misc_feature 1..121: note = Description of artificial sequence: synthetic polynucleotide sequence
  source 1..121: mol_type = other DNA
atatttaggtgctccaaatactgcagaattaaggatttgtcgtgtaaacaagaattgtggaagtgtcagaggaggagatgaaatatttctactttgtgacaaagttcagaaaggtatttat

SEQ ID NO: 4654 - DNA, 214 bp, synthetic construct
  misc_feature 1..214: note = Description of artificial sequence: synthetic polynucleotide sequence
  source 1..214: mol_type = other DNA
gatgacatagaagttcgttttgtgttgaacgattgggaagcaaaaggcatcttttcacaagctgatgtacaccgtcaagtagccattgttttcaaaactccaccatattgcaaagctatcacagaacccgtaacagtaaaaatgcagttgcggagaccttctgaccaggaagttagtgaatctatggattttagatatctgccagatgaaaaag

SEQ ID NO: 4655 - DNA, 121 bp, synthetic construct
  misc_feature 1..121: note = Description of artificial sequence: synthetic polynucleotide sequence
  source 1..121: mol_type = other DNA
tgctttcctggtttctttctaatcagatacttacggcaataaagcaaagaaacaaaagacaactctgcttttccagaaactgtgccaggatcacggtaagaatagtttggatcgattcata

SEQ ID NO: 4656 - DNA, 121 bp, synthetic construct
  misc_feature 1..121: note = Description of artificial sequence: synthetic polynucleotide sequence
  source 1..121: mol_type = other DNA
ataatggaaaaactttatcctaacagttaattttcctgagagaccaagacctggtctcctcggttcaattggagaaggaagatacttcaaaaaaggtattttatttcctatagcatatttc

SEQ ID NO: 4657 - DNA, 327 bp, synthetic construct
  misc_feature 1..327: note = Description of artificial sequence: synthetic polynucleotide sequence
  source 1..327: mol_type = other DNA
gaaccaaacttgttttctcatgatgcagttgtgagagaaatgcctacaggggtttcaagtcaagcagaatcctactatccctcacctgggcccatctcaagtggattgtcacatcatgcctcaatggcacctctgccttcttcaagctggtcatcagtggcccaccccaccccacgctcaggcaatacaaacccactgagtagtttttcaacaaggacacttccttctaattcgcaaggtatcccaccattcctgagaatacctgttgggaatgatttaaatgcttctaatgcttgcatttacaacaatgccgatgacatagtcgga

SEQ ID NO: 4658 - DNA, 447 bp, synthetic construct
  misc_feature 1..447: note = Description of artificial sequence: synthetic polynucleotide sequence
  source 1..447: mol_type = other DNA
atggaagcgtcatccatgccatcagcagatttatatggtatttctgatcccaacatgctgtctaattgttctgtgaatatgatgacaaccagcagtgacagcatgggagagactgataatccaagacttctgagcatgaatcttgaaaacccctcatgtaattcagtgttagacccaagagacttgagacagctccatcagatgtcctcttccagtatgtcagcaggcgccaattccaatactactgtttttgtttcacaatcagatgcatttgagggatctgacttcagttgtgcagataacagcatgataaatgagtcgggaccatcaaacagtactaatccaaacagtcatggttttgttcaagatagtcagtattcaggtattggcagtatgcaaaatgagcaattgagtgactcctttccatatgaattttttcaagtataa

SEQ ID NO: 4659 - DNA, 121 bp, synthetic construct
  misc_feature 1..121: note = Description of artificial sequence: synthetic polynucleotide sequence
  source 1..121: mol_type = other DNA
cgagctcgcacagccaggggccttcggtgaaggacgcgcaaaggtgttttctggtcgatttttaagtcctaggggagaatatgacacacagtcccagagtcagagctttgccacccagtga

SEQ ID NO: 4660 - DNA, 121 bp, synthetic construct
  misc_feature 1..121: note = Description of artificial sequence: synthetic polynucleotide sequence
  source 1..121: mol_type = other DNA
gacgttcacattttcaactggttgataaaatacattaaaaggaacactaaggagaataaagattgtgagatgcccactttaggtaaaaaacaatctgttgcttaatttgtagtgaaatttg

SEQ ID NO: 4661 - DNA, 121 bp, synthetic construct
  misc_feature 1..121: note = Description of artificial sequence: synthetic polynucleotide sequence
  source 1..121: mol_type = other DNA
taatgctgccatgtcagtctgtgataatgtcaaatgcctgaaagaaaatattagtggaaataagtttttcttccttctgtattactttacagcgatttacaacatgtatcaaaaattgttg

SEQ ID NO: 4662 - DNA, 121 bp, synthetic construct
  misc_feature 1..121: note = Description of artificial sequence: synthetic polynucleotide sequence
  source 1..121: mol_type = other DNA
tcacaaaaattagtcttcgaaatacctaaagatgcatacctctgtgtccaggaattgatataagtaaatattttgagagtatgttcctttctgagctgcagtccatcaccaccttctacat

SEQ ID NO: 4663 - DNA, 148 bp, synthetic construct
  misc_feature 1..148: note = Description of artificial sequence: synthetic polynucleotide sequence
  source 1..148: mol_type = other DNA
tttaatcacacatttcttctggaatctcatgtggattaaagatgccagggacagacatttgacgtttatgtttctcttcatcagcctgccgtagggctatttctctctcttccaaaaacaaatcagaagtgtcttcacctgcaaattc

SEQ ID NO: 4664 - DNA, 121 bp, synthetic construct
  misc_feature 1..121: note = Description of artificial sequence: synthetic polynucleotide sequence
  source 1..121: mol_type = other DNA
ataaatacatacctttatttgaactaggaaatctcttaaatgttccttgaaagcaggaatatcttgatttaagctgaaaagccctgtcacaaagagctttacttgagcactgcaaatcaaa

SEQ ID NO: 4665 - DNA, 161 bp, synthetic construct
  misc_feature 1..161: note = Description of artificial sequence: synthetic polynucleotide sequence
  source 1..161: mol_type = other DNA
ctcttgtaggtgagggaaggccgacttaaggagattagccacatattcctgaagaaagatttggttgttaactggatttccaggatttaatgatgtacttatttttccttcttcaaccaaattaaacatatatgcaagaattgatgcatgcattgttaaac

SEQ ID NO: 4666 - DNA, 136 bp, synthetic construct
  misc_feature 1..136: note = Description of artificial sequence: synthetic polynucleotide sequence
  source 1..136: mol_type = other DNA
ccagcagtatgtgaagtgtctgtcacaacagaaaagatatgctggagaatatcacaaaaataagtttgataaaaactctgagctgcagcttcttcttgtgcaacattttgtaagagtgtaaaaagtatctgtaagc

SEQ ID NO: 4667 - DNA, 170 bp, synthetic construct
  misc_feature 1..170: note = Description of artificial sequence: synthetic polynucleotide sequence
  source 1..170: mol_type = other DNA
cccgtatctgcgacattcctcatagtatgtttgaaagcccaaatgatggaatccaaaacaagtttaaactgtgtaggtggaatagcaaggaatgctgggaaacaatgagaattgacagcctgaagtagtaagaaaaagttcgttctatgttcaggatattcttcaaagtc

SEQ ID NO: 4668 - DNA, 196 bp, synthetic construct
  misc_feature 1..196: note = Description of artificial sequence: synthetic polynucleotide sequence
  source 1..196: mol_type = other DNA
ccttatttatcatattcaatgtgcattcaaaaacagcatcaaatatttgaggtatttcagctgttatatgtccccctaacttgttgacaattatggccatagtactaagcacttctggttctctagcagctgggacatttctctgataatcaatgagaactgcatccaacagagggggaacaaaattttcagcgac

SEQ ID NO: 4669 - DNA, 121 bp, synthetic construct
  misc_feature 1..121: note = Description of artificial sequence: synthetic polynucleotide sequence
  source 1..121: mol_type = other DNA
cacttaccatctgtggatcattggatcggctcacccaaccagatattaactttaaagtttccctttttacagttcgcatacttctaatcaatggttgctttgtaaccatttcacctacaaa

SEQ ID NO: 4670 - DNA, 185 bp, synthetic construct
  misc_feature 1..185: note = Description of artificial sequence: synthetic polynucleotide sequence
  source 1..185: mol_type = other DNA
ccattagcttggatagctgcagaaatattttcactgaggcacttgtatacattaagcatatctaaataaattcttccaagctgaattacaaaggggtgtccaacagctttgcaggctctcacatttgttttcaaaatgctaccaagctgcttgactgtttcaggatctttcagtatatccacatt

SEQ ID NO: 4671 - DNA, 136 bp, synthetic construct
  misc_feature 1..136: note = Description of artificial sequence: synthetic polynucleotide sequence
  source 1..136: mol_type = other DNA
ctttggttgcctgctggattatactatcccacacttgattagggagtaacatgtacttttctatcaagtgttcttgtactgtttgatctgtttgtgcaccaatcatgtaccccacagcttcataaaacgtatgaac

SEQ ID NO: 4672 - DNA, 165 bp, synthetic construct
  misc_feature 1..165: note = Description of artificial sequence: synthetic polynucleotide sequence
  source 1..165: mol_type = other DNA
cctgttgaggctgaagatcacaaataatagtgttaatgttgttcaaaatttcatcaataaatggcatcacttctccaacctgaacctgaacgaaatgcctgcggcatttttgggctattttaatgaaagtatcacaagccatatcctggactccatcatgggtct

SEQ ID NO: 4673 - DNA, 158 bp, synthetic construct
  misc_feature 1..158: note = Description of artificial sequence: synthetic polynucleotide sequence
  source 1..158: mol_type = other DNA
ccatgcatgaattcgaacagcttgttaactacagtcttcagaaatttccagtgagctctcaaaaaacgtgggtattgacctactatgtacatgatatttgatgcaataatagctttattatctttgcctcttttctgttcacataatcctaatagatc

SEQ ID NO: 4674 - DNA, 183 bp, synthetic construct
  misc_feature 1..183: note = Description of artificial sequence: synthetic polynucleotide sequence
  source 1..183: mol_type = other DNA
cctttataacagtaacaagaaatcgtttttcgtcctcttcatgcattgctccactaatggagcctattgcccaacacaatgtattcaaatttttccatgaccactctgtaccattcacttgattgtgaagcttctctgtcattattctttctgtatctacataatccagatgagtaagataaa

SEQ ID NO: 4675 - DNA, 140 bp, synthetic construct
  misc_feature 1..140: note = Description of artificial sequence: synthetic polynucleotide sequence
  source 1..140: mol_type = other DNA
cccaatgtttccctcatattcttatacaaatttatggaatctgtatccttcatgaattctctcacaacttctccttgatcattctctacaaccaatacttcctctggtttagccattcgactaaccattaataaacggac

SEQ ID NO: 4676 - DNA, 199 bp, synthetic construct
  misc_feature 1..199: note = Description of artificial sequence: synthetic polynucleotide sequence
  source 1..199: mol_type = other DNA
ccttgaataacatgggcaaatatagctgtctcctgggaggaacatcaaaatgttgacttccagaaagcaacggagaggcagatgtagagaatggactctctctatagagttcagcagccaaatgattccagtattcaagacaaattttaaagatttcagtttcttctacttcagataccaacaacatataatgaagggc

SEQ ID NO: 4677 - DNA, 160 bp, synthetic construct
  misc_feature 1..160: note = Description of artificial sequence: synthetic polynucleotide sequence
  source 1..160: mol_type = other DNA
cctccataagagtttccctgagatttaatcttttttctataagttgatcatgttccttaagaaaggtgcagagaaacaaactgagattttgaatgaagttctgttcatcatcttttccatttgagtacgcaagtcgaatattggtatttaaaggaagcat

SEQ ID NO: 4678 - DNA, 121 bp, synthetic construct
  misc_feature 1..121: note = Description of artificial sequence: synthetic polynucleotide sequence
  source 1..121: mol_type = other DNA
tttagttgcatcattgtcagagtaaatagtgttacaaattgttcttcatattggcttacactcacaccagcaatctcagtgaggcacttcagagagacatttcgaaacattggaacattca

SEQ ID NO: 4679 - DNA, 121 bp, synthetic construct
  misc_feature 1..121: note = Description of artificial sequence: synthetic polynucleotide sequence
  source 1..121: mol_type = other DNA
ccttataaatcaatgtgctgattaatttggtctcaaaaatatatcccaggggaatccagttcagaaatctgagcaatgtttccaaggttgcatgtacaagtggagcattttgagaattttc

SEQ ID NO: 4680 - DNA, 121 bp, synthetic construct
  misc_feature 1..121: note = Description of artificial sequence: synthetic polynucleotide sequence
  source 1..121: mol_type = other DNA
attattgtttttaaaaatgaaattaaaaacacttaccattacaaactgacacagttgaaatatctgtgagaattcattgcacatgctaaaaaaaaaaacacacaaaaatatcagatttaga

SEQ ID NO: 4681 - DNA, 183 bp, synthetic construct
  misc_feature 1..183: note = Description of artificial sequence: synthetic polynucleotide sequence
  source 1..183: mol_type = other DNA
cctgtcttttaaatgcttagatttgacttgggttatctgtccactagagaaatcaaatacttcttcactcaagagtttaagaatcaccatattattttgacagagactttcgctggtcctacttgctccaacaatatcactgataaaagttggccaatgtttgggccattcttgtttcagtat

SEQ ID NO: 4682 - DNA, 121 bp, synthetic construct
  misc_feature 1..121: note = Description of artificial sequence: synthetic polynucleotide sequence
  source 1..121: mol_type = other DNA
ataattcttctaaggaaaacagttaagttaaagcttacctgaacaaggatcatatttaattttccgatatacaccttttctttctaaggaaaagtaaaagattaaatgagagcctgaggta

SEQ ID NO: 4683 - DNA, 121 bp, synthetic construct
  misc_feature 1..121: note = Description of artificial sequence: synthetic polynucleotide sequence
  source 1..121: mol_type = other DNA
ctcccaataagctccaaaataaactcttacctctacacaagttgggtcagatgacgtcttgataatgaggccaacaacgtatttttttattcctattaaaaaaattgcacgtaataaaaaa

SEQ ID NO: 4684 - DNA, 121 bp, synthetic construct
  misc_feature 1..121: note = Description of artificial sequence: synthetic polynucleotide sequence
  source 1..121: mol_type = other DNA
atttataattctttattttcctaccttcgcactggttccttggaagaatcttccaccttgtttttatcacattttccaaaatttgtagtccatagtactgaaaattggagaatagaagcat

SEQ ID NO: 4685 - DNA, 121 bp, synthetic construct
  misc_feature 1..121: note = Description of artificial sequence: synthetic polynucleotide sequence
  source 1..121: mol_type = other DNA
acttgcttactttcgtattcatattctgagaaaattccaaaattgtgtcgactcttgtccaagcatcaggatgctcctttaaatgtgtcagtacttcttgagccattctttgctaaaatat

SEQ ID NO: 4686 - DNA, 121 bp, synthetic construct
  misc_feature 1..121: note = Description of artificial sequence: synthetic polynucleotide sequence
  source 1..121: mol_type = other DNA
gggctccttctccatggtataagcaattcaccacattatctaataagttgatatccagtttttggctgaaatcaagcagctgacgagctgcatggtctgctaacattgtcataattgctgg

SEQ ID NO: 4687 - DNA, 121 bp, synthetic construct
  misc_feature 1..121: note = Description of artificial sequence: synthetic polynucleotide sequence
  source 1..121: mol_type = other DNA
gtgcaacagggagggtttgtcactgctccacagtgtttgagtcctcagaggagaagactcgaacacaaagaatgagtcatttggctgggggatgaagtcatctggaggcttctccattatg

SEQ ID NO: 4688 - DNA, 121 bp, synthetic construct
  misc_feature 1..121: note = Description of artificial sequence: synthetic polynucleotide sequence
  source 1..121: mol_type = other DNA
atttgagctaaactttgatgtgagtcataagccttagcccgggttgtcaggagtttctgcaattctttcattctttgcttctgtttagttaggatccgatttctctcttcttccaacattt

SEQ ID NO: 4689 - DNA, 121 bp, synthetic construct
  misc_feature 1..121: note = Description of artificial sequence: synthetic polynucleotide sequence
  source 1..121: mol_type = other DNA
ggtggttattcctaccaccaccccaaactgcagacacgagccagagttccttgcttgaggaagaagacattaagaaacatttatttgttttgccagataccaaaaagtattcaggagagtt

SEQ ID NO: 4690 - DNA, 121 bp, synthetic construct
  misc_feature 1..121: note = Description of artificial sequence: synthetic polynucleotide sequence
  source 1..121: mol_type = other DNA
ctagtaatggaatgtaagagggaaactttgtggagtttaagtcataacttgtggtcttggttgtcaattcacatcatgtgattggaaattgaagatactgccccaaaggctgagactggga

SEQ ID NO: 4691 - DNA, 121 bp, synthetic construct
  misc_feature 1..121: note = Description of artificial sequence: synthetic polynucleotide sequence
  source 1..121: mol_type = other DNA
cgattggaatcactgaacacggcccggctgaagtttcccagccgctggcgcaccggatccggcagctccatgcctgggcctcagtatccctcaccccctcagacacgggctagtctgcggg

SEQ ID NO: 4692 - DNA, 121 bp, synthetic construct
  misc_feature 1..121: note = Description of artificial sequence: synthetic polynucleotide sequence
  source 1..121: mol_type = other DNA
ggaccattcattgttacaaggggagaagcagggtacatgggtagagaagcagataggttggtagatttggttgggaaggatgtggacattctgttttctcagggaaatgatataagaaatc

SEQ ID NO: 4693 - DNA, 121 bp, synthetic construct
  misc_feature 1..121: note = Description of artificial sequence: synthetic polynucleotide sequence
  source 1..121: mol_type = other DNA
tcagttttatccccatcgaacataatccccacttgctgccagaatgatctttctacaaaacaaatccaattatgtctctttctgaatagtttttgaatgccttccctttgccgtcaggaaa

SEQ ID NO: 4694 - DNA, 121 bp, synthetic construct
  misc_feature 1..121: note = Description of artificial sequence: synthetic polynucleotide sequence
  source 1..121: mol_type = other DNA
agggtatttagtgggtatccctttggttccccaccttacctagcccaggttgaattcctctctgattatctgccttgtgtcctgctttggggaaatagttgtttcagaaaaggattgtatt

SEQ ID NO: 4695 - DNA, 121 bp, synthetic construct
  misc_feature 1..121: note = Description of artificial sequence: synthetic polynucleotide sequence
  source 1..121: mol_type = other DNA
attttactgtgtttatcaagatttggatttcccacagcctggctattttcttctggcctgtcttccagacaaccattatctttttagctgctgctaagccccactcttgaatttttaattc

SEQ ID NO: 4696 - DNA, 121 bp, synthetic construct
  misc_feature 1..121: note = Description of artificial sequence: synthetic polynucleotide sequence
  source 1..121: mol_type = other DNA
acattaagaacttctctatccgggtcagaatcagatggaggcactcagtaggtagtatagttcaccagaacatttccatatgcccctgctgacagaacatcaatggaatcttgatgtatcc

SEQ ID NO: 4697 - DNA, 121 bp, synthetic construct
  misc_feature 1..121: note = Description of artificial sequence: synthetic polynucleotide sequence
  source 1..121: mol_type = other DNA
ttgttatttatttttaagagccagtgtcaacaaattgcatggtaaacctagctatggcttatctgagaatcatccaccatgtttatgcaggaagtaataaacatagtaataatagcggtca

SEQ ID NO: 4698 - DNA, 121 bp, synthetic construct
  misc_feature 1..121: note = Description of artificial sequence: synthetic polynucleotide sequence
  source 1..121: mol_type = other DNA
ataacaaagacactgagaggctaagtatcttgcccaaggttacacagttggtaagatacgggatgtaaacacagccagtctgtttccagagtctgcattccatagagtgtggtataatgta

SEQ ID NO: 4699 - DNA, 121 bp, synthetic construct
  misc_feature 1..121: note = Description of artificial sequence: synthetic polynucleotide sequence
  source 1..121: mol_type = other DNA
ttgccttccagtcactctggaggatgacagaggccagtcactcacacttgggctattcagtggccttcctctcacatcatctcctggtttctgggcttcaccaccaggatccccttagagt

SEQ ID NO: 4700 - DNA, 121 bp, synthetic construct
  misc_feature 1..121: note = Description of artificial sequence: synthetic polynucleotide sequence
  source 1..121: mol_type = other DNA
ctcccatgggtaggtaagatcaaatcctggtaagaaatccctagtgctgattcctgttacggctgcttcctggaaggcagtgtcacgtggaacctctaaattgcagcattcagagctccag

SEQ ID NO: 4701 - DNA, 121 bp, synthetic construct
  misc_feature 1..121: note = Description of artificial sequence: synthetic polynucleotide sequence
  source 1..121: mol_type = other DNA
cactaactactcacttaaactggaagcaaaatgtccctaaaattgccaaggaactgggatttcaacctgaaagtggaggctgcgaaaataggtatggttggtgtcttttcgttgcctctgt

SEQ ID NO: 4702 - DNA, 241 bp, synthetic construct
  misc_feature 1..241: note = Description of artificial sequence: synthetic polynucleotide sequence
  source 1..241: mol_type = other DNA
catgtccctcggtcagtcggcctgtctgttcctctctatagctcggtcaaggagtgtgatgactggcgagcagatggctgccttccatccatcgtccacccccaacccgctggagaggcccatcaagatgggctggctgaagaagcagaggtccatcgtgaagaactggcagcagaggtactttgtgctgagggcgcagcagctctactactacaaggatgaagaggacacgaagccccag

SEQ ID NO: 4703 - DNA, 121 bp, synthetic construct
  misc_feature 1..121: note = Description of artificial sequence: synthetic polynucleotide sequence
  source 1..121: mol_type = other DNA
gacttttcatctttcagggctgcatgtatctaccaggatgtacaatcaaggagatcgccacaaacccagaagaagctgggaagtttgtctttgaaatcattccaggtaggccaccacaggt

SEQ ID NO: 4704 - DNA, 121 bp, synthetic construct
  misc_feature 1..121: note = Description of artificial sequence: synthetic polynucleotide sequence
  source 1..121: mol_type = other DNA
agcctcatgggaccagaatcgcatgggacaggactcctatgtcctcatggccagctctcaggcggagatggaggagtgggttaaattcctcaggagagttgctggcacaccctgtggaggt

SEQ ID NO: 4705 - DNA, 209 bp, synthetic construct
  misc_feature 1..209: note = Description of artificial sequence: synthetic polynucleotide sequence
  source 1..209: mol_type = other DNA
gcagtgtttggccagcgcttggatgagactgtggcctatgaacagaaattcggcccccatctggtgcccatcctggtggagaaatgtgcagagttcatcctggagcacggccggaatgaagagggcatcttccgtctgcctgggcaggacaacctggtgaagcagctgagagacgcttttgatgctggggagcggccctcctttgacag

SEQ ID NO: 4706 - DNA, 134 bp, synthetic construct
  misc_feature 1..134: note = Description of artificial sequence: synthetic polynucleotide sequence
  source 1..134: mol_type = other DNA
gagacacagatgtgcacactgtggcttccctgttaaagctctacctccgagacctcccagagcccgtggttccctggagccagtacgaagggttcctgctctgtgggcagctcacgaatgcggatgaggcaaag

SEQ ID NO: 4707 - DNA, 121 bp, synthetic construct
  misc_feature 1..121: note = Description of artificial sequence: synthetic polynucleotide sequence
  source 1..121: mol_type = other DNA
ttacttgtgtaaatctcttcccaggctcagcaggagttgatgaagcagctctccatccttcctcgtgacaactatagtctcctgagctacatctgcaggtgagaggcccctggtatcaact

SEQ ID NO: 4708 - DNA, 121 bp, synthetic construct
  misc_feature 1..121: note = Description of artificial sequence: synthetic polynucleotide sequence
  source 1..121: mol_type = other DNA
gttcctacatgaaatacagctgaactgtgctgttaacaagatgagtgtggacaacctggctactgtgattggtgtgaatctcatcaggtcgaaggtcgaagaccctgccgtgatcatgaga

SEQ ID NO: 4709 - DNA, 198 bp, synthetic construct
  misc_feature 1..198: note = Description of artificial sequence: synthetic polynucleotide sequence
  source 1..198: mol_type = other DNA
gggactcctcagatccaaagagtgatgactatgatgatcagagaccatgaagtcctcttccccaagtccaaggatatacccctgtcaccccctgcccagaaaaatgaccccaagaaagctccagtggcccgaagctctgtaggctgggatgccactgaagacctccgaatttctaggacagacagcttcagtagcatg

SEQ ID NO: 4710 - DNA, 206 bp, synthetic construct
  misc_feature 1..206: note = Description of artificial sequence: synthetic polynucleotide sequence
  source 1..206: mol_type = other DNA
gacaagcgactctgatacaaccagccccaccggacagcagccgagcgatgcgtttccggaggacagcagcaaagtacccagggaaaagccaggagactggaaaatgcaatctcgtaaaaggactcaaacactccctaaccggaaatgtttcttgacatcagcttttcagggtgccaacagcagcaaaatggagatctttaaaaatg

SEQ ID NO: 4711 - DNA, 328 bp, synthetic construct
  misc_feature 1..328: note = Description of artificial sequence: synthetic polynucleotide sequence
  source 1..328: mol_type = other DNA
aattctggtcgccttcctcagaggctaaggcaggggaagggcacaggagaacgatgtctcaagacttgcgccaactttctgactcccaacggacttccacctacgataacgtcccttccctgccagggtcccctggggaggaagccagtgcactctcttcccaagcctgtgactccaagggagatactcttgccagtccaaactctgaaactgggcctggaaaaaagaactctggagaagaggaaattgattctttgcagaggatggtccaagagctacgaaaggaaatagaaacacagaagcaaatgtatgaggaacagattaaaaa

SEQ ID NO: 4712 - DNA, 209 bp, synthetic construct
  misc_feature 1..209: note = Description of artificial sequence: synthetic polynucleotide sequence
  source 1..209: mol_type = other DNA
gccttgagaaggaaaattatgacgtttgggctaaagtggtgaggctcaatgaagaactggagaaggaaaagaagaagtctgcagccctagagatcagcctccgcaacatggagcgctcccgggaggatgttgagaagaggaacaaggccttggaagaagaagtcaaggaatttgtcaaatccatgaaggaacccaagaccgaggcttaa

SEQ ID NO: 4713 - DNA, 121 bp, synthetic construct
  misc_feature 1..121: note = Description of artificial sequence: synthetic polynucleotide sequence
  source 1..121: mol_type = other DNA
actttgccttaaatagtagttaacctacctgtatttgaaaatctcttcaaagaccacttatgtactctggaattcagaaaggtgcaaaatccctactttttaaccctcgtattatttgtat

SEQ ID NO: 4714 - DNA, 121 bp, synthetic construct
  misc_feature 1..121: note = Description of artificial sequence: synthetic polynucleotide sequence
  source 1..121: mol_type = other DNA
gcattgctacggctcaccattaagattttaacaccatgagagggttcctggtgtcactgcatgtcagtatcaccgtgaggaaattcttgcagcctttagaccccagtgaaggcaaaaggag

SEQ ID NO: 4715 - DNA, 121 bp, synthetic construct
  misc_feature 1..121: note = Description of artificial sequence: synthetic polynucleotide sequence
  source 1..121: mol_type = other DNA
ctttgtgttggacttcagtttggaaaagtggatcaccatgtattcataagtaatagaaacaaggtaacaagttccctcataatttagctattcattctgtaaagaatgtataataaccctg

SEQ ID NO: 4716 - DNA, 121 bp, synthetic construct
  misc_feature 1..121: note = Description of artificial sequence: synthetic polynucleotide sequence
  source 1..121: mol_type = other DNA
ccattgttggtgccctgattccaatttacccttcggttgctggtctcattagaaagtcacaagtgtgttaaggcttccactctcaagacacaactatcaactttttaagtataaacacact

SEQ ID NO: 4717 - DNA, 121 bp, synthetic construct
  misc_feature 1..121: note = Description of artificial sequence: synthetic polynucleotide sequence
  source 1..121: mol_type = other DNA
aaactagcaccctatacctggttgtcttcaaccaatcatgccaattttctcccctgcaggcttcctcagcaccttcaagcccccagcctacgaggatgtggttcaccgcccaggcacacca

SEQ ID NO: 4718 - DNA, 121 bp, synthetic construct
  misc_feature 1..121: note = Description of artificial sequence: synthetic polynucleotide sequence
  source 1..121: mol_type = other DNA
cttatactgtggccccaggccgccccttgactgcttccagtgaacaaacctgctgttcctcctcatccagctgccctgcccactttgaaggaacaaatgtggaaggtgtttcctcccacca

SEQ ID NO: 4719 - DNA, 121 bp, synthetic construct
  misc_feature 1..121: note = Description of artificial sequence: synthetic polynucleotide sequence
  source 1..121: mol_type = other DNA
gtttccattaaaatggaaattaaagcctcatcatatgaagcagtcattttctgggtactgtatgattatctctatctttcctggccacaatgagaatggaaatactcacattcatccatta

SEQ ID NO: 4720 - DNA, 121 bp, synthetic construct
  misc_feature 1..121: note = Description of artificial sequence: synthetic polynucleotide sequence
  source 1..121: mol_type = other DNA
tgcctggggataggaaagaggtagtgtaggtgattccagaccgtctctccgatcctctgcgatgccttctacagcaatatgaagttaaaaacaggtcctgtgattgctcattggatttttg

SEQ ID NO: 4721 - DNA, 121 bp, synthetic construct
  misc_feature 1..121: note = Description of artificial sequence: synthetic polynucleotide sequence
  source 1..121: mol_type = other DNA
caaaaacatttctctaaactgacaaattcatttcccctgccaatgccctggtttaaccatatattcatgccaagactgaattaatacttttctaatacctgtctctttcttaaatatccta

SEQ ID NO: 4722 - DNA, 121 bp, synthetic construct
  misc_feature 1..121: note = Description of artificial sequence: synthetic polynucleotide sequence
  source 1..121: mol_type = other DNA
tctaaccttataatctagattttaaacttgctgtggagagatactcaccctcttgtttacattcttggcaggcaatgtgaataacagcctttctgctaacttcagactggaaagaaaagga

SEQ ID NO: 4723 - DNA, 121 bp, synthetic construct
  misc_feature 1..121: note = Description of artificial sequence: synthetic polynucleotide sequence
  source 1..121: mol_type = other DNA
agaatcctcctcacacaaagcaaggcccggcatagggagctgaatcaatacatatcactcaatgaaagttctagaccttcaaatataaaaggtaaataagaaattagggggcagaggtgca

SEQ ID NO: 4724 - DNA, 121 bp, synthetic construct
  misc_feature 1..121: note = Description of artificial sequence: synthetic polynucleotide sequence
  source 1..121: mol_type = other DNA
atactccctttctaaaggtgctcaactgtgtttactgtaatgcgatcttagagagccaatggatgttgtgcagggatatgttggctggtgctgacccaggcacaggtggtgggagaatctc

SEQ ID NO: 4725 - DNA, 121 bp, synthetic construct
  misc_feature 1..121: note = Description of artificial sequence: synthetic polynucleotide sequence
  source 1..121: mol_type = other DNA
agtagttaccaagggttaagagatagatgtgtgtggctataaaaaggcaacaagagggattgttgccataatgggagtccagtattttgtatcttaagtgtatcaatgactgtatctcatc

SEQ ID NO: 4726 - DNA, 121 bp, synthetic construct
  misc_feature 1..121: note = Description of artificial sequence: synthetic polynucleotide sequence
  source 1..121: mol_type = other DNA
ttatttctcctacctttgaatctggacttggccatgtaccttgctttggtcagtggaacgttgttgatagtgcagagtagcgctgagttcatttggctgaggccattctcagtttcgacac

SEQ ID NO: 4727 - DNA, 121 bp, synthetic construct
  misc_feature 1..121: note = Description of artificial sequence: synthetic polynucleotide sequence
  source 1..121: mol_type = other DNA
gttccaaggtggagcatgtgactacgccagtcagcacattccattaccctttggtcagagtgattggatcagtgtggcatgtggcccagtcctgtccaatcagagtaggtggtgtcaggct

SEQ ID NO: 4728 - DNA, 121 bp, synthetic construct
  misc_feature 1..121: note = Description of artificial sequence: synthetic polynucleotide sequence
  source 1..121: mol_type = other DNA
gagctaccaattaggatagtaaaggcaacagtagtcccgaaagctgcagtaagaatccataggaaagtgggtagaggaagtaggccagatagttttatgagggcgggatggaaatcactag

SEQ ID NO: 4729 - DNA, 121 bp, synthetic construct
  misc_feature 1..121: note = Description of artificial sequence: synthetic polynucleotide sequence
  source 1..121: mol_type = other DNA
ctccttccttgggctcccaaagtgctgggattataggtgtgagccaccatgcctgggccgtcggcagaattccctgtaaacctgctttcctcctttgttcctgatctctatggagggtctc

SEQ ID NO: 4730 - DNA, 474 bp, synthetic construct
  misc_feature 1..474: note = Description of artificial sequence: synthetic polynucleotide sequence
  source 1..474: mol_type = other DNA
ttaaaatcttgatgttttgagtttcttcctagcttccccctattccttaataaagttctaaattgttttgttggagctctttgcagccattctgagggctttgcatgcttttctgaccttgcagtaaactcaatgctttaggcaaagaatggccacgtcatccgaccccctcagagtttagaattcagaacaggtctgaagaagaccaggcagcggctgagtcaaggaaagcctccgtccgcttttatttcccctgtgcctcttccaggactgtgctgggataacaggctcccgggggttactttggctgggctgggctaaaacctccctgcagagcaggccctgagccctgcctctgcgcctgggtggtgtcagcccctccaccttctgactgttccagcaactctctaagccctcccaaaggcctcaaggcctgtaaccatatgcagcaattttcagccataccaggagagg

SEQ ID NO: 4731 - DNA, 474 bp, synthetic construct
  misc_feature 1..474: note = Description of artificial sequence: synthetic polynucleotide sequence
  source 1..474: mol_type = other DNA
tcaactgtaatcttggccacctgcctaagaggaagtggctagcttcacttctgaccctcagcaactgccaggtggcctcttggaaatccccctctgggggattccacccgttgggtgggagagcagtagttaaaatgtaaaataagaatcttttgctgggagaagtcaacagatagggagaagtcagctgataacagaaatagttttttttttttttaaaactaacttcactgttaaccaagcagttcaacatgaaagactgaatctcttatgtttaatattttcttctcttttaatcttcataactaatttttttcagataattgtataaaataaccatggtagcaaaataatgtgatcactggaaaataagcagggaaaaacatgctatgaagatactcctatctgggtgaattcttgatagctttacatttttcatctggcatttaaacattaaacagttaatgtatttga

SEQ ID NO: 4732 - DNA, 474 bp, synthetic construct
  misc_feature 1..474: note = Description of artificial sequence: synthetic polynucleotide sequence
  source 1..474: mol_type = other DNA
catgaaaattatttcaagttatcttattagttttaatagagtttaaaaagtgtttaaaagagttttcaaaaggctctaaaatcattttgaaatagtttaaaacagttttgaatcgttgtaagttagttttaatagagctttaaaaaggccctaaaatagtcctatcaagttgttgcagaccaaaataatctccttaaatatcacttttgagatcagctggggtaaacgacagcaacacaatgacaaatcattaaactattttagagattatgaaattaaaatactcagattaaaattttcctatcacagaattaaggtactggaaaatatgtttaagtttttattaatcacattgctataggtttagatattttgtacaactgaaataaaatcacacactggcagctacatttttgaaagttaaaaacatggtcacgaatatatcttattttaaaatcagttaatataccttaa

SEQ ID NO: 4733 - DNA, 476 bp, synthetic construct
  misc_feature 1..476: note = Description of artificial sequence: synthetic polynucleotide sequence
  source 1..476: mol_type = other DNA
tggtatttaatgccaaattcaaagtgaattgatcaagccctcagtggccaggtcatgggtgtgatttttactctgaaagaattacatatttctttctttttggttgagcttttgttatttaaatacatttgatgagaggatattgaaataattaaatagcactgaaaaaaaaaaagctttaaattatttacaatcccctaatggaaattttcactaatgagatatcataatgaatgtgaattttatttctgaaatctctaataaatcagtcttctccctggttttcccagctcagcgcccattacgtttctgttctctttcccttagtggcattatttgtatcactgtgcatcaggaaagctggctacggcagcatcaatcgggcagacacagggtggccacggccactagcggcaaggcggctgccccaagagcgcggtggcatggccaccaaagccactcaatcgagaaagacc

SEQ ID NO: 4734 - DNA, 474 bp, synthetic construct
  misc_feature 1..474: note = Description of artificial sequence: synthetic polynucleotide sequence
  source 1..474: mol_type = other DNA
gcggctctgtctacagctcgcggtgccacggccttcttggcagaataaaaatgtagacaagtaataacagaggataatgaaagaacatactctttaaaatatttcctatttttttcacagacccacggtcattaaaaaatgcaattatttactttttttcatttaaacacatttctttgagattgagcttttgggaataaccacctttccaccattacaataagagataatttcacgtttagtctaatgtacaaattggatttttaaaaaatgagctctatctgtgaagcccttattcctatagaatgtgtctttttgagtttattacttattacagactctaaaaacaacattgctgctgattttcaagtaagctgcctcttctacatagcaaataggtacacttcacttttccctgatttttcttagggcgtgctattgatttttattgttgtctgacaaaataatttatca

SEQ ID NO: 4735 - DNA, 475 bp, synthetic construct
  misc_feature 1..475: note = Description of artificial sequence: synthetic polynucleotide sequence
  source 1..475: mol_type = other DNA
aacaaaagggagaaagactaaaaaatgtatttttccacttttctgtatcatgcataatcagcaacaaccaatacaatatttggcaagagtgaacaaaaataaatttacttttgctccttagaaatacaagggttcctttttagttacactttttttttttactttgtgtcattcagtttagagcaatttaatctttttttctccaaatccatttttgaagctgagtttaacttttgcaacccatggcaaatcttaaatgccctcatttaccaatctttaccaaactcctatttaagcctctaaaagtcaatactggccatcagacccaaatttcagaagacaatagtgaaaaattacttacgtttaatctccagtcgtgtcccttggccgaaggtgatccacagtgttaacttaattactttccccttaacaaaaatctcttttcgctgttaatatcactaacctgaccgatgca

SEQ ID NO: 4736 - DNA, 476 bp, synthetic construct
  misc_feature 1..476: note = Description of artificial sequence: synthetic polynucleotide sequence
  source 1..476: mol_type = other DNA
gagaaaatcttgcaattgagatgcctcacttaactggctagcgcttggctgttccttaagatgaactaattttctatcccttactcatctgactttttgaaagaatctggtactctttggaattgacctgagctaatatctcaaacacaaaaacgctccaaatttaaaaccttataagaaaaagcattaggaaagtgcacttacgtttgatctccaccttggtccctccgccgaaagtgagccacagtgagggatctcaccctttcccctcaacaaaaacctctcttgaagccaatcatatgagataggctgcttgttcagagaaaaatctagctatttcttccccatttcccccatgaatcctattctcctctcaaacccaatgattcgtctatttgctcagctttttaagttcattttctggtgtcctgctatttacttctgggtcaccaggtttattcaaccaaaatatcaca

SEQ ID NO: 4737 - DNA, 474 bp, synthetic construct
  misc_feature 1..474: note = Description of artificial sequence: synthetic polynucleotide sequence
  source 1..474: mol_type = other DNA
aaacttgcacaaatgatacaatggcactaaaatctcacgaataattgagacagatgtacttacgtttgatatccactttggtcccagggccgaaagtgaatcacagtgattcgtcttaacttttccctttacaaaaacctccctgaaagctcagcaagcctctttcccccaatgaagttattttgatttagaaatcttaaaaattagccacaagctagcgtcctgtggaacaatttcccctcctctgtacctaacctgggaatgaagtttgttagatccctggcatccgactaatgaaaatccacacaaaggaacacaaagtaaactaattagcaacagtgaagaatcagtggaaaaaagtacttacgtttgatctccagcttggtcccctggccaaaagtgtacacacaatggttcctcttaacttccctcctatacaaaaactccctttctgacaattgaccaaggctctgt

SEQ ID NO: 4738 - DNA, 476 bp, synthetic construct
  misc_feature 1..476: note = Description of artificial sequence: synthetic polynucleotide sequence
  source 1..476: mol_type = other DNA
ccagaacatgttatgttccccaggacatttctgaagctattacttagacaagttattctcacccaatgactgaatcttgcttgctcttcaaagaaaatgtgcaatcaattctcgagtttgactacagacttatctttatcttttccctgaaggatatcagaggctgattgcagagtcaccttatagatcacttcatagacacagggaacagaagacacagacaactgaggaagcaaagtttaaattctactcacgtttgatttccaccttggtcccttggccgaacgtccaccacagtgagagctctccattgtcttgctgaacaaaaacccttctcaccaaaggggaacagagtcctgggtcagctgctgaagctcaactcccttttcgagcaggtgtggaaaccctgaggcttctctgacatagcatgtgtttattttcttaggtgagacctaaaatccaagaagagaatatat

SEQ ID NO: 4739 - DNA, 240 bp, synthetic construct
  misc_feature 1..240: note = Description of artificial sequence: synthetic polynucleotide sequence
  source 1..240: mol_type = other DNA
tcttactattttatcttctcctttgctgcaatgttatttaaaaaaaggtagactaaatatatatcaacttaaggctcataactttgaaatgcattttgaaatgtagctccagatggtatacgaaaccaaagtgaagactaatagagtagaaaagtagactttacttggttggtttgtctgttttcacagcacaggaagagctcagctcttactgagctggaccaggcgcatgccatcttt

SEQ ID NO: 4740 - DNA, 360 bp, synthetic construct
  misc_feature 1..360: note = Description of artificial sequence: synthetic polynucleotide sequence
  source 1..360: mol_type = other DNA
ggagctgccatggagtcccagtgttccatagtgtttccatagtaatctcatcaacaacactgaagaccttttcagtattttcttttgagtccagctccatttttgcagccttgtatctctcttaaccttccatctccaccccttccatacattactcccacctccctacactccttagagtttttctatggcctccagctttcacaagcactccctctgcttgggaacatctttgtccacctgggttagcttgtgaactgctaattgtctttcaaaattcaactgaagagagaccttctctcagattagccctgagcaggtgacctgaatttacagagtacagagacaggtcactgggcc

SEQ ID NO: 4741 - DNA, 241 bp, synthetic construct
  misc_feature 1..241: note = Description of artificial sequence: synthetic polynucleotide sequence
  source 1..241: mol_type = other DNA
ctcttctacccttctaaattataagctgtttgatgttttatttgccctgtatttgggaggctccgtccagtatctttacttagcaaatgcttaacaaacattttcagaataaataaaaaaaaatacctaattgaaagtcaataatagatcagagatgctatcatagaccaaagactaatactgactgccacaacagtaacttttacaacagaaatcataactacaattctaaagattaggg

SEQ ID NO: 4742 - DNA, 239 bp, synthetic construct
  misc_feature 1..239: note = Description of artificial sequence: synthetic polynucleotide sequence
  source 1..239: mol_type = other DNA
gtaggtttatttgattctgtcactggcagctttgctagttgccttgaatagcagaattagcatttggtctcaccagaagatgaggaaggagagggatcaagttagaggtggagagttaacattggcaagtgaaatttaatgtgcaaaatagctgaccaagggcatagtccttttttaaaggggacacaaagtgattttctctgcagacatacacgcaataccaatcataaagggtgaca

SEQ ID NO: 4743 - DNA, 240 bp, synthetic construct
  misc_feature 1..240: note = Description of artificial sequence: synthetic polynucleotide sequence
  source 1..240: mol_type = other DNA
tttattgagcacttactaagtgccagacattgtacatggatcatcacatttaattattcccaagactctatgaactaggaactaatattatcccctactttgtaggtgcaaaaacttgagggcagagaggtcaaggaactggcttatggcagtaagtggcagagctgtgacctaaactcagatcccatgtttttaactgaactatatgcagattatactccaggagtaaagtcactcaac

SEQ ID NO: 4744 - DNA, 239 bp, synthetic construct
  misc_feature 1..239: note = Description of artificial sequence: synthetic polynucleotide sequence
  source 1..239: mol_type = other DNA
ggaagcaacaagcgtgacagggaatgctgggatgggggaaggtaaaaggaactccttagactgggataagtgtgtacagacgtatgtataagactacacatggaaatattgtttaaagagtgaaaaataactaaaatcctcattaataggagtttggttaaactgtgctagagctttacaatgtagcacaaagcagacattaaggggaagacgtagacttctatatagttacgtggaag

SEQ ID NO: 4745 - DNA, 241 bp, synthetic construct
  misc_feature 1..241: note = Description of artificial sequence: synthetic polynucleotide sequence
  source 1..241: mol_type = other DNA
gtgtttgtgaaaatgcaggtcactgaagagtatgtgtggtgagatatcatgatcccatctacattgaatatatatgtatataaatacgggctgaattttaaaagacataaattgtgcttggtagttatctcctgggattgcagaggaggaacaatgacactttatgccatctcctcctactcttctgtatggtgatgtgaatatattcattttatagtttttagaaataataaaactgtac

SEQ ID NO: 4746 - DNA, 239 bp, synthetic construct
  misc_feature 1..239: note = Description of artificial sequence: synthetic polynucleotide sequence
  source 1..239: mol_type = other DNA
taattttgaaaaacagtaaactctgacattgcctattagcattctcgatattcctgtgcaatgcataaacataactttttaaaagatatgtacacacatgtgtgagttttctttgtcaaatacttttctataatctttaaatcaagcatgccaaaaaggtaaaagctttcctgtttcagtgtaggagatagtcgtctgcaaaggaaagagatgtaggggatagaaacaggaatgaaaaa

SEQ ID NO: 4747 - DNA, 241 bp, synthetic construct
  misc_feature 1..241: note = Description of artificial sequence: synthetic polynucleotide sequence
  source 1..241: mol_type = other DNA
gatgactgagctgttcgagggacttatgttcctaagtgagctaattggaaatctaatatgaacagtgcaaccgaataactattgtaaagcagtatttgtaaacaataaaagatgattatcataagtaccattgttgcaaaaactattttattgatcacatgcagtggtgatctgtaggaatgattgttgtgatgtttgctgtaacataaaatgaaacatgggaagtggctgagatctttag

SEQ ID NO: 4748 - DNA, 240 bp, synthetic construct
  misc_feature 1..240: note = Description of artificial sequence: synthetic polynucleotide sequence
  source 1..240: mol_type = other DNA
gatgtgtgtggttcattttttgaaagcaaatgttgtctcagaagcatctgtgagactctgccaggatccaccgttctacaaaatatctgtgatggacattgataagattgatctgttgaggaaaggcaaggtgtcagtaagatagtctgagagcttcttggatttcatgtaaaagagtgctggaaatagaatttcttggggaacattccaactaactcatcactgaaggtgctttacatt

SEQ ID NO: 4749 - DNA, 240 bp, synthetic construct
  misc_feature 1..240: note = Description of artificial sequence: synthetic polynucleotide sequence
  source 1..240: mol_type = other DNA
gaaccctcagcaaagttagattatcagaaaaaaaatataaactgctgtggaggggacaggaaggaaagtcagggagggaggggggcaaggagagaaagagcgagagagaggagagaaagagagagagagaggagagagagagcacaagtacacacttcaatgcacatctataaatcatcctgaaaactactgataaattattttagcaatgttcctcagatgtaacatttcaagaaatat

SEQ ID NO: 4750 - DNA, 239 bp, synthetic construct
  misc_feature 1..239: note = Description of artificial sequence: synthetic polynucleotide sequence
  source 1..239: mol_type = other DNA
catttttgctttttatttggcataatttactagccaatttaggaagttcccctcacatcagtaacatacagtacatcacccagtatgtcagaggacacaatggcataagtttgccttttgcaaggtttgagggatggccatttccctacctgactcaggaaagtctgtagctgatatccatcttcaagtttgtggttctttctctctatatatatatttgagctcagcagtcatgctgg

SEQ ID NO: 4751 - DNA, 479 bp, synthetic construct
  misc_feature 1..479: note = Description of artificial sequence: synthetic polynucleotide sequence
  source 1..479: mol_type = other DNA
agtccagagtaggtgattctttctgctttagcttgactcctccttaagattgtaactctctcagttttacattttttgtcagacgtaagctgacattccacaaggagaggaggaaattctgtggttcacatccagtggtgcttggaacctgattggttgtcattcttccagctagtttgtcacgagtggatatctgtcctggattcccaaggatcaaggctgccccattagccaggaagtagggagatagaggaggtcacttgagaaagagctgcttctttgccgcctccaggttgtgtctgtttcctctcatatctgaagacagatgtgctggcagaagcaaagtcctttgtccggccacgtgcaaatgcatgggacataaatatgaacagagattcttgtcccactctagaaaatgtagatgttcatcttgtttccaaggggacagtaaggctgcaggtgttttttgacttccttga

SEQ ID NO: 4752 - DNA, 216 bp, synthetic construct
  misc_feature 1..216: note = Description of artificial sequence: synthetic polynucleotide sequence
  source 1..216: mol_type = other DNA
ctcagtgacacagcacctgggtctcaaactgcagcagctgccccatgaaactgaagttgggggagatgaccccccggcgctgcttaacgaagtcaaaggcctcgtccagccgcacacggcgactctgcatgaggtatgccagacagatggtggcagagcgcgagatacccgcctggcagtgcaccagcacccggcctccgctgttcttcacccagt

SEQ ID NO: 4753 - DNA, 221 bp, synthetic construct
  misc_feature 1..221: note = Description of artificial sequence: synthetic polynucleotide sequence
  source 1..221: mol_type = other DNA
ccaatgaagcctatggcctcctggaaccaggcactgatctccaccatctggttgtcctccacagggatactcttgtagcggaaaaggccctcaaagtggttggggcagctggcggacacgttgaggacggctgtgatgccacaggcctgcagcccctgcaggtctgacgagtgactgcagctgcccaggaacaggtagggcaagatctccacagggccacc

SEQ ID NO: 4754 - DNA, 121 bp, synthetic construct
  misc_feature 1..121: note = Description of artificial sequence: synthetic polynucleotide sequence
  source 1..121: mol_type = other DNA
ctggtcgtagacaggagccctggagtcggagcggctggttttgtcccctgttggcggcagcgcaggggcgggggcctcagagcacagatcgggacagcagccctggaagccgtcgaagcct

SEQ ID NO: 4755 - DNA, 389 bp, synthetic construct
  misc_feature 1..389: note = Description of artificial sequence: synthetic polynucleotide sequence
  source 1..389: mol_type = other DNA
cctcgcaggaagtacacggcagtgggccccgcgcgggtctcgtgcagcagcgcggccagcagcacatgagccgggctgtcgggccggagctccgccaccgaggcactgccctcgtccagcaccacggcccgcgccagctccccgcggaccaggcgcgtccgcagcgcgcggtcgggcagcaggcaggcgagaacggcggcaggagggccgcgcgcgcggcgccgcagcagcgcgttccaaggcactggccgcgcggcgcgcacgtggcgccggcagaaggccaggaaggggcggcagtccagcagcagcgtgcgttccgcctcccgcggatcccgcagcagcgtgcccagcgccgcgcactccagctcgcgcgccgcctccagccccat

SEQ ID NO: 4756 - DNA, 121 bp, synthetic construct
  misc_feature 1..121: note = Description of artificial sequence: synthetic polynucleotide sequence
  source 1..121: mol_type = other DNA
acacagtcctggcccatcgggctctctggaggcccttcttccttggctgtcacctatttctaaactgatatgtaatagttgtacatatttatggactatatgtaatattttgatacatgca

SEQ ID NO: 4757 - DNA, 121 bp, synthetic construct
  misc_feature 1..121: note = Description of artificial sequence: synthetic polynucleotide sequence
  source 1..121: mol_type = other DNA
ccttaattggcacatgagaccaaatcacagcttatttccaaactaaatgactggatttcgtcacagaaactcaaaagacttgggatgacagagaaaaagcccttagaggttatctcttcct

SEQ ID NO: 4758 - DNA, 121 bp, synthetic construct
  misc_feature 1..121: note = Description of artificial sequence: synthetic polynucleotide sequence
  source 1..121: mol_type = other DNA
ttaaaaacaaatgaataaggtcctttaagcaagaaataaccacgtaagtcaacaatcgatagtgagaaaacaaactaatgagcttccaatagtctcttctcttgggctctgttctttgtgc

SEQ ID NO: 4759 - DNA, 121 bp, synthetic construct
  misc_feature 1..121: note = Description of artificial sequence: synthetic polynucleotide sequence
  source 1..121: mol_type = other DNA
tgagttctaaatgacctgcactgtatgtaccaaagagaaaactttgatggaaaagcagtctaaatgttaaattcactcagtttacttgccttatgttaaatcctttattttctgtattttc

SEQ ID NO: 4760 - DNA, 121 bp, synthetic construct
  misc_feature 1..121: note = Description of artificial sequence: synthetic polynucleotide sequence
  source 1..121: mol_type = other DNA
tgtcacaggctcacagactgcagttttagcgataatccaacccaaagcagaaactaaactggagcactggccatatggttgtgatcaggtgggctgcagaggaaggaatcattacttgctg

SEQ ID NO: 4761 - DNA, 121 bp, synthetic construct
  misc_feature 1..121: note = Description of artificial sequence: synthetic polynucleotide sequence
  source 1..121: mol_type = other DNA
aaggaagggtcagcaagggacaggcagcagggctgtgtgatctccgcgcagctggtggacggtgtgtttcccagaaaggctggtcagcagtgtctgctgtagtggacatgcaggtaacaag

SEQ ID NO: 4762 - DNA, 121 bp, synthetic construct
  misc_feature 1..121: note = Description of artificial sequence: synthetic polynucleotide sequence
  source 1..121: mol_type = other DNA
cttaatctctcaatgataaggatgtgcttagcatacatctatatcaagaagaaggagagaataaacatatactaggctcatttctgagcatcttagccccttaacaatgctataaggtaga

SEQ ID NO: 4763 - DNA, 121 bp, synthetic construct
  misc_feature 1..121: note = Description of artificial sequence: synthetic polynucleotide sequence
  source 1..121: mol_type = other DNA
cccccaatctcatccctcttcaggccgaagctctcggcgaggtggcgccacgttttcacaacagccttctcagagttgtacgtggagctgagcattcggctagtcttctcgaggcaatcaa

SEQ ID NO: 4764 - DNA, 121 bp, synthetic construct
  misc_feature 1..121: note = Description of artificial sequence: synthetic polynucleotide sequence
  source 1..121: mol_type = other DNA
atctgaaactctgtggccaacgtaaaagggctacgtaagcaaaaatgatcacgcactacacactgttaaactgttcatagcaactatgagaaaagaattcaatttgctttcaagagccctt

SEQ ID NO: 4765 - DNA, 121 bp, synthetic construct
  misc_feature 1..121: note = Description of artificial sequence: synthetic polynucleotide sequence
  source 1..121: mol_type = other DNA
aagctgctggtgggggcctacgacgccgatgtggacatcagggactacagtgggaaaaaggcctcccagtacctgagtcggagcatcgccgaggagatcaagaacctggtgggagccctgg

SEQ ID NO: 4766 - DNA, 121 bp, synthetic construct
  misc_feature 1..121: note = Description of artificial sequence: synthetic polynucleotide sequence
  source 1..121: mol_type = other DNA
cttctaaggcacagttggaaggaaggggaagatgcctgccttaaggtcaggcctaagaggagccctaatttcttctcccagccccacccattcactttcagtccacagagagttggcccta

SEQ ID NO: 4767 - DNA, 121 bp, synthetic construct
  misc_feature 1..121: note = Description of artificial sequence: synthetic polynucleotide sequence
  source 1..121: mol_type = other DNA
cgaaattgattccctgaaaaaatcattttttcttcattttcttacaaagaaagaaactccaaatcaaaaatccataatgttatgctatgaactagagtacaggcacttccaaaatgccacg

SEQ ID NO: 4768 - DNA, 121 bp, synthetic construct
  misc_feature 1..121: note = Description of artificial sequence: synthetic polynucleotide sequence
  source 1..121: mol_type = other DNA
ctctcagttcctgctgggagcctacacttggccccatacgtgctggattaacctttcatattaaacaaacaaacaacaaaaacaaaaccatgaagtccagaatactactaatcaggcatta

SEQ ID NO: 4769 - DNA, 121 bp, synthetic construct
  misc_feature 1..121: note = Description of artificial sequence: synthetic polynucleotide sequence
  source 1..121: mol_type = other DNA
caatggcaggcgaggggtgtgcaaagggtgttctgccacccccgggcagtgactccatgtgggaaacaaagcgtgcgctcaaacaagcaggcagcagtgaagttctgaaacactcttaccc

SEQ ID NO: 4770 - DNA, 121 bp, synthetic construct
  misc_feature 1..121: note = Description of artificial sequence: synthetic polynucleotide sequence
  source 1..121: mol_type = other DNA
aacgcgagagggatccagaccgaagccacctttgacctctctgcccaggtgaggaatccatccttctcctgccgtgcaggggagctggaaacctggacagaaacagatctccttctttctg

SEQ ID NO: 4771 - DNA, 121 bp, synthetic construct
  misc_feature 1..121: note = Description of artificial sequence: synthetic polynucleotide sequence
  source 1..121: mol_type = other DNA
gcatactcttgatattacttaatttgtttttctctctttttaattacagcttgggttgacgatagccattcgctatagccacaggtaaatgtttacatttttgtttcttttaagaattatc

SEQ ID NO: 4772 - DNA, 121 bp, synthetic construct
  misc_feature 1..121: note = Description of artificial sequence: synthetic polynucleotide sequence
  source 1..121: mol_type = other DNA
acaaacctactctatttctttcaaatgaaattcttggtgaggccaaaataataatgatggtcaccgtgattttctttcagtttcctggcatttaacatggacacagttgatgatctcgcct

SEQ ID NO: 4773 - DNA, 121 bp, synthetic construct
  misc_feature 1..121: note = Description of artificial sequence: synthetic polynucleotide sequence
  source 1..121: mol_type = other DNA
caggctgaacctgcagatatgcgcccagagatatggatcgcccaagagttgcggcgtattggagacgagtttaacgcttactatgcaaggagggtaatgatgttttctttacccgcttttc

SEQ ID NO: 4774 - DNA, 121 bp, synthetic construct
  misc_feature 1..121: note = Description of artificial sequence: synthetic polynucleotide sequence
  source 1..121: mol_type = other DNA
atttttacaacctcactgagctgcaatgaatgaagaagtgaaattttgtccatgatcaccgttaaccccaggaaccaacattgtgatgatggtttaagaactcaaagtctctctcacttgg

SEQ ID NO: 4775 - DNA, 121 bp, synthetic construct
  misc_feature 1..121: note = Description of artificial sequence: synthetic polynucleotide sequence
  source 1..121: mol_type = other DNA
cagagaatggttaagtagtgaaactacttcaagagaatctctgccgtcaggacagtcttgtacaaatctagtaacttgattttttttaatccaagtatatgagaataaggcaacgcacagt

SEQ ID NO: 4776 - DNA, 121 bp, synthetic construct
  misc_feature 1..121: note = Description of artificial sequence: synthetic polynucleotide sequence
  source 1..121: mol_type = other DNA
tgtttggtcacgtttgttgtgcagaagtcacgtttcagggtaggttcaccgccagacacggtcacatcaccattggctgtggatttccaagaagcaaaggagccaatctcagcaaagctcg

SEQ ID NO: 4777 - DNA, 121 bp, synthetic construct
  misc_feature 1..121: note = Description of artificial sequence: synthetic polynucleotide sequence
  source 1..121: mol_type = other DNA
tcggatctctgttcaagtccacaatgctacgtgcacagtgaggattgcagccgtcaccagagggggagttgggcccttcagtgatccagtgaaaatatttatccctgcacacggtgagagc

SEQ ID NO: 4778 - DNA, 121 bp, synthetic construct
  misc_feature 1..121: note = Description of artificial sequence: synthetic polynucleotide sequence
  source 1..121: mol_type = other DNA
ttgaatgggaaacctatatgcttatcagaaaattaacgtttcatgcttgaattgtccttcttttaggattggatggaacgctgggttgacgatgcattttggagcttccttttttcgctta

SEQ ID NO: 4779 - DNA, 121 bp, synthetic construct
  misc_feature 1..121: note = Description of artificial sequence: synthetic polynucleotide sequence
  source 1..121: mol_type = other DNA
cttatagctgaccagaggctaaatagattatggaatacaaaaagtgatcttcatcaaaatacagtgtccattgatccaaaattagcagccaaagccaaaattaacacaacaaacagagaag

SEQ ID NO: 4780 - DNA, 121 bp, synthetic construct
  misc_feature 1..121: note = Description of artificial sequence: synthetic polynucleotide sequence
  source 1..121: mol_type = other DNA
tgtgtgagggaagaacattccgctgtcaatatgaacctccactacttggaaaatggcactgttatgttgaactttatttaccgaaaagaactgttctttcttcctttgggatttgcactta

SEQ ID NO: 4781 - DNA, 121 bp, synthetic construct
  misc_feature 1..121: note = Description of artificial sequence: synthetic polynucleotide sequence
  source 1..121: mol_type = other DNA
tcacagattccatcttcttggccagctcttccactgatgttatactagtttcagcaactaaagagtcagaagtaatccctgtgtatgtaagatcatgaaggaaagtaagatttaccaattt

SEQ ID NO: 4782 - DNA, 121 bp, synthetic construct
  misc_feature 1..121: note = Description of artificial sequence: synthetic polynucleotide sequence
  source 1..121: mol_type = other DNA
acatggggttcccttgtcccttgactcttctctctcttccctcctagagaagatctgcatacttcctaacagaggcttggcccgcaccaaggtccccattttcctggggatccagggaggg

SEQ ID NO: 4783 - DNA, 121 bp, synthetic construct
  misc_feature 1..121: note = Description of artificial sequence: synthetic polynucleotide sequence
  source 1..121: mol_type = other DNA
tctcgagatccaaccacccgagcgcacgcacggacgctcagcggcgcgggggctcggggatcctgaccacaccgcgttcttaccagatctgatggagttgtgaggcatcgccggggagtcg

SEQ ID NO: 4784 - DNA, 121 bp, synthetic construct
  misc_feature 1..121: note = Description of artificial sequence: synthetic polynucleotide sequence
  source 1..121: mol_type = other DNA
aacacccctgctccccactccttccttacctccccttttattgattttgctccttaacctgagtgcagtcagccacagcagctgtccacgtacgccctgaccctgtacaagcacacagcca

SEQ ID NO: 4785 - DNA, 121 bp, synthetic construct
  misc_feature 1..121: note = Description of artificial sequence: synthetic polynucleotide sequence
  source 1..121: mol_type = other DNA
aacttcaggtttttagagtaaacatgtaaacaatgtcctctgtagaaatggacctaaaagaagcctgatctttggacctcctaagggatgctatgtgtttggacaaggtcttggatttatc

SEQ ID NO: 4786 - DNA, 121 bp, synthetic construct
  misc_feature 1..121: note = Description of artificial sequence: synthetic polynucleotide sequence
  source 1..121: mol_type = other DNA
gggagcttaggagttgatttgaggaaaggcattatgtgtatctttcaaatggttctctgaataattaggagcaggtggagaatgtggctgctaaaagctctgcactcgtgtgtcgtctata

SEQ ID NO: 4787 - DNA, 121 bp, synthetic construct
  misc_feature 1..121: note = Description of artificial sequence: synthetic polynucleotide sequence
  source 1..121: mol_type = other DNA
gatcactactgctacacaaagataataataaaggaagacatctcacccaagagttctggtatttgaccctggaggtctagatagatgtaatttcatgtggcaatatccccatatatacaca

SEQ ID NO: 4788 - DNA, 121 bp, synthetic construct
  misc_feature 1..121: note = Description of artificial sequence: synthetic polynucleotide sequence
  source 1..121: mol_type = other DNA
cccaggcagcagtgaggcatggttcacagtgctagcccagtccactggtgcactccataattgactgttgctcatagtttgctgacctctgatgtagaataaggggaactcttttaaactg

SEQ ID NO: 4789 - DNA, 121 bp, synthetic construct
  misc_feature 1..121: note = Description of artificial sequence: synthetic polynucleotide sequence
  source 1..121: mol_type = other DNA
tctttttgccactgcacgggaggcttgtgcaaagtacagcagcattctctcacctccacgtccttaacaggcctgcaagtggctgctcagagggtgtgtgccaacttcagaatttgtgaat

SEQ ID NO: 4790 - DNA, 121 bp, synthetic construct
  misc_feature 1..121: note = Description of artificial sequence: synthetic polynucleotide sequence
  source 1..121: mol_type = other DNA
atgagaatcaaagatgagctgaccaggcagaggcagagggagagcagggagctctgccaggctaagtgagcgggttcctttgcctaggggactgccctccagtgggcaaatcccctgtgtc

SEQ ID NO: 4791 - DNA, 121 bp, synthetic construct
  misc_feature 1..121: note = Description of artificial sequence: synthetic polynucleotide sequence
  source 1..121: mol_type = other DNA
aattcttgccaagacactagtgaattcatttcctctcagccaatggattctaagaggccgaaaaggagaagtgaaaattttgttttagcactacataaggcttctcgtacttgcagccaaa

SEQ ID NO: 4792 - DNA, 121 bp, synthetic construct
  misc_feature 1..121: note = Description of artificial sequence: synthetic polynucleotide sequence
  source 1..121: mol_type = other DNA
gcaacaatttgctacaggagacatcatttgaaaagctccatttgactcaaagatcgagttcttccaaagagaggcttgtctttctgttttctttcccctcatcattaacacggcaaaaaag

SEQ ID NO: 4793 - DNA, 121 bp, synthetic construct
  misc_feature 1..121: note = Description of artificial sequence: synthetic polynucleotide sequence
  source 1..121: mol_type = other DNA
atgggtgcctgggtttggtggcagcaaaaggaaattgctgtgggcctgagccggacacggaagtgatggaacctcctagggttgcgggggagggcgaggaccagggagagctgcaggaagg

SEQ ID NO: 4794 - DNA, 121 bp, synthetic construct
  misc_feature 1..121: note = Description of artificial sequence: synthetic polynucleotide sequence
  source 1..121: mol_type = other DNA
ggttctccaggtgatcctgactaaaaatacttagtccatggactccggcggccctgatggagatgatctgtaatgaccgttacacactggatagaaggctcaagattcctctgtggttttt

SEQ ID NO: 4795 - DNA, 121 bp, synthetic construct
  misc_feature 1..121: note = Description of artificial sequence: synthetic polynucleotide sequence
  source 1..121: mol_type = other DNA
ctaggctggaggagaaattcctcccctgagttctcctgcctcacactctttccttcagcatgacttatattgtgctgagttctgtgctcatgcctgtcttctcctccagcctatgagctcc

SEQ ID NO: 4796 - DNA, 121 bp, synthetic construct
  misc_feature 1..121: note = Description of artificial sequence: synthetic polynucleotide sequence
  source 1..121: mol_type = other DNA
tgaatgtcttttccaaggctcatgttgaagtttagttgccaggaactgtgttctgaagtgcggtctttaagaggtgattaggttgtgagggctctgccattgtgaatgcattaatgttgtt

SEQ ID NO: 4797 - DNA, 121 bp, synthetic construct
  misc_feature 1..121: note = Description of artificial sequence: synthetic polynucleotide sequence
  source 1..121: mol_type = other DNA
cataagtcccttagatgctcaagctcaggttaccaatctatcaaatgaggactccaatatgaagtgaatttgctgaagcttaatcaagacagtgctcaaaaaaatttagatcttaatgtag

SEQ ID NO: 4798 - DNA, 121 bp, synthetic construct
  misc_feature 1..121: note = Description of artificial sequence: synthetic polynucleotide sequence
  source 1..121: mol_type = other DNA
acacaggaagagctaagcccaggagggaggagctggaggccactttggtcaatacagccaacacccacaaggtcatttatagaatcccttgtccaagaaggagagttaaaggttagaacca

SEQ ID NO: 4799 - DNA, 121 bp, synthetic construct
  misc_feature 1..121: note = Description of artificial sequence: synthetic polynucleotide sequence
  source 1..121: mol_type = other DNA
ggaggggaggaggaacacaaacctggggaaccgtattcccagctccagctggctatgccacttctgcaagcacagtgggtttttggccatgctggatggcactggagaacctctatggagc

SEQ ID NO: 4800 - DNA, 121 bp, synthetic construct
  misc_feature 1..121: note = Description of artificial sequence: synthetic polynucleotide sequence
  source 1..121: mol_type = other DNA
agttaggtgttttgttttattttgaactgctgacttctttctagattttctctgtatatttggtttgcttcaatgtggatattataagtgtacttgtagaatttgggggtatttattctgc

SEQ ID NO: 4801 - DNA, 121 bp, synthetic construct
  misc_feature 1..121: note = Description of artificial sequence: synthetic polynucleotide sequence
  source 1..121: mol_type = other DNA
ctctccagcacaaggagcttctgatgatatattgaatgccagctgactctgggcttctcattgtgagtttagccatccttcctcatactggggcagaatcactgcagtccccttctggctg

SEQ ID NO: 4802 - DNA, 121 bp, synthetic construct
  misc_feature 1..121: note = Description of artificial sequence: synthetic polynucleotide sequence
  source 1..121: mol_type = other DNA
gaagatggtaatatgcttctagatctcactgggtttggggatattcacttttccttcctttgatgccctatgcatgtaataaatgtgtccaccttttctcctactcatctgtcttacatca

SEQ ID NO: 4803 - DNA, 121 bp, synthetic construct
  misc_feature 1..121: note = Description of artificial sequence: synthetic polynucleotide sequence
  source 1..121: mol_type = other DNA
ttgcctcccttttcctcatcactgcccaacaccacattgcacatattctttgtgaatccgttcattgtctgcctaagacagaaacgtaagctccatgaggagagggacttgcctctgtttt

SEQ ID NO: 4804 - DNA, 121 bp, synthetic construct
  misc_feature 1..121: note = Description of artificial sequence: synthetic polynucleotide sequence
  source 1..121: mol_type = other DNA
gccccaaatctgacccccacagataagggcgagcatcccttctgtacaaacgtgaggtggtcttaaaaccatacagcattagaaaggataaagggcttagggggcacctaattcatgccac

SEQ ID NO: 4805 - DNA, 121 bp, synthetic construct
  misc_feature 1..121: note = Description of artificial sequence: synthetic polynucleotide sequence
  source 1..121: mol_type = other DNA
cagacatatttctctccatactattttccaaaccagattctggcagaatagttagctcgttcactaactgagctgctagcttcccaaagagaatgtgttactaactaaatattcttctgaa

SEQ ID NO: 4806 - DNA, 239 bp, synthetic construct
  misc_feature 1..239: note = Description of artificial sequence: synthetic polynucleotide sequence
  source 1..239: mol_type = other DNA
gttagctggagtgaaaacttgaagactcagactcagtggaaacagatgaatgtccacctcgctttcctttggagaggatcttgaggctggaccctctgctcacagaggtgagtgcgtgctgggcagaggttttaaatttggctccaaggaaagcatagaggatggggttcagacaacagtggaagaaagctagggcctcggtgatggaaatccacttgtgcacagtgttctcaaactca

SEQ ID NO: 4807 - DNA, 475 bp, synthetic construct
  misc_feature 1..475: note = Description of artificial sequence: synthetic polynucleotide sequence
  source 1..475: mol_type = other DNA
cacccttgcttgatgatttccaggaggatgaaggagtcgatgctgatcccaatgtagtaaggcagccaacaggcgaagaaagccaggatgaggatgactgtggtcttgagggccttgcgcttctggtggcccttggagtgtgacagcttggagatgataatgcaatagcaggacaggatgacaataccaggcaggataaggccaaccatgatgtgctgaaactggaacacaaccacccacaagtcattggggtagaagcggtcacagatatatctgtcatctgcctcactgacgttggcaaagatgaagtcgggaatagtcagcaggagggcagggatccagacgccaacatagaccaccttttcagccaacagcttccttggcctctgactgttggtggcgtggacgatggccaggtagcggtccagactgatgaaggccaggatgaggacactgctgtagaggttgactgtgt

SEQ ID NO: 4808 - DNA, 358 bp, synthetic construct
  misc_feature 1..358: note = Description of artificial sequence: synthetic polynucleotide sequence
  source 1..358: mol_type = other DNA
agatgacatggactgccttgcataggaagttcccaaagtaccagtttgccacggcatcaactgcccagaagggaagcgtgatgacaaagaggaggtcggccactgacaggtgcagcctgtacttgtccgtcatgcttctcagtttcttctggtaacccatgaccaggatgaccaatccattgcccacaatgccagttaagaagatgatggagtagatggtgggcaggaagattttattgaaattagcattttcttcacggaaacagggttccttcatggagtcatagtcccctgagcccatttcctcggtgtagttatctgaagtgtatatctgcaaaagaggcaaaggaatggacat

SEQ ID NO: 4809 - DNA, 214 bp, synthetic construct
  misc_feature 1..214: note = Description of artificial sequence: synthetic polynucleotide sequence
  source 1..214: mol_type = other DNA
ccattctgggcttcaagcaacttgtagtgggtaaagagaatgcggtcttaaaacgaaggcccttcggtgcttggggtatattgggcgggagtgtcagaaaatgaacaaacggcacctcctcccccaagcgggcgctcctccggtgtgtgggtctcttgccatcctcgtgtttatcacttggcgcgtttgggacgttagggagcggggcattttc

SEQ ID NO: 4810 - DNA, 121 bp, synthetic construct
  misc_feature 1..121: note = Description of artificial sequence: synthetic polynucleotide sequence
  source 1..121: mol_type = other DNA
ctaagttcaaacgtttgtacatttatgacaaagcaggttgaaactggacttacactgatcccctccatggtaaccgctggttctccagatgcggtggctactggagcactcaggccctcgg

SEQ ID NO: 4811 - DNA, 121 bp, synthetic construct
  misc_feature 1..121: note = Description of artificial sequence: synthetic polynucleotide sequence
  source 1..121: mol_type = other DNA
cctgtccttcttatttttcctgatgcatgtaatgaagatgttggtgtaggctgtggcaaatgacagattcctgaaggtaaaggtctgatagttataggctcactgctaaaagggtttgtaa

SEQ ID NO: 4812 - DNA, 121 bp, synthetic construct
  misc_feature 1..121: note = Description of artificial sequence: synthetic polynucleotide sequence
  source 1..121: mol_type = other DNA
ctaaccacaagttttctaaggggaatatctattgtggattccctaggatatgcagaactcttcatcaaagtgccctgcccttctcaagctaaggcgtatgacccaaaccaaccaggctttc

SEQ ID NO: 4813 - DNA, 121 bp, synthetic construct
  misc_feature 1..121: note = Description of artificial sequence: synthetic polynucleotide sequence
  source 1..121: mol_type = other DNA
tattcctagggaccataaaagagacaagctgggaatattataatctatttccttaacacgttttcagtctagcagaggaagcaagcacatacacagatgactacctttcatgcacagcata

SEQ ID NO: 4814 - DNA, 121 bp, synthetic construct
  misc_feature 1..121: note = Description of artificial sequence: synthetic polynucleotide sequence
  source 1..121: mol_type = other DNA
cttcatccacacttcagcctacaacattacaactacgattccattcttctgttgcatgaaaaatggctgtgaactccttcttttctctcaaaaccaaggtagagtacatagacttcctctt

SEQ ID NO: 4815 - DNA, 121 bp, synthetic construct
  misc_feature 1..121: note = Description of artificial sequence: synthetic polynucleotide sequence
  source 1..121: mol_type = other DNA
tttgtgaaacttctttatccactccagtatatcaaagcatcttgcattctcttttgtttttgaacgccctcttgaacattttgtatatggctaaaaatgtaacaacaacaaaaacagaaaa

SEQ ID NO: 4816 - DNA, 121 bp, synthetic construct
  misc_feature 1..121: note = Description of artificial sequence: synthetic polynucleotide sequence
  source 1..121: mol_type = other DNA
ctgagatcacgccactgcactccagcctaggcagcagagcaagactccatccaaaaaaacccccaaaaacctaatgtttttatttatattttagattagtgggatggtttggccatgaact

SEQ ID NO: 4817 - DNA, 121 bp, synthetic construct
  misc_feature 1..121: note = Description of artificial sequence: synthetic polynucleotide sequence
  source 1..121: mol_type = other DNA
gcacattatcagaacaaaggggaagagaacaataacttaaatacatcagcagagaaaacgttatgaggcataaggaccatgtggttctggtgttaaaagccaaacccttctcatcaaaatc

SEQ ID NO: 4818 - DNA, 121 bp, synthetic construct
  misc_feature 1..121: note = Description of artificial sequence: synthetic polynucleotide sequence
  source 1..121: mol_type = other DNA
agaaacctggaattattcaaaatccaaagatcctctagcactgaattgctaagtcactacgacagtgatataaaagaacagaaaccagagcacagaaaatctttaagtgagtattttcttt

SEQ ID NO: 4819 - DNA, 121 bp, synthetic construct
  misc_feature 1..121: note = Description of artificial sequence: synthetic polynucleotide sequence
  source 1..121: mol_type = other DNA
ccttgtctgataatactcattggggtaacaaaaacactagggattgttttatatctcagaatccaagtacagcaactattgatctgaaattctatacttgagatcaatccaactgggtcac

SEQ ID NO: 4820 - DNA, 121 bp, synthetic construct
  misc_feature 1..121: note = Description of artificial sequence: synthetic polynucleotide sequence
  source 1..121: mol_type = other DNA
cacaattatttttaacataaaataaacataattctttgtttagtgtttggatacagaaacgaaatttgaagatctggccagattttataaagaactgcccaaactccaatcccttaatcct

SEQ ID NO: 4821 - DNA, 121 bp, synthetic construct
  misc_feature 1..121: note = Description of artificial sequence: synthetic polynucleotide sequence
  source 1..121: mol_type = other DNA
ctgatgatgctttccagatccttgggtctgtgatcaggaatcagcttcataaattttcccatggaagtgagaaatgattccatattaaaaactgagttgaatacaaccacatcagccacca

SEQ ID NO: 4822 - DNA, 229 bp, synthetic construct
  misc_feature 1..229: note = Description of artificial sequence: synthetic polynucleotide sequence
  source 1..229: mol_type = other DNA
attacatgccatcttccatattgtcttcctcgtggtctgatttggtttccattttcccatcctccgaactatcgtccatggagtgatctccagtctcttcttcatctcgtatcgtttcgggatccgtatccatacttttattttcactttcttcctcttcctcctcgaactcctcgtcgccatcctgtctgcccagcttcccgtagccatcctcgccttctttctcgtg

SEQ ID NO: 4823 - DNA, 350 bp, synthetic construct
  misc_feature 1..350: note = Description of artificial sequence: synthetic polynucleotide sequence
  source 1..350: mol_type = other DNA
ctccttctcgctctcgccatccctcggcatactctccctctcctccgagtcagagtacccctgaggggtaatgctctgcaagtaagcccggttcatcagcagctcggtgggttccaagtgccctttctcgcgcgcctcgcgctccgccgcttcccgctcctccgcctcccgcttgcagtaggaatacctgtgattcatgtgctgcgagtacgagcccgagtgtgagaagcgcttgccacatttatcacactgatagggcttctcgcccgagtgaagccttgagtgctcgataaggtggtgcttgtgtttaaacgctttcttacaaatctgacactgatgtggtctttttc

SEQ ID NO: 4824 - DNA, 182 bp, synthetic construct
  misc_feature 1..182: note = Description of artificial sequence: synthetic polynucleotide sequence
  source 1..182: mol_type = other DNA
cctgtgtgttcgtatttatgtcgcagaagggaactgcttttctggaatgtcttgtcacataagtcacatgcatacatgccactctctgtcttcttgatctttttgcgagacagacaggagtcggagtctgtcatatcatctaggcctgacatgtagtcttgtgctccatcaagcaattctcc

SEQ ID NO: 4825 - DNA, 233 bp, synthetic construct
  misc_feature 1..233: note = Description of artificial sequence: synthetic polynucleotide sequence
  source 1..233: mol_type = other DNA
cctgaaatccttgtttccgctggtactttctcctttgctgcatatcagcaaaagtagctgctccagttgggtaggtgtaggccatatgtggtaggaagctcatctgatccagtcctgggtatggtcgtagcccaggaatactggtctggactggtggcatgaaagtagcagggggaaatgcgctttgaggtggaagagctgtgtataaaggtttggcactaaatgggttcatg

SEQ ID NO: 4826 - DNA, 469 bp, synthetic construct
  misc_feature 1..469: note = Description of artificial sequence: synthetic polynucleotide sequence
  source 1..469: mol_type = other DNA
ctgaacactgggttagtgcttttgttgtccagattatttgaatttgaaaattccttcttgataaaagtcaagttcagaggctcatctgagttttcagatgaggaagaaacactgttatgatctaaactgatgctactagcttttgttttgttctttgtggctataatacttttgggttctttcatttgttttggtaatgacaagtctaaaggctcagcctggagctcctcagaagagaagctgtttggagtgtatgaactactgtgggagtttttagaagatgtggaggaaagatttaagggagaaggagtattactcctggagtggtccaatttttcaactggtttaatattggtaaaatgggaaggttttgttagcctgagaggaggatcacaattcgtaacactgttgtggagttctgctatagatggtgatgttatggagtccataggttttacaggagacctgg

SEQ ID NO: 4827 - DNA, 468 bp, synthetic construct
  misc_feature 1..468: note = Description of artificial sequence: synthetic polynucleotide sequence
  source 1..468: mol_type = other DNA
gtaataaagagtcttttgtgggagggttactgttgggagctaacggcttggagcttctttccagggatggggacctggaatttgagtactggtagacttttcgttgttcaaaccattccttcacaaattcctgaggaaggcccacagcaatggaaattttcagcagttcatcggagttgggctccatgttcatagcatagtatgctttgagtacagacatgtggtccttgtatgggttgatggggcttgtcattcctttctcagaaagtacagatgacaagaggagggctttattatcaacaaaaactccggctttgttggggactatgttttcatgaggctgcaggaccgccttgatctcttcattcatcttacaaaggtaacgttcatgctgatgcaaagggatggggccaggaaaactttctttacagaactggcatgaaaatggagtggatatgttgtggttct

SEQ ID NO: 4828 - DNA, 468 bp, synthetic construct
  misc_feature 1..468: note = Description of artificial sequence: synthetic polynucleotide sequence
  source 1..468: mol_type = other DNA
caatcattttgtcatcagtgaccaaatctattaaagtacgtagcttctctttctttatattactgatctgtctccttgagtcagtagtcaagctctggaggcaagctttggcttcattgactttttccaacgtatagtcaataatacttttagtggcaccattatgactcactaccggaagaccgacaggcggaatattaggagaagtaactccttgttcctcaggttgagagcatggatccttcatgtgataacctttcaactttgaaatttcttcagccttgcagtccattttttgcctggaaacagtattgtccacaatctgtagaaccttttgtacctcacttaaattactattcatggtgggaaacccaagtaaaggggcttccatccctacacctaagtgctgcattggactctgagcagatggatgaactcctaaagggctggtggctccaagcccaccat

SEQ ID NO: 4829 - DNA, 355 bp, synthetic construct
  misc_feature 1..355: note = Description of artificial sequence: synthetic polynucleotide sequence
  source 1..355: mol_type = other DNA
tcataaagggactagtgccactaaacccgtgtgtagccataagaactttatagtcattgaagtctagtggttctgttttaattttaagtaagcctgtctgttcagacatactaagtggttttccattctccaacttgtttcttaactgggtaatggctgaattagtaggagaagaagaaacagaattaggggaagaacccgtcttgatattgtttctcattcggccatttacagagattaaaccaatacatttcttgctgctgatgtgcgaactgtaggaaccagaatgggagaaacgtttcttgcagtttgggcactcgtaaggtttttcacctaaaatgataattaaaattac

SEQ ID NO: 4830 - DNA, 121 bp, synthetic construct
  misc_feature 1..121: note = Description of artificial sequence: synthetic polynucleotide sequence
  source 1..121: mol_type = other DNA
actcaccactgtgaattcgcaggtgttctttcagatggtgtttatatttgaaggccttgccacactctgtgcatttgaacttgcgattacctgctccttgggttagcatttggtgctataa

SEQ ID NO: 4831 - DNA, 216 bp, synthetic construct
  misc_feature 1..216: note = Description of artificial sequence: synthetic polynucleotide sequence
  source 1..216: mol_type = other DNA
cctgatctgtccctggcttgtgtgtcaccatatgccgctcgagctgggtgcggtaggcaaacgtgtagctacagagagggcaggaaaagttctcttcattcttctcgtggcggtacttgatgtgctccttcagtgatgtcaagcgcttgtagccccggtcgcagtaggggcaggtcagcagttgggcaaaagcatctggagttccaggtggcaggt

SEQ ID NO: 4832 - DNA, 190 bp, synthetic construct
  misc_feature 1..190: note = Description of artificial sequence: synthetic polynucleotide sequence
  source 1..190: mol_type = other DNA
ccattttcttcttgcccattggcctctggcgtgccaaggcgagacagctcctcaggggcttctgggtaaataatggctgtgtcactgcgctgaaggtactcctcgatgctgactgcatgaccatcgcgttcctccagttttcttttggcaaagtattcctcaaaatctgatgtgcaatttgcattcttca

SEQ ID NO: 4833 - DNA, 121 bp, synthetic construct
  misc_feature 1..121: note = Description of artificial sequence: synthetic polynucleotide sequence
  source 1..121: mol_type = other DNA
tctgagcgtggccaacataactcacctgtaccattgttaattgcggtctggatcgtggcttctggccccatagtgtcatagtcttccttcatttcttctgtgggggaaaattatctttagc

SEQ ID NO: 4834 - DNA, 259 bp, synthetic construct
  misc_feature 1..259: note = Description of artificial sequence: synthetic polynucleotide sequence
  source 1..259: mol_type = other DNA
cctggaccatctacagaggcttgtagaatctcgttgttgtgccaggggtgttccactccaccctcccttatttcatcttcctcttcctctcttggcaacagagcttggctcacgtgtggggaggactcatggttgggcacactagctggactcgtctcctggtccagagggttggcaataccgtcatcctcagcaatatgaagcttgtcttcctcatctgtttcagaacctgtgtccactacattgtcatagttcacca

SEQ ID NO: 4835 - DNA, 121 bp, synthetic construct
  misc_feature 1..121: note = Description of artificial sequence: synthetic polynucleotide sequence
  source 1..121: mol_type = other DNA
agtttggttcgggctgcttcttaccgtttttcctcctgggattggcttgtttgcgcctcttgcaccgggggccatccgccatgatcggctgcttcattgataagagcggatcagatggcag

SEQ ID NO: 4836 - DNA, 121 bp, synthetic construct
  misc_feature 1..121: note = Description of artificial sequence: synthetic polynucleotide sequence
  source 1..121: mol_type = other DNA
gctgtatgtaaaaaggttcctcaacatactaaagtcaatgattgggccatcaacacagcggcttcctagatgggagaattccagcgccaaaggcttaatggagaatgggtccttagccttt

SEQ ID NO: 4837 - DNA, 121 bp, synthetic construct
  misc_feature 1..121: note = Description of artificial sequence: synthetic polynucleotide sequence
  source 1..121: mol_type = other DNA
cactccattggcagtttaatataaacatctgtttccagtcttttatatcctatctgagacttattcagtccctctgagttatctgtccttttctccttccccatttatttcccttgactta

SEQ ID NO: 4838 - DNA, 121 bp, synthetic construct
  misc_feature 1..121: note = Description of artificial sequence: synthetic polynucleotide sequence
  source 1..121: mol_type = other DNA
aagacattgggaaattattcaaatcacagaatcatcttgtttgcatcgacaaaggtagtctaccgggctctctccattatattgcctcattaggcctcattcaccaaacatgagttgaaca

SEQ ID NO: 4839 - DNA, 121 bp, synthetic construct
  misc_feature 1..121: note = Description of artificial sequence: synthetic polynucleotide sequence
  source 1..121: mol_type = other DNA
atagaaatctaaaggtaaagactaaactcctctggaacatcatgcagtctttgcaagggcagcctatcatgtatttcctcaaacacatttggtacaactttcttgaagccgtgcaaccttt

SEQ ID NO: 4840 - DNA, 121 bp, synthetic construct
  misc_feature 1..121: note = Description of artificial sequence: synthetic polynucleotide sequence
  source 1..121: mol_type = other DNA
aaataaaaacataattttattttttaagcacaatgtttttatttagtggatgactattaggaacctgcaatgtgataagtgcttttatgtgcatctccaaggcttgacaatcaccctggaa

SEQ ID NO: 4841 - DNA, 121 bp, synthetic construct
  misc_feature 1..121: note = Description of artificial sequence: synthetic polynucleotide sequence
  source 1..121: mol_type = other DNA
actataggtttttaacctttccgatttttatcataggtgaaagcagatctatgaaactactctattctctacaaacctgaagagagccaggcaagttgggctccacatgtcttgttatcat

SEQ ID NO: 4842 - DNA, 121 bp, synthetic construct
  misc_feature 1..121: note = Description of artificial sequence: synthetic polynucleotide sequence
  source 1..121: mol_type = other DNA
ttgcccactatgatggctcttatcttataggtcaggaagcaatatggaggttttcctaactatccggtgtgtacattccaattgtacatttggaccatagtaggaagtattgagtaggttg

SEQ ID NO: 4843 - DNA, 121 bp, synthetic construct
  misc_feature 1..121: note = Description of artificial sequence: synthetic polynucleotide sequence
  source 1..121: mol_type = other DNA
gacaatgagattcagacagaggaaacagacagtgcagaggccttaaggtgggagaaatccatagaagaccagtctgtggggaaaaaatgagcaacagaagactgatagaaaatcaaataaa

SEQ ID NO: 4844 - DNA, 121 bp, synthetic construct
  misc_feature 1..121: note = Description of artificial sequence: synthetic polynucleotide sequence
  source 1..121: mol_type = other DNA
ttttgtgattatatttaaataattttattgtcaaattttcaattttgtttacctttcctgagctgttttatgggttggccatttaagtaaatttttcactgctattaccttttcctttcta

SEQ ID NO: 4845 - DNA, 121 bp, synthetic construct
  misc_feature 1..121: note = Description of artificial sequence: synthetic polynucleotide sequence
  source 1..121: mol_type = other DNA
ggattatgaatgaagagagagcaagaaattaagtggggttagataacaggtaaaatatgacaatatcaaagaaaaatttatgggcatgaaaatgaagaaagtagttgaaattagatgtaat

SEQ ID NO: 4846 - DNA, 121 bp, synthetic construct
  misc_feature 1..121: note = Description of artificial sequence: synthetic polynucleotide sequence
  source 1..121: mol_type = other DNA
actgcctgcctgactgatttctttctttctcctctctcatcatctcggatagtatccacaaaacagaatcagacaggtcaggattagagcagagcaaatgagatgagatcatgcaagtgta

SEQ ID NO: 4847 - DNA, 121 bp, synthetic construct
  misc_feature 1..121: note = Description of artificial sequence: synthetic polynucleotide sequence
  source 1..121: mol_type = other DNA
gttaatattagagttgtacttgcatttatgaggtctaaagagctcttgggaaataaaacgggactatccagtctggaagaacttcatattatccactcatttcttctattcttacttgtat

SEQ ID NO: 4848 - DNA, 121 bp, synthetic construct
  misc_feature 1..121: note = Description of artificial sequence: synthetic polynucleotide sequence
  source 1..121: mol_type = other DNA
gagtcttgtgccaaagttatgaggtggaaagaaacataacatgttccatacctctagaaactaaatgtagctggtgtatggccatgcggttttactcaggatgaattagagaaatagggtt

SEQ ID NO: 4849 - DNA, 121 bp, synthetic construct
  misc_feature 1..121: note = Description of artificial sequence: synthetic polynucleotide sequence
  source 1..121: mol_type = other DNA
aagattatgttctgaagatgattaaaatggaaggaagactccaagtgctagtgtcacattttgcttaggtggcagtctcttctgataaatctatgccttccagatacccaccttttatacc

SEQ ID NO: 4850 - DNA, 121 bp, synthetic construct
  misc_feature 1..121: note = Description of artificial sequence: synthetic polynucleotide sequence
  source 1..121: mol_type = other DNA
tgtcagcccatgagcttctccaggacaggactctgtcttctttttatcctggtgtcttacgtagacagcaccaaacagatgctatgcagtaggtgttcaacaaaatctcaaagtgtgaaca

SEQ ID NO: 4851 - DNA, 121 bp, synthetic construct
  misc_feature 1..121: note = Description of artificial sequence: synthetic polynucleotide sequence
  source 1..121: mol_type = other DNA
tgaaaatgatttattttacttttcttacttttcaggacctgtagatgaatacatgttgccatttgaggaggaaattggccagcatccatctcttgaagacatgcaggaagttgttgtgcat

SEQ ID NO: 4852 - DNA, 121 bp, synthetic construct
  misc_feature 1..121: note = Description of artificial sequence: synthetic polynucleotide sequence
  source 1..121: mol_type = other DNA
agaggcctgttttaagagattattggcagaaacatgctgtaagttatccagttagcttttcatttgaaattccaataaaacacttttcagaggaattatttatctctgcacatttctcttt

SEQ ID NO: 4853 - DNA, 121 bp, synthetic construct
  misc_feature 1..121: note = Description of artificial sequence: synthetic polynucleotide sequence
  source 1..121: mol_type = other DNA
aaaactggagaagataaggtgtgcaaactagggcagggaagaagacagttctgctgagatagtgtgttcatgcctccatctgcatgtccatctgatattcattaagcttctattctgtgcc

SEQ ID NO: 4854 - DNA, 121 bp, synthetic construct
  misc_feature 1..121: note = Description of artificial sequence: synthetic polynucleotide sequence
  source 1..121: mol_type = other DNA
cctgctattccctgctaagcctctctctgtttatgtgccttcttcacaacacctgcttatagaaaattaacatggaagtcctggaaaacccttccattttaattaacatggaaggtgaggt

SEQ ID NO: 4855 - DNA, 121 bp, synthetic construct
  misc_feature 1..121: note = Description of artificial sequence: synthetic polynucleotide sequence
  source 1..121: mol_type = other DNA
ttctcgggtaagaacatcaaagtgagttgcagcacttctgcattcatacacgtaaatcttaatctggaaggaagatagaatctaccatagtgaatttctccagaagttttacgcttgagtg

SEQ ID NO: 4856 - DNA, 121 bp, synthetic construct
  misc_feature 1..121: note = Description of artificial sequence: synthetic polynucleotide sequence
  source 1..121: mol_type = other DNA
tttaaatggtcaggctcagttcaggaaaacaggctgatgatttaggatgttctactgtggtataacgtatattatcttttagcccaatacctgggaataatatgtcccaattttagaaaaa

SEQ ID NO: 4857 - DNA, 121 bp, synthetic construct
  misc_feature 1..121: note = Description of artificial sequence: synthetic polynucleotide sequence
  source 1..121: mol_type = other DNA
gaagctccttgaatagtggccttttccagagagatttccacattgatctgaggactacaggattgattagtggcgtttcattaaacatttgaagggctcttattaccattccttgggtaca

SEQ ID NO: 4858 - DNA, 121 bp, synthetic construct
  misc_feature 1..121: note = Description of artificial sequence: synthetic polynucleotide sequence
  source 1..121: mol_type = other DNA
ctgtagccttgaccttccaggctctacttttactcttattaccctaaaaggcatcctctatactgcagctagggcatttcttcctttctttctgaaatataagtttcatcgtatcattgta

SEQ ID NO: 4859 - DNA, 121 bp, synthetic construct
  misc_feature 1..121: note = Description of artificial sequence: synthetic polynucleotide sequence
  source 1..121: mol_type = other DNA
ctactcagttatcctgcactgaaaaccacccacatccttcccatttataggcaatctctcttacatcatcataagcaacaatttcaactaccaccacctcctcagccccaaggtctccaat

SEQ ID NO: 4860 - DNA, 121 bp, synthetic construct
  misc_feature 1..121: note = Description of artificial sequence: synthetic polynucleotide sequence
  source 1..121: mol_type = other DNA
tatttatctctttcaccaatagaatgaaaagctccatgagtgcagagtcgctgttgtttagtaccttatccttagcacatgcaagtaactaggcacttaatagttgttgaagaatttagtg

SEQ ID NO: 4861 - DNA, 121 bp, synthetic construct
  misc_feature 1..121: note = Description of artificial sequence: synthetic polynucleotide sequence
  source 1..121: mol_type = other DNA
ttggggagcaagagcacagagggataatgccattctcatcatgtcatatgaaggatacatactatcagcttgacttacctagttacttttcccaaggtgtatttcaatatggtttcatgta

SEQ ID NO: 4862 - DNA, 121 bp, synthetic construct
  misc_feature 1..121: note = Description of artificial sequence: synthetic polynucleotide sequence
  source 1..121: mol_type = other DNA
ttttttaacatcacttgcatttaaaagaaatatcagctgatccctgagaagcactgctactctacttcatctagttctaattctcccagcattctgttagtaaagacagtatgaatatttt

SEQ ID NO: 4863 - DNA, 121 bp, synthetic construct
  misc_feature 1..121: note = Description of artificial sequence: synthetic polynucleotide sequence
  source 1..121: mol_type = other DNA
cagcatatccctttctgcctctttatttgtcagttcttttggagcaggattaggggcagcatggacactcttggcagctgcagatgtcacatagtgacccgatactctcttctgcatctgc

SEQ ID NO: 4864 - DNA, 121 bp, synthetic construct
  misc_feature 1..121: note = Description of artificial sequence: synthetic polynucleotide sequence
  source 1..121: mol_type = other DNA
agagctgggtttggcctgggcatttgaagcccgagatttaaattttgattccaaaatattgtttatttcttccaaatttggtgcaaaaggagctgtgccagtgtctcttgtcattttggga

SEQ ID NO: 4865 - DNA, 121 bp, synthetic construct
  misc_feature 1..121: note = Description of artificial sequence: synthetic polynucleotide sequence
  source 1..121: mol_type = other DNA
ttttggccagaaaactgatgtgaagaaaaataaatgttttgtcttgcatgtagtagatgcttagtaagtatattaattgattacttattcctgaagaattttccccagtgtcatagtccac

SEQ ID NO: 4866 - DNA, 121 bp, synthetic construct
  misc_feature 1..121: note = Description of artificial sequence: synthetic polynucleotide sequence
  source 1..121: mol_type = other DNA
agctgataaagggaaaaatgaaatcatttgagattcaaattgtttccacacccaaatgtataacaaccagctgagataacgaaaaggcaaatgcagttatctgagtaatcactaatgagat

SEQ ID NO: 4867 - DNA, 121 bp, synthetic construct
  misc_feature 1..121: note = Description of artificial sequence: synthetic polynucleotide sequence
  source 1..121: mol_type = other DNA
ttaaaaggtgaaaaagaatttacactgaaaataactatccattctccaggagagtagtgtctcctgaaccttccccctcaaacatgtttgcattattggttcattttcaaggaatcatttt

SEQ ID NO: 4868 - DNA, 121 bp, synthetic construct
  misc_feature 1..121: note = Description of artificial sequence: synthetic polynucleotide sequence
  source 1..121: mol_type = other DNA
tactccacttgctttattatttgcatgtttctcccctgcttgacatacatatatataattttctgagtcacttgaaggtaagttacatatctcatggccctttaccgctaaatattccagt

SEQ ID NO: 4869 - DNA, 121 bp, synthetic construct
  misc_feature 1..121: note = Description of artificial sequence: synthetic polynucleotide sequence
  source 1..121: mol_type = other DNA
ccttaagaccataaaatatccaaggttcaaatttcccaaattgcctccctaatgcttttcagagttttacaattaagatccaaattaggtcacgctttgcatttgatgatgtttttcttca

SEQ ID NO: 4870 - DNA, 121 bp, synthetic construct
  misc_feature 1..121: note = Description of artificial sequence: synthetic polynucleotide sequence
  source 1..121: mol_type = other DNA
atctagaggttgtgaaagaactctgggcaagaaacagaaaaaaagggtctaaacattatgtcactcttctaagctattctactgtctaatcatgaggctttcagagaaagtacagatgacc

SEQ ID NO: 4871 - DNA, 121 bp, synthetic construct
  misc_feature 1..121: note = Description of artificial sequence: synthetic polynucleotide sequence
  source 1..121: mol_type = other DNA
ttccagatttcccccatatctatcagagttctccagagaagcagagccagtgggcgatatgtaatgcatgtcaaagagattcatctctaggaattggcctacatgattgtgaaagctggca

SEQ ID NO: 4872 - DNA, 121 bp, synthetic construct
  misc_feature 1..121: note = Description of artificial sequence: synthetic polynucleotide sequence
  source 1..121: mol_type = other DNA
gggaggcatgtggctaaaccttacagaaacaggatctaagcattctctccaactttcaaatgtgtttctctttgtctgttgggttcaatcccaatggctgtaaagcaatgtcctctacatc

SEQ ID NO: 4873 - DNA, 121 bp, synthetic construct
  misc_feature 1..121: note = Description of artificial sequence: synthetic polynucleotide sequence
  source 1..121: mol_type = other DNA
gtccaattgtttcatcatcatttgttgaaaagactatccttttcccgttgaattgcctttcaatttgtcaaaaatcagttgttcatgtttgaatggctctatttctgccctagctattcca

SEQ ID NO: 4874 - DNA, 121 bp, synthetic construct
  misc_feature 1..121: note = Description of artificial sequence: synthetic polynucleotide sequence
  source 1..121: mol_type = other DNA
agaagacctgtctctcaacatcagttatccctttctaccatgaagttttagctgaatagtgtacatggttgcataaagacaacagtccctagcctcccttgttatgaagtagggccactta

SEQ ID NO: 4875 - DNA, 121 bp, synthetic construct
  misc_feature 1..121: note = Description of artificial sequence: synthetic polynucleotide sequence
  source 1..121: mol_type = other DNA
caaataagaaaggaaataaacgctcatttcctctgtaaaacagaggatactttttctgtaaattcctttatgcacagactagggactgatgccattgacacagtggggaaatgactccact

SEQ ID NO: 4876 - DNA, 121 bp, synthetic construct
  misc_feature 1..121: note = Description of artificial sequence: synthetic polynucleotide sequence
  source 1..121: mol_type = other DNA
tgtcttctatgattcctatttcagggtaacaaaagagtttatgacagagctgtttatagaaggagactagctaataaatatagaaagaatgagagaattaggaaagcaccgttcatgcgca

SEQ ID NO: 4877 - DNA, 121 bp, synthetic construct
  misc_feature 1..121: note = Description of artificial sequence: synthetic polynucleotide sequence
  source 1..121: mol_type = other DNA
agccagagagggtggggtcccaggcaagcagtgtaaaaagctgcagggagtacagtccattcatgtctcagtcccaacagcagctcacagcagcgtggtagggacttttccaagggtgcac

SEQ ID NO: 4878 - DNA, 121 bp, synthetic construct
  misc_feature 1..121: note = Description of artificial sequence: synthetic polynucleotide sequence
  source 1..121: mol_type = other DNA
acactccagagagcatctttgctaggcagttttcccagctacttcatgaagtggttctcaatcttgaccatgaattagaattatctgcagatcttttaaaacataccaatcctggacctgc

SEQ ID NO: 4879 - DNA, 121 bp, synthetic construct
  misc_feature 1..121: note = Description of artificial sequence: synthetic polynucleotide sequence
  source 1..121: mol_type = other DNA
aatctgaattttatctagacccacaaacactcagaagaaagaagattttcacaaactccattgcagttaaaggtagctgtgtgaataagaagtggccaaataatataaagtgttcttagca

SEQ ID NO: 4880 - DNA, 121 bp, synthetic construct
  misc_feature 1..121: note = Description of artificial sequence: synthetic polynucleotide sequence
  source 1..121: mol_type = other DNA
cagtgtagagacagtctaagagatgggagtgtacattgcggatgattagagaatgagttgagcatagccgaagcatattaagtttatggagaacctaaaagtcagtagagttggcactgta

SEQ ID NO: 4881 - DNA, 121 bp, synthetic construct
  misc_feature 1..121: note = Description of artificial sequence: synthetic polynucleotide sequence
  source 1..121: mol_type = other DNA
tgcttaaaattatttaataaaaccttaactctgggttaccaccaggtcccttgcaaagtgttggtttaacactcaaatttcaatggctttggtcccagttactaatcaataatttgtactg

SEQ ID NO: 4882 - DNA, 160 bp, synthetic construct
  misc_feature 1..160: note = Description of artificial sequence: synthetic polynucleotide sequence
  source 1..160: mol_type = other DNA
attataagatatagtcaagttcataacgaatataggtgttcttatcatcgttgtagattcttgggtaatgtgctatgagagcgtcctgggaaccaatgtagatggagttgtaaattttccaatatacatctctgactttccgggctgggtgaaacagacc

SEQ ID NO: 4883 - DNA, 218 bp, synthetic construct
  misc_feature 1..218: note = Description of artificial sequence: synthetic polynucleotide sequence
  source 1..218: mol_type = other DNA
cctgtaaacaatattgcaacattctacatggtccaatagcaactctcaggccctctagggctcccataactgcctgaattacatgaggagatgtctcaaatacattgggccatacatagttcaacaagtgattcagcgaatcttcacaaccaaatccataaaccccaagtgacatgtgctgtaccactgcactagccgtctgtctgtgtacaaggtct

SEQ ID NO: 4884 - DNA, 274 bp, synthetic construct
  misc_feature 1..274: note = Description of artificial sequence: synthetic polynucleotide sequence
  source 1..274: mol_type = other DNA
cctatccattaaagcatcttcaagtaacggtgttacggcataaatgtagtcttttcccatttcaccaatatattcaaacaagaaggaaagcgattttaacactccattttgaacattcagttcaggaactctgtattcattcattaaggcagggagtactgtaaagggtgaacatgtttctgcaacaatagctattgctacagtggtacaaactctgttctgcctttcttgaactttgaggttgttcagaagtgtagccaatacatcatgaggg

SEQ ID NO: 4885 - DNA, 133 bp, synthetic construct
  misc_feature 1..133: note = Description of artificial sequence: synthetic polynucleotide sequence
  source 1..133: mol_type = other DNA
cccaatggcctttgcaatataaccaaatgtgttgactgtggctctacgaatagcctttttgtgggcttttaagagctctaaaagctcaaagcaaatcctcatccactctcttgcagatacatattcagctccc

SEQ ID NO: 4886 - DNA, 121 bp, synthetic construct
  misc_feature 1..121: note = Description of artificial sequence: synthetic polynucleotide sequence
  source 1..121: mol_type = other DNA
ctgtcagcaatacgaccaacaagatcaatacaattctcttgtactttttcatgtctgttctttaagatgggggtgagtctaggcagcagatctttaattggtggagtcatcttatgcatac

SEQ ID NO: 4887 - DNA, 121 bp, synthetic construct
  misc_feature 1..121: note = Description of artificial sequence: synthetic polynucleotide sequence
  source 1..121: mol_type = other DNA
catacctatgacatttacaatggccttcagtgctccaagaatgctgcccaatacttcagggtactcttcacccaaatactcatacaatacaacacccaagtgtcccatcaatttttcctat

SEQ ID NO: 4888 - DNA, 184 bp, synthetic construct
  misc_feature 1..184: note = Description of artificial sequence: synthetic polynucleotide sequence
  source 1..184: mol_type = other DNA
cctcttgacaagtcttcatgacaacagcagttcgagaaatcaagtcagctgcctgttgcctaactttagcagatttgttatttaaacgccacaaaactgtaccacagatctgaggcaagtatggtttgactcgtttgccaagagcattaaccactgtgccaaagccgttcaacattactgagtc

SEQ ID NO: 4889 - DNA, 223 bp, synthetic construct
  misc_feature 1..223: note = Description of artificial sequence: synthetic polynucleotide sequence
  source 1..223: mol_type = other DNA
cctctgtagtctgttcttggaaagcataaagaataccatcaatcagttgttcttcaagtttatgatcaatatctgctgctcccaaattacccataattttctcaattgtctccatcaccatttttctgtactgttcggcttcatctttcagatcatccacaatcctggatataatttctgctgcacctactttgtttgccaactccacagtagtatcaactaa

SEQ ID NO: 4890 - DNA, 121 bp, synthetic construct
  misc_feature 1..121: note = Description of artificial sequence: synthetic polynucleotide sequence
  source 1..121: mol_type = other DNA
gtcggtaatttcttctatccaaagccatcctgtgctgccagaagtgtttaaaaaagggaggaagaatctctgttttaatgtagtttgcttctacaccatctgtcccacaacactgttttac

SEQ ID NO: 4891 - DNA, 148 bp, synthetic construct
  misc_feature 1..148: note = Description of artificial sequence: synthetic polynucleotide sequence
  source 1..148: mol_type = other DNA
ccttcagcacaatttttttcatttcctcatcaggagactggaattctcgaataaggattaacatcacttctctagtatagtagttggcatattctgcatccataagaggaataagatacccaatagccttcaagaaagcagccaaacc

SEQ ID NO: 4892 - DNA, 147 bp, synthetic construct
  misc_feature 1..147: note = Description of artificial sequence: synthetic polynucleotide sequence
  source 1..147: mol_type = other DNA
cctttcctctgtgttggcggatacccttccataaaggctttaacacagaatcaaaagattcgataccataaggagttgctgcttcagccaaggcagcaatggccaaagcactgatggtccgaactttctgctgctcatccacaagac

SEQ ID NO: 4893 - DNA, 272 bp, synthetic construct
  misc_feature 1..272: note = Description of artificial sequence: synthetic polynucleotide sequence
  source 1..272: mol_type = other DNA
ccatgttcaatgatttcaactaaacttctaagatgtggcaagatggcacagcccataagaatagctatctgttgtacaatcttaataccagtgtgtctcgcttgccaggacttcttgcttttgcacacagcttttaagaagggcaataaagaaggaatgcccagggcagaggctacaacagcaaaagctctagctgttgtgttacggacatactcatccatgttatctatatcaggtctcatggtagagatcatagtagccagaccagcagc

SEQ ID NO: 4894 - DNA, 121 bp, synthetic construct
  misc_feature 1..121: note = Description of artificial sequence: synthetic polynucleotide sequence
  source 1..121: mol_type = other DNA
aaattaaatgtaaatacctttgccaaattagaaatgatctctcggccttccactctagcatagtaatcttcatcaatcaatagcggttcaatgaccacgaggatctgaaaaagagaaaaga

SEQ ID NO: 4895 - DNA, 181 bp, synthetic construct
  misc_feature 1..181: note = Description of artificial sequence: synthetic polynucleotide sequence
  source 1..181: mol_type = other DNA
ccttatgcacatatggacgaactaagtcatcaagtttgtacagtatcctatcaataactttcacaagtaaatgacgctcttgatcctcaagtgtaggagacatcagcagaggaagaatctgattaaacaaaggaccagctccaaattcacgagctttatcagtaatctgacgcaatgcagc

SEQ ID NO: 4896 - DNA, 121 bp, synthetic construct
  misc_feature 1..121: note = Description of artificial sequence: synthetic polynucleotide sequence
  source 1..121: mol_type = other DNA
tgggacttacctttctcattggtggtgttccattcttaatttttaaaagcaacttcattatttttctctctttttgctcttctggactaagtgttgattcatcaacatcaacctatagtaa

SEQ ID NO: 4897 - DNA, 199 bp, synthetic construct
  misc_feature 1..199: note = Description of artificial sequence: synthetic polynucleotide sequence
  source 1..199: mol_type = other DNA
ccaatagtttatcaaagtattgaatatcatcaggttttaaaaatggaagatttccagatggctggtcattaacacttttcatagttcgatcttcagtttgcatgtggaaaccagtcataccacccaaaggtgttggagtagctgtcagctttcgagctggagttcgaataggaacataaccagctggaggaggaagtac

SEQ ID NO: 4898 - DNA, 121 bp, synthetic construct
  misc_feature 1..121: note = Description of artificial sequence: synthetic polynucleotide sequence
  source 1..121: mol_type = other DNA
cttatatccttctgggaacatagcatctaattcctcatcagaaagtgggcgatttctctcatcaatttctctttcccaccgccaagcctgaagctgttcaggagtcatactcattatgtga

SEQ ID NO: 4899 - DNA, 214 bp, synthetic construct
  misc_feature 1..214: note = Description of artificial sequence: synthetic polynucleotide sequence
  source 1..214: mol_type = other DNA
cctggagtaggggtagccatgttcatggctggtgtgccaattggtgtctttccaggggtcagaactggagtgcttccacccatctgactagctggtgtttcatcccaccgtgattttcttttactggctccaggagtcggtgtttcaccaatagaatctccacctcgatctgttcgaggagtctcagcccatccacttccatgcccaggagtat

SEQ ID NO: 4900 - DNA, 239 bp, synthetic construct
  misc_feature 1..239: note = Description of artificial sequence: synthetic polynucleotide sequence
  source 1..239: mol_type = other DNA
cctctctctgttttgggggtttcatcccatctgtttttacgagcactggaagttgcgcctccatggcctggtgtcgcatggcctggtgtatcacctcgtccaggagtagcagctcccgctggtgtgtggctaggtgtaggatcccatatttttgagcctggggttgctccaggagtctcgcttccctttgcacgacctggtgtctcatcccatcttaaggaaggagtatgcccaggggt

SEQ ID NO: 4901 - DNA, 172 bp, synthetic construct
  misc_feature 1..172: note = Description of artificial sequence: synthetic polynucleotide sequence
  source 1..172: mol_type = other DNA
cctctgcctgatcccaacttgatagttttttgggagtggcaccaggagtctgatcagctgtttgatcccaacgccgttttcgttttgatggaggctgggacgctgctgctccattgacgacttttagttctccagctttagctttttctgctagctgttgcctaatttctcg

SEQ ID NO: 4902 - DNA, 121 bp, synthetic construct
  misc_feature 1..121: note = Description of artificial sequence: synthetic polynucleotide sequence
  source 1..121: mol_type = other DNA
acaggagacaggtttacatacttcttctttagtcaagtgttgttctcgcattacatccatgtaagtcctagcattcattttaggatcaggggttttccctcctgcagaaaagaacagcaac

SEQ ID NO: 4903 - DNA, 121 bp, synthetic construct
  misc_feature 1..121: note = Description of artificial sequence: synthetic polynucleotide sequence
  source 1..121: mol_type = other DNA
atccggaatacgtacactttcgtgcctttgtctccatcagcagttctgacttcaagcagcagaatagaagcctagaaaattatctctttaccattagtaacactttggaaagatatttata

SEQ ID NO: 4904 - DNA, 166 bp, synthetic construct
  misc_feature 1..166: note = Description of artificial sequence: synthetic polynucleotide sequence
  source 1..166: mol_type = other DNA
cttaatacaaataaatttctgaatacttatagaaaagtgggaaagaattaccatctgcaaaaggatcaagacgctctggggaaattatcatggtccgcctatgctttttgtattcatcttcccggtctgcaatctttggaggtctgtgctcagcaaatggatcata

SEQ ID NO: 4905 - DNA, 121 bp, synthetic construct
  misc_feature 1..121: note = Description of artificial sequence: synthetic polynucleotide sequence
  source 1..121: mol_type = other DNA
aagatcacctgttctgttgactgtggtatatcattaagcaatgccacaggggcatgatatcctggcttcttctgaccaagcaaactcgtagatgatgaatagtcatcgtcatcctgcaatg

SEQ ID NO: 4906 - DNA, 168 bp, synthetic construct
  misc_feature 1..168: note = Description of artificial sequence: synthetic polynucleotide sequence
  source 1..168: mol_type = other DNA
catcttcaagttcagttgcagcaattgatgtcacgtatccagcaaatctgctgtcacttccaccataaatttcctggtcataataacctgtagaatcgaggcccactccttgagcttcatcaagagctgccttcttgccttgaatttctcgaatctgtgcttcaatat

SEQ ID NO: 4907 - DNA, 121 bp, synthetic construct
  misc_feature 1..121: note = Description of artificial sequence: synthetic polynucleotide sequence
  source 1..121: mol_type = other DNA
ttaggctagcaacgaagaaaacacgtaagcagggaaagaccgcttaccttcgtgagtcttggcgatcttcgccattttgtccactcgaacacacagacggaactggcgctcccaagaactt

SEQ ID NO: 4908 - DNA, 121 bp, synthetic construct
  misc_feature 1..121: note = Description of artificial sequence: synthetic polynucleotide sequence
  source 1..121: mol_type = other DNA
catttcccaaacttagttgaccccaagtccttttttccatcgcactcttgaaattagttattcctgggaaaggctttagaaaacattgctttagagattataggagaagcttccttcaaca

SEQ ID NO: 4909 - DNA, 121 bp, synthetic construct
  misc_feature 1..121: note = Description of artificial sequence: synthetic polynucleotide sequence
  source 1..121: mol_type = other DNA
aacaaatttctcaacaaaacatagcttttccttatgttccttatatttttttcagatggtctttataaacatgcaacgaaggacatgtaccaatcttatggtagatttgaccatgagattc

SEQ ID NO: 4910 - DNA, 121 bp, synthetic construct
  misc_feature 1..121: note = Description of artificial sequence: synthetic polynucleotide sequence
  source 1..121: mol_type = other DNA
tccaccccttgcaccactcaaatctatttctttatatgcattcagctcttccaggatcaaagtgtgcttgtctttctgcaggaaacttggtatggttaacaggacaaacgactgccactac

SEQ ID NO: 4911 - DNA, 121 bp, synthetic construct
  misc_feature 1..121: note = Description of artificial sequence: synthetic polynucleotide sequence
  source 1..121: mol_type = other DNA
atggaaatgcacaaaggggcacaggccgtcttcatggaccccaccttggctcaccaaaggtcatggtgccaaggggtcagctgggacagccatcacctttgactcttcctcctgacacaag

SEQ ID NO: 4912 - DNA, 121 bp, synthetic construct
  misc_feature 1..121: note = Description of artificial sequence: synthetic polynucleotide sequence
  source 1..121: mol_type = other DNA
tgtgtttttgttttggggggaattatcatcaggtatcttcagagaagattattccctgccttatcttcaaaaatcggaaaggaagggttaaaatatagtggcttatgttcatggcaagcac

SEQ ID NO: 4913 - DNA, 121 bp, synthetic construct
  misc_feature 1..121: note = Description of artificial sequence: synthetic polynucleotide sequence
  source 1..121: mol_type = other DNA
attaaatgactcttagtctcaaagggaaagtttggcttgtttgaatacaaatgacttattgttagatgataagtaaggcatgtctttaatttatgtttaactttgttctcagttaaaaagc

SEQ ID NO: 4914 - DNA, 121 bp, synthetic construct
  misc_feature 1..121: note = Description of artificial sequence: synthetic polynucleotide sequence
  source 1..121: mol_type = other DNA
agagaaggaaatggcagatcagacatgtattgaagaatttgtgatccacgcattggcattttgtgaaagcttatatgatccatatcggaattggagacatagaatttcagggtatgtctta

SEQ ID NO: 4915 - DNA, 121 bp, synthetic construct
  misc_feature 1..121: note = Description of artificial sequence: synthetic polynucleotide sequence
  source 1..121: mol_type = other DNA
ggagtagcttagaaaaattatgaaagtgatgtttagcatggatgaatgttgatgtggtaaataagatgagtagtagagttacagagacagaggtgggtcaagagcaagttggaggcaattg

SEQ ID NO: 4916 - DNA, 121 bp, synthetic construct
  misc_feature 1..121: note = Description of artificial sequence: synthetic polynucleotide sequence
  source 1..121: mol_type = other DNA
tgtgtacttgagtatctcagcaactgaggaccggaagcgagcttggaacttcttactaattaggacataaaggatggggttcaagcaactattgaggaatgccaaaccagtggagaggggg

SEQ ID NO: 4917 - DNA, 121 bp, synthetic construct
  misc_feature 1..121: note = Description of artificial sequence: synthetic polynucleotide sequence
  source 1..121: mol_type = other DNA
agaagccagtcttcggaaggatccaagaaatgctggcctaaaaggtaagagctgtcagtctagtgcttctgcagtggattttggtgcctcttccaagtcagcgctccatcgaagggctgat

SEQ ID NO: 4918 - DNA, 121 bp, synthetic construct
  misc_feature 1..121: note = Description of artificial sequence: synthetic polynucleotide sequence
  source 1..121: mol_type = other DNA
acgttcgaagctaaaacatagagatctagaagtgagctgtgaaccggatggttttgagatgaattttcagtgtgctccccctcttccatctgatactgatcagcctcaagaaactgttaag

SEQ ID NO: 4919 - DNA, 121 bp, synthetic construct
  misc_feature 1..121: note = Description of artificial sequence: synthetic polynucleotide sequence
  source 1..121: mol_type = other DNA
ttggttttaacatttgaccccctttttttccattaacacacacacaagttagctttctggtttttaccgcaggaaaataccagacttattttttaaattttgtcatttactgtctcacttc

SEQ ID NO: 4920 - DNA, 121 bp, synthetic construct
  misc_feature 1..121: note = Description of artificial sequence: synthetic polynucleotide sequence
  source 1..121: mol_type = other DNA
catttccaccacctttatacccatttcctctaaatccatagaacctaatagtaatagtcgacacttggtgagcacttactctgcgccaggcagtgtgttaagtgtttatggtaattttatc

SEQ ID NO: 4921 - DNA, 121 bp, synthetic construct
  misc_feature 1..121: note = Description of artificial sequence: synthetic polynucleotide sequence
  source 1..121: mol_type = other DNA
agctcaggtatgaacttaaagtttggcctgagctagtttgatcttcaagttttctccaagtttatccatgaactcaaatgtattcaagtagtcagaacgttgcacactaacgggaaggaaa

SEQ ID NO: 4922 - DNA, 164 bp, synthetic construct
  misc_feature 1..164: note = Description of artificial sequence: synthetic polynucleotide sequence
  source 1..164: mol_type = other DNA
cttgggtaaacctttaatgcaagcagccaagtccttggtcatgaagccagcctcaattgtctcaatagagacttcttccaaagcatttgcaaagaaggcaagctctttattgttatcaagctttgctctgtgggctaaccctctggtccaggcaaaaatggaag

SEQ ID NO: 4923 - DNA, 142 bp, synthetic construct
  misc_feature 1..142: note = Description of artificial sequence: synthetic polynucleotide sequence
  source 1..142: mol_type = other DNA
ccaatgggattggtggacgtctcctgtcctttctggtacatgcggtagtgacgggttacagtcccgtgggcagcctctgcttctactgtcttgccatctggacaaaccagcacgctggtcatcatgccgagagagccatacc

SEQ ID NO: 4924 - DNA, 153 bp, synthetic construct
  misc_feature 1..153: note = Description of artificial sequence: synthetic polynucleotide sequence
  source 1..153: mol_type = other DNA
ccttgggccacagagtccgactgcacgtcaccatcatagtttttacaggcccagatgaagcctccctctgatttcatagcttgggccaccatgtcgtcgatgagcctatgctcataccagatcttttgagcttcaaactgggacttgtactgc

SEQ ID NO: 4925 - DNA, 179 bp, synthetic construct
  misc_feature 1..179: note = Description of artificial sequence: synthetic polynucleotide sequence
  source 1..179: mol_type = other DNA
cttgtcatatatctcctgaaagatgtctttaaaacgcccatcatatttcttcagaatagtgtttttggtgctcagatacaaaggccaacccttagacagagccatttggaaggaactgtgtgcaaaatcttcaattgacttatcttgattatacatccccatggcaacaccaccacctt

SEQ ID NO: 4926 - DNA, 121 bp, synthetic construct
  misc_feature 1..121: note = Description of artificial sequence: synthetic polynucleotide sequence
  source 1..121: mol_type = other DNA
atacataccttcaaagttatgtaccaggtatgtcaccttttgggttccgtcacttggtgtgtaggttatctctacttttccaggcccaggaacaacaaaatcagttgctctgtactgtgta

SEQ ID NO: 4927 - DNA, 293 bp, synthetic construct
  misc_feature 1..293: note = Description of artificial sequence: synthetic polynucleotide sequence
  source 1..293: mol_type = other DNA
cttgatccccataagcatgacgacctatgatgataggttttacccatccactcacaagccgggggatatttttgcagataatggcttctctgaagaccgtgccacccagaatatttcgtatggtgccatttggtgatttccacatttgtttcaacttgaactcctcaaccctcttctcatcaggagtgatagtggcacatttgacgccaacattatgcttctttatagcttctgcagcatccttggtgacttggtcgttggtggcatcacgattctctatgcctaaatcatag

SEQ ID NO: 4928 - DNA, 121 bp, synthetic construct
  misc_feature 1..121: note = Description of artificial sequence: synthetic polynucleotide sequence
  source 1..121: mol_type = other DNA
ctatgtagatccaattccacgtagggaaaaatgagtttctctttaatcaattcccaaatgattcgtgtcatttcatctccttgcatctctaccacagaaccgccactgatttttttggaca

SEQ ID NO: 4929 - DNA, 121 bp, synthetic construct
  misc_feature 1..121: note = Description of artificial sequence: synthetic polynucleotide sequence
  source 1..121: mol_type = other DNA
gaggtttttcattgttatttacctaaaataaccaggccatcaatttcctttttacatattcattaaggggtcaagttgtttgcagggagaaaatttgtcctattatacatatcttgattgt

SEQ ID NO: 4930 - DNA, 447 bp, synthetic construct
  misc_feature 1..447: note = Description of artificial sequence: synthetic polynucleotide sequence
  source 1..447: mol_type = other DNA
cttacaccacagtattccggtgtctgtaaggtggaggcggcagcacagtgcctggcttcagggagaactcagagaggtattcaggattctctgccacaataggccggatccgcccattctgtttataaaaatattttgtgctgtactcctgcaggtagtctgggtgctgaagggtgctccgaggtggcaggctgtggttccagtagtcagggttgtcaaacgctttcttggccttctctggcattgacagtatgttgttcttcaggtactcagcttttcccaaggtgttggcaaaggtgttgaggtacagtggctcattcacatactcatcctcggccttgggtggaccattggatgcattgtgatattcgggattatccaatgcttgaaggtctccattttttctccgagaaacaaaagggttctcctccactggattcaggtatt

SEQ ID NO: 4931 - DNA, 299 bp, synthetic construct
  misc_feature 1..299: note = Description of artificial sequence: synthetic polynucleotide sequence
  source 1..299: mol_type = other DNA
ccttgtttgggtttgtctcgcataggagtcatgtaaccttcctcatccagctctcctcgtgggctccgttctggggcaaacacggtggggtcagcactgtacctctgggtgctactgtcctcttggacatggggtgccactggcttgcgtagggtgccattacagcaggagtcatcaaaaatctcagcagtagcaccctgtgccacaggagcttctggaattgtgctagttggggctctgtagggcacagacactccttgttcagcagcaaaacctccatctcggtatacaaactggtt

SEQ ID NO: 4932 - DNA, 121 bp, synthetic construct
  misc_feature 1..121: note = Description of artificial sequence: synthetic polynucleotide sequence
  source 1..121: mol_type = other DNA
aatcctaaaagatgaaggttgattgtgaaatacttactcctgacatgggggtgtaggcaggaggagggctgtgtccaatttcactctaataggaaagaaaaatggaatgatggatataata

SEQ ID NO: 4933 - DNA, 172 bp, synthetic construct
  misc_feature 1..172: note = Description of artificial sequence: synthetic polynucleotide sequence
  source 1..172: mol_type = other DNA
ccctattcgagtcaattcttgctctggaagtatagatgggaggtgggatgttgaaagcctgagggaccaagtactcctcagcatccatcatatcttccaaatcctcttcatccaagagattctgaaagaacttgctgtcatttggactgggaagcttcatacgatcatcacc

SEQ ID NO: 4934 - DNA, 121 bp, synthetic construct
  misc_feature 1..121: note = Description of artificial sequence: synthetic polynucleotide sequence
  source 1..121: mol_type = other DNA
aaatgtactcacctgaataactaggtatctttgagggtctcgagccatccttgaaaactcagcagccagttccttaaatttaggtctactgtcagcatcaatcatccaacctggaaattta

SEQ ID NO: 4935 - DNA, 148 bp, synthetic construct
  misc_feature 1..148: note = Description of artificial sequence: synthetic polynucleotide sequence
  source 1..148: mol_type = other DNA
catttgaccatgaccatgtaaacgtcaatagtgcagatgggaggctgaggcaaacgttctcctttctctaataaatcagggatttctcgcgttggaattccatcatagggttttcctccaaaggtcatcagttcccatatagtaactc

SEQ ID NO: 4936 - DNA, 121 bp, synthetic construct
  misc_feature 1..121: note = Description of artificial sequence: synthetic polynucleotide sequence
  source 1..121: mol_type = other DNA
attcgcaaagaagatttatttaccatagctccaaacgtcactctgatgggtgaatttcctgtaatgtatacactccagagccatccatttaattggcatctatagagaagtaagaagtaaa

SEQ ID NO: 4937 - DNA, 157 bp, synthetic construct
  misc_feature 1..157: note = Description of artificial sequence: synthetic polynucleotide sequence
  source 1..157: mol_type = other DNA
cctttcctccatcagcattgtactctttttcatctccttccaagagtctggctagcccaaaatctgtgattttcacatggtttggagatttcactaagacattacgggctgccaaatcccgatgaacgagtcgtctttcttccaggtacatcattcc

SEQ ID NO: 4938 - DNA, 187 bp, synthetic construct
  misc_feature 1..187: note = Description of artificial sequence: synthetic polynucleotide sequence
  source 1..187: mol_type = other DNA
ccttagctatctggacacaccagttaagcagcagttgtgatccaatgttatccttgtgctcgtggacatactccaacaggcagccatggggcataagttgagtaaccagctggatggttgggctcagacacacacccagcaaccggactaggtgtggatgatccatacttgccatgatcagagcttc

SEQ ID NO: 4939 - DNA, 121 bp, synthetic construct
  misc_feature 1..121: note = Description of artificial sequence: synthetic polynucleotide sequence
  source 1..121: mol_type = other DNA
tctgtacttacatccatgaactccacatttgccttgggaccagttgtctcattaagaatcttaatagccacaggaatcttcacagtttctccttcaggtacccaaataccctttggggaaa

SEQ ID NO: 4940 - DNA, 121 bp, synthetic construct
  misc_feature 1..121: note = Description of artificial sequence: synthetic polynucleotide sequence
  source 1..121: mol_type = other DNA
ttataaaccgttccaaaagcacctgagccaaggacttttaccctcttcagctcagtttctttcaaaatacgaagttgagcttgattgggtgctgtgccactgggagttaatggttccacca

SEQ ID NO: 4941 - DNA, 134 bp, synthetic construct
  misc_feature 1..134: note = Description of artificial sequence: synthetic polynucleotide sequence
  source 1..134: mol_type = other DNA
cctctgtttccaagaatcttctcaaggctcttttctttttgatgctcttccttctaacataaacagcaaatgtcagacccacaatgaccagaatgaagagcccaccaattactccagctgcaatcaggggagtt

SEQ ID NO: 4942 - DNA, 121 bp, synthetic construct
  misc_feature 1..121: note = Description of artificial sequence: synthetic polynucleotide sequence
  source 1..121: mol_type = other DNA
aatggaaacatggtagatgttacctagcatgttgtggtaaagtggaatggcccgtccatgggtagtaaatgcagtcatgactagtgggaccgttacacctgcaggcaattacagaacagaa

SEQ ID NO: 4943 - DNA, 156 bp, synthetic construct
  misc_feature 1..156: note = Description of artificial sequence: synthetic polynucleotide sequence
  source 1..156: mol_type = other DNA
cccttgggtgcagtttggatggcatgggtggcactcccgatctggatcagcatacttgaaaatgaaactgtttgccccctgtaagccatctggacatttttccacacagtttgggccatctttaaaatgagagcactttgtacagttgtcaggacc

SEQ ID NO: 4944 - DNA, 121 bp, synthetic construct
  misc_feature 1..121: note = Description of artificial sequence: synthetic polynucleotide sequence
  source 1..121: mol_type = other DNA
gtcttcaggcttaccggtccatggcatgtgaggaggccatcttccatcttctcacactgggggtcacactccacacagatggagccattctcaaactcccgaaattcactgtgaaaacatc

SEQ ID NO: 4945 - DNA, 134 bp, synthetic construct
  misc_feature 1..134: note = Description of artificial sequence: synthetic polynucleotide sequence
  source 1..134: mol_type = other DNA
cccatcatagaggttacaagactctatgcagatccttcctctactgaagcggcgacacgacagacattggtctggcccaggtccccaacagccatcactggaacacagatggttgcacaccattccttcagcag

SEQ ID NO: 4946 - DNA, 201 bp, synthetic construct
  misc_feature 1..201: note = Description of artificial sequence: synthetic polynucleotide sequence
  source 1..201: mol_type = other DNA
ctacaattttcagcttttctgttgtcccggattactattctctggttgattgtgctgaagagtgttgtccagttaatggtatgataataacacaggttgctgttgtcagtaatatagatgtttcctgcgctgatttccttcagggactggaactgtagagaggtgatgccctgttgcttgaggataagcaaggacaggcca

SEQ ID NO: 4947 - DNA, 121 bp, synthetic construct
  misc_feature 1..121: note = Description of artificial sequence: synthetic polynucleotide sequence
  source 1..121: mol_type = other DNA
aacatatccacttacctatagagtactcttccaccaatggtcaccaggttagaaaaaacactgaagtcagtcatgtttggtggccatgactgtatgttcaggaaacctacaagtgaagagt

SEQ ID NO: 4948 - DNA, 121 bp, synthetic construct
  misc_feature 1..121: note = Description of artificial sequence: synthetic polynucleotide sequence
  source 1..121: mol_type = other DNA
aacagttgcagtttaaaaaattacctgttatctctctgactgtccgaaagacgttcagtttctctgggtctatggcttcaattgcattgtaagggtccctagaaaatcaagaagagatgta

SEQ ID NO: 4949 - DNA, 121 bp, synthetic construct
  misc_feature 1..121: note = Description of artificial sequence: synthetic polynucleotide sequence
  source 1..121: mol_type = other DNA
tgaataccagtgactagaaagatcaaattcccattgatcttggtacagtttatgaatttgtcaatgttactggaatccacagtctgagctgacatcaatgatcctgtgccaatgccatcac

SEQ ID NO: 4950 - DNA, 121 bp, synthetic construct
  misc_feature 1..121: note = Description of artificial sequence: synthetic polynucleotide sequence
  source 1..121: mol_type = other DNA
tcaccttttgggcaaatgtcagtgcaaggtttacacattttaatcccattttcttctacttccatcttggaactagggcaggcacgcacacaagaactggaatctaccacaaagttatctg

SEQ ID NO: 4951 - DNA, 143 bp, synthetic construct
  misc_feature 1..143: note = Description of artificial sequence: synthetic polynucleotide sequence
  source 1..143: mol_type = other DNA
cgtggacatttcttgacacagaatgctccatatgtgtactttgcattgaaattgtgctccagttgaaaggtggttggattgtagacaaaggtttggggacactgagtaacacatgctccactgtcattgaaattcatgcaggc

SEQ ID NO: 4952 - DNA, 121 bp, synthetic construct
  misc_feature 1..121: note = Description of artificial sequence: synthetic polynucleotide sequence
  source 1..121: mol_type = other DNA
caaagcagtctgtgtccttaggtcctgagcagcctccagcacattctcgatggcagcagtcactgacgtaaggtccgtagcatctgccgtcacattgttctgcacacaccgtccttgtcac

SEQ ID NO: 4953 - DNA, 121 bp, synthetic construct
  misc_feature 1..121: note = Description of artificial sequence: synthetic polynucleotide sequence
  source 1..121: mol_type = other DNA
ctgtgtgctctcactgatgaacacttacaagtctggcaatgattttctgtgggtccccagcaacggccagtacaggacttatggcaacgtccacctgcagaacacgaaaagggaaaaagga

SEQ ID NO: 4954 - DNA, 136 bp, synthetic construct
  misc_feature 1..136: note = Description of artificial sequence: synthetic polynucleotide sequence
  source 1..136: mol_type = other DNA
catcctgaactaccatttgttgacacaagagtcaagttggaaggccatgggttccgaacaatatcttgccaatgaatggtgtctgcataacaaaggaatttgttctggtctacatagactccaccatttaggattt

SEQ ID NO: 4955 - DNA, 188 bp, synthetic construct
  misc_feature 1..188: note = Description of artificial sequence: synthetic polynucleotide sequence
  source 1..188: mol_type = other DNA
cctgtcaagttctttaatccaagttcttgaagtccaaagtttccatcttttctgtagtttaaaaatattgccaaggcatatcgatcctcataaagttttgtcccacgaataatgcgtaaattctccagaggcaggtaacgaaactgattaagagccactaacacgtagcctgtgacttctcgaacaga

SEQ ID NO: 4956 - DNA, 153 bp, synthetic construct
  misc_feature 1..153: note = Description of artificial sequence: synthetic polynucleotide sequence
  source 1..153: mol_type = other DNA
cccgcaggaaggagaggtcccggttgtgctcaatgctggttatctccaggttgcccatgacaacctcacagttttcatagtacttgcgcaaggctcggtactgctgttccaggtcagagagagagctcagtttattctccgttcctgcacaca

SEQ ID NO: 4957 - DNA, 121 bp, synthetic construct
  misc_feature 1..121: note = Description of artificial sequence: synthetic polynucleotide sequence
  source 1..121: mol_type = other DNA
gagtgccagaaggaacccacctgactgagaatcgctgggctggacggtccccgccgccacgagaaggctcacccagacccaaagtcctgtcgccggcttcattttttggaagtctcagatc

SEQ ID NO: 4958 - DNA, 121 bp, synthetic construct
  misc_feature 1..121: note = Description of artificial sequence: synthetic polynucleotide sequence
  source 1..121: mol_type = other DNA
ggtttaaaatgctcattggttcacttcagcaaatcacaaactgaccatggtcaaagagaaaagattaaggtgacacagcaattgcaggagagtccagaactctgaggcacctgtaactctt

SEQ ID NO: 4959 - DNA, 121 bp, synthetic construct
  misc_feature 1..121: note = Description of artificial sequence: synthetic polynucleotide sequence
  source 1..121: mol_type = other DNA
tataggaattactttgggtagccacaatcccacaaaaagtaacatgccatggatgccaattgggcaaaagctgccaggaaccagttcaaccaccttagaaaaggcacagatatgggaaact

SEQ ID NO: 4960 - DNA, 121 bp, synthetic construct
  misc_feature 1..121: note = Description of artificial sequence: synthetic polynucleotide sequence
  source 1..121: mol_type = other DNA
agaaaattatccgcatcttactctgggtgttggtttcataggcatgtgcagacataaaagttcaatgagctgcgtacctacaatttgtaccctttgttgcatacgttaacataaaataagt

SEQ ID NO: 4961 - DNA, 121 bp, synthetic construct
  misc_feature 1..121: note = Description of artificial sequence: synthetic polynucleotide sequence
  source 1..121: mol_type = other DNA
cccgggtttccatgccactttttcctcttgctcttttaggcttggaggtaacagcagcttcagttacgatgctttttcttttcgtttttttgagatgaagtttcactcttttgctgaggct

SEQ ID NO: 4962 - DNA, 121 bp, synthetic construct
  misc_feature 1..121: note = Description of artificial sequence: synthetic polynucleotide sequence
  source 1..121: mol_type = other DNA
tatcaatagctgaataattctgagcttagtaatcagcatatgggaggcctccactaagtgtctgtcaagctgaatccatccacaatctcaggaagatgctaccagtaatttgcaccttcag

SEQ ID NO: 4963 - DNA, 121 bp, synthetic construct
  misc_feature 1..121: note = Description of artificial sequence: synthetic polynucleotide sequence
  source 1..121: mol_type = other DNA
gcattactatgtacatattgcacttgtatatataaatgtgtgctggcacatgcatacaaacttaggaatgtcacctgctgtgggaggaaagcctggagtcaggagtggggagactcaggga

SEQ ID NO: 4964 - DNA, 121 bp, synthetic construct
  misc_feature 1..121: note = Description of artificial sequence: synthetic polynucleotide sequence
  source 1..121: mol_type = other DNA
accctgggtgtatgcattcttctccctttcattttgagtgggtattttgcccagaactctgtcttgggggtttcttgtcctcacttcttcataattaagtaaggcccttccttattcatcc

SEQ ID NO: 4965 - DNA, 121 bp, synthetic construct
  misc_feature 1..121: note = Description of artificial sequence: synthetic polynucleotide sequence
  source 1..121: mol_type = other DNA
ggaggcaggtaattgacaatctaattagtctcatttcaattaccatttttctcttcattcgagcagttagttggagagtagagaaggtttgtaaaatattctaagaccatgcattttcaag

SEQ ID NO: 4966 - DNA, 121 bp, synthetic construct
  misc_feature 1..121: note = Description of artificial sequence: synthetic polynucleotide sequence
  source 1..121: mol_type = other DNA
aagctaataaaataaagatcctaattccacaagggtggaatcaacacatcaactctgccgattacatcatgggtttattccatcttcccaaggcttgcattctttctattgagtttgatgt

SEQ ID NO: 4967 - DNA, 121 bp, synthetic construct
  misc_feature 1..121: note = Description of artificial sequence: synthetic polynucleotide sequence
  source 1..121: mol_type = other DNA
cacacacactggtaagtaggtgaggtgatggatgtatgaacaaaattgattgtggtcatcattttttcacaatatatacatatatcaaatcctaatattgtacatcttaaactgatagagt

SEQ ID NO: 4968 - DNA, 121 bp, synthetic construct
  misc_feature 1..121: note = Description of artificial sequence: synthetic polynucleotide sequence
  source 1..121: mol_type = other DNA
gcggttgagtggctgaggcaccgcctgactttggataagccacaagctacttttgactcatttctccaaatgcaaaaggcaggtggggtttttttttgagaatcttgctctgtcgcccagg

SEQ ID NO: 4969 - DNA, 121 bp, synthetic construct
  misc_feature 1..121: note = Description of artificial sequence: synthetic polynucleotide sequence
  source 1..121: mol_type = other DNA
aaatctcctaagtgaataggcaagaaagtagcaactgttactgctaataaggccagcactggaaagttatagcacaaatttctttgtcctgcccaagtctctttctaggtgtatttattga

SEQ ID NO: 4970 - DNA, 121 bp, synthetic construct
  misc_feature 1..121: note = Description of artificial sequence: synthetic polynucleotide sequence
  source 1..121: mol_type = other DNA
ccccacctttggcctgaatttcccatccctgagagcaatgtgacgacaacgctcacgttatatagctgggtacagcgtcccgtgcattctttcaattgattagcttaataattctttaaga

SEQ ID NO: 4971 - DNA, 121 bp, synthetic construct
  misc_feature 1..121: note = Description of artificial sequence: synthetic polynucleotide sequence
  source 1..121: mol_type = other DNA
ctcacttcaaccaaacacttgtgtgtgaagaagtcagaaccccacctaaattcaagcttagcggacatagacactagtcaattggagaagtgtcgaaaaatcagctgcattaaaaaaaatc

SEQ ID NO: 4972 - DNA, 121 bp, synthetic construct
  misc_feature 1..121: note = Description of artificial sequence: synthetic polynucleotide sequence
  source 1..121: mol_type = other DNA
cctgtaaataatttttaaagaggcaacctcgatgggcactgatcagtgaaacagaggtcattagagcgcttgctatctgaaggcggaaatcctccatccactgggcaacactagcccttga

SEQ ID NO: 4973 - DNA, 121 bp, synthetic construct
  misc_feature 1..121: note = Description of artificial sequence: synthetic polynucleotide sequence
  source 1..121: mol_type = other DNA
tcatcttcatcctcatcctcgtcctcgtcatcctcctcatcctcctcactgtcatcatcctcctcttcatcactgtcttccttcttggcattcttgccattctttgcccccttggctggga

SEQ ID NO: 4974 - DNA, 121 bp, synthetic construct
  misc_feature 1..121: note = Description of artificial sequence: synthetic polynucleotide sequence
  source 1..121: mol_type = other DNA
aagtgtgaggtctgtgtggagtggggcagaccatgatgaggtgggtaggactgtggcccttgcattcaggattcaggactttttgtacttgccactatgatttatttcgcccatgagtttt

SEQ ID NO: 4975 - DNA, 121 bp, synthetic construct
  misc_feature 1..121: note = Description of artificial sequence: synthetic polynucleotide sequence
  source 1..121: mol_type = other DNA
agccagtgagggggctatgaggggttgaaatcaggttgccacaggcttgataagccattgtcaaatcactcgatcttgtaagtcgttgggtgtttagcaaggaaatggttgctttgcagga

SEQ ID NO: 4976 - DNA, 121 bp, synthetic construct
  misc_feature 1..121: note = Description of artificial sequence: synthetic polynucleotide sequence
  source 1..121: mol_type = other DNA
gctactacataatgaggccctgatcaggcacctgaatgctacttcctttgatgtggttttaacagaccccgttaacctctgcgcggcagtgctggctaagtacctgtcgattcctactgtg

SEQ ID NO: 4977 - DNA, 121 bp, synthetic construct
  misc_feature 1..121: note = Description of artificial sequence: synthetic polynucleotide sequence
  source 1..121: mol_type = other DNA
tgaggaacattccatgtgatttagactttaagggcacacagtgtccaaacccttcctcctatattcctagattactaacaaccaattcagaccacatgacattcatgcaaagggtcaagaa

SEQ ID NO: 4978 - DNA, 121 bp, synthetic construct
  misc_feature 1..121: note = Description of artificial sequence: synthetic polynucleotide sequence
  source 1..121: mol_type = other DNA
caggttccttccttcaaggctctacagctatggaccccagaggatcagttgttttaatattaaagcagctgcatttgcacaggagggtcagatactataatcttcatacccagagttacat

SEQ ID NO: 4979 - DNA, 121 bp, synthetic construct
  misc_feature 1..121: note = Description of artificial sequence: synthetic polynucleotide sequence
  source 1..121: mol_type = other DNA
actttggcaagacatgcattccagagggtgggaaagtaaccctataaagattcagggacttgttatatgggttacctttttaggtgaccaatggtatggggtattctagaactttcactcc

SEQ ID NO: 4980 - DNA, 121 bp, synthetic construct
  misc_feature 1..121: note = Description of artificial sequence: synthetic polynucleotide sequence
  source 1..121: mol_type = other DNA
gttaaaatgtgttccatgaaaacgcagtcctaccagacattctttaaaacacagtttgtagtcagatgagcttcggaaacagcgcatattatattctcctcctggagattcgtaattcaca

SEQ ID NO: 4981 - DNA, 121 bp, synthetic construct
  misc_feature 1..121: note = Description of artificial sequence: synthetic polynucleotide sequence
  source 1..121: mol_type = other DNA
attttggctactgaaaatgactgagtcctctaatgttgatattatcagaacagagttgttatcaaagtcagctaactaaaggatctgcttcaaaacattaaagagaaattttacaagtttc

SEQ ID NO: 4982 - DNA, 121 bp, synthetic construct
  misc_feature 1..121: note = Description of artificial sequence: synthetic polynucleotide sequence
  source 1..121: mol_type = other DNA
ggagttcctgataacgattctgaaggaaaatctggaggcaattcatgatgccctggcatgaaagaaggctccaactgggcttcttttctgtgttttccaaggcttggaaaggaatcacaca

SEQ ID NO: 4983 - DNA, 121 bp, synthetic construct
  misc_feature 1..121: note = Description of artificial sequence: synthetic polynucleotide sequence
  source 1..121: mol_type = other DNA
accctcatccccatttccctcgagctctgggtacttctgagcagatgtgtttgagaggatgtttacacgcgcgttccaggcttcatgtgcgtcttccactctgtccacactggggcttgct

SEQ ID NO: 4984 - DNA, 121 bp, synthetic construct
  misc_feature 1..121: note = Description of artificial sequence: synthetic polynucleotide sequence
  source 1..121: mol_type = other DNA
actggccaagttcctctcaaaattgactagtgctgaagagtaacgccccgctataagatggtgcaggtcagcatccacatctctctatggccttcaccagcctggggctgtcccaggcctt

SEQ ID NO: 4985 - DNA, 121 bp, synthetic construct
  misc_feature 1..121: note = Description of artificial sequence: synthetic polynucleotide sequence
  source 1..121: mol_type = other DNA
cacaatcacctgatcaacgcacttcaggttgtccttaaccacgttcttgctgttttcatcccagcgatacggtcctgccagacggtctaggcagatgccctgaggccagggtttccctgca

SEQ ID NO: 4986 - DNA, 241 bp, synthetic construct
  misc_feature 1..241: note = Description of artificial sequence: synthetic polynucleotide sequence
  source 1..241: mol_type = other DNA
gtcagaggggccaagagcagtgtccatcctcaggcctcagtggctgggcactccgagggccgtcagctgagcccctgcgggcgggggatgaggtgcccattccgctaggaaagacaatggtggcatactccgtctgctcagggacacagggcacggggggctccggggtcttctctcgccactggaaatccagctccccatagtccacagagaacacaggcacggctgaggggtcctcctt

SEQ ID NO: 4987 - DNA, 121 bp, synthetic construct
  misc_feature 1..121: note = Description of artificial sequence: synthetic polynucleotide sequence
  source 1..121: mol_type = other DNA
aaggaaggcacagtggatcatgcaggaaaagagtgagactcaccaggggctggccggtgcgcctggctcctattgtccctgcagagaaacacacttggggtcaccaggccgaccctgagcc

SEQ ID NO: 4988 - DNA, 157 bp, synthetic construct
  misc_feature 1..157: note = Description of artificial sequence: synthetic polynucleotide sequence
  source 1..157: mol_type = other DNA
cctcgtgcggcccgggagcagatgacggccaggacccagactagcagcaccaggctgcccagcaggccgcccacgacaccaaccaccagggtttggaactggccggctggcctgggtgaggggctggggtgggctgtgggcacttctgcccttctct

SEQ ID NO: 4989 - DNA, 361 bp, synthetic construct
  misc_feature 1..361: note = Description of artificial sequence: synthetic polynucleotide sequence
  source 1..361: mol_type = other DNA
cctgtcaccctgagctctgcccgcaggctctctttgatctgcgccttgggggccagggagatggccccacagaggtaggtgccgctgtcattgcgccgggccctgaccacgctcatgtggaagtcacgcccgttgggcagttgtgtgacacggaagcggcagtcctggccgggctggctgcggtcctcggggaaggcggccagcttgtccgtctggttgctggggctcatgcggtaccagtttagcacgaagctctccgatgtgttggagaagctgcaggtgaaggtggcgttgtccccttcggtcaccacgagcagggctggggagaaggtgggggggttccagggcctgtctggggagt

SEQ ID NO: 4990 - DNA, 121 bp, synthetic construct
  misc_feature 1..121: note = Description of artificial sequence: synthetic polynucleotide sequence
  source 1..121: mol_type = other DNA
acctgaccgccgaccccacctacctaagaaccatcctggccgccagcccagttgtagcaccgcccagacgactggccagggcgcctgtgggatctgcatgcctggagcagccccaccagag

SEQ ID NO: 4991 - DNA, 121 bp, synthetic construct
  misc_feature 1..121: note = Description of artificial sequence: synthetic polynucleotide sequence
  source 1..121: mol_type = other DNA
atgtggggaatcaagttcacagaaggaagcagatgaatcttttgctgcaggctgctggattaggcagcactttttatttaggaagagtggagaccagcgagacaagggctagatttaggat

SEQ ID NO: 4992 - DNA, 121 bp, synthetic construct
  misc_feature 1..121: note = Description of artificial sequence: synthetic polynucleotide sequence
  source 1..121: mol_type = other DNA
acttctctaaaaaagtagtctattaaacataaaaaacaaaatgaaaacccccacacattgtgtttatatgtaaaatagaattcggtccttggctcagataattaaaaacaaggtttttacc

SEQ ID NO: 4993 - DNA, 121 bp, synthetic construct
  misc_feature 1..121: note = Description of artificial sequence: synthetic polynucleotide sequence
  source 1..121: mol_type = other DNA
ttaagccaccttatctgtagtaattttgtacaacagcctccggaaactaaaacacatacgcccagaaatgtgcccaagtctgtctggccccagtagctctgctgtttgctctgtactgtgg

SEQ ID NO: 4994 - DNA, 121 bp, synthetic construct
  misc_feature 1..121: note = Description of artificial sequence: synthetic polynucleotide sequence
  source 1..121: mol_type = other DNA
taaaataggccttggttctcctgggcagatgatggttctcctgttctagacctcgtatcgtctacagtattgactaagggaagagaaaaggcatgcgttggtaggctttatagggggaaaa

SEQ ID NO: 4995 - DNA, 121 bp, synthetic construct
  misc_feature 1..121: note = Description of artificial sequence: synthetic polynucleotide sequence
  source 1..121: mol_type = other DNA
tttttctcctaggaattttatggtgttagctcttcagtgcagggtttgatccattgcgaattaatttttggatacggtgcaacaaaaggatccggctgcattcttttgcatgtgcacacta

SEQ ID NO: 4996 - DNA, 121 bp, synthetic construct
  misc_feature 1..121: note = Description of artificial sequence: synthetic polynucleotide sequence
  source 1..121: mol_type = other DNA
actattagcttaccacagtttgccagtagttatatgacagtgttttaagccatgcaggcgttgaattttaccaaatgtgttttcattgcatcaactattgccactgtaatattgtgtaatg

SEQ ID NO: 4997 - DNA, 121 bp, synthetic construct
  misc_feature 1..121: note = Description of artificial sequence: synthetic polynucleotide sequence
  source 1..121: mol_type = other DNA
tctttcccacattatggtccttaacctattaaattttaatgagtattttatttatctaaaccccgagcatacttgaaagcagtgattatatctttcattgttatatccttggcatagggct

SEQ ID NO: 4998 - DNA, 121 bp, synthetic construct
  misc_feature 1..121: note = Description of artificial sequence: synthetic polynucleotide sequence
  source 1..121: mol_type = other DNA
aatgtcaaaagtgttctgtttagatgtgttacttttgagatgcctgtaagaactttctcgtggagatgtcagtaagtggttggaaatatgaatctgaagcttgggggagaagttggggttg

SEQ ID NO: 4999 - DNA, 121 bp, synthetic construct
  misc_feature 1..121: note = Description of artificial sequence: synthetic polynucleotide sequence
  source 1..121: mol_type = other DNA
taagattgtcataattggcatagaccagtgtagatctatcactgatctggacacattgattcagcccaaatcaagttctgttagcaaggaagatgggaaaatggttttgggtaaaaaatgg

SEQ ID NO: 5000 - DNA, 121 bp, synthetic construct
  misc_feature 1..121: note = Description of artificial sequence: synthetic polynucleotide sequence
  source 1..121: mol_type = other DNA
tgtttggacctaaatatctcatattttcaaagtgtgggtgggataaaatgacatcgaagttttcttctagcctcagaaatgatagattctttaggtcatgaacatgaggactcatctttca

SEQ ID NO: 5001 - DNA, 121 bp, synthetic construct
  misc_feature 1..121: note = Description of artificial sequence: synthetic polynucleotide sequence
  source 1..121: mol_type = other DNA
taagccaaatagtcttcagagtgaccatatgactttaagcttcataatgggaaatattaactatagaactgagcactggatgcattgtcattgatgatatgctgaagagttctgggcattt

SEQ ID NO: 5002 - DNA, 121 bp, synthetic construct
  misc_feature 1..121: note = Description of artificial sequence: synthetic polynucleotide sequence
  source 1..121: mol_type = other DNA
agggctaatggaggtcaggtgatcaacagagttttaattcaggtccatctcacagtgaagttcatgagtctctaaacttatcccgtggttattttcctagtctgaaatgtatacttggaat

SEQ ID NO: 5003 - DNA, 121 bp, synthetic construct
  misc_feature 1..121: note = Description of artificial sequence: synthetic polynucleotide sequence
  source 1..121: mol_type = other DNA
agagaaatggaaatggaatttacctgccctgctaccttctctttcccacaggagcaagacgctctcaaccaggtacaatcttgttccctggggaaacatttggcaagaggtagttttatgt

SEQ ID NO: 5004 - DNA, 121 bp, synthetic construct
  misc_feature 1..121: note = Description of artificial sequence: synthetic polynucleotide sequence
  source 1..121: mol_type = other DNA
ggcctgggtttctgcacacattgttgctggtctccaagggtgagcatcctgaaagagaaaaagtggaattgtagtgctttttatgacctaacttcaaaagtcactaaaaattcctttggtt

SEQ ID NO: 5005 - DNA, 121 bp, synthetic construct
  misc_feature 1..121: note = Description of artificial sequence: synthetic polynucleotide sequence
  source 1..121: mol_type = other DNA
gtgtgcaaaaaagatcccatttggaatgcctggatgatagatacactttttgattttcatgcagaaacctctaaggcattaattgggaaggggtacaaaggtagagtgaccatatcaactg

SEQ ID NO: 5006 - DNA, 121 bp, synthetic construct
  misc_feature 1..121: note = Description of artificial sequence: synthetic polynucleotide sequence
  source 1..121: mol_type = other DNA
tcaccaatttctaataccagcatttcaagtttttgtatcctttattttacccattcatttccctgtcttcaacacgaattccaattacttttctttctttttgataactgaggtaattttt

SEQ ID NO: 5007 - DNA, 121 bp, synthetic construct
  misc_feature 1..121: note = Description of artificial sequence: synthetic polynucleotide sequence
  source 1..121: mol_type = other DNA
gtaggaacgactgaaacaatgacaggatgtgggagtcctcttgggatgtaatcaagaagtatggtaaaacaatggaaccagatttttgaggacattgcattttaaactgtgtggtttaatc

SEQ ID NO: 5008 - DNA, 121 bp, synthetic construct
  misc_feature 1..121: note = Description of artificial sequence: synthetic polynucleotide sequence
  source 1..121: mol_type = other DNA
gctttccaccagtcttcctaccaatattattagcaagcgctagacccaagcacgacttgcagccggctgggaagatttgctttgattccagcctctgactcaatcccatttttgctacaaa

SEQ ID NO: 5009 - DNA, 121 bp, synthetic construct
  misc_feature 1..121: note = Description of artificial sequence: synthetic polynucleotide sequence
  source 1..121: mol_type = other DNA
agagagatttcagagggcaaggtagctaaaaattcaaatcaggccattgtgaaagaagcaataggtgaagttctcagaaacgaaaaatctgattgttaaagaataatcaaaggaaggactg

SEQ ID NO: 5010 - DNA, 121 bp, synthetic construct
  misc_feature 1..121: note = Description of artificial sequence: synthetic polynucleotide sequence
  source 1..121: mol_type = other DNA
ttgcctgaaaacctgcctttatgcttatcatgcagtgaaaacaccttttttttctggagcgccctgaactttgtctatttagtctgggcctttttgatatattgcttcacattttgggggt

SEQ ID NO: 5011 - DNA, 121 bp, synthetic construct
  misc_feature 1..121: note = Description of artificial sequence: synthetic polynucleotide sequence
  source 1..121: mol_type = other DNA
cataaccccatttaattttcttctatcagatttcagtctctgtcagattgacttatgtcattgcacgtttgtcatcagtctcttttatggaatatggtttgtttgtggtctgagccttata

SEQ ID NO: 5012 - DNA, 121 bp, synthetic construct
  misc_feature 1..121: note = Description of artificial sequence: synthetic polynucleotide sequence
  source 1..121: mol_type = other DNA
gtggcaaacacgctttgttgcagcgaaagtgtttagaatttaccctagactcgccataacgtgcaaccaaagaaacagcatgccaacattaaaccatgacatctccctggcacatagacag

SEQ ID NO: 5013 - DNA, 121 bp, synthetic construct
  misc_feature 1..121: note = Description of artificial sequence: synthetic polynucleotide sequence
  source 1..121: mol_type = other DNA
cgtgaccctgcaccacagctgctccccaagggtgcctccacctctgagtctatggcatgttctagccgtgaaagcttttggctgcttctgctcagacttggacacatatgctgtctacagc

SEQ ID NO: 5014 - DNA, 121 bp, synthetic construct
  misc_feature 1..121: note = Description of artificial sequence: synthetic polynucleotide sequence
  source 1..121: mol_type = other DNA
ccgcacccctcctaaaataggtaactgtgactgtgacattattaggaaatagggtcttcgcagatggaatttgatgtaaattgagttaattctggagtatgatgaggctttaatccaatgt

SEQ ID NO: 5015 - DNA, 121 bp, synthetic construct
  misc_feature 1..121: note = Description of artificial sequence: synthetic polynucleotide sequence
  source 1..121: mol_type = other DNA
gacctgtttcttgtgcttcgtggacatgctagtaggtatatagtgccatttgtgtgaaattgaaaatgacattccctactggtgggtgaactgggaaacagcaccctgtctatgggcaaat

SEQ ID NO: 5016 - DNA, 121 bp, synthetic construct
  misc_feature 1..121: note = Description of artificial sequence: synthetic polynucleotide sequence
  source 1..121: mol_type = other DNA
acaaacaaactaacacaaatatacatacacctatggagggaaaagaagttaggcaggccatgtttagtatccaattgatgcttgagataattcatttatagagaaattagctgattagcta

SEQ ID NO: 5017 - DNA, 121 bp, synthetic construct
  misc_feature 1..121: note = Description of artificial sequence: synthetic polynucleotide sequence
  source 1..121: mol_type = other DNA
agaggaaaaagaccctttaccaaaactaccttgtaaagcatttagctaatcatcgattatctgcatattctctgatttctctggccagtctttttcccgcccactgcttgttgttttaaat

SEQ ID NO: 5018 - DNA, 121 bp, synthetic construct
  misc_feature 1..121: note = Description of artificial sequence: synthetic polynucleotide sequence
  source 1..121: mol_type = other DNA
ggagggctgaaactgggaggccaggctgcactgcccaagaatcaacagagtgttcttctctctcccaagtatggtttgctcagaccttaaaatatggatgacatcagagtctggggaatgg

SEQ ID NO: 5019 - DNA, 121 bp, synthetic construct
  misc_feature 1..121: note = Description of artificial sequence: synthetic polynucleotide sequence
  source 1..121: mol_type = other DNA
ctccatccaaacccactcccatattattttgatgtaaatcttaaacattatatcatgtcgttcacaaatgttttggtatattgctctaaaatagcactattttattattttattttatttt

SEQ ID NO: 5020 - DNA, 121 bp, synthetic construct
  misc_feature 1..121: note = Description of artificial sequence: synthetic polynucleotide sequence
  source 1..121: mol_type = other DNA
gactttcacctttctctaacaggtagcatgtcaaaaattggttggggttctgattagttaattcctagttaattaaagctctggtatttagaatataacttcccagagggtcttaggagga

SEQ ID NO: 5021 - DNA, 121 bp, synthetic construct
  misc_feature 1..121: note = Description of artificial sequence: synthetic polynucleotide sequence
  source 1..121: mol_type = other DNA
tcttatacaagatctataaacatgctttgacaacctttgaaattgattaaaagtgggcttatatttctaaatggagatgccttgagtcaggatgagtaagctaagaaaatctattcatttt

SEQ ID NO: 5022 - DNA, 121 bp, synthetic construct
  misc_feature 1..121: note = Description of artificial sequence: synthetic polynucleotide sequence
  source 1..121: mol_type = other DNA
gagtggtagaagttctctgcaataaatgatgaataataagtgaacactaagcaatactacaataaacaaatgaccaaacacagaaagcatcacctacaggtgcaggtggtgaggacaacct

SEQ ID NO: 5023 - DNA, 121 bp, synthetic construct
  misc_feature 1..121: note = Description of artificial sequence: synthetic polynucleotide sequence
  source 1..121: mol_type = other DNA
gaattaatctcttgtagttatcataatttaggaggtataagcatatggaaatgtgaccagcatggtggcatggtatttaagacccaagtgtcaagcacaaaaaggcagctcattcagagtt

SEQ ID NO: 5024 - DNA, 121 bp, synthetic construct
  misc_feature 1..121: note = Description of artificial sequence: synthetic polynucleotide sequence
  source 1..121: mol_type = other DNA
gcgtggagctgccgccgccgccggggagaaggatgaaggacaaacagaagaagaagaaggagcgcacgtgggccgaggccgcgcgcctggtgaggcggacagccgaggggggctccgtggg

SEQ ID NO: 5025 - DNA, 121 bp, synthetic construct
  misc_feature 1..121: note = Description of artificial sequence: synthetic polynucleotide sequence
  source 1..121: mol_type = other DNA
gactccgggggtggaaaagcgaccccacattcaaggacgccaatggcatgttgagctttcccaatctaaaccaggtgcgtggagggaagcaagtgcttactcccagcttgaaccctgagca

SEQ ID NO: 5026 - DNA, 121 bp, synthetic construct
  misc_feature 1..121: note = Description of artificial sequence: synthetic polynucleotide sequence
  source 1..121: mol_type = other DNA
gacgtttatatttcttcaggtattagaaaactactcggatgctccaatgacaccaaaacagattctgcaggtcatagaggcagaaggactaaaggaaatgaggtttgtattgttcttgttg

SEQ ID NO: 5027 - DNA, 121 bp, synthetic construct
  misc_feature 1..121: note = Description of artificial sequence: synthetic polynucleotide sequence
  source 1..121: mol_type = other DNA
ttttacagtgggacttcccctctcgcatgcctcaatgctatgctacattccaattcaagaggaggagaggggttgttttataaactgcctggccgaatcagccttttcacgctcaaggtaa

SEQ ID NO: 5028 - DNA, 121 bp, synthetic construct
  misc_feature 1..121: note = Description of artificial sequence: synthetic polynucleotide sequence
  source 1..121: mol_type = other DNA
ggcatagtacgtgctttatgtgtgaactgaattatatttcttcatcttaattttacaggtgtgagccactgcaccaggccccttcatcttaattttaatatatctttgaataaacaccatt

SEQ ID NO: 5029 - DNA, 121 bp, synthetic construct
  misc_feature 1..121: note = Description of artificial sequence: synthetic polynucleotide sequence
  source 1..121: mol_type = other DNA
aaggatgccctgcagtggtctcgccatccagctacagtggagggagaggagccagaggacacggctgatgtggagagctgtgggtctaatgaagccagcactgtgagtggtgaaaacgatg

SEQ ID NO: 5030 - DNA, 121 bp, synthetic construct
  misc_feature 1..121: note = Description of artificial sequence: synthetic polynucleotide sequence
  source 1..121: mol_type = other DNA
cctctcttccagtatctcttgatgaaacatcttcgaacgcatcctgttctacagaatctcagagtcgacctctttccaatcccagggacagctacagagcttcctcacaggtaaggaagag

SEQ ID NO: 5031 - DNA, 121 bp, synthetic construct
  misc_feature 1..121: note = Description of artificial sequence: synthetic polynucleotide sequence
  source 1..121: mol_type = other DNA
ctcttggaacgcaggcgaacaaacaaaagaaaaagactggggtgatgctgcctcgagttgtcctgactcctctgaaggtaaacggggcccacgtggaatctgcatcaggtatgtgtaaact

SEQ ID NO: 5032 - DNA, 154 bp, synthetic construct
  misc_feature 1..154: note = Description of artificial sequence: synthetic polynucleotide sequence
  source 1..154: mol_type = other DNA
gggttctcgggctgccacgccgatggcgagagcggcagcccgtccagcagcagcagcggctctctggccctgggcagcgctgctattcgtggccaggccgaggtcacccaggaccctgccccgctcctgagaggcttccggaagccagccacag

SEQ ID NO: 5033 - DNA, 165 bp, synthetic construct
  misc_feature 1..165: note = Description of artificial sequence: synthetic polynucleotide sequence
  source 1..165: mol_type = other DNA
ggtcaaatgaagcgcaacagaggggaagaaatagattttgagacacctgggtccattcttgtcaacaccaacctccgtgccctgatcaactctcggaccttccatgccttaccatcacacttccagcagcagctcctcttcctcctgcctgaagtagacagacag

SEQ ID NO: 5034 - DNA, 121 bp, synthetic construct
  misc_feature 1..121: note = Description of artificial sequence: synthetic polynucleotide sequence
  source 1..121: mol_type = other DNA
tgatccttctaggtggggacggatggcctgttgcgtctcagcagcagtgcactaaataacgagttttttacccatgcggctcagagctggcgggagcgcctggctgatggtatgtagactt

SEQ ID NO: 5035 - DNA, 121 bp, synthetic construct
  misc_feature 1..121: note = Description of artificial sequence: synthetic polynucleotide sequence
  source 1..121: mol_type = other DNA
ctccctaggtgaatttactcatgagatgcaagtcaggatacgacaggaaatggagaaggaaaagaaggtggaacaatggaaagaaaagttctttgaagactactatggacagaagtaaggc

SEQ ID NO: 5036 - DNA, 308 bp, synthetic construct
  misc_feature 1..308: note = Description of artificial sequence: synthetic polynucleotide sequence
  source 1..308: mol_type = other DNA
ggctgggtttgaccaaagaagagtcattgcagcagaacgtgggccaggaggaggctgaaatcaaaagtggcttgtgtgtcccaggagaatcagtgcgtatacagcgtggtccagccacccgacagcgagatgggcattttaagaaacgctctcggccagatctccgaaccagagccagaaggaatctgtacaaaaaacaggagtcagaacaagcaggggttgctaaggatgcaaaatctgtggcctcagatgttcccctctacaaggatggggaggctaagactgacccagcagggctgagcagtccc

SEQ ID NO: 5037 - DNA, 327 bp, synthetic construct
  misc_feature 1..327: note = Description of artificial sequence: synthetic polynucleotide sequence
  source 1..327: mol_type = other DNA
catctgccaggcacatcctctgcagcacccgacctggagggtcccgaattcccagttgagtctgtggcttctcggatccaggctgagccagacaacttggcacgtgcctctgcatctccagacagaattcctagcctgcctcaggaaactgtggatcaggaacccaaggatcagaagaggaaatcctttgagcaggcggcctctgcatcctttcccgaaaagaagccccggcttgaagatcgtcagtcctttcgtaacacaattgaaagtgttcacaccgaaaagccacagcccactaaagaggagcccaaagtcccgcccatccgg

SEQ ID NO: 5038 - DNA, 231 bp, synthetic construct
  misc_feature 1..231: note = Description of artificial sequence: synthetic polynucleotide sequence
  source 1..231: mol_type = other DNA
gattcaactttcacgtatcaaaccaccctgggtggttaaaggtcagcccacttaccagatatgcccccggatcatccccaccacggagtcctcctgccggggttggactggcgccaggaccctcgcagacattaaagcccgtgctctgcaggtccgaggggcgagaggtcaccactgccatagagaggcggccaccactgccatcggaggggggggtggcccgggtggagg

SEQ ID NO: 5039 - DNA, 466 bp, synthetic construct
  misc_feature 1..466: note = Description of artificial sequence: synthetic polynucleotide sequence
  source 1..466: mol_type = other DNA
tggcggcggggccaccgatgagggaggtggcagaggcagcagcagtggtgatggtggtgaggcctgtggccaccctgagcccaggggaggcccgagcacccctggaaagtgtacgtcagatctacagcgaacacaactactgccgccttatcctctaaatggggagcatacccaggccggaactgccatgtccagagctaggagagaggacctgccttctctgagaaaggaggaaagctgcctactacagagggctacagttggactcacagatgggctaggagatgcctcccaactccccgttgctcccactggggaccagccatgccaggccttgcccctactgtcctcccaaacctcagtagctgagagattagtggagcagcctcagttgcatccggatgttagaactgaatgtgagtctggcaccacttcctgggaaagtgatgatgaggagcaaggaccc

SEQ ID NO: 5040 - DNA, 464 bp, synthetic construct
  misc_feature 1..464: note = Description of artificial sequence: synthetic polynucleotide sequence
  source 1..464: mol_type = other DNA
accgttcctgcagacaatggtcccattctgtctctagtgggagatgatacattagagaaaggaactggccaagctcttgacagtcatcccactatgaaggatcctgtaaatgtgacccccagttccacacctgaatcctcaccgactgattgcctgcagaacagagcatttgatgacgaattagggcttggtggctcatgccctcctatgagggaaagtgatactagacaagaaaacttgaaaaccaaggctctcgtttctaacagttctttgcattggatacccatcccatcgaatgatgaggtagtgaaacagcccaaaccagaatccagagaacacataccatctgttgagccccaggttggagaggagtgggagaaagctgctcccacccctcctgcattgcctggggatttgacagctgaggagggtctagatcctcttgacagccttacttcactctg

SEQ ID NO: 5041 - DNA, 464 bp, synthetic construct
  misc_feature 1..464: note = Description of artificial sequence: synthetic polynucleotide sequence
  source 1..464: mol_type = other DNA
gactgtgccatctcgaggaggcagtgacagcaatggcagttactgtcaacaggtggacattgaaaagctgaaaatcaacggagactctgaagcactgagtcctcacggtgagtccacggatacagcctctgactttgaaggtcacctcacggaggacagcagtgaggctgacactagagaagctgcagtgacaaagggatcttcggtggacaaggatgagaaacccaattggaaccaatctgccccactgtccaaggtgaatggtgacatgcgtctggttacaaggacagatgggatggttgctcctcagagctgggtgtctcgagtatgtgcggtccgccaaaagatcccagattccctactgctggccagtactgagtaccagccaagagccgtgtgcctgtccatgcctgggtcctcagtggaggccactaacccacttgtgatgcagttgctgcagggta

SEQ ID NO: 5042 - DNA, 465 bp, synthetic construct
  misc_feature 1..465: note = Description of artificial sequence: synthetic polynucleotide sequence
  source 1..465: mol_type = other DNA
gcttgcccctagagaaggttcttccaccagcccacgatgacagcatgtcagaatccccacaagtaccacttacaaaagaccagagccatggctcgctacgcatgggatctttacatggtcttggaaaaaacagtggcatggttgatggaagcagccccagttctttaagggctttgaaggagcctcttctgccagatagctgtgaaacaggcactggtcttgccaggattgaggccacccaggctcctggagcaccccaaaagaattgcaaggcagtcccaagttttgactccctccatccagtgacaaatcccattacatcctctaggaaactggaagaaatggattccaaagagcagttctcttcctttagttgtgaagatcagaaggaagtccgtgctatgtcacaggacagtaattcaaatgctgctccaggaaagagcccaggagatcttactacctcga

SEQ ID NO: 5043 - DNA, 464 bp, synthetic construct
  misc_feature 1..464: note = Description of artificial sequence: synthetic polynucleotide sequence
  source 1..464: mol_type = other DNA
gaacacctcgtttctcatctccaaatgtgatctcctttggtccagagcagacaggtcgggccctgggtgatcagagcaatgttacaggccaagggaagaagctttttggctctgggaatgtggctgcaacccttcagcgccccaggcctgcggacccgatgcctcttcctgctgagatccctccagtttttcccagtgggaagttgggaccaagcacaaactccatgtctggtggggtacagactccaagggaagactgggctccaaagccacatgcctttgttggcagcgtcaagaatgagaagacttttgtggggggtcctcttaaggcaaatgccgagaacaggaaagctactgggcatagtcccctggaactggtgggtcacttggaagggatgccctttgtcatggacttgcccttctggaaattaccccgagagccagggaaggggctcagtgagcct

SEQ ID NO: 5044 - DNA, 354 bp, synthetic construct
  misc_feature 1..354: note = Description of artificial sequence: synthetic polynucleotide sequence
  source 1..354: mol_type = other DNA
ctggagccttcttctctcccctcccaactcagcatcaagcaggcattttatgggaagctttctaaactccaactgagttccaccagctttaattattcctctagctctcccacctttcccaaaggccttgctggaagtgtggtgcagctgagccacaaagcaaactttggtgcgagccacagtgcatcactttccttgcaaatgttcactgacagcagcacggtggaaagcatctcgctccagtgtgcgtgcagcctgaaagccatgatcatgtgccaaggctgcggtgcgttctgtcacgatgactgtattggaccctcaaagctctgtgtattgtgccttgtggtgagataa

SEQ ID NO: 5045 - DNA, 121 bp, synthetic construct
  misc_feature 1..121: note = Description of artificial sequence: synthetic polynucleotide sequence
  source 1..121: mol_type = other DNA
aatggtgatgtttgtaattctgtgtgcctagcaaggtctgtaggatcaaactacaaacttctggtagtatgtgtagcactatgcaaatacaaggtagtaataatgctgttactgtcactgt

SEQ ID NO: 5046 - DNA, 121 bp, synthetic construct
  misc_feature 1..121: note = Description of artificial sequence: synthetic polynucleotide sequence
  source 1..121: mol_type = other DNA
actgtgtttggaaggattctggttgtaggtgctctgagaaattgtattatggttgatcaatgatgtctcctgtggacagttacctagtaggtagtagacatgtgccaaatatatgctattc

SEQ ID NO: 5047 - DNA, 121 bp, synthetic construct
  misc_feature 1..121: note = Description of artificial sequence: synthetic polynucleotide sequence
  source 1..121: mol_type = other DNA
tttggaggccatgtcatttaggaggagaaggccctgaactagacatttagactcaagaactgtgctatccaacatggaagccactagctacatgtaactattgatatttatagtaattaaa

SEQ ID NO: 5048 - DNA, 121 bp, synthetic construct
  misc_feature 1..121: note = Description of artificial sequence: synthetic polynucleotide sequence
  source 1..121: mol_type = other DNA
agcagcagacagagtgaagcaatctgattaccgtgtgggtgggccttggtcaatccattaaaagccttcataggaaaggactgagttctgccagcaggcggccttcagacttgaactgcaa

SEQ ID NO: 5049 - DNA, 121 bp, synthetic construct
  misc_feature 1..121: note = Description of artificial sequence: synthetic polynucleotide sequence
  source 1..121: mol_type = other DNA
tggccagtcacacagctagttagcagacctggaatttgaactcaagcagtggtggtttagaactgaaccgccaccgtaagctgccccccactgcaaccagaggtcggacttcatgtataac

SEQ ID NO: 5050 - DNA, 121 bp, synthetic construct
  misc_feature 1..121: note = Description of artificial sequence: synthetic polynucleotide sequence
  source 1..121: mol_type = other DNA
aggtactgcgcatggaacctaatgaccagtcactcaattaccggctcagtgacatgtttgtaagggtgaactttagagtgctactagggagcggacagatgaactatagctgtgcctgcag

SEQ ID NO: 5051 - DNA, 121 bp, synthetic construct
  misc_feature 1..121: note = Description of artificial sequence: synthetic polynucleotide sequence
  source 1..121: mol_type = other DNA
tgttcccataaaactttatttacaaaaaaaggcagtaggccacatttggcctattgattctagttcaccaactcctggtctgttcaaaacggacattgagcaaatatcacacaaatgccgg

SEQ ID NO: 5052 - DNA, 121 bp, synthetic construct
  misc_feature 1..121: note = Description of artificial sequence: synthetic polynucleotide sequence
  source 1..121: mol_type = other DNA
tcagatgcccccaagtttaacatcgccaaccaggagcaaaaagcaagagccgtggaattgagtcgccgctgttcaggggaggcataaggagctggaggactgggtgggctcggcagcttcc

SEQ ID NO: 5053 - DNA, 218 bp, synthetic construct
  misc_feature 1..218: note = Description of artificial sequence: synthetic polynucleotide sequence
  source 1..218: mol_type = other DNA
catggcgggcgccgcgtccccttgcgccaacggctgcgggcccggcgcgccctcggacgccgaggtgctgcacctctgccgcagcctcgaggtgggcaccgtcatgactttgttctactccaagaagtcgcagcgacccgagcggaagaccttccaggtcaagctggagacgcgccagatcacgtggagccggggcgccgacaagatcgagggggcca

SEQ ID NO: 5054 - DNA, 154 bp, synthetic construct
  misc_feature 1..154: note = Description of artificial sequence: synthetic polynucleotide sequence
  source 1..154: mol_type = other DNA
gttgacattcgtgaaattaaggagatccgcccagggaagacctcacgggactttgatcgctatcaagaggacccagctttccggccggaccagtcacattgctttgtcattctctatggaatggaatttcgcctgaaaacgctgagcctgcaag

SEQ ID NO: 5055 - DNA, 121 bp, synthetic construct
  misc_feature 1..121: note = Description of artificial sequence: synthetic polynucleotide sequence
  source 1..121: mol_type = other DNA
taccttgctcacagccacatctgaggatgaagtgaacatgtggatcaagggcttaacttggctgatggaggatacattgcaggcacccacacccctgcagattgagaggtaagaaccactc

SEQ ID NO: 5056 - DNA, 121 bp, synthetic construct
  misc_feature 1..121: note = Description of artificial sequence: synthetic polynucleotide sequence
  source 1..121: mol_type = other DNA
tggagaagtggccctcacctcaggcttctctctccaggtggctccggaagcagttttactcagtggatcggaatcgtgaggatcggtaagtactgagctgtggctgtagcccagcagggtg

SEQ ID NO: 5057 - DNA, 121 bp, synthetic construct
  misc_feature 1..121: note = Description of artificial sequence: synthetic polynucleotide sequence
  source 1..121: mol_type = other DNA
atgtccctgttttctcagtatatcagccaaggacctgaagaacatgctgtcccaggtcaactaccgggtccccaacatgcgcttcctccgagagcggctgacggtaagtgccacccagggc

SEQ ID NO: 5058 - DNA, 121 bp, synthetic construct
  misc_feature 1..121: note = Description of artificial sequence: synthetic polynucleotide sequence
  source 1..121: mol_type = other DNA
cctgctctataccatgcaggacctggagcagcgcagcggggacatcacctacgggcagtttgctcagctgtaccgcagcctcatgtacagcgcccagaagacggtgcatgagccacctgcc

SEQ ID NO: 5059 - DNA, 121 bp, synthetic construct
  misc_feature 1..121: note = Description of artificial sequence: synthetic polynucleotide sequence
  source 1..121: mol_type = other DNA
gcctcccaggggtcttgccctgaccaggttctgtttcctgcagatggacctccccttcttggaagccagtactctgaggtttggtttggagtggggaggtggggttttccctgggccccct

SEQ ID NO: 5060 - DNA, 121 bp, synthetic construct
  misc_feature 1..121: note = Description of artificial sequence: synthetic polynucleotide sequence
  source 1..121: mol_type = other DNA
ctagcttaccttctctccctgcagggctggggagcggccggagctttgccgagtgtcccttcctgagttccagcagttccttcttgactaccagggggtatggctgggctgacattggccc

SEQ ID NO: 5061 - DNA, 121 bp, synthetic construct
  misc_feature 1..121: note = Description of artificial sequence: synthetic polynucleotide sequence
  source 1..121: mol_type = other DNA
accccatcaggagctgtgggctgttgatcgcctccaggtgcaggagttcatgctcagcttcctccgagaccccttacgagagatcgaggagccatacttcttcctggatgaggtgagcccg

SEQ ID NO: 5062 - DNA, 121 bp, synthetic construct
  misc_feature 1..121: note = Description of artificial sequence: synthetic polynucleotide sequence
  source 1..121: mol_type = other DNA
gtttgtcaccttcctgttctccaaagagaacagtgtgtggaactcgcagctggatgcagtatgcccggacaccatgaacaaccctctttcccactactggatctcctcctcgcacaacacg

SEQ ID NO: 5063 - DNA, 121 bp, synthetic construct
  misc_feature 1..121: note = Description of artificial sequence: synthetic polynucleotide sequence
  source 1..121: mol_type = other DNA
ctctccttgcctatccaggtacctgaccggggaccagttctccagtgagtcctccttggaagcctatgctcgctgcctgcggatgggctgtcgctgcattgagtgtgcgtggggtccaggg

SEQ ID NO: 5064 - DNA, 121 bp, synthetic construct
  misc_feature 1..121: note = Description of artificial sequence: synthetic polynucleotide sequence
  source 1..121: mol_type = other DNA
tggactgctgggacggcccggatgggatgccagttatttaccatgggcacacccttaccaccaagatcaagttctcagatgtcctgcacaccatcaaggagcatgcctttgtggcctcaga

SEQ ID NO: 5065 - DNA, 170 bp, synthetic construct
  misc_feature 1..170: note = Description of artificial sequence: synthetic polynucleotide sequence
  source 1..170: mol_type = other DNA
ggtacccagtcatcctgtccattgaggaccactgcagcattgcccagcagagaaacatggcccaatacttcaagaaggtgctgggggacacactcctcaccaagcccgtggagatctctgccgacgggctcccctcacccaaccagcttaagaggaagatcctcatcaag

SEQ ID NO: 5066 - DNA, 121 bp, synthetic construct
  misc_feature 1..121: note = Description of artificial sequence: synthetic polynucleotide sequence
  source 1..121: mol_type = other DNA
acaagaagctggctgagggcagtgcctacgaggaggtgcctacatccatgatgtactctgagaacgacatcagcaactctatcaagaatggcatcctctacctggaggaccctgtgaacca

SEQ ID NO: 5067 - DNA, 121 bp, synthetic construct
  misc_feature 1..121: note = Description of artificial sequence: synthetic polynucleotide sequence
  source 1..121: mol_type = other DNA
tctgttccaggaatggtatccccactactttgttctgaccagcagcaagatctactactctgaggagaccagcagtgaccagggcaacgaggatgaggaggagcccaaggaggtgaggaac

SEQ ID NO: 5068 - DNA, 189 bp, synthetic construct
  misc_feature 1..189: note = Description of artificial sequence: synthetic polynucleotide sequence
  source 1..189: mol_type = other DNA
ggtcagcagcagcacagagctgcactccaatgagaagtggttccatgggaagctaggggcagggcgtgacgggcgtcacatcgctgagcgcctgcttactgagtactgcatcgagaccggagcccctgacggctccttcctcgtgcgagagagtgagaccttcgtgggcgactacacgctctctttctg

SEQ ID NO: 5069 - DNA, 202 bp, synthetic construct
  misc_feature 1..202: note = Description of artificial sequence: synthetic polynucleotide sequence
  source 1..202: mol_type = other DNA
ggcggaacgggaaagtccagcactgccgtatccactcccggcaagatgctgggacccccaagttcttcttgacagacaacctcgtctttgactccctctatgacctcatcacgcactaccagcaggtgcccctgcgctgtaatgagtttgagatgcgactttcagagcctgtcccacagaccaacgcccacgagagcaaaga

SEQ ID NO: 5070 - DNA, 121 bp, synthetic construct
  misc_feature 1..121: note = Description of artificial sequence: synthetic polynucleotide sequence
  source 1..121: mol_type = other DNA
ggtggtaccacgcgagcctgaccagagcacaggctgagcacatgctaatgcgcgtccctcgtgatggggccttcctggtgcggaagcggaatgaacccaactcatatgccatctctttccg

SEQ ID NO: 5071 - DNA, 182 bp, synthetic construct
  misc_feature 1..182: note = Description of artificial sequence: synthetic polynucleotide sequence
  source 1..182: mol_type = other DNA
gggctgagggcaagatcaagcattgccgtgtccagcaagagggccagacagtgatgctagggaactcggagttcgacagccttgttgacctcatcagctactatgagaaacacccgctataccgcaagatgaagctgcgctatcccatcaacgaggaggcactggagaagattggcacagct

SEQ ID NO: 5072 - DNA, 121 bp, synthetic construct
  misc_feature 1..121: note = Description of artificial sequence: synthetic polynucleotide sequence
  source 1..121: mol_type = other DNA
tcccattgtgtcctgtttccaggagcctgactacggggccctgtatgagggacgcaaccctggcttctatgtagaggcaaaccctatgccaactttcaaggtacagctcaggcctctgggc

SEQ ID NO: 5073 - DNA, 121 bp, synthetic construct
  misc_feature 1..121: note = Description of artificial sequence: synthetic polynucleotide sequence
  source 1..121: mol_type = other DNA
cctctgcagtgtgcagtcaaagccctctttgactacaaggcccagagggaggacgagctgaccttcatcaagagcgccatcatccagaatgtggagaagcaagagggaggctggtaagcca

SEQ ID NO: 5074 - DNA, 121 bp, synthetic construct
  misc_feature 1..121: note = Description of artificial sequence: synthetic polynucleotide sequence
  source 1..121: mol_type = other DNA
tggctcccacaggtggcgaggggactacggagggaagaagcagctgtggttcccatcaaactacgtggaagagatggtcaaccccgtggccctggagccggagagggaggtaagaccagaa

SEQ ID NO: 5075 - DNA, 121 bp, synthetic construct
  misc_feature 1..121: note = Description of artificial sequence: synthetic polynucleotide sequence
  source 1..121: mol_type = other DNA
ccattggtgggctttgcttcccacagcacttggacgagaacagccccctaggggacttgctgcggggggtcttggatgtgccggcttgtcagattggtgagctcccatctgtttctcttgc

SEQ ID NO: 5076 - DNA, 159 bp, synthetic construct
  misc_feature 1..159: note = Description of artificial sequence: synthetic polynucleotide sequence
  source 1..159: mol_type = other DNA
gccatccgtcctgagggcaagaacaaccggctcttcgtcttctccatcagcatggcgtcggtggcccactggtccctggatgttgctgccgactcacaggaggagctgcaggactgggtgaaaaagatccgtgaagtggcccagacagcagacgccagg

SEQ ID NO: 5077 - DNA, 121 bp, synthetic construct
  misc_feature 1..121: note = Description of artificial sequence: synthetic polynucleotide sequence
  source 1..121: mol_type = other DNA
gtgtgtcaccagctcactgaagggaagataatggaacggaggaagaagattgccctggagctctctgaacttgtcgtctactgccggcctgttccctttgatgaagagagtaagggccagg

SEQ ID NO: 5078 - DNA, 226 bp, synthetic construct
  misc_feature 1..226: note = Description of artificial sequence: synthetic polynucleotide sequence
  source 1..226: mol_type = other DNA
gagattggcacagaacgtgcttgctaccgggacatgtcatccttcccggaaaccaaggctgagaaatacgtgaacaaggccaaaggcaagaagttccttcagtacaatcgactgcagctctcccgcatctaccccaagggccagcgactggattcctccaactacgatcctttgcccatgtggatctgtggcagtcagcttgtggccctcaacttccagacccctg

SEQ ID NO: 5079 - DNA, 150 bp, synthetic construct
  misc_feature 1..150: note = Description of artificial sequence: synthetic polynucleotide sequence
  source 1..150: mol_type = other DNA
gacaagcctatgcagatgaaccaggccctcttcatgacgggcaggcactgtggctacgtgctgcagccaagcaccatgcgggatgaggccttcgacccctttgacaagagcagcctccgcgggctggagccatgtgccatctctattgag

SEQ ID NO: 5080 - DNA, 121 bp, synthetic construct
  misc_feature 1..121: note = Description of artificial sequence: synthetic polynucleotide sequence
  source 1..121: mol_type = other DNA
caggtgctgggggcccgacatctgccaaagaatggccgaggcattgtgtgtccttttgtggagattgaggtggctggagctgagtatgacagcaccaagcagaagacagagtttgtgggtc

SEQ ID NO: 5081 - DNA, 163 bp, synthetic construct
  misc_feature 1..163: note = Description of artificial sequence: synthetic polynucleotide sequence
  source 1..163: mol_type = other DNA
gtggacaatggactcaaccctgtatggccagccaagcccttccacttccagatcagtaaccctgaatttgcctttctgcgcttcgtggtgtatgaggaagacatgtttagtgaccagaatttcctggctcaggctactttcccagtaaaaggcctgaagacag

SEQ ID NO: 5082 - DNA, 121 bp, synthetic construct
  misc_feature 1..121: note = Description of artificial sequence: synthetic polynucleotide sequence
  source 1..121: mol_type = other DNA
cttttcctcctcctaggatacagagcagtgcctttgaagaacaactacagtgaggacctggagttggcctccctgctgatcaagattgacattttccctgccaaggtatctgcagcagggg

SEQ ID NO: 5083 - DNA, 189 bp, synthetic construct
  misc_feature 1..189: note = Description of artificial sequence: synthetic polynucleotide sequence
  source 1..189: mol_type = other DNA
gcaggagaatggtgacctcagtcccttcagtggtacgtccctgcgggagcggggctcagatgcctcaggccagctgtttcatggccgagcccgggaaggctcctttgaatcccgctaccagcagccgtttgaggacttccgcatctcccaggagcatctcgcagaccattttgacagtcgagaacgaag

SEQ ID NO: 5084 - DNA, 121 bp, synthetic construct
  misc_feature 1..121: note = Description of artificial sequence: synthetic polynucleotide sequence
  source 1..121: mol_type = other DNA
ccctgcctgccagtaaggacactcttcccttctgtccagggccccaagaaggactcgggtcaatggagacaaccgcctctagttgtaccccagcctcgttggagagcagcaggtgctgtgc

SEQ ID NO: 5085 - DNA, 121 bp, synthetic construct
  misc_feature 1..121: note = Description of artificial sequence: synthetic polynucleotide sequence
  source 1..121: mol_type = other DNA
ctggaagttgctctgggtgagtcagtgagggagttgtgagggaatgtgcagacctagtaaattactgtatgccactgtagactgtatacacactatacacttactgctaaattttttttct

SEQ ID NO: 5086 - DNA, 121 bp, synthetic construct
  misc_feature 1..121: note = Description of artificial sequence: synthetic polynucleotide sequence
  source 1..121: mol_type = other DNA
tgtagtcctaaatagaactttggggaatccttttaaaaatcaaacgcatacttggtaggagaactgacaatggcaaccagttgctcagagttatttgctcaaaggcctacctgcctcctaa

SEQ ID NO: 5087 - DNA, 121 bp, synthetic construct
  misc_feature 1..121: note = Description of artificial sequence: synthetic polynucleotide sequence
  source 1..121: mol_type = other DNA
ggcccaacaactaaaagtgtccccagagattgcccaatgtcccctggaggacaaagccatcctggattgagaaccactgggttaaagtaagtaacaggatcagcacagctcccagggcagg

SEQ ID NO: 5088 - DNA, 121 bp, synthetic construct
  misc_feature 1..121: note = Description of artificial sequence: synthetic polynucleotide sequence
  source 1..121: mol_type = other DNA
cacttagtaggcatcttggttatcataaagactgttgtggtattggtattacagtgcttctgtttaacccttttgttttattttagtatggaaatttttttttttttttttacttttaggt

SEQ ID NO: 5089 - DNA, 121 bp, synthetic construct
  misc_feature 1..121: note = Description of artificial sequence: synthetic polynucleotide sequence
  source 1..121: mol_type = other DNA
tgtggtttgatattatcccacttgtctagttttggttctcattgcctagaccaatgtaatggagcttcccttctatgttttcttctagtacttttacagttttaggttttaggttttacat

SEQ ID NO: 5090 - DNA, 121 bp, synthetic construct
  misc_feature 1..121: note = Description of artificial sequence: synthetic polynucleotide sequence
  source 1..121: mol_type = other DNA
ctcttaatttctctccacttgtcttatctggatttgcagagctgaaatgtcagctggtcccatccattgatttccccctcactcctgagccatcccttacatatgcacacttagcttcatt

SEQ ID NO: 5091 - DNA, 121 bp, synthetic construct
  misc_feature 1..121: note = Description of artificial sequence: synthetic polynucleotide sequence
  source 1..121: mol_type = other DNA
ttactgaaatttctaaatttaatttcctaagttcaaccccagtgaattcagataagttaggacttggcatatttgaatctcagaaggtccttctcaaacactgattttcaaacatttttac

SEQ ID NO: 5092 - DNA, 121 bp, synthetic construct
  misc_feature 1..121: note = Description of artificial sequence: synthetic polynucleotide sequence
  source 1..121: mol_type = other DNA
aaaatatttacatcattgggaatgcacttggctgcagtttcagaacacctgactagctccgtcttgtgctctttttagacagcaccttgtctcatttgaacaagacatctggagcctggag

SEQ ID NO: 5093 - DNA, 121 bp, synthetic construct
  misc_feature 1..121: note = Description of artificial sequence: synthetic polynucleotide sequence
  source 1..121: mol_type = other DNA
gtctccttgaagaatcctgtccggatatttgtgaacagcaacacagatgtggctcccttcctgcggcaggagttcatccggatccggcctaatcgtgaaggagaccgggaagccatcgtgg

SEQ ID NO: 5094 - DNA, 121 bp, synthetic construct
  misc_feature 1..121: note = Description of artificial sequence: synthetic polynucleotide sequence
  source 1..121: mol_type = other DNA
aaaagataaaatcatccctgaaatcttatgctttcttctcatcccagttgccaaagctctgcaggaatttgacttggccttaagaggaaagaagaaaaggaagaagtttatgaaggatgcc

SEQ ID NO: 5095 - DNA, 121 bp, synthetic construct
  misc_feature 1..121: note = Description of artificial sequence: synthetic polynucleotide sequence
  source 1..121: mol_type = other DNA
agggggagatgacagtgagtggcctcccttttggagtttgggcccactcggtggggtgggtcagagtggcctggtgtgttccacactcacacctccccactccccctaggcagaggaaagg

SEQ ID NO: 5096 - DNA, 121 bp, synthetic construct
  misc_feature 1..121: note = Description of artificial sequence: synthetic polynucleotide sequence
  source 1..121: mol_type = other DNA
tgtgaatgcctctttttgttggagtagggtttggactggttctttgcttgcttttcatcaaagtgggtttgtcatgtgattttaaaagtctctaaaactctgcctgccaaagtatccatct

SEQ ID NO: 5097 - DNA, 121 bp, synthetic construct
  misc_feature 1..121: note = Description of artificial sequence: synthetic polynucleotide sequence
  source 1..121: mol_type = other DNA
cttcctgtgtaggaggtttgtttctttcagttttcaattaagccttcatgacctgaatattgtgaatagagtggttataatgattaaagcagatatgtgtataaatgtccagtccaggtcc

SEQ ID NO: 5098 - DNA, 121 bp, synthetic construct
  misc_feature 1..121: note = Description of artificial sequence: synthetic polynucleotide sequence
  source 1..121: mol_type = other DNA
aggaggcgcagcagccgccctggcccgtcatggagatggaaaaggagttcgagcagatcgacaagtccgggagctgggcggccatttaccaggtgcgggagcgccccggagcgtggcgggc

SEQ ID NO: 5099 - DNA, 121 bp, synthetic construct
  misc_feature 1..121: note = Description of artificial sequence: synthetic polynucleotide sequence
  source 1..121: mol_type = other DNA
tattcttttttgtaggatatccgacatgaagccagtgacttcccatgtagagtggccaagcttcctaagaacaaaaaccgaaataggtacagagacgtcagtccctgtaagtatccacgtg

SEQ ID NO: 5100 - DNA, 121 bp, synthetic construct
  misc_feature 1..121: note = Description of artificial sequence: synthetic polynucleotide sequence
  source 1..121: mol_type = other DNA
tgtctttcagttgaccatagtcggattaaactacatcaagaagataatgactatatcaacgctagtttgataaaaatggaagaagcccaaaggagttacattcttacccaggtaagcagat

SEQ ID NO: 5101 - DNA, 121 bp, synthetic construct
  misc_feature 1..121: note = Description of artificial sequence: synthetic polynucleotide sequence
  source 1..121: mol_type = other DNA
tgtctttgcagggccctttgcctaacacatgcggtcacttttgggagatggtgtgggagcagaaaagcaggggtgtcgtcatgctcaacagagtgatggagaaaggttcggtaagtctcgg

SEQ ID NO: 5102 - DNA, 139 bp, synthetic construct
  misc_feature 1..139: note = Description of artificial sequence: synthetic polynucleotide sequence
  source 1..139: mol_type = other DNA
gttaaaatgcgcacaatactggccacaaaaagaagaaaaagagatgatctttgaagacacaaatttgaaattaacattgatctctgaagatatcaagtcatattatacagtgcgacagctagaattggaaaaccttaca

SEQ ID NO: 5103 - DNA, 211 bp, synthetic construct
  misc_feature 1..211: note = Description of artificial sequence: synthetic polynucleotide sequence
  source 1..211: mol_type = other DNA
gacccaagaaactcgagagatcttacatttccactataccacatggcctgactttggagtccctgaatcaccagcctcattcttgaactttcttttcaaagtccgagagtcagggtcactcagcccggagcacgggcccgttgtggtgcactgcagtgcaggcatcggcaggtctggaaccttctgtctggctgatacctgcctcttgctg

SEQ ID NO: 5104 - DNA, 163 bp, synthetic construct
  misc_feature 1..163: note = Description of artificial sequence: synthetic polynucleotide sequence
  source 1..163: mol_type = other DNA
gatggacaagaggaaagacccttcttccgttgatatcaagaaagtgctgttagaaatgaggaagtttcggatggggctgatccagacagccgaccagctgcgcttctcctacctggctgtgatcgaaggtgccaaattcatcatgggggactcttccgtgcag

SEQ ID NO: 5105 - DNA, 225 bp, synthetic construct
  misc_feature 1..225: note = Description of artificial sequence: synthetic polynucleotide sequence
  source 1..225: mol_type = other DNA
ggatcagtggaaggagctttcccacgaggacctggagcccccacccgagcatatccccccacctccccggccacccaaacgaatcctggagccacacaatgggaaatgcagggagttcttcccaaatcaccagtgggtgaaggaagagacccaggaggataaagactgccccatcaaggaagaaaaaggaagccccttaaatgccgcaccctacggcatcgaaag

SEQ ID NO: 5106 - DNA, 197 bp, synthetic construct
  misc_feature 1..197: note = Description of artificial sequence: synthetic polynucleotide sequence
  source 1..197: mol_type = other DNA
gcatgagtcaagacactgaagttagaagtcgggtcgtggggggaagtcttcgaggtgcccaggctgcctccccagccaaaggggagccgtcactgcccgagaaggacgaggaccatgcactgagttactggaagcccttcctggtcaacatgtgcgtggctacggtcctcacggccggcgcttacctctgctacagg

SEQ ID NO: 5107 - DNA, 121 bp, synthetic construct
  misc_feature 1..121: note = Description of artificial sequence: synthetic polynucleotide sequence
  source 1..121: mol_type = other DNA
tctgcaggtgcgggtctgggctcatctgaactgtttggtttcattccagttcctgttcaacagcaacacatagcctgaccctcctccactccacctccacccactgtccgcctctgcccgc

SEQ ID NO: 5108 - DNA, 121 bp, synthetic construct
  misc_feature 1..121: note = Description of artificial sequence: synthetic polynucleotide sequence
  source 1..121: mol_type = other DNA
gcgctcatcattctcagatgcattcttccactgtgactggtccttagaccaaaacccttcaacttttccataggaactattcttccatttcaactgctctctgtcaccttgcatggtagcc

SEQ ID NO: 5109 - DNA, 121 bp, synthetic construct
  misc_feature 1..121: note = Description of artificial sequence: synthetic polynucleotide sequence
  source 1..121: mol_type = other DNA
tggcagctggcttactgctccttgcatcttcgctttgggaagactcgtcagaccaggttcctggtttcatttcgcaggtattgtcctcaaagtctgacacttgttgggatccaggcccact

SEQ ID NO: 5110 - DNA, 121 bp, synthetic construct
  misc_feature 1..121: note = Description of artificial sequence: synthetic polynucleotide sequence
  source 1..121: mol_type = other DNA
aatttgcatgtgttattcggccacaggacaatagagcagtgcagctcttgttgattttgaagagctgctgatcgccttgtttgagaagtcagggcccaggaaggcagccaggatgatgcag

SEQ ID NO: 5111 - DNA, 121 bp, synthetic construct
  misc_feature 1..121: note = Description of artificial sequence: synthetic polynucleotide sequence
  source 1..121: mol_type = other DNA
tcaaaaccacaatgagataccgctccacactgactagaacgtccagaatccaaacaactgacagtaacaaggattgaccgagatgtggagaaacggaaactgtcatacgttgctggtagat

SEQ ID NO: 5112 - DNA, 121 bp, synthetic construct
  misc_feature 1..121: note = Description of artificial sequence: synthetic polynucleotide sequence
  source 1..121: mol_type = other DNA
gggcaggtgccaaagatgcctgcaaagctgcaggtctgagcagcagcagcatgggggtatcatttactgagatgaaaaaagactcatccctagaggtgaagagcacatattttggagaaag

SEQ ID NO: 5113 - DNA, 121 bp, synthetic construct
  misc_feature 1..121: note = Description of artificial sequence: synthetic polynucleotide sequence
  source 1..121: mol_type = other DNA
aaaataaaaaaaaaaaaagaaagagaaaaaggaaaaaaaaaaaagtctaccttgtttatgtccatacttggagggcataccgttcttattaaatgccagcaactcacattttaggcagcag

SEQ ID NO: 5114 - DNA, 121 bp, synthetic construct
  misc_feature 1..121: note = Description of artificial sequence: synthetic polynucleotide sequence
  source 1..121: mol_type = other DNA
agtgaatcaagtttttttgtcatttggtcgataatgtgcattcccaataaaattctcatagtttctcttttgtgccatgctgttagataagtgttgatatgacacaggcctttttcctgat

SEQ ID NO: 5115 - DNA, 239 bp, synthetic construct
  misc_feature 1..239: note = Description of artificial sequence: synthetic polynucleotide sequence
  source 1..239: mol_type = other DNA
ccttctaacgtcgagctggatgctggactaccagcaggcacacaagtgtaaagtggcccggagccaccatagggcttctgaacagtcagcacatttggagaatcgacctcgctggagctcaggaaccttggtttgggaggcagcgcctgcgacggatacacacagtcctgcggtaacagtgatgtgatgcctctgaccatatggtacttgggaaggtcatagcctcttctgtaattggc

SEQ ID NO: 5116 - DNA, 478 bp, synthetic construct
  misc_feature 1..478: note = Description of artificial sequence: synthetic polynucleotide sequence
  source 1..478: mol_type = other DNA
cccgggctggtcaacgtcaagggcaaccacgctggacttcagtctttttggaaggggctcaccaaattctgctgcagtattgctggcactccgattacagaaatagtctcttcccggaggtgcccacgggctgtcgttcttggcggggtagtcgatggaaccattgatgttactgctgccgagggtgggctgagaaggagctactggaagaggtttcaattttgtctcgggtctttttgtcttatccggtgcaggggaaacactggttttaggaaacatctcagattgctgttgcctggtggcggccccttggacccccacattctgctgtggtctgtgggacttcaggttacttggggctaaagtgctagagtctatccctgaagtcagaggggccttgcctggcccaggagggctctgcttccccttcgcagatggcagggatttggactgcgccgggaaagcagacttgggcttg

SEQ ID NO: 5117 - DNA, 478 bp, synthetic construct
  misc_feature 1..478: note = Description of artificial sequence: synthetic polynucleotide sequence
  source 1..478: mol_type = other DNA
ggtttacagaaactagagaggggaggcacatcttttcccagcaacgctggcgggcatccggtacgtcgacttctaagcaaggacttgtttcgacagtttttatgaacgtcaggattgtatttatgctccagtctctggtgcatcattaaaacttctggataaaatgtcttgaaggtacaaaatggacaggtgatacttggaatcaaacttttactcaaagaaattgccgggcaattgtgaagagcccccacggataaatttaaaggtttttcgtgacaatccacacttggcctgtatctgcagtcagctgcggtctccgtttgcttctctttggggctaacttcaaggttatgggtggtactgccatccggaggaggagtaacatccgccttggttctacagatgaggttatttgcctgagtttcaactgctgatctcttttttaacaggtccaggtaagcaggggtagggtttttat

SEQ ID NO: 5118 - DNA, 360 bp, synthetic construct
  misc_feature 1..360: note = Description of artificial sequence: synthetic polynucleotide sequence
  source 1..360: mol_type = other DNA
tcactttatcagcactgtcatcagctgcatttttatggaaatcctgagtatctttgtgtgctggtgagaggacagcgctgcccagaacattctgaaaaacagaaggcatctccttaagctgctttgcaggtggactgcctgtaacatctttggcaccatcaaaaaatcttttcaaatttttggtttgcgcactgtcagcggttaatagtgcatcttcagtgtcctgatttttaccatcgttcttgacttcagcagcaacatcggtttgtttttccttgtgatgtctctccaagtgatacctcagagatgtcttctgggctgcagcatattcacaaaattcacatttgtatggtttttcac

SEQ ID NO: 5119 - DNA, 121 bp, synthetic construct
  misc_feature 1..121: note = Description of artificial sequence: synthetic polynucleotide sequence
  source 1..121: mol_type = other DNA
acctgtatgcgttctgagatgaatattgaggtaataatttgaacggaaaaactttccacaataactacactctcttgaagatgtaagatgttttatttttcctccatcatcatttttatct

SEQ ID NO: 5120 - DNA, 453 bp, synthetic construct
  misc_feature 1..453: note = Description of artificial sequence: synthetic polynucleotide sequence
  source 1..453: mol_type = other DNA
cccagatggattccttcgggaagcccatcctcagatccgtcttcagaaccaccttcccctcgatccacggctccattttcatccagaggggcggcgaggtcaggagaacacgtccccggctgcctcccgtccacagacatggtgggcgactccgcgccggccctccggtccttcttgtggaccctggagtgcaagaccagctggtggtaggttctgaaagctttgccgcactcggagcagtgagtgggcttctccttgctactgggtaacttgggatccgcgtccacggagggcgcttcgccgtgggagtgtttgcacttctctttctcttgcgagaggcctgcacaactgcccttatttgtttctccaagctccttctcggaactcgaatcgtcgttgtcggtgctcccttcttgccccgattccttcacttcttggcaaatggcaactttt

SEQ ID NO: 5121 - DNA, 453 bp, synthetic construct
  misc_feature 1..453: note = Description of artificial sequence: synthetic polynucleotide sequence
  source 1..453: mol_type = other DNA
cctttggtagccagctgccaagcctggaaggtggtgaacggatcgagctgagggatgcatctgacaggcttcttccccgtttcagggtgagattttggtctcaagttgaacaactgcaggaagtcctccctcgaggacggcattcctccttgtggagagtctgtctgcgcgctgctggtaccgaaagcagtttttttggtgtgcaccttgcggtgctcaattagactttctttatttggaaataggaagccacaaaccatgcagattttgtaaggagaggagatgctctcggccgcgtgcacctggacgacctcgttgatcgttgctggactactctccaagccttgctgcagtttgcttctggcccccgatttgccattatgtgtccgcatgtgatttttaagaaaccaaggctccttgaatcttcttccgcacatgttacacccgtaagtg

SEQ ID NO: 5122 - DNA, 461 bp, synthetic construct
  misc_feature 1..461: note = Description of artificial sequence: synthetic polynucleotide sequence
  source 1..461: mol_type = other DNA
aaagaatctttgtgtgttctcatgtggatctcaacatcaaaagcgactctaaatgtctgcccacatacctcacagctaaattcattttccttgcaattcttttccttgggaggttctgttcgcacttgacttttatcaagcggactgagatactctgcttcaacccgaagaactgctggttcacagagggtaggccggtgttgcattaagacatgtttattaaggtcttctgaatgtgtgaaggtctggctgcagaacatgcaatccaagggcatatacccctcgatttggatgacatttttttcttgtgtagctcggaatggaacaacagcggtccctttcattgacaaggcatcctccatctccatcggactgccaagagagctgccaatcacttctggcccatccatgtacattaagagggattgagttggcatgtttcctgtcactttcgattgcat

SEQ ID NO: 5123 - DNA, 121 bp, synthetic construct
  misc_feature 1..121: note = Description of artificial sequence: synthetic polynucleotide sequence
  source 1..121: mol_type = other DNA
tgtgttttattatcataattaattaattagagtctgcctagcatctattctcccctttagtagcaatgtcccaattgtttttccattgaggaataacctgtcctcctacctttgatctgtg

SEQ ID NO: 5124 - DNA, 121 bp, synthetic construct
  misc_feature 1..121: note = Description of artificial sequence: synthetic polynucleotide sequence
  source 1..121: mol_type = other DNA
ttgtgttgttgctgtttgtacagacagggtctcactatgttgctcaagctgcctttgctattaaaagtttttttaaaacattaactttggaaaaccctcatgccatctcatcattacagat

SEQ ID NO: 5125 - DNA, 121 bp, synthetic construct
  misc_feature 1..121: note = Description of artificial sequence: synthetic polynucleotide sequence
  source 1..121: mol_type = other DNA
gggattttatttttcagacattgcctaacttagaagagaaagataaacctatcttggaataaaggttagatgaaaacaaagacttaggaaccatggtaagctatagcactcactctctaaa

SEQ ID NO: 5126 - DNA, 121 bp, synthetic construct
  misc_feature 1..121: note = Description of artificial sequence: synthetic polynucleotide sequence
  source 1..121: mol_type = other DNA
ttaaccgtggaagggagacaccctgacctaagccaaggtggccctctcagtttcttttgtaatagctgtactgtcaacagaggcacgcagccccaggccactttctaagacccaaaccagc

SEQ ID NO: 5127 - DNA, 121 bp, synthetic construct
  misc_feature 1..121: note = Description of artificial sequence: synthetic polynucleotide sequence
  source 1..121: mol_type = other DNA
tggcaggggagggttgagacccagaacccgaggggtacctgtcagcccaggcaccatcttgtaaacaggctgccctaggcaccgtgcacgactttgccagagtgttgtcactgggccaggc

SEQ ID NO: 5128 - DNA, 238 bp, synthetic construct
  misc_feature 1..238: note = Description of artificial sequence: synthetic polynucleotide sequence
  source 1..238: mol_type = other DNA
catgctgctgcagcccgcgccgtgcgccccgagcgcgggcttcccgcggcccctggccgcccccggcgccatgcacggctcgcagaaggacaccacgttcaccaagatcttcgtgggcggcctgccgtaccacactaccgacgcctcgctcaggaagtacttcgagggcttcggcgacatcgaggaggccgtggtcatcaccgaccgccagacgggcaagtcccgcggctacggcttc

SEQ ID NO: 5129 - DNA, 121 bp, synthetic construct
  misc_feature 1..121: note = Description of artificial sequence: synthetic polynucleotide sequence
  source 1..121: mol_type = other DNA
cctatccccgcaggggattatttttgtccttgaaggccacatttcccaggccttgaactttgacgggaggagctggaatccaggaggcatctttgtgggagagccccaggtagggttcaga

SEQ ID NO: 5130 - DNA, 121 bp, synthetic construct
  misc_feature 1..121: note = Description of artificial sequence: synthetic polynucleotide sequence
  source 1..121: mol_type = other DNA
tgaccatggccgaccgggcggcagctgagagggcttgcaaagacccgaaccccatcatcgacggccgcaaggccaacgtgaacctggcatatctgggcgccaagccgcggagcctccagac

SEQ ID NO: 5131 - DNA, 121 bp, synthetic construct
  misc_feature 1..121: note = Description of artificial sequence: synthetic polynucleotide sequence
  source 1..121: mol_type = other DNA
aaggccaagtccctgattgttctctcgttttaggctttgccattggggtgcagcagctgcaccccaccttgatccagcggacttacgggtgagtggacatggctggcttggggtgggtagt

SEQ ID NO: 5132 - DNA, 305 bp, synthetic construct
  misc_feature 1..305: note = Description of artificial sequence: synthetic polynucleotide sequence
  source 1..305: mol_type = other DNA
ggctgaccccgcactacatctacccaccagccatcgtgcagcccagcgtggtgatcccagccgcccctgtcccgtcgctgtcctcgccctacattgagtacacgccggccagcccggcctacgcccagtacccaccggccacctatgaccagtacccatacgccgcctcgcctgccacggctgccagcttcgtgggctacagctaccctgccgccgtgccccaggccctctcagccgcagcacccgcgggcaccactttcgtgcagtaccaggcgccgcagctgcagcctgacaggatgcagtga

SEQ ID NO: 5133 - DNA, 121 bp, synthetic construct
  misc_feature 1..121: note = Description of artificial sequence: synthetic polynucleotide sequence
  source 1..121: mol_type = other DNA
cgcagcttggcttttgctggatgacaatgtggctccactttccctatttccagccaggcatttcagagactcttggcagtatcagtccataccgcctccggaggcaccagctacagtgtct

SEQ ID NO: 5134 - DNA, 121 bp, synthetic construct
  misc_feature 1..121: note = Description of artificial sequence: synthetic polynucleotide sequence
  source 1..121: mol_type = other DNA
atttgggagaataatcgtgcaaggaacaccttgtagacacagaaatttgctctgagtccgtaattttcttgatattagtgcctacaaaggtgattgttcagatgaaatgcacacatttagg

SEQ ID NO: 5135 - DNA, 121 bp, synthetic construct
  misc_feature 1..121: note = Description of artificial sequence: synthetic polynucleotide sequence
  source 1..121: mol_type = other DNA
tgtgaaacagcaggccacagatggctgcattcaaaggcaagtgcaaatgcctggtgcacgagcacattttctttttgagagggtggcatcagcccagattcacctctaattacaagaccgt

SEQ ID NO: 5136 - DNA, 121 bp, synthetic construct
  misc_feature 1..121: note = Description of artificial sequence: synthetic polynucleotide sequence
  source 1..121: mol_type = other DNA
ccaacctcacaagattataaatcaatgcatgtgaggtccttggtaagctctaggctctataaaagtgctgtcagcattaatcttgttacctcctcctcttcctttcatacttcctcctcct

SEQ ID NO: 5137 - DNA, 121 bp, synthetic construct
  misc_feature 1..121: note = Description of artificial sequence: synthetic polynucleotide sequence
  source 1..121: mol_type = other DNA
aattaaacaaggtattacacatgttaaatgtgtagcaattaatcaagtttctttctttcttatgttatcaagtaggcatcttatggatatgcagaaatcaaaacacattgaaagctcacca

SEQ ID NO: 5138 - DNA, 121 bp, synthetic construct
  misc_feature 1..121: note = Description of artificial sequence: synthetic polynucleotide sequence
  source 1..121: mol_type = other DNA
tgtttcgaatcccaggaattaagctcagaagtcaattctttctctgcttttctatgactttgcacatttttgctagcagatggatttttatcgcaagtagcagtattcacatcttttgaca

SEQ ID NO: 5139 - DNA, 121 bp, synthetic construct
  misc_feature 1..121: note = Description of artificial sequence: synthetic polynucleotide sequence
  source 1..121: mol_type = other DNA
actggattctgtttgcatctaattccacttattactttgctaacaaacctagctatcatctgggtataatttcaagagtaggaaaacccttggctggagaaggtcgtgtagtgccagctct

SEQ ID NO: 5140 - DNA, 121 bp, synthetic construct
  misc_feature 1..121: note = Description of artificial sequence: synthetic polynucleotide sequence
  source 1..121: mol_type = other DNA
ggtccctggccagggcctccattcagggtgaaatgtgatgggaggctgtggggagagtgagaaacaagacggtcactcagggccactgtgacagaacagtcaaggggacaatgcatgatgg

SEQ ID NO: 5141 - DNA, 121 bp, synthetic construct
  misc_feature 1..121: note = Description of artificial sequence: synthetic polynucleotide sequence
  source 1..121: mol_type = other DNA
caggggagcacatgggcacaggctcagcgggactcctggaatgttctctctttctccaccgcacgagccatttcaaaggcaagaataggcccctcctgaccccgctcaggcaggcctcagg

SEQ ID NO: 5142 - DNA, 121 bp, synthetic construct
  misc_feature 1..121: note = Description of artificial sequence: synthetic polynucleotide sequence
  source 1..121: mol_type = other DNA
ccaaaattatgactgataacattgcaccagatttctaggaatagcatgtgagataggatatatatcataggataacgtatcagatttctaggaattttatagagtttctgcaacattcata

SEQ ID NO: 5143 - DNA, 121 bp, synthetic construct
  misc_feature 1..121: note = Description of artificial sequence: synthetic polynucleotide sequence
  source 1..121: mol_type = other DNA
tttgattcttaaaattttttccaagaaatagaaatacttgaatctcaaattgaacagtgcattataaaagactgattgcattgtttcatttacaagtccattaattcacaagcaagtgcat

SEQ ID NO: 5144 - DNA, 121 bp, synthetic construct
  misc_feature 1..121: note = Description of artificial sequence: synthetic polynucleotide sequence
  source 1..121: mol_type = other DNA
caatattttcaagtttaaaagataacatgttgaaatcaaaatttaattttcttacctttctgggtatgtaagtgattttaacatgagtctctggatcttgtatgtgcatgtggaacactgc

SEQ ID NO: 5145 - DNA, 121 bp, synthetic construct
  misc_feature 1..121: note = Description of artificial sequence: synthetic polynucleotide sequence
  source 1..121: mol_type = other DNA
actctctagattaaaaaataaactacactatttaaattatctgttggatgggatactgaagaaagcaaacattgaatatatgagagaagaaaatagtaaattttacttactcataaagcct

SEQ ID NO: 5146 - DNA, 121 bp, synthetic construct
  misc_feature 1..121: note = Description of artificial sequence: synthetic polynucleotide sequence
  source 1..121: mol_type = other DNA
aaatcattttatccatgatgttttttcttcttatgccctcctcttgcccaaggtctacattttccttttcattttcaaataattaggtaataaatcctgatttgttaccattggagtcaga

SEQ ID NO: 5147 - DNA, 121 bp, synthetic construct
  misc_feature 1..121: note = Description of artificial sequence: synthetic polynucleotide sequence
  source 1..121: mol_type = other DNA
attcttccaagttgaccatgaaatatctttccaacaaatccactgatatgagcccctaagctcacacctatgaaatgaaaattgtcaagagatgcaccatgcttctgcaattaaagagaaa

SEQ ID NO: 5148 - DNA, 121 bp, synthetic construct
  misc_feature 1..121: note = Description of artificial sequence: synthetic polynucleotide sequence
  source 1..121: mol_type = other DNA
ataggaattttaagattttattacttcttctttcatctcctcaaaggaatgaagaaatgttggtgggcagatcttcctttcccatgcagtattttccaattaataatacttctttacctca

SEQ ID NO: 5149 - DNA, 121 bp, synthetic construct
  misc_feature 1..121: note = Description of artificial sequence: synthetic polynucleotide sequence
  source 1..121: mol_type = other DNA
caaaatcttcagtcctgtaagattggttaagggaagaaaaattcatgagaggatgcgatcaagtaatctcttcccacttacagcatgtttgtgtcttctgtgacatgaactccaccactga

SEQ ID NO: 5150 - DNA, 121 bp, synthetic construct
  misc_feature 1..121: note = Description of artificial sequence: synthetic polynucleotide sequence
  source 1..121: mol_type = other DNA
ctgcttcgctataaaatagaaaagaaaaagcaaaggaaacttagaatttattttcactgtccaaactgataagtatattagattatagtttaataagcaccgtctcttgcaaatacaggct

SEQ ID NO: 5151 - DNA, 121 bp, synthetic construct
  misc_feature 1..121: note = Description of artificial sequence: synthetic polynucleotide sequence
  source 1..121: mol_type = other DNA
gtgatgccacatgtaagcttcaccttcataccaagctaatttatcttccaagttgcagttatttaaagtgctggatctacccagtgatgcagaaagagtatccaatctaatctccatttct

SEQ ID NO: 5152 - DNA, 121 bp, synthetic construct
  misc_feature 1..121: note = Description of artificial sequence: synthetic polynucleotide sequence
  source 1..121: mol_type = other DNA
gcattccagtcctcagaagactgcaacagtctggcttttttgaggtgcagcatgccagacccctgatatgtatgtgtattgagaactggaccattactttgacaggtgggaaatgcactgc

SEQ ID NO: 5153 - DNA, 121 bp, synthetic construct
  misc_feature 1..121: note = Description of artificial sequence: synthetic polynucleotide sequence
  source 1..121: mol_type = other DNA
gatgccagcttggcaaggaagggaagtacacatctgttgacagtaatgaaatatccttgataaggatttaaattttggatgtgctgaatatttctttacccaacaaaaacacttttaattt

SEQ ID NO: 5154 - DNA, 121 bp, synthetic construct
  misc_feature 1..121: note = Description of artificial sequence: synthetic polynucleotide sequence
  source 1..121: mol_type = other DNA
tggccaggccatccagacattctagagaaggtgtgaattttacactttgcttgaaacaagtacacatacacacagagaggtattcttaatgttctttactcaaggtagccagcatcattac

SEQ ID NO: 5155 - DNA, 121 bp, synthetic construct
  misc_feature 1..121: note = Description of artificial sequence: synthetic polynucleotide sequence
  source 1..121: mol_type = other DNA
cctcacccctccccaaagaagatgctacaggctgacaagttcagcatgtatttggcagcgcttgtaacagaatgctttcatttttgtttagtaataatttttaagaggagtgtgcaagatg

SEQ ID NO: 5156 - DNA, 121 bp, synthetic construct
  misc_feature 1..121: note = Description of artificial sequence: synthetic polynucleotide sequence
  source 1..121: mol_type = other DNA
gaatttccccatctcctttttatgaagtctccagtagcgttgcctcatttagtaacatacgcttggtttaaaatggaacgaaattgatctctaagcacatgccacacaatctggggagggc

SEQ ID NO: 5157 - DNA, 121 bp, synthetic construct
  misc_feature 1..121: note = Description of artificial sequence: synthetic polynucleotide sequence
  source 1..121: mol_type = other DNA
accaaacaccacgtattctcactcataagtgggagctgaatatttctttcaaatatctgatctaataatatgatggccagtcatcacagtttgcacagtattatgctggttttagtatctg

SEQ ID NO: 5158 - DNA, 121 bp, synthetic construct
  misc_feature 1..121: note = Description of artificial sequence: synthetic polynucleotide sequence
  source 1..121: mol_type = other DNA
gtaagaaaacgacaatccaattagaacatgtgcaaacaagtttaacagacactttcatttaaaaagatagacatttagaaaataagcacattaaaaggatgtttaacaccaatagtcatga

SEQ ID NO: 5159 - DNA, 121 bp, synthetic construct
  misc_feature 1..121: note = Description of artificial sequence: synthetic polynucleotide sequence
  source 1..121: mol_type = other DNA
tgcatctcatgtcattgcaccagcattcacaatagcccaaaagtggacacaacctaagtatctctctatggatacatggataaacaagacatgatacatatatgtagaatagaatagaata

SEQ ID NO: 5160 - DNA, 121 bp, synthetic construct
  misc_feature 1..121: note = Description of artificial sequence: synthetic polynucleotide sequence
  source 1..121: mol_type = other DNA
gggtgtgggttaaaaaactaccaatcaatcaagctgtgtgctcgctatcagggtgatatgacttccaaacctcagcatcatgcatttccgcatgtaagaaatctgcacatataccccctac

SEQ ID NO: 5161 - DNA, 121 bp, synthetic construct
  misc_feature 1..121: note = Description of artificial sequence: synthetic polynucleotide sequence
  source 1..121: mol_type = other DNA
ttgtggagaaaaattggaaaatgtgcctgatgtatttaagaaatagcaaaaaggacaatgtagctggcatgaacaatcaaaagagtagtaggcattgatgctatacatacatatatatata

SEQ ID NO: 5162 - DNA, 121 bp, synthetic construct
  misc_feature 1..121: note = Description of artificial sequence: synthetic polynucleotide sequence
  source 1..121: mol_type = other DNA
cattcactgagccccttaggagggatgaagtacctcccaacatctcagaagcagaataacgaaacgttttgcttatatgattttctctacatccatcccacacacatacacaagagaacaa

SEQ ID NO: 5163 - DNA, 121 bp, synthetic construct
  misc_feature 1..121: note = Description of artificial sequence: synthetic polynucleotide sequence
  source 1..121: mol_type = other DNA
ggttccctgcacttgagtccctctcctttagcacacttaatttcttaggtctctctttatatttcaccatgggaattggggcttggagaactggtgcaaatgctaatactctattgctgaa

SEQ ID NO: 5164 - DNA, 121 bp, synthetic construct
  misc_feature 1..121: note = Description of artificial sequence: synthetic polynucleotide sequence
  source 1..121: mol_type = other DNA
ttcatatatactatgcacaatgcggtatgatgagaaagcagatgagatcagactaatacggaagaggctacaacacattgttttgtaagtaatattatgaagactatggtactacaaatat

SEQ ID NO: 5165 - DNA, 121 bp, synthetic construct
  misc_feature 1..121: note = Description of artificial sequence: synthetic polynucleotide sequence
  source 1..121: mol_type = other DNA
tacccatgagactgggttcacttctatagacataggacacaccattttattgtctaaagagcaaagaagtcctattatattgctgatttggctcatcctgattcagagcctagatgaggct

SEQ ID NO: 5166 - DNA, 121 bp, synthetic construct
  misc_feature 1..121: note = Description of artificial sequence: synthetic polynucleotide sequence
  source 1..121: mol_type = other DNA
ttggctatctgcccttgacatgtcatgacacatgtcctccaagaacaggtacaaccacatcactccatgattcaaaatgtttaatgacttccattagcaaacaaggtcgattttgcctggg

SEQ ID NO: 5167 - DNA, 121 bp, synthetic construct
  misc_feature 1..121: note = Description of artificial sequence: synthetic polynucleotide sequence
  source 1..121: mol_type = other DNA
gaaattggggacctatgctgtgcagtatcaaaatatttggctaaactattgccggagataagttagaaggccaaagacagataattgtggttctagggaaattgttggaaggagccaaaat

SEQ ID NO: 5168 - DNA, 121 bp, synthetic construct
  misc_feature 1..121: note = Description of artificial sequence: synthetic polynucleotide sequence
  source 1..121: mol_type = other DNA
tctgccaccgccgatgaaacaaaacagtcctcacgttcaaagggatggacacgtcttacgtagagcattctaattaattgccatacattggaattgtcatacactgctggtagcaagataa

SEQ ID NO: 5169 - DNA, 121 bp, synthetic construct
  misc_feature 1..121: note = Description of artificial sequence: synthetic polynucleotide sequence
  source 1..121: mol_type = other DNA
ctctaagtcttggtttttcatctggaaaatagaggtaatacaaggaatgtttgtgaagagctgacacataatgagagctcaaaacatgttagctatttggtcttactctttctcccttgta

SEQ ID NO: 5170 - DNA, 121 bp, synthetic construct
  misc_feature 1..121: note = Description of artificial sequence: synthetic polynucleotide sequence
  source 1..121: mol_type = other DNA
gctggtctgaggattcctttctcactgtaccccagggcccaggagcatttccagtagaataatgtgtgtgtggggggcaggggtaggtggggggatgagtgtagattgccttgcctgcctg

SEQ ID NO: 5171 - DNA, 121 bp, synthetic construct
  misc_feature 1..121: note = Description of artificial sequence: synthetic polynucleotide sequence
  source 1..121: mol_type = other DNA
atggcaccacaccttgttccatcttgcagtgctttctcacaaatagcagtgcttctcttcaacacagatgtaggtatctttgcccttttagagtagatttcgtgaactcttttggctcttc

SEQ ID NO: 5172 - DNA, 121 bp, synthetic construct
  misc_feature 1..121: note = Description of artificial sequence: synthetic polynucleotide sequence
  source 1..121: mol_type = other DNA
cctctggccagcttctcaggagtgaataccagggcagaatctggatccaggaccagttaactgttttgcttgttatgagttctttggatttcaagacagatggtacattaacaactcatcc

SEQ ID NO: 5173 - DNA, 121 bp, synthetic construct
  misc_feature 1..121: note = Description of artificial sequence: synthetic polynucleotide sequence
  source 1..121: mol_type = other DNA
ttttgcttttaatttattcatttttttggtcttaaatgtgctggcatactttatacttacgttcaatggaagtgattagggttgttcattagaagcgattatagtgggcatagagttcttg

SEQ ID NO: 5174 - DNA, 121 bp, synthetic construct
  misc_feature 1..121: note = Description of artificial sequence: synthetic polynucleotide sequence
  source 1..121: mol_type = other DNA
ggaagatggtttctacgatagtcaaaggaaaacagttcattgagttgtcactaattgtaaatgtttatcagcctagagaaactaagactgaaagaagacaaaaaattgaagagaaagatcc

SEQ ID NO: 5175 - DNA, 121 bp, synthetic construct
  misc_feature 1..121: note = Description of artificial sequence: synthetic polynucleotide sequence
  source 1..121: mol_type = other DNA
agaagcaaaaaagttagcacaagaaagaatggaggaggacttaagagaaagtaatccacccaaaaatgaagagcagaaaggtatgcagaagccaaaggcatgataagaataatatactctc

SEQ ID NO: 5176 - DNA, 121 bp, synthetic construct
  misc_feature 1..121: note = Description of artificial sequence: synthetic polynucleotide sequence
  source 1..121: mol_type = other DNA
catctctcccactggattccaagctttgtgagggcagctctgtagttcatactcttctaaccttcccaggtcaacatggtgctacctgttggttcatttatttcaaggtatagcaatgaga

SEQ ID NO: 5177 - DNA, 121 bp, synthetic construct
  misc_feature 1..121: note = Description of artificial sequence: synthetic polynucleotide sequence
  source 1..121: mol_type = other DNA
aattctgggggtggaccgtgtctttatctcgtctggcaaaagtggggttaggactaaatacaatgcacatacacgtgcatgtatctttataatagaatgatttctgttcctttgggtatac

SEQ ID NO: 5178 - DNA, 121 bp, synthetic construct
  misc_feature 1..121: note = Description of artificial sequence: synthetic polynucleotide sequence
  source 1..121: mol_type = other DNA
acatcatagggattttttttgtttgctgttgtttttgttgttgttgttttgccaagaaaacatcctgagttccctggtcctgaatctgacctcattaggggtagaggttggagctacgtcc

SEQ ID NO: 5179 - DNA, 121 bp, synthetic construct
  misc_feature 1..121: note = Description of artificial sequence: synthetic polynucleotide sequence
  source 1..121: mol_type = other DNA
tttattgggaggctatgttggtgccacacagatgtgtcgtaggggctaggtatacggggttgcctaaatcagacccagggcccttcattctctcatggaccttctaggctacacatattca

SEQ ID NO: 5180 - DNA, 121 bp, synthetic construct
  misc_feature 1..121: note = Description of artificial sequence: synthetic polynucleotide sequence
  source 1..121: mol_type = other DNA
aatttctcaacagcttaggatgccaccttttaatatgcaacttctaaaaactgaaaactcttcacaatttgcaaaaatctgtgtcaaatgatggcatgtgggcttcctagagagttgattg

SEQ ID NO: 5181 - DNA, 121 bp, synthetic construct
  misc_feature 1..121: note = Description of artificial sequence: synthetic polynucleotide sequence
  source 1..121: mol_type = other DNA
acccgagtgttccatttcttttttctgtaaccttagacactaacaaggcataaaagtccagagggcatagaaggtatcgcctgggtaatttatgtaccctcttctgactttgccaggcagt

SEQ ID NO: 5182 - DNA, 121 bp, synthetic construct
  misc_feature 1..121: note = Description of artificial sequence: synthetic polynucleotide sequence
  source 1..121: mol_type = other DNA
tggggtgcggcagctaagtgacactatttggcagagtggagcaccttcagcagatagaaggaaagatggtggctgatagcagagggagcagatgagagtaatgggaacacaatgtagattt

SEQ ID NO: 5183 - DNA, 121 bp, synthetic construct
  misc_feature 1..121: note = Description of artificial sequence: synthetic polynucleotide sequence
  source 1..121: mol_type = other DNA
agagaaacgacgagaatacaagcagcagagcctggatgctgatgggcaccaaagagggcgacaccctcaggcagctctgctgagcccgcccccacccagtgcaaaacaggtgactggtctg

SEQ ID NO: 5184 - DNA, 121 bp, synthetic construct
  misc_feature 1..121: note = Description of artificial sequence: synthetic polynucleotide sequence
  source 1..121: mol_type = other DNA
tgatttgtgaaatggattttcccattggaacaggtaatgtgtagaccccacagttcagatgcataatgggtgggtatcctgggaagctggagaaggtcttaggaggtgtttccagaacccc

SEQ ID NO: 5185 - DNA, 121 bp, synthetic construct
  misc_feature 1..121: note = Description of artificial sequence: synthetic polynucleotide sequence
  source 1..121: mol_type = other DNA
ctatgtccttttaagaaccagggagaattcaaacacatctgtttcatggtgtaagttactgtcaagaggctctcttaagtcaaagagaaaaatggaaatgtgaaaatgctaagctcttttc

SEQ ID NO: 5186 - DNA, 121 bp, synthetic construct
  misc_feature 1..121: note = Description of artificial sequence: synthetic polynucleotide sequence
  source 1..121: mol_type = other DNA
atcttttgcacaatttgcatccaattatgttattctgtctctaatctagtgggaatctattctcatctccatcagttggccctgcttcataacgcacgtttcctgacagcagttagaggag

SEQ ID NO: 5187 - DNA, 121 bp, synthetic construct
  misc_feature 1..121: note = Description of artificial sequence: synthetic polynucleotide sequence
  source 1..121: mol_type = other DNA
caaacaagaaaaaatcaaatagaaatgcaaatttggcaggtagagaatttgaggaacgtaaccattcgtctccaacttaaacacaattatgttacaaagtgggacaatgataaacacataa

SEQ ID NO: 5188 - DNA, 121 bp, synthetic construct
  misc_feature 1..121: note = Description of artificial sequence: synthetic polynucleotide sequence
  source 1..121: mol_type = other DNA
agcagcaggccccagccgctgtctagcgtgagccccagggacacccctcacctgagggatgaatgtgcagcccaggatcttgggctgtgggtgggaaggggtcgggccctctcggggctgc

SEQ ID NO: 5189 - DNA, 121 bp, synthetic construct
  misc_feature 1..121: note = Description of artificial sequence: synthetic polynucleotide sequence
  source 1..121: mol_type = other DNA
aagcgaattgatattttttaatttgtcattgaaattggtataatcacgaccactcatagaacagtagcatgcatcgtgtgcctacgtgtaatgaaaatagactcagagagatggcaaaatt

SEQ ID NO: 5190 - DNA, 121 bp, synthetic construct
  misc_feature 1..121: note = Description of artificial sequence: synthetic polynucleotide sequence
  source 1..121: mol_type = other DNA
gggactgtcagtaagtcaaagcccctctatgaccagctactgctcatttgactgaggacaaggccaattccccgagcggctgtcatgcagtcactgcggtgttgcaccgtcaatgggagag

SEQ ID NO: 5191 - DNA, 121 bp, synthetic construct
  misc_feature 1..121: note = Description of artificial sequence: synthetic polynucleotide sequence
  source 1..121: mol_type = other DNA
atttaagatctgtatcctggctggaatctagcagtctcttcaaaaattagttctttgagcttttccttaggcaagtcatccaattccatgtcgaacttgaatggtgcttcggcgatgggct

SEQ ID NO: 5192 - DNA, 121 bp, synthetic construct
  misc_feature 1..121: note = Description of artificial sequence: synthetic polynucleotide sequence
  source 1..121: mol_type = other DNA
tcttacctcgtcactcgggtcgtaatactgctccagatatgggtgggccagagcctgttctacttcaatcctcttgtgtgggttgaatgtcaacattttgtccaataagtccagagctata

SEQ ID NO: 5193 - DNA, 133 bp, synthetic construct
  misc_feature 1..133: note = Description of artificial sequence: synthetic polynucleotide sequence
  source 1..133: mol_type = other DNA
cctttggagtcagcatttgggaacagcctgttccatggcaccttatttttgtgtggaagagaaagcaaatagttcctagcttttaaatttattatacaattcaggtcttcttgtgatggggatccaagaatac

SEQ ID NO: 5194 - DNA, 121 bp, synthetic construct
  misc_feature 1..121: note = Description of artificial sequence: synthetic polynucleotide sequence
  source 1..121: mol_type = other DNA
tacccaaaatgtggttcagctggtcaagataatgcttccctggaaagatgggcctgttagaaagcatttctgccagaatgcagcctacagaccaaatatcaatggacttggtgtagccctg

SEQ ID NO: 5195 - DNA, 121 bp, synthetic construct
  misc_feature 1..121: note = Description of artificial sequence: synthetic polynucleotide sequence
  source 1..121: mol_type = other DNA
accttggaattcaacataatttctggagccctgtaccaacgtgtggccacatattctgtcaggaaccctgtgtgatcatggtctggatctgcaacacgggccaggccaaagtcacagatct

SEQ ID NO: 5196 - DNA, 191 bp, synthetic construct
  misc_feature 1..191: note = Description of artificial sequence: synthetic polynucleotide sequence
  source 1..191: mol_type = other DNA
ccttgagatcacaggtggtgttgagcagcaggttggaaggcttgaggtcacggtgcagaacgttagctgaatggatatattttaaccctctgaggatctggtagagaaaatagcagatatggtcattgctgaggtgttgtgtcttcaagagcttgtaaagatctgtttccatgaggtcctgtactatatat

SEQ ID NO: 5197 - DNA, 184 bp, synthetic construct
  misc_feature 1..184: note = Description of artificial sequence: synthetic polynucleotide sequence
  source 1..184: mol_type = other DNA
cacatctttcatttgctcgatggttggtgctcgaataatgtcattgattccaatgatgttctcatgtctgaagcgcagtaagatttttatctccctcagggttctctggcagtaggtctggtgctcaaaggggctgattttcttgatagctactcgaactttgttgacattatcataagcagag

SEQ ID NO: 5198 - DNA, 121 bp, synthetic construct
  misc_feature 1..121: note = Description of artificial sequence: synthetic polynucleotide sequence
  source 1..121: mol_type = other DNA
ccacaccatgccgtaggcgccctcgccgatgtacgagaggttggtgtagcgcggccccacgtcgaacacctgcccgcggaccatctccgggcccgcgcccgccgccgccgccgccgccatg

SEQ ID NO: 5199 - DNA, 360 bp, synthetic construct
  misc_feature 1..360: note = Description of artificial sequence: synthetic polynucleotide sequence
  source 1..360: mol_type = other DNA
ggtgagggtggggtgaagggaggagctcaaggtggagatttgcatgcaggccccaccctcctctttggcagaggagataagacagggctgggggcaggcccagtgctggggtctcaggaggcagcgctctcaggacatctccaccatggcctgggctctgctgctcctcaccctcctcactcagggcacaggtgacgcctccagggaaggggcttcagggacctctgggctgatccttggtctcctgctcctcaggctcaccggggcccagcactgactcactggcatgtgtttctccctctttccagggtcctgggcccagtctgccctgactcagcctgcctccgtgtctgggtctcc

SEQ ID NO: 5200 - DNA, 480 bp, synthetic construct
  misc_feature 1..480: note = Description of artificial sequence: synthetic polynucleotide sequence
  source 1..480: mol_type = other DNA
tggacagtcgatcaccatctcctgcactggaaccagcagtgacgttggtggttataactatgtctcctggtaccaacagcacccaggcaaagcccccaaactcatgatttatgaggtcagtaatcggccctcaggggtttctaatcgcttctctggctccaagtctggcaacacggcctccctgaccatctctgggctccaggctgaggacgaggctgattattactgcagctcatatacaagcagcagcactctccacagtggtccaagttcctggggaactgagaccaaaacctgccctgggctctcaggccccctccttgctctgaagatgcttcctcacccagtgcaagcggcttcctgcagtgcggccttgagaattcttctctctcagctccttccctttccaccatgaattccaaaaggaaacccgctctgtggtttctcatccaggacagggacagcttcctgatgcttgtg

SEQ ID NO: 5201 - DNA, 361 bp, synthetic construct
  misc_feature 1..361: note = Description of artificial sequence: synthetic polynucleotide sequence
  source 1..361: mol_type = other DNA
tgccgtggtccctgaatgtgcaactcttgttagctcttcaaatgcagggacagtgacaaggagcttcctgattgatgcagtcactgcttttttcagggatgtcttcaccctacatgcatcaccatctcccacactgtgggtagaattttagcaactacattctgatggttatcgccacaactttgatcttaaataacaatgcagcgaacatccctgtgcagcctcctttgagttcctgtgtgaatatgaccacaggattcatttctaaaagtgaaattgagggtcagaaagatgtgtgtgtgtaattttcacccgttgttgtcagattcccctccagagggattctaccaattttcaatgc

SEQ ID NO: 5202 - DNA, 207 bp, synthetic construct
  misc_feature 1..207: note = Description of artificial sequence: synthetic polynucleotide sequence
  source 1..207: mol_type = other DNA
aatgagacccaagacaggccaagtgggttgtgagacccctgaggagctgggccctggtcccaggcagcgctggcccctgctgctgctgggtctggccatggtcgcccatggcctgctgcgcccaatggttgcaccgcaaagcggggacccagaccctggagcctcagttggaagcagccgatccagcctgcggagcctgtggggcag

SEQ ID NO: 5203 - DNA, 440 bp, synthetic construct
  misc_feature 1..440: note = Description of artificial sequence: synthetic polynucleotide sequence
  source 1..440: mol_type = other DNA
tcatgcccagcaggctcctgctccagcccagcccccagagagcagaccccaggtgctggccccgggggttttggtctgagcctcagtcactgtgttatgtcttcggaactgggaccaaggtcaccgtcctaggtaagtggctctcaacctttcccagcctgtctcaccctctgctgtccctggaaaatctgttttctctctctggggcttcctcccctctgtcctcccagccttaagcactgacccttacctttctccatggggcctggaggaggtgcattagtctccgggtaaccggcaggaagggcctccacagtgggagcagccggatgcagcctggtcccggggcctgagctgggattgggcagggtcagggctcctcctctcttccagggcagatgtctgagtgagggacagaggctggttctgatgaggggccc

SEQ ID NO: 5204 - DNA, 321 bp, synthetic construct
  misc_feature 1..321: note = Description of artificial sequence: synthetic polynucleotide sequence
  source 1..321: mol_type = other DNA
ggtcagcccaaggccaaccccactgtcactctgttcccgccctcctctgaggagctccaagccaacaaggccacactagtgtgtctgatcagtgacttctacccgggagctgtgacagtggcctggaaggcagatggcagccccgtcaaggcgggagtggagaccaccaaaccctccaaacagagcaacaacaagtacgcggccagcagctacctgagcctgacgcccgagcagtggaagtcccacagaagctacagctgccaggtcacgcatgaagggagcaccgtggagaagacagtggcccctacagaatgttcatag

SEQ ID NO: 5205 - DNA, 239 bp, synthetic construct
  misc_feature 1..239: note = Description of artificial sequence: synthetic polynucleotide sequence
  source 1..239: mol_type = other DNA
atcttgttttatctcattttttcttttctcacatataattcctagcctttcctgggttctcaatttgtggtggaaagaaccctgaacccagtgggaaagttgcctatgtgaaggggttctcagttccctgggcatctctgcaggtaaggccttcctcacccagacaccccttcctcagctctccactgtacccctgagccaccagcctcgcctggctgggaccaggggggtgtcacact

SEQ ID NO: 5206 - DNA, 477 bp, synthetic construct
  misc_feature 1..477: note = Description of artificial sequence: synthetic polynucleotide sequence
  source 1..477: mol_type = other DNA
ctcctagattctgcctttcaacagaaacctaaccacgcatcacacggcacttctcgcatgccttctgtgtctgctccagtctctgggctaaagagttgctggtccgggacaggggataggtccgctcttggtcagatgccaggtccctgccatggcatccctgaccctatgcaacaagccagtgactctggtgagctctctgtgtcaggagaatccatgatccagagtttcatattgtcctgcaagcatctggtgggctgtagctcttgccaaactgggaaataccatggcccagcatcaggatgcaggacagtccggagagggaaatcaggagaagtgaaggggtctctggggagcccagatgtgggctagaggcagaagtaagggtgaagagcacctatgagtcaatgtcatggtctcagcaggaacacagttgaaaatccccattccacacaagaccgtttagcaggaaaggag

SEQ ID NO: 5207 - DNA, 478 bp, synthetic construct
  misc_feature 1..478: note = Description of artificial sequence: synthetic polynucleotide sequence
  source 1..478: mol_type = other DNA
tccatacttgtgctgccaccaggatgtcctgagaagccttggagaatgaaacatacaggtgcatttcctagacttgacaatgcacgttagccaagtaaaggcaatgaaaagttctctactagggaaataatttcctgtggtaaagcttagcttatgtaaagtcacatttatccatctggcacctctaaaagccccataatattctgcaagatactagtatgtcatggaagtagtttatgaaacataaagtgagatttaagaacaaagatgttacgggtgtatgataagatggctacaggctcagggtcaggctcgaggagtgaaggaggccgtgtcaaattcatgacaagagttggagctgggccaggctgggtcagggctgtgtgaatgcagacagagggctacaggcaaggtcaggcatccatgaacactcagctcccccagaccctcctgcccactgggaccttcgccctccctt

SEQ ID NO: 5208 - DNA, 478 bp, synthetic construct
  misc_feature 1..478: note = Description of artificial sequence: synthetic polynucleotide sequence
  source 1..478: mol_type = other DNA
ggtcacagtggtggagccttcctacccaaacctctatggaggccctggatgactgtgcgttcttagtgcccacgcaaacttagactccctgtctctgcctccagcacatcaggaatgtggcagctgagttcaccagagctgctgggtggtcccgacaggccagggacagagcccgcaaagacaggaagctctgcagtcacaatgaggcagagaaatggccccttggtgcttgatcacagccacccctgatccaaatcccagcctctgaattagaagaaggctaaaaggttctagtggccacagtccctgtctaagcccatttcacaaatgagaaaactaagaccacccaaggagggccagttacgtaggcctgctgggtacaaggccaaggtctacttcacacccagcagctgtccaaagactgagctgtgtcataagtttatattatgaagaactctgaacatataaataaggagac

SEQ ID NO: 5209 - DNA, 476 bp, synthetic construct
  misc_feature 1..476: note = Description of artificial sequence: synthetic polynucleotide sequence
  source 1..476: mol_type = other DNA
agaaaaataacagtgtcccatgttctcatcacccagcactcaaaataagcaattcacagatgatgccgacccacccacagcaaaataaattctcccttacacaacatttagaaagaaatacaagacatcagatctgttcagctgtaagtactccattactgtcctggaatgacatggaccttaaaataactataatatcactaccaaacctaaatagaaattatcactaattccctaatatcgagaaataagcagggtctcctcaaatgcatcagaaacaccagaagtgctttggcttagttacatgttggtgctgttggtatttgggggtttaagtttatatgaggagcaatatgacatcaaatggtgatgggtgcatgtgccatcaggctggttgtcactggtgaatatttcctcaattgctctagagcctcccggcaaggcaggagctgcaggagctgagagctgtctggaga

SEQ ID NO: 5210 - DNA, 477 bp, synthetic construct
  misc_feature 1..477: note = Description of artificial sequence: synthetic polynucleotide sequence
  source 1..477: mol_type = other DNA
acttcccctggctgctatacagccacgcctcctggagcaggaacctagggcttccctcagcttttattttcctggaaaatgattctagcatgaaggggattaacttgattcagattggacattgcaaaatagcttgcaaggacagggagctgctaccagcagagtcacccatgtcagactgccactcttgtagtaatgttagctgcataggatggtcaatagctacatccctcagaagggaaggaaggcagagggttgaggcttcagttcacctccttctcatgagtgctgcagagtgtctgtgatgtcagaggtctgcagctgggctctgttcacccaggagtgtgcttcatgctctaggaaggagccactttgcacacagaagatccggggcccagccatccttccagggtgaacaattcatgtcttctctcatggtgaactctaggattcaagccatctaatgcttttgaagcc

SEQ ID NO: 5211 - DNA, 478 bp, synthetic construct
  misc_feature 1..478: note = Description of artificial sequence: synthetic polynucleotide sequence
  source 1..478: mol_type = other DNA
actgtcattatatttaattgatgatgacaggtggccaccaatgatgaatattttcccagggggagtctccccaagtggcttcagacttcctcacatggccccaggggattaaatggctcctgattactcagaggataagaggttctgtcttatcatgttcctttcttatttgtcttatgtgtctttcctgccccaggcctgggatcccccactgatctcccttcccttagtgagaggtgatatttggagaccacattctggaggctccctcatgtcccccatttgaaaaagacaacggcagcctccaccctagctgtcccacccaacatgaggccagattcaggggtgcagggatgctcccaaggttaccctaacagatgtgactggcacttcatattgggaccagccaggcctcactgaccaggcctatccaactagaactactccagaaggtggggctgaaacccaccaaggttcc

SEQ ID NO: 5212 - DNA, 477 bp, synthetic construct
  misc_feature 1..477: note = Description of artificial sequence: synthetic polynucleotide sequence
  source 1..477: mol_type = other DNA
cagaacactgcactctagggcaatcagcctctgcatgggaggagaggagcaccctctgcaccaccccatggtgttaccaaaagttgaaccatgggttggttcaactttgcagagaagagaccacctatcccatctgtggaaattcactccttagcgacactaatgccctctaataaattcaatcctgggcctgagtgatggttggtgcaaaaaacaaattcaagatcccagtgtcctccagaagcctggatttccagggatcctgctgtgggtcacaggatgtcaccggtcccctctctctgtgggttaagtgtgggggccatgtggactccctcatgagcagatgccaccaggaccactggccccagcttcctccttcacagctgcagtgggggctggggctaggggcatcccagggagggtttttgtatgagcctgtgtcacagtgttgggtgttcggcggagggaccaagctga

SEQ ID NO: 5213 - DNA, 478 bp, synthetic construct
  misc_feature 1..478: note = Description of artificial sequence: synthetic polynucleotide sequence
  source 1..478: mol_type = other DNA
ccgtcctaggtgagtctcttctcccctctccttccccgctcttgggacaatttctgctgtttttgtttgtttctgtatcttgtctcaacttgtggtcagcctttctccctgcatcccaggcctgagcaaggacctctgccctccctgttcagacccttgcttgcctcagcaggtcactacaaccacttcacctctgaccgcaggggcaggggactagatagaatgacctactgagcctcgtctgtctgtctgtctgtctgtctctctctctctgtttgtctctctgtctgtctgacaggcgcaggctgggtctctaagccttgttctgttctggcctcctcagtctgggttcttgtcggaacagctttgcccttgggttacctgggttccatctcctggggaattgggaacaaggggtctgagggaggcacctcctgggagactttagaaggacccagtgccctcggggctgatgctc

SEQ ID NO: 5214 - DNA, 478 bp, synthetic construct
  misc_feature 1..478: note = Description of artificial sequence: synthetic polynucleotide sequence
  source 1..478: mol_type = other DNA
gggaatcacagagctgggacccagagccaggatccagacccagaatgaggtaggaggtggaggggctgccctgggcgtctgggggctgccagggactgagccctgagccagcctgagactcaggaaaccccgtcaggagggagaagggagaagcagactctggacaccagaaagccaggggaagggtcacaaaaggagtggatgtgacggaagggcgggctcctgggtctcttcagaacatatcccctgtgcccagggggatcagaggggcagagtccactgcgtgaaagccccactgctatgaccaggtagccgggacgtggggtggatgccagaaaagactccacggaataagagagagcccaggacagcaggcaggctctccgatccccccaggcccttgccccatacacgggctccagaacacacatttggctggaacagcctgagggaccaaaaggccccagcatcccacaga

SEQ ID NO: 5215 - DNA, 360 bp, synthetic construct
  misc_feature 1..360: note = Description of artificial sequence: synthetic polynucleotide sequence
  source 1..360: mol_type = other DNA
gctgaggagccaggccagaaaagtaaccccagagttcgctgtgcaggggagacacagagctctctttatctgtcaggatggcaggaggggacagggtcagggcgctgagggtcagatgtcggtgttgggggccaaggccccgagagatctcaggacaggtggtcaggtgtctaaggtaaaacagctccccgtgcagatcaggacatagtggaaaacaccctgacccctctgcctggcatagaccttcagacacagagcccctgaacaagggcaccccaacacctcatcatatactgaggtcaggggctccccaggtggacaccaggactctgaccccctgcccctcatccaccccgcagg

SEQ ID NO: 5216 - DNA, 237 bp, synthetic construct
  misc_feature 1..237: note = Description of artificial sequence: synthetic polynucleotide sequence
  source 1..237: mol_type = other DNA
cgtgcatgacctggcagctgtagcttctgcgggacctccactgctcgggcgtcaggctcaggtagctgctggccgcgtacttgttgttgctctgtttggagggcgtggtcatctccacgccctgggtgatgggggtaccatctgccttccaggtcaccgtcaagattcccggataaaagtcattcatgagacacaccagtgtagccttgttggcttggagctcctcagaggacggcg

SEQ ID NO: 5217 - DNA, 476 bp, synthetic construct
  misc_feature 1..476: note = Description of artificial sequence: synthetic polynucleotide sequence
  source 1..476: mol_type = other DNA
ggaacagagtgaccgagggggtggccttgggctgacctgtgtggacagaggagggggtgagagatggcagagggagtgtggggtgttgtggagcgcctctctctgtctaaagtctctgggagggttcatggtgtggccgcctggtccacccagggcctctccttccctcctcattccctcctttccactggagccctctggagagcagacagccctgtgccttcctaggagcccttcccaagtcacctttcccaggtgtcctggcccagccctttcctctgcagcctcggtttccccgtgtgcacccagggcaggctgtgctccctccttcctggtttctggagtctgagtttggaatctaggggtctccctcacagcacacaaaactatactggcaggatgtggggagacccaagcctggcatggcctggagcttcccatcccctggggcaccaggctgtgccccagcctggccc

SEQ ID NO: 5218 - DNA, 476 bp, synthetic construct
  misc_feature 1..476: note = Description of artificial sequence: synthetic polynucleotide sequence
  source 1..476: mol_type = other DNA
actcagctctcctggtgaagcgtgggctccacccagacacaccctggggctctgccgtcgcccctgtccccaccagcccgaccacaggacccttcacatcggctgggttcttggggctgctcccccagactttggggcaccgcagcccccatgcccaccccagcagcctctgatgcccctggacttcacctggcagccatggagttctctgcactcccgtttactccccgctagtcaccttctgagtctaaggtgcccttcctcaaatgaaggtgggaggtcgacccatgaacagagagacaccaggccccagagatgacagggctccagggacaggcacatctctgcactaagagaccctctcctttctggtgactgtcctgggagggctgggctctgggacctcatccgttcctctgtgtccccatgccctgaagacccagcagaggccacagagctgcagcctagacccagag

SEQ ID NO: 5219 - DNA, 475 bp, synthetic construct
  misc_feature 1..475: note = Description of artificial sequence: synthetic polynucleotide sequence
  source 1..475: mol_type = other DNA
ccctctctgtgccctccattggtctcccctgggggtgacccctgtgtccccaggcccccgtgtggccctcccaggctggatgggcatccagccctcagcctagaacctggggtcccagggactgtctctaaggccactgcagggcccctcatcagaaccagcctctgtccctcactcagacatctgccctgggagaggggaggagccctgaccccgcccaatcccagcccaggccctgggaccaggctgtgtcctgctgttggaacctgaaggcggctgctcccactgtgggggcccttcctgccattaccctgagactaacacatctcctccaggccccatggacaaaggtaggggtcagtgcttaaggctgggagggcagaggggaagaagccccagagagagaaaacacattttccagagacaggagagggtgggacagcctgggaagttagagccacttacttaaaacggt

SEQ ID NO: 5220 - DNA, 477 bp, synthetic construct
  misc_feature 1..477: note = Description of artificial sequence: synthetic polynucleotide sequence
  source 1..477: mol_type = other DNA
gagctgggtcccgctgccaaacacatgcgtcactgagttatgcttggattgaaacccccggggccagcacctggggccagtccaggagccgcgctggagcaggaacctgctgggagtgaggggcacagggctgcagtgtgtaggctgtgacccaggcacagggtaggggggtggccagtgtcccagtagtgtcccccagtagtgtctctgtgcctgtcccttctctgaggcaggtgctgccccagcgtgtgtccccctctctgaaactgttggtgctgatggcaacgctgggcccagtaggtcccagcaactccctgagtgacacatcccctcaggcagctgtgccgtgtggctgaggagtcctcagctggctcggacctgtccacctcacttggcctcattttaagggcctctgaaatctgccacaagtgtccccagtcaaggaggctgacttcctccctggaccaggacattggg

SEQ ID NO: 5221 - DNA, 476 bp, synthetic construct
  misc_feature 1..476: note = Description of artificial sequence: synthetic polynucleotide sequence
  source 1..476: mol_type = other DNA
tcattcctgactcaagaggagagtcctctgcttttatatctacccatggagatgcagctcagtctcactttgttcatgaagccttttctgatcattcattccatccgtccgtccatccatctgtccatctgtccatctatgcatctgtccatctattcatctgtctttgcatccatctatcatctgtccattcgtccatccatctacctgtccgtccatccataaatccatcctgtctaccaggcactgtgtgctggggacatggtgtggtcccccaggctctcacccccatctctcccaggccatggtcaacaaggccctcctcatggtcatgtccaaggtccttctgctgtacctggtgtctccgctggatgcgacacagggctggcccctctttccagtgactcttttccccttggggtctgagactcccctttcctcttcccctggcatctgtttctccatggcccatgcct

SEQ ID NO: 5222 - DNA, 360 bp, synthetic construct
  misc_feature 1..360: note = Description of artificial sequence: synthetic polynucleotide sequence
  source 1..360: mol_type = other DNA
ggctgctgactccccagaccccacccagacctctttcttagccattttcacactctgtgacccccactattgcccacatggtgaggctggagtctatcccagctccaaaccctctcagctcctcaattgcctactgaccttgcccagtgggctacccaacaggagcctcaaactaatcacgtccagaggagatgaccaccttcccccagcccagctcattttctgtcttcatctcatcacaatgaccatgggcggtctcaacccctcagccagaaacctggagtccctggactcagtcacctcgcctcccacactgaaatggcttctgcgaacttagctactgcatctagacattctttt

SEQ ID NO: 5223 - DNA, 359 bp, synthetic construct
  misc_feature 1..359: note = Description of artificial sequence: synthetic polynucleotide sequence
  source 1..359: mol_type = other DNA
tttaactatttttaaacgtacagctccgtggcactaagtacattcacaccgttgggcaaccttcaccaccatccatctccagaactctttcatcttcccaaacagaaactctaaacccgttaactacagtcccccattcttccctccccctcaccctgctaacctcaaatctactttttgtccaagtgaatttgcctattctaggtacctcatagaagtggattcaaatgacatttgtccttttgtgtctggcttatttcactaagtataatgtcttcaggtttcatccatgttgtagaagatttttgaaattaatttaaaaataattaacattcaaaacctattaagacctattaaaa

SEQ ID NO: 5224 - DNA, 240 bp, synthetic construct
  misc_feature 1..240: note = Description of artificial sequence: synthetic polynucleotide sequence
  source 1..240: mol_type = other DNA
tcatctctacaaaaaattatgccggtgtggtagcgcatgcttgtagtcccagctactggggacgctgaggcagggatattgcttgagcccagcagttggaggccagcccaggcaacatagtgagacccccatctctaaaaaaataaataaaacaaataaatttacaactaaatataaaaagtgatacacaacctatttcttaaaaacaatgaaaatatcttttaataagctatgaataga

SEQ ID NO: 5225 - DNA, 121 bp, synthetic construct
  misc_feature 1..121: note = Description of artificial sequence: synthetic polynucleotide sequence
  source 1..121: mol_type = other DNA
ggtgggatctcagcttactgcatcctcaacctccgaggcttaagcaatcctctcaccagcctcctaagtagctgggaccacaggcaagtgccaccatgactagctagtttttatatgtttt

SEQ ID NO: 5226 - DNA, 121 bp, synthetic construct
  misc_feature 1..121: note = Description of artificial sequence: synthetic polynucleotide sequence
  source 1..121: mol_type = other DNA
tagtatttctaaagattataaaaactcatattcatatcccccccagcataatacctttttttttttttgagtgggagtctcgttctgtcgtccaggctggagtgcagcggtgcaatctcag

SEQ ID NO: 5227 - DNA, 478 bp, synthetic construct
  misc_feature 1..478: note = Description of artificial sequence: synthetic polynucleotide sequence
  source 1..478: mol_type = other DNA
tctataagatttctaaagattctaatataaaaacttacattaatagccccccaacataataccattttttattatctgtgtctccctccacctgtcacccgtcccttgtggagacccctcgggccttccccatcccagtctctgttctgtaggcatcaccctgcatgtggctgtctcctcacccggcccccgctccttgtggacttgaattggggcaaatctagatcctctgggacctcagccccagcacagagcctgaccctgatggggactccttgctcagaagtccgtgcaggacactgacacccggtcccggcctgccaccatgctgaccccgcctccatggccgggctcctggtgtgggtcaggtcggctgccactgctggagctctcaccacagccaccccagcatcctctgggtgggtgggacgctgaaggccctcaccagtcagggcccctcagattgcagaaggggaaa

SEQ ID NO: 5228 - DNA, 357 bp, synthetic construct
  misc_feature 1..357: note = Description of artificial sequence: synthetic polynucleotide sequence
  source 1..357: mol_type = other DNA
gagccaagatctcgccattgcactccagactgggcgacaagagtgaaactctgtgaaactttatttgaaaaagaaaaaaaagagagaaaaagggaaactcaggtcccagagatgcacgtgtccgctcgatcagcttagaggatgggacaggggagagctagaggggatagcttgggccttagaatctgtgcccatgagctgagtgactcggacgggtcacctcacctctccgggctctatccccgtctgcacaaaggggatcacagcaggacctgcctatggggccaccgagagggaggttctgcccctgaaatgattatcgcctgtgggtataacatgcaccagtgaacaggctgt

SEQ ID NO: 5229 - DNA, 475 bp, synthetic construct
  misc_feature 1..475: note = Description of artificial sequence: synthetic polynucleotide sequence
  source 1..475: mol_type = other DNA
tgtgtcccaaatgctcataaatggaccccgatgcttggtgctttgtctggggacctcccaccacacgcagagtggtggcaatggctgaggtcacacagggagttgtggcctccctagagcctctcctgggcttcttctttggaggcacttgcaccctggataagcttgtgtctcctaggggctggtttcaggaggcgatgctggctgaggtctagtgacccagggactccaggaaaggcccctcacaccttagctggagctccagggagtggcccctgcccagtgagggtgggagtggacaggtgacataggccaaggggaaaagaggaggggggggaggaggagtgggaggaggaggagggagaggcctgggcatccttcagggatagcggccaccactcctgtggacgtcctgcccctgcctccagtcctgccctaccccaaggactagggggaggtgagggagacattggcc

SEQ ID NO: 5230 - DNA, 478 bp, synthetic construct
  misc_feature 1..478: note = Description of artificial sequence: synthetic polynucleotide sequence
  source 1..478: mol_type = other DNA
ttggtgccaaatgtaagtgggggaagaaatctcaggaatcaagataaataatattttaatatgacattaagcaataaaaattaattcaaagatggacaaaatcttgacactttagttaaagtcagtgtctgtggctcccctccagggattaaccttcctcctcacccctctggctcgtctccccttggtcatcctttcccgcctctgccacccagacccccacatcccctggaatctctcaccccttacctgccccaccggctcctcaggctggaccggctgcttcctccaggggctccagggcccagggccctgctctgcgatgcagctgttgggcgcagcaggccatgggttaccacggccagacccagcagcagcaggggccagcgctgcctgaggttggggcctggctcaccaggggcctcaaggcccccctggcctgtccctggcctcatcggccctcagggtcagaggtcct

SEQ ID NO: 5231 - DNA, 121 bp, synthetic construct
  misc_feature 1..121: note = Description of artificial sequence: synthetic polynucleotide sequence
  source 1..121: mol_type = other DNA
gaggcaatattgtgctcgtaacagttctgtctggttgatgattcagcacagtcccaatcaaaattctaacagatttttctatgggaattgacaacctaattctaacatttatatgagactc

SEQ ID NO: 5232 - DNA, 121 bp, synthetic construct
  misc_feature 1..121: note = Description of artificial sequence: synthetic polynucleotide sequence
  source 1..121: mol_type = other DNA
tccctctagtctcagcatagccctgggttacagagtacaatttcatgtactctttctcagtctcctccctatcacttcattaatcaccgtttgaattctgctctccttgaaagcagctggt

SEQ ID NO: 5233 - DNA, 121 bp, synthetic construct
  misc_feature 1..121: note = Description of artificial sequence: synthetic polynucleotide sequence
  source 1..121: mol_type = other DNA
agactgacatctaacaagtgttcggtaattgcaatgtgtttggcattgtgataagctccgtaaagatgatctcatttcatcttccctgcaatcctgtaaatgacaaactggctgcagctca

SEQ ID NO: 5234 - DNA, 121 bp, synthetic construct
  misc_feature 1..121: note = Description of artificial sequence: synthetic polynucleotide sequence
  source 1..121: mol_type = other DNA
catattttaaaaccaccacaaagagtgccagaaggccagaatgatgtgacaagtagatgctgtcaaagtctttggaaagagcctcccagggagaagatctgcaaggacaaaggcctagagg

SEQ ID NO: 5235 - DNA, 121 bp, synthetic construct
  misc_feature 1..121: note = Description of artificial sequence: synthetic polynucleotide sequence
  source 1..121: mol_type = other DNA
tacaccccaggctcagctttcagccccaggtcccaccaacaggccatcccacttggaaagtttgcctgacattcctgagccgggccgccttgccaaagaaaactcaagcgaggcttgtctt

SEQ ID NO: 5236 - DNA, 121 bp, synthetic construct
  misc_feature 1..121: note = Description of artificial sequence: synthetic polynucleotide sequence
  source 1..121: mol_type = other DNA
gagtgggtagagcagggggagtaagatagcataggtgtgagtgaaacctctactgctgatcagtgctgtgttgggggatgtttgctactatggcataacccatcctgcactgactgataga

SEQ ID NO: 5237 - DNA, 121 bp, synthetic construct
  misc_feature 1..121: note = Description of artificial sequence: synthetic polynucleotide sequence
  source 1..121: mol_type = other DNA
gttcaaaccacggagttcacaacacagcagcacacacagctgggcgctttgtggtctcggcaccctcggcttccccttcacggggccgctttcgactagtagaaggctgaaaataaaggaa

SEQ ID NO: 5238 - DNA, 121 bp, synthetic construct
  misc_feature 1..121: note = Description of artificial sequence: synthetic polynucleotide sequence
  source 1..121: mol_type = other DNA
atcatcaggaatacgaatacctgggctagaacctggggtagagctgtggattcattttcctcagacagaagatcttgaaactttctcttcatgtcttcatcctgtgagggaattaaaaaca

SEQ ID NO: 5239 - DNA, 121 bp, synthetic construct
  misc_feature 1..121: note = Description of artificial sequence: synthetic polynucleotide sequence
  source 1..121: mol_type = other DNA
gcactgtcccacacccacctgaagccacgggtgtcttaaggcttcttctgtcgtaaaacgtgcctttggatccactaccaacaacttcttgacaaggtccagagctaaagcaacaattggg

SEQ ID NO: 5240 - DNA, 121 bp, synthetic construct
  misc_feature 1..121: note = Description of artificial sequence: synthetic polynucleotide sequence
  source 1..121: mol_type = other DNA
tacctttctctgagacttctgcccagacttcaggaatgaagttgtattttccactggtgatctgatccttcagtgacacttgagtcctatgctcagagaaaggtggatacccactaaggct

SEQ ID NO: 5241 - DNA, 165 bp, synthetic construct
  misc_feature 1..165: note = Description of artificial sequence: synthetic polynucleotide sequence
  source 1..165: mol_type = other DNA
ccagataaaaagaataactcctaaactccagcagtccacagcacggttatacccagcagtcccaacagaaacaagaacttcaggcgccaagtaggtgggggttccacataaggttctcatgagagaggtctctcccaaaatcttggagtgcccaaaatcagtaat

SEQ ID NO: 5242 - DNA, 121 bp, synthetic construct
  misc_feature 1..121: note = Description of artificial sequence: synthetic polynucleotide sequence
  source 1..121: mol_type = other DNA
gaatgccaatttcttacctttataagacagtcctcttcttgagatgacagtaaaacattctctggctttaagtcacggtgtataataccgttttcatgaaggtactacacagaaaggcagg

SEQ ID NO: 5243 - DNA, 121 bp, synthetic construct
  misc_feature 1..121: note = Description of artificial sequence: synthetic polynucleotide sequence
  source 1..121: mol_type = other DNA
gcttcttttacctgcacagccaagagcatctggtaaaaatagagcttgcaggtagcttctttcaggcgtttattccccaccactttgtcaaacagctctcccccttccatcctgaaacaca

SEQ ID NO: 5244 - DNA, 121 bp, synthetic construct
  misc_feature 1..121: note = Description of artificial sequence: synthetic polynucleotide sequence
  source 1..121: mol_type = other DNA
acagaaatttttaaaaagtttactacttacaattccaaaacaatataataatcttctgcatcaaaaaagtttttaatcttgatgatgcaaggctaagaagagggggagaaaaaagggaaag

SEQ ID NO: 5245 - DNA, 121 bp, synthetic construct
  misc_feature 1..121: note = Description of artificial sequence: synthetic polynucleotide sequence
  source 1..121: mol_type = other DNA
taaatctaagtatgagtcatataataatacttacatgatttagctttttcaaaatttctatttctgtttcaacattgagagctgggtcctttgataaacagaataacagagtttattagta

SEQ ID NO: 5246 - DNA, 121 bp, synthetic construct
  misc_feature 1..121: note = Description of artificial sequence: synthetic polynucleotide sequence
  source 1..121: mol_type = other DNA
acttactgcctctcttgctgaaccaatagcaaacttccttttgctgatgatctttatggctactttcttacatgttttcctctcgaaagccagctttacctctccacaggcaccactagag

SEQ ID NO: 5247 - DNA, 121 bp, synthetic construct
  misc_feature 1..121: note = Description of artificial sequence: synthetic polynucleotide sequence
  source 1..121: mol_type = other DNA
aagaaaataatttaccttccaagagtttttgacatgatgtattcatctcttaatgccttaggataaactgactgatcatctacagtcagatcaaaaaagacaaaaactaaggaagaaaaga

SEQ ID NO: 5248 - DNA, 240 bp, synthetic construct
  misc_feature 1..240: note = Description of artificial sequence: synthetic polynucleotide sequence
  source 1..240: mol_type = other DNA
cttaaaccatattctgtaaggacaggacaaattttcctcctatgagagagtggaaaaaaaaaattccagtaaccataagataataatattacctttatttctgcttagtgacagtgcaatttcagaattgttattcaaaggacggcgttttcctttccctacaagctctgtatttacaaaggttccattgccactgtgatcttctatgtatgcaatgtaagagtttttaggacccacttc

SEQ ID NO: 5249 - DNA, 121 bp, synthetic construct
  misc_feature 1..121: note = Description of artificial sequence: synthetic polynucleotide sequence
  source 1..121: mol_type = other DNA
tgaaaatccgaaagtgtttcttgctgtatgttcggtatttatctgttcttttcagcagtggttcatcaaagcaatattcacagcttttgtccctcccaaaccagtagttgtcattcacaca

SEQ ID NO: 5250 - DNA, 121 bp, synthetic construct
  misc_feature 1..121: note = Description of artificial sequence: synthetic polynucleotide sequence
  source 1..121: mol_type = other DNA
actgcaaactggccggggatggtgcctcacacctcttatcccagcactttgggaggctgaggcaggaggatcagatgacagcaggagttcaagatcagattgggtaacatggccagactct

SEQ ID NO: 5251 - DNA, 320 bp, synthetic construct
  misc_feature 1..320: note = Description of artificial sequence: synthetic polynucleotide sequence
  source 1..320: mol_type = other DNA
ccaagattggcaaatccatcctgaagggcccataatcgagcccagggggcaggggtaggctcctcaggttcttggtcctcaggttcttggtcctcaggaatagaatagagttcctgagtggacactgtctctaaggagctcagtgtcccagagctggagtgagaggactggctggagtttggcatcgtgctggtagaggagctggatatgccctgggactgtgaggaggagccttgggactgggtaacgctgccatggggctgtgaacaggcactgctgccatgagactgctgagcctcaacatccgactcccgagacat

SEQ ID NO: 5252 - DNA, 121 bp, synthetic construct
  misc_feature 1..121: note = Description of artificial sequence: synthetic polynucleotide sequence
  source 1..121: mol_type = other DNA
cagcagttgaggtaacatgaataacctatgcaacagctggaagatgtgcgtatgccttaacttttcagaaatgggggaactgtgtgggtggagcatctggtgcttggagggcagatagtgt

SEQ ID NO: 5253 - DNA, 121 bp, synthetic construct
  misc_feature 1..121: note = Description of artificial sequence: synthetic polynucleotide sequence
  source 1..121: mol_type = other DNA
taactaaaaactaccctcagcatcaaacaaagataaggaagtctagtctgacttttctcgtgatgacaacataccatgcctattttgaaacgtcagagtctggccaaaaatgtttgggtga

SEQ ID NO: 5254 - DNA, 121 bp, synthetic construct
  misc_feature 1..121: note = Description of artificial sequence: synthetic polynucleotide sequence
  source 1..121: mol_type = other DNA
agctctcgggaaccctgctgcctgtgtgcctggggatgcaagtgggcttggtccacttaacagtcctctcttcccgtttgaaggaatgacttcacaaagcacagtgtttcttacttgttgg

SEQ ID NO: 5255 - DNA, 121 bp, synthetic construct
  misc_feature 1..121: note = Description of artificial sequence: synthetic polynucleotide sequence
  source 1..121: mol_type = other DNA
cttttctgactctgcttacgtctgtttcattgcttccttttcttccatacatttagtctatgccgtctaatctttctgtaaattctccccccaggtagtctgatggatgacttcaactacc

SEQ ID NO: 5256 - DNA, 121 bp, synthetic construct
  misc_feature 1..121: note = Description of artificial sequence: synthetic polynucleotide sequence
  source 1..121: mol_type = other DNA
acttactttatagggccctagtgaggctcaaatgggaaaatccacggaaagcatttagcactgatcatgcatggaaagtgcctgatagctgatggcacctattgtaactaataatagtatt

SEQ ID NO: 5257 - DNA, 121 bp, synthetic construct
  misc_feature 1..121: note = Description of artificial sequence: synthetic polynucleotide sequence
  source 1..121: mol_type = other DNA
ttacaacgtacatccatgacatcctatcagaattatgcaggtgtatccaaaaggttgattggcaactttaatatataccccaacagaacaatctcatcctggcaagcattaaaaactcatc

SEQ ID NO: 5258 - DNA, 121 bp, synthetic construct
  misc_feature 1..121: note = Description of artificial sequence: synthetic polynucleotide sequence
  source 1..121: mol_type = other DNA
tactggaacttatttaaatgctgagttaggcagtttttaaatgataactcacttcatcctaatgctctgattaaccattatcatcctcgttttgcccatgcagaaactaaggctcatcggc

SEQ ID NO: 5259 - DNA, 121 bp, synthetic construct
  misc_feature 1..121: note = Description of artificial sequence: synthetic polynucleotide sequence
  source 1..121: mol_type = other DNA
gagtcaaagggtctcagaggctggaactgggtggctgtttaaattccaactctggtactcgccagttctgttgcctcaagtgagcccctgagtcacagtttcctcatccataaagcaggta

SEQ ID NO: 5260 - DNA, 121 bp, synthetic construct
  misc_feature 1..121: note = Description of artificial sequence: synthetic polynucleotide sequence
  source 1..121: mol_type = other DNA
cagtgtcagagcaactgttcaaccaggccaaggtagcacaaaagcagcctcagaaaatatgtaaacacactttatttatgaacatgaaatttgaatgttgtgtaatttgcctgtgtcataa

SEQ ID NO: 5261 - DNA, 121 bp, synthetic construct
  misc_feature 1..121: note = Description of artificial sequence: synthetic polynucleotide sequence
  source 1..121: mol_type = other DNA
tcatatcttctgcaaccctgaggagccaggcaggacgacccctttaccctctgaatcaattggtctgtatcagggtctggcagagggaggggaagttggcccctctgatttaatggatgaa

SEQ ID NO: 5262 - DNA, 121 bp, synthetic construct
  misc_feature 1..121: note = Description of artificial sequence: synthetic polynucleotide sequence
  source 1..121: mol_type = other DNA
gcccggaattcttcttgcaaccccaaaggaggtctaagagaggctgtttctgggaaacttgaaatccagccacatggggccaagctatcaggttgctttcttctactgtggcttcctgatt

SEQ ID NO: 5263 - DNA, 121 bp, synthetic construct
  misc_feature 1..121: note = Description of artificial sequence: synthetic polynucleotide sequence
  source 1..121: mol_type = other DNA
cagaatgagcagatgcatgcgctgctggccattgccctcacgatgtaccccatgcgtattgatgagagcattcacctccagctgcgggagaaatatggggacaagatgttgcgcatgcaga

SEQ ID NO: 5264 - DNA, 121 bp, synthetic construct
  misc_feature 1..121: note = Description of artificial sequence: synthetic polynucleotide sequence
  source 1..121: mol_type = other DNA
atttttccagcactttcacattgagatctgattttctacagccaagtggaaactatcttccccatgtttcggaatgcccagggaggcagggagagtggctttcccagcccccacctgcagg

SEQ ID NO: 5265 - DNA, 121 bp, synthetic construct
  misc_feature 1..121: note = Description of artificial sequence: synthetic polynucleotide sequence
  source 1..121: mol_type = other DNA
tggtcacccacttcctgctaatgagtagaatatggcataagtggtgggatgctgcctccaagagtggatgacagaaagatgctggctcctgtcttgctccatgtgggagctgccctgtgga

SEQ ID NO: 5266 - DNA, 121 bp, synthetic construct
  misc_feature 1..121: note = Description of artificial sequence: synthetic polynucleotide sequence
  source 1..121: mol_type = other DNA
cgaaagaattaaaaatggccgagaatgtggtggaaccggggccgccttcagccaagcggcctaaactctcatctccggccctctcggcgtccgccagcgatggcacaggttagtttcggca

SEQ ID NO: 5267 - DNA, 309 bp, synthetic construct
  misc_feature 1..309: note = Description of artificial sequence: synthetic polynucleotide sequence
  source 1..309: mol_type = other DNA
gattttggctctctatttgacttggagcacgacttaccagatgaattaatcaactctacagaattgggactaaccaatggtggtgatattaatcagcttcagacaagtcttggcatggtacaagatgcagcttctaaacataaacagctgtcagaattgctgcgatctggtagttcccctaacctcaatatgggagttggtggcccaggtcaagtcatggccagccaggcccaacagagcagtcctggattaggtttgataaatagcatggtcaaaagcccaatgacacaggcaggcttgacttctccc

SEQ ID NO: 5268 - DNA, 327 bp, synthetic construct
  misc_feature 1..327: note = Description of artificial sequence: synthetic polynucleotide sequence
  source 1..327: mol_type = other DNA
aacatggggatgggcactagtggaccaaatcagggtcctacgcagtcaacaggtatgatgaacagtccagtaaatcagcctgccatgggaatgaacacagggatgaatgcgggcatgaatcctggaatgttggctgcaggcaatggacaagggataatgcctaatcaagtcatgaacggttcaattggagcaggccgagggcgacagaatatgcagtacccaaacccaggcatgggaagtgctggcaacttactgactgagcctcttcagcagggctctccccagatgggaggacaaacaggattgagaggcccccagcctcttaag

SEQ ID NO: 5269 - DNA, 178 bp, synthetic construct
  misc_feature 1..178: note = Description of artificial sequence: synthetic polynucleotide sequence
  source 1..178: mol_type = other DNA
gatgggaatgatgaacaaccccaatccttatggttcaccatatactcagaatcctggacagcagattggagccagtggccttggtctccagattcagacaaaaactgtactatcaaataacttatctccatttgctatggacaaaaaggcagttcctggtggaggaatgcccaacatg

SEQ ID NO: 5270 - DNA, 263 bp, synthetic construct
  misc_feature 1..263: note = Description of artificial sequence: synthetic polynucleotide sequence
  source 1..263: mol_type = other DNA
gggtcaacagccagccccgcaggtccagcagccaggcctggtgactccagttgcccaagggatgggttctggagcacatacagctgatccagagaagcgcaagctcatccagcagcagcttgttctccttttgcatgctcacaagtgccagcgccgggaacaggccaatggggaagtgaggcagtgcaaccttccccactgtcgcacaatgaagaatgtcctaaaccacatgacacactgccagtcaggcaagtcttgccaag

SEQ ID NO: 5271 - DNA, 121 bp, synthetic construct
  misc_feature 1..121: note = Description of artificial sequence: synthetic polynucleotide sequence
  source 1..121: mol_type = other DNA
ttagtggcacactgtgcatcttctcgacaaatcatttcacactggaagaattgtacaagacatgattgtcctgtgtgtctccccctcaaaaatgctggtgataagagaaatcaacagcgta

SEQ ID NO: 5272 - DNA, 121 bp, synthetic construct
  misc_feature 1..121: note = Description of artificial sequence: synthetic polynucleotide sequence
  source 1..121: mol_type = other DNA
gcaattttgactggagcacccgttggacttggaaatcctagctctctaggggtgggtcaacagtctgcccccaacctaagcactgttagtcagattgatcccagctccatagaaagagcct

SEQ ID NO: 5273 - DNA, 121 bp, synthetic construct
  misc_feature 1..121: note = Description of artificial sequence: synthetic polynucleotide sequence
  source 1..121: mol_type = other DNA
gctcttggactaccctatcaagtaaatcagatgccgacacaaccccaggtgcaagcaaagaaccagcagaatcagcagcctgggcagtctccccaaggcatgcggcccatgagcaacatga

SEQ ID NO: 5274 - DNA, 121 bp, synthetic construct
  misc_feature 1..121: note = Description of artificial sequence: synthetic polynucleotide sequence
  source 1..121: mol_type = other DNA
tcattttgacttaggtgctagtcctatgggagtaaatggaggtgtaggagttcaaacgccgagtcttctttctgactcaatgttgcattcagccataaattctcaaaagtaagtcttaacg

SEQ ID NO: 5275 - DNA, 139 bp, synthetic construct
  misc_feature 1..139: note = Description of artificial sequence: synthetic polynucleotide sequence
  source 1..139: mol_type = other DNA
gcccaatgatgagtgaaaatgccagtgtgccctccctgggtcctatgccaacagcagctcaaccatccactactggaattcggaaacagtggcacgaagatattactcaggatcttcgaaatcatcttgttcacaaact

SEQ ID NO: 5276 - DNA, 121 bp, synthetic construct
  misc_feature 1..121: note = Description of artificial sequence: synthetic polynucleotide sequence
  source 1..121: mol_type = other DNA
agcgtccaagccatatttcctacgccggatcctgctgctttaaaagacagacggatggaaaacctagttgcatatgctcggaaagttgaaggggacatgtatgaatctgcaaacaatcgag

SEQ ID NO: 5277 - DNA, 176 bp, synthetic construct
  misc_feature 1..176: note = Description of artificial sequence: synthetic polynucleotide sequence
  source 1..176: mol_type = other DNA
ggcggaatactaccaccttctagctgagaaaatctataagatccagaaagaactagaagaaaaacgaaggaccagactacagaagcagaacatgctaccaaatgctgcaggcatggttccagtttccatgaatccagggcctaacatgggacagccgcaaccaggaatgacttcta

SEQ ID NO: 5278 - DNA, 121 bp, synthetic construct
  misc_feature 1..121: note = Description of artificial sequence: synthetic polynucleotide sequence
  source 1..121: mol_type = other DNA
ttatttctcttttttactctagatggccctctacctgacccaagtatgatccgtggcagtgtgccaaaccagatgatgcctcgaataactccacaatctggtaaatagtgaaaaaaatttt

SEQ ID NO: 5279 - DNA, 121 bp, synthetic construct
  misc_feature 1..121: note = Description of artificial sequence: synthetic polynucleotide sequence
  source 1..121: mol_type = other DNA
tcacaggtttgaatcaatttggccagatgagcatggcccagccccctattgtaccccggcaaacccctcctcttcagcaccatggacagttggctcaacctggagctctcaacccggttag

SEQ ID NO: 5280 - DNA, 139 bp, synthetic construct
  misc_feature 1..139: note = Description of artificial sequence: synthetic polynucleotide sequence
  source 1..139: mol_type = other DNA
gcctatgggctatgggcctcgtatgcaacagccttccaaccagggccagttccttcctcagactcagttcccatcacagggaatgaatgtaacaaatatccctttggctccgtccagcggtcaagctccagtgtctcaa

SEQ ID NO: 5281 - DNA, 439 bp, synthetic construct
  misc_feature 1..439: note = Description of artificial sequence: synthetic polynucleotide sequence
  source 1..439: mol_type = other DNA
ggcacaaatgtctagttcttcctgcccggtgaactctcctataatgcctccagggtctcaggggagccacattcactgtccccagcttcctcaaccagctcttcatcagaattcaccctcgcctgtacctagtcgtacccccacccctcaccatactcccccaagcataggggctcagcagccaccagcaacaacaattccagcccctgttcctacacctcctgccatgccacctgggccacagtcccaggctctacatccccctccaaggcagacacctacaccaccaacaacacaacttccccaacaagtgcagccttcacttcctgctgcaccttctgctgaccagccccagcagcagcctcgctcacagcagagcacagcagcgtctgttcctaccccaacagcaccgctgcttcctccgcagcctgcaactcca

SEQ ID NO: 5282 - DNA, 181 bp, synthetic construct
  misc_feature 1..181: note = Description of artificial sequence: synthetic polynucleotide sequence
  source 1..181: mol_type = other DNA
gctttcccagccagctgtaagcattgaaggacaggtatcaaatcctccatctactagtagcacagaagtgaattctcaggccattgctgagaagcagccttcccaggaagtgaagatggaggccaaaatggaagtggatcaaccagaaccagcagatactcagccggaggatatttcagag

SEQ ID NO: 5283 - DNA, 146 bp, synthetic construct
  misc_feature 1..146: note = Description of artificial sequence: synthetic polynucleotide sequence
  source 1..146: mol_type = other DNA
gtctaaagtggaagactgtaaaatggaatctaccgaaacagaagagagaagcactgagttaaaaactgaaataaaagaggaggaagaccagccaagtacttcagctacccagtcatctccggctccaggacagtcaaagaaaaaga

SEQ ID NO: 5284 - DNA, 121 bp, synthetic construct
  misc_feature 1..121: note = Description of artificial sequence: synthetic polynucleotide sequence
  source 1..121: mol_type = other DNA
gttttcaaaccagaagaactacgacaggcactgatgccaactttggaggcactttaccgtcaggatccagaatcccttccctttcgtcaacctgtggaccctcagcttttaggaatccctg

SEQ ID NO: 5285 - DNA, 241 bp, synthetic construct
  misc_feature 1..241: note = Description of artificial sequence: synthetic polynucleotide sequence
  source 1..241: mol_type = other DNA
ggattactttgatattgtgaagagccccatggatctttctaccattaagaggaagttagacactggacagtatcaggagccctggcagtatgtcgatgatatttggcttatgttcaataatgcctggttatataaccggaaaacatcacgggtatacaaatactgctccaagctctctgaggtctttgaacaagaaattgacccagtgatgcaaagccttggatactgttgtggcagaaag

SEQ ID NO: 5286 - DNA, 121 bp, synthetic construct
  misc_feature 1..121: note = Description of artificial sequence: synthetic polynucleotide sequence
  source 1..121: mol_type = other DNA
atggtttcttttgcagttggagttctctccacagacactgtgttgctacggcaaacagttgtgcacaatacctcgtgatgccacttattacagttaccagaacaggtaagcttggccaggt

SEQ ID NO: 5287 - DNA, 121 bp, synthetic construct
  misc_feature 1..121: note = Description of artificial sequence: synthetic polynucleotide sequence
  source 1..121: mol_type = other DNA
tatggccttcttgccgacaggtatcatttctgtgagaagtgtttcaatgagatccaaggggagagcgtttctttgggggatgacccttcccagcctcaaacgtaagtaactgcattatttt

SEQ ID NO: 5288 - DNA, 121 bp, synthetic construct
  misc_feature 1..121: note = Description of artificial sequence: synthetic polynucleotide sequence
  source 1..121: mol_type = other DNA
tttttctcattgtgtcccttttctctccttagtacaataaataaagaacaattttccaagagaaaaaatgacacactggatcctgaactgtaagtacgatccccttgaatagtcagtacgc

SEQ ID NO: 5289 - DNA, 121 bp, synthetic construct
  misc_feature 1..121: note = Description of artificial sequence: synthetic polynucleotide sequence
  source 1..121: mol_type = other DNA
ggaattggctctgctcttccaggtttgttgaatgtacagagtgcggaagaaagatgcatcagatctgtgtccttcaccatgagatcatctggcctgctgggtaagtcttaacgttgttact

SEQ ID NO: 5290 - DNA, 121 bp, synthetic construct
  misc_feature 1..121: note = Description of artificial sequence: synthetic polynucleotide sequence
  source 1..121: mol_type = other DNA
gtaagcaaagttttggtttacatttagattcgtctgtgatggctgtttaaagaaaagtgcacgaactaggaaagaaaataagttttctgctaaaagtaagttttattcttaaaggtaaatt

SEQ ID NO: 5291 - DNA, 152 bp, synthetic construct
  misc_feature 1..152: note = Description of artificial sequence: synthetic polynucleotide sequence
  source 1..152: mol_type = other DNA
gggttgccatctaccagacttggcacctttctagagaatcgtgtgaatgactttctgaggcgacagaatcaccctgagtcaggagaggtcactgttagagtagttcatgcttctgacaaaaccgtggaagtaaaaccaggcatgaaagcaag

SEQ ID NO: 5292 - DNA, 148 bp, synthetic construct
  misc_feature 1..148: note = Description of artificial sequence: synthetic polynucleotide sequence
  source 1..148: mol_type = other DNA
ggtttgtggacagtggagagatggcagaatcctttccataccgaaccaaagccctctttgcctttgaagaaattgatggtgttgacctgtgcttctttggcatgcatgttcaagagtatggctctgactgccctccacccaaccagag

SEQ ID NO: 5293 - DNA, 121 bp, synthetic construct
  misc_feature 1..121: note = Description of artificial sequence: synthetic polynucleotide sequence
  source 1..121: mol_type = other DNA
ataggagagtatacatatcttacctcgatagtgttcatttcttccgtcctaaatgcttgaggactgcagtctatcatgaaatcctaattggatatttagaatatgtcaagaaattagggta

SEQ ID NO: 5294 - DNA, 167 bp, synthetic construct
  misc_feature 1..167: note = Description of artificial sequence: synthetic polynucleotide sequence
  source 1..167: mol_type = other DNA
gttacacaacagggcatatttgggcatgtccaccaagtgagggagatgattatatcttccattgccatcctcctgaccagaagatacccaagcccaagcgactgcaggaatggtacaaaaaaatgcttgacaaggctgtatcagagcgtattgtccatgactacaag

SEQ ID NO: 5295 - DNA, 166 bp, synthetic construct
  misc_feature 1..166: note = Description of artificial sequence: synthetic polynucleotide sequence
  source 1..166: mol_type = other DNA
ggatatttttaaacaagctactgaagatagattaacaagtgcaaaggaattgccttatttcgagggtgatttctggcccaatgttctggaagaaagcattaaggaactggaacaggaggaagaagagagaaaacgagaggaaaacaccagcaatgaaagcacagat

SEQ ID NO: 5296 - DNA, 163 bp, synthetic construct
  misc_feature 1..163: note = Description of artificial sequence: synthetic polynucleotide sequence
  source 1..163: mol_type = other DNA
ggtgaccaagggagacagcaaaaatgctaaaaagaagaataataagaaaaccagcaaaaataagagcagcctgagtaggggcaacaagaagaaacccgggatgcccaatgtatctaacgacctctcacagaaactatatgccaccatggagaagcataaagag

SEQ ID NO: 5297 - DNA, 283 bp, synthetic construct
  misc_feature 1..283: note = Description of artificial sequence: synthetic polynucleotide sequence
  source 1..283: mol_type = other DNA
ggtcttctttgtgatccgcctcattgctggccctgctgccaactccctgcctcccattgttgatcctgatcctctcatcccctgcgatctgatggatggtcgggatgcgtttctcacgctggcaagggacaagcacctggagttctcttcactccgaagagcccagtggtccaccatgtgcatgctggtggagctgcacacgcagagccaggaccgctttgtctacacctgcaatgaatgcaagcaccatgtggagacacgctggcactgtactgtctgtgag

SEQ ID NO: 5298 - DNA, 345 bp, synthetic construct
  misc_feature 1..345: note = Description of artificial sequence: synthetic polynucleotide sequence
  source 1..345: mol_type = other DNA
ggattatgacttgtgtatcacctgctataacactaaaaaccatgaccacaaaatggagaaactaggccttggcttagatgatgagagcaacaaccagcaggctgcagccacccagagcccaggcgattctcgccgcctgagtatccagcgctgcatccagtctctggtccatgcttgccagtgtcggaatgccaattgctcactgccatcctgccagaagatgaagcgggttgtgcagcataccaagggttgcaaacggaaaaccaatggcgggtgccccatctgcaagcagctcattgccctctgctgctaccatgccaagcactgccaggagaacaaatgccc

SEQ ID NO: 5299 - DNA, 458 bp, synthetic construct
  misc_feature 1..458: note = Description of artificial sequence: synthetic polynucleotide sequence
  source 1..458: mol_type = other DNA
ggtgccgttctgcctaaacatcaagcagaagctccggcagcaacagctgcagcaccgactacagcaggcccaaatgcttcgcaggaggatggccagcatgcagcggactggtgtggttgggcagcaacagggcctcccttcccccactcctgccactccaacgacaccaactggccaacagccaaccaccccgcagacgccccagcccacttctcagcctcagcctacccctcccaatagcatgccaccctacttgcccaggactcaagctgctggccctgtgtcccagggtaaggcagcaggccaggtgacccctccaacccctcctcagactgctcagccaccccttccagggcccccacctgcagcagtggaaatggcaatgcagattcagagagcagcggagacgcagcgccagatggcccacgtgcaaatttttcaaaggccaatccaacacc

SEQ ID NO: 5300 - DNA, 459 bp, synthetic construct
  misc_feature 1..459: note = Description of artificial sequence: synthetic polynucleotide sequence
  source 1..459: mol_type = other DNA
agatgcccccgatgactcccatggcccccatgggtatgaacccacctcccatgaccagaggtcccagtgggcatttggagccagggatgggaccgacagggatgcagcaacagccaccctggagccaaggaggattgcctcagccccagcaactacagtctgggatgccaaggccagccatgatgtcagtggcccagcatggtcaacctttgaacatggctccacaaccaggattgggccaggtaggtatcagcccactcaaaccaggcactgtgtctcaacaagccttacaaaaccttttgcggactctcaggtctcccagctctcccctgcagcagcaacaggtgcttagtatccttcacgccaacccccagctgttggctgcattcatcaagcagcgggctgccaagtatgccaactctaatccacaacccatccctgggcagcctggcatgcccc

SEQ ID NO: 5301 - DNA, 458 bp, synthetic construct
  misc_feature 1..458: note = Description of artificial sequence: synthetic polynucleotide sequence
  source 1..458: mol_type = other DNA
aggggcagccagggctacagccacctaccatgccaggtcagcagggggtccactccaatccagccatgcagaacatgaatccaatgcaggcgggcgttcagagggctggcctgccccagcagcaaccacagcagcaactccagccacccatgggagggatgagcccccaggctcagcagatgaacatgaaccacaacaccatgccttcacaattccgagacatcttgagacgacagcaaatgatgcaacagcagcagcaacagggagcagggccaggaataggccctggaatggccaaccataaccagttccagcaaccccaaggagttggctacccaccacagcagcagcagcggatgcagcatcacatgcaacagatgcaacaaggaaatatgggacagataggccagcttccccaggccttgggagcagaggcaggtgccagtctacaggcctat

SEQ ID NO: 5302 - DNA, 465 bp, synthetic construct
  misc_feature 1..465: note = Description of artificial sequence: synthetic polynucleotide sequence
  source 1..465: mol_type = other DNA
cagcagcgactccttcagcaacagatggggtcccctgttcagcccaaccccatgagcccccagcagcatatgctcccaaatcaggcccagtccccacacctacaaggccagcagatccctaattctctctccaatcaagtgcgctctccccagcctgtcccttctccacggccacagtcccagcccccccactccagtccttccccaaggatgcagcctcagccttctccacaccacgtttccccacagacaagttccccacatcctggactggtagctgcccaggccaaccccatggaacaagggcattttgccagcccggaccagaattcaatgctttctcagcttgctagcaatccaggcatggcaaacctccatggtgcaagcgccacggacctgggactcagcaccgataactcagacttgaattcaaacctctcacagagtacactagacatacactag

SEQ ID NO: 5303 - DNA, 121 bp, synthetic construct
  misc_feature 1..121: note = Description of artificial sequence: synthetic polynucleotide sequence
  source 1..121: mol_type = other DNA
gcgctgggtttgagcagcatcagcccagaaatgcagaactgccaaaagaaacccccctaaaaggcaggacacttttaaagaaaataaaggtgaattccaggcatgagctttcgacggggaa

SEQ ID NO: 5304 - DNA, 121 bp, synthetic construct
  misc_feature 1..121: note = Description of artificial sequence: synthetic polynucleotide sequence
  source 1..121: mol_type = other DNA
ttcccaccctccaaacctacctgtgaagaccactgaatacatgtatcactgtgtacataagaaatcactcctccaacgttagcctaattgaagggctagactaattagtgagtcaactggc

SEQ ID NO: 5305 - DNA, 121 bp, synthetic construct
  misc_feature 1..121: note = Description of artificial sequence: synthetic polynucleotide sequence
  source 1..121: mol_type = other DNA
tcactacctctcacccaccttccctggggagggtgtgcgtgtgcctggcagatgttgtatcctgtacacacctgccagatgtccccatggtgacagcttcaggcaactttcttccaaccta

SEQ ID NO: 5306 - DNA, 121 bp, synthetic construct
  misc_feature 1..121: note = Description of artificial sequence: synthetic polynucleotide sequence
  source 1..121: mol_type = other DNA
caaacccatctctccactctggtgaactcacagacccaagacttctgagcaaagctgctaaagtggggatagggaggctccacatattccagaaaaaggaggggtaagttgtcaggggggt

SEQ ID NO: 5307 - DNA, 121 bp, synthetic construct
  misc_feature 1..121: note = Description of artificial sequence: synthetic polynucleotide sequence
  source 1..121: mol_type = other DNA
gcccaaccaattgtggtaggggacgaatcagaggttcttgcagtttttcatctgccgtgtagaaaagaggggttgcaaaggaagtagcctccggtccttttgttacttgggcatggaacat

SEQ ID NO: 5308 - DNA, 121 bp, synthetic construct
  misc_feature 1..121: note = Description of artificial sequence: synthetic polynucleotide sequence
  source 1..121: mol_type = other DNA
aaaactctgttatgttaatgatagcaattaagggtcacgaagcctagactcccataactcgagaaaagctgccaggcaacaagcatctgtggctctctcatggtcctgtagtggaagcaga

SEQ ID NO: 5309 - DNA, 121 bp, synthetic construct
  misc_feature 1..121: note = Description of artificial sequence: synthetic polynucleotide sequence
  source 1..121: mol_type = other DNA
cttctgtggtgtttggtacctgaaggccttttcagtttgtcaatgggtcatcttccttcttggggaatgttggtgcctttttaatgatttctgttcctccattttctttggaacgcttggt

SEQ ID NO: 5310 - DNA, 121 bp, synthetic construct
  misc_feature 1..121: note = Description of artificial sequence: synthetic polynucleotide sequence
  source 1..121: mol_type = other DNA
tctggaatgccagttcttttgtgtgctgagtgttctctgtattttcttactctaagtgcgtatttcatgagaactggttttcataggcgttctgagcaccattggtggtgaaaatctccct

SEQ ID NO: 5311 - DNA, 121 bp, synthetic construct
  misc_feature 1..121: note = Description of artificial sequence: synthetic polynucleotide sequence
  source 1..121: mol_type = other DNA
cctccctgacctgtggtcttggcaagcacaatgcaaaagaaaggtccttactcgacatcactgtgtgcagatccgcggaggtctggctctaaccttcatcctcccttgggcatccacccat

SEQ ID NO: 5312 - DNA, 121 bp, synthetic construct
  misc_feature 1..121: note = Description of artificial sequence: synthetic polynucleotide sequence
  source 1..121: mol_type = other DNA
caaccactttgggaaaccatgtggaagaattcttaacagctcaacaaatccacatcttacgcacagcaatttcatttctaggttcacgtctcacagaaacgcatatgtgagttcttctaaa

SEQ ID NO: 5313 - DNA, 121 bp, synthetic construct
  misc_feature 1..121: note = Description of artificial sequence: synthetic polynucleotide sequence
  source 1..121: mol_type = other DNA
atactcaaatattatatattttagcttaaaatataaaacaaaattttgccaataatagcatcaccctgaatgagcacctgaacactgcattctggttcaacaaatactggctgcacaactg

SEQ ID NO: 5314 - DNA, 121 bp, synthetic construct
  misc_feature 1..121: note = Description of artificial sequence: synthetic polynucleotide sequence
  source 1..121: mol_type = other DNA
tgtttatttccagggagtggtcccttggtgaaaagagagaatgagtggtagacctattatttgaccatattcctcctaaataccttcttggtgatatggatacagagattagcaaaacagt

SEQ ID NO: 5315 - DNA, 121 bp, synthetic construct
  misc_feature 1..121: note = Description of artificial sequence: synthetic polynucleotide sequence
  source 1..121: mol_type = other DNA
aattgaaaagcccaattagagattagaatagggatagctgataagaaacatgaccaagcaccccaaattcagcttgggaagtcaaattaaagtacagagggtgaagtggtctgcatcagct

SEQ ID NO: 5316 - DNA, 121 bp, synthetic construct
  misc_feature 1..121: note = Description of artificial sequence: synthetic polynucleotide sequence
  source 1..121: mol_type = other DNA
ttacacatcctaaccacatcagcccttttaatgtccattatttcccaaagttggatgacggaaggatcaaattatttttgtctcataaatcatttcctaagaaccgatagtataaaactaa

SEQ ID NO: 5317 - DNA, 121 bp, synthetic construct
  misc_feature 1..121: note = Description of artificial sequence: synthetic polynucleotide sequence
  source 1..121: mol_type = other DNA
tggacggggcacatgagatcaggatgtgtcataaatggctacttatgtagcaaagttctcagataatgagataaatggaaatgacgggaaacacatgtacagagagagattgagagagaaa

SEQ ID NO: 5318 - DNA, 121 bp, synthetic construct
  misc_feature 1..121: note = Description of artificial sequence: synthetic polynucleotide sequence
  source 1..121: mol_type = other DNA
aatcatcagcaaggggatgctgggtctgatacaactgatgctgcggagaagaaggggacacttatgaatctttctaccttaaggaaattgtgttttccaccttgtgttagagagatataaa

SEQ ID NO: 5319 - DNA, 182 bp, synthetic construct
  misc_feature 1..182: note = Description of artificial sequence: synthetic polynucleotide sequence
  source 1..182: mol_type = other DNA
tttacaagcaaagtattactttgtctggacttatttcatcttcagtgtctgggatcgtgggcaacagagcagatcgcgttaagccccaaaatttttgaggtgacatgtcttttttggtggccgtaaacttccatccaatatggcttgcacagatcttacactgggcaacagtccaggcatac

SEQ ID NO: 5320 - DNA, 133 bp, synthetic construct
  misc_feature 1..133: note = Description of artificial sequence: synthetic polynucleotide sequence
  source 1..133: mol_type = other DNA
cccaggaaaccagctgtgttctgtagaaggccggcctatcagattcaagttgcaagccttatacacagtaagtgtctcatgcacatatccatgaggattcacataagctgccatcggcccacataaggataaa

SEQ ID NO: 5321 - DNA, 121 bp, synthetic construct
  misc_feature 1..121: note = Description of artificial sequence: synthetic polynucleotide sequence
  source 1..121: mol_type = other DNA
tatattaaaaacgtaataaagaccttacctgaatatttcatttttggttgttatttctgtttcttgacattgtttacagcaaagggaagtacactaaaagatttgagagaaaaattattgg

SEQ ID NO: 5322 - DNA, 121 bp, synthetic construct
  misc_feature 1..121: note = Description of artificial sequence: synthetic polynucleotide sequence
  source 1..121: mol_type = other DNA
cactttattcataatgtctaattcacagcgaagtcgctggatagcactgccaattttaaggagctgaattctcaatacatcatcaataggaagacaagcagctactctgtaagaaaaatct

SEQ ID NO: 5323 - DNA, 121 bp, synthetic construct
  misc_feature 1..121: note = Description of artificial sequence: synthetic polynucleotide sequence
  source 1..121: mol_type = other DNA
gaaactaacttttcatacctattggatttgaaggaagagaatcatcttttagattttcatcccattcacgtagctgtttcttgattctgtccattaaggtctccttgtttaaaataaaggt

SEQ ID NO: 5324 - DNA, 121 bp, synthetic construct
  misc_feature 1..121: note = Description of artificial sequence: synthetic polynucleotide sequence
  source 1..121: mol_type = other DNA
ataaagtaaatttaaggtaagttacttacagcatcatataaggaatacagccagcgaggccatgaagttagatttgcacaatgaaactttctctgaaaacaaaacaaaaaggcacttaaaa

SEQ ID NO: 5325 - DNA, 161 bp, synthetic construct
  misc_feature 1..161: note = Description of artificial sequence: synthetic polynucleotide sequence
  source 1..161: mol_type = other DNA
ccttctggtatttctgccaccatttatatgaacattggtcttctcttgagacaggttttgaaggaaatatctggcacttattgagggattctaattgaactgcagacatggttgaaggcaacacacattcgggaagaatttgcactttagcttgctggatt

SEQ ID NO: 5326 - DNA, 151 bp, synthetic construct
  misc_feature 1..151: note = Description of artificial sequence: synthetic polynucleotide sequence
  source 1..151: mol_type = other DNA
cccatctgactgtgttcttagctcaaggactttgaacctttgtcttccaattgctttcactttcactatctcaattccaaaatcctgttcttctcgataggcatatatctctgctgttgttccaaactgtgcttccctttcctgtacattg

SEQ ID NO: 5327 - DNA, 204 bp, synthetic construct
  misc_feature 1..204: note = Description of artificial sequence: synthetic polynucleotide sequence
  source 1..204: mol_type = other DNA
cctgtatgcaagaacagcaaaggttctatctttctgaattaaattccgcaccatactgacttcttgagggtgaaaaagctgaagaggtaatgtctgtccgggaatcaggatcatcatcacttgtggaagaactggaatcacctgacagctgtcgtcatcgtgcaaagtcctgccatgaaattcttccatatcagcacctaggta

SEQ ID NO: 5328 - DNA, 121 bp, synthetic construct
  misc_feature 1..121: note = Description of artificial sequence: synthetic polynucleotide sequence
  source 1..121: mol_type = other DNA
tacatactgtatgtgatgtcggcagactggtgtcaaaatttatgatgtttggttttttggcttctttactatcctggtcttcaacttccatttcatcttcttcctcactctctgctataaa

SEQ ID NO: 5329 - DNA, 121 bp, synthetic construct
  misc_feature 1..121: note = Description of artificial sequence: synthetic polynucleotide sequence
  source 1..121: mol_type = other DNA
ctacagggaactactccgggcggttaccaggcaggagcggcaggtggttgcccatgttgtgcgcagcgtcctgctgatctccttcgccggccatgtctgtttacccgcaaaggaggctggg

SEQ ID NO: 5330 - DNA, 121 bp, synthetic construct
  misc_feature 1..121: note = Description of artificial sequence: synthetic polynucleotide sequence
  source 1..121: mol_type = other DNA
accaagaagtgaaagtgatgccttttttccccactcaatggagaggagacaatatatgatcatctgttcagtgttcaggagcaaaattgtttaatttcatctactccatggtaagaataaa

SEQ ID NO: 5331 - DNA, 121 bp, synthetic construct
  misc_feature 1..121: note = Description of artificial sequence: synthetic polynucleotide sequence
  source 1..121: mol_type = other DNA
tgaagcccagggagattaggtaactttgtgtagggtcactcagctagtaaatgacagcctgtataggaacaaggtctttctaatacccttaatcactaaactgtatagggcctcccaattt

SEQ ID NO: 5332 - DNA, 121 bp, synthetic construct
  misc_feature 1..121: note = Description of artificial sequence: synthetic polynucleotide sequence
  source 1..121: mol_type = other DNA
tactcagtatttgtttgatagctggcaccttaacaatgagaaatactatgggtcaaaacgtaatatgataacctctcatgcatctgtaaacatgttaactttctcctccataagggacccc

SEQ ID NO: 5333 - DNA, 121 bp, synthetic construct
  misc_feature 1..121: note = Description of artificial sequence: synthetic polynucleotide sequence
  source 1..121: mol_type = other DNA
caataaatacattctggaaaaactaaatagagacagagcaacttttaatggggctgaagatagtgtattaggagtggatggataaagcttgctggaggaaatggcatttaacatagattaa

SEQ ID NO: 5334 - DNA, 121 bp, synthetic construct
  misc_feature 1..121: note = Description of artificial sequence: synthetic polynucleotide sequence
  source 1..121: mol_type = other DNA
cttgatctcactctctctctttcatggattatttcagtctggagtgcaaggatggcttacgggagaagatcgttgtattttttttaattttactttaagtgctgggatacatgtacagacg

SEQ ID NO: 5335 - DNA, 121 bp, synthetic construct
  misc_feature 1..121: note = Description of artificial sequence: synthetic polynucleotide sequence
  source 1..121: mol_type = other DNA
ctgggaaggcaagacaggggatcagggggtcagggagttgggaaatagtggacaattagtctaaaacagtaggcaagcacaaaccatccaaactgcaaataacacaactccagaataaggc

SEQ ID NO: 5336 - DNA, 121 bp, synthetic construct
  misc_feature 1..121: note = Description of artificial sequence: synthetic polynucleotide sequence
  source 1..121: mol_type = other DNA
ttccataatatttttcccaggggtagcaccagcttacatttccaccaacggtgcgcaagggttccaatgtatccacatcctcatcaacacgtgttactttgttttcttttttgtgtgcatt

SEQ ID NO: 5337 - DNA, 121 bp, synthetic construct
  misc_feature 1..121: note = Description of artificial sequence: synthetic polynucleotide sequence
  source 1..121: mol_type = other DNA
catgatcactgggaaagataaaacacttttgattaaaggccagtataggaaaaggtagatttaggataccccaccaccactgccttcaaaggagctccaatggagaccatctggatgggca

SEQ ID NO: 5338 - DNA, 121 bp, synthetic construct
  misc_feature 1..121: note = Description of artificial sequence: synthetic polynucleotide sequence
  source 1..121: mol_type = other DNA
tccaatctctgctgtgttggacgtcatgagcattgcaatccctctgggagtcaccacatcagatacatcctactcagatatggctgctggatcagagtaagtgctactttctaggtagtag

SEQ ID NO: 5339 - DNA, 121 bp, synthetic construct
  misc_feature 1..121: note = Description of artificial sequence: synthetic polynucleotide sequence
  source 1..121: mol_type = other DNA
ttgtgcagccctgaatctgtggaggctagtccagcagttaatgagaagagcgtgtattccactcataattatgggaccactcagaggcatgggtgtcgaggactgccttatgctgtgagta

SEQ ID NO: 5340 - DNA, 153 bp, synthetic construct
  misc_feature 1..153: note = Description of artificial sequence: synthetic polynucleotide sequence
  source 1..153: mol_type = other DNA
gacgatcatccctcgttctgacctgaatggcctgccgtcgcctgtagaggaacgctgtggagacagcccgaactctgaaggagaaactgtacctacctggtgtccttgtggtctttctcaggatggcttccttctcaactgtgacaagtgcag

SEQ ID NO: 5341 - DNA, 121 bp, synthetic construct
  misc_feature 1..121: note = Description of artificial sequence: synthetic polynucleotide sequence
  source 1..121: mol_type = other DNA
ggactactttaagtttattttccctctttaggggaatgagcagggggaaggttattagacttcatcggcggaagcaggacaacatatcaggtgagcggaagatgggttaggtccacaattt

SEQ ID NO: 5342 - DNA, 180 bp, synthetic construct
  misc_feature 1..180: note = Description of artificial sequence: synthetic polynucleotide sequence
  source 1..180: mol_type = other DNA
ggtggggatagcagtgcaacagaaagctgggatgaggagctttctccttccactgtgttgtatacagcaacacagcacacacctacaagcatcaccttaactgttagaagaaccaaacccaagaagcggaaaaagagtccagaaaagggtcgtgcagcaccaaagacgaagaaaatcaag

SEQ ID NO: 5343 - DNA, 121 bp, synthetic construct
  misc_feature 1..121: note = Description of artificial sequence: synthetic polynucleotide sequence
  source 1..121: mol_type = other DNA
ccaagttttgtttgttctacttgttttcctccttgggataggcatttcgagagggatcccggaagtccttgcggatgaaggtaaggggtaatcttcgctgatgctgtgttttacttcactg

SEQ ID NO: 5344 - DNA, 121 bp, synthetic construct
  misc_feature 1..121: note = Description of artificial sequence: synthetic polynucleotide sequence
  source 1..121: mol_type = other DNA
gaattctccctctgaagcacagaatttagatgagaatacaactgagggctgggaaaatcggataagactatggactgaccagtatgaagaagctttcactaatcagtacagtgcagatgta

SEQ ID NO: 5345 - DNA, 121 bp, synthetic construct
  misc_feature 1..121: note = Description of artificial sequence: synthetic polynucleotide sequence
  source 1..121: mol_type = other DNA
gaacgcgcttgaacaacacctacattctagcaaggaatttgtgggcaaacctactattttagacactattaataagactgaattggcctgtaataacacagttattggttcccaaatgcag

SEQ ID NO: 5346 - DNA, 150 bp, synthetic construct
  misc_feature 1..150: note = Description of artificial sequence: synthetic polynucleotide sequence
  source 1..150: mol_type = other DNA
gttacagctgggaagagtcactcgtgttcaaaagcaccggaagatcctgagggctgcaagagatttggctttggacactcttataatagagtatcgtgggaaagtcatgttacgacagcaatttgaggtcaatgggcatttcttcaaaaa

SEQ ID NO: 5347 - DNA, 121 bp, synthetic construct
  misc_feature 1..121: note = Description of artificial sequence: synthetic polynucleotide sequence
  source 1..121: mol_type = other DNA
agaccatacccctttgtgctcttctactcaaaattcaatggtgtagagatgtgtgtggatgcccgtactttcggtaatgatgctcggttcatcagaagatcatgtacaccaaatgcagagg

SEQ ID NO: 5348 - DNA, 121 bp, synthetic construct
  misc_feature 1..121: note = Description of artificial sequence: synthetic polynucleotide sequence
  source 1..121: mol_type = other DNA
acacaggtgcgacacatgattgcagatgggatgattcacctgtgcatctatgctgtgtctgccatcaccaaggatgctgaggtcaccatagcatttgattatgagtatagtaactggtaag

SEQ ID NO: 5349 - DNA, 254 bp, synthetic construct
  misc_feature 1..254: note = Description of artificial sequence: synthetic polynucleotide sequence
  source 1..254: mol_type = other DNA
gtaattataaagtggactgtgcctgtcacaagggaaaccggaattgtcctatacaaaaaaggaatcctaatgctacagaactgccactcctaccacctcctccaagcctacccaccattggagcagagactagacgtagaaaagcacgacggaaagagctagagatggagcagcagaatgaggcttcagaggagaataatgaccagcaatcacaagaagttccagaaaaagtaactgtatccagtgatcatgag

SEQ ID NO: 5350 - DNA, 121 bp, synthetic construct
  misc_feature 1..121: note = Description of artificial sequence: synthetic polynucleotide sequence
  source 1..121: mol_type = other DNA
tattgcctctatcttaaaggaagtagacaatccagaagaaaaaccagaagaagagaaagaagaggttatagatgaccaggagaacctagctcatagcaggagggtgagtactgtctgacat

SEQ ID NO: 5351 - DNA, 259 bp, synthetic construct
  misc_feature 1..259: note = Description of artificial sequence: synthetic polynucleotide sequence
  source 1..259: mol_type = other DNA
gaccagggaagatagaaaggtagaagccatcatgcatgcttttgaaaacttagagaaaagaaagaagcggcgggatcagcccttggaacagagcaactctgatgtagagattactacaaccacctcagagactcctgttggtgaagagacaaaaactgaagcccctgaatctgaagttagcaactctgtttcaaatgttaccatcccaagcaccccacagagtgttggtgtgaatacccggaggtcttcccaagcaggg

SEQ ID NO: 5352 - DNA, 322 bp, synthetic construct
  misc_feature 1..322: note = Description of artificial sequence: synthetic polynucleotide sequence
  source 1..322: mol_type = other DNA
ggatattgctgcagaaaaactagtccccaagccacctccagcaaagccttctaggccccggccgaagagtcgaatttctcggtacaggaccagttcagcccaaagactaaagcgtcagaagcaggccaatgcacagcaggcagaattgtcacaagctgccttggaagagggaggaagtaacagtttagtaactcctactgaagctggaagtctagacagttcaggagaaaacaggccattaacagggtctgacccaactgtggtgtcaattactggatcccatgtcaaccgtgctgcatctaaataccccaaaaccaaaaag

SEQ ID NO: 5353 - DNA, 121 bp, synthetic construct
  misc_feature 1..121: note = Description of artificial sequence: synthetic polynucleotide sequence
  source 1..121: mol_type = other DNA
gtatctagttacagaatggttgaatgacaaagcagagaagcaagagtgccctgttgagtgccctttacgtatcacaacggatccaactgtactggcaacgaccctaaacatgttaccaggt

SEQ ID NO: 5354 - DNA, 121 bp, synthetic construct
  misc_feature 1..121: note = Description of artificial sequence: synthetic polynucleotide sequence
  source 1..121: mol_type = other DNA
tatccattccccgttaatttgcaccacccccaaacactacattcgctttggctcaccctttatccctgagagacgtcgaaggccccttctgcctgatggcacattcagctcctgtaagaag

SEQ ID NO: 5355 - DNA, 121 bp, synthetic construct
  misc_feature 1..121: note = Description of artificial sequence: synthetic polynucleotide sequence
  source 1..121: mol_type = other DNA
ggataaaacaagccttagaagaagggatgactcaaacatcatctgtaccccaagagactagaactcagcacctataccaaagcaatgagaatagtagctcttctagtatctgcaaagacaa

SEQ ID NO: 5356 - DNA, 121 bp, synthetic construct
  misc_feature 1..121: note = Description of artificial sequence: synthetic polynucleotide sequence
  source 1..121: mol_type = other DNA
gacttgttgagcccattaaagaaatggaagtctcgctatctgatggagcagaatgtcaccaagttacttcggcctctgtctccagtcacaccaccccctcccaattcaggctcaaagagtc

SEQ ID NO: 5357 - DNA, 121 bp, synthetic construct
  misc_feature 1..121: note = Description of artificial sequence: synthetic polynucleotide sequence
  source 1..121: mol_type = other DNA
ggccacacctggctcatctcacccaggagaagaggagtgtcgaaatggatacagcctcatgttttcaccagtcacatctcttactactgctagtcgctgcaacactcctctacagtttgag

SEQ ID NO: 5358 - DNA, 472 bp, synthetic construct
  misc_feature 1..472: note = Description of artificial sequence: synthetic polynucleotide sequence
  source 1..472: mol_type = other DNA
gctttgtcaccgaaaagacctggatttggcaaaagtaggataccttgactccaacactaacagctgtgctgatagaccttccctactcaactcaggtcattctgacctggctcctcatccctccctcggacccacttctgagactggtttcccaagcagaagtggagatggacatcagaccctcgtgagaaactcagaccaggcatttcggacagagttcaacttgatgtatgcctactcccctttgaatgctatgcctcgagcagatggactgtatcgaggatctcctctagtgggggataggaagcctttacatttggatgggggatattgttcccctgcagaaggattttccagcagatatgaacatggcttaatgaaagacctctctcgtggatccttgtcacctggtggtgaaagggcctgtgaaggagtcccatctgccccccagaacccaccacagaggaaaaaa

SEQ ID NO: 5359 - DNA, 303 bp, synthetic construct
  misc_feature 1..303: note = Description of artificial sequence: synthetic polynucleotide sequence
  source 1..303: mol_type = other DNA
ggtatccctgctggagtaccgaaaacggaaacaagaagctaaggaaaattctgctggtgggggaggtgactctgcacagagcaaaagcaagtctgcaggagctgggcaaggcagcagtaactccgtttccgacactggtgcccatggtgtgcagggatcctcagcccgaactccatcttcccctcacaaaaaattctccccatctcattcctctatgtcccatttggaggcggtaagcccatcagattccagaggcacttcttcatctcactgcagacctcaagagaatatcagcagtaggtg

SEQ ID NO: 5360 - DNA, 135 bp, synthetic construct
  misc_feature 1..135: note = Description of artificial sequence: synthetic polynucleotide sequence
  source 1..135: mol_type = other DNA
ggatggttcccacatcagtagaacgactccgagaaggagggagcatccccaaggtcctccgaagcagcgtgagggtggcccaaaagggagagccctctcccacatgggagagtaacatcacagagaaagactcag

SEQ ID NO: 5361 - DNA, 121 bp, synthetic construct
  misc_feature 1..121: note = Description of artificial sequence: synthetic polynucleotide sequence
  source 1..121: mol_type = other DNA
atatgttaccttccagaccctgcagatggagaaggcccagagacattaagctcagcactctctaaaggagcaacagtttacagcccttccagatacagctaccaggtgagatgagaaattg

SEQ ID NO: 5362 - DNA, 121 bp, synthetic construct
  misc_feature 1..121: note = Description of artificial sequence: synthetic polynucleotide sequence
  source 1..121: mol_type = other DNA
gctcctgcagtgtgatagtcctcggacagaatcacaaagcctccttcagcagagttcctcccccttcagaggacatcctacacagtctccaggatacagttatcgaactactgcactgaga

SEQ ID NO: 5363 - DNA, 121 bp, synthetic construct
  misc_feature 1..121: note = Description of artificial sequence: synthetic polynucleotide sequence
  source 1..121: mol_type = other DNA
ctggaaaccccccctctcacggttcttcagaatcatccctctcttccacgtcctattccagccccgcccaccctgtgtccacagactcgttggccccatttacggggacaccagggtattt

SEQ ID NO: 5364 - DNA, 121 bp, synthetic construct
  misc_feature 1..121: note = Description of artificial sequence: synthetic polynucleotide sequence
  source 1..121: mol_type = other DNA
agcagccagccacattctggaaacagcactggcagcaatcttccaaggaggagctgcccttctagtgctgctagccctaccctgcagggaccctcagactcgccaacctcagattcagttt

SEQ ID NO: 5365 - DNA, 121 bp, synthetic construct
  misc_feature 1..121: note = Description of artificial sequence: synthetic polynucleotide sequence
  source 1..121: mol_type = other DNA
tcagtccagcacaggaactctgagttccacctcctttcctcagaactctaggtcgtcattgccatcagacttacggactatcagtctgcccagtgctgggcagtcagctgtctaccaggcc

SEQ ID NO: 5366 - DNA, 121 bp, synthetic construct
  misc_feature 1..121: note = Description of artificial sequence: synthetic polynucleotide sequence
  source 1..121: mol_type = other DNA
cagggtatctgcggtttccaattcacagcactacccacaccgtgggagtgggggtgtgcaccagtaccgactccagccactgcaagggtcaggagtcaagactcagacgggactttcctag

SEQ ID NO: 5367 - DNA, 121 bp, synthetic construct
  misc_feature 1..121: note = Description of artificial sequence: synthetic polynucleotide sequence
  source 1..121: mol_type = other DNA
ctcagcctcccaaagtgctgggattacaggcgtgagccaccgtgcccggcccaatatgtagtttttaatcacacatccacctctcagcctcccccttctgagtatgcagtgtccactatac

SEQ ID NO: 5368 - DNA, 121 bp, synthetic construct
  misc_feature 1..121: note = Description of artificial sequence: synthetic polynucleotide sequence
  source 1..121: mol_type = other DNA
gttaatgactgtggcaagctggagtaaacattggaggaggagttggcagggcttagcatcgagctctggccttgccacaaagggacactgggcatgggtgggtcctttcccctaccctggg

SEQ ID NO: 5369 - DNA, 121 bp, synthetic construct
  misc_feature 1..121: note = Description of artificial sequence: synthetic polynucleotide sequence
  source 1..121: mol_type = other DNA
tcagtaacttagcaggtcaatgagttgtggctggtgacttctcagccatcagccagaccagggaaatgacttttcgccatcctcccattgttgtcccgttggatccttgaaatctcccaat

SEQ ID NO: 5370 - DNA, 145 bp, synthetic construct
  misc_feature 1..145: note = Description of artificial sequence: synthetic polynucleotide sequence
  source 1..145: mol_type = other DNA
actagaagacaggcagcctcggggacgtggtcagcgtgcaagcattgatatcctcagtgtgggctgcccgatgcaaggatggctcggaagcgctccggttgatcttcggtagagagtgttggagcagctcaatggaagacaggat

SEQ ID NO: 5371 - DNA, 136 bp, synthetic construct
  misc_feature 1..136: note = Description of artificial sequence: synthetic polynucleotide sequence
  source 1..136: mol_type = other DNA
cctggggaaaaagaggcctctcttcctttactttcttcacacagtcagctaccagcctcttcattgctttggggcagttcttatatagcttactaagatctggggaggcatatcctcggcccaccatgaagatgat

SEQ ID NO: 5372 - DNA, 133 bp, synthetic construct
  misc_feature 1..133: note = Description of artificial sequence: synthetic polynucleotide sequence
  source 1..133: mol_type = other DNA
cctgatctcggttgttgatgtgagaataaggaagctcccccgtcatcagttcatacaatacgatgccataggagtagacatccgactggaaactgaatgggttgttatcctgcattcggatcacctctggggc

SEQ ID NO: 5373 - DNA, 121 bp, synthetic construct
  misc_feature 1..121: note = Description of artificial sequence: synthetic polynucleotide sequence
  source 1..121: mol_type = other DNA
ccatccagaggacagagccagtaggttgttcaacctgctgagaaccactccagcgtgactttactgttgccaaaccaaaatctccaattttcactgttaagccttcatggagaaatatatc

SEQ ID NO: 5374 - DNA, 121 bp, synthetic construct
  misc_feature 1..121: note = Description of artificial sequence: synthetic polynucleotide sequence
  source 1..121: mol_type = other DNA
accgagcagtcaaatgaactcaacaaccaaaggatactgttggatttcatgtctctatggatgatgttctttgcatgcaaatagctgtgaagggaaaagaaattattaaaaataagtttga

SEQ ID NO: 5375 - DNA, 178 bp, synthetic construct
  misc_feature 1..178: note = Description of artificial sequence: synthetic polynucleotide sequence
  source 1..178: mol_type = other DNA
ctccattccctgagccgtctgccgggcaatgtcaattagctggaacatctgaaacttggtctcctggacatgcaggtgtttgtagaggctgctgccctcgcaccactgggtcacaattgccaggttgtcctttgtcatgtaccccatgaaaagcagaatgttcacatgccgtgttttg

SEQ ID NO: 5376 - DNA, 121 bp, synthetic construct
  misc_feature 1..121: note = Description of artificial sequence: synthetic polynucleotide sequence
  source 1..121: mol_type = other DNA
cgccagctttctactcaccgcagaacagccacctcattcctgaaggcctggaattgctctggggttgggtcgacaacctttaggatctttactgcaacatctcctgcaaaattagttggca

SEQ ID NO: 5377 - DNA, 121 bp, synthetic construct
  misc_feature 1..121: note = Description of artificial sequence: synthetic polynucleotide sequence
  source 1..121: mol_type = other DNA
accgtgccatttacccttataaacagttccaaaagagcctgacccaatccgagtggacagcatcacttcactggcttctatttcccaataatagcttgaatctctctgtccacgaggcctc

SEQ ID NO: 5378 - DNA, 121 bp, synthetic construct
  misc_feature 1..121: note = Description of artificial sequence: synthetic polynucleotide sequence
  source 1..121: mol_type = other DNA
tttgtttttctcctgggtcccagatactggtgcccgctctctttgtgctggcacgggggttttcggctgtgaccagcctgttgggctcagattgttggggctactggacagggctgaaggt

SEQ ID NO: 5379 - DNA, 121 bp, synthetic construct
  misc_feature 1..121: note = Description of artificial sequence: synthetic polynucleotide sequence
  source 1..121: mol_type = other DNA
aagaaaaaaagcccattattgttggctaaatgactatggaaaagtacctgattcgctgtgacttcgaattgcatcctgaaacagaaaaggaaagctggtcaactcctacacacaaaagatt

SEQ ID NO: 5380 - DNA, 121 bp, synthetic construct
  misc_feature 1..121: note = Description of artificial sequence: synthetic polynucleotide sequence
  source 1..121: mol_type = other DNA
agaaagcaaaggcatgaagaaaaatacctactcttcccctcaaacaaaatcgtctggaccacgccctgggagaagcactcaggttgttattctagtccaaagcaatgagaaataaagaaga

SEQ ID NO: 5381 - DNA, 155 bp, synthetic construct
  misc_feature 1..155: note = Description of artificial sequence: synthetic polynucleotide sequence
  source 1..155: mol_type = other DNA
cctcaatcatcctgctgtccacaggcagggtggtgctgaccatgtggacattaggtgtggatgtcgacctctgcctctgggagagggaaccttcagatgagggactggaggtgttaaaggtgaaggcgtgaggtgtagaatatctgtgctgagaa

SEQ ID NO: 5382 - DNA, 121 bp, synthetic construct
  misc_feature 1..121: note = Description of artificial sequence: synthetic polynucleotide sequence
  source 1..121: mol_type = other DNA
taaaaaattacctaacaggcatcctggaaacagactctcgcatacgacgcatagtcaaagaaggtagtgctgggactccactatcaccaatagtggaatttggaaacaatctaaacaaaag

SEQ ID NO: 5383 - DNA, 159 bp, synthetic construct
  misc_feature 1..159: note = Description of artificial sequence: synthetic polynucleotide sequence
  source 1..159: mol_type = other DNA
caagagttgtctgatgttactccagtccacacacatagtaggtactttggtgctacagtgctcatgaaatttgtagccacaagtctgacatcgaaatccattgagcaggaatttctgacagatgtcacagaaggcaagcttcaggaacgtcttccgagc

SEQ ID NO: 5384 - DNA, 121 bp, synthetic construct
  misc_feature 1..121: note = Description of artificial sequence: synthetic polynucleotide sequence
  source 1..121: mol_type = other DNA
gcaacttacaaagttgtgtgttgtgaggggaacatgatccaggaaatctacttgaagttcttctccaatcaaagacgcagcatcagtattccaatctaagcgtgcttttttactagaaagg

SEQ ID NO: 5385 - DNA, 121 bp, synthetic construct
  misc_feature 1..121: note = Description of artificial sequence: synthetic polynucleotide sequence
  source 1..121: mol_type = other DNA
ttaccctttgtgttcgtggagaagtctgaacactgcacagcactctggttgcaggcccctcaccttgagtgctttcataaggcagtcatgcaagctcattccatttcgcacattgacctac

SEQ ID NO: 5386 - DNA, 208 bp, synthetic construct
  misc_feature 1..208: note = Description of artificial sequence: synthetic polynucleotide sequence
  source 1..208: mol_type = other DNA
ccactgttctttgcttgttcggcaagaaaacacggatagtgttgcttgtcttagaaggatctgtgagtttgccatcatctgatgcccggcgctgatagccaaactgctgaactattgtaggagagatgcagctggagccatcaaacacggcatctttgaatccaaaaccattgctgatcgtcttccaagctccctgtatgtgctccat

SEQ ID NO: 5387 - DNA, 121 bp, synthetic construct
  misc_feature 1..121: note = Description of artificial sequence: synthetic polynucleotide sequence
  source 1..121: mol_type = other DNA
agactccgtcccaaagaaaaaaaaaaaaaaattcttagctattcagataattaagaatgcaccagatatttaggtaaaagaaggctcttggaaaaacagtctaaatgtccatcattttttt

SEQ ID NO: 5388 - DNA, 121 bp, synthetic construct
  misc_feature 1..121: note = Description of artificial sequence: synthetic polynucleotide sequence
  source 1..121: mol_type = other DNA
agattcaaaaacaactttaaaaaagggaccatgctttttaaaaatcacatggcaaatcaggaggaaggcggcacagtcgggaatacaagctcagacctgggacctgcaccagcaccggcag

SEQ ID NO: 5389 - DNA, 121 bp, synthetic construct
  misc_feature 1..121: note = Description of artificial sequence: synthetic polynucleotide sequence
  source 1..121: mol_type = other DNA
cccccccttgacagggagggatttaaggaaagggttaatgcctccacctcaaaccttcggtgatattgttcatgactctcacatcctggttttgtcacaagtcactggaaagtgggtggga

SEQ ID NO: 5390 - DNA, 121 bp, synthetic construct
  misc_feature 1..121: note = Description of artificial sequence: synthetic polynucleotide sequence
  source 1..121: mol_type = other DNA
attacactcagaggtcctcattcttcaccccctgcagcctcctccttgccatttaactccgcagcatccccactccatgctgggcttggcctcatgagttgcttgatccataaaatgccgg

SEQ ID NO: 5391 - DNA, 121 bp, synthetic construct
  misc_feature 1..121: note = Description of artificial sequence: synthetic polynucleotide sequence
  source 1..121: mol_type = other DNA
cttagaggcaccggcacaagctgcaaagaaacgtatcaagaagctcctaaacctgattttctgattctccaatctgttaatgaataacaacatgacagggaaaagtctaatgctaaggcat

SEQ ID NO: 5392 - DNA, 121 bp, synthetic construct
  misc_feature 1..121: note = Description of artificial sequence: synthetic polynucleotide sequence
  source 1..121: mol_type = other DNA
cacattgtgttataattgtttttctacttgtctaacttctccactagattggaactttccaaaggcatcatcagtgtctggcacaggacttagcactcagaccaaattccttagcaaattt

SEQ ID NO: 5393 - DNA, 121 bp, synthetic construct
  misc_feature 1..121: note = Description of artificial sequence: synthetic polynucleotide sequence
  source 1..121: mol_type = other DNA
aagggggcgcagagggtagagtggctgctcttccagtcttaggtctgtatggaagcacttatgttctaaggcagtgagggctggctttgctggtccaagaagaggaggatgcctgaggtgc

SEQ ID NO: 5394 - DNA, 121 bp, synthetic construct
  misc_feature 1..121: note = Description of artificial sequence: synthetic polynucleotide sequence
  source 1..121: mol_type = other DNA
atcttatccaatctggccctcactcctcttctatccatgtttccttacattctctaatacgagttgaggtgcctagaaagcttaacaatattttacatgatttcaagtcctggccttccac

SEQ ID NO: 5395 - DNA, 121 bp, synthetic construct
  misc_feature 1..121: note = Description of artificial sequence: synthetic polynucleotide sequence
  source 1..121: mol_type = other DNA
ttcacatgcttttctgcattgatatgatcatgtgggtgttcttctttcaattgctaatatggtggattgcattgattgattcccaaacattgaacaagtgttgcattctctgaacaaatcc

SEQ ID NO: 5396 - DNA, 121 bp, synthetic construct
  misc_feature 1..121: note = Description of artificial sequence: synthetic polynucleotide sequence
  source 1..121: mol_type = other DNA
aatttttcatgcttgccttccatttcataggtcagatcacttaaagaaggctacatcatgttcactcttggctacaaacatagggaagtgtgaagagtatgtggacaaagttaaggaagct

SEQ ID NO: 5397 - DNA, 121 bp, synthetic construct
  misc_feature 1..121: note = Description of artificial sequence: synthetic polynucleotide sequence
  source 1..121: mol_type = other DNA
cctctagaactacctggcattgattttattttagttgtcctttctaagtactcagcagatgtacaaagtgaagcaagcaataattctctggacaagaaaactgctgaagttcagccacatg

SEQ ID NO: 5398 - DNA, 121 bp, synthetic construct
  misc_feature 1..121: note = Description of artificial sequence: synthetic polynucleotide sequence
  source 1..121: mol_type = other DNA
ctgaggaaaaaccaggataaatgatttgccatggtatcctatatgttatagctgtaagattgacatccaggtttattgaaatctaatgttcttccttcacatcatactgactctgaaattg

SEQ ID NO: 5399 - DNA, 121 bp, synthetic construct
  misc_feature 1..121: note = Description of artificial sequence: synthetic polynucleotide sequence
  source 1..121: mol_type = other DNA
gctcaatcataaaagacaaaacacatatttggaagttagaacagattactctagggtttttgctcccatgtaagctccctgaaactgaacttatttttgaggtgacattgccttgctgctg

SEQ ID NO: 5400 - DNA, 121 bp, synthetic construct
  misc_feature 1..121: note = Description of artificial sequence: synthetic polynucleotide sequence
  source 1..121: mol_type = other DNA
ccatgggatgttctcacttgctacctgagttgaaaatcactgccataaatattaggttgtaaggaaactggtcatcgacataatcaggtttttcccagtaacaaacctatgcccttaacac

SEQ ID NO: 5401 - DNA, 121 bp, synthetic construct
  misc_feature 1..121: note = Description of artificial sequence: synthetic polynucleotide sequence
  source 1..121: mol_type = other DNA
tcctgtgtggttttggtgcaaagtaaaatgcaagaaattagatcctccttcttgatgggagtgaccttggcctggccagtctgatgctgtcttcaggaactctggaagctaagtgagtgac

SEQ ID NO: 5402 - DNA, 121 bp, synthetic construct
  misc_feature 1..121: note = Description of artificial sequence: synthetic polynucleotide sequence
  source 1..121: mol_type = other DNA
gcatgagaacatttcaacagtggctctgcttcaagaatgtgaaggcattccacctaaagttctaatttgcccaaaggaacaaatgacttttgtgagaggttttgataagtcccaagccact

SEQ ID NO: 5403 - DNA, 121 bp, synthetic construct
  misc_feature 1..121: note = Description of artificial sequence: synthetic polynucleotide sequence
  source 1..121: mol_type = other DNA
aataaactgactagaaaataaatgctctagctgttgagaggaagggagttaataagtgagatggacaaaggagggcttgcaacaccagaaccagcaattatgccagccatggggtactggg

SEQ ID NO: 5404 - DNA, 121 bp, synthetic construct
  misc_feature 1..121: note = Description of artificial sequence: synthetic polynucleotide sequence
  source 1..121: mol_type = other DNA
tgtgtgtgtgtgtgtgtgtgtgtgtgtgtgtgtgtgatcatacccagtactcgctggtttttatttaatgtagctttgaaaaaaagtcttgtatctgtctcttggtaattatatattgttt

SEQ ID NO: 5405 - DNA, 121 bp, synthetic construct
  misc_feature 1..121: note = Description of artificial sequence: synthetic polynucleotide sequence
  source 1..121: mol_type = other DNA
gtaatagcaccagaagcagacataacaaattgcctcagggatgctctgatgtgcagttacaaattcagagagggcaaatattgagagactccacagaactggtaagaagttggttgaagag

SEQ ID NO: 5406 - DNA, 121 bp, synthetic construct
  misc_feature 1..121: note = Description of artificial sequence: synthetic polynucleotide sequence
  source 1..121: mol_type = other DNA
aggtgcatatgcccaaacttctggtttgataggctaaatgaaacgtaggcagctcaagatgcatggtcacttggtgtaccacggtcaagtgtacagtatccatgagatcccggtagtaatc

SEQ ID NO: 5407 - DNA, 121 bp, synthetic construct
  misc_feature 1..121: note = Description of artificial sequence: synthetic polynucleotide sequence
  source 1..121: mol_type = other DNA
cagggcctcagaagttctacatgatctggttcctgtcttcttctctgctcttacctcctaatactctgtgctttgcttgctctgctataaatacattcattttctttggatcccctgaaca

SEQ ID NO: 5408 - DNA, 121 bp, synthetic construct
  misc_feature 1..121: note = Description of artificial sequence: synthetic polynucleotide sequence
  source 1..121: mol_type = other DNA
cttcactctaggagaaagaatgacgagaacataacactagagacagtttgccatgaccccaagctcccctaccatgactttattctggaagatgctgcttctccaaagtgcattatgaagg

SEQ ID NO: 5409 - DNA, 121 bp, synthetic construct
  misc_feature 1..121: note = Description of artificial sequence: synthetic polynucleotide sequence
  source 1..121: mol_type = other DNA
agcctggtgagactttcttcatgtgttcctgtagctctgatgagtgcaatgacaacatcatcttctcagaaggtgagttttcttctcttaagggtgtgggacctgagatctgtgccaattt

SEQ ID NO: 5410 - DNA, 121 bp, synthetic construct
  misc_feature 1..121: note = Description of artificial sequence: synthetic polynucleotide sequence
  source 1..121: mol_type = other DNA
taaaaatgtttctgagcatttttgtacaaacataaagaagacaacctaaatttctatcaataggggattggttacatgaattatggaagactgagcaactgttaaaattggcagagatgca

SEQ ID NO: 5411 - DNA, 240 bp, synthetic construct
  misc_feature 1..240: note = Description of artificial sequence: synthetic polynucleotide sequence
  source 1..240: mol_type = other DNA
aatgaaccccacggatatagcagacaccaccctcgatgaaagcatatacagcaattactatctgtatgaaagtatccccaagccttgcaccaaagaaggcatcaaggcatttggggagctcttcctgcccccactgtattccttggtttttgtatttggtctgcttggaaattctgtggtggttctggtcctgttcaaatacaagcggctcaggtccatgactgatgtgtacctgctcaa

SEQ ID NO: 5412 - DNA, 241 bp, synthetic construct
  misc_feature 1..241: note = Description of artificial sequence: synthetic polynucleotide sequence
  source 1..241: mol_type = other DNA
ccttgccatctcggatctgctcttcgtgttttccctccctttttggggctactatgcagcagaccagtgggtttttgggctaggtctgtgcaagatgatttcctggatgtacttggtgggcttttacagtggcatattctttgtcatgctcatgagcattgatagatacctggcaattgtgcacgcggtgttttccttgagggcaaggaccttgacttatggggtcatcaccagtttggct

SEQ ID NO: 5413 - DNA, 241 bp, synthetic construct
  misc_feature 1..241: note = Description of artificial sequence: synthetic polynucleotide sequence
  source 1..241: mol_type = other DNA
acatggtcagtggctgtgttcgcctcccttcctggctttctgttcagcacttgttatactgagcgcaaccatacctactgcaaaaccaagtactctctcaactccacgacgtggaaggttctcagctccctggaaatcaacattctcggattggtgatccccttagggatcatgctgttttgctactccatgatcatcaggaccttgcagcattgtaaaaatgagaagaagaacaaggcgg

SEQ ID NO: 5414 - DNA, 241 bp, synthetic construct
  misc_feature 1..241: note = Description of artificial sequence: synthetic polynucleotide sequence
  source 1..241: mol_type = other DNA
tgaagatgatctttgccgtggtggtcctcttccttgggttctggacaccttacaacatagtgctcttcctagagaccctggtggagctagaagtccttcaggactgcacctttgaaagatacttggactatgccatccaggccacagaaactctggcttttgttcactgctgccttaatcccatcatctacttttttctgggggagaaatttcgcaagtacatcctacagctcttcaaaac

SEQ ID NO: 5415 - DNA, 121 bp, synthetic construct
  misc_feature 1..121: note = Description of artificial sequence: synthetic polynucleotide sequence
  source 1..121: mol_type = other DNA
ctgcaggggcctttttgtgctctgccaatactgtgggctcctccaaatttactctgctgacacccccagctcatcttacacgcagtccaccatggatcatgatctccatgatgctctgtag

SEQ ID NO: 5416 - DNA, 121 bp, synthetic construct
  misc_feature 1..121: note = Description of artificial sequence: synthetic polynucleotide sequence
  source 1..121: mol_type = other DNA
cttttaaagacaagggtacttataaggaggaggccaaaagccacagtcagaggagattttatgacagaacaggtcagatgaagagatgtgacgacgttatactgctggctttgaagatgga

SEQ ID NO: 5417 - DNA, 121 bp, synthetic construct
  misc_feature 1..121: note = Description of artificial sequence: synthetic polynucleotide sequence
  source 1..121: mol_type = other DNA
ttcctcctggaggatctgagggaggatttttccatgcttctctcctagcttaggtttacattgcttatctgccaatccttggtatttgtattagtcagttctcatgcttctactgggtaat

SEQ ID NO: 5418 - DNA, 121 bp, synthetic construct
  misc_feature 1..121: note = Description of artificial sequence: synthetic polynucleotide sequence
  source 1..121: mol_type = other DNA
ctaccacaattataagacgaaagcatattttaagtttaaaaatttacattatctacattttcattctctgctttcttcctcctttcttccacagatgcctgtatattattacccatctggt

SEQ ID NO: 5419 - DNA, 121 bp, synthetic construct
  misc_feature 1..121: note = Description of artificial sequence: synthetic polynucleotide sequence
  source 1..121: mol_type = other DNA
gcagagtgagtgatgaaggagaatggtaagaatgatcagaggtcagatcacggaaaggatattagattttattgtaactacagagaaactatgctaaggttttgagcagagtagtaaaatg

SEQ ID NO: 5420 - DNA, 121 bp, synthetic construct
  misc_feature 1..121: note = Description of artificial sequence: synthetic polynucleotide sequence
  source 1..121: mol_type = other DNA
taacaatgtctatcaatcgaggtgtctctggagttttctggaggttgaatctggaatgaacagttcttgggtgtgccctgttgaggagctaactggtgcaggagctatctggggtgaaatc

SEQ ID NO: 5421 - DNA, 121 bp, synthetic construct
  misc_feature 1..121: note = Description of artificial sequence: synthetic polynucleotide sequence
  source 1..121: mol_type = other DNA
cattttctctagcaattatgggggttttatctcccagatgtgatttatgccatattacattccaagaagggaacatgaagaatgtttgtggctaaagaagtctcaacacaaggaaactaca

SEQ ID NO: 5422 - DNA, 121 bp, synthetic construct
  misc_feature 1..121: note = Description of artificial sequence: synthetic polynucleotide sequence
  source 1..121: mol_type = other DNA
cctggagtcgccacccttgcagcctgctcccctcgcatgcccttttcctgccatcagcgtggctttggcccagaaggcacttacagagccagccctggcagggctggggtctgtaccagct

SEQ ID NO: 5423 - DNA, 329 bp, synthetic construct
  misc_feature 1..329: note = Description of artificial sequence: synthetic polynucleotide sequence
  source 1..329: mol_type = other DNA
catggctgcaggaggtcccggcgcggggtctgcggccccggtctcctccacatcctcccttcccctggctgctctcaacatgcgagtgcggcgccgcctgtctctgttcttgaacgtgcggacacaggtggcggccgactggaccgcgctggcggaggagatggactttgagtacttggagatccggcaactggagacacaagcggaccccactggcaggctgctggacgcctggcagggacgccctggcgcctctgtaggccgactgctcgagctgcttaccaagctgggccgcgacgacgtgctgctggagctgggacccagcattg

SEQ ID NO: 5424 - DNA, 136 bp, synthetic construct
  misc_feature 1..136: note = Description of artificial sequence: synthetic polynucleotide sequence
  source 1..136: mol_type = other DNA
gaggaggattgccaaaagtatatcttgaagcagcagcaggaggaggctgagaagcctttacaggtggccgctgtagacagcagtgtcccacggacagcagagctggcgggcatcaccacacttgatgaccccctgg

SEQ ID NO: 5425 - DNA, 206 bp, synthetic construct
  misc_feature 1..206: note = Description of artificial sequence: synthetic polynucleotide sequence
  source 1..206: mol_type = other DNA
gggcatatgcctgagcgtttcgatgccttcatctgctattgccccagcgacatccagtttgtgcaggagatgatccggcaactggaacagacaaactatcgactgaagttgtgtgtgtctgaccgcgatgtcctgcctggcacctgtgtctggtctattgctagtgagctcatcgaaaagaggttggctagaaggccacggggtgg

SEQ ID NO: 5426 - DNA, 121 bp, synthetic construct
  misc_feature 1..121: note = Description of artificial sequence: synthetic polynucleotide sequence
  source 1..121: mol_type = other DNA
cccactctcccctaggtgccgccggatggtggtggttgtctctgatgattacctgcagagcaaggaatgtgacttccagaccaaatttgcactcagcctctctccaggtaagctcaaccct

SEQ ID NO: 5427 - DNA, 156 bp, synthetic construct
  misc_feature 1..156: note = Description of artificial sequence: synthetic polynucleotide sequence
  source 1..156: mol_type = other DNA
ggtgcccatcagaagcgactgatccccatcaagtacaaggcaatgaagaaagagttccccagcatcctgaggttcatcactgtctgcgactacaccaacccctgcaccaaatcttggttctggactcgccttgccaaggccttgtccctgccctga

SEQ ID NO: 5428 - DNA, 121 bp, synthetic construct
  misc_feature 1..121: note = Description of artificial sequence: synthetic polynucleotide sequence
  source 1..121: mol_type = other DNA
gcccacccacttccccttcccatcatggcacacaggctcgggctccaccaggtgcatgactgtatgcaggtcactcaacttctctgagcctcagttttctcctttttaaatggggtatatc

SEQ ID NO: 5429 - DNA, 121 bp, synthetic construct
  misc_feature 1..121: note = Description of artificial sequence: synthetic polynucleotide sequence
  source 1..121: mol_type = other DNA
ttagtaagagagaaaaaaggaaaacactttttagtagaaatacaatagaatgatccactgttatctgagagggggacaaacagtaatttttttccctcctgcctttaggtgcataataatt

SEQ ID NO: 5430 - DNA, 121 bp, synthetic construct
  misc_feature 1..121: note = Description of artificial sequence: synthetic polynucleotide sequence
  source 1..121: mol_type = other DNA
atgttgctgccttccatctgtgacatctgagggcagcaggaaattttgctctgtaccccatagtttggacacccagagcactcaccatgcctcctctacaggctctgctccctttcaggca

SEQ ID NO: 5431 - DNA, 121 bp, synthetic construct
  misc_feature 1..121: note = Description of artificial sequence: synthetic polynucleotide sequence
  source 1..121: mol_type = other DNA
attcaaggaaaatagaagaaaggaaataataactactaagcagagtaatgaaacagaaatgaacacatgccaaaaagttaacaaaggcaagagatggtttgagaagacaaacctttggaaa

SEQ ID NO: 5432 - DNA, 121 bp, synthetic construct
  misc_feature 1..121: note = Description of artificial sequence: synthetic polynucleotide sequence
  source 1..121: mol_type = other DNA
aaaatgcaagctacaatggttgaactttcagcttccatcaacttgagacatgttccagagtttaaaatattcttcacttgtattacccctgtccacaggcaatgaatctcctgctggccac

SEQ ID NO: 5433 - DNA, 121 bp, synthetic construct
  misc_feature 1..121: note = Description of artificial sequence: synthetic polynucleotide sequence
  source 1..121: mol_type = other DNA
agctgcaagggaggctttggttatcatggtctcactgttcaggccaaggggagtgattgtgtctcccggtggtgactgggcaggggcagaaaaccctcatttcaaccctcttctttgaaag

SEQ ID NO: 5434 - DNA, 121 bp, synthetic construct
  misc_feature 1..121: note = Description of artificial sequence: synthetic polynucleotide sequence
  source 1..121: mol_type = other DNA
tctttttcttcccagtctcaggtatgtctttatcagcagcatgaaaacggactaatacacctacattaaagggcagagaagaggccgtgctggttcatccatataactcatgggatcatta

SEQ ID NO: 5435 - DNA, 121 bp, synthetic construct
  misc_feature 1..121: note = Description of artificial sequence: synthetic polynucleotide sequence
  source 1..121: mol_type = other DNA
gcgggggagaagcatatttggagtaatctatgcatatctaggtggaactatggaactcccttaaggaagaaaagaagctgtaggcattggcttcccatcatagaggcctggataaaggtag

SEQ ID NO: 5436 - DNA, 163 bp, synthetic construct
  misc_feature 1..163: note = Description of artificial sequence: synthetic polynucleotide sequence
  source 1..163: mol_type = other DNA
gtcactctaattcagtgtcctctttgggtttgtaaacagccccaaacttctgcatgtacttcttaatgtactccttggttttgtgtttcacattctcattgcactccaggtcctcaggattcttacagtacttcagctccttattcataacaccgtgagtcag

SEQ ID NO: 5437 - DNA, 121 bp, synthetic construct
  misc_feature 1..121: note = Description of artificial sequence: synthetic polynucleotide sequence
  source 1..121: mol_type = other DNA
aggggagtaccttgcgagccagatgtttaaagtcttcagttgtggtaattcttcccactttgcagtcaggtttccggtaagggttcaggcactggacgatgaactgggacatctgcaggca

SEQ ID NO: 5438 - DNA, 121 bp, synthetic construct
  misc_feature 1..121: note = Description of artificial sequence: synthetic polynucleotide sequence
  source 1..121: mol_type = other DNA
ttatatccaccaaaccttacctcttttctgaatacttctttgcttttctttgctagttcactggaggtgtctgcttctgctgtcttgggctttttcgaggcctaaaaatggaggagaaaac

SEQ ID NO: 5439 - DNA, 121 bp, synthetic construct
  misc_feature 1..121: note = Description of artificial sequence: synthetic polynucleotide sequence
  source 1..121: mol_type = other DNA
ctcaccttcatggggttttcatcatatgttggagttcccaggtccatctcagcttcatgctcaaggctggcatcatctcctgggctttcccaagtaggaggatcccactgagtctgcctag

SEQ ID NO: 5440 - DNA, 141 bp, synthetic construct
  misc_feature 1..141: note = Description of artificial sequence: synthetic polynucleotide sequence
  source 1..141: mol_type = other DNA
ccttgtgatcacatggtagtaataaatcttcccttctggatctcgagctgtcttccagttgggaggtaagacaatggtttttggtttgggaggagaggggggcggcagatccaagagattatttgtcacaaccatttcaga

SEQ ID NO: 5441 - DNA, 136 bp, synthetic construct
  misc_feature 1..136: note = Description of artificial sequence: synthetic polynucleotide sequence
  source 1..136: mol_type = other DNA
ctggctgcaagggctgaggctgccctggtgcaactattgtagtcactgctgcggctggctgtaccaccactccttgtggatgagctgtgaaaatctgttgcccctggatatactgaagacttggctgggcataact

SEQ ID NO: 5442 - DNA, 330 bp, synthetic construct
  misc_feature 1..330: note = Description of artificial sequence: synthetic polynucleotide sequence
  source 1..330: mol_type = other DNA
cctgtacaattggtggagttgtctgtgaataaggtgatgtcacaccatagactgttggacatgtctgtccttgataatatatggttgcttgagactgtgcaggagagtactgctgctgtacactgacagactgttggtttgaatcccaaacactataattctgtccctgaactgggccgggggccggcactggcaagacagcaacgctggagtcttggtgtactacaccatcactctgggccacatactgggaactggaaacttccacaggagctgccacatgtggcaccactggtactggtggaggggcagaaaggggttctgtagaat

SEQ ID NO: 5443 - DNA, 341 bp, synthetic construct
  misc_feature 1..341: note = Description of artificial sequence: synthetic polynucleotide sequence
  source 1..341: mol_type = other DNA
gtcccaccaagggctgagcatgatcataaggagcaggagaacacactgggtccatgctgggtgtgggcaggagcacctttccagcattagggttgctgggatccacataggcctgcatgggataacctggtgggtaaccagcaaagggatgatgcggggcattataaccaagagagtcatagggcagtggtgatgtcattcccaggttctgcatctgttgctgttgtttctgagcctcccgttgagccacctcttgctcaaacaacttccggcgttcctctgtagaaagtttattgcggtctttaattcgtactttctttttagaagttggtgtatcatat

SEQ ID NO: 5444 - DNA, 185 bp, synthetic construct
  misc_feature 1..185: note = Description of artificial sequence: synthetic polynucleotide sequence
  source 1..185: mol_type = other DNA
cctgtcatctggcctttttgttccccgctcataggcagaagagggtggtgagagggagcttcttcgtttccttttctctttattttgagtttgcttgtctgggtctctctctcttgacctattaggagtcttcggggcaggtgtttgatctctgaagccaacagcatcccttcctcgttcagttg

SEQ ID NO: 5445 - DNA, 121 bp, synthetic construct
  misc_feature 1..121: note = Description of artificial sequence: synthetic polynucleotide sequence
  source 1..121: mol_type = other DNA
taaagccatcaacacagagtatctctgaatacctacttgtgttttccttttcagtttgacttttctttggaattcgatatacctcctgcaaaaaataaaccagagggagggttattagtga

SEQ ID NO: 5446 - DNA, 326 bp, synthetic construct
  misc_feature 1..326: note = Description of artificial sequence: synthetic polynucleotide sequence
  source 1..326: mol_type = other DNA
cctttaggtctttccaactgtccaggagtttggtggccaaatcacttatatccactgttttatctggctgttcttggctcctttcactctccacatcagacacaccctcctcttcatcttgggatggtgtttcttcattaataggttcttctagttttgtgccgttgctctctttgggctctatttcagcgtcagcttctggttcagatgtaggtagcttactagcttctatgttggtttcactatcaactttgcattcaggcagctgttgtgggagtagctgttgtgactgcaattcttcctcttcctctacagggacattttct

SEQ ID NO: 5447 - DNA, 338 bp, synthetic construct
  misc_feature 1..338: note = Description of artificial sequence: synthetic polynucleotide sequence
  source 1..338: mol_type = other DNA
aattgatcaagatcctctttgccatccttgccttctagctcactggttgcatcagagattgcactgtccatgctattttcacttataattttcagtctgcgaaacattagtttcttgggagtgtctgtgtcagcttctgtgctcagcttggtggaaggatcaggtgtgttgagtggtgtatgagcacgcgatgtattctcactagaatacccatctccttcactcaacggagggacagcagtcttagtctgagaccagcgttgaataattggaagtactttgctttcctccaacatatttttagtaggaatgggcaagtgttccaaagtctttataat

SEQ ID NO: 5448 - DNA, 121 bp, synthetic construct
  misc_feature 1..121: note = Description of artificial sequence: synthetic polynucleotide sequence
  source 1..121: mol_type = other DNA
cctcttcctgaagcttctggttactttcccggccgtcacctagctctgccatccagatccacaacaaagacagcccatgacgttccagaaaggacttcaggcaggactgtgagtgtgtgtt

SEQ ID NO: 5449 - DNA, 136 bp, synthetic construct
  misc_feature 1..136: note = Description of artificial sequence: synthetic polynucleotide sequence
  source 1..136: mol_type = other DNA
cctgtatgagttccagacaggtaagtttctgctccaaagtttcaattctaaccattagccgggataagctgagcacctggtttttatcagagagaccctcaccattttccatcagagcttctagctctccatccac

SEQ ID NO: 5450 - DNA, 121 bp, synthetic construct
  misc_feature 1..121: note = Description of artificial sequence: synthetic polynucleotide sequence
  source 1..121: mol_type = other DNA
atccttcttacgagatcgttccttcttcattttccctcctgctgctctgatgctgactctgttttctcctcccaggtaaccccggcaattggctgatccgcagaaacatttctgggcttct

SEQ ID NO: 5451 - DNA, 121 bp, synthetic construct
  misc_feature 1..121: note = Description of artificial sequence: synthetic polynucleotide sequence
  source 1..121: mol_type = other DNA
aacaatacttacccatatctctggaactgatagtcaaacgttaactctgagcctgaaggaaccagtttggtggtaaaaaacccaaccctcagttgtccgttcacagtccactgagatgatg

SEQ ID NO: 5452 - DNA, 121 bp, synthetic construct
  misc_feature 1..121: note = Description of artificial sequence: synthetic polynucleotide sequence
  source 1..121: mol_type = other DNA
ctctaaatccacctcaacttactttttgggtttcacaatttggttcacagctgtgattcatgaaacgagagcaatttcctttttgagtggcatctattatctgggagaagaggatcattta

SEQ ID NO: 5453 - DNA, 121 bp, synthetic construct
  misc_feature 1..121: note = Description of artificial sequence: synthetic polynucleotide sequence
  source 1..121: mol_type = other DNA
tcatcattcttcagggccatgaaatagtaatggatgtttttgtttcgtgcatactccttcactcgagctttaaactctttatgatcgagtacctctccacaatattctaggacaaaggtgt

SEQ ID NO: 5454 - DNA, 121 bp, synthetic construct
  misc_feature 1..121: note = Description of artificial sequence: synthetic polynucleotide sequence
  source 1..121: mol_type = other DNA
gaaggtctttggcagctctcaagccccagcctttcttttctgtgagtatgacttccacatctgcatgctgttttctctgaaaccgtctattggaacaataatccccatttggacaccgaga

SEQ ID NO: 5455 - DNA, 133 bp, synthetic construct
  misc_feature 1..133: note = Description of artificial sequence: synthetic polynucleotide sequence
  source 1..133: mol_type = other DNA
ccattcaatcatgagaagacgattaagacaatcttccccacatgctatttcaccttgagctctttcatctttagaaagaggtgtacactcacactgcattcgcttaatatctcgatgagatttattcttcttt

SEQ ID NO: 5456 - DNA, 236 bp, synthetic construct
  misc_feature 1..236: note = Description of artificial sequence: synthetic polynucleotide sequence
  source 1..236: mol_type = other DNA
cctttctgttaaataaacattttcttcaataagatcaaagtaacatggcattttcccttgcttggcacattccttccatcgctgtgggtccctgaagtcatccatgacacaggagggcccaaccagtgctgaacctgggggcactgatgtctctccctgctctacctccactctaactttctttctgtcctgaagctcaccatcactttcagaatcactctctatttcctgcctcc

SEQ ID NO: 5457 - DNA, 471 bp, synthetic construct
  misc_feature 1..471: note = Description of artificial sequence: synthetic polynucleotide sequence
  source 1..471: mol_type = other DNA
tttttttaagaggccctctatctttgatatcatttttttctaagttttttgaaaaatctttcttttcattcacagctaaagtgtccttaatggaattgctgcttatttcaggtgcttgcactgaccccttgtctttctgaagggatagaagaaatttatcggactggtctgaaaaatgggatccatcctgttgatcccaattctcctcttcttcacgatcatctgttagggaatctggtacttgtccttgagttcgatcatacacaaccccagttccaggaggtctacctgatcttggatcccagtaaccattgccttgccagtaatcacgtgtcccaccatactgttctgcattttgctgatacttgtgtccaccacaagctccatagctactgtcaggttgctgatacgtggtagaaggcttttcttgagagaagtcccaacctaagtttctgagctcttctgatgagt

SEQ ID NO: 5458 - DNA, 472 bp, synthetic construct
  misc_feature 1..472: note = Description of artificial sequence: synthetic polynucleotide sequence
  source 1..472: mol_type = other DNA
gcaagccatccacatgtggtatctcacaagaggaagaaaaactcaattctgtttttcccagtctactatctggcctgttttggaaagtggtctgttgccaagacttatttgggacatcttcaaaatcagaagaataaattggcagctcttcttgctgcctagaaggtattttggctttcacggtttcctctgaatttgggtgacccagagggtcagatttcacatctgtatgacttgtactatcaaccccatcactctgaggatgagaaagttcaggcaggcgattatctatttgttttctactggactgtgtaaaagaaatttccggattcttctctgttcctttatgaaggaaaaacttatcagtttgaggacaggctttacttgctatactttcaaatttttcctcatacaaatgtctccttgactccaatctctcatcttcccaatggtcagaatagtgtctataact

SEQ ID NO: 5459 - DNA, 472 bp, synthetic construct
  misc_feature 1..472: note = Description of artificial sequence: synthetic polynucleotide sequence
  source 1..472: mol_type = other DNA
ttgactgctccgagaagaacaaggacttgtttcttccatgggcaaagtagaattctttggcacaaccacaacagactggagacggtttcttggaatactgctatcatccgaatctgtatcttctgaatcactttcatcatttgaactttcagaagagccagaataatcttcatgaactgtagacacaatttctggggcatgaccactactgtcacactttaatgcataagttacaccatcactgtcttccatggttaaattcaaatcacaagaagaaaatacaacttctgagtcatcagaagtatgcacatgtcctccttctcctctttcatctaaagagatttctggtcttcctcttctttcaggcaatatggaattcccttcttcttgagcctcttgcaaacatttcccagataacccattattacgcctgttctccctggaagcaaatccctttcctgaatcaggaagg

SEQ ID NO: 5460 - DNA, 473 bp, synthetic construct
  misc_feature 1..473: note = Description of artificial sequence: synthetic polynucleotide sequence
  source 1..473: mol_type = other DNA
tcactacctacttctactattgtttctttccctgcatgctttaaaaactctgaactttttttactctttagcactgcatccagaactggagatgtgttctctccgcatttcaagagagttagactgtccacctttattcctggtggaagactctgaagagatgaagcaatacctgaactcccaataggttgatataaatcatcaaaatgattaacagaagctgaactagtgctaccgatgctctgcttatattcttcacatgcaaattttgagtgatctgtcaaatttctactatcacatataactggttttgattccaaatgcacattcataaagctatttgaagaaatcttcataactgaaggctcaatattttcagcttcagagttacacaaagaagggttgctatcgttcaaagtacagtatatgtctgaatctttggttttgcagcaagaaaccctcgtatcaactgg

SEQ ID NO: 5461 - DNA, 472 bp, synthetic construct
  misc_feature 1..472: note = Description of artificial sequence: synthetic polynucleotide sequence
  source 1..472: mol_type = other DNA
ttctttaactactgttttggaataatccacagtcataactggcatagacatgagtttatcttggtgtggtgacaccagaggttctgtttctctaaatgggctttctgacttcttatgcagcatgcaggtatcatccaagtctttttctttgcacctactaatattctgaaatccatttgatgaaagcatgcatgctttgaccaaaggggataattccgatccagtcacactatcatcagaagtcattaaaacagcatcagttttagaagtgcaaaatgttgccaaatcagattctgccccaggagatccatttatatttaattctatgggacaaaaacttcttaattgatcattcttcactttagataaagagtctaattccttaatactatcatggctatcatgtgttataaattcggacttaaaaataggcaattcatctagcttttttaaagtaggtgaatcatttaat

SEQ ID NO: 5462 - DNA, 470 bp, synthetic construct
  misc_feature 1..470: note = Description of artificial sequence: synthetic polynucleotide sequence
  source 1..470: mol_type = other DNA
cgatttgatggagctggagacccagccttttctctttcaggatttttattaatcattcttaattcactaccttttgaacaaggtgtctgtaaactaaaagaatgagactgtttgatttcttcatttaattctgtacaacagaaagaatttttaaatttatcagacttgggtataggttttgaaagggtagatttataacgggaagcactactgtcatgcttagaatatgatgaccctcgtcggaatcccagttcattagggggagaacaacatcttttaattgcttcattttctgaagtccttttagattctctttctagttttgaagaatacttgcctcttctttccatctctaagtaagaggtctcagttttacagtcccgatcagatttagaataggatgatgtccttaggtctctgtaagaagaggaatgagatgaggtacgccttgagtatgtcttcttatactc

SEQ ID NO: 5463 - DNA, 472 bp, synthetic construct
  misc_feature 1..472: note = Description of artificial sequence: synthetic polynucleotide sequence
  source 1..472: mol_type = other DNA
ttcttctgagtcagaactctctcgtgctctgttatctgtgtatggccgagaatagcgcgtcctctctcgataaggggagctcctatggtagcgacgatcagagtcataataatgagatcgttctgacctggaataggataaattagttctagagcctctctcagacctagagtgagatctgctccgccgtcgctctctttctgatctacatcgggaagatacataccgagtatctctttcaagttttgaatagctaaaatatttatcatctctgtctgttttagatcgtgaaggtttccctagatcctcactttttaaaggtgctgagctctttttaaaatctctttccttttcaatgcttgctgaaaattttaaatcatgtgatctttgacttgaagaagtccgtacagaatcttcatcagattctgaaccaagaaagatgccttcagattgtgaggatttcttcttagaa

SEQ ID NO: 5464 - DNA, 472 bp, synthetic construct
  misc_feature 1..472: note = Description of artificial sequence: synthetic polynucleotide sequence
  source 1..472: mol_type = other DNA
cctgtttttttacagctcagactaatcttagaactatctggaatttcttcatccttcccaatatgggaatcttctttttttgaggaaatatctgcttgctcattcaatatttgagttacgtgttcttctaaactattagatatagtgtcctgcttagtatctgcttctaaagattctggtacaattataattggtggttctttcagagatctaactgctacatctactggtaagggtactggtgctgccattagaactgttattggtgtatgtggcaaggccactggctctgttactggtgctggtgatgagagtgttgtggcttgggcaggtggaggcggtggaggcggagatgagggcggtgagtctacagttgttgattctgctatcactgctggtaatggtgctgcatgagtaggtggagatgctactgctgtggtagtagccagcagtggcctggatgttacatgaa

SEQ ID NO: 5465 - DNA, 358 bp, synthetic construct
  misc_feature 1..358: note = Description of artificial sequence: synthetic polynucleotide sequence
  source 1..358: mol_type = other DNA
gcagatgtttcttaaaatgaattttgcccaattccacccttgactttggtggggaagattcttctgcagtagataaggtatcaccaatttccattttcattttaggagtcgagtctacctgaagaggtacagctggagggtttggagtatcactttgcttttcattgccaagtgcagtgagaaacctattctgcaaagttttctttgtaaggctgaagctgaatgacaccttctgtcgtccctgttcttccaaattaacttttgttttggtgcctttgggcaaaaatcgactagaagcaacacctttgaacattggtcctttgatgaaacctgttttctgcacattttcaatctttgc

SEQ ID NO: 5466 - DNA, 121 bp, synthetic construct
  misc_feature 1..121: note = Description of artificial sequence: synthetic polynucleotide sequence
  source 1..121: mol_type = other DNA
gtgtttagtggtccatctcataatcattgaatgactagttaaattatacttacctcattttcttcttctctatttccattcagccaagaaaacatgcaaaagaataaaaagaaatcataaa

SEQ ID NO: 5467 - DNA, 121 bp, synthetic construct
  misc_feature 1..121: note = Description of artificial sequence: synthetic polynucleotide sequence
  source 1..121: mol_type = other DNA
ggggggccgcggagctgatacttactcaggggtcgggtgctccgggtcgtagaaatcccccatcttcggaggcggctgcggctgcagctgcttcatcgggagcggctggagacggcgacgc

SEQ ID NO: 5468 - DNA, 121 bp, synthetic construct
  misc_feature 1..121: note = Description of artificial sequence: synthetic polynucleotide sequence
  source 1..121: mol_type = other DNA
ctaccctgggcgcggaatgcgcgttaggcaatccccggtctgcgcgtcccacacgcagacgtggcctgccaggcagcagctcaccagcagcatgccgtcgctggccaggcactcgatgtcc

SEQ ID NO: 5469 - DNA, 121 bp, synthetic construct
  misc_feature 1..121: note = Description of artificial sequence: synthetic polynucleotide sequence
  source 1..121: mol_type = other DNA
tgatatctgatgccggttggggctccagggtgccctgaaatgggtaagtcagctctggcccttgagggtcgggtgtgctgccccccaggttcagccaaacctccaaggggctctccttggg

SEQ ID NO: 5470 - DNA, 121 bp, synthetic construct
  misc_feature 1..121: note = Description of artificial sequence: synthetic polynucleotide sequence
  source 1..121: mol_type = other DNA
agaacaagaccttggaagaatagactatcaaaggagatgacatattcaagacagaaagcacagaccagtgtatagattttaggtgcttacctagatccgctacagttcctcctttaacagg

SEQ ID NO: 5471 - DNA, 121 bp, synthetic construct
  misc_feature 1..121: note = Description of artificial sequence: synthetic polynucleotide sequence
  source 1..121: mol_type = other DNA
tttttctaacacagaatcctcctcggccggcaagctgcactttttccccgttcctgtgacggtttctaaaggtaataacaaaagccacacacgtttcagagaagcatgatttcagctattt

SEQ ID NO: 5472 - DNA, 121 bp, synthetic construct
  misc_feature 1..121: note = Description of artificial sequence: synthetic polynucleotide sequence
  source 1..121: mol_type = other DNA
tgcttcgtgcgtgcgtgcgcgcgcagatgtgggccccgcgggagcagctactgggctggactgcggaaggtgagtcggggccgcgagatcgcctcccccattcggtgctccagccgcaggc

SEQ ID NO: 5473 - DNA, 121 bp, synthetic construct
  misc_feature 1..121: note = Description of artificial sequence: synthetic polynucleotide sequence
  source 1..121: mol_type = other DNA
actacctgcctgtgacccagagtcctgccctggcccagcagcatgtaccaggcccctcaagtccaccatgagattgtggaggtccctctgctggcgggagtagctagacgcctgttctcga

SEQ ID NO: 5474 - DNA, 121 bp, synthetic construct
  misc_feature 1..121: note = Description of artificial sequence: synthetic polynucleotide sequence
  source 1..121: mol_type = other DNA
caaggtgaggcaggcttaccagtgcgcgcagtcacctctgcagagggcccttctccagctggccctaggacactcagcctcacgcggtactgtgtcgctggctccagcccgtccaggtgat

SEQ ID NO: 5475 - DNA, 121 bp, synthetic construct
  misc_feature 1..121: note = Description of artificial sequence: synthetic polynucleotide sequence
  source 1..121: mol_type = other DNA
gaagcatcatcaccatgttgtcgtgtgcccatcttgaggtcaaggacacaaggcacctcgtagcgggaagtcaggttttccagtaagataaattctgagtagttaagaataatacccccaa

SEQ ID NO: 5476 - DNA, 121 bp, synthetic construct
  misc_feature 1..121: note = Description of artificial sequence: synthetic polynucleotide sequence
  source 1..121: mol_type = other DNA
ctggtctcatcctctgcttcctttgcctttaccctatacctctctgcacgtcccaccccattttgctgtgtgctcacccccaggatgtgtacccggttgtagtaggagctgaaatccatgc

SEQ ID NO: 5477 - DNA, 121 bp, synthetic construct
  misc_feature 1..121: note = Description of artificial sequence: synthetic polynucleotide sequence
  source 1..121: mol_type = other DNA
aggatatttgtctatttgatacacttttttttgctaaatttcaggaacaagaagtcatccaactggaataataatcaaaatgattattccagtctcagtgattcccagttcctctttggat

SEQ ID NO: 5478 - DNA, 175 bp, synthetic construct
  misc_feature 1..175: note = Description of artificial sequence: synthetic polynucleotide sequence
  source 1..175: mol_type = other DNA
ttcacaagacaaggcacccagattttttcttcccacgtctagcttgcagagcagctctcgtagccatttcaaaaacctctctcactccatctttggtctttgctgaacactccatgtacccaaaagcgccaatcctgtttgccatatctctgccttcttcaggtttcaccggctc

SEQ ID NO: 5479 - DNA, 121 bp, synthetic construct
  misc_feature 1..121: note = Description of artificial sequence: synthetic polynucleotide sequence
  source 1..121: mol_type = other DNA
tcatcttggctagctcccgccttgtgtgctcatcattccgaagatccttcttattcccaaccaggatgatgggcacgttgggacagaaatgcttgacttctggggtccacttttctgggat

SEQ ID NO: 5480 - DNA, 121 bp, synthetic construct
  misc_feature 1..121: note = Description of artificial sequence: synthetic polynucleotide sequence
  source 1..121: mol_type = other DNA
ctaaactatcagggctgtcgatggaaaaacacatcagtataacatcggtatctgggtaggagaggggcctcaggcgatcataatcttcctgcccagctgtgtcccacaaagccaactctac

SEQ ID NO: 5481 - DNA, 157 bp, synthetic construct
  misc_feature 1..157: note = Description of artificial sequence: synthetic polynucleotide sequence
  source 1..157: mol_type = other DNA
cctgctttccatccacctcgatatctgccacatagttctcaaacactgtgggcacatacacctctgggaactggtccttgctgaagactatgagcaagcatgtctttccacaggctccatcaccaacaatcaccagtttcttccggatggcagccat

SEQ ID NO: 5482 - DNA, 121 bp, synthetic construct
  misc_feature 1..121: note = Description of artificial sequence: synthetic polynucleotide sequence
  source 1..121: mol_type = other DNA
cccacagaagtgcctgacagggaccctgagaagagcagtgaggatgatgtctacctgcacacagtcattccggccgtggtggtcgcagccatcctgctcattgctggcatcattgccatga

SEQ ID NO: 5483 - DNA, 121 bp, synthetic construct
  misc_feature 1..121: note = Description of artificial sequence: synthetic polynucleotide sequence
  source 1..121: mol_type = other DNA
tgtggcttcgggtaccgctatacacggctgccacatctgctgaaaaccaaacttgaggacgccaatttgcccagcctccagagtgagtatctgggttgggcgagtcctgggcaaggcaggc

SEQ ID NO: 5484 - DNA, 121 bp, synthetic construct
  misc_feature 1..121: note = Description of artificial sequence: synthetic polynucleotide sequence
  source 1..121: mol_type = other DNA
gccaccataacacccatagtgctggaaagtgcctcctcagacccatagcgggagtacacaggcttccctgcctcactcagcacaaagacatgcttctggtgcaggcgccatgcctccgtgg

SEQ ID NO: 5485 - DNA, 121 bp, synthetic construct
  misc_feature 1..121: note = Description of artificial sequence: synthetic polynucleotide sequence
  source 1..121: mol_type = other DNA
gaagcgcgagaaggagggagcgtctcatgacggagggtgtgaagacgctaggctggacgaagcagaaaggcgggtgtcactggggacgttctgagggtaagccgatggcggctatcgcgga

SEQ ID NO: 5486 - DNA, 121 bp, synthetic construct
  misc_feature 1..121: note = Description of artificial sequence: synthetic polynucleotide sequence
  source 1..121: mol_type = other DNA
ggatgggctgcaccgtgagcgccgaggacaaggcggcggccgagcgctctaagatgatcgacaagaacctgcgggaggacggagagaaggcggcgcgggaggtgaagttgctgctgttggg

SEQ ID NO: 5487 - DNA, 121 bp, synthetic construct
  misc_feature 1..121: note = Description of artificial sequence: synthetic polynucleotide sequence
  source 1..121: mol_type = other DNA
cagaagctttccttcaaatgagatgaccacagcagtcttctctgcaggttgcaggaaatgagaggtttggggaaatctgtactctttcaaagggtagataaatagtgataacttttacctg

SEQ ID NO: 5488 - DNA, 121 bp, synthetic construct
  misc_feature 1..121: note = Description of artificial sequence: synthetic polynucleotide sequence
  source 1..121: mol_type = other DNA
gagaagaagggctgctaccctgttggatggagtatgcagggcatcttcctgccagctctgcccagggcaccatattggcatgcaccagctgcacaggttggcgagcctatgtatgtgagaa

SEQ ID NO: 5489 - DNA, 121 bp, synthetic construct
  misc_feature 1..121: note = Description of artificial sequence: synthetic polynucleotide sequence
  source 1..121: mol_type = other DNA
ctgggcctgccccctgaccacctgtgccctctgttccaggtgctggggagtcagggaagagcaccatcgtcaagcagatgaagtaagtgctgtattccagaggcagtgctcaaactccagc

SEQ ID NO: 5490 - DNA, 143 bp, synthetic construct
  misc_feature 1..143: note = Description of artificial sequence: synthetic polynucleotide sequence
  source 1..143: mol_type = other DNA
ggatcatccacgaggatggctactccgaggaggaatgccggcagtaccgggcggttgtctacagcaacaccatccagtccatcatggccattgtcaaagccatgggcaacctgcagatcgactttgccgacccctccagagcg

SEQ ID NO: 5491 - DNA, 162 bp, synthetic construct
  misc_feature 1..162: note = Description of artificial sequence: synthetic polynucleotide sequence
  source 1..162: mol_type = other DNA
ggacgacgccaggcagctatttgcactgtcctgcaccgccgaggagcaaggcgtgctccctgatgacctgtccggcgtcatccggaggctctgggctgaccatggtgtgcaggcctgctttggccgctcaagggaataccagctcaacgactcagctgccta

SEQ ID NO: 5492 - DNA, 121 bp, synthetic construct
  misc_feature 1..121: note = Description of artificial sequence: synthetic polynucleotide sequence
  source 1..121: mol_type = other DNA
ctgaacgacctggagcgtattgcacagagtgactacatccccacacagcaagatgtgctacggacccgcgtaaagaccacggggatcgtggagacacacttcaccttcaaggacctacact

SEQ ID NO: 5493 - DNA, 121 bp, synthetic construct
  misc_feature 1..121: note = Description of artificial sequence: synthetic polynucleotide sequence
  source 1..121: mol_type = other DNA
tttgatgtgggtggtcagcggtctgagcggaagaagtggatccactgctttgagggcgtcacagccatcatcttctgcgtagccttgagcgcctatgacttggtgctagctgaggacgagg

SEQ ID NO: 5494 - DNA, 155 bp, synthetic construct
  misc_feature 1..155: note = Description of artificial sequence: synthetic polynucleotide sequence
  source 1..155: mol_type = other DNA
gaaccgcatgcatgagagcatgaagctattcgatagcatctgcaacaacaagtggttcacagacacgtccatcatcctcttcctcaacaagaaggacctgtttgaggagaagatcacacacagtcccctgaccatctgcttccctgagtacacag

SEQ ID NO: 5495 - DNA, 192 bp, synthetic construct
  misc_feature 1..192: note = Description of artificial sequence: synthetic polynucleotide sequence
  source 1..192: mol_type = other DNA
ggggccaacaaatatgatgaggcagccagctacatccagagtaagtttgaggacctgaataagcgcaaagacaccaaggagatctacacgcacttcacgtgcgccaccgacaccaagaacgtgcagttcgtgtttgacgccgtcaccgatgtcatcatcaagaacaacctgaaggactgcggcctcttctga

SEQ ID NO: 5496 - DNA, 121 bp, synthetic construct
  misc_feature 1..121: note = Description of artificial sequence: synthetic polynucleotide sequence
  source 1..121: mol_type = other DNA
cccagcaagatggtgctggcatgaagtctgtgcagggcccccagctgaggctctggttctgttccctttgcaggtcattactccctacactttgacgccttccaccaccctctgggtgata

SEQ ID NO: 5497 - DNA, 121 bp, synthetic construct
  misc_feature 1..121: note = Description of artificial sequence: synthetic polynucleotide sequence
  source 1..121: mol_type = other DNA
cagccctccctgcccggaccctgcgcaaggtaatgtactgaagcggcagccccaccaggctgtgagatgagtcatctcgtctgctctagaaccacccttggggtctacaggaggaactgga

SEQ ID NO: 5498 - DNA, 121 bp, synthetic construct
  misc_feature 1..121: note = Description of artificial sequence: synthetic polynucleotide sequence
  source 1..121: mol_type = other DNA
ccatatttactgtgctctccagcttagggcaaactggtagccgggaagtcatccagctcaatttcagcttgcctcctcctgatttcctggatgtctggtttttaaaaagttaatagcaaac

SEQ ID NO: 5499 - DNA, 121 bp, synthetic construct
  misc_feature 1..121: note = Description of artificial sequence: synthetic polynucleotide sequence
  source 1..121: mol_type = other DNA
tcaacttttaattaagtttctgatttgatatatccatgccagtcagtattcagctgcctttatcttgcttcattttccccgaagaatggactttgtttggttcttttggggaggcatagtt

SEQ ID NO: 5500 - DNA, 121 bp, synthetic construct
  misc_feature 1..121: note = Description of artificial sequence: synthetic polynucleotide sequence
  source 1..121: mol_type = other DNA
atgccttttttaaaacatcaacttccctctgtgctctccaccctgccctttattgctgcctttttaaaaacaacctcatccccagatgttttgccaaaggtagttgtggagtaggtgctta

SEQ ID NO: 5501 - DNA, 121 bp, synthetic construct
  misc_feature 1..121: note = Description of artificial sequence: synthetic polynucleotide sequence
  source 1..121: mol_type = other DNA
gtgggaagaacaaggaccagctgggactaaaggtagtgttagcaaaagaagaaaagcaggcacatttaaatgcattgggatcaactttccccaactctgtttccccatatcctgattcccc

SEQ ID NO: 5502 - DNA, 121 bp, synthetic construct
  misc_feature 1..121: note = Description of artificial sequence: synthetic polynucleotide sequence
  source 1..121: mol_type = other DNA
attagtcataaaacttcagagctgtgaaaaaccatcaccatctttacaatgacacaatgatccacgatttaccaaggaatttcatgtgacctagtcccacccgctcacttcagagatgagg

SEQ ID NO: 5503 - DNA, 121 bp, synthetic construct
  misc_feature 1..121: note = Description of artificial sequence: synthetic polynucleotide sequence
  source 1..121: mol_type = other DNA
tcactttaaaaagccatcatccccttttgtttcctgaagggaaggactacttgctcacaatgcttctgtttctgggtccccatcagccgtggctacattcaagtttatcataaggcatttt

SEQ ID NO: 5504 - DNA, 121 bp, synthetic construct
  misc_feature 1..121: note = Description of artificial sequence: synthetic polynucleotide sequence
  source 1..121: mol_type = other DNA
ctggtttgtgaacacacggcttagtaagcaacagctgggtagatacagaggtactgaaaaaggcatggggtgagacacactgaatatgctgaggattcagaagagggggcatcctcttcca

SEQ ID NO: 5505 - DNA, 121 bp, synthetic construct
  misc_feature 1..121: note = Description of artificial sequence: synthetic polynucleotide sequence
  source 1..121: mol_type = other DNA
cccatagaaaccatgactcagtctgaagtagcacactctaatagaacttcctgtgataatagaactgttccagatctgttctgtccaatatggtggccactaaccacatatatttactgag

SEQ ID NO: 5506 - DNA, 121 bp, synthetic construct
  misc_feature 1..121: note = Description of artificial sequence: synthetic polynucleotide sequence
  source 1..121: mol_type = other DNA
cgcaaccaggatacccagagctgccccaacttctattatttctgaggcctgtttgtgcttagctttcaaatttcagtctatgacctgcttcccatagctttccaatcttgtgtactattac

SEQ ID NO: 5507 - DNA, 121 bp, synthetic construct
  misc_feature 1..121: note = Description of artificial sequence: synthetic polynucleotide sequence
  source 1..121: mol_type = other DNA
tagacacaatgctctgcatcttgcttttttttcacttcatgtgttttgtagattgttccataactatacacagaacctccacatcctatctgatgacttcacagtattccattatgcagat

SEQ ID NO: 5508 - DNA, 121 bp, synthetic construct
  misc_feature 1..121: note = Description of artificial sequence: synthetic polynucleotide sequence
  source 1..121: mol_type = other DNA
ctctctgatcaggtgatacttgagcagacatctgaacacagagggactgagccttgtggctatgtgaggtaagcattgcaggtagagggaagcgggggagataatagcacttggaaaggtt

SEQ ID NO: 5509 - DNA, 121 bp, synthetic construct
  misc_feature 1..121: note = Description of artificial sequence: synthetic polynucleotide sequence
  source 1..121: mol_type = other DNA
ggtacttttagctctacctttagctccactggacacaggatgctatcactgtgggtagaataagttctaagtggttcctgctcctttgtttcaactattccacacttttcatctcagaagg

SEQ ID NO: 5510 - DNA, 121 bp, synthetic construct
  misc_feature 1..121: note = Description of artificial sequence: synthetic polynucleotide sequence
  source 1..121: mol_type = other DNA
aattcttggaaagcataaagaccttgaacagggccatgaaaacttcttttcctgctcttggtctccaatctctgtctcagccagcctgtgcccttcgtctggcttcctgaggcaacgtggg

SEQ ID NO: 5511 - DNA, 121 bp, synthetic construct
  misc_feature 1..121: note = Description of artificial sequence: synthetic polynucleotide sequence
  source 1..121: mol_type = other DNA
caaagtagacagtatatctcttttgcacagataacaggagaaggagacagatcaggacaggacctttaattctttgcttctcaaaggtgatgtcagagaccagcagccatgaaattatctg

SEQ ID NO: 5512 - DNA, 121 bp, synthetic construct
  misc_feature 1..121: note = Description of artificial sequence: synthetic polynucleotide sequence
  source 1..121: mol_type = other DNA
gcaacaactcctgggctcaagagatcctccggcctcagcatcccaaaataacctactcttgaaagtgctattccatcactttagccacattgtattcattacagaaaatcattaggtccaa

SEQ ID NO: 5513 - DNA, 121 bp, synthetic construct
  misc_feature 1..121: note = Description of artificial sequence: synthetic polynucleotide sequence
  source 1..121: mol_type = other DNA
aaacattcattgttttctaaatgtccttgttatgccagccaaaaataagtatccactcagagcaacccactcagaaaaagttttcacttcaattctttttccaaatgttcaaaggggggat

SEQ ID NO: 5514 - DNA, 121 bp, synthetic construct
  misc_feature 1..121: note = Description of artificial sequence: synthetic polynucleotide sequence
  source 1..121: mol_type = other DNA
agatatcattgcaatgaaaaggtttatgtagtcttttatattactcttctgttacttccttacaaccctctgaaatatagcagaccaactcaaccacctgtagaaatctcttgaatagaag

SEQ ID NO: 5515 - DNA, 121 bp, synthetic construct
  misc_feature 1..121: note = Description of artificial sequence: synthetic polynucleotide sequence
  source 1..121: mol_type = other DNA
aaatcatagccaaacctgaaaacattagacataagctttttacaccaaagggattcaagtgtgaattgtcttcatccttctatctttcctgtagacagacaccctagtaatttttctacta

SEQ ID NO: 5516 - DNA, 121 bp, synthetic construct
  misc_feature 1..121: note = Description of artificial sequence: synthetic polynucleotide sequence
  source 1..121: mol_type = other DNA
ctcagaggccctgcatgtttactgatacccaacaagcttcctgtgctcattgagtgacacacatatctccaatatgagcgctttttccctaatgcaactctaaaaagagtgtggtcaagca

SEQ ID NO: 5517 - DNA, 121 bp, synthetic construct
  misc_feature 1..121: note = Description of artificial sequence: synthetic polynucleotide sequence
  source 1..121: mol_type = other DNA
ataaagactgcagatgaaaattataggtgtcatattaaaaacacaatagaagcagtgcctttcctgagtcactgaagaaaaccaagatcacagaagagagagataggcttaagagcttctt

SEQ ID NO: 5518 - DNA, 121 bp, synthetic construct
  misc_feature 1..121: note = Description of artificial sequence: synthetic polynucleotide sequence
  source 1..121: mol_type = other DNA
ttaatttacattagtacaagtgggaaacctcctgggttatagttgagtcctgagggttatgataaggggagatgagaatcctggaggactaagagtgtaatgtgatgactgggcattggag

SEQ ID NO: 5519 - DNA, 121 bp, synthetic construct
  misc_feature 1..121: note = Description of artificial sequence: synthetic polynucleotide sequence
  source 1..121: mol_type = other DNA
tacattgaattaataaaatatcaagaatgagcattctgattccagtgctccattccatattctcctggtgtccttgtagcctgcctgcaagaggagttgacaggatggaaatggtggagtg

SEQ ID NO: 5520 - DNA, 121 bp, synthetic construct
  misc_feature 1..121: note = Description of artificial sequence: synthetic polynucleotide sequence
  source 1..121: mol_type = other DNA
tttcagtgcccatgagtatagttttattggaacacaagccacccccatttgtctacatattgtggcttccatagtacaaaggcagaactcagtagctatgagaccatatggcccacaaagg

SEQ ID NO: 5521 - DNA, 121 bp, synthetic construct
  misc_feature 1..121: note = Description of artificial sequence: synthetic polynucleotide sequence
  source 1..121: mol_type = other DNA
ttgaaacaatgggaactgctcctgttgccatggaaacaagcctttccatctgagtggtttcatcccagtattcacaatctaaagctttgcaaaggtatgctagacttaactcccctactgg

SEQ ID NO: 5522 - DNA, 121 bp, synthetic construct
  misc_feature 1..121: note = Description of artificial sequence: synthetic polynucleotide sequence
  source 1..121: mol_type = other DNA
aatttattgatggatatttgtgatcttggcctaattttcattaaatttcagaagtctgcgttgtagctatgatttcacaattggctaaaaagcctttcctcctctaagtttggattgttgg

SEQ ID NO: 5523 - DNA, 121 bp, synthetic construct
  misc_feature 1..121: note = Description of artificial sequence: synthetic polynucleotide sequence
  source 1..121: mol_type = other DNA
atccagtttaacagttttatcacttcctggtgctcaaatatgttcctattaaattacataatattcaacgtggctgatgcagatgagtaattggtagaagtaaggggaatagtaggcttct

SEQ ID NO: 5524 - DNA, 121 bp, synthetic construct
  misc_feature 1..121: note = Description of artificial sequence: synthetic polynucleotide sequence
  source 1..121: mol_type = other DNA
gcattgacatcatttttaacaaggcacttgttagcatgcttctcaaagttctagaatccgttgacttgctacaggttttcttctcctctatccttagattgcaatccctagaggctgtcac

SEQ ID NO: 5525 - DNA, 121 bp, synthetic construct
  misc_feature 1..121: note = Description of artificial sequence: synthetic polynucleotide sequence
  source 1..121: mol_type = other DNA
tagtattccatggtgtatatgtgccacattttcttaatcaagtctatcattttattaagttttcctgccctgctcttggtcccagagctcttccataagtccctatttatccatttcttct

SEQ ID NO: 5526 - DNA, 121 bp, synthetic construct
  misc_feature 1..121: note = Description of artificial sequence: synthetic polynucleotide sequence
  source 1..121: mol_type = other DNA
gtaattaaagaaaaatggtgcatgatgcatttatagttaagtaaaatgaatataaatcttgcacaacagctggattcctatacttggcaacacggcacagttagagaaaagcaatcatctt

SEQ ID NO: 5527 - DNA, 121 bp, synthetic construct
  misc_feature 1..121: note = Description of artificial sequence: synthetic polynucleotide sequence
  source 1..121: mol_type = other DNA
gagcatcagatcaaaactgggactccagtcttgcaaagatgggggtgtgacatgcaagcgtaactcattcttcaaaagcccattctattgcccaatcatacccacagcttgcaggttgttt

SEQ ID NO: 5528 - DNA, 121 bp, synthetic construct
  misc_feature 1..121: note = Description of artificial sequence: synthetic polynucleotide sequence
  source 1..121: mol_type = other DNA
tcttgagagaactccaggtttctatattattgttgtgacctatttgagccctatgaaaagtcctgtggcattgcaatggttttttttttttaatctaaagttatagttgcttcttgttgtt

SEQ ID NO: 5529 - DNA, 121 bp, synthetic construct
  misc_feature 1..121: note = Description of artificial sequence: synthetic polynucleotide sequence
  source 1..121: mol_type = other DNA
gcctctgcttcctggcctgcctgagaggttttggaatgacttgaagcagccaaaattcctagtcccttggctatatgattatgatgacaaaggggagagattaagatatccaagctatagg

SEQ ID NO: 5530 - DNA, 121 bp, synthetic construct
  misc_feature 1..121: note = Description of artificial sequence: synthetic polynucleotide sequence
  source 1..121: mol_type = other DNA
aagaagttatggtgtctcatgtactgaagcatttgttgcatcctctggtcaaagtatttcatctctgggtaccagtctctaatcccacaaactccaatattggatagatgagaacctaaaa

SEQ ID NO: 5531 - DNA, 121 bp, synthetic construct
  misc_feature 1..121: note = Description of artificial sequence: synthetic polynucleotide sequence
  source 1..121: mol_type = other DNA
aacacagagtatgtaaccacttgctcactcaactctggcacactagttctattttaactcatcacggttagacatggggagtccattttgtacatcaaacatgcacattttaacagtgcca

SEQ ID NO: 5532 - DNA, 121 bp, synthetic construct
  misc_feature 1..121: note = Description of artificial sequence: synthetic polynucleotide sequence
  source 1..121: mol_type = other DNA
gaatttcaaatgtgagataaatgggatcacaactccaggacatcaattctgggcccctagtcaataggatctgtgcagaggaggtagtgaggatctgggatactttcaagatatctaatta

SEQ ID NO: 5533 - DNA, 121 bp, synthetic construct
  misc_feature 1..121: note = Description of artificial sequence: synthetic polynucleotide sequence
  source 1..121: mol_type = other DNA
tccttacagtgaatgcacccaggcaagctgcctccagatgaagaaataggacaatacaggccctccagaagggtaccatgtgttcccacccagtcactattactactcacatgtaaccact

SEQ ID NO: 5534 - DNA, 121 bp, synthetic construct
  misc_feature 1..121: note = Description of artificial sequence: synthetic polynucleotide sequence
  source 1..121: mol_type = other DNA
tgccaacagcatgttcaatggtaggtgacttttcctatctccatggtgtaccctttcacaagtgtgtaacaacctaaatgtccagaaattcacctctgaagctaagtggcagtttttgttt

SEQ ID NO: 5535 - DNA, 121 bp, synthetic construct
  misc_feature 1..121: note = Description of artificial sequence: synthetic polynucleotide sequence
  source 1..121: mol_type = other DNA
ctcaagtcatctgttggttactgcaacacatatgtactgtttaagggagattgtttcacggaaaggattggcttatatacagtctcgacaagcgctgaattctgtagttaaaattacatcc

SEQ ID NO: 5536 - DNA, 121 bp, synthetic construct
  misc_feature 1..121: note = Description of artificial sequence: synthetic polynucleotide sequence
  source 1..121: mol_type = other DNA
acatcctgaactcattaccttcaagtatggaaatagcagtgcttcaggaatagaaatcttggcaatcgaaaggtaagattttccttaagataatattatctgaattcagatattatctgaa

SEQ ID NO: 5537 - DNA, 121 bp, synthetic construct
  misc_feature 1..121: note = Description of artificial sequence: synthetic polynucleotide sequence
  source 1..121: mol_type = other DNA
aaaagcagcaactcttcttaactatatagcatccacagtaagtaaagcaatgaaactgaataagtcaattctagaaaaccttggtaagcaaaaattttccaaatctgaaatcttggcaggc

SEQ ID NO: 5538 - DNA, 121 bp, synthetic construct
  misc_feature 1..121: note = Description of artificial sequence: synthetic polynucleotide sequence
  source 1..121: mol_type = other DNA
gcttatcaagatgttccaaatgcacaaaaacaagggagttaagatacttaaaatcacagaaagttagagactgaaagaatcttagagtccactgaattcaaaccttctattttaaacatgt

SEQ ID NO: 5539 - DNA, 290 bp, synthetic construct
  misc_feature 1..290: note = Description of artificial sequence: synthetic polynucleotide sequence
  source 1..290: mol_type = other DNA
catgattgtggacaagctgctggacgacagccgcggcggagaggggctgcgggacgcggcgggcggctgcggcctcatgaccagcccgctcaacctgagctacttctacggcgcgtcgccgcccgccgccgccccgggcgcctgcgacgccagctgctcggtcttgggcccctcggcgcccggctcgcccggctccgactcctccgacttctcctctgcctcgtcggtgtcctcctgcggcgccgtggagtcccggtcgagaggcggcgcccgcgccgagcgccagccag

SEQ ID NO: 5540 - DNA, 141 bp, synthetic construct
  misc_feature 1..141: note = Description of artificial sequence: synthetic polynucleotide sequence
  source 1..141: mol_type = other DNA
gttgagccccatatgggggttggcaggcagcagagaggcccctttcaaggtgttcgggtaaagaactcagtgaaggaactcctgttgcacatccgaagtcataaacagaaggcttctggccaagctgtggatgattttaag

SEQ ID NO: 5541 - DNA, 121 bp, synthetic construct
  misc_feature 1..121: note = Description of artificial sequence: synthetic polynucleotide sequence
  source 1..121: mol_type = other DNA
gaagtcattttgtatacactaaattggaaacttttttctttatagacacaaggtgtgaacatagaacagttcagaggtaagagttacttgtatttgtaattttttcagggctttggagtaa

SEQ ID NO: 5542 - DNA, 121 bp, synthetic construct
  misc_feature 1..121: note = Description of artificial sequence: synthetic polynucleotide sequence
  source 1..121: mol_type = other DNA
tgggtacagaattgaagaacacagtatcatacagtgggaaaaggaaagggcccgattcgttgtctgatggacctgcttgcaaaaggccagctctgttgcattcccaatttttggtaagtat

SEQ ID NO: 5543 - DNA, 327 bp, synthetic construct
  misc_feature 1..327: note = Description of artificial sequence: synthetic polynucleotide sequence
  source 1..327: mol_type = other DNA
gacaccacctcaaacaccaacgcccggggagagcatggaagatgttcatctcaatgaacccaaacaggagagcagtgctgatctgcttcagaacattatcaacattaagaatgaatgcagccccgtttccctgaacacagttcaagttagctggctgaaccccgtggtggtccctcagagctcccccgcagagcagtgtcaggacttccatggagggcaggtcttttctccacctcagaaatgccaaccattccaagtcaggggctcccaacaaatgatagaccaggcttccctgtaccagtattctccacagaaccagcatgtaga

SEQ ID NO: 5544 - DNA, 447 bp, synthetic construct
  misc_feature 1..447: note = Description of artificial sequence: synthetic polynucleotide sequence
  source 1..447: mol_type = other DNA
gcagcagccacactacacccacaaaccaactctggaatacagtccttttcccatacctccccagtcccccgcttatgaaccaaacctctttgatggtccagaatcacagttttgcccaaaccaaagcttagtttcccttcttggtgatcaaagggaatctgagaatattgctaatcccatgcagacttcctccagtgttcagcagcaaaatgatgctcacttgcacagcttcagcatgatgcccagcagcgcctgtgaggccatggtggggcacgagatggcctctgactcttcaaacacttcactgccattctcaaacatgggaaatccaatgaacaccacacagttagggaaatcactttttcagtggcaggtggagcaggaagaaagcaaattggcaaatatttcccaagaccagtttctttcaaaggatgcagatggtgacac

SEQ ID NO: 5545 - DNA, 121 bp, synthetic construct
  misc_feature 1..121: note = Description of artificial sequence: synthetic polynucleotide sequence
  source 1..121: mol_type = other DNA
ttccccaggttccttcatattgctgttgcccaagggagaagggcactttcctatgttcttgcaagaaagatgaatgcacttcacatgctggatattaaagagcacaatggacaggtgagga

SEQ ID NO: 5546 - DNA, 148 bp, synthetic construct
  misc_feature 1..148: note = Description of artificial sequence: synthetic polynucleotide sequence
  source 1..148: mol_type = other DNA
gagtgcctttcaggtggcagtggctgccaatcagcatctcattgtgcaggatctggtgaacatcggggcacaggtgaacaccacagactgctggggaagaacacctctgcatgtgtgtgctgagaagggccactcccaggtgcttcag

SEQ ID NO: 5547 - DNA, 121 bp, synthetic construct
  misc_feature 1..121: note = Description of artificial sequence: synthetic polynucleotide sequence
  source 1..121: mol_type = other DNA
taacagatgtctgtttttaaaatctgcaggcgattcagaagggagcagtgggaagtaatcagtttgtggatcttgaggcaactaactatgatggtaagcaactgaaactttattagattca

SEQ ID NO: 5548 - DNA, 171 bp, synthetic construct
  misc_feature 1..171: note = Description of artificial sequence: synthetic polynucleotide sequence
  source 1..171: mol_type = other DNA
ggcctgactccccttcactgtgcagtcatagcccacaatgctgtggtccatgaactccagagaaatcaacagcctcattcacctgaagttcaggagcttttactgaagaataagagtctggttgataccattaagtgcctaattcaaatgggagcagcggtggaagcgaag

SEQ ID NO: 5549 - DNA, 121 bp, synthetic construct
  misc_feature 1..121: note = Description of artificial sequence: synthetic polynucleotide sequence
  source 1..121: mol_type = other DNA
acaaggatcgcaaaagtggccgcacagccctgcatttggcagctgaagaagcaaatctggaactcattcgcctctttttggagctgcccagttgcctgtcttttgtgaatgcaaaggtaca

SEQ ID NO: 5550 - DNA, 169 bp, synthetic construct
  misc_feature 1..169: note = Description of artificial sequence: synthetic polynucleotide sequence
  source 1..169: mol_type = other DNA
ggcttacaatggcaacactgccctccatgttgctgccagcttgcagtatcggttgacacaattagatgctgtccgcctgttgatgaggaagggagcagacccaagtactcggaacttggagaacgaacagccagtgcatttggttcccgatggccctgtgggagaacag

SEQ ID NO: 5551 - DNA, 453 bp, synthetic construct
  misc_feature 1..453: note = Description of artificial sequence: synthetic polynucleotide sequence
  source 1..453: mol_type = other DNA
gatccgacgtatcctgaagggaaagtccattcagcagagagctccaccgtattagctccattagcttggagcctggctagcaacactcactgtcagttaggcagtcctgatgtatctgtacatagaccatttgccttatattggcaaatgtaagttgtttctatgaaacaaacatatttagttcactattatatagtgggttatattaaaagaaaagaagaaaaatatctaatttctcttggcagatttgcatatttcatacccaggtatctgggatctagacatctgaatttgatctcaatggtaacattgccttcaattaacagtagcttttgagtaggaaaggactttgatttgtggcacaaaacattattaatatagctattgacagtttcaaagcaggtaaattgtaaatgtttctttaagaaaaagcatgtgaaaggaaaaaggtaa

SEQ ID NO: 5552 - DNA, 461 bp, synthetic construct
  misc_feature 1..461: note = Description of artificial sequence: synthetic polynucleotide sequence
  source 1..461: mol_type = other DNA
atacagcattgaggcttcatttggccttagtccctgggagttactggcgttggacaggcttcagtcattggactagatgaaaggtgtccatggttagaatttgatctttgcaaactgtatataattgttatttttgtccttaaaaatattgtacatacttggttgttaacatggtcatatttgaaatgtataagtccataaaatagaaaagaacaagtgaattgttgctatttaaaaaaattttacaattcttactaaggagtttttattgtgtaatcactaagtctttgtagataaagcagatggggagttacggagttgttcctttactggctgaaagatatattcgaattgtaaagatgctttttctcatgcattgaaattatacattatttgtagggaattgcatgcttttttttttttttctcccgagacagggtcttgctctggcgcccaggctg

SEQ ID NO: 5553 - DNA, 226 bp, synthetic construct
  misc_feature 1..226: note = Description of artificial sequence: synthetic polynucleotide sequence
  source 1..226: mol_type = other DNA
tacaggagtgagccaccatgcccggctggcagttgcatggaagagaacacctctttatggcttaccctctagaatttctaatttatgtgttctgttgaaatttttgtttttttacctttattgaaacaacaaaaagtcagtattgaaacatatcttcctgttttctgttgtcaaatgatgataatgtgccatgatgttttatatatatcattcagaaaaagtttta

SEQ ID NO: 5554 - DNA, 347 bp, synthetic construct
  misc_feature 1..347: note = Description of artificial sequence: synthetic polynucleotide sequence
  source 1..347: mol_type = other DNA
ttttttaataacattctattaacattattttgcttgccgctggcatgcctgaggaatgtatttggctttgattacacactaagtttttgtaataaatttgactcattaaaaaccttttttttttaaaaaaaaaaaaaaagaaaatctcattagtgaacttatctttgcagctgagtacttaaattctttttaaaaagataccctttggattgatcacattgtttgacccagtatgtcttgtagacacgttagttataatcaccttgtatctctaaatatggtgtgatatgaaccagtccattcacattggaaaaactgatggttttaaataaactaattcactaata

SEQ ID NO: 5555 - DNA, 121 bp, synthetic construct
  misc_feature 1..121: note = Description of artificial sequence: synthetic polynucleotide sequence
  source 1..121: mol_type = other DNA
ccatcatgaaatataaattctaatttccaaattacattctcaccacttcaacggctatatcatcctagttcaagcctacattatctcaaattatagccatttcttcctaagtagtttccat

SEQ ID NO: 5556 - DNA, 121 bp, synthetic construct
  misc_feature 1..121: note = Description of artificial sequence: synthetic polynucleotide sequence
  source 1..121: mol_type = other DNA
tgcactgatacaggcacagttcattgccacaggggagcagagaagaggctgagaccatatttgcattagaggaatgggttgtttatcatcacagaaggagcaggaatgctgggaaagtctc

SEQ ID NO: 5557 - DNA, 121 bp, synthetic construct
  misc_feature 1..121: note = Description of artificial sequence: synthetic polynucleotide sequence
  source 1..121: mol_type = other DNA
aaaatagtcaccaaatgtggcacatttactaaacaggcagaaactcttttaatgcagtccgaagttggtttgcttttctgagaacaaccatggtgacgttttgcctggccttattttgcat

SEQ ID NO: 5558 - DNA, 121 bp, synthetic construct
  misc_feature 1..121: note = Description of artificial sequence: synthetic polynucleotide sequence
  source 1..121: mol_type = other DNA
gaggaacctctaacactattttctaagggacaaggcccaagtgaaattctgatctaccaagacttgctaattattaaagtaaagctgaaacaccacacacagaaagagttgctttataaga

SEQ ID NO: 5559 - DNA, 121 bp, synthetic construct
  misc_feature 1..121: note = Description of artificial sequence: synthetic polynucleotide sequence
  source 1..121: mol_type = other DNA
atatggaaaccaaaaacaaaacaaaacaaaaaacaaacagagaaatccatgcagtgacccatggagagttgacacatgtgctgatgctctatatccatcaaaatgattgaggggaactccc

SEQ ID NO: 5560 - DNA, 121 bp, synthetic construct
  misc_feature 1..121: note = Description of artificial sequence: synthetic polynucleotide sequence
  source 1..121: mol_type = other DNA
accattatgaatatccagcgccaactgaactcatgaccaactcgagacaaaacagggcttattaaaagaagggtcagaaatctaaaagacaaaacaatttttacaaagttattctttcata

SEQ ID NO: 5561 - DNA, 121 bp, synthetic construct
  misc_feature 1..121: note = Description of artificial sequence: synthetic polynucleotide sequence
  source 1..121: mol_type = other DNA
actgtttctaatgaaacaagcagacaatgtcccaacctcaggaatttaactcagtctgaaaaagaagagtagtttcaaaactgtcaagcctgctttagtgctataatttttttcactgaca

SEQ ID NO: 5562 - DNA, 121 bp, synthetic construct
  misc_feature 1..121: note = Description of artificial sequence: synthetic polynucleotide sequence
  source 1..121: mol_type = other DNA
gctgtgccactgggtgatctcagccttatcatagtgaatcttgcctctccagcctcaacggaaagtagaaaaagcacagtactggatagctttccagcataatctgatcccagggtgatcc

SEQ ID NO: 5563 - DNA, 121 bp, synthetic construct
  misc_feature 1..121: note = Description of artificial sequence: synthetic polynucleotide sequence
  source 1..121: mol_type = other DNA
gtcgttgaactgctcgatttggtcaaactttgctgggcagacggagcagacgtaagtggtcccctccgtgcaggccaccacgcctggggggccagcgcgggcacctgggggtgtgcctgca

SEQ ID NO: 5564 - DNA, 121 bp, synthetic construct
  misc_feature 1..121: note = Description of artificial sequence: synthetic polynucleotide sequence
  source 1..121: mol_type = other DNA
gtcccattgctggcactgtgcagggccacgtgtcgctccaggagggtcttgtgagagaacttctttttgcagatgtagcactcgtaggacttctctccccggtggaggcgcatgtgcacgt

SEQ ID NO: 5565 - DNA, 121 bp, synthetic construct
  misc_feature 1..121: note = Description of artificial sequence: synthetic polynucleotide sequence
  source 1..121: mol_type = other DNA
cctaacaacctctgcagccttaggtctcatcacatttgtagtttcccaaacaatgtagccagaccaggatgagcactcagtacaaagatatgtaagataaagtctgctgtctggaaaatac

SEQ ID NO: 5566 - DNA, 121 bp, synthetic construct
  misc_feature 1..121: note = Description of artificial sequence: synthetic polynucleotide sequence
  source 1..121: mol_type = other DNA
attgagctgggcgatgtgggggattcaaagatgaaacaggccatgttatggactcaagcagtttacagtgtaattgttgagacagacattaatgtaaattatatattaaaaaagagagaat

SEQ ID NO: 5567 - DNA, 121 bp, synthetic construct
  misc_feature 1..121: note = Description of artificial sequence: synthetic polynucleotide sequence
  source 1..121: mol_type = other DNA
gtggataaaatatcagaggtccaaggtggaaataaagaggaagctggctagaatgagagtccagcagtcactgtcagcatatcacccccaaaggcttcataggaccgtaatacttctgtgg

SEQ ID NO: 5568 - DNA, 121 bp, synthetic construct
  misc_feature 1..121: note = Description of artificial sequence: synthetic polynucleotide sequence
  source 1..121: mol_type = other DNA
cagcctcccagctccacaccaccctgctgcaggccacaggcagaactgagcatgtccagcaattttccactgacctggaacatattcggcatctcagaaggcagctcagtctctatgcaca

SEQ ID NO: 5569 - DNA, 121 bp, synthetic construct
  misc_feature 1..121: note = Description of artificial sequence: synthetic polynucleotide sequence
  source 1..121: mol_type = other DNA
cagtgtgcttagattcccctttccattcctaagtatggtgtcaagtgtatccactctcctttgtcacaagtatttgaatttggattttaagtctcatttctaattgtttaatgcagttaaa

SEQ ID NO: 5570 - DNA, 121 bp, synthetic construct
  misc_feature 1..121: note = Description of artificial sequence: synthetic polynucleotide sequence
  source 1..121: mol_type = other DNA
gtttaatgaatatagagaaatctgctcccgaggaaacagagagataggaatgaagattactggaaatgtttcgttaagatatgggtcagcatagcaacttgactcctaggtatatatccaa

SEQ ID NO: 5571 - DNA, 121 bp, synthetic construct
  misc_feature 1..121: note = Description of artificial sequence: synthetic polynucleotide sequence
  source 1..121: mol_type = other DNA
aaatgtaagaaattaagagttacataggatttgcgagaaacagataaatattgaagataagtaatgtgaataacaggattccctgaagaagaaaagcaaagcaaagaaacagcacaaatat

SEQ ID NO: 5572 - DNA, 121 bp, synthetic construct
  misc_feature 1..121: note = Description of artificial sequence: synthetic polynucleotide sequence
  source 1..121: mol_type = other DNA
aaagggaggaaaagaatgctaaagctgctctggagtttgaaaggtgagtaaatgattggggtcagccagcaatgtttttaaatatctattaataatatgaaattcaggtattgtggaggca

SEQ ID NO: 5573 - DNA, 121 bp, synthetic construct
  misc_feature 1..121: note = Description of artificial sequence: synthetic polynucleotide sequence
  source 1..121: mol_type = other DNA
ctgagtgagtcattgctcacctctcacttctggggggcagaagagcagtacttaggccagtgacactgagtatttgagttgccttacggcagggcttgaagagcggctaacaacaggtgca

SEQ ID NO: 5574 - DNA, 121 bp, synthetic construct
  misc_feature 1..121: note = Description of artificial sequence: synthetic polynucleotide sequence
  source 1..121: mol_type = other DNA
caagtatctccggcttgaaagttaatagagcactattatttcctaaaagaaaggagaaaatccgcatcccaaacaagtgcatccttcctcgagggcctccaaactaccacgtccaatcatc

SEQ ID NO: 5575 - DNA, 121 bp, synthetic construct
  misc_feature 1..121: note = Description of artificial sequence: synthetic polynucleotide sequence
  source 1..121: mol_type = other DNA
tgagatttgggcggggacacaaatccaaaccatatcagtcaccttctaatgaaatgctttttaatgaggtcgagagctttgcaattggtgcagagggcatacacctgggagagttttttct

SEQ ID NO: 5576 - DNA, 121 bp, synthetic construct
  misc_feature 1..121: note = Description of artificial sequence: synthetic polynucleotide sequence
  source 1..121: mol_type = other DNA
aacagaggaagtgtcataaaataaccatgaaacaacaacgtcagacccactcaacgagaacaaaggttggttaaaacccaggcaggccatgtagacatggaaaaacacaaccctctggcag

SEQ ID NO: 5577 - DNA, 121 bp, synthetic construct
  misc_feature 1..121: note = Description of artificial sequence: synthetic polynucleotide sequence
  source 1..121: mol_type = other DNA
ctgggccctcccatcacccaagccaggcctgctccctggagtccagggcacatctgggtcttactaggtctgctagcaaagggcctgggcggctcctatgcggccaacaattcagattcac

SEQ ID NO: 5578 - DNA, 121 bp, synthetic construct
  misc_feature 1..121: note = Description of artificial sequence: synthetic polynucleotide sequence
  source 1..121: mol_type = other DNA
caactcagtaaaatacttgacaaacctgagcaatgtaagttcagttttactattatactcgcccaggacgtaggtgctctctcacaatgttttcacgctgtatgtttccccctttgttctg

SEQ ID NO: 5579 - DNA, 121 bp, synthetic construct
  misc_feature 1..121: note = Description of artificial sequence: synthetic polynucleotide sequence
  source 1..121: mol_type = other DNA
taccacagaaggaacactgcccagaggatttatgggctaggctggatatgcagacatcatatttgccagattttccactggccagaacttagtcacatgacccaaatttagctgtacagga

SEQ ID NO: 5580 - DNA, 121 bp, synthetic construct
  misc_feature 1..121: note = Description of artificial sequence: synthetic polynucleotide sequence
  source 1..121: mol_type = other DNA
aagcctgagacactcacatgagtggtgaccaggctcctgtcagtgaccagaaccagcaatgaaacctttgtgatctgggacatcaggagttgggggccacacatgtcccagcaacgcccac

SEQ ID NO: 5581 - DNA, 121 bp, synthetic construct
  misc_feature 1..121: note = Description of artificial sequence: synthetic polynucleotide sequence
  source 1..121: mol_type = other DNA
atattgtgttcaaattctgtttcccacacttacaaagggactttaacaaactgtagcatcttccaagaaaagcaaaatttctggaaaccattatggatgaggtcttgttcaaagattgaat

SEQ ID NO: 5582 - DNA, 121 bp, synthetic construct
  misc_feature 1..121: note = Description of artificial sequence: synthetic polynucleotide sequence
  source 1..121: mol_type = other DNA
cctctagagctttggtctgtcagctgttctgatgccagggctctcaaactgcaaacaaacgagaacagatgagccaaagctctatacagagccaaagagtcagaggttatgaatgagttta

SEQ ID NO: 5583 - DNA, 121 bp, synthetic construct
  misc_feature 1..121: note = Description of artificial sequence: synthetic polynucleotide sequence
  source 1..121: mol_type = other DNA
ataaaatatgtttgtatttttagatgactttttccactggggactccctggtgagaaccgggcactgagcagaatgagggtgtatatgagctggaaatagagagcgagaaagagacctggc

SEQ ID NO: 5584 - DNA, 121 bp, synthetic construct
  misc_feature 1..121: note = Description of artificial sequence: synthetic polynucleotide sequence
  source 1..121: mol_type = other DNA
gtgggctggccctgtggctcaggtgtccatgcactggtgcccatcaagctgctgaatggatctcaaaaccacatatctactcctcaaaacacatgggctacacataggtaaaggcctctgc

SEQ ID NO: 5585 - DNA, 121 bp, synthetic construct
  misc_feature 1..121: note = Description of artificial sequence: synthetic polynucleotide sequence
  source 1..121: mol_type = other DNA
gttctgttcattgtgaatacgattcccagtctgaggcttgattttatgtttccttttttctgtcacgacaccacaaacctcttccgctcactatctacccctattgatggtggcaaactaa

SEQ ID NO: 5586 - DNA, 121 bp, synthetic construct
  misc_feature 1..121: note = Description of artificial sequence: synthetic polynucleotide sequence
  source 1..121: mol_type = other DNA
gcgtggaatgagatctcttgcaatgccatactcataatttgggactagtttcaattgccacaataaagtacgtctgagtaactactactgggtttattgagtaataggctaggcactgtgc

SEQ ID NO: 5587 - DNA, 121 bp, synthetic construct
  misc_feature 1..121: note = Description of artificial sequence: synthetic polynucleotide sequence
  source 1..121: mol_type = other DNA
gaccatcagaaagcctggaagagcatatccccagacagaagcatggatctaagataccaacagcatcccacactccgtttgacttttgttcacatacatttcaggtgtgtgacttcctcca

SEQ ID NO: 5588 - DNA, 175 bp, synthetic construct
  misc_feature 1..175: note = Description of artificial sequence: synthetic polynucleotide sequence
  source 1..175: mol_type = other DNA
ttcacatatatggagtccaaccaagatacatctggcatagtaagttttcatcagtagcttcctgtataaggtaatgcacatgtccttcaatagataacggcagtcctgtcactctatttcgagtcttgattacaccttgtagtcgctgctcaatgtcaagaacatgggtcttggc

SEQ ID NO: 5589 - DNA, 121 bp, synthetic construct
  misc_feature 1..121: note = Description of artificial sequence: synthetic polynucleotide sequence
  source 1..121: mol_type = other DNA
ctactaaccttttcattgacaacttctccagtttcattcagtggcgctttggaatgccctttcactggtttactccattccacaagaggatcatgtagaaaagtctttaagacactaaaat

SEQ ID NO: 5590 - DNA, 153 bp, synthetic construct
  misc_feature 1..153: note = Description of artificial sequence: synthetic polynucleotide sequence
  source 1..153: mol_type = other DNA
cctcattaaaggctctcgctgatcacgcatcagcctcattgtaacttcacatgctcttcgaaaaagaccctctgttcccataggacccattccattaaccatattatgagtcaggcgaaatggcacaatttctggaacttcaaaggtttctcc

SEQ ID NO: 5591 - DNA, 155 bp, synthetic construct
  misc_feature 1..155: note = Description of artificial sequence: synthetic polynucleotide sequence
  source 1..155: mol_type = other DNA
ccttattgaaaagacaattgaaatctacatgtacgcattcaccagtcaaagaatcaaagagaatattttcaccatgacggtctccaagccccagaatataaccaaccattgacattactgcagtggaacggcagtaagctgatctactactgtac

SEQ ID NO: 5592 - DNA, 158 bp, synthetic construct
  misc_feature 1..158: note = Description of artificial sequence: synthetic polynucleotide sequence
  source 1..158: mol_type = other DNA
ccatgatgtaggatcagggaatgttctcagaaaccactcatgaaaaataggaggatgcctgggcaggagaaattctcggaatactttgagtttttcagataaagctgctgactttggtagcatacactggcgaagttcttttcctgtcatatacactc

SEQ ID NO: 5593 - DNA, 152 bp, synthetic construct
  misc_feature 1..152: note = Description of artificial sequence: synthetic polynucleotide sequence
  source 1..152: mol_type = other DNA
cccttttctttatatagtttggtcagaataggtctcaaaccagcagtgttgttcacccattcaataatcccacattcatcatttagtggaataactgcatatgttcgaatatgaagttctcttctacgagactctgcatcttttcttaagca

SEQ ID NO: 5594 - DNA, 145 bp, synthetic construct
  misc_feature 1..145: note = Description of artificial sequence: synthetic polynucleotide sequence
  source 1..145: mol_type = other DNA
ccttattaatcaaggaattgaattccattagtctacaatcctttctcaggtcatcttttggcttacacatcatgatgtagaactttccatctgagccttttaaagaaatcttctttggtttctgaagagaagcaagaatttccac

SEQ ID NO: 5595 - DNA, 211 bp, synthetic construct
  misc_feature 1..211: note = Description of artificial sequence: synthetic polynucleotide sequence
  source 1..211: mol_type = other DNA
ccatatcatcaaaccctgcaatataggcccaatgtccaggaaatggttcatggctagcatggttagcatgggtacccagaattgatggaagtgtaggtatcatgactgattgtagaggaatgaggatttcactaaatgttgcttcttctaccagctttttaagcattttaaaatgagtgctcatgcttaatgtggaactacttccatcaac

SEQ ID NO: 5596 - DNA, 136 bp, synthetic construct
  misc_feature 1..136: note = Description of artificial sequence: synthetic polynucleotide sequence
  source 1..136: mol_type = other DNA
ccggtttattgcacaattctagaagcttatctgttaggcgagttgcatctccaacaaacttctctaaggattttttcatatgaatagctttattgaggatttccttgcatctgttcacacgcatgggataagatga

SEQ ID NO: 5597 - DNA, 234 bp, synthetic construct
  misc_feature 1..234: note = Description of artificial sequence: synthetic polynucleotide sequence
  source 1..234: mol_type = other DNA
cctttgacacagctgtcatcatccacattgcttgttgaggataggctagaaatactttggctattatttccatcaagacaacaaaaacttcatcgtgagaatgacaaattcgagagatcaattgtgaaaaagcagtcaaaaattgatatggagctaaatagtttgtatgctctgtgataaccttgtttattttacccaaatcattcctcatttgtacacgatcggagcggccag

SEQ ID NO: 5598 - DNA, 121 bp, synthetic construct
  misc_feature 1..121: note = Description of artificial sequence: synthetic polynucleotide sequence
  source 1..121: mol_type = other DNA
gaagagttatacctttttcccattcatatgcctttgtaccataatcaagccatagagttaacattcgtggcattgactgatatatgaactgatttccatattgtagagatctgcaattata

SEQ ID NO: 5599 - DNA, 144 bp, synthetic construct
  misc_feature 1..144: note = Description of artificial sequence: synthetic polynucleotide sequence
  source 1..144: mol_type = other DNA
cctgccaaaatgaagaactatataccggatgagatcaccttgcttttccattttgttgtctgtgaccatgggcatcaatttgtcatagtacttggcaaggtaaaaatgcccatcctcccattctggcaggcacgcggtcacatc

SEQ ID NO: 5600 - DNA, 181 bp, synthetic construct
  misc_feature 1..181: note = Description of artificial sequence: synthetic polynucleotide sequence
  source 1..181: mol_type = other DNA
ccttatattttttcataattgcattgctttcaaagttagctgtttcttccataaatcggcccactagtagcatagctcgaccatggattaacatgttcttaccctcaggtggggtttcattttcaggaaaacataattcaacacctttttgaagaacaattagtgcctggtgaacatcacc

SEQ ID NO: 5601 - DNA, 161 bp, synthetic construct
  misc_feature 1..161: note = Description of artificial sequence: synthetic polynucleotide sequence
  source 1..161: mol_type = other DNA
ccttggaccagagccactttgccctttccacgtacagttcagcgagtcgtgattcccctgcattaaggagagcattgtaggctgtctggtggtgaccagcctttctagctaccctggcactctgcagccagcattctccaaccatttcattgtaatctggt

SEQ ID NO: 5602 - DNA, 181 bp, synthetic construct
  misc_feature 1..181: note = Description of artificial sequence: synthetic polynucleotide sequence
  source 1..181: mol_type = other DNA
ccttttgttgaggcttagtaaagccctccggagagccaggataggctccttggctctgtaggaattctgggtcatttctagtcgagctacccagtttagagaatcttcttgagaactgtcacctggagaatgctggaaaagtggtttgatgctatgctccaactcacataacatgtgcaat

SEQ ID NO: 5603 - DNA, 179 bp, synthetic construct
  misc_feature 1..179: note = Description of artificial sequence: synthetic polynucleotide sequence
  source 1..179: mol_type = other DNA
cctcacaatatattcatatcctcgttggtaggagcctctttcaaagcttgcagctgaaagaggtacaatttgttctgctctcactagtttcagtgagtcataaaaagctgtgatatctctttttttggctgataataatagctgtcccagtctgacactccatgttgtagattttccat

SEQ ID NO: 5604 - DNA, 121 bp, synthetic construct
  misc_feature 1..121: note = Description of artificial sequence: synthetic polynucleotide sequence
  source 1..121: mol_type = other DNA
aagaagtaattttacctgctgccaaatagttttccaccaaatcccactgtgacaatttccaagctgcttccactctgtacgtgtttaattcatctgtccactcggacctattaaaagaaac

SEQ ID NO: 5605 - DNA, 121 bp, synthetic construct
  misc_feature 1..121: note = Description of artificial sequence: synthetic polynucleotide sequence
  source 1..121: mol_type = other DNA
tttataaaatattacctgttagcatgcactccattcacctgagtgataacagtagacagctgaccaagacctaacatggactttactacaccatgataatgaatgatctagaaatttaaaa

SEQ ID NO: 5606 - DNA, 166 bp, synthetic construct
  misc_feature 1..166: note = Description of artificial sequence: synthetic polynucleotide sequence
  source 1..166: mol_type = other DNA
cctggtctggttctagctgaatagccctgtcataacaagcagtggcatccctcagcaagccaaggctttcatgttcaaggatctgttcttttagagatggttctgcctttctaattgcactgactccggccactccatcaggttcatgcatagcagcatacaattt

SEQ ID NO: 5607 - DNA, 180 bp, synthetic construct
  misc_feature 1..180: note = Description of artificial sequence: synthetic polynucleotide sequence
  source 1..180: mol_type = other DNA
cctgtaaaaatccaagatgttcctgaatattttgcttcttttctgtaataaatgattcaaagtgcattacagctcgtgtgtatgctttggagcgaaaggaagctactgccagagtatcctggggtatgaggtctagaaaacgggttacactctgatagtcttcataatccacagtagata

SEQ ID NO: 5608 - DNA, 212 bp, synthetic construct
  misc_feature 1..212: note = Description of artificial sequence: synthetic polynucleotide sequence
  source 1..212: mol_type = other DNA
cccattgagtctaccttatttctgtttgatttgctgtgtggacatttctcagctttcagtgcctgaaatttgtgccttgcccactgtgtgagatggtcaagcatggagaacacagtctgtgtactgagttgacacagatcagatgcaatgtcttgggtatttatggtatgctgatcgtcatgctttagaactgccataatttctgcataaac

SEQ ID NO: 5609 - DNA, 139 bp, synthetic construct
  misc_feature 1..139: note = Description of artificial sequence: synthetic polynucleotide sequence
  source 1..139: mol_type = other DNA
cctcctgctgatcttcttgattacaacccagtaagacatacaccagaatatgtggaagaagatagatggtcactttgaaatcatgcttcatcataatgctacagcaggtgaaaattttactggcaagatcatgtcgaac

SEQ ID NO: 5610 - DNA, 121 bp, synthetic construct
  misc_feature 1..121: note = Description of artificial sequence: synthetic polynucleotide sequence
  source 1..121: mol_type = other DNA
ctttgtaataagataacctgcccaagatgctgaccattctgcaaagttactacccaatttacttaagtaaattggcttctttactccagaccaatcggttgacttctgagaactcttgtat

SEQ ID NO: 5611 - DNA, 121 bp, synthetic construct
  misc_feature 1..121: note = Description of artificial sequence: synthetic polynucleotide sequence
  source 1..121: mol_type = other DNA
tacctggtatttagatgaggttctagtatttcccgaacatgctcaggaaatctcctccacaattggtgacctgggccgttggtctccatctctctacagtcataaatagaaagcaactcct

SEQ ID NO: 5612 - DNA, 121 bp, synthetic construct
  misc_feature 1..121: note = Description of artificial sequence: synthetic polynucleotide sequence
  source 1..121: mol_type = other DNA
ttacctgaatggcataggcagctgaatcttgagctcggctattatcagcatacgcaaggtaagctcttgttagctccatcaataatccataggcaaagcttgaatcttctactccagtctc

SEQ ID NO: 5613 - DNA, 208 bp, synthetic construct
  misc_feature 1..208: note = Description of artificial sequence: synthetic polynucleotide sequence
  source 1..208: mol_type = other DNA
ccacaaatgtaaaatcttttccttgagtttcagttgttgagaaatctaatcgacctggatctatcgcccccaattcccctaaacattccccacagagcaaccgagcttgagagtttgcatcttggcaacctttcaaaagcactgtcaccaactgtgagataataggttctactgtttcactgtctgttgcatactttatcagtttttc

SEQ ID NO: 5614 - DNA, 121 bp, synthetic construct
  misc_feature 1..121: note = Description of artificial sequence: synthetic polynucleotide sequence
  source 1..121: mol_type = other DNA
gatttttatacaaggtttccttcaagcttgtaagagcatgaatacgaacatcgacattttcatgttgaatggccttcatagagagctgaagagttgtctgaagatcagtgctctcagaggt

SEQ ID NO: 5615 - DNA, 121 bp, synthetic construct
  misc_feature 1..121: note = Description of artificial sequence: synthetic polynucleotide sequence
  source 1..121: mol_type = other DNA
taaaaattaaatacctttctgtattcctggagaacggcttttatcttttttaattctggatgatcaggtaaaaaatatatttcatgaagaaaatcttgcacagcatccctaatagttagtt

SEQ ID NO: 5616 - DNA, 145 bp, synthetic construct
  misc_feature 1..145: note = Description of artificial sequence: synthetic polynucleotide sequence
  source 1..145: mol_type = other DNA
cctgttttcaattatgaggtagtggaagatagctgcagtttctttaggctggatgtgtataagaggtaacaaagctactattacatgactgagaagggagcccagacaagcatgatccaggcagcgaacaaagcagtcccaagct

SEQ ID NO: 5617 - DNA, 121 bp, synthetic construct
  misc_feature 1..121: note = Description of artificial sequence: synthetic polynucleotide sequence
  source 1..121: mol_type = other DNA
acacaattcaggaaaatcatccttgaatcgaaggccagttctcagtgtggtcatcatcttcaccctcacagaactgacatgtttgggtcccattaacttcatcaaagacatcaaactgttc

SEQ ID NO: 5618 - DNA, 121 bp, synthetic construct
  misc_feature 1..121: note = Description of artificial sequence: synthetic polynucleotide sequence
  source 1..121: mol_type = other DNA
ctatcaccacttaccattttcttatcttcaatgccaacactagagctcagtaactgcatgttaaaaaaagccaaaatgcccaacaatttgggttgtaaataatcagcctaagaaataaaaa

SEQ ID NO: 5619 - DNA, 187 bp, synthetic construct
  misc_feature 1..187: note = Description of artificial sequence: synthetic polynucleotide sequence
  source 1..187: mol_type = other DNA
ccatcagttcaggtgatatgatatctctcgggccctgatatggatcatcactggatgcaaatgaggcaagtattgacaaaccattaaaaacctgttgatagtgttctccaatacgcagcaataattcattatgcaatccttggaaatcttgtctcaacaggctccccagttcaatttctgtttcatt

SEQ ID NO: 5620 - DNA, 196 bp, synthetic construct
  misc_feature 1..196: note = Description of artificial sequence: synthetic polynucleotide sequence
  source 1..196: mol_type = other DNA
ccttcagataatgaagggcacgttctaattcatctttggaacaagaacagaccaaatgagaaaaaatatatttgaagttgtttattaaaatctctctacgattgacatttaattgttttcctaaagttcgaatgagagcagaagctgcagggcttgctttggcagcaagatcaggtagtagaacttgtaatgtcct

SEQ ID NO: 5621 - DNA, 172 bp, synthetic construct
  misc_feature 1..172: note = Description of artificial sequence: synthetic polynucleotide sequence
  source 1..172: mol_type = other DNA
cagtaagaaaacgattaagatcaggaaagtcgaaaacgttggcaatttcagacaacgtatttaaagccatttctctctggtgagccacatcttgttttcgcacgtcagcattctggcatggagtattcggaagtgctgtcatctgactagagtgaagggattctaccaaaaa

SEQ ID NO: 5622 - DNA, 173 bp, synthetic construct
  misc_feature 1..173: note = Description of artificial sequence: synthetic polynucleotide sequence
  source 1..173: mol_type = other DNA
cctgacagatgggtttcttatactggctgaaaaaactttgcagtttaacacttttagctgcaaccagagctctaatttctgtgtatgctgctccagagacagatgctgacttggataacaaacaatgcaataagtgtaagagtgcaaatggtaccaaatctccttttgcggcc

SEQ ID NO: 5623 - DNA, 121 bp, synthetic construct
  misc_feature 1..121: note = Description of artificial sequence: synthetic polynucleotide sequence
  source 1..121: mol_type = other DNA
ccaagtataccttccaatatcccctgttgtaagaatcaaggtatccttcagctcattatttcttgatatttgggcatgtgtatatgcttccttcattcttaagacaaaaagctagaacaat

SEQ ID NO: 5624 - DNA, 192 bp, synthetic construct
  misc_feature 1..192: note = Description of artificial sequence: synthetic polynucleotide sequence
  source 1..192: mol_type = other DNA
cctcctttataaatccatcttcagagtccaaggattccaatatgtgcttgatatttccactaaaagccactctaacatctttgtctggatcttccattaaatttaataaagttccaagaactgcttttacatctgtttcatcttctctaaaatcaagatgcttacaaagatgatgtagattatctatgaaag

SEQ ID NO: 5625 - DNA, 363 bp, synthetic construct
  misc_feature 1..363: note = Description of artificial sequence: synthetic polynucleotide sequence
  source 1..363: mol_type = other DNA
cttcctgtaatttttcaaggcttcagtctaattcttttactgatttgaaaagcagagcttaaataggttttaaagtattaaataagtcataatcactcaccaagttttactggactaggtattttttttttcagtaggaaaaggaatggcttgcagacagaagcttttagttgagaagatgaacattcatgttgagaagtggctttcaagttcctacagaagaggtccacatgtccgtgttcagagaaaggttctgttaaagaacttgtcagataaaacatgccgtgaagagtacagacaagttgaccaagtatagaagcaaattctttcttgacaatgtcagaatcatctttgactttatct

SEQ ID NO: 5626 - DNA, 194 bp, synthetic construct
  misc_feature 1..194: note = Description of artificial sequence: synthetic polynucleotide sequence
  source 1..194: mol_type = other DNA
cataagaatcttgggaactctgttacaagaattctgctgctgcaataagataaaaaatccactaacacaactagcccggattacttcatgggagctctgcagggcccagttgtaaactgctgttctccactcaaggaatattcttcttggaaacagagtcagaagaaacacacatcgtgattgtgcctgtggtg

SEQ ID NO: 5627 - DNA, 154 bp, synthetic construct
  misc_feature 1..154: note = Description of artificial sequence: synthetic polynucleotide sequence
  source 1..154: mol_type = other DNA
caatagctatctgaaatcctacagcttaatgttagaagattagcggcaaatgtggtcaactttaaacagccatcatcagaatgggaataaatccatggaagtgagagcataccacataaatcttccaggatatgatcttcaaatgaactgttta

SEQ ID NO: 5628 - DNA, 192 bp, synthetic construct
  misc_feature 1..192: note = Description of artificial sequence: synthetic polynucleotide sequence
  source 1..192: mol_type = other DNA
ccttgcatataaatcaaagcatcataaattttcaccaccttatcaatggttgcctccaggtccagtttctgaacagattctaacaaacttctacagctcttaagcacttttgtgtaaaaatccaatgacatccaagttatcactacagaaggtttcttcttggatttatgttgacagtccttgaaagtacgg

SEQ ID NO: 5629 - DNA, 193 bp, synthetic construct
  misc_feature 1..193: note = Description of artificial sequence: synthetic polynucleotide sequence
  source 1..193: mol_type = other DNA
ccagttcatgttttgatgagaacaatgaacagtacacagagcagtcagttgtaagacaacagcaattccttctaacatctcaataacaggattctttaggccactgtattcaagggaaatctgaagggattcagctttctgtttcagtgcactccataatatgctcttttggttcatgtccacatgtttaatt

SEQ ID NO: 5630 - DNA, 180 bp, synthetic construct
  misc_feature 1..180: note = Description of artificial sequence: synthetic polynucleotide sequence
  source 1..180: mol_type = other DNA
ctcctcagtctgttttggtgctcttttagaagggtttagagacgagctgagacgacgccttttgggtgatattccatcactattactgctgaggttttcctgttgagtttggcattgaatctcctcaatgatttccatactttccattttcaaagctgcataaagtgggcccaacaagta

SEQ ID NO: 5631 - DNA, 433 bp, synthetic construct
  misc_feature 1..433: note = Description of artificial sequence: synthetic polynucleotide sequence
  source 1..433: mol_type = other DNA
cctctgcatctacctcaattccaagcacatccaaaagagctttacaaatatttctcacatagaccttcctgacttgtaaagcagattcatacccagctggcacaaatttaaggaaatactgcagtaaatggcacaaagctgcttttagcaaatcagacttaagccgcatgagcacaccgtcttcaaacatgacacagagtttttccagcagcatatttaaatagacaggttcaatatttctataagcttctgcttcaaagggaaatagtgtctttatcagctttgataatggctcttcatagagtttcaattggtcagtatccatttctacaaggtgttttaataattccaaaaatgagctgaaaaaagtgctagctggttgtgctggtagtcctccaagctgaaaaagttctgttaaaaagctaattgctag

SEQ ID NO: 5632 - DNA, 446 bp, synthetic construct
  misc_feature 1..446: note = Description of artificial sequence: synthetic polynucleotide sequence
  source 1..446: mol_type = other DNA
ggatttaatttttggactaccatactctagcagaacacaacctatctgccaaagtaagagttcttgccttctaaaaaacacaattgcaataatacgagtaagaaccattaataaagtgacttcaataaattctaaattttgcatactcatcaactgcaaaggagctgattgtaaatatcccatgtgttcatctaattgacttaaaaatcggctcatgaccactggccattccacagcatgacccatcacatttcttctatggaggtaaaccaagtcttcaaaaagttgtaataattcttttgtgagtaccccaaaaatagcaggactcttgcttttaaaaagaaataataatgaacagatgacttcacagattttcttgtgtaacaaatgacaggagggagttgctgcaatccgcagaagtctcgttatgatccaattactgaatt

SEQ ID NO: 5633 - DNA, 142 bp, synthetic construct
  misc_feature 1..142: note = Description of artificial sequence: synthetic polynucleotide sequence
  source 1..142: mol_type = other DNA
ccaatacaactgcctttggcctcatggcttccactcacatttacaaacataagtggggaggatttcatgatatgctggatgaaatcaagcaacatcacggaggttggctgagagtcagttttctttacaagttctacagcaa

SEQ ID NO: 5634 - DNA, 121 bp, synthetic construct
  misc_feature 1..121: note = Description of artificial sequence: synthetic polynucleotide sequence
  source 1..121: mol_type = other DNA
taattggtttcttaccaacatttacatctgtaagtatccggtcaatgaattgacacagaatttgtcttggcttctgtacaactgtattatattcctctggtgtggcactaaaatacaaatt

SEQ ID NO: 5635 - DNA, 121 bp, synthetic construct
  misc_feature 1..121: note = Description of artificial sequence: synthetic polynucleotide sequence
  source 1..121: mol_type = other DNA
gatgcaggacccaggctgggcctagccctacctgcccagctcccgcagggcggggatcatggaagccagctccaggccatgttcccccatgctgaggctgcgaggcactagtcaaccacgc

SEQ ID NO: 5636 - DNA, 121 bp, synthetic construct
  misc_feature 1..121: note = Description of artificial sequence: synthetic polynucleotide sequence
  source 1..121: mol_type = other DNA
aagcttaaggagcagggcgtgtccaggaggctaatacatggcttgcaactctaaaggctgcacaggcaggactcagtgagcaggtggagatgtagcaaagttaggaaatgttggcatgcca

SEQ ID NO: 5637 - DNA, 121 bp, synthetic construct
  misc_feature 1..121: note = Description of artificial sequence: synthetic polynucleotide sequence
  source 1..121: mol_type = other DNA
tgctttattgatgtgagagcctaggtgggtcccagtgcagaataggcttttccccatgtaagcgagctactgaaaaggctgtgttgctgaaaagggcaagtccaacagaggcagacgctca

SEQ ID NO: 5638 - DNA, 121 bp, synthetic construct
  misc_feature 1..121: note = Description of artificial sequence: synthetic polynucleotide sequence
  source 1..121: mol_type = other DNA
aaagttctattctgagatatataggatctgaaaaagtatggcagacacccttcctgctcgcaaagaaaaggaaagaaaaaaatgcaatgttttaaaaataaccatataaacaagtaccgtg

SEQ ID NO: 5639 - DNA, 121 bp, synthetic construct
  misc_feature 1..121: note = Description of artificial sequence: synthetic polynucleotide sequence
  source 1..121: mol_type = other DNA
taaaagaagttaaacatttaaattaaaaatatgtatgggaacattatgagaataactcaaagaagaagactagaagttgagacgagatttgaaacaaggaatgagggtgaaggtaaatttt

SEQ ID NO: 5640 - DNA, 121 bp, synthetic construct
  misc_feature 1..121: note = Description of artificial sequence: synthetic polynucleotide sequence
  source 1..121: mol_type = other DNA
ttttcttgatgaaagcagtgaattctgaaattatgcacagcaggtacagatggggaagatactgcacagatttcaaaagatatctcacatagttttaatgctgaaacatttactttatcct

SEQ ID NO: 5641 - DNA, 121 bp, synthetic construct
  misc_feature 1..121: note = Description of artificial sequence: synthetic polynucleotide sequence
  source 1..121: mol_type = other DNA
taaactaagaacatgcaatctcacctcagccacaaatatgagagaaataatagcctattgtatacaacccaactagccaggtgcaggctccatcctcaagaaatggtcctgctgcactctt

SEQ ID NO: 5642 - DNA, 121 bp, synthetic construct
  misc_feature 1..121: note = Description of artificial sequence: synthetic polynucleotide sequence
  source 1..121: mol_type = other DNA
tcatttcactgcaatgagtcacaggcgtgtgactattagctgagtcctgtgagtccttctagtgaacaccaaacctgggatggtcttggggacccatgacacagtctgggactctagaatt

SEQ ID NO: 5643 - DNA, 121 bp, synthetic construct
  misc_feature 1..121: note = Description of artificial sequence: synthetic polynucleotide sequence
  source 1..121: mol_type = other DNA
agagaaaaaaacacactgtatcacttaggaattgactctggctgctaggaacagagaactgactatagtgactaaaaatgtgggcattttattctttcattaatggaagtccagaagtagg

SEQ ID NO: 5644 - DNA, 121 bp, synthetic construct
  misc_feature 1..121: note = Description of artificial sequence: synthetic polynucleotide sequence
  source 1..121: mol_type = other DNA
ctaatacatgtgaagctcttagaactgtgtatagtacacattatatagcaagaaatgtttgttgtcattatgtgttcaaaggcaaattgttgatggaattgaaacctatattgtgacacac

SEQ ID NO: 5645 - DNA, 121 bp, synthetic construct
  misc_feature 1..121: note = Description of artificial sequence: synthetic polynucleotide sequence
  source 1..121: mol_type = other DNA
agttattttgttcctcatggtaattaacagtgtttccagaaagcaatatttcactgatttgatgcattttgagtcagtgcctaccatatgctacactactgcaatttgatgagaatttcct

SEQ ID NO: 5646 - DNA, 121 bp, synthetic construct
  misc_feature 1..121: note = Description of artificial sequence: synthetic polynucleotide sequence
  source 1..121: mol_type = other DNA
atcacatcactgacactgaagctgcttttctcatggtctgcagtggtctccctacatatggccaaatccagtggacactgtttggggctgttctgacacaaatgtccatggcgttccaccc

SEQ ID NO: 5647 - DNA, 121 bp, synthetic construct
  misc_feature 1..121: note = Description of artificial sequence: synthetic polynucleotide sequence
  source 1..121: mol_type = other DNA
cagtgactcctgaagtttctcaggtttgggaagtacacaacacttaccttcaatggtacactgatcagggactggaatcttctttccaatttccatggcatatgctttcactttgctgagg

SEQ ID NO: 5648 - DNA, 121 bp, synthetic construct
  misc_feature 1..121: note = Description of artificial sequence: synthetic polynucleotide sequence
  source 1..121: mol_type = other DNA
taagtgcaagtagagcttatcttggtattctataggacttgcagttgtctctggagtttcttcctgggagttttctttaacagtttctgacaaattctctgagtctatatgtataatattt

SEQ ID NO: 5649 - DNA, 121 bp, synthetic construct
  misc_feature 1..121: note = Description of artificial sequence: synthetic polynucleotide sequence
  source 1..121: mol_type = other DNA
caggctaggtgatagatatggaatgatgaaccagatcaggagagatgactctgtccttatgaagtgtaatttaataaatagaagaagcaggtgccaaataaatatataacaagcatattgt

SEQ ID NO: 5650 - DNA, 121 bp, synthetic construct
  misc_feature 1..121: note = Description of artificial sequence: synthetic polynucleotide sequence
  source 1..121: mol_type = other DNA
aatgaataagtgttactcttttagtccatagtcaggagctgtccatcttttggttggcctaatacagacactgagcttctttgtttttgtgtggtcacaaggtagaaggagctatataatg

SEQ ID NO: 5651 - DNA, 121 bp, synthetic construct
  misc_feature 1..121: note = Description of artificial sequence: synthetic polynucleotide sequence
  source 1..121: mol_type = other DNA
gattatactttcccaacaactgtgagctgtttgaggactggcacaaggttgattaactatttatctccagtttctagcacagcacccagaacagagtaggagctcttcaaaacttttctgc

SEQ ID NO: 5652 - DNA, 121 bp, synthetic construct
  misc_feature 1..121: note = Description of artificial sequence: synthetic polynucleotide sequence
  source 1..121: mol_type = other DNA
gttcctggtggagtacactgcctggagtgagaacttctttgatgcagtttggccaatctaatgatactttttccagatccgtccatggaccaataagcaagcacttgctcccaccctggac

SEQ ID NO: 5653 - DNA, 121 bp, synthetic construct
  misc_feature 1..121: note = Description of artificial sequence: synthetic polynucleotide sequence
  source 1..121: mol_type = other DNA
ataatggctgagaagtattcaaaattgaaaaaagatgcatttgataaatttctatgaactccaagtagcataaatacacacacaaaaaaaacagtacttagactcatcacagtaaaacatc

SEQ ID NO: 5654 - DNA, 121 bp, synthetic construct
  misc_feature 1..121: note = Description of artificial sequence: synthetic polynucleotide sequence
  source 1..121: mol_type = other DNA
agagaattgttagttctagtttgcataaatacggcaattgataaagatgcacattattatacacgaagcttacagtgtacccagcctgaaagccttgcaagatgtctccttaaataacctc

SEQ ID NO: 5655 - DNA, 121 bp, synthetic construct
  misc_feature 1..121: note = Description of artificial sequence: synthetic polynucleotide sequence
  source 1..121: mol_type = other DNA
ttttgatttccggatcagaccctgagcagttgataaaggagaattacttggccattatctgaagtagttgtatttccacaaagagctagtgctaaacaagagtttatctctacaacaagac

SEQ ID NO: 5656 - DNA, 121 bp, synthetic construct
  misc_feature 1..121: note = Description of artificial sequence: synthetic polynucleotide sequence
  source 1..121: mol_type = other DNA
tcattagcccacacaaagctcagtgtagaccctatattagcttcctaaggctgtcctaccaaaaaatcaaaacctaggtggcttgaaacaagagaaggttgttatcttacagttttggaga

SEQ ID NO: 5657 - DNA, 121 bp, synthetic construct
  misc_feature 1..121: note = Description of artificial sequence: synthetic polynucleotide sequence
  source 1..121: mol_type = other DNA
gcatgggagaaaataatttggagacattgagtatagacaactcttccaaagaattttatcacaaagggaggaagactaatgaggtggtaactagaggagatatggggtcaagaaagttttt

SEQ ID NO: 5658 - DNA, 121 bp, synthetic construct
  misc_feature 1..121: note = Description of artificial sequence: synthetic polynucleotide sequence
  source 1..121: mol_type = other DNA
tgtgttcttcataccttaatcctaggcagggaaagtctggcccaagggcataaattctcaaatgtgactgtaaagggcagtctcaaagcgactgctaattaaaacctagagcatatgaaaa

SEQ ID NO: 5659 - DNA, 121 bp, synthetic construct
  misc_feature 1..121: note = Description of artificial sequence: synthetic polynucleotide sequence
  source 1..121: mol_type = other DNA
ggctatgtacacattcatagtcggtccatggcttccaactagtagcgctatttccgaaggtctaatacacaaacctgtaagaaattaaaataatcaaccagtgtattcagaattttattgt

SEQ ID NO: 5660 - DNA, 121 bp, synthetic construct
  misc_feature 1..121: note = Description of artificial sequence: synthetic polynucleotide sequence
  source 1..121: mol_type = other DNA
ctatacttactgaaccatctgatgcactggctccaactttgtctcctgctgcattccagcaaacttcaaatattccacctgttcccctatagctgtgaactagagcacctgtctaaaagaa

SEQ ID NO: 5661 - DNA, 352 bp, synthetic construct
  misc_feature 1..352: note = Description of artificial sequence: synthetic polynucleotide sequence
  source 1..352: mol_type = other DNA
tatctataaggaaaaatgtattaagctatgaaaaaaaaaaaaagctatcaaaaaggaaagatctagccgggcacagtggcatgtgcctgtagacccagctacacagaatgctgaggtcaaaggatctcttgagctgaggagtccagcctgggtaacacagcaagaccctatctctaaaaataatcaactaattttaaaaagaaagataaatacatctaaacattaacattaaaaactttcatatgatctgggcgtgatgcctcatgcctgtaatcccaggaatactttggaaggctgaggcaagtggatcccttgagcctagggggttgaggccagactgggcaacatggca

SEQ ID NO: 5662 - DNA, 470 bp, synthetic construct
  misc_feature 1..470: note = Description of artificial sequence: synthetic polynucleotide sequence
  source 1..470: mol_type = other DNA
aaacccggtctctacagaaaaatacaaaaattagtggggtgtggtggcatgcagctgtgatcccagctacttggaaggctgaggtgggaggattagctaagcccaggaaggccaaggctgcagtaagccttgatctgccactgcattccagcctaggcgacatagtgagactctatctcaagacaaaacaaaacaacaaccaaaaaaccccacaaaacttctacgtgataaacactccacatgaagaaaataaaaaagaaggtactgggagatcactggaatccatataaccaggaaggattagtacccagaatgcataatgaacactaatcagtacagaatataaaacaattgaaaaattgtggtggtggtggtgaactaaaatgctaaagtccaactgtataataactatttgaaaagatatttaaactaattgacaatcaagaaaatgcaaatacaaaatgtttcat

SEQ ID NO: 5663 - DNA, 471 bp, synthetic construct
  misc_feature 1..471: note = Description of artificial sequence: synthetic polynucleotide sequence
  source 1..471: mol_type = other DNA
atccatgtaattggaaaaatgttcaccagtctgataacctaaagataaaggaaaatgggaaatcctaaatattgtgattagaaatgtaaatgggtgtatgcacgttgaagagcagttaggcacaagcacgtaaatataccgtatgggccatgacttccacttacaggatatgctatgcacaggtgtgtgtgtgtatgtgtgtgtgtgtgtatatatatatagagagagagagagagagacagacacacacagagaagcgttagagaaactttcattcatgtgcacaagaaaacgtggatggatgttccagcaatgttgtacatttttaaatcccccaataggaaaataaatttgaaaattaatatattcatattatgaatatattattaatgaatatattaatatattcatataatgctctggaatagtctaaataaataatcattctagaggtacaagtattaatgtgat

SEQ ID NO: 5664 - DNA, 474 bp, synthetic construct
  misc_feature 1..474: note = Description of artificial sequence: synthetic polynucleotide sequence
  source 1..474: mol_type = other DNA
atttcaaagaagtggtaaaaaacactagcttgaaaagacatacaatagaagattcacaacagcatgattaattacaattttaccacagaaaatagtagtatatatcatttatcatgggaatgacaggcactctcttcaggattgctatagcctctaggaaggaagaggaaaatggaggtgaacactttatctgtatctataacattttatcaggtaaaaataggaaggaagagattcacaacagtgtggcaacatgttcttatcaattaaatctgagcagtagatatatgagtgttatattattttctgtttgaaatgtataattattaaaagtgaaaatgaacaaatactaacttgaatatacatggaaatgatattatttagatttagattcactttcatcaactctgtaactgttgttcagttttaaaaagtttagttgggtgaggccgggcatggtggctcacacctgta

SEQ ID NO: 5665 - DNA, 167 bp, synthetic construct
  misc_feature 1..167: note = Description of artificial sequence: synthetic polynucleotide sequence
  source 1..167: mol_type = other DNA
cctgcgtgttccagatgtgtacacatttgtcaaaagaaccacttgccagatacctgccatcaggactgaaagctacactgtacacaggctcttggtgttttgtcaaggtatggatgcatatccctcggtctacatcccataacctaacagtagaatcaaaggatgca

SEQ ID NO: 5666 - DNA, 121 bp, synthetic construct
  misc_feature 1..121: note = Description of artificial sequence: synthetic polynucleotide sequence
  source 1..121: mol_type = other DNA
gctaacataaggttggcatttggattattagtccctggtcctgttggactccatttgatagtataaatttctttattatgtgcttgcaaatcatggacacaattgtcttgtttcatactcc

SEQ ID NO: 5667 - DNA, 231 bp, synthetic construct
  misc_feature 1..231: note = Description of artificial sequence: synthetic polynucleotide sequence
  source 1..231: mol_type = other DNA
ctgattgaaccccaacagtgaaccaccaggcctggccatgcccaaggattttaaagaccacctatctgctgagaattcccagtttttaatcttgagcttacagttctctaagcatcagtcccacctatctcctccattcgcatgactcagcgtcaccttctcattccatctggcattccctcttctcagaaaacggcccattacacattatccatccatcctagtttttgc

SEQ ID NO: 5668 - DNA, 462 bp, synthetic construct
  misc_feature 1..462: note = Description of artificial sequence: synthetic polynucleotide sequence
  source 1..462: mol_type = other DNA
tttaaaatcctttgtgacatttaaacattcttaggatgaagaaaagctctctaacaatttctagttttaacctctctccagcttcaactcaatatgtggcacaaggccctctggacactgcccttctgtcatttcctcatatgtgtcacacacagttccagaagaagtttttttcatgttataagcattaatacgtgtgcacataaggaaaagccaaagatgaaagcattaagaagagtattaatactagcaattttgtaagggagcccagacttaagaagaactgtctaaaaacatagcagatacttaaaggagaaaacctcacaagtttcgcaaagttaaatttaatctgttcatagtagcaggaaaatcagttttccctcatgattttcatatctgtaacggtcatcacatctgcagtccttggtactgcaaagtcaaggataaaactgttttcagtag

SEQ ID NO: 5669 - DNA, 462 bp, synthetic construct
  misc_feature 1..462: note = Description of artificial sequence: synthetic polynucleotide sequence
  source 1..462: mol_type = other DNA
agggttagctgttgcaggagagggctcaaagcttcatttattttggaaataagtattacgttgttctttatctccaaatgcttttttccccaaatgaggaatctggtgtgcttaggtgcgagacagcagttttgcttttagtcatacaacaagaaaaacagagatccatgttgagatgtggatgttggtatgtcaactaggctcgctcactgagagattctctgctatgtatcagtttcccagcaatggtgatacatagtcataccacagcaaaatcaaattaatacaacgcaaagaattccaatcaaatccatgaatgctacaaagattttgagtacttattaagtcaaatctttacatatgcaaataaactttaattgcaaataaactttaattgcctcaacatatgactttctaatggtgaagacaatttatagcatgacctttcttactattggtgat

SEQ ID NO: 5670 - DNA, 351 bp, synthetic construct
  misc_feature 1..351: note = Description of artificial sequence: synthetic polynucleotide sequence
  source 1..351: mol_type = other DNA
gtctaattttatctgtcttcttgactgagtcacagggtacagatatttggtgagacattatttccggctgtgtctgagggtgttcccagttgagacaggcatttaacttagctgactgagaaaagcagactgccaccctccccaatgggcggcggggggggcatcactcagtccagtgaggctctaaacagaacaaaaccgccaaggaagcaagaattctctgcctcagcctgactgctgagttggtatattggtcttctgctcttggactgggacttacaccattggcactccttctctggccctggaatggaaccacacctccatctttcatgggtctccagcttgtag

SEQ ID NO: 5671 - DNA, 121 bp, synthetic construct
  misc_feature 1..121: note = Description of artificial sequence: synthetic polynucleotide sequence
  source 1..121: mol_type = other DNA
tttctccctactaagcaaattacctttaaagtcatgtcgtcagaacaggaggccaagagattgccagttgggtcccatttgatagcatttacttcattctaaaaataatagtaaatattca

SEQ ID NO: 5672 - DNA, 121 bp, synthetic construct
  misc_feature 1..121: note = Description of artificial sequence: synthetic polynucleotide sequence
  source 1..121: mol_type = other DNA
cgtatgtccttggaatgttttaataggtctgtcttgtcctaatttacagacatgaatgcacatatctgtactacaagaagcaaaggtgttgttgctctgccaatcaacatccaatgctggt

SEQ ID NO: 5673 - DNA, 121 bp, synthetic construct
  misc_feature 1..121: note = Description of artificial sequence: synthetic polynucleotide sequence
  source 1..121: mol_type = other DNA
cagctttcacgtaaattataagaaatttacctgaatgaaaaggaaactgttgcttggcttcaccagtatgtgcgtcccaaataattgtagtctgagattaaaaggaaaagaaaaataaact

SEQ ID NO: 5674 - DNA, 121 bp, synthetic construct
  misc_feature 1..121: note = Description of artificial sequence: synthetic polynucleotide sequence
  source 1..121: mol_type = other DNA
atgagcttttaccttgtctactccagcacttaggatgaaatttcctttcttattccattttaatgcaaatatagggcctttatgctgccctaaggtgctagcaaggttacctaaaatgcaa

SEQ ID NO: 5675 - DNA, 121 bp, synthetic construct
  misc_feature 1..121: note = Description of artificial sequence: synthetic polynucleotide sequence
  source 1..121: mol_type = other DNA
caaagtaagaaggaaaatgcttcatttaccatctttagtccatattctggcaaacccatcataggaaccagttgctagaagtgtaccttcactctgccagagaaaaacatttctttaatta

SEQ ID NO: 5676 - DNA, 143 bp, synthetic construct
  misc_feature 1..143: note = Description of artificial sequence: synthetic polynucleotide sequence
  source 1..143: mol_type = other DNA
cattccaatctagagatgtgacatccttgttgcttggaacatcttgccctccttctcgtatacaatgtctaagtactaactgtgtagagccactggtgctgttctcactaagattccatattcttgctgttgagtctccagac

SEQ ID NO: 5677 - DNA, 345 bp, synthetic construct
  misc_feature 1..345: note = Description of artificial sequence: synthetic polynucleotide sequence
  source 1..345: mol_type = other DNA
ttgagaaacataccctgatgctaggagatcactaacagggttccaggcacagataaaaacttcagattcatggccccgcaacacaacagctttattaggagggatttcaacatccccatccacttccatcatatcagtatgattatctgcatcgtgaaacacaagtaagcatttccagttaggcagtattacaacatggtggatgggtgatttcttaactagcaaataccttcctttatcgcacacagtgtaacatttttcaattatatccagttaagctgaacatgactacacagtcttagtcacacagaaaataaattcttatctttaattaagtattgacca

SEQ ID NO: 5678 - DNA, 462 bp, synthetic construct
  misc_feature 1..462: note = Description of artificial sequence: synthetic polynucleotide sequence
  source 1..462: mol_type = other DNA
catactttttttttagaggggtgggggtgggagtgggatgggagactttaaatgattagacctaaacatggataaaacgataaaatggtttgaattaaatataatgtctatcagtactattctgagtttctgccagtaggggttgctgatatcattcatataacatgagttgccttttatctcgatgtcagagctctatggttatttgttgataactagtattacaaattttatttagaaatcaaatgtagatgtaaaaattcatttaacaatgggaaaagggtttctagatattttaaaaagaaaataaaagtaaatctagctttttggagctttaggaataaaaatctgaattgaactgtgtgatacaagttagggaaacaagttggtgcaagttaacagatgaaattatttcagcatagaagatggggcatttcttctgagaaaaaatttttaaaaatt

SEQ ID NO: 5679 - DNA, 467 bp, synthetic construct
  misc_feature 1..467: note = Description of artificial sequence: synthetic polynucleotide sequence
  source 1..467: mol_type = other DNA
cttgtctcctgggaccttcctggggggtggagggtgggaggaagaggaggatcagaaaaaataactattgggcactaggcttagtacctgggtgatgaaatagtctgtacaacaaacccctgtgatatgagttcatctatataacaaacctgcacatgtaccccgaattaaaagtttaaaaaaataaataaataaaccatgtaattaaaaaaaaattcttgtctgagctcacttgctatagtatgtgctccattctcctccccatttgctgtgttttctccattttttgcagatccttgttggctggctgcagctgcggcagctgcagcagctgctgcctgttgctgtgcaagcttatctctataagcttgttgtcttgtttgtactacatcaggcattacggcatctatcagggacagagactctattggtcgaccatcaaacaaggtaccatcctggatttggaa

SEQ ID NO: 5680 - DNA, 147 bp, synthetic construct
  misc_feature 1..147: note = Description of artificial sequence: synthetic polynucleotide sequence
  source 1..147: mol_type = other DNA
cctcattaatactaacttctgcttctacatactgtagacctttctggatgatagaaatcaatgcagcgggtgggacgagggcaccatttatattggactgactgatatggctttctataccaaaggtaaatgctgaatgagaaaatc

SEQ ID NO: 5681 - DNA, 121 bp, synthetic construct
  misc_feature 1..121: note = Description of artificial sequence: synthetic polynucleotide sequence
  source 1..121: mol_type = other DNA
ttgaggcctatttactttataaaagtactcacctgactcttgcaagtatctatataccaagaagttgacctcatcactgcttatactcatctttattcccacttaaaccatgaggtcacaa

SEQ ID NO: 5682 - DNA, 348 bp, synthetic construct
  misc_feature 1..348: note = Description of artificial sequence: synthetic polynucleotide sequence
  source 1..348: mol_type = other DNA
cttcctattgcttaggagtattccattgtacacatacagcaacttgataatcctttttcttggtttatagatacttgaactgttaccagtttgggggtcaaccccatattttaggagagtttataaaccacatttggtactccacctctatgggtatcttcttcctggatttcctcctttcctgtgctggaccccattactctgcagtgcaatgttagttctgaacaattctctaattcctctgccaacgggaacctgtcctcaggcaaagatccgtcaataacaggaaactccaatgccattctcttaagaatccaatccggtctgacttctgaaacaggtttgttc

SEQ ID NO: 5683 - DNA, 466 bp, synthetic construct
  misc_feature 1..466: note = Description of artificial sequence: synthetic polynucleotide sequence
  source 1..466: mol_type = other DNA
tatggtgtcctcataatgtttgtttttcatatgttgtccagaaattgtagttactatttgtgggaggatttgttccatagcagccactactccatttgtggaattataactctctactattcttctgagcacacttgttcaacactgtaattggcctacttttttggtgttccccccaactttcaccagctagattgagccagtttctttcaatcaaaaaatcgaaactaaatcagaaaaaacgaggcctccaggaactgaaaagcataagaataaatccctaagagagagctgaagtggatcctgcaattcttcctatgaaccaacacaagttccaaattcatcccaagatgtgcatgtggaacatacccaaagaagcactacaaaggtcttgagaactgaagacacaaatcaccttcaggttccatactaactcctgagaggctcaatcaggaagcagactcat

SEQ ID NO: 5684 - DNA, 466 bp, synthetic construct
  misc_feature 1..466: note = Description of artificial sequence: synthetic polynucleotide sequence
  source 1..466: mol_type = other DNA
agtagcttagcaaagactttgaaaactgaactgacattggaaccactgcccatgggtgccacagaacttgggagtctgagcctatcaatgttaattgcttgctttcatttaaaaacaacattctccaggaatggtacagatgaagaaaatctgatcattctcaaaggaaaagacaataacagatattaatcctgagatgatccaggtgtcagaattctcaaagatgcccatgaagggacaggaaacacaagttctcagaagtagacacgataaaaaaaagttttcaaatgaaaactttatgactgaaaaaatatgggaaaaaattctaagacaataggatgtataggaaaatgatagcaaacactatgatcttcctgaataagagattacatatagatgacaataaaattctgttttaataaaagaaaattttcccaaaataacaaatatctttagctctcaaaag

SEQ ID NO: 5685 - DNA, 466 bp, synthetic construct
  misc_feature 1..466: note = Description of artificial sequence: synthetic polynucleotide sequence
  source 1..466: mol_type = other DNA
taatgaaaaaatctagagacctgtcatcaaggtgctttcaatcctattattctatgggtgcctgaggtccaccaaaaactctcacgattcacctctacacaatctgtgttacacaaaatttaaaagaatgctggagtgcaaatgagataatggttcaattcttggttctgtaactatgacaaagtatatgatatggaatcacttctctaaacattagttcttcatttgtaaaatgagaactaaacaagagaacttacttagctttgtaacacagtcccaatatctaattttaggaaccctcagaaagtcattccagtctccccagatattagcactagccaagtccacacacgtaagttttaaattatctagtagccacatgaaaaagttaaaaagaaacaggcagaatttattctaataataatattttatgtaacccaatgtatctggaatattatttcttata

SEQ ID NO: 5686 - DNA, 466 bp, synthetic construct
  misc_feature 1..466: note = Description of artificial sequence: synthetic polynucleotide sequence
  source 1..466: mol_type = other DNA
atcaatagtttaaaattgagatattttactttaaaaaattaagtcttcaaaatccagcatgcattttacatttacagcacatctcaattctgactagtcttatgtccaagtgttcaacagctacgtatttctagtggttaccatactgggtaagtctaaatacagacatgaaacggtgggggaggggagccaatagaaaagaagggccaaggtgtctcaatatgggtagtctgtcttacatacatacatacacaagctgtatgttcagggggtaatgaaagtgtctgctctgttacatgacatggggttggagcaacggaagtctcttttctgaaataaattttcatctctctactataattagagcccacaatttttttttaagaaaaataatggttttctcaccaatgaaacagatattaacaactttacatggttataacaatatttaagtaagataactact

SEQ ID NO: 5687 - DNA, 354 bp, synthetic construct
  misc_feature 1..354: note = Description of artificial sequence: synthetic polynucleotide sequence
  source 1..354: mol_type = other DNA
ctctatcacggaacatatacagttgacccttgtacaaagcaggagttagggttttatcaacccacccaatcaaaaatccacatataacttccgacttcccaaaaacctaactactaacaacctagttatgaccagaagtcttactagtaacataaacacacacaccttacatgttgtagctattagatgttgtattcttacaataaaagaagctagagaaaaggttatttaaaaaatcatatggaaaatatatttaccattcattaaatggaagtgaatcatcctgaaggtcctcatcctcttcacaaggctgaggagaagttggttttgctgtctgaggggtgggagaggtag

SEQ ID NO: 5688 - DNA, 358 bp, synthetic construct
  misc_feature 1..358: note = Description of artificial sequence: synthetic polynucleotide sequence
  source 1..358: mol_type = other DNA
taaaaaaaaatttaaaacagaaataaccaccatatgatccagcaatcccactactgggtaaatgttggtcaaaggatacataattacagttagacaaaaagaataaacttcaagagatcaattatacagcaatttgactaaagttaaaaatggcatattcttgaaaaatgtagagtagatgttatgtgctcttaccacaaaatggtaactatggggtaatgcatttattaattcactagattcaaccattcctctctctatatgtatacatacatcatatatatacatacacatcatatatatatacatctcatatatataatcatatatatatacacacatcatatatatggataca

SEQ ID NO: 5689 - DNA, 480 bp, synthetic construct
  misc_feature 1..480: note = Description of artificial sequence: synthetic polynucleotide sequence
  source 1..480: mol_type = other DNA
tatatatgatatatgatatatatatgatagggtcttgctttgttgcccaggctagagtacagcagtgttatcatagctcactgcagccttgacctccacctccccaaccccaagttcaaaagatcctcttgactcagcctcccaagtagctgcccagcaagaccagctaatttttaactttttgtagagacgggccctcacactgttgtccaggctagtcttgaactcctgggctcaagagatcctcctgccttggcctcctgaagtgctgggattacggcatgagccaccacacccagccaatatatgtatttcaaaagatttgtgttgcacatgacaaaaacataatgtcgtatgtcacttttttaaaattaaaaagaaaaaaaaaaaagtttggccagatacggtagctcacacctctaatcccagtggtttgggacgctgagatgggaagatcgcttaagcccaggagttcgagac

SEQ ID NO: 5690 - DNA, 358 bp, synthetic construct
  misc_feature 1..358: note = Description of artificial sequence: synthetic polynucleotide sequence
  source 1..358: mol_type = other DNA
tgagcccaggagtttgaggttgcagtgagccatgatgacagctctacactccagcttgggcaacagagtaagaccttgtcactttggggaaaaaaataataataataataataatgatttttaattaaagtatcactgtaaggaggagtgaggcggtctacatccatattgtcttactgccacagtgccatgggcaggatggactccatacagtaaggatcttgggcccccaccagagtacagtgtaatgccatcaaccagtaagtacactttttaaccatctacctgacccagcttccaattacttttgacctatagtatttcatacaactaactacttcctgcaatactatatgga

SEQ ID NO: 5691 - DNA, 478 bp, synthetic construct
  misc_feature 1..478: note = Description of artificial sequence: synthetic polynucleotide sequence
  source 1..478: mol_type = other DNA
tgtaactgttaaaaaaactgatgatacttttaaaaatcaggaacttcacctgatggagtcaggtcaaatttacttaataacataatcagtatttataagagagactgaaattttaaaatacatcatttttctccttttggaagtttaccaaaaagtcttggaaggcacaaaaacactagtcattatcatagtcatattgtgctgcttactgctattcactacccaacccaaaagcctgagggtcacacccctttgctctgcctcctttgtccaccacaaccgcaaaatttggtcaattcttccccaaatctctctatgctgcctactgaccccccttcaatcacactatccgtacgcctcattccactctttccccgcaactttgaggtctacagcccaaattgtttttaatgcatcccaaaatttataattgaacatcattggatatctaaaatttaagcttttgatttttttagtt

SEQ ID NO: 5692 - DNA, 478 bp, synthetic construct
  misc_feature 1..478: note = Description of artificial sequence: synthetic polynucleotide sequence
  source 1..478: mol_type = other DNA
ttgaagcaagaagtagtaatgggtttctttgttgaggcactgcttaattaactattcatttaacaactcttcagatgccttcagcctccttgctaacataattctaattttcttcaaagcagcaacaggcccagataaatacttgctttcctaacctttcttgcagccagaggcagccatattgatcagttctggctggtaaggcctcagaagtccgctagggaaggaatgaggaggccaggggaagcttttgctttaatgaaaataaagaacaggtgcagcacttcttcctgcttaaatatgatgcctcctgcagcagtagccattttccaacccaggcaataaacctgatggaattcatcacactaagggcaatggaattttgaaaaacagtaccttcctgtctcacaatttgtttaaaatggtattttacttacttgaaaccaactagacatcatcattctccccccaacccatg

SEQ ID NO: 5693 - DNA, 478 bp, synthetic construct
  misc_feature 1..478: note = Description of artificial sequence: synthetic polynucleotide sequence
  source 1..478: mol_type = other DNA
tcacacaatgcattgcaaattttctatgtataaatttaattcatctcccaccccaaacttgttcctcttctcgtatttcctaccttggtggatggcgccactttcacccaacttgtcacccaaactagagatatggctccttctcctccctcatttcctgtaagtaagcactaagcaccatgaccttctatttctaggatgcaacttgacatgtgtatgtttttagtttcccaaactcctcttacattagcagactttggaaatgctgtatcctctggctaaattttagatcactcacatcctactaaccattgtggatatccattttacatgcctgtctcccttcactagaaggtatgtatcttgaaagatgccttatccagctttgtaacttgaatgccgagaacatatgggatagaataagaactacaataatactgttactctaccttccactgagaatcaaacaacaagctgg

SEQ ID NO: 5694 - DNA, 479 bp, synthetic construct
  misc_feature 1..479: note = Description of artificial sequence: synthetic polynucleotide sequence
  source 1..479: mol_type = other DNA
ttatttaacctctctaaacctcagttttctcatcagtaaaacaagattgtaatggtatcttctctcagaggaaagttatgttaactaaatgagataatgcattatcaagcacgtaatagtacctgggaaataaaaagcacttaataaatggtagctgttgctatttttcctagattttctatatgatgggaaacactgaactgtcctttaccagaagtacaagatttgctgaaataaactgtcaatccacccagtctgaaagtccagaatgctttattttctgtgcttaggaacattatgcagtttatcttataaaaacaacatgacccggtttctaaacacactgctattggcattccgaaaatggggtaacgattctagaataaatactgaatataaatgagaagggagaaaaaagaatttgcaggagtgggtcaagattatggctttgaagaaatgatgcccatttttaactaaca

SEQ ID NO: 5695 - DNA, 478 bp, synthetic construct
  misc_feature 1..478: note = Description of artificial sequence: synthetic polynucleotide sequence
  source 1..478: mol_type = other DNA
tcacaaccaataatctatagtgggtactggattaatcaaatctccactatttaaacaaacatcagtctagtattattattcctgttccctgtcttccaaatagtagctgcgaagcaatgaaactattgcctagaatagcaacactgaattcctgggaaagatattttcagcaacagcaaataatgggtaaatttaataaggcttccattaaagcctgctccataattacacagtattttaaaatagtacctttattttggtattgaaagtcatgcagattgctgaattatctgcacagtctaaaatttcccttttagatatgacatcaaaataatgttaaaacagtcatagaaaataccagtttcccattcagcgtagttccttataggcagcataagctctcgggtctcccagattgtttgctacacagggaaatctaatgtgctctataaattctattaatatgcatcttttctag

SEQ ID NO: 5696 - DNA, 478 bp, synthetic construct
  misc_feature 1..478: note = Description of artificial sequence: synthetic polynucleotide sequence
  source 1..478: mol_type = other DNA
tgcagtaatgaaaatgttaacactttgattcagtcttgacttcaaattccactagtacagtgactaatcttctaatttgaaagaattcaacaaatcttacttagagctttaataaactctacttctatgccactgattgggagaaatataaagtaaaactggcgatttctttccaagggcaaagaagcagtattaaagagcagaatgggttcaatgggaaggaaaaaaggtgaatgtcaaccaataaccactgaacattctgaccccctcaatttgctatttttatactatgcaaggtagtaagaaatcagaaaccaggagtctatcgtaggtagtaagaaatcagaaaccaggaatctagggccaatggccatttataaatcttttataggtagtatacgaattgtgactttctttctttacctcacctaccattttatccactcttctcagccagagactcaggacatattagtag

SEQ ID NO: 5697 - DNA, 478 bp, synthetic construct
  misc_feature 1..478: note = Description of artificial sequence: synthetic polynucleotide sequence
  source 1..478: mol_type = other DNA
aaagctcaagcaatgactacccacattctaagaaactagttctattccatgcgaatatagaagttccagatcccagagtctgttatttcaaaatcactcgatcttttcaaagtctctaaagagttcttgaacattcattcattcattaactcatttaagagcctatttaaggacaagcactgtgaacaaacaactatacgtctttcatgccctcatcgctgagtagctttaacattgagcctaatgactcaaaatgacctaatgaggcccttttctcatcaaagctaaaagtgtgaccacggtatttttatccaaaggcatgactagattcctgaaaacttaaaatgcagcttcttatactcaccctttcactgatcaaaacaaagcccacaacggaaggaagaagaaaggaaataaaaagacagacattaggaagactttaaagagaatccatttgtgaattcccttctttatgagg

SEQ ID NO: 5698 - DNA, 360 bp, synthetic construct
  misc_feature 1..360: note = Description of artificial sequence: synthetic polynucleotide sequence
  source 1..360: mol_type = other DNA
cttagttgcatgtaatgctgtcaaatatcatagttcttcattcatttaataactagttactgaatgtgtactatttgccatgcttcatttcagatgctaagaacaacagtcaagaaaccaccctgaagtttgtattttaatgggggagtagagacaaaatgaatacattataatatatggcaagtgtcgtattttgtcagtttctcaaactgaacttttataaaatcaagagatacgatttagcattgtaaccattcaggcatattgcctgcaaaccagacagcaactccacataataactcaagaaaaatgggacctatagaaagtataagctcataaaaacaaagaaaaacctggata

SEQ ID NO: 5699 - DNA, 240 bp, synthetic construct
  misc_feature 1..240: note = Description of artificial sequence: synthetic polynucleotide sequence
  source 1..240: mol_type = other DNA
gacctcaggtgatccacccacctcagcctcccaaagtgctgggattacaggcgtgagccaccgcacctggctgataatcaggttttaaaagaaaagaaaccacagcagttccacgggtgaagaatatttacaccctacccaatttgatcctggaaccttttccacaacttgtcataaaatatggtcccatctcttttatttttccaatcgatggctggattcctatataattagggcttc

SEQ ID NO: 5700 - DNA, 479 bp, synthetic construct
  misc_feature 1..479: note = Description of artificial sequence: synthetic polynucleotide sequence
  source 1..479: mol_type = other DNA
ttttgattttgtttagataagtaaatagacatgaatggttaggggaaggggtgttttgaatcctgaggcagagaaacctacatagaatggttattcatatactgtctttgtttcttaactgtcccgcaacagaaattgttgaaatttgctgaacaaacagtgaccattcactacattgtgatacactgctggtccagatcccagtctaggcaacaacaccaattaccaattttgcagattattttagattatacttctgtgaccatttaatgttcctccatgatcaactggcatacttgcgtggctagaagctccagaatcaaccacacgacacgaagaaacattccaaagaatccttggtcctgtgtattgaattagtgctctataccaacctcacccattttctacatggtcattttattgtaatgcaaccactgcccttggtattagttacttcaaatttcagggagaaagagttg

SEQ ID NO: 5701 - DNA, 478 bp, synthetic construct
  misc_feature 1..478: note = Description of artificial sequence: synthetic polynucleotide sequence
  source 1..478: mol_type = other DNA
ggatatcctcctttttgctaacagaaagcccttggggactcgctcatctaaaaatactgcgtaaggtgaatctagttatactccagcaggtgtctcaccaacctttatttaaataagagggccattttccaactgcatcatctctaaacagcaaacataactatatagagcctacttctggagcacagaattgataaccttaacttctcattactttccaacatgcactcctccctgtgatagtataggtctttacctccagttatgccttctttaattcggcattcctgttctaatggctttcccttttcctcttctcctatctagaggctgtctacctttcaagatgcagatgacctccttcctgatgaaagctttctcttactactctgtcttaccaggatgtttctaaagaatgctgataacataccagtcattttatagtgttagagaacaaggtctagacaggttaaataac

SEQ ID NO: 5702 - DNA, 480 bp, synthetic construct
  misc_feature 1..480: note = Description of artificial sequence: synthetic polynucleotide sequence
  source 1..480: mol_type = other DNA
ttaccccaaatcatacaaccagctaatggcaaaggctggactacaacccagaccttcaaactctaattcccaagagtcttctaacttcctcactctaacattatttcccacactaatctgactacgttcccttacacttaagattttccagtggatactctacacctagatattttatccaaagtcaatccatccttaaaatcaaaggtcacgtgcaatcttttccactcaaacttccttttcgcagctttaactcactgattttcctctttcccaaatttactttttttatttttagactagtcgagtgcaatagtgaaaaggggggcaacagaatagaacaagttcgatctgttactgactacataatcaattgagttaactcactaccttcggaccagctcaaatttacagtattttaatcactatcacatagtgtagcatctttgtacttcatgttgtctcatttactcctaacaa

SEQ ID NO: 5703 - DNA, 478 bp, synthetic construct
  misc_feature 1..478: note = Description of artificial sequence: synthetic polynucleotide sequence
  source 1..478: mol_type = other DNA
cttgaaaagacaggaatttactggtcatattttatacatggccctaaaatgttaaccaatttgcttaaatttatacaattattatacagctacacaaaagagctgagatttaaagctgtgtcactaatccaaagtctacattctttaaatactgcatactacaattcctttctaagagccaggactcaggactcctgattcttggtccagaattagttccattataacctacggcttgtcatagaattctaacattttcattcctataaaatcacagttaaacataatccaaatcttgtcctcaggaaacaaacataaactgaggaatgttctttaaaactatcgatgtcataaaagacagaatggctgaggaactatgccagattaaagtctcaagaaatgtgacaactaaattcaacatatgcagataactgttgaagctaacaggatacggtaattcattattcttttattattt

SEQ ID NO: 5704 - DNA, 479 bp, synthetic construct
  misc_feature 1..479: note = Description of artificial sequence: synthetic polynucleotide sequence
  source 1..479: mol_type = other DNA
tcaaatttgtcataataaaaatttaaaaataaagtccattgagaaatcttgctggatgtcaatctttttcttcccttccatagcctatccatagcctatctcctctagaaataagtcccaatttgacttcacacgcatctttctttcaaacattagcctcccttccaaacaatgtgcaatttttttagccagactaaattcatgcagattataaattacatgcattaacgttctctttaaatactaaactccctgagggaaaaggtcttatctggtaattaacataaattttgtagtctaaaaggattaagtaacatctttcatcattggctctgagctccgcctctttttggcacatgggaaatgaaactcacaatcccatcgaggctgttccttgtgaggtttacagaaggcaagcctgtttccattaaggctaccttcatgtctgacacgtttagatactgcaagtggtttagaat

SEQ ID NO: 5705 - DNA, 478 bp, synthetic construct
  misc_feature 1..478: note = Description of artificial sequence: synthetic polynucleotide sequence
  source 1..478: mol_type = other DNA
gttcttagctaaagatttaaaaaaaaaaatccatgaaacttccaactaataaaaagagccattaattactggaaacctagaattactagaagtcctagagagaatgggattgaaagaatcacaatgcaagagcaaccctcatcccaatcctacaaataaatacatttaggatgatcccagcattccaattaactgatgtgaaggtgaaaccatgaagtgttgaaatctaaagtattaataagcaacgttttattctattaattaaaagtacattaatcaataatttctacaatgttgattaattcaccaaaatgctgcttctgagcattactgtcaaatttacttattacttaagactgtgtttactaaatggaatacattgttaggtactatagagtacctaacaattaaaatattccctcctcctctaatacataacttatataagacagataaaaaaaaaaaaaaacactgtaag

SEQ ID NO: 5706 - DNA, 479 bp, synthetic construct
  misc_feature 1..479: note = Description of artificial sequence: synthetic polynucleotide sequence
  source 1..479: mol_type = other DNA
cctgtgtcaaagcatctaggaattcagttaagaatgtcacgcctgattggggtcatagaagaggtgatgtaatagaactaagagaagagcatcaagaagttcagcatgtaccctgaaaattgcaaagtaatgaccgaaatcccttaacattatcatgagatctgcctctaacacagatgtcaaattttactctatacctcttgtgcacttgaagaaagatatctgacctaaaatactgcaagtccaccaacaactgaagccacattgttggaaattcagttttactgggctagctttcataatgttattaaagtcgagtgtgaggaaaagcagagttcttggatcaatggcttctagcagatagggctaaataaggcagttgcaaagagcaacaggttctttaaacagtggagatagctgcaaatcaaagcacagaagatcacataagtgcagaaaagactcatgattaaatattagtc

SEQ ID NO: 5707 - DNA, 478 bp, synthetic construct
  misc_feature 1..478: note = Description of artificial sequence: synthetic polynucleotide sequence
  source 1..478: mol_type = other DNA
gtttcaggctcatccacaaataccaaacaatgagcatcaacagtatctttatcttccaactccaacagtgttttaataatgtggcttattacagttgaatgtggaggtactttttagcacaatgaatccctctctaaattcaagtaatagaactgttaaacattatgaaaaaagtcagccacagaaaaccaaacatcatgagcaatattctccccacattttgtcttgtgtcgcacacatgtgtcttgtatcttttaattgagaggaggggaaatagaagtcttttgctaactcctataagaaatctgcagagaaacctgtgaacagcagcaatctttaagtggtccattcaaaaacagacaaaaagaaaatcttgattagtatattgtaatagtttttttaaaaatgtacagtaacttcaagagagaactcatatcatactaaaaacagtatttaccttcctaatcataaagtacat

SEQ ID NO: 5708 - DNA, 479 bp, synthetic construct
  misc_feature 1..479: note = Description of artificial sequence: synthetic polynucleotide sequence
  source 1..479: mol_type = other DNA
acattaacaaaagtttaaaattcaagccttaaaaagttatataacatcttcatattaattgatttacatcactcattgagcatacctacaccaacatcactgataagaagctttcatttggagccaattatttccaaccaaagagattcagactatgctcaaatctttaacagagaaaacccctacaattgggcaaacaagataaatattttaaacatggaagaggctaagctcaaaaaggttttcctatttaaaagattattccaaaaatctcacttcaaagaaaaaagatacctaattttctcatgcttccaattctgctttaatattttactttgaagtttcagagcattatagctaaaagattctcaaaatattctgactgaaaaccaggtgactgaattcattcatttgcctcaatcagattatataatcagatttttccaaaccttaaaacatatgattcaaacatacccatc

SEQ ID NO: 5709 - DNA, 478 bp, synthetic construct
  misc_feature 1..478: note = Description of artificial sequence: synthetic polynucleotide sequence
  source 1..478: mol_type = other DNA
aaaaagtacaaatacgcactagtacattttctcctgagtacattttgaacaatctactcaagtggatcatttacaaaataagaacataattccctgaatcagtaaattttattttcatgaaaggatgacaaagaaattccatttacactatcacgatttacattttcctacaattcatgcagctttcttcaattcacaatctacaaaccacaacaatgcacaaatttgatgttagaggatactttaatgtttagttctcatctcaacagtcactgttgctagtgtctctcattctcactcttcactgttacttaaagaacaaagaactaaagaagccagaaagaactagatcaagcgatgagaccaattttcagggtaaggcataataacattagctaatcaaaaactggagtatttctatcatttaatcctgcaagacaatacctcctgttttccctcactttccttccaataactt

SEQ ID NO: 5710 - DNA, 478 bp, synthetic construct
  misc_feature 1..478: note = Description of artificial sequence: synthetic polynucleotide sequence
  source 1..478: mol_type = other DNA
gacagaagtctggggaaggatggatcccaagcagaaaaccttcacaaatgtgaaagaaaatggaaatcctagcatagtcacatgactaactagaaatcccagaactctgtcaacaacctttgttttcaatgcagaaatcatttctgtacttttaatgacccatcattcaacctcacttgagctcctccaataattggcactactttaccaagttattagacagttctattagtaattatttgaaaaatcattcttctctatgattcaaatatgtctaactattaactatttcttacgtgctatagggctaaataaacaaactcctcagctttaaatgaaaatcttcagctactggaaggcctttctcccattctctcattctcatttaaaaaatgtgtgacctatcaatttcaaaaacctattccagtttctccttaaagactcctaaaagggaacacagtgcttaactcacggcatc

SEQ ID NO: 5711 - DNA, 478 bp, synthetic construct
  misc_feature 1..478: note = Description of artificial sequence: synthetic polynucleotide sequence
  source 1..478: mol_type = other DNA
tttttcttcaatacttaataagtttattctcttaattgacaatgcaatgagaatagtaaaactcaaaatctcaactgctagtaagatctagaaagtctagataaaaattcataaaaatctgtcactgtaactgaggctgacaaatggtgttacgacaactgaacagctaaatgcaaaagaaatgaatttagaaccctacttcacaccatataaaaaattatcacaaactgggttatagaactaagagctaaaactctgaaacacttagaagaaaacatacaggtcaatctttatgaccttggattaggcaatggtttcatagatatgccaccaagagtacaagaaacaaaagaaaaaaacaataaactgagatcatagaaatgtaaaacattttcatttcaaaagacaacatcaagaaagtgaaaacccacagaacaggacaaaagttgtgtaaatcatatcacagatatgaatcata

SEQ ID NO: 5712 - DNA, 479 bp, synthetic construct
  misc_feature 1..479: note = Description of artificial sequence: synthetic polynucleotide sequence
  source 1..479: mol_type = other DNA
acatttgcatccagaatatatgaaatactacaactcaataaaagacaagccaattttgaaatctgaacagataccccaaagagtaaaatacaaacggccaataagcatatgaaaatacgctcaacatcaccagctatcaggagaaatgcagaacaaaatcacaatgaggtgccattaggatggcaatcaacaaaaaaacagtgataagggttgacaaggatatgagaaagatgagaaactgaaaccctcattcactgctggtggaaatgcaaaatgctgcagtcctttggaaaacagtctggccgttcctcaattattagcatttaattagaaataatgaattaacaggattttaaaaaacatttagtataaaactgacaagtgtcttttttatttcacaagaatgaaaaatatacatcaggacatgtttcatatatgaatatatatataaccaacgactacaataactcatttttaaa

SEQ ID NO: 5713 - DNA, 479 bp, synthetic construct
  misc_feature 1..479: note = Description of artificial sequence: synthetic polynucleotide sequence
  source 1..479: mol_type = other DNA
ttctaggaggcaataaaacagccagtatacttgacgtgccatggagaagtgctggcaattttctttatgattcactaagacaattaaaatagctcatttatttattcaatttccaagttttcaaatttccaagtaaaaaaattaccctccaaactgacaaagattttatatttcaaatagtaagctaaggaatgacttttaatcaaattatggaatgggctattaatcattattagccaatacagttgatacagataccacatttcttttgtttttaattttttggagtacacagtaggtgtatatatttatgaagtacacaagacattttgatacaggcatgcagtgcgtaataaaaaatatgaaacactttgtaaaactgtgtgtcatccttgtgcaggggacatgctaatctttgtatcattccaattttaacatatgtgctgccaaagtgagcatcagttaccgcatttttaaaa

SEQ ID NO: 5714 - DNA, 478 bp, synthetic construct
  misc_feature 1..478: note = Description of artificial sequence: synthetic polynucleotide sequence
  source 1..478: mol_type = other DNA
aggtagtcattaagtagaagtggctctgtcaaaataagacctgttaaagcacagggtgctgaatcccacaccactttctgactcaacggctagatatgggattcagccaagaatctgcatttccaacaagttagcaggagatgttgatgctgccaaggatcacactttgagaactacaatactatgctgaatcatctaacacaacaatattctttttaagaccaaaaaatggtaatattaataatccaatcatttgttaaacatcggttatgtaataaaattaagatacatcagagaagctttaaatcatcaggactttcccagtgttgtttgctccaattagtacatcttctactaatatgtccataagatgcctttcaagtcctacatccatgaagccttctgattcctccagctagaaataactgcttattcctttgaacctaagtcatcacttgtaacacccataaaatactgc

SEQ ID NO: 5715 - DNA, 479 bp, synthetic construct
  misc_feature 1..479: note = Description of artificial sequence: synthetic polynucleotide sequence
  source 1..479: mol_type = other DNA
caacttgtattacttgttcagctattcacattcaagactttctcacctactaaactaagttccatggtagcctactaacaagcattttcatatccctcagaattcttggcactggctctccataaatattcaataaatatgtctttagcaaataattaaaatcaatatatccttgatttcatcccccattttcagccaaaaaaaaaaaaagggcacaagtcaagcttttacagagaaatgcccaaatcaaatccttttcaagtgactgtacataatgtacggttgtaatatttaaccatctaagtttaggcttaaggaataagagcattagaatggcagttttagcaaaacccagtttcagcaaaaacaacattcagttggtgaactaacctacagttctcttctcataaaatgcgttcaacaatacaaaagtttgattgttttaaagagtaatctgccacagattataatcaatgtgg

SEQ ID NO: 5716 - DNA, 478 bp, synthetic construct
  misc_feature 1..478: note = Description of artificial sequence: synthetic polynucleotide sequence
  source 1..478: mol_type = other DNA
aacctgctgcccaagtataattctttccataatgtattattacattaaaaaaccctttgtgttattctatgtatctcaacatactgccacctgacctacatacagaagctcaacttgtatatctagttcccaagtcccttgagtcatttcttttatggtatctctaacatcatataaaacagcacagaattgcaacatcttaaaagtgtttaaaattatctgtaattctcagtatcattaaaaattcttctacgatataactccttctactatcctttcatctgtctgccctttatagagtgtgaagaaaaaaagaacacaggggacctaatgttatttatctccaaaacctaaaaacacagtatctggtatagcaggtgctcaagaaacactttggattgcaatcattgttgttacttgctatcttgtatactattcttcacacagctcattagactactagtatcaacatctggca

SEQ ID NO: 5717 - DNA, 360 bp, synthetic construct
  misc_feature 1..360: note = Description of artificial sequence: synthetic polynucleotide sequence
  source 1..360: mol_type = other DNA
atttagggaagacctgagatctataacagctgcagatcaagtcctaagtacaagaaaagggtatcaaacatgcagttctatttaatcttcaatggacctgaaagttagaagagacaaggaagaattcactgtctgaaacactattgagtcactttaaggagtttgggaggttttttgtttaaacatataccggcagttcacattttggatggtagtgtgggaatgtaaaaatcaccaagatttgaaactgaacaaggtgatcttaatcagtgtgaattgttccattactttaaaaacttggtcaagatattaaaaacatttactatcagttatcaacgtataatcaaaacattgtaaaac

SEQ ID NO: 5718 - DNA, 360 bp, synthetic construct
  misc_feature 1..360: note = Description of artificial sequence: synthetic polynucleotide sequence
  source 1..360: mol_type = other DNA
gcgtgagccaccgtgcccagcctgagccaccaaacttggccacttatgacacagagcaaatatcttttctatttcttggggaaatttcttggggcattttcacacaactctctaaagcttctaacattttatccttgaatgttgaatgtcatgaaatatctctgatagagttcctttattgtgaagtttttggccagtgacacttcctatgaggccatcgtctttttcatcacagccactttcctcatttatgtccataaattcaccttcactaagtttctccagctgcagattctcgcaacactctccccatcagctatttcttctataactccacttacacgtgattcaaatttcatg

SEQ ID NO: 5719 - DNA, 121 bp, synthetic construct
  misc_feature 1..121: note = Description of artificial sequence: synthetic polynucleotide sequence
  source 1..121: mol_type = other DNA
ttcagcacggtcatttttagaggtggtttttgcactttaatctttgatgacattaaagtgtaatctaagggctatgggatgctcaaaagacagtaggcccacaggaaaaaaacaagtaatt

SEQ ID NO: 5720 - DNA, 360 bp, synthetic construct
  misc_feature 1..360: note = Description of artificial sequence: synthetic polynucleotide sequence
  source 1..360: mol_type = other DNA
gagaaaaaaggtaaatggccacaaaaaattgtattatactttttttaaaaatcctttatggcaagaactatcatatgcaaaatcaaaagcaggactagatgaagaaaacaattacaactcatatctgagacaatcagcttcctttacatgtaacgagatccagaagaaaatgattccctactcaaggatacagaatgtaaacagcttacagaaaataaaaattttaaagcttaaaacattaaaaagtgctcaacctccttgcaagagaaatgcaaattaagatttcactgagaacttctgatacgatttggatgaatctcagtaaaataaatctcttataatgctgagaaaaacaagcca

SEQ ID NO: 5721 - DNA, 361 bp, synthetic construct
  misc_feature 1..361: note = Description of artificial sequence: synthetic polynucleotide sequence
  source 1..361: mol_type = other DNA
taaacaagagcacacactgtatgtttatatgaaacacaagaataatgaatagatactttaagtcaggataatggttacctttccagaggctggggatagagtaatgactggtatagtggttacacaggtttgtccaatttgtgaacttcaccatctgtagtctgtaccttttaatgtattctgcatatcataatgaaaagcatatcttaaaaaaaaagtacaagataccgttctttatccaccagtttggcaaagataagaagttttataacactctatagtgttataacacacactggtggtagaaatatcaataactacaacctccatgaagacaacctggcagtgaaatttaaaaatg

SEQ ID NO: 5722 - DNA, 358 bp, synthetic construct
  misc_feature 1..358: note = Description of artificial sequence: synthetic polynucleotide sequence
  source 1..358: mol_type = other DNA
gagggtgaaacagaggttgcagtgagccaagatcgcgccactgcacaccaacctgggcgaaagagtgagactcctatctcaaaaaaaaaaaaaaaaaaagtaacactccatgttaacactatatattggacgtctgttgtttttagtcttccgcttttgctttagagaaactacacagcttcttctgcacagtcttggggttttcaatcacagtgcccttttcttccccgggcaaaggactggaacataactccagctaggcaaatcagacagtctcctagatacgtgaatgtaaagagagagaaattatacaggaaaataattcaaactgattcttaaccactgccaagtcagccca

SEQ ID NO: 5723 - DNA, 478 bp, synthetic construct
  misc_feature 1..478: note = Description of artificial sequence: synthetic polynucleotide sequence
  source 1..478: mol_type = other DNA
ctgtgatgtctacaacctagattctttattcctgtttttgttaattcaatgaacttccccatctttcccgttttttgcttcagataactagactgattctgttgcttgcaaacaaaaaacctggagtcaaggaaccaagagtatgaaagaggtcaccacaagtcacatagcaacaagcaggaaccataaatcagaggaaagcctggtctattgggagcagagagaaagagagaaaacagaattatggcagaacactagacttggaagcctagtactgttgctactaaggggaatacatgataattcagtccctaagaatgtgttacattctataacacatgccaattatccatgaagccagaaagtgaaaacaatcagttataggcaaaacagtactacaatttcctgaaacacttggctttgcagctttaagataattccggtctttcccccttatgtttccttaaagaaatacccc

SEQ ID NO: 5724 - DNA, 360 bp, synthetic construct
  misc_feature 1..360: note = Description of artificial sequence: synthetic polynucleotide sequence
  source 1..360: mol_type = other DNA
atttagctggtggtaatttaagagactctgttccttaaaatttttaaatacggaatacatctgtaatttccctaccctgactgcctcctctaagttacaatacctcttacatactctactaacatccacctcaccctgtatggcagttatatctatacgtctctagtaataacatgttgtctctctaaaagcaagaataaagttgaatctcagagcctacttaataaactaacgggtatacagtaaaaataatgatggataataaaagccttccaattattaaatatctgtatcactcctggcactgcaaggctgtgtgtgtgtgtgtgtgtgtctgtgtgtgtgtctgtgtgtgtgtgt

SEQ ID NO: 5725 - DNA, 360 bp, synthetic construct
  misc_feature 1..360: note = Description of artificial sequence: synthetic polynucleotide sequence
  source 1..360: mol_type = other DNA
attaagataccgtaatgaccatctctgacccttgcagcccagagttttgtttttttaaattctacctcctgaaaccttcaataaaggggaaaataggtggcaaacttcacagtttaaatgttcaacaggtattcctcctccctcatccctcaaacctattcatttcacataaatctcctgaatctgggtactctatgtttaccaaaatgtattaacctttcagcatgatccttacagtccacactaattctgagttacaaatctaagctctcagaaagcagagctttcaatctaactcattttgtttgattcaaaatcatgctgaaaagcttacattctatacataaatattaaaaattt

SEQ ID NO: 5726 - DNA, 239 bp, synthetic construct
  misc_feature 1..239: note = Description of artificial sequence: synthetic polynucleotide sequence
  source 1..239: mol_type = other DNA
atcccagctaggaggctgaggcaggagaatcgcttgaacccaggaggcgcgaggttgcagtaagaggagatcgcgccattgcactccaacctgcactccaacctgggcaacaaacaaagtgagactttatctcaaaaaaaaaaaaaaaagaaagaaagtaagttgaaaaatgtttcaaatggtgcaagtaggcttaagaagtccaacccagatgacagaatagcaacaaaggcatgcaa

SEQ ID NO: 5727 - DNA, 360 bp, synthetic construct
  misc_feature 1..360: note = Description of artificial sequence: synthetic polynucleotide sequence
  source 1..360: mol_type = other DNA
aaaagatccaccaccgtacctacaccaatcatgtaaattattcatagtatatgtaagccttaaaccacaactttttaagagtaaaaaaaaccaagctaagtttacttcaaatgggttacttaggaaatggagctatcaaatccttcctatgacattatgcccctactaaaataaataacaagcaaataaaatgtaatacaaagaaacaaacttcaaaaatcaaacctatcaggagcaacttacacttacaggatgcttagaatgtcaaccattgttctaagtacctctcacacactaactggatcttcttaactctatgaaagttgactgtccccttacactgatgaagaaacaaacaca

SEQ ID NO: 5728 - DNA, 358 bp, synthetic construct
  misc_feature 1..358: note = Description of artificial sequence: synthetic polynucleotide sequence
  source 1..358: mol_type = other DNA
ttacaggcgtgagccactgcacccagcaagactgcatcttattaaatggtgctagggaattcagcacaatgatatgagttctatcaatttcatttacccatgtaatcactcgacccatttagtacagacgctcaactatagatcataaacttgattagaaacacaagtttttggaaggatgatctacacggatcaagactaacaaaacagctgggaaaattccgcagattcagtcatctaagacagacccaggtttgaatcctagtgttcatttaataattttgtggccttgaacaagggaattaacttctttgcatctctgtttcatcatccacaaaaaaagcccaacactatctac

SEQ ID NO: 5729 - DNA, 477 bp, synthetic construct
  misc_feature 1..477: note = Description of artificial sequence: synthetic polynucleotide sequence
  source 1..477: mol_type = other DNA
ctcataggattagcctagggtataaacagcatagaaagcacctcacacctcctagagcatagcccggagcacctagtccctctcctctggctctatggttacagggcaattaattgcactcttaccgaatccaatcccagaggggtaaacagccaaatctctccagcatcagcgctctcagagtcttttctttttaacttcaagtttctattggtggcagagcaggagataccaccttcgtggtacctaaactgaacgatactcaacaattctttactacacagctctagggtcctagccctcctctactaccagaatgtctgagcataaagtataaatgtctcgtgttagctgctttccttttttgcatttcagtgacttatactgtaaatgttatttgtgaaatgagtccaattcacatgcactagaaaaatacaagttctagtgaataccaatgtttctgccatgcctctcccc

SEQ ID NO: 5730 - DNA, 478 bp, synthetic construct
  misc_feature 1..478: note = Description of artificial sequence: synthetic polynucleotide sequence
  source 1..478: mol_type = other DNA
tgacttcctaccattcacattcttctttattctttttatataaatgacaccaaaaattgaacaaacccaacaaattatttcaaccaacttcatcaaaatgtgtcaagtcaggaattctttataatagtactgctacaagttgtactagggagattcctttgtcagctactcgtctgacaaggttgtatatatactgcactgatagatttaatcaacaagttgatgttcaaaaggtctattaatacatttccttttatcagtaccccttatatttatattaccttctgttagcttgaaaggctcctagaacacaggaagcagttacctctaattctttcgggagactggtgtcatggtaatcatgcaaaacctttaattaggtgtcgagaatacaaatatcaaaaagattcttagacatacgtattaaaatgcttaacacttctttgaagcaaccaatgcaaaaatatcatctctgcaa

SEQ ID NO: 5731 - DNA, 477 bp, synthetic construct
  misc_feature 1..477: note = Description of artificial sequence: synthetic polynucleotide sequence
  source 1..477: mol_type = other DNA
ggggtcactccatttaccaccagtgtctcccacattaatacccaaagctggtatacgttaaaagaaaaatgtcataaactgacggtgagctttgcaacaatttttatgccattaacatgtcactttattaagttccttagcaataagaaaaacttttcccaggcacgtagttttcgtcccccatacagtttagtattttgtcctgtaggtcggattccaacaactcaaacgtcaaaaaaaatagtagttatttatgaatttaatgattgcgattacatacatctcagtgcaggatagggttgaaaaaaaaaatcatattccaaacaagaaaacctggatttaagagcaagaagcctaatcacacatcacacgcctaactgctctcaggcatactttcttcctgcagcccctcccccacaggtaaatgctaactatttctagaactctcaactatttgggaagcttgccatcaactcc

SEQ ID NO: 5732 - DNA, 477 bp, synthetic construct
  misc_feature 1..477: note = Description of artificial sequence: synthetic polynucleotide sequence
  source 1..477: mol_type = other DNA
catgataccacccaacccacaccatgttttcggggagacaaaggtgccctacttccccagactataaactattaaaatggtgagaacatacaatcccaggaagtcggcattactaaaatacatcaatgtagcatgggtcttattttaacaaaaatgaaaatgaatcacactggaaaacccaaacagtcactcattgtatcttcaacgtgtaatcgaaattatttattccaagttatttcaggtaagtagatgaacacaccacgagggccttattatccaaactggtgaagaagcctttaggaaaaacggagggggaagatcacttaattatatgaggtggggggtagagcaaccattcagtcttaaaattcaaactaaaaataacctggcattttcaccccccacattttattaacaagcttgtttagatcagcatacggttcctgtttggaaaacaagaaagtgaatagtaaactt

SEQ ID NO: 5733 - DNA, 477 bp, synthetic construct
  misc_feature 1..477: note = Description of artificial sequence: synthetic polynucleotide sequence
  source 1..477: mol_type = other DNA
tcctaagtcaactgtaaatcacataggtactaaaactcttcacccctggtgcctgcacagtccaagatttcaagtaaactccagacactgagaacacctaatttttaactagtttccaacatttctcatttgtaatcaccaaattatcttagagacacttagataacctaacaaagagagcattttttaaaagccacaacccaaattttacatgaaatacaccattttcacaacctaaatttaatcccggttgccactgcgaagtgatgcctgtttcagcaaattaagaacttccaaaaatactgaacacgttaacacatgcatggcttccctcgagctgccatttaagattaatattccacttaaataaaagtctgcttctgttcaaaaaattaaatcggttgcaaagaggaagttaccgagaaaccaccctcacaacgtggcctttacactgtcagaaaataacgtgactctgtg

SEQ ID NO: 5734 - DNA, 478 bp, synthetic construct
  misc_feature 1..478: note = Description of artificial sequence: synthetic polynucleotide sequence
  source 1..478: mol_type = other DNA
ccacccaaaacttaccaggaagctggcaataactttgccaattctacactcctgaacccaacttcaaagagcctccaccaaatacctccttaagacgataaaaagcactaagttacaaataaacacgtcccggagcaaggcccggctgccgcgcgcccctcccccggccggcgcccccgccccggacgcgcggccccaacagccgcccgcagcccccagcacgccggccggggtcgccgcgcccgggccggggacgcgcccggggaggggagatttccattgccgcccgaggtttcacaaaatagcatgcaccgaaaagctccttctcctctgctaaaaataggctataaaggagtcggcctcatgatggctccttgattcaatttgctgcaaatcctttcctgaaagcctccccccccaaacacacacgcacaaaaagggggtgtaaatgcacgaagggaggaagagggggagaagg

SEQ ID NO: 5735 - DNA, 478 bp, synthetic construct
  misc_feature 1..478: note = Description of artificial sequence: synthetic polynucleotide sequence
  source 1..478: mol_type = other DNA
ccgaggtgcacattttcggggacaacataattagggtgaggatcccccgagaccgggaaagggtaggggggtgggcaggcacgtgagcatttcaaagaaacctgagagaggaaaacggggggatgggggcgccccaagtgccctccctgccttcccttcccccacgcaagcccagttcccccaagggccaagttgaaaaatgcatgttccactcgcgcccatccccccgcggcccagcgcccccggccgcctctggcccgcgccccccgcccaggcccccggccgcccccactccagggtccggcccccagcgcttacctggaaacggtggcctccaacgccgctcccccctcccgggaatggaggcacaaggaaattcccctcctcgccgccgccgccaccgcctccaaccacccccaaaataacccctccggggggtgagaggcaattataaccccagcgagcggagggcgcgggg

SEQ ID NO: 5736 - DNA, 478 bp, synthetic construct
  misc_feature 1..478: note = Description of artificial sequence: synthetic polynucleotide sequence
  source 1..478: mol_type = other DNA
gatgggcgccgggcgggcgggggcggggagcgcggcgcgggtccccaggtggcgagcggaggtgctcccgccgcggggggaggggcgggggcgcacgcggccggcggcggggggaggcggcgcgcgggggaagggcgcgagcggggagaggaattgaggcagaaggtaaaagctgttactaagggaaagagccaaacggttcggagcagccaacggctcagacactcaacactggggagagaggaatggggaccagccaggcacaaatgagctcgcgaggcccgcggcggcggcggcggcggcggccgcgcagcaaaacaaacccgagcggcctgcgccgggcgggcgggcgagcgggcgggcgggcgcgcgggggaggggccggcgggggaggggcgccgcggacgccgggaggcggcggcggcgcggcgggggggctccagcggccgcgctcctctccttcccggcccgctctggc

SEQ ID NO: 5737 - DNA, 478 bp, synthetic construct
  misc_feature 1..478: note = Description of artificial sequence: synthetic polynucleotide sequence
  source 1..478: mol_type = other DNA
ggcactgggggctgggctgtgcggcgcattcttttaaaaatcaggcgagccccgcgggcactcgaaggcgcctcggggccccgggccgcccgccccgcccccaccgccgcgggccggcctgggtgtgctcgggtgtgggccgctgggcccgagacgggtgggggcggggaggcccgcgcggtggccggggtggagccgccggcgaagtttccccaaggacgccgcgggctcccgcgtgtccggggggcggcccggcggcgttgggggctgggcgcacacgcggcgggcatgtgggggagtgcggcgcggcatcatatggacatttgtttgtgaaaatctctgtgaacacctttgtgtgcgtaaatacatatggttctccgaagcgtacctggaaaggtgctttatctgtaataagcgactttcaaaatgtgatccagagcacgggatctggagagaaaacacgcacacaagaaaaggt

SEQ ID NO: 5738 - DNA, 477 bp, synthetic construct
  misc_feature 1..477: note = Description of artificial sequence: synthetic polynucleotide sequence
  source 1..477: mol_type = other DNA
ttttgatactaaacacaaagctgtaattgaagtatttatgcccaaatgtactgtgaatcaagcatatggtggtatttatcatctggtgggtctgtttgaaaggtttgctcgatcagttcttatttcacaaaaataaaataatgtaactaaatgtttactaaatatatacctgcacagtggcatccacagtagaagtttatccactttgtgtactttttgcatgtgtgaagcacagcaaggcggtttataaagtataacttagatgagtgataatgtggcagtatggttgagggagggttgtttttaaagaagggaggcacctcacaggttttaaagcaaatggggtggtaatctttctaagactttcagaaagatggggtagggtgctttttagagctttgtataagctcaggactggagaagcagccacccttttacattaagatacgacttgaaacctttttgttatttcgctta

SEQ ID NO: 5739 - DNA, 477 bp, synthetic construct
  misc_feature 1..477: note = Description of artificial sequence: synthetic polynucleotide sequence
  source 1..477: mol_type = other DNA
ttactgccttcaaagcaaaataatgtttgcagctttcttaaaggtgaagggttctgttttcctactttcatcagaatatttgaaaatagatgtagtgatcactttaaagcaaccatcatttcctctcaatatcagaaacctgaagttttgcgacacacacacacacacacacacacacacacacacacacacactactcgtaacttgcaccagtctggactcctggtggcctaataagttcagtaattagacaggtgctttcttggccaaggtcaatgtctctttcccccctgagcccttgcttgggggagctgccagaggcctttcctgaatgacctagtggggcagggagcaggaaaaccatcagaggaaagggagtgggattggaaactcccttccaaccaccagagagttcaaagcatattagtggtgtgtccttagagctattttcatgtatgaaagtgggaatgttggatt

SEQ ID NO: 5740 - DNA, 477 bp, synthetic construct
  misc_feature 1..477: note = Description of artificial sequence: synthetic polynucleotide sequence
  source 1..477: mol_type = other DNA
aaacaatgtcacccgatgggaatttagataactgcaggtttccaaaacactatgcagagtgtacagggaaaccgcacaaagcaagttttgcatttcaataggattctaaagctgaggcttgtttacctcagaactaacacctttcagaagactttatttcagaattgaaaagagtatatagtatcttcctttttttttttttgagttgataaatgacgtagatatcactaaacataccctgtcttcagtaagtaaactatctcggtggagccactcaatgaaacatatctattggcttagattattttttaagtttcatattgtgccaccacgggcgggtcctctccatacagcagtgactgtaaaatcaaaccccactttcagtgagtgaggacttctcaaccataccattcttaaagcgtcatattcaaagctgcccaccccaccccttctccttcccctaaatgacttctatcc

SEQ ID NO: 5741 - DNA, 360 bp, synthetic construct
  misc_feature 1..360: note = Description of artificial sequence: synthetic polynucleotide sequence
  source 1..360: mol_type = other DNA
cttattccacaagggaggagacaccctccttcaggttcataggatcaggtcttccagcctgaagttcttataccctacaccaagctgcctcctaaagttgttcagtgttagttgagcctcctcacaatgataataatccatgcatttgtttatatccctgtagtttacaagacatttctgtgcgtaaatgactgcatttaaatatgaagatcatcgaggctggggacttacaaatccgttgcagtaaaatgtactttactcaccactgttggatcatactaattgaagagagaggagagagcaggagtacattttttttttttaggtggagtttcgctcttgtcgcccaggctagagtgc

SEQ ID NO: 5742 - DNA, 121 bp, synthetic construct
  misc_feature 1..121: note = Description of artificial sequence: synthetic polynucleotide sequence
  source 1..121: mol_type = other DNA
tggagtgctttctccctgaatacctgttggttttctccctcagctctttcaggatatataacattcaaaatttcagctgtgatttctgtctctctttcctgctttgtatccaccatacgta

SEQ ID NO: 5743 - DNA, 121 bp, synthetic construct
  misc_feature 1..121: note = Description of artificial sequence: synthetic polynucleotide sequence
  source 1..121: mol_type = other DNA
attcatgcccagggctttaataccttcaaatatcaactgacatccccaaatttgtacattcagttgttgcctccttagtaaatctcagagctctattttcatctgcctctggatatctcta

SEQ ID NO: 5744 - DNA, 353 bp, synthetic construct
  misc_feature 1..353: note = Description of artificial sequence: synthetic polynucleotide sequence
  source 1..353: mol_type = other DNA
aatgcctccacgaccatcatcaggtgaactgtggggcatccacttgatgcccccaagaatcctagtagaatgtttactaccaaatggaatgatagtgactttagaatgcctccgtgaggctacattaataaccataaagcatgaactatttaaagaagcaagaaaataccccctccatcaacttcttcaagatgaatcttcttacattttcgtaagtgttactcaagaagcagaaagggaagaattttttgatgaaacaagacgactttgtgaccttcggctttttcaaccctttttaaaagtaattgaaccagtaggcaaccgtgaagaaaagatcctcaatcgagaaattg

SEQ ID NO: 5745 - DNA, 211 bp, synthetic construct
  misc_feature 1..211: note = Description of artificial sequence: synthetic polynucleotide sequence
  source 1..211: mol_type = other DNA
ggttttgctatcggcatgccagtgtgtgaatttgatatggttaaagatccagaagtacaggacttccgaagaaatattctgaacgtttgtaaagaagctgtggatcttagggacctcaattcacctcatagtagagcaatgtatgtctatcctccaaatgtagaatcttcaccagaattgccaaagcacatatataataaattagataaag

SEQ ID NO: 5746 - DNA, 121 bp, synthetic construct
  misc_feature 1..121: note = Description of artificial sequence: synthetic polynucleotide sequence
  source 1..121: mol_type = other DNA
gggcaaataatagtggtgatctgggtaatagtttctccaaataatgacaagcagaagtatactctgaaaatcaaccatgactgtgtaccagaacaagtaattgctgaagcaatcaggaaaa

SEQ ID NO: 5747 - DNA, 121 bp, synthetic construct
  misc_feature 1..121: note = Description of artificial sequence: synthetic polynucleotide sequence
  source 1..121: mol_type = other DNA
tatgttgctatcctctgaacaactaaaactctgtgttttagaatatcagggcaagtatattttaaaagtgtgtggatgtgatgaatacttcctagaaaaatatcctctgagtcagtataag

SEQ ID NO: 5748 - DNA, 121 bp, synthetic construct
  misc_feature 1..121: note = Description of artificial sequence: synthetic polynucleotide sequence
  source 1..121: mol_type = other DNA
gtatataagaagctgtataatgcttgggaggatgcccaatttgatgttgatggctaaagaaagcctttattctcaactgccaatggactgttttacaatgccatcttattccagacgcatt

SEQ ID NO: 5749 - DNA, 121 bp, synthetic construct
  misc_feature 1..121: note = Description of artificial sequence: synthetic polynucleotide sequence
  source 1..121: mol_type = other DNA
agctacaccatatatgaatggagaaacatctacaaaatccctttgggttataaatagtgcactcagaataaaaattctttgtgcaacctacgtgaatgtaaatattcgagacattgataag

SEQ ID NO: 5750 - DNA, 121 bp, synthetic construct
  misc_feature 1..121: note = Description of artificial sequence: synthetic polynucleotide sequence
  source 1..121: mol_type = other DNA
cctacttttttcttttagatctatgttcgaacaggtatctaccatggaggagaacccttatgtgacaatgtgaacactcaaagagtaccttgttccaatcccaggtaaggaagtatataga

SEQ ID NO: 5751 - DNA, 121 bp, synthetic construct
  misc_feature 1..121: note = Description of artificial sequence: synthetic polynucleotide sequence
  source 1..121: mol_type = other DNA
ttacataggtggaatgaatggctgaattatgatatatacattcctgatcttcctcgtgctgctcgactttgcctttccatttgctctgttaaaggccgaaagggtgctaaagaggtaaagt

SEQ ID NO: 5752 - DNA, 154 bp, synthetic construct
  misc_feature 1..154: note = Description of artificial sequence: synthetic polynucleotide sequence
  source 1..154: mol_type = other DNA
ggaacactgtccattggcatggggaaatataaacttgtttgattacacagacactctagtatctggaaaaatggctttgaatctttggccagtacctcatggattagaagatttgctgaaccctattggtgttactggatcaaatccaaataaa

SEQ ID NO: 5753 - DNA, 136 bp, synthetic construct
  misc_feature 1..136: note = Description of artificial sequence: synthetic polynucleotide sequence
  source 1..136: mol_type = other DNA
ggaaactccatgcttagagttggagtttgactggttcagcagtgtggtaaagttcccagatatgtcagtgattgaagagcatgccaattggtctgtatcccgagaagcaggatttagctattcccacgcaggactg

SEQ ID NO: 5754 - DNA, 121 bp, synthetic construct
  misc_feature 1..121: note = Description of artificial sequence: synthetic polynucleotide sequence
  source 1..121: mol_type = other DNA
taacagactagctagagacaatgaattaagggaaaatgacaaagaacagctcaaagcaatttctacacgagatcctctctctgaaatcactgagcaggagaaagattttctatggagtcac

SEQ ID NO: 5755 - DNA, 121 bp, synthetic construct
  misc_feature 1..121: note = Description of artificial sequence: synthetic polynucleotide sequence
  source 1..121: mol_type = other DNA
attttgtttctcccacacagacactattgtgtaactatccccgaaattctacccaaattgcttctgtctgttaaatggaattctagagatgaagtagcccaggtaaatgtatgtttgagat

SEQ ID NO: 5756 - DNA, 166 bp, synthetic construct
  misc_feature 1..166: note = Description of artificial sequence: synthetic polynucleotide sequence
  source 1..166: mol_type = other DNA
gatgtattgcttggtaaaagattggcctccaatcaaacctgaacaggctatggaacttctggactgtaattacccagatcctatggttcgaggttttgctgttcggtgcttggaaaaatatttaacagatgacaaactttctcagtatttaattcagctagtacag

SEQ ID NO: 5757 - DNA, 121 bp, synthetic construct
  misc_feature 1..121: note = Description of artificial sequence: synthetic polynucleotide sequence
  source 1..121: mol_type = other DNA
atcacctaggtcctaaaatatgaacaatatttggataacttgcttgtgagatttttactgaagaaagcattgactaatcaaaggattgggcactttttcttttggcatttaaagtaagtct

SEQ ID NO: 5758 - DNA, 173 bp, synthetic construct
  misc_feature 1..173: note = Description of artificial sequence: synthetic polynucleotide sequence
  source 1..173: mol_type = other DNA
gatctgagatgcacaataaaacagttagccagaggtttggcctgcttttggagtcctattgtcgtgcatgtgggatgtatttgaagcacctgaataggcaagtcgaggcaatggaaaagctcattaacttaactgacattctcaaacaggagaagaaggatgaaacacaaaag

SEQ ID NO: 5759 - DNA, 121 bp, synthetic construct
  misc_feature 1..121: note = Description of artificial sequence: synthetic polynucleotide sequence
  source 1..121: mol_type = other DNA
taatcaggtacagatgaagtttttagttgagcaaatgaggcgaccagatttcatggatgctctacagggctttctgtctcctctaaaccctgctcatcaactaggaaacctcaggtacttt

SEQ ID NO: 5760 - DNA, 121 bp, synthetic construct
  misc_feature 1..121: note = Description of artificial sequence: synthetic polynucleotide sequence
  source 1..121: mol_type = other DNA
gcttgaagagtgtcgaattatgtcctctgcaaaaaggccactgtggttgaattgggagaacccagacatcatgtcagagttactgtttcagaacaatgagatcatctttaaaaatggggat

SEQ ID NO: 5761 - DNA, 121 bp, synthetic construct
  misc_feature 1..121: note = Description of artificial sequence: synthetic polynucleotide sequence
  source 1..121: mol_type = other DNA
tacatattatttgaatttcagatttacggcaagatatgctaacacttcaaattattcgtattatggaaaatatctggcaaaatcaaggtcttgatcttcggtaggtaaccagtaaggcaac

SEQ ID NO: 5762 - DNA, 172 bp, synthetic construct
  misc_feature 1..172: note = Description of artificial sequence: synthetic polynucleotide sequence
  source 1..172: mol_type = other DNA
gaatgttaccttatggttgtctgtcaatcggtgactgtgtgggacttattgaggtggtgcgaaattctcacactattatgcaaattcagtgcaaaggcggcttgaaaggtgcactgcagttcaacagccacacactacatcagtggctcaaagacaagaacaaaggagaaat

SEQ ID NO: 5763 - DNA, 121 bp, synthetic construct
  misc_feature 1..121: note = Description of artificial sequence: synthetic polynucleotide sequence
  source 1..121: mol_type = other DNA
agatatgatgcagccattgacctgtttacacgttcatgtgctggatactgtgtagctaccttcattttgggaattggagatcgtcacaatagtaacatcatggtgaaagacgatggacaag

SEQ ID NO: 5764 - DNA, 153 bp, synthetic construct
  misc_feature 1..153: note = Description of artificial sequence: synthetic polynucleotide sequence
  source 1..153: mol_type = other DNA
gctgtttcatatagattttggacactttttggatcacaagaagaaaaaatttggttataaacgagaacgtgtgccatttgttttgacacaggatttcttaatagtgattagtaaaggagcccaagaatgcacaaagacaagagaatttgagag

SEQ ID NO: 5765 - DNA, 272 bp, synthetic construct
  misc_feature 1..272: note = Description of artificial sequence: synthetic polynucleotide sequence
  source 1..272: mol_type = other DNA
ggtttcaggagatgtgttacaaggcttatctagctattcgacagcatgccaatctcttcataaatcttttctcaatgatgcttggctctggaatgccagaactacaatcttttgatgacattgcatacattcgaaagaccctagccttagataaaactgagcaagaggctttggagtatttcatgaaacaaatgaatgatgcacatcatggtggctggacaacaaaaatggattggatcttccacacaattaaacagcatgcattgaactga

SEQ ID NO: 5766 - DNA, 121 bp, synthetic construct
  misc_feature 1..121: note = Description of artificial sequence: synthetic polynucleotide sequence
  source 1..121: mol_type = other DNA
gattcatgccctacccaggacatttcctttttgtggcatgtgagcagagccgttaccaacgctaagatttactgctttggggatcggttcagaacaaatgttccaaacagccgtctgcctc

SEQ ID NO: 5767 - DNA, 303 bp, synthetic construct
  misc_feature 1..303: note = Description of artificial sequence: synthetic polynucleotide sequence
  source 1..303: mol_type = other DNA
gtcagacagacactgctccgggcacgatcctgcggatgtgggtgtacgacttcctgatggtgacgctgccgtggtgcgacacgccccggggcaggacgcactcctctgtcagtttctgggcctcggggtcccagcacagcaccgtggcgataacctcgttcttctcgtcccgcccgccggtgatgtagagccggttgttgcagggcgcgataccgcagctggcccgctcgtggctgagctgggtcaccaggcaccagctgtcttccagcgggctgtaggcgtacagcgctctcatggccccac

SEQ ID NO: 5768 - DNA, 215 bp, synthetic construct
  misc_feature 1..215: note = Description of artificial sequence: synthetic polynucleotide sequence
  source 1..215: mol_type = other DNA
ccaacgacatagatgcggtcccggaaactcactgcattgatgcatttagcctccacgggcatggccgccttcaaactccacttgttggtggaagggtcataacactgagtcttgtctgtggccagtttcccattgggccctcccccgatcacatacagcttcttcttatggctggtggctgcaaaggaactgacatggacaaggaggggtgcggc

SEQ ID NO: 5769 - DNA, 204 bp, synthetic construct
  misc_feature 1..204: note = Description of artificial sequence: synthetic polynucleotide sequence
  source 1..204: mol_type = other DNA
cctctgaccagcagttgtgaaaggggtcgtaggtctccacattgttgattctctgtaagccgtcaaagcctccgatcacatagaccttgccacccaacaccaccatcttatgcctccagcggcctatgtttaaatactcaatctgaatccacttgttgatcgaagaattatatttccaaacatcatgctgtgtttctttgccac

SEQ ID NO: 5770 - DNA, 239 bp, synthetic construct
  misc_feature 1..239: note = Description of artificial sequence: synthetic polynucleotide sequence
  source 1..239: mol_type = other DNA
cctgagatgtagacctcatttttcaatgtcacgcatgcaaactccacccacttcttattctcactctccagctcatgctctgttagcgggagcttggccacctccaggcggctgcgcctcagggggtccaggcaggtcacctctgccacaaaccgttcatccttcgtgcagccgccaatgatcatgaacacctcagactggaactcatgcatcctgggcttggtgcgttccgaaatgat

SEQ ID NO: 5771 - DNA, 451 bp, synthetic construct
  misc_feature 1..451: note = Description of artificial sequence: synthetic polynucleotide sequence
  source 1..451: mol_type = other DNA
cctcattgccagaaaggtggtacatcctggcttcctggagcagcgggaagacctctgggcactgcctgatgagaggatctgcttccaccgtctccacaaagtaccacgggtccagaagcggtaagcgcacgttctcgaggacataggggagtaagcagagtcgttctgatggcttgtgccggacccagctcatcacggtctcaaacacctgagcctcctcggtcacgtaaaggtcatcactcttcaagatgtggtgcagagtgtccacgggcaggtcaagaaactcctcagagttcagaatctgcacaaagttttgaatgatgtaactctgaacctgcttctttagactgtccagcgagtgtgtgtcagccagcctcagtattccaacgcagttttctgggttcaaggcttcagtgaggaagctggcacaggcatccaccatccgcaggaa

SEQ ID NO: 5772 - DNA, 167 bp, synthetic construct
  misc_feature 1..167: note = Description of artificial sequence: synthetic polynucleotide sequence
  source 1..167: mol_type = other DNA
cctggaagaggttagcagcctccaggacccgctggacattctgcttggtgatcagcgccttgctggtgtacgtgtagtccaacagagtgtgcatggtctcagcatcaacccctttaataatgatccttttctcatacttttcctttaaatcgttgcagaacatggcc

SEQ ID NO: 5773 - DNA, 294 bp, synthetic construct
  misc_feature 1..294: note = Description of artificial sequence: synthetic polynucleotide sequence
  source 1..294: mol_type = other DNA
cctgaaatagttgctggctgcggcaagcaccacgcggtggcaggagaattcctgaatgtccacacacaagatgacatctgtcagagcgttttccattcgcagggtttccaggccattctgaagaattaaggagagtcccgcgtcgtcaaatttgaccttttccccatttaagatctcgaccaagtctcctgttttctgggagggctcatctgtagaaggtgccaggggcccttccaaactcttctcgaccacatcacccatggtccaggcgcccctttgtcctgccatcaacat

SEQ ID NO: 5774 - DNA, 121 bp, synthetic construct
  misc_feature 1..121: note = Description of artificial sequence: synthetic polynucleotide sequence
  source 1..121: mol_type = other DNA
aacttagtggattaacatctaaaggctgagcaatgaacaaagacagggcttgacttttatttatgctgctgaagtggagtggctagccagtggcgcaaaatttgcagggcggggaaaccag

SEQ ID NO: 5775 - DNA, 121 bp, synthetic construct
  misc_feature 1..121: note = Description of artificial sequence: synthetic polynucleotide sequence
  source 1..121: mol_type = other DNA
aagtgcaaaacagtcttctaggtgggaggcaagagacataaagaattacagatttccaggtcaaccccctcctttttcagatgggaaaaatgaagtggagagaagtgaagtgacaagtatg

SEQ ID NO: 5776 - DNA, 121 bp, synthetic construct
  misc_feature 1..121: note = Description of artificial sequence: synthetic polynucleotide sequence
  source 1..121: mol_type = other DNA
aatgagctgccagcaggctgcctggtgactgtggccttatgggaatcaggatgtttccaggtcaaaggctgcaggagttcctgtctctttgctcctcctcagcaagggatctgcaacatgc

SEQ ID NO: 5777 - DNA, 121 bp, synthetic construct
  misc_feature 1..121: note = Description of artificial sequence: synthetic polynucleotide sequence
  source 1..121: mol_type = other DNA
gctaatgaaggtcatttaatcaaccagatgactaaagctgttatctcccctatagtgtccaaacaaactctctgcccagacagttccagggaaaggaaacccagtcacttttaagtcaatt

SEQ ID NO: 5778 - DNA, 121 bp, synthetic construct
  misc_feature 1..121: note = Description of artificial sequence: synthetic polynucleotide sequence
  source 1..121: mol_type = other DNA
ttccagatccccttgtccacgggtggtaactttgttggtccatgtggctggcctgatgtagtgaccagactttgatctctgaggggcctgagcttcatagccacgactgctgcacttccat

SEQ ID NO: 5779 - DNA, 121 bp, synthetic construct
  misc_feature 1..121: note = Description of artificial sequence: synthetic polynucleotide sequence
  source 1..121: mol_type = other DNA
gaattcctcacctggaattggtgctgtgtacctcgcaaaccaagccaagaaccagtcagctgaggcaaaagaggctaaggggagtgggtatgagaaattagggcccagtcgagacccagat

SEQ ID NO: 5780 - DNA, 145 bp, synthetic construct
  misc_feature 1..145: note = Description of artificial sequence: synthetic polynucleotide sequence
  source 1..145: mol_type = other DNA
ttcagcaggctttggggagctccggaggcaggtcagtggctgacacgcggtattgcaccttggtgttggtgatggcgccatgcttctggcgcaagtgaagtcgcagctggcttttgtgacggaaatgcaggttacacttctcaca

SEQ ID NO: 5781 - DNA, 139 bp, synthetic construct
  misc_feature 1..139: note = Description of artificial sequence: synthetic polynucleotide sequence
  source 1..139: mol_type = other DNA
catggtaaggtttctctcctgtgtggattcgcaggtggctcttcagagtctgaaggtgccggaaacgggtgccacagatttcacagggatagggcttctcaccagtgtggataagcacatgggcacggaggtgggccac

SEQ ID NO: 5782 - DNA, 121 bp, synthetic construct
  misc_feature 1..121: note = Description of artificial sequence: synthetic polynucleotide sequence
  source 1..121: mol_type = other DNA
caaatctggctccgcaggtttcgcatttgtagggcttctctccagagtgaattcgagtgtgggttttcaggttggctggccggttgaactgggccccacagatgttgcaacgatagggttt

SEQ ID NO: 5783 - DNA, 169 bp, synthetic construct
  misc_feature 1..169: note = Description of artificial sequence: synthetic polynucleotide sequence
  source 1..169: mol_type = other DNA
ccggtatggacggtcttgtggctggcgaggttgcccttgtagcggaaggaggcctggcagcggtcacacttgtagggtttgtcactgtgggtctgcagcgtgtgcctcttgagtgaggcctcctcagagaagcggcagtcacactcattgcagaagaaggccccgttct

SEQ ID NO: 5784 - DNA, 186 bp, synthetic construct
  misc_feature 1..186: note = Description of artificial sequence: synthetic polynucleotide sequence
  source 1..186: mol_type = other DNA
ccacagctagaatctgagtactcagactgggtctctcccatctcctcagggaacgtggggccagcggtgtggaggcacatctctgcatgctgtggggactgagagccgcaggacgtgcacttcggggggtgcatgtagagtggtgagtggctctcgctgctgctgcggggagagcccgtcatggac

SEQ ID NO: 5785 - DNA, 121 bp, synthetic construct
  misc_feature 1..121: note = Description of artificial sequence: synthetic polynucleotide sequence
  source 1..121: mol_type = other DNA
cctgttaacgatgttattgagccggctggcttgtgggatggtggagtcctccccgctggcactcagcttggttggggactggaggtcaaggttctcaggctccatgggtggctggcaggca

SEQ ID NO: 5786 - DNA, 121 bp, synthetic construct
  misc_feature 1..121: note = Description of artificial sequence: synthetic polynucleotide sequence
  source 1..121: mol_type = other DNA
gtggggccgtgtaggctcgtggggaaaggcggcccagctcagcctgctcaggcccctctggtttggcattctggttgaggctgttgagcacgatgaacttgtatttcttccagttgcaggc

SEQ ID NO: 5787 - DNA, 121 bp, synthetic construct
  misc_feature 1..121: note = Description of artificial sequence: synthetic polynucleotide sequence
  source 1..121: mol_type = other DNA
tggggtcagtggggctcttggctggaggggagccagaagcctggaggatgcaggcattcttactgctgcaggactctgtgggcgagttgggctggcagtcagatttctgggggctctgtgg

SEQ ID NO: 5788 - DNA, 121 bp, synthetic construct
  misc_feature 1..121: note = Description of artificial sequence: synthetic polynucleotide sequence
  source 1..121: mol_type = other DNA
actaaccagacccttccggttcaggggtgcattggggggctcgaaatgcagggcaatctcatcttccgaggagggtctctcttcttctttgctggccttgtcacaagggaagtagggggca

SEQ ID NO: 5789 - DNA, 121 bp, synthetic construct
  misc_feature 1..121: note = Description of artificial sequence: synthetic polynucleotide sequence
  source 1..121: mol_type = other DNA
ttcgggctgagggggcagcaggtttgaggccctcagccacactgtagtgcatatcacttcgtgcctcttctgggattgtttccttgggtgaatagatattgctgtggcacacattggggga

SEQ ID NO: 5790 - DNA, 121 bp, synthetic construct
  misc_feature 1..121: note = Description of artificial sequence: synthetic polynucleotide sequence
  source 1..121: mol_type = other DNA
cacctccaaagtcggccggctgtactcaccagggactggcctggcactatcacatgggagtgcccgctccttggggaaggggttggccacaggcatccggacatcccgaaactcctcatcg

SEQ ID NO: 5791 - DNA, 121 bp, synthetic construct
  misc_feature 1..121: note = Description of artificial sequence: synthetic polynucleotide sequence
  source 1..121: mol_type = other DNA
agaagaggaggctgctgacagggaggtggctgtacatggaataagaggctggcggtgtggacaggccactgtacaggctgggggcaaaggctctgctctcacacccaggggcgctcctcag

SEQ ID NO: 5792 - DNA, 121 bp, synthetic construct
  misc_feature 1..121: note = Description of artificial sequence: synthetic polynucleotide sequence
  source 1..121: mol_type = other DNA
tggcaggttgttctccaccacctcacgaccccgataggccatgatgtcttggggcatcagcatccggctgttgaggaactcttcacgaggaggcttgatggcagaaaccatctctgcttca

SEQ ID NO: 5793 - DNA, 223 bp, synthetic construct
  misc_feature 1..223: note = Description of artificial sequence: synthetic polynucleotide sequence
  source 1..223: mol_type = other DNA
cctggccttaataaacttccggcaagtgtccacaacatgctccatctgcaggtacatagccgtggccatcacagccatgatgttgccctcccgcaaattgagccgagatgtgtacatgaagtccaggaggatgcagaatccctcagggttgatctcaggatctagattgatcacactaaggttgcatttcaactggtctgtaaagatgctatagaacaggcca

SEQ ID NO: 5794 - DNA, 162 bp, synthetic construct
  misc_feature 1..162: note = Description of artificial sequence: synthetic polynucleotide sequence
  source 1..162: mol_type = other DNA
cctgcaggccatgaggaccgttttatgggctctaaactgctcacggctcacaacaatgacaacatcagtcaagatgtctcgactccggagacgattaaggttgagaagaacatcactggcatggcgggtgaactggatacagctgtcagccggcgaggccat

SEQ ID NO: 5795 - DNA, 7981 bp, synthetic construct
  misc_feature 1..7981: note = Description of artificial sequence: synthetic polynucleotide sequence
  source 1..7981: mol_type = other DNA
cccattttctcgctcacacataagagcacaaacaccagccctgcgcgccggggcaagcctaggcagacttcgctaccccaccccgaccactccgtacctgtcttccagggactgcccgcccctgggcgatccacctcgaagccccccgcaaggcgcgacggaggctttgtggtatgaccgtggcggcccttaatttagttacattcaaataaaacttttggtgcacctcggtagctaacattgtgtgtatgcctttttttttttttttttttttttcctgttacgccgtcaatgcagcaggcaatgaggggaatgacacagccctctcattcccggaacgtagtcaatctcggctctgcggatttcacagaacacactttgcctattgccggctccaacaagaagtaactttccaggaagctgccggccccggcagccgccaggatcgctgcctgcgctgcgctggccgccggggattcacccagggaggcggggccgctggggaaggctcgcggggaatacagcacactttcccctaaatccctcgtccgcgccgagtgcagggctctcagagttcacctagtcccacctctcacccacaacagtttataaatggggaaggtcagacaagttagtagcagagctgggtctagaacccaggagttcgaatacaatccgaggctcatatcgagactttaagttgtccgattccgaagtttatttgcttttttccctctttttgccttccattctccctcacccccgttcttttaggggaatgtttgagcgagacttcaaggtcaaaagatggagtccctaggggctgagggtctccatcataggcgccccaggcaaggttggagaaaaactaaacagaaagccccttccgcctacgttggcaagaacgggaacccagctccacttggtttccgcccaaagtctttagaacaggagctgccaagccgtaaggatttccgaatccgatttccccgaaaccgtagagacacagcttggactcggcaaaggccggggccccgacccctgcgcgcgcactggcactctccaaagttgcctcgccttcctgtggccctcccgggaattataacccccgggtgccatgtcctaattggtctcggtagcaggctccggggtgcgctttcgggggctaggggacagcgaaagactcagccacaaaggccgcagtctggtcctaaaactagccagtggcgtcacactgcgccgctcatcccttctgcggcaagcggaagggtcagagtcggtctgcaaagaacgagcctttggcctcaaaatcctacattgaggctttctcaccccttcgcccggtgggataaaggtgaaagagacggttgggatttaataaggggtagggatgagaatctgggaagttaaaatgaagtaagtgcatttattggaaattaggagtcccgtggttccgggagctcaaaccgaatggtgtttttaccgctgcctaacgctagagagagccctccatcaaggtttgaaaccgtcaacccctttctcgcccctcccctccttcccattgacctagtttggccagagcctcccgatttggagaatgccttccgcccttcccccctcctctccagccagagaggctacagaggctgttggattattggtaatctaataactccaataacccgctgaaaaatccaaagggaaatctgaaagtgtaaagcactgtttagggacaaggacaaggaattttaataaggctgcaactgccgtagtgaaccccgcatcaggggccctgccgtggggctcccggtctcagcagtgtttcagccaactagctgcacggctgcagacaccaccgtggtccggcggcagggggtgaggtcaaatcgcggagctgtttttattcttgggggaaaacactcttcgccctcttggctggggaacgggagggtgcaggagacgacagtaaataaaagcgaatttgataacgcgatggcctcgacagccgctttggataaccgaggtgttcggggacattgtgtcctgactttcatttctatcacgtttcctgccaacagtgctcttgcaagcctgcaagcttctaggaaatgcaataaaacagagggatgtgttttatcatcaagatctgaagaggagttgcagaagggacgttccccatacgctcagcgcgagacagccttccagaagggcccgaagacaatgccagcaaatcgcgtcccggagcagagatccctcggccgtcctggctggactgggctcagcctttgcaaaaaggctggcgggggaggggagaagcatgatctcctcaagcaaacaatgcctttaaaaatccgatctggaaagaagtcagccaaggtccttattcacgttaatgaagatggaaggcactaactgtccttggaaagcgatgagtcaaacttgaccgcgcttcaaactcgttcccagattcgtttccagtccgaacagaggcgcgtttctccgacgcggcctccgacggctcccgcagtgggaggggccgaactcgatccccgccgacccgggcgggggcgacggcgctgtctccccctgcagagcgcgcctgctgccgctaggggccgccagcatgcggacgcgcgtttgccatcttaagtcacgagctcggagaaagaaaactttacggaggaactgttgtggcacaaattctggcctatccacatgacccccaccccctcacacacacacacccggtttctcgccaggctactatgcagaggatgttaggaaggggaagagagcgatttcagaatcgaggctcgccctgcaagtctttggtccaggccttaacccccctcttaacacgcaaacccccgagctccgagacccacacccttcagcaccatctgggcttttcgtgtcattaccgaaaatcttaggccatattttctttaaaaaaaatcctccaagactgctggggagcggtttccaatgaacactggcaacaaaggtgacctaagaggttaaactcatggttctggcagccgctcctttctcataaatacttctaaggagctgagataaacccgcctttggctttcagtcactgacatgaaattcagaagcttaaaatctggtcctggttaagtcactaactcaccactaacaagcctcctcgtcgggcctgtttcctcaactgcaaaacagagttgtacgtcccaaagcccctgagctcctaggtggcatccttccactaccgacttcccctaagaggggccacagggacaggaagatggtgtgttcgaagcgggttatttgtggtttttcttagtgcaaatagatgctcatcgctgagtgatgggcaagcagcgaggcctttctgattttcatccctcttgccaaaactttggaggttgtatgccatccccattggagggtgccctccttctgtcagtcctagcatctggtcagggtaccgccgcccgggaggtggaacggcgagcccaccgcccatggccgcgaactcgatctcagcccaccgctaggtggcaggccagcccgtccgagaatcgccgcgcggccgcagcttccacaccgatccctacccgcccctctttattttctgtctggtgggggcgagggttgggggtgtgattgcctctaaaagcaaagctagaaaacatttaatttagtgtatgtaattccgttcctcccgatgctcccgcctctagcaaccacaacgcggtatctggagctggtttcatgtatcataagttgatttctcccccagcctccgaaaagctttatgtactgggaagggaaagaaggtgcacttgtcttcaaaaggcagaatggcactcgacagtattggcagagattcttgccaaacactggtcatccagcaaagaaagtcgggaataaactcctgatcttctcggaggaaaggggcgctgggggccgagtgctggatcccactcaggctcactgcgcctggcaaagcgggggagtggggagtcgggtatggtcttttggtgaagttgtgggtctcggagtggacatcgggagggttgggaggggccgttcctggtttccactggggcaaagagaaaccagccagttctgccaccacgctgcaccctcgctgtgctcgcggcggcagcggcggtcccacttgttgcgcagtgctggaaaccggcacgcgccattcgatgttgattcacagagggctacagaccagcctaccattgctccacgccatccacaaacctcctcaacacaccccctacacatacgtcctgccaccgccggcaaaactacagcatttccagccactatggtgttttacaccaaaacatccctcactatctcggtatcagacaggcagcagaattaagatgccctgagaagtcaatccaaggggaaggccgggctacctccgcctggagaactcttctacttaaaatcaaccaggcaccctccccccaccaaaaaaaaaaaccttagaaccacgttgcctattataacaccatcctagttggaaagcaacatttttcttccctacttgataaacttcaaagtcctttttatccgttagttttatctcccctattttttttaaatctctgggggaaaaatgtttcataagttcacttcccaatatttttcaaaaattgacttttgccaatagtttcacccaccgaggggtggcgctgctgcaccgcctcctctatatctcttaagtttttcacaacaaagtgggttgtgagtgtcattaccctgtaggggatagagggaaggaagggttttgacatctagccgtggctaccatttactcaaccaataactggaactcttcaagggctcagcaaacgacaacttaagcatttagagtcccatccctatccaccaaacccagaataagttagtcttttcaagaaagcattggtataaaacccttcaaaactgaaaagaagaaaggggcaattggagaattcccactttttctggctgtctccttcaagtcgcccagtttttatgaacagcatctagccttactgtcactatcaacaacccttaaaactagccaatgcttcggcctctagtattggaaagtcttccaaataggatactggaaacttctatttataagcttggggtggcgggcggggcggggaggtggagagagagttgccatctacaggtttctattttggcctgaagactcaactgcagtcattagagtaagggaatgcccatctcctggtacttgttcgccatttcctcctcccccagagacaaatatcttttcgtcttttttaaaaaagtatatattttaaagcaagaatgtgatttcatctctcttctttgagctcatgtttgctacctccaggaatagcgtgtggactagggccagatgaacttcaacttgggctgcagatttacgaggttctgttctagtgccaaaggctcttggtagtaaatagtgagcaaaatagatacctgtctcctgatggatcttgccgccccctctttttttttttaagttatttattaaaaccacacacaccttgcaaagaaaaagggaaactggcagtctctgtagaggaagccggtggcatcgctcagagccacaaactgtatttctaaacagccctttccctggttccctctctcctgccccactttttttaaaatccagactgtaaaaaacacatctactgacactcactttactttaaaaaaagaagagaaaaagtaaagcgttacaagactttcctcctggaaactataaactgaaaaaaaaatccataaaagattaaatcctggcgggttgtggggtggcgggggccggcggggagggggcgcggagtggagattggctctctgaggtggtcaggggccctgtgacagcttgggactttcagcacctggtttggggtcatttatctgctcaactgtcaggaccccccacccccaaaccccagccaccaacacaaccatcgtagaagggaacacaacacagagggtcttttttcatttttttaaaaaatcggtttggttgtgtttttgttttccatgggggagctttaaaactcattattgcaacactagttccatttttcgccagggttccaataacacggcatcataaaggcaacgcaacccacagttctcaagacatttaccacggtcactacatccggcagcggggtggcccctagctcctgctgcccccccgccctttctccccgcccgcccccggagctcagccgatttctgaggctccaactctacccactccctccccgggccgccgccgccgcgccttcccccattcttactccctcgaggagagccacaggttgcaaatccaaccaacctcgcaatctatttttgcaaaatcactcacaaagatctccctttcgcgcccgcgcccgctcctcccgcgccgggtcccctcagccacggccacaaagtgcccttctctcctcctgagtcttgcacataaggaacgcgggctggggctctgttcgtctttctcctcgcccaaggtaaggacctcgggaatctgaagcctggcgtccactacgctcaggcccgcagttccctttttacagagcttgcaccatgggaaaaaataaaataaaatttaggaaagggaggcaacagccattgggagccaacacagagtcacgcagcgcccaaaatacaaacaccgcagcggccagaaatcccgccacctttctcgttctcccaggctgtcctgtcgaggttccctgagtccccccgcacactgaaaggcatcgcaggtgcagtgcgcacccctttcccacccaccccaagaagccctgtcccgccatcagtctctctcctcgggatgagcagggagagcgcgcggaggttcccgactccctcgactacaaccaagaaagaataattttcaaagtgttcaacatccccgcccccaagctccccaaaacacaggggcagggaacaccaaaacactcggctctcattaggaagatcacggctctgaaaggaaatagtagacacgatacttcatctcatctggatttatgaccaaaaaaacaaaaacaaaaacccaaagagttcgcttgcattttttccttccaaatctcggttcggctcgaaggcagggaatctaaaagaccgaggccgatggaagagagccagcggggcgagcgagcgggcagcctccctttttgcctcccggagttacccagaaggacaggggaagggaaggaagaagaggcgaggaaaaagaggagggagggaagcggaggccaggagcgacggagcaaggaaagcagtttgcaagcgagaaaagagggaaaaaacacagccgcacgaatccagagagatcacaagccgtacgcaagcagcagcagaaagagcgagagcgcgagcgcgcgtcctctccgcggtctggggccagacagcccccagactagcccgaatcaccccccaagcactgtctcgtcctctctgctccggccgccccctaattcccctccttcctctcctccacctcctttccaaaaaccaaaacaacacaagggagggtggcaaaagcctccccaaaccggccgattcactcaaagacaacaataataataataaatacataacaatctatatcctatggtgggagagacgtgggactaatcttcggcatttattttaacacctgacagctagaataaataaatatatacatttatatcaatagatacacatagaaaacttggagccaaagcatttggcaagagcggaaaaaaaaagaattaaaaggtaaaataatgatcatgagcagcggcggcggcagcggcaccagcggcaacagcggcggcggcggcagtagcagcagcagcggcggcagcaacagcaataatcacctggtgtccggcctttcctagaaacttcttgcatcaccacttctaagaaccccagttctaagaatcaacag

SEQ ID NO: 5796 - DNA, 235 bp, synthetic construct
  misc_feature 1..235: note = Description of artificial sequence: synthetic polynucleotide sequence
  source 1..235: mol_type = other DNA
atggcctgctccgccaccatcacgtgggctcctcctctgtgacgtcggcgccttcgctgtagcaaagctcggcctctggaattctgagaactaatttgctattcggtgacataagagggggagtgcgctttgctttcccggggtctggggctaattccttctttcttacccataaactcagcagatcgagctaaatgcacaaaagggagcgagaggtttgaaccactgggaaaag

SEQ ID NO: 5797 - DNA, 474 bp, synthetic construct
  misc_feature 1..474: note = Description of artificial sequence: synthetic polynucleotide sequence
  source 1..474: mol_type = other DNA
tatgttatatatatagtagggttagagaggcgagtaagagaaaaataaaataaaataaacatcacagctctttccaactagaatattaggcaccacgagaaaaatatttgccaagcagttttcggtgggttcatttgctttatttttatttaggacaggggtttttgctgttgttctgggtttttttctttctggtgtggtggcttgggatttttggtttctgtattttgatggtttatggatttttgcttctgattttttgccttttgcaagtttgtggtgttacgtaaatcacaggatcggcatcggttggatttttttgtacgtgccttttctttccctatctaatccctcaagcgttttaaagatgtattatttcaatactaatactattgaaagaagcttaaatttttggccatatgtaacaatcccagcccccactttttttttttttttttcctttggtgcaatttt

SEQ ID NO: 5798 - DNA, 474 bp, synthetic construct
  misc_feature 1..474: note = Description of artificial sequence: synthetic polynucleotide sequence
  source 1..474: mol_type = other DNA
ctttttcccccttggacttttgctgaagtgtgtctctcctgcacttcagagaaatgttcaaaggatttgttttggtttggtttgtttctttccaggacagcaagtggtgggtttaatctgttattgttgactcttgggaaatttcttgttgcaagaaacgtgtgtgtgggggggagggtgggggtggcggggtggtatgtgtgtgttttctacaaaattctgtgagccaaatacctgtttgtgttttgttttctcttaaggtcttgagatttttgttttcgaggctcgtttcaaggtcgttgtaaaaaaatctcttcagtctgtgtttaagagatcagccggagggaattctaaaggcctgccgtgccagtatcacagatactgcctgtatttagaacagactgccacaactacaatgcactacacgcagcacagtcttcttagctttgaagctgagttggggggtggggtggg

SEQ ID NO: 5799 - DNA, 474 bp, synthetic construct
  misc_feature 1..474: note = Description of artificial sequence: synthetic polynucleotide sequence
  source 1..474: mol_type = other DNA
gggggggtagagaagaaggagaaattctttccttctctttttctctattactttctttttaaaggcaattgcagtgcagaatcatttcattgtgggtcctagtttgtttgttcagagctgctagtttccttatttaaatgttggttcgggttttttcccctcctactcatccctgaataagggagactcttgtttcttttatgtctctctcttaaaagaagggtgtgaggggaaaataatatttcagattcctcaagaattagcccaaaatgtttggaccagaagcagctttcaaaggtcaggctgttctgagccttggctatgagagtccttcaagcgacttattaaattacagatgaattcttaaagcttccacaaaatctcgtcacttgttaatttctaataaagatatgtctaaaataatctacctatctcaacccaaaatttgggtttataatggaggagtgatcagag

SEQ ID NO: 5800 - DNA, 472 bp, synthetic construct
  misc_feature 1..472: note = Description of artificial sequence: synthetic polynucleotide sequence
  source 1..472: mol_type = other DNA
ctgtgaaagattgctgtttgctgggatatttggaaaatctctttcattgacagtcccgtaagaagttccatctatcaccgaaaatgttgttggcaatgcacccccctaccccacaacacacacacatttttaaaggctgtattttaggttttaaaacccagaaaggtgcaaagaggttgattattttccacaagggctggagcttaggaaatatgcgttaaagtgtctgtccctgtgaaatctgaatattttaatacttattgacagatggattactgcagcctctgcagaaaagcctgtcttgtgaacggtttttgaaaaatatacataggcctaatcctgtcactgttgttgaaatgtacgttttacccccaaagacacatgatattgtcaagttcagatttattctgccagaaggcagactatctgctttttcatttgagtccccttccttctcattttcaaagaaatt

SEQ ID NO: 5801 - DNA, 358 bp, synthetic construct
  misc_feature 1..358: note = Description of artificial sequence: synthetic polynucleotide sequence
  source 1..358: mol_type = other DNA
aaaatgaatcccgctggatgcaaaatgacaccccgattttgtggaagggattttctttgtgtgtttatatgtgtaattttttcttttatgagcaattagcactttaggatttctcagacgtatctatatggtttggaatgtgaattgtatggctctgccttactattgggccctcaaaagattatttttatgatttttggtcacttttttctttgtcaaaactgccattcagcctcatccaccgcccccctcaacctgaaacacagcttgtccctcctgtgttccctttgccactccactcttagccccatgggggcgctgcagagcaaagggaaatctgctctctaaggcagtagta

SEQ ID NO: 5802 - DNA, 121 bp, synthetic construct
  misc_feature 1..121: note = Description of artificial sequence: synthetic polynucleotide sequence
  source 1..121: mol_type = other DNA
aaatgaaaaatgacagctgagattggagcatgctggcctcattccatctagggttcttcagtccatggggtggaaaatgttacatcgtccttacagtgatggtcaagggtttttaagtagt

SEQ ID NO: 5803 - DNA, 121 bp, synthetic construct
  misc_feature 1..121: note = Description of artificial sequence: synthetic polynucleotide sequence
  source 1..121: mol_type = other DNA
gtgatctgaagcaagtatctgagcctaggtttctcatatgtggaaaatggagattcaatggagctgcagagatggtggtaaagaaattttttctctttttctttttcttttcttttttttt

SEQ ID NO: 5804 - DNA, 121 bp, synthetic construct
  misc_feature 1..121: note = Description of artificial sequence: synthetic polynucleotide sequence
  source 1..121: mol_type = other DNA
ttattttttcttcctgagacttctacatttgtttttttctagccatttatattaggctcgcaaattgcatagtgatagctgattgaccccttcaaaatgcctgttttctgcctccttgtct

SEQ ID NO: 5805 - DNA, 121 bp, synthetic construct
  misc_feature 1..121: note = Description of artificial sequence: synthetic polynucleotide sequence
  source 1..121: mol_type = other DNA
cgctattatgaaggctactatgcagcagggccaggctatgggggcagaaatgactctgaccctacctatggtcaacaaggtcacccaaatacctggaaacgggaaccagggtacactcctc

SEQ ID NO: 5806 - DNA, 121 bp, synthetic construct
  misc_feature 1..121: note = Description of artificial sequence: synthetic polynucleotide sequence
  source 1..121: mol_type = other DNA
agacaagaaggttgccctaaaatatacactaagacagtatgcattacaaaaaagccacaataaggacatagcttaggagaaatgttatgatctctcttcaccagtctccttatatgacact

SEQ ID NO: 5807 - DNA, 121 bp, synthetic construct
  misc_feature 1..121: note = Description of artificial sequence: synthetic polynucleotide sequence
  source 1..121: mol_type = other DNA
ttttcttctctttttttctttctttttcacctgctctgccagtgttgtgctaggcactaggaaacaaagacatgtgaaacatcatatctaacctcaaggttagatactgaccaacaaatgc

SEQ ID NO: 5808 - DNA, 121 bp, synthetic construct
  misc_feature 1..121: note = Description of artificial sequence: synthetic polynucleotide sequence
  source 1..121: mol_type = other DNA
ccatccgtcaaagtaggtatcttttgagtacctactattggcattgtactgtgctagattctaaaaagaatgtcttgtttaagacatggtccttatctttaaagagggtagacagatgcat

SEQ ID NO: 5809 - DNA, 121 bp, synthetic construct
  misc_feature 1..121: note = Description of artificial sequence: synthetic polynucleotide sequence
  source 1..121: mol_type = other DNA
agtgtggaccaggagatgcagaaggaaacaaaggagacacagagaaagggttcactgaccatgagaatgagggatgactgagcagtgatctgcgtagatctatggtcatcagtcaaattcg

SEQ ID NO: 5810 - DNA, 121 bp, synthetic construct
  misc_feature 1..121: note = Description of artificial sequence: synthetic polynucleotide sequence
  source 1..121: mol_type = other DNA
ggctttggtcttctccacttataatagaatgaagcttttgggctgtgtgatcttgaaggttaccgtccctagccaccaactaaagggtttgcaataagataaagtaagaaaaattactgca

SEQ ID NO: 5811 - DNA, 121 bp, synthetic construct
  misc_feature 1..121: note = Description of artificial sequence: synthetic polynucleotide sequence
  source 1..121: mol_type = other DNA
attccggacaccctatcagagattttgaaaactatgaagtgctgggaacagagagactggacagccttcacaaaggtggggaaaccttggtaagtactcagttttcagttgaaacccaaga

SEQ ID NO: 5812 - DNA, 121 bp, synthetic construct
  misc_feature 1..121: note = Description of artificial sequence: synthetic polynucleotide sequence
  source 1..121: mol_type = other DNA
gttcgttgatatcaaagacagttgaaggaaatgaattttgaaacttcacggtgtgccaccctacagtactgccctgacccttacatccagcggtgagtttgaatgtgacataacttctctc

SEQ ID NO: 5813 - DNA, 121 bp, synthetic construct
  misc_feature 1..121: note = Description of artificial sequence: synthetic polynucleotide sequence
  source 1..121: mol_type = other DNA
gtagaaaccccagctcatttctcttggaaagaaagttattaccgatccaccatgtcccagagcacacagacaaatgaattcctcagtccagaggttttccagcatatctgggattttctgg

SEQ ID NO: 5814 - DNA, 481 bp, synthetic construct
  misc_feature 1..481: note = Description of artificial sequence: synthetic polynucleotide sequence
  source 1..481: mol_type = other DNA
tcctatgtgttaggcctatatgttcagttcagcccattgacttgaactttgtggatgaaccatcagaagatggtgcgacaaacaagattgagattagcatggactgtatccgcatgcaggactcggacctgagtgaccccatgtgggtgagtggcacaggctttctcttcagtctttgggccatgctatctatagctctgttaaacctgtcttttcagtcatgtgtgaaaaggcaggtggctctgaatggccaaggcctttgggaagagagtctatgttgttagctgagagaagatttggtgtggattatgcattctgggtctgccgcaaatatctataatatatgtgtttccatccgtgtggggagggagattctttacatcttttatcttgattgttcctcatgtcaaccccaatttagaaaagatggtaccagctcaaggctttctagctggtagggacagcaaaagaatcagaaatt

SEQ ID NO: 5815 - DNA, 360 bp, synthetic construct
  misc_feature 1..360: note = Description of artificial sequence: synthetic polynucleotide sequence
  source 1..360: mol_type = other DNA
tcctgtgatctgcccacctcagcctcccaaagtgctgggattacaggtgtgagccactgtggctggcaaagaatcagatttttagatctgaatcctatccagggcacttcctactatgacaaacaacttctctatccttctttaatgcaggaggaatttatgcacatgaattctatgtgcatatgcaggtttaagtacctggtaacagaataagagggaggaaaaaaactaatacatgaaacaggcttttcttggctataccactgagtcactcgtgatcttaggccccagttcctcatttataaagtggtgagatcataggtgttacatacttcccaggtaagctaaggagtttaatgg

SEQ ID NO: 5816 - DNA, 480 bp, synthetic construct
  misc_feature 1..480: note = Description of artificial sequence: synthetic polynucleotide sequence
  source 1..480: mol_type = other DNA
gttaatgatattaaaacaccttcctgagatgtttagatttcctgtgtttgtgcagtttcataatgctggtgggttttcttttttttttttttttaatcatttatttacggcacaagtcctgctatcttttctatcaaaaatttctagaaaactagtggggggaagctagacagcggggtgtcatagagtatctgttgacgagattaaggggaatgattttaaaatgccttaccttgtttgatatgttttactggaatttttgctatgtactttttggatatagaatgtactgcttaatattgggagaaagtcaatgggagaaagtcaattggagaaaggcaagaggaaacaaaaacagaaagttataactctgcagatacatagatgctttgtcactaatttgattagagaaaaatacactttttcattgactcttttcattccaatacagatatagttctcaatccttgagccaatgaa

SEQ ID NO: 5817 - DNA, 361 bp, synthetic construct
  misc_feature 1..361: note = Description of artificial sequence: synthetic polynucleotide sequence
  source 1..361: mol_type = other DNA
atgaaactatcaaataattccaaggggcaggtcattcaaggccttggactatatcataattcaacataaatatgtgtaaactctgatttgacagttacttaaaaattaggacattcccaattttcataaaaatatcatctcttaagttgatggataggatctgcctaggaaaacctgttattgtattctctccagggattttctgttctcagtcttggactcataaaagttggcaaaaagttaaagaagttaaaaaatgaagaattttctcttacacactgaagcacgtagttttttattgttgtttgttttttgatttttgtttttttatgagcagggtctccctctgtcgcccaggttg

SEQ ID NO: 5818 - DNA, 360 bp, synthetic construct
  misc_feature 1..360: note = Description of artificial sequence: synthetic polynucleotide sequence
  source 1..360: mol_type = other DNA
ccacacctgtttttagcatgtattgtcttaatgtgccatgttgtttcttacttccttgtattcttggaaatgttctccttgaggataccattcacattttttctcctctctggataattcttatttgtcccttaatgcctagtaattacttcttacacagtgtcatagttgtttatttttctctaaagtagaacagggctgtacttgccatgtccagtgcttgaaggtacatagtaggtccccatagtaggagattcggagagagctaaaagacaaaatgaaaacaaatgaggttttgccagtgaggtaaatgaaatagggcacttggaggcatctgtattgaaaggaaaataaaggtag

SEQ ID NO: 5819 - DNA, 480 bp, synthetic construct
  misc_feature 1..480: note = Description of artificial sequence: synthetic polynucleotide sequence
  source 1..480: mol_type = other DNA
agtgagaaagaatttaactgaataaacttgcctatctgtggctgctctgtctgtggaaaaaaaaaaaaaaccctgagatattcctaacaacgtagaaatcctggggcttctcttgccttatgactattccaacatttttatattctcatatatgtccatgtggaaggacacaaaaatggagttggataacaagaatggaaaaatggtaaacttacccaggatgttaatagctagtgttctggtttagaaagtagggagtaggatccttttagattcttagtctttctgaactgctacaacgggtgtgagagtcttttttcccattacttggtagcatattttcttttctcttttccacgtataggttaatagctaaataattcctaaagtctgcaaataaactactttcctcttaaatataatattcattaagtaaggattgtagccaagcattctctcaccatacaagaaatatgaact

SEQ ID NO: 5820 - DNA, 361 bp, synthetic construct
  misc_feature 1..361: note = Description of artificial sequence: synthetic polynucleotide sequence
  source 1..361: mol_type = other DNA
tatagacatgaaaaaacatgtcatattcttagggatagaaatctcgaaattgagaaatttaacccagttttactgattttttgatacaacctaaacatttataactagccattaaatggaatcaccatgttttgctctgattgttagcaaaggatatttgaattgcagagaatgtgtgccttcttaatttgaattgttttagtatcaatgaaaaatgaactccattgggttagtaagtaaaggtgagtggaggctctccaaaaaatttgacattttagtctgttttcaaggaacttctaggttcttgattctgttgtcaagtatattactttaggccaggtgcattggctcaggcctgtaa

SEQ ID NO: 5821 - DNA, 360 bp, synthetic construct
  misc_feature 1..360: note = Description of artificial sequence: synthetic polynucleotide sequence
  source 1..360: mol_type = other DNA
agcaaaactccatcccaaaaaaaaaaaaaaaaaaaaaaaaaaagttactttatatcccatctttgtattattcatagactgtgtaagcatgcctgtcatgtcttcatgaggtagataataatattaacacttaaaagttctcccagattgattgatgctaactacataactcttactttcgcaatttttttttttttattccttgtaaactttgaacccttttaacctgtattggatttttccctggggagttggtggtaattatttaaaactattcctttttgtaaatacttgttgaatcatcccagatatatgtgaagaggcttcagctctaagtatcaaaagaccaatatctatgta

SEQ ID NO: 5822 - DNA, 478 bp, synthetic construct
  misc_feature 1..478: note = Description of artificial sequence: synthetic polynucleotide sequence
  source 1..478: mol_type = other DNA
gcttatttgtgtctggaaaggcttaggcaacagcccttagcgtagtgccctacatcttatataatccaagattcatatatatttcaagcacatacagtaggtctagccataacaattttgcacctatgatctttgtgacacagaccatgatatccttgagaagacgataacacagcagaaaaggcaaatgtgtgtaaaattatctatgaaaagtagttagatatatgtgtttatgtgtttttataaagcacagaaaaaggaatgatttagtgtgcctgagattggcaacacattgcagagaaggtaatttttttatttaggccttaaaatatgagtcaaattgatcaaaacagggaaaggaaaaataatcaggtttgggtaactgttataaaaataattgattataaaaacataatgtgatgctcataagtattaaaagactaaaaaaattgactaaagtttatattaaaaagacata

SEQ ID NO: 5823 - DNA, 480 bp, synthetic construct
  misc_feature 1..480: note = Description of artificial sequence: synthetic polynucleotide sequence
  source 1..480: mol_type = other DNA
aactttaaaaattataattcataacaaaagcttaataaccccaataaactaaatattcaaaatttaataagagagataaatttccccaattggaaaaagatataggtaattcacaaatgattaatgtacaaatgtttaacagattcaaagtgttcaaattctccactaataaaaaattagggaattgaaataatgagattaattatatctttctgatcagcaaaaaatttaatgataataaccaatgctagtgagattgttgagaaacaggcaatcttttcatttcttatgagagtagaaatcgaaataatacattggaaggcaatttgtccattctaatttatttaattttaaagacactttccctttggcctgtaagttccagttttagatattccacaaaactattcaaatataaataagtacctacaaacacaaacacacacacacacacacaaacatacacacacacagaaatga

SEQ ID NO: 5824 - DNA, 121 bp, synthetic construct
  misc_feature 1..121: note = Description of artificial sequence: synthetic polynucleotide sequence
  source 1..121: mol_type = other DNA
aggcttcattgcagcattgtttataataactaaaatggtaagtccaggtaaaattttatagcctttaaagttttagaaaggagtcttcaaaatggttgactggattcatcataggcaccta

SEQ ID NO: 5825 - DNA, 359 bp, synthetic construct
  misc_feature 1..359: note = Description of artificial sequence: synthetic polynucleotide sequence
  source 1..359: mol_type = other DNA
ctccatggagaggagccaaaatggcaagtagattgtcacattttgaatagattatctaagggaaaaaaccggaattcaacagagaagtgacaggaagcatcaaaaacaagaaacggatgtgagggatcagctggtagcctggagaggctccctaatgttgggcaagggtaagtgggagacccctcacggtccacattaccaccacagactcctattgtcctagccaaaggagagccctttgaccatcatgggccctgagactaacataaggagctgaagactactcaacagtattgctccagagagggagctcatgctgaatcccacaaacctctaagtcctaagcagctgcagcatga

SEQ ID NO: 5826 - DNA, 479 bp, synthetic construct
  misc_feature 1..479: note = Description of artificial sequence: synthetic polynucleotide sequence
  source 1..479: mol_type = other DNA
caccatttcaaaaacccagcctccaccagactgcatcctaccctggtgcccaacggcccatgcatctccacatccttgaagcaccattgacattccctgcctggaatggctgccaccaaggctgaggcaagagccacagtcagtgaccccttcaccccccaacagagtagcagtgacacattttcatgtgcctcaggacaaatctcactgcccgcagctgctgtcactgtggtggggctgagatgcaagcaaagaacacactctcaaagcagctatttccttcccagtagaagagctatggtgtagctgctgtggcccttacctgaacattgttctggcctcccgggggatcaccctgcttctgcttaccacaaccagtgcccgcacacaccagcagggggcctaaggacaggttcgcccaacttggccctacccctcagtgcccaggaacaccatccaggggcctgaaaattgcccat

SEQ ID NO: 5827 - DNA, 478 bp, synthetic construct
  misc_feature 1..478: note = Description of artificial sequence: synthetic polynucleotide sequence
  source 1..478: mol_type = other DNA
ttcagtgtgccaccattggcagctgagcattccttctggtcacgcccacccaaccactgctgctaccaccataactgccaccaacttacacacatcacctgcaggcctggggtctggcccacccaggctgtcacagctactgtcaataccagtgtggaacatttgggtcccagagggttgtcttgccactgctaatgccatcacccatgacatgccagctgcccaggggctcaagaacctgcctacccacctacctttccactgccattccaaccacctgagcaagccacctgggacttccaaaattggcttgcctggactcactaacaatggtaccagtgtacactgccctagggtccaaggacaggcacactcagcccactactgctactgcaggagtccaaaggctggcctaccgggtgtctaaaacccagcaaaattcactacagcctccactaacaaccacaccctaagccac

SEQ ID NO: 5828 - DNA, 121 bp, synthetic construct
  misc_feature 1..121: note = Description of artificial sequence: synthetic polynucleotide sequence
  source 1..121: mol_type = other DNA
aagggaaatcatagacaccgctgatgctgtttacaactgaagatattatacagaggctacaggacagtatatactgagaataaaagccaaaattgcctacccatctaatttcatagataat

SEQ ID NO: 5829 - DNA, 361 bp, synthetic construct
  misc_feature 1..361: note = Description of artificial sequence: synthetic polynucleotide sequence
  source 1..361: mol_type = other DNA
gtcttcaggaaattgtcctcttctatgaaagcaaattcaaaaaaaattgtaagaaatgactattctaccagatgtgcagatatcaatataaagacacaggaagcatgaaaaagcaggaaaatatgacaccatcaaaggaacacaataattctccagcaatagatcccagtaaaaattattaaattcttaaattcaaaatattgatactgagaagctcagtgagatataggagaataccaaaaagcaatagaagtcagaaagataattcaggatataaatgagacatttaccaaagagatagatatcattaatagaaccaaacaggctgggcatggtggctcatgcctgtaatcccagaact

SEQ ID NO: 5830 - DNA, 360 bp, synthetic construct
  misc_feature 1..360: note = Description of artificial sequence: synthetic polynucleotide sequence
  source 1..360: mol_type = other DNA
catctcaaaaaaaaaaaaaaaaaaaaaaagccaaacagaaattctgaaactgatgaatttactaagtgaaatccaaaatacatttgaaagcttcagcaatagactagatcaagcagaagaaaggatctcagaaattgaagacaggtttttaaaaaataacacagttagataaaaatgaaaacagaagaattaaaaaaaatcaaagcatacataacatataagatacctcaaagggacaaaacattagaatttttggtgtttccaaatcaaataaaaggattagaaaatctatttaacaaaataattcataaaaatatcccaagtctagcaagatatttatatatccagatatgagtttcg

SEQ ID NO: 5831 - DNA, 121 bp, synthetic construct
  misc_feature 1..121: note = Description of artificial sequence: synthetic polynucleotide sequence
  source 1..121: mol_type = other DNA
gaactctccaaatagacacagttcagaaaggttttctctacagcacattacagtcaaactttcaaaaggcaaagaattctaaaagcagcaaaaataaataaataaataaaagttttgtcac

SEQ ID NO: 5832 - DNA, 360 bp, synthetic construct
  misc_feature 1..360: note = Description of artificial sequence: synthetic polynucleotide sequence
  source 1..360: mol_type = other DNA
ttataaagagacccccatcagacaaagagtgggttactcagcagaaacccacaggccaggagtaaatagaatgatatattctaagtgctgaaagaaaaaaaaaatgtcagtcaaggatattatactcagcaaagttatccttcattaatgaagaagatataatatttccctataagccaaaggtgagagaatttattgctactagatgggcctacaagaaatgcttaagagaatcctataccccagaagcaaaggaaggatatttaccgtcaagaaaacacataaaaatataaacaacactgatacaacaaacataaaaacaaagaaaagtctcaaatgttaacactacagaaaacaacc

SEQ ID NO: 5833 - DNA, 121 bp, synthetic construct
  misc_feature 1..121: note = Description of artificial sequence: synthetic polynucleotide sequence
  source 1..121: mol_type = other DNA
aaatcacaattatgaaaaaaataaaaaagaataatcaaagcacatataacatataagataacataaagtgaccaactgttaaataagggaacaaagactacacaaaagtaccagcaattaa

SEQ ID NO: 5834 - DNA, 359 bp, synthetic construct
  misc_feature 1..359: note = Description of artificial sequence: synthetic polynucleotide sequence
  source 1..359: mol_type = other DNA
taaaatggcaggtgtaagtcctcatatattaataacaaccttcaatctaaatggaatatactttccactcaaaagacatagactgaatagatttttaaaaagacccaactataatatctattaatatataaatatatatttcaatatattttatatacacacacacacacatatgaaactcatctcgcctggaaagacatacatagattgaaagatggaagaaaaaatggaagaaaaggaatgaaaaaaggcatttcatgcatatggaaaccaaacactagcaggactagctatacttccgtcagataaaacagattttaagggaaaaaaaaaaagaaacaaaggtcattatgtaataa

SEQ ID NO: 5835 - DNA, 121 bp, synthetic construct
  misc_feature 1..121: note = Description of artificial sequence: synthetic polynucleotide sequence
  source 1..121: mol_type = other DNA
taaagtaatcaatttagcaaggggatataacaattctaaatatttatgtactcaacagcagagcacccatgtatataaagcatatattattagatctaaagggagagaaagacttcagtac

SEQ ID NO: 5836 - DNA, 360 bp, synthetic construct
  misc_feature 1..360: note = Description of artificial sequence: synthetic polynucleotide sequence
  source 1..360: mol_type = other DNA
agtaatagttgggaacttcaacactgcactcacagcattagagagatcatctagaaagttaagaaagaaacactggatttgaactgcacattagaccaaattgacctaatggacatttacagaacatgttatccaacagctacggaatacagattcttcttatcagcacaaggaacattcttaaggatagatcatatattaggacacaaaataagtctcaaaaattttttaaaaattgaaattacatcaagtttcttcatagacaacaatgggataaaactagaaaaacaatagcaagaggaactttgtaaattgtacagatatatgcaaataacatgtttctgaccattgggtcaagaa

SEQ ID NO: 5837 - DNA, 479 bp, synthetic construct
  misc_feature 1..479: note = Description of artificial sequence: synthetic polynucleotide sequence
  source 1..479: mol_type = other DNA
agaggaaattaaaaaatttcttgaaacaaatgaaaattgaaacacaatgtatcaaaaatctatgggatacaacaaaagcagtgttaacagggaagtttatagtaataaatgcctacaccaataaggtaaaaagatttcacataaacaatccaacaatgcaccttaaggaaatggaaacacaagaacaaaccagatagaaaattagcagaaggaaagaatagtaaaaatcagagcagaactaaacaaaatatagactaaaaaaattggaaaggaccagtaaaaccaaaagttggctttttgaaaagatacaccaaattgataaaccacttactagactaacccagataaaaatagagaagactcaaaatcagaaatgaaaaatatatcaccgacaaaagatcatcagagattattatgaacaactgtatactaacaagctggaaaactgacaagaaattgacacgttcctggacatattg

SEQ ID NO: 5838 - DNA, 480 bp, synthetic construct
  misc_feature 1..480: note = Description of artificial sequence: synthetic polynucleotide sequence
  source 1..480: mol_type = other DNA
caacctactaaggttgaataaggaataaatagaagacctgaacagaccaatatagaaacatgcctctacataatgatggctatatatgactaatccacagctaacatcacactgaatggggagaagctaaaagcctttcctctaagaactggaacaagaaaaggccacttctagttctcctatttaacatcgtactgaaaagtcctagtcagagtaatcaagcaagagaaagaaataaaaggcatgcagactggaaaagaggaagtcaaattgtttgtctttgctgatgatgtatctaagaaaacctacgctcttcctgaaaactcttagatctgataaatgaattcaatatagttgcaggatacaaaaatcaaaatacaaaaatcagtagcatttctatacatcagtaacaaactagctgagaaagaaatcaagaaggcaatttcatttacaatggccacaaaagtaaaacacctggga

SEQ ID NO: 5839 - DNA, 121 bp, synthetic construct
  misc_feature 1..121: note = Description of artificial sequence: synthetic polynucleotide sequence
  source 1..121: mol_type = other DNA
gtaaatttaaccaagaaggcaaaatatctctacaaggaaaactacaaaaaaaaaaaaaaaaaaaaaaaaaggcgggggacagaaaaaaaatgaaagacattctatgctcatggattggaag

SEQ ID NO: 5840 - DNA, 360 bp, synthetic construct
  misc_feature 1..360: note = Description of artificial sequence: synthetic polynucleotide sequence
  source 1..360: mol_type = other DNA
aatgaaaattgttaaaatgaccatgctgcccaaagcaatctatagattcaaagcaattcctatcaaagtgccaatattatttttcacagaaaaaaaaaatcctaaaaatcatatggaataaaaaagagcccaaatatccaaagcattctagagcaaaaagagcaaaactggaggcatctcactacctggctttaaaatatgttagaagcctaaagtaaccaacagagcatgatattggtataaaaacagatacataggtcaatgagacataataggaaatccaaaattaaattcaatatttccagctaactgattttcaacaagggcacaaataacatacattggggaaaggacacactc

SEQ ID NO: 5841 - DNA, 121 bp, synthetic construct
  misc_feature 1..121: note = Description of artificial sequence: synthetic polynucleotide sequence
  source 1..121: mol_type = other DNA
ttcaataagtggtactgggaaaattggatattcatatgcagaagaatgaaactagatccccaactctcatcacatacaaaaatcaacacagataaaatacttaaatgtaaggccttaaaac

SEQ ID NO: 5842 - DNA, 361 bp, synthetic construct
  misc_feature 1..361: note = Description of artificial sequence: synthetic polynucleotide sequence
  source 1..361: mol_type = other DNA
tataaactactagaagaaaacatagaacacttcagaacattggtctaggcagagatttttatggctaagcccacaaaagaacagacaaaaaaaaatagacaaatgggactatttaaactaaaaatggggctattaaactaaaaagcttctgcacagcaaagaaagcaattaatagaacaaagaaacacctgttgaatggaagaaaatatttgaaattattcatccaacatgggactaatatccagaatatatgaggaactcaagtcaacagtaaaaaaataaataatcccgtaaaaatgagattactgacatcaaaagatatgaaaagacatttttcaaaaaaagatgtaaaaatggccaa

SEQ ID NO: 5843 - DNA, 361 bp, synthetic construct
  misc_feature 1..361: note = Description of artificial sequence: synthetic polynucleotide sequence
  source 1..361: mol_type = other DNA
taactatatgaaaatgtcagcatcactaatcatcaggtaaatgcaaatcaaaaccaaaatgagatatcatcttatgccagttagtttatttttcaaatgacaaaaaataacagatgttattgaggatgcagagaaaaaggaactcgtattcactgttggtaggaatgtcaattaatacaaccactacagaaaatagtatggagattcctcaaaaaactaaaaactactgtaaaatccagaaatcccactaccaaatatttatccaaaggaaaaaaatcagtatatcaaaaaggatacatgcacttgcatgtttattgcaatattattcacctatgtgtccatcaattaataaagaaataaa

SEQ ID NO: 5844 - DNA, 358 bp, synthetic construct
  misc_feature 1..358: note = Description of artificial sequence: synthetic polynucleotide sequence
  source 1..358: mol_type = other DNA
aatgaaatattttcatttgcagctacatggatggaactgggagtcattatgctaagtgaaataaggcacagaaagacaaatattgtaagttctcactcatatgtaggagcttaaaaaatttatctcatggaagtagagagtagaatgataaataccagaggctgggtaggatgtgttgttggaaaggggtgatgaaaagaggttggtcaatgtgtgcaaacatacattatagaaaacgtataagttctaatgttgaatagcagaatagggtggctataattagcaacattagattatatattttcaaagtacataaaggagaggacttgaaatgttctcaacacatagaaatgataaa

SEQ ID NO: 5845 - DNA, 360 bp, synthetic construct
  misc_feature 1..360: note = Description of artificial sequence: synthetic polynucleotide sequence
  source 1..360: mol_type = other DNA
tactcaaggtatcgaatactccaaacatcctaacttgatcactgaacattctatgcatgtaacaaaatagcacatatatcccatgaacatgtaaaatattatgtatcaattaaaaaatattgaggatccaaaaaggtaataaaacgttggactctgataggaaggaaactataaagcaaataatagttaaccccaccattgagagacgatagtagtagttaggatgtgtagtcatttttatcttgatcgtattgtttatgatccttggtggaatttctgtatttgtttggtgtcaagtgccttttatttttattatttttattttttattatactttaagttctaaggtacgtgtgcacc

SEQ ID NO: 5846 - DNA, 361 bp, synthetic construct
  misc_feature 1..361: note = Description of artificial sequence: synthetic polynucleotide sequence
  source 1..361: mol_type = other DNA
attagatcctatttgtcaattttggcttttgttgccattgcttttggtgttttaatcatgaagtctttcccatgcctatgtcctcccttttatattctggggaaaattgtgtagaattgatatatcttattgtatatttgatataattcaacaatgaaaccatttgggcctaagatttttttctgggacactctaattatgaatttgattatctaatagttataggaatcctgagattatctattttatcttgggtaagtttggtaaattgtggtttttgaggatttggttaatttcatcaaaattgttgagttacatcaaattattgggaatattttttattttatttattttatctatt

SEQ ID NO: 5847 - DNA, 240 bp, synthetic construct
  misc_feature 1..240: note = Description of artificial sequence: synthetic polynucleotide sequence
  source 1..240: mol_type = other DNA
tcccacctcagcctcccaaatttctaagattacaattgtgagccactgtgctggctattatcctttttaatgtaagtggaatctgtaatgatatcttccactttcatttatcatattgttaacttgtgtttcctctcttttctctcagtcttaccagaggtttatcaattttatttatcattcaaagaacttggtcagcttatcggtttccctgtttttctctctttccattttcaactt

SEQ ID NO: 5848 - DNA, 240 bp, synthetic construct
  misc_feature 1..240: note = Description of artificial sequence: synthetic polynucleotide sequence
  source 1..240: mol_type = other DNA
gattatttccggccttatttgctttctttttctttgggtttatgttttttcttctttttcgagttttttaaattagaagtttatattattgagttgagatatcttttctaatgttaccattcattgctataagttttctattagacactgctttagctgcatacaatacgttttgatatatttattttttattttgttcagttcaaaatattgtctagtttttcttgagacttcctcttt

SEQ ID NO: 5849 - DNA, 241 bp, synthetic construct
  misc_feature 1..241: note = Description of artificial sequence: synthetic polynucleotide sequence
  source 1..241: mol_type = other DNA
gacccataagtatttcaaagcattttgtttaattgctaagttggacattttctgttacctttctatactaacttagcttaatttcattatggtcagaaaatatactttgtatgatttcaaaattttttaatttattaaggtttgtttctagagtcatgatattgtttatcttgatgactgttttatggcacttgaaaagactgtttaatgagcttctgttgggtggaatgttctataaatg

SEQ ID NO: 5850 - DNA, 480 bp, synthetic construct
  misc_feature 1..480: note = Description of artificial sequence: synthetic polynucleotide sequence
  source 1..480: mol_type = other DNA
tcaaatagatatagttgatttgtggtattgtgcagttcttttatatccattctgattttctgtctactagttctattaattgctgagaaaagagggttgaattcttcaactgtcattatgaatgtgtctttctctcctatcaaatatgtcaggttttactacatgtatactaaagctcccttgttgggtatgtcatatttaagattgttaagatgttgataaattgactcttctattaatatataatatttctttatttctgatatctgataattgcttttttccgaagtctactttagtctgtattaatattaatacagcaaatctagctttcttttgatttatgtttgcaaggcaaattttttctccttttacttttaacctacttttatcatttttaacctacttttatcattacatttgaaatgagtttcttctagacaatacagagttggctcattcttatgcattatgatagct

SEQ ID NO: 5851 - DNA, 480 bp, synthetic construct
  misc_feature 1..480: note = Description of artificial sequence: synthetic polynucleotide sequence
  source 1..480: mol_type = other DNA
cctgtcttttaattggtgtatttacatcatttacatataatgtaattatcaatatggtacttttaggactaccatttattagttttctattggttccctcctgtgctcctccctttctttttatactgacttcttttaaaattatttaacctatttttagtattcaattttaatttatctattttagttttggctatatcactcatatttttagtgatggctctataaatctcatagaaattcattatttcatagtctgctgagaatcactattttacaaattcaaatggaaggtagaaacattaccataatattggctttataaccctcacacctttatgtgatactcatatatatttctgtacattgaaaacttcatcagatgcttataatttttacttttgtcagagtaaagaactcaagagaaaaatagcctattttattgactataatatttattattgctgttgctctttatgc

SEQ ID NO: 5852 - DNA, 479 bp, synthetic construct
  misc_feature 1..479: note = Description of artificial sequence: synthetic polynucleotide sequence
  source 1..479: mol_type = other DNA
caaagctaccattttgcctggacatcagcaagaagaatagagaactgcatgcacctcttttttttatcagatgagttttttctaactgggaccataaaccaggtcaaagctctagtttgctaaattttgaattgatcaaagttttataaatatttccttaatacctctcttccttctttcctccatccttgcatctgcatgcatgtgcatgtacacgtacacaatcacccacatataactcaatttgaacaaattatattttctatatagaattggattataaaactttctgatatgccaattattttaaatcttcatttgataaattttgatctttaaatagatattaaacacgtattgtatgaacatatcagtggcctactgaaaaatacattgacccaactccagtcaggctgcaaggagctggttaacaatattactaggtgagtcacttaaacactctaaatcctccttgccgt

SEQ ID NO: 5853 - DNA, 240 bp, synthetic construct
  misc_feature 1..240: note = Description of artificial sequence: synthetic polynucleotide sequence
  source 1..240: mol_type = other DNA
gtgccttttcctggatcaagaaggttgaaaggatctgatttctgatatgtcatagaaacagcaatcattttctatgtgtcttggtctcctagacttctaggattcacaatgtcacttaactttaagtctgacaccaatatcaagctcactacaaagaaagcatctctattttccttctcttctcttcctacgttggtctctatcaggctcctagagccactctcacactgccattatcat

SEQ ID NO: 5854 - DNA, 239 bp, synthetic construct
  misc_feature 1..239: note = Description of artificial sequence: synthetic polynucleotide sequence
  source 1..239: mol_type = other DNA
cctccttttgttcttcctatacattctctttttccttttcaagttccctacttttcccccatgttgagtatccacttttttggttacccagaaaaccgctaaaattcagtgtaggcagatttgattaaaggctgctgcttttttttagggctttatgatgtatgatttactttagaattgtaacatgggatttgtactcagacacactagagttgaaattctgtctgcactaatttagg

SEQ ID NO: 5855 - DNA, 478 bp, synthetic construct
  misc_feature 1..478: note = Description of artificial sequence: synthetic polynucleotide sequence
  source 1..478: mol_type = other DNA
tgcgacctttacaatctttatgagctgcttcttcctcatttgtatagataaacagtgtttctcattgatctcagagaattgtggtgatacctttattggtgagtttcattcagagttactggtgcataaatatacagccgaatataaattgtcattcttgctggttgtctctctgtaccatttttcctcaaagctctgtgaggaaggtaaatatgtatttatttttataataaaatatcaatttatacatttctcacattatgaaagcaatacaaccaacataactttagaagtatcaaaaagacataaatcccaaaccagtgataataactatgaacatttttggggttttaaatttttttctagaaaagatttaataaaacatttgtgatcatgtcatactaaatgttataatatacttctttcattctatagcaaacattttatttactaatcttcaaaacttaaatttcctcat

SEQ ID NO: 5856 - DNA, 478 bp, synthetic construct
  misc_feature 1..478: note = Description of artificial sequence: synthetic polynucleotide sequence
  source 1..478: mol_type = other DNA
tatgtattatattttattgtgtacatataccatggtttatttagctagtctactcacatgtttttaagaaaaaaatatttaaatattttcttgtgctatatgcttagaagtgtaattattgggtaaaattgtataaacatgagtctaaccaaacttcttttcatgaatcttgtttttttaatgtttgttatcagtttacattcccaccaactgtgcaaaagtgtggcctgaaatcaatttgattatagacttgaaatcaattggatgatacagtctcctctttgaaacatgcaagtacttttaggtgactgaaggcctgtctagatgtctgccaccaaattgcaatagtgtctctcgatatacctttgattgtggtctatggaagggatagtagttttggctggaggtgagtaagacatcttgaagaatggagtatccaggagtggggtgagcagacctagctgggatggaaataata

SEQ ID NO: 5857 - DNA, 240 bp, synthetic construct
  misc_feature 1..240: note = Description of artificial sequence: synthetic polynucleotide sequence
  source 1..240: mol_type = other DNA
tgagtgaagaggtggtaaaagagggctagacaaagtctatttcgagactttcacctaaggttaatcttgaacatgggaatggacataatattttccccttttccttcttaacccttgcttttagtatcccaaatgcttttatccctttggcttctactattaaaataatcatttaaacataatttgtgtcaaataggctttgggtatgagttctgtaaatattaattaaacaagtaagaa

SEQ ID NO: 5858 - DNA, 240 bp, synthetic construct
  misc_feature 1..240: note = Description of artificial sequence: synthetic polynucleotide sequence
  source 1..240: mol_type = other DNA
aatatatttcacatagcaaaaatcctctaatttttggaaagtggatttgtagctacctatgtggcttatagggtagctcaatattcactccgtttagactgaattccggtgtccccataagagcagactgtttctctgttctgttctttgtacagtatagccaatgggaaggcagcactttgttaaagagtgccaagtcggggactttaccttaaacacaagtatgcatttcaaaccctg

SEQ ID NO: 5859 - DNA, 480 bp, synthetic construct
  misc_feature 1..480: note = Description of artificial sequence: synthetic polynucleotide sequence
  source 1..480: mol_type = other DNA
aacaaacagccttcttaataaaataagggaaagagttttctttcttctattctctagaaattcacaaatatcacttgacaggtgacagttcttcccttacaaaaggggctgtttgccttttgctttggtgtttgggtaaactgcagtatgcactggcagagaatttattgcctaggggaaggtgtttgcagttgctgtgtttaatctgaaaagaaacccttttccttctgtctcctccctctctttttaaggagggagagttggaaatgatagccccagggaaatagttcccttaacacctgtctttggtgtaacctcagcaatgttacttaagacactgtgctcagactgtatgcattaggaatgacaaagttgaagagggcagataaacagaaagggatttcagcagaaacacaggagctgattctgaccttgcatcctcttaaaaactgatcaggtggaaatcctatcatgctggct

SEQ ID NO: 5860 - DNA, 479 bp, synthetic construct
  misc_feature 1..479: note = Description of artificial sequence: synthetic polynucleotide sequence
  source 1..479: mol_type = other DNA
aaaaagaatctgatttgtttgaagtaatactcatgctattagtcatctgtcctttcctttggcaaaatatgcatacatacatatatatatagtttcaatctgtaaaacgtgaaaaattctacaatgttatatttaggaactttagacctgctaattctagtccaacctttagtagatgagaaaactattaagatccaagttcatcagtggtgacttctccaacatttctgataagcatttttaagaaaaccagggctacacccaactttctggatttctggacccatttttccagctattatcagaggtggtgtgaagaggtcaggctccagagatagatggctgcctgtgtttgaatctagctcagttattcagtatttgggtgaccttgggtgaattacagaatgtttctaagcctcagttttctcatctgcaaaacaaggatcaggattgatattggtgacatcctataggagagc

SEQ ID NO: 5861 - DNA, 240 bp, synthetic construct
  misc_feature 1..240: note = Description of artificial sequence: synthetic polynucleotide sequence
  source 1..240: mol_type = other DNA
tgttctgataactgagataaggcatgttagcataacacactgcctgtggccagtcctcagtggaaatggttgttgctgttagtctttagactgtgttaaatttggaaacagtgaattattaatcctaaatagagcaattactgatgcaggacaagaaaaaaatctacacagatttgtatttttgtttttccaaaaaatatgatattatttgaagatacactagtgttattgtaggtagct

SEQ ID NO: 5862 - DNA, 240 bp, synthetic construct
  misc_feature 1..240: note = Description of artificial sequence: synthetic polynucleotide sequence
  source 1..240: mol_type = other DNA
agtcagacatgagcaggacaggagagggctccaccccctacccccaaccctcaccagcaatctcagatgaccataaggtgatggtcaggcagttgttacactatttcactcaaataatattaataattgttcgtggttgcagccagcaccagggaaaggcagtctcccgatagatagaaaaaaaaccttaaactagtgatcagcagcttcccaaaaagacctcaggagttgggtgaatgg

SEQ ID NO: 5863 - DNA, 480 bp, synthetic construct
  misc_feature 1..480: note = Description of artificial sequence: synthetic polynucleotide sequence
  source 1..480: mol_type = other DNA
gctcaagcatgtgtactaaggggcaaaatggcagagtttaactagtatatgaccttctaggaacattcagactagtaaagtgagaacacctcaagcaggggtcctcaatctttttggcaccaggaaccagttttgtagaagacaatttttcacagagagtgggtggaggtatggtttgggaatgaaactgttctacctcagatcatcaggtattagttagattctcataaggagcacacaacttagatccctcacgtgagcagttcacaacagggttcgtgctcctatgaggatctaatgcccccgctgatctgacaggaggtggggttccagtggtaatgctcactggcctgcctacctctcacctcctgctgtgtggtccagttcctaacaggtcacatattggtaccagtccatggaatggggccgggggcccctggtctcaagtgagcatgcatacaactcgagtaaacacattgc

SEQ ID NO: 5864 - DNA, 480 bp, synthetic construct
  misc_feature 1..480: note = Description of artificial sequence: synthetic polynucleotide sequence
  source 1..480: mol_type = other DNA
acatgcagcccctccttagtgcacatgtcgacagcccaccccaaggaataatcaggggagaagggatgcaagactccagaagtacaccaacatataaaaccctaagtcaaaggtcaaaccaggcacttgatctttcaagtcacctgcttggcttcttccaagtgtactttacttcctttcattcttgctctaaagctttttaataaactttcactcctgctctagaacttgtcttggtctctccctctgccttatgcccctcagttgcattctttattctgcggaggcaagagttgaggtctctgcagacccatacagtttggttgccactaacatactttggtgctgcatgccttggatatgttccactgctgacactggcaggctgtgaaatatgacttgaccatcatttcccatttgaaactagacaaggttgagttttcttcaaactaagatcaggattttgaaccagacagactt

SEQ ID NO: 5865 - DNA, 480 bp, synthetic construct
  misc_feature 1..480: note = Description of artificial sequence: synthetic polynucleotide sequence
  source 1..480: mol_type = other DNA
cttatgaaagccaacactcttttgtctgttcaggtttcagagaactcacaagaaaactttattttacttgctaattttgtttatttgggtgtcattcagtaatgataacataatgaaatattccctttgccagtctaatgattaagagcgtgggctttgcagttgagcacaccaatatacttgagtttaaatcttagcatgataatgaagtcagagctgaatgaactcctatatagtttaattccgtggttctcaccgtgtgttctcagggccagcagcatcagcatcatctaagaacttgttaagaaatgcaaattattggatatcactccagatctactgaatcagaaactggagggaaagtgagagtggtgatctttctataagccctccaggtgattcagatgtttgagaaccagtggtacaatcaagtgatttagtatatatttttatgggaggggacagaactcgggctttggg

SEQ ID NO: 5866 - DNA, 361 bp, synthetic construct
  misc_feature 1..361: note = Description of artificial sequence: synthetic polynucleotide sequence
  source 1..361: mol_type = other DNA
aagtgactaacctgtcaaggaagaggaaaactctgtaaaatatttgaagaggtttattgtgagccaaatatgagtgaccatggccctcaaatttcaagaggttttgagaacatgtgcccaaggttgttggttttcagcttgattttatacattttagggagatgtaagatatcagtcaatacatatgaggtatacattagtatgatctggaaaaatgggacaaattgaagctaagggctcacgggtcataggtggactcaaagattttctaattggcaactgtttattttaaaacatggaatcaatagaaaggagtgtctgcgttgagataaggagttgtggaggccacagttcttattat

SEQ ID NO: 5867 - DNA, 121 bp, synthetic construct
  misc_feature 1..121: note = Description of artificial sequence: synthetic polynucleotide sequence
  source 1..121: mol_type = other DNA
gtttttaaaaccatcagatcttatgagacccattcactatcacaaaaacagcactggaaagacccgcccctatgattcaatcctctaccactgggtccctcccaaaacacaagggaattat

SEQ ID NO: 5868 - DNA, 361 bp, synthetic construct
  misc_feature 1..361: note = Description of artificial sequence: synthetic polynucleotide sequence
  source 1..361: mol_type = other DNA
tcttcaagctccaaaatggtctcctttgactgcatctctcacatccagatcacgctgatgcaaaaagtgggttcacatggccttgggcagctctgcctctgtggttttgcagggtatagcttccctcctggctgccttcatgggctggtgttgagtgtggtttttccaggcacacagtgcaagcagtcagtggatctaccactctggggtctggagaacactggccctcttcttacaactccactaggcagtgccccagtagggactctgtgtgggggctcccactccatatatcccttctgccctgccctaatagaggttctccatgaggaccctgccttgacagtaaacttcttcccag

SEQ ID NO: 5869 - DNA, 480 bp, synthetic construct
  misc_feature 1..480: note = Description of artificial sequence: synthetic polynucleotide sequence
  source 1..480: mol_type = other DNA
caccctctgaggccatggtacaagctctacattgcccctctcagccacaggtagaatggctgggatgcagggcaccaagtccctaggctgcacacagcacagataccctgggcttgcctatgaaagcactttttcctcctaaacctccaggcctgtgatgggagaggttgccacataggtctctgacattccctggaaacattttccccattgtcttggtgattaacattaggctgcttgttacttatgcaaattgctgcagccaacttaaatttctcctcagaaaattggattttgttttctgttgcattgtcaggctgcaaattttccaaacttttgtgctgtttcccttttgaaactgaatgcatttaatagcacccaagtcacttcttaaatgctttactgattagaaatttcttccaccagataccctaaattatctcactcaagttcaaagttgtgcaaatctgtagggcaggg

SEQ ID NO: 5870 - DNA, 121 bp, synthetic construct
  misc_feature 1..121: note = Description of artificial sequence: synthetic polynucleotide sequence
  source 1..121: mol_type = other DNA
gttgcttccacgtttttgggtatcttttcagcaacaccacacttctggtactaatttactgtattagtccattttacactactgatatagacatatccgagactgggcaatttaaaaaaga

SEQ ID NO: 5871 - DNA, 241 bp, synthetic construct
  misc_feature 1..241: note = Description of artificial sequence: synthetic polynucleotide sequence
  source 1..241: mol_type = other DNA
aggtgggaataggaaagctacaagatgagatctgggtgagaacacagagccaaaccatagcagatggcaaatgtttcctattcagaactttaaaatatactagactttcagttaatttcttcaggattgggaggacctggaagaggaaagatctagttaatgttaatagagattctttacagatgcaaatttccccccacaaaggctgcctgttagggccacttcaaaatatggcaaagaa

SEQ ID NO: 5872 - DNA, 479 bp, synthetic construct
  misc_feature 1..479: note = Description of artificial sequence: synthetic polynucleotide sequence
  source 1..479: mol_type = other DNA
acatattttggtataaaatattttgttggcttctttatctgttatttggtatgtcagagtcgtggtgtttaaggttcagggaaacccctgtgatgggattttatggtttgtagggcatgactcctcaggtcccttagatagcttttggggcaagagagaaaaaaggtcagagtttagtcctcaggcccaaaggtatacagctataatgacagagaagaaatttctagacccatctctaagataattatttctgactgtgactcattttaaaacatgtggaagggtctgctgggttttatcatttaaaaagttaaaaggtaaaatgtaatactttaaaatagtaattaaatatgattattcagtggttggctacatgtatctttataagtaagatgttaaatgcattctcatgaaaatctcttccttggcaaaagaactaaaatgtcaagcttgtgtacttattagttcaagaagcactt

SEQ ID NO: 5873 - DNA, 360 bp, synthetic construct
  misc_feature 1..360: note = Description of artificial sequence: synthetic polynucleotide sequence
  source 1..360: mol_type = other DNA
actgagtatctgctaagttcaacacactctgctaggagtgcagtgtttaaaagagctgagtctatcactgcctacaacttagagtgggtgaggagacagatatgaagtcaataaactagattattaatgatctaaattattgtacctgggaaaatatttgctgctgaaatattgagggatcgatagaaaagacaataaatgggcatccatcattgaacaacagaccagagttctgttattaacaaggactgcttgccaggtgtggtggctcattcccataatcccagcactttgggaggccgaggcaggaggatagcttgagcttgggagttcaagatcagccagggtaacctagtgaga

SEQ ID NO: 5874 - DNA, 360 bp, synthetic construct
  misc_feature 1..360: note = Description of artificial sequence: synthetic polynucleotide sequence
  source 1..360: mol_type = other DNA
gtgatccgtgactgtgccactgcactctagcatgacagacagagcaaggccctgtctctaaaaaataataataaaaaaggagggtactgctgggctatattactttagagacagtattttataccaaactctatctgaataatgtagagcatgatatatttttcatcacgcagctcagtggtcctacattcagttacgtttgatgcttgctaaactggaggcaatgtggagaatgaattaataaacaaaaagcaaattctgcccctaaggatttcttagtttgttatggacaggagacaatacaagcaactcatgtcaaggtagagattgctaagtgccagaggaaagtaaagctgtaaa

SEQ ID NO: 5875 - DNA, 121 bp, synthetic construct
  misc_feature 1..121: note = Description of artificial sequence: synthetic polynucleotide sequence
  source 1..121: mol_type = other DNA
gagcagaaattctgatcaccatttgtatttgaaagctcaggaaatagcctggtcacttgaaagaggtggggagaggttatactaggaagacgaactgtgtttaaggtagttaggaaatagg

SEQ ID NO: 5876 - DNA, 359 bp, synthetic construct
  misc_feature 1..359: note = Description of artificial sequence: synthetic polynucleotide sequence
  source 1..359: mol_type = other DNA
ctgccagcttaaatgtgtgaaacactcagtctgacatgaaatggtgatgcttagagctaaaaaatacttgactcatcggaagtatttaaattaatttttaaaagtgtactagacgtgcagaacatatatatggccatcagtgtgacaacccttacttaagtgtaaacatgactttgacagaatgtgcaatgggaggagagtcagcttggtttgatgtgaaccctacagcaagataaattatatgggaataaacaaacagctgagggtcaattaaagaaaaataggaatactctataacctggtgctcttgctgagctgactgtggtaattagaggatgggtggctggggatgtgcaggt

SEQ ID NO: 5877 - DNA, 479 bp, synthetic construct
  misc_feature 1..479: note = Description of artificial sequence: synthetic polynucleotide sequence
  source 1..479: mol_type = other DNA
ccctgtgcatgcatatgacctcaaactctgcacccttgtatgctcattgtcaaaagaggtgggtgtcttgggattatgattaagtccctctggcacactgttctttgcagataaggccctatgaattgtctactttttctgtcccaatatccattcagaatagactacatgctatttcttggagtaagaatagaggaaaatgagagtctctttagttttcagtctaacgaggaatacaggtgcatatcccactacctaggaaacaagaaccatgttgataaaatgccagaatacaaacagagctgataaaaccaatagctggatggcttatttctgactgggaggattacaggtgtcttcatcaggtaaaaggtaaaaattgaaacacccacgcacacacacataggtcatactcttagtgtgtgcagtataagctttttactgggagctattttgaagatgttcccttggctgtctac

SEQ ID NO: 5878 - DNA, 479 bp, synthetic construct
  misc_feature 1..479: note = Description of artificial sequence: synthetic polynucleotide sequence
  source 1..479: mol_type = other DNA
tttgtggacataggttggctgactggggtgctcatcaggagtatattgtctgcagtgatgtaagcttaattctagtctcttttgtctactaaagttatccattgtgtttaggaaagacatacaattcacttgtagattaaaaaaaatagttctaacttcattgtgtttacttatcatcctcccaagaagctgggagctcctaatggatattattcaagtcatttctcaccacacactcttgaagaggtagaaagagcccaggtattttaaaatctcatttttgtacttcggcggcacagcgtaatgaatcagaaaataaactagaaataagacccatgctttgtcctggaatggagcgcactttgttctagtaaatgttcctacctgcttttcttaaaattagaactagatggcttataaaatgtggcttttaaaaaagaactcttttagatgtctgggtggggtatcagatgattttt

SEQ ID NO: 5879 - DNA, 480 bp, synthetic construct
  misc_feature 1..480: note = Description of artificial sequence: synthetic polynucleotide sequence
  source 1..480: mol_type = other DNA
ctgtaatcaaagctttattggagcgttgtggatttagtgatgttggctgccctggatgaaaggaatcagcagaaaccatctttgctattgaattaaatagatgcagccagtttcccatttaaccaagatattttattcactttttagcaataagcctgtttaggaaaagagacaactcagctgcttgatgagattttatggtttgatagaaaactaaggagaatatagagcagaaaaaaaaaatcagttttgtgactaattgatatgagaaacaaatgtatccccgtatattgtttttttcccccctgagatccaagaattaatctcatcaagtaacattaagttctttggaaatcctttgacataaaaaggaaaattggggttttcaatttggggctttgtaaatatcctgtcctctgctttttttttttttttttttttgagacagagtctcactctgttgcccaggcagagtgcagt

SEQ ID NO: 5880 - DNA, 358 bp, synthetic construct
  misc_feature 1..358: note = Description of artificial sequence: synthetic polynucleotide sequence
  source 1..358: mol_type = other DNA
ctgtcctctgcatttttaaaggaacagcagtttggtgaaaaagcactggcctaggagccaggagccttggcttctgttcttcatgctgctgccactaattgttttctgttcatgaacagataactccccctctgggcttagtttccttatgggtgaaagcacggagttgggctaggtgaatactcagtgttcttatagtctgtaatggataaatctccatgctcttgcttctgaattctatgttgctaggattcctcttgtgtctccatgtggctatggtgggcacccagcacatctaaataggtttttaagaaacattggtgcacaggtgcaatggtgaatgcctgtagtcccagct

SEQ ID NO: 5881 - DNA, 480 bp, synthetic construct
  misc_feature 1..480: note = Description of artificial sequence: synthetic polynucleotide sequence
  source 1..480: mol_type = other DNA
acttgggaggctgagtggggaggatcacttgaacccaggaatttgagactgcagtgtgctatggagccactgccctctagcctggccaacatagcaagacctcatctaaaaaaataataactagtgaaagcatatataaacaaatgtaaactgtatgaaatagtgtaaaacaacatttctttctaaataatagctgtagcgtggaatctaaagagtttgatggtgtctcttctttctttctgtccttggatcgggggtgagcattgcaaaaacccaaacacaaaagctacatttacatatctgaaaaaataaatacttcctaatcaggttttttttttctgtggaggtggggtgggtggtaaggtattacactaataaagaccagtcataaatgtgaatactgtctggagttggtgaaaggagaagttcctaactctttctgttactctcctgttcctttctctaacatgctgcctctgt

SEQ ID NO: 5882 - DNA, 480 bp, synthetic construct
  misc_feature 1..480: note = Description of artificial sequence: synthetic polynucleotide sequence
  source 1..480: mol_type = other DNA
cttcctcgcaagccctgcaggcagtgttctttccaaacaactacttgcctaaccagttcattggaatgtcttttctccagactgtctcctcattgagatttcttctgaaaattaacctcgctaaaaacataaatcatgtttaaaaaaaatacagtggtaaatattgcacataaaatcttttctctggtttaaaaaaatgcacaaacctacctaccactttgaaacagcaacagtaacaaaaacagaaacaattagggcaacagttgcttttctccttttaaagaaaatacttttcttggttgcaattgttctttggagtgacagggattaaactctttggatgaaatctttcctccttattgcacacctcctatccctcaccctgcagcctgggagtgattttaggaaatattaagtatatattttcttggctggcactttaaataaggtataaattgtggaacaaagtataaaaatcac

SEQ ID NO: 5883 - DNA, 480 bp, synthetic construct
  misc_feature 1..480: note = Description of artificial sequence: synthetic polynucleotide sequence
  source 1..480: mol_type = other DNA
gtatttccacaaatcttgccatataacaaatctttccccataactttttgtttgtttgctttcatacaaacaaaaggttcttcgtctatggtgaaaaatgtaatggttgtagagtatatacttcaaaatttatctttattatttattagcatcttaggcaatcacagatgtcagtggattcttttccttttttattttatttgaaccagtttctcatccagcagttctacatgaaagaaaaaaaaacatgaacagtaataactcacataacatgttcttgttgttgtgtataggtactattaaataaatagggatagtttgtggtttgaattcattgaaggggaaaaaccagtaaacatgtaccaatctttcaatttatgcagcggaatcaggatgcttttcatagtgttataaaaattcaatttcgctttctctggctaaaatctgaatggccaagaatggaatagtcattttctttgc

SEQ ID NO: 5884 - DNA, 121 bp, synthetic construct
  misc_feature 1..121: note = Description of artificial sequence: synthetic polynucleotide sequence
  source 1..121: mol_type = other DNA
tagtttcgtatttgaagatatccccagaatttgaatcaatctgaagtttgattttcatttctaactcctctggaacaatatgatgaaacagccatactcatcaggaagttcagctaaacag

SEQ ID NO: 5885 - DNA, 360 bp, synthetic construct
  misc_feature 1..360: note = Description of artificial sequence: synthetic polynucleotide sequence
  source 1..360: mol_type = other DNA
gagctcatggttggaaaaccgtgagtctcaagttttaccatatagagtgtaggatactaaattgtctgatagacaatagaaataagtcatcatcttatggcttaattacaggagaaaagaatgttcagactcaaatatctcaataaacagactgttgtacagagacaaaagagctaccttagaagttttggaccctggattgtagtcatgaattctctaccatttagtgatgtgatctgacacatgtcactaaccctctctagtgtcagtttcgtcacttacaataatctaaatatttgatatttaatccaggattttagaataataatacatatgtgaaatcacatacaatatgtcagc

SEQ ID NO: 5886 - DNA, 121 bp, synthetic construct
  misc_feature 1..121: note = Description of artificial sequence: synthetic polynucleotide sequence
  source 1..121: mol_type = other DNA
acatcacgtaaaacaaatgaagtagcattttattgttagagatttattttaagaactaggtacttcaggctctgtgttcaaaccccccgcgtgtatgaataactaaccatctctaggtttt

SEQ ID NO: 5887 - DNA, 358 bp, synthetic construct
  misc_feature 1..358: note = Description of artificial sequence: synthetic polynucleotide sequence
  source 1..358: mol_type = other DNA
aggggttttgttgctgctgttgctgttgctgtttttttgcaaaacgggattaatatgactatggtgaaaactaattgagatagtaaatataaagagcttaccacaatagcattggttcaataaacgtgggcttttctttactatttacttttttaggtcagtcattgaacacaaggggctgttttaaataaacacaatttaaggggtgattttgtatagaagttacaatattttaccagcatcaacatccaattcctcttgtattttggtagcgatgttattctcatgattatgtaattcttttaaaatatctcgaatcacaaacgtaggtagttgcatgttactttttaaaactgtt

SEQ ID NO: 5888 - DNA, 481 bp, synthetic construct
  misc_feature 1..481: note = Description of artificial sequence: synthetic polynucleotide sequence
  source 1..481: mol_type = other DNA
tttgccacctccagataatcattactcaaactgctctaaaatcctgaaagacaaatagtaagaaaatattttaaagtcaacacactattattaaacaattgcttatttttccttcttataaacacttttgaccaaaaattccaaaacgtatgcactgcaatggcctatgatacaatatctcccgctgtacattgaggattgacttgtcattttatagttgacttaatattaggttgttataagagaatgtactgaaaacttatttgacagtggcaggtgggtgccatagtgagacttcatgtacagattaaatgaatgtaacggataaagcatggagctgaacaacagcaaaaaagcacagagttaaaacttcctagtaaatgacatttacaagaagtataggtatgttcacgaagatgaccagagaagattcaatctagggtcagaacaaaagcaaattaatctggctgcagaagacctc

SEQ ID NO: 5889 - DNA, 479 bp, synthetic construct
  misc_feature 1..479: note = Description of artificial sequence: synthetic polynucleotide sequence
  source 1..479: mol_type = other DNA
tttgaagctcacgtctaaaactaactatttgtgtaacatcagccaagttatttcatctccctgtttcattacctcatttgtaaattgtggattataatagtaccttcctcataggctgatgtgagaattaaaacaaaccatgtatataaagtgctcagaatcatgtcttgccttaaaaagtgtttaacaaatggtcactgttgtcattctctgactctgtttatgcatatatgtattttttcaatgtttaatactgcattaaaggcactataaattctatcatcttccgataccttgattccatgtaaggatcaagttgaataatagagtagaagtttattctgggtaaaaatgaaagcacaattttatctcattaaatgttattctagtcagttcctttgagaatattggacagtaaaacactattacagatgttcctgtttatgtgtatacatttgtggttatttcagtctgacaag

SEQ ID NO: 5890 - DNA, 479 bp, synthetic construct
  misc_feature 1..479: note = Description of artificial sequence: synthetic polynucleotide sequence
  source 1..479: mol_type = other DNA
ccagctctaccatgagtttggattagaaattgtgtatccactggatgtaagaactatgtttgatcttttcttggtattcttccacttaattggtattcctttaaaataattagaattaatccaattaataaaattaatatggtctgtgagtacaaatatgattataataaatatagccaataaatggtttatataccatataggatgtatcaaaagaaataaaactttcaaaatgactgtgcccatttagacattttaaaatgtttctaagtagccattgtaggcaattatgttgctggacttcctccttgtcactgaccttcaatgaaagattattcagagcataaaagtgtccctattttaatgctaatttgttttcagaattaaaattatcttatcctatttgactactcatgttacactctaaatttggctgaataaattttctaaaaagatgaacatttgttaccattgattat

SEQ ID NO: 5891 - DNA, 121 bp, synthetic construct
  misc_feature 1..121: note = Description of artificial sequence: synthetic polynucleotide sequence
  source 1..121: mol_type = other DNA
attccaataataagtcacagactggttcataacttacaacagattgtttaccagggttacaacttcatgaaatcagaaattatacgtttttgtgtgttaaacatattataaagcctggcac

SEQ ID NO: 5892 - DNA, 240 bp, synthetic construct
  misc_feature 1..240: note = Description of artificial sequence: synthetic polynucleotide sequence
  source 1..240: mol_type = other DNA
ctgttcatttttagcaaatgtttgttgaatggtttgaggcggtagtagcctcatctcttgaactaaattgttagtgcctttagaaaagtggtacaatctgaatcttctaaatgctgcatattgccttgatctaagttttgaaaaccagacacaatccttatcattggggcaccatccttgttagaattttttatctgttgctttctattcatctggaatgtgtaaatattaaattaaaat

SEQ ID NO: 5893 - DNA, 241 bp, synthetic construct
  misc_feature 1..241: note = Description of artificial sequence: synthetic polynucleotide sequence
  source 1..241: mol_type = other DNA
actccagcctggccaacagagcaagactccgtctcaaaaaaaaaaaaattactttgacatctattaagaaatttgcagcaaagttaagcagcaacaatttacgcctttggggaattattgaatattattatgcctagaaggctgtcccttctttttcattttaaagaacatttttctctgaatttatgcaaatttgaggaggctaatccaagtcatctctacagatagttaggcaagacaa

SEQ ID NO: 5894 - DNA, 239 bp, synthetic construct
  misc_feature 1..239: note = Description of artificial sequence: synthetic polynucleotide sequence
  source 1..239: mol_type = other DNA
aatgtttgatactgcaaattttctcttgaaatgtatcagtcacttccactgtataaatcatgtaatatgtcagaggtttttgtttggatgaagtaaagctaattgcagtaaagatttgaagaatgatacttatccatcaaaaacaaacaaatatcttatgtttgagtaatgctctacagtttaaaaagtcatttcacatcttttattacccttgctcctcacaacaacaggcaatgtat

SEQ ID NO: 5895 - DNA, 241 bp, synthetic construct
  misc_feature 1..241: note = Description of artificial sequence: synthetic polynucleotide sequence
  source 1..241: mol_type = other DNA
atctactaccattctaagtgcattatctctggatttttggcttaattaactgttatgaaaagccacttaacttcattagtgaacaggttagtatgtatgactaattaaaaggtacccataatattttatactaacattaaacaagtaaaaatgtggctattgttcaggagctccaagttgaatgagctctcaaagataacgttttctttattattgtttcatgttattctacctgcaggtg

SEQ ID NO: 5896 - DNA, 239 bp, synthetic construct
  misc_feature 1..239: note = Description of artificial sequence: synthetic polynucleotide sequence
  source 1..239: mol_type = other DNA
acatttttgataaagctaagacaaatatatatataaatatatattatatttatatatataatatattatatatttatatataatatatatttatataatatattaaatatataatatattcaatatagactatattatatattaaatatataagtatattaaatatataattatatataaatctataatataaatgtattatattaaatatataatatttaatatataattaatttata

SEQ ID NO: 5897 - DNA, 241 bp, synthetic construct
  misc_feature 1..241: note = Description of artificial sequence: synthetic polynucleotide sequence
  source 1..241: mol_type = other DNA
taatatataaatatattaaatatataatatagctatgtgtggaggatgaaagcactgatcagctgattggccttgaagatactctcattttctttaattttcatgattgccttcctgttaataatgtgacagactcttttttagccctcctgagttgaatatttgggcacacgtggcagtataagtacaactcatgattgaatagtcttgtttggttgattgctcagttatctgagagtga

SEQ ID NO: 5898 - DNA, 240 bp, synthetic construct
  misc_feature 1..240: note = Description of artificial sequence: synthetic polynucleotide sequence
  source 1..240: mol_type = other DNA
gatcttggctctcatttggataaagcagtaaatgtctgagcagtgtctgctaatgtcgggtcagttcacatcaacattcagcaaatttgttgattgattcatttattcttaaaatatgttgaaagtttcctatgcatatgaccctgtttaatatttgtatgagaatctaatggctttagtgtagatatcattctcaatgggattcgatagcatttcggaaactgttgagcatggcagagt

SEQ ID NO: 5899 - DNA, 241 bp, synthetic construct
  misc_feature 1..241: note = Description of artificial sequence: synthetic polynucleotide sequence
  source 1..241: mol_type = other DNA
gataaattgtgcttttgtttacatgactaattgtaagggtttggaaacactcccttgatgtactaagagcagctaatgaagacagttaaataaacaaaccattatgatgaatctaggagttcatatagacattctgctaatttgcttcttgtccctttcccaaagttttatgtatatcttcccaagcataacaactattttacatttcatggagagctagtttgtttttcttcataaccta

SEQ ID NO: 5900 - DNA, 239 bp, synthetic construct
  misc_feature 1..239: note = Description of artificial sequence: synthetic polynucleotide sequence
  source 1..239: mol_type = other DNA
atgctctattcactcacttagaatgtcactgctcaaactggctttagagatcacgtactagctagctaatgctctttaccaataaggacactgaagctcctagaagtgaagtgataagccttagatcgcattgctaattggtgatggagccagtctagaatccaggtctcctaattgtttccactatactatgatgcttcctttagaaagctagatgctgtataaaatctcttgaaact

SEQ ID NO: 5901 - DNA, 241 bp, synthetic construct
  misc_feature 1..241: note = Description of artificial sequence: synthetic polynucleotide sequence
  source 1..241: mol_type = other DNA
agctctgtatttcaccaatcaatacataccaacttgagactagcaaacttttttagtatgttccatagttgctctcacactgtcattttgcctaacagcagctcatatctacttggagaaagtatcaaggattttcctctgatgagtttggtggctgtttagtgcctagactacatcatgtttaatggaaaagtagattgaatttctgtctcattttcaagaaatgtgctgtaagagcatg

SEQ ID NO: 5902 - DNA, 239 bp, synthetic construct
  misc_feature 1..239: note = Description of artificial sequence: synthetic polynucleotide sequence
  source 1..239: mol_type = other DNA
ccaagcccaaccccttgataatcttgtctaacagcgttggtggtgtaatgaattagtcttgcacgagtctgctgcttctagagggctaagcaggggatcaaatcccccctttgtagtgagacaagctgccagagaagtgattgatattgcagacagacttcaaggaagaaataagcagataagtggggtaataagtagataatactactactttgcacttagtgtcttttatctgagca

SEQ ID NO: 5903 - DNA, 240 bp, synthetic construct
  misc_feature 1..240: note = Description of artificial sequence: synthetic polynucleotide sequence
  source 1..240: mol_type = other DNA
tctgaaggcagctgtatacttaaacatcaaggtcccttagtgtaaggagacaacggggtctttccttttattctgtggtcctcctccataatcaataaatcagcgaaaatgtttccaaagaaagatcagcggtaaagatttgtttttgccctttctctgtgaagctaagtgaccaggatgtgaagcaatcgctctaaaagttatcttgatcttgatgcaatgttttgtatgcactttctc

SEQ ID NO: 5904 - DNA, 239 bp, synthetic construct
  misc_feature 1..239: note = Description of artificial sequence: synthetic polynucleotide sequence
  source 1..239: mol_type = other DNA
ctacaatgtttggatctgaaaaaagaaacttctactgtaccaagtaaggcatttactgtatttttaatcccttccgattgtgtcagactcattcctctgagtaattctcattcttgcatttattttactcctcaaaaatttcccttgtaaatcttattttcggtcaaagtccttagacagtaaatctttcagacagcttcaggccattgtggctccaagaaaccattgtgaagtaaagt

SEQ ID NO: 5905 - DNA, 480 bp, synthetic construct
  misc_feature 1..480: note = Description of artificial sequence: synthetic polynucleotide sequence
  source 1..480: mol_type = other DNA
cgtgtttaataaggtggatggaccctgttagagatctctctgagtatgcttccattaattttgtacacatcttgttaattcacacaaagagagtaagttgccaagccaaaattgtttccttttagcagaccatgactcaaaattcagaagctgattcctaggagagttaaagaacaatagtggctgccacattatttttttaggtaactttgctctttaacatagactagaataattttctagtcattaaatcaccaaatataaatacccagtgaccttacaaatattgtttaatcatcctctccatcaatggctttttttttctagtttatgtcatgtgagggtatttgttaaatcatagaaaactttgagatcatgaaggtcatcagatctaaccacccatgctgtctctggcctttcactccatcattataatatgcaagtgactggcttatagttcccttaggaggtaagagaaca

SEQ ID NO: 5906 - DNA, 360 bp, synthetic construct
  misc_feature 1..360: note = Description of artificial sequence: synthetic polynucleotide sequence
  source 1..360: mol_type = other DNA
atattgctgaatatgaaacaaaaacaaaaacaaaaaaaccaagttcttagcttcatatttatagtttgtctaaagaaaaaattgctttcttccaacgaactgcatttcctgtagaacacaaattttatacttggaagaattatgtgtagcgattttgcaaccatctttccttatgaccaaatacttttgtgagctgagaagtctcaggttgacataattaaagataaaatgtgacaggaattgtatgtgcacctgtgtttgaagggggccttgcagtaagtagaacataaagatatatgcatcgctgttttggtcatctcaatatagtattgactataatctcatatttttcccacttta

SEQ ID NO: 5907 - DNA, 361 bp, synthetic construct
  misc_feature 1..361: note = Description of artificial sequence: synthetic polynucleotide sequence
  source 1..361: mol_type = other DNA
taatttataaacatttcaactcatttgacaacccttacagttacctgtaaatgagatgatgtaggtgttgttatccctatttaataattgtaaaaatagagtttccaattttccccactgctaccaacctagaaagtatcagaacccagaccttttgactcccggccaagtatgaagtgctttcaaatagggcatcagatacagcaaatcatctgttactatgaagtactgtacaaaatgttagtactgttattgaatatattctcaagacttaggtacgcggttggccattgaggtacaaatcttttcccatagaaaggaaattgacagccgggcatggtggctcacgcctgtaatccca

SEQ ID NO: 5908 - DNA, 241 bp, synthetic construct
  misc_feature 1..241: note = Description of artificial sequence: synthetic polynucleotide sequence
  source 1..241: mol_type = other DNA
aaaactctgtctcaaaaaaaaaaaaaaaaaaaaaagaaagaaagaaagaaaaaaattgacttgtaaactacatataaagaagtcatttgctgttactgagtccactgtgttaacttgtttacatcttcaaactcattctgcctcaagtcagtcttattttcttttcttcaccccaaacctagaggattctgccttcttgctgggttctaggttctaccctttcagtataagatgaaaacca

SEQ ID NO: 5909 - DNA, 479 bp, synthetic construct
  misc_feature 1..479: note = Description of artificial sequence: synthetic polynucleotide sequence
  source 1..479: mol_type = other DNA
ccttccacacagctacctagatcgtaatatgccatgttttctctctccttgttttcacttagttttgtctttctatttgattgcgggtgctctttggatcgagttttttgtaaagtaccttctaatatacttgggcaactattatacttctctgaatgttgtaagcatcttatcctcatttctttttactgatatctaaccttctatctctctttaattcacacatttttaagtatcttttttaaggcccaaacatagaagtgaaaacttttcacagagagaaacagaggttaccttttactattaccttagtatgtttattggaaacctgtaatagtcaccaacatttaactgaatttaaagcagaaattgaggcagctgaatgggatgattgagataaagttttggtaccctagtaatataagccttgggccacaaacaaaaatatacttagttctcatagttaaatgtaatgagta

SEQ ID NO: 5910 - DNA, 478 bp, synthetic construct
  misc_feature 1..478: note = Description of artificial sequence: synthetic polynucleotide sequence
  source 1..478: mol_type = other DNA
atgtaattatttcaaatattggatgcaatactaagaatgaggagagaaggagagccacttgacacttacaaaatagttgcaaatttgggaggctgagacagaaggactgcttagcccaggaggttcagattagcctaggcaacatagcaagaccctgtctctgtaatttaacaaaatataaaaaatagttgcaaaacattgggacacttattttcaatctttggatttcatattgtctttctctaaaataaaaacgtgtggttatatgatttctaaagtctcttgatgtaatattctttagttttatttttatcattgcttgcaattactgctcatattatcattacaataagcccgacattcgttttcatcccttatctttggaacaccgtgtttccctccagagacggagacagagcgcttcctcctttctcttcctgtcttgctggggcctaagaagagaaaggggcactatctt

SEQ ID NO: 5911 - DNA, 479 bp, synthetic construct
  misc_feature 1..479: note = Description of artificial sequence: synthetic polynucleotide sequence
  source 1..479: mol_type = other DNA
tatgggtgaatacatgtatagccctaggaaataatgaaaaaaggatttaggagtggatgcttaactgattgctttctattaaaggctcacaatcctacagaagagtagcaatgaagaaatggatctttatgtttgaattcctaaatttatcctgaaaacaaaagccagcccctgctgggttagagtcctccaaagctagggatctgttaggagcactggttttgccttacagacctaaatgtaaatgttagtctcagatgggcagagagttgaactctctaattagccctgcaggtcagtcttgaaagaaacaagagtgtagcatccagcaatttaaaaaggcatcctgtgcaattgtttgctgagggtcagagggtaaatgctgttgtgacagttgggtggacttggcacacttctctacgcaggataagagagagaagagaggttgatgttgatctttggtgatagcaatagcagaa

SEQ ID NO: 5912 - DNA, 361 bp, synthetic construct
  misc_feature 1..361: note = Description of artificial sequence: synthetic polynucleotide sequence
  source 1..361: mol_type = other DNA
gacagttcccaaaattctagggtcttttaaatgtcctttcaattcacatgaaaggcttccgtttgcaatccaaggaattgaaatatcaagtcataggaaataagaggcctataccttttcttcagggaagttaaatcataaacctttctggaagcttaaagctgaagtatatttctcatatttacttcaagtatgagaaagatacagataattcaagtccaccacagtcttattccaacatgtctttcctactctatcttccatctcatgtcattccaggctcacctaactcaccctgttatttttttatgtttatttttattttattttgagacagagtcttgctctgtcatctagactg

SEQ ID NO: 5913 - DNA, 360 bp, synthetic construct
  misc_feature 1..360: note = Description of artificial sequence: synthetic polynucleotide sequence
  source 1..360: mol_type = other DNA
ccatgcctggcctcaccctgttattctgaatgcataatttcatgtctctgtcttttgtcctatgctgtttcttaattagattcctaaatgtcgatttcctcttcctcttctatttcctttttaccttaaggattcaactccttatctcttcatgaagaattaatcactcctttctctctgttcccatagaactatgtctgtaactttacacttacttagtcttcactttagttactatttcacatgtatttcacccgactttgtaaacatattttttttttttcttttaagtgtatgtctcctatactagatgaggaagtctttggacagatgctgagtcttcttcttcttcttcttctt

SEQ ID NO: 5914 - DNA, 121 bp, synthetic construct
  misc_feature 1..121: note = Description of artificial sequence: synthetic polynucleotide sequence
  source 1..121: mol_type = other DNA
ctggtgcgtcagcctcctgagtcgctgggattacaggcatgcgccatcacatctggctaatttctgtatttccagtagaggcagggtttcaccatgctggtgaactccagccatggctggt

SEQ ID NO: 5915 - DNA, 358 bp, synthetic construct
  misc_feature 1..358: note = Description of artificial sequence: synthetic polynucleotide sequence
  source 1..358: mol_type = other DNA
tgtacaataaagcattcagttagtgtttgaaaggaaatgtgtttgtctacaggtgtatgtgggagaaataaaatggcctctaactgatggcctctaacacacttctagtattaacatacactgaatgggtctatagtttgatgtatcaataaaatcaaatcaactaatttttaatcagctattatttactttagccttcattttttattgtcttgattccctgtaagaggatgaaaaactcaaatgtgacaatctttcctattatgtgaaccagtaaacatttttgaccttttccattctagagtcataatggaatcgaaagtagaacttgtctgatgggtgaggattgtgcatgagt

SEQ ID NO: 5916 - DNA, 479 bp, synthetic construct
  misc_feature 1..479: note = Description of artificial sequence: synthetic polynucleotide sequence
  source 1..479: mol_type = other DNA
tttaatttgcttaagtagtcttctagctattgatcatgaccaagaacttattattgttgctaaataggaattgtaagaatgtggatattttgaggaatgagttaggagaaaagaagctgaatatatcttttaaagagatgcttagactgaagtatcagttcccttttttgtccacaatcttatagatctggtcacaccacttacgttgttatcaactcggccctttaactttgtagcttaaatcccttaccccatagagaaactatcacaaaacctcgtgaatcaaagaaatacttaaagaagagaatgtaagtaaatgattaagatcggtataatattaccatttcattcacttagcaaccaagttacaaataattccttagctttattttttattttgctgaagccagctttcccatagctcgtgtgtgtgtgtgtctttatatgacttataatgaagcctgactttgctatgcatt

SEQ ID NO: 5917 - DNA, 479 bp, synthetic construct
  misc_feature 1..479: note = Description of artificial sequence: synthetic polynucleotide sequence
  source 1..479: mol_type = other DNA
tctttttgtgatttaaatacaacactcatactgaatccgtttgaagaaatgatttcatcattatcaggaggctacagtctatagtttccctttacttttaagcaacatatatattaacactaaagtagctttcaatctttgctggaaattacctatatttttaaaatgcatcactcctcgagtattttttaatccctttgtgacattattacaaaatcgtctagttcatgatcaatgcagataatgttttcttacaaaatcaaaccagcagcctccataggccagaagatctggcttaaccacccgggtcacagaggcacacctacttggttgcaccactttttaatcaacttgtgaatcaggcttgggaaggtggagttaagttagttcattgtgtctgtaacagtaggaagctcagaagaccaacatgtagggaaaaaagctgcaaagaaaatccatgggagccatttgtgtccaca

SEQ ID NO: 5918 - DNA, 479 bp, synthetic construct
  misc_feature 1..479: note = Description of artificial sequence: synthetic polynucleotide sequence
  source 1..479: mol_type = other DNA
ggacctctcaatttcccttgcagagcatgcaaataaaaaaggtgatttgctctgatatggaattcctgcacaatgttcaggcatgcgtgcaagacagtaatctcttctgtgacagagtaacctgtgtagcacaggggagcatgaagtttggagccagcaaacctgagttccaagctccagccttaagtatagtttattgtatgaacttgagtatgacgtttaacccctctagagcctcatttccttatctgagaatcaaggacaataagacgctgccaacttcacagacttattatatggatcaaaccagaacagacatctcccaagcagaatgtgaatgcttactctgcatactttccaagctgcaggaaatatagaactaaattgggcatcgcccttgctctcaagcttctatttcagtgtgggattcatgaaaacataactaaaaggcaataagatcagatcaacagtaatatagg

SEQ ID NO: 5919 - DNA, 121 bp, synthetic construct
  misc_feature 1..121: note = Description of artificial sequence: synthetic polynucleotide sequence
  source 1..121: mol_type = other DNA
tatcccaagaattgagtaaaatgttaacggagagagcaactgactgcctagaaaagacaagaaattacaaaaaaaagcaagaagacagatcctagcaagcacaagctaagtacatagaaga

SEQ ID NO: 5920 - DNA, 360 bp, synthetic construct
  misc_feature 1..360: note = Description of artificial sequence: synthetic polynucleotide sequence
  source 1..360: mol_type = other DNA
cactcaaccagtgtggagtaaaatggaagtagcagttatgtgggtgttaaagaatgtgtttgagtttgcctgttggagataacagaggaactagggtctacagagctgccaaattgtgaaatataagagatgtatgctttgtaagctgcaatgcaggatacatatccttaagctcttattacccagccccaaatcactgtacccttctttgcccaccaataagacttttccaaaagaagtactcaagttagatcatcctagacagaaatgtagaatactttaaagctagaactgatcattaggttcttatcaaaatattttcttgcactcttgaagttggatttggtttttcactttgga

SEQ ID NO: 5921 - DNA, 121 bp, synthetic construct
  misc_feature 1..121: note = Description of artificial sequence: synthetic polynucleotide sequence
  source 1..121: mol_type = other DNA
aaacagtttcctccatagattacttataggcccctatttcctaattctatgtacacttcactctctcctgtactcagggtcactgggacaaaaatgacacaaggaaggcacttgtttttat

SEQ ID NO: 5922 - DNA, 358 bp, synthetic construct
  misc_feature 1..358: note = Description of artificial sequence: synthetic polynucleotide sequence
  source 1..358: mol_type = other DNA
gtctttattattgttttggaccaagatctcctacaccccacacttagagtgagtggaaattgttttcagagacaggtgctttttctcccatggcttagtgtcacagaaggaagatgacaccagcctggtgacatttgtgcctgggagagctgccagtccatgctgcttccccagttttaagaaacactatggtttgtcatacctaaattacttccacctctctgctggcggtgacagtgatgtcagttatcctgggtccagctaaggtttcagtctgtgtgttttccggatcatgttgattctcttcttcttcttaaaatgcaatttttctcattttgtgtttgtggtaagggctatt

SEQ ID NO: 5923 - DNA, 480 bp, synthetic construct
  misc_feature 1..480: note = Description of artificial sequence: synthetic polynucleotide sequence
  source 1..480: mol_type = other DNA
ttctgccaaaacagacattatcaaagcagttgcatagtgagggactggtgtcctttataagcgtagagaaaatccgagaacgtcaggcccagaaaggactttagaaatcccacaggatttggccaactctttgtcgtacttgcaagaggctgagaaacagacagactagatagctatgtcaaggccttgtagcaagtcacagcatgagaaaagtggaactttaaaaaatatagatagctacagataccacatttacatataccatttctgtatacttaggatttaagggtaatgtaatcctgaacagtgtagcagagaggattagtgaaaacggggttcttggagtgacttatccaccctcgtggttcatgatgcaaaggtggtgtgcatactggatgggagattcacaggtgggattatccacggattcctgatgtcacaaacctgtgacttctcctattttctaaaactgaactgtgg

SEQ ID NO: 5924 - DNA, 480 bp, synthetic construct
  misc_feature 1..480: note = Description of artificial sequence: synthetic polynucleotide sequence
  source 1..480: mol_type = other DNA
ctactagcggacacatatgctataactaaaggtgcagaccggcagcaattaaaaccagagacggacgctagaactctctaagagcaaaatgcaatccccgccccacctggagttcatctaggattccaaagtaaatacacctcctttctgttttgcctagggatttttttttttcctggaaagggtggagaagatttacgtaagaaagctgagttgcctcaaaatacagcctccagaaagaatgaggcatctcctgcccaacctattattcctgctgaggagagagaaattgaggaactaaaagtgaagcctaaaattgccagggctgaaatcttggtagaaatcaactagtctataaaattagctgcctcactggccctttagggtggaaataccataaggagcagacatctgatgtaaagttgagagggaagttgtctgtcttcatcaatagtaaatcaaatctaggttaaatagaca

SEQ ID NO: 5925 - DNA, 121 bp, synthetic construct
  misc_feature 1..121: note = Description of artificial sequence: synthetic polynucleotide sequence
  source 1..121: mol_type = other DNA
aatgccatctccaaggagagtaggatcacaattatataggatgccgaatatataatgacactaaatccagttaacaggttgaaaacctgaggcatgggcaggggaagtgtcttgcttcaag

SEQ ID NO: 5926 - DNA, 358 bp, synthetic construct
  misc_feature 1..358: note = Description of artificial sequence: synthetic polynucleotide sequence
  source 1..358: mol_type = other DNA
taatgtaatgaatttactggcagatgcagaacttaacccaaaattcatgactcttagaacagtgccctttcatgcatgatcctgaaatgcaagaggggtttcatttttatggtttcaaggtagaatgaattatgaaaatctgggcttgtattataatatatcccagtgtggaatcagaaggaaaagtgatgtgttatgcagtgaacttgagtgaatacttattcattatccattcagcagaagagactaactcaaaatcaaagaggtgaaacccgaagcccaggtttcctgatgttgattccagagttctttccactattccttgctggcagttgactgcgtctatgaccatttgcca

SEQ ID NO: 5927 - DNA, 121 bp, synthetic construct
  misc_feature 1..121: note = Description of artificial sequence: synthetic polynucleotide sequence
  source 1..121: mol_type = other DNA
tggtggcagctgtatggaggatatggcagtaagtaggggggccagggactggaatatatagttttaatccggctattcaaacataagacaatacagtgctttaaaaaataagaatttatag

SEQ ID NO: 5928 - DNA, 359 bp, synthetic construct
  misc_feature 1..359: note = Description of artificial sequence: synthetic polynucleotide sequence
  source 1..359: mol_type = other DNA
gagatatttagtagccatcttcagaaatacatatattgataaatacaacaataaaagatactgaaatttatttggaatctatcataaactaaatagtgccatagggctgattagggaagttaaatattataatgtaaggtgatattttaccttttagagatgaaagttcaaagaaactaaacacatcactattcaaacacaatttagtttgatttaagaccttctctttccaaagtagaccagtcaatgggagtacagatgaatatgtttattttaatgaataacgtataatagcaataggaggaacttaattttgttgatgagtttttactctaagaaattttaaaaaatattttaaa

SEQ ID NO: 5929 - DNA, 480 bp, synthetic construct
  misc_feature 1..480: note = Description of artificial sequence: synthetic polynucleotide sequence
  source 1..480: mol_type = other DNA
taatagtagctgctagtgcttgtactagtgttgtagtaaggtgagctctgtaatgcattgttggcctaaacataaacaggtatactgtttggaaattaatgtatctatcaggctttaaaatatttttgtcttttaattgaataatttgcttatatgatagtgtattttaataaatagtgtaataatttttgctgtatgattatagcggtaaagaaaaatcgaagcaaattgaattctcaactaattggaaatagctaaattaattcaataactatgtagcagtttaatttctttaattttaaaatttaacataatgcattcaatgaactgagaacgtactcattttagcagattaatttcaaaaagtaggtatatgcatctgtatacacagatacatatgtacatacttaacaaaatatatctttggtatttagtatgtgtacacctggtaaaacacatacttgtgtgtaatatgtatct

SEQ ID NO: 5930 - DNA, 479 bp, synthetic construct
  misc_feature 1..479: note = Description of artificial sequence: synthetic polynucleotide sequence
  source 1..479: mol_type = other DNA
ctggaagagaataaaccaaaatgctaatggtgtctacgtgtagtttctaggataaatgactgcaatttattccatacattgtgtattttctatattttcaacaacatatttgtaatctaaacaaatacatgtatttttaaaaatcctaaagaagtgagttttgtataataaaataattagagtttttattttaatgtatataatactaaaaaggaaagcaatttggaaatacttgatgaatatgttaaaggtttaaacctttattaatgaagacactactccctcaacagagcagggattgggagtaaggcaaaatatattaatagatcatttaaaggagaaaggcagagggctaatgaacatattgaaacacatgtaatatcactagcactaaagggaattaatatcaaaatgaaatatttttttcatttataaagttggaaaagataatcctctcagtgctgtagtagttagcctca

SEQ ID NO: 5931 - DNA, 478 bp, synthetic construct
  misc_feature 1..478: note = Description of artificial sequence: synthetic polynucleotide sequence
  source 1..478: mol_type = other DNA
ttcaaatgtaatttggtgcagtctttttggaaaataacttgatattatatccatgaagtgacttaaatccataacatttgacccagtacttttagttgtaggagtacttaacaggggaaaatactcaaaatataatgataactaaaaaaaaattatattgcatatgatctcaatcttgtttatatacataaacacgggaggaagaccatagaaacttttaatgtaattctgagagttgcgcttatagttgactttcattttttatttgtattttacttttttcttctaaatttcacactatttttgtaacctaaaatttttaaatccataatacaaaacaatatgaggagagattatcttatctctgtacctttgtatatctatttacttgaactgtaagtaaggcactatctaaatccaggtaagtggtaaaatactgttattacaatcatagcatgggctatatggtaaatgaact

SEQ ID NO: 5932 - DNA, 121 bp, synthetic construct
  misc_feature 1..121: note = Description of artificial sequence: synthetic polynucleotide sequence
  source 1..121: mol_type = other DNA
gtaggacatacatgacattgaagaaggataaatacaggagtagggggaaaagtaaatattaagatgtaattaaacaatgaagcagtgtttgtagattccagtctcaaaatacacagattcg

SEQ ID NO: 5933 - DNA, 358 bp, synthetic construct
  misc_feature 1..358: note = Description of artificial sequence: synthetic polynucleotide sequence
  source 1..358: mol_type = other DNA
gatctcaattccaatgtttaatatctatctgcatttcagtgtcttcatctgtgcaataacaatgaacatagtatctaaggcataattttgtgagtattaaatgagtttgttatatgtaaagtgctttgagtaccttaaccataaaaagtgcagaatctaaattctgtctaccattttatcttttacttgaacatgtatacaaataaaaaattaaatctagaatacaactgtaagatttacgacagaactcgtctccctttctatgcctatgagacttacccatttttcagaacttagctggtcaccctaaaatgggtgagatctaatatcttgctttggaacttagcctcagactaaa

SEQ ID NO: 5934 - DNA, 121 bp, synthetic construct
  misc_feature 1..121: note = Description of artificial sequence: synthetic polynucleotide sequence
  source 1..121: mol_type = other DNA
aattgatttgttgaactaattcagtggccttcagtagcttcctcaaatgctaattcttatcacctatctgaggcaggagaggaaggtaaacacttaattcatgcaatattagaactttaaa

SEQ ID NO: 5935 - DNA, 359 bp, synthetic construct
  misc_feature 1..359: note = Description of artificial sequence: synthetic polynucleotide sequence
  source 1..359: mol_type = other DNA
agttactcagtgtgttctgttgatcatccttcaacttaatggtagctgataccaaaaagatctcattggttttgttctgcagcagcctggaaagccccaacatttcttagctttcacgcatgttctaaaaaccccaaccttttttgactattacaggtttttcatgctgacaactgtcccttttcacaaataattatcaagggcttgagatacggagcttgaattgaaagcgatattttttctctcttctattttagatactatactttgatttttacaagatcaaaaggcatctctctgtaaaatctctctgtaaaaaggcatctctctgtgtccgtctcataataaatgctttgggt

SEQ ID NO: 5936 - DNA, 479 bp, synthetic construct
  misc_feature 1..479: note = Description of artificial sequence: synthetic polynucleotide sequence
  source 1..479: mol_type = other DNA
aaatactcttctaattctagttctttcttatagaattatagaactgtttaattgagctgatactcaccgagcttttggagtactaaatgtgacatgatgaacataaatgtattctgacttcaaaaacttcacaatcttgttgaggagagcgttaagtatacaactttttgcattgaaagatagaattttattactgcttttatttatattcatataaaataagagaaggtttaacttcaactagggtttagagaaattctcacatcggtaggctttaaagaatctaaaagtatttgaatatatcgggaaagcaaatgaaggcattctaaactgagggaccggaatgaacagaaggacaaaaatagccagctggggtccacatttgctaagcaaagtggattataaggaaagtgaagctgaaatggtagtttggggccagattttaaagggccttgaatgccattctaagtaatttatct

SEQ ID NO: 5937 - DNA, 480 bp, synthetic construct
  misc_feature 1..480: note = Description of artificial sequence: synthetic polynucleotide sequence
  source 1..480: mol_type = other DNA
ggtcctgttggcactgggacaccctgaggagtgacatgatcagagttgcactttaggaaagatgaagttatatagtgagggagctctagcagggaggaaagaaagtggagacattgctgtatgttccttttttgccctcattcagcattcaggtagatttgttattaaaacatagaaggattgattgtcagcccctgtacctgctagttctgtattcatggactcaaacaaccatggatcataaatattcagggaaaaaattaaaaataaaaatacaacaaaccaaaaaaatccagtataactatttaactttttcacatagggatgtcaaatggagccattgacatcggtattttatgaaaatggcatttcaaatctgagaaaaatatatattattcgataaataataaagatcagttttcgattgatgagagtggattttcctttgtttttcatacagacatacattctggaaagtta

SEQ ID NO: 5938 - DNA, 121 bp, synthetic construct
  misc_feature 1..121: note = Description of artificial sequence: synthetic polynucleotide sequence
  source 1..121: mol_type = other DNA
aaagacttgcatgtgaaaacattcaaaaatcctaatattgtaatatggttgcaaaattttacattgggctgggaaaggcctttcacgctgtgtctgaaacacagtaagtcataaaacaaaa

SEQ ID NO: 5939 - DNA, 360 bp, synthetic construct
  misc_feature 1..360: note = Description of artificial sequence: synthetic polynucleotide sequence
  source 1..360: mol_type = other DNA
aaggataagttgactatggaaaaattagaattttcctacaccaaaaagcaaaccataatactgtatgcaaatttgaaagaccagacatacctaaacacacacacacacacacacacacacacacacacacgcatgcacaaatacatatacaaacacaaacacaggaaaatatagcacttataataaaaagttggatgttaaaaaagatagtcaacaaaatgttagcattttgttatttctggaaagcatatgcttcgatctgacatcttggacttctattcccaaagctatggctttacagcgccgccatttttacccagggggcagcgtgacccctaattcagagaccgtggagcttta

SEQ ID NO: 5940 - DNA, 479 bp, synthetic construct
  misc_feature 1..479: note = Description of artificial sequence: synthetic polynucleotide sequence
  source 1..479: mol_type = other DNA
cgaagtctgaggaaatgactgagaaaaggcaagagctctaaatagagttgttctaactactgaggacttgggacattgacgtaaaatccttgcatttctttatttatctgaaaaatgtagataataatactaacttacaccactaggtggttagaaaattaatgcatgttactaaacatttagtacatttgagatccacatataagcattgttgttgagtgcagagaattgttacttctttgtaacctgcttaaatcaatgcatgatatttacatcagctactcactaattctgaaaccaaacattatcaggtatactttaattagctcttttatggaaatgtttgtgctgagttcaaatctacatgaactattagcgaatttttcattgtgaggataccttaaagcaaaaaatatggattttccaccaatatgttccttttcctttatgtcatttaagtatcttaagtagctgtgcag

SEQ ID NO: 5941 - DNA, 121 bp, synthetic construct
  misc_feature 1..121: note = Description of artificial sequence: synthetic polynucleotide sequence
  source 1..121: mol_type = other DNA
cttgactacttcacttgtacaatatgaagatgagcaaactgagggacaaataaatatccgagtaaaatcagaggaatatcctctaaatcacttctctgattctggacaaaaacaggctctt

SEQ ID NO: 5942 - DNA, 360 bp, synthetic construct
  misc_feature 1..360: note = Description of artificial sequence: synthetic polynucleotide sequence
  source 1..360: mol_type = other DNA
atctttgtaattgtctttagaaatcatttagctctgccctcatttcacaaatgaggaatctgaatccagagtggttaagtaacttgccccaagggcacggagctcctgtctcctaactcccagtccagtgctcttttcttccaacatactcaaagttctcaagtagccatagtggatatattgtcttagattttgtccagaatctttgtagatatgttagacagagaccgtatttggattcatgctgatagctgaggtggcacatggaaggaatctgactttttcatctttcaaatcttgctgggaatcttttgacttcgtgaaaggtgaagtttgtttacatttttagtggatatcaat

SEQ ID NO: 5943 - DNA, 121 bp, synthetic construct
  misc_feature 1..121: note = Description of artificial sequence: synthetic polynucleotide sequence
  source 1..121: mol_type = other DNA
acttgggaccctgagccttagatttaggtgttcaaatggctacatgatcccattagtgtaaaaaacaatttaataatgactttggtaggcagttgtgctaacagcatttcctctagatcat

SEQ ID NO: 5944 - DNA, 359 bp, synthetic construct
  misc_feature 1..359: note = Description of artificial sequence: synthetic polynucleotide sequence
  source 1..359: mol_type = other DNA
tgattcccaagcgtgactcatccagaaccgcctagcaggctgtataaaatccagttgttggggctgtaaccctgcagagtctgattcaggaggtctggggccacgtccagaaatctgtttttaaaaagcaccctggatgattttcaggatcatccaagtttttgggccacaggaattatgcatacctttaaggaagtaaccatctgctttctactgttgactcttaagctgtcagtaggtgtagaatttagacacattgtacaaaaaattatactgtattttgtaagtaggtttttttttttttgccttctaggcagtgctcatttggttaattataggtagaaagagagatcattctt

SEQ ID NO: 5945 - DNA, 480 bp, synthetic construct
  misc_feature 1..480: note = Description of artificial sequence: synthetic polynucleotide sequence
  source 1..480: mol_type = other DNA
cccaatatatgtgtgaagaaatgaatgttttgtctgatataaatttgtagtgttacagagtactgtcatattcttgcatactcaagatcaaattatattatgggagttttttggtttttgtgtataaaagaaggaagcattattaccagtaacctatgggtcttatatatcagccaatgaccacgtcatcctttaagtgcataaattttatggatgcaaaagtagaagtaaaggggaggcaaatccgaagtcgtgaacgtatttgcaaactttgtttctgaaatgtatgttctaatctcttctggcttccaattctcttctaaactttgtgtcttctaaattttagaagaaatcacaattttcacttatagttatcttggccacttacaacctttcaagcaaaatagaggaaattgggtccctgagtggggggtgggggtgtaggatgatgtcaagaaataaatctaactgaattacaaa

SEQ ID NO: 5946 - DNA, 478 bp, synthetic construct
  misc_feature 1..478: note = Description of artificial sequence: synthetic polynucleotide sequence
  source 1..478: mol_type = other DNA
tactcagcagtaaagagagtattttaatgaatcagatgataaccatcagggtgcatttcatctccactaaatcttcgtaccaaggccagattctacatgaatgttggtacgtatttatgtaaatgtatttttaaaacaaaagccaattgatatcttatgctttaatacttattccactaatcatttacatagatgcatcacgtgcagtaatcatttttattacctattcacaagcaaaaatattagtataaactgggtacaataaaatagagaaaagaaatattcaaatagataagcgttttgttaaaaaaaaaaaaaagaagaaagaaaggacacatttatcaggattcctatttcccgtacataatatggatgtttgtttgtttttgtaagttaacgggaccggtggtttaacttgttattgaaacatgctcgaaaaaatcaggtagcttattttgtaattgcttgttatgaaacc

SEQ ID NO: 5947 - DNA, 479 bp, synthetic construct
  misc_feature 1..479: note = Description of artificial sequence: synthetic polynucleotide sequence
  source 1..479: mol_type = other DNA
actggcatttctctggggaaaataagttaaaaactctttagctatcaggcagtgggttttaattttttatattggttaaatgtaacagtggatttgcgtactctctcctaatttctaactttgtgtaatcattcttgaaaccccaaatctagattttaaaaaagaagccttctaaaagttttcctgaagtttacttttcagttacaaagagtaaaataactttctgaaatgccttctgtaaatcgtggtggtggtgcggtttgtttggggagatttgttttgtttttaaaagacagtgcactttcttatgaaagagacagggaaagttttacctgtctgtctcctgggtttgttttttttttctttctttctttttcttttaaagattggtgataaggaattctaactacttaatgagatgggagaggcctcactccattggagtggaggagtccaggtggaagttgatggattggaca

SEQ ID NO: 5948 - DNA, 121 bp, synthetic construct
  misc_feature 1..121: note = Description of artificial sequence: synthetic polynucleotide sequence
  source 1..121: mol_type = other DNA
ggtaaagagaagagtcccgcctcctcatgcctatagttgggtatatattaggaaaccttaaattatgtacagagagagaaagagagagagggacttgagttctgttatcttcttaagtaga

SEQ ID NO: 5949 - DNA, 361 bp, synthetic construct
  misc_feature 1..361: note = Description of artificial sequence: synthetic polynucleotide sequence
  source 1..361: mol_type = other DNA
ttcatattgtaagggtctcggggtgggggggttggcaaaatcctggagccagaagaaaggacagcagcattgatcaatcttacagctaacatgttgtacctggaaaacaatgcccagactcaatttagtgaggtaaggattttagattttagcactccatttagagatgctttttaatttttatttttgtaaaaaaacttacgtatttgcggttctcggtcacccaatgtaatgttttgcaaattgtatataggaatctccttttcttggttaatgttttctgtggtggctgtaagatttttttttttttattaagtaggagatgaaacagtaggagaagatgaaaaagaaaatctgggtg

SEQ ID NO: 5950 - DNA, 480 bp, synthetic construct
  misc_feature 1..480: note = Description of artificial sequence: synthetic polynucleotide sequence
  source 1..480: mol_type = other DNA
acattatgtatttgaaaaaataatattcaggagtttataaaatcactttttagaaaaacagactcagagagcagatcacactctgctagatacattgcaatgaatcctctgatgggtattcatgtaccagtaagaaaaatcagttgactgtgtcttaacttcttagcatagttctatttccagacttcatcctaaaagcaaatgaagcttttttcaaaataatcaggtgagattttttaaagccatcttcgtttttaagtctgtcaatccagagacccacctaaatccagaaggggctgtgataacgtttctgtcgtctggagggtgacttgtactttcacgtgtgatgacaaataaagttattttggagggatgcattgttaaatatttatacatgcatacatgtaaatgtgtattatagcatacaggattttatttaagaaactgattatttgcatttctgatctcttctcagcaagt

SEQ ID NO: 5951 - DNA, 479 bp, synthetic construct
  misc_feature 1..479: note = Description of artificial sequence: synthetic polynucleotide sequence
  source 1..479: mol_type = other DNA
ttgtcttaggtatttaaacctgtgcaaagggataaaaaaaaaaatcctgaagagactgtaaggctttgaggaagtttcctaaggttgagggaggtctaacaacaatattagtttacattcctcagaatggggcagctgtgttgacactaatcagattgggttgtggtggggagtgttgtggagagagagagttcggtgtttcagataaaaatgcttgcaggtgagtgcttggaaaagtggactagagtactcaaattgagctccttaaaaatcaaaacaaaatgcatagtattccggtgcagaccgcaagaggaagagtagagcagagggctgcgaagcagggcctgtgctatcgtattgaccacgctattgtctagactcctgaactgtgtaaatacaacaggggaaatatcgagttatctaaagaaggaaaaggaagtgcctatttttctttaaaacattcaagcaggcttgcttgt

SEQ ID NO: 5952 - DNA, 478 bp, synthetic construct
  misc_feature 1..478: note = Description of artificial sequence: synthetic polynucleotide sequence
  source 1..478: mol_type = other DNA
cctcagtagagaaacttgagtttcttgttttgcagttatattgaaagttagcttaaaatgttaccaatttgtttttaaataggattagcttttaagatcttcttgattctattggatccaattttgtccagttttaatcattcagaaaatgatctgtccatcatgtcatacctgagtttgtttgtctttattcatgaactatttcacacacagtatttataagccgcctaggatcttgtaagtcaaatgggagaagcaaaagtctgttcattgatatctctaagtgaagcacaaggttgatgtaaagtggcaagaaatgattaattttaggttaaatataatgtcgtgaaagaaagcaattgcattaatgttgtgattagaggatatttgtagaaattatttccttttatggaggcaaaagagtcatattgtatgtgagaatatggcatgcttatgaaagaaaatagttttatacaca

SEQ ID NO: 5953 - DNA, 481 bp, synthetic construct
  misc_feature 1..481: note = Description of artificial sequence: synthetic polynucleotide sequence
  source 1..481: mol_type = other DNA
ggttttagtttttcacaactctaggtaaatatgtaatcaagagctacaaaaggcatcccttgtctgttttctattggaatgctgctaaggtcgacaaaaaatatctgtaaaaaacatggctgcacttccctacctttctatgtctttttgcatgttgcctgcatgactttcatatccttccaccagtgcatgtattaggttataatttcatggcttgacttccattctattacgtacgaacaactttctttctgtacaggattatgctttcatatctagtcctctgttaaaattcagtgctacatctgagtatatgaaatgcctggcaccacatggctctgagaaccatgaatttaatataaaagttataatgtatagggatttatgtttattagtaactgtcaatacagaaaaagcaatctactattattacacaagaattgttaaacattgggtagattaaaaatgaaaaaggcataaa

SEQ ID NO: 5954 - DNA, 121 bp, synthetic construct
  misc_feature 1..121: note = Description of artificial sequence: synthetic polynucleotide sequence
  source 1..121: mol_type = other DNA
actccctgtaagagtgaaaattatttaaaaactataatccattctttgacttcaaataaatttatagtttaatttgctagcaatttctttgagttgataactcaaaaactatataagaaca

SEQ ID NO: 5955 - DNA, 359 bp, synthetic construct
  misc_feature 1..359: note = Description of artificial sequence: synthetic polynucleotide sequence
  source 1..359: mol_type = other DNA
ctgttccttctctattccttttcccacaacttttgaattcttccccaacccttagcagatttggatttgggggagctgctaattaacaggaaatggtccggaagggaggagaacacaagcaggatataacaggcaaggctgaaggctctacccttgggtacagcggagaggccgcaagcaagctccactccccagtgccagactaggaaagacagagcctctgggaatggtctcagacttggagatagagagggtcaaaataaaggaacttcttcacagatcaagttttaacttcaactttctggcaaaacaaaacaaaacaaaactgggctgtgtgtgtggtgtaagtgtgtatgtgt

SEQ ID NO: 5956 - DNA, 479 bp, synthetic construct
  misc_feature 1..479: note = Description of artificial sequence: synthetic polynucleotide sequence
  source 1..479: mol_type = other DNA
gtgagtggggaggatctcaaactccttcttagaaagagatatttactaaaattcctcatccggggttttagatgatgaaggaaagacactttggtaaatgggttacagtattttcgaactaaatgggaaatcaaggttcatatatggaaacacctcattttacaaatcagggttaatgatttttctttctgtagttgagagagctatatgtatacgatcgtgttccctttactcagccactttctttttaataccaaggagagatgggatgattcatagtagatgctccaaaacagtttccatgaagaacagttgtacaaagccagttgaatgcaagaaaaaaagtgtggagacagcagtgtaaactccctgtagtccaggtcattctcacttaattgacttctttgtctgcttggtctagggaaaaaaatctgtcctgtcctagtactatttctactgactcaaccatttaaaagata

SEQ ID NO: 5957 - DNA, 480 bp, synthetic construct
  misc_feature 1..480: note = Description of artificial sequence: synthetic polynucleotide sequence
  source 1..480: mol_type = other DNA
tgggtgtgagttttctattgatagttaataaatgtattaagctgtcccatgttgtacttctgagctagttagcatcataggaaaaagcacagtgggtgagaagcagaagctgcatttttaattagtgtcagccaggtcgtattcctcactccatgctgttgccatagattgcactacttgttttacagttggttgtcctcgagcccagagggaactaggagaaagacatcttagatcacagatcacagatcataccttccttcactactactggaaaaaaaaagattttgagacaataaatcacttatcctttacctcgataaggaaaaccgtgtttggtttggtttgctttttagaagagcagtgattctcaacagcatgtcacacgtacagcagaaagcatcaatggatgtctacattttctagagcaaccaaaaaaatattggtttctttttcattatacgtacattttctgaatgc

SEQ ID NO: 5958 - DNA, 121 bp, synthetic construct
  misc_feature 1..121: note = Description of artificial sequence: synthetic polynucleotide sequence
  source 1..121: mol_type = other DNA
aaagttgctaaaacattcctcaatgactatggacagaatttagattctgcgttctgctataaagggagtatatatctaatgtcatgagattttaaaaagggatttggatcaaacagttgag

SEQ ID NO: 5959 - DNA, 358 bp, synthetic construct
  misc_feature 1..358: note = Description of artificial sequence: synthetic polynucleotide sequence
  source 1..358: mol_type = other DNA
aaatatgttaccacaaatacaccctggttttctttgatgtgcatatgattgctctgggtggaatctgagctggtagaatagaggggcacaggtaaaaatccttccttcctagtataacttttctctccccttgaatatttttaaatttctaattgttttatgtcaacaaatagaatgaatacaggtaacaaaaagatacttctgtgaaaaacaacttgatgatttccataatttataagttttactattttgaagataaaaaattgttaaacccaagtgggcgctcaattttctttagatgtatgttgaggaaaatgtcagttgactaatatagcattattgtccagtgccaatttag

SEQ ID NO: 5960 - DNA, 478 bp, synthetic construct
  misc_feature 1..478: note = Description of artificial sequence: synthetic polynucleotide sequence
  source 1..478: mol_type = other DNA
tggaacctacaaatggtatccaatagagtactacattttgggtctggaagagcatggattcaagtgtcaaggtgaaacatttgattcaaaagttaagttttaaatcttattcctaatcttaaggacacaatttgtgggcccaagaaaatagtgaaatgtggcttattaatgggccaccactctaaacattttataatttttacttatactttttgattaagttctatgttgacaatattcatgaaaagtagtattgagaaagagaaacaggttagaagaagaactgactgactcttaaaaaaatgtttactgagcatcaattatatgtaaaatggtatataggatctaaaaataattaagaaataattcctacactaagaagtttatagttctttgggggaatgagctaagtatgcatgcaattataatacaggagagattttaagtgtgtgagcaagataatataaagcatcaaagg

SEQ ID NO: 5961 - DNA, 479 bp, synthetic construct
  misc_feature 1..479: note = Description of artificial sequence: synthetic polynucleotide sequence
  source 1..479: mol_type = other DNA
gaaagagagtccatgatgtaggaagatcaagaaagtctatatgcatatgtaagatgaagctgcacttggaaggacagatggaaatttccaagttctagaaatataagaaggaatgaggattttaggtgaagaaataagcatcagcaaagggaaggggggtgaggagtgaatgctggtacactcagaagcatcaaatagttcaaatgcaattgaaattatgagacgatcaggaaataaagttggaaatgcaagatagagtggctcagagatgaccataacactgagaggagagtacatttatcatagtgacaatgaaaagccatggaaggatttcgaacagaagaatggtgtaattgtgtaattggagctctactagagagcacagggagaataaatggctttgcttgagattgcctagaagtatgaaaatgcatctctctgcattgcacattggctgcctgttttgcagaaatatctat

SEQ ID NO: 5962 - DNA, 480 bp, synthetic construct
  misc_feature 1..480: note = Description of artificial sequence: synthetic polynucleotide sequence
  source 1..480: mol_type = other DNA
cagttctcttggatctttggaaggatacgcatggattgtttctaaagtctcatacaacctgtgtattttctgcccagtgctctttttaatagctatggtccctgccatagacaaattgggaactactggtcttggtttgtctttatttatgcctgctattctagcataattactaatagcacaccttttcactttcaaaactgtcccatttagaagataaattatatagtcactctgtaaagaccccattctttatttcattctcttccacacactaacactccaccccaaaatgaaaaagtagtataaatttggctgtaagccagacacaatgattttgaagtaccagccacaaatcattttgattatttcccccactaaaggaaacacttccttccaacccaacagttactgaaaacttataatagtcactgttatatgcactgtgaggaaagaagaaattagtaattcacagcttct

SEQ ID NO: 5963 - DNA, 481 bp, synthetic construct
  misc_feature 1..481: note = Description of artificial sequence: synthetic polynucleotide sequence
  source 1..481: mol_type = other DNA
agcctccgtgaattcataatctgagggagttatgaggggttcgtaaatgactccagtataaaacagaattggtaaaagatatcccaagttttgaaagagtgaaatcgagttcaaactgtttatgataaaggtaatattttatatggtttgagaactgaaattcagatgtggcgtgaggggaggaaagacattctatgtagaggggataaaatttataaaaatacaagggaggactgtgccagacaacgtgaaggaacatagtatattgatttaaaaagaaaatgtgttggtttaaacactgatatgtatttactatttatgtcaaaatggaacgcttttgtagaaatagcaacaaaagttaattggaatattgatctcactaagagcggaaacctatatgtgttttaaaagtgtgaccagtgttcagaattcgagattcaaaacttcacatactctagggatgatgagtgacatcttgcag

SEQ ID NO: 5964 - DNA, 121 bp, synthetic construct
  misc_feature 1..121: note = Description of artificial sequence: synthetic polynucleotide sequence
  source 1..121: mol_type = other DNA
gaaggaaaagaaaattagcccgaatgattccttaggctgaaaagttgaggattaccttttcccgttccttagacttctacagagccagatatggtgtcctatcatttatagggacttagta

SEQ ID NO: 5965 - DNA, 359 bp, synthetic construct
  misc_feature 1..359: note = Description of artificial sequence: synthetic polynucleotide sequence
  source 1..359: mol_type = other DNA
atgacattttaaaacttatcaaagctaggaacaaaattcaaactgactctctgtgtttattatgagttaattttatttattaaatagtcgtcttagaaataggaccagaagtcttttctctggtcactgctctaaatgcaaatagtaatcctgaagctgaatataagacatttattcagaatgagaatcccagctgggaaataaataacagagcagagggaaatatgaatatcccatttaaaagccaaccccaccaaataaaaaatttaagatattatctttgccataaaatttttaaatttgactttgggacaaggatacatgtgtaagatgtaatatgtaaagataaatattgggag

SEQ ID NO: 5966 - DNA, 480 bp, synthetic construct
  misc_feature 1..480: note = Description of artificial sequence: synthetic polynucleotide sequence
  source 1..480: mol_type = other DNA
aagacatgtcttttcccacatcaatatcctccctttccacagcctccttcatcacttccatctcacccaagaagaccacgtgggcaattgaagagataataacagggcaggggagggtaggccatggtgggaggaaggagtgaaccagtgacttgatttaaagccaaagggagtggataagagaactgggcttcaagataaataaggagacatctaagctagtactcatttctttctcttttttttaccaacctaatcctccactttcaaaaagtagattttgaaagcatcaaatgttaacatatgattgtcctacagacattaggggaaacagtgaggttccactaaatacaacctccttaaaagaaataagtagttcaatgaagtgtctgtaaaatcttttcaaaagtcttactttatacttccccacagttgatttccttagttggtctgagaatatagcacctatactattcaaaa

SEQ ID NO: 5967 - DNA, 121 bp, synthetic construct
  misc_feature 1..121: note = Description of artificial sequence: synthetic polynucleotide sequence
  source 1..121: mol_type = other DNA
actattcttttccattttctgcaaaaaaaattataaatttcttatttctaagttgattgattgcatgtttgatatggactaactttattctgattttgaagttgttcaagcttctttttca

SEQ ID NO: 5968 - DNA, 358 bp, synthetic construct
  misc_feature 1..358: note = Description of artificial sequence: synthetic polynucleotide sequence
  source 1..358: mol_type = other DNA
aagacaaagtacaaatggatcattgtatggattcgagctgagatggcttcaccagataatgttcacctgtcaatttaaaattcagtcactggggttaagatagagcacatgttggttctaggtgagggaataactggcaagaataaaacatttttggaatgttagtgaatgtgtgtgtaacgtaaattgatatttcatgcaaaacttgtaatctgaattgcatcttgtctgtatttcttaaatggcaaaaagatttccttataaaagctgaaagagggaattttgagtcaagctgtggtgtgttgccagaggcggaaatttatgaaacactcttgtcagctatgctggaaacactaca

SEQ ID NO: 5969 - DNA, 478 bp, synthetic construct
  misc_feature 1..478: note = Description of artificial sequence: synthetic polynucleotide sequence
  source 1..478: mol_type = other DNA
aaagaaatagttctactttcttattggtgctaaagccactaataggtgcagtttagtataatacccctatgagaattaccacccccgaagtgagcttgccttggaaggaactctgtacaggcattttctttttccttttaagcttgcgcaaaacacccaaaggggccatttcccacccagccagtgatctttctcaagtttattctttctcagatcacagagacaatggggaatatgccctgtttactcaaatcagtctggattagtgtcactctattgatggagtcagaattaaaaggaaaaccattaccctctcaaagggcaacatcagatgtttggggaatggcgtgattacttttaaatagaccgtgtgagactctgtcaccagactgaggttgaggactccacaagacacacttgaagagaaacagtaacactgggtgaggcaggaagctcttcataagccttaggcctggga

SEQ ID NO: 5970 - DNA, 121 bp, synthetic construct
  misc_feature 1..121: note = Description of artificial sequence: synthetic polynucleotide sequence
  source 1..121: mol_type = other DNA
aattatttcaacagacaatcccaaaatgcttgaaaggctgaaaatcagaatggtgagacttcagagaagagggcttttctgccttctttctttgctccaacacctcacccccatatattta

SEQ ID NO: 5971 - DNA, 360 bp, synthetic construct
  misc_feature 1..360: note = Description of artificial sequence: synthetic polynucleotide sequence
  source 1..360: mol_type = other DNA
tctccaggtcaaatcctttccagtcattaagccctgctggggagaaacttaaccctgaaaaagctctcagattcccccattcaggataacacttccatcctctgaactcttttactctgtttcttcctcattgctctctgtgtacaccagatccttcctccctatcctttgactgaagaccctgggagggtagaggatgtgttatgcttatctctgtatcccctacagggccactcagtaatgttccctgaatgtgatgaggacatgcatctgttgctgttgcttgaagggatatcttcacctaggaatatatggtgtattgtatatacttaaaaggctgtttgtaattgacttgtgcac

SEQ ID NO: 5972 - DNA, 121 bp, synthetic construct
  misc_feature 1..121: note = Description of artificial sequence: synthetic polynucleotide sequence
  source 1..121: mol_type = other DNA
aaaaataaataaagcgagccgacatattatacaagcctcttctatctatatgttctgcaggtaaaccaaattgtgtcattttccttcacatcttgcaggtcatttgtttttgctgtttgtt

SEQ ID NO: 5973 - DNA, 360 bp, synthetic construct
  misc_feature 1..360: note = Description of artificial sequence: synthetic polynucleotide sequence
  source 1..360: mol_type = other DNA
tgttttaataagcccaatattatttccattatcttttaaatagcaagaaagtttttgaaagacagggcagatgatttgtttggtatcaagtaattagtgtaaagtatgtgctgctttcacataattgattactcacaaggacagagaatgtgtttgattaaaaaaaagtcttagatttttatcttgctttgcaggccctttttaaaagtgtttacctgtgtctgcactgttcccttgattcagtttatcccctgcagttctctctgtcctcaccagagatgggggaagtttgatctgggtgaataagcttgatgatttgcaaacgctctctccttttaattctctatagtgttatcacta

SEQ ID NO: 5974 - DNA, 479 bp, synthetic construct
  misc_feature 1..479: note = Description of artificial sequence: synthetic polynucleotide sequence
  source 1..479: mol_type = other DNA
aaggatgtctgagaaacctcaaagcaatttttctcttaaacgtggtattccaacttttggttttgctcatatcttttataataggacaaatagaataaaatgaataagacgagtgtcttttcaaaagtaaggcatgtcttctgcatagctcaaaacttgagttttattttgcagttaaagtgacagctgagaggaacactccaatgttatataggtcaccatatctaattgcaaagtaatcactaaaaactttaattatctcaaatataacttaaaaagtagcaatcagcaaagaatttgacaaacaaaagcaaattagaactcatgaaacagtgttccccgcttgaatgcctatagtctaacaagattgagtagtacactccttgtttcaagcctcagttttccagttgcaaataaaaactagtgtttcaacctttaagtgtttgttatattggagcataaatttatatcatttgcaa

SEQ ID NO: 5975 - DNA, 121 bp, synthetic construct
  misc_feature 1..121: note = Description of artificial sequence: synthetic polynucleotide sequence
  source 1..121: mol_type = other DNA
gaaaggatttataagtctgataaactataatctcagttccttaaacatacaatcacaaactgttaattatggctttattctaaactgaattctggctaactgggcataaaatcatggaaat

SEQ ID NO: 5976 - DNA, 360 bp, synthetic construct
  misc_feature 1..360: note = Description of artificial sequence: synthetic polynucleotide sequence
  source 1..360: mol_type = other DNA
taggcagggagggaccaattttgtggcctatctaccagaaactaaatgtctttctctaagcttgtttctgggtggtttcttttcaaagcaacctgcatttggccatgtgctccatcagtaggaagtgaataattatatgaccacaaagatataggttcttattgctgacctaggtgcattcgaaacaaaacctagaccatcaggttaaaaaacactgccttggcacaaaagtgtgtatgtgtttgttttaaggaagtagaagctcattaataaacttcccagctaggtgtgagctaccaagtattactcattgtattgtgagtgacaggactggctattctgctactagttcccataaaa

SEQ ID NO: 5977 - DNA, 479 bp, synthetic construct
  misc_feature 1..479: note = Description of artificial sequence: synthetic polynucleotide sequence
  source 1..479: mol_type = other DNA
gctgaagctaaaagcacaattcccacctaccaagacaaagctaaacaaaaagtaaagatcatagagattatttagggatgcactataacatttgtctgacagtagcatataaagaaatgaatcaaatttggacacagactcaggataaaataaatgatcagttgtattagaataaaagagatactttctgcaagtaattttcatgttgaagtgttttgcatttattcttttaagaactgtctcctgagcatctattatgtttcagccattatcccaggtattggggattcagtactaaacaggccagatatattctctcattaacttattgcctagcagagaagaccaacatttttaaaagtttatacatatagttaatttctattatgattatatgatacaaatggaaagtgctatgaaaatgtggaacaaaagagaataatctgtctgaacagtcaaagaagacttctgggagatga

SEQ ID NO: 5978 - DNA, 121 bp, synthetic construct
  misc_feature 1..121: note = Description of artificial sequence: synthetic polynucleotide sequence
  source 1..121: mol_type = other DNA
catctgagctaaaggttgaacaaggaattggaaaacagctggcatgtgcaaaagacttgaagactgaaggagttagcctttaaaaaaatgaagaaagttctatttggccagagcagagttt

SEQ ID NO: 5979 - DNA, 359 bp, synthetic construct
  misc_feature 1..359: note = Description of artificial sequence: synthetic polynucleotide sequence
  source 1..359: mol_type = other DNA
caaatagtgcctcacaggccacgttaaagacctgaggcctttattctaggagaatagggagctgctcaaggaatttaagcttgagagtgacaagatcagatttgcaatgcctttcaagtggtagttacaaggagttgggtctctgaccctttgcaattatacccattctaactaagaatggggaaacttttatatcctgtctttaatgagtaaaaaaaaaaaaaagaaaaaaaaagcaaataaaagaggtgcgcttttcttgattgtaactttcagataaaaattccaggcagaaatgtgagtgattcctatttacatgcagtcggaatgaaagctacttaggaaagcgggttccggag

SEQ ID NO: 5980 - DNA, 478 bp, synthetic construct
  misc_feature 1..478: note = Description of artificial sequence: synthetic polynucleotide sequence
  source 1..478: mol_type = other DNA
ccagatttactggttcgacatccaggctcttctcactaccttgggcgagttacttaaccttgtggagcttcagtttcctcatctataaaacatggataaaacatggatattaatgccatgtgtctcatgagaaataagtaaaaccatgcaaagcacttgaacactctaagacacatacttagaactccgtaagagaattaataatagtagaagtaattgctcattttcttttatagaggggatggaagatggatgataagtagatttcagagttttaaaatttatttttatttttattttttgctcctgatagtcaccattactttattgaaactgatatgtcttcagtttcatgtcatggtaacgaaagcttattttctgtgataaaatgttaatcacatttaatcacccgttgttttaagtcacaatttaggatatgaactagacaaatatactaccaacattatttaaaaaatat

SEQ ID NO: 5981 - DNA, 479 bp, synthetic construct
  misc_feature 1..479: note = Description of artificial sequence: synthetic polynucleotide sequence
  source 1..479: mol_type = other DNA
ttttaaactcactttccaaaccaaggatgcattactgctgggcttctaaaggcagtatggtatgcttaacataaagatggcttaacattcattgaagaattttattactatgtactttcttcttttaatattaccatatctgctatatagagctatgaaaacatattgattgctatagattgaaaatctcttcaaacatattttgattcacttggaataaactgaaattctgaatatttcccctaataccagaattaaaaattattaaatattaaaattctatcctgctttctgcttagtttgatacttctttgatataaaatgataataattccttcagaattgggatgccttctgattttcattttgttgagttgttatgattattataggagtatgtactaaaataatataattttaaaatttatttttcttaattgagttctacacattttaatttagctgcatttggatcaagt

SEQ ID NO: 5982 - DNA, 121 bp, synthetic construct
  misc_feature 1..121: note = Description of artificial sequence: synthetic polynucleotide sequence
  source 1..121: mol_type = other DNA
tttaattttaatacctttcccacttcctgtcttttcaaatgttgtgtcaaatgtttgttgacattgttgtccacctgatcagacaactttgtatttatttctctcacctgccgttggggct

SEQ ID NO: 5983 - DNA, 359 bp, synthetic construct
  misc_feature 1..359: note = Description of artificial sequence: synthetic polynucleotide sequence
  source 1..359: mol_type = other DNA
tctagagctctttctcctaaattatggaatcttggcactcaaaggaatcttgacactttgtgtcagaacacaggacatctagtgaactctctgcttacagtcttgatagttttgggtgcgtttaaatactttattcttatattttgttctttgtatgagtatatattaagtattcactttttatataattttagaaaacaaaatgagtgacatattttatacctaataaaatctggttttgagaaaaatgtgatgctacataaattcttcggttggaaagatggtgttttaacttgacgtttgaataccaatatattttcttaacctggagtagaacactgtaagtcaattgtgtttaa

SEQ ID NO: 5984 - DNA, 479 bp, synthetic construct
  misc_feature 1..479: note = Description of artificial sequence: synthetic polynucleotide sequence
  source 1..479: mol_type = other DNA
ttctagcataaaagaaaccatcattctctgaggtggggcaggtggcagaagacgaaaaaatgacaagtatgtctcccttaggcagtgcttgttgaaaagtcactatcctgctgatatttggggatggaaatgtagtactctctgctaaagcataattgaatgaatgcttttaaagccagggtcatcaagtaaagctgttttctttacccatgagggactgtagaatgttcataaaagcacctccgtgaagcctcaggtgaaaggtggttatcagctgaggaaactgtatgtgctgcctaaaatgttttagatttctaagtttggtcagggacatctgtatagagagagaacagttaccttagaaaactgttttgaatgtggtcttatagcattgttttaacgtagcttcacagatgaggatggccataagtcacagaatgttagaactggagatccctctcattgaatcctcaaattca

SEQ ID NO: 5985 - DNA, 121 bp, synthetic construct
  misc_feature 1..121: note = Description of artificial sequence: synthetic polynucleotide sequence
  source 1..121: mol_type = other DNA
gtctcctcaattttacacagactttggattatggtaaactaaggtccacaagttgttcagctaccttgcccagaggtacacagcacactagtggcagtgttgggacttagactccatgtaa

SEQ ID NO: 5986 - DNA, 361 bp, synthetic construct
  misc_feature 1..361: note = Description of artificial sequence: synthetic polynucleotide sequence
  source 1..361: mol_type = other DNA
agaagtttaagttcagaattcttttgcatcactaggatccatacaggagtgtaaggagtactgaagcgtgttcaatcccctagcctcatccaccagtcactcatggattataaatacaatttcttccaagtgaaatttgggaatactgttgtatcttgtaacaaaggtctggttgaatcgagataagttatgattatatatcccaacagtaatctcttctacccctgatttggtccctatcccatttttttaataacctcttactatatattgttgactattgttgctatagtgtcataaatttactattatagatagtaatatctgaaaaaggggacattttaaaaaattctcttggcca

SEQ ID NO: 5987 - DNA, 479 bp, synthetic construct
  misc_feature 1..479: note = Description of artificial sequence: synthetic polynucleotide sequence
  source 1..479: mol_type = other DNA
tgcactccagcctgggcaacaagagtgaaactccatctcaaagaaaaaaaattatcttttacagataaattggtggagagagattttcaaaaacacaaattataggtaaatacctatttctattgcattggtcaaatagcttcattggaatctctttttgatgttaaatacttttataggaaaataattacgtcatcaactttaagtaaatataaatccaattatttaatattgagttatagcaatatatattgacacagttttgtttcttcatggtgaaaacagtttgagattcagctcctgggtatctttatacctaccatgcaagctgtatgtttcagaatgccctcagggtgttctatgattgcagggaatatgtcgagtccatgtgaccaaggcgtacttcatcctttctgtgatcagatcagctagtttgtgaggaacctgaatatatcacaactacaaataaattttccagg

SEQ ID NO: 5988 - DNA, 480 bp, synthetic construct
  misc_feature 1..480: note = Description of artificial sequence: synthetic polynucleotide sequence
  source 1..480: mol_type = other DNA
gtccaaacagtgattcttctatttcaaagttattttatagaaaatgaagcatctgtttggaatcacaggaaattattttactttataagtttcacagtagatatcacagaagttgtgttcatttttgcctttatgttttgtggaaagaatactgcctcttttttcagacatgctgagatagatatataatgtttccattcactcattatttgggtgtctgcagggtatgttaaggttattccaaaatcaagatgccttgtgtttagaaagggagaacctgcttcctatttcatttcagatacgccaataacttttgttacctaagaaatacatgcatatgggacatgggggctctatggagttcttccaaaggccgtttttatggctgatctgaaagtatagtgttctaatctctgagactgactctttgacttgtcattgtcagtaagcattgcattaacatcccagcatattacacat

SEQ ID NO: 5989 - DNA, 241 bp, synthetic construct
  misc_feature 1..241: note = Description of artificial sequence: synthetic polynucleotide sequence
  source 1..241: mol_type = other DNA
ttctctcctctgttatggaattattggctgtaaataaggcaagaggtactgctccctttaccccgccagatttgctgtgatagaaaataagggatagatattattcacttgacctgggacagcttcatgggcataaaaactgcaattggtcacacagggccctatcttagaaaagcaccattctttgtttaatgctttgctatcatcattttgaaattcttaatctatgaacaagaggttc

SEQ ID NO: 5990 - DNA, 239 bp, synthetic construct
  misc_feature 1..239: note = Description of artificial sequence: synthetic polynucleotide sequence
  source 1..239: mol_type = other DNA
tgcattttcatcttgcactgagcactacaaattgtacaaattgttttgctggacctgtctgggtgacacttgttcttcttgactataatggccagcccttggcttccaattgtaccctgttaacacacgcgatctttctttaaatcaaaggaataagtgaataagaatattttctttaaactagatattttaaaaattaacttctgaagaatgaatttattgatttttaataaactaag

SEQ ID NO: 5991 - DNA, 241 bp, synthetic construct
  misc_feature 1..241: note = Description of artificial sequence: synthetic polynucleotide sequence
  source 1..241: mol_type = other DNA
aaaatatgtaaatggatttccagtcattcagttctgactttggtgggtttgttgttgtttctgttcattttaagctaacattcaaagttagtagtgtcagttttacgctttccaggaaaagacaacggagtatactacttggcttatatttctgtaaagtatcacttgagaagcgtttcaactgaaatgtgttttcccactttgattgtgtgtagtaggctgatttctcatcaatcctaag

SEQ ID NO: 5992 - DNA, 240 bp, synthetic construct
  misc_feature 1..240: note = Description of artificial sequence: synthetic polynucleotide sequence
  source 1..240: mol_type = other DNA
aaatatacctttatgttatattaattgaggatttagcattggtaacaaatcttgtttttcttacgtacaaaatctcccttgggactggatataatttaaaactatgacgcctaaaagtagatccatcagtacccacattgctattcatgacttttgaaatacagtttctgcttctttgttgcttctcaatggttcagtctttctatcattccaaaggactcttgtgactcctcagtaaat

SEQ ID NO: 5993 - DNA, 241 bp, synthetic construct
  misc_feature 1..241: note = Description of artificial sequence: synthetic polynucleotide sequence
  source 1..241: mol_type = other DNA
ggaattttccctttcttttccttaatatccataaaatcagtttactcaagaaattatatagcagtatacagcctaaaccctttctcaaaattgtcactagcttttcttattcattaaaacattttcatctcattacaaatgatttcttcctttaaaatttcccagaaagtatggcctctgtattttctgctgctcagtttaaacacatcatcaaagacagataattattaatgtcatatga

SEQ ID NO: 5994 - DNA, 240 bp, synthetic construct
  misc_feature 1..240: note = Description of artificial sequence: synthetic polynucleotide sequence
  source 1..240: mol_type = other DNA
gcataacaggagatttataaatcagaaatgtattttctgggaaccaactttcaagttagtcaggtaagttttattaacttcactggtgaagtcctaggataaagcagtgcctagatcaggcttgtttacccttggccttatatggcaccaaacactgtttcaggacagtggaagaacagcctgggaggccttcggccttggccagccttgccgaggcccgctcaccaggagaaataggaa

SEQ ID NO: 5995 - DNA, 478 bp, synthetic construct
  misc_feature 1..478: note = Description of artificial sequence: synthetic polynucleotide sequence
  source 1..478: mol_type = other DNA
ggaaggccagtgagtgtgcaaaggagcatggcttattttgaggtcctgaaggccagtgagtgtgcaaaggagcatggcttattttgaggtcctgctgattgcaggccaacaaaacaatggcaggatttgaaggaagaaagtattgcaacagagtcaccgtatactttgaactgcaaagggagactgaggaaatgttgcctcaaggccaaaaaccctggctcaaaacacaggttcctcaggtgactcagaggcagaccaagttcaccaagtcaaggacattttcctgctacccccctggggagaggggccttcaccaaaccaccctggacatggatctcctgctgttcagaacccacccaataaacaacagaagcaaacactttttttttttttttttttttttttttgccccttacacggaattgtccctttttgtaagtccttgttgaattgaagagtgtttgctcactggctttta

SEQ ID NO: 5996 - DNA, 241 bp, synthetic construct
  misc_feature 1..241: note = Description of artificial sequence: synthetic polynucleotide sequence
  source 1..241: mol_type = other DNA
aagtgtggtcccaaaacttttttcttcgtttatattgggttaaaaaaaaaatcaaggggcccatgcgtctttgttctcatccaagcccacaattagttagctggggttccttctgtgtagctagaagcaggagggaagggggtggcccagcaggcattttactgcctgcgagaaagtgctgtgagtttctttgtcctttttgtcagggacggctgcctccctaattgtactgctgtaggga

SEQ ID NO: 5997 - DNA, 240 bp, synthetic construct
  misc_feature 1..240: note = Description of artificial sequence: synthetic polynucleotide sequence
  source 1..240: mol_type = other DNA
ggcacgtgcctttgggagcattatctgattcctacaggacgttcaagagtgctttgtatactgacccttaacttgaacacaaagaatatcttttcaatccccttccgaggctgttgcctcaggcttggatacctaagagctttagttcagccggggtatggaccatttatatgggctcaggttttatttttttgtcccctagttgtcttacctgcagtttggccacacctgccgggagag

SEQ ID NO: 5998 - DNA, 479 bp, synthetic construct
  misc_feature 1..479: note = Description of artificial sequence: synthetic polynucleotide sequence
  source 1..479: mol_type = other DNA
aaagctgaagatggtgggtaagtggtggatagcagctatagaagtcagaagggagagaaagcgagacaaacagctgctcttgtcagcatggggataagtgtaaagagattaatagttatttgaagagcaaatggggacatggcattcggcagtggaatgcgaatgcatgaatgtaatggaatgagcatgtgactattaacatttagacaaatgcttcctggactgaatggaatggcaaagcccacttctcctccccctgtggaaaaaaaaaagttcaataaaataattaaaagtttgaaatttttaaaaagataagcctagctcctatttctttgtaagtttgttcttctctatagttttacttaatctgggactctcagttacatttcaactgaagagctaggcctatttcctttataaaatatgtacgaataggactgccttaatcttgcttttgatttttttttctcattcattag

SEQ ID NO: 5999 - DNA, 479 bp, synthetic construct
  misc_feature 1..479: note = Description of artificial sequence: synthetic polynucleotide sequence
  source 1..479: mol_type = other DNA
gttgatgaaacaagatttctatgtgtcggaaggttttacaaaggaaaagcaactgtaccataagctggttgcccctttgttcattttggctcaggtttagaaatgatgataggctgatttgcctactcaggctgacagttttgatggcatggacagagccctgaagtcagaaccagaagattcagcaccgaaagccccagtcattgtgttagcggatgctagggcaaatgctctacctctccgatagtaatatagtcaagttttttgtagagtaaatgaggcaaaattaatttattctttcataaatatgttcttgagtacttttactctgtgcttgggcccattcacatagaagacataaaaacgtttggcagaaggaaatacatgagctaatgtatttttgaattatattgaccatagaattttcttcataagtagttggtatttctcttacaaatgttctactctagaaaagaata

SEQ ID NO: 6000 - DNA, 241 bp, synthetic construct
  misc_feature 1..241: note = Description of artificial sequence: synthetic polynucleotide sequence
  source 1..241: mol_type = other DNA
aatttctattaagaaaatgaaagaacaaataaaaaagaattagaccagtttggatgatttactagcatgttactttttaaaatacatagttgggtgtccctaaccccgctacccatgatcctccagtctttgtgaaaccagtccttagggggctgggtggtacactcttggtactctgggacagaatgcagaattgcaagattaagagaaaattcgaaggtcatttgattttgccccctat

SEQ ID NO: 6001 - DNA, 240 bp, synthetic construct
  misc_feature 1..240: note = Description of artificial sequence: synthetic polynucleotide sequence
  source 1..240: mol_type = other DNA
gcaacaatttaacacttaaatcccctctggaacatacctatcaagtggtctttctcattttgtgtaacacgccccaacccccaccaacaacctcaaaatggaatagcaggcagtatttatttaaagacttcctaagcagctactgagcactgggaacgttttgcctagtttgtgaataagcatatactctactttcaaatgctctgtaggaagtcagtctccagaggtggcacatagagc

SEQ ID NO: 6002 - DNA, 480 bp, synthetic construct
  misc_feature 1..480: note = Description of artificial sequence: synthetic polynucleotide sequence
  source 1..480: mol_type = other DNA
tgagtgatctggaaaagccgttacaaacacacacatgctcagacttctcttgttttctctgtttaccaaaaatcaacggttttactttgaatgtgaagtgcttccgacgtgaggtccatctctgtagaatgcattcacccatggatgcctttttttggagcaatgatccgtggcttcagcggctaatattggggtttctgggtgtccttgcagccacagtacacgaacctggggctcctgaacagcatggaccagcagattcagaacggctcctcgtccaccagtccctataacacagaccacgcgcagaacagcgtcacggcgccctcgccctacgcacagcccagctccaccttcgatgctctctctccatcacccgccatcccctccaacaccgactacccaggcccgcacagtttcgacgtgtccttccagcagtcgagcaccgccaagtcggccacctggacggtaagagcagcg

SEQ ID NO: 6003 - DNA, 188 bp, synthetic construct
  misc_feature 1..188: note = Description of artificial sequence: synthetic polynucleotide sequence
  source 1..188: mol_type = other DNA
gtattccactgaactgaagaaactctactgccaaattgcaaagacatgccccatccagatcaaggtgatgaccccacctcctcagggagctgttatccgcgccatgcctgtctacaaaaaagctgagcacgtcacggaggtggtgaagcggtgccccaaccatgagctgagccgtgaattcaacgagg

SEQ ID NO: 6004 - DNA, 121 bp, synthetic construct
  misc_feature 1..121: note = Description of artificial sequence: synthetic polynucleotide sequence
  source 1..121: mol_type = other DNA
caggacagattgcccctcctagtcatttgattcgagtagaggggaacagccatgcccagtatgtagaagatcccatcacaggaagacagagtgtgctggtaccttatgagccaccccaggt

SEQ ID NO: 6005 - DNA, 121 bp, synthetic construct
  misc_feature 1..121: note = Description of artificial sequence: synthetic polynucleotide sequence
  source 1..121: mol_type = other DNA
tttcaggttggcactgaattcacgacagtcttgtacaatttcatgtgtaacagcagttgtgttggagggatgaaccgccgtccaattttaatcattgttactctggaaaccagagagtaag

SEQ ID NO: 6006 - DNA, 138 bp, synthetic construct
  misc_feature 1..138: note = Description of artificial sequence: synthetic polynucleotide sequence
  source 1..138: mol_type = other DNA
gtgggcaagtcctgggccgacgctgctttgaggcccggatctgtgcttgcccaggaagagacaggaaggcggatgaagatagcatcagaaagcagcaagtttcggacagtacaaagaacggtgatggtacgaagcgcc

SEQ ID NO: 6007 - DNA, 121 bp, synthetic construct
  misc_feature 1..121: note = Description of artificial sequence: synthetic polynucleotide sequence
  source 1..121: mol_type = other DNA
tgcatttttcctccaccagcgtttcgtcagaacacacatggtatccagatgacatccatcaagaaacgaagatccccagatgatgaactgttatacttaccagtaggtcttccttgggtgt

SEQ ID NO: 6008 - DNA, 138 bp, synthetic construct
  misc_feature 1..138: note = Description of artificial sequence: synthetic polynucleotide sequence
  source 1..138: mol_type = other DNA
ggtgaggggccgtgagacttatgaaatgctgttgaagatcaaagagtccctggaactcatgcagtaccttcctcagcacacaattgaaacgtacaggcaacagcaacagcagcagcaccagcacttacttcagaaaca

SEQ ID NO: 6009 - DNA, 121 bp, synthetic construct
  misc_feature 1..121: note = Description of artificial sequence: synthetic polynucleotide sequence
  source 1..121: mol_type = other DNA
cagtctcctttcagcctgcttcaggaatgagcttgtggagccccggagagaaactccaaaacaatctgacgtcttctttagacattccaagcccccaaaccgatcagtgtacccatagagc

SEQ ID NO: 6010 - DNA, 159 bp, synthetic construct
  misc_feature 1..159: note = Description of artificial sequence: synthetic polynucleotide sequence
  source 1..159: mol_type = other DNA
ggacctcaatacagtctccatcttcatatggtaacagctccccacctctgaacaaaatgaacagcatgaacaagctgccttctgtgagccagcttatcaaccctcagcagcgcaacgccctcactcctacaaccattcctgatggcatgggagccaaca

SEQ ID NO: 6011 - DNA, 146 bp, synthetic construct
  misc_feature 1..146: note = Description of artificial sequence: synthetic polynucleotide sequence
  source 1..146: mol_type = other DNA
gttcccatgatgggcacccacatgccaatggctggagacatgaatggactcagccccacccaggcactccctcccccactctccatgccatccacctcccactgcacacccccacctccgtatcccacagattgcagcattgtcag

SEQ ID NO: 6012 - DNA, 121 bp, synthetic construct
  misc_feature 1..121: note = Description of artificial sequence: synthetic polynucleotide sequence
  source 1..121: mol_type = other DNA
tcctccctctgcagtttcttagcgaggttgggctgttcatcatgtctggactatttcacgacccaggggctgaccaccatctatcagattgagcattactccatggatgtaagtaactgtt

SEQ ID NO: 6013 - DNA, 298 bp, synthetic construct
  misc_feature 1..298: note = Description of artificial sequence: synthetic polynucleotide sequence
  source 1..298: mol_type = other DNA
ggatctggcaagtctgaaaatccctgagcaatttcgacatgcgatctggaagggcatcctggaccaccggcagctccacgaattctcctccccttctcatctcctgcggaccccaagcagtgcctctacagtcagtgtgggctccagtgagacccggggtgagcgtgttattgatgctgtgcgattcaccctccgccagaccatctctttcccaccccgagatgagtggaatgacttcaactttgacatggatgctcgccgcaataagcaacagcgcatcaaagaggagggggagtga

SEQ ID NO: 6014 - DNA, 121 bp, synthetic construct
  misc_feature 1..121: note = Description of artificial sequence: synthetic polynucleotide sequence
  source 1..121: mol_type = other DNA
tcaatgttctgctgcatttccatgtgctcagggttagccacgaaaaatgtgtgagctgcttccactgctttttcgagctggttaagctaaagagaaaaaaaaatgaccaaaatgaaggcaa

SEQ ID NO: 6015 - DNA, 121 bp, synthetic construct
  misc_feature 1..121: note = Description of artificial sequence: synthetic polynucleotide sequence
  source 1..121: mol_type = other DNA
cacattgccaggtaccagaaacacagaagactgacacccgccacttaagtggggccagggctggtgtctgcccatgttgccatcctgatgggctgcttgccacaatgagggatcttcttca

SEQ ID NO: 6016 - DNA, 121 bp, synthetic construct
  misc_feature 1..121: note = Description of artificial sequence: synthetic polynucleotide sequence
  source 1..121: mol_type = other DNA
gaagaagaatttgtattactgaccctccgtggagttttggagaatgaatttggatacaagctgtgcatctttgaccgagacagtctgcctgggggaagtaggtatttcagaggagtacaaa

SEQ ID NO: 6017 - DNA, 121 bp, synthetic construct
  misc_feature 1..121: note = Description of artificial sequence: synthetic polynucleotide sequence
  source 1..121: mol_type = other DNA
tcctaaatttgttcagcttgacggattttagaatgatgggaagtctcttgttagccttcgtgcaattttgtagattaaaacataaactttgtccagaatgtaaagatttagacgccttcct

SEQ ID NO: 6018 - DNA, 121 bp, synthetic construct
  misc_feature 1..121: note = Description of artificial sequence: synthetic polynucleotide sequence
  source 1..121: mol_type = other DNA
ttcaattactcattgagatactaccagaagaatgaaacacttcaacaaatattttgattttgtcaacactccttttcctttatttacataaggaaagtcctttaaattttaatgttcccta

SEQ ID NO: 6019 - DNA, 121 bp, synthetic construct
  misc_feature 1..121: note = Description of artificial sequence: synthetic polynucleotide sequence
  source 1..121: mol_type = other DNA
gtcagcatcgaccagtccaagctgcctggagtcaaggaaggtaagggccccggagggagagcgcgcgggaccctcccctctcccagcccgaggttctctcaggtcaggggcgttgccattt

SEQ ID NO: 6020 - DNA, 121 bp, synthetic construct
  misc_feature 1..121: note = Description of artificial sequence: synthetic polynucleotide sequence
  source 1..121: mol_type = other DNA
ccactcctgcagctactgggcagggatggcagccatccaggtctttgaaaagatgaatcaaacgcatctgtctgggagagctgatgaacactgtgtgatgcccccaccttaacccctcagg

SEQ ID NO: 6021 - DNA, 121 bp, synthetic construct
  misc_feature 1..121: note = Description of artificial sequence: synthetic polynucleotide sequence
  source 1..121: mol_type = other DNA
cacttacataatcacacagtaatagtgggagacgttattgcacacagcatcaaagcagcttactaacaaaatatccaggaactaaacttgacaccagaccaaatggacctaacagacatct

SEQ ID NO: 6022 - DNA, 121 bp, synthetic construct
  misc_feature 1..121: note = Description of artificial sequence: synthetic polynucleotide sequence
  source 1..121: mol_type = other DNA
taatcagcttcactgattctgaggctttcagccttagactaggccaggttactttcctggttctctagcttgcaaagcctattgtgagacttctcagcctccataactgtgtgaggcaatt

SEQ ID NO: 6023 - DNA, 121 bp, synthetic construct
  misc_feature 1..121: note = Description of artificial sequence: synthetic polynucleotide sequence
  source 1..121: mol_type = other DNA
ctacaaagttgcagcaaacactgaattagtaaatattaaaccattgctcctagggaaaatatggagttaagtttttgtgagcctctggtcacagcatttttgttaataaacacataacctt

SEQ ID NO: 6024 - DNA, 121 bp, synthetic construct
  misc_feature 1..121: note = Description of artificial sequence: synthetic polynucleotide sequence
  source 1..121: mol_type = other DNA
tttgctaagaaactgaataagggaaagcttcataatgaaaatactgcatcataagataagagttgtattggaattttaaaaattattttgggggtgatgaataagaaccataacaatagat

SEQ ID NO: 6025 - DNA, 121 bp, synthetic construct
  misc_feature 1..121: note = Description of artificial sequence: synthetic polynucleotide sequence
  source 1..121: mol_type = other DNA
ttttggatggccgtcagcagctaatttgtgaggggaatactcacaaattgtggtgctcacagacccagaatgtgaagccccttggtaagcttgcgtccccagtttcagctcagtgatcatc

SEQ ID NO: 6026 - DNA, 121 bp, synthetic construct
  misc_feature 1..121: note = Description of artificial sequence: synthetic polynucleotide sequence
  source 1..121: mol_type = other DNA
ttagagcatacaagcaaatccacgataacaaatttacgttaagttccagaaaggaaaggcgtagagtgctattaaaaaggaatagcaggggccatgtaatctagactgagttggggagtag

SEQ ID NO: 6027 - DNA, 121 bp, synthetic construct
  misc_feature 1..121: note = Description of artificial sequence: synthetic polynucleotide sequence
  source 1..121: mol_type = other DNA
agagccaagggtgagctttgtggtagagaacgttttgcagctatgaatcacaattcccatgaagaagtgtttcctctccactccctgacttgctgagcatcctcatctatgctcctatgct

SEQ ID NO: 6028 - DNA, 121 bp, synthetic construct
  misc_feature 1..121: note = Description of artificial sequence: synthetic polynucleotide sequence
  source 1..121: mol_type = other DNA
ccattatttcatgcattgacaaatactaaacacatcggccatgcactcagcagcaatgtgtggagtcttttgtctgatcacatcatatcacagctttgtattacagtatgtgactaacaca

SEQ ID NO: 6029 - DNA, 121 bp, synthetic construct
  misc_feature 1..121: note = Description of artificial sequence: synthetic polynucleotide sequence
  source 1..121: mol_type = other DNA
aaatgagatccttaatttgtttatcttcctagaaaaaatatagagattactttacctctacaaagaaagccacacagaattgggtgagggctaccaccaaaattaaaaccctccacgatgt

SEQ ID NO: 6030 - DNA, 121 bp, synthetic construct
  misc_feature 1..121: note = Description of artificial sequence: synthetic polynucleotide sequence
  source 1..121: mol_type = other DNA
caaaatatacagagatgagtgtgtgtgcatttaataaaagagcaaagacagcttaccccactaagcacatagacacacagagtatagatcatcccaatggtggctgttcctacaaggcaca

SEQ ID NO: 6031 - DNA, 121 bp, synthetic construct
  misc_feature 1..121: note = Description of artificial sequence: synthetic polynucleotide sequence
  source 1..121: mol_type = other DNA
tttatgacagaaccgaaagggaaagagcatgatgacatatttgataaacttaaagaggctgttaaggaagaaagtattaaacgacacaagtggaatgactttgcggaggacagcttggtat

SEQ ID NO: 6032 - DNA, 121 bp, synthetic construct
  misc_feature 1..121: note = Description of artificial sequence: synthetic polynucleotide sequence
  source 1..121: mol_type = other DNA
ctataactagactcaagtttcagcaggctccaggggttaaagtttaaagtgtgatccatgtgaaactgtcatatacatcaaaagaattataagctttttccattcatagtcacagaaacct

SEQ ID NO: 6033 - DNA, 121 bp, synthetic construct
  misc_feature 1..121: note = Description of artificial sequence: synthetic polynucleotide sequence
  source 1..121: mol_type = other DNA
cacataatgtttgtgcacttttttttttttttttttgcatttactacgtaagagatctagaaaaggatggcagtgggggtagggggttggtaatgaaaagaagagagagaaaggtcctgat

SEQ ID NO: 6034 - DNA, 121 bp, synthetic construct
  misc_feature 1..121: note = Description of artificial sequence: synthetic polynucleotide sequence
  source 1..121: mol_type = other DNA
cttccccagctcctgtatgcgctgctactagggccctgctgcccgagcctcgatagacacggtgagccgcagagaaccgcagctcgacctcaggtcccactcctgactagcattgtactgc

SEQ ID NO: 6035 - DNA, 121 bp, synthetic construct
  misc_feature 1..121: note = Description of artificial sequence: synthetic polynucleotide sequence
  source 1..121: mol_type = other DNA
gtgagctgtctggccagaagagccccgacggtgtcacacagactggtcaggaggcagcacgcagcacacagtgccgactggtcctgtctgggtttctgtgcacatctcagatagagaagcc

SEQ ID NO: 6036 - DNA, 121 bp, synthetic construct
  misc_feature 1..121: note = Description of artificial sequence: synthetic polynucleotide sequence
  source 1..121: mol_type = other DNA
ttgcctgccaggcacacaggggatgtgaaatgcagatgaatgaaatgcagatgaatgaataacgaatcaattgattgtaaatactccatttcttggctttgaccgtatggaagttgtggaa

SEQ ID NO: 6037 - DNA, 121 bp, synthetic construct
  misc_feature 1..121: note = Description of artificial sequence: synthetic polynucleotide sequence
  source 1..121: mol_type = other DNA
gtgcctgtgcagtgctgggcctcagcaggggcctggcccagtgtgaccgcagcgccacaatagccaggctccccccgagggcatcttgtacgcaggctgatactttgagcttactcattcc

SEQ ID NO: 6038 - DNA, 121 bp, synthetic construct
  misc_feature 1..121: note = Description of artificial sequence: synthetic polynucleotide sequence
  source 1..121: mol_type = other DNA
aagaaaggaaagaaaacttaatattctataatgatatatatttcacctatcaaattggcctgtacccaccccttcacctcactgaaaatccctgggggcccacatatccttcaagacagca

SEQ ID NO: 6039 - DNA, 121 bp, synthetic construct
  misc_feature 1..121: note = Description of artificial sequence: synthetic polynucleotide sequence
  source 1..121: mol_type = other DNA
tctcatattaacaggtatatgatttcaatagtcacttccaaatttgctctgcataaagacagtagctatatacagtcatttttaacatgtgtagtggcaaataatcattattgacagaata

SEQ ID NO: 6040 - DNA, 121 bp, synthetic construct
  misc_feature 1..121: note = Description of artificial sequence: synthetic polynucleotide sequence
  source 1..121: mol_type = other DNA
atagtgtccccggaatggacggactcacgggctgtcacatcgcgcacgtcttccccggagatgggctggaagaccacgtcgttcctgggctcctcactcctccgtggaacgtggtataaga

SEQ ID NO: 6041 - DNA, 121 bp, synthetic construct
  misc_feature 1..121: note = Description of artificial sequence: synthetic polynucleotide sequence
  source 1..121: mol_type = other DNA
ttctccaggtcctcattcttgacgtactcaaagtgggacaggcgggtgacgttgaggtcatctcggagccgcaggaagtactgttgcagctgcacctcggacagcagctccagcagccagc

SEQ ID NO: 6042 - DNA, 121 bp, synthetic construct
  misc_feature 1..121: note = Description of artificial sequence: synthetic polynucleotide sequence
  source 1..121: mol_type = other DNA
taattcttgaattacttgtctagatacttgcacagcagctggcactcacttgatggtgccggtgaagtctgtgctgtccagtttctccgacaactttctcttcaggtcatcccaatataag

SEQ ID NO: 6043 - DNA, 121 bp, synthetic construct
  misc_feature 1..121: note = Description of artificial sequence: synthetic polynucleotide sequence
  source 1..121: mol_type = other DNA
agccaaatttgctctgttccaggtaactataccctgggagagaaaagatgtttcataaccgagctacagatagttggggttagtaagtgaggccaataaaggctaaagtgggccgggaatc

SEQ ID NO: 6044 - DNA, 121 bp, synthetic construct
  misc_feature 1..121: note = Description of artificial sequence: synthetic polynucleotide sequence
  source 1..121: mol_type = other DNA
ccctttatttttgtacccaagagccagttcactttttctccatgttcaatatttagctttggtaaaatgttgccatgttcttcctcatctgttactgaagcgttagtatttccaccctgct

SEQ ID NO: 6045 - DNA, 121 bp, synthetic construct
  misc_feature 1..121: note = Description of artificial sequence: synthetic polynucleotide sequence
  source 1..121: mol_type = other DNA
gttctgaaattattttgaggcaagaagttttgaaagatggtttccacaggtaagttgcctgttgatttctatttctattaaaataatgtgtcatataattgagagcaaaaaattgatggtt

SEQ ID NO: 6046 - DNA, 121 bp, synthetic construct
  misc_feature 1..121: note = Description of artificial sequence: synthetic polynucleotide sequence
  source 1..121: mol_type = other DNA
catgtgcctgattgccacactaaaggaagctctttcttgggcaaggagcttagtttagacgaagcattccctgaccaacagaatggcagtgccacaaacgcctgggaccagtcatcctgtt

SEQ ID NO: 6047 - DNA, 121 bp, synthetic construct
  misc_feature 1..121: note = Description of artificial sequence: synthetic polynucleotide sequence
  source 1..121: mol_type = other DNA
acgggtcggttcacatggcttcaaagcaaaattctatcttaaagaggactgttacaacacggttccaacctgtgaaatgttcagtaaactcctgttccagtttcatggctctctcaaatgt

SEQ ID NO: 6048 - DNA, 121 bp, synthetic construct
  misc_feature 1..121: note = Description of artificial sequence: synthetic polynucleotide sequence
  source 1..121: mol_type = other DNA
gatcagtggttgctttgagttaagaaggggatggggtgagaggaaagtaggtgtggctacaaaaaggcctcgagtgatctttgtggtgacagaaatgttctgtagtttgactctattaacg

SEQ ID NO: 6049 - DNA, 121 bp, synthetic construct
  misc_feature 1..121: note = Description of artificial sequence: synthetic polynucleotide sequence
  source 1..121: mol_type = other DNA
tttacattagcaagtgaagagtactgacttccttgcatcttcccatgagcataaaacgtcacgcaaatggccatttgcaagcaccctgactctccctgatcatgtgtcactgtgggaggct

SEQ ID NO: 6050 - DNA, 121 bp, synthetic construct
  misc_feature 1..121: note = Description of artificial sequence: synthetic polynucleotide sequence
  source 1..121: mol_type = other DNA
gtggcctccaggacggcggcttccagggccagcgcttccgcgggctcctcctcgtagtctgacaggtaagactccaggctctgcctggccagtgcctcccgccgggcctgcagccgctcgc

SEQ ID NO: 6051 - DNA, 121 bp, synthetic construct
  misc_feature 1..121: note = Description of artificial sequence: synthetic polynucleotide sequence
  source 1..121: mol_type = other DNA
tcaccagtaaagccagtagccattagggagtttcaaaaaacagaagatatgagaagatatttacatcaaaacaggtttgaaaaaccaattctacttaatttgtttctgtcttaatcatgag

SEQ ID NO: 6052 - DNA, 121 bp, synthetic construct
  misc_feature 1..121: note = Description of artificial sequence: synthetic polynucleotide sequence
  source 1..121: mol_type = other DNA
gataaagatggaaatcctctcacttcaagatttgcagatggcctcccaccttttaattataggtatttttgttgttgttgctcttgttctcctcttttaggagggtgctaagactagaatc

SEQ ID NO: 6053 - DNA, 121 bp, synthetic construct
  misc_feature 1..121: note = Description of artificial sequence: synthetic polynucleotide sequence
  source 1..121: mol_type = other DNA
ccatcaagatgctggctgatgggggtcctggcttgcagacagcagccttctcactctgtcttcatacggcctcttttgtgtgtgtgcagagttagtaagcaagctccctggtgtctctttt

SEQ ID NO: 6054 - DNA, 238 bp, synthetic construct
  misc_feature 1..238: note = Description of artificial sequence: synthetic polynucleotide sequence
  source 1..238: mol_type = other DNA
gatggaatttagcatcaagcagagtcccctttctgttcagagtgttgtaaagtgcataaagatgaagcaggcaccagaaatcctcggcagtgccaacgggaagactccgagctgcgaggtgaaccgcgagtgttctgtgttcctcagcaaagcccagctctccagtagcctgcaggagggggtcatgcagaagtttaacggccacgacgccctgccctttattccagccgacaagctg

SEQ ID NO: 6055 - DNA, 360 bp, synthetic construct
  misc_feature 1..360: note = Description of artificial sequence: synthetic polynucleotide sequence
  source 1..360: mol_type = other DNA
aaagatcttacttcccgggtgtttaatggagaacccggcgcacacgatgccaaactgcgttttgagtcccaggaaatgaaagggattgggacaccccctaacactacccctatcaaaaatggctctccagaaattaagctgaaaatcaccaaaacatacatgaatgggaagcctctctttgaatcttccatttgtggtgacagtgctgctgatgtgtctcagtcagaagaaaatggacaaaaaccagaaaacaaggcgagaaggaacaggaagaggagcataaaatatgactccttgctggagcagggccttgtcgaagcagctcttgtgtctaagatctcaagtccttcagataaaaag

SEQ ID NO: 6056 - DNA, 164 bp, synthetic construct
  misc_feature 1..164: note = Description of artificial sequence: synthetic polynucleotide sequence
  source 1..164: mol_type = other DNA
gattccagctaagaaagagtcttgtccaaacactggaagagacaaagaccacctgttgaaatacaacgttggtgatttggtgtggtccaaagtgtcgggttacccttggtggccttgcatggtttctgcagatccactccttcacagctataccaaacttaaag

SEQ ID NO: 6057 - DNA, 168 bp, synthetic construct
  misc_feature 1..168: note = Description of artificial sequence: synthetic polynucleotide sequence
  source 1..168: mol_type = other DNA
ggtcagaaaaagagtgcacgccagtatcacgtacagttctttggtgacgccccagaaagagcttggatatttgagaagagcctcgtagcttttgaaggagaaggacagtttgaaaaattatgccaggaaagtgccaagcaggcacccacgaaagctgagaaaattaag

SEQ ID NO: 6058 - DNA, 241 bp, synthetic construct
  misc_feature 1..241: note = Description of artificial sequence: synthetic polynucleotide sequence
  source 1..241: mol_type = other DNA
gctattgaaaccaatttcagggaaattgagggcccagtgggaaatgggcattgttcaagcagaagaagctgcaagcatgtcagtggaggagcggaaagccaagttcacctttctctatgtgggggaccagcttcatctcaaccctcaagtagccaaggaggctggcattgctgcagagtctttgggagaaatggcagaatcctcaggagtcagtgaagaagctgctgaaaaccccaagtct

SEQ ID NO: 6059 - DNA, 121 bp, synthetic construct
  misc_feature 1..121: note = Description of artificial sequence: synthetic polynucleotide sequence
  source 1..121: mol_type = other DNA
tgagagaagagtgcattcccatgaagagaaggcggagggccaaactgtgtagctctgcagagaccctggagagtcaccccgacatagggaagagtactcctcaaaagacggcagaggctga

SEQ ID NO: 6060 - DNA, 121 bp, synthetic construct
  misc_feature 1..121: note = Description of artificial sequence: synthetic polynucleotide sequence
  source 1..121: mol_type = other DNA
ccccagaagaggagtagggtctcctcctgggaggaagaagaccacagtctccatgccacgaagcaggaagggagatgcagcatcccagtttttggtcttctgtcaaaaacacagggatgag

SEQ ID NO: 6061 - DNA, 146 bp, synthetic construct
  misc_feature 1..146: note = Description of artificial sequence: synthetic polynucleotide sequence
  source 1..146: mol_type = other DNA
ggtggtagctgagcacccagatgcttcaggtgaggagattgaagagctgctcaggtcacagtggagtctgctgagtgagaagcagagagcacgctacaacaccaagtttgccctggtggcccctgtccaggctgaagaagactctg

SEQ ID NO: 6062 - DNA, 121 bp, synthetic construct
  misc_feature 1..121: note = Description of artificial sequence: synthetic polynucleotide sequence
  source 1..121: mol_type = other DNA
ggtaatgtaaatgggaaaaaaagaaaccacacaaagaggatacaggaccctacagaagatgctgaagctgaggacacacccaggaaaagactcaggacggacaagcacagtcttcggaagg

SEQ ID NO: 6063 - DNA, 121 bp, synthetic construct
  misc_feature 1..121: note = Description of artificial sequence: synthetic polynucleotide sequence
  source 1..121: mol_type = other DNA
tttttttttttaaataatagagagacacaatcactgacaaaacggccagaacaagctcttacaaggccatggaggcagcctcctcgctcaagagccaggcaggtaatgtggtcagcgccct

SEQ ID NO: 6064 - DNA, 135 bp, synthetic construct
  misc_feature 1..135: note = Description of artificial sequence: synthetic polynucleotide sequence
  source 1..135: mol_type = other DNA
gcaacgaaaaatctgtctgatgcatgtaaaccactgaagaagcgaaatcgggcttccacggcagcatcttcagctcttgggtttagcaaaagttcatctccttctgcatccttaactgagaatgaggtaaaataa

SEQ ID NO: 6065 - DNA, 121 bp, synthetic construct
  misc_feature 1..121: note = Description of artificial sequence: synthetic polynucleotide sequence
  source 1..121: mol_type = other DNA
cttatttttttcgccttcactggtaacagcttttgtgggagcccacaccagtcaagttggatttgaacccagctgctctgtactgcacttagaatgatgtaatattccaggatgctgctgc

SEQ ID NO: 6066 - DNA, 133 bp, synthetic construct
  misc_feature 1..133: note = Description of artificial sequence: synthetic polynucleotide sequence
  source 1..133: mol_type = other DNA
ggtctcggacagcccgggagacgagccctcggagtccccatacgaaagtgcagacgaaacacaaactgaagtatctgtctcatccaaaaagtctgagcgaggagtgactgccaaaaaggagtatgtgtgccag

SEQ ID NO: 6067 - DNA, 121 bp, synthetic construct
  misc_feature 1..121: note = Description of artificial sequence: synthetic polynucleotide sequence
  source 1..121: mol_type = other DNA
tgtgtgagaagccgggcagcctcctgctctgtgaaggaccctgctgcggagctttccacctcgcctgccttgggctttcccggaggccagaagggaggttcacctgcagcgagtgtgcctc

SEQ ID NO: 6068 - DNA, 202 bp, synthetic construct
  misc_feature 1..202: note = Description of artificial sequence: synthetic polynucleotide sequence
  source 1..202: mol_type = other DNA
gggattcactcatgtttcgtgtgtaaagagagcaagacagatgttaagcgctgtgtggtaactcagtgtggaaaattttaccatgaggcttgtgtgaaaaaataccctctgactgtatttgagagccgaggtttccgctgccccctccacagctgtgtgagctgccatgcttccaacccttcaaacccaaggccgtcaaaag

SEQ ID NO: 6069 - DNA, 181 bp, synthetic construct
  misc_feature 1..181: note = Description of artificial sequence: synthetic polynucleotide sequence
  source 1..181: mol_type = other DNA
ggtaaaatgatgcggtgtgtccgctgccccgttgcctatcacagcggggatgcttgtctggcagcaggatgctcagtgatcgcctccaacagcatcatctgcactgcccacttcactgctcggaaggggaagcgacaccacgcccacgtcaacgtgagctggtgcttcgtgtgctccaaag

SEQ ID NO: 6070 - DNA, 158 bp, synthetic construct
  misc_feature 1..158: note = Description of artificial sequence: synthetic polynucleotide sequence
  source 1..158: mol_type = other DNA
ggggggagccttctgtgctgtgagtcctgcccagcggccttccaccctgactgcctgaacatcgagatgcctgacggcagctggttctgcaatgactgcagggctgggaagaagctgcacttccaggatatcatttgggtgaaacttgggaactacag

SEQ ID NO: 6071 - DNA, 207 bp, synthetic construct
  misc_feature 1..207: note = Description of artificial sequence: synthetic polynucleotide sequence
  source 1..207: mol_type = other DNA
gatggtggccggcagaagtttgccatcccaaaaatgttcccccaaatattcagaaaatgaagcacgagattggagaattccctgtgtttttctttgggtctaaagattattactggacgcatcaggcgcgagtgttcccgtacatggagggggaccggggcagccgctaccagggggtcagagggatcggaagagtcttcaaaaacg

SEQ ID NO: 6072 - DNA, 121 bp, synthetic construct
  misc_feature 1..121: note = Description of artificial sequence: synthetic polynucleotide sequence
  source 1..121: mol_type = other DNA
actttttagcactgcaagaagctgaagctcgttttcgtgaaattaagcttcagagggaagcccgagaaacacaggagagcgagcgcaagcccccaccatacaagcacatcaaggtggcgtg

SEQ ID NO: 6073 - DNA, 271 bp, synthetic construct
  misc_feature 1..271: note = Description of artificial sequence: synthetic polynucleotide sequence
  source 1..271: mol_type = other DNA
ggtgaataagccttacgggaaagtccagatctacacagcggatatttcagaaatccctaagtgcaactgcaagcccacagatgagaatccttgtggctttgattcggagtgtctgaacaggatgctgatgtttgagtgccacccgcaggtgtgtcccgcgggcgagttctgccagaaccagtgcttcaccaagcgccagtacccagagaccaagatcatcaagacagatggcaaagggtggggcctggtcgccaagagggacatcagaaag

SEQ ID NO: 6074 - DNA, 121 bp, synthetic construct
  misc_feature 1..121: note = Description of artificial sequence: synthetic polynucleotide sequence
  source 1..121: mol_type = other DNA
agggagaatttgttaacgagtacgttggggagctgatcgacgaggaggagtgcatggcgagaatcaagcacgcacacgagaacgacatcacccacttctacatgctcactatagacaaggt

SEQ ID NO: 6075 - DNA, 143 bp, synthetic construct
  misc_feature 1..143: note = Description of artificial sequence: synthetic polynucleotide sequence
  source 1..143: mol_type = other DNA
ggaccgtataatagacgctggccccaaaggaaactactctcgatttatgaatcacagctgccagcccaactgtgagaccctcaagtggacagtgaatggggacactcgtgtgggcctgtttgccgtctgtgacattcctgcag

SEQ ID NO: 6076 - DNA, 121 bp, synthetic construct
  misc_feature 1..121: note = Description of artificial sequence: synthetic polynucleotide sequence
  source 1..121: mol_type = other DNA
ctcccagggacggagctgacttttaactacaacctcgattgtctgggcaatgaaaaaacggtctgccggtgtggagcctccaattgcagtggattcctcggggatagaccaaaggtaaggc

SEQ ID NO: 6077 - DNA, 206 bp, synthetic construct
  misc_feature 1..206: note = Description of artificial sequence: synthetic polynucleotide sequence
  source 1..206: mol_type = other DNA
gacctcgacgaccctttcatcagaggaaaagggcaaaaagaccaagaagaaaacgaggcggcgcagagcaaaaggggaagggaagaggcagtcagaggacgagtgcttccgctgcggtgatggcgggcagctggtgctgtgtgaccgcaagttctgcaccaaggcctaccacctgtcctgcctgggccttggcaagcggcccttcg

SEQ ID NO: 6078 - DNA, 273 bp, synthetic construct
  misc_feature 1..273: note = Description of artificial sequence: synthetic polynucleotide sequence
  source 1..273: mol_type = other DNA
gggaagtgggaatgtccttggcatcattgtgacgtgtgtggcaaaccttcgacttcattttgccacctctgccccaattcgttctgtaaggagcaccaggacgggacagccttcagctgcaccccggacgggcggtcctactgctgtgagcatgacttaggggcggcatcggtcagaagcaccaagactgagaagccccccccagagccagggaagccgaaggggaagaggcggcggcggaggggctggcggagagtcacagagggcaaatag

SEQ ID NO: 6079 - DNA, 121 bp, synthetic construct
  misc_feature 1..121: note = Description of artificial sequence: synthetic polynucleotide sequence
  source 1..121: mol_type = other DNA
ttcctttgtgtggcctaagaaatgccaggtggacataaacctcctttattttgctgtttaaactaggtttgcgcctgtcaagtgcgagccacaggaaaaatgtatgcctgcaaaaagctac

SEQ ID NO: 6080 - DNA, 121 bp, synthetic construct
  misc_feature 1..121: note = Description of artificial sequence: synthetic polynucleotide sequence
  source 1..121: mol_type = other DNA
agaataaagaagaggaaaggtgaagctatggctctaaatgagaaaagaattctggagaaagtgcaaagtagattcgtagtaagtgtctcctcttagtcttcactgtgcattgtttgattca

SEQ ID NO: 6081 - DNA, 121 bp, synthetic construct
  misc_feature 1..121: note = Description of artificial sequence: synthetic polynucleotide sequence
  source 1..121: mol_type = other DNA
ggcgtaccatgaggagtatcacaaagttgccccaaacctgctttgagctatgacggcaacaccgaggcttttgctttaggggacaccccagaactcaagcatccaactgtggtcatcctgg

SEQ ID NO: 6082 - DNA, 121 bp, synthetic construct
  misc_feature 1..121: note = Description of artificial sequence: synthetic polynucleotide sequence
  source 1..121: mol_type = other DNA
gccgtgcttcagtgtgtcctgctttagaataaagggtgttgttaaactcatgacaaatggtactttctgttggaggtgtgaccttgggacagatactcaggggcaaaatccagctctgcca

SEQ ID NO: 6083 - DNA, 121 bp, synthetic construct
  misc_feature 1..121: note = Description of artificial sequence: synthetic polynucleotide sequence
  source 1..121: mol_type = other DNA
agtccccttgacaacgagcatcattcctgcttttgttcacctggtacagtgcctggtgcggacaactcttacttaacatctgttgaatgaagatggggaagggcggggaccctttcagagc

SEQ ID NO: 6084 - DNA, 121 bp, synthetic construct
  misc_feature 1..121: note = Description of artificial sequence: synthetic polynucleotide sequence
  source 1..121: mol_type = other DNA
gcctgggccgggctggctcccggctcgggcactgcgtgccttagagtccattgagcttcagttgcctccgctgtaaaatggggatggtggcagcaggcttcataggcttggtgagaggtga

SEQ ID NO: 6085 - DNA, 121 bp, synthetic construct
  misc_feature 1..121: note = Description of artificial sequence: synthetic polynucleotide sequence
  source 1..121: mol_type = other DNA
gttttatgcgtgtgatttacacgctgatcacgcacatctaaagcagatgtcctgggttattgtgagattctgttgcctcctagatcctgtgcttgggatgtggctaaggatgccaggttgg

SEQ ID NO: 6086 - DNA, 121 bp, synthetic construct
  misc_feature 1..121: note = Description of artificial sequence: synthetic polynucleotide sequence
  source 1..121: mol_type = other DNA
atgctgaggttaattgatgctgtgaacgcatttcaacattagtgtctttgtgactgtctagggttctctttgttaatggactgatgtttccatgcatgcactttatcaaggctgctatggt

SEQ ID NO: 6087 - DNA, 121 bp, synthetic construct
  misc_feature 1..121: note = Description of artificial sequence: synthetic polynucleotide sequence
  source 1..121: mol_type = other DNA
tactggatatggcttaggtaaatgttttctcatctgcctcacattcctttttgtctagataggttccttgtcaccccaaaatacttggtatggtgaaggtattattccacacagcagccat

SEQ ID NO: 6088 - DNA, 121 bp, synthetic construct
  misc_feature 1..121: note = Description of artificial sequence: synthetic polynucleotide sequence
  source 1..121: mol_type = other DNA
tctggtctgtgctagtgggttgagaggcagttggatgatctaagattatcacactcatgaatctgtttgttggcaatcatgtcagccaggtgcctctgttctcctctgcatagcttcctgt

SEQ ID NO: 6089 - DNA, 121 bp, synthetic construct
  misc_feature 1..121: note = Description of artificial sequence: synthetic polynucleotide sequence
  source 1..121: mol_type = other DNA
cagttctcaatactgccagatttgtctatttttggtcattgttgacacttcaccttctattaattttaattttgaaaatgatcgttcatagacaatagatacatacaaataggaaaagtct

SEQ ID NO: 6090 - DNA, 121 bp, synthetic construct
  misc_feature 1..121: note = Description of artificial sequence: synthetic polynucleotide sequence
  source 1..121: mol_type = other DNA
agctagacagtgatagattccagattagaactcagactcctgccctccaaagcagcactcaaaattcagtcatatccaaaccataaaatttactctttctctgtgtagtcaccagtctaag

SEQ ID NO: 6091 - DNA, 121 bp, synthetic construct
  misc_feature 1..121: note = Description of artificial sequence: synthetic polynucleotide sequence
  source 1..121: mol_type = other DNA
aaataggtgaaatacatgatgagacaaagcagacctggaaaagaacaggcttgtcagaatggattagaatatggttttttagtctcccttctcaaagctctttccattttaccaaacatct

SEQ ID NO: 6092 - DNA, 121 bp, synthetic construct
  misc_feature 1..121: note = Description of artificial sequence: synthetic polynucleotide sequence
  source 1..121: mol_type = other DNA
acacacacatatttcctactggttctgtttctctggagcattctgagtaacatacaccagtcaaataaaacatgggagtacctactgcttacagtataaatacctgcctcccttctcatct

SEQ ID NO: 6093 - DNA, 121 bp, synthetic construct
  misc_feature 1..121: note = Description of artificial sequence: synthetic polynucleotide sequence
  source 1..121: mol_type = other DNA
tgagagctctaatatgtccactcataaaaatatacagaagtgacttcatcttcctgggtctttgccttcgcatcctccacgctaaaatacagaaaataccaatgagtggcatttattgaac

SEQ ID NO: 6094 - DNA, 121 bp, synthetic construct
  misc_feature 1..121: note = Description of artificial sequence: synthetic polynucleotide sequence
  source 1..121: mol_type = other DNA
ctctcccgaggaaggatgtgctctgtccaagctcaagttcccaaggagctctggtcctcggtgaagatgcttttaccacaaactctcgttggccacaagccaccaggggtgcgaacacaat

SEQ ID NO: 6095 - DNA, 121 bp, synthetic construct
  misc_feature 1..121: note = Description of artificial sequence: synthetic polynucleotide sequence
  source 1..121: mol_type = other DNA
agatttggtgaaggaatgtgttatgtcgattccatgacgagttctaattacctcattaatgttgagatgttcactgatattgaagctgttctgcaggtgaagagtgccgtaagtgcctcta

SEQ ID NO: 6096 - DNA, 121 bp, synthetic construct
  misc_feature 1..121: note = Description of artificial sequence: synthetic polynucleotide sequence
  source 1..121: mol_type = other DNA
tgcagtcactgtgggaatgaacagagaaattaggacctagaaaagctgttgcagctacctctgtccaccactgaagatgaggagaaaggctcactgtttctccttgtttaatctgtgaaca

SEQ ID NO: 6097 - DNA, 121 bp, synthetic construct
  misc_feature 1..121: note = Description of artificial sequence: synthetic polynucleotide sequence
  source 1..121: mol_type = other DNA
gaggtgatttcctttctgtagagagaaggcagacttgggtaaaactggtcctttcctcagggttggatattatacaagacattccttctaaagtgttaagcagttactaaaatagaagcta

SEQ ID NO: 6098 - DNA, 121 bp, synthetic construct
  misc_feature 1..121: note = Description of artificial sequence: synthetic polynucleotide sequence
  source 1..121: mol_type = other DNA
accagtattcagaaatcactgccctcagccctattgcaggaagcctctgcattcttcacaggaaggaaaaataagcatgggaacgttccctgcgaccagcttgatgcacaggggctcgggc

SEQ ID NO: 6099 - DNA, 121 bp, synthetic construct
  misc_feature 1..121: note = Description of artificial sequence: synthetic polynucleotide sequence
  source 1..121: mol_type = other DNA
ccgtgtctacgtctccgaaatctaataagacagaacatgcttttcctgctctgtggaaacgaaggaaagcaactggagaatgctctaggccaccgtcaatgagccctaacccttttcagac

SEQ ID NO: 6100 - DNA, 121 bp, synthetic construct
  misc_feature 1..121: note = Description of artificial sequence: synthetic polynucleotide sequence
  source 1..121: mol_type = other DNA
agtctaggaaaaaggaacagggataggaaatgacatctcccagaatcaggtgtgtaaaatagcacaacgtgtttagggagacaaaaggggttctgtgtgtctggatttcagttaggtagag

SEQ ID NO: 6101 - DNA, 121 bp, synthetic construct
  misc_feature 1..121: note = Description of artificial sequence: synthetic polynucleotide sequence
  source 1..121: mol_type = other DNA
taacattcatgagagagtggtcaatatctttctccacagatgaggaaatggaagcttagtagagttaaataattgcccacagtctttcaggtaacaaatgtctattccaaaataaagtctg

SEQ ID NO: 6102 - DNA, 121 bp, synthetic construct
  misc_feature 1..121: note = Description of artificial sequence: synthetic polynucleotide sequence
  source 1..121: mol_type = other DNA
tgtgaggcatttgagcaaggaacacctcattcaccaatattttccaaacacattttaaaacccatgtgctaagggttttgatagagatggtattgggtgctatgggaagacacccaagacc

SEQ ID NO: 6103 - DNA, 121 bp, synthetic construct
  misc_feature 1..121: note = Description of artificial sequence: synthetic polynucleotide sequence
  source 1..121: mol_type = other DNA
gtgactctattagctccatatacctgtccaacttcctttggactggcagaggacatctccgaatgcctgcagactaatgttatatagaagtacttgacctttttaagaaacactgatcaaa

SEQ ID NO: 6104 - DNA, 121 bp, synthetic construct
  misc_feature 1..121: note = Description of artificial sequence: synthetic polynucleotide sequence
  source 1..121: mol_type = other DNA
gcctatgtcaggtcctggagggacagcagagagcaaaacacaccgtcctcatggagtttacacttgagttggaggaagtggagagaggggaggcagggacattatcaaatcatcatccaaa

SEQ ID NO: 6105 - DNA, 121 bp, synthetic construct
  misc_feature 1..121: note = Description of artificial sequence: synthetic polynucleotide sequence
  source 1..121: mol_type = other DNA
atcttgaactgtaagacttgtgtcattaccactgtgagattgctcaaactctgtgtttactttttggggcttcctgtttagcttctattcttttcttgtcgaactccaatttaatatgttt

SEQ ID NO: 6106 - DNA, 141 bp, synthetic construct
  misc_feature 1..141: note = Description of artificial sequence: synthetic polynucleotide sequence
  source 1..141: mol_type = other DNA
ttcacccacgtggctccgggttattagttactgtgggctggtcttggtcagaggcatctgcagctggagtcacagctggacttgcagtggacgtggcagtgtctggggaggcctgggatggtcttggagggggatcgcttg

SEQ ID NO: 6107 - DNA, 121 bp, synthetic construct
  misc_feature 1..121: note = Description of artificial sequence: synthetic polynucleotide sequence
  source 1..121: mol_type = other DNA
ctttcgctttttataaatctttacctgagacagactggaaatactgcacagtccaggcgatcaatatggatagcagaaaggttcccagaaagtagatctgcaaacatcagaagcacgcatt

SEQ ID NO: 6108 - DNA, 121 bp, synthetic construct
  misc_feature 1..121: note = Description of artificial sequence: synthetic polynucleotide sequence
  source 1..121: mol_type = other DNA
gaaacctaccagggctgagtgcaggatagcaccccagagaagccgcaagtgcaggtaaagccaggccaaggagcaggggctgaaggactcctcgttactgtggctccagcacctgcagaca

SEQ ID NO: 6109 - DNA, 121 bp, synthetic construct
  misc_feature 1..121: note = Description of artificial sequence: synthetic polynucleotide sequence
  source 1..121: mol_type = other DNA
tcgtacagttcctggagaatggagatgttattagaatggagagttgagtcaatttccaagaaatccaagatatggtgtgggattatcgtaccttcctcgattagcagggccaggttaaaaa

SEQ ID NO: 6110 - DNA, 121 bp, synthetic construct
  misc_feature 1..121: note = Description of artificial sequence: synthetic polynucleotide sequence
  source 1..121: mol_type = other DNA
gtttacctgggagtctccatccagggcggcttgggcgtacatctgcacagacaactccaggtcttgtgactggttttggtggccatagtagtaaaggtctcccatcttcaaatatgctgca

SEQ ID NO: 6111 - DNA, 121 bp, synthetic construct
  misc_feature 1..121: note = Description of artificial sequence: synthetic polynucleotide sequence
  source 1..121: mol_type = other DNA
ccgtttttctatacataccaaaggaaggagcatcgatttgaaaaacagagaaattatagtatctccaaacacagttaacacccaagtatctcctggccaggtcctaaggggtaaagggaag

SEQ ID NO: 6112 - DNA, 121 bp, synthetic construct
  misc_feature 1..121: note = Description of artificial sequence: synthetic polynucleotide sequence
  source 1..121: mol_type = other DNA
aatacatttacttactggcctctcctcacagatgtgtgctaaatttgtctgtgacacttcaattccagtttctgctgctaaaacataatacagcaaagcttcatgcctaaaaatagatgat

SEQ ID NO: 6113 - DNA, 121 bp, synthetic construct
  misc_feature 1..121: note = Description of artificial sequence: synthetic polynucleotide sequence
  source 1..121: mol_type = other DNA
acgtggatcccaagcttaccatgaaccttccaggtaggcattgaggcctttgcggatgacatggcccaagtagccatttttctcagctacatgttttgcccatctgaaaaaaaaaagggaa

SEQ ID NO: 6114 - DNA, 121 bp, synthetic construct
  misc_feature 1..121: note = Description of artificial sequence: synthetic polynucleotide sequence
  source 1..121: mol_type = other DNA
acagctttctcaggatctctagggaatgtctccaggttgcctgtgatatagtagagagaacaccacaaggtcccttccatgtgtccaccttgcgcagccttatggaaatattcaccagcta

SEQ ID NO: 6115 - DNA, 178 bp, synthetic construct
  misc_feature 1..178: note = Description of artificial sequence: synthetic polynucleotide sequence
  source 1..178: mol_type = other DNA
cttgattccttccaggaactccagggaagatgccatccaaatgcaggactccaagattgtatgacgcatctgggttccccatttcttctgcttttaaccagtactttgctgctttggcgtaatttttcttgaatttgtggtaataccatcccaggccattgactgcctgatgcaatcc

SEQ ID NO: 6116 - DNA, 121 bp, synthetic construct
  misc_feature 1..121: note = Description of artificial sequence: synthetic polynucleotide sequence
  source 1..121: mol_type = other DNA
gtttccctctgacaatatgcatgtgttaccttggaagctgctttcttcatcagctctaaggcaagccgtctgttcttttttactccttgaccctaaacattgataaacagcgatgattaca

SEQ ID NO: 6117 - DNA, 142 bp, synthetic construct
  misc_feature 1..142: note = Description of artificial sequence: synthetic polynucleotide sequence
  source 1..142: mol_type = other DNA
ccttgaatagcacaatggcatagtcatagattaacgcaggatcctccgtctccagggcgcccttggcgtaccactcaattgctgcttcgggattcttggccacaccttgctgcccccagaacagcatctgggccaatcgttg

SEQ ID NO: 6118 - DNA, 121 bp, synthetic construct
  misc_feature 1..121: note = Description of artificial sequence: synthetic polynucleotide sequence
  source 1..121: mol_type = other DNA
cctgagctgctgcattgcctcgggtagcttcatgcttcaaccacataaagacatctccatcttctttggtttgtaccttgagtatttcatcatcttttagtctaattgtttcaacatatgc

SEQ ID NO: 6119 - DNA, 181 bp, synthetic construct
  misc_feature 1..181: note = Description of artificial sequence: synthetic polynucleotide sequence
  source 1..181: mol_type = other DNA
cctgatctccttgcagtgtgtgctggtcaaggggtgtcttggtggcaatgttgctgtagtaggcatacgacagttcccagtccagggggtagttgtcaataccctggtagtgtttatacccaagattcattgaagacagcctctcactcccctggcctccaaccaaactatacaacatgcc

SEQ ID NO: 6120 - DNA, 213 bp, synthetic construct
  misc_feature 1..213: note = Description of artificial sequence: synthetic polynucleotide sequence
  source 1..213: mol_type = other DNA
cctgcagctgatcccgaggaacatttaatccagtctcataaaagactgcaaggtagtaggatgctttatggtatccacagcagctggaatccgtcagaaaggggacgatagagctaatttggtgaagaccatcaatgctagagagtctctttacagccttctcaaatatcttcccaccgatttctgatacagattcattttggttccttggca

SEQ ID NO: 6121 - DNA, 142 bp, synthetic construct
  misc_feature 1..142: note = Description of artificial sequence: synthetic polynucleotide sequence
  source 1..142: mol_type = other DNA
ccggtcagcagatccatctccagcaatgcctggaacaagctggggtgtttgtctttcagctccttctcccaggggaaggctctgcacatcgagggtctcccatacctgcgctggaggtccaggtaggagttgtggaggtggc

SEQ ID NO: 6122 - DNA, 134 bp, synthetic construct
  misc_feature 1..134: note = Description of artificial sequence: synthetic polynucleotide sequence
  source 1..134: mol_type = other DNA
catgcttcttgtctctcgcccccgtgctttgctgcagatgcatacacagatactatttcttgaacctcagcacacctttcataatataacttgatttgttcagcaagttgcttctcaaggaggggattaaaaat

SEQ ID NO: 6123 - DNA, 134 bp, synthetic construct
  misc_feature 1..134: note = Description of artificial sequence: synthetic polynucleotide sequence
  source 1..134: mol_type = other DNA
cctgggcggggtgcagactgcgaaggcgatagtacttcaggggtccaaaaaacccttcaatgccagccacatacctgctccctccaataatgaagtacccagctgtgtcattataatggaaatcctcccggaag

SEQ ID NO: 6124 - DNA, 121 bp, synthetic construct
  misc_feature 1..121: note = Description of artificial sequence: synthetic polynucleotide sequence
  source 1..121: mol_type = other DNA
aattttgaataaaaagaaaaatcgcacttacctaatggtctgattgtggtagcttttcaaatcctgtccaatgctagtggttactactatctatgatgggagggatacacaagaatcagtt

SEQ ID NO: 6125 - DNA, 121 bp, synthetic construct
  misc_feature 1..121: note = Description of artificial sequence: synthetic polynucleotide sequence
  source 1..121: mol_type = other DNA
tacctggcctccgttaaaagagatatccagtcgaaaccactccttcaaaggtatgatgaatttagtttttacagcaaggtcttcccctttgacaagatgcatctgaatatgcaaatagcct

SEQ ID NO: 6126 - DNA, 121 bp, synthetic construct
  misc_feature 1..121: note = Description of artificial sequence: synthetic polynucleotide sequence
  source 1..121: mol_type = other DNA
cctcttccgtaagaaatacagaaggtgtgccgtacatctcattagagtcaacaaagtacagaatcccacagaggttggccttgcaataatggagtaaataaagccacaatgaaacagtaaa

SEQ ID NO: 6127 - DNA, 121 bp, synthetic construct
  misc_feature 1..121: note = Description of artificial sequence: synthetic polynucleotide sequence
  source 1..121: mol_type = other DNA
gggtaatccatcctctggcgtcgagtggcctccagctctcggttccgaaacctcgggaacttcttgacaatgcctgtgttttctccactggaggcataaggaaagccaagcagggcaacca

SEQ ID NO: 6128 - DNA, 226 bp, synthetic construct
  misc_feature 1..226: note = Description of artificial sequence: synthetic polynucleotide sequence
  source 1..226: mol_type = other DNA
ccattttccagaggacactgtggaatcctgtttgcccgaaggttccaaatataacccatgttccactcaaggcacacttgatgatctttgaaagggcgttcaaaaggcgggatggtctgcaggagggtataattctttgctacagcatggagcaagttttcctcccatttaacattccagtctctgccactgtatttgtgagtaatccaggcgcgtactatcactg

SEQ ID NO: 6129 - DNA, 346 bp, synthetic construct
  misc_feature 1..346: note = Description of artificial sequence: synthetic polynucleotide sequence
  source 1..346: mol_type = other DNA
cagatacagagatggaatgtctgatgaaataatcatctctgtaaaccataatgcttggaaatttcacatgtactatttgtgtcctgctggtgtgaagatgtttctcattcttccacctttttttgtacacgggaatgctacttctgaactcagatgaaacaactgcttccaaattgacaacacaaggctgagagcataaatactcaaccgagacttcagaaacgttgcgaacgtttccttcaaagacagtaaaataaataaagtctttgtaagccacgctctgctcagctttgggtatcactgatgtcgtcagggaagtctgcctacccaaagatggtacaacatt

SEQ ID NO: 6130 - DNA, 163 bp, synthetic construct
  misc_feature 1..163: note = Description of artificial sequence: synthetic polynucleotide sequence
  source 1..163: mol_type = other DNA
ccaggtagcagagcaggagcagcgcgcaggcagagcggccgccgaggccctgggggacgccgccactcgggaccatggctgcggcccgggggccgaccgcgagcggcgggggttgctgctgctgctgccgcggccacccgagccccgcgccgcgccgctgcat

SEQ ID NO: 6131 - DNA, 121 bp, synthetic construct
  misc_feature 1..121: note = Description of artificial sequence: synthetic polynucleotide sequence
  source 1..121: mol_type = other DNA
tcccacccaccccttttgcgggtcgcacagaccagttcccgcccgtgcaatgggtttttgtctggttgcttttttggccggggcgccattcccgcagggcgcagggcgagtgtgccccctg

SEQ ID NO: 6132 - DNA, 121 bp, synthetic construct
  misc_feature 1..121: note = Description of artificial sequence: synthetic polynucleotide sequence
  source 1..121: mol_type = other DNA
gaacatctctgaagacatttttatcagaccattggcacatggtctccccatgtctagaaactaatataaagtggcatctgatctgacccaaagatatatcttaggttttctgttttaccat

SEQ ID NO: 6133 - DNA, 121 bp, synthetic construct
  misc_feature 1..121: note = Description of artificial sequence: synthetic polynucleotide sequence
  source 1..121: mol_type = other DNA
tcctttcatggaattacggtcgcatctatggaaaaattgagccaaatccgagataggtttataaagagattacattgattttctactctctgtgattctctcttctttctccatgttgtgg

SEQ ID NO: 6134 - DNA, 121 bp, synthetic construct
  misc_feature 1..121: note = Description of artificial sequence: synthetic polynucleotide sequence
  source 1..121: mol_type = other DNA
acacttagcaaactgttatttaaccacacattgatttcattaaggctggatcacaataatcatcataataactgtgtgctttccacttgccctcctaatagtgaaaggttttagagcccag

SEQ ID NO: 6135 - DNA, 121 bp, synthetic construct
  misc_feature 1..121: note = Description of artificial sequence: synthetic polynucleotide sequence
  source 1..121: mol_type = other DNA
gaaaaccattacttttagtaatggtgggaggattgtgatctaagacttgactgcaaccatttcaaagtgctaaaggtagtggtaatgtcaccttagtgactagagaaacaccaactgaatt

SEQ ID NO: 6136 - DNA, 121 bp, synthetic construct
  misc_feature 1..121: note = Description of artificial sequence: synthetic polynucleotide sequence
  source 1..121: mol_type = other DNA
ttcaaatctcatctggaaaccttcccacagatacgtacagaattactgtttaatatgggcgctccatgaccagtaaagctgatgcataaaattaaccatcaccgtagggtttattttatta

SEQ ID NO: 6137 - DNA, 121 bp, synthetic construct
  misc_feature 1..121: note = Description of artificial sequence: synthetic polynucleotide sequence
  source 1..121: mol_type = other DNA
gtgggaaagtgagtagaaaatatatgaaagaaactagtgaaagataagatttattttagtaggtttgcttgtacagattcatactggcatggacccctgcttccagtgagaagaatgttct

SEQ ID NO: 6138 - DNA, 121 bp, synthetic construct
  misc_feature 1..121: note = Description of artificial sequence: synthetic polynucleotide sequence
  source 1..121: mol_type = other DNA
ggaagctggagggcagcatttgctttcctgtgttgtagacttgcctgagatgccctcaggttgtgatgtgacagctcagggaatgagatgcagaggaagccatgtacttcccagtagacag

SEQ ID NO: 6139 - DNA, 121 bp, synthetic construct
  misc_feature 1..121: note = Description of artificial sequence: synthetic polynucleotide sequence
  source 1..121: mol_type = other DNA
tgggctatggaggcccagcaaggatggaggcccagcaaggatggaggccaaggttgagatctagtgaagaagaggattcaaggggtctgactaaagtgtgggcaaagaaagaatctttgtc

SEQ ID NO: 6140 - DNA, 121 bp, synthetic construct
  misc_feature 1..121: note = Description of artificial sequence: synthetic polynucleotide sequence
  source 1..121: mol_type = other DNA
tttcatctgtatattccttgctccccatctttccactgggcaattctggagcaaatcccaggcctgtcatcatatctgtaagtatttcagtatttatatcagtaaatatttcagtatatat

SEQ ID NO: 6141 - DNA, 121 bp, synthetic construct
  misc_feature 1..121: note = Description of artificial sequence: synthetic polynucleotide sequence
  source 1..121: mol_type = other DNA
catggggttgaatgcaaattctttctcaataaaacagaaacacagaactggaccaaggattcaagtactggatgggagatttggcagtccttccaataaagttagcagtggcagctgtagt

SEQ ID NO: 6142 - DNA, 121 bp, synthetic construct
  misc_feature 1..121: note = Description of artificial sequence: synthetic polynucleotide sequence
  source 1..121: mol_type = other DNA
tctaaagttttccagtcaaatttttgaaattgccactgatatatcagtacctgagtaaatattaggtcatgaccagccaccctcagctctgtctgagcagagatttgccctttgcatttca

SEQ ID NO: 6143 - DNA, 121 bp, synthetic construct
  misc_feature 1..121: note = Description of artificial sequence: synthetic polynucleotide sequence
  source 1..121: mol_type = other DNA
tgcagcattttgagaaaagaagtgacagaatctgatttgtgctttaacaggaccactctggttcctgggtagaaaattggctgggaggaccaagggcagggagactggttagagtgactat

SEQ ID NO: 6144 - DNA, 121 bp, synthetic construct
  misc_feature 1..121: note = Description of artificial sequence: synthetic polynucleotide sequence
  source 1..121: mol_type = other DNA
accagatggacctggaggtaattaatgcatggcaagctgaactttttacctgcaagatcactttatatgtgccacaaacagctaaaattgaaatgtgatgatttcattgagcccctgggtt

SEQ ID NO: 6145 - DNA, 121 bp, synthetic construct
  misc_feature 1..121: note = Description of artificial sequence: synthetic polynucleotide sequence
  source 1..121: mol_type = other DNA
ctcccttaggcacagaaatattgattaagacagctcggcaggaggaatatgtcacctgcgctcttgtataatataacaaagggaccaaagaagacacaaagctttatatacagcacctgtc

SEQ ID NO: 6146 - DNA, 121 bp, synthetic construct
  misc_feature 1..121: note = Description of artificial sequence: synthetic polynucleotide sequence
  source 1..121: mol_type = other DNA
agatatgctattattgagaatatcatattaatgatcaaatagaaatattaagtataagttgtgtatatatgttaagagcttagggaagagcattgaatgtagatggaaatttgggggtcac

SEQ ID NO: 6147 - DNA, 121 bp, synthetic construct
  misc_feature 1..121: note = Description of artificial sequence: synthetic polynucleotide sequence
  source 1..121: mol_type = other DNA
aatttatgccagtctgtaagacttaaaggatcagcccctagataatccagatagaatatggttgtcatattgcagtagctttgataggaatgaaatcagataggaagggtatgctatagtg

SEQ ID NO: 6148 - DNA, 121 bp, synthetic construct
  misc_feature 1..121: note = Description of artificial sequence: synthetic polynucleotide sequence
  source 1..121: mol_type = other DNA
cttcttagcctaatggtaaactctgtatcagatatttcaagattacttcaaagttttcactgtccaagctctaaccctaacacttcacaatagacaaccatttgggctgaggttctcagtc

SEQ ID NO: 6149 - DNA, 121 bp, synthetic construct
  misc_feature 1..121: note = Description of artificial sequence: synthetic polynucleotide sequence
  source 1..121: mol_type = other DNA
accctaccaacaaccttgtaaatgagcttgagtatgactcatcactcagtggagctttcagatatgaccacagtcccagccagcaacttgattgcaaccttgtgaaagggcttgaggcaga

SEQ ID NO: 6150 - DNA, 121 bp, synthetic construct
  misc_feature 1..121: note = Description of artificial sequence: synthetic polynucleotide sequence
  source 1..121: mol_type = other DNA
gagtgatttcaccatccaaacaagatgaagttactctaatggctcccactagctccatatggcctctcgatgttctattccctgcagtgggattttctttggtcttatttcttgctgtgaa

SEQ ID NO: 6151 - DNA, 121 bp, synthetic construct
  misc_feature 1..121: note = Description of artificial sequence: synthetic polynucleotide sequence
  source 1..121: mol_type = other DNA
cctggagcactcttttcctgatttcctttccagtagagaccactctaggtaaatggaaagataagtttagccctggctgtccccacatgccttaacaggggaacagtaatattaacattta

SEQ ID NO: 6152 - DNA, 121 bp, synthetic construct
  misc_feature 1..121: note = Description of artificial sequence: synthetic polynucleotide sequence
  source 1..121: mol_type = other DNA
gaacagagagataaagaatctgcattcttatgctgagtcccttggcagggtcttcagataggttggcgtttgctggaattcataatctgaaaagtaattttggggaaaaaggtccagtccg

SEQ ID NO: 6153 - DNA, 121 bp, synthetic construct
  misc_feature 1..121: note = Description of artificial sequence: synthetic polynucleotide sequence
  source 1..121: mol_type = other DNA
agctcggatcccatcgcagctaccgcgatgagaggcgctcgcggcgcctgggattttctctgcgttctgctcctactgcttcgcgtccagacaggtgggacaccgcggctggcaccccgac

SEQ ID NO: 6154 - DNA, 271 bp, synthetic construct
  misc_feature 1..271: note = Description of artificial sequence: synthetic polynucleotide sequence
  source 1..271: mol_type = other DNA
ggctcttctcaaccatctgtgagtccaggggaaccgtctccaccatccatccatccaggaaaatcagacttaatagtccgcgtgggcgacgagattaggctgttatgcactgatccgggctttgtcaaatggacttttgagatcctggatgaaacgaatgagaataagcagaatgaatggatcacggaaaaggcagaagccaccaacaccggcaaatacacgtgcaccaacaaacacggcttaagcaattccatttatgtgtttgttagag

SEQ ID NO: 6155 - DNA, 283 bp, synthetic construct
  misc_feature 1..283: note = Description of artificial sequence: synthetic polynucleotide sequence
  source 1..283: mol_type = other DNA
gatcctgccaagcttttccttgttgaccgctccttgtatgggaaagaagacaacgacacgctggtccgctgtcctctcacagacccagaagtgaccaattattccctcaaggggtgccaggggaagcctcttcccaaggacttgaggtttattcctgaccccaaggcgggcatcatgatcaaaagtgtgaaacgcgcctaccatcggctctgtctgcattgttctgtggaccaggagggcaagtcagtgctgtcggaaaaattcatcctgaaagtgaggccag

SEQ ID NO: 6156 - DNA, 138 bp, synthetic construct
  misc_feature 1..138: note = Description of artificial sequence: synthetic polynucleotide sequence
  source 1..138: mol_type = other DNA
gccttcaaagctgtgcctgttgtgtctgtgtccaaagcaagctatcttcttagggaaggggaagaattcacagtgacgtgcacaataaaagatgtgtctagttctgtgtactcaacgtggaaaagagaaaacagtcag

SEQ ID NO: 6157 - DNA, 170 bp, synthetic construct
  misc_feature 1..170: note = Description of artificial sequence: synthetic polynucleotide sequence
  source 1..170: mol_type = other DNA
gactaaactacaggagaaatataatagctggcatcacggtgacttcaattatgaacgtcaggcaacgttgactatcagttcagcgagagttaatgattctggagtgttcatgtgttatgccaataatacttttggatcagcaaatgtcacaacaaccttggaagtagtag

SEQ ID NO: 6158 - DNA, 191 bp, synthetic construct
  misc_feature 1..191: note = Description of artificial sequence: synthetic polynucleotide sequence
  source 1..191: mol_type = other DNA
gataaaggattcattaatatcttccccatgataaacactacagtatttgtaaacgatggagaaaatgtagatttgattgttgaatatgaagcattccccaaacctgaacaccagcagtggatctatatgaacagaaccttcactgataaatgggaagattatcccaagtctgagaatgaaagtaatatcag

SEQ ID NO: 6159 - DNA, 121 bp, synthetic construct
  misc_feature 1..121: note = Description of artificial sequence: synthetic polynucleotide sequence
  source 1..121: mol_type = other DNA
tagatacgtaagtgaacttcatctaacgagattaaaaggcaccgaaggaggcacttacacattcctagtgtccaattctgacgtcaatgctgccatagcatttaatgtttatgtgaatagt

SEQ ID NO: 6160 - DNA, 121 bp, synthetic construct
  misc_feature 1..121: note = Description of artificial sequence: synthetic polynucleotide sequence
  source 1..121: mol_type = other DNA
tagcaaaaccagaaatcctgacttacgacaggctcgtgaatggcatgctccaatgtgtggcagcaggattcccagagcccacaatagattggtatttttgtccaggaactgagcagaggtg

SEQ ID NO: 6161 - DNA, 195 bp, synthetic construct
  misc_feature 1..195: note = Description of artificial sequence: synthetic polynucleotide sequence
  source 1..195: mol_type = other DNA
gatgctctgcttctgtactgccagtggatgtgcagacactaaactcatctgggccaccgtttggaaagctagtggttcagagttctatagattctagtgcattcaagcacaatggcacggttgaatgtaaggcttacaacgatgtgggcaagacttctgcctattttaactttgcatttaaaggtaacaacaaag

SEQ ID NO: 6162 - DNA, 121 bp, synthetic construct
  misc_feature 1..121: note = Description of artificial sequence: synthetic polynucleotide sequence
  source 1..121: mol_type = other DNA
attgtagagcaaatccatccccacaccctgttcactcctttgctgattggtttcgtaatcgtagctggcatgatgtgcattattgtgatgattctgacctacaaatatttacaggtaacca

SEQ ID NO: 6163 - DNA, 121 bp, synthetic construct
  misc_feature 1..121: note = Description of artificial sequence: synthetic polynucleotide sequence
  source 1..121: mol_type = other DNA
cccatgtatgaagtacagtggaaggttgttgaggagataaatggaaacaattatgtttacatagacccaacacaacttccttatgatcacaaatgggagtttcccagaaacaggctgagtt

SEQ ID NO: 6164 - DNA, 121 bp, synthetic construct
  misc_feature 1..121: note = Description of artificial sequence: synthetic polynucleotide sequence
  source 1..121: mol_type = other DNA
tcctacagggaaaaccctgggtgctggagctttcgggaaggttgttgaggcaactgcttatggcttaattaagtcagatgcggccatgactgtcgctgtaaagatgctcaagcgtaagttc

SEQ ID NO: 6165 - DNA, 121 bp, synthetic construct
  misc_feature 1..121: note = Description of artificial sequence: synthetic polynucleotide sequence
  source 1..121: mol_type = other DNA
tttagcgagtgcccatttgacagaacgggaagccctcatgtctgaactcaaagtcctgagttaccttggtaatcacatgaatattgtgaatctacttggagcctgcaccattggaggtaaa

SEQ ID NO: 6166 - DNA, 152 bp, synthetic construct
  misc_feature 1..152: note = Description of artificial sequence: synthetic polynucleotide sequence
  source 1..152: mol_type = other DNA
gggcccaccctggtcattacagaatattgttgctatggtgatcttttgaattttttgagaagaaaacgtgattcatttatttgttcaaagcaggaagatcatgcagaagctgcactttataagaatcttctgcattcaaaggagtcttcctg

SEQ ID NO: 6167 - DNA, 121 bp, synthetic construct
  misc_feature 1..121: note = Description of artificial sequence: synthetic polynucleotide sequence
  source 1..121: mol_type = other DNA
tttcatctctcccagcagcgatagtactaatgagtacatggacatgaaacctggagtttcttatgttgtcccaaccaaggccgacaaaaggagatctgtgagaataggtgagtacctacct

SEQ ID NO: 6168 - DNA, 121 bp, synthetic construct
  misc_feature 1..121: note = Description of artificial sequence: synthetic polynucleotide sequence
  source 1..121: mol_type = other DNA
catacatagaaagagatgtgactcccgccatcatggaggatgacgagttggccctagacttagaagacttgctgagcttttcttaccaggtggcaaagggcatggctttcctcgcctccaa

SEQ ID NO: 6169 - DNA, 121 bp, synthetic construct
  misc_feature 1..121: note = Description of artificial sequence: synthetic polynucleotide sequence
  source 1..121: mol_type = other DNA
gtattcacagagacttggcagccagaaatatcctccttactcatggtcggatcacaaagatttgtgattttggtctagccagagacatcaagaatgattctaattatgtggttaaaggaaa

SEQ ID NO: 6170 - DNA, 121 bp, synthetic construct
  misc_feature 1..121: note = Description of artificial sequence: synthetic polynucleotide sequence
  source 1..121: mol_type = other DNA
tacaggctcgactacctgtgaagtggatggcacctgaaagcattttcaactgtgtatacacgtttgaaagtgacgtctggtcctatgggatttttctttgggagctgttctctttaggtaa

SEQ ID NO: 6171 - DNA, 121 bp, synthetic construct
  misc_feature 1..121: note = Description of artificial sequence: synthetic polynucleotide sequence
  source 1..121: mol_type = other DNA
ctgtgtctcaggaagcagcccctatcctggaatgccggtcgattctaagttctacaagatgatcaaggaaggcttccggatgctcagccctgaacacgcacctgctgaaatgtaagagcca

SEQ ID NO: 6172 - DNA, 121 bp, synthetic construct
  misc_feature 1..121: note = Description of artificial sequence: synthetic polynucleotide sequence
  source 1..121: mol_type = other DNA
tcttgcaggtatgacataatgaagacttgctgggatgcagatcccctaaaaagaccaacattcaagcaaattgttcagctaattgagaagcagatttcagagagcaccaatcatgtgagta

SEQ ID NO: 6173 - DNA, 121 bp, synthetic construct
  misc_feature 1..121: note = Description of artificial sequence: synthetic polynucleotide sequence
  source 1..121: mol_type = other DNA
actccaacttagcaaactgcagccccaaccgacagaagcccgtggtagaccattctgtgcggatcaattctgtcggcagcaccgcttcctcctcccagcctctgcttgtgcacgacgatgt

SEQ ID NO: 6174 - DNA, 121 bp, synthetic construct
  misc_feature 1..121: note = Description of artificial sequence: synthetic polynucleotide sequence
  source 1..121: mol_type = other DNA
ccaatctatcctgctccagggccactgagcagtgagagaagctaaagtgggcctaccactttactcagaatctctcagctccgtatgactcaaatattcacaccttacagaagtgaccatg

SEQ ID NO: 6175 - DNA, 121 bp, synthetic construct
  misc_feature 1..121: note = Description of artificial sequence: synthetic polynucleotide sequence
  source 1..121: mol_type = other DNA
ctattcccacatctacttcttgtttcccagatccgttcatatattatatctgcagaggggatggcactacttattgatttaaggcatattctacatcatgtataacagcatcacaaacagt

SEQ ID NO: 6176 - DNA, 121 bp, synthetic construct
  misc_feature 1..121: note = Description of artificial sequence: synthetic polynucleotide sequence
  source 1..121: mol_type = other DNA
gactgggcaacatcctcctttagaggctgaccgtgctgagggtcatatcactggttctgtgtgtttttagtggcaaagagtctttataagtttcctgattttagcctttttatggggctta

SEQ ID NO: 6177 - DNA, 121 bp, synthetic construct
  misc_feature 1..121: note = Description of artificial sequence: synthetic polynucleotide sequence
  source 1..121: mol_type = other DNA
tttcacattgatgatcggtcatttctctaacagtcacctgagaaaattactccatattagctacactcagccagagcttattcttatagttttagtatttttgtccataaacaactagtta

SEQ ID NO: 6178 - DNA, 121 bp, synthetic construct
  misc_feature 1..121: note = Description of artificial sequence: synthetic polynucleotide sequence
  source 1..121: mol_type = other DNA
tccattacttctaatttagttaattacactgtacctacctaaattcccatggcaattttcgttggatgtagcagttaattgccttgttccaaacagacattattgggggctgttaaactac

SEQ ID NO: 6179 - DNA, 121 bp, synthetic construct
  misc_feature 1..121: note = Description of artificial sequence: synthetic polynucleotide sequence
  source 1..121: mol_type = other DNA
cacacatacactgcctgtaggcctaaggactggcatgcctagcccgctgtcaccattgatattgattacagcagacaatatcacacagagactaccctattgagccccgccagaatcaaaa

SEQ ID NO: 6180 - DNA, 121 bp, synthetic construct
  misc_feature 1..121: note = Description of artificial sequence: synthetic polynucleotide sequence
  source 1..121: mol_type = other DNA
ggcaagcacacaagtggctggacgtcaagaggagtggattagcggaagaagaaacaaacagctggacgtcaagaggacgtccaggtgagcatgcaggcaggtcatcaactggcagaacaac

SEQ ID NO: 6181 - DNA, 121 bp, synthetic construct
  misc_feature 1..121: note = Description of artificial sequence: synthetic polynucleotide sequence
  source 1..121: mol_type = other DNA
tggccctgtggccttttcatggaggtatttacaaaaacaccacctcaaagggatattaaccaagacccagcacaacagtctgaaatcaagctgccatctcacagggggagctaggaaagag

SEQ ID NO: 6182 - DNA, 121 bp, synthetic construct
  misc_feature 1..121: note = Description of artificial sequence: synthetic polynucleotide sequence
  source 1..121: mol_type = other DNA
agggagactctctacacctaaccctccaaaatgagtgagtcagacacagcatccatggtgatctacaaagaacccaaacatggaaactaccattgttgaaatatgacctacttagatgtgt

SEQ ID NO: 6183 - DNA, 121 bp, synthetic construct
  misc_feature 1..121: note = Description of artificial sequence: synthetic polynucleotide sequence
  source 1..121: mol_type = other DNA
ccagagtttccatttcttcttctttcttctttcttttacgacgtttccgaagagggcttggaaaatacgtgttagaagttagtatgggcctagtagttcatgcgaacacaaaattatccat

SEQ ID NO: 6184 - DNA, 121 bp, synthetic construct
  misc_feature 1..121: note = Description of artificial sequence: synthetic polynucleotide sequence
  source 1..121: mol_type = other DNA
tgggttctcgtcaacaagcggtggagtccacttaacaaccacgttggaggaacacagctcgggcactcctgaagcaggcgtggcagctacactgtcgcagtccgctgctgagcctcccaca

SEQ ID NO: 6185 - DNA, 121 bp, synthetic construct
  misc_feature 1..121: note = Description of artificial sequence: synthetic polynucleotide sequence
  source 1..121: mol_type = other DNA
ttccattgctcagacatgacaattctactcaactagttgctcaggccaaagaccttcaagtcatcctggactccctctttctgtcacataccacacctaatcatctaaaaatattatcaga

SEQ ID NO: 6186 - DNA, 121 bp, synthetic construct
  misc_feature 1..121: note = Description of artificial sequence: synthetic polynucleotide sequence
  source 1..121: mol_type = other DNA
gcccaatatagtataagtaacaatgtttgtccacctccccacaccacacacacaaaaaagtcaaacatcttacaattatttttaaaatcccaaacactcactctttcaacatttcttcata

SEQ ID NO: 6187 - DNA, 121 bp, synthetic construct
  misc_feature 1..121: note = Description of artificial sequence: synthetic polynucleotide sequence
  source 1..121: mol_type = other DNA
ctaagcaattgtcccattgcagtaacgcattttcttcacaattcagccaatgttccatttgtatcctttatgttttagtaacgtacatgtaagtatttatatcttttttagtttttctcct

SEQ ID NO: 6188 - DNA, 121 bp, synthetic construct
  misc_feature 1..121: note = Description of artificial sequence: synthetic polynucleotide sequence
  source 1..121: mol_type = other DNA
tggttttaaggagatcttttagacctgtaagaagagaaaggggatataaaagtgtgatagtctgactctggcttcagattgggttgtgtttggaaagtaccgagttcatagaatagataac

SEQ ID NO: 6189 - DNA, 121 bp, synthetic construct
  misc_feature 1..121: note = Description of artificial sequence: synthetic polynucleotide sequence
  source 1..121: mol_type = other DNA
atgacttaagatggcctcttaccagtagtgcctgtgttagttggggcagaaaagctgaatgcagaacctgcagttgtagatgttgtcccaaatcctccaaacccacctaattaaaaaagaa

SEQ ID NO: 6190 - DNA, 121 bp, synthetic construct
  misc_feature 1..121: note = Description of artificial sequence: synthetic polynucleotide sequence
  source 1..121: mol_type = other DNA
cttagtattttactaatagctgagcccaagctgcggaagtgcagagtagacatgctgtcatgttcacatatttttttgcctgaggcttcttcaaagtcaactaggattgaccggatttctt

SEQ ID NO: 6191 - DNA, 121 bp, synthetic construct
  misc_feature 1..121: note = Description of artificial sequence: synthetic polynucleotide sequence
  source 1..121: mol_type = other DNA
ttacagctctttctccaccagttctagcatcctagagtatccacaccctggcatctctggccgggagcgttcaggctccatggacaatacttctgctcgaggtggcctcctcgaagggatg

SEQ ID NO: 6192 - DNA, 121 bp, synthetic construct
  misc_feature 1..121: note = Description of artificial sequence: synthetic polynucleotide sequence
  source 1..121: mol_type = other DNA
aggctgtgtcgccaaccccgctcggccacaacagccttaacctctgcaagttttagtgataaacctgcatcaacccttgggctgggtgccgttcctgccttggagggcttcctggatcgag

SEQ ID NO: 6193 - DNA, 121 bp, synthetic construct
  misc_feature 1..121: note = Description of artificial sequence: synthetic polynucleotide sequence
  source 1..121: mol_type = other DNA
gagattctaaggtgaatgaaatatagacctgctaataagaaacgtaattattcattctttaattgagcaacatttgctagccgtgtgaccttgaggcaagttactcagctttttgttgttg

SEQ ID NO: 6194 - DNA, 121 bp, synthetic construct
  misc_feature 1..121: note = Description of artificial sequence: synthetic polynucleotide sequence
  source 1..121: mol_type = other DNA
gaaataagttgattcttgtaacaaaaatccatgctttgggatttgaactcttggagagcattttcttcatcttgcttgttgtagaagcattttccctgcaaaaattggcaactgactaccg

SEQ ID NO: 6195 - DNA, 121 bp, synthetic construct
  misc_feature 1..121: note = Description of artificial sequence: synthetic polynucleotide sequence
  source 1..121: mol_type = other DNA
gggggtgtttgttaaaatgagagcactcccccggacataggatttaatgccctggaaaagaccctaagtgatagtgctgggatggcttttggaagcttggaaaaagtgatatcccatatta

SEQ ID NO: 6196 - DNA, 121 bp, synthetic construct
  misc_feature 1..121: note = Description of artificial sequence: synthetic polynucleotide sequence
  source 1..121: mol_type = other DNA
tattacagatcatgaagcccaaataacattttaagaatttctgaaaaaaaaggaagaataagaaaaactatttacctgacggcagaatttggtctcgttcttttaatgtaatccatggcct

SEQ ID NO: 6197 - DNA, 121 bp, synthetic construct
  misc_feature 1..121: note = Description of artificial sequence: synthetic polynucleotide sequence
  source 1..121: mol_type = other DNA
aatagtctagaataatttattatcttcttgctttctcatcattaatgttatgtatattattttctttcagttggatatgtcaagtgaccagatagctgccaatctgcaagcagttattaat

SEQ ID NO: 6198 - DNA, 121 bp, synthetic construct
  misc_feature 1..121: note = Description of artificial sequence: synthetic polynucleotide sequence
  source 1..121: mol_type = other DNA
ttatgcatcccttttaattcttgttttgtttttccccacaggtgcttgtgtctatcaggattccttgttggcggtaggtcattctttacatacttggtttctgtcatttgaatgtaaaatg

SEQ ID NO: 6199 - DNA, 121 bp, synthetic construct
  misc_feature 1..121: note = Description of artificial sequence: synthetic polynucleotide sequence
  source 1..121: mol_type = other DNA
agaatggatggtgtgtgcacagctgtggactgggtttttaccaagctggcagtctctgtttaggtatggctccaagtggacaacccagaggtggtggtgtgtgggagatagactcatcaaa

SEQ ID NO: 6200 - DNA, 121 bp, synthetic construct
  misc_feature 1..121: note = Description of artificial sequence: synthetic polynucleotide sequence
  source 1..121: mol_type = other DNA
gcacaaggagccgaactgaccaaacccttccaggcagtcattgcaattaatgacacattccaagatggtaagagattggggatgccagctggtaggtccaaatatatttctattttttctt

SEQ ID NO: 6201 - DNA, 121 bp, synthetic construct
  misc_feature 1..121: note = Description of artificial sequence: synthetic polynucleotide sequence
  source 1..121: mol_type = other DNA
ccctagtgctataggatttgattcatttatggtctcccattatttatactgtatttgttcttcattgattttattctttgcagtcggatacttctggagactatgaaatcacactcttaaa

SEQ ID NO: 6202 - DNA, 121 bp, synthetic construct
  misc_feature 1..121: note = Description of artificial sequence: synthetic polynucleotide sequence
  source 1..121: mol_type = other DNA
tgcatataccttgggcatatatttagactaacaatacaaaactgctataaaagagatacctacctggaaagtaccgctctgggactttggaaatgtagaataggaaagcaagaagagcaat

SEQ ID NO: 6203 - DNA, 121 bp, synthetic construct
  misc_feature 1..121: note = Description of artificial sequence: synthetic polynucleotide sequence
  source 1..121: mol_type = other DNA
cttactctagtcatggggatatcctagggaagacacaagtcagaacttctttcattttagttgactgattaagcaataaaccaagcctcattgtatcttttaaaaacagcttgttaaacat

SEQ ID NO: 6204 - DNA, 121 bp, synthetic construct
  misc_feature 1..121: note = Description of artificial sequence: synthetic polynucleotide sequence
  source 1..121: mol_type = other DNA
cgagtggagttggtgccctggaccaccgctcccaccaacggccccacagctgctgtctttggggctgccatgacaccagtaggtcggctcagcagctctgggaccgtttcccaggccacgg

SEQ ID NO: 6205 - DNA, 121 bp, synthetic construct
  misc_feature 1..121: note = Description of artificial sequence: synthetic polynucleotide sequence
  source 1..121: mol_type = other DNA
cacacatgaactttcagctagagtctctgttagcttccagacctagagaacagagcctaattttcttggcattgtgtgccgggaccttcctaatctagctgatgtgcacaatcctagcatc

SEQ ID NO: 6206 - DNA, 121 bp, synthetic construct
  misc_feature 1..121: note = Description of artificial sequence: synthetic polynucleotide sequence
  source 1..121: mol_type = other DNA
aatgcacttgatttttttcatttggttgaaaatcagctatgtgaaaatgtgccatcttcgtaccttcttggtcttcctgcttcccttttactgagatggaactcgggagaagtttatgcac

SEQ ID NO: 6207 - DNA, 121 bp, synthetic construct
  misc_feature 1..121: note = Description of artificial sequence: synthetic polynucleotide sequence
  source 1..121: mol_type = other DNA
agggttttatttcaccacagaataagaaagcattctctcccatatttacaaatgtaaaataacttactagctttagtccttcatggatatatgtctctcctactggactaacacgttttaa

SEQ ID NO: 6208 - DNA, 121 bp, synthetic construct
  misc_feature 1..121: note = Description of artificial sequence: synthetic polynucleotide sequence
  source 1..121: mol_type = other DNA
gtgtaccatatgaggtcgcaccacaaaaaggagtatgcgatggagcccttggtgaagcggcggcgagaggagaaactcaagtgccccatctgcaatgagtccttcagggagcgccaccacc

SEQ ID NO: 6209 - DNA, 121 bp, synthetic construct
  misc_feature 1..121: note = Description of artificial sequence: synthetic polynucleotide sequence
  source 1..121: mol_type = other DNA
atcaattaataaaatatcttttgactctacatcctagtacttgtcctaatttggtttatttttgccattcaactattttaaaagtactttctcattgtgctcttgatttatgttccgaatc

SEQ ID NO: 6210 - DNA, 121 bp, synthetic construct
  misc_feature 1..121: note = Description of artificial sequence: synthetic polynucleotide sequence
  source 1..121: mol_type = other DNA
cactgaaataatgctatttttttctatcctaatggaaacagttttgattaaaattaacggctacttagaatattttaagtcttcaaggagtgattcaaaacaaatagaaaatatgttcctg

SEQ ID NO: 6211 - DNA, 121 bp, synthetic construct
  misc_feature 1..121: note = Description of artificial sequence: synthetic polynucleotide sequence
  source 1..121: mol_type = other DNA
tattttaggcgcagccaggtgacaactctactagaatcactatcctgacagaactctacgtacaagctgtcatttttgaccacatttccagaaggaagacttaagtaccaacatgttaatt

SEQ ID NO: 6212 - DNA, 121 bp, synthetic construct
  misc_feature 1..121: note = Description of artificial sequence: synthetic polynucleotide sequence
  source 1..121: mol_type = other DNA
caattcaaagatggagcatttcctcttttattacctttcacagaggcagtccttgtacaattgtataaaatggcaagctccccaaatgtggtccacatagggatggaggacagcaatttct

SEQ ID NO: 6213 - DNA, 121 bp, synthetic construct
  misc_feature 1..121: note = Description of artificial sequence: synthetic polynucleotide sequence
  source 1..121: mol_type = other DNA
agctacgtcaatgaaatactcaatcattcttgctcggtgttttttcttaacaggctacacagtaaaagacaatagagggcagttatccagtatgaaggcccaacagttctaaaataagtat

SEQ ID NO: 6214 - DNA, 121 bp, synthetic construct
  misc_feature 1..121: note = Description of artificial sequence: synthetic polynucleotide sequence
  source 1..121: mol_type = other DNA
atgccaagtgctcttggcctcagttattgaccctctggactgacaattgtcatccaaaagtacatatcatgaaaacaaatgatcctaattatggttgtatctataaaatgacagtcaattc

SEQ ID NO: 6215 - DNA, 121 bp, synthetic construct
  misc_feature 1..121: note = Description of artificial sequence: synthetic polynucleotide sequence
  source 1..121: mol_type = other DNA
tgagttcccactgatttctacatgttccaaagacttctgcaatgaagcagagattattactatacctatatgggttaaaagactttagaaaaccacaagccattttcaactccaaaagaaa

SEQ ID NO: 6216 - DNA, 121 bp, synthetic construct
  misc_feature 1..121: note = Description of artificial sequence: synthetic polynucleotide sequence
  source 1..121: mol_type = other DNA
agtaagagacacagtgcctgtcctcacggagcttccttcctggtggcagaggcagacaatgtgcagttacatgggagggatgagcactatgaaggagaaaggagcagagtcaggaggctga

SEQ ID NO: 6217 - DNA, 121 bp, synthetic construct
  misc_feature 1..121: note = Description of artificial sequence: synthetic polynucleotide sequence
  source 1..121: mol_type = other DNA
ggcagagccactgcacctggcaagttcccctataatcattgtttggaaaaatattcaaaccacctaagtaccagtaggtgactggcaccagccagtccaaacaaaacccagtctaaagatg

SEQ ID NO: 6218 - DNA, 121 bp, synthetic construct
  misc_feature 1..121: note = Description of artificial sequence: synthetic polynucleotide sequence
  source 1..121: mol_type = other DNA
ttggggataagttgcaaatggaataatttagtatggtttgtagctattttgatgaccacctcgcctggataccttcccataaccactctgctggtctaaaataaaacaagtgttagaacca

SEQ ID NO: 6219 - DNA, 148 bp, synthetic construct
  misc_feature 1..148: note = Description of artificial sequence: synthetic polynucleotide sequence
  source 1..148: mol_type = other DNA
ctgctataatcaccatatccatagtagttgttgtaaccagtgtagtcatatcctccataaccaccgtaaccttggctgttatatccatagttgccatagccttgattccaatagttactatatccctggttccagttttgactggggc

SEQ ID NO: 6220 - DNA, 121 bp, synthetic construct
  misc_feature 1..121: note = Description of artificial sequence: synthetic polynucleotide sequence
  source 1..121: mol_type = other DNA
ctctagcttaccaccacctcttccacgagctcttcctgcaaatcctcctctagatccccactgttgctgttgctgatattgttccttcgacatggctacttttatttcacactaaaagaga

SEQ ID NO: 6221 - DNA, 133 bp, synthetic construct
  misc_feature 1..133: note = Description of artificial sequence: synthetic polynucleotide sequence
  source 1..133: mol_type = other DNA
ctttactaagaccaacattgtggtatttcttttccattatcttcttcactggttcttcttccttaaaggtaataaagcagaacccacgcctcttattggtcttgttgtccatggggagctctatggattccac

SEQ ID NO: 6222 - DNA, 163 bp, synthetic construct
  misc_feature 1..163: note = Description of artificial sequence: synthetic polynucleotide sequence
  source 1..163: mol_type = other DNA
cctcaccaaaaccaccaaagtactcccttattttctcttcaggtgtatctggagaaaggccaccaacaaaaatttttttaaccggctcttttgttttcatggctttggcccttttaggatcaatcaccttcccattcaatttatgttctttttgatccatgac

SEQ ID NO: 6223 - DNA, 170 bp, synthetic construct
  misc_feature 1..170: note = Description of artificial sequence: synthetic polynucleotide sequence
  source 1..170: mol_type = other DNA
ccttatctacactctccgattctttaaatagcacaaagccaaaaccccttgatcgccctgtgataggatctaacttcagagtgcagtctacaacttcaccaaatttggaaaagtagtccttcagatctttctttgtagtgtcccagctaaggcctcctataaacattttc

SEQ ID NO: 6224 - DNA, 121 bp, synthetic construct
  misc_feature 1..121: note = Description of artificial sequence: synthetic polynucleotide sequence
  source 1..121: mol_type = other DNA
tataatacagaaataaaatttaaaagttttaccattcttcccgctgtgccgtcgctgcttcagagtgtcgtggggaggagtttgaatggctagggaattaacaaccggtacagcaaccaat

SEQ ID NO: 6225 - DNA, 234 bp, synthetic construct
  misc_feature 1..234: note = Description of artificial sequence: synthetic polynucleotide sequence
  source 1..234: mol_type = other DNA
cccttcatcctcctcgttcttactggcgtcaatcttcgccccctccgactcggcgctgcccccttcggtgcctccagacgcggttccgcccccggtcccggctccgcttcccgccgccgccgctgccccctgtgtcgccgccaccatggctccctcctgctcgcccgccgagccgcctaccgccgccgttgccgctgccgccgccccgtccccgccgaactgctcctccgacat

SEQ ID NO: 6226 - DNA, 121 bp, synthetic construct
  misc_feature 1..121: note = Description of artificial sequence: synthetic polynucleotide sequence
  source 1..121: mol_type = other DNA
acttagaggagttgtcatgggaaggagcatgcaagcggggttgtgagtataaggggtaggtagttgagccagccagttctgggattaaatgcacagttccatttgtgatccccggaccttt

SEQ ID NO: 6227 - DNA, 121 bp, synthetic construct
  misc_feature 1..121: note = Description of artificial sequence: synthetic polynucleotide sequence
  source 1..121: mol_type = other DNA
tgttgtatatctctcttctgaccttcagaatacctccagggacacagaaagagcacgcagcatcaagcagcacttttcggagtggttacaatgagtatgtaacaaagctaaaatgtgtaat

SEQ ID NO: 6228 - DNA, 121 bp, synthetic construct
  misc_feature 1..121: note = Description of artificial sequence: synthetic polynucleotide sequence
  source 1..121: mol_type = other DNA
caggaactatttgttttccaatggttaaaaaaaattagaaatcaaaaccaacaagtacttacccccactgacagagatattaaatgttcctccagatgagggtagaaattcagattcttct

SEQ ID NO: 6229 - DNA, 121 bp, synthetic construct
  misc_feature 1..121: note = Description of artificial sequence: synthetic polynucleotide sequence
  source 1..121: mol_type = other DNA
agatttagaatataaaggaacagttaaatttgcagataatgaaataatatagctttaaacagcaactttaccttcaaaaaggaccacacatttttctcaaattcagtctgagaagcatcaa

SEQ ID NO: 6230 - DNA, 121 bp, synthetic construct
  misc_feature 1..121: note = Description of artificial sequence: synthetic polynucleotide sequence
  source 1..121: mol_type = other DNA
tggcaataattgataaatccttgtgactgcacagcctgctgaagttggtctgatcggctgaggaactccttttctgttacaacctgactaatgaacacatggtgctgctgctgctgctgct

SEQ ID NO: 6231 - DNA, 121 bp, synthetic construct
  misc_feature 1..121: note = Description of artificial sequence: synthetic polynucleotide sequence
  source 1..121: mol_type = other DNA
ttccccttctgtgcattaatgttgcttgtctatttcctcccttccctcacaactctccttctggccttccagtatcaatttgctgtagcttttgttataatgatttttttttcttaagaga

SEQ ID NO: 6232 - DNA, 121 bp, synthetic construct
  misc_feature 1..121: note = Description of artificial sequence: synthetic polynucleotide sequence
  source 1..121: mol_type = other DNA
gcaacaactaaaccaaagttaagaaaagataatttctttacctgatgggcataaatagtatcatatattagtgtccacataactccagaaaaataaagaggcaggcaaacagatggatcac

SEQ ID NO: 6233 - DNA, 121 bp, synthetic construct
  misc_feature 1..121: note = Description of artificial sequence: synthetic polynucleotide sequence
  source 1..121: mol_type = other DNA
gtctctcactttgctgggtaatgaataaaaaggaccaaggtcatttgatgatgactcaactgttttcttagcaacattaatttcctcagataggagagtgtctttgagctgtttacttcta

SEQ ID NO: 6234 - DNA, 121 bp, synthetic construct
  misc_feature 1..121: note = Description of artificial sequence: synthetic polynucleotide sequence
  source 1..121: mol_type = other DNA
ggtttaaagcttaagtgaagtagcaacaggctttatgagccgaatcctcaaatgaagcttgagtaagttgttaggaggaacatgccttctccagcagttggagaatcaggaggtcacagga

SEQ ID NO: 6235 - DNA, 121 bp, synthetic construct
  misc_feature 1..121: note = Description of artificial sequence: synthetic polynucleotide sequence
  source 1..121: mol_type = other DNA
tactcctgggtattattatgttaaaataaattaggaaagtaattcatttgactctgctatttgctaaagaaaatttacatataagtttgcttaatataaaaaaacaccaaaccttgatatg

SEQ ID NO: 6236 - DNA, 121 bp, synthetic construct
  misc_feature 1..121: note = Description of artificial sequence: synthetic polynucleotide sequence
  source 1..121: mol_type = other DNA
tggaacaatgcctttctggggggttcacagtttttatatcctgtttccagctggcacaggttttggagcccagggattacttcagaggctgaccagactttttcagacccagtttgtggtt

SEQ ID NO: 6237 - DNA, 121 bp, synthetic construct
  misc_feature 1..121: note = Description of artificial sequence: synthetic polynucleotide sequence
  source 1..121: mol_type = other DNA
aaataagattttgatcccagcagggaactttttggaaacctctcctccgggcatcgtatgaagaccttatggaagaaatggcctttcaatcatatctcctgaagtcatagagaattttatc

SEQ ID NO: 6238 - DNA, 121 bp, synthetic construct
  misc_feature 1..121: note = Description of artificial sequence: synthetic polynucleotide sequence
  source 1..121: mol_type = other DNA
atttgaacttggaagcaggagttgaaaggaaggtcacaagaggtatgcctaaaagtgcacgatttccatcagagaaatggacagatccccacaaagaagtttcaaaaatcccataaatgca

SEQ ID NO: 6239 - DNA, 121 bp, synthetic construct
  misc_feature 1..121: note = Description of artificial sequence: synthetic polynucleotide sequence
  source 1..121: mol_type = other DNA
tttttggggagaggatttgccacccctactcagacatagctggaagtcccaccttgacagttcttcttgatagcaggaagagaaggaccagatcttaatccaaatccaaatatgatgacat

SEQ ID NO: 6240 - DNA, 121 bp, synthetic construct
  misc_feature 1..121: note = Description of artificial sequence: synthetic polynucleotide sequence
  source 1..121: mol_type = other DNA
caacaatttcgaggcccatcttctgaacctctctcatgctgtaagttataataacagttctgacaaacacgcaccggggatgagattttcaagcgtttgatttcagattgaaagcgactgc

SEQ ID NO: 6241 - DNA, 199 bp, synthetic construct
  misc_feature 1..199: note = Description of artificial sequence: synthetic polynucleotide sequence
  source 1..199: mol_type = other DNA
cttctggcagaagagctgaccacagttcctgcaatggtgtcgtctttctgtgagtgaaaacctcaccgagcagcctgagcagctgtcaccaccttcatccttcacccagtgatcagcagcagaacggcctggctggtcactcacagaccagctgaaaactcggcctcgactgtcaccaacgaggatcctactgtgatcc

SEQ ID NO: 6242 - DNA, 121 bp, synthetic construct
  misc_feature 1..121: note = Description of artificial sequence: synthetic polynucleotide sequence
  source 1..121: mol_type = other DNA
cttacttggagatgcccaaggcagtgacctcagctgggtgtgcattgtcctttcgatcaaaggctgtgtgcatagtcagcttactcctgaacaccagctgccgttcccatcggtaccctgg

SEQ ID NO: 6243 - DNA, 325 bp, synthetic construct
  misc_feature 1..325: note = Description of artificial sequence: synthetic polynucleotide sequence
  source 1..325: mol_type = other DNA
ccaggtttcaatctgctgtaattccgcacctcaatgggattggggtgggggtggctaagggggccctgcagatgggctctggtctggccctctgaatagttcacaaatatgaagccgtctttctcatctagactgagctggtcggaccagcgtctggagtcgtcagagccactgtcagtacaccaggcggctgttgcgcggcaggaggctgcccggggcctgtggctggtgctgctgggttggcttggagtgtccttagggtcctggctgatgctctgctcatctgcttctgaatcactgctgtcctcgtcttgggcttcctgcc

SEQ ID NO: 6244 - DNA, 121 bp, synthetic construct
  misc_feature 1..121: note = Description of artificial sequence: synthetic polynucleotide sequence
  source 1..121: mol_type = other DNA
agtattaaatacctatttgtgcttctggacagtcttcctgcatttctaggacttcagcaggctcaggagctggtgtttcaggaacttgcaaaaattccattctccaaaactaaatttaaat

SEQ ID NO: 6245 - DNA, 184 bp, synthetic construct
  misc_feature 1..184: note = Description of artificial sequence: synthetic polynucleotide sequence
  source 1..184: mol_type = other DNA
cccgaaccactccatctgagtgtcctgtcactatgacgttctgcgtgtcccattcgttcatctccgacatgcagcagcagatgatctgctggctcctacctgtgaacgtgttgacactcacgatagggttcccattgatgctccacacatggatatatgtgccagcgcaggacacaatgtcccc

SEQ ID NO: 6246 - DNA, 181 bp, synthetic construct
  misc_feature 1..181: note = Description of artificial sequence: synthetic polynucleotide sequence
  source 1..181: mol_type = other DNA
ctgttaattcattgatacaaagagcagaaactggagctcgatgccctcgaagctgggttagaaatgacagtttgttcaaatcccaaatgatacaggttcgatcacgggacccactgacaattatgtgataggctaatgatgctgtggcgcaggtgacggtatcagtgtggcccagtaaggc

SEQ ID NO: 6247 - DNA, 160 bp, synthetic construct
  misc_feature 1..160: note = Description of artificial sequence: synthetic polynucleotide sequence
  source 1..160: mol_type = other DNA
cctgtttgagggtgacggtcttggccttttctttggaggtgcccatctcccacacacacacaaccgtgcttgttccacccgtgatgaccagcttggggttggggcagattgcacagagaatctggccccactcagacaagcattcataaacagtcatggc

SEQ ID NO: 6248 - DNA, 156 bp, synthetic construct
  misc_feature 1..156: note = Description of artificial sequence: synthetic polynucleotide sequence
  source 1..156: mol_type = other DNA
ccttgtctgactcataggttcccagtctgcaactgaggtctgcatagccccaagcaaaagttttattccaggttggtgggataagaaccttattctgttccaccgcaagaatacctttatctgtacatacgatttgtcctacaggttctttgagtt

SEQ ID NO: 6249 - DNA, 149 bp, synthetic construct
  misc_feature 1..149: note = Description of artificial sequence: synthetic polynucleotide sequence
  source 1..149: mol_type = other DNA
ccttttacaggtgttagagaaggcctcaagttgtctagatgatgaaaaaagatcttgtcacttgtagatcctggtaggacagagattcctgcattgtctccattgagtcgacttctcactcgctttggtggatgaggttttttaaataa

SEQ ID NO: 6250 - DNA, 214 bp, synthetic construct
  misc_feature 1..214: note = Description of artificial sequence: synthetic polynucleotide sequence
  source 1..214: mol_type = other DNA
cctgtttagggatctgaccgaagttattaatgaacccaattgtggctgtctcctttagtgggtcattgatgttgtagatatccacttgaccctcataaaaaagatgatggaagacatttacagcttctactgcagcagggccttgctgtttataaccgaagattaagtcaatccactcatgtagatgggcactcacgtaatcacactccaaagc

SEQ ID NO: 6251 - DNA, 121 bp, synthetic construct
  misc_feature 1..121: note = Description of artificial sequence: synthetic polynucleotide sequence
  source 1..121: mol_type = other DNA
atgtacttccattacctcacgatggactctgatgaattctcgtgggtccccttttgcccagggtggaaggataacatctccaagcttggtgccattttgtttacagcctatgcaattggat

SEQ ID NO: 6252 - DNA, 155 bp, synthetic construct
  misc_feature 1..155: note = Description of artificial sequence: synthetic polynucleotide sequence
  source 1..155: mol_type = other DNA
cctagatcaaagttgttggaattgaacaggaattctggtaaataaaagaactctgggataagttcttttacatctgccatattgtgctttgacgctgaataccaggcctcgcgcacactgtgaaacatccggtcagccaggtcaaagtggccacc

SEQ ID NO: 6253 - DNA, 121 bp, synthetic construct
  misc_feature 1..121: note = Description of artificial sequence: synthetic polynucleotide sequence
  source 1..121: mol_type = other DNA
gttttacctgtagccttaagaatatctgtgtgaaaggctccatccttacaaggtatgaggccacaatcattgcagatgaatagtgggtcccatagtggtatgcaggagtttctcctgttta

SEQ ID NO: 6254 - DNA, 121 bp, synthetic construct
  misc_feature 1..121: note = Description of artificial sequence: synthetic polynucleotide sequence
  source 1..121: mol_type = other DNA
accattaggatcctcccagtctttataccgcttcttatactgagctaatcgttcatctgtttgtgctcccattggcttagccaggtttctaaacgtcttgggattagtaagatccacctcc

SEQ ID NO: 6255 - DNA, 121 bp, synthetic construct
  misc_feature 1..121: note = Description of artificial sequence: synthetic polynucleotide sequence
  source 1..121: mol_type = other DNA
cctctgagtcataatctgcaaggatccaggggaagacaggatactgcatgagatcattatatgatctgccagccaaagtgttcaaatgcatcaaatattggaagttgctgatttcacctct

SEQ ID NO: 6256 - DNA, 121 bp, synthetic construct
  misc_feature 1..121: note = Description of artificial sequence: synthetic polynucleotide sequence
  source 1..121: mol_type = other DNA
ttctaaggaagctcatatattcattaaacttacctcccatctctgagtcacagacttctctccaaccaaagtgctaagtaacccagatctaaaagcaatacataatacaataaattacaag

SEQ ID NO: 6257 - DNA, 121 bp, synthetic construct
  misc_feature 1..121: note = Description of artificial sequence: synthetic polynucleotide sequence
  source 1..121: mol_type = other DNA
gcaaggaacaaaccacctacccctgctccacactcgtgtttggtcgttgcccagatacagattctgaactgtccgttagagatggcactacagccaaaaacctgaaaaatttaaaatagcg

SEQ ID NO: 6258 - DNA, 121 bp, synthetic construct
  misc_feature 1..121: note = Description of artificial sequence: synthetic polynucleotide sequence
  source 1..121: mol_type = other DNA
gttccgaataaacaagacctttgatagactttgtttctgattcctttctgaaaagcaaggaggtaattccgtccatctccagagaaaacttccacagcaataggctgaaatgatcagagag

SEQ ID NO: 6259 - DNA, 121 bp, synthetic construct
  misc_feature 1..121: note = Description of artificial sequence: synthetic polynucleotide sequence
  source 1..121: mol_type = other DNA
ctgcaggagatatctccttttatgaacttccttgatatcttcatatgcaaaaatgctgcatgttctcttgagttgactagggccttgcctggctcctctaggaataataggctcatgcata

SEQ ID NO: 6260 - DNA, 150 bp, synthetic construct
  misc_feature 1..150: note = Description of artificial sequence: synthetic polynucleotide sequence
  source 1..150: mol_type = other DNA
ctttggaggtaaggtttcaatatctcttatttccctggttgctgtcatggtaaatccatcaatcacataaaaatgctctttaccaaaaagaaggagcccctcactggtatctaggccctggactcgagcacagcggtacatgtgttggat

SEQ ID NO: 6261 - DNA, 165 bp, synthetic construct
  misc_feature 1..165: note = Description of artificial sequence: synthetic polynucleotide sequence
  source 1..165: mol_type = other DNA
ccttttctccttcctctaacaggcgcagtaaggtagcattatctgttttctcctcctcttctatggagctgccctcagcaatctggtcttgtagctgctcctggttctcctcatctcctccatcaggtgcagatcgggagcgttttagaggaggcttgaccaaac

SEQ ID NO: 6262 - DNA, 170 bp, synthetic construct
  misc_feature 1..170: note = Description of artificial sequence: synthetic polynucleotide sequence
  source 1..170: mol_type = other DNA
cctttgactttagcaatagtgtcttccccatgctctggttcttgctgagcagcttcaccttctgaactctccacaatggcgtcttggacaatggcgggattgccagaggccagtcgcatgtagtactctttactgtcataacttacggctcttctatatcgagcaggttt

SEQ ID NO: 6263 - DNA, 121 bp, synthetic construct
  misc_feature 1..121: note = Description of artificial sequence: synthetic polynucleotide sequence
  source 1..121: mol_type = other DNA
tagtttacattcttttactgtaatttgtgttttaccttttgaggaatatcatcgggtgtctcaggctgtttacttgggatctcagactgaaaacagggtattaagtatagacatatcagaa

SEQ ID NO: 6264 - DNA, 229 bp, synthetic construct
  misc_feature 1..229: note = Description of artificial sequence: synthetic polynucleotide sequence
  source 1..229: mol_type = other DNA
ccgccacatttgtctcttgctcagtttctggcacgtaagggtaatggttataaaacatatcatttcgcaccatctttttcctcatcctgcagggcccttctgtcatctccagcatccacttgtcgaggtgggagccgatgggagggccccacagcccccgctccctcaacagctcgcactcgatctgacaccactcttctgtcacgtacttcagggcattctgctgacg

SEQ ID NO: 6265 - DNA, 121 bp, synthetic construct
  misc_feature 1..121: note = Description of artificial sequence: synthetic polynucleotide sequence
  source 1..121: mol_type = other DNA
tatgatgattataagtccttacctcctgatattctttatattgtgtatctactaagtcacgaacaacagcaatgtgagtaaacatccactgcgaaatctcctaacaatggatggaaaaaga

SEQ ID NO: 6266 - DNA, 159 bp, synthetic construct
  misc_feature 1..159: note = Description of artificial sequence: synthetic polynucleotide sequence
  source 1..159: mol_type = other DNA
cctgggtggaaagactgtgtttattaagaccactttcttttcgattccttcttgatcctgttaacttggaaagaccaaagccactgctgacacgggataatttggactgtgtggtgggcgctaaagcttctcctcgacttatgcatttcttttcatggg

SEQ ID NO: 6267 - DNA, 184 bp, synthetic construct
  misc_feature 1..184: note = Description of artificial sequence: synthetic polynucleotide sequence
  source 1..184: mol_type = other DNA
cccaaatgattctgccagcacttcagggcagcttcttcaatgagtggccttgctgtagctatgtccacgtggcccctttcattcacaggtagagttactttgaaaagttcctctaagacttgtttcttactatgtatcagttcagtccaaactctgttgacagcttttatgagaagctgacgcc

SEQ ID NO: 6268 - DNA, 121 bp, synthetic construct
  misc_feature 1..121: note = Description of artificial sequence: synthetic polynucleotide sequence
  source 1..121: mol_type = other DNA
aattaccttcactaatatcttggctgtaactaccatctggttcaatgtccgaggggatcataatgtgccatgtggtcatgcgggcttctgcttccagtccaaatccatccacgttgctgaa

SEQ ID NO: 6269 - DNA, 231 bp, synthetic construct
  misc_feature 1..231: note = Description of artificial sequence: synthetic polynucleotide sequence
  source 1..231: mol_type = other DNA
ccttccaacatgtagatttatcaagcagtgggccagacagctaatgaattcttggtcatggttcccaggtcccaggatcaagtttctgtttacagtgaggaccctgagtgaatcaagcagagctacttgctgaggaacggttttgtgtgcccgtgagaactggtacaagatggtcctattgaggcaatgatacactgcatccagtgacaatccctgtgatcttctctttga

SEQ ID NO: 6270 - DNA, 162 bp, synthetic construct
  misc_feature 1..162: note = Description of artificial sequence: synthetic polynucleotide sequence
  source 1..162: mol_type = other DNA
cctgtgcaattagttgaattataaaatctataagaagtttagattctttgttgaacatgccttgccaaagcttgtccaccacacgctgtgtgaaataaaacacattgttcaccaatacctggtagcttcctccactggtaataggcagagatgcatcttccc

SEQ ID NO: 6271 - DNA, 121 bp, synthetic construct
  misc_feature 1..121: note = Description of artificial sequence: synthetic polynucleotide sequence
  source 1..121: mol_type = other DNA
cacagaattacctaataacacatcagctgcaagcaaatggtccatcacgctatccaaaatgtaagtttgaaattctttttgctgagttcttgtagacctttcaggggaagcctaatcaaga

SEQ ID NO: 6272 - DNA, 235 bp, synthetic construct
  misc_feature 1..235: note = Description of artificial sequence: synthetic polynucleotide sequence
  source 1..235: mol_type = other DNA
cctccaacaaaagatcaattagtggagtttgcttgctggcaggagtgagacagaggttgtctatgattaagacccgcatgaagtcaaaaacgaactttttagccgggtgattggtcagatatgtcttggtgcccacattgcagtactctgattggctcctgttcatccctgtgtctgctgcaaacgctttaaactcttctgctggagatccaacttcatcatcaaggtcagtcac

SEQ ID NO: 6273 - DNA, 181 bp, synthetic construct
  misc_feature 1..181: note = Description of artificial sequence: synthetic polynucleotide sequence
  source 1..181: mol_type = other DNA
ccatctctgagtaagggcgaatattgaaggggaagacggtggctgctaatgcacacaggaagtcagggctcatccacatggaggcaaggtctggcacgttgtgatacaaatatctgaagaactgcatcagggtcacaggatattctcggagccaagatccctcttcttctgattgccaagg

SEQ ID NO: 6274 - DNA, 136 bp, synthetic construct
  misc_feature 1..136: note = Description of artificial sequence: synthetic polynucleotide sequence
  source 1..136: mol_type = other DNA
ctgaagtcagcatgctgcggagcattcccaataataaaaaaacagcttctgtgcatacgttatggatagaagagaccacagttccgctggaggcaggaactccaaagatgaatgtccaaatggaatccaaatcaaa

SEQ ID NO: 6275 - DNA, 237 bp, synthetic construct
  misc_feature 1..237: note = Description of artificial sequence: synthetic polynucleotide sequence
  source 1..237: mol_type = other DNA
cctggcaaccctgcttactccggcagctgatgacaggcacactgacctgcaggttctcaggcagctcactaactggctgctgcagaaacaaggccatgaggagaaaatagagggcagggacattagtgtgtttaggaaggaatgactgaaggactggaaaaccaggaaaatgacaagcatctcggttaatctccctgaccgtcgatctcccaccagcacttctgcccacgttgaatc

SEQ ID NO: 6276 - DNA, 219 bp, synthetic construct
  misc_feature 1..219: note = Description of artificial sequence: synthetic polynucleotide sequence
  source 1..219: mol_type = other DNA
cctaatacagttccaatcttattagttaagacagaatctgtctgttcaagccatcctccaccactgagtccttctttaaacttgatgagaatagactgattacttagtaggacaacaagaatcctcatggctgctgtaactgtggtggaatgtaagtgttcctccataaacatcatgatccagtcaaaacccagtgtcttcaccagttcttcacaagct

SEQ ID NO: 6277 - DNA, 121 bp, synthetic construct
  misc_feature 1..121: note = Description of artificial sequence: synthetic polynucleotide sequence
  source 1..121: mol_type = other DNA
tgcaaattaatgcttgtcttttctttagatgtataaattagttttagcaagatatccagaagtctgttcctcaaaagtataagattagctgatacaagacctccaaactcctcttcagttc

SEQ ID NO: 6278 - DNA, 121 bp, synthetic construct
  misc_feature 1..121: note = Description of artificial sequence: synthetic polynucleotide sequence
  source 1..121: mol_type = other DNA
agaatcaacttaccagtgtcaagcttctcttcattatttatttccattactacaaatttctcacaaaccgcaaaggttggcaaagtagaagaaataaactgcccaaatctttaaacaaagg

SEQ ID NO: 6279 - DNA, 163 bp, synthetic construct
  misc_feature 1..163: note = Description of artificial sequence: synthetic polynucleotide sequence
  source 1..163: mol_type = other DNA
cctgagcagatcattgctgctaggaaaaccttgcagtaagaagctcaggacattactaatagcagcaatagtaggctgggataaagacatatctcgaagagtcaggagcagctttgggattaactggaattctctcattaatttggcattctttgaggcttca

SEQ ID NO: 6280 - DNA, 121 bp, synthetic construct
  misc_feature 1..121: note = Description of artificial sequence: synthetic polynucleotide sequence
  source 1..121: mol_type = other DNA
aactacgtgggtattaattaatacctggactctgtgagcagttcaataaagtgttcaaataaggaaagatgaagttcatatggtgcatggagccagacctataataaataaaaacagtagt

SEQ ID NO: 6281 - DNA, 154 bp, synthetic construct
  misc_feature 1..154: note = Description of artificial sequence: synthetic polynucleotide sequence
  source 1..154: mol_type = other DNA
cttcaaaatcacagaggaggtcctggaaagcagttgaatttggaataatggaggtctcatgtccactatcaacagttcccaccaaagaaaaagttagatggaggatgtggctgttaagaagggaacgtttcttcttaagcaacattgccagcaa

SEQ ID NO: 6282 - DNA, 192 bp, synthetic construct
  misc_feature 1..192: note = Description of artificial sequence: synthetic polynucleotide sequence
  source 1..192: mol_type = other DNA
cctggtagcccttgattctttccatttctttgctggctagtgggttactcttgaccacacaaaccagggccttgactgctgcatataacccttccacatcagaggccatggccaccaggcccaggatggctgcagctccaccaacgtactgcaaagtagtggcaacaggcttagggacaaatgttcttactc

SEQ ID NO: 6283 - DNA, 121 bp, synthetic construct
  misc_feature 1..121: note = Description of artificial sequence: synthetic polynucleotide sequence
  source 1..121: mol_type = other DNA
ctcacccaagtatccaatcagagcggccccaattgtccgtgcagatccattaagatgtcctgctgaattgtgtatcaacttcacaggagtggcattctcatgtgaggaaatgcctaactga

SEQ ID NO: 6284 - DNA, 162 bp, synthetic construct
  misc_feature 1..162: note = Description of artificial sequence: synthetic polynucleotide sequence
  source 1..162: mol_type = other DNA
cctgcttagcaatggctttgctatccaatttgttatacactttccggattcttgccactgttagagacgacacagagagtgcatagaggccaaatgacactttctcctctggtactaatgacacaggggatggcaccaccccttcggattttgcatctttac

SEQ ID NO: 6285 - DNA, 233 bp, synthetic construct
  misc_feature 1..233: note = Description of artificial sequence: synthetic polynucleotide sequence
  source 1..233: mol_type = other DNA
catggcatacatacagcctgaaagcttccaacataatttggtccaagttcataaatggtagtaacatttgaagaaggtaaaacttcttctagaaaatgtgtgggtcccaggcgccaaaccaatgaggcaatttggcgttgggcaggtggagtaccaatgtaggcatagaccgtgctcaccactggtggatttgccgaacctgaaccccctggagtactgtggacataatgaag

SEQ ID NO: 6286 - DNA, 183 bp, synthetic construct
  misc_feature 1..183: note = Description of artificial sequence: synthetic polynucleotide sequence
  source 1..183: mol_type = other DNA
cctttacagtgttaacaagctgtccatcaatataaagggctgcagtactgtttttcaacatgcctttgctcattaccaggaccaaatgatgccactgtccctcaatgataagctctccacatcgaaagcgagcacagcatgggagaatttcataaaatgaggactcttcactaaaatcatcaa

SEQ ID NO: 6287 - DNA, 220 bp, synthetic construct
  misc_feature 1..220: note = Description of artificial sequence: synthetic polynucleotide sequence
  source 1..220: mol_type = other DNA
ccataattttggaggagttcctctttggtggaaacaatcagagatcggtcttttgctgatagaactattgcaaggcacacgtaatgttgctcagaagaatttgctcggcgcacaacagtaagaagtctgacagggtggttatttggaggagaactaaaatgttcaatacaaaaccagctagagtaacttaagccggagggaggagggaagaatctttcac

SEQ ID NO: 6288 - DNA, 121 bp, synthetic construct
  misc_feature 1..121: note = Description of artificial sequence: synthetic polynucleotide sequence
  source 1..121: mol_type = other DNA
tattacttaccagaaccaatgccactgaccacagccccatcaataagacctgttgtgacggtattatttgtaggagcattatgaggggccaaactgggcaaaaaaagacatctattaaaga

SEQ ID NO: 6289 - DNA, 233 bp, synthetic construct
  misc_feature 1..233: note = Description of artificial sequence: synthetic polynucleotide sequence
  source 1..233: mol_type = other DNA
cccaaacccttcaagtgatgtgtcaaattcaacaaaagctggagtaactgatgacccatgaagtctgatgtcatgtggggttgtcatggagaccagacacttcaccctggtcaggggtacagtacttccttccgcagattttaccaggctcttgcttatccggtaatggttatcttcatgtaagctaaaaacattatcagtacccagaccttccagagatgtgatcatactac

SEQ ID NO: 6290 - DNA, 121 bp, synthetic construct
  misc_feature 1..121: note = Description of artificial sequence: synthetic polynucleotide sequence
  source 1..121: mol_type = other DNA
ttacttctcatttctggttcataactcagtgaacttggtttgtggaccctatattgttttagcagttttttgtcccaggcaccacaatttaaaggacttgccaaacgtaaaaactccctaa

SEQ ID NO: 6291 - DNA, 216 bp, synthetic construct
  misc_feature 1..216: note = Description of artificial sequence: synthetic polynucleotide sequence
  source 1..216: mol_type = other DNA
cctcaacaccatgggttccagagcctgagaggctaatcgttcaaacatccgctgcaggggcgggtgcagtgagtggtcctcatcagccaatgcagcactgcacctctgcagcagtcgtgcatgaagaccagcttcacacatgacttgctggttcctttctgtgtgcaccagggattgtaaaatatttgccacggcaagttgaagatccaaagcatg

SEQ ID NO: 6292 - DNA, 179 bp, synthetic construct
  misc_feature 1..179: note = Description of artificial sequence: synthetic polynucleotide sequence
  source 1..179: mol_type = other DNA
cttctggctgtgtcactgacccaacagaggccagtaggtccagcatggcaagcatggctccaggatgaatgatgactgcatcagaactctgcagagatgaagttgtcacatgtagtttcaggtcggcaacatttttaggagggtaaacagggggagttgaaacagaatgatatgcatgc

SEQ ID NO: 6293 - DNA, 121 bp, synthetic construct
  misc_feature 1..121: note = Description of artificial sequence: synthetic polynucleotide sequence
  source 1..121: mol_type = other DNA
tctcttatatgatcagtaccttttcctggacaaagctggtgtaccccaaggagaggggagagaagactcacttgtcaggcaaggagggatctgttctgcacgactacagacaacaaaacag

SEQ ID NO: 6294 - DNA, 459 bp, synthetic construct
  misc_feature 1..459: note = Description of artificial sequence: synthetic polynucleotide sequence
  source 1..459: mol_type = other DNA
cctgtcaaaagaatctgtggctactttgtaaagataaataaaaagtttactgcagtgccgtaacgtgggtgacactgattctattgagattacatcttcctctaaaagtctttgaaatggctgtgtatttgaggggaagacattcatggcgcttatttttcttaggtctgagaagcagccaagaaatcgaacagcatctgccaacttctcatactgaatctctgttttgaagaaatgagagttggctggctcatagcgcattgctgcagtcaacgtgcagaacacagtgtgaagaagttcaaacacttgattctggttcactttctcccagccattcttgggtggacagctcaaagatctttccatagcaacgagcaaggatgtaatgtacacaaatcctccaactttcctaaaaactgttcttgaacgatggctttctcgaaggaccgacaggagggc

SEQ ID NO: 6295 - DNA, 195 bp, synthetic construct
  misc_feature 1..195: note = Description of artificial sequence: synthetic polynucleotide sequence
  source 1..195: mol_type = other DNA
cccttaaaatatcagtcttcaactgcaattccgtcggtggggctgaatgcattagccccaggagagtgcccatgtcatcgtccccatttggggagagcaccagctgttggatagtcatcaaggcatgctgccggcattgagggtactttactatattatgtgcacatcttgcacctccaaattctcgaaaaattc

SEQ ID NO: 6296 - DNA, 121 bp, synthetic construct
  misc_feature 1..121: note = Description of artificial sequence: synthetic polynucleotide sequence
  source 1..121: mol_type = other DNA
tttaaattacctgcatttgtgtttgatccttgaagaagcactgtcaaggtctccataaccaataaagccaggtgtttttggtcttcaactgaactattatttcttgagtcccctaaaaaaa

SEQ ID NO: 6297 - DNA, 469 bp, synthetic construct
  misc_feature 1..469: note = Description of artificial sequence: synthetic polynucleotide sequence
  source 1..469: mol_type = other DNA
ccttgttcatttagtgcctgagttggatccttcaacagggcagcatatttatgcaaaaggtttaccatgacctccaaaaggccaacctccctgaacacgtctttaaatatgtagtcatgtcttgtaaacttaagaagtgttttcattgcaataatgctacagtgataagaagagctagattttaagaggatactgacactaataagttctttacaaggtatataatttaagctaaaaacaacaaactccagcatctcaaagtatttgttttgtacttctgggagtttagaaatcttctctgcaaactgtgacaatgtgtgctgtgactctaggatgaagtaattggcattgtcagccatgtaaatatttgtgatagcatcaaggatgatttgggcaaggaagctggtttttgcttttaaaaatgcattctgaagaactgcaaaggcctggacgtttctcacactgtgac

SEQ ID NO: 6298 - DNA, 168 bp, synthetic construct
  misc_feature 1..168: note = Description of artificial sequence: synthetic polynucleotide sequence
  source 1..168: mol_type = other DNA
cctttgcctgcaggctgaggtactgcaaatccaggcaataaaaagggtgcccctgtggtaataccagctggttttagttcactgacaccatatgttgttagggaagttatcagattaaccagatctttcaaggcatctttggattctgcctcttttgcttgttccaat

SEQ ID NO: 6299 - DNA, 188 bp, synthetic construct
  misc_feature 1..188: note = Description of artificial sequence: synthetic polynucleotide sequence
  source 1..188: mol_type = other DNA
cctaagcaagagatcacaaagaaaattatatccttgccatatccgaaaatcatccagaagtgtttgggaaacatcgctggaatctttgaggaaacaagaaagcccagcaaacatttcgacaatttctaggggagacaggtcatctgattgctgcatattctgaacacatgtagataaacactctttct

SEQ ID NO: 6300 - DNA, 194 bp, synthetic construct
  misc_feature 1..194: note = Description of artificial sequence: synthetic polynucleotide sequence
  source 1..194: mol_type = other DNA
ccatgaatatacttcactacattgacactaagaccatgacgagatatggtcatgaggacttctccagcactctttctccaaggcaggttatagggagggcaccaagaggttattgcactgaatagaagctggagatcatctttctgagccagctcctccgcaggggaaacaaaactgcacagtttcactaagat

SEQ ID NO: 6301 - DNA, 163 bp, synthetic construct
  misc_feature 1..163: note = Description of artificial sequence: synthetic polynucleotide sequence
  source 1..163: mol_type = other DNA
cctgtacaaaaactttctggagtagtcctcgacgttctgctagaggtagctcattctgtgcacctccaactgcctcaggcacatgtggaaggtcaaaaaacagatataaacatttaaccagggtggaaggcactgacattgttgtcatgcagtccacggtttt

SEQ ID NO: 6302 - DNA, 121 bp, synthetic construct
  misc_feature 1..121: note = Description of artificial sequence: synthetic polynucleotide sequence
  source 1..121: mol_type = other DNA
acttacctgaccagaggaagctaacaaattaattgtcgttagaagcatccagcctctactggcttcttcactctgattaatctctaggaactgaactatggcccgacttgcagcctctata

SEQ ID NO: 6303 - DNA, 121 bp, synthetic construct
  misc_feature 1..121: note = Description of artificial sequence: synthetic polynucleotide sequence
  source 1..121: mol_type = other DNA
tgtggatttgtttgatgctctccttcgaatttctgtcaccattagtcgtgagacttgtgttgtgaactgcagaagatcagaaaatttttctgtcattgtattcggcggagcatttccaaaa

SEQ ID NO: 6304 - DNA, 181 bp, synthetic construct
  misc_feature 1..181: note = Description of artificial sequence: synthetic polynucleotide sequence
  source 1..181: mol_type = other DNA
ccctgttaaacactggcagcatcatatacagtttctcttcttgttccttctgagtcatgtgccggggaggatggcacaactccgtgaagagccggcggaggtgcatcagtcctaaggcgttgtcttgtgggctgcactcctcctgcctcggccgccccatgatcctcttcaccatgttcat

SEQ ID NO: 6305 - DNA, 121 bp, synthetic construct
  misc_feature 1..121: note = Description of artificial sequence: synthetic polynucleotide sequence
  source 1..121: mol_type = other DNA
caactggacaggagaatagggtctatatttgtacattttacaaaaggctaactacacttcgagtgctcatcaaacattaaggacgcctctattgaactaggtcttttagtaacagatgaag

SEQ ID NO: 6306 - DNA, 121 bp, synthetic construct
  misc_feature 1..121: note = Description of artificial sequence: synthetic polynucleotide sequence
  source 1..121: mol_type = other DNA
tgagactgggtaatttataaagaaaaagaggtttaacggactcacagttacacgtggtttgggatgccctcacaatcatgatagaaagcaagaaacacatctcacatggtggcagacaaga

SEQ ID NO: 6307 - DNA, 121 bp, synthetic construct
  misc_feature 1..121: note = Description of artificial sequence: synthetic polynucleotide sequence
  source 1..121: mol_type = other DNA
aacaggaagaggctgtattagtaagaaggtctagatcagtttcctattacttctgtaacaaattgccagaaacttagaggcttaattaaaacaacacaaactcattatcttagagttctat

SEQ ID NO: 6308 - DNA, 121 bp, synthetic construct
  misc_feature 1..121: note = Description of artificial sequence: synthetic polynucleotide sequence
  source 1..121: mol_type = other DNA
atgcttggtgtatatgtacttatagtgttaccaggctgctcatatgaaaatcttggcacctctcatattaacagttcatctgaatggctatgttttcctttgcttttctcactagctggca

SEQ ID NO: 6309 - DNA, 121 bp, synthetic construct
  misc_feature 1..121: note = Description of artificial sequence: synthetic polynucleotide sequence
  source 1..121: mol_type = other DNA
ctgcattgttactgtgttttcacaggaggcgatcgagatcggatgacagcaaatcatgaaagctacctcctcatggcaagcacccagaatgatatggaagactgggtgaagtcaatccgcc

SEQ ID NO: 6310 - DNA, 121 bp, synthetic construct
  misc_feature 1..121: note = Description of artificial sequence: synthetic polynucleotide sequence
  source 1..121: mol_type = other DNA
ctcctccagcgttttctggggtgtgaagacatttaataaactaataatctgaaagagagtggaagggacagaggaaacgagagaaagaaaaaagagagagaatgtattatttttaaattgt

SEQ ID NO: 6311 - DNA, 121 bp, synthetic construct
  misc_feature 1..121: note = Description of artificial sequence: synthetic polynucleotide sequence
  source 1..121: mol_type = other DNA
gtaaccaattacatatagttttaaattcactacaggcaaaacgctcactagttttctacgtatgattcacagtcctgtcttcagtggtactgaaccacagcctttgtagactagtcattag

SEQ ID NO: 6312 - DNA, 121 bp, synthetic construct
  misc_feature 1..121: note = Description of artificial sequence: synthetic polynucleotide sequence
  source 1..121: mol_type = other DNA
gggtatcatctttcccaaacaaactcattctgttcctgatgttctgaattctgttaatgcaaccacaatttttctcatcatgcaatttcaaaattttaacttagactcttttgtctctggc

SEQ ID NO: 6313 - DNA, 121 bp, synthetic construct
  misc_feature 1..121: note = Description of artificial sequence: synthetic polynucleotide sequence
  source 1..121: mol_type = other DNA
aaggatcaccactggtcacgtggtaccctgaggcacatctcggagaactcctttgggccatctgggggcctgcgggaaggaagcctgagttctcaagattccaggactgagagtgccagct

SEQ ID NO: 6314 - DNA, 121 bp, synthetic construct
  misc_feature 1..121: note = Description of artificial sequence: synthetic polynucleotide sequence
  source 1..121: mol_type = other DNA
agaccttcacatgagggaggcaaaaaagatgaagcagaaagcagagttaatggttagtattggccctttatctctttggtagaatgttttctgatagtaaaaaaaatttttggtagtctcc

SEQ ID NO: 6315 - DNA, 121 bp, synthetic construct
  misc_feature 1..121: note = Description of artificial sequence: synthetic polynucleotide sequence
  source 1..121: mol_type = other DNA
tgccagtgcacaggatacacatacatgtggtagtttttcttaaagtcccttaagagaagatcaatgggatggtccccagccaaaagcctcttttcatccaggtaaattttcttgacctggg

SEQ ID NO: 6316 - DNA, 121 bp, synthetic construct
  misc_feature 1..121: note = Description of artificial sequence: synthetic polynucleotide sequence
  source 1..121: mol_type = other DNA
acactctcccactcaaaaagtgaatccagagaggagcaagcagacagcgaatccagtgagagcctcaacttctcagaggaaagcccggagtcccctgaggatgagaacagctccagccagg

SEQ ID NO: 6317 - DNA, 121 bp, synthetic construct
  misc_feature 1..121: note = Description of artificial sequence: synthetic polynucleotide sequence
  source 1..121: mol_type = other DNA
tttgggaaaaccaccaccgttgaatacgagggggagtacgaatacacgggcgccaatgaatacgacaatggatatgaaatctatgaaagtgagaacggggaacctcgtggggacaattacc

SEQ ID NO: 6318 - DNA, 121 bp, synthetic construct
  misc_feature 1..121: note = Description of artificial sequence: synthetic polynucleotide sequence
  source 1..121: mol_type = other DNA
gatgaccagagtgctgaaacccacagccacaagcagtccagattatataagcggaaagccaatgatgagagcaatgagcattccgatgtgattgatagtcaggaactttccaaagtcagcc

SEQ ID NO: 6319 - DNA, 121 bp, synthetic construct
  misc_feature 1..121: note = Description of artificial sequence: synthetic polynucleotide sequence
  source 1..121: mol_type = other DNA
attacaggtgtgagccactgtacccagcctgatatgattattgattattcttaaccctgcatttactgatatcatttcctcctctcctgttctctttataattaatctttttatttatctc

SEQ ID NO: 6320 - DNA, 121 bp, synthetic construct
  misc_feature 1..121: note = Description of artificial sequence: synthetic polynucleotide sequence
  source 1..121: mol_type = other DNA
atcagatttatttttacttctagaaactctaagcatggatttatgactttcttttagacttcgtggatgttcaagtcaaacacatttttgctggaacatatgccaactttgtgacaactca

SEQ ID NO: 6321 - DNA, 121 bp, synthetic construct
  misc_feature 1..121: note = Description of artificial sequence: synthetic polynucleotide sequence
  source 1..121: mol_type = other DNA
tgcccacagtggccagctttcagcccgagctggtaagaatgattgtctctggaatttaaaggtattttaagtgatgaaaacagttgtttacagaatatgtatctattacttactttgaggt

SEQ ID NO: 6322 - DNA, 121 bp, synthetic construct
  misc_feature 1..121: note = Description of artificial sequence: synthetic polynucleotide sequence
  source 1..121: mol_type = other DNA
gacagttggagaggcaggtagagggcagggcaagcggttccttgtaggctaggcacaagaaagccattatatagttctgagcaggagtggagtctgtttaaactccgtgtctacagagatg

SEQ ID NO: 6323 - DNA, 121 bp, synthetic construct
  misc_feature 1..121: note = Description of artificial sequence: synthetic polynucleotide sequence
  source 1..121: mol_type = other DNA
ctacaaccagagcaaatttatggtgctgatcaaactggattgttttggaaatgtctaccatcaaggacattaactcttgaaactgaccaaagtacttctgggtgtaggtcaagcagagaga

SEQ ID NO: 6324 - DNA, 121 bp, synthetic construct
  misc_feature 1..121: note = Description of artificial sequence: synthetic polynucleotide sequence
  source 1..121: mol_type = other DNA
tagctttcagggagctagaattagtacctgcgagctttttagcagttgactcttccctcactggagtcattcctgctaacctcccatcttctttacacgtatgctgggcattactggagac

SEQ ID NO: 6325 - DNA, 121 bp, synthetic construct
  misc_feature 1..121: note = Description of artificial sequence: synthetic polynucleotide sequence
  source 1..121: mol_type = other DNA
atctgtaaactatcttatatcaaaaattattggttttgaatgccatgtttgggtaaatttttttcaatatcaagaatttctacttttacatttcatttatatttaagattattatttgaga

SEQ ID NO: 6326 - DNA, 121 bp, synthetic construct
  misc_feature 1..121: note = Description of artificial sequence: synthetic polynucleotide sequence
  source 1..121: mol_type = other DNA
gctttgaatgggtttcatgaaaccatcttattttcaaagtgctcataagcatctttacactagattcttctagaatttgtttggaacaatattaatttcacttgaaattaatattttcctc

SEQ ID NO: 6327 - DNA, 121 bp, synthetic construct
  misc_feature 1..121: note = Description of artificial sequence: synthetic polynucleotide sequence
  source 1..121: mol_type = other DNA
acaaggggagggtcaggtagccgttccccacagtaagtatcttgctcctgcctccaggcctcacatgaaaatgaaccgtaatctcaccagcttataaatgtaacacaaaacgtacacagcc

SEQ ID NO: 6328 - DNA, 121 bp, synthetic construct
  misc_feature 1..121: note = Description of artificial sequence: synthetic polynucleotide sequence
  source 1..121: mol_type = other DNA
catttcacacctatcttcatcccttagttattgataggaaagcctcaagaatgtactgggaaaagtcattggtaatctagatgctgtggcagaagtacattgcaggattggttaattataa

SEQ ID NO: 6329 - DNA, 121 bp, synthetic construct
  misc_feature 1..121: note = Description of artificial sequence: synthetic polynucleotide sequence
  source 1..121: mol_type = other DNA
actcagagagtaacctaccagcagatagtgaaagagaagaaaatatagggttacaaaatggtgaaacaatgctggggacaaactccccaaggaaacttggattttatgagcaacataaagc

SEQ ID NO: 6330 - DNA, 121 bp, synthetic construct
  misc_feature 1..121: note = Description of artificial sequence: synthetic polynucleotide sequence
  source 1..121: mol_type = other DNA
gccaataatttggttctgttcctaaaaaataaatgaatagatttggttgacgcactctcgtttcagttctcttgtctcaaataaaatctttaactagttattgcatacgtttactatcttt

SEQ ID NO: 6331 - DNA, 121 bp, synthetic construct
  misc_feature 1..121: note = Description of artificial sequence: synthetic polynucleotide sequence
  source 1..121: mol_type = other DNA
tgctatacagcaaaacaaaatttgcacattgtgtgtaaagttgaagtatattctttctgtttattctgctcattcccttatgtagtttttattgtaaattgattagcttgtcctgggtatg

SEQ ID NO: 6332 - DNA, 121 bp, synthetic construct
  misc_feature 1..121: note = Description of artificial sequence: synthetic polynucleotide sequence
  source 1..121: mol_type = other DNA
gcagtgagcccttctggcagcaggtttttaatttggttgtacagttcaggatccagtccagtagatggtgattaagagtaacatctgtcttgccctcaagtaggttgatgatgagtggaag

SEQ ID NO: 6333 - DNA, 121 bp, synthetic construct
  misc_feature 1..121: note = Description of artificial sequence: synthetic polynucleotide sequence
  source 1..121: mol_type = other DNA
ttatagctctgcctttaaaccttaaagtcagctttaacgtgtttctaaaagttatattccggtattgctgagatattcctatcacaaagctatttccaaagccatgtttgtggtctaagca

SEQ ID NO: 6334 - DNA, 121 bp, synthetic construct
  misc_feature 1..121: note = Description of artificial sequence: synthetic polynucleotide sequence
  source 1..121: mol_type = other DNA
tcatattagagcccacctgctaaagcttagagtggaagcttagctagttttagacactcttatgccacatcccgtgttctgcattccatgattgtggcttgagtccttttaattgcaacat

SEQ ID NO: 6335 - DNA, 121 bp, synthetic construct
  misc_feature 1..121: note = Description of artificial sequence: synthetic polynucleotide sequence
  source 1..121: mol_type = other DNA
gaaatcttcaaattgctttccacggtggccgaactaacttaaattctcaccagtataaaggcattcatttttctccacagccttaccaacagctgttattttttgactttttaataataac

SEQ ID NO: 6336 - DNA, 121 bp, synthetic construct
  misc_feature 1..121: note = Description of artificial sequence: synthetic polynucleotide sequence
  source 1..121: mol_type = other DNA
tttaaaaccacagtgaaatatcatctcacacctgtcagaatggctattattaacaagacgaatgataaccagtgttggtgagaatgtagagaaatgggaacccttgtacacagttggtaga

SEQ ID NO: 6337 - DNA, 121 bp, synthetic construct
  misc_feature 1..121: note = Description of artificial sequence: synthetic polynucleotide sequence
  source 1..121: mol_type = other DNA
ttactcatctaaatcagttatcatatctttggaggaattgcagacatctttggacaacaaaagaacattcctgggttagctcatatcacaacctctggttctgttcattgtaaagcaaata

SEQ ID NO: 6338 - DNA, 121 bp, synthetic construct
  misc_feature 1..121: note = Description of artificial sequence: synthetic polynucleotide sequence
  source 1..121: mol_type = other DNA
caaaatgtggttatacacaataagcacgtaatacatatttttatgaacatattgaattttggatgatattatgcatcttttcttctgcaataacccatgtgatagtaaatctaaagggaaa

SEQ ID NO: 6339 - DNA, 121 bp, synthetic construct
  misc_feature 1..121: note = Description of artificial sequence: synthetic polynucleotide sequence
  source 1..121: mol_type = other DNA
aataattaagtttatcaatatttctatttttgtaaaggaaattactccaggacccatttatatgactatttaggctaaaattgtattttccatttttttaaacaaatatttggtaccagaa

SEQ ID NO: 6340 - DNA, 121 bp, synthetic construct
  misc_feature 1..121: note = Description of artificial sequence: synthetic polynucleotide sequence
  source 1..121: mol_type = other DNA
tttctctttccctaacacattattccaaaagcagaatattttttctcaagaatggactacatttttaacatagatacagtttatataggataaaaactataggtcttggaacccagagagt

SEQ ID NO: 6341 - DNA, 121 bp, synthetic construct
  misc_feature 1..121: note = Description of artificial sequence: synthetic polynucleotide sequence
  source 1..121: mol_type = other DNA
ctaggcaacaaagtgacacccagtctttacaaaaaacaaacaaaaaattagccgagtgccgtactgtgcccttgtagtcctagctactatggaggctgagaagggagggttgctttagccc

SEQ ID NO: 6342 - DNA, 121 bp, synthetic construct
  misc_feature 1..121: note = Description of artificial sequence: synthetic polynucleotide sequence
  source 1..121: mol_type = other DNA
gaatgatggtcatgggttaaaggaaagagagggaagcaaatgtttacagagaatctgccattatcagctgtgtgctgggtcagtaaattcattcaacatttcaatgaactattactagtct

SEQ ID NO: 6343 - DNA, 121 bp, synthetic construct
  misc_feature 1..121: note = Description of artificial sequence: synthetic polynucleotide sequence
  source 1..121: mol_type = other DNA
atttctcatgtcaaaataagataggtttttctgagatttcctcaggcaatacgtatctggaggtctgcttttcaataaagttctggtaccttctaagtttctagtatgtcttaattttcat

SEQ ID NO: 6344 - DNA, 121 bp, synthetic construct
  misc_feature 1..121: note = Description of artificial sequence: synthetic polynucleotide sequence
  source 1..121: mol_type = other DNA
gtgatgggactgttcttcaggcagaaaaatgaccaaagttgtcttatctttcagcttggttgctggaatcctgtcacaggtctgaatgggtcactgactgacaagaaattggagaataaca

SEQ ID NO: 6345 - DNA, 121 bp, synthetic construct
  misc_feature 1..121: note = Description of artificial sequence: synthetic polynucleotide sequence
  source 1..121: mol_type = other DNA
gatgttgactgaattcatttaatctaaagacttagatctcttctcctctatgaagtttctttctgtctatcatttctctttattccctctgttctctgcctctgaaacttctacccagcat

SEQ ID NO: 6346 - DNA, 121 bp, synthetic construct
  misc_feature 1..121: note = Description of artificial sequence: synthetic polynucleotide sequence
  source 1..121: mol_type = other DNA
gtaagcgagaattcaaactcacatctctctaactcagaaatccatgtgctttcctcctcaatgggctatttcagaatcaaggcgagatggaggtaaatggtccttctatattcctcactga

SEQ ID NO: 6347 - DNA, 121 bp, synthetic construct
  misc_feature 1..121: note = Description of artificial sequence: synthetic polynucleotide sequence
  source 1..121: mol_type = other DNA
acaatcgtgtgcctataaatacttcagactcagttggtagaggaaagaaaagcggcccagctggagagagttgacttgactttagagagatggctggacttcggaggagagatgacttgac

SEQ ID NO: 6348 - DNA, 121 bp, synthetic construct
  misc_feature 1..121: note = Description of artificial sequence: synthetic polynucleotide sequence
  source 1..121: mol_type = other DNA
ttacttatctcattcttaaatggcttagaaatgttgatcagaaatttctcagtcattccagtgattttacagcctttttcttcaggatggtgatcagagtacttaacctaccttcctctta

SEQ ID NO: 6349 - DNA, 121 bp, synthetic construct
  misc_feature 1..121: note = Description of artificial sequence: synthetic polynucleotide sequence
  source 1..121: mol_type = other DNA
tcatagggctcaattctattagttgaagaatttaacgttactctgggtttcaggtattatttatgctagatggttttgtatgtagggcacacagtttaaaagggtgcaccctgtaatatta

SEQ ID NO: 6350 - DNA, 121 bp, synthetic construct
  misc_feature 1..121: note = Description of artificial sequence: synthetic polynucleotide sequence
  source 1..121: mol_type = other DNA
actcattttgaatcactttgcacaatatcttttctaatggaatatccaatagtgtataaacttaagctgttagaaatacgcctaccataaaatgtaacttgattatttgtgtcatgccatc

SEQ ID NO: 6351 - DNA, 121 bp, synthetic construct
  misc_feature 1..121: note = Description of artificial sequence: synthetic polynucleotide sequence
  source 1..121: mol_type = other DNA
tcttaatgaagattaattgtcacattgttattaataggatgatgggacagtcaaggcctagaagaccaggtatgtcatagagagagagaatgaaatattcttgagacaaaaactcccatgg

SEQ ID NO: 6352 - DNA, 121 bp, synthetic construct
  misc_feature 1..121: note = Description of artificial sequence: synthetic polynucleotide sequence
  source 1..121: mol_type = other DNA
cttgtattgtcatccgaggcacgcatattccctaaacatccctggattgaatgaagatgacttagcaaagggagggattctctcaacccgggagactgtgcacataactagaaagggaggg

SEQ ID NO: 6353 - DNA, 121 bp, synthetic construct
  misc_feature 1..121: note = Description of artificial sequence: synthetic polynucleotide sequence
  source 1..121: mol_type = other DNA
tggcctaaaatcacaggaaggggggtcaccaggttgccactaaccacgtggtcatctgtgtgacagattcctacagccaccatctacagaataaagagaagctgttcagattcagaaaaga

SEQ ID NO: 6354 - DNA, 121 bp, synthetic construct
  misc_feature 1..121: note = Description of artificial sequence: synthetic polynucleotide sequence
  source 1..121: mol_type = other DNA
ggttttagggcccattctcttttgtggcctttatatttagtgtagagatcagtctcctaagttctactggaaatttctggtcagagatgttcttgaatttcatttaaatcttcaactgtac

SEQ ID NO: 6355 - DNA, 121 bp, synthetic construct
  misc_feature 1..121: note = Description of artificial sequence: synthetic polynucleotide sequence
  source 1..121: mol_type = other DNA
atgtaatttaagccatgttttttcatcaggatggaaaaaaacaaaacaaagaacactttaacaacattcaacctaggacatttcatccatgtaatctataccatgctggtgttttcccctc

SEQ ID NO: 6356 - DNA, 121 bp, synthetic construct
  misc_feature 1..121: note = Description of artificial sequence: synthetic polynucleotide sequence
  source 1..121: mol_type = other DNA
gtatatctttgccatataattccttcacaattctagggaaatatgatttccaacctgggttctaacaactgtaaatcaagtctgaaggtaaagagttcagctatgccaaatctcaaactta

SEQ ID NO: 6357 - DNA, 121 bp, synthetic construct
  misc_feature 1..121: note = Description of artificial sequence: synthetic polynucleotide sequence
  source 1..121: mol_type = other DNA
gacacaaggcccaattgctgaagatttcactgggtgatgatctaccttgcaggtataatgtttcaagcatttgaaagagaatcaagttggctaattaatattaaattgtattgatattgat

SEQ ID NO: 6358 - DNA, 349 bp, synthetic construct
  misc_feature 1..349: note = Description of artificial sequence: synthetic polynucleotide sequence
  source 1..349: mol_type = other DNA
gatggaacaggatagaaccaaccatgttgagggcaacagactaagtccattcctgataccatcacctcccatttgccagacagaacctctggctacaaagctccagaatggaagcccactgcctgagagagctcatccagaagtaaatggagacaccaagtggcactctttcaaaagttattatggaataccctgtatgaagggaagccagaatagtcgtgtgagtcctgactttacacaagaaagtagagggtattccaagtgtttgcaaaatggaggaataaaacgcacagttagtgaaccttctctctctgggctccttcagatcaagaaattgaaacaagaccaa

SEQ ID NO: 6359 - DNA, 466 bp, synthetic construct
  misc_feature 1..466: note = Description of artificial sequence: synthetic polynucleotide sequence
  source 1..466: mol_type = other DNA
aaggctaatggagaaagacgtaacttcggggtaagccaagaaagaaatccaggtgaaagcagtcaaccaaatgtctccgatttgagtgataagaaagaatctgtgagttctgtagcccaagaaaatgcagttaaagatttcaccagtttttcaacacataactgcagtgggcctgaaaatccagagcttcagattctgaatgagcaggaggggaaaagtgctaattaccatgacaagaacattgtattacttaaaaacaaggcagtgctaatgcctaatggtgctacagtttctgcctcttccgtggaacacacacatggtgaactcctggaaaaaacactgtctcaatattatccagattgtgtttccattgcggtgcagaaaaccacatctcacataaatgccattaacagtcaggctactaatgagttgtcctgtgagatcactcacccatcgcatacctcag

SEQ ID NO: 6360 - DNA, 466 bp, synthetic construct
  misc_feature 1..466: note = Description of artificial sequence: synthetic polynucleotide sequence
  source 1..466: mol_type = other DNA
ggcagatcaattccgcacagacctctaactctgagctgcctccaaagccagctgcagtggtgagtgaggcctgtgatgctgatgatgctgataatgccagtaaactagctgcaatgctaaatacctgttcctttcagaaaccagaacaactacaacaacaaaaatcagtttttgagatatgcccatctcctgcagaaaataacatccagggaaccacaaagctagcgtctggtgaagaattctgttcaggttccagcagcaatttgcaagctcctggtggcagctctgaacggtatttaaaacaaaatgaaatgaatggtgcttacttcaagcaaagctcagtgttcactaaggattccttttctgccactaccacaccaccaccaccatcacaattgcttctttctccccctcctcctcttccacaggttcctcagcttccttcagaaggaaaaagcactctgaa

SEQ ID NO: 6361 - DNA, 466 bp, synthetic construct
  misc_feature 1..466: note = Description of artificial sequence: synthetic polynucleotide sequence
  source 1..466: mol_type = other DNA
tggtggagttttagaagaacaccaccactaccccaaccaaagtaacacaacacttttaagggaagtgaaaatagagggtaaacctgaggcaccaccttcccagagtcctaatccatctacacatgtatgcagcccttctccgatgctttctgaaaggcctcagaataattgtgtgaacaggaatgacatacagactgcagggacaatgactgttccattgtgttctgagaaaacaagaccaatgtcagaacacctcaagcataacccaccaatttttggtagcagtggagagctacaggacaactgccagcagttgatgagaaacaaagagcaagagattctgaagggtcgagacaaggagcaaacacgagatcttgtgcccccaacacagcactatctgaaaccaggatggattgaattgaaggcccctcgttttcaccaagcggaatcccatctaaaacgtaat

SEQ ID NO: 6362 - DNA, 466 bp, synthetic construct
  misc_feature 1..466: note = Description of artificial sequence: synthetic polynucleotide sequence
  source 1..466: mol_type = other DNA
gaggcatcactgccatcaattcttcagtatcaacccaatctctccaatcaaatgacctccaaacaatacactggaaattccaacatgcctggggggctcccaaggcaagcttacacccagaaaacaacacagctggagcacaagtcacaaatgtaccaagttgaaatgaatcaagggcagtcccaaggtacagtggaccaacatctccagttccaaaaaccctcacaccaggtgcacttctccaaaacagaccatttaccaaaagctcatgtgcagtcactgtgtggcactagatttcattttcaacaaagagcagattcccaaactgaaaaacttatgtccccagtgttgaaacagcacttgaatcaacaggcttcagagactgagccattttcaaactcacaccttttgcaacataagcctcataaacaggcagcacaaacacaaccatcccagagttcacatc

SEQ ID NO: 6363 - DNA, 466 bp, synthetic construct
  misc_feature 1..466: note = Description of artificial sequence: synthetic polynucleotide sequence
  source 1..466: mol_type = other DNA
tccctcaaaaccagcaacagcagcaaaaattacaaataaagaataaagaggaaatactccagacttttcctcacccccaaagcaacaatgatcagcaaagagaaggatcattctttggccagactaaagtggaagaatgttttcatggtgaaaatcagtattcaaaatcaagcgagttcgagactcataatgtccaaatgggactggaggaagtacagaatataaatcgtagaaattccccttatagtcagaccatgaaatcaagtgcatgcaaaatacaggtttcttgttcaaacaatacacacctagtttcagagaataaagaacagactacacatcctgaactttttgcaggaaacaagacccaaaacttgcatcacatgcaatattttccaaataatgtgatcccaaagcaagatcttcttcacaggtgctttcaagaacaggagcagaagtcacaacaagc

SEQ ID NO: 6364 - DNA, 466 bp, synthetic construct
  misc_feature 1..466: note = Description of artificial sequence: synthetic polynucleotide sequence
  source 1..466: mol_type = other DNA
ttcagttctacagggatataaaaatagaaaccaagatatgtctggtcaacaagctgcgcaacttgctcagcaaaggtacttgatacataaccatgcaaatgtttttcctgtgcctgaccagggaggaagtcacactcagacccctccccagaaggacactcaaaagcatgctgctctaaggtggcatctcttacagaagcaagaacagcagcaaacacagcaaccccaaactgagtcttgccatagtcagatgcacaggccaattaaggtggaacctggatgcaagccacatgcctgtatgcacacagcaccaccagaaaacaaaacatggaaaaaggtaactaagcaagagaatccacctgcaagctgtgataatgtgcagcaaaagagcatcattgagaccatggagcagcatctgaagcagtttcacgccaagtcgttatttgaccataaggctcttactctc

SEQ ID NO: 6365 - DNA, 354 bp, synthetic construct
  misc_feature 1..354: note = Description of artificial sequence: synthetic polynucleotide sequence
  source 1..354: mol_type = other DNA
aaatcacagaagcaagtaaaagttgaaatgtcagggccagtcacagttttgactagacaaaccactgctgcagaacttgatagccacaccccagctttagagcagcaaacaacttcttcagaaaagacaccaaccaaaagaacagctgcttctgttctcaataattttatagagtcaccttccaaattactagatactcctataaaaaatttattggatacacctgtcaagactcaatatgatttcccatcttgcagatgtgtaggtaagtgccagaaatgtactgagacacatggcgtttatccagaattagcaaatttatcttcagatatgggattttccttctttttttaa

SEQ ID NO: 6366 - DNA, 121 bp, synthetic construct
  misc_feature 1..121: note = Description of artificial sequence: synthetic polynucleotide sequence
  source 1..121: mol_type = other DNA
ctattatctcaacagagcaaattattgaaaaagatgaaggtcctttttatacccatctaggagcaggtcctaatgtggcagctattagagaaatcatggaagaaaggtaattaacgcaaag

SEQ ID NO: 6367 - DNA, 121 bp, synthetic construct
  misc_feature 1..121: note = Description of artificial sequence: synthetic polynucleotide sequence
  source 1..121: mol_type = other DNA
tgggtttctttaaggtttggacagaagggtaaagctattaggattgaaagagtcatctatactggtaaagaaggcaaaagttctcagggatgtcctattgctaagtgggtaagtgtgactt

SEQ ID NO: 6368 - DNA, 210 bp, synthetic construct
  misc_feature 1..210: note = Description of artificial sequence: synthetic polynucleotide sequence
  source 1..210: mol_type = other DNA
ggtggttcgcagaagcagcagtgaagagaagctactgtgtttggtgcgggagcgagctggccacacctgtgaggctgcagtgattgtgattctcatcctggtgtgggaaggaatcccgctgtctctggctgacaaactctactcggagcttaccgagacgctgaggaaatacggcacgctcaccaatcgccggtgtgccttgaatgaaga

SEQ ID NO: 6369 - DNA, 152 bp, synthetic construct
  misc_feature 1..152: note = Description of artificial sequence: synthetic polynucleotide sequence
  source 1..152: mol_type = other DNA
ggagaacttgcgcctgtcaggggctggatccagaaacctgtggtgcctccttctcttttggttgttcatggagcatgtactacaatggatgtaagtttgccagaagcaagatcccaaggaagtttaagctgcttggggatgacccaaaagag

SEQ ID NO: 6370 - DNA, 121 bp, synthetic construct
  misc_feature 1..121: note = Description of artificial sequence: synthetic polynucleotide sequence
  source 1..121: mol_type = other DNA
tattcactttatacaggaagagaaactggagtctcatttgcaaaacctgtccactcttatggcaccaacatataagaaacttgcacctgatgcatataataatcaggtaagtttaaataat

SEQ ID NO: 6371 - DNA, 139 bp, synthetic construct
  misc_feature 1..139: note = Description of artificial sequence: synthetic polynucleotide sequence
  source 1..139: mol_type = other DNA
gattgaatatgaacacagagcaccagagtgccgtctgggtctgaaggaaggccgtccattctcaggggtcactgcatgtttggacttctgtgctcatgcccacagagacttgcacaacatgcagaatggcagcacattg

SEQ ID NO: 6372 - DNA, 356 bp, synthetic construct
  misc_feature 1..356: note = Description of artificial sequence: synthetic polynucleotide sequence
  source 1..356: mol_type = other DNA
ggtatgcactctcactagagaagacaatcgagaatttggaggaaaacctgaggatgagcagcttcacgttctgcctttatacaaagtctctgacgtggatgagtttgggagtgtggaagctcaggaggagaaaaaacggagtggtgccattcaggtactgagttcttttcggcgaaaagtcaggatgttagcagagccagtcaagacttgccgacaaaggaaactagaagccaagaaagctgcagctgaaaagctttcctccctggagaacagctcaaataaaaatgaaaaggaaaagtcagccccatcacgtacaaaacaaactgaaaacgcaagccaggctaaacagttggcag

SEQ ID NO: 6373 - DNA, 225 bp, synthetic construct
  misc_feature 1..225: note = Description of artificial sequence: synthetic polynucleotide sequence
  source 1..225: mol_type = other DNA
gaacttttgcgactttcaggaccagtcatgcagcagtcccagcagccccagcctctacagaagcagccaccacagccccagcagcagcagagaccccagcagcagcagccacatcaccctcagacagagtctgtcaactcttattctgcttctggatccaccaatccatacatgagacggcccaatccagttagtccttatccaaactcttcacacacttcagat

SEQ ID NO: 6374 - DNA, 450 bp, synthetic construct
  misc_feature 1..450: note = Description of artificial sequence: synthetic polynucleotide sequence
  source 1..450: mol_type = other DNA
atctatggaagcaccagccctatgaacttctattccacctcatctcaagctgcaggttcatatttgaattcttctaatcccatgaacccttaccctgggcttttgaatcagaatacccaatatccatcatatcaatgcaatggaaacctatcagtggacaactgctccccatatctgggttcctattctccccagtctcagccgatggatctgtataggtatccaagccaagaccctctgtctaagctcagtctaccacccatccatacactttaccagccaaggtttggaaatagccagagttttacatctaaatacttaggttatggaaaccaaaatatgcagggagatggtttcagcagttgtaccattagaccaaatgtacatcatgtagggaaattgcctccttatcccactcatgagatggatggccacttcatgggagccacc

SEQ ID NO: 6375 - DNA, 451 bp, synthetic construct
  misc_feature 1..451: note = Description of artificial sequence: synthetic polynucleotide sequence
  source 1..451: mol_type = other DNA
tctagattaccacccaatctgagcaatccaaacatggactataaaaatggtgaacatcattcaccttctcacataatccataactacagtgcagctccgggcatgttcaacagctctcttcatgccctgcatctccaaaacaaggagaatgacatgctttcccacacagctaatgggttatcaaagatgcttccagctcttaaccatgatagaactgcttgtgtccaaggaggcttacacaaattaagtgatgctaatggtcaggaaaagcagccattggcactagtccagggtgtggcttctggtgcagaggacaacgatgaggtctggtcagacagcgagcagagctttctggatcctgacattgggggagtggccgtggctccaactcatgggtcaattctcattgagtgtgcaaagcgtgagctgcatgccacaacccctttaaaga

SEQ ID NO: 6376 - DNA, 347 bp, synthetic construct
  misc_feature 1..347: note = Description of artificial sequence: synthetic polynucleotide sequence
  source 1..347: mol_type = other DNA
atcccaataggaatcaccccaccaggatctccctcgtcttttaccagcataagagcatgaatgagccaaaacatggcttggctctttgggaagccaaaatggctgaaaaagcccgtgagaaagaggaagagtgtgaaaagtatggcccagactatgtgcctcagaaatcccatggcaaaaaagtgaaacgggagcctgctgagccacatgaaacttcagagcccacttacctgcgtttcatcaagtctcttgccgaaaggaccatgtccgtgaccacagactccacagtaactacatctccatatgccttcactcgggtcacagggccttacaacagatatatatga

SEQ ID NO: 6377 - DNA, 121 bp, synthetic construct
  misc_feature 1..121: note = Description of artificial sequence: synthetic polynucleotide sequence
  source 1..121: mol_type = other DNA
ctagtgtacagtgtagatattatccctgtcttggaaacaaagatactgggattcacaacggttaaataatttttgcctgagatcacagaactagtgaatggaagacctgggattcataccc

SEQ ID NO: 6378 - DNA, 121 bp, synthetic construct
  misc_feature 1..121: note = Description of artificial sequence: synthetic polynucleotide sequence
  source 1..121: mol_type = other DNA
catgatgggattgcagatagagaaatggagaaagccactgctaggctgtccaaagaagcgtttgagggcagtaatccagatcatcagacaagctgagctgtggcctaggcccttgtggcca

SEQ ID NO: 6379 - DNA, 121 bp, synthetic construct
  misc_feature 1..121: note = Description of artificial sequence: synthetic polynucleotide sequence
  source 1..121: mol_type = other DNA
tgcatctacttggtgtacagacagtctcatggcactgtctcctgaaagggcatgtgaattgctgcatcctagggaagtttatggagatggcaaggaaaacaatttatctactgtttcctag

SEQ ID NO: 6380 - DNA, 121 bp, synthetic construct
  misc_feature 1..121: note = Description of artificial sequence: synthetic polynucleotide sequence
  source 1..121: mol_type = other DNA
ggtcagagccagagcattcgaatctcacctgaggtctgctgcattccttcctcggttctatgaaatatggtagctttcctctaacaaccccgctttggggttgggtagctcaggcagagat

SEQ ID NO: 6381 - DNA, 121 bp, synthetic construct
  misc_feature 1..121: note = Description of artificial sequence: synthetic polynucleotide sequence
  source 1..121: mol_type = other DNA
agacttctgaacaacagtgaaaacagcaaactcactgggtaattattagagatgtgaccggagaaaattagtgttctgatgtccagatcaaaaagaaattgctgtcaaagagggaatgtga

SEQ ID NO: 6382 - DNA, 121 bp, synthetic construct
  misc_feature 1..121: note = Description of artificial sequence: synthetic polynucleotide sequence
  source 1..121: mol_type = other DNA
aatatagatatctcagaatactaggctcttgaaattatggctgcaacctttcacaaactcaagtcacaaatgcctatttcctctctgttccaaataaactccaaacaatatcactcctagg

SEQ ID NO: 6383 - DNA, 121 bp, synthetic construct
  misc_feature 1..121: note = Description of artificial sequence: synthetic polynucleotide sequence
  source 1..121: mol_type = other DNA
ggttaagagggcatcttttaagaatactcttgtttttatcacattggaaaatgaaagtagtgttctggctttccctgactaagtcaaacttttatatccacaggtcccatgtacactagca

SEQ ID NO: 6384 - DNA, 121 bp, synthetic construct
  misc_feature 1..121: note = Description of artificial sequence: synthetic polynucleotide sequence
  source 1..121: mol_type = other DNA
gcaacaaagtatgttgtctattgtctggaaagccaaacacgtaaaacaaattagctttaagggccacaataatgaagctgaggtcagttgtctgtactagaatagcaaaagtataaccccc

SEQ ID NO: 6385 - DNA, 121 bp, synthetic construct
  misc_feature 1..121: note = Description of artificial sequence: synthetic polynucleotide sequence
  source 1..121: mol_type = other DNA
agaatccagttggttctcaaacacccagaagagtgcctaggcatggagctgggaaacttcctttgctccaaattctctgtatgggaatggccgatggactaagtttctatttcaggagagt

SEQ ID NO: 6386 - DNA, 121 bp, synthetic construct
  misc_feature 1..121: note = Description of artificial sequence: synthetic polynucleotide sequence
  source 1..121: mol_type = other DNA
aaatttccactgaggaatgaatggataaacaacatgtggtatatacacacgagggattactattcagccttaaaaaggaaggaaatcctattgcacactacagcacagaagaatcttaaaa

SEQ ID NO: 6387 - DNA, 121 bp, synthetic construct
  misc_feature 1..121: note = Description of artificial sequence: synthetic polynucleotide sequence
  source 1..121: mol_type = other DNA
ctggaagccactgtgaatctatccaaggaatcttctaactctcccctctgaaatcattattcccgattagaagctgctggcttggagagagaagcaaggactctttttatcactttatact

SEQ ID NO: 6388 - DNA, 121 bp, synthetic construct
  misc_feature 1..121: note = Description of artificial sequence: synthetic polynucleotide sequence
  source 1..121: mol_type = other DNA
tttcatttataatctaagattcttcgttagtagtaacaaattactgtgcctcataatggtctatacttggagcatgctggaaaaagagtacagatgttaattttttatcacagacattctg

SEQ ID NO: 6389 - DNA, 354 bp, synthetic construct
  misc_feature 1..354: note = Description of artificial sequence: synthetic polynucleotide sequence
  source 1..354: mol_type = other DNA
tttataatggtgtttcctttttatagttgaagctagggtcagaaccttcaatctgaagcttcagagcttgtttaaggcttaattctgtctctgaggaagggtatccctccaacacttcctgatgccctctatcttgcattgttcgtgggactgaaaccctaccaagaaaaacctggttgctctgaagatgataatttggatttgtcattattccatttctcttcttctgttccccactttgttggtgaataagaaactgctgttgagatcgaccaatttcctgctgagctgaaggtatcataattttgcattgagattctgctggcatttgtttaggtggtgcagcagtcccgg

SEQ ID NO: 6390 - DNA, 474 bp, synthetic construct
  misc_feature 1..474: note = Description of artificial sequence: synthetic polynucleotide sequence
  source 1..474: mol_type = other DNA
atttggctataggtcctcttctatcaaactgagtcatttcatattctaaaacctttggctgtgaagaattactttgtttcgcttttttcccagctgatccagacttggcagaattttctgatttcccccctttacttgctttagttgacttcaaactgggctttacttgactccactcaaattcactacttggtgaattatgactctgtcctaaggactgtgttgtggaagatggggaaacaattgactgtcgacttctactgcgtggcaatgaatgctgctgaatttgttctgtaaatgacaagttatgaaagctatcaattggcactgtttgagccgttgctgtagatgaagtagttctcaaagatgaattttttgagcttttcagggaattatttgacagtgatgacttctgccggtcaactgtagaatctggagattctgaaggagaactaaaagcatgagtaggcccat

SEQ ID NO: 6391 - DNA, 472 bp, synthetic construct
  misc_feature 1..472: note = Description of artificial sequence: synthetic polynucleotide sequence
  source 1..472: mol_type = other DNA
taggtaaaccacgtaacgaaggctgcatatcccctccaccagtactaccagagctatttgatttaattgttaatgactgcacttttgaagacaatgactgtagaggtttttgctccattgtgtgaacaggagatggggaacagccattcaaactagatgcaccatatttttctaataatttaattatctgagaatgtccatttttggctgcaacacgcatagcagtgcgtccaaattgatcagcatggtttggatcagcaccatgctctaataagacctgaacaacatcaatgtgcccttcctgggctgcaatacagagtgcagttgcaccttggttacatgtatggtcaactacagcaccatgctcaatcagaagctgaaccacttttacatggccctgccaggctgcagactgcaaagcagagcgcttttcattgtctgcagcattgacgtcagcatggtatgctatcag

SEQ ID NO: 6392 - DNA, 473 bp, synthetic construct
  misc_feature 1..473: note = Description of artificial sequence: synthetic polynucleotide sequence
  source 1..473: mol_type = other DNA
gacctgcaccatttccatatggccttgccaacaagacacatgaagtgctgtccttccttcagcatcacttgcttctacgtttgcaccattttctaaaaaatattcggccattgtaagctgattttctaaggccaagatataaagtgtaggccgaccatcagcatctttgcagttaacatcagcaccatggctaaaaagcaattcaacaatgtccctgtgcccttctaatgcagcaacccgcagtgcatttcttccatcataacctctttgatcaatgttggatttgttttccagtaatatttgaacacaatcataatgaccctcttgtgaagctaatatgaaagggattcgtccatcattgtcaatctcatttgttctagcaccttgttcaataagtgcttcacatatcaatctgtgcccttcaaaagctgccatgtgcaaaggtgtccatccagcatcatctctgtgatttt

SEQ ID NO: 6393 - DNA, 473 bp, synthetic construct
  misc_feature 1..473: note = Description of artificial sequence: synthetic polynucleotide sequence
  source 1..473: mol_type = other DNA
catctaaccctctatccagtagagtacgtaccacctcaacatttccttgtgctgaagctatactgaggactgtcctaccttcactatcaatactatccacagctgcaccccaaaacaaaagtgtatttacaactgatgcatgacccatagacgctgctgctaagaggggtgtacggccattgttatctgtgtgatctacatctgctcccccttctagaagcaagtcaaccacatcaacatgtccttcataggcagctaccagcagtggagtcatgccatctttatcacaatgatctacttcagcacctcgatcaattaaaaggctaacaactgatgcgtgccctttacttgcaggcacacaaagtgcagctacagagagtgcagtcctgccatcaacatcctcatgatttacttctgctccatggtccagtaggtgttccacaatctctctatgtcccatgtatgctgctgct

SEQ ID NO: 6394 - DNA, 472 bp, synthetic construct
  misc_feature 1..472: note = Description of artificial sequence: synthetic polynucleotide sequence
  source 1..472: mol_type = other DNA
atcaaagcagttctaccttcattatcagctttgttcacttcagcgccatgttgtagcaaattcagtacaatatcctcgtgtcctccccatgctgctgctctcaaagctgttcggctatcagcatctgcacaatccacttttacgccagcataaagtagtgcagaaactacctcagtatggccaccccaagcagcagatcttaatgctgtccaaccatcttgatcagtatgattaatatttgctccacacccaatcaaacaattaaccaccttggtatgtccctgtctagccgctagagtgagtggtgtatgtccatgagcatcttctatctctaaatctgctcccctagagacaagtaaattgactacatcaagactgccactatatgcagcattagccaataatgttctcccatttgaatcacactgatttactgaagctccattatctaataatgtccgaatggaatcct

SEQ ID NO: 6395 - DNA, 474 bp, synthetic construct
  misc_feature 1..474: note = Description of artificial sequence: synthetic polynucleotide sequence
  source 1..474: mol_type = other DNA
ctctttctaaggcttgtcgaactatgcatgatgtgcgatcgtcttcactgttgacatgagccccagctttaaccaacagctgtagcacttcttgttccttgggtatcaaagtagaaagggaatctctgacaggtgtaccattccatatcatccacagagctaactccgctgtctctaattgtaagtttgagttaattaagtgcaatgcaaattcttgtgcttccaatggtgttaaattcttggcttgacaggtataactcatagccaacattctgtgtccttctgctgcattacataaatacttctgagtacagtgtttcacatccagaagccactcggcaaaactataatgaaacagtatttttgtatttcctagtccatcaacaagaagtttggagaggatatctaacttgcgttgaaaatcttccaaagttaacgacatgtttttggtccatactgcgtgatataattccg

SEQ ID NO: 6396 - DNA, 357 bp, synthetic construct
  misc_feature 1..357: note = Description of artificial sequence: synthetic polynucleotide sequence
  source 1..357: mol_type = other DNA
ttatggtcaaaggtcggcaggctgcaagaatcacattcaaaataggctgaacctttgcaaattgttttcttacaaaaagtctttggcacagccagagatataaaccatttagagttcctgggatgtcacgaatttctcttaacataataaaattttctacaactccatctaaaactcgttctaggtaaagaaagcatccactgcttttaatgtgcagttgatttaacatctctgcagtttcttttgtgaggtgttgtcgcaaagcttcttcttgatctaaacgatgaagaatgtactgctgaacatccttgacgatatatgccttccgaaggtcatctaaacttatttttcgaaaac

SEQ ID NO: 6397 - DNA, 231 bp, synthetic construct
  misc_feature 1..231: note = Description of artificial sequence: synthetic polynucleotide sequence
  source 1..231: mol_type = other DNA
ccagtaaacattttagtaacagccttactctgctttcgggcagaacagagaagcaatagccatggtggaaagaactcatggtgaccagctaaaagtgctgcaacagtcccagataagctggtagacgtttgttcaccttcagtaatgttacacccttcatcaacagaatcaacaagcaggtataggctttgctggggaggcttcattcccagaagagggagtagaacacac

SEQ ID NO: 6398 - DNA, 196 bp, synthetic construct
  misc_feature 1..196: note = Description of artificial sequence: synthetic polynucleotide sequence
  source 1..196: mol_type = other DNA
ccttttaaatgcttcggctgggtttctctcgcactccccaggctgtaagaggctttggactgctggatcccttagcttgtcctcatatccttggagtagtccactgcggcagatctgggctactagacctctaataaaccctccaacacacaaagtatcagagtcctgggctttgcagaaatgaaaggccaaagct

SEQ ID NO: 6399 - DNA, 317 bp, synthetic construct
  misc_feature 1..317: note = Description of artificial sequence: synthetic polynucleotide sequence
  source 1..317: mol_type = other DNA
tggcgatgtaaacctctctgcaaacttgcaggtgaacttggccataagagttcagtacatagggccgtcttgccactgccaggccctcctaccaacaacacaccccaggcagctccctttccagagacaccactagcattattcccagaattcattacaagtgatggtgcattgacagcactattgcagcagttacttttctcctggaggcaatgctgaagcttgtggaaaacccactccctacagtaaaactgcttcccttgcagtaaactggtttgagccattttgcagactttctcttcccaaggattagtcat

SEQ ID NO: 6400 - DNA, 121 bp, synthetic construct
  misc_feature 1..121: note = Description of artificial sequence: synthetic polynucleotide sequence
  source 1..121: mol_type = other DNA
gtttaaagtatagtaggccactccatggtagtgacaatcaatgtcaactcagtttaagaacatacaatcttctcttagcctgacctcattaaacctgatactaatgagagactaaagtcca

SEQ ID NO: 6401 - DNA, 121 bp, synthetic construct
  misc_feature 1..121: note = Description of artificial sequence: synthetic polynucleotide sequence
  source 1..121: mol_type = other DNA
ggtgtaagataaaggtttaattattcttttgcatgtgggtatctagtttctcttacactttttgtgtttctttcccccattgtagagtcttggcactcttgtcaaagatcatttgactgta

SEQ ID NO: 6402 - DNA, 121 bp, synthetic construct
  misc_feature 1..121: note = Description of artificial sequence: synthetic polynucleotide sequence
  source 1..121: mol_type = other DNA
tgagctttttctttctctcttcttaagctagaacatgcatcttcccctacccttggatattggagtttctgattcttgagccttccactaaatcacataagaatatatacctatatttatc

SEQ ID NO: 6403 - DNA, 121 bp, synthetic construct
  misc_feature 1..121: note = Description of artificial sequence: synthetic polynucleotide sequence
  source 1..121: mol_type = other DNA
ctgtgggaggtgggagtaaaagagctgtaaccttctctcccactcgaggaactaccctcctgcttgacaaattacaggagcgaaaaagccacgtatcagaggagacttcagggtatgttta

SEQ ID NO: 6404 - DNA, 121 bp, synthetic construct
  misc_feature 1..121: note = Description of artificial sequence: synthetic polynucleotide sequence
  source 1..121: mol_type = other DNA
cctactttgtgtctcctacaccactcatcaactatgtggctttgaggaagtcacttaaactgaagcatcccttctctcatattaaaactgggttaataacacctacttctcaggaaaaatt

SEQ ID NO: 6405 - DNA, 121 bp, synthetic construct
  misc_feature 1..121: note = Description of artificial sequence: synthetic polynucleotide sequence
  source 1..121: mol_type = other DNA
ggtgtaggagatgtctttactttgcactgtgagagataactcatgatgggttcgctgcaacagttcctttgaaaagtgtcagcaccggggctagaatcagaggacatgtctcacttcacgt

SEQ ID NO: 6406 - DNA, 121 bp, synthetic construct
  misc_feature 1..121: note = Description of artificial sequence: synthetic polynucleotide sequence
  source 1..121: mol_type = other DNA
ctctcaaacatgtgagtgggcctttagacaattccagctcctatctttgagttttctcattgaagttccagacaggcaagtgatccctgctgtgtcctaagttcctttgctacagagtcat

SEQ ID NO: 6407 - DNA, 121 bp, synthetic construct
  misc_feature 1..121: note = Description of artificial sequence: synthetic polynucleotide sequence
  source 1..121: mol_type = other DNA
agaataatataatgccagtaagcatagtttgatattaagttgagacttttaaacagctcacattgtatttgcctttgaggtttatataactgccaacccatgtatctttcagttataagat

SEQ ID NO: 6408 - DNA, 121 bp, synthetic construct
  misc_feature 1..121: note = Description of artificial sequence: synthetic polynucleotide sequence
  source 1..121: mol_type = other DNA
acctcttccatttactgaagctcattcctcacacttgctagtgtcacaaacagatgcccattgggtgcaattaacgtaagaaaagatagcacttttaaggcttgcttactcccagcctcat

SEQ ID NO: 6409 - DNA, 121 bp, synthetic construct
  misc_feature 1..121: note = Description of artificial sequence: synthetic polynucleotide sequence
  source 1..121: mol_type = other DNA
gtgaacccaatatagagatgggaaagtctagtcctgggtctttgctgctccattctgatacatcctaagcccaagttcatgtttctactgaggatagatgggtttggcagcgtgccagaat

SEQ ID NO: 6410 - DNA, 121 bp, synthetic construct
  misc_feature 1..121: note = Description of artificial sequence: synthetic polynucleotide sequence
  source 1..121: mol_type = other DNA
ttccaaggtatacgaactaagttgtcttattgttgagttaggaaacagatatttctggctttccttccctttgaaacatttctccttcagctttcaaggcttatttctgcagagtcacagc

SEQ ID NO: 6411 - DNA, 121 bp, synthetic construct
  misc_feature 1..121: note = Description of artificial sequence: synthetic polynucleotide sequence
  source 1..121: mol_type = other DNA
aaaagagctttgctattttaacatttttaatataatggaatataatttcccactggtttcattttcttttacttatgttattacagtgtttacctgtacataagagaaagggcacttattt

SEQ ID NO: 6412 - DNA, 121 bp, synthetic construct
  misc_feature 1..121: note = Description of artificial sequence: synthetic polynucleotide sequence
  source 1..121: mol_type = other DNA
ataaaaattaagccaatttcacagagttaattagtagtgtaataacaattcttggttcacgatgcaagatcactatttctgacacctagctcaagagctatgtttcattatcacactgtct

SEQ ID NO: 6413 - DNA, 121 bp, synthetic construct
  misc_feature 1..121: note = Description of artificial sequence: synthetic polynucleotide sequence
  source 1..121: mol_type = other DNA
ctggaatttggggaccaaatcagagaaaaagaatggtaaagtgcttagagttgaggatcggcaaagcagtcctggggaaattctgtcagactaatgaccatgattggaatgatggcctatg

SEQ ID NO: 6414 - DNA, 121 bp, synthetic construct
  misc_feature 1..121: note = Description of artificial sequence: synthetic polynucleotide sequence
  source 1..121: mol_type = other DNA
tttgcggatgagcgagtgttgacaaccaggccatttttctccagcttcatggacggtgcgattctgaaagcaaggtttgctcatctgaggattcagaagctgatcgatactccgattatgg

SEQ ID NO: 6415 - DNA, 121 bp, synthetic construct
  misc_feature 1..121: note = Description of artificial sequence: synthetic polynucleotide sequence
  source 1..121: mol_type = other DNA
cagaagcaaagtgtatctaaaccctggtcacttaagaactccagagacagaacttcagtagtaaaagctgttttttataagaagggaatggacagtcggaaacaatatcctttttaggcac

SEQ ID NO: 6416 - DNA, 121 bp, synthetic construct
  misc_feature 1..121: note = Description of artificial sequence: synthetic polynucleotide sequence
  source 1..121: mol_type = other DNA
agtgagaagcagtcgtgatttcatgggatttctccttcaggctcgaagagtgtccgatcatcaaatcgctggcactttcgttctcattcctcctcattccaaactgatgacttgttttcaa

SEQ ID NO: 6417 - DNA, 121 bp, synthetic construct
  misc_feature 1..121: note = Description of artificial sequence: synthetic polynucleotide sequence
  source 1..121: mol_type = other DNA
aaaaaaggggaaaccagccagcaatggaaatagagaaaacaaacctaaaagcaatgattgagaatacctatctaagcactacctgggaaagaagatcgctggtccaaatgatggacatgtc

SEQ ID NO: 6418 - DNA, 121 bp, synthetic construct
  misc_feature 1..121: note = Description of artificial sequence: synthetic polynucleotide sequence
  source 1..121: mol_type = other DNA
tgcaaaatgatatcaatactacattccacattgttttaattattgtctgaaacatcacagtatttaggacattttagatactcagtaagggttagttctctttctgtccatttatgatatg

SEQ ID NO: 6419 - DNA, 121 bp, synthetic construct
  misc_feature 1..121: note = Description of artificial sequence: synthetic polynucleotide sequence
  source 1..121: mol_type = other DNA
tgttaatgctgtttcatattcctcagcagctaagtgtgctaagcccaagtagtaagaggcttccgcttccatctttttgtcacttcctgaagtgaagatgtaaaaaaattaccaagtattc

SEQ ID NO: 6420 - DNA, 121 bp, synthetic construct
  misc_feature 1..121: note = Description of artificial sequence: synthetic polynucleotide sequence
  source 1..121: mol_type = other DNA
taaatccaatctcattgtttttctgccatcttcagttattcacacttggtccagatcaatctcccattagagtcaaggcttttcccttctcctcagacccatgaaggctactagaccttga

SEQ ID NO: 6421 - DNA, 121 bp, synthetic construct
  misc_feature 1..121: note = Description of artificial sequence: synthetic polynucleotide sequence
  source 1..121: mol_type = other DNA
aggttaacataatcttccaaggccatgatgggactgtccatagccttctctccactgtacgcatgaggaagcagccattattaacagccctccttttttgcagcattagacagtaacaggc

SEQ ID NO: 6422 - DNA, 121 bp, synthetic construct
  misc_feature 1..121: note = Description of artificial sequence: synthetic polynucleotide sequence
  source 1..121: mol_type = other DNA
gtggcaaaaacagttttctgcttggttgtaatttttgctctttgctggttccctcttcatttaagccgtatattgaagaaaactgtgtataacgagatggacaagaaccgatgtgaattac

SEQ ID NO: 6423 - DNA, 121 bp, synthetic construct
  misc_feature 1..121: note = Description of artificial sequence: synthetic polynucleotide sequence
  source 1..121: mol_type = other DNA
ctgaactctagctatggtgggctagttgctagaggtttgtgagaagaaacgtgtatattagtgcagaagagttctagtgcaggagacagcaaatttatttaaaaagcaattacattcacat

SEQ ID NO: 6424 - DNA, 121 bp, synthetic construct
  misc_feature 1..121: note = Description of artificial sequence: synthetic polynucleotide sequence
  source 1..121: mol_type = other DNA
ctattaactgacttaccatttgaaaggatgtttgtaagaaacacataattacacgctatttggataaagaaaactagtttaagttagaatgaatgtctagagtgttgaacagaggcttcca

SEQ ID NO: 6425 - DNA, 121 bp, synthetic construct
  misc_feature 1..121: note = Description of artificial sequence: synthetic polynucleotide sequence
  source 1..121: mol_type = other DNA
acagcagtagaaagacctaggaaagagaaaggttaatttggctggtgtggagtatatgcggagaagcagcaggaaataatgctgaaaatagcattttaaaattaattagtttatcaagtgc

SEQ ID NO: 6426 - DNA, 121 bp, synthetic construct
  misc_feature 1..121: note = Description of artificial sequence: synthetic polynucleotide sequence
  source 1..121: mol_type = other DNA
cctgaattcaccccaacaatagcagaggaagggatgctggcctctgggtaatagctcccatcatctggttcttgtttaatacccactgggaatccgctgccttcacagttaccatcaaagc

SEQ ID NO: 6427 - DNA, 121 bp, synthetic construct
  misc_feature 1..121: note = Description of artificial sequence: synthetic polynucleotide sequence
  source 1..121: mol_type = other DNA
ccctctgtccccagcagaaggtttctttgtttctttctttgttcttctgttccttttctagtgggatctaggtcctatgatggaaatccatcttcttcaggcatctcttctttctaactgg

SEQ ID NO: 6428 - DNA, 121 bp, synthetic construct
  misc_feature 1..121: note = Description of artificial sequence: synthetic polynucleotide sequence
  source 1..121: mol_type = other DNA
tagtagaacataaagaaaagactctggagtctgaaggtatcatgggtatccctccaataatcatgaaaccttgtgcaaattatttcctctaggtctcattcctcttttccaaactaggggt

SEQ ID NO: 6429 - DNA, 121 bp, synthetic construct
  misc_feature 1..121: note = Description of artificial sequence: synthetic polynucleotide sequence
  source 1..121: mol_type = other DNA
taggcctctacccttagcatagaggacctgactaggttgagaatttaccaactttggaaactgcttggtcctcagctttctttatctttgctctagaaaatgaaagcctttatatgctgcc

SEQ ID NO: 6430 - DNA, 121 bp, synthetic construct
  misc_feature 1..121: note = Description of artificial sequence: synthetic polynucleotide sequence
  source 1..121: mol_type = other DNA
gagatggctgaaataacagaaatataattgagaatatggataggaatgatccatattcacaatgtcatccatgagatgatatcttgaaatatatattttccaagttgcttccccaacctag

SEQ ID NO: 6431 - DNA, 121 bp, synthetic construct
  misc_feature 1..121: note = Description of artificial sequence: synthetic polynucleotide sequence
  source 1..121: mol_type = other DNA
cattctttaaacttcagttttctactatgcaaaatgaaaaagaaagtatctatgtattgcttgcctcggtattatggaaatgatcacagtggtaagtgtgttttataattctttctgtaaa

SEQ ID NO: 6432 - DNA, 121 bp, synthetic construct
  misc_feature 1..121: note = Description of artificial sequence: synthetic polynucleotide sequence
  source 1..121: mol_type = other DNA
catgtttggttcaagagtaaaactggaatcagattaggaatcaatcactgaggactcaactgtcttaaaataatctttcatcattgatatggcatcaattgttttataatttcctaacaca

SEQ ID NO: 6433 - DNA, 121 bp, synthetic construct
  misc_feature 1..121: note = Description of artificial sequence: synthetic polynucleotide sequence
  source 1..121: mol_type = other DNA
agacagatgcagtaacttgcccatgatccatgtgctagtaaacaatggaactgaggtttatacccaagccttctagttccagagcctgcatatactcttgaatatttggtatggaacgtca

SEQ ID NO: 6434 - DNA, 121 bp, synthetic construct
  misc_feature 1..121: note = Description of artificial sequence: synthetic polynucleotide sequence
  source 1..121: mol_type = other DNA
caactactgatttgctttgtggggtttatatgcttggtggagagggggaacaaacaaaatgagtaggttaataggttggccaaaataaatggatccccaggaaaactgcattctctattca

SEQ ID NO: 6435 - DNA, 121 bp, synthetic construct
  misc_feature 1..121: note = Description of artificial sequence: synthetic polynucleotide sequence
  source 1..121: mol_type = other DNA
gcgccatggcccggattccagcgtcacatcctggataggcaaagagctgcttgaggtccgacacctgccggaccacgaccactcctctgtctcctcctgtgagcaggtactgcccatctcg

SEQ ID NO: 6436 - DNA, 121 bp, synthetic construct
  misc_feature 1..121: note = Description of artificial sequence: synthetic polynucleotide sequence
  source 1..121: mol_type = other DNA
ttttgggagggcagggatgtcctgtttcccttacctaacctttacatgttgaggttttctggatgtagctctagttcctcttggcattttacaatctctccccagatgaactcattccctc

SEQ ID NO: 6437 - DNA, 121 bp, synthetic construct
  misc_feature 1..121: note = Description of artificial sequence: synthetic polynucleotide sequence
  source 1..121: mol_type = other DNA
ttaattcaacatttattcttgccactcacctgagaacacagtagcataaccaattccacaactgaactactcgacttcatgcaaaccagacctattttaaagagaattttaaaaaagaagt

SEQ ID NO: 6438 - DNA, 121 bp, synthetic construct
  misc_feature 1..121: note = Description of artificial sequence: synthetic polynucleotide sequence
  source 1..121: mol_type = other DNA
atcaaaaattaccattataaatgttcttaaaagatcacagttagtacctggagcatgagtgcatgtggtgaatgaacaaaaattgaagggttgtccttaggagatgattcaagacaaagct

SEQ ID NO: 6439 - DNA, 121 bp, synthetic construct
  misc_feature 1..121: note = Description of artificial sequence: synthetic polynucleotide sequence
  source 1..121: mol_type = other DNA
acactcaatcttggtgataaaaaagagttgggtctctgagtcattaatttttctctaacttttcccacatttacttacctcggtggcaaccttgggggtactcgcacaaaacctcctgttt

SEQ ID NO: 6440 - DNA, 121 bp, synthetic construct
  misc_feature 1..121: note = Description of artificial sequence: synthetic polynucleotide sequence
  source 1..121: mol_type = other DNA
acaatctagacttctctgacttcttgttccctattgtcctactctctctggctctcctgcgtccctcctgtgcctttggacctaacactatacacagagtaggcactgtagctgaagctgt

SEQ ID NO: 6441 - DNA, 121 bp, synthetic construct
  misc_feature 1..121: note = Description of artificial sequence: synthetic polynucleotide sequence
  source 1..121: mol_type = other DNA
aggaggagaagtctgcctctgcacccacatcccactgggaacctgaaaatcctgaaaatccagctcacaggagaaggatttaacctcacctagagctgaaacggatttagggagctgagtg

SEQ ID NO: 6442 - DNA, 121 bp, synthetic construct
  misc_feature 1..121: note = Description of artificial sequence: synthetic polynucleotide sequence
  source 1..121: mol_type = other DNA
gttcaggatcattatgttgaactttaaatgaacttgaaatacgccccagcccccgatatatagcggtattttgccataaggagtaaccacctgtagtcctgttttccttctttgtctctca

SEQ ID NO: 6443 - DNA, 121 bp, synthetic construct
  misc_feature 1..121: note = Description of artificial sequence: synthetic polynucleotide sequence
  source 1..121: mol_type = other DNA
tattgtcttaggagaggtgggacagaagccagaactttgggatgcagatggtgttagatgtatgttctagttccttcttcatttgcagggaaactgagagctagagtttatctgcactcat

SEQ ID NO: 6444 - DNA, 121 bp, synthetic construct
  misc_feature 1..121: note = Description of artificial sequence: synthetic polynucleotide sequence
  source 1..121: mol_type = other DNA
gtcagcaagctaagagtggatttctctcataggggtgaattcacattgatcaatgtaaccaggctcctaagagactgataaagcagaaactgtttaccttgaaaaatatagtcatctcaca

SEQ ID NO: 6445 - DNA, 121 bp, synthetic construct
  misc_feature 1..121: note = Description of artificial sequence: synthetic polynucleotide sequence
  source 1..121: mol_type = other DNA
tttacaaggcacagagaaaatagataaaaactgtccaaggtttgtcagcagattaggctatatcttttctgctttcaatttgctatttttctctttccttcattgtgacctcaactgcata

SEQ ID NO: 6446 - DNA, 270 bp, synthetic construct
  misc_feature 1..270: note = Description of artificial sequence: synthetic polynucleotide sequence
  source 1..270: mol_type = other DNA
ttcacttcatgtccacatcaaagtccagcaccagcagcttggtttcttcagtcccattccgactcccaactgcacacaccagctttgtgtttgaggctctgatccgccacacaactcccccactccccccactctccaatgtgactaggtttcgaataaattcacccgttttcaagtcccatagttttacagttccatcatctgagctggtaattacaaagttcttgttgaactgtaaacaggtcacagcactctgatgcttgttgggac

SEQ ID NO: 6447 - DNA, 212 bp, synthetic construct
  misc_feature 1..212: note = Description of artificial sequence: synthetic polynucleotide sequence
  source 1..212: mol_type = other DNA
ccttgcaatgtttgtaaacactgtcctgttttgatatcccagattttaactgtagaatctgcattcccagagacaagaatattgtctttgagttccattccacttgttaacgactggtgccctgttaacgtgtgaatgcaattccctgtctccacatcccaaacacggattgatgtatcaagagatccactcaccacatggataccatcaaa

SEQ ID NO: 6448 - DNA, 227 bp, synthetic construct
  misc_feature 1..227: note = Description of artificial sequence: synthetic polynucleotide sequence
  source 1..227: mol_type = other DNA
cctgtaatgaatagactctattagtatgcccctgcaacgtgtgtagacaggtttcagtctctggatcccacacctttaccataaaatcatatgctccactaacaaccctcctgccatcatattgaacacagcggactgctgcaacatgacccatcaaaacatgtaaacactggcctgtctcaatatcccaaaccctaagagtggcatctcgagaaccgctaacaact

SEQ ID NO: 6449 - DNA, 183 bp, synthetic construct
  misc_feature 1..183: note = Description of artificial sequence: synthetic polynucleotide sequence
  source 1..183: mol_type = other DNA
ccttttttcatgaagatgcatacaacgcacagtggaagtatgcccatataaggtgtgtatacattctccagtctctgcattccacactttgagtgtccgatctgtagatccactaatgatgatgttgtctctcatttgtgatgaccatactccacctgtatgtcccactaatgttctcagaca

SEQ ID NO: 6450 - DNA, 121 bp, synthetic construct
  misc_feature 1..121: note = Description of artificial sequence: synthetic polynucleotide sequence
  source 1..121: mol_type = other DNA
ttactttgcctgtgactgctgaccaaacttttaaagtgttgtcatcagaaccactaactattcggttaccacaaaactgtaagcatgtgatcacatgatcatcatgtcctttcagcaccta

SEQ ID NO: 6451 - DNA, 138 bp, synthetic construct
  misc_feature 1..138: note = Description of artificial sequence: synthetic polynucleotide sequence
  source 1..138: mol_type = other DNA
ccttaggagatttgagttctcctcgcctccagttagtatcaattctgtgctgtctgatgtatgcacttttccatggactgtgtatgaaacctggttttattacttttcttctcttgatgtgcaatggttcatcaatcc

SEQ ID NO: 6452 - DNA, 121 bp, synthetic construct
  misc_feature 1..121: note = Description of artificial sequence: synthetic polynucleotide sequence
  source 1..121: mol_type = other DNA
ctcttctttgcatttctctctccagagaaggttgtcttcagccaaaattctccagtagcgacatgtctgagctgcttgtagcaggtctttgggttccaggaatgaaagcacatagagtgcc

SEQ ID NO: 6453 - DNA, 136 bp, synthetic construct
  misc_feature 1..136: note = Description of artificial sequence: synthetic polynucleotide sequence
  source 1..136: mol_type = other DNA
cctctttagggagcaatgaaatgaagtctcgttgaaactggggttctatcacttgcatcatatgttttacttgtgttggttcacaactatcaatgagttcatctaaagcaagcaatttctctggtccactccagct

SEQ ID NO: 6454 - DNA, 143 bp, synthetic construct
  misc_feature 1..143: note = Description of artificial sequence: synthetic polynucleotide sequence
  source 1..143: mol_type = other DNA
cctgaaacatttttagccattcctggaggcctgtaggtggctggacagatgtaattcggcgtcgttgttgcccttggccattggctgctctgaggtccccaaaagttgttggtgttgctgaacatggtacaagcccagtggta

SEQ ID NO: 6455 - DNA, 121 bp, synthetic construct
  misc_feature 1..121: note = Description of artificial sequence: synthetic polynucleotide sequence
  source 1..121: mol_type = other DNA
tcattatatttaatattaccttgtatattctgagactttgcatggtttctttcccaaagaaaaagagcggacctcagaaccatggtccaactttcttttcatctataaggtaaaacaaaca

SEQ ID NO: 6456 - DNA, 262 bp, synthetic construct
  misc_feature 1..262: note = Description of artificial sequence: synthetic polynucleotide sequence
  source 1..262: mol_type = other DNA
ctttgtaaaaaatcatttttaatgtgccgtagaaacccatattttctgtatttttccccttcagtgattctgtgcccccgtgtgtccggctgcttggcagtctctgacaatataaacctttttcaggtaggtatgtcacagattctaatgtggacatgctcaggcacgtcagaaaaggaagattagggagcagaaccggcaacaaaactccacagtaaaggcaaatgcagctcagtatcaaaccgcttctcgggacacacat

SEQ ID NO: 6457 - DNA, 148 bp, synthetic construct
  misc_feature 1..148: note = Description of artificial sequence: synthetic polynucleotide sequence
  source 1..148: mol_type = other DNA
cccgtcttcgacaaaaagggaggccttgggcaatgatgctaatgctaaatatcttcatcacagtttgatgtggtagaggctcttttgcacttttaagatcaacaggaaccaagccatggtttagagtaggttttcccggttttgacat

SEQ ID NO: 6458 - DNA, 206 bp, synthetic construct
  misc_feature 1..206: note = Description of artificial sequence: synthetic polynucleotide sequence
  source 1..206: mol_type = other DNA
ctcaggttaacaatatattgaatatactcacttttgttgtttttgtatagaatggggaggagagttggtgaacgggcaggtccacaatactactggagttcgtgacactgttagtatgtgtatgttcatcttctctgctactatcatcagactgatcaaaatcgtcactctcctggtccatctcctcctcctcctcatcctcctca

SEQ ID NO: 6459 - DNA, 326 bp, synthetic construct
  misc_feature 1..326: note = Description of artificial sequence: synthetic polynucleotide sequence
  source 1..326: mol_type = other DNA
tcttgttcaccagcatgttcttcatcttcctcttgttcttcttggtttcctgaggagtcctcatctaccgaaataaatctattattgttttcttccaactgtccttgctgggaatcattttggcctccaggtctaggttctactccaacaacttcaccattccttgcagtgtgctcctcctcttgttgtctgagttgctgttgctgttcctcctctaccacacgattcatctgttcttcatctacctggcttgaggaagggttacctctcagagagcctccagttcgtcgtcttttgctgcccacagagagcagttcctgattcat

SEQ ID NO: 6460 - DNA, 121 bp, synthetic construct
  misc_feature 1..121: note = Description of artificial sequence: synthetic polynucleotide sequence
  source 1..121: mol_type = other DNA
tgtaaggaattattaggaaatgtctgtcagttcacaaagggccatgtttgtgttgccctcgaatttgaactttattctaggcaattggcagtaattaaaaggctataagaagtagtgtatg

SEQ ID NO: 6461 - DNA, 121 bp, synthetic construct
  misc_feature 1..121: note = Description of artificial sequence: synthetic polynucleotide sequence
  source 1..121: mol_type = other DNA
atcctcttcatcagaagtgtaaaatccagtttcatccgatttactttctttggtgcatatggaatcaccatttggtgctgcttcacatgtctccaaatcatcatccagggcagcatattct

SEQ ID NO: 6462 - DNA, 121 bp, synthetic construct
  misc_feature 1..121: note = Description of artificial sequence: synthetic polynucleotide sequence
  source 1..121: mol_type = other DNA
cgcaccagcttgcagccgcccagcctgagaaccatgcctctgccttccccagagctcggcgccagggcgtcagtgtcctccgaaagaggtacagtgagccggtgagcctgggctcagcaca

SEQ ID NO: 6463 - DNA, 121 bp, synthetic construct
  misc_feature 1..121: note = Description of artificial sequence: synthetic polynucleotide sequence
  source 1..121: mol_type = other DNA
gtgctgcagcgaactccaggcagcaacgctgaggagtcttccatcctggagacagtcactgctgtggctgcgggaaagcctctctcttgcccaaaccacgatgggaatgtaagtggctggg

SEQ ID NO: 6464 - DNA, 121 bp, synthetic construct
  misc_feature 1..121: note = Description of artificial sequence: synthetic polynucleotide sequence
  source 1..121: mol_type = other DNA
cctactgaagaaggaagcattgaaagttccttatttattaatacctcttcgtatggagtcctttcctatcatgtgagtaactttttccttttgtcacaactttggttggtgacttaactgt

SEQ ID NO: 6465 - DNA, 471 bp, synthetic construct
  misc_feature 1..471: note = Description of artificial sequence: synthetic polynucleotide sequence
  source 1..471: mol_type = other DNA
aatgccacatactttgtggatggtgtgggtcttgggggtcatcatcagcctctccaaggaagaatcctccaatcaggcttctctgtcttgtgaccgcaatggtatctgcaagggcagctcaggatctttaaactccattccctcagggctcacagaagctgtaaaaagccttgacctgtccaacaacaggatcacctacattagcaacagtgacctacagaggtgtgtgaacctccaggctctggtgctgacatccaatggaattaacacaatagaggaagattctttttcttccctgggcagtcttgaacatttagacttatcctataattacttatctaatttatcgtcttcctggttcaagcccctttcttctttaacattcttaaacttactgggaaatccttacaaaaccctaggggaaacatctcttttttctcatctcacaaaattgcaaatcctgagagtggg

SEQ ID NO: 6466 - DNA, 471 bp, synthetic construct
  misc_feature 1..471: note = Description of artificial sequence: synthetic polynucleotide sequence
  source 1..471: mol_type = other DNA
aaatatggacaccttcactaagattcaaagaaaagattttgctggacttaccttccttgaggaacttgagattgatgcttcagatctacagagctatgagccaaaaagtttgaagtcaattcagaatgtaagtcatctgatccttcatatgaagcagcatattttactgctggagatttttgtagatgttacaagttccgtggaatgtttggaactgcgagatactgatttggacactttccatttttcagaactatccactggtgaaacaaattcattgattaaaaagtttacatttagaaatgtgaaaatcaccgatgaaagtttgtttcaggttatgaaacttttgaatcagatttctggattgttagaattagagtttgatgactgtacccttaatggagttggtaattttagagcatctgataatgacagagttatagatccaggtaaagtggaaacgttaacaat

SEQ ID NO: 6467 - DNA, 471 bp, synthetic construct
  misc_feature 1..471: note = Description of artificial sequence: synthetic polynucleotide sequence
  source 1..471: mol_type = other DNA
ccggaggctgcatattccaaggttttacttattttatgatctgagcactttatattcacttacagaaagagttaaaagaatcacagtagaaaacagtaaagtttttctggttccttgtttactttcacaacatttaaaatcattagaatacttggatctcagtgaaaatttgatggttgaagaatacttgaaaaattcagcctgtgaggatgcctggccctctctacaaactttaattttaaggcaaaatcatttggcatcattggaaaaaaccggagagactttgctcactctgaaaaacttgactaacattgatatcagtaagaatagttttcattctatgcctgaaacttgtcagtggccagaaaagatgaaatatttgaacttatccagcacacgaatacacagtgtaacaggctgcattcccaagacactggaaattttagatgttagcaacaacaatctcaattt

SEQ ID NO: 6468 - DNA, 470 bp, synthetic construct
  misc_feature 1..470: note = Description of artificial sequence: synthetic polynucleotide sequence
  source 1..470: mol_type = other DNA
attttctttgaatttgccgcaactcaaagaactttatatttccagaaataagttgatgactctaccagatgcctccctcttacccatgttactagtattgaaaatcagtaggaatgcaataactacgttttctaaggagcaacttgactcatttcacacactgaagactttggaagctggtggcaataacttcatttgctcctgtgaattcctctccttcactcaggagcagcaagcactggccaaagtcttgattgattggccagcaaattacctgtgtgactctccatcccatgtgcgtggccagcaggttcaggatgtccgcctctcggtgtcggaatgtcacaggacagcactggtgtctggcatgtgctgtgctctgttcctgctgatcctgctcacgggggtcctgtgccaccgtttccatggcctgtggtatatgaaaatgatgtgggcctggctccaggcca

SEQ ID NO: 6469 - DNA, 473 bp, synthetic construct
  misc_feature 1..473: note = Description of artificial sequence: synthetic polynucleotide sequence
  source 1..473: mol_type = other DNA
aaaggaagcccaggaaagctcccagcaggaacatctgctatgatgcatttgtttcttacagtgagcgggatgcctactgggtggagaaccttatggtccaggagctggagaacttcaatccccccttcaagttgtgtcttcataagcgggacttcattcctggcaagtggatcattgacaatatcattgactccattgaaaagagccacaaaactgtctttgtgctttctgaaaactttgtgaagagtgagtggtgcaagtatgaactggacttctcccatttccgtctttttgatgagaacaatgatgctgccattctcattcttctggagcccattgagaaaaaagccattccccagcgcttctgcaagctgcggaagataatgaacaccaagacctacctggagtggcccatggacgaggctcagcgggaaggattttgggtaaatctgagagctgcgataaagtcctag

SEQ ID NO: 6470 - DNA, 121 bp, synthetic construct
  misc_feature 1..121: note = Description of artificial sequence: synthetic polynucleotide sequence
  source 1..121: mol_type = other DNA
caagtctgctttttcccaacgatacaccaacctcggatgcagaattcatgaaagctgaagcatcttgttagggaggcttctagatatgaaaaggcaatgtctggttcatgatggcatggaa

SEQ ID NO: 6471 - DNA, 121 bp, synthetic construct
  misc_feature 1..121: note = Description of artificial sequence: synthetic polynucleotide sequence
  source 1..121: mol_type = other DNA
tgacattgtaggtatcccatgtttatcggagagttcactcttctgaccaaacttgatttgtaacaggaagctccttccccagagccaaacagcacttgctccaaatatgtctagagggaaa

SEQ ID NO: 6472 - DNA, 121 bp, synthetic construct
  misc_feature 1..121: note = Description of artificial sequence: synthetic polynucleotide sequence
  source 1..121: mol_type = other DNA
attaaagcccaaactgcagaagcttataaagtaatatataagcagttatttgaaatattctgtacaagtctgactgatcacctgccaatgccatcactgatttcatccagccccacactgt

SEQ ID NO: 6473 - DNA, 121 bp, synthetic construct
  misc_feature 1..121: note = Description of artificial sequence: synthetic polynucleotide sequence
  source 1..121: mol_type = other DNA
gaaagagctgcacaccttacttcctgatcacctgaaataaagacagactcttttctaacgtcagccaggatgctctcttttgcctctctcttctgaactgtctggggtaacacattatttt

SEQ ID NO: 6474 - DNA, 121 bp, synthetic construct
  misc_feature 1..121: note = Description of artificial sequence: synthetic polynucleotide sequence
  source 1..121: mol_type = other DNA
acctcatatacacaggcatcagtactttcaaactgctgagtaaacatcttcttttctccgtcttcattctctgatttcgttatctcatccagtctcatgattttaaatatctcctatatga

SEQ ID NO: 6475 - DNA, 121 bp, synthetic construct
  misc_feature 1..121: note = Description of artificial sequence: synthetic polynucleotide sequence
  source 1..121: mol_type = other DNA
cccagggttttggtttccagtacttccagttccagagctcccagagttccagcttccagtacttccaggtccagagctcccaggtttccaggttgcagtccctccagtcccagagctccca

SEQ ID NO: 6476 - DNA, 121 bp, synthetic construct
  misc_feature 1..121: note = Description of artificial sequence: synthetic polynucleotide sequence
  source 1..121: mol_type = other DNA
attgaggtaacactagctaaaccagtaaataaagaaaacacttggagacagcatcttaatggtcagattagtccaaattctgaaaatctgattgtgtttgctaacaaagaagagagccacc

SEQ ID NO: 6477 - DNA, 121 bp, synthetic construct
  misc_feature 1..121: note = Description of artificial sequence: synthetic polynucleotide sequence
  source 1..121: mol_type = other DNA
tcgcctgctcagggtgtcctcttccagctcaggtccctgactgagctggcactccttctaccactttaccagtcaaataagaaactgtcattagaaacaggacaagacttattacacaagt

SEQ ID NO: 6478 - DNA, 121 bp, synthetic construct
  misc_feature 1..121: note = Description of artificial sequence: synthetic polynucleotide sequence
  source 1..121: mol_type = other DNA
agtgccctgctggcaagtcccctggccatcttccgggagtattcgctgattgagatcatcccggactttgagattgtggcctgtactgaaaagtggcctggcgaggagaagagcatctatg

SEQ ID NO: 6479 - DNA, 121 bp, synthetic construct
  misc_feature 1..121: note = Description of artificial sequence: synthetic polynucleotide sequence
  source 1..121: mol_type = other DNA
tccaagaatttgtttaagtgatgatgatgctagacttgttaagcatgaatcctgttttcgcaaaaaaaaatacatttgccacataagtttaataattaacatttatgggaacaatagcatt

SEQ ID NO: 6480 - DNA, 121 bp, synthetic construct
  misc_feature 1..121: note = Description of artificial sequence: synthetic polynucleotide sequence
  source 1..121: mol_type = other DNA
ttgttttagactgtgttagttacttaattcacttacatgtgataaatgttgtaggtatcaggatggaaaataaagctattctctttcactccaggcaaaatcatctcttacctctgcatct

SEQ ID NO: 6481 - DNA, 121 bp, synthetic construct
  misc_feature 1..121: note = Description of artificial sequence: synthetic polynucleotide sequence
  source 1..121: mol_type = other DNA
acaaactcacccaagaactggaaatcctcactgacaggctacagctcacgttaagagccctggaagatgaaaagaaaaagacagacacgtaagaatgtaacgcttggagcactactgttat

SEQ ID NO: 6482 - DNA, 121 bp, synthetic construct
  misc_feature 1..121: note = Description of artificial sequence: synthetic polynucleotide sequence
  source 1..121: mol_type = other DNA
aaaggcaacactgagaaaggaagaaggacagggagagagactcctgttcatgcctcagggtatattcaatgggaaagacaggagaagctgctccagtttccttttgcttaaatttcttgat

SEQ ID NO: 6483 - DNA, 121 bp, synthetic construct
  misc_feature 1..121: note = Description of artificial sequence: synthetic polynucleotide sequence
  source 1..121: mol_type = other DNA
ctttgacagaagtttcaggcttgcggttttgtgtttccataagggtcgtttggcaagacaagcttcgtgttaaggtgggattcgacatgcctaagccttttccttaaaactttattactgt

SEQ ID NO: 6484 - DNA, 121 bp, synthetic construct
  misc_feature 1..121: note = Description of artificial sequence: synthetic polynucleotide sequence
  source 1..121: mol_type = other DNA
aaagagaaagaagtagaaagaatatttgaagaaattataatcaaaagtttcaaaatgtgctggcaaatattattctacacatctagaaaattcaacaaatttcaattaggataaactcaaa

SEQ ID NO: 6485 - DNA, 121 bp, synthetic construct
  misc_feature 1..121: note = Description of artificial sequence: synthetic polynucleotide sequence
  source 1..121: mol_type = other DNA
aacaaaggaaagaaggaaggaaggaaggaaggaaggaaggaaggaaggatatcaacattctagaagtagagctgatgcaccctgtgataggagaagtatacagggcaagttgatatgccaa

SEQ ID NO: 6486 - DNA, 121 bp, synthetic construct
  misc_feature 1..121: note = Description of artificial sequence: synthetic polynucleotide sequence
  source 1..121: mol_type = other DNA
aatcagccactgcactgcacagctctgggcaagagctgctggtggtgatgcggctatcctcctgtgctccctctgcacacacagtcacactcctcatggtgctccagggccacgtcggtga

SEQ ID NO: 6487 - DNA, 121 bp, synthetic construct
  misc_feature 1..121: note = Description of artificial sequence: synthetic polynucleotide sequence
  source 1..121: mol_type = other DNA
cagagccctttagacccatccaactaccctctaaaatgcatctaaatcctgctgctcccaggtccttcctggcagatcatgctggtttatcagcacatagtgtatatagtagaaatgtaaa

SEQ ID NO: 6488 - DNA, 121 bp, synthetic construct
  misc_feature 1..121: note = Description of artificial sequence: synthetic polynucleotide sequence
  source 1..121: mol_type = other DNA
ctccttaatcccctgcaattttgtttttgatacaccactgtatcgaaaatgtttttgctgtaatcttcagtggcttcctcatttgctgaaagtagtcagtgtttttgtttgtttgtttgtt

SEQ ID NO: 6489 - DNA, 121 bp, synthetic construct
  misc_feature 1..121: note = Description of artificial sequence: synthetic polynucleotide sequence
  source 1..121: mol_type = other DNA
tttgtattaattaaataattacttatttgtgcttattaggttattaccattggaaaacatgttaaagggtaccactacatcattgcaaatctggtaggtgaattaattggtatatattatt

SEQ ID NO: 6490 - DNA, 121 bp, synthetic construct
  misc_feature 1..121: note = Description of artificial sequence: synthetic polynucleotide sequence
  source 1..121: mol_type = other DNA
ctctagaaataattttgagaaataaaatatctgtttaagaaatcatttgtgaatattacgataaggaaatgcacatgtcttattaccatactaaaactctattaaatcaatgtatgtatag

SEQ ID NO: 6491 - DNA, 121 bp, synthetic construct
  misc_feature 1..121: note = Description of artificial sequence: synthetic polynucleotide sequence
  source 1..121: mol_type = other DNA
ctaggttacctcgtttatcctcatgatatttaataccgcccatccagatatatgtgtacaaagccaaaccattctgctgactgctggattcatgtatttatctctaccataaggaatttac

SEQ ID NO: 6492 - DNA, 121 bp, synthetic construct
  misc_feature 1..121: note = Description of artificial sequence: synthetic polynucleotide sequence
  source 1..121: mol_type = other DNA
cattctttgtcttgggataccactgaaggaattaaagtactaatgaaccttaataacctaatcagactttccagtttcttttttcctgcttgttcatttattggagtttggctaggtttca

SEQ ID NO: 6493 - DNA, 121 bp, synthetic construct
  misc_feature 1..121: note = Description of artificial sequence: synthetic polynucleotide sequence
  source 1..121: mol_type = other DNA
aacaaaaaatcaaagagtgccatcttggaccactcatgatgatgtatttcagtacaacccgattcaggcttgggtactcggccattctgccagcatttctgtttcagcaactgctgataag

SEQ ID NO: 6494 - DNA, 121 bp, synthetic construct
  misc_feature 1..121: note = Description of artificial sequence: synthetic polynucleotide sequence
  source 1..121: mol_type = other DNA
gaattaccactatgcagtttaactaaaaattattcaaagcatctcaggccttaattttacctctggaattatgttgaagcctggaataaagaaggaagaattctatgtcctaaaattacaa

SEQ ID NO: 6495 - DNA, 121 bp, synthetic construct
  misc_feature 1..121: note = Description of artificial sequence: synthetic polynucleotide sequence
  source 1..121: mol_type = other DNA
tctttattacaaaaattacttcctgaatcttcacaacaactctattatgtggatacaattaagcacacgaggtaggacattcagtgccttgtcacaagactccagctaataaatgccaaga

SEQ ID NO: 6496 - DNA, 121 bp, synthetic construct
  misc_feature 1..121: note = Description of artificial sequence: synthetic polynucleotide sequence
  source 1..121: mol_type = other DNA
agcatatcagtgctttcatgccttaaaaattaagaaaaattatctacctctatgtgctacaagatggtcttcaacttctactgtgcctcgaattactacccattatactatttatccccgg

SEQ ID NO: 6497 - DNA, 121 bp, synthetic construct
  misc_feature 1..121: note = Description of artificial sequence: synthetic polynucleotide sequence
  source 1..121: mol_type = other DNA
atattcatatttgcttaccatgggttttgatatctgtgggttattgaatcaagagaagcttgacttagttcttcatactgtaaaaggaagaaaattaatgtaccataattccaaagtaaag

SEQ ID NO: 6498 - DNA, 121 bp, synthetic construct
  misc_feature 1..121: note = Description of artificial sequence: synthetic polynucleotide sequence
  source 1..121: mol_type = other DNA
aggcctgtgaacaaacctcagtggcataaaccgaacgagtctgacccgcgcctcgccccctatcagtcccaagggttttccaccgaggaggatggtatatgcacataaatattcctaaaac

SEQ ID NO: 6499 - DNA, 121 bp, synthetic construct
  misc_feature 1..121: note = Description of artificial sequence: synthetic polynucleotide sequence
  source 1..121: mol_type = other DNA
tgagttcttggtcagaagcaatgctgtgtggagtaccatgatggcagttaaggaattctgtcagtctatagatggtagttttggcagaagcatttcctgcagggagacaaattcatacctg

SEQ ID NO: 6500 - DNA, 121 bp, synthetic construct
  misc_feature 1..121: note = Description of artificial sequence: synthetic polynucleotide sequence
  source 1..121: mol_type = other DNA
cctggttagtcttccaagggctaccattatattgcccaggattagggtccttcttgttataatgttaagttcattggcttgtaatagagatggaaatagttgtagtacaggtaataataat

SEQ ID NO: 6501 - DNA, 121 bp, synthetic construct
  misc_feature 1..121: note = Description of artificial sequence: synthetic polynucleotide sequence
  source 1..121: mol_type = other DNA
ttaaatattttattttatattttagttttattgaggtatattcctaataaaccttccctaagtgaacactggtgcacaaatatcatttgaataggtttaaaaatgtctgaatcactctgaa

SEQ ID NO: 6502 - DNA, 121 bp, synthetic construct
  misc_feature 1..121: note = Description of artificial sequence: synthetic polynucleotide sequence
  source 1..121: mol_type = other DNA
tactgaagtattttgtttttaattcctccaagaacaatataatgcaagctcgtaaattccctatttgcatcactgtggagtgtagttaaatctcttggctatagacagcagagtttttttt

SEQ ID NO: 6503 - DNA, 121 bp, synthetic construct
  misc_feature 1..121: note = Description of artificial sequence: synthetic polynucleotide sequence
  source 1..121: mol_type = other DNA
acaaagccgaacataaagactgtctggaagagaagataactttatccatgcagggagagacatcattcaagttaaccagttagatcctacaagaggaagtaaaagagcagaatggagtcct

SEQ ID NO: 6504 - DNA, 121 bp, synthetic construct
  misc_feature 1..121: note = Description of artificial sequence: synthetic polynucleotide sequence
  source 1..121: mol_type = other DNA
tatggcagcagttccatgtgagactgatgaagtaacatattatgaaaatacactgagaaatatcaaatgctgattttaacataaagacatgattgttttataacttaactgacaccaaata

SEQ ID NO: 6505 - DNA, 121 bp, synthetic construct
  misc_feature 1..121: note = Description of artificial sequence: synthetic polynucleotide sequence
  source 1..121: mol_type = other DNA
ggtattgaggtaaatggagaatattcattaaagatttctttcaattaacaaattgagaataggaatcagattgaaagaaatctttttcttttatagaatagggttgaaaacttttctcctg

SEQ ID NO: 6506 - DNA, 121 bp, synthetic construct
  misc_feature 1..121: note = Description of artificial sequence: synthetic polynucleotide sequence
  source 1..121: mol_type = other DNA
aatacatttttatcttctatacgttttctagtattacattgcctggaagtcttacatttcattgtgaacactcttgctaaacatcttgttttcagcaaatgtttcatatccctcaattcta

SEQ ID NO: 6507 - DNA, 121 bp, synthetic construct
  misc_feature 1..121: note = Description of artificial sequence: synthetic polynucleotide sequence
  source 1..121: mol_type = other DNA
tagcttttagaaatattaaaatttttaaaaataaatccatctctactttgatatttaccgttttcagctccattacttgtgtagaaagactcaagtatttttgtgtgtgtggtttgtttgt

SEQ ID NO: 6508 - DNA, 121 bp, synthetic construct
  misc_feature 1..121: note = Description of artificial sequence: synthetic polynucleotide sequence
  source 1..121: mol_type = other DNA
gggtctgacagaagcagataatgccaaacaatacaacatctgataaaattactagagtcgtagagaagaataaggtgactttacaggtcacctcacaatgaaatgctactatttatttttc

SEQ ID NO: 6509 - DNA, 121 bp, synthetic construct
  misc_feature 1..121: note = Description of artificial sequence: synthetic polynucleotide sequence
  source 1..121: mol_type = other DNA
tcagatgcaaaaatgagtttatttctcatatccaagcccattcttgttccactatcttagcttattcttagacataagaagagactttgaacttcactgaatgtacctttctctctcaagt

SEQ ID NO: 6510 - DNA, 121 bp, synthetic construct
  misc_feature 1..121: note = Description of artificial sequence: synthetic polynucleotide sequence
  source 1..121: mol_type = other DNA
tgttcttctctcacatttttcatttatgtattattttatcatttacttgagcaaaaatgggttcctaatagcctcccttaagaattacatagaaatacttcagtcttattttgttgagctt

SEQ ID NO: 6511 - DNA, 121 bp, synthetic construct
  misc_feature 1..121: note = Description of artificial sequence: synthetic polynucleotide sequence
  source 1..121: mol_type = other DNA
catatttaatgattccatttataattatgggatagtaagatacatgtacatggttataagggtgagtgtgggtaatgaaatgcttgaagatgaatatgatattagaggaggaatccaaatg

SEQ ID NO: 6512 - DNA, 121 bp, synthetic construct
  misc_feature 1..121: note = Description of artificial sequence: synthetic polynucleotide sequence
  source 1..121: mol_type = other DNA
cctgtcagagctcctttcctcccgtggtgcctctttgagtccagttattcattgccatactgttccctcttgctgttctgtcccactccgtatgccaacagcaattcttaggagaagccct

SEQ ID NO: 6513 - DNA, 121 bp, synthetic construct
  misc_feature 1..121: note = Description of artificial sequence: synthetic polynucleotide sequence
  source 1..121: mol_type = other DNA
ttaaagattactatatatttggctttaaagtcaaattattcatgcatagcaaactgaataagtctaatagtagcagcacttttttaatgatttggggtgtgtatggttttgttctgcacat

SEQ ID NO: 6514 - DNA, 121 bp, synthetic construct
  misc_feature 1..121: note = Description of artificial sequence: synthetic polynucleotide sequence
  source 1..121: mol_type = other DNA
tttttttgaactgtgaagtctactgtatttgtttgtttgtgaggtgtaaaaagctttatgcctagtccccaattcttaaaatctgtattcaaagcagtatccagtgataatggctgatata

SEQ ID NO: 6515 - DNA, 121 bp, synthetic construct
  misc_feature 1..121: note = Description of artificial sequence: synthetic polynucleotide sequence
  source 1..121: mol_type = other DNA
tcaggaaataaataggaatttaatttaattcaattcctatttcaggaaagaaatgagttcaacaattagagtgtttaagctgatgtcataatccagcctaatcccagaagtgacagatatc

SEQ ID NO: 6516 - DNA, 121 bp, synthetic construct
  misc_feature 1..121: note = Description of artificial sequence: synthetic polynucleotide sequence
  source 1..121: mol_type = other DNA
accactctgaattgcaaagatttagccccacttgaaagacagctttcctttctgcttacaagaacagctctctctctctctgatgacttagtgaagactgcagcacagtcttcttgcagtc

SEQ ID NO: 6517 - DNA, 121 bp, synthetic construct
  misc_feature 1..121: note = Description of artificial sequence: synthetic polynucleotide sequence
  source 1..121: mol_type = other DNA
tacattaagaagtaattcatcttttgttttaagaggaaaattcttattttccttctcaatttgtaaatcatcatctccatctgacagcactggaggaagtgatatacaagaggaagaagac

SEQ ID NO: 6518 - DNA, 121 bp, synthetic construct
  misc_feature 1..121: note = Description of artificial sequence: synthetic polynucleotide sequence
  source 1..121: mol_type = other DNA
ttggtacttgttgtttataggtgaaaaactgcaatggtttcaaaatcatcttgatccccaaaaaaagagatattcaaagaaagatgcttgtgaactaattgaaaggtaaacactgggcata

SEQ ID NO: 6519 - DNA, 121 bp, synthetic construct
  misc_feature 1..121: note = Description of artificial sequence: synthetic polynucleotide sequence
  source 1..121: mol_type = other DNA
cctgagtatacacaagggtcatttcatgactttccagatgaaaatactgacattcttaggtgttgatgctagacagaattacagttaagttaaacttaggcatcctgcaaactcgacaaat

SEQ ID NO: 6520 - DNA, 121 bp, synthetic construct
  misc_feature 1..121: note = Description of artificial sequence: synthetic polynucleotide sequence
  source 1..121: mol_type = other DNA
ctgcaatgtactaacactgctctgagtactgtgctgtaaccaagaagagaaacaaaacacttctctctcgtaccctattatttgcaagtaggagtaaacaagagtaggcaatttcagatag

SEQ ID NO: 6521 - DNA, 121 bp, synthetic construct
  misc_feature 1..121: note = Description of artificial sequence: synthetic polynucleotide sequence
  source 1..121: mol_type = other DNA
ggccaaaagagaaatccttttgtaaataataagaccaagatgtaaagaagtaatttaccaaaatcacacaataaataagggacagaactgaacacagaatcgaggttctttgattcctcag

SEQ ID NO: 6522 - DNA, 121 bp, synthetic construct
  misc_feature 1..121: note = Description of artificial sequence: synthetic polynucleotide sequence
  source 1..121: mol_type = other DNA
cagttgagattcttgagatcacataagtactcggcaggaaagagtgttttattggattagtggttatgctgtggacttgggtcagtaagcttgagttagcaccctggacagcactttgccc

SEQ ID NO: 6523 - DNA, 121 bp, synthetic construct
  misc_feature 1..121: note = Description of artificial sequence: synthetic polynucleotide sequence
  source 1..121: mol_type = other DNA
accaagtattgtggcaaaggcaacacaactaaatcagaagagggtagcctgtgtcccaaagaaaggagaggtacaaagcaggcaaaaatcttatacacgcacacacatgcgcactgggaaa

SEQ ID NO: 6524 - DNA, 121 bp, synthetic construct
  misc_feature 1..121: note = Description of artificial sequence: synthetic polynucleotide sequence
  source 1..121: mol_type = other DNA
acagagccaaacgtctttcacccagcctcttgatcttcttttccgtatctgtctctaaggcccttgactacactgttcttccagctgtttctgaaatacacagaggggttcctgctttagg

SEQ ID NO: 6525 - DNA, 121 bp, synthetic construct
  misc_feature 1..121: note = Description of artificial sequence: synthetic polynucleotide sequence
  source 1..121: mol_type = other DNA
ttcctggtgcagggcttcgggtctccctaacagaccttatacgctgaccggcggccgccatggcagtgtctctttgctcagacatccagggacgaccacattcgtccaacagcggtcgctc

SEQ ID NO: 6526 - DNA, 121 bp, synthetic construct
  misc_feature 1..121: note = Description of artificial sequence: synthetic polynucleotide sequence
  source 1..121: mol_type = other DNA
caagtagctgagagaaaattggacataccagaggactgtatcatcaacgcaagtctcttgagatgccttgttgatcggtagatcaagttatagcctcggtttctgattttgctgtggtgat

SEQ ID NO: 6527 - DNA, 121 bp, synthetic construct
  misc_feature 1..121: note = Description of artificial sequence: synthetic polynucleotide sequence
  source 1..121: mol_type = other DNA
agcgttgctaacatgagagaccggagaagcactttgggagctgctgtgttaaatggattattatacgctgtgggaggctttgatgggagtacaggtaatttccttttcatttattctacat

SEQ ID NO: 6528 - DNA, 121 bp, synthetic construct
  misc_feature 1..121: note = Description of artificial sequence: synthetic polynucleotide sequence
  source 1..121: mol_type = other DNA
tatctaaaagcagccggccatggtcattcacctatagttaccctttgctccagaaacttcgctgcagcttcccctgtgtttattttaaaccttaaatttgaagagcaagatgatgagaaaa

SEQ ID NO: 6529 - DNA, 121 bp, synthetic construct
  misc_feature 1..121: note = Description of artificial sequence: synthetic polynucleotide sequence
  source 1..121: mol_type = other DNA
aaactgttttcctgagaggtttgaagtttgatcttcaatttcctattggcttaaaattcgtcaacagagatatttggctttttaattaaagtcttgactggtccaaactttcagaaatact

SEQ ID NO: 6530 - DNA, 121 bp, synthetic construct
  misc_feature 1..121: note = Description of artificial sequence: synthetic polynucleotide sequence
  source 1..121: mol_type = other DNA
gcttacctatttttcacaatcattaccttcattagatagcatttcctgtttggctttttctctattagcgtgtgaaaaatattcttatggtttatttatccatcgctaccccagaaaacaa

SEQ ID NO: 6531 - DNA, 121 bp, synthetic construct
  misc_feature 1..121: note = Description of artificial sequence: synthetic polynucleotide sequence
  source 1..121: mol_type = other DNA
acataatattagaatataaaggtacattatgtatttatgacctttacacaattttaatcaatccacaatcataagaattaattatctggctatattaaaaacaaaaatttatatgtaccat

SEQ ID NO: 6532 - DNA, 121 bp, synthetic construct
  misc_feature 1..121: note = Description of artificial sequence: synthetic polynucleotide sequence
  source 1..121: mol_type = other DNA
gtatgtgaagacaattatttaaattaatgaatatgagcaaagtctaggaaattctctccattgaaatgtgattgactcggatttgcatgactgctaaaaatattacggaagttggagcaag

SEQ ID NO: 6533 - DNA, 121 bp, synthetic construct
  misc_feature 1..121: note = Description of artificial sequence: synthetic polynucleotide sequence
  source 1..121: mol_type = other DNA
gcttttttaaaaaagatggaaactgacttccactacacttaatgacagggaagagggaaactaagagccaggtaaattgacagatttgtcaaagaaaaagttttgtcccaagcataacaaa

SEQ ID NO: 6534 - DNA, 121 bp, synthetic construct
  misc_feature 1..121: note = Description of artificial sequence: synthetic polynucleotide sequence
  source 1..121: mol_type = other DNA
ggctatcatttttgtaaatattagaaatgtagaatttattgatttcaactgtcatcaatcaaatgtatacatcatggtcatcaccaccatcatcatcatccccttcatcttcatcatcatc

SEQ ID NO: 6535 - DNA, 121 bp, synthetic construct
  misc_feature 1..121: note = Description of artificial sequence: synthetic polynucleotide sequence
  source 1..121: mol_type = other DNA
aacaacaacaaaaactatggactttgagtgataataatgtgtcagtataggtttatggactgtaccaaatgcaccacactggaggagtatgttgataatggggagggttctgcaatgtgtg

SEQ ID NO: 6536 - DNA, 121 bp, synthetic construct
  misc_feature 1..121: note = Description of artificial sequence: synthetic polynucleotide sequence
  source 1..121: mol_type = other DNA
gtgtccaaaattttctatctctgtttaaaactacaaaataaattgctataaaaatcacttgagagtattaggcagctaataaatttcaaacagaatctgttgttcttcaaaataagcacag

SEQ ID NO: 6537 - DNA, 121 bp, synthetic construct
  misc_feature 1..121: note = Description of artificial sequence: synthetic polynucleotide sequence
  source 1..121: mol_type = other DNA
tggatctcagaagtacaaaacagatctcaccagactaaaactaaagtgtcagaagtttcattgtttccagagctctagaggagaacccatttcctttccttctccagcttccaaaacctgc

SEQ ID NO: 6538 - DNA, 121 bp, synthetic construct
  misc_feature 1..121: note = Description of artificial sequence: synthetic polynucleotide sequence
  source 1..121: mol_type = other DNA
tgttttactgcctctgaagacctttaagtgggacaggatgtggaagtggaaggtgatgacattagtgatgctgactctgtgtaggcctaggctaatgggtgtcttcatgtcttaattttta

SEQ ID NO: 6539 - DNA, 121 bp, synthetic construct
  misc_feature 1..121: note = Description of artificial sequence: synthetic polynucleotide sequence
  source 1..121: mol_type = other DNA
ttttgtcttagtttcatgaggagatgttgagaggtagtttgagcaactactgtcttcagttacaatgaggtttcataggtttttatagatacctttattcagattaataaagttcctttct

SEQ ID NO: 6540 - DNA, 121 bp, synthetic construct
  misc_feature 1..121: note = Description of artificial sequence: synthetic polynucleotide sequence
  source 1..121: mol_type = other DNA
aatttggtaacatataataaatatatgtactttttcctccacaggacctgattggggatatgagggagcagctttcggatcacttcaaagatgtgatggctggcctcatgtacccaccacc

SEQ ID NO: 6541 - DNA, 121 bp, synthetic construct
  misc_feature 1..121: note = Description of artificial sequence: synthetic polynucleotide sequence
  source 1..121: mol_type = other DNA
atacctgatagcctgaatgttgaatgcaaaatctttcaaacactttaaaagctgtcccatacgcatcctaaagagaacaacatttcttaattaaaaagtataaaaacataaacataaaaga

SEQ ID NO: 6542 - DNA, 121 bp, synthetic construct
  misc_feature 1..121: note = Description of artificial sequence: synthetic polynucleotide sequence
  source 1..121: mol_type = other DNA
cctaaaaatcagccgtcagccctgctgagtgcctcagccagccagagccctatggaagaccaaggggagatggaaagagaggtcaagtcccctggggccaggcattgctaccaggacaacc

SEQ ID NO: 6543 - DNA, 121 bp, synthetic construct
  misc_feature 1..121: note = Description of artificial sequence: synthetic polynucleotide sequence
  source 1..121: mol_type = other DNA
gttatatagctgtcagctcttgttatcgtcatcatcatcatcatcatccccctcacaataaccgtgtggtggttaattttgtgtgtcatgcatgactaatacaaactctgtgaggtagctt

SEQ ID NO: 6544 - DNA, 121 bp, synthetic construct
  misc_feature 1..121: note = Description of artificial sequence: synthetic polynucleotide sequence
  source 1..121: mol_type = other DNA
caacctgttaataccagctgcatttaccaagaaatttactcgacctaaatgtttctccagctcttcaaatgtattttgaacatcatgttctttagcaacatcacagctaaatgccaaatga

SEQ ID NO: 6545 - DNA, 121 bp, synthetic construct
  misc_feature 1..121: note = Description of artificial sequence: synthetic polynucleotide sequence
  source 1..121: mol_type = other DNA
cttcgcaaaatgatgatgtcacctttgctgaatttaaggtctccaggctcttttccttcatagttgtataatgctttggcacatggtaactgaggtataccctttaaaaaaaaaagaggga

SEQ ID NO: 6546 - DNA, 121 bp, synthetic construct
  misc_feature 1..121: note = Description of artificial sequence: synthetic polynucleotide sequence
  source 1..121: mol_type = other DNA
aggggttgtaggatttttagtgcagtaggtagctatgtttggagttcctgagttacagtatatctttcactgtcttatattttgctcatgtatatgcagccatgtcacatgtgcactgggg

SEQ ID NO: 6547 - DNA, 121 bp, synthetic construct
  misc_feature 1..121: note = Description of artificial sequence: synthetic polynucleotide sequence
  source 1..121: mol_type = other DNA
tgacctcccaaagtgcaattctcagattctttaattattcctcataaaatttttcaagatttagcaatacagtttggctgtgtccccacccaaatctcaaattgaaactcccataattccc

SEQ ID NO: 6548 - DNA, 121 bp, synthetic construct
  misc_feature 1..121: note = Description of artificial sequence: synthetic polynucleotide sequence
  source 1..121: mol_type = other DNA
atgagcccttttacagtgacagaccacaccccaatggagatcgtggtggatattttccgaaagctgggactgaggcagtgccttgtaactcacaatgggtaagtctggtaccacaggaatc

SEQ ID NO: 6549 - DNA, 121 bp, synthetic construct
  misc_feature 1..121: note = Description of artificial sequence: synthetic polynucleotide sequence
  source 1..121: mol_type = other DNA
taggaaacgggaaacaagatgctcctgctgctgttggagtcttgagttgttcctgaaatgagactgtggcatcccctgagaacaaggcatgatgcagaattgcacaatctaggtgcctgta

SEQ ID NO: 6550 - DNA, 121 bp, synthetic construct
  misc_feature 1..121: note = Description of artificial sequence: synthetic polynucleotide sequence
  source 1..121: mol_type = other DNA
agggagtgaaaatcttggacattagtaagcacagtggaaactagtaaatcaccttgatcgttagcccttacaacggtcccagggagattagtatatgctcgaatgtgcatgatatagaaag

SEQ ID NO: 6551 - DNA, 121 bp, synthetic construct
  misc_feature 1..121: note = Description of artificial sequence: synthetic polynucleotide sequence
  source 1..121: mol_type = other DNA
tttgtatggtatctagtaaatagcagacaataaatatttgttgaatgaatggacaacatatgtattattctgttctcatgctgctataaagagctgcctgagactgggtaattgataaagg

SEQ ID NO: 6552 - DNA, 121 bp, synthetic construct
  misc_feature 1..121: note = Description of artificial sequence: synthetic polynucleotide sequence
  source 1..121: mol_type = other DNA
aaggcacacattgatacaaagctgttttgtgcaaatgttcataagagctctaattgtgatagctaaatatcagtaacaacctaaatatctattcctttgcctgtggtcaatatccagttgc

SEQ ID NO: 6553 - DNA, 121 bp, synthetic construct
  misc_feature 1..121: note = Description of artificial sequence: synthetic polynucleotide sequence
  source 1..121: mol_type = other DNA
caaagatttcatgacaaagtctctaaaagcaattgaaacaggaacaaatattgacaaagtggaccttattaaactaaagaacttctgcgcaccaaaagaaactatcaagagagtaaacaga

SEQ ID NO: 6554 - DNA, 121 bp, synthetic construct
  misc_feature 1..121: note = Description of artificial sequence: synthetic polynucleotide sequence
  source 1..121: mol_type = other DNA
caaataatttagaaagaatttattatgaatcaatagagcaacattccctctagttcattgcacttgttattacgctttctttaaaagtgcccaagaaagaatttaaatttatcactcctct

SEQ ID NO: 6555 - DNA, 121 bp, synthetic construct
  misc_feature 1..121: note = Description of artificial sequence: synthetic polynucleotide sequence
  source 1..121: mol_type = other DNA
aagcacttaaaccgtaaatacaaggattttcaattatttgcttgtcatacatgctaatatcccagtggccaagaaaaatctcatgaccaagcccagagtcaacatggaagggaacacaaga

SEQ ID NO: 6556 - DNA, 121 bp, synthetic construct
  misc_feature 1..121: note = Description of artificial sequence: synthetic polynucleotide sequence
  source 1..121: mol_type = other DNA
aagcctatacacaatcaatcagccatgtgtccattctacctccaaatctgcttatttccatctgacccaactacccctaacccagcaaattattctttcaccttcaaggattactgtcaaa

SEQ ID NO: 6557 - DNA, 121 bp, synthetic construct
  misc_feature 1..121: note = Description of artificial sequence: synthetic polynucleotide sequence
  source 1..121: mol_type = other DNA
tggtgaagtcagcggagcccggggagcagcaggtaagtgccacccagagaaagatcacacaaggattggtaaggcagtgatcctcgcgcggggactcgagaaagccggtgtgggatcgcct

SEQ ID NO: 6558 - DNA, 121 bp, synthetic construct
  misc_feature 1..121: note = Description of artificial sequence: synthetic polynucleotide sequence
  source 1..121: mol_type = other DNA
ctgtatattttaagtgaagcatttggaccacttacatttaatgtttgttttgagatgtcggttattgttctgttaatcatgttacttgttgcctaaataccttatattttgttattgtttt

SEQ ID NO: 6559 - DNA, 121 bp, synthetic construct
  misc_feature 1..121: note = Description of artificial sequence: synthetic polynucleotide sequence
  source 1..121: mol_type = other DNA
ttttgttttctcctgctagggaaaggtgaacatgggaaaccttacccccttactgaagaggaccatgatgactcagcttacagggaaaatggttttaatattttcgtcagcaacaatattg

SEQ ID NO: 6560 - DNA, 121 bp, synthetic construct
  misc_feature 1..121: note = Description of artificial sequence: synthetic polynucleotide sequence
  source 1..121: mol_type = other DNA
tttcctaccttaaggactttttaaaaattatctcttttttatttcaactatcttcagattgttaaggaaaaagttctatgtcaacacttgtaccaataacaaaagtgattacagaggcaat

SEQ ID NO: 6561 - DNA, 121 bp, synthetic construct
  misc_feature 1..121: note = Description of artificial sequence: synthetic polynucleotide sequence
  source 1..121: mol_type = other DNA
aattgtaatatgaaagattaagcttacatataatgttacgtaagggataacaacactacgattggccaaaatatgcataaaatggaagaatttatttttagataattaaaatagggcaaat

SEQ ID NO: 6562 - DNA, 121 bp, synthetic construct
  misc_feature 1..121: note = Description of artificial sequence: synthetic polynucleotide sequence
  source 1..121: mol_type = other DNA
atcttgaattttacttttttcccaaggaaaatgccattgtctgtaacgttcatagtcctttaaagattattttgttcatttcacaggtctcctgttatggctggaggtctctttgctgtgg

SEQ ID NO: 6563 - DNA, 121 bp, synthetic construct
  misc_feature 1..121: note = Description of artificial sequence: synthetic polynucleotide sequence
  source 1..121: mol_type = other DNA
ggcggctgcgccgggctgtgagtctctcgccgccggaggaagatgaggctgaagattgggttcatcttacgcagtttgctggtggtgggaagcttcctggggctagtggtcctctggtctt

SEQ ID NO: 6564 - DNA, 121 bp, synthetic construct
  misc_feature 1..121: note = Description of artificial sequence: synthetic polynucleotide sequence
  source 1..121: mol_type = other DNA
aattccaaaccaaggcctgcaatcacagagtctgcctttgtggtttttaatttgtggctcaaatctgaaaccactctttgttttcctgtaaatggagccttaaggccttttagttttcttt

SEQ ID NO: 6565 - DNA, 121 bp, synthetic construct
  misc_feature 1..121: note = Description of artificial sequence: synthetic polynucleotide sequence
  source 1..121: mol_type = other DNA
tgttttataatgggcagttagcatgtctgctccattgccccagagagagatattctttctaccttccaaggtggttagctatacaaacatccctgaaaagatagtttggaacagtgacagt

SEQ ID NO: 6566 - DNA, 121 bp, synthetic construct
  misc_feature 1..121: note = Description of artificial sequence: synthetic polynucleotide sequence
  source 1..121: mol_type = other DNA
aaagatctctttcgacctcagtttcttaaagcctaggggaacagaaaagatttgagggacagtcaaaaactttaaagacttgaggaattaggggttttgctcaaaccagaaagcatttctc

SEQ ID NO: 6567 - DNA, 121 bp, synthetic construct
  misc_feature 1..121: note = Description of artificial sequence: synthetic polynucleotide sequence
  source 1..121: mol_type = other DNA
cattcactgatgagaagaatctatgccatgcggtaacacagcaagaccatttaaatacctatcatgtaataagtaatcaaatccgagggctcccttgggcttttagctccaggatgaattt

SEQ ID NO: 6568 - DNA, 121 bp, synthetic construct
  misc_feature 1..121: note = Description of artificial sequence: synthetic polynucleotide sequence
  source 1..121: mol_type = other DNA
gtttgtaaagactaaaattcctcatgatttgagcaatgcatgctaacgttataactgtatctcattttagtccagtggaaaatgaactataatgcaaaactcaaacaagtatgttctgctc

SEQ ID NO: 6569 - DNA, 121 bp, synthetic construct
  misc_feature 1..121: note = Description of artificial sequence: synthetic polynucleotide sequence
  source 1..121: mol_type = other DNA
tttagattccatcacaacaaagaaagaaaatcagttctggtaagtcagaacctcctttgggcaatgagaaaatatctgcagaggctgttggcgttgatatcagtggcaggtttatgacctc

SEQ ID NO: 6570 - DNA, 121 bp, synthetic construct
  misc_feature 1..121: note = Description of artificial sequence: synthetic polynucleotide sequence
  source 1..121: mol_type = other DNA
ctcagttgttgctggtcagccacatcgcactggatgaacagagtcttctgaggttcaaactgctcatccagggcagctttacactgtacacctgcttcaagattccaatccaccagcgcta

SEQ ID NO: 6571 - DNA, 121 bp, synthetic construct
  misc_feature 1..121: note = Description of artificial sequence: synthetic polynucleotide sequence
  source 1..121: mol_type = other DNA
gcacttacttttggcaaggaagctcgtgatcctgaactctgtgtagtcatcgttagcacagtggttatccccagagctaccctggccggtgctgcatccatgttgatccagaatgaaaccc

SEQ ID NO: 6572 - DNA, 121 bp, synthetic construct
  misc_feature 1..121: note = Description of artificial sequence: synthetic polynucleotide sequence
  source 1..121: mol_type = other DNA
aatgttagcacaggcagggattatgaaaacaatagaaggaactgctcctatgtatacttctggtggcatcaggatccttcaatataacaatctgatttagcttccaatctttgttaataaa

SEQ ID NO: 6573 - DNA, 121 bp, synthetic construct
  misc_feature 1..121: note = Description of artificial sequence: synthetic polynucleotide sequence
  source 1..121: mol_type = other DNA
gctgaaatactctgcgcaccatgccagtaccgctggggagtggggaatgggtggtgtcagggattcaagactattttttctacctctgcagtgcctcttttagggaaatgaagttaaaacc

SEQ ID NO: 6574 - DNA, 121 bp, synthetic construct
  misc_feature 1..121: note = Description of artificial sequence: synthetic polynucleotide sequence
  source 1..121: mol_type = other DNA
aattttaccctagtgttccataggtgattctctgtactatcaattgctacaatatttcatccaaataagtaatatctgtatgacttcatagtatttattcacatagttattatgcactgca

SEQ ID NO: 6575 - DNA, 121 bp, synthetic construct
  misc_feature 1..121: note = Description of artificial sequence: synthetic polynucleotide sequence
  source 1..121: mol_type = other DNA
atagcagaatccaaatcagcattaaatttcaaaaacattgcacatatttaaacttgggtgaatttgagcttgaaactatgggctggccaatagtcacaaagggaaaaaaaatacaattact

SEQ ID NO: 6576 - DNA, 121 bp, synthetic construct
  misc_feature 1..121: note = Description of artificial sequence: synthetic polynucleotide sequence
  source 1..121: mol_type = other DNA
ggctcaccttgcacacacctctttcaacctcagaaacaggcatctctttgagaaactctcgtcctattaaagagcaatggtattcgggaccaagatgtggtgctatatgtgctcattgcaa

SEQ ID NO: 6577 - DNA, 121 bp, synthetic construct
  misc_feature 1..121: note = Description of artificial sequence: synthetic polynucleotide sequence
  source 1..121: mol_type = other DNA
gtgagaaaactcaagaaaattattgaacaggaacaaataagaataaggtcttggaaaaactgatagaaattcaccaagcagtcaagatgataaaggcattctaagtagcaggaataattga

SEQ ID NO: 6578 - DNA, 121 bp, synthetic construct
  misc_feature 1..121: note = Description of artificial sequence: synthetic polynucleotide sequence
  source 1..121: mol_type = other DNA
tcaattatcaacaattagctaaagaataattcaacatttaattaaattctaggctgcttgtgaaggaaatatgcagcccttacatgtttccgtgcctaaaggagcttcatattctgatgat

SEQ ID NO: 6579 - DNA, 121 bp, synthetic construct
  misc_feature 1..121: note = Description of artificial sequence: synthetic polynucleotide sequence
  source 1..121: mol_type = other DNA
tattcttctacaacatcaatttataattaccaatatgaactaaatcagtctattgtttgtcatctgagatttttgaagtctaatattaaaaacatttcaacaagtatcttagctataagta

SEQ ID NO: 6580 - DNA, 121 bp, synthetic construct
  misc_feature 1..121: note = Description of artificial sequence: synthetic polynucleotide sequence
  source 1..121: mol_type = other DNA
aatggaagatcaagattttgaaactttgaacttgtaattagagtagatgcatcagaaactataaggatcacagttgctaaaacatgatgcagtataaatctatcgatacatgcaacccctt

SEQ ID NO: 6581 - DNA, 121 bp, synthetic construct
  misc_feature 1..121: note = Description of artificial sequence: synthetic polynucleotide sequence
  source 1..121: mol_type = other DNA
ccaagcatcaatcataccagacacttcccagagctaggacatgcacattttttaatcttggcagctggtgctagaaaacctccgtcttactgactagaactgaattaaatgtggttatcaa

SEQ ID NO: 6582 - DNA, 121 bp, synthetic construct
  misc_feature 1..121: note = Description of artificial sequence: synthetic polynucleotide sequence
  source 1..121: mol_type = other DNA
cttcagaactatgaaacatttgcattgttttaagccattatatttgtggtcatttgttcgggcaaccaaaggaaactaacacagctagcatttgcattttctactttaactcttcagtttt

SEQ ID NO: 6583 - DNA, 121 bp, synthetic construct
  misc_feature 1..121: note = Description of artificial sequence: synthetic polynucleotide sequence
  source 1..121: mol_type = other DNA
agtagcaggcctgtccacctaagaccagattgcagatactgaagcagctctgtgattaaattccagcaccactctactgcagtctgggggacattccatcaacccaaaaacccagcaagag

SEQ ID NO: 6584 - DNA, 121 bp, synthetic construct
  misc_feature 1..121: note = Description of artificial sequence: synthetic polynucleotide sequence
  source 1..121: mol_type = other DNA
ttaatgaagtacccgtgtaatacttttggaaaacctcatacagaagtcaagatcaacagaaaaactgcatttggaactacaactcttgtcttgactgattttagcaataaatccagtactt

SEQ ID NO: 6585 - DNA, 121 bp, synthetic construct
  misc_feature 1..121: note = Description of artificial sequence: synthetic polynucleotide sequence
  source 1..121: mol_type = other DNA
tggagatcaaaacccagagagacaataaatagcctgcattttaatttcagaatgtgatatttgctctcctcacagcaagggagaagttcccttgaaaatcctcatttgttaatacaccatg

SEQ ID NO: 6586 - DNA, 121 bp, synthetic construct
  misc_feature 1..121: note = Description of artificial sequence: synthetic polynucleotide sequence
  source 1..121: mol_type = other DNA
acaattctaatctagttaagaataatttggagtcagactgttggagtttttatccttgtggtaccactgagggcactggataaggtattttgtattcctgtttcataatttcctcatctac

SEQ ID NO: 6587 - DNA, 121 bp, synthetic construct
  misc_feature 1..121: note = Description of artificial sequence: synthetic polynucleotide sequence
  source 1..121: mol_type = other DNA
tttatttttcgtactgtctatttgctattatttatttctaagtttatctggcagaactcatcagaaaaaacataaagtcaatttatttctaaattttaaaaatctttttttgatagggact

SEQ ID NO: 6588 - DNA, 121 bp, synthetic construct
  misc_feature 1..121: note = Description of artificial sequence: synthetic polynucleotide sequence
  source 1..121: mol_type = other DNA
agtgatctaaatgttttaattaagcaagaaagtatttatgaactgtgtgggcatgaagagtttggacagcgagcattcttctttactaaaacaaatgctaatgataactaagattcattag

SEQ ID NO: 6589 - DNA, 121 bp, synthetic construct
  misc_feature 1..121: note = Description of artificial sequence: synthetic polynucleotide sequence
  source 1..121: mol_type = other DNA
cagacacaactgtgctattttactaccaattatggtcttatatgtattttcatgtcactgtctgcatctgaaactgcaattaatgtgaaggcctaaagaacacaaactatttcaccacata

SEQ ID NO: 6590 - DNA, 121 bp, synthetic construct
  misc_feature 1..121: note = Description of artificial sequence: synthetic polynucleotide sequence
  source 1..121: mol_type = other DNA
atctccctttccatgcaaaatggaagtttcaggagactaatgtgtttgtagagtttactgttgcattctagcactcaaaacaatgactaagatatagtcagtgctacctattggttgacca

SEQ ID NO: 6591 - DNA, 121 bp, synthetic construct
  misc_feature 1..121: note = Description of artificial sequence: synthetic polynucleotide sequence
  source 1..121: mol_type = other DNA
ttttaaaaatttagttatgatatgtcttggtgtgaatttccttaggtttatcctcttttgtgttgacccaacttcccaccaaatttgagaaatttttggccattttgctatgaagagtcat

SEQ ID NO: 6592 - DNA, 121 bp, synthetic construct
  misc_feature 1..121: note = Description of artificial sequence: synthetic polynucleotide sequence
  source 1..121: mol_type = other DNA
tagagaaaaattggccacaagatctgaactcttagaatctactccaattcatgctttctcttaggaatcaaagagaatattggctataaaccttaattttatgaaaatagaaaataaaact

SEQ ID NO: 6593 - DNA, 121 bp, synthetic construct
  misc_feature 1..121: note = Description of artificial sequence: synthetic polynucleotide sequence
  source 1..121: mol_type = other DNA
gtcactgtttgcctagagtttatccatacaatctacattttttaagtaaaatttttcccatctattgagcgtatactctgtgacacttattggatgattatgtgcgacatctctaagttga

SEQ ID NO: 6594 - DNA, 121 bp, synthetic construct
  misc_feature 1..121: note = Description of artificial sequence: synthetic polynucleotide sequence
  source 1..121: mol_type = other DNA
atagctctggattggctttgttgcctcagcaattcctggctagtagagaggtatctgactgaccaggaaaattgatccagggagggctatactgttgctcccttgtctctggaggcagcca

SEQ ID NO: 6595 - DNA, 121 bp, synthetic construct
  misc_feature 1..121: note = Description of artificial sequence: synthetic polynucleotide sequence
  source 1..121: mol_type = other DNA
aacagcagttctcaaattagttgctgaaaagttctacaaatccagcaaatgctgtcagaggtcttcaatatcctcccttttcaactttatatacttaaatccaaataacatgttacaataa

SEQ ID NO: 6596 - DNA, 121 bp, synthetic construct
  misc_feature 1..121: note = Description of artificial sequence: synthetic polynucleotide sequence
  source 1..121: mol_type = other DNA
aaaatatccaactctcaatactcacctttacttacattagaggcatgcttcttgcatattgcttagttataaaaatactcgcaatcgtttaagtacaaatctctttaacttcgctaacatt

SEQ ID NO: 6597 - DNA, 121 bp, synthetic construct
  misc_feature 1..121: note = Description of artificial sequence: synthetic polynucleotide sequence
  source 1..121: mol_type = other DNA
ataatattttaaaaatcacaaagcaatttttattgtgttctgaaaacatttgatttgcactttgctatttttgtctctattcatcagtcgctgagaggcctgtggaaatatctcaatttta

SEQ ID NO: 6598 - DNA, 121 bp, synthetic construct
  misc_feature 1..121: note = Description of artificial sequence: synthetic polynucleotide sequence
  source 1..121: mol_type = other DNA
aagttagcaggtaagactggccagagccaaaaaccaaattaacaggagaagggaaaatcttgagctaattacggaggttaatgaagggaatctaatagttcatccattaagagaaaaaatg

SEQ ID NO: 6599 - DNA, 121 bp, synthetic construct
  misc_feature 1..121: note = Description of artificial sequence: synthetic polynucleotide sequence
  source 1..121: mol_type = other DNA
gcagctgactgaatcgttatcctaatgggatattcatcaaaagtctatgatgattcacaatgagaggcttttataactgaaatccaaatgttatgtacaatggcaatctgaatgcatgtgt

SEQ ID NO: 6600 - DNA, 121 bp, synthetic construct
  misc_feature 1..121: note = Description of artificial sequence: synthetic polynucleotide sequence
  source 1..121: mol_type = other DNA
tgctcacccttaaaggatgaagatgaagtaaaaatcaagtgctcatccgttcctatatgtccctgccaggggctgggcggtggttcacgcctgtaatcccagcactttgggaggccgaggc

SEQ ID NO: 6601 - DNA, 121 bp, synthetic construct
  misc_feature 1..121: note = Description of artificial sequence: synthetic polynucleotide sequence
  source 1..121: mol_type = other DNA
ctaaagaaaagctctggactcagagatgctgctgtaataagttagatagcacgtaggcaatctagcaatttgtaatttgtcatcatgtagaacttttaaatccgttttctaaatatgttga

SEQ ID NO: 6602 - DNA, 121 bp, synthetic construct
  misc_feature 1..121: note = Description of artificial sequence: synthetic polynucleotide sequence
  source 1..121: mol_type = other DNA
taacagtttgactgaatttagatgactatgagtaaaattttagatttattacatcttacgttatcttccttggcagagagtacatttagaagagaaactggccaaccaaaggcaacagttt

SEQ ID NO: 6603 - DNA, 121 bp, synthetic construct
  misc_feature 1..121: note = Description of artificial sequence: synthetic polynucleotide sequence
  source 1..121: mol_type = other DNA
attttgtacctgctatgaagcaagcaactggtgtgatcataatactggcagagaaacggcagctggtagagaaaagagaagacaaactccttttttttctcttagcccaacagagcaatta

SEQ ID NO: 6604 - DNA, 121 bp, synthetic construct
  misc_feature 1..121: note = Description of artificial sequence: synthetic polynucleotide sequence
  source 1..121: mol_type = other DNA
gtccaactgtgtatctgttgctggtgtcccctctcaaatgtcacactgatgtgattgtattatctaaggctaacatacttctcaagagaacactcacaccctgcagaggtctacctgttta

SEQ ID NO: 6605 - DNA, 121 bp, synthetic construct
  misc_feature 1..121: note = Description of artificial sequence: synthetic polynucleotide sequence
  source 1..121: mol_type = other DNA
gttttaaactattaagcgcctgaggaagaaacatctaattataagtcttacctatatctcttatagcagctaccactcttttcctttccggatttttctttttcttttctttcttttcttt

SEQ ID NO: 6606 - DNA, 121 bp, synthetic construct
  misc_feature 1..121: note = Description of artificial sequence: synthetic polynucleotide sequence
  source 1..121: mol_type = other DNA
caggtactaaggttagacagtatcttcaagaatatatttgaacaaccaaatgaaatcacgtcatcatcagctggtatactacagaccttggttgtttttcaagatgggcatattttgaatt

SEQ ID NO: 6607 - DNA, 121 bp, synthetic construct
  misc_feature 1..121: note = Description of artificial sequence: synthetic polynucleotide sequence
  source 1..121: mol_type = other DNA
ctctctctctctctctctagcatgcatgtgccacaccaaatttcttttcatgcagttatgtaaacagcagagactttgcatgaaagggttccttccactccctgcttgtctacttcatctt

SEQ ID NO: 6608 - DNA, 121 bp, synthetic construct
  misc_feature 1..121: note = Description of artificial sequence: synthetic polynucleotide sequence
  source 1..121: mol_type = other DNA
gttcctgagctgctagagagctatctgagtcagcggttaactgaggcttaggcacacatagtcatcagctgggaggaacaggctaaacagatatctccttgcactacttagaaaaccaact

SEQ ID NO: 6609 - DNA, 121 bp, synthetic construct
  misc_feature 1..121: note = Description of artificial sequence: synthetic polynucleotide sequence
  source 1..121: mol_type = other DNA
tgtcttcaatgggtaaatctgttctgtgacccttttcttcaatctgacctaagcctcaccatgatgtttctgaaaccactgaaaatatccacaacgtgttacctttctcttctcctacttc

SEQ ID NO: 6610 - DNA, 121 bp, synthetic construct
  misc_feature 1..121: note = Description of artificial sequence: synthetic polynucleotide sequence
  source 1..121: mol_type = other DNA
gagttgtccagaactgtgtgtatgtacacccgtccctctgacatctgccacgtttgggagttgtagtaaggaatttctgttgcccttcgagttctattgtccccatgtgtattgattgcct

SEQ ID NO: 6611 - DNA, 121 bp, synthetic construct
  misc_feature 1..121: note = Description of artificial sequence: synthetic polynucleotide sequence
  source 1..121: mol_type = other DNA
ccgactacccagtgtattgacccacagtgtgggggtcgtgggatttgtatcatgggctcttgtgcttgcaactcaggatacaaaggagaaagttgtgaagaaggtaaacatgtcaatattc

SEQ ID NO: 6612 - DNA, 121 bp, synthetic construct
  misc_feature 1..121: note = Description of artificial sequence: synthetic polynucleotide sequence
  source 1..121: mol_type = other DNA
acccggttcctacctgcctggatgatgagcttagcgcattcattacaagggaacaaggcaacatacatactacagcctttcacatcggtcgaatttttgttcatgatggcattcagctccg

SEQ ID NO: 6613 - DNA, 121 bp, synthetic construct
  misc_feature 1..121: note = Description of artificial sequence: synthetic polynucleotide sequence
  source 1..121: mol_type = other DNA
ctaccaaaagtgttttgtttttgttttaccataggctaacaatgctaagagaggcctctgatgaaattgtggctgaaaaagaggctgaagttaaattgccagaggacagtagctgtacaga

SEQ ID NO: 6614 - DNA, 121 bp, synthetic construct
  misc_feature 1..121: note = Description of artificial sequence: synthetic polynucleotide sequence
  source 1..121: mol_type = other DNA
gcgacggcgcggatcggcaggatgttagggcagcagcagcagcaactgtactcgtcggccgcgctcctgaccggggagcggagccggctgctcacctgctacgtgcaggactaccttgagt

SEQ ID NO: 6615 - DNA, 121 bp, synthetic construct
  misc_feature 1..121: note = Description of artificial sequence: synthetic polynucleotide sequence
  source 1..121: mol_type = other DNA
tgtttggttgtgactgttcagtcccatgaaaagacccaaatcagagatgtgaagctcaccgctggcttaaaaccaggtaagcattcctttttgtaagtttgatcagtattaatccaacatt

SEQ ID NO: 6616 - DNA, 121 bp, synthetic construct
  misc_feature 1..121: note = Description of artificial sequence: synthetic polynucleotide sequence
  source 1..121: mol_type = other DNA
tcttgtccaacaaaaacagccacagatgactatttccagtgcaacacctctagtgagacggtgctcacggcaccatcacctctgggaaagaataaggaggaccatgacactctgactttgg

SEQ ID NO: 6617 - DNA, 121 bp, synthetic construct
  misc_feature 1..121: note = Description of artificial sequence: synthetic polynucleotide sequence
  source 1..121: mol_type = other DNA
gtccccatgttgctgaggtactgtttgccttcaatattcctcttccgccagtgtggccgcccctttcaagaaagtaattaagatatgtatttccttctccttctattggatggctttttaa

SEQ ID NO: 6618 - DNA, 121 bp, synthetic construct
  misc_feature 1..121: note = Description of artificial sequence: synthetic polynucleotide sequence
  source 1..121: mol_type = other DNA
aaaattggaaagcgtgtggctttggaggttactgaagataacaaattttttcctatacagtcaaaagatgtttctgacgaatatcaatattttctctcttctttggtcagcaatgtcaggt

SEQ ID NO: 6619 - DNA, 121 bp, synthetic construct
  misc_feature 1..121: note = Description of artificial sequence: synthetic polynucleotide sequence
  source 1..121: mol_type = other DNA
ggtctattttgagcaaagatgccaatgaactgatctggggcagtcttgaagcccttctggatcagtgctgagcctatgcactccgacaattctgcaacctaaaatggagaggaaaaagtca

SEQ ID NO: 6620 - DNA, 121 bp, synthetic construct
  misc_feature 1..121: note = Description of artificial sequence: synthetic polynucleotide sequence
  source 1..121: mol_type = other DNA
gcactgtgatataactttgggggatgatcagccgatctaggaattgtacttttgcttcccggcttttccgcctgtcttgacagttctttcaaaagcctctgattttcccgatcgatctgtc

SEQ ID NO: 6621 - DNA, 121 bp, synthetic construct
  misc_feature 1..121: note = Description of artificial sequence: synthetic polynucleotide sequence
  source 1..121: mol_type = other DNA
gcagttaatcctctttcttccatagaatctgctttcagatgaaagactgtgtcagagtgaagcactttatgccttcttgagcccttctcctgactacctcaaggttatcgacgtgcagggg

SEQ ID NO: 6622 - DNA, 121 bp, synthetic construct
  misc_feature 1..121: note = Description of artificial sequence: synthetic polynucleotide sequence
  source 1..121: mol_type = other DNA
attctttttcattatcctcatttttggaaagacttcctcgcgacttcttctcccaccaggaggtgagccgttgaaagagtgaaccacttttgtagtgtatttcagcagatactaagctcat

SEQ ID NO: 6623 - DNA, 121 bp, synthetic construct
  misc_feature 1..121: note = Description of artificial sequence: synthetic polynucleotide sequence
  source 1..121: mol_type = other DNA
tttccaagggaagcttaaatatcaggatttgtaccagtcttttcctttttccactggaaaaatttttggtttttagcagcatactgagatacagaggcataaaaggggttcttgggcaact

SEQ ID NO: 6624 - DNA, 121 bp, synthetic construct
  misc_feature 1..121: note = Description of artificial sequence: synthetic polynucleotide sequence
  source 1..121: mol_type = other DNA
tcggcacacacgaagcactcagggtgccggtacttatcccgcgccttcaccacagcaccgctgttggggaagaaaacgagctcaagttaaaaaaccacagagcaaaaatatgagacaaagg

SEQ ID NO: 6625 - DNA, 121 bp, synthetic construct
  misc_feature 1..121: note = Description of artificial sequence: synthetic polynucleotide sequence
  source 1..121: mol_type = other DNA
tccagagcctcaaacacagatgctttacattttgccttttcagtctgtttcttaggagccgaattttttttcctccggaaaggcacaggactgactagaaaagcaagtttagaaaggccag

SEQ ID NO: 6626 - DNA, 121 bp, synthetic construct
  misc_feature 1..121: note = Description of artificial sequence: synthetic polynucleotide sequence
  source 1..121: mol_type = other DNA
caatagtaaactgactttatgaaaagtcagagaaagatttgagttttcctgatatgttctgtggaggaagctttgatgaatattaaaaaaaattcagtgagaagatggagacttgttttat

SEQ ID NO: 6627 - DNA, 121 bp, synthetic construct
  misc_feature 1..121: note = Description of artificial sequence: synthetic polynucleotide sequence
  source 1..121: mol_type = other DNA
cttaatgaaattgggcaagaactcacaggccaggaatggagaggtctagaaaatattttcgaaatctatctttcctacaacaagtacctgcagctgactaggaactcctttgccttggtcc

SEQ ID NO: 6628 - DNA, 121 bp, synthetic construct
  misc_feature 1..121: note = Description of artificial sequence: synthetic polynucleotide sequence
  source 1..121: mol_type = other DNA
ttttatttttccactgtgactcagggagattcaggtggtcccttagtttgcaaacacaatggaatgtggcgtttggtgggcatcaccagctggggtgaaggctgtgcccgcagggagcaac

SEQ ID NO: 6629 - DNA, 121 bp, synthetic construct
  misc_feature 1..121: note = Description of artificial sequence: synthetic polynucleotide sequence
  source 1..121: mol_type = other DNA
tacactgaagacctattttacagctgtctacactggagtggtccaatgagttcttgtgacgcaggtcggagctggcccttgggattgccaggtcttggcacagtgccttcaccgtgctgcc

SEQ ID NO: 6630 - DNA, 121 bp, synthetic construct
  misc_feature 1..121: note = Description of artificial sequence: synthetic polynucleotide sequence
  source 1..121: mol_type = other DNA
tttagcaataaatcctgttttgactgaattatagtatttggataattgatccaattctcttcacatgcgcatttattattagtgttctatgtggtctagctaaaccccagtgattcatgaa

SEQ ID NO: 6631 - DNA, 121 bp, synthetic construct
  misc_feature 1..121: note = Description of artificial sequence: synthetic polynucleotide sequence
  source 1..121: mol_type = other DNA
ttcttcctgaatgggtataaaaaggctgaggaatagtaggaaactgagatactctgatcaagcaataccccttctgatgtgaaccacgtctgcctatatatttggctaaataaattgggaa

SEQ ID NO: 6632 - DNA, 121 bp, synthetic construct
  misc_feature 1..121: note = Description of artificial sequence: synthetic polynucleotide sequence
  source 1..121: mol_type = other DNA
gatggggtcatattgttgacttttaaaaatactgcaatatactgacatatcgaaacagcgacgttcggctatgttttctggtgagtatgccttcaggaagaagaaaagacgagatgccttc

SEQ ID NO: 6633 - DNA, 121 bp, synthetic construct
  misc_feature 1..121: note = Description of artificial sequence: synthetic polynucleotide sequence
  source 1..121: mol_type = other DNA
agaagtgacgtgatcgctgctgaatttttggaggattattctggttttgtgttgaaacttcagtagatcaaggctggaagtactggagaactgttgagaggccactgaaataatccaggtg

SEQ ID NO: 6634 - DNA, 121 bp, synthetic construct
  misc_feature 1..121: note = Description of artificial sequence: synthetic polynucleotide sequence
  source 1..121: mol_type = other DNA
agatagtggaattgacaactctggcagcaacgctgctaaggacaggatgaatatgaaaattgcttgaagttcaacaataaggagaaaggaggttgccaaaaagaccaggagaggcaagaac

SEQ ID NO: 6635 - DNA, 121 bp, synthetic construct
  misc_feature 1..121: note = Description of artificial sequence: synthetic polynucleotide sequence
  source 1..121: mol_type = other DNA
acaggcctgagagctccttggaaggcgcaatgggagaaattgtaaatgagggacatctcggtcacattgtagaatgatatctgcccgtgttcgcagtcaaggaaaacgccaactgtgtcca

SEQ ID NO: 6636 - DNA, 121 bp, synthetic construct
  misc_feature 1..121: note = Description of artificial sequence: synthetic polynucleotide sequence
  source 1..121: mol_type = other DNA
accatgcttctttttatttgctttgagcagtgcgtatatacctgtcttgtactttttacggacagtttcagttagaaccactttgatacaagaatactactgaacatttacatttttagca

SEQ ID NO: 6637 - DNA, 121 bp, synthetic construct
  misc_feature 1..121: note = Description of artificial sequence: synthetic polynucleotide sequence
  source 1..121: mol_type = other DNA
atacagacatattacatttttcaactaattttttttcttaagaagaattctttcagaaacggagaagcatgtagtaacatactgattttaaggaacctatgctaacaattttaagtagtaa

SEQ ID NO: 6638 - DNA, 121 bp, synthetic construct
  misc_feature 1..121: note = Description of artificial sequence: synthetic polynucleotide sequence
  source 1..121: mol_type = other DNA
ctggaaaaattgaatcatagcttgtgttggtcagggcatggaacgttggaactcttgctcatccataggagaagaactttcgtggaaattcatttgacctaaataccatccatagtctctg

SEQ ID NO: 6639 - DNA, 2701 bp, synthetic construct
  misc_feature 1..2701: note = Description of artificial sequence: synthetic polynucleotide sequence
  source 1..2701: mol_type = other DNA
ttttctgagcccctactgcattcagctctggggcctgggccctcgacggccaccacctcctcacctgggctcctgcgcagccaagcgcagtcccgcacgctcatcttccacgtcagctcctgcagcgagagcttggcatgcttccccagggagatgaacttcttggtgttcctgaggaagcggcgttcgttgtgcctggagccccagaggcctgggggcaccagccggcgcaggcaggcccgcacgaagccgtacacctgccaggggctgctgtgctggcggagcagctgcaccaggcgacgggggtctgtgtcctcctcctcgggggccgccacagagccctggggcttctcccgggcacagacaccggctgctggggtgaccgcagctcgcagcgggcagtgcgtcttgaggagcaccccgtaggggcactgcgcgtggttcccaagcagctccagaaacaggggccgcatttgccagtagcgctggggcaggcggggcaacctgcggggagtccctggcatccagggcctggaacccagaaagatggtctccacgagcctccgagcgccagtcaggctgggcctcagagagctgagtaggaaggagggccgcagctgctccttgtcgcctgaggagtagaggaagtgcttggtctcggcgtacaccgggggacaaggcgtgtcccagggacgtggtggccgcgatgtggatggggggcccgcgtggtgctggcggcccacggatgggtgggagtggcgcgtgccagagagcgcaccctccaaagaggtggcttcttcggcgggtctggcaggtgacaccacacagaaaccacggtcactcggtccacgcgtcctgcccgggtgggcccaggacccctgcccaacgggcgtccgctccggctcaggggcagcgccacgcctgggcctcttgggcaacggcagacttcggctggcactgcccccgcgcctcctcgcacccggggctggcaggcccagggggaccccggcctccctgacgctatggttccaggcccgttcgcatcccagacgccttcggggtccactagcgtgtggcgggggccgggcctgagtggcagcgccgagctggtacagcggcggcccgcacacctggtaggcgcagctgggagccaccagcacaaagagcgcgcagcgtgccagcaggtgaaccagcacgtcgtcgcccacgcggcgcagcagcagcccccacgccccgctcccccgcagtgcgtcggtcaccgtgttgggcaggtagctgcgcacgctggtggtgaaggcctcgggggggcccccgcgggccccgtccagcagcgcgaagccgaaggccagcacgttcttcgcgccgcgctcgcacagcctctgcagcactcgggccaccagctccttcaggcaggacacctgcgggggaagcgccctgagtcgcctgcgctgctctccgcatgtcgctggttccccccggccgccctcaaccccagccggacgccgaccccggggaggcccacctggcggaaggagggggcggcggggggcggccgtgcgtcccagggcacgcacaccaggcactgggccaccagcgcgcggaaagccgccgggtccccgcgctgcaccagccgccagccctggggccccaggcgccgcacgaacgtggccagcggcagcacctcgcggtagtggctgcgcagcagggagcgcacggctcggcagcggggagcgcgcggcatcgcgggggtggccggggccagggcttcccacgtgcgcagcaggacgcagcgctgcctgaaactcgcgccgcgaggagagggcggggccgcggaaaggaaggggaggggctgggagggcccggagggggctgggccggggacccgggaggggtcgggacggggcggggtccgcgcggaggaggcggagctggaaggtgaaggggcaggacgggtgcccgggtccccagtccctccgccacgtgggaagcgcggtcctgggcgtctgtgcccgcgaatccactgggagcccggcctggccccgacagcgcagctgctccgggcggacccgggggtctgggccgcgcttccccgcccgcgcgccgctcgcgctcccagggtgcagggacgccagcgagggccccagcggagagaggtcgaatcggcctaggctgtggggtaacccgagggaggggccatgatgtggaggccctgggaacaggtgcgtgcggcgaccctttggccgctggcctgatccggagacccagggctgcctccaggtccggacgcggggcgtcgggctccgggcaccacgaatgccggacgtgaaggggaggacggaggcgcgtagacgcggctggggacgaacccgaggacgcattgctccctggacgggcacgcgggacctcccggagtgcctccctgcaacacttccccgcgacttgggctccttgacacaggcccgtcatttctctttgcaggttctcaggcggcgaggggtccccaccatgagcaaaccaccccaaatctgttaatcacccaccggggcggtcccgtcgagaaagggtgggaaatggagccaggcgctcctgctggccgcgcaccgggcgcctcacaccagccacaacggccttgaccctgggccccggcactctgtctggcagatgaggccaacatctggtcacatcccgcccgcacagggtg

SEQ ID NO: 6640 - DNA, 121 bp, synthetic construct
  misc_feature 1..121: note = Description of artificial sequence: synthetic polynucleotide sequence
  source 1..121: mol_type = other DNA
gggacatctaggcccaaggtgtcacaccgtgcctggctgctggctctcctcttgcaaggacacagctcttacaggacttcctagcccacccaagaacatctttccatcatcgaaaagttat

SEQ ID NO: 6641 - DNA, 121 bp, synthetic construct
  misc_feature 1..121: note = Description of artificial sequence: synthetic polynucleotide sequence
  source 1..121: mol_type = other DNA
tccaaaacagccacgcacctgtgacgattttgtatctaaagacgaagctgggagtttcttgtcactctgcaagcatggctgccatttacatacatctctcagcatcacagattaggacccc

SEQ ID NO: 6642 - DNA, 121 bp, synthetic construct
  misc_feature 1..121: note = Description of artificial sequence: synthetic polynucleotide sequence
  source 1..121: mol_type = other DNA
tcatgtgagtctcctgtgcaggagagagagcaaaggatgctcactgagagcctgactttagagattctgagattgcatgaaacaccccgagaatcccctgttctacacatgagctgcttcc

SEQ ID NO: 6643 - DNA, 121 bp, synthetic construct
  misc_feature 1..121: note = Description of artificial sequence: synthetic polynucleotide sequence
  source 1..121: mol_type = other DNA
actaaaaataaaaggatatggcaaataagctttagaaaggcatatcgtattaactgtgtggtgaacgtctgtcattaggtttagctcccccaacatatgaacctctttctgtgtttggaca

SEQ ID NO: 6644 - DNA, 121 bp, synthetic construct
  misc_feature 1..121: note = Description of artificial sequence: synthetic polynucleotide sequence
  source 1..121: mol_type = other DNA
ccagaattagagtgcaggatatttgctttttgtgagagatgaatccggaggtaattacattcatgtgtttctttctccctgtgcttgttcacatgtgtgtattggggttctctcgtgtcca

SEQ ID NO: 6645 - DNA, 121 bp, synthetic construct
  misc_feature 1..121: note = Description of artificial sequence: synthetic polynucleotide sequence
  source 1..121: mol_type = other DNA
gaactgctcttcttgacacacaaaagaaagcaagagtggcatagaggagatgcttcagctcctatagtccagcactcagtaggactgtgcagaagagagctcaaccattaagaggtgcacc

SEQ ID NO: 6646 - DNA, 121 bp, synthetic construct
  misc_feature 1..121: note = Description of artificial sequence: synthetic polynucleotide sequence
  source 1..121: mol_type = other DNA
taaaattaattcaccatagtaatctcctcctaagaaactcccctgagggaaaacattatacgcccatttctgtgggcagagatttaaatatatctcccctattagttttacatgcctaaat

SEQ ID NO: 6647 - DNA, 121 bp, synthetic construct
  misc_feature 1..121: note = Description of artificial sequence: synthetic polynucleotide sequence
  source 1..121: mol_type = other DNA
tgtactctctgccttttggtttccagctggagttgaccaaaaaagcaccctcaagatcacaaagctggggattaactcactcaacattttctctagcaagtcctggtttgaccaagtcatg

SEQ ID NO: 6648 - DNA, 121 bp, synthetic construct
  misc_feature 1..121: note = Description of artificial sequence: synthetic polynucleotide sequence
  source 1..121: mol_type = other DNA
ttatttgcatggagaggtctttagtgtagggtttctagaagccaaacttccaagttggcttcttatctcctagagaaatgtagttacatcctgaagtatgagtgggacttgatccttatca

SEQ ID NO: 6649 - DNA, 121 bp, synthetic construct
  misc_feature 1..121: note = Description of artificial sequence: synthetic polynucleotide sequence
  source 1..121: mol_type = other DNA
ccagttcctcacttataaattgaggacttgggattaggacagttaagaatcatccaaccataattgtctaaacttctgctgctgcctcaggtcatccaaccctttaagccagcaggtgaag

SEQ ID NO: 6650 - DNA, 121 bp, synthetic construct
  misc_feature 1..121: note = Description of artificial sequence: synthetic polynucleotide sequence
  source 1..121: mol_type = other DNA
aacgggttattttgagaacagcatgagcaggtgagtttgggggcctatgagaggatggactattcattgagataatggcaaagcaggtggctgcggcaggtatcaggcagaatattaaagg

SEQ ID NO: 6651 - DNA, 121 bp, synthetic construct
  misc_feature 1..121: note = Description of artificial sequence: synthetic polynucleotide sequence
  source 1..121: mol_type = other DNA
ggtctggaagagtttcagtggtgagggcctgcttcagagtcacttgtatgagaagatccaaaacatgtggacgatggtgtgcatgtggggagggtctgacatagcctttttgctgcaggga

SEQ ID NO: 6652 - DNA, 121 bp, synthetic construct
  misc_feature 1..121: note = Description of artificial sequence: synthetic polynucleotide sequence
  source 1..121: mol_type = other DNA
gaaactggtaggaagtgaaggtgaacagataggtgggggcctgatggagagatcttacagatgatggaaggagcagtgccctgccttcttccccatccctgcaactaggtaggaatctctt

SEQ ID NO: 6653 - DNA, 121 bp, synthetic construct
  misc_feature 1..121: note = Description of artificial sequence: synthetic polynucleotide sequence
  source 1..121: mol_type = other DNA
caactagagttgacctcaggtaggatgaagccctagagacaaggccagccctccccaccatgacagttgacttgaagcatgctgggaagtccactgcagcagaaacagctagttgcctatc

SEQ ID NO: 6654 - DNA, 121 bp, synthetic construct
  misc_feature 1..121: note = Description of artificial sequence: synthetic polynucleotide sequence
  source 1..121: mol_type = other DNA
acacacagcacatgtggtgggggaatgaactgagagaaaatccgcgggatggagactgggagcctcatgcctctaatttgtcatcacgctgaatcatccaacatcctcacctacaacaaat

SEQ ID NO: 6655 - DNA, 121 bp, synthetic construct
  misc_feature 1..121: note = Description of artificial sequence: synthetic polynucleotide sequence
  source 1..121: mol_type = other DNA
gcatcctctccgcaccctcacagaagagaaggatacaacactatggcattatttggatgttgcctgatagggcaaaaagaagccatcaaggatgaggaatattttggtggtcaggccacta

SEQ ID NO: 6656 - DNA, 121 bp, synthetic construct
  misc_feature 1..121: note = Description of artificial sequence: synthetic polynucleotide sequence
  source 1..121: mol_type = other DNA
tagcaaccattcctatatggataggggatgtcagctgctggaaagggccattgtattaacctggtgatcaagcaaaacactgtatgttgctgtacaagtcagggttctccagagggacaga

SEQ ID NO: 6657 - DNA, 121 bp, synthetic construct
  misc_feature 1..121: note = Description of artificial sequence: synthetic polynucleotide sequence
  source 1..121: mol_type = other DNA
gaggcagataaaattcatgaagaaggaacgtgtgactaatgcgaaagctatgcaataaataaccatcttcagagttgctctccttgtaggaacacgtatgcaaatgttactctatacatgc

SEQ ID NO: 6658 - DNA, 121 bp, synthetic construct
  misc_feature 1..121: note = Description of artificial sequence: synthetic polynucleotide sequence
  source 1..121: mol_type = other DNA
caaaaactggaacagaaggaggtgagttgtccaagattagagagctatagtgataactgagaatgaaacctagtcagaatggatccgtggcctctccgcttcatctctgcaatactttgga

SEQ ID NO: 6659 - DNA, 121 bp, synthetic construct
  misc_feature 1..121: note = Description of artificial sequence: synthetic polynucleotide sequence
  source 1..121: mol_type = other DNA
tccataatagctgtgtcttcaaatccctgtgtcctcaaatcgttacaccatccttcctcgtcatactcaaagaatgaccttgatttctacagcacaaagcaaatggaggtcatgacacggg

SEQ ID NO: 6660 - DNA, 121 bp, synthetic construct
  misc_feature 1..121: note = Description of artificial sequence: synthetic polynucleotide sequence
  source 1..121: mol_type = other DNA
ttaaagaatggaatgttagcagtctctttcaacttccctctgttcttctgcaatttcatattaccagtctctttcaacttccctctgttcttctgcaatttcattgtccccgctgggatgt

SEQ ID NO: 6661 - DNA, 121 bp, synthetic construct
  misc_feature 1..121: note = Description of artificial sequence: synthetic polynucleotide sequence
  source 1..121: mol_type = other DNA
gctttttctatttcccacattgccacaggcaacggtgttactaaacttcctgctgttgcatcacgaaggttttctttttccagcttccaataatattttcctcactttcctgtaagtcctc

SEQ ID NO: 6662 - DNA, 121 bp, synthetic construct
  misc_feature 1..121: note = Description of artificial sequence: synthetic polynucleotide sequence
  source 1..121: mol_type = other DNA
agagggaactagtgaaccattgcagggtattgggcagagcgctgacatgatctgacttatgttttcagagggtcatgtgtttggaatcgacatttgaggaatgtctattccatgtaattac

SEQ ID NO: 6663 - DNA, 121 bp, synthetic construct
  misc_feature 1..121: note = Description of artificial sequence: synthetic polynucleotide sequence
  source 1..121: mol_type = other DNA
aagtgtgtatgcaaattatattggttaggctaggttgtaatgagaaagtggctgaatactatgcagtcattacgagaatggttgatatgaatgaatgatttggttcattcacttgctccat

SEQ ID NO: 6664 - DNA, 121 bp, synthetic construct
  misc_feature 1..121: note = Description of artificial sequence: synthetic polynucleotide sequence
  source 1..121: mol_type = other DNA
gtccccaattatttccttaaaggggctttgtaatgtcgaggctctactgagaagtgtagttttctctctctcctcactacatcttctttcctaaaccacaggtacctgagtctttgagcct

SEQ ID NO: 6665 - DNA, 121 bp, synthetic construct
  misc_feature 1..121: note = Description of artificial sequence: synthetic polynucleotide sequence
  source 1..121: mol_type = other DNA
ttctctctaggtatgtggctcatgggaagaatcatctaaatagagaacaagattcattagagtgtgttggagcttttttcaatagtggtatgttgccccacaatagagctaagtactacta

SEQ ID NO: 6666 - DNA, 121 bp, synthetic construct
  misc_feature 1..121: note = Description of artificial sequence: synthetic polynucleotide sequence
  source 1..121: mol_type = other DNA
atcaaaaggcatgaaaagtatggcgactggaatgaaaagccaccattattcacccttgcgtccctatacccatgccctgcagcatcagagctgatagtttctcccaatagaggtggagtgt

SEQ ID NO: 6667 - DNA, 121 bp, synthetic construct
  misc_feature 1..121: note = Description of artificial sequence: synthetic polynucleotide sequence
  source 1..121: mol_type = other DNA
acatacacctgtgatagtatttttaattccagtaccaaggtaatagacttatatgcatcgcctccaaaagttttcctgagagctgtcgaaaacaagcaatgggaaaaagactccatattta

SEQ ID NO: 6668 - DNA, 121 bp, synthetic construct
  misc_feature 1..121: note = Description of artificial sequence: synthetic polynucleotide sequence
  source 1..121: mol_type = other DNA
tgtacatcctattgtgtctgcctctctggagaactgtgactaatacagattttgatatgaggaactggcttatacaggttctagggaaatagaagtttaaggatgaatttccttagttggt

SEQ ID NO: 6669 - DNA, 121 bp, synthetic construct
  misc_feature 1..121: note = Description of artificial sequence: synthetic polynucleotide sequence
  source 1..121: mol_type = other DNA
actttgctgcttagaattttcttccactagatactccaagtcatcactgttaagttcagtcttccaagaagtcatcaagtatgtacataatacagccaagttctttactaaggtgtaacag

SEQ ID NO: 6670 - DNA, 121 bp, synthetic construct
  misc_feature 1..121: note = Description of artificial sequence: synthetic polynucleotide sequence
  source 1..121: mol_type = other DNA
ttttcaaacacatgtttatatacttctctctctcttcaacctttgaccattctcaaatgttttgcaatgttatacaagcctatgacacatttacctctggggcagcatctggtgaggcgcc

SEQ ID NO: 6671 - DNA, 121 bp, synthetic construct
  misc_feature 1..121: note = Description of artificial sequence: synthetic polynucleotide sequence
  source 1..121: mol_type = other DNA
ttaagtttggggtgtctccaggaaatacactcagatttctcaacacacactggcagcgttcacacattacccatcgctgacggcgatctcacacttcgcttgtcctctgccaaatggactc

SEQ ID NO: 6672 - DNA, 121 bp, synthetic construct
  misc_feature 1..121: note = Description of artificial sequence: synthetic polynucleotide sequence
  source 1..121: mol_type = other DNA
aacagttttgaaggcttgtgattctgcccctgggttatgggtctgtgatgttaagagattataaatggacatggtaggaaatgtcacagttaatgacgtttgcttataaaaggggtgaatt

SEQ ID NO: 6673 - DNA, 121 bp, synthetic construct
  misc_feature 1..121: note = Description of artificial sequence: synthetic polynucleotide sequence
  source 1..121: mol_type = other DNA
cagggactgagccaccacaaatgtcttcaggaacctgacccctccacgtcatgaacactaagtagctcctgacactgcttatgtttgcttgcaggtgatcaaatggaatcatacactctct

SEQ ID NO: 6674 - DNA, 121 bp, synthetic construct
  misc_feature 1..121: note = Description of artificial sequence: synthetic polynucleotide sequence
  source 1..121: mol_type = other DNA
tcttctgttgtctttgctgtcccttgtaggcccatctgcccagattgccttcgttaagcacatgggtgcctcactggatagccacactgtgactccacagatggcctcagcagggcacatt

SEQ ID NO: 6675 - DNA, 121 bp, synthetic construct
  misc_feature 1..121: note = Description of artificial sequence: synthetic polynucleotide sequence
  source 1..121: mol_type = other DNA
ttttagtgaaaggaatagacttgatgaatgtaaaggaaaaaatatgactatgctacccagtaaaatgccaatagtctttcaagcaggtttctaaaatcctagcaactccctggaattcaca

SEQ ID NO: 6676 - DNA, 121 bp, synthetic construct
  misc_feature 1..121: note = Description of artificial sequence: synthetic polynucleotide sequence
  source 1..121: mol_type = other DNA
catccttaggagagagaaagacttacaagaataaagtgaggaaaacacggagttgatgcacaagccccaacatccaacctcgactcctctttcgtagatgagaaactctgtggagttgtgt

SEQ ID NO: 6677 - DNA, 121 bp, synthetic construct
  misc_feature 1..121: note = Description of artificial sequence: synthetic polynucleotide sequence
  source 1..121: mol_type = other DNA
atgggaaatggggagatgttggaatgtccagaactaaatcaaactattgacttaagtccacagggcaataaattacagtctggtgaatgtctactcctgtcacatagggcctaaagttttt

SEQ ID NO: 6678 - DNA, 121 bp, synthetic construct
  misc_feature 1..121: note = Description of artificial sequence: synthetic polynucleotide sequence
  source 1..121: mol_type = other DNA
tgtttccttgacatgtggcccccttcatctttaagtcgatagtgacatgtgaaacacttctcatatctcaaatttctctgagttcctcttccctcacatttctgtgactttcttgtcggca

SEQ ID NO: 6679 - DNA, 121 bp, synthetic construct
  misc_feature 1..121: note = Description of artificial sequence: synthetic polynucleotide sequence
  source 1..121: mol_type = other DNA
caggtgactcactcttccaccatggaacaaggacagacctaacccctgaatgagataagcaactgagcatggtgcctcagctcctacctctcctctttaggggtctgtccacttgcaaaaa

SEQ ID NO: 6680 - DNA, 121 bp, synthetic construct
  misc_feature 1..121: note = Description of artificial sequence: synthetic polynucleotide sequence
  source 1..121: mol_type = other DNA
attttctgaaacaagatatgaaggctgctatcagtaagtagacacatggccatctatcagtttgggggccactaagaattataaaagaatgagattattataattgttggaaagtaacaac

SEQ ID NO: 6681 - DNA, 121 bp, synthetic construct
  misc_feature 1..121: note = Description of artificial sequence: synthetic polynucleotide sequence
  source 1..121: mol_type = other DNA
tgatcattggtaccatacgaaaaccacaggttggcaagattggccctgtaaaagcagccaaggcacacactatagaatgagagtcattactttcagagtaacctgaccctcttaagacatg

SEQ ID NO: 6682 - DNA, 121 bp, synthetic construct
  misc_feature 1..121: note = Description of artificial sequence: synthetic polynucleotide sequence
  source 1..121: mol_type = other DNA
tatatattttaagtgtccacatgtggcagctagactccaaagatgacctccaatgaatcttacctcctggtatacagtcccttcccaaatggaatctgccaacttgttttaattaactgaa

SEQ ID NO: 6683 - DNA, 121 bp, synthetic construct
  misc_feature 1..121: note = Description of artificial sequence: synthetic polynucleotide sequence
  source 1..121: mol_type = other DNA
aaaaacgccaatacgtggaaataggaaagattaaaagttcaaatcaacataaataagatatctatgttctccagaaagagaagggattctcttgggagagatacaattcccttccaactat

SEQ ID NO: 6684 - DNA, 121 bp, synthetic construct
  misc_feature 1..121: note = Description of artificial sequence: synthetic polynucleotide sequence
  source 1..121: mol_type = other DNA
tctaccctcatttaattccttatttctctattttgcctttgagtgactgaatcttatttgtgaggcacacattacatctttttcttttcttttgttcacagacccagattcttcccccgca

SEQ ID NO: 6685 - DNA, 121 bp, synthetic construct
  misc_feature 1..121: note = Description of artificial sequence: synthetic polynucleotide sequence
  source 1..121: mol_type = other DNA
caataaagtgacaagatcctttctagtttctatttccctggtcttagagtctgatcttatggtgatattggtctcttctaaatccaaaacccaccactctttgacacgttgaaaagtatcc

SEQ ID NO: 6686 - DNA, 121 bp, synthetic construct
  misc_feature 1..121: note = Description of artificial sequence: synthetic polynucleotide sequence
  source 1..121: mol_type = other DNA
gatagataagaaagtggagcaggctaaggggtttggtagtaagtggtaggggtgaagattgagagcttacaattttggataaggtggtatgttggatttctgccagtttgctatcagattt

SEQ ID NO: 6687 - DNA, 121 bp, synthetic construct
  misc_feature 1..121: note = Description of artificial sequence: synthetic polynucleotide sequence
  source 1..121: mol_type = other DNA
acaaaaacaacaatgataaccacaacaccccaaacaagagccatgttgatgacaagaggggttagaggtagttttaatataaaatctgtctatgctaaagaaagttaaactaactgagcac

SEQ ID NO: 6688 - DNA, 121 bp, synthetic construct
  misc_feature 1..121: note = Description of artificial sequence: synthetic polynucleotide sequence
  source 1..121: mol_type = other DNA
gggtgaggaggaagagtttcagtttcctctctttggaatatagtgataccattgacataggagtacagaagcaagaattggggaggaagaatatgtgttgggtttgaagtgtgttgagctt

SEQ ID NO: 6689 - DNA, 121 bp, synthetic construct
  misc_feature 1..121: note = Description of artificial sequence: synthetic polynucleotide sequence
  source 1..121: mol_type = other DNA
gtgactgaaggctgctttagattgggtgccagagaagacctccctgacaagtgttcttcaagctgagaactgaatgacatggaggaaccagaaatacaaacattggggaaaacatcatgga

SEQ ID NO: 6690 - DNA, 121 bp, synthetic construct
  misc_feature 1..121: note = Description of artificial sequence: synthetic polynucleotide sequence
  source 1..121: mol_type = other DNA
cttaatgacaaggaaacagttacctcattagaagtggtaggagatagagatatactttcggagtgcatgtatgtaaggagccttgggaaaagaaaagaggatcttaaggacagaacctgag

SEQ ID NO: 6691 - DNA, 121 bp, synthetic construct
  misc_feature 1..121: note = Description of artificial sequence: synthetic polynucleotide sequence
  source 1..121: mol_type = other DNA
ctcacaattatttttttgctgcatattcttggagccttcttcagtgacacatgagactccaaaaaaacaggtcatttttcctttagaatacagactcatagtttcatcattttgtagcact

SEQ ID NO: 6692 - DNA, 121 bp, synthetic construct
  misc_feature 1..121: note = Description of artificial sequence: synthetic polynucleotide sequence
  source 1..121: mol_type = other DNA
gcatgcttgtcatacctttttgctgtctgaagtttacaagaacaacctggctgctgttcgctgaaaaaagtgcccaaaactgagtaaaatctattaatggtcaattttaggtcatagtaat

SEQ ID NO: 6693 - DNA, 121 bp, synthetic construct
  misc_feature 1..121: note = Description of artificial sequence: synthetic polynucleotide sequence
  source 1..121: mol_type = other DNA
agcatatggggaggagaatttgaagatgaatttcattcaacattacgacatgacaggccatacacactcagcatggctaacgcgggatcaaatactaatggatcccagtttttcataacgg

SEQ ID NO: 6694 - DNA, 121 bp, synthetic construct
  misc_feature 1..121: note = Description of artificial sequence: synthetic polynucleotide sequence
  source 1..121: mol_type = other DNA
aacacgaagtgtaaagtacctgggaataaatctaataaaacatgtgcaagacttgtatgaagattattatactttattgaatgacattaaaggaggcttcaatatctggagagataaacca

SEQ ID NO: 6695 - DNA, 121 bp, synthetic construct
  misc_feature 1..121: note = Description of artificial sequence: synthetic polynucleotide sequence
  source 1..121: mol_type = other DNA
atactttatgtttctaaaatacatctctttttctgaaaggtcactgccattccttcagggccaacactcatcagcttttgtccagatgagcacaggagctccctactattctcccagcctc

SEQ ID NO: 6696 - DNA, 121 bp, synthetic construct
  misc_feature 1..121: note = Description of artificial sequence: synthetic polynucleotide sequence
  source 1..121: mol_type = other DNA
gcctcactttcccatcctaccagactcagacccagctgatgaaaacctacaatgtgcctgttacacatacagtcagaacactggcccagtcgtctggtcctcaagtatatgtattatagat

SEQ ID NO: 6697 - DNA, 121 bp, synthetic construct
  misc_feature 1..121: note = Description of artificial sequence: synthetic polynucleotide sequence
  source 1..121: mol_type = other DNA
tctgggcaaacaggctcacctctgacttctaggacaactgctctttgggctacagctgggattcttgctatgctaatggaggacagtcagaaaccatgacacttctgctctgatttggctt

SEQ ID NO: 6698 - DNA, 121 bp, synthetic construct
  misc_feature 1..121: note = Description of artificial sequence: synthetic polynucleotide sequence
  source 1..121: mol_type = other DNA
acacaaaaaaacaaaaaacaaaaacaaaacacaacaaacaaaaaagattgttctttctatgttcagttgtcttggcaagcttatgaaaattaattggttataaatataagggcttattttt

SEQ ID NO: 6699 - DNA, 121 bp, synthetic construct
  misc_feature 1..121: note = Description of artificial sequence: synthetic polynucleotide sequence
  source 1..121: mol_type = other DNA
tgtttcctgattacaaataaaagcaactataataagtaataataatggcaggaattttatagtgtacccaccatttttctaaaggctttatgtggttttactcatgtatttatcataatga

SEQ ID NO: 6700 - DNA, 121 bp, synthetic construct
  misc_feature 1..121: note = Description of artificial sequence: synthetic polynucleotide sequence
  source 1..121: mol_type = other DNA
tgtgttttggtggctaagattatgattttgaagcagcgtcatttgtctagagtagtaaccgaggttcgttgcctcacaccaaggaaatcaaggatgtggacacgtaaggagtgaggttagg

SEQ ID NO: 6701 - DNA, 121 bp, synthetic construct
  misc_feature 1..121: note = Description of artificial sequence: synthetic polynucleotide sequence
  source 1..121: mol_type = other DNA
aggtcagaaataatgtctgatatgctctcttgctctttccttgtcctgaacacatatatgttactggcttgtggagggagtgatgtgaaaatttagagcaaggatttggtaacaagaggaa

SEQ ID NO: 6702 - DNA, 121 bp, synthetic construct
  misc_feature 1..121: note = Description of artificial sequence: synthetic polynucleotide sequence
  source 1..121: mol_type = other DNA
aagactcagaagtcactcattgtatacactcacgcacacatgccccagcctggcaaagatgtggtccttgaccttcagacaggcagaatgcagtaagagctcgactactcctcccagcaga

SEQ ID NO: 6703 - DNA, 121 bp, synthetic construct
  misc_feature 1..121: note = Description of artificial sequence: synthetic polynucleotide sequence
  source 1..121: mol_type = other DNA
ggtgttattaccaaaggtactgtcattgaagtaaatgtgagcgaattgggccttgtgacacaaggaggcaaagttatttggggtaagtgaatttttgaatacagggctgctgtgttctgca

SEQ ID NO: 6704 - DNA, 121 bp, synthetic construct
  misc_feature 1..121: note = Description of artificial sequence: synthetic polynucleotide sequence
  source 1..121: mol_type = other DNA
aatgggaaatgctcttggatcaacaccattgtggcaatgaggaaaagagagttgctgcaagacaagaagctattggatttcagtacagtcaaacaaaagcctcactcagttccgtggggag

SEQ ID NO: 6705 - DNA, 121 bp, synthetic construct
  misc_feature 1..121: note = Description of artificial sequence: synthetic polynucleotide sequence
  source 1..121: mol_type = other DNA
acaccactttttatttgtagtgcactatacttagagctgttgccataggaattgatataccaggcgtcatggtggtcagcagacaaataggaaactcctgttatgtcgtcagaatgagttg

SEQ ID NO: 6706 - DNA, 121 bp, synthetic construct
  misc_feature 1..121: note = Description of artificial sequence: synthetic polynucleotide sequence
  source 1..121: mol_type = other DNA
tcaattctatcctggtgaattaatcttggcatcttggctctgagttctgtttctttacctaccttaactgaaattctctgggtttaccccaccaaagcttctaagtcatttacagcaactt

SEQ ID NO: 6707 - DNA, 121 bp, synthetic construct
  misc_feature 1..121: note = Description of artificial sequence: synthetic polynucleotide sequence
  source 1..121: mol_type = other DNA
gacgatgatctatgaatgatgatctacaatgatcaacaaggacctcaaacagtgatcatctaagggagcaacagattgaaaagcacctcccatcagtctcacgccaaggcaatggttctca

SEQ ID NO: 6708 - DNA, 121 bp, synthetic construct
  misc_feature 1..121: note = Description of artificial sequence: synthetic polynucleotide sequence
  source 1..121: mol_type = other DNA
gcacacacacaaagctaccactgcactataattgtttgtctgctcaactggactataaaattctccagggtagagattgtgcctgattcatgtagcttagcagagaggctggcctgcagcc

SEQ ID NO: 6709 - DNA, 121 bp, synthetic construct
  misc_feature 1..121: note = Description of artificial sequence: synthetic polynucleotide sequence
  source 1..121: mol_type = other DNA
cattgttcccctcacacatcctctgagttgagtatcatctagcagttcccagggactgactgataggagcatctggtcataaatcatagaaatagacccttatcttctttagtaggaaatg

SEQ ID NO: 6710 - DNA, 121 bp, synthetic construct
  misc_feature 1..121: note = Description of artificial sequence: synthetic polynucleotide sequence
  source 1..121: mol_type = other DNA
attattaaatgtgaatcccctaatcaagctggatgatgctgtaaatgttgatgagataatgactgatacttctaccagctatcttctgtgcatctctgaaaataaggaaaatgttagggac

SEQ ID NO: 6711 - DNA, 121 bp, synthetic construct
  misc_feature 1..121: note = Description of artificial sequence: synthetic polynucleotide sequence
  source 1..121: mol_type = other DNA
agggcaacatttttattggcattgtggtaagtactttgcaggtgaggaacaaatgttagatgttcatggtatctctaaatatgatctatcatgtatggtttataataaggatatctgatga

SEQ ID NO: 6712 - DNA, 121 bp, synthetic construct
  misc_feature 1..121: note = Description of artificial sequence: synthetic polynucleotide sequence
  source 1..121: mol_type = other DNA
tctgatctattctacatcctgaaatgaccactgcattggtgtagaaaaatgatgacgctataagcatttgtattgttatagcaatcgcttcctaatggatctacctccccctttactccat

SEQ ID NO: 6713 - DNA, 121 bp, synthetic construct
  misc_feature 1..121: note = Description of artificial sequence: synthetic polynucleotide sequence
  source 1..121: mol_type = other DNA
ctgtgcaggaatccctagccagccttcccacactaccaaaataccccatttgcaacaatcctcactggggaagagcaacactctgattgtttatagagccattataaacccgggcttaagg

SEQ ID NO: 6714 - DNA, 121 bp, synthetic construct
  misc_feature 1..121: note = Description of artificial sequence: synthetic polynucleotide sequence
  source 1..121: mol_type = other DNA
cttggaaactgttctgtgtgttgcaggatatttagcagcatttatcaagagcgtctacttaccagatgccagcagcactcctctgatatgacaaccaaaaatataccaaaagtgcaaaatc

SEQ ID NO: 6715 - DNA, 121 bp, synthetic construct
  misc_feature 1..121: note = Description of artificial sequence: synthetic polynucleotide sequence
  source 1..121: mol_type = other DNA
aggtctatattgatgagcaaaatccctatttctgacatcacttatttcagttttaggaactgtttgactccatagccacagccacactatcttttagctggagttttctgttccttttgta

SEQ ID NO: 6716 - DNA, 121 bp, synthetic construct
  misc_feature 1..121: note = Description of artificial sequence: synthetic polynucleotide sequence
  source 1..121: mol_type = other DNA
gaaaatttgttttctttccaactgatttagaaaatagaaaaatgtagacttggatttctctaaacaaactaggatgagagtggatgggcatttgtttctctgcattctctgcataaggggc

SEQ ID NO: 6717 - DNA, 121 bp, synthetic construct
  misc_feature 1..121: note = Description of artificial sequence: synthetic polynucleotide sequence
  source 1..121: mol_type = other DNA
accttgaagtcacaatattaaaggaaaaagataaaagaaagctggaaaaactggaagagcgcttactattctgcgcgcagaaaatatttaatttaaacactctaagaaattacgtccaaag

SEQ ID NO: 6718 - DNA, 121 bp, synthetic construct
  misc_feature 1..121: note = Description of artificial sequence: synthetic polynucleotide sequence
  source 1..121: mol_type = other DNA
gcagagcgagggtgtgtggagggccggcggggaccgccgggagcgcgcggatgtcggtgttcctggggccaggtaggctatggctgaggggtggtgctgcgagcatcgctgagccccaggg

SEQ ID NO: 6719 - DNA, 186 bp, synthetic construct
  misc_feature 1..186: note = Description of artificial sequence: synthetic polynucleotide sequence
  source 1..186: mol_type = other DNA
gggatgccctctgcatctttattagtaaatcttctttcagctttactcatcctatttgtgtttggagaaacagaaataagatttactggacaaactgaatttgttgttaatgaaacaagtacaacagttattcgtcttatcattgaaaggataggagagccagcaaatgttactgcaattgtatcg

SEQ ID NO: 6720 - DNA, 151 bp, synthetic construct
  misc_feature 1..151: note = Description of artificial sequence: synthetic polynucleotide sequence
  source 1..151: mol_type = other DNA
gctgtatggagaggacgctggtgacttttttgacacatatgctgcagcttttatacctgccggagaaacaaacagaacagtgtacatagcagtatgtgatgatgacttaccagagcctgacgaaacttttatttttcacttaacattacag

SEQ ID NO: 6721 - DNA, 121 bp, synthetic construct
  misc_feature 1..121: note = Description of artificial sequence: synthetic polynucleotide sequence
  source 1..121: mol_type = other DNA
gattttattttagaaaccttcagcaaatgtgaagcttggatggccaaggactgttactgtgacaatattatcaaatgacaatgcatttggaattatttcatttaatatggtatggacacaa

SEQ ID NO: 6722 - DNA, 121 bp, synthetic construct
  misc_feature 1..121: note = Description of artificial sequence: synthetic polynucleotide sequence
  source 1..121: mol_type = other DNA
ctcaatagcttccctcaatcgcagtgagtgagcccaagggcagaaatgagtctatgcctcttactctcatcagggaaaagggaacctatggaatggtcatggtgacttttgaggtaagttt

SEQ ID NO: 6723 - DNA, 121 bp, synthetic construct
  misc_feature 1..121: note = Description of artificial sequence: synthetic polynucleotide sequence
  source 1..121: mol_type = other DNA
gcaggtagagggtggcccaaatccccctgatgaagatttgagtccagttaaaggaaatatcacctttccccctggcagagcaacagtaatttataacttgacagtactcgatgacgaggtt

SEQ ID NO: 6724 - DNA, 223 bp, synthetic construct
  misc_feature 1..223: note = Description of artificial sequence: synthetic polynucleotide sequence
  source 1..223: mol_type = other DNA
ggtaccagaaaatgatgaaatatttttaattcaactgaaaagtgtagaaggaggagctgagattaacacctctaggaattccattgagatcatcattaagaaaaatgatagtcccgtgagattccttcagagtatttatttggttcctgaggaagaccacatactcataattccagtagttcgtggaaaggacaacaatggaaatctgattggatctgatgaa

SEQ ID NO: 6725 - DNA, 344 bp, synthetic construct
  misc_feature 1..344: note = Description of artificial sequence: synthetic polynucleotide sequence
  source 1..344: mol_type = other DNA
tatgaggtttcaatcagttatgctgtcacaactgggaattccacagcacatgcccagcaaaatctggacttcattgatcttcagccaaacacaactgttgtttttccaccttttattcatgaatctcacttgaaatttcaaatagttgatgacaccataccggagattgctgaatcgtttcacattatgttactaaaagataccttacagggagatgctgtgctaataagcccttctgttgtacaagtcaccattaagccaaatgataaaccttatggagtcctttcattcaacagtgttttgtttgaaaggacagttataattgatgaagatagaatatcaag

SEQ ID NO: 6726 - DNA, 272 bp, synthetic construct
  misc_feature 1..272: note = Description of artificial sequence: synthetic polynucleotide sequence
  source 1..272: mol_type = other DNA
gatatgaagaaatcacagtggttagaaatggaggaacccatgggaatgtctctgcgaattgggtgttgacacggaacagcactgatccctcaccagtaacagcagatatcagaccgagctctggagttctccattttgcacaagggcagatgttggcaacaattcctcttactgtggttgatgatgatcttccagaagaggcagaagcttatctacttcaaattctgcctcatacaatacgaggaggtgcagaagtgagcgagccagcggag

SEQ ID NO: 6727 - DNA, 331 bp, synthetic construct
  misc_feature 1..331: note = Description of artificial sequence: synthetic polynucleotide sequence
  source 1..331: mol_type = other DNA
gcttttgttctacattcaggatagtgatgatgtctatggcctaataacattttttcctatggaaaaccagaagattgaaagcagcccaggtgaacgatacttatccttgagttttacaagactaggagggactaaaggagatgtgaggttgctttattctgtactttacattcctgctggagctgtggaccccttgcaagcaaaagaaggcatcttaaatatatcaaggagaaatgacctcatttttccagagcaaaaaactcaagtcactacaaaattaccaataagaaatgatgcattccttcaaaatggagctcactttctagtacag

SEQ ID NO: 6728 - DNA, 178 bp, synthetic construct
  misc_feature 1..178: note = Description of artificial sequence: synthetic polynucleotide sequence
  source 1..178: mol_type = other DNA
gttggaaactgtggagttgttaaacataattcctctaatcccacccataagccctagatttggggaaatctgcaatatttctttactggttactccagccattgcaaatggagaaattggctttctcagcaatcttccaattattttgcatgaaccagaagattttgctgctgaagtg

SEQ ID NO: 6729 - DNA, 225 bp, synthetic construct
  misc_feature 1..225: note = Description of artificial sequence: synthetic polynucleotide sequence
  source 1..225: mol_type = other DNA
ggtatacattcccttacatcgggatggaactgatggccaggctactgtctactggagtttgaagccctctggctttaattcaaaagcagtgaccccggatgatataggcccctttaatggctctgttttgtttttatctgggcaaagtgacacaacaatcaacattactatcaaaggtgatgacataccggaaatgaatgaaactgtaacactttctctagacag

SEQ ID NO: 6730 - DNA, 121 bp, synthetic construct
  misc_feature 1..121: note = Description of artificial sequence: synthetic polynucleotide sequence
  source 1..121: mol_type = other DNA
taacgtggaaaaccaagtgctgaaatctggatatactagccgtgacctaattattttggaaaatgatgaccctgggggagtttttgaattttctcctgcttccagaggaccctatgttata

SEQ ID NO: 6731 - DNA, 187 bp, synthetic construct
  misc_feature 1..187: note = Description of artificial sequence: synthetic polynucleotide sequence
  source 1..187: mol_type = other DNA
ggaaggagaatctgtagagctccacatcatccgatcaagggggtcccttgttaagcagtttctacactaccgagtagagccaagagatagcaatgaattctatggaaacacgggagtactagaatttaaacctggagaaagggagatagtgatcaccttgctagcaagattggatgggataccagag

SEQ ID NO: 6732 - DNA, 182 bp, synthetic construct
  misc_feature 1..182: note = Description of artificial sequence: synthetic polynucleotide sequence
  source 1..182: mol_type = other DNA
gttggatgaacactactgggtggtcctcagcagccacggagaacgggaaagcaagttgggaagtgccaccattgtcaatataacgattctgaaaaatgatgatcctcatggcattatagaatttgtttctgatggtctaattgtgatgataaatgaaagcaaaggagatgctatctatagtg

SEQ ID NO: 6733 - DNA, 165 bp, synthetic construct
  misc_feature 1..165: note = Description of artificial sequence: synthetic polynucleotide sequence
  source 1..165: mol_type = other DNA
gctgtttatgatgtagtaagaaatcgaggcaactttggtgatgttagtgtatcatgggtggttagtccagactttacacaagatgtatttcctgtacaagggactgttgtctttggagatcaggaattttcaaaaaatatcaccatttactcccttccagatgag

SEQ ID NO: 6734 - DNA, 121 bp, synthetic construct
  misc_feature 1..121: note = Description of artificial sequence: synthetic polynucleotide sequence
  source 1..121: mol_type = other DNA
ttccagaagaaatggaagaatttaccgttatcctactgaatggcactggaggagctaaagtgggaaatagaacaactgcaactctgaggattagaagaaatgatgaccccatttattttgc

SEQ ID NO: 6735 - DNA, 268 bp, synthetic construct
  misc_feature 1..268: note = Description of artificial sequence: synthetic polynucleotide sequence
  source 1..268: mol_type = other DNA
gaacctcgtgtagtgagggttcaggaaggtgagactgccaactttacagttctcagaaatggatctgttgatgtgacttgcatggtccagtatgctaccaaggatgggaaggctactgcaagagagagagatttcattcctgttgaaaaaggagaaacgctcatttttgaggttggaagtagacagcagagcatatccatatttgttaatgaagatggtatcccggaaacagatgagcccttttatataatcctcttgaattcaacag

SEQ ID NO: 6736 - DNA, 121 bp, synthetic construct
  misc_feature 1..121: note = Description of artificial sequence: synthetic polynucleotide sequence
  source 1..121: mol_type = other DNA
atacagtagtatatcaatatggagtagctacagtaataattgaagctaatgatgacccaaatggcattttttctctggagcccatagacaaagcagtggaagaaggaaagactaatgcatt

SEQ ID NO: 6737 - DNA, 219 bp, synthetic construct
  misc_feature 1..219: note = Description of artificial sequence: synthetic polynucleotide sequence
  source 1..219: mol_type = other DNA
ggattttgaggcaccgaggatactttggtagtgtttctgtatcttggcagctctttcagaatgattctgctttgcagcctgggcaggagttctatgaaacttcaggaactgttaacttcatggatggagaagaagcaaaaccaatcattctccatgcttttccagataaaattcctgaattcaatgaattttatttcctaaaacttgtaaacatttcag

SEQ ID NO: 6738 - DNA, 311 bp, synthetic construct
  misc_feature 1..311: note = Description of artificial sequence: synthetic polynucleotide sequence
  source 1..311: mol_type = other DNA
ggtggatccccaggtcctgggggccagctagcagaaaccaacctccaggtgacagtaatggttccattcaatgatgatccctttggagtttttatcttggatccagagtgtttagagagagaagtggcagaagatgtcctgtctgaagatgatatgtcttatattaccaacttcaccattttgaggcagcagggtgtgtttggtgatgtacaactgggctgggaaatactgtccagtgagttccctgctggtttgccaccaatgatagattttttactggttggaattttccccaccaccgtgcatttaca

SEQ ID NO: 6739 - DNA, 434 bp, synthetic construct
  misc_feature 1..434: note = Description of artificial sequence: synthetic polynucleotide sequence
  source 1..434: mol_type = other DNA
acagcacatgcggcgtcaccacagtggaacggatgctttgtactttaccggactagagggtgcatttgggactgttaatccaaaataccatccctccaggaataatacaattgccaactttacattctcagcttgggtaatgcccaatgccaatacgaatggattcattatagcgaaggatgacggtaatggaagcatctactacggggtaaaaatacaaacaaacgaatcccatgtgacactttcccttcattataaaaccttgggttccaatgctacatacattgccaagacaacagtcatgaaatatttagaagaaagtgtttggcttcatctactaattatcctggaggatggtataatcgaattctacctggatggaaatgcaatgcccaggggaatcaagagtctgaaaggagaagccattactgacg

SEQ ID NO: 6740 - DNA, 375 bp, synthetic construct
  misc_feature 1..375: note = Description of artificial sequence: synthetic polynucleotide sequence
  source 1..375: mol_type = other DNA
ggtcctgggatactgagaattggagcagggataaatggcaatgacagatttacaggtctgatgcaggatgtgaggtcctatgagcggaaactgacgcttgaagaaatttatgaacttcatgccatgcccgcaaaaagtgatttacacccaatttctggatatctggagttcagacagggagaaactaacaaatcattcattatttctgcaagagatgacaatgacgaggaaggagaagaattattcattcttaaactagtttctgtatatggaggagctcgtatttcggaagaaaatactactgcaagattaacaatacaaaaaagtgacaatgcaaatggcttgtttggtttcacaggagcttgtataccagag

SEQ ID NO: 6741 - DNA, 178 bp, synthetic construct
  misc_feature 1..178: note = Description of artificial sequence: synthetic polynucleotide sequence
  source 1..178: mol_type = other DNA
gattgcagaggagggatcaaccatttcttgtgtggttgagagaaccagaggagctctggattatgtgcatgttttttacaccatttcacagattgaaactgatggcattaattaccttgttgatgactttgctaatgccagtggaactattacattccttccttggcagagatcagag

SEQ ID NO: 6742 - DNA, 182 bp, synthetic construct
  misc_feature 1..182: note = Description of artificial sequence: synthetic polynucleotide sequence
  source 1..182: mol_type = other DNA
ggttctgaatatatatgttcttgatgatgatattcctgaacttaatgagtatttccgtgtgacattggtttctgcaattcctggagatgggaagctaggctcaactcctaccagtggtgcaagcatagatcctgaaaaggaaacgactgatatcaccatcaaagctagtgatcatccatatg

SEQ ID NO: 6743 - DNA, 204 bp, synthetic construct
  misc_feature 1..204: note = Description of artificial sequence: synthetic polynucleotide sequence
  source 1..204: mol_type = other DNA
ggcttgctgcagttctccacagggctgcctcctcagcctaaggacgcaatgaccctgcctgcaagcagcgttccacatatcactgtggaggaggaagatggagaaatcaggttattggtcatccgtgcacagggacttctgggaagggtgactgcggaatttagaacagtgtccttgacagcattcagtcctgaggattaccag

SEQ ID NO: 6744 - DNA, 121 bp, synthetic construct
  misc_feature 1..121: note = Description of artificial sequence: synthetic polynucleotide sequence
  source 1..121: mol_type = other DNA
ttgctggcacattagaatttcaaccaggagaaagatataaatacattttcataaacatcactgataattctattcctgaactggaaaaatcttttaaagttgagttgttaaacttggaagg

SEQ ID NO: 6745 - DNA, 121 bp, synthetic construct
  misc_feature 1..121: note = Description of artificial sequence: synthetic polynucleotide sequence
  source 1..121: mol_type = other DNA
ctctgtgtctccttgtgaagtagctgaactctttagggttgatggaagtggtagtggtgatggggacatggaattcttccttccaactattcacaaacgtggtaagcagtttttccaaggt

SEQ ID NO: 6746 - DNA, 141 bp, synthetic construct
  misc_feature 1..141: note = Description of artificial sequence: synthetic polynucleotide sequence
  source 1..141: mol_type = other DNA
gccagtctaggagtggcttcccaaattctagtgacaattgcagcctctgaccacgctcatggcgtatttgaatttagccctgagtcactctttgtcagtggaactgaaccagaagatgggtatagcactgttacattaaat

SEQ ID NO: 6747 - DNA, 121 bp, synthetic construct
  misc_feature 1..121: note = Description of artificial sequence: synthetic polynucleotide sequence
  source 1..121: mol_type = other DNA
ggttataagacatcatggaactctgtctccagtgactttgcattggaacatagactctgatcctgatggtgatctcgccttcacctctggcaacatcacatttgagattgggcagacgagc

SEQ ID NO: 6748 - DNA, 121 bp, synthetic construct
  misc_feature 1..121: note = Description of artificial sequence: synthetic polynucleotide sequence
  source 1..121: mol_type = other DNA
ccaatatcactgtggagatattgcctgacgaagacccagaactggataaggcattctctgtgtcagtcctcagtgtttccagtggttctttgggagctcatattaatgccacgttaacagt

SEQ ID NO: 6749 - DNA, 121 bp, synthetic construct
  misc_feature 1..121: note = Description of artificial sequence: synthetic polynucleotide sequence
  source 1..121: mol_type = other DNA
tggctagtgatgatccatatgggatattcattttttctgagaaaaacagacctgttaaagttgaggaagcaacccagaacatcacactatcaataataaggttgaaaggcctcatgggaaa

SEQ ID NO: 6750 - DNA, 121 bp, synthetic construct
  misc_feature 1..121: note = Description of artificial sequence: synthetic polynucleotide sequence
  source 1..121: mol_type = other DNA
gtccttgtctcatatgcaacactagatgatatggaaaaaccaccttattttccacctaatttagcgagagcaactcaaggaagagactatataccagcttctggatttgctctttttggag

SEQ ID NO: 6751 - DNA, 121 bp, synthetic construct
  misc_feature 1..121: note = Description of artificial sequence: synthetic polynucleotide sequence
  source 1..121: mol_type = other DNA
aatcagagtgaggcaacaatagctatttcaattttggatgatgatgagccagaaaggtccgaatctgtctttatcgaactactcaactctactttagtagcgaaagtacagagtcgttcaa

SEQ ID NO: 6752 - DNA, 217 bp, synthetic construct
  misc_feature 1..217: note = Description of artificial sequence: synthetic polynucleotide sequence
  source 1..217: mol_type = other DNA
gttccaaattctccacgtcttgggcctaaggtagaaactattgcgcaactaattatcattgccaatgatgatgcatttggaactcttcagctctcagcaccaattgtccgagtggcagaaaatcatgttggacccattatcaatgtgactagaacaggaggagcatttgcagatgtctctgtgaagtttaaagctgtgccaataactgcaatagctg

SEQ ID NO: 6753 - DNA, 217 bp, synthetic construct
  misc_feature 1..217: note = Description of artificial sequence: synthetic polynucleotide sequence
  source 1..217: mol_type = other DNA
ggtgaagattatagtatagcttcatcagatgtggtcttgctagaaggggaaaccagtaaagccgtgccaatatatgtcattaatgatatctatcctgaactggaagaatcttttcttgtgcaactgatgaatgaaacaacaggaggagccagactaggggctttaacagaggcagtcattattattgaggcctctgatgacccctatggattatttg

SEQ ID NO: 6754 - DNA, 121 bp, synthetic construct
  misc_feature 1..121: note = Description of artificial sequence: synthetic polynucleotide sequence
  source 1..121: mol_type = other DNA
ggttttcagattactaaacttattgtagaggaacctgagtttaactcagtgaaggtaaacctgccaataattcgaaattctgggacactcggcaatgttactgttcagtgggttgccacca

SEQ ID NO: 6755 - DNA, 121 bp, synthetic construct
  misc_feature 1..121: note = Description of artificial sequence: synthetic polynucleotide sequence
  source 1..121: mol_type = other DNA
tggacagcttgctactggcgacctgcgagttgtctcaggtaatgtgacctttgcccctggggaaaccattcaaaccttgttgttagaggtcctggctgacgacgttccggagattgaagag

SEQ ID NO: 6756 - DNA, 183 bp, synthetic construct
  misc_feature 1..183: note = Description of artificial sequence: synthetic polynucleotide sequence
  source 1..183: mol_type = other DNA
ggttatccaagtgcaactaactgatgcctctggtggaggtactattgggttagatcgaattgcaaatattattattcctgccaatgatgatccttatggtacagtagcctttgctcagatggtttatcgtgttcaagagcctctggaaagaagttcctgtgctaatataactgtcaggcgaag

SEQ ID NO: 6757 - DNA, 345 bp, synthetic construct
  misc_feature 1..345: note = Description of artificial sequence: synthetic polynucleotide sequence
  source 1..345: mol_type = other DNA
gcggagggcactttggtcggctgttgttgttctacagtacttccgacattgatgtagtggctctggcaatggaggaaggtcaagatttactgtcctactatgaatctccaattcaaggggtgcctgacccactttggagaacttggatgaatgtctctgccgtgggggagcccctgtatacctgtgccactttgtgccttaaggaacaagcttgctcagcgttttcatttttcagtgcttctgagggtccccagtgtttctggatgacatcatggatcagcccagctgtcaacaattcagacttctggacctacaggaaaaacatgaccagggtagcatctcttt

SEQ ID NO: 6758 - DNA, 468 bp, synthetic construct
  misc_feature 1..468: note = Description of artificial sequence: synthetic polynucleotide sequence
  source 1..468: mol_type = other DNA
ttagtggtcaggctgtggctgggagtgactatgagcctgtgacaaggcaatgggccataatgcaggaaggtgatgaattcgcaaatctcacagtgtctattcttcctgatgatttcccagagatggatgagagttttctaatttctctccttgaagttcacctcatgaacatttcagccagtttgaaaaatcagccaaccataggacagccaaatatttctacagttgtcatagcactaaatggtgatgcctttggagtgtttgtgatctacaatattagtcccaatacttccgaagatggcttatttgttgaagttcaggagcagccccaaaccttggtggagctgatgatacacaggacagggggcagcttaggtcaagtggcagtcgaatggcgtgttgttggtggaacagctactgaaggtttagattttataggtgctggagagattctgacctttgctgaag

SEQ ID NO: 6759 - DNA, 211 bp, synthetic construct
  misc_feature 1..211: note = Description of artificial sequence: synthetic polynucleotide sequence
  source 1..211: mol_type = other DNA
ggtgaaaccaaaaagacagtcattttaaccatcttggatgactctgaaccagaggatgacgaaagtatcatagttagtttggtgtacactgaaggtggaagtagaattttgccaagctccgacactgttagagtgaacattttggccaatgacaatgtggcaggaattgttagctttcagacagcttccagatctgtcataggtcatgaag

SEQ ID NO: 6760 - DNA, 121 bp, synthetic construct
  misc_feature 1..121: note = Description of artificial sequence: synthetic polynucleotide sequence
  source 1..121: mol_type = other DNA
attttacaattccatgtgataagaactttccctggtcgaggaaatgttactgttaactggaaaattattgggcaaaatctagaactcaattttgctaactttagcggacaacttttctttc

SEQ ID NO: 6761 - DNA, 121 bp, synthetic construct
  misc_feature 1..121: note = Description of artificial sequence: synthetic polynucleotide sequence
  source 1..121: mol_type = other DNA
gtatgacataggggtcgttgaatacaacattgtttgtgcatttgttggatgacaacattcctgaggagaaagaagtataccaagtcattctgtatgatgtcaggacacaaggtaattcaga

SEQ ID NO: 6762 - DNA, 181 bp, synthetic construct
  misc_feature 1..181: note = Description of artificial sequence: synthetic polynucleotide sequence
  source 1..181: mol_type = other DNA
ggagttccaccagccggaatcgccctgcttgatgctcaaggatatgcagctgtcctcacagtagaagccagtgatgaaccacatggagttttaaattttgctctttcatcaagatttgtgttactacaagaggctaacataacaattcagcttttcatcaacagagaatttggatctctag

SEQ ID NO: 6763 - DNA, 165 bp, synthetic construct
  misc_feature 1..165: note = Description of artificial sequence: synthetic polynucleotide sequence
  source 1..165: mol_type = other DNA
ggagctatcaatgtcacatataccacggttcctggaatgctgagtctgaagaaccaaacagtaggaaacctagcagagccagaagttgattttgtccctatcattggctttctgattttagaagaaggggaaacagcagcagccatcaacattaccattcttgag

SEQ ID NO: 6764 - DNA, 121 bp, synthetic construct
  misc_feature 1..121: note = Description of artificial sequence: synthetic polynucleotide sequence
  source 1..121: mol_type = other DNA
tgtaattttttcaggatgatgtaccagagctagaagaatatttcctggtgaatttaacttacgttggacttaccatggctgcttcaacttcatttcctcccagactaggtatgaggggttt

SEQ ID NO: 6765 - DNA, 121 bp, synthetic construct
  misc_feature 1..121: note = Description of artificial sequence: synthetic polynucleotide sequence
  source 1..121: mol_type = other DNA
tatgcttctatgttttttaagattcagaaggtttgactgcacaagttattattgatgccaatgatggggcccgaggtgtaattgaatggcaacaaagcaggtaaggccaaggctgcatgag

SEQ ID NO: 6766 - DNA, 140 bp, synthetic construct
  misc_feature 1..140: note = Description of artificial sequence: synthetic polynucleotide sequence
  source 1..140: mol_type = other DNA
ggtttgaagtaaatgaaacccatggaagtttaacattggtagcccagaggagcagagaacctcttggccatgtttccttatttgtgtatgctcagaatttggaagcacaagtggggctggattatatcttcaccccaatg

SEQ ID NO: 6767 - DNA, 143 bp, synthetic construct
  misc_feature 1..143: note = Description of artificial sequence: synthetic polynucleotide sequence
  source 1..143: mol_type = other DNA
gattcttcattttgctgatggagaaaggtataaaaatgtcaatatcatgattcttgatgatgacattccagaaggagatgaaaaatttcagctgattttaacaaatccttctcctggactagagctagggaaaaatacaatag

SEQ ID NO: 6768 - DNA, 264 bp, synthetic construct
  misc_feature 1..264: note = Description of artificial sequence: synthetic polynucleotide sequence
  source 1..264: mol_type = other DNA
gccttaattattgtccttgctaatgatgacggccctggagttctatcatttaacaacagtgagcactttttcctaagagagccaacagctctctacgtccaggagagtgttgcagtattgtacattgttcgggaacctgcacaaggattgtttggaacagtgacagttcagttcattgtgacagaagtgaattcctcaaatgaatctaaagatctgactccttccaaaggctatattgttttagaagaaggtgttcgattcaag

SEQ ID NO: 6769 - DNA, 177 bp, synthetic construct
  misc_feature 1..177: note = Description of artificial sequence: synthetic polynucleotide sequence
  source 1..177: mol_type = other DNA
ggccctacaaatatctgccatattagacacggaaccagaaatggatgagtattttgtttgcaccttgtttaatccaactggaggtgctagactaggggtgcatgttcaaaccctgataacagttttgcaaaaccaggcccctttggggctattcagtatctctgcagttgaaaatag

SEQ ID NO: 6770 - DNA, 121 bp, synthetic construct
  misc_feature 1..121: note = Description of artificial sequence: synthetic polynucleotide sequence
  source 1..121: mol_type = other DNA
ccacctccatagacatcgaagaagccaataggaccgtgtatttaaatgtatctcgaactaatggcattgatttggctgtgagtgtgcagtgggagacagtatctgaaacagcctttggcat

SEQ ID NO: 6771 - DNA, 159 bp, synthetic construct
  misc_feature 1..159: note = Description of artificial sequence: synthetic polynucleotide sequence
  source 1..159: mol_type = other DNA
gggggaatggatgttgtgttttccgtatttcaaagttttttggatgaatcagcttctggctggtgtttctttactttggaaaatttaatatatggtataatgttaagaaaatcatctgttactgtttaccgatggcaggggatttttattccagttgag

SEQ ID NO: 6772 - DNA, 148 bp, synthetic construct
  misc_feature 1..148: note = Description of artificial sequence: synthetic polynucleotide sequence
  source 1..148: mol_type = other DNA
ggatttaaatatagaaaatcctaaaacttgtgaggcctttaatattggtttttctccctactttgtgattactcatgaagaaagaaatgaagaaaagccttctcttaacagtgtgtttacattcacatctggatttaaattattcctg

SEQ ID NO: 6773 - DNA, 121 bp, synthetic construct
  misc_feature 1..121: note = Description of artificial sequence: synthetic polynucleotide sequence
  source 1..121: mol_type = other DNA
cttgcaggtacaaacaatcattattctggaaagttctcaagtaagatattttacttcagacagccaagattatttaatcattgcaagtcaaagagatgattccgaattaactcaggtttga

SEQ ID NO: 6774 - DNA, 266 bp, synthetic construct
  misc_feature 1..266: note = Description of artificial sequence: synthetic polynucleotide sequence
  source 1..266: mol_type = other DNA
ggtcttcaggtggaatggaggaagcttcgtgttgcatcaaaaactccctgtccgaggtgtgctgaccgtggccttgttcaacaagggaggctctgtgttcttagccatttcccaggctaatgccaggctaaactcccttttattcagatggtctggcagtgggtttattaactttcaagaggtgcctgtcagtgggacaacagaagttgaggctttgtcttcagccaatgatatttacctaatatttgccgaaaatgtctttctag

SEQ ID NO: 6775 - DNA, 121 bp, synthetic construct
  misc_feature 1..121: note = Description of artificial sequence: synthetic polynucleotide sequence
  source 1..121: mol_type = other DNA
agatcagaattcaattgatattttcatctgggagatgggacagtcttccttcaggtattttcagtctgtagattttgctgctgttaacagaatccactccttcacaccagcctcaggaata

SEQ ID NO: 6776 - DNA, 221 bp, synthetic construct
  misc_feature 1..221: note = Description of artificial sequence: synthetic polynucleotide sequence
  source 1..221: mol_type = other DNA
gcccacatacttcttattggccaagatatgtctgctctttactgctggaattcggagcgtaatcaattctcttttgttctggaagtaccttctgcttatgatgtggcttctgttacagtaaagtcccttaattcaagcaagaatttaatagctctagtgggagctcattcacatatatatgagctagcctacatttccagccattctgactttattcctag

SEQ ID NO: 6777 - DNA, 206 bp, synthetic construct
  misc_feature 1..206: note = Description of artificial sequence: synthetic polynucleotide sequence
  source 1..206: mol_type = other DNA
gttcaggtgaactgatatttgaacctggtgagagagaagctacaatagcagtaaatatccttgatgatacagttccagaaaaagaagaatccttcaaagttcaacttaaaaatcccaaaggaggagcagagattggcattaatgattctgtaacaataaccattctgtctaatgatgatgcctatggaattgttgcatttgctcag

SEQ ID NO: 6778 - DNA, 148 bp, synthetic construct
  misc_feature 1..148: note = Description of artificial sequence: synthetic polynucleotide sequence
  source 1..148: mol_type = other DNA
gaattcattatataagcaagtggaagaaatggagcaagatagcctagtaaccttgaacgttgaacgcttaaaaggaacatatggccgtataaccatagcatgggaagctgatggaagtattagtgatatatttcctacctcaggagtg

SEQ ID NO: 6779 - DNA, 257 bp, synthetic construct
  misc_feature 1..257: note = Description of artificial sequence: synthetic polynucleotide sequence
  source 1..257: mol_type = other DNA
gattttatttactgaaggccaggtactgtcaacaatcactctaactattcttgctgataatataccagagttatcagaggttgtgattgtaaccctcacccgtatcaccacagaaggggttgaggactcatacaaaggtgctactattgatcaggacagaagcaagtctgttataacaactttgcccaatgactcaccttttggcttggtgggctggcgtgctgcgtctgtcttcattagagtagcagagcctaaag

SEQ ID NO: 6780 - DNA, 204 bp, synthetic construct
  misc_feature 1..204: note = Description of artificial sequence: synthetic polynucleotide sequence
  source 1..204: mol_type = other DNA
gaaaacaccaccactcttcagttacaaatagctcgagataaaggactacttggggatattgccattcacttgagagctcaacccaatttcttactgcatgtcgataatcaagctactgagaatgaagattatgtattgcaagaaacaataataataatgaaagaaaacataaaagaagctcatgccgaagtttccattttgccg

SEQ ID NO: 6781 - DNA, 178 bp, synthetic construct
  misc_feature 1..178: note = Description of artificial sequence: synthetic polynucleotide sequence
  source 1..178: mol_type = other DNA
ggatgaccttcctgaattggaggaaggatttattgtcactatcactgaggtgaacctggtgaactctgacttctctacaggacagccaagtgtgcggaggcccggaatggaaatagctgagataatgatagaagaaaatgacgatcccagaggaatttttatgtttcatgttactaga

SEQ ID NO: 6782 - DNA, 184 bp, synthetic construct
  misc_feature 1..184: note = Description of artificial sequence: synthetic polynucleotide sequence
  source 1..184: mol_type = other DNA
gggcgctggggaagttattactgcctatgaggtgcctccacccttgaacgttcttcaagttcctgtagtccggctggctggaagctttggggcagtaaatgtttattggaaagcatcaccagacagtgctggcctggaagactttaaaccatctcatgggattcttgaatttgcagataaacag

SEQ ID NO: 6783 - DNA, 181 bp, synthetic construct
  misc_feature 1..181: note = Description of artificial sequence: synthetic polynucleotide sequence
  source 1..181: mol_type = other DNA
ggttactgcaatgatagaaatcaccataattgatgatgctgaatttgaattgacagagacgttcaatatttccttgatcagtgttgctggaggtggcagacttggtgatgatgttgtggtaactgttgttattccacaaaatgattctccatttggagtatttggatttgaagaaaagact

SEQ ID NO: 6784 - DNA, 166 bp, synthetic construct
  misc_feature 1..166: note = Description of artificial sequence: synthetic polynucleotide sequence
  source 1..166: mol_type = other DNA
ggtaatgattgatgaatccctttcatccgatgaccctgattcatatgtgacattgacggttgtccggtccccaggaggaaaaggaaccgtccgacttgagtggaccatagatgagaaggctaaacataaccttagtcctttgaatgggacccttcattttgatgag

SEQ ID NO: 6785 - DNA, 121 bp, synthetic construct
  misc_feature 1..121: note = Description of artificial sequence: synthetic polynucleotide sequence
  source 1..121: mol_type = other DNA
agactgagtcccagaagaccattgtgttgcacacacttcaagacacagtgttggaggaggacaggcgtttcaccattcagctgatatcaattgatgaggtagaaatatctccagtaaaagg

SEQ ID NO: 6786 - DNA, 121 bp, synthetic construct
  misc_feature 1..121: note = Description of artificial sequence: synthetic polynucleotide sequence
  source 1..121: mol_type = other DNA
tagtgcatcaataattattcggggtgataagcgagcatcaggagaagttgggatagctccgtcatctaggcacatcctcattggggaaccctcagcaaaatataatggtaccgctattatc

SEQ ID NO: 6787 - DNA, 140 bp, synthetic construct
  misc_feature 1..140: note = Description of artificial sequence: synthetic polynucleotide sequence
  source 1..140: mol_type = other DNA
gccttgttcgaggcccagggattttgggggaggtcacagtgttctggaggatattccctccttccgtgggggaatttgctgaaacatcaggaaaactgacaatgcgagacgaacagtctgcagtcattgtagtaatacag

SEQ ID NO: 6788 - DNA, 184 bp, synthetic construct
  misc_feature 1..184: note = Description of artificial sequence: synthetic polynucleotide sequence
  source 1..184: mol_type = other DNA
ggctttgaacgatgacattcccgaggaaaaaagcttctatgagtttcagctcactgcagtcagtgagggaggagttctgagtgaatccagcagcactgccaacatcacggtggtggccagcgactctccctatggccgatttgccttttcacatgagcaacttcgagtgtcagaagcacagagg

SEQ ID NO: 6789 - DNA, 234 bp, synthetic construct
  misc_feature 1..234: note = Description of artificial sequence: synthetic polynucleotide sequence
  source 1..234: mol_type = other DNA
ggttaacatcacaatcatccgttccagtggagattttggccatgtgcgactctggtacaagacgatgagcgggacagcggaagcaggcttggattttgttcctgcagcaggggagctcctctttgaagcaggggagatgaggaaaagtctgcatgttgaaatccttgatgatgactatcctgaaggcccagaggaattttctctaacaattacaaaggtggaactccagggaag

SEQ ID NO: 6790 - DNA, 150 bp, synthetic construct
  misc_feature 1..150: note = Description of artificial sequence: synthetic polynucleotide sequence
  source 1..150: mol_type = other DNA
gagggtatgattttaccattcaagaaaatggacttcagatagatcaacctcctgaaataggaaacatctccattgttcgcatcataataatgaaaaatgataacgcagaaggcatcattgaatttgacccaaagtatactgccttcgaag

SEQ ID NO: 6791 - DNA, 203 bp, synthetic construct
  misc_feature 1..203: note = Description of artificial sequence: synthetic polynucleotide sequence
  source 1..203: mol_type = other DNA
gtggaggaagatgttgggctgatcatgatcccagtggtgaggctacatggaacttatggctatgtgacagctgatttcatctctcagagctcctctgccagtcccggaggtgttgattacattttgcatggcagtacagtcacctttcagcatgggcaaaacttaagttttataaatatctccatcattgatgacaatgaaag

SEQ ID NO: 6792 - DNA, 221 bp, synthetic construct
  misc_feature 1..221: note = Description of artificial sequence: synthetic polynucleotide sequence
  source 1..221: mol_type = other DNA
gtgaatttgaggagcccattgaaattctactcactggagctactggaggagcggtccttgggcgccacctagtgagcagaatcataatagctaagagtgactctccctttggagttataaggtttctcaatcaaagcaaaatttctattgctaatcccaattccacaatgattttatcactggtgctggagcggactggaggactcttgggagagattcag

SEQ ID NO: 6793 - DNA, 241 bp, synthetic construct
  misc_feature 1..241: note = Description of artificial sequence: synthetic polynucleotide sequence
  source 1..241: mol_type = other DNA
ggtgaactgggagacagtaggacccaactctcaagaagccttactgccacagaatagagacattgcagacccagtgagcgggttgttctattttggagaaggagaaggaggagtgagaaccataattctgacaatctatcctcatgaagaaattgaagttgaagagacattcattattaaacttcatcttgtgaaaggagaagctaaattagactccagagctaaagatgttacattaacc

SEQ ID NO: 6794 - DNA, 151 bp, synthetic construct
  misc_feature 1..151: note = Description of artificial sequence: synthetic polynucleotide sequence
  source 1..151: mol_type = other DNA
gatacaagagtttggtgacccaaatggagttgttcagtttgctcctgaaactttgtctaagaagacttattcagagcctctggctctggaagggcccctgctcattaccttctttgtcagaagagtcaagggcacctttggagagattatg

SEQ ID NO: 6795 - DNA, 475 bp, synthetic construct
  misc_feature 1..475: note = Description of artificial sequence: synthetic polynucleotide sequence
  source 1..475: mol_type = other DNA
ggtttactgggaattaagtagtgagtttgacattactgaagactttctttccaccagtggatttttcaccattgctgatggagagagtgaagctagctttgatgttcatttgctaccagatgaggtacctgagatagaggaagattatgtgatccagcttgtttctgtagagggaggagccgaactggatctggagaagagtatcacatggttctctgtttatgcaaatgatgacccacatggagtatttgccctgtattcggatcgccagtcaatacttattgggcagaaccttattagatccatccaaattaacataacccggcttgctggaacatttggagatgtggctgttgggcttcgaatatcatcggatcataaagaacagccgattgttaccgaaaatgcagagaggcagctggtggtcaaagatggtgccacatataaagtggacgtggtgccaataaagaatcag

SEQ ID NO: 6796 - DNA, 145 bp, synthetic construct
  misc_feature 1..145: note = Description of artificial sequence: synthetic polynucleotide sequence
  source 1..145: mol_type = other DNA
ggtcttcctatcactgggctctaatttcactttgcaactggtgactgtgatgcttgtcggtggacgtttctatggaatgccaacaattcttcaggaagcaaaatctgctgtccttccagtctctgagaaagctgccaattctcag

SEQ ID NO: 6797 - DNA, 176 bp, synthetic construct
  misc_feature 1..176: note = Description of artificial sequence: synthetic polynucleotide sequence
  source 1..176: mol_type = other DNA
ggtcggatttgaatccactgcttttcaactcatgaacatcactgctggcacaagccacgttatgatttctaggagaggcacatatggagctctctcggttgcctggaccactggatatgctcctgggttagaaattcctgaattcattgttgttggcaacatgaccccaacactgg

SEQ ID NO: 6798 - DNA, 137 bp, synthetic construct
  misc_feature 1..137: note = Description of artificial sequence: synthetic polynucleotide sequence
  source 1..137: mol_type = other DNA
gggagcctttcattttcccacggtgaacaaaggaaaggagttttcctgtggacgtttcctagccctggttggccagaggcctttgttcttcacctatcaggagtgcagagcagtgctcctggcggagctcaactccg

SEQ ID NO: 6799 - DNA, 328 bp, synthetic construct
  misc_feature 1..328: note = Description of artificial sequence: synthetic polynucleotide sequence
  source 1..328: mol_type = other DNA
gatcaggtttcattgttgctgaaattgaaccaatgggcgtcttccaattttccactagctcaagaaatatcatagtgtcagaagatacacagatgatcagattacatgtacaaagactatttgggttccacagcgatcttattaaagtttcttatcagaccactgcaggaagcgccaagccactggaagattttgagcctgttcagaatggggaactgttttttcaaaaattccaaactgaggttgattttgaaataaccattattaatgatcagctttctgagatagaagaatttttttacattaaccttacttcagtagaaattag

SEQ ID NO: 6800 - DNA, 438 bp, synthetic construct
  misc_feature 1..438: note = Description of artificial sequence: synthetic polynucleotide sequence
  source 1..438: mol_type = other DNA
gggattacaaaagtttgatgttaattggagcccacgcctgaatctagatttcagtgttgcagtgattacaatattggataatgatgacctggcaggaatggatatttccttccccgagacaactgtggctgtagcagttgacacaactctcattcctgtagaaactgaatccaccacatacctcagcacaagcaagacgactaccattctgcagccaaccaacgtggttgccattgttactgaggcaactggtgtatctgccatccctgagaaacttgtcacccttcatggcacacctgctgtgtctgaaaagcctgatgtggccactgtaactgccaatgtttccattcatggaacattcagccttgggccatccattgtttatattgaagaggagatgaagaatggcacattcaacactgcagaagttcttatccg

SEQ ID NO: 6801 - DNA, 341 bp, synthetic construct
  misc_feature 1..341: note = Description of artificial sequence: synthetic polynucleotide sequence
  source 1..341: mol_type = other DNA
aagaactggtgggtttactggcaatgtcagcataacagttaaaactttcggtgaaagatgtgctcagatggaaccaaatgcattgccctttcgtggtatctatgggatttccaacctaacatgggcagttgaagaagaagactttgaagaacaaactcttacccttatattcctagatggagaaagagaacgtaaagtatcagttcaaattttggatgatgatgagcctgaggggcaggaattcttctacgtgtttctcacaaaccctcaagggggagcacagattgtggaggagaaggatgatactggatttgcagcttttgccatggttattattacag

SEQ ID NO: 6802 - DNA, 121 bp, synthetic construct
  misc_feature 1..121: note = Description of artificial sequence: synthetic polynucleotide sequence
  source 1..121: mol_type = other DNA
agggagtgaccttcacaatggcatcataggattcagtgaggagtcccagagtggactagaactcagggaaggagctgttatgagaagattgcaccttattgtcacaagacagccaaacagg

SEQ ID NO: 6803 - DNA, 173 bp, synthetic construct
  misc_feature 1..173: note = Description of artificial sequence: synthetic polynucleotide sequence
  source 1..173: mol_type = other DNA
gggcctttgaagatgtcaaggtcttttggcgagtcacacttaacaaaacagtcgtcgtgctccagaaggatggggtaaacctggtggaggaacttcagtctgtgtcagggaccacaacctgtacaatgggtcaaacaaaatgctttatcagcattgaactcaaaccagaaaag

SEQ ID NO: 6804 - DNA, 121 bp, synthetic construct
  misc_feature 1..121: note = Description of artificial sequence: synthetic polynucleotide sequence
  source 1..121: mol_type = other DNA
ggtaccacaggttgaagtgtatttttttgtggaactatatgaagctactgctggagcagcaataaacaacagtgccagattcgcacagattaaaatcttagaaagtgatgaatctcaaagc

SEQ ID NO: 6805 - DNA, 121 bp, synthetic construct
  misc_feature 1..121: note = Description of artificial sequence: synthetic polynucleotide sequence
  source 1..121: mol_type = other DNA
tgtgtatttttctgtgggttctcggctggcagtggctcacaagaaggccactttaatcagtctgcaggtggccagagattctgggacaggactaatgatgtctgttaactttagtacccag

SEQ ID NO: 6806 - DNA, 409 bp, synthetic construct
  misc_feature 1..409: note = Description of artificial sequence: synthetic polynucleotide sequence
  source 1..409: mol_type = other DNA
ggagttgaggagtgctgaaacaattggtcgtaccatcatatctccagctatttctggaaaggattttgtgataactgaaggcacattggtctttgaacctggccagagaagcactgtattggatgtcatcctaacgccagagacaggatctttaaattcatttcctaaacgcttccagattgtcctttttgacccaaaaggtggtgccagaattgataaagtgtatgggactgccaacatcactcttgtctcagatgcagattcgcaggccatttgggggcttgcagatcagctacatcagcctgtgaatgatgatattctcaacagagtgctccataccatcagcatgaaagtggccacagaaaacacagatgaacaactcagtgccatgatgcatttaatagaaaag

SEQ ID NO: 6807 - DNA, 186 bp, synthetic construct
  misc_feature 1..186: note = Description of artificial sequence: synthetic polynucleotide sequence
  source 1..186: mol_type = other DNA
gataactactgaaggaaaaattcaagctttcagtgttgccagccgaactcttttctatgagattctttgttctcttattaacccaaagcgcaaggacactaggggattcagtcactttgctgaagtgactgagaattttgccttttctctgctgactaatgttacttgcggctctcctggtgaaaa

SEQ ID NO: 6808 - DNA, 121 bp, synthetic construct
  misc_feature 1..121: note = Description of artificial sequence: synthetic polynucleotide sequence
  source 1..121: mol_type = other DNA
gaagcaaaaccatccttgatagttgcccatatttgtcaatattggctcttcactggtatcctcagcaaatcaatggacacaagtttgaaggaaaggaaggagattacattcgaattccaga

SEQ ID NO: 6809 - DNA, 121 bp, synthetic construct
  misc_feature 1..121: note = Description of artificial sequence: synthetic polynucleotide sequence
  source 1..121: mol_type = other DNA
ggatgtccaggatgcagaaataatggctgggaaaagtacatgtaaattagtccagtttacagagtatagcagccaacagtggtttataagtggaaacaatcttcctaccctaaaaaataag

SEQ ID NO: 6810 - DNA, 141 bp, synthetic construct
  misc_feature 1..141: note = Description of artificial sequence: synthetic polynucleotide sequence
  source 1..141: mol_type = other DNA
ggtattatctttgagtgtgaaaggtcagagttcacaactcctgactaatgacaatgaggttctctacaggatttatgctgctgagcctagaattattcctcagacatctctgtgtctcctttggaatcaggctgctgcaag

SEQ ID NO: 6811 - DNA, 162 bp, synthetic construct
  misc_feature 1..162: note = Description of artificial sequence: synthetic polynucleotide sequence
  source 1..162: mol_type = other DNA
gctggttgtctgacagtcagttttgcaaagtggttgaggaaactgcagactatgtggaatgtgcctgttcacacatgtctgtgtatgctgtctatgctcggactgacaacttgtcttcatacaatgaagccttcttcacttctggatttatatgtatctcag

SEQ ID NO: 6812 - DNA, 121 bp, synthetic construct
  misc_feature 1..121: note = Description of artificial sequence: synthetic polynucleotide sequence
  source 1..121: mol_type = other DNA
gttcctacaggtctttgcttggctgttctttcccatatcttctgtgccaggtactccatgtttgcagctaaacttctgactcacatgatggcagccagcttaggtacacaggtaggagagc

SEQ ID NO: 6813 - DNA, 121 bp, synthetic construct
  misc_feature 1..121: note = Description of artificial sequence: synthetic polynucleotide sequence
  source 1..121: mol_type = other DNA
agattctgtttctggcgtctgcatacgcaagtccccaactcgctgaggagagctgttcagctatggctgctgtcacacattacctgtatctttgccagtttagctggatgctcattcaggt

SEQ ID NO: 6814 - DNA, 180 bp, synthetic construct
  misc_feature 1..180: note = Description of artificial sequence: synthetic polynucleotide sequence
  source 1..180: mol_type = other DNA
gtctgtgaatttctggtacgtgctggtgatgaatgatgagcacacagagaggcgatatctgctgtttttccttctgagttggggactaccagcttttgtggtgattctcctcatagttattttgaaaggaatctatcatcagagcatgtcacagatctatggactcattcatggtgacct

SEQ ID NO: 6815 - DNA, 159 bp, synthetic construct
  misc_feature 1..159: note = Description of artificial sequence: synthetic polynucleotide sequence
  source 1..159: mol_type = other DNA
ggtgttttattccaaacgtctatgctgctttgttcactgcagctcttgttcctttgacgtgcctcgtggtggtgttcgtggtgttcatccatgcctaccaggtgaagccacagtggaaagcatatgatgatgtcttcagaggaaggacaaatgctgcag

SEQ ID NO: 6816 - DNA, 121 bp, synthetic construct
  misc_feature 1..121: note = Description of artificial sequence: synthetic polynucleotide sequence
  source 1..121: mol_type = other DNA
aaattccactgattttatatctctttgctctgatttccgtgacatggctttggggaggactacacatggcctacagacacttctggatgttggttctctttgtcattttcaacagtctgca

SEQ ID NO: 6817 - DNA, 193 bp, synthetic construct
  misc_feature 1..193: note = Description of artificial sequence: synthetic polynucleotide sequence
  source 1..193: mol_type = other DNA
gggactttatgttttcatggtttatttcattttacacaaccaaatgtgttgccctatgaaggccagttacactgtggaaatgaatgggcatcctggacccagcacagcctttttcacgcccgggagtggaatgcctcctgctggaggggaaatcagcaagtccacccagaatctcatcggtgctatggaggag

SEQ ID NO: 6818 - DNA, 179 bp, synthetic construct
  misc_feature 1..179: note = Description of artificial sequence: synthetic polynucleotide sequence
  source 1..179: mol_type = other DNA
ggtgccacctgactgggagagagcatccttccaacagggcagtcaggccagccctgatttaaagccaagtccacaaaatggagccacgttcccgtcctctggaggatatggccaggggtcactgatagccgatgaggagtcccaggagtttgatgatttaatatttgcattaaaaactg

SEQ ID NO: 6819 - DNA, 121 bp, synthetic construct
  misc_feature 1..121: note = Description of artificial sequence: synthetic polynucleotide sequence
  source 1..121: mol_type = other DNA
ggtgctggtctcagtgtcagtgataatgaatctggtcaaggcagccaggaggggggcaccttgactgactcccagatcgtggagctcaggaggatacccatcgccgacactcacctgtagc

SEQ ID NO: 6820 - DNA, 121 bp, synthetic construct
  misc_feature 1..121: note = Description of artificial sequence: synthetic polynucleotide sequence
  source 1..121: mol_type = other DNA
gagaggtctatacactttgacggattgacattgctagttttttggttctagcttaggaacagtgtgatcctggcagcagctttaagatagcacatctcaactttcagaacaacatgattta

SEQ ID NO: 6821 - DNA, 121 bp, synthetic construct
  misc_feature 1..121: note = Description of artificial sequence: synthetic polynucleotide sequence
  source 1..121: mol_type = other DNA
ggagttttcatgtggaccttactgtctgaatagaacagggccatgatggtgactaaggcttaaattccaagtctctttctagaaatttgtatttcttgaagtgtttttcctaagaacattt

SEQ ID NO: 6822 - DNA, 121 bp, synthetic construct
  misc_feature 1..121: note = Description of artificial sequence: synthetic polynucleotide sequence
  source 1..121: mol_type = other DNA
ttgaaaaggcactggtattagagcagctgcccctttcttcaagtgacttctgcagggagtttgctattataaattacaaatctatgatgcacaacctaaaccagagaatgcatgaccctgt

SEQ ID NO: 6823 - DNA, 121 bp, synthetic construct
  misc_feature 1..121: note = Description of artificial sequence: synthetic polynucleotide sequence
  source 1..121: mol_type = other DNA
tacaggttatggataaggcaaaaaatgttcagtggaaaaaagcacatactttaaaattgattgcttctggattcaagtcctcactctctcacttattagatgtgtgaccttaagaaaatgt

SEQ ID NO: 6824 - DNA, 121 bp, synthetic construct
  misc_feature 1..121: note = Description of artificial sequence: synthetic polynucleotide sequence
  source 1..121: mol_type = other DNA
gaaaattaaagtagatgtagacttctgtcctaccctttgttcttttctctttgatgtaaaagtctttgatcaagcaagacattaggtctaaaaccttttagtgaggatagaaaaaaaaaca

SEQ ID NO: 6825 - DNA, 121 bp, synthetic construct
  misc_feature 1..121: note = Description of artificial sequence: synthetic polynucleotide sequence
  source 1..121: mol_type = other DNA
aaataggacaattttatactgaagtggtttttataaaaggtctctgccagaactaaggattttcctggaaatgatttgtaaaaggctttgcataaagacatactgcaaataaggccacgaa

SEQ ID NO: 6826 - DNA, 121 bp, synthetic construct
  misc_feature 1..121: note = Description of artificial sequence: synthetic polynucleotide sequence
  source 1..121: mol_type = other DNA
gcaactgtctattgtggatctcatattaattagaatcctatgtggtaattcatgaacctttctttaccatacctgctcagtgctcattgtccttaatctaattgttttctccctcttaaaa

SEQ ID NO: 6827 - DNA, 121 bp, synthetic construct
  misc_feature 1..121: note = Description of artificial sequence: synthetic polynucleotide sequence
  source 1..121: mol_type = other DNA
aagacactactctcttacagatatttagaacaatgctagtgagtattgcaggcaaaaaccaggtggattgattcataaagctttattttgaattatagaagtcctttggaatacatggtgg

SEQ ID NO: 6828 - DNA, 121 bp, synthetic construct
  misc_feature 1..121: note = Description of artificial sequence: synthetic polynucleotide sequence
  source 1..121: mol_type = other DNA
taatttaggttacagagtttttgttagtaggtttacagcaagaccaaaagtggtttttgcgtacattgaaaaatattgtaggatggagatgaagtttcaaatacttagttaaaaatgggct

SEQ ID NO: 6829 - DNA, 121 bp, synthetic construct
  misc_feature 1..121: note = Description of artificial sequence: synthetic polynucleotide sequence
  source 1..121: mol_type = other DNA
ataaatagataaataaaggaatttaaatgtttcactacaaaaaaaagctaaacacaaaacagaataataatgcaggaaatgagagacaaaaaagctataacacatatggaaaagaaatcat

SEQ ID NO: 6830 - DNA, 121 bp, synthetic construct
  misc_feature 1..121: note = Description of artificial sequence: synthetic polynucleotide sequence
  source 1..121: mol_type = other DNA
caaggtagtctgatgcctacacatcgtccactttgagctccaccatggatcaagtagcaataatgattgtacctgcctctagcccaaaacaaatgtgtgcgtgaaaaagtcagagattgat

SEQ ID NO: 6831 - DNA, 121 bp, synthetic construct
  misc_feature 1..121: note = Description of artificial sequence: synthetic polynucleotide sequence
  source 1..121: mol_type = other DNA
tgataggcacgagtaaatatatctttagtcaactgtgttccatgtgttgacaatagtatgcttcatgctaaactccttttgaaaatcttccacacccttgcttctgttcactgctggtagc

SEQ ID NO: 6832 - DNA, 121 bp, synthetic construct
  misc_feature 1..121: note = Description of artificial sequence: synthetic polynucleotide sequence
  source 1..121: mol_type = other DNA
ctcctgagccaagaggagagggagagggagagagagagagagagactctatcaaataaaagcctgttgggatttacaaggaaacactcgcttgggagctcaattaataataaaatgtgatg

SEQ ID NO: 6833 - DNA, 121 bp, synthetic construct
  misc_feature 1..121: note = Description of artificial sequence: synthetic polynucleotide sequence
  source 1..121: mol_type = other DNA
gagaggtaccttgaaaaaattgatgtctttccattcgaaacataaggtcaacaaatgaagatgagtgggaacatagactctgactggggtcacaaaatattcctttaaaatgagggataaa

SEQ ID NO: 6834 - DNA, 121 bp, synthetic construct
  misc_feature 1..121: note = Description of artificial sequence: synthetic polynucleotide sequence
  source 1..121: mol_type = other DNA
tttcttcaagaaacttcctaggaaatgtgaaaggaaaggaaagcaaataggagacaaatgtaaccctgtagattttcattccaaagctgtagaaagtttcatatatttccaggtcttgtat

SEQ ID NO: 6835 - DNA, 121 bp, synthetic construct
  misc_feature 1..121: note = Description of artificial sequence: synthetic polynucleotide sequence
  source 1..121: mol_type = other DNA
tcatttcagcattaactcaaaagtcccaagtctcatttggagatgatttccttctgcctataagtctatgaagtcaaaacaagttatttgctttcaagatataatgggggtactgtcacat

SEQ ID NO: 6836 - DNA, 121 bp, synthetic construct
  misc_feature 1..121: note = Description of artificial sequence: synthetic polynucleotide sequence
  source 1..121: mol_type = other DNA
agcaccctaatccgaagtgtgttttaaggtattctggcggcagaatcaaactacagaatgacccattaggacactactctctgggttctgagggtcagtgcgatggaaaggaatggaaggg

SEQ ID NO: 6837 - DNA, 121 bp, synthetic construct
  misc_feature 1..121: note = Description of artificial sequence: synthetic polynucleotide sequence
  source 1..121: mol_type = other DNA
agaaactgctcaaactgctcaatttgctcttactaagcacccacatctataggaaacccgtcgggagggaactcagtctaagagagctgttaggattatcaactgtcctgatttgcctggg

SEQ ID NO: 6838 - DNA, 121 bp, synthetic construct
  misc_feature 1..121: note = Description of artificial sequence: synthetic polynucleotide sequence
  source 1..121: mol_type = other DNA
aataaaaaattccagtgggcagggcccctcaggagctgaagtcatatcagaaagtggtagtgactgctgagtctcaatgagatgccaagtgccagccaatgctgcttctgcatttgtgtgc

SEQ ID NO: 6839 - DNA, 121 bp, synthetic construct
  misc_feature 1..121: note = Description of artificial sequence: synthetic polynucleotide sequence
  source 1..121: mol_type = other DNA
aggcttaggacacatccatgaataaaatagacaaaaagtcttgaccttgtgaggcttacattctagcaggagtgatagaggactaaaaatgtagatattataaataataaatgagtatact

SEQ ID NO: 6840 - DNA, 121 bp, synthetic construct
  misc_feature 1..121: note = Description of artificial sequence: synthetic polynucleotide sequence
  source 1..121: mol_type = other DNA
ataagtttgagaaccagacccctacattttcttaatttaggctgagaggttgaaaaatgatcatattagaataagtaaactggatacaattaattgtaaagtaaaacaatttttttttttt

SEQ ID NO: 6841 - DNA, 121 bp, synthetic construct
  misc_feature 1..121: note = Description of artificial sequence: synthetic polynucleotide sequence
  source 1..121: mol_type = other DNA
tgatgtaatctcccagtaaagaatctgcaaccacagatacctcaaaggtacaaggttgttacagtcagaacgacttataggcagtacccagtaaatacgtaaaaatcataggttgtcacca

SEQ ID NO: 6842 - DNA, 121 bp, synthetic construct
  misc_feature 1..121: note = Description of artificial sequence: synthetic polynucleotide sequence
  source 1..121: mol_type = other DNA
aatatccacagacacagagttctagttctatagagaaatctttaattcagccaacaaagttcatagaaggcttccccaaagtggaaatgtttgacctgattcactgtatgacagagtaaaa

SEQ ID NO: 6843 - DNA, 121 bp, synthetic construct
  misc_feature 1..121: note = Description of artificial sequence: synthetic polynucleotide sequence
  source 1..121: mol_type = other DNA
ttttctcctacttgcactctgtaattccattattgccctaatgaagcctatttttttcattgtacagccagagtgatgtttttttaaatgtatagcattttgtttcttcctttcagctctt

SEQ ID NO: 6844 - DNA, 121 bp, synthetic construct
  misc_feature 1..121: note = Description of artificial sequence: synthetic polynucleotide sequence
  source 1..121: mol_type = other DNA
caatagtattgtctaggtttgctaccttcaattcctcttctcccattttgtctcgaatacacgccaggtaggctttaaccctcacaactctactgaaacagctcttgtcagggtcactggg

SEQ ID NO: 6845 - DNA, 121 bp, synthetic construct
  misc_feature 1..121: note = Description of artificial sequence: synthetic polynucleotide sequence
  source 1..121: mol_type = other DNA
gtataaagcgcttccccatgtgatccagtcacatgacaatgtacatgtccaatcttgttattctctgcaaaagaaaagcaaaccttagcacacggttctatcaacattttgtttgtttgtt

SEQ ID NO: 6846 - DNA, 121 bp, synthetic construct
  misc_feature 1..121: note = Description of artificial sequence: synthetic polynucleotide sequence
  source 1..121: mol_type = other DNA
aaaatgtagaggatatttaccttctttgtccaggaaacattccagatgcagatgcctgggcagccacctgctgagaggcaacaagggcagcagaggtcaagcctaatggggaaaaaatgta

SEQ ID NO: 6847 - DNA, 155 bp, synthetic construct
  misc_feature 1..155: note = Description of artificial sequence: synthetic polynucleotide sequence
  source 1..155: mol_type = other DNA
ccttgaaaagggtcatattgacccgggattagcgggtaacccatgccaacgtgggtgtggtggtgcgtgtgcaggtgccgctggccgaagggggagtggcgatccctttccctttctgcctcccgttcccgctcagctgtagccttttccacagg

SEQ ID NO: 6848 - DNA, 174 bp, synthetic construct
  misc_feature 1..174: note = Description of artificial sequence: synthetic polynucleotide sequence
  source 1..174: mol_type = other DNA
cagcaggagacttgctgcggtattggttagcatgctgctggagcaaatccagtgctttagattcagtggttgttttcgtgttgacgctagggctggtattgactttctctgtctcttctctccctgacatcttcccataaacaggataatgaaatcctggagagagatatgccc

SEQ ID NO: 6849 - DNA, 419 bp, synthetic construct
  misc_feature 1..419: note = Description of artificial sequence: synthetic polynucleotide sequence
  source 1..419: mol_type = other DNA
ccaggataactgtgcattaggacgggagaaacagcccggtatgcaggatggctggggtcgtacatctgtgggtaaggataagcatgcaagtactgtatgtatgactgatgctgactcatgggtgaggagacagccactcttgttccccgagagtccttccagttcacaggagtctttcgatcatcatttttcagcttgctctcctccattgattgagaatcaggatgcttggcctctttgggctcctctttaatgcttgttaacgatacaggaaggctgggcacaccactctctttattaggagttttcctcggactatcctcttttaatttcttctctctatcaagttcttctgacttttgctgatccagatatttgggctggtatacataatgatgccatgttcttgaatctgggtc

SEQ ID NO: 6850 - DNA, 235 bp, synthetic construct
  misc_feature 1..235: note = Description of artificial sequence: synthetic polynucleotide sequence
  source 1..235: mol_type = other DNA
cttgtttaaatctcgaggttgggtctacacctgtctgcttcatagagtccatgacagacttcatttctacagcctccttaataagctggtggttttccatctgcttagctttgaagctgtcggcctgaagctgctgctggtgattggagagaagctgcgatttacctgtctcctcagttttattaggcactgatggccctagtttagaatggtttttgttaggctccggagtaga

SEQ ID NO: 6851 - DNA, 466 bp, synthetic construct
  misc_feature 1..466: note = Description of artificial sequence: synthetic polynucleotide sequence
  source 1..466: mol_type = other DNA
gggagcttttgagattgtggccgatggcatatttttctgtttagtttcctccttgcccagctctttcaaggggagctcacttttcctttcacagtctcctctcccagtctgggccattttctgctctgccagcctctggtcctcatagtacttctcatactgctgtctataggcagggctggtggccatcagagacttctggtccatatagagcccatatgcatactggccataataaagtgactgagccagggcaggatgtctttgtgtgatcaccgactggtgctgaggctgtaaggatgcagaattgtggtccactttcttagaatctaactgctctgccttgtctttcttttcagcatcttcctcagactccttcttgatcttcattccctgcgtgctcccactatttccagctgcaggggcaccgacctgcccagggtgcatgtaacttggagaataataa

SEQ ID NO: 6852 - DNA, 467 bp, synthetic construct
  misc_feature 1..467: note = Description of artificial sequence: synthetic polynucleotide sequence
  source 1..467: mol_type = other DNA
ggatcatagctgtggtaatagggagaatgggactctttcagttgagatgattgtgctgtagttgaagaatgcccttttacaacactgtccttactagaaataatatctgatggggaactggcctttgatctcataccctccgacctgctgtcagaaccaccatcgtcagcagcatcagatatgtctgaataggccgggctgcttgtctttgcagctgaactctctgccccattctgggtcaacacatgcagaggtgccattggtgcctgcccgttcaccaaagtgctgcattccagcctcgaggcgctccctatggaagggctgggagcgttgtctgtgaaagtgtaaaccttatcggcctcagctttgatactggccatgcggctctcctgagactccgacagtccatttgccagcccttcattcttgttgagatgatcctttaaaaaatgcccaggtaaatcttt

SEQ ID NO: 6853 - DNA, 466 bp, synthetic construct
  misc_feature 1..466: note = Description of artificial sequence: synthetic polynucleotide sequence
  source 1..466: mol_type = other DNA
gctggcccccttggagtcctctagtttccccagcttggcatccatttttgggcttcccgtctctttcccttctttgtcctttagctttcgcttctcctttttctttttgtctttgagtgacaccagagctgggttcacggtgatgggctctcccataattgtgggctttggttgaatgggttttaacggaggactctttggtgtagcctgaacaacagttgttgtgagggagggcagtccgggtattgtcccagtggtggtcgttgtaaaggttgcagtgggtatagcgattagctgcgggggagtgggggctggggcaggggcaatgggccgggcacttttcagtttagagaggtttttgtccgttttgcagttggtagcttttttgcccttttctttatctcctaaatttttcttgtcaattaatccttctgcttccagtttaggcatctcagcagccaaactg

SEQ ID NO: 6854 - DNA, 468 bp, synthetic construct
  misc_feature 1..468: note = Description of artificial sequence: synthetic polynucleotide sequence
  source 1..468: mol_type = other DNA
ccgtctgctgccgagcaactgtctaacgcagccgtcatgttggagattactggaaggttgttcagttcattgttaaggcccttctttttgccagaattcttcccagctttagcaccaataatggaacctgggccattgctcatcagctctctctttccctttggggtcccaggtgggtttccagcaccaggggatgccggtgccttcaactggtcataagcagatacacttgtgcttggctcactgcattcaagtgccacattactcaatccttcctcacagtccgagatcttgtcctcactgtcaggctcgaactccagcttgttttctgggtctaagtgtgcatgagcctggtggtacctcaggccgttaatgtgcttgtactttttgttgcagtttgggtggggacagtcgattaacactggagaagagcagccttggtccaaaaaagtagtctctggtttccct

SEQ ID NO: 6855 - DNA, 354 bp, synthetic construct
  misc_feature 1..354: note = Description of artificial sequence: synthetic polynucleotide sequence
  source 1..354: mol_type = other DNA
tgaggggtagtgggagtgcttctggaatttgtgcggacacgctttccaggcttattgtcctcagagctggagttcaggtccagctccattggaggcttgtttttccttttgttggtggaggaagggctggctttgatatcctcagcagcacaatttgggggtgtccttcgtccgctggcattgaggctgccccgcctccctttcccattggccccccctctgttcttattctgcagccctctggactctgtgaagctggcctcggagcccggggcagcagcagcagacctcgctctcttccctctgccccggccccctctcatctccaggtcacttgtcggtgactcacaaaac

SEQ ID NO: 6856 - DNA, 121 bp, synthetic construct
  misc_feature 1..121: note = Description of artificial sequence: synthetic polynucleotide sequence
  source 1..121: mol_type = other DNA
aaaggccctgttcatacctgggaggggcccagtcgtgcttggtgcagtccagtagggttcccacgtacgttttgttcctccacgtgacattgaccactaggacacctgcaggaggcagggg

SEQ ID NO: 6857 - DNA, 257 bp, synthetic construct
  misc_feature 1..257: note = Description of artificial sequence: synthetic polynucleotide sequence
  source 1..257: mol_type = other DNA
ccttcttctgtttcatgccacacgatcccttccaaattcacactggtcccaggttcacagggcccaagacactctggctctgtcactactccaacttcacatgtattgacacccacagaacgagtccgaaccaaaagctgttcaaccggtgctgcaatattggatgaagatggggaaaagtaggagggtagaatctgaggcgtgagactgctggaaatcggcggtggtggcgctggcactgtaaacagggggtcaac

SEQ ID NO: 6858 - DNA, 449 bp, synthetic construct
  misc_feature 1..449: note = Description of artificial sequence: synthetic polynucleotide sequence
  source 1..449: mol_type = other DNA
ccttctcagttttcagtttcttgattcgcctgtggctctcctcctcctcctcttccttctttaccaacatagagtttcccatgagccctgaatccggggcacttttgctaacttcccctgcagcggcgacgctgccactcccagtgcccccgcagtggaaggggctcgcgccacctccattgctcttggccccaaagccatagaggtgccccccggaaggggcctggctgccactgccattctggtggccctgaagcaggtcgtgcttgtccttcctggatttccccgcatccttatcccgcttggcgcctcggctgctctggcttttacctggcttctcctctttgcttttcccacaggagcctgcccccgcggtggcggcagaggtgctggtgctggtactattgctgtttgggttgccgctgccgccgctgctcacactttgaccc

SEQ ID NO: 6859 - DNA, 458 bp, synthetic construct
  misc_feature 1..458: note = Description of artificial sequence: synthetic polynucleotide sequence
  source 1..458: mol_type = other DNA
agcgctgaattcatgccagttgcctctccagggcgcccttggacttcctgcctcttgccagtgctgctgatctcgggaatcccatacaaggcagcagaaggcagagatttattagcatccttagaagttttactccttttcacttttgatttgctggtctctttgtgtgaattcccctggggagcagaggcctgaacagaagcaaattttaggccatcagctaaggctgcggtagcaccagccccactggaggccggacctccacaatccttggagttgctgctactagtggtggtggtggaattattcatctcaaatttctgtctgtccttctccaaatcagcgtccaaatcaattattaaatttccaaccccgatttcccaatcatcgccactgtcataagtatcaactgtatttggatccacaccttttcctgcagtagaaatgttcactgacat

SEQ ID NO: 6860 - DNA, 121 bp, synthetic construct
  misc_feature 1..121: note = Description of artificial sequence: synthetic polynucleotide sequence
  source 1..121: mol_type = other DNA
ggcatgtggggacttctgggctgctgctaatttcttgatttaggggatggctatttcactttaggaaaatgcactgaactatatacttatgacacatacactgtagtgaattgaatgttgg

SEQ ID NO: 6861 - DNA, 121 bp, synthetic construct
  misc_feature 1..121: note = Description of artificial sequence: synthetic polynucleotide sequence
  source 1..121: mol_type = other DNA
tgaagacaggcacagaaggaacagagccatgagggcttggacacggtgacttggtatcagtgtgggtcaaaggtcatatggcacaccctgaaggatgtactgcagtcatttgccaggtaga

SEQ ID NO: 6862 - DNA, 121 bp, synthetic construct
  misc_feature 1..121: note = Description of artificial sequence: synthetic polynucleotide sequence
  source 1..121: mol_type = other DNA
tgtttgaaaagagagaaggtcaccatctagaagaatggaagagcaagtgaactaaggagttataattgggttgctgggtagtgccaaggatccacttagtactagtagtcatgaatttaga

SEQ ID NO: 6863 - DNA, 121 bp, synthetic construct
  misc_feature 1..121: note = Description of artificial sequence: synthetic polynucleotide sequence
  source 1..121: mol_type = other DNA
aaacaatcatggcttccctgtaggaatgcgaaggcctgtgacagagtcttgctcaaaatttatctcacagtggaaccaacatttcagttccctggtccctgagtgtggaattgtgatggat

SEQ ID NO: 6864 - DNA, 121 bp, synthetic construct
  misc_feature 1..121: note = Description of artificial sequence: synthetic polynucleotide sequence
  source 1..121: mol_type = other DNA
gccaaatgaggctctacctccatgctgtccctaggcaatatccctggccaatggctccttgaagcagtctggacttgtctgcctgccatccccaccccgaaggaagaacctggtgtttccc

SEQ ID NO: 6865 - DNA, 121 bp, synthetic construct
  misc_feature 1..121: note = Description of artificial sequence: synthetic polynucleotide sequence
  source 1..121: mol_type = other DNA
catgttgccccgtttgtcagagagtttttcagacagaggctgagttacaagaagtcatcagtgatttgcagtctaaactgcgacttgctccagataaactcaagtcaacagaatcagagct

SEQ ID NO: 6866 - DNA, 121 bp, synthetic construct
  misc_feature 1..121: note = Description of artificial sequence: synthetic polynucleotide sequence
  source 1..121: mol_type = other DNA
aggaaaagcggcgtgatgaaatgctgggacttgtgcccatgaggtaagaatgggatttaccttcactgtacatgtagcagcacattgtaaaaggtacccatctcatgcctgggcagatggt

SEQ ID NO: 6867 - DNA, 121 bp, synthetic construct
  misc_feature 1..121: note = Description of artificial sequence: synthetic polynucleotide sequence
  source 1..121: mol_type = other DNA
ctgatctgccctaggcttgactcctgtccccatatctcttgaggtcgtaacaatcagagttcaaggtcacctgcattgggcaaatactctcaaagcaaaagtctgctttagaacccaactt

SEQ ID NO: 6868 - DNA, 121 bp, synthetic construct
  misc_feature 1..121: note = Description of artificial sequence: synthetic polynucleotide sequence
  source 1..121: mol_type = other DNA
ggaaactccaccccggtggacacagaccattgggttggggacatatggtcagtgttcagtcaccctcctctgctgtgtgttaagctggggaagattccctaggggaggacaagggccagga

SEQ ID NO: 6869 - DNA, 121 bp, synthetic construct
  misc_feature 1..121: note = Description of artificial sequence: synthetic polynucleotide sequence
  source 1..121: mol_type = other DNA
ggtctcttcagatcatctatagccaagctataagacgacatctccagaggataggaaccatgtgtgcccagtcacttgtgtgcactgcacacccagcacaggtctgcacttggtagatcct

SEQ ID NO: 6870 - DNA, 135 bp, synthetic construct
  misc_feature 1..135: note = Description of artificial sequence: synthetic polynucleotide sequence
  source 1..135: mol_type = other DNA
catggcgctcttcgtgcggctgctggctctcgccctggctctggccctgggccccgccgcgaccctggcgggtcccgccaagtcgccctaccagctggtgctgcagcacagcaggctccggggccgccagcacgg

SEQ ID NO: 6871 - DNA, 121 bp, synthetic construct
  misc_feature 1..121: note = Description of artificial sequence: synthetic polynucleotide sequence
  source 1..121: mol_type = other DNA
tttgttttcagccccaacgtgtgtgctgtgcagaaggttattggcactaataggaagtacttcaccaactgcaagcagtggtaccaaaggaaaatctgtggcaaatcaacgtgagtatctg

SEQ ID NO: 6872 - DNA, 121 bp, synthetic construct
  misc_feature 1..121: note = Description of artificial sequence: synthetic polynucleotide sequence
  source 1..121: mol_type = other DNA
aacacaatgtatggttgtcttgttacagagtcatcagctacgagtgctgtcctggatatgaaaaggtccctggggagaagggctgtccagcaggtgaatgaatcctccgggccttgcctgt

SEQ ID NO: 6873 - DNA, 162 bp, synthetic construct
  misc_feature 1..162: note = Description of artificial sequence: synthetic polynucleotide sequence
  source 1..162: mol_type = other DNA
gccctaccactctcaaacctttacgagaccctgggagtcgttggatccaccaccactcagctgtacacggaccgcacggagaagctgaggcctgagatggaggggcccggcagcttcaccatcttcgcccctagcaacgaggcctgggcctccttgccagct

SEQ ID NO: 6874 - DNA, 166 bp, synthetic construct
  misc_feature 1..166: note = Description of artificial sequence: synthetic polynucleotide sequence
  source 1..166: mol_type = other DNA
ggaagtgctggactccctggtcagcaatgtcaacattgagctgctcaatgccctccgctaccatatggtgggcaggcgagtcctgactgatgagctgaaacacggcatgaccctcacctctatgtaccagaattccaacatccagatccaccactatcctaatggg

SEQ ID NO: 6875 - DNA, 148 bp, synthetic construct
  misc_feature 1..148: note = Description of artificial sequence: synthetic polynucleotide sequence
  source 1..148: mol_type = other DNA
gattgtaactgtgaactgtgcccggctgctgaaagccgaccaccatgcaaccaacggggtggtgcacctcatcgataaggtcatctccaccatcaccaacaacatccagcagatcattgagatcgaggacacctttgagacccttcgg

SEQ ID NO: 6876 - DNA, 143 bp, synthetic construct
  misc_feature 1..143: note = Description of artificial sequence: synthetic polynucleotide sequence
  source 1..143: mol_type = other DNA
ggctgctgtggctgcatcagggctcaacacgatgcttgaaggtaacggccagtacacgcttttggccccgaccaatgaggccttcgagaagatccctagtgagactttgaaccgtatcctgggcgacccagaagccctgagag

SEQ ID NO: 6877 - DNA, 214 bp, synthetic construct
  misc_feature 1..214: note = Description of artificial sequence: synthetic polynucleotide sequence
  source 1..214: mol_type = other DNA
gacctgctgaacaaccacatcttgaagtcagctatgtgtgctgaagccatcgttgcggggctgtctgtagagaccctggagggcacgacactggaggtgggctgcagcggggacatgctcactatcaacgggaaggcgatcatctccaataaagacatcctagccaccaacggggtgatccactacattgatgagctactcatcccagactcag

SEQ ID NO: 6878 - DNA, 139 bp, synthetic construct
  misc_feature 1..139: note = Description of artificial sequence: synthetic polynucleotide sequence
  source 1..139: mol_type = other DNA
gccaagacactatttgaattggctgcagagtctgatgtgtccacagccattgaccttttcagacaagccggcctcggcaatcatctctctggaagtgagcggttgaccctcctggctcccctgaattctgtattcaaag

SEQ ID NO: 6879 - DNA, 147 bp, synthetic construct
  misc_feature 1..147: note = Description of artificial sequence: synthetic polynucleotide sequence
  source 1..147: mol_type = other DNA
gatggaacccctccaattgatgcccatacaaggaatttgcttcggaaccacataattaaagaccagctggcctctaagtatctgtaccatggacagaccctggaaactctgggcggcaaaaaactgagagtttttgtttatcgtaat

SEQ ID NO: 6880 - DNA, 138 bp, synthetic construct
  misc_feature 1..138: note = Description of artificial sequence: synthetic polynucleotide sequence
  source 1..138: mol_type = other DNA
gagcctctgcattgagaacagctgcatcgcggcccacgacaagagggggaggtacgggaccctgttcacgatggaccgggtgctgacccccccaatggggactgtcatggatgtcctgaagggagacaatcgctttag

SEQ ID NO: 6881 - DNA, 121 bp, synthetic construct
  misc_feature 1..121: note = Description of artificial sequence: synthetic polynucleotide sequence
  source 1..121: mol_type = other DNA
tggtagctgccatccagtctgcaggactgacggagaccctcaaccgggaaggagtctacacagtctttgctcccacaaatgaagccttccgagccctgccaccaagagaacggagcagact

SEQ ID NO: 6882 - DNA, 121 bp, synthetic construct
  misc_feature 1..121: note = Description of artificial sequence: synthetic polynucleotide sequence
  source 1..121: mol_type = other DNA
gatgccaaggaacttgccaacatcctgaaataccacattggtgatgaaatcctggttagcggaggcatcggggccctggtgcggctaaagtctctccaaggtgacaagctggaagtcagct

SEQ ID NO: 6883 - DNA, 121 bp, synthetic construct
  misc_feature 1..121: note = Description of artificial sequence: synthetic polynucleotide sequence
  source 1..121: mol_type = other DNA
ttcttttagaaaaacaatgtggtgagtgtcaacaaggagcctgttgccgagcctgacatcatggccacaaatggcgtggtccatgtcatcaccaatgttctgcagcctccaggtaagtgtc

SEQ ID NO: 6884 - DNA, 121 bp, synthetic construct
  misc_feature 1..121: note = Description of artificial sequence: synthetic polynucleotide sequence
  source 1..121: mol_type = other DNA
tgccttttctttcctcttcagccaacagacctcaggaaagaggggatgaacttgcagactctgcgcttgagatcttcaaacaagcatcagcgttttccagggtaagatgcctgctaggttt

SEQ ID NO: 6885 - DNA, 121 bp, synthetic construct
  misc_feature 1..121: note = Description of artificial sequence: synthetic polynucleotide sequence
  source 1..121: mol_type = other DNA
caggtataactttcactagaaaacctgacaccttgtgttttctttcaggcttcccagaggtctgtgcgactaggtgagtctggtctgggtttgaagtcattgcagacctgtttaggcctta

SEQ ID NO: 6886 - DNA, 121 bp, synthetic construct
  misc_feature 1..121: note = Description of artificial sequence: synthetic polynucleotide sequence
  source 1..121: mol_type = other DNA
gatctgcacctatttgacgttaccaacttctctttttcagcccctgtctatcaaaagttattagagaggatgaagcattagcttgaagcactacaggaggaatgcaccacggcagctctcc

SEQ ID NO: 6887 - DNA, 121 bp, synthetic construct
  misc_feature 1..121: note = Description of artificial sequence: synthetic polynucleotide sequence
  source 1..121: mol_type = other DNA
tggcgcacagtgattccacagccccacacatgtctataccatccccaggagagctagaggaaagaagagccttttgactctgaatgtcctcctgggacaaccgccatttggtaaatcatct

SEQ ID NO: 6888 - DNA, 121 bp, synthetic construct
  misc_feature 1..121: note = Description of artificial sequence: synthetic polynucleotide sequence
  source 1..121: mol_type = other DNA
gcaacaggggtctgggtatgaatgccacagtgtggcagacaagtgagaactacaaagagtgtgtgtttatacataagagtagtacagatatgaccactaggagtataggagtctgttagtg

SEQ ID NO: 6889 - DNA, 121 bp, synthetic construct
  misc_feature 1..121: note = Description of artificial sequence: synthetic polynucleotide sequence
  source 1..121: mol_type = other DNA
catatacactcactggattcaaaaacaccattaaaatgtcatttacaaagaatagcaccttactaaaatgtttatgttgtgttgttacatgaaaaaagacgcgccaaatcatataaacagc

SEQ ID NO: 6890 - DNA, 121 bp, synthetic construct
  misc_feature 1..121: note = Description of artificial sequence: synthetic polynucleotide sequence
  source 1..121: mol_type = other DNA
cttatttttaagaaataaatttattttacttgtagttacttaaaccctagaaataattttttcaaacagtagaagtacagccttttataataagatagttcatgatttgttctttcgagga

SEQ ID NO: 6891 - DNA, 121 bp, synthetic construct
  misc_feature 1..121: note = Description of artificial sequence: synthetic polynucleotide sequence
  source 1..121: mol_type = other DNA
taataaggttcttctacaattggatggtgacaaagtttgggtttgttaggattatttttcagcagccaatcagctagccaaatctatgggaaaaaaaaaaacaacctaagttaagaaacag

SEQ ID NO: 6892 - DNA, 121 bp, synthetic construct
  misc_feature 1..121: note = Description of artificial sequence: synthetic polynucleotide sequence
  source 1..121: mol_type = other DNA
tgttccactactccttcaggcttgacaattcactagaacagctcgcagaactcaagtaaatgctacagttactgtgtctgacactaattctctcacaccagctgagggtcctatgattcaa

SEQ ID NO: 6893 - DNA, 121 bp, synthetic construct
  misc_feature 1..121: note = Description of artificial sequence: synthetic polynucleotide sequence
  source 1..121: mol_type = other DNA
ggaggagctggccctctcccactgtggccgcttcctggccagtagtggccatgaccagcgcctcaagttttgggacatggcccagctgcgagctgtggtggtggatgactaccgtcggcgc

SEQ ID NO: 6894 - DNA, 121 bp, synthetic construct
  misc_feature 1..121: note = Description of artificial sequence: synthetic polynucleotide sequence
  source 1..121: mol_type = other DNA
agggaggaccactgcgggctctgagcagcaagacttggagcaccgatgacttcttcgcaggactgagggaagagggagaagactccatggctcaggaagaaaaggaggagactggggatga

SEQ ID NO: 6895 - DNA, 121 bp, synthetic construct
  misc_feature 1..121: note = Description of artificial sequence: synthetic polynucleotide sequence
  source 1..121: mol_type = other DNA
atatagccataatattccatcattgaattccatggcattcactcaaatgtaactcacctgttttaacagtaccttaatttggcctgtatttattggacttggtgttctttttgctgtgaga

SEQ ID NO: 6896 - DNA, 121 bp, synthetic construct
  misc_feature 1..121: note = Description of artificial sequence: synthetic polynucleotide sequence
  source 1..121: mol_type = other DNA
ggaccctgtcccagagctaccactatgaggtgtgtgtgactggaggctccaggtcaaataagttcaaatttctgaaaccaattatccccaacttcctaccccagagcacaggtagtgaagt

SEQ ID NO: 6897 - DNA, 121 bp, synthetic construct
  misc_feature 1..121: note = Description of artificial sequence: synthetic polynucleotide sequence
  source 1..121: mol_type = other DNA
ttatttaggtcactctgcacaagggaactgggaatacaatacctagacatttgaggaccgttggacacagggtctgagttgacattgacacccaaggacctgaagtgtcatcatagctccc

SEQ ID NO: 6898 - DNA, 121 bp, synthetic construct
  misc_feature 1..121: note = Description of artificial sequence: synthetic polynucleotide sequence
  source 1..121: mol_type = other DNA
cgagaagtagaaactgagcaagtctgctcgctgttacatggattggtagtggtggaatatggatggttgcttacatagttgttcatttgatttaatgtaaatatctattgctcttataaaa

SEQ ID NO: 6899 - DNA, 121 bp, synthetic construct
  misc_feature 1..121: note = Description of artificial sequence: synthetic polynucleotide sequence
  source 1..121: mol_type = other DNA
gccaatactttcagaagatattcatttggaattgttttgggtagtataagcagagctctcctctaactaggaacagagtagaacatgtgttaccaaagtcagaaagtcccaccttgagcca

SEQ ID NO: 6900 - DNA, 121 bp, synthetic construct
  misc_feature 1..121: note = Description of artificial sequence: synthetic polynucleotide sequence
  source 1..121: mol_type = other DNA
gcccctgagataagagcagagacaggggaaaagcaaaacatttctgaagaggcagttggtctagtttggctataatcactagacgggtaaaggaacattgggtgcattaaaagtagagagc

SEQ ID NO: 6901 - DNA, 121 bp, synthetic construct
  misc_feature 1..121: note = Description of artificial sequence: synthetic polynucleotide sequence
  source 1..121: mol_type = other DNA
acaagcaaatgtgatgtgtaggcactgcctgggtcctagttcagataaaccaactgtgaaaagacattttcaagacaggaactttgtaatggacaggtatcagggaattctgaagaattcc

SEQ ID NO: 6902 - DNA, 185 bp, synthetic construct
  misc_feature 1..185: note = Description of artificial sequence: synthetic polynucleotide sequence
  source 1..185: mol_type = other DNA
cctacaggaagctatcctctgcttccgcccgaggcgcagggcaccccgaatccggcaactgttccagctctggctccggctccacctggagctcaagctggggctctggctctggttcgtcctggggctccagggggctgtcacaggagatggttgaggaggtgttgacttcattcagggtggag

SEQ ID NO: 6903 - DNA, 234 bp, synthetic construct
  misc_feature 1..234: note = Description of artificial sequence: synthetic polynucleotide sequence
  source 1..234: mol_type = other DNA
cctggctaggctgggggaaccctccagtgggccctcgtcagcaacctcgggtttggggtcaggcagggggatgatatagtcgttgtcaccctcattgggctgcacggcagtatagaggacggagctggtgtccaggggagatcggaggccatggaacccaggcaagcgggcctgggaccgaaggatggctgggtggtcactcctcagaaactcctcatccacctgctggtactt

SEQ ID NO: 6904 - DNA, 121 bp, synthetic construct
  misc_feature 1..121: note = Description of artificial sequence: synthetic polynucleotide sequence
  source 1..121: mol_type = other DNA
caacatacctttttgtaaccttcgcccaacagtctctcgagaagcagcaccagctgggagaaggggggccgaatctcaaacttctcttcccagcacttctgcatgatctcatagctgggga

SEQ ID NO: 6905 - DNA, 121 bp, synthetic construct
  misc_feature 1..121: note = Description of artificial sequence: synthetic polynucleotide sequence
  source 1..121: mol_type = other DNA
actccactcacatctcgtcggaggcatgggcaggctgggccatgcggtaaccccgtttgatggcattgtagaactgctcgttcatgggcagctctgggtaaggggtgccacctgttgggga

SEQ ID NO: 6906 - DNA, 121 bp, synthetic construct
  misc_feature 1..121: note = Description of artificial sequence: synthetic polynucleotide sequence
  source 1..121: mol_type = other DNA
catacccaaggtgaagatctcccagagcaggatcccgaaggaccacacgtcgctcagggtggtgtagaggctgttgaagatgctctccggagccatccactttaaaggcaaaaaggtctgt

SEQ ID NO: 6907 - DNA, 121 bp, synthetic construct
  misc_feature 1..121: note = Description of artificial sequence: synthetic polynucleotide sequence
  source 1..121: mol_type = other DNA
ctgcctttggagatgtaattcgagtcccgcatgatgtctcgagccaggccaaagtcacagatcttgaccagcttgccttcacagatgagcacgttcctagccgccaggtctctgtggacgc

SEQ ID NO: 6908 - DNA, 121 bp, synthetic construct
  misc_feature 1..121: note = Description of artificial sequence: synthetic polynucleotide sequence
  source 1..121: mol_type = other DNA
cgttcttggaggccagaaactccatgccattggccacctggtagctgaagcccacgaggtccatgtagcttagcactggagactcgttgatcaaagttgctcggcaggtcctctcaggggc

SEQ ID NO: 6909 - DNA, 162 bp, synthetic construct
  misc_feature 1..162: note = Description of artificial sequence: synthetic polynucleotide sequence
  source 1..162: mol_type = other DNA
ccagagggaacgtagttatcgtaaggggccatgtagttggaggactcgatgtctgcatatttgacgtctcctttcatgtccagcatgggcacatagtccaccgactcgtccttgctcatgtccatgtagccaccgtcgctctccccggtcaaggacacatgg

SEQ ID NO: 6910 - DNA, 161 bp, synthetic construct
  misc_feature 1..161: note = Description of artificial sequence: synthetic polynucleotide sequence
  source 1..161: mol_type = other DNA
cctgggcagggggagcccaacgggcagagcattgctgtagagctccgcgctgggcgggcggcgcttgtcggagtggtgctgcaggaaggtgtgtttgttgcggtgcaggtagtccaccaggtctccgtagcggcagtactcagtgatgatatagatgggtc

SEQ ID NO: 6911 - DNA, 121 bp, synthetic construct
  misc_feature 1..121: note = Description of artificial sequence: synthetic polynucleotide sequence
  source 1..121: mol_type = other DNA
ggtacctcctttggtgcaggcccccaacaggttgaccacgttcaggtggggcccaaggtgactcatgatcttcagctccgacataagggcttgcttctcactgctgcgggctgtggctgag

SEQ ID NO: 6912 - DNA, 121 bp, synthetic construct
  misc_feature 1..121: note = Description of artificial sequence: synthetic polynucleotide sequence
  source 1..121: mol_type = other DNA
ctactcacatttaagcatcttgacggccactttcatcgtggcctgagaatggctcaggccatgagccgtggcctccaccacctgcccaaaggccccagagccgagggtgcgtcctggtgca

SEQ ID NO: 6913 - DNA, 134 bp, synthetic construct
  misc_feature 1..134: note = Description of artificial sequence: synthetic polynucleotide sequence
  source 1..134: mol_type = other DNA
cccagcacaagctggtcccgcggcagctcccacgtggagtcatagggcagctgcatggggtccacgtagatgtactcatggccgtcagagctcacagactcaatcaccttccatcggatctcgtaacgtggctt

SEQ ID NO: 6914 - DNA, 121 bp, synthetic construct
  misc_feature 1..121: note = Description of artificial sequence: synthetic polynucleotide sequence
  source 1..121: mol_type = other DNA
gggaggggcttaccttctgccaaagcatgatgaggatgataagggagatgatggtgagcaccaccagggccaggatggctgagatcaccaccaccttaaagggcaaggctggaggcagaga

SEQ ID NO: 6915 - DNA, 213 bp, synthetic construct
  misc_feature 1..213: note = Description of artificial sequence: synthetic polynucleotide sequence
  source 1..213: mol_type = other DNA
cagtgtggcaccacgatgacctcctgcgtgtcctggcccacagcgttgcgcagcgtgcagcgcaccgacagtggccgatccacgtgctgcagacgcagtgtgctcaccacctcaaactcctgctcctcctcccagtacgtcacgttagtctccagctggctctcctcttcggaactgttccccagcagcgtgggcggcagctcacgtggacac

SEQ ID NO: 6916 - DNA, 121 bp, synthetic construct
  misc_feature 1..121: note = Description of artificial sequence: synthetic polynucleotide sequence
  source 1..121: mol_type = other DNA
ttttgaggtctctgcaggcagaccagatgatgttcggctggggcatgccccggccacgacagcggactgtctgttccccactgtcagggtggctctcacttagctccagcactcggacagg

SEQ ID NO: 6917 - DNA, 121 bp, synthetic construct
  misc_feature 1..121: note = Description of artificial sequence: synthetic polynucleotide sequence
  source 1..121: mol_type = other DNA
caccattgatctgtagctggaaggagagctggacctcagcatcctcatggaaggcccgcatggtgtagtggccagcctctgccaccttcacgcgaaccagtgtcagctctgacacatacct

SEQ ID NO: 6918 - DNA, 194 bp, synthetic construct
  misc_feature 1..194: note = Description of artificial sequence: synthetic polynucleotide sequence
  source 1..194: mol_type = other DNA
ccgggtctccgacacgttgcgcgtggacagggcgatttcgccagcgctggagtcgcccagggtgcggttgtctttgaaccacaggacagtgggcggtgggtaggcctcgaacactacctgcagtgtccggctccgatgcagctcagcaaattgtagtgtgcccacctctcccaggagccgcacgtagccgctct

SEQ ID NO: 6919 - DNA, 176 bp, synthetic construct
  misc_feature 1..176: note = Description of artificial sequence: synthetic polynucleotide sequence
  source 1..176: mol_type = other DNA
ccaaccacggtgatgttgatggccttttcatcctgatggtcattcacactctccgtcacattgcaggtgtaggtccccgagtcttctaactcggcactggggatgtgcaggatggagcggatgtggtaaggcatatccaagaggaagtcagtcaccggctccaccagccgcccact

SEQ ID NO: 6920 - DNA, 121 bp, synthetic construct
  misc_feature 1..121: note = Description of artificial sequence: synthetic polynucleotide sequence
  source 1..121: mol_type = other DNA
tttgcgggggtatgtccactcgaagttgaccacctcattcccgatcacaatgcacatgagggtgatgttctcaccctggcggaccacagtctgcactgcgttcacagagacgttgatggat

SEQ ID NO: 6921 - DNA, 302 bp, synthetic construct
  misc_feature 1..302: note = Description of artificial sequence: synthetic polynucleotide sequence
  source 1..302: mol_type = other DNA
cctctgctgagcatcaggccagaaagggggctcaccctggagtctgtagacatagtaggcatcagaatccacctccctgtccccaatggtggttttgcagatgtagcttctgtcctcaaagataccagaaaagccacgttggtgatcataggggacaggcagtgcaacgtcccctttcttctcgtgcagtgtcaccaccagctgtgggtctgttactcggcatggaatggtgatctcagttatttccgtgagaaagatgaatagttcctcggcatcattagggaggaagcccacggtgggat

SEQ ID NO: 6922 - DNA, 325 bp, synthetic construct
  misc_feature 1..325: note = Description of artificial sequence: synthetic polynucleotide sequence
  source 1..325: mol_type = other DNA
cctggcacaaagatgtagagccgtttccgctcatcggtctccagtccacgggagtcattgtgggtgcaaaagtattctcccgtgtctagcccagtgaggttggtcagtgtgagcacgctggagaaggtgccatcctgggccttggccatttcctgtgggggctcctgggacatccgttcccacaccaccggagctgaacccgagcaggtcagaacgaaggtgctggagacattgaggacaagctctggccccgggggtgtgacgaccaggccctgagagatctgtggttccagaagtaacaggagagacagcaacagcagctcgc

SEQ ID NO: 6923 - DNA, 121 bp, synthetic construct
  misc_feature 1..121: note = Description of artificial sequence: synthetic polynucleotide sequence
  source 1..121: mol_type = other DNA
gcagccccccgggtcccctaccttatctcccatctacccacctttgagggccagagctggcatcgcacccggaagccgcatggtgtcctgcagagttaaacaggagtcagggcccagggca

SEQ ID NO: 6924 - DNA, 121 bp, synthetic construct
  misc_feature 1..121: note = Description of artificial sequence: synthetic polynucleotide sequence
  source 1..121: mol_type = other DNA
agtggcttctagtttcttggcaatctgagatcagctggctctgcaagatgaaggtggagccaaatgacacaatctggtctcactgaggcccctcacggtcattttttggagactctaaata

SEQ ID NO: 6925 - DNA, 121 bp, synthetic construct
  misc_feature 1..121: note = Description of artificial sequence: synthetic polynucleotide sequence
  source 1..121: mol_type = other DNA
tcacctggttctgtaggcctggctgtgggagggtccatcacttgggagctctgatttggatttcgaacccctccacagggtagacgccaggtgtattccggctgcgacaaaactggtgctt

SEQ ID NO: 6926 - DNA, 193 bp, synthetic construct
  misc_feature 1..193: note = Description of artificial sequence: synthetic polynucleotide sequence
  source 1..193: mol_type = other DNA
ccagatggaagaggcgcgagttggggagtgggggcgggtgctccatggccatggggggaggggggtagcggatctgggaccagtcctcgaagccatggtgtggcaccatggctggcatgggcgggtaggcgtaggggtaggccccgcagagatgttctgggtggggctccacatggtaacgctctcctgaggc

SEQ ID NO: 6927 - DNA, 121 bp, synthetic construct
  misc_feature 1..121: note = Description of artificial sequence: synthetic polynucleotide sequence
  source 1..121: mol_type = other DNA
tgctgctacctccctcaagcctcctcacctttgctttcctcttctgctgtctgagggcttctcttgccttctcctcatctttgaatgcttttagctgagagaagaagggagggagaaaaga

SEQ ID NO: 6928 - DNA, 121 bp, synthetic construct
  misc_feature 1..121: note = Description of artificial sequence: synthetic polynucleotide sequence
  source 1..121: mol_type = other DNA
gggcatttgacagggtgacctgggcctgcagcttctccacttgcttcttcagctcttccttctcctcattcatgcgctcacgatcactgcgctccctctggaagtcctcctcgaagatctt

SEQ ID NO: 6929 - DNA, 133 bp, synthetic construct
  misc_feature 1..133: note = Description of artificial sequence: synthetic polynucleotide sequence
  source 1..133: mol_type = other DNA
cctgctgtttcagcaactcattctgcgtgaccagctcctgtttccttaggagggcccctgctccttctgggctcccaaatgctgttggtggagatgatggcggggtttggatgctcagtgcttcctccagggc

SEQ ID NO: 6930 - DNA, 121 bp, synthetic construct
  misc_feature 1..121: note = Description of artificial sequence: synthetic polynucleotide sequence
  source 1..121: mol_type = other DNA
ttgagccgctggatctccttttcctggtactcacgctgtcgggtgagtgggctcagctgatcctgcaggtacttgaccttttggcgcagctccttggcctctgctgtcagctgctccttgt

SEQ ID NO: 6931 - DNA, 133 bp, synthetic construct
  misc_feature 1..133: note = Description of artificial sequence: synthetic polynucleotide sequence
  source 1..133: mol_type = other DNA
cctcctccatttcaatcttggacttggccaggaggagcttgcggtcaaagtcacgctgcttctgctcccgctcggcctccaggtcagtcacctgcttctgcaaatcagccagcttctgacgcagctcagtgat

SEQ ID NO: 6932 - DNA, 121 bp, synthetic construct
  misc_feature 1..121: note = Description of artificial sequence: synthetic polynucleotide sequence
  source 1..121: mol_type = other DNA
gtgggcgtggccaggaaccccacattaccttctgctcatactgctgcttcatggaccggaaatgctggtcccactgcttgttcacttccagcagctgtggggagagactggagttagcagg

SEQ ID NO: 6933 - DNA, 121 bp, synthetic construct
  misc_feature 1..121: note = Description of artificial sequence: synthetic polynucleotide sequence
  source 1..121: mol_type = other DNA
cacctcggccacctacctcactgcgctgctgctccagcatcttcaccttcttctcggctgcgcccaaggccaccacctctgggaccttacctgccgtcacactagcctggggagaagcaca

SEQ ID NO: 6934 - DNA, 121 bp, synthetic construct
  misc_feature 1..121: note = Description of artificial sequence: synthetic polynucleotide sequence
  source 1..121: mol_type = other DNA
agattcttgccaaaacacgtaacctcaatctcctcatgagatccaatcacttgtgaggcctcaatcgtgacagcaaataagtctatactgaaaaacattctacaaataactggccagtaca

SEQ ID NO: 6935 - DNA, 121 bp, synthetic construct
  misc_feature 1..121: note = Description of artificial sequence: synthetic polynucleotide sequence
  source 1..121: mol_type = other DNA
tgctgctgtccagccactgccttcttgcctgtcccttccatcttcggtgagcctggccgcccagacgcaccctctttgttgccattgctcatcaacaacttcttgagctccaaattttcct

SEQ ID NO: 6936 - DNA, 121 bp, synthetic construct
  misc_feature 1..121: note = Description of artificial sequence: synthetic polynucleotide sequence
  source 1..121: mol_type = other DNA
ggcctgaacttaccgcagcctctcggcagcctgatcccgctgttccaggcccttatccaacttggccttcagagcctcgttctccttccgaagctgctcacacagggtctgtggggcaggg

SEQ ID NO: 6937 - DNA, 193 bp, synthetic construct
  misc_feature 1..193: note = Description of artificial sequence: synthetic polynucleotide sequence
  source 1..193: mol_type = other DNA
cctgcagaatggaggtgcgctgctcattcttgtgcaccttggatgccagtcggttgaactccagggccatgcggcccaggtgggtgaagagctggccgtggtccggctcctcggcacacacactcagcgtggtctccaggcgctgcaggtgcagcatcaggttgccgtcctcacggggcagggggcccagcgc

SEQ ID NO: 6938 - DNA, 121 bp, synthetic construct
  misc_feature 1..121: note = Description of artificial sequence: synthetic polynucleotide sequence
  source 1..121: mol_type = other DNA
ggggtcctgcccgtccactcaccatcgcattggcatggctgctgctctctggtgaattctgctcctcaggagtgaccacttcaaattcagaggaggtgccctgtgcagaaaggaagttagg

SEQ ID NO: 6939 - DNA, 121 bp, synthetic construct
  misc_feature 1..121: note = Description of artificial sequence: synthetic polynucleotide sequence
  source 1..121: mol_type = other DNA
actccaaataaaacttacactggatggaggcttctggactggtgctggcttgtcactggggcatgcaggggctgtgggagatgctgtgacatttgagtcctttcctggagaatcaagaaag

SEQ ID NO: 6940 - DNA, 136 bp, synthetic construct
  misc_feature 1..136: note = Description of artificial sequence: synthetic polynucleotide sequence
  source 1..136: mol_type = other DNA
cctgtgagctcagccagggggtcgaaggagcccaaggagggagaaggtggtgggagcagctcgttgtccttcactagctcctctgccttctgccggagcctggtcgcttccatctgggactcttccaaaagctccc

SEQ ID NO: 6941 - DNA, 137 bp, synthetic construct
  misc_feature 1..137: note = Description of artificial sequence: synthetic polynucleotide sequence
  source 1..137: mol_type = other DNA
cctaacatctttatcccttgcattttttccttcagccgggaattctccttcactaggcgctcaaaagctgcggatgcctctcctgagggcacgctgcccccagggtcgtagatccggtacggtcctctcccttccat

SEQ ID NO: 6942 - DNA, 121 bp, synthetic construct
  misc_feature 1..121: note = Description of artificial sequence: synthetic polynucleotide sequence
  source 1..121: mol_type = other DNA
cctgttggcaaagcacagagtaccccctccttcattcccaaagcccttcgctgataccaatatccttgtccatttcagagatggggacactgagggttaagcaaggaatgtcattagcctg

SEQ ID NO: 6943 - DNA, 121 bp, synthetic construct
  misc_feature 1..121: note = Description of artificial sequence: synthetic polynucleotide sequence
  source 1..121: mol_type = other DNA
gaaataaggcacagggtgcatgaatctaaaaatgtgaccaaagcatcctgcctaatccagaaattctgtccttctttctgacctggtatccagccttagatagatccctgccttactcttc

SEQ ID NO: 6944 - DNA, 121 bp, synthetic construct
  misc_feature 1..121: note = Description of artificial sequence: synthetic polynucleotide sequence
  source 1..121: mol_type = other DNA
catccaatcaggatataacaggatatcctcagtaagtcacatctcttcaaagggtgacagtcattccattaccctgtctgtgctggctgcctctatccctcaacctgcccaggtttgtctt

SEQ ID NO: 6945 - DNA, 121 bp, synthetic construct
  misc_feature 1..121: note = Description of artificial sequence: synthetic polynucleotide sequence
  source 1..121: mol_type = other DNA
cagaactgcatccctattatcacccttagcccattattctgggtgggctctatccctagattgtaagcaggctctctgccagatctgttacaaagtcttacattctaagaatctctgagat

SEQ ID NO: 6946 - DNA, 194 bp, synthetic construct
  misc_feature 1..194: note = Description of artificial sequence: synthetic polynucleotide sequence
  source 1..194: mol_type = other DNA
tctatggcattgcaaagcgacaacccaaaggttgtgagggttgctgcctgctgctgacatagcaataatactcattgggctcctccacttcatatacgttctcttcaatggtatagatgttttcttctgagcgaattccctctgctactgcatttgccaatcctgagggagggaggttggccaaagagatgagg

SEQ ID NO: 6947 - DNA, 121 bp, synthetic construct
  misc_feature 1..121: note = Description of artificial sequence: synthetic polynucleotide sequence
  source 1..121: mol_type = other DNA
caagattctcaccttttcccaaccccattccattattcttaccttaaattctgtatcttctctttgctatgagaataccctagtaagggggaaacaaaagccaataaaaatgcattcataa

SEQ ID NO: 6948 - DNA, 155 bp, synthetic construct
  misc_feature 1..155: note = Description of artificial sequence: synthetic polynucleotide sequence
  source 1..155: mol_type = other DNA
catttgaaaattaaagcgccgaagataagagccagagccagcccagcacagatccctgctccgatgtagatgcctattctgatggttgctccagagtcccgtaagtcattggccaatctagagtcccgtaactcattggccaatgtggatatttg

SEQ ID NO: 6949 - DNA, 121 bp, synthetic construct
  misc_feature 1..121: note = Description of artificial sequence: synthetic polynucleotide sequence
  source 1..121: mol_type = other DNA
aagttgagtacaacatagctcacaaaaaaagttacttactgttagatttatatcagggaggctccccagtgtctgtgtctctgctataaaaagagagagagagagagagagaggaaaaata

SEQ ID NO: 6950 - DNA, 121 bp, synthetic construct
  misc_feature 1..121: note = Description of artificial sequence: synthetic polynucleotide sequence
  source 1..121: mol_type = other DNA
ctgccccatgcatagttacctgggccatgtcccctggtggtaagcatccttggaaaggctgcagtgaagtctctctgccgagtcggtgcaggggtgaccttggctaatgtcagaaacaaca

SEQ ID NO: 6951 - DNA, 337 bp, synthetic construct
  misc_feature 1..337: note = Description of artificial sequence: synthetic polynucleotide sequence
  source 1..337: mol_type = other DNA
cctggtttgatgaccaacttcaggttaaatttttcatcattcattatgcctgggatttggatccggcagcagtagatcccactgtctgctagagtcacattctctatggtcagggacacatctcctttgcggaaatccccatttagccagtatctggatgtccaataattcacatccctttcatcagtcctgagcaccacgttgccacattcaaacacaggacaggctcctttgccccagcagacgggcacgaggttccctggggcggctggggtgtagaagcagggcagataggcattctgaccgacctccgctctgtattccacttctgaggacc

SEQ ID NO: 6952 - DNA, 121 bp, synthetic construct
  misc_feature 1..121: note = Description of artificial sequence: synthetic polynucleotide sequence
  source 1..121: mol_type = other DNA
atgtcattgtaaatatccatgccgagacttacttgtaagtagtagcagcagcagcagcaggacacagtcaaagggaagatgtgaaaacatggagcttgcagaagaaaagtcagaggacacc

SEQ ID NO: 6953 - DNA, 139 bp, synthetic construct
  misc_feature 1..139: note = Description of artificial sequence: synthetic polynucleotide sequence
  source 1..139: mol_type = other DNA
catgaacaactttatcctcctggaagaacagctcatcaagaaatcccaacaaaagagaagaacttctccctcgaactttaaagtccgcttctttgtgttaaccaaagccagcctggcatactttgaagatcgtcatggg

SEQ ID NO: 6954 - DNA, 121 bp, synthetic construct
  misc_feature 1..121: note = Description of artificial sequence: synthetic polynucleotide sequence
  source 1..121: mol_type = other DNA
ccccacagaagaagcgcacgctgaaggggtccattgagctctcccgaatcaaatgtgttgagattgtgaaaagtgacatcagcatcccatgccactataaatacccgtttcaggtaagtcc

SEQ ID NO: 6955 - DNA, 121 bp, synthetic construct
  misc_feature 1..121: note = Description of artificial sequence: synthetic polynucleotide sequence
  source 1..121: mol_type = other DNA
ctctgtgtgtgtgtctccaggtggtgcatgacaactacctcctatatgtgtttgctccagatcgtgagagccggcagcgctgggtgctggcccttaaagaaggtaattaaactcctttgcc

SEQ ID NO: 6956 - DNA, 153 bp, synthetic construct
  misc_feature 1..153: note = Description of artificial sequence: synthetic polynucleotide sequence
  source 1..153: mol_type = other DNA
gcgaccactttgggaacctgaagaaactgtggtcattgccttatatgactaccaaaccaatgatcctcaggaactcgcactgcggcgcaacgaagagtactgcctgctggacagttctgagattcactggtggagagtccaggacaggaatgg

SEQ ID NO: 6957 - DNA, 121 bp, synthetic construct
  misc_feature 1..121: note = Description of artificial sequence: synthetic polynucleotide sequence
  source 1..121: mol_type = other DNA
gtctaaacattaattttccttttaacaggcatgaaggatatgtaccaagcagttatctggtggaaaaatctccaaataatctggaaacctatgagtaagatattttatttgtttttggaaa

SEQ ID NO: 6958 - DNA, 121 bp, synthetic construct
  misc_feature 1..121: note = Description of artificial sequence: synthetic polynucleotide sequence
  source 1..121: mol_type = other DNA
tgtcattgacatatgacttttccttgctttcaggtggtacaataagagtatcagccgagacaaagctgaaaaacttcttttggacacagtaagtctccttaacctgtcttttgacataaaa

SEQ ID NO: 6959 - DNA, 121 bp, synthetic construct
  misc_feature 1..121: note = Description of artificial sequence: synthetic polynucleotide sequence
  source 1..121: mol_type = other DNA
ttctttctaaccattccagggcaaagaaggagccttcatggtaagggattccaggactgcaggaacatacaccgtgtctgttttcaccaaggctgttgtaaggtatggagctaactctgct

SEQ ID NO: 6960 - DNA, 135 bp, synthetic construct
  misc_feature 1..135: note = Description of artificial sequence: synthetic polynucleotide sequence
  source 1..135: mol_type = other DNA
gtgagaacaatccctgtataaagcattatcacatcaaggaaacaaatgacaatcctaagcgatactatgtggctgaaaagtatgtgttcgattccatccctcttctcatcaactatcaccaacataatggaggag

SEQ ID NO: 6961 - DNA, 121 bp, synthetic construct
  misc_feature 1..121: note = Description of artificial sequence: synthetic polynucleotide sequence
  source 1..121: mol_type = other DNA
tcttggcttttcaatcaacccaggcctggtgactcgactccggtatccagtttgttttgggaggcagaaagccccagttacagcagggctgagatacggtgagcagtacaatcaggaatgt

SEQ ID NO: 6962 - DNA, 173 bp, synthetic construct
  misc_feature 1..173: note = Description of artificial sequence: synthetic polynucleotide sequence
  source 1..173: mol_type = other DNA
gggaaatgggtgatcgacccctcagagctcacttttgtgcaagagattggcagtgggcaatttgggttggtgcatctgggctactggctcaacaaggacaaggtggctatcaaaaccattcgggaaggggctatgtcagaagaggacttcatagaggaggctgaagtaatgat

SEQ ID NO: 6963 - DNA, 218 bp, synthetic construct
  misc_feature 1..218: note = Description of artificial sequence: synthetic polynucleotide sequence
  source 1..218: mol_type = other DNA
ggaaactctctcatcccaaactggtgcagctgtatggggtgtgcctggagcaggcccccatctgcctggtgtttgagttcatggagcacggctgcctgtcagattatctacgcacccagcggggactttttgctgcagagaccctgctgggcatgtgtctggatgtgtgtgagggcatggcctacctggaagaggcatgtgtcatccacagagacttg

SEQ ID NO: 6964 - DNA, 121 bp, synthetic construct
  misc_feature 1..121: note = Description of artificial sequence: synthetic polynucleotide sequence
  source 1..121: mol_type = other DNA
cgcctttgtttgcctgtctcctctccaggctgccagaaattgtttggtgggagaaaaccaagtcatcaaggtgtctgactttgggatgacaaggtaaaagagggatgtggtgccggtgaag

SEQ ID NO: 6965 - DNA, 121 bp, synthetic construct
  misc_feature 1..121: note = Description of artificial sequence: synthetic polynucleotide sequence
  source 1..121: mol_type = other DNA
ggttcgttctggatgatcagtacaccagttccacaggcaccaaattcccggtgaagtgggcatccccagaggttttctctttcagtcgctatagcagcaagtccgatgtgtggtcatttgg

SEQ ID NO: 6966 - DNA, 159 bp, synthetic construct
  misc_feature 1..159: note = Description of artificial sequence: synthetic polynucleotide sequence
  source 1..159: mol_type = other DNA
ggtgtgctgatgtgggaagttttcagtgaaggcaaaatcccgtatgaaaaccgaagcaactcagaggtggtggaagacatcagtaccggatttcggttgtacaagccccggctggcctccacacacgtctaccagattatgaatcactgctggaaagag

SEQ ID NO: 6967 - DNA, 121 bp, synthetic construct
  misc_feature 1..121: note = Description of artificial sequence: synthetic polynucleotide sequence
  source 1..121: mol_type = other DNA
acagagttcttttttccctctccagagaccagaagatcggccagccttctccagactgctgcgtcaactggctgaaattgcagaatcaggactttagtagagactgagtaccaggccacgg

SEQ ID NO: 6968 - DNA, 121 bp, synthetic construct
  misc_feature 1..121: note = Description of artificial sequence: synthetic polynucleotide sequence
  source 1..121: mol_type = other DNA
tgaatggcaagataagaattcagaactagaggtcagccccctatctccaagtctgttatacttccatatgggaaagagaaatgaggacctgcttcttagggtttgaagtggaaactatacg

SEQ ID NO: 6969 - DNA, 121 bp, synthetic construct
  misc_feature 1..121: note = Description of artificial sequence: synthetic polynucleotide sequence
  source 1..121: mol_type = other DNA
ataaggagatgaaggaaagcccacagggccatgacagtggtaacagtaccacctattccagtccaaaaagtcatgcaaacctcaacggaggcttcctctttgaggaagtaatgctggagtt

SEQ ID NO: 6970 - DNA, 121 bp, synthetic construct
  misc_feature 1..121: note = Description of artificial sequence: synthetic polynucleotide sequence
  source 1..121: mol_type = other DNA
cagaatccaacctcttcattaatacaattcttcaaggcaattctttcacataggaggaacaatcatgccagatatcgctatgaaagaaaagacagaagtcaatggtttctttgcgttcaaa

SEQ ID NO: 6971 - DNA, 121 bp, synthetic construct
  misc_feature 1..121: note = Description of artificial sequence: synthetic polynucleotide sequence
  source 1..121: mol_type = other DNA
caggaagggaaggttgagtgacctacttcaggagaaggccagtcccgggagagaccctgcactggagaacttgctagagtccacaaaagactgatctgataatggcgaccacaaggagtga

SEQ ID NO: 6972 - DNA, 196 bp, synthetic construct
  misc_feature 1..196: note = Description of artificial sequence: synthetic polynucleotide sequence
  source 1..196: mol_type = other DNA
ccttgcaggctgttcccgttggtgctggtgcaggtgggaggtggggaggtctggggtctgacgactggtgcgaaagcactcttctgtttcacggctgagaccatgttggctggtgagaaggagaagatgcccgaggagctgctgcagttggaggggaggcttgtggaggaggccatggtggggctggatggcacta

SEQ ID NO: 6973 - DNA, 181 bp, synthetic construct
  misc_feature 1..181: note = Description of artificial sequence: synthetic polynucleotide sequence
  source 1..181: mol_type = other DNA
ctggcatagggggagttggcagctgagccgttgaggaaggtgggggagccgcccaaattggacattgcggcagagccgtatccgttcatgctcgtggtgacggagttatagttggtctgctggggagtggtgctcggcacgtacccgtgtggtgatacgctgcttgagttgcgggtgaaac

SEQ ID NO: 6974 - DNA, 179 bp, synthetic construct
  misc_feature 1..179: note = Description of artificial sequence: synthetic polynucleotide sequence
  source 1..179: mol_type = other DNA
ccctgattggtggcttgtgatgcctcggagacattcacggccagttgtccactgaacgaattcacgcccatcatccctgcgtggaccgaggtgttagcaagggccgggagttggttgtggttgcggggaacactgtacagggcctcggcaatgtcggccgctctcttcagaatgatttc

SEQ ID NO: 6975 - DNA, 121 bp, synthetic construct
  misc_feature 1..121: note = Description of artificial sequence: synthetic polynucleotide sequence
  source 1..121: mol_type = other DNA
acacaggctagacacccacagcgctcacctggttgttgtgtggcatcccatacagtgcttctaccagatccgcagcccttttgagtattacttcctgtcaagagaaaagcagatacaatcc

SEQ ID NO: 6976 - DNA, 121 bp, synthetic construct
  misc_feature 1..121: note = Description of artificial sequence: synthetic polynucleotide sequence
  source 1..121: mol_type = other DNA
aaggcagtatcctcacctttggcaaacgctcagggtcaccagggtgccgaggaatgaccttctgtaacctctggaaaccataatcgatggtgggttcgttgagcgctgcaataaagaagtc

SEQ ID NO: 6977 - DNA, 121 bp, synthetic construct
  misc_feature 1..121: note = Description of artificial sequence: synthetic polynucleotide sequence
  source 1..121: mol_type = other DNA
tataaatgaatctgcctggtgttcctttgcagaactgcttagatttgtaggacagtgtgacttccacaacaccagggatgtgccgaggaggggtctgcacacggatggcatgaggagtgat

SEQ ID NO: 6978 - DNA, 135 bp, synthetic construct
  misc_feature 1..135: note = Description of artificial sequence: synthetic polynucleotide sequence
  source 1..135: mol_type = other DNA
cctcactccagaccagcatggtaccgaatatgacctgtaacccatcaaagaaattgtcccctatgatgatcacagtcgcacctcccgtcgtccatccttcactcgggctgatggctttgatacagggagtagctg

SEQ ID NO: 6979 - DNA, 143 bp, synthetic construct
  misc_feature 1..143: note = Description of artificial sequence: synthetic polynucleotide sequence
  source 1..143: mol_type = other DNA
ccatgttccagataagagggcgtaccttccgaggggtcaagcctccgagccctccgcccatgcttggaattattatggacaaacatgttatcagagactgccaggacatggccatccacattgactgtcgtagacaccacgac

SEQ ID NO: 6980 - DNA, 121 bp, synthetic construct
  misc_feature 1..121: note = Description of artificial sequence: synthetic polynucleotide sequence
  source 1..121: mol_type = other DNA
gaaagataagtcagacccacctggaatctccgcatgtcacgtgggtttcccgcattctttaggcaattttggttacatttgaggaaaaatttcaagaagaacctgtgaagaaacaaatcat

SEQ ID NO: 6981 - DNA, 121 bp, synthetic construct
  misc_feature 1..121: note = Description of artificial sequence: synthetic polynucleotide sequence
  source 1..121: mol_type = other DNA
attttatcataggtgaaataataatagtagctgatatttatgaagcacctactgtctaattgaatcaggtacctatagaatgtattgtttcaacaacaccaagcaatccagcaggatggat

SEQ ID NO: 6982 - DNA, 121 bp, synthetic construct
  misc_feature 1..121: note = Description of artificial sequence: synthetic polynucleotide sequence
  source 1..121: mol_type = other DNA
tccagtgaaagaagagtggtccctacctgtcaattatcactggatctgagggagtctcatttcggttgccacagcttttcttgtcacaacagcggctatggagcaaaagcgaaaggattta

SEQ ID NO: 6983 - DNA, 121 bp, synthetic construct
  misc_feature 1..121: note = Description of artificial sequence: synthetic polynucleotide sequence
  source 1..121: mol_type = other DNA
gggagagaccaagatatttcttacctgcacatgatctcatgtgtgagcaagactcggcacatttctgggttcttgtcttggccttcatacactatggcctaaaagcaaaagcacagtttta

SEQ ID NO: 6984 - DNA, 121 bp, synthetic construct
  misc_feature 1..121: note = Description of artificial sequence: synthetic polynucleotide sequence
  source 1..121: mol_type = other DNA
gagccccccgtggcccaaaatcaagaaacttacttgttttgtcatggagtcaatgaggcgcacgtagaaatcctgctccgtccttatccctagggttggaaatgggggaagggaggagaat

SEQ ID NO: 6985 - DNA, 121 bp, synthetic construct
  misc_feature 1..121: note = Description of artificial sequence: synthetic polynucleotide sequence
  source 1..121: mol_type = other DNA
tgaggccatagacccgacccgggcctcaccattgctgtagagaagctgaagccggtagtgaattccgttattggtcttttcgctgttggcttcctgggttgcatcaggacgcaaagacaca

SEQ ID NO: 6986 - DNA, 158 bp, synthetic construct
  misc_feature 1..158: note = Description of artificial sequence: synthetic polynucleotide sequence
  source 1..158: mol_type = other DNA
ctttttccttctccacgaaccccacaaacgctgtcctctcgatctccacgggctggccctgtctgtcgtagagggccaggacgaagtggaagaagttggatttccgcagattggaaggcggctgcttctcaaagtgagcccgggccagacccaccccg

SEQ ID NO: 6987 - DNA, 121 bp, synthetic construct
  misc_feature 1..121: note = Description of artificial sequence: synthetic polynucleotide sequence
  source 1..121: mol_type = other DNA
acccgcgccccttgtcaccctgtacacacactcgaaccctcaaacacccacctcctcttcccccaaaacatccagtgggcgctcttcacgccccttcaggcgacatagacccagctgacaa

SEQ ID NO: 6988 - DNA, 135 bp, synthetic construct
  misc_feature 1..135: note = Description of artificial sequence: synthetic polynucleotide sequence
  source 1..135: mol_type = other DNA
cctctgcgccgccgtgttggcgtccagcaccccggcgccctgcatccacgtccgcaccgcgttcatgccgctgcccagcggctcttccttcatgctgcttccactccgttggatgctttcctgaatcccaaacat

SEQ ID NO: 6989 - DNA, 121 bp, synthetic construct
  misc_feature 1..121: note = Description of artificial sequence: synthetic polynucleotide sequence
  source 1..121: mol_type = other DNA
actttcaggcccctttttgtctcttatgtgctcttccctctaggaagaggtacaccttctgaggttggtgaggctcagaaaagaaagaggaccttttcatgtctttgatctaagggtgtcc

SEQ ID NO: 6990 - DNA, 121 bp, synthetic construct
  misc_feature 1..121: note = Description of artificial sequence: synthetic polynucleotide sequence
  source 1..121: mol_type = other DNA
tcgtgtatgcgatggtagtcctgtaaggttacaatggagtgaaaaatttctgtcacctaatgccgacatcatggctgtcacaacattgtattgcaattactttatttgtttagaaacttag

SEQ ID NO: 6991 - DNA, 121 bp, synthetic construct
  misc_feature 1..121: note = Description of artificial sequence: synthetic polynucleotide sequence
  source 1..121: mol_type = other DNA
gcagaaatggtggaaattgtgccctgataacaaatccagaggctctcttcttgccaaactcaaccatacacaatttgtctgcagctactgtgcttcctctccctgcaatagctgagtgaac

SEQ ID NO: 6992 - DNA, 121 bp, synthetic construct
  misc_feature 1..121: note = Description of artificial sequence: synthetic polynucleotide sequence
  source 1..121: mol_type = other DNA
attttcacattttaacatcttgaaaatccagaaatatcttacagttgacgacatcttaaaatcagaacataattttcagtgcccatggattcaggaatttggtttgttgttcctggaggcc

SEQ ID NO: 6993 - DNA, 121 bp, synthetic construct
  misc_feature 1..121: note = Description of artificial sequence: synthetic polynucleotide sequence
  source 1..121: mol_type = other DNA
tgattgaagacagatcatcaactatcagttgagaacaggagaagcagccttaaacgctgtttacaaaagctacttactctaccccattttacttccagctttactctcatattattcgtgt

SEQ ID NO: 6994 - DNA, 121 bp, synthetic construct
  misc_feature 1..121: note = Description of artificial sequence: synthetic polynucleotide sequence
  source 1..121: mol_type = other DNA
cacacatgtttgtatatgtgtattaagttcactttagtaaactctgtagaggatattcccttgagtacaatccgtagagtcagataatgtcgaccaatatttttctgtctttttaaagctt

SEQ ID NO: 6995 - DNA, 121 bp, synthetic construct
  misc_feature 1..121: note = Description of artificial sequence: synthetic polynucleotide sequence
  source 1..121: mol_type = other DNA
ttgaagtcagattagagattcagtttgaaattttgtaagggagcatctcttaatttgcctaccaagtgtcagccactcctgtgagccatacatgttacctcactgaacccttccatcaatg

SEQ ID NO: 6996 - DNA, 121 bp, synthetic construct
  misc_feature 1..121: note = Description of artificial sequence: synthetic polynucleotide sequence
  source 1..121: mol_type = other DNA
tgagcccactaaactataataattaagctccactgatttagcttttaccaagggctgtgtattatgctaagtgctttatatgcattatttcacttaatcctcccacctgttctttgagtta

SEQ ID NO: 6997 - DNA, 121 bp, synthetic construct
  misc_feature 1..121: note = Description of artificial sequence: synthetic polynucleotide sequence
  source 1..121: mol_type = other DNA
gagagagtgtgctccggagccagcctgtctggggtgaaatcctcacttggccccttctttgctgtgttcaccccaggatgtttacttgatcttgcactacctcagtttcctcatctgtaaa

SEQ ID NO: 6998 - DNA, 121 bp, synthetic construct
  misc_feature 1..121: note = Description of artificial sequence: synthetic polynucleotide sequence
  source 1..121: mol_type = other DNA
gggatcttctgttgaataggcccacatagaggtggttttaacttaactactggcttccaaaatgaaatgctgttcctgttccgccagtgacttgggacacatttatcccccgtaacgctcc

SEQ ID NO: 6999 - DNA, 121 bp, synthetic construct
  misc_feature 1..121: note = Description of artificial sequence: synthetic polynucleotide sequence
  source 1..121: mol_type = other DNA
tccggagggcagagaaggcttcttgaactaggacctaagaaatgggaagaaatttgctagttaagcaggtgttgggggaaggtcctcagaagaacattctagaacaagtgcaaggtcccaa

SEQ ID NO: 7000 - DNA, 121 bp, synthetic construct
  misc_feature 1..121: note = Description of artificial sequence: synthetic polynucleotide sequence
  source 1..121: mol_type = other DNA
caaatggttccagggagggtgcaactggctactcaaggccctgggtctgaaattacagatcaaaaaatacattgtgagcaggctgtggtgactcaagcctgtaatcccagcactttgggag

SEQ ID NO: 7001 - DNA, 121 bp, synthetic construct
  misc_feature 1..121: note = Description of artificial sequence: synthetic polynucleotide sequence
  source 1..121: mol_type = other DNA
gtaaagtagggctaagaaaacatcgcattcatggaaacatggaaaagaatgtgtgcaaatcaactgtaggccaagcattcaagaagtcgcagctggtattcttattataatcacgttcccc

SEQ ID NO: 7002 - DNA, 121 bp, synthetic construct
  misc_feature 1..121: note = Description of artificial sequence: synthetic polynucleotide sequence
  source 1..121: mol_type = other DNA
attttaggccagtgagaccatgctgaacttctgacccacagactattagataataaatatgtgctgtcggccgggcgtggtggctcatgcatggtgggtctacgattttctaaatatttgt

SEQ ID NO: 7003 - DNA, 121 bp, synthetic construct
  misc_feature 1..121: note = Description of artificial sequence: synthetic polynucleotide sequence
  source 1..121: mol_type = other DNA
tgggtggtttggcggtgaaatgaatgagtgtttgcaaagcagcgtgcagagcactgataggtattcaatccatctcctccttcagagagtattttcccactcaaattcttgtttctgtatc

SEQ ID NO: 7004 - DNA, 121 bp, synthetic construct
  misc_feature 1..121: note = Description of artificial sequence: synthetic polynucleotide sequence
  source 1..121: mol_type = other DNA
gacttaactaccaggcagctggtctggggcagatgaagtagtagatatctggctgtcccatctacttaaaagcctcactgccctctaattacttcaggctaggcaataactttgcccaccc

SEQ ID NO: 7005 - DNA, 121 bp, synthetic construct
  misc_feature 1..121: note = Description of artificial sequence: synthetic polynucleotide sequence
  source 1..121: mol_type = other DNA
tcttagccaagaactgcagctatgggcacgtaacatgctagtaggattaagcaaatcattctggagctgaaatctggattctatgctctccaaccaagtggctgctacaaactggggtaca

SEQ ID NO: 7006 - DNA, 121 bp, synthetic construct
  misc_feature 1..121: note = Description of artificial sequence: synthetic polynucleotide sequence
  source 1..121: mol_type = other DNA
gcacttagattggttcactgatagagactcagcccaaatgagtccaaaaagaatcattcatggagttgtttgcttgtattttgctcaaatgatggggaaggaattggggttccgttttcct

SEQ ID NO: 7007 - DNA, 121 bp, synthetic construct
  misc_feature 1..121: note = Description of artificial sequence: synthetic polynucleotide sequence
  source 1..121: mol_type = other DNA
ggcagcatcccacagccctcacgtgatgccctgggtgagttcatacagacgtaaagacatgagcggcctgctgcaggagcacagggcagggagatggtggaggaagagatgccagagggag

SEQ ID NO: 7008 - DNA, 121 bp, synthetic construct
  misc_feature 1..121: note = Description of artificial sequence: synthetic polynucleotide sequence
  source 1..121: mol_type = other DNA
aaaaatgaaaatttacctgctaccaaccacatcatcttgtgcatctgtgtagctcagtttttatttctttagatctgtggtcctccgtggaaagagagccactaccccaagacacatctaa

SEQ ID NO: 7009 - DNA, 121 bp, synthetic construct
  misc_feature 1..121: note = Description of artificial sequence: synthetic polynucleotide sequence
  source 1..121: mol_type = other DNA
gtgcttgttaggcttgggataattaggattacatgtgggaaagtgacactgaaactgtactcgctatacaagagaatgcaagtgagaaaaaaatagcatcaacagcagcttaaaaaagtgc

SEQ ID NO: 7010 - DNA, 121 bp, synthetic construct
  misc_feature 1..121: note = Description of artificial sequence: synthetic polynucleotide sequence
  source 1..121: mol_type = other DNA
cccctttcttctctgacagatgccagagacgcggaacaattgagcaagaacaaggtgacacatattctgtctgtccacgatagtgccaggcctatgttggaggtaagagagcaccgtgggg

SEQ ID NO: 7011 - DNA, 121 bp, synthetic construct
  misc_feature 1..121: note = Description of artificial sequence: synthetic polynucleotide sequence
  source 1..121: mol_type = other DNA
tttatttttatgtatttactttttattattctgcagggagttaaatacctgtgcatcccagcagcggattcaccatctcaaaacctgtaagtttcttatttctgtattatttggagacatt

SEQ ID NO: 7012 - DNA, 121 bp, synthetic construct
  misc_feature 1..121: note = Description of artificial sequence: synthetic polynucleotide sequence
  source 1..121: mol_type = other DNA
tttctctttttttcttttcccaggacaagacatttcaaagaaagtattaaattcattcacgagtgccggctccgcggtgagagctgccttgtacactggtacgtgtgtctcttgcttaata

SEQ ID NO: 7013 - DNA, 173 bp, synthetic construct
  misc_feature 1..173: note = Description of artificial sequence: synthetic polynucleotide sequence
  source 1..173: mol_type = other DNA
gcctggccggggtctccaggagcgtgacactggtgatcgcatacatcatgaccgtcactgactttggctgggaggatgccctgcacaccgtgcgtgctgggagatcctgtgccaaccccaacgtgggcttccagagacagctccaggagtttgagaagcatgaggtccatcag

SEQ ID NO: 7014 - DNA, 184 bp, synthetic construct
  misc_feature 1..184: note = Description of artificial sequence: synthetic polynucleotide sequence
  source 1..184: mol_type = other DNA
gtatcggcagtggctgaaggaagaatatggagagagccctttgcaggatgcagaagaagccaaaaacattctgggtaaatataaggagcaagggcgcacagagccccagcccggcgccaggcggtggagcagttttccggcactggctccgctgacctacgataattatacgacggagacctaa

SEQ ID NO: 7015 - DNA, 121 bp, synthetic construct
  misc_feature 1..121: note = Description of artificial sequence: synthetic polynucleotide sequence
  source 1..121: mol_type = other DNA
tttaatatttgttgccagtaatgttctttcttcacagccgctccgggaattctgaagttctgggcctttctcagaagactgtaatgtacctgaagtttctgaaatattgcaaacccacaga

SEQ ID NO: 7016 - DNA, 217 bp, synthetic construct
  misc_feature 1..217: note = Description of artificial sequence: synthetic polynucleotide sequence
  source 1..217: mol_type = other DNA
catgaacctggagggcggcggccgaggcggagagttcggcatgagcgcggtgagctgcggcaacgggaagctccgccagtggctgatcgaccagatcgacagcggcaagtaccccgggctggtgtgggagaacgaggagaagagcatcttccgcatcccctggaagcacgcgggcaagcaggactacaaccgcgaggaggacgccgcgctcttcaag

SEQ ID NO: 7017 - DNA, 188 bp, synthetic construct
  misc_feature 1..188: note = Description of artificial sequence: synthetic polynucleotide sequence
  source 1..188: mol_type = other DNA
ggcttgggcactgtttaaaggaaagttccgagaaggcatcgacaagccggaccctcccacctggaagacgcgcctgcggtgcgctttgaacaagagcaatgactttgaggaactggttgagcggagccagctggacatctcagacccgtacaaagtgtacaggattgttcctgagggagccaaaaaag

SEQ ID NO: 7018 - DNA, 121 bp, synthetic construct
  misc_feature 1..121: note = Description of artificial sequence: synthetic polynucleotide sequence
  source 1..121: mol_type = other DNA
ttccccaaacatgtaggagccaagcagctcaccctggaggacccgcagatgtccatgagccacccctacaccatgacaacgccttacccttcgctcccagcccaggtatggtggagggcac

SEQ ID NO: 7019 - DNA, 146 bp, synthetic construct
  misc_feature 1..146: note = Description of artificial sequence: synthetic polynucleotide sequence
  source 1..146: mol_type = other DNA
gcaggttcacaactacatgatgccacccctcgaccgaagctggagggactacgtcccggatcagccacacccggaaatcccgtaccaatgtcccatgacgtttggaccccgcggccaccactggcaaggcccagcttgtgaaaatg

SEQ ID NO: 7020 - DNA, 121 bp, synthetic construct
  misc_feature 1..121: note = Description of artificial sequence: synthetic polynucleotide sequence
  source 1..121: mol_type = other DNA
aatgcaggttgccaggtgacaggaaccttttatgcttgtgccccacctgagtcccaggctcccggagtccccacagagccaagcataaggtctgccgaagccttggcgttctcaggtgagt

SEQ ID NO: 7021 - DNA, 355 bp, synthetic construct
  misc_feature 1..355: note = Description of artificial sequence: synthetic polynucleotide sequence
  source 1..355: mol_type = other DNA
gactgccggctgcacatctgcctgtactaccgggaaatcctcgtgaaggagctgaccacgtccagccccgagggctgccggatctcccatggacatacgtatgacgccagcaacctggaccaggtcctgttcccctacccagaggacaatggccagaggaaaaacattgagaagctgctgagccacctggagaggggcgtggtcctctggatggcccccgacgggctctatgcgaaaagactgtgccagagcaggatctactgggacgggcccctggcgctgtgcaacgaccggcccaacaaactggagagagaccagacctgcaagctctttgacacacagcagttcttgtcag

SEQ ID NO: 7022 - DNA, 121 bp, synthetic construct
  misc_feature 1..121: note = Description of artificial sequence: synthetic polynucleotide sequence
  source 1..121: mol_type = other DNA
acagagctgcaagcgtttgctcaccacggccgctccctgccaagattccaggtgactctatgctttggagaggagtttccagaccctcagaggcaaagaaagctcatcacagctcacgtga

SEQ ID NO: 7023 - DNA, 145 bp, synthetic construct
  misc_feature 1..145: note = Description of artificial sequence: synthetic polynucleotide sequence
  source 1..145: mol_type = other DNA
ggtagaacctctgctagccagacaactatattattttgctcaacaaaacagtggacatttcctgaggggctacgatttaccagaacacatcagcaatccagaagattaccacagatctatccgccattcctctattcaagaatga

SEQ ID NO: 7024 - DNA, 121 bp, synthetic construct
  misc_feature 1..121: note = Description of artificial sequence: synthetic polynucleotide sequence
  source 1..121: mol_type = other DNA
gagcagtgagaaccgcaggttacgaaggggccaggtgggcaggactgaaggataactccatggtaaccggcgtggatcgatgactatggggccaaagagtgggcatgcctgggtgtgtctg

SEQ ID NO: 7025 - DNA, 121 bp, synthetic construct
  misc_feature 1..121: note = Description of artificial sequence: synthetic polynucleotide sequence
  source 1..121: mol_type = other DNA
aacttaaagacataacgtggatttgtcagcaaaaaaagtaagaattcaagatggtattttaaaaaaaaacctcatatcttttttcttttctttagccttcagtttattccacaaattaata

SEQ ID NO: 7026 - DNA, 121 bp, synthetic construct
  misc_feature 1..121: note = Description of artificial sequence: synthetic polynucleotide sequence
  source 1..121: mol_type = other DNA
aagagcaatgaattattgaatacatgccacatgccacagagccacatcttcaaataatttgctgggcagaagaagcctgacccaaaagaatcatactgcctggttctacttttatgaaatt

SEQ ID NO: 7027 - DNA, 355 bp, synthetic construct
  misc_feature 1..355: note = Description of artificial sequence: synthetic polynucleotide sequence
  source 1..355: mol_type = other DNA
catgcaggcgcgctactccgtgtccagccccaactccctgggagtggtgccctacctcggcggcgagcagagctactaccgcgcggcggccgcggcggccgggggcggctacaccgccatgccggcccccatgagcgtgtactcgcaccctgcgcacgccgagcagtacccgggcggcatggcccgcgcctacgggccctacacgccgcagccgcagcccaaggacatggtgaagccgccctatagctacatcgcgctcatcaccatggccatccagaacgccccggacaagaagatcaccctgaacggcatctaccagttcatcatggaccgcttccccttctaccgggacaac

SEQ ID NO: 7028 - DNA, 474 bp, synthetic construct
  misc_feature 1..474: note = Description of artificial sequence: synthetic polynucleotide sequence
  source 1..474: mol_type = other DNA
aagcagggctggcagaacagcatccgccacaacctctcgctcaacgagtgcttcgtcaaggtgccgcgcgacgacaagaagccgggcaagggcagctactggacgctggacccggactcctacaacatgttcgagaacggcagcttcctgcggcggcggcggcgcttcaagaagaaggacgcggtgaaggacaaggaggagaaggacaggctgcacctcaaggagccgcccccgcccggccgccagcccccgcccgcgccgccggagcaggccgacggcaacgcgcccggtccgcagccgccgcccgtgcgcatccaggacatcaagaccgagaacggtacgtgcccctcgccgccccagcccctgtccccggccgccgccctgggcagcggcagcgccgccgcggtgcccaagatcgagagccccgacagcagcagcagcagcctgtccagcgggagcagccccccgggcagc

SEQ ID NO: 7029 - DNA, 475 bp, synthetic construct
  misc_feature 1..475: note = Description of artificial sequence: synthetic polynucleotide sequence
  source 1..475: mol_type = other DNA
ctgccgtcggcgcggccgctcagcctggacggtgcggattccgcgccgccgccgcccgcgccctccgccccgccgccgcaccatagccagggcttcagcgtggacaacatcatgacgtcgctgcgggggtcgccgcagagcgcggccgcggagctcagctccggccttctggcctcggcggccgcgtcctcgcgcgcggggatcgcacccccgctggcgctcggcgcctactcgcccggccagagctccctctacagctccccctgcagccagacctccagcgcgggcagctcgggcggcggcggcggcggcgcgggggccgcggggggcgcgggcggcgccgggacctaccactgcaacctgcaagccatgagcctgtacgcggccggcgagcgcgggggccacttgcagggcgcgcccgggggcgcgggcggctcggccgtggacgaccccctgcccgactactctctgcctc

SEQ ID NO: 7030 - DNA, 359 bp, synthetic construct
  misc_feature 1..359: note = Description of artificial sequence: synthetic polynucleotide sequence
  source 1..359: mol_type = other DNA
cggtcaccagcagcagctcgtcgtccctgagtcacggcggcggcggcggcggcggcgggggaggccaggaggccggccaccaccctgcggcccaccaaggccgcctcacctcgtggtacctgaaccaggcgggcggagacctgggccacttggcgagcgcggcggcggcggcggcggccgcaggctacccgggccagcagcagaacttccactcggtgcgggagatgttcgagtcacagaggatcggcttgaacaactctccagtgaacgggaatagtagctgtcaaatggccttcccttccagccagtctctgtaccgcacgtccggagctttcgtctacgactgtagcaagttttga

SEQ ID NO: 7031 - DNA, 121 bp, synthetic construct
  misc_feature 1..121: note = Description of artificial sequence: synthetic polynucleotide sequence
  source 1..121: mol_type = other DNA
atttgaagttaaaaaacatgagggttatttggagtttcaactgctgtgcactctggacatatagttgctcattaatggcagaaggcaggggcaacgtgaaggcacactaaccttaactaat

SEQ ID NO: 7032 - DNA, 121 bp, synthetic construct
  misc_feature 1..121: note = Description of artificial sequence: synthetic polynucleotide sequence
  source 1..121: mol_type = other DNA
cagctctgtgacctagtagtctctttgtatgtgctcatggagtacccatgtctctagtcgtttattggtttgtcaagggtgtaccatgtgccctttactgtgctaggggtacagcagtgaa

SEQ ID NO: 7033 - DNA, 121 bp, synthetic construct
  misc_feature 1..121: note = Description of artificial sequence: synthetic polynucleotide sequence
  source 1..121: mol_type = other DNA
ttgatccatggctcccaggaagggatggagggcagctggcatgcaggagacagagcatcaacgaggagctacagcagttggcttctgggtcctggagctccacggaaaactctgcaaccct

SEQ ID NO: 7034 - DNA, 121 bp, synthetic construct
  misc_feature 1..121: note = Description of artificial sequence: synthetic polynucleotide sequence
  source 1..121: mol_type = other DNA
acataaaactcattcatctataccatggcatgtggagcttgaaggaacctcagctttatctcccagggtttgctgatggaaatgctgacccatttcttctcgccccgaggatcctttccct

SEQ ID NO: 7035 - DNA, 121 bp, synthetic construct
  misc_feature 1..121: note = Description of artificial sequence: synthetic polynucleotide sequence
  source 1..121: mol_type = other DNA
agtcccaaagttttcaaatccactttattagagttaacttgatttattataggttattctacttatgcactattggacacttgtgcgctattcagggacagtaactctccatccaactgaa

SEQ ID NO: 7036 - DNA, 121 bp, synthetic construct
  misc_feature 1..121: note = Description of artificial sequence: synthetic polynucleotide sequence
  source 1..121: mol_type = other DNA
gaatcatactttggccagaaatgtaggttgtgcagctgtgggggttcttaatcttattcgttccctctttgtttatcacaaagctttgttggacaaaaaaaagcgagcaccaggtacggat

SEQ ID NO: 7037 - DNA, 121 bp, synthetic construct
  misc_feature 1..121: note = Description of artificial sequence: synthetic polynucleotide sequence
  source 1..121: mol_type = other DNA
acttcattctaagaagcttaaatttcttatgatcatgacctgttgaccttttaatggatggattacacagagcaaattcccaaatggacatctagaattgatgataatgataatcattgtt

SEQ ID NO: 7038 - DNA, 121 bp, synthetic construct
  misc_feature 1..121: note = Description of artificial sequence: synthetic polynucleotide sequence
  source 1..121: mol_type = other DNA
aaatatatgtacaagagtattctgtctttaaaaattatgctaaaatgtgttgaaaccctgttggcaaaaggaactttaaatgcagtgtgttttagaaatacacaatcctttaaaaatatta

SEQ ID NO: 7039 - DNA, 121 bp, synthetic construct
  misc_feature 1..121: note = Description of artificial sequence: synthetic polynucleotide sequence
  source 1..121: mol_type = other DNA
agagaacttaaggcagcatgttgccaaccacatcttaaaactgtgatcatggaggtttgacttgaacacctgggcatcaatgtcagcagtgaatttggctcatccatttagttaatccggg

SEQ ID NO: 7040 - DNA, 121 bp, synthetic construct
  misc_feature 1..121: note = Description of artificial sequence: synthetic polynucleotide sequence
  source 1..121: mol_type = other DNA
tctttaaagtctgtcccatcagacctgaagcactgtaaaagggcaaagacagttacaataacctttgtattctccagctcctagcacagcacttgacatgtagtaggtgcttcgacagata

SEQ ID NO: 7041 - DNA, 121 bp, synthetic construct
  misc_feature 1..121: note = Description of artificial sequence: synthetic polynucleotide sequence
  source 1..121: mol_type = other DNA
gcagacacatgtggtgtctactgtttgtctggtggctgccatattgctcagcacaggtagagtaagtggtgtgagtgtgagcagcatagggattagagagagtggggaacgtagaggggag

SEQ ID NO: 7042 - DNA, 121 bp, synthetic construct
  misc_feature 1..121: note = Description of artificial sequence: synthetic polynucleotide sequence
  source 1..121: mol_type = other DNA
tcacatggttcacatttattgtcaggtaactggctttctttgttccctcacataacccttctggccctgtaggtaactggatttgcaatcactgctttagatcttgcaagcctcctccctc

SEQ ID NO: 7043 - DNA, 121 bp, synthetic construct
  misc_feature 1..121: note = Description of artificial sequence: synthetic polynucleotide sequence
  source 1..121: mol_type = other DNA
ccacagctctgcagctcgtggcagcggcgcagcgctccagccatgtcgcgcggcctccagcttctgctcctgagctgcggtagggctcgcgagcgcctgtctcgcctgtcgccccccgccc

SEQ ID NO: 7044 - DNA, 121 bp, synthetic construct
  misc_feature 1..121: note = Description of artificial sequence: synthetic polynucleotide sequence
  source 1..121: mol_type = other DNA
tagcctacagcctggctcccgcgacgccggaggtgaaggtggcttgctccgaagatgtggacttgccctgcaccgccccctgggatccgcaggttccctacacggtctcctgggtcaaggt

SEQ ID NO: 7045 - DNA, 230 bp, synthetic construct
  misc_feature 1..230: note = Description of artificial sequence: synthetic polynucleotide sequence
  source 1..230: mol_type = other DNA
gttattggagggtggtgaagagaggatggagacaccccaggaagaccacctcaggggacagcactatcatcagaaggggcaaaatggttctttcgacgcccccaatgaaaggccctattccctgaagatccgaaacactaccagctgcaactcggggacatacaggtgcactctgcaggacccggatgggcagagaaacctaagtggcaaggtgatcttgagagtgacag

SEQ ID NO: 7046 - DNA, 121 bp, synthetic construct
  misc_feature 1..121: note = Description of artificial sequence: synthetic polynucleotide sequence
  source 1..121: mol_type = other DNA
tttaaaggatgccctgcacagcgtaaagaagagacttttaagaaatacagagcggagattgtcctgctgctggctctggttattttctacttaacactcatcattttcacttgtgtaagta

SEQ ID NO: 7047 - DNA, 121 bp, synthetic construct
  misc_feature 1..121: note = Description of artificial sequence: synthetic polynucleotide sequence
  source 1..121: mol_type = other DNA
ttgcacggctacagagtatcttcccagatttttctaaagctggcatggaacgagcttttctcccagttacctccccaaataagcatttagggctagtgactcctcacaagacagaactggt

SEQ ID NO: 7048 - DNA, 121 bp, synthetic construct
  misc_feature 1..121: note = Description of artificial sequence: synthetic polynucleotide sequence
  source 1..121: mol_type = other DNA
ggttgctatgaatgcttggcagccataagccagtaaagagggcatttctgtttaattccgtgtagagtcaggcacatatgagcagctcaataaacacctgctggaagaatgaatggttcca

SEQ ID NO: 7049 - DNA, 121 bp, synthetic construct
  misc_feature 1..121: note = Description of artificial sequence: synthetic polynucleotide sequence
  source 1..121: mol_type = other DNA
gaccaaaaggatctatctgttcaaaggcctagaaccaaaaagagaatattagctacttcgacaggaatgtggctatcaggggagacatggtgtaagagcagcacaccaaaggtgagatttt

SEQ ID NO: 7050 - DNA, 121 bp, synthetic construct
  misc_feature 1..121: note = Description of artificial sequence: synthetic polynucleotide sequence
  source 1..121: mol_type = other DNA
ctgtattgttttaagactaggaaattaatactattctgtagactttatcagtggcattatacatactcacctacttaacagagtgctagctgggaaaaggtgtctgtaaagagctttatga

SEQ ID NO: 7051 - DNA, 121 bp, synthetic construct
  misc_feature 1..121: note = Description of artificial sequence: synthetic polynucleotide sequence
  source 1..121: mol_type = other DNA
cttgaatttcaaaatctctgatcacaggcattttagaatggtgatacctcaaaccagtcttggagtataggttgttattttattaaacatttactaggaagaaagctgaagtccagaaatc

SEQ ID NO: 7052 - DNA, 121 bp, synthetic construct
  misc_feature 1..121: note = Description of artificial sequence: synthetic polynucleotide sequence
  source 1..121: mol_type = other DNA
tgacttattaaacagtctcccaaagggaataccttttccaaatgggctaaacagagaaaattttaccagctgaagacttaaactgcaactgtgcttaattatgtggaactgcatcttcatc

SEQ ID NO: 7053 - DNA, 121 bp, synthetic construct
  misc_feature 1..121: note = Description of artificial sequence: synthetic polynucleotide sequence
  source 1..121: mol_type = other DNA
atggtgctctacatctgtgggtctagacaaatgtataatgacatgtatccaccattatggtatcgtacagagtctcttcactgcccgaaaagtcctttgtgctctgctcattcatcccttc

SEQ ID NO: 7054 - DNA, 121 bp, synthetic construct
  misc_feature 1..121: note = Description of artificial sequence: synthetic polynucleotide sequence
  source 1..121: mol_type = other DNA
tatgtattggaatttgtacattggtgtctccaggacagccacttcctcttaaagcttctatggacacttcccacactgaagccccagttagaagtgtttaggactgcttcattcaatttac

SEQ ID NO: 7055 - DNA, 121 bp, synthetic construct
  misc_feature 1..121: note = Description of artificial sequence: synthetic polynucleotide sequence
  source 1..121: mol_type = other DNA
aaatgtatacttctttagatacttctggctttggataccacacaagaaataatatggcatagatagactgaatcttgcctatgatggttaattgcttctttctgttttttgttttgttttg

SEQ ID NO: 7056 - DNA, 121 bp, synthetic construct
  misc_feature 1..121: note = Description of artificial sequence: synthetic polynucleotide sequence
  source 1..121: mol_type = other DNA
tgtatccttctatattctttgtgtgtgtgtgtgctttttacaaaagtttatattcttctatgtgttcatccaaattattgatctgggtcattcacttataaacttaataagaacaggtgat

SEQ ID NO: 7057 - DNA, 121 bp, synthetic construct
  misc_feature 1..121: note = Description of artificial sequence: synthetic polynucleotide sequence
  source 1..121: mol_type = other DNA
actgcccaaggagaagcagataggtagacacagtgtccaaaaaagacagagcaagctcacatgtgattcaagtaatggtcaatatcaaggagtcagaggacagaaggatggggatggggtg

SEQ ID NO: 7058 - DNA, 121 bp, synthetic construct
  misc_feature 1..121: note = Description of artificial sequence: synthetic polynucleotide sequence
  source 1..121: mol_type = other DNA
tcaatggggaaacctcagttcagggtcttgcctaagtctgcttccagagccagtactctcaaccattaagcggaagccacctgtgtaatgaagctactgaaacatacattataaagcagaa

SEQ ID NO: 7059 - DNA, 121 bp, synthetic construct
  misc_feature 1..121: note = Description of artificial sequence: synthetic polynucleotide sequence
  source 1..121: mol_type = other DNA
taattttactattaccaaaaatgtttgtttatagcccaaagaacggtgaaactttccctatgaattccaaaggaactttgacacatcaccaacctgctattcacagatttaagtttgttca

SEQ ID NO: 7060 - DNA, 121 bp, synthetic construct
  misc_feature 1..121: note = Description of artificial sequence: synthetic polynucleotide sequence
  source 1..121: mol_type = other DNA
ctttgaatatggcaactataaataattcctacttggtactggctgccagtctttttatctctaagtagtgtgaggctgaatctactatgcctgggtcttcctttaagtagtttgctattgc

SEQ ID NO: 7061 - DNA, 412 bp, synthetic construct
  misc_feature 1..412: note = Description of artificial sequence: synthetic polynucleotide sequence
  source 1..412: mol_type = other DNA
tttacgctctttctccgcgaatgcggcgagcgagctggatgtctttgggcataatagtcactcgcttagcatggatggcgcaaaggtttgtgtcctcaaagagccctaccaagtaggcctcacaagcctcctgcagcgccatcaccgcagagctctggaagcgaagatcggtcttgaagtcttgggcgatttctcgcaccaggcgctggaacggcagcttccgaatcagcaactcggtcgacttttggtagcggcggatctcgcgcagagccacagtgcccgggcggtaacggtgaggctttttcacgccgccggtagccggcgcgctcttgcgagcagccttggtagccagctgcttgcgtggcgctttaccgccggtggatttccgagctgtctgtttagtacgagccat

SEQ ID NO: 7062 - DNA, 313 bp, synthetic construct
  misc_feature 1..313: note = Description of artificial sequence: synthetic polynucleotide sequence
  source 1..313: mol_type = other DNA
cctatttcttcttgggcgccgccttcttaggcttgacaaccttgggcttagcggccttgggcttcacagccttagcagcacttttggcagctttcttgggcttcgcaaccttggccttctttgggctcttagccactttcttggttacagtggccgcggccggcttcttcgctttcttcggtgttttcttagcgctcttcttcggagttgcgccgccagccgccttcttgggcttcttggctgccccaactggcttcttaggtttggttccgcccgcctttttaaccttgggcttggcttccccggaggctgc

SEQ ID NO: 7063 - DNA, 330 bp, synthetic construct
  misc_feature 1..330: note = Description of artificial sequence: synthetic polynucleotide sequence
  source 1..330: mol_type = other DNA
cttcttgttgagtttaaaggagccagaagcaccggtgcctttcgtttgcaccagagtgcccttgctcaccaggctcttgagaccaagtttgatacggctgttgtttttctccacatcatagccggcggcagccaacgcttttttcagagcagccagagaaactccgctacgctctttagaggcggccacagccttggtgatgagctctgacaccgggggaccagacgccttacgaggcgtacccccagcctttttggccgccttcttctttacaggggccttctccgcaggaggcgcggcagcgggagcggcaggagcagtctcggacat

SEQ ID NO: 7064 - DNA, 382 bp, synthetic construct
  misc_feature 1..382: note = Description of artificial sequence: synthetic polynucleotide sequence
  source 1..382: mol_type = other DNA
tttacttggagctggtgtacttggtgacggccttggtgccctccgacacggcgtgcttggccagctctccgggaagcagcaggcgcacggccgtctggatctccctggaggtgatggtcgagcgcttgttgtaatgcgccaggcgggaagcctcgcccgcgatgcgctcaaatatgtcgttaacgaaagaattcatgatgcccatggccttggaagagatgccagtgtcgggatggacctgtttcagcaccttgtacacgtacacagagtaactctccttgcggctgcgcttgcgcttcttgccatctttcttctgcgctttggtcactgccttcttggagcccttcttcggggcgggagcagacttggctggctcaggcat

SEQ ID NO: 7065 - DNA, 394 bp, synthetic construct
  misc_feature 1..394: note = Description of artificial sequence: synthetic polynucleotide sequence
  source 1..394: mol_type = other DNA
aatgtctggacgtggtaagcaaggaggcaaagctcgcgccaaagcgaaatcccgctcttctcgcgctggtctccagttcccggtgggccgagtgcaccgcctgctccgtaaaggcaactacgcagagcgggttggggcaggcgcgccggtgtacctggcggcggtgttagagtacctgaccgccgagatcctggagctggccggcaacgcggctcgcgacaacaagaagactcgcatcatcccgcgccacttgcagctggccatccgcaacgacgaggagctcaacaaactgctaggccgggtgaccattgctcagggcggcgtccttcctaacatccaggccgtgcttctgcctaagaagaccgagagtcaccacaaggccaagggcaagtga

SEQ ID NO: 7066 - DNA, 324 bp, synthetic construct
  misc_feature 1..324: note = Description of artificial sequence: synthetic polynucleotide sequence
  source 1..324: mol_type = other DNA
catgtccgagactgcgcctgccgcgcccgctgctccggcccctgccgagaagactcccgtgaagaagaaggcccgcaagtctgcaggtgcggccaagcgcaaagcgtctgggcccccggtgtccgagctcattactaaagctgttgccgcctccaaggagcgcagcggcgtatctttggccgctctcaagaaagcgctggcagccgctggctatgacgtggagaagaacaacagccgcatcaagctgggtctcaagagcctggtgagcaagggcaccctggtgcagaccaagggcaccggcgcgtcgggttccttcaaactcaa

SEQ ID NO: 7067 - DNA, 337 bp, synthetic construct
  misc_feature 1..337: note = Description of artificial sequence: synthetic polynucleotide sequence
  source 1..337: mol_type = other DNA
caagaaggcggcctctggggaagccaagcctaaggctaaaaaggcaggcgcggccaaggccaagaagccagcaggagcggcgaagaagcccaagaaggcgacgggggcggccacccccaagaagagcgccaagaagaccccaaagaaggcgaagaagccggctgcagctgctggagccaaaaaagcgaaaagcccgaaaaaggcgaaagcagccaagccaaaaaaggcgcccaagagcccagcgaaggccaaagcagttaaacccaaggcggctaaaccaaagaccgccaagcccaaggcagccaagccaaagaaggcggcagccaagaaaaagtag

SEQ ID NO: 7068 - DNA, 327 bp, synthetic construct
  misc_feature 1..327: note = Description of artificial sequence: synthetic polynucleotide sequence
  source 1..327: mol_type = other DNA
ttcactttttcttcggagctgccttctttgcctttgtaaccttcggcttccccgacttaggcttggccgccttgggcttaggggctttggccttagctggactcttggcagctttttttggctgaggtgttttcacctttttcgcactcttggccactttcttggtcccagcagcggttgctggcttctttaccttcttaggagtctttttgatgcttttcttcggggtagcggcgccagccaccttcttgggcttcttggctgccccagcaggcttcctaggcttggctgcgccagcctttttggccttgggtttgccttccccgg

SEQ ID NO: 7069 - DNA, 340 bp, synthetic construct
  misc_feature 1..340: note = Description of artificial sequence: synthetic polynucleotide sequence
  source 1..340: mol_type = other DNA
aagccgctttcttgttgagtttgaaggagccagaagcaccggtacctttggtctgcaccagagtacctttgctcaccaagctcttgaggccaagcttgatacggctgttgtttttttctacatcgtagccagcagccgcaagcgctttcttaagcgcggccagagaaacgccgctgcgctccttagaagctgccactgccttggtgataagctcagatactgggggtccggatgctttgcgtttcccagcagttgcgcctgccttcttcgcctttttcttcacaggtgttttttctgcgggtgcaggaatggtaggagcaagtggagcagtctccgacat

SEQ ID NO: 7070 - DNA, 382 bp, synthetic construct
  misc_feature 1..382: note = Description of artificial sequence: synthetic polynucleotide sequence
  source 1..382: mol_type = other DNA
tttacttagcgctggtgtacttggtgacggccttggtgccctcggacacggcgtgcttggccaactccccgggcagcagcaggcgcacggccgtctggatctccctggaggtgatggtcgagcgcttgttgtaatgcgccaggcgggaagcctcacccgcgatgcgttcgaagatgtcgttgacgaaggagttcatgattcccatggccttagaggagatgccggtgtcggggtggacctgcttcagcaccttgtacacgtatacggagtagctctccttgcggctgcgcttgcgcttcttgccgtccttcttctgcgccttagtcacggctttcttcgagcccttcttgggcgcgggagcggacttcgctggttccggcat

SEQ ID NO: 7071 - DNA, 336 bp, synthetic construct
  misc_feature 1..336: note = Description of artificial sequence: synthetic polynucleotide sequence
  source 1..336: mol_type = other DNA
cctacttctttttggcagccgccttcttggcctttgcagctttaggttttgctgctttgggcttagcggctttgggctttgccgccttcggcttaactgccttgggcttggcaggactcttggttgcctttttcggtttggcagcggccttggccttcttagggctcttcgccacctttttgacgccagccgccgcgggcttcttcgccttcttcggagtcttcttcactgcctttttcgcccctgcagccttcttggccttcttaggcgtggcccccgcgggcttcttagctttagcggcgcctgccttcttggctttgggcttggcttccccgg

SEQ ID NO: 7072 - DNA, 346 bp, synthetic construct
  misc_feature 1..346: note = Description of artificial sequence: synthetic polynucleotide sequence
  source 1..346: mol_type = other DNA
aggccgccttcttgttgagtttaaaggagccagaagcaccagtgcccttggtctgcaccagggtgcccttgctcaccaagctcttgaggcccagcttaatgcggctgttattcttctccacgtcgtagccaccggccgctaaggccttcttaagggctgccaaagaaaggccattgcgctccttagaagcagccacagccttggtgatcagctctgagactgggggccccgtcgctttgcgcttagcagcgccggcgccggcagccttcttagttgccttcttcttagccggggatttctccaccggcgctggggtggctgtctcggcaggagcggtttccgacat

SEQ ID NO: 7073 - DNA, 394 bp, synthetic construct
  misc_feature 1..394: note = Description of artificial sequence: synthetic polynucleotide sequence
  source 1..394: mol_type = other DNA
cttacttgcccttagctttgtggtggctctcagtcttcttggggagcagtacggcctggatgttaggcagaacaccgccctgagcgatggtaactttaccaagcagcttgttgagctcctcgtcgttgcggatggccagctgcaagtggcgcgggatgatgcgggtctttttgttgtcgcgggctgcgttgcccgccagctccaggatctcggcagttaggtactccagcaccgccgccaggtaaaccggcgcgccggccccgacccgctcagcgtagttgcccttgcggagcaggcggtgcactcgtcctacaggaaattggagcccagctctagaggagcgggttttggccttggcgcgagccttgccgccctgcttgccacgtccagacat

SEQ ID NO: 7074 - DNA, 121 bp, synthetic construct
  misc_feature 1..121: note = Description of artificial sequence: synthetic polynucleotide sequence
  source 1..121: mol_type = other DNA
tgctaaaactacaagatggaatccatcatagaaaatgaattaagcaactaggtagaaaatgtgacttggcgagcagttattgtcaagagcttctgacatttgccctcattatcctacctgc

SEQ ID NO: 7075 - DNA, 121 bp, synthetic construct
  misc_feature 1..121: note = Description of artificial sequence: synthetic polynucleotide sequence
  source 1..121: mol_type = other DNA
gcgccccgaagcctcctcctgctgctctcaggggccctggccctgaccgatacttgggcgggtgagtgcggggtccagagagaaacggcctctgtggggaggagtgaggggcccgcccggt

SEQ ID NO: 7076 - DNA, 121 bp, synthetic construct
  misc_feature 1..121: note = Description of artificial sequence: synthetic polynucleotide sequence
  source 1..121: mol_type = other DNA
ggcctggttgtccttgcagctgtagtcactggagctgcggtcgctgctgtgctgtggagaaagaagagctcaggtaaggaaggggtgacaagtggggtctgagttttcttgtcccactggg

SEQ ID NO: 7077 - DNA, 121 bp, synthetic construct
  misc_feature 1..121: note = Description of artificial sequence: synthetic polynucleotide sequence
  source 1..121: mol_type = other DNA
tcagattctccccagacgccgaggatggccgtcatggcgccccgaaccctcctcctgctactctcgggggccctggccctgacccagacctgggcgggtgagtgcggggtcgggagggaaa

SEQ ID NO: 7078 - DNA, 271 bp, synthetic construct
  misc_feature 1..271: note = Description of artificial sequence: synthetic polynucleotide sequence
  source 1..271: mol_type = other DNA
ggctcccactccatgaggtatttcttcacatccgtgtcccggcccggccgcggggagccccgcttcatcgccgtgggctacgtggacgacacgcagttcgtgcggttcgacagcgacgccgcgagccagaggatggagccgcgggcgccgtggatagagcaggaggggccggagtattgggaccaggagacacggaatgtgaaggcccagtcacagactgaccgagtggacctggggaccctgcgcggctactacaaccagagcgaggccg

SEQ ID NO: 7079 - DNA, 277 bp, synthetic construct
  misc_feature 1..277: note = Description of artificial sequence: synthetic polynucleotide sequence
  source 1..277: mol_type = other DNA
ggttctcacaccatccagataatgtatggctgcgacgtggggtcggacgggcgcttcctccgcgggtaccggcaggacgcctacgacggcaaggattacatcgccctgaacgaggacctgcgctcttggaccgcggcggacatggcggctcagatcaccaagcgcaagtgggaggcggcccatgaggcggagcagttgagagcctacctggatggcacgtgcgtggagtggctccgcagatacctggagaacgggaaggagacgctgcagcgcacgg

SEQ ID NO: 7080 - DNA, 277 bp, synthetic construct
  misc_feature 1..277: note = Description of artificial sequence: synthetic polynucleotide sequence
  source 1..277: mol_type = other DNA
gacccccccaagacacatatgacccaccaccccatctctgaccatgaggccaccctgaggtgctgggccctgggcttctaccctgcggagatcacactgacctggcagcgggatggggaggaccagacccaggacacggagctcgtggagaccaggcctgcaggggatggaaccttccagaagtgggcggctgtggtggtgccttctggagaggagcagagatacacctgccatgtgcagcatgagggtctgcccaagcccctcaccctgagatggg

SEQ ID NO: 7081 - DNA, 121 bp, synthetic construct
  misc_feature 1..121: note = Description of artificial sequence: synthetic polynucleotide sequence
  source 1..121: mol_type = other DNA
agagctgtcttcccagcccaccatccccatcgtgggcatcattgctggcctggttctccttggagctgtgatcactggagctgtggtcgctgccgtgatgtggaggaggaagagctcaggt

SEQ ID NO: 7082 - DNA, 121 bp, synthetic construct
  misc_feature 1..121: note = Description of artificial sequence: synthetic polynucleotide sequence
  source 1..121: mol_type = other DNA
cctggctcctttctggtatctcacaggacattttcttctcacagatagaaaaggagggagttacactcaggctgcaagtaagtatgaaggaggctgatgcctgaggtccttgggatattgt

SEQ ID NO: 7083 - DNA, 121 bp, synthetic construct
  misc_feature 1..121: note = Description of artificial sequence: synthetic polynucleotide sequence
  source 1..121: mol_type = other DNA
tgggatctgaccaggttctgtttttgttctaccccaggcagtgacagtgcccagggctctgatgtgtccctcacagcttgtaaaggtgagagcttggaggacctaatgtgtgttgggtgtt

SEQ ID NO: 7084 - DNA, 121 bp, synthetic construct
  misc_feature 1..121: note = Description of artificial sequence: synthetic polynucleotide sequence
  source 1..121: mol_type = other DNA
aggtgtgacccctcactgtgatggatatgaatttgttcatgaatatttttttctatagtgtgagacagctgccttgtgtgggactgagaggcaagagttgttcctgcccttccctttgtga

SEQ ID NO: 7085 - DNA, 121 bp, synthetic construct
  misc_feature 1..121: note = Description of artificial sequence: synthetic polynucleotide sequence
  source 1..121: mol_type = other DNA
agagaaaatacagcctcttccttacctttgaatttttttaggctccctgtgatggagtcatgtcttgattttgcttcactgagttttttctccagttccagaggaacaggggttgggttga

SEQ ID NO: 7086 - DNA, 121 bp, synthetic construct
  misc_feature 1..121: note = Description of artificial sequence: synthetic polynucleotide sequence
  source 1..121: mol_type = other DNA
tgcttgatatgtgcaatttcccacacccaccgggcccacaccgttgtgccactggacgatgctacacaggagtacaaggtggggaagcagacacacgatgtcagtgtgggtaaaaagggag

SEQ ID NO: 7087 - DNA, 121 bp, synthetic construct
  misc_feature 1..121: note = Description of artificial sequence: synthetic polynucleotide sequence
  source 1..121: mol_type = other DNA
ccctgccaactcacctctcccaagttgccctctctcattgcccactcaccactactagggtcctgtggggtgcgggggtcccgaggaaaagaggtgaaaaggacgacgtggagctggggat

SEQ ID NO: 7088 - DNA, 121 bp, synthetic construct
  misc_feature 1..121: note = Description of artificial sequence: synthetic polynucleotide sequence
  source 1..121: mol_type = other DNA
ccgcctgcataattagttgggacctgtggacagaagggaagtggagggtggagcccagcagcccttactcccaggagaaaggcccagtgctgcagaggcagacgctcctgaaacctgaaat

SEQ ID NO: 7089 - DNA, 121 bp, synthetic construct
  misc_feature 1..121: note = Description of artificial sequence: synthetic polynucleotide sequence
  source 1..121: mol_type = other DNA
ccgcagatccagctacctctgttagccgcccgaaggtacaagttgcagaagcagcttgacagcctcacagccaggaccccatcagaaggggaggcagggactcagaggcaacaaaaggtaa

SEQ ID NO: 7090 - DNA, 121 bp, synthetic construct
  misc_feature 1..121: note = Description of artificial sequence: synthetic polynucleotide sequence
  source 1..121: mol_type = other DNA
ctttggcacttgtgatatgacttgcacaggtgagttacctctctcagtgttggttcctcttctgtgaaatggggctaatcatttgctttattgagtgccttctaggctgggtactaggaga

SEQ ID NO: 7091 - DNA, 121 bp, synthetic construct
  misc_feature 1..121: note = Description of artificial sequence: synthetic polynucleotide sequence
  source 1..121: mol_type = other DNA
agtcacaaaggagaggtgtgaagaaatcctgcatctcagtcccacacaggcagctgtctcaggctacagaacacaatagtcatgaacaaattcaggtcagtcatggtaagcgatgacactc

SEQ ID NO: 7092 - DNA, 121 bp, synthetic construct
  misc_feature 1..121: note = Description of artificial sequence: synthetic polynucleotide sequence
  source 1..121: mol_type = other DNA
ccccacccccgaccacttcagctccccagaatctcacctttacaagtgatgagagactcatcagagccctgggcactgttgctgcctggggtagaacaaaaaaaaagacctggtcagagcc

SEQ ID NO: 7093 - DNA, 121 bp, synthetic construct
  misc_feature 1..121: note = Description of artificial sequence: synthetic polynucleotide sequence
  source 1..121: mol_type = other DNA
atggagtaggtgagctcctccacacgcccgccgccatcacttacacgcagcctgagagcagctccctccttttccacctgtgggaagaaaatgccctatgaggggactgggaggaggcagg

SEQ ID NO: 7094 - DNA, 121 bp, synthetic construct
  misc_feature 1..121: note = Description of artificial sequence: synthetic polynucleotide sequence
  source 1..121: mol_type = other DNA
cctgagctcttcctcctacacatcatagcggtgaccacagctccaaggacagctaggacaaccaggacagccaggccagcaacgatgcccatgatggggatggtgggctgggaagatggct

SEQ ID NO: 7095 - DNA, 277 bp, synthetic construct
  misc_feature 1..277: note = Description of artificial sequence: synthetic polynucleotide sequence
  source 1..277: mol_type = other DNA
ccccagctcagggtgaggggctcttgcagcccctcgtgctgcatatggcacgtgtatctctgctcttgtccagaaggcaccaccacagctgcccacttctggaaggttccatctcctgctggcctggtctccacaagctcggtgtcctgggtctggtcctccccatcccgctgccaggtcagtgtgatctccgcagggtagaagcccagggcccagcacctcagggtggcctcatggtcagagagggggtggtgggtcacgtgtgtctttgggggtt

SEQ ID NO: 7096 - DNA, 277 bp, synthetic construct
  misc_feature 1..277: note = Description of artificial sequence: synthetic polynucleotide sequence
  source 1..277: mol_type = other DNA
cctgcgcgctgcagcgtctccttcccgttctccaggtatctgcggagccactccacgcacgtgccctccaggtaggctctcagctgctccgccgcacgggccgcctccaacttgcgctgggtgatctgagccgcggtgtccgcggcggtccaggagcgcaggtcctcgttcagggcgatgtaatccttgccgtcgtaggcggactggtcatacccgcggaggaggcgcccgtcgggccccaggtcgcagccagacatcctctggagggtgtgagacc

SEQ ID NO: 7097 - DNA, 271 bp, synthetic construct
  misc_feature 1..271: note = Description of artificial sequence: synthetic polynucleotide sequence
  source 1..271: mol_type = other DNA
ccgtcctcgctctggttgtagtagccgcgcaggttccgcaggctcactcggtcagcctgtgcctggcgcttgtacttctgtgtctcccggtcccaatactccggcccctcctgctccacccacggcgcccgcggctcccctctcggactcgcggcgtcgctgtcgaaccgcacgaactgcgtgtcgtccacgtagcccactgagatgaagcggggctctccgcggccgggccgggacacggcggtgtcgaaatacctcatggagtgggagc

SEQ ID NO: 7098 - DNA, 121 bp, synthetic construct
  misc_feature 1..121: note = Description of artificial sequence: synthetic polynucleotide sequence
  source 1..121: mol_type = other DNA
cttccctcccaaccccgcactcacaggcccaggtctcggtcagggccaggcctcccgagagcagcaggaggagggctcggggcgccatgacccgcatctcggcctctggggagaatgtgag

SEQ ID NO: 7099 - DNA, 121 bp, synthetic construct
  misc_feature 1..121: note = Description of artificial sequence: synthetic polynucleotide sequence
  source 1..121: mol_type = other DNA
gccaccccacccactctagaccccaagaatctcaccttttcaagctgtgagagacacatcagagccctgggcactgtcgctgcctggagtagaacaaaaacaggacctggtcagagcccgc

SEQ ID NO: 7100 - DNA, 121 bp, synthetic construct
  misc_feature 1..121: note = Description of artificial sequence: synthetic polynucleotide sequence
  source 1..121: mol_type = other DNA
aattatggggtgggtgagctcctccacactcccacccccaccacttacacgcagcctgagagtagctccctccttttccacctgtgggaagaaaatgtcctgtgagggcactgggaggaag

SEQ ID NO: 7101 - DNA, 121 bp, synthetic construct
  misc_feature 1..121: note = Description of artificial sequence: synthetic polynucleotide sequence
  source 1..121: mol_type = other DNA
acctgaactcttcctcctacacatcacagcagcgaccacagctccgatgaccacaactgctaggacagccaggccagcaacaatgcccacgatggggacggtggactgggaagacggctct

SEQ ID NO: 7102 - DNA, 277 bp, synthetic construct
  misc_feature 1..277: note = Description of artificial sequence: synthetic polynucleotide sequence
  source 1..277: mol_type = other DNA
ccccatctcagggtgaggggcttcggcagcccctcatgctgtacatggcatgtgtatctctgctcttctccagaaggcaccaccacagctgcccacttctggaaggttctatctcctgctggtctggtctccacaagctcagtgtcctgagtttggtcctcgccatcccgctgccaggtcagtgtgatctccgcagggtagaaacccagggcccagcacctcagggtggcctcatggtcagagatggggtggtgggtcacgtgtgtctttggggggt

SEQ ID NO: 7103 - DNA, 277 bp, synthetic construct
  misc_feature 1..277: note = Description of artificial sequence: synthetic polynucleotide sequence
  source 1..277: mol_type = other DNA
ccagcgcgctccagcttgtccttcccgttctccaggtatctgcggagccactccacgcactcgccctccaggtaggctctccgctgctccgcctcacgggccgcctcccacttgcgctgggtgatctgagccgccgtgtccgcggcggtccaggagcgcaggtcctcgttcagggcgatgtaatccttgccgtcgtaggcgtactggtcatgcccgcggaggaggcgcccgtccggccccacgtcgcagccgtacatgctctggagggtgtgagacc

SEQ ID NO: 7104 - DNA, 271 bp, synthetic construct
  misc_feature 1..271: note = Description of artificial sequence: synthetic polynucleotide sequence
  source 1..271: mol_type = other DNA
ccggcctcgctctggttgtagtagccgcgcaggttccgcaggctctctcggtcagtctgtgcctgggccttgtagatctgtgtgttccggtcccaatactccggcccctcctgctctatccacggcgcccgcggctcctctctcggactcgcggcgtcgctgtcgaacctcacgaactgggtgtcgtccacgtagcccactgagatgaagcggggctccccgcggccgggccgggacacggaggtgtagaaatacctcatggagtgggagc

SEQ ID NO: 7105 - DNA, 121 bp, synthetic construct
  misc_feature 1..121: note = Description of artificial sequence: synthetic polynucleotide sequence
  source 1..121: mol_type = other DNA
atttccctcccgacccgcactcaccggcccaggtctcggtcagggccagggccgccgagagcagcaggaggacggttcggggcgccatgaccagcatctcggcgtctgaggagactctgag

SEQ ID NO: 7106 - DNA, 121 bp, synthetic construct
  misc_feature 1..121: note = Description of artificial sequence: synthetic polynucleotide sequence
  source 1..121: mol_type = other DNA
ctctttctctgcaggttctccccatgacaccacctgaacgtctcttcctcccaagggtgtgtggcaccaccctacacctcctccttctggggctgctgctggttctgctgcctggggccca

SEQ ID NO: 7107 - DNA, 456 bp, synthetic construct
  misc_feature 1..456: note = Description of artificial sequence: synthetic polynucleotide sequence
  source 1..456: mol_type = other DNA
ctcaccccaccatcacggccccaaagaaggtcttccctctcgcgaagtccaccatatcggggtgactgatgttgacgtacaccctctcgcccctccggagctgcaccaggccgccgaaccccacgctcgtgtaccagagaggcccgtacccttgtctcctggccgggtccagcactggagtcaccgtctcggcgccctcgagcagcagctcgggagtgcccggcccgtaggcgccccccgcccggtacagagagctgcgcagcgtgaccgagcggccctgggggtccccgccgccagggggcgcccggccccggtagccgacgagacagtagaggtaatagaggccgtcctgcgggagcgccagcccctcggcgtccgagaactgcgtcccgctcgtcagaaacgcctgttccttcgtcgtctcccagcctagcccctgccccttcagcggagcgc

SEQ ID NO: 7108 - DNA, 121 bp, synthetic construct
  misc_feature 1..121: note = Description of artificial sequence: synthetic polynucleotide sequence
  source 1..121: mol_type = other DNA
ttattcaggtcttggaggtccttacctatgaggtgggcagctgggagcccggggctgagatctgtttctggctcctcctctggcagcttctgaaaccctggaaggggcaaagagtccacga

SEQ ID NO: 7109 - DNA, 121 bp, synthetic construct
  misc_feature 1..121: note = Description of artificial sequence: synthetic polynucleotide sequence
  source 1..121: mol_type = other DNA
gggtctgaagcggggaaggagagacagtctgctcttacccagtccttgctgggcctgtgccccggggtcggccgtctccgttacctggttgggtggggtcacagtgcccagagttcagatt

SEQ ID NO: 7110 - DNA, 163 bp, synthetic construct
  misc_feature 1..163: note = Description of artificial sequence: synthetic polynucleotide sequence
  source 1..163: mol_type = other DNA
ccagtcctccctgatcctggggcactaaggccagcacagccaggacagtgataggcaccgccagcaacaaggtcaccagagaagtggctcctgccacagctagcaggagggaacccctcccctggagcctcccacccctgccctccagccccagtgcccccat

SEQ ID NO: 7111 - DNA, 121 bp, synthetic construct
  misc_feature 1..121: note = Description of artificial sequence: synthetic polynucleotide sequence
  source 1..121: mol_type = other DNA
acggcccttcctggctggcccagcacccagcccacctgcagggagattccatagatgacgtccaggggatcgatgacattgcctagagacttgctcatcttccggccgtgagcatctcgca

SEQ ID NO: 7112 - DNA, 121 bp, synthetic construct
  misc_feature 1..121: note = Description of artificial sequence: synthetic polynucleotide sequence
  source 1..121: mol_type = other DNA
tgttggcttgctcctcagattgtccaactccagctcctggactactaagccttagctgtatgttggagcctctggatttgggtgggggtgacgaggatgagaatgaggcagtgggacagcc

SEQ ID NO: 7113 - DNA, 121 bp, synthetic construct
  misc_feature 1..121: note = Description of artificial sequence: synthetic polynucleotide sequence
  source 1..121: mol_type = other DNA
ctgatctggacagctccaagtgagggggctgggacatcccacaggaggcatcctgaaggggacagggactctgtcttcacttccaggacctcctctcctataaaagcctatgtggggcatt

SEQ ID NO: 7114 - DNA, 121 bp, synthetic construct
  misc_feature 1..121: note = Description of artificial sequence: synthetic polynucleotide sequence
  source 1..121: mol_type = other DNA
gtctctaagccttgcagggaacaacaagaacaacaacagaaaagagtagaaaaagaaattgaacttaccgcggggtgctgaaggtggaccagctgaaaaacagagaggtatcttagcaact

SEQ ID NO: 7115 - DNA, 121 bp, synthetic construct
  misc_feature 1..121: note = Description of artificial sequence: synthetic polynucleotide sequence
  source 1..121: mol_type = other DNA
acagagcgcccaagaagaaaatggccataagtggagtccctgtgctaggatttttcatcatagctgtgctgatgagcgctcaggaatcatgggctatcaaaggtaggtgctgagggaatga

SEQ ID NO: 7116 - DNA, 121 bp, synthetic construct
  misc_feature 1..121: note = Description of artificial sequence: synthetic polynucleotide sequence
  source 1..121: mol_type = other DNA
gaagaacatgtgatcatccaggccgagttctatctgaatcctgaccaatcaggcgagtttatgtttgactttgatggtgatgagattttccatgtggatatggcaaagaaggagacggtct

SEQ ID NO: 7117 - DNA, 121 bp, synthetic construct
  misc_feature 1..121: note = Description of artificial sequence: synthetic polynucleotide sequence
  source 1..121: mol_type = other DNA
cttgaagaatttggacgatttgccagctttgaggctcaaggtgcattggccaacatagctgtggacaaagccaacctggaaatcatgacaaagcgctccaactatactccgatcaccaatg

SEQ ID NO: 7118 - DNA, 283 bp, synthetic construct
  misc_feature 1..283: note = Description of artificial sequence: synthetic polynucleotide sequence
  source 1..283: mol_type = other DNA
gtacctccagaggtaactgtgctcacaaacagccctgtggaactgagagagcccaacgtcctcatctgtttcatagacaagttcaccccaccagtggtcaatgtcacgtggcttcgaaatggaaaacctgtcaccacaggagtgtcagagacagtcttcctgcccagggaagaccaccttttccgcaagttccactatctccccttcctgccctcaactgaggacgtttacgactgcagggtggagcactggggcttggatgagcctcttctcaagcactggg

SEQ ID NO: 7119 - DNA, 156 bp, synthetic construct
  misc_feature 1..156: note = Description of artificial sequence: synthetic polynucleotide sequence
  source 1..156: mol_type = other DNA
gagtttgatgctccaagccctctcccagagactacagagaacgtggtgtgtgccctgggcctgactgtgggtctggtgggcatcattattgggaccatcttcatcatcaagggattgcgcaaaagcaatgcagcagaacgcagggggcctctgtaa

SEQ ID NO: 7120 - DNA, 121 bp, synthetic construct
  misc_feature 1..121: note = Description of artificial sequence: synthetic polynucleotide sequence
  source 1..121: mol_type = other DNA
gatttgcttgtctcgaggtcctcacaattgctctacagctcagagcagcaactgctgaggctgccttgggaagaagatgatcctaaacaaagctctgctgctgggggccctcgccctgact

SEQ ID NO: 7121 - DNA, 121 bp, synthetic construct
  misc_feature 1..121: note = Description of artificial sequence: synthetic polynucleotide sequence
  source 1..121: mol_type = other DNA
attgagtttgaatctccttctcacttggagtggaagttgtaggattctgcctctaggaaatgtgccatcctacagaataaataaaagggagataatgaggcttcaacccaacttgccccca

SEQ ID NO: 7122 - DNA, 121 bp, synthetic construct
  misc_feature 1..121: note = Description of artificial sequence: synthetic polynucleotide sequence
  source 1..121: mol_type = other DNA
ctaccaaagggcaagtagggaaacagaccaacagagatgttaccttctgaataattggacccaggaagaggagtgtaacctaagagaggaagatacttgattataccagtctttgtggatg

SEQ ID NO: 7123 - DNA, 121 bp, synthetic construct
  misc_feature 1..121: note = Description of artificial sequence: synthetic polynucleotide sequence
  source 1..121: mol_type = other DNA
actagagtggccagctctccgccagctgatcacaccaagagagaagatgatgaggcccaggcccagagtcactgcagacacagaaaccttcagggtctgcatgggggacagcccaggtgct

SEQ ID NO: 7124 - DNA, 286 bp, synthetic construct
  misc_feature 1..286: note = Description of artificial sequence: synthetic polynucleotide sequence
  source 1..286: mol_type = other DNA
ctccagtcccgaaggatgggctcaggagccccagtgtgctctaccacacaggtgtaagtgtccccgtaagagggggttaaggctaaatgggagagggtctggtatgtccagtctccattgggctgggcagtcttgtgcgcactgctgtgaggcatgacaagcttcccgttcttcctccacgtgatagtcacttctgctggatagaagccccacacatagcaggccagcatcacaggctccctcgtgttaaaaggagtggttttggctacttgcacagatggtggcc

SEQ ID NO: 7125 - DNA, 283 bp, synthetic construct
  misc_feature 1..283: note = Description of artificial sequence: synthetic polynucleotide sequence
  source 1..283: mol_type = other DNA
cgtgtcctgttggtcagtgatccccagaagggctgggtgtgtgtggcacaattctgaagcccattgcgcaagcgctgcatcagggtgtctttttggttgaggtgctgtgagaggacattcgccaagctattcagcaccccaaattcgcaaggggccatcttattctcctctggatcccagcaggtcagcagatccttgttgaaggagatgcagtatgtgaaatcctttggagtcccagcatcatccaacagacaggtgctttccacatgggccacgaagccac

SEQ ID NO: 7126 - DNA, 121 bp, synthetic construct
  misc_feature 1..121: note = Description of artificial sequence: synthetic polynucleotide sequence
  source 1..121: mol_type = other DNA
ggaagggagagtccccagaagaagtgtccttacctgctcctgtgcagcccaggctgagccccagcagcagcggcaggaatgtgatcatgctctgctctgtaaagatgccgggagttcagtc

SEQ ID NO: 7127 - DNA, 121 bp, synthetic construct
  misc_feature 1..121: note = Description of artificial sequence: synthetic polynucleotide sequence
  source 1..121: mol_type = other DNA
tgagcatcctctgtttggatggccgaagctgctggcatcaaactctggtctggaagaatcagtctgggggagagacagggatggaggaaaggcatcaggggatccatcctcctcctccttc

SEQ ID NO: 7128 - DNA, 121 bp, synthetic construct
  misc_feature 1..121: note = Description of artificial sequence: synthetic polynucleotide sequence
  source 1..121: mol_type = other DNA
tgagcaaggcttccggaagtagatgatgagaacaatgcccacgatgatgcccagcacacccaggccaaaggccacgccacacagcacattctccagcagatctgagggcagtgcgttccgg

SEQ ID NO: 7129 - DNA, 280 bp, synthetic construct
  misc_feature 1..280: note = Description of artificial sequence: synthetic polynucleotide sequence
  source 1..280: mol_type = other DNA
ccccaataggcaattgctgtgtagcggtcaatttcgtgagtcacaatgcaggagaaaatgtcagaaggttctggtgtgaagtttaagtaagaaaaggcctggaagctgagtccatcgacagctgagacaaaagtaggcccaaatccttccacagggacggaatgatgctgccagttcactgtcagcatgggtgggaagagattactgacaaaacagaccaaagtgttgggcttgccaaactccaggggcttcagcgtgaacacttcagcgataggaaacc

SEQ ID NO: 7130 - DNA, 286 bp, synthetic construct
  misc_feature 1..286: note = Description of artificial sequence: synthetic polynucleotide sequence
  source 1..286: mol_type = other DNA
cctctggacaccgggattttcccatcaagttttggccctatttgctggatcatccactcgcagaactctttgtcaaataaaatggcaggagcatctccctgttcctgagcccagtcagcaaattcgggcaggcgaggcacccgagtgttctgggaaaagtcgaagaagaaaagctggtcctcgtcgtaggcctcagagagtcccacactgggactcccatcctggcagtacactgtgtgcaggaatgtgtggttttgcaggtcatctggccacattggagtaggag

SEQ ID NO: 7131 - DNA, 121 bp, synthetic construct
  misc_feature 1..121: note = Description of artificial sequence: synthetic polynucleotide sequence
  source 1..121: mol_type = other DNA
taggagtaccatcttaccttcagggacggcccaggagtggggtagcagccacagaagtggtaacatctgtagcagcgcagctccttggttctgttcatgacccataccttcttgccacaca

SEQ ID NO: 7132 - DNA, 121 bp, synthetic construct
  misc_feature 1..121: note = Description of artificial sequence: synthetic polynucleotide sequence
  source 1..121: mol_type = other DNA
cctggggaagggaatgcagggttgctggggctgggcccagaagcagcagcaccagggaagaggattcgaaaaccctctctcttgtatgagggctttgagagccccacaatggcttcggtgc

SEQ ID NO: 7133 - DNA, 121 bp, synthetic construct
  misc_feature 1..121: note = Description of artificial sequence: synthetic polynucleotide sequence
  source 1..121: mol_type = other DNA
acccagggtgagactccccacagaccccctctacacctctccagcccttcccttctcacgccctcccaccccccagcttacccgggctcccttctctccactggcaccaggaaagccagga

SEQ ID NO: 7134 - DNA, 121 bp, synthetic construct
  misc_feature 1..121: note = Description of artificial sequence: synthetic polynucleotide sequence
  source 1..121: mol_type = other DNA
cctcactaatggcatacaccaggacgtaagtggctcaggccaagaatcccgcagtcaccttcgcctcacctctttcacactgtgtggcagagtaatgatggccacaagttctttgttctct

SEQ ID NO: 7135 - DNA, 121 bp, synthetic construct
  misc_feature 1..121: note = Description of artificial sequence: synthetic polynucleotide sequence
  source 1..121: mol_type = other DNA
catggcgacaccggacgcggggctccctggggctgagggcgtggagccggcgccctgggcgcagctggaggcccccgcccgcctcctgctgcaggcgctgcaggcggggcctgagggggcg

SEQ ID NO: 7136 - DNA, 121 bp, synthetic construct
  misc_feature 1..121: note = Description of artificial sequence: synthetic polynucleotide sequence
  source 1..121: mol_type = other DNA
gcctgggggtgctccgggcgctgggcagccgcggctgggagcccttcgactggggtcgcttgctcgaggccctgtgccgggaggagccggtcgtgcaggggcctgacggccgtctggagct

SEQ ID NO: 7137 - DNA, 121 bp, synthetic construct
  misc_feature 1..121: note = Description of artificial sequence: synthetic polynucleotide sequence
  source 1..121: mol_type = other DNA
ggaaaccactgttgctgcgattgccccggatatgccagaggaacctgatgtccctgctgatggccgttcggccatcgctgccggaaagtgggctcctctctgtgctgcagattgcccagca

SEQ ID NO: 7138 - DNA, 121 bp, synthetic construct
  misc_feature 1..121: note = Description of artificial sequence: synthetic polynucleotide sequence
  source 1..121: mol_type = other DNA
ggacctagcccctgacccagatgcctggctccgtgccctgggggaattgctgcgaagggatttgggggtggggacctccatggagggagcttctccactgtctgaaagatgccagagacag

SEQ ID NO: 7139 - DNA, 121 bp, synthetic construct
  misc_feature 1..121: note = Description of artificial sequence: synthetic polynucleotide sequence
  source 1..121: mol_type = other DNA
ccaaagtctatgtagggggctgggcctggggggcaggaggttgaaatccccccaggctccagaccctgaagaagaggagaacagggactcccagcagcctgggaaacgcagaaaggactca

SEQ ID NO: 7140 - DNA, 121 bp, synthetic construct
  misc_feature 1..121: note = Description of artificial sequence: synthetic polynucleotide sequence
  source 1..121: mol_type = other DNA
gaggaagaggctgccagtcctgaggggaagagggtccccaaaagattacggtgttgggaagaggaagaagatcatgagaaggagagacccgaacataagtcactggaatccctggcagatg

SEQ ID NO: 7141 - DNA, 121 bp, synthetic construct
  misc_feature 1..121: note = Description of artificial sequence: synthetic polynucleotide sequence
  source 1..121: mol_type = other DNA
aggaagtgcatctcctattaaggaccagcctgtcatggcagttaagactggcgaggacggttcgaatctggatgatgctaaaggtctggctgagagtttggagttgcccaaagctatccag

SEQ ID NO: 7142 - DNA, 121 bp, synthetic construct
  misc_feature 1..121: note = Description of artificial sequence: synthetic polynucleotide sequence
  source 1..121: mol_type = other DNA
ggggagggacgtagcagtgactgggctctcctccacaggaccagcttcccaggctgcagcagctgctgaagaccttggaggaggtgactggccccacagtgctcaccatagcctttcttcc

SEQ ID NO: 7143 - DNA, 121 bp, synthetic construct
  misc_feature 1..121: note = Description of artificial sequence: synthetic polynucleotide sequence
  source 1..121: mol_type = other DNA
ccctaacatgagatttgtctccccaggggttagagggattggaggatgcccccccagttgagctacagcttcttcacgaatgtagtcccagccaggtgagtccagatgactgcctggctct

SEQ ID NO: 7144 - DNA, 145 bp, synthetic construct
  misc_feature 1..145: note = Description of artificial sequence: synthetic polynucleotide sequence
  source 1..145: mol_type = other DNA
gatggacttgctgtgtgcccagctgcagctccctcagctctcagacctcggtctcctgcggctctgcacctggctgctggccctttcacctgatctcagcctcagcaatgctactgtgctgaccagaagcctctttcttggacgg

SEQ ID NO: 7145 - DNA, 121 bp, synthetic construct
  misc_feature 1..121: note = Description of artificial sequence: synthetic polynucleotide sequence
  source 1..121: mol_type = other DNA
tcctctccttgacttcctcagcctcccgcctgcttacaactgccctgacctccttctgtgccaaatatacataccctgtctgcagcgccctccttgaccctgtgctccaggccccaggcac

SEQ ID NO: 7146 - DNA, 121 bp, synthetic construct
  misc_feature 1..121: note = Description of artificial sequence: synthetic polynucleotide sequence
  source 1..121: mol_type = other DNA
cttctgctgtcctctacccaggtcctgctcaaacagagttactgtgttgccttgtgaagatggagtccctggagccagatgcacaggttctaatgctggggtgagtgtgcaggcctccgtg

SEQ ID NO: 7147 - DNA, 121 bp, synthetic construct
  misc_feature 1..121: note = Description of artificial sequence: synthetic polynucleotide sequence
  source 1..121: mol_type = other DNA
tttttcactagggcctctgctttgcagacagatcttggagctgccctggaaggaggaaactttcttggtgttgcagtcactcctagagcggcaggtgagcaggctgccctggggaagagtg

SEQ ID NO: 7148 - DNA, 121 bp, synthetic construct
  misc_feature 1..121: note = Description of artificial sequence: synthetic polynucleotide sequence
  source 1..121: mol_type = other DNA
ggagatgacccctgagaagttcagtgtcttaatggagaagctctgtaaaaaggggctggcagccaccacctccatggcctatgccaagctcatgctgacagtgatgaccaagtatcaggct

SEQ ID NO: 7149 - DNA, 121 bp, synthetic construct
  misc_feature 1..121: note = Description of artificial sequence: synthetic polynucleotide sequence
  source 1..121: mol_type = other DNA
ttctccccagatcactgagacccagaggctgggcctggctatggccctagaacctaacaccaccttcctgaggaagtccctgaaggccgccttgaaacatttgggcccctgaccatccacc

SEQ ID NO: 7150 - DNA, 121 bp, synthetic construct
  misc_feature 1..121: note = Description of artificial sequence: synthetic polynucleotide sequence
  source 1..121: mol_type = other DNA
attatactataatgcaagatgtgaccattgaggggaactgggtgaagagcacatgggacctcgctgtactatttttgcaacttcctgtaaatttataatcatttcaaaataaaggccgggc

SEQ ID NO: 7151 - DNA, 121 bp, synthetic construct
  misc_feature 1..121: note = Description of artificial sequence: synthetic polynucleotide sequence
  source 1..121: mol_type = other DNA
tgtatacgggctatgtggggagtattcaggagacagacaactcactcgtcaaatcctccccttcctggccaacaaagctgctgcaaccacagggatttcttctgttcaggtgagtgtaggg

SEQ ID NO: 7152 - DNA, 451 bp, synthetic construct
  misc_feature 1..451: note = Description of artificial sequence: synthetic polynucleotide sequence
  source 1..451: mol_type = other DNA
ggcgccatgtcagaaccggctggggatgtccgtcagaacccatgcggcagcaaggcctgccgccgcctcttcggcccagtggacagcgagcagctgagccgcgactgtgatgcgctaatggcgggctgcatccaggaggcccgtgagcgatggaacttcgactttgtcaccgagacaccactggagggtgacttcgcctgggagcgtgtgcggggccttggcctgcccaagctctaccttcccacggggccccggcgaggccgggatgagttgggaggaggcaggcggcctggcacctcacctgctctgctgcaggggacagcagaggaagaccatgtggacctgtcactgtcttgtacccttgtgcctcgctcaggggagcaggctgaagggtccccaggtggacctggagactctcagggtcgaaaacggcggcagaccagcatgacag

SEQ ID NO: 7153 - DNA, 121 bp, synthetic construct
  misc_feature 1..121: note = Description of artificial sequence: synthetic polynucleotide sequence
  source 1..121: mol_type = other DNA
ttcttggcctggctgacttctgctgtctctcctcagatttctaccactccaaacgccggctgatcttctccaagaggaagccctaatccgcccacaggaagcctgcagtcctggaagcgcg

SEQ ID NO: 7154 - DNA, 356 bp, synthetic construct
  misc_feature 1..356: note = Description of artificial sequence: synthetic polynucleotide sequence
  source 1..356: mol_type = other DNA
gctgccgcacgagccccacgagccgctcaccccgccgttctcagcgctgcccgaccccgctggcgcgccctcccgccgccagtcccggcagcgccctcagttgtcctccgactcgccctcggccttccgcgccagccgcagccacagccgcaacgccacccgcagccacagccacagccacagccccaggcatagccttcggcacagccccggctccggctcctgcggcagctcctctgggcaccgtccctgcgccgacatcctggaggttgggatgctcttgtccaaaatcaactcgcttgcccacctgcgcgccgcgccctgcaacgacctgcacgccaccaagctggcgcccg

SEQ ID NO: 7155 - DNA, 121 bp, synthetic construct
  misc_feature 1..121: note = Description of artificial sequence: synthetic polynucleotide sequence
  source 1..121: mol_type = other DNA
ttcctaggcaaggagaaggagcccctggagtcgcagtaccaggtgggcccgctactgggcagcggcggcttcggctcggtctactcaggcatccgcgtctccgacaacttgccggtgagtg

SEQ ID NO: 7156 - DNA, 121 bp, synthetic construct
  misc_feature 1..121: note = Description of artificial sequence: synthetic polynucleotide sequence
  source 1..121: mol_type = other DNA
gacgagggaacctgacggagaccctgggcttccaggtggccatcaaacacgtggagaaggaccggatttccgactggggagagctggtgagtgccctgcaggagcgacccccaggatgagt

SEQ ID NO: 7157 - DNA, 121 bp, synthetic construct
  misc_feature 1..121: note = Description of artificial sequence: synthetic polynucleotide sequence
  source 1..121: mol_type = other DNA
gcctaatggcactcgagtgcccatggaagtggtcctgctgaagaaggtgagctcgggtttctccggcgtcattaggctcctggactggttcgagaggcccgacagtttcgtcctgatcctg

SEQ ID NO: 7158 - DNA, 121 bp, synthetic construct
  misc_feature 1..121: note = Description of artificial sequence: synthetic polynucleotide sequence
  source 1..121: mol_type = other DNA
gaggcccgagccggtgcaagatctcttcgacttcatcacggaaaggggagccctgcaagaggagctggcccgcagcttcttctggcaggtgctggaggccgtgcggcactgccacaactgc

SEQ ID NO: 7159 - DNA, 121 bp, synthetic construct
  misc_feature 1..121: note = Description of artificial sequence: synthetic polynucleotide sequence
  source 1..121: mol_type = other DNA
gtgctccaccgcgacatcaaggacgaaaacatccttatcgacctcaatcgcggcgagctcaagctcatcgacttcgggtcgggggcgctgctcaaggacaccgtctacacggacttcgatg

SEQ ID NO: 7160 - DNA, 178 bp, synthetic construct
  misc_feature 1..178: note = Description of artificial sequence: synthetic polynucleotide sequence
  source 1..178: mol_type = other DNA
gggacccgagtgtatagccctccagagtggatccgctaccatcgctaccatggcaggtcggcggcagtctggtccctggggatcctgctgtatgatatggtgtgtggagatattcctttcgagcatgacgaagagatcatcaggggccaggttttcttcaggcagagggtctcttcag

SEQ ID NO: 7161 - DNA, 159 bp, synthetic construct
  misc_feature 1..159: note = Description of artificial sequence: synthetic polynucleotide sequence
  source 1..159: mol_type = other DNA
gaatgtcagcatctcattagatggtgcttggccctgagaccatcagataggccaaccttcgaagaaatccagaaccatccatggatgcaagatgttctcctgccccaggaaactgctgagatccacctccacagcctgtcgccggggcccagcaaatag

SEQ ID NO: 7162 - DNA, 121 bp, synthetic construct
  misc_feature 1..121: note = Description of artificial sequence: synthetic polynucleotide sequence
  source 1..121: mol_type = other DNA
agtcatctctggaaaatacaatctgccacagttcataatatgaaacaccatgcaatcattaagagattttaatgtatcttatcaaatgaaaaaaagaccaagtcatgaaacatttatgaaa

SEQ ID NO: 7163 - DNA, 121 bp, synthetic construct
  misc_feature 1..121: note = Description of artificial sequence: synthetic polynucleotide sequence
  source 1..121: mol_type = other DNA
atgttttgtctcttttgcacaagctttcttgcccttctgcttttcaccatgttatgatgtggtaaaaaagcccttgccagaagctgccaccatgcccttggatttcccagcctccagcgct

SEQ ID NO: 7164 - DNA, 121 bp, synthetic construct
  misc_feature 1..121: note = Description of artificial sequence: synthetic polynucleotide sequence
  source 1..121: mol_type = other DNA
ggtgcagaccctggaggcaggatgcttttggcatgtataggtatgtccactaaagttgcaatgatctgcggggtggactgggaagaagtgggcagagtatcaacagtgtcttctatggtca

SEQ ID NO: 7165 - DNA, 121 bp, synthetic construct
  misc_feature 1..121: note = Description of artificial sequence: synthetic polynucleotide sequence
  source 1..121: mol_type = other DNA
gtatagacaaaacatgtgtgttttgctgtggacttctctccatgaacacttcaccattccctgcttcctactgtcctcccctctcatctctgcagggcctaatcctatcagtctttcaggg

SEQ ID NO: 7166 - DNA, 121 bp, synthetic construct
  misc_feature 1..121: note = Description of artificial sequence: synthetic polynucleotide sequence
  source 1..121: mol_type = other DNA
ggcagtcaggtagggccgggcagggagtgtgaggcagagccagccggttgcggtattgaagcgggtggtggaaggcctcggtgagaggtggcatttgggcaaagaaggagatgagggactc

SEQ ID NO: 7167 - DNA, 169 bp, synthetic construct
  misc_feature 1..169: note = Description of artificial sequence: synthetic polynucleotide sequence
  source 1..169: mol_type = other DNA
gctacaggtgtatggctgtgacatctgtaggagtgctggtctggctgggcccttggctgctggagccccggggggctttgggcgctgggctggagctggtctgagaggcttccctgaggctctccctgagtgcagcttcgatctgctcctgacaggcccgcaggcagtc

SEQ ID NO: 7168 - DNA, 138 bp, synthetic construct
  misc_feature 1..138: note = Description of artificial sequence: synthetic polynucleotide sequence
  source 1..138: mol_type = other DNA
ccacttcagtgccagtgatccctgccagcagctctgtgagctcatccccggacatggagcaggcacccaggccttgcactgcagccccaatgctgcccgtggcgatcatggatggcgggtacatggcaaaggtataat

SEQ ID NO: 7169 - DNA, 161 bp, synthetic construct
  misc_feature 1..161: note = Description of artificial sequence: synthetic polynucleotide sequence
  source 1..161: mol_type = other DNA
cctgtagcacagagggccaaaaaggtctgggcatgctttttgaccaaggcctgtcggtcacggggcagagagagccggtgcagaatgaaggccaggaaatcatgtgcaatcacagcagccaggtcccacttgagcttccctaggaccagcacctcccagtc

SEQ ID NO: 7170 - DNA, 217 bp, synthetic construct
  misc_feature 1..217: note = Description of artificial sequence: synthetic polynucleotide sequence
  source 1..217: mol_type = other DNA
cccgcaactggcggggagagacagcgtggtcggtgtagatgcacagtttttcgatggtcaggggcgtggtctcgcgcagcttggaggccagcagcatgcagaccgcacccaggagctgcaactgcgcctttcgggtggggacgcaagacaggtagcgatccaggtagttcatggccagggggaagacttcctcctcacagcgctgctcctcacatac

SEQ ID NO: 7171 - DNA, 121 bp, synthetic construct
  misc_feature 1..121: note = Description of artificial sequence: synthetic polynucleotide sequence
  source 1..121: mol_type = other DNA
gggacctcacccccatcaccgccaccactgcacacacccgaggggaagggaggaggctcctgccgctgcctcctgcacttttcatttccctgtcggccggaacagggcgcgcgccaccccc

SEQ ID NO: 7172 - DNA, 199 bp, synthetic construct
  misc_feature 1..199: note = Description of artificial sequence: synthetic polynucleotide sequence
  source 1..199: mol_type = other DNA
cctccagcatccagtaagccagcatcttccgcatgtgcggcttgatctcccgctgcacgcactggaagtaggaggcgcggggtacgtagcgctcctccaggcggagcaggctctgcaggacacgctggtcccccagcagccgcgggtccggcccggcccggggcgcgtgccgggtgccttcgcaacacagcagctccat

SEQ ID NO: 7173 - DNA, 481 bp, synthetic construct
  misc_feature 1..481: note = Description of artificial sequence: synthetic polynucleotide sequence
  source 1..481: mol_type = other DNA
ggataaacaaatagtgcatatacatccatacaatgcaatacaagttagcaataaaaaggaacaggttgctaacacataccacatatactaagtgaaagaagccaggcacaaagagaattgatactgcatgattctttttagatgaggttctatacatgtatagtcttaacaggggtaaactctggtgataaaaaagagactgaaccaaaatgggccccatgggcaggaagcagtggtgcacatctgtaatcgcagctactgggtggctgaggtagaaggatcacttgagctcaggagttcaaggatagcctgagcagcacagcaagactccatctcaaaaaaagcggggcggggggcggagtgtgcctgaaactttctaggataatagaactgtcccatattttgattcagatgatggcaacatggatgtgaatgtttacatttgtcaaaattcatagggccgggcacggtagctcatgcc

SEQ ID NO: 7174 - DNA, 181 bp, synthetic construct
  misc_feature 1..181: note = Description of artificial sequence: synthetic polynucleotide sequence
  source 1..181: mol_type = other DNA
aacctgggagacagaggttgcagtgagctgagaaagcgccattgtactccagcctgggtgagaagagcaaaactttctttaaaaaaaaaaaaaattcatagaactgtagacttaagatctgtgtattttggccaggcatggtggctcacacctgtaatcacagcactttgggaggccgagg

SEQ ID NO: 7175 - DNA, 181 bp, synthetic construct
  misc_feature 1..181: note = Description of artificial sequence: synthetic polynucleotide sequence
  source 1..181: mol_type = other DNA
gtgccactgcactccagcctgggcaacagaacaagactccatctcaaaaaaaaaaaaaactatgtatttattttatgatatgtacattcaataaagaaagcaaacttatacaatgcagctaaaacaacacttacagggaaatatatagccttaagtgcatgtattagaaaagagagggctg

SEQ ID NO: 7176 - DNA, 181 bp, synthetic construct
  misc_feature 1..181: note = Description of artificial sequence: synthetic polynucleotide sequence
  source 1..181: mol_type = other DNA
tcgtgccactgcactccagcctggacaacaagagcgaaacagcgtgtcaaaaaaaaaaaaaagagaaatattcaaaattgataaaccaagcacagaacttatgaagttaaaaaaaaaaagaacagcagaggccaggagcaatggctcacacctgtaatcccagcactttgggaagccgaga

SEQ ID NO: 7177 - DNA, 181 bp, synthetic construct
  misc_feature 1..181: note = Description of artificial sequence: synthetic polynucleotide sequence
  source 1..181: mol_type = other DNA
aaaaaaaaaaaaaaaaaaaaaaaaaaaagaacagcagaataagtcttaaggagaataaaacaataaaagcagaggaataatgagacagaaaataaacagtagaaaaggtcagtaaagttaaaagtttaacattgtggttcaggcctgtaatctcagcactttgggaagctgaggcaggcag

SEQ ID NO: 7178 - DNA, 181 bp, synthetic construct
  misc_feature 1..181: note = Description of artificial sequence: synthetic polynucleotide sequence
  source 1..181: mol_type = other DNA
tgccactgcattccagcctgggcgacagagtgagaccctatctcaaaaaaaaaaaaaaaaaaaagtttaacatcaaaaagactaacaaaacaaacaaaacttaggtaatatgatcaataaaaagaagattcagatcaatgacattagagatcttaaaagttatatatatatgtatgtgtgt

SEQ ID NO: 7179 - DNA, 301 bp, synthetic construct
  misc_feature 1..301: note = Description of artificial sequence: synthetic polynucleotide sequence
  source 1..301: mol_type = other DNA
aagcgcttctcatccctcactcagcctctccagtagctgggattacaggtgtgagccacagttcctggtccaaagtgatatgtttaaatctatggcagagggttaaaagatgagaaaactataagcaacttagtgccaataaatttgatacagacaaattagatgatattatagaaaaacataatttaccaaaaactacctcaagaagaaagaaaaaacctaaatagtcctatatatacagaataactctatttatggctgggcatggtggctcatgcctgtaatcccagcactttgggag

SEQ ID NO: 7180 - DNA, 661 bp, synthetic construct
  misc_feature 1..661: note = Description of artificial sequence: synthetic polynucleotide sequence
  source 1..661: mol_type = other DNA
acctgagactgcaccactgcactccttcttgggcaacagagtgagactccatttcaggaaaaaaaagaaaaagaaagaataactatttattattatccaaaccagtatatcttttaaagtgaaagggagtaccatttataaatatgccaggataacagctataacctggcactagcccaagcaaacaaggacatatggtctatttatctatagtcataaacacaaattaaatcagtaatttaaaatcttcttacaaagaaaacagactcagaatgttttacaggaatattctatcaaacattaaagaaagcatcaattccaattttatgttgactttcataggtattaaaaaagaaatactgccaactcagtcagcgaggttagtaaaatcttaattccaaaccagccaaacatagtatgagaaagaaaaattaaaggttaatgtcactaatgagcatatatgctgacaccttgctcaaaatataagcaaaccaaacccagcagtgtattaacaagataatgtatcatgtcctaattggatttatcccagaaatgcaaagaaaatttaacataaaaaattactggggcgaggtgtggtggctcaggcctgtaatcccagaattttgggaagccagggcgggtggataatttgaggtctgga

SEQ ID NO: 7181 - DNA, 241 bp, synthetic construct
  misc_feature 1..241: note = Description of artificial sequence: synthetic polynucleotide sequence
  source 1..241: mol_type = other DNA
tgggagacagagtgagaccctgtctcaaaaaaaaaaaaaaaaaaaaaaaaaagaattaatgtaggccaattgcattggctcattcctgtaatctcagaacttgaggagcccaaggtaggagaatcacttgagctaggaattttgataaccctcggcaacatggtgaggccccatttcttatttttttgagataagagttttgctcgttgcccaggctggagtgcaaaggcgcaatctcagc

SEQ ID NO: 7182 - DNA, 781 bp, synthetic construct
  misc_feature 1..781: note = Description of artificial sequence: synthetic polynucleotide sequence
  source 1..781: mol_type = other DNA
gggtttcaccatgttggccaggctagtcgaactcctgacctcaggtgatcacccgcctcagcctcccaaagtgttgggattacgggtatgagcaaccgcgcccagcctgagaccccatttctacacaaaaaatttttttttaattagcagggtgtggtgttgtgtgcctgtggtcccagctacttgggaggctgagggggtaggattccttgtgcaccagagctcaaggctacagtgagctatgattgcaccgtggcactacagcctgagtgcagaccaagaccctgtcttaaaataataataataattattattaatgtaacttataacactcatagatgaaaaacaaaaactcacatcatctcatctcaatagatgtagaaaaagcatgtgataagatttaacaacattaaggtagatttagaggtttaaaaaaaaaagatttaacaacaaactagaaataaaggaaacttcctttatctattaaagagcatctaccctaaacctacagcaatcattattatgagtgggaagccattagaagcattatcctttaagttcaggagtagggcaaggatgcctgctgtccttgcttctagctgacattaaattggaggctctagcaaaacacaaaacaaaggaaaataaatgaaaggtatagaattgaaaaaaaacaacttcattattaatagatgatatgactatctacgtggaatctcttcaagtccacaaattattaaaattaattaggcagccaggcgcggtggcccatgcctgtaat

SEQ ID NO: 7183 - DNA, 1201 bp, synthetic construct
  misc_feature 1..1201: note = Description of artificial sequence: synthetic polynucleotide sequence
  source 1..1201: mol_type = other DNA
aagactctgtctcaaaaaaaaaaaaagaaaaattaagtaggcgaatgataaaatgaacacaattcatagtatctcaatgagatttgttagagggatggcacagaaaagggaacacaggaagctcctatataactggtgacatatttctcaagttgcagggtatgtttagttttattatactacttcataatatacatacacacatgtatatatatacctacatacatatatatgcacttatattcttttgtgtatatatgcttcataagtcaattttaacatttgaaacaacatgtttttactttctatattgtacacttattggttgtttcattgttttacaacaaaaatgtaaaaaggtctgtgtttttgaaaatggttaaagaaagaaaaagaacaaaaggaaatgaagggaggctggaatttcaccaacagcttgatagatgggcgggtggatggccatgagggtggctagtaaggccaagtccaattgaagtcaggacaagggcttagtcaaggactgagcagaggctggtagaattggagggaagtctgatagcactgacctttaaacgggcaatttttaaagactggcaggaggcggagcccaaatgcagggggttaaatggtgaatgaataaatagcaaaaaattggaaactacccaagggcctaacaatcagggcctggctaagcaaccatagtaccattcatagaaaaaatgatgctgtgtccatacataggcgggcttataaaattaggtgacgtaaaaaatttcaggacacaaaatagcatttgtgcagattacaattatgaaaggacatgcatgtgctgcgagagccagaaagggctggacaggatcgagagcagctcacggatgctgctttaaagtctatgggattttctttcttttttggaatgctggcgatccacaaacaaaagcacataatgttgctttaaaataaaaagagtggctgttgaagaagtggagacagcaggtgaaggccactcagtgaagaaacctgacggtgacaggaagaaatgagccggcagagcagctggcggggtgtgaaggctggggacagcagctggcgggggagctgggggctgggggaagtggggagaggaagaaaggaggctgttctgtttcctttattgcctatagctctaccttattttttaatataaaaaatagtagtatct

SEQ ID NO: 7184 - DNA, 901 bp, synthetic construct
  misc_feature 1..901: note = Description of artificial sequence: synthetic polynucleotide sequence
  source 1..901: mol_type = other DNA
gccgctgcattccagcctgggcaacaagagcgaaactctgtctcaaaaaaaagaaaaagaaaagtacctcttgagacaaattcaaacagtccagagtgtgtatgtataaagtgacagaaccctcagcctagtccccattgtcaacagcttagtgtgcagctttccagagctgcaccattttcttttacttgcagtgcattcatttttaattacaaagtaagataggctggtttttaattacaaagtaagatgggcttgttaaaatgtaggattagagaaaataaagagtgaaatattctatcctgctgaaatctcccaacagagctgactgctgttgattggtctggaaagggtctatgtgcatgtaaatacttatgtatatattcggttatggttttttggttggttgtttttacagaagcaggaacatttcctacctatagttgagcagtttcatgctacatcatggtggatccctcccaagtcaccactgcctaacattccacagaatatagttgaaaggtaaacttcagggaacacaggggcatctctttccctataattggcaggaaaggagctctagaaacaaaaggttcaagatggaaggaggtattgcttggaggggggctgcccgtgggaatagggaacatgcagacagagagggtcttctttccgccttcttctcttaagccagagtcccatccaaatgtagctaaggtatacagaagtgtaagggggaagggttgtgattagagcctgagtgataagggtcactactgggggctcaacttccttgagtggactgctcttccctcaactgtgcctaggtcaggcctacttatcagaaaccttaaggggaggctgggtgtggtggctcatgcctataaccccagcactttgg

SEQ ID NO: 7185 - DNA, 2461 bp, synthetic construct
  misc_feature 1..2461: note = Description of artificial sequence: synthetic polynucleotide sequence
  source 1..2461: mol_type = other DNA
ccagcctaggtgatagagcgagaccctgtctcaaaaaaaataaacaaacaaaaaccttaaggggagccctagaatagtgattctcaaagtgtggtccctataccagtagaagcagcatcaacaacttagaaatgcagattgttgggccccacttagtcctactgaatcagaatctctcagcaatcagtgccctccaagcaatcagcaaacaggccctccaaggaatgcaggctaagcttggagaacctttgttctagaatgtggatttgggtgtgatttcttcatccctcaggcacccccatgttcattctcctagaggacaagcaggagtcagccctgaaggggatgggttatcaacttcataagtggtttcttctgtgagcttagaggttgcaggcaaagtcagtgacctaggtagtacctgggagagccctccctctcttctcatgacaacacttccatctcttcacacgccccccaaataaaacagaaagggaggggggcagtggaaacctactgctttccactttcccttaacggtgtcccctgccccggggcactgccctctgcagcatggaggacagagtagggagtgaagcttttgaatgagggggaggaaatgggatgtggcttcatgtggctgggttgggggagggagttggaaggagaggagggagggagaggaagaatgtcctcatttcacccagctgcctgggcctgcacctgttcagctgaggcccaaggaaagacaccaagcccgacagtaaatgaagcacggccccaccccatctagcggggccccttcccacactgcagcagggccgggttaactgacaggaaaactgtgaatgatttcaggtggctgaatgaggggctggggaaacagctgtgctcctctgcggggtggagcaactgtcttctgtcacccccaggctctcagagcctcggcaaggtcagcaggagtcagataggttgggacctgctcagacaccttctcctacagaaagtgacatcactgccatcagcgctgaggaggttccgggtggttaagccctacaacattccacaacattctttagttcctctataggcaactatcttcttctttttttctaaatagactgttttttagcacagttttagtttcacaggaaaattgagaggaaatattaagtttcctcttggtctgtcctccatagaaacacttcaggagttcatccaagcagtcaatcggtcatttcacaaggatccaatgaaggctttcaaaagtgattcttgaatctgtaagaacaactggtagtgaatgaatgaatgaatgaatgaatgaatgaatgaatggatttttcactgactgattgattgactgagaatctcactctgtcacccaggctggagtatgttggtgcaatcacagctcactgcagcctcaaactcctgggctcaagcaattctcctgcctcagcctgccaagtagctaggaccacagcaagtacctaggccaccatgcctggctaattttaaaaatttatttgtagagacgggatctaactttgttgcccaggctggtctcaaactcctggcctccagcaatcctcctgccccagcatcccaaaatgctgagattataggcacgagccaccaagcctgactaactgggaatttattaaagaggcaagccctggtcactccactagagattttgattcaggaggtctggagtggggtccgggattatgtatttttgacacagtctgcaggagatgatacatttgacataatgggccctaactggagaaactcaggcatggtgtgagatacaaagggttagtaaattgctctggtgggaaggaaggaagcagtgaacattaaggaccaaaatcctcctacctctccaccaccccagaattgaagatgcagagtactgagccctccacctgcaaatgcatacagccatgaacagatgggtgtaaactgaggcagtggagggagaggggtactcccaagccctgaaaatctcagagtaagaggccaccgacgacagcgctcaccggtgctgagctcccttctacagaaacctgcaaagactcagatcgaggaggaaatacaccaggaaaatgtcacaggatcatctcgaggtaaggtcctgagcaaggtagcctttccatgcctgcatttcctcatctgtcaaattcggagcatgatgggctctgtcaaacagggttacaggcattgagccactatgcccagctgcattagctcattttttgactttgcttaagagttccttgcccactcttcaaaaatgttgatgtcatggaagacaaaaactaaggaatcatttcaggttaaacaaaacttggggagacaggacaactgaatataatccatgatctgggactttgttttcatttctgtaaagcataacattggagaccaggctggccaatatggcaaaacccca

SEQ ID NO: 7186 - DNA, 121 bp, synthetic construct
  misc_feature 1..121: note = Description of artificial sequence: synthetic polynucleotide sequence
  source 1..121: mol_type = other DNA
acttgggaggctgaggcaggagaatcacttgaacctggggtgggatgggggcggggagtggaggttgcagtgagccaagatcacaccacttcactccagcctgggcgaaagaagctctatc

SEQ ID NO: 7187 - DNA, 1261 bp, synthetic construct
  misc_feature 1..1261: note = Description of artificial sequence: synthetic polynucleotide sequence
  source 1..1261: mol_type = other DNA
aggttgtagtgagcagagatggtgccactgtactccagcctgggagacagagtgagactcctctcatataaataaataaataaaataaaatgatgagtgaaggagttctgagaacttgtgatttctacatgctggaattctgcttatgcccttggtggttgttggctattaaaatgtgggtagtgtggaattatgtacattacaagatctttacagaaaatccttttttcttctcatgcatagtatgacctggaactaaaaggagctgcacatataaattgatccaagcttctaccagattcattatatgctatcctgacacagatgaatccaggctcttcttatatacttctggagatgggaaagtcaccccctctcacagcctgttccattcctggtcagttctgaccactagaacattccttgacctactgagctgaaaccttccttcctggagcctctacccactggtccggtcctgttttctgggtagtggggcctctacccgctgatcctggtcctattgcctgtttaggggcaatacgggacccctaatgatcttagtcatcctttcctaaataagttccagttcatcagtgtctctctagagtgtaaatgcagtgccccaggatccaacttgataatcagatagcagagggaacatgatctcccaagtgctggacattccattcatacagcctaaggtagagttgggcttttttcaaaattgaatcacacagttgattcatgagtttagagccaacttaaaccacggttttctcttgtgaaccatggttaactgccattggtctcagcagttttcactatgagacatcccattgtatgttcgtttgcttattgtctgtctctagatattgctagaatgtaagctataggagggcagggttgttggcttgttctgaatccccaacacctagaacaaacaagtcttggcacatagtagacattcaataaatacatgttgagcaaataaataactgttaagccacatctcacctatcctgtatttctataatttatttgtaattcacacccagtcttctaacaagagaggtttgaggtgattgctttgcagaatccttttgttaacttcagaataaactttgttcttgttgaattttatattgttaaattttcatcattagttcagcctattgagatctaatttctggctctctcaatctacatttcagcagtcccttccagcgccaagccattcattcaagaatgactcagggcc

SEQ ID NO: 7188 - DNA, 1141 bp, synthetic construct
  misc_feature 1..1141: note = Description of artificial sequence: synthetic polynucleotide sequence
  source 1..1141: mol_type = other DNA
tccagcctgggcaacagcgagactctgtctcaaacaaaacaaaacaaaacaaaacaaaacaaaacaaaacaaaggcctccctgtctccagaatggcaacaatatattaactcccttagtgtatagtctttcaatcagtaaaacaaaacaaaatgccattaacaactctatttcaaagaatatattaatggcattggaaaatgctcatcctatatacataccaggtcagtgggggatacaaaactgtaacacagcacatgatcccagttacaggaaaatagttgtctacatagaaataagatgggaaggagctgggcatggtggcttatgcctgtaatcccagcactgggaggctgaggttgggggatggcctgagccccgaagtttgaggcttcattgagctatgatcaagccactgcactccagcttgggtgacagactagaaggaaatataccaaaatgttaacagtgattatttctgagtagtggttcattttcattttattcattatatttttcaaaatctcttattataataagcaagtatttccaacatatatacttgttatccttgttattataccatcatctggatcactcagccatacatatcttcactaaggcagtgagaacccaggtgacaccttcctgaaattgatcctgccctcaaaaagtttctagtcaatatcaatagcaaatatacatgtacatgcacaaacacacacgtattcattttaatcctacaacaatccttccatttctatcttcatattctagatgaagaaactgaggctcaaagaggttaaaagaacttgctcaaggtcatacatctagcatgaatctgggccaggattttaaacccaggcagtccagctccagaatggacacccttaaccactctgccatgcatgtaaactcaaagtagcgccacccaaggattgatgattctgagtgagtggtgggggctgtaacaggaggcaggggagtcgacattagctgaatgaggactatgtgacaagtgcttgatatacattacctcattcaggtcctgcaactacccttgcaaaaaaatattttattttaaaaaaaagttatggccaggcacagtggctcacgcctgtaatcccagcactttgggaagc

SEQ ID NO: 7189 - DNA, 241 bp, synthetic construct
  misc_feature 1..241: note = Description of artificial sequence: synthetic polynucleotide sequence
  source 1..241: mol_type = other DNA
ataaaaaaaaaagttatgtctttttaaattgacaaataaaaattgtacatatttattgtgtacaatgtgatattttgaaatatatatatattgtggaatggctaaatcaagctaattaacatatgcattgcctcacatttttttgtgtgcgtggtgagaacataaacactgctctcttagcagttttcacgtatacaatacgtttttattttatttattttttatttatttatttattttt

SEQ ID NO: 7190 - DNA, 421 bp, synthetic construct
  misc_feature 1..421: note = Description of artificial sequence: synthetic polynucleotide sequence
  source 1..421: mol_type = other DNA
aaagtgccaggattacaggcgtgagccactgcgcccagccacagtatgttttttactaaccatagtcaccatgttgtacgatacgtctcttgaacttattcttcccatctagctgaatttttgtatcttttggccaacataaaaagatattattttcatctttgtgttataaatgaggaaattgagattcagacaggggtttgaatctctgctgtgataattcaagtttactaatatctctgtccttcagtttcctcctctacaacatgggataataatagctcctacctcactgacagttgggaagtattagtgagaaagtagactcacaacactcaacacggtgcctagcatatggtaaatgcttgataaatgttagctgctattactatctattactttttttttttttttttgagac

SEQ ID NO: 7191 - DNA, 421 bp, synthetic construct
  misc_feature 1..421: note = Description of artificial sequence: synthetic polynucleotide sequence
  source 1..421: mol_type = other DNA
ggctggtcttgaactcctgacctcaagttatccaaccaccatggccttccaaagtgctgggattacaggtgtgagccaccacaaccagtctattactattcttgattccaaagttcacactctcaactacaacataatgacctgctaagtgggcaaaggagaaaaattaattctgaatgatgccatggggaaacgttagataaatgagtggagtcacagaggagtgacgtctgaaggggccttgatacagcagcatctcacccggcagaggagggcaggggcacgtcctggaagtacagagggacaaggtctgtttctgtcccttgccctggccctcccccacacagcatcctgcaggtctccacctctgtccctcactgtgccctgccagtactcccgcctgcagtgcccatggtcccct

SEQ ID NO: 7192 - DNA, 121 bp, synthetic construct
  misc_feature 1..121: note = Description of artificial sequence: synthetic polynucleotide sequence
  source 1..121: mol_type = other DNA
tcaatagaaattgtgcttcacttcacttatcagccttgtgtgtgttgctgagaagggttagagagatcgagaatctaagacaggaaagggcctcagaaggctttaacttgagactcactgc

SEQ ID NO: 7193 - DNA, 121 bp, synthetic construct
  misc_feature 1..121: note = Description of artificial sequence: synthetic polynucleotide sequence
  source 1..121: mol_type = other DNA
ccctgaggatcccagaccctgcctggcttcagtcggtacacagcagcagtttccctgagatcttcaggtcatcaaagggcaaaaggacaagggactgagaaggagaatggagagaagcaag

SEQ ID NO: 7194 - DNA, 241 bp, synthetic construct
  misc_feature 1..241: note = Description of artificial sequence: synthetic polynucleotide sequence
  source 1..241: mol_type = other DNA
cttcctcagtcaggtcctggggcgtctcatcctccacattccgcagcagggagtcagcacccgccttgcacagagtggatgagatgcccatgagaccccggccagctgccaggtgcaggggtgtgcacccgttcagcatgcgggcatctacctgggcaccagcctggagcaggaactgtaccaggccccgctcttgggtttccacagccaggtgcagcgctgtcttaccactggtgccctc

SEQ ID NO: 7195 - DNA, 121 bp, synthetic construct
  misc_feature 1..121: note = Description of artificial sequence: synthetic polynucleotide sequence
  source 1..121: mol_type = other DNA
ttgctggctgtctcacctgcacatcaatgtcagctccattccgaagcagcaattccatgagtggttggttcttctgaagggtggcaatgtggagacaagccagacctgggatggggtgaga

SEQ ID NO: 7196 - DNA, 224 bp, synthetic construct
  misc_feature 1..224: note = Description of artificial sequence: synthetic polynucleotide sequence
  source 1..224: mol_type = other DNA
ccttgccagttttgcagctggaggtccagagagtgagatgttcctctgcctggctctggccgcccttccagcaggcagcgggcacaggccaagtgctggcgctggcaggccacatgaagggctgtgtcaccatgccggtcctgtagtgcccggctggcccccttcagcaccagtgcccgaactgcgcccggttggtccagatgtacagccagatggagtgctgt

SEQ ID NO: 7197 - DNA, 121 bp, synthetic construct
  misc_feature 1..121: note = Description of artificial sequence: synthetic polynucleotide sequence
  source 1..121: mol_type = other DNA
gccaccaacctggtaaaggttattttgaatgtccaggacctcctggggcagcaaagccaggcaacagagcagcaccgctggggcctcatgaatcactgccaggtggaccagcctaggggag

SEQ ID NO: 7198 - DNA, 121 bp, synthetic construct
  misc_feature 1..121: note = Description of artificial sequence: synthetic polynucleotide sequence
  source 1..121: mol_type = other DNA
cgtgtctccgtcctcggagatgtaagtgagtgcttccagctgctgagggctcagcgcccccacgtgggggagtggcaggcgtggggccgggtcctcagcctcggggccccccagcaaggac

SEQ ID NO: 7199 - DNA, 121 bp, synthetic construct
  misc_feature 1..121: note = Description of artificial sequence: synthetic polynucleotide sequence
  source 1..121: mol_type = other DNA
gggtgtaggtgagcgaggaggagccataggtggaatcagcccgctccccatccgcgtcttccttctcctgtggttccttgacgggtcccggaggatgggtgcagggctgggggctgccgtc

SEQ ID NO: 7200 - DNA, 121 bp, synthetic construct
  misc_feature 1..121: note = Description of artificial sequence: synthetic polynucleotide sequence
  source 1..121: mol_type = other DNA
agggcccggaggctggagccgaggtggactcgggtagggagcgcagagagcgcagagactcaatgccagagtcgtactggctctcctccgcctcgtccggccccttccgcgcctccgacat

SEQ ID NO: 7201 - DNA, 121 bp, synthetic construct
  misc_feature 1..121: note = Description of artificial sequence: synthetic polynucleotide sequence
  source 1..121: mol_type = other DNA
cgcacatacgcacatgctgggtgcctgcattgcactattcctggaatataacacacactaagtagatgtcatgagtaacatcacaagccaccgcagcctaggggtatcacagcccccacat

SEQ ID NO: 7202 - DNA, 121 bp, synthetic construct
  misc_feature 1..121: note = Description of artificial sequence: synthetic polynucleotide sequence
  source 1..121: mol_type = other DNA
tggcagtaagaaggaatacagaactcatgcatgcaacaacatggatgaatctcaaaagcgtttttctaggtgaacgaagccagacacaaatggccatacactgtgtgattctgtttatatg

SEQ ID NO: 7203 - DNA, 121 bp, synthetic construct
  misc_feature 1..121: note = Description of artificial sequence: synthetic polynucleotide sequence
  source 1..121: mol_type = other DNA
aagctatcattctgggattaagatttcatactgggaaaggcaagttgctggtttttctcatcacctctccctagcctcatgttgcagaagtcctaccctttccctgcctggactccacttg

SEQ ID NO: 7204 - DNA, 121 bp, synthetic construct
  misc_feature 1..121: note = Description of artificial sequence: synthetic polynucleotide sequence
  source 1..121: mol_type = other DNA
caggtaccatccaatctgctgagggcctagatagaacaaaaaggtagaagaaaggcaaattgaccctctctttcttttctggagctgaggcacccttctttatctgcccttggacatcaga

SEQ ID NO: 7205 - DNA, 121 bp, synthetic construct
  misc_feature 1..121: note = Description of artificial sequence: synthetic polynucleotide sequence
  source 1..121: mol_type = other DNA
taaaggactggtagagtaaaggataaatgcacatgcaactttgttagatattgccaaatttccctctctggtttcaaaatgaaaataccaataaaaaacccacaatgagataccatctcac

SEQ ID NO: 7206 - DNA, 121 bp, synthetic construct
  misc_feature 1..121: note = Description of artificial sequence: synthetic polynucleotide sequence
  source 1..121: mol_type = other DNA
gatgcagtagctagaaatgacaatatgtgtctcgcactggggagggacgaatgcatttcgtatagcaactaggatggttcttaaagtcattaatcagaaaaagcacacatgtgcatttata

SEQ ID NO: 7207 - DNA, 121 bp, synthetic construct
  misc_feature 1..121: note = Description of artificial sequence: synthetic polynucleotide sequence
  source 1..121: mol_type = other DNA
ttattgtaccatatattctatattccatatacgtgagagacattaaaagtcattgaatcttgctggtgaatttgctgctaccttcatagaatctttgccttactctccagtagagaggcca

SEQ ID NO: 7208 - DNA, 121 bp, synthetic construct
  misc_feature 1..121: note = Description of artificial sequence: synthetic polynucleotide sequence
  source 1..121: mol_type = other DNA
ccacttcagttaatagataaggatggttatctaaccaggaggtagagtagtgagagattacaacatagtgatgcccttttcttggtgaaaggactttgacttttttttttttttttttaag

SEQ ID NO: 7209 - DNA, 121 bp, synthetic construct
  misc_feature 1..121: note = Description of artificial sequence: synthetic polynucleotide sequence
  source 1..121: mol_type = other DNA
attgaaattgggtagatatttttatcacaggattctctgcacccctaattggaggaatggatatgttttatatgagaatgacagagtgtcttattattgcttttttcatgggtgaatgaaa

SEQ ID NO: 7210 - DNA, 121 bp, synthetic construct
  misc_feature 1..121: note = Description of artificial sequence: synthetic polynucleotide sequence
  source 1..121: mol_type = other DNA
acccaaatcctgccttaggagagcacacacactcttttccttgagaagtgaaaaagttagtggaaacttagagaaagtgtgatccataagccagtgagctagctaagttgtgagttcaaat

SEQ ID NO: 7211 - DNA, 121 bp, synthetic construct
  misc_feature 1..121: note = Description of artificial sequence: synthetic polynucleotide sequence
  source 1..121: mol_type = other DNA
acaacccctgcaatattgaaagtaatataatcccttttctcccttcatattaacaaaaagtcacaggaggaggtgtaaactccctgcgatattgagagtaatatcatcctctccccccttt

SEQ ID NO: 7212 - DNA, 121 bp, synthetic construct
  misc_feature 1..121: note = Description of artificial sequence: synthetic polynucleotide sequence
  source 1..121: mol_type = other DNA
agtaacagtagtcaggacaaagactggacccatagtctgggacccagagagaacacatcggagtgagagaacaaaaggtgtcatggccagattactccaactgcaaagcaacatgcagata

SEQ ID NO: 7213 - DNA, 121 bp, synthetic construct
  misc_feature 1..121: note = Description of artificial sequence: synthetic polynucleotide sequence
  source 1..121: mol_type = other DNA
agaactaagtatgtttttataaacaaatcctttgatatttgttccacttttgctgaaaacgtgaacttgttaagaaaaaccaagagcacatagtagactatcctgtaggtattgcagtttt

SEQ ID NO: 7214 - DNA, 121 bp, synthetic construct
  misc_feature 1..121: note = Description of artificial sequence: synthetic polynucleotide sequence
  source 1..121: mol_type = other DNA
aatacctgggtctattaatttcatctttacaaacagcttcatgttgacactcattttcttgatcatcagttgtattttccagatacatgttgccagcccatctgagaaaacatagataccg

SEQ ID NO: 7215 - DNA, 121 bp, synthetic construct
  misc_feature 1..121: note = Description of artificial sequence: synthetic polynucleotide sequence
  source 1..121: mol_type = other DNA
tagcactattgaaaactgcacatcttcttcattataggcccacacaggacagcccagtaacatgatggagaacagaaatcctttcagaggatagatctctgagcactaaattgatcacacc

SEQ ID NO: 7216 - DNA, 121 bp, synthetic construct
  misc_feature 1..121: note = Description of artificial sequence: synthetic polynucleotide sequence
  source 1..121: mol_type = other DNA
gttattcctgagtttgcaaatgtttttctctgtgattagggcatcggtgctcgctaatcggtgccaccagagattagacaattaccctccttcagaaactgggaaatagggcacaatcttc

SEQ ID NO: 7217 - DNA, 121 bp, synthetic construct
  misc_feature 1..121: note = Description of artificial sequence: synthetic polynucleotide sequence
  source 1..121: mol_type = other DNA
ataatatatgcttttttctactaagtccttattgctcttgtgtgaaccagcaaatactctctggaaaaaaagctgcagagaagtttggcttgcatcagtgagcatttatctccaagatctt

SEQ ID NO: 7218 - DNA, 121 bp, synthetic construct
  misc_feature 1..121: note = Description of artificial sequence: synthetic polynucleotide sequence
  source 1..121: mol_type = other DNA
tagctttttgatgtgctgctggattttgtttgctagtattttgctggggattttttccaccaatgttcatcaaggatattggcctgaagtttttcatgttgttgttatgtctctgccagtt

SEQ ID NO: 7219 - DNA, 121 bp, synthetic construct
  misc_feature 1..121: note = Description of artificial sequence: synthetic polynucleotide sequence
  source 1..121: mol_type = other DNA
tgcctttattactcattttacatttcatcaggtatcagatggcatgaaaatacgctgtcttggtctattttcttgctaccacccctaagatatcacatacttggctgtttcttattctaaa

SEQ ID NO: 7220 - DNA, 121 bp, synthetic construct
  misc_feature 1..121: note = Description of artificial sequence: synthetic polynucleotide sequence
  source 1..121: mol_type = other DNA
attataattgttattatttctatttaactgtctcctcttctacatagtagtcatgtctgtattttctactctcttcagatatgctaagccactatgttgaccttcacccagcagataactt

SEQ ID NO: 7221 - DNA, 121 bp, synthetic construct
  misc_feature 1..121: note = Description of artificial sequence: synthetic polynucleotide sequence
  source 1..121: mol_type = other DNA
ttcaagtgctattttagttgtgtctcttgctttcagaaaggaggggctttgtcattcaaacttcatacatggaaattaattttaatacataattttctttgatttctgaattactttaaaa

SEQ ID NO: 7222 - DNA, 121 bp, synthetic construct
  misc_feature 1..121: note = Description of artificial sequence: synthetic polynucleotide sequence
  source 1..121: mol_type = other DNA
gacaaagattttaactaaaaagagacaaagaccaagttgtaggtatgctgctattcccatcactattatcaactttgtgtttgcatgattaaccaattaattccaaccctttctttataac

SEQ ID NO: 7223 - DNA, 121 bp, synthetic construct
  misc_feature 1..121: note = Description of artificial sequence: synthetic polynucleotide sequence
  source 1..121: mol_type = other DNA
gccaccccagcccatggaacctccatactactctctacttctgcaagatcatctttttacagttccacatacgagtgaaataatgcaacatttgtctttctctgcctcgattatttcactt

SEQ ID NO: 7224 - DNA, 121 bp, synthetic construct
  misc_feature 1..121: note = Description of artificial sequence: synthetic polynucleotide sequence
  source 1..121: mol_type = other DNA
aaataaagtattttcataattcaaactcttccatgtagaatgacacattttgcagtcaatagtgaactcccctcctctctaatgtctatgtatttaaaaaactcaatttccgtgtatttat

SEQ ID NO: 7225 - DNA, 121 bp, synthetic construct
  misc_feature 1..121: note = Description of artificial sequence: synthetic polynucleotide sequence
  source 1..121: mol_type = other DNA
tttgtggaagacttctattaatagaaacacacagattagattaagccttccactgaagccttcgctcactctatgcttgtgttttggatcattagtcacaactagacatagtaaattaaaa

SEQ ID NO: 7226 - DNA, 121 bp, synthetic construct
  misc_feature 1..121: note = Description of artificial sequence: synthetic polynucleotide sequence
  source 1..121: mol_type = other DNA
acttctagaaaggattcaccaatctaggtttcattaactacgtgtgtgattgatatgaggaggtcaaaatatctacattaataggagtttggaaaaatttgagaccaaatctcatgaatga

SEQ ID NO: 7227 - DNA, 121 bp, synthetic construct
  misc_feature 1..121: note = Description of artificial sequence: synthetic polynucleotide sequence
  source 1..121: mol_type = other DNA
cttcccaggaagaggaatagcaagggtgaaggcactaggcaagaataagtgtggcaatttagaacagcaaggtggtctgtaattgaacacagttaataaagcacagaatggtagcagctga

SEQ ID NO: 7228 - DNA, 121 bp, synthetic construct
  misc_feature 1..121: note = Description of artificial sequence: synthetic polynucleotide sequence
  source 1..121: mol_type = other DNA
aggtgactattcatataaattctttctctttgtgaaatatgtgtatctaattatgacttccaggatatttatttcagtttctgaatccaaggaggtaggattttttctttttaatttcttt

SEQ ID NO: 7229 - DNA, 121 bp, synthetic construct
  misc_feature 1..121: note = Description of artificial sequence: synthetic polynucleotide sequence
  source 1..121: mol_type = other DNA
ttaaaaatcattaaacagagaatgataattatattccaaaaaataaagggacaaaacatgctaataccaatacaatataactaatatctttggctgtgatcaggaagatgtaattagagaa

SEQ ID NO: 7230 - DNA, 121 bp, synthetic construct
  misc_feature 1..121: note = Description of artificial sequence: synthetic polynucleotide sequence
  source 1..121: mol_type = other DNA
ttcctttcaaaatgaacaagaaagcaaattttgtttgtaagtgtgatgagattgagttctactttagaaaaaaatggcttgcttgcatttttctttatagatacataatttcataaagcca

SEQ ID NO: 7231 - DNA, 121 bp, synthetic construct
  misc_feature 1..121: note = Description of artificial sequence: synthetic polynucleotide sequence
  source 1..121: mol_type = other DNA
aagactatttatacatcagtttcagtgttactgttattcactcttgattatgatctatgttagtgatggaatattattaaaattataggcccggtcaagtataacaaaatgccacaattat

SEQ ID NO: 7232 - DNA, 121 bp, synthetic construct
  misc_feature 1..121: note = Description of artificial sequence: synthetic polynucleotide sequence
  source 1..121: mol_type = other DNA
ctccatgaaagttctttggtgagagaaattctgtaatatttctctatcatgtgaacctggaaaataatgaaagaaattgaataaataattatttttgcaatttaaatgttgaatttgcact

SEQ ID NO: 7233 - DNA, 121 bp, synthetic construct
  misc_feature 1..121: note = Description of artificial sequence: synthetic polynucleotide sequence
  source 1..121: mol_type = other DNA
gggtgcagtgataacagggcagcaatgtgaaggaacgggcgaagaagtgagaagatgcaatgagcagcgatgccctggtgagaatgaacccaaattatcccaaaagaaacatttcataacg

SEQ ID NO: 7234 - DNA, 121 bp, synthetic construct
  misc_feature 1..121: note = Description of artificial sequence: synthetic polynucleotide sequence
  source 1..121: mol_type = other DNA
ctgcctgagaacaccaggaaacatttctcaaactggttatagcagttgagttttccgggtgcaccattgagacccgtgttgaagtcctaggcttactgtgcagattccctccaggtgaggt

SEQ ID NO: 7235 - DNA, 121 bp, synthetic construct
  misc_feature 1..121: note = Description of artificial sequence: synthetic polynucleotide sequence
  source 1..121: mol_type = other DNA
tcatgtatgcttccgcactgattaatttatgcagtctttcactcactcaacacatacttgtcaggccttattatctacttaaacttgatgcaagcctgcaaatcagagagtatctctggta

SEQ ID NO: 7236 - DNA, 121 bp, synthetic construct
  misc_feature 1..121: note = Description of artificial sequence: synthetic polynucleotide sequence
  source 1..121: mol_type = other DNA
atttagccttctgagctttctgggcagacttggtgaccttgccagctccagcagccttcttgtccactgctttgatgacacccaccgcaactgtctgtctcatatcacgaacagcaaagcg

SEQ ID NO: 7237 - DNA, 236 bp, synthetic construct
  misc_feature 1..236: note = Description of artificial sequence: synthetic polynucleotide sequence
  source 1..236: mol_type = other DNA
cccaaaggtggatagtctgagaagctctcaacacacatgggcttgccaggaaccatatcaacaatggcagcatcaccagacttcaagaatttagggccatcttccagctttttaccagaacggcgatcaatcttttccttcagctcagcaaacttgcatgcaatgtgagccgtgtggcaatccaatacaggggcatagccggcgcttatttggcctggatggttcaggataatcac

SEQ ID NO: 7238 - DNA, 258 bp, synthetic construct
  misc_feature 1..258: note = Description of artificial sequence: synthetic polynucleotide sequence
  source 1..258: mol_type = other DNA
cctgagcagtgaagccagctgcttccattggtgggtcatttttgctgtcaccagcaacgttgccacgacgaacatccttgacagacacattcttgacattgaagcccacattgtccccaggaagagcttcactcaaagcttcatggtgcatttcgacagattttacttccgttgtaacgttgactggagcaaaggtgaccaccataccgggtttgagaacaccagtctccactcggccaacaggaacagtaccaatac

SEQ ID NO: 7239 - DNA, 152 bp, synthetic construct
  misc_feature 1..152: note = Description of artificial sequence: synthetic polynucleotide sequence
  source 1..152: mol_type = other DNA
ccaccaattttgtagacatcctggagaggcaggcgcaagggcttgtcagttggacgagttggtggtaggatgcagtccagagcctcaagcagcgtggttccactggcattgccatccttacgggtgactttccatcccttgaaccaaggcat

SEQ ID NO: 7240 - DNA, 298 bp, synthetic construct
  misc_feature 1..298: note = Description of artificial sequence: synthetic polynucleotide sequence
  source 1..298: mol_type = other DNA
cgttagcacttggctccagcatgttgtcaccattccaaccagaaattggcacaaatgctactgtgtcggggttgtagccaattttcttaatgtaagtgctgacttccttaacaatttcctcatatctcttctggctgtagggtggctcagtggaatccattttgttaacaccgacaattagttgtttcacacccagtgtgtaagccagaagggcatgctctcgggtctgcccattcttggagataccagcttcaaattcaccaacaccagcagcaacaatcaggacagcacagtcagc

SEQ ID NO: 7241 - DNA, 181 bp, synthetic construct
  misc_feature 1..181: note = Description of artificial sequence: synthetic polynucleotide sequence
  source 1..181: mol_type = other DNA
cctgagatgtccctgtaatcatgtttttgataaagtctctgtgtcctggggcatcaatgatagtcacatagtacttgctggtctcaaatttccacaaggagatatcaatggtgataccacgttcacgctcagctttcagtttatccaagacccaggcatacttgaaggagccctttcccat

SEQ ID NO: 7242 - DNA, 145 bp, synthetic construct
  misc_feature 1..145: note = Description of artificial sequence: synthetic polynucleotide sequence
  source 1..145: mol_type = other DNA
cctcagcagcctccttctcaaatttttcaatggttcttttgtcgatgccaccgcatttatagatcagatggccagtagtggtggacttgcccgaatctacgtgtccaatgacgacaatgttgatatgagtcttttcctttcccat

SEQ ID NO: 7243 - DNA, 121 bp, synthetic construct
  misc_feature 1..121: note = Description of artificial sequence: synthetic polynucleotide sequence
  source 1..121: mol_type = other DNA
ggaaaattagcctcattcactttttttcaccttgattcagcttgctgtggtacagccaacggcagttaatatttccgcaaatggttttggatttgctatttgtcaggtatgtaacgatgct

SEQ ID NO: 7244 - DNA, 121 bp, synthetic construct
  misc_feature 1..121: note = Description of artificial sequence: synthetic polynucleotide sequence
  source 1..121: mol_type = other DNA
gaacacttaaaatctctcagtgattttcgagaatacaatacattgttattaactgtagtcgtcatgttgttcaatagatctcttgaacttattcctcttatctaactgaaattttctatcc

SEQ ID NO: 7245 - DNA, 121 bp, synthetic construct
  misc_feature 1..121: note = Description of artificial sequence: synthetic polynucleotide sequence
  source 1..121: mol_type = other DNA
aaagtccttgaaagcaaggaggcaggtttagttggtttctgtgatctctctaacatagtgcgatgcatagtaggtgatatgatttggctgtgtccccacccaaattttatcccacaattct

SEQ ID NO: 7246 - DNA, 121 bp, synthetic construct
  misc_feature 1..121: note = Description of artificial sequence: synthetic polynucleotide sequence
  source 1..121: mol_type = other DNA
gtaccaattattataatttttaggatcctgggagaaaatagtttctgcatgcattgagggtgaatatgcaatatgtgatcctgcattcaaccctggactagaatttttggatagaagacat

SEQ ID NO: 7247 - DNA, 121 bp, synthetic construct
  misc_feature 1..121: note = Description of artificial sequence: synthetic polynucleotide sequence
  source 1..121: mol_type = other DNA
atttagttattagttaataatttattgaaatctcttttaagagtagaactaaaatagtcttaagatgaagctcaaagcttctcatagtgagactacatctctacaattttttttttaatta

SEQ ID NO: 7248 - DNA, 121 bp, synthetic construct
  misc_feature 1..121: note = Description of artificial sequence: synthetic polynucleotide sequence
  source 1..121: mol_type = other DNA
tcatttaaaatgattagtttttaaaagttgctgatatttacataatatgtacatcaggccgtgattaggtgtctagttttatctgttatttaaacaataataaaccagaaaccctcttcta

SEQ ID NO: 7249 - DNA, 121 bp, synthetic construct
  misc_feature 1..121: note = Description of artificial sequence: synthetic polynucleotide sequence
  source 1..121: mol_type = other DNA
aattattgatatgtatttattcacccagtgagaaagacacagctttcatagggcagaaattacgtgagtttccaagatagacagaaacacaataatagtagaatattttaataaaccttgc

SEQ ID NO: 7250 - DNA, 121 bp, synthetic construct
  misc_feature 1..121: note = Description of artificial sequence: synthetic polynucleotide sequence
  source 1..121: mol_type = other DNA
aagttctttacttcaggtgagttggggttcctacaatggcaacaacgtacctggatagccttgcccgttgtatgggatgctggcacactgagaagaatcacagtatccaggaggacctggg

SEQ ID NO: 7251 - DNA, 195 bp, synthetic construct
  misc_feature 1..195: note = Description of artificial sequence: synthetic polynucleotide sequence
  source 1..195: mol_type = other DNA
attaaatggtaatgtcagctgtattactactgtttctatatttatgattaattactagcagtacaactcccagaaggaaggagatggatccaacagcgatgtaagcaatccccaaaaatggattttttcctcccatccatgaaatagtgctcaagatcatccgttttcgtccatcaaaataatgtacagggtaat

SEQ ID NO: 7252 - DNA, 208 bp, synthetic construct
  misc_feature 1..208: note = Description of artificial sequence: synthetic polynucleotide sequence
  source 1..208: mol_type = other DNA
ctgtatgtgacattcaaagagtatcggccagctggtaatgttggatgtaaatcacttttcctttctataagacgatacaacttgcgaaaagtaggtaatgctgcagtacgcatccaaacaataaaatcctcatttatgaatccattattatctgggtcagaatccagcatgtaaactggtttaagccagttcacaggctttgttgtac

SEQ ID NO: 7253 - DNA, 145 bp, synthetic construct
  misc_feature 1..145: note = Description of artificial sequence: synthetic polynucleotide sequence
  source 1..145: mol_type = other DNA
cctttaaatcgttcttccaggttgtctcctccagggggatttctgaatttcacatttttatctgtccaccaagcaatacctttctttttcaaagcgataggtataggataagaatcattgccaatgagaaacaattctaatgtat

SEQ ID NO: 7254 - DNA, 121 bp, synthetic construct
  misc_feature 1..121: note = Description of artificial sequence: synthetic polynucleotide sequence
  source 1..121: mol_type = other DNA
ttgtatctatatcataccattaaacatgctgttggcaatagctccacaaggagcaattggtttgtcttcatttcttcgataaggttcacattccttactgggattctggtttttacaagga

SEQ ID NO: 7255 - DNA, 121 bp, synthetic construct
  misc_feature 1..121: note = Description of artificial sequence: synthetic polynucleotide sequence
  source 1..121: mol_type = other DNA
tacttacaagcaaagcactagaatctccatttagttgactatcatctcgagatttcacgtaacgacgatggttttgatagaaattagacagtccataatacataaacacgttgccctagag

SEQ ID NO: 7256 - DNA, 121 bp, synthetic construct
  misc_feature 1..121: note = Description of artificial sequence: synthetic polynucleotide sequence
  source 1..121: mol_type = other DNA
cacagacctcaaatgacttttccagtgtgaagttaatggtacaaaagcaaggtgtcacatccggagataaacatttattacagggactggaaggctctgttccggtataatcaatctgcaa

SEQ ID NO: 7257 - DNA, 238 bp, synthetic construct
  misc_feature 1..238: note = Description of artificial sequence: synthetic polynucleotide sequence
  source 1..238: mol_type = other DNA
cctcgatctcgcggatgttgttggaggtgacaaaaatgccaatgccgatgggaatgaagatgagaccgatgatgaagaaaataggtagcaccgtgccagccgtaaggatgggctgccaagctggcagccgttgctgtttgaaggccgtgttatccggtctccgagtcttcgcggtgccccccggagcacacgggggcccaccgtccacttcatccttcgcgttatagttcatcgccat

SEQ ID NO: 7258 - DNA, 121 bp, synthetic construct
  misc_feature 1..121: note = Description of artificial sequence: synthetic polynucleotide sequence
  source 1..121: mol_type = other DNA
ctggccaattccatactttaaatgaaagaatgtgattctcacaagacttcggacttcatgacttccactgcatagaatctctcagttgattatatccccatggcatgtattttttcattag

SEQ ID NO: 7259 - DNA, 121 bp, synthetic construct
  misc_feature 1..121: note = Description of artificial sequence: synthetic polynucleotide sequence
  source 1..121: mol_type = other DNA
ttcggagtacattaacacactgacctgtcagtttcacaggacagatcagcttgtttccaatgcacctgctgtataggaaagcaaagtgattaatcctttcctgttgttgctggtattgtga

SEQ ID NO: 7260 - DNA, 121 bp, synthetic construct
  misc_feature 1..121: note = Description of artificial sequence: synthetic polynucleotide sequence
  source 1..121: mol_type = other DNA
cagcctgctgattcagcatgttcttcccctgcaccatccactggaaaagtagaagcagcgctaaatgaaaatacttgcagagcagagcgtgaactacgaagcattccagaagactcagagt

SEQ ID NO: 7261 - DNA, 121 bp, synthetic construct
  misc_feature 1..121: note = Description of artificial sequence: synthetic polynucleotide sequence
  source 1..121: mol_type = other DNA
ccttttagaggtctgtgatataacaaaaggacagtgccaataagcagttgagcaaatggcgctagagtttggttgagttctgaccaacagagatggtaagatgttgtttaattgtgagaat

SEQ ID NO: 7262 - DNA, 121 bp, synthetic construct
  misc_feature 1..121: note = Description of artificial sequence: synthetic polynucleotide sequence
  source 1..121: mol_type = other DNA
tggtaccctagggataagggagagtaccctaggaagtacaaacttcgaagatattcagaacttgctggagaaggtgtaattccaagcactagctaacagttttgccggtttggccaggctg

SEQ ID NO: 7263 - DNA, 121 bp, synthetic construct
  misc_feature 1..121: note = Description of artificial sequence: synthetic polynucleotide sequence
  source 1..121: mol_type = other DNA
aaatgtttaattgtaaagagataactgtttttttgtacatgtgttccaacaggagattcatgaaaacttaactgaacttaacatggttatatgagacagcaagtgacatgaaggagcagac

SEQ ID NO: 7264 - DNA, 121 bp, synthetic construct
  misc_feature 1..121: note = Description of artificial sequence: synthetic polynucleotide sequence
  source 1..121: mol_type = other DNA
catcatttcaaaatttcgaaggcaagtcttggcaaattgctagctagtgtgggtactgtgatttaaattcaggtagtttagatcagagttgccatttttaagcattagtctataatgacct

SEQ ID NO: 7265 - DNA, 121 bp, synthetic construct
  misc_feature 1..121: note = Description of artificial sequence: synthetic polynucleotide sequence
  source 1..121: mol_type = other DNA
agctccttttctcactctcacacactaagccagtatttccctgttttaaatcatctcagagctgggaccagacaactagatacctgtgccccagggcccactggaattattcaaactagcc

SEQ ID NO: 7266 - DNA, 121 bp, synthetic construct
  misc_feature 1..121: note = Description of artificial sequence: synthetic polynucleotide sequence
  source 1..121: mol_type = other DNA
gagtgccttcaattatttccctaaaacacctatttctcataacatcaatcacagagagcgagtccatcacctctaccctcttaactctttcttagaaatcctacctttcttagaaagccta

SEQ ID NO: 7267 - DNA, 121 bp, synthetic construct
  misc_feature 1..121: note = Description of artificial sequence: synthetic polynucleotide sequence
  source 1..121: mol_type = other DNA
taataataagtaataaatttccttattatttaggccagacgttatgttagtttcatctcgaggcattcaaagtgccacaccctgcttaaattccactgtagaaatggcagacctatgatga

SEQ ID NO: 7268 - DNA, 121 bp, synthetic construct
  misc_feature 1..121: note = Description of artificial sequence: synthetic polynucleotide sequence
  source 1..121: mol_type = other DNA
tattaaggtacattttatcaacatgttcttctgtggcagttacttcagttacttgtggacagctgttttccatactctcatttgtggtcttttgtaaaatcacattctcatcatttttgtc

SEQ ID NO: 7269 - DNA, 121 bp, synthetic construct
  misc_feature 1..121: note = Description of artificial sequence: synthetic polynucleotide sequence
  source 1..121: mol_type = other DNA
aggttcacatgttgtgagtcttgagacaaaatatttgggttcatcttcaggggtaaagagctaaaaaattcagtttcttttctttcggccactttctcagagctataaaacaaaacaggac

SEQ ID NO: 7270 - DNA, 121 bp, synthetic construct
  misc_feature 1..121: note = Description of artificial sequence: synthetic polynucleotide sequence
  source 1..121: mol_type = other DNA
catctgcatagcattcaaaagactatttgttttgtaggttagtagctcgtagacatgacctcataatcatctttctgcatgttcaccttccttaccaatttgggtaatattattaataaaa

SEQ ID NO: 7271 - DNA, 121 bp, synthetic construct
  misc_feature 1..121: note = Description of artificial sequence: synthetic polynucleotide sequence
  source 1..121: mol_type = other DNA
gacagatcctagggggatacttatattagggggcagaagaaacaaaagagcctgtgaacgagataaggaagatgcctttagagcttaggaaaagaaccagtgacacaatggaggttggaag

SEQ ID NO: 7272 - DNA, 169 bp, synthetic construct
  misc_feature 1..169: note = Description of artificial sequence: synthetic polynucleotide sequence
  source 1..169: mol_type = other DNA
gatggcggacgaagaggccgagcaggagaggttgagttgcggcgaaggcggctgcgtcgcggagctgcagcgcctgggcgagcggctccaggagctggagctacagctgcgggagagccgggtaccggccgtggaagcggccaccgactactgtcagcagctgtgccag

SEQ ID NO: 7273 - DNA, 156 bp, synthetic construct
  misc_feature 1..156: note = Description of artificial sequence: synthetic polynucleotide sequence
  source 1..156: mol_type = other DNA
gacactcctagaatatgcagagaaatggaaaacttcagaagatcctttacctttattggaggtatacacagtggctatccaaagttatgttaaagcccgaccttatcttacctctgaatgtgaaaatgtagccttggttctggaacgcttggcatt

SEQ ID NO: 7274 - DNA, 121 bp, synthetic construct
  misc_feature 1..121: note = Description of artificial sequence: synthetic polynucleotide sequence
  source 1..121: mol_type = other DNA
taccaactttttgttttttagaagctgtgttgaacttttactgtgtctgcctgttgagttatcagataaacagtgggaacaatttcagacactggtgcaggtgagaatctttatctttaga

SEQ ID NO: 7275 - DNA, 137 bp, synthetic construct
  misc_feature 1..137: note = Description of artificial sequence: synthetic polynucleotide sequence
  source 1..137: mol_type = other DNA
ggtagctcatgaaaagctgatggagaatggcagctgtgaattgcattttttagctactctagctcaagagactggggtgtggaaaaacccggtactgtgcactattctttcccaggaaccattggataaggataaag

SEQ ID NO: 7276 - DNA, 204 bp, synthetic construct
  misc_feature 1..204: note = Description of artificial sequence: synthetic polynucleotide sequence
  source 1..204: mol_type = other DNA
gtgaatgaatttttagcttttgagggtcccatcttgttggatatgagaattaaacatctaatcaaaacaaatcagttaagtcaagcaactgctctagcaaagctgtgttctgaccatccagagattggcataaaaggtagttttaagcaaacttaccttgtctgtctttgtacatcatcaccaaatggaaagttaatcgaagag

SEQ ID NO: 7277 - DNA, 138 bp, synthetic construct
  misc_feature 1..138: note = Description of artificial sequence: synthetic polynucleotide sequence
  source 1..138: mol_type = other DNA
gatttcagaagttgattgcaaagatgcactggaaatgatctgtaacttagaatctgagggtgatgaaaaaagcgctcttgttttatgtactgcgtttttgtcacgtcagctccaacaaggagatatgtactgcgcttg

SEQ ID NO: 7278 - DNA, 143 bp, synthetic construct
  misc_feature 1..143: note = Description of artificial sequence: synthetic polynucleotide sequence
  source 1..143: mol_type = other DNA
gggaacttactctcttttggagtaaattacaacaaagagtagaaccatctatacaagtgtaccttgagaggtgtcgtcaactttctttgttaacgaaaacagtatatcacattttcttcctgattaaagttattaattcagag

SEQ ID NO: 7279 - DNA, 476 bp, synthetic construct
  misc_feature 1..476: note = Description of artificial sequence: synthetic polynucleotide sequence
  source 1..476: mol_type = other DNA
gactgaaggggctggacttgctacctgtatagaactgtgtgtaaaggctcttcgcttggagtctacagaaaatactgaagtgaaaatatctatttgcaagaccatttcatgtttgttgcctgatgatctggaagttaaacgtgcttgtcaactgagtgaatttcttattgagcctacagtagatgcgtattatgctgtggaaatgttgtataatcagccagaccagaaatatgatgaagagaatcttccaataccaaattctttacgctgtgagctgttacttgtattgaaaactcaatggccctttgatccagaattctgggattggaaaaccttgaaacgacaatgtcttgcattaatgggagaagaagcatccattgtgtcttcaatagatgaactaaatgacagtgaagtatatgaaaaagtggtagactaccaagaagagagtaaagaaacttctatgaatgggctttctg

SEQ ID NO: 7280 - DNA, 475 bp, synthetic construct
  misc_feature 1..475: note = Description of artificial sequence: synthetic polynucleotide sequence
  source 1..475: mol_type = other DNA
gtggagttggtgctaattctggccttcttaaagacattggtgatgaaaagcagaagaagagagagataaaacagttaagagagaggggatttatatctgctcggtttaggaattggcaagcctacatgcagtattgtgtgttgtgtgacaaagaattccttggtcacagaatagtacgacatgctcagaaacattacaaagatggaatttatagttgccccatatgtgcaaagaactttaattctaaagaaacttttgtccctcatgtcacactgcatgttaaacaatctagtaaagagagactagcagctatgaaaccattaagaagattgggaaggcctccaaagatcacaactaccaatgaaaatcagaagactaatactgtggctaaacaggagcagcgacctataaaaaagaatagtctctattcaacagattttatagtgtttaatgacaatgatggttcagatgatga

SEQ ID NO: 7281 - DNA, 477 bp, synthetic construct
  misc_feature 1..477: note = Description of artificial sequence: synthetic polynucleotide sequence
  source 1..477: mol_type = other DNA
gaatgatgacaaagataaatcctatgagccagaagtgattccagtccagaaaccagtacctgttaatgaatttaattgccctgtaactttttgtaaaaagggctttaagtactttaaaaatttaattgctcatgtgaaggggcataaagataatgaagacgccaagcgctttcttgaaatgcagagcaaaaaagttatttgccagtactgtaggcggcattttgtgagtgttactcatctcaatgatcacttacagatgcactgtggcagtaaaccatatatctgtatacagatgaaatgtaaagctggttttaatagttacgccgagcttttaacccaccgaaaggagcatcaagtctttagagcaaaatgtatgtttcctaaatgtggaagaattttttcggaagcttatttactatatgatcatgaagcacaacattataatacgtacacttgtaagttcacaggttgtggtaa

SEQ ID NO: 7282 - DNA, 476 bp, synthetic construct
  misc_feature 1..476: note = Description of artificial sequence: synthetic polynucleotide sequence
  source 1..476: mol_type = other DNA
agtttatcgttctcagggtgagctggaaaagcatctggatgatcacagtactcctcctgaaaaagtgctgcctcctgaagcccaacttaattcatctggagattccattcagccttctgaagtgaatcagaacacagcagagaatattgagaaagaaagatctatgcttccttcagaaaataacattgaaaacagcttactagcagatagaagtgatgcttgggataaaagcaaagcagaatcagctgtgaccaaacaagaccagatttctgcctctgagctcaggcaagctaatggaccattgtcaaatggtttggaaaaccctgctactactcctctacttcaatccagtgaagtagctgtgtccattaaggtgtctctcaatcaggggattgaggataactttggaaagcaagaaaactcaactgtggaaggcagtggtgaagcactggtcacagacttacatacgccagttg

SEQ ID NO: 7283 - DNA, 477 bp, synthetic construct
  misc_feature 1..477: note = Description of artificial sequence: synthetic polynucleotide sequence
  source 1..477: mol_type = other DNA
aagatacttgtaatgatttgtgtcatccaggtttccaggagagaaaagaacaagattgctttaatgatgcccatgttactcagaattctttagtaaattcagaaactctcaaaataggtgaccttaccccacaaaacttagaaagacaagtgaacaacttgatgaccttttctgtgcaaaatcaggcagcatttcaaaacaatttaccaacttccaaatttgaatgtggagataatgttaaaacatcatccaatctttataatttacctcttaagacattagaaagtattgcatttgttccaccgcagtccgacctaagtaattcattaggaactccatcagtgcctccaaaagctccagttcagaaattcagctgccaggtcgagggatgtactcgaacctataattcttcacagagtattgggaaacacatgaagacagcacaccctgaccaatatgctgcatttaaaatgcagc

SEQ ID NO: 7284 - DNA, 478 bp, synthetic construct
  misc_feature 1..478: note = Description of artificial sequence: synthetic polynucleotide sequence
  source 1..478: mol_type = other DNA
gcaaaagtaaaaaaggtcagaaagctaacaacttaaatacaccaaataatggaaagtttgtttattttttgccatcaccggtgaacagctcaaatccattttttacatcacagaccaaagccaatgggaatcctgcttgttcggcccagttgcagcatgtctcgccacccatttttccagctcatttagcaagtgtgtcaactccattgttgtcctcaatggaaagtgtcataaatccaaatataacttctcaggataaaaatgaacaaggtggtatgttatgttcccaaatggaaaatttacctagtactgccttgccagcacaaatggaagatctaaccaaaacagttctgcctttgaatattgacagtggctcagatcctttccttcctttacctgcagaaagtagttcaatgtctctcttcccttcaccagcagatagtgggactaattctgttttttcccaactggaaaataa

SEQ ID NO: 7285 - DNA, 477 bp, synthetic construct
  misc_feature 1..477: note = Description of artificial sequence: synthetic polynucleotide sequence
  source 1..477: mol_type = other DNA
tacaaatcattattcctcacagattgaaggaaacactaattcctcctttctaaaggggggtaatggtgaaaatgcagtttttccttcacaagtgaatgttgcaaataacttcagtagcaccaatgcccaacagtctgcacctgaaaaagttaaaaaagaccgtgggcggggcccaaatgggaaggaaagaaaacctaagcacaacaaaagggctaaatggcctgcaattatcagagatgggaaatttatctgtagcaggtgttacagggcttttactaatcccagatcactgggtgggcacttatccaagcgatcttactgtaaaccactggatggagccgaaattgctcaagaacttctacagagtaatggacagccttctcttcttgccagcatgattctctccacaaatgcagtaaatttgcagcagccacaacaatctaccttcaatccagaagcatgttttaaagatccatc

SEQ ID NO: 7286 - DNA, 477 bp, synthetic construct
  misc_feature 1..477: note = Description of artificial sequence: synthetic polynucleotide sequence
  source 1..477: mol_type = other DNA
atttctacagcttcttgctgaaaatcgctcgccagcatttttaccaaatacatttcctcgatctggtgtgactaactttaataccagtgtcagtcaagaaggtagtgaaattattaaacaggctttggaaactgctggcattcccagtacatttgagggtgccgaaatgctttctcatgtttcaacaggttgtgtctctgatgcatcacaagtaaatgcaacggtgatgccaaatccaactgtaccacccctgttgcacactgtatgccatccaaacaccttgctgaccaaccagaataggacgtcaaactccaaaacttcctccattgaggaatgtagcagcttgcctgtttttccaacgaatgacttactactgaagactgttgaaaatggtttgtgctctagttcatttcctaattctggtgggccatcacaaaattttaccagtaacagttctcgtgtttctgttataagtgg

SEQ ID NO: 7287 - DNA, 477 bp, synthetic construct
  misc_feature 1..477: note = Description of artificial sequence: synthetic polynucleotide sequence
  source 1..477: mol_type = other DNA
tcctcagaacacaagatccagtcatttaaataaaaagggaaacagtgcttctaagagaagaaagaaagttgctcctccactaattgcacctaacgcttcccaaaacttggtaacaagtgacttaacaacaatgggactcatagcaaagagtgttgaaatcccaactactaaccttcattcaaatgtaattccaacttgtgaacctcagagtttggtggaaaatctaacacagaaattaaataatgttaacaatcagttatttatgactgatgtaaaagagaatttcaaaaccagtcttgagtcccatacagtgttagcccctttaacattaaaaactgaaaatggtgattcccaaatgatggctttgaattcatgcacaacttcaataaattctgatttgcagatttctgaagacaatgttatacaaaactttgaaaagactcttgaaattattaaaactgctatgaattctcaaat

SEQ ID NO: 7288 - DNA, 477 bp, synthetic construct
  misc_feature 1..477: note = Description of artificial sequence: synthetic polynucleotide sequence
  source 1..477: mol_type = other DNA
acttgaggtaaaaagtggatctcagggtgctggtgaaacttcacaaaatgctcaaataaattataacattcagcttccttcagtaaacactgtgcaaaataacaaattacccgattcttctccgttttcctcctttataagtgtcatgccaacaaaaagtaacattcctcagtctgaagtatcacataaggaggatcaaatacaggaaattttagaaggcttacagaaattaaaattagaaaatgacctatccactccagcatcccaatgtgtactgataaatacatcagtgacactgactcccacgcctgttaaatcaactgcagatatcacagttattcagccagtttctgaaatgataaacattcaatttaatgacaaagttaataaaccctttgtgtgtcaaaaccaaggctgtaactacagtgctatgacaaaggatgcactatttaagcactatggtaaaattcatcaata

SEQ ID NO: 7289 - DNA, 478 bp, synthetic construct
  misc_feature 1..478: note = Description of artificial sequence: synthetic polynucleotide sequence
  source 1..478: mol_type = other DNA
cactccagaaatgattcttgaaattaagaagaatcaattgaaatttgctccctttaaatgtgtagtacctacatgtacaaaaacatttacaagaaattctaacctccgggcacactgtcagttggtgcatcattttacaactgaagaaatggtaaagttaaaaattaaaaggccttatggaagaaaatctcagagtgaaaatgtgccggcctcacgaagtacacaagtgaaaaaacagctagctatgacagaggaaaataaaaaggaatctcagcctgctttagaattgagagcagagacccaaaatacccacagtaatgtagcagtgatcccagaaaaacaacttgtagaaaaaaaaagtcctgacaaaacagaaagttctttacaagtgattacagttacttcagaacaatgtaatacaaatgcactcacaaacacacaaaccaaaggacggaagattaggaggcataaaaaagaa

SEQ ID NO: 7290 - DNA, 476 bp, synthetic construct
  misc_feature 1..476: note = Description of artificial sequence: synthetic polynucleotide sequence
  source 1..476: mol_type = other DNA
aaggaggagaaaaaacgaaagaagccagtttcccaatcccttgagtttccaacaagatacagtccttacagaccttatcgatgtgttcaccagggatgctttgctgcctttacgatacagcaaaacttgattctccattaccaggctgtacacaaatcagatctacctgcattttcagcagaggtcgaagaggaaagtgaagctggtaaagaaagtgaagaaactgaaactaaacaaactttgaaagaatttcgatgtcaggtaagtgactgttctcgaattttccaagcaattactggcctaatacaacactacatgaaacttcatgaaatgactcctgaagaaattgaaagtatgactgcttcagtggatgttgggaagtttccatgtgaccagttagagtgtaaatcttcatttactacatatttgaactatgttgttcatctagaggcagaccacgggattggactaagggc

SEQ ID NO: 7291 - DNA, 477 bp, synthetic construct
  misc_feature 1..477: note = Description of artificial sequence: synthetic polynucleotide sequence
  source 1..477: mol_type = other DNA
aagtaaaacagaagaagatggtgtatacaaatgtgattgtgaaggctgtgaccgtatatatgcaacccggtcgaatctcctccgacacatttttaataagcataatgacaaacataaggctcatttgattcgtccaagaagattaacaccaggccaggaaaatatgtcaagcaaggcaaaccaagaaaaatcaaagtctaaacatcgggggaccaagcacagcagatgtggaaaggaaggaataaaaatgcccaagaccaaacgaaagaaaaaaaataatttagaaaacaagaatgcaaagattgtgcagattgaagaaaataagccttattctctgaaacgtgggaagcatgtatattctataaaggctagaaatgatgccctgtctgagtgtacaagcagatttgtaacccagtatccatgtatgataaagggatgtacttcagttgttacaagtgaaagcaatataattagaca

SEQ ID NO: 7292 - DNA, 477 bp, synthetic construct
  misc_feature 1..477: note = Description of artificial sequence: synthetic polynucleotide sequence
  source 1..477: mol_type = other DNA
ttataagtgccataaattatctaaggcatttacatcacaacaccgaaatcttcttattgtattcaaacggtgttgcaactcacaagtaaaggaaacgtctgagcaagaaggtgctaagaatgatgtgaaagattctgacacgtgtgtatcagagagcaatgataattcaagaacaacagctacagtttcacaaaaggaagttgaaaaaaatgaaaaagatgaaatggatgaactaacagaattgtttattacaaaattaataaatgaagatagcacaagtgtagagacccaagctaatacttcttcaaatgtaagtaatgattttcaggaagataacctctgccagtcagaaagacaaaaagcaagtaatttgaagagagttaataaggaaaaaaatgtctcacaaaataaaaaaaggaaagttgaaaaagctgaaccagcatcagcagctgagttaagtagcgtgcgtaaagaaga

SEQ ID NO: 7293 - DNA, 478 bp, synthetic construct
  misc_feature 1..478: note = Description of artificial sequence: synthetic polynucleotide sequence
  source 1..478: mol_type = other DNA
agaaactgctgttgccattcaaaccattgaggagcatcctgcatcttttgactggagctcttttaagccaatgggatttgaagtatcatttctgaagtttcttgaggagtctgcagtgaagcagaagaaaaatactgacaaagaccatccgaatactggaaacaaaaaaggatcccattcaaattcaagaaaaaatattgataagactgctgtgactagtggaaatcatgtatgtccttgtaaagaaagcgaaacgtttgtacagtttgccaatccatcacagcttcagtgcagtgataatgtaaaaattgttttagacaagaatcttaaagattgcactgagcttgtcttaaagcaacttcaggaaatgaaacctaccgtcagtctgaaaaaacttgaagtacattcaaatgatccagatatgtctgttatgaaagatatcagtataggtaaagccacaggcagaggtcagtactga

SEQ ID NO: 7294 - DNA, 121 bp, synthetic construct
  misc_feature 1..121: note = Description of artificial sequence: synthetic polynucleotide sequence
  source 1..121: mol_type = other DNA
gaacaaaggggctgtctacaagaggtctgcactgcagtgtgtactcttaaaccagagaaaccaagagagaaatggaaatgagaagcaattgtgcaggaatttaatggactctgactagagt

SEQ ID NO: 7295 - DNA, 121 bp, synthetic construct
  misc_feature 1..121: note = Description of artificial sequence: synthetic polynucleotide sequence
  source 1..121: mol_type = other DNA
ggagcaattgtaaaggggaaggagggttgaactgaacttctaagtgccagggacacttcttgtagcattgaggcagttaagagaagagcctggtattccagagatggcaagtgaggaagca

SEQ ID NO: 7296 - DNA, 121 bp, synthetic construct
  misc_feature 1..121: note = Description of artificial sequence: synthetic polynucleotide sequence
  source 1..121: mol_type = other DNA
aaacccagtctcaaaaaaaaaaaaaaaaaaaaaggcttgcaattagtgtatgtcctttctcacccacaggaaatcaactttcagatggaaagaaatacaaataccaagcgtgaaactcacc

SEQ ID NO: 7297 - DNA, 121 bp, synthetic construct
  misc_feature 1..121: note = Description of artificial sequence: synthetic polynucleotide sequence
  source 1..121: mol_type = other DNA
tgtcctcttcggttctcattctttcaccatagaccaaaaacacatgctgaccaggatcataacacccaggggactggtcaaccagcatcaactgacaccagcggaaaaggtcccggaggtt

SEQ ID NO: 7298 - DNA, 121 bp, synthetic construct
  misc_feature 1..121: note = Description of artificial sequence: synthetic polynucleotide sequence
  source 1..121: mol_type = other DNA
tggtcacactgatgtcattatggttctcaaaaaatggtggttcttcttgttccaggccaggttggtttcagaaatatttgctgagcctgagaactccaaaccagcttcacttggggcacca

SEQ ID NO: 7299 - DNA, 121 bp, synthetic construct
  misc_feature 1..121: note = Description of artificial sequence: synthetic polynucleotide sequence
  source 1..121: mol_type = other DNA
ttctgtctgagtcaatgctgactctactggtaataatcaccatgaagagggtttctgaatctcgaagaagatggcagctttctttggaaccatctagttaatattgggacaaggaaattgc

SEQ ID NO: 7300 - DNA, 121 bp, synthetic construct
  misc_feature 1..121: note = Description of artificial sequence: synthetic polynucleotide sequence
  source 1..121: mol_type = other DNA
cacaccaagtgattaaacccacccatagtgtagataacactaccaatagtaaaatgataatctccctgcaaacattattaccaaatctatggtttggagtgctcctcccctcatgaattca

SEQ ID NO: 7301 - DNA, 121 bp, synthetic construct
  misc_feature 1..121: note = Description of artificial sequence: synthetic polynucleotide sequence
  source 1..121: mol_type = other DNA
gatggtattaagaggtagaaccagtatgaggtgaatagaccataagggccctgtccttatgagtgaatgaatgttttatccagagattggttttgttatcaggaaagtggggttgttgcaa

SEQ ID NO: 7302 - DNA, 121 bp, synthetic construct
  misc_feature 1..121: note = Description of artificial sequence: synthetic polynucleotide sequence
  source 1..121: mol_type = other DNA
ctgtaactgttaaattgtggtagaattaggaaatgttgaaatggtctcatcaagaaaccatgcataatgacatttaggacattaacagagtcccccaaatcttgttcaaaagtgtcttttt

SEQ ID NO: 7303 - DNA, 121 bp, synthetic construct
  misc_feature 1..121: note = Description of artificial sequence: synthetic polynucleotide sequence
  source 1..121: mol_type = other DNA
tttaatatttagatgtaccttatgacttgcacaatgcatttctttagagatgatattggtggaatagtggctgtgtttctcaatgccagcaaaacaggatgttgtccaagatctgaaacat

SEQ ID NO: 7304 - DNA, 121 bp, synthetic construct
  misc_feature 1..121: note = Description of artificial sequence: synthetic polynucleotide sequence
  source 1..121: mol_type = other DNA
gtctgtgtagtttcctataccaaaaatttgagtttaataaagaggaaatattactttacgtctaccgtcaataacagcataatagagtaatagatacatctttaatttgattaagtagtat

SEQ ID NO: 7305 - DNA, 121 bp, synthetic construct
  misc_feature 1..121: note = Description of artificial sequence: synthetic polynucleotide sequence
  source 1..121: mol_type = other DNA
ccactaaaatctttctccgtatctattcagttacttcttcacttactcatccatattatcgaatgtcaacctaacaccatacactgtcccaagtactgggaatatagtggtaaatacaaaa

SEQ ID NO: 7306 - DNA, 121 bp, synthetic construct
  misc_feature 1..121: note = Description of artificial sequence: synthetic polynucleotide sequence
  source 1..121: mol_type = other DNA
gtctctaagttagtacttagtattaatagaacaaccaaaataatggagtgtcttgtattcgtatgccgtctttattttccttatataacctgcactataagtgaatttgacatcattatta

SEQ ID NO: 7307 - DNA, 121 bp, synthetic construct
  misc_feature 1..121: note = Description of artificial sequence: synthetic polynucleotide sequence
  source 1..121: mol_type = other DNA
actttaatgaggtgaagcccagatgtagctgaaatgatccagaggaggagtgaatatgacgcagaattgtaatcagagtgggactttggaatttgagatttcagatagagccattgccaga

SEQ ID NO: 7308 - DNA, 121 bp, synthetic construct
  misc_feature 1..121: note = Description of artificial sequence: synthetic polynucleotide sequence
  source 1..121: mol_type = other DNA
tttgcctagtagaggagcttataatatagttggagattaacaaataaatgtcatgtaggtagagtaaaacaagatatgtgtaatcaggacaagctgctattaggcaataatactaatgctg

SEQ ID NO: 7309 - DNA, 121 bp, synthetic construct
  misc_feature 1..121: note = Description of artificial sequence: synthetic polynucleotide sequence
  source 1..121: mol_type = other DNA
tccatcagctgaaaaacttgtacctgagaagaacatgagaaagccaagaatgtatcgttgcaaatacagcagccaaattttactgtaggtctcctcttttggtacaattaagggaattgat

SEQ ID NO: 7310 - DNA, 121 bp, synthetic construct
  misc_feature 1..121: note = Description of artificial sequence: synthetic polynucleotide sequence
  source 1..121: mol_type = other DNA
tatcatttgacatctattcatttctcaataaatccctttctcgttaactacgtaatttccagcttaacagaacctaagtatcttggggtagaaaggacaacacatccaattaatcagataa

SEQ ID NO: 7311 - DNA, 121 bp, synthetic construct
  misc_feature 1..121: note = Description of artificial sequence: synthetic polynucleotide sequence
  source 1..121: mol_type = other DNA
tactcgcagcccagcttcacggtgaacggcatgctgggcgccggcgggcagccggccggtctgcaccaccacggcctgcgggacgcgcacgacgagccacaccatgccgaccaccacccgc

SEQ ID NO: 7312 - DNA, 121 bp, synthetic construct
  misc_feature 1..121: note = Description of artificial sequence: synthetic polynucleotide sequence
  source 1..121: mol_type = other DNA
gatttcagaaagctgtgacaaacaaccacgatgcagtgtgtagtaaattgtcagagtacagtgtgtcacctaaagctctgaattgacttaggtcaacactgtcaaatcaccagaaaacaat

SEQ ID NO: 7313 - DNA, 121 bp, synthetic construct
  misc_feature 1..121: note = Description of artificial sequence: synthetic polynucleotide sequence
  source 1..121: mol_type = other DNA
ctaagagagagcatcttccgggtctcattgagattgtccacccactggcaataagctaatgtcctggaattgtgtggaaacaagttactactgtgcatcaggtacatatcagctccacagg

SEQ ID NO: 7314 - DNA, 121 bp, synthetic construct
  misc_feature 1..121: note = Description of artificial sequence: synthetic polynucleotide sequence
  source 1..121: mol_type = other DNA
gaggcacaaccaaatatcagaagtaagtactagctgcccatcatagaatcttctttcttttaaacattctgagcaaactgaccacagattctcagctattgctctctttacatgattcacg

SEQ ID NO: 7315 - DNA, 121 bp, synthetic construct
  misc_feature 1..121: note = Description of artificial sequence: synthetic polynucleotide sequence
  source 1..121: mol_type = other DNA
attgttaaggggctttcagactgtggcctgcagttttggtggggtctgtggaactctggacatcagctttattaaccactgtcttccaaatacttttgacttatgaatctctttcacagtc

SEQ ID NO: 7316 - DNA, 121 bp, synthetic construct
  misc_feature 1..121: note = Description of artificial sequence: synthetic polynucleotide sequence
  source 1..121: mol_type = other DNA
agaggaggcgttttgtagaatgaactaaattattggtgtagagagctgtcaacaaaaaattgggggcagtaaaagaaaatattgttaatttctctattttgctttgggctgattccataga

SEQ ID NO: 7317 - DNA, 121 bp, synthetic construct
  misc_feature 1..121: note = Description of artificial sequence: synthetic polynucleotide sequence
  source 1..121: mol_type = other DNA
ttgttcttttaacaaataaaacaaggcaaacacttaccatctggcatccttattctgttgatacatctcccaagtatagcataaaattaaaatatagcacaccaaaatcaagggtagaggg

SEQ ID NO: 7318 - DNA, 121 bp, synthetic construct
  misc_feature 1..121: note = Description of artificial sequence: synthetic polynucleotide sequence
  source 1..121: mol_type = other DNA
agttgttatcgtcaaataaagtgtatacctgtaaaatgagagagagaagagagagagagaaagaacaacaccattacattaattggattaggaattggcttttgcagtttccgaggcataa

SEQ ID NO: 7319 - DNA, 121 bp, synthetic construct
  misc_feature 1..121: note = Description of artificial sequence: synthetic polynucleotide sequence
  source 1..121: mol_type = other DNA
acttcctctccattcctatgaccaccgctatcaaatctgggccactgtaatcagatcagtttctctaatacctatctctaatgaagccatcctactcaagcctctgtactatttcctaatg

SEQ ID NO: 7320 - DNA, 121 bp, synthetic construct
  misc_feature 1..121: note = Description of artificial sequence: synthetic polynucleotide sequence
  source 1..121: mol_type = other DNA
ttacctgagggtatggggaagtcctggattttgactttgagctggagagccgggatttggccccctttctgttgtcagtcatggtgggggtggagctgctggtataggagaaggctggttt

SEQ ID NO: 7321 - DNA, 121 bp, synthetic construct
  misc_feature 1..121: note = Description of artificial sequence: synthetic polynucleotide sequence
  source 1..121: mol_type = other DNA
tcattccaagtgaaatcagcatagatgctgagtgtcactcggaggacagtccttgtgataggctgaatggatgcttccatcataacagaaggaatctgatgaacacattgtttgaccttca

SEQ ID NO: 7322 - DNA, 121 bp, synthetic construct
  misc_feature 1..121: note = Description of artificial sequence: synthetic polynucleotide sequence
  source 1..121: mol_type = other DNA
tttaccaaaaaaaaccctatcgccatgttctttttctgtcatctgcacaagagcagtaagatcatcttgactaaaatgagaaataattcgattagtagcattacaagctgcagtggcagat

SEQ ID NO: 7323 - DNA, 121 bp, synthetic construct
  misc_feature 1..121: note = Description of artificial sequence: synthetic polynucleotide sequence
  source 1..121: mol_type = other DNA
gggggcctgaggacagaaccgcttcacctggtgtcattcctgccagttcccaagtgcatggtctgggtgcctggggattgttctgccctgcattccactgatggcctgatggcacccacac

SEQ ID NO: 7324 - DNA, 121 bp, synthetic construct
  misc_feature 1..121: note = Description of artificial sequence: synthetic polynucleotide sequence
  source 1..121: mol_type = other DNA
ggaaagagatatcatttcagtttgatatctggcttgactgcatttgcctgaggaacagatagttgactgattgatagatcgattgatagataaagtgcccaagctaattgtcattgcattg

SEQ ID NO: 7325 - DNA, 121 bp, synthetic construct
  misc_feature 1..121: note = Description of artificial sequence: synthetic polynucleotide sequence
  source 1..121: mol_type = other DNA
ttcttctatttataatgagcagcggcatcagctttcggaattagcagttgataatcatgtctagatgatgaaaaacaatgagtaaatgttgtagataacagttggggcttagatattttat

SEQ ID NO: 7326 - DNA, 121 bp, synthetic construct
  misc_feature 1..121: note = Description of artificial sequence: synthetic polynucleotide sequence
  source 1..121: mol_type = other DNA
catttgatcttgagacatttgtttaagctatgtctacacaaagtcactgtaaacattttggtcagtgacctgctttgtttgacagtgtcacaccactgtatttttttctggtctactttca

SEQ ID NO: 7327 - DNA, 121 bp, synthetic construct
  misc_feature 1..121: note = Description of artificial sequence: synthetic polynucleotide sequence
  source 1..121: mol_type = other DNA
aaggaacaaaatgctgctaagtagcaaaaagtcctcattttaaatttagtagaatagtttacagctcaaggtctagattcagagatattttggctcaaattctcactctgccctttacttt

SEQ ID NO: 7328 - DNA, 121 bp, synthetic construct
  misc_feature 1..121: note = Description of artificial sequence: synthetic polynucleotide sequence
  source 1..121: mol_type = other DNA
tgaaggcaatgtatttctctgcagaaataaactcttgacattaatgatattgactctttcatccagtttcaaaactctattttgtcaagaaagttataattattgatactacttgacagca

SEQ ID NO: 7329 - DNA, 121 bp, synthetic construct
  misc_feature 1..121: note = Description of artificial sequence: synthetic polynucleotide sequence
  source 1..121: mol_type = other DNA
tagataccatgagttcagaatttttgaaaagtttttattgtagtacattgaaagaaacacgaataaacaggaatataccattcaatatagtaataatgtcaaatatcattttgagcaccta

SEQ ID NO: 7330 - DNA, 121 bp, synthetic construct
  misc_feature 1..121: note = Description of artificial sequence: synthetic polynucleotide sequence
  source 1..121: mol_type = other DNA
ccgaagaaactaacctaatattgaggtaatcttttctcatggccatggccaagaaggctaaatctgttataatttatacatgtaacactgaaggaactggaataaatgaataaatgttcta

SEQ ID NO: 7331 - DNA, 121 bp, synthetic construct
  misc_feature 1..121: note = Description of artificial sequence: synthetic polynucleotide sequence
  source 1..121: mol_type = other DNA
gatgaatttccttatctcttggatctctcaaatttagtttgaaattctctactaggtgataaattgacatattttttatttttattattaatttttgaaacaagctcttcctctgttgctc

SEQ ID NO: 7332 - DNA, 121 bp, synthetic construct
  misc_feature 1..121: note = Description of artificial sequence: synthetic polynucleotide sequence
  source 1..121: mol_type = other DNA
accaacagattacacagacagcatgcagaatggaagaaaatattttcaaactatgtatttgacaaaggtctactattcagaatatctgaggaacttaaacaattcaagaagcaacaacaac

SEQ ID NO: 7333 - DNA, 121 bp, synthetic construct
  misc_feature 1..121: note = Description of artificial sequence: synthetic polynucleotide sequence
  source 1..121: mol_type = other DNA
atttattgcagatagggaaaaaaaaaataaagcattaactctctacctctgtggaaggagcaagaaaagtacagagctcagaacattagccagggggaaaaatattaagaaggccataatc

SEQ ID NO: 7334 - DNA, 121 bp, synthetic construct
  misc_feature 1..121: note = Description of artificial sequence: synthetic polynucleotide sequence
  source 1..121: mol_type = other DNA
gttaatatgagacaactttttttgcttatttgtaacttctttctctaacagcaaaaacccggatctagtatctaaatttttttcaaatatttgtttaacctagtttacatgtaaagtggtt

SEQ ID NO: 7335 - DNA, 121 bp, synthetic construct
  misc_feature 1..121: note = Description of artificial sequence: synthetic polynucleotide sequence
  source 1..121: mol_type = other DNA
ctattttgtctttgatgagaagacatgtgtctcatgacatttgacttgctttactaaaccaagactcaaaattttttgttttaaactttcaataattgaattctcattgttagaatattaa

SEQ ID NO: 7336 - DNA, 121 bp, synthetic construct
  misc_feature 1..121: note = Description of artificial sequence: synthetic polynucleotide sequence
  source 1..121: mol_type = other DNA
atcaaatgccttcttcacatggtggcaggagagagagcaaatggggaaatactacacatttgtaaataaccagatctcatgagaactccatcataagacaccaaaggcgaagtccaccccc

SEQ ID NO: 7337 - DNA, 121 bp, synthetic construct
  misc_feature 1..121: note = Description of artificial sequence: synthetic polynucleotide sequence
  source 1..121: mol_type = other DNA
tccaagaccgctctggcccaccacgaaccccatcctgtgcccacataaatctaagactttagcaggcacacacacagtggctgatcgtcaagaggaacaaagtggtagaaaatggcagaga

SEQ ID NO: 7338 - DNA, 121 bp, synthetic construct
  misc_feature 1..121: note = Description of artificial sequence: synthetic polynucleotide sequence
  source 1..121: mol_type = other DNA
gccagtattcttagatcaattataacagactttaaaccagtaaaaattaagaaggacaactaagggtgttacataatgataaagggtaaaaatccaacaagaagctttaactaatatgtgt

SEQ ID NO: 7339 - DNA, 121 bp, synthetic construct
  misc_feature 1..121: note = Description of artificial sequence: synthetic polynucleotide sequence
  source 1..121: mol_type = other DNA
tacacatacagacttttaaatttgtaatatatttaaatttttaattattaccatattccatccttagtcaaatccttaataactttaatgtgaagtacaaagatatttcctctgtatttca

SEQ ID NO: 7340 - DNA, 121 bp, synthetic construct
  misc_feature 1..121: note = Description of artificial sequence: synthetic polynucleotide sequence
  source 1..121: mol_type = other DNA
ttagctttttgatagctgctgtcctgattggaattaatgtggaaataggagggaccatactttattcttttattacagccactatattttgttaaaatacttcttagtacattatcttgga

SEQ ID NO: 7341 - DNA, 121 bp, synthetic construct
  misc_feature 1..121: note = Description of artificial sequence: synthetic polynucleotide sequence
  source 1..121: mol_type = other DNA
caaaccactatggcacacatttgcctatgtaacaaacctgcacattctgcacatgtcttaataatgtttatattgattacatgcagcaatgaaatcttagatatattgggttttgtaaaaa

SEQ ID NO: 7342 - DNA, 121 bp, synthetic construct
  misc_feature 1..121: note = Description of artificial sequence: synthetic polynucleotide sequence
  source 1..121: mol_type = other DNA
gtcatatatgctgagcaggaataaagcttcttcatttacaagctactatcacaaatacaataccatgttttctcggaggtcttcattctgtgtcatttgaataatagtctgaaaaagcctc

SEQ ID NO: 7343 - DNA, 121 bp, synthetic construct
  misc_feature 1..121: note = Description of artificial sequence: synthetic polynucleotide sequence
  source 1..121: mol_type = other DNA
gacttgagtttatgttaggggatttgcagagggttaaggaagcagggatttgctctggactggatgccatcagaaagcaggagtcattctgtggttgggtatcttaacaattcttatctag

SEQ ID NO: 7344 - DNA, 121 bp, synthetic construct
  misc_feature 1..121: note = Description of artificial sequence: synthetic polynucleotide sequence
  source 1..121: mol_type = other DNA
ttgaggttttctgtcgctgtcaggaggaagcacgaaaactgtttatggaatccagtcgacgttcaggcaccgcgcgatgaacgcaaacatgtctgagacttcctctatcactttggctgtg

SEQ ID NO: 7345 - DNA, 121 bp, synthetic construct
  misc_feature 1..121: note = Description of artificial sequence: synthetic polynucleotide sequence
  source 1..121: mol_type = other DNA
tacctatataaaccccaaaccccaggctccacaagcagaagagcaaaggagcaaaacagtggcagagtggcacagcagagaaggaaagaacagaaagagcgtctgaatgtcgagaggagtt

SEQ ID NO: 7346 - DNA, 121 bp, synthetic construct
  misc_feature 1..121: note = Description of artificial sequence: synthetic polynucleotide sequence
  source 1..121: mol_type = other DNA
tgattgttcactttctttgaagagagaaatggccagtcatgtgattatataccatttcagggactctggccaatggtttagctggatgttcagggccttggaaggaacatgattggaaagt

SEQ ID NO: 7347 - DNA, 121 bp, synthetic construct
  misc_feature 1..121: note = Description of artificial sequence: synthetic polynucleotide sequence
  source 1..121: mol_type = other DNA
ataatctcctcttagtattagttgatatacagaatgttcctgagctgctgggtatagttcagggttatgcagaaaacaagggttttggctgggcacggtggctcacacctgtaatcccaac

SEQ ID NO: 7348 - DNA, 121 bp, synthetic construct
  misc_feature 1..121: note = Description of artificial sequence: synthetic polynucleotide sequence
  source 1..121: mol_type = other DNA
agaatgtggactgggtagagatgaacgagacttttctcagatgttggatatttgcttggaaaaacgtgtgggtacgaccttggtaaggaacttgaattttttttttttaattctgaaattg

SEQ ID NO: 7349 - DNA, 121 bp, synthetic construct
  misc_feature 1..121: note = Description of artificial sequence: synthetic polynucleotide sequence
  source 1..121: mol_type = other DNA
ggctgcccccaagtgtaactccagcactgtgaggtttcagggattggcagaggggaccaaggggaccatgaaaatggacatggaggatgcggatatgactctgtggacagaggctgagttt

SEQ ID NO: 7350 - DNA, 121 bp, synthetic construct
  misc_feature 1..121: note = Description of artificial sequence: synthetic polynucleotide sequence
  source 1..121: mol_type = other DNA
gtgtacatacattgtgaacgaccacccctgggattctggtgctgatggcggtacttcggttcaggcggaggcatccttaccaaggaatctgcttttcaagtatgccaccaacagtgaagag

SEQ ID NO: 7351 - DNA, 121 bp, synthetic construct
  misc_feature 1..121: note = Description of artificial sequence: synthetic polynucleotide sequence
  source 1..121: mol_type = other DNA
ggttattggagtgatgagtaaagaatacataccaaagggcacacgttttggacccctaataggtgaaatctacaccaatgacacagttcctaagaacgccaacaggaaatatttttggagg

SEQ ID NO: 7352 - DNA, 121 bp, synthetic construct
  misc_feature 1..121: note = Description of artificial sequence: synthetic polynucleotide sequence
  source 1..121: mol_type = other DNA
atttgtgtttcatttttctgttattttcccgaacatgaaaagacgataaaactgaaatggaaaaggtaactgacaaaagtgtgccttacctgtttccgccctgatttctgctgattcaaga

SEQ ID NO: 7353 - DNA, 254 bp, synthetic construct
  misc_feature 1..254: note = Description of artificial sequence: synthetic polynucleotide sequence
  source 1..254: mol_type = other DNA
gatctattccagaggggagcttcaccacttcattgacggctttaatgaagagaaaagcaactggatgcgctatgtgaatccagcacactctccccgggagcaaaacctggctgcgtgtcagaacgggatgaacatctacttctacaccattaagcccatccctgccaaccaggaacttcttgtgtggtattgtcgggactttgcagaaaggcttcactacccttatcccggagagctgacaatgatgaatctca

SEQ ID NO: 7354 - DNA, 330 bp, synthetic construct
  misc_feature 1..330: note = Description of artificial sequence: synthetic polynucleotide sequence
  source 1..330: mol_type = other DNA
gcacaaacacagagcagtctaaagcaaccgagcactgagaaaaatgaactctgcccaaagaatgtcccaaagagagagtacagcgtgaaagaaatcctaaaattggactccaacccctccaaaggaaaggacctctaccgttctaacatttcacccctcacatcagaaaaggacctcgatgactttagaagacgtgggagccccgaaatgcccttctaccctcgggtcgtttaccccatccgggcccctctgccagaagactttttgaaagcttccctggcctacgggatcgagagacccacgtacatcactcgctcccccattccatcc

SEQ ID NO: 7355 - DNA, 439 bp, synthetic construct
  misc_feature 1..439: note = Description of artificial sequence: synthetic polynucleotide sequence
  source 1..439: mol_type = other DNA
tccaccactccaagcccctctgcaagaagcagccccgaccaaagcctcaagagctccagccctcacagcagccctgggaatacggtgtcccctgtgggccccggctctcaagagcaccgggactcctacgcttacttgaacgcgtcctacggcacggaaggtttgggctcctaccctggctacgcacccctgccccacctcccgccagctttcatcccctcgtacaacgctcactaccccaagttcctcttgcccccctacggcatgaattgtaatggcctgagcgctgtgagcagcatgaatggcatcaacaactttggcctcttcccgaggctgtgccctgtctacagcaatctcctcggtgggggcagcctgccccaccccatgctcaaccccacttctctcccgagctcgctgccctcagatggagcccggaggt

SEQ ID NO: 7356 - DNA, 341 bp, synthetic construct
  misc_feature 1..341: note = Description of artificial sequence: synthetic polynucleotide sequence
  source 1..341: mol_type = other DNA
tgctccagccggagcatcccagggaggtgcttgtcccggcgccccacagtgccttctcctttaccggggccgccgccagcatgaaggacaaggcctgtagccccacaagcgggtctcccacggcgggaacagccgccacggcagaacatgtggtgcagcccaaagctacctcagcagcgatggcagcccccagcagcgacgaagccatgaatctcattaaaaacaaaagaaacatgaccggctacaagacccttccctacccgctgaagaagcagaacggcaagatcaagtacgaatgcaacgtttgcgccaagactttcggccagctctccaatctgaag

SEQ ID NO: 7357 - DNA, 121 bp, synthetic construct
  misc_feature 1..121: note = Description of artificial sequence: synthetic polynucleotide sequence
  source 1..121: mol_type = other DNA
acctgagagtgcacagtggagaacggcctttcaaatgtcagacttgcaacaagggctttactcagctcgcccacctgcagaaacactacctggtacacacgggagaaaagccacatgaatg

SEQ ID NO: 7358 - DNA, 228 bp, synthetic construct
  misc_feature 1..228: note = Description of artificial sequence: synthetic polynucleotide sequence
  source 1..228: mol_type = other DNA
ggtctgccacaagagatttagcagcaccagcaatctcaagacccacctgcgactccattctggagagaaaccataccaatgcaaggtgtgccctgccaagttcacccagtttgtgcacctgaaactgcacaagcgtctgcacacccgggagcggccccacaagtgctcccagtgccacaagaactacatccatctctgtagcctcaaggttcacctgaaagggaactg

SEQ ID NO: 7359 - DNA, 349 bp, synthetic construct
  misc_feature 1..349: note = Description of artificial sequence: synthetic polynucleotide sequence
  source 1..349: mol_type = other DNA
cgctgcggccccggcgcctgggctgcccttggaagatctgacccgaatcaatgaagaaatcgagaagtttgacatcagtgacaatgctgaccggctcgaggacgtggaggatgacatcagtgtgatctctgtagtggagaaggaaattctggccgtggtcagaaaagagaaagaagaaactggcctgaaagtgtctttgcaaagaaacatggggaatggactcctctcctcagggtgcagcctttatgagtcatcagatctacccctcatgaagttgcctcccagcaacccactacctctggtacctgtaaaggtcaaacaagaaacagttgaaccaatggatccttaa

SEQ ID NO: 7360 - DNA, 121 bp, synthetic construct
  misc_feature 1..121: note = Description of artificial sequence: synthetic polynucleotide sequence
  source 1..121: mol_type = other DNA
agaacatgtgacaatattatttcatcttttatgctatttacacaaatttatttgatagtaggcaaatgcaaaagttctatttatataaaaagaagactgaaggaattagatcacatagaaa

SEQ ID NO: 7361 - DNA, 121 bp, synthetic construct
  misc_feature 1..121: note = Description of artificial sequence: synthetic polynucleotide sequence
  source 1..121: mol_type = other DNA
ctccttatttgaaaacaaacggacaaacagtagcccaagacacactgacattcgaggccaaaggaatactcctgcctctagtaaaacgtttgttgggagggcaaagctgaatttagccaaa

SEQ ID NO: 7362 - DNA, 121 bp, synthetic construct
  misc_feature 1..121: note = Description of artificial sequence: synthetic polynucleotide sequence
  source 1..121: mol_type = other DNA
ggattgccagcagtgagtatccctgttgcactctcaaaccaagggttgccaataggactgcagtttattggacgtgcgttttgtgaccagcagcttcttacagtagccaaatggtttgaaa

SEQ ID NO: 7363 - DNA, 121 bp, synthetic construct
  misc_feature 1..121: note = Description of artificial sequence: synthetic polynucleotide sequence
  source 1..121: mol_type = other DNA
tggccgctgggctggctgtcctccatttcccgctgggcccagaagcggctgaagaagtcgttcagctggggcaggcactcggcctgccacacagccgtgtccttcaccgaggggtagtaga

SEQ ID NO: 7364 - DNA, 121 bp, synthetic construct
  misc_feature 1..121: note = Description of artificial sequence: synthetic polynucleotide sequence
  source 1..121: mol_type = other DNA
ggtttctggtttgatactcagagaaatgtcaatttcacctgatggcatttaaccttcctgtgccaaaaagctactacattccattgtcttgtggcttcaaaatgggcaaagttccaggttt

SEQ ID NO: 7365 - DNA, 121 bp, synthetic construct
  misc_feature 1..121: note = Description of artificial sequence: synthetic polynucleotide sequence
  source 1..121: mol_type = other DNA
atctctggaaaactaacattccagctaatcataaggtgacattcctgataactgggaacgatgccaaggaataaaatcactttattattactatttgataacttttgtagtaagaaaatga

SEQ ID NO: 7366 - DNA, 121 bp, synthetic construct
  misc_feature 1..121: note = Description of artificial sequence: synthetic polynucleotide sequence
  source 1..121: mol_type = other DNA
tctgctggtgggcgcagtcgatgcaggcttggacggcctgctgcagcaccgccgatggccgctcgggcccaaaatgctccgggagctgctgcaccttcttcctctccagatagggccccgc

SEQ ID NO: 7367 - DNA, 121 bp, synthetic construct
  misc_feature 1..121: note = Description of artificial sequence: synthetic polynucleotide sequence
  source 1..121: mol_type = other DNA
caaaaattttgtctaatacatcataatgtatcttatttaaatgcactcaccagaattgagtttttctggtcaactatccaagctggcagggcaattccaaagcttgtggctgaaatagaaa

SEQ ID NO: 7368 - DNA, 121 bp, synthetic construct
  misc_feature 1..121: note = Description of artificial sequence: synthetic polynucleotide sequence
  source 1..121: mol_type = other DNA
atttgccagtgttctctttgttgacctggtatttctcatctcaagcctaagtcatgtactctgcatgtcttgccctctttccagccccactcatgttttgcacttacatgagagagacaca

SEQ ID NO: 7369 - DNA, 121 bp, synthetic construct
  misc_feature 1..121: note = Description of artificial sequence: synthetic polynucleotide sequence
  source 1..121: mol_type = other DNA
tgggatccttttttttctattgtattttccaactggttatctatggtatgctgaaagattaagatagtaaaatgtgtttctctgtttccagtatccttctttttggcttaagagaaggcat

SEQ ID NO: 7370 - DNA, 121 bp, synthetic construct
  misc_feature 1..121: note = Description of artificial sequence: synthetic polynucleotide sequence
  source 1..121: mol_type = other DNA
aaaacagacttttattttgtgagatttttcttaccttcaacttgtgaaatgtaaagagtaacacatttacccattttcttctatttcaggtgcgtataatttgctctgcgtcgactcctat

SEQ ID NO: 7371 - DNA, 121 bp, synthetic construct
  misc_feature 1..121: note = Description of artificial sequence: synthetic polynucleotide sequence
  source 1..121: mol_type = other DNA
cctatccctgcttctccagctcaggctcttcttgtcttggtgtgtcactgtgagcatcgtgtttctgagctcagctctgagtgtctgccctaatcctcgcccctcataaaagcataccgat

SEQ ID NO: 7372 - DNA, 121 bp, synthetic construct
  misc_feature 1..121: note = Description of artificial sequence: synthetic polynucleotide sequence
  source 1..121: mol_type = other DNA
attccaatgtagtgacgataatgtaggggtaacggcccatccatttgcagtagatagtgctgagtttttaagaaactttctaaatattgtgggtggaaaaccatcactaacgtaatgttat

SEQ ID NO: 7373 - DNA, 121 bp, synthetic construct
  misc_feature 1..121: note = Description of artificial sequence: synthetic polynucleotide sequence
  source 1..121: mol_type = other DNA
atagtctatgccctgaatggggctcaccatgtagtgaggaaatcctgacacaacgtggcaagtacagtgatgaaggtgccaccacaggggcccacactggagggggaagaaggaatgttca

SEQ ID NO: 7374 - DNA, 121 bp, synthetic construct
  misc_feature 1..121: note = Description of artificial sequence: synthetic polynucleotide sequence
  source 1..121: mol_type = other DNA
atatacatacacgccttcagtctttaccggactctcagggcctctatcgctgccttccgctttgtggtctgtctggggcaggtgctggaggcagtagaaatgtcctggaaagggtagagag

SEQ ID NO: 7375 - DNA, 121 bp, synthetic construct
  misc_feature 1..121: note = Description of artificial sequence: synthetic polynucleotide sequence
  source 1..121: mol_type = other DNA
ttacttctttgccatctgtatcttggtgcaataagtttataagatgcaagagtacgaaatagctcatcctgtgaattgcaaatactacattaaaaatatgggcataaattttgctgaaatt

SEQ ID NO: 7376 - DNA, 121 bp, synthetic construct
  misc_feature 1..121: note = Description of artificial sequence: synthetic polynucleotide sequence
  source 1..121: mol_type = other DNA
ctgctctagtagattgctagcctttaaccaggtttttggtagcacagaatcctttagaacatgatgaaagccatagatttttgcatcagaaaaattcacatatacataaagttttatgtat

SEQ ID NO: 7377 - DNA, 121 bp, synthetic construct
  misc_feature 1..121: note = Description of artificial sequence: synthetic polynucleotide sequence
  source 1..121: mol_type = other DNA
ccttatattttctttaatgcagccctctctttattcatcttttatagaacacccatctcggctttctcgcaagataacatctatgaagttcagcccccaagagtagacagaaaatctacag

SEQ ID NO: 7378 - DNA, 121 bp, synthetic construct
  misc_feature 1..121: note = Description of artificial sequence: synthetic polynucleotide sequence
  source 1..121: mol_type = other DNA
tgagatagtggggaaggaacatattttgtgttaatatccatgccagcatgaaaggaaagagtgtcctggttgagtgaggcctgagtcacgcagggtgggctctgtccccaccatgggcctg

SEQ ID NO: 7379 - DNA, 121 bp, synthetic construct
  misc_feature 1..121: note = Description of artificial sequence: synthetic polynucleotide sequence
  source 1..121: mol_type = other DNA
gagtgactatttttagtgacagtaagtgaaagtgaaactcttgattctacagcttcttacatctgcaatagctgtcatcaaatgagtttctttcattccccactctccagcctccagcttt

SEQ ID NO: 7380 - DNA, 121 bp, synthetic construct
  misc_feature 1..121: note = Description of artificial sequence: synthetic polynucleotide sequence
  source 1..121: mol_type = other DNA
ggaaactctttcttactgccagtgtattcatagcccaaactcgatgtgttctccctcttattcctgctacaccttgagagctcccagatctcaccattctgcaactgcaccgtaacataat

SEQ ID NO: 7381 - DNA, 121 bp, synthetic construct
  misc_feature 1..121: note = Description of artificial sequence: synthetic polynucleotide sequence
  source 1..121: mol_type = other DNA
tttcaggagtagttactggcctggacaacagagataaggttttcttttctctaacaagaaccaataaaaagcaaccattataaaaagttcaatgtaaaacaaatacatgtatgtagaaggc

SEQ ID NO: 7382 - DNA, 121 bp, synthetic construct
  misc_feature 1..121: note = Description of artificial sequence: synthetic polynucleotide sequence
  source 1..121: mol_type = other DNA
cttcatctttgttttatttgatggcataagaagtataataatgttgttcatttctgttccagctgatacagaaggcaataataaaacagtgctaaaatataaatgccatacaatgaagaag

SEQ ID NO: 7383 - DNA, 210 bp, synthetic construct
  misc_feature 1..210: note = Description of artificial sequence: synthetic polynucleotide sequence
  source 1..210: mol_type = other DNA
cttacaggttttcaccaggttggtactggggctctgtcgcggtaaagtagtcttccaggaagctctgcaagtactcaaaagtggggcgttcttcagggtcctttttccagcagtggatcatgagctcatgcagagagatggggcagtcctgcgggcagggcatcctgtagcctcgctccacctgctccagcacctcccggttgttcatgc

SEQ ID NO: 7384 - DNA, 133 bp, synthetic construct
  misc_feature 1..133: note = Description of artificial sequence: synthetic polynucleotide sequence
  source 1..133: mol_type = other DNA
cctgggtatggcactcttcctttggtgaccagctctgtgagtaagattccaaaagaccacacgtcagacttgattgtgaacctcccgtacagggctgcctcgggggccgtccacttgatggggaactttgcac

SEQ ID NO: 7385 - DNA, 155 bp, synthetic construct
  misc_feature 1..155: note = Description of artificial sequence: synthetic polynucleotide sequence
  source 1..155: mol_type = other DNA
ccttgtcttgctgtgtactcattgtcttctatcaatcgggccaatccgaagtcagcaatcttgcatatgagtccattccccactagaatgtttgctgatcgcagatctctatggatataattcatgcgctcgatgtaagccattcctgcagccac

SEQ ID NO: 7386 - DNA, 121 bp, synthetic construct
  misc_feature 1..121: note = Description of artificial sequence: synthetic polynucleotide sequence
  source 1..121: mol_type = other DNA
caagttaccctgcagggcctacctgtgctgccatgtccacaagatttggtaatttcagagctcttccttctccatcttttaagaaatccagtaaacttcctatgaacaaaacataaaatca

SEQ ID NO: 7387 - DNA, 181 bp, synthetic construct
  misc_feature 1..181: note = Description of artificial sequence: synthetic polynucleotide sequence
  source 1..181: mol_type = other DNA
cctttgttcatatactcggtgacgatgtagatgggctcctcagacaccactgcatagagctggaccagcttgtcgtgcttcagcttcttcatgatctgcgcttcctcaaggaatgattcgggggacattgtgcctggtttaagagtctttatggctacttttgtgtttccattccaggtac

SEQ ID NO: 7388 - DNA, 157 bp, synthetic construct
  misc_feature 1..157: note = Description of artificial sequence: synthetic polynucleotide sequence
  source 1..157: mol_type = other DNA
ccaagccacacttcagcgaaacacccctgacccagcttcttctccagacacaacgaacgacgtgcaacttcccaagcatctttagccaatccagaagtttgtggggtacaactcgatgcaatcacagttaagttaaaacacaaaccatcagctttct

SEQ ID NO: 7389 - DNA, 166 bp, synthetic construct
  misc_feature 1..166: note = Description of artificial sequence: synthetic polynucleotide sequence
  source 1..166: mol_type = other DNA
cccatccatacttccccaaactgcccatttcccagtctcttgatcaactgcagggattctcgagggatttcccagacatctttggttttgacagacagatcggtaagccttggcatccctttgtgacagggaactactaggcggcagcagagacctgcagctctct

SEQ ID NO: 7390 - DNA, 151 bp, synthetic construct
  misc_feature 1..151: note = Description of artificial sequence: synthetic polynucleotide sequence
  source 1..151: mol_type = other DNA
cctgagtaatgttgtacaagctgctgaagtgtttcaaactgggcccgggtggtaatgtagtatccaccattgtcaagtttgcgaattttataatgtttgacatggtctcctttcatatcatcccaatcacggatagaaagtgaataggcac

SEQ ID NO: 7391 - DNA, 121 bp, synthetic construct
  misc_feature 1..121: note = Description of artificial sequence: synthetic polynucleotide sequence
  source 1..121: mol_type = other DNA
ttatcttacctttggtggtttcactctcgcggataagaaaggtacctcttgggtttccaaaggacaatagctgtcgctcagcatcttttcggccaagttttccaaagtaccacctttaaat

SEQ ID NO: 7392 - DNA, 121 bp, synthetic construct
  misc_feature 1..121: note = Description of artificial sequence: synthetic polynucleotide sequence
  source 1..121: mol_type = other DNA
atgaaacatactcttctgcctggatagagtcaactggagccacataattgctgggaatgtaacctgtctctccagttgtcaaggagcgggcttcccaccaatctccttccctgtaaataaa

SEQ ID NO: 7393 - DNA, 121 bp, synthetic construct
  misc_feature 1..121: note = Description of artificial sequence: synthetic polynucleotide sequence
  source 1..121: mol_type = other DNA
ctccaaacttacgagctgttcaatatttgaaatttttctcctttgtgaaaactcaggtcatcttctgtccgtgcttcatagtcataaagggccacaaagagtgtcactcctgccgaaacga

SEQ ID NO: 7394 - DNA, 121 bp, synthetic construct
  misc_feature 1..121: note = Description of artificial sequence: synthetic polynucleotide sequence
  source 1..121: mol_type = other DNA
cctgttcctcctctcgtacgcaaggtccccgtatgagacgaagagttcacacctccaaagacggtgagtccttggcccccggctgcgtggaagttgttgtagttggggatggaggtcacac

SEQ ID NO: 7395 - DNA, 121 bp, synthetic construct
  misc_feature 1..121: note = Description of artificial sequence: synthetic polynucleotide sequence
  source 1..121: mol_type = other DNA
tggggtagtgctgaggggtggggtctgtgccatagcggtacccagagctctggttcaggctgccgtccctctcctccgtcagttttgttgcttctttatccttacattgcacacagcccat

SEQ ID NO: 7396 - DNA, 121 bp, synthetic construct
  misc_feature 1..121: note = Description of artificial sequence: synthetic polynucleotide sequence
  source 1..121: mol_type = other DNA
ggacctctaaccttttctaatctttcagaatcctccctatactatttatttctgagactactttttcctggcttttttcccagtgaccccatactctgtggctgtgccatggtaaaaaagg

SEQ ID NO: 7397 - DNA, 121 bp, synthetic construct
  misc_feature 1..121: note = Description of artificial sequence: synthetic polynucleotide sequence
  source 1..121: mol_type = other DNA
taatttatcctcacgtctattcccagactgatttcctaaagcagaaacctggtttatcttacaatattttctactagtatttaggataaattaaaacccttactgtagtccccaaagcctt

SEQ ID NO: 7398 - DNA, 121 bp, synthetic construct
  misc_feature 1..121: note = Description of artificial sequence: synthetic polynucleotide sequence
  source 1..121: mol_type = other DNA
agggggttagagaaaacctcacatagatgaattcaaactaagcttgcacaaagggggtcatattaggtgaaagacaccatagagacctgagaggtgtctatggaagaatagaggacaagac

SEQ ID NO: 7399 - DNA, 121 bp, synthetic construct
  misc_feature 1..121: note = Description of artificial sequence: synthetic polynucleotide sequence
  source 1..121: mol_type = other DNA
ttgaggttgattatggaatgaaattaaagggtgggaaggaaaggttttcacatatgatcagagaacagagataccactgtgtggtcaccaacaaactttgtccccttcttcctctccctct

SEQ ID NO: 7400 - DNA, 121 bp, synthetic construct
  misc_feature 1..121: note = Description of artificial sequence: synthetic polynucleotide sequence
  source 1..121: mol_type = other DNA
tgccttcagtctttttattcctttacaactgggtcaggtttagctcagtgtgattgcatctagtgtcatagcagataccatgttttctctgatagtgttttctgaagtaagatgtatcccc

SEQ ID NO: 7401 - DNA, 121 bp, synthetic construct
  misc_feature 1..121: note = Description of artificial sequence: synthetic polynucleotide sequence
  source 1..121: mol_type = other DNA
aagtttctttatggttctccgagtcactctgcacaccacttgtactctgtctgggtttggagttggacacggtgagagctggcatggtagagaacaaggacatatgtgcatgcacacggga

SEQ ID NO: 7402 - DNA, 121 bp, synthetic construct
  misc_feature 1..121: note = Description of artificial sequence: synthetic polynucleotide sequence
  source 1..121: mol_type = other DNA
gtgcctttttttctgctccacagccctaactcctgttaccctcaggctctagaaggaacgcagtgattagagactaatatgggttcccagcacagagcagctgccttacagaaaagtggcc

SEQ ID NO: 7403 - DNA, 121 bp, synthetic construct
  misc_feature 1..121: note = Description of artificial sequence: synthetic polynucleotide sequence
  source 1..121: mol_type = other DNA
taattcttcatgagtcttgtgattttgcatggtatatgagcaatggaagaagcagctacctttcccagtttttacacacttgctttgctgaggaaagaccttcaccaatcaacctagctaa

SEQ ID NO: 7404 - DNA, 121 bp, synthetic construct
  misc_feature 1..121: note = Description of artificial sequence: synthetic polynucleotide sequence
  source 1..121: mol_type = other DNA
taagaccctcaaacagtaatagaggtgaaaaatgtctttaatgagctcatcagcagactttacatagctgaggaaagatcattgaactcaaagacaggtcaatagaaattattcaaaataa

SEQ ID NO: 7405 - DNA, 121 bp, synthetic construct
  misc_feature 1..121: note = Description of artificial sequence: synthetic polynucleotide sequence
  source 1..121: mol_type = other DNA
tcttcatggatgcactttaaagagtctcacccaactaagatgattccaggtactccaaagctacatcatagcagaaacggtattgctcctgaaagatgtcaaaacacaaagagtgagaaaa

SEQ ID NO: 7406 - DNA, 137 bp, synthetic construct
  misc_feature 1..137: note = Description of artificial sequence: synthetic polynucleotide sequence
  source 1..137: mol_type = other DNA
ccggggcttccaccatgtttggcttgctgttcctcagtgtctttactgcatggaaaacatcgacaacattttgccgtttcaccatttcaacaacgatgcctatagcacagaacatgccacttcgcccgccaccattt

SEQ ID NO: 7407 - DNA, 165 bp, synthetic construct
  misc_feature 1..165: note = Description of artificial sequence: synthetic polynucleotide sequence
  source 1..165: mol_type = other DNA
caggcagtggataatcgtccggccttccccttcctcgcattcctcctgccacttttccacctgaagtatcagtttcaagaatgaccttttggatccaggcacttctcgatgagaagcccatcctaggtactgaaactgttgcaccatcagataaccttcctgtgg

SEQ ID NO: 7408 - DNA, 121 bp, synthetic construct
  misc_feature 1..121: note = Description of artificial sequence: synthetic polynucleotide sequence
  source 1..121: mol_type = other DNA
ttgttagattgcatatcctaaaaatccggttgatcacatcacagtccattgaacaagacatacattccacttggatggggccatatcgtagcatcccttcctctggccagtactgagggca

SEQ ID NO: 7409 - DNA, 133 bp, synthetic construct
  misc_feature 1..133: note = Description of artificial sequence: synthetic polynucleotide sequence
  source 1..133: mol_type = other DNA
cctgggacaagtcgacttcgtttaacatcacaatggaggtacagccataatcatacactaatctccagaagtcttttacagtgtttggcagagggtattgtgtgacgatgaaagcagctggttgcctgtagct

SEQ ID NO: 7410 - DNA, 175 bp, synthetic construct
  misc_feature 1..175: note = Description of artificial sequence: synthetic polynucleotide sequence
  source 1..175: mol_type = other DNA
cgtccataagagcagcattgatgtagttactgctctccccatcaattgtaattaaaaaaggcagacatctgtcaggtggcagcatgtccatgaaacggttcttgtcatggttccttggcaggcacgctatactgcagtcttcagcttgtagtcgaggggtgactgaattcagagt

SEQ ID NO: 7411 - DNA, 151 bp, synthetic construct
  misc_feature 1..151: note = Description of artificial sequence: synthetic polynucleotide sequence
  source 1..151: mol_type = other DNA
cctgaaattcatccttgagatgtgaagagttagtctgggagtctattctaatcatatcaaaatatgcagctttaaattcacagacaggtatggcagtttctccacataagcaggcttctaaaatggcatcatgaataaaaatgtactgttc

SEQ ID NO: 7412 - DNA, 137 bp, synthetic construct
  misc_feature 1..137: note = Description of artificial sequence: synthetic polynucleotide sequence
  source 1..137: mol_type = other DNA
cctctgtctggaccatattaatacgccgagatcttaaggctttgacacaattgtaaatatcaacaacaccctctctttcagccatgtctagcatgatgtcaatcacaatgtagcagccagttcgtccagcaccagca

SEQ ID NO: 7413 - DNA, 156 bp, synthetic construct
  misc_feature 1..156: note = Description of artificial sequence: synthetic polynucleotide sequence
  source 1..156: mol_type = other DNA
cctgcaatgtacaacgatggggccagcactgggagggtttgataacttgactcgccggataaaggaaagcagccctgtagcatggtagggcactccatggtcaggccagcccgtgaaatggaactgtttaacttcacggatttcattgtaccccct

SEQ ID NO: 7414 - DNA, 121 bp, synthetic construct
  misc_feature 1..121: note = Description of artificial sequence: synthetic polynucleotide sequence
  source 1..121: mol_type = other DNA
accctttccagggtgaatgtcctaactacatattcagcaagtggttccatttctacacacgttactttgaagtcaccataaacttcagtatcatcaggccaatatttatagcatttaacct

SEQ ID NO: 7415 - DNA, 121 bp, synthetic construct
  misc_feature 1..121: note = Description of artificial sequence: synthetic polynucleotide sequence
  source 1..121: mol_type = other DNA
tcttcctcttacccggccaacctcaactaaatttgtaaccatcacaatgcaagcagattgttcttgccaaatcatcctccagaaatcatacactgtttcatgaacgggacctacaaagaaa

SEQ ID NO: 7416 - DNA, 121 bp, synthetic construct
  misc_feature 1..121: note = Description of artificial sequence: synthetic polynucleotide sequence
  source 1..121: mol_type = other DNA
aagtttgttttttctataacatttaacaaggcaaagttttaccttgggttgcaatgtaatgacttggtctctggtagccctaaaataagagaacaaattagttatcattttacatcaatat

SEQ ID NO: 7417 - DNA, 121 bp, synthetic construct
  misc_feature 1..121: note = Description of artificial sequence: synthetic polynucleotide sequence
  source 1..121: mol_type = other DNA
gaatgtttgtatttataatagggtgctgttatttacatatagtggtacttacatccctgtacagccaaatctacagcccaaaccaaagtcaggtgtgaaagaaagcacaacaatgtcagta

SEQ ID NO: 7418 - DNA, 121 bp, synthetic construct
  misc_feature 1..121: note = Description of artificial sequence: synthetic polynucleotide sequence
  source 1..121: mol_type = other DNA
acttaactataaaaatacttacatcaatatagttggcattaatataatctgaggaaggatcatcctctacgggttgcaaaatcactctggagtgatcatctaaaattttaaaataataaat

SEQ ID NO: 7419 - DNA, 121 bp, synthetic construct
  misc_feature 1..121: note = Description of artificial sequence: synthetic polynucleotide sequence
  source 1..121: mol_type = other DNA
attgaatgggaacttacatgctataatgtttccatatcggttttttgctctattttgatcttttttagctacatcccaagatgctgactgtccttcaaaaaagctctgggaaaacaaaacg

SEQ ID NO: 7420 - DNA, 186 bp, synthetic construct
  misc_feature 1..186: note = Description of artificial sequence: synthetic polynucleotide sequence
  source 1..186: mol_type = other DNA
cctcatattcctctttgaacccatagctgtctgatgtcttcatgagattaatgtgctgcagtaaatcagctaccctgatggctggatgcagctgtcctgtctggtaaggggattccgtcccctcacagaggtagcgaggtacgtctagaaggcgactggactctgctgtagcactgtggttctcat

SEQ ID NO: 7421 - DNA, 121 bp, synthetic construct
  misc_feature 1..121: note = Description of artificial sequence: synthetic polynucleotide sequence
  source 1..121: mol_type = other DNA
gctagtacatttgcctgttctatcaccaactctacaaataggatatagcaaaaaatgaattgttgtccccatgataaacattttttcttcctggagaagggaaaaaaaaaagaaccctaca

SEQ ID NO: 7422 - DNA, 121 bp, synthetic construct
  misc_feature 1..121: note = Description of artificial sequence: synthetic polynucleotide sequence
  source 1..121: mol_type = other DNA
cttgaaatatatccttgattgaaaggttttctagagttctttgcaatacacttacctgttataggaacttaaacccaatgaagcagtaaaacacaaaaaccaaaaatacgaatcagtatga

SEQ ID NO: 7423 - DNA, 121 bp, synthetic construct
  misc_feature 1..121: note = Description of artificial sequence: synthetic polynucleotide sequence
  source 1..121: mol_type = other DNA
gtgatccatgcaatgaaaagatgataaagatttagggcctcacctaacacagcagtcggtacaagtggatcattgggcactgcaggaaaacaaagctcatgaaggaatatattgctctaaa

SEQ ID NO: 7424 - DNA, 162 bp, synthetic construct
  misc_feature 1..162: note = Description of artificial sequence: synthetic polynucleotide sequence
  source 1..162: mol_type = other DNA
catcttggactaaagttatgttggtccatgaaggtgatggaaagaggatcttctgcatgcagagtgctctgatcagcataacttcgatccattgcattcaccatgtgagtcatctcctgccgggtattccccatggcatctttgcgttttttagcaagtttg

SEQ ID NO: 7425 - DNA, 121 bp, synthetic construct
  misc_feature 1..121: note = Description of artificial sequence: synthetic polynucleotide sequence
  source 1..121: mol_type = other DNA
catccttaacacacgtaaagttgtacatcacccattttctacttacaggtagtaggagtaagaatagtagctcctcctggcaagcaaatcacagacagtggaaaaagagaagcaatggtga

SEQ ID NO: 7426 - DNA, 121 bp, synthetic construct
  misc_feature 1..121: note = Description of artificial sequence: synthetic polynucleotide sequence
  source 1..121: mol_type = other DNA
cgtatgtagctaatttaacacaaaacactataatgcatacctaatgtttctaatgcagatgtgtcttctccaacatatatatctccaggggataatcgtaaagaggcaatatattaaaata

SEQ ID NO: 7427 - DNA, 140 bp, synthetic construct
  misc_feature 1..140: note = Description of artificial sequence: synthetic polynucleotide sequence
  source 1..140: mol_type = other DNA
cctcttttttacaattaatatgacaactaggagaaggaggatgaacaccaaaattccagcactaattcctgctattttcaccactctgtctgtctgcttggcgggatctgggatcacttctggttcttctgttgctgctg

SEQ ID NO: 7428 - DNA, 121 bp, synthetic construct
  misc_feature 1..121: note = Description of artificial sequence: synthetic polynucleotide sequence
  source 1..121: mol_type = other DNA
ggtgagagtagttaaaacaagcaaaaaaagcaaacctcttaccttttgtagcaatgcgtacgcactgggttttagtttcctgatagagtaaaaatgaaaaaaaaaagagtcaatgtacaga

SEQ ID NO: 7429 - DNA, 275 bp, synthetic construct
  misc_feature 1..275: note = Description of artificial sequence: synthetic polynucleotide sequence
  source 1..275: mol_type = other DNA
ccttctccacactgctcatcgcctggaaatagatgttgtatcctttgcgcggagccaaaggagggttccaaaagccttggtaggtccgattgtcacccacagtgaacggggcaggctcaggtaggtttcccggggggagttctgcagcaaagtaatacggtgcacccccactcatggcattttggtatgtgacaggaacctggtagcattccatggctccggcttctctcttggttcggtgtgggtgcagttcttccacaacaatctgataagca

SEQ ID NO: 7430 - DNA, 121 bp, synthetic construct
  misc_feature 1..121: note = Description of artificial sequence: synthetic polynucleotide sequence
  source 1..121: mol_type = other DNA
cctcttacctgataggagcacctttggcttgtgctggtctcaacaatacagttattgtggtggcagtttcattgagagaggcatcaactccttcatagtcaggtaaagttggagctgatga

SEQ ID NO: 7431 - DNA, 203 bp, synthetic construct
  misc_feature 1..203: note = Description of artificial sequence: synthetic polynucleotide sequence
  source 1..203: mol_type = other DNA
cctgagatattggtggtgacattgatggctgtggctggaccaaagcctttgaccgtgctggctcttatgaaaaactggtacgtggttccagggtggagatgcataaagacatggtgtgtactgttccataaatttgatacagtctggggaggtccagccactggaactgcaggatcaaatgatcttatactgctatagctgat

SEQ ID NO: 7432 - DNA, 121 bp, synthetic construct
  misc_feature 1..121: note = Description of artificial sequence: synthetic polynucleotide sequence
  source 1..121: mol_type = other DNA
caatacctcatattgagtgatgattccatttggatccaaaggttctttccagttcaagaagatcttattttcaaaggatgttccttgaagagattttactggtacgggaccaggcactaca

SEQ ID NO: 7433 - DNA, 304 bp, synthetic construct
  misc_feature 1..304: note = Description of artificial sequence: synthetic polynucleotide sequence
  source 1..304: mol_type = other DNA
ccatcttcatcagtttgaataattgtctcttcactctccttccttccctctggattggttaggatcatcttgaggctgacatttgtataaggtggcagatggttcacaacatgctgaggggctttggggtccatgtccaaacagtctgccttgctctcgttgtgaccacggaagtaatggtagcagatagtgacattaaaagtgtggcaacgcgtaatgttgtaacccaaggattcccagtccacagcaatccgtcttgcctgtatttcagcaatctttaatgtctttggggttctcataggtt

SEQ ID NO: 7434 - DNA, 295 bp, synthetic construct
  misc_feature 1..295: note = Description of artificial sequence: synthetic polynucleotide sequence
  source 1..295: mol_type = other DNA
cctgcacattttgttctggtgattagtggaggtcctgggagccccgttccaccttcaccaggtcttgtaagtagaactcggatctcatattcggtatctggatctaaatgccataatttgtaagttggagcattgactgcatgggtttctgtccaggatcctgatgtcattcggtactctacttctttcaggatgataggaccatcgccaatgatcgagttggcatttagttggatcagcaaatatgtaggcccaacaccaagaagctgaggaggagcaatgggtcttggcggtt

SEQ ID NO: 7435 - DNA, 176 bp, synthetic construct
  misc_feature 1..176: note = Description of artificial sequence: synthetic polynucleotide sequence
  source 1..176: mol_type = other DNA
cctctcacaataagttgagcaaaattggacacaccggaacctcgttctgactgagttacacagcgatacaaatcctggtcagtttttgtcacttcttgcaatctgaaggaagcggcaaaccttctatgattgatgttcttagtctgggctactggtatatcttctccatttcgtct

SEQ ID NO: 7436 - DNA, 121 bp, synthetic construct
  misc_feature 1..121: note = Description of artificial sequence: synthetic polynucleotide sequence
  source 1..121: mol_type = other DNA
tacctggagccataacttgttatgcacagcatctctccctgtggcaatgcactgaaatgtagcgttttgccctgcattcacctctacatcccctagacggaggaaatgaggagatttatct

SEQ ID NO: 7437 - DNA, 121 bp, synthetic construct
  misc_feature 1..121: note = Description of artificial sequence: synthetic polynucleotide sequence
  source 1..121: mol_type = other DNA
aattcttaatcacaacctaccacaaggataactcagtacttggatgtcatcaatggcaatataaccacttctccctcctgagacttcagcttcaaatattacctgtcaaaaagaaacagaa

SEQ ID NO: 7438 - DNA, 273 bp, synthetic construct
  misc_feature 1..273: note = Description of artificial sequence: synthetic polynucleotide sequence
  source 1..273: mol_type = other DNA
cctgatattcattgggccaaaaggtgctcactgctagctcagcccgaagccaatctctacccgtgaatccagtcacattccaaattggattggcaagaggtcctttattcaccctaactaatatgttcaaagtgccaggattcagtcctttctggctatataataggtaactgaaatcaatgcagtgagtgtcgttctccttcattgtaggcagctgaagtctggctttttctccagggtcgtgatctgaagagtccactatcatataggaac

SEQ ID NO: 7439 - DNA, 121 bp, synthetic construct
  misc_feature 1..121: note = Description of artificial sequence: synthetic polynucleotide sequence
  source 1..121: mol_type = other DNA
ttggggcatctcgggtggtagataatgaggctcttgagcactaacatgcacccattcaaagtcatcatacagatcctggtggtaatcacaggcccctggaccatcatcaaaagtacagcca

SEQ ID NO: 7440 - DNA, 121 bp, synthetic construct
  misc_feature 1..121: note = Description of artificial sequence: synthetic polynucleotide sequence
  source 1..121: mol_type = other DNA
cggccactcacctgcggagaactggccttgggccgatcccaggagaggccaaggagagaggagcaagagcgccacaaaagcaggcagcgccgccgccgcagtcgtatccatgccgagtttg

SEQ ID NO: 7441 - DNA, 121 bp, synthetic construct
  misc_feature 1..121: note = Description of artificial sequence: synthetic polynucleotide sequence
  source 1..121: mol_type = other DNA
aacttctttttatgattaagacaaactcgtattaatgttccttaatagtcagggatgctaggcaacaaaaatttgatacgagtggaagcagaaataaatggaaactataaaaaagaagtgg

SEQ ID NO: 7442 - DNA, 121 bp, synthetic construct
  misc_feature 1..121: note = Description of artificial sequence: synthetic polynucleotide sequence
  source 1..121: mol_type = other DNA
gcagttcaacccaaaggatggttatattactgttcccacctcagaaccaggctcttcgacaaaatcagcaccacaaagcaacagatctctaacccaaggtatctcaatcctgggtgcacag

SEQ ID NO: 7443 - DNA, 121 bp, synthetic construct
  misc_feature 1..121: note = Description of artificial sequence: synthetic polynucleotide sequence
  source 1..121: mol_type = other DNA
tcagataaactttgcaagacaatttgtttcctaagtgtacacaaacattcttagatatgtcaactcagaaatggctttcaatcatatgaacaagattgatactgtctgtcctaaataatca

SEQ ID NO: 7444 - DNA, 121 bp, synthetic construct
  misc_feature 1..121: note = Description of artificial sequence: synthetic polynucleotide sequence
  source 1..121: mol_type = other DNA
attttgaaaaacttgtatttgccatttgagtgtaacagcttcctgatccttacacaaaattgatgaagatagcgaggaatgtggttttttttcatgttgtttaatgacatgcgttaacatt

SEQ ID NO: 7445 - DNA, 121 bp, synthetic construct
  misc_feature 1..121: note = Description of artificial sequence: synthetic polynucleotide sequence
  source 1..121: mol_type = other DNA
catatttcagatttttagcatagttttttcccagtattttcaggaagggcaattcattgtgtcaaattaaatatgatatattttaaaatattttaagtgtctatgtaaatagaggtataca

SEQ ID NO: 7446 - DNA, 121 bp, synthetic construct
  misc_feature 1..121: note = Description of artificial sequence: synthetic polynucleotide sequence
  source 1..121: mol_type = other DNA
tgctgctctcctcttgaactctattatctgggcagactgaatttattttagttttttgaaagtgcaatacaattgatcctcattattgacagattctatatttacaaatgctcttactggc

(The sequence listing continues in the following parts.)
